(19) United States
(12) Patent Application Publication
(10) Pub. No.: US 2017/0314015 A1
(43) Pub. Date: Nov. 2, 2017

(54) CRISPR/CAS-RELATED METHODS AND COMPOSITIONS FOR TREATING SICKLE CELL DISEASE

(71) Applicant: EDITAS MEDICINE, INC., Cambridge, MA (US)

(72) Inventors: Ari E. FRIEDLAND, Boston, MA (US); Morgan L. MAEDER, Jamaica Plain, MA (US); G. Grant WELSTEAD, Cambridge, MA (US); David A. BUMCROT, Belmont, MA (US)

(21) Appl. No.: 15/129,367

(22) PCT Filed: Mar. 26, 2015
(86) PCT No.: PCT/US2015/022856

§ 371 Date: Sep. 26, 2016

Related U.S. Application Data
(60) Provisional application No. 61/970,588, filed on Mar. 26, 2014.
(60) Provisional application No. 62/084,487, filed on Nov. 25, 2014.

(51) Int. Cl. C12N 15/11; C12N 15/10; C12N 9/22; A61K 48/00; C12N 2310/20

(52) U.S. Cl. CPC C12N 15/11; C12N 9/22; A61K 48/005; C12N 15/1024; C12N 2310/20; C12N 2320/34

(57) ABSTRACT

CRISPR/CAS-related compositions and methods for treatment of Sickle Cell Disease (SCD) are disclosed.

### REFERENCE TO RELATED APPLICATIONS

[0001] The present application is a national phase of International Application No. PCT/US2015/022856, filed Mar. 26, 2015, which claims the benefit of U.S. Provisional Application No. 61/970,588, filed Mar. 26, 2014, and U.S. Provisional Application No. 62/084,487, filed Nov. 25, 2014, the contents of each of which are hereby incorporated by reference in their entirety.

### FIELD OF THE INVENTION

[0002] The invention relates to CRISPR/CAS-related methods and components for editing of a target nucleic acid sequence, or modulating expression of a target nucleic acid sequence, and applications thereof in connection with Sickle Cell Disease (SCD).

### BACKGROUND

[0003] Sickle Cell Disease (SCD), also known as Sickle Cell Anemia (SCA), is a common inherited hematologic disease. It affects 80,000-90,000 people in the United States. It is common in people of African descent and in Hispanic-Americans with the prevalence of SCD being 1 in 500 and 1 in 1,000, respectively.

[0004] SCD is caused by a mutation in the beta-globin (HBB) gene. HBB is located on chromosome 11 within the HBB gene cluster, which includes genes encoding the delta globin chain, A gamma chain, G gamma chain. The alpha-globin gene is located on chromosome 16. A point mutation (e.g., GAG→GTG) results in the substitution of valine for glutamic acid at amino acid position 6 in exon 1 of the HBB gene. Beta hemoglobin chains with this mutation are expressed as HbS. The disease is inherited in an autosomal recessive manner, so that only patients with two HbS alleles have SCD. Subjects who have sickle cell trait (are heterozygous for HbS) only display a phenotype if they are severely dehydrated or oxygen deprived.

[0005] Normal adult hemoglobin (Hb) is composed of a tetramer made from two alpha-globin chains and two beta-globin chains. In SCD, the valine at position 6 of the beta-chain is hydrophobic and causes a change in conformation of the beta-globin protein when it is not bound to oxygen. HbS is more likely to polymerize and leads to the characteristic sickle shaped red blood cells (RBCs) found in SCD.

[0006] Sickle shape RBCs cause multiple manifestations of disease, which include, e.g., anemia, sickle cell crises, vaso-occlusive crises, aplastic crises and acute chest syndrome. The disease has various manifestations, e.g., vaso-occlusive crisis, splenic sequestration crisis and anemia. Subjects may also suffer from acute chest crisis and infarcts of extremities, end organs and central nervous system. Treatment includes. e.g., hydration, transfusion and analgesics. Treatment of SCD also includes, e.g., the use of hydroxyurea, supplementation with folic acid, and penicillin prophylaxis during childhood. Bone marrow transplants have been demonstrated to cure SCD.

[0007] Thus, there remains a need for additional methods and compositions that can be used to treat SCD.

### SUMMARY OF THE INVENTION

[0008] Methods and compositions discussed herein, provide for the treatment and prevention of Sickle Cell Disease (SCD), also known as Sickle Cell Anemia (SCA). SCD is an inherited hematologic disease.

[0009] In healthy individuals, two beta-globin molecules pair with two alpha-globin molecules to form normal hemoglobin (Hb). In SCD, mutations in the beta-globin (HBB) gene, e.g., a point mutation (GAG→GTG) that results in the substitution of valine for glutamic acid at amino acid position 6 of the beta-globin molecule, cause production of sickle hemoglobin (HbS). HbS is more likely to polymerize and leads to the characteristic sickle shaped red blood cells (RBCs). Sickle shaped RBCs give rise to multiple manifestations of disease, such as, anemia, sickle cell crises, vaso-occlusive crises, aplastic crises and acute chest syndrome. Alpha-globin can also pair with fetal hemoglobin (HbF), which significantly moderates the severe anemia and other symptoms of SCD. However, the expression of HbF is negatively regulated by the BCL11A gene product.

[0010] Methods and compositions disclosed herein provide a number of approaches for treating SCD. As is discussed in more detail below, methods described herein provide for treating SCD by correcting a target position in the HBB gene to provide corrected, or functional, e.g., wild type, beta-globin. Methods and compositions discussed herein can be used to treat or prevent SCD by altering the BCL11A gene (also known as B-cell CLL/lymphoma 11A, BCL11A-L, BCL11A-S, BCL11A-XL, CTIP1, HBFQTL5 and ZNF). BCL11A encodes a zinc-finger protein that is involved in the regulation of globin gene expression. By altering the BCL11A gene (e.g., one or both alleles of the BCL11A gene), the levels of gamma globin can be increased. Gamma globin can replace beta globin in the hemoglobin complex and effectively carry oxygen to tissues, thereby ameliorating SCD disease phenotypes.

[0011] In one aspect, methods and compositions discussed herein, provide for the correction of the underlying genetic cause of SCD, e.g., the correction of a mutation at a target position in the HBB gene, e.g., correction of a mutation at amino acid position 6, e.g., an E6V substitution in the HBB gene.

[0012] Mutations in the HBB gene (also known as beta-globin and CD113t-C) have been shown to cause SCD. Mutations leading to SCD can be described based on their target positions in the HBB gene. In an embodiment, the target position is E6, e.g., E6V, in the HBB gene.

[0013] “SCD target point position”, as used herein, refers to a target position in the HBB gene, typically a single nucleotide, which, if mutated, can result in a protein having a mutant amino acid and give rise to SCD. In an embodiment, the SCD target position is the target position at which a change can give rise to an E6 mutant protein, e.g., a protein having an E6V substitution.

[0014] While much of the disclosure herein is presented in the context of the mutation in the HBB gene that gives rise to an E6 mutant protein (e.g., E6V mutant protein), the methods and compositions herein are broadly applicable to any mutation, e.g., a point mutation or a deletion, in the HBB gene that gives rise to SCD.

[0015] While not wishing to be bound by theory, it is believed that, in an embodiment, a mutation at an SCD target point position in the HBB gene is corrected, e.g., by homology directed repair (HDR), as described herein.

[0016] In one aspect, methods and compositions discussed herein may be used to alter the BCL11A gene to treat or prevent SCD, by targeting the BCL11A gene, e.g., coding or non-coding regions of the BCL11A gene. Altering the BCL11A gene herein refers to reducing or eliminating (1) BCL11A gene expression, (2) BCL11A protein function, or (3) the level of BCL11A protein.

[0017] In an embodiment, the coding region (e.g., an early coding region) of the BCL11A gene is targeted for alteration. In an embodiment, a non-coding sequence (e.g., an enhancer region, a promoter region, an intron, 5′UTR, 3′UTR, or polyadenylation signal) is targeted for alteration.

[0018] In an embodiment, the method provides an alteration that comprises disrupting the BCL11A gene by the insertion or deletion of one or more nucleotides mediated by Cas9 (e.g., enzymatically active Cas9 (eaCas9), e.g., Cas9 nuclease or Cas9 nickase) as described below. This type of alteration is also referred to as “knocking out” the BCL11A gene.

[0019] In another embodiment, the method provides an alteration that does not comprise nucleotide insertion or deletion in the BCL11A gene and is mediated by enzymatically inactive Cas9 (eiCas9) or an eiCas9-fusion protein, as described below. This type of alteration is also referred to as “knocking down” the BCL11A gene.

[0020] In an embodiment, the methods and compositions discussed herein may be used to alter the BCL11A gene to treat or prevent SCD by knocking out one or both alleles in the BCL11A gene. In an embodiment, the coding region (e.g., an early coding region) of the BCL11A gene, is targeted to alter the gene. In an embodiment, a non-coding region of the BCL11A gene (e.g., an enhancer region, a promoter region, an intron, 5′ UTR, 3′UTR, polyadenylation signal) is targeted to alter the gene. In an embodiment, an enhancer (e.g., a tissue-specific enhancer, e.g., a myeloid enhancer, e.g., an erythroid enhancer) is targeted to alter the gene. BCL11A erythroid enhancer comprises an approximate 12.4 kb fragment of BCL11A intron2, located between approximate +52.0 to +64.4 kilobases (kb) from the Transcription Start Site (TSS+52 kb to TSS+64.4 kb, see FIG. 10). It's also referred to herein as chromosome 2 location 60,716,189-60,728,612 (according to UCSC Genome Browser hg 19 human genome assembly). Three deoxyribonuclese I hypersensitive sites (DHSs), TSS+62 kb, TSS+58 kb and TSS+55 kb are located in this region. Deoxyribonuclease I sensitivity is a marker for gene regulatory elements. While not wishing to be bound by theory, it's believed that deleting the enhancer region (e.g., TSS+52 kb to TSS+64.4 kb) may reduce or eliminate BCL11A expression in erythroid precursors which leads to gamma globin derepression while sparing BCL11A expression in nonerythoroid lineages. In an embodiment, the method provides an alteration that comprises a deletion of the enhancer region (e.g., a tissue-specific enhancer, e.g., a myleloid enhancer, e.g., an erythroid enhancer) or a portion of the region resulting in disruption of one or more DNase 1-hypersensitive sites (DHS). In an embodiment, the method provides an alteration that comprises an insertion or deletion of one or more nucleotides. As described herein, in an embodiment, a targeted knockout approach is mediated by non-homologous end joining (NHEJ) using a CRISPR/Cas system comprising an enzymatically active Cas9 (eaCas9). In an embodiment, a targeted knockout approach alters the BCL11A gene. In an embodiment, a targeted knockout approach reduces or eliminates expression of functional BCL11A gene product. In an embodiment, targeting affects one or both alleles of the BCL11A gene. In an embodiment, an enhancer disruption approach reduces or eliminates expression of functional BCL11A gene product in the erythroid lineage.

[0021] “SCD target knockout position”, as used herein, refers to a position in the BCL11A gene, which if altered, e.g., disrupted by insertion or deletion of one or more nucleotides, e.g., by NHEJ-mediated alteration, results in reduction or elimination of expression of functional BCL11A gene product. In an embodiment, the position is in the BCL11A coding region, e.g., an early coding region. In an embodiment, the position is in the BCL11A non-coding region, e.g., an enhancer region.

[0022] In an embodiment, methods and compositions discussed herein, provide for altering (e.g., knocking out) the BCL11A gene. In an embodiment, knocking out the BCL11A gene herein refers to (1) insertion or deletion (e.g., NHEJ-mediated insertion or deletion) of one or more nucleotides in close proximity to or within the early coding region of the BCL11A gene, or (2) deletion (e.g., NHEJ-mediated deletion) of a genomic sequence including the erythroid enhancer of the BCL11A gene,

[0023] In an embodiment, the SCD target knockout position is altered by genome editing using the CRISPR/Cas9 system. The SCD target knockout position may be targeted by cleaving with either a single nuclease or dual nickases, e.g., to induce insertion or deletion (e.g., NHEJ-mediated insertion or deletion) of one or more nucleotides in close proximity to or within the early coding region of the SCD target knockout position or to delete (e.g., mediated by NHEJ) a genomic sequence including the erythroid enhancer of the BCL11A gene.

[0024] In an embodiment, the methods and compositions described herein introduce one or more breaks in close proximity to or within the early coding region in at least one allele of the BCL11A gene. In an embodiment, a single strand break is introduced in close proximity to or within the early coding region in at least one allele of the BCL11A gene. In an embodiment, the single strand break will be accompanied by an additional single strand break, positioned by a second gRNA molecule.

[0025] In an embodiment, a double strand break is introduced in close proximity to or within the early coding region in at least one allele of the BCL11A gene. In an embodiment, a double strand break will be accompanied by an additional single strand break positioned by a second gRNA molecule. In an embodiment, a double strand break will be accompanied by two additional single strand breaks positioned by a second gRNA molecule and a third gRNA molecule.

[0026] In an embodiment, a pair of single strand breaks is introduced in close proximity to or within the early coding region in at least one allele of the BCL11A gene. In an embodiment, the pair of single strand breaks will be accompanied by an additional double strand break, positioned by a third gRNA molecule. In an embodiment, the pair of single strand breaks will be accompanied by an additional pair of single strand breaks positioned by a third gRNA molecule and a fourth gRNA molecule.

[0027] In an embodiment, two double strand breaks are introduced to flank the erythroid enhancer at the in the BCL11A gene (one 5′ and the other one 3′ to the erythroid enhancer) to remove (e.g., delete) the genomic sequence including the erythroid enhancer. It is contemplated herein that in an embodiment the deletion of the genomic sequence including the erythroid enhancer is mediated by NHEJ. In an embodiment, the breaks (i.e., the two double strand breaks) are positioned to avoid unwanted deletion of certain elements, such as endogenous splice sites. The breaks, i.e., two double strand breaks, can be positioned upstream and downstream of the erythroid enhancer, as discussed herein.

[0028] In an embodiment, two sets of breaks (e.g., one double strand break and a pair of single strand breaks) are introduced to flank the erythroid enhancer in the BCL11A gene (one set 5′ and the other set 3′ to the erythroid enhancer) to remove (e.g., delete) the genomic sequence including the erythroid enhancer. It is contemplated herein that in an embodiment the deletion of the genomic sequence including the erythroid enhancer is mediated by NHEJ. In an embodiment, the breaks (i.e., the double strand break and the pair of single strand breaks) are positioned to avoid unwanted deletion of certain chromosome elements, such as endogenous splice sites. The breaks, e.g., the double strand break and the pair of single strand breaks, can be positioned upstream and downstream of the erythroid enhancer, as discussed herein.

[0029] In an embodiment, two sets of breaks (e.g., two pairs of single strand breaks) are introduced to flank the erythroid enhancer at the SCD target position in the BCL11A gene (one set 5′ and the other set 3′ to the erythroid enhancer) to remove (e.g., delete) the genomic sequence including the erythroid enhancer. It is contemplated herein that in an embodiment the deletion of the genomic sequence including the erythroid enhancer is mediated by NHEJ. In an embodiment, the breaks (i.e., the two pairs of single strand breaks) are positioned to avoid unwanted deletion of certain chromosome elements, such as endogenous splice sites. The breaks, e.g., the two pairs of single strand breaks, can be positioned upstream and downstream of the erythroid enhancer, as discussed herein.

[0030] In an embodiment, the methods and compositions discussed herein may be used to alter the BCL11A gene to treat or prevent SCD by knocking down one or both alleles of the BCL11A gene. In one embodiment, the coding region of the BCL11A gene, is targeted to alter the gene. In another embodiment, a non-coding region (e.g., an enhancer region, a promoter region, an intron, 5′ UTR, 3′UTR, polyadenylation signal) of the BCL11A gene is targeted to alter the gene. In an embodiment, the promoter region of the BCL11A gene is targeted to knock down the expression of the BCL11A gene. A targeted knockdown approach alters, e.g., reduces or eliminates the expression of the BCL11A gene. As described herein, in an embodiment, a targeted knockdown is mediated by targeting an enzymatically inactive Cas9 (eiCas9) or an eiCas9 fused to a transcription repressor domain or chromatin modifying protein to alter transcription, e.g., to block, reduce, or decrease transcription, of the BCL11A gene.

[0031] “SCD target knockdown position”, as used herein, refers to a position, e.g., in the BCL11A gene, which if targeted by an eiCas9 or an eiCas9 fusion described herein, results in reduction or elimination of expression of functional BCL11A gene product. In an embodiment, transcription is reduced or eliminated. In an embodiment, the position is in the BCL11A promoter sequence. In an embodiment, a position in the promoter sequence of the BCL11A gene is targeted by an enzymatically inactive Cas9 (eiCas9) or an eiCas9-fusion protein, as described herein.

[0032] In an embodiment, one or more gRNA molecule comprising a targeting domain configured to target an enzymatically inactive Cas9 (eiCas9) or an eiCas9 fusion protein (e.g., an eiCas9 fused to a transcription repressor domain), sufficiently close to a SCD target knockdown position to reduce, decrease or repress expression of the BCL11A gene.

[0033] “SCD target position”, as used herein, refers to any of an SCD target point position, SCD target knockout position, or SCD target knockdown position, as described herein.

[0034] In one aspect, disclosed herein is a gRNA molecule, e.g., an isolated or non-naturally occurring gRNA molecule, comprising a targeting domain which is complementary with a target domain from the HBB gene or BCL11A gene.

[0035] When two or more gRNAs are used to position two or more cleavage events, e.g., double strand or single strand breaks, in a target nucleic acid, it is contemplated that the two or more cleavage events may be made by the same or different Cas9 proteins. For example, when two gRNAs are used to position two double strand breaks, a single Cas9 nuclease may be used to create both double strand breaks. When two or more gRNAs are used to position two or more single stranded breaks (single strand breaks), a single Cas9 nickase may be used to create the two or more single strand breaks. When two or more gRNAs are used to position at least one double strand break and at least one single strand break, two Cas9 proteins may be used, e.g., one Cas9 nuclease and one Cas9 nickase. It is contemplated that when two or more Cas9 proteins are used that the two or more Cas9 proteins may be delivered sequentially to control specificity of a double strand versus a single strand break at the desired position in the target nucleic acid.

[0036] In an embodiment, the targeting domain of the first gRNA molecule and the targeting domain of the second gRNA molecule hybridize to the target domain through complementary base pairing to opposite strands of the target nucleic acid molecule. In an embodiment, the gRNA molecule and the second gRNA molecule are configured such that the PAMs are oriented outward.

[0037] In an embodiment, the targeting domain of a gRNA molecule is configured to avoid unwanted target chromosome elements, such as repeat elements, e.g., an Alu repeat, or the endogenous splice sites, in the target domain. The gRNA molecule may be a first, second, third and/or fourth gRNA molecule.

[0038] In an embodiment, the targeting domain of a gRNA molecule is configured to position a cleavage event sufficiently far from a preselected nucleotide, e.g., the nucleotide of a coding region, such that the nucleotide is not altered. In an embodiment, the targeting domain of a gRNA molecule is configured to position an intronic cleavage event sufficiently far from an intron/exon border, or naturally occurring splice signal, to avoid alteration of the exonic sequence or unwanted splicing events. The gRNA molecule may be a first, second, third and/or fourth gRNA molecule, as described herein.

[0039] In an embodiment, a point mutation in the HBB gene, e.g., at E6, e.g., E6V, is targeted, e.g., for correction. In an embodiment, the targeting domain of a gRNA molecule comprises a sequence that is the same as, or differs by no more than 1, 2, 3, 4, or 5 nucleotides from, a targeting domain sequence from any one of Tables 1A-1D. In an embodiment, the targeting domain is selected from those in Tables 1A-1D. For example, in an embodiment, the targeting domain is:

(SEQ ID NO: 387)

AAGGUGAACGUGGAUGAAGU;

(SEQ ID NO: 388)

GUAACGGCAGACUUCUCCUC;

(SEQ ID NO: 389)

GUGAACGUGGAUGAAGU;
or

(SEQ ID NO: 390)

ACGGCAGACUUCUCCUC.

[0040] In an embodiment, when the SCD target point position is E6, e.g., E6V, and two gRNAs are used to position two breaks, e.g., two single stranded breaks, in the target nucleic acid sequence, the targeting domain of each guide RNA is selected from one of Tables 1A-1D.

[0041] In an embodiment, a point mutation in the HBB gene, e.g., at E6, e.g., E6V, is targeted, e.g., for correction. In an embodiment, the targeting domain of a gRNA molecule comprises a sequence that is the same as, or differs by no more than 1, 2, 3, 4, or 5 nucleotides from, a targeting domain sequence from any one of Tables 13A-13D. In an embodiment, the targeting domain is selected from those in Tables 13A-13D. For example, in an embodiment, the targeting domain is:

(SEQ ID NO: 6803)

GGUGCACCUGACUCCUG;
or

(SEQ ID NO: 6804)

GUAACGGCAGACUUCUCCAC.

[0042] In an embodiment, when the SCD target point position is E6, e.g., E6V, and two gRNAs are used to position two breaks, e.g., two single stranded breaks, in the target nucleic acid sequence, the targeting domain of each guide RNA is selected from one of Tables 13A-13D.

[0043] In an embodiment, a point mutation in the HBB gene, e.g., at E6, e.g., E6V, is targeted, e.g., for correction. In an embodiment, the targeting domain of a gRNA molecule comprises a sequence that is the same as, or differs by no more than 1, 2, 3, 4, or 5 nucleotides from, a targeting domain sequence from any one of Tables 14A-14C. In an embodiment, the targeting domain is selected from those in Tables 14A-14C.

[0044] In an embodiment, when the SCD target point position is E6, e.g., E6V, and two gRNAs are used to position two breaks, e.g., two single stranded breaks, in the target nucleic acid sequence, each guide RNA is selected from one of Tables 14A-14C.

[0045] In an embodiment, a point mutation in the HBB gene, e.g., at E6, e.g., E6V, is targeted, e.g., for correction. In an embodiment, the targeting domain of a gRNA molecule comprises a sequence that is the same as, or differs by no more than 1, 2, 3, 4, or 5 nucleotides from, a targeting domain sequence from any one of Tables 24A-24D. In an embodiment, the targeting domain is selected from those in Tables 24A-24D.

[0046] In an embodiment, when the SCD target point position is E6, e.g., E6V, and two gRNAs are used to position two breaks, e.g., two single stranded breaks, in the target nucleic acid sequence, the targeting domain of each guide RNA is selected from one of Tables 24A-24D.

[0047] In an embodiment, a point mutation in the HBB gene, e.g., at E6, e.g., E6V, is targeted, e.g., for correction. In an embodiment, the targeting domain of a gRNA molecule comprises a sequence that is the same as, or differs by no more than 1, 2, 3, 4, or 5 nucleotides from, a targeting domain sequence from any one of Tables 25A-25B. In an embodiment, the targeting domain is selected from those in Tables 25A-25B.

[0048] In an embodiment, when the SCD target point position is E6, e.g., E6V, and two gRNAs are used to position two breaks, e.g., two single stranded breaks, in the target nucleic acid sequence, the targeting domain of each guide RNA is selected from one of Tables 25A-25B.

[0049] In an embodiment, a point mutation in the HBB gene, e.g., at E6, e.g., E6V, is targeted, e.g., for correction. In an embodiment, the targeting domain of a gRNA molecule comprises a sequence that is the same as, or differs by no more than 1, 2, 3, 4, or 5 nucleotides from, a targeting domain sequence from Table 26. In an embodiment, the targeting domain is selected from those in Table 26.

[0050] In an embodiment, when the SCD target point position is E6, e.g., E6V, and two gRNAs are used to position two breaks, e.g., two single stranded breaks, in the target nucleic acid sequence, the targeting domain of each guide RNA is selected from Table 26. In another embodiment, a position in the coding region, e.g., the early coding region, of the BCL11A gene is targeted, e.g., for knockout. In an embodiment, the targeting domain comprises a sequence that is the same as, or differs by no more than 1, 2, 3, 4, or 5 nucleotides from, a targeting domain sequence from any one of Tables 2A-2F. In an embodiment, the targeting domain is selected from those in Tables 2A-2F. In another embodiment, the targeting domain is:

(SEQ ID NO: 486)

UGGCAUCCAGGUCACGCCAG;

(SEQ ID NO: 487)

GAUGCUUUUUUCAUCUCGAU;

(SEQ ID NO: 488)

GCAUCCAAUCCCGUGGAGGU;

(SEQ ID NO: 489)

UUUUCAUCUCGAUUGGUGAA;

(SEQ ID NO: 490)

CCAGAUGAACUUCCCAUUGG;

(SEQ ID NO: 491)

AGGAGGUCAUGAUCCCCUUC;

(SEQ ID NO: 492)

CAUCCAGGUCACGCCAG;

(SEQ ID NO: 493)

GCUUUUUUCAUCUCGAU;

(SEQ ID NO: 494)

UCCAAUCCCGUGGAGGU;

(SEQ ID NO: 495)

UCAUCUCGAUUGGUGAA;

(SEQ ID NO: 496)

GAUGAACUUCCCAUUGG;
or

(SEQ ID NO: 497)

AGGUCAUGAUCCCCUUC.

[0051] In an embodiment, when the SCD target knockout position is the BCL11A coding region, e.g., early coding region, and more than one gRNA is used to position breaks, e.g., two single stranded breaks or two double stranded breaks, or a combination of single strand and double strand breaks, e.g., to create one or more indels, in the target nucleic acid sequence, the targeting domain of each guide RNA is selected from one of Tables 2A-2F.

[0052] In another embodiment, a position in the coding region, e.g., the early coding region, of the BCL11A gene is targeted, e.g., for knockout. In an embodiment, the targeting domain comprises a sequence that is the same as, or differs by no more than 1, 2, 3, 4, or 5 nucleotides from, a targeting domain sequence from any one of Table 4A-4E. In an embodiment, the targeting domain is selected from those in Table 4A-4E. In another embodiment, the targeting domain is:

(SEQ ID NO: 3073)

GAGCUCCAUGUGCAGAACGA;

(SEQ ID NO: 3074)

GAGCUCCCAACGGGCCG;

(SEQ ID NO: 3075)

GAGUGCAGAAUAUGCCCCGC;

(SEQ ID NO: 3076)

GAUAAACAAUCGUCAUCCUC;

(SEQ ID NO: 3077)

GAUGCCAACCUCCACGGGAU;

(SEQ ID NO: 3078)

GCAGAAUAUGCCCCGCA;

(SEQ ID NO: 3079)

GCAUCCAAUCCCGUGGAGGU;

(SEQ ID NO: 3080)

GCCAACCUCCACGGGAU;

(SEQ ID NO: 3081)

GCUCCCAACGGGCCGUGGUC;
or

(SEQ ID NO: 3082)

GGAGCUCUAAUCCCCACGCC.

[0053] In an embodiment, when the SCD target knockout position is the BCL11A coding region, e.g., early coding region, and more than one gRNA is used to position breaks, e.g., two single strand breaks or two double strand breaks, or a combination of single strand and double strand breaks. e.g., to create one or more indels, in the target nucleic acid sequence, the targeting domain of each guide RNA is selected from one of Table 4A-4E.

[0054] In another embodiment, a position in the coding region, e.g., the early coding region, of the BCL11A gene is targeted, e.g., for knockout. In an embodiment, the targeting domain comprises a sequence that is the same as, or differs by no more than 1, 2, 3, 4, or 5 nucleotides from, a targeting domain sequence from any one of Table 5A-5E. In an embodiment, the targeting domain is selected from those in Table 5A-5E.

[0055] In an embodiment, when the SCD target knockout position is the BCL11A coding region, e.g., early coding region, and more than one gRNA is used to position breaks, e.g., two single strand breaks or two double strand breaks, or a combination of single strand and double strand breaks, e.g., to create one or more indels, in the target nucleic acid sequence, the targeting domain of each guide RNA is selected from one of Table 5A-5E.

[0056] In another embodiment, a position in the coding region, e.g., the early coding region, of the BCL11A gene is targeted, e.g., for knockout. In an embodiment, the targeting domain comprises a sequence that is the same as, or differs by no more than 1, 2, 3, 4, or 5 nucleotides from, a targeting domain sequence from any one of Table 6A-6B. In an embodiment, the targeting domain is selected from those in Table 6A-6B.

[0057] In an embodiment, when the SCD target knockout position is the BCL11A coding region, e.g., early coding region, and more than one gRNA is used to position breaks, e.g., two single strand breaks or two double strand breaks, or a combination of single strand and double strand breaks, e.g., to create one or more indels, in the target nucleic acid sequence, the targeting domain of each guide RNA is selected from one of Table 6A-6B.

[0058] In another embodiment, a position in the coding region, e.g., the early coding region, of the BCL11A gene is targeted, e.g., for knockout. In an embodiment, the targeting domain comprises a sequence that is the same as, or differs by no more than 1, 2, 3, 4, or 5 nucleotides from, a targeting domain sequence from any one of Table 15A-15D. In an embodiment, the targeting domain is selected from those in Table 15A-15D.

[0059] In an embodiment, when the SCD target knockout position is the BCL11A coding region, e.g., early coding region, and more than one gRNA is used to position breaks, e.g., two single strand breaks or two double strand breaks, or a combination of single strand and double strand breaks, e.g., to create one or more indels, in the target nucleic acid sequence, the targeting domain of each guide RNA is selected from one of Table 15A-15D.

[0060] In another embodiment, a position in the coding region, e.g., the early coding region, of the BCL11A gene is targeted. e.g., for knockout. In an embodiment, the targeting domain comprises a sequence that is the same as, or differs by no more than 1, 2, 3, 4, or 5 nucleotides from, a targeting domain sequence from any one of Table 16A-16E. In an embodiment, the targeting domain is selected from those in Table 16A-16E.

[0061] In an embodiment, when the SCD target knockout position is the BCL11A coding region, e.g., early coding region, and more than one gRNA is used to position breaks, e.g., two single strand breaks or two double strand breaks, or a combination of single strand and double strand breaks, e.g., to create one or more indels, in the target nucleic acid sequence, the targeting domain of each guide RNA is selected from one of Table 16A-16E.

[0062] In another embodiment, a position in the coding region, e.g., the early coding region, of the BCL11A gene is targeted, e.g., for knockout. In an embodiment, the targeting domain comprises a sequence that is the same as, or differs by no more than 1, 2, 3, 4, or 5 nucleotides from, a targeting domain sequence from any one of Table 17A-17B. In an embodiment, the targeting domain is selected from those in Table 17A-17B.

[0063] In an embodiment, when the SCD target knockout position is the BCL11A coding region, e.g., early coding region, and more than one gRNA is used to position breaks, e.g., two single strand breaks or two double strand breaks, or a combination of single strand and double strand breaks, e.g., to create one or more indels, in the target nucleic acid sequence, the targeting domain of each guide RNA is selected from one of Table 17A-17B.

[0064] In another embodiment, a position in the non-coding region, e.g., the enhancer region, of the BCL11A gene is targeted, e.g., for knockout. In an embodiment, the targeting domain comprises a sequence that is the same as, or differs by no more than 1, 2, 3, 4, or 5 nucleotides from, a targeting domain sequence from any one of Tables 7A-7D. In an embodiment, the targeting domain is selected from those in Tables 7A-7D. In another embodiment, the targeting domain is:

(SEQ ID NO: 4835)

GAAAAUACUUACUGUACUGC;

(SEQ ID NO: 4836)

GAAAGCAGUGUAAGGCU;

(SEQ ID NO: 4837)

GGCUGUUUUGGAAUGUAGAG;
or

(SEQ ID NO: 4838)

GUGCUACUUAUACAAUUCAC.

[0065] In an embodiment, when the SCD target knockout position is the non-coding region, e.g., the enhancer region, of the BCL11A gene, and more than one gRNA is used to position breaks, e.g., two single strand breaks or two double strand breaks, or a combination of single strand and double strand breaks, e.g., to create a deletion, in the target nucleic acid sequence, the targeting domain of each guide RNA is selected from one of Table 7A-7D.

[0066] In another embodiment, a position in the non-coding region, e.g., the enhancer region, of the BCL11A gene is targeted, e.g., for knockout. In an embodiment, the targeting domain comprises a sequence that is the same as, or differs by no more than 1, 2, 3, 4, or 5 nucleotides from, a targeting domain sequence from any one of Tables 8A-8D. In an embodiment, the targeting domain is selected from those in Tables 8A-8D.

[0067] In an embodiment, when the SCD target knockout position is the non-coding region, e.g., the enhancer region, of the BCL11A gene, and more than one gRNA is used to position breaks, e.g., two single strand breaks or two double strand breaks, or a combination of single strand and double strand breaks, e.g., to create a deletion, in the target nucleic acid sequence, the targeting domain of each guide RNA is selected from one of Table 8A-8D.

[0068] In another embodiment, a position in the non-coding region, e.g., the enhancer region, of the BCL11A gene is targeted, e.g., for knockout. In an embodiment, the targeting domain comprises a sequence that is the same as, or differs by no more than 1, 2, 3, 4, or 5 nucleotides from, a targeting domain sequence from Table 9. In an embodiment, the targeting domain is selected from those in Table 9.

[0069] In an embodiment, when the SCD target knockout position is the non-coding region, e.g., the enhancer region, of the BCL11A gene, and more than one gRNA is used to position breaks, e.g., two single strand breaks or two double strand breaks, or a combination of single strand and double strand breaks, e.g., to create a deletion, in the target nucleic acid sequence, the targeting domain of each guide RNA is selected from one of Table 9.

[0070] In another embodiment, a position in the non-coding region, e.g., the enhancer region, of the BCL11A gene is targeted, e.g., for knockout. In an embodiment, the targeting domain comprises a sequence that is the same as, or differs by no more than 1, 2, 3, 4, or 5 nucleotides from, a targeting domain sequence from any one of Tables 21A-21E. In an embodiment, the targeting domain is selected from those in Tables 21A-21E. In an embodiment, when the SCD target knockout position is the non-coding region, e.g., the enhancer region, of the BCL11A gene, and more than one gRNA is used to position breaks, e.g., two single strand breaks or two double strand breaks, or a combination of single strand and double strand breaks, e.g., to create a deletion, in the target nucleic acid sequence, the targeting domain of each guide RNA is selected from one of Table 21A-21E.

[0071] In another embodiment, a position in the non-coding region, e.g., the enhancer region, of the BCL11A gene is targeted. e.g., for knockout. In an embodiment, the targeting domain comprises a sequence that is the same as, or differs by no more than 1, 2, 3, 4, or 5 nucleotides from, a targeting domain sequence from any one of Tables 22A-22E. In an embodiment, the targeting domain is selected from those in Tables 22A-22E. In an embodiment, when the SCD target knockout position is the non-coding region, e.g., the enhancer region, of the BCL11A gene, and more than one gRNA is used to position breaks, e.g., two single strand breaks or two double strand breaks, or a combination of single strand and double strand breaks, e.g., to create a deletion, in the target nucleic acid sequence, the targeting domain of each guide RNA is selected from one of Table 22A-22E.

[0072] In another embodiment, a position in the non-coding region, e.g., the enhancer region, of the BCL11A gene is targeted, e.g., for knockout. In an embodiment, the targeting domain comprises a sequence that is the same as, or differs by no more than 1, 2, 3, 4, or 5 nucleotides from, a targeting domain sequence from any one of Tables 23A-23C. In an embodiment, the targeting domain is selected from those in Tables 23A-23C.

[0073] In an embodiment, when the SCD target knockout position is the non-coding region, e.g., the enhancer region, of the BCL11A gene, and more than one gRNA is used to position breaks, e.g., two single strand breaks or two double strand breaks, or a combination of single strand and double strand breaks, e.g., to create a deletion, in the target nucleic acid sequence, the targeting domain of each guide RNA is selected from one of Table 23A-23C.

[0074] In an embodiment, the targeting domain of the gRNA molecule is configured to target an enzymatically inactive Cas9 (eiCas9) or an eiCas9 fusion protein (e.g., an eiCas9 fused to a transcription repressor domain), sufficiently close to an SCD knockdown target position to reduce, decrease or repress expression of the BCL11A gene. In an embodiment, the targeting domain is configured to target the promoter region of the BCL11A gene to block transcription initiation, binding of one or more transcription enhancers or activators, and/or RNA polymerase. One or more gRNA may be used to target an eiCas9 to the promoter region of the BCL11A gene.

[0075] In an embodiment, when the BCL11A promoter region is targeted, e.g., for knockdown, the targeting domain can comprise a sequence that is the same as, or differs by no more than 1, 2, 3, 4, or 5 nucleotides from, a targeting domain sequence from any one of Tables 3A-3C. In an embodiment, the targeting domain is selected from those in Tables 3A-3C.

[0076] In an embodiment, when the SCD target knockdown position is the BCL11A promoter region and more than one gRNA is used to position an eiCas9 or an eiCas9-fusion protein (e.g., an eiCas9-transcription repressor domain fusion protein), in the target nucleic acid sequence, the targeting domain of each guide RNA is selected from one of Tables 3A-3C.

[0077] In an embodiment, when the BCL11A promoter region is targeted, e.g., for knockdown, the targeting domain can comprise a sequence that is the same as, or differs by no more than 1, 2, 3, 4, or 5 nucleotides from, a targeting domain sequence from any one of Tables 10A-10D. In an embodiment, the targeting domain is selected from those in Tables 10A-10D. In another embodiment, the targeting domain is:

(SEQ ID NO: 4981)

GACGACGGCUCGGUUCACAU;

(SEQ ID NO: 4982)

GACGCCAGACGCGGCCCCCG;

(SEQ ID NO: 4983)

GCCUUGCUUGCGGCGAGACA;

(SEQ ID NO: 4984)

GGCUCCGCGGACGCCAGACG;

(SEQ ID NO: 4985)

GACGGCUCGGUUCACAU;

(SEQ ID NO: 4986)

GCCGCGUCUGGCGUCCG;
or

(SEQ ID NO: 4987)

GCGGGCGGACGACGGCU.

[0078] In an embodiment, when the SCD target knockdown position is the BCL11A promoter region and more than one gRNA is used to position an eiCas9 or an eiCas9-fusion protein (e.g., an eiCas9-transcription repressor domain fusion protein), in the target nucleic acid sequence, each guide RNA is selected from one of Tables 10A-10D.

[0079] In an embodiment, when the BCL11A promoter region is targeted, e.g., for knockdown, the targeting domain can comprise a sequence that is the same as, or differs by no more than 1, 2, 3, 4, or 5 nucleotides from, a targeting domain sequence from any one of Tables 11A-11D. In an embodiment, the targeting domain is selected from those in Tables 11A-11D.

[0080] In an embodiment, when the SCD target knockdown position is the BCL11A promoter region and more than one gRNA is used to position an eiCas9 or an eiCas9-fusion protein (e.g., an eiCas9-transcription repressor domain fusion protein), in the target nucleic acid sequence, each guide RNA is selected from one of Tables 11A-11D.

[0081] In an embodiment, when the BCL11A promoter region is targeted, e.g., for knockdown, the targeting domain can comprise a sequence that is the same as, or differs by no more than 1, 2, 3, 4, or 5 nucleotides from, a targeting domain sequence from Table 12. In an embodiment, the targeting domain is selected from those in Table 12.

[0082] In an embodiment, when the SCD target knockdown position is the BCL11A promoter region and more than one gRNA is used to position an eiCas9 or an eiCas9-fusion protein (e.g., an eiCas9-transcription repressor domain fusion protein), in the target nucleic acid sequence, each guide RNA is selected from Table 12.

[0083] In an embodiment, when the BCL11A promoter region is targeted, e.g., for knockdown, the targeting domain can comprise a sequence that is the same as, or differs by no more than 1, 2, 3, 4, or 5 nucleotides from, a targeting domain sequence from any one of Tables 18A-18C. In an embodiment, the targeting domain is selected from those in Tables 18A-18C.

[0084] In an embodiment, when the SCD target knockdown position is the BCL11A promoter region and more than one gRNA is used to position an eiCas9 or an eiCas9-fusion protein (e.g., an eiCas9-transcription repressor domain fusion protein), in the target nucleic acid sequence, each guide RNA is selected from one of Tables 18A-18C.

[0085] In an embodiment, when the BCL11A promoter region is targeted, e.g., for knockdown, the targeting domain can comprise a sequence that is the same as, or differs by no more than 1, 2, 3, 4, or 5 nucleotides from, a targeting domain sequence from any one of Tables 19A-19E. In an embodiment, the targeting domain is selected from those in Tables 19A-19E.

[0086] In an embodiment, when the SCD target knockdown position is the BCL11A promoter region and more than one gRNA is used to position an eiCas9 or an eiCas9-fusion protein (e.g., an eiCas9-transcription repressor domain fusion protein), in the target nucleic acid sequence, each guide RNA is selected from one of Tables 19A-19E.

[0087] In an embodiment, when the BCL11A promoter region is targeted, e.g., for knockdown, the targeting domain can comprise a sequence that is the same as, or differs by no more than 1, 2, 3, 4, or 5 nucleotides from, a targeting domain sequence from any one of Tables 20A-20C. In an embodiment, the targeting domain is selected from those in Tables 20A-20C.

[0088] In an embodiment, when the SCD target knockdown position is the BCL11A promoter region and more than one gRNA is used to position an eiCas9 or an eiCas9-fusion protein (e.g., an eiCas9-transcription repressor domain fusion protein), in the target nucleic acid sequence, each guide RNA is selected from one of Tables 20A-20C.

[0089] In an embodiment, the targeting domain comprises a sequence that is the same as, or differs by no more than 1, 2, 3, 4, or 5 nucleotides from, a targeting domain sequence selected from any one of Tables 1A-1D, 2A-2F, 3A-3C, 4A-4E, 5A-5E, 6A-6B, 7A-7D, 8A-8D, 9, 10A-10D, 11A-11D, 12, 13A-13D, 14A-14C, 15A-15D, 16A-16E, 17A-17B, 18A-18C, 19A-19E, 20A-20C, 21A-21E, 22A-22E, 23A-23C, 24A-24D, 25A-25B, 26, or 31. In an embodiment, the targeting domain is selected from those in Tables 1A-1D, 2A-2F, 3A-3C, 4A-4E, 5A-5E, 6A-6B, 7A-7D, 8A-8D, 9, 10A-10D, 11A-11D, 12, 13A-13D, 14A-14C, 15A-15D, 16A-16E, 17A-17B, 18A-18C, 19A-19E, 20A-20C, 21A-21E, 22A-22E, 23A-23C, 24A-24D, 25A-25B, 26, or 31.

[0090] In an embodiment, the targeting domain which is complementary with the BCL11A gene is 16 nucleotides or more in length. In an embodiment, the targeting domain is 16 nucleotides in length. In an embodiment, the targeting domain is 17 nucleotides in length. In another embodiment, the targeting domain is 18 nucleotides in length. In still another embodiment, the targeting domain is 19 nucleotides in length. In still another embodiment, the targeting domain is 20 nucleotides in length. In still another embodiment, the targeting domain is 21 nucleotides in length. In still another embodiment, the targeting domain is 22 nucleotides in length. In still another embodiment, the targeting domain is 23 nucleotides in length. In still another embodiment, the targeting domain is 24 nucleotides in length. In still another embodiment, the targeting domain is 25 nucleotides in length. In still another embodiment, the targeting domain is 26 nucleotides in length.

[0091] In an embodiment, the targeting domain comprises 16 nucleotides.

[0092] In an embodiment, the targeting domain comprises 17 nucleotides.

[0093] In an embodiment, the targeting domain comprises 18 nucleotides.

[0094] In an embodiment, the targeting domain comprises 19 nucleotides.

[0095] In an embodiment, the targeting domain comprises 20 nucleotides.

[0096] In an embodiment, the targeting domain comprises 21 nucleotides.

[0097] In an embodiment, the targeting domain comprises 22 nucleotides.

[0098] In an embodiment, the targeting domain comprises 23 nucleotides.

[0099] In an embodiment, the targeting domain comprises 24 nucleotides.

[0100] In an embodiment, the targeting domain comprises 25 nucleotides.

[0101] In an embodiment, the targeting domain comprises 26 nucleotides.

[0102] In an embodiment, the gRNA, e.g., a gRNA comprising a targeting domain, which is complementary with the HBB gene or BCL11A gene, is a modular gRNA. In another embodiment, the gRNA is a unimolecular or chimeric gRNA.

[0103] HBB gRNA as described herein may comprise from 5′ to 3′: a targeting domain (comprising a “core domain”, and optionally a “secondary domain”); a first complementarity domain; a linking domain; a second complementarity domain; a proximal domain; and a tail domain. In an embodiment, the proximal domain and tail domain are taken together as a single domain.

[0104] In an embodiment, a gRNA comprises a linking domain of no more than 25 nucleotides in length; a proximal and tail domain, that taken together, are at least 20 nucleotides in length; and a targeting domain equal to or greater than 16, 17, 18, 19, 20, 21, 22, 23, 24, 25 or 26 nucleotides in length.

[0105] In another embodiment, a gRNA comprises a linking domain of no more than 25 nucleotides in length; a proximal and tail domain, that taken together, are at least 25 nucleotides in length; and a targeting domain equal to or greater than 16, 17, 18, 19, 20, 21, 22, 23, 24, 25 or 26 nucleotides in length.

[0106] In another embodiment, a gRNA comprises a linking domain of no more than 25 nucleotides in length; a proximal and tail domain, that taken together, are at least 30 nucleotides in length; and a targeting domain equal to or greater than 16, 17, 18, 19, 20, 21, 22, 23, 24, 25 or 26 nucleotides in length.

[0107] In another embodiment, a gRNA comprises a linking domain of no more than 25 nucleotides in length; a proximal and tail domain, that taken together, are at least 40 nucleotides in length; and a targeting domain equal to or greater than 16, 17, 18, 19, 20, 21, 22, 23, 24, 25 or 26 nucleotides in length.

[0108] A cleavage event, e.g., a double strand or single strand break, is generated by a Cas9 molecule. The Cas9 molecule may be an enzymatically active Cas9 (eaCas9) molecule, e.g., an eaCas9 molecule that forms a double strand break in a target nucleic acid or an eaCas9 molecule forms a single strand break in a target nucleic acid (e.g., a nickase molecule). Alternatively, in an embodiment, the Cas9 molecule may be an enzymatically inactive Cas9 (eiCas9) molecule or a modified eiCas9 molecule, e.g., the eiCas9 molecule is fused to Krüppel-associated box (KRAB) to generate an eiCas9-KRAB fusion protein molecule.

[0109] In an embodiment, the eaCas9 molecule catalyzes a double strand break.

[0110] In an embodiment, the eaCas9 molecule comprises HNH-like domain cleavage activity but has no, or no significant, N-terminal RuvC-like domain cleavage activity. In this case, the eaCas9 molecule is an HNH-like domain nickase, e.g., the eaCas9 molecule comprises a mutation at D10, e.g., D10A. In another embodiment, the eaCas9 molecule comprises N-terminal RuvC-like domain cleavage activity but has no, or no significant, HNH-like domain cleavage activity. In an embodiment, the eaCas9 molecule is an N-terminal RuvC-like domain nickase, e.g., the eaCas9 molecule comprises a mutation at H840, e.g., H840A. In an embodiment, the eaCas9 molecule is an N-terminal RuvC-like domain nickase, e.g., the eaCas9 molecule comprises a mutation at N863, e.g., N863A.

[0111] In an embodiment, a single strand break is formed in the strand of the target nucleic acid to which the targeting domain of said gRNA is complementary. In another embodiment, a single strand break is formed in the strand of the target nucleic acid other than the strand to which the targeting domain of said gRNA is complementary.

[0112] In another aspect, disclosed herein is a nucleic acid, e.g., an isolated or non-naturally occurring nucleic acid, e.g., DNA, that comprises (a) a sequence that encodes a gRNA molecule comprising a targeting domain that is complementary with a target domain, e.g., with an SCD target position, in the HBB gene or BCL11A gene as disclosed herein.

[0113] In an embodiment, the nucleic acid encodes a gRNA molecule, e.g., a first gRNA molecule, comprising a targeting domain configured to provide a cleavage event, e.g., a double strand break or a single strand break, sufficiently close to an SCD target position in the HBB gene or BCL11A gene to allow alteration, e.g., alteration associated with HDR or NHEJ, of the an SCD target position in the HBB gene or BCL11A gene.

[0114] In an embodiment, the nucleic acid encodes a gRNA molecule, e.g., a first gRNA molecule, comprising a targeting domain configured to target an enzymatically inactive Cas9 (eiCas9) or an eiCas9 fusion protein (e.g., an eiCas9 fused to a transcription repressor domain), sufficiently close to an SCD knockdown target position to reduce, decrease or repress expression of the BCL11A gene.

[0115] In an embodiment, the nucleic acid encodes a gRNA molecule, e.g., the first gRNA molecule, comprising a targeting domain comprising a sequence that is the same as, or differs by no more than 1, 2, 3, 4, or 5 nucleotides from, a targeting domain sequence from any one of Tables 1A-1D, 2A-2F, 3A-3C, 4A-4E, 5A-5E, 6A-6B, 7A-7D, 8A-8D, 9, 10A-10D, 11A-11D, 12, 13A-13D, 14A-14C, 15A-15D, 16A-16E, 17A-17B, 18A-18C, 19A-19E, 20A-20C, 21A-21E, 22A-22E, 23A-23C, 24A-24D, 25A-25B, 26, or 31. In an embodiment, the nucleic acid encodes a gRNA molecule comprising a targeting domain is selected from those in Tables 1A-1D, 2A-2F, 3A-3C, 4A-4E, 5A-5E, 6A-613, 7A-7D, 8A-8D, 9, 10A-10D, 11A-11D, 12, 13A-13D, 14A-14C, 15A-15D, 16A-16E, 17A-17B, 18A-18C, 19A-19E, 20A-20C, 21A-21E, 22A-22E, 23A-23C, 24A-24D, 25A-25B, 26, or 31.

[0116] In an embodiment, the nucleic acid encodes a modular gRNA, e.g., one or more nucleic acids encode a modular gRNA. In another embodiment, the nucleic acid encodes a chimeric gRNA. The nucleic acid may encode a gRNA, e.g., the first gRNA molecule, comprising a targeting domain comprising 16 nucleotides or more in length. In one embodiment, the nucleic acid encodes a gRNA, e.g., the first gRNA molecule, comprising a targeting domain that is 16 nucleotides in length. In another embodiment, the nucleic acid encodes a gRNA, e.g., the first gRNA molecule, comprising a targeting domain that is 17 nucleotides in length. In still another embodiment, the nucleic acid encodes a gRNA, e.g., the first gRNA molecule, comprising a targeting domain that is 18 nucleotides in length. In still another embodiment, the nucleic acid encodes a gRNA, e.g., the first gRNA molecule, comprising a targeting domain that is 19 nucleotides in length. In still another embodiment, the nucleic acid encodes a gRNA, e.g., the first gRNA molecule, comprising a targeting domain that is 20 nucleotides in length. In still another embodiment, the nucleic acid encodes a gRNA, e.g., the first gRNA molecule, comprising a targeting domain that is 21 nucleotides in length. In still another embodiment, the nucleic acid encodes a gRNA, e.g., the first gRNA molecule, comprising a targeting domain that is 22 nucleotides in length. In still another embodiment, the nucleic acid encodes a gRNA, e.g., the first gRNA molecule, comprising a targeting domain that is 23 nucleotides in length. In still another embodiment, the nucleic acid encodes a gRNA, e.g., the first gRNA molecule, comprising a targeting domain that is 24 nucleotides in length. In still another embodiment, the nucleic acid encodes a gRNA, e.g., the first gRNA molecule, comprising a targeting domain that is 25 nucleotides in length. In still another embodiment, the nucleic acid encodes a gRNA, e.g., the first gRNA molecule, comprising a targeting domain that is 26 nucleotides in length.

[0117] In an embodiment, the targeting domain comprises 16 nucleotides.

[0118] In an embodiment, the targeting domain comprises 17 nucleotides.

[0119] In an embodiment, the targeting domain comprises 18 nucleotides.

[0120] In an embodiment, the targeting domain comprises 19 nucleotides.

[0121] In an embodiment, the targeting domain comprises 20 nucleotides.

[0122] In an embodiment, the targeting domain comprises 21 nucleotides.

[0123] In an embodiment, the targeting domain comprises 22 nucleotides.

[0124] In an embodiment, the targeting domain comprises 23 nucleotides.

[0125] In an embodiment, the targeting domain comprises 24 nucleotides.

[0126] In an embodiment, the targeting domain comprises 25 nucleotides.

[0127] In an embodiment, the targeting domain comprises 26 nucleotides.

[0128] In an embodiment, a nucleic acid encodes a gRNA comprising from 5′ to 3′: a targeting domain (comprising a “core domain”, and optionally a “secondary domain”); a first complementarity domain; a linking domain; a second complementarity domain; a proximal domain; and a tail domain. In an embodiment, the proximal domain and tail domain are taken together as a single domain.

[0129] In an embodiment, a nucleic acid encodes a gRNA e.g., the first gRNA molecule, comprising a linking domain of no more than 25 nucleotides in length; a proximal and tail domain, that taken together, are at least 20 nucleotides in length; and a targeting domain equal to or greater than 16, 17, 18, 19, 20, 21, 22, 23, 24, 25 or 26 nucleotides in length.

[0130] In an embodiment, a nucleic acid encodes a gRNA e.g., the first gRNA molecule, comprising a linking domain of no more than 25 nucleotides in length; a proximal and tail domain, that taken together, are at least 30 nucleotides in length; and a targeting domain equal to or greater than 16, 17, 18, 19, 20, 21, 22, 23, 24, 25 or 26 nucleotides in length.

[0131] In an embodiment, a nucleic acid encodes a gRNA e.g., the first gRNA molecule, comprising a linking domain of no more than 25 nucleotides in length; a proximal and tail domain, that taken together, are at least 30 nucleotides in length; and a targeting domain equal to or greater than 16, 17, 18, 19, 20, 21, 22, 23, 24, 25 or 26 nucleotides in length.

[0132] In an embodiment, a nucleic acid encodes a gRNA comprising e.g., the first gRNA molecule, a linking domain of no more than 25 nucleotides in length; a proximal and tail domain, that taken together, are at least 40 nucleotides in length; and a targeting domain equal to or greater than 16, 17, 18, 19, 20, 21, 22, 23, 24, 25 or 26 nucleotides in length.

[0133] In an embodiment, a nucleic acid comprises (a) a sequence that encodes a gRNA molecule e.g., the first gRNA molecule, comprising a targeting domain that is complementary with a target domain in the HBB gene or BCL11A gene as disclosed herein, and further comprising (b) a sequence that encodes a Cas9 molecule.

[0134] The Cas9 molecule may be an enzymatically active Cas9 (eaCas9) molecule, e.g., an eaCas9 molecule that forms a double strand break in a target nucleic acid or an eaCas9 molecule forms a single strand break in a target nucleic acid (e.g., a nickase molecule). Alternatively, in an embodiment, the Cas9 molecule may be an enzymatically inactive Cas9 (eiCas9) molecule or a modified eiCas9 molecule, e.g., the eiCas9 molecule is fused to Krüppel-associated box (KRAB) to generate an eiCas9-KRAB fusion protein molecule.

[0135] A nucleic acid disclosed herein may comprise (a) a sequence that encodes a gRNA molecule comprising a targeting domain that is complementary with a target domain in the HBB gene or BCL11A gene as disclosed herein; (b) a sequence that encodes a Cas9 molecule; and further comprises (c)(i) a sequence that encodes a second gRNA molecule described herein having a targeting domain that is complementary to a second target domain of the HBB gene or BCL11IA gene, and optionally, (c)(ii) a sequence that encodes a third gRNA molecule described herein having a targeting domain that is complementary to a third target domain of the HBB gene or BCL11A gene; and optionally, (c)(iii) a sequence that encodes a fourth gRNA molecule described herein having a targeting domain that is complementary to a fourth target domain of the HBB gene or BCL11A gene.

[0136] In an embodiment, a nucleic acid encodes a second gRNA molecule comprising a targeting domain configured to provide a cleavage event, e.g., a double strand break or a single strand break, sufficiently close to an SCD target position in the HBB gene or BCL11A gene, to allow alteration, e.g., alteration associated with HDR or NHEJ, of an SCD target position in the HBB gene or BCL11A gene, either alone or in combination with the break positioned by said first gRNA molecule.

[0137] In an embodiment, the nucleic acid encodes a second gRNA molecule comprising a targeting domain configured to target an enzymatically inactive Cas9 (eiCas9) or an eiCas9 fusion protein (e.g., an eiCas9 fused to a transcription repressor domain), sufficiently close to an SCD knockdown target position to reduce, decrease or repress expression of the BCL11A gene.

[0138] In an embodiment, a nucleic acid encodes a third gRNA molecule comprising a targeting domain configured to provide a cleavage event, e.g., a double strand break or a single strand break, sufficiently close to an SCD target position in the HBB gene or BCL11A gene to allow alteration, e.g., alteration associated with HDR or NHEJ, of an SCD target position in the HBB gene or BCL11A gene, either alone or in combination with the break positioned by the first and/or second gRNA molecule.

[0139] In an embodiment, the nucleic acid encodes a third gRNA molecule comprising a targeting domain configured to target an enzymatically inactive Cas9 (eiCas9) or an eiCas9 fusion protein (e.g., an eiCas9 fused to a transcription repressor domain), sufficiently close to an SCD knockdown target position to reduce, decrease or repress expression of the BCL11A gene.

[0140] In an embodiment, a nucleic acid encodes a fourth gRNA molecule comprising a targeting domain configured to provide a cleavage event, e.g., a double strand break or a single strand break, sufficiently close to an SCD target position in the HBB gene or BCL11A gene to allow alteration, e.g., alteration associated with HDR or NHEJ, of an SCD target position in the HBB gene or BCL11A gene, either alone or in combination with the break positioned by the first gRNA molecule, the second gRNA molecule and/or the third gRNA molecule.

[0141] In an embodiment, the nucleic acid encodes a fourth gRNA molecule comprising a targeting domain configured to target an enzymatically inactive Cas9 (eiCas9) or an eiCas9 fusion protein (e.g., an eiCas9 fused to a transcription repressor domain), sufficiently close to an SCD knockdown target position to reduce, decrease or repress expression of the BCL11A gene.

[0142] In an embodiment, the nucleic acid encodes a second gRNA molecule. The second gRNA is selected to target the same SCD target position as the first gRNA molecule. Optionally, the nucleic acid may encode a third gRNA, and further optionally, the nucleic acid may encode a fourth gRNA molecule. The third gRNA molecule and the fourth gRNA molecule are selected to target the same SCD target position as the first and/or second gRNA molecules.

[0143] In an embodiment, the nucleic acid encodes a second gRNA molecule comprising a targeting domain comprising a sequence that is the same as, or differs by no more than 1, 2, 3, 4, or 5 nucleotides from, a targeting domain sequence from one of Tables 1A-1D, 2A-2F, 3A-3C, 4A-4E, 5A-5E, 6A-6B, 7A-7D, 8A-8D, 9, 10A-10D, 11A-11D, 12, 13A-13D, 14A-14C, 15A-15D, 16A-16E, 17A-17B, 18A-18C, 19A-19E, 20A-20C, 21A-21E, 22A-22E, 23A-23C, 24A-24D, 25A-25B, 26, or 31. In an embodiment, the nucleic acid encodes a second gRNA molecule comprising a targeting domain selected from those in Tables 1A-1D, 2A-2F, 3A-3C, 4A-4E, 5A-5E, 6A-6B, 7A-7D, 8A-8D, 9, 10A-10D, 11A-11D, 12, 13A-13D, 14A-14C, 15A-15D, 16A-16E, 17A-17B, 18A-18C, 19A-19E, 20A-20C, 21A-21E, 22A-22E, 23A-23C, 24A-24D, 25A-25B, 26, or 31. In an embodiment, when a third or fourth gRNA molecule are present, the third and fourth gRNA molecules may independently comprise a targeting domain comprising a sequence that is the same as, or differs by no more than 1, 2, 3, 4, or 5 nucleotides from, a targeting domain sequence from one of Tables 1A-1D, 2A-2F, 3A-3C, 4A-4E, 5A-5E, 6A-6B, 7A-7D, 8A-8D, 9, 10A-10D, 11A-11D, 12, 13A-13D, 14A-14C, 15A-15D, 16A-16E, 17A-17B, 18A-18C, 19A-19E, 20A-20C, 21A-21E, 22A-22E, 23A-23C, 24A-24D, 25A-25B, 26, or 31. In a further embodiment, when a third or fourth gRNA molecule are present, the third and fourth gRNA molecules may independently comprise a targeting domain selected from those in Tables 1A-1D, 2A-2F, 3A-3C, 4A-4E, 5A-5E, 6A-6B, 7A-7D, 8A-8D, 9, 10A-10D, 11A-11D, 12, 13A-13D, 14A-14C, 15A-15D, 16A-16E, 17A-17B, 18A-18C, 19A-19E, 20A-20C, 21A-21E, 22A-22E, 23A-23C, 24A-24D, 25A-25B, 26, or 31.

[0144] In an embodiment, the nucleic acid encodes a second gRNA which is a modular gRNA, e.g., wherein one or more nucleic acid molecules encode a modular gRNA. In another embodiment, the nucleic acid encoding a second gRNA is a chimeric gRNA. In another embodiment, when a nucleic acid encodes a third or fourth gRNA, the third and/or fourth gRNA may be a modular gRNA or a chimeric gRNA. When multiple gRNAs are used, any combination of modular or chimeric gRNAs may be used.

[0145] A nucleic acid may encode a second, a third, and/or a fourth gRNA comprising a targeting domain comprising 16 nucleotides or more in length. In an embodiment, the nucleic acid encodes a second gRNA comprising a targeting domain that is 16 nucleotides in length. In another embodiment, the nucleic acid encodes a second gRNA comprising a targeting domain that is 17 nucleotides in length. In still another embodiment, the nucleic acid encodes a second gRNA comprising a targeting domain that is 18 nucleotides in length. In still another embodiment, the nucleic acid encodes a second gRNA comprising a targeting domain that is 19 nucleotides in length. In still another embodiment, the nucleic acid encodes a second gRNA comprising a targeting domain that is 20 nucleotides in length. In still another embodiment, the nucleic acid encodes a second gRNA comprising a targeting domain that is 21 nucleotides in length. In still another embodiment, the nucleic acid encodes a second gRNA comprising a targeting domain that is 22 nucleotides in length. In still another embodiment, the nucleic acid encodes a second gRNA comprising a targeting domain that is 23 nucleotides in length. In still another embodiment, the nucleic acid encodes a second gRNA comprising a targeting domain that is 24 nucleotides in length. In still another embodiment, the nucleic acid encodes a second gRNA comprising a targeting domain that is 25 nucleotides in length. In still another embodiment, the nucleic acid encodes a second gRNA comprising a targeting domain that is 26 nucleotides in length.

[0146] In an embodiment, the targeting domain comprises 16 nucleotides.

[0147] In an embodiment, the targeting domain comprises 17 nucleotides.

[0148] In an embodiment, the targeting domain comprises 18 nucleotides.

[0149] In an embodiment, the targeting domain comprises 19 nucleotides.

[0150] In an embodiment, the targeting domain comprises 20 nucleotides.

[0151] In an embodiment, the targeting domain comprises 21 nucleotides.

[0152] In an embodiment, the targeting domain comprises 22 nucleotides.

[0153] In an embodiment, the targeting domain comprises 23 nucleotides.

[0154] In an embodiment, the targeting domain comprises 24 nucleotides.

[0155] In an embodiment, the targeting domain comprises 25 nucleotides.

[0156] In an embodiment, the targeting domain comprises 26 nucleotides.

[0157] In an embodiment, a nucleic acid encodes a second, a third, and/or a fourth gRNA comprising from 5′ to 3′: a targeting domain (comprising a “core domain”, and optionally a “secondary domain”); a first complementarity domain; a linking domain; a second complementarity domain; a proximal domain; and a tail domain. In an embodiment, the proximal domain and tail domain are taken together as a single domain.

[0158] In an embodiment, a nucleic acid encodes a second, a third, and/or a fourth gRNA comprising a linking domain of no more than 25 nucleotides in length; a proximal and tail domain, that taken together, are at least 20 nucleotides in length; and a targeting domain equal to or greater than 16, 17, 18, 19, 20, 21, 22, 23, 24, 25 or 26 nucleotides in length.

[0159] In an embodiment, a nucleic acid encodes a second, a third, and/or a fourth gRNA comprising a linking domain of no more than 25 nucleotides in length; a proximal and tail domain, that taken together, are at least 30 nucleotides in length; and a targeting domain equal to or greater than 16, 17, 18, 19, 20, 21, 22, 23, 24, 25 or 26 nucleotides in length.

[0160] In an embodiment, a nucleic acid encodes a second, a third, and/or a fourth gRNA comprising a linking domain of no more than 25 nucleotides in length; a proximal and tail domain, that taken together, are at least 35 nucleotides in length; and a targeting domain equal to or greater than 16, 17, 18, 19, 20, 21, 22, 23, 24, 25 or 26 nucleotides in length.

[0161] In an embodiment, a nucleic acid encodes a second, a third, and/or a fourth gRNA comprising a linking domain of no more than 25 nucleotides in length; a proximal and tail domain, that taken together, are at least 40 nucleotides in length; and a targeting domain equal to or greater than 16, 17, 18, 19, 20, 21, 22, 23, 24, 25 or 26 nucleotides in length.

[0162] In an embodiment, when the HBB gene is corrected, e.g., by HDR, the nucleic acid encodes (a) a sequence that encodes a gRNA molecule comprising a targeting domain that is complementary with a target domain in the HBB gene as disclosed herein; (b) a sequence that encodes a Cas9 molecule; optionally, (c)(i) a sequence that encodes a second gRNA molecule described herein having a targeting domain that is complementary to a second target domain of the HBB gene, and further optionally, (c)(ii) a sequence that encodes a third gRNA molecule described herein having a targeting domain that is complementary to a third target domain of the HBB gene; and still further optionally, (c)(iii) a sequence that encodes a fourth gRNA molecule described herein having a targeting domain that is complementary to a fourth target domain of the HBB gene; and further may comprise (d) a template nucleic acid (in an embodiment where an exogenous template is used).

[0163] In an embodiment, a mutation in the HBB gene is corrected, e.g., by HDR, using an exogenously provided template nucleic acid.

[0164] In an embodiment, the template nucleic acid is a single stranded nucleic acid. In another embodiment, the template nucleic acid is a double stranded nucleic acid. In an embodiment, the template nucleic acid comprises a nucleotide sequence, e.g., of one or more nucleotides, that will be added to or will template a change in the target nucleic acid. In another embodiment, the template nucleic acid comprises a nucleotide sequence that may be used to modify the target position. In another embodiment, the template nucleic acid comprises a nucleotide sequence, e.g., of one or more nucleotides, that corresponds to wild type sequence of the target nucleic acid, e.g., of the target position.

[0165] The template nucleic acid may comprise a replacement sequence, e.g., a replacement sequence from the Table 27. In an embodiment, the template nucleic acid comprises a 5′ homology arm, e.g., a 5′ homology arm from Table 27. In another embodiment, the template nucleic acid comprises a 3′ homology arm, e.g., a 3′ homology arm from Table 27.

[0166] In another embodiment, a mutation in the HBB gene is corrected, e.g., by HDR, without using an exogenously provided template nucleic acid. While not wishing to be bound by theory, it is believed that an endogenous region of homology can mediate HDR-based correction. In an embodiment, alteration of the target sequence occurs by HDR with an endogenous genomic donor sequence. In an embodiment, the endogenous genomic donor sequence is located on the same chromosome as the target sequence. In another embodiment, the endogenous genomic donor sequence is located on a different chromosome from the target sequence. In an embodiment, the endogenous genomic donor sequence comprises one or more nucleotides derived from the HBD gene. Mutations in the HBB gene that can be corrected (e.g., altered) by HDR with an endogenous genomic donor sequence include, e.g., a point mutation at E6, e.g., E6V.

[0167] As described above, a nucleic acid may comprise (a) a sequence encoding a gRNA molecule comprising a targeting domain that is complementary with a target domain in the HBB gene or BCL11A gene, and (b) a sequence encoding a Cas9 molecule.

[0168] In an embodiment, (a) and (b) are present on the same nucleic acid molecule, e.g., the same vector, e.g., the same viral vector, e.g., the same adeno-associated virus (AAV) vector. In an embodiment, the nucleic acid molecule is an AAV vector. Exemplary AAV vectors that may be used in any of the described compositions and methods include an AAV2 vector, a modified AAV2 vector, an AAV3 vector, a modified AAV3 vector, an AAV6 vector, a modified AAV6 vector, an AAV8 vector and an AAV9 vector.

[0169] In another embodiment, (a) is present on a first nucleic acid molecule, e.g. a first vector, e.g., a first viral vector, e.g., a first AAV vector; and (b) is present on a second nucleic acid molecule, e.g., a second vector, e.g., a second vector, e.g., a second AAV vector. The first and second nucleic acid molecules may be AAV vectors.

[0170] In another embodiment, the nucleic acid may further comprise (c) a sequence that encodes a second, third and/or fourth gRNA molecule as described herein. In an embodiment, the nucleic acid comprises (a), (b) and (c). Each of (a) and (c) may be present on the same nucleic acid molecule, e.g., the same vector, e.g., the same viral vector, e.g., the same adeno-associated virus (AAV) vector. In an embodiment, the nucleic acid molecule is an AAV vector.

[0171] In another embodiment, (a) and (c) are on different vectors. For example, (a) may be present on a first nucleic acid molecule, e.g. a first vector, e.g., a first viral vector, e.g., a first AAV vector; and (c) may be present on a second nucleic acid molecule, e.g., a second vector. e.g., a second vector, e.g., a second AAV vector. In an embodiment, the first and second nucleic acid molecules are AAV vectors.

[0172] In another embodiment, each of (a), (b), and (c) are present on the same nucleic acid molecule, e.g., the same vector, e.g., the same viral vector, e.g., an AAV vector. In an embodiment, the nucleic acid molecule is an AAV vector. In an alternate embodiment, one of (a), (b), and (c) is encoded on a first nucleic acid molecule, e.g., a first vector, e.g., a first viral vector, e.g., a first AAV vector; and a second and third of (a), (b), and (c) is encoded on a second nucleic acid molecule, e.g., a second vector, e.g., a second vector, e.g., a second AAV vector. The first and second nucleic acid molecule may be AAV vectors.

[0173] In an embodiment, (a) is present on a first nucleic acid molecule, e.g., a first vector, e.g., a first viral vector, a first AAV vector; and (b) and (c) are present on a second nucleic acid molecule, e.g., a second vector, e.g., a second vector, e.g., a second AAV vector. The first and second nucleic acid molecule may be AAV vectors.

[0174] In another embodiment, (b) is present on a first nucleic acid molecule, e.g., a first vector, e.g., a first viral vector, e.g., a first AAV vector; and (a) and (c) are present on a second nucleic acid molecule, e.g., a second vector, e.g., a second vector, e.g., a second AAV vector. The first and second nucleic acid molecule may be AAV vectors.

[0175] In another embodiment, (c) is present on a first nucleic acid molecule, e.g., a first vector, e.g., a first viral vector, e.g., a first AAV vector; and (b) and (a) are present on a second nucleic acid molecule, e.g., a second vector, e.g., a second vector, e.g., a second AAV vector. The first and second nucleic acid molecule may be AAV vectors.

[0176] In another embodiment, each of (a), (b) and (c) are present on different nucleic acid molecules, e.g., different vectors, e.g., different viral vectors, e.g., different AAV vector. For example, (a) may be on a first nucleic acid molecule, (b) on a second nucleic acid molecule, and (c) on a third nucleic acid molecule. The first, second and third nucleic acid molecule may be AAV vectors.

[0177] In another embodiment, when a third and/or fourth gRNA molecule are present, each of (a), (b), (c)(i), (c)(ii) and (c)(iii) may be present on the same nucleic acid molecule, e.g., the same vector, e.g., the same viral vector, e.g., an AAV vector. In an embodiment, the nucleic acid molecule is an AAV vector. In an alternate embodiment, each of (a), (b), (c)(i), (c)(ii) and (c)(iii) may be present on the different nucleic acid molecules, e.g., different vectors, e.g., the different viral vectors, e.g., different AAV vectors. In further embodiments, each of (a), (b), (c)(i), (c)(ii) and (c)(iii) may be present on more than one nucleic acid molecule, but fewer than five nucleic acid molecules, e.g., AAV vectors.

[0178] In another embodiment, when (d) a template nucleic acid is present, each of (a), (b), and (d) may be present on the same nucleic acid molecule, e.g., the same vector, e.g., the same viral vector, e.g., an AAV vector. In an embodiment, the nucleic acid molecule is an AAV vector. In an alternate embodiment, each of (a), (b), and (d) may be present on the different nucleic acid molecules, e.g., different vectors, e.g., the different viral vectors, e.g., different AAV vectors. In further embodiments, each of (a), (b), and (d) may be present on more than one nucleic acid molecule, but fewer than three nucleic acid molecules, e.g., AAV vectors.

[0179] In another embodiment, when (d) a template nucleic acid is present, each of (a), (b), (c)(i) and (d) may be present on the same nucleic acid molecule, e.g., the same vector, e.g., the same viral vector, e.g., an AAV vector. In an embodiment, the nucleic acid molecule is an AAV vector. In an alternate embodiment, each of (a), (b), (c)(i) and (d) may be present on the different nucleic acid molecules, e.g., different vectors, e.g., the different viral vectors, e.g., different AAV vectors. In further embodiments, each of (a), (b), (c)(i) and (d) may be present on more than one nucleic acid molecule, but fewer than four nucleic acid molecules, e.g., AAV vectors.

[0180] In another embodiment, when (d) a template nucleic acid is present, each of (a), (b), (c)(i), (c)(ii) and (d) may be present on the same nucleic acid molecule, e.g., the same vector, e.g., the same viral vector, e.g., an AAV vector. In an embodiment, the nucleic acid molecule is an AAV vector. In an alternate embodiment, each of (a), (b), (c)(i), (c)(ii) and (d) may be present on the different nucleic acid molecules, e.g., different vectors, e.g., the different viral vectors, e.g., different AAV vectors. In further embodiments, each of (a), (b). (c)(i), (c)(ii) and (d) may be present on more than one nucleic acid molecule, but fewer than five nucleic acid molecules, e.g., AAV vectors.

[0181] In another embodiment, when (d) a template nucleic acid is present, each of (a), (b), (c)(i), (c)(ii), (c)(iii) and (d) may be present on the same nucleic acid molecule, e.g., the same vector, e.g., the same viral vector, e.g., an AAV vector. In an embodiment, the nucleic acid molecule is an AAV vector. In an alternate embodiment, each of (a), (b), (c)(i), (c)(ii), (c)(iii) and (d) may be present on the different nucleic acid molecules, e.g., different vectors, e.g., the different viral vectors. e.g., different AAV vectors. In further embodiments, each of (a), (b), (c)(i), (c)(ii), (c)(iii) and (d) may be present on more than one nucleic acid molecule, but fewer than six nucleic acid molecules, e.g., AAV vectors.

[0182] The nucleic acids described herein may comprise a promoter operably linked to the sequence that encodes the gRNA molecule of (a), e.g., a promoter described herein. The nucleic acid may further comprise a second promoter operably linked to the sequence that encodes the second, third and/or fourth gRNA molecule of (c), e.g., a promoter described herein. The promoter and second promoter differ from one another. In an embodiment, the promoter and second promoter are the same.

[0183] The nucleic acids described herein may further comprise a promoter operably linked to the sequence that encodes the Cas9 molecule of (b), e.g., a promoter described herein.

[0184] In another aspect, disclosed herein is a composition comprising (a) a gRNA molecule comprising a targeting domain that is complementary with a target domain in the HBB gene or BCL11A gene, as described herein. The composition of (a) may further comprise (b) a Cas9 molecule, e.g., a Cas9 molecule as described herein. A composition of (a) and (b) may further comprise (c) a second, third and/or fourth gRNA molecule, e.g., a second, third and/or fourth gRNA molecule described herein. A composition of (a), (b) and (c) may further comprise (d) a template nucleic acid (in an embodiment where an exogenous template is used). In an embodiment, the composition is a pharmaceutical composition. The Compositions described herein, e.g., pharmaceutical compositions described herein, can be used in treating SCD in a subject, e.g., in accordance with a method disclosed herein.

[0185] In another aspect, disclosed herein is a method of altering a cell, e.g., altering the structure, e.g., altering the sequence, of a target nucleic acid of a cell, comprising contacting said cell with: (a) a gRNA that targets the HBB gene or BCL11A gene, e.g., a gRNA as described herein; (b) a Cas9 molecule, e.g., a Cas9 molecule as described herein; and optionally, (c) a second, third and/or fourth gRNA that targets HBB gene or BCL11A gene, e.g., a gRNA; and optionally, (d) a template nucleic acid, as described herein.

[0186] In an embodiment, the method comprises contacting said cell with (a) and (b).

[0187] In an embodiment, the method comprises contacting said cell with (a), (b), and (c).

[0188] In an embodiment, the method comprises contacting said cell with (a), (b), (c) and (d).

[0189] In an embodiment, the gRNA targets the HBB gene and no exogenous template nucleic acid is contacted with the cell.

[0190] The gRNA of (a) and optionally (c) may be selected from any of Tables 1A-1D, 2A-2F, 3A-3C, 4A-4E, 5A-5E, 6A-6B, 7A-7D, 8A-8D, 9, 10A-10D, 11A-11D, 12, 13A-13D, 14A-14C, 15A-15D, 16A-16E, 17A-17B, 18A-18C, 19A-19E, 20A-20C, 21A-21E, 22A-22E, 23A-23C, 24A-24D, 25A-25B, 26, or 31, or a gRNA that differs by no more than 1, 2, 3, 4, or 5 nucleotides from, a targeting domain sequence from any of Tables 1A-1D, 2A-2F, 3A-3C, 4A-4E, 5A-5E, 6A-6B, 7A-7D, 8A-8D, 9, 10A-10D, 11A-11D, 12, 13A-13D, 14A-14C, 15A-15D, 16A-16E, 17A-17B, 18A-18C, 19A-19E, 20A-20C, 21A-21E, 22A-22E, 23A-23C, 24A-24D, 25A-25B, 26, or 31.

[0191] In an embodiment, the method comprises contacting a cell from a subject suffering from or likely to develop SCD. The cell may be from a subject having a mutation at an SCD target position in the HBB gene or a subject which would benefit from having a mutation at an SCD target position in the BCL11A gene.

[0192] In an embodiment, the cell being contacted in the disclosed method is an erythroid cell. The contacting may be performed ex vivo and the contacted cell may be returned to the subject's body after the contacting step. In another embodiment, the contacting step may be performed in vivo.

[0193] In an embodiment, the method of altering a cell as described herein comprises acquiring knowledge of the sequence at an SCD target position in said cell, prior to the contacting step. Acquiring knowledge of the sequence at an SCD target position in the cell may be by sequencing the HBB gene or BCL11A gene, or a portion of the HBB gene or BCL11A gene.

[0194] In an embodiment, the contacting step of the method comprises contacting the cell with a nucleic acid, e.g., a vector, e.g., an AAV vector, that expresses at least one of (a), (b), and (c). In an embodiment, the contacting step of the method comprises contacting the cell with a nucleic acid, e.g., a vector, e.g., an AAV vector, that expresses each of (a), (b), and (c). In another embodiment, the contacting step of the method comprises delivering to the cell a Cas9 molecule of (b) and a nucleic acid which encodes a gRNA (a) and optionally, a second gRNA (c)(i) (and further optionally, a third gRNA (c)(iv) and/or fourth gRNA (c)(iii).

[0195] In an embodiment, the contacting step of the method comprises contacting the cell with a nucleic acid, e.g., a vector, e.g., an AAV vector, that expresses at least one of (a), (b), (c) and (d). In an embodiment, the contacting step of the method comprises contacting the cell with a nucleic acid, e.g., a vector, e.g., an AAV vector, that expresses each of (a), (b), and (c). In another embodiment, the contacting step of the method comprises delivering to the cell a Cas9 molecule of (b), a nucleic acid which encodes a gRNA of (a) and a template nucleic acid of (d), and optionally, a second gRNA (c)(i) (and further optionally, a third gRNA (c)(iv) and/or fourth gRNA (c)(iii).

[0196] In an embodiment, contacting comprises contacting the cell with a nucleic acid, e.g., a vector, e.g., an AAV vector, e.g., an AAV2 vector, a modified AAV2 vector, an AAV3 vector, a modified AAV3 vector, an AAV6 vector, a modified AAV6 vector, an AAV8 vector or an AAV9 vector.

[0197] In an embodiment, contacting comprises delivering to the cell a Cas9 molecule of (b), as a protein or an mRNA, and a nucleic acid which encodes (a) and optionally a second, third and/or fourth gRNA of (c).

[0198] In an embodiment, contacting comprises delivering to the cell a Cas9 molecule of (b), as a protein or an mRNA, said gRNA of (a), as an RNA, and optionally said second, third and/or fourth gRNA of (c), as an RNA.

[0199] In an embodiment, contacting comprises delivering to the cell a gRNA of (a) as an RNA, optionally said second, third and/or fourth gRNA of (c) as an RNA, and a nucleic acid that encodes the Cas9 molecule of (b).

[0200] In another aspect, disclosed herein is a method of treating or preventing a subject suffering from or likely to develop SCD, e.g., altering the structure, e.g., sequence, of a target nucleic acid of the subject, comprising contacting the subject (or a cell from the subject) with:

[0201] (a) a gRNA that targets the HBB gene or BCL11A gene, e.g., a gRNA disclosed herein;

[0202] (b) a Cas9 molecule, e.g., a Cas9 molecule disclosed herein; and

[0203] optionally, (c)(i) a second gRNA that targets the HBB gene or BCL11A gene, e.g., a second gRNA disclosed herein, and

[0204] further optionally, (c)(ii) a third gRNA, and still further optionally, (c)(iii) a fourth gRNA that target the HBB gene or BCL11A gene, e.g., a third and fourth gRNA disclosed herein.

[0205] The method of treating a subject may further comprise contacting the subject (or a cell from the subject) with (d) a template nucleic acid (in an embodiment where an exogenous template is used), e.g., a template nucleic acid disclosed herein.

[0206] In an embodiment, a template nucleic acid is used when the method of treating a subject uses HDR to alter the sequence of the target nucleic acid of the subject. In an embodiment, the gRNA targets the HBB gene and no exogenous template nucleic acid is contacted with the subject (or a cell from the subject).

[0207] In an embodiment, contacting comprises contacting with (a) and (b).

[0208] In an embodiment, contacting comprises contacting with (a), (b), and (c)(i).

[0209] In an embodiment, contacting comprises contacting with (a), (b), (c)(i) and (c)(ii).

[0210] In an embodiment, contacting comprises contacting with (a), (b), (c)(i), (c)(ii) and (c)(iii).

[0211] In an embodiment, contacting comprises contacting with (a), (b), (c)(i) and (d).

[0212] In an embodiment, contacting comprises contacting with (a), (b), (c)(i), (c)(ii) and (d).

[0213] In an embodiment, contacting comprises contacting with (a), (b), (c)(i), (c)(ii), (c)(iii) and (d).

[0214] The gRNA of (a) or (c) (e.g., (c)(i), (c)(ii), or (c)(iii) may be selected from any of Tables 1A-1D, 2A-2F, 3A-3C, 4A-4E, 5A-5E, 6A-6B, 7A-7D, 8A-8D, 9, 10A-10D, 11A-11D, 12, 13A-13D, 14A-14C, 15A-15D, 16A-16E, 17A-17B, 18A-18C, 19A-19E, 20A-20C, 21A-21E, 22A-22E, 23A-23C, 24A-24D, 25A-25B, 26, or 31, or a gRNA that differs by no more than 1, 2, 3, 4, or 5 nucleotides from, a targeting domain sequence from any of Tables 1A-1D, 2A-2F, 3A-3C, 4A-4E, 5A-5E, 6A-6B, 7A-7D, 8A-8D, 9, 10A-10D, 11A-11D, 12, 13A-13D, 14A-14C, 15A-15D, 16A-16E, 17A-17B, 18A-18C, 19A-19E, 20A-20C, 21A-21E, 22A-22E, 23A-23C, 24A-24D, 25A-25B, 26, or 31.

[0215] In an embodiment, the method comprises acquiring knowledge of the sequence (e.g., a mutation) of an SCD target position in said subject.

[0216] In an embodiment, the method comprises acquiring knowledge of the sequence (e.g., a mutation) of an SCD target position in said subject by sequencing the HBB gene or BCL11A gene or a portion of the HBB gene or BCL11A gene.

[0217] In an embodiment, the method comprises correcting a mutation at an SCD target position in the HBB gene.

[0218] In an embodiment, the method comprises correcting a mutation at an SCD target position in the HBB gene by HDR.

[0219] In an embodiment, the method comprises introducing a mutation at an SCD target position in the BCL11A gene.

[0220] In an embodiment, the method comprises introducing a mutation at an SCD target position in the BCL11A gene by NHEJ.

[0221] When the method comprises correcting the mutation at an SCD target position by HDR, a Cas9 of (b), at least one guide RNA, e.g., a guide RNA of (a) and a template nucleic acid of (d) are included in the contacting step.

[0222] In an embodiment, a cell of the subject is contacted ex vivo with (a), (b), (d) and optionally (c)(i), further optionally (c)(ii), and still further optionally (c)(iii). In an embodiment, said cell is returned to the subject's body.

[0223] In an embodiment, a cell of the subject is contacted is in vivo with (a), (b) (d) and optionally (c)(i), further optionally (c)(ii), and still further optionally (c)(iii).

[0224] In an embodiment, the cell of the subject is contacted in vivo by intravenous delivery of (a), (b), (d) and optionally (c)(i), further optionally (c)(ii), and still further optionally (c)(iii).

[0225] In an embodiment, the cell of the subject is contacted in vivo by intramuscular delivery of (a), (b), (d) and optionally (c)(i), further optionally (c)(ii), and still further optionally (c)(iii).

[0226] In an embodiment, the cell of the subject is contacted in vivo by subcutaneous delivery of (a), (b), (d) and optionally (c)(i), further optionally (c)(ii), and still further optionally (c)(iii).

[0227] In an embodiment, the cell of the subject is contacted in vivo by intra-bone marrow (IBM) delivery of (a), (b), (d) and optionally (c)(i), further optionally (c)(ii), and still further optionally (c)(iii).

[0228] In an embodiment, contacting comprises contacting the subject with a nucleic acid, e.g., a vector, e.g., an AAV vector, described herein, e.g., a nucleic acid that encodes at least one of (a), (b), (d) and optionally (c)(i), further optionally (c)(ii), and still further optionally (c)(iii).

[0229] In an embodiment, contacting comprises delivering to said subject said Cas9 molecule of (b), as a protein or mRNA, and a nucleic acid which encodes (a), a nucleic acid of (d) and optionally (c)(i), further optionally (c)(ii), and still further optionally (c)(iii).

[0230] In an embodiment, contacting comprises delivering to the subject the Cas9 molecule of (b), as a protein or mRNA, the gRNA of (a), as an RNA, a nucleic acid of (d) and optionally the second, third and/or fourth gRNA of (c), as an RNA.

[0231] In an embodiment, contacting comprises delivering to the subject the gRNA of (a), as an RNA, optionally said second, third and/or fourth gRNA of (c), as an RNA, a nucleic acid that encodes the Cas9 molecule of (b), and a nucleic acid of (d).

[0232] When the method comprises (1) introducing a mutation at an SCD target position by NHEJ or (2) knocking down expression of the BCL11A gene by targeting the promoter region, a Cas9 of (b) and at least one guide RNA, e.g., a guide RNA of (a) are included in the contacting step.

[0233] In an embodiment, a cell of the subject is contacted ex vivo with (a), (b) and optionally (c)(i), further optionally (c)(ii), and still further optionally (c)(iii). In an embodiment, said cell is returned to the subject's body.

[0234] In an embodiment, a populations of cells from a subject is contacted ex vivo with (a), (b) and optionally (c) to correct the E6V mutation in the HBB gene and a second population of cells from the subject is contacted ex vivo with (a), (b) and optionally (c) to introduce a mutation in the BCL11A gene to knockout the BCL11A gene. A mixture of the two cell populations may be returned to the subject's body to treat or prevent SCD.

[0235] In an embodiment, a cell of the subject is contacted is in vivo with (a), (b) and optionally (c)(i), further optionally (c)(ii), and still further optionally (c)(iii). In an embodiment, the cell of the subject is contacted in vivo by intravenous delivery of (a), (b) and optionally (c)(i), further optionally (c)(ii), and still further optionally (c)(iii). In an embodiment, the cell of the subject is contacted in vivo by intramuscular delivery of (a), (b) and optionally (c)(i), further optionally (c)(ii), and still further optionally (c)(iii). In an embodiment, the cell of the subject is contacted in vivo by subcutaneous delivery of (a), (b) and optionally (c)(i), further optionally (c)(ii), and still further optionally (c)(iii). In an embodiment, the cell of the subject is contacted in vivo by intra-bone marrow (IBM) delivery of (a), (b) and optionally (c)(i), further optionally (c)(ii), and still further optionally (c)(iii).

[0236] In an embodiment, contacting comprises contacting the subject with a nucleic acid, e.g., a vector, e.g., an AAV vector, described herein. e.g., a nucleic acid that encodes at least one of (a), (b), and optionally (c)(i), further optionally (c)(ii), and still further optionally (c)(iii).

[0237] In an embodiment, contacting comprises delivering to said subject said Cas9 molecule of (b), as a protein or mRNA, and a nucleic acid which encodes (a) and optionally (c)(i), further optionally (c)(ii), and still further optionally (c)(iii).

[0238] In an embodiment, contacting comprises delivering to the subject the Cas9 molecule of (b), as a protein or mRNA, the gRNA of (a), as an RNA, and optionally the second, third and/or fourth gRNA of (c), as an RNA.

[0239] In an embodiment, contacting comprises delivering to the subject the gRNA of (a), as an RNA, optionally said second, third and/or fourth gRNA of (c), as an RNA, and a nucleic acid that encodes the Cas9 molecule of (b).

[0240] In another aspect, disclosed herein is a reaction mixture comprising a gRNA, a nucleic acid, or a composition described herein, and a cell, e.g., a cell from a subject having, or likely to develop SCD, or a subject having a mutation at an SCD target position in the HBB gene, or a cell from a subject which would benefit from having a mutation at an SCD target position in the BCL11A gene.

[0241] In another aspect, disclosed herein is a kit comprising, (a) gRNA molecule described herein, or nucleic acid that encodes the gRNA, and one or more of the following:

[0242] (b) a Cas9 molecule, e.g., a Cas9 molecule described herein, or a nucleic acid or mRNA that encodes the Cas9;

[0243] (c)(i) a second gRNA molecule, e.g., a second gRNA molecule described herein or a nucleic acid that encodes (c)(i);

[0244] (c)(ii) a third gRNA molecule, e.g., a second gRNA molecule described herein or a nucleic acid that encodes (c)(ii);

[0245] (c)(iii) a fourth gRNA molecule, e.g., a second gRNA molecule described herein or a nucleic acid that encodes (c)(iii);

[0246] (d) a template nucleic acid (in an embodiment where an exogenous template is used), e.g., a template nucleic acid described herein.

[0247] In an embodiment, the kit comprises nucleic acid, e.g., an AAV vector, that encodes one or more of (a), (b), (c)(i), (c)(ii), (c)(iii) and (d).

[0248] In an aspect, the disclosure features a gRNA molecule, referred to herein as a governing gRNA molecule, comprising a targeting domain which is complementary to a target domain on a nucleic acid that encodes a component of the CRISPR/Cas system introduced into a cell or subject. In an embodiment, the governing gRNA molecule targets a nucleic acid that encodes a Cas9 molecule or a nucleic acid that encodes a target gene gRNA molecule. In an embodiment, the governing gRNA comprises a targeting domain that is complementary to a target domain in a sequence that encodes a Cas9 component. e.g., a Cas9 molecule or target gene gRNA molecule. In an embodiment, the target domain is designed with, or has, minimal homology to other nucleic acid sequences in the cell, e.g., to minimize off-target cleavage. For example, the targeting domain on the governing gRNA can be selected to reduce or minimize off-target effects. In an embodiment, a target domain for a governing gRNA can be disposed in the control or coding region of a Cas9 molecule or disposed between a control region and a transcribed region. In an embodiment, a target domain for a governing gRNA can be disposed in the control or coding region of a target gene gRNA molecule or disposed between a control region and a transcribed region for a target gene gRNA. While not wishing to be bound by theory, it is believed that altering, e.g., inactivating, a nucleic acid that encodes a Cas9 molecule or a nucleic acid that encodes a target gene gRNA molecule can be effected by cleavage of the targeted nucleic acid sequence or by binding of a Cas9 molecule/governing gRNA molecule complex to the targeted nucleic acid sequence.

[0249] The compositions, reaction mixtures and kits, as disclosed herein, can also include a governing gRNA molecule, e.g., a governing gRNA molecule disclosed herein.

[0250] Unless otherwise defined, all technical and scientific terms used herein have the same meaning as commonly understood by one of ordinary skill in the art to which this invention belongs. Although methods and materials similar or equivalent to those described herein can be used in the practice or testing of the present invention, suitable methods and materials are described below. All publications, patent applications, patents, and other references mentioned herein are incorporated by reference in their entirety. In addition, the materials, methods, and examples are illustrative only and not intended to be limiting.

[0251] Headings, including numeric and alphabetical headings and subheadings, are for organization and presentation and are not intended to be limiting.

[0252] Other features and advantages of the invention will be apparent from the detailed description, drawings, and from the claims.

### BRIEF DESCRIPTION OF THE DRAWINGS

[0253] FIGS. 1A-1I are representations of several exemplary gRNAs.

[0254] FIG. 1A depicts a modular gRNA molecule derived in part (or modeled on a sequence in part) from Streptococcus pyogenes (S. pyogenes) as a duplexed structure (SEQ ID NOS: 42 and 43, respectively, in order of appearance);

[0255] FIG. 1B depicts a unimolecular (or chimeric) gRNA molecule derived in part from S. pyogenes as a duplexed structure (SEQ ID NO: 44);

[0256] FIG. 1C depicts a unimolecular gRNA molecule derived in part from S. pyogenes as a duplexed structure (SEQ ID NO: 45);

[0257] FIG. 1D depicts a unimolecular gRNA molecule derived in part from S. pyogenes as a duplexed structure (SEQ ID NO: 46);

[0258] FIG. 1E depicts a unimolecular gRNA molecule derived in part from S. pyogenes as a duplexed structure (SEQ ID NO: 47);

[0259] FIG. 1F depicts a modular gRNA molecule derived in part from Streptococcus thermophilus (S. thermophilus) as a duplexed structure (SEQ ID NOS: 48 and 49, respectively, in order of appearance);

[0260] FIG. 1G depicts an alignment of modular gRNA molecules of S. pyogenes and S. thermophilus (SEQ ID NOS: 50-53, respectively, in order of appearance).

[0261] FIGS. 1H-1I depicts additional exemplary structures of unimolecular gRNA molecules.

[0262] FIG. 1H shows an exemplary structure of a unimolecular gRNA molecule derived in part from S. pyogenes as a duplexed structure (SEQ ID NO: 45).

[0263] FIG. 1I shows an exemplary structure of a unimolecular gRNA molecule derived in part from S. aureus as a duplexed structure (SEQ ID NO: 40).

[0264] FIGS. 2A-2G depict an alignment of Cas9 sequences from Chylinski et al. (RNA Biol. 2013; 10(5): 726-737). The N-terminal RuvC-like domain is boxed and indicated with a “Y”. The other two RuvC-like domains are boxed and indicated with a “B”. The HNH-like domain is boxed and indicated by a “G”. Sm: S. mutans (SEQ ID NO: 1); Sp: S. pyogenes (SEQ ID NO: 2); St: S. thermophilus (SEQ ID NO: 3); Li: L. innocua (SEQ ID NO: 4). Motif: this is a motif based on the four sequences: residues conserved in all four sequences are indicated by single letter amino acid abbreviation; “*” indicates any amino acid found in the corresponding position of any of the four sequences; and “-” indicates any amino acid, e.g., any of the 20 naturally occurring amino acids, or absent.

[0265] FIGS. 3A-3B show an alignment of the N-terminal RuvC-like domain from the Cas9 molecules disclosed in Chylinski et al (SEQ ID NOS: 54-103, respectively, in order of appearance). The last line of FIG. 3B identifies 4 highly conserved residues.

[0266] FIGS. 4A-4B show an alignment of the N-terminal RuvC-like domain from the Cas9 molecules disclosed in Chylinski et al. with sequence outliers removed (SEQ ID NOS: 104-177, respectively, in order of appearance). The last line of FIG. 4B identifies 3 highly conserved residues.

[0267] FIGS. 5A-5C show an alignment of the HNH-like domain from the Cas9 molecules disclosed in Chylinski et al (SEQ ID NOS: 178-252, respectively, in order of appearance). The last line of FIG. 5C identifies conserved residues.

[0268] FIGS. 6A-6B show an alignment of the HNH-like domain from the Cas9 molecules disclosed in Chylinski et al. with sequence outliers removed (SEQ ID NOS: 253-302, respectively, in order of appearance). The last line of FIG. 6B identifies 3 highly conserved residues.

[0269] FIGS. 7A-7B depict an alignment of Cas9 sequences from S. pyogenes and Neisseria meningitidis (N. meningitidis). The N-terminal RuvC-like domain is boxed and indicated with a “Y”. The other two RuvC-like domains are boxed and indicated with a “B”. The HNH-like domain is boxed and indicated with a “G”. Sp: S. pyogenes; Nm: N. meningitidis. Motif: this is a motif based on the two sequences: residues conserved in both sequences are indicated by a single amino acid designation; “*” indicates any amino acid found in the corresponding position of any of the two sequences; “-” indicates any amino acid, e.g., any of the 20 naturally occurring amino acids, and “-” indicates any amino acid, e.g., any of the 20 naturally occurring amino acids, or absent.

[0270] FIG. 8 shows a nucleic acid sequence encoding Cas9 of N. meningitidis (SEQ ID NO: 303). Sequence indicated by an “R” is an SV40 NLS; sequence indicated as “G” is an HA tag; and sequence indicated by an “0” is a synthetic NLS sequence; the remaining (unmarked) sequence is the open reading frame (ORF).

[0271] FIGS. 9A and 9B are schematic representations of the domain organization of S. pyogenes Cas 9. FIG. 9A shows the organization of the Cas9 domains, including amino acid positions, in reference to the two lobes of Cas9 (recognition (REC) and nuclease (NUC) lobes). FIG. 9B shows the percent homology of each domain across 83 Cas9 orthologs.

[0272] FIG. 10 shows chromosome 2 location (according to UCSC Genome Browser hg 19 human genome assembly) that corresponds to BCL11A intron 2. Three erythroid DHSs are labeled as distance in kilobases from BCL11A TSS (+62, +58 and +55). BCL11A transcription is from right to left.

[0273] FIG. 11 depicts the efficiency of NHEJ mediated by a Cas9 molecule and exemplary gRNA molecules targeting three different regions of the BCL11A locus.

[0274] FIGS. 12A-12B depict detected deletion events resulting from co-transfection of exemplary gRNA molecules, BCL11A-2983W and BCL11A-2981W.

[0275] FIG. 12A depicts schematic of DNA sequence recognized by BCL11A-2983W and BCL11A-2981W, which flanks the putative erythroid enhancer elements.

[0276] FIG. 12B depicts sequenced deletion events from the TOPO cloning of the PCR using primers that flank the enhancer region. A product is obtained when a deletion event has taken place.

[0277] FIGS. 13A-13B depicts detected deletion events resulting from co-transfection of the exemplary gRNA molecules, BCL11A-2995W and BCL11A-2984W.

[0278] FIG. 13A depicts Schematic of DNA sequence recognized by BCL11A-2995W and BCL11A-2984W, which flanks the putative erythroid enhancer elements.

[0279] FIG. 13B depicts sequenced deletion events from the TOPO cloning of the PCR using primers that flank the enhancer region. A product is obtained when a deletion event has taken place.

[0280] FIG. 14 depicts a scheme of the pair 8/15 of gRNAs surrounding the sickle mutation in combination with a Cas9 nickase (D10A or N863A). The nickases are shown as the grey ovals.

[0281] FIG. 15 depicts the percentages of total editing event after a wildtype Cas9 or a Cas9 nickase (D10A or N863A). A preprentation of at least three independent experiments for each condition is shown.

[0282] FIG. 16A depicts the frequency of deletions a wildtype Cas9 or a Cas9 nickase (D10A or N863A). A representation of at least 3 independent experiments for each condition is shown.

[0283] FIG. 16B depicts the frequency distribution of the length of deletions using a wildtype Cas9 and gRNA 8 (similar results have been obtained with gRNA 15).

[0284] FIG. 16C depicts the frequency distribution of the length of deletions using a Cas9 nickase (D10A) with gRNAs 8/15 (similar results have been obtained using Cas9 N863A).

[0285] FIG. 17A depicts the frequency of gene conversion a wildtype Cas9 or a Cas9 nickase (D10A or N863A).

[0286] FIG. 17B shows a scheme representing the region of similarity between the HBB and HBD loci.

[0287] FIG. 18 depicts the frequency of different lengths of HBD sequences that were incorporated into the HBB locus.

[0288] FIG. 19A depicts the frequency of insertions using a wildtype Cas9 or a Cas9 nickase (D10A or N863A). A representation of at least three independent experiments for each condition is shown.

[0289] FIG. 19B depicts examples of common reads observed in U2OS cells electroporated with plasmid encoding Cas9 N863 and gRNA 8/15 pair. The HBB reference is shown on the top.

[0290] FIG. 20A is a schematic representation of the donor template.

[0291] FIG. 20B depicts the frequency of HDR using a wildtype Cas9 or a Cas9 nickase (D10A or N863A).

[0292] FIG. 20C depicts different forms of nonors and there contribution to HDR.

[0293] FIG. 21 depicts genome editing of the HBB locus in bone marrow leukemia K562 hematopoietic cells after electroporation of Cas9 protein complexed to HBB gRNAs 8 and 15 (RNP) or Cas9 mRNA co-delivered with HBB gRNAs 8 and 15 (RNA).

### DETAILED DESCRIPTION

[0294] Definitions

[0295] “Alt-HDR” or “alternative HDR”, or alternative homology-directed repair, as used herein, refers to the process of repairing DNA damage using a homologous nucleic acid (e.g., an endogenous homologous sequence, e.g., a sister chromatid, or an exogenous nucleic acid, e.g., a template nucleic acid). Alt-HDR is distinct from canonical HDR in that the process utilizes different pathways from canonical HDR, and can be inhibited by the canonical HDR mediators, RAD51 and BRCA2. Also, alt-HDR uses a single-stranded or nicked homologous nucleic acid for repair of the break.

[0296] “Canonical HDR”, or canonical homology-directed repair, as used herein, refers to the process of repairing DNA damage using a homologous nucleic acid (e.g., an endogenous homologous sequence, e.g., a sister chromatid, or an exogenous nucleic acid, e.g., a template nucleic acid). Canonical HDR typically acts when there has been significant resection at the double strand break, forming at least one single stranded portion of DNA. In a normal cell, HDR typically involves a series of steps such as recognition of the break, stabilization of the break, resection, stabilization of single stranded DNA, formation of a DNA crossover intermediate, resolution of the crossover intermediate, and ligation. The process requires RAD51 and BRCA2, and the homologous nucleic acid is typically double-stranded.

[0297] Unless indicated otherwise, the term “HDR” as used herein encompasses canonical HDR and alt-HDR.

[0298] “Domain”, as used herein, is used to describe segments of a protein or nucleic acid. Unless otherwise indicated, a domain is not required to have any specific functional property.

[0299] Calculations of homology or sequence identity between two sequences (the terms are used interchangeably herein) are performed as follows. The sequences are aligned for optimal comparison purposes (e.g., gaps can be introduced in one or both of a first and a second amino acid or nucleic acid sequence for optimal alignment and non-homologous sequences can be disregarded for comparison purposes). The optimal alignment is determined as the best score using the GAP program in the GCG software package with a Blossum 62 scoring matrix with a gap penalty of 12, a gap extend penalty of 4, and a frame shift gap penalty of 5. The amino acid residues or nucleotides at corresponding amino acid positions or nucleotide positions are then compared. When a position in the first sequence is occupied by the same amino acid residue or nucleotide as the corresponding position in the second sequence, then the molecules are identical at that position. The percent identity between the two sequences is a function of the number of identical positions shared by the sequences.

[0300] “Governing gRNA molecule”, as used herein, refers to a gRNA molecule that comprises a targeting domain that is complementary to a target domain on a nucleic acid that comprises a sequence that encodes a component of the CRISPR/Cas system that is introduced into a cell or subject. A governing gRNA does not target an endogenous cell or subject sequence. In an embodiment, a governing gRNA molecule comprises a targeting domain that is complementary with a target sequence on: (a) a nucleic acid that encodes a Cas9 molecule; (b) a nucleic acid that encodes a gRNA which comprises a targeting domain that targets the HBB or BCL11A gene (a target gene gRNA); or on more than one nucleic acid that encodes a CRISPR/Cas component, e.g., both (a) and (b). In an embodiment, a nucleic acid molecule that encodes a CRISPR/Cas component, e.g., that encodes a Cas9 molecule or a target gene gRNA, comprises more than one target domain that is complementary with a governing gRNA targeting domain. While not wishing to be bound by theory, it is believed that a governing gRNA molecule complexes with a Cas9 molecule and results in Cas9 mediated inactivation of the targeted nucleic acid, e.g., by cleavage or by binding to the nucleic acid, and results in cessation or reduction of the production of a CRISPR/Cas system component. In an embodiment, the Cas9 molecule forms two complexes: a complex comprising a Cas9 molecule with a target gene gRNA, which complex will alter the HBB or BCL11A gene; and a complex comprising a Cas9 molecule with a governing gRNA molecule, which complex will act to prevent further production of a CRISPR/Cas system component, e.g., a Cas9 molecule or a target gene gRNA molecule. In an embodiment, a governing gRNA molecule/Cas9 molecule complex binds to or promotes cleavage of a control region sequence, e.g., a promoter, operably linked to a sequence that encodes a Cas9 molecule, a sequence that encodes a transcribed region, an exon, or an intron, for the Cas9 molecule. In an embodiment, a governing gRNA molecule/Cas9 molecule complex binds to or promotes cleavage of a control region sequence, e.g., a promoter, operably linked to a gRNA molecule, or a sequence that encodes the gRNA molecule. In an embodiment, the governing gRNA, e.g., a Cas9-targeting governing gRNA molecule, or a target gene gRNA-targeting governing gRNA molecule, limits the effect of the Cas9 molecule/target gene gRNA molecule complex-mediated gene targeting. In an embodiment, a governing gRNA places temporal, level of expression, or other limits, on activity of the Cas9 molecule/target gene gRNA molecule complex. In an embodiment, a governing gRNA reduces off-target or other unwanted activity. In an embodiment, a governing gRNA molecule inhibits, e.g., entirely or substantially entirely inhibits, the production of a component of the Cas9 system and thereby limits, or governs, its activity.

[0301] “Modulator”, as used herein, refers to an entity, e.g., a drug, that can alter the activity (e.g., enzymatic activity, transcriptional activity, or translational activity), amount, distribution, or structure of a subject molecule or genetic sequence. In an embodiment, modulation comprises cleavage, e.g., breaking of a covalent or non-covalent bond, or the forming of a covalent or non-covalent bond, e.g., the attachment of a moiety, to the subject molecule. In an embodiment, a modulator alters the, three dimensional, secondary, tertiary, or quaternary structure, of a subject molecule. A modulator can increase, decrease, initiate, or eliminate a subject activity.

[0302] “Large molecule”, as used herein, refers to a molecule having a molecular weight of at least 2, 3, 5, 10, 20, 30, 40, 50, 60, 70, 80, 90, or 100 kD. Large molecules include proteins, polypeptides, nucleic acids, biologics, and carbohydrates.

[0303] A “polypeptide”, as used herein, refers to a polymer of amino acids having less than 100 amino acid residues. In an embodiment, it has less than 50, 20, or 10 amino acid residues.

[0304] “Non-homologous end joining” or “NHEJ”, as used herein, refers to ligation mediated repair and/or non-template mediated repair including canonical NHEJ (cNHEJ), alternative NHEJ (altNHEJ), microhomology-mediated end joining (MMEJ), single-strand annealing (SSA), and synthesis-dependent microhomology-mediated end joining (SD-MMEJ).

[0305] A “reference molecule”, e.g., a reference Cas9 molecule or reference gRNA, as used herein, refers to a molecule to which a subject molecule, e.g., a subject Cas9 molecule of subject gRNA molecule, e.g., a modified or candidate Cas9 molecule is compared. For example, a Cas9 molecule can be characterized as having no more than 10% of the nuclease activity of a reference Cas9 molecule. Examples of reference Cas9 molecules include naturally occurring unmodified Cas9 molecules, e.g., a naturally occurring Cas9 molecule such as a Cas9 molecule of S. pyogenes, S. aureus or S. thermophilus. In an embodiment, the reference Cas9 molecule is the naturally occurring Cas9 molecule having the closest sequence identity or homology with the Cas9 molecule to which it is being compared. In an embodiment, the reference Cas9 molecule is a sequence, e.g., a naturally occurring or known sequence, which is the parental form on which a change, e.g., a mutation has been made.

[0306] “Replacement”, or “replaced”, as used herein with reference to a modification of a molecule does not require a process limitation but merely indicates that the replacement entity is present.

[0307] “Small molecule”, as used herein, refers to a compound having a molecular weight less than about 2 kD, e.g., less than about 2 kD, less than about 1.5 kD, less than about 1 kD, or less than about 0.75 kD.

[0308] “Subject”, as used herein, may mean either a human or non-human animal. The term includes, but is not limited to, mammals (e.g., humans, other primates, pigs, rodents (e.g., mice and rats or hamsters), rabbits, guinea pigs, cows, horses, cats, dogs, sheep, and goats). In an embodiment, the subject is a human. In another embodiment, the subject is poultry.

[0309] “Treat”, “treating” and “treatment”, as used herein, mean the treatment of a disease in a mammal, e.g., in a human, including (a) inhibiting the disease, i.e., arresting or preventing its development; (b) relieving the disease, i.e., causing regression of the disease state; and (c) curing the disease.

[0310] “Prevent”, “preventing” and “prevention”, as used herein, means the prevention of a disease in a mammal, e.g., in a human, including (a) avoiding or precluding the disease; (2) affecting the predisposition toward the disease, e.g., preventing at least one symptom of the disease or to delay onset of at least one symptom of the disease.

[0311] “X” as used herein in the context of an amino acid sequence, refers to any amino acid (e.g., any of the twenty natural amino acids) unless otherwise specified.

[0312] Methods of Repairing Mutation(s) in the HBB Gene

[0313] One approach to treat or prevent SCD is to repair (i.e., correct) one or more mutations in the HBB gene, e.g., by HDR. In this approach, mutant HBB allele(s) are corrected and restored to wild type state. While not wishing to be bound by theory, it is believed that correction of the glutamic acid to valine substitution at amino acid 6 in the beta-globin gene restores wild type beta-globin production within erythroid cells. The method described herein can be performed in all cell types. Beta-globin is expressed in cells of erythroid cell lineage. In an embodiment, an erythroid cell is targeted.

[0314] In an embodiment, one HBB allele is repaired in the subject. In another embodiment, both HBB alleles are repaired in the subject. In either situation, the subject can be cured of disease. As the disease only displays a phenotype when both alleles are mutated, repair of a single allele is adequate for a cure.

[0315] In one aspect, methods and compositions discussed herein, provide for the correction of the underlying genetic cause of SCD, e.g., the correction of a mutation at a target position in the HBB gene, e.g., correction of a mutation at amino acid position 6, e.g., an E6V substitution in the HBB gene.

[0316] In an embodiment, the method provides for the correction of a mutation at a target position in the HBB gene, e.g., correction of a mutation at amino acid position 6, e.g., an E6V substitution in the HBB gene. As described herein, in one embodiment, the method comprises the introduction of one or more breaks (e.g., single strand breaks or double strand breaks) sufficiently close to (e.g., either 5′ or 3′ to) the target position in the HBB gene. e.g., E6V.

[0317] In an embodiment, the targeting domain of the gRNA molecule is configured to provide a cleavage event, e.g., a double strand break or a single strand break, sufficiently close to (e.g., either 5′ or 3′ to) the target position in the HBB gene, e.g., E6V to allow correction, e.g., an alteration in the HBB gene, e.g., an alternation associated with HDR. In an embodiment, the targeting domain is configured such that a cleavage event, e.g., a double strand or single strand break, is positioned within 1, 2, 3, 4, 5, 10, 15, 20, 25, 30, 35, 40, 45, 50, 60, 70, 80, 90, 100, 150, 200, 250, 300, 350, 400, 450 or 500 nucleotides of a the target position in the HBB gene, e.g., E6V. The break, e.g., a double strand or single strand break, can be positioned upstream or downstream of the target position in the HBB gene, e.g., E6V.

[0318] In an embodiment, a second, third and/or fourth gRNA molecule is configured to provide a cleavage event, e.g., a double strand break or a single strand break, sufficiently close to (e.g., either 5′ or 3′ to) the target position in the HBB gene, e.g., E6V to allow correction, e.g., an alteration associated with HDR in the HBB gene. In an embodiment, the targeting domain is configured such that a cleavage event, e.g., a double strand or single strand break, is positioned within 1, 2, 3, 4, 5, 10, 15, 20, 25, 30, 35, 40, 45, 50, 60, 70, 80, 90, 100, 150, 200, 250, 300, 350, 400, 450 or 500 nucleotides of a the target position in the HBB gene, e.g., E6V. The break, e.g., a double strand or single strand break, can be positioned upstream or downstream of the target position in the HBB gene, e.g., E6V.

[0319] In an embodiment, a single strand break is accompanied by an additional single strand break, positioned by a second, third and/or fourth gRNA molecule, as discussed below. For example, The targeting domains bind configured such that a cleavage event, e.g., the two single strand breaks, are positioned within 1, 2, 3, 4, 5, 10, 15, 20, 25, 30, 35, 40, 45, 50, 60, 70, 80, 90, 100, 150, 200, 250, 300, 350, 400, 450 or 500 nucleotides of the target position in the HBB gene, e.g., E6V. In an embodiment, the first and second gRNA molecules are configured such, that when guiding a Cas9 nickase, a single strand break will be accompanied by an additional single strand break, positioned by a second gRNA, sufficiently close to one another to result in an alteration of the target position in the HBB gene, e.g., E6V. In an embodiment, the first and second gRNA molecules are configured such that a single strand break positioned by said second gRNA is within 10, 20, 30, 40, or 50 nucleotides of the break positioned by said first gRNA molecule, e.g., when the Cas9 is a nickase. In an embodiment, the two gRNA molecules are configured to position cuts at the same position, or within a few nucleotides of one another, on different strands, e.g., essentially mimicking a double strand break.

[0320] In an embodiment, a double strand break can be accompanied by an additional double strand break, positioned by a second, third and/or fourth gRNA molecule, as is discussed below. For example, the targeting domain of a first gRNA molecule is configured such that a double strand break is positioned upstream of the target position in the HBB gene, e.g., E6V, e.g., within 1, 2, 3, 4, 5, 10, 15, 20, 25, 30, 35, 40, 45, 50, 60, 70, 80, 90, 100, 150, 200, 250, 300, 350, 400, 450 or 500 nucleotides of the target position; and the targeting domain of a second gRNA molecule is configured such that a double strand break is positioned downstream the target position in the HBB gene, e.g., E6V, e.g., within 1, 2, 3, 4, 5, 10, 15, 20, 25, 30, 35, 40, 45, 50, 60, 70, 80, 90, 100, 150, 200, 250, 300, 350, 400, 450 or 500 nucleotides of the target position.

[0321] In an embodiment, a double strand break can be accompanied by two additional single strand breaks, positioned by a second gRNA molecule and a third gRNA molecule. For example, the targeting domain of a first gRNA molecule is configured such that a double strand break is positioned upstream of the target position in the HBB gene, e.g., E6V, e.g., within 1, 2, 3, 4, 5, 10, 15, 20, 25, 30, 35, 40, 45, 50, 60, 70, 80, 90, 100, 150, 200, 250, 300, 350, 400, 450 or 500 nucleotides of the target position; and the targeting domains of a second and third gRNA molecule are configured such that two single strand breaks are positioned downstream of the target position in the HBB gene, e.g., E6V, e.g., within 1, 2, 3, 4, 5, 10, 15, 20, 25, 30, 35, 40, 45, 50, 60, 70, 80, 90, 100, 150, 200, 250, 300, 350, 400, 450 or 500 nucleotides of the target position. In an embodiment, the targeting domain of the first, second and third gRNA molecules are configured such that a cleavage event, e.g., a double strand or single strand break, is positioned, independently for each of the gRNA molecules.

[0322] In an embodiment, a first and second single strand breaks can be accompanied by two additional single strand breaks positioned by a third gRNA molecule and a fourth gRNA molecule. For example, the targeting domain of a first and second gRNA molecule are configured such that two single strand breaks are positioned upstream of the target position in the HBB gene. e.g., E6V, e.g., within 1, 2, 3, 4, 5, 10, 15, 20, 25, 30, 35, 40, 45, 50, 60, 70, 80, 90, 100, 150, 200, 250, 300, 350, 400, 450 or 500 nucleotides of the target position in the HBB gene, e.g., E6V; and the targeting domains of a third and fourth gRNA molecule are configured such that two single strand breaks are positioned downstream of the target position in the HBB gene, e.g., E6V, e.g., within 1, 2, 3, 4, 5, 10, 15, 20, 25, 30, 35, 40, 45, 50, 60, 70, 80, 90, 100, 150, 200, 250, 300, 350, 400, 450 or 500 nucleotides of the target position in the HBB gene, e.g., E6V.

[0323] In an embodiment, a mutation in the HBB gene, e.g., E6V is corrected using an exogenously provided template nucleic acid, e.g., by HDR. In another embodiment, a mutation in the HBB gene. e.g., E6V is corrected without using an exogenously provided template nucleic acid, e.g., by HDR. In an embodiment, alteration of the target sequence occurs with an endogenous genomic donor sequence, e.g., by HDR. In an embodiment, the endogenous genomic donor sequence comprises one or more nucleotides derived from the HBD gene. In an embodiment, a mutation in the HBB gene, e.g., E6V is corrected by an endogenous genomic donor sequence (e.g, an HBD gene). In an embodiment, an eaCas9 molecule, e.g., an eaCas9 molecule described herein, is used. In an embodiment, the eaCas9 molecule comprises HNH-like domain cleavage activity but has no, or no significant, N-terminal RuvC-like domain cleavage activity. In an embodiment, the eaCas9 molecule is an HNH-like domain nickase. In an embodiment, the eaCas9 molecule comprises a mutation at D10 (e.g., D10A). In an embodiment, the eaCas9 molecule comprises N-terminal RuvC-like domain cleavage activity but has no, or no significant, HNH-like domain cleavage activity. In an embodiment, the eaCas9 molecule is an N-terminal RuvC-like domain nickase. In an embodiment, the eaCas9 molecule comprises a mutation at H840 (e.g., H840A) or N863 (e.g., N863A).

[0324] Methods of Altering BCL11A

[0325] One approach to increase the expression of HbF involves identification of genes whose products play a role in the regulation of globin gene expression. One such gene is BCL11A. It plays a role in the regulation of y globin expression. It was first identified because of its role in lymphocyte development. BCL11A encodes a zinc finger protein that is thought to be involved in the stage specific regulation of y globin expression. The BCL11A gene product is expressed in adult erythroid precursor cells and down-regulation of its expression leads to an increase in γ globin expression. In addition, it appears that the splicing of the BCL11A mRNA is developmentally regulated. In embryonic cells, it appears that the shorter BCL11A mRNA variants, known as BCL11A-S and BCL11A-XS are primary expressed, while in adult cells, the longer BCL11A-L and BCL11A-XL mRNA variants are predominantly expressed. See, Sankaran et al (2008) Science 322 p. 1839. The BCL11A protein appears to interact with the β globin locus to alter its conformation and thus its expression at different developmental stages. Thus, if BCL11A expression is altered e.g., disrupted (e.g., reduced or eliminated), it results in the elevation of γ globin and HbF production.

[0326] Disclosed herein are methods for altering the SCD target position in the BCL11A gene. Altering the SCD target position is achieved, e.g., by:

[0327] (1) knocking out the BCL11A gene:
[0328] (a) insertion or deletion (e.g., NHEJ-mediated insertion or deletion) of one or more nucleotides in close proximity to or within the early coding region of the BCL11A gene, or
[0329] (b) deletion (e.g., NHEJ-mediated deletion) of a genomic sequence including the erythroid enhancer of the BCL11A gene, or

[0330] (2) knocking down the BCL11A gene mediated by enzymatically inactive Cas9 (eiCas9) molecule or an eiCas9-fusion protein by targeting the promoter region of the gene.

[0331] All approaches give rise to alteration of the BCL11A gene.

[0332] In one embodiment, methods described herein introduce one or more breaks near the early coding region in at least one allele of the BCL11A gene. In another embodiment, methods described herein introduce two or more breaks to flank the erythroid enhancer of SCD target knockout position. The two or more breaks remove (e.g., delete) genomic sequence including the erythorid enhancer. In another embodiment, methods described herein comprises knocking down the BCL11A gene mediated by enzymatically inactive Cas9 (eiCas9) molecule or an eiCas9-fusion protein by targeting the promoter region of SCD target knockdown position. All methods described herein result in alteration of the BCL11A gene.

[0333] NHEJ-Mediated Introduction of an Indel in Close Proximity to or within the Early Coding Region of the SCD Knockout Position

[0334] In an embodiment, the method comprises introducing a NHEJ-mediated insertion or deletion of one more nucleotides in close proximity to the SCD target knockout position (e.g., the early coding region) of the BCL11A gene. As described herein, in one embodiment, the method comprises the introduction of one or more breaks (e.g., single strand breaks or double strand breaks) sufficiently close to (e.g., either 5′ or 3′ to) the early coding region of the SCD target knockout position, such that the break-induced indel could be reasonably expected to span the SCD target knockout position (e.g., the early coding region). While not wishing to be bound by theory, it is believed that NHEJ-mediated repair of the break(s) allows for the NHEJ-mediated introduction of an indel in close proximity to within the early coding region of the SCD target knockout position.

[0335] In an embodiment, the targeting domain of the gRNA molecule is configured to provide a cleavage event, e.g., a double strand break or a single strand break, sufficiently close to the early coding region in the BCL11A gene to allow alteration, e.g., alteration associated with NHEJ in the BCL11A gene. In an embodiment, the targeting domain is configured such that a cleavage event, e.g., a double strand or single strand break, is positioned within 1, 2, 3, 4, 5, 10, 15, 20, 25, 30, 35, 40, 45, 50, 60, 70, 80, 90, 100, 150, 200, 250, 300, 350, 400, 450 or 500 nucleotides of a SCD target knockout position. The break, e.g., a double strand or single strand break, can be positioned upstream or downstream of a SCD target knockout position in the BCL11A gene.

[0336] In an embodiment, a second gRNA molecule comprising a second targeting domain is configured to provide a cleavage event, e.g., a double strand break or a single strand break, sufficiently close to the early coding region in the BCL11A gene, to allow alteration, e.g., alteration associated with NHEJ in the BCL11A gene, either alone or in combination with the break positioned by said first gRNA molecule. In an embodiment, the targeting domains of the first and second gRNA molecules are configured such that a cleavage event, e.g., a double strand or single strand break, is positioned, independently for each of the gRNA molecules, within 1, 2, 3, 4, 5, 10, 15, 20, 25, 30, 35, 40, 45, 50, 60, 70, 80, 90, 100, 150, 200, 250, 300, 350, 400, 450 or 500 nucleotides of the target position. In an embodiment, the breaks, e.g., double strand or single strand breaks, are positioned on both sides of a nucleotide of a SCD target knockout position in the BCL11A gene. In an embodiment, the breaks, e.g., double strand or single strand breaks, are positioned on one side, e.g., upstream or downstream, of a nucleotide of a SCD target knockout position in the BCL11A gene.

[0337] In an embodiment, a single strand break is accompanied by an additional single strand break, positioned by a second gRNA molecule, as discussed below. For example, The targeting domains bind configured such that a cleavage event, e.g., the two single strand breaks, are positioned within 1, 2, 3, 4, 5, 10, 15, 20, 25, 30, 35, 40, 45, 50, 60, 70, 80, 90, 100, 150, 200, 250, 300, 350, 400, 450 or 500 nucleotides of the early coding region in the BCL11A gene. In an embodiment, the first and second gRNA molecules are configured such, that when guiding a Cas9 nickase, a single strand break will be accompanied by an additional single strand break, positioned by a second gRNA, sufficiently close to one another to result in alteration of the early coding region in the BCL11A gene. In an embodiment, the first and second gRNA molecules are configured such that a single strand break positioned by said second gRNA is within 10, 20, 30, 40, or 50 nucleotides of the break positioned by said first gRNA molecule, e.g., when the Cas9 is a nickase. In an embodiment, the two gRNA molecules are configured to position cuts at the same position, or within a few nucleotides of one another, on different strands, e.g., essentially mimicking a double strand break.

[0338] In an embodiment, a double strand break can be accompanied by an additional double strand break, positioned by a second gRNA molecule, as is discussed below. For example, the targeting domain of a first gRNA molecule is configured such that a double strand break is positioned upstream of the early coding region in the BCL11A gene, e.g., within 1, 2, 3, 4, 5, 10, 15, 20, 25, 30, 35, 40, 45, 50, 60, 70, 80, 90, 100, 150, 200, 250, 300, 350, 400, 450 or 500 nucleotides of the target position; and the targeting domain of a second gRNA molecule is configured such that a double strand break is positioned downstream of the early coding region in the BCL11A gene, e.g., within 1, 2, 3, 4, 5, 10, 15, 20, 25, 30, 35, 40, 45, 50, 60, 70, 80, 90, 100, 150, 200, 250, 300, 350, 400, 450 or 500 nucleotides of the target position.

[0339] In an embodiment, a double strand break can be accompanied by two additional single strand breaks, positioned by a second gRNA molecule and a third gRNA molecule. For example, the targeting domain of a first gRNA molecule is configured such that a double strand break is positioned upstream of the early coding region in the BCL11A gene, e.g., within 1, 2, 3, 4, 5, 10, 15, 20, 25, 30, 35, 40, 45, 50, 60, 70, 80, 90, 100, 150, 200, 250, 300, 350, 400, 450 or 500 nucleotides of the target position; and the targeting domains of a second and third gRNA molecule are configured such that two single strand breaks are positioned downstream of the early coding region in the BCL11A gene, e.g., within 1, 2, 3, 4, 5, 10, 15, 20, 25, 30, 35, 40, 45, 50, 60, 70, 80, 90, 100, 150, 200, 250, 300, 350, 400, 450 or 500 nucleotides of the target position. In an embodiment, the targeting domain of the first, second and third gRNA molecules are configured such that a cleavage event, e.g., a double strand or single strand break, is positioned, independently for each of the gRNA molecules.

[0340] In an embodiment, a first and second single strand breaks can be accompanied by two additional single strand breaks positioned by a third gRNA molecule and a fourth gRNA molecule. For example, the targeting domain of a first and second gRNA molecule are configured such that two single strand breaks are positioned upstream of the early coding region in the BCL11A gene, e.g., within 1, 2, 3, 4, 5, 10, 15, 20, 25, 30, 35, 40, 45, 50, 60, 70, 80, 90, 100, 150, 200, 250, 300, 350, 400, 450 or 500 nucleotides of the early coding region in the BCL11A gene; and the targeting domains of a third and fourth gRNA molecule are configured such that two single strand breaks are positioned downstream of a SCD target knockout position in the early coding region in the BCL11A gene, e.g., within 1, 2, 3, 4, 5, 10, 15, 20, 25, 30, 35, 40, 45, 50, 60, 70, 80, 90, 100, 150, 200, 250, 300, 350, 400, 450 or 500 nucleotides of the early coding region in the BCL11A gene.

[0341] NHEJ-Mediated Deletion of the Erythroid Enhancer at the SCD Target Position

[0342] In an embodiment, the method comprises introducing a NHEJ-mediated deletion of a genomic sequence including the erythroid enhancer. As described herein, in one embodiment, the method comprises the introduction of two double strand breaks—one 5′ and the other 3′ to (i.e., flanking) the SCD target position (e.g., the erythroid enhancer). Two gRNAs, e.g., unimolecular (or chimeric) or modular gRNA molecules, are configured to position the two double strand breaks on opposite sides of the SCD target knockdown position (e.g., the erythroid enhancer) in the BCL11A gene. In an embodiment, the first double strand break is positioned upstream of the the erythroid enhancer within intron 2 (e.g., between TSS+0.75 kb to TSS+52.0 kb), and the second double strand break is positioned downstream of the the erythroid enhancer within intron 2 (e.g., between TSS+64.4 kb to TSS+84.7 kb) (see FIG. 10). In an embodiment, the two double strand breaks are positioned to remove a portion of the erythroid enhancer resulting in disruption of one or more DHSs. In an embodiment, the breaks (i.e., the two double strand breaks) are positioned to avoid unwanted target chromosome elements, such as repeat elements, e.g., an Alu repeat, or the endogenous splice sites.

[0343] The first double strand break may be positioned as follows:
[0344] (1) upstream of the 5′ end of the erythroid enhancer in intron 2 (e.g., between TSS+0.75 kb to TSS+52.0 kb), or
[0345] (2) within the erythroid enhancer provided that a portion of the erythroid enhancer is removed resulting in disruption of one or more DHSs (e.g., between TSS+52.0 kb to TSS+64.4 kb),
   and the second double strand break to be paired with the first double strand break may be positioned as follows:
[0346] (1) downstream the 3′ end of the erythroid enhancer in intron 2 (e.g., between TSS+64.4 kb to TSS+84.7 kb), or
[0347] (2) within the erythroid enhancer provided that a portion of the erythroid enhancer is removed resulting in disruption of one or more DHSs (e.g., between TSS+52.0 kb to TSS+64.4 kb).

[0348] For example, the first double strand break may be positioned in the BCL11A gene:

[0349] (1) between TSS+0.75 kb to TSS+10 kb,

[0350] (2) between TSS+10 kb to TSS+20 kb,

[0351] (3) between TSS+20 kb to TSS+30 kb,

[0352] (4) between TSS+30 kb to TSS+40 kb,

[0353] (5) between TSS+40 kb to TSS+45 kb,

[0354] (6) between TSS+45 kb to TSS+47.5 kb,

[0355] (7) between TSS+47.5 kb to TSS+50 kb,

[0356] (8) between TSS+50 kb to TSS+51 kb,

[0357] (9) between TSS+51 kb to TSS+51.1 kb,

[0358] (10) between TSS+51.1 kb to TSS+51.2 kb,

[0359] (11) between TSS+51.2 kb to TSS+51.3 kb,

[0360] (12) between TSS+51.3 kb to TSS+51.4 kb,

[0361] (13) between TSS+51.4 kb to TSS+51.5 kb,

[0362] (14) between TSS+51.5 kb to TSS+51.6 kb,

[0363] (15) between TSS+51.6 kb to TSS+51.7 kb,

[0364] (16) between TSS+51.7 kb to TSS+51.8 kb,

[0365] (17) between TSS+51.8 kb to TSS+51.9 kb,

[0366] (18) between TSS+51.9 kb to TSS+52 kb,

[0367] (19) between TSS+52 kb to TSS+53 kb,

[0368] (20) between TSS+53 kb to TSS+54 kb,

[0369] (21) between TSS+54 kb to TSS+55 kb,

[0370] (22) between TSS+55 kb to TSS+56 kb,

[0371] (23) between TSS+56 kb to TSS+57 kb,

[0372] (24) between TSS+57 kb to TSS+58 kb,

[0373] (25) between TSS+58 kb to TSS+59 kb,

[0374] (26) between TSS+59 kb to TSS+60 kb,

[0375] (27) between TSS+60 kb to TSS+61 kb,

[0376] (28) between TSS+61 kb to TSS+62 kb,

[0377] (29) between TSS+62 kb to TSS+63 kb,

[0378] (30) between TSS+63 kb to TSS+64 kb, or

[0379] (31) between TSS+64 kb to TSS+64.4 kb,

and the second double strand break to be paired with the first double strand break may be positioned in the BCL11A gene:

[0380] (1) between TSS+52 kb to TSS+53 kb,

[0381] (2) between TSS+53 kb to TSS+54 kb,

[0382] (3) between TSS+54 kb to TSS+55 kb,

[0383] (4) between TSS+55 kb to TSS+56 kb,

[0384] (5) between TSS+56 kb to TSS+57 kb,

[0385] (6) between TSS+57 kb to TSS+58 kb,

[0386] (7) between TSS+58 kb to TSS+59 kb,

[0387] (8) between TSS+59 kb to TSS+60 kb,

[0388] (9) between TSS+60 kb to TSS+61 kb,

[0389] (10) between TSS+61 kb to TSS+62 kb,

[0390] (11) between TSS+62 kb to TSS+63 kb,

[0391] (12) between TSS+63 kb to TSS+64 kb,

[0392] (13) between TSS+64 kb to TSS+64.4 kb,

[0393] (14) between TSS+64.4 kb to TSS+65 kb,

[0394] (15) between TSS+65 kb to TSS+65.1 kb,

[0395] (16) between TSS+65.1 kb to TSS+65.2 kb,

[0396] (17) between TSS+65.2 kb to TSS+65.3 kb,

[0397] (18) between TSS+65.3 kb to TSS+65.4 kb,

[0398] (19) between TSS+65.4 kb to TSS+65.5 kb,

[0399] (20) between TSS+65.5 kb to TSS+65.7 kb,

[0400] (21) between TSS+65.7 kb to TSS+65.8 kb,

[0401] (22) between TSS+65.8 kb to TSS+65.9 kb,

[0402] (23) between TSS+65.9 kb to TSS+66 kb,

[0403] (24) between TSS+66 kb to TSS+67 kb,

[0404] (25) between TSS+67 kb to TSS+68 kb,

[0405] (26) between TSS+68 kb to TSS+69 kb,

[0406] (27) between TSS+69 kb to TSS+70 kb,

[0407] (28) between TSS+70 kb to TSS+75 kb,

[0408] (29) between TSS+75 kb to TSS+80 kb, or

[0409] (30) between TSS+80 kb to TSS+84.4 kb.

[0410] While not wishing to be bound by theory, it is believed that the two double strand breaks allow for NHEJ-mediated deletion of erythroid enhancer in the BCL11A gene.

[0411] In an embodiment, the method comprises introducing a NHEJ-mediated deletion of a genomic sequence including the erythroid enhancer. As described herein, in one embodiment, the method comprises the introduction of two sets of breaks (e.g., one double strand break and a pair of single strand breaks)—one 5′ and the other 3′ to (i.e., flanking) the SCD target position (e.g., the erythroid enhancer). Two gRNAs, e.g., unimolecular (or chimeric) or modular gRNA molecules, are configured to position the two sets of breaks (either the double strand break or the pair of single strand breaks) on opposite sides of the SCD target knockdown position (e.g., the erythroid enhancer) in the BCL11A gene. In an embodiment, the first set of breaks (either the double strand break or the pair of single strand breaks) is positioned upstream of the the erythroid enhancer within intron 2 (e.g., between TSS+0.75 kb to TSS+52.0 kb), and the second set of breaks (either the double strand break or the pair of single strand breaks) is positioned downstream of the the erythroid enhancer within intron 2 (e.g., between TSS+64.4 kb to TSS+84.7 kb) (see FIG. 10). In an embodiment, the two sets of breaks (either the double strand break or the pair of single strand breaks) are positioned to remove a portion of the erythroid enhancer resulting in disruption of one or more DHSs. In an embodiment, the breaks (i.e., the two sets of breaks (either the double strand break or the pair of single strand breaks)) are positioned to avoid unwanted target chromosome elements, such as repeat elements, e.g., an Alu repeat, or the endogenous splice sites.

[0412] The first set of breaks (either the double strand break or the pair of single strand breaks) may be positioned as follows:
[0413] (1) upstream of the 5′ end of the erythroid enhancer in intron 2 (e.g., between TSS+0.75 kb to TSS+52.0 kb), or
[0414] (2) within the erythroid enhancer provided that a portion of the erythroid enhancer is removed resulting in disruption of one or more DHSs (e.g., between TSS+52.0 kb to TSS+64.4 kb),
   and the second set of breaks (either the double strand break or the pair of single strand breaks) to be paired with the first set of breaks (either the double strand break or the pair of single strand breaks) may be positioned as follows:
[0415] (1) downstream the 3′ end of the erythroid enhancer in intron 2 (e.g., between TSS+64.4 kb to TSS+84.7 kb), or
[0416] (2) within the erythroid enhancer provided that a portion of the erythroid enhancer is removed resulting in disruption of one or more DHSs (e.g., between TSS+52.0 kb to TSS+64.4 kb).

[0417] For example, the first set of breaks (either the double strand break or the pair of single strand breaks) may be positioned in the BCL11A gene:

[0418] (1) between TSS+0.75 kb to TSS+10 kb,

[0419] (2) between TSS+10 kb to TSS+20 kb,

[0420] (3) between TSS+20 kb to TSS+30 kb,

[0421] (4) between TSS+30 kb to TSS+40 kb,

[0422] (5) between TSS+40 kb to TSS+45 kb,

[0423] (6) between TSS+45 kb to TSS+47.5 kb,

[0424] (7) between TSS+47.5 kb to TSS+50 kb,

[0425] (8) between TSS+50 kb to TSS+51 kb,

[0426] (9) between TSS+51 kb to TSS+51.1 kb,

[0427] (10) between TSS+51.1 kb to TSS+51.2 kb,

[0428] (11) between TSS+51.2 kb to TSS+51.3 kb,

[0429] (12) between TSS+51.3 kb to TSS+51.4 kb,

[0430] (13) between TSS+51.4 kb to TSS+51.5 kb,

[0431] (14) between TSS+51.5 kb to TSS+51.6 kb,

[0432] (15) between TSS+51.6 kb to TSS+51.7 kb,

[0433] (16) between TSS+51.7 kb to TSS+51.8 kb,

[0434] (17) between TSS+51.8 kb to TSS+51.9 kb,

[0435] (18) between TSS+51.9 kb to TSS+52 kb,

[0436] (19) between TSS+52 kb to TSS+53 kb,

[0437] (20) between TSS+53 kb to TSS+54 kb,

[0438] (21) between TSS+54 kb to TSS+55 kb,

[0439] (22) between TSS+55 kb to TSS+56 kb,

[0440] (23) between TSS+56 kb to TSS+57 kb,

[0441] (24) between TSS+57 kb to TSS+58 kb,

[0442] (25) between TSS+58 kb to TSS+59 kb,

[0443] (26) between TSS+59 kb to TSS+60 kb,

[0444] (27) between TSS+60 kb to TSS+61 kb,

[0445] (28) between TSS+61 kb to TSS+62 kb,

[0446] (29) between TSS+62 kb to TSS+63 kb,

[0447] (30) between TSS+63 kb to TSS+64 kb, or

[0448] (31) between TSS+64 kb to TSS+64.4 kb,

and the second set of breaks (either the double strand break or the pair of single strand breaks) to be paired with the first set of breaks (either the double strand break or the pair of single strand breaks) may be positioned in the BCL11A gene:

[0449] (1) between TSS+52 kb to TSS+53 kb,

[0450] (2) between TSS+53 kb to TSS+54 kb,

[0451] (3) between TSS+54 kb to TSS+55 kb,

[0452] (4) between TSS+55 kb to TSS+56 kb,

[0453] (5) between TSS+56 kb to TSS+57 kb,

[0454] (6) between TSS+57 kb to TSS+58 kb,

[0455] (7) between TSS+58 kb to TSS+59 kb,

[0456] (8) between TSS+59 kb to TSS+60 kb,

[0457] (9) between TSS+60 kb to TSS+61 kb,

[0458] (10) between TSS+61 kb to TSS+62 kb,

[0459] (11) between TSS+62 kb to TSS+63 kb,

[0460] (12) between TSS+63 kb to TSS+64 kb,

[0461] (13) between TSS+64 kb to TSS+64.4 kb,

[0462] (14) between TSS+64.4 kb to TSS+65 kb,

[0463] (15) between TSS+65 kb to TSS+65.1 kb,

[0464] (16) between TSS+65.1 kb to TSS+65.2 kb,

[0465] (17) between TSS+65.2 kb to TSS+65.3 kb,

[0466] (18) between TSS+65.3 kb to TSS+65.4 kb,

[0467] (19) between TSS+65.4 kb to TSS+65.5 kb,

[0468] (20) between TSS+65.5 kb to TSS+65.7 kb,

[0469] (21) between TSS+65.7 kb to TSS+65.8 kb,

[0470] (22) between TSS+65.8 kb to TSS+65.9 kb,

[0471] (23) between TSS+65.9 kb to TSS+66 kb,

[0472] (24) between TSS+66 kb to TSS+67 kb,

[0473] (25) between TSS+67 kb to TSS+68 kb,

[0474] (26) between TSS+68 kb to TSS+69 kb,

[0475] (27) between TSS+69 kb to TSS+70 kb,

[0476] (28) between TSS+70 kb to TSS+75 kb,

[0477] (29) between TSS+75 kb to TSS+80 kb, or

[0478] (30) between TSS+80 kb to TSS+84.4 kb.

[0479] While not wishing to be bound by theory, it is believed that the two sets of breaks (either the double strand break or the pair of single strand breaks) allow for NHEJ-mediated deletion of erythroid enhancer in the BCL11A gene.

[0480] In an embodiment, the method comprises introducing a NHEJ-mediated deletion of a genomic sequence including the erythroid enhancer. As described herein, in one embodiment, the method comprises the introduction of two sets of breaks (e.g., two pairs of single strand breaks)—one 5′ and the other 3′ to (i.e., flanking) the SCD target position (e.g., the erythroid enhancer). Two gRNAs, e.g., unimolecular (or chimeric) or modular gRNA molecules, are configured to position the two sets of breaks on opposite sides of the SCD target knockdown position (e.g., the erythroid enhancer) in the BCL11A gene. In an embodiment, the first set of breaks (i.e., the first pair of single strand breaks) is positioned upstream of the the erythroid enhancer within intron 2 (e.g., between TSS+0.75 kb to TSS+52.0 kb), and the second set of breaks (i.e., the second pair of single strand breaks) is positioned downstream of the the erythroid enhancer within intron 2 (e.g., between TSS+64.4 kb to TSS+84.7 kb) (see FIG. 10). In an embodiment, the two sets of breaks (e.g., two pairs of single strand breaks)) are positioned to remove a portion of the erythroid enhancer resulting in disruption of one or more DHSs. In an embodiment, the breaks (i.e., the two pairs of single strand breaks) are positioned to avoid unwanted target chromosome elements, such as repeat elements, e.g., an Alu repeat, or the endogenous splice sites.

[0481] The first pair of single strand breaks may be positioned as follows:
[0482] (1) upstream of the 5′ end of the erythroid enhancer in intron 2 (e.g., between TSS+0.75 kb to TSS+52.0 kb), or
[0483] (2) within the erythroid enhancer provided that a portion of the erythroid enhancer is removed resulting in disruption of one or more DHSs (e.g., between TSS+52.0 kb to TSS+64.4 kb),
   and the second pair of single strand breaks to be paired with the first pair of single strand breaks may be positioned as follows:
[0484] (1) downstream the 3′ end of the erythroid enhancer in intron 2 (e.g., between TSS+64.4 kb to TSS+84.7 kb), or
[0485] (2) within the erythroid enhancer provided that a portion of the erythroid enhancer is removed resulting in disruption of one or more DHSs (e.g., between TSS+52.0 kb to TSS+64.4 kb).

[0486] For example, the pair of single strand breaks may be positioned in the BCL11A gene:

[0487] (1) between TSS+0.75 kb to TSS+10 kb,

[0488] (2) between TSS+10 kb to TSS+20 kb,

[0489] (3) between TSS+20 kb to TSS+30 kb,

[0490] (4) between TSS+30 kb to TSS+40 kb,

[0491] (5) between TSS+40 kb to TSS+45 kb,

[0492] (6) between TSS+45 kb to TSS+47.5 kb,

[0493] (7) between TSS+47.5 kb to TSS+50 kb,

[0494] (8) between TSS+50 kb to TSS+51 kb,

[0495] (9) between TSS+51 kb to TSS+51.1 kb,

[0496] (10) between TSS+51.1 kb to TSS+51.2 kb,

[0497] (11) between TSS+51.2 kb to TSS+51.3 kb,

[0498] (12) between TSS+51.3 kb to TSS+51.4 kb,

[0499] (13) between TSS+51.4 kb to TSS+51.5 kb,

[0500] (14) between TSS+51.5 kb to TSS+51.6 kb,

[0501] (15) between TSS+51.6 kb to TSS+51.7 kb,

[0502] (16) between TSS+51.7 kb to TSS+51.8 kb,

[0503] (17) between TSS+51.8 kb to TSS+51.9 kb,

[0504] (18) between TSS+51.9 kb to TSS+52 kb,

[0505] (19) between TSS+52 kb to TSS+53 kb,

[0506] (20) between TSS+53 kb to TSS+54 kb,

[0507] (21) between TSS+54 kb to TSS+55 kb,

[0508] (22) between TSS+55 kb to TSS+56 kb,

[0509] (23) between TSS+56 kb to TSS+57 kb,

[0510] (24) between TSS+57 kb to TSS+58 kb,

[0511] (25) between TSS+58 kb to TSS+59 kb,

[0512] (26) between TSS+59 kb to TSS+60 kb,

[0513] (27) between TSS+60 kb to TSS+61 kb,

[0514] (28) between TSS+61 kb to TSS+62 kb,

[0515] (29) between TSS+62 kb to TSS+63 kb,

[0516] (30) between TSS+63 kb to TSS+64 kb, or

[0517] (31) between TSS+64 kb to TSS+64.4 kb,

and the second pair of single strand breaks to be paired with the first pair of single strand breaks may be positioned in the BCL11A gene:

[0518] (1) between TSS+52 kb to TSS+53 kb,

[0519] (2) between TSS+53 kb to TSS+54 kb,

[0520] (3) between TSS+54 kb to TSS+55 kb,

[0521] (4) between TSS+55 kb to TSS+56 kb,

[0522] (5) between TSS+56 kb to TSS+57 kb,

[0523] (6) between TSS+57 kb to TSS+58 kb,

[0524] (7) between TSS+58 kb to TSS+59 kb,

[0525] (8) between TSS+59 kb to TSS+60 kb,

[0526] (9) between TSS+60 kb to TSS+61 kb,

[0527] (10) between TSS+61 kb to TSS+62 kb,

[0528] (11) between TSS+62 kb to TSS+63 kb,

[0529] (12) between TSS+63 kb to TSS+64 kb,

[0530] (13) between TSS+64 kb to TSS+64.4 kb,

[0531] (14) between TSS+64.4 kb to TSS+65 kb,

[0532] (15) between TSS+65 kb to TSS+65.1 kb,

[0533] (16) between TSS+65.1 kb to TSS+65.2 kb,

[0534] (17) between TSS+65.2 kb to TSS+65.3 kb,

[0535] (18) between TSS+65.3 kb to TSS+65.4 kb,

[0536] (19) between TSS+65.4 kb to TSS+65.5 kb,

[0537] (20) between TSS+65.5 kb to TSS+65.7 kb,

[0538] (21) between TSS+65.7 kb to TSS+65.8 kb,

[0539] (22) between TSS+65.8 kb to TSS+65.9 kb,

[0540] (23) between TSS+65.9 kb to TSS+66 kb,

[0541] (24) between TSS+66 kb to TSS+67 kb,

[0542] (25) between TSS+67 kb to TSS+68 kb,

[0543] (26) between TSS+68 kb to TSS+69 kb,

[0544] (27) between TSS+69 kb to TSS+70 kb,

[0545] (28) between TSS+70 kb to TSS+75 kb,

[0546] (29) between TSS+75 kb to TSS+80 kb, or

[0547] (30) between TSS+80 kb to TSS+84.4 kb.

[0548] While not wishing to be bound by theory, it is believed that the two sets of breaks (e.g., the two pair of single strand breaks) allow for NHEJ-mediated deletion of erythroid enhancer in the BCL11A gene.

[0549] Knocking Down the BCL11A Gene Mediated by an Enzymatically Inactive Cas9 (eiCas9) Molecule or an eiCas9-Fusion Protein by Targeting the Promoter Region of the Gene.

[0550] A targeted knockdown approach reduces or eliminates expression of functional BCL11A gene product. As described herein, a targeted knockdown is mediated by targeting an enzymatically inactive Cas9 (eiCas9) molecule or an eiCas9 fused to a transcription repressor domain or chromatin modifying protein to alter transcription, e.g., to block, reduce, or decrease transcription, of the BCL11A gene. In an embodiment, one or more eiCas9s may be used to block binding of one or more endogenous transcription factors. In another embodiment, an eiCas9 can be fused to a chromatin modifying protein. Altering chromatin status can result in decreased expression of the target gene. One or more eiCas9s fused to one or more chromatin modifying proteins may be used to alter chromatin status.

[0551] Methods and compositions discussed herein may be used to alter the expression of the BCL11A gene to treat or prevent SCD by targeting a promoter region of the BCL11A gene. In an embodiment, the promoter region, e.g., at least 2 kb, at least 1.5 kb, at least 1.0 kb, or at least 0.5 kb upstream or downstream of the TSS is targeted to knockdown expression of the BCL11A gene. In an embodiment, the methods and compositions discussed herein may be used to knock down the BCL11A gene to treat or prevent SCD by targeting 0.5 kb upstream or downstream of the TSS. A targeted knockdown approach reduces or eliminates expression of functional BCL11A gene product. As described herein, a targeted knockdown is mediated by targeting an enzymatically inactive Cas9 (eiCas9) molecule or an eiCas9 fused to a transcription repressor domain or chromatin modifying protein to alter transcription, e.g., to block, reduce, or decrease transcription, of the BCL11A gene.

[0552] Methods to Treat or Prevent Sickle Cell Disease (SCD)

[0553] Disclosed herein are the approaches to treat or prevent SCD, using the compositions and methods described herein.

[0554] One approach to treat or prevent SCD is to repair (i.e., correct) one or more mutations in the HBB gene, e.g., by HDR. In this approach, mutant HBB allele(s) are corrected and restored to wild type state. While not wishing to be bound by theory, it is believed that correction of the glutamic acid to valine substitution at amino acid 6 in the beta-globin gene restores wild type beta-globin production within erythroid cells. The method described herein can be performed in all cell types. Beta-globin is expressed in cells of erythroid cell lineage. In an embodiment, an erythroid cell is targeted.

[0555] In an embodiment, one HBB allele is repaired in the subject. In another embodiment, both HBB alleles are repaired in the subject. In either situation, the subjects can be cured of disease. As the disease only displays a phenotype when both alleles are mutated, repair of a single allele is adequate for a cure.

[0556] In one approach, the BCL11A gene is targeted as a targeted knockout or knockdown, e.g., to increase expression of fetal hemoglobin.

[0557] While not wishing to be bound by theory, it is considered that increasing levels of fetal hemoglobin (HbF) in subjects with SCD may ameliorate disease. Fetal hemoglobin can replace beta hemoglobin in the hemoglobin complex, form adequate tetramers with alpha hemoglobin, and effectively carry oxygen to tissues. Subjects with beta-thalassemia who express higher levels of fetal hemoglobin have been found to have a less severe phenotype. Hydroxyurea, often used in the treatment of beta-thalassemia, may exert its mechanism of action via increasing levels of HbF production.

[0558] In an embodiment, knockout or knockdown of the BCL11A gene increases fetal hemoglobin levels in beta-thalassemia subjects and improves phenotype and/or reduces or prevents disease progression. BCL11A is a zinc-finger repressor that is involved in the regulation of fetal hemoglobin and acts to repress the synthesis of fetal hemoglobin. Knockout of the BCL11A gene in erythroid cells induces increased fetal hemoglobin (HbF) synthesis and increased HbF can result in more effective oxygen carrying capacity in subjects with beta-thalassemia (HbF will form tetramers with hemoglobin alpha).

[0559] In an embodiment, the BCL11A knockout or knockdown is targeted specifically to cells of the erythroid lineage. BCL11A knockout in erythroid cells has been found in in vitro studies to have no effect on erythroid growth, maturation and function. In an embodiment, erythroid cells are preferentially targeted, e.g., at least 90%, 95%, 96%, 97%, 98%, 99%, or 100% of the targeted cells are erythroid cells. For example, in the case of in vivo delivery. erythroid cells are preferentially targeted, and if cells are treated ex vivo and returned to the subject, erythroid cells are preferentially modified.

[0560] In an embodiment, the methods described herein result in increased fetal hemoglobin synthesis in beta thalassemia subjects, thereby improving disease phenotype in subjects with SCD. For example, subjects with beta thalassemia major will suffer from less severe anemia and will need fewer blood transfusions. They will therefore have fewer complications arising from transfusions and chelation therapy. In an embodiment, the method described herein increases fetal hemoglobin synthesis and improves the oxygen carrying capacity of erythroid cells. For example, subjects are expected to demonstrate decreased rates of extramedullary erythropoiesis and decreased erythroid hypertrophy within the bone marrow compared to a subject who has not received the therapy. In an embodiment, the method described herein results in reduction of bone fractures, bone abnormalities, splenomegaly, and thrombosis compared to a subject who has not received the therapy.

[0561] Knockdown or knockout of one or both BCL11A alleles may be performed prior to disease onset or after disease onset, but preferably early in the disease course.

[0562] In an embodiment, the method comprises initiating treatment of a subject prior to disease onset.

[0563] In an embodiment, the method comprises initiating treatment of a subject after disease onset.

[0564] In an embodiment, the method comprises initiating treatment of a subject well after disease onset, e.g., 1, 2, 3, 4, 5, 6, 7, 8, 9, 10, 12, 16, 24, 36, 48 or more months after onset of SCD. While not wishing to be bound by theory it is believed that this treatment may be effective if subjects present well into the course of illness.

[0565] In an embodiment, the method comprises initiating treatment of a subject in an advanced stage of disease.

[0566] Overall, initiation of treatment for subjects at all stages of disease is expected to prevent negative consequences of disease and be of benefit to subjects.

[0567] In an embodiment, the method comprises initiating treatment of a subject prior to disease expression. In an embodiment, the method comprises initiating treatment of a subject in an early stage of disease, e.g., when a subject has tested positive for beta-thalassemia mutations but has no signs or symptoms associated with beta-thalassemia major, minor or intermedia.

[0568] In an embodiment, the method comprises initiating treatment of a subject at the appearance of microcytic anemia, e.g., in an infant, child, adult or young adult.

[0569] In an embodiment, the method comprises initiating treatment of a subject who is transfusion-dependent.

[0570] In an embodiment, the method comprises initiating treatment of a subject who has tested positive for a mutation in a beta globin gene.

[0571] In an embodiment, the method comprises initiating treatment at the appearance of any one or more of the following findings associated or consistent with beta-thalassemia major or beta-thalassemia minor: anemia, diarrhea, fever, failure to thrive, frontal bossing, broken long bones, hepatomegaly, splenomegaly, thrombosis, pulmonary embolus, stroke, leg ulcer, cardiomyopathy, cardiac arrhythmia, and evidence of extramedullary erythropoiesis.

[0572] In an embodiment, a cell is treated, e.g., ex vivo. In an embodiment, an ex vivo treated cell is returned to a subject.

[0573] In an embodiment, allogenic or autologous bone marrow or erythroid cells are treated ex vivo. In an embodiment, an ex vivo treated allogenic or autologous bone marrow or erythroid cells are administered to the subject. In an embodiment, an erythroid cell, e.g., an autologous erythroid cell, is treated ex vivo and returned to the subject. In an embodiment, an autologous stem cell, is treated ex vivo and returned to the subject. In an embodiment, the modified HSCs are administered to the patient following no myeloablative pre-conditioning. In an embodiment, the modified HSCs are administered to the patient following mild myeloablative pre-conditioning such that following engraftment, some of the hematopoietic cells are devied from the modified HSCs. In other aspects, the HSCs are administered after full myeloablation such that following engraftment, 100% of the hematopoietic cells are derived from the modified HSCs.

[0574] In an embodiment, the method comprises delivery of a gRNA molecule and Cas9 molecule by intravenous injection, intramuscular injection, subcutaneous injection, or intra-bone marrow (IBM) injection.

[0575] In an embodiment, the method comprises delivery of a gRNA molecule and/or a Cas9 molecule by an AAV. In an embodiment, the method comprises delivery of a gRNA molecule and/or a Cas9 molecule by a lentivirus. In an embodiment, the method comprises delivery of a gRNA molecule and/or a Cas9 molecule by a nanoparticle. In an embodiment, the method comprises delivery of a gRNA molecule by a parvovirus, e.g., a modified parvovirus specifically designed to target bone marrow cells and/or CD4 cells. In an embodiment, two or more gRNA molecules (e.g., a second, third or fourth gRNA molecules) are delivered.

I. gRNA Molecules

[0576] A gRNA molecule, as that term is used herein, refers to a nucleic acid that promotes the specific targeting or homing of a gRNA molecule/Cas9 molecule complex to a target nucleic acid. gRNA molecules can be unimolecular (having a single RNA molecule), sometimes referred to herein as “chimeric” gRNAs, or modular (comprising more than one, and typically two, separate RNA molecules). A gRNA molecule comprises a number of domains. The gRNA molecule domains are described in more detail below.

[0577] Several exemplary gRNA structures, with domains indicated thereon, are provided in FIGS. 1A-1G. While not wishing to be bound by theory, in an embodiment, with regard to the three dimensional form, or intra- or inter-strand interactions of an active form of a gRNA, regions of high complementarity are sometimes shown as duplexes in FIGS. 1A-1G and other depictions provided herein.

[0578] In an embodiment, a unimolecular, or chimeric, gRNA comprises, preferably from 5′ to 3′:
[0579] a targeting domain (which is complementary to a target nucleic acid in the HBB gene or BCL11A gene, e.g., a targeting domain from any of Tables 1A-1D, 2A-2F, 3A-3C, 4A-4E, 5A-5E, 6A-6B, 7A-7D, 8A-8D, 9, 10A-10D, 11A-11D, 12, 13A-13D, 14A-14C, 15A-15D, 16A-16E, 17A-17B, 18A-18C, 19A-19E, 20A-20C, 21A-21E, 22A-22E, 23A-23C, 24A-24D, 25A-25B, 26, or 31;
[0580] a first complementarity domain;
[0581] a linking domain;
[0582] a second complementarity domain (which is complementary to the first complementarity domain);
[0583] a proximal domain; and
[0584] optionally, a tail domain.

[0585] In an embodiment, a modular gRNA comprises:
[0586] a first strand comprising, preferably from 5′ to 3′;
   [0587] a targeting domain (which is complementary to a target nucleic acid in the HBB gene or BCL11A gene, e.g., a targeting domain from Tables 1A-1D, 2A-2F, 3A-3C, 4A-4E, 5A-5E, 6A-6B, 7A-7D, 8A-8D, 9, 10A-10D, 11A-11D, 12, 13A-13D, 14A-14C, 15A-15D, 16A-16E, 17A-17B, 18A-18C, 19A-19E, 20A-20C, 21A-21E, 22A-22E, 23A-23C, 24A-24D, 25A-25B, 26, or 31; and
   [0588] a first complementarity domain; and
[0589] a second strand, comprising, preferably from 5′ to 3′:
   [0590] optionally, a 5′ extension domain;
   [0591] a second complementarity domain;
   [0592] a proximal domain; and
   [0593] optionally, a tail domain.

[0594] The domains are discussed briefly below.

[0595] The Targeting Domain

[0596] FIGS. 1A-1G provide examples of the placement of targeting domains.

[0597] The targeting domain comprises a nucleotide sequence that is complementary, e.g., at least 80, 85, 90, or 95% complementary, e.g., fully complementary, to the target sequence on the target nucleic acid. The targeting domain is part of an RNA molecule and will therefore comprise the base uracil (U), while any DNA encoding the gRNA molecule will comprise the base thymine (T). While not wishing to be bound by theory, in an embodiment, it is believed that the complementarity of the targeting domain with the target sequence contributes to specificity of the interaction of the gRNA molecule/Cas9 molecule complex with a target nucleic acid. It is understood that in a targeting domain and target sequence pair, the uracil bases in the targeting domain will pair with the adenine bases in the target sequence. In an embodiment, the target domain itself comprises in the 5′ to 3′ direction, an optional secondary domain, and a core domain. In an embodiment, the core domain is fully complementary with the target sequence. In an embodiment, the targeting domain is 5 to 50 nucleotides in length. The strand of the target nucleic acid with which the targeting domain is complementary is referred to herein as the complementary strand. Some or all of the nucleotides of the domain can have a modification. e.g., a modification found in Section VIII herein.

[0598] In an embodiment, the targeting domain is 16 nucleotides in length.

[0599] In an embodiment, the targeting domain is 17 nucleotides in length.

[0600] In an embodiment, the targeting domain is 18 nucleotides in length.

[0601] In an embodiment, the targeting domain is 19 nucleotides in length.

[0602] In an embodiment, the targeting domain is 20 nucleotides in length.

[0603] In an embodiment, the targeting domain is 21 nucleotides in length.

[0604] In an embodiment, the targeting domain is 22 nucleotides in length.

[0605] In an embodiment, the targeting domain is 23 nucleotides in length.

[0606] In an embodiment, the targeting domain is 24 nucleotides in length.

[0607] In an embodiment, the targeting domain is 25 nucleotides in length.

[0608] In an embodiment, the targeting domain is 26 nucleotides in length.

[0609] In an embodiment, the targeting domain comprises 16 nucleotides.

[0610] In an embodiment, the targeting domain comprises 17 nucleotides.

[0611] In an embodiment, the targeting domain comprises 18 nucleotides.

[0612] In an embodiment, the targeting domain comprises 19 nucleotides.

[0613] In an embodiment, the targeting domain comprises 20 nucleotides.

[0614] In an embodiment, the targeting domain comprises 21 nucleotides.

[0615] In an embodiment, the targeting domain comprises 22 nucleotides.

[0616] In an embodiment, the targeting domain comprises 23 nucleotides.

[0617] In an embodiment, the targeting domain comprises 24 nucleotides.

[0618] In an embodiment, the targeting domain comprises 25 nucleotides.

[0619] In an embodiment, the targeting domain comprises 26 nucleotides.

[0620] Targeting domains are discussed in more detail below.

[0621] The First Complementarity Domain

[0622] FIGS. 1A-1G provide examples of first complementarity domains.

[0623] The first complementarity domain is complementary with the second complementarity domain, and in an embodiment, has sufficient complementarity to the second complementarity domain to form a duplexed region under at least some physiological conditions. In an embodiment, the first complementarity domain is 5 to 30 nucleotides in length. In an embodiment, the first complementarity domain is 5 to 25 nucleotides in length. In an embodiment, the first complementary domain is 7 to 25 nucleotides in length. In an embodiment, the first complementary domain is 7 to 22 nucleotides in length. In an embodiment, the first complementary domain is 7 to 18 nucleotides in length. In an embodiment, the first complementary domain is 7 to 15 nucleotides in length. In an embodiment, the first complementary domain is 5, 6, 7, 8, 9, 10, 11, 12, 13, 14, 15, 16, 17, 18, 19, 20, 21, 22, 23, 24, or 25 nucleotides in length.

[0624] In an embodiment, the first complementarity domain comprises 3 subdomains, which, in the 5′ to 3′ direction are: a 5′ subdomain, a central subdomain, and a 3′ subdomain. In an embodiment, the 5′ subdomain is 4 to 9, e.g., 4, 5, 6, 7, 8 or 9 nucleotides in length. In an embodiment, the central subdomain is 1, 2, or 3, e.g., 1, nucleotide in length. In an embodiment, the 3′ subdomain is 3 to 25, e.g., 4 to 22, 4 to 18, or 4 to 10, or 3, 4, 5, 6, 7, 8, 9, 10, 11, 12, 13, 14, 15, 16, 17, 18, 19, 20, 21, 22, 23, 24, or 25 nucleotides in length.

[0625] The first complementarity domain can share homology with, or be derived from, a naturally occurring first complementarity domain. In an embodiment, it has at least 50% homology with a first complementarity domain disclosed herein, e.g., an S. pyogenes, S. aureus or S. thermophilus, first complementarity domain.

[0626] Some or all of the nucleotides of the domain can have a modification, e.g., a modification found in Section VIII herein.

[0627] First complementarity domains are discussed in more detail below.

[0628] The Linking Domain

[0629] FIGS. 1A-1G provide examples of linking domains.

[0630] A linking domain serves to link the first complementarity domain with the second complementarity domain of a unimolecular gRNA. The linking domain can link the first and second complementarity domains covalently or non-covalently. In an embodiment, the linkage is covalent. In an embodiment, the linking domain covalently couples the first and second complementarity domains, see, e.g., FIGS. 1B-1E. In an embodiment, the linking domain is, or comprises, a covalent bond interposed between the first complementarity domain and the second complementarity domain. Typically the linking domain comprises one or more, e.g., 2, 3, 4, 5, 6, 7, 8, 9, or 10 nucleotides.

[0631] In modular gRNA molecules the two molecules are associated by virtue of the hybridization of the complementarity domains see e.g., FIG. 1A.

[0632] A wide variety of linking domains are suitable for use in unimolecular gRNA molecules. Linking domains can consist of a covalent bond, or be as short as one or a few nucleotides, e.g., 1, 2, 3, 4, or 5 nucleotides in length. In an embodiment, a linking domain is 2, 3, 4, 5, 6, 7, 8, 9, 10, 15, 20, or 25 or more nucleotides in length. In an embodiment, a linking domain is 2 to 50, 2 to 40, 2 to 30, 2 to 20, 2 to 10, or 2 to 5 nucleotides in length. In an embodiment, a linking domain shares homology with, or is derived from, a naturally occurring sequence, e.g., the sequence of a tracrRNA that is 5′ to the second complementarity domain. In an embodiment, the linking domain has at least 50% homology with a linking domain disclosed herein.

[0633] Some or all of the nucleotides of the domain can have a modification, e.g., a modification found in Section VIII herein.

[0634] Linking domains are discussed in more detail below.

[0635] The 5′ Extension Domain

[0636] In an embodiment, a modular gRNA can comprise additional sequence, 5′ to the second complementarity domain, referred to herein as the 5′ extension domain, see, e.g., FIG. 1A. In an embodiment, the 5′ extension domain is, 2 to 10, 2 to 9, 2 to 8, 2 to 7, 2 to 6, 2 to 5, 2 to 4 nucleotides in length. In an embodiment, the 5′ extension domain is 2, 3, 4, 5, 6, 7, 8, 9, or 10 or more nucleotides in length.

[0637] The Second Complementarity Domain

[0638] FIGS. 1A-1G provides examples of second complementarity domains.

[0639] The second complementarity domain is complementary with the first complementarity domain, and in an embodiment, has sufficient complementarity to the second complementarity domain to form a duplexed region under at least some physiological conditions. In an embodiment, e.g., as shown in FIGS. 1A-1B, the second complementarity domain can include sequence that lacks complementarity with the first complementarity domain, e.g., sequence that loops out from the duplexed region.

[0640] In an embodiment, the second complementarity domain is 5 to 27 nucleotides in length. In an embodiment, it is longer than the first complementarity region. In an embodiment the second complementary domain is 7 to 27 nucleotides in length. In an embodiment, the second complementary domain is 7 to 25 nucleotides in length. In an embodiment, the second complementary domain is 7 to 20 nucleotides in length. In an embodiment, the second complementary domain is 7 to 17 nucleotides in length. In an embodiment, the complementary domain is 5, 6, 7, 8, 9, 10, 11, 12, 13, 14, 15, 16, 17, 18, 19, 20, 21, 22, 23, 24, 25 or 26 nucleotides in length.

[0641] In an embodiment, the second complementarity domain comprises 3 subdomains, which, in the 5′ to 3′ direction are: a 5′ subdomain, a central subdomain, and a 3′ subdomain. In an embodiment, the 5′ subdomain is 3 to 25, e.g., 4 to 22, 4 to18, or 4 to 10, or 3, 4, 5, 6, 7, 8, 9, 10, 11, 12, 13, 14, 15, 16, 17, 18, 19, 20, 21, 22, 23, 24, or 25 nucleotides in length. In an embodiment, the central subdomain is 1, 2, 3, 4 or 5, e.g., 3, nucleotides in length. In an embodiment, the 3′ subdomain is 4 to 9, e.g., 4, 5, 6, 7, 8 or 9 nucleotides in length.

[0642] In an embodiment, the 5′ subdomain and the 3′ subdomain of the first complementarity domain, are respectively, complementary, e.g., fully complementary, with the 3′ subdomain and the 5′ subdomain of the second complementarity domain.

[0643] The second complementarity domain can share homology with or be derived from a naturally occurring second complementarity domain. In an embodiment, it has at least 50% homology with a second complementarity domain disclosed herein, e.g., an S. pyogenes, S. aureus or S. thermophilus, first complementarity domain.

[0644] Some or all of the nucleotides of the domain can have a modification, e.g., a modification found in Section VIII herein.

[0645] A Proximal Domain

[0646] FIGS. 1A-1G provide examples of proximal domains.

[0647] In an embodiment, the proximal domain is 5 to 20 nucleotides in length. In an embodiment, the proximal domain can share homology with or be derived from a naturally occurring proximal domain. In an embodiment, it has at least 50% homology with a proximal domain disclosed herein, e.g., an S. pyogenes, S. aureus or S. thermophilus, proximal domain.

[0648] Some or all of the nucleotides of the domain can have a modification, e.g., modification found in Section VIII herein.

[0649] A Tail Domain

[0650] FIGS. 1A-1G provide examples of tail domains.

[0651] As can be seen by inspection of the tail domains in FIGS. 1A-1E, a broad spectrum of tail domains are suitable for use in gRNA molecules. In an embodiment, the tail domain is 0 (absent), 1, 2, 3, 4, 5, 6, 7, 8, 9, or 10 nucleotides in length. In embodiment, the tail domain nucleotides are from or share homology with sequence from the 5′ end of a naturally occurring tail domain, see e.g., panels 4a or 5a of FIG. 1D or FIG. 1E. In an embodiment, the tail domain includes sequences that are complementary to each other and which, under at least some physiological conditions, form a duplexed region.

[0652] In an embodiment, the tail domain is absent or is 1 to 50 nucleotides in length. In an embodiment, the tail domain can share homology with or be derived from a naturally occurring proximal tail domain. In an embodiment, it has at least 50% homology with a tail domain disclosed herein, e.g., an S. pyogenes, S. aureus or S. thermophilus, tail domain.

[0653] In an embodiment, the tail domain includes nucleotides at the 3′ end that are related to the method of in vitro or in vivo transcription. When a T7 promoter is used for in vitro transcription of the gRNA, these nucleotides may be any nucleotides present before the 3′ end of the DNA template. When a U6 promoter is used for in vivo transcription, these nucleotides may be the sequence UUUUUU. When alternate pol-III promoters are used, these nucleotides may be various numbers or uracil bases or may include alternate bases.

[0654] The domains of gRNA molecules are described in more detail below.

[0655] The Targeting Domain

[0656] The “targeting domain” of the gRNA is complementary to the “target domain” on the target nucleic acid. The strand of the target nucleic acid comprising the nucleotide sequence complementary to the core domain of the gRNA is referred to herein as the “complementary strand” of the target nucleic acid. Guidance on the selection of targeting domains can be found, e.g., in Fu Y et al., Nat Biotechnol 2014 (doi: 10.1038/nbt.2808) and Sternberg S H et al., Nature 2014 (doi: 10.1038/nature13011).

[0657] In an embodiment, the targeting domain is 16, 17, 18, 19, 20, 21, 22, 23, 24, 25 or 26 nucleotides in length.

[0658] In an embodiment, the targeting domain is 16 nucleotides in length.

[0659] In an embodiment, the targeting domain is 17 nucleotides in length.

[0660] In an embodiment, the targeting domain is 18 nucleotides in length.

[0661] In an embodiment, the targeting domain is 19 nucleotides in length.

[0662] In an embodiment, the targeting domain is 20 nucleotides in length.

[0663] In an embodiment, the targeting domain is 21 nucleotides in length.

[0664] In an embodiment, the targeting domain is 22 nucleotides in length.

[0665] In an embodiment, the targeting domain is 23 nucleotides in length.

[0666] In an embodiment, the targeting domain is 24 nucleotides in length.

[0667] In an embodiment, the targeting domain is 25 nucleotides in length.

[0668] In an embodiment, the targeting domain is 26 nucleotides in length.

[0669] In an embodiment, the targeting domain comprises 16 nucleotides.

[0670] In an embodiment, the targeting domain comprises 17 nucleotides.

[0671] In an embodiment, the targeting domain comprises 18 nucleotides.

[0672] In an embodiment, the targeting domain comprises 19 nucleotides.

[0673] In an embodiment, the targeting domain comprises 20 nucleotides.

[0674] In an embodiment, the targeting domain comprises 21 nucleotides.

[0675] In an embodiment, the targeting domain comprises 22 nucleotides.

[0676] In an embodiment, the targeting domain comprises 23 nucleotides.

[0677] In an embodiment, the targeting domain comprises 24 nucleotides.

[0678] In an embodiment, the targeting domain comprises 25 nucleotides.

[0679] In an embodiment, the targeting domain comprises 26 nucleotides.

[0680] In an embodiment, the targeting domain is 10+/−5, 20+/−5, 30+/−5, 40+/−5, 50+/−5, 60+/−5, 70+/−5, 80+/−5, 90+/−5, or 100+/−5 nucleotides, in length.

[0681] In an embodiment, the targeting domain is 20+/−5 nucleotides in length.

[0682] In an embodiment, the targeting domain is 20+/−10, 30+/−10, 40+/−10, 50+/−10, 60+/−10, 70+/−10, 80+/−10, 90+/−10, or 100+/−10 nucleotides, in length.

[0683] In an embodiment, the targeting domain is 30+/−10 nucleotides in length.

[0684] In an embodiment, the targeting domain is 10 to 100, 10 to 90, 10 to 80, 10 to 70, 10 to 60, 10 to 50, 10 to 40, 10 to 30, 10 to 20 or 10 to 15 nucleotides in length.

[0685] In another embodiment, the targeting domain is 20 to 100, 20 to 90, 20 to 80, 20 to 70, 20 to 60, 20 to 50, 20 to 40, 20 to 30, or 20 to 25 nucleotides in length.

[0686] Typically the targeting domain has full complementarity with the target sequence. In an embodiment the targeting domain has or includes 1, 2, 3, 4, 5, 6, 7 or 8 nucleotides that are not complementary with the corresponding nucleotide of the targeting domain.

[0687] In an embodiment, the target domain includes 1, 2, 3, 4 or 5 nucleotides that are complementary with the corresponding nucleotide of the targeting domain within 5 nucleotides of its 5′ end. In an embodiment, the target domain includes 1, 2, 3, 4 or 5 nucleotides that are complementary with the corresponding nucleotide of the targeting domain within 5 nucleotides of its 3′ end.

[0688] In an embodiment, the target domain includes 1, 2, 3, or 4 nucleotides that are not complementary with the corresponding nucleotide of the targeting domain within 5 nucleotides of its 5′ end. In an embodiment, the target domain includes 1, 2, 3, or 4 nucleotides that are not complementary with the corresponding nucleotide of the targeting domain within 5 nucleotides of its 3′ end.

[0689] In an embodiment, the degree of complementarity, together with other properties of the gRNA, is sufficient to allow targeting of a Cas9 molecule to the target nucleic acid.

[0690] In an embodiment, the targeting domain comprises two consecutive nucleotides that are not complementary to the target domain (“non-complementary nucleotides”), e.g., two consecutive noncomplementary nucleotides that are within 5 nucleotides of the 5′ end of the targeting domain, within 5 nucleotides of the 3′ end of the targeting domain, or more than 5 nucleotides away from one or both ends of the targeting domain.

[0691] In an embodiment, no two consecutive nucleotides within 5 nucleotides of the 5′ end of the targeting domain, within 5 nucleotides of the 3′ end of the targeting domain, or within a region that is more than 5 nucleotides away from one or both ends of the targeting domain, are not complementary to the targeting domain.

[0692] In an embodiment, there are no noncomplementary nucleotides within 5 nucleotides of the 5′ end of the targeting domain, within 5 nucleotides of the 3′ end of the targeting domain, or within a region that is more than 5 nucleotides away from one or both ends of the targeting domain.

[0693] In an embodiment, the targeting domain nucleotides do not comprise modifications, e.g., modifications of the type provided in Section VIII. However, in an embodiment, the targeting domain comprises one or more modifications, e.g., modifications that it render it less susceptible to degradation or more bio-compatible, e.g., less immunogenic. By way of example, the backbone of the targeting domain can be modified with a phosphorothioate, or other modification from Section VIII. In an embodiment, a nucleotide of the targeting domain can comprise a 2′ modification (e.g., a modification at the 2′ position on ribose), e.g., a 2-acetylation, e.g., a 2′ methylation, or other modification(s) from Section VIII.

[0694] In an embodiment, the targeting domain includes 1, 2, 3, 4, 5, 6, 7 or 8 or more modifications. In an embodiment, the targeting domain includes 1, 2, 3, or 4 modifications within 5 nucleotides of its 5′ end. In an embodiment, the targeting domain comprises as many as 1, 2, 3, or 4 modifications within 5 nucleotides of its 3′ end.

[0695] In an embodiment, the targeting domain comprises modifications at two consecutive nucleotides, e.g., two consecutive nucleotides that are within 5 nucleotides of the 5′ end of the targeting domain, within 5 nucleotides of the 3′ end of the targeting domain, or more than 5 nucleotides away from one or both ends of the targeting domain.

[0696] In an embodiment, no two consecutive nucleotides are modified within 5 nucleotides of the 5′ end of the targeting domain, within 5 nucleotides of the 3′ end of the targeting domain, or within a region that is more than 5 nucleotides away from one or both ends of the targeting domain. In an embodiment, no nucleotide is modified within 5 nucleotides of the 5′ end of the targeting domain, within 5 nucleotides of the 3′ end of the targeting domain, or within a region that is more than 5 nucleotides away from one or both ends of the targeting domain.

[0697] Modifications in the targeting domain can be selected to not interfere with targeting efficacy, which can be evaluated by testing a candidate modification in the system described in Section IV. gRNAs having a candidate targeting domain having a selected length, sequence, degree of complementarity, or degree of modification, can be evaluated in a system in Section IV. The candidate targeting domain can be placed, either alone, or with one or more other candidate changes in a gRNA molecule/Cas9 molecule system known to be functional with a selected target and evaluated.

[0698] In an embodiment, all of the modified nucleotides are complementary to and capable of hybridizing to corresponding nucleotides present in the target domain. In another embodiment, 1, 2, 3, 4, 5, 6, 7 or 8 or more modified nucleotides are not complementary to or capable of hybridizing to corresponding nucleotides present in the target domain.

[0699] In an embodiment, the targeting domain comprises, preferably in the 5′→3′ direction: a secondary domain and a core domain. These domains are discussed in more detail below.

[0700] The Core Domain and Secondary Domain of the Targeting Domain

[0701] The “core domain” of the targeting domain is complementary to the “core domain target” on the target nucleic acid. In an embodiment, the core domain comprises about 8 to about 13 nucleotides from the 3′ end of the targeting domain (e.g., the most 3′ 8 to 13 nucleotides of the targeting domain).

[0702] In an embodiment, the core domain and targeting domain, are independently, 6+/−2, 7+/−2, 8+/−2, 9+/−2, 10+/−2, 11+/−2, 12+/−2, 13+/−2, 14+/−2, 15+/−2, or 16+−2, nucleotides in length.

[0703] In an embodiment, the core domain and targeting domain, are independently, 10+/−2 nucleotides in length.

[0704] In an embodiment, the core domain and targeting domain, are independently, 10+/−4 nucleotides in length.

[0705] In an embodiment, the core domain and targeting domain are independently 6, 7, 8, 9, 10, 11, 12, 13, 14, 15, 16, 17, or 18 nucleotides in length.

[0706] In an embodiment, the core domain and targeting domain are independently 3 to 20, 4 to 20, 5 to 20, 6 to 20, 7 to 20, 8 to 20, 9 to 20 10 to 20 or 15 to 20 nucleotides in length.

[0707] In an embodiment, the core domain and targeting domain are independently 3 to 15, e.g., 6 to 15, 7 to 14, 7 to 13, 6 to 12, 7 to 12, 7 to 11, 7 to 10, 8 to 14, 8 to 13, 8 to 12, 8 to 11, 8 to 10 or 8 to 9 nucleotides in length.

[0708] The core domain is complementary with the core domain target. Typically the core domain has exact complementarity with the core domain target. In an embodiment, the core domain can have 1, 2, 3, 4 or 5 nucleotides that are not complementary with the corresponding nucleotide of the core domain. In an embodiment, the degree of complementarity, together with other properties of the gRNA, is sufficient to allow targeting of a Cas9 molecule to the target nucleic acid.

[0709] The “secondary domain” of the targeting domain of the gRNA is complementary to the “secondary domain target” of the target nucleic acid.

[0710] In an embodiment, the secondary domain is positioned 5′ to the core domain.

[0711] In an embodiment, the secondary domain is absent or optional.

[0712] In an embodiment, if the targeting domain is 26 nucleotides in length and the core domain (counted from the 3′ end of the targeting domain) is 8 to 13 nucleotides in length, the secondary domain is 12 to 17 nucleotides in length.

[0713] In an embodiment, if the targeting domain is 25 nucleotides in length and the core domain (counted from the 3′ end of the targeting domain) is 8 to 13 nucleotides in length, the secondary domain is 12 to 17 nucleotides in length.

[0714] In an embodiment, if the targeting domain is 24 nucleotides in length and the core domain (counted from the 3′ end of the targeting domain) is 8 to 13 nucleotides in length, the secondary domain is 11 to 16 nucleotides in length.

[0715] In an embodiment, if the targeting domain is 23 nucleotides in length and the core domain (counted from the 3′ end of the targeting domain) is 8 to 13 nucleotides in length, the secondary domain is 10 to 15 nucleotides in length.

[0716] In an embodiment, if the targeting domain is 22 nucleotides in length and the core domain (counted from the 3′ end of the targeting domain) is 8 to 13 nucleotides in length, the secondary domain is 9 to 14 nucleotides in length.

[0717] In an embodiment, if the targeting domain is 21 nucleotides in length and the core domain (counted from the 3′ end of the targeting domain) is 8 to 13 nucleotides in length, the secondary domain is 8 to 13 nucleotides in length.

[0718] In an embodiment, if the targeting domain is 20 nucleotides in length and the core domain (counted from the 3′ end of the targeting domain) is 8 to 13 nucleotides in length, the secondary domain is 7 to 12 nucleotides in length.

[0719] In an embodiment, if the targeting domain is 19 nucleotides in length and the core domain (counted from the 3′ end of the targeting domain) is 8 to 13 nucleotides in length, the secondary domain is 6 to 11 nucleotides in length.

[0720] In an embodiment, if the targeting domain is 18 nucleotides in length and the core domain (counted from the 3′ end of the targeting domain) is 8 to 13 nucleotides in length, the secondary domain is 5 to 10 nucleotides in length.

[0721] In an embodiment, if the targeting domain is 17 nucleotides in length and the core domain (counted from the 3′ end of the targeting domain) is 8 to 13 nucleotides in length, the secondary domain is 4 to 9 nucleotides in length.

[0722] In an embodiment, if the targeting domain is 16 nucleotides in length and the core domain (counted from the 3′ end of the targeting domain) is 8 to 13 nucleotides in length, the secondary domain is 3 to 8 nucleotides in length.

[0723] In an embodiment, the secondary domain is 0, 1, 2, 3, 4, 5, 6, 7, 8, 9, 10, 11, 12, 13, 14 or 15 nucleotides in length.

[0724] The secondary domain is complementary with the secondary domain target. Typically the secondary domain has exact complementarity with the secondary domain target. In an embodiment the secondary domain can have 1, 2, 3, 4 or 5 nucleotides that are not complementary with the corresponding nucleotide of the secondary domain. In an embodiment, the degree of complementarity, together with other properties of the gRNA, is sufficient to allow targeting of a Cas9 molecule to the target nucleic acid.

[0725] In an embodiment, the core domain nucleotides do not comprise modifications, e.g., modifications of the type provided in Section VIII. However, in an embodiment, the core domain comprises one or more modifications, e.g., modifications that it render it less susceptible to degradation or more bio-compatible, e.g., less immunogenic. By way of example, the backbone of the core domain can be modified with a phosphorothioate, or other modification(s) from Section VIII. In an embodiment a nucleotide of the core domain can comprise a 2′ modification (e.g., a modification at the 2′ position on ribose), e.g., a 2-acetylation, e.g., a 2′ methylation, or other modification(s) from Section VIII. Typically, a core domain will contain no more than 1, 2, or 3 modifications.

[0726] Modifications in the core domain can be selected to not interfere with targeting efficacy, which can be evaluated by testing a candidate modification in the system described in Section IV. gRNAs having a candidate core domain having a selected length, sequence, degree of complementarity, or degree of modification, can be evaluated in the system described at Section IV. The candidate core domain can be placed, either alone, or with one or more other candidate changes in a gRNA molecule/Cas9 molecule system known to be functional with a selected target and evaluated.

[0727] In an embodiment, the secondary domain nucleotides do not comprise modifications, e.g., modifications of the type provided in Section VIII. However, in an embodiment, the secondary domain comprises one or more modifications, e.g., modifications that render it less susceptible to degradation or more bio-compatible, e.g., less immunogenic. By way of example, the backbone of the secondary domain can be modified with a phosphorothioate, or other modification(s) from Section VIII. In an embodiment a nucleotide of the secondary domain can comprise a 2′ modification (e.g., a modification at the 2′ position on ribose), e.g., a 2-acetylation, e.g., a 2′ methylation, or other modification from Section VIII. Typically, a secondary domain will contain no more than 1, 2, or 3 modifications.

[0728] Modifications in the secondary domain can be selected to not interfere with targeting efficacy, which can be evaluated by testing a candidate modification in the system described in Section IV. gRNAs having a candidate secondary domain having a selected length, sequence, degree of complementarity, or degree of modification, can be evaluated in the system described at Section IV. The candidate secondary domain can be placed, either alone, or with one or more other candidate changes in a gRNA molecule/Cas9 molecule system known to be functional with a selected target and evaluated.

[0729] In an embodiment, (1) the degree of complementarity between the core domain and its target, and (2) the degree of complementarity between the secondary domain and its target, may differ. In an embodiment, (1) may be greater than (2). In an embodiment, (1) may be less than (2). In an embodiment, (1) and (2) are the same, e.g., each may be completely complementary with its target.

[0730] In an embodiment, (1) the number of modifications (e.g., modifications from Section VIII) of the nucleotides of the core domain and (2) the number of modification (e.g., modifications from Section VIII) of the nucleotides of the secondary domain, may differ. In an embodiment, (1) may be less than (2). In an embodiment, (1) may be greater than (2). In an embodiment, (1) and (2) may be the same, e.g., each may be free of modifications.

[0731] The First and Second Complementarity Domains

[0732] The first complementarity domain is complementary with the second complementarity domain.

[0733] Typically the first domain does not have exact complementarity with the second complementarity domain target. In an embodiment, the first complementarity domain can have 1, 2, 3, 4 or 5 nucleotides that are not complementary with the corresponding nucleotide of the second complementarity domain. In an embodiment, 1, 2, 3, 4, 5 or 6, e.g., 3 nucleotides, will not pair in the duplex, and, e.g., form a non-duplexed or looped-out region. In an embodiment, an unpaired, or loop-out, region, e.g., a loop-out of 3 nucleotides, is present on the second complementarity domain. In an embodiment, the unpaired region begins 1, 2, 3, 4, 5, or 6, e.g., 4, nucleotides from the 5′ end of the second complementarity domain.

[0734] In an embodiment, the degree of complementarity, together with other properties of the gRNA, is sufficient to allow targeting of a Cas9 molecule to the target nucleic acid.

[0735] In an embodiment, the first and second complementarity domains are:

[0736] independently, 6+/−2, 7+/−2, 8+/−2, 9+/−2, 10+/−2, 11+/−2, 12+/−2, 13+/−2, 14+/−2, 15+/−2, 16+/−2, 17+/−2, 18+/−2, 19+/−2, or 20+/−2, 21+/−2, 22+/−2, 23+/−2, or 24+/−2 nucleotides in length;

[0737] independently, 6, 7, 8, 9, 10, 11, 12, 13, 14, 14, 16, 17, 18, 19, 20, 21, 22, 23, 24, 25, or 26, nucleotides in length; or

[0738] independently, 5 to 24, 5 to 23, 5 to 22, 5 to 21, 5 to 20, 7 to 18, 9 to 16, or 10 to 14 nucleotides in length.

[0739] In an embodiment, the second complementarity domain is longer than the first complementarity domain, e.g., 2, 3, 4, 5, or 6, e.g., 6, nucleotides longer.

[0740] In an embodiment, the first and second complementary domains, independently, do not comprise modifications, e.g., modifications of the type provided in Section VIII.

[0741] In an embodiment, the first and second complementary domains, independently, comprise one or more modifications, e.g., modifications that the render the domain less susceptible to degradation or more bio-compatible, e.g., less immunogenic. By way of example, the backbone of the domain can be modified with a phosphorothioate, or other modification(s) from Section VIII. In an embodiment a nucleotide of the domain can comprise a 2′ modification (e.g., a modification at the 2′ position on ribose), e.g., a 2-acetylation, e.g., a 2′ methylation, or other modification(s) from Section VIII.

[0742] In an embodiment, the first and second complementary domains, independently, include 1, 2, 3, 4, 5, 6, 7 or 8 or more modifications. In an embodiment, the first and second complementary domains, independently, include 1, 2, 3, or 4 modifications within 5 nucleotides of its 5′ end. In an embodiment, the first and second complementary domains, independently, include as many as 1, 2, 3, or 4 modifications within 5 nucleotides of its 3′ end.

[0743] In an embodiment, the first and second complementary domains, independently, include modifications at two consecutive nucleotides, e.g., two consecutive nucleotides that are within 5 nucleotides of the 5′ end of the domain, within 5 nucleotides of the 3′ end of the domain, or more than 5 nucleotides away from one or both ends of the domain. In an embodiment, the first and second complementary domains, independently, include no two consecutive nucleotides that are modified, within 5 nucleotides of the 5′ end of the domain, within 5 nucleotides of the 3′ end of the domain, or within a region that is more than 5 nucleotides away from one or both ends of the domain. In an embodiment, the first and second complementary domains, independently, include no nucleotide that is modified within 5 nucleotides of the 5′ end of the domain, within 5 nucleotides of the 3′ end of the domain, or within a region that is more than 5 nucleotides away from one or both ends of the domain.

[0744] Modifications in a complementarity domain can be selected to not interfere with targeting efficacy, which can be evaluated by testing a candidate modification in the system described in Section IV. gRNAs having a candidate complementarity domain having a selected length, sequence, degree of complementarity, or degree of modification, can be evaluated in the system described in Section IV. The candidate complementarity domain can be placed, either alone, or with one or more other candidate changes in a gRNA molecule/Cas9 molecule system known to be functional with a selected target and evaluated.

[0745] In an embodiment, the first complementarity domain has at least 60, 70, 80, 85%, 90% or 95% homology with, or differs by no more than 1, 2, 3, 4, 5, or 6 nucleotides from, a reference first complementarity domain, e.g., a naturally occurring, e.g., an S. pyogenes, S. aureus or S. thermophilus, first complementarity domain, or a first complementarity domain described herein, e.g., from FIGS. 1A-1G.

[0746] In an embodiment, the second complementarity domain has at least 60, 70, 80, 85%, 90%, or 95% homology with, or differs by no more than 1, 2, 3, 4, 5, or 6 nucleotides from. a reference second complementarity domain, e.g., a naturally occurring, e.g., an S. pyogenes, S. aureus or S. thermophilus, second complementarity domain, or a second complementarity domain described herein, e.g., from FIGS. 1A-1G.

[0747] The duplexed region formed by first and second complementarity domains is typically 6, 7, 8, 9, 10, 11, 12, 13, 14, 15, 16, 17, 18, 19, 20, 21 or 22 base pairs in length (excluding any looped out or unpaired nucleotides).

[0748] In an embodiment, the first and second complementarity domains, when duplexed, comprise 11 paired nucleotides, for example, in the gRNA sequence (one paired strand underlined, one bolded): NNNNNNNNNNNNNNNNNNNNGUUUUAGAGCUAGAAAUAGCAAGUUAAAAUAAGG CUAGUCCGUUAUCAACUUGAAAAAGUGGCACCGAGUCGGUGC (SEQ ID NO: 5).

[0749] In an embodiment, the first and second complementarity domains, when duplexed, comprise 15 paired nucleotides, for example in the gRNA sequence (one paired strand underlined, one bolded): NNNNNNNNNNNNNNNNNNNNGUUUUAGAGCUAUGCUGAAAAGCAUAGCAAGUUA AAAUAAGGCUAGUCCGUUAUCAACUUGAAAAAGUGGCACCGAGUCGGUGC (SEQ ID NO: 27).

[0750] In an embodiment the first and second complementarity domains, when duplexed, comprise 16 paired nucleotides, for example in the gRNA sequence (one paired strand underlined, one bolded): NNNNNNNNNNNNNNNNNNNNGUUUUAGAGCUAUGCUGGAAACAGCAUAGCAAGU UAAAAUAAGGCUAGUCCGUUAUCAACUUGAAAAAGUGGCACCGAGUCGGUGC (SEQ ID NO: 28).

[0751] In an embodiment the first and second complementarity domains, when duplexed, comprise 21 paired nucleotides, for example in the gRNA sequence (one paired strand underlined, one bolded): NNNNNNNNNNNNNNNNNNNNGUUUUAGAGCUAUGCUGUUUUGGAAACAAAACAG CAUAGCAAGUUAAAAUAAGGCUAGUCCGUUAUCAACUUGAAAAAGUGGCACCGA GUCGGUGC (SEQ ID NO: 29).

[0752] In an embodiment, nucleotides are exchanged to remove poly-U tracts, for example in the gRNA sequences (exchanged nucleotides underlined):

(SEQ ID NO: 30)

NNNNNNNNNNNNNNNNNNNNGUAUUAGAGCUAGAAAUAGCAAGUUAAUAU
AAGGCUAGUCCGUUAUCAACUUGAAAAAGUGGCACCGAGUCGGUGC;

(SEQ ID NO: 31)

NNNNNNNNNNNNNNNNNNNNGUUUAAGAGCUAGAAAUAGCAAGUUUAAAU
AAGGCUAGUCCGUUAUCAACUUGAAAAAGUGGCACCGAGUCGGUGC;
or

(SEQ ID NO: 32)

NNNNNNNNNNNNNNNNNNNNGUAUUAGAGCUAUGCUGUAUUGGAAACAAU
ACAGCAUAGCAAGUUAAUAUAAGGCUAGUCCGUUAUCAACUUGAAAAAGU
GGCACCGAGUCGGUGC.

[0753] The 5′ Extension Domain

[0754] In an embodiment, a modular gRNA can comprise additional sequence, 5′ to the second complementarity domain. In an embodiment, the 5′ extension domain is 2 to 10, 2 to 9, 2 to 8, 2 to 7, 2 to 6, 2 to 5, or 2 to 4 nucleotides in length. In an embodiment, the 5′ extension domain is 2, 3, 4, 5, 6, 7, 8, 9, or 10 or more nucleotides in length.

[0755] In an embodiment, the 5′ extension domain nucleotides do not comprise modifications, e.g., modifications of the type provided in Section VIII. However, in an embodiment, the 5′ extension domain comprises one or more modifications, e.g., modifications that it render it less susceptible to degradation or more bio-compatible, e.g., less immunogenic. By way of example, the backbone of the 5′ extension domain can be modified with a phosphorothioate, or other modification(s) from Section VIII. In an embodiment, a nucleotide of the 5′ extension domain can comprise a 2′ modification (e.g., a modification at the 2′ position on ribose), e.g., a 2-acetylation, e.g., a 2′ methylation, or other modification(s) from Section VIII.

[0756] In an embodiment, the 5′ extension domain can comprise as many as 1, 2, 3, 4, 5, 6, 7 or 8 modifications. In an embodiment, the 5′ extension domain comprises as many as 1, 2, 3, or 4 modifications within 5 nucleotides of its 5′ end, e.g., in a modular gRNA molecule. In an embodiment, the 5′ extension domain comprises as many as 1, 2, 3, or 4 modifications within 5 nucleotides of its 3′ end, e.g., in a modular gRNA molecule.

[0757] In an embodiment, the 5′ extension domain comprises modifications at two consecutive nucleotides, e.g., two consecutive nucleotides that are within 5 nucleotides of the 5′ end of the 5′ extension domain, within 5 nucleotides of the 3′ end of the 5′ extension domain, or more than 5 nucleotides away from one or both ends of the 5′ extension domain. In an embodiment, no two consecutive nucleotides are modified within 5 nucleotides of the 5′ end of the 5′ extension domain, within 5 nucleotides of the 3′ end of the 5′ extension domain, or within a region that is more than 5 nucleotides away from one or both ends of the 5′ extension domain. In an embodiment, no nucleotide is modified within 5 nucleotides of the 5′ end of the 5′ extension domain, within 5 nucleotides of the 3′ end of the 5′ extension domain, or within a region that is more than 5 nucleotides away from one or both ends of the 5′ extension domain.

[0758] Modifications in the 5′ extension domain can be selected so as to not interfere with gRNA molecule efficacy, which can be evaluated by testing a candidate modification in the system described in Section IV. gRNAs having a candidate 5′ extension domain having a selected length, sequence, degree of complementarity, or degree of modification, can be evaluated in the system described at Section IV. The candidate 5′ extension domain can be placed, either alone, or with one or more other candidate changes in a gRNA molecule/Cas9 molecule system known to be functional with a selected target and evaluated.

[0759] In an embodiment, the 5′ extension domain has at least 60, 70, 80, 85, 90 or 95% homology with, or differs by no more than 1, 2, 3, 4, 5, or 6 nucleotides from, a reference 5′ extension domain, e.g., a naturally occurring, e.g., an S. pyogenes, S. aureus or S. thermophilus, 5′ extension domain, or a 5′ extension domain described herein, e.g., from FIGS. 1A-1G.

[0760] The Linking Domain

[0761] In a unimolecular gRNA molecule the linking domain is disposed between the first and second complementarity domains. In a modular gRNA molecule, the two molecules are associated with one another by the complementarity domains.

[0762] In an embodiment, the linking domain is 10+/−5, 20+/−5, 30+/−5, 40+/−5, 50+/−5, 60+/−5, 70+/−5, 80+/−5, 90+/−5, or 100+/−5 nucleotides, in length.

[0763] In an embodiment, the linking domain is 20+/−10, 30+/−10, 40+/−10, 50+/−10, 60+/−10, 70+/−10, 80+/−10, 90+/−10, or 100+/−10 nucleotides, in length.

[0764] In an embodiment, the linking domain is 10 to 100, 10 to 90, 10 to 80, 10 to 70, 10 to 60, 10 to 50, 10 to 40, 10 to 30, 10 to 20 or 10 to 15 nucleotides in length.

[0765] In another embodiment, the linking domain is 20 to 100, 20 to 90, 20 to 80, 20 to 70, 20 to 60, 20 to 50, 20 to 40, 20 to 30, or 20 to 25 nucleotides in length.

[0766] In an embodiment, the linking domain is 1, 2, 3, 4, 5, 6, 7, 8, 9, 10, 11, 12, 13, 14, 15, 16 17, 18, 19, or 20 nucleotides in length.

[0767] In and embodiment, the linking domain is a covalent bond.

[0768] In an embodiment, the linking domain comprises a duplexed region, typically adjacent to or within 1, 2, or 3 nucleotides of the 3′ end of the first complementarity domain and/or the S-end of the second complementarity domain. In an embodiment, the duplexed region can be 20+/−10 base pairs in length. In an embodiment, the duplexed region can be 10+/−5, 15+/−5, 20+/−5, or 30+/−5 base pairs in length. In an embodiment, the duplexed region can be 1, 2, 3, 4, 5, 6, 7, 8, 9, 10, 11, 12, 13, 14, or 15 base pairs in length.

[0769] Typically the sequences forming the duplexed region have exact complementarity with one another, though in an embodiment as many as 1, 2, 3, 4, 5, 6, 7 or 8 nucleotides are not complementary with the corresponding nucleotides.

[0770] In an embodiment, the linking domain nucleotides do not comprise modifications, e.g., modifications of the type provided in Section VIII. However, in an embodiment, the linking domain comprises one or more modifications, e.g., modifications that it render it less susceptible to degradation or more bio-compatible, e.g., less immunogenic. By way of example, the backbone of the linking domain can be modified with a phosphorothioate, or other modification(s) from Section VIII. In an embodiment a nucleotide of the linking domain can comprise a 2′ modification (e.g., a modification at the 2′ position on ribose), e.g., a 2-acetylation, e.g., a 2′ methylation, or other modification(s) from Section VIII. In an embodiment, the linking domain can comprise as many as 1, 2, 3, 4, 5, 6, 7 or 8 modifications.

[0771] Modifications in a linking domain can be selected so as to not interfere with targeting efficacy, which can be evaluated by testing a candidate modification in the system described in Section IV. gRNAs having a candidate linking domain having a selected length, sequence, degree of complementarity, or degree of modification, can be evaluated a system described in Section IV. A candidate linking domain can be placed, either alone, or with one or more other candidate changes in a gRNA molecule/Cas9 molecule system known to be functional with a selected target and evaluated.

[0772] In an embodiment, the linking domain has at least 60, 70, 80, 85, 90 or 95% homology with, or differs by no more than 1, 2, 3, 4, 5, or 6 nucleotides from, a reference linking domain, e.g., a linking domain described herein, e.g., from FIGS. 1A-1G.

[0773] The Proximal Domain

[0774] In an embodiment, the proximal domain is 6+/−2, 7+/−2, 8+/−2, 9+/−2, 10+/−2, 11+/−2, 12+/−2, 13+/−2, 14+/−2, 14+/−2, 16+/−2, 17+/−2, 18+/−2, 19+/−2, or 20+/−2 nucleotides in length.

[0775] In an embodiment, the proximal domain is 6, 7, 8, 9, 10, 11, 12, 13, 14, 15, 16, 17, 18, 19, 20, 21, 22, 23, 24, 25 or 26 nucleotides in length.

[0776] In an embodiment, the proximal domain is 5 to 20, 7, to 18, 9 to 16, or 10 to 14 nucleotides in length.

[0777] In an embodiment, the proximal domain nucleotides do not comprise modifications, e.g., modifications of the type provided in Section VIII. However, in an embodiment, the proximal domain comprises one or more modifications, e.g., modifications that it render it less susceptible to degradation or more bio-compatible, e.g., less immunogenic. By way of example, the backbone of the proximal domain can be modified with a phosphorothioate, or other modification(s) from Section VIII. In an embodiment a nucleotide of the proximal domain can comprise a 2′ modification (e.g., a modification at the 2′ position on ribose), e.g., a 2-acetylation, e.g., a 2′ methylation, or other modification(s) from Section VIII.

[0778] In an embodiment, the proximal domain can comprise as many as 1, 2, 3, 4, 5, 6, 7 or 8 modifications. In an embodiment, the proximal domain comprises as many as 1, 2, 3, or 4 modifications within 5 nucleotides of its 5′ end, e.g., in a modular gRNA molecule. In an embodiment, the target domain comprises as many as 1, 2, 3, or 4 modifications within 5 nucleotides of its 3′ end, e.g., in a modular gRNA molecule.

[0779] In an embodiment, the proximal domain comprises modifications at two consecutive nucleotides, e.g., two consecutive nucleotides that are within 5 nucleotides of the 5′ end of the proximal domain, within 5 nucleotides of the 3′ end of the proximal domain, or more than 5 nucleotides away from one or both ends of the proximal domain. In an embodiment, no two consecutive nucleotides are modified within 5 nucleotides of the 5′ end of the proximal domain, within 5 nucleotides of the 3′ end of the proximal domain, or within a region that is more than 5 nucleotides away from one or both ends of the proximal domain. In an embodiment, no nucleotide is modified within 5 nucleotides of the 5′ end of the proximal domain, within 5 nucleotides of the 3′ end of the proximal domain, or within a region that is more than 5 nucleotides away from one or both ends of the proximal domain.

[0780] Modifications in the proximal domain can be selected so as to not interfere with gRNA molecule efficacy, which can be evaluated by testing a candidate modification in the system described in Section IV. gRNAs having a candidate proximal domain having a selected length, sequence, degree of complementarity, or degree of modification, can be evaluated in the system described at Section IV. The candidate proximal domain can be placed, either alone, or with one or more other candidate changes in a gRNA molecule/Cas9 molecule system known to be functional with a selected target and evaluated.

[0781] In an embodiment, the proximal domain has at least 60, 70, 80, 85 90 or 95% homology with, or differs by no more than 1, 2, 3.4, 5, or 6 nucleotides from, a reference proximal domain, e.g., a naturally occurring, e.g., an S. pyogenes, S. aureus or S. thermophilus, proximal domain, or a proximal domain described herein, e.g., from FIGS. 1A-1G.

[0782] The Tail Domain

[0783] In an embodiment, the tail domain is 10+/−5, 20+/−5, 30+/−5, 40+/−5, 50+/−5, 60+/−5, 70+/−5, 80+/−5, 90+/−5, or 100+/−5 nucleotides, in length.

[0784] In an embodiment, the tail domain is 20+/−5 nucleotides in length.

[0785] In an embodiment, the tail domain is 20+/−10, 30+/−10, 40+/−10, 50+/−10, 60+/−10, 70+/−10, 80+/−10, 90+/−10, or 100+/−10 nucleotides, in length.

[0786] In an embodiment, the tail domain is 25+/−10 nucleotides in length.

[0787] In an embodiment, the tail domain is 10 to 100, 10 to 90, 10 to 80, 10 to 70, 10 to 60, 10 to 50, 10 to 40, 10 to 30, 10 to 20 or 10 to 15 nucleotides in length.

[0788] In another embodiment, the tail domain is 20 to 100, 20 to 90, 20 to 80, 20 to 70, 20 to 60, 20 to 50, 20 to 40, 20 to 30, or 20 to 25 nucleotides in length.

[0789] In an embodiment, the tail domain is 1 to 20, 1 to 15, 1 to 10, or 1 to 5 nucleotides in length.

[0790] In an embodiment, the tail domain nucleotides do not comprise modifications, e.g., modifications of the type provided in Section VIII. However, in an embodiment, the tail domain comprises one or more modifications, e.g., modifications that it render it less susceptible to degradation or more bio-compatible, e.g., less immunogenic. By way of example, the backbone of the tail domain can be modified with a phosphorothioate, or other modification(s) from Section VIII. In an embodiment a nucleotide of the tail domain can comprise a 2′ modification (e.g., a modification at the 2′ position on ribose), e.g., a 2-acetylation, e.g., a 2′ methylation, or other modification(s) from Section VIII.

[0791] In an embodiment, the tail domain can have as many as 1, 2, 3, 4, 5, 6, 7 or 8 modifications. In an embodiment, the target domain comprises as many as 1, 2, 3, or 4 modifications within 5 nucleotides of its 5′ end. In an embodiment, the target domain comprises as many as 1, 2, 3, or 4 modifications within 5 nucleotides of its 3′ end.

[0792] In an embodiment, the tail domain comprises a tail duplex domain, which can form a tail duplexed region. In an embodiment, the tail duplexed region can be 3, 4, 5, 6, 7, 8, 9, 10, 11, or 12 base pairs in length. In an embodiment, a further single stranded domain, exists 3′ to the tail duplexed domain. In an embodiment, this domain is 3, 4, 5, 6, 7, 8, 9, or 10 nucleotides in length. In an embodiment it is 4 to 6 nucleotides in length.

[0793] In an embodiment, the tail domain has at least 60, 70, 80, or 90% homology with, or differs by no more than 1, 2, 3, 4, 5, or 6 nucleotides from, a reference tail domain, e.g., a naturally occurring, e.g., an S. pyogenes, S. aureus or S. thermophilus, tail domain, or a tail domain described herein, e.g., from FIGS. 1A-1G.

[0794] In an embodiment, the proximal and tail domain, taken together comprise the following sequences:

(SEQ ID NO: 33)

AAGGCUAGUCCGUUAUCAACUUGAAAAAGUGGCACCGAGUCGGUGCU,
or

(SEQ ID NO: 34)

AAGGCUAGUCCGUUAUCAACUUGAAAAAGUGGCACCGAGUCGGUGGUGC,
or

(SEQ ID NO: 35)

AAGGCUAGUCCGUUAUCAACUUGAAAAAGUGGCACCGAGUCGGUGCGGA
UC,
or

(SEQ ID NO: 36)

AAGGCUAGUCCGUUAUCAACUUGAAAAAGUG,
or

(SEQ ID NO: 37)

AAGGCUAGUCCGUUAUCA,
or

(SEQ ID NO: 38)

AAGGCUAGUCCG.

[0795] In an embodiment, the tail domain comprises the 3′ sequence UUUUUU, e.g., if a U6 promoter is used for transcription.

[0796] In an embodiment, the tail domain comprises the 3′ sequence UUUU, e.g., if an H1 promoter is used for transcription.

[0797] In an embodiment, tail domain comprises variable numbers of 3′ Us depending, e.g., on the termination signal of the pol-III promoter used.

[0798] In an embodiment, the tail domain comprises variable 3′ sequence derived from the DNA template if a T7 promoter is used.

[0799] In an embodiment, the tail domain comprises variable 3′ sequence derived from the DNA template, e.g., if in vitro transcription is used to generate the RNA molecule.

[0800] In an embodiment, the tail domain comprises variable 3′ sequence derived from the DNA template, e., if a pol-II promoter is used to drive transcription.

[0801] Modifications in the tail domain can be selected to not interfere with targeting efficacy, which can be evaluated by testing a candidate modification in the system described in Section IV. gRNAs having a candidate tail domain having a selected length, sequence, degree of complementarity, or degree of modification, can be evaluated in the system described in Section IV. The candidate tail domain can be placed, either alone, or with one or more other candidate changes in a gRNA molecule/Cas9 molecule system known to be functional with a selected target and evaluated.

[0802] In an embodiment, the tail domain comprises modifications at two consecutive nucleotides, e.g., two consecutive nucleotides that are within 5 nucleotides of the 5′ end of the tail domain, within 5 nucleotides of the 3′ end of the tail domain, or more than 5 nucleotides away from one or both ends of the tail domain. In an embodiment, no two consecutive nucleotides are modified within 5 nucleotides of the 5′ end of the tail domain, within 5 nucleotides of the 3′ end of the tail domain, or within a region that is more than 5 nucleotides away from one or both ends of the tail domain. In an embodiment, no nucleotide is modified within 5 nucleotides of the 5′ end of the tail domain, within 5 nucleotides of the 3′ end of the tail domain, or within a region that is more than 5 nucleotides away from one or both ends of the tail domain.

[0803] In an embodiment a gRNA has the following structure:

[0804] 5′ [targeting domain]-[first complementarity domain]-[linking domain]-[second complementarity domain]-[proximal domain]-[tail domain]-3′

[0805] wherein, the targeting domain comprises a core domain and optionally a secondary domain, and is 10 to 50 nucleotides in length;

[0806] the first complementarity domain is 5 to 25 nucleotides in length and, In an embodiment has at least 50, 60, 70, 80, 85, 90 or 95% homology with a reference first complementarity domain disclosed herein;

[0807] the linking domain is 1 to 5 nucleotides in length;

[0808] the second complementarity domain is 5 to 27 nucleotides in length and, in an embodiment has at least 50, 60, 70, 80, 85, 90 or 95% homology with a reference second complementarity domain disclosed herein;

[0809] the proximal domain is 5 to 20 nucleotides in length and, in an embodiment has at least 50, 60, 70, 80, 85, 90 or 95% homology with a reference proximal domain disclosed herein; and

[0810] the tail domain is absent or a nucleotide sequence is 1 to 50 nucleotides in length and, in an embodiment has at least 50, 60, 70, 80, 85, 90 or 95% homology with a reference tail domain disclosed herein.

[0811] Exemplary Chimeric gRNAs

[0812] In an embodiment, a unimolecular, or chimeric, gRNA comprises, preferably from 5′ to
[0813] 3′:
[0814] a targeting domain (which is complementary to a target nucleic acid); a first complementarity domain, e.g., comprising 15, 16, 17, 18, 19, 20, 21, 22,
[0815] 23, 24, 25, or 26 nucleotides;
[0816] a linking domain; a second complementarity domain (which is complementary to the first
[0817] complementarity domain);
[0818] a proximal domain; and
[0819] a tail domain,
[0820] wherein,
[0821] (a) the proximal and tail domain, when taken together, comprise at least 15, 18, 20, 25, 30, 31, 35, 40, 45, 49, 50, or 53 nucleotides;
[0822] (b) there are at least 15, 18, 20, 25, 30, 31, 35, 40, 45, 49, 50, or 53 nucleotides 3′ to the last nucleotide of the second complementarity domain; or
[0823] (c) there are at least 16, 19, 21, 26, 31, 32, 36, 41, 46, 50, 51, or 54 nucleotides 3′ to the last nucleotide of the second complementarity domain that is complementary to its corresponding nucleotide of the first complementarity domain.

[0824] In an embodiment, the sequence from (a). (b), or (c), has at least 60, 75, 80, 85, 90, 95, or 99% homology with the corresponding sequence of a naturally occurring gRNA, or with a gRNA described herein.

[0825] In an embodiment, the proximal and tail domain, when taken together, comprise at least 15, 18, 20, 25, 30, 31, 35, 40, 45, 49, 50, or 53 nucleotides.

[0826] In an embodiment, there are at least 15, 18, 20, 25, 30, 31, 35, 40, 45, 49, 50, or 53 nucleotides 3′ to the last nucleotide of the second complementarity domain.

[0827] In an embodiment, there are at least 16, 19, 21, 26, 31, 32, 36, 41, 46, 50, 51, or 54 nucleotides 3′ to the last nucleotide of the second complementarity domain that is complementary to its corresponding nucleotide of the first complementarity domain.

[0828] In an embodiment, the targeting domain comprises, has, or consists of, 16, 17, 18, 19, 20, 21, 22, 23, 24, 25 or 26 nucleotides (e.g., 16, 17, 18, 19, 20, 21, 22, 23, 24, 25 or 26 consecutive nucleotides) having complementarity with the target domain, e.g., the targeting domain is 16, 17, 18, 19, 20, 21, 22, 23, 24, 25, or 26 nucleotides in length.

[0829] In an embodiment, the targeting domain comprises, has, or consists of, 16 nucleotides (e.g., 16 consecutive nucleotides) having complementarity with the target domain, e.g., the targeting domain is 16 nucleotides in length.

[0830] In an embodiment, the targeting domain comprises, has, or consists of, 17 nucleotides (e.g., 17 consecutive nucleotides) having complementarity with the target domain, e.g., the targeting domain is 17 nucleotides in length.

[0831] In an embodiment, the targeting domain comprises, has, or consists of, 18 nucleotides (e.g., 18 consecutive nucleotides) having complementarity with the target domain, e.g., the targeting domain is 18 nucleotides in length.

[0832] In an embodiment, the targeting domain comprises, has, or consists of, 19 nucleotides (e.g., 19 consecutive nucleotides) having complementarity with the target domain, e.g., the targeting domain is 19 nucleotides in length.

[0833] In an embodiment, the targeting domain comprises, has, or consists of, 20 nucleotides (e.g., 20 consecutive nucleotides) having complementarity with the target domain, e.g., the targeting domain is 20 nucleotides in length.

[0834] In an embodiment, the targeting domain comprises, has, or consists of, 21 nucleotides (e.g., 21 consecutive nucleotides) having complementarity with the target domain, e.g., the targeting domain is 21 nucleotides in length.

[0835] In an embodiment, the targeting domain comprises, has, or consists of, 22 nucleotides (e.g., 22 consecutive nucleotides) having complementarity with the target domain, e.g., the targeting domain is 22 nucleotides in length.

[0836] In an embodiment, the targeting domain comprises, has, or consists of, 23 nucleotides (e.g., 23 consecutive nucleotides) having complementarity with the target domain, e.g., the targeting domain is 23 nucleotides in length.

[0837] In an embodiment, the targeting domain comprises, has, or consists of, 24 nucleotides (e.g., 24 consecutive nucleotides) having complementarity with the target domain, e.g., the targeting domain is 24 nucleotides in length.

[0838] In an embodiment, the targeting domain comprises, has, or consists of, 25 nucleotides (e.g., 25 consecutive nucleotides) having complementarity with the target domain, e.g., the targeting domain is 25 nucleotides in length.

[0839] In an embodiment, the targeting domain comprises, has, or consists of, 26 nucleotides (e.g., 26 consecutive nucleotides) having complementarity with the target domain, e.g., the targeting domain is 26 nucleotides in length.

[0840] In an embodiment, the targeting domain comprises, has, or consists of, 16 nucleotides (e.g., 16 consecutive nucleotides) having complementarity with the target domain, e.g., the targeting domain is 16 nucleotides in length; and the proximal and tail domain, when taken together, comprise at least 15, 18, 20, 25, 30, 31, 35, 40, 45, 49, 50, or 53 nucleotides.

[0841] In an embodiment, the targeting domain comprises, has, or consists of, 16 nucleotides (e.g., 16 consecutive nucleotides) having complementarity with the target domain, e.g., the targeting domain is 16 nucleotides in length; and there are at least 15, 18, 20, 25, 30, 31, 35, 40, 45, 49, 50, or 53 nucleotides 3′ to the last nucleotide of the second complementarity domain.

[0842] In an embodiment, the targeting domain comprises, has, or consists of, 16 nucleotides (e.g., 16 consecutive nucleotides) having complementarity with the target domain, e.g., the targeting domain is 16 nucleotides in length; and there are at least 16, 19, 21, 26, 31, 32, 36, 41, 46, 50, 51, or 54 nucleotides 3′ to the last nucleotide of the second complementarity domain that is complementary to its corresponding nucleotide of the first complementarity domain.

[0843] In an embodiment, the targeting domain comprises, has, or consists of, 17 nucleotides (e.g., 17 consecutive nucleotides) having complementarity with the target domain, e.g., the targeting domain is 17 nucleotides in length; and the proximal and tail domain, when taken together, comprise at least 15, 18, 20, 25, 30, 31, 35, 40, 45, 49, 50, or 53 nucleotides.

[0844] In an embodiment, the targeting domain comprises, has, or consists of, 17 nucleotides (e.g., 17 consecutive nucleotides) having complementarity with the target domain, e.g., the targeting domain is 17 nucleotides in length; and there are at least 15, 18, 20, 25, 30, 31, 35, 40, 45, 49, 50, or 53 nucleotides 3′ to the last nucleotide of the second complementarity domain.

[0845] In an embodiment, the targeting domain comprises, has, or consists of, 17 nucleotides (e.g., 17 consecutive nucleotides) having complementarity with the target domain, e.g., the targeting domain is 17 nucleotides in length; and there are at least 16, 19, 21, 26, 31, 32, 36, 41, 46, 50, 51, or 54 nucleotides 3′ to the last nucleotide of the second complementarity domain that is complementary to its corresponding nucleotide of the first complementarity domain.

[0846] In an embodiment, the targeting domain comprises, has, or consists of, 18 nucleotides (e.g., 18 consecutive nucleotides) having complementarity with the target domain, e.g., the targeting domain is 18 nucleotides in length; and the proximal and tail domain, when taken together, comprise at least15, 18, 20, 25, 30, 31, 35, 40, 45, 49, 50, or 53 nucleotides.

[0847] In an embodiment, the targeting domain comprises, has, or consists of, 18 nucleotides (e.g., 18 consecutive nucleotides) having complementarity with the target domain, e.g., the targeting domain is 18 nucleotides in length; and there are at least 15, 18, 20, 25, 30, 31, 35, 40, 45, 49, 50, or 53 nucleotides 3′ to the last nucleotide of the second complementarity domain.

[0848] In an embodiment, the targeting domain comprises, has, or consists of, 18 nucleotides (e.g., 18 consecutive nucleotides) having complementarity with the target domain, e.g., the targeting domain is 18 nucleotides in length; and there are at least 16, 19, 21, 26, 31, 32, 36, 41, 46, 50, 51, or 54 nucleotides 3′ to the last nucleotide of the second complementarity domain that is complementary to its corresponding nucleotide of the first complementarity domain.

[0849] In an embodiment, the targeting domain comprises, has, or consists of, 19 nucleotides (e.g., 19 consecutive nucleotides) having complementarity with the target domain, e.g., the targeting domain is 19 nucleotides in length; and the proximal and tail domain, when taken together, comprise at least 15, 18, 20, 25, 30, 31, 35, 40, 45, 49, 50, or 53 nucleotides.

[0850] In an embodiment, the targeting domain comprises, has, or consists of. 19 nucleotides (e.g., 19 consecutive nucleotides) having complementarity with the target domain, e.g., the targeting domain is 19 nucleotides in length; and there are at least 15, 18, 20, 25, 30, 31, 35, 40, 45, 49, 50, or 53 nucleotides 3′ to the last nucleotide of the second complementarity domain.

[0851] In an embodiment, the targeting domain comprises, has, or consists of, 19 nucleotides (e.g., 19 consecutive nucleotides) having complementarity with the target domain, e.g., the targeting domain is 19 nucleotides in length; and there are at least 16, 19, 21, 26, 31, 32, 36, 41, 46, 50, 51, or 54 nucleotides 3′ to the last nucleotide of the second complementarity domain that is complementary to its corresponding nucleotide of the first complementarity domain.

[0852] In an embodiment, the targeting domain comprises, has, or consists of, 20 nucleotides (e.g., 20 consecutive nucleotides) having complementarity with the target domain, e.g., the targeting domain is 20 nucleotides in length; and the proximal and tail domain, when taken together, comprise at least 15, 18, 20, 25, 30, 31, 35, 40, 45, 49, 50, or 53 nucleotides.

[0853] In an embodiment, the targeting domain comprises, has, or consists of, 20 nucleotides (e.g., 20 consecutive nucleotides) having complementarity with the target domain, e.g., the targeting domain is 20 nucleotides in length; and there are at least 15, 18, 20, 25, 30, 31, 35, 40, 45, 49, 50, or 53 nucleotides 3′ to the last nucleotide of the second complementarity domain.

[0854] In an embodiment, the targeting domain comprises, has, or consists of, 20 nucleotides (e.g., 20 consecutive nucleotides) having complementarity with the target domain, e.g., the targeting domain is 20 nucleotides in length; and there are at least 16, 19, 21, 26, 31, 32, 36, 41, 46, 50, 51, or 54 nucleotides 3′ to the last nucleotide of the second complementarity domain that is complementary to its corresponding nucleotide of the first complementarity domain.

[0855] In an embodiment, the targeting domain comprises, has, or consists of, 21 nucleotides (e.g., 21 consecutive nucleotides) having complementarity with the target domain, e.g., the targeting domain is 21 nucleotides in length; and the proximal and tail domain, when taken together, comprise at least 15, 18, 20, 25, 30, 31, 35, 40, 45, 49, 50, or 53 nucleotides.

[0856] In an embodiment, the targeting domain comprises, has, or consists of, 21 nucleotides (e.g., 21 consecutive nucleotides) having complementarity with the target domain, e.g., the targeting domain is 21 nucleotides in length; and there are at least 15, 18, 20, 25, 30, 31, 35, 40, 45, 49, 50, or 53 nucleotides 3′ to the last nucleotide of the second complementarity domain.

[0857] In an embodiment, the targeting domain comprises, has, or consists of, 21 nucleotides (e.g., 21 consecutive nucleotides) having complementarity with the target domain, e.g., the targeting domain is 21 nucleotides in length; and there are at least 16, 19, 21, 26, 31, 32, 36, 41, 46, 50, 51, or 54 nucleotides 3′ to the last nucleotide of the second complementarity domain that is complementary to its corresponding nucleotide of the first complementarity domain.

[0858] In an embodiment, the targeting domain comprises, has, or consists of, 22 nucleotides (e.g., 22 consecutive nucleotides) having complementarity with the target domain, e.g., the targeting domain is 22 nucleotides in length; and the proximal and tail domain, when taken together, comprise at least 15, 18, 20, 25, 30, 31, 35, 40, 45, 49, 50, or 53 nucleotides.

[0859] In an embodiment, the targeting domain comprises, has, or consists of, 22 nucleotides (e.g., 22 consecutive nucleotides) having complementarity with the target domain, e.g., the targeting domain is 22 nucleotides in length; and there are at least 15, 18, 20, 25, 30, 31, 35, 40, 45, 49, 50, or 53 nucleotides 3′ to the last nucleotide of the second complementarity domain.

[0860] In an embodiment, the targeting domain comprises, has, or consists of, 22 nucleotides (e.g., 22 consecutive nucleotides) having complementarity with the target domain, e.g., the targeting domain is 22 nucleotides in length; and there are at least 16, 19, 21, 26, 31, 32, 36, 41, 46, 50, 51, or 54 nucleotides 3′ to the last nucleotide of the second complementarity domain that is complementary to its corresponding nucleotide of the first complementarity domain.

[0861] In an embodiment, the targeting domain comprises, has, or consists of, 23 nucleotides (e.g., 23 consecutive nucleotides) having complementarity with the target domain, e.g., the targeting domain is 23 nucleotides in length; and the proximal and tail domain, when taken together, comprise at least 15, 18, 20, 25, 30, 31, 35, 40, 45, 49, 50, or 53 nucleotides.

[0862] In an embodiment, the targeting domain comprises, has, or consists of, 23 nucleotides (e.g., 23 consecutive nucleotides) having complementarity with the target domain, e.g., the targeting domain is 23 nucleotides in length; and there are at least 15, 18, 20, 25, 30, 31, 35, 40, 45, 49, 50, or 53 nucleotides 3′ to the last nucleotide of the second complementarity domain.

[0863] In an embodiment, the targeting domain comprises, has, or consists of, 23 nucleotides (e.g., 23 consecutive nucleotides) having complementarity with the target domain, e.g., the targeting domain is 23 nucleotides in length; and there are at least 16, 19, 21, 26, 31, 32, 36, 41, 46, 50, 51, or 54 nucleotides 3′ to the last nucleotide of the second complementarity domain that is complementary to its corresponding nucleotide of the first complementarity domain.

[0864] In an embodiment, the targeting domain comprises, has, or consists of, 24 nucleotides (e.g., 24 consecutive nucleotides) having complementarity with the target domain, e.g., the targeting domain is 24 nucleotides in length; and the proximal and tail domain, when taken together, comprise at least 15, 18, 20, 25, 30, 31, 35, 40, 45, 49, 50, or 53 nucleotides.

[0865] In an embodiment, the targeting domain comprises, has, or consists of, 24 nucleotides (e.g., 24 consecutive nucleotides) having complementarity with the target domain, e.g., the targeting domain is 24 nucleotides in length; and there are at least 15, 18, 20, 25, 30, 31, 35, 40, 45, 49, 50, or 53 nucleotides 3′ to the last nucleotide of the second complementarity domain.

[0866] In an embodiment, the targeting domain comprises, has, or consists of, 24 nucleotides (e.g., 24 consecutive nucleotides) having complementarity with the target domain, e.g., the targeting domain is 24 nucleotides in length; and there are at least 16, 19, 21, 26, 31, 32, 36, 41, 46, 50, 51, or 54 nucleotides 3′ to the last nucleotide of the second complementarity domain that is complementary to its corresponding nucleotide of the first complementarity domain.

[0867] In an embodiment, the targeting domain comprises, has, or consists of, 25 nucleotides (e.g., 25 consecutive nucleotides) having complementarity with the target domain, e.g., the targeting domain is 25 nucleotides in length; and the proximal and tail domain, when taken together, comprise at least 15, 18, 20, 25, 30, 31, 35, 40, 45, 49, 50, or 53 nucleotides.

[0868] In an embodiment, the targeting domain comprises, has, or consists of, 25 nucleotides (e.g., 25 consecutive nucleotides) having complementarity with the target domain, e.g., the targeting domain is 25 nucleotides in length; and there are at least 15, 18, 20, 25, 30, 31, 35, 40, 45, 49, 50, or 53 nucleotides 3′ to the last nucleotide of the second complementarity domain.

[0869] In an embodiment, the targeting domain comprises, has, or consists of, 25 nucleotides (e.g., 25 consecutive nucleotides) having complementarity with the target domain, e.g., the targeting domain is 25 nucleotides in length; and there are at least 16, 19, 21, 26, 31, 32, 36, 41, 46, 50, 51, or 54 nucleotides 3′ to the last nucleotide of the second complementarity domain that is complementary to its corresponding nucleotide of the first complementarity domain.

[0870] In an embodiment, the targeting domain comprises, has, or consists of, 26 nucleotides (e.g., 26 consecutive nucleotides) having complementarity with the target domain, e.g., the targeting domain is 26 nucleotides in length; and the proximal and tail domain, when taken together, comprise at least 15, 18, 20, 25, 30, 31, 35, 40, 45, 49, 50, or 53 nucleotides.

[0871] In an embodiment, the targeting domain comprises, has, or consists of, 26 nucleotides (e.g., 26 consecutive nucleotides) having complementarity with the target domain, e.g., the targeting domain is 26 nucleotides in length; and there are at least 15, 18, 20, 25, 30, 31, 35, 40, 45, 49, 50, or 53 nucleotides 3′ to the last nucleotide of the second complementarity domain.

[0872] In an embodiment, the targeting domain comprises, has, or consists of, 26 nucleotides (e.g., 26 consecutive nucleotides) having complementarity with the target domain, e.g., the targeting domain is 26 nucleotides in length; and there are at least 16, 19, 21, 26, 31, 32, 36, 41, 46, 50, 51, or 54 nucleotides 3′ to the last nucleotide of the second complementarity domain that is complementary to its corresponding nucleotide of the first complementarity domain.

[0873] In an embodiment, the unimolecular, or chimeric, gRNA molecule (comprising a targeting domain, a first complementary domain, a linking domain, a second complementary domain, a proximal domain and, optionally, a tail domain) comprises the following sequence in which the targeting domain is depicted as 20 Ns but could be any sequence and range in length from 16 to 26 nucleotides and in which the gRNA sequence is followed by 6 Us, which serve as a termination signal for the U6 promoter, but which could be either absent or fewer in number: NNNNNNNNNNNNNNNNNNNNGUUUUAGAGCUAGAAAUAGCAAGUUAAAAUAAGG CUAGUCCGUUAUCAACUUGAAAAAGUGGCACCGAGUCGGUGCUUUUUU (SEQ ID NO: 45). In an embodiment, the unimolecular, or chimeric, gRNA molecule is a S. pyogenes gRNA molecule.

[0874] In some embodiments, the unimolecular, or chimeric, gRNA molecule (comprising a targeting domain, a first complementary domain, a linking domain, a second complementary domain, a proximal domain and, optionally, a tail domain) comprises the following sequence in which the targeting domain is depicted as 20 Ns but could be any sequence and range in length from 16 to 26 nucleotides and in which the gRNA sequence is followed by 6 Us, which serve as a termination signal for the U6 promoter, but which could be either absent or fewer in number: NNNNNNNNNNNNNNNNNNNNGUUUUAGUACUCUGGAAACAGAAUCUACUAAAAC AAGGCAAAAUGCCGUGUUUAUCUCGUCAACUUGUUGGCGAGAUUUUUU (SEQ ID NO: 40). In an embodiment, the unimolecular, or chimeric, gRNA molecule is a S. aureus gRNA molecule.

[0875] The sequences and structures of exemplary chimeric gRNAs are also shown in FIGS. 1H-1I.

[0876] Exemplary Modular gRNAs

[0877] In an embodiment, a modular gRNA comprises:
[0878] a first strand comprising, preferably from 5′ to 3′;
   [0879] a targeting domain, e.g., comprising 15, 16, 17, 18, 19, 20, 21, 22, 23, 24, 25, or 26 nucleotides;
   [0880] a first complementarity domain; and
   [0881] a second strand, comprising, preferably from 5′ to 3′:
   [0882] optionally a 5′ extension domain;
   [0883] a second complementarity domain;
   [0884] a proximal domain; and
   [0885] a tail domain,
[0886] wherein:
[0887] (a) the proximal and tail domain, when taken together, comprise at least 15, 18, 20, 25, 30, 31, 35, 40, 45, 49, 50, or 53 nucleotides;
[0888] (b) there are at least 15, 18, 20, 25, 30, 31, 35, 40, 45, 49, 50, or 53 nucleotides 3′ to the last nucleotide of the second complementarity domain; or
[0889] (c) there are at least 16, 19, 21, 26, 31, 32, 36, 41, 46, 50, 51, or 54 nucleotides 3′ to the last nucleotide of the second complementarity domain that is complementary to its corresponding nucleotide of the first complementarity domain.

[0890] In an embodiment, the sequence from (a), (b), or (c), has at least 60, 75, 80, 85, 90, 95, or 99% homology with the corresponding sequence of a naturally occurring gRNA, or with a gRNA described herein.

[0891] In an embodiment, the proximal and tail domain, when taken together, comprise at least 15, 18, 20, 25, 30, 31, 35, 40, 45, 49, 50, or 53 nucleotides.

[0892] In an embodiment, there are at least 15, 18, 20, 25, 30, 31, 35, 40, 45, 49, 50, or 53 nucleotides 3′ to the last nucleotide of the second complementarity domain.

[0893] In an embodiment, there are at least 16, 19, 21, 26, 31, 32, 36, 41, 46, 50, 51, or 54 nucleotides 3′ to the last nucleotide of the second complementarity domain that is complementary to its corresponding nucleotide of the first complementarity domain.

[0894] In an embodiment, the targeting domain comprises, has, or consists of, 16, 17, 18, 19, 20, 21, 22, 23, 24, 25 or 26 nucleotides (e.g., 16, 17, 18, 19, 20, 21, 22, 23, 24, 25 or 26 consecutive nucleotides) having complementarity with the target domain, e.g., the targeting domain is 16, 17, 18, 19, 20, 21, 22, 23, 24, 25 or 26 nucleotides in length. In an embodiment, the targeting domain comprises, has, or consists of, 16 nucleotides (e.g., 16 consecutive nucleotides) having complementarity with the target domain, e.g., the targeting domain is 16 nucleotides in length.

[0895] In an embodiment, the targeting domain has, or consists of, 17 nucleotides (e.g., 17 consecutive nucleotides) having complementarity with the target domain, e.g., the targeting domain is 17 nucleotides in length.

[0896] In an embodiment, the targeting domain has, or consists of, 18 nucleotides (e.g., 18 consecutive nucleotides) having complementarity with the target domain, e.g., the targeting domain is 18 nucleotides in length.

[0897] In an embodiment, the targeting domain comprises, has, or consists of, 19 nucleotides (e.g., 19 consecutive nucleotides) having complementarity with the target domain, e.g., the targeting domain is 19 nucleotides in length.

[0898] In an embodiment, the targeting domain comprises, has, or consists of, 20 nucleotides (e.g., 20 consecutive nucleotides) having complementarity with the target domain, e.g., the targeting domain is 20 nucleotides in length.

[0899] In an embodiment, the targeting domain comprises, has, or consists of, 21 nucleotides (e.g., 21 consecutive nucleotides) having complementarity with the target domain, e.g., the targeting domain is 21 nucleotides in length.

[0900] In an embodiment, the targeting domain comprises, has, or consists of, 22 nucleotides (e.g., 22 consecutive nucleotides) having complementarity with the target domain, e.g., the targeting domain is 22 nucleotides in length.

[0901] In an embodiment, the targeting domain comprises, has, or consists of, 23 nucleotides (e.g., 23 consecutive nucleotides) having complementarity with the target domain, e.g., the targeting domain is 23 nucleotides in length.

[0902] In an embodiment, the targeting domain comprises, has, or consists of, 24 nucleotides (e.g., 24 consecutive nucleotides) having complementarity with the target domain, e.g., the targeting domain is 24 nucleotides in length.

[0903] In an embodiment, the targeting domain comprises, has, or consists of, 25 nucleotides (e.g., 25 consecutive nucleotides) having complementarity with the target domain, e.g., the targeting domain is 5 nucleotides in length.

[0904] In an embodiment, the targeting domain comprises, has, or consists of, 26 nucleotides (e.g., 26 consecutive nucleotides) having complementarity with the target domain, e.g., the targeting domain is 26 nucleotides in length.

[0905] In an embodiment, the targeting domain comprises, has, or consists of, 16 nucleotides (e.g., 16 consecutive nucleotides) having complementarity with the target domain, e.g., the targeting domain is 16 nucleotides in length; and the proximal and tail domain, when taken together, comprise at least 15, 18, 20, 25, 30, 31, 35, 40, 45, 49, 50, or 53 nucleotides.

[0906] In an embodiment, the targeting domain comprises, has, or consists of, 16 nucleotides (e.g., 16 consecutive nucleotides) having complementarity with the target domain, e.g., the targeting domain is 16 nucleotides in length; and there are at least 15, 18, 20, 25, 30, 31, 35, 40, 45, 49, 50, or 53 nucleotides 3′ to the last nucleotide of the second complementarity domain.

[0907] In an embodiment, the targeting domain comprises, has, or consists of, 16 nucleotides (e.g., 16 consecutive nucleotides) having complementarity with the target domain, e.g., the targeting domain is 16 nucleotides in length; and there are at least 16, 19, 21, 26, 31, 32, 36, 41, 46, 50, 51, or 54 nucleotides 3′ to the last nucleotide of the second complementarity domain that is complementary to its corresponding nucleotide of the first complementarity domain.

[0908] In an embodiment, the targeting domain has, or consists of, 17 nucleotides (e.g., 17 consecutive nucleotides) having complementarity with the target domain, e.g., the targeting domain is 17 nucleotides in length; and the proximal and tail domain, when taken together, comprise at least 15, 18, 20, 25, 30, 31, 35, 40, 45, 49, 50, or 53 nucleotides.

[0909] In an embodiment, the targeting domain has, or consists of, 17 nucleotides (e.g., 17 consecutive nucleotides) having complementarity with the target domain, e.g., the targeting domain is 17 nucleotides in length; and there are at least 15, 18, 20, 25, 30, 31, 35, 40, 45, 49, 50, or 53 nucleotides 3′ to the last nucleotide of the second complementarity domain.

[0910] In an embodiment, the targeting domain has, or consists of, 17 nucleotides (e.g., 17 consecutive nucleotides) having complementarity with the target domain, e.g., the targeting domain is 17 nucleotides in length; and there are at least 16, 19, 21, 26, 31, 32, 36, 41, 46, 50, 51, or 54 nucleotides 3′ to the last nucleotide of the second complementarity domain that is complementary to its corresponding nucleotide of the first complementarity domain.

[0911] In an embodiment, the targeting domain has, or consists of, 18 nucleotides (e.g., 18 consecutive nucleotides) having complementarity with the target domain, e.g., the targeting domain is 18 nucleotides in length; and the proximal and tail domain, when taken together, comprise at least 15, 18, 20, 25, 30, 31, 35, 40, 45, 49, 50, or 53 nucleotides.

[0912] In an embodiment, the targeting domain has, or consists of, 18 nucleotides (e.g., 18 consecutive nucleotides) having complementarity with the target domain, e.g., the targeting domain is 18 nucleotides in length; and there are at least 15, 18, 20, 25, 30, 31, 35, 40, 45, 49, 50, or 53 nucleotides 3′ to the last nucleotide of the second complementarity domain.

[0913] In an embodiment, the targeting domain has, or consists of, 18 nucleotides (e.g., 18 consecutive nucleotides) having complementarity with the target domain, e.g., the targeting domain is 18 nucleotides in length; and there are at least 16, 19, 21, 26, 31, 32, 36, 41, 46, 50, 51, or 54 nucleotides 3′ to the last nucleotide of the second complementarity domain that is complementary to its corresponding nucleotide of the first complementarity domain.

[0914] In an embodiment, the targeting domain comprises, has, or consists of, 19 nucleotides (e.g., 19 consecutive nucleotides) having complementarity with the target domain, e.g., the targeting domain is 19 nucleotides in length; and the proximal and tail domain, when taken together, comprise at least 15, 18, 20, 25, 30, 31, 35, 40, 45, 49, 50, or 53 nucleotides.

[0915] In an embodiment, the targeting domain comprises, has, or consists of, 19 nucleotides (e.g., 19 consecutive nucleotides) having complementarity with the target domain, e.g., the targeting domain is 19 nucleotides in length; and there are at least 15, 18, 20, 25, 30, 31, 35, 40, 45, 49, 50, or 53 nucleotides 3′ to the last nucleotide of the second complementarity domain.

[0916] In an embodiment, the targeting domain comprises, has, or consists of, 19 nucleotides (e.g., 19 consecutive nucleotides) having complementarity with the target domain, e.g., the targeting domain is 19 nucleotides in length; and there are at least 16, 19, 21, 26, 31, 32, 36, 41, 46, 50, 51, or 54 nucleotides 3′ to the last nucleotide of the second complementarity domain that is complementary to its corresponding nucleotide of the first complementarity domain.

[0917] In an embodiment, the targeting domain comprises, has, or consists of, 20 nucleotides (e.g., 20 consecutive nucleotides) having complementarity with the target domain, e.g., the targeting domain is 20 nucleotides in length; and the proximal and tail domain, when taken together, comprise at least 15, 18, 20, 25, 30, 31, 35, 40, 45, 49, 50, or 53 nucleotides.

[0918] In an embodiment, the targeting domain comprises, has, or consists of, 20 nucleotides (e.g., 20 consecutive nucleotides) having complementarity with the target domain, e.g., the targeting domain is 20 nucleotides in length; and there are at least 15, 18, 20, 25, 30, 31, 35, 40, 45, 49, 50, or 53 nucleotides 3′ to the last nucleotide of the second complementarity domain.

[0919] In an embodiment, the targeting domain comprises, has, or consists of, 20 nucleotides (e.g., 20 consecutive nucleotides) having complementarity with the target domain, e.g., the targeting domain is 20 nucleotides in length; and there are at least 16, 19, 21, 26, 31, 32, 36, 41, 46, 50, 51, or 54 nucleotides 3′ to the last nucleotide of the second complementarity domain that is complementary to its corresponding nucleotide of the first complementarity domain.

[0920] In an embodiment, the targeting domain comprises, has, or consists of, 21 nucleotides (e.g., 21 consecutive nucleotides) having complementarity with the target domain, e.g., the targeting domain is 21 nucleotides in length; and the proximal and tail domain, when taken together, comprise at least 15, 18, 20, 25, 30, 31, 35, 40, 45, 49, 50, or 53 nucleotides.

[0921] In an embodiment, the targeting domain comprises, has, or consists of, 21 nucleotides (e.g., 21 consecutive nucleotides) having complementarity with the target domain, e.g., the targeting domain is 21 nucleotides in length; and there are at least 15, 18, 20, 25, 30, 31, 35, 40, 45, 49, 50, or 53 nucleotides 3′ to the last nucleotide of the second complementarity domain.

[0922] In an embodiment, the targeting domain comprises, has, or consists of, 21 nucleotides (e.g., 21 consecutive nucleotides) having complementarity with the target domain, e.g., the targeting domain is 21 nucleotides in length; and there are at least 16, 19, 21, 26, 31, 32, 36, 41, 46, 50, 51, or 54 nucleotides 3′ to the last nucleotide of the second complementarity domain that is complementary to its corresponding nucleotide of the first complementarity domain.

[0923] In an embodiment, the targeting domain comprises, has, or consists of, 22 nucleotides (e.g., 22 consecutive nucleotides) having complementarity with the target domain, e.g., the targeting domain is 22 nucleotides in length; and the proximal and tail domain, when taken together, comprise at least 15, 18, 20, 25, 30, 31, 35, 40, 45, 49, 50, or 53 nucleotides.

[0924] In an embodiment, the targeting domain comprises, has, or consists of, 22 nucleotides (e.g., 22 consecutive nucleotides) having complementarity with the target domain, e.g., the targeting domain is 22 nucleotides in length; and there are at least 15, 18, 20, 25, 30, 31, 35, 40, 45, 49, 50, or 53 nucleotides 3′ to the last nucleotide of the second complementarity domain.

[0925] In an embodiment, the targeting domain comprises, has, or consists of, 22 nucleotides (e.g., 22 consecutive nucleotides) having complementarity with the target domain, e.g., the targeting domain is 22 nucleotides in length; and there are at least 16, 19, 21, 26, 31, 32, 36, 41, 46, 50, 51, or 54 nucleotides 3′ to the last nucleotide of the second complementarity domain that is complementary to its corresponding nucleotide of the first complementarity domain.

[0926] In an embodiment, the targeting domain comprises, has, or consists of, 23 nucleotides (e.g., 23 consecutive nucleotides) having complementarity with the target domain, e.g., the targeting domain is 23 nucleotides in length; and the proximal and tail domain, when taken together, comprise at least 15, 18, 20, 25, 30, 31, 35, 40, 45, 49, 50, or 53 nucleotides.

[0927] In an embodiment, the targeting domain comprises, has, or consists of, 23 nucleotides (e.g., 23 consecutive nucleotides) having complementarity with the target domain, e.g., the targeting domain is 23 nucleotides in length; and there are at least 15, 18, 20, 25, 30, 31, 35, 40, 45, 49, 50, or 53 nucleotides 3′ to the last nucleotide of the second complementarity domain.

[0928] In an embodiment, the targeting domain comprises, has, or consists of, 23 nucleotides (e.g., 23 consecutive nucleotides) having complementarity with the target domain, e.g., the targeting domain is 23 nucleotides in length; and there are at least 16, 19, 21, 26, 31, 32, 36, 41, 46, 50, 51, or 54 nucleotides 3′ to the last nucleotide of the second complementarity domain that is complementary to its corresponding mucleotide of the first complementarity domain.

[0929] In an embodiment, the targeting domain comprises, has, or consists of, 24 nucleotides (e.g., 24 consecutive nucleotides) having complementarity with the target domain, e.g., the targeting domain is 24 nucleotides in length; and the proximal and tail domain, when taken together, comprise at least 15, 18, 20, 25, 30, 31, 35, 40, 45, 49, 50, or 53 nucleotides.

[0930] In an embodiment, the targeting domain comprises, has, or consists of, 24 nucleotides (e.g., 24 consecutive nucleotides) having complementarity with the target domain, e.g., the targeting domain is 24 nucleotides in length; and there are at least 15, 18, 20, 25, 30, 31, 35, 40, 45, 49, 50, or 53 nucleotides 3′ to the last nucleotide of the second complementarity domain.

[0931] In an embodiment, the targeting domain comprises, has, or consists of, 24 nucleotides (e.g., 24 consecutive nucleotides) having complementarity with the target domain, e.g., the targeting domain is 24 nucleotides in length; and there are at least 16, 19, 21, 26, 31, 32, 36, 41, 46, 50, 51, or 54 nucleotides 3′ to the last nucleotide of the second complementarity domain that is complementary to its corresponding nucleotide of the first complementarity domain.

[0932] In an embodiment, the targeting domain comprises, has, or consists of, 25 nucleotides (e.g., 25 consecutive nucleotides) having complementarity with the target domain, e.g., the targeting domain is 25 nucleotides in length; and the proximal and tail domain, when taken together, comprise at least 15, 18, 20, 25, 30, 31, 35, 40, 45, 49, 50, or 53 nucleotides.

[0933] In an embodiment, the targeting domain comprises, has, or consists of, 25 nucleotides (e.g., 25 consecutive nucleotides) having complementarity with the target domain, e.g., the targeting domain is 25 nucleotides in length; and there are at least 15, 18, 20, 25, 30, 31, 35, 40, 45, 49, 50, or 53 nucleotides 3′ to the last nucleotide of the second complementarity domain.

[0934] In an embodiment, the targeting domain comprises, has, or consists of, 25 nucleotides (e.g., 25 consecutive nucleotides) having complementarity with the target domain, e.g., the targeting domain is 25 nucleotides in length; and there are at least 16, 19, 21, 26, 31, 32, 36, 41, 46, 50, 51, or 54 nucleotides 3′ to the last nucleotide of the second complementarity domain that is complementary to its corresponding nucleotide of the first complementarity domain.

[0935] In an embodiment, the targeting domain comprises, has, or consists of, 26 nucleotides (e.g., 26 consecutive nucleotides) having complementarity with the target domain, e.g., the targeting domain is 26 nucleotides in length; and the proximal and tail domain, when taken together, comprise at least 15, 18, 20, 25, 30, 31, 35, 40, 45, 49, 50, or 53 nucleotides.

[0936] In an embodiment, the targeting domain comprises, has, or consists of, 26 nucleotides (e.g., 26 consecutive nucleotides) having complementarity with the target domain, e.g., the targeting domain is 26 nucleotides in length; and there are at least 15, 18, 20, 25, 30, 31, 35, 40, 45, 49, 50, or 53 nucleotides 3′ to the last nucleotide of the second complementarity domain.

[0937] In an embodiment, the targeting domain comprises, has, or consists of, 26 nucleotides (e.g., 26 consecutive nucleotides) having complementarity with the target domain, e.g., the targeting domain is 26 nucleotides in length; and there are at least 16, 19, 21, 26, 31, 32, 36, 41, 46, 50, 51, or 54 nucleotides 3′ to the last nucleotide of the second complementarity domain that is complementary to its corresponding nucleotide of the first complementarity domain.

[0938] II. Methods for Designing gRNAs

[0939] Methods for designing gRNAs are described herein, including methods for selecting, designing and validating target domains. Exemplary targeting domains are also provided herein. Targeting Domains discussed herein can be incorporated into the gRNAs described herein.

[0940] Methods for selection and validation of target sequences as well as off-target analyses are described, e.g., in Mali et al., 2013 Science 339(6121): 823-826; Hsu et al. Nat Biotechnol, 31(9): 827-32; Fu et al., 2014 Nat Biotechnol. doi: 10.1038/nbt.2808. PubMed PMID: 24463574; Heigwer et al., 2014 Nat Methods 11(2):122-3. doi: 10.1038/nmeth.2812. PubMed PMID: 24481216; Bae et al., 2014 Bioinformatics PubMed PMID: 24463181; Xiao A et al., 2014 Bioinformatics PubMed PMID: 24389662.

[0941] For example, a software tool can be used to optimize the choice of gRNA within a user's target sequence, e.g., to minimize total off-target activity across the genome. Off target activity may be other than cleavage. For each possible gRNA choice using S. pyogenes Cas9, software tools can identify all potential off-target sequences (preceding either NAG or NGG PAMs) across the genome that contain up to a certain number (e.g., 1, 2, 3, 4, 5, 6, 7, 8, 9, or 10) of mismatched base-pairs. The cleavage efficiency at each off-target sequence can be predicted, e.g., using an experimentally-derived weighting scheme. Each possible gRNA can then ranked according to its total predicted off-target cleavage; the top-ranked gRNAs represent those that are likely to have the greatest on-target and the least off-target cleavage. Other functions, e.g., automated reagent design for gRNA vector construction, primer design for the on-target Surveyor assay, and primer design for high-throughput detection and quantification of off-target cleavage via next-generation sequencing, can also be included in the tool. Candidate gRNA molecules can be evaluated by art-known methods or as described in Section IV herein.

[0942] Guide RNAs (gRNAs) for use with S. pyogenes, S. aureus and N. meningitidis Cas9s were identified using a DNA sequence searching algorithm. Guide RNA design was carried out using a custom guide RNA design software based on the public tool cas-offinder (reference:Cas-OFFinder: a fast and versatile algorithm that searches for potential off-target sites of Cas9 RNA-guided endonucleases., Bioinformatics. 2014 Feb. 17. Bae S, Park J, Kim J S. PMID:24463181). Said custom guide RNA design software scores guides after calculating their genomewide off-target propensity. Typically matches ranging from perfect matches to 7 mismatches are considered for guides ranging in length from 17 to 24. Once the off-target sites are computationally determined, an aggregate score is calculated for each guide and summarized in a tabular output using a web-interface. In addition to identifying potential gRNA sites adjacent to PAM sequences, the software also identifies all PAM adjacent sequences that differ by 1, 2, 3 or more nucleotides from the selected gRNA sites. Genomic DNA sequence for each gene was obtained from the UCSC Genome browser and sequences were screened for repeat elements using the publically available RepeatMasker program. RepeatMasker searches input DNA sequences for repeated elements and regions of low complexity. The output is a detailed annotation of the repeats present in a given query sequence.

[0943] Following identification, gRNAs were ranked into tiers based on their distance to the target site, their orthogonality or presence of a 5′ G (based on identification of close matches in the human genome containing a relavant PAM (e.g., in the case of S. pyogenes, a NGG PAM, in the case of S. aureus, a NNGRRT or NNGRRV PAM, and in the case of N. meningitidis, a NNNNGATT or NNNNGCTT PAM). Orthogonality refers to the number of sequences in the human genome that contain a minimum number of mismatches to the target sequence. A “high level of orthogonality” or “good orthogonality” may, for example, refer to 20-mer gRNAs that have no identical sequences in the human genome besides the intended target, nor any sequences that contain one or two mismatches in the target sequence. Targeting domains with good orthogonality are selected to minimize off-target DNA cleavage.

[0944] As an example, for S. pyogenes and N. meningitidis targets, 17-mer, or 20-mer gRNAs were designed. As another example, for S. aureus targets, 18-mer, 19-mer, 20-mer, 21-mer, 22-mer, 23-mer and 24-mer gRNAs were designed. Targeting domains, disclosed herein, may comprise the 17-mer described in Tables 1A-1D, 2A-2F, 3A-3C, 4A-4E, 5A-5E, 6A-6B, 7A-7D, 8A-8D, 9, 10A-10D, 11A-11D, 12, 13A-13D, 14A-14C, 15A-15D, 16A-16E, 17A-17B, 18A-18C, 19A-19E, 20A-20C, 21A-21E, 22A-22E, 23A-23C, 24A-24D, 25A-25B, 26, or 31, e.g., the targeting domains of 18 or more nucleotides may comprise the 17-mer gRNAs described in Tables 1A-1D, 2A-2F, 3A-3C, 4A-4E, 5A-5E, 6A-6B, 7A-7D, 8A-8D, 9, 10A-10D, 11A-11D, 12, 13A-13D, 14A-14C, 15A-15D, 16A-16E, 17A-17B, 18A-18C, 19A-19E, 20A-20C, 21A-21E, 22A-22E, 23A-23C, 24A-24D, 25A-25B, 26, or 31. Targeting domains, disclosed herein, may comprises the 18-mer described in Tables 1A-1D, 2A-2F, 3A-3C, 4A-4E, 5A-5E, 6A-6B, 7A-7D, 8A-8D, 9, 10A-10D, 11A-11D, 12, 13A-13D, 14A-14C, 15A-15D, 16A-16E, 17A-17B, 18A-18C, 19A-19E, 20A-20C, 21A-21E, 22A-22E, 23A-23C, 24A-24D, 25A-25B, 26, or 31, e.g., the targeting domains of 19 or more nucleotides may comprise the 18-mer gRNAs described in Tables 1A-1D, 2A-2F, 3A-3C, 4A-4E, 5A-5E, 6A-6B, 7A-7D, 8A-8D, 9, 10A-10D, 11A-11D, 12, 13A-13D, 14A-14C, 15A-15D, 16A-16E, 17A-17B, 18A-18C, 19A-19E, 20A-20C, 21A-21E, 22A-22E, 23A-23C, 24A-24D, 25A-25B, 26, or 31. Targeting domains, disclosed herein, may comprises the 19-mer described in Tables 1A-1D, 2A-2F, 3A-3C, 4A-4E, 5A-5E, 6A-6B, 7A-7D, 8A-8D, 9, 10A-10D, 11A-11D, 12, 13A-13D, 14A-14C, 15A-15D, 16A-16E, 17A-17B, 18A-18C, 19A-19E, 20A-20C, 21A-21E, 22A-22E, 23A-23C, 24A-24D, 25A-25B, 26, or 31, e.g., the targeting domains of 20 or more nucleotides may comprise the 19-mer gRNAs described in Tables 1A-1D, 2A-2F, 3A-3C, 4A-4E, 5A-5E, 6A-6B, 7A-7D, 8A-8D, 9, 10A-10D, 11A-11D, 12, 13A-13D, 14A-14C, 15A-15D, 16A-16E, 17A-17B, 18A-18C, 19A-19E, 20A-20C, 21A-21E, 22A-22E, 23A-23C, 24A-24D, 25A-25B, 26, or 31. Targeting domains, disclosed herein, may comprises the 20-mer gRNAs described in Tables 1A-1D, 2A-2F, 3A-3C, 4A-4E, 5A-5E, 6A-6B, 7A-7D, 8A-8D, 9, 10A-10D, 11A-11D, 12, 13A-13D, 14A-14C, 15A-15D, 16A-16E, 17A-17B, 18A-18C, 19A-19E, 20A-20C, 21A-21E, 22A-22E, 23A-23C, 24A-24D, 25A-25B, 26, or 31, e.g., the targeting domains of 21 or more nucleotides may comprise the 20-mer gRNAs described in Tables 1A-1D, 2A-2F, 3A-3C, 4A-4E, 5A-5E, 6A-6B, 7A-7D, 8A-8D, 9, 10A-10D, 11A-11D, 12, 13A-13D, 14A-14C, 15A-15D, 16A-16E, 17A-17B, 18A-18C, 19A-19E, 20A-20C, 21A-21E, 22A-22E, 23A-23C, 24A-24D, 25A-25B, 26, or 31. Targeting domains, disclosed herein, may comprises the 21-mer described in Tables 1A-1D, 2A-2F, 3A-3C, 4A-4E, 5A-5E, 6A-6B, 7A-7D, 8A-8D, 9, 10A-10D, 11A-11D, 12, 13A-13D, 14A-14C, 15A-15D, 16A-16E, 17A-17B, 18A-18C, 19A-19E, 20A-20C, 21A-21E, 22A-22E, 23A-23C, 24A-24D, 25A-25B, 26, or 31, e.g., the targeting domains of 22 or more nucleotides may comprise the 21-mer gRNAs described in Tables 1A-1D, 2A-2F, 3A-3C, 4A-4E, 5A-5E, 6A-6B, 7A-7D, 8A-8D, 9, 10A-10D, 11A-11D, 12, 13A-13D, 14A-14C, 15A-15D, 16A-16E, 17A-17B, 18A-18C, 19A-19E, 20A-20C, 21A-21E, 22A-22E, 23A-23C, 24A-24D, 25A-25B, 26, or 31. Targeting domains, disclosed herein, may comprises the 22-mer described in Tables 1A-1D, 2A-2F, 3A-3C, 4A-4E, 5A-5E, 6A-6B, 7A-7D, 8A-8D, 9, 10A-10D, 11A-11D, 12, 13A-13D, 14A-14C, 15A-15D, 16A-16E, 17A-17B, 18A-18C, 19A-19E, 20A-20C, 21A-21E, 22A-22E, 23A-23C, 24A-24D, 25A-25B, 26, or 31, e.g., the targeting domains of 23 or more nucleotides may comprise the 22-mer gRNAs described in Tables 1A-1D, 2A-2F, 3A-3C, 4A-4E, 5A-5E, 6A-6B, 7A-7D, 8A-8D, 9, 10A-10D, 11A-11D, 12, 13A-13D, 14A-14C, 15A-15D, 16A-16E, 17A-17B, 18A-18C, 19A-19E, 20A-20C, 21A-21E, 22A-22E, 23A-23C, 24A-24D, 25A-25B, 26, or 31. Targeting domains, disclosed herein, may comprises the 23-mer described in Tables 1A-1D, 2A-2F, 3A-3C, 4A-4E, 5A-5E, 6A-6B, 7A-7D, 8A-8D, 9, 10A-10D, 11A-11D, 12, 13A-13D, 14A-14C, 15A-15D, 16A-16E, 17A-17B, 18A-18C, 19A-19E, 20A-20C, 21A-21E, 22A-22E, 23A-23C, 24A-24D, 25A-25B, 26, or 31,e.g., the targeting domains of 24 or more nucleotides may comprise the 23-mer gRNAs described in Tables 1A-1D, 2A-2F, 3A-3C, 4A-4E, 5A-5E, 6A-6B, 7A-7D, 8A-8D, 9, 10A-10D, 11A-11D, 12, 13A-13D, 14A-14C, 15A-15D, 16A-16E, 17A-17B, 18A-18C, 19A-19E, 20A-20C, 21A-21E, 22A-22E, 23A-23C, 24A-24D, 25A-25B, 26, or 31. Targeting domains, disclosed herein, may comprises the 24-mer described in Tables 1A-1D, 2A-2F, 3A-3C, 4A-4E, 5A-5E, 6A-6B, 7A-7D, 8A-8D, 9, 10A-10D, 11A-11D, 12, 13A-13D, 14A-14C, 15A-15D, 16A-16E, 17A-17B, 18A-18C, 19A-19E, 20A-20C, 21A-21E, 22A-22E, 23A-23C, 24A-24D, 25A-25B, 26, or 31, e.g., the targeting domains of 25 or more nucleotides may comprise the 24-mer gRNAs described in Tables 1A-1D, 2A-2F, 3A-3C, 4A-4E, 5A-5E, 6A-6B, 7A-7D, 8A-8D, 9, 10A-10D, 11A-11D, 12, 13A-13D, 14A-14C, 15A-15D, 16A-16E, 17A-17B, 18A-18C, 19A-19E, 20A-20C, 21A-21E, 22A-22E, 23A-23C, 24A-24D, 25A-25B, 26, or 31.

[0945] gRNAs were identified for both single-gRNA nuclease cleavage and for a dual-gRNA paired “nickase” strategy. Criteria for selecting gRNAs and the determination for which gRNAs can be used for the dual-gRNA paired “nickase” strategy is based on two considerations:
[0946] 1. gRNA pairs should be oriented on the DNA such that PAMs are facing out and cutting with the D10A Cas9 nickase will result in 5′ overhangs.
[0947] 2. An assumption that cleaving with dual nickase pairs will result in deletion of the entire intervening sequence at a reasonable frequency. However, cleaving with dual nickase pairs can also result in indel mutations at the site of only one of the gRNAs. Candidate pair members can be tested for how efficiently they remove the entire sequence versus causing indel mutations at the site of one gRNA.

[0948] The targeting domains discussed herein can be incorporated into the gRNAs described herein.

[0949] Strategies to Identify gRNAs for S. pyogenes, S. Aureus, and N. meningitidis to Correct a Mutation in the HBB Gene

[0950] gRNAs were designed for use with S. pyogenes, and S. aureus Cas9 enzymes to target the E6V mutation in the HBB gene. As an example, three strategies were utilized to identify gRNAs for use with S. pyogenes, S. aureus and N. meningitidis Cas9 enzymes.

[0951] In one strategy, the gRNAs were identified and ranked into 3 tiers for S. pyogenes (Tables 1A-1C). The targeting domains for tier 1 gRNA molecules for use with the S. pyogenes Cas9 to target the E6V mutation in the HBB gene were selected based on (1) a reasonable distance to the target position, and (2) a high level of orthogonality. Tier 2 gRNAs were selected based on (1), a reasonable distance to the target position, and (2) presence of a 5′G. Tier 3 used the same distance restriction, but removed the requirement of good orthogonality and the 5′G. Note that tiers are non-inclusive (each gRNA is listed only once). gRNAs for use with the S. aureus (Table 1D), Cas9s were identified manually by scanning genomic DNA sequence for the presence of PAM sequences. These gRNAs were not separated into tiers, but were listed in a single list.

[0952] In a second strategy, the gRNAs were identified and ranked into 4 tiers for S. pyogenes (Tables 13A-13D) and 5 tiers for S. aureus (Tables 14A-14C). The targeting domain for tier 1 gRNA molecules to use with S. pyogenes Cas9 were selected based on (1) a short distance to the target position, e.g., within 100 bp upstream and 100 bp downstream of the mutation, (2) a high level of orthogonality, and (3) the presence of a 5′ G. For selection of tier 2 gRNAs, a short distance and high orthogonality were required but the presence of a 5′G was not required. Tier 3 uses the same distance restriction and the requirement for a 5′G, but removes the requirement of good orthogonality. Tier 4 uses the same distance restriction but removes the requirement of good orthogonality and the 5′G. The targeting domain for tier 1 gRNA molecules to use with S. aureus Cas9 were selected based on (1) a short distance to the target position, e.g., within 100 bp upstream and 100 bp downstream of the mutation, (2) a high level of orthogonality, and (3) the presence of a 5′ G. For selection of tier 2 gRNAs, a short distance and high orthogonality were required but the presence of a 5′G was not required. Tier 3 uses the same distance restriction and the requirement for a 5′G, but removes the requirement of good orthogonality. Tier 4 uses the same distance restriction but removes the requirement of good orthogonality and the 5′G. Tier 5 is selected based on (1) a short distance to the target position, e.g., within 100 bp upstream and 100 bp downstream of the mutation and (2) PAM is NNGRRV. Note that tiers are non-inclusive (each gRNA is listed only once for the strategy). In certain instances, no gRNA was identified based on the criteria of the particular tier. In some instances, there are no corresponding exemplary gRNAs in certain tiers.

[0953] In a third strategy, the gRNAs were identified and ranked into 3 tiers for S. pyogenes (Tables 24A-24D), 4 tiers for S. aureus (Tables 25A-25B) and 3 tiers for N. meningitidis (Tables 26). The targeting domain for tier 1 gRNA molecules to use with S. pyogenes Cas9 were selected based on (1) distance to the target position, e.g., within 200 bp upstream and 200 bp downstream of the mutation and (2) a high level of orthogonality. The targeting domain for tier 2 gRNA molecules to use with S. pyogenes Cas9 were selected based on (1) distance to the target position, e.g., within 200 bp upstream and 200 bp downstream of the mutation and (2) the presence of a 5′G. The targeting domain for tier 3 gRNA molecules to use with S. pyogenes Cas9 were selected based on distance to the target position, e.g., within 200 bp upstream and 200 bp downstream of the mutation. The targeting domain for tier 1 gRNA molecules to use with S. aureus Cas9 were selected based on (1) distance to the target position, e.g., within 200 bp upstream and 200 bp downstream of the mutation, (2) a high level of orthogonality and (3) PAM is NNGRRT. The targeting domain for tier 2 gRNA molecules to use with S. aureus Cas9 were selected based on (1) distance to the target position, e.g., within 200 bp upstream and 200 bp downstream of the mutation, (2) the presence of a 5′G, and (3) PAM is NNGRRT. The targeting domain for tier 3 gRNA molecules to use with S. aureus Cas9 were selected based on (1) distance to the target position, e.g., within 200 bp upstream and 200 bp downstream of the mutation and (2) PAM is NNGRRT. The targeting domain for tier 4 gRNA molecules to use with S. aureus Cas9 were selected based on (1) distance to the target position, e.g., within 200 bp upstream and 200 bp downstream of the mutation and (2) PAM is NNGRRV. The targeting domain for tier 1 gRNA molecules to use with N. meningitidis Cas9 were selected based on (1) distance to the target position, e.g., within 200 bp upstream and 200 bp downstream of the mutation and (2) a high level of orthogonality. The targeting domain for tier 2 gRNA molecules to use with N. meningitidis Cas9 were selected based on (1) distance to the target position, e.g., within 200 bp upstream and 200 bp downstream of the mutation and (2) the presence of a 5′G. The targeting domain for tier 3 gRNA molecules to use with N. meningitidis Cas9 were selected based on distance to the target position, e.g., within 200 bp upstream and 200 bp downstream of the mutation.

[0954] In an embodiment, dual targeting (e.g., dual nicking) is used to create two nicks on opposite DNA strands by using S. pyogenes, S. aureus and N. meningitidis Cas9 nickases with two targeting domains that are complementary to opposite DNA strands, e.g., a gRNA comprising any minus strand targeting domain may be paired any gRNA comprising a plus strand targeting domain provided that the two gRNAs are oriented on the DNA such that PAMs face outward and the distance between the 5′ ends of the gRNAs is 0-50 bp. Exemplary nickase pairs including selecting a targeting domain from Group A and a second targeting domain from Group B in Table 24D (for S. pyogenes). It is contemplated herein that in an embodiment a targeting domain of Group A can be combined with any of the targeting domains of Group B in Table 24D (for S. pyogenes). For example, HBB-9, HBB-20can be combined with HBB-11, HBB-39.

[0955] Strategies to Identify gRNAs for S. pyogenes, S. Aureus, and N. meningitidis to Knock Out the BCL11A Gene

[0956] gRNAs were designed for use with S. pyogenes, S. aureus and N. meningitidis Cas9 enzymes to induce an insertion or deletion of one or more nucleotides mediated by NHEJ in close proximity to or within the early coding region. As an example, three strategies were utilized to identify gRNAs for use with S. pyogenes, S. aureus and N. meningitidis Cas9 enzymes.

[0957] In one strategy, the gRNAs were identified and ranked into 4 tires for S. pyogenes (Tables 2A-2D). The targeting domains for tier 1 gRNA molecules for use with the S. pyogenes Cas9 to knockout the BCL11A gene were selected based on (1) a reasonable distance to the target position, and (2) a high level of orthogonality. Tier 2 gRNAs were selected based on (1), a reasonable distance to the target position, and (2) presence of a 5′G. Tier 3 used the same distance restriction, but removed the requirement of good orthogonality and the 5′G. Tier 4 only required the presence in the coding sequence. Note that tiers are non-inclusive (each gRNA is listed only once). gRNAs for use with the S. aureus (Table 2E), and N. meningitidis (Table 2F) Cas9s were identified manually by scanning genomic DNA sequence for the presence of PAM sequences. These gRNAs were not separated into tiers, but were listed in a single list. Note that tiers are non-inclusive (each gRNA is listed only once for the strategy). In certain instances, no gRNA was identified based on the criteria of the particular tier.

[0958] In a second strategy, the gRNAs were identified and ranked into 5 tiers for S. pyogenes (Tables 4A-4E), and S. aureus (Tables 5A-5E); and 2 tiers for N. meningitidis (Tables 6A-6B). For S. pyogenes, and S. aureus, the targeting domain for tier 1 gRNA molecules were selected based on (1) distance to a target site (e.g., start codon), e.g., within 500 bp (e.g., downstream) of the target site (e.g., start codon), (2) a high level of orthogonality and (3) the presence of 5′G. The targeting domain for tier 2 gRNA molecules were selected based on (1) distance to a target site (e.g., start codon), e.g., within 500 bp (e.g., downstream) of the target site (e.g., start codon) and (2) a high level of orthogonality. The targeting domain for tier 3 gRNA molecules were selected based on (1) distance to a target site (e.g., start codon), e.g., within 500 bp (e.g., downstream) of the target site (e.g., start codon) and (2) the presence of 5′G. The targeting domain for tier 4 gRNA molecules were selected based on distance to a target site (e.g., start codon), e.g., within 500 bp (e.g., downstream) of the target site (e.g., start codon). The targeting domain for tier 5 gRNA molecules were selected based on distance to the target site (e.g., start codon), e.g., within reminder of the coding sequence, e.g., downstream of the first 500 bp of coding sequence (e.g., anywhere from +500 (relative to the start codon) to the stop codon). For N. meningitidis, the targeting domain for tier 1 gRNA molecules were selected based on (I) distance to a target site (e.g., start codon), e.g., within 500 bp (e.g., downstream) of the target site (e.g., start codon). The targeting domain for tier 2 gRNA molecules were selected based on distance to the target site (e.g., start codon), e.g., within reminder of the coding sequence, e.g., downstream of the first 500 bp of coding sequence (e.g., anywhere from +500 (relative to the start codon) to the stop codon). Note that tiers are non-inclusive (each gRNA is listed only once for the strategy). In certain instances, no gRNA was identified based on the criteria of the particular tier.

[0959] In a third strategy, the gRNAs were identified and ranked into 3 tiers for S. pyogenes (Tables 15A-15D), and N. meningitidis (Tables 17A-17B); and 5 tiers for S. aureus (Tables 16A-16D). The targeting domain to be used with S. pyogenes Cas9 enzymes for tier 1 gRNA molecules were selected based on (1) distance to a target site (e.g., start codon), e.g., within 500 bp (e.g., downstream) of the target site (e.g., start codon) and (2) a high level of orthogonality. The targeting domain to be used with S. pyogenes Cas9 enzymes for tier 2 gRNA molecules were selected based on (1) distance to the target site (e.g., start codon), e.g., within 500 bp (e.g., downstream) of the target site (e.g., start codon). The targeting domain to be used with S. pyogenes Cas9 enzymes for tier 3 gRNA molecules were selected based on distance to the target site (e.g., start codon), e.g., within reminder of the coding sequence, e.g., downstream of the first 500 bp of coding sequence (e.g., anywhere from +500 (relative to the start codon) to the stop codon). The gRNAs were identified and ranked into 5 tiers for S. aureus, when the relevant PAM was NNGRRT or NNGRRV. The targeting domain to be used with S. aureus Cas9 enzymes for tier 1 gRNA molecules were selected based on (1) distance to the target site (e.g., start codon), e.g., within 500 bp (e.g., downstream) of the target site (e.g., start codon), (2) a high level of orthogonality, and (3) PAM is NNGRRT. The targeting domain to be used with S. aureus Cas9 enzymes for tier 2 gRNA molecules were selected based on (1) distance to the target site (e.g., start codon), e.g., within 500 bp (e.g., downstream) of the target site (e.g., start codon), and (2) PAM is NNGRRT. The targeting domain to be used with S. aureus Cas9 enzymes for tier 3 gRNA molecules were selected based on (1) distance to a the target site (e.g., start codon) mutation, e.g., within 500 bp (e.g., downstream) of the target site (e.g., start codon), and (2) PAM is NNGRRV. The targeting domain to be used with S. aureus Cas9 enzymes for tier 4 gRNA molecules were selected based on (1) distance to the target site (e.g., start codon), e.g., within reminder of the coding sequence, e.g., downstream of the first 500 bp of coding sequence (e.g., anywhere from +500 (relative to the start codon) to the stop codon), and (2) PAM is NNGRRT. The targeting domain to be used with S. aureus Cas9 enzymes for tier 5 gRNA molecules were selected based on (1) distance to the target site (e.g., start codon), e.g., within reminder of the coding sequence, e.g., downstream of the first 500 bp of coding sequence (e.g., anywhere from +500 (relative to the start codon) to the stop codon), and (2) PAM is NNGRRV. The gRNAs were identified and ranked into 3 tiers for N. meningitidis. The targeting domain to be used with N. meningitidis Cas9 enzymes for tier 1 gRNA molecules were selected based on (1) distance to the target site, e.g., within 500 bp (e.g., downstream) of the target site (e.g., start codon) and (2) a high level of orthogonality. The targeting domain to be used with N. meningitidis Cas9 enzymes for tier 2 gRNA molecules were selected based on (1) distance to the target site (e.g., start codon), e.g., within 500 bp (e.g., downstream) of the target site (e.g., start codon). The targeting domain to be used with N. meningitidis Cas9 enzymes for tier 3 gRNA molecules were selected based on distance to the target site (e.g., start codon), e.g., within reminder of the coding sequence, e.g., downstream of the first 500 bp of coding sequence (e.g., anywhere from +500 (relative to the start codon) to the stop codon). Note that tiers are non-inclusive (each gRNA is listed only once for the strategy). In certain instances, no gRNA was identified based on the criteria of the particular tier.

[0960] In an embodiment, when a single gRNA molecule is used to target a Cas9 nickase to create a single strand break in close proximity to the BCL11A target position, e.g., the gRNA is used to target either upstream of (e.g., within 500 bp, e.g., within 200 bp upstream of the BCL11A target position), or downstream of (e.g., within 500 bp, e.g., within 200 bp downstream of the BCL11A target position) in the BCL11A gene.

[0961] In an embodiment, when a single gRNA molecule is used to target a Cas9 nuclease to create a double strand break to in close proximity to the BCL target position, e.g., the gRNA is used to target either upstream of (e.g., within 500 bp, e.g., within 200 bp upstream of the BCL11A target position), or downstream of (e.g., within 500 bp, e.g., within 200 bp downstream of the BCL11A target position) in the BCL11A gene.

[0962] In an embodiment, dual targeting is used to create two double strand breaks to in close proximity to the mutation, e.g., the gRNA is used to target either upstream of (e.g., within 500 bp, e.g., within 200 bp upstream of the BCL11A target position), or downstream of (e.g., within 500 bp, e.g., within 200 bp downstream of the BCL11A target position) in the BCL11A gene. In an embodiment, the first and second gRNAs are used to target two Cas9 nucleases to flank, e.g., the first of gRNA is used to target upstream of (e.g., within 500 bp, e.g., within 200 bp upstream of the BCL11A target position), and the second gRNA is used to target downstream of (e.g., within 500 bp, e.g., within 200 bp downstream of the BCL11A target position) in the BCL11A gene.

[0963] In an embodiment, dual targeting is used to create a double strand break and a pair of single strand breaks to delete a genomic sequence including the BCL11A target position. In an embodiment, the first, second and third gRNAs are used to target one Cas9 nuclease and two Cas9 nickases to flank, e.g., the first gRNA that will be used with the Cas9 nuclease is used to target upstream of (e.g., within 500 bp, e.g., within 200 bp upstream of the BCL11A target position) or downstream of (e.g., within 500 bp, e.g., within 200 bp downstream of the BCL11A target position), and the second and third gRNAs that will be used with the Cas9 nickase pair are used to target the opposite side of the mutation (e.g., within 200 bp upstream or downstream of the BCL11A target position) in the BCL11A gene.

[0964] In an embodiment, when four gRNAs (e.g., two pairs) are used to target four Cas9 nickases to create four single strand breaks to delete genomic sequence including the mutation, the first pair and second pair of gRNAs are used to target four Cas9 nickases to flank, e.g., the first pair of gRNAs are used to target upstream of (e.g., within 500 bp, e.g., within 200 bp upstream of the BCL11A target position), and the second pair of gRNAs are used to target downstream of (e.g., within 500 bp. e.g., within 200 bp downstream of the BCL11A target position) in the BCL11A gene.

[0965] In an embodiment, dual targeting (e.g., dual nicking) is used to create two nicks on opposite DNA strands by using S. pyogenes, S. aureus and N. meningitidis Cas9 nickases with two targeting domains that are complementary to opposite DNA strands, e.g., a gRNA comprising any minus strand targeting domain may be paired any gRNA comprising a plus strand targeting domain provided that the two gRNAs are oriented on the DNA such that PAMs face outward and the distance between the 5′ ends of the gRNAs is 0-50 bp. Exemplary nickase pairs including selecting a targeting domain from Group A and a second targeting domain from Group B, or including selecting a targeting domain from Group C and a second targeting domain from Group D in Table 15D (for S. pyogenes). It is contemplated herein that in an embodiment a targeting domain of Group A can be combined with any of the targeting domains of Group B; in an embodiment a targeting domain of Group C can be combined with any of the targeting domains of Group D in Table 15D (for S. pyogenes). For example, BCL11A-5355 or BCL11A-5380 can be combined with BCL11A-5321 or BCL11A-5416; or BCL11A-5333, BCL11A-5354, or BCL11A-5329 can be combined with BCL11A-5367 or BCL11A-5341.

[0966] Strategies to Identify gRNAs for S. pyogenes, S. Aureus, and N. meningitidis to Knock Down the BCL11A Gene

[0967] gRNAs were designed for use with S. pyogenes, S. aureus and N. meningitidis one or more Cas9 molecules, e.g., enzymatically inactive Cas9 (eiCas9) molecules or Cas9 fusion proteins (e.g., an eiCas9 fused to a transcription repressor domain or chromatin modifying protein to alter (e.g., to block, reduce, or decrease) the transcription of the BCL11A gene. As an example, three strategies were utilized to identify gRNAs for use with S. pyogenes, S. aureus and N. meningitidis one or more Cas9 molecules.

[0968] In one strategy, the targeting domains for gRNA molecules to knockdown the BCL11A gene were designed to target the 1 kb of sequence 3′ of the start codon. They were listed in a single list for S. pyogenes (Table 3A), S. aureus (Table 3B) and N. meningitidis (Table 3C).

[0969] In a second strategy, the gRNAs were identified and ranked into 4 tiers for S. pyogenes (Tables 10A-10D), and S. aureus (Tables 11A-11D). The gRNAs were identified and listed in a single list for N. meningitidis (Table 12). For S. pyogenes, and S. aureus, the targeting domain for tier 1 gRNA molecules were selected based on (1) distance to a target site (e.g., a transcription start site), e.g., within 500 bp (e.g., upstream or downstream) of the target site (e.g., the transcription start site), (2) a high level of orthogonality and (3) the presence of 5′G. The targeting domain for tier 2 gRNA molecules were selected based on (1) distance to a target site (e.g., the transcription start site), e.g., within 500 bp (e.g., upstream or downstream) of the target site (e.g., the transcription start site) and (2) a high level of orthogonality. The targeting domain for tier 3 gRNA molecules were selected based on (1) distance to a target site (e.g., the transcription start site), e.g., within 500 bp (e.g., upstream or downstream) of the target site (e.g., the transcription start site) and (2) the presence of 5′G. The targeting domain for tier 4 gRNA molecules were selected based on distance to a target site (e.g., the transcription start site), e.g., within 500 bp (e.g., upstream or downstream) of the target site (e.g., the transcription start site).

[0970] In a third strategy, gRNAs were designed for use with S. pyogenes, S. aureus and N. meningitidis Cas9 molecules. The gRNAs were identified and ranked into 3 tiers for S. pyogenes (Tables 18A-18C). The targeting domain to be used with S. pyogenes Cas9 enzymes for tier 1 gRNA molecules were selected based on (1) distance to a target site (e.g., the transcription start site), e.g., within 500 bp (e.g., upstream or downstream) of the target site (e.g., the transcription start site) and (2) a high level of orthogonality. The targeting domain to be used with S. pyogenes Cas9 enzymes for tier 2 gRNA molecules were selected based on (1) distance to the target site (e.g., the transcription start site), e.g., within 500 bp (e.g., upstream or downstream) of the target site (e.g., the transcription start site). The targeting domain to be used with S. pyogenes Cas9 enzymes for tier 3 gRNA molecules were selected based on distance to the target site (e.g., the transcription start site), e.g., within the additional 500 bp upstream and downstream of the transcription start site (i.e., extending to 1 kb upstream and downstream of the transcription start site. The gRNAs were identified and ranked into 5 tiers for S. aureus, when the relevant PAM was NNGRRT or NNGRRV (Tables 19A-19B). The targeting domain to be used with S. aureus Cas9 enzymes for tier 1 gRNA molecules were selected based on (1) distance to the target site (e.g., the transcription start site), e.g., within 500 bp (e.g., upstream or downstream) of the target site (e.g., the transcription start site), (2) a high level of orthogonality, and (3) PAM is NNGRRT. The targeting domain to be used with S. aureus Cas9 enzymes for tier 2 gRNA molecules were selected based on (1) distance to the target site (e.g., the transcription start site), e.g., within 500 bp (e.g., upstream or downstream) of the target site (e.g., the transcription start site), and (2) PAM is NNGRRT. The targeting domain to be used with S. aureus Cas9 enzymes for tier 3 gRNA molecules were selected based on (1) distance to a target site (e.g., the transcription start site), e.g., within 500 bp (e.g., upstream or downstream) of the target site (e.g., the transcription start site), and (2) PAM is NNGRRV. The targeting domain to be used with S. aureus Cas9 enzymes for tier 4 gRNA molecules were selected based on (1) distance to the target site (e.g., the transcription start site), e.g., within the additional 500 bp upstream and downstream of the transcription start site (i.e., extending to 1 kb upstream and downstream of the transcription start site, and (2) PAM is NNGRRT. The targeting domain to be used with S. aureus Cas9 enzymes for tier 5 gRNA molecules were selected based on (1) distance to the target site (e.g., the transcription start site), e.g., within the additional 500 bp upstream and downstream of the transcription start site (i.e., extending to 1 kb upstream and downstream of the transcription start site, and (2) PAM is NNGRRV. The gRNAs were identified and ranked into 3 tiers for N. meningitidis (Tables 20A-20C). The targeting domain to be used with N. meningitidis Cas9 enzymes for tier 1 gRNA molecules were selected based on (1) distance to a target site (e.g., the transcription start site), e.g., within 500 bp (e.g., upstream or downstream) of the target site (e.g., the transcription start site) and (2) a high level of orthogonality. The targeting domain to be used with N. meningitidis Cas9 enzymes for tier 2 gRNA molecules were selected based on (1) distance to the target site (e.g., the transcription start site), e.g., within 500 bp (e.g., upstream or downstream) of the target site (e.g., the transcription start site). The targeting domain to be used with N. meningitidis Cas9 enzymes for tier 3 gRNA molecules were selected based on distance to the target site (e.g., the transcription start site), e.g., within the additional 500 bp upstream and downstream of the transcription start site (i.e., extending to 1 kb upstream and downstream of the transcription start site. Note that tiers are non-inclusive (each gRNA is listed only once for the strategy). In certain instances, no gRNA was identified based on the criteria of the particular tier.

[0971] Strategies to Identify gRNAs for S. pyogenes. S. Aureus, and N. meningitidis to Remove (e.g., Delete) the Enhancer Region the BCL11A Gene

[0972] gRNAs were designed for use with S. pyogenes, S. aureus and N. meningitidis Cas9 enzymes to remove (e.g., delete) the enhancer region in the BCL11A gene. As an example, two strategies were utilized to identify gRNAs for use with S. pyogenes, S. aureus and N. meningitidis one or more Cas9 molecules.

[0973] In an strategy, the gRNAs were identified and ranked into 4 tiers for S. pyogenes (Tables 7A-7D) and for S. aureus (Tables 8A-8D). The gRNAs were identified and listed in a single list for N. meningitidis (Table 9). The targeting domains for tier 1 gRNA molecules for use with the S. pyogenes, S. aureus Cas9 were selected based on (1) a reasonable distance to the target position, e.g., within a region 5′ (51.5 to 51.7 kb downstream of transcription start site, TSS) or 3′ (65.1 to 65.3 kb downstream of TSS), (2) a high level of orthogonality and (3) presence of a 5′G. For selection of tier 2 gRNAs, reasonable distance and high orthogonality were required but the presence of a 5′G was not required. Tier 3 uses the same distance restriction and the requirement for a 5′G, but removes the requirement of good orthogonality. Tier 4 uses the same distance restriction but removes the requirement of good orthogonality and the 5′G. Note that tiers are non-inclusive (each gRNA is listed only once for the strategy). In certain instances, no gRNA was identified based on the criteria of the particular tier.

[0974] In a second strategy, gRNAs were designed for use with S. pyogenes, S. aureus and N. meningitidis Cas9 molecules. The gRNAs were identified and ranked into 4 tiers for S. pyogenes (Tables 21A-21E). The targeting domain to be used with S. pyogenes Cas9 enzymes for tier 1 gRNA molecules were selected based on (1) within a region 5′ (51.5 to 51.7 kb downstream of TSS) or 3′ (65.1 to 65.3 kb downstream of TSS), (2) a high level of orthogonality and (3) presence of 5′G. The targeting domain to be used with S. pyogenes Cas9 enzymes for tier 2 gRNA molecules were selected based on (1) within a region 5′ (51.5 to 51.7 kb downstream of TSS) or 3′ (65.1 to 65.3 kb downstream of TSS) and (2) a high level of orthogonality. The targeting domain to be used with S. pyogenes Cas9 enzymes for tier 3 gRNA molecules were selected based on (1) within a region 5′ (51.5 to 51.7 kb downstream of TSS) or 3′ (65.1 to 65.3 kb downstream of TSS) and (2) presence of 5′G. The targeting domain to be used with S. pyogenes Cas9 enzymes for tier 4 gRNA molecules were selected based on within a region 5′ (51.5 to 51.7 kb downstream of TSS) or 3′ (65.1 to 65.3 kb downstream of TSS). The gRNAs were identified and ranked into 5 tiers for S. aureus, when the relevant PAM was NNGRRT or NNGRRV (Tables 22A-22E). The targeting domain to be used with S. aureus Cas9 enzymes for tier 1 gRNA molecules were selected based on (1) within a region 5′ (51.5 to 51.7 kb downstream of TSS) or 3′ (65.1 to 65.3 kb downstream of TSS), (2) a high level of orthogonality, (3)) presence of 5′G and (4) PAM is NNGRRT. The targeting domain to be used with S. aureus Cas9 enzymes for tier 2 gRNA molecules were selected based on (1) within a region 5′ (51.5 to 51.7 kb downstream of TSS) or 3′ (65.1 to 65.3 kb downstream of TSS), (2) a high level of orthogonality, and (3) PAM is NNGRRT. The targeting domain to be used with S. aureus Cas9 enzymes for tier 3 gRNA molecules were selected based on (1) within a region 5′ (51.5 to 51.7 kb downstream of TSS) or 3′ (65.1 to 65.3 kb downstream of TSS), (2) presence of 5′G and (3) PAM is NNGRRT. The targeting domain to be used with S. aureus Cas9 enzymes for tier 4 gRNA molecules were selected based on (1) within a region 5′ (51.5 to 51.7 kb downstream of TSS) or 3′ (65.1 to 65.3 kb downstream of TSS), and (2) PAM is NNGRRT. The targeting domain to be used with S. aureus Cas9 enzymes for tier 5 gRNA molecules were selected based on (1) within a region 5′ (51.5 to 51.7 kb downstream of TSS) or 3′ (65.1 to 65.3 kb downstream of TSS), and (2) PAM is NNGRRV. The gRNAs were identified and ranked into 3 tiers for N. meningitidis (Tables 23A-23C). The targeting domain to be used with N. meningitidis Cas9 enzymes for tier 1 gRNA molecules were selected based on (1) within a region 5′ (51.5 to 51.7 kb downstream of TSS) or 3′ (65.1 to 65.3 kb downstream of TSS), (2) a high level of orthogonality and (3) presence of 5′G. The targeting domain to be used with N. meningitidis Cas9 enzymes for tier 2 gRNA molecules were selected based on (1) within a region 5′ (51.5 to 51.7 kb downstream of TSS) or 3′ (65.1 to 65.3 kb downstream of TSS) and (2) a high level of orthogonality. The targeting domain to be used with N. meningitidis Cas9 enzymes for tier 3 gRNA molecules were selected based on (1) within a region 5′ (51.5 to 51.7 kb downstream of TSS) or 3′ (65.1 to 65.3 kb downstream of TSS) and (2) presence of 5′G. The targeting domain to be used with N. meningitidis Cas9 enzymes for tier 4 gRNA molecules were selected based on within a region 5′ (51.5 to 51.7 kb downstream of TSS) or 3′ (65.1 to 65.3 kb downstream of TSS). Note that tiers are non-inclusive (each gRNA is listed only once for the strategy). In certain instances, no gRNA was identified based on the criteria of the particular tier.

[0975] In an embodiment, dual targeting (e.g., dual nicking) is used to create two nicks on opposite DNA strands by using S. pyogenes, S. aureus and N. meningitidis Cas9 nickases with two targeting domains that are complementary to opposite DNA strands, e.g., a gRNA comprising any minus strand targeting domain may be paired any gRNA comprising a plus strand targeting domain provided that the two gRNAs are oriented on the DNA such that PAMs face outward and the distance between the 5′ ends of the gRNAs is 0-50 bp. Exemplary nickase pairs including selecting a targeting domain from Group A and a second targeting domain from Group B, or including selecting a targeting domain from Group C and a second targeting domain from Group D in Table 20E (for S. pyogenes). It is contemplated herein that in an embodiment a targeting domain of Group A can be combined with any of the targeting domains of Group B; in an embodiment a targeting domain of Group C can be combined with any of the targeting domains of Group Din Table 20E (for S. pyogenes). For example, BCL11A-13271 or BCL11A-13264 can be combined with BCL11A-13276; or BCL11A-13262 or BCL11A-13282 can be combined with BCL11A-13290 or BCL11A-13280.

[0976] In an embodiment, two or more (e.g., three or four) gRNA molecules are used with one Cas9 molecule. In another embodiment, when two or more (e.g., three or four) gRNAs are used with two or more Cas9 molecules, at least one Cas9 molecule is from a different species than the other Cas9 molecule(s). For example, when two gRNA molecules are used with two Cas9 molecules, one Cas9 molecule can be from one species and the other Cas9 molecule can be from a different species. Both Cas9 species are used to generate a single or double-strand break, as desired.

[0977] Any of the targeting domains in the tables described herein can be used with a Cas9 nickase molecule to generate a single strand break.

[0978] Any of the targeting domains in the tables described herein can be used with a Cas9 nuclease molecule to generate a double strand break.

[0979] When two gRNAs designed for use to target two Cas9 molecules, one Cas9 can be one species, the second Cas9 can be from a different species. Both Cas9 species are used to generate a single or double-strand break, as desired.

[0980] It is contemplated herein that any upstream gRNA described herein may be paired with any downstream gRNA described herein. When an upstream gRNA designed for use with one species of Cas9 is paired with a downstream gRNA designed for use from a different species of Cas9, both Cas9 species are used to generate a single or double-strand break, as desired.

[0981] Exemplary Targeting Domains

[0982] Table 1A provides exemplary targeting domains for the E6V target site in the HBB gene selected according to the first tier parameters, and are selected based on the close proximity and orientation to mutation and orthogonality in the human genome. In an embodiment, the targeting domain is the exact complement of the target domain. Any of the targeting domains in the table can be used with a Cas9 molecule (e.g., a S. pyogenes Cas9 molecule) that gives double stranded cleavage. Any of the targeting domains in the table can be used with a Cas9 (e.g., a S. pyogenes Cas9 nickase) molecule to generate a single strand break. In an embodiment, dual targeting is used to create two nicks on opposite DNA strands by using Cas9 nickases (e.g., a S. pyogenes Cas9 nickase) with two targeting domains that are complementary to opposite DNA strands, e.g., a gRNA comprising any minus strand targeting domain may be paired any gRNA comprising a plus strand targeting domain provided that the two gRNAs are oriented on the DNA such that PAMs face outward and the distance between the 5′ ends of the gRNAs is 0-50 bp. When selecting gRNAs for use in a nickase pair, one gRNA targets a domain in the complementary strand and the second gRNA targets a domain in the non-complementary strand, e.g., a gRNA comprising any minus strand targeting domain may be paired any gRNA comprising a plus strand targeting domain targeting the same target position. In an embodiment, two 20-mer guide RNAs are used to target two Cas9 nucleases (e.g., two S. pyogenes Cas9 nucleases) or two Cas9 nickases (e.g., two S. pyogenes Cas9 nickases), e.g., HBB-8 and HBB-25 are used. In an embodiment, two 17-mer RNAs are used to target two Cas9 nucleases or two Cas9 nickases, e.g., HBB-35 and HBB-53 are used.

TABLE 1A
1st Tier

| | | | Target | |
|---|---|---|---|---|
| | DNA | | Site | SEQ ID |
| gRNA Name | Strand | Targeting Domain | Length | NO |
| HBB-8 | − | AAGGUGAACGUGGAUGAAGU | 20 | 387 |
| HBB-25 | + | GUAACGGCAGACUUCUCCUC | 20 | 388 |
| HBB-35 | − | GUGAACGUGGAUGAAGU | 17 | 389 |
| HBB-53 | + | ACGGCAGACUUCUCCUC | 17 | 390 |

[0983] Table 1B provides exemplary targeting domains for the E6V target site in the HBB gene selected according to the second tier parameters and are selected based on the presence of a 5′ G and reasonable proximity to mutation. In an embodiment, the targeting domain is the exact complement of the target domain. Any of the targeting domains in the table can be used with a S. pyogenes Cas9 molecule that gives double stranded cleavage. Any of the targeting domains in the table can be used with S. pyogenes single-stranded break nucleases (nickases). In an embodiment, dual targeting is used to create two nicks. When selecting gRNAs for use in a nickase pair, one gRNA targets a domain in the complementary strand and the second gRNA targets a domain in the non-complementary strand, e.g., a gRNA comprising any minus strand targeting domain may be paired any gRNA comprising a plus strand targeting domain targeting the same target position.

TABLE 1B
2nd Tier

| | | | Target | |
|---|---|---|---|---|
| | DNA | | Site | SEQ ID |
| gRNA Name | Strand | Targeting Domain | Length | NO |
| HBB-12 | − | GAAGUUGGUGGUGAGGCCCU | 20 | 391 |
| HBB-1 | − | GCAACCUCAAACAGACACCA | 20 | 392 |
| HBB-52 | + | GCCCCACAGGGCAGUAA | 17 | 393 |
| HBB-32 | − | GCCGUUACUGCCCUGUG | 17 | 394 |
| HBB-46 | − | GGAGACCAAUAGAAACU | 17 | 395 |
| HBB-37 | − | GGAUGAAGUUGGUGGUG | 17 | 396 |
| HBB-29 | − | GGUGCAUCUGACUCCUG | 17 | 397 |
| HBB-4 | − | GUCUGCCGUUACUGCCCUGU | 20 | 398 |
| HBB-9 | − | GUGAACGUGGAUGAAGUUGG | 20 | 399 |
| HBB-34 | − | GUGGGGCAAGGUGAACG | 17 | 400 |
| HBB-40 | − | GUGGUGAGGCCCUGGGC | 17 | 401 |
| HBB-44 | − | GUUACAAGACAGGUUUA | 17 | 402 |
| HBB-51 | + | GUUCACCUUGCCCCACA | 17 | 403 |
| HBB-39 | − | GUUGGUGGUGAGGCCCU | 17 | 404 |

[0984] Table 1C provides exemplary targeting domains for the E6V target site in the HBB gene selected according to the third tier parameters and are selected based on reasonable proximity to mutation. In an embodiment, the targeting domain is the exact complement of the target domain. Any of the targeting domains in the table can be used with a S. pyogenes Cas9 molecule that gives double stranded cleavage. Any of the targeting domains in the table can be used with S. pyogenes single-stranded break nucleases (nickases). In an embodiment, dual targeting is used to create two nicks. When selecting gRNAs for use in a nickase pair, one gRNA targets a domain in the complementary strand and the second gRNA targets a domain in the non-complementary strand, e.g., a gRNA comprising any minus strand targeting domain may be paired any gRNA comprising a plus strand targeting domain targeting the same target position.

TABLE 1C
3rd Tier

| | | | Target | |
|---|---|---|---|---|
| | DNA | | Site | SEQ ID |
| gRNA Name | Strand | Targeting Domain | Length | NO |
| HBB-36 | − | AACGUGGAUGAAGUUGG | 17 | 405 |
| HBB-17 | − | AAGGUUACAAGACAGGUUUA | 20 | 406 |
| HBB-47 | + | ACAUGCCCAGUUUCUAU | 17 | 407 |
| HBB-55 | + | ACCAUGGUGUCUGUUUG | 17 | 408 |
| HBB-28 | − | ACCUCAAACAGACACCA | 17 | 409 |
| HBB-20 | + | ACCUUGAUACCAACCUGCCC | 20 | 410 |
| HBB-45 | − | AGGAGACCAAUAGAAAC | 17 | 411 |
| HBB-54 | + | AGGAGUCAGAUGCACCA | 17 | 412 |
| HBB-3 | − | AGUCUGCCGUUACUGCCCUG | 20 | 413 |
| HBB-38 | − | AGUUGGUGGUGAGGCCC | 17 | 414 |
| HBB-23 | + | CACGUUCACCUUGCCCCACA | 20 | 415 |
| HBB-2 | − | CAUGGUGCAUCUGACUCCUG | 20 | 416 |
| HBB-22 | + | CCACGUUCACCUUGCCCCAC | 20 | 417 |
| HBB-15 | − | CCCUGGGCAGGUUGGUAUCA | 20 | 418 |
| HBB-7 | − | CCUGUGGGGCAAGGUGAACG | 20 | 419 |
| HBB-21 | + | CCUUGAUACCAACCUGCCCA | 20 | 420 |
| HBB-10 | − | CGUGGAUGAAGUUGGUGGUG | 20 | 421 |
| HBB-6 | − | CGUUACUGCCCUGUGGGGCA | 20 | 422 |
| HBB-50 | + | CGUUCACCUUGCCCCAC | 17 | 423 |
| HBB-26 | + | CUCAGGAGUCAGAUGCACCA | 20 | 424 |
| HBB-30 | − | CUGCCGUUACUGCCCUG | 17 | 425 |
| HBB-24 | + | CUUGCCCCACAGGGCAGUAA | 20 | 426 |
| HBB-19 | − | UAAGGAGACCAAUAGAAACU | 20 | 427 |
| HBB-33 | − | UACUGCCCUGUGGGGCA | 17 | 428 |
| HBB-43 | − | UAUCAAGGUUACAAGAC | 17 | 429 |
| HBB-5 | − | UCUGCCGUUACUGCCCUGUG | 20 | 430 |
| HBB-11 | − | UGAAGUUGGUGGUGAGGCCC | 20 | 431 |
| HBB-41 | − | UGAGGCCCUGGGCAGGU | 17 | 432 |
| HBB-49 | + | UGAUACCAACCUGCCCA | 17 | 433 |
| HBB-27 | + | UGCACCAUGGUGUCUGUUUG | 20 | 434 |
| HBB-31 | − | UGCCGUUACUGCCCUGU | 17 | 435 |
| HBB-42 | − | UGGGCAGGUUGGUAUCA | 17 | 436 |
| HBB-16 | − | UGGUAUCAAGGUUACAAGAC | 20 | 437 |
| HBB-14 | − | UGGUGAGGCCCUGGGCAGGU | 20 | 438 |
| HBB-18 | − | UUAAGGAGACCAAUAGAAAC | 20 | 439 |
| HBB-48 | + | UUGAUACCAACCUGCCC | 17 | 440 |
| HBB-13 | − | UUGGUGGUGAGGCCCUGGGC | 20 | 441 |

[0985] Table 1D provides exemplary targeting domains for the E6V target site in the HBB gene selected based on close proximity to mutation. In an embodiment, the targeting domain is the exact complement of the target domain. Any of the targeting domains in the table can be used with a S. aureus Cas9 molecule that gives double stranded cleavage. Any of the targeting domains in the table can be used with S. aureus single-stranded break nucleases (nickases). In an embodiment, dual targeting is used to create two nicks. When selecting gRNAs for use in a nickase pair, one gRNA targets a domain in the complementary strand and the second gRNA targets a domain in the non-complementary strand, e.g., a gRNA comprising any minus strand targeting domain may be paired any gRNA comprising a plus strand targeting domain targeting the same target position.

TABLE 1D

| | | | Target | |
|---|---|---|---|---|
| | DNA | | Site | SEQ ID |
| gRNA Name | Strand | Targeting Domain | Length | NO |
| HBB-56 | − | CACCAUGGUGCAUCUGACUC | 20 | 442 |
| HBB-57 | − | CCAUGGUGCAUCUGACUCCU | 20 | 443 |
| HBB-58 | − | CAUGGUGCAUCUGACUCCUG | 20 | 444 |
| HBB-59 | − | UGGUGCAUCUGACUCCUGAG | 20 | 445 |
| HBB-60 | − | AAGUCUGCCGUUACUGCCCU | 20 | 446 |
| HBB-61 | − | AGUCUGCCGUUACUGCCCUG | 20 | 447 |
| HBB-62 | − | UUACUGCCCUGUGGGGCAAG | 20 | 448 |
| HBB-63 | − | CCCUGUGGGGCAAGGUGAAC | 20 | 449 |
| HBB-64 | − | GUGGGGCAAGGUGAACGUGG | 20 | 450 |
| HBB-65 | − | GAACGUGGAUGAAGUUGGUG | 20 | 451 |
| HBB-66 | − | AUGAAGUUGGUGGUGAGGCC | 20 | 452 |
| HBB-67 | − | CAAGGUUACAAGACAGGUUU | 20 | 453 |
| HBB-68 | − | AAGGUUACAAGACAGGUUUA | 20 | 454 |
| HBB-69 | − | GACAGGUUUAAGGAGACCAA | 20 | 455 |
| HBB-70 | − | UUUAAGGAGACCAAUAGAAA | 20 | 456 |
| HBB-71 | − | CAUGGUGCAUCUGACUC | 20 | 457 |
| HBB-72 | − | UGGUGCAUCUGACUCCU | 17 | 458 |
| HBB-73 | − | GGUGCAUCUGACUCCUG | 17 | 459 |
| HBB-74 | − | UGCAUCUGACUCCUGAG | 17 | 460 |
| HBB-75 | − | UCUGCCGUUACUGCCCU | 17 | 461 |
| HBB-76 | − | CUGCCGUUACUGCCCUG | 17 | 462 |
| HBB-77 | − | CUGCCCUGUGGGGCAAG | 17 | 463 |
| HBB-78 | − | UGUGGGGCAAGGUGAAC | 17 | 464 |
| HBB-79 | − | GGGCAAGGUGAACGUGG | 17 | 465 |
| HBB-80 | − | CGUGGAUGAAGUUGGUG | 17 | 466 |
| HBB-81 | − | AAGUUGGUGGUGAGGCC | 17 | 467 |
| HBB-82 | − | GGUUACAAGACAGGUUU | 17 | 468 |
| HBB-83 | − | GUUACAAGACAGGUUUA | 17 | 469 |
| HBB-84 | − | AGGUUUAAGGAGACCAA | 17 | 470 |
| HBB-85 | − | AAGGAGACCAAUAGAAA | 17 | 471 |
| HBB-86 | + | GCUAGUGAACACAGUUGUGU | 20 | 472 |
| HBB-87 | + | GUGUCUGUUUGAGGUUGCUA | 20 | 473 |
| HBB-88 | + | AGAUGCACCAUGGUGUCUGU | 20 | 474 |
| HBB-89 | + | GUAACGGCAGACUUCUCCUC | 20 | 475 |
| HBB-90 | + | AGUAACGGCAGACUUCUCCU | 20 | 476 |
| HBB-91 | + | UCCACGUUCACCUUGCCCCA | 20 | 477 |
| HBB-92 | + | AACCUUGAUACCAACCUGCC | 20 | 478 |
| HBB-93 | + | AGUGAACACAGUUGUGU | 17 | 479 |
| HBB-94 | + | UCUGUUUGAGGUUGCUA | 17 | 480 |
| HBB-95 | + | UGCACCAUGGUGUCUGU | 17 | 481 |
| HBB-96 | + | ACGGCAGACUUCUCCUC | 17 | 482 |
| HBB-97 | + | AACGGCAGACUUCUCCU | 17 | 483 |
| HBB-98 | + | ACGUUCACCUUGCCCCA | 17 | 484 |
| HBB-99 | + | CUUGAUACCAACCUGCC | 17 | 485 |

[0986] Table 2A provides exemplary targeting domains for knocking out the BCL11A gene selected according to first tier parameters, and are selected based on close proximity to start of the coding sequence and orthogonality in the human genome. In an embodiment, the targeting domain is the exact complement of the target domain. Any of the targeting domains in the table can be used with a S. pyogenes Cas9 molecule that gives double stranded cleavage. Any of the targeting domains in the table can be used with a S. pyogenes Cas9 single-stranded break nucleases (nickases). In an embodiment, dual targeting is used to create two nicks. When selecting gRNAs for use in a nickase pair, one gRNA targets a domain in the complementary strand and the second gRNA targets a domain in the non-complementary strand, e.g., a gRNA comprising any minus strand targeting domain may be paired any gRNA comprising a plus strand targeting domain targeting the same target position. In an embodiment, two 20-mer guide RNAs are used to target two S. pyogenes Cas9 nucleases or two S. pyogenes Cas9 nickases, e.g., BCL11A-31 and BCL11A-40 BCL11A-30 and BCL11A-42, or BCL11A-24 and BCL11A-53 are used. In an embodiment, two 17-mer RNAs are used to target two Cas9 nucleases or two Cas9 nickases, e.g., BCL11A-79 and BCL11A-90, BCL11A-77 and BCL11A-92, or BCL11A-71 and BCL11A-103 are used.

TABLE 2A
1st Tier

| | | | Target | SEQ |
|---|---|---|---|---|
| | DNA | | Site | ID |
| gRNA Name | Strand | Targeting Domain | Length | NO |
| BCL11A-32 | − | UGGCAUCCAGGUCACGCCAG | 20 | 486 |
| BCL11A-40 | + | GAUGCUUUUUUCAUCUCGAU | 20 | 487 |
| BCL11A-30 | − | GCAUCCAAUCCCGUGGAGGU | 20 | 488 |
| BCL11A-42 | + | UUUUCAUCUCGAUUGGUGAA | 20 | 489 |
| BCL11A-24 | − | CCAGAUGAACUUCCCAUUGG | 20 | 490 |
| BCL11A-53 | + | AGGAGGUCAUGAUCCCCUUC | 20 | 491 |
| BCL11A-79 | − | CAUCCAGGUCACGCCAG | 17 | 492 |
| BCL11A-90 | + | GCUUUUUUCAUCUCGAU | 17 | 493 |
| BCL11A-77 | − | UCCAAUCCCGUGGAGGU | 17 | 494 |
| BCL11A-92 | + | UCAUCUCGAUUGGUGAA | 17 | 495 |
| BCL11A-71 | − | GAUGAACUUCCCAUUGG | 17 | 496 |
| BCL11A-103 | + | AGGUCAUGAUCCCCUUC | 17 | 497 |

[0987] Table 2B provides exemplary targeting domains for knocking out the BCL11A gene selected according to the second tier parameters and are selected based on close proximity to start of the coding sequence and presence of a 5′ G. In an embodiment, the targeting domain is the exact complement of the target domain. Any of the targeting domains in the table can be used with a S. pyogenes Cas9 molecule that gives double stranded cleavage. Any of the targeting domains in the table can be used with a S. pyogenes Cas9 single-stranded break nucleases (nickases). In an embodiment, dual targeting is used to create two nicks. When selecting gRNAs for use in a nickase pair, one gRNA targets a domain in the complementary strand and the second gRNA targets a domain in the non-complementary strand, e.g., a gRNA comprising any minus strand targeting domain may be paired any gRNA comprising a plus strand targeting domain targeting the same target position.

TABLE 2B
2nd Tier

| | | | Target | SEQ |
|---|---|---|---|---|
| | DNA | | Site | ID |
| gRNA Name | Strand | Targeting Domain | Length | NO |
| BCL11A-28 | − | GAAAAAAGCAUCCAAUCCCG | 20 | 498 |
| BCL11A-15 | − | GAACCAGACCACGGCCCGUU | 20 | 499 |
| BCL11A-37 | + | GACCUGGAUGCCAACCUCCA | 20 | 500 |
| BCL11A-120 | + | GAGCUCCAUGUGCAGAACGA | 20 | 501 |
| BCL11A-106 | + | GAGCUCCCAACGGGCCG | 17 | 502 |
| BCL11A-112 | − | GAGCUCUAAUCCCCACGCCU | 20 | 503 |
| BCL11A-113 | − | GAGUGCAGAAUAUGCCCCGC | 20 | 504 |
| BCL11A-35 | + | GAUAAACAAUCGUCAUCCUC | 20 | 505 |
| BCL11A-19 | − | GAUCAUGACCUCCUCACCUG | 20 | 506 |
| BCL11A-60 | − | GAUGAUGAACCAGACCA | 17 | 507 |
| BCL11A-39 | + | GAUGCCAACCUCCACGGGAU | 20 | 508 |
| BCL11A-133 | + | GCACUCAUCCCAGGCGU | 17 | 509 |
| BCL11A-130 | − | GCAGAAUAUGCCCCGCA | 17 | 510 |
| BCL11A-115 | + | GCAUAUUCUGCACUCAUCCC | 20 | 511 |
| BCL11A-89 | + | GCCAACCUCCACGGGAU | 17 | 512 |
| BCL11A-23 | − | GCCAGAUGAACUUCCCAUUG | 20 | 513 |
| BCL11A-17 | − | GCCCGUUGGGAGCUCCAGAA | 20 | 514 |
| BCL11A-83 | + | GCUAUGUGUUCCUGUUU | 17 | 515 |
| BCL11A-135 | + | GCUCCAUGUGCAGAACG | 17 | 516 |
| BCL11A-57 | + | GCUCCCAACGGGCCGUGGUC | 20 | 517 |
| BCL11A-127 | − | GCUCUAAUCCCCACGCC | 17 | 518 |
| BCL11A-6 | + | GCUGGGGUUUGCCUUGCUUG | 20 | 519 |
| BCL11A-111 | − | GGAGCUCUAAUCCCCACGCC | 20 | 520 |
| BCL11A-101 | + | GGCACUGCCCACAGGUG | 17 | 521 |
| BCL11A-52 | + | GGCACUGCCCACAGGUGAGG | 20 | 522 |
| BCL11A-16 | − | GGCCCGUUGGGAGCUCCAGA | 20 | 523 |
| BCL11A-12 | + | GGGGUUUGCCUUGCUUG | 17 | 524 |
| BCL11A-109 | + | GUAAGAAUGGCUUCAAG | 17 | 525 |
| BCL11A-123 | + | GUGCAGAACGAGGGGAGGAG | 20 | 526 |
| BCL11A-21 | − | GUGCCAGAUGAACUUCCCAU | 20 | 527 |
| BCL11A-50 | + | GUUCAUCUGGCACUGCCCAC | 20 | 528 |
| BCL11A-65 | − | GUUGGGAGCUCCAGAAG | 17 | 529 |

[0988] Table 2C provides exemplary targeting domains for knocking out the BCL11A gene selected according to the third tier parameters and are selected based on close proximity to start of the coding sequence. In an embodiment, the targeting domain is the exact complement of the target domain. Any of the targeting domains in the table can be used with a S. pyogenes Cas9 molecule that gives double stranded cleavage. Any of the targeting domains in the table can be used with a S. pyogenes Cas9 single-stranded break nucleases (nickases). In an embodiment, dual targeting is used to create two nicks. When selecting gRNAs for use in a nickase pair, one gRNA targets a domain in the complementary strand and the second gRNA targets a domain in the non-complementary strand, e.g., a gRNA comprising any minus strand targeting domain may be paired any gRNA comprising a plus strand targeting domain targeting the same target position.

TABLE 2C
3rd Tier

| | | | Target | SEQ |
|---|---|---|---|---|
| | DNA | | Site | ID |
| gRNA Name | Strand | Targeting Domain | Length | NO |
| BCL11A-75 | − | AAAAGCAUCCAAUCCCG | 17 | 530 |
| BCL11A-29 | − | AAAAGCAUCCAAUCCCGUGG | 20 | 531 |
| BCL11A-47 | + | AAAAUAAGAAUGUCCCCCAA | 20 | 532 |
| BCL11A-85 | + | AAACAAUCGUCAUCCUC | 17 | 533 |
| BCL11A-73 | − | AAACGGAAACAAUGCAA | 17 | 534 |
| BCL11A-125 | − | AAACUUCUGCACUGGAG | 17 | 535 |
| BCL11A-48 | + | AAAUAAGAAUGUCCCCCAAU | 20 | 536 |
| BCL11A-1 | − | AACCCCAGCACUUAAGCAAA | 20 | 537 |
| BCL11A-13 | − | ACAGAUGAUGAACCAGACCA | 20 | 538 |
| BCL11A-61 | − | ACCAGACCACGGCCCGU | 17 | 539 |
| BCL11A-2 | − | ACCCCAGCACUUAAGCAAAC | 20 | 540 |
| BCL11A-38 | + | ACCUGGAUGCCAACCUCCAC | 20 | 541 |
| BCL11A-102 | + | ACUGCCCACAGGUGAGG | 17 | 542 |
| BCL11A-119 | + | AGAGCUCCAUGUGCAGAACG | 20 | 543 |
| BCL11A-70 | − | AGAUGAACUUCCCAUUG | 17 | 544 |
| BCL11A-76 | − | AGCAUCCAAUCCCGUGG | 17 | 545 |
| BCL11A-121 | + | AGCUCCAUGUGCAGAACGAG | 20 | 546 |
| BCL11A-81 | − | AGGAAUUUGCCCCAAAC | 17 | 547 |
| BCL11A-114 | − | AGUGCAGAAUAUGCCCCGCA | 20 | 548 |
| BCL11A-97 | + | AUAAGAAUGUCCCCCAA | 17 | 549 |
| BCL11A-20 | − | AUCAUGACCUCCUCACCUGU | 20 | 550 |
| BCL11A-44 | + | AUCUCGAUUGGUGAAGGGGA | 20 | 551 |
| BCL11A-67 | − | AUGACCUCCUCACCUGU | 17 | 552 |
| BCL11A-138 | + | AUGUGCAGAACGAGGGG | 17 | 553 |
| BCL11A-3 | + | AUUCCCGUUUGCUUAAGUGC | 20 | 554 |
| BCL11A-95 | + | AUUGGUGAAGGGGAAGG | 17 | 555 |
| BCL11A-26 | − | CACAAACGGAAACAAUGCAA | 20 | 556 |
| BCL11A-134 | + | CACUCAUCCCAGGCGUG | 17 | 557 |
| BCL11A-139 | + | CAGAACGAGGGGAGGAG | 17 | 558 |
| BCL11A-69 | − | CAGAUGAACUUCCCAUU | 17 | 559 |
| BCL11A-96 | + | CAGCUUUUUCUAAGCAG | 17 | 560 |
| BCL11A-86 | + | CAUCCUCUGGCGUGACC | 17 | 561 |
| BCL11A-93 | + | CAUCUCGAUUGGUGAAG | 17 | 562 |
| BCL11A-100 | + | CAUCUGGCACUGCCCAC | 17 | 563 |
| BCL11A-66 | − | CAUGACCUCCUCACCUG | 17 | 564 |
| BCL11A-99 | + | CCAAUGGGAAGUUCAUC | 17 | 565 |
| BCL11A-46 | + | CCACAGCUUUUUCUAAGCAG | 20 | 566 |
| BCL11A-62 | − | CCAGACCACGGCCCGUU | 17 | 567 |
| BCL11A-68 | − | CCAGAUGAACUUCCCAU | 17 | 568 |
| BCL11A-8 | − | CCAGCACUUAAGCAAAC | 17 | 569 |
| BCL11A-107 | + | CCCAACGGGCCGUGGUC | 17 | 570 |
| BCL11A-7 | − | CCCAGCACUUAAGCAAA | 17 | 571 |
| BCL11A-49 | + | CCCCCAAUGGGAAGUUCAUC | 20 | 572 |
| BCL11A-55 | + | CCCCUUCUGGAGCUCCCAAC | 20 | 573 |
| BCL11A-18 | − | CCCGUUGGGAGCUCCAGAAG | 20 | 574 |
| BCL11A-9 | + | CCCGUUUGCUUAAGUGC | 17 | 575 |
| BCL11A-63 | − | CCGUUGGGAGCUCCAGA | 17 | 576 |
| BCL11A-10 | + | CCGUUUGCUUAAGUGCU | 17 | 577 |
| BCL11A-27 | − | CCUCUGCUUAGAAAAAGCUG | 20 | 578 |
| BCL11A-104 | + | CCUUCUGGAGCUCCCAA | 17 | 579 |
| BCL11A-36 | + | CGUCAUCCUCUGGCGUGACC | 20 | 580 |
| BCL11A-78 | − | CGUGGAGGUUGGCAUCC | 17 | 581 |
| BCL11A-64 | − | CGUUGGGAGCUCCAGAA | 17 | 582 |
| BCL11A-11 | + | CGUUUGCUUAAGUGCUG | 17 | 583 |
| BCL11A-84 | + | CUAUGUGUUCCUGUUUG | 17 | 584 |
| BCL11A-136 | + | CUCCAUGUGCAGAACGA | 17 | 585 |
| BCL11A-128 | − | CUCUAAUCCCCACGCCU | 17 | 586 |
| BCL11A-118 | + | CUGCACUCAUCCCAGGCGUG | 20 | 587 |
| BCL11A-74 | − | CUGCUUAGAAAAAGCUG | 17 | 588 |
| BCL11A-56 | + | CUGGAGCUCCCAACGGGCCG | 20 | 589 |
| BCL11A-87 | + | CUGGAUGCCAACCUCCA | 17 | 590 |
| BCL11A-105 | + | CUUCUGGAGCUCCCAAC | 17 | 591 |
| BCL11A-124 | − | UAAACUUCUGCACUGGA | 17 | 592 |
| BCL11A-98 | + | UAAGAAUGUCCCCCAAU | 17 | 593 |
| BCL11A-34 | − | UAGAGGAAUUUGCCCCAAAC | 20 | 594 |
| BCL11A-131 | + | UAUUCUGCACUCAUCCC | 17 | 595 |
| BCL11A-137 | + | UCCAUGUGCAGAACGAG | 17 | 596 |
| BCL11A-122 | + | UCCAUGUGCAGAACGAGGGG | 20 | 597 |
| BCL11A-126 | − | UCCCCUCGUUCUGCACA | 17 | 598 |
| BCL11A-54 | + | UCCCCUUCUGGAGCUCCCAA | 20 | 599 |
| BCL11A-31 | − | UCCCGUGGAGGUUGGCAUCC | 20 | 600 |
| BCL11A-5 | + | UCCCGUUUGCUUAAGUGCUG | 20 | 601 |
| BCL11A-110 | − | UCCUCCCCUCGUUCUGCACA | 20 | 602 |
| BCL11A-94 | + | UCGAUUGGUGAAGGGGA | 17 | 603 |
| BCL11A-45 | + | UCGAUUGGUGAAGGGGAAGG | 20 | 604 |
| BCL11A-117 | + | UCUGCACUCAUCCCAGGCGU | 20 | 605 |
| BCL11A-51 | + | UCUGGCACUGCCCACAGGUG | 20 | 606 |
| BCL11A-59 | + | UCUGUAAGAAUGGCUUCAAG | 20 | 607 |
| BCL11A-14 | − | UGAACCAGACCACGGCCCGU | 20 | 608 |
| BCL11A-132 | + | UGCACUCAUCCCAGGCG | 17 | 609 |
| BCL11A-129 | − | UGCAGAAUAUGCCCCGC | 17 | 610 |
| BCL11A-22 | − | UGCCAGAUGAACUUCCCAUU | 20 | 611 |
| BCL11A-82 | + | UGCUAUGUGUUCCUGUU | 17 | 612 |
| BCL11A-88 | + | UGGAUGCCAACCUCCAC | 17 | 613 |
| BCL11A-58 | + | UGGUUCAUCAUCUGUAAGAA | 20 | 614 |
| BCL11A-33 | − | UGUUUAUCAACGUCAUCUAG | 20 | 615 |
| BCL11A-80 | − | UUAUCAACGUCAUCUAG | 17 | 616 |
| BCL11A-25 | − | UUAUUUUUAUCGAGCACAAA | 20 | 617 |
| BCL11A-108 | + | UUCAUCAUCUGUAAGAA | 17 | 618 |
| BCL11A-91 | + | UUCAUCUCGAUUGGUGA | 17 | 619 |
| BCL11A-4 | + | UUCCCGUUUGCUUAAGUGCU | 20 | 620 |
| BCL11A-116 | + | UUCUGCACUCAUCCCAGGCG | 20 | 621 |
| BCL11A-43 | + | UUUCAUCUCGAUUGGUGAAG | 20 | 622 |
| BCL11A-72 | − | UUUUUAUCGAGCACAAA | 17 | 623 |
| BCL11A-41 | + | UUUUUCAUCUCGAUUGGUGA | 20 | 624 |

[0989] Table 2D provides exemplary targeting domains for knocking out the BCL11A gene selected according to the fourth tier parameters and are selected based on presence in the coding sequence. In an embodiment, the targeting domain is the exact complement of the target domain. Any of the targeting domains in the table can be used with a S. pyogenes Cas9 molecule that gives double stranded cleavage. Any of the targeting domains in the table can be used with a S. pyogenes Cas9 single-stranded break nucleases (nickases). In an embodiment, dual targeting is used to create two nicks. When selecting gRNAs for use in a nickase pair, one gRNA targets a domain in the complementary strand and the second gRNA targets a domain in the non-complementary strand, e.g., a gRNA comprising any minus strand targeting domain may be paired any gRNA comprising a plus strand targeting domain targeting the same target position.

TABLE 2D
4th Tier

| | | | Target | SEQ |
|---|---|---|---|---|
| | DNA | | Site | ID |
| gRNA Name | Strand | Targeting domain | Length | NO |
| BCL11A-140 | − | AACAGCCAUUCACCAGUGCA | 20 | 625 |
| BCL11A-141 | − | CAACACGCACAGAACACUCA | 20 | 626 |
| BCL11A-142 | − | AUCUACUUAGAAAGCGAACA | 20 | 627 |
| BCL11A-143 | − | ACGGAAGUCCCCUGACCCCG | 20 | 628 |
| BCL11A-144 | − | CGGAAGUCCCCUGACCCCGC | 20 | 629 |
| BCL11A-145 | − | AGUCCCCUGACCCCGCGGGU | 20 | 630 |
| BCL11A-146 | − | CCGCGGGUUGGUAUCCCUUC | 20 | 631 |
| BCL11A-147 | − | GUUGGUAUCCCUUCAGGACU | 20 | 632 |
| BCL11A-148 | − | CCUUCCCAGCCACCUCUCCA | 20 | 633 |
| BCL11A-149 | − | CUUCCCAGCCACCUCUCCAU | 20 | 634 |
| BCL11A-150 | − | UUUAACCUGCUAAGAAUACC | 20 | 635 |
| BCL11A-151 | − | ACCAGGAUCAGUAUCGAGAG | 20 | 636 |
| BCL11A-152 | − | UCAGUAUCGAGAGAGGCUUC | 20 | 637 |
| BCL11A-153 | − | AUCGAGAGAGGCUUCCGGCC | 20 | 638 |
| BCL11A-154 | − | GAGGCUUCCGGCCUGGCAGA | 20 | 639 |
| BCL11A-155 | − | AGGCUUCCGGCCUGGCAGAA | 20 | 640 |
| BCL11A-156 | − | UCCACCACCGAGACAUCACU | 20 | 641 |
| BCL11A-157 | − | CCCCCACCGCAUAGAGCGCC | 20 | 642 |
| BCL11A-158 | − | CCCCACCGCAUAGAGCGCCU | 20 | 643 |
| BCL11A-159 | − | CCCACCGCAUAGAGCGCCUG | 20 | 644 |
| BCL11A-160 | − | CCACCGCAUAGAGCGCCUGG | 20 | 645 |
| BCL11A-161 | − | CCGCAUAGAGCGCCUGGGGG | 20 | 646 |
| BCL11A-162 | − | GCGCCUGGGGGCGGAAGAGA | 20 | 647 |
| BCL11A-163 | − | GGGGGCGGAAGAGAUGGCCC | 20 | 648 |
| BCL11A-164 | − | AUCACCCGAGUGCCUUUGAC | 20 | 649 |
| BCL11A-165 | − | UCACCCGAGUGCCUUUGACA | 20 | 650 |
| BCL11A-166 | − | GUGCCUUUGACAGGGUGCUG | 20 | 651 |
| BCL11A-167 | − | GGUGCUGCGGUUGAAUCCAA | 20 | 652 |
| BCL11A-168 | − | GCGGUUGAAUCCAAUGGCUA | 20 | 653 |
| BCL11A-169 | − | GGCUAUGGAGCCUCCCGCCA | 20 | 654 |
| BCL11A-170 | − | CUCCCGCCAUGGAUUUCUCU | 20 | 655 |
| BCL11A-171 | − | CUCUAGGAGACUUAGAGAGC | 20 | 656 |
| BCL11A-172 | − | AGGAGACUUAGAGAGCUGGC | 20 | 657 |
| BCL11A-173 | − | GGAGACUUAGAGAGCUGGCA | 20 | 658 |
| BCL11A-174 | − | UCUAGCCCACCGCUGUCCCC | 20 | 659 |
| BCL11A-175 | − | GCCCACCGCUGUCCCCAGGC | 20 | 660 |
| BCL11A-176 | − | GCCGGCCCAGCCCUAUGCAA | 20 | 661 |
| BCL11A-177 | − | UUACUGCAACCAUUCCAGCC | 20 | 662 |
| BCL11A-178 | − | AGGUAGCAAGCCGCCCUUCC | 20 | 663 |
| BCL11A-179 | − | CCCUCCUCCCUCCCAGCCCC | 20 | 664 |
| BCL11A-180 | − | UCCAAGUCAUGCGAGUUCUG | 20 | 665 |
| BCL11A-181 | − | GUUCAAAUUUCAGAGCAACC | 20 | 666 |
| BCL11A-182 | − | CAAAUUUCAGAGCAACCUGG | 20 | 667 |
| BCL11A-183 | − | AGAGCAACCUGGUGGUGCAC | 20 | 668 |
| BCL11A-184 | − | GGUGCACCGGCGCAGCCACA | 20 | 669 |
| BCL11A-185 | − | GUGCACCGGCGCAGCCACAC | 20 | 670 |
| BCL11A-186 | − | GUGCGACCACGCGUGCACCC | 20 | 671 |
| BCL11A-187 | − | GCACAAAUCGUCCCCCAUGA | 20 | 672 |
| BCL11A-188 | − | AUGACGGUCAAGUCCGACGA | 20 | 673 |
| BCL11A-189 | − | UCUCUCCACCGCCAGCUCCC | 20 | 674 |
| BCL11A-190 | − | ACCGCCAGCUCCCCGGAACC | 20 | 675 |
| BCL11A-191 | − | GGAACCCGGCACCAGCGACU | 20 | 676 |
| BCL11A-192 | − | ACCCGGCACCAGCGACUUGG | 20 | 677 |
| BCL11A-193 | − | CCCGGCACCAGCGACUUGGU | 20 | 678 |
| BCL11A-194 | − | CAGCAGCGCGCUCAAGUCCG | 20 | 679 |
| BCL11A-195 | − | CAGCGCGCUCAAGUCCGUGG | 20 | 680 |
| BCL11A-196 | − | GAACGACCCCAACCUGAUCC | 20 | 681 |
| BCL11A-197 | − | CCCAACCUGAUCCCGGAGAA | 20 | 682 |
| BCL11A-198 | − | CCAACCUGAUCCCGGAGAAC | 20 | 683 |
| BCL11A-199 | − | CAACCUGAUCCCGGAGAACG | 20 | 684 |
| BCL11A-200 | − | GAUCCCGGAGAACGGGGACG | 20 | 685 |
| BCL11A-201 | − | CCCGGAGAACGGGGACGAGG | 20 | 686 |
| BCL11A-202 | − | GAACGGGGACGAGGAGGAAG | 20 | 687 |
| BCL11A-203 | − | CGGGGACGAGGAGGAAGAGG | 20 | 688 |
| BCL11A-204 | − | GGAGGAAGAGGAGGACGACG | 20 | 689 |
| BCL11A-205 | − | AGAGGAGGACGACGAGGAAG | 20 | 690 |
| BCL11A-206 | − | CGACGAGGAAGAGGAAGAAG | 20 | 691 |
| BCL11A-207 | − | CGAGGAAGAGGAAGAAGAGG | 20 | 692 |
| BCL11A-208 | − | AGAGGAAGAAGAGGAGGAAG | 20 | 693 |
| BCL11A-209 | − | GGAAGAAGAGGAGGAAGAGG | 20 | 694 |
| BCL11A-210 | − | AGAAGAGGAGGAAGAGGAGG | 20 | 695 |
| BCL11A-211 | − | AGAGGAGGAAGAGGAGGAGG | 20 | 696 |
| BCL11A-212 | + | UCCUCCUCGUCCCCGUUCUC | 20 | 697 |
| BCL11A-213 | + | CCUCCUCGUCCCCGUUCUCC | 20 | 698 |
| BCL11A-214 | + | CGUCCCCGUUCUCCGGGAUC | 20 | 699 |
| BCL11A-215 | + | CCCGUUCUCCGGGAUCAGGU | 20 | 700 |
| BCL11A-216 | + | CCGUUCUCCGGGAUCAGGUU | 20 | 701 |
| BCL11A-217 | + | CGUUCUCCGGGAUCAGGUUG | 20 | 702 |
| BCL11A-218 | + | GUCGUUCUCGCUCUUGAACU | 20 | 703 |
| BCL11A-219 | + | GCUCUUGAACUUGGCCACCA | 20 | 704 |
| BCL11A-220 | + | CACGGACUUGAGCGCGCUGC | 20 | 705 |
| BCL11A-221 | + | GGCGCUGCCCACCAAGUCGC | 20 | 706 |
| BCL11A-222 | + | GCCCACCAAGUCGCUGGUGC | 20 | 707 |
| BCL11A-223 | + | CCCACCAAGUCGCUGGUGCC | 20 | 708 |
| BCL11A-224 | + | AAGUCGCUGGUGCCGGGUUC | 20 | 709 |
| BCL11A-225 | + | AGUCGCUGGUGCCGGGUUCC | 20 | 710 |
| BCL11A-226 | + | GUCGCUGGUGCCGGGUUCCG | 20 | 711 |
| BCL11A-227 | + | GGUGCCGGGUUCCGGGGAGC | 20 | 712 |
| BCL11A-228 | + | GCCGGGUUCCGGGGAGCUGG | 20 | 713 |
| BCL11A-229 | + | GGGUUCCGGGGAGCUGGCGG | 20 | 714 |
| BCL11A-230 | + | GGCGGUGGAGAGACCGUCGU | 20 | 715 |
| BCL11A-231 | + | GUCGUCGGACUUGACCGUCA | 20 | 716 |
| BCL11A-232 | + | UCGUCGGACUUGACCGUCAU | 20 | 717 |
| BCL11A-233 | + | CGUCGGACUUGACCGUCAUG | 20 | 718 |
| BCL11A-234 | + | GUCGGACUUGACCGUCAUGG | 20 | 719 |
| BCL11A-235 | + | UGUGCAUGUGCGUCUUCAUG | 20 | 720 |
| BCL11A-236 | + | CAUGUGGCGCUUCAGCUUGC | 20 | 721 |
| BCL11A-237 | + | GGCGCUUCAGCUUGCUGGCC | 20 | 722 |
| BCL11A-238 | + | GCGCUUCAGCUUGCUGGCCU | 20 | 723 |
| BCL11A-239 | + | UGCUGGCCUGGGUGCACGCG | 20 | 724 |
| BCL11A-240 | + | GGGUGCACGCGUGGUCGCAC | 20 | 725 |
| BCL11A-241 | + | GUCGCACAGGUUGCACUUGU | 20 | 726 |
| BCL11A-242 | + | UCGCACAGGUUGCACUUGUA | 20 | 727 |
| BCL11A-243 | + | UGUAGGGCUUCUCGCCCGUG | 20 | 728 |
| BCL11A-244 | + | UCUCGCCCGUGUGGCUGCGC | 20 | 729 |
| BCL11A-245 | + | GGCUGCGCCGGUGCACCACC | 20 | 730 |
| BCL11A-246 | + | GCCGCAGAACUCGCAUGACU | 20 | 731 |
| BCL11A-247 | + | UCGCAUGACUUGGACUUGAC | 20 | 732 |
| BCL11A-248 | + | CGCAUGACUUGGACUUGACC | 20 | 733 |
| BCL11A-249 | + | GCAUGACUUGGACUUGACCG | 20 | 734 |
| BCL11A-250 | + | CAUGACUUGGACUUGACCGG | 20 | 735 |
| BCL11A-251 | + | ACUUGGACUUGACCGGGGGC | 20 | 736 |
| BCL11A-252 | + | CUUGGACUUGACCGGGGGCU | 20 | 737 |
| BCL11A-253 | + | GGACUUGACCGGGGGCUGGG | 20 | 738 |
| BCL11A-254 | + | GACUUGACCGGGGGCUGGGA | 20 | 739 |
| BCL11A-255 | + | UUGACCGGGGGCUGGGAGGG | 20 | 740 |
| BCL11A-256 | + | ACCGGGGGCUGGGAGGGAGG | 20 | 741 |
| BCL11A-257 | + | CCGGGGGCUGGGAGGGAGGA | 20 | 742 |
| BCL11A-258 | + | CGGGGGCUGGGAGGGAGGAG | 20 | 743 |
| BCL11A-259 | + | GGGCUGGGAGGGAGGAGGGG | 20 | 744 |
| BCL11A-260 | + | GGAGGAGGGGCGGAUUGCAG | 20 | 745 |
| BCL11A-261 | + | GGAGGGGCGGAUUGCAGAGG | 20 | 746 |
| BCL11A-262 | + | GAGGGGCGGAUUGCAGAGGA | 20 | 747 |
| BCL11A-263 | + | GGGCGGAUUGCAGAGGAGGG | 20 | 748 |
| BCL11A-264 | + | GGCGGAUUGCAGAGGAGGGA | 20 | 749 |
| BCL11A-265 | + | GCGGAUUGCAGAGGAGGGAG | 20 | 750 |
| BCL11A-266 | + | CGGAUUGCAGAGGAGGGAGG | 20 | 751 |
| BCL11A-267 | + | GGAUUGCAGAGGAGGGAGGG | 20 | 752 |
| BCL11A-268 | + | GAUUGCAGAGGAGGGAGGGG | 20 | 753 |
| BCL11A-269 | + | GAGGGAGGGGGGGCGUCGCC | 20 | 754 |
| BCL11A-270 | + | GAGGGGGGGCGUCGCCAGGA | 20 | 755 |
| BCL11A-271 | + | AGGGGGGGCGUCGCCAGGAA | 20 | 756 |
| BCL11A-272 | + | GGGGGCGUCGCCAGGAAGGG | 20 | 757 |
| BCL11A-273 | + | AGGAAGGGCGGCUUGCUACC | 20 | 758 |
| BCL11A-274 | + | AGGGCGGCUUGCUACCUGGC | 20 | 759 |
| BCL11A-275 | + | GGCUUGCUACCUGGCUGGAA | 20 | 760 |
| BCL11A-276 | + | GGUUGCAGUAACCUUUGCAU | 20 | 761 |
| BCL11A-277 | + | GUUGCAGUAACCUUUGCAUA | 20 | 762 |
| BCL11A-278 | + | CAGUAACCUUUGCAUAGGGC | 20 | 763 |
| BCL11A-279 | + | AGUAACCUUUGCAUAGGGCU | 20 | 764 |
| BCL11A-280 | + | ACCUUUGCAUAGGGCUGGGC | 20 | 765 |
| BCL11A-281 | + | UGCAUAGGGCUGGGCCGGCC | 20 | 766 |
| BCL11A-282 | + | GCAUAGGGCUGGGCCGGCCU | 20 | 767 |
| BCL11A-283 | + | CAUAGGGCUGGGCCGGCCUG | 20 | 768 |
| BCL11A-284 | + | CUGGGCCGGCCUGGGGACAG | 20 | 769 |
| BCL11A-285 | + | GGCCGGCCUGGGGACAGCGG | 20 | 770 |
| BCL11A-286 | + | GCCGGCCUGGGGACAGCGGU | 20 | 771 |
| BCL11A-287 | + | AAGUCUCCUAGAGAAAUCCA | 20 | 772 |
| BCL11A-288 | + | UCUCCUAGAGAAAUCCAUGG | 20 | 773 |
| BCL11A-289 | + | CUCCUAGAGAAAUCCAUGGC | 20 | 774 |
| BCL11A-290 | + | CUAGAGAAAUCCAUGGCGGG | 20 | 775 |
| BCL11A-291 | + | GCGGGAGGCUCCAUAGCCAU | 20 | 776 |
| BCL11A-292 | + | CAACCGCAGCACCCUGUCAA | 20 | 777 |
| BCL11A-293 | + | AGCACCCUGUCAAAGGCACU | 20 | 778 |
| BCL11A-294 | + | GCACCCUGUCAAAGGCACUC | 20 | 779 |
| BCL11A-295 | + | UGUCAAAGGCACUCGGGUGA | 20 | 780 |
| BCL11A-296 | + | GUCAAAGGCACUCGGGUGAU | 20 | 781 |
| BCL11A-297 | + | AAAGGCACUCGGGUGAUGGG | 20 | 782 |
| BCL11A-298 | + | CACUCGGGUGAUGGGUGGCC | 20 | 783 |
| BCL11A-299 | + | ACUCGGGUGAUGGGUGGCCA | 20 | 784 |
| BCL11A-300 | + | GGGCCAUCUCUUCCGCCCCC | 20 | 785 |
| BCL11A-301 | + | CCGCCCCCAGGCGCUCUAUG | 20 | 786 |
| BCL11A-302 | + | CCCCCAGGCGCUCUAUGCGG | 20 | 787 |
| BCL11A-303 | + | CCCCAGGCGCUCUAUGCGGU | 20 | 788 |
| BCL11A-304 | + | CCCAGGCGCUCUAUGCGGUG | 20 | 789 |
| BCL11A-305 | + | CCAGGCGCUCUAUGCGGUGG | 20 | 790 |
| BCL11A-306 | + | UGGGGGUCCAAGUGAUGUCU | 20 | 791 |
| BCL11A-307 | + | GGGUCCAAGUGAUGUCUCGG | 20 | 792 |
| BCL11A-308 | + | UCCAAGUGAUGUCUCGGUGG | 20 | 793 |
| BCL11A-309 | + | GUCUCGGUGGUGGACUAAAC | 20 | 794 |
| BCL11A-310 | + | UCUCGGUGGUGGACUAAACA | 20 | 795 |
| BCL11A-311 | + | CUCGGUGGUGGACUAAACAG | 20 | 796 |
| BCL11A-312 | + | UCGGUGGUGGACUAAACAGG | 20 | 797 |
| BCL11A-313 | + | CGGUGGUGGACUAAACAGGG | 20 | 798 |
| BCL11A-314 | + | GGUGGUGGACUAAACAGGGG | 20 | 799 |
| BCL11A-315 | + | UGGACUAAACAGGGGGGGAG | 20 | 800 |
| BCL11A-316 | + | GGACUAAACAGGGGGGGAGU | 20 | 801 |
| BCL11A-317 | + | CUAAACAGGGGGGGAGUGGG | 20 | 802 |
| BCL11A-318 | + | GUGGAAAGCGCCCUUCUGCC | 20 | 803 |
| BCL11A-319 | + | AAAGCGCCCUUCUGCCAGGC | 20 | 804 |
| BCL11A-320 | + | GCCUCUCUCGAUACUGAUCC | 20 | 805 |
| BCL11A-321 | + | CUGAUCCUGGUAUUCUUAGC | 20 | 806 |
| BCL11A-322 | + | UGGUAUUCUUAGCAGGUUAA | 20 | 807 |
| BCL11A-323 | + | GGUAUUCUUAGCAGGUUAAA | 20 | 808 |
| BCL11A-324 | + | GUAUUCUUAGCAGGUUAAAG | 20 | 809 |
| BCL11A-325 | + | UGUCUGCAAUAUGAAUCCCA | 20 | 810 |
| BCL11A-326 | + | GCAAUAUGAAUCCCAUGGAG | 20 | 811 |
| BCL11A-327 | + | AUAUGAAUCCCAUGGAGAGG | 20 | 812 |
| BCL11A-328 | + | GAAUCCCAUGGAGAGGUGGC | 20 | 813 |
| BCL11A-329 | + | AAUCCCAUGGAGAGGUGGCU | 20 | 814 |
| BCL11A-330 | + | CCAUGGAGAGGUGGCUGGGA | 20 | 815 |
| BCL11A-331 | + | CAUUCUGCACCUAGUCCUGA | 20 | 816 |
| BCL11A-332 | + | AUUCUGCACCUAGUCCUGAA | 20 | 817 |
| BCL11A-333 | + | CCUGAAGGGAUACCAACCCG | 20 | 818 |
| BCL11A-334 | + | CUGAAGGGAUACCAACCCGC | 20 | 819 |
| BCL11A-335 | + | UGAAGGGAUACCAACCCGCG | 20 | 820 |
| BCL11A-336 | + | GGAUACCAACCCGCGGGGUC | 20 | 821 |
| BCL11A-337 | + | GAUACCAACCCGCGGGGUCA | 20 | 822 |
| BCL11A-338 | + | AUACCAACCCGCGGGGUCAG | 20 | 823 |
| BCL11A-339 | + | UUGCAAGAGAAACCAUGCAC | 20 | 824 |
| BCL11A-340 | + | AGAAACCAUGCACUGGUGAA | 20 | 825 |
| BCL11A-341 | + | AGUUGUACAUGUGUAGCUGC | 20 | 826 |
| BCL11A-342 | + | GUUGUACAUGUGUAGCUGCU | 20 | 827 |
| BCL11A-343 | − | AGCCAUUCACCAGUGCA | 17 | 828 |
| BCL11A-344 | − | CACGCACAGAACACUCA | 17 | 829 |
| BCL11A-345 | − | UACUUAGAAAGCGAACA | 17 | 830 |
| BCL11A-346 | − | GAAGUCCCCUGACCCCG | 17 | 831 |
| BCL11A-347 | − | AAGUCCCCUGACCCCGC | 17 | 832 |
| BCL11A-348 | − | CCCCUGACCCCGCGGGU | 17 | 833 |
| BCL11A-349 | − | CGGGUUGGUAUCCCUUC | 17 | 834 |
| BCL11A-350 | − | GGUAUCCCUUCAGGACU | 17 | 835 |
| BCL11A-351 | − | UCCCAGCCACCUCUCCA | 17 | 836 |
| BCL11A-352 | − | CCCAGCCACCUCUCCAU | 17 | 837 |
| BCL11A-353 | − | AACCUGCUAAGAAUACC | 17 | 838 |
| BCL11A-354 | − | AGGAUCAGUAUCGAGAG | 17 | 839 |
| BCL11A-355 | − | GUAUCGAGAGAGGCUUC | 17 | 840 |
| BCL11A-356 | − | GAGAGAGGCUUCCGGCC | 17 | 841 |
| BCL11A-357 | − | GCUUCCGGCCUGGCAGA | 17 | 842 |
| BCL11A-358 | − | CUUCCGGCCUGGCAGAA | 17 | 843 |
| BCL11A-359 | − | ACCACCGAGACAUCACU | 17 | 844 |
| BCL11A-360 | − | CCACCGCAUAGAGCGCC | 17 | 845 |
| BCL11A-361 | − | CACCGCAUAGAGCGCCU | 17 | 846 |
| BCL11A-362 | − | ACCGCAUAGAGCGCCUG | 17 | 847 |
| BCL11A-363 | − | CCGCAUAGAGCGCCUGG | 17 | 848 |
| BCL11A-364 | − | CAUAGAGCGCCUGGGGG | 17 | 849 |
| BCL11A-365 | − | CCUGGGGGCGGAAGAGA | 17 | 850 |
| BCL11A-366 | − | GGCGGAAGAGAUGGCCC | 17 | 851 |
| BCL11A-367 | − | ACCCGAGUGCCUUUGAC | 17 | 852 |
| BCL11A-368 | − | CCCGAGUGCCUUUGACA | 17 | 853 |
| BCL11A-369 | − | CCUUUGACAGGGUGCUG | 17 | 854 |
| BCL11A-370 | − | GCUGCGGUUGAAUCCAA | 17 | 855 |
| BCL11A-371 | − | GUUGAAUCCAAUGGCUA | 17 | 856 |
| BCL11A-372 | − | UAUGGAGCCUCCCGCCA | 17 | 857 |
| BCL11A-373 | − | CCGCCAUGGAUUUCUCU | 17 | 858 |
| BCL11A-374 | − | UAGGAGACUUAGAGAGC | 17 | 859 |
| BCL11A-375 | − | AGACUUAGAGAGCUGGC | 17 | 860 |
| BCL11A-376 | − | GACUUAGAGAGCUGGCA | 17 | 861 |
| BCL11A-377 | − | AGCCCACCGCUGUCCCC | 17 | 862 |
| BCL11A-378 | − | CACCGCUGUCCCCAGGC | 17 | 863 |
| BCL11A-379 | − | GGCCCAGCCCUAUGCAA | 17 | 864 |
| BCL11A-380 | − | CUGCAACCAUUCCAGCC | 17 | 865 |
| BCL11A-381 | − | UAGCAAGCCGCCCUUCC | 17 | 866 |
| BCL11A-382 | − | UCCUCCCUCCCAGCCCC | 17 | 867 |
| BCL11A-383 | − | AAGUCAUGCGAGUUCUG | 17 | 868 |
| BCL11A-384 | − | CAAAUUUCAGAGCAACC | 17 | 869 |
| BCL11A-385 | − | AUUUCAGAGCAACCUGG | 17 | 870 |
| BCL11A-386 | − | GCAACCUGGUGGUGCAC | 17 | 871 |
| BCL11A-387 | − | GCACCGGCGCAGCCACA | 17 | 872 |
| BCL11A-388 | − | CACCGGCGCAGCCACAC | 17 | 873 |
| BCL11A-389 | − | CGACCACGCGUGCACCC | 17 | 874 |
| BCL11A-390 | − | CAAAUCGUCCCCCAUGA | 17 | 875 |
| BCL11A-391 | − | ACGGUCAAGUCCGACGA | 17 | 876 |
| BCL11A-392 | − | CUCCACCGCCAGCUCCC | 17 | 877 |
| BCL11A-393 | − | GCCAGCUCCCCGGAACC | 17 | 878 |
| BCL11A-394 | − | ACCCGGCACCAGCGACU | 17 | 879 |
| BCL11A-395 | − | CGGCACCAGCGACUUGG | 17 | 880 |
| BCL11A-396 | − | GGCACCAGCGACUUGGU | 17 | 881 |
| BCL11A-397 | − | CAGCGCGCUCAAGUCCG | 17 | 882 |
| BCL11A-398 | − | CGCGCUCAAGUCCGUGG | 17 | 883 |
| BCL11A-399 | − | CGACCCCAACCUGAUCC | 17 | 884 |
| BCL11A-400 | − | AACCUGAUCCCGGAGAA | 17 | 885 |
| BCL11A-401 | − | ACCUGAUCCCGGAGAAC | 17 | 886 |
| BCL11A-402 | − | CCUGAUCCCGGAGAACG | 17 | 887 |
| BCL11A-403 | − | CCCGGAGAACGGGGACG | 17 | 888 |
| BCL11A-404 | − | GGAGAACGGGGACGAGG | 17 | 889 |
| BCL11A-405 | − | CGGGGACGAGGAGGAAG | 17 | 890 |
| BCL11A-406 | − | GGACGAGGAGGAAGAGG | 17 | 891 |
| BCL11A-407 | − | GGAAGAGGAGGACGACG | 17 | 892 |
| BCL11A-408 | − | GGAGGACGACGAGGAAG | 17 | 893 |
| BCL11A-409 | − | CGAGGAAGAGGAAGAAG | 17 | 894 |
| BCL11A-410 | − | GGAAGAGGAAGAAGAGG | 17 | 895 |
| BCL11A-411 | − | GGAAGAAGAGGAGGAAG | 17 | 896 |
| BCL11A-412 | − | AGAAGAGGAGGAAGAGG | 17 | 897 |
| BCL11A-413 | − | AGAGGAGGAAGAGGAGG | 17 | 898 |
| BCL11A-414 | − | GGAGGAAGAGGAGGAGG | 17 | 899 |
| BCL11A-415 | + | UCCUCGUCCCCGUUCUC | 17 | 900 |
| BCL11A-416 | + | CCUCGUCCCCGUUCUCC | 17 | 901 |
| BCL11A-417 | + | CCCCGUUCUCCGGGAUC | 17 | 902 |
| BCL11A-418 | + | GUUCUCCGGGAUCAGGU | 17 | 903 |
| BCL11A-419 | + | UUCUCCGGGAUCAGGUU | 17 | 904 |
| BCL11A-420 | + | UCUCCGGGAUCAGGUUG | 17 | 905 |
| BCL11A-421 | + | GUUCUCGCUCUUGAACU | 17 | 906 |
| BCL11A-422 | + | CUUGAACUUGGCCACCA | 17 | 907 |
| BCL11A-423 | + | GGACUUGAGCGCGCUGC | 17 | 908 |
| BCL11A-424 | + | GCUGCCCACCAAGUCGC | 17 | 909 |
| BCL11A-425 | + | CACCAAGUCGCUGGUGC | 17 | 910 |
| BCL11A-426 | + | ACCAAGUCGCUGGUGCC | 17 | 911 |
| BCL11A-427 | + | UCGCUGGUGCCGGGUUC | 17 | 912 |
| BCL11A-428 | + | CGCUGGUGCCGGGUUCC | 17 | 913 |
| BCL11A-429 | + | GCUGGUGCCGGGUUCCG | 17 | 914 |
| BCL11A-430 | + | GCCGGGUUCCGGGGAGC | 17 | 915 |
| BCL11A-431 | + | GGGUUCCGGGGAGCUGG | 17 | 916 |
| BCL11A-432 | + | UUCCGGGGAGCUGGCGG | 17 | 917 |
| BCL11A-433 | + | GGUGGAGAGACCGUCGU | 17 | 918 |
| BCL11A-434 | + | GUCGGACUUGACCGUCA | 17 | 919 |
| BCL11A-435 | + | UCGGACUUGACCGUCAU | 17 | 920 |
| BCL11A-436 | + | CGGACUUGACCGUCAUG | 17 | 921 |
| BCL11A-437 | + | GGACUUGACCGUCAUGG | 17 | 922 |
| BCL11A-438 | + | GCAUGUGCGUCUUCAUG | 17 | 923 |
| BCL11A-439 | + | GUGGCGCUUCAGCUUGC | 17 | 924 |
| BCL11A-440 | + | GCUUCAGCUUGCUGGCC | 17 | 925 |
| BCL11A-441 | + | CUUCAGCUUGCUGGCCU | 17 | 926 |
| BCL11A-442 | + | UGGCCUGGGUGCACGCG | 17 | 927 |
| BCL11A-443 | + | UGCACGCGUGGUCGCAC | 17 | 928 |
| BCL11A-444 | + | GCACAGGUUGCACUUGU | 17 | 929 |
| BCL11A-445 | + | CACAGGUUGCACUUGUA | 17 | 930 |
| BCL11A-446 | + | AGGGCUUCUCGCCCGUG | 17 | 931 |
| BCL11A-447 | + | CGCCCGUGUGGCUGCGC | 17 | 932 |
| BCL11A-448 | + | UGCGCCGGUGCACCACC | 17 | 933 |
| BCL11A-449 | + | GCAGAACUCGCAUGACU | 17 | 934 |
| BCL11A-450 | + | CAUGACUUGGACUUGAC | 17 | 935 |
| BCL11A-451 | + | AUGACUUGGACUUGACC | 17 | 936 |
| BCL11A-452 | + | UGACUUGGACUUGACCG | 17 | 937 |
| BCL11A-453 | + | GACUUGGACUUGACCGG | 17 | 938 |
| BCL11A-454 | + | UGGACUUGACCGGGGGC | 17 | 939 |
| BCL11A-455 | + | GGACUUGACCGGGGGCU | 17 | 940 |
| BCL11A-456 | + | CUUGACCGGGGGCUGGG | 17 | 941 |
| BCL11A-457 | + | UUGACCGGGGGCUGGGA | 17 | 942 |
| BCL11A-458 | + | ACCGGGGGCUGGGAGGG | 17 | 943 |
| BCL11A-459 | + | GGGGGCUGGGAGGGAGG | 17 | 944 |
| BCL11A-460 | + | GGGGCUGGGAGGGAGGA | 17 | 945 |
| BCL11A-461 | + | GGGCUGGGAGGGAGGAG | 17 | 946 |
| BCL11A-462 | + | CUGGGAGGGAGGAGGGG | 17 | 947 |
| BCL11A-463 | + | GGAGGGGCGGAUUGCAG | 17 | 948 |
| BCL11A-464 | + | GGGGCGGAUUGCAGAGG | 17 | 949 |
| BCL11A-465 | + | GGGCGGAUUGCAGAGGA | 17 | 950 |
| BCL11A-466 | + | CGGAUUGCAGAGGAGGG | 17 | 951 |
| BCL11A-467 | + | GGAUUGCAGAGGAGGGA | 17 | 952 |
| BCL11A-468 | + | GAUUGCAGAGGAGGGAG | 17 | 953 |
| BCL11A-469 | + | AUUGCAGAGGAGGGAGG | 17 | 954 |
| BCL11A-470 | + | UUGCAGAGGAGGGAGGG | 17 | 955 |
| BCL11A-471 | + | UGCAGAGGAGGGAGGGG | 17 | 956 |
| BCL11A-472 | + | GGAGGGGGGGCGUCGCC | 17 | 957 |
| BCL11A-473 | + | GGGGGGCGUCGCCAGGA | 17 | 958 |
| BCL11A-474 | + | GGGGGCGUCGCCAGGAA | 17 | 959 |
| BCL11A-475 | + | GGCGUCGCCAGGAAGGG | 17 | 960 |
| BCL11A-476 | + | AAGGGCGGCUUGCUACC | 17 | 961 |
| BCL11A-477 | + | GCGGCUUGCUACCUGGC | 17 | 962 |
| BCL11A-478 | + | UUGCUACCUGGCUGGAA | 17 | 963 |
| BCL11A-479 | + | UGCAGUAACCUUUGCAU | 17 | 964 |
| BCL11A-480 | + | GCAGUAACCUUUGCAUA | 17 | 965 |
| BCL11A-481 | + | UAACCUUUGCAUAGGGC | 17 | 966 |
| BCL11A-482 | + | AACCUUUGCAUAGGGCU | 17 | 967 |
| BCL11A-483 | + | UUUGCAUAGGGCUGGGC | 17 | 968 |
| BCL11A-484 | + | AUAGGGCUGGGCCGGCC | 17 | 969 |
| BCL11A-485 | + | UAGGGCUGGGCCGGCCU | 17 | 970 |
| BCL11A-486 | + | AGGGCUGGGCCGGCCUG | 17 | 971 |
| BCL11A-487 | + | GGCCGGCCUGGGGACAG | 17 | 972 |
| BCL11A-488 | + | CGGCCUGGGGACAGCGG | 17 | 973 |
| BCL11A-489 | + | GGCCUGGGGACAGCGGU | 17 | 974 |
| BCL11A-490 | + | UCUCCUAGAGAAAUCCA | 17 | 975 |
| BCL11A-491 | + | CCUAGAGAAAUCCAUGG | 17 | 976 |
| BCL11A-492 | + | CUAGAGAAAUCCAUGGC | 17 | 977 |
| BCL11A-493 | + | GAGAAAUCCAUGGCGGG | 17 | 978 |
| BCL11A-494 | + | GGAGGCUCCAUAGCCAU | 17 | 979 |
| BCL11A-495 | + | CCGCAGCACCCUGUCAA | 17 | 980 |
| BCL11A-496 | + | ACCCUGUCAAAGGCACU | 17 | 981 |
| BCL11A-497 | + | CCCUGUCAAAGGCACUC | 17 | 982 |
| BCL11A-498 | + | CAAAGGCACUCGGGUGA | 17 | 983 |
| BCL11A-499 | + | AAAGGCACUCGGGUGAU | 17 | 984 |
| BCL11A-500 | + | GGCACUCGGGUGAUGGG | 17 | 985 |
| BCL11A-501 | + | UCGGGUGAUGGGUGGCC | 17 | 986 |
| BCL11A-502 | + | CGGGUGAUGGGUGGCCA | 17 | 987 |
| BCL11A-503 | + | CCAUCUCUUCCGCCCCC | 17 | 988 |
| BCL11A-504 | + | CCCCCAGGCGCUCUAUG | 17 | 989 |
| BCL11A-505 | + | CCAGGCGCUCUAUGCGG | 17 | 990 |
| BCL11A-506 | + | CAGGCGCUCUAUGCGGU | 17 | 991 |
| BCL11A-507 | + | AGGCGCUCUAUGCGGUG | 17 | 992 |
| BCL11A-508 | + | GGCGCUCUAUGCGGUGG | 17 | 993 |
| BCL11A-509 | + | GGGUCCAAGUGAUGUCU | 17 | 994 |
| BCL11A-510 | + | UCCAAGUGAUGUCUCGG | 17 | 995 |
| BCL11A-511 | + | AAGUGAUGUCUCGGUGG | 17 | 996 |
| BCL11A-512 | + | UCGGUGGUGGACUAAAC | 17 | 997 |
| BCL11A-513 | + | CGGUGGUGGACUAAACA | 17 | 998 |
| BCL11A-514 | + | GGUGGUGGACUAAACAG | 17 | 999 |
| BCL11A-515 | + | GUGGUGGACUAAACAGG | 17 | 1000 |
| BCL11A-516 | + | UGGUGGACUAAACAGGG | 17 | 1001 |
| BCL11A-517 | + | GGUGGACUAAACAGGGG | 17 | 1002 |
| BCL11A-518 | + | ACUAAACAGGGGGGGAG | 17 | 1003 |
| BCL11A-519 | + | CUAAACAGGGGGGGAGU | 17 | 1004 |
| BCL11A-520 | + | AACAGGGGGGGAGUGGG | 17 | 1005 |
| BCL11A-521 | + | GAAAGCGCCCUUCUGCC | 17 | 1006 |
| BCL11A-522 | + | GCGCCCUUCUGCCAGGC | 17 | 1007 |
| BCL11A-523 | + | UCUCUCGAUACUGAUCC | 17 | 1008 |
| BCL11A-524 | + | AUCCUGGUAUUCUUAGC | 17 | 1009 |
| BCL11A-525 | + | UAUUCUUAGCAGGUUAA | 17 | 1010 |
| BCL11A-526 | + | AUUCUUAGCAGGUUAAA | 17 | 1011 |
| BCL11A-527 | + | UUCUUAGCAGGUUAAAG | 17 | 1012 |
| BCL11A-528 | + | CUGCAAUAUGAAUCCCA | 17 | 1013 |
| BCL11A-529 | + | AUAUGAAUCCCAUGGAG | 17 | 1014 |
| BCL11A-530 | + | UGAAUCCCAUGGAGAGG | 17 | 1015 |
| BCL11A-531 | + | UCCCAUGGAGAGGUGGC | 17 | 1016 |
| BCL11A-532 | + | CCCAUGGAGAGGUGGCU | 17 | 1017 |
| BCL11A-533 | + | UGGAGAGGUGGCUGGGA | 17 | 1018 |
| BCL11A-534 | + | UCUGCACCUAGUCCUGA | 17 | 1019 |
| BCL11A-535 | + | CUGCACCUAGUCCUGAA | 17 | 1020 |
| BCL11A-536 | + | GAAGGGAUACCAACCCG | 17 | 1021 |
| BCL11A-537 | + | AAGGGAUACCAACCCGC | 17 | 1022 |
| BCL11A-538 | + | AGGGAUACCAACCCGCG | 17 | 1023 |
| BCL11A-539 | + | UACCAACCCGCGGGGUC | 17 | 1024 |
| BCL11A-540 | + | ACCAACCCGCGGGGUCA | 17 | 1025 |
| BCL11A-541 | + | CCAACCCGCGGGGUCAG | 17 | 1026 |
| BCL11A-542 | + | CAAGAGAAACCAUGCAC | 17 | 1027 |
| BCL11A-543 | + | AACCAUGCACUGGUGAA | 17 | 1028 |
| BCL11A-544 | + | UGUACAUGUGUAGCUGC | 17 | 1029 |
| BCL11A-545 | + | GUACAUGUGUAGCUGCU | 17 | 1030 |
| BCL11A-546 | − | AGAGGAGGAGGAGGAGCUGA | 20 | 1031 |
| BCL11A-547 | − | AGGAGCUGACGGAGAGCGAG | 20 | 1032 |
| BCL11A-548 | − | GGAGCUGACGGAGAGCGAGA | 20 | 1033 |
| BCL11A-549 | − | GCUGACGGAGAGCGAGAGGG | 20 | 1034 |
| BCL11A-550 | − | GAGAGCGAGAGGGUGGACUA | 20 | 1035 |
| BCL11A-551 | − | GAGAGGGUGGACUACGGCUU | 20 | 1036 |
| BCL11A-552 | − | AGAGGGUGGACUACGGCUUC | 20 | 1037 |
| BCL11A-553 | − | CUACGGCUUCGGGCUGAGCC | 20 | 1038 |
| BCL11A-554 | − | CGGCUUCGGGCUGAGCCUGG | 20 | 1039 |
| BCL11A-555 | − | CUUCGGGCUGAGCCUGGAGG | 20 | 1040 |
| BCL11A-556 | − | GCCACCACGAGAACAGCUCG | 20 | 1041 |
| BCL11A-557 | − | CCACCACGAGAACAGCUCGC | 20 | 1042 |
| BCL11A-558 | − | CACCACGAGAACAGCUCGCG | 20 | 1043 |
| BCL11A-559 | − | CGAGAACAGCUCGCGGGGCG | 20 | 1044 |
| BCL11A-560 | − | CAGCUCGCGGGGCGCGGUCG | 20 | 1045 |
| BCL11A-561 | − | AGCUCGCGGGGCGCGGUCGU | 20 | 1046 |
| BCL11A-562 | − | GCGGGGCGCGGUCGUGGGCG | 20 | 1047 |
| BCL11A-563 | − | CGGGGCGCGGUCGUGGGCGU | 20 | 1048 |
| BCL11A-564 | − | CGCCCUGCCCGACGUCAUGC | 20 | 1049 |
| BCL11A-565 | − | GCCCUGCCCGACGUCAUGCA | 20 | 1050 |
| BCL11A-566 | − | GCCCGACGUCAUGCAGGGCA | 20 | 1051 |
| BCL11A-567 | − | CUCCAUGCAGCACUUCAGCG | 20 | 1052 |
| BCL11A-568 | − | CUUCAGCGAGGCCUUCCACC | 20 | 1053 |
| BCL11A-569 | − | CGAGGCCUUCCACCAGGUCC | 20 | 1054 |
| BCL11A-570 | − | GAGGCCUUCCACCAGGUCCU | 20 | 1055 |
| BCL11A-571 | − | CUGGGCGAGAAGCAUAAGCG | 20 | 1056 |
| BCL11A-572 | − | GAAGCAUAAGCGCGGCCACC | 20 | 1057 |
| BCL11A-573 | − | UAAGCGCGGCCACCUGGCCG | 20 | 1058 |
| BCL11A-574 | − | CGGCCACCUGGCCGAGGCCG | 20 | 1059 |
| BCL11A-575 | − | GGCCACCUGGCCGAGGCCGA | 20 | 1060 |
| BCL11A-576 | − | UGGCCGAGGCCGAGGGCCAC | 20 | 1061 |
| BCL11A-577 | − | GGCCGAGGCCGAGGGCCACA | 20 | 1062 |
| BCL11A-578 | − | GGACACUUGCGACGAAGACU | 20 | 1063 |
| BCL11A-579 | − | CACUUGCGACGAAGACUCGG | 20 | 1064 |
| BCL11A-580 | − | UGCGACGAAGACUCGGUGGC | 20 | 1065 |
| BCL11A-581 | − | AGACUCGGUGGCCGGCGAGU | 20 | 1066 |
| BCL11A-582 | − | GAGUCGGACCGCAUAGACGA | 20 | 1067 |
| BCL11A-583 | − | AUAGACGAUGGCACUGUUAA | 20 | 1068 |
| BCL11A-584 | − | GAUGGCACUGUUAAUGGCCG | 20 | 1069 |
| BCL11A-585 | − | UAAUGGCCGCGGCUGCUCCC | 20 | 1070 |
| BCL11A-586 | − | AAUGGCCGCGGCUGCUCCCC | 20 | 1071 |
| BCL11A-587 | − | CGGCUGCUCCCCGGGCGAGU | 20 | 1072 |
| BCL11A-588 | − | CUCCCCGGGCGAGUCGGCCU | 20 | 1073 |
| BCL11A-589 | − | UCCCCGGGCGAGUCGGCCUC | 20 | 1074 |
| BCL11A-590 | − | CCCCGGGCGAGUCGGCCUCG | 20 | 1075 |
| BCL11A-591 | − | CCCGGGCGAGUCGGCCUCGG | 20 | 1076 |
| BCL11A-592 | − | CCGGGCGAGUCGGCCUCGGG | 20 | 1077 |
| BCL11A-593 | − | CCUGUCCAAAAAGCUGCUGC | 20 | 1078 |
| BCL11A-594 | − | CUGUCCAAAAAGCUGCUGCU | 20 | 1079 |
| BCL11A-595 | − | UAAGCGCAUCAAGCUCGAGA | 20 | 1080 |
| BCL11A-596 | − | GAAGGAGUUCGACCUGCCCC | 20 | 1081 |
| BCL11A-597 | − | CCCGGCCGCGAUGCCCAACA | 20 | 1082 |
| BCL11A-598 | − | CGGAGAACGUGUACUCGCAG | 20 | 1083 |
| BCL11A-599 | − | GUGUACUCGCAGUGGCUCGC | 20 | 1084 |
| BCL11A-600 | − | GCAGUGGCUCGCCGGCUACG | 20 | 1085 |
| BCL11A-601 | − | UCGCCGGCUACGCGGCCUCC | 20 | 1086 |
| BCL11A-602 | − | AAAGAUCCCUUCCUUAGCUU | 20 | 1087 |
| BCL11A-603 | − | AUCGCCUUUUGCCUCCUCGU | 20 | 1088 |
| BCL11A-604 | − | CUCCUCGUCGGAGCACUCCU | 20 | 1089 |
| BCL11A-605 | − | UCGGAGCACUCCUCGGAGAA | 20 | 1090 |
| BCL11A-606 | − | CGGAGCACUCCUCGGAGAAC | 20 | 1091 |
| BCL11A-607 | − | UUGCGCUUCUCCACACCGCC | 20 | 1092 |
| BCL11A-608 | − | UGCGCUUCUCCACACCGCCC | 20 | 1093 |
| BCL11A-609 | − | GCGCUUCUCCACACCGCCCG | 20 | 1094 |
| BCL11A-610 | − | CUCCACACCGCCCGGGGAGC | 20 | 1095 |
| BCL11A-611 | − | ACACCGCCCGGGGAGCUGGA | 20 | 1096 |
| BCL11A-612 | − | CCGCCCGGGGAGCUGGACGG | 20 | 1097 |
| BCL11A-613 | − | CGCCCGGGGAGCUGGACGGA | 20 | 1098 |
| BCL11A-614 | − | GGAGCUGGACGGAGGGAUCU | 20 | 1099 |
| BCL11A-615 | − | GAGCUGGACGGAGGGAUCUC | 20 | 1100 |
| BCL11A-616 | − | AGCUGGACGGAGGGAUCUCG | 20 | 1101 |
| BCL11A-617 | − | GGAGGGAUCUCGGGGCGCAG | 20 | 1102 |
| BCL11A-618 | − | GAUCUCGGGGCGCAGCGGCA | 20 | 1103 |
| BCL11A-619 | − | AUCUCGGGGCGCAGCGGCAC | 20 | 1104 |
| BCL11A-620 | − | GGGCGCAGCGGCACGGGAAG | 20 | 1105 |
| BCL11A-621 | − | CGCAGCGGCACGGGAAGUGG | 20 | 1106 |
| BCL11A-622 | − | GCAGCGGCACGGGAAGUGGA | 20 | 1107 |
| BCL11A-623 | − | GGGAGCACGCCCCAUAUUAG | 20 | 1108 |
| BCL11A-624 | − | CACGCCCCAUAUUAGUGGUC | 20 | 1109 |
| BCL11A-625 | − | ACGCCCCAUAUUAGUGGUCC | 20 | 1110 |
| BCL11A-626 | − | CCAUAUUAGUGGUCCGGGCC | 20 | 1111 |
| BCL11A-627 | − | CAUAUUAGUGGUCCGGGCCC | 20 | 1112 |
| BCL11A-628 | − | UUAGUGGUCCGGGCCCGGGC | 20 | 1113 |
| BCL11A-629 | − | GGGCAGGCCCAGCUCAAAAG | 20 | 1114 |
| BCL11A-630 | − | GGCAGGCCCAGCUCAAAAGA | 20 | 1115 |
| BCL11A-631 | + | GCGUCUGCCCUCUUUUGAGC | 20 | 1116 |
| BCL11A-632 | + | CGUCUGCCCUCUUUUGAGCU | 20 | 1117 |
| BCL11A-633 | + | UCUUUUGAGCUGGGCCUGCC | 20 | 1118 |
| BCL11A-634 | + | CUUUUGAGCUGGGCCUGCCC | 20 | 1119 |
| BCL11A-635 | + | GAGCUGGGCCUGCCCGGGCC | 20 | 1120 |
| BCL11A-636 | + | CCGGGCCCGGACCACUAAUA | 20 | 1121 |
| BCL11A-637 | + | CGGGCCCGGACCACUAAUAU | 20 | 1122 |
| BCL11A-638 | + | GGGCCCGGACCACUAAUAUG | 20 | 1123 |
| BCL11A-639 | + | GAUCCCUCCGUCCAGCUCCC | 20 | 1124 |
| BCL11A-640 | + | AUCCCUCCGUCCAGCUCCCC | 20 | 1125 |
| BCL11A-641 | + | CCUCCGUCCAGCUCCCCGGG | 20 | 1126 |
| BCL11A-642 | + | GUCCAGCUCCCCGGGCGGUG | 20 | 1127 |
| BCL11A-643 | + | GCGCAAACUCCCGUUCUCCG | 20 | 1128 |
| BCL11A-644 | + | CUCCGAGGAGUGCUCCGACG | 20 | 1129 |
| BCL11A-645 | + | CGAGGAGUGCUCCGACGAGG | 20 | 1130 |
| BCL11A-646 | + | UGCUCCGACGAGGAGGCAAA | 20 | 1131 |
| BCL11A-647 | + | GGAGGCAAAAGGCGAUUGUC | 20 | 1132 |
| BCL11A-648 | + | GUCUGGAGUCUCCGAAGCUA | 20 | 1133 |
| BCL11A-649 | + | GGAGUCUCCGAAGCUAAGGA | 20 | 1134 |
| BCL11A-650 | + | GAGUCUCCGAAGCUAAGGAA | 20 | 1135 |
| BCL11A-651 | + | GAAGGGAUCUUUGAGCUGCC | 20 | 1136 |
| BCL11A-652 | + | GGGAUCUUUGAGCUGCCUGG | 20 | 1137 |
| BCL11A-653 | + | CUGCCUGGAGGCCGCGUAGC | 20 | 1138 |
| BCL11A-654 | + | CGAGUACACGUUCUCCGUGU | 20 | 1139 |
| BCL11A-655 | + | GAGUACACGUUCUCCGUGUU | 20 | 1140 |
| BCL11A-656 | + | GUUCUCCGUGUUGGGCAUCG | 20 | 1141 |
| BCL11A-657 | + | UCCGUGUUGGGCAUCGCGGC | 20 | 1142 |
| BCL11A-658 | + | CCGUGUUGGGCAUCGCGGCC | 20 | 1143 |
| BCL11A-659 | + | CGUGUUGGGCAUCGCGGCCG | 20 | 1144 |
| BCL11A-660 | + | GUGUUGGGCAUCGCGGCCGG | 20 | 1145 |
| BCL11A-661 | + | UGGGCAUCGCGGCCGGGGGC | 20 | 1146 |
| BCL11A-662 | + | GAGCUUGAUGCGCUUAGAGA | 20 | 1147 |
| BCL11A-663 | + | AGCUUGAUGCGCUUAGAGAA | 20 | 1148 |
| BCL11A-664 | + | GCUUGAUGCGCUUAGAGAAG | 20 | 1149 |
| BCL11A-665 | + | AGAGAAGGGGCUCAGCGAGC | 20 | 1150 |
| BCL11A-666 | + | GAGAAGGGGCUCAGCGAGCU | 20 | 1151 |
| BCL11A-667 | + | AGAAGGGGCUCAGCGAGCUG | 20 | 1152 |
| BCL11A-668 | + | GCUGCCCAGCAGCAGCUUUU | 20 | 1153 |
| BCL11A-669 | + | CCAGCAGCAGCUUUUUGGAC | 20 | 1154 |
| BCL11A-670 | + | CUUUUUGGACAGGCCCCCCG | 20 | 1155 |
| BCL11A-671 | + | CCCCCCGAGGCCGACUCGCC | 20 | 1156 |
| BCL11A-672 | + | CCCCCGAGGCCGACUCGCCC | 20 | 1157 |
| BCL11A-673 | + | CCCCGAGGCCGACUCGCCCG | 20 | 1158 |
| BCL11A-674 | + | ACUCGCCCGGGGAGCAGCCG | 20 | 1159 |
| BCL11A-675 | + | UAACAGUGCCAUCGUCUAUG | 20 | 1160 |
| BCL11A-676 | + | GUCUAUGCGGUCCGACUCGC | 20 | 1161 |
| BCL11A-677 | + | CUUCGUCGCAAGUGUCCCUG | 20 | 1162 |
| BCL11A-678 | + | GCAAGUGUCCCUGUGGCCCU | 20 | 1163 |
| BCL11A-679 | + | GUCCCUGUGGCCCUCGGCCU | 20 | 1164 |
| BCL11A-680 | + | UGUGGCCCUCGGCCUCGGCC | 20 | 1165 |
| BCL11A-681 | + | GGCCCUCGGCCUCGGCCAGG | 20 | 1166 |
| BCL11A-682 | + | CGCGCUUAUGCUUCUCGCCC | 20 | 1167 |
| BCL11A-683 | + | UAUGCUUCUCGCCCAGGACC | 20 | 1168 |
| BCL11A-684 | + | GCUUCUCGCCCAGGACCUGG | 20 | 1169 |
| BCL11A-685 | + | CUCGCCCAGGACCUGGUGGA | 20 | 1170 |
| BCL11A-686 | + | GGCCUCGCUGAAGUGCUGCA | 20 | 1171 |
| BCL11A-687 | + | CACCAUGCCCUGCAUGACGU | 20 | 1172 |
| BCL11A-688 | + | ACCAUGCCCUGCAUGACGUC | 20 | 1173 |
| BCL11A-689 | + | UGCCCUGCAUGACGUCGGGC | 20 | 1174 |
| BCL11A-690 | + | GCCCUGCAUGACGUCGGGCA | 20 | 1175 |
| BCL11A-691 | + | GCAUGACGUCGGGCAGGGCG | 20 | 1176 |
| BCL11A-692 | + | CGCCCCGCGAGCUGUUCUCG | 20 | 1177 |
| BCL11A-693 | + | CCCGCGAGCUGUUCUCGUGG | 20 | 1178 |
| BCL11A-694 | + | CGUGGUGGCGCGCCGCCUCC | 20 | 1179 |
| BCL11A-695 | − | GGAGGAAGAGGAGGAGG | 17 | 1180 |
| BCL11A-696 | − | GGAGGAGGAGGAGCUGA | 17 | 1181 |
| BCL11A-697 | − | AGCUGACGGAGAGCGAG | 17 | 1182 |
| BCL11A-698 | − | GCUGACGGAGAGCGAGA | 17 | 1183 |
| BCL11A-699 | − | GACGGAGAGCGAGAGGG | 17 | 1184 |
| BCL11A-700 | − | AGCGAGAGGGUGGACUA | 17 | 1185 |
| BCL11A-701 | − | AGGGUGGACUACGGCUU | 17 | 1186 |
| BCL11A-702 | − | GGGUGGACUACGGCUUC | 17 | 1187 |
| BCL11A-703 | − | CGGCUUCGGGCUGAGCC | 17 | 1188 |
| BCL11A-704 | − | CUUCGGGCUGAGCCUGG | 17 | 1189 |
| BCL11A-705 | − | CGGGCUGAGCCUGGAGG | 17 | 1190 |
| BCL11A-706 | − | ACCACGAGAACAGCUCG | 17 | 1191 |
| BCL11A-707 | − | CCACGAGAACAGCUCGC | 17 | 1192 |
| BCL11A-708 | − | CACGAGAACAGCUCGCG | 17 | 1193 |
| BCL11A-709 | − | GAACAGCUCGCGGGGCG | 17 | 1194 |
| BCL11A-710 | − | CUCGCGGGGCGCGGUCG | 17 | 1195 |
| BCL11A-711 | − | UCGCGGGGCGCGGUCGU | 17 | 1196 |
| BCL11A-712 | − | GGGCGCGGUCGUGGGCG | 17 | 1197 |
| BCL11A-713 | − | GGCGCGGUCGUGGGCGU | 17 | 1198 |
| BCL11A-714 | − | CCUGCCCGACGUCAUGC | 17 | 1199 |
| BCL11A-715 | − | CUGCCCGACGUCAUGCA | 17 | 1200 |
| BCL11A-716 | − | CGACGUCAUGCAGGGCA | 17 | 1201 |
| BCL11A-717 | − | CAUGCAGCACUUCAGCG | 17 | 1202 |
| BCL11A-718 | − | CAGCGAGGCCUUCCACC | 17 | 1203 |
| BCL11A-719 | − | GGCCUUCCACCAGGUCC | 17 | 1204 |
| BCL11A-720 | − | GCCUUCCACCAGGUCCU | 17 | 1205 |
| BCL11A-721 | − | GGCGAGAAGCAUAAGCG | 17 | 1206 |
| BCL11A-722 | − | GCAUAAGCGCGGCCACC | 17 | 1207 |
| BCL11A-723 | − | GCGCGGCCACCUGGCCG | 17 | 1208 |
| BCL11A-724 | − | CCACCUGGCCGAGGCCG | 17 | 1209 |
| BCL11A-725 | − | CACCUGGCCGAGGCCGA | 17 | 1210 |
| BCL11A-726 | − | CCGAGGCCGAGGGCCAC | 17 | 1211 |
| BCL11A-727 | − | CGAGGCCGAGGGCCACA | 17 | 1212 |
| BCL11A-728 | − | CACUUGCGACGAAGACU | 17 | 1213 |
| BCL11A-729 | − | UUGCGACGAAGACUCGG | 17 | 1214 |
| BCL11A-730 | − | GACGAAGACUCGGUGGC | 17 | 1215 |
| BCL11A-731 | − | CUCGGUGGCCGGCGAGU | 17 | 1216 |
| BCL11A-732 | − | UCGGACCGCAUAGACGA | 17 | 1217 |
| BCL11A-733 | − | GACGAUGGCACUGUUAA | 17 | 1218 |
| BCL11A-734 | − | GGCACUGUUAAUGGCCG | 17 | 1219 |
| BCL11A-735 | − | UGGCCGCGGCUGCUCCC | 17 | 1220 |
| BCL11A-736 | − | GGCCGCGGCUGCUCCCC | 17 | 1221 |
| BCL11A-737 | − | CUGCUCCCCGGGCGAGU | 17 | 1222 |
| BCL11A-738 | − | CCCGGGCGAGUCGGCCU | 17 | 1223 |
| BCL11A-739 | − | CCGGGCGAGUCGGCCUC | 17 | 1224 |
| BCL11A-740 | − | CGGGCGAGUCGGCCUCG | 17 | 1225 |
| BCL11A-741 | − | GGGCGAGUCGGCCUCGG | 17 | 1226 |
| BCL11A-742 | − | GGCGAGUCGGCCUCGGG | 17 | 1227 |
| BCL11A-743 | − | GUCCAAAAAGCUGCUGC | 17 | 1228 |
| BCL11A-744 | − | UCCAAAAAGCUGCUGCU | 17 | 1229 |
| BCL11A-745 | − | GCGCAUCAAGCUCGAGA | 17 | 1230 |
| BCL11A-746 | − | GGAGUUCGACCUGCCCC | 17 | 1231 |
| BCL11A-747 | − | GGCCGCGAUGCCCAACA | 17 | 1232 |
| BCL11A-748 | − | AGAACGUGUACUCGCAG | 17 | 1233 |
| BCL11A-749 | − | UACUCGCAGUGGCUCGC | 17 | 1234 |
| BCL11A-750 | − | GUGGCUCGCCGGCUACG | 17 | 1235 |
| BCL11A-751 | − | CCGGCUACGCGGCCUCC | 17 | 1236 |
| BCL11A-752 | − | GAUCCCUUCCUUAGCUU | 17 | 1237 |
| BCL11A-753 | − | GCCUUUUGCCUCCUCGU | 17 | 1238 |
| BCL11A-754 | − | CUCGUCGGAGCACUCCU | 17 | 1239 |
| BCL11A-755 | − | GAGCACUCCUCGGAGAA | 17 | 1240 |
| BCL11A-756 | − | AGCACUCCUCGGAGAAC | 17 | 1241 |
| BCL11A-757 | − | CGCUUCUCCACACCGCC | 17 | 1242 |
| BCL11A-758 | − | GCUUCUCCACACCGCCC | 17 | 1243 |
| BCL11A-759 | − | CUUCUCCACACCGCCCG | 17 | 1244 |
| BCL11A-760 | − | CACACCGCCCGGGGAGC | 17 | 1245 |
| BCL11A-761 | − | CCGCCCGGGGAGCUGGA | 17 | 1246 |
| BCL11A-762 | − | CCCGGGGAGCUGGACGG | 17 | 1247 |
| BCL11A-763 | − | CCGGGGAGCUGGACGGA | 17 | 1248 |
| BCL11A-764 | − | GCUGGACGGAGGGAUCU | 17 | 1249 |
| BCL11A-765 | − | CUGGACGGAGGGAUCUC | 17 | 1250 |
| BCL11A-766 | − | UGGACGGAGGGAUCUCG | 17 | 1251 |
| BCL11A-767 | − | GGGAUCUCGGGGCGCAG | 17 | 1252 |
| BCL11A-768 | − | CUCGGGGCGCAGCGGCA | 17 | 1253 |
| BCL11A-769 | − | UCGGGGCGCAGCGGCAC | 17 | 1254 |
| BCL11A-770 | − | CGCAGCGGCACGGGAAG | 17 | 1255 |
| BCL11A-771 | − | AGCGGCACGGGAAGUGG | 17 | 1256 |
| BCL11A-772 | − | GCGGCACGGGAAGUGGA | 17 | 1257 |
| BCL11A-773 | − | AGCACGCCCCAUAUUAG | 17 | 1258 |
| BCL11A-774 | − | GCCCCAUAUUAGUGGUC | 17 | 1259 |
| BCL11A-775 | − | CCCCAUAUUAGUGGUCC | 17 | 1260 |
| BCL11A-776 | − | UAUUAGUGGUCCGGGCC | 17 | 1261 |
| BCL11A-777 | − | AUUAGUGGUCCGGGCCC | 17 | 1262 |
| BCL11A-778 | − | GUGGUCCGGGCCCGGGC | 17 | 1263 |
| BCL11A-779 | − | CAGGCCCAGCUCAAAAG | 17 | 1264 |
| BCL11A-780 | − | AGGCCCAGCUCAAAAGA | 17 | 1265 |
| BCL11A-781 | + | UCUGCCCUCUUUUGAGC | 17 | 1266 |
| BCL11A-782 | + | CUGCCCUCUUUUGAGCU | 17 | 1267 |
| BCL11A-783 | + | UUUGAGCUGGGCCUGCC | 17 | 1268 |
| BCL11A-784 | + | UUGAGCUGGGCCUGCCC | 17 | 1269 |
| BCL11A-785 | + | CUGGGCCUGCCCGGGCC | 17 | 1270 |
| BCL11A-786 | + | GGCCCGGACCACUAAUA | 17 | 1271 |
| BCL11A-787 | + | GCCCGGACCACUAAUAU | 17 | 1272 |
| BCL11A-788 | + | CCCGGACCACUAAUAUG | 17 | 1273 |
| BCL11A-789 | + | CCCUCCGUCCAGCUCCC | 17 | 1274 |
| BCL11A-790 | + | CCUCCGUCCAGCUCCCC | 17 | 1275 |
| BCL11A-791 | + | CCGUCCAGCUCCCCGGG | 17 | 1276 |
| BCL11A-792 | + | CAGCUCCCCGGGCGGUG | 17 | 1277 |
| BCL11A-793 | + | CAAACUCCCGUUCUCCG | 17 | 1278 |
| BCL11A-794 | + | CGAGGAGUGCUCCGACG | 17 | 1279 |
| BCL11A-795 | + | GGAGUGCUCCGACGAGG | 17 | 1280 |
| BCL11A-796 | + | UCCGACGAGGAGGCAAA | 17 | 1281 |
| BCL11A-797 | + | GGCAAAAGGCGAUUGUC | 17 | 1282 |
| BCL11A-798 | + | UGGAGUCUCCGAAGCUA | 17 | 1283 |
| BCL11A-799 | + | GUCUCCGAAGCUAAGGA | 17 | 1284 |
| BCL11A-800 | + | UCUCCGAAGCUAAGGAA | 17 | 1285 |
| BCL11A-801 | + | GGGAUCUUUGAGCUGCC | 17 | 1286 |
| BCL11A-802 | + | AUCUUUGAGCUGCCUGG | 17 | 1287 |
| BCL11A-803 | + | CCUGGAGGCCGCGUAGC | 17 | 1288 |
| BCL11A-804 | + | GUACACGUUCUCCGUGU | 17 | 1289 |
| BCL11A-805 | + | UACACGUUCUCCGUGUU | 17 | 1290 |
| BCL11A-806 | + | CUCCGUGUUGGGCAUCG | 17 | 1291 |
| BCL11A-807 | + | GUGUUGGGCAUCGCGGC | 17 | 1292 |
| BCL11A-808 | + | UGUUGGGCAUCGCGGCC | 17 | 1293 |
| BCL11A-809 | + | GUUGGGCAUCGCGGCCG | 17 | 1294 |
| BCL11A-810 | + | UUGGGCAUCGCGGCCGG | 17 | 1295 |
| BCL11A-811 | + | GCAUCGCGGCCGGGGGC | 17 | 1296 |
| BCL11A-812 | + | CUUGAUGCGCUUAGAGA | 17 | 1297 |
| BCL11A-813 | + | UUGAUGCGCUUAGAGAA | 17 | 1298 |
| BCL11A-814 | + | UGAUGCGCUUAGAGAAG | 17 | 1299 |
| BCL11A-815 | + | GAAGGGGCUCAGCGAGC | 17 | 1300 |
| BCL11A-816 | + | AAGGGGCUCAGCGAGCU | 17 | 1301 |
| BCL11A-817 | + | AGGGGCUCAGCGAGCUG | 17 | 1302 |
| BCL11A-818 | + | GCCCAGCAGCAGCUUUU | 17 | 1303 |
| BCL11A-819 | + | GCAGCAGCUUUUUGGAC | 17 | 1304 |
| BCL11A-820 | + | UUUGGACAGGCCCCCCG | 17 | 1305 |
| BCL11A-821 | + | CCCGAGGCCGACUCGCC | 17 | 1306 |
| BCL11A-822 | + | CCGAGGCCGACUCGCCC | 17 | 1307 |
| BCL11A-823 | + | CGAGGCCGACUCGCCCG | 17 | 1308 |
| BCL11A-824 | + | CGCCCGGGGAGCAGCCG | 17 | 1309 |
| BCL11A-825 | + | CAGUGCCAUCGUCUAUG | 17 | 1310 |
| BCL11A-826 | + | UAUGCGGUCCGACUCGC | 17 | 1311 |
| BCL11A-827 | + | CGUCGCAAGUGUCCCUG | 17 | 1312 |
| BCL11A-828 | + | AGUGUCCCUGUGGCCCU | 17 | 1313 |
| BCL11A-829 | + | CCUGUGGCCCUCGGCCU | 17 | 1314 |
| BCL11A-830 | + | GGCCCUCGGCCUCGGCC | 17 | 1315 |
| BCL11A-831 | + | CCUCGGCCUCGGCCAGG | 17 | 1316 |
| BCL11A-832 | + | GCUUAUGCUUCUCGCCC | 17 | 1317 |
| BCL11A-833 | + | GCUUCUCGCCCAGGACC | 17 | 1318 |
| BCL11A-834 | + | UCUCGCCCAGGACCUGG | 17 | 1319 |
| BCL11A-835 | + | GCCCAGGACCUGGUGGA | 17 | 1320 |
| BCL11A-836 | + | CUCGCUGAAGUGCUGCA | 17 | 1321 |
| BCL11A-837 | + | CAUGCCCUGCAUGACGU | 17 | 1322 |
| BCL11A-838 | + | AUGCCCUGCAUGACGUC | 17 | 1323 |
| BCL11A-839 | + | CCUGCAUGACGUCGGGC | 17 | 1324 |
| BCL11A-840 | + | CUGCAUGACGUCGGGCA | 17 | 1325 |
| BCL11A-841 | + | UGACGUCGGGCAGGGCG | 17 | 1326 |
| BCL11A-842 | + | CCCGCGAGCUGUUCUCG | 17 | 1327 |
| BCL11A-843 | + | GCGAGCUGUUCUCGUGG | 17 | 1328 |
| BCL11A-844 | + | GGUGGCGCGCCGCCUCC | 17 | 1329 |
| BCL11A-845 | − | CCCAGAGAGCUCAAGAUGUG | 20 | 1330 |
| BCL11A-846 | − | UCAAGAUGUGUGGCAGUUUU | 20 | 1331 |
| BCL11A-847 | − | GAUGUGUGGCAGUUUUCGGA | 20 | 1332 |
| BCL11A-848 | + | GCCACACAUCUUGAGCUCUC | 20 | 1333 |
| BCL11A-849 | + | CCACACAUCUUGAGCUCUCU | 20 | 1334 |
| BCL11A-850 | + | UCUCUGGGUACUACGCCGAA | 20 | 1335 |
| BCL11A-851 | + | CUCUGGGUACUACGCCGAAU | 20 | 1336 |
| BCL11A-852 | + | UCUGGGUACUACGCCGAAUG | 20 | 1337 |
| BCL11A-853 | + | CUGGGUACUACGCCGAAUGG | 20 | 1338 |
| BCL11A-854 | − | CUUCACACACCCCCAUU | 17 | 1339 |
| BCL11A-855 | − | AGAGAGCUCAAGAUGUG | 17 | 1340 |
| BCL11A-856 | − | AGAUGUGUGGCAGUUUU | 17 | 1341 |
| BCL11A-857 | − | GUGUGGCAGUUUUCGGA | 17 | 1342 |
| BCL11A-858 | + | ACACAUCUUGAGCUCUC | 17 | 1343 |
| BCL11A-859 | + | CACAUCUUGAGCUCUCU | 17 | 1344 |
| BCL11A-860 | + | CUGGGUACUACGCCGAA | 17 | 1345 |
| BCL11A-861 | + | UGGGUACUACGCCGAAU | 17 | 1346 |
| BCL11A-862 | + | GGGUACUACGCCGAAUG | 17 | 1347 |
| BCL11A-863 | + | GGUACUACGCCGAAUGG | 17 | 1348 |

[0990] Table 2E provides exemplary targeting domains for knocking out the BCL11A gene. In an embodiment, the targeting domain is the exact complement of the target domain. Any of the targeting domains in the table can be used with a S. aureus Cas9 molecule that gives double stranded cleavage. Any of the targeting domains in the table can be used with a S. aureus Cas9 single-stranded break nucleases (nickases). In an embodiment, dual targeting is used to create two nicks. When selecting gRNAs for use in a nickase pair, one gRNA targets a domain in the complementary strand and the second gRNA targets a domain in the non-complementary strand, e.g., a gRNA comprising any minus strand targeting domain may be paired any gRNA comprising a plus strand targeting domain targeting the same target position.

TABLE 2E

| S. aureus gRNA targets for BCL11A knockout | | | | |
|---|---|---|---|---|
| | | | Target | SEQ |
| | DNA | | Site | ID |
| gRNA Name | Strand | Targeting Domain | Length | NO |
| BCL11A-864 | − | AAACCCCAGCACUUAAGCAA | 20 | 1349 |
| BCL11A-865 | − | AACCCCAGCACUUAAGCAAA | 20 | 1350 |
| BCL11A-866 | − | ACCCCAGCACUUAAGCAAAC | 20 | 1351 |
| BCL11A-867 | − | CCCCAGCACUUAAGCAA | 17 | 1352 |
| BCL11A-868 | − | CCCAGCACUUAAGCAAA | 17 | 1353 |
| BCL11A-869 | − | CCAGCACUUAAGCAAAC | 17 | 1354 |
| BCL11A-870 | + | UGGGGUUUGCCUUGCUUGCG | 20 | 1355 |
| BCL11A-871 | + | AUUCCCGUUUGCUUAAGUGC | 20 | 1356 |
| BCL11A-872 | + | AAUUCCCGUUUGCUUAAGUG | 20 | 1357 |
| BCL11A-873 | + | GGUUUGCCUUGCUUGCG | 17 | 1358 |
| BCL11A-874 | + | CCCGUUUGCUUAAGUGC | 17 | 1359 |
| BCL11A-875 | + | UCCCGUUUGCUUAAGUG | 17 | 1360 |
| BCL11A-876 | − | UGAAGCCAUUCUUACAGAUG | 20 | 1361 |
| BCL11A-877 | − | AUGAACCAGACCACGGCCCG | 20 | 1362 |
| BCL11A-878 | − | UGAACCAGACCACGGCCCGU | 20 | 1363 |
| BCL11A-879 | − | GAACCAGACCACGGCCCGUU | 20 | 1364 |
| BCL11A-880 | − | CCACGGCCCGUUGGGAGCUC | 20 | 1365 |
| BCL11A-881 | − | CGGCCCGUUGGGAGCUCCAG | 20 | 1366 |
| BCL11A-882 | − | GGCCCGUUGGGAGCUCCAGA | 20 | 1367 |
| BCL11A-883 | − | GCCCGUUGGGAGCUCCAGAA | 20 | 1368 |
| BCL11A-884 | − | GGAUCAUGACCUCCUCACCU | 20 | 1369 |
| BCL11A-885 | − | UCACCUGUGGGCAGUGCCAG | 20 | 1370 |
| BCL11A-886 | − | AGUGCCAGAUGAACUUCCCA | 20 | 1371 |
| BCL11A-887 | − | GUGCCAGAUGAACUUCCCAU | 20 | 1372 |
| BCL11A-888 | − | UGCCAGAUGAACUUCCCAUU | 20 | 1373 |
| BCL11A-889 | − | GCCAGAUGAACUUCCCAUUG | 20 | 1374 |
| BCL11A-890 | − | GGGGGACAUUCUUAUUUUUA | 20 | 1375 |
| BCL11A-891 | − | CUUAUUUUUAUCGAGCACAA | 20 | 1376 |
| BCL11A-892 | − | UUAUUUUUAUCGAGCACAAA | 20 | 1377 |
| BCL11A-893 | − | AUGCAAUGGCAGCCUCUGCU | 20 | 1378 |
| BCL11A-894 | − | GCCUCUGCUUAGAAAAAGCU | 20 | 1379 |
| BCL11A-895 | − | GCCACCUUCCCCUUCACCAA | 20 | 1380 |
| BCL11A-896 | − | CUUCCCCUUCACCAAUCGAG | 20 | 1381 |
| BCL11A-897 | − | UGAAAAAAGCAUCCAAUCCC | 20 | 1382 |
| BCL11A-898 | − | GAAAAAAGCAUCCAAUCCCG | 20 | 1383 |
| BCL11A-899 | − | GGUUGGCAUCCAGGUCACGC | 20 | 1384 |
| BCL11A-900 | − | UUGGCAUCCAGGUCACGCCA | 20 | 1385 |
| BCL11A-901 | − | GAUUGUUUAUCAACGUCAUC | 20 | 1386 |
| BCL11A-902 | − | UUGUUUAUCAACGUCAUCUA | 20 | 1387 |
| BCL11A-903 | − | UGUUUAUCAACGUCAUCUAG | 20 | 1388 |
| BCL11A-904 | − | CUAGAGGAAUUUGCCCCAAA | 20 | 1389 |
| BCL11A-905 | − | UAGAGGAAUUUGCCCCAAAC | 20 | 1390 |
| BCL11A-906 | − | AGCCAUUCUUACAGAUG | 17 | 1391 |
| BCL11A-907 | − | AACCAGACCACGGCCCG | 17 | 1392 |
| BCL11A-908 | − | ACCAGACCACGGCCCGU | 17 | 1393 |
| BCL11A-909 | − | CCAGACCACGGCCCGUU | 17 | 1394 |
| BCL11A-910 | − | CGGCCCGUUGGGAGCUC | 17 | 1395 |
| BCL11A-911 | − | CCCGUUGGGAGCUCCAG | 17 | 1396 |
| BCL11A-912 | − | CCGUUGGGAGCUCCAGA | 17 | 1397 |
| BCL11A-913 | − | CGUUGGGAGCUCCAGAA | 17 | 1398 |
| BCL11A-914 | − | UCAUGACCUCCUCACCU | 17 | 1399 |
| BCL11A-915 | − | CCUGUGGGCAGUGCCAG | 17 | 1400 |
| BCL11A-916 | − | GCCAGAUGAACUUCCCA | 17 | 1401 |
| BCL11A-917 | − | CCAGAUGAACUUCCCAU | 17 | 1402 |
| BCL11A-918 | − | CAGAUGAACUUCCCAUU | 17 | 1403 |
| BCL11A-919 | − | AGAUGAACUUCCCAUUG | 17 | 1404 |
| BCL11A-920 | − | GGACAUUCUUAUUUUUA | 17 | 1405 |
| BCL11A-921 | − | AUUUUUAUCGAGCACAA | 17 | 1406 |
| BCL11A-922 | − | UUUUUAUCGAGCACAAA | 17 | 1407 |
| BCL11A-923 | − | CAAUGGCAGCCUCUGCU | 17 | 1408 |
| BCL11A-924 | − | UCUGCUUAGAAAAAGCU | 17 | 1409 |
| BCL11A-925 | − | ACCUUCCCCUUCACCAA | 17 | 1410 |
| BCL11A-926 | − | CCCCUUCACCAAUCGAG | 17 | 1411 |
| BCL11A-927 | − | AAAAAGCAUCCAAUCCC | 17 | 1412 |
| BCL11A-928 | − | AAAAGCAUCCAAUCCCG | 17 | 1413 |
| BCL11A-929 | − | UGGCAUCCAGGUCACGC | 17 | 1414 |
| BCL11A-930 | − | GCAUCCAGGUCACGCCA | 17 | 1415 |
| BCL11A-931 | − | UGUUUAUCAACGUCAUC | 17 | 1416 |
| BCL11A-932 | − | UUUAUCAACGUCAUCUA | 17 | 1417 |
| BCL11A-933 | − | UUAUCAACGUCAUCUAG | 17 | 1418 |
| BCL11A-934 | − | GAGGAAUUUGCCCCAAA | 17 | 1419 |
| BCL11A-935 | − | AGGAAUUUGCCCCAAAC | 17 | 1420 |
| BCL11A-936 | + | UCAUCUGUAAGAAUGGCUUC | 20 | 1421 |
| BCL11A-937 | + | UGGUCUGGUUCAUCAUCUGU | 20 | 1422 |
| BCL11A-938 | + | AUCCCCUUCUGGAGCUCCCA | 20 | 1423 |
| BCL11A-939 | + | AGGAGGUCAUGAUCCCCUUC | 20 | 1424 |
| BCL11A-940 | + | GAGGAGGUCAUGAUCCCCUU | 20 | 1425 |
| BCL11A-941 | + | UCUGGCACUGCCCACAGGUG | 20 | 1426 |
| BCL11A-942 | + | AUCUGGCACUGCCCACAGGU | 20 | 1427 |
| BCL11A-943 | + | UCAUCUGGCACUGCCCACAG | 20 | 1428 |
| BCL11A-944 | + | AAAUAAGAAUGUCCCCCAAU | 20 | 1429 |
| BCL11A-945 | + | AAAAUAAGAAUGUCCCCCAA | 20 | 1430 |
| BCL11A-946 | + | AAAAAUAAGAAUGUCCCCCA | 20 | 1431 |
| BCL11A-947 | + | CGUUUGUGCUCGAUAAAAAU | 20 | 1432 |
| BCL11A-948 | + | UAUCCACAGCUUUUUCUAAG | 20 | 1433 |
| BCL11A-949 | + | UUUCAUCUCGAUUGGUGAAG | 20 | 1434 |
| BCL11A-950 | + | UUUUCAUCUCGAUUGGUGAA | 20 | 1435 |
| BCL11A-951 | + | UUUUUCAUCUCGAUUGGUGA | 20 | 1436 |
| BCL11A-952 | + | UUUUUUCAUCUCGAUUGGUG | 20 | 1437 |
| BCL11A-953 | + | UGCUUUUUUCAUCUCGAUUG | 20 | 1438 |
| BCL11A-954 | + | GGAUGCCAACCUCCACGGGA | 20 | 1439 |
| BCL11A-955 | + | GACCUGGAUGCCAACCUCCA | 20 | 1440 |
| BCL11A-956 | + | UGACCUGGAUGCCAACCUCC | 20 | 1441 |
| BCL11A-957 | + | UCGUCAUCCUCUGGCGUGAC | 20 | 1442 |
| BCL11A-958 | + | CUGCUAUGUGUUCCUGUUUG | 20 | 1443 |
| BCL11A-959 | + | CUGCUAUGUGUUCCUGUUUG | 20 | 1444 |
| BCL11A-960 | + | UCUGUAAGAAUGGCUUC | 17 | 1445 |
| BCL11A-961 | + | UCUGGUUCAUCAUCUGU | 17 | 1446 |
| BCL11A-962 | + | CCCUUCUGGAGCUCCCA | 17 | 1447 |
| BCL11A-963 | + | AGGUCAUGAUCCCCUUC | 17 | 1448 |
| BCL11A-964 | + | GAGGUCAUGAUCCCCUU | 17 | 1449 |
| BCL11A-965 | + | GGCACUGCCCACAGGUG | 17 | 1450 |
| BCL11A-966 | + | UGGCACUGCCCACAGGU | 17 | 1451 |
| BCL11A-967 | + | UCUGGCACUGCCCACAG | 17 | 1452 |
| BCL11A-968 | + | UAAGAAUGUCCCCCAAU | 17 | 1453 |
| BCL11A-969 | + | AUAAGAAUGUCCCCCAA | 17 | 1454 |
| BCL11A-970 | + | AAUAAGAAUGUCCCCCA | 17 | 1455 |
| BCL11A-971 | + | UUGUGCUCGAUAAAAAU | 17 | 1456 |
| BCL11A-972 | + | CCACAGCUUUUUCUAAG | 17 | 1457 |
| BCL11A-973 | + | CAUCUCGAUUGGUGAAG | 17 | 1458 |
| BCL11A-974 | + | UCAUCUCGAUUGGUGAA | 17 | 1459 |
| BCL11A-975 | + | UUCAUCUCGAUUGGUGA | 17 | 1460 |
| BCL11A-976 | + | UUUCAUCUCGAUUGGUG | 17 | 1461 |
| BCL11A-977 | + | UUUUUUCAUCUCGAUUG | 17 | 1462 |
| BCL11A-978 | + | UGCCAACCUCCACGGGA | 17 | 1463 |
| BCL11A-979 | + | CUGGAUGCCAACCUCCA | 17 | 1464 |
| BCL11A-980 | + | CCUGGAUGCCAACCUCC | 17 | 1465 |
| BCL11A-981 | + | UCAUCCUCUGGCGUGAC | 17 | 1466 |
| BCL11A-982 | + | UGCUAUGUGUUCCUGUU | 17 | 1467 |
| BCL11A-983 | + | CUGCUAUGUGUUCCUGU | 17 | 1468 |
| BCL11A-984 | − | CUCCUCCCCUCGUUCUGCAC | 20 | 1469 |
| BCL11A-985 | − | UCCUCCCCUCGUUCUGCACA | 20 | 1470 |
| BCL11A-986 | − | UGGAGCUCUAAUCCCCACGC | 20 | 1471 |
| BCL11A-987 | − | GGAGCUCUAAUCCCCACGCC | 20 | 1472 |
| BCL11A-988 | − | CUCUAAUCCCCACGCCUGGG | 20 | 1473 |
| BCL11A-989 | − | CCCCACGCCUGGGAUGAGUG | 20 | 1474 |
| BCL11A-990 | − | UGAGUGCAGAAUAUGCCCCG | 20 | 1475 |
| BCL11A-991 | − | CUCCCCUCGUUCUGCAC | 17 | 1476 |
| BCL11A-992 | − | UCCCCUCGUUCUGCACA | 17 | 1477 |
| BCL11A-993 | − | AGCUCUAAUCCCCACGC | 17 | 1478 |
| BCL11A-994 | − | GCUCUAAUCCCCACGCC | 17 | 1479 |
| BCL11A-995 | − | UAAUCCCCACGCCUGGG | 17 | 1480 |
| BCL11A-996 | − | CACGCCUGGGAUGAGUG | 17 | 1481 |
| BCL11A-997 | − | GUGCAGAAUAUGCCCCG | 17 | 1482 |
| BCL11A-998 | + | GAGGAGAGGCCCCUCCAGUG | 20 | 1483 |
| BCL11A-999 | + | CAUGUGCAGAACGAGGGGAG | 20 | 1484 |
| BCL11A-1000 | + | UCCAUGUGCAGAACGAGGGG | 20 | 1485 |
| BCL11A-1001 | + | CUCCAUGUGCAGAACGAGGG | 20 | 1486 |
| BCL11A-1002 | + | AGCUCCAUGUGCAGAACGAG | 20 | 1487 |
| BCL11A-1003 | + | GAGCUCCAUGUGCAGAACGA | 20 | 1488 |
| BCL11A-1004 | + | AGAGCUCCAUGUGCAGAACG | 20 | 1489 |
| BCL11A-1005 | + | UAGAGCUCCAUGUGCAGAAC | 20 | 1490 |
| BCL11A-1006 | + | AUUAGAGCUCCAUGUGCAGA | 20 | 1491 |
| BCL11A-1007 | + | GGGGAUUAGAGCUCCAUGUG | 20 | 1492 |
| BCL11A-1008 | + | CUCAUCCCAGGCGUGGGGAU | 20 | 1493 |
| BCL11A-1009 | + | UCUGCACUCAUCCCAGGCGU | 20 | 1494 |
| BCL11A-1010 | + | UUCUGCACUCAUCCCAGGCG | 20 | 1495 |
| BCL11A-1011 | + | AUUCUGCACUCAUCCCAGGC | 20 | 1496 |
| BCL11A-1012 | + | GAGAGGCCCCUCCAGUG | 17 | 1497 |
| BCL11A-1013 | + | GUGCAGAACGAGGGGAG | 17 | 1498 |
| BCL11A-1014 | + | AUGUGCAGAACGAGGGG | 17 | 1499 |
| BCL11A-1015 | + | CAUGUGCAGAACGAGGG | 17 | 1500 |
| BCL11A-1016 | + | UCCAUGUGCAGAACGAG | 17 | 1501 |
| BCL11A-1017 | + | CUCCAUGUGCAGAACGA | 17 | 1502 |
| BCL11A-1018 | + | GCUCCAUGUGCAGAACG | 17 | 1503 |
| BCL11A-1019 | + | AGCUCCAUGUGCAGAAC | 17 | 1504 |
| BCL11A-1020 | + | AGAGCUCCAUGUGCAGA | 17 | 1505 |
| BCL11A-1021 | + | GAUUAGAGCUCCAUGUG | 17 | 1506 |
| BCL11A-1022 | + | AUCCCAGGCGUGGGGAU | 17 | 1507 |
| BCL11A-1023 | + | GCACUCAUCCCAGGCGU | 17 | 1508 |
| BCL11A-1024 | + | UGCACUCAUCCCAGGCG | 17 | 1509 |
| BCL11A-1025 | + | CUGCACUCAUCCCAGGC | 17 | 1510 |
| BCL11A-1026 | − | GGUUUCUCUUGCAACACGCA | 20 | 1511 |
| BCL11A-1027 | − | GCAACACGCACAGAACACUC | 20 | 1512 |
| BCL11A-1028 | − | GCACAGAACACUCAUGGAUU | 20 | 1513 |
| BCL11A-1029 | − | UCAUGGAUUAAGAAUCUACU | 20 | 1514 |
| BCL11A-1030 | − | AUUAAGAAUCUACUUAGAAA | 20 | 1515 |
| BCL11A-1031 | − | AAUCUACUUAGAAAGCGAAC | 20 | 1516 |
| BCL11A-1032 | − | AUCUACUUAGAAAGCGAACA | 20 | 1517 |
| BCL11A-1033 | − | CACGGAAGUCCCCUGACCCC | 20 | 1518 |
| BCL11A-1034 | − | CCCGCGGGUUGGUAUCCCUU | 20 | 1519 |
| BCL11A-1035 | − | UAUCCCUUCAGGACUAGGUG | 20 | 1520 |
| BCL11A-1036 | − | UCCUUCCCAGCCACCUCUCC | 20 | 1521 |
| BCL11A-1037 | − | CCUUCCCAGCCACCUCUCCA | 20 | 1522 |
| BCL11A-1038 | − | AAUAACCCCUUUAACCUGCU | 20 | 1523 |
| BCL11A-1039 | − | CUUUAACCUGCUAAGAAUAC | 20 | 1524 |
| BCL11A-1040 | − | UAAGAAUACCAGGAUCAGUA | 20 | 1525 |
| BCL11A-1041 | − | AGAAUACCAGGAUCAGUAUC | 20 | 1526 |
| BCL11A-1042 | − | AAUACCAGGAUCAGUAUCGA | 20 | 1527 |
| BCL11A-1043 | − | GAGAGAGGCUUCCGGCCUGG | 20 | 1528 |
| BCL11A-1044 | − | AGAGGCUUCCGGCCUGGCAG | 20 | 1529 |
| BCL11A-1045 | − | CCCCCCUGUUUAGUCCACCA | 20 | 1530 |
| BCL11A-1046 | − | GUCCACCACCGAGACAUCAC | 20 | 1531 |
| BCL11A-1047 | − | UCACUUGGACCCCCACCGCA | 20 | 1532 |
| BCL11A-1048 | − | ACCCCCACCGCAUAGAGCGC | 20 | 1533 |
| BCL11A-1049 | − | CCCCCACCGCAUAGAGCGCC | 20 | 1534 |
| BCL11A-1050 | − | CCCCACCGCAUAGAGCGCCU | 20 | 1535 |
| BCL11A-1051 | − | ACCGCAUAGAGCGCCUGGGG | 20 | 1536 |
| BCL11A-1052 | − | CCGCAUAGAGCGCCUGGGGG | 20 | 1537 |
| BCL11A-1053 | − | CAUAGAGCGCCUGGGGGCGG | 20 | 1538 |
| BCL11A-1054 | − | UGGCCCUGGCCACCCAUCAC | 20 | 1539 |
| BCL11A-1055 | − | CAUCACCCGAGUGCCUUUGA | 20 | 1540 |
| BCL11A-1056 | − | CCUUUGACAGGGUGCUGCGG | 20 | 1541 |
| BCL11A-1057 | − | UGCGGUUGAAUCCAAUGGCU | 20 | 1542 |
| BCL11A-1058 | − | GCGGUUGAAUCCAAUGGCUA | 20 | 1543 |
| BCL11A-1059 | − | UGGCUAUGGAGCCUCCCGCC | 20 | 1544 |
| BCL11A-1060 | − | CCUCCCGCCAUGGAUUUCUC | 20 | 1545 |
| BCL11A-1061 | − | CUCCCGCCAUGGAUUUCUCU | 20 | 1546 |
| BCL11A-1062 | − | AUGGAUUUCUCUAGGAGACU | 20 | 1547 |
| BCL11A-1063 | − | GGAUUUCUCUAGGAGACUUA | 20 | 1548 |
| BCL11A-1064 | − | UAGGAGACUUAGAGAGCUGG | 20 | 1549 |
| BCL11A-1065 | − | AGGAGACUUAGAGAGCUGGC | 20 | 1550 |
| BCL11A-1066 | − | GGAGACUUAGAGAGCUGGCA | 20 | 1551 |
| BCL11A-1067 | − | CCCGGUCAAGUCCAAGUCAU | 20 | 1552 |
| BCL11A-1068 | − | GCGGCAAGACGUUCAAAUUU | 20 | 1553 |
| BCL11A-1069 | − | UGGUGCACCGGCGCAGCCAC | 20 | 1554 |
| BCL11A-1070 | − | GCACCGGCGCAGCCACACGG | 20 | 1555 |
| BCL11A-1071 | − | ACCGGCGCAGCCACACGGGC | 20 | 1556 |
| BCL11A-1072 | − | CGUGCACCCAGGCCAGCAAG | 20 | 1557 |
| BCL11A-1073 | − | CCAGCAAGCUGAAGCGCCAC | 20 | 1558 |
| BCL11A-1074 | − | GUCUCUCCACCGCCAGCUCC | 20 | 1559 |
| BCL11A-1075 | − | UCUCUCCACCGCCAGCUCCC | 20 | 1560 |
| BCL11A-1076 | − | AACCCGGCACCAGCGACUUG | 20 | 1561 |
| BCL11A-1077 | − | AGUCCGUGGUGGCCAAGUUC | 20 | 1562 |
| BCL11A-1078 | − | CGUGGUGGCCAAGUUCAAGA | 20 | 1563 |
| BCL11A-1079 | − | UGGUGGCCAAGUUCAAGAGC | 20 | 1564 |
| BCL11A-1080 | − | AGAACGACCCCAACCUGAUC | 20 | 1565 |
| BCL11A-1081 | − | GAACGACCCCAACCUGAUCC | 20 | 1566 |
| BCL11A-1082 | − | ACGACCCCAACCUGAUCCCG | 20 | 1567 |
| BCL11A-1083 | − | CCCCAACCUGAUCCCGGAGA | 20 | 1568 |
| BCL11A-1084 | − | CCCAACCUGAUCCCGGAGAA | 20 | 1569 |
| BCL11A-1085 | − | CCAACCUGAUCCCGGAGAAC | 20 | 1570 |
| BCL11A-1086 | − | CCUGAUCCCGGAGAACGGGG | 20 | 1571 |
| BCL11A-1087 | − | UGAUCCCGGAGAACGGGGAC | 20 | 1572 |
| BCL11A-1088 | − | GAUCCCGGAGAACGGGGACG | 20 | 1573 |
| BCL11A-1089 | − | UCCCGGAGAACGGGGACGAG | 20 | 1574 |
| BCL11A-1090 | − | CCCGGAGAACGGGGACGAGG | 20 | 1575 |
| BCL11A-1091 | − | GGAGAACGGGGACGAGGAGG | 20 | 1576 |
| BCL11A-1092 | − | AGAACGGGGACGAGGAGGAA | 20 | 1577 |
| BCL11A-1093 | − | GAACGGGGACGAGGAGGAAG | 20 | 1578 |
| BCL11A-1094 | − | ACGGGGACGAGGAGGAAGAG | 20 | 1579 |
| BCL11A-1095 | − | CGAGGAGGAAGAGGAGGACG | 20 | 1580 |
| BCL11A-1096 | − | AGGAGGAAGAGGAGGACGAC | 20 | 1581 |
| BCL11A-1097 | − | GGAGGAAGAGGAGGACGACG | 20 | 1582 |
| BCL11A-1098 | − | GGAAGAGGAGGACGACGAGG | 20 | 1583 |
| BCL11A-1099 | − | AAGAGGAGGACGACGAGGAA | 20 | 1584 |
| BCL11A-1100 | − | AGAGGAGGACGACGAGGAAG | 20 | 1585 |
| BCL11A-1101 | − | GGAGGACGACGAGGAAGAGG | 20 | 1586 |
| BCL11A-1102 | − | GGACGACGAGGAAGAGGAAG | 20 | 1587 |
| BCL11A-1103 | − | ACGACGAGGAAGAGGAAGAA | 20 | 1588 |
| BCL11A-1104 | − | CGACGAGGAAGAGGAAGAAG | 20 | 1589 |
| BCL11A-1105 | − | ACGAGGAAGAGGAAGAAGAG | 20 | 1590 |
| BCL11A-1106 | − | CGAGGAAGAGGAAGAAGAGG | 20 | 1591 |
| BCL11A-1107 | − | GGAAGAGGAAGAAGAGGAGG | 20 | 1592 |
| BCL11A-1108 | − | AAGAGGAAGAAGAGGAGGAA | 20 | 1593 |
| BCL11A-1109 | − | AGAGGAAGAAGAGGAGGAAG | 20 | 1594 |
| BCL11A-1110 | − | AGGAAGAAGAGGAGGAAGAG | 20 | 1595 |
| BCL11A-1111 | − | GGAAGAAGAGGAGGAAGAGG | 20 | 1596 |
| BCL11A-1112 | − | AAGAAGAGGAGGAAGAGGAG | 20 | 1597 |
| BCL11A-1113 | − | AGAAGAGGAGGAAGAGGAGG | 20 | 1598 |
| BCL11A-1114 | − | AAGAGGAGGAAGAGGAGGAG | 20 | 1599 |
| BCL11A-1115 | − | AGAGGAGGAAGAGGAGGAGG | 20 | 1600 |
| BCL11A-1116 | − | AAGAGGAGGAGGAGGAGCUG | 20 | 1601 |
| BCL11A-1117 | − | AGAGGAGGAGGAGGAGCUGA | 20 | 1602 |
| BCL11A-1118 | − | AGGAGGAGGAGGAGCUGACG | 20 | 1603 |
| BCL11A-1119 | − | GGAGGAGGAGCUGACGGAGA | 20 | 1604 |
| BCL11A-1120 | − | AGGAGGAGCUGACGGAGAGC | 20 | 1605 |
| BCL11A-1121 | − | GAGGAGCUGACGGAGAGCGA | 20 | 1606 |
| BCL11A-1122 | − | AGCUGACGGAGAGCGAGAGG | 20 | 1607 |
| BCL11A-1123 | − | CGAGAGGGUGGACUACGGCU | 20 | 1608 |
| BCL11A-1124 | − | GGGUGGACUACGGCUUCGGG | 20 | 1609 |
| BCL11A-1125 | − | ACUACGGCUUCGGGCUGAGC | 20 | 1610 |
| BCL11A-1126 | − | CUACGGCUUCGGGCUGAGCC | 20 | 1611 |
| BCL11A-1127 | − | CCUGGAGGCGGCGCGCCACC | 20 | 1612 |
| BCL11A-1128 | − | UGGAGGCGGCGCGCCACCAC | 20 | 1613 |
| BCL11A-1129 | − | CGCCACCACGAGAACAGCUC | 20 | 1614 |
| BCL11A-1130 | − | GCCACCACGAGAACAGCUCG | 20 | 1615 |
| BCL11A-1131 | − | ACAGCUCGCGGGGCGCGGUC | 20 | 1616 |
| BCL11A-1132 | − | CGCGGGGCGCGGUCGUGGGC | 20 | 1617 |
| BCL11A-1133 | − | CGCGGUCGUGGGCGUGGGCG | 20 | 1618 |
| BCL11A-1134 | − | CGGUCGUGGGCGUGGGCGAC | 20 | 1619 |
| BCL11A-1135 | − | GCGCCCUGCCCGACGUCAUG | 20 | 1620 |
| BCL11A-1136 | − | CAGCUCCAUGCAGCACUUCA | 20 | 1621 |
| BCL11A-1137 | − | GCGAGGCCUUCCACCAGGUC | 20 | 1622 |
| BCL11A-1138 | − | GGCCUUCCACCAGGUCCUGG | 20 | 1623 |
| BCL11A-1139 | − | CCUUCCACCAGGUCCUGGGC | 20 | 1624 |
| BCL11A-1140 | − | GCAUAAGCGCGGCCACCUGG | 20 | 1625 |
| BCL11A-1141 | − | GCGCGGCCACCUGGCCGAGG | 20 | 1626 |
| BCL11A-1142 | − | GCGGCCACCUGGCCGAGGCC | 20 | 1627 |
| BCL11A-1143 | − | CUGGCCGAGGCCGAGGGCCA | 20 | 1628 |
| BCL11A-1144 | − | UGGCCGAGGCCGAGGGCCAC | 20 | 1629 |
| BCL11A-1145 | − | GGGCCACAGGGACACUUGCG | 20 | 1630 |
| BCL11A-1146 | − | CGACGAAGACUCGGUGGCCG | 20 | 1631 |
| BCL11A-1147 | − | AAGACUCGGUGGCCGGCGAG | 20 | 1632 |
| BCL11A-1148 | − | UUAAUGGCCGCGGCUGCUCC | 20 | 1633 |
| BCL11A-1149 | − | UGGCCGCGGCUGCUCCCCGG | 20 | 1634 |
| BCL11A-1150 | − | GCUCCCCGGGCGAGUCGGCC | 20 | 1635 |
| BCL11A-1151 | − | CUCCCCGGGCGAGUCGGCCU | 20 | 1636 |
| BCL11A-1152 | − | UCCCCGGGCGAGUCGGCCUC | 20 | 1637 |
| BCL11A-1153 | − | CCCCGGGCGAGUCGGCCUCG | 20 | 1638 |
| BCL11A-1154 | − | GCCUGUCCAAAAAGCUGCUG | 20 | 1639 |
| BCL11A-1155 | − | UGCUGGGCAGCCCCAGCUCG | 20 | 1640 |
| BCL11A-1156 | − | CUUCUCUAAGCGCAUCAAGC | 20 | 1641 |
| BCL11A-1157 | − | UCUCUAAGCGCAUCAAGCUC | 20 | 1642 |
| BCL11A-1158 | − | CUAAGCGCAUCAAGCUCGAG | 20 | 1643 |
| BCL11A-1159 | − | UAAGCGCAUCAAGCUCGAGA | 20 | 1644 |
| BCL11A-1160 | − | CCCCGGCCGCGAUGCCCAAC | 20 | 1645 |
| BCL11A-1161 | − | CCCGGCCGCGAUGCCCAACA | 20 | 1646 |
| BCL11A-1162 | − | CGGCCGCGAUGCCCAACACG | 20 | 1647 |
| BCL11A-1163 | − | CAAAGAUCCCUUCCUUAGCU | 20 | 1648 |
| BCL11A-1164 | − | AAAGAUCCCUUCCUUAGCUU | 20 | 1649 |
| BCL11A-1165 | − | AAUCGCCUUUUGCCUCCUCG | 20 | 1650 |
| BCL11A-1166 | − | AUCGCCUUUUGCCUCCUCGU | 20 | 1651 |
| BCL11A-1167 | − | CCUCCUCGUCGGAGCACUCC | 20 | 1652 |
| BCL11A-1168 | − | CUCCUCGUCGGAGCACUCCU | 20 | 1653 |
| BCL11A-1169 | − | CCUCGUCGGAGCACUCCUCG | 20 | 1654 |
| BCL11A-1170 | − | GUCGGAGCACUCCUCGGAGA | 20 | 1655 |
| BCL11A-1171 | − | UCGGAGCACUCCUCGGAGAA | 20 | 1656 |
| BCL11A-1172 | − | CGGAGCACUCCUCGGAGAAC | 20 | 1657 |
| BCL11A-1173 | − | UUUGCGCUUCUCCACACCGC | 20 | 1658 |
| BCL11A-1174 | − | UUGCGCUUCUCCACACCGCC | 20 | 1659 |
| BCL11A-1175 | − | UGCGCUUCUCCACACCGCCC | 20 | 1660 |
| BCL11A-1176 | − | GCGCUUCUCCACACCGCCCG | 20 | 1661 |
| BCL11A-1177 | − | UCUCCACACCGCCCGGGGAG | 20 | 1662 |
| BCL11A-1178 | − | CACACCGCCCGGGGAGCUGG | 20 | 1663 |
| BCL11A-1179 | − | ACACCGCCCGGGGAGCUGGA | 20 | 1664 |
| BCL11A-1180 | − | ACCGCCCGGGGAGCUGGACG | 20 | 1665 |
| BCL11A-1181 | − | CCGCCCGGGGAGCUGGACGG | 20 | 1666 |
| BCL11A-1182 | − | GGGAGCUGGACGGAGGGAUC | 20 | 1667 |
| BCL11A-1183 | − | GGAGCUGGACGGAGGGAUCU | 20 | 1668 |
| BCL11A-1184 | − | GGAUCUCGGGGCGCAGCGGC | 20 | 1669, |
| BCL11A-1185 | − | GAUCUCGGGGCGCAGCGGCA | 20 | 1670 |
| BCL11A-1186 | − | AUCUCGGGGCGCAGCGGCAC | 20 | 1671 |
| BCL11A-1187 | − | GGGGCGCAGCGGCACGGGAA | 20 | 1672 |
| BCL11A-1188 | − | GGGCGCAGCGGCACGGGAAG | 20 | 1673 |
| BCL11A-1189 | − | GCGCAGCGGCACGGGAAGUG | 20 | 1674 |
| BCL11A-1190 | − | CGCAGCGGCACGGGAAGUGG | 20 | 1675 |
| BCL11A-1191 | − | GCAGCGGCACGGGAAGUGGA | 20 | 1676 |
| BCL11A-1192 | − | GCACGCCCCAUAUUAGUGGU | 20 | 1677 |
| BCL11A-1193 | − | CCCAUAUUAGUGGUCCGGGC | 20 | 1678 |
| BCL11A-1194 | − | CCCGGGCAGGCCCAGCUCAA | 20 | 1679 |
| BCL11A-1195 | − | CGGGCAGGCCCAGCUCAAAA | 20 | 1680 |
| BCL11A-1196 | − | UUCUCUUGCAACACGCA | 17 | 1681 |
| BCL11A-1197 | − | ACACGCACAGAACACUC | 17 | 1682 |
| BCL11A-1198 | − | CAGAACACUCAUGGAUU | 17 | 1683 |
| BCL11A-1199 | − | UGGAUUAAGAAUCUACU | 17 | 1684 |
| BCL11A-1200 | − | AAGAAUCUACUUAGAAA | 17 | 1685 |
| BCL11A-1201 | − | CUACUUAGAAAGCGAAC | 17 | 1686 |
| BCL11A-1202 | − | UACUUAGAAAGCGAACA | 17 | 1687 |
| BCL11A-1203 | − | GGAAGUCCCCUGACCCC | 17 | 1688 |
| BCL11A-1204 | − | GCGGGUUGGUAUCCCUU | 17 | 1689 |
| BCL11A-1205 | − | CCCUUCAGGACUAGGUG | 17 | 1690 |
| BCL11A-1206 | − | UUCCCAGCCACCUCUCC | 17 | 1691 |
| BCL11A-1207 | − | UCCCAGCCACCUCUCCA | 17 | 1692 |
| BCL11A-1208 | − | AACCCCUUUAACCUGCU | 17 | 1693 |
| BCL11A-1209 | − | UAACCUGCUAAGAAUAC | 17 | 1694 |
| BCL11A-1210 | − | GAAUACCAGGAUCAGUA | 17 | 1695 |
| BCL11A-1211 | − | AUACCAGGAUCAGUAUC | 17 | 1696 |
| BCL11A-1212 | − | ACCAGGAUCAGUAUCGA | 17 | 1697 |
| BCL11A-1213 | − | AGAGGCUUCCGGCCUGG | 17 | 1698 |
| BCL11A-1214 | − | GGCUUCCGGCCUGGCAG | 17 | 1699 |
| BCL11A-1215 | − | CCCUGUUUAGUCCACCA | 17 | 1700 |
| BCL11A-1216 | − | CACCACCGAGACAUCAC | 17 | 1701 |
| BCL11A-1217 | − | CUUGGACCCCCACCGCA | 17 | 1702 |
| BCL11A-1218 | − | CCCACCGCAUAGAGCGC | 17 | 1703 |
| BCL11A-1219 | − | CCACCGCAUAGAGCGCC | 17 | 1704 |
| BCL11A-1220 | − | CACCGCAUAGAGCGCCU | 17 | 1705 |
| BCL11A-1221 | − | GCAUAGAGCGCCUGGGG | 17 | 1706 |
| BCL11A-1222 | − | CAUAGAGCGCCUGGGGG | 17 | 1707 |
| BCL11A-1223 | − | AGAGCGCCUGGGGGCGG | 17 | 1708 |
| BCL11A-1224 | − | CCCUGGCCACCCAUCAC | 17 | 1709 |
| BCL11A-1225 | − | CACCCGAGUGCCUUUGA | 17 | 1710 |
| BCL11A-1226 | − | UUGACAGGGUGCUGCGG | 17 | 1711 |
| BCL11A-1227 | − | GGUUGAAUCCAAUGGCU | 17 | 1712 |
| BCL11A-1228 | − | GUUGAAUCCAAUGGCUA | 17 | 1713 |
| BCL11A-1229 | − | CUAUGGAGCCUCCCGCC | 17 | 1714 |
| BCL11A-1230 | − | CCCGCCAUGGAUUUCUC | 17 | 1715 |
| BCL11A-1231 | − | CCGCCAUGGAUUUCUCU | 17 | 1716 |
| BCL11A-1232 | − | GAUUUCUCUAGGAGACU | 17 | 1717 |
| BCL11A-1233 | − | UUUCUCUAGGAGACUUA | 17 | 1718 |
| BCL11A-1234 | − | GAGACUUAGAGAGCUGG | 17 | 1719 |
| BCL11A-1235 | − | AGACUUAGAGAGCUGGC | 17 | 1720 |
| BCL11A-1236 | − | GACUUAGAGAGCUGGCA | 17 | 1721 |
| BCL11A-1237 | − | GGUCAAGUCCAAGUCAU | 17 | 1722 |
| BCL11A-1238 | − | GCAAGACGUUCAAAUUU | 17 | 1723 |
| BCL11A-1239 | − | UGCACCGGCGCAGCCAC | 17 | 1724 |
| BCL11A-1240 | − | CCGGCGCAGCCACACGG | 17 | 1725 |
| BCL11A-1241 | − | GGCGCAGCCACACGGGC | 17 | 1726 |
| BCL11A-1242 | − | GCACCCAGGCCAGCAAG | 17 | 1727 |
| BCL11A-1243 | − | GCAAGCUGAAGCGCCAC | 17 | 1728 |
| BCL11A-1244 | − | UCUCCACCGCCAGCUCC | 17 | 1729 |
| BCL11A-1245 | − | CUCCACCGCCAGCUCCC | 17 | 1730 |
| BCL11A-1246 | − | CCGGCACCAGCGACUUG | 17 | 1731 |
| BCL11A-1247 | − | CCGUGGUGGCCAAGUUC | 17 | 1732 |
| BCL11A-1248 | − | GGUGGCCAAGUUCAAGA | 17 | 1733 |
| BCL11A-1249 | − | UGGCCAAGUUCAAGAGC | 17 | 1734 |
| BCL11A-1250 | − | ACGACCCCAACCUGAUC | 17 | 1735 |
| BCL11A-1251 | − | CGACCCCAACCUGAUCC | 17 | 1736 |
| BCL11A-1252 | − | ACCCCAACCUGAUCCCG | 17 | 1737 |
| BCL11A-1253 | − | CAACCUGAUCCCGGAGA | 17 | 1738 |
| BCL11A-1254 | − | AACCUGAUCCCGGAGAA | 17 | 1739 |
| BCL11A-1255 | − | ACCUGAUCCCGGAGAAC | 17 | 1740 |
| BCL11A-1256 | − | GAUCCCGGAGAACGGGG | 17 | 1741 |
| BCL11A-1257 | − | UCCCGGAGAACGGGGAC | 17 | 1742 |
| BCL11A-1258 | − | CCCGGAGAACGGGGACG | 17 | 1743 |
| BCL11A-1259 | − | CGGAGAACGGGGACGAG | 17 | 1744 |
| BCL11A-1260 | − | GGAGAACGGGGACGAGG | 17 | 1745 |
| BCL11A-1261 | − | GAACGGGGACGAGGAGG | 17 | 1746 |
| BCL11A-1262 | − | ACGGGGACGAGGAGGAA | 17 | 1747 |
| BCL11A-1263 | − | CGGGGACGAGGAGGAAG | 17 | 1748 |
| BCL11A-1264 | − | GGGACGAGGAGGAAGAG | 17 | 1749 |
| BCL11A-1265 | − | GGAGGAAGAGGAGGACG | 17 | 1750 |
| BCL11A-1266 | − | AGGAAGAGGAGGACGAC | 17 | 1751 |
| BCL11A-1267 | − | GGAAGAGGAGGACGACG | 17 | 1752 |
| BCL11A-1268 | − | AGAGGAGGACGACGAGG | 17 | 1753 |
| BCL11A-1269 | − | AGGAGGACGACGAGGAA | 17 | 1754 |
| BCL11A-1270 | − | GGAGGACGACGAGGAAG | 17 | 1755 |
| BCL11A-1271 | − | GGACGACGAGGAAGAGG | 17 | 1756 |
| BCL11A-1272 | − | CGACGAGGAAGAGGAAG | 17 | 1757 |
| BCL11A-1273 | − | ACGAGGAAGAGGAAGAA | 17 | 1758 |
| BCL11A-1274 | − | CGAGGAAGAGGAAGAAG | 17 | 1759 |
| BCL11A-1275 | − | AGGAAGAGGAAGAAGAG | 17 | 1760 |
| BCL11A-1276 | − | GGAAGAGGAAGAAGAGG | 17 | 1761 |
| BCL11A-1277 | − | AGAGGAAGAAGAGGAGG | 17 | 1762 |
| BCL11A-1278 | − | AGGAAGAAGAGGAGGAA | 17 | 1763 |
| BCL11A-1279 | − | GGAAGAAGAGGAGGAAG | 17 | 1764 |
| BCL11A-1280 | − | AAGAAGAGGAGGAAGAG | 17 | 1765 |
| BCL11A-1281 | − | AGAAGAGGAGGAAGAGG | 17 | 1766 |
| BCL11A-1282 | − | AAGAGGAGGAAGAGGAG | 17 | 1767 |
| BCL11A-1283 | − | AGAGGAGGAAGAGGAGG | 17 | 1768 |
| BCL11A-1284 | − | AGGAGGAAGAGGAGGAG | 17 | 1769 |
| BCL11A-1285 | − | GGAGGAAGAGGAGGAGG | 17 | 1770 |
| BCL11A-1286 | − | AGGAGGAGGAGGAGCUG | 17 | 1771 |
| BCL11A-1287 | − | GGAGGAGGAGGAGCUGA | 17 | 1772 |
| BCL11A-1288 | − | AGGAGGAGGAGCUGACG | 17 | 1773 |
| BCL11A-1289 | − | GGAGGAGCUGACGGAGA | 17 | 1774 |
| BCL11A-1290 | − | AGGAGCUGACGGAGAGC | 17 | 1775 |
| BCL11A-1291 | − | GAGCUGACGGAGAGCGA | 17 | 1776 |
| BCL11A-1292 | − | UGACGGAGAGCGAGAGG | 17 | 1777 |
| BCL11A-1293 | − | GAGGGUGGACUACGGCU | 17 | 1778 |
| BCL11A-1294 | − | UGGACUACGGCUUCGGG | 17 | 1779 |
| BCL11A-1295 | − | ACGGCUUCGGGCUGAGC | 17 | 1780 |
| BCL11A-1296 | − | CGGCUUCGGGCUGAGCC | 17 | 1781 |
| BCL11A-1297 | − | GGAGGCGGCGCGCCACC | 17 | 1782 |
| BCL11A-1298 | − | AGGCGGCGCGCCACCAC | 17 | 1783 |
| BCL11A-1299 | − | CACCACGAGAACAGCUC | 17 | 1784 |
| BCL11A-1300 | − | ACCACGAGAACAGCUCG | 17 | 1785 |
| BCL11A-1301 | − | GCUCGCGGGGCGCGGUC | 17 | 1786 |
| BCL11A-1302 | − | GGGGCGCGGUCGUGGGC | 17 | 1787 |
| BCL11A-1303 | − | GGUCGUGGGCGUGGGCG | 17 | 1788 |
| BCL11A-1304 | − | UCGUGGGCGUGGGCGAC | 17 | 1789 |
| BCL11A-1305 | − | CCCUGCCCGACGUCAUG | 17 | 1790 |
| BCL11A-1306 | − | CUCCAUGCAGCACUUCA | 17 | 1791 |
| BCL11A-1307 | − | AGGCCUUCCACCAGGUC | 17 | 1792 |
| BCL11A-1308 | − | CUUCCACCAGGUCCUGG | 17 | 1793 |
| BCL11A-1309 | − | UCCACCAGGUCCUGGGC | 17 | 1794 |
| BCL11A-1310 | − | UAAGCGCGGCCACCUGG | 17 | 1795 |
| BCL11A-1311 | − | CGGCCACCUGGCCGAGG | 17 | 1796 |
| BCL11A-1312 | − | GCCACCUGGCCGAGGCC | 17 | 1797 |
| BCL11A-1313 | − | GCCGAGGCCGAGGGCCA | 17 | 1798 |
| BCL11A-1314 | − | CCGAGGCCGAGGGCCAC | 17 | 1799 |
| BCL11A-1315 | − | CCACAGGGACACUUGCG | 17 | 1800 |
| BCL11A-1316 | − | CGAAGACUCGGUGGCCG | 17 | 1801 |
| BCL11A-1317 | − | ACUCGGUGGCCGGCGAG | 17 | 1802 |
| BCL11A-1318 | − | AUGGCCGCGGCUGCUCC | 17 | 1803 |
| BCL11A-1319 | − | CCGCGGCUGCUCCCCGG | 17 | 1804 |
| BCL11A-1320 | − | CCCCGGGCGAGUCGGCC | 17 | 1805 |
| BCL11A-1321 | − | CCCGGGCGAGUCGGCCU | 17 | 1806 |
| BCL11A-1322 | − | CCGGGCGAGUCGGCCUC | 17 | 1807 |
| BCL11A-1323 | − | CGGGCGAGUCGGCCUCG | 17 | 1808 |
| BCL11A-1324 | − | UGUCCAAAAAGCUGCUG | 17 | 1809 |
| BCL11A-1325 | − | UGGGCAGCCCCAGCUCG | 17 | 1810 |
| BCL11A-1326 | − | CUCUAAGCGCAUCAAGC | 17 | 1811 |
| BCL11A-1327 | − | CUAAGCGCAUCAAGCUC | 17 | 1812 |
| BCL11A-1328 | − | AGCGCAUCAAGCUCGAG | 17 | 1813 |
| BCL11A-1329 | − | GCGCAUCAAGCUCGAGA | 17 | 1814 |
| BCL11A-1330 | − | CGGCCGCGAUGCCCAAC | 17 | 1815 |
| BCL11A-1331 | − | GGCCGCGAUGCCCAACA | 17 | 1816 |
| BCL11A-1332 | − | CCGCGAUGCCCAACACG | 17 | 1817 |
| BCL11A-1333 | − | AGAUCCCUUCCUUAGCU | 17 | 1818 |
| BCL11A-1334 | − | GAUCCCUUCCUUAGCUU | 17 | 1819 |
| BCL11A-1335 | − | CGCCUUUUGCCUCCUCG | 17 | 1820 |
| BCL11A-1336 | − | GCCUUUUGCCUCCUCGU | 17 | 1821 |
| BCL11A-1337 | − | CCUCGUCGGAGCACUCC | 17 | 1822 |
| BCL11A-1338 | − | CUCGUCGGAGCACUCCU | 17 | 1823 |
| BCL11A-1339 | − | CGUCGGAGCACUCCUCG | 17 | 1824 |
| BCL11A-1340 | − | GGAGCACUCCUCGGAGA | 17 | 1825 |
| BCL11A-1341 | − | GAGCACUCCUCGGAGAA | 17 | 1826 |
| BCL11A-1342 | − | AGCACUCCUCGGAGAAC | 17 | 1827 |
| BCL11A-1343 | − | GCGCUUCUCCACACCGC | 17 | 1828 |
| BCL11A-1344 | − | CGCUUCUCCACACCGCC | 17 | 1829 |
| BCL11A-1345 | − | GCUUCUCCACACCGCCC | 17 | 1830 |
| BCL11A-1346 | − | CUUCUCCACACCGCCCG | 17 | 1831 |
| BCL11A-1347 | − | CCACACCGCCCGGGGAG | 17 | 1832 |
| BCL11A-1348 | − | ACCGCCCGGGGAGCUGG | 17 | 1833 |
| BCL11A-1349 | − | CCGCCCGGGGAGCUGGA | 17 | 1834 |
| BCL11A-1350 | − | GCCCGGGGAGCUGGACG | 17 | 1835 |
| BCL11A-1351 | − | CCCGGGGAGCUGGACGG | 17 | 1836 |
| BCL11A-1352 | − | AGCUGGACGGAGGGAUC | 17 | 1837 |
| BCL11A-1353 | − | GCUGGACGGAGGGAUCU | 17 | 1838 |
| BCL11A-1354 | − | UCUCGGGGCGCAGCGGC | 17 | 1839 |
| BCL11A-1355 | − | CUCGGGGCGCAGCGGCA | 17 | 1840 |
| BCL11A-1356 | − | UCGGGGCGCAGCGGCAC | 17 | 1841 |
| BCL11A-1357 | − | GCGCAGCGGCACGGGAA | 17 | 1842 |
| BCL11A-1358 | − | CGCAGCGGCACGGGAAG | 17 | 1843 |
| BCL11A-1359 | − | CAGCGGCACGGGAAGUG | 17 | 1844 |
| BCL11A-1360 | − | AGCGGCACGGGAAGUGG | 17 | 1845 |
| BCL11A-1361 | − | GCGGCACGGGAAGUGGA | 17 | 1846 |
| BCL11A-1362 | − | CGCCCCAUAUUAGUGGU | 17 | 1847 |
| BCL11A-1363 | − | AUAUUAGUGGUCCGGGC | 17 | 1848 |
| BCL11A-1364 | − | GGGCAGGCCCAGCUCAA | 17 | 1849 |
| BCL11A-1365 | − | GCAGGCCCAGCUCAAAA | 17 | 1850 |
| BCL11A-1366 | + | AAGUUGUACAUGUGUAGCUG | 20 | 1851 |
| BCL11A-1367 | + | GCAAGAGAAACCAUGCACUG | 20 | 1852 |
| BCL11A-1368 | + | GUGUUCUGUGCGUGUUGCAA | 20 | 1853 |
| BCL11A-1369 | + | GAGUGUUCUGUGCGUGUUGC | 20 | 1854 |
| BCL11A-1370 | + | UCUAAGUAGAUUCUUAAUCC | 20 | 1855 |
| BCL11A-1371 | + | GAUACCAACCCGCGGGGUCA | 20 | 1856 |
| BCL11A-1372 | + | GGAUACCAACCCGCGGGGUC | 20 | 1857 |
| BCL11A-1373 | + | GGGAUACCAACCCGCGGGGU | 20 | 1858 |
| BCL11A-1374 | + | CCUGAAGGGAUACCAACCCG | 20 | 1859 |
| BCL11A-1375 | + | UCCUGAAGGGAUACCAACCC | 20 | 1860 |
| BCL11A-1376 | + | CAUUCUGCACCUAGUCCUGA | 20 | 1861 |
| BCL11A-1377 | + | ACAUUCUGCACCUAGUCCUG | 20 | 1862 |
| BCL11A-1378 | + | AGGACAUUCUGCACCUAGUC | 20 | 1863 |
| BCL11A-1379 | + | CCCAUGGAGAGGUGGCUGGG | 20 | 1864 |
| BCL11A-1380 | + | AAUCCCAUGGAGAGGUGGCU | 20 | 1865 |
| BCL11A-1381 | + | GAAUCCCAUGGAGAGGUGGC | 20 | 1866 |
| BCL11A-1382 | + | UGAAUCCCAUGGAGAGGUGG | 20 | 1867 |
| BCL11A-1383 | + | UCUGCAAUAUGAAUCCCAUG | 20 | 1868 |
| BCL11A-1384 | + | UGUCUGCAAUAUGAAUCCCA | 20 | 1869 |
| BCL11A-1385 | + | UUGUCUGCAAUAUGAAUCCC | 20 | 1870 |
| BCL11A-1386 | + | AAGGGGUUAUUGUCUGCAAU | 20 | 1871 |
| BCL11A-1387 | + | UGGUAUUCUUAGCAGGUUAA | 20 | 1872 |
| BCL11A-1388 | + | CUGGUAUUCUUAGCAGGUUA | 20 | 1873 |
| BCL11A-1389 | + | AAAGCGCCCUUCUGCCAGGC | 20 | 1874 |
| BCL11A-1390 | + | GAAAGCGCCCUUCUGCCAGG | 20 | 1875 |
| BCL11A-1391 | + | CUAAACAGGGGGGGAGUGGG | 20 | 1876 |
| BCL11A-1392 | + | ACUAAACAGGGGGGGAGUGG | 20 | 1877 |
| BCL11A-1393 | + | GUGGACUAAACAGGGGGGGA | 20 | 1878 |
| BCL11A-1394 | + | GGUGGUGGACUAAACAGGGG | 20 | 1879 |
| BCL11A-1395 | + | CGGUGGUGGACUAAACAGGG | 20 | 1880 |
| BCL11A-1396 | + | UCGGUGGUGGACUAAACAGG | 20 | 1881 |
| BCL11A-1397 | + | CUCGGUGGUGGACUAAACAG | 20 | 1882 |
| BCL11A-1398 | + | UCUCGGUGGUGGACUAAACA | 20 | 1883 |
| BCL11A-1399 | + | GUCUCGGUGGUGGACUAAAC | 20 | 1884 |
| BCL11A-1400 | + | UGUCUCGGUGGUGGACUAAA | 20 | 1885 |
| BCL11A-1401 | + | GUCCAAGUGAUGUCUCGGUG | 20 | 1886 |
| BCL11A-1402 | + | CCCCAGGCGCUCUAUGCGGU | 20 | 1887 |
| BCL11A-1403 | + | CCCCCAGGCGCUCUAUGCGG | 20 | 1888 |
| BCL11A-1404 | + | GCCCCCAGGCGCUCUAUGCG | 20 | 1889 |
| BCL11A-1405 | + | GCACUCGGGUGAUGGGUGGC | 20 | 1890 |
| BCL11A-1406 | + | CUGUCAAAGGCACUCGGGUG | 20 | 1891 |
| BCL11A-1407 | + | CAGCACCCUGUCAAAGGCAC | 20 | 1892 |
| BCL11A-1408 | + | GGCGGGAGGCUCCAUAGCCA | 20 | 1893 |
| BCL11A-1409 | + | CUCCUAGAGAAAUCCAUGGC | 20 | 1894 |
| BCL11A-1410 | + | UCUCCUAGAGAAAUCCAUGG | 20 | 1895 |
| BCL11A-1411 | + | GUCUCCUAGAGAAAUCCAUG | 20 | 1896 |
| BCL11A-1412 | + | CCAGCUCUCUAAGUCUCCUA | 20 | 1897 |
| BCL11A-1413 | + | UGCCAGCUCUCUAAGUCUCC | 20 | 1898 |
| BCL11A-1414 | + | GGGCCGGCCUGGGGACAGCG | 20 | 1899 |
| BCL11A-1415 | + | GCAUAGGGCUGGGCCGGCCU | 20 | 1900 |
| BCL11A-1416 | + | UGCAUAGGGCUGGGCCGGCC | 20 | 1901 |
| BCL11A-1417 | + | UUGCAUAGGGCUGGGCCGGC | 20 | 1902 |
| BCL11A-1418 | + | GCAGUAACCUUUGCAUAGGG | 20 | 1903 |
| BCL11A-1419 | + | UGGUUGCAGUAACCUUUGCA | 20 | 1904 |
| BCL11A-1420 | + | AGGGCGGCUUGCUACCUGGC | 20 | 1905 |
| BCL11A-1421 | + | AAGGGCGGCUUGCUACCUGG | 20 | 1906 |
| BCL11A-1422 | + | GGAGGGGGGGCGUCGCCAGG | 20 | 1907 |
| BCL11A-1423 | + | GAGGGAGGGGGGGCGUCGCC | 20 | 1908 |
| BCL11A-1424 | + | GGAGGGAGGGGGGGCGUCGC | 20 | 1909 |
| BCL11A-1425 | + | CGGAUUGCAGAGGAGGGAGG | 20 | 1910 |
| BCL11A-1426 | + | GCGGAUUGCAGAGGAGGGAG | 20 | 1911 |
| BCL11A-1427 | + | GGCGGAUUGCAGAGGAGGGA | 20 | 1912 |
| BCL11A-1428 | + | GGGCGGAUUGCAGAGGAGGG | 20 | 1913 |
| BCL11A-1429 | + | GGGGCGGAUUGCAGAGGAGG | 20 | 1914 |
| BCL11A-1430 | + | GAGGGGCGGAUUGCAGAGGA | 20 | 1915 |
| BCL11A-1431 | + | GGAGGGGCGGAUUGCAGAGG | 20 | 1916 |
| BCL11A-1432 | + | AGGAGGGGCGGAUUGCAGAG | 20 | 1917 |
| BCL11A-1433 | + | GGAGGAGGGGCGGAUUGCAG | 20 | 1918 |
| BCL11A-1434 | + | GGGAGGAGGGGCGGAUUGCA | 20 | 1919 |
| BCL11A-1435 | + | GAGGGAGGAGGGGCGGAUUG | 20 | 1920 |
| BCL11A-1436 | + | GGGGCUGGGAGGGAGGAGGG | 20 | 1921 |
| BCL11A-1437 | + | ACCGGGGGCUGGGAGGGAGG | 20 | 1922 |
| BCL11A-1438 | + | GACCGGGGGCUGGGAGGGAG | 20 | 1923 |
| BCL11A-1439 | + | UUGACCGGGGGCUGGGAGGG | 20 | 1924 |
| BCL11A-1440 | + | CUUGACCGGGGGCUGGGAGG | 20 | 1925 |
| BCL11A-1441 | + | GACUUGACCGGGGGCUGGGA | 20 | 1926 |
| BCL11A-1442 | + | GGACUUGACCGGGGGCUGGG | 20 | 1927 |
| BCL11A-1443 | + | UGGACUUGACCGGGGGCUGG | 20 | 1928 |
| BCL11A-1444 | + | CUUGGACUUGACCGGGGGCU | 20 | 1929 |
| BCL11A-1445 | + | ACUUGGACUUGACCGGGGGC | 20 | 1930 |
| BCL11A-1446 | + | GACUUGGACUUGACCGGGGG | 20 | 1931 |
| BCL11A-1447 | + | CGCAUGACUUGGACUUGACC | 20 | 1932 |
| BCL11A-1448 | + | UCGCAUGACUUGGACUUGAC | 20 | 1933 |
| BCL11A-1449 | + | CUCGCAUGACUUGGACUUGA | 20 | 1934 |
| BCL11A-1450 | + | UGCCGCAGAACUCGCAUGAC | 20 | 1935 |
| BCL11A-1451 | + | GAAAUUUGAACGUCUUGCCG | 20 | 1936 |
| BCL11A-1452 | + | CCACCAGGUUGCUCUGAAAU | 20 | 1937 |
| BCL11A-1453 | + | CGGUGCACCACCAGGUUGCU | 20 | 1938 |
| BCL11A-1454 | + | GGUCGCACAGGUUGCACUUG | 20 | 1939 |
| BCL11A-1455 | + | UGGCGCUUCAGCUUGCUGGC | 20 | 1940 |
| BCL11A-1456 | + | CGUCGGACUUGACCGUCAUG | 20 | 1941 |
| BCL11A-1457 | + | UCGUCGGACUUGACCGUCAU | 20 | 1942 |
| BCL11A-1458 | + | GUCGUCGGACUUGACCGUCA | 20 | 1943 |
| BCL11A-1459 | + | CGUCGUCGGACUUGACCGUC | 20 | 1944 |
| BCL11A-1460 | + | UGGCGGUGGAGAGACCGUCG | 20 | 1945 |
| BCL11A-1461 | + | GUUCCGGGGAGCUGGCGGUG | 20 | 1946 |
| BCL11A-1462 | + | GGGUUCCGGGGAGCUGGCGG | 20 | 1947 |
| BCL11A-1463 | + | CGGGUUCCGGGGAGCUGGCG | 20 | 1948 |
| BCL11A-1464 | + | GUCGCUGGUGCCGGGUUCCG | 20 | 1949 |
| BCL11A-1465 | + | AGUCGCUGGUGCCGGGUUCC | 20 | 1950 |
| BCL11A-1466 | + | AAGUCGCUGGUGCCGGGUUC | 20 | 1951 |
| BCL11A-1467 | + | CAAGUCGCUGGUGCCGGGUU | 20 | 1952 |
| BCL11A-1468 | + | UGCCCACCAAGUCGCUGGUG | 20 | 1953 |
| BCL11A-1469 | + | UGAACUUGGCCACCACGGAC | 20 | 1954 |
| BCL11A-1470 | + | CGCUCUUGAACUUGGCCACC | 20 | 1955 |
| BCL11A-1471 | + | GGUUGGGGUCGUUCUCGCUC | 20 | 1956 |
| BCL11A-1472 | + | CCCGUUCUCCGGGAUCAGGU | 20 | 1957 |
| BCL11A-1473 | + | CCCCGUUCUCCGGGAUCAGG | 20 | 1958 |
| BCL11A-1474 | + | UCCUCCUCGUCCCCGUUCUC | 20 | 1959 |
| BCL11A-1475 | + | UUCCUCCUCGUCCCCGUUCU | 20 | 1960 |
| BCL11A-1476 | + | GCGCCGCCUCCAGGCUCAGC | 20 | 1961 |
| BCL11A-1477 | + | CACGCCCACGACCGCGCCCC | 20 | 1962 |
| BCL11A-1478 | + | AUGCCCUGCAUGACGUCGGG | 20 | 1963 |
| BCL11A-1479 | + | GCACCAUGCCCUGCAUGACG | 20 | 1964 |
| BCL11A-1480 | + | CGCUGAAGUGCUGCAUGGAG | 20 | 1965 |
| BCL11A-1481 | + | GGCCUCGCUGAAGUGCUGCA | 20 | 1966 |
| BCL11A-1482 | + | AGGCCUCGCUGAAGUGCUGC | 20 | 1967 |
| BCL11A-1483 | + | GGACCUGGUGGAAGGCCUCG | 20 | 1968 |
| BCL11A-1484 | + | GCUUCUCGCCCAGGACCUGG | 20 | 1969 |
| BCL11A-1485 | + | UGCUUCUCGCCCAGGACCUG | 20 | 1970 |
| BCL11A-1486 | + | CCGCGCUUAUGCUUCUCGCC | 20 | 1971 |
| BCL11A-1487 | + | GCGGUCCGACUCGCCGGCCA | 20 | 1972 |
| BCL11A-1488 | + | CCCCGAGGCCGACUCGCCCG | 20 | 1973 |
| BCL11A-1489 | + | CCCCCGAGGCCGACUCGCCC | 20 | 1974 |
| BCL11A-1490 | + | CCCCCCGAGGCCGACUCGCC | 20 | 1975 |
| BCL11A-1491 | + | GCCCCCCGAGGCCGACUCGC | 20 | 1976 |
| BCL11A-1492 | + | CAGCUUUUUGGACAGGCCCC | 20 | 1977 |
| BCL11A-1493 | + | GGCUGCCCAGCAGCAGCUUU | 20 | 1978 |
| BCL11A-1494 | + | AGAGAAGGGGCUCAGCGAGC | 20 | 1979 |
| BCL11A-1495 | + | UAGAGAAGGGGCUCAGCGAG | 20 | 1980 |
| BCL11A-1496 | + | GCGCUUAGAGAAGGGGCUCA | 20 | 1981 |
| BCL11A-1497 | + | GAGCUUGAUGCGCUUAGAGA | 20 | 1982 |
| BCL11A-1498 | + | CGAGCUUGAUGCGCUUAGAG | 20 | 1983 |
| BCL11A-1499 | + | UCUCGAGCUUGAUGCGCUUA | 20 | 1984 |
| BCL11A-1500 | + | CUUCUCGAGCUUGAUGCGCU | 20 | 1985 |
| BCL11A-1501 | + | GGGGCAGGUCGAACUCCUUC | 20 | 1986 |
| BCL11A-1502 | + | GCAUCGCGGCCGGGGGCAGG | 20 | 1987 |
| BCL11A-1503 | + | CCGUGUUGGGCAUCGCGGCC | 20 | 1988 |
| BCL11A-1504 | + | UCCGUGUUGGGCAUCGCGGC | 20 | 1989 |
| BCL11A-1505 | + | CUCCGUGUUGGGCAUCGCGG | 20 | 1990 |
| BCL11A-1506 | + | GCGAGUACACGUUCUCCGUG | 20 | 1991 |
| BCL11A-1507 | + | CGCGUAGCCGGCGAGCCACU | 20 | 1992 |
| BCL11A-1508 | + | GCCUGGAGGCCGCGUAGCCG | 20 | 1993 |
| BCL11A-1509 | + | GAAGGGAUCUUUGAGCUGCC | 20 | 1994 |
| BCL11A-1510 | + | GGAAGGGAUCUUUGAGCUGC | 20 | 1995 |
| BCL11A-1511 | + | CGAAGCUAAGGAAGGGAUCU | 20 | 1996 |
| BCL11A-1512 | + | GGAGUCUCCGAAGCUAAGGA | 20 | 1997 |
| BCL11A-1513 | + | UGGAGUCUCCGAAGCUAAGG | 20 | 1998 |
| BCL11A-1514 | + | GUCUGGAGUCUCCGAAGCUA | 20 | 1999 |
| BCL11A-1515 | + | UGUCUGGAGUCUCCGAAGCU | 20 | 2000 |
| BCL11A-1516 | + | AAGGCGAUUGUCUGGAGUCU | 20 | 2001 |
| BCL11A-1517 | + | GGAGGCAAAAGGCGAUUGUC | 20 | 2002 |
| BCL11A-1518 | + | AGGAGGCAAAAGGCGAUUGU | 20 | 2003 |
| BCL11A-1519 | + | CUCCGAGGAGUGCUCCGACG | 20 | 2004 |
| BCL11A-1520 | + | UCUCCGAGGAGUGCUCCGAC | 20 | 2005 |
| BCL11A-1521 | + | GUUCUCCGAGGAGUGCUCCG | 20 | 2006 |
| BCL11A-1522 | + | GCGCAAACUCCCGUUCUCCG | 20 | 2007 |
| BCL11A-1523 | + | AGCGCAAACUCCCGUUCUCC | 20 | 2008 |
| BCL11A-1524 | + | GAAGCGCAAACUCCCGUUCU | 20 | 2009 |
| BCL11A-1525 | + | CCAGCUCCCCGGGCGGUGUG | 20 | 2010 |
| BCL11A-1526 | + | GUCCAGCUCCCCGGGCGGUG | 20 | 2011 |
| BCL11A-1527 | + | CGUCCAGCUCCCCGGGCGGU | 20 | 2012 |
| BCL11A-1528 | + | AGAUCCCUCCGUCCAGCUCC | 20 | 2013 |
| BCL11A-1529 | + | ACUUCCCGUGCCGCUGCGCC | 20 | 2014 |
| BCL11A-1530 | + | CCGGGCCCGGACCACUAAUA | 20 | 2015 |
| BCL11A-1531 | + | CCCGGGCCCGGACCACUAAU | 20 | 2016 |
| BCL11A-1532 | + | UGAGCUGGGCCUGCCCGGGC | 20 | 2017 |
| BCL11A-1533 | + | CUCUUUUGAGCUGGGCCUGC | 20 | 2018 |
| BCL11A-1534 | + | UGCGUCUGCCCUCUUUUGAG | 20 | 2019 |
| BCL11A-1535 | + | GUCGCUGCGUCUGCCCUCUU | 20 | 2020 |
| BCL11A-1536 | + | UUGUACAUGUGUAGCUG | 17 | 2021 |
| BCL11A-1537 | + | AGAGAAACCAUGCACUG | 17 | 2022 |
| BCL11A-1538 | + | UUCUGUGCGUGUUGCAA | 17 | 2023 |
| BCL11A-1539 | + | UGUUCUGUGCGUGUUGC | 17 | 2024 |
| BCL11A-1540 | + | AAGUAGAUUCUUAAUCC | 17 | 2025 |
| BCL11A-1541 | + | ACCAACCCGCGGGGUCA | 17 | 2026 |
| BCL11A-1542 | + | UACCAACCCGCGGGGUC | 17 | 2027 |
| BCL11A-1543 | + | AUACCAACCCGCGGGGU | 17 | 2028 |
| BCL11A-1544 | + | GAAGGGAUACCAACCCG | 17 | 2029 |
| BCL11A-1545 | + | UGAAGGGAUACCAACCC | 17 | 2030 |
| BCL11A-1546 | + | UCUGCACCUAGUCCUGA | 17 | 2031 |
| BCL11A-1547 | + | UUCUGCACCUAGUCCUG | 17 | 2032 |
| BCL11A-1548 | + | ACAUUCUGCACCUAGUC | 17 | 2033 |
| BCL11A-1549 | + | AUGGAGAGGUGGCUGGG | 17 | 2034 |
| BCL11A-1550 | + | CCCAUGGAGAGGUGGCU | 17 | 2035 |
| BCL11A-1551 | + | UCCCAUGGAGAGGUGGC | 17 | 2036 |
| BCL11A-1552 | + | AUCCCAUGGAGAGGUGG | 17 | 2037 |
| BCL11A-1553 | + | GCAAUAUGAAUCCCAUG | 17 | 2038 |
| BCL11A-1554 | + | CUGCAAUAUGAAUCCCA | 17 | 2039 |
| BCL11A-1555 | + | UCUGCAAUAUGAAUCCC | 17 | 2040 |
| BCL11A-1556 | + | GGGUUAUUGUCUGCAAU | 17 | 2041 |
| BCL11A-1557 | + | UAUUCUUAGCAGGUUAA | 17 | 2042 |
| BCL11A-1558 | + | GUAUUCUUAGCAGGUUA | 17 | 2043 |
| BCL11A-1559 | + | GCGCCCUUCUGCCAGGC | 17 | 2044 |
| BCL11A-1560 | + | AGCGCCCUUCUGCCAGG | 17 | 2045 |
| BCL11A-1561 | + | AACAGGGGGGGAGUGGG | 17 | 2046 |
| BCL11A-1562 | + | AAACAGGGGGGGAGUGG | 17 | 2047 |
| BCL11A-1563 | + | GACUAAACAGGGGGGGA | 17 | 2048 |
| BCL11A-1564 | + | GGUGGACUAAACAGGGG | 17 | 2049 |
| BCL11A-1565 | + | UGGUGGACUAAACAGGG | 17 | 2050 |
| BCL11A-1566 | + | GUGGUGGACUAAACAGG | 17 | 2051 |
| BCL11A-1567 | + | GGUGGUGGACUAAACAG | 17 | 2052 |
| BCL11A-1568 | + | CGGUGGUGGACUAAACA | 17 | 2053 |
| BCL11A-1569 | + | UCGGUGGUGGACUAAAC | 17 | 2054 |
| BCL11A-1570 | + | CUCGGUGGUGGACUAAA | 17 | 2055 |
| BCL11A-1571 | + | CAAGUGAUGUCUCGGUG | 17 | 2056 |
| BCL11A-1572 | + | CAGGCGCUCUAUGCGGU | 17 | 2057 |
| BCL11A-1573 | + | CCAGGCGCUCUAUGCGG | 17 | 2058 |
| BCL11A-1574 | + | CCCAGGCGCUCUAUGCG | 17 | 2059 |
| BCL11A-1575 | + | CUCGGGUGAUGGGUGGC | 17 | 2060 |
| BCL11A-1576 | + | UCAAAGGCACUCGGGUG | 17 | 2061 |
| BCL11A-1577 | + | CACCCUGUCAAAGGCAC | 17 | 2062 |
| BCL11A-1578 | + | GGGAGGCUCCAUAGCCA | 17 | 2063 |
| BCL11A-1579 | + | CUAGAGAAAUCCAUGGC | 17 | 2064 |
| BCL11A-1580 | + | CCUAGAGAAAUCCAUGG | 17 | 2065 |
| BCL11A-1581 | + | UCCUAGAGAAAUCCAUG | 17 | 2066 |
| BCL11A-1582 | + | GCUCUCUAAGUCUCCUA | 17 | 2067 |
| BCL11A-1583 | + | CAGCUCUCUAAGUCUCC | 17 | 2068 |
| BCL11A-1584 | + | CCGGCCUGGGGACAGCG | 17 | 2069 |
| BCL11A-1585 | + | UAGGGCUGGGCCGGCCU | 17 | 2070 |
| BCL11A-1586 | + | AUAGGGCUGGGCCGGCC | 17 | 2071 |
| BCL11A-1587 | + | CAUAGGGCUGGGCCGGC | 17 | 2072 |
| BCL11A-1588 | + | GUAACCUUUGCAUAGGG | 17 | 2073 |
| BCL11A-1589 | + | UUGCAGUAACCUUUGCA | 17 | 2074 |
| BCL11A-1590 | + | GCGGCUUGCUACCUGGC | 17 | 2075 |
| BCL11A-1591 | + | GGCGGCUUGCUACCUGG | 17 | 2076 |
| BCL11A-1592 | + | GGGGGGGCGUCGCCAGG | 17 | 2077 |
| BCL11A-1593 | + | GGAGGGGGGGCGUCGCC | 17 | 2078 |
| BCL11A-1594 | + | GGGAGGGGGGGCGUCGC | 17 | 2079 |
| BCL11A-1595 | + | AUUGCAGAGGAGGGAGG | 17 | 2080 |
| BCL11A-1596 | + | GAUUGCAGAGGAGGGAG | 17 | 2081 |
| BCL11A-1597 | + | GGAUUGCAGAGGAGGGA | 17 | 2082 |
| BCL11A-1598 | + | CGGAUUGCAGAGGAGGG | 17 | 2083 |
| BCL11A-1599 | + | GCGGAUUGCAGAGGAGG | 17 | 2084 |
| BCL11A-1600 | + | GGGCGGAUUGCAGAGGA | 17 | 2085 |
| BCL11A-1601 | + | GGGGCGGAUUGCAGAGG | 17 | 2086 |
| BCL11A-1602 | + | AGGGGCGGAUUGCAGAG | 17 | 2087 |
| BCL11A-1603 | + | GGAGGGGCGGAUUGCAG | 17 | 2088 |
| BCL11A-1604 | + | AGGAGGGGCGGAUUGCA | 17 | 2089 |
| BCL11A-1605 | + | GGAGGAGGGGCGGAUUG | 17 | 2090 |
| BCL11A-1606 | + | GCUGGGAGGGAGGAGGG | 17 | 2091 |
| BCL11A-1607 | + | GGGGGCUGGGAGGGAGG | 17 | 2092 |
| BCL11A-1608 | + | CGGGGGCUGGGAGGGAG | 17 | 2093 |
| BCL11A-1609 | + | ACCGGGGGCUGGGAGGG | 17 | 2094 |
| BCL11A-1610 | + | GACCGGGGGCUGGGAGG | 17 | 2095 |
| BCL11A-1611 | + | UUGACCGGGGGCUGGGA | 17 | 2096 |
| BCL11A-1612 | + | CUUGACCGGGGGCUGGG | 17 | 2097 |
| BCL11A-1613 | + | ACUUGACCGGGGGCUGG | 17 | 2098 |
| BCL11A-1614 | + | GGACUUGACCGGGGGCU | 17 | 2099 |
| BCL11A-1615 | + | UGGACUUGACCGGGGGC | 17 | 2100 |
| BCL11A-1616 | + | UUGGACUUGACCGGGGG | 17 | 2101 |
| BCL11A-1617 | + | AUGACUUGGACUUGACC | 17 | 2102 |
| BCL11A-1618 | + | CAUGACUUGGACUUGAC | 17 | 2103 |
| BCL11A-1619 | + | GCAUGACUUGGACUUGA | 17 | 2104 |
| BCL11A-1620 | + | CGCAGAACUCGCAUGAC | 17 | 2105 |
| BCL11A-1621 | + | AUUUGAACGUCUUGCCG | 17 | 2106 |
| BCL11A-1622 | + | CCAGGUUGCUCUGAAAU | 17 | 2107 |
| BCL11A-1623 | + | UGCACCACCAGGUUGCU | 17 | 2108 |
| BCL11A-1624 | + | CGCACAGGUUGCACUUG | 17 | 2109 |
| BCL11A-1625 | + | CGCUUCAGCUUGCUGGC | 17 | 2110 |
| BCL11A-1626 | + | CGGACUUGACCGUCAUG | 17 | 2111 |
| BCL11A-1627 | + | UCGGACUUGACCGUCAU | 17 | 2112 |
| BCL11A-1628 | + | GUCGGACUUGACCGUCA | 17 | 2113 |
| BCL11A-1629 | + | CGUCGGACUUGACCGUC | 17 | 2114 |
| BCL11A-1630 | + | CGGUGGAGAGACCGUCG | 17 | 2115 |
| BCL11A-1631 | + | CCGGGGAGCUGGCGGUG | 17 | 2116 |
| BCL11A-1632 | + | UUCCGGGGAGCUGGCGG | 17 | 2117 |
| BCL11A-1633 | + | GUUCCGGGGAGCUGGCG | 17 | 2118 |
| BCL11A-1634 | + | GCUGGUGCCGGGUUCCG | 17 | 2119 |
| BCL11A-1635 | + | CGCUGGUGCCGGGUUCC | 17 | 2120 |
| BCL11A-1636 | + | UCGCUGGUGCCGGGUUC | 17 | 2121 |
| BCL11A-1637 | + | GUCGCUGGUGCCGGGUU | 17 | 2122 |
| BCL11A-1638 | + | CCACCAAGUCGCUGGUG | 17 | 2123 |
| BCL11A-1639 | + | ACUUGGCCACCACGGAC | 17 | 2124 |
| BCL11A-1640 | + | UCUUGAACUUGGCCACC | 17 | 2125 |
| BCL11A-1641 | + | UGGGGUCGUUCUCGCUC | 17 | 2126 |
| BCL11A-1642 | + | GUUCUCCGGGAUCAGGU | 17 | 2127 |
| BCL11A-1643 | + | CGUUCUCCGGGAUCAGG | 17 | 2128 |
| BCL11A-1644 | + | UCCUCGUCCCCGUUCUC | 17 | 2129 |
| BCL11A-1645 | + | CUCCUCGUCCCCGUUCU | 17 | 2130 |
| BCL11A-1646 | + | CCGCCUCCAGGCUCAGC | 17 | 2131 |
| BCL11A-1647 | + | GCCCACGACCGCGCCCC | 17 | 2132 |
| BCL11A-1648 | + | CCCUGCAUGACGUCGGG | 17 | 2133 |
| BCL11A-1649 | + | CCAUGCCCUGCAUGACG | 17 | 2134 |
| BCL11A-1650 | + | UGAAGUGCUGCAUGGAG | 17 | 2135 |
| BCL11A-1651 | + | CUCGCUGAAGUGCUGCA | 17 | 2136 |
| BCL11A-1652 | + | CCUCGCUGAAGUGCUGC | 17 | 2137 |
| BCL11A-1653 | + | CCUGGUGGAAGGCCUCG | 17 | 2138 |
| BCL11A-1654 | + | UCUCGCCCAGGACCUGG | 17 | 2139 |
| BCL11A-1655 | + | UUCUCGCCCAGGACCUG | 17 | 2140 |
| BCL11A-1656 | + | CGCUUAUGCUUCUCGCC | 17 | 2141 |
| BCL11A-1657 | + | GUCCGACUCGCCGGCCA | 17 | 2142 |
| BCL11A-1658 | + | CGAGGCCGACUCGCCCG | 17 | 2143 |
| BCL11A-1659 | + | CCGAGGCCGACUCGCCC | 17 | 2144 |
| BCL11A-1660 | + | CCCGAGGCCGACUCGCC | 17 | 2145 |
| BCL11A-1661 | + | CCCCGAGGCCGACUCGC | 17 | 2146 |
| BCL11A-1662 | + | CUUUUUGGACAGGCCCC | 17 | 2147 |
| BCL11A-1663 | + | UGCCCAGCAGCAGCUUU | 17 | 2148 |
| BCL11A-1664 | + | GAAGGGGCUCAGCGAGC | 17 | 2149 |
| BCL11A-1665 | + | AGAAGGGGCUCAGCGAG | 17 | 2150 |
| BCL11A-1666 | + | CUUAGAGAAGGGGCUCA | 17 | 2151 |
| BCL11A-1667 | + | CUUGAUGCGCUUAGAGA | 17 | 2152 |
| BCL11A-1668 | + | GCUUGAUGCGCUUAGAG | 17 | 2153 |
| BCL11A-1669 | + | CGAGCUUGAUGCGCUUA | 17 | 2154 |
| BCL11A-1670 | + | CUCGAGCUUGAUGCGCU | 17 | 2155 |
| BCL11A-1671 | + | GCAGGUCGAACUCCUUC | 17 | 2156 |
| BCL11A-1672 | + | UCGCGGCCGGGGGCAGG | 17 | 2157 |
| BCL11A-1673 | + | UGUUGGGCAUCGCGGCC | 17 | 2158 |
| BCL11A-1674 | + | GUGUUGGGCAUCGCGGC | 17 | 2159 |
| BCL11A-1675 | + | CGUGUUGGGCAUCGCGG | 17 | 2160 |
| BCL11A-1676 | + | AGUACACGUUCUCCGUG | 17 | 2161 |
| BCL11A-1677 | + | GUAGCCGGCGAGCCACU | 17 | 2162 |
| BCL11A-1678 | + | UGGAGGCCGCGUAGCCG | 17 | 2163 |
| BCL11A-1679 | + | GGGAUCUUUGAGCUGCC | 17 | 2164 |
| BCL11A-1680 | + | AGGGAUCUUUGAGCUGC | 17 | 2165 |
| BCL11A-1681 | + | AGCUAAGGAAGGGAUCU | 17 | 2166 |
| BCL11A-1682 | + | GUCUCCGAAGCUAAGGA | 17 | 2167 |
| BCL11A-1683 | + | AGUCUCCGAAGCUAAGG | 17 | 2168 |
| BCL11A-1684 | + | UGGAGUCUCCGAAGCUA | 17 | 2169 |
| BCL11A-1685 | + | CUGGAGUCUCCGAAGCU | 17 | 2170 |
| BCL11A-1686 | + | GCGAUUGUCUGGAGUCU | 17 | 2171 |
| BCL11A-1687 | + | GGCAAAAGGCGAUUGUC | 17 | 2172 |
| BCL11A-1688 | + | AGGCAAAAGGCGAUUGU | 17 | 2173 |
| BCL11A-1689 | + | CGAGGAGUGCUCCGACG | 17 | 2174 |
| BCL11A-1690 | + | CCGAGGAGUGCUCCGAC | 17 | 2175 |
| BCL11A-1691 | + | CUCCGAGGAGUGCUCCG | 17 | 2176 |
| BCL11A-1692 | + | CAAACUCCCGUUCUCCG | 17 | 2177 |
| BCL11A-1693 | + | GCAAACUCCCGUUCUCC | 17 | 2178 |
| BCL11A-1694 | + | GCGCAAACUCCCGUUCU | 17 | 2179 |
| BCL11A-1695 | + | GCUCCCCGGGCGGUGUG | 17 | 2180 |
| BCL11A-1696 | + | CAGCUCCCCGGGCGGUG | 17 | 2181 |
| BCL11A-1697 | + | CCAGCUCCCCGGGCGGU | 17 | 2182 |
| BCL11A-1698 | + | UCCCUCCGUCCAGCUCC | 17 | 2183 |
| BCL11A-1699 | + | UCCCGUGCCGCUGCGCC | 17 | 2184 |
| BCL11A-1700 | + | GGCCCGGACCACUAAUA | 17 | 2185 |
| BCL11A-1701 | + | GGGCCCGGACCACUAAU | 17 | 2186 |
| BCL11A-1702 | + | GCUGGGCCUGCCCGGGC | 17 | 2187 |
| BCL11A-1703 | + | UUUUGAGCUGGGCCUGC | 17 | 2188 |
| BCL11A-1704 | + | GUCUGCCCUCUUUUGAG | 17 | 2189 |
| BCL11A-1705 | + | GCUGCGUCUGCCCUCUU | 17 | 2190 |
| BCL11A-1706 | − | CCCCCAUUCGGCGUAGUACC | 20 | 2191 |
| BCL11A-1707 | − | CCCAUUCGGCGUAGUACCCA | 20 | 2192 |
| BCL11A-1708 | − | CUCAAGAUGUGUGGCAGUUU | 20 | 2193 |
| BCL11A-1709 | − | AGAUGUGUGGCAGUUUUCGG | 20 | 2194 |
| BCL11A-1710 | − | GAUGUGUGGCAGUUUUCGGA | 20 | 2195 |
| BCL11A-1711 | − | GGCAGUUUUCGGAUGGAAGC | 20 | 2196 |
| BCL11A-1712 | − | CAGUUUUCGGAUGGAAGCUC | 20 | 2197 |
| BCL11A-1713 | − | CCAUUCGGCGUAGUACC | 17 | 2198 |
| BCL11A-1714 | − | AUUCGGCGUAGUACCCA | 17 | 2199 |
| BCL11A-1715 | − | AAGAUGUGUGGCAGUUU | 17 | 2200 |
| BCL11A-1716 | − | UGUGUGGCAGUUUUCGG | 17 | 2201 |
| BCL11A-1717 | − | GUGUGGCAGUUUUCGGA | 17 | 2202 |
| BCL11A-1718 | − | AGUUUUCGGAUGGAAGC | 17 | 2203 |
| BCL11A-1719 | − | UUUUCGGAUGGAAGCUC | 17 | 2204 |
| BCL11A-1720 | + | ACGCCGAAUGGGGGUGUGUG | 20 | 2205 |
| BCL11A-1721 | + | ACUACGCCGAAUGGGGGUGU | 20 | 2206 |
| BCL11A-1722 | + | CUCUGGGUACUACGCCGAAU | 20 | 2207 |
| BCL11A-1723 | + | UCUCUGGGUACUACGCCGAA | 20 | 2208 |
| BCL11A-1724 | + | CUCUCUGGGUACUACGCCGA | 20 | 2209 |
| BCL11A-1725 | + | UGAGCUCUCUGGGUACUACG | 20 | 2210 |
| BCL11A-1726 | + | UGCCACACAUCUUGAGCUCU | 20 | 2211 |
| BCL11A-1727 | + | UCCGAAAACUGCCACACAUC | 20 | 2212 |
| BCL11A-1728 | + | AAGGGCUCUCGAGCUUCCAU | 20 | 2213 |
| BCL11A-1729 | + | CCGAAUGGGGGUGUGUG | 17 | 2214 |
| BCL11A-1730 | + | ACGCCGAAUGGGGGUGU | 17 | 2215 |
| BCL11A-1731 | + | UGGGUACUACGCCGAAU | 17 | 2216 |
| BCL11A-1732 | + | CUGGGUACUACGCCGAA | 17 | 2217 |
| BCL11A-1733 | + | UCUGGGUACUACGCCGA | 17 | 2218 |
| BCL11A-1734 | + | GCUCUCUGGGUACUACG | 17 | 2219 |
| BCL11A-1735 | + | CACACAUCUUGAGCUCU | 17 | 2220 |
| BCL11A-1736 | + | GAAAACUGCCACACAUC | 17 | 2221 |
| BCL11A-1737 | + | GGCUCUCGAGCUUCCAU | 17 | 2222 |

[0991] Table 2F provides exemplary targeting domains for knocking out the BCL11A gene. In an embodiment, the targeting domain is the exact complement of the target domain. Any of the targeting domains in the table can be used with an N. meningitidis Cas9 molecule that gives double stranded cleavage. Any of the targeting domains in the table can be used with an N. meningitidis Cas9 single-stranded break nucleases (nickases). In an embodiment, dual targeting is used to create two nicks. When selecting gRNAs for use in a nickase pair, one gRNA targets a domain in the complementary strand and the second gRNA targets a domain in the non-complementary strand, e.g., a gRNA comprising any minus strand targeting domain may be paired any gRNA comprising a plus strand targeting domain targeting the same target position.

TABLE 2F

| N. meningitidis gRNA targets | | | | |
|---|---|---|---|---|
| for BCL11A knockout | | | | |
| | | | Target | |
| | DNA | | Site | |
| gRNA Name | Strand | Targeting Domain | Length | |
| BCL11A-1738 | − | AUCCAGGUCACGCCAGAGGA | 20 | 2223 |
| BCL11A-1739 | − | UGCAACACGCACAGAACACU | 20 | 2224 |
| BCL11A-1740 | − | UCCUUCCCAGCCACCUCUCC | 20 | 2225 |
| BCL11A-1741 | − | AUGGCUAUGGAGCCUCCCGC | 20 | 2226 |
| BCL11A-1742 | − | CAGGUCACGCCAGAGGA | 17 | 2227 |
| BCL11A-1743 | − | AACACGCACAGAACACU | 17 | 2228 |
| BCL11A-1744 | − | UUCCCAGCCACCUCUCC | 17 | 2229 |
| BCL11A-1745 | − | GCUAUGGAGCCUCCCGC | 17 | 2230 |
| BCL11A-1746 | + | UGAAAAAAGCAUCCAAUCCC | 20 | 2231 |
| BCL11A-1747 | + | GGAGGUUGGCAUCCAGGUCA | 20 | 2232 |
| BCL11A-1748 | + | CGCCUGGGAUGAGUGCAGAA | 20 | 2233 |
| BCL11A-1749 | + | UAGAAAGCGAACACGGAAGU | 20 | 2234 |
| BCL11A-1750 | + | GGCUAUGGAGCCUCCCGCCA | 20 | 2235 |
| BCL11A-1751 | + | CCUCCUCCCUCCCAGCCCCC | 20 | 2236 |
| BCL11A-1752 | + | CCCAUGACGGUCAAGUCCGA | 20 | 2237 |
| BCL11A-1753 | + | UUUGCCUCCUCGUCGGAGCA | 20 | 2238 |
| BCL11A-1754 | + | UGAAAAAAGCAUCCAAU | 17 | 2239 |
| BCL11A-1755 | + | GGAGGUUGGCAUCCAGG | 17 | 2240 |
| BCL11A-1756 | + | CGCCUGGGAUGAGUGCA | 17 | 2241 |
| BCL11A-1757 | + | UAGAAAGCGAACACGGA | 17 | 2242 |
| BCL11A-1758 | + | GGCUAUGGAGCCUCCCG | 17 | 2243 |
| BCL11A-1759 | + | CCUCCUCCCUCCCAGCC | 17 | 2244 |
| BCL11A-1760 | + | CCCAUGACGGUCAAGUC | 17 | 2245 |
| BCL11A-1761 | + | UUUGCCUCCUCGUCGGA | 17 | 2246 |

[0992] Table 3A provides exemplary targeting domains for repressing (i.e., knocking down or decreasing) expression of the BCL11A gene. In an embodiment, the targeting domain is the exact complement of the target domain. Any of the targeting domains in the table can be used with a S. pyogenes eiCas9 molecule to cause a steric block at the promoter region to block transcription resulting in the repression of the BCL11A gene. Alternatively, any of the targeting domains in the table can be used with a S. pyogenes eiCas9 fused to a transcriptional repressor to decrease transcription and therefore downregulate gene expression.

TABLE 3A
S. pyogenes gRNA targets for BCL11A knockdown

| | | | Target | SEQ |
|---|---|---|---|---|
| | DNA | | Site | ID |
| gRNA Name | Strand | Targeting Domain | Length | NO |
| BCL11A-1762 | − | UCUUCUCCUUGCUGCCUCUG | 20 | 2247 |
| BCL11A-1763 | − | UCCUUGCUGCCUCUGAGGUU | 20 | 2248 |
| BCL11A-1764 | − | UGCUGCCUCUGAGGUUCGGU | 20 | 2249 |
| BCL11A-1765 | − | GCUGCCUCUGAGGUUCGGUC | 20 | 2250 |
| BCL11A-1766 | − | GCCUCUGAGGUUCGGUCGGG | 20 | 2251 |
| BCL11A-1767 | − | CCUCUGAGGUUCGGUCGGGA | 20 | 2252 |
| BCL11A-1768 | − | CUCUGAGGUUCGGUCGGGAG | 20 | 2253 |
| BCL11A-1769 | − | UGAGGUUCGGUCGGGAGGGG | 20 | 2254 |
| BCL11A-1770 | − | GAGGUUCGGUCGGGAGGGGA | 20 | 2255 |
| BCL11A-1771 | − | CGGUCGGGAGGGGAGGGCAG | 20 | 2256 |
| BCL11A-1772 | − | GGGGAGGGCAGCGGCAACCC | 20 | 2257 |
| BCL11A-1773 | − | GAGGGCAGCGGCAACCCAGG | 20 | 2258 |
| BCL11A-1774 | − | CAACCCAGGAGGCAGCAGUC | 20 | 2259 |
| BCL11A-1775 | − | AACCCAGGAGGCAGCAGUCC | 20 | 2260 |
| BCL11A-1776 | − | CUCCCUCUCCCGCGUGCCCC | 20 | 2261 |
| BCL11A-1777 | − | CCCCCGGCCGCCUCCUCCCC | 20 | 2262 |
| BCL11A-1778 | − | CGGCCCUAGCUCCUGCCCUU | 20 | 2263 |
| BCL11A-1779 | − | CCCUAGCUCCUGCCCUUCGG | 20 | 2264 |
| BCL11A-1780 | − | UAGCUCCUGCCCUUCGGCGG | 20 | 2265 |
| BCL11A-1781 | − | CUCCUGCCCUUCGGCGGCGG | 20 | 2266 |
| BCL11A-1782 | − | CUGCCCUUCGGCGGCGGCGG | 20 | 2267 |
| BCL11A-1783 | − | CCCUUCGGCGGCGGCGGCGG | 20 | 2268 |
| BCL11A-1784 | − | UUCGGCGGCGGCGGCGGCGG | 20 | 2269 |
| BCL11A-1785 | − | CGGCGGCGGCGGCGGCGGCG | 20 | 2270 |
| BCL11A-1786 | − | GGCGGCGGCGGCGGCGGCGC | 20 | 2271 |
| BCL11A-1787 | − | GGCGGCGGCGGCGGCGCGGG | 20 | 2272 |
| BCL11A-1788 | − | GCGGCGGCGGCGGCGCGGGA | 20 | 2273 |
| BCL11A-1789 | − | GGCGCGGGAGGGCAAGCGCG | 20 | 2274 |
| BCL11A-1790 | − | GGAGGGCAAGCGCGAGGAGC | 20 | 2275 |
| BCL11A-1791 | − | GCGCGAGGAGCCGGCACAAA | 20 | 2276 |
| BCL11A-1792 | − | GGAGCCGGCACAAAAGGCAG | 20 | 2277 |
| BCL11A-1793 | − | GAGCCGGCACAAAAGGCAGC | 20 | 2278 |
| BCL11A-1794 | − | GCGGGACAAACACCCACCUC | 20 | 2279 |
| BCL11A-1795 | − | GACAAACACCCACCUCUGGC | 20 | 2280 |
| BCL11A-1796 | − | CCACCUCUGGCCGGAACAAA | 20 | 2281 |
| BCL11A-1797 | − | CCUCUGGCCGGAACAAAAGG | 20 | 2282 |
| BCL11A-1798 | − | GGAACAAAAGGCGGCAGUGC | 20 | 2283 |
| BCL11A-1799 | − | GCCGCGUCUCCCGUCCUUCC | 20 | 2284 |
| BCL11A-1800 | − | UCCCGUCCUUCCCGGUCCCA | 20 | 2285 |
| BCL11A-1801 | − | CACGGCUCUCCCCGUCGCCG | 20 | 2286 |
| BCL11A-1802 | − | CGGCCCCUCUCCCGACUCCG | 20 | 2287 |
| BCL11A-1803 | − | UCUCCCGACUCCGCGGACUC | 20 | 2288 |
| BCL11A-1804 | − | CUCCGCGGACUCAGGAGCGC | 20 | 2289 |
| BCL11A-1805 | − | UCCGCGGACUCAGGAGCGCC | 20 | 2290 |
| BCL11A-1806 | − | CCGCGGACUCAGGAGCGCCG | 20 | 2291 |
| BCL11A-1807 | − | CGCGGACUCAGGAGCGCCGG | 20 | 2292 |
| BCL11A-1808 | − | GUGCCACUUUCUCACUAUUG | 20 | 2293 |
| BCL11A-1809 | − | UGCCACUUUCUCACUAUUGU | 20 | 2294 |
| BCL11A-1810 | − | GCCACUUUCUCACUAUUGUG | 20 | 2295 |
| BCL11A-1811 | − | ACACUUGACCGUGAGCGCGC | 20 | 2296 |
| BCL11A-1812 | − | AGUCUCACCUCUUUUCUCCC | 20 | 2297 |
| BCL11A-1813 | − | GUCUCACCUCUUUUCUCCCC | 20 | 2298 |
| BCL11A-1814 | − | CCUACCCCCCCAUUUUCUUA | 20 | 2299 |
| BCL11A-1815 | − | CCCCAUUUUCUUACGGUGAG | 20 | 2300 |
| BCL11A-1816 | − | CCCAUUUUCUUACGGUGAGU | 20 | 2301 |
| BCL11A-1817 | − | CCCCACCAGCUCCCACCCCC | 20 | 2302 |
| BCL11A-1818 | − | UGUUCAUUAUUUUGCAAAAC | 20 | 2303 |
| BCL11A-1819 | − | UCAUUAUUUUGCAAAACUGG | 20 | 2304 |
| BCL11A-1820 | − | CAUUAUUUUGCAAAACUGGC | 20 | 2305 |
| BCL11A-1821 | − | AUUAUUUUGCAAAACUGGCG | 20 | 2306 |
| BCL11A-1822 | − | AUUUUGCAAAACUGGCGGGG | 20 | 2307 |
| BCL11A-1823 | − | UUUUGCAAAACUGGCGGGGC | 20 | 2308 |
| BCL11A-1824 | − | UUUGCAAAACUGGCGGGGCG | 20 | 2309 |
| BCL11A-1825 | − | UUGCAAAACUGGCGGGGCGG | 20 | 2310 |
| BCL11A-1826 | − | UGCAAAACUGGCGGGGCGGG | 20 | 2311 |
| BCL11A-1827 | − | GCAAAACUGGCGGGGCGGGG | 20 | 2312 |
| BCL11A-1828 | − | CAAAACUGGCGGGGCGGGGG | 20 | 2313 |
| BCL11A-1829 | − | CUGGCGGGGCGGGGGGGGAG | 20 | 2314 |
| BCL11A-1830 | − | UUUCGAAAAGAGAAAUAAAG | 20 | 2315 |
| BCL11A-1831 | − | CGAAAAGAGAAAUAAAGCGG | 20 | 2316 |
| BCL11A-1832 | − | AGAGAAAUAAAGCGGCGGAA | 20 | 2317 |
| BCL11A-1833 | − | GAAAUAAAGCGGCGGAAAGG | 20 | 2318 |
| BCL11A-1834 | − | AGCGGCGGAAAGGAGGAAAG | 20 | 2319 |
| BCL11A-1835 | − | GGCGGAAAGGAGGAAAGAGG | 20 | 2320 |
| BCL11A-1836 | − | UAAAAUUAAAUAAAAUUAAA | 20 | 2321 |
| BCL11A-1837 | − | CUGUCUCAAAAGUGCAUACA | 20 | 2322 |
| BCL11A-1838 | − | CAAAAGUGCAUACACGGCAA | 20 | 2323 |
| BCL11A-1839 | − | UACACGGCAAUGGUUCCAGA | 20 | 2324 |
| BCL11A-1840 | − | ACACGGCAAUGGUUCCAGAU | 20 | 2325 |
| BCL11A-1841 | − | CAAUGGUUCCAGAUGGGAUG | 20 | 2326 |
| BCL11A-1842 | − | AAUGGUUCCAGAUGGGAUGA | 20 | 2327 |
| BCL11A-1843 | − | AUCUCUUUUACCUCGACUCU | 20 | 2328 |
| BCL11A-1844 | − | UCUUUUACCUCGACUCUCGG | 20 | 2329 |
| BCL11A-1845 | − | AUAAUUAUUAUUACUAUUAU | 20 | 2330 |
| BCL11A-1846 | − | UAAUUAUUAUUACUAUUAUU | 20 | 2331 |
| BCL11A-1847 | + | UAAUAAUCACGAGAGCGCGC | 20 | 2332 |
| BCL11A-1848 | + | CAGGACUAGAAGCAAAAGCG | 20 | 2333 |
| BCL11A-1849 | + | AGGACUAGAAGCAAAAGCGA | 20 | 2334 |
| BCL11A-1850 | + | GGACUAGAAGCAAAAGCGAG | 20 | 2335 |
| BCL11A-1851 | + | GACUAGAAGCAAAAGCGAGG | 20 | 2336 |
| BCL11A-1852 | + | AGCAAAAGCGAGGGGGAGAG | 20 | 2337 |
| BCL11A-1853 | + | GCAAAAGCGAGGGGGAGAGA | 20 | 2338 |
| BCL11A-1854 | + | CAAAAGCGAGGGGGAGAGAG | 20 | 2339 |
| BCL11A-1855 | + | AGAAAAACCUCCGAGAGUCG | 20 | 2340 |
| BCL11A-1856 | + | AGUCGAGGUAAAAGAGAUAA | 20 | 2341 |
| BCL11A-1857 | + | GUCGAGGUAAAAGAGAUAAA | 20 | 2342 |
| BCL11A-1858 | + | UCGAGGUAAAAGAGAUAAAG | 20 | 2343 |
| BCL11A-1859 | + | CGAGGUAAAAGAGAUAAAGG | 20 | 2344 |
| BCL11A-1860 | + | GAAAAAACCCUCAUCCCAUC | 20 | 2345 |
| BCL11A-1861 | + | CUUUAUUUCUCUUUUCGAAA | 20 | 2346 |
| BCL11A-1862 | + | CAAAAUAAUGAACAAUGCUA | 20 | 2347 |
| BCL11A-1863 | + | GAACAACUCACAUGCAAACC | 20 | 2348 |
| BCL11A-1864 | + | AACAACUCACAUGCAAACCU | 20 | 2349 |
| BCL11A-1865 | + | ACAACUCACAUGCAAACCUG | 20 | 2350 |
| BCL11A-1866 | + | CAACUCACAUGCAAACCUGG | 20 | 2351 |
| BCL11A-1867 | + | CUCACAUGCAAACCUGGGGG | 20 | 2352 |
| BCL11A-1868 | + | UCACAUGCAAACCUGGGGGU | 20 | 2353 |
| BCL11A-1869 | + | GCAAACCUGGGGGUGGGAGC | 20 | 2354 |
| BCL11A-1870 | + | AACCUGGGGGUGGGAGCUGG | 20 | 2355 |
| BCL11A-1871 | + | ACCUGGGGGUGGGAGCUGGU | 20 | 2356 |
| BCL11A-1872 | + | CCUGGGGGUGGGAGCUGGUG | 20 | 2357 |
| BCL11A-1873 | + | GGGUGGGAGCUGGUGGGGAA | 20 | 2358 |
| BCL11A-1874 | + | GGUGGGAGCUGGUGGGGAAA | 20 | 2359 |
| BCL11A-1875 | + | GGGAGCUGGUGGGGAAAGGG | 20 | 2360 |
| BCL11A-1876 | + | UCCCACUCACCGUAAGAAAA | 20 | 2361 |
| BCL11A-1877 | + | CCCACUCACCGUAAGAAAAU | 20 | 2362 |
| BCL11A-1878 | + | CCACUCACCGUAAGAAAAUG | 20 | 2363 |
| BCL11A-1879 | + | CACUCACCGUAAGAAAAUGG | 20 | 2364 |
| BCL11A-1880 | + | ACUCACCGUAAGAAAAUGGG | 20 | 2365 |
| BCL11A-1881 | + | CUCACCGUAAGAAAAUGGGG | 20 | 2366 |
| BCL11A-1882 | + | CCGUAAGAAAAUGGGGGGGU | 20 | 2367 |
| BCL11A-1883 | + | CGUAAGAAAAUGGGGGGGUA | 20 | 2368 |
| BCL11A-1884 | + | AAGAAAAUGGGGGGGUAGGG | 20 | 2369 |
| BCL11A-1885 | + | AGAAAAUGGGGGGGUAGGGA | 20 | 2370 |
| BCL11A-1886 | + | CAAGUCUAAAAAACGAUUCC | 20 | 2371 |
| BCL11A-1887 | + | AAGUCUAAAAAACGAUUCCC | 20 | 2372 |
| BCL11A-1888 | + | AGUCUAAAAAACGAUUCCCG | 20 | 2373 |
| BCL11A-1889 | + | ACGAUUCCCGGGGAGAAAAG | 20 | 2374 |
| BCL11A-1890 | + | GGGGAGAAAAGAGGUGAGAC | 20 | 2375 |
| BCL11A-1891 | + | AAAGAGGUGAGACUGGCUUU | 20 | 2376 |
| BCL11A-1892 | + | UUUGGACACCAGCGCGCUCA | 20 | 2377 |
| BCL11A-1893 | + | GCUCACGGUCAAGUGUGCAG | 20 | 2378 |
| BCL11A-1894 | + | CUCACGGUCAAGUGUGCAGC | 20 | 2379 |
| BCL11A-1895 | + | ACGGUCAAGUGUGCAGCGGG | 20 | 2380 |
| BCL11A-1896 | + | UCCCCACAAUAGUGAGAAAG | 20 | 2381 |
| BCL11A-1897 | + | AUAGUGAGAAAGUGGCACUG | 20 | 2382 |
| BCL11A-1898 | + | GAGAAAGUGGCACUGUGGAA | 20 | 2383 |
| BCL11A-1899 | + | AGAAAGUGGCACUGUGGAAA | 20 | 2384 |
| BCL11A-1900 | + | GAAAGUGGCACUGUGGAAAG | 20 | 2385 |
| BCL11A-1901 | + | GCACUGUGGAAAGGGGCCCC | 20 | 2386 |
| BCL11A-1902 | + | CCCCGGCGCUCCUGAGUCCG | 20 | 2387 |
| BCL11A-1903 | + | CGCUCCUGAGUCCGCGGAGU | 20 | 2388 |
| BCL11A-1904 | + | GCUCCUGAGUCCGCGGAGUC | 20 | 2389 |
| BCL11A-1905 | + | UGAGUCCGCGGAGUCGGGAG | 20 | 2390 |
| BCL11A-1906 | + | GAGUCCGCGGAGUCGGGAGA | 20 | 2391 |
| BCL11A-1907 | + | AGUCCGCGGAGUCGGGAGAG | 20 | 2392 |
| BCL11A-1908 | + | CGGAGUCGGGAGAGGGGCCG | 20 | 2393 |
| BCL11A-1909 | + | CGGGAGAGGGGCCGCGGCGA | 20 | 2394 |
| BCL11A-1910 | + | GGGAGAGGGGCCGCGGCGAC | 20 | 2395 |
| BCL11A-1911 | + | GGAGAGGGGCCGCGGCGACG | 20 | 2396 |
| BCL11A-1912 | + | CGCGGCGACGGGGAGAGCCG | 20 | 2397 |
| BCL11A-1913 | + | GCGGCGACGGGGAGAGCCGU | 20 | 2398 |
| BCL11A-1914 | + | GACGGGGAGAGCCGUGGGAC | 20 | 2399 |
| BCL11A-1915 | + | ACGGGGAGAGCCGUGGGACC | 20 | 2400 |
| BCL11A-1916 | + | GGAGAGCCGUGGGACCGGGA | 20 | 2401 |
| BCL11A-1917 | + | AGCCGUGGGACCGGGAAGGA | 20 | 2402 |
| BCL11A-1918 | + | GCCGUGGGACCGGGAAGGAC | 20 | 2403 |
| BCL11A-1919 | + | ACCGGGAAGGACGGGAGACG | 20 | 2404 |
| BCL11A-1920 | + | GGAAGGACGGGAGACGCGGC | 20 | 2405 |
| BCL11A-1921 | + | GGCACUGCCGCCUUUUGUUC | 20 | 2406 |
| BCL11A-1922 | + | CCGCCUUUUGUUCCGGCCAG | 20 | 2407 |
| BCL11A-1923 | + | CCUUUUGUUCCGGCCAGAGG | 20 | 2408 |
| BCL11A-1924 | + | CUUUUGUUCCGGCCAGAGGU | 20 | 2409 |
| BCL11A-1925 | + | UGUCCCGCUGCCUUUUGUGC | 20 | 2410 |
| BCL11A-1926 | + | GCCGCCGCCGCCGCCGCCGA | 20 | 2411 |
| BCL11A-1927 | + | CCGCCGCCGCCGCCGCCGAA | 20 | 2412 |
| BCL11A-1928 | + | CGCCGCCGCCGCCGAAGGGC | 20 | 2413 |
| BCL11A-1929 | + | GCCGCCGAAGGGCAGGAGCU | 20 | 2414 |
| BCL11A-1930 | + | CCGCCGAAGGGCAGGAGCUA | 20 | 2415 |
| BCL11A-1931 | + | CGAAGGGCAGGAGCUAGGGC | 20 | 2416 |
| BCL11A-1932 | + | GAAGGGCAGGAGCUAGGGCC | 20 | 2417 |
| BCL11A-1933 | + | AAGGGCAGGAGCUAGGGCCG | 20 | 2418 |
| BCL11A-1934 | + | AGGGCAGGAGCUAGGGCCGG | 20 | 2419 |
| BCL11A-1935 | + | GCAGGAGCUAGGGCCGGGGG | 20 | 2420 |
| BCL11A-1936 | + | GGAGCUAGGGCCGGGGGAGG | 20 | 2421 |
| BCL11A-1937 | + | GCUAGGGCCGGGGGAGGAGG | 20 | 2422 |
| BCL11A-1938 | + | GGGCCGGGGGAGGAGGCGGC | 20 | 2423 |
| BCL11A-1939 | + | GGCCGGGGGAGGAGGCGGCC | 20 | 2424 |
| BCL11A-1940 | + | GCCGGGGGAGGAGGCGGCCG | 20 | 2425 |
| BCL11A-1941 | + | CCGGGGGAGGAGGCGGCCGG | 20 | 2426 |
| BCL11A-1942 | + | AGGAGGCGGCCGGGGGCACG | 20 | 2427 |
| BCL11A-1943 | + | GGAGGCGGCCGGGGGCACGC | 20 | 2428 |
| BCL11A-1944 | + | CGGCCGGGGGCACGCGGGAG | 20 | 2429 |
| BCL11A-1945 | + | GGCCGGGGGCACGCGGGAGA | 20 | 2430 |
| BCL11A-1946 | + | CGGGGGCACGCGGGAGAGGG | 20 | 2431 |
| BCL11A-1947 | + | GGGGGCACGCGGGAGAGGGA | 20 | 2432 |
| BCL11A-1948 | + | GGCACGCGGGAGAGGGAGGG | 20 | 2433 |
| BCL11A-1949 | + | GCACGCGGGAGAGGGAGGGA | 20 | 2434 |
| BCL11A-1950 | + | GGAGAGGGAGGGAGGGAGCC | 20 | 2435 |
| BCL11A-1951 | + | GAGCCCGGACUGCUGCCUCC | 20 | 2436 |
| BCL11A-1952 | + | AGCCCGGACUGCUGCCUCCU | 20 | 2437 |
| BCL11A-1953 | + | CCCUCCCGACCGAACCUCAG | 20 | 2438 |
| BCL11A-1954 | + | ACCGAACCUCAGAGGCAGCA | 20 | 2439 |
| BCL11A-1955 | + | AGAGGCAGCAAGGAGAAGAC | 20 | 2440 |
| BCL11A-1956 | + | AAAAUAAAAUAAAUAAAACA | 20 | 2441 |
| BCL11A-1957 | − | UCUCCUUGCUGCCUCUG | 17 | 2442 |
| BCL11A-1958 | − | UUGCUGCCUCUGAGGUU | 17 | 2443 |
| BCL11A-1959 | − | UGCCUCUGAGGUUCGGU | 17 | 2444 |
| BCL11A-1960 | − | GCCUCUGAGGUUCGGUC | 17 | 2445 |
| BCL11A-1961 | − | UCUGAGGUUCGGUCGGG | 17 | 2446 |
| BCL11A-1962 | − | CUGAGGUUCGGUCGGGA | 17 | 2447 |
| BCL11A-1963 | − | UGAGGUUCGGUCGGGAG | 17 | 2448 |
| BCL11A-1964 | − | GGUUCGGUCGGGAGGGG | 17 | 2449 |
| BCL11A-1965 | − | GUUCGGUCGGGAGGGGA | 17 | 2450 |
| BCL11A-1966 | − | UCGGGAGGGGAGGGCAG | 17 | 2451 |
| BCL11A-1967 | − | GAGGGCAGCGGCAACCC | 17 | 2452 |
| BCL11A-1968 | − | GGCAGCGGCAACCCAGG | 17 | 2453 |
| BCL11A-1969 | − | CCCAGGAGGCAGCAGUC | 17 | 2454 |
| BCL11A-1970 | − | CCAGGAGGCAGCAGUCC | 17 | 2455 |
| BCL11A-1971 | − | CCUCUCCCGCGUGCCCC | 17 | 2456 |
| BCL11A-1972 | − | CCGGCCGCCUCCUCCCC | 17 | 2457 |
| BCL11A-1973 | − | CCCUAGCUCCUGCCCUU | 17 | 2458 |
| BCL11A-1974 | − | UAGCUCCUGCCCUUCGG | 17 | 2459 |
| BCL11A-1975 | − | CUCCUGCCCUUCGGCGG | 17 | 2460 |
| BCL11A-1976 | − | CUGCCCUUCGGCGGCGG | 17 | 2461 |
| BCL11A-1977 | − | CCCUUCGGCGGCGGCGG | 17 | 2462 |
| BCL11A-1978 | − | UUCGGCGGCGGCGGCGG | 17 | 2463 |
| BCL11A-1979 | − | GGCGGCGGCGGCGGCGG | 17 | 2464 |
| BCL11A-1980 | − | CGGCGGCGGCGGCGGCG | 17 | 2465 |
| BCL11A-1981 | − | GGCGGCGGCGGCGGCGC | 17 | 2466 |
| BCL11A-1982 | − | GGCGGCGGCGGCGCGGG | 17 | 2467 |
| BCL11A-1983 | − | GCGGCGGCGGCGCGGGA | 17 | 2468 |
| BCL11A-1984 | − | GCGGGAGGGCAAGCGCG | 17 | 2469 |
| BCL11A-1985 | − | GGGCAAGCGCGAGGAGC | 17 | 2470 |
| BCL11A-1986 | − | CGAGGAGCCGGCACAAA | 17 | 2471 |
| BCL11A-1987 | − | GCCGGCACAAAAGGCAG | 17 | 2472 |
| BCL11A-1988 | − | CCGGCACAAAAGGCAGC | 17 | 2473 |
| BCL11A-1989 | − | GGACAAACACCCACCUC | 17 | 2474 |
| BCL11A-1990 | − | AAACACCCACCUCUGGC | 17 | 2475 |
| BCL11A-1991 | − | CCUCUGGCCGGAACAAA | 17 | 2476 |
| BCL11A-1992 | − | CUGGCCGGAACAAAAGG | 17 | 2477 |
| BCL11A-1993 | − | ACAAAAGGCGGCAGUGC | 17 | 2478 |
| BCL11A-1994 | − | GCGUCUCCCGUCCUUCC | 17 | 2479 |
| BCL11A-1995 | − | CGUCCUUCCCGGUCCCA | 17 | 2480 |
| BCL11A-1996 | − | GGCUCUCCCCGUCGCCG | 17 | 2481 |
| BCL11A-1997 | − | CCCCUCUCCCGACUCCG | 17 | 2482 |
| BCL11A-1998 | − | CCCGACUCCGCGGACUC | 17 | 2483 |
| BCL11A-1999 | − | CGCGGACUCAGGAGCGC | 17 | 2484 |
| BCL11A-2000 | − | GCGGACUCAGGAGCGCC | 17 | 2485 |
| BCL11A-2001 | − | CGGACUCAGGAGCGCCG | 17 | 2486 |
| BCL11A-2002 | − | GGACUCAGGAGCGCCGG | 17 | 2487 |
| BCL11A-2003 | − | CCACUUUCUCACUAUUG | 17 | 2488 |
| BCL11A-2004 | − | CACUUUCUCACUAUUGU | 17 | 2489 |
| BCL11A-2005 | − | ACUUUCUCACUAUUGUG | 17 | 2490 |
| BCL11A-2006 | − | CUUGACCGUGAGCGCGC | 17 | 2491 |
| BCL11A-2007 | − | CUCACCUCUUUUCUCCC | 17 | 2492 |
| BCL11A-2008 | − | UCACCUCUUUUCUCCCC | 17 | 2493 |
| BCL11A-2009 | − | ACCCCCCCAUUUUCUUA | 17 | 2494 |
| BCL11A-2010 | − | CAUUUUCUUACGGUGAG | 17 | 2495 |
| BCL11A-2011 | − | AUUUUCUUACGGUGAGU | 17 | 2496 |
| BCL11A-2012 | − | CACCAGCUCCCACCCCC | 17 | 2497 |
| BCL11A-2013 | − | UCAUUAUUUUGCAAAAC | 17 | 2498 |
| BCL11A-2014 | − | UUAUUUUGCAAAACUGG | 17 | 2499 |
| BCL11A-2015 | − | UAUUUUGCAAAACUGGC | 17 | 2500 |
| BCL11A-2016 | − | AUUUUGCAAAACUGGCG | 17 | 2501 |
| BCL11A-2017 | − | UUGCAAAACUGGCGGGG | 17 | 2502 |
| BCL11A-2018 | − | UGCAAAACUGGCGGGGC | 17 | 2503 |
| BCL11A-2019 | − | GCAAAACUGGCGGGGCG | 17 | 2504 |
| BCL11A-2020 | − | CAAAACUGGCGGGGCGG | 17 | 2505 |
| BCL11A-2021 | − | AAAACUGGCGGGGCGGG | 17 | 2506 |
| BCL11A-2022 | − | AAACUGGCGGGGCGGGG | 17 | 2507 |
| BCL11A-2023 | − | AACUGGCGGGGCGGGGG | 17 | 2508 |
| BCL11A-2024 | − | GCGGGGCGGGGGGGGAG | 17 | 2509 |
| BCL11A-2025 | − | CGAAAAGAGAAAUAAAG | 17 | 2510 |
| BCL11A-2026 | − | AAAGAGAAAUAAAGCGG | 17 | 2511 |
| BCL11A-2027 | − | GAAAUAAAGCGGCGGAA | 17 | 2512 |
| BCL11A-2028 | − | AUAAAGCGGCGGAAAGG | 17 | 2513 |
| BCL11A-2029 | − | GGCGGAAAGGAGGAAAG | 17 | 2514 |
| BCL11A-2030 | − | GGAAAGGAGGAAAGAGG | 17 | 2515 |
| BCL11A-2031 | − | AAUUAAAUAAAAUUAAA | 17 | 2516 |
| BCL11A-2032 | − | UCUCAAAAGUGCAUACA | 17 | 2517 |
| BCL11A-2033 | − | AAGUGCAUACACGGCAA | 17 | 2518 |
| BCL11A-2034 | − | ACGGCAAUGGUUCCAGA | 17 | 2519 |
| BCL11A-2035 | − | CGGCAAUGGUUCCAGAU | 17 | 2520 |
| BCL11A-2036 | − | UGGUUCCAGAUGGGAUG | 17 | 2521 |
| BCL11A-2037 | − | GGUUCCAGAUGGGAUGA | 17 | 2522 |
| BCL11A-2038 | − | UCUUUUACCUCGACUCU | 17 | 2523 |
| BCL11A-2039 | − | UUUACCUCGACUCUCGG | 17 | 2524 |
| BCL11A-2040 | − | AUUAUUAUUACUAUUAU | 17 | 2525 |
| BCL11A-2041 | − | UUAUUAUUACUAUUAUU | 17 | 2526 |
| BCL11A-2042 | + | UAAUCACGAGAGCGCGC | 17 | 2527 |
| BCL11A-2043 | + | GACUAGAAGCAAAAGCG | 17 | 2528 |
| BCL11A-2044 | + | ACUAGAAGCAAAAGCGA | 17 | 2529 |
| BCL11A-2045 | + | CUAGAAGCAAAAGCGAG | 17 | 2530 |
| BCL11A-2046 | + | UAGAAGCAAAAGCGAGG | 17 | 2531 |
| BCL11A-2047 | + | AAAAGCGAGGGGGAGAG | 17 | 2532 |
| BCL11A-2048 | + | AAAGCGAGGGGGAGAGA | 17 | 2533 |
| BCL11A-2049 | + | AAGCGAGGGGGAGAGAG | 17 | 2534 |
| BCL11A-2050 | + | AAAACCUCCGAGAGUCG | 17 | 2535 |
| BCL11A-2051 | + | CGAGGUAAAAGAGAUAA | 17 | 2536 |
| BCL11A-2052 | + | GAGGUAAAAGAGAUAAA | 17 | 2537 |
| BCL11A-2053 | + | AGGUAAAAGAGAUAAAG | 17 | 2538 |
| BCL11A-2054 | + | GGUAAAAGAGAUAAAGG | 17 | 2539 |
| BCL11A-2055 | + | AAAACCCUCAUCCCAUC | 17 | 2540 |
| BCL11A-2056 | + | UAUUUCUCUUUUCGAAA | 17 | 2541 |
| BCL11A-2057 | + | AAUAAUGAACAAUGCUA | 17 | 2542 |
| BCL11A-2058 | + | CAACUCACAUGCAAACC | 17 | 2543 |
| BCL11A-2059 | + | AACUCACAUGCAAACCU | 17 | 2544 |
| BCL11A-2060 | + | ACUCACAUGCAAACCUG | 17 | 2545 |
| BCL11A-2061 | + | CUCACAUGCAAACCUGG | 17 | 2546 |
| BCL11A-2062 | + | ACAUGCAAACCUGGGGG | 17 | 2547 |
| BCL11A-2063 | + | CAUGCAAACCUGGGGGU | 17 | 2548 |
| BCL11A-2064 | + | AACCUGGGGGUGGGAGC | 17 | 2549 |
| BCL11A-2065 | + | CUGGGGGUGGGAGCUGG | 17 | 2550 |
| BCL11A-2066 | + | UGGGGGUGGGAGCUGGU | 17 | 2551 |
| BCL11A-2067 | + | GGGGGUGGGAGCUGGUG | 17 | 2552 |
| BCL11A-2068 | + | UGGGAGCUGGUGGGGAA | 17 | 2553 |
| BCL11A-2069 | + | GGGAGCUGGUGGGGAAA | 17 | 2554 |
| BCL11A-2070 | + | AGCUGGUGGGGAAAGGG | 17 | 2555 |
| BCL11A-2071 | + | CACUCACCGUAAGAAAA | 17 | 2556 |
| BCL11A-2072 | + | ACUCACCGUAAGAAAAU | 17 | 2557 |
| BCL11A-2073 | + | CUCACCGUAAGAAAAUG | 17 | 2558 |
| BCL11A-2074 | + | UCACCGUAAGAAAAUGG | 17 | 2559 |
| BCL11A-2075 | + | CACCGUAAGAAAAUGGG | 17 | 2560 |
| BCL11A-2076 | + | ACCGUAAGAAAAUGGGG | 17 | 2561 |
| BCL11A-2077 | + | UAAGAAAAUGGGGGGGU | 17 | 2562 |
| BCL11A-2078 | + | AAGAAAAUGGGGGGGUA | 17 | 2563 |
| BCL11A-2079 | + | AAAAUGGGGGGGUAGGG | 17 | 2564 |
| BCL11A-2080 | + | AAAUGGGGGGGUAGGGA | 17 | 2565 |
| BCL11A-2081 | + | GUCUAAAAAACGAUUCC | 17 | 2566 |
| BCL11A-2082 | + | UCUAAAAAACGAUUCCC | 17 | 2567 |
| BCL11A-2083 | + | CUAAAAAACGAUUCCCG | 17 | 2568 |
| BCL11A-2084 | + | AUUCCCGGGGAGAAAAG | 17 | 2569 |
| BCL11A-2085 | + | GAGAAAAGAGGUGAGAC | 17 | 2570 |
| BCL11A-2086 | + | GAGGUGAGACUGGCUUU | 17 | 2571 |
| BCL11A-2087 | + | GGACACCAGCGCGCUCA | 17 | 2572 |
| BCL11A-2088 | + | CACGGUCAAGUGUGCAG | 17 | 2573 |
| BCL11A-2089 | + | ACGGUCAAGUGUGCAGC | 17 | 2574 |
| BCL11A-2090 | + | GUCAAGUGUGCAGCGGG | 17 | 2575 |
| BCL11A-2091 | + | CCACAAUAGUGAGAAAG | 17 | 2576 |
| BCL11A-2092 | + | GUGAGAAAGUGGCACUG | 17 | 2577 |
| BCL11A-2093 | + | AAAGUGGCACUGUGGAA | 17 | 2578 |
| BCL11A-2094 | + | AAGUGGCACUGUGGAAA | 17 | 2579 |
| BCL11A-2095 | + | AGUGGCACUGUGGAAAG | 17 | 2580 |
| BCL11A-2096 | + | CUGUGGAAAGGGGCCCC | 17 | 2581 |
| BCL11A-2097 | + | CGGCGCUCCUGAGUCCG | 17 | 2582 |
| BCL11A-2098 | + | UCCUGAGUCCGCGGAGU | 17 | 2583 |
| BCL11A-2099 | + | CCUGAGUCCGCGGAGUC | 17 | 2584 |
| BCL11A-2100 | + | GUCCGCGGAGUCGGGAG | 17 | 2585 |
| BCL11A-2101 | + | UCCGCGGAGUCGGGAGA | 17 | 2586 |
| BCL11A-2102 | + | CCGCGGAGUCGGGAGAG | 17 | 2587 |
| BCL11A-2103 | + | AGUCGGGAGAGGGGCCG | 17 | 2588 |
| BCL11A-2104 | + | GAGAGGGGCCGCGGCGA | 17 | 2589 |
| BCL11A-2105 | + | AGAGGGGCCGCGGCGAC | 17 | 2590 |
| BCL11A-2106 | + | GAGGGGCCGCGGCGACG | 17 | 2591 |
| BCL11A-2107 | + | GGCGACGGGGAGAGCCG | 17 | 2592 |
| BCL11A-2108 | + | GCGACGGGGAGAGCCGU | 17 | 2593 |
| BCL11A-2109 | + | GGGGAGAGCCGUGGGAC | 17 | 2594 |
| BCL11A-2110 | + | GGGAGAGCCGUGGGACC | 17 | 2595 |
| BCL11A-2111 | + | GAGCCGUGGGACCGGGA | 17 | 2596 |
| BCL11A-2112 | + | CGUGGGACCGGGAAGGA | 17 | 2597 |
| BCL11A-2113 | + | GUGGGACCGGGAAGGAC | 17 | 2598 |
| BCL11A-2114 | + | GGGAAGGACGGGAGACG | 17 | 2599 |
| BCL11A-2115 | + | AGGACGGGAGACGCGGC | 17 | 2600 |
| BCL11A-2116 | + | ACUGCCGCCUUUUGUUC | 17 | 2601 |
| BCL11A-2117 | + | CCUUUUGUUCCGGCCAG | 17 | 2602 |
| BCL11A-2118 | + | UUUGUUCCGGCCAGAGG | 17 | 2603 |
| BCL11A-2119 | + | UUGUUCCGGCCAGAGGU | 17 | 2604 |
| BCL11A-2120 | + | CCCGCUGCCUUUUGUGC | 17 | 2605 |
| BCL11A-2121 | + | GCCGCCGCCGCCGCCGA | 17 | 2606 |
| BCL11A-2122 | + | CCGCCGCCGCCGCCGAA | 17 | 2607 |
| BCL11A-2123 | + | CGCCGCCGCCGAAGGGC | 17 | 2608 |
| BCL11A-2124 | + | GCCGAAGGGCAGGAGCU | 17 | 2609 |
| BCL11A-2125 | + | CCGAAGGGCAGGAGCUA | 17 | 2610 |
| BCL11A-2126 | + | AGGGCAGGAGCUAGGGC | 17 | 2611 |
| BCL11A-2127 | + | GGGCAGGAGCUAGGGCC | 17 | 2612 |
| BCL11A-2128 | + | GGCAGGAGCUAGGGCCG | 17 | 2613 |
| BCL11A-2129 | + | GCAGGAGCUAGGGCCGG | 17 | 2614 |
| BCL11A-2130 | + | GGAGCUAGGGCCGGGGG | 17 | 2615 |
| BCL11A-2131 | + | GCUAGGGCCGGGGGAGG | 17 | 2616 |
| BCL11A-2132 | + | AGGGCCGGGGGAGGAGG | 17 | 2617 |
| BCL11A-2133 | + | CCGGGGGAGGAGGCGGC | 17 | 2618 |
| BCL11A-2134 | + | CGGGGGAGGAGGCGGCC | 17 | 2619 |
| BCL11A-2135 | + | GGGGGAGGAGGCGGCCG | 17 | 2620 |
| BCL11A-2136 | + | GGGGAGGAGGCGGCCGG | 17 | 2621 |
| BCL11A-2137 | + | AGGCGGCCGGGGGCACG | 17 | 2622 |
| BCL11A-2138 | + | GGCGGCCGGGGGCACGC | 17 | 2623 |
| BCL11A-2139 | + | CCGGGGGCACGCGGGAG | 17 | 2624 |
| BCL11A-2140 | + | CGGGGGCACGCGGGAGA | 17 | 2625 |
| BCL11A-2141 | + | GGGCACGCGGGAGAGGG | 17 | 2626 |
| BCL11A-2142 | + | GGCACGCGGGAGAGGGA | 17 | 2627 |
| BCL11A-2143 | + | ACGCGGGAGAGGGAGGG | 17 | 2628 |
| BCL11A-2144 | + | CGCGGGAGAGGGAGGGA | 17 | 2629 |
| BCL11A-2145 | + | GAGGGAGGGAGGGAGCC | 17 | 2630 |
| BCL11A-2146 | + | CCCGGACUGCUGCCUCC | 17 | 2631 |
| BCL11A-2147 | + | CCGGACUGCUGCCUCCU | 17 | 2632 |
| BCL11A-2148 | + | UCCCGACCGAACCUCAG | 17 | 2633 |
| BCL11A-2149 | + | GAACCUCAGAGGCAGCA | 17 | 2634 |
| BCL11A-2150 | + | GGCAGCAAGGAGAAGAC | 17 | 2635 |
| BCL11A-2151 | + | AUAAAAUAAAUAAAACA | 17 | 2636 |

[0993] Table 3B provides exemplary targeting domains for repressing (i.e., knocking down or decreasing) expression of the BCL11A gene. Any of the targeting domains in the table can be used with a S. aureus eiCas9 molecule to cause a steric block in the promoter region to block transcription elongation resulting in the repression of the BCL11A gene. Any of the targeting domains in the table can be used with a S. aureus eiCas9 fused to a transcriptional repressor to decrease transcription and therefore downregulate gene expression.

TABLE 3B
S. aureus gRNA targets for BCL11A knockdown

| | | | Target | SEQ |
|---|---|---|---|---|
| | DNA | | Site | ID |
| gRNA Name | Strand | Targeting Domain | Length | NO |
| BCL11A-2152 | − | CAGUCUUCUCCUUGCUGCCU | 20 | 2637 |
| BCL11A-2153 | − | UUGCUGCCUCUGAGGUUCGG | 20 | 2638 |
| BCL11A-2154 | − | UGCUGCCUCUGAGGUUCGGU | 20 | 2639 |
| BCL11A-2155 | − | GCUGCCUCUGAGGUUCGGUC | 20 | 2640 |
| BCL11A-2156 | − | UGCCUCUGAGGUUCGGUCGG | 20 | 2641 |
| BCL11A-2157 | − | GCCUCUGAGGUUCGGUCGGG | 20 | 2642 |
| BCL11A-2158 | − | CCUCUGAGGUUCGGUCGGGA | 20 | 2643 |
| BCL11A-2159 | − | CUCUGAGGUUCGGUCGGGAG | 20 | 2644 |
| BCL11A-2160 | − | CUGAGGUUCGGUCGGGAGGG | 20 | 2645 |
| BCL11A-2161 | − | AGGGGAGGGCAGCGGCAACC | 20 | 2646 |
| BCL11A-2162 | − | GGGGAGGGCAGCGGCAACCC | 20 | 2647 |
| BCL11A-2163 | − | GCAACCCAGGAGGCAGCAGU | 20 | 2648 |
| BCL11A-2164 | − | GCGGCGGCGGCGGCGGCGGC | 20 | 2649 |
| BCL11A-2165 | − | CGGCGGCGGCGGCGGCGGCG | 20 | 2650 |
| BCL11A-2166 | − | GGCGGCGGCGGCGGCGGCGC | 20 | 2651 |
| BCL11A-2167 | − | CGGCGGCGGCGGCGGCGCGG | 20 | 2652 |
| BCL11A-2168 | − | GGCGGCGCGGGAGGGCAAGC | 20 | 2653 |
| BCL11A-2169 | − | CGGCGCGGGAGGGCAAGCGC | 20 | 2654 |
| BCL11A-2170 | − | GGCGCGGGAGGGCAAGCGCG | 20 | 2655 |
| BCL11A-2171 | − | AGGAGCCGGCACAAAAGGCA | 20 | 2656 |
| BCL11A-2172 | − | GGAGCCGGCACAAAAGGCAG | 20 | 2657 |
| BCL11A-2173 | − | GGACAAACACCCACCUCUGG | 20 | 2658 |
| BCL11A-2174 | − | GACAAACACCCACCUCUGGC | 20 | 2659 |
| BCL11A-2175 | − | GCGGCCCCUCUCCCGACUCC | 20 | 2660 |
| BCL11A-2176 | − | CUCUCCCGACUCCGCGGACU | 20 | 2661 |
| BCL11A-2177 | − | UCUCCCGACUCCGCGGACUC | 20 | 2662 |
| BCL11A-2178 | − | ACUCCGCGGACUCAGGAGCG | 20 | 2663 |
| BCL11A-2179 | − | CUCCGCGGACUCAGGAGCGC | 20 | 2664 |
| BCL11A-2180 | − | UCCGCGGACUCAGGAGCGCC | 20 | 2665 |
| BCL11A-2181 | − | AGUGCCACUUUCUCACUAUU | 20 | 2666 |
| BCL11A-2182 | − | GUGCCACUUUCUCACUAUUG | 20 | 2667 |
| BCL11A-2183 | − | UGCCACUUUCUCACUAUUGU | 20 | 2668 |
| BCL11A-2184 | − | CUCCCGCUGCACACUUGACC | 20 | 2669 |
| BCL11A-2185 | − | CAGUCUCACCUCUUUUCUCC | 20 | 2670 |
| BCL11A-2186 | − | AGUCUCACCUCUUUUCUCCC | 20 | 2671 |
| BCL11A-2187 | − | GUCUCACCUCUUUUCUCCCC | 20 | 2672 |
| BCL11A-2188 | − | UACCCCCCCAUUUUCUUACG | 20 | 2673 |
| BCL11A-2189 | − | CCCCCAUUUUCUUACGGUGA | 20 | 2674 |
| BCL11A-2190 | − | CCCCAUUUUCUUACGGUGAG | 20 | 2675 |
| BCL11A-2191 | − | CCCAUUUUCUUACGGUGAGU | 20 | 2676 |
| BCL11A-2192 | − | UCCCACCCCCAGGUUUGCAU | 20 | 2677 |
| BCL11A-2193 | − | UUCAUUAUUUUGCAAAACUG | 20 | 2678 |
| BCL11A-2194 | − | UCAUUAUUUUGCAAAACUGG | 20 | 2679 |
| BCL11A-2195 | − | UAUUUUGCAAAACUGGCGGG | 20 | 2680 |
| BCL11A-2196 | − | AUUUUGCAAAACUGGCGGGG | 20 | 2681 |
| BCL11A-2197 | − | UUUUGCAAAACUGGCGGGGC | 20 | 2682 |
| BCL11A-2198 | − | UUUGCAAAACUGGCGGGGCG | 20 | 2683 |
| BCL11A-2199 | − | UUGCAAAACUGGCGGGGCGG | 20 | 2684 |
| BCL11A-2200 | − | UGCAAAACUGGCGGGGCGGG | 20 | 2685 |
| BCL11A-2201 | − | GCAAAACUGGCGGGGCGGGG | 20 | 2686 |
| BCL11A-2202 | − | CAAAACUGGCGGGGCGGGGG | 20 | 2687 |
| BCL11A-2203 | − | ACUGGCGGGGCGGGGGGGGA | 20 | 2688 |
| BCL11A-2204 | − | CUGGCGGGGCGGGGGGGGAG | 20 | 2689 |
| BCL11A-2205 | − | UGGAAUCAUUGCAUUCCUUU | 20 | 2690 |
| BCL11A-2206 | − | UCAUUGCAUUCCUUUUCGAA | 20 | 2691 |
| BCL11A-2207 | − | AUUGCAUUCCUUUUCGAAAA | 20 | 2692 |
| BCL11A-2208 | − | UCGAAAAGAGAAAUAAAGCG | 20 | 2693 |
| BCL11A-2209 | − | CGAAAAGAGAAAUAAAGCGG | 20 | 2694 |
| BCL11A-2210 | − | AAGAGAAAUAAAGCGGCGGA | 20 | 2695 |
| BCL11A-2211 | − | AGAGAAAUAAAGCGGCGGAA | 20 | 2696 |
| BCL11A-2212 | − | AGAAAUAAAGCGGCGGAAAG | 20 | 2697 |
| BCL11A-2213 | − | GAAAUAAAGCGGCGGAAAGG | 20 | 2698 |
| BCL11A-2214 | − | UAAAGCGGCGGAAAGGAGGA | 20 | 2699 |
| BCL11A-2215 | − | AAGCGGCGGAAAGGAGGAAA | 20 | 2700 |
| BCL11A-2216 | − | AGCGGCGGAAAGGAGGAAAG | 20 | 2701 |
| BCL11A-2217 | − | CGGCGGAAAGGAGGAAAGAG | 20 | 2702 |
| BCL11A-2218 | − | GGCGGAAAGGAGGAAAGAGG | 20 | 2703 |
| BCL11A-2219 | − | AUACACGGCAAUGGUUCCAG | 20 | 2704 |
| BCL11A-2220 | − | UACACGGCAAUGGUUCCAGA | 20 | 2705 |
| BCL11A-2221 | − | CGGCAAUGGUUCCAGAUGGG | 20 | 2706 |
| BCL11A-2222 | − | GCAAUGGUUCCAGAUGGGAU | 20 | 2707 |
| BCL11A-2223 | − | UAUCUCUUUUACCUCGACUC | 20 | 2708 |
| BCL11A-2224 | − | AUCUCUUUUACCUCGACUCU | 20 | 2709 |
| BCL11A-2225 | − | GACUCUCGGAGGUUUUUCUC | 20 | 2710 |
| BCL11A-2226 | − | AAUAAUUAUUAUUACUAUUA | 20 | 2711 |
| BCL11A-2227 | − | ACUAUUAUUGGGUUACUUAC | 20 | 2712 |
| BCL11A-2228 | − | UAUUAUUGGGUUACUUACGC | 20 | 2713 |
| BCL11A-2229 | − | UCUUCUCCUUGCUGCCU | 17 | 2714 |
| BCL11A-2230 | − | CUGCCUCUGAGGUUCGG | 17 | 2715 |
| BCL11A-2231 | − | UGCCUCUGAGGUUCGGU | 17 | 2716 |
| BCL11A-2232 | − | GCCUCUGAGGUUCGGUC | 17 | 2717 |
| BCL11A-2233 | − | CUCUGAGGUUCGGUCGG | 17 | 2718 |
| BCL11A-2234 | − | UCUGAGGUUCGGUCGGG | 17 | 2719 |
| BCL11A-2235 | − | CUGAGGUUCGGUCGGGA | 17 | 2720 |
| BCL11A-2236 | − | UGAGGUUCGGUCGGGAG | 17 | 2721 |
| BCL11A-2237 | − | AGGUUCGGUCGGGAGGG | 17 | 2722 |
| BCL11A-2238 | − | GGAGGGCAGCGGCAACC | 17 | 2723 |
| BCL11A-2239 | − | GAGGGCAGCGGCAACCC | 17 | 2724 |
| BCL11A-2240 | − | ACCCAGGAGGCAGCAGU | 17 | 2725 |
| BCL11A-2241 | − | GCGGCGGCGGCGGCGGC | 17 | 2726 |
| BCL11A-2242 | − | CGGCGGCGGCGGCGGCG | 17 | 2727 |
| BCL11A-2243 | − | GGCGGCGGCGGCGGCGC | 17 | 2728 |
| BCL11A-2244 | − | CGGCGGCGGCGGCGCGG | 17 | 2729 |
| BCL11A-2245 | − | GGCGCGGGAGGGCAAGC | 17 | 2730 |
| BCL11A-2246 | − | CGCGGGAGGGCAAGCGC | 17 | 2731 |
| BCL11A-2247 | − | GCGGGAGGGCAAGCGCG | 17 | 2732 |
| BCL11A-2248 | − | AGCCGGCACAAAAGGCA | 17 | 2733 |
| BCL11A-2249 | − | GCCGGCACAAAAGGCAG | 17 | 2734 |
| BCL11A-2250 | − | CAAACACCCACCUCUGG | 17 | 2735 |
| BCL11A-2251 | − | AAACACCCACCUCUGGC | 17 | 2736 |
| BCL11A-2252 | − | GCCCCUCUCCCGACUCC | 17 | 2737 |
| BCL11A-2253 | − | UCCCGACUCCGCGGACU | 17 | 2738 |
| BCL11A-2254 | − | CCCGACUCCGCGGACUC | 17 | 2739 |
| BCL11A-2255 | − | CCGCGGACUCAGGAGCG | 17 | 2740 |
| BCL11A-2256 | − | CGCGGACUCAGGAGCGC | 17 | 2741 |
| BCL11A-2257 | − | GCGGACUCAGGAGCGCC | 17 | 2742 |
| BCL11A-2258 | − | GCCACUUUCUCACUAUU | 17 | 2743 |
| BCL11A-2259 | − | CCACUUUCUCACUAUUG | 17 | 2744 |
| BCL11A-2260 | − | CACUUUCUCACUAUUGU | 17 | 2745 |
| BCL11A-2261 | − | CCGCUGCACACUUGACC | 17 | 2746 |
| BCL11A-2262 | − | UCUCACCUCUUUUCUCC | 17 | 2747 |
| BCL11A-2263 | − | CUCACCUCUUUUCUCCC | 17 | 2748 |
| BCL11A-2264 | − | UCACCUCUUUUCUCCCC | 17 | 2749 |
| BCL11A-2265 | − | CCCCCCAUUUUCUUACG | 17 | 2750 |
| BCL11A-2266 | − | CCAUUUUCUUACGGUGA | 17 | 2751 |
| BCL11A-2267 | − | CAUUUUCUUACGGUGAG | 17 | 2752 |
| BCL11A-2268 | − | AUUUUCUUACGGUGAGU | 17 | 2753 |
| BCL11A-2269 | − | CACCCCCAGGUUUGCAU | 17 | 2754 |
| BCL11A-2270 | − | AUUAUUUUGCAAAACUG | 17 | 2755 |
| BCL11A-2271 | − | UUAUUUUGCAAAACUGG | 17 | 2756 |
| BCL11A-2272 | − | UUUGCAAAACUGGCGGG | 17 | 2757 |
| BCL11A-2273 | − | UUGCAAAACUGGCGGGG | 17 | 2758 |
| BCL11A-2274 | − | UGCAAAACUGGCGGGGC | 17 | 2759 |
| BCL11A-2275 | − | GCAAAACUGGCGGGGCG | 17 | 2760 |
| BCL11A-2276 | − | CAAAACUGGCGGGGCGG | 17 | 2761 |
| BCL11A-2277 | − | AAAACUGGCGGGGCGGG | 17 | 2762 |
| BCL11A-2278 | − | AAACUGGCGGGGCGGGG | 17 | 2763 |
| BCL11A-2279 | − | AACUGGCGGGGCGGGGG | 17 | 2764 |
| BCL11A-2280 | − | GGCGGGGCGGGGGGGGA | 17 | 2765 |
| BCL11A-2281 | − | GCGGGGCGGGGGGGGAG | 17 | 2766 |
| BCL11A-2282 | − | AAUCAUUGCAUUCCUUU | 17 | 2767 |
| BCL11A-2283 | − | UUGCAUUCCUUUUCGAA | 17 | 2768 |
| BCL11A-2284 | − | GCAUUCCUUUUCGAAAA | 17 | 2769 |
| BCL11A-2285 | − | AAAAGAGAAAUAAAGCG | 17 | 2770 |
| BCL11A-2286 | − | AAAGAGAAAUAAAGCGG | 17 | 2771 |
| BCL11A-2287 | − | AGAAAUAAAGCGGCGGA | 17 | 2772 |
| BCL11A-2288 | − | GAAAUAAAGCGGCGGAA | 17 | 2773 |
| BCL11A-2289 | − | AAUAAAGCGGCGGAAAG | 17 | 2774 |
| BCL11A-2290 | − | AUAAAGCGGCGGAAAGG | 17 | 2775 |
| BCL11A-2291 | − | AGCGGCGGAAAGGAGGA | 17 | 2776 |
| BCL11A-2292 | − | CGGCGGAAAGGAGGAAA | 17 | 2777 |
| BCL11A-2293 | − | GGCGGAAAGGAGGAAAG | 17 | 2778 |
| BCL11A-2294 | − | CGGAAAGGAGGAAAGAG | 17 | 2779 |
| BCL11A-2295 | − | GGAAAGGAGGAAAGAGG | 17 | 2780 |
| BCL11A-2296 | − | CACGGCAAUGGUUCCAG | 17 | 2781 |
| BCL11A-2297 | − | ACGGCAAUGGUUCCAGA | 17 | 2782 |
| BCL11A-2298 | − | CAAUGGUUCCAGAUGGG | 17 | 2783 |
| BCL11A-2299 | − | AUGGUUCCAGAUGGGAU | 17 | 2784 |
| BCL11A-2300 | − | CUCUUUUACCUCGACUC | 17 | 2785 |
| BCL11A-2301 | − | UCUUUUACCUCGACUCU | 17 | 2786 |
| BCL11A-2302 | − | UCUCGGAGGUUUUUCUC | 17 | 2787 |
| BCL11A-2303 | − | AAUUAUUAUUACUAUUA | 17 | 2788 |
| BCL11A-2304 | − | AUUAUUGGGUUACUUAC | 17 | 2789 |
| BCL11A-2305 | − | UAUUGGGUUACUUACGC | 17 | 2790 |
| BCL11A-2306 | + | CGAACCUCAGAGGCAGCAAG | 20 | 2791 |
| BCL11A-2307 | + | ACCGAACCUCAGAGGCAGCA | 20 | 2792 |
| BCL11A-2308 | + | GACCGAACCUCAGAGGCAGC | 20 | 2793 |
| BCL11A-2309 | + | CUCCCCUCCCGACCGAACCU | 20 | 2794 |
| BCL11A-2310 | + | CCGCUGCCCUCCCCUCCCGA | 20 | 2795 |
| BCL11A-2311 | + | GGAGCCCGGACUGCUGCCUC | 20 | 2796 |
| BCL11A-2312 | + | GGGAGAGGGAGGGAGGGAGC | 20 | 2797 |
| BCL11A-2313 | + | GCACGCGGGAGAGGGAGGGA | 20 | 2798 |
| BCL11A-2314 | + | GGCACGCGGGAGAGGGAGGG | 20 | 2799 |
| BCL11A-2315 | + | GGGCACGCGGGAGAGGGAGG | 20 | 2800 |
| BCL11A-2316 | + | GGGGGCACGCGGGAGAGGGA | 20 | 2801 |
| BCL11A-2317 | + | CGGGGGCACGCGGGAGAGGG | 20 | 2802 |
| BCL11A-2318 | + | CCGGGGGCACGCGGGAGAGG | 20 | 2803 |
| BCL11A-2319 | + | GGCCGGGGGCACGCGGGAGA | 20 | 2804 |
| BCL11A-2320 | + | CGGCCGGGGGCACGCGGGAG | 20 | 2805 |
| BCL11A-2321 | + | GCGGCCGGGGGCACGCGGGA | 20 | 2806 |
| BCL11A-2322 | + | AGGCGGCCGGGGGCACGCGG | 20 | 2807 |
| BCL11A-2323 | + | GGAGGCGGCCGGGGGCACGC | 20 | 2808 |
| BCL11A-2324 | + | AGGAGGCGGCCGGGGGCACG | 20 | 2809 |
| BCL11A-2325 | + | GAGGAGGCGGCCGGGGGCAC | 20 | 2810 |
| BCL11A-2326 | + | GGCCGGGGGAGGAGGCGGCC | 20 | 2811 |
| BCL11A-2327 | + | GGGCCGGGGGAGGAGGCGGC | 20 | 2812 |
| BCL11A-2328 | + | AGGGCCGGGGGAGGAGGCGG | 20 | 2813 |
| BCL11A-2329 | + | GCAGGAGCUAGGGCCGGGGG | 20 | 2814 |
| BCL11A-2330 | + | GGCAGGAGCUAGGGCCGGGG | 20 | 2815 |
| BCL11A-2331 | + | AGGGCAGGAGCUAGGGCCGG | 20 | 2816 |
| BCL11A-2332 | + | AAGGGCAGGAGCUAGGGCCG | 20 | 2817 |
| BCL11A-2333 | + | GAAGGGCAGGAGCUAGGGCC | 20 | 2818 |
| BCL11A-2334 | + | CGAAGGGCAGGAGCUAGGGC | 20 | 2819 |
| BCL11A-2335 | + | CCGAAGGGCAGGAGCUAGGG | 20 | 2820 |
| BCL11A-2336 | + | CGCCGCCGAAGGGCAGGAGC | 20 | 2821 |
| BCL11A-2337 | + | CGCCGCCGCCGCCGAAGGGC | 20 | 2822 |
| BCL11A-2338 | + | CCGCCGCCGCCGCCGAAGGG | 20 | 2823 |
| BCL11A-2339 | + | CGCCGCCGCCGCCGCCGCCG | 20 | 2824 |
| BCL11A-2340 | + | CGCCGCCGCCGCCGCCGCCG | 20 | 2825 |
| BCL11A-2341 | + | GCCUUUUGUUCCGGCCAGAG | 20 | 2826 |
| BCL11A-2342 | + | CUGCCGCCUUUUGUUCCGGC | 20 | 2827 |
| BCL11A-2343 | + | GCCGUGGGACCGGGAAGGAC | 20 | 2828 |
| BCL11A-2344 | + | AGCCGUGGGACCGGGAAGGA | 20 | 2829 |
| BCL11A-2345 | + | GAGCCGUGGGACCGGGAAGG | 20 | 2830 |
| BCL11A-2346 | + | GGGAGAGCCGUGGGACCGGG | 20 | 2831 |
| BCL11A-2347 | + | ACGGGGAGAGCCGUGGGACC | 20 | 2832 |
| BCL11A-2348 | + | GACGGGGAGAGCCGUGGGAC | 20 | 2833 |
| BCL11A-2349 | + | CGACGGGGAGAGCCGUGGGA | 20 | 2834 |
| BCL11A-2350 | + | CGCGGCGACGGGGAGAGCCG | 20 | 2835 |
| BCL11A-2351 | + | CCGCGGCGACGGGGAGAGCC | 20 | 2836 |
| BCL11A-2352 | + | AGAGGGGCCGCGGCGACGGG | 20 | 2837 |
| BCL11A-2353 | + | GGAGAGGGGCCGCGGCGACG | 20 | 2838 |
| BCL11A-2354 | + | GGGAGAGGGGCCGCGGCGAC | 20 | 2839 |
| BCL11A-2355 | + | CGGGAGAGGGGCCGCGGCGA | 20 | 2840 |
| BCL11A-2356 | + | UCGGGAGAGGGGCCGCGGCG | 20 | 2841 |
| BCL11A-2357 | + | UGAGUCCGCGGAGUCGGGAG | 20 | 2842 |
| BCL11A-2358 | + | CUGAGUCCGCGGAGUCGGGA | 20 | 2843 |
| BCL11A-2359 | + | UCCUGAGUCCGCGGAGUCGG | 20 | 2844 |
| BCL11A-2360 | + | GCUCCUGAGUCCGCGGAGUC | 20 | 2845 |
| BCL11A-2361 | + | CGCUCCUGAGUCCGCGGAGU | 20 | 2846 |
| BCL11A-2362 | + | GCGCUCCUGAGUCCGCGGAG | 20 | 2847 |
| BCL11A-2363 | + | CCCCGGCGCUCCUGAGUCCG | 20 | 2848 |
| BCL11A-2364 | + | CCCCCGGCGCUCCUGAGUCC | 20 | 2849 |
| BCL11A-2365 | + | GAAAGGGGCCCCCGGCGCUC | 20 | 2850 |
| BCL11A-2366 | + | GAGAAAGUGGCACUGUGGAA | 20 | 2851 |
| BCL11A-2367 | + | UGAGAAAGUGGCACUGUGGA | 20 | 2852 |
| BCL11A-2368 | + | AUAGUGAGAAAGUGGCACUG | 20 | 2853 |
| BCL11A-2369 | + | AAUAGUGAGAAAGUGGCACU | 20 | 2854 |
| BCL11A-2370 | + | GUAGUCAUCCCCACAAUAGU | 20 | 2855 |
| BCL11A-2371 | + | AAGUAGUCAUCCCCACAAUA | 20 | 2856 |
| BCL11A-2372 | + | ACGGUCAAGUGUGCAGCGGG | 20 | 2857 |
| BCL11A-2373 | + | CACGGUCAAGUGUGCAGCGG | 20 | 2858 |
| BCL11A-2374 | + | CUCACGGUCAAGUGUGCAGC | 20 | 2859 |
| BCL11A-2375 | + | GCUCACGGUCAAGUGUGCAG | 20 | 2860 |
| BCL11A-2376 | + | CGCUCACGGUCAAGUGUGCA | 20 | 2861 |
| BCL11A-2377 | + | AAAAGAGGUGAGACUGGCUU | 20 | 2862 |
| BCL11A-2378 | + | GAUUCCCGGGGAGAAAAGAG | 20 | 2863 |
| BCL11A-2379 | + | AAAACGAUUCCCGGGGAGAA | 20 | 2864 |
| BCL11A-2380 | + | UCUAAAAAACGAUUCCCGGG | 20 | 2865 |
| BCL11A-2381 | + | AGUCUAAAAAACGAUUCCCG | 20 | 2866 |
| BCL11A-2382 | + | AAGUCUAAAAAACGAUUCCC | 20 | 2867 |
| BCL11A-2383 | + | CAAGUCUAAAAAACGAUUCC | 20 | 2868 |
| BCL11A-2384 | + | ACAAGUCUAAAAAACGAUUC | 20 | 2869 |
| BCL11A-2385 | + | AAUGGGGGGGUAGGGAGGGA | 20 | 2870 |
| BCL11A-2386 | + | AGAAAAUGGGGGGGUAGGGA | 20 | 2871 |
| BCL11A-2387 | + | AAGAAAAUGGGGGGGUAGGG | 20 | 2872 |
| BCL11A-2388 | + | UAAGAAAAUGGGGGGGUAGG | 20 | 2873 |
| BCL11A-2389 | + | CGUAAGAAAAUGGGGGGGUA | 20 | 2874 |
| BCL11A-2390 | + | CCGUAAGAAAAUGGGGGGGU | 20 | 2875 |
| BCL11A-2391 | + | ACCGUAAGAAAAUGGGGGGG | 20 | 2876 |
| BCL11A-2392 | + | CACUCACCGUAAGAAAAUGG | 20 | 2877 |
| BCL11A-2393 | + | CCACUCACCGUAAGAAAAUG | 20 | 2878 |
| BCL11A-2394 | + | CCCACUCACCGUAAGAAAAU | 20 | 2879 |
| BCL11A-2395 | + | UCCCACUCACCGUAAGAAAA | 20 | 2880 |
| BCL11A-2396 | + | UUCCCACUCACCGUAAGAAA | 20 | 2881 |
| BCL11A-2397 | + | GGUUGCUUCCCACUCACCGU | 20 | 2882 |
| BCL11A-2398 | + | GGUGGGAGCUGGUGGGGAAA | 20 | 2883 |
| BCL11A-2399 | + | GGGUGGGAGCUGGUGGGGAA | 20 | 2884 |
| BCL11A-2400 | + | GGGGUGGGAGCUGGUGGGGA | 20 | 2885 |
| BCL11A-2401 | + | CCUGGGGGUGGGAGCUGGUG | 20 | 2886 |
| BCL11A-2402 | + | ACCUGGGGGUGGGAGCUGGU | 20 | 2887 |
| BCL11A-2403 | + | AACCUGGGGGUGGGAGCUGG | 20 | 2888 |
| BCL11A-2404 | + | AAACCUGGGGGUGGGAGCUG | 20 | 2889 |
| BCL11A-2405 | + | UCACAUGCAAACCUGGGGGU | 20 | 2890 |
| BCL11A-2406 | + | CUCACAUGCAAACCUGGGGG | 20 | 2891 |
| BCL11A-2407 | + | ACUCACAUGCAAACCUGGGG | 20 | 2892 |
| BCL11A-2408 | + | AACAACUCACAUGCAAACCU | 20 | 2893 |
| BCL11A-2409 | + | GAACAACUCACAUGCAAACC | 20 | 2894 |
| BCL11A-2410 | + | CGAACAACUCACAUGCAAAC | 20 | 2895 |
| BCL11A-2411 | + | UAAUGAACAAUGCUAAGGUU | 20 | 2896 |
| BCL11A-2412 | + | CCCGCCAGUUUUGCAAAAUA | 20 | 2897 |
| BCL11A-2413 | + | CUUUAUUUCUCUUUUCGAAA | 20 | 2898 |
| BCL11A-2414 | + | GCUUUAUUUCUCUUUUCGAA | 20 | 2899 |
| BCL11A-2415 | + | CCGCCGCUUUAUUUCUCUUU | 20 | 2900 |
| BCL11A-2416 | + | CCAUUGCCGUGUAUGCACUU | 20 | 2901 |
| BCL11A-2417 | + | GAAAAAACCCUCAUCCCAUC | 20 | 2902 |
| BCL11A-2418 | + | GGAAAAAACCCUCAUCCCAU | 20 | 2903 |
| BCL11A-2419 | + | CGAGGUAAAAGAGAUAAAGG | 20 | 2904 |
| BCL11A-2420 | + | UCGAGGUAAAAGAGAUAAAG | 20 | 2905 |
| BCL11A-2421 | + | GUCGAGGUAAAAGAGAUAAA | 20 | 2906 |
| BCL11A-2422 | + | AGUCGAGGUAAAAGAGAUAA | 20 | 2907 |
| BCL11A-2423 | + | GAGUCGAGGUAAAAGAGAUA | 20 | 2908 |
| BCL11A-2424 | + | ACCUCCGAGAGUCGAGGUAA | 20 | 2909 |
| BCL11A-2425 | + | ACGAGAAAAACCUCCGAGAG | 20 | 2910 |
| BCL11A-2426 | + | UUUUCACGAGAAAAACCUCC | 20 | 2911 |
| BCL11A-2427 | + | AUUUUUCACGAGAAAAACCU | 20 | 2912 |
| BCL11A-2428 | + | UGCAUUUUUAAAUUUUUCAC | 20 | 2913 |
| BCL11A-2429 | + | CAUGCAUUUUUAAAUUUUUC | 20 | 2914 |
| BCL11A-2430 | + | AGCAAAAGCGAGGGGGAGAG | 20 | 2915 |
| BCL11A-2431 | + | AAGCAAAAGCGAGGGGGAGA | 20 | 2916 |
| BCL11A-2432 | + | AGAAGCAAAAGCGAGGGGGA | 20 | 2917 |
| BCL11A-2433 | + | CUAGAAGCAAAAGCGAGGGG | 20 | 2918 |
| BCL11A-2434 | + | GACUAGAAGCAAAAGCGAGG | 20 | 2919 |
| BCL11A-2435 | + | GGACUAGAAGCAAAAGCGAG | 20 | 2920 |
| BCL11A-2436 | + | AGGACUAGAAGCAAAAGCGA | 20 | 2921 |
| BCL11A-2437 | + | CAGGACUAGAAGCAAAAGCG | 20 | 2922 |
| BCL11A-2438 | + | GCAGGACUAGAAGCAAAAGC | 20 | 2923 |
| BCL11A-2439 | + | GCGCAGGACUAGAAGCAAAA | 20 | 2924 |
| BCL11A-2440 | + | AUCACGAGAGCGCGCAGGAC | 20 | 2925 |
| BCL11A-2441 | + | UUAAUAAUCACGAGAGCGCG | 20 | 2926 |
| BCL11A-2442 | + | UAAUAAUUAUUAAUAAUCAC | 20 | 2927 |
| BCL11A-2443 | + | AAUAAUAAUUAUUAAUAAUC | 20 | 2928 |
| BCL11A-2444 | + | ACCUCAGAGGCAGCAAG | 17 | 2929 |
| BCL11A-2445 | + | GAACCUCAGAGGCAGCA | 17 | 2930 |
| BCL11A-2446 | + | CGAACCUCAGAGGCAGC | 17 | 2931 |
| BCL11A-2447 | + | CCCUCCCGACCGAACCU | 17 | 2932 |
| BCL11A-2448 | + | CUGCCCUCCCCUCCCGA | 17 | 2933 |
| BCL11A-2449 | + | GCCCGGACUGCUGCCUC | 17 | 2934 |
| BCL11A-2450 | + | AGAGGGAGGGAGGGAGC | 17 | 2935 |
| BCL11A-2451 | + | CGCGGGAGAGGGAGGGA | 17 | 2936 |
| BCL11A-2452 | + | ACGCGGGAGAGGGAGGG | 17 | 2937 |
| BCL11A-2453 | + | CACGCGGGAGAGGGAGG | 17 | 2938 |
| BCL11A-2454 | + | GGCACGCGGGAGAGGGA | 17 | 2939 |
| BCL11A-2455 | + | GGGCACGCGGGAGAGGG | 17 | 2940 |
| BCL11A-2456 | + | GGGGCACGCGGGAGAGG | 17 | 2941 |
| BCL11A-2457 | + | CGGGGGCACGCGGGAGA | 17 | 2942 |
| BCL11A-2458 | + | CCGGGGGCACGCGGGAG | 17 | 2943 |
| BCL11A-2459 | + | GCCGGGGGCACGCGGGA | 17 | 2944 |
| BCL11A-2460 | + | CGGCCGGGGGCACGCGG | 17 | 2945 |
| BCL11A-2461 | + | GGCGGCCGGGGGCACGC | 17 | 2946 |
| BCL11A-2462 | + | AGGCGGCCGGGGGCACG | 17 | 2947 |
| BCL11A-2463 | + | GAGGCGGCCGGGGGCAC | 17 | 2948 |
| BCL11A-2464 | + | CGGGGGAGGAGGCGGCC | 17 | 2949 |
| BCL11A-2465 | + | CCGGGGGAGGAGGCGGC | 17 | 2950 |
| BCL11A-2466 | + | GCCGGGGGAGGAGGCGG | 17 | 2951 |
| BCL11A-2467 | + | GGAGCUAGGGCCGGGGG | 17 | 2952 |
| BCL11A-2468 | + | AGGAGCUAGGGCCGGGG | 17 | 2953 |
| BCL11A-2469 | + | GCAGGAGCUAGGGCCGG | 17 | 2954 |
| BCL11A-2470 | + | GGCAGGAGCUAGGGCCG | 17 | 2955 |
| BCL11A-2471 | + | GGGCAGGAGCUAGGGCC | 17 | 2956 |
| BCL11A-2472 | + | AGGGCAGGAGCUAGGGC | 17 | 2957 |
| BCL11A-2473 | + | AAGGGCAGGAGCUAGGG | 17 | 2958 |
| BCL11A-2474 | + | CGCCGAAGGGCAGGAGC | 17 | 2959 |
| BCL11A-2475 | + | CGCCGCCGCCGAAGGGC | 17 | 2960 |
| BCL11A-2476 | + | CCGCCGCCGCCGAAGGG | 17 | 2961 |
| BCL11A-2477 | + | CGCCGCCGCCGCCGCCG | 17 | 2962 |
| BCL11A-2478 | + | CGCCGCCGCCGCCGCCG | 17 | 2963 |
| BCL11A-2479 | + | UUUUGUUCCGGCCAGAG | 17 | 2964 |
| BCL11A-2480 | + | CCGCCUUUUGUUCCGGC | 17 | 2965 |
| BCL11A-2481 | + | GUGGGACCGGGAAGGAC | 17 | 2966 |
| BCL11A-2482 | + | CGUGGGACCGGGAAGGA | 17 | 2967 |
| BCL11A-2483 | + | CCGUGGGACCGGGAAGG | 17 | 2968 |
| BCL11A-2484 | + | AGAGCCGUGGGACCGGG | 17 | 2969 |
| BCL11A-2485 | + | GGGAGAGCCGUGGGACC | 17 | 2970 |
| BCL11A-2486 | + | GGGGAGAGCCGUGGGAC | 17 | 2971 |
| BCL11A-2487 | + | CGGGGAGAGCCGUGGGA | 17 | 2972 |
| BCL11A-2488 | + | GGCGACGGGGAGAGCCG | 17 | 2973 |
| BCL11A-2489 | + | CGGCGACGGGGAGAGCC | 17 | 2974 |
| BCL11A-2490 | + | GGGGCCGCGGCGACGGG | 17 | 2975 |
| BCL11A-2491 | + | GAGGGGCCGCGGCGACG | 17 | 2976 |
| BCL11A-2492 | + | AGAGGGGCCGCGGCGAC | 17 | 2977 |
| BCL11A-2493 | + | GAGAGGGGCCGCGGCGA | 17 | 2978 |
| BCL11A-2494 | + | GGAGAGGGGCCGCGGCG | 17 | 2979 |
| BCL11A-2495 | + | GUCCGCGGAGUCGGGAG | 17 | 2980 |
| BCL11A-2496 | + | AGUCCGCGGAGUCGGGA | 17 | 2981 |
| BCL11A-2497 | + | UGAGUCCGCGGAGUCGG | 17 | 2982 |
| BCL11A-2498 | + | CCUGAGUCCGCGGAGUC | 17 | 2983 |
| BCL11A-2499 | + | UCCUGAGUCCGCGGAGU | 17 | 2984 |
| BCL11A-2500 | + | CUCCUGAGUCCGCGGAG | 17 | 2985 |
| BCL11A-2501 | + | CGGCGCUCCUGAGUCCG | 17 | 2986 |
| BCL11A-2502 | + | CCGGCGCUCCUGAGUCC | 17 | 2987 |
| BCL11A-2503 | + | AGGGGCCCCCGGCGCUC | 17 | 2988 |
| BCL11A-2504 | + | AAAGUGGCACUGUGGAA | 17 | 2989 |
| BCL11A-2505 | + | GAAAGUGGCACUGUGGA | 17 | 2990 |
| BCL11A-2506 | + | GUGAGAAAGUGGCACUG | 17 | 2991 |
| BCL11A-2507 | + | AGUGAGAAAGUGGCACU | 17 | 2992 |
| BCL11A-2508 | + | GUCAUCCCCACAAUAGU | 17 | 2993 |
| BCL11A-2509 | + | UAGUCAUCCCCACAAUA | 17 | 2994 |
| BCL11A-2510 | + | GUCAAGUGUGCAGCGGG | 17 | 2995 |
| BCL11A-2511 | + | GGUCAAGUGUGCAGCGG | 17 | 2996 |
| BCL11A-2512 | + | ACGGUCAAGUGUGCAGC | 17 | 2997 |
| BCL11A-2513 | + | CACGGUCAAGUGUGCAG | 17 | 2998 |
| BCL11A-2514 | + | UCACGGUCAAGUGUGCA | 17 | 2999 |
| BCL11A-2515 | + | AGAGGUGAGACUGGCUU | 17 | 3000 |
| BCL11A-2516 | + | UCCCGGGGAGAAAAGAG | 17 | 3001 |
| BCL11A-2517 | + | ACGAUUCCCGGGGAGAA | 17 | 3002 |
| BCL11A-2518 | + | AAAAAACGAUUCCCGGG | 17 | 3003 |
| BCL11A-2519 | + | CUAAAAAACGAUUCCCG | 17 | 3004 |
| BCL11A-2520 | + | UCUAAAAAACGAUUCCC | 17 | 3005 |
| BCL11A-2521 | + | GUCUAAAAAACGAUUCC | 17 | 3006 |
| BCL11A-2522 | + | AGUCUAAAAAACGAUUC | 17 | 3007 |
| BCL11A-2523 | + | GGGGGGGUAGGGAGGGA | 17 | 3008 |
| BCL11A-2524 | + | AAAUGGGGGGGUAGGGA | 17 | 3009 |
| BCL11A-2525 | + | AAAAUGGGGGGGUAGGG | 17 | 3010 |
| BCL11A-2526 | + | GAAAAUGGGGGGGUAGG | 17 | 3011 |
| BCL11A-2527 | + | AAGAAAAUGGGGGGGUA | 17 | 3012 |
| BCL11A-2528 | + | UAAGAAAAUGGGGGGGU | 17 | 3013 |
| BCL11A-2529 | + | GUAAGAAAAUGGGGGGG | 17 | 3014 |
| BCL11A-2530 | + | UCACCGUAAGAAAAUGG | 17 | 3015 |
| BCL11A-2531 | + | CUCACCGUAAGAAAAUG | 17 | 3016 |
| BCL11A-2532 | + | ACUCACCGUAAGAAAAU | 17 | 3017 |
| BCL11A-2533 | + | CACUCACCGUAAGAAAA | 17 | 3018 |
| BCL11A-2534 | + | CCACUCACCGUAAGAAA | 17 | 3019 |
| BCL11A-2535 | + | UGCUUCCCACUCACCGU | 17 | 3020 |
| BCL11A-2536 | + | GGGAGCUGGUGGGGAAA | 17 | 3021 |
| BCL11A-2537 | + | UGGGAGCUGGUGGGGAA | 17 | 3022 |
| BCL11A-2538 | + | GUGGGAGCUGGUGGGGA | 17 | 3023 |
| BCL11A-2539 | + | GGGGGUGGGAGCUGGUG | 17 | 3024 |
| BCL11A-2540 | + | UGGGGGUGGGAGCUGGU | 17 | 3025 |
| BCL11A-2541 | + | CUGGGGGUGGGAGCUGG | 17 | 3026 |
| BCL11A-2542 | + | CCUGGGGGUGGGAGCUG | 17 | 3027 |
| BCL11A-2543 | + | CAUGCAAACCUGGGGGU | 17 | 3028 |
| BCL11A-2544 | + | ACAUGCAAACCUGGGGG | 17 | 3029 |
| BCL11A-2545 | + | CACAUGCAAACCUGGGG | 17 | 3030 |
| BCL11A-2546 | + | AACUCACAUGCAAACCU | 17 | 3031 |
| BCL11A-2547 | + | CAACUCACAUGCAAACC | 17 | 3032 |
| BCL11A-2548 | + | ACAACUCACAUGCAAAC | 17 | 3033 |
| BCL11A-2549 | + | UGAACAAUGCUAAGGUU | 17 | 3034 |
| BCL11A-2550 | + | GCCAGUUUUGCAAAAUA | 17 | 3035 |
| BCL11A-2551 | + | UAUUUCUCUUUUCGAAA | 17 | 3036 |
| BCL11A-2552 | + | UUAUUUCUCUUUUCGAA | 17 | 3037 |
| BCL11A-2553 | + | CCGCUUUAUUUCUCUUU | 17 | 3038 |
| BCL11A-2554 | + | UUGCCGUGUAUGCACUU | 17 | 3039 |
| BCL11A-2555 | + | AAAACCCUCAUCCCAUC | 17 | 3040 |
| BCL11A-2556 | + | AAAAACCCUCAUCCCAU | 17 | 3041 |
| BCL11A-2557 | + | GGUAAAAGAGAUAAAGG | 17 | 3042 |
| BCL11A-2558 | + | AGGUAAAAGAGAUAAAG | 17 | 3043 |
| BCL11A-2559 | + | GAGGUAAAAGAGAUAAA | 17 | 3044 |
| BCL11A-2560 | + | CGAGGUAAAAGAGAUAA | 17 | 3045 |
| BCL11A-2561 | + | UCGAGGUAAAAGAGAUA | 17 | 3046 |
| BCL11A-2562 | + | UCCGAGAGUCGAGGUAA | 17 | 3047 |
| BCL11A-2563 | + | AGAAAAACCUCCGAGAG | 17 | 3048 |
| BCL11A-2564 | + | UCACGAGAAAAACCUCC | 17 | 3049 |
| BCL11A-2565 | + | UUUCACGAGAAAAACCU | 17 | 3050 |
| BCL11A-2566 | + | AUUUUUAAAUUUUUCAC | 17 | 3051 |
| BCL11A-2567 | + | GCAUUUUUAAAUUUUUC | 17 | 3052 |
| BCL11A-2568 | + | AAAAGCGAGGGGGAGAG | 17 | 3053 |
| BCL11A-2569 | + | CAAAAGCGAGGGGGAGA | 17 | 3054 |
| BCL11A-2570 | + | AGCAAAAGCGAGGGGGA | 17 | 3055 |
| BCL11A-2571 | + | GAAGCAAAAGCGAGGGG | 17 | 3056 |
| BCL11A-2572 | + | UAGAAGCAAAAGCGAGG | 17 | 3057 |
| BCL11A-2573 | + | CUAGAAGCAAAAGCGAG | 17 | 3058 |
| BCL11A-2574 | + | ACUAGAAGCAAAAGCGA | 17 | 3059 |
| BCL11A-2575 | + | GACUAGAAGCAAAAGCG | 17 | 3060 |
| BCL11A-2576 | + | GGACUAGAAGCAAAAGC | 17 | 3061 |
| BCL11A-2577 | + | CAGGACUAGAAGCAAAA | 17 | 3062 |
| BCL11A-2578 | + | ACGAGAGCGCGCAGGAC | 17 | 3063 |
| BCL11A-2579 | + | AUAAUCACGAGAGCGCG | 17 | 3064 |
| BCL11A-2580 | + | UAAUUAUUAAUAAUCAC | 17 | 3065 |
| BCL11A-2581 | + | AAUAAUUAUUAAUAAUC | 17 | 3066 |

[0994] Table 3C provides exemplary targeting domains for repressing (i.e., knocking down or decreasing) expression of the BCL11A gene. Any of the targeting domains in the table can be used with an N. meningitidis eiCas9 molecule to cause a steric block in the promoter region to block transcription elongation resulting in the repression of the BCL11A gene. Any of the targeting domains in the table can be used with an N. meningitidis eiCas9 fused to a transcriptional repressor to decrease transcription and therefore downregulate gene expression.

TABLE 3C
N. meningitidis gRNA targets
for BCL11A knockdown

| | | | Target | SEQ |
|---|---|---|---|---|
| | DNA | | Site | ID |
| gRNA Name | Strand | Targeting Domain | Length | NO |
| BCL11A-2582 | − | GCUUCUAGUCCUGCGCGCUC | 20 | 3067 |
| BCL11A-2583 | − | UCUAGUCCUGCGCGCUC | 17 | 3068 |
| BCL11A-2584 | + | UUUAGACUUGUACUCACUCC | 20 | 3069 |
| BCL11A-2585 | + | CAUUCCUUUUCGAAAAGAGA | 20 | 3070 |
| BCL11A-2586 | + | UUUAGACUUGUACUCAC | 17 | 3071 |
| BCL11A-2587 | + | CAUUCCUUUUCGAAAAG | 17 | 3072 |

[0995] Table 4A provides exemplary targeting domains for knocking out the BCL11A gene by targeting the early coding sequence the BCL11A gene selected according to first tier parameters. The targeting domains bind within first 500 bp of coding sequence downstream of start codon, good orthogonality, start with G. It is contemplated herein that the targeting domain hybridizes to the target domain through complementary base pairing. Any of the targeting domains in the table can be used with a S. pyogenes Cas9 molecule that generates a double strand break (Cas9 nuclease) or a single-strand break (Cas9 nickase). In an embodiment, dual targeting is used to create two double strand breaks to remove the enhancer region in the BCL11A gene, e.g., the first gRNA is used to target upstream (i.e., 5′) of the enhancer region in the BCL11A gene and the second gRNA is used to target downstream (i.e., 3′) of the enhancer region in the BCL11A gene.

[0996] Any of the targeting domains in the table can be used with a S. pyogenes Cas9 (nickase) molecule to generate a single strand break. In an embodiment, dual targeting is used to create two nicks on opposite DNA strands by using S. pyogenes Cas9 nickases with two targeting domains that are complementary to opposite DNA strands, e.g., a gRNA comprising any minus strand targeting domain may be paired any gRNA comprising a plus strand targeting domain provided that the two gRNAs are oriented on the DNA such that PAMs face outward and the distance between the 5′ ends of the gRNAs is 0-50 bp. Exemplary gRNA pairs are: BCL11A-2607 and BCL11A-2593, BCL11A-2607 and BCL11A-2598. BCL11A-264 and BCL11A-2593, BCL11A-2614 and BCL11A-2598, BCL11A-2589 and BCL11A-2664, BCL11A-2589 and BCL11A-2666, BCL11A-2596 and BCL11A-2664, BCL11A-2596 and BCL11A-2666, BCL11A-2603 and BCL11A-2664, of BCL11A-2603 and BCL11A-2666.

[0997] In an embodiment, four gRNAs (e.g., two pairs) are used to target four Cas9 nickases to create four nicks to remove the enhancer region in the BCL11A gene, e.g., the first pair of gRNAs are used to target upstream (i.e., 5′) of the enhancer region in the BCL11A gene and the second pair of gRNAs are used to target downstream (i.e., 3′) of the enhancer region in the BCL11A gene. For example, gRNA pairs that target upstream (i.e., 5′) of the enhancer region in the BCL11A gene (e.g., 2607 and BCL11A-2593, BCL11A-2607 and BCL11A-2598, BCL11A-264 and BCL11A-2593, or BCL11A-2614 and BCL11A-2598) can be paired with gRNA pairs that target downstream (i.e., 3′) of the enhancer region in the BCL11A gene (e.g., BCL11A-2589 and BCL11A-2664, BCL11A-2589 and BCL11A-2666, BCL11A-2596 and BCL11A-2664, BCL11A-2596 and BCL11A-2666, BCL11A-2603 and BCL11A-2664, of BCL11A-2603 and BCL11A-2666).

TABLE 4A
1st Tier

| | | | Target | SEQ |
|---|---|---|---|---|
| | DNA | | Site | ID |
| gRNA Name | Strand | Targeting Domain | Length | NO |
| BCL11A-2588 | + | GAGCUCCAUGUGCAGAACGA | 20 | 3073 |
| BCL11A-2589 | + | GAGCUCCCAACGGGCCG | 17 | 3074 |
| BCL11A-2590 | − | GAGUGCAGAAUAUGCCCCGC | 20 | 3075 |
| BCL11A-2591 | + | GAUAAACAAUCGUCAUCCUC | 20 | 3076 |
| BCL11A-2592 | + | GAUGCCAACCUCCACGGGAU | 20 | 3077 |
| BCL11A-2593 | − | GCAGAAUAUGCCCCGCA | 17 | 3078 |
| BCL11A-2594 | − | GCAUCCAAUCCCGUGGAGGU | 20 | 3079 |
| BCL11A-2595 | + | GCCAACCUCCACGGGAU | 17 | 3080 |
| BCL11A-2596 | + | GCUCCCAACGGGCCGUGGUC | 20 | 3081 |
| BCL11A-2597 | − | GGAGCUCUAAUCCCCACGCC | 20 | 3082 |

[0998] Table 4B provides exemplary targeting domains for knocking out the BCL11A gene by targeting the early coding sequence the BCL11A gene selected according to second tier parameters. The targeting domains bind within first 500 bp of coding sequence downstream of start codon, good orthogonality, and do not start with G. It is contemplated herein that the targeting domain hybridizes to the target domain through complementary base pairing. Any of the targeting domains in the table can be used with a S. pyogenes Cas9 molecule that generates a double strand break (Cas9 nuclease) or a single-strand break (Cas9 nickase). In an embodiment, dual targeting is used to create two double strand breaks to remove the enhancer region in the BCL11A gene, e.g., the first gRNA is used to target upstream (i.e., 5′) of the enhancer region in the BCL11A gene and the second gRNA is used to target downstream (i.e., 3′) of the enhancer region in the BCL11A gene.

[0999] Any of the targeting domains in the table can be used with a S. pyogenes Cas9 (nickase) molecule to generate a single strand break. In an embodiment, dual targeting is used to create two nicks on opposite DNA strands by using S. pyogenes Cas9 nickases with two targeting domains that are complementary to opposite DNA strands, e.g., a gRNA comprising any minus strand targeting domain may be paired any gRNA comprising a plus strand targeting domain provided that the two gRNAs are oriented on the DNA such that PAMs face outward and the distance between the 5′ ends of the gRNAs is 0-50 bp.

[1000] In an embodiment, four gRNAs (e.g., two pairs) are used to target four Cas9 nickases to create four nicks to remove the enhancer region in the BCL11A gene, e.g., the first pair of gRNAs are used to target upstream (i.e., 5′) of the enhancer region in the BCL11A gene and the second pair of gRNAs are used to target downstream (i.e., 3′) of the enhancer region in the BCL11A gene.

TABLE 4B
2nd Tier

| | | | Target | SEQ |
|---|---|---|---|---|
| | DNA | | Site | ID |
| gRNA Name | Strand | Targeting Domain | Length | NO |
| BCL11A-2598 | − | AGCAUCCAAUCCCGUGG | 17 | 3083 |
| BCL11A-2599 | − | AGUGCAGAAUAUGCCCCGCA | 20 | 3084 |
| BCL11A-2600 | − | AUGUCUCGCCGCAAGCA | 17 | 3085 |
| BCL11A-2601 | + | AUUCCCGUUUGCUUAAGUGC | 20 | 3086 |
| BCL11A-2602 | + | CAUCCUCUGGCGUGACC | 17 | 3087 |
| BCL11A-2603 | + | CCCAACGGGCCGUGGUC | 17 | 3088 |
| BCL11A-2604 | + | CCCCCAAUGGGAAGUUCAUC | 20 | 3089 |
| BCL11A-2605 | + | CCCGUUUGCUUAAGUGC | 17 | 3090 |
| BCL11A-2606 | + | CGUCAUCCUCUGGCGUGACC | 20 | 3091 |
| BCL11A-2607 | + | UCAUCUCGAUUGGUGAA | 17 | 3092 |
| BCL11A-2608 | − | UCCAAUCCCGUGGAGGU | 17 | 3093 |
| BCL11A-2609 | + | UCCCGUUUGCUUAAGUGCUG | 20 | 3094 |
| BCL11A-2610 | − | UGAACCAGACCACGGCCCGU | 20 | 3095 |
| BCL11A-2611 | − | UGCAGAAUAUGCCCCGC | 17 | 3096 |
| BCL11A-2612 | − | UGGCAUCCAGGUCACGCCAG | 20 | 3097 |
| BCL11A-2613 | − | UUAUCAACGUCAUCUAG | 17 | 3098 |
| BCL11A-2614 | + | UUCAUCUCGAUUGGUGA | 17 | 3099 |

[1001] Table 4C provides exemplary targeting domains for knocking out the BCL11A gene by targeting the early coding sequence the BCL11A gene selected according to third tier parameters. The targeting domains bind within first 500 bp of coding sequence downstream of start codon and start with G. It is contemplated herein that the targeting domain hybridizes to the target domain through complementary base pairing. Any of the targeting domains in the table can be used with a S. pyogenes Cas9 molecule that generates a double strand break (Cas9 nuclease) or a single-strand break (Cas9 nickase). In an embodiment, dual targeting is used to create two double strand breaks to remove the enhancer region in the BCL11A gene, e.g., the first gRNA is used to target upstream (i.e., 5′) of the enhancer region in the BCL11A gene and the second gRNA is used to target downstream (i.e., 3′) of the enhancer region in the BCL11A gene.

[1002] Any of the targeting domains in the table can be used with a S. pyogenes Cas9 (nickase) molecule to generate a single strand break. In an embodiment, dual targeting is used to create two nicks on opposite DNA strands by using S. pyogenes Cas9 nickases with two targeting domains that are complementary to opposite DNA strands, e.g., a gRNA comprising any minus strand targeting domain may be paired any gRNA comprising a plus strand targeting domain provided that the two gRNAs are oriented on the DNA such that PAMs face outward and the distance between the 5′ ends of the gRNAs is 0-50 bp.

[1003] In an embodiment, four gRNAs (e.g., two pairs) are used to target four Cas9 nickases to create four nicks to remove the enhancer region in the BCL11A gene, e.g., the first pair of gRNAs are used to target upstream (i.e., 5′) of the enhancer region in the BCL11A gene and the second pair of gRNAs are used to target downstream (i.e., 3′) of the enhancer region in the BCL11A gene.

TABLE 4C
3rd Tier

| | | | Target | SEQ |
|---|---|---|---|---|
| | DNA | | Site | ID |
| gRNA Name | Strand | Targeting Domain | Length | NO |
| BCL11A-2615 | − | GAAAAAAGCAUCCAAUCCCG | 20 | 3100 |
| BCL11A-2616 | − | GAACCAGACCACGGCCCGUU | 20 | 3101 |
| BCL11A-2617 | + | GACCUGGAUGCCAACCUCCA | 20 | 3102 |
| BCL11A-2618 | − | GAGCUCUAAUCCCCACGCCU | 20 | 3103 |
| BCL11A-2619 | − | GAUCAUGACCUCCUCACCUG | 20 | 3104 |
| BCL11A-2620 | − | GAUGAACUUCCCAUUGG | 17 | 3105 |
| BCL11A-2621 | − | GAUGAUGAACCAGACCA | 17 | 3106 |
| BCL11A-2622 | + | GAUGCUUUUUUCAUCUCGAU | 20 | 3107 |
| BCL11A-2623 | + | GCACUCAUCCCAGGCGU | 17 | 3108 |
| BCL11A-2624 | + | GCAUAUUCUGCACUCAUCCC | 20 | 3109 |
| BCL11A-2625 | − | GCCAGAUGAACUUCCCAUUG | 20 | 3110 |
| BCL11A-2626 | − | GCCCGUUGGGAGCUCCAGAA | 20 | 3111 |
| BCL11A-2627 | + | GCUAUGUGUUCCUGUUU | 17 | 3112 |
| BCL11A-2628 | + | GCUCCAUGUGCAGAACG | 17 | 3113 |
| BCL11A-2629 | − | GCUCUAAUCCCCACGCC | 17 | 3114 |
| BCL11A-2630 | + | GCUGGGGUUUGCCUUGCUUG | 20 | 3115 |
| BCL11A-2631 | + | GCUUUUUUCAUCUCGAU | 17 | 3116 |
| BCL11A-2632 | + | GGCACUGCCCACAGGUG | 17 | 3117 |
| BCL11A-2633 | + | GGCACUGCCCACAGGUGAGG | 20 | 3118 |
| BCL11A-2634 | − | GGCCCGUUGGGAGCUCCAGA | 20 | 3119 |
| BCL11A-2635 | + | GGGGUUUGCCUUGCUUG | 17 | 3120 |
| BCL11A-2636 | + | GUAAGAAUGGCUUCAAG | 17 | 3121 |
| BCL11A-2637 | + | GUGCAGAACGAGGGGAGGAG | 20 | 3122 |
| BCL11A-2638 | − | GUGCCAGAUGAACUUCCCAU | 20 | 3123 |
| BCL11A-2639 | + | GUUCAUCUGGCACUGCCCAC | 20 | 3124 |
| BCL11A-2640 | − | GUUGGGAGCUCCAGAAG | 17 | 3125 |

[1004] Table 4D provides exemplary targeting domains for knocking out the BCL11A gene by targeting the early coding sequence the BCL11A gene selected according to forth tier parameters. The targeting domains bind within first 500 bp of coding sequence downstream of start codon and do not start with G. It is contemplated herein that the targeting domain hybridizes to the target domain through complementary base pairing. Any of the targeting domains in the table can be used with a S. pyogenes Cas9 molecule that generates a double strand break (Cas9 nuclease) or a single-strand break (Cas9 nickase). In an embodiment, dual targeting is used to create two double strand breaks to remove the enhancer region in the BCL11A gene, e.g., the first gRNA is used to target upstream (i.e., 5′) of the enhancer region in the BCL11A gene and the second gRNA is used to target downstream (i.e., 3′) of the enhancer region in the BCL11A gene.

[1005] Any of the targeting domains in the table can be used with a S. pyogenes Cas9 (nickase) molecule to generate a single strand break. In an embodiment, dual targeting is used to create two nicks on opposite DNA strands by using S. pyogenes Cas9 nickases with two targeting domains that are complementary to opposite DNA strands, e.g., a gRNA comprising any minus strand targeting domain may be paired any gRNA comprising a plus strand targeting domain provided that the two gRNAs are oriented on the DNA such that PAMs face outward and the distance between the 5′ ends of the gRNAs is 0-50 bp.

[1006] In an embodiment, four gRNAs (e.g., two pairs) are used to target four Cas9 nickases to create four nicks to remove the enhancer region in the BCL11A gene, e.g., the first pair of gRNAs are used to target upstream (i.e., 5′) of the enhancer region in the BCL11A gene and the second pair of gRNAs are used to target downstream (i.e., 3′) of the enhancer region in the BCL11A gene.

TABLE 4D
4th Tier

| | | | Target | SEQ |
|---|---|---|---|---|
| | DNA | | Site | ID |
| gRNA Name | Strand | Targeting Domain | Length | NO |
| BCL11A-2641 | − | AAAAGCAUCCAAUCCCG | 17 | 3126 |
| BCL11A-2642 | − | AAAAGCAUCCAAUCCCGUGG | 20 | 3127 |
| BCL11A-2643 | + | AAAAUAAGAAUGUCCCCCAA | 20 | 3128 |
| BCL11A-2644 | + | AAACAAUCGUCAUCCUC | 17 | 3129 |
| BCL11A-2645 | − | AAACGGAAACAAUGCAA | 17 | 3130 |
| BCL11A-2646 | − | AAACUUCUGCACUGGAG | 17 | 3131 |
| BCL11A-2647 | + | AAAUAAGAAUGUCCCCCAAU | 20 | 3132 |
| BCL11A-2648 | − | AACCCCAGCACUUAAGCAAA | 20 | 3133 |
| BCL11A-2649 | + | AAGAAUGGCUUCAAGAGGCU | 20 | 3134 |
| BCL11A-2650 | + | AAUGGCUUCAAGAGGCU | 17 | 3135 |
| BCL11A-2651 | − | ACAGAUGAUGAACCAGACCA | 20 | 3136 |
| BCL11A-2652 | − | ACCAGACCACGGCCCGU | 17 | 3137 |
| BCL11A-2653 | − | ACCCCAGCACUUAAGCAAAC | 20 | 3138 |
| BCL11A-2654 | + | ACCUGGAUGCCAACCUCCAC | 20 | 3139 |
| BCL11A-2655 | + | ACUGCCCACAGGUGAGG | 17 | 3140 |
| BCL11A-2656 | + | AGAGCUCCAUGUGCAGAACG | 20 | 3141 |
| BCL11A-2657 | − | AGAUGAACUUCCCAUUG | 17 | 3142 |
| BCL11A-2658 | + | AGCUCCAUGUGCAGAACGAG | 20 | 3143 |
| BCL11A-2659 | − | AGGAAUUUGCCCCAAAC | 17 | 3144 |
| BCL11A-2660 | + | AGGAGGUCAUGAUCCCCUUC | 20 | 3145 |
| BCL11A-2661 | + | AGGUCAUGAUCCCCUUC | 17 | 3146 |
| BCL11A-2662 | − | AUAAACUUCUGCACUGG | 17 | 3147 |
| BCL11A-2663 | + | AUAAGAAUGUCCCCCAA | 17 | 3148 |
| BCL11A-2664 | − | AUCAUGACCUCCUCACCUGU | 20 | 3149 |
| BCL11A-2665 | + | AUCUCGAUUGGUGAAGGGGA | 20 | 3150 |
| BCL11A-2666 | − | AUGACCUCCUCACCUGU | 17 | 3151 |
| BCL11A-2667 | + | AUGUGCAGAACGAGGGG | 17 | 3152 |
| BCL11A-2668 | + | AUUGGUGAAGGGGAAGG | 17 | 3153 |
| BCL11A-2669 | − | CACAAACGGAAACAAUGCAA | 20 | 3154 |
| BCL11A-2670 | + | CACUCAUCCCAGGCGUG | 17 | 3155 |
| BCL11A-2671 | + | CAGAACGAGGGGAGGAG | 17 | 3156 |
| BCL11A-2672 | − | CAGAUGAACUUCCCAUU | 17 | 3157 |
| BCL11A-2673 | + | CAGCUUUUUCUAAGCAG | 17 | 3158 |
| BCL11A-2674 | − | CAUCCAGGUCACGCCAG | 17 | 3159 |
| BCL11A-2675 | + | CAUCUCGAUUGGUGAAG | 17 | 3160 |
| BCL11A-2676 | + | CAUCUGGCACUGCCCAC | 17 | 3161 |
| BCL11A-2677 | − | CAUGACCUCCUCACCUG | 17 | 3162 |
| BCL11A-2678 | + | CCAAUGGGAAGUUCAUC | 17 | 3163 |
| BCL11A-2679 | + | CCACAGCUUUUUCUAAGCAG | 20 | 3164 |
| BCL11A-2680 | − | CCAGACCACGGCCCGUU | 17 | 3165 |
| BCL11A-2681 | − | CCAGAUGAACUUCCCAU | 17 | 3166 |
| BCL11A-2682 | − | CCAGAUGAACUUCCCAUUGG | 20 | 3167 |
| BCL11A-2683 | − | CCAGCACUUAAGCAAAC | 17 | 3168 |
| BCL11A-2684 | − | CCCAGCACUUAAGCAAA | 17 | 3169 |
| BCL11A-2685 | + | CCCCUUCUGGAGCUCCCAAC | 20 | 3170 |
| BCL11A-2686 | − | CCCGUUGGGAGCUCCAGAAG | 20 | 3171 |
| BCL11A-2687 | − | CCGUUGGGAGCUCCAGA | 17 | 3172 |
| BCL11A-2688 | + | CCGUUUGCUUAAGUGCU | 17 | 3173 |
| BCL11A-2689 | − | CCUCUGCUUAGAAAAAGCUG | 20 | 3174 |
| BCL11A-2690 | + | CCUUCUGGAGCUCCCAA | 17 | 3175 |
| BCL11A-2691 | − | CGUGGAGGUUGGCAUCC | 17 | 3176 |
| BCL11A-2692 | − | CGUUGGGAGCUCCAGAA | 17 | 3177 |
| BCL11A-2693 | + | CGUUUGCUUAAGUGCUG | 17 | 3178 |
| BCL11A-2694 | + | CUAUGUGUUCCUGUUUG | 17 | 3179 |
| BCL11A-2695 | + | CUCCAUGUGCAGAACGA | 17 | 3180 |
| BCL11A-2696 | − | CUCUAAUCCCCACGCCU | 17 | 3181 |
| BCL11A-2697 | + | CUGCACUCAUCCCAGGCGUG | 20 | 3182 |
| BCL11A-2698 | + | CUGCUAUGUGUUCCUGUUUG | 20 | 3183 |
| BCL11A-2699 | − | CUGCUUAGAAAAAGCUG | 17 | 3184 |
| BCL11A-2700 | + | CUGGAGCUCCCAACGGGCCG | 20 | 3185 |
| BCL11A-2701 | + | CUGGAUGCCAACCUCCA | 17 | 3186 |
| BCL11A-2702 | + | CUUCUGGAGCUCCCAAC | 17 | 3187 |
| BCL11A-2703 | − | UAAACUUCUGCACUGGA | 17 | 3188 |
| BCL11A-2704 | + | UAAGAAUGUCCCCCAAU | 17 | 3189 |
| BCL11A-2705 | − | UAGAGGAAUUUGCCCCAAAC | 20 | 3190 |
| BCL11A-2706 | + | UAUUCUGCACUCAUCCC | 17 | 3191 |
| BCL11A-2707 | + | UCCAUGUGCAGAACGAG | 17 | 3192 |
| BCL11A-2708 | + | UCCAUGUGCAGAACGAGGGG | 20 | 3193 |
| BCL11A-2709 | − | UCCCCUCGUUCUGCACA | 17 | 3194 |
| BCL11A-2710 | + | UCCCCUUCUGGAGCUCCCAA | 20 | 3195 |
| BCL11A-2711 | − | UCCCGUGGAGGUUGGCAUCC | 20 | 3196 |
| BCL11A-2712 | − | UCCUCCCCUCGUUCUGCACA | 20 | 3197 |
| BCL11A-2713 | + | UCGAUUGGUGAAGGGGA | 17 | 3198 |
| BCL11A-2714 | + | UCGAUUGGUGAAGGGGAAGG | 20 | 3199 |
| BCL11A-2715 | + | UCUGCACUCAUCCCAGGCGU | 20 | 3200 |
| BCL11A-2716 | + | UCUGGCACUGCCCACAGGUG | 20 | 3201 |
| BCL11A-2717 | + | UCUGUAAGAAUGGCUUCAAG | 20 | 3202 |
| BCL11A-2718 | + | UGCACUCAUCCCAGGCG | 17 | 3203 |
| BCL11A-2719 | − | UGCCAGAUGAACUUCCCAUU | 20 | 3204 |
| BCL11A-2720 | + | UGCUAUGUGUUCCUGUU | 17 | 3205 |
| BCL11A-2721 | + | UGGAUGCCAACCUCCAC | 17 | 3206 |
| BCL11A-2722 | + | UGGUUCAUCAUCUGUAAGAA | 20 | 3207 |
| BCL11A-2723 | − | UGUUUAUCAACGUCAUCUAG | 20 | 3208 |
| BCL11A-2724 | − | UUAUUUUUAUCGAGCACAAA | 20 | 3209 |
| BCL11A-2725 | + | UUCAUCAUCUGUAAGAA | 17 | 3210 |
| BCL11A-2726 | + | UUCCCGUUUGCUUAAGUGCU | 20 | 3211 |
| BCL11A-2727 | + | UUCUGCACUCAUCCCAGGCG | 20 | 3212 |
| BCL11A-2728 | + | UUUCAUCUCGAUUGGUGAAG | 20 | 3213 |
| BCL11A-2729 | + | UUUUCAUCUCGAUUGGUGAA | 20 | 3214 |
| BCL11A-2730 | − | UUUUUAUCGAGCACAAA | 17 | 3215 |
| BCL11A-2731 | + | UUUUUCAUCUCGAUUGGUGA | 20 | 3216 |

[1007] Table 4E provides exemplary targeting domains for knocking out the BCL11A gene by targeting the early coding sequence the BCL11A gene selected according to fifth tier parameters. The targeting domains outside the first 500 bp of coding sequence downstream of start codon. It is contemplated herein that the targeting domain hybridizes to the target domain through complementary base pairing. Any of the targeting domains in the table can be used with a S. pyogenes Cas9 molecule that generates a double strand break (Cas9 nuclease) or a single-strand break (Cas9 nickase). In an embodiment, dual targeting is used to create two double strand breaks to remove the enhancer region in the BCL11A gene, e.g., the first gRNA is used to target upstream (i.e., 5′) of the enhancer region in the BCL11A gene and the second gRNA is used to target downstream (i.e., 3′) of the enhancer region in the BCL11A gene.

[1008] Any of the targeting domains in the table can be used with a S. pyogenes Cas9 (nickase) molecule to generate a single strand break. In an embodiment, dual targeting is used to create two nicks on opposite DNA strands by using S. pyogenes Cas9 nickases with two targeting domains that are complementary to opposite DNA strands, e.g., a gRNA comprising any minus strand targeting domain may be paired any gRNA comprising a plus strand targeting domain provided that the two gRNAs are oriented on the DNA such that PAMs face outward and the distance between the 5′ ends of the gRNAs is 0-50 bp.

[1009] In an embodiment, four gRNAs (e.g., two pairs) are used to target four Cas9 nickases to create four nicks to remove the enhancer region in the BCL11A gene, e.g., the first pair of gRNAs are used to target upstream (i.e., 5′) of the enhancer region in the BCL11A gene and the second pair of gRNAs are used to target downstream (i.e., 3′) of the enhancer region in the BCL11A gene.

TABLE 4E
5th Tier

| | | | Target | SEQ |
|---|---|---|---|---|
| | DNA | | Site | ID |
| gRNA Name | Strand | Targeting Domain | Length | NO |
| BCL11A-2732 | + | UAUGCGGUCCGACUCGC | 17 | 3217 |
| BCL11A-2733 | − | UCGGACCGCAUAGACGA | 17 | 3218 |
| BCL11A-2734 | + | UGGGUACUACGCCGAAU | 17 | 3219 |
| BCL11A-2735 | + | GGUACUACGCCGAAUGG | 17 | 3220 |
| BCL11A-2736 | − | UUGCGACGAAGACUCGG | 17 | 3221 |
| BCL11A-2737 | + | CUGGGUACUACGCCGAA | 17 | 3222 |
| BCL11A-2738 | + | GGGUACUACGCCGAAUG | 17 | 3223 |
| BCL11A-2739 | + | UCGGACUUGACCGUCAU | 17 | 3224 |
| BCL11A-2740 | + | AGGGAUACCAACCCGCG | 17 | 3225 |
| BCL11A-2741 | − | CGCGCUCAAGUCCGUGG | 17 | 3226 |
| BCL11A-2742 | + | CGAGGAGUGCUCCGACG | 17 | 3227 |
| BCL11A-2743 | + | GUCGGACUUGACCGUCA | 17 | 3228 |
| BCL11A-2744 | + | UGCACGCGUGGUCGCAC | 17 | 3229 |
| BCL11A-2745 | − | CAGCGCGCUCAAGUCCG | 17 | 3230 |
| BCL11A-2746 | + | UACCAACCCGCGGGGUC | 17 | 3231 |
| BCL11A-2747 | − | GUGGCUCGCCGGCUACG | 17 | 3232 |
| BCL11A-2748 | + | CGGACUUGACCGUCAUG | 17 | 3233 |
| BCL11A-2749 | − | CACCGCAUAGAGCGCCU | 17 | 3234 |
| BCL11A-2750 | − | GCGCAUCAAGCUCGAGA | 17 | 3235 |
| BCL11A-2751 | + | GGCCCGGACCACUAAUA | 17 | 3236 |
| BCL11A-2752 | + | GCCCGGACCACUAAUAU | 17 | 3237 |
| BCL11A-2753 | − | GCAUAAGCGCGGCCACC | 17 | 3238 |
| BCL11A-2754 | + | AGGCGCUCUAUGCGGUG | 17 | 3239 |
| BCL11A-2755 | − | ACGGUCAAGUCCGACGA | 17 | 3240 |
| BCL11A-2756 | + | CGAGGCCGACUCGCCCG | 17 | 3241 |
| BCL11A-2757 | − | ACCGCAUAGAGCGCCUG | 17 | 3242 |
| BCL11A-2758 | − | CGACCACGCGUGCACCC | 17 | 3243 |
| BCL11A-2759 | + | GUACACGUUCUCCGUGU | 17 | 3244 |
| BCL11A-2760 | − | CACUUGCGACGAAGACU | 17 | 3245 |
| BCL11A-2761 | − | CGGGUUGGUAUCCCUUC | 17 | 3246 |
| BCL11A-2762 | − | CUCGUCGGAGCACUCCU | 17 | 3247 |
| BCL11A-2763 | + | CCCGGACCACUAAUAUG | 17 | 3248 |
| BCL11A-2764 | + | UCGGUGGUGGACUAAAC | 17 | 3249 |
| BCL11A-2765 | + | CAGGCGCUCUAUGCGGU | 17 | 3250 |
| BCL11A-2766 | + | AAGGGAUACCAACCCGC | 17 | 3251 |
| BCL11A-2767 | + | GGCGCUCUAUGCGGUGG | 17 | 3252 |
| BCL11A-2768 | − | CCACCGCAUAGAGCGCC | 17 | 3253 |
| BCL11A-2769 | − | UACUCGCAGUGGCUCGC | 17 | 3254 |
| BCL11A-2770 | − | CGGGCGAGUCGGCCUCG | 17 | 3255 |
| BCL11A-2771 | + | UACACGUUCUCCGUGUU | 17 | 3256 |
| BCL11A-2772 | − | AGCACGCCCCAUAUUAG | 17 | 3257 |
| BCL11A-2773 | + | GAAGGGAUACCAACCCG | 17 | 3258 |
| BCL11A-2774 | + | UUGGGCAUCGCGGCCGG | 17 | 3259 |
| BCL11A-2775 | − | CCGGGCGAGUCGGCCUC | 17 | 3260 |
| BCL11A-2776 | + | GGUGGAGAGACCGUCGU | 17 | 3261 |
| BCL11A-2777 | + | GUUGGGCAUCGCGGCCG | 17 | 3262 |
| BCL11A-2778 | − | AGAACGUGUACUCGCAG | 17 | 3263 |
| BCL11A-2779 | + | ACCAACCCGCGGGGUCA | 17 | 3264 |
| BCL11A-2780 | − | CACGAGAACAGCUCGCG | 17 | 3265 |
| BCL11A-2781 | − | UAUUAGUGGUCCGGGCC | 17 | 3266 |
| BCL11A-2782 | + | CGUCGCAAGUGUCCCUG | 17 | 3267 |
| BCL11A-2783 | + | CCCGCGAGCUGUUCUCG | 17 | 3268 |
| BCL11A-2784 | + | UGCGCCGGUGCACCACC | 17 | 3269 |
| BCL11A-2785 | − | CUGCCCGACGUCAUGCA | 17 | 3270 |
| BCL11A-2786 | − | GACGAAGACUCGGUGGC | 17 | 3271 |
| BCL11A-2787 | − | CCUGCCCGACGUCAUGC | 17 | 3272 |
| BCL11A-2788 | + | AAGGGCGGCUUGCUACC | 17 | 3273 |
| BCL11A-2789 | − | GGGUGGACUACGGCUUC | 17 | 3274 |
| BCL11A-2790 | + | UCGCUGGUGCCGGGUUC | 17 | 3275 |
| BCL11A-2791 | − | GGCGAGAAGCAUAAGCG | 17 | 3276 |
| BCL11A-2792 | + | GGACUUGAGCGCGCUGC | 17 | 3277 |
| BCL11A-2793 | − | CUCGGUGGCCGGCGAGU | 17 | 3278 |
| BCL11A-2794 | + | CCCGAGGCCGACUCGCC | 17 | 3279 |
| BCL11A-2795 | − | CCCGGGCGAGUCGGCCU | 17 | 3280 |
| BCL11A-2796 | − | CCGCAUAGAGCGCCUGG | 17 | 3281 |
| BCL11A-2797 | + | UGUUGGGCAUCGCGGCC | 17 | 3282 |
| BCL11A-2798 | + | GUGUUGGGCAUCGCGGC | 17 | 3283 |
| BCL11A-2799 | + | UCUCUCGAUACUGAUCC | 17 | 3284 |
| BCL11A-2800 | − | ACCCGAGUGCCUUUGAC | 17 | 3285 |
| BCL11A-2801 | + | UCCGACGAGGAGGCAAA | 17 | 3286 |
| BCL11A-2802 | − | ACCCGGCACCAGCGACU | 17 | 3287 |
| BCL11A-2803 | + | CCCCGUUCUCCGGGAUC | 17 | 3288 |
| BCL11A-2804 | + | CCGAGGCCGACUCGCCC | 17 | 3289 |
| BCL11A-2805 | − | CCCCAUAUUAGUGGUCC | 17 | 3290 |
| BCL11A-2806 | + | GACUUGGACUUGACCGG | 17 | 3291 |
| BCL11A-2807 | − | GCCCCAUAUUAGUGGUC | 17 | 3292 |
| BCL11A-2808 | − | AGGGUGGACUACGGCUU | 17 | 3293 |
| BCL11A-2809 | − | CAAAUCGUCCCCCAUGA | 17 | 3294 |
| BCL11A-2810 | − | CGACGUCAUGCAGGGCA | 17 | 3295 |
| BCL11A-2811 | − | GGCCGCGAUGCCCAACA | 17 | 3296 |
| BCL11A-2812 | + | CCAGGCGCUCUAUGCGG | 17 | 3297 |
| BCL11A-2813 | − | CCUGAUCCCGGAGAACG | 17 | 3298 |
| BCL11A-2814 | + | CCAACCCGCGGGGUCAG | 17 | 3299 |
| BCL11A-2815 | − | GGCGAGUCGGCCUCGGG | 17 | 3300 |
| BCL11A-2816 | + | GGCAAAAGGCGAUUGUC | 17 | 3301 |
| BCL11A-2817 | + | UUUGGACAGGCCCCCCG | 17 | 3302 |
| BCL11A-2818 | + | GCGGCUUGCUACCUGGC | 17 | 3303 |
| BCL11A-2819 | + | GGACUUGACCGUCAUGG | 17 | 3304 |
| BCL11A-2820 | + | GGAGUGCUCCGACGAGG | 17 | 3305 |
| BCL11A-2821 | − | AUUAGUGGUCCGGGCCC | 17 | 3306 |
| BCL11A-2822 | − | CCACGAGAACAGCUCGC | 17 | 3307 |
| BCL11A-2823 | − | GUAUCGAGAGAGGCUUC | 17 | 3308 |
| BCL11A-2824 | + | CUCCGUGUUGGGCAUCG | 17 | 3309 |
| BCL11A-2825 | + | CAAACUCCCGUUCUCCG | 17 | 3310 |
| BCL11A-2826 | − | ACCUGAUCCCGGAGAAC | 17 | 3311 |
| BCL11A-2827 | − | GGCACUGUUAAUGGCCG | 17 | 3312 |
| BCL11A-2828 | + | UUCUCCGGGAUCAGGUU | 17 | 3313 |
| BCL11A-2829 | − | UAUGGAGCCUCCCGCCA | 17 | 3314 |
| BCL11A-2830 | + | CUUGAUGCGCUUAGAGA | 17 | 3315 |
| BCL11A-2831 | − | UAGCAAGCCGCCCUUCC | 17 | 3316 |
| BCL11A-2832 | − | CCGGCUACGCGGCCUCC | 17 | 3317 |
| BCL11A-2833 | + | UCCAAGUGAUGUCUCGG | 17 | 3318 |
| BCL11A-2834 | − | GAACAGCUCGCGGGGCG | 17 | 3319 |
| BCL11A-2835 | − | GCUGCGGUUGAAUCCAA | 17 | 3320 |
| BCL11A-2836 | + | UGACUUGGACUUGACCG | 17 | 3321 |
| BCL11A-2837 | − | CCCGGAGAACGGGGACG | 17 | 3322 |
| BCL11A-2838 | + | GUGGCGCUUCAGCUUGC | 17 | 3323 |
| BCL11A-2839 | + | GUUCUCCGGGAUCAGGU | 17 | 3324 |
| BCL11A-2840 | + | CAGUGCCAUCGUCUAUG | 17 | 3325 |
| BCL11A-2841 | + | UCUCCGGGAUCAGGUUG | 17 | 3326 |
| BCL11A-2842 | − | GACGAUGGCACUGUUAA | 17 | 3327 |
| BCL11A-2843 | − | CUGCUCCCCGGGCGAGU | 17 | 3328 |
| BCL11A-2844 | + | CGGUGGUGGACUAAACA | 17 | 3329 |
| BCL11A-2845 | − | CUCGCGGGGCGCGGUCG | 17 | 3330 |
| BCL11A-2846 | + | AUGCCCUGCAUGACGUC | 17 | 3331 |
| BCL11A-2847 | + | UGGACUUGACCGGGGGC | 17 | 3332 |
| BCL11A-2848 | − | ACCACCGAGACAUCACU | 17 | 3333 |
| BCL11A-2849 | − | GGAGUUCGACCUGCCCC | 17 | 3334 |
| BCL11A-2850 | + | CCUGCAUGACGUCGGGC | 17 | 3335 |
| BCL11A-2851 | + | CUGCAUGACGUCGGGCA | 17 | 3336 |
| BCL11A-2852 | − | AGGAUCAGUAUCGAGAG | 17 | 3337 |
| BCL11A-2853 | + | GGACUUGACCGGGGGCU | 17 | 3338 |
| BCL11A-2854 | + | AAAGGCACUCGGGUGAU | 17 | 3339 |
| BCL11A-2855 | − | UGGACGGAGGGAUCUCG | 17 | 3340 |
| BCL11A-2856 | + | CCCCCAGGCGCUCUAUG | 17 | 3341 |
| BCL11A-2857 | − | CCGCCAUGGAUUUCUCU | 17 | 3342 |
| BCL11A-2858 | − | GGCGCGGUCGUGGGCGU | 17 | 3343 |
| BCL11A-2859 | − | AACCUGAUCCCGGAGAA | 17 | 3344 |
| BCL11A-2860 | + | CAUGCCCUGCAUGACGU | 17 | 3345 |
| BCL11A-2861 | + | CGCUGGUGCCGGGUUCC | 17 | 3346 |
| BCL11A-2862 | + | CCUGGAGGCCGCGUAGC | 17 | 3347 |
| BCL11A-2863 | − | CCCCUGACCCCGCGGGU | 17 | 3348 |
| BCL11A-2864 | + | GCUUAUGCUUCUCGCCC | 17 | 3349 |
| BCL11A-2865 | − | AAGUCAUGCGAGUUCUG | 17 | 3350 |
| BCL11A-2866 | + | CACCAAGUCGCUGGUGC | 17 | 3351 |
| BCL11A-2867 | − | CCCGAGUGCCUUUGACA | 17 | 3352 |
| BCL11A-2868 | + | CAUGACUUGGACUUGAC | 17 | 3353 |
| BCL11A-2869 | − | CGACCCCAACCUGAUCC | 17 | 3354 |
| BCL11A-2870 | + | ACCAAGUCGCUGGUGCC | 17 | 3355 |
| BCL11A-2871 | + | AAGUGAUGUCUCGGUGG | 17 | 3356 |
| BCL11A-2872 | − | CUUCUCCACACCGCCCG | 17 | 3357 |
| BCL11A-2873 | + | UGGAGUCUCCGAAGCUA | 17 | 3358 |
| BCL11A-2874 | − | CGCUUCUCCACACCGCC | 17 | 3359 |
| BCL11A-2875 | + | GCUGGUGCCGGGUUCCG | 17 | 3360 |
| BCL11A-2876 | − | CGCAGCGGCACGGGAAG | 17 | 3361 |
| BCL11A-2877 | + | GCAUCGCGGCCGGGGGC | 17 | 3362 |
| BCL11A-2878 | − | GAGCACUCCUCGGAGAA | 17 | 3363 |
| BCL11A-2879 | + | GGGGGGCGUCGCCAGGA | 17 | 3364 |
| BCL11A-2880 | + | GAAAGCGCCCUUCUGCC | 17 | 3365 |
| BCL11A-2881 | − | CUGGACGGAGGGAUCUC | 17 | 3366 |
| BCL11A-2882 | − | CGGCUUCGGGCUGAGCC | 17 | 3367 |
| BCL11A-2883 | + | GGGGGCGUCGCCAGGAA | 17 | 3368 |
| BCL11A-2884 | + | UAACCUUUGCAUAGGGC | 17 | 3369 |
| BCL11A-2885 | − | GGGCGAGUCGGCCUCGG | 17 | 3370 |
| BCL11A-2886 | − | CACACCGCCCGGGGAGC | 17 | 3371 |
| BCL11A-2887 | − | GGGAUCUCGGGGCGCAG | 17 | 3372 |
| BCL11A-2888 | + | CUCGCUGAAGUGCUGCA | 17 | 3373 |
| BCL11A-2889 | − | UCGGGGCGCAGCGGCAC | 17 | 3374 |
| BCL11A-2890 | − | AAGUCCCCUGACCCCGC | 17 | 3375 |
| BCL11A-2891 | − | GCCUUUUGCCUCCUCGU | 17 | 3376 |
| BCL11A-2892 | − | CACCUGGCCGAGGCCGA | 17 | 3377 |
| BCL11A-2893 | − | GGUAUCCCUUCAGGACU | 17 | 3378 |
| BCL11A-2894 | + | GUGGUGGACUAAACAGG | 17 | 3379 |
| BCL11A-2895 | + | GCGAGCUGUUCUCGUGG | 17 | 3380 |
| BCL11A-2896 | − | AGCACUCCUCGGAGAAC | 17 | 3381 |
| BCL11A-2897 | − | CAUGCAGCACUUCAGCG | 17 | 3382 |
| BCL11A-2898 | + | UGGCCUGGGUGCACGCG | 17 | 3383 |
| BCL11A-2899 | − | AGCGAGAGGGUGGACUA | 17 | 3384 |
| BCL11A-2900 | + | GCACAGGUUGCACUUGU | 17 | 3385 |
| BCL11A-2901 | + | GAGAAAUCCAUGGCGGG | 17 | 3386 |
| BCL11A-2902 | + | GCAGAACUCGCAUGACU | 17 | 3387 |
| BCL11A-2903 | + | UCUCCGAAGCUAAGGAA | 17 | 3388 |
| BCL11A-2904 | + | UGACGUCGGGCAGGGCG | 17 | 3389 |
| BCL11A-2905 | + | GGGUCCAAGUGAUGUCU | 17 | 3390 |
| BCL11A-2906 | − | GCAACCUGGUGGUGCAC | 17 | 3391 |
| BCL11A-2907 | + | GGUGGCGCGCCGCCUCC | 17 | 3392 |
| BCL11A-2908 | + | GCUGCCCACCAAGUCGC | 17 | 3393 |
| BCL11A-2909 | + | GUUCUCGCUCUUGAACU | 17 | 3394 |
| BCL11A-2910 | + | CCGCAGCACCCUGUCAA | 17 | 3395 |
| BCL11A-2911 | − | GAAGUCCCCUGACCCCG | 17 | 3396 |
| BCL11A-2912 | − | GCGCGGCCACCUGGCCG | 17 | 3397 |
| BCL11A-2913 | + | GGCGUCGCCAGGAAGGG | 17 | 3398 |
| BCL11A-2914 | − | GUUGAAUCCAAUGGCUA | 17 | 3399 |
| BCL11A-2915 | − | CUCGGGGCGCAGCGGCA | 17 | 3400 |
| BCL11A-2916 | − | CCGAGGCCGAGGGCCAC | 17 | 3401 |
| BCL11A-2917 | + | CUAAACAGGGGGGGAGU | 17 | 3402 |
| BCL11A-2918 | − | GCGGCACGGGAAGUGGA | 17 | 3403 |
| BCL11A-2919 | + | CACAGGUUGCACUUGUA | 17 | 3404 |
| BCL11A-2920 | − | CAGCGAGGCCUUCCACC | 17 | 3405 |
| BCL11A-2921 | − | AACCUGCUAAGAAUACC | 17 | 3406 |
| BCL11A-2922 | + | AUCCUGGUAUUCUUAGC | 17 | 3407 |
| BCL11A-2923 | + | GGUGGUGGACUAAACAG | 17 | 3408 |
| BCL11A-2924 | − | CGAGGCCGAGGGCCACA | 17 | 3409 |
| BCL11A-2925 | + | GUACAUGUGUAGCUGCU | 17 | 3410 |
| BCL11A-2926 | + | UUGAUGCGCUUAGAGAA | 17 | 3411 |
| BCL11A-2927 | + | UCCUCGUCCCCGUUCUC | 17 | 3412 |
| BCL11A-2928 | + | AUGACUUGGACUUGACC | 17 | 3413 |
| BCL11A-2929 | + | GUCUCCGAAGCUAAGGA | 17 | 3414 |
| BCL11A-2930 | + | GGUGGACUAAACAGGGG | 17 | 3415 |
| BCL11A-2931 | + | GCAUGUGCGUCUUCAUG | 17 | 3416 |
| BCL11A-2932 | + | GGCACUCGGGUGAUGGG | 17 | 3417 |
| BCL11A-2933 | + | AUAGGGCUGGGCCGGCC | 17 | 3418 |
| BCL11A-2934 | + | CCGUCCAGCUCCCCGGG | 17 | 3419 |
| BCL11A-2935 | + | GCAGUAACCUUUGCAUA | 17 | 3420 |
| BCL11A-2936 | − | GAUCCCUUCCUUAGCUU | 17 | 3421 |
| BCL11A-2937 | + | AAGGGGCUCAGCGAGCU | 17 | 3422 |
| BCL11A-2938 | − | AGCUGACGGAGAGCGAG | 17 | 3423 |
| BCL11A-2939 | − | UCGCGGGGCGCGGUCGU | 17 | 3424 |
| BCL11A-2940 | − | AGCGGCACGGGAAGUGG | 17 | 3425 |
| BCL11A-2941 | + | CAAAGGCACUCGGGUGA | 17 | 3426 |
| BCL11A-2942 | + | CUGCACCUAGUCCUGAA | 17 | 3427 |
| BCL11A-2943 | − | GCUGGACGGAGGGAUCU | 17 | 3428 |
| BCL11A-2944 | + | CCCUGUCAAAGGCACUC | 17 | 3429 |
| BCL11A-2945 | + | AACCUUUGCAUAGGGCU | 17 | 3430 |
| BCL11A-2946 | + | CGCCCGGGGAGCAGCCG | 17 | 3431 |
| BCL11A-2947 | + | UGGUGGACUAAACAGGG | 17 | 3432 |
| BCL11A-2948 | − | GGCCCAGCCCUAUGCAA | 17 | 3433 |
| BCL11A-2949 | + | CCUCGUCCCCGUUCUCC | 17 | 3434 |
| BCL11A-2950 | − | GCCAGCUCCCCGGAACC | 17 | 3435 |
| BCL11A-2951 | + | GCCGGGUUCCGGGGAGC | 17 | 3436 |
| BCL11A-2952 | + | UGCAGUAACCUUUGCAU | 17 | 3437 |
| BCL11A-2953 | + | GCUUCUCGCCCAGGACC | 17 | 3438 |
| BCL11A-2954 | − | CCGCCCGGGGAGCUGGA | 17 | 3439 |
| BCL11A-2955 | − | CCGGGGAGCUGGACGGA | 17 | 3440 |
| BCL11A-2956 | − | CUUCCGGCCUGGCAGAA | 17 | 3441 |
| BCL11A-2957 | + | CCUAGAGAAAUCCAUGG | 17 | 3442 |
| BCL11A-2958 | + | GGAGGGGGGGCGUCGCC | 17 | 3443 |
| BCL11A-2959 | − | UACUUAGAAAGCGAACA | 17 | 3444 |
| BCL11A-2960 | + | GGAGGCUCCAUAGCCAU | 17 | 3445 |
| BCL11A-2961 | + | ACACAUCUUGAGCUCUC | 17 | 3446 |
| BCL11A-2962 | − | GGCACCAGCGACUUGGU | 17 | 3447 |
| BCL11A-2963 | + | GGGAUCUUUGAGCUGCC | 17 | 3448 |
| BCL11A-2964 | + | GCAGCAGCUUUUUGGAC | 17 | 3449 |
| BCL11A-2965 | + | CUGCAAUAUGAAUCCCA | 17 | 3450 |
| BCL11A-2966 | + | UCUGCACCUAGUCCUGA | 17 | 3451 |
| BCL11A-2967 | + | GAAGGGGCUCAGCGAGC | 17 | 3452 |
| BCL11A-2968 | + | UUCCGGGGAGCUGGCGG | 17 | 3453 |
| BCL11A-2969 | − | GCACCGGCGCAGCCACA | 17 | 3454 |
| BCL11A-2970 | + | AUAUGAAUCCCAUGGAG | 17 | 3455 |
| BCL11A-2971 | − | GUGGUCCGGGCCCGGGC | 17 | 3456 |
| BCL11A-2972 | − | CUUCACACACCCCCAUU | 17 | 3457 |
| BCL11A-2973 | − | GUCCAAAAAGCUGCUGC | 17 | 3458 |
| BCL11A-2974 | − | CGGCACCAGCGACUUGG | 17 | 3459 |
| BCL11A-2975 | − | GCUUCUCCACACCGCCC | 17 | 3460 |
| BCL11A-2976 | + | CGCCCGUGUGGCUGCGC | 17 | 3461 |
| BCL11A-2977 | − | CACGCACAGAACACUCA | 17 | 3462 |
| BCL11A-2978 | + | UGUACAUGUGUAGCUGC | 17 | 3463 |
| BCL11A-2979 | − | CACCGGCGCAGCCACAC | 17 | 3464 |
| BCL11A-2980 | + | UUGCUACCUGGCUGGAA | 17 | 3465 |
| BCL11A-2981 | + | ACCCUGUCAAAGGCACU | 17 | 3466 |
| BCL11A-2982 | − | CCACCUGGCCGAGGCCG | 17 | 3467 |
| BCL11A-2983 | + | GGGCGGAUUGCAGAGGA | 17 | 3468 |
| BCL11A-2984 | + | CUAGAGAAAUCCAUGGC | 17 | 3469 |
| BCL11A-2985 | − | GGCGGAAGAGAUGGCCC | 17 | 3470 |
| BCL11A-2986 | + | GGGGCGGAUUGCAGAGG | 17 | 3471 |
| BCL11A-2987 | − | GUGUGGCAGUUUUCGGA | 17 | 3472 |
| BCL11A-2988 | − | GAGAGAGGCUUCCGGCC | 17 | 3473 |
| BCL11A-2989 | + | CGGGUGAUGGGUGGCCA | 17 | 3474 |
| BCL11A-2990 | − | CCCGGGGAGCUGGACGG | 17 | 3475 |
| BCL11A-2991 | − | UAGGAGACUUAGAGAGC | 17 | 3476 |
| BCL11A-2992 | + | CACAUCUUGAGCUCUCU | 17 | 3477 |
| BCL11A-2993 | + | CCUCGGCCUCGGCCAGG | 17 | 3478 |
| BCL11A-2994 | − | GGCCUUCCACCAGGUCC | 17 | 3479 |
| BCL11A-2995 | + | UCUCGCCCAGGACCUGG | 17 | 3480 |
| BCL11A-2996 | + | UCUGCCCUCUUUUGAGC | 17 | 3481 |
| BCL11A-2997 | + | ACUAAACAGGGGGGGAG | 17 | 3482 |
| BCL11A-2998 | + | CUUGACCGGGGGCUGGG | 17 | 3483 |
| BCL11A-2999 | + | UUGACCGGGGGCUGGGA | 17 | 3484 |
| BCL11A-3000 | − | AGACUUAGAGAGCUGGC | 17 | 3485 |
| BCL11A-3001 | − | AGCCCACCGCUGUCCCC | 17 | 3486 |
| BCL11A-3002 | − | AGCCAUUCACCAGUGCA | 17 | 3487 |
| BCL11A-3003 | − | GCUUCCGGCCUGGCAGA | 17 | 3488 |
| BCL11A-3004 | − | GACUUAGAGAGCUGGCA | 17 | 3489 |
| BCL11A-3005 | − | AGGCCCAGCUCAAAAGA | 17 | 3490 |
| BCL11A-3006 | + | UCGGGUGAUGGGUGGCC | 17 | 3491 |
| BCL11A-3007 | + | CAAGAGAAACCAUGCAC | 17 | 3492 |
| BCL11A-3008 | + | AUCUUUGAGCUGCCUGG | 17 | 3493 |
| BCL11A-3009 | + | UAUUCUUAGCAGGUUAA | 17 | 3494 |
| BCL11A-3010 | + | CUGCCCUCUUUUGAGCU | 17 | 3495 |
| BCL11A-3011 | + | CCAUCUCUUCCGCCCCC | 17 | 3496 |
| BCL11A-3012 | − | UGGCCGCGGCUGCUCCC | 17 | 3497 |
| BCL11A-3013 | + | CCUGUGGCCCUCGGCCU | 17 | 3498 |
| BCL11A-3014 | + | CAGCUCCCCGGGCGGUG | 17 | 3499 |
| BCL11A-3015 | + | UUUGCAUAGGGCUGGGC | 17 | 3500 |
| BCL11A-3016 | + | GGCCCUCGGCCUCGGCC | 17 | 3501 |
| BCL11A-3017 | − | GCUGACGGAGAGCGAGA | 17 | 3502 |
| BCL11A-3018 | − | AGAUGUGUGGCAGUUUU | 17 | 3503 |
| BCL11A-3019 | + | AUUCUUAGCAGGUUAAA | 17 | 3504 |
| BCL11A-3020 | + | UCUCCUAGAGAAAUCCA | 17 | 3505 |
| BCL11A-3021 | − | CCUUUGACAGGGUGCUG | 17 | 3506 |
| BCL11A-3022 | + | GGAGGGGCGGAUUGCAG | 17 | 3507 |
| BCL11A-3023 | + | UUCUUAGCAGGUUAAAG | 17 | 3508 |
| BCL11A-3024 | + | CGGAUUGCAGAGGAGGG | 17 | 3509 |
| BCL11A-3025 | + | UUUGAGCUGGGCCUGCC | 17 | 3510 |
| BCL11A-3026 | + | CUUCAGCUUGCUGGCCU | 17 | 3511 |
| BCL11A-3027 | + | CUUGAACUUGGCCACCA | 17 | 3512 |
| BCL11A-3028 | − | CUGCAACCAUUCCAGCC | 17 | 3513 |
| BCL11A-3029 | − | CAUAGAGCGCCUGGGGG | 17 | 3514 |
| BCL11A-3030 | − | GGGCGCGGUCGUGGGCG | 17 | 3515 |
| BCL11A-3031 | + | UCCCAUGGAGAGGUGGC | 17 | 3516 |
| BCL11A-3032 | − | GGCCGCGGCUGCUCCCC | 17 | 3517 |
| BCL11A-3033 | − | AUUUCAGAGCAACCUGG | 17 | 3518 |
| BCL11A-3034 | − | GCCUUCCACCAGGUCCU | 17 | 3519 |
| BCL11A-3035 | + | UGAAUCCCAUGGAGAGG | 17 | 3520 |
| BCL11A-3036 | + | UUGAGCUGGGCCUGCCC | 17 | 3521 |
| BCL11A-3037 | + | AGGGGCUCAGCGAGCUG | 17 | 3522 |
| BCL11A-3038 | + | AGGGCUUCUCGCCCGUG | 17 | 3523 |
| BCL11A-3039 | − | CACCGCUGUCCCCAGGC | 17 | 3524 |
| BCL11A-3040 | − | CAAAUUUCAGAGCAACC | 17 | 3525 |
| BCL11A-3041 | − | AGAGAGCUCAAGAUGUG | 17 | 3526 |
| BCL11A-3042 | + | AACCAUGCACUGGUGAA | 17 | 3527 |
| BCL11A-3043 | + | CCUCCGUCCAGCUCCCC | 17 | 3528 |
| BCL11A-3044 | + | AGUGUCCCUGUGGCCCU | 17 | 3529 |
| BCL11A-3045 | + | CCCUCCGUCCAGCUCCC | 17 | 3530 |
| BCL11A-3046 | + | GGCCUGGGGACAGCGGU | 17 | 3531 |
| BCL11A-3047 | + | GCCCAGCAGCAGCUUUU | 17 | 3532 |
| BCL11A-3048 | − | CAGGCCCAGCUCAAAAG | 17 | 3533 |
| BCL11A-3049 | − | CUUCGGGCUGAGCCUGG | 17 | 3534 |
| BCL11A-3050 | + | CCCAUGGAGAGGUGGCU | 17 | 3535 |
| BCL11A-3051 | − | CCCAGCCACCUCUCCAU | 17 | 3536 |
| BCL11A-3052 | + | GGGUUCCGGGGAGCUGG | 17 | 3537 |
| BCL11A-3053 | + | UAGGGCUGGGCCGGCCU | 17 | 3538 |
| BCL11A-3054 | − | CCUGGGGGCGGAAGAGA | 17 | 3539 |
| BCL11A-3055 | + | GCCCAGGACCUGGUGGA | 17 | 3540 |
| BCL11A-3056 | − | CGGGCUGAGCCUGGAGG | 17 | 3541 |
| BCL11A-3057 | − | ACCACGAGAACAGCUCG | 17 | 3542 |
| BCL11A-3058 | + | CGGCCUGGGGACAGCGG | 17 | 3543 |
| BCL11A-3059 | − | UCCAAAAAGCUGCUGCU | 17 | 3544 |
| BCL11A-3060 | + | GCGCCCUUCUGCCAGGC | 17 | 3545 |
| BCL11A-3061 | − | UCCCAGCCACCUCUCCA | 17 | 3546 |
| BCL11A-3062 | − | CUCCACCGCCAGCUCCC | 17 | 3547 |
| BCL11A-3063 | + | CUGGGCCUGCCCGGGCC | 17 | 3548 |
| BCL11A-3064 | + | AGGGCUGGGCCGGCCUG | 17 | 3549 |
| BCL11A-3065 | + | AACAGGGGGGGAGUGGG | 17 | 3550 |
| BCL11A-3066 | − | GGAGAACGGGGACGAGG | 17 | 3551 |
| BCL11A-3067 | + | UGAUGCGCUUAGAGAAG | 17 | 3552 |
| BCL11A-3068 | + | GGAUUGCAGAGGAGGGA | 17 | 3553 |
| BCL11A-3069 | + | GGCCGGCCUGGGGACAG | 17 | 3554 |
| BCL11A-3070 | + | GAUUGCAGAGGAGGGAG | 17 | 3555 |
| BCL11A-3071 | + | AUUGCAGAGGAGGGAGG | 17 | 3556 |
| BCL11A-3072 | + | ACCGGGGGCUGGGAGGG | 17 | 3557 |
| BCL11A-3073 | + | UGGAGAGGUGGCUGGGA | 17 | 3558 |
| BCL11A-3074 | + | UUGCAGAGGAGGGAGGG | 17 | 3559 |
| BCL11A-3075 | − | CGGGGACGAGGAGGAAG | 17 | 3560 |
| BCL11A-3076 | − | GACGGAGAGCGAGAGGG | 17 | 3561 |
| BCL11A-3077 | − | UCCUCCCUCCCAGCCCC | 17 | 3562 |
| BCL11A-3078 | + | GCUUCAGCUUGCUGGCC | 17 | 3563 |
| BCL11A-3079 | + | UGCAGAGGAGGGAGGGG | 17 | 3564 |
| BCL11A-3080 | + | GGGCUGGGAGGGAGGAG | 17 | 3565 |
| BCL11A-3081 | − | GGAAGAGGAGGACGACG | 17 | 3566 |
| BCL11A-3082 | + | GGGGCUGGGAGGGAGGA | 17 | 3567 |
| BCL11A-3083 | − | GGAGGACGACGAGGAAG | 17 | 3568 |
| BCL11A-3084 | − | GGAGGAGGAGGAGCUGA | 17 | 3569 |
| BCL11A-3085 | + | GGGGGCUGGGAGGGAGG | 17 | 3570 |
| BCL11A-3086 | + | CUGGGAGGGAGGAGGGG | 17 | 3571 |
| BCL11A-3087 | − | CGAGGAAGAGGAAGAAG | 17 | 3572 |
| BCL11A-3088 | − | GGACGAGGAGGAAGAGG | 17 | 3573 |
| BCL11A-3089 | − | GGAAGAAGAGGAGGAAG | 17 | 3574 |
| BCL11A-3090 | − | GGAAGAGGAAGAAGAGG | 17 | 3575 |
| BCL11A-3091 | − | AGAAGAGGAGGAAGAGG | 17 | 3576 |
| BCL11A-3092 | − | AGAGGAGGAAGAGGAGG | 17 | 3577 |
| BCL11A-3093 | − | GGAGGAAGAGGAGGAGG | 17 | 3578 |
| BCL11A-3094 | + | GUCUAUGCGGUCCGACUCGC | 20 | 3579 |
| BCL11A-3095 | + | UCGUCGGACUUGACCGUCAU | 20 | 3580 |
| BCL11A-3096 | + | CGUCGGACUUGACCGUCAUG | 20 | 3581 |
| BCL11A-3097 | − | AUGACGGUCAAGUCCGACGA | 20 | 3582 |
| BCL11A-3098 | − | GAGUCGGACCGCAUAGACGA | 20 | 3583 |
| BCL11A-3099 | + | CGGGCCCGGACCACUAAUAU | 20 | 3584 |
| BCL11A-3100 | + | GUCGUCGGACUUGACCGUCA | 20 | 3585 |
| BCL11A-3101 | + | CUCUGGGUACUACGCCGAAU | 20 | 3586 |
| BCL11A-3102 | + | CUGGGUACUACGCCGAAUGG | 20 | 3587 |
| BCL11A-3103 | + | CCGGGCCCGGACCACUAAUA | 20 | 3588 |
| BCL11A-3104 | − | CCGCGGGUUGGUAUCCCUUC | 20 | 3589 |
| BCL11A-3105 | + | UCUGGGUACUACGCCGAAUG | 20 | 3590 |
| BCL11A-3106 | + | GGAUACCAACCCGCGGGGUC | 20 | 3591 |
| BCL11A-3107 | − | ACGCCCCAUAUUAGUGGUCC | 20 | 3592 |
| BCL11A-3108 | − | CACUUGCGACGAAGACUCGG | 20 | 3593 |
| BCL11A-3109 | + | UCUCUGGGUACUACGCCGAA | 20 | 3594 |
| BCL11A-3110 | − | UAAGCGCAUCAAGCUCGAGA | 20 | 3595 |
| BCL11A-3111 | − | UGCGACGAAGACUCGGUGGC | 20 | 3596 |
| BCL11A-3112 | + | CGCGCUUAUGCUUCUCGCCC | 20 | 3597 |
| BCL11A-3113 | + | UGAAGGGAUACCAACCCGCG | 20 | 3598 |
| BCL11A-3114 | + | GGGCCCGGACCACUAAUAUG | 20 | 3599 |
| BCL11A-3115 | + | CGUGUUGGGCAUCGCGGCCG | 20 | 3600 |
| BCL11A-3116 | + | UCCGUGUUGGGCAUCGCGGC | 20 | 3601 |
| BCL11A-3117 | + | GUCGGACUUGACCGUCAUGG | 20 | 3602 |
| BCL11A-3118 | + | GCGCAAACUCCCGUUCUCCG | 20 | 3603 |
| BCL11A-3119 | + | CUCCGAGGAGUGCUCCGACG | 20 | 3604 |
| BCL11A-3120 | + | CACGGACUUGAGCGCGCUGC | 20 | 3605 |
| BCL11A-3121 | − | CACGCCCCAUAUUAGUGGUC | 20 | 3606 |
| BCL11A-3122 | + | GAUACCAACCCGCGGGGUCA | 20 | 3607 |
| BCL11A-3123 | − | CAGCGCGCUCAAGUCCGUGG | 20 | 3608 |
| BCL11A-3124 | + | GGGUGCACGCGUGGUCGCAC | 20 | 3609 |
| BCL11A-3125 | − | GAAGCAUAAGCGCGGCCACC | 20 | 3610 |
| BCL11A-3126 | − | GUGCGACCACGCGUGCACCC | 20 | 3611 |
| BCL11A-3127 | + | GAGUACACGUUCUCCGUGUU | 20 | 3612 |
| BCL11A-3128 | + | GUCUCGGUGGUGGACUAAAC | 20 | 3613 |
| BCL11A-3129 | + | CCGUUCUCCGGGAUCAGGUU | 20 | 3614 |
| BCL11A-3130 | + | CGAGUACACGUUCUCCGUGU | 20 | 3615 |
| BCL11A-3131 | − | CGGAGAACGUGUACUCGCAG | 20 | 3616 |
| BCL11A-3132 | − | GGGAGCACGCCCCAUAUUAG | 20 | 3617 |
| BCL11A-3133 | − | CCAUAUUAGUGGUCCGGGCC | 20 | 3618 |
| BCL11A-3134 | + | GCCGCAGAACUCGCAUGACU | 20 | 3619 |
| BCL11A-3135 | + | CGCCCCGCGAGCUGUUCUCG | 20 | 3620 |
| BCL11A-3136 | − | GCAGUGGCUCGCCGGCUACG | 20 | 3621 |
| BCL11A-3137 | − | CAUAUUAGUGGUCCGGGCCC | 20 | 3622 |
| BCL11A-3138 | + | CUGAAGGGAUACCAACCCGC | 20 | 3623 |
| BCL11A-3139 | + | AUACCAACCCGCGGGGUCAG | 20 | 3624 |
| BCL11A-3140 | − | CAGCAGCGCGCUCAAGUCCG | 20 | 3625 |
| BCL11A-3141 | + | CGUCCCCGUUCUCCGGGAUC | 20 | 3626 |
| BCL11A-3142 | − | CACCACGAGAACAGCUCGCG | 20 | 3627 |
| BCL11A-3143 | − | GCGGUUGAAUCCAAUGGCUA | 20 | 3628 |
| BCL11A-3144 | − | GGACACUUGCGACGAAGACU | 20 | 3629 |
| BCL11A-3145 | + | GUGUUGGGCAUCGCGGCCGG | 20 | 3630 |
| BCL11A-3146 | + | CUUCGUCGCAAGUGUCCCUG | 20 | 3631 |
| BCL11A-3147 | + | CCCCAGGCGCUCUAUGCGGU | 20 | 3632 |
| BCL11A-3148 | + | CCGUGUUGGGCAUCGCGGCC | 20 | 3633 |
| BCL11A-3149 | + | CGUUCUCCGGGAUCAGGUUG | 20 | 3634 |
| BCL11A-3150 | + | GCCUCUCUCGAUACUGAUCC | 20 | 3635 |
| BCL11A-3151 | + | UCGCAUGACUUGGACUUGAC | 20 | 3636 |
| BCL11A-3152 | − | AUCACCCGAGUGCCUUUGAC | 20 | 3637 |
| BCL11A-3153 | − | UAAGCGCGGCCACCUGGCCG | 20 | 3638 |
| BCL11A-3154 | − | GCACAAAUCGUCCCCCAUGA | 20 | 3639 |
| BCL11A-3155 | − | CGCCCUGCCCGACGUCAUGC | 20 | 3640 |
| BCL11A-3156 | − | CAACCUGAUCCCGGAGAACG | 20 | 3641 |
| BCL11A-3157 | − | CGGAGCACUCCUCGGAGAAC | 20 | 3642 |
| BCL11A-3158 | − | AGACUCGGUGGCCGGCGAGU | 20 | 3643 |
| BCL11A-3159 | + | GGCGGUGGAGAGACCGUCGU | 20 | 3644 |
| BCL11A-3160 | − | GUGUACUCGCAGUGGCUCGC | 20 | 3645 |
| BCL11A-3161 | − | UCGGAGCACUCCUCGGAGAA | 20 | 3646 |
| BCL11A-3162 | − | CCCGGCCGCGAUGCCCAACA | 20 | 3647 |
| BCL11A-3163 | + | CCCGUUCUCCGGGAUCAGGU | 20 | 3648 |
| BCL11A-3164 | + | UCGGUGGUGGACUAAACAGG | 20 | 3649 |
| BCL11A-3165 | + | CCUGAAGGGAUACCAACCCG | 20 | 3650 |
| BCL11A-3166 | + | GUCGUUCUCGCUCUUGAACU | 20 | 3651 |
| BCL11A-3167 | − | CCCCACCGCAUAGAGCGCCU | 20 | 3652 |
| BCL11A-3168 | + | GUCGCUGGUGCCGGGUUCCG | 20 | 3653 |
| BCL11A-3169 | − | CGAGAACAGCUCGCGGGGCG | 20 | 3654 |
| BCL11A-3170 | + | CGCAUGACUUGGACUUGACC | 20 | 3655 |
| BCL11A-3171 | − | CCCACCGCAUAGAGCGCCUG | 20 | 3656 |
| BCL11A-3172 | + | AAGUCGCUGGUGCCGGGUUC | 20 | 3657 |
| BCL11A-3173 | + | CGAGGAGUGCUCCGACGAGG | 20 | 3658 |
| BCL11A-3174 | − | UCCCCGGGCGAGUCGGCCUC | 20 | 3659 |
| BCL11A-3175 | − | CUCCCCGGGCGAGUCGGCCU | 20 | 3660 |
| BCL11A-3176 | + | CAUGACUUGGACUUGACCGG | 20 | 3661 |
| BCL11A-3177 | − | AGCUCGCGGGGCGCGGUCGU | 20 | 3662 |
| BCL11A-3178 | + | UGCUCCGACGAGGAGGCAAA | 20 | 3663 |
| BCL11A-3179 | + | CUUUUUGGACAGGCCCCCCG | 20 | 3664 |
| BCL11A-3180 | − | CUACGGCUUCGGGCUGAGCC | 20 | 3665 |
| BCL11A-3181 | − | CCCCGGGCGAGUCGGCCUCG | 20 | 3666 |
| BCL11A-3182 | + | UAACAGUGCCAUCGUCUAUG | 20 | 3667 |
| BCL11A-3183 | − | CUCCUCGUCGGAGCACUCCU | 20 | 3668 |
| BCL11A-3184 | − | CCCGGCACCAGCGACUUGGU | 20 | 3669 |
| BCL11A-3185 | − | GCGCUUCUCCACACCGCCCG | 20 | 3670 |
| BCL11A-3186 | + | CUCGGUGGUGGACUAAACAG | 20 | 3671 |
| BCL11A-3187 | − | CCCCCACCGCAUAGAGCGCC | 20 | 3672 |
| BCL11A-3188 | − | GAUCCCGGAGAACGGGGACG | 20 | 3673 |
| BCL11A-3189 | + | CCAGGCGCUCUAUGCGGUGG | 20 | 3674 |
| BCL11A-3190 | − | UUAGUGGUCCGGGCCCGGGC | 20 | 3675 |
| BCL11A-3191 | + | CCCAGGCGCUCUAUGCGGUG | 20 | 3676 |
| BCL11A-3192 | − | CGGCUGCUCCCCGGGCGAGU | 20 | 3677 |
| BCL11A-3193 | − | UCGCCGGCUACGCGGCCUCC | 20 | 3678 |
| BCL11A-3194 | − | AUCGAGAGAGGCUUCCGGCC | 20 | 3679 |
| BCL11A-3195 | + | GGGUCCAAGUGAUGUCUCGG | 20 | 3680 |
| BCL11A-3196 | − | AUCGCCUUUUGCCUCCUCGU | 20 | 3681 |
| BCL11A-3197 | − | AUCUCGGGGCGCAGCGGCAC | 20 | 3682 |
| BCL11A-3198 | + | CGGUGGUGGACUAAACAGGG | 20 | 3683 |
| BCL11A-3199 | − | GAUGGCACUGUUAAUGGCCG | 20 | 3684 |
| BCL11A-3200 | + | UGCCCUGCAUGACGUCGGGC | 20 | 3685 |
| BCL11A-3201 | + | UCUCGGUGGUGGACUAAACA | 20 | 3686 |
| BCL11A-3202 | − | AGAGGGUGGACUACGGCUUC | 20 | 3687 |
| BCL11A-3203 | + | CCCCGAGGCCGACUCGCCCG | 20 | 3688 |
| BCL11A-3204 | − | GAUCUCGGGGCGCAGCGGCA | 20 | 3689 |
| BCL11A-3205 | − | ACGGAAGUCCCCUGACCCCG | 20 | 3690 |
| BCL11A-3206 | + | ACUCGCCCGGGGAGCAGCCG | 20 | 3691 |
| BCL11A-3207 | − | UUGCGCUUCUCCACACCGCC | 20 | 3692 |
| BCL11A-3208 | − | GGAACCCGGCACCAGCGACU | 20 | 3693 |
| BCL11A-3209 | + | GCAUGACUUGGACUUGACCG | 20 | 3694 |
| BCL11A-3210 | − | UAAUGGCCGCGGCUGCUCCC | 20 | 3695 |
| BCL11A-3211 | − | CCGGGCGAGUCGGCCUCGGG | 20 | 3696 |
| BCL11A-3212 | + | GUCAAAGGCACUCGGGUGAU | 20 | 3697 |
| BCL11A-3213 | − | GGUGCUGCGGUUGAAUCCAA | 20 | 3698 |
| BCL11A-3214 | − | CUGGGCGAGAAGCAUAAGCG | 20 | 3699 |
| BCL11A-3215 | + | ACUUGGACUUGACCGGGGGC | 20 | 3700 |
| BCL11A-3216 | + | CCCCCCGAGGCCGACUCGCC | 20 | 3701 |
| BCL11A-3217 | − | CCACCGCAUAGAGCGCCUGG | 20 | 3702 |
| BCL11A-3218 | + | AGUCGCUGGUGCCGGGUUCC | 20 | 3703 |
| BCL11A-3219 | + | UCGCACAGGUUGCACUUGUA | 20 | 3704 |
| BCL11A-3220 | + | GCCCUGCAUGACGUCGGGCA | 20 | 3705 |
| BCL11A-3221 | + | CCGCCCCCAGGCGCUCUAUG | 20 | 3706 |
| BCL11A-3222 | − | GCCCUGCCCGACGUCAUGCA | 20 | 3707 |
| BCL11A-3223 | + | GUCGCACAGGUUGCACUUGU | 20 | 3708 |
| BCL11A-3224 | − | AGGUAGCAAGCCGCCCUUCC | 20 | 3709 |
| BCL11A-3225 | − | CCAACCUGAUCCCGGAGAAC | 20 | 3710 |
| BCL11A-3226 | + | AGGAAGGGCGGCUUGCUACC | 20 | 3711 |
| BCL11A-3227 | − | GAAGGAGUUCGACCUGCCCC | 20 | 3712 |
| BCL11A-3228 | + | CUUGGACUUGACCGGGGGCU | 20 | 3713 |
| BCL11A-3229 | − | GAGAGGGUGGACUACGGCUU | 20 | 3714 |
| BCL11A-3230 | − | UCCAAGUCAUGCGAGUUCUG | 20 | 3715 |
| BCL11A-3231 | − | ACCCGGCACCAGCGACUUGG | 20 | 3716 |
| BCL11A-3232 | + | CCCCCAGGCGCUCUAUGCGG | 20 | 3717 |
| BCL11A-3233 | + | GCGUCUGCCCUCUUUUGAGC | 20 | 3718 |
| BCL11A-3234 | − | GCCCGACGUCAUGCAGGGCA | 20 | 3719 |
| BCL11A-3235 | + | GAGCUUGAUGCGCUUAGAGA | 20 | 3720 |
| BCL11A-3236 | − | CAGCUCGCGGGGCGCGGUCG | 20 | 3721 |
| BCL11A-3237 | + | CGUGGUGGCGCGCCGCCUCC | 20 | 3722 |
| BCL11A-3238 | − | UCACCCGAGUGCCUUUGACA | 20 | 3723 |
| BCL11A-3239 | − | GAACGACCCCAACCUGAUCC | 20 | 3724 |
| BCL11A-3240 | + | CAACCGCAGCACCCUGUCAA | 20 | 3725 |
| BCL11A-3241 | + | UCCAAGUGAUGUCUCGGUGG | 20 | 3726 |
| BCL11A-3242 | + | GUUCUCCGUGUUGGGCAUCG | 20 | 3727 |
| BCL11A-3243 | − | CGGAAGUCCCCUGACCCCGC | 20 | 3728 |
| BCL11A-3244 | + | UAUGCUUCUCGCCCAGGACC | 20 | 3729 |
| BCL11A-3245 | − | AGCUGGACGGAGGGAUCUCG | 20 | 3730 |
| BCL11A-3246 | + | GGCUGCGCCGGUGCACCACC | 20 | 3731 |
| BCL11A-3247 | − | GUUGGUAUCCCUUCAGGACU | 20 | 3732 |
| BCL11A-3248 | − | AUAGACGAUGGCACUGUUAA | 20 | 3733 |
| BCL11A-3249 | − | CUCCCGCCAUGGAUUUCUCU | 20 | 3734 |
| BCL11A-3250 | − | ACCAGGAUCAGUAUCGAGAG | 20 | 3735 |
| BCL11A-3251 | − | AGUCCCCUGACCCCGCGGGU | 20 | 3736 |
| BCL11A-3252 | + | GUCUGGAGUCUCCGAAGCUA | 20 | 3737 |
| BCL11A-3253 | − | GCCGGCCCAGCCCUAUGCAA | 20 | 3738 |
| BCL11A-3254 | − | GAUGUGUGGCAGUUUUCGGA | 20 | 3739 |
| BCL11A-3255 | + | CUAGAGAAAUCCAUGGCGGG | 20 | 3740 |
| BCL11A-3256 | + | GGCGCUGCCCACCAAGUCGC | 20 | 3741 |
| BCL11A-3257 | − | CCCGGGCGAGUCGGCCUCGG | 20 | 3742 |
| BCL11A-3258 | − | ACACCGCCCGGGGAGCUGGA | 20 | 3743 |
| BCL11A-3259 | + | CAGUAACCUUUGCAUAGGGC | 20 | 3744 |
| BCL11A-3260 | − | UCAGUAUCGAGAGAGGCUUC | 20 | 3745 |
| BCL11A-3261 | + | GCAUGACGUCGGGCAGGGCG | 20 | 3746 |
| BCL11A-3262 | − | CCGCAUAGAGCGCCUGGGGG | 20 | 3747 |
| BCL11A-3263 | + | CCCCCGAGGCCGACUCGCCC | 20 | 3748 |
| BCL11A-3264 | + | AGGGCGGCUUGCUACCUGGC | 20 | 3749 |
| BCL11A-3265 | + | GCACCCUGUCAAAGGCACUC | 20 | 3750 |
| BCL11A-3266 | + | CUGAUCCUGGUAUUCUUAGC | 20 | 3751 |
| BCL11A-3267 | + | CAUGUGGCGCUUCAGCUUGC | 20 | 3752 |
| BCL11A-3268 | + | CCCACCAAGUCGCUGGUGCC | 20 | 3753 |
| BCL11A-3269 | + | GGAGGCAAAAGGCGAUUGUC | 20 | 3754 |
| BCL11A-3270 | − | CCCAACCUGAUCCCGGAGAA | 20 | 3755 |
| BCL11A-3271 | + | GAGUCUCCGAAGCUAAGGAA | 20 | 3756 |
| BCL11A-3272 | − | GGCUAUGGAGCCUCCCGCCA | 20 | 3757 |
| BCL11A-3273 | + | CGUCUGCCCUCUUUUGAGCU | 20 | 3758 |
| BCL11A-3274 | − | CGCCCGGGGAGCUGGACGGA | 20 | 3759 |
| BCL11A-3275 | + | AGUAACCUUUGCAUAGGGCU | 20 | 3760 |
| BCL11A-3276 | − | UCCACCACCGAGACAUCACU | 20 | 3761 |
| BCL11A-3277 | + | GGUUGCAGUAACCUUUGCAU | 20 | 3762 |
| BCL11A-3278 | + | GCAAUAUGAAUCCCAUGGAG | 20 | 3763 |
| BCL11A-3279 | + | ACCAUGCCCUGCAUGACGUC | 20 | 3764 |
| BCL11A-3280 | + | GGCCUCGCUGAAGUGCUGCA | 20 | 3765 |
| BCL11A-3281 | − | AGAGCAACCUGGUGGUGCAC | 20 | 3766 |
| BCL11A-3282 | + | GCCCACCAAGUCGCUGGUGC | 20 | 3767 |
| BCL11A-3283 | + | UGUCAAAGGCACUCGGGUGA | 20 | 3768 |
| BCL11A-3284 | + | AGCUUGAUGCGCUUAGAGAA | 20 | 3769 |
| BCL11A-3285 | + | AGGGGGGGCGUCGCCAGGAA | 20 | 3770 |
| BCL11A-3286 | + | GUGGAAAGCGCCCUUCUGCC | 20 | 3771 |
| BCL11A-3287 | + | UGGGGGUCCAAGUGAUGUCU | 20 | 3772 |
| BCL11A-3288 | − | CUCCAUGCAGCACUUCAGCG | 20 | 3773 |
| BCL11A-3289 | + | GCGCUUCAGCUUGCUGGCCU | 20 | 3774 |
| BCL11A-3290 | − | CUUCAGCGAGGCCUUCCACC | 20 | 3775 |
| BCL11A-3291 | + | GGAGUCUCCGAAGCUAAGGA | 20 | 3776 |
| BCL11A-3292 | + | CACUCGGGUGAUGGGUGGCC | 20 | 3777 |
| BCL11A-3293 | − | UGCGCUUCUCCACACCGCCC | 20 | 3778 |
| BCL11A-3294 | + | GGUGGUGGACUAAACAGGGG | 20 | 3779 |
| BCL11A-3295 | − | CGAGGCCUUCCACCAGGUCC | 20 | 3780 |
| BCL11A-3296 | − | AAUGGCCGCGGCUGCUCCCC | 20 | 3781 |
| BCL11A-3297 | + | GUUGUACAUGUGUAGCUGCU | 20 | 3782 |
| BCL11A-3298 | − | GUUCUUCACACACCCCCAUU | 20 | 3783 |
| BCL11A-3299 | − | CGCAGCGGCACGGGAAGUGG | 20 | 3784 |
| BCL11A-3300 | + | GCGGGAGGCUCCAUAGCCAU | 20 | 3785 |
| BCL11A-3301 | − | GGUGCACCGGCGCAGCCACA | 20 | 3786 |
| BCL11A-3302 | − | CUCCACACCGCCCGGGGAGC | 20 | 3787 |
| BCL11A-3303 | + | AAAGCGCCCUUCUGCCAGGC | 20 | 3788 |
| BCL11A-3304 | + | ACUCGGGUGAUGGGUGGCCA | 20 | 3789 |
| BCL11A-3305 | + | CUGCCUGGAGGCCGCGUAGC | 20 | 3790 |
| BCL11A-3306 | + | GUCCAGCUCCCCGGGCGGUG | 20 | 3791 |
| BCL11A-3307 | − | GAGCUGGACGGAGGGAUCUC | 20 | 3792 |
| BCL11A-3308 | − | UCUAGCCCACCGCUGUCCCC | 20 | 3793 |
| BCL11A-3309 | + | AGUUGUACAUGUGUAGCUGC | 20 | 3794 |
| BCL11A-3310 | + | AUUCUGCACCUAGUCCUGAA | 20 | 3795 |
| BCL11A-3311 | − | CCACCACGAGAACAGCUCGC | 20 | 3796 |
| BCL11A-3312 | + | CUCCUAGAGAAAUCCAUGGC | 20 | 3797 |
| BCL11A-3313 | − | UUUAACCUGCUAAGAAUACC | 20 | 3798 |
| BCL11A-3314 | + | GGACUAAACAGGGGGGGAGU | 20 | 3799 |
| BCL11A-3315 | − | GGCCACCUGGCCGAGGCCGA | 20 | 3800 |
| BCL11A-3316 | + | GGCUUGCUACCUGGCUGGAA | 20 | 3801 |
| BCL11A-3317 | + | CAUUCUGCACCUAGUCCUGA | 20 | 3802 |
| BCL11A-3318 | + | UGCUGGCCUGGGUGCACGCG | 20 | 3803 |
| BCL11A-3319 | + | UGUGGCCCUCGGCCUCGGCC | 20 | 3804 |
| BCL11A-3320 | − | CCGCCCGGGGAGCUGGACGG | 20 | 3805 |
| BCL11A-3321 | − | UGGCCGAGGCCGAGGGCCAC | 20 | 3806 |
| BCL11A-3322 | + | UGGGCAUCGCGGCCGGGGGC | 20 | 3807 |
| BCL11A-3323 | + | UCUCCUAGAGAAAUCCAUGG | 20 | 3808 |
| BCL11A-3324 | + | GGGCCAUCUCUUCCGCCCCC | 20 | 3809 |
| BCL11A-3325 | + | GUUGCAGUAACCUUUGCAUA | 20 | 3810 |
| BCL11A-3326 | + | AAAGGCACUCGGGUGAUGGG | 20 | 3811 |
| BCL11A-3327 | + | GAAGGGAUCUUUGAGCUGCC | 20 | 3812 |
| BCL11A-3328 | + | GCCACACAUCUUGAGCUCUC | 20 | 3813 |
| BCL11A-3329 | − | GGAGGGAUCUCGGGGCGCAG | 20 | 3814 |
| BCL11A-3330 | − | CCCGGAGAACGGGGACGAGG | 20 | 3815 |
| BCL11A-3331 | + | UGCAUAGGGCUGGGCCGGCC | 20 | 3816 |
| BCL11A-3332 | − | CGGGGCGCGGUCGUGGGCGU | 20 | 3817 |
| BCL11A-3333 | + | GAGGGGGGGCGUCGCCAGGA | 20 | 3818 |
| BCL11A-3334 | − | ACCGCCAGCUCCCCGGAACC | 20 | 3819 |
| BCL11A-3335 | + | GGUAUUCUUAGCAGGUUAAA | 20 | 3820 |
| BCL11A-3336 | − | AGGCUUCCGGCCUGGCAGAA | 20 | 3821 |
| BCL11A-3337 | + | GAUCCCUCCGUCCAGCUCCC | 20 | 3822 |
| BCL11A-3338 | + | UGGUAUUCUUAGCAGGUUAA | 20 | 3823 |
| BCL11A-3339 | − | AUCUACUUAGAAAGCGAACA | 20 | 3824 |
| BCL11A-3340 | − | CGGCCACCUGGCCGAGGCCG | 20 | 3825 |
| BCL11A-3341 | − | CAACACGCACAGAACACUCA | 20 | 3826 |
| BCL11A-3342 | + | GCCGGCCUGGGGACAGCGGU | 20 | 3827 |
| BCL11A-3343 | − | GCCACCACGAGAACAGCUCG | 20 | 3828 |
| BCL11A-3344 | + | GUAUUCUUAGCAGGUUAAAG | 20 | 3829 |
| BCL11A-3345 | − | CUCUAGGAGACUUAGAGAGC | 20 | 3830 |
| BCL11A-3346 | − | AACAGCCAUUCACCAGUGCA | 20 | 3831 |
| BCL11A-3347 | + | UUGCAAGAGAAACCAUGCAC | 20 | 3832 |
| BCL11A-3348 | + | GACUUGACCGGGGGCUGGGA | 20 | 3833 |
| BCL11A-3349 | + | ACCUUUGCAUAGGGCUGGGC | 20 | 3834 |
| BCL11A-3350 | + | UCUUUUGAGCUGGGCCUGCC | 20 | 3835 |
| BCL11A-3351 | − | GAGGCCUUCCACCAGGUCCU | 20 | 3836 |
| BCL11A-3352 | + | CUUUUGAGCUGGGCCUGCCC | 20 | 3837 |
| BCL11A-3353 | + | GGGAUCUUUGAGCUGCCUGG | 20 | 3838 |
| BCL11A-3354 | − | GGGCAGGCCCAGCUCAAAAG | 20 | 3839 |
| BCL11A-3355 | + | AGCACCCUGUCAAAGGCACU | 20 | 3840 |
| BCL11A-3356 | + | UGGACUAAACAGGGGGGGAG | 20 | 3841 |
| BCL11A-3357 | + | GCUCUUGAACUUGGCCACCA | 20 | 3842 |
| BCL11A-3358 | + | GAAUCCCAUGGAGAGGUGGC | 20 | 3843 |
| BCL11A-3359 | − | GUGCACCGGCGCAGCCACAC | 20 | 3844 |
| BCL11A-3360 | − | AAAGAUCCCUUCCUUAGCUU | 20 | 3845 |
| BCL11A-3361 | + | UGUCUGCAAUAUGAAUCCCA | 20 | 3846 |
| BCL11A-3362 | − | GGCAGGCCCAGCUCAAAAGA | 20 | 3847 |
| BCL11A-3363 | + | CCUCCGUCCAGCUCCCCGGG | 20 | 3848 |
| BCL11A-3364 | − | CUGUCCAAAAAGCUGCUGCU | 20 | 3849 |
| BCL11A-3365 | + | GCUUGAUGCGCUUAGAGAAG | 20 | 3850 |
| BCL11A-3366 | − | CGGCUUCGGGCUGAGCCUGG | 20 | 3851 |
| BCL11A-3367 | + | CACCAUGCCCUGCAUGACGU | 20 | 3852 |
| BCL11A-3368 | − | UCAAGAUGUGUGGCAGUUUU | 20 | 3853 |
| BCL11A-3369 | − | GUUCAAAUUUCAGAGCAACC | 20 | 3854 |
| BCL11A-3370 | + | GAGAAGGGGCUCAGCGAGCU | 20 | 3855 |
| BCL11A-3371 | − | GCAGCGGCACGGGAAGUGGA | 20 | 3856 |
| BCL11A-3372 | + | AAGUCUCCUAGAGAAAUCCA | 20 | 3857 |
| BCL11A-3373 | + | GGUGCCGGGUUCCGGGGAGC | 20 | 3858 |
| BCL11A-3374 | − | CCUGUCCAAAAAGCUGCUGC | 20 | 3859 |
| BCL11A-3375 | + | AUAUGAAUCCCAUGGAGAGG | 20 | 3860 |
| BCL11A-3376 | − | GGGCGCAGCGGCACGGGAAG | 20 | 3861 |
| BCL11A-3377 | − | GGCCGAGGCCGAGGGCCACA | 20 | 3862 |
| BCL11A-3378 | + | GCAAGUGUCCCUGUGGCCCU | 20 | 3863 |
| BCL11A-3379 | + | GGACUUGACCGGGGGCUGGG | 20 | 3864 |
| BCL11A-3380 | + | GCUUCUCGCCCAGGACCUGG | 20 | 3865 |
| BCL11A-3381 | − | GCGCCUGGGGGCGGAAGAGA | 20 | 3866 |
| BCL11A-3382 | + | GUCCCUGUGGCCCUCGGCCU | 20 | 3867 |
| BCL11A-3383 | + | AUCCCUCCGUCCAGCUCCCC | 20 | 3868 |
| BCL11A-3384 | − | GUGCCUUUGACAGGGUGCUG | 20 | 3869 |
| BCL11A-3385 | − | CCCAGAGAGCUCAAGAUGUG | 20 | 3870 |
| BCL11A-3386 | + | GGCCCUCGGCCUCGGCCAGG | 20 | 3871 |
| BCL11A-3387 | − | GAGAGCGAGAGGGUGGACUA | 20 | 3872 |
| BCL11A-3388 | + | GGGGGCGUCGCCAGGAAGGG | 20 | 3873 |
| BCL11A-3389 | + | AGAGAAGGGGCUCAGCGAGC | 20 | 3874 |
| BCL11A-3390 | + | CCACACAUCUUGAGCUCUCU | 20 | 3875 |
| BCL11A-3391 | + | GCUGCCCAGCAGCAGCUUUU | 20 | 3876 |
| BCL11A-3392 | − | GGAGCUGGACGGAGGGAUCU | 20 | 3877 |
| BCL11A-3393 | − | GGGGGCGGAAGAGAUGGCCC | 20 | 3878 |
| BCL11A-3394 | − | AGGAGACUUAGAGAGCUGGC | 20 | 3879 |
| BCL11A-3395 | − | GAGGCUUCCGGCCUGGCAGA | 20 | 3880 |
| BCL11A-3396 | + | AAUCCCAUGGAGAGGUGGCU | 20 | 3881 |
| BCL11A-3397 | + | UGUGCAUGUGCGUCUUCAUG | 20 | 3882 |
| BCL11A-3398 | + | CUCGCCCAGGACCUGGUGGA | 20 | 3883 |
| BCL11A-3399 | + | UCCUCCUCGUCCCCGUUCUC | 20 | 3884 |
| BCL11A-3400 | + | AGAAACCAUGCACUGGUGAA | 20 | 3885 |
| BCL11A-3401 | − | CUUCGGGCUGAGCCUGGAGG | 20 | 3886 |
| BCL11A-3402 | + | GCCGGGUUCCGGGGAGCUGG | 20 | 3887 |
| BCL11A-3403 | + | AGAAGGGGCUCAGCGAGCUG | 20 | 3888 |
| BCL11A-3404 | + | CUAAACAGGGGGGGAGUGGG | 20 | 3889 |
| BCL11A-3405 | − | CAAAUUUCAGAGCAACCUGG | 20 | 3890 |
| BCL11A-3406 | + | GAGGGAGGGGGGGCGUCGCC | 20 | 3891 |
| BCL11A-3407 | + | CCUCCUCGUCCCCGUUCUCC | 20 | 3892 |
| BCL11A-3408 | + | CCAGCAGCAGCUUUUUGGAC | 20 | 3893 |
| BCL11A-3409 | − | GCCCACCGCUGUCCCCAGGC | 20 | 3894 |
| BCL11A-3410 | − | GGAGACUUAGAGAGCUGGCA | 20 | 3895 |
| BCL11A-3411 | − | AGGAGCUGACGGAGAGCGAG | 20 | 3896 |
| BCL11A-3412 | + | GAGGGGCGGAUUGCAGAGGA | 20 | 3897 |
| BCL11A-3413 | + | CAUAGGGCUGGGCCGGCCUG | 20 | 3898 |
| BCL11A-3414 | + | GGCGGAUUGCAGAGGAGGGA | 20 | 3899 |
| BCL11A-3415 | + | GGAGGGGCGGAUUGCAGAGG | 20 | 3900 |
| BCL11A-3416 | − | UUACUGCAACCAUUCCAGCC | 20 | 3901 |
| BCL11A-3417 | + | GCAUAGGGCUGGGCCGGCCU | 20 | 3902 |
| BCL11A-3418 | + | GGGCGGAUUGCAGAGGAGGG | 20 | 3903 |
| BCL11A-3419 | + | GGGUUCCGGGGAGCUGGCGG | 20 | 3904 |
| BCL11A-3420 | + | UCUCGCCCGUGUGGCUGCGC | 20 | 3905 |
| BCL11A-3421 | − | CUUCCCAGCCACCUCUCCAU | 20 | 3906 |
| BCL11A-3422 | − | GCUGACGGAGAGCGAGAGGG | 20 | 3907 |
| BCL11A-3423 | + | GCGGAUUGCAGAGGAGGGAG | 20 | 3908 |
| BCL11A-3424 | − | GGAGCUGACGGAGAGCGAGA | 20 | 3909 |
| BCL11A-3425 | − | UCUCUCCACCGCCAGCUCCC | 20 | 3910 |
| BCL11A-3426 | + | UUGACCGGGGGCUGGGAGGG | 20 | 3911 |
| BCL11A-3427 | + | CGGAUUGCAGAGGAGGGAGG | 20 | 3912 |
| BCL11A-3428 | − | GCGGGGCGCGGUCGUGGGCG | 20 | 3913 |
| BCL11A-3429 | + | GAGCUGGGCCUGCCCGGGCC | 20 | 3914 |
| BCL11A-3430 | + | CUGGGCCGGCCUGGGGACAG | 20 | 3915 |
| BCL11A-3431 | + | UGUAGGGCUUCUCGCCCGUG | 20 | 3916 |
| BCL11A-3432 | + | CCAUGGAGAGGUGGCUGGGA | 20 | 3917 |
| BCL11A-3433 | + | GGAGGAGGGGCGGAUUGCAG | 20 | 3918 |
| BCL11A-3434 | − | CCUUCCCAGCCACCUCUCCA | 20 | 3919 |
| BCL11A-3435 | + | CCCGCGAGCUGUUCUCGUGG | 20 | 3920 |
| BCL11A-3436 | + | GAUUGCAGAGGAGGGAGGGG | 20 | 3921 |
| BCL11A-3437 | + | GGCCGGCCUGGGGACAGCGG | 20 | 3922 |
| BCL11A-3438 | + | GGAUUGCAGAGGAGGGAGGG | 20 | 3923 |
| BCL11A-3439 | + | ACCGGGGGCUGGGAGGGAGG | 20 | 3924 |
| BCL11A-3440 | + | CCGGGGGCUGGGAGGGAGGA | 20 | 3925 |
| BCL11A-3441 | − | GAACGGGGACGAGGAGGAAG | 20 | 3926 |
| BCL11A-3442 | − | CCCUCCUCCCUCCCAGCCCC | 20 | 3927 |
| BCL11A-3443 | + | CGGGGGCUGGGAGGGAGGAG | 20 | 3928 |
| BCL11A-3444 | + | GGCGCUUCAGCUUGCUGGCC | 20 | 3929 |
| BCL11A-3445 | − | CGGGGACGAGGAGGAAGAGG | 20 | 3930 |
| BCL11A-3446 | − | AGAGGAGGAGGAGGAGCUGA | 20 | 3931 |
| BCL11A-3447 | + | GGGCUGGGAGGGAGGAGGGG | 20 | 3932 |
| BCL11A-3448 | − | AGAGGAGGACGACGAGGAAG | 20 | 3933 |
| BCL11A-3449 | − | CGACGAGGAAGAGGAAGAAG | 20 | 3934 |
| BCL11A-3450 | − | GGAGGAAGAGGAGGACGACG | 20 | 3935 |
| BCL11A-3451 | − | CGAGGAAGAGGAAGAAGAGG | 20 | 3936 |
| BCL11A-3452 | − | GGAAGAAGAGGAGGAAGAGG | 20 | 3937 |
| BCL11A-3453 | − | AGAGGAAGAAGAGGAGGAAG | 20 | 3938 |
| BCL11A-3454 | − | AGAAGAGGAGGAAGAGGAGG | 20 | 3939 |
| BCL11A-3455 | − | AGAGGAGGAAGAGGAGGAGG | 20 | 3940 |

[1010] Table 5A provides exemplary targeting domains for knocking out the BCL11A gene by targeting the early coding sequence the BCL11A gene selected according to first tier parameters. The targeting domains bind within first 500 bp of coding sequence downstream of start codon, good orthogonality, start with G. It is contemplated herein that the targeting domain hybridizes to the target domain through complementary base pairing. Any of the targeting domains in the table can be used with a S. aureus Cas9 molecule that generates a double strand break (Cas9 nuclease) or a single-strand break (Cas9 nickase). In an embodiment, dual targeting is used to create two double strand breaks to remove the enhancer region in the BCL11A gene, e.g., the first gRNA is used to target upstream (i.e., 5′) of the enhancer region in the BCL11A gene and the second gRNA is used to target downstream (i.e., 3′) of the enhancer region in the BCL11A gene.

[1011] Any of the targeting domains in the table can be used with a S. aureus Cas9 (nickase) molecule to generate a single strand break. In an embodiment, dual targeting is used to create two nicks on opposite DNA strands by using S. aureus Cas9 nickases with two targeting domains that are complementary to opposite DNA strands, e.g., a gRNA comprising any minus strand targeting domain may be paired any gRNA comprising a plus strand targeting domain provided that the two gRNAs are oriented on the DNA such that PAMs face outward and the distance between the 5′ ends of the gRNAs is 0-50 bp.

[1012] In an embodiment, four gRNAs (e.g., two pairs) are used to target four Cas9 nickases to create four nicks to remove the enhancer region in the BCL11A gene, e.g., the first pair of gRNAs are used to target upstream (i.e., 5′) of the enhancer region in the BCL11A gene and the second pair of gRNAs are used to target downstream (i.e., 3′) of the enhancer region in the BCL11A gene.

TABLE 5A

| | | | Target | SEQ |
|---|---|---|---|---|
| | DNA | | Site | ID |
| gRNA Name | Strand | Targeting Domain | Length | NO |
| BCL11A-3456 | − | GAACCAGACCACGGCCCGUU | 20 | 3941 |
| BCL11A-3457 | + | GACCUGGAUGCCAACCUCCA | 20 | 3942 |
| BCL11A-3458 | + | GAUUAGAGCUCCAUGUG | 17 | 3943 |
| BCL11A-3459 | − | GAUUGUUUAUCAACGUCAUC | 20 | 3944 |
| BCL11A-3460 | + | GCACUCAUCCCAGGCGU | 17 | 3945 |
| BCL11A-3461 | + | GGGGAUUAGAGCUCCAUGUG | 20 | 3946 |
| BCL11A-3462 | − | GUGCAGAAUAUGCCCCG | 17 | 3947 |

[1013] Table 5B provides exemplary targeting domains for knocking out the BCL11A gene by targeting the early coding sequence the BCL11A gene selected according to second tier parameters. The targeting domains bind within first 500 bp of coding sequence downstream of start codon, good orthogonality, and do not start with G. It is contemplated herein that the targeting domain hybridizes to the target domain through complementary base pairing. Any of the targeting domains in the table can be used with a S. aureus Cas9 molecule that generates a double strand break (Cas9 nuclease) or a single-strand break (Cas9 nickase). In an embodiment, dual targeting is used to create two double strand breaks to remove the enhancer region in the BCL11A gene, e.g., the first gRNA is used to target upstream (i.e., 5′) of the enhancer region in the BCL11A gene and the second gRNA is used to target downstream (i.e., 3′) of the enhancer region in the BCL11A gene.

[1014] Any of the targeting domains in the table can be used with a S. aureus Cas9 (nickase) molecule to generate a single strand break. In an embodiment, dual targeting is used to create two nicks on opposite DNA strands by using S. aureus Cas9 nickases with two targeting domains that are complementary to opposite DNA strands, e.g., a gRNA comprising any minus strand targeting domain may be paired any gRNA comprising a plus strand targeting domain provided that the two gRNAs are oriented on the DNA such that PAMs face outward and the distance between the 5′ ends of the gRNAs is 0-50 bp.

[1015] In an embodiment, four gRNAs (e.g., two pairs) are used to target four Cas9 nickases to create four nicks to remove the enhancer region in the BCL11A gene, e.g., the first pair of gRNAs are used to target upstream (i.e., 5′) of the enhancer region in the BCL11A gene and the second pair of gRNAs are used to target downstream (i.e., 3′) of the enhancer region in the BCL11A gene.

TABLE 5B
2nd Tier

| | | | Target | SEQ |
|---|---|---|---|---|
| | DNA | | Site | ID |
| gRNA Name | Strand | Targeting Domain | Length | NO |
| BCL11A-3463 | − | AACCAGACCACGGCCCG | 17 | 3948 |
| BCL11A-3464 | + | AAUUCCCGUUUGCUUAAGUG | 20 | 3949 |
| BCL11A-3465 | − | ACCAGACCACGGCCCGU | 17 | 3950 |
| BCL11A-3466 | − | AUGAACCAGACCACGGCCCG | 20 | 3951 |
| BCL11A-3467 | + | AUUCCCGUUUGCUUAAGUGC | 20 | 3952 |
| BCL11A-3468 | − | CCAGACCACGGCCCGUU | 17 | 3953 |
| BCL11A-3469 | + | CCCGUUUGCUUAAGUGC | 17 | 3954 |
| BCL11A-3470 | + | CCUGGAUGCCAACCUCC | 17 | 3955 |
| BCL11A-3471 | + | CUGGAUGCCAACCUCCA | 17 | 3956 |
| BCL11A-3472 | + | UCAUCCUCUGGCGUGAC | 17 | 3957 |
| BCL11A-3473 | + | UCCCGUUUGCUUAAGUG | 17 | 3958 |
| BCL11A-3474 | + | UCGUCAUCCUCUGGCGUGAC | 20 | 3959 |
| BCL11A-3475 | + | UCUGCACUCAUCCCAGGCGU | 20 | 3960 |
| BCL11A-3476 | + | UCUGGUUCAUCAUCUGU | 17 | 3961 |
| BCL11A-3477 | − | UGAACCAGACCACGGCCCGU | 20 | 3962 |
| BCL11A-3478 | + | UGACCUGGAUGCCAACCUCC | 20 | 3963 |
| BCL11A-3479 | − | UGAGUGCAGAAUAUGCCCCG | 20 | 3964 |
| BCL11A-3480 | + | UGCACUCAUCCCAGGCG | 17 | 3965 |
| BCL11A-3481 | + | UGGUCUGGUUCAUCAUCUGU | 20 | 3966 |
| BCL11A-3482 | − | UGUUUAUCAACGUCAUC | 17 | 3967 |
| BCL11A-3483 | − | UGUUUAUCAACGUCAUCUAG | 20 | 3968 |
| BCL11A-3484 | − | UUAUCAACGUCAUCUAG | 17 | 3969 |
| BCL11A-3485 | + | UUCUGCACUCAUCCCAGGCG | 20 | 3970 |
| BCL11A-3486 | − | UUGUUUAUCAACGUCAUCUA | 20 | 3971 |
| BCL11A-3487 | − | UUUAUCAACGUCAUCUA | 17 | 3972 |

[1016] Table 5C provides exemplary targeting domains for knocking out the BCL11A gene by targeting the early coding sequence the BCL11A gene selected according to third tier parameters. The targeting domains bind within first 500 bp of coding sequence downstream of start codon and start with G. It is contemplated herein that the targeting domain hybridizes to the target domain through complementary base pairing. Any of the targeting domains in the table can be used with a S. aureus Cas9 molecule that generates a double strand break (Cas9 nuclease) or a single-strand break (Cas9 nickase). In an embodiment, dual targeting is used to create two double strand breaks to remove the enhancer region in the BCL11A gene, e.g., the first gRNA is used to target upstream (i.e., 5′) of the enhancer region in the BCL11A gene and the second gRNA is used to target downstream (i.e., 3′) of the enhancer region in the BCL11A gene.

[1017] Any of the targeting domains in the table can be used with a S. aureus Cas9 (nickase) molecule to generate a single strand break. In an embodiment, dual targeting is used to create two nicks on opposite DNA strands by using S. aureus Cas9 nickases with two targeting domains that are complementary to opposite DNA strands, e.g., a gRNA comprising any minus strand targeting domain may be paired any gRNA comprising a plus strand targeting domain provided that the two gRNAs are oriented on the DNA such that PAMs face outward and the distance between the 5′ ends of the gRNAs is 0-50 bp.

[1018] In an embodiment, four gRNAs (e.g., two pairs) are used to target four Cas9 nickases to create four nicks to remove the enhancer region in the BCL11A gene, e.g., the first pair of gRNAs are used to target upstream (i.e., 5′) of the enhancer region in the BCL11A gene and the second pair of gRNAs are used to target downstream (i.e., 3′) of the enhancer region in the BCL11A gene.

TABLE 5C
3rd Tier

| | | | Target | SEQ |
|---|---|---|---|---|
| | DNA | | Site | ID |
| gRNA Name | Strand | Targeting Domain | Length | NO |
| BCL11A-3488 | − | GAAAAAAGCAUCCAAUCCCG | 20 | 3973 |
| BCL11A-3489 | + | GAGAGGCCCCUCCAGUG | 17 | 3974 |
| BCL11A-3490 | + | GAGCUCCAUGUGCAGAACGA | 20 | 3975 |
| BCL11A-3491 | − | GAGGAAUUUGCCCCAAA | 17 | 3976 |
| BCL11A-3492 | + | GAGGAGAGGCCCCUCCAGUG | 20 | 3977 |
| BCL11A-3493 | + | GAGGAGGUCAUGAUCCCCUU | 20 | 3978 |
| BCL11A-3494 | + | GAGGUCAUGAUCCCCUU | 17 | 3979 |
| BCL11A-3495 | − | GCAUCCAGGUCACGCCA | 17 | 3980 |
| BCL11A-3496 | − | GCCACCUUCCCCUUCACCAA | 20 | 3981 |
| BCL11A-3497 | − | GCCAGAUGAACUUCCCA | 17 | 3982 |
| BCL11A-3498 | − | GCCAGAUGAACUUCCCAUUG | 20 | 3983 |
| BCL11A-3499 | − | GCCCGUUGGGAGCUCCAGAA | 20 | 3984 |
| BCL11A-3500 | − | GCCUCUGCUUAGAAAAAGCU | 20 | 3985 |
| BCL11A-3501 | + | GCUCCAUGUGCAGAACG | 17 | 3986 |
| BCL11A-3502 | − | GCUCUAAUCCCCACGCC | 17 | 3987 |
| BCL11A-3503 | − | GGACAUUCUUAUUUUUA | 17 | 3988 |
| BCL11A-3504 | − | GGAGCUCUAAUCCCCACGCC | 20 | 3989 |
| BCL11A-3505 | − | GGAUCAUGACCUCCUCACCU | 20 | 3990 |
| BCL11A-3506 | + | GGAUGCCAACCUCCACGGGA | 20 | 3991 |
| BCL11A-3507 | + | GGCACUGCCCACAGGUG | 17 | 3992 |
| BCL11A-3508 | − | GGCCCGUUGGGAGCUCCAGA | 20 | 3993 |
| BCL11A-3509 | − | GGGGGACAUUCUUAUUUUUA | 20 | 3994 |
| BCL11A-3510 | − | GGUUGGCAUCCAGGUCACGC | 20 | 3995 |
| BCL11A-3511 | + | GGUUUGCCUUGCUUGCG | 17 | 3996 |
| BCL11A-3512 | + | GUGCAGAACGAGGGGAG | 17 | 3997 |
| BCL11A-3513 | − | GUGCCAGAUGAACUUCCCAU | 20 | 3998 |

[1019] Table 5D provides exemplary targeting domains for knocking out the BCL11A gene by targeting the early coding sequence the BCL11A gene selected according to forth tier parameters. The targeting domains bind within first 500 bp of coding sequence downstream of start codon and do not start with G. It is contemplated herein that the targeting domain hybridizes to the target domain through complementary base pairing. Any of the targeting domains in the table can be used with a S. aureus Cas9 molecule that generates a double strand break (Cas9 nuclease) or a single-strand break (Cas9 nickase). In an embodiment, dual targeting is used to create two double strand breaks to remove the enhancer region in the BCL11A gene, e.g., the first gRNA is used to target upstream (i.e., 5′) of the enhancer region in the BCL11A gene and the second gRNA is used to target downstream (i.e., 3′) of the enhancer region in the BCL11A gene.

[1020] Any of the targeting domains in the table can be used with a S. aureus Cas9 (nickase) molecule to generate a single strand break. In an embodiment, dual targeting is used to create two nicks on opposite DNA strands by using S. aureus Cas9 nickases with two targeting domains that are complementary to opposite DNA strands, e.g., a gRNA comprising any minus strand targeting domain may be paired any gRNA comprising a plus strand targeting domain provided that the two gRNAs are oriented on the DNA such that PAMs face outward and the distance between the 5′ ends of the gRNAs is 0-50 bp.

[1021] In an embodiment, four gRNAs (e.g., two pairs) are used to target four Cas9 nickases to create four nicks to remove the enhancer region in the BCL11A gene, e.g., the first pair of gRNAs are used to target upstream (i.e., 5′) of the enhancer region in the BCL11A gene and the second pair of gRNAs are used to target downstream (i.e., 3′) of the enhancer region in the BCL11A gene.

TABLE 5D
4th Tier

| | | | Target | SEQ |
|---|---|---|---|---|
| | DNA | | Site | ID |
| gRNA Name | Strand | Targeting Domain | Length | NO |
| BCL11A-3514 | − | AAAAAGCAUCCAAUCCC | 17 | 3999 |
| BCL11A-3515 | + | AAAAAUAAGAAUGUCCCCCA | 20 | 4000 |
| BCL11A-3516 | − | AAAAGCAUCCAAUCCCG | 17 | 4001 |
| BCL11A-3517 | + | AAAAUAAGAAUGUCCCCCAA | 20 | 4002 |
| BCL11A-3518 | − | AAACCCCAGCACUUAAGCAA | 20 | 4003 |
| BCL11A-3519 | + | AAAUAAGAAUGUCCCCCAAU | 20 | 4004 |
| BCL11A-3520 | − | AACCCCAGCACUUAAGCAAA | 20 | 4005 |
| BCL11A-3521 | + | AAUAAGAAUGUCCCCCA | 17 | 4006 |
| BCL11A-3522 | − | ACCCCAGCACUUAAGCAAAC | 20 | 4007 |
| BCL11A-3523 | − | ACCUUCCCCUUCACCAA | 17 | 4008 |
| BCL11A-3524 | + | AGAGCUCCAUGUGCAGA | 17 | 4009 |
| BCL11A-3525 | + | AGAGCUCCAUGUGCAGAACG | 20 | 4010 |
| BCL11A-3526 | − | AGAUGAACUUCCCAUUG | 17 | 4011 |
| BCL11A-3527 | − | AGCCAUUCUUACAGAUG | 17 | 4012 |
| BCL11A-3528 | + | AGCUCCAUGUGCAGAAC | 17 | 4013 |
| BCL11A-3529 | + | AGCUCCAUGUGCAGAACGAG | 20 | 4014 |
| BCL11A-3530 | − | AGCUCUAAUCCCCACGC | 17 | 4015 |
| BCL11A-3531 | − | AGGAAUUUGCCCCAAAC | 17 | 4016 |
| BCL11A-3532 | + | AGGAGGUCAUGAUCCCCUUC | 20 | 4017 |
| BCL11A-3533 | + | AGGUCAUGAUCCCCUUC | 17 | 4018 |
| BCL11A-3534 | − | AGUGCCAGAUGAACUUCCCA | 20 | 4019 |
| BCL11A-3535 | + | AUAAGAAUGUCCCCCAA | 17 | 4020 |
| BCL11A-3536 | + | AUCCCAGGCGUGGGGAU | 17 | 4021 |
| BCL11A-3537 | + | AUCCCCUUCUGGAGCUCCCA | 20 | 4022 |
| BCL11A-3538 | + | AUCUGGCACUGCCCACAGGU | 20 | 4023 |
| BCL11A-3539 | − | AUGCAAUGGCAGCCUCUGCU | 20 | 4024 |
| BCL11A-3540 | + | AUGUGCAGAACGAGGGG | 17 | 4025 |
| BCL11A-3541 | + | AUUAGAGCUCCAUGUGCAGA | 20 | 4026 |
| BCL11A-3542 | + | AUUCUGCACUCAUCCCAGGC | 20 | 4027 |
| BCL11A-3543 | − | AUUUUUAUCGAGCACAA | 17 | 4028 |
| BCL11A-3544 | − | CAAUGGCAGCCUCUGCU | 17 | 4029 |
| BCL11A-3545 | − | CACGCCUGGGAUGAGUG | 17 | 4030 |
| BCL11A-3546 | − | CAGAUGAACUUCCCAUU | 17 | 4031 |
| BCL11A-3547 | + | CAUCUCGAUUGGUGAAG | 17 | 4032 |
| BCL11A-3548 | + | CAUGUGCAGAACGAGGG | 17 | 4033 |
| BCL11A-3549 | + | CAUGUGCAGAACGAGGGGAG | 20 | 4034 |
| BCL11A-3550 | + | CCACAGCUUUUUCUAAG | 17 | 4035 |
| BCL11A-3551 | − | CCACGGCCCGUUGGGAGCUC | 20 | 4036 |
| BCL11A-3552 | − | CCAGAUGAACUUCCCAU | 17 | 4037 |
| BCL11A-3553 | − | CCAGCACUUAAGCAAAC | 17 | 4038 |
| BCL11A-3554 | − | CCCAGCACUUAAGCAAA | 17 | 4039 |
| BCL11A-3555 | − | CCCCACGCCUGGGAUGAGUG | 20 | 4040 |
| BCL11A-3556 | − | CCCCAGCACUUAAGCAA | 17 | 4041 |
| BCL11A-3557 | − | CCCCUUCACCAAUCGAG | 17 | 4042 |
| BCL11A-3558 | − | CCCGUUGGGAGCUCCAG | 17 | 4043 |
| BCL11A-3559 | + | CCCUUCUGGAGCUCCCA | 17 | 4044 |
| BCL11A-3560 | − | CCGUUGGGAGCUCCAGA | 17 | 4045 |
| BCL11A-3561 | − | CCUGUGGGCAGUGCCAG | 17 | 4046 |
| BCL11A-3562 | − | CGGCCCGUUGGGAGCUC | 17 | 4047 |
| BCL11A-3563 | − | CGGCCCGUUGGGAGCUCCAG | 20 | 4048 |
| BCL11A-3564 | − | CGUUGGGAGCUCCAGAA | 17 | 4049 |
| BCL11A-3565 | + | CGUUUGUGCUCGAUAAAAAU | 20 | 4050 |
| BCL11A-3566 | − | CUAGAGGAAUUUGCCCCAAA | 20 | 4051 |
| BCL11A-3567 | + | CUCAUCCCAGGCGUGGGGAU | 20 | 4052 |
| BCL11A-3568 | + | CUCCAUGUGCAGAACGA | 17 | 4053 |
| BCL11A-3569 | + | CUCCAUGUGCAGAACGAGGG | 20 | 4054 |
| BCL11A-3570 | − | CUCCCCUCGUUCUGCAC | 17 | 4055 |
| BCL11A-3571 | − | CUCCUCCCCUCGUUCUGCAC | 20 | 4056 |
| BCL11A-3572 | − | CUCUAAUCCCCACGCCUGGG | 20 | 4057 |
| BCL11A-3573 | + | CUGCACUCAUCCCAGGC | 17 | 4058 |
| BCL11A-3574 | − | CUUAUUUUUAUCGAGCACAA | 20 | 4059 |
| BCL11A-3575 | − | CUUCCCCUUCACCAAUCGAG | 20 | 4060 |
| BCL11A-3576 | + | UAAGAAUGUCCCCCAAU | 17 | 4061 |
| BCL11A-3577 | − | UAAUCCCCACGCCUGGG | 17 | 4062 |
| BCL11A-3578 | + | UAGAGCUCCAUGUGCAGAAC | 20 | 4063 |
| BCL11A-3579 | − | UAGAGGAAUUUGCCCCAAAC | 20 | 4064 |
| BCL11A-3580 | + | UAUCCACAGCUUUUUCUAAG | 20 | 4065 |
| BCL11A-3581 | − | UCACCUGUGGGCAGUGCCAG | 20 | 4066 |
| BCL11A-3582 | + | UCAUCUCGAUUGGUGAA | 17 | 4067 |
| BCL11A-3583 | + | UCAUCUGGCACUGCCCACAG | 20 | 4068 |
| BCL11A-3584 | + | UCAUCUGUAAGAAUGGCUUC | 20 | 4069 |
| BCL11A-3585 | − | UCAUGACCUCCUCACCU | 17 | 4070 |
| BCL11A-3586 | + | UCCAUGUGCAGAACGAG | 17 | 4071 |
| BCL11A-3587 | + | UCCAUGUGCAGAACGAGGGG | 20 | 4072 |
| BCL11A-3588 | − | UCCCCUCGUUCUGCACA | 17 | 4073 |
| BCL11A-3589 | − | UCCUCCCCUCGUUCUGCACA | 20 | 4074 |
| BCL11A-3590 | − | UCUGCUUAGAAAAAGCU | 17 | 4075 |
| BCL11A-3591 | + | UCUGGCACUGCCCACAG | 17 | 4076 |
| BCL11A-3592 | + | UCUGGCACUGCCCACAGGUG | 20 | 4077 |
| BCL11A-3593 | + | UCUGUAAGAAUGGCUUC | 17 | 4078 |
| BCL11A-3594 | − | UGAAAAAAGCAUCCAAUCCC | 20 | 4079 |
| BCL11A-3595 | − | UGAAGCCAUUCUUACAGAUG | 20 | 4080 |
| BCL11A-3596 | + | UGCCAACCUCCACGGGA | 17 | 4081 |
| BCL11A-3597 | − | UGCCAGAUGAACUUCCCAUU | 20 | 4082 |
| BCL11A-3598 | + | UGCUUUUUUCAUCUCGAUUG | 20 | 4083 |
| BCL11A-3599 | − | UGGAGCUCUAAUCCCCACGC | 20 | 4084 |
| BCL11A-3600 | + | UGGCACUGCCCACAGGU | 17 | 4085 |
| BCL11A-3601 | − | UGGCAUCCAGGUCACGC | 17 | 4086 |
| BCL11A-3602 | + | UGGGGUUUGCCUUGCUUGCG | 20 | 4087 |
| BCL11A-3603 | − | UUAUUUUUAUCGAGCACAAA | 20 | 4088 |
| BCL11A-3604 | + | UUCAUCUCGAUUGGUGA | 17 | 4089 |
| BCL11A-3605 | − | UUGGCAUCCAGGUCACGCCA | 20 | 4090 |
| BCL11A-3606 | + | UUGUGCUCGAUAAAAAU | 17 | 4091 |
| BCL11A-3607 | + | UUUCAUCUCGAUUGGUG | 17 | 4092 |
| BCL11A-3608 | + | UUUCAUCUCGAUUGGUGAAG | 20 | 4093 |
| BCL11A-3609 | + | UUUUCAUCUCGAUUGGUGAA | 20 | 4094 |
| BCL11A-3610 | − | UUUUUAUCGAGCACAAA | 17 | 4095 |
| BCL11A-3611 | + | UUUUUCAUCUCGAUUGGUGA | 20 | 4096 |
| BCL11A-3612 | + | UUUUUUCAUCUCGAUUG | 17 | 4097 |
| BCL11A-3613 | + | UUUUUUCAUCUCGAUUGGUG | 20 | 4098 |

[1022] Table 5E provides exemplary targeting domains for knocking out the BCL11A gene by targeting the early coding sequence the BCL11A gene selected according to fifth tier parameters. The targeting domains target outside the first 500 bp of coding sequence downstream of start codon. It is contemplated herein that the targeting domain hybridizes to the target domain through complementary base pairing. Any of the targeting domains in the table can be used with a S. aureus Cas9 molecule that generates a double strand break (Cas9 nuclease) or a single-strand break (Cas9 nickase). In an embodiment, dual targeting is used to create two double strand breaks to remove the enhancer region in the BCL11A gene, e.g., the first gRNA is used to target upstream (i.e., 5′) of the enhancer region in the BCL11A gene and the second gRNA is used to target downstream (i.e., 3′) of the enhancer region in the BCL11A gene.

[1023] Any of the targeting domains in the table can be used with a S. aureus Cas9 (nickase) molecule to generate a single strand break. In an embodiment, dual targeting is used to create two nicks on opposite DNA strands by using S. aureus Cas9 nickases with two targeting domains that are complementary to opposite DNA strands, e.g., a gRNA comprising any minus strand targeting domain may be paired any gRNA comprising a plus strand targeting domain provided that the two gRNAs are oriented on the DNA such that PAMs face outward and the distance between the 5′ ends of the gRNAs is 0-50 bp.

[1024] In an embodiment, four gRNAs (e.g., two pairs) are used to target four Cas9 nickases to create four nicks to remove the enhancer region in the BCL11A gene, e.g., the first pair of gRNAs are used to target upstream (i.e., 5′) of the enhancer region in the BCL11A gene and the second pair of gRNAs are used to target downstream (i.e., 3′) of the enhancer region in the BCL11A gene.

TABLE 5E
5th Tier

| | | | Target | SEQ |
|---|---|---|---|---|
| | DNA | | Site | ID |
| gRNA Name | Strand | Targeting Domain | Length | NO |
| BCL11A-3614 | + | UCGUCGGACUUGACCGUCAU | 20 | 4099 |
| BCL11A-3615 | + | GUCGUCGGACUUGACCGUCA | 20 | 4100 |
| BCL11A-3616 | + | CGUCGUCGGACUUGACCGUC | 20 | 4101 |
| BCL11A-3617 | + | CGUCGGACUUGACCGUCAUG | 20 | 4102 |
| BCL11A-3618 | − | CCCAUAUUAGUGGUCCGGGC | 20 | 4103 |
| BCL11A-3619 | + | GCGGUCCGACUCGCCGGCCA | 20 | 4104 |
| BCL11A-3620 | + | CUCCGAGGAGUGCUCCGACG | 20 | 4105 |
| BCL11A-3621 | − | CCCCCAUUCGGCGUAGUACC | 20 | 4106 |
| BCL11A-3622 | + | UCUCCGAGGAGUGCUCCGAC | 20 | 4107 |
| BCL11A-3623 | − | CCCGCGGGUUGGUAUCCCUU | 20 | 4108 |
| BCL11A-3624 | + | GCGAGUACACGUUCUCCGUG | 20 | 4109 |
| BCL11A-3625 | − | CCCAUUCGGCGUAGUACCCA | 20 | 4110 |
| BCL11A-3626 | + | CUCCGUGUUGGGCAUCGCGG | 20 | 4111 |
| BCL11A-3627 | + | CCGCGCUUAUGCUUCUCGCC | 20 | 4112 |
| BCL11A-3628 | − | CGACGAAGACUCGGUGGCCG | 20 | 4113 |
| BCL11A-3629 | − | ACCCCCACCGCAUAGAGCGC | 20 | 4114 |
| BCL11A-3630 | + | ACUACGCCGAAUGGGGGUGU | 20 | 4115 |
| BCL11A-3631 | + | CCGGGCCCGGACCACUAAUA | 20 | 4116 |
| BCL11A-3632 | + | CGCGUAGCCGGCGAGCCACU | 20 | 4117 |
| BCL11A-3633 | − | UCGGAGCACUCCUCGGAGAA | 20 | 4118 |
| BCL11A-3634 | − | CGGAGCACUCCUCGGAGAAC | 20 | 4119 |
| BCL11A-3635 | + | UCUCUGGGUACUACGCCGAA | 20 | 4120 |
| BCL11A-3636 | + | UGCCGCAGAACUCGCAUGAC | 20 | 4121 |
| BCL11A-3637 | + | GAUACCAACCCGCGGGGUCA | 20 | 4122 |
| BCL11A-3638 | + | GGAUACCAACCCGCGGGGUC | 20 | 4123 |
| BCL11A-3639 | + | GGGAUACCAACCCGCGGGGU | 20 | 4124 |
| BCL11A-3640 | − | CCCCCACCGCAUAGAGCGCC | 20 | 4125 |
| BCL11A-3641 | + | GGUUGGGGUCGUUCUCGCUC | 20 | 4126 |
| BCL11A-3642 | − | GCACGCCCCAUAUUAGUGGU | 20 | 4127 |
| BCL11A-3643 | − | UAAGCGCAUCAAGCUCGAGA | 20 | 4128 |
| BCL11A-3644 | + | GUUCUCCGAGGAGUGCUCCG | 20 | 4129 |
| BCL11A-3645 | + | UCUCGAGCUUGAUGCGCUUA | 20 | 4130 |
| BCL11A-3646 | − | CUAAGCGCAUCAAGCUCGAG | 20 | 4131 |
| BCL11A-3647 | − | GUCGGAGCACUCCUCGGAGA | 20 | 4132 |
| BCL11A-3648 | − | UGGCCGCGGCUGCUCCCCGG | 20 | 4133 |
| BCL11A-3649 | − | CCCCACCGCAUAGAGCGCCU | 20 | 4134 |
| BCL11A-3650 | + | CCUGAAGGGAUACCAACCCG | 20 | 4135 |
| BCL11A-3651 | − | GCGCUUCUCCACACCGCCCG | 20 | 4136 |
| BCL11A-3652 | − | GCGCCCUGCCCGACGUCAUG | 20 | 4137 |
| BCL11A-3653 | − | AACCCGGCACCAGCGACUUG | 20 | 4138 |
| BCL11A-3654 | + | CUCUGGGUACUACGCCGAAU | 20 | 4139 |
| BCL11A-3655 | + | CCCGUUCUCCGGGAUCAGGU | 20 | 4140 |
| BCL11A-3656 | − | GAACGACCCCAACCUGAUCC | 20 | 4141 |
| BCL11A-3657 | + | ACGCCGAAUGGGGGUGUGUG | 20 | 4142 |
| BCL11A-3658 | + | GUCGCUGGUGCCGGGUUCCG | 20 | 4143 |
| BCL11A-3659 | − | CCCCGGGCGAGUCGGCCUCG | 20 | 4144 |
| BCL11A-3660 | + | CGGUGCACCACCAGGUUGCU | 20 | 4145 |
| BCL11A-3661 | − | GUCCACCACCGAGACAUCAC | 20 | 4146 |
| BCL11A-3662 | − | UUAAUGGCCGCGGCUGCUCC | 20 | 4147 |
| BCL11A-3663 | + | CUCUCUGGGUACUACGCCGA | 20 | 4148 |
| BCL11A-3664 | + | GCGCAAACUCCCGUUCUCCG | 20 | 4149 |
| BCL11A-3665 | + | CCCGGGCCCGGACCACUAAU | 20 | 4150 |
| BCL11A-3666 | + | GCCCCCAGGCGCUCUAUGCG | 20 | 4151 |
| BCL11A-3667 | − | AUCGCCUUUUGCCUCCUCGU | 20 | 4152 |
| BCL11A-3668 | − | CCUCGUCGGAGCACUCCUCG | 20 | 4153 |
| BCL11A-3669 | + | GAGCUUGAUGCGCUUAGAGA | 20 | 4154 |
| BCL11A-3670 | + | CCCCGUUCUCCGGGAUCAGG | 20 | 4155 |
| BCL11A-3671 | − | CGGCCGCGAUGCCCAACACG | 20 | 4156 |
| BCL11A-3672 | + | GCCCCCCGAGGCCGACUCGC | 20 | 4157 |
| BCL11A-3673 | − | CCCGGCCGCGAUGCCCAACA | 20 | 4158 |
| BCL11A-3674 | − | CUCCUCGUCGGAGCACUCCU | 20 | 4159 |
| BCL11A-3675 | + | GUCUCGGUGGUGGACUAAAC | 20 | 4160 |
| BCL11A-3676 | + | CCCCAGGCGCUCUAUGCGGU | 20 | 4161 |
| BCL11A-3677 | + | GGUCGCACAGGUUGCACUUG | 20 | 4162 |
| BCL11A-3678 | + | AGUCGCUGGUGCCGGGUUCC | 20 | 4163 |
| BCL11A-3679 | − | CCCGGUCAAGUCCAAGUCAU | 20 | 4164 |
| BCL11A-3680 | − | AGAACGACCCCAACCUGAUC | 20 | 4165 |
| BCL11A-3681 | + | UCCGUGUUGGGCAUCGCGGC | 20 | 4166 |
| BCL11A-3682 | − | CCUCCUCGUCGGAGCACUCC | 20 | 4167 |
| BCL11A-3683 | − | UCACUUGGACCCCCACCGCA | 20 | 4168 |
| BCL11A-3684 | − | CCCAACCUGAUCCCGGAGAA | 20 | 4169 |
| BCL11A-3685 | − | ACUACGGCUUCGGGCUGAGC | 20 | 4170 |
| BCL11A-3686 | − | UUUGCGCUUCUCCACACCGC | 20 | 4171 |
| BCL11A-3687 | + | AAGUCGCUGGUGCCGGGUUC | 20 | 4172 |
| BCL11A-3688 | − | CCCCAACCUGAUCCCGGAGA | 20 | 4173 |
| BCL11A-3689 | − | AAGACUCGGUGGCCGGCGAG | 20 | 4174 |
| BCL11A-3690 | − | GCGCGGCCACCUGGCCGAGG | 20 | 4175 |
| BCL11A-3691 | − | AAUCGCCUUUUGCCUCCUCG | 20 | 4176 |
| BCL11A-3692 | − | ACGACCCCAACCUGAUCCCG | 20 | 4177 |
| BCL11A-3693 | − | GAUCCCGGAGAACGGGGACG | 20 | 4178 |
| BCL11A-3694 | + | GGGGCAGGUCGAACUCCUUC | 20 | 4179 |
| BCL11A-3695 | − | UGGCUAUGGAGCCUCCCGCC | 20 | 4180 |
| BCL11A-3696 | + | CCCCCAGGCGCUCUAUGCGG | 20 | 4181 |
| BCL11A-3697 | − | GCGGUUGAAUCCAAUGGCUA | 20 | 4182 |
| BCL11A-3698 | − | CUACGGCUUCGGGCUGAGCC | 20 | 4183 |
| BCL11A-3699 | − | ACAGCUCGCGGGGCGCGGUC | 20 | 4184 |
| BCL11A-3700 | − | CCCCCCUGUUUAGUCCACCA | 20 | 4185 |
| BCL11A-3701 | + | CGCAUGACUUGGACUUGACC | 20 | 4186 |
| BCL11A-3702 | − | CACGGAAGUCCCCUGACCCC | 20 | 4187 |
| BCL11A-3703 | − | CCUCCCGCCAUGGAUUUCUC | 20 | 4188 |
| BCL11A-3704 | + | UCUCGGUGGUGGACUAAACA | 20 | 4189 |
| BCL11A-3705 | + | UGAACUUGGCCACCACGGAC | 20 | 4190 |
| BCL11A-3706 | − | CUUCUCUAAGCGCAUCAAGC | 20 | 4191 |
| BCL11A-3707 | + | AGCGCAAACUCCCGUUCUCC | 20 | 4192 |
| BCL11A-3708 | + | UCGGUGGUGGACUAAACAGG | 20 | 4193 |
| BCL11A-3709 | − | CGCCACCACGAGAACAGCUC | 20 | 4194 |
| BCL11A-3710 | − | CUCCCGCCAUGGAUUUCUCU | 20 | 4195 |
| BCL11A-3711 | + | CGAGCUUGAUGCGCUUAGAG | 20 | 4196 |
| BCL11A-3712 | + | AUGCCCUGCAUGACGUCGGG | 20 | 4197 |
| BCL11A-3713 | − | UCUCUAAGCGCAUCAAGCUC | 20 | 4198 |
| BCL11A-3714 | + | GUCCAAGUGAUGUCUCGGUG | 20 | 4199 |
| BCL11A-3715 | + | CCCCCGAGGCCGACUCGCCC | 20 | 4200 |
| BCL11A-3716 | + | CCCCGAGGCCGACUCGCCCG | 20 | 4201 |
| BCL11A-3717 | + | GAAAUUUGAACGUCUUGCCG | 20 | 4202 |
| BCL11A-3718 | + | GUCGCUGCGUCUGCCCUCUU | 20 | 4203 |
| BCL11A-3719 | − | UGGAGGCGGCGCGCCACCAC | 20 | 4204 |
| BCL11A-3720 | + | CUUCUCGAGCUUGAUGCGCU | 20 | 4205 |
| BCL11A-3721 | + | GAAGCGCAAACUCCCGUUCU | 20 | 4206 |
| BCL11A-3722 | − | GAGAGAGGCUUCCGGCCUGG | 20 | 4207 |
| BCL11A-3723 | − | UCCCCGGGCGAGUCGGCCUC | 20 | 4208 |
| BCL11A-3724 | + | CAAGUCGCUGGUGCCGGGUU | 20 | 4209 |
| BCL11A-3725 | − | CAUAGAGCGCCUGGGGGCGG | 20 | 4210 |
| BCL11A-3726 | + | CUCGGUGGUGGACUAAACAG | 20 | 4211 |
| BCL11A-3727 | + | CCCCCCGAGGCCGACUCGCC | 20 | 4212 |
| BCL11A-3728 | − | GGUUUCUCUUGCAACACGCA | 20 | 4213 |
| BCL11A-3729 | + | ACUUGGACUUGACCGGGGGC | 20 | 4214 |
| BCL11A-3730 | − | UGAUCCCGGAGAACGGGGAC | 20 | 4215 |
| BCL11A-3731 | + | UGUCUGGAGUCUCCGAAGCU | 20 | 4216 |
| BCL11A-3732 | − | AUGGAUUUCUCUAGGAGACU | 20 | 4217 |
| BCL11A-3733 | − | UGCGGUUGAAUCCAAUGGCU | 20 | 4218 |
| BCL11A-3734 | − | CUCCCCGGGCGAGUCGGCCU | 20 | 4219 |
| BCL11A-3735 | − | CCUGAUCCCGGAGAACGGGG | 20 | 4220 |
| BCL11A-3736 | + | UGUCUCGGUGGUGGACUAAA | 20 | 4221 |
| BCL11A-3737 | + | CGGUGGUGGACUAAACAGGG | 20 | 4222 |
| BCL11A-3738 | + | UGCCCACCAAGUCGCUGGUG | 20 | 4223 |
| BCL11A-3739 | − | CGUGGUGGCCAAGUUCAAGA | 20 | 4224 |
| BCL11A-3740 | − | CAUCACCCGAGUGCCUUUGA | 20 | 4225 |
| BCL11A-3741 | − | GCGGCAAGACGUUCAAAUUU | 20 | 4226 |
| BCL11A-3742 | + | AAGGGCUCUCGAGCUUCCAU | 20 | 4227 |
| BCL11A-3743 | + | GUCUGGAGUCUCCGAAGCUA | 20 | 4228 |
| BCL11A-3744 | − | CCCCGGCCGCGAUGCCCAAC | 20 | 4229 |
| BCL11A-3745 | + | CUGUCAAAGGCACUCGGGUG | 20 | 4230 |
| BCL11A-3746 | + | CUUGGACUUGACCGGGGGCU | 20 | 4231 |
| BCL11A-3747 | + | GACUUGGACUUGACCGGGGG | 20 | 4232 |
| BCL11A-3748 | + | UGCGUCUGCCCUCUUUUGAG | 20 | 4233 |
| BCL11A-3749 | + | GGAGGCAAAAGGCGAUUGUC | 20 | 4234 |
| BCL11A-3750 | − | GCAACACGCACAGAACACUC | 20 | 4235 |
| BCL11A-3751 | + | GCAGUAACCUUUGCAUAGGG | 20 | 4236 |
| BCL11A-3752 | − | UGGUGCACCGGCGCAGCCAC | 20 | 4237 |
| BCL11A-3753 | − | UGGUGGCCAAGUUCAAGAGC | 20 | 4238 |
| BCL11A-3754 | − | GCAUAAGCGCGGCCACCUGG | 20 | 4239 |
| BCL11A-3755 | + | UUGCAUAGGGCUGGGCCGGC | 20 | 4240 |
| BCL11A-3756 | − | CCAACCUGAUCCCGGAGAAC | 20 | 4241 |
| BCL11A-3757 | − | AGAUGUGUGGCAGUUUUCGG | 20 | 4242 |
| BCL11A-3758 | − | CAGUUUUCGGAUGGAAGCUC | 20 | 4243 |
| BCL11A-3759 | − | GCUCCCCGGGCGAGUCGGCC | 20 | 4244 |
| BCL11A-3760 | − | GGGUGGACUACGGCUUCGGG | 20 | 4245 |
| BCL11A-3761 | − | UAUCCCUUCAGGACUAGGUG | 20 | 4246 |
| BCL11A-3762 | − | AUCUCGGGGCGCAGCGGCAC | 20 | 4247 |
| BCL11A-3763 | + | CGCUCUUGAACUUGGCCACC | 20 | 4248 |
| BCL11A-3764 | − | GCACCGGCGCAGCCACACGG | 20 | 4249 |
| BCL11A-3765 | + | GCUUCUCGCCCAGGACCUGG | 20 | 4250 |
| BCL11A-3766 | − | UCCCGGAGAACGGGGACGAG | 20 | 4251 |
| BCL11A-3767 | + | CAGCACCCUGUCAAAGGCAC | 20 | 4252 |
| BCL11A-3768 | + | CAUUCUGCACCUAGUCCUGA | 20 | 4253 |
| BCL11A-3769 | − | CUUUAACCUGCUAAGAAUAC | 20 | 4254 |
| BCL11A-3770 | − | GUCUCUCCACCGCCAGCUCC | 20 | 4255 |
| BCL11A-3771 | − | UCUCUCCACCGCCAGCUCCC | 20 | 4256 |
| BCL11A-3772 | + | UGCUUCUCGCCCAGGACCUG | 20 | 4257 |
| BCL11A-3773 | + | GCGCCGCCUCCAGGCUCAGC | 20 | 4258 |
| BCL11A-3774 | + | AGAUCCCUCCGUCCAGCUCC | 20 | 4259 |
| BCL11A-3775 | − | CGAGAGGGUGGACUACGGCU | 20 | 4260 |
| BCL11A-3776 | + | CGUCCAGCUCCCCGGGCGGU | 20 | 4261 |
| BCL11A-3777 | + | CCAGCUCUCUAAGUCUCCUA | 20 | 4262 |
| BCL11A-3778 | + | UCGCAUGACUUGGACUUGAC | 20 | 4263 |
| BCL11A-3779 | + | GCACCAUGCCCUGCAUGACG | 20 | 4264 |
| BCL11A-3780 | + | AAGGCGAUUGUCUGGAGUCU | 20 | 4265 |
| BCL11A-3781 | + | GCCUGGAGGCCGCGUAGCCG | 20 | 4266 |
| BCL11A-3782 | − | GCGGCCACCUGGCCGAGGCC | 20 | 4267 |
| BCL11A-3783 | − | AGAAUACCAGGAUCAGUAUC | 20 | 4268 |
| BCL11A-3784 | − | GAUGUGUGGCAGUUUUCGGA | 20 | 4269 |
| BCL11A-3785 | − | UCUCCACACCGCCCGGGGAG | 20 | 4270 |
| BCL11A-3786 | − | CCUGGAGGCGGCGCGCCACC | 20 | 4271 |
| BCL11A-3787 | + | CUGGUAUUCUUAGCAGGUUA | 20 | 4272 |
| BCL11A-3788 | + | UAGAGAAGGGGCUCAGCGAG | 20 | 4273 |
| BCL11A-3789 | + | GAGUGUUCUGUGCGUGUUGC | 20 | 4274 |
| BCL11A-3790 | − | AAUAACCCCUUUAACCUGCU | 20 | 4275 |
| BCL11A-3791 | + | AAAGCGCCCUUCUGCCAGGC | 20 | 4276 |
| BCL11A-3792 | + | GUCCAGCUCCCCGGGCGGUG | 20 | 4277 |
| BCL11A-3793 | + | AAGGGCGGCUUGCUACCUGG | 20 | 4278 |
| BCL11A-3794 | + | GAAAGCGCCCUUCUGCCAGG | 20 | 4279 |
| BCL11A-3795 | + | AGGGCGGCUUGCUACCUGGC | 20 | 4280 |
| BCL11A-3796 | − | CGCGGGGCGCGGUCGUGGGC | 20 | 4281 |
| BCL11A-3797 | − | GCGAGGCCUUCCACCAGGUC | 20 | 4282 |
| BCL11A-3798 | + | ACUUCCCGUGCCGCUGCGCC | 20 | 4283 |
| BCL11A-3799 | − | GCACAGAACACUCAUGGAUU | 20 | 4284 |
| BCL11A-3800 | + | CCAGCUCCCCGGGCGGUGUG | 20 | 4285 |
| BCL11A-3801 | − | ACCGCCCGGGGAGCUGGACG | 20 | 4286 |
| BCL11A-3802 | + | UGGUUGCAGUAACCUUUGCA | 20 | 4287 |
| BCL11A-3803 | − | AGGAGACUUAGAGAGCUGGC | 20 | 4288 |
| BCL11A-3804 | − | ACCGGCGCAGCCACACGGGC | 20 | 4289 |
| BCL11A-3805 | + | ACAUUCUGCACCUAGUCCUG | 20 | 4290 |
| BCL11A-3806 | + | GUGUUCUGUGCGUGUUGCAA | 20 | 4291 |
| BCL11A-3807 | − | UGGCCCUGGCCACCCAUCAC | 20 | 4292 |
| BCL11A-3808 | + | UGCAUAGGGCUGGGCCGGCC | 20 | 4293 |
| BCL11A-3809 | − | AAUACCAGGAUCAGUAUCGA | 20 | 4294 |
| BCL11A-3810 | + | UCCUGAAGGGAUACCAACCC | 20 | 4295 |
| BCL11A-3811 | + | CUCCUAGAGAAAUCCAUGGC | 20 | 4296 |
| BCL11A-3812 | + | UGGCGGUGGAGAGACCGUCG | 20 | 4297 |
| BCL11A-3813 | − | GGAUUUCUCUAGGAGACUUA | 20 | 4298 |
| BCL11A-3814 | + | CUCGCAUGACUUGGACUUGA | 20 | 4299 |
| BCL11A-3815 | − | GAUCUCGGGGCGCAGCGGCA | 20 | 4300 |
| BCL11A-3816 | + | GGUGGUGGACUAAACAGGGG | 20 | 4301 |
| BCL11A-3817 | + | AGGCCUCGCUGAAGUGCUGC | 20 | 4302 |
| BCL11A-3818 | + | CCACCAGGUUGCUCUGAAAU | 20 | 4303 |
| BCL11A-3819 | − | ACCGCAUAGAGCGCCUGGGG | 20 | 4304 |
| BCL11A-3820 | − | CCAGCAAGCUGAAGCGCCAC | 20 | 4305 |
| BCL11A-3821 | + | GGCCUCGCUGAAGUGCUGCA | 20 | 4306 |
| BCL11A-3822 | − | CGUGCACCCAGGCCAGCAAG | 20 | 4307 |
| BCL11A-3823 | + | GGCGGGAGGCUCCAUAGCCA | 20 | 4308 |
| BCL11A-3824 | + | AGGAGGCAAAAGGCGAUUGU | 20 | 4309 |
| BCL11A-3825 | − | AAAGAUCCCUUCCUUAGCUU | 20 | 4310 |
| BCL11A-3826 | + | GGAGUCUCCGAAGCUAAGGA | 20 | 4311 |
| BCL11A-3827 | + | GCGCUUAGAGAAGGGGCUCA | 20 | 4312 |
| BCL11A-3828 | + | CAGCUUUUUGGACAGGCCCC | 20 | 4313 |
| BCL11A-3829 | + | GCACUCGGGUGAUGGGUGGC | 20 | 4314 |
| BCL11A-3830 | + | CACGCCCACGACCGCGCCCC | 20 | 4315 |
| BCL11A-3831 | + | AAGUUGUACAUGUGUAGCUG | 20 | 4316 |
| BCL11A-3832 | − | AGUCCGUGGUGGCCAAGUUC | 20 | 4317 |
| BCL11A-3833 | − | CCCGGAGAACGGGGACGAGG | 20 | 4318 |
| BCL11A-3834 | − | CGGGCAGGCCCAGCUCAAAA | 20 | 4319 |
| BCL11A-3835 | + | UGGUAUUCUUAGCAGGUUAA | 20 | 4320 |
| BCL11A-3836 | + | UUGUCUGCAAUAUGAAUCCC | 20 | 4321 |
| BCL11A-3837 | + | GUCUCCUAGAGAAAUCCAUG | 20 | 4322 |
| BCL11A-3838 | + | UGGACUUGACCGGGGGCUGG | 20 | 4323 |
| BCL11A-3839 | + | UGGAGUCUCCGAAGCUAAGG | 20 | 4324 |
| BCL11A-3840 | + | UGAGCUGGGCCUGCCCGGGC | 20 | 4325 |
| BCL11A-3841 | − | CAAAGAUCCCUUCCUUAGCU | 20 | 4326 |
| BCL11A-3842 | + | UGCCACACAUCUUGAGCUCU | 20 | 4327 |
| BCL11A-3843 | − | CCGCCCGGGGAGCUGGACGG | 20 | 4328 |
| BCL11A-3844 | + | AGAGAAGGGGCUCAGCGAGC | 20 | 4329 |
| BCL11A-3845 | − | GGAGACUUAGAGAGCUGGCA | 20 | 4330 |
| BCL11A-3846 | + | GAAUCCCAUGGAGAGGUGGC | 20 | 4331 |
| BCL11A-3847 | + | CGCUGAAGUGCUGCAUGGAG | 20 | 4332 |
| BCL11A-3848 | + | AGGACAUUCUGCACCUAGUC | 20 | 4333 |
| BCL11A-3849 | + | AAUCCCAUGGAGAGGUGGCU | 20 | 4334 |
| BCL11A-3850 | + | UGAGCUCUCUGGGUACUACG | 20 | 4335 |
| BCL11A-3851 | − | GGGCCACAGGGACACUUGCG | 20 | 4336 |
| BCL11A-3852 | − | UAGGAGACUUAGAGAGCUGG | 20 | 4337 |
| BCL11A-3853 | − | CCUUUGACAGGGUGCUGCGG | 20 | 4338 |
| BCL11A-3854 | − | UGGCCGAGGCCGAGGGCCAC | 20 | 4339 |
| BCL11A-3855 | + | GGAAGGGAUCUUUGAGCUGC | 20 | 4340 |
| BCL11A-3856 | + | UCUAAGUAGAUUCUUAAUCC | 20 | 4341 |
| BCL11A-3857 | − | GGGGCGCAGCGGCACGGGAA | 20 | 4342 |
| BCL11A-3858 | − | CUGGCCGAGGCCGAGGGCCA | 20 | 4343 |
| BCL11A-3859 | − | CUCAAGAUGUGUGGCAGUUU | 20 | 4344 |
| BCL11A-3860 | + | CGAAGCUAAGGAAGGGAUCU | 20 | 4345 |
| BCL11A-3861 | + | UGCCAGCUCUCUAAGUCUCC | 20 | 4346 |
| BCL11A-3862 | + | UCUCCUAGAGAAAUCCAUGG | 20 | 4347 |
| BCL11A-3863 | − | GCCACCACGAGAACAGCUCG | 20 | 4348 |
| BCL11A-3864 | + | UCUGCAAUAUGAAUCCCAUG | 20 | 4349 |
| BCL11A-3865 | − | CAGCUCCAUGCAGCACUUCA | 20 | 4350 |
| BCL11A-3866 | − | GCCUGUCCAAAAAGCUGCUG | 20 | 4351 |
| BCL11A-3867 | − | UAAGAAUACCAGGAUCAGUA | 20 | 4352 |
| BCL11A-3868 | − | GGAUCUCGGGGCGCAGCGGC | 20 | 4353 |
| BCL11A-3869 | − | GGCAGUUUUCGGAUGGAAGC | 20 | 4354 |
| BCL11A-3870 | − | CGGUCGUGGGCGUGGGCGAC | 20 | 4355 |
| BCL11A-3871 | + | GCAUCGCGGCCGGGGGCAGG | 20 | 4356 |
| BCL11A-3872 | − | AAUCUACUUAGAAAGCGAAC | 20 | 4357 |
| BCL11A-3873 | + | AAGGGGUUAUUGUCUGCAAU | 20 | 4358 |
| BCL11A-3874 | + | GGACUUGACCGGGGGCUGGG | 20 | 4359 |
| BCL11A-3875 | − | UCAUGGAUUAAGAAUCUACU | 20 | 4360 |
| BCL11A-3876 | − | AGAGGCUUCCGGCCUGGCAG | 20 | 4361 |
| BCL11A-3877 | − | GGCCUUCCACCAGGUCCUGG | 20 | 4362 |
| BCL11A-3878 | + | UGGCGCUUCAGCUUGCUGGC | 20 | 4363 |
| BCL11A-3879 | − | CCGCAUAGAGCGCCUGGGGG | 20 | 4364 |
| BCL11A-3880 | + | GGACCUGGUGGAAGGCCUCG | 20 | 4365 |
| BCL11A-3881 | − | CCUUCCACCAGGUCCUGGGC | 20 | 4366 |
| BCL11A-3882 | + | UGUCUGCAAUAUGAAUCCCA | 20 | 4367 |
| BCL11A-3883 | − | GGAGCUGGACGGAGGGAUCU | 20 | 4368 |
| BCL11A-3884 | + | GACUUGACCGGGGGCUGGGA | 20 | 4369 |
| BCL11A-3885 | − | UCCUUCCCAGCCACCUCUCC | 20 | 4370 |
| BCL11A-3886 | + | CUCUUUUGAGCUGGGCCUGC | 20 | 4371 |
| BCL11A-3887 | − | UGCGCUUCUCCACACCGCCC | 20 | 4372 |
| BCL11A-3888 | + | GCAAGAGAAACCAUGCACUG | 20 | 4373 |
| BCL11A-3889 | − | GGGAGCUGGACGGAGGGAUC | 20 | 4374 |
| BCL11A-3890 | + | GUUCCGGGGAGCUGGCGGUG | 20 | 4375 |
| BCL11A-3891 | + | UGAAUCCCAUGGAGAGGUGG | 20 | 4376 |
| BCL11A-3892 | + | CGGGUUCCGGGGAGCUGGCG | 20 | 4377 |
| BCL11A-3893 | + | GUGGACUAAACAGGGGGGGA | 20 | 4378 |
| BCL11A-3894 | + | GGCUGCCCAGCAGCAGCUUU | 20 | 4379 |
| BCL11A-3895 | + | GAAGGGAUCUUUGAGCUGCC | 20 | 4380 |
| BCL11A-3896 | − | CCUUCCCAGCCACCUCUCCA | 20 | 4381 |
| BCL11A-3897 | − | GCGCAGCGGCACGGGAAGUG | 20 | 4382 |
| BCL11A-3898 | + | GGGUUCCGGGGAGCUGGCGG | 20 | 4383 |
| BCL11A-3899 | + | UCCUCCUCGUCCCCGUUCUC | 20 | 4384 |
| BCL11A-3900 | − | GCAGCGGCACGGGAAGUGGA | 20 | 4385 |
| BCL11A-3901 | − | UGCUGGGCAGCCCCAGCUCG | 20 | 4386 |
| BCL11A-3902 | − | GGGCGCAGCGGCACGGGAAG | 20 | 4387 |
| BCL11A-3903 | − | ACACCGCCCGGGGAGCUGGA | 20 | 4388 |
| BCL11A-3904 | + | CCCAUGGAGAGGUGGCUGGG | 20 | 4389 |
| BCL11A-3905 | + | UUCCUCCUCGUCCCCGUUCU | 20 | 4390 |
| BCL11A-3906 | − | AUCUACUUAGAAAGCGAACA | 20 | 4391 |
| BCL11A-3907 | − | CCCGGGCAGGCCCAGCUCAA | 20 | 4392 |
| BCL11A-3908 | − | CACACCGCCCGGGGAGCUGG | 20 | 4393 |
| BCL11A-3909 | + | ACUAAACAGGGGGGGAGUGG | 20 | 4394 |
| BCL11A-3910 | + | GACCGGGGGCUGGGAGGGAG | 20 | 4395 |
| BCL11A-3911 | + | GGGCCGGCCUGGGGACAGCG | 20 | 4396 |
| BCL11A-3912 | + | GCAUAGGGCUGGGCCGGCCU | 20 | 4397 |
| BCL11A-3913 | − | AUUAAGAAUCUACUUAGAAA | 20 | 4398 |
| BCL11A-3914 | + | CUAAACAGGGGGGGAGUGGG | 20 | 4399 |
| BCL11A-3915 | + | UUGACCGGGGGCUGGGAGGG | 20 | 4400 |
| BCL11A-3916 | − | CGCGGUCGUGGGCGUGGGCG | 20 | 4401 |
| BCL11A-3917 | + | GAGGGAGGGGGGGCGUCGCC | 20 | 4402 |
| BCL11A-3918 | − | GGAGAACGGGGACGAGGAGG | 20 | 4403 |
| BCL11A-3919 | + | CUUGACCGGGGGCUGGGAGG | 20 | 4404 |
| BCL11A-3920 | + | GGAGGGAGGGGGGGCGUCGC | 20 | 4405 |
| BCL11A-3921 | + | ACCGGGGGCUGGGAGGGAGG | 20 | 4406 |
| BCL11A-3922 | − | CGCAGCGGCACGGGAAGUGG | 20 | 4407 |
| BCL11A-3923 | + | GCGGAUUGCAGAGGAGGGAG | 20 | 4408 |
| BCL11A-3924 | + | GGAGGGGGGGCGUCGCCAGG | 20 | 4409 |
| BCL11A-3925 | + | GGCGGAUUGCAGAGGAGGGA | 20 | 4410 |
| BCL11A-3926 | + | GAGGGGCGGAUUGCAGAGGA | 20 | 4411 |
| BCL11A-3927 | + | GGGGCGGAUUGCAGAGGAGG | 20 | 4412 |
| BCL11A-3928 | − | GAGGAGCUGACGGAGAGCGA | 20 | 4413 |
| BCL11A-3929 | + | UCCGAAAACUGCCACACAUC | 20 | 4414 |
| BCL11A-3930 | + | CGGAUUGCAGAGGAGGGAGG | 20 | 4415 |
| BCL11A-3931 | + | GGAGGGGCGGAUUGCAGAGG | 20 | 4416 |
| BCL11A-3932 | + | GGGCGGAUUGCAGAGGAGGG | 20 | 4417 |
| BCL11A-3933 | + | AGGAGGGGCGGAUUGCAGAG | 20 | 4418 |
| BCL11A-3934 | − | AGAACGGGGACGAGGAGGAA | 20 | 4419 |
| BCL11A-3935 | + | GAGGGAGGAGGGGCGGAUUG | 20 | 4420 |
| BCL11A-3936 | − | UUGCGCUUCUCCACACCGCC | 20 | 4421 |
| BCL11A-3937 | − | AGCUGACGGAGAGCGAGAGG | 20 | 4422 |
| BCL11A-3938 | − | AGGAGGAGCUGACGGAGAGC | 20 | 4423 |
| BCL11A-3939 | + | GGGGCUGGGAGGGAGGAGGG | 20 | 4424 |
| BCL11A-3940 | + | GGGAGGAGGGGCGGAUUGCA | 20 | 4425 |
| BCL11A-3941 | + | CCGUGUUGGGCAUCGCGGCC | 20 | 4426 |
| BCL11A-3942 | − | GAACGGGGACGAGGAGGAAG | 20 | 4427 |
| BCL11A-3943 | + | GGAGGAGGGGCGGAUUGCAG | 20 | 4428 |
| BCL11A-3944 | − | GGAGGAGGAGCUGACGGAGA | 20 | 4429 |
| BCL11A-3945 | − | ACGGGGACGAGGAGGAAGAG | 20 | 4430 |
| BCL11A-3946 | − | AGGAGGAGGAGGAGCUGACG | 20 | 4431 |
| BCL11A-3947 | − | ACGACGAGGAAGAGGAAGAA | 20 | 4432 |
| BCL11A-3948 | − | ACGAGGAAGAGGAAGAAGAG | 20 | 4433 |
| BCL11A-3949 | − | AGGAGGAAGAGGAGGACGAC | 20 | 4434 |
| BCL11A-3950 | − | AAGAGGAGGACGACGAGGAA | 20 | 4435 |
| BCL11A-3951 | − | AGAGGAGGAGGAGGAGCUGA | 20 | 4436 |
| BCL11A-3952 | − | GGAGGAAGAGGAGGACGACG | 20 | 4437 |
| BCL11A-3953 | − | CGAGGAGGAAGAGGAGGACG | 20 | 4438 |
| BCL11A-3954 | − | CGAGGAAGAGGAAGAAGAGG | 20 | 4439 |
| BCL11A-3955 | − | AAGAGGAGGAGGAGGAGCUG | 20 | 4440 |
| BCL11A-3956 | − | CGACGAGGAAGAGGAAGAAG | 20 | 4441 |
| BCL11A-3957 | − | GGAGGACGACGAGGAAGAGG | 20 | 4442 |
| BCL11A-3958 | − | AGAGGAGGACGACGAGGAAG | 20 | 4443 |
| BCL11A-3959 | − | GGACGACGAGGAAGAGGAAG | 20 | 4444 |
| BCL11A-3960 | − | GGAAGAGGAGGACGACGAGG | 20 | 4445 |
| BCL11A-3961 | − | AGGAAGAAGAGGAGGAAGAG | 20 | 4446 |
| BCL11A-3962 | − | AAGAGGAAGAAGAGGAGGAA | 20 | 4447 |
| BCL11A-3963 | − | GGAAGAGGAAGAAGAGGAGG | 20 | 4448 |
| BCL11A-3964 | − | AAGAAGAGGAGGAAGAGGAG | 20 | 4449 |
| BCL11A-3965 | − | AAGAGGAGGAAGAGGAGGAG | 20 | 4450 |
| BCL11A-3966 | − | AGAGGAAGAAGAGGAGGAAG | 20 | 4451 |
| BCL11A-3967 | − | GGAAGAAGAGGAGGAAGAGG | 20 | 4452 |
| BCL11A-3968 | − | AGAAGAGGAGGAAGAGGAGG | 20 | 4453 |
| BCL11A-3969 | − | AGAGGAGGAAGAGGAGGAGG | 20 | 4454 |
| BCL11A-3970 | + | UCGGACUUGACCGUCAU | 17 | 4455 |
| BCL11A-3971 | + | GUCGGACUUGACCGUCA | 17 | 4456 |
| BCL11A-3972 | + | CGUCGGACUUGACCGUC | 17 | 4457 |
| BCL11A-3973 | + | CGGACUUGACCGUCAUG | 17 | 4458 |
| BCL11A-3974 | − | AUAUUAGUGGUCCGGGC | 17 | 4459 |
| BCL11A-3975 | + | GUCCGACUCGCCGGCCA | 17 | 4460 |
| BCL11A-3976 | + | CGAGGAGUGCUCCGACG | 17 | 4461 |
| BCL11A-3977 | − | CCAUUCGGCGUAGUACC | 17 | 4462 |
| BCL11A-3978 | + | CCGAGGAGUGCUCCGAC | 17 | 4463 |
| BCL11A-3979 | − | GCGGGUUGGUAUCCCUU | 17 | 4464 |
| BCL11A-3980 | + | AGUACACGUUCUCCGUG | 17 | 4465 |
| BCL11A-3981 | − | AUUCGGCGUAGUACCCA | 17 | 4466 |
| BCL11A-3982 | + | CGUGUUGGGCAUCGCGG | 17 | 4467 |
| BCL11A-3983 | + | CGCUUAUGCUUCUCGCC | 17 | 4468 |
| BCL11A-3984 | − | CGAAGACUCGGUGGCCG | 17 | 4469 |
| BCL11A-3985 | − | CCCACCGCAUAGAGCGC | 17 | 4470 |
| BCL11A-3986 | + | ACGCCGAAUGGGGGUGU | 17 | 4471 |
| BCL11A-3987 | + | GGCCCGGACCACUAAUA | 17 | 4472 |
| BCL11A-3988 | + | GUAGCCGGCGAGCCACU | 17 | 4473 |
| BCL11A-3989 | − | GAGCACUCCUCGGAGAA | 17 | 4474 |
| BCL11A-3990 | − | AGCACUCCUCGGAGAAC | 17 | 4475 |
| BCL11A-3991 | + | CUGGGUACUACGCCGAA | 17 | 4476 |
| BCL11A-3992 | + | CGCAGAACUCGCAUGAC | 17 | 4477 |
| BCL11A-3993 | + | ACCAACCCGCGGGGUCA | 17 | 4478 |
| BCL11A-3994 | + | UACCAACCCGCGGGGUC | 17 | 4479 |
| BCL11A-3995 | + | AUACCAACCCGCGGGGU | 17 | 4480 |
| BCL11A-3996 | − | CCACCGCAUAGAGCGCC | 17 | 4481 |
| BCL11A-3997 | + | UGGGGUCGUUCUCGCUC | 17 | 4482 |
| BCL11A-3998 | − | CGCCCCAUAUUAGUGGU | 17 | 4483 |
| BCL11A-3999 | − | GCGCAUCAAGCUCGAGA | 17 | 4484 |
| BCL11A-4000 | + | CUCCGAGGAGUGCUCCG | 17 | 4485 |
| BCL11A-4001 | + | CGAGCUUGAUGCGCUUA | 17 | 4486 |
| BCL11A-4002 | − | AGCGCAUCAAGCUCGAG | 17 | 4487 |
| BCL11A-4003 | − | GGAGCACUCCUCGGAGA | 17 | 4488 |
| BCL11A-4004 | − | CCGCGGCUGCUCCCCGG | 17 | 4489 |
| BCL11A-4005 | − | CACCGCAUAGAGCGCCU | 17 | 4490 |
| BCL11A-4006 | + | GAAGGGAUACCAACCCG | 17 | 4491 |
| BCL11A-4007 | − | CUUCUCCACACCGCCCG | 17 | 4492 |
| BCL11A-4008 | − | CCCUGCCCGACGUCAUG | 17 | 4493 |
| BCL11A-4009 | − | CCGGCACCAGCGACUUG | 17 | 4494 |
| BCL11A-4010 | + | UGGGUACUACGCCGAAU | 17 | 4495 |
| BCL11A-4011 | + | GUUCUCCGGGAUCAGGU | 17 | 4496 |
| BCL11A-4012 | − | CGACCCCAACCUGAUCC | 17 | 4497 |
| BCL11A-4013 | + | CCGAAUGGGGGUGUGUG | 17 | 4498 |
| BCL11A-4014 | + | GCUGGUGCCGGGUUCCG | 17 | 4499 |
| BCL11A-4015 | − | CGGGCGAGUCGGCCUCG | 17 | 4500 |
| BCL11A-4016 | + | UGCACCACCAGGUUGCU | 17 | 4501 |
| BCL11A-4017 | − | CACCACCGAGACAUCAC | 17 | 4502 |
| BCL11A-4018 | − | AUGGCCGCGGCUGCUCC | 17 | 4503 |
| BCL11A-4019 | + | UCUGGGUACUACGCCGA | 17 | 4504 |
| BCL11A-4020 | + | CAAACUCCCGUUCUCCG | 17 | 4505 |
| BCL11A-4021 | + | GGGCCCGGACCACUAAU | 17 | 4506 |
| BCL11A-4022 | + | CCCAGGCGCUCUAUGCG | 17 | 4507 |
| BCL11A-4023 | − | GCCUUUUGCCUCCUCGU | 17 | 4508 |
| BCL11A-4024 | − | CGUCGGAGCACUCCUCG | 17 | 4509 |
| BCL11A-4025 | + | CUUGAUGCGCUUAGAGA | 17 | 4510 |
| BCL11A-4026 | + | CGUUCUCCGGGAUCAGG | 17 | 4511 |
| BCL11A-4027 | − | CCGCGAUGCCCAACACG | 17 | 4512 |
| BCL11A-4028 | + | CCCCGAGGCCGACUCGC | 17 | 4513 |
| BCL11A-4029 | − | GGCCGCGAUGCCCAACA | 17 | 4514 |
| BCL11A-4030 | − | CUCGUCGGAGCACUCCU | 17 | 4515 |
| BCL11A-4031 | + | UCGGUGGUGGACUAAAC | 17 | 4516 |
| BCL11A-4032 | + | CAGGCGCUCUAUGCGGU | 17 | 4517 |
| BCL11A-4033 | + | CGCACAGGUUGCACUUG | 17 | 4518 |
| BCL11A-4034 | + | CGCUGGUGCCGGGUUCC | 17 | 4519 |
| BCL11A-4035 | − | GGUCAAGUCCAAGUCAU | 17 | 4520 |
| BCL11A-4036 | − | ACGACCCCAACCUGAUC | 17 | 4521 |
| BCL11A-4037 | + | GUGUUGGGCAUCGCGGC | 17 | 4522 |
| BCL11A-4038 | − | CCUCGUCGGAGCACUCC | 17 | 4523 |
| BCL11A-4039 | − | CUUGGACCCCCACCGCA | 17 | 4524 |
| BCL11A-4040 | − | AACCUGAUCCCGGAGAA | 17 | 4525 |
| BCL11A-4041 | − | ACGGCUUCGGGCUGAGC | 17 | 4526 |
| BCL11A-4042 | − | GCGCUUCUCCACACCGC | 17 | 4527 |
| BCL11A-4043 | + | UCGCUGGUGCCGGGUUC | 17 | 4528 |
| BCL11A-4044 | − | CAACCUGAUCCCGGAGA | 17 | 4529 |
| BCL11A-4045 | − | ACUCGGUGGCCGGCGAG | 17 | 4530 |
| BCL11A-4046 | − | CGGCCACCUGGCCGAGG | 17 | 4531 |
| BCL11A-4047 | − | CGCCUUUUGCCUCCUCG | 17 | 4532 |
| BCL11A-4048 | − | ACCCCAACCUGAUCCCG | 17 | 4533 |
| BCL11A-4049 | − | CCCGGAGAACGGGGACG | 17 | 4534 |
| BCL11A-4050 | + | GCAGGUCGAACUCCUUC | 17 | 4535 |
| BCL11A-4051 | − | CUAUGGAGCCUCCCGCC | 17 | 4536 |
| BCL11A-4052 | + | CCAGGCGCUCUAUGCGG | 17 | 4537 |
| BCL11A-4053 | − | GUUGAAUCCAAUGGCUA | 17 | 4538 |
| BCL11A-4054 | − | CGGCUUCGGGCUGAGCC | 17 | 4539 |
| BCL11A-4055 | − | GCUCGCGGGGCGCGGUC | 17 | 4540 |
| BCL11A-4056 | − | CCCUGUUUAGUCCACCA | 17 | 4541 |
| BCL11A-4057 | + | AUGACUUGGACUUGACC | 17 | 4542 |
| BCL11A-4058 | − | GGAAGUCCCCUGACCCC | 17 | 4543 |
| BCL11A-4059 | − | CCCGCCAUGGAUUUCUC | 17 | 4544 |
| BCL11A-4060 | + | CGGUGGUGGACUAAACA | 17 | 4545 |
| BCL11A-4061 | + | ACUUGGCCACCACGGAC | 17 | 4546 |
| BCL11A-4062 | − | CUCUAAGCGCAUCAAGC | 17 | 4547 |
| BCL11A-4063 | + | GCAAACUCCCGUUCUCC | 17 | 4548 |
| BCL11A-4064 | + | GUGGUGGACUAAACAGG | 17 | 4549 |
| BCL11A-4065 | − | CACCACGAGAACAGCUC | 17 | 4550 |
| BCL11A-4066 | − | CCGCCAUGGAUUUCUCU | 17 | 4551 |
| BCL11A-4067 | + | GCUUGAUGCGCUUAGAG | 17 | 4552 |
| BCL11A-4068 | + | CCCUGCAUGACGUCGGG | 17 | 4553 |
| BCL11A-4069 | − | CUAAGCGCAUCAAGCUC | 17 | 4554 |
| BCL11A-4070 | + | CAAGUGAUGUCUCGGUG | 17 | 4555 |
| BCL11A-4071 | + | CCGAGGCCGACUCGCCC | 17 | 4556 |
| BCL11A-4072 | + | CGAGGCCGACUCGCCCG | 17 | 4557 |
| BCL11A-4073 | + | AUUUGAACGUCUUGCCG | 17 | 4558 |
| BCL11A-4074 | + | GCUGCGUCUGCCCUCUU | 17 | 4559 |
| BCL11A-4075 | − | AGGCGGCGCGCCACCAC | 17 | 4560 |
| BCL11A-4076 | + | CUCGAGCUUGAUGCGCU | 17 | 4561 |
| BCL11A-4077 | + | GCGCAAACUCCCGUUCU | 17 | 4562 |
| BCL11A-4078 | − | AGAGGCUUCCGGCCUGG | 17 | 4563 |
| BCL11A-4079 | − | CCGGGCGAGUCGGCCUC | 17 | 4564 |
| BCL11A-4080 | + | GUCGCUGGUGCCGGGUU | 17 | 4565 |
| BCL11A-4081 | − | AGAGCGCCUGGGGGCGG | 17 | 4566 |
| BCL11A-4082 | + | GGUGGUGGACUAAACAG | 17 | 4567 |
| BCL11A-4083 | + | CCCGAGGCCGACUCGCC | 17 | 4568 |
| BCL11A-4084 | − | UUCUCUUGCAACACGCA | 17 | 4569 |
| BCL11A-4085 | + | UGGACUUGACCGGGGGC | 17 | 4570 |
| BCL11A-4086 | − | UCCCGGAGAACGGGGAC | 17 | 4571 |
| BCL11A-4087 | + | CUGGAGUCUCCGAAGCU | 17 | 4572 |
| BCL11A-4088 | − | GAUUUCUCUAGGAGACU | 17 | 4573 |
| BCL11A-4089 | − | GGUUGAAUCCAAUGGCU | 17 | 4574 |
| BCL11A-4090 | − | CCCGGGCGAGUCGGCCU | 17 | 4575 |
| BCL11A-4091 | − | GAUCCCGGAGAACGGGG | 17 | 4576 |
| BCL11A-4092 | + | CUCGGUGGUGGACUAAA | 17 | 4577 |
| BCL11A-4093 | + | UGGUGGACUAAACAGGG | 17 | 4578 |
| BCL11A-4094 | + | CCACCAAGUCGCUGGUG | 17 | 4579 |
| BCL11A-4095 | − | GGUGGCCAAGUUCAAGA | 17 | 4580 |
| BCL11A-4096 | − | CACCCGAGUGCCUUUGA | 17 | 4581 |
| BCL11A-4097 | − | GCAAGACGUUCAAAUUU | 17 | 4582 |
| BCL11A-4098 | + | GGCUCUCGAGCUUCCAU | 17 | 4583 |
| BCL11A-4099 | + | UGGAGUCUCCGAAGCUA | 17 | 4584 |
| BCL11A-4100 | − | CGGCCGCGAUGCCCAAC | 17 | 4585 |
| BCL11A-4101 | + | UCAAAGGCACUCGGGUG | 17 | 4586 |
| BCL11A-4102 | + | GGACUUGACCGGGGGCU | 17 | 4587 |
| BCL11A-4103 | + | UUGGACUUGACCGGGGG | 17 | 4588 |
| BCL11A-4104 | + | GUCUGCCCUCUUUUGAG | 17 | 4589 |
| BCL11A-4105 | + | GGCAAAAGGCGAUUGUC | 17 | 4590 |
| BCL11A-4106 | − | ACACGCACAGAACACUC | 17 | 4591 |
| BCL11A-4107 | + | GUAACCUUUGCAUAGGG | 17 | 4592 |
| BCL11A-4108 | − | UGCACCGGCGCAGCCAC | 17 | 4593 |
| BCL11A-4109 | − | UGGCCAAGUUCAAGAGC | 17 | 4594 |
| BCL11A-4110 | − | UAAGCGCGGCCACCUGG | 17 | 4595 |
| BCL11A-4111 | + | CAUAGGGCUGGGCCGGC | 17 | 4596 |
| BCL11A-4112 | − | ACCUGAUCCCGGAGAAC | 17 | 4597 |
| BCL11A-4113 | − | UGUGUGGCAGUUUUCGG | 17 | 4598 |
| BCL11A-4114 | − | UUUUCGGAUGGAAGCUC | 17 | 4599 |
| BCL11A-4115 | − | CCCCGGGCGAGUCGGCC | 17 | 4600 |
| BCL11A-4116 | − | UGGACUACGGCUUCGGG | 17 | 4601 |
| BCL11A-4117 | − | CCCUUCAGGACUAGGUG | 17 | 4602 |
| BCL11A-4118 | − | UCGGGGCGCAGCGGCAC | 17 | 4603 |
| BCL11A-4119 | + | UCUUGAACUUGGCCACC | 17 | 4604 |
| BCL11A-4120 | − | CCGGCGCAGCCACACGG | 17 | 4605 |
| BCL11A-4121 | + | UCUCGCCCAGGACCUGG | 17 | 4606 |
| BCL11A-4122 | − | CGGAGAACGGGGACGAG | 17 | 4607 |
| BCL11A-4123 | + | CACCCUGUCAAAGGCAC | 17 | 4608 |
| BCL11A-4124 | + | UCUGCACCUAGUCCUGA | 17 | 4609 |
| BCL11A-4125 | − | UAACCUGCUAAGAAUAC | 17 | 4610 |
| BCL11A-4126 | − | UCUCCACCGCCAGCUCC | 17 | 4611 |
| BCL11A-4127 | − | CUCCACCGCCAGCUCCC | 17 | 4612 |
| BCL11A-4128 | + | UUCUCGCCCAGGACCUG | 17 | 4613 |
| BCL11A-4129 | + | CCGCCUCCAGGCUCAGC | 17 | 4614 |
| BCL11A-4130 | + | UCCCUCCGUCCAGCUCC | 17 | 4615 |
| BCL11A-4131 | − | GAGGGUGGACUACGGCU | 17 | 4616 |
| BCL11A-4132 | + | CCAGCUCCCCGGGCGGU | 17 | 4617 |
| BCL11A-4133 | + | GCUCUCUAAGUCUCCUA | 17 | 4618 |
| BCL11A-4134 | + | CAUGACUUGGACUUGAC | 17 | 4619 |
| BCL11A-4135 | + | CCAUGCCCUGCAUGACG | 17 | 4620 |
| BCL11A-4136 | + | GCGAUUGUCUGGAGUCU | 17 | 4621 |
| BCL11A-4137 | + | UGGAGGCCGCGUAGCCG | 17 | 4622 |
| BCL11A-4138 | − | GCCACCUGGCCGAGGCC | 17 | 4623 |
| BCL11A-4139 | − | AUACCAGGAUCAGUAUC | 17 | 4624 |
| BCL11A-4140 | − | GUGUGGCAGUUUUCGGA | 17 | 4625 |
| BCL11A-4141 | − | CCACACCGCCCGGGGAG | 17 | 4626 |
| BCL11A-4142 | − | GGAGGCGGCGCGCCACC | 17 | 4627 |
| BCL11A-4143 | + | GUAUUCUUAGCAGGUUA | 17 | 4628 |
| BCL11A-4144 | + | AGAAGGGGCUCAGCGAG | 17 | 4629 |
| BCL11A-4145 | + | UGUUCUGUGCGUGUUGC | 17 | 4630 |
| BCL11A-4146 | − | AACCCCUUUAACCUGCU | 17 | 4631 |
| BCL11A-4147 | + | GCGCCCUUCUGCCAGGC | 17 | 4632 |
| BCL11A-4148 | + | CAGCUCCCCGGGCGGUG | 17 | 4633 |
| BCL11A-4149 | + | GGCGGCUUGCUACCUGG | 17 | 4634 |
| BCL11A-4150 | + | AGCGCCCUUCUGCCAGG | 17 | 4635 |
| BCL11A-4151 | + | GCGGCUUGCUACCUGGC | 17 | 4636 |
| BCL11A-4152 | − | GGGGCGCGGUCGUGGGC | 17 | 4637 |
| BCL11A-4153 | − | AGGCCUUCCACCAGGUC | 17 | 4638 |
| BCL11A-4154 | + | UCCCGUGCCGCUGCGCC | 17 | 4639 |
| BCL11A-4155 | − | CAGAACACUCAUGGAUU | 17 | 4640 |
| BCL11A-4156 | + | GCUCCCCGGGCGGUGUG | 17 | 4641 |
| BCL11A-4157 | − | GCCCGGGGAGCUGGACG | 17 | 4642 |
| BCL11A-4158 | + | UUGCAGUAACCUUUGCA | 17 | 4643 |
| BCL11A-4159 | − | AGACUUAGAGAGCUGGC | 17 | 4644 |
| BCL11A-4160 | − | GGCGCAGCCACACGGGC | 17 | 4645 |
| BCL11A-4161 | + | UUCUGCACCUAGUCCUG | 17 | 4646 |
| BCL11A-4162 | + | UUCUGUGCGUGUUGCAA | 17 | 4647 |
| BCL11A-4163 | − | CCCUGGCCACCCAUCAC | 17 | 4648 |
| BCL11A-4164 | + | AUAGGGCUGGGCCGGCC | 17 | 4649 |
| BCL11A-4165 | − | ACCAGGAUCAGUAUCGA | 17 | 4650 |
| BCL11A-4166 | + | UGAAGGGAUACCAACCC | 17 | 4651 |
| BCL11A-4167 | + | CUAGAGAAAUCCAUGGC | 17 | 4652 |
| BCL11A-4168 | + | CGGUGGAGAGACCGUCG | 17 | 4653 |
| BCL11A-4169 | − | UUUCUCUAGGAGACUUA | 17 | 4654 |
| BCL11A-4170 | + | GCAUGACUUGGACUUGA | 17 | 4655 |
| BCL11A-4171 | − | CUCGGGGCGCAGCGGCA | 17 | 4656 |
| BCL11A-4172 | + | GGUGGACUAAACAGGGG | 17 | 4657 |
| BCL11A-4173 | + | CCUCGCUGAAGUGCUGC | 17 | 4658 |
| BCL11A-4174 | + | CCAGGUUGCUCUGAAAU | 17 | 4659 |
| BCL11A-4175 | − | GCAUAGAGCGCCUGGGG | 17 | 4660 |
| BCL11A-4176 | − | GCAAGCUGAAGCGCCAC | 17 | 4661 |
| BCL11A-4177 | + | CUCGCUGAAGUGCUGCA | 17 | 4662 |
| BCL11A-4178 | − | GCACCCAGGCCAGCAAG | 17 | 4663 |
| BCL11A-4179 | + | GGGAGGCUCCAUAGCCA | 17 | 4664 |
| BCL11A-4180 | + | AGGCAAAAGGCGAUUGU | 17 | 4665 |
| BCL11A-4181 | − | GAUCCCUUCCUUAGCUU | 17 | 4666 |
| BCL11A-4182 | + | GUCUCCGAAGCUAAGGA | 17 | 4667 |
| BCL11A-4183 | + | CUUAGAGAAGGGGCUCA | 17 | 4668 |
| BCL11A-4184 | + | CUUUUUGGACAGGCCCC | 17 | 4669 |
| BCL11A-4185 | + | CUCGGGUGAUGGGUGGC | 17 | 4670 |
| BCL11A-4186 | + | GCCCACGACCGCGCCCC | 17 | 4671 |
| BCL11A-4187 | + | UUGUACAUGUGUAGCUG | 17 | 4672 |
| BCL11A-4188 | − | CCGUGGUGGCCAAGUUC | 17 | 4673 |
| BCL11A-4189 | − | GGAGAACGGGGACGAGG | 17 | 4674 |
| BCL11A-4190 | − | GCAGGCCCAGCUCAAAA | 17 | 4675 |
| BCL11A-4191 | + | UAUUCUUAGCAGGUUAA | 17 | 4676 |
| BCL11A-4192 | + | UCUGCAAUAUGAAUCCC | 17 | 4677 |
| BCL11A-4193 | + | UCCUAGAGAAAUCCAUG | 17 | 4678 |
| BCL11A-4194 | + | ACUUGACCGGGGGCUGG | 17 | 4679 |
| BCL11A-4195 | + | AGUCUCCGAAGCUAAGG | 17 | 4680 |
| BCL11A-4196 | + | GCUGGGCCUGCCCGGGC | 17 | 4681 |
| BCL11A-4197 | − | AGAUCCCUUCCUUAGCU | 17 | 4682 |
| BCL11A-4198 | + | CACACAUCUUGAGCUCU | 17 | 4683 |
| BCL11A-4199 | − | CCCGGGGAGCUGGACGG | 17 | 4684 |
| BCL11A-4200 | + | GAAGGGGCUCAGCGAGC | 17 | 4685 |
| BCL11A-4201 | − | GACUUAGAGAGCUGGCA | 17 | 4686 |
| BCL11A-4202 | + | UCCCAUGGAGAGGUGGC | 17 | 4687 |
| BCL11A-4203 | + | UGAAGUGCUGCAUGGAG | 17 | 4688 |
| BCL11A-4204 | + | ACAUUCUGCACCUAGUC | 17 | 4689 |
| BCL11A-4205 | + | CCCAUGGAGAGGUGGCU | 17 | 4690 |
| BCL11A-4206 | + | GCUCUCUGGGUACUACG | 17 | 4691 |
| BCL11A-4207 | − | CCACAGGGACACUUGCG | 17 | 4692 |
| BCL11A-4208 | − | GAGACUUAGAGAGCUGG | 17 | 4693 |
| BCL11A-4209 | − | UUGACAGGGUGCUGCGG | 17 | 4694 |
| BCL11A-4210 | − | CCGAGGCCGAGGGCCAC | 17 | 4695 |
| BCL11A-4211 | + | AGGGAUCUUUGAGCUGC | 17 | 4696 |
| BCL11A-4212 | + | AAGUAGAUUCUUAAUCC | 17 | 4697 |
| BCL11A-4213 | − | GCGCAGCGGCACGGGAA | 17 | 4698 |
| BCL11A-4214 | − | GCCGAGGCCGAGGGCCA | 17 | 4699 |
| BCL11A-4215 | − | AAGAUGUGUGGCAGUUU | 17 | 4700 |
| BCL11A-4216 | + | AGCUAAGGAAGGGAUCU | 17 | 4701 |
| BCL11A-4217 | + | CAGCUCUCUAAGUCUCC | 17 | 4702 |
| BCL11A-4218 | + | CCUAGAGAAAUCCAUGG | 17 | 4703 |
| BCL11A-4219 | − | ACCACGAGAACAGCUCG | 17 | 4704 |
| BCL11A-4220 | + | GCAAUAUGAAUCCCAUG | 17 | 4705 |
| BCL11A-4221 | − | CUCCAUGCAGCACUUCA | 17 | 4706 |
| BCL11A-4222 | − | UGUCCAAAAAGCUGCUG | 17 | 4707 |
| BCL11A-4223 | − | GAAUACCAGGAUCAGUA | 17 | 4708 |
| BCL11A-4224 | − | UCUCGGGGCGCAGCGGC | 17 | 4709 |
| BCL11A-4225 | − | AGUUUUCGGAUGGAAGC | 17 | 4710 |
| BCL11A-4226 | − | UCGUGGGCGUGGGCGAC | 17 | 4711 |
| BCL11A-4227 | + | UCGCGGCCGGGGGCAGG | 17 | 4712 |
| BCL11A-4228 | − | CUACUUAGAAAGCGAAC | 17 | 4713 |
| BCL11A-4229 | + | GGGUUAUUGUCUGCAAU | 17 | 4714 |
| BCL11A-4230 | + | CUUGACCGGGGGCUGGG | 17 | 4715 |
| BCL11A-4231 | − | UGGAUUAAGAAUCUACU | 17 | 4716 |
| BCL11A-4232 | − | GGCUUCCGGCCUGGCAG | 17 | 4717 |
| BCL11A-4233 | − | CUUCCACCAGGUCCUGG | 17 | 4718 |
| BCL11A-4234 | + | CGCUUCAGCUUGCUGGC | 17 | 4719 |
| BCL11A-4235 | − | CAUAGAGCGCCUGGGGG | 17 | 4720 |
| BCL11A-4236 | + | CCUGGUGGAAGGCCUCG | 17 | 4721 |
| BCL11A-4237 | − | UCCACCAGGUCCUGGGC | 17 | 4722 |
| BCL11A-4238 | + | CUGCAAUAUGAAUCCCA | 17 | 4723 |
| BCL11A-4239 | − | GCUGGACGGAGGGAUCU | 17 | 4724 |
| BCL11A-4240 | + | UUGACCGGGGGCUGGGA | 17 | 4725 |
| BCL11A-4241 | − | UUCCCAGCCACCUCUCC | 17 | 4726 |
| BCL11A-4242 | + | UUUUGAGCUGGGCCUGC | 17 | 4727 |
| BCL11A-4243 | − | GCUUCUCCACACCGCCC | 17 | 4728 |
| BCL11A-4244 | + | AGAGAAACCAUGCACUG | 17 | 4729 |
| BCL11A-4245 | − | AGCUGGACGGAGGGAUC | 17 | 4730 |
| BCL11A-4246 | + | CCGGGGAGCUGGCGGUG | 17 | 4731 |
| BCL11A-4247 | + | AUCCCAUGGAGAGGUGG | 17 | 4732 |
| BCL11A-4248 | + | GUUCCGGGGAGCUGGCG | 17 | 4733 |
| BCL11A-4249 | + | GACUAAACAGGGGGGGA | 17 | 4734 |
| BCL11A-4250 | + | UGCCCAGCAGCAGCUUU | 17 | 4735 |
| BCL11A-4251 | + | GGGAUCUUUGAGCUGCC | 17 | 4736 |
| BCL11A-4252 | − | UCCCAGCCACCUCUCCA | 17 | 4737 |
| BCL11A-4253 | − | CAGCGGCACGGGAAGUG | 17 | 4738 |
| BCL11A-4254 | + | UUCCGGGGAGCUGGCGG | 17 | 4739 |
| BCL11A-4255 | + | UCCUCGUCCCCGUUCUC | 17 | 4740 |
| BCL11A-4256 | − | GCGGCACGGGAAGUGGA | 17 | 4741 |
| BCL11A-4257 | − | UGGGCAGCCCCAGCUCG | 17 | 4742 |
| BCL11A-4258 | − | CGCAGCGGCACGGGAAG | 17 | 4743 |
| BCL11A-4259 | − | CCGCCCGGGGAGCUGGA | 17 | 4744 |
| BCL11A-4260 | + | AUGGAGAGGUGGCUGGG | 17 | 4745 |
| BCL11A-4261 | + | CUCCUCGUCCCCGUUCU | 17 | 4746 |
| BCL11A-4262 | − | UACUUAGAAAGCGAACA | 17 | 4747 |
| BCL11A-4263 | − | GGGCAGGCCCAGCUCAA | 17 | 4748 |
| BCL11A-4264 | − | ACCGCCCGGGGAGCUGG | 17 | 4749 |
| BCL11A-4265 | + | AAACAGGGGGGGAGUGG | 17 | 4750 |
| BCL11A-4266 | + | CGGGGGCUGGGAGGGAG | 17 | 4751 |
| BCL11A-4267 | + | CCGGCCUGGGGACAGCG | 17 | 4752 |
| BCL11A-4268 | + | UAGGGCUGGGCCGGCCU | 17 | 4753 |
| BCL11A-4269 | − | AAGAAUCUACUUAGAAA | 17 | 4754 |
| BCL11A-4270 | + | AACAGGGGGGGAGUGGG | 17 | 4755 |
| BCL11A-4271 | + | ACCGGGGGCUGGGAGGG | 17 | 4756 |
| BCL11A-4272 | − | GGUCGUGGGCGUGGGCG | 17 | 4757 |
| BCL11A-4273 | + | GGAGGGGGGGCGUCGCC | 17 | 4758 |
| BCL11A-4274 | − | GAACGGGGACGAGGAGG | 17 | 4759 |
| BCL11A-4275 | + | GACCGGGGGCUGGGAGG | 17 | 4760 |
| BCL11A-4276 | + | GGGAGGGGGGGCGUCGC | 17 | 4761 |
| BCL11A-4277 | + | GGGGGCUGGGAGGGAGG | 17 | 4762 |
| BCL11A-4278 | − | AGCGGCACGGGAAGUGG | 17 | 4763 |
| BCL11A-4279 | + | GAUUGCAGAGGAGGGAG | 17 | 4764 |
| BCL11A-4280 | + | GGGGGGGCGUCGCCAGG | 17 | 4765 |
| BCL11A-4281 | + | GGAUUGCAGAGGAGGGA | 17 | 4766 |
| BCL11A-4282 | + | GGGCGGAUUGCAGAGGA | 17 | 4767 |
| BCL11A-4283 | + | GCGGAUUGCAGAGGAGG | 17 | 4768 |
| BCL11A-4284 | − | GAGCUGACGGAGAGCGA | 17 | 4769 |
| BCL11A-4285 | + | GAAAACUGCCACACAUC | 17 | 4770 |
| BCL11A-4286 | + | AUUGCAGAGGAGGGAGG | 17 | 4771 |
| BCL11A-4287 | + | GGGGCGGAUUGCAGAGG | 17 | 4772 |
| BCL11A-4288 | + | CGGAUUGCAGAGGAGGG | 17 | 4773 |
| BCL11A-4289 | + | AGGGGCGGAUUGCAGAG | 17 | 4774 |
| BCL11A-4290 | − | ACGGGGACGAGGAGGAA | 17 | 4775 |
| BCL11A-4291 | + | GGAGGAGGGGCGGAUUG | 17 | 4776 |
| BCL11A-4292 | − | CGCUUCUCCACACCGCC | 17 | 4777 |
| BCL11A-4293 | − | UGACGGAGAGCGAGAGG | 17 | 4778 |
| BCL11A-4294 | − | AGGAGCUGACGGAGAGC | 17 | 4779 |
| BCL11A-4295 | + | GCUGGGAGGGAGGAGGG | 17 | 4780 |
| BCL11A-4296 | + | AGGAGGGGCGGAUUGCA | 17 | 4781 |
| BCL11A-4297 | + | UGUUGGGCAUCGCGGCC | 17 | 4782 |
| BCL11A-4298 | − | CGGGGACGAGGAGGAAG | 17 | 4783 |
| BCL11A-4299 | + | GGAGGGGCGGAUUGCAG | 17 | 4784 |
| BCL11A-4300 | − | GGAGGAGCUGACGGAGA | 17 | 4785 |
| BCL11A-4301 | − | GGGACGAGGAGGAAGAG | 17 | 4786 |
| BCL11A-4302 | − | AGGAGGAGGAGCUGACG | 17 | 4787 |
| BCL11A-4303 | − | ACGAGGAAGAGGAAGAA | 17 | 4788 |
| BCL11A-4304 | − | AGGAAGAGGAAGAAGAG | 17 | 4789 |
| BCL11A-4305 | − | AGGAAGAGGAGGACGAC | 17 | 4790 |
| BCL11A-4306 | − | AGGAGGACGACGAGGAA | 17 | 4791 |
| BCL11A-4307 | − | GGAGGAGGAGGAGCUGA | 17 | 4792 |
| BCL11A-4308 | − | GGAAGAGGAGGACGACG | 17 | 4793 |
| BCL11A-4309 | − | GGAGGAAGAGGAGGACG | 17 | 4794 |
| BCL11A-4310 | − | GGAAGAGGAAGAAGAGG | 17 | 4795 |
| BCL11A-4311 | − | AGGAGGAGGAGGAGCUG | 17 | 4796 |
| BCL11A-4312 | − | CGAGGAAGAGGAAGAAG | 17 | 4797 |
| BCL11A-4313 | − | GGACGACGAGGAAGAGG | 17 | 4798 |
| BCL11A-4314 | − | GGAGGACGACGAGGAAG | 17 | 4799 |
| BCL11A-4315 | − | CGACGAGGAAGAGGAAG | 17 | 4800 |
| BCL11A-4316 | − | AGAGGAGGACGACGAGG | 17 | 4801 |
| BCL11A-4317 | − | AAGAAGAGGAGGAAGAG | 17 | 4802 |
| BCL11A-4318 | − | AGGAAGAAGAGGAGGAA | 17 | 4803 |
| BCL11A-4319 | − | AGAGGAAGAAGAGGAGG | 17 | 4804 |
| BCL11A-4320 | − | AAGAGGAGGAAGAGGAG | 17 | 4805 |
| BCL11A-4321 | − | AGGAGGAAGAGGAGGAG | 17 | 4806 |
| BCL11A-4322 | − | GGAAGAAGAGGAGGAAG | 17 | 4807 |
| BCL11A-4323 | − | AGAAGAGGAGGAAGAGG | 17 | 4808 |
| BCL11A-4324 | − | AGAGGAGGAAGAGGAGG | 17 | 4809 |
| BCL11A-4325 | − | GGAGGAAGAGGAGGAGG | 17 | 4810 |

[1025] Table 6A provides exemplary targeting domains for knocking out the BCL11A gene by targeting the early coding sequence the BCL11A gene selected according to first tier parameters. The targeting domains bind within first 500 bp of coding sequence downstream of start codon, good orthogonality, start with G. It is contemplated herein that the targeting domain hybridizes to the target domain through complementary base pairing. Any of the targeting domains in the table can be used with a N. meningitidis Cas9 molecule that generates a double strand break (Cas9 nuclease) or a single-strand break (Cas9 nickase). In an embodiment, dual targeting is used to create two double strand breaks to remove the enhancer region in the BCL11A gene. e.g., the first gRNA is used to target upstream (i.e., 5′) of the enhancer region in the BCL11A gene and the second gRNA is used to target downstream (i.e., 3′) of the enhancer region in the BCL11A gene.

[1026] Any of the targeting domains in the table can be used with a N. meningitidis Cas9 (nickase) molecule to generate a single strand break. In an embodiment, dual targeting is used to create two nicks on opposite DNA strands by using N. meningitidis Cas9 nickases with two targeting domains that are complementary to opposite DNA strands, e.g., a gRNA comprising any minus strand targeting domain may be paired any gRNA comprising a plus strand targeting domain provided that the two gRNAs are oriented on the DNA such that PAMs face outward and the distance between the 5′ ends of the gRNAs is 0-50 bp.

[1027] In an embodiment, four gRNAs (e.g., two pairs) are used to target four Cas9 nickases to create four nicks to remove the enhancer region in the BCL11A gene, e.g., the first pair of gRNAs are used to target upstream (i.e., 5′) of the enhancer region in the BCL11A gene and the second pair of gRNAs are used to target downstream (i.e., 3′) of the enhancer region in the BCL11A gene.

TABLE 6A
1st Tier

| | | | Target | SEQ |
|---|---|---|---|---|
| | DNA | | Site | ID |
| gRNA Name | Strand | Targeting Domain | Length | NO |
| BCL11A-4326 | + | UUCUGCACUCAUCCCAGGCG | 20 | 4811 |
| BCL11A-4327 | − | AUCCAGGUCACGCCAGAGGA | 20 | 4812 |
| BCL11A-4328 | + | UGACCUGGAUGCCAACCUCC | 20 | 4813 |
| BCL11A-4329 | + | GGGAUUGGAUGCUUUUUUCA | 20 | 4814 |
| BCL11A-4330 | + | UGCACUCAUCCCAGGCG | 17 | 4815 |
| BCL11A-4331 | − | CAGGUCACGCCAGAGGA | 17 | 4816 |
| BCL11A-4332 | + | CCUGGAUGCCAACCUCC | 17 | 4817 |
| BCL11A-4333 | + | AUUGGAUGCUUUUUUCA | 17 | 4818 |

[1028] Table 6B provides exemplary targeting domains for knocking out the BCL11A gene by targeting the early coding sequence the BCL11A gene. The targeting domains target outside the first 500 bp of coding sequence downstream of start codon. It is contemplated herein that the targeting domain hybridizes to the target domain through complementary base pairing. Any of the targeting domains in the table can be used with a N. meningitidis Cas9 molecule that generates a double strand break (Cas9 nuclease) or a single-strand break (Cas9 nickase). In an embodiment, dual targeting is used to create two double strand breaks to remove the enhancer region in the BCL11A gene, e.g., the first gRNA is used to target upstream (i.e., 5′) of the enhancer region in the BCL11A gene and the second gRNA is used to target downstream (i.e., 3′) of the enhancer region in the BCL11A gene.

[1029] Any of the targeting domains in the table can be used with a N. meningitidis Cas9 (nickase) molecule to generate a single strand break. In an embodiment, dual targeting is used to create two nicks on opposite DNA strands by using N. meningitidis Cas9 nickases with two targeting domains that are complementary to opposite DNA strands, e.g., a gRNA comprising any minus strand targeting domain may be paired any gRNA comprising a plus strand targeting domain provided that the two gRNAs are oriented on the DNA such that PAMs face outward and the distance between the 5′ ends of the gRNAs is 0-50 bp.

[1030] In an embodiment, four gRNAs (e.g., two pairs) are used to target four Cas9 nickases to create four nicks to remove the enhancer region in the BCL11A gene, e.g., the first pair of gRNAs are used to target upstream (i.e., 5′) of the enhancer region in the BCL11A gene and the second pair of gRNAs are used to target downstream (i.e., 3′) of the enhancer region in the BCL11A gene.

TABLE 6B

| | | | Target | SEQ |
|---|---|---|---|---|
| | DNA | | Site | ID |
| gRNA Name | Strand | Targeting Domain | Length | NO |
| BCL11A-4334 | − | GCUAUGGAGCCUCCCGC | 17 | 4819 |
| BCL11A-4335 | + | GACUUGACCGUCAUGGG | 17 | 4820 |
| BCL11A-4336 | + | UCCGACGAGGAGGCAAA | 17 | 4821 |
| BCL11A-4337 | + | CGGGAGGCUCCAUAGCC | 17 | 4822 |
| BCL11A-4338 | + | UCCGUGUUCGCUUUCUA | 17 | 4823 |
| BCL11A-4339 | − | AACACGCACAGAACACU | 17 | 4824 |
| BCL11A-4340 | − | UUCCCAGCCACCUCUCC | 17 | 4825 |
| BCL11A-4341 | + | GGCUGGGAGGGAGGAGG | 17 | 4826 |
| BCL11A-4342 | + | UCGGACUUGACCGUCAUGGG | 20 | 4827 |
| BCL11A-4343 | − | AUGGCUAUGGAGCCUCCCGC | 20 | 4828 |
| BCL11A-4344 | + | UGCUCCGACGAGGAGGCAAA | 20 | 4829 |
| BCL11A-4345 | + | UGGCGGGAGGCUCCAUAGCC | 20 | 4830 |
| BCL11A-4346 | − | UGCAACACGCACAGAACACU | 20 | 4831 |
| BCL11A-4347 | + | ACUUCCGUGUUCGCUUUCUA | 20 | 4832 |
| BCL11A-4348 | − | UCCUUCCCAGCCACCUCUCC | 20 | 4833 |
| BCL11A-4349 | + | GGGGGCUGGGAGGGAGGAGG | 20 | 4834 |

[1031] Table 7A provides exemplary targeting domains for removing (e.g., deleting) the enhancer region in the BCL11A gene selected according to first tier parameters. The targeting domains bind within a region 5′ (51.5 to 51.7 kb downstream of transcription start site, TSS) or 3′ (65.1 to 65.3 kb downstream of TSS) of enhancer, good orthogonality, starts with G. It is contemplated herein that the targeting domain hybridizes to the target domain through complementary base pairing. Any of the targeting domains in the table can be used with a S. pyogenes Cas9 molecule that generates a double strand break (Cas9 nuclease) or a single-strand break (Cas9 nickase). In an embodiment, dual targeting is used to create two double strand breaks to remove the enhancer region in the BCL11A gene, e.g., the first gRNA is used to target upstream (i.e., 5′) of the enhancer region in the BCL11A gene and the second gRNA is used to target downstream (i.e., 3′) of the enhancer region in the BCL11A gene.

[1032] Any of the targeting domains in the table can be used with a S. pyogenes Cas9 (nickase) molecule to generate a single strand break. In an embodiment, dual targeting is used to create two nicks on opposite DNA strands by using S. pyogenes Cas9 nickases with two targeting domains that are complementary to opposite DNA strands, e.g., a gRNA comprising any minus strand targeting domain may be paired any gRNA comprising a plus strand targeting domain provided that the two gRNAs are oriented on the DNA such that PAMs face outward and the distance between the 5′ ends of the gRNAs is 0-50 bp. Exemplary gRNA pairs are: BCL11A-5210 and BCL11A-5204, BCL11A-5211 and BCL11A-5204, BCL11A-5172 and BCL11A-5176, BCL11A-5172 and BCL11A-5186, BCL11A-5179 and BCL11A-5176, or BCL11A-5179 and BCL11A-5186.

[1033] In an embodiment, four gRNAs (e.g., two pairs) are used to target four Cas9 nickases to create four nicks to remove the enhancer region in the BCL11A gene, e.g., the first pair of gRNAs are used to target upstream (i.e., 5′) of the enhancer region in the BCL11A gene and the second pair of gRNAs are used to target downstream (i.e., 3′) of the enhancer region in the BCL11A gene. For example, gRNA pairs that target upstream (i.e., 5′) of the enhancer region in the BCL11A gene (e.g., BCL11A-5210 and BCL11A-5204, or BCL11A-5211 and BCL11A-5204) can be paired with gRNA pairs that target downstream (i.e., 3′) of the enhancer region in the BCL11A gene (e.g., BCL11A-5172 and BCL11A-5176, BCL11A-5172 and BCL11A-5186, BCL11A-5179 and BCL11A-5176, or BCL11A-5179 and BCL11A-5186).

TABLE 7A
1st Tier

| | | | Target | | |
|---|---|---|---|---|---|
| | DNA | | Site | 5′ or 3′ of | SEQ ID |
| gRNA Name | Strand | Targeting Domain | Length | repeats | NO |
| BCL11A-5172 | + | GAAAAUACUUACUGUACUGC | 20 | 3′ | 4835 |
| BCL11A-5173 | − | GAAAGCAGUGUAAGGCU | 17 | 5′ | 4836 |
| BCL11A-5174 | − | GGCUGUUUUGGAAUGUAGAG | 20 | 5′ | 4837 |
| BCL11A-5175 | + | GUGCUACUUAUACAAUUCAC | 20 | 3′ | 4838 |

[1034] Table 7B provides exemplary targeting domains for removing (e.g., deleting) the enhancer region in the BCL11A gene selected according to second tier parameters. The targeting domains bind within a region 5′ (51.5 to 51.7 kb downstream of transcription start site, TSS) or 3′ (65.1 to 65.3 kb downstream of TSS) of enhancer, good orthogonality, and do not start with G. It is contemplated herein that the targeting domain hybridizes to the target domain through complementary base pairing. Any of the targeting domains in the table can be used with a S. pyogenes Cas9 molecule that generates a double strand break (Cas9 nuclease) or a single-strand break (Cas9 nickase). In an embodiment, dual targeting is used to create two double strand breaks to remove the enhancer region in the BCL11A gene, e.g., the first gRNA is used to target upstream (i.e., 5′) of the enhancer region in the BCL11A gene and the second gRNA is used to target downstream (i.e., 3′) of the enhancer region in the BCL11A gene.

[1035] Any of the targeting domains in the table can be used with a S. pyogenes Cas9 (nickase) molecule to generate a single strand break. In an embodiment, dual targeting is used to create two nicks on opposite DNA strands by using S. pyogenes Cas9 nickases with two targeting domains that are complementary to opposite DNA strands, e.g., a gRNA comprising any minus strand targeting domain may be paired any gRNA comprising a plus strand targeting domain provided that the two gRNAs are oriented on the DNA such that PAMs face outward and the distance between the 5′ ends of the gRNAs is 0-50 bp. The table provides exemplary targeting domains for removing (e.g., deleting) the enhancer region in the BCL11A gene selected according to first tier parameters. The targeting domains bind within a region 5′ (51.5 to 51.7 kb downstream of transcription start site, TSS) or 3′ (65.1 to 65.3 kb downstream of TSS) of enhancer, good orthogonality, starts with G. It is contemplated herein that the targeting domain hybridizes to the target domain through complementary base pairing. Any of the targeting domains in the table can be used with a S. pyogenes Cas9 molecule that generates a double strand break (Cas9 nuclease) or a single-strand break (Cas9 nickase). In an embodiment, dual targeting is used to create two double strand breaks to remove the enhancer region in the BCL11A gene, e.g., the first gRNA is used to target upstream (i.e., 5′) of the enhancer region in the BCL11A gene and the second gRNA is used to target downstream (i.e., 3′) of the enhancer region in the BCL11A gene.

[1036] Any of the targeting domains in the table can be used with a S. pyogenes Cas9 (nickase) molecule to generate a single strand break. In an embodiment, dual targeting is used to create two nicks on opposite DNA strands by using S. pyogenes Cas9 nickases with two targeting domains that are complementary to opposite DNA strands, e.g., a gRNA comprising any minus strand targeting domain may be paired any gRNA comprising a plus strand targeting domain provided that the two gRNAs are oriented on the DNA such that PAMs face outward and the distance between the 5′ ends of the gRNAs is 0-50 bp.

[1037] In an embodiment, four gRNAs (e.g., two pairs) are used to target four Cas9 nickases to create four nicks to remove the enhancer region in the BCL11A gene, e.g., the first pair of gRNAs are used to target upstream (i.e., 5′) of the enhancer region in the BCL11A gene and the second pair of gRNAs are used to target downstream (i.e., 3′) of the enhancer region in the BCL11A gene.

TABLE 7B
2nd Tier

| | | | Target | | |
|---|---|---|---|---|---|
| | DNA | | Site | 5′ or 3′ of | SEQ ID |
| gRNA Name | Strand | Targeting Domain | Length | repeats | NO |
| BCL11A-5176 | − | AAACUAUUUACAGCCAUAAC | 20 | 3′ | 4839 |
| BCL11A-5177 | + | AAAUACUUACUGUACUGCAG | 20 | 3′ | 4840 |
| BCL11A-5178 | − | AACUAUUUACAGCCAUAACA | 20 | 3′ | 4841 |
| BCL11A-5179 | + | AAUACUUACUGUACUGC | 17 | 3′ | 4842 |
| BCL11A-5180 | + | ACAACUUGUGUUGCACU | 17 | 5′ | 4843 |
| BCL11A-5181 | + | AUACUUACUGUACUGCA | 17 | 3′ | 4844 |
| BCL11A-5182 | + | AUUCACUGGAAACCCUGUUA | 20 | 3′ | 4845 |
| BCL11A-5183 | + | AUUUAAGACGGGAAAAC | 17 | 5′ | 4846 |
| BCL11A-5184 | + | CACUGGAAACCCUGUUA | 17 | 3′ | 4847 |
| BCL11A-5185 | + | CUACUUAUACAAUUCAC | 17 | 3′ | 4848 |
| BCL11A-5186 | − | CUAUUUACAGCCAUAAC | 17 | 3′ | 4849 |
| BCL11A-5187 | − | UAAGAAAGCAGUGUAAGGCU | 20 | 5′ | 4850 |
| BCL11A-5188 | + | UACACAACUUGUGUUGCACU | 20 | 5′ | 4851 |
| BCL11A-5189 | + | UACUGUACUGCAGGGGAAUU | 20 | 3′ | 4852 |
| BCL11A-5190 | + | UACUUACUGUACUGCAG | 17 | 3′ | 4853 |
| BCL11A-5191 | + | UGUACUGCAGGGGAAUU | 17 | 3′ | 4854 |

[1038] Table 7C provides exemplary targeting domains for removing (e.g., deleting) the enhancer region in the BCL11A gene selected according to third tier parameters. The targeting domains bind within a region 5′ (51.5 to 51.7 kb downstream of transcription start site, TSS) or 3′ (65.1 to 65.3 kb downstream of TSS) of enhancer and start with G. It is contemplated herein that the targeting domain hybridizes to the target domain through complementary base pairing. Any of the targeting domains in the table can be used with a S. pyogenes Cas9 molecule that generates a double strand break (Cas9 nuclease) or a single-strand break (Cas9 nickase). In an embodiment, dual targeting is used to create two double strand breaks to remove the enhancer region in the BCL11A gene, e.g., the first gRNA is used to target upstream (i.e., 5′) of the enhancer region in the BCL11A gene and the second gRNA is used to target downstream (i.e., 3′) of the enhancer region in the BCL11A gene.

[1039] Any of the targeting domains in the table can be used with a S. pyogenes Cas9 (nickase) molecule to generate a single strand break. In an embodiment, dual targeting is used to create two nicks on opposite DNA strands by using S. pyogenes Cas9 nickases with two targeting domains that are complementary to opposite DNA strands, e.g., a gRNA comprising any minus strand targeting domain may be paired any gRNA comprising a plus strand targeting domain provided that the two gRNAs are oriented on the DNA such that PAMs face outward and the distance between the 5′ ends of the gRNAs is 0-50 bp. The table provides exemplary targeting domains for removing (e.g., deleting) the enhancer region in the BCL11A gene selected according to first tier parameters. The targeting domains bind within a region 5′ (51.5 to 51.7 kb downstream of transcription start site, TSS) or 3′ (65.1 to 65.3 kb downstream of TSS) of enhancer, good orthogonality, starts with G. It is contemplated herein that the targeting domain hybridizes to the target domain through complementary base pairing. Any of the targeting domains in the table can be used with a S. pyogenes Cas9 molecule that generates a double strand break (Cas9 nuclease) or a single-strand break (Cas9 nickase). In an embodiment, dual targeting is used to create two double strand breaks to remove the enhancer region in the BCL11A gene, e.g., the first gRNA is used to target upstream (i.e., 5′) of the enhancer region in the BCL11A gene and the second gRNA is used to target downstream (i.e., 3′) of the enhancer region in the BCL11A gene.

[1040] Any of the targeting domains in the table can be used with a S. pyogenes Cas9 (nickase) molecule to generate a single strand break. In an embodiment, dual targeting is used to create two nicks on opposite DNA strands by using S. pyogenes Cas9 nickases with two targeting domains that are complementary to opposite DNA strands, e.g., a gRNA comprising any minus strand targeting domain may be paired any gRNA comprising a plus strand targeting domain provided that the two gRNAs are oriented on the DNA such that PAMs face outward and the distance between the 5′ ends of the gRNAs is 0-50 bp.

[1041] In an embodiment, four gRNAs (e.g., two pairs) are used to target four Cas9 nickases to create four nicks to remove the enhancer region in the BCL11A gene, e.g., the first pair of gRNAs are used to target upstream (i.e., 5′) of the enhancer region in the BCL11A gene and the second pair of gRNAs are used to target downstream (i.e., 3′) of the enhancer region in the BCL gene.

TABLE 7C
3rd Tier

| | | | Target | | |
|---|---|---|---|---|---|
| | DNA | | Site | 5′ or 3′ of | SEQ ID |
| gRNA Name | Strand | Targeting Domain | Length | repeats | NO |
| BCL11A-5192 | − | GAAUGUAGAGAGGCAGA | 17 | 5′ | 4855 |
| BCL11A-5193 | − | GGAAUGUAGAGAGGCAG | 17 | 5′ | 4856 |
| BCL11A-5194 | − | GUAAGUAUUUUCUUUCAUUG | 20 | 3′ | 4857 |
| BCL11A-5195 | − | GUAAUUAAGAAAGCAGUGUA | 20 | 5′ | 4858 |
| BCL11A-5196 | − | GUAUUUUCUUUCAUUGG | 17 | 3′ | 4859 |

[1042] Table 7D provides exemplary targeting domains for removing (e.g., deleting) the enhancer region in the BCL11A gene selected according to forth tier parameters. The targeting domains bind within a region 5′ (51.5 to 51.7 kb downstream of transcription start site, TSS) or 3′ (65.1 to 65.3 kb downstream of TSS) of enhancer and do not start with G. It is contemplated herein that the targeting domain hybridizes to the target domain through complementary base pairing. Any of the targeting domains in the table can be used with a S. pyogenes Cas9 molecule that generates a double strand break (Cas9 nuclease) or a single-strand break (Cas9 nickase). In an embodiment, dual targeting is used to create two double strand breaks to remove the enhancer region in the BCL11A gene, e.g., the first gRNA is used to target upstream (i.e., 5′) of the enhancer region in the BCL11A gene and the second gRNA is used to target downstream (i.e., 3′) of the enhancer region in the BCL11A gene.

[1043] Any of the targeting domains in the table can be used with a S. pyogenes Cas9 (nickase) molecule to generate a single strand break. In an embodiment, dual targeting is used to create two nicks on opposite DNA strands by using S. pyogenes Cas9 nickases with two targeting domains that are complementary to opposite DNA strands, e.g., a gRNA comprising any minus strand targeting domain may be paired any gRNA comprising a plus strand targeting domain provided that the two gRNAs are oriented on the DNA such that PAMs face outward and the distance between the 5′ ends of the gRNAs is 0-50 bp. The table provides exemplary targeting domains for removing (e.g., deleting) the enhancer region in the BCL11A gene selected according to first tier parameters. The targeting domains bind within a region 5′ (51.5 to 51.7 kb downstream of transcription start site, TSS) or 3′ (65.1 to 65.3 kb downstream of TSS) of enhancer, good orthogonality, starts with G. It is contemplated herein that the targeting domain hybridizes to the target domain through complementary base pairing. Any of the targeting domains in the table can be used with a S. pyogenes Cas9 molecule that generates a double strand break (Cas9 nuclease) or a single-strand break (Cas9 nickase). In an embodiment, dual targeting is used to create two double strand breaks to remove the enhancer region in the BCL11A gene, e.g., the first gRNA is used to target upstream (i.e., 5′) of the enhancer region in the BCL11A gene and the second gRNA is used to target downstream (i.e., 3′) of the enhancer region in the BCL11A gene.

[1044] Any of the targeting domains in the table can be used with a S. pyogenes Cas9 (nickase) molecule to generate a single strand break. In an embodiment, dual targeting is used to create two nicks on opposite DNA strands by using S. pyogenes Cas9 nickases with two targeting domains that are complementary to opposite DNA strands, e.g., a gRNA comprising any minus strand targeting domain may be paired any gRNA comprising a plus strand targeting domain provided that the two gRNAs are oriented on the DNA such that PAMs face outward and the distance between the 5′ ends of the gRNAs is 0-50 bp.

[1045] In an embodiment, four gRNAs (e.g., two pairs) are used to target four Cas9 nickases to create four nicks to remove the enhancer region in the BCL11A gene, e.g., the first pair of gRNAs are used to target upstream (i.e., 5′) of the enhancer region in the BCL11A gene and the second pair of gRNAs are used to target downstream (i.e., 3′) of the enhancer region in the BCL11A gene.

TABLE 7D
4th Tier

| | | | Target | | |
|---|---|---|---|---|---|
| | DNA | | Site | 5′ or 3′ of | SEQ ID |
| gRNA Name | Strand | Targeting Domain | Length | repeats | NO |
| BCL11A-5197 | − | AAAAUAAUUAGAAUAAA | 17 | 5′ | 4860 |
| BCL11A-5198 | + | AAAAUACUUACUGUACUGCA | 20 | 3′ | 4861 |
| BCL11A-5199 | + | AAAAUUUAAGACGGGAAAAC | 20 | 5′ | 4862 |
| BCL11A-5200 | − | AAGUAUUUUCUUUCAUU | 17 | 3′ | 4863 |
| BCL11A-5201 | − | AAUGUAGAGAGGCAGAG | 17 | 5′ | 4864 |
| BCL11A-5202 | + | ACAUAAAAAUUUAAGAC | 17 | 5′ | 4865 |
| BCL11A-5203 | − | AGAAAGCAGUGUAAGGC | 17 | 5′ | 4866 |
| BCL11A-5204 | − | AGAAUAAAAGGCUGUUU | 17 | 5′ | 4867 |
| BCL11A-5205 | − | AGUAAAAUAAUUAGAAUAAA | 20 | 5′ | 4868 |
| BCL11A-5206 | − | AGUAAGUAUUUUCUUUCAUU | 20 | 3′ | 4869 |
| BCL11A-5207 | − | AGUAUUUUCUUUCAUUG | 17 | 3′ | 4870 |
| BCL11A-5208 | − | AUUAAGAAAGCAGUGUA | 17 | 5′ | 4871 |
| BCL11A-5209 | − | AUUAGAAUAAAAGGCUGUUU | 20 | 5′ | 4872 |
| BCL11A-5210 | + | AUUAUUUUACUAGUGAAUUA | 20 | 5′ | 4873 |
| BCL11A-5211 | + | AUUUUACUAGUGAAUUA | 17 | 5′ | 4874 |
| BCL11A-5212 | + | CACAUAAAAAUUUAAGA | 17 | 5′ | 4875 |
| BCL11A-5213 | − | CAGUAAGUAUUUUCUUUCAU | 20 | 3′ | 4876 |
| BCL11A-5214 | + | CUCACAUAAAAAUUUAAGAC | 20 | 5′ | 4877 |
| BCL11A-5215 | − | UAAGUAUUUUCUUUCAU | 17 | 3′ | 4878 |
| BCL11A-5216 | − | UAAGUAUUUUCUUUCAUUGG | 20 | 3′ | 4879 |
| BCL11A-5217 | − | UAUUUACAGCCAUAACA | 17 | 3′ | 4880 |
| BCL11A-5218 | + | UCUCACAUAAAAAUUUAAGA | 20 | 5′ | 4881 |
| BCL11A-5219 | − | UGGAAUGUAGAGAGGCAGAG | 20 | 5′ | 4882 |
| BCL11A-5220 | − | UGUUUUGGAAUGUAGAG | 17 | 5′ | 4883 |
| BCL11A-5221 | − | UUAAGAAAGCAGUGUAAGGC | 20 | 5′ | 4884 |
| BCL11A-5222 | − | UUGGAAUGUAGAGAGGCAGA | 20 | 5′ | 4885 |
| BCL11A-5223 | − | UUUGGAAUGUAGAGAGGCAG | 20 | 5′ | 4886 |

[1046] Table 8A provides exemplary targeting domains for removing (e.g., deleting) the enhancer region in the BCL11A gene selected according to first tier parameters. The targeting domains bind within a region 5′ (51.5 to 51.7 kb downstream of transcription start site, TSS) or 3′ (65.1 to 65.3 kb downstream of TSS) of enhancer, good orthogonality, starts with G. It is contemplated herein that the targeting domain hybridizes to the target domain through complementary base pairing. Any of the targeting domains in the table can be used with a S. aureus Cas9 molecule that generates a double strand break (Cas9 nuclease) or a single-strand break (Cas9 nickase). In an embodiment, dual targeting is used to create two double strand breaks to remove the enhancer region in the BCL11A gene, e.g., the first gRNA is used to target upstream (i.e., 5′) of the enhancer region in the BCL11A gene and the second gRNA is used to target downstream (i.e., 3′) of the enhancer region in the BCL11A gene.

[1047] Any of the targeting domains in the table can be used with a S. aureus Cas9 (nickase) molecule to generate a single strand break. In an embodiment, dual targeting is used to create two nicks on opposite DNA strands by using S. aureus Cas9 nickases with two targeting domains that are complementary to opposite DNA strands, e.g., a gRNA comprising any minus strand targeting domain may be paired any gRNA comprising a plus strand targeting domain provided that the two gRNAs are oriented on the DNA such that PAMs face outward and the distance between the 5′ ends of the gRNAs is 0-50 bp.

[1048] In an embodiment, four gRNAs (e.g., two pairs) are used to target four Cas9 nickases to create four nicks to remove the enhancer region in the BCL11A gene, e.g., the first pair of gRNAs are used to target upstream (i.e., 5′) of the enhancer region in the BCL11A gene and the second pair of gRNAs are used to target downstream (i.e., 3′) of the enhancer region in the BCL11A gene.

TABLE 8A
1st Tier

| | | | Target | | |
|---|---|---|---|---|---|
| | DNA | | Site | 5′ or 3′ of | SEQ ID |
| gRNA Name | Strand | Targeting Domain | Length | repeats | NO |
| BCL11A-5224 | − | GAGGGGCUGAUAUAACUUCU | 20 | 5′ | 4887 |
| BCL11A-5225 | + | GCUACUUAUACAAUUCA | 17 | 3′ | 4888 |
| BCL11A-5226 | − | GGGCUGAUAUAACUUCU | 17 | 5′ | 4889 |
| BCL11A-5227 | − | GUCUUAAAUUUUUAUGUGAG | 20 | 5′ | 4890 |
| BCL11A-5228 | + | GUGCUACUUAUACAAUUCAC | 20 | 3′ | 4891 |

[1049] Table 8B provides exemplary targeting domains for removing (e.g., deleting) the enhancer region in the BCL11A gene selected according to second tier parameters. The targeting domains bind within a region 5′ (51.5 to 51.7 kb downstream of transcription start site, TSS) or 3′ (65.1 to 65.3 kb downstream of TSS) of enhancer, good orthogonality, and do not start with G. It is contemplated herein that the targeting domain hybridizes to the target domain through complementary base pairing. Any of the targeting domains in the table can be used with a S. aureus Cas9 molecule that generates a double strand break (Cas9 nuclease) or a single-strand break (Cas9 nickase). In an embodiment, dual targeting is used to create two double strand breaks to remove the enhancer region in the BCL11A gene, e.g., the first gRNA is used to target upstream (i.e., 5′) of the enhancer region in the BCL11A gene and the second gRNA is used to target downstream (i.e., 3′) of the enhancer region in the BCL11A gene.

[1050] Any of the targeting domains in the table can be used with a S. aureus Cas9 (nickase) molecule to generate a single strand break. In an embodiment, dual targeting is used to create two nicks on opposite DNA strands by using S. aureus Cas9 nickases with two targeting domains that are complementary to opposite DNA strands, e.g., a gRNA comprising any minus strand targeting domain may be paired any gRNA comprising a plus strand targeting domain provided that the two gRNAs are oriented on the DNA such that PAMs face outward and the distance between the 5′ ends of the gRNAs is 0-50 bp. The table provides exemplary targeting domains for removing (e.g., deleting) the enhancer region in the BCL11A gene selected according to first tier parameters. The targeting domains bind within a region 5′ (51.5 to 51.7 kb downstream of transcription start site, TSS) or 3′ (65.1 to 65.3 kb downstream of TSS) of enhancer, good orthogonality, starts with G. It is contemplated herein that the targeting domain hybridizes to the target domain through complementary base pairing. Any of the targeting domains in the table can be used with a S. aureus Cas9 molecule that generates a double strand break (Cas9 nuclease) or a single-strand break (Cas9 nickase). In an embodiment, dual targeting is used to create two double strand breaks to remove the enhancer region in the BCL11A gene, e.g., the first gRNA is used to target upstream (i.e., 5′) of the enhancer region in the BCL11A gene and the second gRNA is used to target downstream (i.e., 3′) of the enhancer region in the BCL11A gene.

[1051] Any of the targeting domains in the table can be used with a S. aureus Cas9 (nickase) molecule to generate a single strand break. In an embodiment, dual targeting is used to create two nicks on opposite DNA strands by using S. aureus Cas9 nickases with two targeting domains that are complementary to opposite DNA strands, e.g., a gRNA comprising any minus strand targeting domain may be paired any gRNA comprising a plus strand targeting domain provided that the two gRNAs are oriented on the DNA such that PAMs face outward and the distance between the 5′ ends of the gRNAs is 0-50 bp.

[1052] In an embodiment, four gRNAs (e.g., two pairs) are used to target four Cas9 nickases to create four nicks to remove the enhancer region in the BCL11A gene, e.g., the first pair of gRNAs are used to target upstream (i.e., 5′) of the enhancer region in the BCL11A gene and the second pair of gRNAs are used to target downstream (i.e., 3′) of the enhancer region in the BCL11A gene.

TABLE 8B
2nd Tier

| | | | Target | | |
|---|---|---|---|---|---|
| | DNA | | Site | 5′ or 3′ of | SEQ ID |
| gRNA Name | Strand | Targeting Domain | Length | repeats | NO |
| BCL11A-5229 | − | AACACAAGUUGUGUAGA | 17 | 5′ | 4892 |
| BCL11A-5230 | − | ACUAUUUACAGCCAUAA | 17 | 3′ | 4893 |
| BCL11A-5231 | − | AGCACACUGCUGUAAUU | 17 | 5′ | 4894 |
| BCL11A-5232 | + | AGUGCUACUUAUACAAUUCA | 20 | 3′ | 4895 |
| BCL11A-5233 | + | AUAGUUUGCUUCCCCCA | 17 | 3′ | 4896 |
| BCL11A-5234 | − | AUGAGCACACUGCUGUAAUU | 20 | 5′ | 4897 |
| BCL11A-5235 | − | CAAACUAUUUACAGCCAUAA | 20 | 3′ | 4898 |
| BCL11A-5236 | − | CAGCCAUAACAGGGUUUCCA | 20 | 3′ | 4899 |
| BCL11A-5237 | − | CCAUAACAGGGUUUCCA | 17 | 3′ | 4900 |
| BCL11A-5238 | + | CUACUUAUACAAUUCAC | 17 | 3′ | 4901 |
| BCL11A-5239 | − | CUUUGGCUAUUGAUACUGAU | 20 | 3′ | 4902 |
| BCL11A-5240 | + | UAAAUAGUUUGCUUCCCCCA | 20 | 3′ | 4903 |
| BCL11A-5241 | + | UAGUUUGCUUCCCCCAAUGA | 20 | 3′ | 4904 |
| BCL11A-5242 | − | UGCAACACAAGUUGUGUAGA | 20 | 5′ | 4905 |
| BCL11A-5243 | − | UGGAAUGUAGAGAGGCA | 17 | 5′ | 4906 |
| BCL11A-5244 | − | UGGCUAUUGAUACUGAU | 17 | 3′ | 4907 |
| BCL11A-5245 | + | UUUGCUUCCCCCAAUGA | 17 | 3′ | 4908 |
| BCL11A-5246 | − | UUUUGGAAUGUAGAGAGGCA | 20 | 5′ | 4909 |

[1053] Table 8C provides exemplary targeting domains for removing (e.g., deleting) the enhancer region in the BCL11A gene selected according to third tier parameters. The targeting domains bind within a region 5′ (51.5 to 51.7 kb downstream of transcription start site, TSS) or 3′ (65.1 to 65.3 kb downstream of TSS) of enhancer and start with G. It is contemplated herein that the targeting domain hybridizes to the target domain through complementary base pairing. Any of the targeting domains in the table can be used with a S. aureus Cas9 molecule that generates a double strand break (Cas9 nuclease) or a single-strand break (Cas9 nickase). In an embodiment, dual targeting is used to create two double strand breaks to remove the enhancer region in the BCL11A gene, e.g., the first gRNA is used to target upstream (i.e., 5′) of the enhancer region in the BCL11A gene and the second gRNA is used to target downstream (i.e., 3′) of the enhancer region in the BCL11A gene.

[1054] Any of the targeting domains in the table can be used with a S. aureus Cas9 (nickase) molecule to generate a single strand break. In an embodiment, dual targeting is used to create two nicks on opposite DNA strands by using S. aureus Cas9 nickases with two targeting domains that are complementary to opposite DNA strands, e.g., a gRNA comprising any minus strand targeting domain may be paired any gRNA comprising a plus strand targeting domain provided that the two gRNAs are oriented on the DNA such that PAMs face outward and the distance between the 5′ ends of the gRNAs is 0-50 bp. The table provides exemplary targeting domains for removing (e.g., deleting) the enhancer region in the BCL11A gene selected according to first tier parameters. The targeting domains bind within a region 5′ (51.5 to 51.7 kb downstream of transcription start site, TSS) or 3′ (65.1 to 65.3 kb downstream of TSS) of enhancer, good orthogonality, starts with G. It is contemplated herein that the targeting domain hybridizes to the target domain through complementary base pairing. Any of the targeting domains in the table can be used with a S. aureus Cas9 molecule that generates a double strand break (Cas9 nuclease) or a single-strand break (Cas9 nickase). In an embodiment, dual targeting is used to create two double strand breaks to remove the enhancer region in the BCL11A gene, e.g., the first gRNA is used to target upstream (i.e., 5′) of the enhancer region in the BCL11A gene and the second gRNA is used to target downstream (i.e., 3′) of the enhancer region in the BCL11A gene.

[1055] Any of the targeting domains in the table can be used with a S. aureus Cas9 (nickase) molecule to generate a single strand break. In an embodiment, dual targeting is used to create two nicks on opposite DNA strands by using S. aureus Cas9 nickases with two targeting domains that are complementary to opposite DNA strands, e.g., a gRNA comprising any minus strand targeting domain may be paired any gRNA comprising a plus strand targeting domain provided that the two gRNAs are oriented on the DNA such that PAMs face outward and the distance between the 5′ ends of the gRNAs is 0-50 bp.

[1056] In an embodiment, four gRNAs (e.g., two pairs) are used to target four Cas9 nickases to create four nicks to remove the enhancer region in the BCL11A gene, e.g., the first pair of gRNAs are used to target upstream (i.e., 5′) of the enhancer region in the BCL11A gene and the second pair of gRNAs are used to target downstream (i.e., 3′) of the enhancer region in the BCL11A gene.

TABLE 8C
3rd Tier

| | | | Target | | |
|---|---|---|---|---|---|
| | DNA | | Site | 5′ or 3′ of | SEQ ID |
| gRNA Name | Strand | Targeting Domain | Length | repeats | NO |
| BCL11A-5247 | + | GAAAAUACUUACUGUACUGC | 20 | 3′ | 4910 |
| BCL11A-5248 | − | GAAUUGUAUAAGUAGCA | 17 | 3′ | 4911 |
| BCL11A-5249 | − | GAGUUCUGUGUCAGCAAAAA | 20 | 3′ | 4912 |
| BCL11A-5250 | + | GGAAAACAGGAAGAUGCAUU | 20 | 5′ | 4913 |
| BCL11A-5251 | − | GGAAUGUAGAGAGGCAG | 17 | 5′ | 4914 |
| BCL11A-5252 | − | GGCUGUUUUGGAAUGUA | 17 | 5′ | 4915 |
| BCL11A-5253 | − | GUAAGUAUUUUCUUUCA | 17 | 3′ | 4916 |
| BCL11A-5254 | − | GUAAGUAUUUUCUUUCAUUG | 20 | 3′ | 4917 |
| BCL11A-5255 | − | GUAUUUUCUUUCAUUGG | 17 | 3′ | 4918 |

[1057] Table 8D provides exemplary targeting domains for removing (e.g., deleting) the enhancer region in the BCL11A gene selected according to forth tier parameters. The targeting domains bind within a region 5′ (51.5 to 51.7 kb downstream of transcription start site, TSS) or 3′ (65.1 to 65.3 kb downstream of TSS) of enhancer and do not start with G. It is contemplated herein that the targeting domain hybridizes to the target domain through complementary base pairing. Any of the targeting domains in the table can be used with a S. aureus Cas9 molecule that generates a double strand break (Cas9 nuclease) or a single-strand break (Cas9 nickase). In an embodiment, dual targeting is used to create two double strand breaks to remove the enhancer region in the BCL11A gene, e.g., the first gRNA is used to target upstream (i.e., 5′) of the enhancer region in the BCL11A gene and the second gRNA is used to target downstream (i.e., 3′) of the enhancer region in the BCL11A gene.

[1058] Any of the targeting domains in the table can be used with a S. aureus Cas9 (nickase) molecule to generate a single strand break. In an embodiment, dual targeting is used to create two nicks on opposite DNA strands by using S. aureus Cas9 nickases with two targeting domains that are complementary to opposite DNA strands, e.g., a gRNA comprising any minus strand targeting domain may be paired any gRNA comprising a plus strand targeting domain provided that the two gRNAs are oriented on the DNA such that PAMs face outward and the distance between the 5′ ends of the gRNAs is 0-50 bp. The table provides exemplary targeting domains for removing (e.g., deleting) the enhancer region in the BCL11A gene selected according to first tier parameters. The targeting domains bind within a region 5′ (51.5 to 51.7 kb downstream of transcription start site, TSS) or 3′ (65.1 to 65.3 kb downstream of TSS) of enhancer, good orthogonality, starts with G. It is contemplated herein that the targeting domain hybridizes to the target domain through complementary base pairing. Any of the targeting domains in the table can be used with a S. aureus Cas9 molecule that generates a double strand break (Cas9 nuclease) or a single-strand break (Cas9 nickase). In an embodiment, dual targeting is used to create two double strand breaks to remove the enhancer region in the BCL11A gene, e.g., the first gRNA is used to target upstream (i.e., 5′) of the enhancer region in the BCL11A gene and the second gRNA is used to target downstream (i.e., 3′) of the enhancer region in the BCL11A gene.

[1059] Any of the targeting domains in the table can be used with a S. aureus Cas9 (nickase) molecule to generate a single strand break. In an embodiment, dual targeting is used to create two nicks on opposite DNA strands by using S. aureus Cas9 nickases with two targeting domains that are complementary to opposite DNA strands, e.g., a gRNA comprising any minus strand targeting domain may be paired any gRNA comprising a plus strand targeting domain provided that the two gRNAs are oriented on the DNA such that PAMs face outward and the distance between the 5′ ends of the gRNAs is 0-50 bp.

[1060] In an embodiment, four gRNAs (e.g., two pairs) are used to target four Cas9 nickases to create four nicks to remove the enhancer region in the BCL11A gene, e.g., the first pair of gRNAs are used to target upstream (i.e., 5′) of the enhancer region in the BCL11A gene and the second pair of gRNAs are used to target downstream (i.e., 3′) of the enhancer region in the BCL11A gene.

TABLE 8D
4th Tier

| | | | Target | | |
|---|---|---|---|---|---|
| | DNA | | Site | 5′ or 3′ of | SEQ ID |
| gRNA Name | Strand | Targeting Domain | Length | repeats | NO |
| BCL11A-5256 | + | AAAAAUUUAAGACGGGAAAA | 20 | 5′ | 4919 |
| BCL11A-5257 | + | AAAACAGGAAGAUGCAUUCU | 20 | 5′ | 4920 |
| BCL11A-5258 | − | AAAACUAGAAAGUUUUA | 17 | 3′ | 4921 |
| BCL11A-5259 | + | AAAAUACUUACUGUACUGCA | 20 | 3′ | 4922 |
| BCL11A-5260 | + | AAAAUUUAAGACGGGAAAAC | 20 | 5′ | 4923 |
| BCL11A-5261 | + | AAACAGGAAGAUGCAUU | 17 | 5′ | 4924 |
| BCL11A-5262 | − | AAAGGCUGUUUUGGAAUGUA | 20 | 5′ | 4925 |
| BCL11A-5263 | + | AAAUACUUACUGUACUG | 17 | 3′ | 4926 |
| BCL11A-5264 | + | AAAUACUUACUGUACUGCAG | 20 | 3′ | 4927 |
| BCL11A-5265 | − | AAGAAAGCAGUGUAAGG | 17 | 5′ | 4928 |
| BCL11A-5266 | − | AAGGCUGUUUUGGAAUG | 17 | 5′ | 4929 |
| BCL11A-5267 | − | AAGUAUUUUCUUUCAUU | 17 | 3′ | 4930 |
| BCL11A-5268 | + | AAUACUUACUGUACUGC | 17 | 3′ | 4931 |
| BCL11A-5269 | − | AAUUAGAAUAAAAGGCUGUU | 20 | 5′ | 4932 |
| BCL11A-5270 | + | AAUUAUUUUACUAGUGAAUU | 20 | 5′ | 4933 |
| BCL11A-5271 | + | AAUUUAAGACGGGAAAA | 17 | 5′ | 4934 |
| BCL11A-5272 | + | ACAGGAAGAUGCAUUCU | 17 | 5′ | 4935 |
| BCL11A-5273 | − | ACAGUAAGUAUUUUCUUUCA | 20 | 3′ | 4936 |
| BCL11A-5274 | + | ACAUAAAAAUUUAAGAC | 17 | 5′ | 4937 |
| BCL11A-5275 | + | ACUUUCUAGUUUUGCUUAAC | 20 | 3′ | 4938 |
| BCL11A-5276 | + | AGAAAAUACUUACUGUACUG | 20 | 3′ | 4939 |
| BCL11A-5277 | − | AGAAUAAAAGGCUGUUU | 17 | 5′ | 4940 |
| BCL11A-5278 | − | AGCAAAACUAGAAAGUUUUA | 20 | 3′ | 4941 |
| BCL11A-5279 | − | AGUAAGUAUUUUCUUUCAUU | 20 | 3′ | 4942 |
| BCL11A-5280 | − | AGUAUUUUCUUUCAUUG | 17 | 3′ | 4943 |
| BCL11A-5281 | − | AGUGAAUUGUAUAAGUAGCA | 20 | 3′ | 4944 |
| BCL11A-5282 | + | AUACUUACUGUACUGCA | 17 | 3′ | 4945 |
| BCL11A-5283 | + | AUCUCACAUAAAAAUUUAAG | 20 | 5′ | 4946 |
| BCL11A-5284 | − | AUUAAGAAAGCAGUGUAAGG | 20 | 5′ | 4947 |
| BCL11A-5285 | − | AUUAGAAUAAAAGGCUGUUU | 20 | 5′ | 4948 |
| BCL11A-5286 | + | AUUAUUUUACUAGUGAAUUA | 20 | 5′ | 4949 |
| BCL11A-5287 | + | AUUUAAGACGGGAAAAC | 17 | 5′ | 4950 |
| BCL11A-5288 | + | AUUUUACUAGUGAAUUA | 17 | 5′ | 4951 |
| BCL11A-5289 | − | AUUUUCAUGUUAAGCAAAAC | 20 | 3′ | 4952 |
| BCL11A-5290 | + | CACAUAAAAAUUUAAGA | 17 | 5′ | 4953 |
| BCL11A-5291 | − | CAGUAAGUAUUUUCUUUCAU | 20 | 3′ | 4954 |
| BCL11A-5292 | − | CCGUCUUAAAUUUUUAU | 17 | 5′ | 4955 |
| BCL11A-5293 | + | CUCACAUAAAAAUUUAAGAC | 20 | 5′ | 4956 |
| BCL11A-5294 | − | UAAAAGGCUGUUUUGGAAUG | 20 | 5′ | 4957 |
| BCL11A-5295 | − | UAAGUAUUUUCUUUCAU | 17 | 3′ | 4958 |
| BCL11A-5296 | − | UAAGUAUUUUCUUUCAUUGG | 20 | 3′ | 4959 |
| BCL11A-5297 | − | UAAUUCACUAGUAAAAUAAU | 20 | 5′ | 4960 |
| BCL11A-5298 | + | UACUUACUGUACUGCAG | 17 | 3′ | 4961 |
| BCL11A-5299 | − | UAGAAUAAAAGGCUGUU | 17 | 5′ | 4962 |
| BCL11A-5300 | + | UAUUUUACUAGUGAAUU | 17 | 5′ | 4963 |
| BCL11A-5301 | + | UCACAUAAAAAUUUAAG | 17 | 5′ | 4964 |
| BCL11A-5302 | + | UCUCACAUAAAAAUUUAAGA | 20 | 5′ | 4965 |
| BCL11A-5303 | + | UGUUUCAUUUUUUGCUGACA | 20 | 3′ | 4966 |
| BCL11A-5304 | − | UGUUUUGGAAUGUAGAGAGG | 20 | 5′ | 4967 |
| BCL11A-5305 | − | UUAAAUUUUUAUGUGAG | 17 | 5′ | 4968 |
| BCL11A-5306 | + | UUAUUCUAAUUAUUUUACUA | 20 | 5′ | 4969 |
| BCL11A-5307 | − | UUCACUAGUAAAAUAAU | 17 | 5′ | 4970 |
| BCL11A-5308 | − | UUCAUGUUAAGCAAAAC | 17 | 3′ | 4971 |
| BCL11A-5309 | + | UUCAUUUUUUGCUGACA | 17 | 3′ | 4972 |
| BCL11A-5310 | − | UUCCCGUCUUAAAUUUUUAU | 20 | 5′ | 4973 |
| BCL11A-5311 | + | UUCUAAUUAUUUUACUA | 17 | 5′ | 4974 |
| BCL11A-5312 | + | UUCUAGUUUUGCUUAAC | 17 | 3′ | 4975 |
| BCL11A-5313 | − | UUCUGUGUCAGCAAAAA | 17 | 3′ | 4976 |
| BCL11A-5314 | − | UUUGGAAUGUAGAGAGG | 17 | 5′ | 4977 |
| BCL11A-5315 | − | UUUGGAAUGUAGAGAGGCAG | 20 | 5′ | 4978 |

[1061] Table 9 provides exemplary targeting domains for removing (e.g., deleting) the enhancer region in the BCL11A gene selected according to first tier parameters. The targeting domains bind within a region 5′ (51.5 to 51.7 kb downstream of transcription start site, TSS) or 3′ (65.1 to 65.3 kb downstream of TSS) of enhancer, good orthogonality, starts with G. It is contemplated herein that the targeting domain hybridizes to the target domain through complementary base pairing. Any of the targeting domains in the table can be used with a N. meningitidis Cas9 molecule that generates a double strand break (Cas9 nuclease) or a single-strand break (Cas9 nickase). In an embodiment, dual targeting is used to create two double strand breaks to remove the enhancer region in the BCL11A gene, e.g., the first gRNA is used to target upstream (i.e., 5′) of the enhancer region in the BCL11A gene and the second gRNA is used to target downstream (i.e., 3′) of the enhancer region in the BCL11A gene.

[1062] Any of the targeting domains in the table can be used with a N. meningitidis Cas9 (nickase) molecule to generate a single strand break. In an embodiment, dual targeting is used to create two nicks on opposite DNA strands by using N. meningitidis Cas9 nickases with two targeting domains that are complementary to opposite DNA strands, e.g., a gRNA comprising any minus strand targeting domain may be paired any gRNA comprising a plus strand targeting domain provided that the two gRNAs are oriented on the DNA such that PAMs face outward and the distance between the 5′ ends of the gRNAs is 0-50 bp.

[1063] In an embodiment, four gRNAs (e.g., two pairs) are used to target four Cas9 nickases to create four nicks to remove the enhancer region in the BCL11A gene, e.g., the first pair of gRNAs are used to target upstream (i.e., 5′) of the enhancer region in the BCL11A gene and the second pair of gRNAs are used to target downstream (i.e., 3′) of the enhancer region in the BCL11A gene.

TABLE 9
1st Tier

| | | | Target | | |
|---|---|---|---|---|---|
| | DNA | | Site | 5′ or 3′ of | SEQ ID |
| gRNA Name | Strand | Targeting Domain | Length | repeats | NO |
| BCL11A-5316 | − | UUUGGAUCUUUGGCUAUUGA | 20 | 3′ | 4979 |
| BCL11A-5317 | − | GGAUCUUUGGCUAUUGA | 17 | 3′ | 4980 |

[1064] Table 10A provides exemplary targeting domains for knocking down expression of the BCL11A gene according to first tier parameters. The targeting domains bind between 500 bp upstream and 500 bp downstream of transcription start site, good orthogonality, starts with G. It is contemplated herein that the targeting domain hybridizes to the target domain through complementary base pairing. Any of the targeting domains in the table can be used with a S. pyogenes eiCas9 molecule to cause a steric block at the target region, e.g., between 500 bp upstream and 500 bp downstream of transcription start site to block transcription resulting in the repression of the BCL11A gene. Alternatively, any of the targeting domains in the table can be used with a S. pyogenes eiCas9 fused to a transcriptional repressor to decrease transcription and therefore downregulate gene expression.

TABLE 10A
1st Tier

| | | | Target | SEQ |
|---|---|---|---|---|
| | DNA | | Site | ID |
| gRNA Name | Strand | Targeting Domain | Length | NO |
| BCL11A-4350 | + | GACGACGGCUCGGUUCACAU | 20 | 4981 |
| BCL11A-4351 | + | GACGCCAGACGCGGCCCCCG | 20 | 4982 |
| BCL11A-4352 | + | GCCUUGCUUGCGGCGAGACA | 20 | 4983 |
| BCL11A-4353 | + | GGCUCCGCGGACGCCAGACG | 20 | 4984 |
| BCL11A-4354 | + | GACGGCUCGGUUCACAU | 17 | 4985 |
| BCL11A-4355 | − | GCCGCGUCUGGCGUCCG | 17 | 4986 |
| BCL11A-4356 | + | GCGGGCGGACGACGGCU | 17 | 4987 |

[1065] Table 10B provides exemplary targeting domains for knocking down expression of the BCL11A gene according to second tier parameters. The targeting domains bind between 500 bp upstream and 500 bp downstream of transcription start site, good orthogonality and do not start with G. It is contemplated herein that the targeting domain hybridizes to the target domain through complementary base pairing. Any of the targeting domains in the table can be used with a S. pyogenes eiCas9 molecule to cause a steric block at the target region, e.g., between 500 bp upstream and 500 bp downstream of transcription start site to block transcription resulting in the repression of the BCL11A gene. Alternatively, any of the targeting domains in the table can be used with a S. pyogenes eiCas9 fused to a transcriptional repressor to decrease transcription and therefore downregulate gene expression.

TABLE 10B
2nd Tier

| | | | Target | SEQ |
|---|---|---|---|---|
| | DNA | | Site | ID |
| gRNA Name | Strand | Targeting Domain | Length | NO |
| BCL11A-4357 | + | ACACGGCAAUGGUUCCAGAU | 20 | 4988 |
| BCL11A-4358 | − | ACCAUGUCUCGCCGCAAGCA | 20 | 4989 |
| BCL11A-4359 | + | ACGACGGCUCGGUUCACAUC | 20 | 4990 |
| BCL11A-4360 | + | AUUCCCGUUUGCUUAAGUGC | 20 | 4991 |
| BCL11A-4361 | − | CAUUUUAGAGUCCGCGUGUG | 20 | 4992 |
| BCL11A-4362 | + | CGGACGCCAGACGCGGCCCC | 20 | 4993 |
| BCL11A-4363 | + | CGGUUCACAUCGGGAGAGCC | 20 | 4994 |
| BCL11A-4364 | − | CUCCUGACGUUCAAGUUCGC | 20 | 4995 |
| BCL11A-4365 | − | UAAUAAUCACGAGAGCGCGC | 20 | 4996 |
| BCL11A-4366 | − | UCCUGACGUUCAAGUUCGCA | 20 | 4997 |
| BCL11A-4367 | + | UCGGUUCACAUCGGGAGAGC | 20 | 4998 |
| BCL11A-4368 | + | UCUUUUACCUCGACUCUCGG | 20 | 4999 |
| BCL11A-4369 | + | UGCUUGCGGCGAGACAUGGU | 20 | 5000 |
| BCL11A-4370 | − | UUUAGAGUCCGCGUGUGUGG | 20 | 5001 |
| BCL11A-4371 | + | ACGGCUCGGUUCACAUC | 17 | 5002 |
| BCL11A-4372 | − | AUGUCUCGCCGCAAGCA | 17 | 5003 |
| BCL11A-4373 | − | CUGACGUUCAAGUUCGC | 17 | 5004 |
| BCL11A-4374 | − | UAAUCACGAGAGCGCGC | 17 | 5005 |
| BCL11A-4375 | + | UCCGCGGACGCCAGACG | 17 | 5006 |
| BCL11A-4376 | − | UGACGUUCAAGUUCGCA | 17 | 5007 |
| BCL11A-4377 | − | UUAGAGUCCGCGUGUGU | 17 | 5008 |
| BCL11A-4378 | + | UUGCGGCGAGACAUGGU | 17 | 5009 |
| BCL11A-4379 | + | UUGCUUGCGGCGAGACA | 17 | 5010 |
| BCL11A-4380 | + | UUUACCUCGACUCUCGG | 17 | 5011 |
| BCL11A-4381 | − | UUUAGAGUCCGCGUGUG | 17 | 5012 |

[1066] Table 10C provides exemplary targeting domains for knocking down expression of the BCL11A gene according to third tier parameters. The targeting domains bind between 500 bp upstream and 500 bp downstream of transcription start site and start with G. It is contemplated herein that the targeting domain hybridizes to the target domain through complementary base pairing. Any of the targeting domains in the table can be used with a S. pyogenes eiCas9 molecule to cause a steric block at the target region, e.g., between 500 bp upstream and 500 bp downstream of transcription start site to block transcription resulting in the repression of the BCL11A gene. Alternatively, any of the targeting domains in the table can be used with a S. pyogenes eiCas9 fused to a transcriptional repressor to decrease transcription and therefore downregulate gene expression.

TABLE 10C
3rd Tier

| | | | Target | SEQ |
|---|---|---|---|---|
| | DNA | | Site | ID |
| gRNA Name | Strand | Targeting Domain | Length | NO |
| BCL11A-4382 | − | GAAAAAACCCUCAUCCCAUC | 20 | 5013 |
| BCL11A-4383 | + | GAAAGGGGUGGCAGGGG | 17 | 5014 |
| BCL11A-4384 | + | GAACUUGAACGUCAGGAGUC | 20 | 5015 |
| BCL11A-4385 | − | GAACUUGCAGCUCAGGG | 17 | 5016 |
| BCL11A-4386 | + | GAAGAAAGGGGUGGCAG | 17 | 5017 |
| BCL11A-4387 | + | GAAGAAAGGGGUGGCAGGGG | 20 | 5018 |
| BCL11A-4388 | + | GAAGGGGAAGCUCACACCAA | 20 | 5019 |
| BCL11A-4389 | + | GAAGGGGAGGAGGGAAG | 17 | 5020 |
| BCL11A-4390 | + | GAAUUGUGGGAGAGCCGUCA | 20 | 5021 |
| BCL11A-4391 | + | GACAAGCCAAUGGCCAGUGC | 20 | 5022 |
| BCL11A-4392 | + | GACAGAGACACACAAAACAU | 20 | 5023 |
| BCL11A-4393 | + | GACAUGAAAAAGAGACC | 17 | 5024 |
| BCL11A-4394 | + | GACAUGGUGGGCUGCGGGGC | 20 | 5025 |
| BCL11A-4395 | + | GACGCGGCCCCCGGGGG | 17 | 5026 |
| BCL11A-4396 | − | GACUAGAAGCAAAAGCG | 17 | 5027 |
| BCL11A-4397 | − | GACUAGAAGCAAAAGCGAGG | 20 | 5028 |
| BCL11A-4398 | + | GAGAAGAAAGGGGUGGC | 17 | 5029 |
| BCL11A-4399 | + | GAGAAGGGGAGGAGGGA | 17 | 5030 |
| BCL11A-4400 | + | GAGACACACAAAACAUGGGC | 20 | 5031 |
| BCL11A-4401 | + | GAGACAUGGUGGGCUGC | 17 | 5032 |
| BCL11A-4402 | + | GAGAGAAGAAAGGGGUGGCA | 20 | 5033 |
| BCL11A-4403 | + | GAGAGAAGAGAGAUAGA | 17 | 5034 |
| BCL11A-4404 | + | GAGAGAAGGGGAGGAGGGAA | 20 | 5035 |
| BCL11A-4405 | + | GAGAGAGAGAAGAGAGAUAG | 20 | 5036 |
| BCL11A-4406 | + | GAGAGAGAUGAAAAAAA | 17 | 5037 |
| BCL11A-4407 | + | GAGCAGGAGAGAAGGGG | 17 | 5038 |
| BCL11A-4408 | + | GAGCAGGAGAGAAGGGGAGG | 20 | 5039 |
| BCL11A-4409 | + | GAGCCGGGUUAGAAAGA | 17 | 5040 |
| BCL11A-4410 | + | GAGGGGAGGGGGCGCUG | 17 | 5041 |
| BCL11A-4411 | + | GAGGGGCGGGCCGAGGGGAG | 20 | 5042 |
| BCL11A-4412 | + | GAGGGGGAGGUGCGGGG | 17 | 5043 |
| BCL11A-4413 | + | GAGGGGGAGGUGCGGGGCGG | 20 | 5044 |
| BCL11A-4414 | − | GAGGUAAAAGAGAUAAA | 17 | 5045 |
| BCL11A-4415 | − | GAGUCCGCGUGUGUGGG | 17 | 5046 |
| BCL11A-4416 | − | GAGUCUCCUUCUUUCUAACC | 20 | 5047 |
| BCL11A-4417 | − | GAUGAAGAUAUUUUCUC | 17 | 5048 |
| BCL11A-4418 | − | GCAAAAGCGAGGGGGAGAGA | 20 | 5049 |
| BCL11A-4419 | − | GCACCUCCCCCUCCCCGCAC | 20 | 5050 |
| BCL11A-4420 | − | GCACUUGAACUUGCAGCUCA | 20 | 5051 |
| BCL11A-4421 | + | GCAGGGAAGAUGAAUUG | 17 | 5052 |
| BCL11A-4422 | + | GCAGGGCGAGCAGGAGAGAA | 20 | 5053 |
| BCL11A-4423 | + | GCAGGGGUGGGAGGAAA | 17 | 5054 |
| BCL11A-4424 | + | GCAGGGGUGGGAGGAAAGGG | 20 | 5055 |
| BCL11A-4425 | + | GCCAAUGGCCAGUGCGGGGA | 20 | 5056 |
| BCL11A-4426 | − | GCCACCCCUUUCUUCUCUCC | 20 | 5057 |
| BCL11A-4427 | + | GCCAGACGCGGCCCCCG | 17 | 5058 |
| BCL11A-4428 | − | GCCCCAGCGCCCCCUCCCCU | 20 | 5059 |
| BCL11A-4429 | + | GCCCCCGGGGGAGGGGC | 17 | 5060 |
| BCL11A-4430 | − | GCCCGCCCCUCCCCCGG | 17 | 5061 |
| BCL11A-4431 | + | GCCGAGGGGAGGGGGCGCUG | 20 | 5062 |
| BCL11A-4432 | + | GCCGCGGCGGUGGCGUGGCC | 20 | 5063 |
| BCL11A-4433 | + | GCCGGGAGAGAAGAAAG | 17 | 5064 |
| BCL11A-4434 | + | GCCGGGAGAGAAGAAAGGGG | 20 | 5065 |
| BCL11A-4435 | + | GCGAGACAUGGUGGGCUGCG | 20 | 5066 |
| BCL11A-4436 | + | GCGCAGGGAAGAUGAAUUGU | 20 | 5067 |
| BCL11A-4437 | + | GCGCCGCGGCGGUGGCG | 17 | 5068 |
| BCL11A-4438 | − | GCGCUCGCUGCGGCCAC | 17 | 5069 |
| BCL11A-4439 | + | GCGGCCCCCGGGGGAGGGGC | 20 | 5070 |
| BCL11A-4440 | − | GCGGCGCUCGCUGCGGCCAC | 20 | 5071 |
| BCL11A-4441 | + | GCGGCGGCGGCGGCGGC | 17 | 5072 |
| BCL11A-4442 | + | GCGGCGGCGGCGGCGGCGGC | 20 | 5073 |
| BCL11A-4443 | + | GCGGCGGCGGCGGCGGCGGG | 20 | 5074 |
| BCL11A-4444 | + | GCGGCGGCGGCGGCGGG | 17 | 5075 |
| BCL11A-4445 | + | GCGGCGGGCGGACGACGGCU | 20 | 5076 |
| BCL11A-4446 | + | GCGGCGGUGGCGUGGCC | 17 | 5077 |
| BCL11A-4447 | + | GCGGGCGGCGGCGGCGG | 17 | 5078 |
| BCL11A-4448 | + | GCGGGCGGCGGCGGCGGCGG | 20 | 5079 |
| BCL11A-4449 | + | GCGGGGAGGGGGAGGUG | 17 | 5080 |
| BCL11A-4450 | + | GCGUGGCCGGGAGAGAAGAA | 20 | 5081 |
| BCL11A-4451 | + | GCUCCCCCCCACACACG | 17 | 5082 |
| BCL11A-4452 | + | GCUGGGGUUUGCCUUGCUUG | 20 | 5083 |
| BCL11A-4453 | + | GGACAAGCCAAUGGCCAGUG | 20 | 5084 |
| BCL11A-4454 | + | GGACACACAUCAGGGGC | 17 | 5085 |
| BCL11A-4455 | + | GGACAGAGACACACAAAACA | 20 | 5086 |
| BCL11A-4456 | + | GGACGCCAGACGCGGCCCCC | 20 | 5087 |
| BCL11A-4457 | − | GGACUAGAAGCAAAAGCGAG | 20 | 5088 |
| BCL11A-4458 | + | GGAGAGAAGAAAGGGGUGGC | 20 | 5089 |
| BCL11A-4459 | + | GGAGAGAAGGGGAGGAGGGA | 20 | 5090 |
| BCL11A-4460 | + | GGAGAGCCGGGUUAGAAAGA | 20 | 5091 |
| BCL11A-4461 | + | GGAGGGGCGGGCCGAGGGGA | 20 | 5092 |
| BCL11A-4462 | + | GGAGGGGGAGGUGCGGGGCG | 20 | 5093 |
| BCL11A-4463 | + | GGAGGGGGCGCUGGGGCCGC | 20 | 5094 |
| BCL11A-4464 | + | GGCAGGGCGAGCAGGAGAGA | 20 | 5095 |
| BCL11A-4465 | + | GGCAGGGGUGGGAGGAA | 17 | 5096 |
| BCL11A-4466 | − | GGCCACUGGUGAGCCCG | 17 | 5097 |
| BCL11A-4467 | + | GGCCCCCGGGGGAGGGG | 17 | 5098 |
| BCL11A-4468 | − | GGCCCGCCCCUCCCCCG | 17 | 5099 |
| BCL11A-4469 | + | GGCCGAGGGGAGGGGGCGCU | 20 | 5100 |
| BCL11A-4470 | + | GGCCGCAGCGAGCGCCG | 17 | 5101 |
| BCL11A-4471 | + | GGCCGCAGCGAGCGCCGCGG | 20 | 5102 |
| BCL11A-4472 | + | GGCCGCGGGCUCACCAG | 17 | 5103 |
| BCL11A-4473 | + | GGCCGGGAGAGAAGAAA | 17 | 5104 |
| BCL11A-4474 | + | GGCGAGACAUGGUGGGCUGC | 20 | 5105 |
| BCL11A-4475 | + | GGCGAGCAGGAGAGAAG | 17 | 5106 |
| BCL11A-4476 | + | GGCGAGCAGGAGAGAAGGGG | 20 | 5107 |
| BCL11A-4477 | + | GGCGCAGGGAAGAUGAAUUG | 20 | 5108 |
| BCL11A-4478 | + | GGCGGCGGCGGCGGCGG | 17 | 5109 |
| BCL11A-4479 | + | GGCGGCGGCGGCGGCGGCGG | 20 | 5110 |
| BCL11A-4480 | + | GGCGGGCCGAGGGGAGG | 17 | 5111 |
| BCL11A-4481 | + | GGCUGCGGGGCGGGCGG | 17 | 5112 |
| BCL11A-4482 | + | GGCUGCGGGGCGGGCGGCGG | 20 | 5113 |
| BCL11A-4483 | + | GGGAGAGAAGAAAGGGG | 17 | 5114 |
| BCL11A-4484 | + | GGGAGGAAAGGGUGGGG | 17 | 5115 |
| BCL11A-4485 | + | GGGAGGGGCGGGCCGAG | 17 | 5116 |
| BCL11A-4486 | + | GGGAGGGGCGGGCCGAGGGG | 20 | 5117 |
| BCL11A-4487 | + | GGGAGGGGGAGGUGCGGGGC | 20 | 5118 |
| BCL11A-4488 | + | GGGAGGGGGCGCUGGGGCCG | 20 | 5119 |
| BCL11A-4489 | + | GGGAGGUGCGGGGCGGG | 17 | 5120 |
| BCL11A-4490 | + | GGGCCGAGGGGAGGGGGCGC | 20 | 5121 |
| BCL11A-4491 | + | GGGCGAGCAGGAGAGAA | 17 | 5122 |
| BCL11A-4492 | + | GGGCGGGCCGAGGGGAG | 17 | 5123 |
| BCL11A-4493 | + | GGGGAAGCUCACACCAA | 17 | 5124 |
| BCL11A-4494 | + | GGGGAGGGGCGGGCCGA | 17 | 5125 |
| BCL11A-4495 | + | GGGGAGGGGGAGGUGCG | 17 | 5126 |
| BCL11A-4496 | + | GGGGAGGGGGAGGUGCGGGG | 20 | 5127 |
| BCL11A-4497 | + | GGGGAGGUGCGGGGCGG | 17 | 5128 |
| BCL11A-4498 | − | GGGGCCGCGUCUGGCGUCCG | 20 | 5129 |
| BCL11A-4499 | + | GGGGCGGGCCGAGGGGA | 17 | 5130 |
| BCL11A-4500 | + | GGGGCGGGCGGCGGCGG | 17 | 5131 |
| BCL11A-4501 | + | GGGGCGGGCGGCGGCGGCGG | 20 | 5132 |
| BCL11A-4502 | + | GGGGGAGGGGCGGGCCG | 17 | 5133 |
| BCL11A-4503 | + | GGGGGAGGUGCGGGGCG | 17 | 5134 |
| BCL11A-4504 | + | GGGGGCGCUGGGGCCGC | 17 | 5135 |
| BCL11A-4505 | + | GGGGUGGCAGGGGUGGG | 17 | 5136 |
| BCL11A-4506 | + | GGGGUGGGAGGAAAGGG | 17 | 5137 |
| BCL11A-4507 | + | GGGGUGGGAGGAAAGGGUGG | 20 | 5138 |
| BCL11A-4508 | + | GGGGUUUGCCUUGCUUG | 17 | 5139 |
| BCL11A-4509 | + | GGGUGGGAGGAAAGGGU | 17 | 5140 |
| BCL11A-4510 | + | GGGUGGGAGGAAAGGGUGGG | 20 | 5141 |
| BCL11A-4511 | − | GGUAAAAGAGAUAAAGG | 17 | 5142 |
| BCL11A-4512 | + | GGUGGCAGGGGUGGGAGGAA | 20 | 5143 |
| BCL11A-4513 | + | GGUGGGAGGAAAGGGUG | 17 | 5144 |
| BCL11A-4514 | + | GGUGGGAGGAAAGGGUGGGG | 20 | 5145 |
| BCL11A-4515 | + | GGUUCCAGAUGGGAUGA | 17 | 5146 |
| BCL11A-4516 | − | GUAUUAUUUCUAAUUUAUUU | 20 | 5147 |
| BCL11A-4517 | − | GUCGAGGUAAAAGAGAUAAA | 20 | 5148 |
| BCL11A-4518 | + | GUGCGGGGAGGGGGAGGUGC | 20 | 5149 |
| BCL11A-4519 | + | GUGCGGGGCGGGGGGCUCCG | 20 | 5150 |
| BCL11A-4520 | + | GUGGCAGGGGUGGGAGGAAA | 20 | 5151 |
| BCL11A-4521 | + | GUGGCCGGGAGAGAAGAAAG | 20 | 5152 |
| BCL11A-4522 | + | GUGGGAGGAAAGGGUGG | 17 | 5153 |
| BCL11A-4523 | + | GUGGGCUGCGGGGCGGG | 17 | 5154 |
| BCL11A-4524 | + | GUGGGCUGCGGGGCGGGCGG | 20 | 5155 |
| BCL11A-4525 | − | GUGUGUGGGGGGGAGCA | 17 | 5156 |

[1067] Table 10D provides exemplary targeting domains for knocking down expression of the BCL11A gene according to forth tier parameters. The targeting domains bind between 500 bp upstream and 500 bp downstream of transcription start site and do not start with G. It is contemplated herein that the targeting domain hybridizes to the target domain through complementary base pairing. Any of the targeting domains in the table can be used with a S. pyogenes eiCas9 molecule to cause a steric block at the target region, e.g., between 500 bp upstream and 500 bp downstream of transcription start site to block transcription resulting in the repression of the BCL11A gene. Alternatively, any of the targeting domains in the table can be used with a S. pyogenes eiCas9 fused to a transcriptional repressor to decrease transcription and therefore downregulate gene expression.

TABLE 10D
4th Tier

| | | | Target | SEQ |
|---|---|---|---|---|
| | DNA | | Site | ID |
| gRNA Name | Strand | Targeting Domain | Length | NO |
| BCL11A-4526 | + | AAAAAAAAAAAAAAAAAAAG | 20 | 5157 |
| BCL11A-4527 | + | AAAAAAAAAAAAAAAAAAGA | 20 | 5158 |
| BCL11A-4528 | + | AAAAAAAAAAAAAAAAG | 17 | 5159 |
| BCL11A-4529 | + | AAAAAAAAAAAAAAAGA | 17 | 5160 |
| BCL11A-4530 | + | AAAACAUGGGCAGGGCGAGC | 20 | 5161 |
| BCL11A-4531 | − | AAAACCCUCAUCCCAUC | 17 | 5162 |
| BCL11A-4532 | − | AAAACCUCCGAGAGUCG | 17 | 5163 |
| BCL11A-4533 | − | AAAAGCGAGGGGGAGAG | 17 | 5164 |
| BCL11A-4534 | − | AAAGCGAGGGGGAGAGA | 17 | 5165 |
| BCL11A-4535 | + | AAAGGGGUGGCAGGGGU | 17 | 5166 |
| BCL11A-4536 | + | AAAGGGGUGGCAGGGGUGGG | 20 | 5167 |
| BCL11A-4537 | + | AAAUAAUACAAAGAUGGCGC | 20 | 5168 |
| BCL11A-4538 | − | AACCCCAGCACUUAAGCAAA | 20 | 5169 |
| BCL11A-4539 | + | AACGUCAGGAGUCUGGA | 17 | 5170 |
| BCL11A-4540 | + | AAGAAAGGGGUGGCAGGGGU | 20 | 5171 |
| BCL11A-4541 | + | AAGAGACCAGGACAAGCCAA | 20 | 5172 |
| BCL11A-4542 | + | AAGCCAAUGGCCAGUGC | 17 | 5173 |
| BCL11A-4543 | − | AAGCGAGGGGGAGAGAG | 17 | 5174 |
| BCL11A-4544 | + | AAGUGCAUACACGGCAA | 17 | 5175 |
| BCL11A-4545 | + | AAUAAUACAAAGAUGGCGCA | 20 | 5176 |
| BCL11A-4546 | + | AAUACAAAGAUGGCGCA | 17 | 5177 |
| BCL11A-4547 | + | AAUGGACACACAUCAGGGGC | 20 | 5178 |
| BCL11A-4548 | + | AAUGGCCAGUGCGGGGA | 17 | 5179 |
| BCL11A-4549 | + | AAUGGUUCCAGAUGGGAUGA | 20 | 5180 |
| BCL11A-4550 | + | AAUUAAAUAAAAUUAAA | 17 | 5181 |
| BCL11A-4551 | + | AAUUAGAAAUAAUACAAAGA | 20 | 5182 |
| BCL11A-4552 | − | AAUUUAUUUUGGAUGUCAAA | 20 | 5183 |
| BCL11A-4553 | + | ACAAGCCAAUGGCCAGUGCG | 20 | 5184 |
| BCL11A-4554 | + | ACACACAAAACAUGGGC | 17 | 5185 |
| BCL11A-4555 | + | ACACCAAUGGACACACAUCA | 20 | 5186 |
| BCL11A-4556 | + | ACAUGGGCAGGGCGAGC | 17 | 5187 |
| BCL11A-4557 | + | ACCAAUGGACACACAUC | 17 | 5188 |
| BCL11A-4558 | − | ACCCCAGCACUUAAGCAAAC | 20 | 5189 |
| BCL11A-4559 | − | ACCCCUUUCUUCUCUCC | 17 | 5190 |
| BCL11A-4560 | + | ACGCCAGACGCGGCCCC | 17 | 5191 |
| BCL11A-4561 | + | ACGCCAGACGCGGCCCCCGG | 20 | 5192 |
| BCL11A-4562 | + | ACGCGGCCCCCGGGGGA | 17 | 5193 |
| BCL11A-4563 | + | ACGGCAAUGGUUCCAGA | 17 | 5194 |
| BCL11A-4564 | − | ACUAGAAGCAAAAGCGA | 17 | 5195 |
| BCL11A-4565 | − | ACUGAUGAAGAUAUUUUCUC | 20 | 5196 |
| BCL11A-4566 | − | ACUUGAACUUGCAGCUC | 17 | 5197 |
| BCL11A-4567 | − | ACUUGAACUUGCAGCUCAGG | 20 | 5198 |
| BCL11A-4568 | − | AGAAAAACCUCCGAGAGUCG | 20 | 5199 |
| BCL11A-4569 | + | AGAAGAAAGGGGUGGCA | 17 | 5200 |
| BCL11A-4570 | + | AGAAGGGGAGGAGGGAA | 17 | 5201 |
| BCL11A-4571 | + | AGACACACAAAACAUGGGCA | 20 | 5202 |
| BCL11A-4572 | + | AGACAUGGUGGGCUGCG | 17 | 5203 |
| BCL11A-4573 | + | AGACAUGGUGGGCUGCGGGG | 20 | 5204 |
| BCL11A-4574 | + | AGACCAGGACAAGCCAA | 17 | 5205 |
| BCL11A-4575 | + | AGACGCGGCCCCCGGGGGAG | 20 | 5206 |
| BCL11A-4576 | + | AGAGAAGAAAGGGGUGGCAG | 20 | 5207 |
| BCL11A-4577 | + | AGAGAAGGGGAGGAGGGAAG | 20 | 5208 |
| BCL11A-4578 | + | AGAGACACACAAAACAU | 17 | 5209 |
| BCL11A-4579 | + | AGAGAGAAGAGAGAUAG | 17 | 5210 |
| BCL11A-4580 | + | AGAGAGAGAAGAGAGAUAGA | 20 | 5211 |
| BCL11A-4581 | + | AGAGAGAGAGAUGAAAAAAA | 20 | 5212 |
| BCL11A-4582 | − | AGAGUCCGCGUGUGUGG | 17 | 5213 |
| BCL11A-4583 | − | AGCAAAAGCGAGGGGGAGAG | 20 | 5214 |
| BCL11A-4584 | + | AGCAGGAGAGAAGGGGAGGA | 20 | 5215 |
| BCL11A-4585 | + | AGCCAAUGGCCAGUGCG | 17 | 5216 |
| BCL11A-4586 | + | AGCCAAUGGCCAGUGCGGGG | 20 | 5217 |
| BCL11A-4587 | − | AGCCCCUGAUGUGUGUCCAU | 20 | 5218 |
| BCL11A-4588 | + | AGCGAGCGCCGCGGCGG | 17 | 5219 |
| BCL11A-4589 | + | AGCUGCAAGUUCAAGUG | 17 | 5220 |
| BCL11A-4590 | − | AGGACUAGAAGCAAAAGCGA | 20 | 5221 |
| BCL11A-4591 | + | AGGAGAGAAGGGGAGGA | 17 | 5222 |
| BCL11A-4592 | + | AGGGCGAGCAGGAGAGA | 17 | 5223 |
| BCL11A-4593 | + | AGGGGCGGGCCGAGGGG | 17 | 5224 |
| BCL11A-4594 | + | AGGGGCGGGCCGAGGGGAGG | 20 | 5225 |
| BCL11A-4595 | + | AGGGGGAGGUGCGGGGC | 17 | 5226 |
| BCL11A-4596 | + | AGGGGGAGGUGCGGGGCGGG | 20 | 5227 |
| BCL11A-4597 | + | AGGGGGCGCUGGGGCCG | 17 | 5228 |
| BCL11A-4598 | + | AGGGGUGGGAGGAAAGGGUG | 20 | 5229 |
| BCL11A-4599 | − | AGGUAAAAGAGAUAAAG | 17 | 5230 |
| BCL11A-4600 | − | AGUCCGCGUGUGUGGGG | 17 | 5231 |
| BCL11A-4601 | − | AGUCGAGGUAAAAGAGAUAA | 20 | 5232 |
| BCL11A-4602 | + | AGUGCGGGGAGGGGGAGGUG | 20 | 5233 |
| BCL11A-4603 | + | AGUGGCCGCAGCGAGCGCCG | 20 | 5234 |
| BCL11A-4604 | + | AUAAUUAUUAUUACUAUUAU | 20 | 5235 |
| BCL11A-4605 | + | AUCUCUUUUACCUCGACUCU | 20 | 5236 |
| BCL11A-4606 | + | AUGGCCAGUGCGGGGAG | 17 | 5237 |
| BCL11A-4607 | + | AUGGUGGGCUGCGGGGC | 17 | 5238 |
| BCL11A-4608 | + | AUGGUGGGCUGCGGGGCGGG | 20 | 5239 |
| BCL11A-4609 | + | AUUAUUAUUACUAUUAU | 17 | 5240 |
| BCL11A-4610 | − | AUUUUAGAGUCCGCGUGUGU | 20 | 5241 |
| BCL11A-4611 | − | CAAAAGCGAGGGGGAGAGAG | 20 | 5242 |
| BCL11A-4612 | + | CAAAAGUGCAUACACGGCAA | 20 | 5243 |
| BCL11A-4613 | + | CAAGCCAAUGGCCAGUG | 17 | 5244 |
| BCL11A-4614 | + | CAAUGGACACACAUCAG | 17 | 5245 |
| BCL11A-4615 | + | CAAUGGCCAGUGCGGGG | 17 | 5246 |
| BCL11A-4616 | + | CAAUGGCCAGUGCGGGGAGG | 20 | 5247 |
| BCL11A-4617 | + | CAAUGGUUCCAGAUGGGAUG | 20 | 5248 |
| BCL11A-4618 | + | CACACAAAACAUGGGCA | 17 | 5249 |
| BCL11A-4619 | + | CACACCAAUGGACACACAUC | 20 | 5250 |
| BCL11A-4620 | + | CACCAAUGGACACACAUCAG | 20 | 5251 |
| BCL11A-4621 | − | CACCGCCGCGGCGCUCGCUG | 20 | 5252 |
| BCL11A-4622 | − | CACUGGCCAUUGGCUUGUCC | 20 | 5253 |
| BCL11A-4623 | − | CACUUGAACUUGCAGCUCAG | 20 | 5254 |
| BCL11A-4624 | + | CAGACGCGGCCCCCGGGGGA | 20 | 5255 |
| BCL11A-4625 | + | CAGAGACACACAAAACA | 17 | 5256 |
| BCL11A-4626 | − | CAGGACUAGAAGCAAAAGCG | 20 | 5257 |
| BCL11A-4627 | + | CAGGAGAGAAGGGGAGG | 17 | 5258 |
| BCL11A-4628 | + | CAGGGAAGAUGAAUUGU | 17 | 5259 |
| BCL11A-4629 | + | CAGGGCGAGCAGGAGAGAAG | 20 | 5260 |
| BCL11A-4630 | + | CAGGGGUGGGAGGAAAGGGU | 20 | 5261 |
| BCL11A-4631 | + | CAUGGUGGGCUGCGGGG | 17 | 5262 |
| BCL11A-4632 | + | CCAAUGGACACACAUCA | 17 | 5263 |
| BCL11A-4633 | + | CCAAUGGCCAGUGCGGGGAG | 20 | 5264 |
| BCL11A-4634 | + | CCAGACGCGGCCCCCGG | 17 | 5265 |
| BCL11A-4635 | + | CCAGACGCGGCCCCCGGGGG | 20 | 5266 |
| BCL11A-4636 | − | CCAGCACUUAAGCAAAC | 17 | 5267 |
| BCL11A-4637 | − | CCAGCGCCCCCUCCCCU | 17 | 5268 |
| BCL11A-4638 | + | CCAGUGCGGGGAGGGGG | 17 | 5269 |
| BCL11A-4639 | − | CCCAGCACUUAAGCAAA | 17 | 5270 |
| BCL11A-4640 | − | CCCCCGGGGGCCGCGUC | 17 | 5271 |
| BCL11A-4641 | − | CCCCUCCCCGCACUGGCCAU | 20 | 5272 |
| BCL11A-4642 | + | CCCGGGGGAGGGGCGGGCCG | 20 | 5273 |
| BCL11A-4643 | + | CCCGUUUGCUUAAGUGC | 17 | 5274 |
| BCL11A-4644 | − | CCCUCGGCCCGCCCCUCCCC | 20 | 5275 |
| BCL11A-4645 | − | CCCUGAUGUGUGUCCAU | 17 | 5276 |
| BCL11A-4646 | + | CCGAGGGGAGGGGGCGC | 17 | 5277 |
| BCL11A-4647 | − | CCGCGUGUGUGGGGGGGAGC | 20 | 5278 |
| BCL11A-4648 | + | CCGGGGGAGGGGCGGGCCGA | 20 | 5279 |
| BCL11A-4649 | + | CCGUUUGCUUAAGUGCU | 17 | 5280 |
| BCL11A-4650 | − | CCUCCCCCGGGGGCCGCGUC | 20 | 5281 |
| BCL11A-4651 | − | CCUCCCCCUCCCCGCAC | 17 | 5282 |
| BCL11A-4652 | − | CCUCGGCCCGCCCCUCCCCC | 20 | 5283 |
| BCL11A-4653 | + | CCUGCUCCCCCCCACACACG | 20 | 5284 |
| BCL11A-4654 | + | CGAGACAUGGUGGGCUG | 17 | 5285 |
| BCL11A-4655 | + | CGAGCGCCGCGGCGGUGGCG | 20 | 5286 |
| BCL11A-4656 | + | CGAGGGGAGGGGGCGCU | 17 | 5287 |
| BCL11A-4657 | − | CGAGGUAAAAGAGAUAA | 17 | 5288 |
| BCL11A-4658 | − | CGAGGUAAAAGAGAUAAAGG | 20 | 5289 |
| BCL11A-4659 | − | CGCACUUGAACUUGCAGCUC | 20 | 5290 |
| BCL11A-4660 | + | CGCAGCGAGCGCCGCGG | 17 | 5291 |
| BCL11A-4661 | + | CGCAGCGAGCGCCGCGGCGG | 20 | 5292 |
| BCL11A-4662 | + | CGCCAGACGCGGCCCCC | 17 | 5293 |
| BCL11A-4663 | − | CGCCGCGGCGCUCGCUG | 17 | 5294 |
| BCL11A-4664 | + | CGCCGCGGCGGUGGCGUGGC | 20 | 5295 |
| BCL11A-4665 | + | CGCGGCCCCCGGGGGAG | 17 | 5296 |
| BCL11A-4666 | + | CGCGGCCCCCGGGGGAGGGG | 20 | 5297 |
| BCL11A-4667 | + | CGCGGCGGUGGCGUGGC | 17 | 5298 |
| BCL11A-4668 | − | CGCGUGUGUGGGGGGGAGCA | 20 | 5299 |
| BCL11A-4669 | + | CGGCAAUGGUUCCAGAU | 17 | 5300 |
| BCL11A-4670 | − | CGGCCACGCCACCGCCG | 17 | 5301 |
| BCL11A-4671 | − | CGGCCCGCCCCUCCCCC | 17 | 5302 |
| BCL11A-4672 | + | CGGCGAGACAUGGUGGGCUG | 20 | 5303 |
| BCL11A-4673 | + | CGGCGGCGGCGGGCGGACGA | 20 | 5304 |
| BCL11A-4674 | + | CGGCGGCGGGCGGACGA | 17 | 5305 |
| BCL11A-4675 | + | CGGGGAGGGGGAGGUGC | 17 | 5306 |
| BCL11A-4676 | + | CGGGGCGGGGGGCUCCG | 17 | 5307 |
| BCL11A-4677 | + | CGGGGGAGGGGCGGGCCGAG | 20 | 5308 |
| BCL11A-4678 | + | CGUGGCCGGGAGAGAAGAAA | 20 | 5309 |
| BCL11A-4679 | − | CGUGUGUGGGGGGGAGC | 17 | 5310 |
| BCL11A-4680 | + | CGUUUGCUUAAGUGCUG | 17 | 5311 |
| BCL11A-4681 | − | CUAGAAGCAAAAGCGAG | 17 | 5312 |
| BCL11A-4682 | − | CUCCCCGCACUGGCCAU | 17 | 5313 |
| BCL11A-4683 | − | CUCGGCCCGCCCCUCCCCCG | 20 | 5314 |
| BCL11A-4684 | + | CUGAGCUGCAAGUUCAAGUG | 20 | 5315 |
| BCL11A-4685 | + | CUGCGAACUUGAACGUC | 17 | 5316 |
| BCL11A-4686 | + | CUGGACAUGAAAAAGAGACC | 20 | 5317 |
| BCL11A-4687 | + | CUGUCUCAAAAGUGCAUACA | 20 | 5318 |
| BCL11A-4688 | + | CUUGAACGUCAGGAGUC | 17 | 5319 |
| BCL11A-4689 | − | CUUGAACUUGCAGCUCA | 17 | 5320 |
| BCL11A-4690 | − | CUUGAACUUGCAGCUCAGGG | 20 | 5321 |
| BCL11A-4691 | + | CUUGCGGCGAGACAUGG | 17 | 5322 |
| BCL11A-4692 | + | GUUCACAUCGGGAGAGC | 17 | 5323 |
| BCL11A-4693 | + | UAAUACAAAGAUGGCGC | 17 | 5324 |
| BCL11A-4694 | + | UAAUUAUUAUUACUAUUAUU | 20 | 5325 |
| BCL11A-4695 | + | UACACGGCAAUGGUUCCAGA | 20 | 5326 |
| BCL11A-4696 | + | UAGAAAUAAUACAAAGA | 17 | 5327 |
| BCL11A-4697 | − | UAGAAGCAAAAGCGAGG | 17 | 5328 |
| BCL11A-4698 | − | UAGAGUCCGCGUGUGUG | 17 | 5329 |
| BCL11A-4699 | − | UAGAGUCCGCGUGUGUGGGG | 20 | 5330 |
| BCL11A-4700 | − | UCCCGGCCACGCCACCGCCG | 20 | 5331 |
| BCL11A-4701 | + | UCCCGUUUGCUUAAGUGCUG | 20 | 5332 |
| BCL11A-4702 | + | UCCCUGCGAACUUGAACGUC | 20 | 5333 |
| BCL11A-4703 | − | UCGAGGUAAAAGAGAUAAAG | 20 | 5334 |
| BCL11A-4704 | − | UCGGCCCGCCCCUCCCC | 17 | 5335 |
| BCL11A-4705 | − | UCGGCCCGCCCCUCCCCCGG | 20 | 5336 |
| BCL11A-4706 | + | UCUCAAAAGUGCAUACA | 17 | 5337 |
| BCL11A-4707 | − | UCUCCUUCUUUCUAACC | 17 | 5338 |
| BCL11A-4708 | + | UCUUUUACCUCGACUCU | 17 | 5339 |
| BCL11A-4709 | − | UGAACUUGCAGCUCAGG | 17 | 5340 |
| BCL11A-4710 | − | UGCGGCCACUGGUGAGCCCG | 20 | 5341 |
| BCL11A-4711 | + | UGCGGGGAGGGGGAGGUGCG | 20 | 5342 |
| BCL11A-4712 | + | UGCGGGGCGGGCGGCGG | 17 | 5343 |
| BCL11A-4713 | + | UGCGGGGCGGGCGGCGGCGG | 20 | 5344 |
| BCL11A-4714 | − | UGCUUAAAAAAAAGCCAUGA | 20 | 5345 |
| BCL11A-4715 | + | UGGCCAGUGCGGGGAGG | 17 | 5346 |
| BCL11A-4716 | + | UGGCCAGUGCGGGGAGGGGG | 20 | 5347 |
| BCL11A-4717 | − | UGGCCAUUGGCUUGUCC | 17 | 5348 |
| BCL11A-4718 | + | UGGCCGGGAGAGAAGAA | 17 | 5349 |
| BCL11A-4719 | + | UGGGAGGAAAGGGUGGG | 17 | 5350 |
| BCL11A-4720 | + | UGGGGCCGCGGGCUCACCAG | 20 | 5351 |
| BCL11A-4721 | + | UGGUUCCAGAUGGGAUG | 17 | 5352 |
| BCL11A-4722 | − | UUAAAAAAAAGCCAUGA | 17 | 5353 |
| BCL11A-4723 | − | UUAGAGUCCGCGUGUGUGGG | 20 | 5354 |
| BCL11A-4724 | + | UUAUUAUUACUAUUAUU | 17 | 5355 |
| BCL11A-4725 | − | UUAUUUCUAAUUUAUUU | 17 | 5356 |
| BCL11A-4726 | − | UUAUUUUGGAUGUCAAA | 17 | 5357 |
| BCL11A-4727 | + | UUCACAUCGGGAGAGCC | 17 | 5358 |
| BCL11A-4728 | + | UUCCCGUUUGCUUAAGUGCU | 20 | 5359 |
| BCL11A-4729 | + | UUGAACGUCAGGAGUCUGGA | 20 | 5360 |
| BCL11A-4730 | − | UUGAACUUGCAGCUCAG | 17 | 5361 |
| BCL11A-4731 | + | UUGCUUGCGGCGAGACAUGG | 20 | 5362 |
| BCL11A-4732 | + | UUGUGGGAGAGCCGUCA | 17 | 5363 |
| BCL11A-4733 | − | UUUUAGAGUCCGCGUGUGUG | 20 | 5364 |

[1068] Table 11A provides exemplary targeting domains for knocking down expression of the BCL11A gene according to first tier parameters. The targeting domains bind between 500 bp upstream and 500 bp downstream of transcription start site, good orthogonality, starts with G. It is contemplated herein that the targeting domain hybridizes to the target domain through complementary base pairing. Any of the targeting domains in the table can be used with a S. aureus eiCas9 molecule to cause a steric block at the target region, e.g., between 500 bp upstream and 500 bp downstream of transcription start site to block transcription resulting in the repression of the BCL11A gene. Alternatively, any of the targeting domains in the table can be used with a S. aureus eiCas9 fused to a transcriptional repressor to decrease transcription and therefore downregulate gene expression.

TABLE 11A
1st Tier

| | | | Target | SEQ |
|---|---|---|---|---|
| | DNA | | Site | ID |
| gRNA Name | Strand | Targeting Domain | Length | NO |
| BCL11A-4734 | + | GACGACGGCUCGGUUCACAU | 20 | 6365 |
| BCL11A-4735 | + | GACGGCUCGGUUCACAU | 17 | 6366 |
| BCL11A-4736 | + | GACGGCUCGGUUCACAUCGG | 20 | 6367 |
| BCL11A-4737 | + | GACGUGACGUCCCUGCGAAC | 20 | 6368 |
| BCL11A-4738 | + | GCGGACGUGACGUCCCU | 17 | 6369 |
| BCL11A-4739 | + | GGACGACGGCUCGGUUCACA | 20 | 6370 |
| BCL11A-4740 | − | GGACGUCACGUCCGCAC | 17 | 6371 |
| BCL11A-4741 | + | GGCUCGGUUCACAUCGG | 17 | 6372 |
| BCL11A-4742 | − | GGCUCUCCCGAUGUGAA | 17 | 6373 |
| BCL11A-4743 | + | GGUUCACAUCGGGAGAG | 17 | 6374 |
| BCL11A-4744 | + | GUCCCUGCGAACUUGAACGU | 20 | 6375 |
| BCL11A-4745 | + | GUGACGUCCCUGCGAAC | 17 | 6376 |

[1069] Table 11B provides exemplary targeting domains for knocking down expression of the BCL11A gene according to second tier parameters. The targeting domains bind between 500 bp upstream and 500 bp downstream of transcription start site, good orthogonality and do not start with G. It is contemplated herein that the targeting domain hybridizes to the target domain through complementary base pairing. Any of the targeting domains in the table can be used with a S. aureus eiCas9 molecule to cause a steric block at the target region, e.g., between 500 bp upstream and 500 bp downstream of transcription start site to block transcription resulting in the repression of the BCL11A gene. Alternatively, any of the targeting domains in the table can be used with a S. aureus eiCas9 fused to a transcriptional repressor to decrease transcription and therefore downregulate gene expression.

TABLE 11B
2nd Tier

| | | | Target | SEQ |
|---|---|---|---|---|
| | DNA | | Site | ID |
| gRNA Name | Strand | Targeting Domain | Length | NO |
| BCL11A-4746 | + | ACGACGGCUCGGUUCACAUC | 20 | 6377 |
| BCL11A-4747 | − | ACGAGAGCGCGCAGGAC | 17 | 6378 |
| BCL11A-4748 | + | ACGGCUCGGUUCACAUC | 17 | 6379 |
| BCL11A-4749 | + | AGUGCGGACGUGACGUCCCU | 20 | 6380 |
| BCL11A-4750 | − | AUCACGAGAGCGCGCAGGAC | 20 | 6381 |
| BCL11A-4751 | − | CAGGGACGUCACGUCCGCAC | 20 | 6382 |
| BCL11A-4752 | + | CAUCGGGAGAGCCGGGU | 17 | 6383 |
| BCL11A-4753 | − | CCCGGCUCUCCCGAUGUGAA | 20 | 6384 |
| BCL11A-4754 | + | CCUGCGAACUUGAACGU | 17 | 6385 |
| BCL11A-4755 | + | CGACGGCUCGGUUCACA | 17 | 6386 |
| BCL11A-4756 | + | CUCGGUUCACAUCGGGAGAG | 20 | 6387 |
| BCL11A-4757 | + | CUGCGAACUUGAACGUC | 17 | 6388 |
| BCL11A-4758 | + | UCACAUCGGGAGAGCCGGGU | 20 | 6389 |
| BCL11A-4759 | + | UCCCUGCGAACUUGAACGUC | 20 | 6390 |

[1070] Table 11C provides exemplary targeting domains for knocking down expression of the BCL11A gene according to third tier parameters. The targeting domains bind between 500 bp upstream and 500 bp downstream of transcription start site and start with G. It is contemplated herein that the targeting domain hybridizes to the target domain through complementary base pairing. Any of the targeting domains in the table can be used with a S. aureus eiCas9 molecule to cause a steric block at the target region, e.g., between 500 bp upstream and 500 bp downstream of transcription start site to block transcription resulting in the repression of the BCL11A gene. Alternatively, any of the targeting domains in the table can be used with a S. aureus eiCas9 fused to a transcriptional repressor to decrease transcription and therefore downregulate gene expression.

TABLE 11C
3rd Tier

| | | | Target | SEQ |
|---|---|---|---|---|
| | DNA | | Site | ID |
| gRNA Name | Strand | Targeting Domain | Length | NO |
| BCL11A-4760 | − | GAAAAAACCCUCAUCCCAUC | 20 | 6391 |
| BCL11A-4761 | + | GAAAGAAGGAGACUCCA | 17 | 6392 |
| BCL11A-4762 | + | GAAAGGGGUGGCAGGGG | 17 | 6393 |
| BCL11A-4763 | + | GAAAGGGGUGGCAGGGGUGG | 20 | 6394 |
| BCL11A-4764 | + | GAAAUAAUACAAAGAUGGCG | 20 | 6395 |
| BCL11A-4765 | + | GAACGUCAGGAGUCUGG | 17 | 6396 |
| BCL11A-4766 | + | GAAGAAAGGGGUGGCAGGGG | 20 | 6397 |
| BCL11A-4767 | + | GAAGAGAGAUAGAGGGA | 17 | 6398 |
| BCL11A-4768 | − | GAAGCAAAAGCGAGGGG | 17 | 6399 |
| BCL11A-4769 | + | GAAGGGGAGGAGGGAAG | 17 | 6400 |
| BCL11A-4770 | + | GACAAGCCAAUGGCCAGUGC | 20 | 6401 |
| BCL11A-4771 | + | GACACACAAAACAUGGG | 17 | 6402 |
| BCL11A-4772 | + | GACGCCAGACGCGGCCC | 17 | 6403 |
| BCL11A-4773 | + | GACGCCAGACGCGGCCCCCG | 20 | 6404 |
| BCL11A-4774 | + | GACGCGGCCCCCGGGGG | 17 | 6405 |
| BCL11A-4775 | − | GACUAGAAGCAAAAGCG | 17 | 6406 |
| BCL11A-4776 | − | GACUAGAAGCAAAAGCGAGG | 20 | 6407 |
| BCL11A-4777 | + | GACUCUCGGAGGUUUUUCUC | 20 | 6408 |
| BCL11A-4778 | + | GAGAAGAAAGGGGUGGC | 17 | 6409 |
| BCL11A-4779 | + | GAGAAGAGAGAUAGAGG | 17 | 6410 |
| BCL11A-4780 | + | GAGAAGGGGAGGAGGGA | 17 | 6411 |
| BCL11A-4781 | + | GAGACAUGGUGGGCUGCGGG | 20 | 6412 |
| BCL11A-4782 | + | GAGAGAAGAGAGAUAGA | 17 | 6413 |
| BCL11A-4783 | + | GAGAGAAGGGGAGGAGGGAA | 20 | 6414 |
| BCL11A-4784 | + | GAGAGAGAAGAGAGAUA | 17 | 6415 |
| BCL11A-4785 | + | GAGAGAGAGAAGAGAGA | 17 | 6416 |
| BCL11A-4786 | + | GAGAGAGAGAAGAGAGAUAG | 20 | 6417 |
| BCL11A-4787 | + | GAGAGAGAGAGAGAGAG | 17 | 6418 |
| BCL11A-4788 | + | GAGAGAUAGAGGGAGAGAGA | 20 | 6419 |
| BCL11A-4789 | + | GAGAUAGAGGGAGAGAGAGA | 20 | 6420 |
| BCL11A-4790 | + | GAGCAGGAGAGAAGGGG | 17 | 6421 |
| BCL11A-4791 | + | GAGCAGGAGAGAAGGGGAGG | 20 | 6422 |
| BCL11A-4792 | + | GAGCCGGGUUAGAAAGA | 17 | 6423 |
| BCL11A-4793 | + | GAGCUGCAAGUUCAAGU | 17 | 6424 |
| BCL11A-4794 | + | GAGGGAGAGAGAGAGAA | 17 | 6425 |
| BCL11A-4795 | + | GAGGGGCGGGCCGAGGG | 17 | 6426 |
| BCL11A-4796 | + | GAGGGGGAGGUGCGGGG | 17 | 6427 |
| BCL11A-4797 | + | GAGGGGGCGCUGGGGCC | 17 | 6428 |
| BCL11A-4798 | − | GAGGUAAAAGAGAUAAA | 17 | 6429 |
| BCL11A-4799 | − | GAGUCCGCGUGUGUGGG | 17 | 6430 |
| BCL11A-4800 | − | GAGUCGAGGUAAAAGAGAUA | 20 | 6431 |
| BCL11A-4801 | + | GAUAGAGGGAGAGAGAGAGA | 20 | 6432 |
| BCL11A-4802 | − | GAUGAAGAUAUUUUCUC | 17 | 6433 |
| BCL11A-4803 | − | GAUGUCAAAAGGCACUG | 17 | 6434 |
| BCL11A-4804 | − | GAUGUGUGUCCAUUGGU | 17 | 6435 |
| BCL11A-4805 | + | GCAAUGGUUCCAGAUGGGAU | 20 | 6436 |
| BCL11A-4806 | − | GCACUUGAACUUGCAGCUCA | 20 | 6437 |
| BCL11A-4807 | − | GCAGGACUAGAAGCAAAAGC | 20 | 6438 |
| BCL11A-4808 | + | GCAGGAGAGAAGGGGAG | 17 | 6439 |
| BCL11A-4809 | + | GCAGGGAAGAUGAAUUG | 17 | 6440 |
| BCL11A-4810 | + | GCAGGGAAGAUGAAUUGUGG | 20 | 6441 |
| BCL11A-4811 | + | GCAGGGCGAGCAGGAGAGAA | 20 | 6442 |
| BCL11A-4812 | + | GCAGGGGUGGGAGGAAAGGG | 20 | 6443 |
| BCL11A-4813 | − | GCAUUUUUAAAUUUUUC | 17 | 6444 |
| BCL11A-4814 | + | GCCAAUGGCCAGUGCGGGGA | 20 | 6445 |
| BCL11A-4815 | + | GCCAGACGCGGCCCCCG | 17 | 6446 |
| BCL11A-4816 | + | GCCAGACGCGGCCCCCGGGG | 20 | 6447 |
| BCL11A-4817 | + | GCCCCCGGGGGAGGGGCGGG | 20 | 6448 |
| BCL11A-4818 | + | GCCGAGGGGAGGGGGCG | 17 | 6449 |
| BCL11A-4819 | + | GCCGCGGCGGUGGCGUGGCC | 20 | 6450 |
| BCL11A-4820 | − | GCCGCGUCUGGCGUCCG | 17 | 6451 |
| BCL11A-4821 | + | GCGAGACAUGGUGGGCU | 17 | 6452 |
| BCL11A-4822 | − | GCGCAGGACUAGAAGCAAAA | 20 | 6453 |
| BCL11A-4823 | + | GCGCAGGGAAGAUGAAUUGU | 20 | 6454 |
| BCL11A-4824 | + | GCGCCGCGGCGGUGGCGUGG | 20 | 6455 |
| BCL11A-4825 | + | GCGGACGCCAGACGCGGCCC | 20 | 6456 |
| BCL11A-4826 | + | GCGGCGAGACAUGGUGGGCU | 20 | 6457 |
| BCL11A-4827 | + | GCGGCGGUGGCGUGGCC | 17 | 6458 |
| BCL11A-4828 | + | GCGGGGAGGGGGAGGUG | 17 | 6459 |
| BCL11A-4829 | + | GCGGGGCGGGGGGCUCC | 17 | 6460 |
| BCL11A-4830 | + | GCGUGGCCGGGAGAGAAGAA | 20 | 6461 |
| BCL11A-4831 | − | GCGUGUGUGGGGGGGAG | 17 | 6462 |
| BCL11A-4832 | + | GCUCACCAGUGGCCGCA | 17 | 6463 |
| BCL11A-4833 | − | GCUCGCUGCGGCCACUG | 17 | 6464 |
| BCL11A-4834 | + | GCUGGACAUGAAAAAGAGAC | 20 | 6465 |
| BCL11A-4835 | + | GCUUGCGGCGAGACAUG | 17 | 6466 |
| BCL11A-4836 | − | GGAAAAAACCCUCAUCCCAU | 20 | 6467 |
| BCL11A-4837 | + | GGAAGGGGAAGCUCACACCA | 20 | 6468 |
| BCL11A-4838 | + | GGACAAGCCAAUGGCCAGUG | 20 | 6469 |
| BCL11A-4839 | + | GGACAUGAAAAAGAGAC | 17 | 6470 |
| BCL11A-4840 | + | GGACGCCAGACGCGGCCCCC | 20 | 6471 |
| BCL11A-4841 | − | GGACUAGAAGCAAAAGC | 17 | 6472 |
| BCL11A-4842 | − | GGACUAGAAGCAAAAGCGAG | 20 | 6473 |
| BCL11A-4843 | + | GGAGAGAAGAAAGGGGUGGC | 20 | 6474 |
| BCL11A-4844 | + | GGAGAGAAGGGGAGGAGGGA | 20 | 6475 |
| BCL11A-4845 | + | GGAGAGAGAGAGAAGAGAGA | 20 | 6476 |
| BCL11A-4846 | + | GGAGAGCCGGGUUAGAAAGA | 20 | 6477 |
| BCL11A-4847 | + | GGAGGGGCGGGCCGAGGGGA | 20 | 6478 |
| BCL11A-4848 | + | GGAGGGGGAGGUGCGGG | 17 | 6479 |
| BCL11A-4849 | + | GGAGGGGGAGGUGCGGGGCG | 20 | 6480 |
| BCL11A-4850 | + | GGCAGGGCGAGCAGGAGAGA | 20 | 6481 |
| BCL11A-4851 | + | GGCAGGGGUGGGAGGAAAGG | 20 | 6482 |
| BCL11A-4852 | − | GGCCGCGUCUGGCGUCC | 17 | 6483 |
| BCL11A-4853 | + | GGCGAGCAGGAGAGAAG | 17 | 6484 |
| BCL11A-4854 | + | GGCGAGCAGGAGAGAAGGGG | 20 | 6485 |
| BCL11A-4855 | + | GGCGCAGGGAAGAUGAAUUG | 20 | 6486 |
| BCL11A-4856 | − | GGCGCUCGCUGCGGCCACUG | 20 | 6487 |
| BCL11A-4857 | + | GGCGGCGGCGGCGGCGG | 17 | 6488 |
| BCL11A-4858 | + | GGCGGCGGCGGCGGCGGCGG | 20 | 6489 |
| BCL11A-4859 | + | GGCGGUGGCGUGGCCGG | 17 | 6490 |
| BCL11A-4860 | + | GGCGUGGCCGGGAGAGAAGA | 20 | 6491 |
| BCL11A-4861 | + | GGGAAGAUGAAUUGUGG | 17 | 6492 |
| BCL11A-4862 | + | GGGAGAGAAGAAAGGGGUGG | 20 | 6493 |
| BCL11A-4863 | + | GGGAGAGCCGGGUUAGA | 17 | 6494 |
| BCL11A-4864 | + | GGGAGAGCCGGGUUAGAAAG | 20 | 6495 |
| BCL11A-4865 | + | GGGAGGAAAGGGUGGGG | 17 | 6496 |
| BCL11A-4866 | + | GGGAGGGGCGGGCCGAG | 17 | 6497 |
| BCL11A-4867 | + | GGGAGGGGCGGGCCGAGGGG | 20 | 6498 |
| BCL11A-4868 | + | GGGAGGGGGAGGUGCGGGGC | 20 | 6499 |
| BCL11A-4869 | + | GGGCAGGGCGAGCAGGA | 17 | 6500 |
| BCL11A-4870 | + | GGGCAGGGCGAGCAGGAGAG | 20 | 6501 |
| BCL11A-4871 | + | GGGCCGAGGGGAGGGGGCGC | 20 | 6502 |
| BCL11A-4872 | + | GGGCGAGCAGGAGAGAA | 17 | 6503 |
| BCL11A-4873 | + | GGGCGAGCAGGAGAGAAGGG | 20 | 6504 |
| BCL11A-4874 | + | GGGGAGGGGCGGGCCGA | 17 | 6505 |
| BCL11A-4875 | + | GGGGAGGGGCGGGCCGAGGG | 20 | 6506 |
| BCL11A-4876 | + | GGGGAGGGGGAGGUGCGGGG | 20 | 6507 |
| BCL11A-4877 | + | GGGGAGGGGGCGCUGGGGCC | 20 | 6508 |
| BCL11A-4878 | − | GGGGCCGCGUCUGGCGUCCG | 20 | 6509 |
| BCL11A-4879 | + | GGGGCGGGCCGAGGGGA | 17 | 6510 |
| BCL11A-4880 | + | GGGGGAGGGGCGGGCCG | 17 | 6511 |
| BCL11A-4881 | + | GGGGGAGGUGCGGGGCG | 17 | 6512 |
| BCL11A-4882 | − | GGGGGCCGCGUCUGGCGUCC | 20 | 6513 |
| BCL11A-4883 | + | GGGGUGGCAGGGGUGGG | 17 | 6514 |
| BCL11A-4884 | + | GGGGUGGGAGGAAAGGG | 17 | 6515 |
| BCL11A-4885 | + | GGGGUGGGAGGAAAGGGUGG | 20 | 6516 |
| BCL11A-4886 | + | GGGUGGCAGGGGUGGGAGGA | 20 | 6517 |
| BCL11A-4887 | + | GGGUGGGAGGAAAGGGU | 17 | 6518 |
| BCL11A-4888 | + | GGGUGGGAGGAAAGGGUGGG | 20 | 6519 |
| BCL11A-4889 | − | GGUAAAAGAGAUAAAGG | 17 | 6520 |
| BCL11A-4890 | + | GGUGCGGGGCGGGGGGCUCC | 20 | 6521 |
| BCL11A-4891 | + | GGUGGGAGGAAAGGGUG | 17 | 6522 |
| BCL11A-4892 | + | GGUGGGAGGAAAGGGUGGGG | 20 | 6523 |
| BCL11A-4893 | + | GGUUAGAAAGAAGGAGACUC | 20 | 6524 |
| BCL11A-4894 | + | GGUUUGCCUUGCUUGCG | 17 | 6525 |
| BCL11A-4895 | − | GUCGAGGUAAAAGAGAUAAA | 20 | 6526 |
| BCL11A-4896 | + | GUGGCCGGGAGAGAAGA | 17 | 6527 |
| BCL11A-4897 | + | GUGGGAGGAAAGGGUGG | 17 | 6528 |

[1071] Table 11D provides exemplary targeting domains for knocking down expression of the BCL11A gene according to forth tier parameters. The targeting domains bind between 500 bp upstream and 500 bp downstream of transcription start site and do not start with G. It is contemplated herein that the targeting domain hybridizes to the target domain through complementary base pairing. Any of the targeting domains in the table can be used with a S. aureus eiCas9 molecule to cause a steric block at the target region, e.g., between 500 bp upstream and 500 bp downstream of transcription start site to block transcription resulting in the repression of the BCL11A gene. Alternatively, any of the targeting domains in the table can be used with a S. aureus eiCas9 fused to a transcriptional repressor to decrease transcription and therefore downregulate gene expression.

TABLE 11D
4th Tier

| | | | Target | SEQ |
|---|---|---|---|---|
| | DNA | | Site | ID |
| gRNA Name | Strand | Targeting Domain | Length | NO |
| BCL11A-4898 | + | AAAAAAAAAAAAAAAAA | 17 | 6529 |
| BCL11A-4899 | + | AAAAAAAAAAAAAAAAAAAA | 20 | 6530 |
| BCL11A-4900 | + | AAAAAAAAAAAAAAAAAAAG | 20 | 6531 |
| BCL11A-4901 | + | AAAAAAAAAAAAAAAAAAGA | 20 | 6532 |
| BCL11A-4902 | + | AAAAAAAAAAAAAAAAG | 17 | 6533 |
| BCL11A-4903 | + | AAAAAAAAAAAAAAAAGAGG | 20 | 6534 |
| BCL11A-4904 | + | AAAAAAAAAAAAAAAGA | 17 | 6535 |
| BCL11A-4905 | + | AAAAAAAAAAAAAAGAGGGA | 20 | 6536 |
| BCL11A-4906 | + | AAAAAAAAAAAAAGAGG | 17 | 6537 |
| BCL11A-4907 | + | AAAAAAAAAAAAGAGGGAGA | 20 | 6538 |
| BCL11A-4908 | + | AAAAAAAAAAAGAGGGA | 17 | 6539 |
| BCL11A-4909 | + | AAAAAAAAAAGAGGGAGAGA | 20 | 6540 |
| BCL11A-4910 | + | AAAAAAAAAGAGGGAGA | 17 | 6541 |
| BCL11A-4911 | + | AAAAAAAAGAGGGAGAGAGA | 20 | 6542 |
| BCL11A-4912 | + | AAAAAAAGAGGGAGAGA | 17 | 6543 |
| BCL11A-4913 | + | AAAAAAUGGCAAAAGCCCCC | 20 | 6544 |
| BCL11A-4914 | − | AAAAACCCUCAUCCCAU | 17 | 6545 |
| BCL11A-4915 | + | AAAAAGAGGGAGAGAGA | 17 | 6546 |
| BCL11A-4916 | + | AAAAAGAGGGAGAGAGAGAG | 20 | 6547 |
| BCL11A-4917 | + | AAAACAUGGGCAGGGCGAGC | 20 | 6548 |
| BCL11A-4918 | − | AAAACCCUCAUCCCAUC | 17 | 6549 |
| BCL11A-4919 | − | AAAAGCGAGGGGGAGAG | 17 | 6550 |
| BCL11A-4920 | − | AAACCCCAGCACUUAAGCAA | 20 | 6551 |
| BCL11A-4921 | + | AAAGAGGGAGAGAGAGAGAA | 20 | 6552 |
| BCL11A-4922 | + | AAAGGGGUGGCAGGGGU | 17 | 6553 |
| BCL11A-4923 | + | AAAGGGGUGGCAGGGGUGGG | 20 | 6554 |
| BCL11A-4924 | + | AAAUAAUACAAAGAUGGCGC | 20 | 6555 |
| BCL11A-4925 | + | AAAUGGCAAAAGCCCCC | 17 | 6556 |
| BCL11A-4926 | + | AACAUGGGCAGGGCGAG | 17 | 6557 |
| BCL11A-4927 | + | AACAUGGGCAGGGCGAGCAG | 20 | 6558 |
| BCL11A-4928 | − | AACCCCAGCACUUAAGCAAA | 20 | 6559 |
| BCL11A-4929 | − | AACCCGGCUCUCCCGAU | 17 | 6560 |
| BCL11A-4930 | + | AAGAAAGGGGUGGCAGGGGU | 20 | 6561 |
| BCL11A-4931 | + | AAGAGAGAUAGAGGGAGAGA | 20 | 6562 |
| BCL11A-4932 | + | AAGAGGGAGAGAGAGAG | 17 | 6563 |
| BCL11A-4933 | + | AAGAUGGCGCAGGGAAG | 17 | 6564 |
| BCL11A-4934 | − | AAGCAAAAGCGAGGGGGAGA | 20 | 6565 |
| BCL11A-4935 | + | AAGCCAAUGGCCAGUGC | 17 | 6566 |
| BCL11A-4936 | + | AAGCCAAUGGCCAGUGCGGG | 20 | 6567 |
| BCL11A-4937 | − | AAUAAUAAUUAUUAAUAAUC | 20 | 6568 |
| BCL11A-4938 | + | AAUAAUACAAAGAUGGCGCA | 20 | 6569 |
| BCL11A-4939 | − | AAUAAUUAUUAAUAAUC | 17 | 6570 |
| BCL11A-4940 | + | AAUAAUUAUUAUUACUAUUA | 20 | 6571 |
| BCL11A-4941 | + | AAUACAAAGAUGGCGCA | 17 | 6572 |
| BCL11A-4942 | + | AAUGGCCAGUGCGGGGA | 17 | 6573 |
| BCL11A-4943 | + | AAUUAUUAUUACUAUUA | 17 | 6574 |
| BCL11A-4944 | + | AAUUCCCGUUUGCUUAAGUG | 20 | 6575 |
| BCL11A-4945 | + | ACAAAGAUGGCGCAGGGAAG | 20 | 6576 |
| BCL11A-4946 | + | ACAAGCCAAUGGCCAGU | 17 | 6577 |
| BCL11A-4947 | + | ACAAGCCAAUGGCCAGUGCG | 20 | 6578 |
| BCL11A-4948 | + | ACACACAAAACAUGGGCAGG | 20 | 6579 |
| BCL11A-4949 | + | ACACACAUCAGGGGCUGGAC | 20 | 6580 |
| BCL11A-4950 | + | ACAGAGACACACAAAAC | 17 | 6581 |
| BCL11A-4951 | + | ACAUGGGCAGGGCGAGC | 17 | 6582 |
| BCL11A-4952 | + | ACAUGGUGGGCUGCGGG | 17 | 6583 |
| BCL11A-4953 | + | ACCAAUGGACACACAUC | 17 | 6584 |
| BCL11A-4954 | − | ACCCCAGCACUUAAGCAAAC | 20 | 6585 |
| BCL11A-4955 | − | ACCUCCGAGAGUCGAGGUAA | 20 | 6586 |
| BCL11A-4956 | − | ACGAGAAAAACCUCCGAGAG | 20 | 6587 |
| BCL11A-4957 | + | ACGCCAGACGCGGCCCC | 17 | 6588 |
| BCL11A-4958 | + | ACGCCAGACGCGGCCCCCGG | 20 | 6589 |
| BCL11A-4959 | + | ACGCGGCCCCCGGGGGAGGG | 20 | 6590 |
| BCL11A-4960 | + | ACGGCAAUGGUUCCAGA | 17 | 6591 |
| BCL11A-4961 | + | ACGUCAGGAGUCUGGAUGGA | 20 | 6592 |
| BCL11A-4962 | − | ACUAGAAGCAAAAGCGA | 17 | 6593 |
| BCL11A-4963 | + | ACUAUUAUUGGGUUACUUAC | 20 | 6594 |
| BCL11A-4964 | − | ACUCCUGACGUUCAAGUUCG | 20 | 6595 |
| BCL11A-4965 | − | ACUGAUGAAGAUAUUUUCUC | 20 | 6596 |
| BCL11A-4966 | + | ACUUGAACGUCAGGAGU | 17 | 6597 |
| BCL11A-4967 | − | ACUUGAACUUGCAGCUC | 17 | 6598 |
| BCL11A-4968 | − | AGAAAAACCUCCGAGAG | 17 | 6599 |
| BCL11A-4969 | + | AGAAAGGGGUGGCAGGG | 17 | 6600 |
| BCL11A-4970 | + | AGAAGAAAGGGGUGGCAGGG | 20 | 6601 |
| BCL11A-4971 | + | AGAAGAGAGAUAGAGGGAGA | 20 | 6602 |
| BCL11A-4972 | − | AGAAGCAAAAGCGAGGGGGA | 20 | 6603 |
| BCL11A-4973 | + | AGAAGGGGAGGAGGGAA | 17 | 6604 |
| BCL11A-4974 | + | AGACGCGGCCCCCGGGG | 17 | 6605 |
| BCL11A-4975 | + | AGAGAAGAAAGGGGUGG | 17 | 6606 |
| BCL11A-4976 | + | AGAGAAGAGAGAUAGAGGGA | 20 | 6607 |
| BCL11A-4977 | + | AGAGAAGGGGAGGAGGG | 17 | 6608 |
| BCL11A-4978 | + | AGAGAAGGGGAGGAGGGAAG | 20 | 6609 |
| BCL11A-4979 | + | AGAGACACACAAAACAUGGG | 20 | 6610 |
| BCL11A-4980 | + | AGAGAGAAGAGAGAUAG | 17 | 6611 |
| BCL11A-4981 | + | AGAGAGAAGAGAGAUAGAGG | 20 | 6612 |
| BCL11A-4982 | + | AGAGAGAGAAGAGAGAUAGA | 20 | 6613 |
| BCL11A-4983 | + | AGAGAGAGAGAAGAGAGAUA | 20 | 6614 |
| BCL11A-4984 | + | AGAGAGAUAGAGGGAGA | 17 | 6615 |
| BCL11A-4985 | + | AGAGAUAGAGGGAGAGA | 17 | 6616 |
| BCL11A-4986 | + | AGAGCCGGGUUAGAAAG | 17 | 6617 |
| BCL11A-4987 | + | AGAGGGAGAGAGAGAGA | 17 | 6618 |
| BCL11A-4988 | − | AGAGUCCGCGUGUGUGG | 17 | 6619 |
| BCL11A-4989 | + | AGAUAGAGGGAGAGAGA | 17 | 6620 |
| BCL11A-4990 | − | AGCAAAAGCGAGGGGGA | 17 | 6621 |
| BCL11A-4991 | − | AGCAAAAGCGAGGGGGAGAG | 20 | 6622 |
| BCL11A-4992 | + | AGCAGGAGAGAAGGGGAGGA | 20 | 6623 |
| BCL11A-4993 | + | AGCCAAUGGCCAGUGCG | 17 | 6624 |
| BCL11A-4994 | + | AGCCAAUGGCCAGUGCGGGG | 20 | 6625 |
| BCL11A-4995 | + | AGGACAAGCCAAUGGCCAGU | 20 | 6626 |
| BCL11A-4996 | − | AGGACUAGAAGCAAAAGCGA | 20 | 6627 |
| BCL11A-4997 | + | AGGAGAGAAGGGGAGGA | 17 | 6628 |
| BCL11A-4998 | + | AGGAGAGAAGGGGAGGAGGG | 20 | 6629 |
| BCL11A-4999 | + | AGGGAGAGAGAGAGAGAGAG | 20 | 6630 |
| BCL11A-5000 | + | AGGGCGAGCAGGAGAGA | 17 | 6631 |
| BCL11A-5001 | + | AGGGGAAGCUCACACCA | 17 | 6632 |
| BCL11A-5002 | + | AGGGGCGGGCCGAGGGG | 17 | 6633 |
| BCL11A-5003 | + | AGGGGCUGGACAUGAAA | 17 | 6634 |
| BCL11A-5004 | + | AGGGGGAGGUGCGGGGC | 17 | 6635 |
| BCL11A-5005 | + | AGGGGUGGCAGGGGUGG | 17 | 6636 |
| BCL11A-5006 | + | AGGGGUGGGAGGAAAGG | 17 | 6637 |
| BCL11A-5007 | + | AGGGGUGGGAGGAAAGGGUG | 20 | 6638 |
| BCL11A-5008 | − | AGGUAAAAGAGAUAAAG | 17 | 6639 |
| BCL11A-5009 | − | AGUCCGCGUGUGUGGGG | 17 | 6640 |
| BCL11A-5010 | − | AGUCGAGGUAAAAGAGAUAA | 20 | 6641 |
| BCL11A-5011 | + | AGUGCGGGGAGGGGGAGGUG | 20 | 6642 |
| BCL11A-5012 | + | AUAAUACAAAGAUGGCG | 17 | 6643 |
| BCL11A-5013 | − | AUAAUCACGAGAGCGCG | 17 | 6644 |
| BCL11A-5014 | + | AUACACGGCAAUGGUUCCAG | 20 | 6645 |
| BCL11A-5015 | + | AUAGAGGGAGAGAGAGA | 17 | 6646 |
| BCL11A-5016 | + | AUCAGGGGCUGGACAUGAAA | 20 | 6647 |
| BCL11A-5017 | + | AUCGGGAGAGCCGGGUUAGA | 20 | 6648 |
| BCL11A-5018 | + | AUCUCUUUUACCUCGACUCU | 20 | 6649 |
| BCL11A-5019 | + | AUGGCCAGUGCGGGGAG | 17 | 6650 |
| BCL11A-5020 | + | AUGGGCAGGGCGAGCAG | 17 | 6651 |
| BCL11A-5021 | + | AUGGUUCCAGAUGGGAU | 17 | 6652 |
| BCL11A-5022 | + | AUUAUUGGGUUACUUAC | 17 | 6653 |
| BCL11A-5023 | − | AUUAUUUCUAAUUUAUU | 17 | 6654 |
| BCL11A-5024 | + | AUUCCCGUUUGCUUAAGUGC | 20 | 6655 |
| BCL11A-5025 | − | AUUUUAGAGUCCGCGUGUGU | 20 | 6656 |
| BCL11A-5026 | − | AUUUUUAAAUUUUUCAC | 17 | 6657 |
| BCL11A-5027 | − | AUUUUUCACGAGAAAAACCU | 20 | 6658 |
| BCL11A-5028 | + | CAAAACAUGGGCAGGGCGAG | 20 | 6659 |
| BCL11A-5029 | − | CAAAAGCGAGGGGGAGA | 17 | 6660 |
| BCL11A-5030 | + | CAAGCCAAUGGCCAGUG | 17 | 6661 |
| BCL11A-5031 | + | CAAUGGACACACAUCAGGGG | 20 | 6662 |
| BCL11A-5032 | + | CAAUGGCCAGUGCGGGG | 17 | 6663 |
| BCL11A-5033 | + | CAAUGGCCAGUGCGGGGAGG | 20 | 6664 |
| BCL11A-5034 | + | CAAUGGUUCCAGAUGGG | 17 | 6665 |
| BCL11A-5035 | + | CACAAAACAUGGGCAGG | 17 | 6666 |
| BCL11A-5036 | + | CACACCAAUGGACACACAUC | 20 | 6667 |
| BCL11A-5037 | + | CACACGCGGACUCUAAA | 17 | 6668 |
| BCL11A-5038 | + | CACAUCAGGGGCUGGAC | 17 | 6669 |
| BCL11A-5039 | + | CACCAAUGGACACACAU | 17 | 6670 |
| BCL11A-5040 | + | CACGGCAAUGGUUCCAG | 17 | 6671 |
| BCL11A-5041 | − | CACUGAUGAAGAUAUUUUCU | 20 | 6672 |
| BCL11A-5042 | − | CACUUGAACUUGCAGCU | 17 | 6673 |
| BCL11A-5043 | − | CACUUGAACUUGCAGCUCAG | 20 | 6674 |
| BCL11A-5044 | − | CAGGACUAGAAGCAAAA | 17 | 6675 |
| BCL11A-5045 | − | CAGGACUAGAAGCAAAAGCG | 20 | 6676 |
| BCL11A-5046 | + | CAGGAGAGAAGGGGAGG | 17 | 6677 |
| BCL11A-5047 | + | CAGGGAAGAUGAAUUGU | 17 | 6678 |
| BCL11A-5048 | + | CAGGGCGAGCAGGAGAG | 17 | 6679 |
| BCL11A-5049 | + | CAGGGCGAGCAGGAGAGAAG | 20 | 6680 |
| BCL11A-5050 | + | CAGGGGUGGGAGGAAAGGGU | 20 | 6681 |
| BCL11A-5051 | + | CAGUGCGGGGAGGGGGAGGU | 20 | 6682 |
| BCL11A-5052 | − | CAUGCAUUUUUAAAUUUUUC | 20 | 6683 |
| BCL11A-5053 | + | CAUGGGCAGGGCGAGCAGGA | 20 | 6684 |
| BCL11A-5054 | − | CAUUUUAGAGUCCGCGUGUG | 20 | 6685 |
| BCL11A-5055 | + | CCAAUGGCCAGUGCGGG | 17 | 6686 |
| BCL11A-5056 | + | CCAAUGGCCAGUGCGGGGAG | 20 | 6687 |
| BCL11A-5057 | + | CCACACACGCGGACUCUAAA | 20 | 6688 |
| BCL11A-5058 | + | CCAGACGCGGCCCCCGG | 17 | 6689 |
| BCL11A-5059 | + | CCAGACGCGGCCCCCGGGGG | 20 | 6690 |
| BCL11A-5060 | − | CCAGCACUUAAGCAAAC | 17 | 6691 |
| BCL11A-5061 | − | CCAUUGCCGUGUAUGCACUU | 20 | 6692 |
| BCL11A-5062 | − | CCCAGCACUUAAGCAAA | 17 | 6693 |
| BCL11A-5063 | − | CCCCAGCACUUAAGCAA | 17 | 6694 |
| BCL11A-5064 | + | CCCCGGGGGAGGGGCGGGCC | 20 | 6695 |
| BCL11A-5065 | − | CCCCUCGGCCCGCCCCUCCC | 20 | 6696 |
| BCL11A-5066 | + | CCCGGGGGAGGGGCGGG | 17 | 6697 |
| BCL11A-5067 | + | CCCGGGGGAGGGGCGGGCCG | 20 | 6698 |
| BCL11A-5068 | + | CCCGUUUGCUUAAGUGC | 17 | 6699 |
| BCL11A-5069 | − | CCCUCGGCCCGCCCCUCCCC | 20 | 6700 |
| BCL11A-5070 | + | CCCUGCUCCCCCCCACACAC | 20 | 6701 |
| BCL11A-5071 | + | CCGAGGGGAGGGGGCGC | 17 | 6702 |
| BCL11A-5072 | − | CCGCACUUGAACUUGCAGCU | 20 | 6703 |
| BCL11A-5073 | + | CCGCGGCGGUGGCGUGG | 17 | 6704 |
| BCL11A-5074 | + | CCGGGGGAGGGGCGGGCCGA | 20 | 6705 |
| BCL11A-5075 | − | CCUCGGCCCGCCCCUCCCCC | 20 | 6706 |
| BCL11A-5076 | − | CCUGACGUUCAAGUUCG | 17 | 6707 |
| BCL11A-5077 | + | CCUGAGCUGCAAGUUCAAGU | 20 | 6708 |
| BCL11A-5078 | − | CCUGAUGUGUGUCCAUUGGU | 20 | 6709 |
| BCL11A-5079 | + | CGAACUUGAACGUCAGGAGU | 20 | 6710 |
| BCL11A-5080 | + | CGAGACAUGGUGGGCUG | 17 | 6711 |
| BCL11A-5081 | + | CGAGCAGGAGAGAAGGG | 17 | 6712 |
| BCL11A-5082 | + | CGAGCAGGAGAGAAGGGGAG | 20 | 6713 |
| BCL11A-5083 | − | CGAGGUAAAAGAGAUAA | 17 | 6714 |
| BCL11A-5084 | − | CGAGGUAAAAGAGAUAAAGG | 20 | 6715 |
| BCL11A-5085 | − | CGCACUUGAACUUGCAGCUC | 20 | 6716 |
| BCL11A-5086 | + | CGCAGGGAAGAUGAAUU | 17 | 6717 |
| BCL11A-5087 | + | CGCCAGACGCGGCCCCC | 17 | 6718 |
| BCL11A-5088 | + | CGCCGCGGCGGUGGCGUGGC | 20 | 6719 |
| BCL11A-5089 | + | CGCGGCGGUGGCGUGGC | 17 | 6720 |
| BCL11A-5090 | + | CGCGGCGGUGGCGUGGCCGG | 20 | 6721 |
| BCL11A-5091 | + | CGGACGCCAGACGCGGCCCC | 20 | 6722 |
| BCL11A-5092 | + | CGGCAAUGGUUCCAGAUGGG | 20 | 6723 |
| BCL11A-5093 | + | CGGCCCCCGGGGGAGGG | 17 | 6724 |
| BCL11A-5094 | − | CGGCCCGCCCCUCCCCC | 17 | 6725 |
| BCL11A-5095 | + | CGGCGAGACAUGGUGGGCUG | 20 | 6726 |
| BCL11A-5096 | + | CGGCGGCGGCGGCGGCG | 17 | 6727 |
| BCL11A-5097 | + | CGGCGGCGGCGGCGGCGGCG | 20 | 6728 |
| BCL11A-5098 | + | CGGCGGUGGCGUGGCCGGGA | 20 | 6729 |
| BCL11A-5099 | + | CGGGCCGAGGGGAGGGGGCG | 20 | 6730 |
| BCL11A-5100 | + | CGGGCUCACCAGUGGCCGCA | 20 | 6731 |
| BCL11A-5101 | + | CGGGGAGGGGGAGGUGCGGG | 20 | 6732 |
| BCL11A-5102 | + | CGGGGGAGGGGCGGGCC | 17 | 6733 |
| BCL11A-5103 | + | CGGGGGAGGGGCGGGCCGAG | 20 | 6734 |
| BCL11A-5104 | + | CGGUGGCGUGGCCGGGA | 17 | 6735 |
| BCL11A-5105 | + | CGGUGGCGUGGCCGGGAGAG | 20 | 6736 |
| BCL11A-5106 | − | CUAGAAGCAAAAGCGAG | 17 | 6737 |
| BCL11A-5107 | − | CUAGAAGCAAAAGCGAGGGG | 20 | 6738 |
| BCL11A-5108 | − | CUCCUGACGUUCAAGUUCGC | 20 | 6739 |
| BCL11A-5109 | − | CUCGGCCCGCCCCUCCC | 17 | 6740 |
| BCL11A-5110 | + | CUCUUUUACCUCGACUC | 17 | 6741 |
| BCL11A-5111 | − | CUGACGUUCAAGUUCGC | 17 | 6742 |
| BCL11A-5112 | + | CUUGAACGUCAGGAGUCUGG | 20 | 6743 |
| BCL11A-5113 | − | CUUGAACUUGCAGCUCA | 17 | 6744 |
| BCL11A-5114 | + | CUUGCUUGCGGCGAGACAUG | 20 | 6745 |
| BCL11A-5115 | − | UAAUAAUUAUUAAUAAUCAC | 20 | 6746 |
| BCL11A-5116 | + | UAAUACAAAGAUGGCGC | 17 | 6747 |
| BCL11A-5117 | − | UAAUUAUUAAUAAUCAC | 17 | 6748 |
| BCL11A-5118 | + | UACACGGCAAUGGUUCCAGA | 20 | 6749 |
| BCL11A-5119 | + | UAGAAAGAAGGAGACUC | 17 | 6750 |
| BCL11A-5120 | − | UAGAAGCAAAAGCGAGG | 17 | 6751 |
| BCL11A-5121 | − | UAGAGUCCGCGUGUGUG | 17 | 6752 |
| BCL11A-5122 | − | UAGAGUCCGCGUGUGUGGGG | 20 | 6753 |
| BCL11A-5123 | + | UAUCUCUUUUACCUCGACUC | 20 | 6754 |
| BCL11A-5124 | + | UAUUAUUGGGUUACUUACGC | 20 | 6755 |
| BCL11A-5125 | + | UAUUGGGUUACUUACGC | 17 | 6756 |
| BCL11A-5126 | + | UCACACCAAUGGACACACAU | 20 | 6757 |
| BCL11A-5127 | − | UCACGAGAAAAACCUCC | 17 | 6758 |
| BCL11A-5128 | + | UCAGGAGUCUGGAUGGA | 17 | 6759 |
| BCL11A-5129 | − | UCAUUUUAGAGUCCGCGUGU | 20 | 6760 |
| BCL11A-5130 | + | UCCCGUUUGCUUAAGUG | 17 | 6761 |
| BCL11A-5131 | − | UCCGAGAGUCGAGGUAA | 17 | 6762 |
| BCL11A-5132 | − | UCCGCGUGUGUGGGGGGGAG | 20 | 6763 |
| BCL11A-5133 | − | UCGAGGUAAAAGAGAUA | 17 | 6764 |
| BCL11A-5134 | − | UCGAGGUAAAAGAGAUAAAG | 20 | 6765 |
| BCL11A-5135 | − | UCGGCCCGCCCCUCCCC | 17 | 6766 |
| BCL11A-5136 | − | UCUAACCCGGCUCUCCCGAU | 20 | 6767 |
| BCL11A-5137 | + | UCUCGGAGGUUUUUCUC | 17 | 6768 |
| BCL11A-5138 | + | UCUUUUACCUCGACUCU | 17 | 6769 |
| BCL11A-5139 | + | UGACAUCCAAAAUAAAU | 17 | 6770 |
| BCL11A-5140 | − | UGAUGAAGAUAUUUUCU | 17 | 6771 |
| BCL11A-5141 | − | UGCAUUUUUAAAUUUUUCAC | 20 | 6772 |
| BCL11A-5142 | + | UGCGGGGAGGGGGAGGU | 17 | 6773 |
| BCL11A-5143 | + | UGCUCCCCCCCACACAC | 17 | 6774 |
| BCL11A-5144 | + | UGGACACACAUCAGGGG | 17 | 6775 |
| BCL11A-5145 | + | UGGACAGAGACACACAAAAC | 20 | 6776 |
| BCL11A-5146 | + | UGGCAGGGGUGGGAGGA | 17 | 6777 |
| BCL11A-5147 | + | UGGCCAGUGCGGGGAGG | 17 | 6778 |
| BCL11A-5148 | + | UGGCCGGGAGAGAAGAA | 17 | 6779 |
| BCL11A-5149 | + | UGGCGCAGGGAAGAUGAAUU | 20 | 6780 |
| BCL11A-5150 | + | UGGCGUGGCCGGGAGAG | 17 | 6781 |
| BCL11A-5151 | + | UGGGAGGAAAGGGUGGG | 17 | 6782 |
| BCL11A-5152 | + | UGGGGUUUGCCUUGCUUGCG | 20 | 6783 |
| BCL11A-5153 | − | UGUAUUAUUUCUAAUUUAUU | 20 | 6784 |
| BCL11A-5154 | − | UUAAUAAUCACGAGAGCGCG | 20 | 6785 |
| BCL11A-5155 | + | UUAGAAAGAAGGAGACUCCA | 20 | 6786 |
| BCL11A-5156 | − | UUAGAGUCCGCGUGUGU | 17 | 6787 |
| BCL11A-5157 | − | UUAGAGUCCGCGUGUGUGGG | 20 | 6788 |
| BCL11A-5158 | − | UUGAACUUGCAGCUCAG | 17 | 6789 |
| BCL11A-5159 | − | UUGCCGUGUAUGCACUU | 17 | 6790 |
| BCL11A-5160 | − | UUGGAUGUCAAAAGGCACUG | 20 | 6791 |
| BCL11A-5161 | − | UUUAGAGUCCGCGUGUG | 17 | 6792 |
| BCL11A-5162 | − | UUUAGAGUCCGCGUGUGUGG | 20 | 6793 |
| BCL11A-5163 | − | UUUCACGAGAAAAACCU | 17 | 6794 |
| BCL11A-5164 | − | UUUUAGAGUCCGCGUGU | 17 | 6795 |
| BCL11A-5165 | − | UUUUAGAGUCCGCGUGUGUG | 20 | 6796 |
| BCL11A-5166 | − | UUUUCACGAGAAAAACCUCC | 20 | 6797 |
| BCL11A-5167 | + | UUUUGACAUCCAAAAUAAAU | 20 | 6798 |

[1072] Table 12 provides exemplary targeting domains for knocking down expression of the BCL11A gene. The targeting domains bind between 500 bp upstream and 500 bp downstream of transcription start site. It is contemplated herein that the targeting domain hybridizes to the target domain through complementary base pairing. Any of the targeting domains in the table can be used with a N. meningitidismeningitidis eiCas9 molecule to cause a steric block at the target region, e.g., between 500 bp upstream and 500 bp downstream of transcription start site to block transcription resulting in the repression of the BCL11A gene. Alternatively, any of the targeting domains in the table can be used with a N. meningitidismeningitidis eiCas9 fused to a transcriptional repressor to decrease transcription and therefore downregulate gene expression.

TABLE 12

| | | | Target | SEQ |
|---|---|---|---|---|
| | DNA | | Site | ID |
| gRNA Name | Strand | Targeting Domain | Length | NO |
| BCL11A-5168 | + | GCUUCUAGUCCUGCGCGCUC | 20 | 6799 |
| BCL11A-5169 | + | ACACACGCGGACUCUAAAAU | 20 | 6800 |
| BCL11A-5170 | + | UCUAGUCCUGCGCGCUC | 17 | 6801 |
| BCL11A-5171 | + | CACGCGGACUCUAAAAU | 17 | 6802 |

[1073] Table 13A provides exemplary targeting domains for the E6V target site in the HBB gene selected according to the first tier parameters. The targeting domains bind within 100 bp upstream and 100 bp downstream of the target position, good orthogonality and start with G. It is contemplated herein that the targeting domain hybridizes to the target domain through complementary base pairing. Any of the targeting domains in the table can be used with a S. pyogenes Cas9 molecule that generates a double strand break (Cas9 nuclease) or a single-strand break (Cas9 nickase).

[1074] Any of the targeting domains in the table can be used with a S. pyogenes Cas9 (nickase) molecule to generate a single strand break. In an embodiment, dual targeting is used to create two nicks on opposite DNA strands by using S. pyogenes Cas9 nickases with two targeting domains that are complementary to opposite DNA strands, e.g., a gRNA comprising any minus strand targeting domain may be paired any gRNA comprising a plus strand targeting domain provided that the two gRNAs are oriented on the DNA such that PAMs face outward and the distance between the 5′ ends of the gRNAs is 0-50 bp. Exemplary gRNA pairs are: HBB-9 and HBB-11, HBB-9 and HBB-39, HBB-20 and HBB-11 and HBB-20 and HBB-39.

TABLE 13A
1st Tier

| | | | Target | |
|---|---|---|---|---|
| | DNA | | Site | SEQ |
| gRNA Name | Strand | Targeting Domain | Length | ID NO |
| HBB-1 | − | GGUGCACCUGACUCCUG | 17 | 6803 |
| HBB-2 | + | GUAACGGCAGACUUCUCCAC | 20 | 6804 |

[1075] Table 13B provides exemplary targeting domains for the E6V target site in the HBB gene selected according to the second tier parameters. The targeting domains bind within 100 bp upstream and 100 bp downstream of the target position, good orthogonality and do not start with G. It is contemplated herein that the targeting domain hybridizes to the target domain through complementary base pairing. Any of the targeting domains in the table can be used with a S. pyogenes Cas9 molecule that generates a double strand break (Cas9 nuclease) or a single-strand break (Cas9 nickase).

[1076] Any of the targeting domains in the table can be used with a S. pyogenes Cas9 (nickase) molecule to generate a single strand break. In an embodiment, dual targeting is used to create two nicks on opposite DNA strands by using S. pyogenes Cas9 nickases with two targeting domains that are complementary to opposite DNA strands, e.g., a gRNA comprising any minus strand targeting domain may be paired any gRNA comprising a plus strand targeting domain provided that the two gRNAs are oriented on the DNA such that PAMs face outward and the distance between the 5′ ends of the gRNAs is 0-50 bp.

TABLE 13B
2nd Tier

| | | | Target | |
|---|---|---|---|---|
| | DNA | | Site | SEQ |
| gRNA Name | Strand | Targeting Domain | Length | ID NO |
| HBB-3 | + | ACGGCAGACUUCUCCAC | 17 | 6805 |
| HBB-4 | + | ACUUCUCCACAGGAGUC | 17 | 6806 |
| HBB-5 | + | AGGAGUCAGGUGCACCA | 17 | 6807 |
| HBB-6 | − | CAUGGUGCACCUGACUCCUG | 20 | 6808 |
| HBB-7 | + | CACAGGAGUCAGGUGCACCA | 20 | 6809 |
| HBB-8 | + | CAGACUUCUCCACAGGAGUC | 20 | 6810 |

[1077] Table 13C provides exemplary targeting domains for the E6V target site in the HBB gene selected according to the third tier parameters. The targeting domains bind within 100 bp upstream and 100 bp downstream of the target position, and start with G. It is contemplated herein that the targeting domain hybridizes to the target domain through complementary base pairing. Any of the targeting domains in the table can be used with a S. pyogenes Cas9 molecule that generates a double strand break (Cas9 nuclease) or a single-strand break (Cas9 nickase).

[1078] Any of the targeting domains in the table can be used with a S. pyogenes Cas9 (nickase) molecule to generate a single strand break. In an embodiment, dual targeting is used to create two nicks on opposite DNA strands by using S. pyogenes Cas9 nickases with two targeting domains that are complementary to opposite DNA strands, e.g., a gRNA comprising any minus strand targeting domain may be paired any gRNA comprising a plus strand targeting domain provided that the two gRNAs are oriented on the DNA such that PAMs face outward and the distance between the 5′ ends of the gRNAs is 0-50 bp.

TABLE 13C
3rd Tier

| | | | Target | |
|---|---|---|---|---|
| | DNA | | Site | SEQ ID |
| gRNA Name | Strand | Targeting Domain | Length | NO |
| HBB-9 | − | GAAGUUGGUGGUGAGGCCCU | 20 | 6811 |
| HBB-10 | − | GCAACCUCAAACAGACACCA | 20 | 6812 |
| HBB-11 | + | GCCCCACAGGGCAGUAA | 17 | 6813 |
| HBB-12 | − | GCCGUUACUGCCCUGUG | 17 | 6814 |
| HBB-13 | − | GGAUGAAGUUGGUGGUG | 17 | 6815 |
| HBB-14 | − | GUCUGCCGUUACUGCCCUGU | 20 | 6816 |
| HBB-15 | − | GUGAACGUGGAUGAAGU | 17 | 6817 |
| HBB-16 | − | GUGAACGUGGAUGAAGUUGG | 20 | 6818 |
| HBB-17 | − | GUGGGGCAAGGUGAACG | 17 | 6819 |
| HBB-18 | − | GUGGUGAGGCCCUGGGC | 17 | 6820 |
| HBB-19 | + | GUUCACCUUGCCCCACA | 17 | 6821 |
| HBB-20 | − | GUUGGUGGUGAGGCCCU | 17 | 6822 |

[1079] Table 13D provides exemplary targeting domains for the E6V target site in the HBB gene selected according to the fourth tier parameters. The targeting domains bind within 100 bp upstream and 100 bp downstream of the target position, and do not start with G. It is contemplated herein that the targeting domain hybridizes to the target domain through complementary base pairing. Any of the targeting domains in the table can be used with a S. pyogenes Cas9 molecule that generates a double strand break (Cas9 nuclease) or a single-strand break (Cas9 nickase).

[1080] Any of the targeting domains in the table can be used with a S. pyogenes Cas9 (nickase) molecule to generate a single strand break. In an embodiment, dual targeting is used to create two nicks on opposite DNA strands by using S. pyogenes Cas9 nickases with two targeting domains that are complementary to opposite DNA strands, e.g., a gRNA comprising any minus strand targeting domain may be paired any gRNA comprising a plus strand targeting domain provided that the two gRNAs are oriented on the DNA such that PAMs face outward and the distance between the 5′ ends of the gRNAs is 0-50 bp.

TABLE 13D
4th Tier

| | | | Target | |
|---|---|---|---|---|
| | DNA | | Site | SEQ ID |
| gRNA Name | Strand | Targeting Domain | Length | NO |
| HBB-21 | − | AACGUGGAUGAAGUUGG | 17 | 6823 |
| HBB-22 | + | AAGCAAAUGUAAGCAAUAGA | 20 | 6824 |
| HBB-23 | − | AAGGUGAACGUGGAUGAAGU | 20 | 6825 |
| HBB-24 | + | ACCAUGGUGUCUGUUUG | 17 | 6826 |
| HBB-25 | − | ACCUCAAACAGACACCA | 17 | 6827 |
| HBB-26 | + | ACCUUGAUACCAACCUGCCC | 20 | 6828 |
| HBB-27 | − | AGUCUGCCGUUACUGCCCUG | 20 | 6829 |
| HBB-28 | − | AGUUGGUGGUGAGGCCC | 17 | 6830 |
| HBB-29 | + | CAAAUGUAAGCAAUAGA | 17 | 6831 |
| HBB-30 | + | CACGUUCACCUUGCCCCACA | 20 | 6832 |
| HBB-31 | + | CCACGUUCACCUUGCCCCAC | 20 | 6833 |
| HBB-32 | − | CCCUGGGCAGGUUGGUAUCA | 20 | 6834 |
| HBB-33 | − | CCUGUGGGGCAAGGUGAACG | 20 | 6835 |
| HBB-34 | + | CCUUGAUACCAACCUGCCCA | 20 | 6836 |
| HBB-35 | − | CGUGGAUGAAGUUGGUGGUG | 20 | 6837 |
| HBB-36 | − | CGUUACUGCCCUGUGGGGCA | 20 | 6838 |
| HBB-37 | + | CGUUCACCUUGCCCCAC | 17 | 6839 |
| HBB-38 | − | CUGCCGUUACUGCCCUG | 17 | 6840 |
| HBB-39 | + | CUUGCCCCACAGGGCAGUAA | 20 | 6841 |
| HBB-40 | − | UACUGCCCUGUGGGGCA | 17 | 6842 |
| HBB-41 | − | UAUCAAGGUUACAAGAC | 17 | 6843 |
| HBB-42 | − | UCUGCCGUUACUGCCCUGUG | 20 | 6844 |
| HBB-43 | − | UGAAGUUGGUGGUGAGGCCC | 20 | 6845 |
| HBB-44 | − | UGAGGCCCUGGGCAGGU | 17 | 6846 |
| HBB-45 | + | UGAUACCAACCUGCCCA | 17 | 6847 |
| HBB-46 | + | UGCACCAUGGUGUCUGUUUG | 20 | 6848 |
| HBB-47 | − | UGCCGUUACUGCCCUGU | 17 | 6849 |
| HBB-48 | − | UGGGCAGGUUGGUAUCA | 17 | 6850 |
| HBB-49 | − | UGGUAUCAAGGUUACAAGAC | 20 | 6851 |
| HBB-50 | − | UGGUGAGGCCCUGGGCAGGU | 20 | 6852 |
| HBB-51 | + | UUGAUACCAACCUGCCC | 17 | 6853 |
| HBB-52 | − | UUGGUGGUGAGGCCCUGGGC | 20 | 6854 |

[1081] Table 14A provides exemplary targeting domains for the E6V target site in the HBB gene selected according to the first tier parameters. The targeting domains bind within 100 bp upstream and 100 bp downstream of the target position, good orthogonality and start with G. It is contemplated herein that the targeting domain hybridizes to the target domain through complementary base pairing. Any of the targeting domains in the table can be used with a S. aureus Cas9 molecule that generates a double strand break (Cas9 nuclease) or a single-strand break (Cas9 nickase).

[1082] Any of the targeting domains in the table can be used with a S. aureus Cas9 (nickase) molecule to generate a single strand break. In an embodiment, dual targeting is used to create two nicks on opposite DNA strands by using S. aureus Cas9 nickases with two targeting domains that are complementary to opposite DNA strands, e.g., a gRNA comprising any minus strand targeting domain may be paired any gRNA comprising a plus strand targeting domain provided that the two gRNAs are oriented on the DNA such that PAMs face outward and the distance between the 5′ ends of the gRNAs is 0-50 bp. Exemplary gRNA pairs are: HBB-9 and HBB-11, HBB-9 and HBB-39, HBB-20 and HBB-11 and HBB-20 and HBB-39.

TABLE 14A
1st Tier

| | | | Target | |
|---|---|---|---|---|
| | DNA | | Site | SEQ ID |
| gRNA Name | Strand | Targeting Domain | Length | NO |
| HBB-53 | + | GUAACGGCAGACUUCUCCAC | 20 | 6855 |

[1083] Table 14B provides exemplary targeting domains for the E6V target site in the HBB gene selected according to the second tier parameters. The targeting domains bind within 100 bp upstream and 100 bp downstream of the target position, good orthogonality and do not start with G. It is contemplated herein that the targeting domain hybridizes to the target domain through complementary base pairing. Any of the targeting domains in the table can be used with a S. aureus Cas9 molecule that generates a double strand break (Cas9 nuclease) or a single-strand break (Cas9 nickase).

[1084] Any of the targeting domains in the table can be used with a S. aureus Cas9 (nickase) molecule to generate a single strand break. In an embodiment, dual targeting is used to create two nicks on opposite DNA strands by using S. aureus Cas9 nickases with two targeting domains that are complementary to opposite DNA strands, e.g., a gRNA comprising any minus strand targeting domain may be paired any gRNA comprising a plus strand targeting domain provided that the two gRNAs are oriented on the DNA such that PAMs face outward and the distance between the 5′ ends of the gRNAs is 0-50 bp.

TABLE 14B
2nd Tier

| | | | Target | |
|---|---|---|---|---|
| | DNA | | Site | SEQ ID |
| gRNA Name | Strand | Targeting Domain | Length | NO |
| HBB-54 | − | CCCUGUGGGGCAAGGUGGAC | 20 | 6856 |

[1085] Table 14C provides exemplary targeting domains for the E6V target site in the HBB gene selected according to the fifth tier parameters. The targeting domains bind within 100 bp upstream and 100 bp downstream of the target position and PAM is NNGRRV. It is contemplated herein that the targeting domain hybridizes to the target domain through complementary base pairing. Any of the targeting domains in the table can be used with a S. aureus Cas9 molecule that generates a double strand break (Cas9 nuclease) or a single-strand break (Cas9 nickase).

[1086] Any of the targeting domains in the table can be used with a S. aureus Cas9 (nickase) molecule to generate a single strand break. In an embodiment, dual targeting is used to create two nicks on opposite DNA strands by using S. aureus Cas9 nickases with two targeting domains that are complementary to opposite DNA strands, e.g., a gRNA comprising any minus strand targeting domain may be paired any gRNA comprising a plus strand targeting domain provided that the two gRNAs are oriented on the DNA such that PAMs face outward and the distance between the 5′ ends of the gRNAs is 0-50 bp.

TABLE 14C
5th Tier

| | | | Target | |
|---|---|---|---|---|
| | DNA | | Site | SEQ ID |
| gRNA Name | Strand | Targeting Domain | Length | NO |
| HBB-55 | − | AGUCUGCCGUUACUGCCCUG | 20 | 6857 |
| HBB-56 | − | AAGUCUGCCGUUACUGCCCU | 20 | 6858 |
| HBB-57 | + | AACCUUGAUACCAACCUGCC | 20 | 6859 |
| HBB-58 | + | UCCACGUUCACCUUGCCCCA | 20 | 6860 |
| HBB-59 | + | GCUAGUGAACACAGUUGUGU | 20 | 6861 |
| HBB-60 | − | CCAUGGUGCACCUGACUCCU | 20 | 6862 |
| HBB-61 | − | CAUGGUGCACCUGACUCCUG | 20 | 6863 |
| HBB-62 | + | AGGUGCACCAUGGUGUCUGU | 20 | 6864 |
| HBB-63 | − | UGGUGCACCUGACUCCUGUG | 20 | 6865 |
| HBB-64 | − | GAACGUGGAUGAAGUUGGUG | 20 | 6866 |
| HBB-65 | − | UUACUGCCCUGUGGGGCAAG | 20 | 6867 |
| HBB-66 | + | GUGUCUGUUUGAGGUUGCUA | 20 | 6868 |
| HBB-67 | − | GUGGGGCAAGGUGAACGUGG | 20 | 6869 |
| HBB-68 | − | AUGAAGUUGGUGGUGAGGCC | 20 | 6870 |
| HBB-69 | + | AGUAACGGCAGACUUCUCCA | 20 | 6871 |

[1087] Table 15A provides exemplary targeting domains for knocking out the BCL11A gene selected according to the first tier parameters. The targeting domains bind within the first 500 bp of the coding sequence (e.g., within 500 bp downstream from the start codon) and have a high level of orthogonality. It is contemplated herein that in an embodiment the targeting domain hybridizes to the target domain through complementary base pairing. Any of the targeting domains in the table can be used with a S. pyogenes Cas9 molecule that generates a double stranded break (Cas9 nuclease) or a single-stranded break (Cas9 nickase).

TABLE 15A
1st Tier

| | | | Target | SEQ |
|---|---|---|---|---|
| | DNA | | Site | ID |
| gRNA Name | Strand | Targeting Domain | Length | NO: |
| BCL11A-5318 | + | UCAUCUCGAUUGGUGAA | 17 | 6872 |
| BCL11A-5319 | + | UUGCUUGCGGCGAGACA | 17 | 6873 |
| BCL11A-5320 | − | AUGUCUCGCCGCAAGCA | 17 | 6874 |
| BCL11A-5321 | − | GCAGAAUAUGCCCCGCA | 17 | 6875 |
| BCL11A-5322 | − | CCGUUGGGAGCUCCAGA | 17 | 6876 |
| BCL11A-5323 | + | CUCCAUGUGCAGAACGA | 17 | 6877 |
| BCL11A-5324 | + | UCGAUUGGUGAAGGGGA | 17 | 6878 |
| BCL11A-5325 | + | CAUCCUCUGGCGUGACC | 17 | 6879 |
| BCL11A-5326 | − | GCUCUAAUCCCCACGCC | 17 | 6880 |
| BCL11A-5327 | + | CCCGUUUGCUUAAGUGC | 17 | 6881 |
| BCL11A-5328 | + | AAACAAUCGUCAUCCUC | 17 | 6882 |
| BCL11A-5329 | + | CCCAACGGGCCGUGGUC | 17 | 6883 |
| BCL11A-5330 | + | CAUCUCGAUUGGUGAAG | 17 | 6884 |
| BCL11A-5331 | − | CAUCCAGGUCACGCCAG | 17 | 6885 |
| BCL11A-5332 | − | UUAUCAACGUCAUCUAG | 17 | 6886 |
| BCL11A-5333 | + | GAGCUCCCAACGGGCCG | 17 | 6887 |
| BCL11A-5334 | + | UGCACUCAUCCCAGGCG | 17 | 6888 |
| BCL11A-5335 | + | AGACAUGGUGGGCUGCG | 17 | 6889 |
| BCL11A-5336 | + | CGUUUGCUUAAGUGCUG | 17 | 6890 |
| BCL11A-5337 | + | GCUUUUUUCAUCUCGAU | 17 | 6891 |
| BCL11A-5338 | + | CCGUUUGCUUAAGUGCU | 17 | 6892 |
| BCL11A-5339 | − | UCCAAUCCCGUGGAGGU | 17 | 6893 |
| BCL11A-5340 | + | UUGCGGCGAGACAUGGU | 17 | 6894 |
| BCL11A-5341 | − | AUGACCUCCUCACCUGU | 17 | 6895 |
| BCL11A-5342 | − | UUAUUUUUAUCGAGCACAAA | 20 | 6896 |
| BCL11A-5343 | + | UCCCCUUCUGGAGCUCCCAA | 20 | 6897 |
| BCL11A-5344 | + | UUUUCAUCUCGAUUGGUGAA | 20 | 6898 |
| BCL11A-5345 | + | GCCUUGCUUGCGGCGAGACA | 20 | 6899 |
| BCL11A-5346 | − | ACCAUGUCUCGCCGCAAGCA | 20 | 6900 |
| BCL11A-5347 | + | GAGCUCCAUGUGCAGAACGA | 20 | 6901 |
| BCL11A-5348 | − | UCACAGAUAAACUUCUGCAC | 20 | 6902 |
| BCL11A-5349 | + | CGUCAUCCUCUGGCGUGACC | 20 | 6903 |
| BCL11A-5350 | − | GGAGCUCUAAUCCCCACGCC | 20 | 6904 |
| BCL11A-5351 | − | UCCCGUGGAGGUUGGCAUCC | 20 | 6905 |
| BCL11A-5352 | + | AUUCCCGUUUGCUUAAGUGC | 20 | 6906 |
| BCL11A-5353 | + | CCCCCAAUGGGAAGUUCAUC | 20 | 6907 |
| BCL11A-5354 | + | GCUCCCAACGGGCCGUGGUC | 20 | 6908 |
| BCL11A-5355 | + | UUUCAUCUCGAUUGGUGAAG | 20 | 6909 |
| BCL11A-5356 | − | UGUUUAUCAACGUCAUCUAG | 20 | 6910 |
| BCL11A-5357 | + | AGAGCUCCAUGUGCAGAACG | 20 | 6911 |
| BCL11A-5358 | − | GAAAAAAGCAUCCAAUCCCG | 20 | 6912 |
| BCL11A-5359 | + | GCGAGACAUGGUGGGCUGCG | 20 | 6913 |
| BCL11A-5360 | − | CAGAUAAACUUCUGCACUGG | 20 | 6914 |
| BCL11A-5361 | + | CGGCGAGACAUGGUGGGCUG | 20 | 6915 |
| BCL11A-5362 | + | CUGCACUCAUCCCAGGCGUG | 20 | 6916 |
| BCL11A-5363 | − | UGAACCAGACCACGGCCCGU | 20 | 6917 |
| BCL11A-5364 | − | GCAUCCAAUCCCGUGGAGGU | 20 | 6918 |
| BCL11A-5365 | + | UGCUUGCGGCGAGACAUGGU | 20 | 6919 |
| BCL11A-5366 | + | UCAAGAGGCUCGGCUGUGGU | 20 | 6920 |
| BCL11A-5367 | − | AUCAUGACCUCCUCACCUGU | 20 | 6921 |

[1088] Table 15B provides exemplary targeting domains for knocking out the BCL11A gene selected according to the second tier parameters. The targeting domains bind within the first 500 bp of the coding sequence (e.g., within 500 bp downstream from the start codon). It is contemplated herein that in an embodiment the targeting domain hybridizes to the target domain through complementary base pairing. Any of the targeting domains in the table can be used with a S. pyogenes Cas9 molecule that generates a double stranded break (Cas9 nuclease) or a single-stranded break (Cas9 nickase).

TABLE 15B
2nd Tier

| | | | Target | SEQ |
|---|---|---|---|---|
| | DNA | | Site | ID |
| gRNA Name | Strand | Targeting Domain | Length | NO: |
| BCL11A-5368 | − | UUUUUAUCGAGCACAAA | 17 | 6922 |
| BCL11A-5369 | − | CCCAGCACUUAAGCAAA | 17 | 6923 |
| BCL11A-5370 | + | AUAAGAAUGUCCCCCAA | 17 | 6924 |
| BCL11A-5371 | + | CCUUCUGGAGCUCCCAA | 17 | 6925 |
| BCL11A-5372 | − | AAACGGAAACAAUGCAA | 17 | 6926 |
| BCL11A-5373 | + | UUCAUCAUCUGUAAGAA | 17 | 6927 |
| BCL11A-5374 | − | CGUUGGGAGCUCCAGAA | 17 | 6928 |
| BCL11A-5375 | − | UCCCCUCGUUCUGCACA | 17 | 6929 |
| BCL11A-5376 | − | GAUGAUGAACCAGACCA | 17 | 6930 |
| BCL11A-5377 | + | CUGGAUGCCAACCUCCA | 17 | 6931 |
| BCL11A-5378 | − | CAGGUAAAUGAGAAGCA | 17 | 6932 |
| BCL11A-5379 | − | UAAACUUCUGCACUGGA | 17 | 6933 |
| BCL11A-5380 | + | UUCAUCUCGAUUGGUGA | 17 | 6934 |
| BCL11A-5381 | + | CAUUUGUAGAAGAAAUA | 17 | 6935 |
| BCL11A-5382 | − | AGGAAUUUGCCCCAAAC | 17 | 6936 |
| BCL11A-5383 | − | CCAGCACUUAAGCAAAC | 17 | 6937 |
| BCL11A-5384 | + | CUUCUGGAGCUCCCAAC | 17 | 6938 |
| BCL11A-5385 | + | CAUCUGGCACUGCCCAC | 17 | 6939 |
| BCL11A-5386 | + | UGGAUGCCAACCUCCAC | 17 | 6940 |
| BCL11A-5387 | − | CAGAUAAACUUCUGCAC | 17 | 6941 |
| BCL11A-5388 | + | UAUUCUGCACUCAUCCC | 17 | 6942 |
| BCL11A-5389 | − | CGUGGAGGUUGGCAUCC | 17 | 6943 |
| BCL11A-5390 | − | AAACAGGAACACAUAGC | 17 | 6944 |
| BCL11A-5391 | − | UGCAGAAUAUGCCCCGC | 17 | 6945 |
| BCL11A-5392 | + | AUGGUGGGCUGCGGGGC | 17 | 6946 |
| BCL11A-5393 | + | ACUUACAAAUACCCUGC | 17 | 6947 |
| BCL11A-5394 | + | UGUACAUGUGUAGCUGC | 17 | 6948 |
| BCL11A-5395 | + | GAGACAUGGUGGGCUGC | 17 | 6949 |
| BCL11A-5396 | − | GUGUUGUAUUAUUUUGC | 17 | 6950 |
| BCL11A-5397 | + | CCAAUGGGAAGUUCAUC | 17 | 6951 |
| BCL11A-5398 | + | AGGUCAUGAUCCCCUUC | 17 | 6952 |
| BCL11A-5399 | + | GUAAGAAUGGCUUCAAG | 17 | 6953 |
| BCL11A-5400 | − | GUUGGGAGCUCCAGAAG | 17 | 6954 |
| BCL11A-5401 | + | CAGCUUUUUCUAAGCAG | 17 | 6955 |
| BCL11A-5402 | + | UCCAUGUGCAGAACGAG | 17 | 6956 |
| BCL11A-2671 | + | CAGAACGAGGGGAGGAG | 17 | 6957 |
| BCL11A-5403 | − | AAACUUCUGCACUGGAG | 17 | 6958 |
| BCL11A-5404 | + | GCUCCAUGUGCAGAACG | 17 | 6959 |
| BCL11A-5405 | − | AAAAGCAUCCAAUCCCG | 17 | 6960 |
| BCL11A-5406 | + | CUUACAAAUACCCUGCG | 17 | 6961 |
| BCL11A-5407 | + | AUUGGUGAAGGGGAAGG | 17 | 6962 |
| BCL11A-5408 | + | ACUGCCCACAGGUGAGG | 17 | 6963 |
| BCL11A-4500 | + | GGGGCGGGCGGCGGCGG | 17 | 6964 |
| BCL11A-5409 | + | UGCGGGGCGGGCGGCGG | 17 | 6965 |
| BCL11A-5410 | + | GGCUGCGGGGCGGGCGG | 17 | 6966 |
| BCL11A-5411 | + | GUGGGCUGCGGGGCGGG | 17 | 6967 |
| BCL11A-5412 | + | AUGUGCAGAACGAGGGG | 17 | 6968 |
| BCL11A-5413 | + | CAUGGUGGGCUGCGGGG | 17 | 6969 |
| BCL11A-5414 | + | CUUGCGGCGAGACAUGG | 17 | 6970 |
| BCL11A-5415 | − | AUAAACUUCUGCACUGG | 17 | 6971 |
| BCL11A-5416 | − | AGCAUCCAAUCCCGUGG | 17 | 6972 |
| BCL11A-5417 | − | GAUGAACUUCCCAUUGG | 17 | 6973 |
| BCL11A-5418 | − | CAUGACCUCCUCACCUG | 17 | 6974 |
| BCL11A-5419 | + | AACUUACAAAUACCCUG | 17 | 6975 |
| BCL11A-5420 | − | CUGCUUAGAAAAAGCUG | 17 | 6976 |
| BCL11A-5421 | + | UUCAAGAGGCUCGGCUG | 17 | 6977 |
| BCL11A-5422 | + | CGAGACAUGGUGGGCUG | 17 | 6978 |
| BCL11A-5423 | + | CACUCAUCCCAGGCGUG | 17 | 6979 |
| BCL11A-5424 | + | GGCACUGCCCACAGGUG | 17 | 6980 |
| BCL11A-5425 | − | AGAUGAACUUCCCAUUG | 17 | 6981 |
| BCL11A-5426 | + | GGGGUUUGCCUUGCUUG | 17 | 6982 |
| BCL11A-5427 | + | CUAUGUGUUCCUGUUUG | 17 | 6983 |
| BCL11A-5428 | + | UAAGAAUGUCCCCCAAU | 17 | 6984 |
| BCL11A-5429 | − | CCAGAUGAACUUCCCAU | 17 | 6985 |
| BCL11A-5430 | + | GCCAACCUCCACGGGAU | 17 | 6986 |
| BCL11A-5431 | + | AUUAUUAUUACUAUUAU | 17 | 6987 |
| BCL11A-5432 | − | CUCUAAUCCCCACGCCU | 17 | 6988 |
| BCL11A-5433 | + | AAUGGCUUCAAGAGGCU | 17 | 6989 |
| BCL11A-5434 | + | GUACAUGUGUAGCUGCU | 17 | 6990 |
| BCL11A-5435 | − | ACCAGACCACGGCCCGU | 17 | 6991 |
| BCL11A-5436 | + | GCACUCAUCCCAGGCGU | 17 | 6992 |
| BCL11A-5437 | + | AGAGGCUCGGCUGUGGU | 17 | 6993 |
| BCL11A-5438 | − | CAGAUGAACUUCCCAUU | 17 | 6994 |
| BCL11A-5439 | + | UUAUUAUUACUAUUAUU | 17 | 6995 |
| BCL11A-5440 | − | CCAGACCACGGCCCGUU | 17 | 6996 |
| BCL11A-5441 | + | UGCUAUGUGUUCCUGUU | 17 | 6997 |
| BCL11A-5442 | + | GCUAUGUGUUCCUGUUU | 17 | 6998 |
| BCL11A-5443 | − | AACCCCAGCACUUAAGCAAA | 20 | 6999 |
| BCL11A-5444 | + | AAAAUAAGAAUGUCCCCCAA | 20 | 7000 |
| BCL11A-5445 | − | CACAAACGGAAACAAUGCAA | 20 | 7001 |
| BCL11A-5446 | + | UGGUUCAUCAUCUGUAAGAA | 20 | 7002 |
| BCL11A-5447 | − | GCCCGUUGGGAGCUCCAGAA | 20 | 7003 |
| BCL11A-5448 | − | UCCUCCCCUCGUUCUGCACA | 20 | 7004 |
| BCL11A-5449 | − | ACAGAUGAUGAACCAGACCA | 20 | 7005 |
| BCL11A-5450 | + | GACCUGGAUGCCAACCUCCA | 20 | 7006 |
| BCL11A-5451 | − | UAGCAGGUAAAUGAGAAGCA | 20 | 7007 |
| BCL11A-5452 | − | AGUGCAGAAUAUGCCCCGCA | 20 | 7008 |
| BCL11A-5453 | − | GGCCCGUUGGGAGCUCCAGA | 20 | 7009 |
| BCL11A-5454 | + | AUCUCGAUUGGUGAAGGGGA | 20 | 7010 |
| BCL11A-5455 | − | AGAUAAACUUCUGCACUGGA | 20 | 7011 |
| BCL11A-5456 | + | UUUUUCAUCUCGAUUGGUGA | 20 | 7012 |
| BCL11A-5457 | − | UAGAGGAAUUUGCCCCAAAC | 20 | 7013 |
| BCL11A-5458 | − | ACCCCAGCACUUAAGCAAAC | 20 | 7014 |
| BCL11A-5459 | + | CCCCUUCUGGAGCUCCCAAC | 20 | 7015 |
| BCL11A-5460 | + | GUUCAUCUGGCACUGCCCAC | 20 | 7016 |
| BCL11A-5461 | + | ACCUGGAUGCCAACCUCCAC | 20 | 7017 |
| BCL11A-5462 | + | GCAUAUUCUGCACUCAUCCC | 20 | 7018 |
| BCL11A-5463 | − | CCCAAACAGGAACACAUAGC | 20 | 7019 |
| BCL11A-5464 | − | GAGUGCAGAAUAUGCCCCGC | 20 | 7020 |
| BCL11A-5465 | + | GACAUGGUGGGCUGCGGGGC | 20 | 7021 |
| BCL11A-5466 | + | UCAACUUACAAAUACCCUGC | 20 | 7022 |
| BCL11A-5467 | + | AGUUGUACAUGUGUAGCUGC | 20 | 7023 |
| BCL11A-5468 | + | GGCGAGACAUGGUGGGCUGC | 20 | 7024 |
| BCL11A-5469 | − | UUGGUGUUGUAUUAUUUUGC | 20 | 7025 |
| BCL11A-5470 | + | GAUAAACAAUCGUCAUCCUC | 20 | 7026 |
| BCL11A-5471 | + | AGGAGGUCAUGAUCCCCUUC | 20 | 7027 |
| BCL11A-5472 | + | UCUGUAAGAAUGGCUUCAAG | 20 | 7028 |
| BCL11A-5473 | − | CCCGUUGGGAGCUCCAGAAG | 20 | 7029 |
| BCL11A-5474 | − | UGGCAUCCAGGUCACGCCAG | 20 | 7030 |
| BCL11A-5475 | + | CCACAGCUUUUUCUAAGCAG | 20 | 7031 |
| BCL11A-5476 | + | AGCUCCAUGUGCAGAACGAG | 20 | 7032 |
| BCL11A-5477 | + | GUGCAGAACGAGGGGAGGAG | 20 | 7033 |
| BCL11A-5478 | − | GAUAAACUUCUGCACUGGAG | 20 | 7034 |
| BCL11A-5479 | + | CUGGAGCUCCCAACGGGCCG | 20 | 7035 |
| BCL11A-5480 | + | UUCUGCACUCAUCCCAGGCG | 20 | 7036 |
| BCL11A-5481 | + | CAACUUACAAAUACCCUGCG | 20 | 7037 |
| BCL11A-5482 | + | UCGAUUGGUGAAGGGGAAGG | 20 | 7038 |
| BCL11A-5483 | + | GGCACUGCCCACAGGUGAGG | 20 | 7039 |
| BCL11A-5484 | + | UGCGGGGCGGGCGGCGGCGG | 20 | 7040 |
| BCL11A-5485 | + | GGCUGCGGGGCGGGCGGCGG | 20 | 7041 |
| BCL11A-5486 | + | GUGGGCUGCGGGGCGGGCGG | 20 | 7042 |
| BCL11A-5487 | + | AUGGUGGGCUGCGGGGCGGG | 20 | 7043 |
| BCL11A-5488 | + | UCCAUGUGCAGAACGAGGGG | 20 | 7044 |
| BCL11A-5489 | + | AGACAUGGUGGGCUGCGGGG | 20 | 7045 |
| BCL11A-5490 | + | UUGCUUGCGGCGAGACAUGG | 20 | 7046 |
| BCL11A-5491 | − | AAAAGCAUCCAAUCCCGUGG | 20 | 7047 |
| BCL11A-5492 | − | CCAGAUGAACUUCCCAUUGG | 20 | 7048 |
| BCL11A-5493 | − | GAUCAUGACCUCCUCACCUG | 20 | 7049 |
| BCL11A-5494 | + | CUCAACUUACAAAUACCCUG | 20 | 7050 |
| BCL11A-5495 | − | CCUCUGCUUAGAAAAAGCUG | 20 | 7051 |
| BCL11A-5496 | + | GGCUUCAAGAGGCUCGGCUG | 20 | 7052 |
| BCL11A-5497 | + | UCCCGUUUGCUUAAGUGCUG | 20 | 7053 |
| BCL11A-5498 | + | UCUGGCACUGCCCACAGGUG | 20 | 7054 |
| BCL11A-5499 | − | GCCAGAUGAACUUCCCAUUG | 20 | 7055 |
| BCL11A-5500 | + | GCUGGGGUUUGCCUUGCUUG | 20 | 7056 |
| BCL11A-5501 | + | CUGCUAUGUGUUCCUGUUUG | 20 | 7057 |
| BCL11A-5502 | + | AAAUAAGAAUGUCCCCCAAU | 20 | 7058 |
| BCL11A-5503 | − | GUGCCAGAUGAACUUCCCAU | 20 | 7059 |
| BCL11A-5504 | + | GAUGCUUUUUUCAUCUCGAU | 20 | 7060 |
| BCL11A-5505 | + | GAUGCCAACCUCCACGGGAU | 20 | 7061 |
| BCL11A-5506 | − | GAGCUCUAAUCCCCACGCCU | 20 | 7062 |
| BCL11A-5507 | + | AAGAAUGGCUUCAAGAGGCU | 20 | 7063 |
| BCL11A-5508 | + | GUUGUACAUGUGUAGCUGCU | 20 | 7064 |
| BCL11A-5509 | + | UUCCCGUUUGCUUAAGUGCU | 20 | 7065 |
| BCL11A-5510 | + | UCUGCACUCAUCCCAGGCGU | 20 | 7066 |
| BCL11A-5511 | − | UGCCAGAUGAACUUCCCAUU | 20 | 7067 |
| BCL11A-5512 | − | GAACCAGACCACGGCCCGUU | 20 | 7068 |
| BCL11A-5513 | + | ACCUGCUAUGUGUUCCUGUU | 20 | 7069 |
| BCL11A-5514 | + | CCUGCUAUGUGUUCCUGUUU | 20 | 7070 |

[1089] Table 15C provides exemplary targeting domains for knocking out the BCL11A gene selected according to the third tier parameters. The targeting domains fall in the coding sequence of the gene, downstream of the first 500 bp of coding sequence (e.g., anywhere from +500 (relative to the start codon) to the stop codon of the gene). It is contemplated herein that in an embodiment the targeting domain hybridizes to the target domain through complementary base pairing. Any of the targeting domains in the table can be used with a S. pyogenes Cas9 molecule that generates a double stranded break (Cas9 nuclease) or a single-stranded break (Cas9 nickase).

TABLE 15C
3rd Tier

| | DNA | | Target Site | |
|---|---|---|---|---|
| gRNA Name | Strand | Targeting Domain | Length | SEQ ID NO: |
| BCL11A-5515 | + | UCCGACGAGGAGGCAAA | 17 | 7071 |
| BCL11A-5516 | + | AUUCUUAGCAGGUUAAA | 17 | 7072 |
| BCL11A-5517 | − | GCUGCGGUUGAAUCCAA | 17 | 7073 |
| BCL11A-5518 | − | GGCCCAGCCCUAUGCAA | 17 | 7074 |
| BCL11A-5519 | + | CCGCAGCACCCUGUCAA | 17 | 7075 |
| BCL11A-5520 | − | CUUCCGGCCUGGCAGAA | 17 | 7076 |
| BCL11A-5521 | + | UUGAUGCGCUUAGAGAA | 17 | 7077 |
| BCL11A-5522 | − | AACCUGAUCCCGGAGAA | 17 | 7078 |
| BCL11A-5523 | − | GAGCACUCCUCGGAGAA | 17 | 7079 |
| BCL11A-5524 | + | CUGGGUACUACGCCGAA | 17 | 7080 |
| BCL11A-5525 | + | UCUCCGAAGCUAAGGAA | 17 | 7081 |
| BCL11A-5526 | + | GGGGGCGUCGCCAGGAA | 17 | 7082 |
| BCL11A-5527 | + | UUGCUACCUGGCUGGAA | 17 | 7083 |
| BCL11A-5528 | + | CUGCACCUAGUCCUGAA | 17 | 7084 |
| BCL11A-5529 | + | AACCAUGCACUGGUGAA | 17 | 7085 |
| BCL11A-5530 | + | AUUUUCUCAGAACUUAA | 17 | 7086 |
| BCL11A-5531 | + | UAUUCUUAGCAGGUUAA | 17 | 7087 |
| BCL11A-5532 | − | GACGAUGGCACUGUUAA | 17 | 7088 |
| BCL11A-5533 | + | CGGUGGUGGACUAAACA | 17 | 7089 |
| BCL11A-5534 | − | GGCCGCGAUGCCCAACA | 17 | 7090 |
| BCL11A-5535 | − | UACUUAGAAAGCGAACA | 17 | 7091 |
| BCL11A-2969 | − | GCACCGGCGCAGCCACA | 17 | 7092 |
| BCL11A-2924 | − | CGAGGCCGAGGGCCACA | 17 | 7093 |
| BCL11A-5536 | − | CCCGAGUGCCUUUGACA | 17 | 7094 |
| BCL11A-5537 | + | CUUGAACUUGGCCACCA | 17 | 7095 |
| BCL11A-5538 | − | AAAAUUUGAAGCCCCCA | 17 | 7096 |
| BCL11A-5539 | + | CUGCAAUAUGAAUCCCA | 17 | 7097 |
| BCL11A-5540 | − | UAUGGAGCCUCCCGCCA | 17 | 7098 |
| BCL11A-5541 | + | CGGGUGAUGGGUGGCCA | 17 | 7099 |
| BCL11A-5542 | + | UCUCCUAGAGAAAUCCA | 17 | 7100 |
| BCL11A-5543 | − | UCCCAGCCACCUCUCCA | 17 | 7101 |
| BCL11A-5544 | − | CUCGGGGCGCAGCGGCA | 17 | 7102 |
| BCL11A-5545 | − | CGACGUCAUGCAGGGCA | 17 | 7103 |
| BCL11A-5546 | + | CUGCAUGACGUCGGGCA | 17 | 7104 |
| BCL11A-5547 | − | GACUUAGAGAGCUGGCA | 17 | 7105 |
| BCL11A-5548 | − | CUGCCCGACGUCAUGCA | 17 | 7106 |
| BCL11A-5549 | + | CUCGCUGAAGUGCUGCA | 17 | 7107 |
| BCL11A-5550 | − | AGCCAUUCACCAGUGCA | 17 | 7108 |
| BCL11A-5551 | − | CACGCACAGAACACUCA | 17 | 7109 |
| BCL11A-5552 | + | GUCGGACUUGACCGUCA | 17 | 7110 |
| BCL11A-5553 | + | ACCAACCCGCGGGGUCA | 17 | 7111 |
| BCL11A-5554 | − | AGGCCCAGCUCAAAAGA | 17 | 7112 |
| BCL11A-5555 | − | GCUUCCGGCCUGGCAGA | 17 | 7113 |
| BCL11A-5556 | − | CCUGGGGGCGGAAGAGA | 17 | 7114 |
| BCL11A-5557 | + | CUUGAUGCGCUUAGAGA | 17 | 7115 |
| BCL11A-5558 | − | GCUGACGGAGAGCGAGA | 17 | 7116 |
| BCL11A-5559 | − | GCGCAUCAAGCUCGAGA | 17 | 7117 |
| BCL11A-5560 | − | UCGGACCGCAUAGACGA | 17 | 7118 |
| BCL11A-5561 | − | ACGGUCAAGUCCGACGA | 17 | 7119 |
| BCL11A-5562 | − | CACCUGGCCGAGGCCGA | 17 | 7120 |
| BCL11A-5563 | + | GUCUCCGAAGCUAAGGA | 17 | 7121 |
| BCL11A-5564 | + | GGGGGGCGUCGCCAGGA | 17 | 7122 |
| BCL11A-5565 | + | AGGUUGGAGACAGAGGA | 17 | 7123 |
| BCL11A-5566 | + | GGGCGGAUUGCAGAGGA | 17 | 7124 |
| BCL11A-5567 | + | GGGGCUGGGAGGGAGGA | 17 | 7125 |
| BCL11A-5568 | − | CCGGGGAGCUGGACGGA | 17 | 7126 |
| BCL11A-5569 | − | GUGUGGCAGUUUUCGGA | 17 | 7127 |
| BCL11A-5570 | + | GGAUUGCAGAGGAGGGA | 17 | 7128 |
| BCL11A-5571 | + | UUGACCGGGGGCUGGGA | 17 | 7129 |
| BCL11A-5572 | + | UGGAGAGGUGGCUGGGA | 17 | 7130 |
| BCL11A-5573 | − | CCGCCCGGGGAGCUGGA | 17 | 7131 |
| BCL11A-5574 | − | GCGGCACGGGAAGUGGA | 17 | 7132 |
| BCL11A-5575 | + | GCCCAGGACCUGGUGGA | 17 | 7133 |
| BCL11A-5576 | − | CAAAUCGUCCCCCAUGA | 17 | 7134 |
| BCL11A-5577 | + | UCUGCACCUAGUCCUGA | 17 | 7135 |
| BCL11A-5578 | − | GGAGGAGGAGGAGCUGA | 17 | 7136 |
| BCL11A-5579 | + | CAAAGGCACUCGGGUGA | 17 | 7137 |
| BCL11A-5580 | + | GGCCCGGACCACUAAUA | 17 | 7138 |
| BCL11A-5581 | + | GCAGUAACCUUUGCAUA | 17 | 7139 |
| BCL11A-5582 | − | AGCGAGAGGGUGGACUA | 17 | 7140 |
| BCL11A-5583 | + | UGGAGUCUCCGAAGCUA | 17 | 7141 |
| BCL11A-5584 | − | GUUGAAUCCAAUGGCUA | 17 | 7142 |
| BCL11A-5585 | + | CACAGGUUGCACUUGUA | 17 | 7143 |
| BCL11A-5586 | + | AAUUUUCUCAGAACUUA | 17 | 7144 |
| BCL11A-5587 | + | UCGGUGGUGGACUAAAC | 17 | 7145 |
| BCL11A-5588 | − | ACCUGAUCCCGGAGAAC | 17 | 7146 |
| BCL11A-5589 | − | AGCACUCCUCGGAGAAC | 17 | 7147 |
| BCL11A-2979 | − | CACCGGCGCAGCCACAC | 17 | 7148 |
| BCL11A-2916 | − | CCGAGGCCGAGGGCCAC | 17 | 7149 |
| BCL11A-5590 | + | UGCACGCGUGGUCGCAC | 17 | 7150 |
| BCL11A-5591 | − | UCGGGGCGCAGCGGCAC | 17 | 7151 |
| BCL11A-5592 | + | CAAGAGAAACCAUGCAC | 17 | 7152 |
| BCL11A-5593 | − | GCAACCUGGUGGUGCAC | 17 | 7153 |
| BCL11A-5594 | + | GCAGCAGCUUUUUGGAC | 17 | 7154 |
| BCL11A-5595 | + | CAUGACUUGGACUUGAC | 17 | 7155 |
| BCL11A-5596 | − | ACCCGAGUGCCUUUGAC | 17 | 7156 |
| BCL11A-5597 | − | CAAAUUUCAGAGCAACC | 17 | 7157 |
| BCL11A-5598 | − | GCCAGCUCCCCGGAACC | 17 | 7158 |
| BCL11A-5599 | + | UGCGCCGGUGCACCACC | 17 | 7159 |
| BCL11A-5600 | − | GCAUAAGCGCGGCCACC | 17 | 7160 |
| BCL11A-5601 | − | CAGCGAGGCCUUCCACC | 17 | 7161 |
| BCL11A-5602 | + | GCUUCUCGCCCAGGACC | 17 | 7162 |
| BCL11A-5603 | + | AUGACUUGGACUUGACC | 17 | 7163 |
| BCL11A-5604 | − | AACCUGCUAAGAAUACC | 17 | 7164 |
| BCL11A-5605 | + | AAGGGCGGCUUGCUACC | 17 | 7165 |
| BCL11A-5606 | − | CGACCACGCGUGCACCC | 17 | 7166 |
| BCL11A-5607 | − | GAAAAUUUGAAGCCCCC | 17 | 7167 |
| BCL11A-5608 | + | CCAUCUCUUCCGCCCCC | 17 | 7168 |
| BCL11A-5609 | − | UCCUCCCUCCCAGCCCC | 17 | 7169 |
| BCL11A-5610 | − | GGAGUUCGACCUGCCCC | 17 | 7170 |
| BCL11A-5611 | + | CCUCCGUCCAGCUCCCC | 17 | 7171 |
| BCL11A-5612 | − | GGCCGCGGCUGCUCCCC | 17 | 7172 |
| BCL11A-5613 | − | AGCCCACCGCUGUCCCC | 17 | 7173 |
| BCL11A-5614 | − | GCUUCUCCACACCGCCC | 17 | 7174 |
| BCL11A-5615 | + | CCGAGGCCGACUCGCCC | 17 | 7175 |
| BCL11A-5616 | + | GCUUAUGCUUCUCGCCC | 17 | 7176 |
| BCL11A-5617 | − | AUUAGUGGUCCGGGCCC | 17 | 7177 |
| BCL11A-5618 | − | GGCGGAAGAGAUGGCCC | 17 | 7178 |
| BCL11A-5619 | + | UUGAGCUGGGCCUGCCC | 17 | 7179 |
| BCL11A-5620 | − | CUCCACCGCCAGCUCCC | 17 | 7180 |
| BCL11A-5621 | + | CCCUCCGUCCAGCUCCC | 17 | 7181 |
| BCL11A-5622 | − | UGGCCGCGGCUGCUCCC | 17 | 7182 |
| BCL11A-5623 | − | CUGCAACCAUUCCAGCC | 17 | 7183 |
| BCL11A-5624 | − | CGGCUUCGGGCUGAGCC | 17 | 7184 |
| BCL11A-5625 | − | CGCUUCUCCACACCGCC | 17 | 7185 |
| BCL11A-5626 | − | CCACCGCAUAGAGCGCC | 17 | 7186 |
| BCL11A-5627 | + | CCCGAGGCCGACUCGCC | 17 | 7187 |
| BCL11A-5628 | + | GGAGGGGGGGCGUCGCC | 17 | 7188 |
| BCL11A-5629 | + | AUAGGGCUGGGCCGGCC | 17 | 7189 |
| BCL11A-5630 | − | GAGAGAGGCUUCCGGCC | 17 | 7190 |
| BCL11A-5631 | + | UGUUGGGCAUCGCGGCC | 17 | 7191 |
| BCL11A-5632 | + | GGCCCUCGGCCUCGGCC | 17 | 7192 |
| BCL11A-5633 | + | CUGGGCCUGCCCGGGCC | 17 | 7193 |
| BCL11A-5634 | − | UAUUAGUGGUCCGGGCC | 17 | 7194 |
| BCL11A-5635 | + | GCUUCAGCUUGCUGGCC | 17 | 7195 |
| BCL11A-5636 | + | UCGGGUGAUGGGUGGCC | 17 | 7196 |
| BCL11A-5637 | + | UUUGAGCUGGGCCUGCC | 17 | 7197 |
| BCL11A-5638 | + | GGGAUCUUUGAGCUGCC | 17 | 7198 |
| BCL11A-5639 | + | GAAAGCGCCCUUCUGCC | 17 | 7199 |
| BCL11A-5640 | + | ACCAAGUCGCUGGUGCC | 17 | 7200 |
| BCL11A-5641 | + | UCUCUCGAUACUGAUCC | 17 | 7201 |
| BCL11A-5642 | − | CGACCCCAACCUGAUCC | 17 | 7202 |
| BCL11A-5643 | + | GGUGGCGCGCCGCCUCC | 17 | 7203 |
| BCL11A-5644 | − | CCGGCUACGCGGCCUCC | 17 | 7204 |
| BCL11A-5645 | + | CCUCGUCCCCGUUCUCC | 17 | 7205 |
| BCL11A-5646 | − | GGCCUUCCACCAGGUCC | 17 | 7206 |
| BCL11A-5647 | − | CCCCAUAUUAGUGGUCC | 17 | 7207 |
| BCL11A-5648 | − | UAGCAAGCCGCCCUUCC | 17 | 7208 |
| BCL11A-5649 | + | CGCUGGUGCCGGGUUCC | 17 | 7209 |
| BCL11A-5650 | − | UAGGAGACUUAGAGAGC | 17 | 7210 |
| BCL11A-5651 | + | GAAGGGGCUCAGCGAGC | 17 | 7211 |
| BCL11A-2886 | − | CACACCGCCCGGGGAGC | 17 | 7212 |
| BCL11A-5652 | + | GCCGGGUUCCGGGGAGC | 17 | 7213 |
| BCL11A-5653 | + | UCUGCCCUCUUUUGAGC | 17 | 7214 |
| BCL11A-5654 | + | CCUGGAGGCCGCGUAGC | 17 | 7215 |
| BCL11A-5655 | + | AUCCUGGUAUUCUUAGC | 17 | 7216 |
| BCL11A-5656 | + | AAGGGAUACCAACCCGC | 17 | 7217 |
| BCL11A-5657 | − | AAGUCCCCUGACCCCGC | 17 | 7218 |
| BCL11A-5658 | + | CGCCCGUGUGGCUGCGC | 17 | 7219 |
| BCL11A-5659 | + | UAUGCGGUCCGACUCGC | 17 | 7220 |
| BCL11A-5660 | − | CCACGAGAACAGCUCGC | 17 | 7221 |
| BCL11A-5661 | − | UACUCGCAGUGGCUCGC | 17 | 7222 |
| BCL11A-5662 | + | GCUGCCCACCAAGUCGC | 17 | 7223 |
| BCL11A-5663 | − | CACCGCUGUCCCCAGGC | 17 | 7224 |
| BCL11A-5664 | + | GCGCCCUUCUGCCAGGC | 17 | 7225 |
| BCL11A-5665 | + | GUGUUGGGCAUCGCGGC | 17 | 7226 |
| BCL11A-5666 | + | UAACCUUUGCAUAGGGC | 17 | 7227 |
| BCL11A-5667 | − | GUGGUCCGGGCCCGGGC | 17 | 7228 |
| BCL11A-5668 | + | CCUGCAUGACGUCGGGC | 17 | 7229 |
| BCL11A-5669 | + | UGGACUUGACCGGGGGC | 17 | 7230 |
| BCL11A-5670 | + | GCAUCGCGGCCGGGGGC | 17 | 7231 |
| BCL11A-5671 | + | UUUGCAUAGGGCUGGGC | 17 | 7232 |
| BCL11A-5672 | + | CUAGAGAAAUCCAUGGC | 17 | 7233 |
| BCL11A-5673 | + | GCGGCUUGCUACCUGGC | 17 | 7234 |
| BCL11A-5674 | − | AGACUUAGAGAGCUGGC | 17 | 7235 |
| BCL11A-5675 | + | UCCCAUGGAGAGGUGGC | 17 | 7236 |
| BCL11A-5676 | − | GACGAAGACUCGGUGGC | 17 | 7237 |
| BCL11A-5677 | − | CCUGCCCGACGUCAUGC | 17 | 7238 |
| BCL11A-5394 | + | UGUACAUGUGUAGCUGC | 17 | 7239 |
| BCL11A-5678 | + | GGACUUGAGCGCGCUGC | 17 | 7240 |
| BCL11A-5679 | − | GUCCAAAAAGCUGCUGC | 17 | 7241 |
| BCL11A-5680 | + | CACCAAGUCGCUGGUGC | 17 | 7242 |
| BCL11A-5681 | + | GUGGCGCUUCAGCUUGC | 17 | 7243 |
| BCL11A-5682 | + | CCCCGUUCUCCGGGAUC | 17 | 7244 |
| BCL11A-5683 | + | CCCUGUCAAAGGCACUC | 17 | 7245 |
| BCL11A-5684 | − | CCGGGCGAGUCGGCCUC | 17 | 7246 |
| BCL11A-5685 | − | CUGGACGGAGGGAUCUC | 17 | 7247 |
| BCL11A-5686 | + | ACACAUCUUGAGCUCUC | 17 | 7248 |
| BCL11A-5687 | + | UCCUCGUCCCCGUUCUC | 17 | 7249 |
| BCL11A-5688 | + | AUGCCCUGCAUGACGUC | 17 | 7250 |
| BCL11A-5689 | + | UACCAACCCGCGGGGUC | 17 | 7251 |
| BCL11A-5690 | − | GCCCCAUAUUAGUGGUC | 17 | 7252 |
| BCL11A-5691 | + | GGCAAAAGGCGAUUGUC | 17 | 7253 |
| BCL11A-5692 | − | CGGGUUGGUAUCCCUUC | 17 | 7254 |
| BCL11A-5693 | − | GUAUCGAGAGAGGCUUC | 17 | 7255 |
| BCL11A-5694 | − | GGGUGGACUACGGCUUC | 17 | 7256 |
| BCL11A-5695 | + | UCGCUGGUGCCGGGUUC | 17 | 7257 |
| BCL11A-5696 | − | CAGGCCCAGCUCAAAAG | 17 | 7258 |
| BCL11A-5697 | + | GUGAAGAACCUAGAAAG | 17 | 7259 |
| BCL11A-5698 | + | UUCUUAGCAGGUUAAAG | 17 | 7260 |
| BCL11A-3087 | − | CGAGGAAGAGGAAGAAG | 17 | 7261 |
| BCL11A-5699 | + | UGAUGCGCUUAGAGAAG | 17 | 7262 |
| BCL11A-3083 | − | GGAGGACGACGAGGAAG | 17 | 7263 |
| BCL11A-3089 | − | GGAAGAAGAGGAGGAAG | 17 | 7264 |
| BCL11A-3075 | − | CGGGGACGAGGAGGAAG | 17 | 7265 |
| BCL11A-2876 | − | CGCAGCGGCACGGGAAG | 17 | 7266 |
| BCL11A-5700 | + | GGUGGUGGACUAAACAG | 17 | 7267 |
| BCL11A-5701 | + | AAAGAGGUUGGAGACAG | 17 | 7268 |
| BCL11A-5702 | + | GGCCGGCCUGGGGACAG | 17 | 7269 |
| BCL11A-5703 | − | AAAUUUGAAGCCCCCAG | 17 | 7270 |
| BCL11A-5704 | − | GGGAUCUCGGGGCGCAG | 17 | 7271 |
| BCL11A-5705 | − | AGAACGUGUACUCGCAG | 17 | 7272 |
| BCL11A-5706 | + | GGAGGGGCGGAUUGCAG | 17 | 7273 |
| BCL11A-5707 | + | CCAACCCGCGGGGUCAG | 17 | 7274 |
| BCL11A-5708 | − | AGGAUCAGUAUCGAGAG | 17 | 7275 |
| BCL11A-5709 | − | AGCUGACGGAGAGCGAG | 17 | 7276 |
| BCL11A-5710 | + | GGUUGGAGACAGAGGAG | 17 | 7277 |
| BCL11A-5711 | + | GGGCUGGGAGGGAGGAG | 17 | 7278 |
| BCL11A-5712 | + | GAUUGCAGAGGAGGGAG | 17 | 7279 |
| BCL11A-5713 | + | ACUAAACAGGGGGGGAG | 17 | 7280 |
| BCL11A-5714 | + | AUAUGAAUCCCAUGGAG | 17 | 7281 |
| BCL11A-5715 | − | AGCACGCCCCAUAUUAG | 17 | 7282 |
| BCL11A-5716 | − | CCUGAUCCCGGAGAACG | 17 | 7283 |
| BCL11A-3081 | − | GGAAGAGGAGGACGACG | 17 | 7284 |
| BCL11A-5717 | + | CGAGGAGUGCUCCGACG | 17 | 7285 |
| BCL11A-2837 | − | CCCGGAGAACGGGGACG | 17 | 7286 |
| BCL11A-5718 | − | GUGGCUCGCCGGCUACG | 17 | 7287 |
| BCL11A-5719 | + | UGACUUGGACUUGACCG | 17 | 7288 |
| BCL11A-5720 | + | GAAGGGAUACCAACCCG | 17 | 7289 |
| BCL11A-5721 | − | GAAGUCCCCUGACCCCG | 17 | 7290 |
| BCL11A-5722 | + | UUUGGACAGGCCCCCCG | 17 | 7291 |
| BCL11A-5723 | − | CUUCUCCACACCGCCCG | 17 | 7292 |
| BCL11A-5724 | + | CGAGGCCGACUCGCCCG | 17 | 7293 |
| BCL11A-2946 | + | CGCCCGGGGAGCAGCCG | 17 | 7294 |
| BCL11A-5725 | − | CCACCUGGCCGAGGCCG | 17 | 7295 |
| BCL11A-5726 | + | GUUGGGCAUCGCGGCCG | 17 | 7296 |
| BCL11A-5727 | − | GGCACUGUUAAUGGCCG | 17 | 7297 |
| BCL11A-5728 | − | GCGCGGCCACCUGGCCG | 17 | 7298 |
| BCL11A-5729 | + | CAAACUCCCGUUCUCCG | 17 | 7299 |
| BCL11A-5730 | − | CAGCGCGCUCAAGUCCG | 17 | 7300 |
| BCL11A-5731 | + | GCUGGUGCCGGGUUCCG | 17 | 7301 |
| BCL11A-5732 | − | GGCGAGAAGCAUAAGCG | 17 | 7302 |
| BCL11A-5733 | − | CAUGCAGCACUUCAGCG | 17 | 7303 |
| BCL11A-5734 | + | UGGCCUGGGUGCACGCG | 17 | 7304 |
| BCL11A-5735 | + | AGGGAUACCAACCCGCG | 17 | 7305 |
| BCL11A-5736 | − | CACGAGAACAGCUCGCG | 17 | 7306 |
| BCL11A-5737 | + | UGACGUCGGGCAGGGCG | 17 | 7307 |
| BCL11A-5738 | − | GAACAGCUCGCGGGGCG | 17 | 7308 |
| BCL11A-5739 | − | GGGCGCGGUCGUGGGCG | 17 | 7309 |
| BCL11A-5740 | + | CUCCGUGUUGGGCAUCG | 17 | 7310 |
| BCL11A-5741 | − | CGGGCGAGUCGGCCUCG | 17 | 7311 |
| BCL11A-5742 | − | ACCACGAGAACAGCUCG | 17 | 7312 |
| BCL11A-5743 | − | UGGACGGAGGGAUCUCG | 17 | 7313 |
| BCL11A-5744 | + | CCCGCGAGCUGUUCUCG | 17 | 7314 |
| BCL11A-5745 | − | CUCGCGGGGCGCGGUCG | 17 | 7315 |
| BCL11A-5746 | + | GUGGUGGACUAAACAGG | 17 | 7316 |
| BCL11A-5747 | + | CCUCGGCCUCGGCCAGG | 17 | 7317 |
| BCL11A-3090 | − | GGAAGAGGAAGAAGAGG | 17 | 7318 |
| BCL11A-3091 | − | AGAAGAGGAGGAAGAGG | 17 | 7319 |
| BCL11A-3088 | − | GGACGAGGAGGAAGAGG | 17 | 7320 |
| BCL11A-5748 | + | GAGGUUGGAGACAGAGG | 17 | 7321 |
| BCL11A-5749 | + | GGGGCGGAUUGCAGAGG | 17 | 7322 |
| BCL11A-5750 | + | UGAAUCCCAUGGAGAGG | 17 | 7323 |
| BCL11A-5751 | + | GGAGUGCUCCGACGAGG | 17 | 7324 |
| BCL11A-3066 | − | GGAGAACGGGGACGAGG | 17 | 7325 |
| BCL11A-3092 | − | AGAGGAGGAAGAGGAGG | 17 | 7326 |
| BCL11A-5752 | + | GUUGGAGACAGAGGAGG | 17 | 7327 |
| BCL11A-3093 | − | GGAGGAAGAGGAGGAGG | 17 | 7328 |
| BCL11A-5753 | + | AUUGCAGAGGAGGGAGG | 17 | 7329 |
| BCL11A-5754 | + | GGGGGCUGGGAGGGAGG | 17 | 7330 |
| BCL11A-5755 | − | CGGGCUGAGCCUGGAGG | 17 | 7331 |
| BCL11A-5756 | − | CCCGGGGAGCUGGACGG | 17 | 7332 |
| BCL11A-5757 | + | GACUUGGACUUGACCGG | 17 | 7333 |
| BCL11A-5758 | + | UUGGGCAUCGCGGCCGG | 17 | 7334 |
| BCL11A-5759 | + | CGGCCUGGGGACAGCGG | 17 | 7335 |
| BCL11A-5760 | + | UUCCGGGGAGCUGGCGG | 17 | 7336 |
| BCL11A-5761 | + | CCAGGCGCUCUAUGCGG | 17 | 7337 |
| BCL11A-5762 | − | UUGCGACGAAGACUCGG | 17 | 7338 |
| BCL11A-5763 | − | GGGCGAGUCGGCCUCGG | 17 | 7339 |
| BCL11A-5764 | + | UCCAAGUGAUGUCUCGG | 17 | 7340 |
| BCL11A-5765 | + | GGCGUCGCCAGGAAGGG | 17 | 7341 |
| BCL11A-5766 | + | UGGUGGACUAAACAGGG | 17 | 7342 |
| BCL11A-3076 | − | GACGGAGAGCGAGAGGG | 17 | 7343 |
| BCL11A-5767 | + | CGGAUUGCAGAGGAGGG | 17 | 7344 |
| BCL11A-5768 | + | UUGCAGAGGAGGGAGGG | 17 | 7345 |
| BCL11A-5769 | + | ACCGGGGGCUGGGAGGG | 17 | 7346 |
| BCL11A-5770 | + | CCGUCCAGCUCCCCGGG | 17 | 7347 |
| BCL11A-5771 | + | GAGAAAUCCAUGGCGGG | 17 | 7348 |
| BCL11A-5772 | − | GGCGAGUCGGCCUCGGG | 17 | 7349 |
| BCL11A-5773 | + | GGUGGACUAAACAGGGG | 17 | 7350 |
| BCL11A-5774 | − | UUUGAAGCCCCCAGGGG | 17 | 7351 |
| BCL11A-5775 | + | CUGGGAGGGAGGAGGGG | 17 | 7352 |
| BCL11A-5776 | + | UGCAGAGGAGGGAGGGG | 17 | 7353 |
| BCL11A-5777 | − | CAUAGAGCGCCUGGGGG | 17 | 7354 |
| BCL11A-5778 | − | AGCCCCCAGGGGUGGGG | 17 | 7355 |
| BCL11A-5779 | + | GGCACUCGGGUGAUGGG | 17 | 7356 |
| BCL11A-5780 | + | CUUGACCGGGGGCUGGG | 17 | 7357 |
| BCL11A-5781 | + | AACAGGGGGGGAGUGGG | 17 | 7358 |
| BCL11A-5782 | + | GGUACUACGCCGAAUGG | 17 | 7359 |
| BCL11A-5783 | + | CCUAGAGAAAUCCAUGG | 17 | 7360 |
| BCL11A-5784 | + | GGACUUGACCGUCAUGG | 17 | 7361 |
| BCL11A-5785 | − | AUUUCAGAGCAACCUGG | 17 | 7362 |
| BCL11A-5786 | + | UCUCGCCCAGGACCUGG | 17 | 7363 |
| BCL11A-5787 | − | CUUCGGGCUGAGCCUGG | 17 | 7364 |
| BCL11A-5788 | − | CCGCAUAGAGCGCCUGG | 17 | 7365 |
| BCL11A-5789 | + | AUCUUUGAGCUGCCUGG | 17 | 7366 |
| BCL11A-5790 | + | GGGUUCCGGGGAGCUGG | 17 | 7367 |
| BCL11A-5791 | − | AGCGGCACGGGAAGUGG | 17 | 7368 |
| BCL11A-5792 | − | CGCGCUCAAGUCCGUGG | 17 | 7369 |
| BCL11A-5793 | + | GCGAGCUGUUCUCGUGG | 17 | 7370 |
| BCL11A-5794 | + | GGCGCUCUAUGCGGUGG | 17 | 7371 |
| BCL11A-5795 | + | AAGUGAUGUCUCGGUGG | 17 | 7372 |
| BCL11A-5796 | − | CGGCACCAGCGACUUGG | 17 | 7373 |
| BCL11A-5797 | + | GGGUACUACGCCGAAUG | 17 | 7374 |
| BCL11A-5798 | + | CGGACUUGACCGUCAUG | 17 | 7375 |
| BCL11A-5799 | + | GCAUGUGCGUCUUCAUG | 17 | 7376 |
| BCL11A-5800 | + | CCCGGACCACUAAUAUG | 17 | 7377 |
| BCL11A-5801 | + | CCCCCAGGCGCUCUAUG | 17 | 7378 |
| BCL11A-5802 | + | CAGUGCCAUCGUCUAUG | 17 | 7379 |
| BCL11A-5803 | − | GACACUUGUGAGUACUG | 17 | 7380 |
| BCL11A-5804 | + | CGUCGCAAGUGUCCCUG | 17 | 7381 |
| BCL11A-5805 | − | ACCGCAUAGAGCGCCUG | 17 | 7382 |
| BCL11A-5806 | + | AGGGCUGGGCCGGCCUG | 17 | 7383 |
| BCL11A-5807 | + | AGGGGCUCAGCGAGCUG | 17 | 7384 |
| BCL11A-5808 | − | CCUUUGACAGGGUGCUG | 17 | 7385 |
| BCL11A-5809 | − | AAGUCAUGCGAGUUCUG | 17 | 7386 |
| BCL11A-5810 | + | AGGGCUUCUCGCCCGUG | 17 | 7387 |
| BCL11A-5811 | + | CAGCUCCCCGGGCGGUG | 17 | 7388 |
| BCL11A-5812 | + | AGGCGCUCUAUGCGGUG | 17 | 7389 |
| BCL11A-5813 | − | UGAAGCCCCCAGGGGUG | 17 | 7390 |
| BCL11A-5814 | − | AGAGAGCUCAAGAUGUG | 17 | 7391 |
| BCL11A-5815 | + | UCUCCGGGAUCAGGUUG | 17 | 7392 |
| BCL11A-5816 | + | UGGGUACUACGCCGAAU | 17 | 7393 |
| BCL11A-5817 | + | GGAGGCUCCAUAGCCAU | 17 | 7394 |
| BCL11A-5818 | − | CCCAGCCACCUCUCCAU | 17 | 7395 |
| BCL11A-5819 | + | UGCAGUAACCUUUGCAU | 17 | 7396 |
| BCL11A-5820 | + | UCGGACUUGACCGUCAU | 17 | 7397 |
| BCL11A-5821 | + | AAAGGCACUCGGGUGAU | 17 | 7398 |
| BCL11A-5822 | + | GCCCGGACCACUAAUAU | 17 | 7399 |
| BCL11A-5823 | + | GUUCUCGCUCUUGAACU | 17 | 7400 |
| BCL11A-5824 | + | ACCCUGUCAAAGGCACU | 17 | 7401 |
| BCL11A-5825 | − | ACCACCGAGACAUCACU | 17 | 7402 |
| BCL11A-5826 | − | CACUUGCGACGAAGACU | 17 | 7403 |
| BCL11A-5827 | − | ACCCGGCACCAGCGACU | 17 | 7404 |
| BCL11A-5828 | − | GGUAUCCCUUCAGGACU | 17 | 7405 |
| BCL11A-5829 | + | GCAGAACUCGCAUGACU | 17 | 7406 |
| BCL11A-5830 | + | AGUGUCCCUGUGGCCCU | 17 | 7407 |
| BCL11A-5831 | − | CACCGCAUAGAGCGCCU | 17 | 7408 |
| BCL11A-5832 | + | UAGGGCUGGGCCGGCCU | 17 | 7409 |
| BCL11A-5833 | + | CCUGUGGCCCUCGGCCU | 17 | 7410 |
| BCL11A-5834 | − | CCCGGGCGAGUCGGCCU | 17 | 7411 |
| BCL11A-5835 | + | CUUCAGCUUGCUGGCCU | 17 | 7412 |
| BCL11A-5836 | − | CUCGUCGGAGCACUCCU | 17 | 7413 |
| BCL11A-5837 | − | GCCUUCCACCAGGUCCU | 17 | 7414 |
| BCL11A-5838 | + | AAGGGGCUCAGCGAGCU | 17 | 7415 |
| BCL11A-5839 | + | CUGCCCUCUUUUGAGCU | 17 | 7416 |
| BCL11A-5840 | + | AACCUUUGCAUAGGGCU | 17 | 7417 |
| BCL11A-5841 | + | GGACUUGACCGGGGGCU | 17 | 7418 |
| BCL11A-5842 | + | CCCAUGGAGAGGUGGCU | 17 | 7419 |
| BCL11A-5434 | + | GUACAUGUGUAGCUGCU | 17 | 7420 |
| BCL11A-5843 | − | UCCAAAAAGCUGCUGCU | 17 | 7421 |
| BCL11A-5844 | − | GCUGGACGGAGGGAUCU | 17 | 7422 |
| BCL11A-5845 | + | CACAUCUUGAGCUCUCU | 17 | 7423 |
| BCL11A-5846 | − | CCGCCAUGGAUUUCUCU | 17 | 7424 |
| BCL11A-5847 | + | GGGUCCAAGUGAUGUCU | 17 | 7425 |
| BCL11A-5848 | − | GUCUCCAACCUCUUUCU | 17 | 7426 |
| BCL11A-5849 | − | CUCGGUGGCCGGCGAGU | 17 | 7427 |
| BCL11A-5850 | − | CUGCUCCCCGGGCGAGU | 17 | 7428 |
| BCL11A-5851 | + | CUAAACAGGGGGGGAGU | 17 | 7429 |
| BCL11A-5852 | + | CAUGCCCUGCAUGACGU | 17 | 7430 |
| BCL11A-5853 | − | GGCGCGGUCGUGGGCGU | 17 | 7431 |
| BCL11A-5854 | − | GCCUUUUGCCUCCUCGU | 17 | 7432 |
| BCL11A-5855 | + | GGUGGAGAGACCGUCGU | 17 | 7433 |
| BCL11A-5856 | − | UCGCGGGGCGCGGUCGU | 17 | 7434 |
| BCL11A-5857 | + | GUUCUCCGGGAUCAGGU | 17 | 7435 |
| BCL11A-5858 | + | AGAACCUAGAAAGAGGU | 17 | 7436 |
| BCL11A-5859 | + | GGCCUGGGGACAGCGGU | 17 | 7437 |
| BCL11A-5860 | + | CAGGCGCUCUAUGCGGU | 17 | 7438 |
| BCL11A-5861 | − | CCCCUGACCCCGCGGGU | 17 | 7439 |
| BCL11A-5862 | − | UUGAAGCCCCCAGGGGU | 17 | 7440 |
| BCL11A-5863 | − | GGCACCAGCGACUUGGU | 17 | 7441 |
| BCL11A-5864 | − | ACACUUGUGAGUACUGU | 17 | 7442 |
| BCL11A-5865 | + | GUACACGUUCUCCGUGU | 17 | 7443 |
| BCL11A-5866 | + | GCACAGGUUGCACUUGU | 17 | 7444 |
| BCL11A-5867 | − | CUUCACACACCCCCAUU | 17 | 7445 |
| BCL11A-5868 | − | GAUCCCUUCCUUAGCUU | 17 | 7446 |
| BCL11A-5869 | − | AGGGUGGACUACGGCUU | 17 | 7447 |
| BCL11A-5870 | + | UUCUCCGGGAUCAGGUU | 17 | 7448 |
| BCL11A-5871 | + | UACACGUUCUCCGUGUU | 17 | 7449 |
| BCL11A-5872 | + | GCCCAGCAGCAGCUUUU | 17 | 7450 |
| BCL11A-5873 | − | AGAUGUGUGGCAGUUUU | 17 | 7451 |
| BCL11A-5874 | + | UGCUCCGACGAGGAGGCAAA | 20 | 7452 |
| BCL11A-5875 | + | GGUAUUCUUAGCAGGUUAAA | 20 | 7453 |
| BCL11A-5876 | − | GGUGCUGCGGUUGAAUCCAA | 20 | 7454 |
| BCL11A-5877 | − | GCCGGCCCAGCCCUAUGCAA | 20 | 7455 |
| BCL11A-5878 | + | CAACCGCAGCACCCUGUCAA | 20 | 7456 |
| BCL11A-5879 | − | AGGCUUCCGGCCUGGCAGAA | 20 | 7457 |
| BCL11A-5880 | + | AGCUUGAUGCGCUUAGAGAA | 20 | 7458 |
| BCL11A-5881 | − | CCCAACCUGAUCCCGGAGAA | 20 | 7459 |
| BCL11A-5882 | − | UCGGAGCACUCCUCGGAGAA | 20 | 7460 |
| BCL11A-5883 | + | UCUCUGGGUACUACGCCGAA | 20 | 7461 |
| BCL11A-5884 | + | GAGUCUCCGAAGCUAAGGAA | 20 | 7462 |
| BCL11A-5885 | + | AGGGGGGGCGUCGCCAGGAA | 20 | 7463 |
| BCL11A-5886 | + | GGCUUGCUACCUGGCUGGAA | 20 | 7464 |
| BCL11A-5887 | + | AUUCUGCACCUAGUCCUGAA | 20 | 7465 |
| BCL11A-5888 | + | AGAAACCAUGCACUGGUGAA | 20 | 7466 |
| BCL11A-5889 | + | CAAAUUUUCUCAGAACUUAA | 20 | 7467 |
| BCL11A-5890 | + | UGGUAUUCUUAGCAGGUUAA | 20 | 7468 |
| BCL11A-5891 | − | AUAGACGAUGGCACUGUUAA | 20 | 7469 |
| BCL11A-5892 | + | UCUCGGUGGUGGACUAAACA | 20 | 7470 |
| BCL11A-5893 | − | CCCGGCCGCGAUGCCCAACA | 20 | 7471 |
| BCL11A-5894 | − | AUCUACUUAGAAAGCGAACA | 20 | 7472 |
| BCL11A-5895 | − | GGUGCACCGGCGCAGCCACA | 20 | 7473 |
| BCL11A-3377 | − | GGCCGAGGCCGAGGGCCACA | 20 | 7474 |
| BCL11A-5896 | − | UCACCCGAGUGCCUUUGACA | 20 | 7475 |
| BCL11A-5897 | + | GCUCUUGAACUUGGCCACCA | 20 | 7476 |
| BCL11A-5898 | − | GAGAAAAUUUGAAGCCCCCA | 20 | 7477 |
| BCL11A-5899 | + | UGUCUGCAAUAUGAAUCCCA | 20 | 7478 |
| BCL11A-5900 | − | GGCUAUGGAGCCUCCCGCCA | 20 | 7479 |
| BCL11A-5901 | + | ACUCGGGUGAUGGGUGGCCA | 20 | 7480 |
| BCL11A-5902 | + | AAGUCUCCUAGAGAAAUCCA | 20 | 7481 |
| BCL11A-5903 | − | CCUUCCCAGCCACCUCUCCA | 20 | 7482 |
| BCL11A-5904 | − | GAUCUCGGGGCGCAGCGGCA | 20 | 7483 |
| BCL11A-5905 | − | GCCCGACGUCAUGCAGGGCA | 20 | 7484 |
| BCL11A-5906 | + | GCCCUGCAUGACGUCGGGCA | 20 | 7485 |
| BCL11A-5907 | − | GGAGACUUAGAGAGCUGGCA | 20 | 7486 |
| BCL11A-5908 | − | GCCCUGCCCGACGUCAUGCA | 20 | 7487 |
| BCL11A-5909 | + | GGCCUCGCUGAAGUGCUGCA | 20 | 7488 |
| BCL11A-5910 | − | AACAGCCAUUCACCAGUGCA | 20 | 7489 |
| BCL11A-5911 | − | CAACACGCACAGAACACUCA | 20 | 7490 |
| BCL11A-5912 | + | GUCGUCGGACUUGACCGUCA | 20 | 7491 |
| BCL11A-5913 | + | GAUACCAACCCGCGGGGUCA | 20 | 7492 |
| BCL11A-5914 | − | GGCAGGCCCAGCUCAAAAGA | 20 | 7493 |
| BCL11A-5915 | − | GAGGCUUCCGGCCUGGCAGA | 20 | 7494 |
| BCL11A-5916 | − | GCGCCUGGGGGCGGAAGAGA | 20 | 7495 |
| BCL11A-5917 | + | GAGCUUGAUGCGCUUAGAGA | 20 | 7496 |
| BCL11A-5918 | − | GGAGCUGACGGAGAGCGAGA | 20 | 7497 |
| BCL11A-5919 | − | UAAGCGCAUCAAGCUCGAGA | 20 | 7498 |
| BCL11A-5920 | − | GAGUCGGACCGCAUAGACGA | 20 | 7499 |
| BCL11A-5921 | − | AUGACGGUCAAGUCCGACGA | 20 | 7500 |
| BCL11A-5922 | − | GGCCACCUGGCCGAGGCCGA | 20 | 7501 |
| BCL11A-5923 | + | GGAGUCUCCGAAGCUAAGGA | 20 | 7502 |
| BCL11A-5924 | + | GAGGGGGGGCGUCGCCAGGA | 20 | 7503 |
| BCL11A-5925 | + | AAGAGGUUGGAGACAGAGGA | 20 | 7504 |
| BCL11A-5926 | + | GAGGGGCGGAUUGCAGAGGA | 20 | 7505 |
| BCL11A-5927 | + | CCGGGGGCUGGGAGGGAGGA | 20 | 7506 |
| BCL11A-5928 | − | CGCCCGGGGAGCUGGACGGA | 20 | 7507 |
| BCL11A-5929 | − | GAUGUGUGGCAGUUUUCGGA | 20 | 7508 |
| BCL11A-5930 | + | GGCGGAUUGCAGAGGAGGGA | 20 | 7509 |
| BCL11A-5931 | + | GACUUGACCGGGGGCUGGGA | 20 | 7510 |
| BCL11A-5932 | + | CCAUGGAGAGGUGGCUGGGA | 20 | 7511 |
| BCL11A-5933 | − | ACACCGCCCGGGGAGCUGGA | 20 | 7512 |
| BCL11A-5934 | − | GCAGCGGCACGGGAAGUGGA | 20 | 7513 |
| BCL11A-5935 | + | CUCGCCCAGGACCUGGUGGA | 20 | 7514 |
| BCL11A-5936 | − | GCACAAAUCGUCCCCCAUGA | 20 | 7515 |
| BCL11A-5937 | + | CAUUCUGCACCUAGUCCUGA | 20 | 7516 |
| BCL11A-5938 | − | AGAGGAGGAGGAGGAGCUGA | 20 | 7517 |
| BCL11A-5939 | + | UGUCAAAGGCACUCGGGUGA | 20 | 7518 |
| BCL11A-5940 | + | CCGGGCCCGGACCACUAAUA | 20 | 7519 |
| BCL11A-5941 | + | GUUGCAGUAACCUUUGCAUA | 20 | 7520 |
| BCL11A-5942 | − | GAGAGCGAGAGGGUGGACUA | 20 | 7521 |
| BCL11A-5943 | + | GUCUGGAGUCUCCGAAGCUA | 20 | 7522 |
| BCL11A-5944 | − | GCGGUUGAAUCCAAUGGCUA | 20 | 7523 |
| BCL11A-5945 | + | UCGCACAGGUUGCACUUGUA | 20 | 7524 |
| BCL11A-5946 | + | UCAAAUUUUCUCAGAACUUA | 20 | 7525 |
| BCL11A-5947 | + | GUCUCGGUGGUGGACUAAAC | 20 | 7526 |
| BCL11A-5948 | − | CCAACCUGAUCCCGGAGAAC | 20 | 7527 |
| BCL11A-5949 | − | CGGAGCACUCCUCGGAGAAC | 20 | 7528 |
| BCL11A-5950 | − | GUGCACCGGCGCAGCCACAC | 20 | 7529 |
| BCL11A-5951 | − | UGGCCGAGGCCGAGGGCCAC | 20 | 7530 |
| BCL11A-5952 | + | GGGUGCACGCGUGGUCGCAC | 20 | 7531 |
| BCL11A-5953 | − | AUCUCGGGGCGCAGCGGCAC | 20 | 7532 |
| BCL11A-5954 | + | UUGCAAGAGAAACCAUGCAC | 20 | 7533 |
| BCL11A-5955 | − | AGAGCAACCUGGUGGUGCAC | 20 | 7534 |
| BCL11A-5956 | + | CCAGCAGCAGCUUUUUGGAC | 20 | 7535 |
| BCL11A-5957 | + | UCGCAUGACUUGGACUUGAC | 20 | 7536 |
| BCL11A-5958 | − | AUCACCCGAGUGCCUUUGAC | 20 | 7537 |
| BCL11A-5959 | − | GUUCAAAUUUCAGAGCAACC | 20 | 7538 |
| BCL11A-5960 | − | ACCGCCAGCUCCCCGGAACC | 20 | 7539 |
| BCL11A-5961 | + | GGCUGCGCCGGUGCACCACC | 20 | 7540 |
| BCL11A-5962 | − | GAAGCAUAAGCGCGGCCACC | 20 | 7541 |
| BCL11A-5963 | − | CUUCAGCGAGGCCUUCCACC | 20 | 7542 |
| BCL11A-5964 | + | UAUGCUUCUCGCCCAGGACC | 20 | 7543 |
| BCL11A-5965 | + | CGCAUGACUUGGACUUGACC | 20 | 7544 |
| BCL11A-5966 | − | UUUAACCUGCUAAGAAUACC | 20 | 7545 |
| BCL11A-5967 | + | AGGAAGGGCGGCUUGCUACC | 20 | 7546 |
| BCL11A-5968 | − | GUGCGACCACGCGUGCACCC | 20 | 7547 |
| BCL11A-5969 | − | UGAGAAAAUUUGAAGCCCCC | 20 | 7548 |
| BCL11A-5970 | + | GGGCCAUCUCUUCCGCCCCC | 20 | 7549 |
| BCL11A-5971 | − | CCCUCCUCCCUCCCAGCCCC | 20 | 7550 |
| BCL11A-5972 | − | GAAGGAGUUCGACCUGCCCC | 20 | 7551 |
| BCL11A-5973 | + | AUCCCUCCGUCCAGCUCCCC | 20 | 7552 |
| BCL11A-5974 | − | AAUGGCCGCGGCUGCUCCCC | 20 | 7553 |
| BCL11A-5975 | − | UCUAGCCCACCGCUGUCCCC | 20 | 7554 |
| BCL11A-5976 | − | UGCGCUUCUCCACACCGCCC | 20 | 7555 |
| BCL11A-5977 | + | CCCCCGAGGCCGACUCGCCC | 20 | 7556 |
| BCL11A-5978 | + | CGCGCUUAUGCUUCUCGCCC | 20 | 7557 |
| BCL11A-5979 | − | CAUAUUAGUGGUCCGGGCCC | 20 | 7558 |
| BCL11A-5980 | − | GGGGGCGGAAGAGAUGGCCC | 20 | 7559 |
| BCL11A-5981 | + | CUUUUGAGCUGGGCCUGCCC | 20 | 7560 |
| BCL11A-5982 | − | UCUCUCCACCGCCAGCUCCC | 20 | 7561 |
| BCL11A-5983 | + | GAUCCCUCCGUCCAGCUCCC | 20 | 7562 |
| BCL11A-5984 | − | UAAUGGCCGCGGCUGCUCCC | 20 | 7563 |
| BCL11A-5985 | − | UUACUGCAACCAUUCCAGCC | 20 | 7564 |
| BCL11A-5986 | − | CUACGGCUUCGGGCUGAGCC | 20 | 7565 |
| BCL11A-5987 | − | UUGCGCUUCUCCACACCGCC | 20 | 7566 |
| BCL11A-5988 | − | CCCCCACCGCAUAGAGCGCC | 20 | 7567 |
| BCL11A-5989 | + | CCCCCCGAGGCCGACUCGCC | 20 | 7568 |
| BCL11A-5990 | + | GAGGGAGGGGGGGCGUCGCC | 20 | 7569 |
| BCL11A-5991 | + | UGCAUAGGGCUGGGCCGGCC | 20 | 7570 |
| BCL11A-5992 | − | AUCGAGAGAGGCUUCCGGCC | 20 | 7571 |
| BCL11A-5993 | + | CCGUGUUGGGCAUCGCGGCC | 20 | 7572 |
| BCL11A-5994 | + | UGUGGCCCUCGGCCUCGGCC | 20 | 7573 |
| BCL11A-5995 | + | GAGCUGGGCCUGCCCGGGCC | 20 | 7574 |
| BCL11A-5996 | − | CCAUAUUAGUGGUCCGGGCC | 20 | 7575 |
| BCL11A-5997 | + | GGCGCUUCAGCUUGCUGGCC | 20 | 7576 |
| BCL11A-5998 | + | CACUCGGGUGAUGGGUGGCC | 20 | 7577 |
| BCL11A-5999 | + | UCUUUUGAGCUGGGCCUGCC | 20 | 7578 |
| BCL11A-6000 | + | GAAGGGAUCUUUGAGCUGCC | 20 | 7579 |
| BCL11A-6001 | + | GUGGAAAGCGCCCUUCUGCC | 20 | 7580 |
| BCL11A-6002 | + | CCCACCAAGUCGCUGGUGCC | 20 | 7581 |
| BCL11A-6003 | + | GCCUCUCUCGAUACUGAUCC | 20 | 7582 |
| BCL11A-6004 | − | GAACGACCCCAACCUGAUCC | 20 | 7583 |
| BCL11A-6005 | + | CGUGGUGGCGCGCCGCCUCC | 20 | 7584 |
| BCL11A-6006 | − | UCGCCGGCUACGCGGCCUCC | 20 | 7585 |
| BCL11A-6007 | + | CCUCCUCGUCCCCGUUCUCC | 20 | 7586 |
| BCL11A-6008 | − | CGAGGCCUUCCACCAGGUCC | 20 | 7587 |
| BCL11A-6009 | − | ACGCCCCAUAUUAGUGGUCC | 20 | 7588 |
| BCL11A-6010 | − | AGGUAGCAAGCCGCCCUUCC | 20 | 7589 |
| BCL11A-6011 | + | AGUCGCUGGUGCCGGGUUCC | 20 | 7590 |
| BCL11A-6012 | − | CUCUAGGAGACUUAGAGAGC | 20 | 7591 |
| BCL11A-6013 | + | AGAGAAGGGGCUCAGCGAGC | 20 | 7592 |
| BCL11A-6014 | − | CUCCACACCGCCCGGGGAGC | 20 | 7593 |
| BCL11A-6015 | + | GGUGCCGGGUUCCGGGGAGC | 20 | 7594 |
| BCL11A-6016 | + | GCGUCUGCCCUCUUUUGAGC | 20 | 7595 |
| BCL11A-6017 | + | CUGCCUGGAGGCCGCGUAGC | 20 | 7596 |
| BCL11A-6018 | + | CUGAUCCUGGUAUUCUUAGC | 20 | 7597 |
| BCL11A-6019 | + | CUGAAGGGAUACCAACCCGC | 20 | 7598 |
| BCL11A-6020 | − | CGGAAGUCCCCUGACCCCGC | 20 | 7599 |
| BCL11A-6021 | + | UCUCGCCCGUGUGGCUGCGC | 20 | 7600 |
| BCL11A-6022 | + | GUCUAUGCGGUCCGACUCGC | 20 | 7601 |
| BCL11A-6023 | − | CCACCACGAGAACAGCUCGC | 20 | 7602 |
| BCL11A-6024 | − | GUGUACUCGCAGUGGCUCGC | 20 | 7603 |
| BCL11A-6025 | + | GGCGCUGCCCACCAAGUCGC | 20 | 7604 |
| BCL11A-6026 | − | GCCCACCGCUGUCCCCAGGC | 20 | 7605 |
| BCL11A-6027 | + | AAAGCGCCCUUCUGCCAGGC | 20 | 7606 |
| BCL11A-6028 | + | UCCGUGUUGGGCAUCGCGGC | 20 | 7607 |
| BCL11A-6029 | + | CAGUAACCUUUGCAUAGGGC | 20 | 7608 |
| BCL11A-6030 | − | UUAGUGGUCCGGGCCCGGGC | 20 | 7609 |
| BCL11A-6031 | + | UGCCCUGCAUGACGUCGGGC | 20 | 7610 |
| BCL11A-6032 | + | ACUUGGACUUGACCGGGGGC | 20 | 7611 |
| BCL11A-6033 | + | UGGGCAUCGCGGCCGGGGGC | 20 | 7612 |
| BCL11A-6034 | + | ACCUUUGCAUAGGGCUGGGC | 20 | 7613 |
| BCL11A-6035 | + | CUCCUAGAGAAAUCCAUGGC | 20 | 7614 |
| BCL11A-6036 | + | AGGGCGGCUUGCUACCUGGC | 20 | 7615 |
| BCL11A-6037 | − | AGGAGACUUAGAGAGCUGGC | 20 | 7616 |
| BCL11A-6038 | + | GAAUCCCAUGGAGAGGUGGC | 20 | 7617 |
| BCL11A-6039 | − | UGCGACGAAGACUCGGUGGC | 20 | 7618 |
| BCL11A-6040 | − | CGCCCUGCCCGACGUCAUGC | 20 | 7619 |
| BCL11A-5467 | + | AGUUGUACAUGUGUAGCUGC | 20 | 7620 |
| BCL11A-6041 | + | CACGGACUUGAGCGCGCUGC | 20 | 7621 |
| BCL11A-6042 | − | CCUGUCCAAAAAGCUGCUGC | 20 | 7622 |
| BCL11A-6043 | + | GCCCACCAAGUCGCUGGUGC | 20 | 7623 |
| BCL11A-6044 | + | CAUGUGGCGCUUCAGCUUGC | 20 | 7624 |
| BCL11A-6045 | + | CGUCCCCGUUCUCCGGGAUC | 20 | 7625 |
| BCL11A-6046 | + | GCACCCUGUCAAAGGCACUC | 20 | 7626 |
| BCL11A-6047 | − | UCCCCGGGCGAGUCGGCCUC | 20 | 7627 |
| BCL11A-6048 | − | GAGCUGGACGGAGGGAUCUC | 20 | 7628 |
| BCL11A-6049 | + | GCCACACAUCUUGAGCUCUC | 20 | 7629 |
| BCL11A-6050 | + | UCCUCCUCGUCCCCGUUCUC | 20 | 7630 |
| BCL11A-6051 | + | ACCAUGCCCUGCAUGACGUC | 20 | 7631 |
| BCL11A-6052 | + | GGAUACCAACCCGCGGGGUC | 20 | 7632 |
| BCL11A-6053 | − | CACGCCCCAUAUUAGUGGUC | 20 | 7633 |
| BCL11A-6054 | + | GGAGGCAAAAGGCGAUUGUC | 20 | 7634 |
| BCL11A-6055 | − | CCGCGGGUUGGUAUCCCUUC | 20 | 7635 |
| BCL11A-6056 | − | UCAGUAUCGAGAGAGGCUUC | 20 | 7636 |
| BCL11A-6057 | − | AGAGGGUGGACUACGGCUUC | 20 | 7637 |
| BCL11A-6058 | + | AAGUCGCUGGUGCCGGGUUC | 20 | 7638 |
| BCL11A-6059 | − | GGGCAGGCCCAGCUCAAAAG | 20 | 7639 |
| BCL11A-6060 | + | UGUGUGAAGAACCUAGAAAG | 20 | 7640 |
| BCL11A-6061 | + | GUAUUCUUAGCAGGUUAAAG | 20 | 7641 |
| BCL11A-3449 | − | CGACGAGGAAGAGGAAGAAG | 20 | 7642 |
| BCL11A-6062 | + | GCUUGAUGCGCUUAGAGAAG | 20 | 7643 |
| BCL11A-3448 | − | AGAGGAGGACGACGAGGAAG | 20 | 7644 |
| BCL11A-3453 | − | AGAGGAAGAAGAGGAGGAAG | 20 | 7645 |
| BCL11A-3441 | − | GAACGGGGACGAGGAGGAAG | 20 | 7646 |
| BCL11A-3376 | − | GGGCGCAGCGGCACGGGAAG | 20 | 7647 |
| BCL11A-6063 | + | CUCGGUGGUGGACUAAACAG | 20 | 7648 |
| BCL11A-6064 | + | UAGAAAGAGGUUGGAGACAG | 20 | 7649 |
| BCL11A-6065 | + | CUGGGCCGGCCUGGGGACAG | 20 | 7650 |
| BCL11A-6066 | − | AGAAAAUUUGAAGCCCCCAG | 20 | 7651 |
| BCL11A-6067 | − | GGAGGGAUCUCGGGGCGCAG | 20 | 7652 |
| BCL11A-6068 | − | CGGAGAACGUGUACUCGCAG | 20 | 7653 |
| BCL11A-6069 | + | GGAGGAGGGGCGGAUUGCAG | 20 | 7654 |
| BCL11A-6070 | + | AUACCAACCCGCGGGGUCAG | 20 | 7655 |
| BCL11A-6071 | − | ACCAGGAUCAGUAUCGAGAG | 20 | 7656 |
| BCL11A-6072 | − | AGGAGCUGACGGAGAGCGAG | 20 | 7657 |
| BCL11A-6073 | + | AGAGGUUGGAGACAGAGGAG | 20 | 7658 |
| BCL11A-6074 | + | CGGGGGCUGGGAGGGAGGAG | 20 | 7659 |
| BCL11A-6075 | + | GCGGAUUGCAGAGGAGGGAG | 20 | 7660 |
| BCL11A-6076 | + | UGGACUAAACAGGGGGGGAG | 20 | 7661 |
| BCL11A-6077 | + | GCAAUAUGAAUCCCAUGGAG | 20 | 7662 |
| BCL11A-6078 | − | GGGAGCACGCCCCAUAUUAG | 20 | 7663 |
| BCL11A-6079 | − | CAACCUGAUCCCGGAGAACG | 20 | 7664 |
| BCL11A-3450 | − | GGAGGAAGAGGAGGACGACG | 20 | 7665 |
| BCL11A-6080 | + | CUCCGAGGAGUGCUCCGACG | 20 | 7666 |
| BCL11A-6081 | − | GAUCCCGGAGAACGGGGACG | 20 | 7667 |
| BCL11A-6082 | − | GCAGUGGCUCGCCGGCUACG | 20 | 7668 |
| BCL11A-6083 | + | GCAUGACUUGGACUUGACCG | 20 | 7669 |
| BCL11A-6084 | + | CCUGAAGGGAUACCAACCCG | 20 | 7670 |
| BCL11A-6085 | − | ACGGAAGUCCCCUGACCCCG | 20 | 7671 |
| BCL11A-6086 | + | CUUUUUGGACAGGCCCCCCG | 20 | 7672 |
| BCL11A-6087 | − | GCGCUUCUCCACACCGCCCG | 20 | 7673 |
| BCL11A-6088 | + | CCCCGAGGCCGACUCGCCCG | 20 | 7674 |
| BCL11A-6089 | + | ACUCGCCCGGGGAGCAGCCG | 20 | 7675 |
| BCL11A-6090 | − | CGGCCACCUGGCCGAGGCCG | 20 | 7676 |
| BCL11A-6091 | + | CGUGUUGGGCAUCGCGGCCG | 20 | 7677 |
| BCL11A-6092 | − | GAUGGCACUGUUAAUGGCCG | 20 | 7678 |
| BCL11A-6093 | − | UAAGCGCGGCCACCUGGCCG | 20 | 7679 |
| BCL11A-6094 | + | GCGCAAACUCCCGUUCUCCG | 20 | 7680 |
| BCL11A-6095 | − | CAGCAGCGCGCUCAAGUCCG | 20 | 7681 |
| BCL11A-6096 | + | GUCGCUGGUGCCGGGUUCCG | 20 | 7682 |
| BCL11A-6097 | − | CUGGGCGAGAAGCAUAAGCG | 20 | 7683 |
| BCL11A-6098 | − | CUCCAUGCAGCACUUCAGCG | 20 | 7684 |
| BCL11A-6099 | + | UGCUGGCCUGGGUGCACGCG | 20 | 7685 |
| BCL11A-6100 | + | UGAAGGGAUACCAACCCGCG | 20 | 7686 |
| BCL11A-6101 | − | CACCACGAGAACAGCUCGCG | 20 | 7687 |
| BCL11A-6102 | + | GCAUGACGUCGGGCAGGGCG | 20 | 7688 |
| BCL11A-6103 | − | CGAGAACAGCUCGCGGGGCG | 20 | 7689 |
| BCL11A-6104 | − | GCGGGGCGCGGUCGUGGGCG | 20 | 7690 |
| BCL11A-6105 | + | GUUCUCCGUGUUGGGCAUCG | 20 | 7691 |
| BCL11A-6106 | − | CCCCGGGCGAGUCGGCCUCG | 20 | 7692 |
| BCL11A-6107 | − | GCCACCACGAGAACAGCUCG | 20 | 7693 |
| BCL11A-6108 | − | AGCUGGACGGAGGGAUCUCG | 20 | 7694 |
| BCL11A-6109 | + | CGCCCCGCGAGCUGUUCUCG | 20 | 7695 |
| BCL11A-6110 | − | CAGCUCGCGGGGCGCGGUCG | 20 | 7696 |
| BCL11A-6111 | + | UCGGUGGUGGACUAAACAGG | 20 | 7697 |
| BCL11A-6112 | + | GGCCCUCGGCCUCGGCCAGG | 20 | 7698 |
| BCL11A-3451 | − | CGAGGAAGAGGAAGAAGAGG | 20 | 7699 |
| BCL11A-3452 | − | GGAAGAAGAGGAGGAAGAGG | 20 | 7700 |
| BCL11A-3445 | − | CGGGGACGAGGAGGAAGAGG | 20 | 7701 |
| BCL11A-6113 | + | AAAGAGGUUGGAGACAGAGG | 20 | 7702 |
| BCL11A-6114 | + | GGAGGGGCGGAUUGCAGAGG | 20 | 7703 |
| BCL11A-6115 | + | AUAUGAAUCCCAUGGAGAGG | 20 | 7704 |
| BCL11A-6116 | + | CGAGGAGUGCUCCGACGAGG | 20 | 7705 |
| BCL11A-3330 | − | CCCGGAGAACGGGGACGAGG | 20 | 7706 |
| BCL11A-3454 | − | AGAAGAGGAGGAAGAGGAGG | 20 | 7707 |
| BCL11A-6117 | + | GAGGUUGGAGACAGAGGAGG | 20 | 7708 |
| BCL11A-3455 | − | AGAGGAGGAAGAGGAGGAGG | 20 | 7709 |
| BCL11A-6118 | + | CGGAUUGCAGAGGAGGGAGG | 20 | 7710 |
| BCL11A-6119 | + | ACCGGGGGCUGGGAGGGAGG | 20 | 7711 |
| BCL11A-6120 | − | CUUCGGGCUGAGCCUGGAGG | 20 | 7712 |
| BCL11A-6121 | − | CCGCCCGGGGAGCUGGACGG | 20 | 7713 |
| BCL11A-6122 | + | CAUGACUUGGACUUGACCGG | 20 | 7714 |
| BCL11A-6123 | + | GUGUUGGGCAUCGCGGCCGG | 20 | 7715 |
| BCL11A-6124 | + | GGCCGGCCUGGGGACAGCGG | 20 | 7716 |
| BCL11A-6125 | + | GGGUUCCGGGGAGCUGGCGG | 20 | 7717 |
| BCL11A-6126 | + | CCCCCAGGCGCUCUAUGCGG | 20 | 7718 |
| BCL11A-6127 | − | CACUUGCGACGAAGACUCGG | 20 | 7719 |
| BCL11A-6128 | − | CCCGGGCGAGUCGGCCUCGG | 20 | 7720 |
| BCL11A-6129 | + | GGGUCCAAGUGAUGUCUCGG | 20 | 7721 |
| BCL11A-6130 | + | GGGGGCGUCGCCAGGAAGGG | 20 | 7722 |
| BCL11A-6131 | + | CGGUGGUGGACUAAACAGGG | 20 | 7723 |
| BCL11A-6132 | − | GCUGACGGAGAGCGAGAGGG | 20 | 7724 |
| BCL11A-6133 | + | GGGCGGAUUGCAGAGGAGGG | 20 | 7725 |
| BCL11A-6134 | + | GGAUUGCAGAGGAGGGAGGG | 20 | 7726 |
| BCL11A-6135 | + | UUGACCGGGGGCUGGGAGGG | 20 | 7727 |
| BCL11A-6136 | + | CCUCCGUCCAGCUCCCCGGG | 20 | 7728 |
| BCL11A-6137 | + | CUAGAGAAAUCCAUGGCGGG | 20 | 7729 |
| BCL11A-6138 | − | CCGGGCGAGUCGGCCUCGGG | 20 | 7730 |
| BCL11A-6139 | + | GGUGGUGGACUAAACAGGGG | 20 | 7731 |
| BCL11A-6140 | − | AAAUUUGAAGCCCCCAGGGG | 20 | 7732 |
| BCL11A-6141 | + | GGGCUGGGAGGGAGGAGGGG | 20 | 7733 |
| BCL11A-6142 | + | GAUUGCAGAGGAGGGAGGGG | 20 | 7734 |
| BCL11A-6143 | − | CCGCAUAGAGCGCCUGGGGG | 20 | 7735 |
| BCL11A-6144 | − | UGAAGCCCCCAGGGGUGGGG | 20 | 7736 |
| BCL11A-6145 | + | AAAGGCACUCGGGUGAUGGG | 20 | 7737 |
| BCL11A-6146 | + | GGACUUGACCGGGGGCUGGG | 20 | 7738 |
| BCL11A-6147 | + | CUAAACAGGGGGGGAGUGGG | 20 | 7739 |
| BCL11A-6148 | + | CUGGGUACUACGCCGAAUGG | 20 | 7740 |
| BCL11A-6149 | + | UCUCCUAGAGAAAUCCAUGG | 20 | 7741 |
| BCL11A-6150 | + | GUCGGACUUGACCGUCAUGG | 20 | 7742 |
| BCL11A-6151 | − | CAAAUUUCAGAGCAACCUGG | 20 | 7743 |
| BCL11A-6152 | + | GCUUCUCGCCCAGGACCUGG | 20 | 7744 |
| BCL11A-6153 | − | CGGCUUCGGGCUGAGCCUGG | 20 | 7745 |
| BCL11A-6154 | − | CCACCGCAUAGAGCGCCUGG | 20 | 7746 |
| BCL11A-6155 | + | GGGAUCUUUGAGCUGCCUGG | 20 | 7747 |
| BCL11A-6156 | + | GCCGGGUUCCGGGGAGCUGG | 20 | 7748 |
| BCL11A-6157 | − | CGCAGCGGCACGGGAAGUGG | 20 | 7749 |
| BCL11A-6158 | − | CAGCGCGCUCAAGUCCGUGG | 20 | 7750 |
| BCL11A-6159 | + | CCCGCGAGCUGUUCUCGUGG | 20 | 7751 |
| BCL11A-6160 | + | CCAGGCGCUCUAUGCGGUGG | 20 | 7752 |
| BCL11A-6161 | + | UCCAAGUGAUGUCUCGGUGG | 20 | 7753 |
| BCL11A-6162 | − | ACCCGGCACCAGCGACUUGG | 20 | 7754 |
| BCL11A-6163 | + | UCUGGGUACUACGCCGAAUG | 20 | 7755 |
| BCL11A-6164 | + | CGUCGGACUUGACCGUCAUG | 20 | 7756 |
| BCL11A-6165 | + | UGUGCAUGUGCGUCUUCAUG | 20 | 7757 |
| BCL11A-6166 | + | GGGCCCGGACCACUAAUAUG | 20 | 7758 |
| BCL11A-6167 | + | CCGCCCCCAGGCGCUCUAUG | 20 | 7759 |
| BCL11A-6168 | + | UAACAGUGCCAUCGUCUAUG | 20 | 7760 |
| BCL11A-6169 | − | AGCGACACUUGUGAGUACUG | 20 | 7761 |
| BCL11A-6170 | + | CUUCGUCGCAAGUGUCCCUG | 20 | 7762 |
| BCL11A-6171 | − | CCCACCGCAUAGAGCGCCUG | 20 | 7763 |
| BCL11A-6172 | + | CAUAGGGCUGGGCCGGCCUG | 20 | 7764 |
| BCL11A-6173 | + | AGAAGGGGCUCAGCGAGCUG | 20 | 7765 |
| BCL11A-6174 | − | GUGCCUUUGACAGGGUGCUG | 20 | 7766 |
| BCL11A-6175 | − | UCCAAGUCAUGCGAGUUCUG | 20 | 7767 |
| BCL11A-6176 | + | UGUAGGGCUUCUCGCCCGUG | 20 | 7768 |
| BCL11A-6177 | + | GUCCAGCUCCCCGGGCGGUG | 20 | 7769 |
| BCL11A-6178 | + | CCCAGGCGCUCUAUGCGGUG | 20 | 7770 |
| BCL11A-6179 | − | AUUUGAAGCCCCCAGGGGUG | 20 | 7771 |
| BCL11A-6180 | − | CCCAGAGAGCUCAAGAUGUG | 20 | 7772 |
| BCL11A-6181 | + | CGUUCUCCGGGAUCAGGUUG | 20 | 7773 |
| BCL11A-6182 | + | CUCUGGGUACUACGCCGAAU | 20 | 7774 |
| BCL11A-6183 | + | GCGGGAGGCUCCAUAGCCAU | 20 | 7775 |
| BCL11A-6184 | − | CUUCCCAGCCACCUCUCCAU | 20 | 7776 |
| BCL11A-6185 | + | GGUUGCAGUAACCUUUGCAU | 20 | 7777 |
| BCL11A-6186 | + | UCGUCGGACUUGACCGUCAU | 20 | 7778 |
| BCL11A-6187 | + | GUCAAAGGCACUCGGGUGAU | 20 | 7779 |
| BCL11A-6188 | + | CGGGCCCGGACCACUAAUAU | 20 | 7780 |
| BCL11A-6189 | + | GUCGUUCUCGCUCUUGAACU | 20 | 7781 |
| BCL11A-6190 | + | AGCACCCUGUCAAAGGCACU | 20 | 7782 |
| BCL11A-6191 | − | UCCACCACCGAGACAUCACU | 20 | 7783 |
| BCL11A-6192 | − | GGACACUUGCGACGAAGACU | 20 | 7784 |
| BCL11A-6193 | − | GGAACCCGGCACCAGCGACU | 20 | 7785 |
| BCL11A-6194 | − | GUUGGUAUCCCUUCAGGACU | 20 | 7786 |
| BCL11A-6195 | + | GCCGCAGAACUCGCAUGACU | 20 | 7787 |
| BCL11A-6196 | + | GCAAGUGUCCCUGUGGCCCU | 20 | 7788 |
| BCL11A-6197 | − | CCCCACCGCAUAGAGCGCCU | 20 | 7789 |
| BCL11A-6198 | + | GCAUAGGGCUGGGCCGGCCU | 20 | 7790 |
| BCL11A-6199 | + | GUCCCUGUGGCCCUCGGCCU | 20 | 7791 |
| BCL11A-6200 | − | CUCCCCGGGCGAGUCGGCCU | 20 | 7792 |
| BCL11A-6201 | + | GCGCUUCAGCUUGCUGGCCU | 20 | 7793 |
| BCL11A-6202 | − | CUCCUCGUCGGAGCACUCCU | 20 | 7794 |
| BCL11A-6203 | − | GAGGCCUUCCACCAGGUCCU | 20 | 7795 |
| BCL11A-6204 | + | GAGAAGGGGCUCAGCGAGCU | 20 | 7796 |
| BCL11A-6205 | + | CGUCUGCCCUCUUUUGAGCU | 20 | 7797 |
| BCL11A-6206 | + | AGUAACCUUUGCAUAGGGCU | 20 | 7798 |
| BCL11A-6207 | + | CUUGGACUUGACCGGGGGCU | 20 | 7799 |
| BCL11A-6208 | + | AAUCCCAUGGAGAGGUGGCU | 20 | 7800 |
| BCL11A-5508 | + | GUUGUACAUGUGUAGCUGCU | 20 | 7801 |
| BCL11A-6209 | − | CUGUCCAAAAAGCUGCUGCU | 20 | 7802 |
| BCL11A-6210 | − | GGAGCUGGACGGAGGGAUCU | 20 | 7803 |
| BCL11A-6211 | + | CCACACAUCUUGAGCUCUCU | 20 | 7804 |
| BCL11A-6212 | − | CUCCCGCCAUGGAUUUCUCU | 20 | 7805 |
| BCL11A-6213 | + | UGGGGGUCCAAGUGAUGUCU | 20 | 7806 |
| BCL11A-6214 | − | UCUGUCUCCAACCUCUUUCU | 20 | 7807 |
| BCL11A-6215 | − | AGACUCGGUGGCCGGCGAGU | 20 | 7808 |
| BCL11A-6216 | − | CGGCUGCUCCCCGGGCGAGU | 20 | 7809 |
| BCL11A-6217 | + | GGACUAAACAGGGGGGGAGU | 20 | 7810 |
| BCL11A-6218 | + | CACCAUGCCCUGCAUGACGU | 20 | 7811 |
| BCL11A-6219 | − | CGGGGCGCGGUCGUGGGCGU | 20 | 7812 |
| BCL11A-6220 | − | AUCGCCUUUUGCCUCCUCGU | 20 | 7813 |
| BCL11A-6221 | + | GGCGGUGGAGAGACCGUCGU | 20 | 7814 |
| BCL11A-6222 | − | AGCUCGCGGGGCGCGGUCGU | 20 | 7815 |
| BCL11A-6223 | + | CCCGUUCUCCGGGAUCAGGU | 20 | 7816 |
| BCL11A-6224 | + | UGAAGAACCUAGAAAGAGGU | 20 | 7817 |
| BCL11A-6225 | + | GCCGGCCUGGGGACAGCGGU | 20 | 7818 |
| BCL11A-6226 | + | CCCCAGGCGCUCUAUGCGGU | 20 | 7819 |
| BCL11A-6227 | − | AGUCCCCUGACCCCGCGGGU | 20 | 7820 |
| BCL11A-6228 | − | AAUUUGAAGCCCCCAGGGGU | 20 | 7821 |
| BCL11A-6229 | − | CCCGGCACCAGCGACUUGGU | 20 | 7822 |
| BCL11A-6230 | − | GCGACACUUGUGAGUACUGU | 20 | 7823 |
| BCL11A-6231 | + | CGAGUACACGUUCUCCGUGU | 20 | 7824 |
| BCL11A-6232 | + | GUCGCACAGGUUGCACUUGU | 20 | 7825 |
| BCL11A-6233 | − | GUUCUUCACACACCCCCAUU | 20 | 7826 |
| BCL11A-6234 | − | AAAGAUCCCUUCCUUAGCUU | 20 | 7827 |
| BCL11A-6235 | − | GAGAGGGUGGACUACGGCUU | 20 | 7828 |
| BCL11A-6236 | + | CCGUUCUCCGGGAUCAGGUU | 20 | 7829 |
| BCL11A-6237 | + | GAGUACACGUUCUCCGUGUU | 20 | 7830 |
| BCL11A-6238 | + | GCUGCCCAGCAGCAGCUUUU | 20 | 7831 |
| BCL11A-6239 | − | UCAAGAUGUGUGGCAGUUUU | 20 | 7832 |

[1090] Table 15D provides targeting domains for knocking out the BCL11A gene by dual targeting (e.g., dual single strand cleavages). In an embodiment, dual targeting (e.g., dual nicking) is used to create two nicks on opposite DNA strands by using S. pyogenes Cas9 nickases with two targeting domains that are complementary to opposite DNA strands, e.g., a gRNA comprising any minus strand targeting domain may be paired any gRNA comprising a plus strand targeting domain provided that the two gRNAs are oriented on the DNA such that PAMs face outward and the distance between the 5′ ends of the gRNAs is 0-50 bp. Exemplary nickase pairs include a targeting domain from Group A and a second targeting domain from Group B, or include a targeting domain from Group C and a second targeting domain from Group D. It is contemplated herein that in an embodiment a targeting domain of Group A can be combined with any of the targeting domains of Group B; in an embodiment a targeting domain of Group C can be combined with any of the targeting domains of Group D. Exemplary gRNA pairs to be used with S. pyogenes Cas9 are shown in Table 15D, e.g., BCL11A-5355 or BCL11A-5380 can be combined with BCL11A-5321 or BCL11A-5416; or BCL11A-5333, BCL11A-5354, or BCL11A-5329 can be combined with BCL11A-5367 or BCL11A-5341.

TABLE 15D

| Group A | Group B |
|---|---|
| BCL11A-5355, BCL11A-5380 | BCL11A-5321, BCL11A-5416 |
| Group C | Group D |
| BCL11A-5333, BCL11A-5354, | BCL11A-5367, BCL11A-5341 |
| BCL11A-5329 | |

[1091] Table 16A provides exemplary targeting domains for knocking out the BCL11A gene selected according to the first tier parameters. The targeting domains bind within the first 500 bp of the coding sequence (e.g., within 500 bp downstream from the start codon) and have a high level of orthogonality, and the PAM is NNGRRT. It is contemplated herein that in an embodiment the targeting domain hybridizes to the target domain through complementary base pairing. Any of the targeting domains in the table can be used with a S. aureus Cas9 molecule that generates a double stranded break (Cas9 nuclease) or a single-stranded break (Cas9 nickase).

TABLE 16A
1st Tier

| | DNA | | Target Site | SEQ ID |
|---|---|---|---|---|
| gRNA Name | Strand | Targeting Domain | Length | NO: |
| BCL11A-6240 | + | UGACCUGGAUGCCAACCUCCA | 21 | 7833 |
| BCL11A-6241 | + | GUGACCUGGAUGCCAACCUCCA | 22 | 7834 |
| BCL11A-6242 | + | CGUGACCUGGAUGCCAACCUCCA | 23 | 7835 |
| BCL11A-6243 | + | GCGUGACCUGGAUGCCAACCUCCA | 24 | 7836 |
| BCL11A-6244 | + | AUGCCAACCUCCACGGGA | 18 | 7837 |
| BCL11A-6245 | + | GAUGCCAACCUCCACGGGA | 19 | 7838 |
| BCL11A-6246 | + | GGAUGCCAACCUCCACGGGA | 20 | 7839 |
| BCL11A-6247 | + | UGGAUGCCAACCUCCACGGGA | 21 | 7840 |
| BCL11A-6248 | + | CUGGAUGCCAACCUCCACGGGA | 22 | 7841 |
| BCL11A-6249 | + | CCUGGAUGCCAACCUCCACGGGA | 23 | 7842 |
| BCL11A-6250 | + | ACCUGGAUGCCAACCUCCACGGGA | 24 | 7843 |
| BCL11A-6251 | + | GUCAUCCUCUGGCGUGAC | 18 | 7844 |
| BCL11A-6252 | + | CGUCAUCCUCUGGCGUGAC | 19 | 7845 |
| BCL11A-6253 | + | UCGUCAUCCUCUGGCGUGAC | 20 | 7846 |
| BCL11A-6254 | + | AUCGUCAUCCUCUGGCGUGAC | 21 | 7847 |
| BCL11A-6255 | + | AAUCGUCAUCCUCUGGCGUGAC | 22 | 7848 |
| BCL11A-6256 | + | CAAUCGUCAUCCUCUGGCGUGAC | 23 | 7849 |
| BCL11A-6257 | + | ACAAUCGUCAUCCUCUGGCGUGAC | 24 | 7850 |
| BCL11A-6258 | + | UUAUUGGGUUACUUACGC | 18 | 7851 |
| BCL11A-6259 | + | AUUAUUGGGUUACUUACGC | 19 | 7852 |
| BCL11A-6260 | + | UAUUAUUGGGUUACUUACGC | 20 | 7853 |
| BCL11A-6261 | + | CUAUUAUUGGGUUACUUACGC | 21 | 7854 |
| BCL11A-6262 | + | ACUAUUAUUGGGUUACUUACGC | 22 | 7855 |
| BCL11A-6263 | + | UACUAUUAUUGGGUUACUUACGC | 23 | 7856 |
| BCL11A-6264 | + | UUACUAUUAUUGGGUUACUUACGC | 24 | 7857 |
| BCL11A-6265 | + | UCCCGUUUGCUUAAGUGC | 18 | 7858 |
| BCL11A-6266 | + | UUCCCGUUUGCUUAAGUGC | 19 | 7859 |
| BCL11A-5352 | + | AUUCCCGUUUGCUUAAGUGC | 20 | 7860 |
| BCL11A-6267 | + | AAUUCCCGUUUGCUUAAGUGC | 21 | 7861 |
| BCL11A-6268 | + | GAAUUCCCGUUUGCUUAAGUGC | 22 | 7862 |
| BCL11A-6269 | + | AGAAUUCCCGUUUGCUUAAGUGC | 23 | 7863 |
| BCL11A-6270 | + | GAGAAUUCCCGUUUGCUUAAGUGC | 24 | 7864 |
| BCL11A-6271 | + | UUUGUGCUCGAUAAAAAU | 18 | 7865 |
| BCL11A-6272 | + | GUUUGUGCUCGAUAAAAAU | 19 | 7866 |
| BCL11A-6273 | + | CGUUUGUGCUCGAUAAAAAU | 20 | 7867 |
| BCL11A-6274 | + | CCGUUUGUGCUCGAUAAAAAU | 21 | 7868 |
| BCL11A-6275 | + | UCCGUUUGUGCUCGAUAAAAAU | 22 | 7869 |
| BCL11A-6276 | + | UUCCGUUUGUGCUCGAUAAAAAU | 23 | 7870 |
| BCL11A-6277 | + | UUUCCGUUUGUGCUCGAUAAAAAU | 24 | 7871 |
| BCL11A-6278 | + | UGCACUCAUCCCAGGCGU | 18 | 7872 |
| BCL11A-6279 | + | CUGCACUCAUCCCAGGCGU | 19 | 7873 |
| BCL11A-5510 | + | UCUGCACUCAUCCCAGGCGU | 20 | 7874 |
| BCL11A-6280 | + | UUCUGCACUCAUCCCAGGCGU | 21 | 7875 |
| BCL11A-6281 | + | AUUCUGCACUCAUCCCAGGCGU | 22 | 7876 |
| BCL11A-6282 | + | UAUUCUGCACUCAUCCCAGGCGU | 23 | 7877 |
| BCL11A-6283 | + | AUAUUCUGCACUCAUCCCAGGCGU | 24 | 7878 |
| BCL11A-6284 | + | GUCUGGUUCAUCAUCUGU | 18 | 7879 |
| BCL11A-6285 | + | GGUCUGGUUCAUCAUCUGU | 19 | 7880 |
| BCL11A-6286 | + | UGGUCUGGUUCAUCAUCUGU | 20 | 7881 |
| BCL11A-6287 | + | GUGGUCUGGUUCAUCAUCUGU | 21 | 7882 |
| BCL11A-6288 | + | CGUGGUCUGGUUCAUCAUCUGU | 22 | 7883 |
| BCL11A-6289 | + | CCGUGGUCUGGUUCAUCAUCUGU | 23 | 7884 |
| BCL11A-6290 | + | GCCGUGGUCUGGUUCAUCAUCUGU | 24 | 7885 |
| BCL11A-6291 | − | CCGUUGGGAGCUCCAGAA | 18 | 7886 |
| BCL11A-6292 | − | CCCGUUGGGAGCUCCAGAA | 19 | 7887 |
| BCL11A-5447 | − | GCCCGUUGGGAGCUCCAGAA | 20 | 7888 |
| BCL11A-6293 | − | GGCCCGUUGGGAGCUCCAGAA | 21 | 7889 |
| BCL11A-6294 | − | CGGCCCGUUGGGAGCUCCAGAA | 22 | 7890 |
| BCL11A-6295 | − | ACGGCCCGUUGGGAGCUCCAGAA | 23 | 7891 |
| BCL11A-6296 | − | CACGGCCCGUUGGGAGCUCCAGAA | 24 | 7892 |
| BCL11A-6297 | − | GGCAUCCAGGUCACGCCA | 18 | 7893 |
| BCL11A-6298 | − | UGGCAUCCAGGUCACGCCA | 19 | 7894 |
| BCL11A-6299 | − | UUGGCAUCCAGGUCACGCCA | 20 | 7895 |
| BCL11A-6300 | − | GUUGGCAUCCAGGUCACGCCA | 21 | 7896 |
| BCL11A-6301 | − | GGUUGGCAUCCAGGUCACGCCA | 22 | 7897 |
| BCL11A-6302 | − | AGGUUGGCAUCCAGGUCACGCCA | 23 | 7898 |
| BCL11A-6303 | − | GAGGUUGGCAUCCAGGUCACGCCA | 24 | 7899 |
| BCL11A-6304 | − | AACCCCAGCACUUAAGCAAAC | 21 | 7900 |
| BCL11A-6305 | − | AAACCCCAGCACUUAAGCAAAC | 22 | 7901 |
| BCL11A-6306 | − | CAAACCCCAGCACUUAAGCAAAC | 23 | 7902 |
| BCL11A-6307 | − | GCAAACCCCAGCACUUAAGCAAAC | 24 | 7903 |
| BCL11A-6308 | − | AGCUCUAAUCCCCACGCC | 18 | 7904 |
| BCL11A-6309 | − | GAGCUCUAAUCCCCACGCC | 19 | 7905 |
| BCL11A-5350 | − | GGAGCUCUAAUCCCCACGCC | 20 | 7906 |
| BCL11A-6310 | − | UGGAGCUCUAAUCCCCACGCC | 21 | 7907 |
| BCL11A-6311 | − | AUGGAGCUCUAAUCCCCACGCC | 22 | 7908 |
| BCL11A-6312 | − | CAUGGAGCUCUAAUCCCCACGCC | 23 | 7909 |
| BCL11A-6313 | − | ACAUGGAGCUCUAAUCCCCACGCC | 24 | 7910 |
| BCL11A-6314 | − | UUUAUCAACGUCAUCUAG | 18 | 7911 |
| BCL11A-6315 | − | GUUUAUCAACGUCAUCUAG | 19 | 7912 |
| BCL11A-5356 | − | UGUUUAUCAACGUCAUCUAG | 20 | 7913 |
| BCL11A-6316 | − | UUGUUUAUCAACGUCAUCUAG | 21 | 7914 |
| BCL11A-6317 | − | AUUGUUUAUCAACGUCAUCUAG | 22 | 7915 |
| BCL11A-6318 | − | GAUUGUUUAUCAACGUCAUCUAG | 23 | 7916 |
| BCL11A-6319 | − | CGAUUGUUUAUCAACGUCAUCUAG | 24 | 7917 |
| BCL11A-6320 | − | AGUGCAGAAUAUGCCCCG | 18 | 7918 |
| BCL11A-6321 | − | GAGUGCAGAAUAUGCCCCG | 19 | 7919 |
| BCL11A-6322 | − | UGAGUGCAGAAUAUGCCCCG | 20 | 7920 |
| BCL11A-6323 | − | AUGAGUGCAGAAUAUGCCCCG | 21 | 7921 |
| BCL11A-6324 | − | GAUGAGUGCAGAAUAUGCCCCG | 22 | 7922 |
| BCL11A-6325 | − | GGAUGAGUGCAGAAUAUGCCCCG | 23 | 7923 |
| BCL11A-6326 | − | GGGAUGAGUGCAGAAUAUGCCCCG | 24 | 7924 |
| BCL11A-6327 | − | CUAAUCCCCACGCCUGGG | 18 | 7925 |
| BCL11A-6328 | − | UCUAAUCCCCACGCCUGGG | 19 | 7926 |
| BCL11A-6329 | − | CUCUAAUCCCCACGCCUGGG | 20 | 7927 |
| BCL11A-6330 | − | GCUCUAAUCCCCACGCCUGGG | 21 | 7928 |
| BCL11A-6331 | − | AGCUCUAAUCCCCACGCCUGGG | 22 | 7929 |
| BCL11A-6332 | − | GAGCUCUAAUCCCCACGCCUGGG | 23 | 7930 |
| BCL11A-6333 | − | GGAGCUCUAAUCCCCACGCCUGGG | 24 | 7931 |
| BCL11A-6334 | − | CCACGCCUGGGAUGAGUG | 18 | 7932 |
| BCL11A-6335 | − | CCCACGCCUGGGAUGAGUG | 19 | 7933 |
| BCL11A-6336 | − | CCCCACGCCUGGGAUGAGUG | 20 | 7934 |
| BCL11A-6337 | − | UCCCCACGCCUGGGAUGAGUG | 21 | 7935 |
| BCL11A-6338 | − | AUCCCCACGCCUGGGAUGAGUG | 22 | 7936 |
| BCL11A-6339 | − | AAUCCCCACGCCUGGGAUGAGUG | 23 | 7937 |
| BCL11A-6340 | − | UAAUCCCCACGCCUGGGAUGAGUG | 24 | 7938 |
| BCL11A-6341 | − | CUCUGCUUAGAAAAAGCU | 18 | 7939 |
| BCL11A-6342 | − | CCUCUGCUUAGAAAAAGCU | 19 | 7940 |
| BCL11A-6343 | − | GCCUCUGCUUAGAAAAAGCU | 20 | 7941 |
| BCL11A-6344 | − | AGCCUCUGCUUAGAAAAAGCU | 21 | 7942 |
| BCL11A-6345 | − | CAGCCUCUGCUUAGAAAAAGCU | 22 | 7943 |
| BCL11A-6346 | − | GCAGCCUCUGCUUAGAAAAAGCU | 23 | 7944 |
| BCL11A-6347 | − | GGCAGCCUCUGCUUAGAAAAAGCU | 24 | 7945 |

[1092] Table 16B provides exemplary targeting domains for knocking out the BCL11A gene selected according to the second tier parameters. The targeting domains bind within the first 500 bp of the coding sequence (e.g., within 500 bp downstream from the start codon), and the PAM is NNGRRT. It is contemplated herein that in an embodiment the targeting domain hybridizes to the target domain through complementary base pairing. Any of the targeting domains in the table can be used with a S. aureus Cas9 molecule that generates a double stranded break (Cas9 nuclease) or a single-stranded break (Cas9 nickase).

TABLE 16B
2nd Tier

| | DNA | | Target Site | |
|---|---|---|---|---|
| gRNA Name | Strand | Targeting Domain | Length | SEQ ID NO: |
| BCL11A-6348 | + | CCUGGAUGCCAACCUCCA | 18 | 7946 |
| BCL11A-6349 | + | ACCUGGAUGCCAACCUCCA | 19 | 7947 |
| BCL11A-5450 | + | GACCUGGAUGCCAACCUCCA | 20 | 7948 |
| BCL11A-6350 | − | CCCAGCACUUAAGCAAAC | 18 | 7949 |
| BCL11A-6351 | − | CCCCAGCACUUAAGCAAAC | 19 | 7950 |
| BCL11A-5458 | − | ACCCCAGCACUUAAGCAAAC | 20 | 7951 |

[1093] Table 16C provides exemplary targeting domains for knocking out the BCL11A gene selected according to the third tier parameters. The targeting domains bind within the first 500 bp of the coding sequence (e.g., within 500 bp downstream from the start codon), and the PAM is NNGRRV. It is contemplated herein that in an embodiment the targeting domain hybridizes to the target domain through complementary base pairing. Any of the targeting domains in the table can be used with a S. aureus Cas9 molecule that generates a double stranded break (Cas9 nuclease) or a single-stranded break (Cas9 nickase).

TABLE 16C
3rd Tier

| | DNA | | Target Site | SEQ ID |
|---|---|---|---|---|
| gRNA Name | Strand | Targeting Domain | Length | NO: |
| BCL11A-6352 | + | AAUAAGAAUGUCCCCCAA | 18 | 7952 |
| BCL11A-6353 | + | AAAUAAGAAUGUCCCCCAA | 19 | 7953 |
| BCL11A-5444 | + | AAAAUAAGAAUGUCCCCCAA | 20 | 7954 |
| BCL11A-6354 | + | AAAAAUAAGAAUGUCCCCCAA | 21 | 7955 |
| BCL11A-6355 | + | UAAAAAUAAGAAUGUCCCCCAA | 22 | 7956 |
| BCL11A-6356 | + | AUAAAAAUAAGAAUGUCCCCCAA | 23 | 7957 |
| BCL11A-6357 | + | GAUAAAAAUAAGAAUGUCCCCCAA | 24 | 7958 |
| BCL11A-6358 | + | UUCAUCUCGAUUGGUGAA | 18 | 7959 |
| BCL11A-6359 | + | UUUCAUCUCGAUUGGUGAA | 19 | 7960 |
| BCL11A-5344 | + | UUUUCAUCUCGAUUGGUGAA | 20 | 7961 |
| BCL11A-6360 | + | UUUUUCAUCUCGAUUGGUGAA | 21 | 7962 |
| BCL11A-6361 | + | UUUUUUCAUCUCGAUUGGUGAA | 22 | 7963 |
| BCL11A-6362 | + | CUUUUUUCAUCUCGAUUGGUGAA | 23 | 7964 |
| BCL11A-6363 | + | GCUUUUUUCAUCUCGAUUGGUGAA | 24 | 7965 |
| BCL11A-6364 | + | AAAUAAGAAUGUCCCCCA | 18 | 7966 |
| BCL11A-6365 | + | AAAAUAAGAAUGUCCCCCA | 19 | 7967 |
| BCL11A-6366 | + | AAAAAUAAGAAUGUCCCCCA | 20 | 7968 |
| BCL11A-6367 | + | UAAAAAUAAGAAUGUCCCCCA | 21 | 7969 |
| BCL11A-6368 | + | AUAAAAAUAAGAAUGUCCCCCA | 22 | 7970 |
| BCL11A-6369 | + | GAUAAAAAUAAGAAUGUCCCCCA | 23 | 7971 |
| BCL11A-6370 | + | CGAUAAAAAUAAGAAUGUCCCCCA | 24 | 7972 |
| BCL11A-6371 | + | CCCCUUCUGGAGCUCCCA | 18 | 7973 |
| BCL11A-6372 | + | UCCCCUUCUGGAGCUCCCA | 19 | 7974 |
| BCL11A-6373 | + | AUCCCCUUCUGGAGCUCCCA | 20 | 7975 |
| BCL11A-6374 | + | GAUCCCCUUCUGGAGCUCCCA | 21 | 7976 |
| BCL11A-6375 | + | UGAUCCCCUUCUGGAGCUCCCA | 22 | 7977 |
| BCL11A-6376 | + | AUGAUCCCCUUCUGGAGCUCCCA | 23 | 7978 |
| BCL11A-6377 | + | CAUGAUCCCCUUCUGGAGCUCCCA | 24 | 7979 |
| BCL11A-6378 | + | UAGAGCUCCAUGUGCAGA | 18 | 7980 |
| BCL11A-6379 | + | UUAGAGCUCCAUGUGCAGA | 19 | 7981 |
| BCL11A-6380 | + | AUUAGAGCUCCAUGUGCAGA | 20 | 7982 |
| BCL11A-6381 | + | GAUUAGAGCUCCAUGUGCAGA | 21 | 7983 |
| BCL11A-6382 | + | GGAUUAGAGCUCCAUGUGCAGA | 22 | 7984 |
| BCL11A-6383 | + | GGGAUUAGAGCUCCAUGUGCAGA | 23 | 7985 |
| BCL11A-6384 | + | GGGGAUUAGAGCUCCAUGUGCAGA | 24 | 7986 |
| BCL11A-6385 | + | GCUCCAUGUGCAGAACGA | 18 | 7987 |
| BCL11A-6386 | + | AGCUCCAUGUGCAGAACGA | 19 | 7988 |
| BCL11A-5347 | + | GAGCUCCAUGUGCAGAACGA | 20 | 7989 |
| BCL11A-6387 | + | AGAGCUCCAUGUGCAGAACGA | 21 | 7990 |
| BCL11A-6388 | + | UAGAGCUCCAUGUGCAGAACGA | 22 | 7991 |
| BCL11A-6389 | + | UUAGAGCUCCAUGUGCAGAACGA | 23 | 7992 |
| BCL11A-6390 | + | AUUAGAGCUCCAUGUGCAGAACGA | 24 | 7993 |
| BCL11A-6391 | + | UUUCAUCUCGAUUGGUGA | 18 | 7994 |
| BCL11A-6392 | + | UUUUCAUCUCGAUUGGUGA | 19 | 7995 |
| BCL11A-5456 | + | UUUUUCAUCUCGAUUGGUGA | 20 | 7996 |
| BCL11A-6393 | + | UUUUUUCAUCUCGAUUGGUGA | 21 | 7997 |
| BCL11A-6394 | + | CUUUUUUCAUCUCGAUUGGUGA | 22 | 7998 |
| BCL11A-6395 | + | GCUUUUUUCAUCUCGAUUGGUGA | 23 | 7999 |
| BCL11A-6396 | + | UGCUUUUUUCAUCUCGAUUGGUGA | 24 | 8000 |
| BCL11A-6397 | + | GCAGAAGUUUAUCUGUGA | 18 | 8001 |
| BCL11A-6398 | + | UGCAGAAGUUUAUCUGUGA | 19 | 8002 |
| BCL11A-6399 | + | GUGCAGAAGUUUAUCUGUGA | 20 | 8003 |
| BCL11A-6400 | + | AGUGCAGAAGUUUAUCUGUGA | 21 | 8004 |
| BCL11A-6401 | + | CAGUGCAGAAGUUUAUCUGUGA | 22 | 8005 |
| BCL11A-6402 | + | CCAGUGCAGAAGUUUAUCUGUGA | 23 | 8006 |
| BCL11A-6403 | + | UCCAGUGCAGAAGUUUAUCUGUGA | 24 | 8007 |
| BCL11A-6404 | + | GAGCUCCAUGUGCAGAAC | 18 | 8008 |
| BCL11A-6405 | + | AGAGCUCCAUGUGCAGAAC | 19 | 8009 |
| BCL11A-6406 | + | UAGAGCUCCAUGUGCAGAAC | 20 | 8010 |
| BCL11A-6407 | + | UUAGAGCUCCAUGUGCAGAAC | 21 | 8011 |
| BCL11A-6408 | + | AUUAGAGCUCCAUGUGCAGAAC | 22 | 8012 |
| BCL11A-6409 | + | GAUUAGAGCUCCAUGUGCAGAAC | 23 | 8013 |
| BCL11A-6410 | + | GGAUUAGAGCUCCAUGUGCAGAAC | 24 | 8014 |
| BCL11A-6411 | + | UAUUAUUGGGUUACUUAC | 18 | 8015 |
| BCL11A-6412 | + | CUAUUAUUGGGUUACUUAC | 19 | 8016 |
| BCL11A-6413 | + | ACUAUUAUUGGGUUACUUAC | 20 | 8017 |
| BCL11A-6414 | + | UACUAUUAUUGGGUUACUUAC | 21 | 8018 |
| BCL11A-6415 | + | UUACUAUUAUUGGGUUACUUAC | 22 | 8019 |
| BCL11A-6416 | + | AUUACUAUUAUUGGGUUACUUAC | 23 | 8020 |
| BCL11A-6417 | + | UAUUACUAUUAUUGGGUUACUUAC | 24 | 8021 |
| BCL11A-6418 | + | ACCUGGAUGCCAACCUCC | 18 | 8022 |
| BCL11A-6419 | + | GACCUGGAUGCCAACCUCC | 19 | 8023 |
| BCL11A-6420 | + | UGACCUGGAUGCCAACCUCC | 20 | 8024 |
| BCL11A-6421 | + | GUGACCUGGAUGCCAACCUCC | 21 | 8025 |
| BCL11A-6422 | + | CGUGACCUGGAUGCCAACCUCC | 22 | 8026 |
| BCL11A-6423 | + | GCGUGACCUGGAUGCCAACCUCC | 23 | 8027 |
| BCL11A-6424 | + | GGCGUGACCUGGAUGCCAACCUCC | 24 | 8028 |
| BCL11A-6425 | + | UCUGCACUCAUCCCAGGC | 18 | 8029 |
| BCL11A-6426 | + | UUCUGCACUCAUCCCAGGC | 19 | 8030 |
| BCL11A-6427 | + | AUUCUGCACUCAUCCCAGGC | 20 | 8031 |
| BCL11A-6428 | + | UAUUCUGCACUCAUCCCAGGC | 21 | 8032 |
| BCL11A-6429 | + | AUAUUCUGCACUCAUCCCAGGC | 22 | 8033 |
| BCL11A-6430 | + | CAUAUUCUGCACUCAUCCCAGGC | 23 | 8034 |
| BCL11A-6431 | + | GCAUAUUCUGCACUCAUCCCAGGC | 24 | 8035 |
| BCL11A-6432 | + | GAGGUCAUGAUCCCCUUC | 18 | 8036 |
| BCL11A-6433 | + | GGAGGUCAUGAUCCCCUUC | 19 | 8037 |
| BCL11A-5471 | + | AGGAGGUCAUGAUCCCCUUC | 20 | 8038 |
| BCL11A-6434 | + | GAGGAGGUCAUGAUCCCCUUC | 21 | 8039 |
| BCL11A-6435 | + | UGAGGAGGUCAUGAUCCCCUUC | 22 | 8040 |
| BCL11A-6436 | + | GUGAGGAGGUCAUGAUCCCCUUC | 23 | 8041 |
| BCL11A-6437 | + | GGUGAGGAGGUCAUGAUCCCCUUC | 24 | 8042 |
| BCL11A-6438 | + | AUCUGUAAGAAUGGCUUC | 18 | 8043 |
| BCL11A-6439 | + | CAUCUGUAAGAAUGGCUUC | 19 | 8044 |
| BCL11A-6440 | + | UCAUCUGUAAGAAUGGCUUC | 20 | 8045 |
| BCL11A-6441 | + | AUCAUCUGUAAGAAUGGCUUC | 21 | 8046 |
| BCL11A-6442 | + | CAUCAUCUGUAAGAAUGGCUUC | 22 | 8047 |
| BCL11A-6443 | + | UCAUCAUCUGUAAGAAUGGCUUC | 23 | 8048 |
| BCL11A-6444 | + | UUCAUCAUCUGUAAGAAUGGCUUC | 24 | 8049 |
| BCL11A-6445 | + | UCAUCUCGAUUGGUGAAG | 18 | 8050 |
| BCL11A-6446 | + | UUCAUCUCGAUUGGUGAAG | 19 | 8051 |
| BCL11A-5355 | + | UUUCAUCUCGAUUGGUGAAG | 20 | 8052 |
| BCL11A-6447 | + | UUUUCAUCUCGAUUGGUGAAG | 21 | 8053 |
| BCL11A-6448 | + | UUUUUCAUCUCGAUUGGUGAAG | 22 | 8054 |
| BCL11A-6449 | + | UUUUUUCAUCUCGAUUGGUGAAG | 23 | 8055 |
| BCL11A-6450 | + | CUUUUUUCAUCUCGAUUGGUGAAG | 24 | 8056 |
| BCL11A-6451 | + | UCCACAGCUUUUUCUAAG | 18 | 8057 |
| BCL11A-6452 | + | AUCCACAGCUUUUUCUAAG | 19 | 8058 |
| BCL11A-6453 | + | UAUCCACAGCUUUUUCUAAG | 20 | 8059 |
| BCL11A-6454 | + | UUAUCCACAGCUUUUUCUAAG | 21 | 8060 |
| BCL11A-6455 | + | CUUAUCCACAGCUUUUUCUAAG | 22 | 8061 |
| BCL11A-6456 | + | GCUUAUCCACAGCUUUUUCUAAG | 23 | 8062 |
| BCL11A-6457 | + | GGCUUAUCCACAGCUUUUUCUAAG | 24 | 8063 |
| BCL11A-6458 | + | AUCUGGCACUGCCCACAG | 18 | 8064 |
| BCL11A-6459 | + | CAUCUGGCACUGCCCACAG | 19 | 8065 |
| BCL11A-6460 | + | UCAUCUGGCACUGCCCACAG | 20 | 8066 |
| BCL11A-6461 | + | UUCAUCUGGCACUGCCCACAG | 21 | 8067 |
| BCL11A-6462 | + | GUUCAUCUGGCACUGCCCACAG | 22 | 8068 |
| BCL11A-6463 | + | AGUUCAUCUGGCACUGCCCACAG | 23 | 8069 |
| BCL11A-6464 | + | AAGUUCAUCUGGCACUGCCCACAG | 24 | 8070 |
| BCL11A-6465 | + | CUCCAUGUGCAGAACGAG | 18 | 8071 |
| BCL11A-6466 | + | GCUCCAUGUGCAGAACGAG | 19 | 8072 |
| BCL11A-5476 | + | AGCUCCAUGUGCAGAACGAG | 20 | 8073 |
| BCL11A-6467 | + | GAGCUCCAUGUGCAGAACGAG | 21 | 8074 |
| BCL11A-6468 | + | AGAGCUCCAUGUGCAGAACGAG | 22 | 8075 |
| BCL11A-6469 | + | UAGAGCUCCAUGUGCAGAACGAG | 23 | 8076 |
| BCL11A-6470 | + | UUAGAGCUCCAUGUGCAGAACGAG | 24 | 8077 |
| BCL11A-6471 | + | UGUGCAGAACGAGGGGAG | 18 | 8078 |
| BCL11A-6472 | + | AUGUGCAGAACGAGGGGAG | 19 | 8079 |
| BCL11A-6473 | + | CAUGUGCAGAACGAGGGGAG | 20 | 8080 |
| BCL11A-6474 | + | CCAUGUGCAGAACGAGGGGAG | 21 | 8081 |
| BCL11A-6475 | + | UCCAUGUGCAGAACGAGGGGAG | 22 | 8082 |
| BCL11A-6476 | + | CUCCAUGUGCAGAACGAGGGGAG | 23 | 8083 |
| BCL11A-6477 | + | GCUCCAUGUGCAGAACGAGGGGAG | 24 | 8084 |
| BCL11A-6478 | + | AGCUCCAUGUGCAGAACG | 18 | 8085 |
| BCL11A-6479 | + | GAGCUCCAUGUGCAGAACG | 19 | 8086 |
| BCL11A-5357 | + | AGAGCUCCAUGUGCAGAACG | 20 | 8087 |
| BCL11A-6480 | + | UAGAGCUCCAUGUGCAGAACG | 21 | 8088 |
| BCL11A-6481 | + | UUAGAGCUCCAUGUGCAGAACG | 22 | 8089 |
| BCL11A-6482 | + | AUUAGAGCUCCAUGUGCAGAACG | 23 | 8090 |
| BCL11A-6483 | + | GAUUAGAGCUCCAUGUGCAGAACG | 24 | 8091 |
| BCL11A-6484 | + | CUGCACUCAUCCCAGGCG | 18 | 8092 |
| BCL11A-6485 | + | UCUGCACUCAUCCCAGGCG | 19 | 8093 |
| BCL11A-5480 | + | UUCUGCACUCAUCCCAGGCG | 20 | 8094 |
| BCL11A-6486 | + | AUUCUGCACUCAUCCCAGGCG | 21 | 8095 |
| BCL11A-6487 | + | UAUUCUGCACUCAUCCCAGGCG | 22 | 8096 |
| BCL11A-6488 | + | AUAUUCUGCACUCAUCCCAGGCG | 23 | 8097 |
| BCL11A-6489 | + | CAUAUUCUGCACUCAUCCCAGGCG | 24 | 8098 |
| BCL11A-6490 | + | GGGUUUGCCUUGCUUGCG | 18 | 8099 |
| BCL11A-6491 | + | GGGGUUUGCCUUGCUUGCG | 19 | 8100 |
| BCL11A-6492 | + | UGGGGUUUGCCUUGCUUGCG | 20 | 8101 |
| BCL11A-6493 | + | CUGGGGUUUGCCUUGCUUGCG | 21 | 8102 |
| BCL11A-6494 | + | GCUGGGGUUUGCCUUGCUUGCG | 22 | 8103 |
| BCL11A-6495 | + | UGCUGGGGUUUGCCUUGCUUGCG | 23 | 8104 |
| BCL11A-6496 | + | GUGCUGGGGUUUGCCUUGCUUGCG | 24 | 8105 |
| BCL11A-6497 | + | CCAUGUGCAGAACGAGGG | 18 | 8106 |
| BCL11A-6498 | + | UCCAUGUGCAGAACGAGGG | 19 | 8107 |
| BCL11A-6499 | + | CUCCAUGUGCAGAACGAGGG | 20 | 8108 |
| BCL11A-6500 | + | GCUCCAUGUGCAGAACGAGGG | 21 | 8109 |
| BCL11A-6501 | + | AGCUCCAUGUGCAGAACGAGGG | 22 | 8110 |
| BCL11A-6502 | + | GAGCUCCAUGUGCAGAACGAGGG | 23 | 8111 |
| BCL11A-6503 | + | AGAGCUCCAUGUGCAGAACGAGGG | 24 | 8112 |
| BCL11A-6504 | + | GACAUGGUGGGCUGCGGG | 18 | 8113 |
| BCL11A-6505 | + | AGACAUGGUGGGCUGCGGG | 19 | 8114 |
| BCL11A-6506 | + | GAGACAUGGUGGGCUGCGGG | 20 | 8115 |
| BCL11A-6507 | + | CGAGACAUGGUGGGCUGCGGG | 21 | 8116 |
| BCL11A-6508 | + | GCGAGACAUGGUGGGCUGCGGG | 22 | 8117 |
| BCL11A-6509 | + | GGCGAGACAUGGUGGGCUGCGGG | 23 | 8118 |
| BCL11A-6510 | + | CGGCGAGACAUGGUGGGCUGCGGG | 24 | 8119 |
| BCL11A-6511 | + | CAUGUGCAGAACGAGGGG | 18 | 8120 |
| BCL11A-6512 | + | CCAUGUGCAGAACGAGGGG | 19 | 8121 |
| BCL11A-5488 | + | UCCAUGUGCAGAACGAGGGG | 20 | 8122 |
| BCL11A-6513 | + | CUCCAUGUGCAGAACGAGGGG | 21 | 8123 |
| BCL11A-6514 | + | GCUCCAUGUGCAGAACGAGGGG | 22 | 8124 |
| BCL11A-6515 | + | AGCUCCAUGUGCAGAACGAGGGG | 23 | 8125 |
| BCL11A-6516 | + | GAGCUCCAUGUGCAGAACGAGGGG | 24 | 8126 |
| BCL11A-6517 | + | CAAGAGGCUCGGCUGUGG | 18 | 8127 |
| BCL11A-6518 | + | UCAAGAGGCUCGGCUGUGG | 19 | 8128 |
| BCL11A-6519 | + | UUCAAGAGGCUCGGCUGUGG | 20 | 8129 |
| BCL11A-6520 | + | CUUCAAGAGGCUCGGCUGUGG | 21 | 8130 |
| BCL11A-6521 | + | GCUUCAAGAGGCUCGGCUGUGG | 22 | 8131 |
| BCL11A-6522 | + | GGCUUCAAGAGGCUCGGCUGUGG | 23 | 8132 |
| BCL11A-6523 | + | UGGCUUCAAGAGGCUCGGCUGUGG | 24 | 8133 |
| BCL11A-6524 | + | UGCUUGCGGCGAGACAUG | 18 | 8134 |
| BCL11A-6525 | + | UUGCUUGCGGCGAGACAUG | 19 | 8135 |
| BCL11A-6526 | + | CUUGCUUGCGGCGAGACAUG | 20 | 8136 |
| BCL11A-6527 | + | CCUUGCUUGCGGCGAGACAUG | 21 | 8137 |
| BCL11A-6528 | + | GCCUUGCUUGCGGCGAGACAUG | 22 | 8138 |
| BCL11A-6529 | + | UGCCUUGCUUGCGGCGAGACAUG | 23 | 8139 |
| BCL11A-6530 | + | UUGCCUUGCUUGCGGCGAGACAUG | 24 | 8140 |
| BCL11A-6531 | + | CAACUUACAAAUACCCUG | 18 | 8141 |
| BCL11A-6532 | + | UCAACUUACAAAUACCCUG | 19 | 8142 |
| BCL11A-5494 | + | CUCAACUUACAAAUACCCUG | 20 | 8143 |
| BCL11A-6533 | + | GCUCAACUUACAAAUACCCUG | 21 | 8144 |
| BCL11A-6534 | + | GGCUCAACUUACAAAUACCCUG | 22 | 8145 |
| BCL11A-6535 | + | AGGCUCAACUUACAAAUACCCUG | 23 | 8146 |
| BCL11A-6536 | + | AAGGCUCAACUUACAAAUACCCUG | 24 | 8147 |
| BCL11A-6537 | + | GUUGUACAUGUGUAGCUG | 18 | 8148 |
| BCL11A-6538 | + | AGUUGUACAUGUGUAGCUG | 19 | 8149 |
| BCL11A-6539 | + | AAGUUGUACAUGUGUAGCUG | 20 | 8150 |
| BCL11A-6540 | + | CAAGUUGUACAUGUGUAGCUG | 21 | 8151 |
| BCL11A-6541 | + | GCAAGUUGUACAUGUGUAGCUG | 22 | 8152 |
| BCL11A-6542 | + | UGCAAGUUGUACAUGUGUAGCUG | 23 | 8153 |
| BCL11A-6543 | + | UUGCAAGUUGUACAUGUGUAGCUG | 24 | 8154 |
| BCL11A-6544 | + | GCGAGACAUGGUGGGCUG | 18 | 8155 |
| BCL11A-6545 | + | GGCGAGACAUGGUGGGCUG | 19 | 8156 |
| BCL11A-5361 | + | CGGCGAGACAUGGUGGGCUG | 20 | 8157 |
| BCL11A-6546 | + | GCGGCGAGACAUGGUGGGCUG | 21 | 8158 |
| BCL11A-6547 | + | UGCGGCGAGACAUGGUGGGCUG | 22 | 8159 |
| BCL11A-6548 | + | UUGCGGCGAGACAUGGUGGGCUG | 23 | 8160 |
| BCL11A-6549 | + | CUUGCGGCGAGACAUGGUGGGCUG | 24 | 8161 |
| BCL11A-6550 | + | UUCCCGUUUGCUUAAGUG | 18 | 8162 |
| BCL11A-6551 | + | AUUCCCGUUUGCUUAAGUG | 19 | 8163 |
| BCL11A-6552 | + | AAUUCCCGUUUGCUUAAGUG | 20 | 8164 |
| BCL11A-6553 | + | GAAUUCCCGUUUGCUUAAGUG | 21 | 8165 |
| BCL11A-6554 | + | AGAAUUCCCGUUUGCUUAAGUG | 22 | 8166 |
| BCL11A-6555 | + | GAGAAUUCCCGUUUGCUUAAGUG | 23 | 8167 |
| BCL11A-6556 | + | CGAGAAUUCCCGUUUGCUUAAGUG | 24 | 8168 |
| BCL11A-6557 | + | GGAGAGGCCCCUCCAGUG | 18 | 8169 |
| BCL11A-6558 | + | AGGAGAGGCCCCUCCAGUG | 19 | 8170 |
| BCL11A-6559 | + | GAGGAGAGGCCCCUCCAGUG | 20 | 8171 |
| BCL11A-6560 | + | GGAGGAGAGGCCCCUCCAGUG | 21 | 8172 |
| BCL11A-6561 | + | GGGAGGAGAGGCCCCUCCAGUG | 22 | 8173 |
| BCL11A-6562 | + | GGGGAGGAGAGGCCCCUCCAGUG | 23 | 8174 |
| BCL11A-6563 | + | AGGGGAGGAGAGGCCCCUCCAGUG | 24 | 8175 |
| BCL11A-6564 | + | UGGCACUGCCCACAGGUG | 18 | 8176 |
| BCL11A-6565 | + | CUGGCACUGCCCACAGGUG | 19 | 8177 |
| BCL11A-5498 | + | UCUGGCACUGCCCACAGGUG | 20 | 8178 |
| BCL11A-6566 | + | AUCUGGCACUGCCCACAGGUG | 21 | 8179 |
| BCL11A-6567 | + | CAUCUGGCACUGCCCACAGGUG | 22 | 8180 |
| BCL11A-6568 | + | UCAUCUGGCACUGCCCACAGGUG | 23 | 8181 |
| BCL11A-6569 | + | UUCAUCUGGCACUGCCCACAGGUG | 24 | 8182 |
| BCL11A-6570 | + | UUUUCAUCUCGAUUGGUG | 18 | 8183 |
| BCL11A-6571 | + | UUUUUCAUCUCGAUUGGUG | 19 | 8184 |
| BCL11A-6572 | + | UUUUUUCAUCUCGAUUGGUG | 20 | 8185 |
| BCL11A-6573 | + | CUUUUUUCAUCUCGAUUGGUG | 21 | 8186 |
| BCL11A-6574 | + | GCUUUUUUCAUCUCGAUUGGUG | 22 | 8187 |
| BCL11A-6575 | + | UGCUUUUUUCAUCUCGAUUGGUG | 23 | 8188 |
| BCL11A-6576 | + | AUGCUUUUUUCAUCUCGAUUGGUG | 24 | 8189 |
| BCL11A-6577 | + | GGAUUAGAGCUCCAUGUG | 18 | 8190 |
| BCL11A-6578 | + | GGGAUUAGAGCUCCAUGUG | 19 | 8191 |
| BCL11A-6579 | + | GGGGAUUAGAGCUCCAUGUG | 20 | 8192 |
| BCL11A-6580 | + | UGGGGAUUAGAGCUCCAUGUG | 21 | 8193 |
| BCL11A-6581 | + | GUGGGGAUUAGAGCUCCAUGUG | 22 | 8194 |
| BCL11A-6582 | + | CGUGGGGAUUAGAGCUCCAUGUG | 23 | 8195 |
| BCL11A-6583 | + | GCGUGGGGAUUAGAGCUCCAUGUG | 24 | 8196 |
| BCL11A-6584 | + | CUUUUUUCAUCUCGAUUG | 18 | 8197 |
| BCL11A-6585 | + | GCUUUUUUCAUCUCGAUUG | 19 | 8198 |
| BCL11A-6586 | + | UGCUUUUUUCAUCUCGAUUG | 20 | 8199 |
| BCL11A-6587 | + | AUGCUUUUUUCAUCUCGAUUG | 21 | 8200 |
| BCL11A-6588 | + | GAUGCUUUUUUCAUCUCGAUUG | 22 | 8201 |
| BCL11A-6589 | + | GGAUGCUUUUUUCAUCUCGAUUG | 23 | 8202 |
| BCL11A-6590 | + | UGGAUGCUUUUUUCAUCUCGAUUG | 24 | 8203 |
| BCL11A-6591 | + | GAGGCUCGGCUGUGGUUG | 18 | 8204 |
| BCL11A-6592 | + | AGAGGCUCGGCUGUGGUUG | 19 | 8205 |
| BCL11A-6593 | + | AAGAGGCUCGGCUGUGGUUG | 20 | 8206 |
| BCL11A-6594 | + | CAAGAGGCUCGGCUGUGGUUG | 21 | 8207 |
| BCL11A-6595 | + | UCAAGAGGCUCGGCUGUGGUUG | 22 | 8208 |
| BCL11A-6596 | + | UUCAAGAGGCUCGGCUGUGGUUG | 23 | 8209 |
| BCL11A-6597 | + | CUUCAAGAGGCUCGGCUGUGGUUG | 24 | 8210 |
| BCL11A-6598 | + | AUAAGAAUGUCCCCCAAU | 18 | 8211 |
| BCL11A-6599 | + | AAUAAGAAUGUCCCCCAAU | 19 | 8212 |
| BCL11A-5502 | + | AAAUAAGAAUGUCCCCCAAU | 20 | 8213 |
| BCL11A-6600 | + | AAAAUAAGAAUGUCCCCCAAU | 21 | 8214 |
| BCL11A-6601 | + | AAAAAUAAGAAUGUCCCCCAAU | 22 | 8215 |
| BCL11A-6602 | + | UAAAAAUAAGAAUGUCCCCCAAU | 23 | 8216 |
| BCL11A-6603 | + | AUAAAAAUAAGAAUGUCCCCCAAU | 24 | 8217 |
| BCL11A-6604 | + | CAUCCCAGGCGUGGGGAU | 18 | 8218 |
| BCL11A-6605 | + | UCAUCCCAGGCGUGGGGAU | 19 | 8219 |
| BCL11A-6606 | + | CUCAUCCCAGGCGUGGGGAU | 20 | 8220 |
| BCL11A-6607 | + | ACUCAUCCCAGGCGUGGGGAU | 21 | 8221 |
| BCL11A-6608 | + | CACUCAUCCCAGGCGUGGGGAU | 22 | 8222 |
| BCL11A-6609 | + | GCACUCAUCCCAGGCGUGGGGAU | 23 | 8223 |
| BCL11A-6610 | + | UGCACUCAUCCCAGGCGUGGGGAU | 24 | 8224 |
| BCL11A-6611 | + | UCAACUUACAAAUACCCU | 18 | 8225 |
| BCL11A-6612 | + | CUCAACUUACAAAUACCCU | 19 | 8226 |
| BCL11A-6613 | + | GCUCAACUUACAAAUACCCU | 20 | 8227 |
| BCL11A-6614 | + | GGCUCAACUUACAAAUACCCU | 21 | 8228 |
| BCL11A-6615 | + | AGGCUCAACUUACAAAUACCCU | 22 | 8229 |
| BCL11A-6616 | + | AAGGCUCAACUUACAAAUACCCU | 23 | 8230 |
| BCL11A-6617 | + | UAAGGCUCAACUUACAAAUACCCU | 24 | 8231 |
| BCL11A-6618 | + | GGCGAGACAUGGUGGGCU | 18 | 8232 |
| BCL11A-6619 | + | CGGCGAGACAUGGUGGGCU | 19 | 8233 |
| BCL11A-6620 | + | GCGGCGAGACAUGGUGGGCU | 20 | 8234 |
| BCL11A-6621 | + | UGCGGCGAGACAUGGUGGGCU | 21 | 8235 |
| BCL11A-6622 | + | UUGCGGCGAGACAUGGUGGGCU | 22 | 8236 |
| BCL11A-6623 | + | CUUGCGGCGAGACAUGGUGGGCU | 23 | 8237 |
| BCL11A-6624 | + | GCUUGCGGCGAGACAUGGUGGGCU | 24 | 8238 |
| BCL11A-6625 | + | CAGUGCAGAAGUUUAUCU | 18 | 8239 |
| BCL11A-6626 | + | CCAGUGCAGAAGUUUAUCU | 19 | 8240 |
| BCL11A-6627 | + | UCCAGUGCAGAAGUUUAUCU | 20 | 8241 |
| BCL11A-6628 | + | CUCCAGUGCAGAAGUUUAUCU | 21 | 8242 |
| BCL11A-6629 | + | CCUCCAGUGCAGAAGUUUAUCU | 22 | 8243 |
| BCL11A-6630 | + | CCCUCCAGUGCAGAAGUUUAUCU | 23 | 8244 |
| BCL11A-6631 | + | CCCCUCCAGUGCAGAAGUUUAUCU | 24 | 8245 |
| BCL11A-6632 | + | CUGGCACUGCCCACAGGU | 18 | 8246 |
| BCL11A-6633 | + | UCUGGCACUGCCCACAGGU | 19 | 8247 |
| BCL11A-6634 | + | AUCUGGCACUGCCCACAGGU | 20 | 8248 |
| BCL11A-6635 | + | CAUCUGGCACUGCCCACAGGU | 21 | 8249 |
| BCL11A-6636 | + | UCAUCUGGCACUGCCCACAGGU | 22 | 8250 |
| BCL11A-6637 | + | UUCAUCUGGCACUGCCCACAGGU | 23 | 8251 |
| BCL11A-6638 | + | GUUCAUCUGGCACUGCCCACAGGU | 24 | 8252 |
| BCL11A-6639 | + | AAGAGGCUCGGCUGUGGU | 18 | 8253 |
| BCL11A-6640 | + | CAAGAGGCUCGGCUGUGGU | 19 | 8254 |
| BCL11A-5366 | + | UCAAGAGGCUCGGCUGUGGU | 20 | 8255 |
| BCL11A-6641 | + | UUCAAGAGGCUCGGCUGUGGU | 21 | 8256 |
| BCL11A-6642 | + | CUUCAAGAGGCUCGGCUGUGGU | 22 | 8257 |
| BCL11A-6643 | + | GCUUCAAGAGGCUCGGCUGUGGU | 23 | 8258 |
| BCL11A-6644 | + | GGCUUCAAGAGGCUCGGCUGUGGU | 24 | 8259 |
| BCL11A-6645 | + | CCUGCUAUGUGUUCCUGU | 18 | 8260 |
| BCL11A-6646 | + | ACCUGCUAUGUGUUCCUGU | 19 | 8261 |
| BCL11A-6647 | + | UACCUGCUAUGUGUUCCUGU | 20 | 8262 |
| BCL11A-6648 | + | UUACCUGCUAUGUGUUCCUGU | 21 | 8263 |
| BCL11A-6649 | + | UUUACCUGCUAUGUGUUCCUGU | 22 | 8264 |
| BCL11A-6650 | + | AUUUACCUGCUAUGUGUUCCUGU | 23 | 8265 |
| BCL11A-6651 | + | CAUUUACCUGCUAUGUGUUCCUGU | 24 | 8266 |
| BCL11A-6652 | + | GGAGGUCAUGAUCCCCUU | 18 | 8267 |
| BCL11A-6653 | + | AGGAGGUCAUGAUCCCCUU | 19 | 8268 |
| BCL11A-6654 | + | GAGGAGGUCAUGAUCCCCUU | 20 | 8269 |
| BCL11A-6655 | + | UGAGGAGGUCAUGAUCCCCUU | 21 | 8270 |
| BCL11A-6656 | + | GUGAGGAGGUCAUGAUCCCCUU | 22 | 8271 |
| BCL11A-6657 | + | GGUGAGGAGGUCAUGAUCCCCUU | 23 | 8272 |
| BCL11A-6658 | + | AGGUGAGGAGGUCAUGAUCCCCUU | 24 | 8273 |
| BCL11A-6659 | + | CUGCUAUGUGUUCCUGUU | 18 | 8274 |
| BCL11A-6660 | + | CCUGCUAUGUGUUCCUGUU | 19 | 8275 |
| BCL11A-5513 | + | ACCUGCUAUGUGUUCCUGUU | 20 | 8276 |
| BCL11A-6661 | + | UACCUGCUAUGUGUUCCUGUU | 21 | 8277 |
| BCL11A-6662 | + | UUACCUGCUAUGUGUUCCUGUU | 22 | 8278 |
| BCL11A-6663 | + | UUUACCUGCUAUGUGUUCCUGUU | 23 | 8279 |
| BCL11A-6664 | + | AUUUACCUGCUAUGUGUUCCUGUU | 24 | 8280 |
| BCL11A-6665 | − | AUUUUUAUCGAGCACAAA | 18 | 8281 |
| BCL11A-6666 | − | UAUUUUUAUCGAGCACAAA | 19 | 8282 |
| BCL11A-5342 | − | UUAUUUUUAUCGAGCACAAA | 20 | 8283 |
| BCL11A-6667 | − | CUUAUUUUUAUCGAGCACAAA | 21 | 8284 |
| BCL11A-6668 | − | UCUUAUUUUUAUCGAGCACAAA | 22 | 8285 |
| BCL11A-6669 | − | UUCUUAUUUUUAUCGAGCACAAA | 23 | 8286 |
| BCL11A-6670 | − | AUUCUUAUUUUUAUCGAGCACAAA | 24 | 8287 |
| BCL11A-6671 | − | AGAGGAAUUUGCCCCAAA | 18 | 8288 |
| BCL11A-6672 | − | UAGAGGAAUUUGCCCCAAA | 19 | 8289 |
| BCL11A-6673 | − | CUAGAGGAAUUUGCCCCAAA | 20 | 8290 |
| BCL11A-6674 | − | UCUAGAGGAAUUUGCCCCAAA | 21 | 8291 |
| BCL11A-6675 | − | AUCUAGAGGAAUUUGCCCCAAA | 22 | 8292 |
| BCL11A-6676 | − | CAUCUAGAGGAAUUUGCCCCAAA | 23 | 8293 |
| BCL11A-6677 | − | UCAUCUAGAGGAAUUUGCCCCAAA | 24 | 8294 |
| BCL11A-6678 | − | CCCCAGCACUUAAGCAAA | 18 | 8295 |
| BCL11A-6679 | − | ACCCCAGCACUUAAGCAAA | 19 | 8296 |
| BCL11A-5443 | − | AACCCCAGCACUUAAGCAAA | 20 | 8297 |
| BCL11A-6680 | − | AAACCCCAGCACUUAAGCAAA | 21 | 8298 |
| BCL11A-6681 | − | CAAACCCCAGCACUUAAGCAAA | 22 | 8299 |
| BCL11A-6682 | − | GCAAACCCCAGCACUUAAGCAAA | 23 | 8300 |
| BCL11A-6683 | − | GGCAAACCCCAGCACUUAAGCAAA | 24 | 8301 |
| BCL11A-6684 | − | UAUUUUUAUCGAGCACAA | 18 | 8302 |
| BCL11A-6685 | − | UUAUUUUUAUCGAGCACAA | 19 | 8303 |
| BCL11A-6686 | − | CUUAUUUUUAUCGAGCACAA | 20 | 8304 |
| BCL11A-6687 | − | UCUUAUUUUUAUCGAGCACAA | 21 | 8305 |
| BCL11A-6688 | − | UUCUUAUUUUUAUCGAGCACAA | 22 | 8306 |
| BCL11A-6689 | − | AUUCUUAUUUUUAUCGAGCACAA | 23 | 8307 |
| BCL11A-6690 | − | CAUUCUUAUUUUUAUCGAGCACAA | 24 | 8308 |
| BCL11A-6691 | − | CACCUUCCCCUUCACCAA | 18 | 8309 |
| BCL11A-6692 | − | CCACCUUCCCCUUCACCAA | 19 | 8310 |
| BCL11A-6693 | − | GCCACCUUCCCCUUCACCAA | 20 | 8311 |
| BCL11A-6694 | − | AGCCACCUUCCCCUUCACCAA | 21 | 8312 |
| BCL11A-6695 | − | AAGCCACCUUCCCCUUCACCAA | 22 | 8313 |
| BCL11A-6696 | − | UAAGCCACCUUCCCCUUCACCAA | 23 | 8314 |
| BCL11A-6697 | − | AUAAGCCACCUUCCCCUUCACCAA | 24 | 8315 |
| BCL11A-6698 | − | ACCCCAGCACUUAAGCAA | 18 | 8316 |
| BCL11A-6699 | − | AACCCCAGCACUUAAGCAA | 19 | 8317 |
| BCL11A-6700 | − | AAACCCCAGCACUUAAGCAA | 20 | 8318 |
| BCL11A-6701 | − | CAAACCCCAGCACUUAAGCAA | 21 | 8319 |
| BCL11A-6702 | − | GCAAACCCCAGCACUUAAGCAA | 22 | 8320 |
| BCL11A-6703 | − | GGCAAACCCCAGCACUUAAGCAA | 23 | 8321 |
| BCL11A-6704 | − | AGGCAAACCCCAGCACUUAAGCAA | 24 | 8322 |
| BCL11A-6705 | − | GGAACACAUAGCAGGUAA | 18 | 8323 |
| BCL11A-6706 | − | AGGAACACAUAGCAGGUAA | 19 | 8324 |
| BCL11A-6707 | − | CAGGAACACAUAGCAGGUAA | 20 | 8325 |
| BCL11A-6708 | − | ACAGGAACACAUAGCAGGUAA | 21 | 8326 |
| BCL11A-6709 | − | AACAGGAACACAUAGCAGGUAA | 22 | 8327 |
| BCL11A-6710 | − | AAACAGGAACACAUAGCAGGUAA | 23 | 8328 |
| BCL11A-6711 | − | CAAACAGGAACACAUAGCAGGUAA | 24 | 8329 |
| BCL11A-6712 | − | CUCCCCUCGUUCUGCACA | 18 | 8330 |
| BCL11A-6713 | − | CCUCCCCUCGUUCUGCACA | 19 | 8331 |
| BCL11A-5448 | − | UCCUCCCCUCGUUCUGCACA | 20 | 8332 |
| BCL11A-6714 | − | CUCCUCCCCUCGUUCUGCACA | 21 | 8333 |
| BCL11A-6715 | − | UCUCCUCCCCUCGUUCUGCACA | 22 | 8334 |
| BCL11A-6716 | − | CUCUCCUCCCCUCGUUCUGCACA | 23 | 8335 |
| BCL11A-6717 | − | CCUCUCCUCCCCUCGUUCUGCACA | 24 | 8336 |
| BCL11A-6718 | − | UGCCAGAUGAACUUCCCA | 18 | 8337 |
| BCL11A-6719 | − | GUGCCAGAUGAACUUCCCA | 19 | 8338 |
| BCL11A-6720 | − | AGUGCCAGAUGAACUUCCCA | 20 | 8339 |
| BCL11A-6721 | − | CAGUGCCAGAUGAACUUCCCA | 21 | 8340 |
| BCL11A-6722 | − | GCAGUGCCAGAUGAACUUCCCA | 22 | 8341 |
| BCL11A-6723 | − | GGCAGUGCCAGAUGAACUUCCCA | 23 | 8342 |
| BCL11A-6724 | − | GGGCAGUGCCAGAUGAACUUCCCA | 24 | 8343 |
| BCL11A-6725 | − | GCAGGUAAAUGAGAAGCA | 18 | 8344 |
| BCL11A-6726 | − | AGCAGGUAAAUGAGAAGCA | 19 | 8345 |
| BCL11A-5451 | − | UAGCAGGUAAAUGAGAAGCA | 20 | 8346 |
| BCL11A-6727 | − | AUAGCAGGUAAAUGAGAAGCA | 21 | 8347 |
| BCL11A-6728 | − | CAUAGCAGGUAAAUGAGAAGCA | 22 | 8348 |
| BCL11A-6729 | − | ACAUAGCAGGUAAAUGAGAAGCA | 23 | 8349 |
| BCL11A-6730 | − | CACAUAGCAGGUAAAUGAGAAGCA | 24 | 8350 |
| BCL11A-6731 | − | CACAGAUAAACUUCUGCA | 18 | 8351 |
| BCL11A-6732 | − | UCACAGAUAAACUUCUGCA | 19 | 8352 |
| BCL11A-6733 | − | UUCACAGAUAAACUUCUGCA | 20 | 8353 |
| BCL11A-6734 | − | UUUCACAGAUAAACUUCUGCA | 21 | 8354 |
| BCL11A-6735 | − | CUUUCACAGAUAAACUUCUGCA | 22 | 8355 |
| BCL11A-6736 | − | UCUUUCACAGAUAAACUUCUGCA | 23 | 8356 |
| BCL11A-6737 | − | UUCUUUCACAGAUAAACUUCUGCA | 24 | 8357 |
| BCL11A-6738 | − | CCCGUUGGGAGCUCCAGA | 18 | 8358 |
| BCL11A-6739 | − | GCCCGUUGGGAGCUCCAGA | 19 | 8359 |
| BCL11A-5453 | − | GGCCCGUUGGGAGCUCCAGA | 20 | 8360 |
| BCL11A-6740 | − | CGGCCCGUUGGGAGCUCCAGA | 21 | 8361 |
| BCL11A-6741 | − | ACGGCCCGUUGGGAGCUCCAGA | 22 | 8362 |
| BCL11A-6742 | − | CACGGCCCGUUGGGAGCUCCAGA | 23 | 8363 |
| BCL11A-6743 | − | CCACGGCCCGUUGGGAGCUCCAGA | 24 | 8364 |
| BCL11A-6744 | − | GUUUAUCAACGUCAUCUA | 18 | 8365 |
| BCL11A-6745 | − | UGUUUAUCAACGUCAUCUA | 19 | 8366 |
| BCL11A-6746 | − | UUGUUUAUCAACGUCAUCUA | 20 | 8367 |
| BCL11A-6747 | − | AUUGUUUAUCAACGUCAUCUA | 21 | 8368 |
| BCL11A-6748 | − | GAUUGUUUAUCAACGUCAUCUA | 22 | 8369 |
| BCL11A-6749 | − | CGAUUGUUUAUCAACGUCAUCUA | 23 | 8370 |
| BCL11A-6750 | − | ACGAUUGUUUAUCAACGUCAUCUA | 24 | 8371 |
| BCL11A-6751 | − | GGGACAUUCUUAUUUUUA | 18 | 8372 |
| BCL11A-6752 | − | GGGGACAUUCUUAUUUUUA | 19 | 8373 |
| BCL11A-6753 | − | GGGGGACAUUCUUAUUUUUA | 20 | 8374 |
| BCL11A-6754 | − | UGGGGGACAUUCUUAUUUUUA | 21 | 8375 |
| BCL11A-6755 | − | UUGGGGGACAUUCUUAUUUUUA | 22 | 8376 |
| BCL11A-6756 | − | AUUGGGGGACAUUCUUAUUUUUA | 23 | 8377 |
| BCL11A-6757 | − | CAUUGGGGGACAUUCUUAUUUUUA | 24 | 8378 |
| BCL11A-6758 | − | GAGGAAUUUGCCCCAAAC | 18 | 8379 |
| BCL11A-6759 | − | AGAGGAAUUUGCCCCAAAC | 19 | 8380 |
| BCL11A-5457 | − | UAGAGGAAUUUGCCCCAAAC | 20 | 8381 |
| BCL11A-6760 | − | CUAGAGGAAUUUGCCCCAAAC | 21 | 8382 |
| BCL11A-6761 | − | UCUAGAGGAAUUUGCCCCAAAC | 22 | 8383 |
| BCL11A-6762 | − | AUCUAGAGGAAUUUGCCCCAAAC | 23 | 8384 |
| BCL11A-6763 | − | CAUCUAGAGGAAUUUGCCCCAAAC | 24 | 8385 |
| BCL11A-6764 | − | ACAGAUAAACUUCUGCAC | 18 | 8386 |
| BCL11A-6765 | − | CACAGAUAAACUUCUGCAC | 19 | 8387 |
| BCL11A-5348 | − | UCACAGAUAAACUUCUGCAC | 20 | 8388 |
| BCL11A-6766 | − | UUCACAGAUAAACUUCUGCAC | 21 | 8389 |
| BCL11A-6767 | − | UUUCACAGAUAAACUUCUGCAC | 22 | 8390 |
| BCL11A-6768 | − | CUUUCACAGAUAAACUUCUGCAC | 23 | 8391 |
| BCL11A-6769 | − | UCUUUCACAGAUAAACUUCUGCAC | 24 | 8392 |
| BCL11A-6770 | − | CCUCCCCUCGUUCUGCAC | 18 | 8393 |
| BCL11A-6771 | − | UCCUCCCCUCGUUCUGCAC | 19 | 8394 |
| BCL11A-6772 | − | CUCCUCCCCUCGUUCUGCAC | 20 | 8395 |
| BCL11A-6773 | − | UCUCCUCCCCUCGUUCUGCAC | 21 | 8396 |
| BCL11A-6774 | − | CUCUCCUCCCCUCGUUCUGCAC | 22 | 8397 |
| BCL11A-6775 | − | CCUCUCCUCCCCUCGUUCUGCAC | 23 | 8398 |
| BCL11A-6776 | − | GCCUCUCCUCCCCUCGUUCUGCAC | 24 | 8399 |
| BCL11A-6777 | − | AAAAAAGCAUCCAAUCCC | 18 | 8400 |
| BCL11A-6778 | − | GAAAAAAGCAUCCAAUCCC | 19 | 8401 |
| BCL11A-6779 | − | UGAAAAAAGCAUCCAAUCCC | 20 | 8402 |
| BCL11A-6780 | − | AUGAAAAAAGCAUCCAAUCCC | 21 | 8403 |
| BCL11A-6781 | − | GAUGAAAAAAGCAUCCAAUCCC | 22 | 8404 |
| BCL11A-6782 | − | AGAUGAAAAAAGCAUCCAAUCCC | 23 | 8405 |
| BCL11A-6783 | − | GAGAUGAAAAAAGCAUCCAAUCCC | 24 | 8406 |
| BCL11A-6784 | − | AGCAGGUAAAUGAGAAGC | 18 | 8407 |
| BCL11A-6785 | − | UAGCAGGUAAAUGAGAAGC | 19 | 8408 |
| BCL11A-6786 | − | AUAGCAGGUAAAUGAGAAGC | 20 | 8409 |
| BCL11A-6787 | − | CAUAGCAGGUAAAUGAGAAGC | 21 | 8410 |
| BCL11A-6788 | − | ACAUAGCAGGUAAAUGAGAAGC | 22 | 8411 |
| BCL11A-6789 | − | CACAUAGCAGGUAAAUGAGAAGC | 23 | 8412 |
| BCL11A-6790 | − | ACACAUAGCAGGUAAAUGAGAAGC | 24 | 8413 |
| BCL11A-6791 | − | GAGCUCUAAUCCCCACGC | 18 | 8414 |
| BCL11A-6792 | − | GGAGCUCUAAUCCCCACGC | 19 | 8415 |
| BCL11A-6793 | − | UGGAGCUCUAAUCCCCACGC | 20 | 8416 |
| BCL11A-6794 | − | AUGGAGCUCUAAUCCCCACGC | 21 | 8417 |
| BCL11A-6795 | − | CAUGGAGCUCUAAUCCCCACGC | 22 | 8418 |
| BCL11A-6796 | − | ACAUGGAGCUCUAAUCCCCACGC | 23 | 8419 |
| BCL11A-6797 | − | CACAUGGAGCUCUAAUCCCCACGC | 24 | 8420 |
| BCL11A-6798 | − | UUGGCAUCCAGGUCACGC | 18 | 8421 |
| BCL11A-6799 | − | GUUGGCAUCCAGGUCACGC | 19 | 8422 |
| BCL11A-6800 | − | GGUUGGCAUCCAGGUCACGC | 20 | 8423 |
| BCL11A-6801 | − | AGGUUGGCAUCCAGGUCACGC | 21 | 8424 |
| BCL11A-6802 | − | GAGGUUGGCAUCCAGGUCACGC | 22 | 8425 |
| BCL11A-6803 | − | GGAGGUUGGCAUCCAGGUCACGC | 23 | 8426 |
| BCL11A-6804 | − | UGGAGGUUGGCAUCCAGGUCACGC | 24 | 8427 |
| BCL11A-6805 | − | UUGUUUAUCAACGUCAUC | 18 | 8428 |
| BCL11A-6806 | − | AUUGUUUAUCAACGUCAUC | 19 | 8429 |
| BCL11A-6807 | − | GAUUGUUUAUCAACGUCAUC | 20 | 8430 |
| BCL11A-6808 | − | CGAUUGUUUAUCAACGUCAUC | 21 | 8431 |
| BCL11A-6809 | − | ACGAUUGUUUAUCAACGUCAUC | 22 | 8432 |
| BCL11A-6810 | − | GACGAUUGUUUAUCAACGUCAUC | 23 | 8433 |
| BCL11A-6811 | − | UGACGAUUGUUUAUCAACGUCAUC | 24 | 8434 |
| BCL11A-6812 | − | CAACCACAGCCGAGCCUC | 18 | 8435 |
| BCL11A-6813 | − | CCAACCACAGCCGAGCCUC | 19 | 8436 |
| BCL11A-6814 | − | UCCAACCACAGCCGAGCCUC | 20 | 8437 |
| BCL11A-6815 | − | CUCCAACCACAGCCGAGCCUC | 21 | 8438 |
| BCL11A-6816 | − | UCUCCAACCACAGCCGAGCCUC | 22 | 8439 |
| BCL11A-6817 | − | UUCUCCAACCACAGCCGAGCCUC | 23 | 8440 |
| BCL11A-6818 | − | UUUCUCCAACCACAGCCGAGCCUC | 24 | 8441 |
| BCL11A-6819 | − | ACGGCCCGUUGGGAGCUC | 18 | 8442 |
| BCL11A-6820 | − | CACGGCCCGUUGGGAGCUC | 19 | 8443 |
| BCL11A-6821 | − | CCACGGCCCGUUGGGAGCUC | 20 | 8444 |
| BCL11A-6822 | − | ACCACGGCCCGUUGGGAGCUC | 21 | 8445 |
| BCL11A-6823 | − | GACCACGGCCCGUUGGGAGCUC | 22 | 8446 |
| BCL11A-6824 | − | AGACCACGGCCCGUUGGGAGCUC | 23 | 8447 |
| BCL11A-6825 | − | CAGACCACGGCCCGUUGGGAGCUC | 24 | 8448 |
| BCL11A-6826 | − | AUUAUUUUGCAGGUAAAG | 18 | 8449 |
| BCL11A-6827 | − | UAUUAUUUUGCAGGUAAAG | 19 | 8450 |
| BCL11A-6828 | − | GUAUUAUUUUGCAGGUAAAG | 20 | 8451 |
| BCL11A-6829 | − | UGUAUUAUUUUGCAGGUAAAG | 21 | 8452 |
| BCL11A-6830 | − | UUGUAUUAUUUUGCAGGUAAAG | 22 | 8453 |
| BCL11A-6831 | − | GUUGUAUUAUUUUGCAGGUAAAG | 23 | 8454 |
| BCL11A-6832 | − | UGUUGUAUUAUUUUGCAGGUAAAG | 24 | 8455 |
| BCL11A-6833 | − | AGGUAAAUGAGAAGCAAG | 18 | 8456 |
| BCL11A-6834 | − | CAGGUAAAUGAGAAGCAAG | 19 | 8457 |
| BCL11A-6835 | − | GCAGGUAAAUGAGAAGCAAG | 20 | 8458 |
| BCL11A-6836 | − | AGCAGGUAAAUGAGAAGCAAG | 21 | 8459 |
| BCL11A-6837 | − | UAGCAGGUAAAUGAGAAGCAAG | 22 | 8460 |
| BCL11A-6838 | − | AUAGCAGGUAAAUGAGAAGCAAG | 23 | 8461 |
| BCL11A-6839 | − | CAUAGCAGGUAAAUGAGAAGCAAG | 24 | 8462 |
| BCL11A-6840 | − | CCGCAGGGUAUUUGUAAG | 18 | 8463 |
| BCL11A-6841 | − | CCCGCAGGGUAUUUGUAAG | 19 | 8464 |
| BCL11A-6842 | − | CCCCGCAGGGUAUUUGUAAG | 20 | 8465 |
| BCL11A-6843 | − | GCCCCGCAGGGUAUUUGUAAG | 21 | 8466 |
| BCL11A-6844 | − | UGCCCCGCAGGGUAUUUGUAAG | 22 | 8467 |
| BCL11A-6845 | − | AUGCCCCGCAGGGUAUUUGUAAG | 23 | 8468 |
| BCL11A-6846 | − | UAUGCCCCGCAGGGUAUUUGUAAG | 24 | 8469 |
| BCL11A-6847 | − | UUGUUUCUCCAACCACAG | 18 | 8470 |
| BCL11A-6848 | − | UUUGUUUCUCCAACCACAG | 19 | 8471 |
| BCL11A-6849 | − | UUUUGUUUCUCCAACCACAG | 20 | 8472 |
| BCL11A-6850 | − | CUUUUGUUUCUCCAACCACAG | 21 | 8473 |
| BCL11A-6851 | − | GCUUUUGUUUCUCCAACCACAG | 22 | 8474 |
| BCL11A-6852 | − | UGCUUUUGUUUCUCCAACCACAG | 23 | 8475 |
| BCL11A-6853 | − | GUGCUUUUGUUUCUCCAACCACAG | 24 | 8476 |
| BCL11A-6854 | − | ACCUGUGGGCAGUGCCAG | 18 | 8477 |
| BCL11A-6855 | − | CACCUGUGGGCAGUGCCAG | 19 | 8478 |
| BCL11A-6856 | − | UCACCUGUGGGCAGUGCCAG | 20 | 8479 |
| BCL11A-6857 | − | CUCACCUGUGGGCAGUGCCAG | 21 | 8480 |
| BCL11A-6858 | − | CCUCACCUGUGGGCAGUGCCAG | 22 | 8481 |
| BCL11A-6859 | − | UCCUCACCUGUGGGCAGUGCCAG | 23 | 8482 |
| BCL11A-6860 | − | CUCCUCACCUGUGGGCAGUGCCAG | 24 | 8483 |
| BCL11A-6861 | − | GCCCGUUGGGAGCUCCAG | 18 | 8484 |
| BCL11A-6862 | − | GGCCCGUUGGGAGCUCCAG | 19 | 8485 |
| BCL11A-6863 | − | CGGCCCGUUGGGAGCUCCAG | 20 | 8486 |
| BCL11A-6864 | − | ACGGCCCGUUGGGAGCUCCAG | 21 | 8487 |
| BCL11A-6865 | − | CACGGCCCGUUGGGAGCUCCAG | 22 | 8488 |
| BCL11A-6866 | − | CCACGGCCCGUUGGGAGCUCCAG | 23 | 8489 |
| BCL11A-6867 | − | ACCACGGCCCGUUGGGAGCUCCAG | 24 | 8490 |
| BCL11A-6868 | − | UCCCCUUCACCAAUCGAG | 18 | 8491 |
| BCL11A-6869 | − | UUCCCCUUCACCAAUCGAG | 19 | 8492 |
| BCL11A-6870 | − | CUUCCCCUUCACCAAUCGAG | 20 | 8493 |
| BCL11A-6871 | − | CCUUCCCCUUCACCAAUCGAG | 21 | 8494 |
| BCL11A-6872 | − | ACCUUCCCCUUCACCAAUCGAG | 22 | 8495 |
| BCL11A-6873 | − | CACCUUCCCCUUCACCAAUCGAG | 23 | 8496 |
| BCL11A-6874 | − | CCACCUUCCCCUUCACCAAUCGAG | 24 | 8497 |
| BCL11A-6875 | − | GAACCAGACCACGGCCCG | 18 | 8498 |
| BCL11A-6876 | − | UGAACCAGACCACGGCCCG | 19 | 8499 |
| BCL11A-6877 | − | AUGAACCAGACCACGGCCCG | 20 | 8500 |
| BCL11A-6878 | − | GAUGAACCAGACCACGGCCCG | 21 | 8501 |
| BCL11A-6879 | − | UGAUGAACCAGACCACGGCCCG | 22 | 8502 |
| BCL11A-6880 | − | AUGAUGAACCAGACCACGGCCCG | 23 | 8503 |
| BCL11A-6881 | − | GAUGAUGAACCAGACCACGGCCCG | 24 | 8504 |
| BCL11A-6882 | − | AAAAAGCAUCCAAUCCCG | 18 | 8505 |
| BCL11A-6883 | − | AAAAAAGCAUCCAAUCCCG | 19 | 8506 |
| BCL11A-5358 | − | GAAAAAAGCAUCCAAUCCCG | 20 | 8507 |
| BCL11A-6884 | − | UGAAAAAAGCAUCCAAUCCCG | 21 | 8508 |
| BCL11A-6885 | − | AUGAAAAAAGCAUCCAAUCCCG | 22 | 8509 |
| BCL11A-6886 | − | GAUGAAAAAAGCAUCCAAUCCCG | 23 | 8510 |
| BCL11A-6887 | − | AGAUGAAAAAAGCAUCCAAUCCCG | 24 | 8511 |
| BCL11A-6888 | − | GAUAAACUUCUGCACUGG | 18 | 8512 |
| BCL11A-6889 | − | AGAUAAACUUCUGCACUGG | 19 | 8513 |
| BCL11A-5360 | − | CAGAUAAACUUCUGCACUGG | 20 | 8514 |
| BCL11A-6890 | − | ACAGAUAAACUUCUGCACUGG | 21 | 8515 |
| BCL11A-6891 | − | CACAGAUAAACUUCUGCACUGG | 22 | 8516 |
| BCL11A-6892 | − | UCACAGAUAAACUUCUGCACUGG | 23 | 8517 |
| BCL11A-6893 | − | UUCACAGAUAAACUUCUGCACUGG | 24 | 8518 |
| BCL11A-6894 | − | AAGCCAUUCUUACAGAUG | 18 | 8519 |
| BCL11A-6895 | − | GAAGCCAUUCUUACAGAUG | 19 | 8520 |
| BCL11A-6896 | − | UGAAGCCAUUCUUACAGAUG | 20 | 8521 |
| BCL11A-6897 | − | UUGAAGCCAUUCUUACAGAUG | 21 | 8522 |
| BCL11A-6898 | − | CUUGAAGCCAUUCUUACAGAUG | 22 | 8523 |
| BCL11A-6899 | − | UCUUGAAGCCAUUCUUACAGAUG | 23 | 8524 |
| BCL11A-6900 | − | CUCUUGAAGCCAUUCUUACAGAUG | 24 | 8525 |
| BCL11A-6901 | − | AGAUAAACUUCUGCACUG | 18 | 8526 |
| BCL11A-6902 | − | CAGAUAAACUUCUGCACUG | 19 | 8527 |
| BCL11A-6903 | − | ACAGAUAAACUUCUGCACUG | 20 | 8528 |
| BCL11A-6904 | − | CACAGAUAAACUUCUGCACUG | 21 | 8529 |
| BCL11A-6905 | − | UCACAGAUAAACUUCUGCACUG | 22 | 8530 |
| BCL11A-6906 | − | UUCACAGAUAAACUUCUGCACUG | 23 | 8531 |
| BCL11A-6907 | − | UUUCACAGAUAAACUUCUGCACUG | 24 | 8532 |
| BCL11A-6908 | − | CAGAUGAACUUCCCAUUG | 18 | 8533 |
| BCL11A-6909 | − | CCAGAUGAACUUCCCAUUG | 19 | 8534 |
| BCL11A-5499 | − | GCCAGAUGAACUUCCCAUUG | 20 | 8535 |
| BCL11A-6910 | − | UGCCAGAUGAACUUCCCAUUG | 21 | 8536 |
| BCL11A-6911 | − | GUGCCAGAUGAACUUCCCAUUG | 22 | 8537 |
| BCL11A-6912 | − | AGUGCCAGAUGAACUUCCCAUUG | 23 | 8538 |
| BCL11A-6913 | − | CAGUGCCAGAUGAACUUCCCAUUG | 24 | 8539 |
| BCL11A-6914 | − | AACACAUAGCAGGUAAAU | 18 | 8540 |
| BCL11A-6915 | − | GAACACAUAGCAGGUAAAU | 19 | 8541 |
| BCL11A-6916 | − | GGAACACAUAGCAGGUAAAU | 20 | 8542 |
| BCL11A-6917 | − | AGGAACACAUAGCAGGUAAAU | 21 | 8543 |
| BCL11A-6918 | − | CAGGAACACAUAGCAGGUAAAU | 22 | 8544 |
| BCL11A-6919 | − | ACAGGAACACAUAGCAGGUAAAU | 23 | 8545 |
| BCL11A-6920 | − | AACAGGAACACAUAGCAGGUAAAU | 24 | 8546 |
| BCL11A-6921 | − | GCCAGAUGAACUUCCCAU | 18 | 8547 |
| BCL11A-6922 | − | UGCCAGAUGAACUUCCCAU | 19 | 8548 |
| BCL11A-5503 | − | GUGCCAGAUGAACUUCCCAU | 20 | 8549 |
| BCL11A-6923 | − | AGUGCCAGAUGAACUUCCCAU | 21 | 8550 |
| BCL11A-6924 | − | CAGUGCCAGAUGAACUUCCCAU | 22 | 8551 |
| BCL11A-6925 | − | GCAGUGCCAGAUGAACUUCCCAU | 23 | 8552 |
| BCL11A-6926 | − | GGCAGUGCCAGAUGAACUUCCCAU | 24 | 8553 |
| BCL11A-6927 | − | AUCAUGACCUCCUCACCU | 18 | 8554 |
| BCL11A-6928 | − | GAUCAUGACCUCCUCACCU | 19 | 8555 |
| BCL11A-6929 | − | GGAUCAUGACCUCCUCACCU | 20 | 8556 |
| BCL11A-6930 | − | GGGAUCAUGACCUCCUCACCU | 21 | 8557 |
| BCL11A-6931 | − | GGGGAUCAUGACCUCCUCACCU | 22 | 8558 |
| BCL11A-6932 | − | AGGGGAUCAUGACCUCCUCACCU | 23 | 8559 |
| BCL11A-6933 | − | AAGGGGAUCAUGACCUCCUCACCU | 24 | 8560 |
| BCL11A-6934 | − | GCAAUGGCAGCCUCUGCU | 18 | 8561 |
| BCL11A-6935 | − | UGCAAUGGCAGCCUCUGCU | 19 | 8562 |
| BCL11A-6936 | − | AUGCAAUGGCAGCCUCUGCU | 20 | 8563 |
| BCL11A-6937 | − | AAUGCAAUGGCAGCCUCUGCU | 21 | 8564 |
| BCL11A-6938 | − | CAAUGCAAUGGCAGCCUCUGCU | 22 | 8565 |
| BCL11A-6939 | − | ACAAUGCAAUGGCAGCCUCUGCU | 23 | 8566 |
| BCL11A-6940 | − | AACAAUGCAAUGGCAGCCUCUGCU | 24 | 8567 |
| BCL11A-6941 | − | AACCAGACCACGGCCCGU | 18 | 8568 |
| BCL11A-6942 | − | GAACCAGACCACGGCCCGU | 19 | 8569 |
| BCL11A-5363 | − | UGAACCAGACCACGGCCCGU | 20 | 8570 |
| BCL11A-6943 | − | AUGAACCAGACCACGGCCCGU | 21 | 8571 |
| BCL11A-6944 | − | GAUGAACCAGACCACGGCCCGU | 22 | 8572 |
| BCL11A-6945 | − | UGAUGAACCAGACCACGGCCCGU | 23 | 8573 |
| BCL11A-6946 | − | AUGAUGAACCAGACCACGGCCCGU | 24 | 8574 |
| BCL11A-6947 | − | CCAGAUGAACUUCCCAUU | 18 | 8575 |
| BCL11A-6948 | − | GCCAGAUGAACUUCCCAUU | 19 | 8576 |
| BCL11A-5511 | − | UGCCAGAUGAACUUCCCAUU | 20 | 8577 |
| BCL11A-6949 | − | GUGCCAGAUGAACUUCCCAUU | 21 | 8578 |
| BCL11A-6950 | − | AGUGCCAGAUGAACUUCCCAUU | 22 | 8579 |
| BCL11A-6951 | − | CAGUGCCAGAUGAACUUCCCAUU | 23 | 8580 |
| BCL11A-6952 | − | GCAGUGCCAGAUGAACUUCCCAUU | 24 | 8581 |
| BCL11A-6953 | − | ACCAGACCACGGCCCGUU | 18 | 8582 |
| BCL11A-6954 | − | AACCAGACCACGGCCCGUU | 19 | 8583 |
| BCL11A-5512 | − | GAACCAGACCACGGCCCGUU | 20 | 8584 |
| BCL11A-6955 | − | UGAACCAGACCACGGCCCGUU | 21 | 8585 |
| BCL11A-6956 | − | AUGAACCAGACCACGGCCCGUU | 22 | 8586 |
| BCL11A-6957 | − | GAUGAACCAGACCACGGCCCGUU | 23 | 8587 |
| BCL11A-6958 | − | UGAUGAACCAGACCACGGCCCGUU | 24 | 8588 |

[1094] Table 16D provides exemplary targeting domains for knocking out the BCL11A gene selected according to the fourth tier parameters. The targeting domains fall in the coding sequence of the gene, downstream of the first 500 bp of coding sequence (e.g., anywhere from +500 (relative to the start codon) to the stop codon of the gene), and the PAM is NNGRRT. It is contemplated herein that in an embodiment the targeting domain hybridizes to the target domain through complementary base pairing. Any of the targeting domains in the table can be used with a S. aureus Cas9 molecule that generates a double stranded break (Cas9 nuclease) or a single-stranded break (Cas9 nickase).

TABLE 16D
4th Tier

| | DNA | | Target Site | SEQ ID |
|---|---|---|---|---|
| gRNA Name | Strand | Targeting Domain | Length | NO: |
| BCL11A-6959 | + | GUAUUCUUAGCAGGUUAA | 18 | 8589 |
| BCL11A-6960 | + | GGUAUUCUUAGCAGGUUAA | 19 | 8590 |
| BCL11A-5890 | + | UGGUAUUCUUAGCAGGUUAA | 20 | 8591 |
| BCL11A-6961 | + | CUGGUAUUCUUAGCAGGUUAA | 21 | 8592 |
| BCL11A-6962 | + | CCUGGUAUUCUUAGCAGGUUAA | 22 | 8593 |
| BCL11A-6963 | + | UCCUGGUAUUCUUAGCAGGUUAA | 23 | 8594 |
| BCL11A-6964 | + | AUCCUGGUAUUCUUAGCAGGUUAA | 24 | 8595 |
| BCL11A-6965 | + | CGGGAGGCUCCAUAGCCA | 18 | 8596 |
| BCL11A-6966 | + | GCGGGAGGCUCCAUAGCCA | 19 | 8597 |
| BCL11A-6967 | + | GGCGGGAGGCUCCAUAGCCA | 20 | 8598 |
| BCL11A-6968 | + | UGGCGGGAGGCUCCAUAGCCA | 21 | 8599 |
| BCL11A-6969 | + | AUGGCGGGAGGCUCCAUAGCCA | 22 | 8600 |
| BCL11A-6970 | + | CAUGGCGGGAGGCUCCAUAGCCA | 23 | 8601 |
| BCL11A-6971 | + | CCAUGGCGGGAGGCUCCAUAGCCA | 24 | 8602 |
| BCL11A-6972 | + | GGUCCGACUCGCCGGCCA | 18 | 8603 |
| BCL11A-6973 | + | CGGUCCGACUCGCCGGCCA | 19 | 8604 |
| BCL11A-6974 | + | GCGGUCCGACUCGCCGGCCA | 20 | 8605 |
| BCL11A-6975 | + | UGCGGUCCGACUCGCCGGCCA | 21 | 8606 |
| BCL11A-6976 | + | AUGCGGUCCGACUCGCCGGCCA | 22 | 8607 |
| BCL11A-6977 | + | UAUGCGGUCCGACUCGCCGGCCA | 23 | 8608 |
| BCL11A-6978 | + | CUAUGCGGUCCGACUCGCCGGCCA | 24 | 8609 |
| BCL11A-6979 | + | AGUCUCCGAAGCUAAGGA | 18 | 8610 |
| BCL11A-6980 | + | GAGUCUCCGAAGCUAAGGA | 19 | 8611 |
| BCL11A-5923 | + | GGAGUCUCCGAAGCUAAGGA | 20 | 8612 |
| BCL11A-6981 | + | UGGAGUCUCCGAAGCUAAGGA | 21 | 8613 |
| BCL11A-6982 | + | CUGGAGUCUCCGAAGCUAAGGA | 22 | 8614 |
| BCL11A-6983 | + | UCUGGAGUCUCCGAAGCUAAGGA | 23 | 8615 |
| BCL11A-6984 | + | GUCUGGAGUCUCCGAAGCUAAGGA | 24 | 8616 |
| BCL11A-6985 | + | GGACUAAACAGGGGGGGA | 18 | 8617 |
| BCL11A-6986 | + | UGGACUAAACAGGGGGGGA | 19 | 8618 |
| BCL11A-6987 | + | GUGGACUAAACAGGGGGGGA | 20 | 8619 |
| BCL11A-6988 | + | GGUGGACUAAACAGGGGGGGA | 21 | 8620 |
| BCL11A-6989 | + | UGGUGGACUAAACAGGGGGGGA | 22 | 8621 |
| BCL11A-6990 | + | GUGGUGGACUAAACAGGGGGGGA | 23 | 8622 |
| BCL11A-6991 | + | GGUGGUGGACUAAACAGGGGGGGA | 24 | 8623 |
| BCL11A-6992 | + | UUCUGCACCUAGUCCUGA | 18 | 8624 |
| BCL11A-6993 | + | AUUCUGCACCUAGUCCUGA | 19 | 8625 |
| BCL11A-5937 | + | CAUUCUGCACCUAGUCCUGA | 20 | 8626 |
| BCL11A-6994 | + | ACAUUCUGCACCUAGUCCUGA | 21 | 8627 |
| BCL11A-6995 | + | GACAUUCUGCACCUAGUCCUGA | 22 | 8628 |
| BCL11A-6996 | + | GGACAUUCUGCACCUAGUCCUGA | 23 | 8629 |
| BCL11A-6997 | + | AGGACAUUCUGCACCUAGUCCUGA | 24 | 8630 |
| BCL11A-6998 | + | GCACCCUGUCAAAGGCAC | 18 | 8631 |
| BCL11A-6999 | + | AGCACCCUGUCAAAGGCAC | 19 | 8632 |
| BCL11A-7000 | + | CAGCACCCUGUCAAAGGCAC | 20 | 8633 |
| BCL11A-7001 | + | GCAGCACCCUGUCAAAGGCAC | 21 | 8634 |
| BCL11A-7002 | + | CGCAGCACCCUGUCAAAGGCAC | 22 | 8635 |
| BCL11A-7003 | + | CCGCAGCACCCUGUCAAAGGCAC | 23 | 8636 |
| BCL11A-7004 | + | ACCGCAGCACCCUGUCAAAGGCAC | 24 | 8637 |
| BCL11A-7005 | + | UAAGUAGAUUCUUAAUCC | 18 | 8638 |
| BCL11A-7006 | + | CUAAGUAGAUUCUUAAUCC | 19 | 8639 |
| BCL11A-7007 | + | UCUAAGUAGAUUCUUAAUCC | 20 | 8640 |
| BCL11A-7008 | + | UUCUAAGUAGAUUCUUAAUCC | 21 | 8641 |
| BCL11A-7009 | + | UUUCUAAGUAGAUUCUUAAUCC | 22 | 8642 |
| BCL11A-7010 | + | CUUUCUAAGUAGAUUCUUAAUCC | 23 | 8643 |
| BCL11A-7011 | + | GCUUUCUAAGUAGAUUCUUAAUCC | 24 | 8644 |
| BCL11A-7012 | + | GGCGGCUUGCUACCUGGC | 18 | 8645 |
| BCL11A-7013 | + | GGGCGGCUUGCUACCUGGC | 19 | 8646 |
| BCL11A-6036 | + | AGGGCGGCUUGCUACCUGGC | 20 | 8647 |
| BCL11A-7014 | + | AAGGGCGGCUUGCUACCUGGC | 21 | 8648 |
| BCL11A-7015 | + | GAAGGGCGGCUUGCUACCUGGC | 22 | 8649 |
| BCL11A-7016 | + | GGAAGGGCGGCUUGCUACCUGGC | 23 | 8650 |
| BCL11A-7017 | + | AGGAAGGGCGGCUUGCUACCUGGC | 24 | 8651 |
| BCL11A-7018 | + | GCGCUUCAGCUUGCUGGC | 18 | 8652 |
| BCL11A-7019 | + | GGCGCUUCAGCUUGCUGGC | 19 | 8653 |
| BCL11A-7020 | + | UGGCGCUUCAGCUUGCUGGC | 20 | 8654 |
| BCL11A-7021 | + | GUGGCGCUUCAGCUUGCUGGC | 21 | 8655 |
| BCL11A-7022 | + | UGUGGCGCUUCAGCUUGCUGGC | 22 | 8656 |
| BCL11A-7023 | + | AUGUGGCGCUUCAGCUUGCUGGC | 23 | 8657 |
| BCL11A-7024 | + | CAUGUGGCGCUUCAGCUUGCUGGC | 24 | 8658 |
| BCL11A-7025 | + | CUCCUCGUCCCCGUUCUC | 18 | 8659 |
| BCL11A-7026 | + | CCUCCUCGUCCCCGUUCUC | 19 | 8660 |
| BCL11A-6050 | + | UCCUCCUCGUCCCCGUUCUC | 20 | 8661 |
| BCL11A-7027 | + | UUCCUCCUCGUCCCCGUUCUC | 21 | 8662 |
| BCL11A-7028 | + | CUUCCUCCUCGUCCCCGUUCUC | 22 | 8663 |
| BCL11A-7029 | + | UCUUCCUCCUCGUCCCCGUUCUC | 23 | 8664 |
| BCL11A-7030 | + | CUCUUCCUCCUCGUCCCCGUUCUC | 24 | 8665 |
| BCL11A-7031 | + | AGGCAAAAGGCGAUUGUC | 18 | 8666 |
| BCL11A-7032 | + | GAGGCAAAAGGCGAUUGUC | 19 | 8667 |
| BCL11A-6054 | + | GGAGGCAAAAGGCGAUUGUC | 20 | 8668 |
| BCL11A-7033 | + | AGGAGGCAAAAGGCGAUUGUC | 21 | 8669 |
| BCL11A-7034 | + | GAGGAGGCAAAAGGCGAUUGUC | 22 | 8670 |
| BCL11A-7035 | + | CGAGGAGGCAAAAGGCGAUUGUC | 23 | 8671 |
| BCL11A-7036 | + | ACGAGGAGGCAAAAGGCGAUUGUC | 24 | 8672 |
| BCL11A-7037 | + | AGCUCUCUGGGUACUACG | 18 | 8673 |
| BCL11A-7038 | + | GAGCUCUCUGGGUACUACG | 19 | 8674 |
| BCL11A-7039 | + | UGAGCUCUCUGGGUACUACG | 20 | 8675 |
| BCL11A-7040 | + | UUGAGCUCUCUGGGUACUACG | 21 | 8676 |
| BCL11A-7041 | + | CUUGAGCUCUCUGGGUACUACG | 22 | 8677 |
| BCL11A-7042 | + | UCUUGAGCUCUCUGGGUACUACG | 23 | 8678 |
| BCL11A-7043 | + | AUCUUGAGCUCUCUGGGUACUACG | 24 | 8679 |
| BCL11A-7044 | + | UGAAGGGAUACCAACCCG | 18 | 8680 |
| BCL11A-7045 | + | CUGAAGGGAUACCAACCCG | 19 | 8681 |
| BCL11A-6084 | + | CCUGAAGGGAUACCAACCCG | 20 | 8682 |
| BCL11A-7046 | + | UCCUGAAGGGAUACCAACCCG | 21 | 8683 |
| BCL11A-7047 | + | GUCCUGAAGGGAUACCAACCCG | 22 | 8684 |
| BCL11A-7048 | + | AGUCCUGAAGGGAUACCAACCCG | 23 | 8685 |
| BCL11A-7049 | + | UAGUCCUGAAGGGAUACCAACCCG | 24 | 8686 |
| BCL11A-7050 | + | GCAAACUCCCGUUCUCCG | 18 | 8687 |
| BCL11A-7051 | + | CGCAAACUCCCGUUCUCCG | 19 | 8688 |
| BCL11A-6094 | + | GCGCAAACUCCCGUUCUCCG | 20 | 8689 |
| BCL11A-7052 | + | AGCGCAAACUCCCGUUCUCCG | 21 | 8690 |
| BCL11A-7053 | + | AAGCGCAAACUCCCGUUCUCCG | 22 | 8691 |
| BCL11A-7054 | + | GAAGCGCAAACUCCCGUUCUCCG | 23 | 8692 |
| BCL11A-7055 | + | AGAAGCGCAAACUCCCGUUCUCCG | 24 | 8693 |
| BCL11A-7056 | + | GGCUGGGAGGGAGGAGGG | 18 | 8694 |
| BCL11A-7057 | + | GGGCUGGGAGGGAGGAGGG | 19 | 8695 |
| BCL11A-7058 | + | GGGGCUGGGAGGGAGGAGGG | 20 | 8696 |
| BCL11A-7059 | + | GGGGGCUGGGAGGGAGGAGGG | 21 | 8697 |
| BCL11A-7060 | + | CGGGGGCUGGGAGGGAGGAGGG | 22 | 8698 |
| BCL11A-7061 | + | CCGGGGGCUGGGAGGGAGGAGGG | 23 | 8699 |
| BCL11A-7062 | + | ACCGGGGGCUGGGAGGGAGGAGGG | 24 | 8700 |
| BCL11A-7063 | + | UGGUGGACUAAACAGGGG | 18 | 8701 |
| BCL11A-7064 | + | GUGGUGGACUAAACAGGGG | 19 | 8702 |
| BCL11A-6139 | + | GGUGGUGGACUAAACAGGGG | 20 | 8703 |
| BCL11A-7065 | + | CGGUGGUGGACUAAACAGGGG | 21 | 8704 |
| BCL11A-7066 | + | UCGGUGGUGGACUAAACAGGGG | 22 | 8705 |
| BCL11A-7067 | + | CUCGGUGGUGGACUAAACAGGGG | 23 | 8706 |
| BCL11A-7068 | + | UCUCGGUGGUGGACUAAACAGGGG | 24 | 8707 |
| BCL11A-7069 | + | AAGAGAAACCAUGCACUG | 18 | 8708 |
| BCL11A-7070 | + | CAAGAGAAACCAUGCACUG | 19 | 8709 |
| BCL11A-7071 | + | GCAAGAGAAACCAUGCACUG | 20 | 8710 |
| BCL11A-7072 | + | UGCAAGAGAAACCAUGCACUG | 21 | 8711 |
| BCL11A-7073 | + | UUGCAAGAGAAACCAUGCACUG | 22 | 8712 |
| BCL11A-7074 | + | GUUGCAAGAGAAACCAUGCACUG | 23 | 8713 |
| BCL11A-7075 | + | UGUUGCAAGAGAAACCAUGCACUG | 24 | 8714 |
| BCL11A-7076 | + | GUCAAAGGCACUCGGGUG | 18 | 8715 |
| BCL11A-7077 | + | UGUCAAAGGCACUCGGGUG | 19 | 8716 |
| BCL11A-7078 | + | CUGUCAAAGGCACUCGGGUG | 20 | 8717 |
| BCL11A-7079 | + | CCUGUCAAAGGCACUCGGGUG | 21 | 8718 |
| BCL11A-7080 | + | CCCUGUCAAAGGCACUCGGGUG | 22 | 8719 |
| BCL11A-7081 | + | ACCCUGUCAAAGGCACUCGGGUG | 23 | 8720 |
| BCL11A-7082 | + | CACCCUGUCAAAGGCACUCGGGUG | 24 | 8721 |
| BCL11A-7083 | + | CCCACCAAGUCGCUGGUG | 18 | 8722 |
| BCL11A-7084 | + | GCCCACCAAGUCGCUGGUG | 19 | 8723 |
| BCL11A-7085 | + | UGCCCACCAAGUCGCUGGUG | 20 | 8724 |
| BCL11A-7086 | + | CUGCCCACCAAGUCGCUGGUG | 21 | 8725 |
| BCL11A-7087 | + | GCUGCCCACCAAGUCGCUGGUG | 22 | 8726 |
| BCL11A-7088 | + | CGCUGCCCACCAAGUCGCUGGUG | 23 | 8727 |
| BCL11A-7089 | + | GCGCUGCCCACCAAGUCGCUGGUG | 24 | 8728 |
| BCL11A-7090 | + | GGGGUUAUUGUCUGCAAU | 18 | 8729 |
| BCL11A-7091 | + | AGGGGUUAUUGUCUGCAAU | 19 | 8730 |
| BCL11A-7092 | + | AAGGGGUUAUUGUCUGCAAU | 20 | 8731 |
| BCL11A-7093 | + | AAAGGGGUUAUUGUCUGCAAU | 21 | 8732 |
| BCL11A-7094 | + | UAAAGGGGUUAUUGUCUGCAAU | 22 | 8733 |
| BCL11A-7095 | + | UUAAAGGGGUUAUUGUCUGCAAU | 23 | 8734 |
| BCL11A-7096 | + | GUUAAAGGGGUUAUUGUCUGCAAU | 24 | 8735 |
| BCL11A-7097 | + | CUGGGUACUACGCCGAAU | 18 | 8736 |
| BCL11A-7098 | + | UCUGGGUACUACGCCGAAU | 19 | 8737 |
| BCL11A-6182 | + | CUCUGGGUACUACGCCGAAU | 20 | 8738 |
| BCL11A-7099 | + | UCUCUGGGUACUACGCCGAAU | 21 | 8739 |
| BCL11A-7100 | + | CUCUCUGGGUACUACGCCGAAU | 22 | 8740 |
| BCL11A-7101 | + | GCUCUCUGGGUACUACGCCGAAU | 23 | 8741 |
| BCL11A-7102 | + | AGCUCUCUGGGUACUACGCCGAAU | 24 | 8742 |
| BCL11A-7103 | + | CGUAGCCGGCGAGCCACU | 18 | 8743 |
| BCL11A-7104 | + | GCGUAGCCGGCGAGCCACU | 19 | 8744 |
| BCL11A-7105 | + | CGCGUAGCCGGCGAGCCACU | 20 | 8745 |
| BCL11A-7106 | + | CCGCGUAGCCGGCGAGCCACU | 21 | 8746 |
| BCL11A-7107 | + | GCCGCGUAGCCGGCGAGCCACU | 22 | 8747 |
| BCL11A-7108 | + | GGCCGCGUAGCCGGCGAGCCACU | 23 | 8748 |
| BCL11A-7109 | + | AGGCCGCGUAGCCGGCGAGCCACU | 24 | 8749 |
| BCL11A-7110 | + | CCACACAUCUUGAGCUCU | 18 | 8750 |
| BCL11A-7111 | + | GCCACACAUCUUGAGCUCU | 19 | 8751 |
| BCL11A-7112 | + | UGCCACACAUCUUGAGCUCU | 20 | 8752 |
| BCL11A-7113 | + | CUGCCACACAUCUUGAGCUCU | 21 | 8753 |
| BCL11A-7114 | + | ACUGCCACACAUCUUGAGCUCU | 22 | 8754 |
| BCL11A-7115 | + | AACUGCCACACAUCUUGAGCUCU | 23 | 8755 |
| BCL11A-7116 | + | AAACUGCCACACAUCUUGAGCUCU | 24 | 8756 |
| BCL11A-7117 | + | CGUUCUCCGGGAUCAGGU | 18 | 8757 |
| BCL11A-7118 | + | CCGUUCUCCGGGAUCAGGU | 19 | 8758 |
| BCL11A-6223 | + | CCCGUUCUCCGGGAUCAGGU | 20 | 8759 |
| BCL11A-7119 | + | CCCCGUUCUCCGGGAUCAGGU | 21 | 8760 |
| BCL11A-7120 | + | UCCCCGUUCUCCGGGAUCAGGU | 22 | 8761 |
| BCL11A-7121 | + | GUCCCCGUUCUCCGGGAUCAGGU | 23 | 8762 |
| BCL11A-7122 | + | CGUCCCCGUUCUCCGGGAUCAGGU | 24 | 8763 |
| BCL11A-7123 | + | CCAGGCGCUCUAUGCGGU | 18 | 8764 |
| BCL11A-7124 | + | CCCAGGCGCUCUAUGCGGU | 19 | 8765 |
| BCL11A-6226 | + | CCCCAGGCGCUCUAUGCGGU | 20 | 8766 |
| BCL11A-7125 | + | CCCCCAGGCGCUCUAUGCGGU | 21 | 8767 |
| BCL11A-7126 | + | GCCCCCAGGCGCUCUAUGCGGU | 22 | 8768 |
| BCL11A-7127 | + | CGCCCCCAGGCGCUCUAUGCGGU | 23 | 8769 |
| BCL11A-7128 | + | CCGCCCCCAGGCGCUCUAUGCGGU | 24 | 8770 |
| BCL11A-7129 | − | UUCCCAGCCACCUCUCCA | 18 | 8771 |
| BCL11A-7130 | − | CUUCCCAGCCACCUCUCCA | 19 | 8772 |
| BCL11A-5903 | − | CCUUCCCAGCCACCUCUCCA | 20 | 8773 |
| BCL11A-7131 | − | UCCUUCCCAGCCACCUCUCCA | 21 | 8774 |
| BCL11A-7132 | − | GUCCUUCCCAGCCACCUCUCCA | 22 | 8775 |
| BCL11A-7133 | − | UGUCCUUCCCAGCCACCUCUCCA | 23 | 8776 |
| BCL11A-7134 | − | AUGUCCUUCCCAGCCACCUCUCCA | 24 | 8777 |
| BCL11A-7135 | − | AGCGCAUCAAGCUCGAGA | 18 | 8778 |
| BCL11A-7136 | − | AAGCGCAUCAAGCUCGAGA | 19 | 8779 |
| BCL11A-5919 | − | UAAGCGCAUCAAGCUCGAGA | 20 | 8780 |
| BCL11A-7137 | − | CUAAGCGCAUCAAGCUCGAGA | 21 | 8781 |
| BCL11A-7138 | − | UCUAAGCGCAUCAAGCUCGAGA | 22 | 8782 |
| BCL11A-7139 | − | CUCUAAGCGCAUCAAGCUCGAGA | 23 | 8783 |
| BCL11A-7140 | − | UCUCUAAGCGCAUCAAGCUCGAGA | 24 | 8784 |
| BCL11A-7141 | − | GGAGCUGACGGAGAGCGA | 18 | 8785 |
| BCL11A-7142 | − | AGGAGCUGACGGAGAGCGA | 19 | 8786 |
| BCL11A-7143 | − | GAGGAGCUGACGGAGAGCGA | 20 | 8787 |
| BCL11A-7144 | − | GGAGGAGCUGACGGAGAGCGA | 21 | 8788 |
| BCL11A-7145 | − | AGGAGGAGCUGACGGAGAGCGA | 22 | 8789 |
| BCL11A-7146 | − | GAGGAGGAGCUGACGGAGAGCGA | 23 | 8790 |
| BCL11A-7147 | − | GGAGGAGGAGCUGACGGAGAGCGA | 24 | 8791 |
| BCL11A-7148 | − | UCACCCGAGUGCCUUUGA | 18 | 8792 |
| BCL11A-7149 | − | AUCACCCGAGUGCCUUUGA | 19 | 8793 |
| BCL11A-7150 | − | CAUCACCCGAGUGCCUUUGA | 20 | 8794 |
| BCL11A-7151 | − | CCAUCACCCGAGUGCCUUUGA | 21 | 8795 |
| BCL11A-7152 | − | CCCAUCACCCGAGUGCCUUUGA | 22 | 8796 |
| BCL11A-7153 | − | ACCCAUCACCCGAGUGCCUUUGA | 23 | 8797 |
| BCL11A-7154 | − | CACCCAUCACCCGAGUGCCUUUGA | 24 | 8798 |
| BCL11A-7155 | − | GAGCACUCCUCGGAGAAC | 18 | 8799 |
| BCL11A-7156 | − | GGAGCACUCCUCGGAGAAC | 19 | 8800 |
| BCL11A-5949 | − | CGGAGCACUCCUCGGAGAAC | 20 | 8801 |
| BCL11A-7157 | − | UCGGAGCACUCCUCGGAGAAC | 21 | 8802 |
| BCL11A-7158 | − | GUCGGAGCACUCCUCGGAGAAC | 22 | 8803 |
| BCL11A-7159 | − | CGUCGGAGCACUCCUCGGAGAAC | 23 | 8804 |
| BCL11A-7160 | − | UCGUCGGAGCACUCCUCGGAGAAC | 24 | 8805 |
| BCL11A-7161 | − | GCCCUGGCCACCCAUCAC | 18 | 8806 |
| BCL11A-7162 | − | GGCCCUGGCCACCCAUCAC | 19 | 8807 |
| BCL11A-7163 | − | UGGCCCUGGCCACCCAUCAC | 20 | 8808 |
| BCL11A-7164 | − | AUGGCCCUGGCCACCCAUCAC | 21 | 8809 |
| BCL11A-7165 | − | GAUGGCCCUGGCCACCCAUCAC | 22 | 8810 |
| BCL11A-7166 | − | AGAUGGCCCUGGCCACCCAUCAC | 23 | 8811 |
| BCL11A-7167 | − | GAGAUGGCCCUGGCCACCCAUCAC | 24 | 8812 |
| BCL11A-7168 | − | UUAACCUGCUAAGAAUAC | 18 | 8813 |
| BCL11A-7169 | − | UUUAACCUGCUAAGAAUAC | 19 | 8814 |
| BCL11A-7170 | − | CUUUAACCUGCUAAGAAUAC | 20 | 8815 |
| BCL11A-7171 | − | CCUUUAACCUGCUAAGAAUAC | 21 | 8816 |
| BCL11A-7172 | − | CCCUUUAACCUGCUAAGAAUAC | 22 | 8817 |
| BCL11A-7173 | − | CCCCUUUAACCUGCUAAGAAUAC | 23 | 8818 |
| BCL11A-7174 | − | ACCCCUUUAACCUGCUAAGAAUAC | 24 | 8819 |
| BCL11A-7175 | − | CGGAAGUCCCCUGACCCC | 18 | 8820 |
| BCL11A-7176 | − | ACGGAAGUCCCCUGACCCC | 19 | 8821 |
| BCL11A-7177 | − | CACGGAAGUCCCCUGACCCC | 20 | 8822 |
| BCL11A-7178 | − | ACACGGAAGUCCCCUGACCCC | 21 | 8823 |
| BCL11A-7179 | − | AACACGGAAGUCCCCUGACCCC | 22 | 8824 |
| BCL11A-7180 | − | GAACACGGAAGUCCCCUGACCCC | 23 | 8825 |
| BCL11A-7181 | − | CGAACACGGAAGUCCCCUGACCCC | 24 | 8826 |
| BCL11A-7182 | − | AGAAAAUUUGAAGCCCCC | 18 | 8827 |
| BCL11A-7183 | − | GAGAAAAUUUGAAGCCCCC | 19 | 8828 |
| BCL11A-5969 | − | UGAGAAAAUUUGAAGCCCCC | 20 | 8829 |
| BCL11A-7184 | − | CUGAGAAAAUUUGAAGCCCCC | 21 | 8830 |
| BCL11A-7185 | − | UCUGAGAAAAUUUGAAGCCCCC | 22 | 8831 |
| BCL11A-7186 | − | UUCUGAGAAAAUUUGAAGCCCCC | 23 | 8832 |
| BCL11A-7187 | − | GUUCUGAGAAAAUUUGAAGCCCCC | 24 | 8833 |
| BCL11A-7188 | − | GCUAUGGAGCCUCCCGCC | 18 | 8834 |
| BCL11A-7189 | − | GGCUAUGGAGCCUCCCGCC | 19 | 8835 |
| BCL11A-7190 | − | UGGCUAUGGAGCCUCCCGCC | 20 | 8836 |
| BCL11A-7191 | − | AUGGCUAUGGAGCCUCCCGCC | 21 | 8837 |
| BCL11A-7192 | − | AAUGGCUAUGGAGCCUCCCGCC | 22 | 8838 |
| BCL11A-7193 | − | CAAUGGCUAUGGAGCCUCCCGCC | 23 | 8839 |
| BCL11A-7194 | − | CCAAUGGCUAUGGAGCCUCCCGCC | 24 | 8840 |
| BCL11A-7195 | − | AACACGCACAGAACACUC | 18 | 8841 |
| BCL11A-7196 | − | CAACACGCACAGAACACUC | 19 | 8842 |
| BCL11A-7197 | − | GCAACACGCACAGAACACUC | 20 | 8843 |
| BCL11A-7198 | − | UGCAACACGCACAGAACACUC | 21 | 8844 |
| BCL11A-7199 | − | UUGCAACACGCACAGAACACUC | 22 | 8845 |
| BCL11A-7200 | − | CUUGCAACACGCACAGAACACUC | 23 | 8846 |
| BCL11A-7201 | − | UCUUGCAACACGCACAGAACACUC | 24 | 8847 |
| BCL11A-7202 | − | ACGAAGACUCGGUGGCCG | 18 | 8848 |
| BCL11A-7203 | − | GACGAAGACUCGGUGGCCG | 19 | 8849 |
| BCL11A-7204 | − | CGACGAAGACUCGGUGGCCG | 20 | 8850 |
| BCL11A-7205 | − | GCGACGAAGACUCGGUGGCCG | 21 | 8851 |
| BCL11A-7206 | − | UGCGACGAAGACUCGGUGGCCG | 22 | 8852 |
| BCL11A-7207 | − | UUGCGACGAAGACUCGGUGGCCG | 23 | 8853 |
| BCL11A-7208 | − | CUUGCGACGAAGACUCGGUGGCCG | 24 | 8854 |
| BCL11A-7209 | − | GCCCGGGGAGCUGGACGG | 18 | 8855 |
| BCL11A-7210 | − | CGCCCGGGGAGCUGGACGG | 19 | 8856 |
| BCL11A-6121 | − | CCGCCCGGGGAGCUGGACGG | 20 | 8857 |
| BCL11A-7211 | − | ACCGCCCGGGGAGCUGGACGG | 21 | 8858 |
| BCL11A-7212 | − | CACCGCCCGGGGAGCUGGACGG | 22 | 8859 |
| BCL11A-7213 | − | ACACCGCCCGGGGAGCUGGACGG | 23 | 8860 |
| BCL11A-7214 | − | CACACCGCCCGGGGAGCUGGACGG | 24 | 8861 |
| BCL11A-7215 | − | GCCGCGGCUGCUCCCCGG | 18 | 8862 |
| BCL11A-7216 | − | GGCCGCGGCUGCUCCCCGG | 19 | 8863 |
| BCL11A-7217 | − | UGGCCGCGGCUGCUCCCCGG | 20 | 8864 |
| BCL11A-7218 | − | AUGGCCGCGGCUGCUCCCCGG | 21 | 8865 |
| BCL11A-7219 | − | AAUGGCCGCGGCUGCUCCCCGG | 22 | 8866 |
| BCL11A-7220 | − | UAAUGGCCGCGGCUGCUCCCCGG | 23 | 8867 |
| BCL11A-7221 | − | UUAAUGGCCGCGGCUGCUCCCCGG | 24 | 8868 |
| BCL11A-7222 | − | UUUGACAGGGUGCUGCGG | 18 | 8869 |
| BCL11A-7223 | − | CUUUGACAGGGUGCUGCGG | 19 | 8870 |
| BCL11A-7224 | − | CCUUUGACAGGGUGCUGCGG | 20 | 8871 |
| BCL11A-7225 | − | GCCUUUGACAGGGUGCUGCGG | 21 | 8872 |
| BCL11A-7226 | − | UGCCUUUGACAGGGUGCUGCGG | 22 | 8873 |
| BCL11A-7227 | − | GUGCCUUUGACAGGGUGCUGCGG | 23 | 8874 |
| BCL11A-7228 | − | AGUGCCUUUGACAGGGUGCUGCGG | 24 | 8875 |
| BCL11A-7229 | − | AUUUGAAGCCCCCAGGGG | 18 | 8876 |
| BCL11A-7230 | − | AAUUUGAAGCCCCCAGGGG | 19 | 8877 |
| BCL11A-6140 | − | AAAUUUGAAGCCCCCAGGGG | 20 | 8878 |
| BCL11A-7231 | − | AAAAUUUGAAGCCCCCAGGGG | 21 | 8879 |
| BCL11A-7232 | − | GAAAAUUUGAAGCCCCCAGGGG | 22 | 8880 |
| BCL11A-7233 | − | AGAAAAUUUGAAGCCCCCAGGGG | 23 | 8881 |
| BCL11A-7234 | − | GAGAAAAUUUGAAGCCCCCAGGGG | 24 | 8882 |
| BCL11A-7235 | − | UCCCUUCAGGACUAGGUG | 18 | 8883 |
| BCL11A-7236 | − | AUCCCUUCAGGACUAGGUG | 19 | 8884 |
| BCL11A-7237 | − | UAUCCCUUCAGGACUAGGUG | 20 | 8885 |
| BCL11A-7238 | − | GUAUCCCUUCAGGACUAGGUG | 21 | 8886 |
| BCL11A-7239 | − | GGUAUCCCUUCAGGACUAGGUG | 22 | 8887 |
| BCL11A-7240 | − | UGGUAUCCCUUCAGGACUAGGUG | 23 | 8888 |
| BCL11A-7241 | − | UUGGUAUCCCUUCAGGACUAGGUG | 24 | 8889 |
| BCL11A-7242 | − | CGGUCAAGUCCAAGUCAU | 18 | 8890 |
| BCL11A-7243 | − | CCGGUCAAGUCCAAGUCAU | 19 | 8891 |
| BCL11A-7244 | − | CCCGGUCAAGUCCAAGUCAU | 20 | 8892 |
| BCL11A-7245 | − | CCCCGGUCAAGUCCAAGUCAU | 21 | 8893 |
| BCL11A-7246 | − | CCCCCGGUCAAGUCCAAGUCAU | 22 | 8894 |
| BCL11A-7247 | − | GCCCCCGGUCAAGUCCAAGUCAU | 23 | 8895 |
| BCL11A-7248 | − | AGCCCCCGGUCAAGUCCAAGUCAU | 24 | 8896 |
| BCL11A-7249 | − | UAACCCCUUUAACCUGCU | 18 | 8897 |
| BCL11A-7250 | − | AUAACCCCUUUAACCUGCU | 19 | 8898 |
| BCL11A-7251 | − | AAUAACCCCUUUAACCUGCU | 20 | 8899 |
| BCL11A-7252 | − | CAAUAACCCCUUUAACCUGCU | 21 | 8900 |
| BCL11A-7253 | − | ACAAUAACCCCUUUAACCUGCU | 22 | 8901 |
| BCL11A-7254 | − | GACAAUAACCCCUUUAACCUGCU | 23 | 8902 |
| BCL11A-7255 | − | AGACAAUAACCCCUUUAACCUGCU | 24 | 8903 |
| BCL11A-7256 | − | ACAGAACACUCAUGGAUU | 18 | 8904 |
| BCL11A-7257 | − | CACAGAACACUCAUGGAUU | 19 | 8905 |
| BCL11A-7258 | − | GCACAGAACACUCAUGGAUU | 20 | 8906 |
| BCL11A-7259 | − | CGCACAGAACACUCAUGGAUU | 21 | 8907 |
| BCL11A-7260 | − | ACGCACAGAACACUCAUGGAUU | 22 | 8908 |
| BCL11A-7261 | − | CACGCACAGAACACUCAUGGAUU | 23 | 8909 |
| BCL11A-7262 | − | ACACGCACAGAACACUCAUGGAUU | 24 | 8910 |
| BCL11A-7263 | − | GCAGACGCAGCGACACUU | 18 | 8911 |
| BCL11A-7264 | − | GGCAGACGCAGCGACACUU | 19 | 8912 |
| BCL11A-7265 | − | GGGCAGACGCAGCGACACUU | 20 | 8913 |
| BCL11A-7266 | − | AGGGCAGACGCAGCGACACUU | 21 | 8914 |
| BCL11A-7267 | − | GAGGGCAGACGCAGCGACACUU | 22 | 8915 |
| BCL11A-7268 | − | AGAGGGCAGACGCAGCGACACUU | 23 | 8916 |
| BCL11A-7269 | − | AAGAGGGCAGACGCAGCGACACUU | 24 | 8917 |
| BCL11A-7270 | − | CAAGAUGUGUGGCAGUUU | 18 | 8918 |
| BCL11A-7271 | − | UCAAGAUGUGUGGCAGUUU | 19 | 8919 |
| BCL11A-7272 | − | CUCAAGAUGUGUGGCAGUUU | 20 | 8920 |
| BCL11A-7273 | − | GCUCAAGAUGUGUGGCAGUUU | 21 | 8921 |
| BCL11A-7274 | − | AGCUCAAGAUGUGUGGCAGUUU | 22 | 8922 |
| BCL11A-7275 | − | GAGCUCAAGAUGUGUGGCAGUUU | 23 | 8923 |
| BCL11A-7276 | − | AGAGCUCAAGAUGUGUGGCAGUUU | 24 | 8924 |

[1095] Table 16E provides exemplary targeting domains for knocking out the BCL11A gene selected according to the fifth tier parameters. The targeting domains fall in the coding sequence of the gene, downstream of the first 500 bp of coding sequence (e.g., anywhere from +500 (relative to the start codon) to the stop codon of the gene), and the PAM is NNGRRV. It is contemplated herein that in an embodiment the targeting domain hybridizes to the target domain through complementary base pairing. Any of the targeting domains in the table can be used with a S. aureus Cas9 molecule that generates a double stranded break (Cas9 nuclease) or a single-stranded break (Cas9 nickase).

TABLE 16E
5th Tier

| | DNA | | Target Site | SEQ ID |
|---|---|---|---|---|
| gRNA Name | Strand | Targeting Domain | Length | NO: |
| BCL11A-7277 | + | UCUCGGUGGUGGACUAAA | 18 | 8925 |
| BCL11A-7278 | + | GUCUCGGUGGUGGACUAAA | 19 | 8926 |
| BCL11A-7279 | + | UGUCUCGGUGGUGGACUAAA | 20 | 8927 |
| BCL11A-7280 | + | AUGUCUCGGUGGUGGACUAAA | 21 | 8928 |
| BCL11A-7281 | + | GAUGUCUCGGUGGUGGACUAAA | 22 | 8929 |
| BCL11A-7282 | + | UGAUGUCUCGGUGGUGGACUAAA | 23 | 8930 |
| BCL11A-7283 | + | GUGAUGUCUCGGUGGUGGACUAAA | 24 | 8931 |
| BCL11A-7284 | + | GUUCUGUGCGUGUUGCAA | 18 | 8932 |
| BCL11A-7285 | + | UGUUCUGUGCGUGUUGCAA | 19 | 8933 |
| BCL11A-7286 | + | GUGUUCUGUGCGUGUUGCAA | 20 | 8934 |
| BCL11A-7287 | + | AGUGUUCUGUGCGUGUUGCAA | 21 | 8935 |
| BCL11A-7288 | + | GAGUGUUCUGUGCGUGUUGCAA | 22 | 8936 |
| BCL11A-7289 | + | UGAGUGUUCUGUGCGUGUUGCAA | 23 | 8937 |
| BCL11A-7290 | + | AUGAGUGUUCUGUGCGUGUUGCAA | 24 | 8938 |
| BCL11A-7291 | + | UCUGGGUACUACGCCGAA | 18 | 8939 |
| BCL11A-7292 | + | CUCUGGGUACUACGCCGAA | 19 | 8940 |
| BCL11A-5883 | + | UCUCUGGGUACUACGCCGAA | 20 | 8941 |
| BCL11A-7293 | + | CUCUCUGGGUACUACGCCGAA | 21 | 8942 |
| BCL11A-7294 | + | GCUCUCUGGGUACUACGCCGAA | 22 | 8943 |
| BCL11A-7295 | + | AGCUCUCUGGGUACUACGCCGAA | 23 | 8944 |
| BCL11A-7296 | + | GAGCUCUCUGGGUACUACGCCGAA | 24 | 8945 |
| BCL11A-7297 | + | UCGGUGGUGGACUAAACA | 18 | 8946 |
| BCL11A-7298 | + | CUCGGUGGUGGACUAAACA | 19 | 8947 |
| BCL11A-5892 | + | UCUCGGUGGUGGACUAAACA | 20 | 8948 |
| BCL11A-7299 | + | GUCUCGGUGGUGGACUAAACA | 21 | 8949 |
| BCL11A-7300 | + | UGUCUCGGUGGUGGACUAAACA | 22 | 8950 |
| BCL11A-7301 | + | AUGUCUCGGUGGUGGACUAAACA | 23 | 8951 |
| BCL11A-7342 | + | UGAUGCGCUUAGAGAAGGGGCUCA | 24 | 8994 |
| BCL11A-7343 | + | CGUCGGACUUGACCGUCA | 18 | 8995 |
| BCL11A-7344 | + | UCGUCGGACUUGACCGUCA | 19 | 8996 |
| BCL11A-5912 | + | GUCGUCGGACUUGACCGUCA | 20 | 8997 |
| BCL11A-7345 | + | CGUCGUCGGACUUGACCGUCA | 21 | 8998 |
| BCL11A-7346 | + | CCGUCGUCGGACUUGACCGUCA | 22 | 8999 |
| BCL11A-7347 | + | ACCGUCGUCGGACUUGACCGUCA | 23 | 9000 |
| BCL11A-7348 | + | GACCGUCGUCGGACUUGACCGUCA | 24 | 9001 |
| BCL11A-7349 | + | UACCAACCCGCGGGGUCA | 18 | 9002 |
| BCL11A-7350 | + | AUACCAACCCGCGGGGUCA | 19 | 9003 |
| BCL11A-5913 | + | GAUACCAACCCGCGGGGUCA | 20 | 9004 |
| BCL11A-7351 | + | GGAUACCAACCCGCGGGGUCA | 21 | 9005 |
| BCL11A-7352 | + | GGGAUACCAACCCGCGGGGUCA | 22 | 9006 |
| BCL11A-7353 | + | AGGGAUACCAACCCGCGGGGUCA | 23 | 9007 |
| BCL11A-7354 | + | AAGGGAUACCAACCCGCGGGGUCA | 24 | 9008 |
| BCL11A-7355 | + | GCUUGAUGCGCUUAGAGA | 18 | 9009 |
| BCL11A-7356 | + | AGCUUGAUGCGCUUAGAGA | 19 | 9010 |
| BCL11A-5917 | + | GAGCUUGAUGCGCUUAGAGA | 20 | 9011 |
| BCL11A-7357 | + | CGAGCUUGAUGCGCUUAGAGA | 21 | 9012 |
| BCL11A-7358 | + | UCGAGCUUGAUGCGCUUAGAGA | 22 | 9013 |
| BCL11A-7359 | + | CUCGAGCUUGAUGCGCUUAGAGA | 23 | 9014 |
| BCL11A-7360 | + | UCUCGAGCUUGAUGCGCUUAGAGA | 24 | 9015 |
| BCL11A-7361 | + | CUAGAAAGAGGUUGGAGA | 18 | 9016 |
| BCL11A-7362 | + | CCUAGAAAGAGGUUGGAGA | 19 | 9017 |
| BCL11A-7363 | + | ACCUAGAAAGAGGUUGGAGA | 20 | 9018 |
| BCL11A-7364 | + | AACCUAGAAAGAGGUUGGAGA | 21 | 9019 |
| BCL11A-7365 | + | GAACCUAGAAAGAGGUUGGAGA | 22 | 9020 |
| BCL11A-7366 | + | AGAACCUAGAAAGAGGUUGGAGA | 23 | 9021 |
| BCL11A-7367 | + | AAGAACCUAGAAAGAGGUUGGAGA | 24 | 9022 |
| BCL11A-7368 | + | GUGUGUGAAGAACCUAGA | 18 | 9023 |
| BCL11A-7369 | + | GGUGUGUGAAGAACCUAGA | 19 | 9024 |
| BCL11A-7370 | + | GGGUGUGUGAAGAACCUAGA | 20 | 9025 |
| BCL11A-7371 | + | GGGGUGUGUGAAGAACCUAGA | 21 | 9026 |
| BCL11A-7372 | + | GGGGGUGUGUGAAGAACCUAGA | 22 | 9027 |
| BCL11A-7373 | + | UGGGGGUGUGUGAAGAACCUAGA | 23 | 9028 |
| BCL11A-7374 | + | AUGGGGGUGUGUGAAGAACCUAGA | 24 | 9029 |
| BCL11A-7375 | + | CUCUGGGUACUACGCCGA | 18 | 9030 |
| BCL11A-7376 | + | UCUCUGGGUACUACGCCGA | 19 | 9031 |
| BCL11A-7377 | + | CUCUCUGGGUACUACGCCGA | 20 | 9032 |
| BCL11A-7378 | + | GCUCUCUGGGUACUACGCCGA | 21 | 9033 |
| BCL11A-7379 | + | AGCUCUCUGGGUACUACGCCGA | 22 | 9034 |
| BCL11A-7380 | + | GAGCUCUCUGGGUACUACGCCGA | 23 | 9035 |
| BCL11A-7381 | + | UGAGCUCUCUGGGUACUACGCCGA | 24 | 9036 |
| BCL11A-7382 | + | GAGGUUGGAGACAGAGGA | 18 | 9037 |
| BCL11A-7383 | + | AGAGGUUGGAGACAGAGGA | 19 | 9038 |
| BCL11A-5925 | + | AAGAGGUUGGAGACAGAGGA | 20 | 9039 |
| BCL11A-7384 | + | AAAGAGGUUGGAGACAGAGGA | 21 | 9040 |
| BCL11A-7385 | + | GAAAGAGGUUGGAGACAGAGGA | 22 | 9041 |
| BCL11A-7386 | + | AGAAAGAGGUUGGAGACAGAGGA | 23 | 9042 |
| BCL11A-7387 | + | UAGAAAGAGGUUGGAGACAGAGGA | 24 | 9043 |
| BCL11A-7388 | + | GGGGCGGAUUGCAGAGGA | 18 | 9044 |
| BCL11A-7389 | + | AGGGGCGGAUUGCAGAGGA | 19 | 9045 |
| BCL11A-5926 | + | GAGGGGCGGAUUGCAGAGGA | 20 | 9046 |
| BCL11A-7390 | + | GGAGGGGCGGAUUGCAGAGGA | 21 | 9047 |
| BCL11A-7391 | + | AGGAGGGGCGGAUUGCAGAGGA | 22 | 9048 |
| BCL11A-7392 | + | GAGGAGGGGCGGAUUGCAGAGGA | 23 | 9049 |
| BCL11A-7393 | + | GGAGGAGGGGCGGAUUGCAGAGGA | 24 | 9050 |
| BCL11A-7394 | + | CGGAUUGCAGAGGAGGGA | 18 | 9051 |
| BCL11A-7395 | + | GCGGAUUGCAGAGGAGGGA | 19 | 9052 |
| BCL11A-5930 | + | GGCGGAUUGCAGAGGAGGGA | 20 | 9053 |
| BCL11A-7396 | + | GGGCGGAUUGCAGAGGAGGGA | 21 | 9054 |
| BCL11A-7397 | + | GGGGCGGAUUGCAGAGGAGGGA | 22 | 9055 |
| BCL11A-7398 | + | AGGGGCGGAUUGCAGAGGAGGGA | 23 | 9056 |
| BCL11A-7399 | + | GAGGGGCGGAUUGCAGAGGAGGGA | 24 | 9057 |
| BCL11A-7400 | + | CUUGACCGGGGGCUGGGA | 18 | 9058 |
| BCL11A-7401 | + | ACUUGACCGGGGGCUGGGA | 19 | 9059 |
| BCL11A-5931 | + | GACUUGACCGGGGGCUGGGA | 20 | 9060 |
| BCL11A-7402 | + | GGACUUGACCGGGGGCUGGGA | 21 | 9061 |
| BCL11A-7403 | + | UGGACUUGACCGGGGGCUGGGA | 22 | 9062 |
| BCL11A-7404 | + | UUGGACUUGACCGGGGGCUGGGA | 23 | 9063 |
| BCL11A-7405 | + | CUUGGACUUGACCGGGGGCUGGGA | 24 | 9064 |
| BCL11A-7406 | + | CGCAUGACUUGGACUUGA | 18 | 9065 |
| BCL11A-7407 | + | UCGCAUGACUUGGACUUGA | 19 | 9066 |
| BCL11A-7408 | + | CUCGCAUGACUUGGACUUGA | 20 | 9067 |
| BCL11A-7409 | + | ACUCGCAUGACUUGGACUUGA | 21 | 9068 |
| BCL11A-7410 | + | AACUCGCAUGACUUGGACUUGA | 22 | 9069 |
| BCL11A-7411 | + | GAACUCGCAUGACUUGGACUUGA | 23 | 9070 |
| BCL11A-7412 | + | AGAACUCGCAUGACUUGGACUUGA | 24 | 9071 |
| BCL11A-7413 | + | GGGCCCGGACCACUAAUA | 18 | 9072 |
| BCL11A-7414 | + | CGGGCCCGGACCACUAAUA | 19 | 9073 |
| BCL11A-5940 | + | CCGGGCCCGGACCACUAAUA | 20 | 9074 |
| BCL11A-7415 | + | CCCGGGCCCGGACCACUAAUA | 21 | 9075 |
| BCL11A-7416 | + | GCCCGGGCCCGGACCACUAAUA | 22 | 9076 |
| BCL11A-7417 | + | UGCCCGGGCCCGGACCACUAAUA | 23 | 9077 |
| BCL11A-7418 | + | CUGCCCGGGCCCGGACCACUAAUA | 24 | 9078 |
| BCL11A-7419 | + | AGCUCUCUAAGUCUCCUA | 18 | 9079 |
| BCL11A-7420 | + | CAGCUCUCUAAGUCUCCUA | 19 | 9080 |
| BCL11A-7421 | + | CCAGCUCUCUAAGUCUCCUA | 20 | 9081 |
| BCL11A-7422 | + | GCCAGCUCUCUAAGUCUCCUA | 21 | 9082 |
| BCL11A-7423 | + | UGCCAGCUCUCUAAGUCUCCUA | 22 | 9083 |
| BCL11A-7424 | + | CUGCCAGCUCUCUAAGUCUCCUA | 23 | 9084 |
| BCL11A-7425 | + | CCUGCCAGCUCUCUAAGUCUCCUA | 24 | 9085 |
| BCL11A-7426 | + | CUGGAGUCUCCGAAGCUA | 18 | 9086 |
| BCL11A-7427 | + | UCUGGAGUCUCCGAAGCUA | 19 | 9087 |
| BCL11A-5943 | + | GUCUGGAGUCUCCGAAGCUA | 20 | 9088 |
| BCL11A-7428 | + | UGUCUGGAGUCUCCGAAGCUA | 21 | 9089 |
| BCL11A-7429 | + | UUGUCUGGAGUCUCCGAAGCUA | 22 | 9090 |
| BCL11A-7430 | + | AUUGUCUGGAGUCUCCGAAGCUA | 23 | 9091 |
| BCL11A-7431 | + | GAUUGUCUGGAGUCUCCGAAGCUA | 24 | 9092 |
| BCL11A-7432 | + | UCGAGCUUGAUGCGCUUA | 18 | 9093 |
| BCL11A-7433 | + | CUCGAGCUUGAUGCGCUUA | 19 | 9094 |
| BCL11A-7434 | + | UCUCGAGCUUGAUGCGCUUA | 20 | 9095 |
| BCL11A-7435 | + | UUCUCGAGCUUGAUGCGCUUA | 21 | 9096 |
| BCL11A-7436 | + | CUUCUCGAGCUUGAUGCGCUUA | 22 | 9097 |
| BCL11A-7437 | + | CCUUCUCGAGCUUGAUGCGCUUA | 23 | 9098 |
| BCL11A-7438 | + | UCCUUCUCGAGCUUGAUGCGCUUA | 24 | 9099 |
| BCL11A-7439 | + | GGUAUUCUUAGCAGGUUA | 18 | 9100 |
| BCL11A-7440 | + | UGGUAUUCUUAGCAGGUUA | 19 | 9101 |
| BCL11A-7441 | + | CUGGUAUUCUUAGCAGGUUA | 20 | 9102 |
| BCL11A-7442 | + | CCUGGUAUUCUUAGCAGGUUA | 21 | 9103 |
| BCL11A-7443 | + | UCCUGGUAUUCUUAGCAGGUUA | 22 | 9104 |
| BCL11A-7444 | + | AUCCUGGUAUUCUUAGCAGGUUA | 23 | 9105 |
| BCL11A-7445 | + | GAUCCUGGUAUUCUUAGCAGGUUA | 24 | 9106 |
| BCL11A-7446 | + | CUCGGUGGUGGACUAAAC | 18 | 9107 |
| BCL11A-7447 | + | UCUCGGUGGUGGACUAAAC | 19 | 9108 |
| BCL11A-5947 | + | GUCUCGGUGGUGGACUAAAC | 20 | 9109 |
| BCL11A-7448 | + | UGUCUCGGUGGUGGACUAAAC | 21 | 9110 |
| BCL11A-7449 | + | AUGUCUCGGUGGUGGACUAAAC | 22 | 9111 |
| BCL11A-7450 | + | GAUGUCUCGGUGGUGGACUAAAC | 23 | 9112 |
| BCL11A-7451 | + | UGAUGUCUCGGUGGUGGACUAAAC | 24 | 9113 |
| BCL11A-7452 | + | UCCGAGGAGUGCUCCGAC | 18 | 9114 |
| BCL11A-7453 | + | CUCCGAGGAGUGCUCCGAC | 19 | 9115 |
| BCL11A-7454 | + | UCUCCGAGGAGUGCUCCGAC | 20 | 9116 |
| BCL11A-7455 | + | UUCUCCGAGGAGUGCUCCGAC | 21 | 9117 |
| BCL11A-7456 | + | GUUCUCCGAGGAGUGCUCCGAC | 22 | 9118 |
| BCL11A-7457 | + | CGUUCUCCGAGGAGUGCUCCGAC | 23 | 9119 |
| BCL11A-7458 | + | CCGUUCUCCGAGGAGUGCUCCGAC | 24 | 9120 |
| BCL11A-7459 | + | AACUUGGCCACCACGGAC | 18 | 9121 |
| BCL11A-7460 | + | GAACUUGGCCACCACGGAC | 19 | 9122 |
| BCL11A-7461 | + | UGAACUUGGCCACCACGGAC | 20 | 9123 |
| BCL11A-7462 | + | UUGAACUUGGCCACCACGGAC | 21 | 9124 |
| BCL11A-7463 | + | CUUGAACUUGGCCACCACGGAC | 22 | 9125 |
| BCL11A-7464 | + | UCUUGAACUUGGCCACCACGGAC | 23 | 9126 |
| BCL11A-7465 | + | CUCUUGAACUUGGCCACCACGGAC | 24 | 9127 |
| BCL11A-7466 | + | CCGCAGAACUCGCAUGAC | 18 | 9128 |
| BCL11A-7467 | + | GCCGCAGAACUCGCAUGAC | 19 | 9129 |
| BCL11A-7468 | + | UGCCGCAGAACUCGCAUGAC | 20 | 9130 |
| BCL11A-7469 | + | UUGCCGCAGAACUCGCAUGAC | 21 | 9131 |
| BCL11A-7470 | + | CUUGCCGCAGAACUCGCAUGAC | 22 | 9132 |
| BCL11A-7471 | + | UCUUGCCGCAGAACUCGCAUGAC | 23 | 9133 |
| BCL11A-7472 | + | GUCUUGCCGCAGAACUCGCAUGAC | 24 | 9134 |
| BCL11A-7473 | + | GCAUGACUUGGACUUGAC | 18 | 9135 |
| BCL11A-7474 | + | CGCAUGACUUGGACUUGAC | 19 | 9136 |
| BCL11A-5957 | + | UCGCAUGACUUGGACUUGAC | 20 | 9137 |
| BCL11A-7475 | + | CUCGCAUGACUUGGACUUGAC | 21 | 9138 |
| BCL11A-7476 | + | ACUCGCAUGACUUGGACUUGAC | 22 | 9139 |
| BCL11A-7477 | + | AACUCGCAUGACUUGGACUUGAC | 23 | 9140 |
| BCL11A-7478 | + | GAACUCGCAUGACUUGGACUUGAC | 24 | 9141 |
| BCL11A-7479 | + | GGGGGUGUGUGAAGAACC | 18 | 9142 |
| BCL11A-7480 | + | UGGGGGUGUGUGAAGAACC | 19 | 9143 |
| BCL11A-7481 | + | AUGGGGGUGUGUGAAGAACC | 20 | 9144 |
| BCL11A-7482 | + | AAUGGGGGUGUGUGAAGAACC | 21 | 9145 |
| BCL11A-7483 | + | GAAUGGGGGUGUGUGAAGAACC | 22 | 9146 |
| BCL11A-7484 | + | CGAAUGGGGGUGUGUGAAGAACC | 23 | 9147 |
| BCL11A-7485 | + | CCGAAUGGGGGUGUGUGAAGAACC | 24 | 9148 |
| BCL11A-7486 | + | CUCUUGAACUUGGCCACC | 18 | 9149 |
| BCL11A-7487 | + | GCUCUUGAACUUGGCCACC | 19 | 9150 |
| BCL11A-7488 | + | CGCUCUUGAACUUGGCCACC | 20 | 9151 |
| BCL11A-7489 | + | UCGCUCUUGAACUUGGCCACC | 21 | 9152 |
| BCL11A-7490 | + | CUCGCUCUUGAACUUGGCCACC | 22 | 9153 |
| BCL11A-7491 | + | UCUCGCUCUUGAACUUGGCCACC | 23 | 9154 |
| BCL11A-7492 | + | UUCUCGCUCUUGAACUUGGCCACC | 24 | 9155 |
| BCL11A-7493 | + | CAUGACUUGGACUUGACC | 18 | 9156 |
| BCL11A-7494 | + | GCAUGACUUGGACUUGACC | 19 | 9157 |
| BCL11A-5965 | + | CGCAUGACUUGGACUUGACC | 20 | 9158 |
| BCL11A-7495 | + | UCGCAUGACUUGGACUUGACC | 21 | 9159 |
| BCL11A-7496 | + | CUCGCAUGACUUGGACUUGACC | 22 | 9160 |
| BCL11A-7497 | + | ACUCGCAUGACUUGGACUUGACC | 23 | 9161 |
| BCL11A-7498 | + | AACUCGCAUGACUUGGACUUGACC | 24 | 9162 |
| BCL11A-7499 | + | CUGAAGGGAUACCAACCC | 18 | 9163 |
| BCL11A-7500 | + | CCUGAAGGGAUACCAACCC | 19 | 9164 |
| BCL11A-7501 | + | UCCUGAAGGGAUACCAACCC | 20 | 9165 |
| BCL11A-7502 | + | GUCCUGAAGGGAUACCAACCC | 21 | 9166 |
| BCL11A-7503 | + | AGUCCUGAAGGGAUACCAACCC | 22 | 9167 |
| BCL11A-7504 | + | UAGUCCUGAAGGGAUACCAACCC | 23 | 9168 |
| BCL11A-7505 | + | CUAGUCCUGAAGGGAUACCAACCC | 24 | 9169 |
| BCL11A-7506 | + | CGCCCACGACCGCGCCCC | 18 | 9170 |
| BCL11A-7507 | + | ACGCCCACGACCGCGCCCC | 19 | 9171 |
| BCL11A-3830 | + | CACGCCCACGACCGCGCCCC | 20 | 9172 |
| BCL11A-7508 | + | CCACGCCCACGACCGCGCCCC | 21 | 9173 |
| BCL11A-7509 | + | CCCACGCCCACGACCGCGCCCC | 22 | 9174 |
| BCL11A-7510 | + | GCCCACGCCCACGACCGCGCCCC | 23 | 9175 |
| BCL11A-7511 | + | CGCCCACGCCCACGACCGCGCCCC | 24 | 9176 |
| BCL11A-7512 | + | GCUUUUUGGACAGGCCCC | 18 | 9177 |
| BCL11A-7513 | + | AGCUUUUUGGACAGGCCCC | 19 | 9178 |
| BCL11A-7514 | + | CAGCUUUUUGGACAGGCCCC | 20 | 9179 |
| BCL11A-7515 | + | GCAGCUUUUUGGACAGGCCCC | 21 | 9180 |
| BCL11A-7516 | + | AGCAGCUUUUUGGACAGGCCCC | 22 | 9181 |
| BCL11A-7517 | + | CAGCAGCUUUUUGGACAGGCCCC | 23 | 9182 |
| BCL11A-7518 | + | GCAGCAGCUUUUUGGACAGGCCCC | 24 | 9183 |
| BCL11A-7519 | + | CCCGAGGCCGACUCGCCC | 18 | 9184 |
| BCL11A-7520 | + | CCCCGAGGCCGACUCGCCC | 19 | 9185 |
| BCL11A-5977 | + | CCCCCGAGGCCGACUCGCCC | 20 | 9186 |
| BCL11A-7521 | + | CCCCCCGAGGCCGACUCGCCC | 21 | 9187 |
| BCL11A-7522 | + | GCCCCCCGAGGCCGACUCGCCC | 22 | 9188 |
| BCL11A-7523 | + | GGCCCCCCGAGGCCGACUCGCCC | 23 | 9189 |
| BCL11A-7524 | + | AGGCCCCCCGAGGCCGACUCGCCC | 24 | 9190 |
| BCL11A-7525 | + | GUCUGCAAUAUGAAUCCC | 18 | 9191 |
| BCL11A-7526 | + | UGUCUGCAAUAUGAAUCCC | 19 | 9192 |
| BCL11A-7527 | + | UUGUCUGCAAUAUGAAUCCC | 20 | 9193 |
| BCL11A-7528 | + | AUUGUCUGCAAUAUGAAUCCC | 21 | 9194 |
| BCL11A-7529 | + | UAUUGUCUGCAAUAUGAAUCCC | 22 | 9195 |
| BCL11A-7530 | + | UUAUUGUCUGCAAUAUGAAUCCC | 23 | 9196 |
| BCL11A-7531 | + | GUUAUUGUCUGCAAUAUGAAUCCC | 24 | 9197 |
| BCL11A-7532 | + | UUCCCGUGCCGCUGCGCC | 18 | 9198 |
| BCL11A-7533 | + | CUUCCCGUGCCGCUGCGCC | 19 | 9199 |
| BCL11A-7534 | + | ACUUCCCGUGCCGCUGCGCC | 20 | 9200 |
| BCL11A-7535 | + | CACUUCCCGUGCCGCUGCGCC | 21 | 9201 |
| BCL11A-7536 | + | CCACUUCCCGUGCCGCUGCGCC | 22 | 9202 |
| BCL11A-7537 | + | UCCACUUCCCGUGCCGCUGCGCC | 23 | 9203 |
| BCL11A-7538 | + | CUCCACUUCCCGUGCCGCUGCGCC | 24 | 9204 |
| BCL11A-7539 | + | CCCCGAGGCCGACUCGCC | 18 | 9205 |
| BCL11A-7540 | + | CCCCCGAGGCCGACUCGCC | 19 | 9206 |
| BCL11A-5989 | + | CCCCCCGAGGCCGACUCGCC | 20 | 9207 |
| BCL11A-7541 | + | GCCCCCCGAGGCCGACUCGCC | 21 | 9208 |
| BCL11A-7542 | + | GGCCCCCCGAGGCCGACUCGCC | 22 | 9209 |
| BCL11A-7543 | + | AGGCCCCCCGAGGCCGACUCGCC | 23 | 9210 |
| BCL11A-7544 | + | CAGGCCCCCCGAGGCCGACUCGCC | 24 | 9211 |
| BCL11A-7545 | + | GCGCUUAUGCUUCUCGCC | 18 | 9212 |
| BCL11A-7546 | + | CGCGCUUAUGCUUCUCGCC | 19 | 9213 |
| BCL11A-7547 | + | CCGCGCUUAUGCUUCUCGCC | 20 | 9214 |
| BCL11A-7548 | + | GCCGCGCUUAUGCUUCUCGCC | 21 | 9215 |
| BCL11A-7549 | + | GGCCGCGCUUAUGCUUCUCGCC | 22 | 9216 |
| BCL11A-7550 | + | UGGCCGCGCUUAUGCUUCUCGCC | 23 | 9217 |
| BCL11A-7551 | + | GUGGCCGCGCUUAUGCUUCUCGCC | 24 | 9218 |
| BCL11A-7552 | + | GGGAGGGGGGGCGUCGCC | 18 | 9219 |
| BCL11A-7553 | + | AGGGAGGGGGGGCGUCGCC | 19 | 9220 |
| BCL11A-5990 | + | GAGGGAGGGGGGGCGUCGCC | 20 | 9221 |
| BCL11A-7554 | + | GGAGGGAGGGGGGGCGUCGCC | 21 | 9222 |
| BCL11A-7555 | + | AGGAGGGAGGGGGGGCGUCGCC | 22 | 9223 |
| BCL11A-7556 | + | GAGGAGGGAGGGGGGGCGUCGCC | 23 | 9224 |
| BCL11A-7557 | + | AGAGGAGGGAGGGGGGGCGUCGCC | 24 | 9225 |
| BCL11A-7558 | + | CAUAGGGCUGGGCCGGCC | 18 | 9226 |
| BCL11A-7559 | + | GCAUAGGGCUGGGCCGGCC | 19 | 9227 |
| BCL11A-5991 | + | UGCAUAGGGCUGGGCCGGCC | 20 | 9228 |
| BCL11A-7560 | + | UUGCAUAGGGCUGGGCCGGCC | 21 | 9229 |
| BCL11A-7561 | + | UUUGCAUAGGGCUGGGCCGGCC | 22 | 9230 |
| BCL11A-7562 | + | CUUUGCAUAGGGCUGGGCCGGCC | 23 | 9231 |
| BCL11A-7563 | + | CCUUUGCAUAGGGCUGGGCCGGCC | 24 | 9232 |
| BCL11A-7564 | + | GUGUUGGGCAUCGCGGCC | 18 | 9233 |
| BCL11A-7565 | + | CGUGUUGGGCAUCGCGGCC | 19 | 9234 |
| BCL11A-5993 | + | CCGUGUUGGGCAUCGCGGCC | 20 | 9235 |
| BCL11A-7566 | + | UCCGUGUUGGGCAUCGCGGCC | 21 | 9236 |
| BCL11A-7567 | + | CUCCGUGUUGGGCAUCGCGGCC | 22 | 9237 |
| BCL11A-7568 | + | UCUCCGUGUUGGGCAUCGCGGCC | 23 | 9238 |
| BCL11A-7569 | + | UUCUCCGUGUUGGGCAUCGCGGCC | 24 | 9239 |
| BCL11A-7570 | + | AGGGAUCUUUGAGCUGCC | 18 | 9240 |
| BCL11A-7571 | + | AAGGGAUCUUUGAGCUGCC | 19 | 9241 |
| BCL11A-6000 | + | GAAGGGAUCUUUGAGCUGCC | 20 | 9242 |
| BCL11A-7572 | + | GGAAGGGAUCUUUGAGCUGCC | 21 | 9243 |
| BCL11A-7573 | + | AGGAAGGGAUCUUUGAGCUGCC | 22 | 9244 |
| BCL11A-7574 | + | AAGGAAGGGAUCUUUGAGCUGCC | 23 | 9245 |
| BCL11A-7575 | + | UAAGGAAGGGAUCUUUGAGCUGCC | 24 | 9246 |
| BCL11A-7576 | + | AUCCCUCCGUCCAGCUCC | 18 | 9247 |
| BCL11A-7577 | + | GAUCCCUCCGUCCAGCUCC | 19 | 9248 |
| BCL11A-7578 | + | AGAUCCCUCCGUCCAGCUCC | 20 | 9249 |
| BCL11A-7579 | + | GAGAUCCCUCCGUCCAGCUCC | 21 | 9250 |
| BCL11A-7580 | + | CGAGAUCCCUCCGUCCAGCUCC | 22 | 9251 |
| BCL11A-7581 | + | CCGAGAUCCCUCCGUCCAGCUCC | 23 | 9252 |
| BCL11A-7582 | + | CCCGAGAUCCCUCCGUCCAGCUCC | 24 | 9253 |
| BCL11A-7583 | + | CCAGCUCUCUAAGUCUCC | 18 | 9254 |
| BCL11A-7584 | + | GCCAGCUCUCUAAGUCUCC | 19 | 9255 |
| BCL11A-7585 | + | UGCCAGCUCUCUAAGUCUCC | 20 | 9256 |
| BCL11A-7586 | + | CUGCCAGCUCUCUAAGUCUCC | 21 | 9257 |
| BCL11A-7587 | + | CCUGCCAGCUCUCUAAGUCUCC | 22 | 9258 |
| BCL11A-7588 | + | CCCUGCCAGCUCUCUAAGUCUCC | 23 | 9259 |
| BCL11A-7589 | + | UCCCUGCCAGCUCUCUAAGUCUCC | 24 | 9260 |
| BCL11A-7590 | + | CGCAAACUCCCGUUCUCC | 18 | 9261 |
| BCL11A-7591 | + | GCGCAAACUCCCGUUCUCC | 19 | 9262 |
| BCL11A-7592 | + | AGCGCAAACUCCCGUUCUCC | 20 | 9263 |
| BCL11A-7593 | + | AAGCGCAAACUCCCGUUCUCC | 21 | 9264 |
| BCL11A-7594 | + | GAAGCGCAAACUCCCGUUCUCC | 22 | 9265 |
| BCL11A-7595 | + | AGAAGCGCAAACUCCCGUUCUCC | 23 | 9266 |
| BCL11A-7596 | + | GAGAAGCGCAAACUCCCGUUCUCC | 24 | 9267 |
| BCL11A-7597 | + | UCGCUGGUGCCGGGUUCC | 18 | 9268 |
| BCL11A-7598 | + | GUCGCUGGUGCCGGGUUCC | 19 | 9269 |
| BCL11A-6011 | + | AGUCGCUGGUGCCGGGUUCC | 20 | 9270 |
| BCL11A-7599 | + | AAGUCGCUGGUGCCGGGUUCC | 21 | 9271 |
| BCL11A-7600 | + | CAAGUCGCUGGUGCCGGGUUCC | 22 | 9272 |
| BCL11A-7601 | + | CCAAGUCGCUGGUGCCGGGUUCC | 23 | 9273 |
| BCL11A-7602 | + | ACCAAGUCGCUGGUGCCGGGUUCC | 24 | 9274 |
| BCL11A-7603 | + | GCCGCCUCCAGGCUCAGC | 18 | 9275 |
| BCL11A-7604 | + | CGCCGCCUCCAGGCUCAGC | 19 | 9276 |
| BCL11A-7605 | + | GCGCCGCCUCCAGGCUCAGC | 20 | 9277 |
| BCL11A-7606 | + | CGCGCCGCCUCCAGGCUCAGC | 21 | 9278 |
| BCL11A-7607 | + | GCGCGCCGCCUCCAGGCUCAGC | 22 | 9279 |
| BCL11A-7608 | + | GGCGCGCCGCCUCCAGGCUCAGC | 23 | 9280 |
| BCL11A-7609 | + | UGGCGCGCCGCCUCCAGGCUCAGC | 24 | 9281 |
| BCL11A-7610 | + | AGAAGGGGCUCAGCGAGC | 18 | 9282 |
| BCL11A-7611 | + | GAGAAGGGGCUCAGCGAGC | 19 | 9283 |
| BCL11A-6013 | + | AGAGAAGGGGCUCAGCGAGC | 20 | 9284 |
| BCL11A-7612 | + | UAGAGAAGGGGCUCAGCGAGC | 21 | 9285 |
| BCL11A-7613 | + | UUAGAGAAGGGGCUCAGCGAGC | 22 | 9286 |
| BCL11A-7614 | + | CUUAGAGAAGGGGCUCAGCGAGC | 23 | 9287 |
| BCL11A-7615 | + | GCUUAGAGAAGGGGCUCAGCGAGC | 24 | 9288 |
| BCL11A-7616 | + | CCCCCGAGGCCGACUCGC | 18 | 9289 |
| BCL11A-7617 | + | CCCCCCGAGGCCGACUCGC | 19 | 9290 |
| BCL11A-7618 | + | GCCCCCCGAGGCCGACUCGC | 20 | 9291 |
| BCL11A-7619 | + | GGCCCCCCGAGGCCGACUCGC | 21 | 9292 |
| BCL11A-7620 | + | AGGCCCCCCGAGGCCGACUCGC | 22 | 9293 |
| BCL11A-7621 | + | CAGGCCCCCCGAGGCCGACUCGC | 23 | 9294 |
| BCL11A-7622 | + | ACAGGCCCCCCGAGGCCGACUCGC | 24 | 9295 |
| BCL11A-7623 | + | AGGGAGGGGGGGCGUCGC | 18 | 9296 |
| BCL11A-7624 | + | GAGGGAGGGGGGGCGUCGC | 19 | 9297 |
| BCL11A-7625 | + | GGAGGGAGGGGGGGCGUCGC | 20 | 9298 |
| BCL11A-7626 | + | AGGAGGGAGGGGGGGCGUCGC | 21 | 9299 |
| BCL11A-7627 | + | GAGGAGGGAGGGGGGGCGUCGC | 22 | 9300 |
| BCL11A-7628 | + | AGAGGAGGGAGGGGGGGCGUCGC | 23 | 9301 |
| BCL11A-7629 | + | CAGAGGAGGGAGGGGGGGCGUCGC | 24 | 9302 |
| BCL11A-7630 | + | AGCGCCCUUCUGCCAGGC | 18 | 9303 |
| BCL11A-7631 | + | AAGCGCCCUUCUGCCAGGC | 19 | 9304 |
| BCL11A-6027 | + | AAAGCGCCCUUCUGCCAGGC | 20 | 9305 |
| BCL11A-7632 | + | GAAAGCGCCCUUCUGCCAGGC | 21 | 9306 |
| BCL11A-7633 | + | GGAAAGCGCCCUUCUGCCAGGC | 22 | 9307 |
| BCL11A-7634 | + | UGGAAAGCGCCCUUCUGCCAGGC | 23 | 9308 |
| BCL11A-7635 | + | GUGGAAAGCGCCCUUCUGCCAGGC | 24 | 9309 |
| BCL11A-7636 | + | GCAUAGGGCUGGGCCGGC | 18 | 9310 |
| BCL11A-7637 | + | UGCAUAGGGCUGGGCCGGC | 19 | 9311 |
| BCL11A-7638 | + | UUGCAUAGGGCUGGGCCGGC | 20 | 9312 |
| BCL11A-7639 | + | UUUGCAUAGGGCUGGGCCGGC | 21 | 9313 |
| BCL11A-7640 | + | CUUUGCAUAGGGCUGGGCCGGC | 22 | 9314 |
| BCL11A-7641 | + | CCUUUGCAUAGGGCUGGGCCGGC | 23 | 9315 |
| BCL11A-7642 | + | ACCUUUGCAUAGGGCUGGGCCGGC | 24 | 9316 |
| BCL11A-7643 | + | CGUGUUGGGCAUCGCGGC | 18 | 9317 |
| BCL11A-7644 | + | CCGUGUUGGGCAUCGCGGC | 19 | 9318 |
| BCL11A-6028 | + | UCCGUGUUGGGCAUCGCGGC | 20 | 9319 |
| BCL11A-7645 | + | CUCCGUGUUGGGCAUCGCGGC | 21 | 9320 |
| BCL11A-7646 | + | UCUCCGUGUUGGGCAUCGCGGC | 22 | 9321 |
| BCL11A-7647 | + | UUCUCCGUGUUGGGCAUCGCGGC | 23 | 9322 |
| BCL11A-7648 | + | GUUCUCCGUGUUGGGCAUCGCGGC | 24 | 9323 |
| BCL11A-7649 | + | AGCUGGGCCUGCCCGGGC | 18 | 9324 |
| BCL11A-7650 | + | GAGCUGGGCCUGCCCGGGC | 19 | 9325 |
| BCL11A-7651 | + | UGAGCUGGGCCUGCCCGGGC | 20 | 9326 |
| BCL11A-7652 | + | UUGAGCUGGGCCUGCCCGGGC | 21 | 9327 |
| BCL11A-7653 | + | UUUGAGCUGGGCCUGCCCGGGC | 22 | 9328 |
| BCL11A-7654 | + | UUUUGAGCUGGGCCUGCCCGGGC | 23 | 9329 |
| BCL11A-7655 | + | CUUUUGAGCUGGGCCUGCCCGGGC | 24 | 9330 |
| BCL11A-7656 | + | UUGGACUUGACCGGGGGC | 18 | 9331 |
| BCL11A-7657 | + | CUUGGACUUGACCGGGGGC | 19 | 9332 |
| BCL11A-6032 | + | ACUUGGACUUGACCGGGGGC | 20 | 9333 |
| BCL11A-7658 | + | GACUUGGACUUGACCGGGGGC | 21 | 9334 |
| BCL11A-7659 | + | UGACUUGGACUUGACCGGGGGC | 22 | 9335 |
| BCL11A-7660 | + | AUGACUUGGACUUGACCGGGGGC | 23 | 9336 |
| BCL11A-7661 | + | CAUGACUUGGACUUGACCGGGGGC | 24 | 9337 |
| BCL11A-7662 | + | CCUAGAGAAAUCCAUGGC | 18 | 9338 |
| BCL11A-7663 | + | UCCUAGAGAAAUCCAUGGC | 19 | 9339 |
| BCL11A-6035 | + | CUCCUAGAGAAAUCCAUGGC | 20 | 9340 |
| BCL11A-7664 | + | UCUCCUAGAGAAAUCCAUGGC | 21 | 9341 |
| BCL11A-7665 | + | GUCUCCUAGAGAAAUCCAUGGC | 22 | 9342 |
| BCL11A-7666 | + | AGUCUCCUAGAGAAAUCCAUGGC | 23 | 9343 |
| BCL11A-7667 | + | AAGUCUCCUAGAGAAAUCCAUGGC | 24 | 9344 |
| BCL11A-7668 | + | AUCCCAUGGAGAGGUGGC | 18 | 9345 |
| BCL11A-7669 | + | AAUCCCAUGGAGAGGUGGC | 19 | 9346 |
| BCL11A-6038 | + | GAAUCCCAUGGAGAGGUGGC | 20 | 9347 |
| BCL11A-7670 | + | UGAAUCCCAUGGAGAGGUGGC | 21 | 9348 |
| BCL11A-7671 | + | AUGAAUCCCAUGGAGAGGUGGC | 22 | 9349 |
| BCL11A-7672 | + | UAUGAAUCCCAUGGAGAGGUGGC | 23 | 9350 |
| BCL11A-7673 | + | AUAUGAAUCCCAUGGAGAGGUGGC | 24 | 9351 |
| BCL11A-7674 | + | ACUCGGGUGAUGGGUGGC | 18 | 9352 |
| BCL11A-7675 | + | CACUCGGGUGAUGGGUGGC | 19 | 9353 |
| BCL11A-7676 | + | GCACUCGGGUGAUGGGUGGC | 20 | 9354 |
| BCL11A-7677 | + | GGCACUCGGGUGAUGGGUGGC | 21 | 9355 |
| BCL11A-7678 | + | AGGCACUCGGGUGAUGGGUGGC | 22 | 9356 |
| BCL11A-7679 | + | AAGGCACUCGGGUGAUGGGUGGC | 23 | 9357 |
| BCL11A-7680 | + | AAAGGCACUCGGGUGAUGGGUGGC | 24 | 9358 |
| BCL11A-7681 | + | CUUUUGAGCUGGGCCUGC | 18 | 9359 |
| BCL11A-7682 | + | UCUUUUGAGCUGGGCCUGC | 19 | 9360 |
| BCL11A-7683 | + | CUCUUUUGAGCUGGGCCUGC | 20 | 9361 |
| BCL11A-7684 | + | CCUCUUUUGAGCUGGGCCUGC | 21 | 9362 |
| BCL11A-7685 | + | CCCUCUUUUGAGCUGGGCCUGC | 22 | 9363 |
| BCL11A-7686 | + | GCCCUCUUUUGAGCUGGGCCUGC | 23 | 9364 |
| BCL11A-7687 | + | UGCCCUCUUUUGAGCUGGGCCUGC | 24 | 9365 |
| BCL11A-7688 | + | AAGGGAUCUUUGAGCUGC | 18 | 9366 |
| BCL11A-7689 | + | GAAGGGAUCUUUGAGCUGC | 19 | 9367 |
| BCL11A-7690 | + | GGAAGGGAUCUUUGAGCUGC | 20 | 9368 |
| BCL11A-7691 | + | AGGAAGGGAUCUUUGAGCUGC | 21 | 9369 |
| BCL11A-7692 | + | AAGGAAGGGAUCUUUGAGCUGC | 22 | 9370 |
| BCL11A-7693 | + | UAAGGAAGGGAUCUUUGAGCUGC | 23 | 9371 |
| BCL11A-7694 | + | CUAAGGAAGGGAUCUUUGAGCUGC | 24 | 9372 |
| BCL11A-7695 | + | GCCUCGCUGAAGUGCUGC | 18 | 9373 |
| BCL11A-7696 | + | GGCCUCGCUGAAGUGCUGC | 19 | 9374 |
| BCL11A-7697 | + | AGGCCUCGCUGAAGUGCUGC | 20 | 9375 |
| BCL11A-7698 | + | AAGGCCUCGCUGAAGUGCUGC | 21 | 9376 |
| BCL11A-7699 | + | GAAGGCCUCGCUGAAGUGCUGC | 22 | 9377 |
| BCL11A-7700 | + | GGAAGGCCUCGCUGAAGUGCUGC | 23 | 9378 |
| BCL11A-7701 | + | UGGAAGGCCUCGCUGAAGUGCUGC | 24 | 9379 |
| BCL11A-7702 | + | GUGUUCUGUGCGUGUUGC | 18 | 9380 |
| BCL11A-7703 | + | AGUGUUCUGUGCGUGUUGC | 19 | 9381 |
| BCL11A-7704 | + | GAGUGUUCUGUGCGUGUUGC | 20 | 9382 |
| BCL11A-7705 | + | UGAGUGUUCUGUGCGUGUUGC | 21 | 9383 |
| BCL11A-7706 | + | AUGAGUGUUCUGUGCGUGUUGC | 22 | 9384 |
| BCL11A-7707 | + | CAUGAGUGUUCUGUGCGUGUUGC | 23 | 9385 |
| BCL11A-7708 | + | CCAUGAGUGUUCUGUGCGUGUUGC | 24 | 9386 |
| BCL11A-7709 | + | CGAAAACUGCCACACAUC | 18 | 9387 |
| BCL11A-7710 | + | CCGAAAACUGCCACACAUC | 19 | 9388 |
| BCL11A-7711 | + | UCCGAAAACUGCCACACAUC | 20 | 9389 |
| BCL11A-7712 | + | AUCCGAAAACUGCCACACAUC | 21 | 9390 |
| BCL11A-7713 | + | CAUCCGAAAACUGCCACACAUC | 22 | 9391 |
| BCL11A-7714 | + | CCAUCCGAAAACUGCCACACAUC | 23 | 9392 |
| BCL11A-7715 | + | UCCAUCCGAAAACUGCCACACAUC | 24 | 9393 |
| BCL11A-7716 | + | UUGGGGUCGUUCUCGCUC | 18 | 9394 |
| BCL11A-7717 | + | GUUGGGGUCGUUCUCGCUC | 19 | 9395 |
| BCL11A-7718 | + | GGUUGGGGUCGUUCUCGCUC | 20 | 9396 |
| BCL11A-7719 | + | AGGUUGGGGUCGUUCUCGCUC | 21 | 9397 |
| BCL11A-7720 | + | CAGGUUGGGGUCGUUCUCGCUC | 22 | 9398 |
| BCL11A-7721 | + | UCAGGUUGGGGUCGUUCUCGCUC | 23 | 9399 |
| BCL11A-7722 | + | AUCAGGUUGGGGUCGUUCUCGCUC | 24 | 9400 |
| BCL11A-7723 | + | CUCAGAACUUAAGGGCUC | 18 | 9401 |
| BCL11A-7724 | + | UCUCAGAACUUAAGGGCUC | 19 | 9402 |
| BCL11A-7725 | + | UUCUCAGAACUUAAGGGCUC | 20 | 9403 |
| BCL11A-7726 | + | UUUCUCAGAACUUAAGGGCUC | 21 | 9404 |
| BCL11A-7727 | + | UUUUCUCAGAACUUAAGGGCUC | 22 | 9405 |
| BCL11A-7728 | + | AUUUUCUCAGAACUUAAGGGCUC | 23 | 9406 |
| BCL11A-7729 | + | AAUUUUCUCAGAACUUAAGGGCUC | 24 | 9407 |
| BCL11A-7730 | + | GACAUUCUGCACCUAGUC | 18 | 9408 |
| BCL11A-7731 | + | GGACAUUCUGCACCUAGUC | 19 | 9409 |
| BCL11A-7732 | + | AGGACAUUCUGCACCUAGUC | 20 | 9410 |
| BCL11A-7733 | + | AAGGACAUUCUGCACCUAGUC | 21 | 9411 |
| BCL11A-7734 | + | GAAGGACAUUCUGCACCUAGUC | 22 | 9412 |
| BCL11A-7735 | + | GGAAGGACAUUCUGCACCUAGUC | 23 | 9413 |
| BCL11A-7736 | + | GGGAAGGACAUUCUGCACCUAGUC | 24 | 9414 |
| BCL11A-7737 | + | UCGUCGGACUUGACCGUC | 18 | 9415 |
| BCL11A-7738 | + | GUCGUCGGACUUGACCGUC | 19 | 9416 |
| BCL11A-7739 | + | CGUCGUCGGACUUGACCGUC | 20 | 9417 |
| BCL11A-7740 | + | CCGUCGUCGGACUUGACCGUC | 21 | 9418 |
| BCL11A-7741 | + | ACCGUCGUCGGACUUGACCGUC | 22 | 9419 |
| BCL11A-7742 | + | GACCGUCGUCGGACUUGACCGUC | 23 | 9420 |
| BCL11A-7743 | + | AGACCGUCGUCGGACUUGACCGUC | 24 | 9421 |
| BCL11A-7744 | + | AUACCAACCCGCGGGGUC | 18 | 9422 |
| BCL11A-7745 | + | GAUACCAACCCGCGGGGUC | 19 | 9423 |
| BCL11A-6052 | + | GGAUACCAACCCGCGGGGUC | 20 | 9424 |
| BCL11A-7746 | + | GGGAUACCAACCCGCGGGGUC | 21 | 9425 |
| BCL11A-7747 | + | AGGGAUACCAACCCGCGGGGUC | 22 | 9426 |
| BCL11A-7748 | + | AAGGGAUACCAACCCGCGGGGUC | 23 | 9427 |
| BCL11A-7749 | + | GAAGGGAUACCAACCCGCGGGGUC | 24 | 9428 |
| BCL11A-7750 | + | GGCAGGUCGAACUCCUUC | 18 | 9429 |
| BCL11A-7751 | + | GGGCAGGUCGAACUCCUUC | 19 | 9430 |
| BCL11A-7752 | + | GGGGCAGGUCGAACUCCUUC | 20 | 9431 |
| BCL11A-7753 | + | GGGGGCAGGUCGAACUCCUUC | 21 | 9432 |
| BCL11A-7754 | + | CGGGGGCAGGUCGAACUCCUUC | 22 | 9433 |
| BCL11A-7755 | + | CCGGGGGCAGGUCGAACUCCUUC | 23 | 9434 |
| BCL11A-7756 | + | GCCGGGGGCAGGUCGAACUCCUUC | 24 | 9435 |
| BCL11A-7757 | + | GUCGCUGGUGCCGGGUUC | 18 | 9436 |
| BCL11A-7758 | + | AGUCGCUGGUGCCGGGUUC | 19 | 9437 |
| BCL11A-6058 | + | AAGUCGCUGGUGCCGGGUUC | 20 | 9438 |
| BCL11A-7759 | + | CAAGUCGCUGGUGCCGGGUUC | 21 | 9439 |
| BCL11A-7760 | + | CCAAGUCGCUGGUGCCGGGUUC | 22 | 9440 |
| BCL11A-7761 | + | ACCAAGUCGCUGGUGCCGGGUUC | 23 | 9441 |
| BCL11A-7762 | + | CACCAAGUCGCUGGUGCCGGGUUC | 24 | 9442 |
| BCL11A-7763 | + | CGGUGGUGGACUAAACAG | 18 | 9443 |
| BCL11A-7764 | + | UCGGUGGUGGACUAAACAG | 19 | 9444 |
| BCL11A-6063 | + | CUCGGUGGUGGACUAAACAG | 20 | 9445 |
| BCL11A-7765 | + | UCUCGGUGGUGGACUAAACAG | 21 | 9446 |
| BCL11A-7766 | + | GUCUCGGUGGUGGACUAAACAG | 22 | 9447 |
| BCL11A-7767 | + | UGUCUCGGUGGUGGACUAAACAG | 23 | 9448 |
| BCL11A-7768 | + | AUGUCUCGGUGGUGGACUAAACAG | 24 | 9449 |
| BCL11A-7769 | + | GAAAGAGGUUGGAGACAG | 18 | 9450 |
| BCL11A-7770 | + | AGAAAGAGGUUGGAGACAG | 19 | 9451 |
| BCL11A-6064 | + | UAGAAAGAGGUUGGAGACAG | 20 | 9452 |
| BCL11A-7771 | + | CUAGAAAGAGGUUGGAGACAG | 21 | 9453 |
| BCL11A-7772 | + | CCUAGAAAGAGGUUGGAGACAG | 22 | 9454 |
| BCL11A-7773 | + | ACCUAGAAAGAGGUUGGAGACAG | 23 | 9455 |
| BCL11A-7774 | + | AACCUAGAAAGAGGUUGGAGACAG | 24 | 9456 |
| BCL11A-7775 | + | AGGAGGGGCGGAUUGCAG | 18 | 9457 |
| BCL11A-7776 | + | GAGGAGGGGCGGAUUGCAG | 19 | 9458 |
| BCL11A-6069 | + | GGAGGAGGGGCGGAUUGCAG | 20 | 9459 |
| BCL11A-7777 | + | GGGAGGAGGGGCGGAUUGCAG | 21 | 9460 |
| BCL11A-7778 | + | AGGGAGGAGGGGCGGAUUGCAG | 22 | 9461 |
| BCL11A-7779 | + | GAGGGAGGAGGGGCGGAUUGCAG | 23 | 9462 |
| BCL11A-7780 | + | GGAGGGAGGAGGGGCGGAUUGCAG | 24 | 9463 |
| BCL11A-7781 | + | AAGAGGUUGGAGACAGAG | 18 | 9464 |
| BCL11A-7782 | + | AAAGAGGUUGGAGACAGAG | 19 | 9465 |
| BCL11A-7783 | + | GAAAGAGGUUGGAGACAGAG | 20 | 9466 |
| BCL11A-7784 | + | AGAAAGAGGUUGGAGACAGAG | 21 | 9467 |
| BCL11A-7785 | + | UAGAAAGAGGUUGGAGACAGAG | 22 | 9468 |
| BCL11A-7786 | + | CUAGAAAGAGGUUGGAGACAGAG | 23 | 9469 |
| BCL11A-7787 | + | CCUAGAAAGAGGUUGGAGACAGAG | 24 | 9470 |
| BCL11A-7788 | + | GAGGGGCGGAUUGCAGAG | 18 | 9471 |
| BCL11A-7789 | + | GGAGGGGCGGAUUGCAGAG | 19 | 9472 |
| BCL11A-7790 | + | AGGAGGGGCGGAUUGCAGAG | 20 | 9473 |
| BCL11A-7791 | + | GAGGAGGGGCGGAUUGCAGAG | 21 | 9474 |
| BCL11A-7792 | + | GGAGGAGGGGCGGAUUGCAGAG | 22 | 9475 |
| BCL11A-7793 | + | GGGAGGAGGGGCGGAUUGCAGAG | 23 | 9476 |
| BCL11A-7794 | + | AGGGAGGAGGGGCGGAUUGCAGAG | 24 | 9477 |
| BCL11A-7795 | + | AGCUUGAUGCGCUUAGAG | 18 | 9478 |
| BCL11A-7796 | + | GAGCUUGAUGCGCUUAGAG | 19 | 9479 |
| BCL11A-7797 | + | CGAGCUUGAUGCGCUUAGAG | 20 | 9480 |
| BCL11A-7798 | + | UCGAGCUUGAUGCGCUUAGAG | 21 | 9481 |
| BCL11A-7799 | + | CUCGAGCUUGAUGCGCUUAGAG | 22 | 9482 |
| BCL11A-7800 | + | UCUCGAGCUUGAUGCGCUUAGAG | 23 | 9483 |
| BCL11A-7801 | + | UUCUCGAGCUUGAUGCGCUUAGAG | 24 | 9484 |
| BCL11A-7802 | + | GAGAAGGGGCUCAGCGAG | 18 | 9485 |
| BCL11A-7803 | + | AGAGAAGGGGCUCAGCGAG | 19 | 9486 |
| BCL11A-7804 | + | UAGAGAAGGGGCUCAGCGAG | 20 | 9487 |
| BCL11A-7805 | + | UUAGAGAAGGGGCUCAGCGAG | 21 | 9488 |
| BCL11A-7806 | + | CUUAGAGAAGGGGCUCAGCGAG | 22 | 9489 |
| BCL11A-7807 | + | GCUUAGAGAAGGGGCUCAGCGAG | 23 | 9490 |
| BCL11A-7808 | + | CGCUUAGAGAAGGGGCUCAGCGAG | 24 | 9491 |
| BCL11A-7809 | + | GGAUUGCAGAGGAGGGAG | 18 | 9492 |
| BCL11A-7810 | + | CGGAUUGCAGAGGAGGGAG | 19 | 9493 |
| BCL11A-6075 | + | GCGGAUUGCAGAGGAGGGAG | 20 | 9494 |
| BCL11A-7811 | + | GGCGGAUUGCAGAGGAGGGAG | 21 | 9495 |
| BCL11A-7812 | + | GGGCGGAUUGCAGAGGAGGGAG | 22 | 9496 |
| BCL11A-7813 | + | GGGGCGGAUUGCAGAGGAGGGAG | 23 | 9497 |
| BCL11A-7814 | + | AGGGGCGGAUUGCAGAGGAGGGAG | 24 | 9498 |
| BCL11A-7815 | + | CCGGGGGCUGGGAGGGAG | 18 | 9499 |
| BCL11A-7816 | + | ACCGGGGGCUGGGAGGGAG | 19 | 9500 |
| BCL11A-7817 | + | GACCGGGGGCUGGGAGGGAG | 20 | 9501 |
| BCL11A-7818 | + | UGACCGGGGGCUGGGAGGGAG | 21 | 9502 |
| BCL11A-7819 | + | UUGACCGGGGGCUGGGAGGGAG | 22 | 9503 |
| BCL11A-7820 | + | CUUGACCGGGGGCUGGGAGGGAG | 23 | 9504 |
| BCL11A-7821 | + | ACUUGACCGGGGGCUGGGAGGGAG | 24 | 9505 |
| BCL11A-7822 | + | CUGAAGUGCUGCAUGGAG | 18 | 9506 |
| BCL11A-7823 | + | GCUGAAGUGCUGCAUGGAG | 19 | 9507 |
| BCL11A-7824 | + | CGCUGAAGUGCUGCAUGGAG | 20 | 9508 |
| BCL11A-7825 | + | UCGCUGAAGUGCUGCAUGGAG | 21 | 9509 |
| BCL11A-7826 | + | CUCGCUGAAGUGCUGCAUGGAG | 22 | 9510 |
| BCL11A-7827 | + | CCUCGCUGAAGUGCUGCAUGGAG | 23 | 9511 |
| BCL11A-7828 | + | GCCUCGCUGAAGUGCUGCAUGGAG | 24 | 9512 |
| BCL11A-7829 | + | CGUCUGCCCUCUUUUGAG | 18 | 9513 |
| BCL11A-7830 | + | GCGUCUGCCCUCUUUUGAG | 19 | 9514 |
| BCL11A-7831 | + | UGCGUCUGCCCUCUUUUGAG | 20 | 9515 |
| BCL11A-7832 | + | CUGCGUCUGCCCUCUUUUGAG | 21 | 9516 |
| BCL11A-7833 | + | GCUGCGUCUGCCCUCUUUUGAG | 22 | 9517 |
| BCL11A-7834 | + | CGCUGCGUCUGCCCUCUUUUGAG | 23 | 9518 |
| BCL11A-7835 | + | UCGCUGCGUCUGCCCUCUUUUGAG | 24 | 9519 |
| BCL11A-7836 | + | CCGAGGAGUGCUCCGACG | 18 | 9520 |
| BCL11A-7837 | + | UCCGAGGAGUGCUCCGACG | 19 | 9521 |
| BCL11A-6080 | + | CUCCGAGGAGUGCUCCGACG | 20 | 9522 |
| BCL11A-7838 | + | UCUCCGAGGAGUGCUCCGACG | 21 | 9523 |
| BCL11A-7839 | + | UUCUCCGAGGAGUGCUCCGACG | 22 | 9524 |
| BCL11A-7840 | + | GUUCUCCGAGGAGUGCUCCGACG | 23 | 9525 |
| BCL11A-7841 | + | CGUUCUCCGAGGAGUGCUCCGACG | 24 | 9526 |
| BCL11A-7842 | + | ACCAUGCCCUGCAUGACG | 18 | 9527 |
| BCL11A-7843 | + | CACCAUGCCCUGCAUGACG | 19 | 9528 |
| BCL11A-7844 | + | GCACCAUGCCCUGCAUGACG | 20 | 9529 |
| BCL11A-7845 | + | AGCACCAUGCCCUGCAUGACG | 21 | 9530 |
| BCL11A-7846 | + | GAGCACCAUGCCCUGCAUGACG | 22 | 9531 |
| BCL11A-7847 | + | UGAGCACCAUGCCCUGCAUGACG | 23 | 9532 |
| BCL11A-7848 | + | CUGAGCACCAUGCCCUGCAUGACG | 24 | 9533 |
| BCL11A-7849 | + | CCGAGGCCGACUCGCCCG | 18 | 9534 |
| BCL11A-7850 | + | CCCGAGGCCGACUCGCCCG | 19 | 9535 |
| BCL11A-6088 | + | CCCCGAGGCCGACUCGCCCG | 20 | 9536 |
| BCL11A-7851 | + | CCCCCGAGGCCGACUCGCCCG | 21 | 9537 |
| BCL11A-7852 | + | CCCCCCGAGGCCGACUCGCCCG | 22 | 9538 |
| BCL11A-7853 | + | GCCCCCCGAGGCCGACUCGCCCG | 23 | 9539 |
| BCL11A-7854 | + | GGCCCCCCGAGGCCGACUCGCCCG | 24 | 9540 |
| BCL11A-7855 | + | CUGGAGGCCGCGUAGCCG | 18 | 9541 |
| BCL11A-7856 | + | CCUGGAGGCCGCGUAGCCG | 19 | 9542 |
| BCL11A-7857 | + | GCCUGGAGGCCGCGUAGCCG | 20 | 9543 |
| BCL11A-7858 | + | UGCCUGGAGGCCGCGUAGCCG | 21 | 9544 |
| BCL11A-7859 | + | CUGCCUGGAGGCCGCGUAGCCG | 22 | 9545 |
| BCL11A-7860 | + | GCUGCCUGGAGGCCGCGUAGCCG | 23 | 9546 |
| BCL11A-7861 | + | AGCUGCCUGGAGGCCGCGUAGCCG | 24 | 9547 |
| BCL11A-7862 | + | AAUUUGAACGUCUUGCCG | 18 | 9548 |
| BCL11A-7863 | + | AAAUUUGAACGUCUUGCCG | 19 | 9549 |
| BCL11A-7864 | + | GAAAUUUGAACGUCUUGCCG | 20 | 9550 |
| BCL11A-7865 | + | UGAAAUUUGAACGUCUUGCCG | 21 | 9551 |
| BCL11A-7866 | + | CUGAAAUUUGAACGUCUUGCCG | 22 | 9552 |
| BCL11A-7867 | + | UCUGAAAUUUGAACGUCUUGCCG | 23 | 9553 |
| BCL11A-7868 | + | CUCUGAAAUUUGAACGUCUUGCCG | 24 | 9554 |
| BCL11A-7869 | + | UCUCCGAGGAGUGCUCCG | 18 | 9555 |
| BCL11A-7870 | + | UUCUCCGAGGAGUGCUCCG | 19 | 9556 |
| BCL11A-7871 | + | GUUCUCCGAGGAGUGCUCCG | 20 | 9557 |
| BCL11A-7872 | + | CGUUCUCCGAGGAGUGCUCCG | 21 | 9558 |
| BCL11A-7873 | + | CCGUUCUCCGAGGAGUGCUCCG | 22 | 9559 |
| BCL11A-7874 | + | CCCGUUCUCCGAGGAGUGCUCCG | 23 | 9560 |
| BCL11A-7875 | + | UCCCGUUCUCCGAGGAGUGCUCCG | 24 | 9561 |
| BCL11A-7876 | + | CGCUGGUGCCGGGUUCCG | 18 | 9562 |
| BCL11A-7877 | + | UCGCUGGUGCCGGGUUCCG | 19 | 9563 |
| BCL11A-6096 | + | GUCGCUGGUGCCGGGUUCCG | 20 | 9564 |
| BCL11A-7878 | + | AGUCGCUGGUGCCGGGUUCCG | 21 | 9565 |
| BCL11A-7879 | + | AAGUCGCUGGUGCCGGGUUCCG | 22 | 9566 |
| BCL11A-7880 | + | CAAGUCGCUGGUGCCGGGUUCCG | 23 | 9567 |
| BCL11A-7881 | + | CCAAGUCGCUGGUGCCGGGUUCCG | 24 | 9568 |
| BCL11A-7882 | + | GCCGGCCUGGGGACAGCG | 18 | 9569 |
| BCL11A-7883 | + | GGCCGGCCUGGGGACAGCG | 19 | 9570 |
| BCL11A-7884 | + | GGGCCGGCCUGGGGACAGCG | 20 | 9571 |
| BCL11A-7885 | + | UGGGCCGGCCUGGGGACAGCG | 21 | 9572 |
| BCL11A-7886 | + | CUGGGCCGGCCUGGGGACAGCG | 22 | 9573 |
| BCL11A-7887 | + | GCUGGGCCGGCCUGGGGACAGCG | 23 | 9574 |
| BCL11A-7888 | + | GGCUGGGCCGGCCUGGGGACAGCG | 24 | 9575 |
| BCL11A-7889 | + | GGUUCCGGGGAGCUGGCG | 18 | 9576 |
| BCL11A-7890 | + | GGGUUCCGGGGAGCUGGCG | 19 | 9577 |
| BCL11A-7891 | + | CGGGUUCCGGGGAGCUGGCG | 20 | 9578 |
| BCL11A-7892 | + | CCGGGUUCCGGGGAGCUGGCG | 21 | 9579 |
| BCL11A-7893 | + | GCCGGGUUCCGGGGAGCUGGCG | 22 | 9580 |
| BCL11A-7894 | + | UGCCGGGUUCCGGGGAGCUGGCG | 23 | 9581 |
| BCL11A-7895 | + | GUGCCGGGUUCCGGGGAGCUGGCG | 24 | 9582 |
| BCL11A-7896 | + | CCCCAGGCGCUCUAUGCG | 18 | 9583 |
| BCL11A-7897 | + | CCCCCAGGCGCUCUAUGCG | 19 | 9584 |
| BCL11A-7898 | + | GCCCCCAGGCGCUCUAUGCG | 20 | 9585 |
| BCL11A-7899 | + | CGCCCCCAGGCGCUCUAUGCG | 21 | 9586 |
| BCL11A-7900 | + | CCGCCCCCAGGCGCUCUAUGCG | 22 | 9587 |
| BCL11A-7901 | + | UCCGCCCCCAGGCGCUCUAUGCG | 23 | 9588 |
| BCL11A-7902 | + | UUCCGCCCCCAGGCGCUCUAUGCG | 24 | 9589 |
| BCL11A-7903 | + | ACCUGGUGGAAGGCCUCG | 18 | 9590 |
| BCL11A-7904 | + | GACCUGGUGGAAGGCCUCG | 19 | 9591 |
| BCL11A-7905 | + | GGACCUGGUGGAAGGCCUCG | 20 | 9592 |
| BCL11A-7906 | + | AGGACCUGGUGGAAGGCCUCG | 21 | 9593 |
| BCL11A-7907 | + | CAGGACCUGGUGGAAGGCCUCG | 22 | 9594 |
| BCL11A-7908 | + | CCAGGACCUGGUGGAAGGCCUCG | 23 | 9595 |
| BCL11A-7909 | + | CCCAGGACCUGGUGGAAGGCCUCG | 24 | 9596 |
| BCL11A-7910 | + | GCGGUGGAGAGACCGUCG | 18 | 9597 |
| BCL11A-7911 | + | GGCGGUGGAGAGACCGUCG | 19 | 9598 |
| BCL11A-7912 | + | UGGCGGUGGAGAGACCGUCG | 20 | 9599 |
| BCL11A-7913 | + | CUGGCGGUGGAGAGACCGUCG | 21 | 9600 |
| BCL11A-7914 | + | GCUGGCGGUGGAGAGACCGUCG | 22 | 9601 |
| BCL11A-7915 | + | AGCUGGCGGUGGAGAGACCGUCG | 23 | 9602 |
| BCL11A-7916 | + | GAGCUGGCGGUGGAGAGACCGUCG | 24 | 9603 |
| BCL11A-7917 | + | GAGUCUCCGAAGCUAAGG | 18 | 9604 |
| BCL11A-7918 | + | GGAGUCUCCGAAGCUAAGG | 19 | 9605 |
| BCL11A-7919 | + | UGGAGUCUCCGAAGCUAAGG | 20 | 9606 |
| BCL11A-7920 | + | CUGGAGUCUCCGAAGCUAAGG | 21 | 9607 |
| BCL11A-7921 | + | UCUGGAGUCUCCGAAGCUAAGG | 22 | 9608 |
| BCL11A-7922 | + | GUCUGGAGUCUCCGAAGCUAAGG | 23 | 9609 |
| BCL11A-7923 | + | UGUCUGGAGUCUCCGAAGCUAAGG | 24 | 9610 |
| BCL11A-7924 | + | GGUGGUGGACUAAACAGG | 18 | 9611 |
| BCL11A-7925 | + | CGGUGGUGGACUAAACAGG | 19 | 9612 |
| BCL11A-6111 | + | UCGGUGGUGGACUAAACAGG | 20 | 9613 |
| BCL11A-7926 | + | CUCGGUGGUGGACUAAACAGG | 21 | 9614 |
| BCL11A-7927 | + | UCUCGGUGGUGGACUAAACAGG | 22 | 9615 |
| BCL11A-7928 | + | GUCUCGGUGGUGGACUAAACAGG | 23 | 9616 |
| BCL11A-7929 | + | UGUCUCGGUGGUGGACUAAACAGG | 24 | 9617 |
| BCL11A-7930 | + | AGGGGGGGCGUCGCCAGG | 18 | 9618 |
| BCL11A-7931 | + | GAGGGGGGGCGUCGCCAGG | 19 | 9619 |
| BCL11A-7932 | + | GGAGGGGGGGCGUCGCCAGG | 20 | 9620 |
| BCL11A-7933 | + | GGGAGGGGGGGCGUCGCCAGG | 21 | 9621 |
| BCL11A-7934 | + | AGGGAGGGGGGGCGUCGCCAGG | 22 | 9622 |
| BCL11A-7935 | + | GAGGGAGGGGGGGCGUCGCCAGG | 23 | 9623 |
| BCL11A-7936 | + | GGAGGGAGGGGGGGCGUCGCCAGG | 24 | 9624 |
| BCL11A-7937 | + | AAGCGCCCUUCUGCCAGG | 18 | 9625 |
| BCL11A-7938 | + | AAAGCGCCCUUCUGCCAGG | 19 | 9626 |
| BCL11A-7939 | + | GAAAGCGCCCUUCUGCCAGG | 20 | 9627 |
| BCL11A-7940 | + | GGAAAGCGCCCUUCUGCCAGG | 21 | 9628 |
| BCL11A-7941 | + | UGGAAAGCGCCCUUCUGCCAGG | 22 | 9629 |
| BCL11A-7942 | + | GUGGAAAGCGCCCUUCUGCCAGG | 23 | 9630 |
| BCL11A-7943 | + | GGUGGAAAGCGCCCUUCUGCCAGG | 24 | 9631 |
| BCL11A-7944 | + | AUCGCGGCCGGGGGCAGG | 18 | 9632 |
| BCL11A-7945 | + | CAUCGCGGCCGGGGGCAGG | 19 | 9633 |
| BCL11A-7946 | + | GCAUCGCGGCCGGGGGCAGG | 20 | 9634 |
| BCL11A-7947 | + | GGCAUCGCGGCCGGGGGCAGG | 21 | 9635 |
| BCL11A-7948 | + | GGGCAUCGCGGCCGGGGGCAGG | 22 | 9636 |
| BCL11A-7949 | + | UGGGCAUCGCGGCCGGGGGCAGG | 23 | 9637 |
| BCL11A-7950 | + | UUGGGCAUCGCGGCCGGGGGCAGG | 24 | 9638 |
| BCL11A-7951 | + | CCGUUCUCCGGGAUCAGG | 18 | 9639 |
| BCL11A-7952 | + | CCCGUUCUCCGGGAUCAGG | 19 | 9640 |
| BCL11A-7953 | + | CCCCGUUCUCCGGGAUCAGG | 20 | 9641 |
| BCL11A-7954 | + | UCCCCGUUCUCCGGGAUCAGG | 21 | 9642 |
| BCL11A-7955 | + | GUCCCCGUUCUCCGGGAUCAGG | 22 | 9643 |
| BCL11A-7956 | + | CGUCCCCGUUCUCCGGGAUCAGG | 23 | 9644 |
| BCL11A-7957 | + | UCGUCCCCGUUCUCCGGGAUCAGG | 24 | 9645 |
| BCL11A-7958 | + | GAAGAACCUAGAAAGAGG | 18 | 9646 |
| BCL11A-7959 | + | UGAAGAACCUAGAAAGAGG | 19 | 9647 |
| BCL11A-7960 | + | GUGAAGAACCUAGAAAGAGG | 20 | 9648 |
| BCL11A-7961 | + | UGUGAAGAACCUAGAAAGAGG | 21 | 9649 |
| BCL11A-7962 | + | GUGUGAAGAACCUAGAAAGAGG | 22 | 9650 |
| BCL11A-7963 | + | UGUGUGAAGAACCUAGAAAGAGG | 23 | 9651 |
| BCL11A-7964 | + | GUGUGUGAAGAACCUAGAAAGAGG | 24 | 9652 |
| BCL11A-7965 | + | AGAGGUUGGAGACAGAGG | 18 | 9653 |
| BCL11A-7966 | + | AAGAGGUUGGAGACAGAGG | 19 | 9654 |
| BCL11A-6113 | + | AAAGAGGUUGGAGACAGAGG | 20 | 9655 |
| BCL11A-7967 | + | GAAAGAGGUUGGAGACAGAGG | 21 | 9656 |
| BCL11A-7968 | + | AGAAAGAGGUUGGAGACAGAGG | 22 | 9657 |
| BCL11A-7969 | + | UAGAAAGAGGUUGGAGACAGAGG | 23 | 9658 |
| BCL11A-7970 | + | CUAGAAAGAGGUUGGAGACAGAGG | 24 | 9659 |
| BCL11A-7971 | + | AGGGGCGGAUUGCAGAGG | 18 | 9660 |
| BCL11A-7972 | + | GAGGGGCGGAUUGCAGAGG | 19 | 9661 |
| BCL11A-6114 | + | GGAGGGGCGGAUUGCAGAGG | 20 | 9662 |
| BCL11A-7973 | + | AGGAGGGGCGGAUUGCAGAGG | 21 | 9663 |
| BCL11A-7974 | + | GAGGAGGGGCGGAUUGCAGAGG | 22 | 9664 |
| BCL11A-7975 | + | GGAGGAGGGGCGGAUUGCAGAGG | 23 | 9665 |
| BCL11A-7976 | + | GGGAGGAGGGGCGGAUUGCAGAGG | 24 | 9666 |
| BCL11A-7977 | + | GGCGGAUUGCAGAGGAGG | 18 | 9667 |
| BCL11A-7978 | + | GGGCGGAUUGCAGAGGAGG | 19 | 9668 |
| BCL11A-7979 | + | GGGGCGGAUUGCAGAGGAGG | 20 | 9669 |
| BCL11A-7980 | + | AGGGGCGGAUUGCAGAGGAGG | 21 | 9670 |
| BCL11A-7981 | + | GAGGGGCGGAUUGCAGAGGAGG | 22 | 9671 |
| BCL11A-7982 | + | GGAGGGGCGGAUUGCAGAGGAGG | 23 | 9672 |
| BCL11A-7983 | + | AGGAGGGGCGGAUUGCAGAGGAGG | 24 | 9673 |
| BCL11A-7984 | + | GAUUGCAGAGGAGGGAGG | 18 | 9674 |
| BCL11A-7985 | + | GGAUUGCAGAGGAGGGAGG | 19 | 9675 |
| BCL11A-6118 | + | CGGAUUGCAGAGGAGGGAGG | 20 | 9676 |
| BCL11A-7986 | + | GCGGAUUGCAGAGGAGGGAGG | 21 | 9677 |
| BCL11A-7987 | + | GGCGGAUUGCAGAGGAGGGAGG | 22 | 9678 |
| BCL11A-7988 | + | GGGCGGAUUGCAGAGGAGGGAGG | 23 | 9679 |
| BCL11A-7989 | + | GGGGCGGAUUGCAGAGGAGGGAGG | 24 | 9680 |
| BCL11A-7990 | + | CGGGGGCUGGGAGGGAGG | 18 | 9681 |
| BCL11A-7991 | + | CCGGGGGCUGGGAGGGAGG | 19 | 9682 |
| BCL11A-6119 | + | ACCGGGGGCUGGGAGGGAGG | 20 | 9683 |
| BCL11A-7992 | + | GACCGGGGGCUGGGAGGGAGG | 21 | 9684 |
| BCL11A-7993 | + | UGACCGGGGGCUGGGAGGGAGG | 22 | 9685 |
| BCL11A-7994 | + | UUGACCGGGGGCUGGGAGGGAGG | 23 | 9686 |
| BCL11A-7995 | + | CUUGACCGGGGGCUGGGAGGGAGG | 24 | 9687 |
| BCL11A-7996 | + | UGACCGGGGGCUGGGAGG | 18 | 9688 |
| BCL11A-7997 | + | UUGACCGGGGGCUGGGAGG | 19 | 9689 |
| BCL11A-7998 | + | CUUGACCGGGGGCUGGGAGG | 20 | 9690 |
| BCL11A-7999 | + | ACUUGACCGGGGGCUGGGAGG | 21 | 9691 |
| BCL11A-8000 | + | GACUUGACCGGGGGCUGGGAGG | 22 | 9692 |
| BCL11A-8001 | + | GGACUUGACCGGGGGCUGGGAGG | 23 | 9693 |
| BCL11A-8002 | + | UGGACUUGACCGGGGGCUGGGAGG | 24 | 9694 |
| BCL11A-8003 | + | CCGUGUUGGGCAUCGCGG | 18 | 9695 |
| BCL11A-8004 | + | UCCGUGUUGGGCAUCGCGG | 19 | 9696 |
| BCL11A-8005 | + | CUCCGUGUUGGGCAUCGCGG | 20 | 9697 |
| BCL11A-8006 | + | UCUCCGUGUUGGGCAUCGCGG | 21 | 9698 |
| BCL11A-8007 | + | UUCUCCGUGUUGGGCAUCGCGG | 22 | 9699 |
| BCL11A-8008 | + | GUUCUCCGUGUUGGGCAUCGCGG | 23 | 9700 |
| BCL11A-8009 | + | CGUUCUCCGUGUUGGGCAUCGCGG | 24 | 9701 |
| BCL11A-8010 | + | GUUCCGGGGAGCUGGCGG | 18 | 9702 |
| BCL11A-8011 | + | GGUUCCGGGGAGCUGGCGG | 19 | 9703 |
| BCL11A-6125 | + | GGGUUCCGGGGAGCUGGCGG | 20 | 9704 |
| BCL11A-8012 | + | CGGGUUCCGGGGAGCUGGCGG | 21 | 9705 |
| BCL11A-8013 | + | CCGGGUUCCGGGGAGCUGGCGG | 22 | 9706 |
| BCL11A-8014 | + | GCCGGGUUCCGGGGAGCUGGCGG | 23 | 9707 |
| BCL11A-8015 | + | UGCCGGGUUCCGGGGAGCUGGCGG | 24 | 9708 |
| BCL11A-8016 | + | CCCAGGCGCUCUAUGCGG | 18 | 9709 |
| BCL11A-8017 | + | CCCCAGGCGCUCUAUGCGG | 19 | 9710 |
| BCL11A-6126 | + | CCCCCAGGCGCUCUAUGCGG | 20 | 9711 |
| BCL11A-8018 | + | GCCCCCAGGCGCUCUAUGCGG | 21 | 9712 |
| BCL11A-8019 | + | CGCCCCCAGGCGCUCUAUGCGG | 22 | 9713 |
| BCL11A-8020 | + | CCGCCCCCAGGCGCUCUAUGCGG | 23 | 9714 |
| BCL11A-8021 | + | UCCGCCCCCAGGCGCUCUAUGCGG | 24 | 9715 |
| BCL11A-8022 | + | GUGGUGGACUAAACAGGG | 18 | 9716 |
| BCL11A-8023 | + | GGUGGUGGACUAAACAGGG | 19 | 9717 |
| BCL11A-6131 | + | CGGUGGUGGACUAAACAGGG | 20 | 9718 |
| BCL11A-8024 | + | UCGGUGGUGGACUAAACAGGG | 21 | 9719 |
| BCL11A-8025 | + | CUCGGUGGUGGACUAAACAGGG | 22 | 9720 |
| BCL11A-8026 | + | UCUCGGUGGUGGACUAAACAGGG | 23 | 9721 |
| BCL11A-8027 | + | GUCUCGGUGGUGGACUAAACAGGG | 24 | 9722 |
| BCL11A-8028 | + | GCGGAUUGCAGAGGAGGG | 18 | 9723 |
| BCL11A-8029 | + | GGCGGAUUGCAGAGGAGGG | 19 | 9724 |
| BCL11A-6133 | + | GGGCGGAUUGCAGAGGAGGG | 20 | 9725 |
| BCL11A-8030 | + | GGGGCGGAUUGCAGAGGAGGG | 21 | 9726 |
| BCL11A-8031 | + | AGGGGCGGAUUGCAGAGGAGGG | 22 | 9727 |
| BCL11A-8032 | + | GAGGGGCGGAUUGCAGAGGAGGG | 23 | 9728 |
| BCL11A-8033 | + | GGAGGGGCGGAUUGCAGAGGAGGG | 24 | 9729 |
| BCL11A-8034 | + | GACCGGGGGCUGGGAGGG | 18 | 9730 |
| BCL11A-8035 | + | UGACCGGGGGCUGGGAGGG | 19 | 9731 |
| BCL11A-6135 | + | UUGACCGGGGGCUGGGAGGG | 20 | 9732 |
| BCL11A-8036 | + | CUUGACCGGGGGCUGGGAGGG | 21 | 9733 |
| BCL11A-8037 | + | ACUUGACCGGGGGCUGGGAGGG | 22 | 9734 |
| BCL11A-8038 | + | GACUUGACCGGGGGCUGGGAGGG | 23 | 9735 |
| BCL11A-8039 | + | GGACUUGACCGGGGGCUGGGAGGG | 24 | 9736 |
| BCL11A-8040 | + | AGUAACCUUUGCAUAGGG | 18 | 9737 |
| BCL11A-8041 | + | CAGUAACCUUUGCAUAGGG | 19 | 9738 |
| BCL11A-8042 | + | GCAGUAACCUUUGCAUAGGG | 20 | 9739 |
| BCL11A-8043 | + | UGCAGUAACCUUUGCAUAGGG | 21 | 9740 |
| BCL11A-8044 | + | UUGCAGUAACCUUUGCAUAGGG | 22 | 9741 |
| BCL11A-8045 | + | GUUGCAGUAACCUUUGCAUAGGG | 23 | 9742 |
| BCL11A-8046 | + | GGUUGCAGUAACCUUUGCAUAGGG | 24 | 9743 |
| BCL11A-8047 | + | GCCCUGCAUGACGUCGGG | 18 | 9744 |
| BCL11A-8048 | + | UGCCCUGCAUGACGUCGGG | 19 | 9745 |
| BCL11A-8049 | + | AUGCCCUGCAUGACGUCGGG | 20 | 9746 |
| BCL11A-8050 | + | CAUGCCCUGCAUGACGUCGGG | 21 | 9747 |
| BCL11A-8051 | + | CCAUGCCCUGCAUGACGUCGGG | 22 | 9748 |
| BCL11A-8052 | + | ACCAUGCCCUGCAUGACGUCGGG | 23 | 9749 |
| BCL11A-8053 | + | CACCAUGCCCUGCAUGACGUCGGG | 24 | 9750 |
| BCL11A-8054 | + | CUUGGACUUGACCGGGGG | 18 | 9751 |
| BCL11A-8055 | + | ACUUGGACUUGACCGGGGG | 19 | 9752 |
| BCL11A-8056 | + | GACUUGGACUUGACCGGGGG | 20 | 9753 |
| BCL11A-8057 | + | UGACUUGGACUUGACCGGGGG | 21 | 9754 |
| BCL11A-8058 | + | AUGACUUGGACUUGACCGGGGG | 22 | 9755 |
| BCL11A-8059 | + | CAUGACUUGGACUUGACCGGGGG | 23 | 9756 |
| BCL11A-8060 | + | GCAUGACUUGGACUUGACCGGGGG | 24 | 9757 |
| BCL11A-8061 | + | ACUUGACCGGGGGCUGGG | 18 | 9758 |
| BCL11A-8062 | + | GACUUGACCGGGGGCUGGG | 19 | 9759 |
| BCL11A-6146 | + | GGACUUGACCGGGGGCUGGG | 20 | 9760 |
| BCL11A-8063 | + | UGGACUUGACCGGGGGCUGGG | 21 | 9761 |
| BCL11A-8064 | + | UUGGACUUGACCGGGGGCUGGG | 22 | 9762 |
| BCL11A-8065 | + | CUUGGACUUGACCGGGGGCUGGG | 23 | 9763 |
| BCL11A-8066 | + | ACUUGGACUUGACCGGGGGCUGGG | 24 | 9764 |
| BCL11A-8067 | + | CAUGGAGAGGUGGCUGGG | 18 | 9765 |
| BCL11A-8068 | + | CCAUGGAGAGGUGGCUGGG | 19 | 9766 |
| BCL11A-8069 | + | CCCAUGGAGAGGUGGCUGGG | 20 | 9767 |
| BCL11A-8070 | + | UCCCAUGGAGAGGUGGCUGGG | 21 | 9768 |
| BCL11A-8071 | + | AUCCCAUGGAGAGGUGGCUGGG | 22 | 9769 |
| BCL11A-8072 | + | AAUCCCAUGGAGAGGUGGCUGGG | 23 | 9770 |
| BCL11A-8073 | + | GAAUCCCAUGGAGAGGUGGCUGGG | 24 | 9771 |
| BCL11A-8074 | + | AAACAGGGGGGGAGUGGG | 18 | 9772 |
| BCL11A-8075 | + | UAAACAGGGGGGGAGUGGG | 19 | 9773 |
| BCL11A-6147 | + | CUAAACAGGGGGGGAGUGGG | 20 | 9774 |
| BCL11A-8076 | + | ACUAAACAGGGGGGGAGUGGG | 21 | 9775 |
| BCL11A-8077 | + | GACUAAACAGGGGGGGAGUGGG | 22 | 9776 |
| BCL11A-8078 | + | GGACUAAACAGGGGGGGAGUGGG | 23 | 9777 |
| BCL11A-8079 | + | UGGACUAAACAGGGGGGGAGUGGG | 24 | 9778 |
| BCL11A-8080 | + | UCCUAGAGAAAUCCAUGG | 18 | 9779 |
| BCL11A-8081 | + | CUCCUAGAGAAAUCCAUGG | 19 | 9780 |
| BCL11A-6149 | + | UCUCCUAGAGAAAUCCAUGG | 20 | 9781 |
| BCL11A-8082 | + | GUCUCCUAGAGAAAUCCAUGG | 21 | 9782 |
| BCL11A-8083 | + | AGUCUCCUAGAGAAAUCCAUGG | 22 | 9783 |
| BCL11A-8084 | + | AAGUCUCCUAGAGAAAUCCAUGG | 23 | 9784 |
| BCL11A-8085 | + | UAAGUCUCCUAGAGAAAUCCAUGG | 24 | 9785 |
| BCL11A-8086 | + | UUCUCGCCCAGGACCUGG | 18 | 9786 |
| BCL11A-8087 | + | CUUCUCGCCCAGGACCUGG | 19 | 9787 |
| BCL11A-6152 | + | GCUUCUCGCCCAGGACCUGG | 20 | 9788 |
| BCL11A-8088 | + | UGCUUCUCGCCCAGGACCUGG | 21 | 9789 |
| BCL11A-8089 | + | AUGCUUCUCGCCCAGGACCUGG | 22 | 9790 |
| BCL11A-8090 | + | UAUGCUUCUCGCCCAGGACCUGG | 23 | 9791 |
| BCL11A-8091 | + | UUAUGCUUCUCGCCCAGGACCUGG | 24 | 9792 |
| BCL11A-8092 | + | GGGCGGCUUGCUACCUGG | 18 | 9793 |
| BCL11A-8093 | + | AGGGCGGCUUGCUACCUGG | 19 | 9794 |
| BCL11A-8094 | + | AAGGGCGGCUUGCUACCUGG | 20 | 9795 |
| BCL11A-8095 | + | GAAGGGCGGCUUGCUACCUGG | 21 | 9796 |
| BCL11A-8096 | + | GGAAGGGCGGCUUGCUACCUGG | 22 | 9797 |
| BCL11A-8097 | + | AGGAAGGGCGGCUUGCUACCUGG | 23 | 9798 |
| BCL11A-8098 | + | CAGGAAGGGCGGCUUGCUACCUGG | 24 | 9799 |
| BCL11A-8099 | + | GACUUGACCGGGGGCUGG | 18 | 9800 |
| BCL11A-8100 | + | GGACUUGACCGGGGGCUGG | 19 | 9801 |
| BCL11A-8101 | + | UGGACUUGACCGGGGGCUGG | 20 | 9802 |
| BCL11A-8102 | + | UUGGACUUGACCGGGGGCUGG | 21 | 9803 |
| BCL11A-8103 | + | CUUGGACUUGACCGGGGGCUGG | 22 | 9804 |
| BCL11A-8104 | + | ACUUGGACUUGACCGGGGGCUGG | 23 | 9805 |
| BCL11A-8105 | + | GACUUGGACUUGACCGGGGGCUGG | 24 | 9806 |
| BCL11A-8106 | + | UAAACAGGGGGGGAGUGG | 18 | 9807 |
| BCL11A-8107 | + | CUAAACAGGGGGGGAGUGG | 19 | 9808 |
| BCL11A-8108 | + | ACUAAACAGGGGGGGAGUGG | 20 | 9809 |
| BCL11A-8109 | + | GACUAAACAGGGGGGGAGUGG | 21 | 9810 |
| BCL11A-8110 | + | GGACUAAACAGGGGGGGAGUGG | 22 | 9811 |
| BCL11A-8111 | + | UGGACUAAACAGGGGGGGAGUGG | 23 | 9812 |
| BCL11A-8112 | + | GUGGACUAAACAGGGGGGGAGUGG | 24 | 9813 |
| BCL11A-8113 | + | AAUCCCAUGGAGAGGUGG | 18 | 9814 |
| BCL11A-8114 | + | GAAUCCCAUGGAGAGGUGG | 19 | 9815 |
| BCL11A-8115 | + | UGAAUCCCAUGGAGAGGUGG | 20 | 9816 |
| BCL11A-8116 | + | AUGAAUCCCAUGGAGAGGUGG | 21 | 9817 |
| BCL11A-8117 | + | UAUGAAUCCCAUGGAGAGGUGG | 22 | 9818 |
| BCL11A-8118 | + | AUAUGAAUCCCAUGGAGAGGUGG | 23 | 9819 |
| BCL11A-8119 | + | AAUAUGAAUCCCAUGGAGAGGUGG | 24 | 9820 |
| BCL11A-8120 | + | UGCAAUAUGAAUCCCAUG | 18 | 9821 |
| BCL11A-8121 | + | CUGCAAUAUGAAUCCCAUG | 19 | 9822 |
| BCL11A-8122 | + | UCUGCAAUAUGAAUCCCAUG | 20 | 9823 |
| BCL11A-8123 | + | GUCUGCAAUAUGAAUCCCAUG | 21 | 9824 |
| BCL11A-8124 | + | UGUCUGCAAUAUGAAUCCCAUG | 22 | 9825 |
| BCL11A-8125 | + | UUGUCUGCAAUAUGAAUCCCAUG | 23 | 9826 |
| BCL11A-8126 | + | AUUGUCUGCAAUAUGAAUCCCAUG | 24 | 9827 |
| BCL11A-8127 | + | CUCCUAGAGAAAUCCAUG | 18 | 9828 |
| BCL11A-8128 | + | UCUCCUAGAGAAAUCCAUG | 19 | 9829 |
| BCL11A-8129 | + | GUCUCCUAGAGAAAUCCAUG | 20 | 9830 |
| BCL11A-8130 | + | AGUCUCCUAGAGAAAUCCAUG | 21 | 9831 |
| BCL11A-8131 | + | AAGUCUCCUAGAGAAAUCCAUG | 22 | 9832 |
| BCL11A-8132 | + | UAAGUCUCCUAGAGAAAUCCAUG | 23 | 9833 |
| BCL11A-8133 | + | CUAAGUCUCCUAGAGAAAUCCAUG | 24 | 9834 |
| BCL11A-8134 | + | UCGGACUUGACCGUCAUG | 18 | 9835 |
| BCL11A-8135 | + | GUCGGACUUGACCGUCAUG | 19 | 9836 |
| BCL11A-6164 | + | CGUCGGACUUGACCGUCAUG | 20 | 9837 |
| BCL11A-8136 | + | UCGUCGGACUUGACCGUCAUG | 21 | 9838 |
| BCL11A-8137 | + | GUCGUCGGACUUGACCGUCAUG | 22 | 9839 |
| BCL11A-8138 | + | CGUCGUCGGACUUGACCGUCAUG | 23 | 9840 |
| BCL11A-8139 | + | CCGUCGUCGGACUUGACCGUCAUG | 24 | 9841 |
| BCL11A-8140 | + | CUUCUCGCCCAGGACCUG | 18 | 9842 |
| BCL11A-8141 | + | GCUUCUCGCCCAGGACCUG | 19 | 9843 |
| BCL11A-8142 | + | UGCUUCUCGCCCAGGACCUG | 20 | 9844 |
| BCL11A-8143 | + | AUGCUUCUCGCCCAGGACCUG | 21 | 9845 |
| BCL11A-8144 | + | UAUGCUUCUCGCCCAGGACCUG | 22 | 9846 |
| BCL11A-8145 | + | UUAUGCUUCUCGCCCAGGACCUG | 23 | 9847 |
| BCL11A-8146 | + | CUUAUGCUUCUCGCCCAGGACCUG | 24 | 9848 |
| BCL11A-8147 | + | AUUCUGCACCUAGUCCUG | 18 | 9849 |
| BCL11A-8148 | + | CAUUCUGCACCUAGUCCUG | 19 | 9850 |
| BCL11A-8149 | + | ACAUUCUGCACCUAGUCCUG | 20 | 9851 |
| BCL11A-8150 | + | GACAUUCUGCACCUAGUCCUG | 21 | 9852 |
| BCL11A-8151 | + | GGACAUUCUGCACCUAGUCCUG | 22 | 9853 |
| BCL11A-8152 | + | AGGACAUUCUGCACCUAGUCCUG | 23 | 9854 |
| BCL11A-8153 | + | AAGGACAUUCUGCACCUAGUCCUG | 24 | 9855 |
| BCL11A-6537 | + | GUUGUACAUGUGUAGCUG | 18 | 9856 |
| BCL11A-6538 | + | AGUUGUACAUGUGUAGCUG | 19 | 9857 |
| BCL11A-6539 | + | AAGUUGUACAUGUGUAGCUG | 20 | 9858 |
| BCL11A-6540 | + | CAAGUUGUACAUGUGUAGCUG | 21 | 9859 |
| BCL11A-6541 | + | GCAAGUUGUACAUGUGUAGCUG | 22 | 9860 |
| BCL11A-6542 | + | UGCAAGUUGUACAUGUGUAGCUG | 23 | 9861 |
| BCL11A-6543 | + | UUGCAAGUUGUACAUGUGUAGCUG | 24 | 9862 |
| BCL11A-8154 | + | GAGUACACGUUCUCCGUG | 18 | 9863 |
| BCL11A-8155 | + | CGAGUACACGUUCUCCGUG | 19 | 9864 |
| BCL11A-8156 | + | GCGAGUACACGUUCUCCGUG | 20 | 9865 |
| BCL11A-8157 | + | UGCGAGUACACGUUCUCCGUG | 21 | 9866 |
| BCL11A-8158 | + | CUGCGAGUACACGUUCUCCGUG | 22 | 9867 |
| BCL11A-8159 | + | ACUGCGAGUACACGUUCUCCGUG | 23 | 9868 |
| BCL11A-8160 | + | CACUGCGAGUACACGUUCUCCGUG | 24 | 9869 |
| BCL11A-8161 | + | CCAGCUCCCCGGGCGGUG | 18 | 9870 |
| BCL11A-8162 | + | UCCAGCUCCCCGGGCGGUG | 19 | 9871 |
| BCL11A-6177 | + | GUCCAGCUCCCCGGGCGGUG | 20 | 9872 |
| BCL11A-8163 | + | CGUCCAGCUCCCCGGGCGGUG | 21 | 9873 |
| BCL11A-8164 | + | CCGUCCAGCUCCCCGGGCGGUG | 22 | 9874 |
| BCL11A-8165 | + | UCCGUCCAGCUCCCCGGGCGGUG | 23 | 9875 |
| BCL11A-8166 | + | CUCCGUCCAGCUCCCCGGGCGGUG | 24 | 9876 |
| BCL11A-8167 | + | UCCGGGGAGCUGGCGGUG | 18 | 9877 |
| BCL11A-8168 | + | UUCCGGGGAGCUGGCGGUG | 19 | 9878 |
| BCL11A-8169 | + | GUUCCGGGGAGCUGGCGGUG | 20 | 9879 |
| BCL11A-8170 | + | GGUUCCGGGGAGCUGGCGGUG | 21 | 9880 |
| BCL11A-8171 | + | GGGUUCCGGGGAGCUGGCGGUG | 22 | 9881 |
| BCL11A-8172 | + | CGGGUUCCGGGGAGCUGGCGGUG | 23 | 9882 |
| BCL11A-8173 | + | CCGGGUUCCGGGGAGCUGGCGGUG | 24 | 9883 |
| BCL11A-8174 | + | CCAAGUGAUGUCUCGGUG | 18 | 9884 |
| BCL11A-8175 | + | UCCAAGUGAUGUCUCGGUG | 19 | 9885 |
| BCL11A-8176 | + | GUCCAAGUGAUGUCUCGGUG | 20 | 9886 |
| BCL11A-8177 | + | GGUCCAAGUGAUGUCUCGGUG | 21 | 9887 |
| BCL11A-8178 | + | GGGUCCAAGUGAUGUCUCGGUG | 22 | 9888 |
| BCL11A-8179 | + | GGGGUCCAAGUGAUGUCUCGGUG | 23 | 9889 |
| BCL11A-8180 | + | GGGGGUCCAAGUGAUGUCUCGGUG | 24 | 9890 |
| BCL11A-8181 | + | AGCUCCCCGGGCGGUGUG | 18 | 9891 |
| BCL11A-8182 | + | CAGCUCCCCGGGCGGUGUG | 19 | 9892 |
| BCL11A-8183 | + | CCAGCUCCCCGGGCGGUGUG | 20 | 9893 |
| BCL11A-8184 | + | UCCAGCUCCCCGGGCGGUGUG | 21 | 9894 |
| BCL11A-8185 | + | GUCCAGCUCCCCGGGCGGUGUG | 22 | 9895 |
| BCL11A-8186 | + | CGUCCAGCUCCCCGGGCGGUGUG | 23 | 9896 |
| BCL11A-8187 | + | CCGUCCAGCUCCCCGGGCGGUGUG | 24 | 9897 |
| BCL11A-8188 | + | GCCGAAUGGGGGUGUGUG | 18 | 9898 |
| BCL11A-8189 | + | CGCCGAAUGGGGGUGUGUG | 19 | 9899 |
| BCL11A-8190 | + | ACGCCGAAUGGGGGUGUGUG | 20 | 9900 |
| BCL11A-8191 | + | UACGCCGAAUGGGGGUGUGUG | 21 | 9901 |
| BCL11A-8192 | + | CUACGCCGAAUGGGGGUGUGUG | 22 | 9902 |
| BCL11A-8193 | + | ACUACGCCGAAUGGGGGUGUGUG | 23 | 9903 |
| BCL11A-8194 | + | UACUACGCCGAAUGGGGGUGUGUG | 24 | 9904 |
| BCL11A-8195 | + | GGGAGGAGGGGCGGAUUG | 18 | 9905 |
| BCL11A-8196 | + | AGGGAGGAGGGGCGGAUUG | 19 | 9906 |
| BCL11A-8197 | + | GAGGGAGGAGGGGCGGAUUG | 20 | 9907 |
| BCL11A-8198 | + | GGAGGGAGGAGGGGCGGAUUG | 21 | 9908 |
| BCL11A-8199 | + | GGGAGGGAGGAGGGGCGGAUUG | 22 | 9909 |
| BCL11A-8200 | + | UGGGAGGGAGGAGGGGCGGAUUG | 23 | 9910 |
| BCL11A-8201 | + | CUGGGAGGGAGGAGGGGCGGAUUG | 24 | 9911 |
| BCL11A-8202 | + | UCGCACAGGUUGCACUUG | 18 | 9912 |
| BCL11A-8203 | + | GUCGCACAGGUUGCACUUG | 19 | 9913 |
| BCL11A-8204 | + | GGUCGCACAGGUUGCACUUG | 20 | 9914 |
| BCL11A-8205 | + | UGGUCGCACAGGUUGCACUUG | 21 | 9915 |
| BCL11A-8206 | + | GUGGUCGCACAGGUUGCACUUG | 22 | 9916 |
| BCL11A-8207 | + | CGUGGUCGCACAGGUUGCACUUG | 23 | 9917 |
| BCL11A-8208 | + | GCGUGGUCGCACAGGUUGCACUUG | 24 | 9918 |
| BCL11A-8209 | + | ACCAGGUUGCUCUGAAAU | 18 | 9919 |
| BCL11A-8210 | + | CACCAGGUUGCUCUGAAAU | 19 | 9920 |
| BCL11A-8211 | + | CCACCAGGUUGCUCUGAAAU | 20 | 9921 |
| BCL11A-8212 | + | ACCACCAGGUUGCUCUGAAAU | 21 | 9922 |
| BCL11A-8213 | + | CACCACCAGGUUGCUCUGAAAU | 22 | 9923 |
| BCL11A-8214 | + | GCACCACCAGGUUGCUCUGAAAU | 23 | 9924 |
| BCL11A-8215 | + | UGCACCACCAGGUUGCUCUGAAAU | 24 | 9925 |
| BCL11A-8216 | + | CGGGCCCGGACCACUAAU | 18 | 9926 |
| BCL11A-8217 | + | CCGGGCCCGGACCACUAAU | 19 | 9927 |
| BCL11A-8218 | + | CCCGGGCCCGGACCACUAAU | 20 | 9928 |
| BCL11A-8219 | + | GCCCGGGCCCGGACCACUAAU | 21 | 9929 |
| BCL11A-8220 | + | UGCCCGGGCCCGGACCACUAAU | 22 | 9930 |
| BCL11A-8221 | + | CUGCCCGGGCCCGGACCACUAAU | 23 | 9931 |
| BCL11A-8222 | + | CCUGCCCGGGCCCGGACCACUAAU | 24 | 9932 |
| BCL11A-8223 | + | GGGCUCUCGAGCUUCCAU | 18 | 9933 |
| BCL11A-8224 | + | AGGGCUCUCGAGCUUCCAU | 19 | 9934 |
| BCL11A-8225 | + | AAGGGCUCUCGAGCUUCCAU | 20 | 9935 |
| BCL11A-8226 | + | UAAGGGCUCUCGAGCUUCCAU | 21 | 9936 |
| BCL11A-8227 | + | UUAAGGGCUCUCGAGCUUCCAU | 22 | 9937 |
| BCL11A-8228 | + | CUUAAGGGCUCUCGAGCUUCCAU | 23 | 9938 |
| BCL11A-8229 | + | ACUUAAGGGCUCUCGAGCUUCCAU | 24 | 9939 |
| BCL11A-8230 | + | GUCGGACUUGACCGUCAU | 18 | 9940 |
| BCL11A-8231 | + | CGUCGGACUUGACCGUCAU | 19 | 9941 |
| BCL11A-6186 | + | UCGUCGGACUUGACCGUCAU | 20 | 9942 |
| BCL11A-8232 | + | GUCGUCGGACUUGACCGUCAU | 21 | 9943 |
| BCL11A-8233 | + | CGUCGUCGGACUUGACCGUCAU | 22 | 9944 |
| BCL11A-8234 | + | CCGUCGUCGGACUUGACCGUCAU | 23 | 9945 |
| BCL11A-8235 | + | ACCGUCGUCGGACUUGACCGUCAU | 24 | 9946 |
| BCL11A-8236 | + | AUAGGGCUGGGCCGGCCU | 18 | 9947 |
| BCL11A-8237 | + | CAUAGGGCUGGGCCGGCCU | 19 | 9948 |
| BCL11A-6198 | + | GCAUAGGGCUGGGCCGGCCU | 20 | 9949 |
| BCL11A-8238 | + | UGCAUAGGGCUGGGCCGGCCU | 21 | 9950 |
| BCL11A-8239 | + | UUGCAUAGGGCUGGGCCGGCCU | 22 | 9951 |
| BCL11A-8240 | + | UUUGCAUAGGGCUGGGCCGGCCU | 23 | 9952 |
| BCL11A-8241 | + | CUUUGCAUAGGGCUGGGCCGGCCU | 24 | 9953 |
| BCL11A-8242 | + | UCUGGAGUCUCCGAAGCU | 18 | 9954 |
| BCL11A-8243 | + | GUCUGGAGUCUCCGAAGCU | 19 | 9955 |
| BCL11A-8244 | + | UGUCUGGAGUCUCCGAAGCU | 20 | 9956 |
| BCL11A-8245 | + | UUGUCUGGAGUCUCCGAAGCU | 21 | 9957 |
| BCL11A-8246 | + | AUUGUCUGGAGUCUCCGAAGCU | 22 | 9958 |
| BCL11A-8247 | + | GAUUGUCUGGAGUCUCCGAAGCU | 23 | 9959 |
| BCL11A-8248 | + | CGAUUGUCUGGAGUCUCCGAAGCU | 24 | 9960 |
| BCL11A-8249 | + | UCUCGAGCUUGAUGCGCU | 18 | 9961 |
| BCL11A-8250 | + | UUCUCGAGCUUGAUGCGCU | 19 | 9962 |
| BCL11A-8251 | + | CUUCUCGAGCUUGAUGCGCU | 20 | 9963 |
| BCL11A-8252 | + | CCUUCUCGAGCUUGAUGCGCU | 21 | 9964 |
| BCL11A-8253 | + | UCCUUCUCGAGCUUGAUGCGCU | 22 | 9965 |
| BCL11A-8254 | + | CUCCUUCUCGAGCUUGAUGCGCU | 23 | 9966 |
| BCL11A-8255 | + | ACUCCUUCUCGAGCUUGAUGCGCU | 24 | 9967 |
| BCL11A-8256 | + | UGGACUUGACCGGGGGCU | 18 | 9968 |
| BCL11A-8257 | + | UUGGACUUGACCGGGGGCU | 19 | 9969 |
| BCL11A-6207 | + | CUUGGACUUGACCGGGGGCU | 20 | 9970 |
| BCL11A-8258 | + | ACUUGGACUUGACCGGGGGCU | 21 | 9971 |
| BCL11A-8259 | + | GACUUGGACUUGACCGGGGGCU | 22 | 9972 |
| BCL11A-8260 | + | UGACUUGGACUUGACCGGGGGCU | 23 | 9973 |
| BCL11A-8261 | + | AUGACUUGGACUUGACCGGGGGCU | 24 | 9974 |
| BCL11A-8262 | + | UCCCAUGGAGAGGUGGCU | 18 | 9975 |
| BCL11A-8263 | + | AUCCCAUGGAGAGGUGGCU | 19 | 9976 |
| BCL11A-6208 | + | AAUCCCAUGGAGAGGUGGCU | 20 | 9977 |
| BCL11A-8264 | + | GAAUCCCAUGGAGAGGUGGCU | 21 | 9978 |
| BCL11A-8265 | + | UGAAUCCCAUGGAGAGGUGGCU | 22 | 9979 |
| BCL11A-8266 | + | AUGAAUCCCAUGGAGAGGUGGCU | 23 | 9980 |
| BCL11A-8267 | + | UAUGAAUCCCAUGGAGAGGUGGCU | 24 | 9981 |
| BCL11A-8268 | + | GUGCACCACCAGGUUGCU | 18 | 9982 |
| BCL11A-8269 | + | GGUGCACCACCAGGUUGCU | 19 | 9983 |
| BCL11A-8270 | + | CGGUGCACCACCAGGUUGCU | 20 | 9984 |
| BCL11A-8271 | + | CCGGUGCACCACCAGGUUGCU | 21 | 9985 |
| BCL11A-8272 | + | GCCGGUGCACCACCAGGUUGCU | 22 | 9986 |
| BCL11A-8273 | + | CGCCGGUGCACCACCAGGUUGCU | 23 | 9987 |
| BCL11A-8274 | + | GCGCCGGUGCACCACCAGGUUGCU | 24 | 9988 |
| BCL11A-8275 | + | AAGCUAAGGAAGGGAUCU | 18 | 9989 |
| BCL11A-8276 | + | GAAGCUAAGGAAGGGAUCU | 19 | 9990 |
| BCL11A-8277 | + | CGAAGCUAAGGAAGGGAUCU | 20 | 9991 |
| BCL11A-8278 | + | CCGAAGCUAAGGAAGGGAUCU | 21 | 9992 |
| BCL11A-8279 | + | UCCGAAGCUAAGGAAGGGAUCU | 22 | 9993 |
| BCL11A-8280 | + | CUCCGAAGCUAAGGAAGGGAUCU | 23 | 9994 |
| BCL11A-8281 | + | UCUCCGAAGCUAAGGAAGGGAUCU | 24 | 9995 |
| BCL11A-8282 | + | GGCGAUUGUCUGGAGUCU | 18 | 9996 |
| BCL11A-8283 | + | AGGCGAUUGUCUGGAGUCU | 19 | 9997 |
| BCL11A-8284 | + | AAGGCGAUUGUCUGGAGUCU | 20 | 9998 |
| BCL11A-8285 | + | AAAGGCGAUUGUCUGGAGUCU | 21 | 9999 |
| BCL11A-8286 | + | AAAAGGCGAUUGUCUGGAGUCU | 22 | 10000 |
| BCL11A-8287 | + | CAAAAGGCGAUUGUCUGGAGUCU | 23 | 10001 |
| BCL11A-8288 | + | GCAAAAGGCGAUUGUCUGGAGUCU | 24 | 10002 |
| BCL11A-8289 | + | CCUCCUCGUCCCCGUUCU | 18 | 10003 |
| BCL11A-8290 | + | UCCUCCUCGUCCCCGUUCU | 19 | 10004 |
| BCL11A-8291 | + | UUCCUCCUCGUCCCCGUUCU | 20 | 10005 |
| BCL11A-8292 | + | CUUCCUCCUCGUCCCCGUUCU | 21 | 10006 |
| BCL11A-8293 | + | UCUUCCUCCUCGUCCCCGUUCU | 22 | 10007 |
| BCL11A-8294 | + | CUCUUCCUCCUCGUCCCCGUUCU | 23 | 10008 |
| BCL11A-8295 | + | CCUCUUCCUCCUCGUCCCCGUUCU | 24 | 10009 |
| BCL11A-8296 | + | AGCGCAAACUCCCGUUCU | 18 | 10010 |
| BCL11A-8297 | + | AAGCGCAAACUCCCGUUCU | 19 | 10011 |
| BCL11A-8298 | + | GAAGCGCAAACUCCCGUUCU | 20 | 10012 |
| BCL11A-8299 | + | AGAAGCGCAAACUCCCGUUCU | 21 | 10013 |
| BCL11A-8300 | + | GAGAAGCGCAAACUCCCGUUCU | 22 | 10014 |
| BCL11A-8301 | + | GGAGAAGCGCAAACUCCCGUUCU | 23 | 10015 |
| BCL11A-8302 | + | UGGAGAAGCGCAAACUCCCGUUCU | 24 | 10016 |
| BCL11A-8303 | + | GGGGGCUUCAAAUUUUCU | 18 | 10017 |
| BCL11A-8304 | + | UGGGGGCUUCAAAUUUUCU | 19 | 10018 |
| BCL11A-8305 | + | CUGGGGGCUUCAAAUUUUCU | 20 | 10019 |
| BCL11A-8306 | + | CCUGGGGGCUUCAAAUUUUCU | 21 | 10020 |
| BCL11A-8307 | + | CCCUGGGGGCUUCAAAUUUUCU | 22 | 10021 |
| BCL11A-8308 | + | CCCCUGGGGGCUUCAAAUUUUCU | 23 | 10022 |
| BCL11A-8309 | + | ACCCCUGGGGGCUUCAAAUUUUCU | 24 | 10023 |
| BCL11A-8310 | + | AAGAACCUAGAAAGAGGU | 18 | 10024 |
| BCL11A-8311 | + | GAAGAACCUAGAAAGAGGU | 19 | 10025 |
| BCL11A-6224 | + | UGAAGAACCUAGAAAGAGGU | 20 | 10026 |
| BCL11A-8312 | + | GUGAAGAACCUAGAAAGAGGU | 21 | 10027 |
| BCL11A-8313 | + | UGUGAAGAACCUAGAAAGAGGU | 22 | 10028 |
| BCL11A-8314 | + | GUGUGAAGAACCUAGAAAGAGGU | 23 | 10029 |
| BCL11A-8315 | + | UGUGUGAAGAACCUAGAAAGAGGU | 24 | 10030 |
| BCL11A-8316 | + | UCCAGCUCCCCGGGCGGU | 18 | 10031 |
| BCL11A-8317 | + | GUCCAGCUCCCCGGGCGGU | 19 | 10032 |
| BCL11A-8318 | + | CGUCCAGCUCCCCGGGCGGU | 20 | 10033 |
| BCL11A-8319 | + | CCGUCCAGCUCCCCGGGCGGU | 21 | 10034 |
| BCL11A-8320 | + | UCCGUCCAGCUCCCCGGGCGGU | 22 | 10035 |
| BCL11A-8321 | + | CUCCGUCCAGCUCCCCGGGCGGU | 23 | 10036 |
| BCL11A-8322 | + | CCUCCGUCCAGCUCCCCGGGCGGU | 24 | 10037 |
| BCL11A-8323 | + | GAUACCAACCCGCGGGGU | 18 | 10038 |
| BCL11A-8324 | + | GGAUACCAACCCGCGGGGU | 19 | 10039 |
| BCL11A-8325 | + | GGGAUACCAACCCGCGGGGU | 20 | 10040 |
| BCL11A-8326 | + | AGGGAUACCAACCCGCGGGGU | 21 | 10041 |
| BCL11A-8327 | + | AAGGGAUACCAACCCGCGGGGU | 22 | 10042 |
| BCL11A-8328 | + | GAAGGGAUACCAACCCGCGGGGU | 23 | 10043 |
| BCL11A-8329 | + | UGAAGGGAUACCAACCCGCGGGGU | 24 | 10044 |
| BCL11A-8330 | + | UACGCCGAAUGGGGGUGU | 18 | 10045 |
| BCL11A-8331 | + | CUACGCCGAAUGGGGGUGU | 19 | 10046 |
| BCL11A-8332 | + | ACUACGCCGAAUGGGGGUGU | 20 | 10047 |
| BCL11A-8333 | + | UACUACGCCGAAUGGGGGUGU | 21 | 10048 |
| BCL11A-8334 | + | GUACUACGCCGAAUGGGGGUGU | 22 | 10049 |
| BCL11A-8335 | + | GGUACUACGCCGAAUGGGGGUGU | 23 | 10050 |
| BCL11A-8336 | + | GGGUACUACGCCGAAUGGGGGUGU | 24 | 10051 |
| BCL11A-8337 | + | GAGGCAAAAGGCGAUUGU | 18 | 10052 |
| BCL11A-8338 | + | GGAGGCAAAAGGCGAUUGU | 19 | 10053 |
| BCL11A-8339 | + | AGGAGGCAAAAGGCGAUUGU | 20 | 10054 |
| BCL11A-8340 | + | GAGGAGGCAAAAGGCGAUUGU | 21 | 10055 |
| BCL11A-8341 | + | CGAGGAGGCAAAAGGCGAUUGU | 22 | 10056 |
| BCL11A-8342 | + | ACGAGGAGGCAAAAGGCGAUUGU | 23 | 10057 |
| BCL11A-8343 | + | GACGAGGAGGCAAAAGGCGAUUGU | 24 | 10058 |
| BCL11A-8344 | + | CAAAUUUUCUCAGAACUU | 18 | 10059 |
| BCL11A-8345 | + | UCAAAUUUUCUCAGAACUU | 19 | 10060 |
| BCL11A-8346 | + | UUCAAAUUUUCUCAGAACUU | 20 | 10061 |
| BCL11A-8347 | + | CUUCAAAUUUUCUCAGAACUU | 21 | 10062 |
| BCL11A-8348 | + | GCUUCAAAUUUUCUCAGAACUU | 22 | 10063 |
| BCL11A-8349 | + | GGCUUCAAAUUUUCUCAGAACUU | 23 | 10064 |
| BCL11A-8350 | + | GGGCUUCAAAUUUUCUCAGAACUU | 24 | 10065 |
| BCL11A-8351 | + | CGCUGCGUCUGCCCUCUU | 18 | 10066 |
| BCL11A-8352 | + | UCGCUGCGUCUGCCCUCUU | 19 | 10067 |
| BCL11A-8353 | + | GUCGCUGCGUCUGCCCUCUU | 20 | 10068 |
| BCL11A-8354 | + | UGUCGCUGCGUCUGCCCUCUU | 21 | 10069 |
| BCL11A-8355 | + | GUGUCGCUGCGUCUGCCCUCUU | 22 | 10070 |
| BCL11A-8356 | + | AGUGUCGCUGCGUCUGCCCUCUU | 23 | 10071 |
| BCL11A-8357 | + | AAGUGUCGCUGCGUCUGCCCUCUU | 24 | 10072 |
| BCL11A-8358 | + | AGUCGCUGGUGCCGGGUU | 18 | 10073 |
| BCL11A-8359 | + | AAGUCGCUGGUGCCGGGUU | 19 | 10074 |
| BCL11A-8360 | + | CAAGUCGCUGGUGCCGGGUU | 20 | 10075 |
| BCL11A-8361 | + | CCAAGUCGCUGGUGCCGGGUU | 21 | 10076 |
| BCL11A-8362 | + | ACCAAGUCGCUGGUGCCGGGUU | 22 | 10077 |
| BCL11A-8363 | + | CACCAAGUCGCUGGUGCCGGGUU | 23 | 10078 |
| BCL11A-8364 | + | CCACCAAGUCGCUGGUGCCGGGUU | 24 | 10079 |
| BCL11A-8365 | + | CUGCCCAGCAGCAGCUUU | 18 | 10080 |
| BCL11A-8366 | + | GCUGCCCAGCAGCAGCUUU | 19 | 10081 |
| BCL11A-8367 | + | GGCUGCCCAGCAGCAGCUUU | 20 | 10082 |
| BCL11A-8368 | + | GGGCUGCCCAGCAGCAGCUUU | 21 | 10083 |
| BCL11A-8369 | + | GGGGCUGCCCAGCAGCAGCUUU | 22 | 10084 |
| BCL11A-8370 | + | UGGGGCUGCCCAGCAGCAGCUUU | 23 | 10085 |
| BCL11A-8371 | + | CUGGGGCUGCCCAGCAGCAGCUUU | 24 | 10086 |
| BCL11A-8372 | − | GGCAGGCCCAGCUCAAAA | 18 | 10087 |
| BCL11A-8373 | − | GGGCAGGCCCAGCUCAAAA | 19 | 10088 |
| BCL11A-8374 | − | CGGGCAGGCCCAGCUCAAAA | 20 | 10089 |
| BCL11A-8375 | − | CCGGGCAGGCCCAGCUCAAAA | 21 | 10090 |
| BCL11A-8376 | − | CCCGGGCAGGCCCAGCUCAAAA | 22 | 10091 |
| BCL11A-8377 | − | GCCCGGGCAGGCCCAGCUCAAAA | 23 | 10092 |
| BCL11A-8378 | − | GGCCCGGGCAGGCCCAGCUCAAAA | 24 | 10093 |
| BCL11A-8379 | − | UAAGAAUCUACUUAGAAA | 18 | 10094 |
| BCL11A-8380 | − | UUAAGAAUCUACUUAGAAA | 19 | 10095 |
| BCL11A-8381 | − | AUUAAGAAUCUACUUAGAAA | 20 | 10096 |
| BCL11A-8382 | − | GAUUAAGAAUCUACUUAGAAA | 21 | 10097 |
| BCL11A-8383 | − | GGAUUAAGAAUCUACUUAGAAA | 22 | 10098 |
| BCL11A-8384 | − | UGGAUUAAGAAUCUACUUAGAAA | 23 | 10099 |
| BCL11A-8385 | − | AUGGAUUAAGAAUCUACUUAGAAA | 24 | 10100 |
| BCL11A-8386 | − | CGGGCAGGCCCAGCUCAA | 18 | 10101 |
| BCL11A-8387 | − | CCGGGCAGGCCCAGCUCAA | 19 | 10102 |
| BCL11A-8388 | − | CCCGGGCAGGCCCAGCUCAA | 20 | 10103 |
| BCL11A-8389 | − | GCCCGGGCAGGCCCAGCUCAA | 21 | 10104 |
| BCL11A-8390 | − | GGCCCGGGCAGGCCCAGCUCAA | 22 | 10105 |
| BCL11A-8391 | − | GGGCCCGGGCAGGCCCAGCUCAA | 23 | 10106 |
| BCL11A-8392 | − | CGGGCCCGGGCAGGCCCAGCUCAA | 24 | 10107 |
| BCL11A-8393 | − | GACGAGGAAGAGGAAGAA | 18 | 10108 |
| BCL11A-8394 | − | CGACGAGGAAGAGGAAGAA | 19 | 10109 |
| BCL11A-3947 | − | ACGACGAGGAAGAGGAAGAA | 20 | 10110 |
| BCL11A-8395 | − | GACGACGAGGAAGAGGAAGAA | 21 | 10111 |
| BCL11A-8396 | − | GGACGACGAGGAAGAGGAAGAA | 22 | 10112 |
| BCL11A-8397 | − | AGGACGACGAGGAAGAGGAAGAA | 23 | 10113 |
| BCL11A-8398 | − | GAGGACGACGAGGAAGAGGAAGAA | 24 | 10114 |
| BCL11A-8399 | − | CAACCUGAUCCCGGAGAA | 18 | 10115 |
| BCL11A-8400 | − | CCAACCUGAUCCCGGAGAA | 19 | 10116 |
| BCL11A-5881 | − | CCCAACCUGAUCCCGGAGAA | 20 | 10117 |
| BCL11A-8401 | − | CCCCAACCUGAUCCCGGAGAA | 21 | 10118 |
| BCL11A-8402 | − | ACCCCAACCUGAUCCCGGAGAA | 22 | 10119 |
| BCL11A-8403 | − | GACCCCAACCUGAUCCCGGAGAA | 23 | 10120 |
| BCL11A-8404 | − | CGACCCCAACCUGAUCCCGGAGAA | 24 | 10121 |
| BCL11A-8405 | − | GGAGCACUCCUCGGAGAA | 18 | 10122 |
| BCL11A-8406 | − | CGGAGCACUCCUCGGAGAA | 19 | 10123 |
| BCL11A-5882 | − | UCGGAGCACUCCUCGGAGAA | 20 | 10124 |
| BCL11A-8407 | − | GUCGGAGCACUCCUCGGAGAA | 21 | 10125 |
| BCL11A-8408 | − | CGUCGGAGCACUCCUCGGAGAA | 22 | 10126 |
| BCL11A-8409 | − | UCGUCGGAGCACUCCUCGGAGAA | 23 | 10127 |
| BCL11A-8410 | − | CUCGUCGGAGCACUCCUCGGAGAA | 24 | 10128 |
| BCL11A-8411 | − | GAGGAGGACGACGAGGAA | 18 | 10129 |
| BCL11A-8412 | − | AGAGGAGGACGACGAGGAA | 19 | 10130 |
| BCL11A-3950 | − | AAGAGGAGGACGACGAGGAA | 20 | 10131 |
| BCL11A-8413 | − | GAAGAGGAGGACGACGAGGAA | 21 | 10132 |
| BCL11A-8414 | − | GGAAGAGGAGGACGACGAGGAA | 22 | 10133 |
| BCL11A-8415 | − | AGGAAGAGGAGGACGACGAGGAA | 23 | 10134 |
| BCL11A-8416 | − | GAGGAAGAGGAGGACGACGAGGAA | 24 | 10135 |
| BCL11A-8417 | − | GAGGAAGAAGAGGAGGAA | 18 | 10136 |
| BCL11A-8418 | − | AGAGGAAGAAGAGGAGGAA | 19 | 10137 |
| BCL11A-3962 | − | AAGAGGAAGAAGAGGAGGAA | 20 | 10138 |
| BCL11A-8419 | − | GAAGAGGAAGAAGAGGAGGAA | 21 | 10139 |
| BCL11A-8420 | − | GGAAGAGGAAGAAGAGGAGGAA | 22 | 10140 |
| BCL11A-8421 | − | AGGAAGAGGAAGAAGAGGAGGAA | 23 | 10141 |
| BCL11A-8422 | − | GAGGAAGAGGAAGAAGAGGAGGAA | 24 | 10142 |
| BCL11A-8423 | − | AACGGGGACGAGGAGGAA | 18 | 10143 |
| BCL11A-8424 | − | GAACGGGGACGAGGAGGAA | 19 | 10144 |
| BCL11A-3934 | − | AGAACGGGGACGAGGAGGAA | 20 | 10145 |
| BCL11A-8425 | − | GAGAACGGGGACGAGGAGGAA | 21 | 10146 |
| BCL11A-8426 | − | GGAGAACGGGGACGAGGAGGAA | 22 | 10147 |
| BCL11A-8427 | − | CGGAGAACGGGGACGAGGAGGAA | 23 | 10148 |
| BCL11A-8428 | − | CCGGAGAACGGGGACGAGGAGGAA | 24 | 10149 |
| BCL11A-8429 | − | GGCGCAGCGGCACGGGAA | 18 | 10150 |
| BCL11A-8430 | − | GGGCGCAGCGGCACGGGAA | 19 | 10151 |
| BCL11A-3857 | − | GGGGCGCAGCGGCACGGGAA | 20 | 10152 |
| BCL11A-8431 | − | CGGGGCGCAGCGGCACGGGAA | 21 | 10153 |
| BCL11A-8432 | − | UCGGGGCGCAGCGGCACGGGAA | 22 | 10154 |
| BCL11A-8433 | − | CUCGGGGCGCAGCGGCACGGGAA | 23 | 10155 |
| BCL11A-8434 | − | UCUCGGGGCGCAGCGGCACGGGAA | 24 | 10156 |
| BCL11A-8435 | − | CGGCCGCGAUGCCCAACA | 18 | 10157 |
| BCL11A-8436 | − | CCGGCCGCGAUGCCCAACA | 19 | 10158 |
| BCL11A-5893 | − | CCCGGCCGCGAUGCCCAACA | 20 | 10159 |
| BCL11A-8437 | − | CCCCGGCCGCGAUGCCCAACA | 21 | 10160 |
| BCL11A-8438 | − | CCCCCGGCCGCGAUGCCCAACA | 22 | 10161 |
| BCL11A-8439 | − | GCCCCCGGCCGCGAUGCCCAACA | 23 | 10162 |
| BCL11A-8440 | − | UGCCCCCGGCCGCGAUGCCCAACA | 24 | 10163 |
| BCL11A-8441 | − | CUACUUAGAAAGCGAACA | 18 | 10164 |
| BCL11A-8442 | − | UCUACUUAGAAAGCGAACA | 19 | 10165 |
| BCL11A-5894 | − | AUCUACUUAGAAAGCGAACA | 20 | 10166 |
| BCL11A-8443 | − | AAUCUACUUAGAAAGCGAACA | 21 | 10167 |
| BCL11A-8444 | − | GAAUCUACUUAGAAAGCGAACA | 22 | 10168 |
| BCL11A-8445 | − | AGAAUCUACUUAGAAAGCGAACA | 23 | 10169 |
| BCL11A-8446 | − | AAGAAUCUACUUAGAAAGCGAACA | 24 | 10170 |
| BCL11A-8447 | − | CCCCUGUUUAGUCCACCA | 18 | 10171 |
| BCL11A-8448 | − | CCCCCUGUUUAGUCCACCA | 19 | 10172 |
| BCL11A-8449 | − | CCCCCCUGUUUAGUCCACCA | 20 | 10173 |
| BCL11A-8450 | − | CCCCCCCUGUUUAGUCCACCA | 21 | 10174 |
| BCL11A-8451 | − | UCCCCCCCUGUUUAGUCCACCA | 22 | 10175 |
| BCL11A-8452 | − | CUCCCCCCCUGUUUAGUCCACCA | 23 | 10176 |
| BCL11A-8453 | − | ACUCCCCCCCUGUUUAGUCCACCA | 24 | 10177 |
| BCL11A-8454 | − | CAUUCGGCGUAGUACCCA | 18 | 10178 |
| BCL11A-8455 | − | CCAUUCGGCGUAGUACCCA | 19 | 10179 |
| BCL11A-8456 | − | CCCAUUCGGCGUAGUACCCA | 20 | 10180 |
| BCL11A-8457 | − | CCCCAUUCGGCGUAGUACCCA | 21 | 10181 |
| BCL11A-8458 | − | CCCCCAUUCGGCGUAGUACCCA | 22 | 10182 |
| BCL11A-8459 | − | ACCCCCAUUCGGCGUAGUACCCA | 23 | 10183 |
| BCL11A-8460 | − | CACCCCCAUUCGGCGUAGUACCCA | 24 | 10184 |
| BCL11A-8461 | − | GGCCGAGGCCGAGGGCCA | 18 | 10185 |
| BCL11A-8462 | − | UGGCCGAGGCCGAGGGCCA | 19 | 10186 |
| BCL11A-8463 | − | CUGGCCGAGGCCGAGGGCCA | 20 | 10187 |
| BCL11A-8464 | − | CCUGGCCGAGGCCGAGGGCCA | 21 | 10188 |
| BCL11A-8465 | − | ACCUGGCCGAGGCCGAGGGCCA | 22 | 10189 |
| BCL11A-8466 | − | CACCUGGCCGAGGCCGAGGGCCA | 23 | 10190 |
| BCL11A-8467 | − | CCACCUGGCCGAGGCCGAGGGCCA | 24 | 10191 |
| BCL11A-8468 | − | UUUCUCUUGCAACACGCA | 18 | 10192 |
| BCL11A-8469 | − | GUUUCUCUUGCAACACGCA | 19 | 10193 |
| BCL11A-8470 | − | GGUUUCUCUUGCAACACGCA | 20 | 10194 |
| BCL11A-8471 | − | UGGUUUCUCUUGCAACACGCA | 21 | 10195 |
| BCL11A-8472 | − | AUGGUUUCUCUUGCAACACGCA | 22 | 10196 |
| BCL11A-8473 | − | CAUGGUUUCUCUUGCAACACGCA | 23 | 10197 |
| BCL11A-8474 | − | GCAUGGUUUCUCUUGCAACACGCA | 24 | 10198 |
| BCL11A-8475 | − | ACUUGGACCCCCACCGCA | 18 | 10199 |
| BCL11A-8476 | − | CACUUGGACCCCCACCGCA | 19 | 10200 |
| BCL11A-8477 | − | UCACUUGGACCCCCACCGCA | 20 | 10201 |
| BCL11A-8478 | − | AUCACUUGGACCCCCACCGCA | 21 | 10202 |
| BCL11A-8479 | − | CAUCACUUGGACCCCCACCGCA | 22 | 10203 |
| BCL11A-8480 | − | ACAUCACUUGGACCCCCACCGCA | 23 | 10204 |
| BCL11A-8481 | − | GACAUCACUUGGACCCCCACCGCA | 24 | 10205 |
| BCL11A-8482 | − | UCUCGGGGCGCAGCGGCA | 18 | 10206 |
| BCL11A-8483 | − | AUCUCGGGGCGCAGCGGCA | 19 | 10207 |
| BCL11A-5904 | − | GAUCUCGGGGCGCAGCGGCA | 20 | 10208 |
| BCL11A-8484 | − | GGAUCUCGGGGCGCAGCGGCA | 21 | 10209 |
| BCL11A-8485 | − | GGGAUCUCGGGGCGCAGCGGCA | 22 | 10210 |
| BCL11A-8486 | − | AGGGAUCUCGGGGCGCAGCGGCA | 23 | 10211 |
| BCL11A-8487 | − | GAGGGAUCUCGGGGCGCAGCGGCA | 24 | 10212 |
| BCL11A-8488 | − | AGACUUAGAGAGCUGGCA | 18 | 10213 |
| BCL11A-8489 | − | GAGACUUAGAGAGCUGGCA | 19 | 10214 |
| BCL11A-5907 | − | GGAGACUUAGAGAGCUGGCA | 20 | 10215 |
| BCL11A-8490 | − | AGGAGACUUAGAGAGCUGGCA | 21 | 10216 |
| BCL11A-8491 | − | UAGGAGACUUAGAGAGCUGGCA | 22 | 10217 |
| BCL11A-8492 | − | CUAGGAGACUUAGAGAGCUGGCA | 23 | 10218 |
| BCL11A-8493 | − | UCUAGGAGACUUAGAGAGCUGGCA | 24 | 10219 |
| BCL11A-8494 | − | GCUCCAUGCAGCACUUCA | 18 | 10220 |
| BCL11A-8495 | − | AGCUCCAUGCAGCACUUCA | 19 | 10221 |
| BCL11A-8496 | − | CAGCUCCAUGCAGCACUUCA | 20 | 10222 |
| BCL11A-8497 | − | UCAGCUCCAUGCAGCACUUCA | 21 | 10223 |
| BCL11A-8498 | − | CUCAGCUCCAUGCAGCACUUCA | 22 | 10224 |
| BCL11A-8499 | − | GCUCAGCUCCAUGCAGCACUUCA | 23 | 10225 |
| BCL11A-8500 | − | UGCUCAGCUCCAUGCAGCACUUCA | 24 | 10226 |
| BCL11A-8501 | − | UGGUGGCCAAGUUCAAGA | 18 | 10227 |
| BCL11A-8502 | − | GUGGUGGCCAAGUUCAAGA | 19 | 10228 |
| BCL11A-8503 | − | CGUGGUGGCCAAGUUCAAGA | 20 | 10229 |
| BCL11A-8504 | − | CCGUGGUGGCCAAGUUCAAGA | 21 | 10230 |
| BCL11A-8505 | − | UCCGUGGUGGCCAAGUUCAAGA | 22 | 10231 |
| BCL11A-8506 | − | GUCCGUGGUGGCCAAGUUCAAGA | 23 | 10232 |
| BCL11A-8507 | − | AGUCCGUGGUGGCCAAGUUCAAGA | 24 | 10233 |
| BCL11A-8508 | − | AGGAGGAGCUGACGGAGA | 18 | 10234 |
| BCL11A-8509 | − | GAGGAGGAGCUGACGGAGA | 19 | 10235 |
| BCL11A-8510 | − | GGAGGAGGAGCUGACGGAGA | 20 | 10236 |
| BCL11A-8511 | − | AGGAGGAGGAGCUGACGGAGA | 21 | 10237 |
| BCL11A-8512 | − | GAGGAGGAGGAGCUGACGGAGA | 22 | 10238 |
| BCL11A-8513 | − | GGAGGAGGAGGAGCUGACGGAGA | 23 | 10239 |
| BCL11A-8514 | − | AGGAGGAGGAGGAGCUGACGGAGA | 24 | 10240 |
| BCL11A-8515 | − | CCAACCUGAUCCCGGAGA | 18 | 10241 |
| BCL11A-8516 | − | CCCAACCUGAUCCCGGAGA | 19 | 10242 |
| BCL11A-8517 | − | CCCCAACCUGAUCCCGGAGA | 20 | 10243 |
| BCL11A-8518 | − | ACCCCAACCUGAUCCCGGAGA | 21 | 10244 |
| BCL11A-8519 | − | GACCCCAACCUGAUCCCGGAGA | 22 | 10245 |
| BCL11A-8520 | − | CGACCCCAACCUGAUCCCGGAGA | 23 | 10246 |
| BCL11A-8521 | − | ACGACCCCAACCUGAUCCCGGAGA | 24 | 10247 |
| BCL11A-8522 | − | CGGAGCACUCCUCGGAGA | 18 | 10248 |
| BCL11A-8523 | − | UCGGAGCACUCCUCGGAGA | 19 | 10249 |
| BCL11A-8524 | − | GUCGGAGCACUCCUCGGAGA | 20 | 10250 |
| BCL11A-8525 | − | CGUCGGAGCACUCCUCGGAGA | 21 | 10251 |
| BCL11A-8526 | − | UCGUCGGAGCACUCCUCGGAGA | 22 | 10252 |
| BCL11A-8527 | − | CUCGUCGGAGCACUCCUCGGAGA | 23 | 10253 |
| BCL11A-8528 | − | CCUCGUCGGAGCACUCCUCGGAGA | 24 | 10254 |
| BCL11A-8529 | − | UACCAGGAUCAGUAUCGA | 18 | 10255 |
| BCL11A-8530 | − | AUACCAGGAUCAGUAUCGA | 19 | 10256 |
| BCL11A-8531 | − | AAUACCAGGAUCAGUAUCGA | 20 | 10257 |
| BCL11A-8532 | − | GAAUACCAGGAUCAGUAUCGA | 21 | 10258 |
| BCL11A-8533 | − | AGAAUACCAGGAUCAGUAUCGA | 22 | 10259 |
| BCL11A-8534 | − | AAGAAUACCAGGAUCAGUAUCGA | 23 | 10260 |
| BCL11A-8535 | − | UAAGAAUACCAGGAUCAGUAUCGA | 24 | 10261 |
| BCL11A-8536 | − | UGUGUGGCAGUUUUCGGA | 18 | 10262 |
| BCL11A-8537 | − | AUGUGUGGCAGUUUUCGGA | 19 | 10263 |
| BCL11A-5929 | − | GAUGUGUGGCAGUUUUCGGA | 20 | 10264 |
| BCL11A-8538 | − | AGAUGUGUGGCAGUUUUCGGA | 21 | 10265 |
| BCL11A-8539 | − | AAGAUGUGUGGCAGUUUUCGGA | 22 | 10266 |
| BCL11A-8540 | − | CAAGAUGUGUGGCAGUUUUCGGA | 23 | 10267 |
| BCL11A-8541 | − | UCAAGAUGUGUGGCAGUUUUCGGA | 24 | 10268 |
| BCL11A-8542 | − | ACCGCCCGGGGAGCUGGA | 18 | 10269 |
| BCL11A-8543 | − | CACCGCCCGGGGAGCUGGA | 19 | 10270 |
| BCL11A-5933 | − | ACACCGCCCGGGGAGCUGGA | 20 | 10271 |
| BCL11A-8544 | − | CACACCGCCCGGGGAGCUGGA | 21 | 10272 |
| BCL11A-8545 | − | CCACACCGCCCGGGGAGCUGGA | 22 | 10273 |
| BCL11A-8546 | − | UCCACACCGCCCGGGGAGCUGGA | 23 | 10274 |
| BCL11A-8547 | − | CUCCACACCGCCCGGGGAGCUGGA | 24 | 10275 |
| BCL11A-8548 | − | AGCGGCACGGGAAGUGGA | 18 | 10276 |
| BCL11A-8549 | − | CAGCGGCACGGGAAGUGGA | 19 | 10277 |
| BCL11A-5934 | − | GCAGCGGCACGGGAAGUGGA | 20 | 10278 |
| BCL11A-8550 | − | CGCAGCGGCACGGGAAGUGGA | 21 | 10279 |
| BCL11A-8551 | − | GCGCAGCGGCACGGGAAGUGGA | 22 | 10280 |
| BCL11A-8552 | − | GGCGCAGCGGCACGGGAAGUGGA | 23 | 10281 |
| BCL11A-8553 | − | GGGCGCAGCGGCACGGGAAGUGGA | 24 | 10282 |
| BCL11A-8554 | − | AGGAGGAGGAGGAGCUGA | 18 | 10283 |
| BCL11A-8555 | − | GAGGAGGAGGAGGAGCUGA | 19 | 10284 |
| BCL11A-5938 | − | AGAGGAGGAGGAGGAGCUGA | 20 | 10285 |
| BCL11A-8556 | − | AAGAGGAGGAGGAGGAGCUGA | 21 | 10286 |
| BCL11A-8557 | − | GAAGAGGAGGAGGAGGAGCUGA | 22 | 10287 |
| BCL11A-8558 | − | GGAAGAGGAGGAGGAGGAGCUGA | 23 | 10288 |
| BCL11A-8559 | − | AGGAAGAGGAGGAGGAGGAGCUGA | 24 | 10289 |
| BCL11A-8560 | − | GGUUGAAUCCAAUGGCUA | 18 | 10290 |
| BCL11A-8561 | − | CGGUUGAAUCCAAUGGCUA | 19 | 10291 |
| BCL11A-5944 | − | GCGGUUGAAUCCAAUGGCUA | 20 | 10292 |
| BCL11A-8562 | − | UGCGGUUGAAUCCAAUGGCUA | 21 | 10293 |
| BCL11A-8563 | − | CUGCGGUUGAAUCCAAUGGCUA | 22 | 10294 |
| BCL11A-8564 | − | GCUGCGGUUGAAUCCAAUGGCUA | 23 | 10295 |
| BCL11A-8565 | − | UGCUGCGGUUGAAUCCAAUGGCUA | 24 | 10296 |
| BCL11A-8566 | − | AGAAUACCAGGAUCAGUA | 18 | 10297 |
| BCL11A-8567 | − | AAGAAUACCAGGAUCAGUA | 19 | 10298 |
| BCL11A-8568 | − | UAAGAAUACCAGGAUCAGUA | 20 | 10299 |
| BCL11A-8569 | − | CUAAGAAUACCAGGAUCAGUA | 21 | 10300 |
| BCL11A-8570 | − | GCUAAGAAUACCAGGAUCAGUA | 22 | 10301 |
| BCL11A-8571 | − | UGCUAAGAAUACCAGGAUCAGUA | 23 | 10302 |
| BCL11A-8572 | − | CUGCUAAGAAUACCAGGAUCAGUA | 24 | 10303 |
| BCL11A-8573 | − | AUUUCUCUAGGAGACUUA | 18 | 10304 |
| BCL11A-8574 | − | GAUUUCUCUAGGAGACUUA | 19 | 10305 |
| BCL11A-8575 | − | GGAUUUCUCUAGGAGACUUA | 20 | 10306 |
| BCL11A-8576 | − | UGGAUUUCUCUAGGAGACUUA | 21 | 10307 |
| BCL11A-8577 | − | AUGGAUUUCUCUAGGAGACUUA | 22 | 10308 |
| BCL11A-8578 | − | CAUGGAUUUCUCUAGGAGACUUA | 23 | 10309 |
| BCL11A-8579 | − | CCAUGGAUUUCUCUAGGAGACUUA | 24 | 10310 |
| BCL11A-8580 | − | CCGGCCGCGAUGCCCAAC | 18 | 10311 |
| BCL11A-8581 | − | CCCGGCCGCGAUGCCCAAC | 19 | 10312 |
| BCL11A-8582 | − | CCCCGGCCGCGAUGCCCAAC | 20 | 10313 |
| BCL11A-8583 | − | CCCCCGGCCGCGAUGCCCAAC | 21 | 10314 |
| BCL11A-8584 | − | GCCCCCGGCCGCGAUGCCCAAC | 22 | 10315 |
| BCL11A-8585 | − | UGCCCCCGGCCGCGAUGCCCAAC | 23 | 10316 |
| BCL11A-8586 | − | CUGCCCCCGGCCGCGAUGCCCAAC | 24 | 10317 |
| BCL11A-8587 | − | AACCUGAUCCCGGAGAAC | 18 | 10318 |
| BCL11A-8588 | − | CAACCUGAUCCCGGAGAAC | 19 | 10319 |
| BCL11A-5948 | − | CCAACCUGAUCCCGGAGAAC | 20 | 10320 |
| BCL11A-8589 | − | CCCAACCUGAUCCCGGAGAAC | 21 | 10321 |
| BCL11A-8590 | − | CCCCAACCUGAUCCCGGAGAAC | 22 | 10322 |
| BCL11A-8591 | − | ACCCCAACCUGAUCCCGGAGAAC | 23 | 10323 |
| BCL11A-8592 | − | GACCCCAACCUGAUCCCGGAGAAC | 24 | 10324 |
| BCL11A-8593 | − | UCUACUUAGAAAGCGAAC | 18 | 10325 |
| BCL11A-8594 | − | AUCUACUUAGAAAGCGAAC | 19 | 10326 |
| BCL11A-8595 | − | AAUCUACUUAGAAAGCGAAC | 20 | 10327 |
| BCL11A-8596 | − | GAAUCUACUUAGAAAGCGAAC | 21 | 10328 |
| BCL11A-8597 | − | AGAAUCUACUUAGAAAGCGAAC | 22 | 10329 |
| BCL11A-8598 | − | AAGAAUCUACUUAGAAAGCGAAC | 23 | 10330 |
| BCL11A-8599 | − | UAAGAAUCUACUUAGAAAGCGAAC | 24 | 10331 |
| BCL11A-8600 | − | GAGGCGGCGCGCCACCAC | 18 | 10332 |
| BCL11A-8601 | − | GGAGGCGGCGCGCCACCAC | 19 | 10333 |
| BCL11A-8602 | − | UGGAGGCGGCGCGCCACCAC | 20 | 10334 |
| BCL11A-8603 | − | CUGGAGGCGGCGCGCCACCAC | 21 | 10335 |
| BCL11A-8604 | − | CCUGGAGGCGGCGCGCCACCAC | 22 | 10336 |
| BCL11A-8605 | − | GCCUGGAGGCGGCGCGCCACCAC | 23 | 10337 |
| BCL11A-8606 | − | AGCCUGGAGGCGGCGCGCCACCAC | 24 | 10338 |
| BCL11A-8607 | − | GUGCACCGGCGCAGCCAC | 18 | 10339 |
| BCL11A-8608 | − | GGUGCACCGGCGCAGCCAC | 19 | 10340 |
| BCL11A-8609 | − | UGGUGCACCGGCGCAGCCAC | 20 | 10341 |
| BCL11A-8610 | − | GUGGUGCACCGGCGCAGCCAC | 21 | 10342 |
| BCL11A-8611 | − | GGUGGUGCACCGGCGCAGCCAC | 22 | 10343 |
| BCL11A-8612 | − | UGGUGGUGCACCGGCGCAGCCAC | 23 | 10344 |
| BCL11A-8613 | − | CUGGUGGUGCACCGGCGCAGCCAC | 24 | 10345 |
| BCL11A-8614 | − | AGCAAGCUGAAGCGCCAC | 18 | 10346 |
| BCL11A-8615 | − | CAGCAAGCUGAAGCGCCAC | 19 | 10347 |
| BCL11A-8616 | − | CCAGCAAGCUGAAGCGCCAC | 20 | 10348 |
| BCL11A-8617 | − | GCCAGCAAGCUGAAGCGCCAC | 21 | 10349 |
| BCL11A-8618 | − | GGCCAGCAAGCUGAAGCGCCAC | 22 | 10350 |
| BCL11A-8619 | − | AGGCCAGCAAGCUGAAGCGCCAC | 23 | 10351 |
| BCL11A-8620 | − | CAGGCCAGCAAGCUGAAGCGCCAC | 24 | 10352 |
| BCL11A-8621 | − | GCCGAGGCCGAGGGCCAC | 18 | 10353 |
| BCL11A-8622 | − | GGCCGAGGCCGAGGGCCAC | 19 | 10354 |
| BCL11A-5951 | − | UGGCCGAGGCCGAGGGCCAC | 20 | 10355 |
| BCL11A-8623 | − | CUGGCCGAGGCCGAGGGCCAC | 21 | 10356 |
| BCL11A-8624 | − | CCUGGCCGAGGCCGAGGGCCAC | 22 | 10357 |
| BCL11A-8625 | − | ACCUGGCCGAGGCCGAGGGCCAC | 23 | 10358 |
| BCL11A-8626 | − | CACCUGGCCGAGGCCGAGGGCCAC | 24 | 10359 |
| BCL11A-8627 | − | CUCGGGGCGCAGCGGCAC | 18 | 10360 |
| BCL11A-8628 | − | UCUCGGGGCGCAGCGGCAC | 19 | 10361 |
| BCL11A-5953 | − | AUCUCGGGGCGCAGCGGCAC | 20 | 10362 |
| BCL11A-8629 | − | GAUCUCGGGGCGCAGCGGCAC | 21 | 10363 |
| BCL11A-8630 | − | GGAUCUCGGGGCGCAGCGGCAC | 22 | 10364 |
| BCL11A-8631 | − | GGGAUCUCGGGGCGCAGCGGCAC | 23 | 10365 |
| BCL11A-8632 | − | AGGGAUCUCGGGGCGCAGCGGCAC | 24 | 10366 |
| BCL11A-8633 | − | CCACCACCGAGACAUCAC | 18 | 10367 |
| BCL11A-8634 | − | UCCACCACCGAGACAUCAC | 19 | 10368 |
| BCL11A-8635 | − | GUCCACCACCGAGACAUCAC | 20 | 10369 |
| BCL11A-8636 | − | AGUCCACCACCGAGACAUCAC | 21 | 10370 |
| BCL11A-8637 | − | UAGUCCACCACCGAGACAUCAC | 22 | 10371 |
| BCL11A-8638 | − | UUAGUCCACCACCGAGACAUCAC | 23 | 10372 |
| BCL11A-8639 | − | UUUAGUCCACCACCGAGACAUCAC | 24 | 10373 |
| BCL11A-8640 | − | GAGGAAGAGGAGGACGAC | 18 | 10374 |
| BCL11A-8641 | − | GGAGGAAGAGGAGGACGAC | 19 | 10375 |
| BCL11A-3949 | − | AGGAGGAAGAGGAGGACGAC | 20 | 10376 |
| BCL11A-8642 | − | GAGGAGGAAGAGGAGGACGAC | 21 | 10377 |
| BCL11A-8643 | − | CGAGGAGGAAGAGGAGGACGAC | 22 | 10378 |
| BCL11A-8644 | − | ACGAGGAGGAAGAGGAGGACGAC | 23 | 10379 |
| BCL11A-8645 | − | GACGAGGAGGAAGAGGAGGACGAC | 24 | 10380 |
| BCL11A-8646 | − | GUCGUGGGCGUGGGCGAC | 18 | 10381 |
| BCL11A-8647 | − | GGUCGUGGGCGUGGGCGAC | 19 | 10382 |
| BCL11A-8648 | − | CGGUCGUGGGCGUGGGCGAC | 20 | 10383 |
| BCL11A-8649 | − | GCGGUCGUGGGCGUGGGCGAC | 21 | 10384 |
| BCL11A-8650 | − | CGCGGUCGUGGGCGUGGGCGAC | 22 | 10385 |
| BCL11A-8651 | − | GCGCGGUCGUGGGCGUGGGCGAC | 23 | 10386 |
| BCL11A-8652 | − | GGCGCGGUCGUGGGCGUGGGCGAC | 24 | 10387 |
| BCL11A-8653 | − | AUCCCGGAGAACGGGGAC | 18 | 10388 |
| BCL11A-8654 | − | GAUCCCGGAGAACGGGGAC | 19 | 10389 |
| BCL11A-8655 | − | UGAUCCCGGAGAACGGGGAC | 20 | 10390 |
| BCL11A-8656 | − | CUGAUCCCGGAGAACGGGGAC | 21 | 10391 |
| BCL11A-8657 | − | CCUGAUCCCGGAGAACGGGGAC | 22 | 10392 |
| BCL11A-8658 | − | ACCUGAUCCCGGAGAACGGGGAC | 23 | 10393 |
| BCL11A-8659 | − | AACCUGAUCCCGGAGAACGGGGAC | 24 | 10394 |
| BCL11A-8660 | − | UGGAGGCGGCGCGCCACC | 18 | 10395 |
| BCL11A-8661 | − | CUGGAGGCGGCGCGCCACC | 19 | 10396 |
| BCL11A-8662 | − | CCUGGAGGCGGCGCGCCACC | 20 | 10397 |
| BCL11A-8663 | − | GCCUGGAGGCGGCGCGCCACC | 21 | 10398 |
| BCL11A-8664 | − | AGCCUGGAGGCGGCGCGCCACC | 22 | 10399 |
| BCL11A-8665 | − | GAGCCUGGAGGCGGCGCGCCACC | 23 | 10400 |
| BCL11A-8666 | − | UGAGCCUGGAGGCGGCGCGCCACC | 24 | 10401 |
| BCL11A-8667 | − | CCCAUUCGGCGUAGUACC | 18 | 10402 |
| BCL11A-8668 | − | CCCCAUUCGGCGUAGUACC | 19 | 10403 |
| BCL11A-8669 | − | CCCCCAUUCGGCGUAGUACC | 20 | 10404 |
| BCL11A-8670 | − | ACCCCCAUUCGGCGUAGUACC | 21 | 10405 |
| BCL11A-8671 | − | CACCCCCAUUCGGCGUAGUACC | 22 | 10406 |
| BCL11A-8672 | − | ACACCCCCAUUCGGCGUAGUACC | 23 | 10407 |
| BCL11A-8673 | − | CACACCCCCAUUCGGCGUAGUACC | 24 | 10408 |
| BCL11A-8674 | − | GAGAAAAUUUGAAGCCCC | 18 | 10409 |
| BCL11A-8675 | − | UGAGAAAAUUUGAAGCCCC | 19 | 10410 |
| BCL11A-8676 | − | CUGAGAAAAUUUGAAGCCCC | 20 | 10411 |
| BCL11A-8677 | − | UCUGAGAAAAUUUGAAGCCCC | 21 | 10412 |
| BCL11A-8678 | − | UUCUGAGAAAAUUUGAAGCCCC | 22 | 10413 |
| BCL11A-8679 | − | GUUCUGAGAAAAUUUGAAGCCCC | 23 | 10414 |
| BCL11A-8680 | − | AGUUCUGAGAAAAUUUGAAGCCCC | 24 | 10415 |
| BCL11A-8681 | − | CGCUUCUCCACACCGCCC | 18 | 10416 |
| BCL11A-8682 | − | GCGCUUCUCCACACCGCCC | 19 | 10417 |
| BCL11A-5976 | − | UGCGCUUCUCCACACCGCCC | 20 | 10418 |
| BCL11A-8683 | − | UUGCGCUUCUCCACACCGCCC | 21 | 10419 |
| BCL11A-8684 | − | UUUGCGCUUCUCCACACCGCCC | 22 | 10420 |
| BCL11A-8685 | − | GUUUGCGCUUCUCCACACCGCCC | 23 | 10421 |
| BCL11A-8686 | − | AGUUUGCGCUUCUCCACACCGCCC | 24 | 10422 |
| BCL11A-8687 | − | UCUCCACCGCCAGCUCCC | 18 | 10423 |
| BCL11A-8688 | − | CUCUCCACCGCCAGCUCCC | 19 | 10424 |
| BCL11A-5982 | − | UCUCUCCACCGCCAGCUCCC | 20 | 10425 |
| BCL11A-8689 | − | GUCUCUCCACCGCCAGCUCCC | 21 | 10426 |
| BCL11A-8690 | − | GGUCUCUCCACCGCCAGCUCCC | 22 | 10427 |
| BCL11A-8691 | − | CGGUCUCUCCACCGCCAGCUCCC | 23 | 10428 |
| BCL11A-8692 | − | ACGGUCUCUCCACCGCCAGCUCCC | 24 | 10429 |
| BCL11A-8693 | − | ACGGCUUCGGGCUGAGCC | 18 | 10430 |
| BCL11A-8694 | − | UACGGCUUCGGGCUGAGCC | 19 | 10431 |
| BCL11A-5986 | − | CUACGGCUUCGGGCUGAGCC | 20 | 10432 |
| BCL11A-8695 | − | ACUACGGCUUCGGGCUGAGCC | 21 | 10433 |
| BCL11A-8696 | − | GACUACGGCUUCGGGCUGAGCC | 22 | 10434 |
| BCL11A-8697 | − | GGACUACGGCUUCGGGCUGAGCC | 23 | 10435 |
| BCL11A-8698 | − | UGGACUACGGCUUCGGGCUGAGCC | 24 | 10436 |
| BCL11A-8699 | − | GCGCUUCUCCACACCGCC | 18 | 10437 |
| BCL11A-8700 | − | UGCGCUUCUCCACACCGCC | 19 | 10438 |
| BCL11A-5987 | − | UUGCGCUUCUCCACACCGCC | 20 | 10439 |
| BCL11A-8701 | − | UUUGCGCUUCUCCACACCGCC | 21 | 10440 |
| BCL11A-8702 | − | GUUUGCGCUUCUCCACACCGCC | 22 | 10441 |
| BCL11A-8703 | − | AGUUUGCGCUUCUCCACACCGCC | 23 | 10442 |
| BCL11A-8704 | − | GAGUUUGCGCUUCUCCACACCGCC | 24 | 10443 |
| BCL11A-8705 | − | CCCACCGCAUAGAGCGCC | 18 | 10444 |
| BCL11A-8706 | − | CCCCACCGCAUAGAGCGCC | 19 | 10445 |
| BCL11A-5988 | − | CCCCCACCGCAUAGAGCGCC | 20 | 10446 |
| BCL11A-8707 | − | ACCCCCACCGCAUAGAGCGCC | 21 | 10447 |
| BCL11A-8708 | − | GACCCCCACCGCAUAGAGCGCC | 22 | 10448 |
| BCL11A-8709 | − | GGACCCCCACCGCAUAGAGCGCC | 23 | 10449 |
| BCL11A-8710 | − | UGGACCCCCACCGCAUAGAGCGCC | 24 | 10450 |
| BCL11A-8711 | − | GGCCACCUGGCCGAGGCC | 18 | 10451 |
| BCL11A-8712 | − | CGGCCACCUGGCCGAGGCC | 19 | 10452 |
| BCL11A-8713 | − | GCGGCCACCUGGCCGAGGCC | 20 | 10453 |
| BCL11A-8714 | − | CGCGGCCACCUGGCCGAGGCC | 21 | 10454 |
| BCL11A-8715 | − | GCGCGGCCACCUGGCCGAGGCC | 22 | 10455 |
| BCL11A-8716 | − | AGCGCGGCCACCUGGCCGAGGCC | 23 | 10456 |
| BCL11A-8717 | − | AAGCGCGGCCACCUGGCCGAGGCC | 24 | 10457 |
| BCL11A-8718 | − | UCCCCGGGCGAGUCGGCC | 18 | 10458 |
| BCL11A-8719 | − | CUCCCCGGGCGAGUCGGCC | 19 | 10459 |
| BCL11A-8720 | − | GCUCCCCGGGCGAGUCGGCC | 20 | 10460 |
| BCL11A-8721 | − | UGCUCCCCGGGCGAGUCGGCC | 21 | 10461 |
| BCL11A-8722 | − | CUGCUCCCCGGGCGAGUCGGCC | 22 | 10462 |
| BCL11A-8723 | − | GCUGCUCCCCGGGCGAGUCGGCC | 23 | 10463 |
| BCL11A-8724 | − | GGCUGCUCCCCGGGCGAGUCGGCC | 24 | 10464 |
| BCL11A-8725 | − | ACGACCCCAACCUGAUCC | 18 | 10465 |
| BCL11A-8726 | − | AACGACCCCAACCUGAUCC | 19 | 10466 |
| BCL11A-6004 | − | GAACGACCCCAACCUGAUCC | 20 | 10467 |
| BCL11A-8727 | − | AGAACGACCCCAACCUGAUCC | 21 | 10468 |
| BCL11A-8728 | − | GAGAACGACCCCAACCUGAUCC | 22 | 10469 |
| BCL11A-8729 | − | CGAGAACGACCCCAACCUGAUCC | 23 | 10470 |
| BCL11A-8730 | − | GCGAGAACGACCCCAACCUGAUCC | 24 | 10471 |
| BCL11A-8731 | − | UCCUCGUCGGAGCACUCC | 18 | 10472 |
| BCL11A-8732 | − | CUCCUCGUCGGAGCACUCC | 19 | 10473 |
| BCL11A-8733 | − | CCUCCUCGUCGGAGCACUCC | 20 | 10474 |
| BCL11A-8734 | − | GCCUCCUCGUCGGAGCACUCC | 21 | 10475 |
| BCL11A-8735 | − | UGCCUCCUCGUCGGAGCACUCC | 22 | 10476 |
| BCL11A-8736 | − | UUGCCUCCUCGUCGGAGCACUCC | 23 | 10477 |
| BCL11A-8737 | − | UUUGCCUCCUCGUCGGAGCACUCC | 24 | 10478 |
| BCL11A-8738 | − | CUCUCCACCGCCAGCUCC | 18 | 10479 |
| BCL11A-8739 | − | UCUCUCCACCGCCAGCUCC | 19 | 10480 |
| BCL11A-8740 | − | GUCUCUCCACCGCCAGCUCC | 20 | 10481 |
| BCL11A-8741 | − | GGUCUCUCCACCGCCAGCUCC | 21 | 10482 |
| BCL11A-8742 | − | CGGUCUCUCCACCGCCAGCUCC | 22 | 10483 |
| BCL11A-8743 | − | ACGGUCUCUCCACCGCCAGCUCC | 23 | 10484 |
| BCL11A-8744 | − | GACGGUCUCUCCACCGCCAGCUCC | 24 | 10485 |
| BCL11A-8745 | − | AAUGGCCGCGGCUGCUCC | 18 | 10486 |
| BCL11A-8746 | − | UAAUGGCCGCGGCUGCUCC | 19 | 10487 |
| BCL11A-8747 | − | UUAAUGGCCGCGGCUGCUCC | 20 | 10488 |
| BCL11A-8748 | − | GUUAAUGGCCGCGGCUGCUCC | 21 | 10489 |
| BCL11A-8749 | − | UGUUAAUGGCCGCGGCUGCUCC | 22 | 10490 |
| BCL11A-8750 | − | CUGUUAAUGGCCGCGGCUGCUCC | 23 | 10491 |
| BCL11A-8751 | − | ACUGUUAAUGGCCGCGGCUGCUCC | 24 | 10492 |
| BCL11A-8752 | − | CUUCCCAGCCACCUCUCC | 18 | 10493 |
| BCL11A-8753 | − | CCUUCCCAGCCACCUCUCC | 19 | 10494 |
| BCL11A-8754 | − | UCCUUCCCAGCCACCUCUCC | 20 | 10495 |
| BCL11A-8755 | − | GUCCUUCCCAGCCACCUCUCC | 21 | 10496 |
| BCL11A-8756 | − | UGUCCUUCCCAGCCACCUCUCC | 22 | 10497 |
| BCL11A-8757 | − | AUGUCCUUCCCAGCCACCUCUCC | 23 | 10498 |
| BCL11A-8758 | − | AAUGUCCUUCCCAGCCACCUCUCC | 24 | 10499 |
| BCL11A-8759 | − | UCUCUAAGCGCAUCAAGC | 18 | 10500 |
| BCL11A-8760 | − | UUCUCUAAGCGCAUCAAGC | 19 | 10501 |
| BCL11A-8761 | − | CUUCUCUAAGCGCAUCAAGC | 20 | 10502 |
| BCL11A-8762 | − | CCUUCUCUAAGCGCAUCAAGC | 21 | 10503 |
| BCL11A-8763 | − | CCCUUCUCUAAGCGCAUCAAGC | 22 | 10504 |
| BCL11A-8764 | − | CCCCUUCUCUAAGCGCAUCAAGC | 23 | 10505 |
| BCL11A-8765 | − | GCCCCUUCUCUAAGCGCAUCAAGC | 24 | 10506 |
| BCL11A-8766 | − | CAGUUUUCGGAUGGAAGC | 18 | 10507 |
| BCL11A-8767 | − | GCAGUUUUCGGAUGGAAGC | 19 | 10508 |
| BCL11A-8768 | − | GGCAGUUUUCGGAUGGAAGC | 20 | 10509 |
| BCL11A-8769 | − | UGGCAGUUUUCGGAUGGAAGC | 21 | 10510 |
| BCL11A-8770 | − | GUGGCAGUUUUCGGAUGGAAGC | 22 | 10511 |
| BCL11A-8771 | − | UGUGGCAGUUUUCGGAUGGAAGC | 23 | 10512 |
| BCL11A-8772 | − | GUGUGGCAGUUUUCGGAUGGAAGC | 24 | 10513 |
| BCL11A-8773 | − | GUGGCCAAGUUCAAGAGC | 18 | 10514 |
| BCL11A-8774 | − | GGUGGCCAAGUUCAAGAGC | 19 | 10515 |
| BCL11A-8775 | − | UGGUGGCCAAGUUCAAGAGC | 20 | 10516 |
| BCL11A-8776 | − | GUGGUGGCCAAGUUCAAGAGC | 21 | 10517 |
| BCL11A-8777 | − | CGUGGUGGCCAAGUUCAAGAGC | 22 | 10518 |
| BCL11A-8778 | − | CCGUGGUGGCCAAGUUCAAGAGC | 23 | 10519 |
| BCL11A-8779 | − | UCCGUGGUGGCCAAGUUCAAGAGC | 24 | 10520 |
| BCL11A-8780 | − | GAGGAGCUGACGGAGAGC | 18 | 10521 |
| BCL11A-8781 | − | GGAGGAGCUGACGGAGAGC | 19 | 10522 |
| BCL11A-8782 | − | AGGAGGAGCUGACGGAGAGC | 20 | 10523 |
| BCL11A-8783 | − | GAGGAGGAGCUGACGGAGAGC | 21 | 10524 |
| BCL11A-8784 | − | GGAGGAGGAGCUGACGGAGAGC | 22 | 10525 |
| BCL11A-8785 | − | AGGAGGAGGAGCUGACGGAGAGC | 23 | 10526 |
| BCL11A-8786 | − | GAGGAGGAGGAGCUGACGGAGAGC | 24 | 10527 |
| BCL11A-8787 | − | UACGGCUUCGGGCUGAGC | 18 | 10528 |
| BCL11A-8788 | − | CUACGGCUUCGGGCUGAGC | 19 | 10529 |
| BCL11A-8789 | − | ACUACGGCUUCGGGCUGAGC | 20 | 10530 |
| BCL11A-8790 | − | GACUACGGCUUCGGGCUGAGC | 21 | 10531 |
| BCL11A-8791 | − | GGACUACGGCUUCGGGCUGAGC | 22 | 10532 |
| BCL11A-8792 | − | UGGACUACGGCUUCGGGCUGAGC | 23 | 10533 |
| BCL11A-8793 | − | GUGGACUACGGCUUCGGGCUGAGC | 24 | 10534 |
| BCL11A-8794 | − | UGCGCUUCUCCACACCGC | 18 | 10535 |
| BCL11A-8795 | − | UUGCGCUUCUCCACACCGC | 19 | 10536 |
| BCL11A-8796 | − | UUUGCGCUUCUCCACACCGC | 20 | 10537 |
| BCL11A-8797 | − | GUUUGCGCUUCUCCACACCGC | 21 | 10538 |
| BCL11A-8798 | − | AGUUUGCGCUUCUCCACACCGC | 22 | 10539 |
| BCL11A-8799 | − | GAGUUUGCGCUUCUCCACACCGC | 23 | 10540 |
| BCL11A-8800 | − | GGAGUUUGCGCUUCUCCACACCGC | 24 | 10541 |
| BCL11A-8801 | − | CCCCACCGCAUAGAGCGC | 18 | 10542 |
| BCL11A-8802 | − | CCCCCACCGCAUAGAGCGC | 19 | 10543 |
| BCL11A-8803 | − | ACCCCCACCGCAUAGAGCGC | 20 | 10544 |
| BCL11A-8804 | − | GACCCCCACCGCAUAGAGCGC | 21 | 10545 |
| BCL11A-8805 | − | GGACCCCCACCGCAUAGAGCGC | 22 | 10546 |
| BCL11A-8806 | − | UGGACCCCCACCGCAUAGAGCGC | 23 | 10547 |
| BCL11A-8807 | − | UUGGACCCCCACCGCAUAGAGCGC | 24 | 10548 |
| BCL11A-8808 | − | AUCUCGGGGCGCAGCGGC | 18 | 10549 |
| BCL11A-8809 | − | GAUCUCGGGGCGCAGCGGC | 19 | 10550 |
| BCL11A-8810 | − | GGAUCUCGGGGCGCAGCGGC | 20 | 10551 |
| BCL11A-8811 | − | GGGAUCUCGGGGCGCAGCGGC | 21 | 10552 |
| BCL11A-8812 | − | AGGGAUCUCGGGGCGCAGCGGC | 22 | 10553 |
| BCL11A-8813 | − | GAGGGAUCUCGGGGCGCAGCGGC | 23 | 10554 |
| BCL11A-8814 | − | GGAGGGAUCUCGGGGCGCAGCGGC | 24 | 10555 |
| BCL11A-8815 | − | CGGCGCAGCCACACGGGC | 18 | 10556 |
| BCL11A-8816 | − | CCGGCGCAGCCACACGGGC | 19 | 10557 |
| BCL11A-3804 | − | ACCGGCGCAGCCACACGGGC | 20 | 10558 |
| BCL11A-8817 | − | CACCGGCGCAGCCACACGGGC | 21 | 10559 |
| BCL11A-8818 | − | GCACCGGCGCAGCCACACGGGC | 22 | 10560 |
| BCL11A-8819 | − | UGCACCGGCGCAGCCACACGGGC | 23 | 10561 |
| BCL11A-8820 | − | GUGCACCGGCGCAGCCACACGGGC | 24 | 10562 |
| BCL11A-8821 | − | CAUAUUAGUGGUCCGGGC | 18 | 10563 |
| BCL11A-8822 | − | CCAUAUUAGUGGUCCGGGC | 19 | 10564 |
| BCL11A-8823 | − | CCCAUAUUAGUGGUCCGGGC | 20 | 10565 |
| BCL11A-8824 | − | CCCCAUAUUAGUGGUCCGGGC | 21 | 10566 |
| BCL11A-8825 | − | GCCCCAUAUUAGUGGUCCGGGC | 22 | 10567 |
| BCL11A-8826 | − | CGCCCCAUAUUAGUGGUCCGGGC | 23 | 10568 |
| BCL11A-8827 | − | ACGCCCCAUAUUAGUGGUCCGGGC | 24 | 10569 |
| BCL11A-8828 | − | UUCCACCAGGUCCUGGGC | 18 | 10570 |
| BCL11A-8829 | − | CUUCCACCAGGUCCUGGGC | 19 | 10571 |
| BCL11A-8830 | − | CCUUCCACCAGGUCCUGGGC | 20 | 10572 |
| BCL11A-8831 | − | GCCUUCCACCAGGUCCUGGGC | 21 | 10573 |
| BCL11A-8832 | − | GGCCUUCCACCAGGUCCUGGGC | 22 | 10574 |
| BCL11A-8833 | − | AGGCCUUCCACCAGGUCCUGGGC | 23 | 10575 |
| BCL11A-8834 | − | GAGGCCUUCCACCAGGUCCUGGGC | 24 | 10576 |
| BCL11A-8835 | − | CGGGGCGCGGUCGUGGGC | 18 | 10577 |
| BCL11A-8836 | − | GCGGGGCGCGGUCGUGGGC | 19 | 10578 |
| BCL11A-8837 | − | CGCGGGGCGCGGUCGUGGGC | 20 | 10579 |
| BCL11A-8838 | − | UCGCGGGGCGCGGUCGUGGGC | 21 | 10580 |
| BCL11A-8839 | − | CUCGCGGGGCGCGGUCGUGGGC | 22 | 10581 |
| BCL11A-8840 | − | GCUCGCGGGGCGCGGUCGUGGGC | 23 | 10582 |
| BCL11A-8841 | − | AGCUCGCGGGGCGCGGUCGUGGGC | 24 | 10583 |
| BCL11A-8842 | − | GAGACUUAGAGAGCUGGC | 18 | 10584 |
| BCL11A-8843 | − | GGAGACUUAGAGAGCUGGC | 19 | 10585 |
| BCL11A-6037 | − | AGGAGACUUAGAGAGCUGGC | 20 | 10586 |
| BCL11A-8844 | − | UAGGAGACUUAGAGAGCUGGC | 21 | 10587 |
| BCL11A-8845 | − | CUAGGAGACUUAGAGAGCUGGC | 22 | 10588 |
| BCL11A-8846 | − | UCUAGGAGACUUAGAGAGCUGGC | 23 | 10589 |
| BCL11A-8847 | − | CUCUAGGAGACUUAGAGAGCUGGC | 24 | 10590 |
| BCL11A-8848 | − | GAGCUGGACGGAGGGAUC | 18 | 10591 |
| BCL11A-8849 | − | GGAGCUGGACGGAGGGAUC | 19 | 10592 |
| BCL11A-8850 | − | GGGAGCUGGACGGAGGGAUC | 20 | 10593 |
| BCL11A-8851 | − | GGGGAGCUGGACGGAGGGAUC | 21 | 10594 |
| BCL11A-8852 | − | CGGGGAGCUGGACGGAGGGAUC | 22 | 10595 |
| BCL11A-8853 | − | CCGGGGAGCUGGACGGAGGGAUC | 23 | 10596 |
| BCL11A-8854 | − | CCCGGGGAGCUGGACGGAGGGAUC | 24 | 10597 |
| BCL11A-8855 | − | AACGACCCCAACCUGAUC | 18 | 10598 |
| BCL11A-8856 | − | GAACGACCCCAACCUGAUC | 19 | 10599 |
| BCL11A-8857 | − | AGAACGACCCCAACCUGAUC | 20 | 10600 |
| BCL11A-8858 | − | GAGAACGACCCCAACCUGAUC | 21 | 10601 |
| BCL11A-8859 | − | CGAGAACGACCCCAACCUGAUC | 22 | 10602 |
| BCL11A-8860 | − | GCGAGAACGACCCCAACCUGAUC | 23 | 10603 |
| BCL11A-8861 | − | AGCGAGAACGACCCCAACCUGAUC | 24 | 10604 |
| BCL11A-8862 | − | AAUACCAGGAUCAGUAUC | 18 | 10605 |
| BCL11A-8863 | − | GAAUACCAGGAUCAGUAUC | 19 | 10606 |
| BCL11A-8864 | − | AGAAUACCAGGAUCAGUAUC | 20 | 10607 |
| BCL11A-8865 | − | AAGAAUACCAGGAUCAGUAUC | 21 | 10608 |
| BCL11A-8866 | − | UAAGAAUACCAGGAUCAGUAUC | 22 | 10609 |
| BCL11A-8867 | − | CUAAGAAUACCAGGAUCAGUAUC | 23 | 10610 |
| BCL11A-8868 | − | GCUAAGAAUACCAGGAUCAGUAUC | 24 | 10611 |
| BCL11A-8869 | − | CCCGGGCGAGUCGGCCUC | 18 | 10612 |
| BCL11A-8870 | − | CCCCGGGCGAGUCGGCCUC | 19 | 10613 |
| BCL11A-6047 | − | UCCCCGGGCGAGUCGGCCUC | 20 | 10614 |
| BCL11A-8871 | − | CUCCCCGGGCGAGUCGGCCUC | 21 | 10615 |
| BCL11A-8872 | − | GCUCCCCGGGCGAGUCGGCCUC | 22 | 10616 |
| BCL11A-8873 | − | UGCUCCCCGGGCGAGUCGGCCUC | 23 | 10617 |
| BCL11A-8874 | − | CUGCUCCCCGGGCGAGUCGGCCUC | 24 | 10618 |
| BCL11A-8875 | − | UCUAAGCGCAUCAAGCUC | 18 | 10619 |
| BCL11A-8876 | − | CUCUAAGCGCAUCAAGCUC | 19 | 10620 |
| BCL11A-8877 | − | UCUCUAAGCGCAUCAAGCUC | 20 | 10621 |
| BCL11A-8878 | − | UUCUCUAAGCGCAUCAAGCUC | 21 | 10622 |
| BCL11A-8879 | − | CUUCUCUAAGCGCAUCAAGCUC | 22 | 10623 |
| BCL11A-8880 | − | CCUUCUCUAAGCGCAUCAAGCUC | 23 | 10624 |
| BCL11A-8881 | − | CCCUUCUCUAAGCGCAUCAAGCUC | 24 | 10625 |
| BCL11A-8882 | − | GUUUUCGGAUGGAAGCUC | 18 | 10626 |
| BCL11A-8883 | − | AGUUUUCGGAUGGAAGCUC | 19 | 10627 |
| BCL11A-8884 | − | CAGUUUUCGGAUGGAAGCUC | 20 | 10628 |
| BCL11A-8885 | − | GCAGUUUUCGGAUGGAAGCUC | 21 | 10629 |
| BCL11A-8886 | − | GGCAGUUUUCGGAUGGAAGCUC | 22 | 10630 |
| BCL11A-8887 | − | UGGCAGUUUUCGGAUGGAAGCUC | 23 | 10631 |
| BCL11A-8888 | − | GUGGCAGUUUUCGGAUGGAAGCUC | 24 | 10632 |
| BCL11A-8889 | − | CCACCACGAGAACAGCUC | 18 | 10633 |
| BCL11A-8890 | − | GCCACCACGAGAACAGCUC | 19 | 10634 |
| BCL11A-8891 | − | CGCCACCACGAGAACAGCUC | 20 | 10635 |
| BCL11A-8892 | − | GCGCCACCACGAGAACAGCUC | 21 | 10636 |
| BCL11A-8893 | − | CGCGCCACCACGAGAACAGCUC | 22 | 10637 |
| BCL11A-8894 | − | GCGCGCCACCACGAGAACAGCUC | 23 | 10638 |
| BCL11A-8895 | − | GGCGCGCCACCACGAGAACAGCUC | 24 | 10639 |
| BCL11A-8896 | − | UCCCGCCAUGGAUUUCUC | 18 | 10640 |
| BCL11A-8897 | − | CUCCCGCCAUGGAUUUCUC | 19 | 10641 |
| BCL11A-8898 | − | CCUCCCGCCAUGGAUUUCUC | 20 | 10642 |
| BCL11A-8899 | − | GCCUCCCGCCAUGGAUUUCUC | 21 | 10643 |
| BCL11A-8900 | − | AGCCUCCCGCCAUGGAUUUCUC | 22 | 10644 |
| BCL11A-8901 | − | GAGCCUCCCGCCAUGGAUUUCUC | 23 | 10645 |
| BCL11A-8902 | − | GGAGCCUCCCGCCAUGGAUUUCUC | 24 | 10646 |
| BCL11A-8903 | − | GAGGCCUUCCACCAGGUC | 18 | 10647 |
| BCL11A-8904 | − | CGAGGCCUUCCACCAGGUC | 19 | 10648 |
| BCL11A-8905 | − | GCGAGGCCUUCCACCAGGUC | 20 | 10649 |
| BCL11A-8906 | − | AGCGAGGCCUUCCACCAGGUC | 21 | 10650 |
| BCL11A-8907 | − | CAGCGAGGCCUUCCACCAGGUC | 22 | 10651 |
| BCL11A-8908 | − | UCAGCGAGGCCUUCCACCAGGUC | 23 | 10652 |
| BCL11A-8909 | − | UUCAGCGAGGCCUUCCACCAGGUC | 24 | 10653 |
| BCL11A-8910 | − | AGCUCGCGGGGCGCGGUC | 18 | 10654 |
| BCL11A-8911 | − | CAGCUCGCGGGGCGCGGUC | 19 | 10655 |
| BCL11A-8912 | − | ACAGCUCGCGGGGCGCGGUC | 20 | 10656 |
| BCL11A-8913 | − | AACAGCUCGCGGGGCGCGGUC | 21 | 10657 |
| BCL11A-8914 | − | GAACAGCUCGCGGGGCGCGGUC | 22 | 10658 |
| BCL11A-8915 | − | AGAACAGCUCGCGGGGCGCGGUC | 23 | 10659 |
| BCL11A-8916 | − | GAGAACAGCUCGCGGGGCGCGGUC | 24 | 10660 |
| BCL11A-8917 | − | UACUGUGGGAAAGUCUUC | 18 | 10661 |
| BCL11A-8918 | − | GUACUGUGGGAAAGUCUUC | 19 | 10662 |
| BCL11A-8919 | − | AGUACUGUGGGAAAGUCUUC | 20 | 10663 |
| BCL11A-8920 | − | GAGUACUGUGGGAAAGUCUUC | 21 | 10664 |
| BCL11A-8921 | − | UGAGUACUGUGGGAAAGUCUUC | 22 | 10665 |
| BCL11A-8922 | − | GUGAGUACUGUGGGAAAGUCUUC | 23 | 10666 |
| BCL11A-8923 | − | UGUGAGUACUGUGGGAAAGUCUUC | 24 | 10667 |
| BCL11A-8924 | − | UCCGUGGUGGCCAAGUUC | 18 | 10668 |
| BCL11A-8925 | − | GUCCGUGGUGGCCAAGUUC | 19 | 10669 |
| BCL11A-8926 | − | AGUCCGUGGUGGCCAAGUUC | 20 | 10670 |
| BCL11A-8927 | − | AAGUCCGUGGUGGCCAAGUUC | 21 | 10671 |
| BCL11A-8928 | − | CAAGUCCGUGGUGGCCAAGUUC | 22 | 10672 |
| BCL11A-8929 | − | UCAAGUCCGUGGUGGCCAAGUUC | 23 | 10673 |
| BCL11A-8930 | − | CUCAAGUCCGUGGUGGCCAAGUUC | 24 | 10674 |
| BCL11A-6826 | − | AUUAUUUUGCAGGUAAAG | 18 | 10675 |
| BCL11A-6827 | − | UAUUAUUUUGCAGGUAAAG | 19 | 10676 |
| BCL11A-6828 | − | GUAUUAUUUUGCAGGUAAAG | 20 | 10677 |
| BCL11A-8931 | − | UGCACCCAGGCCAGCAAG | 18 | 10678 |
| BCL11A-8932 | − | GUGCACCCAGGCCAGCAAG | 19 | 10679 |
| BCL11A-8933 | − | CGUGCACCCAGGCCAGCAAG | 20 | 10680 |
| BCL11A-8934 | − | GCGUGCACCCAGGCCAGCAAG | 21 | 10681 |
| BCL11A-8935 | − | CGCGUGCACCCAGGCCAGCAAG | 22 | 10682 |
| BCL11A-8936 | − | ACGCGUGCACCCAGGCCAGCAAG | 23 | 10683 |
| BCL11A-8937 | − | CACGCGUGCACCCAGGCCAGCAAG | 24 | 10684 |
| BCL11A-8938 | − | ACGAGGAAGAGGAAGAAG | 18 | 10685 |
| BCL11A-8939 | − | GACGAGGAAGAGGAAGAAG | 19 | 10686 |
| BCL11A-3449 | − | CGACGAGGAAGAGGAAGAAG | 20 | 10687 |
| BCL11A-8940 | − | ACGACGAGGAAGAGGAAGAAG | 21 | 10688 |
| BCL11A-8941 | − | GACGACGAGGAAGAGGAAGAAG | 22 | 10689 |
| BCL11A-8942 | − | GGACGACGAGGAAGAGGAAGAAG | 23 | 10690 |
| BCL11A-8943 | − | AGGACGACGAGGAAGAGGAAGAAG | 24 | 10691 |
| BCL11A-8944 | − | ACGACGAGGAAGAGGAAG | 18 | 10692 |
| BCL11A-8945 | − | GACGACGAGGAAGAGGAAG | 19 | 10693 |
| BCL11A-3959 | − | GGACGACGAGGAAGAGGAAG | 20 | 10694 |
| BCL11A-8946 | − | AGGACGACGAGGAAGAGGAAG | 21 | 10695 |
| BCL11A-8947 | − | GAGGACGACGAGGAAGAGGAAG | 22 | 10696 |
| BCL11A-8948 | − | GGAGGACGACGAGGAAGAGGAAG | 23 | 10697 |
| BCL11A-8949 | − | AGGAGGACGACGAGGAAGAGGAAG | 24 | 10698 |
| BCL11A-8950 | − | AGGAGGACGACGAGGAAG | 18 | 10699 |
| BCL11A-8951 | − | GAGGAGGACGACGAGGAAG | 19 | 10700 |
| BCL11A-3448 | − | AGAGGAGGACGACGAGGAAG | 20 | 10701 |
| BCL11A-8952 | − | AAGAGGAGGACGACGAGGAAG | 21 | 10702 |
| BCL11A-8953 | − | GAAGAGGAGGACGACGAGGAAG | 22 | 10703 |
| BCL11A-8954 | − | GGAAGAGGAGGACGACGAGGAAG | 23 | 10704 |
| BCL11A-8955 | − | AGGAAGAGGAGGACGACGAGGAAG | 24 | 10705 |
| BCL11A-8956 | − | AGGAAGAAGAGGAGGAAG | 18 | 10706 |
| BCL11A-8957 | − | GAGGAAGAAGAGGAGGAAG | 19 | 10707 |
| BCL11A-3453 | − | AGAGGAAGAAGAGGAGGAAG | 20 | 10708 |
| BCL11A-8958 | − | AAGAGGAAGAAGAGGAGGAAG | 21 | 10709 |
| BCL11A-8959 | − | GAAGAGGAAGAAGAGGAGGAAG | 22 | 10710 |
| BCL11A-8960 | − | GGAAGAGGAAGAAGAGGAGGAAG | 23 | 10711 |
| BCL11A-8961 | − | AGGAAGAGGAAGAAGAGGAGGAAG | 24 | 10712 |
| BCL11A-8962 | − | ACGGGGACGAGGAGGAAG | 18 | 10713 |
| BCL11A-8963 | − | AACGGGGACGAGGAGGAAG | 19 | 10714 |
| BCL11A-3441 | − | GAACGGGGACGAGGAGGAAG | 20 | 10715 |
| BCL11A-8964 | − | AGAACGGGGACGAGGAGGAAG | 21 | 10716 |
| BCL11A-8965 | − | GAGAACGGGGACGAGGAGGAAG | 22 | 10717 |
| BCL11A-8966 | − | GGAGAACGGGGACGAGGAGGAAG | 23 | 10718 |
| BCL11A-8967 | − | CGGAGAACGGGGACGAGGAGGAAG | 24 | 10719 |
| BCL11A-8968 | − | GCGCAGCGGCACGGGAAG | 18 | 10720 |
| BCL11A-8969 | − | GGCGCAGCGGCACGGGAAG | 19 | 10721 |
| BCL11A-3376 | − | GGGCGCAGCGGCACGGGAAG | 20 | 10722 |
| BCL11A-8970 | − | GGGGCGCAGCGGCACGGGAAG | 21 | 10723 |
| BCL11A-8971 | − | CGGGGCGCAGCGGCACGGGAAG | 22 | 10724 |
| BCL11A-8972 | − | UCGGGGCGCAGCGGCACGGGAAG | 23 | 10725 |
| BCL11A-8973 | − | CUCGGGGCGCAGCGGCACGGGAAG | 24 | 10726 |
| BCL11A-8974 | − | AGGCUUCCGGCCUGGCAG | 18 | 10727 |
| BCL11A-8975 | − | GAGGCUUCCGGCCUGGCAG | 19 | 10728 |
| BCL11A-8976 | − | AGAGGCUUCCGGCCUGGCAG | 20 | 10729 |
| BCL11A-8977 | − | GAGAGGCUUCCGGCCUGGCAG | 21 | 10730 |
| BCL11A-8978 | − | AGAGAGGCUUCCGGCCUGGCAG | 22 | 10731 |
| BCL11A-8979 | − | GAGAGAGGCUUCCGGCCUGGCAG | 23 | 10732 |
| BCL11A-8980 | − | CGAGAGAGGCUUCCGGCCUGGCAG | 24 | 10733 |
| BCL11A-8981 | − | GAGGAAGAGGAAGAAGAG | 18 | 10734 |
| BCL11A-8982 | − | CGAGGAAGAGGAAGAAGAG | 19 | 10735 |
| BCL11A-3948 | − | ACGAGGAAGAGGAAGAAGAG | 20 | 10736 |
| BCL11A-8983 | − | GACGAGGAAGAGGAAGAAGAG | 21 | 10737 |
| BCL11A-8984 | − | CGACGAGGAAGAGGAAGAAGAG | 22 | 10738 |
| BCL11A-8985 | − | ACGACGAGGAAGAGGAAGAAGAG | 23 | 10739 |
| BCL11A-8986 | − | GACGACGAGGAAGAGGAAGAAGAG | 24 | 10740 |
| BCL11A-8987 | − | GAAGAAGAGGAGGAAGAG | 18 | 10741 |
| BCL11A-8988 | − | GGAAGAAGAGGAGGAAGAG | 19 | 10742 |
| BCL11A-3961 | − | AGGAAGAAGAGGAGGAAGAG | 20 | 10743 |
| BCL11A-8989 | − | GAGGAAGAAGAGGAGGAAGAG | 21 | 10744 |
| BCL11A-8990 | − | AGAGGAAGAAGAGGAGGAAGAG | 22 | 10745 |
| BCL11A-8991 | − | AAGAGGAAGAAGAGGAGGAAGAG | 23 | 10746 |
| BCL11A-8992 | − | GAAGAGGAAGAAGAGGAGGAAGAG | 24 | 10747 |
| BCL11A-8993 | − | GGGGACGAGGAGGAAGAG | 18 | 10748 |
| BCL11A-8994 | − | CGGGGACGAGGAGGAAGAG | 19 | 10749 |
| BCL11A-3945 | − | ACGGGGACGAGGAGGAAGAG | 20 | 10750 |
| BCL11A-8995 | − | AACGGGGACGAGGAGGAAGAG | 21 | 10751 |
| BCL11A-8996 | − | GAACGGGGACGAGGAGGAAGAG | 22 | 10752 |
| BCL11A-8997 | − | AGAACGGGGACGAGGAGGAAGAG | 23 | 10753 |
| BCL11A-8998 | − | GAGAACGGGGACGAGGAGGAAGAG | 24 | 10754 |
| BCL11A-8999 | − | CCGGAGAACGGGGACGAG | 18 | 10755 |
| BCL11A-9000 | − | CCCGGAGAACGGGGACGAG | 19 | 10756 |
| BCL11A-9001 | − | UCCCGGAGAACGGGGACGAG | 20 | 10757 |
| BCL11A-9002 | − | AUCCCGGAGAACGGGGACGAG | 21 | 10758 |
| BCL11A-9003 | − | GAUCCCGGAGAACGGGGACGAG | 22 | 10759 |
| BCL11A-9004 | − | UGAUCCCGGAGAACGGGGACGAG | 23 | 10760 |
| BCL11A-9005 | − | CUGAUCCCGGAGAACGGGGACGAG | 24 | 10761 |
| BCL11A-9006 | − | GACUCGGUGGCCGGCGAG | 18 | 10762 |
| BCL11A-9007 | − | AGACUCGGUGGCCGGCGAG | 19 | 10763 |
| BCL11A-9008 | − | AAGACUCGGUGGCCGGCGAG | 20 | 10764 |
| BCL11A-9009 | − | GAAGACUCGGUGGCCGGCGAG | 21 | 10765 |
| BCL11A-9010 | − | CGAAGACUCGGUGGCCGGCGAG | 22 | 10766 |
| BCL11A-9011 | − | ACGAAGACUCGGUGGCCGGCGAG | 23 | 10767 |
| BCL11A-9012 | − | GACGAAGACUCGGUGGCCGGCGAG | 24 | 10768 |
| BCL11A-9013 | − | AAGCGCAUCAAGCUCGAG | 18 | 10769 |
| BCL11A-9014 | − | UAAGCGCAUCAAGCUCGAG | 19 | 10770 |
| BCL11A-9015 | − | CUAAGCGCAUCAAGCUCGAG | 20 | 10771 |
| BCL11A-9016 | − | UCUAAGCGCAUCAAGCUCGAG | 21 | 10772 |
| BCL11A-9017 | − | CUCUAAGCGCAUCAAGCUCGAG | 22 | 10773 |
| BCL11A-9018 | − | UCUCUAAGCGCAUCAAGCUCGAG | 23 | 10774 |
| BCL11A-9019 | − | UUCUCUAAGCGCAUCAAGCUCGAG | 24 | 10775 |
| BCL11A-9020 | − | GAAGAGGAGGAAGAGGAG | 18 | 10776 |
| BCL11A-9021 | − | AGAAGAGGAGGAAGAGGAG | 19 | 10777 |
| BCL11A-3964 | − | AAGAAGAGGAGGAAGAGGAG | 20 | 10778 |
| BCL11A-9022 | − | GAAGAAGAGGAGGAAGAGGAG | 21 | 10779 |
| BCL11A-9023 | − | GGAAGAAGAGGAGGAAGAGGAG | 22 | 10780 |
| BCL11A-9024 | − | AGGAAGAAGAGGAGGAAGAGGAG | 23 | 10781 |
| BCL11A-9025 | − | GAGGAAGAAGAGGAGGAAGAGGAG | 24 | 10782 |
| BCL11A-9026 | − | GAGGAGGAAGAGGAGGAG | 18 | 10783 |
| BCL11A-9027 | − | AGAGGAGGAAGAGGAGGAG | 19 | 10784 |
| BCL11A-3965 | − | AAGAGGAGGAAGAGGAGGAG | 20 | 10785 |
| BCL11A-9028 | − | GAAGAGGAGGAAGAGGAGGAG | 21 | 10786 |
| BCL11A-9029 | − | AGAAGAGGAGGAAGAGGAGGAG | 22 | 10787 |
| BCL11A-9030 | − | AAGAAGAGGAGGAAGAGGAGGAG | 23 | 10788 |
| BCL11A-9031 | − | GAAGAAGAGGAGGAAGAGGAGGAG | 24 | 10789 |
| BCL11A-9032 | − | UCCACACCGCCCGGGGAG | 18 | 10790 |
| BCL11A-9033 | − | CUCCACACCGCCCGGGGAG | 19 | 10791 |
| BCL11A-9034 | − | UCUCCACACCGCCCGGGGAG | 20 | 10792 |
| BCL11A-9035 | − | UUCUCCACACCGCCCGGGGAG | 21 | 10793 |
| BCL11A-9036 | − | CUUCUCCACACCGCCCGGGGAG | 22 | 10794 |
| BCL11A-9037 | − | GCUUCUCCACACCGCCCGGGGAG | 23 | 10795 |
| BCL11A-9038 | − | CGCUUCUCCACACCGCCCGGGGAG | 24 | 10796 |
| BCL11A-9039 | − | GCCGCGAUGCCCAACACG | 18 | 10797 |
| BCL11A-9040 | − | GGCCGCGAUGCCCAACACG | 19 | 10798 |
| BCL11A-9041 | − | CGGCCGCGAUGCCCAACACG | 20 | 10799 |
| BCL11A-9042 | − | CCGGCCGCGAUGCCCAACACG | 21 | 10800 |
| BCL11A-9043 | − | CCCGGCCGCGAUGCCCAACACG | 22 | 10801 |
| BCL11A-9044 | − | CCCCGGCCGCGAUGCCCAACACG | 23 | 10802 |
| BCL11A-9045 | − | CCCCCGGCCGCGAUGCCCAACACG | 24 | 10803 |
| BCL11A-9046 | − | AGGAAGAGGAGGACGACG | 18 | 10804 |
| BCL11A-9047 | − | GAGGAAGAGGAGGACGACG | 19 | 10805 |
| BCL11A-3450 | − | GGAGGAAGAGGAGGACGACG | 20 | 10806 |
| BCL11A-9048 | − | AGGAGGAAGAGGAGGACGACG | 21 | 10807 |
| BCL11A-9049 | − | GAGGAGGAAGAGGAGGACGACG | 22 | 10808 |
| BCL11A-9050 | − | CGAGGAGGAAGAGGAGGACGACG | 23 | 10809 |
| BCL11A-9051 | − | ACGAGGAGGAAGAGGAGGACGACG | 24 | 10810 |
| BCL11A-9052 | − | AGGAGGAAGAGGAGGACG | 18 | 10811 |
| BCL11A-9053 | − | GAGGAGGAAGAGGAGGACG | 19 | 10812 |
| BCL11A-3953 | − | CGAGGAGGAAGAGGAGGACG | 20 | 10813 |
| BCL11A-9054 | − | ACGAGGAGGAAGAGGAGGACG | 21 | 10814 |
| BCL11A-9055 | − | GACGAGGAGGAAGAGGAGGACG | 22 | 10815 |
| BCL11A-9056 | − | GGACGAGGAGGAAGAGGAGGACG | 23 | 10816 |
| BCL11A-9057 | − | GGGACGAGGAGGAAGAGGAGGACG | 24 | 10817 |
| BCL11A-9058 | − | UCCCGGAGAACGGGGACG | 18 | 10818 |
| BCL11A-9059 | − | AUCCCGGAGAACGGGGACG | 19 | 10819 |
| BCL11A-6081 | − | GAUCCCGGAGAACGGGGACG | 20 | 10820 |
| BCL11A-9060 | − | UGAUCCCGGAGAACGGGGACG | 21 | 10821 |
| BCL11A-9061 | − | CUGAUCCCGGAGAACGGGGACG | 22 | 10822 |
| BCL11A-9062 | − | CCUGAUCCCGGAGAACGGGGACG | 23 | 10823 |
| BCL11A-9063 | − | ACCUGAUCCCGGAGAACGGGGACG | 24 | 10824 |
| BCL11A-9064 | − | CGCCCGGGGAGCUGGACG | 18 | 10825 |
| BCL11A-9065 | − | CCGCCCGGGGAGCUGGACG | 19 | 10826 |
| BCL11A-9066 | − | ACCGCCCGGGGAGCUGGACG | 20 | 10827 |
| BCL11A-9067 | − | CACCGCCCGGGGAGCUGGACG | 21 | 10828 |
| BCL11A-9068 | − | ACACCGCCCGGGGAGCUGGACG | 22 | 10829 |
| BCL11A-9069 | − | CACACCGCCCGGGGAGCUGGACG | 23 | 10830 |
| BCL11A-9070 | − | CCACACCGCCCGGGGAGCUGGACG | 24 | 10831 |
| BCL11A-9071 | − | GAGGAGGAGGAGCUGACG | 18 | 10832 |
| BCL11A-9072 | − | GGAGGAGGAGGAGCUGACG | 19 | 10833 |
| BCL11A-9073 | − | AGGAGGAGGAGGAGCUGACG | 20 | 10834 |
| BCL11A-9074 | − | GAGGAGGAGGAGGAGCUGACG | 21 | 10835 |
| BCL11A-9075 | − | AGAGGAGGAGGAGGAGCUGACG | 22 | 10836 |
| BCL11A-9076 | − | AAGAGGAGGAGGAGGAGCUGACG | 23 | 10837 |
| BCL11A-9077 | − | GAAGAGGAGGAGGAGGAGCUGACG | 24 | 10838 |
| BCL11A-9078 | − | GCUUCUCCACACCGCCCG | 18 | 10839 |
| BCL11A-9079 | − | CGCUUCUCCACACCGCCCG | 19 | 10840 |
| BCL11A-6087 | − | GCGCUUCUCCACACCGCCCG | 20 | 10841 |
| BCL11A-9080 | − | UGCGCUUCUCCACACCGCCCG | 21 | 10842 |
| BCL11A-9081 | − | UUGCGCUUCUCCACACCGCCCG | 22 | 10843 |
| BCL11A-9082 | − | UUUGCGCUUCUCCACACCGCCCG | 23 | 10844 |
| BCL11A-9083 | − | GUUUGCGCUUCUCCACACCGCCCG | 24 | 10845 |
| BCL11A-9084 | − | GACCCCAACCUGAUCCCG | 18 | 10846 |
| BCL11A-9085 | − | CGACCCCAACCUGAUCCCG | 19 | 10847 |
| BCL11A-9086 | − | ACGACCCCAACCUGAUCCCG | 20 | 10848 |
| BCL11A-9087 | − | AACGACCCCAACCUGAUCCCG | 21 | 10849 |
| BCL11A-9088 | − | GAACGACCCCAACCUGAUCCCG | 22 | 10850 |
| BCL11A-9089 | − | AGAACGACCCCAACCUGAUCCCG | 23 | 10851 |
| BCL11A-9090 | − | GAGAACGACCCCAACCUGAUCCCG | 24 | 10852 |
| BCL11A-9091 | − | CGGUCGUGGGCGUGGGCG | 18 | 10853 |
| BCL11A-9092 | − | GCGGUCGUGGGCGUGGGCG | 19 | 10854 |
| BCL11A-9093 | − | CGCGGUCGUGGGCGUGGGCG | 20 | 10855 |
| BCL11A-9094 | − | GCGCGGUCGUGGGCGUGGGCG | 21 | 10856 |
| BCL11A-9095 | − | GGCGCGGUCGUGGGCGUGGGCG | 22 | 10857 |
| BCL11A-9096 | − | GGGCGCGGUCGUGGGCGUGGGCG | 23 | 10858 |
| BCL11A-9097 | − | GGGGCGCGGUCGUGGGCGUGGGCG | 24 | 10859 |
| BCL11A-9098 | − | GCCACAGGGACACUUGCG | 18 | 10860 |
| BCL11A-9099 | − | GGCCACAGGGACACUUGCG | 19 | 10861 |
| BCL11A-9100 | − | GGGCCACAGGGACACUUGCG | 20 | 10862 |
| BCL11A-9101 | − | AGGGCCACAGGGACACUUGCG | 21 | 10863 |
| BCL11A-9102 | − | GAGGGCCACAGGGACACUUGCG | 22 | 10864 |
| BCL11A-9103 | − | CGAGGGCCACAGGGACACUUGCG | 23 | 10865 |
| BCL11A-9104 | − | CCGAGGGCCACAGGGACACUUGCG | 24 | 10866 |
| BCL11A-9105 | − | CCGGGCGAGUCGGCCUCG | 18 | 10867 |
| BCL11A-9106 | − | CCCGGGCGAGUCGGCCUCG | 19 | 10868 |
| BCL11A-6106 | − | CCCCGGGCGAGUCGGCCUCG | 20 | 10869 |
| BCL11A-9107 | − | UCCCCGGGCGAGUCGGCCUCG | 21 | 10870 |
| BCL11A-9108 | − | CUCCCCGGGCGAGUCGGCCUCG | 22 | 10871 |
| BCL11A-9109 | − | GCUCCCCGGGCGAGUCGGCCUCG | 23 | 10872 |
| BCL11A-9110 | − | UGCUCCCCGGGCGAGUCGGCCUCG | 24 | 10873 |
| BCL11A-9111 | − | UCGUCGGAGCACUCCUCG | 18 | 10874 |
| BCL11A-9112 | − | CUCGUCGGAGCACUCCUCG | 19 | 10875 |
| BCL11A-9113 | − | CCUCGUCGGAGCACUCCUCG | 20 | 10876 |
| BCL11A-9114 | − | UCCUCGUCGGAGCACUCCUCG | 21 | 10877 |
| BCL11A-9115 | − | CUCCUCGUCGGAGCACUCCUCG | 22 | 10878 |
| BCL11A-9116 | − | CCUCCUCGUCGGAGCACUCCUCG | 23 | 10879 |
| BCL11A-9117 | − | GCCUCCUCGUCGGAGCACUCCUCG | 24 | 10880 |
| BCL11A-9118 | − | UCGCCUUUUGCCUCCUCG | 18 | 10881 |
| BCL11A-9119 | − | AUCGCCUUUUGCCUCCUCG | 19 | 10882 |
| BCL11A-9120 | − | AAUCGCCUUUUGCCUCCUCG | 20 | 10883 |
| BCL11A-9121 | − | CAAUCGCCUUUUGCCUCCUCG | 21 | 10884 |
| BCL11A-9122 | − | ACAAUCGCCUUUUGCCUCCUCG | 22 | 10885 |
| BCL11A-9123 | − | GACAAUCGCCUUUUGCCUCCUCG | 23 | 10886 |
| BCL11A-9124 | − | AGACAAUCGCCUUUUGCCUCCUCG | 24 | 10887 |
| BCL11A-9125 | − | CACCACGAGAACAGCUCG | 18 | 10888 |
| BCL11A-9126 | − | CCACCACGAGAACAGCUCG | 19 | 10889 |
| BCL11A-6107 | − | GCCACCACGAGAACAGCUCG | 20 | 10890 |
| BCL11A-9127 | − | CGCCACCACGAGAACAGCUCG | 21 | 10891 |
| BCL11A-9128 | − | GCGCCACCACGAGAACAGCUCG | 22 | 10892 |
| BCL11A-9129 | − | CGCGCCACCACGAGAACAGCUCG | 23 | 10893 |
| BCL11A-9130 | − | GCGCGCCACCACGAGAACAGCUCG | 24 | 10894 |
| BCL11A-9131 | − | CUGGGCAGCCCCAGCUCG | 18 | 10895 |
| BCL11A-9132 | − | GCUGGGCAGCCCCAGCUCG | 19 | 10896 |
| BCL11A-9133 | − | UGCUGGGCAGCCCCAGCUCG | 20 | 10897 |
| BCL11A-9134 | − | CUGCUGGGCAGCCCCAGCUCG | 21 | 10898 |
| BCL11A-9135 | − | GCUGCUGGGCAGCCCCAGCUCG | 22 | 10899 |
| BCL11A-9136 | − | UGCUGCUGGGCAGCCCCAGCUCG | 23 | 10900 |
| BCL11A-9137 | − | CUGCUGCUGGGCAGCCCCAGCUCG | 24 | 10901 |
| BCL11A-9138 | − | AGGAAGAGGAAGAAGAGG | 18 | 10902 |
| BCL11A-9139 | − | GAGGAAGAGGAAGAAGAGG | 19 | 10903 |
| BCL11A-3451 | − | CGAGGAAGAGGAAGAAGAGG | 20 | 10904 |
| BCL11A-9140 | − | ACGAGGAAGAGGAAGAAGAGG | 21 | 10905 |
| BCL11A-9141 | − | GACGAGGAAGAGGAAGAAGAGG | 22 | 10906 |
| BCL11A-9142 | − | CGACGAGGAAGAGGAAGAAGAGG | 23 | 10907 |
| BCL11A-9143 | − | ACGACGAGGAAGAGGAAGAAGAGG | 24 | 10908 |
| BCL11A-9144 | − | AGGACGACGAGGAAGAGG | 18 | 10909 |
| BCL11A-9145 | − | GAGGACGACGAGGAAGAGG | 19 | 10910 |
| BCL11A-3957 | − | GGAGGACGACGAGGAAGAGG | 20 | 10911 |
| BCL11A-9146 | − | AGGAGGACGACGAGGAAGAGG | 21 | 10912 |
| BCL11A-9147 | − | GAGGAGGACGACGAGGAAGAGG | 22 | 10913 |
| BCL11A-9148 | − | AGAGGAGGACGACGAGGAAGAGG | 23 | 10914 |
| BCL11A-9149 | − | AAGAGGAGGACGACGAGGAAGAGG | 24 | 10915 |
| BCL11A-9150 | − | AAGAAGAGGAGGAAGAGG | 18 | 10916 |
| BCL11A-9151 | − | GAAGAAGAGGAGGAAGAGG | 19 | 10917 |
| BCL11A-3452 | − | GGAAGAAGAGGAGGAAGAGG | 20 | 10918 |
| BCL11A-9152 | − | AGGAAGAAGAGGAGGAAGAGG | 21 | 10919 |
| BCL11A-9153 | − | GAGGAAGAAGAGGAGGAAGAGG | 22 | 10920 |
| BCL11A-9154 | − | AGAGGAAGAAGAGGAGGAAGAGG | 23 | 10921 |
| BCL11A-9155 | − | AAGAGGAAGAAGAGGAGGAAGAGG | 24 | 10922 |
| BCL11A-9156 | − | CUGACGGAGAGCGAGAGG | 18 | 10923 |
| BCL11A-9157 | − | GCUGACGGAGAGCGAGAGG | 19 | 10924 |
| BCL11A-9158 | − | AGCUGACGGAGAGCGAGAGG | 20 | 10925 |
| BCL11A-9159 | − | GAGCUGACGGAGAGCGAGAGG | 21 | 10926 |
| BCL11A-9160 | − | GGAGCUGACGGAGAGCGAGAGG | 22 | 10927 |
| BCL11A-9161 | − | AGGAGCUGACGGAGAGCGAGAGG | 23 | 10928 |
| BCL11A-9162 | − | GAGGAGCUGACGGAGAGCGAGAGG | 24 | 10929 |
| BCL11A-9163 | − | AAGAGGAGGACGACGAGG | 18 | 10930 |
| BCL11A-9164 | − | GAAGAGGAGGACGACGAGG | 19 | 10931 |
| BCL11A-3960 | − | GGAAGAGGAGGACGACGAGG | 20 | 10932 |
| BCL11A-9165 | − | AGGAAGAGGAGGACGACGAGG | 21 | 10933 |
| BCL11A-9166 | − | GAGGAAGAGGAGGACGACGAGG | 22 | 10934 |
| BCL11A-9167 | − | GGAGGAAGAGGAGGACGACGAGG | 23 | 10935 |
| BCL11A-9168 | − | AGGAGGAAGAGGAGGACGACGAGG | 24 | 10936 |
| BCL11A-9169 | − | CGGAGAACGGGGACGAGG | 18 | 10937 |
| BCL11A-9170 | − | CCGGAGAACGGGGACGAGG | 19 | 10938 |
| BCL11A-3330 | − | CCCGGAGAACGGGGACGAGG | 20 | 10939 |
| BCL11A-9171 | − | UCCCGGAGAACGGGGACGAGG | 21 | 10940 |
| BCL11A-9172 | − | AUCCCGGAGAACGGGGACGAGG | 22 | 10941 |
| BCL11A-9173 | − | GAUCCCGGAGAACGGGGACGAGG | 23 | 10942 |
| BCL11A-9174 | − | UGAUCCCGGAGAACGGGGACGAGG | 24 | 10943 |
| BCL11A-9175 | − | GCGGCCACCUGGCCGAGG | 18 | 10944 |
| BCL11A-9176 | − | CGCGGCCACCUGGCCGAGG | 19 | 10945 |
| BCL11A-9177 | − | GCGCGGCCACCUGGCCGAGG | 20 | 10946 |
| BCL11A-9178 | − | AGCGCGGCCACCUGGCCGAGG | 21 | 10947 |
| BCL11A-9179 | − | AAGCGCGGCCACCUGGCCGAGG | 22 | 10948 |
| BCL11A-9180 | − | UAAGCGCGGCCACCUGGCCGAGG | 23 | 10949 |
| BCL11A-9181 | − | AUAAGCGCGGCCACCUGGCCGAGG | 24 | 10950 |
| BCL11A-9182 | − | AAGAGGAAGAAGAGGAGG | 18 | 10951 |
| BCL11A-9183 | − | GAAGAGGAAGAAGAGGAGG | 19 | 10952 |
| BCL11A-3963 | − | GGAAGAGGAAGAAGAGGAGG | 20 | 10953 |
| BCL11A-9184 | − | AGGAAGAGGAAGAAGAGGAGG | 21 | 10954 |
| BCL11A-9185 | − | GAGGAAGAGGAAGAAGAGGAGG | 22 | 10955 |
| BCL11A-9186 | − | CGAGGAAGAGGAAGAAGAGGAGG | 23 | 10956 |
| BCL11A-9187 | − | ACGAGGAAGAGGAAGAAGAGGAGG | 24 | 10957 |
| BCL11A-9188 | − | AAGAGGAGGAAGAGGAGG | 18 | 10958 |
| BCL11A-9189 | − | GAAGAGGAGGAAGAGGAGG | 19 | 10959 |
| BCL11A-3454 | − | AGAAGAGGAGGAAGAGGAGG | 20 | 10960 |
| BCL11A-9190 | − | AAGAAGAGGAGGAAGAGGAGG | 21 | 10961 |
| BCL11A-9191 | − | GAAGAAGAGGAGGAAGAGGAGG | 22 | 10962 |
| BCL11A-9192 | − | GGAAGAAGAGGAGGAAGAGGAGG | 23 | 10963 |
| BCL11A-9193 | − | AGGAAGAAGAGGAGGAAGAGGAGG | 24 | 10964 |
| BCL11A-9194 | − | AGAACGGGGACGAGGAGG | 18 | 10965 |
| BCL11A-9195 | − | GAGAACGGGGACGAGGAGG | 19 | 10966 |
| BCL11A-3918 | − | GGAGAACGGGGACGAGGAGG | 20 | 10967 |
| BCL11A-9196 | − | CGGAGAACGGGGACGAGGAGG | 21 | 10968 |
| BCL11A-9197 | − | CCGGAGAACGGGGACGAGGAGG | 22 | 10969 |
| BCL11A-9198 | − | CCCGGAGAACGGGGACGAGGAGG | 23 | 10970 |
| BCL11A-9199 | − | UCCCGGAGAACGGGGACGAGGAGG | 24 | 10971 |
| BCL11A-9200 | − | AGGAGGAAGAGGAGGAGG | 18 | 10972 |
| BCL11A-9201 | − | GAGGAGGAAGAGGAGGAGG | 19 | 10973 |
| BCL11A-3455 | − | AGAGGAGGAAGAGGAGGAGG | 20 | 10974 |
| BCL11A-9202 | − | AAGAGGAGGAAGAGGAGGAGG | 21 | 10975 |
| BCL11A-9203 | − | GAAGAGGAGGAAGAGGAGGAGG | 22 | 10976 |
| BCL11A-9204 | − | AGAAGAGGAGGAAGAGGAGGAGG | 23 | 10977 |
| BCL11A-9205 | − | AAGAAGAGGAGGAAGAGGAGGAGG | 24 | 10978 |
| BCL11A-9206 | − | ACCGGCGCAGCCACACGG | 18 | 10979 |
| BCL11A-9207 | − | CACCGGCGCAGCCACACGG | 19 | 10980 |
| BCL11A-3764 | − | GCACCGGCGCAGCCACACGG | 20 | 10981 |
| BCL11A-9208 | − | UGCACCGGCGCAGCCACACGG | 21 | 10982 |
| BCL11A-9209 | − | GUGCACCGGCGCAGCCACACGG | 22 | 10983 |
| BCL11A-9210 | − | GGUGCACCGGCGCAGCCACACGG | 23 | 10984 |
| BCL11A-9211 | − | UGGUGCACCGGCGCAGCCACACGG | 24 | 10985 |
| BCL11A-9212 | − | UAGAGCGCCUGGGGGCGG | 18 | 10986 |
| BCL11A-9213 | − | AUAGAGCGCCUGGGGGCGG | 19 | 10987 |
| BCL11A-9214 | − | CAUAGAGCGCCUGGGGGCGG | 20 | 10988 |
| BCL11A-9215 | − | GCAUAGAGCGCCUGGGGGCGG | 21 | 10989 |
| BCL11A-9216 | − | CGCAUAGAGCGCCUGGGGGCGG | 22 | 10990 |
| BCL11A-9217 | − | CCGCAUAGAGCGCCUGGGGGCGG | 23 | 10991 |
| BCL11A-9218 | − | ACCGCAUAGAGCGCCUGGGGGCGG | 24 | 10992 |
| BCL11A-9219 | − | AUGUGUGGCAGUUUUCGG | 18 | 10993 |
| BCL11A-9220 | − | GAUGUGUGGCAGUUUUCGG | 19 | 10994 |
| BCL11A-9221 | − | AGAUGUGUGGCAGUUUUCGG | 20 | 10995 |
| BCL11A-9222 | − | AAGAUGUGUGGCAGUUUUCGG | 21 | 10996 |
| BCL11A-9223 | − | CAAGAUGUGUGGCAGUUUUCGG | 22 | 10997 |
| BCL11A-9224 | − | UCAAGAUGUGUGGCAGUUUUCGG | 23 | 10998 |
| BCL11A-9225 | − | CUCAAGAUGUGUGGCAGUUUUCGG | 24 | 10999 |
| BCL11A-9226 | − | AAUUUGAAGCCCCCAGGG | 18 | 11000 |
| BCL11A-9227 | − | AAAUUUGAAGCCCCCAGGG | 19 | 11001 |
| BCL11A-9228 | − | AAAAUUUGAAGCCCCCAGGG | 20 | 11002 |
| BCL11A-9229 | − | GAAAAUUUGAAGCCCCCAGGG | 21 | 11003 |
| BCL11A-9230 | − | AGAAAAUUUGAAGCCCCCAGGG | 22 | 11004 |
| BCL11A-9231 | − | GAGAAAAUUUGAAGCCCCCAGGG | 23 | 11005 |
| BCL11A-9232 | − | UGAGAAAAUUUGAAGCCCCCAGGG | 24 | 11006 |
| BCL11A-9233 | − | GUGGACUACGGCUUCGGG | 18 | 11007 |
| BCL11A-9234 | − | GGUGGACUACGGCUUCGGG | 19 | 11008 |
| BCL11A-9235 | − | GGGUGGACUACGGCUUCGGG | 20 | 11009 |
| BCL11A-9236 | − | AGGGUGGACUACGGCUUCGGG | 21 | 11010 |
| BCL11A-9237 | − | GAGGGUGGACUACGGCUUCGGG | 22 | 11011 |
| BCL11A-9238 | − | AGAGGGUGGACUACGGCUUCGGG | 23 | 11012 |
| BCL11A-9239 | − | GAGAGGGUGGACUACGGCUUCGGG | 24 | 11013 |
| BCL11A-9240 | − | UGAUCCCGGAGAACGGGG | 18 | 11014 |
| BCL11A-9241 | − | CUGAUCCCGGAGAACGGGG | 19 | 11015 |
| BCL11A-9242 | − | CCUGAUCCCGGAGAACGGGG | 20 | 11016 |
| BCL11A-9243 | − | ACCUGAUCCCGGAGAACGGGG | 21 | 11017 |
| BCL11A-9244 | − | AACCUGAUCCCGGAGAACGGGG | 22 | 11018 |
| BCL11A-9245 | − | CAACCUGAUCCCGGAGAACGGGG | 23 | 11019 |
| BCL11A-9246 | − | CCAACCUGAUCCCGGAGAACGGGG | 24 | 11020 |
| BCL11A-9247 | − | GCAUAGAGCGCCUGGGGG | 18 | 11021 |
| BCL11A-9248 | − | CGCAUAGAGCGCCUGGGGG | 19 | 11022 |
| BCL11A-6143 | − | CCGCAUAGAGCGCCUGGGGG | 20 | 11023 |
| BCL11A-9249 | − | ACCGCAUAGAGCGCCUGGGGG | 21 | 11024 |
| BCL11A-9250 | − | CACCGCAUAGAGCGCCUGGGGG | 22 | 11025 |
| BCL11A-9251 | − | CCACCGCAUAGAGCGCCUGGGGG | 23 | 11026 |
| BCL11A-9252 | − | CCCACCGCAUAGAGCGCCUGGGGG | 24 | 11027 |
| BCL11A-9253 | − | CGCAUAGAGCGCCUGGGG | 18 | 11028 |
| BCL11A-9254 | − | CCGCAUAGAGCGCCUGGGG | 19 | 11029 |
| BCL11A-9255 | − | ACCGCAUAGAGCGCCUGGGG | 20 | 11030 |
| BCL11A-9256 | − | CACCGCAUAGAGCGCCUGGGG | 21 | 11031 |
| BCL11A-9257 | − | CCACCGCAUAGAGCGCCUGGGG | 22 | 11032 |
| BCL11A-9258 | − | CCCACCGCAUAGAGCGCCUGGGG | 23 | 11033 |
| BCL11A-9259 | − | CCCCACCGCAUAGAGCGCCUGGGG | 24 | 11034 |
| BCL11A-9260 | − | AUAAGCGCGGCCACCUGG | 18 | 11035 |
| BCL11A-9261 | − | CAUAAGCGCGGCCACCUGG | 19 | 11036 |
| BCL11A-9262 | − | GCAUAAGCGCGGCCACCUGG | 20 | 11037 |
| BCL11A-9263 | − | AGCAUAAGCGCGGCCACCUGG | 21 | 11038 |
| BCL11A-9264 | − | AAGCAUAAGCGCGGCCACCUGG | 22 | 11039 |
| BCL11A-9265 | − | GAAGCAUAAGCGCGGCCACCUGG | 23 | 11040 |
| BCL11A-9266 | − | AGAAGCAUAAGCGCGGCCACCUGG | 24 | 11041 |
| BCL11A-9267 | − | GAGAGGCUUCCGGCCUGG | 18 | 11042 |
| BCL11A-9268 | − | AGAGAGGCUUCCGGCCUGG | 19 | 11043 |
| BCL11A-9269 | − | GAGAGAGGCUUCCGGCCUGG | 20 | 11044 |
| BCL11A-9270 | − | CGAGAGAGGCUUCCGGCCUGG | 21 | 11045 |
| BCL11A-9271 | − | UCGAGAGAGGCUUCCGGCCUGG | 22 | 11046 |
| BCL11A-9272 | − | AUCGAGAGAGGCUUCCGGCCUGG | 23 | 11047 |
| BCL11A-9273 | − | UAUCGAGAGAGGCUUCCGGCCUGG | 24 | 11048 |
| BCL11A-9274 | − | CCUUCCACCAGGUCCUGG | 18 | 11049 |
| BCL11A-9275 | − | GCCUUCCACCAGGUCCUGG | 19 | 11050 |
| BCL11A-9276 | − | GGCCUUCCACCAGGUCCUGG | 20 | 11051 |
| BCL11A-9277 | − | AGGCCUUCCACCAGGUCCUGG | 21 | 11052 |
| BCL11A-9278 | − | GAGGCCUUCCACCAGGUCCUGG | 22 | 11053 |
| BCL11A-9279 | − | CGAGGCCUUCCACCAGGUCCUGG | 23 | 11054 |
| BCL11A-9280 | − | GCGAGGCCUUCCACCAGGUCCUGG | 24 | 11055 |
| BCL11A-9281 | − | GGAGACUUAGAGAGCUGG | 18 | 11056 |
| BCL11A-9282 | − | AGGAGACUUAGAGAGCUGG | 19 | 11057 |
| BCL11A-9283 | − | UAGGAGACUUAGAGAGCUGG | 20 | 11058 |
| BCL11A-9284 | − | CUAGGAGACUUAGAGAGCUGG | 21 | 11059 |
| BCL11A-9285 | − | UCUAGGAGACUUAGAGAGCUGG | 22 | 11060 |
| BCL11A-9286 | − | CUCUAGGAGACUUAGAGAGCUGG | 23 | 11061 |
| BCL11A-9287 | − | UCUCUAGGAGACUUAGAGAGCUGG | 24 | 11062 |
| BCL11A-9288 | − | CACCGCCCGGGGAGCUGG | 18 | 11063 |
| BCL11A-9289 | − | ACACCGCCCGGGGAGCUGG | 19 | 11064 |
| BCL11A-9290 | − | CACACCGCCCGGGGAGCUGG | 20 | 11065 |
| BCL11A-9291 | − | CCACACCGCCCGGGGAGCUGG | 21 | 11066 |
| BCL11A-9292 | − | UCCACACCGCCCGGGGAGCUGG | 22 | 11067 |
| BCL11A-9293 | − | CUCCACACCGCCCGGGGAGCUGG | 23 | 11068 |
| BCL11A-9294 | − | UCUCCACACCGCCCGGGGAGCUGG | 24 | 11069 |
| BCL11A-9295 | − | CAGCGGCACGGGAAGUGG | 18 | 11070 |
| BCL11A-9296 | − | GCAGCGGCACGGGAAGUGG | 19 | 11071 |
| BCL11A-6157 | − | CGCAGCGGCACGGGAAGUGG | 20 | 11072 |
| BCL11A-9297 | − | GCGCAGCGGCACGGGAAGUGG | 21 | 11073 |
| BCL11A-9298 | − | GGCGCAGCGGCACGGGAAGUGG | 22 | 11074 |
| BCL11A-9299 | − | GGGCGCAGCGGCACGGGAAGUGG | 23 | 11075 |
| BCL11A-9300 | − | GGGGCGCAGCGGCACGGGAAGUGG | 24 | 11076 |
| BCL11A-9301 | − | GCCCUGCCCGACGUCAUG | 18 | 11077 |
| BCL11A-9302 | − | CGCCCUGCCCGACGUCAUG | 19 | 11078 |
| BCL11A-9303 | − | GCGCCCUGCCCGACGUCAUG | 20 | 11079 |
| BCL11A-9304 | − | CGCGCCCUGCCCGACGUCAUG | 21 | 11080 |
| BCL11A-9305 | − | CCGCGCCCUGCCCGACGUCAUG | 22 | 11081 |
| BCL11A-9306 | − | GCCGCGCCCUGCCCGACGUCAUG | 23 | 11082 |
| BCL11A-9307 | − | AGCCGCGCCCUGCCCGACGUCAUG | 24 | 11083 |
| BCL11A-9308 | − | CGACACUUGUGAGUACUG | 18 | 11084 |
| BCL11A-9309 | − | GCGACACUUGUGAGUACUG | 19 | 11085 |
| BCL11A-6169 | − | AGCGACACUUGUGAGUACUG | 20 | 11086 |
| BCL11A-9310 | − | CAGCGACACUUGUGAGUACUG | 21 | 11087 |
| BCL11A-9311 | − | GCAGCGACACUUGUGAGUACUG | 22 | 11088 |
| BCL11A-9312 | − | CGCAGCGACACUUGUGAGUACUG | 23 | 11089 |
| BCL11A-9313 | − | ACGCAGCGACACUUGUGAGUACUG | 24 | 11090 |
| BCL11A-9314 | − | GAGGAGGAGGAGGAGCUG | 18 | 11091 |
| BCL11A-9315 | − | AGAGGAGGAGGAGGAGCUG | 19 | 11092 |
| BCL11A-9316 | − | AAGAGGAGGAGGAGGAGCUG | 20 | 11093 |
| BCL11A-9317 | − | GAAGAGGAGGAGGAGGAGCUG | 21 | 11094 |
| BCL11A-9318 | − | GGAAGAGGAGGAGGAGGAGCUG | 22 | 11095 |
| BCL11A-9319 | − | AGGAAGAGGAGGAGGAGGAGCUG | 23 | 11096 |
| BCL11A-9320 | − | GAGGAAGAGGAGGAGGAGGAGCUG | 24 | 11097 |
| BCL11A-9321 | − | CUGUCCAAAAAGCUGCUG | 18 | 11098 |
| BCL11A-9322 | − | CCUGUCCAAAAAGCUGCUG | 19 | 11099 |
| BCL11A-9323 | − | GCCUGUCCAAAAAGCUGCUG | 20 | 11100 |
| BCL11A-9324 | − | GGCCUGUCCAAAAAGCUGCUG | 21 | 11101 |
| BCL11A-9325 | − | GGGCCUGUCCAAAAAGCUGCUG | 22 | 11102 |
| BCL11A-9326 | − | GGGGCCUGUCCAAAAAGCUGCUG | 23 | 11103 |
| BCL11A-9327 | − | GGGGGCCUGUCCAAAAAGCUGCUG | 24 | 11104 |
| BCL11A-9328 | − | GCAGCGGCACGGGAAGUG | 18 | 11105 |
| BCL11A-9329 | − | CGCAGCGGCACGGGAAGUG | 19 | 11106 |
| BCL11A-9330 | − | GCGCAGCGGCACGGGAAGUG | 20 | 11107 |
| BCL11A-9331 | − | GGCGCAGCGGCACGGGAAGUG | 21 | 11108 |
| BCL11A-9332 | − | GGGCGCAGCGGCACGGGAAGUG | 22 | 11109 |
| BCL11A-9333 | − | GGGGCGCAGCGGCACGGGAAGUG | 23 | 11110 |
| BCL11A-9334 | − | CGGGGCGCAGCGGCACGGGAAGUG | 24 | 11111 |
| BCL11A-9335 | − | CCCGGCACCAGCGACUUG | 18 | 11112 |
| BCL11A-9336 | − | ACCCGGCACCAGCGACUUG | 19 | 11113 |
| BCL11A-9337 | − | AACCCGGCACCAGCGACUUG | 20 | 11114 |
| BCL11A-9338 | − | GAACCCGGCACCAGCGACUUG | 21 | 11115 |
| BCL11A-9339 | − | GGAACCCGGCACCAGCGACUUG | 22 | 11116 |
| BCL11A-9340 | − | CGGAACCCGGCACCAGCGACUUG | 23 | 11117 |
| BCL11A-9341 | − | CCGGAACCCGGCACCAGCGACUUG | 24 | 11118 |
| BCL11A-9342 | − | CUUAAGUUCUGAGAAAAU | 18 | 11119 |
| BCL11A-9343 | − | CCUUAAGUUCUGAGAAAAU | 19 | 11120 |
| BCL11A-9344 | − | CCCUUAAGUUCUGAGAAAAU | 20 | 11121 |
| BCL11A-9345 | − | GCCCUUAAGUUCUGAGAAAAU | 21 | 11122 |
| BCL11A-9346 | − | AGCCCUUAAGUUCUGAGAAAAU | 22 | 11123 |
| BCL11A-9347 | − | GAGCCCUUAAGUUCUGAGAAAAU | 23 | 11124 |
| BCL11A-9348 | − | AGAGCCCUUAAGUUCUGAGAAAAU | 24 | 11125 |
| BCL11A-9349 | − | GGAUUUCUCUAGGAGACU | 18 | 11126 |
| BCL11A-9350 | − | UGGAUUUCUCUAGGAGACU | 19 | 11127 |
| BCL11A-9351 | − | AUGGAUUUCUCUAGGAGACU | 20 | 11128 |
| BCL11A-9352 | − | CAUGGAUUUCUCUAGGAGACU | 21 | 11129 |
| BCL11A-9353 | − | CCAUGGAUUUCUCUAGGAGACU | 22 | 11130 |
| BCL11A-9354 | − | GCCAUGGAUUUCUCUAGGAGACU | 23 | 11131 |
| BCL11A-9355 | − | CGCCAUGGAUUUCUCUAGGAGACU | 24 | 11132 |
| BCL11A-9356 | − | AUGGAUUAAGAAUCUACU | 18 | 11133 |
| BCL11A-9357 | − | CAUGGAUUAAGAAUCUACU | 19 | 11134 |
| BCL11A-9358 | − | UCAUGGAUUAAGAAUCUACU | 20 | 11135 |
| BCL11A-9359 | − | CUCAUGGAUUAAGAAUCUACU | 21 | 11136 |
| BCL11A-9360 | − | ACUCAUGGAUUAAGAAUCUACU | 22 | 11137 |
| BCL11A-9361 | − | CACUCAUGGAUUAAGAAUCUACU | 23 | 11138 |
| BCL11A-9362 | − | ACACUCAUGGAUUAAGAAUCUACU | 24 | 11139 |
| BCL11A-9363 | − | GCGACACUUGUGAGUACU | 18 | 11140 |
| BCL11A-9364 | − | AGCGACACUUGUGAGUACU | 19 | 11141 |
| BCL11A-9365 | − | CAGCGACACUUGUGAGUACU | 20 | 11142 |
| BCL11A-9366 | − | GCAGCGACACUUGUGAGUACU | 21 | 11143 |
| BCL11A-9367 | − | CGCAGCGACACUUGUGAGUACU | 22 | 11144 |
| BCL11A-9368 | − | ACGCAGCGACACUUGUGAGUACU | 23 | 11145 |
| BCL11A-9369 | − | GACGCAGCGACACUUGUGAGUACU | 24 | 11146 |
| BCL11A-9370 | − | CCACCGCAUAGAGCGCCU | 18 | 11147 |
| BCL11A-9371 | − | CCCACCGCAUAGAGCGCCU | 19 | 11148 |
| BCL11A-6197 | − | CCCCACCGCAUAGAGCGCCU | 20 | 11149 |
| BCL11A-9372 | − | CCCCCACCGCAUAGAGCGCCU | 21 | 11150 |
| BCL11A-9373 | − | ACCCCCACCGCAUAGAGCGCCU | 22 | 11151 |
| BCL11A-9374 | − | GACCCCCACCGCAUAGAGCGCCU | 23 | 11152 |
| BCL11A-9375 | − | GGACCCCCACCGCAUAGAGCGCCU | 24 | 11153 |
| BCL11A-9376 | − | CCCCGGGCGAGUCGGCCU | 18 | 11154 |
| BCL11A-9377 | − | UCCCCGGGCGAGUCGGCCU | 19 | 11155 |
| BCL11A-6200 | − | CUCCCCGGGCGAGUCGGCCU | 20 | 11156 |
| BCL11A-9378 | − | GCUCCCCGGGCGAGUCGGCCU | 21 | 11157 |
| BCL11A-9379 | − | UGCUCCCCGGGCGAGUCGGCCU | 22 | 11158 |
| BCL11A-9380 | − | CUGCUCCCCGGGCGAGUCGGCCU | 23 | 11159 |
| BCL11A-9381 | − | GCUGCUCCCCGGGCGAGUCGGCCU | 24 | 11160 |
| BCL11A-9382 | − | CCUCGUCGGAGCACUCCU | 18 | 11161 |
| BCL11A-9383 | − | UCCUCGUCGGAGCACUCCU | 19 | 11162 |
| BCL11A-6202 | − | CUCCUCGUCGGAGCACUCCU | 20 | 11163 |
| BCL11A-9384 | − | CCUCCUCGUCGGAGCACUCCU | 21 | 11164 |
| BCL11A-9385 | − | GCCUCCUCGUCGGAGCACUCCU | 22 | 11165 |
| BCL11A-9386 | − | UGCCUCCUCGUCGGAGCACUCCU | 23 | 11166 |
| BCL11A-9387 | − | UUGCCUCCUCGUCGGAGCACUCCU | 24 | 11167 |
| BCL11A-9388 | − | AAGAUCCCUUCCUUAGCU | 18 | 11168 |
| BCL11A-9389 | − | AAAGAUCCCUUCCUUAGCU | 19 | 11169 |
| BCL11A-9390 | − | CAAAGAUCCCUUCCUUAGCU | 20 | 11170 |
| BCL11A-9391 | − | UCAAAGAUCCCUUCCUUAGCU | 21 | 11171 |
| BCL11A-9392 | − | CUCAAAGAUCCCUUCCUUAGCU | 22 | 11172 |
| BCL11A-9393 | − | GCUCAAAGAUCCCUUCCUUAGCU | 23 | 11173 |
| BCL11A-9394 | − | AGCUCAAAGAUCCCUUCCUUAGCU | 24 | 11174 |
| BCL11A-9395 | − | AGAGGGUGGACUACGGCU | 18 | 11175 |
| BCL11A-9396 | − | GAGAGGGUGGACUACGGCU | 19 | 11176 |
| BCL11A-9397 | − | CGAGAGGGUGGACUACGGCU | 20 | 11177 |
| BCL11A-9398 | − | GCGAGAGGGUGGACUACGGCU | 21 | 11178 |
| BCL11A-9399 | − | AGCGAGAGGGUGGACUACGGCU | 22 | 11179 |
| BCL11A-9400 | − | GAGCGAGAGGGUGGACUACGGCU | 23 | 11180 |
| BCL11A-9401 | − | AGAGCGAGAGGGUGGACUACGGCU | 24 | 11181 |
| BCL11A-9402 | − | CGGUUGAAUCCAAUGGCU | 18 | 11182 |
| BCL11A-9403 | − | GCGGUUGAAUCCAAUGGCU | 19 | 11183 |
| BCL11A-9404 | − | UGCGGUUGAAUCCAAUGGCU | 20 | 11184 |
| BCL11A-9405 | − | CUGCGGUUGAAUCCAAUGGCU | 21 | 11185 |
| BCL11A-9406 | − | GCUGCGGUUGAAUCCAAUGGCU | 22 | 11186 |
| BCL11A-9407 | − | UGCUGCGGUUGAAUCCAAUGGCU | 23 | 11187 |
| BCL11A-9408 | − | GUGCUGCGGUUGAAUCCAAUGGCU | 24 | 11188 |
| BCL11A-9409 | − | AGCUGGACGGAGGGAUCU | 18 | 11189 |
| BCL11A-9410 | − | GAGCUGGACGGAGGGAUCU | 19 | 11190 |
| BCL11A-6210 | − | GGAGCUGGACGGAGGGAUCU | 20 | 11191 |
| BCL11A-9411 | − | GGGAGCUGGACGGAGGGAUCU | 21 | 11192 |
| BCL11A-9412 | − | GGGGAGCUGGACGGAGGGAUCU | 22 | 11193 |
| BCL11A-9413 | − | CGGGGAGCUGGACGGAGGGAUCU | 23 | 11194 |
| BCL11A-9414 | − | CCGGGGAGCUGGACGGAGGGAUCU | 24 | 11195 |
| BCL11A-9415 | − | CCCGCCAUGGAUUUCUCU | 18 | 11196 |
| BCL11A-9416 | − | UCCCGCCAUGGAUUUCUCU | 19 | 11197 |
| BCL11A-6212 | − | CUCCCGCCAUGGAUUUCUCU | 20 | 11198 |
| BCL11A-9417 | − | CCUCCCGCCAUGGAUUUCUCU | 21 | 11199 |
| BCL11A-9418 | − | GCCUCCCGCCAUGGAUUUCUCU | 22 | 11200 |
| BCL11A-9419 | − | AGCCUCCCGCCAUGGAUUUCUCU | 23 | 11201 |
| BCL11A-9420 | − | GAGCCUCCCGCCAUGGAUUUCUCU | 24 | 11202 |
| BCL11A-9421 | − | CGAGAGCCCUUAAGUUCU | 18 | 11203 |
| BCL11A-9422 | − | UCGAGAGCCCUUAAGUUCU | 19 | 11204 |
| BCL11A-9423 | − | CUCGAGAGCCCUUAAGUUCU | 20 | 11205 |
| BCL11A-9424 | − | GCUCGAGAGCCCUUAAGUUCU | 21 | 11206 |
| BCL11A-9425 | − | AGCUCGAGAGCCCUUAAGUUCU | 22 | 11207 |
| BCL11A-9426 | − | AAGCUCGAGAGCCCUUAAGUUCU | 23 | 11208 |
| BCL11A-9427 | − | GAAGCUCGAGAGCCCUUAAGUUCU | 24 | 11209 |
| BCL11A-9428 | − | CGCCUUUUGCCUCCUCGU | 18 | 11210 |
| BCL11A-9429 | − | UCGCCUUUUGCCUCCUCGU | 19 | 11211 |
| BCL11A-6220 | − | AUCGCCUUUUGCCUCCUCGU | 20 | 11212 |
| BCL11A-9430 | − | AAUCGCCUUUUGCCUCCUCGU | 21 | 11213 |
| BCL11A-9431 | − | CAAUCGCCUUUUGCCUCCUCGU | 22 | 11214 |
| BCL11A-9432 | − | ACAAUCGCCUUUUGCCUCCUCGU | 23 | 11215 |
| BCL11A-9433 | − | GACAAUCGCCUUUUGCCUCCUCGU | 24 | 11216 |
| BCL11A-9434 | − | ACGCCCCAUAUUAGUGGU | 18 | 11217 |
| BCL11A-9435 | − | CACGCCCCAUAUUAGUGGU | 19 | 11218 |
| BCL11A-9436 | − | GCACGCCCCAUAUUAGUGGU | 20 | 11219 |
| BCL11A-9437 | − | AGCACGCCCCAUAUUAGUGGU | 21 | 11220 |
| BCL11A-9438 | − | GAGCACGCCCCAUAUUAGUGGU | 22 | 11221 |
| BCL11A-9439 | − | GGAGCACGCCCCAUAUUAGUGGU | 23 | 11222 |
| BCL11A-9440 | − | GGGAGCACGCCCCAUAUUAGUGGU | 24 | 11223 |
| BCL11A-9441 | − | GACACUUGUGAGUACUGU | 18 | 11224 |
| BCL11A-9442 | − | CGACACUUGUGAGUACUGU | 19 | 11225 |
| BCL11A-6230 | − | GCGACACUUGUGAGUACUGU | 20 | 11226 |
| BCL11A-9443 | − | AGCGACACUUGUGAGUACUGU | 21 | 11227 |
| BCL11A-9444 | − | CAGCGACACUUGUGAGUACUGU | 22 | 11228 |
| BCL11A-9445 | − | GCAGCGACACUUGUGAGUACUGU | 23 | 11229 |
| BCL11A-9446 | − | CGCAGCGACACUUGUGAGUACUGU | 24 | 11230 |
| BCL11A-9447 | − | CGCGGGUUGGUAUCCCUU | 18 | 11231 |
| BCL11A-9448 | − | CCGCGGGUUGGUAUCCCUU | 19 | 11232 |
| BCL11A-9449 | − | CCCGCGGGUUGGUAUCCCUU | 20 | 11233 |
| BCL11A-9450 | − | CCCCGCGGGUUGGUAUCCCUU | 21 | 11234 |
| BCL11A-9451 | − | ACCCCGCGGGUUGGUAUCCCUU | 22 | 11235 |
| BCL11A-9452 | − | GACCCCGCGGGUUGGUAUCCCUU | 23 | 11236 |
| BCL11A-9453 | − | UGACCCCGCGGGUUGGUAUCCCUU | 24 | 11237 |
| BCL11A-9454 | − | AGAUCCCUUCCUUAGCUU | 18 | 11238 |
| BCL11A-9455 | − | AAGAUCCCUUCCUUAGCUU | 19 | 11239 |
| BCL11A-6234 | − | AAAGAUCCCUUCCUUAGCUU | 20 | 11240 |
| BCL11A-9456 | − | CAAAGAUCCCUUCCUUAGCUU | 21 | 11241 |
| BCL11A-9457 | − | UCAAAGAUCCCUUCCUUAGCUU | 22 | 11242 |
| BCL11A-9458 | − | CUCAAAGAUCCCUUCCUUAGCUU | 23 | 11243 |
| BCL11A-9459 | − | GCUCAAAGAUCCCUUCCUUAGCUU | 24 | 11244 |
| BCL11A-9460 | − | CUCGAGAGCCCUUAAGUU | 18 | 11245 |
| BCL11A-9461 | − | GCUCGAGAGCCCUUAAGUU | 19 | 11246 |
| BCL11A-9462 | − | AGCUCGAGAGCCCUUAAGUU | 20 | 11247 |
| BCL11A-9463 | − | AAGCUCGAGAGCCCUUAAGUU | 21 | 11248 |
| BCL11A-9464 | − | GAAGCUCGAGAGCCCUUAAGUU | 22 | 11249 |
| BCL11A-9465 | − | GGAAGCUCGAGAGCCCUUAAGUU | 23 | 11250 |
| BCL11A-9466 | − | UGGAAGCUCGAGAGCCCUUAAGUU | 24 | 11251 |
| BCL11A-9467 | − | GGCAAGACGUUCAAAUUU | 18 | 11252 |
| BCL11A-9468 | − | CGGCAAGACGUUCAAAUUU | 19 | 11253 |
| BCL11A-9469 | − | GCGGCAAGACGUUCAAAUUU | 20 | 11254 |
| BCL11A-9470 | − | UGCGGCAAGACGUUCAAAUUU | 21 | 11255 |
| BCL11A-9471 | − | CUGCGGCAAGACGUUCAAAUUU | 22 | 11256 |
| BCL11A-9472 | − | UCUGCGGCAAGACGUUCAAAUUU | 23 | 11257 |
| BCL11A-9473 | − | UUCUGCGGCAAGACGUUCAAAUUU | 24 | 11258 |

[1096] Table 17A provides exemplary targeting domains for knocking out the BCL11A gene selected according to the first tier parameters. The targeting domains bind within the first 500 bp of the coding sequence (e.g., within 500 bp downstream from the start codon) and have a high level of orthogonality. It is contemplated herein that in an embodiment the targeting domain hybridizes to the target domain through complementary base pairing. Any of the targeting domains in the table can be used with a N. meningitidis Cas9 molecule that generates a double stranded break (Cas9 nuclease) or a single-stranded break (Cas9 nickase).

TABLE 17A
1st Tier

| | | | Target | |
|---|---|---|---|---|
| | DNA | | Site | SEQ ID |
| gRNA Name | Strand | Targeting Domain | Length | NO: |
| BCL11A-9474 | + | CGAUUGGUGAAGGGGAA | 17 | 11259 |
| BCL11A-9475 | + | AUUGGAUGCUUUUUUCA | 17 | 11260 |
| BCL11A-9476 | − | CAGGUCACGCCAGAGGA | 17 | 11261 |
| BCL11A-9477 | + | CUUACGCGAGAAUUCCC | 17 | 11262 |
| BCL11A-9478 | + | CCUGGAUGCCAACCUCC | 17 | 11263 |
| BCL11A-9479 | − | AACAAUGCAAUGGCAGC | 17 | 11264 |
| BCL11A-9480 | + | GGGGAAGGUGGCUUAUC | 17 | 11265 |
| BCL11A-9481 | + | GGUUCAUCAUCUGUAAG | 17 | 11266 |
| BCL11A-5334 | + | UGCACUCAUCCCAGGCG | 17 | 11267 |
| BCL11A-9482 | + | UUAAGUGCUGGGGUUUG | 17 | 11268 |
| BCL11A-9483 | + | CCAACCUCCACGGGAUU | 17 | 11269 |
| BCL11A-9484 | + | UCUCGAUUGGUGAAGGG | 20 | 11270 |
| | | GAA | | |
| BCL11A-9485 | + | GGGAUUGGAUGCUUUUU | 20 | 11271 |
| | | UCA | | |
| BCL11A-9486 | − | AUCCAGGUCACGCCAGA | 20 | 11272 |
| | | GGA | | |
| BCL11A-9487 | + | UUACUUACGCGAGAAUU | 20 | 11273 |
| | | CCC | | |
| BCL11A-6420 | + | UGACCUGGAUGCCAACC | 20 | 11274 |
| | | UCC | | |
| BCL11A-9488 | − | GGAAACAAUGCAAUGGC | 20 | 11275 |
| | | AGC | | |
| BCL11A-9489 | + | GAAGGGGAAGGUGGCUU | 20 | 11276 |
| | | AUC | | |
| BCL11A-9490 | + | UCUGGUUCAUCAUCUGU | 20 | 11277 |
| | | AAG | | |
| BCL11A-5480 | + | UUCUGCACUCAUCCCAG | 20 | 11278 |
| | | GCG | | |
| BCL11A-9491 | + | UGCUUAAGUGCUGGGGU | 20 | 11279 |
| | | UUG | | |
| BCL11A-9492 | + | AUGCCAACCUCCACGGG | 20 | 11280 |
| | | AUU | | |

[1097] Table 17B provides exemplary targeting domains for knocking out the BCL11A gene selected according to the third tier parameters. The targeting domains fall in the coding sequence of the gene, downstream of the first 500 bp of coding sequence (e.g., anywhere from +500 (relative to the start codon) to the stop codon of the gene). It is contemplated herein that in an embodiment the targeting domain hybridizes to the target domain through complementary base pairing. Any of the targeting domains in the table can be used with a N. meningindis Cas9 molecule that generates a double stranded break (Cas9 nuclease) or a single-stranded break (Cas9 nickase).

TABLE 17B
3rd Tier

| | | | Target | |
|---|---|---|---|---|
| | DNA | | Site | SEQ ID |
| gRNA Name | Strand | Targeting Domain | Length | NO: |
| BCL11A-5515 | + | UCCGACGAGGAGGCAAA | 17 | 11281 |
| BCL11A-5520 | − | CUUCCGGCCUGGCAGAA | 17 | 11282 |
| BCL11A-9493 | + | UCCGUGUUCGCUUUCUA | 17 | 11283 |
| BCL11A-9494 | − | AGAGCGAGAGGGUGGAC | 17 | 11284 |
| BCL11A-9495 | + | CGGGAGGCUCCAUAGCC | 17 | 11285 |
| BCL11A-9496 | − | UUCCCAGCCACCUCUCC | 17 | 11286 |
| BCL11A-9497 | + | AGCUGGGGCUGCCCAGC | 17 | 11287 |
| BCL11A-9498 | − | GCUAUGGAGCCUCCCGC | 17 | 11288 |
| BCL11A-9499 | + | CGGCCAGGUGGCCGCGC | 17 | 11289 |
| BCL11A-9500 | + | GCGUCUUCAUGUGGCGC | 17 | 11290 |
| BCL11A-9501 | + | UCAGAACUUAAGGGCUC | 17 | 11291 |
| BCL11A-9502 | − | AGCUCAAAGAUCCCUUC | 17 | 11292 |
| BCL11A-9503 | + | GCAGGUCGAACUCCUUC | 17 | 11293 |
| BCL11A-9504 | + | GGGGCGUCGCCAGGAAG | 17 | 11294 |
| BCL11A-9505 | − | CCAGGAUCAGUAUCGAG | 17 | 11295 |
| BCL11A-9506 | + | GGCUGGGAGGGAGGAGG | 17 | 11296 |
| BCL11A-9507 | + | GACUUGACCGUCAUGGG | 17 | 11297 |
| BCL11A-9508 | + | CGGCCUCGGCCAGGUGG | 17 | 11298 |
| BCL11A-5799 | + | GCAUGUGCGUCUUCAUG | 17 | 11299 |
| BCL11A-9509 | + | CGCACAGGUUGCACUUG | 17 | 11300 |
| BCL11A-9510 | + | ACUCCUUCUCGAGCUUG | 17 | 11301 |
| BCL11A-9511 | − | AACACGCACAGAACACU | 17 | 11302 |
| BCL11A-9512 | − | CCUCGGAGAACGGGAGU | 17 | 11303 |
| BCL11A-9513 | + | GGUCAGGGGACUUCCGU | 17 | 11304 |
| BCL11A-5874 | + | UGCUCCGACGAGGAGGC | 20 | 11305 |
| | | AAA | | |
| BCL11A-5879 | − | AGGCUUCCGGCCUGGCA | 20 | 11306 |
| | | GAA | | |
| BCL11A-9514 | + | ACUUCCGUGUUCGCUUU | 20 | 11307 |
| | | CUA | | |
| BCL11A-9515 | − | CGGAGAGCGAGAGGGUG | 20 | 11308 |
| | | GAC | | |
| BCL11A-9516 | + | UGGCGGGAGGCUCCAUA | 20 | 11309 |
| | | GCC | | |
| BCL11A-8754 | − | UCCUUCCCAGCCACCUC | 20 | 11310 |
| | | UCC | | |
| BCL11A-9517 | + | GCGAGCUGGGGCUGCCC | 20 | 11311 |
| | | AGC | | |
| BCL11A-9518 | − | AUGGCUAUGGAGCCUCC | 20 | 11312 |
| | | CGC | | |
| BCL11A-9519 | + | CCUCGGCCAGGUGGCCG | 20 | 11313 |
| | | CGC | | |
| BCL11A-9520 | + | UGUGCGUCUUCAUGUGG | 20 | 11314 |
| | | CGC | | |
| BCL11A-7725 | + | UUCUCAGAACUUAAGGG | 20 | 11315 |
| | | CUC | | |
| BCL11A-9521 | − | GGCAGCUCAAAGAUCCC | 20 | 11316 |
| | | UUC | | |
| BCL11A-7752 | + | GGGGCAGGUCGAACUCC | 20 | 11317 |
| | | UUC | | |
| BCL11A-9522 | + | GGGGGGGCGUCGCCAGG | 20 | 11318 |
| | | AAG | | |
| BCL11A-9523 | − | AUACCAGGAUCAGUAUC | 20 | 11319 |
| | | GAG | | |
| BCL11A-9524 | + | GGGGGCUGGGAGGGAGG | 20 | 11320 |
| | | AGG | | |
| BCL11A-9525 | + | UCGGACUUGACCGUCAU | 20 | 11321 |
| | | GGG | | |
| BCL11A-9526 | + | CCUCGGCCUCGGCCAGG | 20 | 11322 |
| | | UGG | | |
| BCL11A-6165 | + | UGUGCAUGUGCGUCUUC | 20 | 11323 |
| | | AUG | | |
| BCL11A-8204 | + | GGUCGCACAGGUUGCAC | 20 | 11324 |
| | | UUG | | |
| BCL11A-9527 | + | CGAACUCCUUCUCGAGC | 20 | 11325 |
| | | UUG | | |
| BCL11A-9528 | − | UGCAACACGCACAGAAC | 20 | 11326 |
| | | ACU | | |
| BCL11A-9529 | − | ACUCCUCGGAGAACGGG | 20 | 11327 |
| | | AGU | | |
| BCL11A-9530 | + | CGGGGUCAGGGGACUUC | 20 | 11328 |
| | | CGU | | |

[1098] Table 18A provides exemplary targeting domains for knocking down the BCL11A gene selected according to the first tier parameters. The targeting domains bind within 500 bp (e.g., upstream or downstream) of a transcription start site (TSS) and have a high level of orthogonality. It is contemplated herein that in an embodiment the targeting domain hybridizes to the target domain through complementary base pairing. Any of the targeting domains in the table can be used with a S. pyogenes eiCas9 molecule or eiCas9 fusion protein (e.g., an eiCas9 fused to a transcription repressor domain) to alter the BCL11A gene (e.g., reduce or eliminate BCL11A gene expression, BCL11A protein function, or the level of BCL11A protein). One or more gRNA may be used to target an eiCas9 to the promoter region of the BCL11A gene.

TABLE 18A
1st Tier

| | | | Target | |
|---|---|---|---|---|
| | DNA | | Site | SEQ ID |
| gRNA Name | Strand | Targeting Domain | Length | NO: |
| BCL11A-9531 | + | AAGUGCAUACACGGCAA | 17 | 11329 |
| BCL11A-5319 | + | UUGCUUGCGGCGAGACA | 17 | 11330 |
| BCL11A-5320 | − | AUGUCUCGCCGCAAGCA | 17 | 11331 |
| BCL11A-9532 | − | UGACGUUCAAGUUCGCA | 17 | 11332 |
| BCL11A-9533 | + | UUGUGGGAGAGCCGUCA | 17 | 11333 |
| BCL11A-9534 | + | ACGGCAAUGGUUCCAGA | 17 | 11334 |
| BCL11A-9535 | − | GCGCUCGCUGCGGCCAC | 17 | 11335 |
| BCL11A-4560 | + | ACGCCAGACGCGGCCCC | 17 | 11336 |
| BCL11A-9536 | + | UUCACAUCGGGAGAGCC | 17 | 11337 |
| BCL11A-9537 | + | GUUCACAUCGGGAGAGC | 17 | 11338 |
| BCL11A-9538 | − | UAAUCACGAGAGCGCGC | 17 | 11339 |
| BCL11A-9539 | − | CUGACGUUCAAGUUCGC | 17 | 11340 |
| BCL11A-5327 | + | CCCGUUUGCUUAAGUGC | 17 | 11341 |
| BCL11A-9540 | + | ACGGCUCGGUUCACAUC | 17 | 11342 |
| BCL11A-9541 | + | CUUGAACGUCAGGAGUC | 17 | 11343 |
| BCL11A-9542 | + | CUGCGAACUUGAACGUC | 17 | 11344 |
| BCL11A-9543 | − | CCCCCGGGGGCCGCGUC | 17 | 11345 |
| BCL11A-9544 | + | UCCGCGGACGCCAGACG | 17 | 11346 |
| BCL11A-9545 | − | GACUAGAAGCAAAAGCG | 17 | 11347 |
| BCL11A-5335 | + | AGACAUGGUGGGCUGCG | 17 | 11348 |
| BCL11A-9546 | − | AAAACCUCCGAGAGUCG | 17 | 11349 |
| BCL11A-9547 | + | UUUACCUCGACUCUCGG | 17 | 11350 |
| BCL11A-9548 | − | AGUCCGCGUGUGUGGGG | 17 | 11351 |
| BCL11A-5336 | + | CGUUUGCUUAAGUGCUG | 17 | 11352 |
| BCL11A-9549 | − | UAGAGUCCGCGUGUGUG | 17 | 11353 |
| BCL11A-9550 | + | GACGGCUCGGUUCACAU | 17 | 11354 |
| BCL11A-9551 | − | CUCCCCGCACUGGCCAU | 17 | 11355 |
| BCL11A-9552 | + | CGGCAAUGGUUCCAGAU | 17 | 11356 |
| BCL11A-9553 | + | GCGGGCGGACGACGGCU | 17 | 11357 |
| BCL11A-5338 | + | CCGUUUGCUUAAGUGCU | 17 | 11358 |
| BCL11A-5340 | + | UUGCGGCGAGACAUGGU | 17 | 11359 |
| BCL11A-9554 | + | CGUGGCCGGGAGAGAAG | 20 | 11360 |
| | | AAA | | |
| BCL11A-5345 | + | GCCUUGCUUGCGGCGAG | 20 | 11361 |
| | | ACA | | |
| BCL11A-5346 | − | ACCAUGUCUCGCCGCAA | 20 | 11362 |
| | | GCA | | |
| BCL11A-9555 | − | UCCUGACGUUCAAGUUC | 20 | 11363 |
| | | GCA | | |
| BCL11A-9556 | + | ACACCAAUGGACACACA | 20 | 11364 |
| | | UCA | | |
| BCL11A-9557 | + | UACACGGCAAUGGUUCC | 20 | 11365 |
| | | AGA | | |
| BCL11A-9558 | + | GCCAAUGGCCAGUGCGG | 20 | 11366 |
| | | GGA | | |
| BCL11A-9559 | + | AAUGGUUCCAGAUGGGA | 20 | 11367 |
| | | UGA | | |
| BCL11A-9560 | − | GAGUCUCCUUCUUUCUA | 20 | 11368 |
| | | ACC | | |
| BCL11A-9561 | + | CGGUUCACAUCGGGAGA | 20 | 11369 |
| | | GCC | | |
| BCL11A-9562 | + | UCGGUUCACAUCGGGAG | 20 | 11370 |
| | | AGC | | |
| BCL11A-9563 | − | CCGCGUGUGUGGGGGGG | 20 | 11371 |
| | | AGC | | |
| BCL11A-9564 | − | UAAUAAUCACGAGAGCG | 20 | 11372 |
| | | CGC | | |
| BCL11A-9565 | + | AAAUAAUACAAAGAUGG | 20 | 11373 |
| | | CGC | | |
| BCL11A-9566 | − | CUCCUGACGUUCAAGUU | 20 | 11374 |
| | | CGC | | |
| BCL11A-9567 | + | GAGACACACAAAACAUG | 20 | 11375 |
| | | GGC | | |
| BCL11A-5352 | + | AUUCCCGUUUGCUUAAG | 20 | 11376 |
| | | UGC | | |
| BCL11A-9568 | + | ACGACGGCUCGGUUCAC | 20 | 11377 |
| | | AUC | | |
| BCL11A-9569 | − | CGCACUUGAACUUGCAG | 20 | 11378 |
| | | CUC | | |
| BCL11A-9570 | + | UCCCUGCGAACUUGAAC | 20 | 11379 |
| | | GUC | | |
| BCL11A-9571 | − | UCGAGGUAAAAGAGAUA | 20 | 11380 |
| | | AAG | | |
| BCL11A-9572 | + | CCAAUGGCCAGUGCGGG | 20 | 11381 |
| | | GAG | | |
| BCL11A-4351 | + | GACGCCAGACGCGGCCC | 20 | 11382 |
| | | CCG | | |
| BCL11A-9573 | − | UGCGGCCACUGGUGAGC | 20 | 11383 |
| | | CCG | | |
| BCL11A-9574 | − | GGGGCCGCGUCUGGCGU | 20 | 11384 |
| | | CCG | | |
| BCL11A-5359 | + | GCGAGACAUGGUGGGCU | 20 | 11385 |
| | | GCG | | |
| BCL11A-9575 | − | AGAAAAACCUCCGAGAG | 20 | 11386 |
| | | UCG | | |
| BCL11A-4561 | + | ACGCCAGACGCGGCCCC | 20 | 11387 |
| | | CGG | | |
| BCL11A-9576 | + | UCUUUUACCUCGACUCU | 20 | 11388 |
| | | CGG | | |
| BCL11A-9577 | − | UAGAGUCCGCGUGUGUG | 20 | 11389 |
| | | GGG | | |
| BCL11A-9578 | − | UUUAGAGUCCGCGUGUG | 20 | 11390 |
| | | UGG | | |
| BCL11A-9579 | + | CAAUGGUUCCAGAUGGG | 20 | 11391 |
| | | AUG | | |
| BCL11A-5361 | + | CGGCGAGACAUGGUGGG | 20 | 11392 |
| | | CUG | | |
| BCL11A-9580 | + | CUGAGCUGCAAGUUCAA | 20 | 11393 |
| | | GUG | | |
| BCL11A-9581 | − | CAUUUUAGAGUCCGCGU | 20 | 11394 |
| | | GUG | | |
| BCL11A-9582 | + | GACGACGGCUCGGUUCA | 20 | 11395 |
| | | CAU | | |
| BCL11A-9583 | − | AGCCCCUGAUGUGUGUC | 20 | 11396 |
| | | CAU | | |
| BCL11A-9584 | + | GCGGCGGGCGGACGACG | 20 | 11397 |
| | | GCU | | |
| BCL11A-9585 | + | AUCUCUUUUACCUCGAC | 20 | 11398 |
| | | UCU | | |
| BCL11A-5365 | + | UGCUUGCGGCGAGACAU | 20 | 11399 |
| | | GGU | | |
| BCL11A-9586 | − | AUUUUAGAGUCCGCGUG | 20 | 11400 |
| | | UGU | | |

[1099] Table 18B provides exemplary targeting domains for knocking down the BCL11A gene selected according to the second tier parameters. The targeting domains bind within 500 bp (e.g., upstream or downstream) of a transcription start site (TSS). It is contemplated herein that in an embodiment the targeting domain hybridizes to the target domain through complementary base pairing. Any of the targeting domains in the table can be used with a S. pyogenes eiCas9 molecule or eiCas9 fusion protein (e.g., an eiCas9 fused to a transcription repressor domain) to alter the BCL11A gene (e.g., reduce or eliminate BCL11A gene expression, BCL11A protein function, or the level of BCL11A protein). One or more gRNA may be used to target an eiCas9 to the promoter region of the BCL11A gene.

TABLE 18B
2nd Tier

| | DNA | | Target Site | |
|---|---|---|---|---|
| gRNA Name | Strand | Targeting Domain | Length | SEQ ID NO: |
| BCL11A-9587 | + | GAGAGAGAUGAAAAAAA | 17 | 11401 |
| BCL11A-5369 | − | CCCAGCACUUAAGCAAA | 17 | 11402 |
| BCL11A-9588 | − | UUAUUUUGGAUGUCAAA | 17 | 11403 |
| BCL11A-4473 | + | GGCCGGGAGAGAAGAAA | 17 | 11404 |
| BCL11A-9589 | + | GCAGGGGUGGGAGGAAA | 17 | 11405 |
| BCL11A-9590 | − | GAGGUAAAAGAGAUAAA | 17 | 11406 |
| BCL11A-9591 | + | AAUUAAAUAAAAUUAAA | 17 | 11407 |
| BCL11A-9592 | + | GGGGAAGCUCACACCAA | 17 | 11408 |
| BCL11A-4574 | + | AGACCAGGACAAGCCAA | 17 | 11409 |
| BCL11A-9593 | + | UGGCCGGGAGAGAAGAA | 17 | 11410 |
| BCL11A-4491 | + | GGGCGAGCAGGAGAGAA | 17 | 11411 |
| BCL11A-9594 | + | GGCAGGGGUGGGAGGAA | 17 | 11412 |
| BCL11A-4570 | + | AGAAGGGGAGGAGGGAA | 17 | 11413 |
| BCL11A-9595 | − | CGAGGUAAAAGAGAUAA | 17 | 11414 |
| BCL11A-4625 | + | CAGAGACACACAAAACA | 17 | 11415 |
| BCL11A-9596 | + | UCUCAAAAGUGCAUACA | 17 | 11416 |
| BCL11A-9597 | − | GUGUGUGGGGGGGAGCA | 17 | 11417 |
| BCL11A-9598 | + | AAUACAAAGAUGGCGCA | 17 | 11418 |
| BCL11A-9599 | + | CACACAAAACAUGGGCA | 17 | 11419 |
| BCL11A-9600 | + | AGAAGAAAGGGGUGGCA | 17 | 11420 |
| BCL11A-9601 | + | CCAAUGGACACACAUCA | 17 | 11421 |
| BCL11A-9602 | − | CUUGAACUUGCAGCUCA | 17 | 11422 |
| BCL11A-4529 | + | AAAAAAAAAAAAAAAGA | 17 | 11423 |
| BCL11A-9603 | + | UAGAAAUAAUACAAAGA | 17 | 11424 |
| BCL11A-9604 | + | GAGCCGGGUUAGAAAGA | 17 | 11425 |
| BCL11A-4592 | + | AGGGCGAGCAGGAGAGA | 17 | 11426 |
| BCL11A-4534 | − | AAAGCGAGGGGGAGAGA | 17 | 11427 |
| BCL11A-9605 | + | GAGAGAAGAGAGAUAGA | 17 | 11428 |
| BCL11A-4674 | + | CGGCGGCGGGCGGACGA | 17 | 11429 |
| BCL11A-4494 | + | GGGGAGGGGCGGGCCGA | 17 | 11430 |
| BCL11A-9606 | − | ACUAGAAGCAAAAGCGA | 17 | 11431 |
| BCL11A-4591 | + | AGGAGAGAAGGGGAGGA | 17 | 11432 |
| BCL11A-4399 | + | GAGAAGGGGAGGAGGGA | 17 | 11433 |
| BCL11A-4499 | + | GGGGCGGGCCGAGGGGA | 17 | 11434 |
| BCL11A-9607 | + | AAUGGCCAGUGCGGGGA | 17 | 11435 |
| BCL11A-4562 | + | ACGCGGCCCCCGGGGGA | 17 | 11436 |
| BCL11A-9608 | + | AACGUCAGGAGUCUGGA | 17 | 11437 |
| BCL11A-9609 | − | UUAAAAAAAAGCCAUGA | 17 | 11438 |
| BCL11A-9610 | + | GGUUCCAGAUGGGAUGA | 17 | 11439 |
| BCL11A-5383 | − | CCAGCACUUAAGCAAAC | 17 | 11440 |
| BCL11A-9611 | − | CCUCCCCCUCCCCGCAC | 17 | 11441 |
| BCL11A-9612 | − | UCUCCUUCUUUCUAACC | 17 | 11442 |
| BCL11A-9613 | + | GACAUGAAAAAGAGACC | 17 | 11443 |
| BCL11A-4662 | + | CGCCAGACGCGGCCCCC | 17 | 11444 |
| BCL11A-9614 | − | CGGCCCGCCCCUCCCCC | 17 | 11445 |
| BCL11A-9615 | − | UCGGCCCGCCCCUCCCC | 17 | 11446 |
| BCL11A-9616 | + | GCGGCGGUGGCGUGGCC | 17 | 11447 |
| BCL11A-9617 | − | ACCCCUUUCUUCUCUCC | 17 | 11448 |
| BCL11A-9618 | − | UGGCCAUUGGCUUGUCC | 17 | 11449 |
| BCL11A-9619 | + | ACAUGGGCAGGGCGAGC | 17 | 11450 |
| BCL11A-9620 | − | CGUGUGUGGGGGGGAGC | 17 | 11451 |
| BCL11A-9621 | + | GGGGGCGCUGGGGCCGC | 17 | 11452 |
| BCL11A-4646 | + | CCGAGGGGAGGGGGCGC | 17 | 11453 |
| BCL11A-9622 | + | UAAUACAAAGAUGGCGC | 17 | 11454 |
| BCL11A-4441 | + | GCGGCGGCGGCGGCGGC | 17 | 11455 |
| BCL11A-9623 | + | GGACACACAUCAGGGGC | 17 | 11456 |
| BCL11A-4429 | + | GCCCCCGGGGGAGGGGC | 17 | 11457 |
| BCL11A-5392 | + | AUGGUGGGCUGCGGGGC | 17 | 11458 |
| BCL11A-9624 | + | AGGGGGAGGUGCGGGGC | 17 | 11459 |
| BCL11A-9625 | + | ACACACAAAACAUGGGC | 17 | 11460 |
| BCL11A-9626 | + | CGCGGCGGUGGCGUGGC | 17 | 11461 |
| BCL11A-9627 | + | GAGAAGAAAGGGGUGGC | 17 | 11462 |
| BCL11A-5395 | + | GAGACAUGGUGGGCUGC | 17 | 11463 |
| BCL11A-9628 | + | AAGCCAAUGGCCAGUGC | 17 | 11464 |
| BCL11A-9629 | + | CGGGGAGGGGGAGGUGC | 17 | 11465 |
| BCL11A-9630 | + | ACCAAUGGACACACAUC | 17 | 11466 |
| BCL11A-9631 | − | AAAACCCUCAUCCCAUC | 17 | 11467 |
| BCL11A-9632 | − | ACUUGAACUUGCAGCUC | 17 | 11468 |
| BCL11A-9633 | − | GAUGAAGAUAUUUUCUC | 17 | 11469 |
| BCL11A-4528 | + | AAAAAAAAAAAAAAAAG | 17 | 11470 |
| BCL11A-4433 | + | GCCGGGAGAGAAGAAAG | 17 | 11471 |
| BCL11A-9634 | − | AGGUAAAAGAGAUAAAG | 17 | 11472 |
| BCL11A-4475 | + | GGCGAGCAGGAGAGAAG | 17 | 11473 |
| BCL11A-4389 | + | GAAGGGGAGGAGGGAAG | 17 | 11474 |
| BCL11A-9635 | + | GGCCGCGGGCUCACCAG | 17 | 11475 |
| BCL11A-9636 | + | GAAGAAAGGGGUGGCAG | 17 | 11476 |
| BCL11A-9637 | + | CAAUGGACACACAUCAG | 17 | 11477 |
| BCL11A-9638 | − | UUGAACUUGCAGCUCAG | 17 | 11478 |
| BCL11A-4543 | − | AAGCGAGGGGGAGAGAG | 17 | 11479 |
| BCL11A-4533 | − | AAAAGCGAGGGGGAGAG | 17 | 11480 |
| BCL11A-4485 | + | GGGAGGGGCGGGCCGAG | 17 | 11481 |
| BCL11A-9639 | − | CUAGAAGCAAAAGCGAG | 17 | 11482 |
| BCL11A-4492 | + | GGGCGGGCCGAGGGGAG | 17 | 11483 |
| BCL11A-9640 | + | AUGGCCAGUGCGGGGAG | 17 | 11484 |
| BCL11A-4665 | + | CGCGGCCCCCGGGGGAG | 17 | 11485 |
| BCL11A-9641 | + | AGAGAGAAGAGAGAUAG | 17 | 11486 |
| BCL11A-9642 | + | GCUCCCCCCCACACACG | 17 | 11487 |
| BCL11A-4427 | + | GCCAGACGCGGCCCCCG | 17 | 11488 |
| BCL11A-9643 | − | GGCCCGCCCCUCCCCCG | 17 | 11489 |
| BCL11A-9644 | − | GGCCACUGGUGAGCCCG | 17 | 11490 |
| BCL11A-4670 | − | CGGCCACGCCACCGCCG | 17 | 11491 |
| BCL11A-4470 | + | GGCCGCAGCGAGCGCCG | 17 | 11492 |
| BCL11A-4502 | + | GGGGGAGGGGCGGGCCG | 17 | 11493 |
| BCL11A-9645 | + | AGGGGGCGCUGGGGCCG | 17 | 11494 |
| BCL11A-9646 | + | CGGGGCGGGGGGCUCCG | 17 | 11495 |
| BCL11A-9647 | − | GCCGCGUCUGGCGUCCG | 17 | 11496 |
| BCL11A-9648 | + | GGGGGAGGUGCGGGGCG | 17 | 11497 |
| BCL11A-9649 | + | GCGCCGCGGCGGUGGCG | 17 | 11498 |
| BCL11A-9650 | + | AGCCAAUGGCCAGUGCG | 17 | 11499 |
| BCL11A-9651 | + | GGGGAGGGGGAGGUGCG | 17 | 11500 |
| BCL11A-9652 | − | GGUAAAAGAGAUAAAGG | 17 | 11501 |
| BCL11A-9653 | − | UGAACUUGCAGCUCAGG | 17 | 11502 |
| BCL11A-9654 | − | UAGAAGCAAAAGCGAGG | 17 | 11503 |
| BCL11A-4627 | + | CAGGAGAGAAGGGGAGG | 17 | 11504 |
| BCL11A-4480 | + | GGCGGGCCGAGGGGAGG | 17 | 11505 |
| BCL11A-9655 | + | UGGCCAGUGCGGGGAGG | 17 | 11506 |
| BCL11A-4634 | + | CCAGACGCGGCCCCCGG | 17 | 11507 |
| BCL11A-9656 | − | GCCCGCCCCUCCCCCGG | 17 | 11508 |
| BCL11A-4660 | + | CGCAGCGAGCGCCGCGG | 17 | 11509 |
| BCL11A-4588 | + | AGCGAGCGCCGCGGCGG | 17 | 11510 |
| BCL11A-4478 | + | GGCGGCGGCGGCGGCGG | 17 | 11511 |
| BCL11A-4447 | + | GCGGGCGGCGGCGGCGG | 17 | 11512 |
| BCL11A-4500 | + | GGGGCGGGCGGCGGCGG | 17 | 11513 |
| BCL11A-5409 | + | UGCGGGGCGGGCGGCGG | 17 | 11514 |
| BCL11A-5410 | + | GGCUGCGGGGCGGGCGG | 17 | 11515 |
| BCL11A-9657 | + | GGGGAGGUGCGGGGCGG | 17 | 11516 |
| BCL11A-9658 | + | GGGGUGGGAGGAAAGGG | 17 | 11517 |
| BCL11A-9659 | − | GAACUUGCAGCUCAGGG | 17 | 11518 |
| BCL11A-4444 | + | GCGGCGGCGGCGGCGGG | 17 | 11519 |
| BCL11A-5411 | + | GUGGGCUGCGGGGCGGG | 17 | 11520 |
| BCL11A-9660 | + | GGGAGGUGCGGGGCGGG | 17 | 11521 |
| BCL11A-4483 | + | GGGAGAGAAGAAAGGGG | 17 | 11522 |
| BCL11A-4407 | + | GAGCAGGAGAGAAGGGG | 17 | 11523 |
| BCL11A-9661 | + | GAAAGGGGUGGCAGGGG | 17 | 11524 |
| BCL11A-4593 | + | AGGGGCGGGCCGAGGGG | 17 | 11525 |
| BCL11A-4467 | + | GGCCCCCGGGGGAGGGG | 17 | 11526 |
| BCL11A-5413 | + | CAUGGUGGGCUGCGGGG | 17 | 11527 |
| BCL11A-9662 | + | CAAUGGCCAGUGCGGGG | 17 | 11528 |
| BCL11A-9663 | + | GAGGGGGAGGUGCGGGG | 17 | 11529 |
| BCL11A-9664 | + | CCAGUGCGGGGAGGGGG | 17 | 11530 |
| BCL11A-4395 | + | GACGCGGCCCCCGGGGG | 17 | 11531 |
| BCL11A-9665 | + | GGGAGGAAAGGGUGGGG | 17 | 11532 |
| BCL11A-9666 | + | UGGGAGGAAAGGGUGGG | 17 | 11533 |
| BCL11A-9667 | + | GGGGUGGCAGGGGUGGG | 17 | 11534 |
| BCL11A-9668 | − | GAGUCCGCGUGUGUGGG | 17 | 11535 |
| BCL11A-5414 | + | CUUGCGGCGAGACAUGG | 17 | 11536 |
| BCL11A-9669 | + | GUGGGAGGAAAGGGUGG | 17 | 11537 |
| BCL11A-9670 | − | AGAGUCCGCGUGUGUGG | 17 | 11538 |
| BCL11A-9671 | + | UGGUUCCAGAUGGGAUG | 17 | 11539 |
| BCL11A-9672 | + | GAGGGGAGGGGGCGCUG | 17 | 11540 |
| BCL11A-9673 | − | CGCCGCGGCGCUCGCUG | 17 | 11541 |
| BCL11A-5422 | + | CGAGACAUGGUGGGCUG | 17 | 11542 |
| BCL11A-9674 | + | AGCUGCAAGUUCAAGUG | 17 | 11543 |
| BCL11A-9675 | + | CAAGCCAAUGGCCAGUG | 17 | 11544 |
| BCL11A-9676 | + | GCGGGGAGGGGGAGGUG | 17 | 11545 |
| BCL11A-9677 | + | GGUGGGAGGAAAGGGUG | 17 | 11546 |
| BCL11A-9678 | − | UUUAGAGUCCGCGUGUG | 17 | 11547 |
| BCL11A-9679 | + | GCAGGGAAGAUGAAUUG | 17 | 11548 |
| BCL11A-5426 | + | GGGGUUUGCCUUGCUUG | 17 | 11549 |
| BCL11A-9680 | + | AGAGACACACAAAACAU | 17 | 11550 |
| BCL11A-9681 | − | CCCUGAUGUGUGUCCAU | 17 | 11551 |
| BCL11A-5431 | + | AUUAUUAUUACUAUUAU | 17 | 11552 |
| BCL11A-9682 | − | CCAGCGCCCCCUCCCCU | 17 | 11553 |
| BCL11A-9683 | + | CGAGGGGAGGGGGCGCU | 17 | 11554 |
| BCL11A-9684 | + | UCUUUUACCUCGACUCU | 17 | 11555 |
| BCL11A-9685 | + | GGGUGGGAGGAAAGGGU | 17 | 11556 |
| BCL11A-9686 | + | AAAGGGGUGGCAGGGGU | 17 | 11557 |
| BCL11A-9687 | − | UUAGAGUCCGCGUGUGU | 17 | 11558 |
| BCL11A-9688 | + | CAGGGAAGAUGAAUUGU | 17 | 11559 |
| BCL11A-5439 | + | UUAUUAUUACUAUUAUU | 17 | 11560 |
| BCL11A-9689 | − | UUAUUUCUAAUUUAUUU | 17 | 11561 |
| BCL11A-9690 | + | AGAGAGAGAGAUGAAAAAAA | 20 | 11562 |
| BCL11A-5443 | − | AACCCCAGCACUUAAGCAAA | 20 | 11563 |
| BCL11A-9691 | − | AAUUUAUUUUGGAUGUCAAA | 20 | 11564 |
| BCL11A-9692 | + | GUGGCAGGGGUGGGAGGAAA | 20 | 11565 |
| BCL11A-9693 | − | GUCGAGGUAAAAGAGAUAAA | 20 | 11566 |
| BCL11A-9694 | + | UAAAAUUAAAUAAAAUUAAA | 20 | 11567 |
| BCL11A-9695 | + | GAAGGGGAAGCUCACACCAA | 20 | 11568 |
| BCL11A-4541 | + | AAGAGACCAGGACAAGCCAA | 20 | 11569 |
| BCL11A-9696 | + | CAAAAGUGCAUACACGGCAA | 20 | 11570 |
| BCL11A-9697 | + | GCGUGGCCGGGAGAGAAGAA | 20 | 11571 |
| BCL11A-4422 | + | GCAGGGCGAGCAGGAGAGAA | 20 | 11572 |
| BCL11A-9698 | + | GGUGGCAGGGGUGGGAGGAA | 20 | 11573 |
| BCL11A-4404 | + | GAGAGAAGGGGAGGAGGGAA | 20 | 11574 |
| BCL11A-9699 | − | AGUCGAGGUAAAAGAGAUAA | 20 | 11575 |
| BCL11A-4455 | + | GGACAGAGACACACAAAACA | 20 | 11576 |
| BCL11A-9700 | + | CUGUCUCAAAAGUGCAUACA | 20 | 11577 |
| BCL11A-9701 | − | CGCGUGUGUGGGGGGGAGCA | 20 | 11578 |
| BCL11A-9702 | + | AAUAAUACAAAGAUGGCGCA | 20 | 11579 |
| BCL11A-9703 | + | AGACACACAAAACAUGGGCA | 20 | 11580 |
| BCL11A-9704 | + | GAGAGAAGAAAGGGGUGGCA | 20 | 11581 |
| BCL11A-9705 | − | GCACUUGAACUUGCAGCUCA | 20 | 11582 |
| BCL11A-9706 | + | GAAUUGUGGGAGAGCCGUCA | 20 | 11583 |
| BCL11A-4527 | + | AAAAAAAAAAAAAAAAAAGA | 20 | 11584 |
| BCL11A-9707 | + | AAUUAGAAAUAAUACAAAGA | 20 | 11585 |
| BCL11A-9708 | + | GGAGAGCCGGGUUAGAAAGA | 20 | 11586 |
| BCL11A-4464 | + | GGCAGGGCGAGCAGGAGAGA | 20 | 11587 |
| BCL11A-4418 | − | GCAAAAGCGAGGGGGAGAGA | 20 | 11588 |
| BCL11A-9709 | + | AGAGAGAGAAGAGAGAUAGA | 20 | 11589 |
| BCL11A-4673 | + | CGGCGGCGGCGGGCGGACGA | 20 | 11590 |
| BCL11A-4648 | + | CCGGGGGAGGGGCGGGCCGA | 20 | 11591 |
| BCL11A-9710 | − | AGGACUAGAAGCAAAAGCGA | 20 | 11592 |
| BCL11A-4584 | + | AGCAGGAGAGAAGGGGAGGA | 20 | 11593 |
| BCL11A-4459 | + | GGAGAGAAGGGGAGGAGGGA | 20 | 11594 |
| BCL11A-4461 | + | GGAGGGGCGGGCCGAGGGGA | 20 | 11595 |
| BCL11A-4624 | + | CAGACGCGGCCCCCGGGGGA | 20 | 11596 |
| BCL11A-9711 | + | UUGAACGUCAGGAGUCUGGA | 20 | 11597 |
| BCL11A-9712 | − | UGCUUAAAAAAAAGCCAUGA | 20 | 11598 |
| BCL11A-5458 | − | ACCCCAGCACUUAAGCAAAC | 20 | 11599 |
| BCL11A-9713 | − | GCGGCGCUCGCUGCGGCCAC | 20 | 11600 |
| BCL11A-9714 | − | GCACCUCCCCCUCCCCGCAC | 20 | 11601 |
| BCL11A-9715 | + | CUGGACAUGAAAAAGAGACC | 20 | 11602 |
| BCL11A-4456 | + | GGACGCCAGACGCGGCCCCC | 20 | 11603 |
| BCL11A-9716 | − | CCUCGGCCCGCCCCUCCCCC | 20 | 11604 |
| BCL11A-4362 | + | CGGACGCCAGACGCGGCCCC | 20 | 11605 |
| BCL11A-9717 | − | CCCUCGGCCCGCCCCUCCCC | 20 | 11606 |
| BCL11A-9718 | + | GCCGCGGCGGUGGCGUGGCC | 20 | 11607 |
| BCL11A-9719 | − | GCCACCCCUUUCUUCUCUCC | 20 | 11608 |
| BCL11A-9720 | − | CACUGGCCAUUGGCUUGUCC | 20 | 11609 |
| BCL11A-9721 | + | AAAACAUGGGCAGGGCGAGC | 20 | 11610 |
| BCL11A-9722 | + | GGAGGGGGCGCUGGGGCCGC | 20 | 11611 |
| BCL11A-4490 | + | GGGCCGAGGGGAGGGGGCGC | 20 | 11612 |
| BCL11A-4442 | + | GCGGCGGCGGCGGCGGCGGC | 20 | 11613 |
| BCL11A-9723 | + | AAUGGACACACAUCAGGGGC | 20 | 11614 |
| BCL11A-4439 | + | GCGGCCCCCGGGGGAGGGGC | 20 | 11615 |
| BCL11A-5465 | + | GACAUGGUGGGCUGCGGGGC | 20 | 11616 |
| BCL11A-9724 | + | GGGAGGGGGAGGUGCGGGGC | 20 | 11617 |
| BCL11A-9725 | + | CGCCGCGGCGGUGGCGUGGC | 20 | 11618 |
| BCL11A-9726 | + | GGAGAGAAGAAAGGGGUGGC | 20 | 11619 |
| BCL11A-5468 | + | GGCGAGACAUGGUGGGCUGC | 20 | 11620 |
| BCL11A-9727 | + | GACAAGCCAAUGGCCAGUGC | 20 | 11621 |
| BCL11A-9728 | + | GUGCGGGGAGGGGGAGGUGC | 20 | 11622 |
| BCL11A-9729 | + | CACACCAAUGGACACACAUC | 20 | 11623 |
| BCL11A-9730 | − | GAAAAAACCCUCAUCCCAUC | 20 | 11624 |
| BCL11A-9731 | − | ACUGAUGAAGAUAUUUUCUC | 20 | 11625 |
| BCL11A-9732 | + | GAACUUGAACGUCAGGAGUC | 20 | 11626 |
| BCL11A-9733 | − | CCUCCCCCGGGGGCCGCGUC | 20 | 11627 |
| BCL11A-4526 | + | AAAAAAAAAAAAAAAAAAAG | 20 | 11628 |
| BCL11A-9734 | + | GUGGCCGGGAGAGAAGAAAG | 20 | 11629 |
| BCL11A-4629 | + | CAGGGCGAGCAGGAGAGAAG | 20 | 11630 |
| BCL11A-4577 | + | AGAGAAGGGGAGGAGGGAAG | 20 | 11631 |
| BCL11A-9735 | + | UGGGGCCGCGGGCUCACCAG | 20 | 11632 |
| BCL11A-9736 | + | AGAGAAGAAAGGGGUGGCAG | 20 | 11633 |
| BCL11A-9737 | + | CACCAAUGGACACACAUCAG | 20 | 11634 |
| BCL11A-9738 | − | CACUUGAACUUGCAGCUCAG | 20 | 11635 |
| BCL11A-4611 | − | CAAAAGCGAGGGGGAGAGAG | 20 | 11636 |
| BCL11A-4583 | − | AGCAAAAGCGAGGGGGAGAG | 20 | 11637 |
| BCL11A-4677 | + | CGGGGGAGGGGCGGGCCGAG | 20 | 11638 |
| BCL11A-9739 | − | GGACUAGAAGCAAAAGCGAG | 20 | 11639 |
| BCL11A-4411 | + | GAGGGGCGGGCCGAGGGGAG | 20 | 11640 |
| BCL11A-4575 | + | AGACGCGGCCCCCGGGGGAG | 20 | 11641 |
| BCL11A-9740 | + | GAGAGAGAGAAGAGAGAUAG | 20 | 11642 |
| BCL11A-9741 | + | CCUGCUCCCCCCCACACACG | 20 | 11643 |
| BCL11A-9742 | + | GGCUCCGCGGACGCCAGACG | 20 | 11644 |
| BCL11A-9743 | − | CUCGGCCCGCCCCUCCCCCG | 20 | 11645 |
| BCL11A-9744 | − | UCCCGGCCACGCCACCGCCG | 20 | 11646 |
| BCL11A-9745 | + | AGUGGCCGCAGCGAGCGCCG | 20 | 11647 |
| BCL11A-4642 | + | CCCGGGGGAGGGGCGGGCCG | 20 | 11648 |
| BCL11A-9746 | + | GGGAGGGGGCGCUGGGGCCG | 20 | 11649 |
| BCL11A-9747 | + | GUGCGGGGCGGGGGGCUCCG | 20 | 11650 |
| BCL11A-9748 | − | CAGGACUAGAAGCAAAAGCG | 20 | 11651 |
| BCL11A-9749 | + | GGAGGGGGAGGUGCGGGGCG | 20 | 11652 |
| BCL11A-9750 | + | CGAGCGCCGCGGCGGUGGCG | 20 | 11653 |
| BCL11A-9751 | + | ACAAGCCAAUGGCCAGUGCG | 20 | 11654 |
| BCL11A-9752 | + | UGCGGGGAGGGGGAGGUGCG | 20 | 11655 |
| BCL11A-9753 | − | CGAGGUAAAAGAGAUAAAGG | 20 | 11656 |
| BCL11A-9754 | − | ACUUGAACUUGCAGCUCAGG | 20 | 11657 |
| BCL11A-9755 | − | GACUAGAAGCAAAAGCGAGG | 20 | 11658 |
| BCL11A-4408 | + | GAGCAGGAGAGAAGGGGAGG | 20 | 11659 |
| BCL11A-4594 | + | AGGGGCGGGCCGAGGGGAGG | 20 | 11660 |
| BCL11A-9756 | + | CAAUGGCCAGUGCGGGGAGG | 20 | 11661 |
| BCL11A-9757 | − | UCGGCCCGCCCCUCCCCCGG | 20 | 11662 |
| BCL11A-4471 | + | GGCCGCAGCGAGCGCCGCGG | 20 | 11663 |
| BCL11A-4661 | + | CGCAGCGAGCGCCGCGGCGG | 20 | 11664 |
| BCL11A-4479 | + | GGCGGCGGCGGCGGCGGCGG | 20 | 11665 |
| BCL11A-4448 | + | GCGGGCGGCGGCGGCGGCGG | 20 | 11666 |
| BCL11A-4501 | + | GGGGCGGGCGGCGGCGGCGG | 20 | 11667 |
| BCL11A-5484 | + | UGCGGGGCGGGCGGCGGCGG | 20 | 11668 |
| BCL11A-5485 | + | GGCUGCGGGGCGGGCGGCGG | 20 | 11669 |
| BCL11A-5486 | + | GUGGGCUGCGGGGCGGGCGG | 20 | 11670 |
| BCL11A-9758 | + | GAGGGGGAGGUGCGGGGCGG | 20 | 11671 |
| BCL11A-9759 | + | GCAGGGGUGGGAGGAAAGGG | 20 | 11672 |
| BCL11A-9760 | − | CUUGAACUUGCAGCUCAGGG | 20 | 11673 |
| BCL11A-4443 | + | GCGGCGGCGGCGGCGGCGGG | 20 | 11674 |
| BCL11A-5487 | + | AUGGUGGGCUGCGGGGCGGG | 20 | 11675 |
| BCL11A-9761 | + | AGGGGGAGGUGCGGGGCGGG | 20 | 11676 |
| BCL11A-4434 | + | GCCGGGAGAGAAGAAAGGGG | 20 | 11677 |
| BCL11A-4476 | + | GGCGAGCAGGAGAGAAGGGG | 20 | 11678 |
| BCL11A-9762 | + | GAAGAAAGGGGUGGCAGGGG | 20 | 11679 |
| BCL11A-4486 | + | GGGAGGGGCGGGCCGAGGGG | 20 | 11680 |
| BCL11A-4666 | + | CGCGGCCCCCGGGGGAGGGG | 20 | 11681 |
| BCL11A-5489 | + | AGACAUGGUGGGCUGCGGGG | 20 | 11682 |
| BCL11A-9763 | + | AGCCAAUGGCCAGUGCGGGG | 20 | 11683 |
| BCL11A-9764 | + | GGGGAGGGGGAGGUGCGGGG | 20 | 11684 |
| BCL11A-9765 | + | UGGCCAGUGCGGGGAGGGGG | 20 | 11685 |
| BCL11A-4635 | + | CCAGACGCGGCCCCCGGGGG | 20 | 11686 |
| BCL11A-9766 | + | GGUGGGAGGAAAGGGUGGGG | 20 | 11687 |
| BCL11A-9767 | + | GGGUGGGAGGAAAGGGUGGG | 20 | 11688 |
| BCL11A-9768 | + | AAAGGGGUGGCAGGGGUGGG | 20 | 11689 |
| BCL11A-9769 | − | UUAGAGUCCGCGUGUGUGGG | 20 | 11690 |
| BCL11A-5490 | + | UUGCUUGCGGCGAGACAUGG | 20 | 11691 |
| BCL11A-9770 | + | GGGGUGGGAGGAAAGGGUGG | 20 | 11692 |
| BCL11A-9771 | + | GCCGAGGGGAGGGGGCGCUG | 20 | 11693 |
| BCL11A-9772 | − | CACCGCCGCGGCGCUCGCUG | 20 | 11694 |
| BCL11A-5497 | + | UCCCGUUUGCUUAAGUGCUG | 20 | 11695 |
| BCL11A-9773 | + | GGACAAGCCAAUGGCCAGUG | 20 | 11696 |
| BCL11A-9774 | + | AGUGCGGGGAGGGGGAGGUG | 20 | 11697 |
| BCL11A-9775 | + | AGGGGUGGGAGGAAAGGGUG | 20 | 11698 |
| BCL11A-9776 | − | UUUUAGAGUCCGCGUGUGUG | 20 | 11699 |
| BCL11A-9777 | + | GGCGCAGGGAAGAUGAAUUG | 20 | 11700 |
| BCL11A-5500 | + | GCUGGGGUUUGCCUUGCUUG | 20 | 11701 |
| BCL11A-9778 | + | GACAGAGACACACAAAACAU | 20 | 11702 |
| BCL11A-9779 | − | CCCCUCCCCGCACUGGCCAU | 20 | 11703 |
| BCL11A-9780 | + | ACACGGCAAUGGUUCCAGAU | 20 | 11704 |
| BCL11A-9781 | + | AUAAUUAUUAUUACUAUUAU | 20 | 11705 |
| BCL11A-9782 | − | GCCCCAGCGCCCCCUCCCCU | 20 | 11706 |
| BCL11A-9783 | + | GGCCGAGGGGAGGGGGCGCU | 20 | 11707 |
| BCL11A-5509 | + | UUCCCGUUUGCUUAAGUGCU | 20 | 11708 |
| BCL11A-9784 | + | CAGGGGUGGGAGGAAAGGGU | 20 | 11709 |
| BCL11A-9785 | + | AAGAAAGGGGUGGCAGGGGU | 20 | 11710 |
| BCL11A-9786 | + | GCGCAGGGAAGAUGAAUUGU | 20 | 11711 |
| BCL11A-9787 | + | UAAUUAUUAUUACUAUUAUU | 20 | 11712 |
| BCL11A-9788 | − | GUAUUAUUUCUAAUUUAUUU | 20 | 11713 |

[1100] Table 18C provides exemplary targeting domains for knocking down the BCL11A gene selected according to the third tier parameters. The targeting domains binds within the additional 500 bp (e.g., upstream or downstream) of a transcription start site (TSS), e.g., extending to 1 kb upstream and downstream of a TSS. It is contemplated herein that in an embodiment the targeting domain hybridizes to the target domain through complementary base pairing. Any of the targeting domains in the table can be used with a S. pyogenes eiCas9 molecule or eiCas9 fusion protein (e.g., an eiCas9 fused to a transcription repressor domain) to alter the BCL11A gene (e.g., reduce or eliminate BCL11A gene expression, BCL11A protein function, or the level of BCL11A protein). One or more gRNA may be used to target an eiCas9 to the promoter region of the BCL11A gene.

TABLE 18C

| | | | Target Site | SEQ ID |
|---|---|---|---|---|
| gRNA Name | DNA Strand | Targeting Domain | Length | NO: |
| BCL11A-9789 | − | CACUCACCGUAAGAAAA | 17 | 11714 |
| BCL11A-9790 | + | CCUCUGGCCGGAACAAA | 17 | 11715 |
| BCL11A-9791 | + | CGAGGAGCCGGCACAAA | 17 | 11716 |
| BCL11A-9792 | − | UAUUUCUCUUUUCGAAA | 17 | 11717 |
| BCL11A-9793 | − | GGGAGCUGGUGGGGAAA | 17 | 11718 |
| BCL11A-9794 | − | AAGUGGCACUGUGGAAA | 17 | 11719 |
| BCL11A-9795 | + | GGGCUGCGGGUCCGGAA | 17 | 11720 |
| BCL11A-9796 | + | GAAAUAAAGCGGCGGAA | 17 | 11721 |
| BCL11A-9797 | − | UGGGAGCUGGUGGGGAA | 17 | 11722 |
| BCL11A-9798 | − | AAAGUGGCACUGUGGAA | 17 | 11723 |
| BCL11A-9799 | + | GCCCGAGGGCGCCCCCA | 17 | 11724 |
| BCL11A-9800 | + | CGUCCUUCCCGGUCCCA | 17 | 11725 |
| BCL11A-9801 | + | CCCCCAAGGCCGAGCCA | 17 | 11726 |
| BCL11A-9802 | + | CCCGCGUGUGGACGCCA | 17 | 11727 |
| BCL11A-9597 | − | GUGUGUGGGGGGGAGCA | 17 | 11728 |
| BCL11A-9803 | + | AGGUGGGAGGGAGCGCA | 17 | 11729 |
| BCL11A-9804 | − | GGACACCAGCGCGCUCA | 17 | 11730 |
| BCL11A-9805 | + | CGCGCGGCCUGGAAAGA | 17 | 11731 |
| BCL11A-9806 | − | UCCGCGGAGUCGGGAGA | 17 | 11732 |
| BCL11A-9807 | + | CGCAGGCCGGGGCCCGA | 17 | 11733 |
| BCL11A-9808 | − | GAGAGGGGCCGCGGCGA | 17 | 11734 |
| BCL11A-9809 | + | AGCUCCGCAGCGGGCGA | 17 | 11735 |
| BCL11A-9810 | − | CGUGGGACCGGGAAGGA | 17 | 11736 |
| BCL11A-9811 | − | GGUGUGCGUACGGAGGA | 17 | 11737 |
| BCL11A-9812 | + | AGGGCUGCGGGUCCGGA | 17 | 11738 |
| BCL11A-9813 | + | GGGGAAGCGCGGGCGGA | 17 | 11739 |
| BCL11A-9814 | − | AAAUGGGGGGGUAGGGA | 17 | 11740 |
| BCL11A-9815 | − | GAGCCGUGGGACCGGGA | 17 | 11741 |
| BCL11A-9816 | − | CGCGGCGGCGGCGGGGA | 17 | 11742 |
| BCL11A-9817 | + | GGCGAGGGGAGGUGGGA | 17 | 11743 |
| BCL11A-9818 | + | UCCAGCCUAAGUUUGGA | 17 | 11744 |
| BCL11A-9819 | − | AAUAAUGAACAAUGCUA | 17 | 11745 |
| BCL11A-9820 | − | GGAAGUGGGUGUGCGUA | 17 | 11746 |
| BCL11A-9821 | − | AAGAAAAUGGGGGGGUA | 17 | 11747 |
| BCL11A-9822 | + | ACCCCCCCAUUUUCUUA | 17 | 11748 |
| BCL11A-9823 | + | UCAUUAUUUUGCAAAAC | 17 | 11749 |
| BCL11A-9824 | + | AUAGAGCGAGAGUGCAC | 17 | 11750 |
| BCL11A-9825 | − | GAGAAAAGAGGUGAGAC | 17 | 11751 |
| BCL11A-9826 | − | AGAGGGGCCGCGGCGAC | 17 | 11752 |
| BCL11A-9827 | − | GUGGGACCGGGAAGGAC | 17 | 11753 |
| BCL11A-9828 | + | AAGGCCGAGCCAGGGAC | 17 | 11754 |
| BCL11A-9829 | + | GCCUGGAAAGAGGGGAC | 17 | 11755 |
| BCL11A-9830 | − | GGGGAGAGCCGUGGGAC | 17 | 11756 |
| BCL11A-9831 | − | CAACUCACAUGCAAACC | 17 | 11757 |
| BCL11A-9832 | + | UAGAGCGAGAGUGCACC | 17 | 11758 |
| BCL11A-9833 | + | AGGCCGAGCCAGGGACC | 17 | 11759 |
| BCL11A-9834 | + | CCUGGAAAGAGGGGACC | 17 | 11760 |
| BCL11A-9835 | − | GGGAGAGCCGUGGGACC | 17 | 11761 |
| BCL11A-9836 | − | CCGGGAGCAACUCUACC | 17 | 11762 |
| BCL11A-9837 | + | CACCAGCUCCCACCCCC | 17 | 11763 |
| BCL11A-9838 | + | CGGGAGGCUGCAGCCCC | 17 | 11764 |
| BCL11A-9839 | − | GCUUUUACUUCGGCCCC | 17 | 11765 |
| BCL11A-9840 | − | CUGUGGAAAGGGGCCCC | 17 | 11766 |
| BCL11A-9841 | + | UCACCUCUUUUCUCCCC | 17 | 11767 |
| BCL11A-9842 | − | CCGCGCUUCCCCAGCCC | 17 | 11768 |
| BCL11A-9843 | + | CCGGGAGGCUGCAGCCC | 17 | 11769 |
| BCL11A-9844 | − | GGGGCGCCCUCGGGCCC | 17 | 11770 |
| BCL11A-9845 | − | CGCCGCCUGCCUCUCCC | 17 | 11771 |
| BCL11A-9846 | + | CUCACCUCUUUUCUCCC | 17 | 11772 |
| BCL11A-9847 | − | UCUAAAAAACGAUUCCC | 17 | 11773 |
| BCL11A-9848 | + | GCGGGCGGAGGGAAGCC | 17 | 11774 |
| BCL11A-9849 | − | CCCGCGCUUCCCCAGCC | 17 | 11775 |
| BCL11A-9850 | + | GCCCCCAAGGCCGAGCC | 17 | 11776 |
| BCL11A-9851 | + | CCCCGCGUGUGGACGCC | 17 | 11777 |
| BCL11A-9852 | + | GCGGACUCAGGAGCGCC | 17 | 11778 |
| BCL11A-9853 | + | GGCAGGCGGCGCAGGCC | 17 | 11779 |
| BCL11A-9854 | + | CAGGAGCCCGCGCGGCC | 17 | 11780 |
| BCL11A-9855 | − | CCGGGGCUGCAGCCUCC | 17 | 11781 |
| BCL11A-9856 | − | CAGGCCGCGCGGGCUCC | 17 | 11782 |
| BCL11A-9857 | + | CCAGGUAGAGUUGCUCC | 17 | 11783 |
| BCL11A-9858 | + | GCAGCGCCCAAGUCUCC | 17 | 11784 |
| BCL11A-9859 | − | UACGGAGGAGGGUGUCC | 17 | 11785 |
| BCL11A-9860 | − | GUCUAAAAAACGAUUCC | 17 | 11786 |
| BCL11A-9861 | + | GCGUCUCCCGUCCUUCC | 17 | 11787 |
| BCL11A-9862 | − | CCCGGUCCCCUCUUUCC | 17 | 11788 |
| BCL11A-9863 | + | AGUUACAGCUCCGCAGC | 17 | 11789 |
| BCL11A-9864 | + | CCGGCACAAAAGGCAGC | 17 | 11790 |
| BCL11A-9865 | − | ACGGUCAAGUGUGCAGC | 17 | 11791 |
| BCL11A-9866 | + | GGGCAAGCGCGAGGAGC | 17 | 11792 |
| BCL11A-9620 | − | CGUGUGUGGGGGGGAGC | 17 | 11793 |
| BCL11A-9867 | − | AACCUGGGGGUGGGAGC | 17 | 11794 |
| BCL11A-9868 | − | CCCUGGCGUCCACACGC | 17 | 11795 |
| BCL11A-9869 | − | UUCCCGAGCGCAGCCGC | 17 | 11796 |
| BCL11A-9870 | + | CCGGGCUGGGGAAGCGC | 17 | 11797 |
| BCL11A-9871 | + | CGCGGACUCAGGAGCGC | 17 | 11798 |
| BCL11A-9872 | − | CUCUUUCCAGGCCGCGC | 17 | 11799 |
| BCL11A-9873 | + | CUUGACCGUGAGCGCGC | 17 | 11800 |
| BCL11A-9874 | + | GGAGAGGCAGGCGGCGC | 17 | 11801 |
| BCL11A-9875 | + | AGGCAGGCGGCGCAGGC | 17 | 11802 |
| BCL11A-9876 | + | GGGGACCGGGGAGAGGC | 17 | 11803 |
| BCL11A-9877 | − | GCCCUCCAAACUUAGGC | 17 | 11804 |
| BCL11A-9878 | − | AGGACGGGAGACGCGGC | 17 | 11805 |
| BCL11A-9879 | − | GCGAGCGCGGCGGCGGC | 17 | 11806 |
| BCL11A-9880 | + | AGGCUGCAGCCCCGGGC | 17 | 11807 |
| BCL11A-9881 | + | UGCAAAACUGGCGGGGC | 17 | 11808 |
| BCL11A-9882 | + | UAUUUUGCAAAACUGGC | 17 | 11809 |
| BCL11A-9883 | + | AAACACCCACCUCUGGC | 17 | 11810 |
| BCL11A-9884 | + | UAAGUUUGGAGGGCUGC | 17 | 11811 |
| BCL11A-9885 | + | ACAAAAGGCGGCAGUGC | 17 | 11812 |
| BCL11A-9886 | − | CCCGCUGCCUUUUGUGC | 17 | 11813 |
| BCL11A-9887 | + | CCCGACUCCGCGGACUC | 17 | 11814 |
| BCL11A-9888 | + | GGACAAACACCCACCUC | 17 | 11815 |
| BCL11A-9889 | − | GCCUUGGGGGCGCCCUC | 17 | 11816 |
| BCL11A-9890 | − | UUUGCUGUCCUCUCCUC | 17 | 11817 |
| BCL11A-9891 | + | AGCCCGCGGCUGCGCUC | 17 | 11818 |
| BCL11A-9892 | − | AGCGCAGCCGCGGGCUC | 17 | 11819 |
| BCL11A-9893 | − | CCUGAGUCCGCGGAGUC | 17 | 11820 |
| BCL11A-9894 | + | UUGGAGGGCUGCGGGUC | 17 | 11821 |
| BCL11A-9895 | − | GUACGGAGGAGGGUGUC | 17 | 11822 |
| BCL11A-9896 | − | GCUCAGCUCUCAACUUC | 17 | 11823 |
| BCL11A-9897 | − | CUUGGGCGCUGCCCUUC | 17 | 11824 |
| BCL11A-9898 | − | ACUGCCGCCUUUUGUUC | 17 | 11825 |
| BCL11A-9899 | − | AUUCCCGGGGAGAAAAG | 17 | 11826 |
| BCL11A-9900 | − | CCACAAUAGUGAGAAAG | 17 | 11827 |
| BCL11A-9901 | + | GGCGGAAAGGAGGAAAG | 17 | 11828 |
| BCL11A-9902 | + | CCGCGCGGCCUGGAAAG | 17 | 11829 |
| BCL11A-9903 | − | AGUGGCACUGUGGAAAG | 17 | 11830 |
| BCL11A-9904 | + | CGAAAAGAGAAAUAAAG | 17 | 11831 |
| BCL11A-9905 | − | GCGGCGGGGAGGGGAAG | 17 | 11832 |
| BCL11A-9906 | + | CCGCGUGUGGACGCCAG | 17 | 11833 |
| BCL11A-9907 | − | CCUUUUGUUCCGGCCAG | 17 | 11834 |
| BCL11A-9908 | + | AAGUUACAGCUCCGCAG | 17 | 11835 |
| BCL11A-9909 | + | GCCGGCACAAAAGGCAG | 17 | 11836 |
| BCL11A-9910 | − | CACGGUCAAGUGUGCAG | 17 | 11837 |
| BCL11A-9911 | + | GCGCGGCCUGGAAAGAG | 17 | 11838 |
| BCL11A-9912 | − | CCGCGGAGUCGGGAGAG | 17 | 11839 |
| BCL11A-9913 | + | GCUCCGCAGCGGGCGAG | 17 | 11840 |
| BCL11A-9914 | + | AAACUUUGCCCGAGGAG | 17 | 11841 |
| BCL11A-9915 | − | GUCCGCGGAGUCGGGAG | 17 | 11842 |
| BCL11A-9916 | + | AAGAGGGGACCGGGGAG | 17 | 11843 |
| BCL11A-9917 | − | GCGGCGGCGGCGGGGAG | 17 | 11844 |
| BCL11A-9918 | + | GCGGGGCGGGGGGGGAG | 17 | 11845 |
| BCL11A-9919 | + | CAUUUUCUUACGGUGAG | 17 | 11846 |
| BCL11A-9920 | + | GGGAGCGCACGGCAACG | 17 | 11847 |
| BCL11A-9642 | + | GCUCCCCCCCACACACG | 17 | 11848 |
| BCL11A-9921 | − | CCCCUGGCGUCCACACG | 17 | 11849 |
| BCL11A-9922 | − | GGGAAGGACGGGAGACG | 17 | 11850 |
| BCL11A-9923 | − | GAGGGGCCGCGGCGACG | 17 | 11851 |
| BCL11A-9924 | + | CUGGAAAGAGGGGACCG | 17 | 11852 |
| BCL11A-9925 | − | CGCGCUUCCCCAGCCCG | 17 | 11853 |
| BCL11A-9926 | + | UAAAAGCCCCGAGCCCG | 17 | 11854 |
| BCL11A-9927 | + | GCGCAGGCCGGGGCCCG | 17 | 11855 |
| BCL11A-9928 | + | UCGGGAAACUUUGCCCG | 17 | 11856 |
| BCL11A-9929 | − | CUAAAAAACGAUUCCCG | 17 | 11857 |
| BCL11A-9930 | − | UUUCCCGAGCGCAGCCG | 17 | 11858 |
| BCL11A-9931 | − | GGCGACGGGGAGAGCCG | 17 | 11859 |
| BCL11A-9932 | + | CGGACUCAGGAGCGCCG | 17 | 11860 |
| BCL11A-9933 | + | GGCUCUCCCCGUCGCCG | 17 | 11861 |
| BCL11A-9934 | + | GCAGGCGGCGCAGGCCG | 17 | 11862 |
| BCL11A-9935 | − | AGUCGGGAGAGGGGCCG | 17 | 11863 |
| BCL11A-9936 | + | CCCCUCUCCCGACUCCG | 17 | 11864 |
| BCL11A-9937 | − | CGGCGCUCCUGAGUCCG | 17 | 11865 |
| BCL11A-9938 | + | CCCGGGCUGGGGAAGCG | 17 | 11866 |
| BCL11A-9939 | − | CACGCGGGGAGCGAGCG | 17 | 11867 |
| BCL11A-9940 | − | CCUGGCGUCCACACGCG | 17 | 11868 |
| BCL11A-9941 | + | GUCUCCAGGAGCCCGCG | 17 | 11869 |
| BCL11A-9942 | − | CCUCUUUCCAGGCCGCG | 17 | 11870 |
| BCL11A-9943 | + | GCGGGAGGGCAAGCGCG | 17 | 11871 |
| BCL11A-9944 | − | CGAGCGCGGCGGCGGCG | 17 | 11872 |
| BCL11A-9945 | + | CAGCUCCGCAGCGGGCG | 17 | 11873 |
| BCL11A-9946 | + | GCAAAACUGGCGGGGCG | 17 | 11874 |
| BCL11A-9947 | + | AUUUUGCAAAACUGGCG | 17 | 11875 |
| BCL11A-9948 | − | GCGCAGCCGCGGGCUCG | 17 | 11876 |
| BCL11A-9949 | + | CUGGCCGGAACAAAAGG | 17 | 11877 |
| BCL11A-9950 | + | AUAAAGCGGCGGAAAGG | 17 | 11878 |
| BCL11A-9951 | + | GACCGGGGAGAGGCAGG | 17 | 11879 |
| BCL11A-9952 | + | GGAAAGGAGGAAAGAGG | 17 | 11880 |
| BCL11A-9953 | − | UUUGUUCCGGCCAGAGG | 17 | 11881 |
| BCL11A-9954 | − | GGGUGUGCGUACGGAGG | 17 | 11882 |
| BCL11A-9955 | + | CAGCGGGCGAGGGGAGG | 17 | 11883 |
| BCL11A-9956 | − | AGUGGGUGUGCGUACGG | 17 | 11884 |
| BCL11A-9957 | + | GGACUCAGGAGCGCCGG | 17 | 11885 |
| BCL11A-9958 | + | AAAGAGAAAUAAAGCGG | 17 | 11886 |
| BCL11A-9959 | − | GCGGGGAGCGAGCGCGG | 17 | 11887 |
| BCL11A-9960 | − | GGGAGCGAGCGCGGCGG | 17 | 11888 |
| BCL11A-9961 | − | AGCGAGCGCGGCGGCGG | 17 | 11889 |
| BCL11A-9962 | + | UGGGGAAGCGCGGGCGG | 17 | 11890 |
| BCL11A-9963 | + | CAAAACUGGCGGGGCGG | 17 | 11891 |
| BCL11A-9964 | − | AGCUGGUGGGGAAAGGG | 17 | 11892 |
| BCL11A-9965 | − | AAAAUGGGGGGGUAGGG | 17 | 11893 |
| BCL11A-9966 | + | AGCGAGAGUGCACCGGG | 17 | 11894 |
| BCL11A-9967 | − | GUCAAGUGUGCAGCGGG | 17 | 11895 |
| BCL11A-9968 | + | GGCUGGGGAAGCGCGGG | 17 | 11896 |
| BCL11A-9969 | + | AAAACUGGCGGGGCGGG | 17 | 11897 |
| BCL11A-9970 | + | CCGCAGCGGGCGAGGGG | 17 | 11898 |
| BCL11A-9971 | − | GCGCGGCGGCGGCGGGG | 17 | 11899 |
| BCL11A-9972 | + | AAACUGGCGGGGCGGGG | 17 | 11900 |
| BCL11A-9973 | + | UUGCAAAACUGGCGGGG | 17 | 11901 |
| BCL11A-9974 | + | AACUGGCGGGGCGGGGG | 17 | 11902 |
| BCL11A-9975 | − | ACAUGCAAACCUGGGGG | 17 | 11903 |
| BCL11A-9976 | − | ACCGUAAGAAAAUGGGG | 17 | 11904 |
| BCL11A-9548 | − | AGUCCGCGUGUGUGGGG | 17 | 11905 |
| BCL11A-9977 | − | CACCGUAAGAAAAUGGG | 17 | 11906 |
| BCL11A-9978 | + | GGGCGAGGGGAGGUGGG | 17 | 11907 |
| BCL11A-9668 | − | GAGUCCGCGUGUGUGGG | 17 | 11908 |
| BCL11A-9979 | − | UCACCGUAAGAAAAUGG | 17 | 11909 |
| BCL11A-9980 | + | UUAUUUUGCAAAACUGG | 17 | 11910 |
| BCL11A-9981 | − | CUCACAUGCAAACCUGG | 17 | 11911 |
| BCL11A-9982 | − | CUGGGGGUGGGAGCUGG | 17 | 11912 |
| BCL11A-9670 | − | AGAGUCCGCGUGUGUGG | 17 | 11913 |
| BCL11A-9983 | − | GCGGAGCUGUAACUUGG | 17 | 11914 |
| BCL11A-9984 | − | CCCUGGCUCGGCCUUGG | 17 | 11915 |
| BCL11A-9985 | + | AUCCAGCCUAAGUUUGG | 17 | 11916 |
| BCL11A-9986 | − | CUCACCGUAAGAAAAUG | 17 | 11917 |
| BCL11A-9987 | − | GUGAGAAAGUGGCACUG | 17 | 11918 |
| BCL11A-9988 | − | ACUCACAUGCAAACCUG | 17 | 11919 |
| BCL11A-9989 | − | CCUCCCCUCGCCCGCUG | 17 | 11920 |
| BCL11A-9990 | + | CUAAGUUUGGAGGGCUG | 17 | 11921 |
| BCL11A-9991 | + | GCUGCAGCCCCGGGCUG | 17 | 11922 |
| BCL11A-9992 | + | CGCUCGCUCCCCGCGUG | 17 | 11923 |
| BCL11A-9993 | − | GGGGGUGGGAGCUGGUG | 17 | 11924 |
| BCL11A-9678 | − | UUUAGAGUCCGCGUGUG | 17 | 11925 |
| BCL11A-9549 | − | UAGAGUCCGCGUGUGUG | 17 | 11926 |
| BCL11A-9994 | + | ACUUUCUCACUAUUGUG | 17 | 11927 |
| BCL11A-9995 | + | CCACUUUCUCACUAUUG | 17 | 11928 |
| BCL11A-9996 | − | UCCCUGGCUCGGCCUUG | 17 | 11929 |
| BCL11A-9997 | − | ACUCACCGUAAGAAAAU | 17 | 11930 |
| BCL11A-9998 | − | GCUGCGGAGCUGUAACU | 17 | 11931 |
| BCL11A-9999 | − | GCGGGCUCCUGGAGACU | 17 | 11932 |
| BCL11A-10000 | − | AACUCACAUGCAAACCU | 17 | 11933 |
| BCL11A-10001 | − | GGCCUUGGGGGCGCCCU | 17 | 11934 |
| BCL11A-10002 | − | GGUCCCUGGCUCGGCCU | 17 | 11935 |
| BCL11A-10003 | − | CUUUGCUGUCCUCUCCU | 17 | 11936 |
| BCL11A-10004 | + | GAGCCCGCGGCUGCGCU | 17 | 11937 |
| BCL11A-10005 | + | GGCUGCAGCCCCGGGCU | 17 | 11938 |
| BCL11A-10006 | − | GAGCGCAGCCGCGGGCU | 17 | 11939 |
| BCL11A-10007 | − | CGGCGGGGAGGGGAAGU | 17 | 11940 |
| BCL11A-10008 | − | UCCUGAGUCCGCGGAGU | 17 | 11941 |
| BCL11A-10009 | + | AUUUUCUUACGGUGAGU | 17 | 11942 |
| BCL11A-10010 | − | GCGACGGGGAGAGCCGU | 17 | 11943 |
| BCL11A-10011 | − | UUGUUCCGGCCAGAGGU | 17 | 11944 |
| BCL11A-10012 | + | AGCGGGCGAGGGGAGGU | 17 | 11945 |
| BCL11A-10013 | − | UAAGAAAAUGGGGGGGU | 17 | 11946 |
| BCL11A-10014 | − | CAUGCAAACCUGGGGGU | 17 | 11947 |
| BCL11A-10015 | − | UGGGGGUGGGAGCUGGU | 17 | 11948 |
| BCL11A-9687 | − | UUAGAGUCCGCGUGUGU | 17 | 11949 |
| BCL11A-10016 | + | CACUUUCUCACUAUUGU | 17 | 11950 |
| BCL11A-10017 | − | CGCAGCCCUCCAAACUU | 17 | 11951 |
| BCL11A-10018 | − | GGCUCAGCUCUCAACUU | 17 | 11952 |
| BCL11A-10019 | − | CGGGCUCCUGGAGACUU | 17 | 11953 |
| BCL11A-10020 | − | GCUCGGGGCUUUUACUU | 17 | 11954 |
| BCL11A-10021 | − | GUCCCUGGCUCGGCCUU | 17 | 11955 |
| BCL11A-10022 | + | GGAAUCCAGCCUAAGUU | 17 | 11956 |
| BCL11A-10023 | − | GAGGUGAGACUGGCUUU | 17 | 11957 |
| BCL11A-10024 | − | UCCCACUCACCGUAAGAAAA | 20 | 11958 |
| BCL11A-10025 | + | CCACCUCUGGCCGGAACAAA | 20 | 11959 |
| BCL11A-10026 | + | GCGCGAGGAGCCGGCACAAA | 20 | 11960 |
| BCL11A-10027 | − | CUUUAUUUCUCUUUUCGAAA | 20 | 11961 |
| BCL11A-10028 | − | GGUGGGAGCUGGUGGGGAAA | 20 | 11962 |
| BCL11A-10029 | − | AGAAAGUGGCACUGUGGAAA | 20 | 11963 |
| BCL11A-10030 | + | GGAGGGCUGCGGGUCCGGAA | 20 | 11964 |
| BCL11A-10031 | + | AGAGAAAUAAAGCGGCGGAA | 20 | 11965 |
| BCL11A-10032 | − | GGGUGGGAGCUGGUGGGGAA | 20 | 11966 |
| BCL11A-10033 | − | GAGAAAGUGGCACUGUGGAA | 20 | 11967 |
| BCL11A-10034 | + | GGGGCCCGAGGGCGCCCCCA | 20 | 11968 |
| BCL11A-10035 | + | UCCCGUCCUUCCCGGUCCCA | 20 | 11969 |
| BCL11A-10036 | + | GCGCCCCCAAGGCCGAGCCA | 20 | 11970 |
| BCL11A-10037 | + | CUCCCCGCGUGUGGACGCCA | 20 | 11971 |
| BCL11A-9701 | − | CGCGUGUGUGGGGGGGAGCA | 20 | 11972 |
| BCL11A-10038 | + | GGGAGGUGGGAGGGAGCGCA | 20 | 11973 |
| BCL11A-10039 | − | UUUGGACACCAGCGCGCUCA | 20 | 11974 |
| BCL11A-10040 | + | GCCCGCGCGGCCUGGAAAGA | 20 | 11975 |
| BCL11A-10041 | − | GAGUCCGCGGAGUCGGGAGA | 20 | 11976 |
| BCL11A-10042 | + | CGGCGCAGGCCGGGGCCCGA | 20 | 11977 |
| BCL11A-10043 | − | CGGGAGAGGGGCCGCGGCGA | 20 | 11978 |
| BCL11A-10044 | + | UACAGCUCCGCAGCGGGCGA | 20 | 11979 |
| BCL11A-10045 | − | AGCCGUGGGACCGGGAAGGA | 20 | 11980 |
| BCL11A-10046 | − | GUGGGUGUGCGUACGGAGGA | 20 | 11981 |
| BCL11A-10047 | + | UGGAGGGCUGCGGGUCCGGA | 20 | 11982 |
| BCL11A-10048 | + | GCUGGGGAAGCGCGGGCGGA | 20 | 11983 |
| BCL11A-10049 | − | AGAAAAUGGGGGGGUAGGGA | 20 | 11984 |
| BCL11A-10050 | − | GGAGAGCCGUGGGACCGGGA | 20 | 11985 |
| BCL11A-10051 | − | GAGCGCGGCGGCGGCGGGGA | 20 | 11986 |
| BCL11A-10052 | + | GCGGGCGAGGGGAGGUGGGA | 20 | 11987 |
| BCL11A-10053 | + | GAAUCCAGCCUAAGUUUGGA | 20 | 11988 |
| BCL11A-10054 | − | CAAAAUAAUGAACAAUGCUA | 20 | 11989 |
| BCL11A-10055 | − | AGGGGAAGUGGGUGUGCGUA | 20 | 11990 |
| BCL11A-10056 | − | CGUAAGAAAAUGGGGGGGUA | 20 | 11991 |
| BCL11A-10057 | + | CCUACCCCCCCAUUUUCUUA | 20 | 11992 |
| BCL11A-10058 | + | UGUUCAUUAUUUUGCAAAAC | 20 | 11993 |
| BCL11A-10059 | + | AAAAUAGAGCGAGAGUGCAC | 20 | 11994 |
| BCL11A-10060 | − | GGGGAGAAAAGAGGUGAGAC | 20 | 11995 |
| BCL11A-10061 | − | GGGAGAGGGGCCGCGGCGAC | 20 | 11996 |
| BCL11A-10062 | − | GCCGUGGGACCGGGAAGGAC | 20 | 11997 |
| BCL11A-10063 | + | CCCAAGGCCGAGCCAGGGAC | 20 | 11998 |
| BCL11A-10064 | + | GCGGCCUGGAAAGAGGGGAC | 20 | 11999 |
| BCL11A-10065 | − | GACGGGGAGAGCCGUGGGAC | 20 | 12000 |
| BCL11A-10066 | − | GAACAACUCACAUGCAAACC | 20 | 12001 |
| BCL11A-10067 | + | AAAUAGAGCGAGAGUGCACC | 20 | 12002 |
| BCL11A-10068 | + | CCAAGGCCGAGCCAGGGACC | 20 | 12003 |
| BCL11A-10069 | + | CGGCCUGGAAAGAGGGGACC | 20 | 12004 |
| BCL11A-10070 | − | ACGGGGAGAGCCGUGGGACC | 20 | 12005 |
| BCL11A-10071 | − | UGUCCGGGAGCAACUCUACC | 20 | 12006 |
| BCL11A-10072 | + | CCCCACCAGCUCCCACCCCC | 20 | 12007 |
| BCL11A-10073 | + | CACCGGGAGGCUGCAGCCCC | 20 | 12008 |
| BCL11A-10074 | − | GGGGCUUUUACUUCGGCCCC | 20 | 12009 |
| BCL11A-10075 | − | GCACUGUGGAAAGGGGCCCC | 20 | 12010 |
| BCL11A-10076 | + | GUCUCACCUCUUUUCUCCCC | 20 | 12011 |
| BCL11A-10077 | − | CGCCCGCGCUUCCCCAGCCC | 20 | 12012 |
| BCL11A-10078 | + | GCACCGGGAGGCUGCAGCCC | 20 | 12013 |
| BCL11A-10079 | − | UUGGGGGCGCCCUCGGGCCC | 20 | 12014 |
| BCL11A-10080 | − | CUGCGCCGCCUGCCUCUCCC | 20 | 12015 |
| BCL11A-10081 | + | AGUCUCACCUCUUUUCUCCC | 20 | 12016 |
| BCL11A-10082 | − | AAGUCUAAAAAACGAUUCCC | 20 | 12017 |
| BCL11A-10083 | + | AGCGCGGGCGGAGGGAAGCC | 20 | 12018 |
| BCL11A-10084 | − | CCGCCCGCGCUUCCCCAGCC | 20 | 12019 |
| BCL11A-10085 | + | GGCGCCCCCAAGGCCGAGCC | 20 | 12020 |
| BCL11A-10086 | + | GCUCCCCGCGUGUGGACGCC | 20 | 12021 |
| BCL11A-10087 | + | UCCGCGGACUCAGGAGCGCC | 20 | 12022 |
| BCL11A-10088 | + | AGAGGCAGGCGGCGCAGGCC | 20 | 12023 |
| BCL11A-10089 | + | CUCCAGGAGCCCGCGCGGCC | 20 | 12024 |
| BCL11A-10090 | − | AGCCCGGGGCUGCAGCCUCC | 20 | 12025 |
| BCL11A-10091 | − | UUCCAGGCCGCGCGGGCUCC | 20 | 12026 |
| BCL11A-10092 | + | AAGCCAGGUAGAGUUGCUCC | 20 | 12027 |
| BCL11A-10093 | + | AGGGCAGCGCCCAAGUCUCC | 20 | 12028 |
| BCL11A-10094 | − | GCGUACGGAGGAGGGUGUCC | 20 | 12029 |
| BCL11A-10095 | − | CAAGUCUAAAAAACGAUUCC | 20 | 12030 |
| BCL11A-10096 | + | GCCGCGUCUCCCGUCCUUCC | 20 | 12031 |
| BCL11A-10097 | − | CUCCCCGGUCCCCUCUUUCC | 20 | 12032 |
| BCL11A-10098 | + | CCAAGUUACAGCUCCGCAGC | 20 | 12033 |
| BCL11A-10099 | + | GAGCCGGCACAAAAGGCAGC | 20 | 12034 |
| BCL11A-10100 | − | CUCACGGUCAAGUGUGCAGC | 20 | 12035 |
| BCL11A-10101 | + | GGAGGGCAAGCGCGAGGAGC | 20 | 12036 |
| BCL11A-9563 | − | CCGCGUGUGUGGGGGGGAGC | 20 | 12037 |
| BCL11A-10102 | − | GCAAACCUGGGGGUGGGAGC | 20 | 12038 |
| BCL11A-10103 | − | GGCCCCUGGCGUCCACACGC | 20 | 12039 |
| BCL11A-10104 | − | AGUUUCCCGAGCGCAGCCGC | 20 | 12040 |
| BCL11A-10105 | + | GCCCCGGGCUGGGGAAGCGC | 20 | 12041 |
| BCL11A-10106 | + | CUCCGCGGACUCAGGAGCGC | 20 | 12042 |
| BCL11A-10107 | − | CCCCUCUUUCCAGGCCGCGC | 20 | 12043 |
| BCL11A-10108 | + | ACACUUGACCGUGAGCGCGC | 20 | 12044 |
| BCL11A-10109 | + | CGGGGAGAGGCAGGCGGCGC | 20 | 12045 |
| BCL11A-10110 | + | GAGAGGCAGGCGGCGCAGGC | 20 | 12046 |
| BCL11A-10111 | + | AGAGGGGACCGGGGAGAGGC | 20 | 12047 |
| BCL11A-10112 | − | GCAGCCCUCCAAACUUAGGC | 20 | 12048 |
| BCL11A-10113 | − | GGAAGGACGGGAGACGCGGC | 20 | 12049 |
| BCL11A-10114 | − | GGAGCGAGCGCGGCGGCGGC | 20 | 12050 |
| BCL11A-10115 | + | GGGAGGCUGCAGCCCCGGGC | 20 | 12051 |
| BCL11A-10116 | + | UUUUGCAAAACUGGCGGGGC | 20 | 12052 |
| BCL11A-10117 | + | CAUUAUUUUGCAAAACUGGC | 20 | 12053 |
| BCL11A-10118 | + | GACAAACACCCACCUCUGGC | 20 | 12054 |
| BCL11A-10119 | + | GCCUAAGUUUGGAGGGCUGC | 20 | 12055 |
| BCL11A-10120 | + | GGAACAAAAGGCGGCAGUGC | 20 | 12056 |
| BCL11A-10121 | − | UGUCCCGCUGCCUUUUGUGC | 20 | 12057 |
| BCL11A-10122 | + | UCUCCCGACUCCGCGGACUC | 20 | 12058 |
| BCL11A-10123 | + | GCGGGACAAACACCCACCUC | 20 | 12059 |
| BCL11A-10124 | − | UCGGCCUUGGGGGCGCCCUC | 20 | 12060 |
| BCL11A-10125 | − | UUCUUUGCUGUCCUCUCCUC | 20 | 12061 |
| BCL11A-10126 | + | CCGAGCCCGCGGCUGCGCUC | 20 | 12062 |
| BCL11A-10127 | − | CCGAGCGCAGCCGCGGGCUC | 20 | 12063 |
| BCL11A-10128 | − | GCUCCUGAGUCCGCGGAGUC | 20 | 12064 |
| BCL11A-10129 | + | AGUUUGGAGGGCUGCGGGUC | 20 | 12065 |
| BCL11A-10130 | − | UGCGUACGGAGGAGGGUGUC | 20 | 12066 |
| BCL11A-10131 | − | GAGGCUCAGCUCUCAACUUC | 20 | 12067 |
| BCL11A-10132 | − | AGACUUGGGCGCUGCCCUUC | 20 | 12068 |
| BCL11A-10133 | − | GGCACUGCCGCCUUUUGUUC | 20 | 12069 |
| BCL11A-10134 | − | ACGAUUCCCGGGGAGAAAAG | 20 | 12070 |
| BCL11A-10135 | − | UCCCCACAAUAGUGAGAAAG | 20 | 12071 |
| BCL11A-10136 | + | AGCGGCGGAAAGGAGGAAAG | 20 | 12072 |
| BCL11A-10137 | + | AGCCCGCGCGGCCUGGAAAG | 20 | 12073 |
| BCL11A-10138 | − | GAAAGUGGCACUGUGGAAAG | 20 | 12074 |
| BCL11A-10139 | + | UUUCGAAAAGAGAAAUAAAG | 20 | 12075 |
| BCL11A-10140 | − | GCGGCGGCGGGGAGGGGAAG | 20 | 12076 |
| BCL11A-10141 | + | UCCCCGCGUGUGGACGCCAG | 20 | 12077 |
| BCL11A-10142 | − | CCGCCUUUUGUUCCGGCCAG | 20 | 12078 |
| BCL11A-10143 | + | UCCAAGUUACAGCUCCGCAG | 20 | 12079 |
| BCL11A-10144 | + | GGAGCCGGCACAAAAGGCAG | 20 | 12080 |
| BCL11A-10145 | − | GCUCACGGUCAAGUGUGCAG | 20 | 12081 |
| BCL11A-10146 | + | CCCGCGCGGCCUGGAAAGAG | 20 | 12082 |
| BCL11A-10147 | − | AGUCCGCGGAGUCGGGAGAG | 20 | 12083 |
| BCL11A-10148 | + | ACAGCUCCGCAGCGGGCGAG | 20 | 12084 |
| BCL11A-10149 | + | GGGAAACUUUGCCCGAGGAG | 20 | 12085 |
| BCL11A-10150 | − | UGAGUCCGCGGAGUCGGGAG | 20 | 12086 |
| BCL11A-10151 | + | GGAAAGAGGGGACCGGGGAG | 20 | 12087 |
| BCL11A-10152 | − | AGCGCGGCGGCGGCGGGGAG | 20 | 12088 |
| BCL11A-10153 | + | CUGGCGGGGCGGGGGGGGAG | 20 | 12089 |
| BCL11A-10154 | + | CCCCAUUUUCUUACGGUGAG | 20 | 12090 |
| BCL11A-10155 | + | GGAGGGAGCGCACGGCAACG | 20 | 12091 |
| BCL11A-9741 | + | CCUGCUCCCCCCCACACACG | 20 | 12092 |
| BCL11A-10156 | − | CGGCCCCUGGCGUCCACACG | 20 | 12093 |
| BCL11A-10157 | − | ACCGGGAAGGACGGGAGACG | 20 | 12094 |
| BCL11A-10158 | − | GGAGAGGGGCCGCGGCGACG | 20 | 12095 |
| BCL11A-10159 | + | GGCCUGGAAAGAGGGGACCG | 20 | 12096 |
| BCL11A-10160 | − | GCCCGCGCUUCCCCAGCCCG | 20 | 12097 |
| BCL11A-10161 | + | AAGUAAAAGCCCCGAGCCCG | 20 | 12098 |
| BCL11A-10162 | + | GCGGCGCAGGCCGGGGCCCG | 20 | 12099 |
| BCL11A-10163 | + | CGCUCGGGAAACUUUGCCCG | 20 | 12100 |
| BCL11A-10164 | − | AGUCUAAAAAACGAUUCCCG | 20 | 12101 |
| BCL11A-10165 | − | AAGUUUCCCGAGCGCAGCCG | 20 | 12102 |
| BCL11A-10166 | − | CGCGGCGACGGGGAGAGCCG | 20 | 12103 |
| BCL11A-10167 | + | CCGCGGACUCAGGAGCGCCG | 20 | 12104 |
| BCL11A-10168 | + | CACGGCUCUCCCCGUCGCCG | 20 | 12105 |
| BCL11A-10169 | + | GAGGCAGGCGGCGCAGGCCG | 20 | 12106 |
| BCL11A-10170 | − | CGGAGUCGGGAGAGGGGCCG | 20 | 12107 |
| BCL11A-10171 | + | CGGCCCCUCUCCCGACUCCG | 20 | 12108 |
| BCL11A-10172 | − | CCCCGGCGCUCCUGAGUCCG | 20 | 12109 |
| BCL11A-10173 | + | AGCCCCGGGCUGGGGAAGCG | 20 | 12110 |
| BCL11A-10174 | − | CCACACGCGGGGAGCGAGCG | 20 | 12111 |
| BCL11A-10175 | − | GCCCCUGGCGUCCACACGCG | 20 | 12112 |
| BCL11A-10176 | + | CAAGUCUCCAGGAGCCCGCG | 20 | 12113 |
| BCL11A-10177 | − | UCCCCUCUUUCCAGGCCGCG | 20 | 12114 |
| BCL11A-10178 | + | GGCGCGGGAGGGCAAGCGCG | 20 | 12115 |
| BCL11A-10179 | − | GAGCGAGCGCGGCGGCGGCG | 20 | 12116 |
| BCL11A-10180 | + | UUACAGCUCCGCAGCGGGCG | 20 | 12117 |
| BCL11A-10181 | + | UUUGCAAAACUGGCGGGGCG | 20 | 12118 |
| BCL11A-10182 | + | AUUAUUUUGCAAAACUGGCG | 20 | 12119 |
| BCL11A-10183 | − | CGAGCGCAGCCGCGGGCUCG | 20 | 12120 |
| BCL11A-10184 | + | CCUCUGGCCGGAACAAAAGG | 20 | 12121 |
| BCL11A-10185 | + | GAAAUAAAGCGGCGGAAAGG | 20 | 12122 |
| BCL11A-10186 | + | GGGGACCGGGGAGAGGCAGG | 20 | 12123 |
| BCL11A-10187 | + | GGCGGAAAGGAGGAAAGAGG | 20 | 12124 |
| BCL11A-10188 | − | CCUUUUGUUCCGGCCAGAGG | 20 | 12125 |
| BCL11A-10189 | − | AGUGGGUGUGCGUACGGAGG | 20 | 12126 |
| BCL11A-10190 | + | CCGCAGCGGGCGAGGGGAGG | 20 | 12127 |
| BCL11A-10191 | − | GGAAGUGGGUGUGCGUACGG | 20 | 12128 |
| BCL11A-10192 | + | CGCGGACUCAGGAGCGCCGG | 20 | 12129 |
| BCL11A-10193 | + | CGAAAAGAGAAAUAAAGCGG | 20 | 12130 |
| BCL11A-10194 | − | CACGCGGGGAGCGAGCGCGG | 20 | 12131 |
| BCL11A-10195 | − | GCGGGGAGCGAGCGCGGCGG | 20 | 12132 |
| BCL11A-10196 | − | GGGAGCGAGCGCGGCGGCGG | 20 | 12133 |
| BCL11A-10197 | + | GGCUGGGGAAGCGCGGGCGG | 20 | 12134 |
| BCL11A-10198 | + | UUGCAAAACUGGCGGGGCGG | 20 | 12135 |
| BCL11A-10199 | − | GGGAGCUGGUGGGGAAAGGG | 20 | 12136 |
| BCL11A-10200 | − | AAGAAAAUGGGGGGGUAGGG | 20 | 12137 |
| BCL11A-10201 | + | UAGAGCGAGAGUGCACCGGG | 20 | 12138 |
| BCL11A-10202 | − | ACGGUCAAGUGUGCAGCGGG | 20 | 12139 |
| BCL11A-10203 | + | CCGGGCUGGGGAAGCGCGGG | 20 | 12140 |
| BCL11A-10204 | + | UGCAAAACUGGCGGGGCGGG | 20 | 12141 |
| BCL11A-10205 | + | GCUCCGCAGCGGGCGAGGGG | 20 | 12142 |
| BCL11A-10206 | − | CGAGCGCGGCGGCGGCGGGG | 20 | 12143 |
| BCL11A-10207 | + | GCAAAACUGGCGGGGCGGGG | 20 | 12144 |
| BCL11A-10208 | + | AUUUUGCAAAACUGGCGGGG | 20 | 12145 |
| BCL11A-10209 | + | CAAAACUGGCGGGGCGGGGG | 20 | 12146 |
| BCL11A-10210 | − | CUCACAUGCAAACCUGGGGG | 20 | 12147 |
| BCL11A-10211 | − | CUCACCGUAAGAAAAUGGGG | 20 | 12148 |
| BCL11A-9577 | − | UAGAGUCCGCGUGUGUGGGG | 20 | 12149 |
| BCL11A-10212 | − | ACUCACCGUAAGAAAAUGGG | 20 | 12150 |
| BCL11A-10213 | + | AGCGGGCGAGGGGAGGUGGG | 20 | 12151 |
| BCL11A-9769 | − | UUAGAGUCCGCGUGUGUGGG | 20 | 12152 |
| BCL11A-10214 | − | CACUCACCGUAAGAAAAUGG | 20 | 12153 |
| BCL11A-10215 | + | UCAUUAUUUUGCAAAACUGG | 20 | 12154 |
| BCL11A-10216 | − | CAACUCACAUGCAAACCUGG | 20 | 12155 |
| BCL11A-10217 | − | AACCUGGGGGUGGGAGCUGG | 20 | 12156 |
| BCL11A-9578 | − | UUUAGAGUCCGCGUGUGUGG | 20 | 12157 |
| BCL11A-10218 | − | GCUGCGGAGCUGUAACUUGG | 20 | 12158 |
| BCL11A-10219 | − | GGUCCCUGGCUCGGCCUUGG | 20 | 12159 |
| BCL11A-10220 | + | GGAAUCCAGCCUAAGUUUGG | 20 | 12160 |
| BCL11A-10221 | − | CCACUCACCGUAAGAAAAUG | 20 | 12161 |
| BCL11A-10222 | − | AUAGUGAGAAAGUGGCACUG | 20 | 12162 |
| BCL11A-10223 | − | ACAACUCACAUGCAAACCUG | 20 | 12163 |
| BCL11A-10224 | − | CCACCUCCCCUCGCCCGCUG | 20 | 12164 |
| BCL11A-10225 | + | AGCCUAAGUUUGGAGGGCUG | 20 | 12165 |
| BCL11A-10226 | + | GAGGCUGCAGCCCCGGGCUG | 20 | 12166 |
| BCL11A-10227 | + | CCGCGCUCGCUCCCCGCGUG | 20 | 12167 |
| BCL11A-10228 | − | CCUGGGGGUGGGAGCUGGUG | 20 | 12168 |
| BCL11A-9581 | − | CAUUUUAGAGUCCGCGUGUG | 20 | 12169 |
| BCL11A-9776 | − | UUUUAGAGUCCGCGUGUGUG | 20 | 12170 |
| BCL11A-10229 | + | GCCACUUUCUCACUAUUGUG | 20 | 12171 |
| BCL11A-10230 | + | GUGCCACUUUCUCACUAUUG | 20 | 12172 |
| BCL11A-10231 | − | CGGUCCCUGGCUCGGCCUUG | 20 | 12173 |
| BCL11A-10232 | − | CCCACUCACCGUAAGAAAAU | 20 | 12174 |
| BCL11A-10233 | − | CCCGCUGCGGAGCUGUAACU | 20 | 12175 |
| BCL11A-10234 | − | CGCGCGGGCUCCUGGAGACU | 20 | 12176 |
| BCL11A-10235 | − | AACAACUCACAUGCAAACCU | 20 | 12177 |
| BCL11A-10236 | − | CUCGGCCUUGGGGGCGCCCU | 20 | 12178 |
| BCL11A-10237 | − | CCCGGUCCCUGGCUCGGCCU | 20 | 12179 |
| BCL11A-10238 | − | UUUCUUUGCUGUCCUCUCCU | 20 | 12180 |
| BCL11A-10239 | + | CCCGAGCCCGCGGCUGCGCU | 20 | 12181 |
| BCL11A-10240 | + | GGAGGCUGCAGCCCCGGGCU | 20 | 12182 |
| BCL11A-10241 | − | CCCGAGCGCAGCCGCGGGCU | 20 | 12183 |
| BCL11A-10242 | − | CGGCGGCGGGGAGGGGAAGU | 20 | 12184 |
| BCL11A-10243 | − | CGCUCCUGAGUCCGCGGAGU | 20 | 12185 |
| BCL11A-10244 | + | CCCAUUUUCUUACGGUGAGU | 20 | 12186 |
| BCL11A-10245 | − | GCGGCGACGGGGAGAGCCGU | 20 | 12187 |
| BCL11A-10246 | − | CUUUUGUUCCGGCCAGAGGU | 20 | 12188 |
| BCL11A-10247 | + | CGCAGCGGGCGAGGGGAGGU | 20 | 12189 |
| BCL11A-10248 | − | CCGUAAGAAAAUGGGGGGGU | 20 | 12190 |
| BCL11A-10249 | − | UCACAUGCAAACCUGGGGGU | 20 | 12191 |
| BCL11A-10250 | − | ACCUGGGGGUGGGAGCUGGU | 20 | 12192 |
| BCL11A-9586 | − | AUUUUAGAGUCCGCGUGUGU | 20 | 12193 |
| BCL11A-10251 | + | UGCCACUUUCUCACUAUUGU | 20 | 12194 |
| BCL11A-10252 | − | ACCCGCAGCCCUCCAAACUU | 20 | 12195 |
| BCL11A-10253 | − | GGAGGCUCAGCUCUCAACUU | 20 | 12196 |
| BCL11A-10254 | − | GCGCGGGCUCCUGGAGACUU | 20 | 12197 |
| BCL11A-10255 | − | CGGGCUCGGGGCUUUUACUU | 20 | 12198 |
| BCL11A-10256 | − | CCGGUCCCUGGCUCGGCCUU | 20 | 12199 |
| BCL11A-10257 | + | CGCGGAAUCCAGCCUAAGUU | 20 | 12200 |
| BCL11A-10258 | − | AAAGAGGUGAGACUGGCUUU | 20 | 12201 |

[1101] Table 19A provides exemplary targeting domains for knocking down the BCL11A gene selected according to the first tier parameters. The targeting domains bind within 500 bp (e.g., upstream or downstream) of a transcription start site (TSS) and have a high level of orthogonality, and the PAM is NNGRRT. It is contemplated herein that in an embodiment the targeting domain hybridizes to the target domain through complementary base pairing. Any of the targeting domains in the table can be used with a S. aureus eiCas9 molecule or eiCas9 fusion protein (e.g., an eiCas9 fused to a transcription repressor domain) to alter the BCL11A gene (e.g., reduce or eliminate BCL11A gene expression, BCL11A protein function, or the level of BCL11A protein). One or more gRNA may be used to target an eiCas9 to the promoter region of the BCL11A gene.

TABLE 19A
1st Tier

| | DNA | | Target Site | |
|---|---|---|---|---|
| gRNA Name | Strand | Targeting Domain | Length | SEQ ID NO: |
| BCL11A-10259 | + | GGCGUGGCCGGGAGAGAAGAA | 21 | 12202 |
| BCL11A-10260 | + | UGGCGUGGCCGGGAGAGAAGAA | 22 | 12203 |
| BCL11A-10261 | + | GUGGCGUGGCCGGGAGAGAAGAA | 23 | 12204 |
| BCL11A-10262 | + | GGUGGCGUGGCCGGGAGAGAAGAA | 24 | 12205 |
| BCL11A-10263 | + | CACGGCAAUGGUUCCAGA | 18 | 12206 |
| BCL11A-10264 | + | ACACGGCAAUGGUUCCAGA | 19 | 12207 |
| BCL11A-9557 | + | UACACGGCAAUGGUUCCAGA | 20 | 12208 |
| BCL11A-10265 | + | AUACACGGCAAUGGUUCCAGA | 21 | 12209 |
| BCL11A-10266 | + | CAUACACGGCAAUGGUUCCAGA | 22 | 12210 |
| BCL11A-10267 | + | GCAUACACGGCAAUGGUUCCAGA | 23 | 12211 |
| BCL11A-10268 | + | UGCAUACACGGCAAUGGUUCCAGA | 24 | 12212 |
| BCL11A-6258 | + | UUAUUGGGUUACUUACGC | 18 | 12213 |
| BCL11A-6259 | + | AUUAUUGGGUUACUUACGC | 19 | 12214 |
| BCL11A-6260 | + | UAUUAUUGGGUUACUUACGC | 20 | 12215 |
| BCL11A-6261 | + | CUAUUAUUGGGUUACUUACGC | 21 | 12216 |
| BCL11A-6262 | + | ACUAUUAUUGGGUUACUUACGC | 22 | 12217 |
| BCL11A-6263 | + | UACUAUUAUUGGGUUACUUACGC | 23 | 12218 |
| BCL11A-6264 | + | UUACUAUUAUUGGGUUACUUACGC | 24 | 12219 |
| BCL11A-10269 | + | GGGAGAGAAGAAAGGGGUGGC | 21 | 12220 |
| BCL11A-10270 | + | CGGGAGAGAAGAAAGGGGUGGC | 22 | 12221 |
| BCL11A-10271 | + | CCGGGAGAGAAGAAAGGGGUGGC | 23 | 12222 |
| BCL11A-10272 | + | GCCGGGAGAGAAGAAAGGGGUGGC | 24 | 12223 |
| BCL11A-6265 | + | UCCCGUUUGCUUAAGUGC | 18 | 12224 |
| BCL11A-6266 | + | UUCCCGUUUGCUUAAGUGC | 19 | 12225 |
| BCL11A-5352 | + | AUUCCCGUUUGCUUAAGUGC | 20 | 12226 |
| BCL11A-6267 | + | AAUUCCCGUUUGCUUAAGUGC | 21 | 12227 |
| BCL11A-6268 | + | GAAUUCCCGUUUGCUUAAGUGC | 22 | 12228 |
| BCL11A-6269 | + | AGAAUUCCCGUUUGCUUAAGUGC | 23 | 12229 |
| BCL11A-6270 | + | GAGAAUUCCCGUUUGCUUAAGUGC | 24 | 12230 |
| BCL11A-10273 | + | CCUGCGAACUUGAACGUC | 18 | 12231 |
| BCL11A-10274 | + | CCCUGCGAACUUGAACGUC | 19 | 12232 |
| BCL11A-9570 | + | UCCCUGCGAACUUGAACGUC | 20 | 12233 |
| BCL11A-10275 | + | GUCCCUGCGAACUUGAACGUC | 21 | 12234 |
| BCL11A-10276 | + | CGUCCCUGCGAACUUGAACGUC | 22 | 12235 |
| BCL11A-10277 | + | ACGUCCCUGCGAACUUGAACGUC | 23 | 12236 |
| BCL11A-10278 | + | GACGUCCCUGCGAACUUGAACGUC | 24 | 12237 |
| BCL11A-10279 | + | UACAAAGAUGGCGCAGGGAAG | 21 | 12238 |
| BCL11A-10280 | + | AUACAAAGAUGGCGCAGGGAAG | 22 | 12239 |
| BCL11A-10281 | + | AAUACAAAGAUGGCGCAGGGAAG | 23 | 12240 |
| BCL11A-10282 | + | UAAUACAAAGAUGGCGCAGGGAAG | 24 | 12241 |
| BCL11A-10283 | + | CGGUUCACAUCGGGAGAG | 18 | 12242 |
| BCL11A-10284 | + | UCGGUUCACAUCGGGAGAG | 19 | 12243 |
| BCL11A-10285 | + | CUCGGUUCACAUCGGGAGAG | 20 | 12244 |
| BCL11A-10286 | + | GCUCGGUUCACAUCGGGAGAG | 21 | 12245 |
| BCL11A-10287 | + | GGCUCGGUUCACAUCGGGAGAG | 22 | 12246 |
| BCL11A-10288 | + | CGGCUCGGUUCACAUCGGGAGAG | 23 | 12247 |
| BCL11A-10289 | + | ACGGCUCGGUUCACAUCGGGAGAG | 24 | 12248 |
| BCL11A-10290 | + | AAUGGUUCCAGAUGGGAU | 18 | 12249 |
| BCL11A-10291 | + | CAAUGGUUCCAGAUGGGAU | 19 | 12250 |
| BCL11A-10292 | + | GCAAUGGUUCCAGAUGGGAU | 20 | 12251 |
| BCL11A-10293 | + | GGCAAUGGUUCCAGAUGGGAU | 21 | 12252 |
| BCL11A-10294 | + | CGGCAAUGGUUCCAGAUGGGAU | 22 | 12253 |
| BCL11A-10295 | + | ACGGCAAUGGUUCCAGAUGGGAU | 23 | 12254 |
| BCL11A-10296 | + | CACGGCAAUGGUUCCAGAUGGGAU | 24 | 12255 |
| BCL11A-10297 | + | AACUUGAACGUCAGGAGU | 18 | 12256 |
| BCL11A-10298 | + | GAACUUGAACGUCAGGAGU | 19 | 12257 |
| BCL11A-10299 | + | CGAACUUGAACGUCAGGAGU | 20 | 12258 |
| BCL11A-10300 | + | GCGAACUUGAACGUCAGGAGU | 21 | 12259 |
| BCL11A-10301 | + | UGCGAACUUGAACGUCAGGAGU | 22 | 12260 |
| BCL11A-10302 | + | CUGCGAACUUGAACGUCAGGAGU | 23 | 12261 |
| BCL11A-10303 | + | CCUGCGAACUUGAACGUCAGGAGU | 24 | 12262 |
| BCL11A-6304 | − | AACCCCAGCACUUAAGCAAAC | 21 | 12263 |
| BCL11A-6305 | − | AAACCCCAGCACUUAAGCAAAC | 22 | 12264 |
| BCL11A-6306 | − | CAAACCCCAGCACUUAAGCAAAC | 23 | 12265 |
| BCL11A-6307 | − | GCAAACCCCAGCACUUAAGCAAAC | 24 | 12266 |
| BCL11A-10304 | − | AAGCAAAAGCGAGGGGGAGAG | 21 | 12267 |
| BCL11A-10305 | − | GAAGCAAAAGCGAGGGGGAGAG | 22 | 12268 |
| BCL11A-10306 | − | AGAAGCAAAAGCGAGGGGGAGAG | 23 | 12269 |
| BCL11A-10307 | − | UAGAAGCAAAAGCGAGGGGGAGAG | 24 | 12270 |

[1102] Table 19B provides exemplary targeting domains for knocking down the BCL11A gene selected according to the second tier parameters. The targeting domains bind within 500 bp (e.g., upstream or downstream) of a transcription start site (TSS), and PAM is NNGRRT. It is contemplated herein that in an embodiment the targeting domain hybridizes to the target domain through complementary base pairing. Any of the targeting domains in the table can be used with a S. aureus eiCas9 molecule or eiCas9 fusion protein (e.g., an eiCas9 fused to a transcription repressor domain) to alter the BCL11A gene (e.g., reduce or eliminate BCL11A gene expression, BCL protein function, or the level of BCL11A protein). One or more gRNA may be used to target an eiCas9 to the promoter region of the BCL gene.

TABLE 19B
2nd Tier

| | DNA | | Target Site | SEQ |
|---|---|---|---|---|
| gRNA Name | Strand | Targeting Domain | Length | ID NO: |
| BCL11A-10308 | + | GUGGCCGGGAGAGAAGAA | 18 | 12271 |
| BCL11A-10309 | + | CGUGGCCGGGAGAGAAGAA | 19 | 12272 |
| BCL11A-9697 | + | GCGUGGCCGGGAGAGAAGAA | 20 | 12273 |
| BCL11A-10310 | + | GUGGCAGGGGUGGGAGGA | 18 | 12274 |
| BCL11A-10311 | + | GGUGGCAGGGGUGGGAGGA | 19 | 12275 |
| BCL11A-10312 | + | GGGUGGCAGGGGUGGGAGGA | 20 | 12276 |
| BCL11A-10313 | + | GGGGUGGCAGGGGUGGGAGGA | 21 | 12277 |
| BCL11A-10314 | + | AGGGGUGGCAGGGGUGGGAGGA | 22 | 12278 |
| BCL11A-10315 | + | AAGGGGUGGCAGGGGUGGGAGGA | 23 | 12279 |
| BCL11A-10316 | + | AAAGGGGUGGCAGGGGUGGGAGGA | 24 | 12280 |
| BCL11A-10317 | + | UAAUUAUUAUUACUAUUA | 18 | 12281 |
| BCL11A-10318 | + | AUAAUUAUUAUUACUAUUA | 19 | 12282 |
| BCL11A-10319 | + | AAUAAUUAUUAUUACUAUUA | 20 | 12283 |
| BCL11A-10320 | + | UAAUAAUUAUUAUUACUAUUA | 21 | 12284 |
| BCL11A-10321 | + | UUAAUAAUUAUUAUUACUAUUA | 22 | 12285 |
| BCL11A-10322 | + | AUUAAUAAUUAUUAUUACUAUUA | 23 | 12286 |
| BCL11A-10323 | + | UAUUAAUAAUUAUUAUUACUAUUA | 24 | 12287 |
| BCL11A-10324 | + | AGAGAAGAAAGGGGUGGC | 18 | 12288 |
| BCL11A-10325 | + | GAGAGAAGAAAGGGGUGGC | 19 | 12289 |
| BCL11A-9726 | + | GGAGAGAAGAAAGGGGUGGC | 20 | 12290 |
| BCL11A-10326 | + | AAAGAUGGCGCAGGGAAG | 18 | 12291 |
| BCL11A-10327 | + | CAAAGAUGGCGCAGGGAAG | 19 | 12292 |
| BCL11A-10328 | + | ACAAAGAUGGCGCAGGGAAG | 20 | 12293 |
| BCL11A-6350 | − | CCCAGCACUUAAGCAAAC | 18 | 12294 |
| BCL11A-6351 | − | CCCCAGCACUUAAGCAAAC | 19 | 12295 |
| BCL11A-5458 | − | ACCCCAGCACUUAAGCAAAC | 20 | 12296 |
| BCL11A-10329 | − | UUCACGAGAAAAACCUCC | 18 | 12297 |
| BCL11A-10330 | − | UUUCACGAGAAAAACCUCC | 19 | 12298 |
| BCL11A-10331 | − | UUUUCACGAGAAAAACCUCC | 20 | 12299 |
| BCL11A-10332 | − | UUUUUCACGAGAAAAACCUCC | 21 | 12300 |
| BCL11A-10333 | − | AUUUUUCACGAGAAAAACCUCC | 22 | 12301 |
| BCL11A-10334 | − | AAUUUUUCACGAGAAAAACCUCC | 23 | 12302 |
| BCL11A-10335 | − | AAAUUUUUCACGAGAAAAACCUCC | 24 | 12303 |
| BCL11A-10336 | − | UGAUGAAGAUAUUUUCUC | 18 | 12304 |
| BCL11A-10337 | − | CUGAUGAAGAUAUUUUCUC | 19 | 12305 |
| BCL11A-9731 | − | ACUGAUGAAGAUAUUUUCUC | 20 | 12306 |
| BCL11A-10338 | − | CACUGAUGAAGAUAUUUUCUC | 21 | 12307 |
| BCL11A-10339 | − | GCACUGAUGAAGAUAUUUUCUC | 22 | 12308 |
| BCL11A-10340 | − | GGCACUGAUGAAGAUAUUUUCUC | 23 | 12309 |
| BCL11A-10341 | − | AGGCACUGAUGAAGAUAUUUUCUC | 24 | 12310 |
| BCL11A-10342 | − | CAAAAGCGAGGGGGAGAG | 18 | 12311 |
| BCL11A-10343 | − | GCAAAAGCGAGGGGGAGAG | 19 | 12312 |
| BCL11A-4583 | − | AGCAAAAGCGAGGGGGAGAG | 20 | 12313 |
| BCL11A-10344 | − | UAUUAUUUCUAAUUUAUU | 18 | 12314 |
| BCL11A-10345 | − | GUAUUAUUUCUAAUUUAUU | 19 | 12315 |
| BCL11A-10346 | − | UGUAUUAUUUCUAAUUUAUU | 20 | 12316 |
| BCL11A-10347 | − | UUGUAUUAUUUCUAAUUUAUU | 21 | 12317 |
| BCL11A-10348 | − | UUUGUAUUAUUUCUAAUUUAUU | 22 | 12318 |
| BCL11A-10349 | − | CUUUGUAUUAUUUCUAAUUUAUU | 23 | 12319 |
| BCL11A-10350 | − | UCUUUGUAUUAUUUCUAAUUUAUU | 24 | 12320 |
| BCL11A-10351 | − | UUGAAUAAUCUUUCAUUU | 18 | 12321 |
| BCL11A-10352 | − | UUUGAAUAAUCUUUCAUUU | 19 | 12322 |
| BCL11A-10353 | − | UUUUGAAUAAUCUUUCAUUU | 20 | 12323 |
| BCL11A-10354 | − | UUUUUGAAUAAUCUUUCAUUU | 21 | 12324 |
| BCL11A-10355 | − | UUUUUUGAAUAAUCUUUCAUUU | 22 | 12325 |
| BCL11A-10356 | − | CUUUUUUGAAUAAUCUUUCAUUU | 23 | 12326 |
| BCL11A-10357 | − | UCUUUUUUGAAUAAUCUUUCAUUU | 24 | 12327 |

[1103] Table 19C provides exemplary targeting domains for knocking down the BCL11A gene selected according to the third tier parameters. The targeting domains bind within 500 bp (e.g., upstream or downstream) of a transcription start site (TSS), and the PAM is NNGRRV. It is contemplated herein that in an embodiment the targeting domain hybridizes to the target domain through complementary base pairing. Any of the targeting domains in the table can be used with a S. aureus eiCas9 molecule or eiCas9 fusion protein (e.g., an eiCas9 fused to a transcription repressor domain) to alter the BCL11A gene (e.g., reduce or eliminate BCL11A gene expression, BCL11A protein function, or the level of BCL11A protein). One or more gRNA may be used

TABLE 19C
3rd Tier

| | DNA | | Target Site | SEQ |
|---|---|---|---|---|
| gRNA Name | Strand | Targeting Domain | Length | ID NO: |
| BCL11A-10358 | + | AAAAAAAAAAAAAAAAAA | 18 | 12328 |
| BCL11A-10359 | + | AAAAAAAAAAAAAAAAAAA | 19 | 12329 |
| BCL11A-4899 | + | AAAAAAAAAAAAAAAAAAAA | 20 | 12330 |
| BCL11A-10360 | + | AAAAAAAAAAAAAAAAAAAAA | 21 | 12331 |
| BCL11A-10361 | + | AAAAAAAAAAAAAAAAAAAAAA | 22 | 12332 |
| BCL11A-10362 | + | AAAAAAAAAAAAAAAAAAAAAAA | 23 | 12333 |
| BCL11A-10363 | + | AAAAAAAAAAAAAAAAAAAAAAAA | 24 | 12334 |
| BCL11A-10364 | + | CAGGGGCUGGACAUGAAA | 18 | 12335 |
| BCL11A-10365 | + | UCAGGGGCUGGACAUGAAA | 19 | 12336 |
| BCL11A-10366 | + | AUCAGGGGCUGGACAUGAAA | 20 | 12337 |
| BCL11A-10367 | + | CAUCAGGGGCUGGACAUGAAA | 21 | 12338 |
| BCL11A-10368 | + | ACAUCAGGGGCUGGACAUGAAA | 22 | 12339 |
| BCL11A-10369 | + | CACAUCAGGGGCUGGACAUGAAA | 23 | 12340 |
| BCL11A-10370 | + | ACACAUCAGGGGCUGGACAUGAAA | 24 | 12341 |
| BCL11A-10371 | + | ACACACGCGGACUCUAAA | 18 | 12342 |
| BCL11A-10372 | + | CACACACGCGGACUCUAAA | 19 | 12343 |
| BCL11A-10373 | + | CCACACACGCGGACUCUAAA | 20 | 12344 |
| BCL11A-10374 | + | CCCACACACGCGGACUCUAAA | 21 | 12345 |
| BCL11A-10375 | + | CCCCACACACGCGGACUCUAAA | 22 | 12346 |
| BCL11A-10376 | + | CCCCCACACACGCGGACUCUAAA | 23 | 12347 |
| BCL11A-10377 | + | CCCCCCACACACGCGGACUCUAAA | 24 | 12348 |
| BCL11A-10378 | + | AGAGGGAGAGAGAGAGAA | 18 | 12349 |
| BCL11A-10379 | + | AAGAGGGAGAGAGAGAGAA | 19 | 12350 |
| BCL11A-4921 | + | AAAGAGGGAGAGAGAGAGAA | 20 | 12351 |
| BCL11A-10380 | + | AAAAGAGGGAGAGAGAGAGAA | 21 | 12352 |
| BCL11A-10381 | + | AAAAAGAGGGAGAGAGAGAGAA | 22 | 12353 |
| BCL11A-10382 | + | AAAAAAGAGGGAGAGAGAGAGAA | 23 | 12354 |
| BCL11A-10383 | + | AAAAAAAGAGGGAGAGAGAGAGAA | 24 | 12355 |
| BCL11A-10384 | + | AGGGCGAGCAGGAGAGAA | 18 | 12356 |
| BCL11A-10385 | + | CAGGGCGAGCAGGAGAGAA | 19 | 12357 |
| BCL11A-4422 | + | GCAGGGCGAGCAGGAGAGAA | 20 | 12358 |
| BCL11A-10386 | + | GGCAGGGCGAGCAGGAGAGAA | 21 | 12359 |
| BCL11A-10387 | + | GGGCAGGGCGAGCAGGAGAGAA | 22 | 12360 |
| BCL11A-10388 | + | UGGGCAGGGCGAGCAGGAGAGAA | 23 | 12361 |
| BCL11A-10389 | + | AUGGGCAGGGCGAGCAGGAGAGAA | 24 | 12362 |
| BCL11A-10390 | + | GAGAAGGGGAGGAGGGAA | 18 | 12363 |
| BCL11A-10391 | + | AGAGAAGGGGAGGAGGGAA | 19 | 12364 |
| BCL11A-4404 | + | GAGAGAAGGGGAGGAGGGAA | 20 | 12365 |
| BCL11A-10392 | + | GGAGAGAAGGGGAGGAGGGAA | 21 | 12366 |
| BCL11A-10393 | + | AGGAGAGAAGGGGAGGAGGGAA | 22 | 12367 |
| BCL11A-10394 | + | CAGGAGAGAAGGGGAGGAGGGAA | 23 | 12368 |
| BCL11A-10395 | + | GCAGGAGAGAAGGGGAGGAGGGAA | 24 | 12369 |
| BCL11A-10396 | + | ACGACGGCUCGGUUCACA | 18 | 12370 |
| BCL11A-10397 | + | GACGACGGCUCGGUUCACA | 19 | 12371 |
| BCL11A-10398 | + | GGACGACGGCUCGGUUCACA | 20 | 12372 |
| BCL11A-10399 | + | CGGACGACGGCUCGGUUCACA | 21 | 12373 |
| BCL11A-10400 | + | GCGGACGACGGCUCGGUUCACA | 22 | 12374 |
| BCL11A-10401 | + | GGCGGACGACGGCUCGGUUCACA | 23 | 12375 |
| BCL11A-10402 | + | GGGCGGACGACGGCUCGGUUCACA | 24 | 12376 |
| BCL11A-10403 | + | AAGGGGAAGCUCACACCA | 18 | 12377 |
| BCL11A-10404 | + | GAAGGGGAAGCUCACACCA | 19 | 12378 |
| BCL11A-10405 | + | GGAAGGGGAAGCUCACACCA | 20 | 12379 |
| BCL11A-10406 | + | GGGAAGGGGAAGCUCACACCA | 21 | 12380 |
| BCL11A-10407 | + | AGGGAAGGGGAAGCUCACACCA | 22 | 12381 |
| BCL11A-10408 | + | GAGGGAAGGGGAAGCUCACACCA | 23 | 12382 |
| BCL11A-10409 | + | GGAGGGAAGGGGAAGCUCACACCA | 24 | 12383 |
| BCL11A-10410 | + | AGAAAGAAGGAGACUCCA | 18 | 12384 |
| BCL11A-10411 | + | UAGAAAGAAGGAGACUCCA | 19 | 12385 |
| BCL11A-10412 | + | UUAGAAAGAAGGAGACUCCA | 20 | 12386 |
| BCL11A-10413 | + | GUUAGAAAGAAGGAGACUCCA | 21 | 12387 |
| BCL11A-10414 | + | GGUUAGAAAGAAGGAGACUCCA | 22 | 12388 |
| BCL11A-10415 | + | GGGUUAGAAAGAAGGAGACUCCA | 23 | 12389 |
| BCL11A-10416 | + | CGGGUUAGAAAGAAGGAGACUCCA | 24 | 12390 |
| BCL11A-10417 | + | GGCUCACCAGUGGCCGCA | 18 | 12391 |
| BCL11A-10418 | + | GGGCUCACCAGUGGCCGCA | 19 | 12392 |
| BCL11A-10419 | + | CGGGCUCACCAGUGGCCGCA | 20 | 12393 |
| BCL11A-10420 | + | GCGGGCUCACCAGUGGCCGCA | 21 | 12394 |
| BCL11A-10421 | + | CGCGGGCUCACCAGUGGCCGCA | 22 | 12395 |
| BCL11A-10422 | + | CCGCGGGCUCACCAGUGGCCGCA | 23 | 12396 |
| BCL11A-10423 | + | GCCGCGGGCUCACCAGUGGCCGCA | 24 | 12397 |
| BCL11A-10424 | + | UAAUACAAAGAUGGCGCA | 18 | 12398 |
| BCL11A-10425 | + | AUAAUACAAAGAUGGCGCA | 19 | 12399 |
| BCL11A-9702 | + | AAUAAUACAAAGAUGGCGCA | 20 | 12400 |
| BCL11A-10426 | + | AAAUAAUACAAAGAUGGCGCA | 21 | 12401 |
| BCL11A-10427 | + | GAAAUAAUACAAAGAUGGCGCA | 22 | 12402 |
| BCL11A-10428 | + | AGAAAUAAUACAAAGAUGGCGCA | 23 | 12403 |
| BCL11A-10429 | + | UAGAAAUAAUACAAAGAUGGCGCA | 24 | 12404 |
| BCL11A-10430 | + | AAAAAAAAAAAAAAAAGA | 18 | 12405 |
| BCL11A-10431 | + | AAAAAAAAAAAAAAAAAGA | 19 | 12406 |
| BCL11A-4527 | + | AAAAAAAAAAAAAAAAAAGA | 20 | 12407 |
| BCL11A-10432 | + | AAAAAAAAAAAAAAAAAAAGA | 21 | 12408 |
| BCL11A-10433 | + | AAAAAAAAAAAAAAAAAAAAGA | 22 | 12409 |
| BCL11A-10434 | + | AAAAAAAAAAAAAAAAAAAAAGA | 23 | 12410 |
| BCL11A-10435 | + | AAAAAAAAAAAAAAAAAAAAAAGA | 24 | 12411 |
| BCL11A-10436 | + | AGAGCCGGGUUAGAAAGA | 18 | 12412 |
| BCL11A-10437 | + | GAGAGCCGGGUUAGAAAGA | 19 | 12413 |
| BCL11A-9708 | + | GGAGAGCCGGGUUAGAAAGA | 20 | 12414 |
| BCL11A-10438 | + | GGGAGAGCCGGGUUAGAAAGA | 21 | 12415 |
| BCL11A-10439 | + | CGGGAGAGCCGGGUUAGAAAGA | 22 | 12416 |
| BCL11A-10440 | + | UCGGGAGAGCCGGGUUAGAAAGA | 23 | 12417 |
| BCL11A-10441 | + | AUCGGGAGAGCCGGGUUAGAAAGA | 24 | 12418 |
| BCL11A-10442 | + | CGUGGCCGGGAGAGAAGA | 18 | 12419 |
| BCL11A-10443 | + | GCGUGGCCGGGAGAGAAGA | 19 | 12420 |
| BCL11A-10444 | + | GGCGUGGCCGGGAGAGAAGA | 20 | 12421 |
| BCL11A-10445 | + | UGGCGUGGCCGGGAGAGAAGA | 21 | 12422 |
| BCL11A-10446 | + | GUGGCGUGGCCGGGAGAGAAGA | 22 | 12423 |
| BCL11A-10447 | + | GGUGGCGUGGCCGGGAGAGAAGA | 23 | 12424 |
| BCL11A-10448 | + | CGGUGGCGUGGCCGGGAGAGAAGA | 24 | 12425 |
| BCL11A-10449 | + | AGAGAGAGAGAAGAGAGA | 18 | 12426 |
| BCL11A-10450 | + | GAGAGAGAGAGAAGAGAGA | 19 | 12427 |
| BCL11A-4845 | + | GGAGAGAGAGAGAAGAGAGA | 20 | 12428 |
| BCL11A-10451 | + | GGGAGAGAGAGAGAAGAGAGA | 21 | 12429 |
| BCL11A-10452 | + | AGGGAGAGAGAGAGAAGAGAGA | 22 | 12430 |
| BCL11A-10453 | + | GAGGGAGAGAGAGAGAAGAGAGA | 23 | 12431 |
| BCL11A-10454 | + | AGAGGGAGAGAGAGAGAAGAGAGA | 24 | 12432 |
| BCL11A-10455 | + | UAGAGGGAGAGAGAGAGA | 18 | 12433 |
| BCL11A-10456 | + | AUAGAGGGAGAGAGAGAGA | 19 | 12434 |
| BCL11A-10457 | + | GAUAGAGGGAGAGAGAGAGA | 20 | 12435 |
| BCL11A-10458 | + | AGAUAGAGGGAGAGAGAGAGA | 21 | 12436 |
| BCL11A-10459 | + | GAGAUAGAGGGAGAGAGAGAGA | 22 | 12437 |
| BCL11A-10460 | + | AGAGAUAGAGGGAGAGAGAGAGA | 23 | 12438 |
| BCL11A-10461 | + | GAGAGAUAGAGGGAGAGAGAGAGA | 24 | 12439 |
| BCL11A-10462 | + | GAUAGAGGGAGAGAGAGA | 18 | 12440 |
| BCL11A-10463 | + | AGAUAGAGGGAGAGAGAGA | 19 | 12441 |
| BCL11A-10464 | + | GAGAUAGAGGGAGAGAGAGA | 20 | 12442 |
| BCL11A-10465 | + | AGAGAUAGAGGGAGAGAGAGA | 21 | 12443 |
| BCL11A-10466 | + | GAGAGAUAGAGGGAGAGAGAGA | 22 | 12444 |
| BCL11A-10467 | + | AGAGAGAUAGAGGGAGAGAGAGA | 23 | 12445 |
| BCL11A-10468 | + | AAGAGAGAUAGAGGGAGAGAGAGA | 24 | 12446 |
| BCL11A-10469 | + | AAAAAAGAGGGAGAGAGA | 18 | 12447 |
| BCL11A-10470 | + | AAAAAAAGAGGGAGAGAGA | 19 | 12448 |
| BCL11A-4911 | + | AAAAAAAAGAGGGAGAGAGA | 20 | 12449 |
| BCL11A-10471 | + | AAAAAAAAAGAGGGAGAGAGA | 21 | 12450 |
| BCL11A-10472 | + | AAAAAAAAAAGAGGGAGAGAGA | 22 | 12451 |
| BCL11A-10473 | + | AAAAAAAAAAAGAGGGAGAGAGA | 23 | 12452 |
| BCL11A-10474 | + | AAAAAAAAAAAAGAGGGAGAGAGA | 24 | 12453 |
| BCL11A-10475 | + | GAGAUAGAGGGAGAGAGA | 18 | 12454 |
| BCL11A-10476 | + | AGAGAUAGAGGGAGAGAGA | 19 | 12455 |
| BCL11A-10477 | + | GAGAGAUAGAGGGAGAGAGA | 20 | 12456 |
| BCL11A-10478 | + | AGAGAGAUAGAGGGAGAGAGA | 21 | 12457 |
| BCL11A-10479 | + | AAGAGAGAUAGAGGGAGAGAGA | 22 | 12458 |
| BCL11A-10480 | + | GAAGAGAGAUAGAGGGAGAGAGA | 23 | 12459 |
| BCL11A-10481 | + | AGAAGAGAGAUAGAGGGAGAGAGA | 24 | 12460 |
| BCL11A-10482 | + | CAGGGCGAGCAGGAGAGA | 18 | 12461 |
| BCL11A-10483 | + | GCAGGGCGAGCAGGAGAGA | 19 | 12462 |
| BCL11A-4464 | + | GGCAGGGCGAGCAGGAGAGA | 20 | 12463 |
| BCL11A-10484 | + | GGGCAGGGCGAGCAGGAGAGA | 21 | 12464 |
| BCL11A-10485 | + | UGGGCAGGGCGAGCAGGAGAGA | 22 | 12465 |
| BCL11A-10486 | + | AUGGGCAGGGCGAGCAGGAGAGA | 23 | 12466 |
| BCL11A-10487 | + | CAUGGGCAGGGCGAGCAGGAGAGA | 24 | 12467 |
| BCL11A-10488 | + | AAAAAAAAGAGGGAGAGA | 18 | 12468 |
| BCL11A-10489 | + | AAAAAAAAAGAGGGAGAGA | 19 | 12469 |
| BCL11A-4909 | + | AAAAAAAAAAGAGGGAGAGA | 20 | 12470 |
| BCL11A-10490 | + | AAAAAAAAAAAGAGGGAGAGA | 21 | 12471 |
| BCL11A-10491 | + | AAAAAAAAAAAAGAGGGAGAGA | 22 | 12472 |
| BCL11A-10492 | + | AAAAAAAAAAAAAGAGGGAGAGA | 23 | 12473 |
| BCL11A-10493 | + | AAAAAAAAAAAAAAGAGGGAGAGA | 24 | 12474 |
| BCL11A-10494 | + | GAGAGAUAGAGGGAGAGA | 18 | 12475 |
| BCL11A-10495 | + | AGAGAGAUAGAGGGAGAGA | 19 | 12476 |
| BCL11A-10496 | + | AAGAGAGAUAGAGGGAGAGA | 20 | 12477 |
| BCL11A-10497 | + | GAAGAGAGAUAGAGGGAGAGA | 21 | 12478 |
| BCL11A-10498 | + | AGAAGAGAGAUAGAGGGAGAGA | 22 | 12479 |
| BCL11A-10499 | + | GAGAAGAGAGAUAGAGGGAGAGA | 23 | 12480 |
| BCL11A-10500 | + | AGAGAAGAGAGAUAGAGGGAGAGA | 24 | 12481 |
| BCL11A-10501 | + | AAAAAAAAAAGAGGGAGA | 18 | 12482 |
| BCL11A-10502 | + | AAAAAAAAAAAGAGGGAGA | 19 | 12483 |
| BCL11A-4907 | + | AAAAAAAAAAAAGAGGGAGA | 20 | 12484 |
| BCL11A-10503 | + | AAAAAAAAAAAAAGAGGGAGA | 21 | 12485 |
| BCL11A-10504 | + | AAAAAAAAAAAAAAGAGGGAGA | 22 | 12486 |
| BCL11A-10505 | + | AAAAAAAAAAAAAAAGAGGGAGA | 23 | 12487 |
| BCL11A-10506 | + | AAAAAAAAAAAAAAAAGAGGGAGA | 24 | 12488 |
| BCL11A-10507 | + | AAGAGAGAUAGAGGGAGA | 18 | 12489 |
| BCL11A-10508 | + | GAAGAGAGAUAGAGGGAGA | 19 | 12490 |
| BCL11A-10509 | + | AGAAGAGAGAUAGAGGGAGA | 20 | 12491 |
| BCL11A-10510 | + | GAGAAGAGAGAUAGAGGGAGA | 21 | 12492 |
| BCL11A-10511 | + | AGAGAAGAGAGAUAGAGGGAGA | 22 | 12493 |
| BCL11A-10512 | + | GAGAGAAGAGAGAUAGAGGGAGA | 23 | 12494 |
| BCL11A-10513 | + | AGAGAGAAGAGAGAUAGAGGGAGA | 24 | 12495 |
| BCL11A-10514 | + | AGAGAGAAGAGAGAUAGA | 18 | 12496 |
| BCL11A-10515 | + | GAGAGAGAAGAGAGAUAGA | 19 | 12497 |
| BCL11A-9709 | + | AGAGAGAGAAGAGAGAUAGA | 20 | 12498 |
| BCL11A-10516 | + | GAGAGAGAGAAGAGAGAUAGA | 21 | 12499 |
| BCL11A-10517 | + | AGAGAGAGAGAAGAGAGAUAGA | 22 | 12500 |
| BCL11A-10518 | + | GAGAGAGAGAGAAGAGAGAUAGA | 23 | 12501 |
| BCL11A-10519 | + | GGAGAGAGAGAGAAGAGAGAUAGA | 24 | 12502 |
| BCL11A-10520 | + | CGGGAGAGCCGGGUUAGA | 18 | 12503 |
| BCL11A-10521 | + | UCGGGAGAGCCGGGUUAGA | 19 | 12504 |
| BCL11A-10522 | + | AUCGGGAGAGCCGGGUUAGA | 20 | 12505 |
| BCL11A-10523 | + | CAUCGGGAGAGCCGGGUUAGA | 21 | 12506 |
| BCL11A-10524 | + | ACAUCGGGAGAGCCGGGUUAGA | 22 | 12507 |
| BCL11A-10525 | + | CACAUCGGGAGAGCCGGGUUAGA | 23 | 12508 |
| BCL11A-10526 | + | UCACAUCGGGAGAGCCGGGUUAGA | 24 | 12509 |
| BCL11A-10527 | + | GGGGGAGGGGCGGGCCGA | 18 | 12510 |
| BCL11A-10528 | + | CGGGGGAGGGGCGGGCCGA | 19 | 12511 |
| BCL11A-4648 | + | CCGGGGGAGGGGCGGGCCGA | 20 | 12512 |
| BCL11A-10529 | + | CCCGGGGGAGGGGCGGGCCGA | 21 | 12513 |
| BCL11A-10530 | + | CCCCGGGGGAGGGGCGGGCCGA | 22 | 12514 |
| BCL11A-10531 | + | CCCCCGGGGGAGGGGCGGGCCGA | 23 | 12515 |
| BCL11A-10532 | + | GCCCCCGGGGGAGGGGCGGGCCGA | 24 | 12516 |
| BCL11A-10533 | + | UGGGCAGGGCGAGCAGGA | 18 | 12517 |
| BCL11A-10534 | + | AUGGGCAGGGCGAGCAGGA | 19 | 12518 |
| BCL11A-10535 | + | CAUGGGCAGGGCGAGCAGGA | 20 | 12519 |
| BCL11A-10536 | + | ACAUGGGCAGGGCGAGCAGGA | 21 | 12520 |
| BCL11A-10537 | + | AACAUGGGCAGGGCGAGCAGGA | 22 | 12521 |
| BCL11A-10538 | + | AAACAUGGGCAGGGCGAGCAGGA | 23 | 12522 |
| BCL11A-10539 | + | AAAACAUGGGCAGGGCGAGCAGGA | 24 | 12523 |
| BCL11A-10540 | + | CAGGAGAGAAGGGGAGGA | 18 | 12524 |
| BCL11A-10541 | + | GCAGGAGAGAAGGGGAGGA | 19 | 12525 |
| BCL11A-4584 | + | AGCAGGAGAGAAGGGGAGGA | 20 | 12526 |
| BCL11A-10542 | + | GAGCAGGAGAGAAGGGGAGGA | 21 | 12527 |
| BCL11A-10543 | + | CGAGCAGGAGAGAAGGGGAGGA | 22 | 12528 |
| BCL11A-10544 | + | GCGAGCAGGAGAGAAGGGGAGGA | 23 | 12529 |
| BCL11A-10545 | + | GGCGAGCAGGAGAGAAGGGGAGGA | 24 | 12530 |
| BCL11A-10546 | + | AAAAAAAAAAAAGAGGGA | 18 | 12531 |
| BCL11A-10547 | + | AAAAAAAAAAAAAGAGGGA | 19 | 12532 |
| BCL11A-4905 | + | AAAAAAAAAAAAAAGAGGGA | 20 | 12533 |
| BCL11A-10548 | + | AAAAAAAAAAAAAAAGAGGGA | 21 | 12534 |
| BCL11A-10549 | + | AAAAAAAAAAAAAAAAGAGGGA | 22 | 12535 |
| BCL11A-10550 | + | AAAAAAAAAAAAAAAAAGAGGGA | 23 | 12536 |
| BCL11A-10551 | + | AAAAAAAAAAAAAAAAAAGAGGGA | 24 | 12537 |
| BCL11A-10552 | + | AGAAGAGAGAUAGAGGGA | 18 | 12538 |
| BCL11A-10553 | + | GAGAAGAGAGAUAGAGGGA | 19 | 12539 |
| BCL11A-10554 | + | AGAGAAGAGAGAUAGAGGGA | 20 | 12540 |
| BCL11A-10555 | + | GAGAGAAGAGAGAUAGAGGGA | 21 | 12541 |
| BCL11A-10556 | + | AGAGAGAAGAGAGAUAGAGGGA | 22 | 12542 |
| BCL11A-10557 | + | GAGAGAGAAGAGAGAUAGAGGGA | 23 | 12543 |
| BCL11A-10558 | + | AGAGAGAGAAGAGAGAUAGAGGGA | 24 | 12544 |
| BCL11A-10559 | + | AGAGAAGGGGAGGAGGGA | 18 | 12545 |
| BCL11A-10560 | + | GAGAGAAGGGGAGGAGGGA | 19 | 12546 |
| BCL11A-4459 | + | GGAGAGAAGGGGAGGAGGGA | 20 | 12547 |
| BCL11A-10561 | + | AGGAGAGAAGGGGAGGAGGGA | 21 | 12548 |
| BCL11A-10562 | + | CAGGAGAGAAGGGGAGGAGGGA | 22 | 12549 |
| BCL11A-10563 | + | GCAGGAGAGAAGGGGAGGAGGGA | 23 | 12550 |
| BCL11A-10564 | + | AGCAGGAGAGAAGGGGAGGAGGGA | 24 | 12551 |
| BCL11A-10565 | + | GCGGUGGCGUGGCCGGGA | 18 | 12552 |
| BCL11A-10566 | + | GGCGGUGGCGUGGCCGGGA | 19 | 12553 |
| BCL11A-10567 | + | CGGCGGUGGCGUGGCCGGGA | 20 | 12554 |
| BCL11A-10568 | + | GCGGCGGUGGCGUGGCCGGGA | 21 | 12555 |
| BCL11A-10569 | + | CGCGGCGGUGGCGUGGCCGGGA | 22 | 12556 |
| BCL11A-10570 | + | CCGCGGCGGUGGCGUGGCCGGGA | 23 | 12557 |
| BCL11A-10571 | + | GCCGCGGCGGUGGCGUGGCCGGGA | 24 | 12558 |
| BCL11A-10572 | + | AGGGGCGGGCCGAGGGGA | 18 | 12559 |
| BCL11A-10573 | + | GAGGGGCGGGCCGAGGGGA | 19 | 12560 |
| BCL11A-4461 | + | GGAGGGGCGGGCCGAGGGGA | 20 | 12561 |
| BCL11A-10574 | + | GGGAGGGGCGGGCCGAGGGGA | 21 | 12562 |
| BCL11A-10575 | + | GGGGAGGGGCGGGCCGAGGGGA | 22 | 12563 |
| BCL11A-10576 | + | GGGGGAGGGGCGGGCCGAGGGGA | 23 | 12564 |
| BCL11A-10577 | + | CGGGGGAGGGGCGGGCCGAGGGGA | 24 | 12565 |
| BCL11A-10578 | + | CAAUGGCCAGUGCGGGGA | 18 | 12566 |
| BCL11A-10579 | + | CCAAUGGCCAGUGCGGGGA | 19 | 12567 |
| BCL11A-9558 | + | GCCAAUGGCCAGUGCGGGGA | 20 | 12568 |
| BCL11A-10580 | + | AGCCAAUGGCCAGUGCGGGGA | 21 | 12569 |
| BCL11A-10581 | + | AAGCCAAUGGCCAGUGCGGGGA | 22 | 12570 |
| BCL11A-10582 | + | CAAGCCAAUGGCCAGUGCGGGGA | 23 | 12571 |
| BCL11A-10583 | + | ACAAGCCAAUGGCCAGUGCGGGGA | 24 | 12572 |
| BCL11A-10584 | + | GUCAGGAGUCUGGAUGGA | 18 | 12573 |
| BCL11A-10585 | + | CGUCAGGAGUCUGGAUGGA | 19 | 12574 |
| BCL11A-10586 | + | ACGUCAGGAGUCUGGAUGGA | 20 | 12575 |
| BCL11A-10587 | + | AACGUCAGGAGUCUGGAUGGA | 21 | 12576 |
| BCL11A-10588 | + | GAACGUCAGGAGUCUGGAUGGA | 22 | 12577 |
| BCL11A-10589 | + | UGAACGUCAGGAGUCUGGAUGGA | 23 | 12578 |
| BCL11A-10590 | + | UUGAACGUCAGGAGUCUGGAUGGA | 24 | 12579 |
| BCL11A-10591 | + | AGAGAGAGAAGAGAGAUA | 18 | 12580 |
| BCL11A-10592 | + | GAGAGAGAGAAGAGAGAUA | 19 | 12581 |
| BCL11A-10593 | + | AGAGAGAGAGAAGAGAGAUA | 20 | 12582 |
| BCL11A-10594 | + | GAGAGAGAGAGAAGAGAGAUA | 21 | 12583 |
| BCL11A-10595 | + | GGAGAGAGAGAGAAGAGAGAUA | 22 | 12584 |
| BCL11A-10596 | + | GGGAGAGAGAGAGAAGAGAGAUA | 23 | 12585 |
| BCL11A-10597 | + | AGGGAGAGAGAGAGAAGAGAGAUA | 24 | 12586 |
| BCL11A-10598 | + | GACAGAGACACACAAAAC | 18 | 12587 |
| BCL11A-10599 | + | GGACAGAGACACACAAAAC | 19 | 12588 |
| BCL11A-10600 | + | UGGACAGAGACACACAAAAC | 20 | 12589 |
| BCL11A-10601 | + | AUGGACAGAGACACACAAAAC | 21 | 12590 |
| BCL11A-10602 | + | GAUGGACAGAGACACACAAAAC | 22 | 12591 |
| BCL11A-10603 | + | GGAUGGACAGAGACACACAAAAC | 23 | 12592 |
| BCL11A-10604 | + | UGGAUGGACAGAGACACACAAAAC | 24 | 12593 |
| BCL11A-10605 | + | CGUGACGUCCCUGCGAAC | 18 | 12594 |
| BCL11A-10606 | + | ACGUGACGUCCCUGCGAAC | 19 | 12595 |
| BCL11A-10607 | + | GACGUGACGUCCCUGCGAAC | 20 | 12596 |
| BCL11A-10608 | + | GGACGUGACGUCCCUGCGAAC | 21 | 12597 |
| BCL11A-10609 | + | CGGACGUGACGUCCCUGCGAAC | 22 | 12598 |
| BCL11A-10610 | + | GCGGACGUGACGUCCCUGCGAAC | 23 | 12599 |
| BCL11A-10611 | + | UGCGGACGUGACGUCCCUGCGAAC | 24 | 12600 |
| BCL11A-10612 | + | CUGCUCCCCCCCACACAC | 18 | 12601 |
| BCL11A-10613 | + | CCUGCUCCCCCCCACACAC | 19 | 12602 |
| BCL11A-10614 | + | CCCUGCUCCCCCCCACACAC | 20 | 12603 |
| BCL11A-10615 | + | GCCCUGCUCCCCCCCACACAC | 21 | 12604 |
| BCL11A-10616 | + | CGCCCUGCUCCCCCCCACACAC | 22 | 12605 |
| BCL11A-10617 | + | GCGCCCUGCUCCCCCCCACACAC | 23 | 12606 |
| BCL11A-10618 | + | UGCGCCCUGCUCCCCCCCACACAC | 24 | 12607 |
| BCL11A-10619 | + | UGGACAUGAAAAAGAGAC | 18 | 12608 |
| BCL11A-10620 | + | CUGGACAUGAAAAAGAGAC | 19 | 12609 |
| BCL11A-10621 | + | GCUGGACAUGAAAAAGAGAC | 20 | 12610 |
| BCL11A-10622 | + | GGCUGGACAUGAAAAAGAGAC | 21 | 12611 |
| BCL11A-10623 | + | GGGCUGGACAUGAAAAAGAGAC | 22 | 12612 |
| BCL11A-10624 | + | GGGGCUGGACAUGAAAAAGAGAC | 23 | 12613 |
| BCL11A-10625 | + | AGGGGCUGGACAUGAAAAAGAGAC | 24 | 12614 |
| BCL11A-10626 | + | ACACAUCAGGGGCUGGAC | 18 | 12615 |
| BCL11A-10627 | + | CACACAUCAGGGGCUGGAC | 19 | 12616 |
| BCL11A-10628 | + | ACACACAUCAGGGGCUGGAC | 20 | 12617 |
| BCL11A-10629 | + | GACACACAUCAGGGGCUGGAC | 21 | 12618 |
| BCL11A-10630 | + | GGACACACAUCAGGGGCUGGAC | 22 | 12619 |
| BCL11A-10631 | + | UGGACACACAUCAGGGGCUGGAC | 23 | 12620 |
| BCL11A-10632 | + | AUGGACACACAUCAGGGGCUGGAC | 24 | 12621 |
| BCL11A-6411 | + | UAUUAUUGGGUUACUUAC | 18 | 12622 |
| BCL11A-6412 | + | CUAUUAUUGGGUUACUUAC | 19 | 12623 |
| BCL11A-6413 | + | ACUAUUAUUGGGUUACUUAC | 20 | 12624 |
| BCL11A-6414 | + | UACUAUUAUUGGGUUACUUAC | 21 | 12625 |
| BCL11A-6415 | + | UUACUAUUAUUGGGUUACUUAC | 22 | 12626 |
| BCL11A-6416 | + | AUUACUAUUAUUGGGUUACUUAC | 23 | 12627 |
| BCL11A-6417 | + | UAUUACUAUUAUUGGGUUACUUAC | 24 | 12628 |
| BCL11A-10633 | + | AAAAUGGCAAAAGCCCCC | 18 | 12629 |
| BCL11A-10634 | + | AAAAAUGGCAAAAGCCCCC | 19 | 12630 |
| BCL11A-10635 | + | AAAAAAUGGCAAAAGCCCCC | 20 | 12631 |
| BCL11A-10636 | + | AAAAAAAUGGCAAAAGCCCCC | 21 | 12632 |
| BCL11A-10637 | + | GAAAAAAAUGGCAAAAGCCCCC | 22 | 12633 |
| BCL11A-10638 | + | UGAAAAAAAUGGCAAAAGCCCCC | 23 | 12634 |
| BCL11A-10639 | + | AUGAAAAAAAUGGCAAAAGCCCCC | 24 | 12635 |
| BCL11A-10640 | + | ACGCCAGACGCGGCCCCC | 18 | 12636 |
| BCL11A-10641 | + | GACGCCAGACGCGGCCCCC | 19 | 12637 |
| BCL11A-4456 | + | GGACGCCAGACGCGGCCCCC | 20 | 12638 |
| BCL11A-10642 | + | CGGACGCCAGACGCGGCCCCC | 21 | 12639 |
| BCL11A-10643 | + | GCGGACGCCAGACGCGGCCCCC | 22 | 12640 |
| BCL11A-10644 | + | CGCGGACGCCAGACGCGGCCCCC | 23 | 12641 |
| BCL11A-10645 | + | CCGCGGACGCCAGACGCGGCCCCC | 24 | 12642 |
| BCL11A-10646 | + | GACGCCAGACGCGGCCCC | 18 | 12643 |
| BCL11A-10647 | + | GGACGCCAGACGCGGCCCC | 19 | 12644 |
| BCL11A-4362 | + | CGGACGCCAGACGCGGCCCC | 20 | 12645 |
| BCL11A-10648 | + | GCGGACGCCAGACGCGGCCCC | 21 | 12646 |
| BCL11A-10649 | + | CGCGGACGCCAGACGCGGCCCC | 22 | 12647 |
| BCL11A-10650 | + | CCGCGGACGCCAGACGCGGCCCC | 23 | 12648 |
| BCL11A-10651 | + | UCCGCGGACGCCAGACGCGGCCCC | 24 | 12649 |
| BCL11A-10652 | + | GGACGCCAGACGCGGCCC | 18 | 12650 |
| BCL11A-10653 | + | CGGACGCCAGACGCGGCCC | 19 | 12651 |
| BCL11A-4825 | + | GCGGACGCCAGACGCGGCCC | 20 | 12652 |
| BCL11A-10654 | + | CGCGGACGCCAGACGCGGCCC | 21 | 12653 |
| BCL11A-10655 | + | CCGCGGACGCCAGACGCGGCCC | 22 | 12654 |
| BCL11A-10656 | + | UCCGCGGACGCCAGACGCGGCCC | 23 | 12655 |
| BCL11A-10657 | + | CUCCGCGGACGCCAGACGCGGCCC | 24 | 12656 |
| BCL11A-10658 | + | CCGGGGGAGGGGCGGGCC | 18 | 12657 |
| BCL11A-10659 | + | CCCGGGGGAGGGGCGGGCC | 19 | 12658 |
| BCL11A-5064 | + | CCCCGGGGGAGGGGCGGGCC | 20 | 12659 |
| BCL11A-10660 | + | CCCCCGGGGGAGGGGCGGGCC | 21 | 12660 |
| BCL11A-10661 | + | GCCCCCGGGGGAGGGGCGGGCC | 22 | 12661 |
| BCL11A-10662 | + | GGCCCCCGGGGGAGGGGCGGGCC | 23 | 12662 |
| BCL11A-10663 | + | CGGCCCCCGGGGGAGGGGCGGGCC | 24 | 12663 |
| BCL11A-10664 | + | GGAGGGGGCGCUGGGGCC | 18 | 12664 |
| BCL11A-10665 | + | GGGAGGGGGCGCUGGGGCC | 19 | 12665 |
| BCL11A-10666 | + | GGGGAGGGGGCGCUGGGGCC | 20 | 12666 |
| BCL11A-10667 | + | AGGGGAGGGGGCGCUGGGGCC | 21 | 12667 |
| BCL11A-10668 | + | GAGGGGAGGGGGCGCUGGGGCC | 22 | 12668 |
| BCL11A-10669 | + | CGAGGGGAGGGGGCGCUGGGGCC | 23 | 12669 |
| BCL11A-10670 | + | CCGAGGGGAGGGGGCGCUGGGGCC | 24 | 12670 |
| BCL11A-10671 | + | CGCGGCGGUGGCGUGGCC | 18 | 12671 |
| BCL11A-10672 | + | CCGCGGCGGUGGCGUGGCC | 19 | 12672 |
| BCL11A-9718 | + | GCCGCGGCGGUGGCGUGGCC | 20 | 12673 |
| BCL11A-10673 | + | CGCCGCGGCGGUGGCGUGGCC | 21 | 12674 |
| BCL11A-10674 | + | GCGCCGCGGCGGUGGCGUGGCC | 22 | 12675 |
| BCL11A-10675 | + | AGCGCCGCGGCGGUGGCGUGGCC | 23 | 12676 |
| BCL11A-10676 | + | GAGCGCCGCGGCGGUGGCGUGGCC | 24 | 12677 |
| BCL11A-10677 | + | UGCGGGGCGGGGGGCUCC | 18 | 12678 |
| BCL11A-10678 | + | GUGCGGGGCGGGGGGCUCC | 19 | 12679 |
| BCL11A-10679 | + | GGUGCGGGGCGGGGGGCUCC | 20 | 12680 |
| BCL11A-10680 | + | AGGUGCGGGGCGGGGGGCUCC | 21 | 12681 |
| BCL11A-10681 | + | GAGGUGCGGGGCGGGGGGCUCC | 22 | 12682 |
| BCL11A-10682 | + | GGAGGUGCGGGGCGGGGGGCUCC | 23 | 12683 |
| BCL11A-10683 | + | GGGAGGUGCGGGGCGGGGGGCUCC | 24 | 12684 |
| BCL11A-10684 | + | AACAUGGGCAGGGCGAGC | 18 | 12685 |
| BCL11A-10685 | + | AAACAUGGGCAGGGCGAGC | 19 | 12686 |
| BCL11A-9721 | + | AAAACAUGGGCAGGGCGAGC | 20 | 12687 |
| BCL11A-10686 | + | CAAAACAUGGGCAGGGCGAGC | 21 | 12688 |
| BCL11A-10687 | + | ACAAAACAUGGGCAGGGCGAGC | 22 | 12689 |
| BCL11A-10688 | + | CACAAAACAUGGGCAGGGCGAGC | 23 | 12690 |
| BCL11A-10689 | + | ACACAAAACAUGGGCAGGGCGAGC | 24 | 12691 |
| BCL11A-10690 | + | GCCGAGGGGAGGGGGCGC | 18 | 12692 |
| BCL11A-10691 | + | GGCCGAGGGGAGGGGGCGC | 19 | 12693 |
| BCL11A-4490 | + | GGGCCGAGGGGAGGGGGCGC | 20 | 12694 |
| BCL11A-10692 | + | CGGGCCGAGGGGAGGGGGCGC | 21 | 12695 |
| BCL11A-10693 | + | GCGGGCCGAGGGGAGGGGGCGC | 22 | 12696 |
| BCL11A-10694 | + | GGCGGGCCGAGGGGAGGGGGCGC | 23 | 12697 |
| BCL11A-10695 | + | GGGCGGGCCGAGGGGAGGGGGCGC | 24 | 12698 |
| BCL11A-10696 | + | AUAAUACAAAGAUGGCGC | 18 | 12699 |
| BCL11A-10697 | + | AAUAAUACAAAGAUGGCGC | 19 | 12700 |
| BCL11A-9565 | + | AAAUAAUACAAAGAUGGCGC | 20 | 12701 |
| BCL11A-10698 | + | GAAAUAAUACAAAGAUGGCGC | 21 | 12702 |
| BCL11A-10699 | + | AGAAAUAAUACAAAGAUGGCGC | 22 | 12703 |
| BCL11A-10700 | + | UAGAAAUAAUACAAAGAUGGCGC | 23 | 12704 |
| BCL11A-10701 | + | UUAGAAAUAAUACAAAGAUGGCGC | 24 | 12705 |
| BCL11A-10702 | + | GAGGGGGAGGUGCGGGGC | 18 | 12706 |
| BCL11A-10703 | + | GGAGGGGGAGGUGCGGGGC | 19 | 12707 |
| BCL11A-9724 | + | GGGAGGGGGAGGUGCGGGGC | 20 | 12708 |
| BCL11A-10704 | + | GGGGAGGGGGAGGUGCGGGGC | 21 | 12709 |
| BCL11A-10705 | + | CGGGGAGGGGGAGGUGCGGGGC | 22 | 12710 |
| BCL11A-10706 | + | GCGGGGAGGGGGAGGUGCGGGGC | 23 | 12711 |
| BCL11A-10707 | + | UGCGGGGAGGGGGAGGUGCGGGGC | 24 | 12712 |
| BCL11A-10708 | + | CCGCGGCGGUGGCGUGGC | 18 | 12713 |
| BCL11A-10709 | + | GCCGCGGCGGUGGCGUGGC | 19 | 12714 |
| BCL11A-9725 | + | CGCCGCGGCGGUGGCGUGGC | 20 | 12715 |
| BCL11A-10710 | + | GCGCCGCGGCGGUGGCGUGGC | 21 | 12716 |
| BCL11A-10711 | + | AGCGCCGCGGCGGUGGCGUGGC | 22 | 12717 |
| BCL11A-10712 | + | GAGCGCCGCGGCGGUGGCGUGGC | 23 | 12718 |
| BCL11A-10713 | + | CGAGCGCCGCGGCGGUGGCGUGGC | 24 | 12719 |
| BCL11A-10714 | + | CAAGCCAAUGGCCAGUGC | 18 | 12720 |
| BCL11A-10715 | + | ACAAGCCAAUGGCCAGUGC | 19 | 12721 |
| BCL11A-9727 | + | GACAAGCCAAUGGCCAGUGC | 20 | 12722 |
| BCL11A-10716 | + | GGACAAGCCAAUGGCCAGUGC | 21 | 12723 |
| BCL11A-10717 | + | AGGACAAGCCAAUGGCCAGUGC | 22 | 12724 |
| BCL11A-10718 | + | CAGGACAAGCCAAUGGCCAGUGC | 23 | 12725 |
| BCL11A-10719 | + | CCAGGACAAGCCAAUGGCCAGUGC | 24 | 12726 |
| BCL11A-10720 | + | CACCAAUGGACACACAUC | 18 | 12727 |
| BCL11A-10721 | + | ACACCAAUGGACACACAUC | 19 | 12728 |
| BCL11A-9729 | + | CACACCAAUGGACACACAUC | 20 | 12729 |
| BCL11A-10722 | + | UCACACCAAUGGACACACAUC | 21 | 12730 |
| BCL11A-10723 | + | CUCACACCAAUGGACACACAUC | 22 | 12731 |
| BCL11A-10724 | + | GCUCACACCAAUGGACACACAUC | 23 | 12732 |
| BCL11A-10725 | + | AGCUCACACCAAUGGACACACAUC | 24 | 12733 |
| BCL11A-10726 | + | GACGGCUCGGUUCACAUC | 18 | 12734 |
| BCL11A-10727 | + | CGACGGCUCGGUUCACAUC | 19 | 12735 |
| BCL11A-9568 | + | ACGACGGCUCGGUUCACAUC | 20 | 12736 |
| BCL11A-10728 | + | GACGACGGCUCGGUUCACAUC | 21 | 12737 |
| BCL11A-10729 | + | GGACGACGGCUCGGUUCACAUC | 22 | 12738 |
| BCL11A-10730 | + | CGGACGACGGCUCGGUUCACAUC | 23 | 12739 |
| BCL11A-10731 | + | GCGGACGACGGCUCGGUUCACAUC | 24 | 12740 |
| BCL11A-10732 | + | UUAGAAAGAAGGAGACUC | 18 | 12741 |
| BCL11A-10733 | + | GUUAGAAAGAAGGAGACUC | 19 | 12742 |
| BCL11A-10734 | + | GGUUAGAAAGAAGGAGACUC | 20 | 12743 |
| BCL11A-10735 | + | GGGUUAGAAAGAAGGAGACUC | 21 | 12744 |
| BCL11A-10736 | + | CGGGUUAGAAAGAAGGAGACUC | 22 | 12745 |
| BCL11A-10737 | + | CCGGGUUAGAAAGAAGGAGACUC | 23 | 12746 |
| BCL11A-10738 | + | GCCGGGUUAGAAAGAAGGAGACUC | 24 | 12747 |
| BCL11A-10739 | + | UCUCUUUUACCUCGACUC | 18 | 12748 |
| BCL11A-10740 | + | AUCUCUUUUACCUCGACUC | 19 | 12749 |
| BCL11A-10741 | + | UAUCUCUUUUACCUCGACUC | 20 | 12750 |
| BCL11A-10742 | + | UUAUCUCUUUUACCUCGACUC | 21 | 12751 |
| BCL11A-10743 | + | UUUAUCUCUUUUACCUCGACUC | 22 | 12752 |
| BCL11A-10744 | + | CUUUAUCUCUUUUACCUCGACUC | 23 | 12753 |
| BCL11A-10745 | + | CCUUUAUCUCUUUUACCUCGACUC | 24 | 12754 |
| BCL11A-10746 | + | CUCUCGGAGGUUUUUCUC | 18 | 12755 |
| BCL11A-10747 | + | ACUCUCGGAGGUUUUUCUC | 19 | 12756 |
| BCL11A-10748 | + | GACUCUCGGAGGUUUUUCUC | 20 | 12757 |
| BCL11A-10749 | + | CGACUCUCGGAGGUUUUUCUC | 21 | 12758 |
| BCL11A-10750 | + | UCGACUCUCGGAGGUUUUUCUC | 22 | 12759 |
| BCL11A-10751 | + | CUCGACUCUCGGAGGUUUUUCUC | 23 | 12760 |
| BCL11A-10752 | + | CCUCGACUCUCGGAGGUUUUUCUC | 24 | 12761 |
| BCL11A-10753 | + | AAAAAAAAAAAAAAAAAG | 18 | 12762 |
| BCL11A-10754 | + | AAAAAAAAAAAAAAAAAAG | 19 | 12763 |
| BCL11A-4526 | + | AAAAAAAAAAAAAAAAAAAG | 20 | 12764 |
| BCL11A-10755 | + | AAAAAAAAAAAAAAAAAAAAG | 21 | 12765 |
| BCL11A-10756 | + | AAAAAAAAAAAAAAAAAAAAAG | 22 | 12766 |
| BCL11A-10757 | + | AAAAAAAAAAAAAAAAAAAAAAG | 23 | 12767 |
| BCL11A-10758 | + | AAAAAAAAAAAAAAAAAAAAAAAG | 24 | 12768 |
| BCL11A-10759 | + | GAGAGCCGGGUUAGAAAG | 18 | 12769 |
| BCL11A-10760 | + | GGAGAGCCGGGUUAGAAAG | 19 | 12770 |
| BCL11A-10761 | + | GGGAGAGCCGGGUUAGAAAG | 20 | 12771 |
| BCL11A-10762 | + | CGGGAGAGCCGGGUUAGAAAG | 21 | 12772 |
| BCL11A-10763 | + | UCGGGAGAGCCGGGUUAGAAAG | 22 | 12773 |
| BCL11A-10764 | + | AUCGGGAGAGCCGGGUUAGAAAG | 23 | 12774 |
| BCL11A-10765 | + | CAUCGGGAGAGCCGGGUUAGAAAG | 24 | 12775 |
| BCL11A-10766 | + | GGGCGAGCAGGAGAGAAG | 18 | 12776 |
| BCL11A-10767 | + | AGGGCGAGCAGGAGAGAAG | 19 | 12777 |
| BCL11A-4629 | + | CAGGGCGAGCAGGAGAGAAG | 20 | 12778 |
| BCL11A-10768 | + | GCAGGGCGAGCAGGAGAGAAG | 21 | 12779 |
| BCL11A-10769 | + | GGCAGGGCGAGCAGGAGAGAAG | 22 | 12780 |
| BCL11A-10770 | + | GGGCAGGGCGAGCAGGAGAGAAG | 23 | 12781 |
| BCL11A-10771 | + | UGGGCAGGGCGAGCAGGAGAGAAG | 24 | 12782 |
| BCL11A-10772 | + | AGAAGGGGAGGAGGGAAG | 18 | 12783 |
| BCL11A-10773 | + | GAGAAGGGGAGGAGGGAAG | 19 | 12784 |
| BCL11A-4577 | + | AGAGAAGGGGAGGAGGGAAG | 20 | 12785 |
| BCL11A-10774 | + | GAGAGAAGGGGAGGAGGGAAG | 21 | 12786 |
| BCL11A-10775 | + | GGAGAGAAGGGGAGGAGGGAAG | 22 | 12787 |
| BCL11A-10776 | + | AGGAGAGAAGGGGAGGAGGGAAG | 23 | 12788 |
| BCL11A-10777 | + | CAGGAGAGAAGGGGAGGAGGGAAG | 24 | 12789 |
| BCL11A-10778 | + | ACACGGCAAUGGUUCCAG | 18 | 12790 |
| BCL11A-10779 | + | UACACGGCAAUGGUUCCAG | 19 | 12791 |
| BCL11A-10780 | + | AUACACGGCAAUGGUUCCAG | 20 | 12792 |
| BCL11A-10781 | + | CAUACACGGCAAUGGUUCCAG | 21 | 12793 |
| BCL11A-10782 | + | GCAUACACGGCAAUGGUUCCAG | 22 | 12794 |
| BCL11A-10783 | + | UGCAUACACGGCAAUGGUUCCAG | 23 | 12795 |
| BCL11A-10784 | + | GUGCAUACACGGCAAUGGUUCCAG | 24 | 12796 |
| BCL11A-10785 | + | CAUGGGCAGGGCGAGCAG | 18 | 12797 |
| BCL11A-10786 | + | ACAUGGGCAGGGCGAGCAG | 19 | 12798 |
| BCL11A-10787 | + | AACAUGGGCAGGGCGAGCAG | 20 | 12799 |
| BCL11A-10788 | + | AAACAUGGGCAGGGCGAGCAG | 21 | 12800 |
| BCL11A-10789 | + | AAAACAUGGGCAGGGCGAGCAG | 22 | 12801 |
| BCL11A-10790 | + | CAAAACAUGGGCAGGGCGAGCAG | 23 | 12802 |
| BCL11A-10791 | + | ACAAAACAUGGGCAGGGCGAGCAG | 24 | 12803 |
| BCL11A-10792 | + | GGAGAGAGAGAGAGAGAG | 18 | 12804 |
| BCL11A-10793 | + | GGGAGAGAGAGAGAGAGAG | 19 | 12805 |
| BCL11A-4999 | + | AGGGAGAGAGAGAGAGAGAG | 20 | 12806 |
| BCL11A-10794 | + | GAGGGAGAGAGAGAGAGAGAG | 21 | 12807 |
| BCL11A-10795 | + | AGAGGGAGAGAGAGAGAGAGAG | 22 | 12808 |
| BCL11A-10796 | + | UAGAGGGAGAGAGAGAGAGAGAG | 23 | 12809 |
| BCL11A-10797 | + | AUAGAGGGAGAGAGAGAGAGAGAG | 24 | 12810 |
| BCL11A-10798 | + | AAAGAGGGAGAGAGAGAG | 18 | 12811 |
| BCL11A-10799 | + | AAAAGAGGGAGAGAGAGAG | 19 | 12812 |
| BCL11A-4916 | + | AAAAAGAGGGAGAGAGAGAG | 20 | 12813 |
| BCL11A-10800 | + | AAAAAAGAGGGAGAGAGAGAG | 21 | 12814 |
| BCL11A-10801 | + | AAAAAAAGAGGGAGAGAGAGAG | 22 | 12815 |
| BCL11A-10802 | + | AAAAAAAAGAGGGAGAGAGAGAG | 23 | 12816 |
| BCL11A-10803 | + | AAAAAAAAAGAGGGAGAGAGAGAG | 24 | 12817 |
| BCL11A-10804 | + | GCAGGGCGAGCAGGAGAG | 18 | 12818 |
| BCL11A-10805 | + | GGCAGGGCGAGCAGGAGAG | 19 | 12819 |
| BCL11A-4870 | + | GGGCAGGGCGAGCAGGAGAG | 20 | 12820 |
| BCL11A-10806 | + | UGGGCAGGGCGAGCAGGAGAG | 21 | 12821 |
| BCL11A-10807 | + | AUGGGCAGGGCGAGCAGGAGAG | 22 | 12822 |
| BCL11A-10808 | + | CAUGGGCAGGGCGAGCAGGAGAG | 23 | 12823 |
| BCL11A-10809 | + | ACAUGGGCAGGGCGAGCAGGAGAG | 24 | 12824 |
| BCL11A-10810 | + | GUGGCGUGGCCGGGAGAG | 18 | 12825 |
| BCL11A-10811 | + | GGUGGCGUGGCCGGGAGAG | 19 | 12826 |
| BCL11A-10812 | + | CGGUGGCGUGGCCGGGAGAG | 20 | 12827 |
| BCL11A-10813 | + | GCGGUGGCGUGGCCGGGAGAG | 21 | 12828 |
| BCL11A-10814 | + | GGCGGUGGCGUGGCCGGGAGAG | 22 | 12829 |
| BCL11A-10815 | + | CGGCGGUGGCGUGGCCGGGAGAG | 23 | 12830 |
| BCL11A-10816 | + | GCGGCGGUGGCGUGGCCGGGAGAG | 24 | 12831 |
| BCL11A-10817 | + | GGGGAGGGGCGGGCCGAG | 18 | 12832 |
| BCL11A-10818 | + | GGGGGAGGGGCGGGCCGAG | 19 | 12833 |
| BCL11A-4677 | + | CGGGGGAGGGGCGGGCCGAG | 20 | 12834 |
| BCL11A-10819 | + | CCGGGGGAGGGGCGGGCCGAG | 21 | 12835 |
| BCL11A-10820 | + | CCCGGGGGAGGGGCGGGCCGAG | 22 | 12836 |
| BCL11A-10821 | + | CCCCGGGGGAGGGGCGGGCCGAG | 23 | 12837 |
| BCL11A-10822 | + | CCCCCGGGGGAGGGGCGGGCCGAG | 24 | 12838 |
| BCL11A-10823 | + | AAACAUGGGCAGGGCGAG | 18 | 12839 |
| BCL11A-10824 | + | AAAACAUGGGCAGGGCGAG | 19 | 12840 |
| BCL11A-10825 | + | CAAAACAUGGGCAGGGCGAG | 20 | 12841 |
| BCL11A-10826 | + | ACAAAACAUGGGCAGGGCGAG | 21 | 12842 |
| BCL11A-10827 | + | CACAAAACAUGGGCAGGGCGAG | 22 | 12843 |
| BCL11A-10828 | + | ACACAAAACAUGGGCAGGGCGAG | 23 | 12844 |
| BCL11A-10829 | + | CACACAAAACAUGGGCAGGGCGAG | 24 | 12845 |
| BCL11A-10830 | + | AGCAGGAGAGAAGGGGAG | 18 | 12846 |
| BCL11A-10831 | + | GAGCAGGAGAGAAGGGGAG | 19 | 12847 |
| BCL11A-5082 | + | CGAGCAGGAGAGAAGGGGAG | 20 | 12848 |
| BCL11A-10832 | + | GCGAGCAGGAGAGAAGGGGAG | 21 | 12849 |
| BCL11A-10833 | + | GGCGAGCAGGAGAGAAGGGGAG | 22 | 12850 |
| BCL11A-10834 | + | GGGCGAGCAGGAGAGAAGGGGAG | 23 | 12851 |
| BCL11A-10835 | + | AGGGCGAGCAGGAGAGAAGGGGAG | 24 | 12852 |
| BCL11A-10836 | + | AAUGGCCAGUGCGGGGAG | 18 | 12853 |
| BCL11A-10837 | + | CAAUGGCCAGUGCGGGGAG | 19 | 12854 |
| BCL11A-9572 | + | CCAAUGGCCAGUGCGGGGAG | 20 | 12855 |
| BCL11A-10838 | + | GCCAAUGGCCAGUGCGGGGAG | 21 | 12856 |
| BCL11A-10839 | + | AGCCAAUGGCCAGUGCGGGGAG | 22 | 12857 |
| BCL11A-10840 | + | AAGCCAAUGGCCAGUGCGGGGAG | 23 | 12858 |
| BCL11A-10841 | + | CAAGCCAAUGGCCAGUGCGGGGAG | 24 | 12859 |
| BCL11A-10842 | + | GAGAGAGAAGAGAGAUAG | 18 | 12860 |
| BCL11A-10843 | + | AGAGAGAGAAGAGAGAUAG | 19 | 12861 |
| BCL11A-9740 | + | GAGAGAGAGAAGAGAGAUAG | 20 | 12862 |
| BCL11A-10844 | + | AGAGAGAGAGAAGAGAGAUAG | 21 | 12863 |
| BCL11A-10845 | + | GAGAGAGAGAGAAGAGAGAUAG | 22 | 12864 |
| BCL11A-10846 | + | GGAGAGAGAGAGAAGAGAGAUAG | 23 | 12865 |
| BCL11A-10847 | + | GGGAGAGAGAGAGAAGAGAGAUAG | 24 | 12866 |
| BCL11A-10848 | + | CGCCAGACGCGGCCCCCG | 18 | 12867 |
| BCL11A-10849 | + | ACGCCAGACGCGGCCCCCG | 19 | 12868 |
| BCL11A-4351 | + | GACGCCAGACGCGGCCCCCG | 20 | 12869 |
| BCL11A-10850 | + | GGACGCCAGACGCGGCCCCCG | 21 | 12870 |
| BCL11A-10851 | + | CGGACGCCAGACGCGGCCCCCG | 22 | 12871 |
| BCL11A-10852 | + | GCGGACGCCAGACGCGGCCCCCG | 23 | 12872 |
| BCL11A-10853 | + | CGCGGACGCCAGACGCGGCCCCCG | 24 | 12873 |
| BCL11A-10854 | + | CGGGGGAGGGGCGGGCCG | 18 | 12874 |
| BCL11A-10855 | + | CCGGGGGAGGGGCGGGCCG | 19 | 12875 |
| BCL11A-4642 | + | CCCGGGGGAGGGGCGGGCCG | 20 | 12876 |
| BCL11A-10856 | + | CCCCGGGGGAGGGGCGGGCCG | 21 | 12877 |
| BCL11A-10857 | + | CCCCCGGGGGAGGGGCGGGCCG | 22 | 12878 |
| BCL11A-10858 | + | GCCCCCGGGGGAGGGGCGGGCCG | 23 | 12879 |
| BCL11A-10859 | + | GGCCCCCGGGGGAGGGGCGGGCCG | 24 | 12880 |
| BCL11A-10860 | + | GCGGCGGCGGCGGCGGCG | 18 | 12881 |
| BCL11A-10861 | + | GGCGGCGGCGGCGGCGGCG | 19 | 12882 |
| BCL11A-5097 | + | CGGCGGCGGCGGCGGCGGCG | 20 | 12883 |
| BCL11A-10862 | + | GCGGCGGCGGCGGCGGCGGCG | 21 | 12884 |
| BCL11A-10863 | + | GGCGGCGGCGGCGGCGGCGGCG | 22 | 12885 |
| BCL11A-10864 | + | CGGCGGCGGCGGCGGCGGCGGCG | 23 | 12886 |
| BCL11A-10865 | + | GCGGCGGCGGCGGCGGCGGCGGCG | 24 | 12887 |
| BCL11A-10866 | + | AGGGGGAGGUGCGGGGCG | 18 | 12888 |
| BCL11A-10867 | + | GAGGGGGAGGUGCGGGGCG | 19 | 12889 |
| BCL11A-9749 | + | GGAGGGGGAGGUGCGGGGCG | 20 | 12890 |
| BCL11A-10868 | + | GGGAGGGGGAGGUGCGGGGCG | 21 | 12891 |
| BCL11A-10869 | + | GGGGAGGGGGAGGUGCGGGGCG | 22 | 12892 |
| BCL11A-10870 | + | CGGGGAGGGGGAGGUGCGGGGCG | 23 | 12893 |
| BCL11A-10871 | + | GCGGGGAGGGGGAGGUGCGGGGCG | 24 | 12894 |
| BCL11A-10872 | + | GGCCGAGGGGAGGGGGCG | 18 | 12895 |
| BCL11A-10873 | + | GGGCCGAGGGGAGGGGGCG | 19 | 12896 |
| BCL11A-5099 | + | CGGGCCGAGGGGAGGGGGCG | 20 | 12897 |
| BCL11A-10874 | + | GCGGGCCGAGGGGAGGGGGCG | 21 | 12898 |
| BCL11A-10875 | + | GGCGGGCCGAGGGGAGGGGGCG | 22 | 12899 |
| BCL11A-10876 | + | GGGCGGGCCGAGGGGAGGGGGCG | 23 | 12900 |
| BCL11A-10877 | + | GGGGCGGGCCGAGGGGAGGGGGCG | 24 | 12901 |
| BCL11A-10878 | + | AAUAAUACAAAGAUGGCG | 18 | 12902 |
| BCL11A-10879 | + | AAAUAAUACAAAGAUGGCG | 19 | 12903 |
| BCL11A-10880 | + | GAAAUAAUACAAAGAUGGCG | 20 | 12904 |
| BCL11A-10881 | + | AGAAAUAAUACAAAGAUGGCG | 21 | 12905 |
| BCL11A-10882 | + | UAGAAAUAAUACAAAGAUGGCG | 22 | 12906 |
| BCL11A-10883 | + | UUAGAAAUAAUACAAAGAUGGCG | 23 | 12907 |
| BCL11A-10884 | + | AUUAGAAAUAAUACAAAGAUGGCG | 24 | 12908 |
| BCL11A-10885 | + | AAGCCAAUGGCCAGUGCG | 18 | 12909 |
| BCL11A-10886 | + | CAAGCCAAUGGCCAGUGCG | 19 | 12910 |
| BCL11A-9751 | + | ACAAGCCAAUGGCCAGUGCG | 20 | 12911 |
| BCL11A-10887 | + | GACAAGCCAAUGGCCAGUGCG | 21 | 12912 |
| BCL11A-10888 | + | GGACAAGCCAAUGGCCAGUGCG | 22 | 12913 |
| BCL11A-10889 | + | AGGACAAGCCAAUGGCCAGUGCG | 23 | 12914 |
| BCL11A-10890 | + | CAGGACAAGCCAAUGGCCAGUGCG | 24 | 12915 |
| BCL11A-6490 | + | GGGUUUGCCUUGCUUGCG | 18 | 12916 |
| BCL11A-6491 | + | GGGGUUUGCCUUGCUUGCG | 19 | 12917 |
| BCL11A-6492 | + | UGGGGUUUGCCUUGCUUGCG | 20 | 12918 |
| BCL11A-6493 | + | CUGGGGUUUGCCUUGCUUGCG | 21 | 12919 |
| BCL11A-6494 | + | GCUGGGGUUUGCCUUGCUUGCG | 22 | 12920 |
| BCL11A-6495 | + | UGCUGGGGUUUGCCUUGCUUGCG | 23 | 12921 |
| BCL11A-6496 | + | GUGCUGGGGUUUGCCUUGCUUGCG | 24 | 12922 |
| BCL11A-10891 | + | CAGGGGUGGGAGGAAAGG | 18 | 12923 |
| BCL11A-10892 | + | GCAGGGGUGGGAGGAAAGG | 19 | 12924 |
| BCL11A-10893 | + | GGCAGGGGUGGGAGGAAAGG | 20 | 12925 |
| BCL11A-10894 | + | UGGCAGGGGUGGGAGGAAAGG | 21 | 12926 |
| BCL11A-10895 | + | GUGGCAGGGGUGGGAGGAAAGG | 22 | 12927 |
| BCL11A-10896 | + | GGUGGCAGGGGUGGGAGGAAAGG | 23 | 12928 |
| BCL11A-10897 | + | GGGUGGCAGGGGUGGGAGGAAAGG | 24 | 12929 |
| BCL11A-10898 | + | ACACAAAACAUGGGCAGG | 18 | 12930 |
| BCL11A-10899 | + | CACACAAAACAUGGGCAGG | 19 | 12931 |
| BCL11A-10900 | + | ACACACAAAACAUGGGCAGG | 20 | 12932 |
| BCL11A-10901 | + | GACACACAAAACAUGGGCAGG | 21 | 12933 |
| BCL11A-10902 | + | AGACACACAAAACAUGGGCAGG | 22 | 12934 |
| BCL11A-10903 | + | GAGACACACAAAACAUGGGCAGG | 23 | 12935 |
| BCL11A-10904 | + | AGAGACACACAAAACAUGGGCAGG | 24 | 12936 |
| BCL11A-10905 | + | AAAAAAAAAAAAAAGAGG | 18 | 12937 |
| BCL11A-10906 | + | AAAAAAAAAAAAAAAGAGG | 19 | 12938 |
| BCL11A-4903 | + | AAAAAAAAAAAAAAAAGAGG | 20 | 12939 |
| BCL11A-10907 | + | AAAAAAAAAAAAAAAAAGAGG | 21 | 12940 |
| BCL11A-10908 | + | AAAAAAAAAAAAAAAAAAGAGG | 22 | 12941 |
| BCL11A-10909 | + | AAAAAAAAAAAAAAAAAAAGAGG | 23 | 12942 |
| BCL11A-10910 | + | AAAAAAAAAAAAAAAAAAAAGAGG | 24 | 12943 |
| BCL11A-10911 | + | AGAGAAGAGAGAUAGAGG | 18 | 12944 |
| BCL11A-10912 | + | GAGAGAAGAGAGAUAGAGG | 19 | 12945 |
| BCL11A-10913 | + | AGAGAGAAGAGAGAUAGAGG | 20 | 12946 |
| BCL11A-10914 | + | GAGAGAGAAGAGAGAUAGAGG | 21 | 12947 |
| BCL11A-10915 | + | AGAGAGAGAAGAGAGAUAGAGG | 22 | 12948 |
| BCL11A-10916 | + | GAGAGAGAGAAGAGAGAUAGAGG | 23 | 12949 |
| BCL11A-10917 | + | AGAGAGAGAGAAGAGAGAUAGAGG | 24 | 12950 |
| BCL11A-10918 | + | GCAGGAGAGAAGGGGAGG | 18 | 12951 |
| BCL11A-10919 | + | AGCAGGAGAGAAGGGGAGG | 19 | 12952 |
| BCL11A-4408 | + | GAGCAGGAGAGAAGGGGAGG | 20 | 12953 |
| BCL11A-10920 | + | CGAGCAGGAGAGAAGGGGAGG | 21 | 12954 |
| BCL11A-10921 | + | GCGAGCAGGAGAGAAGGGGAGG | 22 | 12955 |
| BCL11A-10922 | + | GGCGAGCAGGAGAGAAGGGGAGG | 23 | 12956 |
| BCL11A-10923 | + | GGGCGAGCAGGAGAGAAGGGGAGG | 24 | 12957 |
| BCL11A-10924 | + | AUGGCCAGUGCGGGGAGG | 18 | 12958 |
| BCL11A-10925 | + | AAUGGCCAGUGCGGGGAGG | 19 | 12959 |
| BCL11A-9756 | + | CAAUGGCCAGUGCGGGGAGG | 20 | 12960 |
| BCL11A-10926 | + | CCAAUGGCCAGUGCGGGGAGG | 21 | 12961 |
| BCL11A-10927 | + | GCCAAUGGCCAGUGCGGGGAGG | 22 | 12962 |
| BCL11A-10928 | + | AGCCAAUGGCCAGUGCGGGGAGG | 23 | 12963 |
| BCL11A-10929 | + | AAGCCAAUGGCCAGUGCGGGGAGG | 24 | 12964 |
| BCL11A-10930 | + | GCCAGACGCGGCCCCCGG | 18 | 12965 |
| BCL11A-10931 | + | CGCCAGACGCGGCCCCCGG | 19 | 12966 |
| BCL11A-4561 | + | ACGCCAGACGCGGCCCCCGG | 20 | 12967 |
| BCL11A-10932 | + | GACGCCAGACGCGGCCCCCGG | 21 | 12968 |
| BCL11A-10933 | + | GGACGCCAGACGCGGCCCCCGG | 22 | 12969 |
| BCL11A-10934 | + | CGGACGCCAGACGCGGCCCCCGG | 23 | 12970 |
| BCL11A-10935 | + | GCGGACGCCAGACGCGGCCCCCGG | 24 | 12971 |
| BCL11A-10936 | + | CGGCGGUGGCGUGGCCGG | 18 | 12972 |
| BCL11A-10937 | + | GCGGCGGUGGCGUGGCCGG | 19 | 12973 |
| BCL11A-10938 | + | CGCGGCGGUGGCGUGGCCGG | 20 | 12974 |
| BCL11A-10939 | + | CCGCGGCGGUGGCGUGGCCGG | 21 | 12975 |
| BCL11A-10940 | + | GCCGCGGCGGUGGCGUGGCCGG | 22 | 12976 |
| BCL11A-10941 | + | CGCCGCGGCGGUGGCGUGGCCGG | 23 | 12977 |
| BCL11A-10942 | + | GCGCCGCGGCGGUGGCGUGGCCGG | 24 | 12978 |
| BCL11A-10943 | + | CGGCGGCGGCGGCGGCGG | 18 | 12979 |
| BCL11A-10944 | + | GCGGCGGCGGCGGCGGCGG | 19 | 12980 |
| BCL11A-4479 | + | GGCGGCGGCGGCGGCGGCGG | 20 | 12981 |
| BCL11A-10945 | + | CGGCGGCGGCGGCGGCGGCGG | 21 | 12982 |
| BCL11A-10946 | + | GCGGCGGCGGCGGCGGCGGCGG | 22 | 12983 |
| BCL11A-10947 | + | GGCGGCGGCGGCGGCGGCGGCGG | 23 | 12984 |
| BCL11A-10948 | + | CGGCGGCGGCGGCGGCGGCGGCGG | 24 | 12985 |
| BCL11A-10949 | + | CGGCUCGGUUCACAUCGG | 18 | 12986 |
| BCL11A-10950 | + | ACGGCUCGGUUCACAUCGG | 19 | 12987 |
| BCL11A-10951 | + | GACGGCUCGGUUCACAUCGG | 20 | 12988 |
| BCL11A-10952 | + | CGACGGCUCGGUUCACAUCGG | 21 | 12989 |
| BCL11A-10953 | + | ACGACGGCUCGGUUCACAUCGG | 22 | 12990 |
| BCL11A-10954 | + | GACGACGGCUCGGUUCACAUCGG | 23 | 12991 |
| BCL11A-10955 | + | GGACGACGGCUCGGUUCACAUCGG | 24 | 12992 |
| BCL11A-10956 | + | AGGGGUGGGAGGAAAGGG | 18 | 12993 |
| BCL11A-10957 | + | CAGGGGUGGGAGGAAAGGG | 19 | 12994 |
| BCL11A-9759 | + | GCAGGGGUGGGAGGAAAGGG | 20 | 12995 |
| BCL11A-10958 | + | GGCAGGGGUGGGAGGAAAGGG | 21 | 12996 |
| BCL11A-10959 | + | UGGCAGGGGUGGGAGGAAAGGG | 22 | 12997 |
| BCL11A-10960 | + | GUGGCAGGGGUGGGAGGAAAGGG | 23 | 12998 |
| BCL11A-10961 | + | GGUGGCAGGGGUGGGAGGAAAGGG | 24 | 12999 |
| BCL11A-10962 | + | GCGAGCAGGAGAGAAGGG | 18 | 13000 |
| BCL11A-10963 | + | GGCGAGCAGGAGAGAAGGG | 19 | 13001 |
| BCL11A-4873 | + | GGGCGAGCAGGAGAGAAGGG | 20 | 13002 |
| BCL11A-10964 | + | AGGGCGAGCAGGAGAGAAGGG | 21 | 13003 |
| BCL11A-10965 | + | CAGGGCGAGCAGGAGAGAAGGG | 22 | 13004 |
| BCL11A-10966 | + | GCAGGGCGAGCAGGAGAGAAGGG | 23 | 13005 |
| BCL11A-10967 | + | GGCAGGGCGAGCAGGAGAGAAGGG | 24 | 13006 |
| BCL11A-10968 | + | AAGAAAGGGGUGGCAGGG | 18 | 13007 |
| BCL11A-10969 | + | GAAGAAAGGGGUGGCAGGG | 19 | 13008 |
| BCL11A-10970 | + | AGAAGAAAGGGGUGGCAGGG | 20 | 13009 |
| BCL11A-10971 | + | GAGAAGAAAGGGGUGGCAGGG | 21 | 13010 |
| BCL11A-10972 | + | AGAGAAGAAAGGGGUGGCAGGG | 22 | 13011 |
| BCL11A-10973 | + | GAGAGAAGAAAGGGGUGGCAGGG | 23 | 13012 |
| BCL11A-10974 | + | GGAGAGAAGAAAGGGGUGGCAGGG | 24 | 13013 |
| BCL11A-10975 | + | GGAGGGGCGGGCCGAGGG | 18 | 13014 |
| BCL11A-10976 | + | GGGAGGGGCGGGCCGAGGG | 19 | 13015 |
| BCL11A-4875 | + | GGGGAGGGGCGGGCCGAGGG | 20 | 13016 |
| BCL11A-10977 | + | GGGGGAGGGGCGGGCCGAGGG | 21 | 13017 |
| BCL11A-10978 | + | CGGGGGAGGGGCGGGCCGAGGG | 22 | 13018 |
| BCL11A-10979 | + | CCGGGGGAGGGGCGGGCCGAGGG | 23 | 13019 |
| BCL11A-10980 | + | CCCGGGGGAGGGGCGGGCCGAGGG | 24 | 13020 |
| BCL11A-10981 | + | GAGAGAAGGGGAGGAGGG | 18 | 13021 |
| BCL11A-10982 | + | GGAGAGAAGGGGAGGAGGG | 19 | 13022 |
| BCL11A-4998 | + | AGGAGAGAAGGGGAGGAGGG | 20 | 13023 |
| BCL11A-10983 | + | CAGGAGAGAAGGGGAGGAGGG | 21 | 13024 |
| BCL11A-10984 | + | GCAGGAGAGAAGGGGAGGAGGG | 22 | 13025 |
| BCL11A-10985 | + | AGCAGGAGAGAAGGGGAGGAGGG | 23 | 13026 |
| BCL11A-10986 | + | GAGCAGGAGAGAAGGGGAGGAGGG | 24 | 13027 |
| BCL11A-10987 | + | GCGGCCCCCGGGGGAGGG | 18 | 13028 |
| BCL11A-10988 | + | CGCGGCCCCCGGGGGAGGG | 19 | 13029 |
| BCL11A-4959 | + | ACGCGGCCCCCGGGGGAGGG | 20 | 13030 |
| BCL11A-10989 | + | GACGCGGCCCCCGGGGGAGGG | 21 | 13031 |
| BCL11A-10990 | + | AGACGCGGCCCCCGGGGGAGGG | 22 | 13032 |
| BCL11A-10991 | + | CAGACGCGGCCCCCGGGGGAGGG | 23 | 13033 |
| BCL11A-10992 | + | CCAGACGCGGCCCCCGGGGGAGGG | 24 | 13034 |
| BCL11A-10993 | + | CCCCGGGGGAGGGGCGGG | 18 | 13035 |
| BCL11A-10994 | + | CCCCCGGGGGAGGGGCGGG | 19 | 13036 |
| BCL11A-4817 | + | GCCCCCGGGGGAGGGGCGGG | 20 | 13037 |
| BCL11A-10995 | + | GGCCCCCGGGGGAGGGGCGGG | 21 | 13038 |
| BCL11A-10996 | + | CGGCCCCCGGGGGAGGGGCGGG | 22 | 13039 |
| BCL11A-10997 | + | GCGGCCCCCGGGGGAGGGGCGGG | 23 | 13040 |
| BCL11A-10998 | + | CGCGGCCCCCGGGGGAGGGGCGGG | 24 | 13041 |
| BCL11A-6504 | + | GACAUGGUGGGCUGCGGG | 18 | 13042 |
| BCL11A-6505 | + | AGACAUGGUGGGCUGCGGG | 19 | 13043 |
| BCL11A-6506 | + | GAGACAUGGUGGGCUGCGGG | 20 | 13044 |
| BCL11A-6507 | + | CGAGACAUGGUGGGCUGCGGG | 21 | 13045 |
| BCL11A-6508 | + | GCGAGACAUGGUGGGCUGCGGG | 22 | 13046 |
| BCL11A-6509 | + | GGCGAGACAUGGUGGGCUGCGGG | 23 | 13047 |
| BCL11A-6510 | + | CGGCGAGACAUGGUGGGCUGCGGG | 24 | 13048 |
| BCL11A-10999 | + | GCCAAUGGCCAGUGCGGG | 18 | 13049 |
| BCL11A-11000 | + | AGCCAAUGGCCAGUGCGGG | 19 | 13050 |
| BCL11A-11001 | + | AAGCCAAUGGCCAGUGCGGG | 20 | 13051 |
| BCL11A-11002 | + | CAAGCCAAUGGCCAGUGCGGG | 21 | 13052 |
| BCL11A-11003 | + | ACAAGCCAAUGGCCAGUGCGGG | 22 | 13053 |
| BCL11A-11004 | + | GACAAGCCAAUGGCCAGUGCGGG | 23 | 13054 |
| BCL11A-11005 | + | GGACAAGCCAAUGGCCAGUGCGGG | 24 | 13055 |
| BCL11A-11006 | + | GGGAGGGGGAGGUGCGGG | 18 | 13056 |
| BCL11A-11007 | + | GGGGAGGGGGAGGUGCGGG | 19 | 13057 |
| BCL11A-11008 | + | CGGGGAGGGGGAGGUGCGGG | 20 | 13058 |
| BCL11A-11009 | + | GCGGGGAGGGGGAGGUGCGGG | 21 | 13059 |
| BCL11A-11010 | + | UGCGGGGAGGGGGAGGUGCGGG | 22 | 13060 |
| BCL11A-11011 | + | GUGCGGGGAGGGGGAGGUGCGGG | 23 | 13061 |
| BCL11A-11012 | + | AGUGCGGGGAGGGGGAGGUGCGGG | 24 | 13062 |
| BCL11A-11013 | + | CGAGCAGGAGAGAAGGGG | 18 | 13063 |
| BCL11A-11014 | + | GCGAGCAGGAGAGAAGGGG | 19 | 13064 |
| BCL11A-4476 | + | GGCGAGCAGGAGAGAAGGGG | 20 | 13065 |
| BCL11A-11015 | + | GGGCGAGCAGGAGAGAAGGGG | 21 | 13066 |
| BCL11A-11016 | + | AGGGCGAGCAGGAGAGAAGGGG | 22 | 13067 |
| BCL11A-11017 | + | CAGGGCGAGCAGGAGAGAAGGGG | 23 | 13068 |
| BCL11A-11018 | + | GCAGGGCGAGCAGGAGAGAAGGGG | 24 | 13069 |
| BCL11A-11019 | + | AGAAAGGGGUGGCAGGGG | 18 | 13070 |
| BCL11A-11020 | + | AAGAAAGGGGUGGCAGGGG | 19 | 13071 |
| BCL11A-9762 | + | GAAGAAAGGGGUGGCAGGGG | 20 | 13072 |
| BCL11A-11021 | + | AGAAGAAAGGGGUGGCAGGGG | 21 | 13073 |
| BCL11A-11022 | + | GAGAAGAAAGGGGUGGCAGGGG | 22 | 13074 |
| BCL11A-11023 | + | AGAGAAGAAAGGGGUGGCAGGGG | 23 | 13075 |
| BCL11A-11024 | + | GAGAGAAGAAAGGGGUGGCAGGGG | 24 | 13076 |
| BCL11A-11025 | + | AUGGACACACAUCAGGGG | 18 | 13077 |
| BCL11A-11026 | + | AAUGGACACACAUCAGGGG | 19 | 13078 |
| BCL11A-11027 | + | CAAUGGACACACAUCAGGGG | 20 | 13079 |
| BCL11A-11028 | + | CCAAUGGACACACAUCAGGGG | 21 | 13080 |
| BCL11A-11029 | + | ACCAAUGGACACACAUCAGGGG | 22 | 13081 |
| BCL11A-11030 | + | CACCAAUGGACACACAUCAGGGG | 23 | 13082 |
| BCL11A-11031 | + | ACACCAAUGGACACACAUCAGGGG | 24 | 13083 |
| BCL11A-11032 | + | GAGGGGCGGGCCGAGGGG | 18 | 13084 |
| BCL11A-11033 | + | GGAGGGGCGGGCCGAGGGG | 19 | 13085 |
| BCL11A-4486 | + | GGGAGGGGCGGGCCGAGGGG | 20 | 13086 |
| BCL11A-11034 | + | GGGGAGGGGCGGGCCGAGGGG | 21 | 13087 |
| BCL11A-11035 | + | GGGGGAGGGGCGGGCCGAGGGG | 22 | 13088 |
| BCL11A-11036 | + | CGGGGGAGGGGCGGGCCGAGGGG | 23 | 13089 |
| BCL11A-11037 | + | CCGGGGGAGGGGCGGGCCGAGGGG | 24 | 13090 |
| BCL11A-11038 | + | CAGACGCGGCCCCCGGGG | 18 | 13091 |
| BCL11A-11039 | + | CCAGACGCGGCCCCCGGGG | 19 | 13092 |
| BCL11A-4816 | + | GCCAGACGCGGCCCCCGGGG | 20 | 13093 |
| BCL11A-11040 | + | CGCCAGACGCGGCCCCCGGGG | 21 | 13094 |
| BCL11A-11041 | + | ACGCCAGACGCGGCCCCCGGGG | 22 | 13095 |
| BCL11A-11042 | + | GACGCCAGACGCGGCCCCCGGGG | 23 | 13096 |
| BCL11A-11043 | + | GGACGCCAGACGCGGCCCCCGGGG | 24 | 13097 |
| BCL11A-11044 | + | CCAAUGGCCAGUGCGGGG | 18 | 13098 |
| BCL11A-11045 | + | GCCAAUGGCCAGUGCGGGG | 19 | 13099 |
| BCL11A-9763 | + | AGCCAAUGGCCAGUGCGGGG | 20 | 13100 |
| BCL11A-11046 | + | AAGCCAAUGGCCAGUGCGGGG | 21 | 13101 |
| BCL11A-11047 | + | CAAGCCAAUGGCCAGUGCGGGG | 22 | 13102 |
| BCL11A-11048 | + | ACAAGCCAAUGGCCAGUGCGGGG | 23 | 13103 |
| BCL11A-11049 | + | GACAAGCCAAUGGCCAGUGCGGGG | 24 | 13104 |
| BCL11A-11050 | + | GGAGGGGGAGGUGCGGGG | 18 | 13105 |
| BCL11A-11051 | + | GGGAGGGGGAGGUGCGGGG | 19 | 13106 |
| BCL11A-9764 | + | GGGGAGGGGGAGGUGCGGGG | 20 | 13107 |
| BCL11A-11052 | + | CGGGGAGGGGGAGGUGCGGGG | 21 | 13108 |
| BCL11A-11053 | + | GCGGGGAGGGGGAGGUGCGGGG | 22 | 13109 |
| BCL11A-11054 | + | UGCGGGGAGGGGGAGGUGCGGGG | 23 | 13110 |
| BCL11A-11055 | + | GUGCGGGGAGGGGGAGGUGCGGGG | 24 | 13111 |
| BCL11A-11056 | + | AGACGCGGCCCCCGGGGG | 18 | 13112 |
| BCL11A-11057 | + | CAGACGCGGCCCCCGGGGG | 19 | 13113 |
| BCL11A-4635 | + | CCAGACGCGGCCCCCGGGGG | 20 | 13114 |
| BCL11A-11058 | + | GCCAGACGCGGCCCCCGGGGG | 21 | 13115 |
| BCL11A-11059 | + | CGCCAGACGCGGCCCCCGGGGG | 22 | 13116 |
| BCL11A-11060 | + | ACGCCAGACGCGGCCCCCGGGGG | 23 | 13117 |
| BCL11A-11061 | + | GACGCCAGACGCGGCCCCCGGGGG | 24 | 13118 |
| BCL11A-11062 | + | UGGGAGGAAAGGGUGGGG | 18 | 13119 |
| BCL11A-11063 | + | GUGGGAGGAAAGGGUGGGG | 19 | 13120 |
| BCL11A-9766 | + | GGUGGGAGGAAAGGGUGGGG | 20 | 13121 |
| BCL11A-11064 | + | GGGUGGGAGGAAAGGGUGGGG | 21 | 13122 |
| BCL11A-11065 | + | GGGGUGGGAGGAAAGGGUGGGG | 22 | 13123 |
| BCL11A-11066 | + | AGGGGUGGGAGGAAAGGGUGGGG | 23 | 13124 |
| BCL11A-11067 | + | CAGGGGUGGGAGGAAAGGGUGGGG | 24 | 13125 |
| BCL11A-11068 | + | AGACACACAAAACAUGGG | 18 | 13126 |
| BCL11A-11069 | + | GAGACACACAAAACAUGGG | 19 | 13127 |
| BCL11A-11070 | + | AGAGACACACAAAACAUGGG | 20 | 13128 |
| BCL11A-11071 | + | CAGAGACACACAAAACAUGGG | 21 | 13129 |
| BCL11A-11072 | + | ACAGAGACACACAAAACAUGGG | 22 | 13130 |
| BCL11A-11073 | + | GACAGAGACACACAAAACAUGGG | 23 | 13131 |
| BCL11A-11074 | + | GGACAGAGACACACAAAACAUGGG | 24 | 13132 |
| BCL11A-11075 | + | GCAAUGGUUCCAGAUGGG | 18 | 13133 |
| BCL11A-11076 | + | GGCAAUGGUUCCAGAUGGG | 19 | 13134 |
| BCL11A-11077 | + | CGGCAAUGGUUCCAGAUGGG | 20 | 13135 |
| BCL11A-11078 | + | ACGGCAAUGGUUCCAGAUGGG | 21 | 13136 |
| BCL11A-11079 | + | CACGGCAAUGGUUCCAGAUGGG | 22 | 13137 |
| BCL11A-11080 | + | ACACGGCAAUGGUUCCAGAUGGG | 23 | 13138 |
| BCL11A-11081 | + | UACACGGCAAUGGUUCCAGAUGGG | 24 | 13139 |
| BCL11A-11082 | + | GUGGGAGGAAAGGGUGGG | 18 | 13140 |
| BCL11A-11083 | + | GGUGGGAGGAAAGGGUGGG | 19 | 13141 |
| BCL11A-9767 | + | GGGUGGGAGGAAAGGGUGGG | 20 | 13142 |
| BCL11A-11084 | + | GGGGUGGGAGGAAAGGGUGGG | 21 | 13143 |
| BCL11A-11085 | + | AGGGGUGGGAGGAAAGGGUGGG | 22 | 13144 |
| BCL11A-11086 | + | CAGGGGUGGGAGGAAAGGGUGGG | 23 | 13145 |
| BCL11A-11087 | + | GCAGGGGUGGGAGGAAAGGGUGGG | 24 | 13146 |
| BCL11A-11088 | + | AGGGGUGGCAGGGGUGGG | 18 | 13147 |
| BCL11A-11089 | + | AAGGGGUGGCAGGGGUGGG | 19 | 13148 |
| BCL11A-9768 | + | AAAGGGGUGGCAGGGGUGGG | 20 | 13149 |
| BCL11A-11090 | + | GAAAGGGGUGGCAGGGGUGGG | 21 | 13150 |
| BCL11A-11091 | + | AGAAAGGGGUGGCAGGGGUGGG | 22 | 13151 |
| BCL11A-11092 | + | AAGAAAGGGGUGGCAGGGGUGGG | 23 | 13152 |
| BCL11A-11093 | + | GAAGAAAGGGGUGGCAGGGGUGGG | 24 | 13153 |
| BCL11A-11094 | + | UGAACGUCAGGAGUCUGG | 18 | 13154 |
| BCL11A-11095 | + | UUGAACGUCAGGAGUCUGG | 19 | 13155 |
| BCL11A-11096 | + | CUUGAACGUCAGGAGUCUGG | 20 | 13156 |
| BCL11A-11097 | + | ACUUGAACGUCAGGAGUCUGG | 21 | 13157 |
| BCL11A-11098 | + | AACUUGAACGUCAGGAGUCUGG | 22 | 13158 |
| BCL11A-11099 | + | GAACUUGAACGUCAGGAGUCUGG | 23 | 13159 |
| BCL11A-11100 | + | CGAACUUGAACGUCAGGAGUCUGG | 24 | 13160 |
| BCL11A-11101 | + | GCCGCGGCGGUGGCGUGG | 18 | 13161 |
| BCL11A-11102 | + | CGCCGCGGCGGUGGCGUGG | 19 | 13162 |
| BCL11A-11103 | + | GCGCCGCGGCGGUGGCGUGG | 20 | 13163 |
| BCL11A-11104 | + | AGCGCCGCGGCGGUGGCGUGG | 21 | 13164 |
| BCL11A-11105 | + | GAGCGCCGCGGCGGUGGCGUGG | 22 | 13165 |
| BCL11A-11106 | + | CGAGCGCCGCGGCGGUGGCGUGG | 23 | 13166 |
| BCL11A-11107 | + | GCGAGCGCCGCGGCGGUGGCGUGG | 24 | 13167 |
| BCL11A-11108 | + | GGUGGGAGGAAAGGGUGG | 18 | 13168 |
| BCL11A-11109 | + | GGGUGGGAGGAAAGGGUGG | 19 | 13169 |
| BCL11A-9770 | + | GGGGUGGGAGGAAAGGGUGG | 20 | 13170 |
| BCL11A-11110 | + | AGGGGUGGGAGGAAAGGGUGG | 21 | 13171 |
| BCL11A-11111 | + | CAGGGGUGGGAGGAAAGGGUGG | 22 | 13172 |
| BCL11A-11112 | + | GCAGGGGUGGGAGGAAAGGGUGG | 23 | 13173 |
| BCL11A-11113 | + | GGCAGGGGUGGGAGGAAAGGGUGG | 24 | 13174 |
| BCL11A-11114 | + | GAGAGAAGAAAGGGGUGG | 18 | 13175 |
| BCL11A-11115 | + | GGAGAGAAGAAAGGGGUGG | 19 | 13176 |
| BCL11A-11116 | + | GGGAGAGAAGAAAGGGGUGG | 20 | 13177 |
| BCL11A-11117 | + | CGGGAGAGAAGAAAGGGGUGG | 21 | 13178 |
| BCL11A-11118 | + | CCGGGAGAGAAGAAAGGGGUGG | 22 | 13179 |
| BCL11A-11119 | + | GCCGGGAGAGAAGAAAGGGGUGG | 23 | 13180 |
| BCL11A-11120 | + | GGCCGGGAGAGAAGAAAGGGGUGG | 24 | 13181 |
| BCL11A-11121 | + | AAGGGGUGGCAGGGGUGG | 18 | 13182 |
| BCL11A-11122 | + | AAAGGGGUGGCAGGGGUGG | 19 | 13183 |
| BCL11A-11123 | + | GAAAGGGGUGGCAGGGGUGG | 20 | 13184 |
| BCL11A-11124 | + | AGAAAGGGGUGGCAGGGGUGG | 21 | 13185 |
| BCL11A-11125 | + | AAGAAAGGGGUGGCAGGGGUGG | 22 | 13186 |
| BCL11A-11126 | + | GAAGAAAGGGGUGGCAGGGGUGG | 23 | 13187 |
| BCL11A-11127 | + | AGAAGAAAGGGGUGGCAGGGGUGG | 24 | 13188 |
| BCL11A-11128 | + | AGGGAAGAUGAAUUGUGG | 18 | 13189 |
| BCL11A-11129 | + | CAGGGAAGAUGAAUUGUGG | 19 | 13190 |
| BCL11A-11130 | + | GCAGGGAAGAUGAAUUGUGG | 20 | 13191 |
| BCL11A-11131 | + | CGCAGGGAAGAUGAAUUGUGG | 21 | 13192 |
| BCL11A-11132 | + | GCGCAGGGAAGAUGAAUUGUGG | 22 | 13193 |
| BCL11A-11133 | + | GGCGCAGGGAAGAUGAAUUGUGG | 23 | 13194 |
| BCL11A-11134 | + | UGGCGCAGGGAAGAUGAAUUGUGG | 24 | 13195 |
| BCL11A-6524 | + | UGCUUGCGGCGAGACAUG | 18 | 13196 |
| BCL11A-6525 | + | UUGCUUGCGGCGAGACAUG | 19 | 13197 |
| BCL11A-6526 | + | CUUGCUUGCGGCGAGACAUG | 20 | 13198 |
| BCL11A-6527 | + | CCUUGCUUGCGGCGAGACAUG | 21 | 13199 |
| BCL11A-6528 | + | GCCUUGCUUGCGGCGAGACAUG | 22 | 13200 |
| BCL11A-6529 | + | UGCCUUGCUUGCGGCGAGACAUG | 23 | 13201 |
| BCL11A-6530 | + | UUGCCUUGCUUGCGGCGAGACAUG | 24 | 13202 |
| BCL11A-6544 | + | GCGAGACAUGGUGGGCUG | 18 | 13203 |
| BCL11A-6545 | + | GGCGAGACAUGGUGGGCUG | 19 | 13204 |
| BCL11A-5361 | + | CGGCGAGACAUGGUGGGCUG | 20 | 13205 |
| BCL11A-6546 | + | GCGGCGAGACAUGGUGGGCUG | 21 | 13206 |
| BCL11A-6547 | + | UGCGGCGAGACAUGGUGGGCUG | 22 | 13207 |
| BCL11A-6548 | + | UUGCGGCGAGACAUGGUGGGCUG | 23 | 13208 |
| BCL11A-6549 | + | CUUGCGGCGAGACAUGGUGGGCUG | 24 | 13209 |
| BCL11A-6550 | + | UUCCCGUUUGCUUAAGUG | 18 | 13210 |
| BCL11A-6551 | + | AUUCCCGUUUGCUUAAGUG | 19 | 13211 |
| BCL11A-6552 | + | AAUUCCCGUUUGCUUAAGUG | 20 | 13212 |
| BCL11A-6553 | + | GAAUUCCCGUUUGCUUAAGUG | 21 | 13213 |
| BCL11A-6554 | + | AGAAUUCCCGUUUGCUUAAGUG | 22 | 13214 |
| BCL11A-6555 | + | GAGAAUUCCCGUUUGCUUAAGUG | 23 | 13215 |
| BCL11A-6556 | + | CGAGAAUUCCCGUUUGCUUAAGUG | 24 | 13216 |
| BCL11A-11135 | + | ACAAGCCAAUGGCCAGUG | 18 | 13217 |
| BCL11A-11136 | + | GACAAGCCAAUGGCCAGUG | 19 | 13218 |
| BCL11A-9773 | + | GGACAAGCCAAUGGCCAGUG | 20 | 13219 |
| BCL11A-11137 | + | AGGACAAGCCAAUGGCCAGUG | 21 | 13220 |
| BCL11A-11138 | + | CAGGACAAGCCAAUGGCCAGUG | 22 | 13221 |
| BCL11A-11139 | + | CCAGGACAAGCCAAUGGCCAGUG | 23 | 13222 |
| BCL11A-11140 | + | ACCAGGACAAGCCAAUGGCCAGUG | 24 | 13223 |
| BCL11A-11141 | + | UGCGGGGAGGGGGAGGUG | 18 | 13224 |
| BCL11A-11142 | + | GUGCGGGGAGGGGGAGGUG | 19 | 13225 |
| BCL11A-9774 | + | AGUGCGGGGAGGGGGAGGUG | 20 | 13226 |
| BCL11A-11143 | + | CAGUGCGGGGAGGGGGAGGUG | 21 | 13227 |
| BCL11A-11144 | + | CCAGUGCGGGGAGGGGGAGGUG | 22 | 13228 |
| BCL11A-11145 | + | GCCAGUGCGGGGAGGGGGAGGUG | 23 | 13229 |
| BCL11A-11146 | + | GGCCAGUGCGGGGAGGGGGAGGUG | 24 | 13230 |
| BCL11A-11147 | + | GGGUGGGAGGAAAGGGUG | 18 | 13231 |
| BCL11A-11148 | + | GGGGUGGGAGGAAAGGGUG | 19 | 13232 |
| BCL11A-9775 | + | AGGGGUGGGAGGAAAGGGUG | 20 | 13233 |
| BCL11A-11149 | + | CAGGGGUGGGAGGAAAGGGUG | 21 | 13234 |
| BCL11A-11150 | + | GCAGGGGUGGGAGGAAAGGGUG | 22 | 13235 |
| BCL11A-11151 | + | GGCAGGGGUGGGAGGAAAGGGUG | 23 | 13236 |
| BCL11A-11152 | + | UGGCAGGGGUGGGAGGAAAGGGUG | 24 | 13237 |
| BCL11A-11153 | + | CGCAGGGAAGAUGAAUUG | 18 | 13238 |
| BCL11A-11154 | + | GCGCAGGGAAGAUGAAUUG | 19 | 13239 |
| BCL11A-9777 | + | GGCGCAGGGAAGAUGAAUUG | 20 | 13240 |
| BCL11A-11155 | + | UGGCGCAGGGAAGAUGAAUUG | 21 | 13241 |
| BCL11A-11156 | + | AUGGCGCAGGGAAGAUGAAUUG | 22 | 13242 |
| BCL11A-11157 | + | GAUGGCGCAGGGAAGAUGAAUUG | 23 | 13243 |
| BCL11A-11158 | + | AGAUGGCGCAGGGAAGAUGAAUUG | 24 | 13244 |
| BCL11A-11159 | + | UUGACAUCCAAAAUAAAU | 18 | 13245 |
| BCL11A-11160 | + | UUUGACAUCCAAAAUAAAU | 19 | 13246 |
| BCL11A-11161 | + | UUUUGACAUCCAAAAUAAAU | 20 | 13247 |
| BCL11A-11162 | + | CUUUUGACAUCCAAAAUAAAU | 21 | 13248 |
| BCL11A-11163 | + | CCUUUUGACAUCCAAAAUAAAU | 22 | 13249 |
| BCL11A-11164 | + | GCCUUUUGACAUCCAAAAUAAAU | 23 | 13250 |
| BCL11A-11165 | + | UGCCUUUUGACAUCCAAAAUAAAU | 24 | 13251 |
| BCL11A-11166 | + | ACACCAAUGGACACACAU | 18 | 13252 |
| BCL11A-11167 | + | CACACCAAUGGACACACAU | 19 | 13253 |
| BCL11A-11168 | + | UCACACCAAUGGACACACAU | 20 | 13254 |
| BCL11A-11169 | + | CUCACACCAAUGGACACACAU | 21 | 13255 |
| BCL11A-11170 | + | GCUCACACCAAUGGACACACAU | 22 | 13256 |
| BCL11A-11171 | + | AGCUCACACCAAUGGACACACAU | 23 | 13257 |
| BCL11A-11172 | + | AAGCUCACACCAAUGGACACACAU | 24 | 13258 |
| BCL11A-11173 | + | CGACGGCUCGGUUCACAU | 18 | 13259 |
| BCL11A-11174 | + | ACGACGGCUCGGUUCACAU | 19 | 13260 |
| BCL11A-9582 | + | GACGACGGCUCGGUUCACAU | 20 | 13261 |
| BCL11A-11175 | + | GGACGACGGCUCGGUUCACAU | 21 | 13262 |
| BCL11A-11176 | + | CGGACGACGGCUCGGUUCACAU | 22 | 13263 |
| BCL11A-11177 | + | GCGGACGACGGCUCGGUUCACAU | 23 | 13264 |
| BCL11A-11178 | + | GGCGGACGACGGCUCGGUUCACAU | 24 | 13265 |
| BCL11A-11179 | + | UGCGGACGUGACGUCCCU | 18 | 13266 |
| BCL11A-11180 | + | GUGCGGACGUGACGUCCCU | 19 | 13267 |
| BCL11A-11181 | + | AGUGCGGACGUGACGUCCCU | 20 | 13268 |
| BCL11A-11182 | + | AAGUGCGGACGUGACGUCCCU | 21 | 13269 |
| BCL11A-11183 | + | CAAGUGCGGACGUGACGUCCCU | 22 | 13270 |
| BCL11A-11184 | + | UCAAGUGCGGACGUGACGUCCCU | 23 | 13271 |
| BCL11A-11185 | + | UUCAAGUGCGGACGUGACGUCCCU | 24 | 13272 |
| BCL11A-6618 | + | GGCGAGACAUGGUGGGCU | 18 | 13273 |
| BCL11A-6619 | + | CGGCGAGACAUGGUGGGCU | 19 | 13274 |
| BCL11A-6620 | + | GCGGCGAGACAUGGUGGGCU | 20 | 13275 |
| BCL11A-6621 | + | UGCGGCGAGACAUGGUGGGCU | 21 | 13276 |
| BCL11A-6622 | + | UUGCGGCGAGACAUGGUGGGCU | 22 | 13277 |
| BCL11A-6623 | + | CUUGCGGCGAGACAUGGUGGGCU | 23 | 13278 |
| BCL11A-6624 | + | GCUUGCGGCGAGACAUGGUGGGCU | 24 | 13279 |
| BCL11A-11186 | + | CUCUUUUACCUCGACUCU | 18 | 13280 |
| BCL11A-11187 | + | UCUCUUUUACCUCGACUCU | 19 | 13281 |
| BCL11A-9585 | + | AUCUCUUUUACCUCGACUCU | 20 | 13282 |
| BCL11A-11188 | + | UAUCUCUUUUACCUCGACUCU | 21 | 13283 |
| BCL11A-11189 | + | UUAUCUCUUUUACCUCGACUCU | 22 | 13284 |
| BCL11A-11190 | + | UUUAUCUCUUUUACCUCGACUCU | 23 | 13285 |
| BCL11A-11191 | + | CUUUAUCUCUUUUACCUCGACUCU | 24 | 13286 |
| BCL11A-11192 | + | UGAGCUGCAAGUUCAAGU | 18 | 13287 |
| BCL11A-11193 | + | CUGAGCUGCAAGUUCAAGU | 19 | 13288 |
| BCL11A-11194 | + | CCUGAGCUGCAAGUUCAAGU | 20 | 13289 |
| BCL11A-11195 | + | CCCUGAGCUGCAAGUUCAAGU | 21 | 13290 |
| BCL11A-11196 | + | CCCCUGAGCUGCAAGUUCAAGU | 22 | 13291 |
| BCL11A-11197 | + | CCCCCUGAGCUGCAAGUUCAAGU | 23 | 13292 |
| BCL11A-11198 | + | CCCCCCUGAGCUGCAAGUUCAAGU | 24 | 13293 |
| BCL11A-11199 | + | GACAAGCCAAUGGCCAGU | 18 | 13294 |
| BCL11A-11200 | + | GGACAAGCCAAUGGCCAGU | 19 | 13295 |
| BCL11A-11201 | + | AGGACAAGCCAAUGGCCAGU | 20 | 13296 |
| BCL11A-11202 | + | CAGGACAAGCCAAUGGCCAGU | 21 | 13297 |
| BCL11A-11203 | + | CCAGGACAAGCCAAUGGCCAGU | 22 | 13298 |
| BCL11A-11204 | + | ACCAGGACAAGCCAAUGGCCAGU | 23 | 13299 |
| BCL11A-11205 | + | GACCAGGACAAGCCAAUGGCCAGU | 24 | 13300 |
| BCL11A-11206 | + | CCCUGCGAACUUGAACGU | 18 | 13301 |
| BCL11A-11207 | + | UCCCUGCGAACUUGAACGU | 19 | 13302 |
| BCL11A-11208 | + | GUCCCUGCGAACUUGAACGU | 20 | 13303 |
| BCL11A-11209 | + | CGUCCCUGCGAACUUGAACGU | 21 | 13304 |
| BCL11A-11210 | + | ACGUCCCUGCGAACUUGAACGU | 22 | 13305 |
| BCL11A-11211 | + | GACGUCCCUGCGAACUUGAACGU | 23 | 13306 |
| BCL11A-11212 | + | UGACGUCCCUGCGAACUUGAACGU | 24 | 13307 |
| BCL11A-11213 | + | GUGCGGGGAGGGGGAGGU | 18 | 13308 |
| BCL11A-11214 | + | AGUGCGGGGAGGGGGAGGU | 19 | 13309 |
| BCL11A-11215 | + | CAGUGCGGGGAGGGGGAGGU | 20 | 13310 |
| BCL11A-11216 | + | CCAGUGCGGGGAGGGGGAGGU | 21 | 13311 |
| BCL11A-11217 | + | GCCAGUGCGGGGAGGGGGAGGU | 22 | 13312 |
| BCL11A-11218 | + | GGCCAGUGCGGGGAGGGGGAGGU | 23 | 13313 |
| BCL11A-11219 | + | UGGCCAGUGCGGGGAGGGGGAGGU | 24 | 13314 |
| BCL11A-11220 | + | GGGGUGGGAGGAAAGGGU | 18 | 13315 |
| BCL11A-11221 | + | AGGGGUGGGAGGAAAGGGU | 19 | 13316 |
| BCL11A-9784 | + | CAGGGGUGGGAGGAAAGGGU | 20 | 13317 |
| BCL11A-11222 | + | GCAGGGGUGGGAGGAAAGGGU | 21 | 13318 |
| BCL11A-11223 | + | GGCAGGGGUGGGAGGAAAGGGU | 22 | 13319 |
| BCL11A-11224 | + | UGGCAGGGGUGGGAGGAAAGGGU | 23 | 13320 |
| BCL11A-11225 | + | GUGGCAGGGGUGGGAGGAAAGGGU | 24 | 13321 |
| BCL11A-11226 | + | ACAUCGGGAGAGCCGGGU | 18 | 13322 |
| BCL11A-11227 | + | CACAUCGGGAGAGCCGGGU | 19 | 13323 |
| BCL11A-11228 | + | UCACAUCGGGAGAGCCGGGU | 20 | 13324 |
| BCL11A-11229 | + | UUCACAUCGGGAGAGCCGGGU | 21 | 13325 |
| BCL11A-11230 | + | GUUCACAUCGGGAGAGCCGGGU | 22 | 13326 |
| BCL11A-11231 | + | GGUUCACAUCGGGAGAGCCGGGU | 23 | 13327 |
| BCL11A-11232 | + | CGGUUCACAUCGGGAGAGCCGGGU | 24 | 13328 |
| BCL11A-11233 | + | GAAAGGGGUGGCAGGGGU | 18 | 13329 |
| BCL11A-11234 | + | AGAAAGGGGUGGCAGGGGU | 19 | 13330 |
| BCL11A-9785 | + | AAGAAAGGGGUGGCAGGGGU | 20 | 13331 |
| BCL11A-11235 | + | GAAGAAAGGGGUGGCAGGGGU | 21 | 13332 |
| BCL11A-11236 | + | AGAAGAAAGGGGUGGCAGGGGU | 22 | 13333 |
| BCL11A-11237 | + | GAGAAGAAAGGGGUGGCAGGGGU | 23 | 13334 |
| BCL11A-11238 | + | AGAGAAGAAAGGGGUGGCAGGGGU | 24 | 13335 |
| BCL11A-11239 | + | GCAGGGAAGAUGAAUUGU | 18 | 13336 |
| BCL11A-11240 | + | CGCAGGGAAGAUGAAUUGU | 19 | 13337 |
| BCL11A-9786 | + | GCGCAGGGAAGAUGAAUUGU | 20 | 13338 |
| BCL11A-11241 | + | GGCGCAGGGAAGAUGAAUUGU | 21 | 13339 |
| BCL11A-11242 | + | UGGCGCAGGGAAGAUGAAUUGU | 22 | 13340 |
| BCL11A-11243 | + | AUGGCGCAGGGAAGAUGAAUUGU | 23 | 13341 |
| BCL11A-11244 | + | GAUGGCGCAGGGAAGAUGAAUUGU | 24 | 13342 |
| BCL11A-11245 | + | GCGCAGGGAAGAUGAAUU | 18 | 13343 |
| BCL11A-11246 | + | GGCGCAGGGAAGAUGAAUU | 19 | 13344 |
| BCL11A-11247 | + | UGGCGCAGGGAAGAUGAAUU | 20 | 13345 |
| BCL11A-11248 | + | AUGGCGCAGGGAAGAUGAAUU | 21 | 13346 |
| BCL11A-11249 | + | GAUGGCGCAGGGAAGAUGAAUU | 22 | 13347 |
| BCL11A-11250 | + | AGAUGGCGCAGGGAAGAUGAAUU | 23 | 13348 |
| BCL11A-11251 | + | AAGAUGGCGCAGGGAAGAUGAAUU | 24 | 13349 |
| BCL11A-11252 | − | GCAGGACUAGAAGCAAAA | 18 | 13350 |
| BCL11A-11253 | − | CGCAGGACUAGAAGCAAAA | 19 | 13351 |
| BCL11A-11254 | − | GCGCAGGACUAGAAGCAAAA | 20 | 13352 |
| BCL11A-11255 | − | CGCGCAGGACUAGAAGCAAAA | 21 | 13353 |
| BCL11A-11256 | − | GCGCGCAGGACUAGAAGCAAAA | 22 | 13354 |
| BCL11A-11257 | − | AGCGCGCAGGACUAGAAGCAAAA | 23 | 13355 |
| BCL11A-11258 | − | GAGCGCGCAGGACUAGAAGCAAAA | 24 | 13356 |
| BCL11A-6678 | − | CCCCAGCACUUAAGCAAA | 18 | 13357 |
| BCL11A-6679 | − | ACCCCAGCACUUAAGCAAA | 19 | 13358 |
| BCL11A-5443 | − | AACCCCAGCACUUAAGCAAA | 20 | 13359 |
| BCL11A-6680 | − | AAACCCCAGCACUUAAGCAAA | 21 | 13360 |
| BCL11A-6681 | − | CAAACCCCAGCACUUAAGCAAA | 22 | 13361 |
| BCL11A-6682 | − | GCAAACCCCAGCACUUAAGCAAA | 23 | 13362 |
| BCL11A-6683 | − | GGCAAACCCCAGCACUUAAGCAAA | 24 | 13363 |
| BCL11A-11259 | − | CGAGGUAAAAGAGAUAAA | 18 | 13364 |
| BCL11A-11260 | − | UCGAGGUAAAAGAGAUAAA | 19 | 13365 |
| BCL11A-9693 | − | GUCGAGGUAAAAGAGAUAAA | 20 | 13366 |
| BCL11A-11261 | − | AGUCGAGGUAAAAGAGAUAAA | 21 | 13367 |
| BCL11A-11262 | − | GAGUCGAGGUAAAAGAGAUAAA | 22 | 13368 |
| BCL11A-11263 | − | AGAGUCGAGGUAAAAGAGAUAAA | 23 | 13369 |
| BCL11A-11264 | − | GAGAGUCGAGGUAAAAGAGAUAAA | 24 | 13370 |
| BCL11A-6698 | − | ACCCCAGCACUUAAGCAA | 18 | 13371 |
| BCL11A-6699 | − | AACCCCAGCACUUAAGCAA | 19 | 13372 |
| BCL11A-6700 | − | AAACCCCAGCACUUAAGCAA | 20 | 13373 |
| BCL11A-6701 | − | CAAACCCCAGCACUUAAGCAA | 21 | 13374 |
| BCL11A-6702 | − | GCAAACCCCAGCACUUAAGCAA | 22 | 13375 |
| BCL11A-6703 | − | GGCAAACCCCAGCACUUAAGCAA | 23 | 13376 |
| BCL11A-6704 | − | AGGCAAACCCCAGCACUUAAGCAA | 24 | 13377 |
| BCL11A-11265 | − | CGGCUCUCCCGAUGUGAA | 18 | 13378 |
| BCL11A-11266 | − | CCGGCUCUCCCGAUGUGAA | 19 | 13379 |
| BCL11A-11267 | − | CCCGGCUCUCCCGAUGUGAA | 20 | 13380 |
| BCL11A-11268 | − | ACCCGGCUCUCCCGAUGUGAA | 21 | 13381 |
| BCL11A-11269 | − | AACCCGGCUCUCCCGAUGUGAA | 22 | 13382 |
| BCL11A-11270 | − | UAACCCGGCUCUCCCGAUGUGAA | 23 | 13383 |
| BCL11A-11271 | − | CUAACCCGGCUCUCCCGAUGUGAA | 24 | 13384 |
| BCL11A-11272 | − | UCGAGGUAAAAGAGAUAA | 18 | 13385 |
| BCL11A-11273 | − | GUCGAGGUAAAAGAGAUAA | 19 | 13386 |
| BCL11A-9699 | − | AGUCGAGGUAAAAGAGAUAA | 20 | 13387 |
| BCL11A-11274 | − | GAGUCGAGGUAAAAGAGAUAA | 21 | 13388 |
| BCL11A-11275 | − | AGAGUCGAGGUAAAAGAGAUAA | 22 | 13389 |
| BCL11A-11276 | − | GAGAGUCGAGGUAAAAGAGAUAA | 23 | 13390 |
| BCL11A-11277 | − | CGAGAGUCGAGGUAAAAGAGAUAA | 24 | 13391 |
| BCL11A-11278 | − | CUCCGAGAGUCGAGGUAA | 18 | 13392 |
| BCL11A-11279 | − | CCUCCGAGAGUCGAGGUAA | 19 | 13393 |
| BCL11A-11280 | − | ACCUCCGAGAGUCGAGGUAA | 20 | 13394 |
| BCL11A-11281 | − | AACCUCCGAGAGUCGAGGUAA | 21 | 13395 |
| BCL11A-11282 | − | AAACCUCCGAGAGUCGAGGUAA | 22 | 13396 |
| BCL11A-11283 | − | AAAACCUCCGAGAGUCGAGGUAA | 23 | 13397 |
| BCL11A-11284 | − | AAAAACCUCCGAGAGUCGAGGUAA | 24 | 13398 |
| BCL11A-11285 | − | ACUUGAACUUGCAGCUCA | 18 | 13399 |
| BCL11A-11286 | − | CACUUGAACUUGCAGCUCA | 19 | 13400 |
| BCL11A-9705 | − | GCACUUGAACUUGCAGCUCA | 20 | 13401 |
| BCL11A-11287 | − | CGCACUUGAACUUGCAGCUCA | 21 | 13402 |
| BCL11A-11288 | − | CCGCACUUGAACUUGCAGCUCA | 22 | 13403 |
| BCL11A-11289 | − | UCCGCACUUGAACUUGCAGCUCA | 23 | 13404 |
| BCL11A-11290 | − | GUCCGCACUUGAACUUGCAGCUCA | 24 | 13405 |
| BCL11A-11291 | − | GCAAAAGCGAGGGGGAGA | 18 | 13406 |
| BCL11A-11292 | − | AGCAAAAGCGAGGGGGAGA | 19 | 13407 |
| BCL11A-4934 | − | AAGCAAAAGCGAGGGGGAGA | 20 | 13408 |
| BCL11A-11293 | − | GAAGCAAAAGCGAGGGGGAGA | 21 | 13409 |
| BCL11A-11294 | − | AGAAGCAAAAGCGAGGGGGAGA | 22 | 13410 |
| BCL11A-11295 | − | UAGAAGCAAAAGCGAGGGGGAGA | 23 | 13411 |
| BCL11A-11296 | − | CUAGAAGCAAAAGCGAGGGGGAGA | 24 | 13412 |
| BCL11A-11297 | − | GACUAGAAGCAAAAGCGA | 18 | 13413 |
| BCL11A-11298 | − | GGACUAGAAGCAAAAGCGA | 19 | 13414 |
| BCL11A-9710 | − | AGGACUAGAAGCAAAAGCGA | 20 | 13415 |
| BCL11A-11299 | − | CAGGACUAGAAGCAAAAGCGA | 21 | 13416 |
| BCL11A-11300 | − | GCAGGACUAGAAGCAAAAGCGA | 22 | 13417 |
| BCL11A-11301 | − | CGCAGGACUAGAAGCAAAAGCGA | 23 | 13418 |
| BCL11A-11302 | − | GCGCAGGACUAGAAGCAAAAGCGA | 24 | 13419 |
| BCL11A-11303 | − | AAGCAAAAGCGAGGGGGA | 18 | 13420 |
| BCL11A-11304 | − | GAAGCAAAAGCGAGGGGGA | 19 | 13421 |
| BCL11A-4972 | − | AGAAGCAAAAGCGAGGGGGA | 20 | 13422 |
| BCL11A-11305 | − | UAGAAGCAAAAGCGAGGGGGA | 21 | 13423 |
| BCL11A-11306 | − | CUAGAAGCAAAAGCGAGGGGGA | 22 | 13424 |
| BCL11A-11307 | − | ACUAGAAGCAAAAGCGAGGGGGA | 23 | 13425 |
| BCL11A-11308 | − | GACUAGAAGCAAAAGCGAGGGGGA | 24 | 13426 |
| BCL11A-11309 | − | GUCGAGGUAAAAGAGAUA | 18 | 13427 |
| BCL11A-11310 | − | AGUCGAGGUAAAAGAGAUA | 19 | 13428 |
| BCL11A-11311 | − | GAGUCGAGGUAAAAGAGAUA | 20 | 13429 |
| BCL11A-11312 | − | AGAGUCGAGGUAAAAGAGAUA | 21 | 13430 |
| BCL11A-11313 | − | GAGAGUCGAGGUAAAAGAGAUA | 22 | 13431 |
| BCL11A-11314 | − | CGAGAGUCGAGGUAAAAGAGAUA | 23 | 13432 |
| BCL11A-11315 | − | CCGAGAGUCGAGGUAAAAGAGAUA | 24 | 13433 |
| BCL11A-11316 | − | GGGACGUCACGUCCGCAC | 18 | 13434 |
| BCL11A-11317 | − | AGGGACGUCACGUCCGCAC | 19 | 13435 |
| BCL11A-11318 | − | CAGGGACGUCACGUCCGCAC | 20 | 13436 |
| BCL11A-11319 | − | GCAGGGACGUCACGUCCGCAC | 21 | 13437 |
| BCL11A-11320 | − | CGCAGGGACGUCACGUCCGCAC | 22 | 13438 |
| BCL11A-11321 | − | UCGCAGGGACGUCACGUCCGCAC | 23 | 13439 |
| BCL11A-11322 | − | UUCGCAGGGACGUCACGUCCGCAC | 24 | 13440 |
| BCL11A-11323 | − | AUAAUUAUUAAUAAUCAC | 18 | 13441 |
| BCL11A-11324 | − | AAUAAUUAUUAAUAAUCAC | 19 | 13442 |
| BCL11A-11325 | − | UAAUAAUUAUUAAUAAUCAC | 20 | 13443 |
| BCL11A-11326 | − | AUAAUAAUUAUUAAUAAUCAC | 21 | 13444 |
| BCL11A-11327 | − | AAUAAUAAUUAUUAAUAAUCAC | 22 | 13445 |
| BCL11A-11328 | − | UAAUAAUAAUUAUUAAUAAUCAC | 23 | 13446 |
| BCL11A-11329 | − | GUAAUAAUAAUUAUUAAUAAUCAC | 24 | 13447 |
| BCL11A-11330 | − | CAUUUUUAAAUUUUUCAC | 18 | 13448 |
| BCL11A-11331 | − | GCAUUUUUAAAUUUUUCAC | 19 | 13449 |
| BCL11A-11332 | − | UGCAUUUUUAAAUUUUUCAC | 20 | 13450 |
| BCL11A-11333 | − | AUGCAUUUUUAAAUUUUUCAC | 21 | 13451 |
| BCL11A-11334 | − | CAUGCAUUUUUAAAUUUUUCAC | 22 | 13452 |
| BCL11A-11335 | − | GCAUGCAUUUUUAAAUUUUUCAC | 23 | 13453 |
| BCL11A-11336 | − | UGCAUGCAUUUUUAAAUUUUUCAC | 24 | 13454 |
| BCL11A-11337 | − | CACGAGAGCGCGCAGGAC | 18 | 13455 |
| BCL11A-11338 | − | UCACGAGAGCGCGCAGGAC | 19 | 13456 |
| BCL11A-11339 | − | AUCACGAGAGCGCGCAGGAC | 20 | 13457 |
| BCL11A-11340 | − | AAUCACGAGAGCGCGCAGGAC | 21 | 13458 |
| BCL11A-11341 | − | UAAUCACGAGAGCGCGCAGGAC | 22 | 13459 |
| BCL11A-11342 | − | AUAAUCACGAGAGCGCGCAGGAC | 23 | 13460 |
| BCL11A-11343 | − | AAUAAUCACGAGAGCGCGCAGGAC | 24 | 13461 |
| BCL11A-11344 | − | UCGGCCCGCCCCUCCCCC | 18 | 13462 |
| BCL11A-11345 | − | CUCGGCCCGCCCCUCCCCC | 19 | 13463 |
| BCL11A-9716 | − | CCUCGGCCCGCCCCUCCCCC | 20 | 13464 |
| BCL11A-11346 | − | CCCUCGGCCCGCCCCUCCCCC | 21 | 13465 |
| BCL11A-11347 | − | CCCCUCGGCCCGCCCCUCCCCC | 22 | 13466 |
| BCL11A-11348 | − | UCCCCUCGGCCCGCCCCUCCCCC | 23 | 13467 |
| BCL11A-11349 | − | CUCCCCUCGGCCCGCCCCUCCCCC | 24 | 13468 |
| BCL11A-11350 | − | CUCGGCCCGCCCCUCCCC | 18 | 13469 |
| BCL11A-11351 | − | CCUCGGCCCGCCCCUCCCC | 19 | 13470 |
| BCL11A-9717 | − | CCCUCGGCCCGCCCCUCCCC | 20 | 13471 |
| BCL11A-11352 | − | CCCCUCGGCCCGCCCCUCCCC | 21 | 13472 |
| BCL11A-11353 | − | UCCCCUCGGCCCGCCCCUCCCC | 22 | 13473 |
| BCL11A-11354 | − | CUCCCCUCGGCCCGCCCCUCCCC | 23 | 13474 |
| BCL11A-11355 | − | CCUCCCCUCGGCCCGCCCCUCCCC | 24 | 13475 |
| BCL11A-11356 | − | CCUCGGCCCGCCCCUCCC | 18 | 13476 |
| BCL11A-11357 | − | CCCUCGGCCCGCCCCUCCC | 19 | 13477 |
| BCL11A-11358 | − | CCCCUCGGCCCGCCCCUCCC | 20 | 13478 |
| BCL11A-11359 | − | UCCCCUCGGCCCGCCCCUCCC | 21 | 13479 |
| BCL11A-11360 | − | CUCCCCUCGGCCCGCCCCUCCC | 22 | 13480 |
| BCL11A-11361 | − | CCUCCCCUCGGCCCGCCCCUCCC | 23 | 13481 |
| BCL11A-11362 | − | CCCUCCCCUCGGCCCGCCCCUCCC | 24 | 13482 |
| BCL11A-11363 | − | GGGCCGCGUCUGGCGUCC | 18 | 13483 |
| BCL11A-11364 | − | GGGGCCGCGUCUGGCGUCC | 19 | 13484 |
| BCL11A-11365 | − | GGGGGCCGCGUCUGGCGUCC | 20 | 13485 |
| BCL11A-11366 | − | CGGGGGCCGCGUCUGGCGUCC | 21 | 13486 |
| BCL11A-11367 | − | CCGGGGGCCGCGUCUGGCGUCC | 22 | 13487 |
| BCL11A-11368 | − | CCCGGGGGCCGCGUCUGGCGUCC | 23 | 13488 |
| BCL11A-11369 | − | CCCCGGGGGCCGCGUCUGGCGUCC | 24 | 13489 |
| BCL11A-11370 | − | AGGACUAGAAGCAAAAGC | 18 | 13490 |
| BCL11A-11371 | − | CAGGACUAGAAGCAAAAGC | 19 | 13491 |
| BCL11A-11372 | − | GCAGGACUAGAAGCAAAAGC | 20 | 13492 |
| BCL11A-11373 | − | CGCAGGACUAGAAGCAAAAGC | 21 | 13493 |
| BCL11A-11374 | − | GCGCAGGACUAGAAGCAAAAGC | 22 | 13494 |
| BCL11A-11375 | − | CGCGCAGGACUAGAAGCAAAAGC | 23 | 13495 |
| BCL11A-11376 | − | GCGCGCAGGACUAGAAGCAAAAGC | 24 | 13496 |
| BCL11A-11377 | − | CCUGACGUUCAAGUUCGC | 18 | 13497 |
| BCL11A-11378 | − | UCCUGACGUUCAAGUUCGC | 19 | 13498 |
| BCL11A-9566 | − | CUCCUGACGUUCAAGUUCGC | 20 | 13499 |
| BCL11A-11379 | − | ACUCCUGACGUUCAAGUUCGC | 21 | 13500 |
| BCL11A-11380 | − | GACUCCUGACGUUCAAGUUCGC | 22 | 13501 |
| BCL11A-11381 | − | AGACUCCUGACGUUCAAGUUCGC | 23 | 13502 |
| BCL11A-11382 | − | CAGACUCCUGACGUUCAAGUUCGC | 24 | 13503 |
| BCL11A-11383 | − | UAAUAAUUAUUAAUAAUC | 18 | 13504 |
| BCL11A-11384 | − | AUAAUAAUUAUUAAUAAUC | 19 | 13505 |
| BCL11A-11385 | − | AAUAAUAAUUAUUAAUAAUC | 20 | 13506 |
| BCL11A-11386 | − | UAAUAAUAAUUAUUAAUAAUC | 21 | 13507 |
| BCL11A-11387 | − | GUAAUAAUAAUUAUUAAUAAUC | 22 | 13508 |
| BCL11A-11388 | − | AGUAAUAAUAAUUAUUAAUAAUC | 23 | 13509 |
| BCL11A-11389 | − | UAGUAAUAAUAAUUAUUAAUAAUC | 24 | 13510 |
| BCL11A-11390 | − | AAAAACCCUCAUCCCAUC | 18 | 13511 |
| BCL11A-11391 | − | AAAAAACCCUCAUCCCAUC | 19 | 13512 |
| BCL11A-9730 | − | GAAAAAACCCUCAUCCCAUC | 20 | 13513 |
| BCL11A-11392 | − | GGAAAAAACCCUCAUCCCAUC | 21 | 13514 |
| BCL11A-11393 | − | GGGAAAAAACCCUCAUCCCAUC | 22 | 13515 |
| BCL11A-11394 | − | GGGGAAAAAACCCUCAUCCCAUC | 23 | 13516 |
| BCL11A-11395 | − | GGGGGAAAAAACCCUCAUCCCAUC | 24 | 13517 |
| BCL11A-11396 | − | CACUUGAACUUGCAGCUC | 18 | 13518 |
| BCL11A-11397 | − | GCACUUGAACUUGCAGCUC | 19 | 13519 |
| BCL11A-9569 | − | CGCACUUGAACUUGCAGCUC | 20 | 13520 |
| BCL11A-11398 | − | CCGCACUUGAACUUGCAGCUC | 21 | 13521 |
| BCL11A-11399 | − | UCCGCACUUGAACUUGCAGCUC | 22 | 13522 |
| BCL11A-11400 | − | GUCCGCACUUGAACUUGCAGCUC | 23 | 13523 |
| BCL11A-11401 | − | CGUCCGCACUUGAACUUGCAGCUC | 24 | 13524 |
| BCL11A-11402 | − | UGCAUUUUUAAAUUUUUC | 18 | 13525 |
| BCL11A-11403 | − | AUGCAUUUUUAAAUUUUUC | 19 | 13526 |
| BCL11A-11404 | − | CAUGCAUUUUUAAAUUUUUC | 20 | 13527 |
| BCL11A-11405 | − | GCAUGCAUUUUUAAAUUUUUC | 21 | 13528 |
| BCL11A-11406 | − | UGCAUGCAUUUUUAAAUUUUUC | 22 | 13529 |
| BCL11A-11407 | − | GUGCAUGCAUUUUUAAAUUUUUC | 23 | 13530 |
| BCL11A-11408 | − | UGUGCAUGCAUUUUUAAAUUUUUC | 24 | 13531 |
| BCL11A-11409 | − | GAGGUAAAAGAGAUAAAG | 18 | 13532 |
| BCL11A-11410 | − | CGAGGUAAAAGAGAUAAAG | 19 | 13533 |
| BCL11A-9571 | − | UCGAGGUAAAAGAGAUAAAG | 20 | 13534 |
| BCL11A-11411 | − | GUCGAGGUAAAAGAGAUAAAG | 21 | 13535 |
| BCL11A-11412 | − | AGUCGAGGUAAAAGAGAUAAAG | 22 | 13536 |
| BCL11A-11413 | − | GAGUCGAGGUAAAAGAGAUAAAG | 23 | 13537 |
| BCL11A-11414 | − | AGAGUCGAGGUAAAAGAGAUAAAG | 24 | 13538 |
| BCL11A-11415 | − | CUUGAACUUGCAGCUCAG | 18 | 13539 |
| BCL11A-11416 | − | ACUUGAACUUGCAGCUCAG | 19 | 13540 |
| BCL11A-9738 | − | CACUUGAACUUGCAGCUCAG | 20 | 13541 |
| BCL11A-11417 | − | GCACUUGAACUUGCAGCUCAG | 21 | 13542 |
| BCL11A-11418 | − | CGCACUUGAACUUGCAGCUCAG | 22 | 13543 |
| BCL11A-11419 | − | CCGCACUUGAACUUGCAGCUCAG | 23 | 13544 |
| BCL11A-11420 | − | UCCGCACUUGAACUUGCAGCUCAG | 24 | 13545 |
| BCL11A-11421 | − | GAGAAAAACCUCCGAGAG | 18 | 13546 |
| BCL11A-11422 | − | CGAGAAAAACCUCCGAGAG | 19 | 13547 |
| BCL11A-11423 | − | ACGAGAAAAACCUCCGAGAG | 20 | 13548 |
| BCL11A-11424 | − | CACGAGAAAAACCUCCGAGAG | 21 | 13549 |
| BCL11A-11425 | − | UCACGAGAAAAACCUCCGAGAG | 22 | 13550 |
| BCL11A-11426 | − | UUCACGAGAAAAACCUCCGAGAG | 23 | 13551 |
| BCL11A-11427 | − | UUUCACGAGAAAAACCUCCGAGAG | 24 | 13552 |
| BCL11A-11428 | − | ACUAGAAGCAAAAGCGAG | 18 | 13553 |
| BCL11A-11429 | − | GACUAGAAGCAAAAGCGAG | 19 | 13554 |
| BCL11A-9739 | − | GGACUAGAAGCAAAAGCGAG | 20 | 13555 |
| BCL11A-11430 | − | AGGACUAGAAGCAAAAGCGAG | 21 | 13556 |
| BCL11A-11431 | − | CAGGACUAGAAGCAAAAGCGAG | 22 | 13557 |
| BCL11A-11432 | − | GCAGGACUAGAAGCAAAAGCGAG | 23 | 13558 |
| BCL11A-11433 | − | CGCAGGACUAGAAGCAAAAGCGAG | 24 | 13559 |
| BCL11A-11434 | − | CGCGUGUGUGGGGGGGAG | 18 | 13560 |
| BCL11A-11435 | − | CCGCGUGUGUGGGGGGGAG | 19 | 13561 |
| BCL11A-11436 | − | UCCGCGUGUGUGGGGGGGAG | 20 | 13562 |
| BCL11A-11437 | − | GUCCGCGUGUGUGGGGGGGAG | 21 | 13563 |
| BCL11A-11438 | − | AGUCCGCGUGUGUGGGGGGGAG | 22 | 13564 |
| BCL11A-11439 | − | GAGUCCGCGUGUGUGGGGGGGAG | 23 | 13565 |
| BCL11A-11440 | − | AGAGUCCGCGUGUGUGGGGGGGAG | 24 | 13566 |
| BCL11A-11441 | − | GGCCGCGUCUGGCGUCCG | 18 | 13567 |
| BCL11A-11442 | − | GGGCCGCGUCUGGCGUCCG | 19 | 13568 |
| BCL11A-9574 | − | GGGGCCGCGUCUGGCGUCCG | 20 | 13569 |
| BCL11A-11443 | − | GGGGGCCGCGUCUGGCGUCCG | 21 | 13570 |
| BCL11A-11444 | − | CGGGGGCCGCGUCUGGCGUCCG | 22 | 13571 |
| BCL11A-11445 | − | CCGGGGGCCGCGUCUGGCGUCCG | 23 | 13572 |
| BCL11A-11446 | − | CCCGGGGGCCGCGUCUGGCGUCCG | 24 | 13573 |
| BCL11A-11447 | − | GGACUAGAAGCAAAAGCG | 18 | 13574 |
| BCL11A-11448 | − | AGGACUAGAAGCAAAAGCG | 19 | 13575 |
| BCL11A-9748 | − | CAGGACUAGAAGCAAAAGCG | 20 | 13576 |
| BCL11A-11449 | − | GCAGGACUAGAAGCAAAAGCG | 21 | 13577 |
| BCL11A-11450 | − | CGCAGGACUAGAAGCAAAAGCG | 22 | 13578 |
| BCL11A-11451 | − | GCGCAGGACUAGAAGCAAAAGCG | 23 | 13579 |
| BCL11A-11452 | − | CGCGCAGGACUAGAAGCAAAAGCG | 24 | 13580 |
| BCL11A-11453 | − | AAUAAUCACGAGAGCGCG | 18 | 13581 |
| BCL11A-11454 | − | UAAUAAUCACGAGAGCGCG | 19 | 13582 |
| BCL11A-11455 | − | UUAAUAAUCACGAGAGCGCG | 20 | 13583 |
| BCL11A-11456 | − | AUUAAUAAUCACGAGAGCGCG | 21 | 13584 |
| BCL11A-11457 | − | UAUUAAUAAUCACGAGAGCGCG | 22 | 13585 |
| BCL11A-11458 | − | UUAUUAAUAAUCACGAGAGCGCG | 23 | 13586 |
| BCL11A-11459 | − | AUUAUUAAUAAUCACGAGAGCGCG | 24 | 13587 |
| BCL11A-11460 | − | UCCUGACGUUCAAGUUCG | 18 | 13588 |
| BCL11A-11461 | − | CUCCUGACGUUCAAGUUCG | 19 | 13589 |
| BCL11A-11462 | − | ACUCCUGACGUUCAAGUUCG | 20 | 13590 |
| BCL11A-11463 | − | GACUCCUGACGUUCAAGUUCG | 21 | 13591 |
| BCL11A-11464 | − | AGACUCCUGACGUUCAAGUUCG | 22 | 13592 |
| BCL11A-11465 | − | CAGACUCCUGACGUUCAAGUUCG | 23 | 13593 |
| BCL11A-11466 | − | CCAGACUCCUGACGUUCAAGUUCG | 24 | 13594 |
| BCL11A-11467 | − | AGGUAAAAGAGAUAAAGG | 18 | 13595 |
| BCL11A-11468 | − | GAGGUAAAAGAGAUAAAGG | 19 | 13596 |
| BCL11A-9753 | − | CGAGGUAAAAGAGAUAAAGG | 20 | 13597 |
| BCL11A-11469 | − | UCGAGGUAAAAGAGAUAAAGG | 21 | 13598 |
| BCL11A-11470 | − | GUCGAGGUAAAAGAGAUAAAGG | 22 | 13599 |
| BCL11A-11471 | − | AGUCGAGGUAAAAGAGAUAAAGG | 23 | 13600 |
| BCL11A-11472 | − | GAGUCGAGGUAAAAGAGAUAAAGG | 24 | 13601 |
| BCL11A-11473 | − | CUAGAAGCAAAAGCGAGG | 18 | 13602 |
| BCL11A-11474 | − | ACUAGAAGCAAAAGCGAGG | 19 | 13603 |
| BCL11A-9755 | − | GACUAGAAGCAAAAGCGAGG | 20 | 13604 |
| BCL11A-11475 | − | GGACUAGAAGCAAAAGCGAGG | 21 | 13605 |
| BCL11A-11476 | − | AGGACUAGAAGCAAAAGCGAGG | 22 | 13606 |
| BCL11A-11477 | − | CAGGACUAGAAGCAAAAGCGAGG | 23 | 13607 |
| BCL11A-11478 | − | GCAGGACUAGAAGCAAAAGCGAGG | 24 | 13608 |
| BCL11A-11479 | − | AGAAGCAAAAGCGAGGGG | 18 | 13609 |
| BCL11A-11480 | − | UAGAAGCAAAAGCGAGGGG | 19 | 13610 |
| BCL11A-11481 | − | CUAGAAGCAAAAGCGAGGGG | 20 | 13611 |
| BCL11A-11482 | − | ACUAGAAGCAAAAGCGAGGGG | 21 | 13612 |
| BCL11A-11483 | − | GACUAGAAGCAAAAGCGAGGGG | 22 | 13613 |
| BCL11A-11484 | − | GGACUAGAAGCAAAAGCGAGGGG | 23 | 13614 |
| BCL11A-11485 | − | AGGACUAGAAGCAAAAGCGAGGGG | 24 | 13615 |
| BCL11A-11486 | − | GAGUCCGCGUGUGUGGGG | 18 | 13616 |
| BCL11A-11487 | − | AGAGUCCGCGUGUGUGGGG | 19 | 13617 |
| BCL11A-9577 | − | UAGAGUCCGCGUGUGUGGGG | 20 | 13618 |
| BCL11A-11488 | − | UUAGAGUCCGCGUGUGUGGGG | 21 | 13619 |
| BCL11A-11489 | − | UUUAGAGUCCGCGUGUGUGGGG | 22 | 13620 |
| BCL11A-11490 | − | UUUUAGAGUCCGCGUGUGUGGGG | 23 | 13621 |
| BCL11A-11491 | − | AUUUUAGAGUCCGCGUGUGUGGGG | 24 | 13622 |
| BCL11A-11492 | − | AGAGUCCGCGUGUGUGGG | 18 | 13623 |
| BCL11A-11493 | − | UAGAGUCCGCGUGUGUGGG | 19 | 13624 |
| BCL11A-9769 | − | UUAGAGUCCGCGUGUGUGGG | 20 | 13625 |
| BCL11A-11494 | − | UUUAGAGUCCGCGUGUGUGGG | 21 | 13626 |
| BCL11A-11495 | − | UUUUAGAGUCCGCGUGUGUGGG | 22 | 13627 |
| BCL11A-11496 | − | AUUUUAGAGUCCGCGUGUGUGGG | 23 | 13628 |
| BCL11A-11497 | − | CAUUUUAGAGUCCGCGUGUGUGGG | 24 | 13629 |
| BCL11A-11498 | − | UAGAGUCCGCGUGUGUGG | 18 | 13630 |
| BCL11A-11499 | − | UUAGAGUCCGCGUGUGUGG | 19 | 13631 |
| BCL11A-9578 | − | UUUAGAGUCCGCGUGUGUGG | 20 | 13632 |
| BCL11A-11500 | − | UUUUAGAGUCCGCGUGUGUGG | 21 | 13633 |
| BCL11A-11501 | − | AUUUUAGAGUCCGCGUGUGUGG | 22 | 13634 |
| BCL11A-11502 | − | CAUUUUAGAGUCCGCGUGUGUGG | 23 | 13635 |
| BCL11A-11503 | − | UCAUUUUAGAGUCCGCGUGUGUGG | 24 | 13636 |
| BCL11A-11504 | − | CGCUCGCUGCGGCCACUG | 18 | 13637 |
| BCL11A-11505 | − | GCGCUCGCUGCGGCCACUG | 19 | 13638 |
| BCL11A-11506 | − | GGCGCUCGCUGCGGCCACUG | 20 | 13639 |
| BCL11A-11507 | − | CGGCGCUCGCUGCGGCCACUG | 21 | 13640 |
| BCL11A-11508 | − | GCGGCGCUCGCUGCGGCCACUG | 22 | 13641 |
| BCL11A-11509 | − | CGCGGCGCUCGCUGCGGCCACUG | 23 | 13642 |
| BCL11A-11510 | − | CCGCGGCGCUCGCUGCGGCCACUG | 24 | 13643 |
| BCL11A-11511 | − | GGAUGUCAAAAGGCACUG | 18 | 13644 |
| BCL11A-11512 | − | UGGAUGUCAAAAGGCACUG | 19 | 13645 |
| BCL11A-11513 | − | UUGGAUGUCAAAAGGCACUG | 20 | 13646 |
| BCL11A-11514 | − | UUUGGAUGUCAAAAGGCACUG | 21 | 13647 |
| BCL11A-11515 | − | UUUUGGAUGUCAAAAGGCACUG | 22 | 13648 |
| BCL11A-11516 | − | AUUUUGGAUGUCAAAAGGCACUG | 23 | 13649 |
| BCL11A-11517 | − | UAUUUUGGAUGUCAAAAGGCACUG | 24 | 13650 |
| BCL11A-11518 | − | UUUUAGAGUCCGCGUGUG | 18 | 13651 |
| BCL11A-11519 | − | AUUUUAGAGUCCGCGUGUG | 19 | 13652 |
| BCL11A-9581 | − | CAUUUUAGAGUCCGCGUGUG | 20 | 13653 |
| BCL11A-11520 | − | UCAUUUUAGAGUCCGCGUGUG | 21 | 13654 |
| BCL11A-11521 | − | UUCAUUUUAGAGUCCGCGUGUG | 22 | 13655 |
| BCL11A-11522 | − | UUUCAUUUUAGAGUCCGCGUGUG | 23 | 13656 |
| BCL11A-11523 | − | CUUUCAUUUUAGAGUCCGCGUGUG | 24 | 13657 |
| BCL11A-11524 | − | UUAGAGUCCGCGUGUGUG | 18 | 13658 |
| BCL11A-11525 | − | UUUAGAGUCCGCGUGUGUG | 19 | 13659 |
| BCL11A-9776 | − | UUUUAGAGUCCGCGUGUGUG | 20 | 13660 |
| BCL11A-11526 | − | AUUUUAGAGUCCGCGUGUGUG | 21 | 13661 |
| BCL11A-11527 | − | CAUUUUAGAGUCCGCGUGUGUG | 22 | 13662 |
| BCL11A-11528 | − | UCAUUUUAGAGUCCGCGUGUGUG | 23 | 13663 |
| BCL11A-11529 | − | UUCAUUUUAGAGUCCGCGUGUGUG | 24 | 13664 |
| BCL11A-11530 | − | AAAAAACCCUCAUCCCAU | 18 | 13665 |
| BCL11A-11531 | − | GAAAAAACCCUCAUCCCAU | 19 | 13666 |
| BCL11A-11532 | − | GGAAAAAACCCUCAUCCCAU | 20 | 13667 |
| BCL11A-11533 | − | GGGAAAAAACCCUCAUCCCAU | 21 | 13668 |
| BCL11A-11534 | − | GGGGAAAAAACCCUCAUCCCAU | 22 | 13669 |
| BCL11A-11535 | − | GGGGGAAAAAACCCUCAUCCCAU | 23 | 13670 |
| BCL11A-11536 | − | AGGGGGAAAAAACCCUCAUCCCAU | 24 | 13671 |
| BCL11A-11537 | − | UAACCCGGCUCUCCCGAU | 18 | 13672 |
| BCL11A-11538 | − | CUAACCCGGCUCUCCCGAU | 19 | 13673 |
| BCL11A-11539 | − | UCUAACCCGGCUCUCCCGAU | 20 | 13674 |
| BCL11A-11540 | − | UUCUAACCCGGCUCUCCCGAU | 21 | 13675 |
| BCL11A-11541 | − | UUUCUAACCCGGCUCUCCCGAU | 22 | 13676 |
| BCL11A-11542 | − | CUUUCUAACCCGGCUCUCCCGAU | 23 | 13677 |
| BCL11A-11543 | − | UCUUUCUAACCCGGCUCUCCCGAU | 24 | 13678 |
| BCL11A-11544 | − | UUUUCACGAGAAAAACCU | 18 | 13679 |
| BCL11A-11545 | − | UUUUUCACGAGAAAAACCU | 19 | 13680 |
| BCL11A-11546 | − | AUUUUUCACGAGAAAAACCU | 20 | 13681 |
| BCL11A-11547 | − | AAUUUUUCACGAGAAAAACCU | 21 | 13682 |
| BCL11A-11548 | − | AAAUUUUUCACGAGAAAAACCU | 22 | 13683 |
| BCL11A-11549 | − | UAAAUUUUUCACGAGAAAAACCU | 23 | 13684 |
| BCL11A-11550 | − | UUAAAUUUUUCACGAGAAAAACCU | 24 | 13685 |
| BCL11A-11551 | − | GCACUUGAACUUGCAGCU | 18 | 13686 |
| BCL11A-11552 | − | CGCACUUGAACUUGCAGCU | 19 | 13687 |
| BCL11A-11553 | − | CCGCACUUGAACUUGCAGCU | 20 | 13688 |
| BCL11A-11554 | − | UCCGCACUUGAACUUGCAGCU | 21 | 13689 |
| BCL11A-11555 | − | GUCCGCACUUGAACUUGCAGCU | 22 | 13690 |
| BCL11A-11556 | − | CGUCCGCACUUGAACUUGCAGCU | 23 | 13691 |
| BCL11A-11557 | − | ACGUCCGCACUUGAACUUGCAGCU | 24 | 13692 |
| BCL11A-11558 | − | CUGAUGAAGAUAUUUUCU | 18 | 13693 |
| BCL11A-11559 | − | ACUGAUGAAGAUAUUUUCU | 19 | 13694 |
| BCL11A-11560 | − | CACUGAUGAAGAUAUUUUCU | 20 | 13695 |
| BCL11A-11561 | − | GCACUGAUGAAGAUAUUUUCU | 21 | 13696 |
| BCL11A-11562 | − | GGCACUGAUGAAGAUAUUUUCU | 22 | 13697 |
| BCL11A-11563 | − | AGGCACUGAUGAAGAUAUUUUCU | 23 | 13698 |
| BCL11A-11564 | − | AAGGCACUGAUGAAGAUAUUUUCU | 24 | 13699 |
| BCL11A-11565 | − | UGAUGUGUGUCCAUUGGU | 18 | 13700 |
| BCL11A-11566 | − | CUGAUGUGUGUCCAUUGGU | 19 | 13701 |
| BCL11A-11567 | − | CCUGAUGUGUGUCCAUUGGU | 20 | 13702 |
| BCL11A-11568 | − | CCCUGAUGUGUGUCCAUUGGU | 21 | 13703 |
| BCL11A-11569 | − | CCCCUGAUGUGUGUCCAUUGGU | 22 | 13704 |
| BCL11A-11570 | − | GCCCCUGAUGUGUGUCCAUUGGU | 23 | 13705 |
| BCL11A-11571 | − | AGCCCCUGAUGUGUGUCCAUUGGU | 24 | 13706 |
| BCL11A-11572 | − | AUUUUAGAGUCCGCGUGU | 18 | 13707 |
| BCL11A-11573 | − | CAUUUUAGAGUCCGCGUGU | 19 | 13708 |
| BCL11A-11574 | − | UCAUUUUAGAGUCCGCGUGU | 20 | 13709 |
| BCL11A-11575 | − | UUCAUUUUAGAGUCCGCGUGU | 21 | 13710 |
| BCL11A-11576 | − | UUUCAUUUUAGAGUCCGCGUGU | 22 | 13711 |
| BCL11A-11577 | − | CUUUCAUUUUAGAGUCCGCGUGU | 23 | 13712 |
| BCL11A-11578 | − | UCUUUCAUUUUAGAGUCCGCGUGU | 24 | 13713 |
| BCL11A-11579 | − | UUUAGAGUCCGCGUGUGU | 18 | 13714 |
| BCL11A-11580 | − | UUUUAGAGUCCGCGUGUGU | 19 | 13715 |
| BCL11A-9586 | − | AUUUUAGAGUCCGCGUGUGU | 20 | 13716 |
| BCL11A-11581 | − | CAUUUUAGAGUCCGCGUGUGU | 21 | 13717 |
| BCL11A-11582 | − | UCAUUUUAGAGUCCGCGUGUGU | 22 | 13718 |
| BCL11A-11583 | − | UUCAUUUUAGAGUCCGCGUGUGU | 23 | 13719 |
| BCL11A-11584 | − | UUUCAUUUUAGAGUCCGCGUGUGU | 24 | 13720 |
| BCL11A-11585 | − | AUUGCCGUGUAUGCACUU | 18 | 13721 |
| BCL11A-11586 | − | CAUUGCCGUGUAUGCACUU | 19 | 13722 |
| BCL11A-11587 | − | CCAUUGCCGUGUAUGCACUU | 20 | 13723 |
| BCL11A-11588 | − | ACCAUUGCCGUGUAUGCACUU | 21 | 13724 |
| BCL11A-11589 | − | AACCAUUGCCGUGUAUGCACUU | 22 | 13725 |
| BCL11A-11590 | − | GAACCAUUGCCGUGUAUGCACUU | 23 | 13726 |
| BCL11A-11591 | − | GGAACCAUUGCCGUGUAUGCACUU | 24 | 13727 |

[1104] Table 19D provides exemplary targeting domains for knocking down the BCL11A gene selected according to the fourth tier parameters. The targeting domains bind within the additional 500 bp (e.g., upstream or downstream) of a transcription start site (TSS), e.g., extending to 1 kb upstream and downstream of a TSS, and the PAM is NNGRRT. It is contemplated herein that in an embodiment the targeting domain hybridizes to the target domain through complementary base pairing. Any of the targeting domains in the table can be used with a S. aureus eiCas9 molecule or eiCas9 fusion protein (e.g., an eiCas9 fused to a transcription repressor domain) to alter the BCL11A gene (e.g., reduce or eliminate BCL gene expression, BCL protein function, or the level of BCL11A protein). One or more gRNA may be used to target an eiCas9 to the promoter region of the BCL11A gene.

TABLE 19D
4th Tier

| | DNA | | Target Site | |
|---|---|---|---|---|
| gRNA Name | Strand | Targeting Domain | Length | SEQ ID NO: |
| BCL11A-11592 | + | CUCACCUCUUUUCUCCCC | 18 | 13728 |
| BCL11A-11593 | + | UCUCACCUCUUUUCUCCCC | 19 | 13729 |
| BCL11A-10076 | + | GUCUCACCUCUUUUCUCCCC | 20 | 13730 |
| BCL11A-11594 | + | AGUCUCACCUCUUUUCUCCCC | 21 | 13731 |
| BCL11A-11595 | + | CAGUCUCACCUCUUUUCUCCCC | 22 | 13732 |
| BCL11A-11596 | + | CCAGUCUCACCUCUUUUCUCCCC | 23 | 13733 |
| BCL11A-11597 | + | GCCAGUCUCACCUCUUUUCUCCCC | 24 | 13734 |
| BCL11A-11598 | + | AAAAGAAAAAAAUAGAGC | 18 | 13735 |
| BCL11A-11599 | + | AAAAAGAAAAAAAUAGAGC | 19 | 13736 |
| BCL11A-11600 | + | AAAAAAGAAAAAAAUAGAGC | 20 | 13737 |
| BCL11A-11601 | + | CAAAAAAGAAAAAAAUAGAGC | 21 | 13738 |
| BCL11A-11602 | + | UCAAAAAAGAAAAAAAUAGAGC | 22 | 13739 |
| BCL11A-11603 | + | UUCAAAAAAGAAAAAAAUAGAGC | 23 | 13740 |
| BCL11A-11604 | + | AUUCAAAAAAGAAAAAAAUAGAGC | 24 | 13741 |
| BCL11A-11605 | + | GGCGGGGCGGGGGGGGAG | 18 | 13742 |
| BCL11A-11606 | + | UGGCGGGGCGGGGGGGGAG | 19 | 13743 |
| BCL11A-10153 | + | CUGGCGGGGCGGGGGGGGAG | 20 | 13744 |
| BCL11A-11607 | + | ACUGGCGGGGCGGGGGGGGAG | 21 | 13745 |
| BCL11A-11608 | + | AACUGGCGGGGCGGGGGGGGAG | 22 | 13746 |
| BCL11A-11609 | + | AAACUGGCGGGGCGGGGGGGGAG | 23 | 13747 |
| BCL11A-11610 | + | AAAACUGGCGGGGCGGGGGGGGAG | 24 | 13748 |
| BCL11A-11611 | + | AGGGAGCGCACGGCAACG | 18 | 13749 |
| BCL11A-11612 | + | GAGGGAGCGCACGGCAACG | 19 | 13750 |
| BCL11A-10155 | + | GGAGGGAGCGCACGGCAACG | 20 | 13751 |
| BCL11A-11613 | + | GGGAGGGAGCGCACGGCAACG | 21 | 13752 |
| BCL11A-11614 | + | UGGGAGGGAGCGCACGGCAACG | 22 | 13753 |
| BCL11A-11615 | + | GUGGGAGGGAGCGCACGGCAACG | 23 | 13754 |
| BCL11A-11616 | + | GGUGGGAGGGAGCGCACGGCAACG | 24 | 13755 |
| BCL11A-11617 | + | CCCCCCCAUUUUCUUACG | 18 | 13756 |
| BCL11A-11618 | + | ACCCCCCCAUUUUCUUACG | 19 | 13757 |
| BCL11A-11619 | + | UACCCCCCCAUUUUCUUACG | 20 | 13758 |
| BCL11A-11620 | + | CUACCCCCCCAUUUUCUUACG | 21 | 13759 |
| BCL11A-11621 | + | CCUACCCCCCCAUUUUCUUACG | 22 | 13760 |
| BCL11A-11622 | + | CCCUACCCCCCCAUUUUCUUACG | 23 | 13761 |
| BCL11A-11623 | + | UCCCUACCCCCCCAUUUUCUUACG | 24 | 13762 |
| BCL11A-11624 | + | GGGCGGAGGGAAGCCAGG | 18 | 13763 |
| BCL11A-11625 | + | CGGGCGGAGGGAAGCCAGG | 19 | 13764 |
| BCL11A-11626 | + | GCGGGCGGAGGGAAGCCAGG | 20 | 13765 |
| BCL11A-11627 | + | CGCGGGCGGAGGGAAGCCAGG | 21 | 13766 |
| BCL11A-11628 | + | GCGCGGGCGGAGGGAAGCCAGG | 22 | 13767 |
| BCL11A-11629 | + | AGCGCGGGCGGAGGGAAGCCAGG | 23 | 13768 |
| BCL11A-11630 | + | AAGCGCGGGCGGAGGGAAGCCAGG | 24 | 13769 |
| BCL11A-11631 | + | CGGAAAGGAGGAAAGAGG | 18 | 13770 |
| BCL11A-11632 | + | GCGGAAAGGAGGAAAGAGG | 19 | 13771 |
| BCL11A-10187 | + | GGCGGAAAGGAGGAAAGAGG | 20 | 13772 |
| BCL11A-11633 | + | CGGCGGAAAGGAGGAAAGAGG | 21 | 13773 |
| BCL11A-11634 | + | GCGGCGGAAAGGAGGAAAGAGG | 22 | 13774 |
| BCL11A-11635 | + | AGCGGCGGAAAGGAGGAAAGAGG | 23 | 13775 |
| BCL11A-11636 | + | AAGCGGCGGAAAGGAGGAAAGAGG | 24 | 13776 |
| BCL11A-11637 | + | AAACUGGCGGGGCGGGGG | 18 | 13777 |
| BCL11A-11638 | + | AAAACUGGCGGGGCGGGGG | 19 | 13778 |
| BCL11A-10209 | + | CAAAACUGGCGGGGCGGGGG | 20 | 13779 |
| BCL11A-11639 | + | GCAAAACUGGCGGGGCGGGGG | 21 | 13780 |
| BCL11A-11640 | + | UGCAAAACUGGCGGGGCGGGGG | 22 | 13781 |
| BCL11A-11641 | + | UUGCAAAACUGGCGGGGCGGGGG | 23 | 13782 |
| BCL11A-11642 | + | UUUGCAAAACUGGCGGGGCGGGGG | 24 | 13783 |
| BCL11A-11643 | + | CCACCCCCAGGUUUGCAU | 18 | 13784 |
| BCL11A-11644 | + | CCCACCCCCAGGUUUGCAU | 19 | 13785 |
| BCL11A-11645 | + | UCCCACCCCCAGGUUUGCAU | 20 | 13786 |
| BCL11A-11646 | + | CUCCCACCCCCAGGUUUGCAU | 21 | 13787 |
| BCL11A-11647 | + | GCUCCCACCCCCAGGUUUGCAU | 22 | 13788 |
| BCL11A-11648 | + | AGCUCCCACCCCCAGGUUUGCAU | 23 | 13789 |
| BCL11A-11649 | + | CAGCUCCCACCCCCAGGUUUGCAU | 24 | 13790 |
| BCL11A-11650 | + | GCCUAAGUUUGGAGGGCU | 18 | 13791 |
| BCL11A-11651 | + | AGCCUAAGUUUGGAGGGCU | 19 | 13792 |
| BCL11A-11652 | + | CAGCCUAAGUUUGGAGGGCU | 20 | 13793 |
| BCL11A-11653 | + | CCAGCCUAAGUUUGGAGGGCU | 21 | 13794 |
| BCL11A-11654 | + | UCCAGCCUAAGUUUGGAGGGCU | 22 | 13795 |
| BCL11A-11655 | + | AUCCAGCCUAAGUUUGGAGGGCU | 23 | 13796 |
| BCL11A-11656 | + | AAUCCAGCCUAAGUUUGGAGGGCU | 24 | 13797 |
| BCL11A-11657 | + | CCACUUUCUCACUAUUGU | 18 | 13798 |
| BCL11A-11658 | + | GCCACUUUCUCACUAUUGU | 19 | 13799 |
| BCL11A-10251 | + | UGCCACUUUCUCACUAUUGU | 20 | 13800 |
| BCL11A-11659 | + | GUGCCACUUUCUCACUAUUGU | 21 | 13801 |
| BCL11A-11660 | + | AGUGCCACUUUCUCACUAUUGU | 22 | 13802 |
| BCL11A-11661 | + | CAGUGCCACUUUCUCACUAUUGU | 23 | 13803 |
| BCL11A-11662 | + | ACAGUGCCACUUUCUCACUAUUGU | 24 | 13804 |
| BCL11A-11663 | − | UUAUUUCUCUUUUCGAAA | 18 | 13805 |
| BCL11A-11664 | − | UUUAUUUCUCUUUUCGAAA | 19 | 13806 |
| BCL11A-10027 | − | CUUUAUUUCUCUUUUCGAAA | 20 | 13807 |
| BCL11A-11665 | − | GCUUUAUUUCUCUUUUCGAAA | 21 | 13808 |
| BCL11A-11666 | − | CGCUUUAUUUCUCUUUUCGAAA | 22 | 13809 |
| BCL11A-11667 | − | CCGCUUUAUUUCUCUUUUCGAAA | 23 | 13810 |
| BCL11A-11668 | − | GCCGCUUUAUUUCUCUUUUCGAAA | 24 | 13811 |
| BCL11A-11669 | − | CGGCGGCGGGGAGGGGAA | 18 | 13812 |
| BCL11A-11670 | − | GCGGCGGCGGGGAGGGGAA | 19 | 13813 |
| BCL11A-11671 | − | GGCGGCGGCGGGGAGGGGAA | 20 | 13814 |
| BCL11A-11672 | − | CGGCGGCGGCGGGGAGGGGAA | 21 | 13815 |
| BCL11A-11673 | − | GCGGCGGCGGCGGGGAGGGGAA | 22 | 13816 |
| BCL11A-11674 | − | CGCGGCGGCGGCGGGGAGGGGAA | 23 | 13817 |
| BCL11A-11675 | − | GCGCGGCGGCGGCGGGGAGGGGAA | 24 | 13818 |
| BCL11A-11676 | − | UGGGGGGGUAGGGAGGGA | 18 | 13819 |
| BCL11A-11677 | − | AUGGGGGGGUAGGGAGGGA | 19 | 13820 |
| BCL11A-11678 | − | AAUGGGGGGGUAGGGAGGGA | 20 | 13821 |
| BCL11A-11679 | − | AAAUGGGGGGGUAGGGAGGGA | 21 | 13822 |
| BCL11A-11680 | − | AAAAUGGGGGGGUAGGGAGGGA | 22 | 13823 |
| BCL11A-11681 | − | GAAAAUGGGGGGGUAGGGAGGGA | 23 | 13824 |
| BCL11A-11682 | − | AGAAAAUGGGGGGGUAGGGAGGGA | 24 | 13825 |
| BCL11A-11683 | − | AAAAUGGGGGGGUAGGGA | 18 | 13826 |
| BCL11A-11684 | − | GAAAAUGGGGGGGUAGGGA | 19 | 13827 |
| BCL11A-10049 | − | AGAAAAUGGGGGGGUAGGGA | 20 | 13828 |
| BCL11A-11685 | − | AAGAAAAUGGGGGGGUAGGGA | 21 | 13829 |
| BCL11A-11686 | − | UAAGAAAAUGGGGGGGUAGGGA | 22 | 13830 |
| BCL11A-11687 | − | GUAAGAAAAUGGGGGGGUAGGGA | 23 | 13831 |
| BCL11A-11688 | − | CGUAAGAAAAUGGGGGGGUAGGGA | 24 | 13832 |
| BCL11A-11689 | − | AAGGGGCCCCCGGCGCUC | 18 | 13833 |
| BCL11A-11690 | − | AAAGGGGCCCCCGGCGCUC | 19 | 13834 |
| BCL11A-11691 | − | GAAAGGGGCCCCCGGCGCUC | 20 | 13835 |
| BCL11A-11692 | − | GGAAAGGGGCCCCCGGCGCUC | 21 | 13836 |
| BCL11A-11693 | − | UGGAAAGGGGCCCCCGGCGCUC | 22 | 13837 |
| BCL11A-11694 | − | GUGGAAAGGGGCCCCCGGCGCUC | 23 | 13838 |
| BCL11A-11695 | − | UGUGGAAAGGGGCCCCCGGCGCUC | 24 | 13839 |
| BCL11A-11696 | − | CUUUUGUUCCGGCCAGAG | 18 | 13840 |
| BCL11A-11697 | − | CCUUUUGUUCCGGCCAGAG | 19 | 13841 |
| BCL11A-11698 | − | GCCUUUUGUUCCGGCCAGAG | 20 | 13842 |
| BCL11A-11699 | − | CGCCUUUUGUUCCGGCCAGAG | 21 | 13843 |
| BCL11A-11700 | − | CCGCCUUUUGUUCCGGCCAGAG | 22 | 13844 |
| BCL11A-11701 | − | GCCGCCUUUUGUUCCGGCCAGAG | 23 | 13845 |
| BCL11A-11702 | − | UGCCGCCUUUUGUUCCGGCCAGAG | 24 | 13846 |
| BCL11A-11703 | − | GUGGGUGUGCGUACGGAG | 18 | 13847 |
| BCL11A-11704 | − | AGUGGGUGUGCGUACGGAG | 19 | 13848 |
| BCL11A-11705 | − | AAGUGGGUGUGCGUACGGAG | 20 | 13849 |
| BCL11A-11706 | − | GAAGUGGGUGUGCGUACGGAG | 21 | 13850 |
| BCL11A-11707 | − | GGAAGUGGGUGUGCGUACGGAG | 22 | 13851 |
| BCL11A-11708 | − | GGGAAGUGGGUGUGCGUACGGAG | 23 | 13852 |
| BCL11A-11709 | − | GGGGAAGUGGGUGUGCGUACGGAG | 24 | 13853 |
| BCL11A-11710 | − | CCGGCGCUCCUGAGUCCG | 18 | 13854 |
| BCL11A-11711 | − | CCCGGCGCUCCUGAGUCCG | 19 | 13855 |
| BCL11A-10172 | − | CCCCGGCGCUCCUGAGUCCG | 20 | 13856 |
| BCL11A-11712 | − | CCCCCGGCGCUCCUGAGUCCG | 21 | 13857 |
| BCL11A-11713 | − | GCCCCCGGCGCUCCUGAGUCCG | 22 | 13858 |
| BCL11A-11714 | − | GGCCCCCGGCGCUCCUGAGUCCG | 23 | 13859 |
| BCL11A-11715 | − | GGGCCCCCGGCGCUCCUGAGUCCG | 24 | 13860 |
| BCL11A-11716 | − | CAGCCCUCCAAACUUAGG | 18 | 13861 |
| BCL11A-11717 | − | GCAGCCCUCCAAACUUAGG | 19 | 13862 |
| BCL11A-11718 | − | CGCAGCCCUCCAAACUUAGG | 20 | 13863 |
| BCL11A-11719 | − | CCGCAGCCCUCCAAACUUAGG | 21 | 13864 |
| BCL11A-11720 | − | CCCGCAGCCCUCCAAACUUAGG | 22 | 13865 |
| BCL11A-11721 | − | ACCCGCAGCCCUCCAAACUUAGG | 23 | 13866 |
| BCL11A-11722 | − | GACCCGCAGCCCUCCAAACUUAGG | 24 | 13867 |
| BCL11A-11723 | − | CUCACCGUAAGAAAAUGG | 18 | 13868 |
| BCL11A-11724 | − | ACUCACCGUAAGAAAAUGG | 19 | 13869 |
| BCL11A-10214 | − | CACUCACCGUAAGAAAAUGG | 20 | 13870 |
| BCL11A-11725 | − | CCACUCACCGUAAGAAAAUGG | 21 | 13871 |
| BCL11A-11726 | − | CCCACUCACCGUAAGAAAAUGG | 22 | 13872 |
| BCL11A-11727 | − | UCCCACUCACCGUAAGAAAAUGG | 23 | 13873 |
| BCL11A-11728 | − | UUCCCACUCACCGUAAGAAAAUGG | 24 | 13874 |
| BCL11A-11729 | − | GAGGCUCAGCUCUCAACU | 18 | 13875 |
| BCL11A-11730 | − | GGAGGCUCAGCUCUCAACU | 19 | 13876 |
| BCL11A-11731 | − | UGGAGGCUCAGCUCUCAACU | 20 | 13877 |
| BCL11A-11732 | − | UUGGAGGCUCAGCUCUCAACU | 21 | 13878 |
| BCL11A-11733 | − | CUUGGAGGCUCAGCUCUCAACU | 22 | 13879 |
| BCL11A-11734 | − | ACUUGGAGGCUCAGCUCUCAACU | 23 | 13880 |
| BCL11A-11735 | − | AACUUGGAGGCUCAGCUCUCAACU | 24 | 13881 |
| BCL11A-11736 | − | CAACUCACAUGCAAACCU | 18 | 13882 |
| BCL11A-11737 | − | ACAACUCACAUGCAAACCU | 19 | 13883 |
| BCL11A-10235 | − | AACAACUCACAUGCAAACCU | 20 | 13884 |
| BCL11A-11738 | − | GAACAACUCACAUGCAAACCU | 21 | 13885 |
| BCL11A-11739 | − | CGAACAACUCACAUGCAAACCU | 22 | 13886 |
| BCL11A-11740 | − | GCGAACAACUCACAUGCAAACCU | 23 | 13887 |
| BCL11A-11741 | − | UGCGAACAACUCACAUGCAAACCU | 24 | 13888 |
| BCL11A-10351 | − | UUGAAUAAUCUUUCAUUU | 18 | 13889 |
| BCL11A-10352 | − | UUUGAAUAAUCUUUCAUUU | 19 | 13890 |
| BCL11A-10353 | − | UUUUGAAUAAUCUUUCAUUU | 20 | 13891 |
| BCL11A-10354 | − | UUUUUGAAUAAUCUUUCAUUU | 21 | 13892 |
| BCL11A-10355 | − | UUUUUUGAAUAAUCUUUCAUUU | 22 | 13893 |
| BCL11A-10356 | − | CUUUUUUGAAUAAUCUUUCAUUU | 23 | 13894 |
| BCL11A-10357 | − | UCUUUUUUGAAUAAUCUUUCAUUU | 24 | 13895 |
| BCL11A-11742 | − | GCUCUAUUUUUUUCUUUU | 18 | 13896 |
| BCL11A-11743 | − | CGCUCUAUUUUUUUCUUUU | 19 | 13897 |
| BCL11A-11744 | − | UCGCUCUAUUUUUUUCUUUU | 20 | 13898 |
| BCL11A-11745 | − | CUCGCUCUAUUUUUUUCUUUU | 21 | 13899 |
| BCL11A-11746 | − | UCUCGCUCUAUUUUUUUCUUUU | 22 | 13900 |
| BCL11A-11747 | − | CUCUCGCUCUAUUUUUUUCUUUU | 23 | 13901 |
| BCL11A-11748 | − | ACUCUCGCUCUAUUUUUUUCUUUU | 24 | 13902 |

[1105] Table 19E provides exemplary targeting domains for knocking down the BCL11A gene selected according to the fifth tier parameters. The targeting domains bind within the additional 500 bp (e.g., upstream or downstream) of a transcription start site (TSS), e.g., extending to 1 kb upstream and downstream of a TSS, and the PAM is NNGRRV. It is contemplated herein that in an embodiment the targeting domain hybridizes to the target domain through complementary base pairing. Any of the targeting domains in the table can be used with a S. aureus eiCas9 molecule or eiCas9 fusion protein (e.g., an eiCas9 fused to a transcription repressor domain) to alter the BCL11A gene (e.g., reduce or eliminate BCL11A gene expression, BCL11A protein function, or the level of BCL11A protein). One or more gRNA may be used to target an eiCas9 to the promoter region of the BCL11A gene.

TABLE 19E
5th Tier

| | | | Target | |
|---|---|---|---|---|
| | DNA | | Site | |
| gRNA Name | Strand | Targeting Domain | Length | SEQ ID NO: |
| BCL11A-11749 | + | AUUCAAAAAAGAAAAAAA | 18 | 13903 |
| BCL11A-11750 | + | UAUUCAAAAAAGAAAAAAA | 19 | 13904 |
| BCL11A-11751 | + | UUAUUCAAAAAAGAAAAAAA | 20 | 13905 |
| BCL11A-11752 | + | AUUAUUCAAAAAAGAAAAAAA | 21 | 13906 |
| BCL11A-11753 | + | GAUUAUUCAAAAAAGAAAAAAA | 22 | 13907 |
| BCL11A-11754 | + | AGAUUAUUCAAAAAAGAAAAAAA | 23 | 13908 |
| BCL11A-11755 | + | AAGAUUAUUCAAAAAAGAAAAAAA | 24 | 13909 |
| BCL11A-11756 | + | AUGAAAGAUUAUUCAAAA | 18 | 13910 |
| BCL11A-11757 | + | AAUGAAAGAUUAUUCAAAA | 19 | 13911 |
| BCL11A-11758 | + | AAAUGAAAGAUUAUUCAAAA | 20 | 13912 |
| BCL11A-11759 | + | AAAAUGAAAGAUUAUUCAAAA | 21 | 13913 |
| BCL11A-11760 | + | UAAAAUGAAAGAUUAUUCAAAA | 22 | 13914 |
| BCL11A-11761 | + | CUAAAAUGAAAGAUUAUUCAAAA | 23 | 13915 |
| BCL11A-11762 | + | UCUAAAAUGAAAGAUUAUUCAAAA | 24 | 13916 |
| BCL11A-11763 | + | UGCAUUCCUUUUCGAAAA | 18 | 13917 |
| BCL11A-11764 | + | UUGCAUUCCUUUUCGAAAA | 19 | 13918 |
| BCL11A-11765 | + | AUUGCAUUCCUUUUCGAAAA | 20 | 13919 |
| BCL11A-11766 | + | CAUUGCAUUCCUUUUCGAAAA | 21 | 13920 |
| BCL11A-11767 | + | UCAUUGCAUUCCUUUUCGAAAA | 22 | 13921 |
| BCL11A-11768 | + | AUCAUUGCAUUCCUUUUCGAAAA | 23 | 13922 |
| BCL11A-11769 | + | AAUCAUUGCAUUCCUUUUCGAAAA | 24 | 13923 |
| BCL11A-11770 | + | GCGGCGGAAAGGAGGAAA | 18 | 13924 |
| BCL11A-11771 | + | AGCGGCGGAAAGGAGGAAA | 19 | 13925 |
| BCL11A-11772 | + | AAGCGGCGGAAAGGAGGAAA | 20 | 13926 |
| BCL11A-11773 | + | AAAGCGGCGGAAAGGAGGAAA | 21 | 13927 |
| BCL11A-11774 | + | UAAAGCGGCGGAAAGGAGGAAA | 22 | 13928 |
| BCL11A-11775 | + | AUAAAGCGGCGGAAAGGAGGAAA | 23 | 13929 |
| BCL11A-11776 | + | AAUAAAGCGGCGGAAAGGAGGAAA | 24 | 13930 |
| BCL11A-11777 | + | GCCCGCGCGGCCUGGAAA | 18 | 13931 |
| BCL11A-11778 | + | AGCCCGCGCGGCCUGGAAA | 19 | 13932 |
| BCL11A-11779 | + | GAGCCCGCGCGGCCUGGAAA | 20 | 13933 |
| BCL11A-11780 | + | GGAGCCCGCGCGGCCUGGAAA | 21 | 13934 |
| BCL11A-11781 | + | AGGAGCCCGCGCGGCCUGGAAA | 22 | 13935 |
| BCL11A-11782 | + | CAGGAGCCCGCGCGGCCUGGAAA | 23 | 13936 |
| BCL11A-11783 | + | CCAGGAGCCCGCGCGGCCUGGAAA | 24 | 13937 |
| BCL11A-10371 | + | ACACACGCGGACUCUAAA | 18 | 13938 |
| BCL11A-10372 | + | CACACACGCGGACUCUAAA | 19 | 13939 |
| BCL11A-10373 | + | CCACACACGCGGACUCUAAA | 20 | 13940 |
| BCL11A-10374 | + | CCCACACACGCGGACUCUAAA | 21 | 13941 |
| BCL11A-10375 | + | CCCCACACACGCGGACUCUAAA | 22 | 13942 |
| BCL11A-10376 | + | CCCCCACACACGCGGACUCUAAA | 23 | 13943 |
| BCL11A-10377 | + | CCCCCCACACACGCGGACUCUAAA | 24 | 13944 |
| BCL11A-11784 | + | AUUGCAUUCCUUUUCGAA | 18 | 13945 |
| BCL11A-11785 | + | CAUUGCAUUCCUUUUCGAA | 19 | 13946 |
| BCL11A-11786 | + | UCAUUGCAUUCCUUUUCGAA | 20 | 13947 |
| BCL11A-11787 | + | AUCAUUGCAUUCCUUUUCGAA | 21 | 13948 |
| BCL11A-11788 | + | AAUCAUUGCAUUCCUUUUCGAA | 22 | 13949 |
| BCL11A-11789 | + | GAAUCAUUGCAUUCCUUUUCGAA | 23 | 13950 |
| BCL11A-11790 | + | GGAAUCAUUGCAUUCCUUUUCGAA | 24 | 13951 |
| BCL11A-11791 | + | AGAAAUAAAGCGGCGGAA | 18 | 13952 |
| BCL11A-11792 | + | GAGAAAUAAAGCGGCGGAA | 19 | 13953 |
| BCL11A-10031 | + | AGAGAAAUAAAGCGGCGGAA | 20 | 13954 |
| BCL11A-11793 | + | AAGAGAAAUAAAGCGGCGGAA | 21 | 13955 |
| BCL11A-11794 | + | AAAGAGAAAUAAAGCGGCGGAA | 22 | 13956 |
| BCL11A-11795 | + | AAAAGAGAAAUAAAGCGGCGGAA | 23 | 13957 |
| BCL11A-11796 | + | GAAAAGAGAAAUAAAGCGGCGGAA | 24 | 13958 |
| BCL11A-11797 | + | CCCGAGGAGAGGACAGCA | 18 | 13959 |
| BCL11A-11798 | + | GCCCGAGGAGAGGACAGCA | 19 | 13960 |
| BCL11A-11799 | + | UGCCCGAGGAGAGGACAGCA | 20 | 13961 |
| BCL11A-11800 | + | UUGCCCGAGGAGAGGACAGCA | 21 | 13962 |
| BCL11A-11801 | + | UUUGCCCGAGGAGAGGACAGCA | 22 | 13963 |
| BCL11A-11802 | + | CUUUGCCCGAGGAGAGGACAGCA | 23 | 13964 |
| BCL11A-11803 | + | ACUUUGCCCGAGGAGAGGACAGCA | 24 | 13965 |
| BCL11A-11804 | + | CCAAGUUACAGCUCCGCA | 18 | 13966 |
| BCL11A-11805 | + | UCCAAGUUACAGCUCCGCA | 19 | 13967 |
| BCL11A-11806 | + | CUCCAAGUUACAGCUCCGCA | 20 | 13968 |
| BCL11A-11807 | + | CCUCCAAGUUACAGCUCCGCA | 21 | 13969 |
| BCL11A-11808 | + | GCCUCCAAGUUACAGCUCCGCA | 22 | 13970 |
| BCL11A-11809 | + | AGCCUCCAAGUUACAGCUCCGCA | 23 | 13971 |
| BCL11A-11810 | + | GAGCCUCCAAGUUACAGCUCCGCA | 24 | 13972 |
| BCL11A-11811 | + | GAGCCGGCACAAAAGGCA | 18 | 13973 |
| BCL11A-11812 | + | GGAGCCGGCACAAAAGGCA | 19 | 13974 |
| BCL11A-11813 | + | AGGAGCCGGCACAAAAGGCA | 20 | 13975 |
| BCL11A-11814 | + | GAGGAGCCGGCACAAAAGGCA | 21 | 13976 |
| BCL11A-11815 | + | CGAGGAGCCGGCACAAAAGGCA | 22 | 13977 |
| BCL11A-11816 | + | GCGAGGAGCCGGCACAAAAGGCA | 23 | 13978 |
| BCL11A-11817 | + | CGCGAGGAGCCGGCACAAAAGGCA | 24 | 13979 |
| BCL11A-11818 | + | AAAUAGAGCGAGAGUGCA | 18 | 13980 |
| BCL11A-11819 | + | AAAAUAGAGCGAGAGUGCA | 19 | 13981 |
| BCL11A-11820 | + | AAAAAUAGAGCGAGAGUGCA | 20 | 13982 |
| BCL11A-11821 | + | AAAAAAUAGAGCGAGAGUGCA | 21 | 13983 |
| BCL11A-11822 | + | AAAAAAAUAGAGCGAGAGUGCA | 22 | 13984 |
| BCL11A-11823 | + | GAAAAAAAUAGAGCGAGAGUGCA | 23 | 13985 |
| BCL11A-11824 | + | AGAAAAAAAUAGAGCGAGAGUGCA | 24 | 13986 |
| BCL11A-11825 | + | CCGCGCGGCCUGGAAAGA | 18 | 13987 |
| BCL11A-11826 | + | CCCGCGCGGCCUGGAAAGA | 19 | 13988 |
| BCL11A-10040 | + | GCCCGCGCGGCCUGGAAAGA | 20 | 13989 |
| BCL11A-11827 | + | AGCCCGCGCGGCCUGGAAAGA | 21 | 13990 |
| BCL11A-11828 | + | GAGCCCGCGCGGCCUGGAAAGA | 22 | 13991 |
| BCL11A-11829 | + | GGAGCCCGCGCGGCCUGGAAAGA | 23 | 13992 |
| BCL11A-11830 | + | AGGAGCCCGCGCGGCCUGGAAAGA | 24 | 13993 |
| BCL11A-11831 | + | AAAAAAGAAAAAAAUAGA | 18 | 13994 |
| BCL11A-11832 | + | CAAAAAAGAAAAAAAUAGA | 19 | 13995 |
| BCL11A-11833 | + | UCAAAAAAGAAAAAAAUAGA | 20 | 13996 |
| BCL11A-11834 | + | UUCAAAAAAGAAAAAAAUAGA | 21 | 13997 |
| BCL11A-11835 | + | AUUCAAAAAAGAAAAAAAUAGA | 22 | 13998 |
| BCL11A-11836 | + | UAUUCAAAAAAGAAAAAAAUAGA | 23 | 13999 |
| BCL11A-11837 | + | UUAUUCAAAAAAGAAAAAAAUAGA | 24 | 14000 |
| BCL11A-11838 | + | CAGCUCCGCAGCGGGCGA | 18 | 14001 |
| BCL11A-11839 | + | ACAGCUCCGCAGCGGGCGA | 19 | 14002 |
| BCL11A-10044 | + | UACAGCUCCGCAGCGGGCGA | 20 | 14003 |
| BCL11A-11840 | + | UUACAGCUCCGCAGCGGGCGA | 21 | 14004 |
| BCL11A-11841 | + | GUUACAGCUCCGCAGCGGGCGA | 22 | 14005 |
| BCL11A-11842 | + | AGUUACAGCUCCGCAGCGGGCGA | 23 | 14006 |
| BCL11A-11843 | + | AAGUUACAGCUCCGCAGCGGGCGA | 24 | 14007 |
| BCL11A-11844 | + | GGAAACUUUGCCCGAGGA | 18 | 14008 |
| BCL11A-11845 | + | GGGAAACUUUGCCCGAGGA | 19 | 14009 |
| BCL11A-11846 | + | CGGGAAACUUUGCCCGAGGA | 20 | 14010 |
| BCL11A-11847 | + | UCGGGAAACUUUGCCCGAGGA | 21 | 14011 |
| BCL11A-11848 | + | CUCGGGAAACUUUGCCCGAGGA | 22 | 14012 |
| BCL11A-11849 | + | GCUCGGGAAACUUUGCCCGAGGA | 23 | 14013 |
| BCL11A-11850 | + | CGCUCGGGAAACUUUGCCCGAGGA | 24 | 14014 |
| BCL11A-11851 | + | AAGCGGCGGAAAGGAGGA | 18 | 14015 |
| BCL11A-11852 | + | AAAGCGGCGGAAAGGAGGA | 19 | 14016 |
| BCL11A-11853 | + | UAAAGCGGCGGAAAGGAGGA | 20 | 14017 |
| BCL11A-11854 | + | AUAAAGCGGCGGAAAGGAGGA | 21 | 14018 |
| BCL11A-11855 | + | AAUAAAGCGGCGGAAAGGAGGA | 22 | 14019 |
| BCL11A-11856 | + | AAAUAAAGCGGCGGAAAGGAGGA | 23 | 14020 |
| BCL11A-11857 | + | GAAAUAAAGCGGCGGAAAGGAGGA | 24 | 14021 |
| BCL11A-11858 | + | GAGAAAUAAAGCGGCGGA | 18 | 14022 |
| BCL11A-11859 | + | AGAGAAAUAAAGCGGCGGA | 19 | 14023 |
| BCL11A-11860 | + | AAGAGAAAUAAAGCGGCGGA | 20 | 14024 |
| BCL11A-11861 | + | AAAGAGAAAUAAAGCGGCGGA | 21 | 14025 |
| BCL11A-11862 | + | AAAAGAGAAAUAAAGCGGCGGA | 22 | 14026 |
| BCL11A-11863 | + | GAAAAGAGAAAUAAAGCGGCGGA | 23 | 14027 |
| BCL11A-11864 | + | CGAAAAGAGAAAUAAAGCGGCGGA | 24 | 14028 |
| BCL11A-11865 | + | UGGGGAAGCGCGGGCGGA | 18 | 14029 |
| BCL11A-11866 | + | CUGGGGAAGCGCGGGCGGA | 19 | 14030 |
| BCL11A-10048 | + | GCUGGGGAAGCGCGGGCGGA | 20 | 14031 |
| BCL11A-11867 | + | GGCUGGGGAAGCGCGGGCGGA | 21 | 14032 |
| BCL11A-11868 | + | GGGCUGGGGAAGCGCGGGCGGA | 22 | 14033 |
| BCL11A-11869 | + | CGGGCUGGGGAAGCGCGGGCGGA | 23 | 14034 |
| BCL11A-11870 | + | CCGGGCUGGGGAAGCGCGGGCGGA | 24 | 14035 |
| BCL11A-11871 | + | CCAAGGCCGAGCCAGGGA | 18 | 14036 |
| BCL11A-11872 | + | CCCAAGGCCGAGCCAGGGA | 19 | 14037 |
| BCL11A-11873 | + | CCCCAAGGCCGAGCCAGGGA | 20 | 14038 |
| BCL11A-11874 | + | CCCCCAAGGCCGAGCCAGGGA | 21 | 14039 |
| BCL11A-11875 | + | GCCCCCAAGGCCGAGCCAGGGA | 22 | 14040 |
| BCL11A-11876 | + | CGCCCCCAAGGCCGAGCCAGGGA | 23 | 14041 |
| BCL11A-11877 | + | GCGCCCCCAAGGCCGAGCCAGGGA | 24 | 14042 |
| BCL11A-11878 | + | CGGCCUGGAAAGAGGGGA | 18 | 14043 |
| BCL11A-11879 | + | GCGGCCUGGAAAGAGGGGA | 19 | 14044 |
| BCL11A-11880 | + | CGCGGCCUGGAAAGAGGGGA | 20 | 14045 |
| BCL11A-11881 | + | GCGCGGCCUGGAAAGAGGGGA | 21 | 14046 |
| BCL11A-11882 | + | CGCGCGGCCUGGAAAGAGGGGA | 22 | 14047 |
| BCL11A-11883 | + | CCGCGCGGCCUGGAAAGAGGGGA | 23 | 14048 |
| BCL11A-11884 | + | CCCGCGCGGCCUGGAAAGAGGGGA | 24 | 14049 |
| BCL11A-11885 | + | UGGCGGGGCGGGGGGGGA | 18 | 14050 |
| BCL11A-11886 | + | CUGGCGGGGCGGGGGGGGA | 19 | 14051 |
| BCL11A-11887 | + | ACUGGCGGGGCGGGGGGGGA | 20 | 14052 |
| BCL11A-11888 | + | AACUGGCGGGGCGGGGGGGGA | 21 | 14053 |
| BCL11A-11889 | + | AAACUGGCGGGGCGGGGGGGGA | 22 | 14054 |
| BCL11A-11890 | + | AAAACUGGCGGGGCGGGGGGGGA | 23 | 14055 |
| BCL11A-11891 | + | CAAAACUGGCGGGGCGGGGGGGGA | 24 | 14056 |
| BCL11A-11892 | + | GGGCGAGGGGAGGUGGGA | 18 | 14057 |
| BCL11A-11893 | + | CGGGCGAGGGGAGGUGGGA | 19 | 14058 |
| BCL11A-10052 | + | GCGGGCGAGGGGAGGUGGGA | 20 | 14059 |
| BCL11A-11894 | + | AGCGGGCGAGGGGAGGUGGGA | 21 | 14060 |
| BCL11A-11895 | + | CAGCGGGCGAGGGGAGGUGGGA | 22 | 14061 |
| BCL11A-11896 | + | GCAGCGGGCGAGGGGAGGUGGGA | 23 | 14062 |
| BCL11A-11897 | + | CGCAGCGGGCGAGGGGAGGUGGGA | 24 | 14063 |
| BCL11A-11898 | + | GAGCCCGCGCGGCCUGGA | 18 | 14064 |
| BCL11A-11899 | + | GGAGCCCGCGCGGCCUGGA | 19 | 14065 |
| BCL11A-11900 | + | AGGAGCCCGCGCGGCCUGGA | 20 | 14066 |
| BCL11A-11901 | + | CAGGAGCCCGCGCGGCCUGGA | 21 | 14067 |
| BCL11A-11902 | + | CCAGGAGCCCGCGCGGCCUGGA | 22 | 14068 |
| BCL11A-11903 | + | UCCAGGAGCCCGCGCGGCCUGGA | 23 | 14069 |
| BCL11A-11904 | + | CUCCAGGAGCCCGCGCGGCCUGGA | 24 | 14070 |
| BCL11A-11905 | + | CCCAUUUUCUUACGGUGA | 18 | 14071 |
| BCL11A-11906 | + | CCCCAUUUUCUUACGGUGA | 19 | 14072 |
| BCL11A-11907 | + | CCCCCAUUUUCUUACGGUGA | 20 | 14073 |
| BCL11A-11908 | + | CCCCCCAUUUUCUUACGGUGA | 21 | 14074 |
| BCL11A-11909 | + | CCCCCCCAUUUUCUUACGGUGA | 22 | 14075 |
| BCL11A-11910 | + | ACCCCCCCAUUUUCUUACGGUGA | 23 | 14076 |
| BCL11A-11911 | + | UACCCCCCCAUUUUCUUACGGUGA | 24 | 14077 |
| BCL11A-11912 | + | GAGGGAGCGCACGGCAAC | 18 | 14078 |
| BCL11A-11913 | + | GGAGGGAGCGCACGGCAAC | 19 | 14079 |
| BCL11A-11914 | + | GGGAGGGAGCGCACGGCAAC | 20 | 14080 |
| BCL11A-11915 | + | UGGGAGGGAGCGCACGGCAAC | 21 | 14081 |
| BCL11A-11916 | + | GUGGGAGGGAGCGCACGGCAAC | 22 | 14082 |
| BCL11A-11917 | + | GGUGGGAGGGAGCGCACGGCAAC | 23 | 14083 |
| BCL11A-11918 | + | AGGUGGGAGGGAGCGCACGGCAAC | 24 | 14084 |
| BCL11A-10612 | + | CUGCUCCCCCCCACACAC | 18 | 14085 |
| BCL11A-10613 | + | CCUGCUCCCCCCCACACAC | 19 | 14086 |
| BCL11A-10614 | + | CCCUGCUCCCCCCCACACAC | 20 | 14087 |
| BCL11A-10615 | + | GCCCUGCUCCCCCCCACACAC | 21 | 14088 |
| BCL11A-10616 | + | CGCCCUGCUCCCCCCCACACAC | 22 | 14089 |
| BCL11A-10617 | + | GCGCCCUGCUCCCCCCCACACAC | 23 | 14090 |
| BCL11A-10618 | + | UGCGCCCUGCUCCCCCCCACACAC | 24 | 14091 |
| BCL11A-11919 | + | AAUAGAGCGAGAGUGCAC | 18 | 14092 |
| BCL11A-11920 | + | AAAUAGAGCGAGAGUGCAC | 19 | 14093 |
| BCL11A-10059 | + | AAAAUAGAGCGAGAGUGCAC | 20 | 14094 |
| BCL11A-11921 | + | AAAAAUAGAGCGAGAGUGCAC | 21 | 14095 |
| BCL11A-11922 | + | AAAAAAUAGAGCGAGAGUGCAC | 22 | 14096 |
| BCL11A-11923 | + | AAAAAAAUAGAGCGAGAGUGCAC | 23 | 14097 |
| BCL11A-11924 | + | GAAAAAAAUAGAGCGAGAGUGCAC | 24 | 14098 |
| BCL11A-11925 | + | ACAGCAAAGAAAAAUCAC | 18 | 14099 |
| BCL11A-11926 | + | GACAGCAAAGAAAAAUCAC | 19 | 14100 |
| BCL11A-11927 | + | GGACAGCAAAGAAAAAUCAC | 20 | 14101 |
| BCL11A-11928 | + | AGGACAGCAAAGAAAAAUCAC | 21 | 14102 |
| BCL11A-11929 | + | GAGGACAGCAAAGAAAAAUCAC | 22 | 14103 |
| BCL11A-11930 | + | AGAGGACAGCAAAGAAAAAUCAC | 23 | 14104 |
| BCL11A-11931 | + | GAGAGGACAGCAAAGAAAAAUCAC | 24 | 14105 |
| BCL11A-11932 | + | CAAGGCCGAGCCAGGGAC | 18 | 14106 |
| BCL11A-11933 | + | CCAAGGCCGAGCCAGGGAC | 19 | 14107 |
| BCL11A-10063 | + | CCCAAGGCCGAGCCAGGGAC | 20 | 14108 |
| BCL11A-11934 | + | CCCCAAGGCCGAGCCAGGGAC | 21 | 14109 |
| BCL11A-11935 | + | CCCCCAAGGCCGAGCCAGGGAC | 22 | 14110 |
| BCL11A-11936 | + | GCCCCCAAGGCCGAGCCAGGGAC | 23 | 14111 |
| BCL11A-11937 | + | CGCCCCCAAGGCCGAGCCAGGGAC | 24 | 14112 |
| BCL11A-11938 | + | GGCCUGGAAAGAGGGGAC | 18 | 14113 |
| BCL11A-11939 | + | CGGCCUGGAAAGAGGGGAC | 19 | 14114 |
| BCL11A-10064 | + | GCGGCCUGGAAAGAGGGGAC | 20 | 14115 |
| BCL11A-11940 | + | CGCGGCCUGGAAAGAGGGGAC | 21 | 14116 |
| BCL11A-11941 | + | GCGCGGCCUGGAAAGAGGGGAC | 22 | 14117 |
| BCL11A-11942 | + | CGCGCGGCCUGGAAAGAGGGGAC | 23 | 14118 |
| BCL11A-11943 | + | CCGCGCGGCCUGGAAAGAGGGGAC | 24 | 14119 |
| BCL11A-11944 | + | AUAGAGCGAGAGUGCACC | 18 | 14120 |
| BCL11A-11945 | + | AAUAGAGCGAGAGUGCACC | 19 | 14121 |
| BCL11A-10067 | + | AAAUAGAGCGAGAGUGCACC | 20 | 14122 |
| BCL11A-11946 | + | AAAAUAGAGCGAGAGUGCACC | 21 | 14123 |
| BCL11A-11947 | + | AAAAAUAGAGCGAGAGUGCACC | 22 | 14124 |
| BCL11A-11948 | + | AAAAAAUAGAGCGAGAGUGCACC | 23 | 14125 |
| BCL11A-11949 | + | AAAAAAAUAGAGCGAGAGUGCACC | 24 | 14126 |
| BCL11A-11950 | + | AAGGCCGAGCCAGGGACC | 18 | 14127 |
| BCL11A-11951 | + | CAAGGCCGAGCCAGGGACC | 19 | 14128 |
| BCL11A-10068 | + | CCAAGGCCGAGCCAGGGACC | 20 | 14129 |
| BCL11A-11952 | + | CCCAAGGCCGAGCCAGGGACC | 21 | 14130 |
| BCL11A-11953 | + | CCCCAAGGCCGAGCCAGGGACC | 22 | 14131 |
| BCL11A-11954 | + | CCCCCAAGGCCGAGCCAGGGACC | 23 | 14132 |
| BCL11A-11955 | + | GCCCCCAAGGCCGAGCCAGGGACC | 24 | 14133 |
| BCL11A-11956 | + | GCCUGGAAAGAGGGGACC | 18 | 14134 |
| BCL11A-11957 | + | GGCCUGGAAAGAGGGGACC | 19 | 14135 |
| BCL11A-10069 | + | CGGCCUGGAAAGAGGGGACC | 20 | 14136 |
| BCL11A-11958 | + | GCGGCCUGGAAAGAGGGGACC | 21 | 14137 |
| BCL11A-11959 | + | CGCGGCCUGGAAAGAGGGGACC | 22 | 14138 |
| BCL11A-11960 | + | GCGCGGCCUGGAAAGAGGGGACC | 23 | 14139 |
| BCL11A-11961 | + | CGCGCGGCCUGGAAAGAGGGGACC | 24 | 14140 |
| BCL11A-11962 | + | CCCGCUGCACACUUGACC | 18 | 14141 |
| BCL11A-11963 | + | UCCCGCUGCACACUUGACC | 19 | 14142 |
| BCL11A-11964 | + | CUCCCGCUGCACACUUGACC | 20 | 14143 |
| BCL11A-11965 | + | CCUCCCGCUGCACACUUGACC | 21 | 14144 |
| BCL11A-11966 | + | UCCUCCCGCUGCACACUUGACC | 22 | 14145 |
| BCL11A-11967 | + | UUCCUCCCGCUGCACACUUGACC | 23 | 14146 |
| BCL11A-11968 | + | UUUCCUCCCGCUGCACACUUGACC | 24 | 14147 |
| BCL11A-11969 | + | CGGCGCAGGCCGGGGCCC | 18 | 14148 |
| BCL11A-11970 | + | GCGGCGCAGGCCGGGGCCC | 19 | 14149 |
| BCL11A-11971 | + | GGCGGCGCAGGCCGGGGCCC | 20 | 14150 |
| BCL11A-11972 | + | AGGCGGCGCAGGCCGGGGCCC | 21 | 14151 |
| BCL11A-11973 | + | CAGGCGGCGCAGGCCGGGGCCC | 22 | 14152 |
| BCL11A-11974 | + | GCAGGCGGCGCAGGCCGGGGCCC | 23 | 14153 |
| BCL11A-11975 | + | GGCAGGCGGCGCAGGCCGGGGCCC | 24 | 14154 |
| BCL11A-11976 | + | GCUCGGGAAACUUUGCCC | 18 | 14155 |
| BCL11A-11977 | + | CGCUCGGGAAACUUUGCCC | 19 | 14156 |
| BCL11A-11978 | + | GCGCUCGGGAAACUUUGCCC | 20 | 14157 |
| BCL11A-11979 | + | UGCGCUCGGGAAACUUUGCCC | 21 | 14158 |
| BCL11A-11980 | + | CUGCGCUCGGGAAACUUUGCCC | 22 | 14159 |
| BCL11A-11981 | + | GCUGCGCUCGGGAAACUUUGCCC | 23 | 14160 |
| BCL11A-11982 | + | GGCUGCGCUCGGGAAACUUUGCCC | 24 | 14161 |
| BCL11A-11983 | + | UCUCACCUCUUUUCUCCC | 18 | 14162 |
| BCL11A-11984 | + | GUCUCACCUCUUUUCUCCC | 19 | 14163 |
| BCL11A-10081 | + | AGUCUCACCUCUUUUCUCCC | 20 | 14164 |
| BCL11A-11985 | + | CAGUCUCACCUCUUUUCUCCC | 21 | 14165 |
| BCL11A-11986 | + | CCAGUCUCACCUCUUUUCUCCC | 22 | 14166 |
| BCL11A-11987 | + | GCCAGUCUCACCUCUUUUCUCCC | 23 | 14167 |
| BCL11A-11988 | + | AGCCAGUCUCACCUCUUUUCUCCC | 24 | 14168 |
| BCL11A-11989 | + | GGGGCCGAAGUAAAAGCC | 18 | 14169 |
| BCL11A-11990 | + | AGGGGCCGAAGUAAAAGCC | 19 | 14170 |
| BCL11A-11991 | + | CAGGGGCCGAAGUAAAAGCC | 20 | 14171 |
| BCL11A-11992 | + | CCAGGGGCCGAAGUAAAAGCC | 21 | 14172 |
| BCL11A-11993 | + | GCCAGGGGCCGAAGUAAAAGCC | 22 | 14173 |
| BCL11A-11994 | + | CGCCAGGGGCCGAAGUAAAAGCC | 23 | 14174 |
| BCL11A-11995 | + | ACGCCAGGGGCCGAAGUAAAAGCC | 24 | 14175 |
| BCL11A-11996 | + | CACCGGGAGGCUGCAGCC | 18 | 14176 |
| BCL11A-11997 | + | GCACCGGGAGGCUGCAGCC | 19 | 14177 |
| BCL11A-11998 | + | UGCACCGGGAGGCUGCAGCC | 20 | 14178 |
| BCL11A-11999 | + | GUGCACCGGGAGGCUGCAGCC | 21 | 14179 |
| BCL11A-12000 | + | AGUGCACCGGGAGGCUGCAGCC | 22 | 14180 |
| BCL11A-12001 | + | GAGUGCACCGGGAGGCUGCAGCC | 23 | 14181 |
| BCL11A-12002 | + | AGAGUGCACCGGGAGGCUGCAGCC | 24 | 14182 |
| BCL11A-12003 | + | CGCCCCCAAGGCCGAGCC | 18 | 14183 |
| BCL11A-12004 | + | GCGCCCCCAAGGCCGAGCC | 19 | 14184 |
| BCL11A-10085 | + | GGCGCCCCCAAGGCCGAGCC | 20 | 14185 |
| BCL11A-12005 | + | GGGCGCCCCCAAGGCCGAGCC | 21 | 14186 |
| BCL11A-12006 | + | AGGGCGCCCCCAAGGCCGAGCC | 22 | 14187 |
| BCL11A-12007 | + | GAGGGCGCCCCCAAGGCCGAGCC | 23 | 14188 |
| BCL11A-12008 | + | CGAGGGCGCCCCCAAGGCCGAGCC | 24 | 14189 |
| BCL11A-12009 | + | UCCCCGCGUGUGGACGCC | 18 | 14190 |
| BCL11A-12010 | + | CUCCCCGCGUGUGGACGCC | 19 | 14191 |
| BCL11A-10086 | + | GCUCCCCGCGUGUGGACGCC | 20 | 14192 |
| BCL11A-12011 | + | CGCUCCCCGCGUGUGGACGCC | 21 | 14193 |
| BCL11A-12012 | + | UCGCUCCCCGCGUGUGGACGCC | 22 | 14194 |
| BCL11A-12013 | + | CUCGCUCCCCGCGUGUGGACGCC | 23 | 14195 |
| BCL11A-12014 | + | GCUCGCUCCCCGCGUGUGGACGCC | 24 | 14196 |
| BCL11A-12015 | + | CGCGGACUCAGGAGCGCC | 18 | 14197 |
| BCL11A-12016 | + | CCGCGGACUCAGGAGCGCC | 19 | 14198 |
| BCL11A-10087 | + | UCCGCGGACUCAGGAGCGCC | 20 | 14199 |
| BCL11A-12017 | + | CUCCGCGGACUCAGGAGCGCC | 21 | 14200 |
| BCL11A-12018 | + | ACUCCGCGGACUCAGGAGCGCC | 22 | 14201 |
| BCL11A-12019 | + | GACUCCGCGGACUCAGGAGCGCC | 23 | 14202 |
| BCL11A-12020 | + | CGACUCCGCGGACUCAGGAGCGCC | 24 | 14203 |
| BCL11A-12021 | + | CCAGGAGCCCGCGCGGCC | 18 | 14204 |
| BCL11A-12022 | + | UCCAGGAGCCCGCGCGGCC | 19 | 14205 |
| BCL11A-10089 | + | CUCCAGGAGCCCGCGCGGCC | 20 | 14206 |
| BCL11A-12023 | + | UCUCCAGGAGCCCGCGCGGCC | 21 | 14207 |
| BCL11A-12024 | + | GUCUCCAGGAGCCCGCGCGGCC | 22 | 14208 |
| BCL11A-12025 | + | AGUCUCCAGGAGCCCGCGCGGCC | 23 | 14209 |
| BCL11A-12026 | + | AAGUCUCCAGGAGCCCGCGCGGCC | 24 | 14210 |
| BCL11A-12027 | + | GGCCCCUCUCCCGACUCC | 18 | 14211 |
| BCL11A-12028 | + | CGGCCCCUCUCCCGACUCC | 19 | 14212 |
| BCL11A-12029 | + | GCGGCCCCUCUCCCGACUCC | 20 | 14213 |
| BCL11A-12030 | + | CGCGGCCCCUCUCCCGACUCC | 21 | 14214 |
| BCL11A-12031 | + | CCGCGGCCCCUCUCCCGACUCC | 22 | 14215 |
| BCL11A-12032 | + | GCCGCGGCCCCUCUCCCGACUCC | 23 | 14216 |
| BCL11A-12033 | + | CGCCGCGGCCCCUCUCCCGACUCC | 24 | 14217 |
| BCL11A-12034 | + | GGCAGCGCCCAAGUCUCC | 18 | 14218 |
| BCL11A-12035 | + | GGGCAGCGCCCAAGUCUCC | 19 | 14219 |
| BCL11A-10093 | + | AGGGCAGCGCCCAAGUCUCC | 20 | 14220 |
| BCL11A-12036 | + | AAGGGCAGCGCCCAAGUCUCC | 21 | 14221 |
| BCL11A-12037 | + | GAAGGGCAGCGCCCAAGUCUCC | 22 | 14222 |
| BCL11A-12038 | + | GGAAGGGCAGCGCCCAAGUCUCC | 23 | 14223 |
| BCL11A-12039 | + | CGGAAGGGCAGCGCCCAAGUCUCC | 24 | 14224 |
| BCL11A-12040 | + | GUCUCACCUCUUUUCUCC | 18 | 14225 |
| BCL11A-12041 | + | AGUCUCACCUCUUUUCUCC | 19 | 14226 |
| BCL11A-12042 | + | CAGUCUCACCUCUUUUCUCC | 20 | 14227 |
| BCL11A-12043 | + | CCAGUCUCACCUCUUUUCUCC | 21 | 14228 |
| BCL11A-12044 | + | GCCAGUCUCACCUCUUUUCUCC | 22 | 14229 |
| BCL11A-12045 | + | AGCCAGUCUCACCUCUUUUCUCC | 23 | 14230 |
| BCL11A-12046 | + | AAGCCAGUCUCACCUCUUUUCUCC | 24 | 14231 |
| BCL11A-12047 | + | CGGCGCGGGAGGGCAAGC | 18 | 14232 |
| BCL11A-12048 | + | GCGGCGCGGGAGGGCAAGC | 19 | 14233 |
| BCL11A-12049 | + | GGCGGCGCGGGAGGGCAAGC | 20 | 14234 |
| BCL11A-12050 | + | GCCCCGGGCUGGGGAAGC | 18 | 14235 |
| BCL11A-12051 | + | AGCCCCGGGCUGGGGAAGC | 19 | 14236 |
| BCL11A-12052 | + | CAGCCCCGGGCUGGGGAAGC | 20 | 14237 |
| BCL11A-12053 | + | GCAGCCCCGGGCUGGGGAAGC | 21 | 14238 |
| BCL11A-12054 | + | UGCAGCCCCGGGCUGGGGAAGC | 22 | 14239 |
| BCL11A-12055 | + | CUGCAGCCCCGGGCUGGGGAAGC | 23 | 14240 |
| BCL11A-12056 | + | GCUGCAGCCCCGGGCUGGGGAAGC | 24 | 14241 |
| BCL11A-12057 | + | GCGCCCCCAAGGCCGAGC | 18 | 14242 |
| BCL11A-12058 | + | GGCGCCCCCAAGGCCGAGC | 19 | 14243 |
| BCL11A-12059 | + | GGGCGCCCCCAAGGCCGAGC | 20 | 14244 |
| BCL11A-12060 | + | AGGGCGCCCCCAAGGCCGAGC | 21 | 14245 |
| BCL11A-12061 | + | GAGGGCGCCCCCAAGGCCGAGC | 22 | 14246 |
| BCL11A-12062 | + | CGAGGGCGCCCCCAAGGCCGAGC | 23 | 14247 |
| BCL11A-12063 | + | CCGAGGGCGCCCCCAAGGCCGAGC | 24 | 14248 |
| BCL11A-12064 | + | CUCCCCGCGUGUGGACGC | 18 | 14249 |
| BCL11A-12065 | + | GCUCCCCGCGUGUGGACGC | 19 | 14250 |
| BCL11A-12066 | + | CGCUCCCCGCGUGUGGACGC | 20 | 14251 |
| BCL11A-12067 | + | UCGCUCCCCGCGUGUGGACGC | 21 | 14252 |
| BCL11A-12068 | + | CUCGCUCCCCGCGUGUGGACGC | 22 | 14253 |
| BCL11A-12069 | + | GCUCGCUCCCCGCGUGUGGACGC | 23 | 14254 |
| BCL11A-12070 | + | CGCUCGCUCCCCGCGUGUGGACGC | 24 | 14255 |
| BCL11A-12071 | + | GCGCGGGAGGGCAAGCGC | 18 | 14256 |
| BCL11A-12072 | + | GGCGCGGGAGGGCAAGCGC | 19 | 14257 |
| BCL11A-12073 | + | CGGCGCGGGAGGGCAAGCGC | 20 | 14258 |
| BCL11A-12074 | + | CCGCGGACUCAGGAGCGC | 18 | 14259 |
| BCL11A-12075 | + | UCCGCGGACUCAGGAGCGC | 19 | 14260 |
| BCL11A-10106 | + | CUCCGCGGACUCAGGAGCGC | 20 | 14261 |
| BCL11A-12076 | + | ACUCCGCGGACUCAGGAGCGC | 21 | 14262 |
| BCL11A-12077 | + | GACUCCGCGGACUCAGGAGCGC | 22 | 14263 |
| BCL11A-12078 | + | CGACUCCGCGGACUCAGGAGCGC | 23 | 14264 |
| BCL11A-12079 | + | CCGACUCCGCGGACUCAGGAGCGC | 24 | 14265 |
| BCL11A-12080 | + | CCGAGCCCGCGGCUGCGC | 18 | 14266 |
| BCL11A-12081 | + | CCCGAGCCCGCGGCUGCGC | 19 | 14267 |
| BCL11A-12082 | + | CCCCGAGCCCGCGGCUGCGC | 20 | 14268 |
| BCL11A-12083 | + | GCCCCGAGCCCGCGGCUGCGC | 21 | 14269 |
| BCL11A-12084 | + | AGCCCCGAGCCCGCGGCUGCGC | 22 | 14270 |
| BCL11A-12085 | + | AAGCCCCGAGCCCGCGGCUGCGC | 23 | 14271 |
| BCL11A-12086 | + | AAAGCCCCGAGCCCGCGGCUGCGC | 24 | 14272 |
| BCL11A-12087 | + | GAGGCAGGCGGCGCAGGC | 18 | 14273 |
| BCL11A-12088 | + | AGAGGCAGGCGGCGCAGGC | 19 | 14274 |
| BCL11A-10110 | + | GAGAGGCAGGCGGCGCAGGC | 20 | 14275 |
| BCL11A-12089 | + | GGAGAGGCAGGCGGCGCAGGC | 21 | 14276 |
| BCL11A-12090 | + | GGGAGAGGCAGGCGGCGCAGGC | 22 | 14277 |
| BCL11A-12091 | + | GGGGAGAGGCAGGCGGCGCAGGC | 23 | 14278 |
| BCL11A-12092 | + | CGGGGAGAGGCAGGCGGCGCAGGC | 24 | 14279 |
| BCL11A-12093 | + | UCCAGGAGCCCGCGCGGC | 18 | 14280 |
| BCL11A-12094 | + | CUCCAGGAGCCCGCGCGGC | 19 | 14281 |
| BCL11A-12095 | + | UCUCCAGGAGCCCGCGCGGC | 20 | 14282 |
| BCL11A-12096 | + | GUCUCCAGGAGCCCGCGCGGC | 21 | 14283 |
| BCL11A-12097 | + | AGUCUCCAGGAGCCCGCGCGGC | 22 | 14284 |
| BCL11A-12098 | + | AAGUCUCCAGGAGCCCGCGCGGC | 23 | 14285 |
| BCL11A-12099 | + | CAAGUCUCCAGGAGCCCGCGCGGC | 24 | 14286 |
| BCL11A-12100 | + | GAGGCUGCAGCCCCGGGC | 18 | 14287 |
| BCL11A-12101 | + | GGAGGCUGCAGCCCCGGGC | 19 | 14288 |
| BCL11A-10115 | + | GGGAGGCUGCAGCCCCGGGC | 20 | 14289 |
| BCL11A-12102 | + | CGGGAGGCUGCAGCCCCGGGC | 21 | 14290 |
| BCL11A-12103 | + | CCGGGAGGCUGCAGCCCCGGGC | 22 | 14291 |
| BCL11A-12104 | + | ACCGGGAGGCUGCAGCCCCGGGC | 23 | 14292 |
| BCL11A-12105 | + | CACCGGGAGGCUGCAGCCCCGGGC | 24 | 14293 |
| BCL11A-12106 | + | UACAGCUCCGCAGCGGGC | 18 | 14294 |
| BCL11A-12107 | + | UUACAGCUCCGCAGCGGGC | 19 | 14295 |
| BCL11A-12108 | + | GUUACAGCUCCGCAGCGGGC | 20 | 14296 |
| BCL11A-12109 | + | AGUUACAGCUCCGCAGCGGGC | 21 | 14297 |
| BCL11A-12110 | + | AAGUUACAGCUCCGCAGCGGGC | 22 | 14298 |
| BCL11A-12111 | + | CAAGUUACAGCUCCGCAGCGGGC | 23 | 14299 |
| BCL11A-12112 | + | CCAAGUUACAGCUCCGCAGCGGGC | 24 | 14300 |
| BCL11A-12113 | + | GGCGGCGCAGGCCGGGGC | 18 | 14301 |
| BCL11A-12114 | + | AGGCGGCGCAGGCCGGGGC | 19 | 14302 |
| BCL11A-12115 | + | CAGGCGGCGCAGGCCGGGGC | 20 | 14303 |
| BCL11A-12116 | + | GCAGGCGGCGCAGGCCGGGGC | 21 | 14304 |
| BCL11A-12117 | + | GGCAGGCGGCGCAGGCCGGGGC | 22 | 14305 |
| BCL11A-12118 | + | AGGCAGGCGGCGCAGGCCGGGGC | 23 | 14306 |
| BCL11A-12119 | + | GAGGCAGGCGGCGCAGGCCGGGGC | 24 | 14307 |
| BCL11A-12120 | + | UUGCAAAACUGGCGGGGC | 18 | 14308 |
| BCL11A-12121 | + | UUUGCAAAACUGGCGGGGC | 19 | 14309 |
| BCL11A-10116 | + | UUUUGCAAAACUGGCGGGGC | 20 | 14310 |
| BCL11A-12122 | + | AUUUUGCAAAACUGGCGGGGC | 21 | 14311 |
| BCL11A-12123 | + | UAUUUUGCAAAACUGGCGGGGC | 22 | 14312 |
| BCL11A-12124 | + | UUAUUUUGCAAAACUGGCGGGGC | 23 | 14313 |
| BCL11A-12125 | + | AUUAUUUUGCAAAACUGGCGGGGC | 24 | 14314 |
| BCL11A-12126 | + | CAAACACCCACCUCUGGC | 18 | 14315 |
| BCL11A-12127 | + | ACAAACACCCACCUCUGGC | 19 | 14316 |
| BCL11A-10118 | + | GACAAACACCCACCUCUGGC | 20 | 14317 |
| BCL11A-12128 | + | GGACAAACACCCACCUCUGGC | 21 | 14318 |
| BCL11A-12129 | + | GGGACAAACACCCACCUCUGGC | 22 | 14319 |
| BCL11A-12130 | + | CGGGACAAACACCCACCUCUGGC | 23 | 14320 |
| BCL11A-12131 | + | GCGGGACAAACACCCACCUCUGGC | 24 | 14321 |
| BCL11A-12132 | + | GCGCUCGGGAAACUUUGC | 18 | 14322 |
| BCL11A-12133 | + | UGCGCUCGGGAAACUUUGC | 19 | 14323 |
| BCL11A-12134 | + | CUGCGCUCGGGAAACUUUGC | 20 | 14324 |
| BCL11A-12135 | + | GCUGCGCUCGGGAAACUUUGC | 21 | 14325 |
| BCL11A-12136 | + | GGCUGCGCUCGGGAAACUUUGC | 22 | 14326 |
| BCL11A-12137 | + | CGGCUGCGCUCGGGAAACUUUGC | 23 | 14327 |
| BCL11A-12138 | + | GCGGCUGCGCUCGGGAAACUUUGC | 24 | 14328 |
| BCL11A-12139 | + | UCCCGACUCCGCGGACUC | 18 | 14329 |
| BCL11A-12140 | + | CUCCCGACUCCGCGGACUC | 19 | 14330 |
| BCL11A-10122 | + | UCUCCCGACUCCGCGGACUC | 20 | 14331 |
| BCL11A-12141 | + | CUCUCCCGACUCCGCGGACUC | 21 | 14332 |
| BCL11A-12142 | + | CCUCUCCCGACUCCGCGGACUC | 22 | 14333 |
| BCL11A-12143 | + | CCCUCUCCCGACUCCGCGGACUC | 23 | 14334 |
| BCL11A-12144 | + | CCCCUCUCCCGACUCCGCGGACUC | 24 | 14335 |
| BCL11A-12145 | + | GAGCCCGCGGCUGCGCUC | 18 | 14336 |
| BCL11A-12146 | + | CGAGCCCGCGGCUGCGCUC | 19 | 14337 |
| BCL11A-10126 | + | CCGAGCCCGCGGCUGCGCUC | 20 | 14338 |
| BCL11A-12147 | + | CCCGAGCCCGCGGCUGCGCUC | 21 | 14339 |
| BCL11A-12148 | + | CCCCGAGCCCGCGGCUGCGCUC | 22 | 14340 |
| BCL11A-12149 | + | GCCCCGAGCCCGCGGCUGCGCUC | 23 | 14341 |
| BCL11A-12150 | + | AGCCCCGAGCCCGCGGCUGCGCUC | 24 | 14342 |
| BCL11A-12151 | + | AGCCAGGUAGAGUUGCUC | 18 | 14343 |
| BCL11A-12152 | + | AAGCCAGGUAGAGUUGCUC | 19 | 14344 |
| BCL11A-12153 | + | GAAGCCAGGUAGAGUUGCUC | 20 | 14345 |
| BCL11A-12154 | + | GGAAGCCAGGUAGAGUUGCUC | 21 | 14346 |
| BCL11A-12155 | + | GGGAAGCCAGGUAGAGUUGCUC | 22 | 14347 |
| BCL11A-12156 | + | AGGGAAGCCAGGUAGAGUUGCUC | 23 | 14348 |
| BCL11A-12157 | + | GAGGGAAGCCAGGUAGAGUUGCUC | 24 | 14349 |
| BCL11A-12158 | + | GGGCAGCGCCCAAGUCUC | 18 | 14350 |
| BCL11A-12159 | + | AGGGCAGCGCCCAAGUCUC | 19 | 14351 |
| BCL11A-12160 | + | AAGGGCAGCGCCCAAGUCUC | 20 | 14352 |
| BCL11A-12161 | + | GAAGGGCAGCGCCCAAGUCUC | 21 | 14353 |
| BCL11A-12162 | + | GGAAGGGCAGCGCCCAAGUCUC | 22 | 14354 |
| BCL11A-12163 | + | CGGAAGGGCAGCGCCCAAGUCUC | 23 | 14355 |
| BCL11A-12164 | + | CCGGAAGGGCAGCGCCCAAGUCUC | 24 | 14356 |
| BCL11A-12165 | + | UUUGGAGGGCUGCGGGUC | 18 | 14357 |
| BCL11A-12166 | + | GUUUGGAGGGCUGCGGGUC | 19 | 14358 |
| BCL11A-10129 | + | AGUUUGGAGGGCUGCGGGUC | 20 | 14359 |
| BCL11A-12167 | + | AAGUUUGGAGGGCUGCGGGUC | 21 | 14360 |
| BCL11A-12168 | + | UAAGUUUGGAGGGCUGCGGGUC | 22 | 14361 |
| BCL11A-12169 | + | CUAAGUUUGGAGGGCUGCGGGUC | 23 | 14362 |
| BCL11A-12170 | + | CCUAAGUUUGGAGGGCUGCGGGUC | 24 | 14363 |
| BCL11A-12171 | + | CGGCGGAAAGGAGGAAAG | 18 | 14364 |
| BCL11A-12172 | + | GCGGCGGAAAGGAGGAAAG | 19 | 14365 |
| BCL11A-10136 | + | AGCGGCGGAAAGGAGGAAAG | 20 | 14366 |
| BCL11A-12173 | + | AAGCGGCGGAAAGGAGGAAAG | 21 | 14367 |
| BCL11A-12174 | + | AAAGCGGCGGAAAGGAGGAAAG | 22 | 14368 |
| BCL11A-12175 | + | UAAAGCGGCGGAAAGGAGGAAAG | 23 | 14369 |
| BCL11A-12176 | + | AUAAAGCGGCGGAAAGGAGGAAAG | 24 | 14370 |
| BCL11A-12177 | + | AAAUAAAGCGGCGGAAAG | 18 | 14371 |
| BCL11A-12178 | + | GAAAUAAAGCGGCGGAAAG | 19 | 14372 |
| BCL11A-12179 | + | AGAAAUAAAGCGGCGGAAAG | 20 | 14373 |
| BCL11A-12180 | + | GAGAAAUAAAGCGGCGGAAAG | 21 | 14374 |
| BCL11A-12181 | + | AGAGAAAUAAAGCGGCGGAAAG | 22 | 14375 |
| BCL11A-12182 | + | AAGAGAAAUAAAGCGGCGGAAAG | 23 | 14376 |
| BCL11A-12183 | + | AAAGAGAAAUAAAGCGGCGGAAAG | 24 | 14377 |
| BCL11A-12184 | + | CCCGCGCGGCCUGGAAAG | 18 | 14378 |
| BCL11A-12185 | + | GCCCGCGCGGCCUGGAAAG | 19 | 14379 |
| BCL11A-10137 | + | AGCCCGCGCGGCCUGGAAAG | 20 | 14380 |
| BCL11A-12186 | + | GAGCCCGCGCGGCCUGGAAAG | 21 | 14381 |
| BCL11A-12187 | + | GGAGCCCGCGCGGCCUGGAAAG | 22 | 14382 |
| BCL11A-12188 | + | AGGAGCCCGCGCGGCCUGGAAAG | 23 | 14383 |
| BCL11A-12189 | + | CAGGAGCCCGCGCGGCCUGGAAAG | 24 | 14384 |
| BCL11A-12190 | + | AAGAAAAAUCACCCGAAG | 18 | 14385 |
| BCL11A-12191 | + | AAAGAAAAAUCACCCGAAG | 19 | 14386 |
| BCL11A-12192 | + | CAAAGAAAAAUCACCCGAAG | 20 | 14387 |
| BCL11A-12193 | + | GCAAAGAAAAAUCACCCGAAG | 21 | 14388 |
| BCL11A-12194 | + | AGCAAAGAAAAAUCACCCGAAG | 22 | 14389 |
| BCL11A-12195 | + | CAGCAAAGAAAAAUCACCCGAAG | 23 | 14390 |
| BCL11A-12196 | + | ACAGCAAAGAAAAAUCACCCGAAG | 24 | 14391 |
| BCL11A-12197 | + | AGCCGGCACAAAAGGCAG | 18 | 14392 |
| BCL11A-12198 | + | GAGCCGGCACAAAAGGCAG | 19 | 14393 |
| BCL11A-10144 | + | GGAGCCGGCACAAAAGGCAG | 20 | 14394 |
| BCL11A-12199 | + | AGGAGCCGGCACAAAAGGCAG | 21 | 14395 |
| BCL11A-12200 | + | GAGGAGCCGGCACAAAAGGCAG | 22 | 14396 |
| BCL11A-12201 | + | CGAGGAGCCGGCACAAAAGGCAG | 23 | 14397 |
| BCL11A-12202 | + | GCGAGGAGCCGGCACAAAAGGCAG | 24 | 14398 |
| BCL11A-12203 | + | GCGGAAAGGAGGAAAGAG | 18 | 14399 |
| BCL11A-12204 | + | GGCGGAAAGGAGGAAAGAG | 19 | 14400 |
| BCL11A-12205 | + | CGGCGGAAAGGAGGAAAGAG | 20 | 14401 |
| BCL11A-12206 | + | GCGGCGGAAAGGAGGAAAGAG | 21 | 14402 |
| BCL11A-12207 | + | AGCGGCGGAAAGGAGGAAAGAG | 22 | 14403 |
| BCL11A-12208 | + | AAGCGGCGGAAAGGAGGAAAGAG | 23 | 14404 |
| BCL11A-12209 | + | AAAGCGGCGGAAAGGAGGAAAGAG | 24 | 14405 |
| BCL11A-12210 | + | AUCACCCGAAGUUGAGAG | 18 | 14406 |
| BCL11A-12211 | + | AAUCACCCGAAGUUGAGAG | 19 | 14407 |
| BCL11A-12212 | + | AAAUCACCCGAAGUUGAGAG | 20 | 14408 |
| BCL11A-12213 | + | AAAAUCACCCGAAGUUGAGAG | 21 | 14409 |
| BCL11A-12214 | + | AAAAAUCACCCGAAGUUGAGAG | 22 | 14410 |
| BCL11A-12215 | + | GAAAAAUCACCCGAAGUUGAGAG | 23 | 14411 |
| BCL11A-12216 | + | AGAAAAAUCACCCGAAGUUGAGAG | 24 | 14412 |
| BCL11A-12217 | + | CGGGAAACUUUGCCCGAG | 18 | 14413 |
| BCL11A-12218 | + | UCGGGAAACUUUGCCCGAG | 19 | 14414 |
| BCL11A-12219 | + | CUCGGGAAACUUUGCCCGAG | 20 | 14415 |
| BCL11A-12220 | + | GCUCGGGAAACUUUGCCCGAG | 21 | 14416 |
| BCL11A-12221 | + | CGCUCGGGAAACUUUGCCCGAG | 22 | 14417 |
| BCL11A-12222 | + | GCGCUCGGGAAACUUUGCCCGAG | 23 | 14418 |
| BCL11A-12223 | + | UGCGCUCGGGAAACUUUGCCCGAG | 24 | 14419 |
| BCL11A-12224 | + | AGCUCCGCAGCGGGCGAG | 18 | 14420 |
| BCL11A-12225 | + | CAGCUCCGCAGCGGGCGAG | 19 | 14421 |
| BCL11A-10148 | + | ACAGCUCCGCAGCGGGCGAG | 20 | 14422 |
| BCL11A-12226 | + | UACAGCUCCGCAGCGGGCGAG | 21 | 14423 |
| BCL11A-12227 | + | UUACAGCUCCGCAGCGGGCGAG | 22 | 14424 |
| BCL11A-12228 | + | GUUACAGCUCCGCAGCGGGCGAG | 23 | 14425 |
| BCL11A-12229 | + | AGUUACAGCUCCGCAGCGGGCGAG | 24 | 14426 |
| BCL11A-12230 | + | CGCAGCGGGCGAGGGGAG | 18 | 14427 |
| BCL11A-12231 | + | CCGCAGCGGGCGAGGGGAG | 19 | 14428 |
| BCL11A-12232 | + | UCCGCAGCGGGCGAGGGGAG | 20 | 14429 |
| BCL11A-12233 | + | CUCCGCAGCGGGCGAGGGGAG | 21 | 14430 |
| BCL11A-12234 | + | GCUCCGCAGCGGGCGAGGGGAG | 22 | 14431 |
| BCL11A-12235 | + | AGCUCCGCAGCGGGCGAGGGGAG | 23 | 14432 |
| BCL11A-12236 | + | CAGCUCCGCAGCGGGCGAGGGGAG | 24 | 14433 |
| BCL11A-12237 | + | CCAUUUUCUUACGGUGAG | 18 | 14434 |
| BCL11A-12238 | + | CCCAUUUUCUUACGGUGAG | 19 | 14435 |
| BCL11A-10154 | + | CCCCAUUUUCUUACGGUGAG | 20 | 14436 |
| BCL11A-12239 | + | CCCCCAUUUUCUUACGGUGAG | 21 | 14437 |
| BCL11A-12240 | + | CCCCCCAUUUUCUUACGGUGAG | 22 | 14438 |
| BCL11A-12241 | + | CCCCCCCAUUUUCUUACGGUGAG | 23 | 14439 |
| BCL11A-12242 | + | ACCCCCCCAUUUUCUUACGGUGAG | 24 | 14440 |
| BCL11A-12243 | + | CCUGGAAAGAGGGGACCG | 18 | 14441 |
| BCL11A-12244 | + | GCCUGGAAAGAGGGGACCG | 19 | 14442 |
| BCL11A-10159 | + | GGCCUGGAAAGAGGGGACCG | 20 | 14443 |
| BCL11A-12245 | + | CGGCCUGGAAAGAGGGGACCG | 21 | 14444 |
| BCL11A-12246 | + | GCGGCCUGGAAAGAGGGGACCG | 22 | 14445 |
| BCL11A-12247 | + | CGCGGCCUGGAAAGAGGGGACCG | 23 | 14446 |
| BCL11A-12248 | + | GCGCGGCCUGGAAAGAGGGGACCG | 24 | 14447 |
| BCL11A-12249 | + | CUCGGGAAACUUUGCCCG | 18 | 14448 |
| BCL11A-12250 | + | GCUCGGGAAACUUUGCCCG | 19 | 14449 |
| BCL11A-10163 | + | CGCUCGGGAAACUUUGCCCG | 20 | 14450 |
| BCL11A-12251 | + | GCGCUCGGGAAACUUUGCCCG | 21 | 14451 |
| BCL11A-12252 | + | UGCGCUCGGGAAACUUUGCCCG | 22 | 14452 |
| BCL11A-12253 | + | CUGCGCUCGGGAAACUUUGCCCG | 23 | 14453 |
| BCL11A-12254 | + | GCUGCGCUCGGGAAACUUUGCCCG | 24 | 14454 |
| BCL11A-12255 | + | GAAAAGAGAAAUAAAGCG | 18 | 14455 |
| BCL11A-12256 | + | CGAAAAGAGAAAUAAAGCG | 19 | 14456 |
| BCL11A-12257 | + | UCGAAAAGAGAAAUAAAGCG | 20 | 14457 |
| BCL11A-12258 | + | UUCGAAAAGAGAAAUAAAGCG | 21 | 14458 |
| BCL11A-12259 | + | UUUCGAAAAGAGAAAUAAAGCG | 22 | 14459 |
| BCL11A-12260 | + | UUUUCGAAAAGAGAAAUAAAGCG | 23 | 14460 |
| BCL11A-12261 | + | CUUUUCGAAAAGAGAAAUAAAGCG | 24 | 14461 |
| BCL11A-12262 | + | UCCGCGGACUCAGGAGCG | 18 | 14462 |
| BCL11A-12263 | + | CUCCGCGGACUCAGGAGCG | 19 | 14463 |
| BCL11A-12264 | + | ACUCCGCGGACUCAGGAGCG | 20 | 14464 |
| BCL11A-12265 | + | GACUCCGCGGACUCAGGAGCG | 21 | 14465 |
| BCL11A-12266 | + | CGACUCCGCGGACUCAGGAGCG | 22 | 14466 |
| BCL11A-12267 | + | CCGACUCCGCGGACUCAGGAGCG | 23 | 14467 |
| BCL11A-12268 | + | CCCGACUCCGCGGACUCAGGAGCG | 24 | 14468 |
| BCL11A-12269 | + | CGCGGGAGGGCAAGCGCG | 18 | 14469 |
| BCL11A-12270 | + | GCGCGGGAGGGCAAGCGCG | 19 | 14470 |
| BCL11A-10178 | + | GGCGCGGGAGGGCAAGCGCG | 20 | 14471 |
| BCL11A-12271 | + | ACAGCUCCGCAGCGGGCG | 18 | 14472 |
| BCL11A-12272 | + | UACAGCUCCGCAGCGGGCG | 19 | 14473 |
| BCL11A-10180 | + | UUACAGCUCCGCAGCGGGCG | 20 | 14474 |
| BCL11A-12273 | + | GUUACAGCUCCGCAGCGGGCG | 21 | 14475 |
| BCL11A-12274 | + | AGUUACAGCUCCGCAGCGGGCG | 22 | 14476 |
| BCL11A-12275 | + | AAGUUACAGCUCCGCAGCGGGCG | 23 | 14477 |
| BCL11A-12276 | + | CAAGUUACAGCUCCGCAGCGGGCG | 24 | 14478 |
| BCL11A-12277 | + | GCUGGGGAAGCGCGGGCG | 18 | 14479 |
| BCL11A-12278 | + | GGCUGGGGAAGCGCGGGCG | 19 | 14480 |
| BCL11A-12279 | + | GGGCUGGGGAAGCGCGGGCG | 20 | 14481 |
| BCL11A-12280 | + | CGGGCUGGGGAAGCGCGGGCG | 21 | 14482 |
| BCL11A-12281 | + | CCGGGCUGGGGAAGCGCGGGCG | 22 | 14483 |
| BCL11A-12282 | + | CCCGGGCUGGGGAAGCGCGGGCG | 23 | 14484 |
| BCL11A-12283 | + | CCCCGGGCUGGGGAAGCGCGGGCG | 24 | 14485 |
| BCL11A-12284 | + | UGCAAAACUGGCGGGGCG | 18 | 14486 |
| BCL11A-12285 | + | UUGCAAAACUGGCGGGGCG | 19 | 14487 |
| BCL11A-10181 | + | UUUGCAAAACUGGCGGGGCG | 20 | 14488 |
| BCL11A-12286 | + | UUUUGCAAAACUGGCGGGGCG | 21 | 14489 |
| BCL11A-12287 | + | AUUUUGCAAAACUGGCGGGGCG | 22 | 14490 |
| BCL11A-12288 | + | UAUUUUGCAAAACUGGCGGGGCG | 23 | 14491 |
| BCL11A-12289 | + | UUAUUUUGCAAAACUGGCGGGGCG | 24 | 14492 |
| BCL11A-12290 | + | AAUAAAGCGGCGGAAAGG | 18 | 14493 |
| BCL11A-12291 | + | AAAUAAAGCGGCGGAAAGG | 19 | 14494 |
| BCL11A-10185 | + | GAAAUAAAGCGGCGGAAAGG | 20 | 14495 |
| BCL11A-12292 | + | AGAAAUAAAGCGGCGGAAAGG | 21 | 14496 |
| BCL11A-12293 | + | GAGAAAUAAAGCGGCGGAAAGG | 22 | 14497 |
| BCL11A-12294 | + | AGAGAAAUAAAGCGGCGGAAAGG | 23 | 14498 |
| BCL11A-12295 | + | AAGAGAAAUAAAGCGGCGGAAAGG | 24 | 14499 |
| BCL11A-12296 | + | CCGAGGGCGCCCCCAAGG | 18 | 14500 |
| BCL11A-12297 | + | CCCGAGGGCGCCCCCAAGG | 19 | 14501 |
| BCL11A-12298 | + | GCCCGAGGGCGCCCCCAAGG | 20 | 14502 |
| BCL11A-12299 | + | GGCCCGAGGGCGCCCCCAAGG | 21 | 14503 |
| BCL11A-12300 | + | GGGCCCGAGGGCGCCCCCAAGG | 22 | 14504 |
| BCL11A-12301 | + | GGGGCCCGAGGGCGCCCCCAAGG | 23 | 14505 |
| BCL11A-12302 | + | CGGGGCCCGAGGGCGCCCCCAAGG | 24 | 14506 |
| BCL11A-12303 | + | AGAGGCAGGCGGCGCAGG | 18 | 14507 |
| BCL11A-12304 | + | GAGAGGCAGGCGGCGCAGG | 19 | 14508 |
| BCL11A-12305 | + | GGAGAGGCAGGCGGCGCAGG | 20 | 14509 |
| BCL11A-12306 | + | GGGAGAGGCAGGCGGCGCAGG | 21 | 14510 |
| BCL11A-12307 | + | GGGGAGAGGCAGGCGGCGCAGG | 22 | 14511 |
| BCL11A-12308 | + | CGGGGAGAGGCAGGCGGCGCAGG | 23 | 14512 |
| BCL11A-12309 | + | CCGGGGAGAGGCAGGCGGCGCAGG | 24 | 14513 |
| BCL11A-12310 | + | GCAGCGGGCGAGGGGAGG | 18 | 14514 |
| BCL11A-12311 | + | CGCAGCGGGCGAGGGGAGG | 19 | 14515 |
| BCL11A-10190 | + | CCGCAGCGGGCGAGGGGAGG | 20 | 14516 |
| BCL11A-12312 | + | UCCGCAGCGGGCGAGGGGAGG | 21 | 14517 |
| BCL11A-12313 | + | CUCCGCAGCGGGCGAGGGGAGG | 22 | 14518 |
| BCL11A-12314 | + | GCUCCGCAGCGGGCGAGGGGAGG | 23 | 14519 |
| BCL11A-12315 | + | AGCUCCGCAGCGGGCGAGGGGAGG | 24 | 14520 |
| BCL11A-12316 | + | GGAGGGCUGCGGGUCCGG | 18 | 14521 |
| BCL11A-12317 | + | UGGAGGGCUGCGGGUCCGG | 19 | 14522 |
| BCL11A-12318 | + | UUGGAGGGCUGCGGGUCCGG | 20 | 14523 |
| BCL11A-12319 | + | UUUGGAGGGCUGCGGGUCCGG | 21 | 14524 |
| BCL11A-12320 | + | GUUUGGAGGGCUGCGGGUCCGG | 22 | 14525 |
| BCL11A-12321 | + | AGUUUGGAGGGCUGCGGGUCCGG | 23 | 14526 |
| BCL11A-12322 | + | AAGUUUGGAGGGCUGCGGGUCCGG | 24 | 14527 |
| BCL11A-12323 | + | AAAAGAGAAAUAAAGCGG | 18 | 14528 |
| BCL11A-12324 | + | GAAAAGAGAAAUAAAGCGG | 19 | 14529 |
| BCL11A-10193 | + | CGAAAAGAGAAAUAAAGCGG | 20 | 14530 |
| BCL11A-12325 | + | UCGAAAAGAGAAAUAAAGCGG | 21 | 14531 |
| BCL11A-12326 | + | UUCGAAAAGAGAAAUAAAGCGG | 22 | 14532 |
| BCL11A-12327 | + | UUUCGAAAAGAGAAAUAAAGCGG | 23 | 14533 |
| BCL11A-12328 | + | UUUUCGAAAAGAGAAAUAAAGCGG | 24 | 14534 |
| BCL11A-12329 | + | GUUACAGCUCCGCAGCGG | 18 | 14535 |
| BCL11A-12330 | + | AGUUACAGCUCCGCAGCGG | 19 | 14536 |
| BCL11A-12331 | + | AAGUUACAGCUCCGCAGCGG | 20 | 14537 |
| BCL11A-12332 | + | CAAGUUACAGCUCCGCAGCGG | 21 | 14538 |
| BCL11A-12333 | + | CCAAGUUACAGCUCCGCAGCGG | 22 | 14539 |
| BCL11A-12334 | + | UCCAAGUUACAGCUCCGCAGCGG | 23 | 14540 |
| BCL11A-12335 | + | CUCCAAGUUACAGCUCCGCAGCGG | 24 | 14541 |
| BCL11A-12336 | + | CGGGCUGGGGAAGCGCGG | 18 | 14542 |
| BCL11A-12337 | + | CCGGGCUGGGGAAGCGCGG | 19 | 14543 |
| BCL11A-12338 | + | CCCGGGCUGGGGAAGCGCGG | 20 | 14544 |
| BCL11A-12339 | + | CCCCGGGCUGGGGAAGCGCGG | 21 | 14545 |
| BCL11A-12340 | + | GCCCCGGGCUGGGGAAGCGCGG | 22 | 14546 |
| BCL11A-12341 | + | AGCCCCGGGCUGGGGAAGCGCGG | 23 | 14547 |
| BCL11A-12342 | + | CAGCCCCGGGCUGGGGAAGCGCGG | 24 | 14548 |
| BCL11A-12343 | + | CUGGGGAAGCGCGGGCGG | 18 | 14549 |
| BCL11A-12344 | + | GCUGGGGAAGCGCGGGCGG | 19 | 14550 |
| BCL11A-10197 | + | GGCUGGGGAAGCGCGGGCGG | 20 | 14551 |
| BCL11A-12345 | + | GGGCUGGGGAAGCGCGGGCGG | 21 | 14552 |
| BCL11A-12346 | + | CGGGCUGGGGAAGCGCGGGCGG | 22 | 14553 |
| BCL11A-12347 | + | CCGGGCUGGGGAAGCGCGGGCGG | 23 | 14554 |
| BCL11A-12348 | + | CCCGGGCUGGGGAAGCGCGGGCGG | 24 | 14555 |
| BCL11A-12349 | + | GCAAAACUGGCGGGGCGG | 18 | 14556 |
| BCL11A-12350 | + | UGCAAAACUGGCGGGGCGG | 19 | 14557 |
| BCL11A-10198 | + | UUGCAAAACUGGCGGGGCGG | 20 | 14558 |
| BCL11A-12351 | + | UUUGCAAAACUGGCGGGGCGG | 21 | 14559 |
| BCL11A-12352 | + | UUUUGCAAAACUGGCGGGGCGG | 22 | 14560 |
| BCL11A-12353 | + | AUUUUGCAAAACUGGCGGGGCGG | 23 | 14561 |
| BCL11A-12354 | + | UAUUUUGCAAAACUGGCGGGGCGG | 24 | 14562 |
| BCL11A-12355 | + | UGGAAAGAGGGGACCGGG | 18 | 14563 |
| BCL11A-12356 | + | CUGGAAAGAGGGGACCGGG | 19 | 14564 |
| BCL11A-12357 | + | CCUGGAAAGAGGGGACCGGG | 20 | 14565 |
| BCL11A-12358 | + | GCCUGGAAAGAGGGGACCGGG | 21 | 14566 |
| BCL11A-12359 | + | GGCCUGGAAAGAGGGGACCGGG | 22 | 14567 |
| BCL11A-12360 | + | CGGCCUGGAAAGAGGGGACCGGG | 23 | 14568 |
| BCL11A-12361 | + | GCGGCCUGGAAAGAGGGGACCGGG | 24 | 14569 |
| BCL11A-12362 | + | GGAGGCUGCAGCCCCGGG | 18 | 14570 |
| BCL11A-12363 | + | GGGAGGCUGCAGCCCCGGG | 19 | 14571 |
| BCL11A-12364 | + | CGGGAGGCUGCAGCCCCGGG | 20 | 14572 |
| BCL11A-12365 | + | CCGGGAGGCUGCAGCCCCGGG | 21 | 14573 |
| BCL11A-12366 | + | ACCGGGAGGCUGCAGCCCCGGG | 22 | 14574 |
| BCL11A-12367 | + | CACCGGGAGGCUGCAGCCCCGGG | 23 | 14575 |
| BCL11A-12368 | + | GCACCGGGAGGCUGCAGCCCCGGG | 24 | 14576 |
| BCL11A-12369 | + | GGGCUGGGGAAGCGCGGG | 18 | 14577 |
| BCL11A-12370 | + | CGGGCUGGGGAAGCGCGGG | 19 | 14578 |
| BCL11A-10203 | + | CCGGGCUGGGGAAGCGCGGG | 20 | 14579 |
| BCL11A-12371 | + | CCCGGGCUGGGGAAGCGCGGG | 21 | 14580 |
| BCL11A-12372 | + | CCCCGGGCUGGGGAAGCGCGGG | 22 | 14581 |
| BCL11A-12373 | + | GCCCCGGGCUGGGGAAGCGCGGG | 23 | 14582 |
| BCL11A-12374 | + | AGCCCCGGGCUGGGGAAGCGCGGG | 24 | 14583 |
| BCL11A-12375 | + | CAAAACUGGCGGGGCGGG | 18 | 14584 |
| BCL11A-12376 | + | GCAAAACUGGCGGGGCGGG | 19 | 14585 |
| BCL11A-10204 | + | UGCAAAACUGGCGGGGCGGG | 20 | 14586 |
| BCL11A-12377 | + | UUGCAAAACUGGCGGGGCGGG | 21 | 14587 |
| BCL11A-12378 | + | UUUGCAAAACUGGCGGGGCGGG | 22 | 14588 |
| BCL11A-12379 | + | UUUUGCAAAACUGGCGGGGCGGG | 23 | 14589 |
| BCL11A-12380 | + | AUUUUGCAAAACUGGCGGGGCGGG | 24 | 14590 |
| BCL11A-12381 | + | UUUUGCAAAACUGGCGGG | 18 | 14591 |
| BCL11A-12382 | + | AUUUUGCAAAACUGGCGGG | 19 | 14592 |
| BCL11A-12383 | + | UAUUUUGCAAAACUGGCGGG | 20 | 14593 |
| BCL11A-12384 | + | UUAUUUUGCAAAACUGGCGGG | 21 | 14594 |
| BCL11A-12385 | + | AUUAUUUUGCAAAACUGGCGGG | 22 | 14595 |
| BCL11A-12386 | + | CAUUAUUUUGCAAAACUGGCGGG | 23 | 14596 |
| BCL11A-12387 | + | UCAUUAUUUUGCAAAACUGGCGGG | 24 | 14597 |
| BCL11A-12388 | + | GCGUGUGGACGCCAGGGG | 18 | 14598 |
| BCL11A-12389 | + | CGCGUGUGGACGCCAGGGG | 19 | 14599 |
| BCL11A-12390 | + | CCGCGUGUGGACGCCAGGGG | 20 | 14600 |
| BCL11A-12391 | + | CCCGCGUGUGGACGCCAGGGG | 21 | 14601 |
| BCL11A-12392 | + | CCCCGCGUGUGGACGCCAGGGG | 22 | 14602 |
| BCL11A-12393 | + | UCCCCGCGUGUGGACGCCAGGGG | 23 | 14603 |
| BCL11A-12394 | + | CUCCCCGCGUGUGGACGCCAGGGG | 24 | 14604 |
| BCL11A-12395 | + | AAAACUGGCGGGGCGGGG | 18 | 14605 |
| BCL11A-12396 | + | CAAAACUGGCGGGGCGGGG | 19 | 14606 |
| BCL11A-10207 | + | GCAAAACUGGCGGGGCGGGG | 20 | 14607 |
| BCL11A-12397 | + | UGCAAAACUGGCGGGGCGGGG | 21 | 14608 |
| BCL11A-12398 | + | UUGCAAAACUGGCGGGGCGGGG | 22 | 14609 |
| BCL11A-12399 | + | UUUGCAAAACUGGCGGGGCGGGG | 23 | 14610 |
| BCL11A-12400 | + | UUUUGCAAAACUGGCGGGGCGGGG | 24 | 14611 |
| BCL11A-12401 | + | UUUGCAAAACUGGCGGGG | 18 | 14612 |
| BCL11A-12402 | + | UUUUGCAAAACUGGCGGGG | 19 | 14613 |
| BCL11A-10208 | + | AUUUUGCAAAACUGGCGGGG | 20 | 14614 |
| BCL11A-12403 | + | UAUUUUGCAAAACUGGCGGGG | 21 | 14615 |
| BCL11A-12404 | + | UUAUUUUGCAAAACUGGCGGGG | 22 | 14616 |
| BCL11A-12405 | + | AUUAUUUUGCAAAACUGGCGGGG | 23 | 14617 |
| BCL11A-12406 | + | CAUUAUUUUGCAAAACUGGCGGGG | 24 | 14618 |
| BCL11A-12407 | + | CGGGCGAGGGGAGGUGGG | 18 | 14619 |
| BCL11A-12408 | + | GCGGGCGAGGGGAGGUGGG | 19 | 14620 |
| BCL11A-10213 | + | AGCGGGCGAGGGGAGGUGGG | 20 | 14621 |
| BCL11A-12409 | + | CAGCGGGCGAGGGGAGGUGGG | 21 | 14622 |
| BCL11A-12410 | + | GCAGCGGGCGAGGGGAGGUGGG | 22 | 14623 |
| BCL11A-12411 | + | CGCAGCGGGCGAGGGGAGGUGGG | 23 | 14624 |
| BCL11A-12412 | + | CCGCAGCGGGCGAGGGGAGGUGGG | 24 | 14625 |
| BCL11A-12413 | + | AUUAUUUUGCAAAACUGG | 18 | 14626 |
| BCL11A-12414 | + | CAUUAUUUUGCAAAACUGG | 19 | 14627 |
| BCL11A-10215 | + | UCAUUAUUUUGCAAAACUGG | 20 | 14628 |
| BCL11A-12415 | + | UUCAUUAUUUUGCAAAACUGG | 21 | 14629 |
| BCL11A-12416 | + | GUUCAUUAUUUUGCAAAACUGG | 22 | 14630 |
| BCL11A-12417 | + | UGUUCAUUAUUUUGCAAAACUGG | 23 | 14631 |
| BCL11A-12418 | + | UUGUUCAUUAUUUUGCAAAACUGG | 24 | 14632 |
| BCL11A-12419 | + | ACAAACACCCACCUCUGG | 18 | 14633 |
| BCL11A-12420 | + | GACAAACACCCACCUCUGG | 19 | 14634 |
| BCL11A-12421 | + | GGACAAACACCCACCUCUGG | 20 | 14635 |
| BCL11A-12422 | + | GGGACAAACACCCACCUCUGG | 21 | 14636 |
| BCL11A-12423 | + | CGGGACAAACACCCACCUCUGG | 22 | 14637 |
| BCL11A-12424 | + | GCGGGACAAACACCCACCUCUGG | 23 | 14638 |
| BCL11A-12425 | + | AGCGGGACAAACACCCACCUCUGG | 24 | 14639 |
| BCL11A-12426 | + | GCGGGCGAGGGGAGGUGG | 18 | 14640 |
| BCL11A-12427 | + | AGCGGGCGAGGGGAGGUGG | 19 | 14641 |
| BCL11A-12428 | + | CAGCGGGCGAGGGGAGGUGG | 20 | 14642 |
| BCL11A-12429 | + | GCAGCGGGCGAGGGGAGGUGG | 21 | 14643 |
| BCL11A-12430 | + | CGCAGCGGGCGAGGGGAGGUGG | 22 | 14644 |
| BCL11A-12431 | + | CCGCAGCGGGCGAGGGGAGGUGG | 23 | 14645 |
| BCL11A-12432 | + | UCCGCAGCGGGCGAGGGGAGGUGG | 24 | 14646 |
| BCL11A-12433 | + | CAUUAUUUUGCAAAACUG | 18 | 14647 |
| BCL11A-12434 | + | UCAUUAUUUUGCAAAACUG | 19 | 14648 |
| BCL11A-12435 | + | UUCAUUAUUUUGCAAAACUG | 20 | 14649 |
| BCL11A-12436 | + | GUUCAUUAUUUUGCAAAACUG | 21 | 14650 |
| BCL11A-12437 | + | UGUUCAUUAUUUUGCAAAACUG | 22 | 14651 |
| BCL11A-12438 | + | UUGUUCAUUAUUUUGCAAAACUG | 23 | 14652 |
| BCL11A-12439 | + | AUUGUUCAUUAUUUUGCAAAACUG | 24 | 14653 |
| BCL11A-12440 | + | GGCUGCAGCCCCGGGCUG | 18 | 14654 |
| BCL11A-12441 | + | AGGCUGCAGCCCCGGGCUG | 19 | 14655 |
| BCL11A-10226 | + | GAGGCUGCAGCCCCGGGCUG | 20 | 14656 |
| BCL11A-12442 | + | GGAGGCUGCAGCCCCGGGCUG | 21 | 14657 |
| BCL11A-12443 | + | GGGAGGCUGCAGCCCCGGGCUG | 22 | 14658 |
| BCL11A-12444 | + | CGGGAGGCUGCAGCCCCGGGCUG | 23 | 14659 |
| BCL11A-12445 | + | CCGGGAGGCUGCAGCCCCGGGCUG | 24 | 14660 |
| BCL11A-12446 | + | GCCACUUUCUCACUAUUG | 18 | 14661 |
| BCL11A-12447 | + | UGCCACUUUCUCACUAUUG | 19 | 14662 |
| BCL11A-10230 | + | GUGCCACUUUCUCACUAUUG | 20 | 14663 |
| BCL11A-12448 | + | AGUGCCACUUUCUCACUAUUG | 21 | 14664 |
| BCL11A-12449 | + | CAGUGCCACUUUCUCACUAUUG | 22 | 14665 |
| BCL11A-12450 | + | ACAGUGCCACUUUCUCACUAUUG | 23 | 14666 |
| BCL11A-12451 | + | CACAGUGCCACUUUCUCACUAUUG | 24 | 14667 |
| BCL11A-12452 | + | GAAUCCAGCCUAAGUUUG | 18 | 14668 |
| BCL11A-12453 | + | GGAAUCCAGCCUAAGUUUG | 19 | 14669 |
| BCL11A-12454 | + | CGGAAUCCAGCCUAAGUUUG | 20 | 14670 |
| BCL11A-12455 | + | GCGGAAUCCAGCCUAAGUUUG | 21 | 14671 |
| BCL11A-12456 | + | CGCGGAAUCCAGCCUAAGUUUG | 22 | 14672 |
| BCL11A-12457 | + | ACGCGGAAUCCAGCCUAAGUUUG | 23 | 14673 |
| BCL11A-12458 | + | AACGCGGAAUCCAGCCUAAGUUUG | 24 | 14674 |
| BCL11A-12459 | + | CUCCCGACUCCGCGGACU | 18 | 14675 |
| BCL11A-12460 | + | UCUCCCGACUCCGCGGACU | 19 | 14676 |
| BCL11A-12461 | + | CUCUCCCGACUCCGCGGACU | 20 | 14677 |
| BCL11A-12462 | + | CCUCUCCCGACUCCGCGGACU | 21 | 14678 |
| BCL11A-12463 | + | CCCUCUCCCGACUCCGCGGACU | 22 | 14679 |
| BCL11A-12464 | + | CCCCUCUCCCGACUCCGCGGACU | 23 | 14680 |
| BCL11A-12465 | + | GCCCCUCUCCCGACUCCGCGGACU | 24 | 14681 |
| BCL11A-12466 | + | CGAGCCCGCGGCUGCGCU | 18 | 14682 |
| BCL11A-12467 | + | CCGAGCCCGCGGCUGCGCU | 19 | 14683 |
| BCL11A-10239 | + | CCCGAGCCCGCGGCUGCGCU | 20 | 14684 |
| BCL11A-12468 | + | CCCCGAGCCCGCGGCUGCGCU | 21 | 14685 |
| BCL11A-12469 | + | GCCCCGAGCCCGCGGCUGCGCU | 22 | 14686 |
| BCL11A-12470 | + | AGCCCCGAGCCCGCGGCUGCGCU | 23 | 14687 |
| BCL11A-12471 | + | AAGCCCCGAGCCCGCGGCUGCGCU | 24 | 14688 |
| BCL11A-12472 | + | AGGCUGCAGCCCCGGGCU | 18 | 14689 |
| BCL11A-12473 | + | GAGGCUGCAGCCCCGGGCU | 19 | 14690 |
| BCL11A-10240 | + | GGAGGCUGCAGCCCCGGGCU | 20 | 14691 |
| BCL11A-12474 | + | GGGAGGCUGCAGCCCCGGGCU | 21 | 14692 |
| BCL11A-12475 | + | CGGGAGGCUGCAGCCCCGGGCU | 22 | 14693 |
| BCL11A-12476 | + | CCGGGAGGCUGCAGCCCCGGGCU | 23 | 14694 |
| BCL11A-12477 | + | ACCGGGAGGCUGCAGCCCCGGGCU | 24 | 14695 |
| BCL11A-12478 | + | GCGGAAUCCAGCCUAAGU | 18 | 14696 |
| BCL11A-12479 | + | CGCGGAAUCCAGCCUAAGU | 19 | 14697 |
| BCL11A-12480 | + | ACGCGGAAUCCAGCCUAAGU | 20 | 14698 |
| BCL11A-12481 | + | AACGCGGAAUCCAGCCUAAGU | 21 | 14699 |
| BCL11A-12482 | + | CAACGCGGAAUCCAGCCUAAGU | 22 | 14700 |
| BCL11A-12483 | + | GCAACGCGGAAUCCAGCCUAAGU | 23 | 14701 |
| BCL11A-12484 | + | GGCAACGCGGAAUCCAGCCUAAGU | 24 | 14702 |
| BCL11A-12485 | + | CAUUUUCUUACGGUGAGU | 18 | 14703 |
| BCL11A-12486 | + | CCAUUUUCUUACGGUGAGU | 19 | 14704 |
| BCL11A-10244 | + | CCCAUUUUCUUACGGUGAGU | 20 | 14705 |
| BCL11A-12487 | + | CCCCAUUUUCUUACGGUGAGU | 21 | 14706 |
| BCL11A-12488 | + | CCCCCAUUUUCUUACGGUGAGU | 22 | 14707 |
| BCL11A-12489 | + | CCCCCCAUUUUCUUACGGUGAGU | 23 | 14708 |
| BCL11A-12490 | + | CCCCCCCAUUUUCUUACGGUGAGU | 24 | 14709 |
| BCL11A-12491 | + | CGCGCUCGCUCCCCGCGU | 18 | 14710 |
| BCL11A-12492 | + | CCGCGCUCGCUCCCCGCGU | 19 | 14711 |
| BCL11A-12493 | + | GCCGCGCUCGCUCCCCGCGU | 20 | 14712 |
| BCL11A-12494 | + | CGCCGCGCUCGCUCCCCGCGU | 21 | 14713 |
| BCL11A-12495 | + | CCGCCGCGCUCGCUCCCCGCGU | 22 | 14714 |
| BCL11A-12496 | + | GCCGCCGCGCUCGCUCCCCGCGU | 23 | 14715 |
| BCL11A-12497 | + | CGCCGCCGCGCUCGCUCCCCGCGU | 24 | 14716 |
| BCL11A-12498 | + | CAGCGGGCGAGGGGAGGU | 18 | 14717 |
| BCL11A-12499 | + | GCAGCGGGCGAGGGGAGGU | 19 | 14718 |
| BCL11A-10247 | + | CGCAGCGGGCGAGGGGAGGU | 20 | 14719 |
| BCL11A-12500 | + | CCGCAGCGGGCGAGGGGAGGU | 21 | 14720 |
| BCL11A-12501 | + | UCCGCAGCGGGCGAGGGGAGGU | 22 | 14721 |
| BCL11A-12502 | + | CUCCGCAGCGGGCGAGGGGAGGU | 23 | 14722 |
| BCL11A-12503 | + | GCUCCGCAGCGGGCGAGGGGAGGU | 24 | 14723 |
| BCL11A-12504 | + | GUUUGGAGGGCUGCGGGU | 18 | 14724 |
| BCL11A-12505 | + | AGUUUGGAGGGCUGCGGGU | 19 | 14725 |
| BCL11A-12506 | + | AAGUUUGGAGGGCUGCGGGU | 20 | 14726 |
| BCL11A-12507 | + | UAAGUUUGGAGGGCUGCGGGU | 21 | 14727 |
| BCL11A-12508 | + | CUAAGUUUGGAGGGCUGCGGGU | 22 | 14728 |
| BCL11A-12509 | + | CCUAAGUUUGGAGGGCUGCGGGU | 23 | 14729 |
| BCL11A-12510 | + | GCCUAAGUUUGGAGGGCUGCGGGU | 24 | 14730 |
| BCL11A-12511 | + | UGCCACUUUCUCACUAUU | 18 | 14731 |
| BCL11A-12512 | + | GUGCCACUUUCUCACUAUU | 19 | 14732 |
| BCL11A-12513 | + | AGUGCCACUUUCUCACUAUU | 20 | 14733 |
| BCL11A-12514 | + | CAGUGCCACUUUCUCACUAUU | 21 | 14734 |
| BCL11A-12515 | + | ACAGUGCCACUUUCUCACUAUU | 22 | 14735 |
| BCL11A-12516 | + | CACAGUGCCACUUUCUCACUAUU | 23 | 14736 |
| BCL11A-12517 | + | CCACAGUGCCACUUUCUCACUAUU | 24 | 14737 |
| BCL11A-12518 | + | GAAAAAUCACCCGAAGUU | 18 | 14738 |
| BCL11A-12519 | + | AGAAAAAUCACCCGAAGUU | 19 | 14739 |
| BCL11A-12520 | + | AAGAAAAAUCACCCGAAGUU | 20 | 14740 |
| BCL11A-12521 | + | AAAGAAAAAUCACCCGAAGUU | 21 | 14741 |
| BCL11A-12522 | + | CAAAGAAAAAUCACCCGAAGUU | 22 | 14742 |
| BCL11A-12523 | + | GCAAAGAAAAAUCACCCGAAGUU | 23 | 14743 |
| BCL11A-12524 | + | AGCAAAGAAAAAUCACCCGAAGUU | 24 | 14744 |
| BCL11A-12525 | + | CGGAAUCCAGCCUAAGUU | 18 | 14745 |
| BCL11A-12526 | + | GCGGAAUCCAGCCUAAGUU | 19 | 14746 |
| BCL11A-10257 | + | CGCGGAAUCCAGCCUAAGUU | 20 | 14747 |
| BCL11A-12527 | + | ACGCGGAAUCCAGCCUAAGUU | 21 | 14748 |
| BCL11A-12528 | + | AACGCGGAAUCCAGCCUAAGUU | 22 | 14749 |
| BCL11A-12529 | + | CAACGCGGAAUCCAGCCUAAGUU | 23 | 14750 |
| BCL11A-12530 | + | GCAACGCGGAAUCCAGCCUAAGUU | 24 | 14751 |
| BCL11A-12531 | + | GAAUCAUUGCAUUCCUUU | 18 | 14752 |
| BCL11A-12532 | + | GGAAUCAUUGCAUUCCUUU | 19 | 14753 |
| BCL11A-12533 | + | UGGAAUCAUUGCAUUCCUUU | 20 | 14754 |
| BCL11A-12534 | + | GUGGAAUCAUUGCAUUCCUUU | 21 | 14755 |
| BCL11A-12535 | + | AGUGGAAUCAUUGCAUUCCUUU | 22 | 14756 |
| BCL11A-12536 | + | GAGUGGAAUCAUUGCAUUCCUUU | 23 | 14757 |
| BCL11A-12537 | + | GGAGUGGAAUCAUUGCAUUCCUUU | 24 | 14758 |
| BCL11A-12538 | − | CCACUCACCGUAAGAAAA | 18 | 14759 |
| BCL11A-12539 | − | CCCACUCACCGUAAGAAAA | 19 | 14760 |
| BCL11A-10024 | − | UCCCACUCACCGUAAGAAAA | 20 | 14761 |
| BCL11A-12540 | − | UUCCCACUCACCGUAAGAAAA | 21 | 14762 |
| BCL11A-12541 | − | CUUCCCACUCACCGUAAGAAAA | 22 | 14763 |
| BCL11A-12542 | − | GCUUCCCACUCACCGUAAGAAAA | 23 | 14764 |
| BCL11A-12543 | − | UGCUUCCCACUCACCGUAAGAAAA | 24 | 14765 |
| BCL11A-12544 | − | CCCACUCACCGUAAGAAA | 18 | 14766 |
| BCL11A-12545 | − | UCCCACUCACCGUAAGAAA | 19 | 14767 |
| BCL11A-12546 | − | UUCCCACUCACCGUAAGAAA | 20 | 14768 |
| BCL11A-12547 | − | CUUCCCACUCACCGUAAGAAA | 21 | 14769 |
| BCL11A-12548 | − | GCUUCCCACUCACCGUAAGAAA | 22 | 14770 |
| BCL11A-12549 | − | UGCUUCCCACUCACCGUAAGAAA | 23 | 14771 |
| BCL11A-12550 | − | UUGCUUCCCACUCACCGUAAGAAA | 24 | 14772 |
| BCL11A-12551 | − | UGGGAGCUGGUGGGGAAA | 18 | 14773 |
| BCL11A-12552 | − | GUGGGAGCUGGUGGGGAAA | 19 | 14774 |
| BCL11A-10028 | − | GGUGGGAGCUGGUGGGGAAA | 20 | 14775 |
| BCL11A-12553 | − | GGGUGGGAGCUGGUGGGGAAA | 21 | 14776 |
| BCL11A-12554 | − | GGGGUGGGAGCUGGUGGGGAAA | 22 | 14777 |
| BCL11A-12555 | − | GGGGGUGGGAGCUGGUGGGGAAA | 23 | 14778 |
| BCL11A-12556 | − | UGGGGGUGGGAGCUGGUGGGGAAA | 24 | 14779 |
| BCL11A-12557 | − | AACGAUUCCCGGGGAGAA | 18 | 14780 |
| BCL11A-12558 | − | AAACGAUUCCCGGGGAGAA | 19 | 14781 |
| BCL11A-12559 | − | AAAACGAUUCCCGGGGAGAA | 20 | 14782 |
| BCL11A-12560 | − | AAAAACGAUUCCCGGGGAGAA | 21 | 14783 |
| BCL11A-12561 | − | AAAAAACGAUUCCCGGGGAGAA | 22 | 14784 |
| BCL11A-12562 | − | UAAAAAACGAUUCCCGGGGAGAA | 23 | 14785 |
| BCL11A-12563 | − | CUAAAAAACGAUUCCCGGGGAGAA | 24 | 14786 |
| BCL11A-12564 | − | UUUAUUUCUCUUUUCGAA | 18 | 14787 |
| BCL11A-12565 | − | CUUUAUUUCUCUUUUCGAA | 19 | 14788 |
| BCL11A-12566 | − | GCUUUAUUUCUCUUUUCGAA | 20 | 14789 |
| BCL11A-12567 | − | CGCUUUAUUUCUCUUUUCGAA | 21 | 14790 |
| BCL11A-12568 | − | CCGCUUUAUUUCUCUUUUCGAA | 22 | 14791 |
| BCL11A-12569 | − | GCCGCUUUAUUUCUCUUUUCGAA | 23 | 14792 |
| BCL11A-12570 | − | CGCCGCUUUAUUUCUCUUUUCGAA | 24 | 14793 |
| BCL11A-12571 | − | GUGGGAGCUGGUGGGGAA | 18 | 14794 |
| BCL11A-12572 | − | GGUGGGAGCUGGUGGGGAA | 19 | 14795 |
| BCL11A-10032 | − | GGGUGGGAGCUGGUGGGGAA | 20 | 14796 |
| BCL11A-12573 | − | GGGGUGGGAGCUGGUGGGGAA | 21 | 14797 |
| BCL11A-12574 | − | GGGGGUGGGAGCUGGUGGGGAA | 22 | 14798 |
| BCL11A-12575 | − | UGGGGGUGGGAGCUGGUGGGGAA | 23 | 14799 |
| BCL11A-12576 | − | CUGGGGGUGGGAGCUGGUGGGGAA | 24 | 14800 |
| BCL11A-12577 | − | GAAAGUGGCACUGUGGAA | 18 | 14801 |
| BCL11A-12578 | − | AGAAAGUGGCACUGUGGAA | 19 | 14802 |
| BCL11A-10033 | − | GAGAAAGUGGCACUGUGGAA | 20 | 14803 |
| BCL11A-12579 | − | UGAGAAAGUGGCACUGUGGAA | 21 | 14804 |
| BCL11A-12580 | − | GUGAGAAAGUGGCACUGUGGAA | 22 | 14805 |
| BCL11A-12581 | − | AGUGAGAAAGUGGCACUGUGGAA | 23 | 14806 |
| BCL11A-12582 | − | UAGUGAGAAAGUGGCACUGUGGAA | 24 | 14807 |
| BCL11A-12583 | − | CUCACGGUCAAGUGUGCA | 18 | 14808 |
| BCL11A-12584 | − | GCUCACGGUCAAGUGUGCA | 19 | 14809 |
| BCL11A-12585 | − | CGCUCACGGUCAAGUGUGCA | 20 | 14810 |
| BCL11A-12586 | − | GCGCUCACGGUCAAGUGUGCA | 21 | 14811 |
| BCL11A-12587 | − | CGCGCUCACGGUCAAGUGUGCA | 22 | 14812 |
| BCL11A-12588 | − | GCGCGCUCACGGUCAAGUGUGCA | 23 | 14813 |
| BCL11A-12589 | − | AGCGCGCUCACGGUCAAGUGUGCA | 24 | 14814 |
| BCL11A-12590 | − | GGAGAGGGGCCGCGGCGA | 18 | 14815 |
| BCL11A-12591 | − | GGGAGAGGGGCCGCGGCGA | 19 | 14816 |
| BCL11A-10043 | − | CGGGAGAGGGGCCGCGGCGA | 20 | 14817 |
| BCL11A-12592 | − | UCGGGAGAGGGGCCGCGGCGA | 21 | 14818 |
| BCL11A-12593 | − | GUCGGGAGAGGGGCCGCGGCGA | 22 | 14819 |
| BCL11A-12594 | − | AGUCGGGAGAGGGGCCGCGGCGA | 23 | 14820 |
| BCL11A-12595 | − | GAGUCGGGAGAGGGGCCGCGGCGA | 24 | 14821 |
| BCL11A-12596 | − | CCGUGGGACCGGGAAGGA | 18 | 14822 |
| BCL11A-12597 | − | GCCGUGGGACCGGGAAGGA | 19 | 14823 |
| BCL11A-10045 | − | AGCCGUGGGACCGGGAAGGA | 20 | 14824 |
| BCL11A-12598 | − | GAGCCGUGGGACCGGGAAGGA | 21 | 14825 |
| BCL11A-12599 | − | AGAGCCGUGGGACCGGGAAGGA | 22 | 14826 |
| BCL11A-12600 | − | GAGAGCCGUGGGACCGGGAAGGA | 23 | 14827 |
| BCL11A-12601 | − | GGAGAGCCGUGGGACCGGGAAGGA | 24 | 14828 |
| BCL11A-12602 | − | GAGUCCGCGGAGUCGGGA | 18 | 14829 |
| BCL11A-12603 | − | UGAGUCCGCGGAGUCGGGA | 19 | 14830 |
| BCL11A-12604 | − | CUGAGUCCGCGGAGUCGGGA | 20 | 14831 |
| BCL11A-12605 | − | CCUGAGUCCGCGGAGUCGGGA | 21 | 14832 |
| BCL11A-12606 | − | UCCUGAGUCCGCGGAGUCGGGA | 22 | 14833 |
| BCL11A-12607 | − | CUCCUGAGUCCGCGGAGUCGGGA | 23 | 14834 |
| BCL11A-12608 | − | GCUCCUGAGUCCGCGGAGUCGGGA | 24 | 14835 |
| BCL11A-12609 | − | GGCGUCCACACGCGGGGA | 18 | 14836 |
| BCL11A-12610 | − | UGGCGUCCACACGCGGGGA | 19 | 14837 |
| BCL11A-12611 | − | CUGGCGUCCACACGCGGGGA | 20 | 14838 |
| BCL11A-12612 | − | CCUGGCGUCCACACGCGGGGA | 21 | 14839 |
| BCL11A-12613 | − | CCCUGGCGUCCACACGCGGGGA | 22 | 14840 |
| BCL11A-12614 | − | CCCCUGGCGUCCACACGCGGGGA | 23 | 14841 |
| BCL11A-12615 | − | GCCCCUGGCGUCCACACGCGGGGA | 24 | 14842 |
| BCL11A-12616 | − | GCGCGGCGGCGGCGGGGA | 18 | 14843 |
| BCL11A-12617 | − | AGCGCGGCGGCGGCGGGGA | 19 | 14844 |
| BCL11A-10051 | − | GAGCGCGGCGGCGGCGGGGA | 20 | 14845 |
| BCL11A-12618 | − | CGAGCGCGGCGGCGGCGGGGA | 21 | 14846 |
| BCL11A-12619 | − | GCGAGCGCGGCGGCGGCGGGGA | 22 | 14847 |
| BCL11A-12620 | − | AGCGAGCGCGGCGGCGGCGGGGA | 23 | 14848 |
| BCL11A-12621 | − | GAGCGAGCGCGGCGGCGGCGGGGA | 24 | 14849 |
| BCL11A-12622 | − | GGUGGGAGCUGGUGGGGA | 18 | 14850 |
| BCL11A-12623 | − | GGGUGGGAGCUGGUGGGGA | 19 | 14851 |
| BCL11A-12624 | − | GGGGUGGGAGCUGGUGGGGA | 20 | 14852 |
| BCL11A-12625 | − | GGGGGUGGGAGCUGGUGGGGA | 21 | 14853 |
| BCL11A-12626 | − | UGGGGGUGGGAGCUGGUGGGGA | 22 | 14854 |
| BCL11A-12627 | − | CUGGGGGUGGGAGCUGGUGGGGA | 23 | 14855 |
| BCL11A-12628 | − | CCUGGGGGUGGGAGCUGGUGGGGA | 24 | 14856 |
| BCL11A-12629 | − | ACGGGGAGAGCCGUGGGA | 18 | 14857 |
| BCL11A-12630 | − | GACGGGGAGAGCCGUGGGA | 19 | 14858 |
| BCL11A-12631 | − | CGACGGGGAGAGCCGUGGGA | 20 | 14859 |
| BCL11A-12632 | − | GCGACGGGGAGAGCCGUGGGA | 21 | 14860 |
| BCL11A-12633 | − | GGCGACGGGGAGAGCCGUGGGA | 22 | 14861 |
| BCL11A-12634 | − | CGGCGACGGGGAGAGCCGUGGGA | 23 | 14862 |
| BCL11A-12635 | − | GCGGCGACGGGGAGAGCCGUGGGA | 24 | 14863 |
| BCL11A-12636 | − | AGAAAGUGGCACUGUGGA | 18 | 14864 |
| BCL11A-12637 | − | GAGAAAGUGGCACUGUGGA | 19 | 14865 |
| BCL11A-12638 | − | UGAGAAAGUGGCACUGUGGA | 20 | 14866 |
| BCL11A-12639 | − | GUGAGAAAGUGGCACUGUGGA | 21 | 14867 |
| BCL11A-12640 | − | AGUGAGAAAGUGGCACUGUGGA | 22 | 14868 |
| BCL11A-12641 | − | UAGUGAGAAAGUGGCACUGUGGA | 23 | 14869 |
| BCL11A-12642 | − | AUAGUGAGAAAGUGGCACUGUGGA | 24 | 14870 |
| BCL11A-12643 | − | CGCCAGUUUUGCAAAAUA | 18 | 14871 |
| BCL11A-12644 | − | CCGCCAGUUUUGCAAAAUA | 19 | 14872 |
| BCL11A-12645 | − | CCCGCCAGUUUUGCAAAAUA | 20 | 14873 |
| BCL11A-12646 | − | CCCCGCCAGUUUUGCAAAAUA | 21 | 14874 |
| BCL11A-12647 | − | GCCCCGCCAGUUUUGCAAAAUA | 22 | 14875 |
| BCL11A-12648 | − | CGCCCCGCCAGUUUUGCAAAAUA | 23 | 14876 |
| BCL11A-12649 | − | CCGCCCCGCCAGUUUUGCAAAAUA | 24 | 14877 |
| BCL11A-12650 | − | GUAGUCAUCCCCACAAUA | 18 | 14878 |
| BCL11A-12651 | − | AGUAGUCAUCCCCACAAUA | 19 | 14879 |
| BCL11A-12652 | − | AAGUAGUCAUCCCCACAAUA | 20 | 14880 |
| BCL11A-12653 | − | AAAGUAGUCAUCCCCACAAUA | 21 | 14881 |
| BCL11A-12654 | − | GAAAGUAGUCAUCCCCACAAUA | 22 | 14882 |
| BCL11A-12655 | − | GGAAAGUAGUCAUCCCCACAAUA | 23 | 14883 |
| BCL11A-12656 | − | AGGAAAGUAGUCAUCCCCACAAUA | 24 | 14884 |
| BCL11A-12657 | − | GGGAAGUGGGUGUGCGUA | 18 | 14885 |
| BCL11A-12658 | − | GGGGAAGUGGGUGUGCGUA | 19 | 14886 |
| BCL11A-10055 | − | AGGGGAAGUGGGUGUGCGUA | 20 | 14887 |
| BCL11A-12659 | − | GAGGGGAAGUGGGUGUGCGUA | 21 | 14888 |
| BCL11A-12660 | − | GGAGGGGAAGUGGGUGUGCGUA | 22 | 14889 |
| BCL11A-12661 | − | GGGAGGGGAAGUGGGUGUGCGUA | 23 | 14890 |
| BCL11A-12662 | − | GGGGAGGGGAAGUGGGUGUGCGUA | 24 | 14891 |
| BCL11A-12663 | − | UAAGAAAAUGGGGGGGUA | 18 | 14892 |
| BCL11A-12664 | − | GUAAGAAAAUGGGGGGGUA | 19 | 14893 |
| BCL11A-10056 | − | CGUAAGAAAAUGGGGGGGUA | 20 | 14894 |
| BCL11A-12665 | − | CCGUAAGAAAAUGGGGGGGUA | 21 | 14895 |
| BCL11A-12666 | − | ACCGUAAGAAAAUGGGGGGGUA | 22 | 14896 |
| BCL11A-12667 | − | CACCGUAAGAAAAUGGGGGGGUA | 23 | 14897 |
| BCL11A-12668 | − | UCACCGUAAGAAAAUGGGGGGGUA | 24 | 14898 |
| BCL11A-12669 | − | AACAACUCACAUGCAAAC | 18 | 14899 |
| BCL11A-12670 | − | GAACAACUCACAUGCAAAC | 19 | 14900 |
| BCL11A-12671 | − | CGAACAACUCACAUGCAAAC | 20 | 14901 |
| BCL11A-12672 | − | GCGAACAACUCACAUGCAAAC | 21 | 14902 |
| BCL11A-12673 | − | UGCGAACAACUCACAUGCAAAC | 22 | 14903 |
| BCL11A-12674 | − | UUGCGAACAACUCACAUGCAAAC | 23 | 14904 |
| BCL11A-12675 | − | GUUGCGAACAACUCACAUGCAAAC | 24 | 14905 |
| BCL11A-12676 | − | CCGCUGCGGAGCUGUAAC | 18 | 14906 |
| BCL11A-12677 | − | CCCGCUGCGGAGCUGUAAC | 19 | 14907 |
| BCL11A-12678 | − | GCCCGCUGCGGAGCUGUAAC | 20 | 14908 |
| BCL11A-12679 | − | CGCCCGCUGCGGAGCUGUAAC | 21 | 14909 |
| BCL11A-12680 | − | UCGCCCGCUGCGGAGCUGUAAC | 22 | 14910 |
| BCL11A-12681 | − | CUCGCCCGCUGCGGAGCUGUAAC | 23 | 14911 |
| BCL11A-12682 | − | CCUCGCCCGCUGCGGAGCUGUAAC | 24 | 14912 |
| BCL11A-12683 | − | GGCCCCUGGCGUCCACAC | 18 | 14913 |
| BCL11A-12684 | − | CGGCCCCUGGCGUCCACAC | 19 | 14914 |
| BCL11A-12685 | − | UCGGCCCCUGGCGUCCACAC | 20 | 14915 |
| BCL11A-12686 | − | UUCGGCCCCUGGCGUCCACAC | 21 | 14916 |
| BCL11A-12687 | − | CUUCGGCCCCUGGCGUCCACAC | 22 | 14917 |
| BCL11A-12688 | − | ACUUCGGCCCCUGGCGUCCACAC | 23 | 14918 |
| BCL11A-12689 | − | UACUUCGGCCCCUGGCGUCCACAC | 24 | 14919 |
| BCL11A-12690 | − | GCGCGGGCUCCUGGAGAC | 18 | 14920 |
| BCL11A-12691 | − | CGCGCGGGCUCCUGGAGAC | 19 | 14921 |
| BCL11A-12692 | − | CCGCGCGGGCUCCUGGAGAC | 20 | 14922 |
| BCL11A-12693 | − | GCCGCGCGGGCUCCUGGAGAC | 21 | 14923 |
| BCL11A-12694 | − | GGCCGCGCGGGCUCCUGGAGAC | 22 | 14924 |
| BCL11A-12695 | − | AGGCCGCGCGGGCUCCUGGAGAC | 23 | 14925 |
| BCL11A-12696 | − | CAGGCCGCGCGGGCUCCUGGAGAC | 24 | 14926 |
| BCL11A-12697 | − | GAGAGGGGCCGCGGCGAC | 18 | 14927 |
| BCL11A-12698 | − | GGAGAGGGGCCGCGGCGAC | 19 | 14928 |
| BCL11A-10061 | − | GGGAGAGGGGCCGCGGCGAC | 20 | 14929 |
| BCL11A-12699 | − | CGGGAGAGGGGCCGCGGCGAC | 21 | 14930 |
| BCL11A-12700 | − | UCGGGAGAGGGGCCGCGGCGAC | 22 | 14931 |
| BCL11A-12701 | − | GUCGGGAGAGGGGCCGCGGCGAC | 23 | 14932 |
| BCL11A-12702 | − | AGUCGGGAGAGGGGCCGCGGCGAC | 24 | 14933 |
| BCL11A-12703 | − | CGUGGGACCGGGAAGGAC | 18 | 14934 |
| BCL11A-12704 | − | CCGUGGGACCGGGAAGGAC | 19 | 14935 |
| BCL11A-10062 | − | GCCGUGGGACCGGGAAGGAC | 20 | 14936 |
| BCL11A-12705 | − | AGCCGUGGGACCGGGAAGGAC | 21 | 14937 |
| BCL11A-12706 | − | GAGCCGUGGGACCGGGAAGGAC | 22 | 14938 |
| BCL11A-12707 | − | AGAGCCGUGGGACCGGGAAGGAC | 23 | 14939 |
| BCL11A-12708 | − | GAGAGCCGUGGGACCGGGAAGGAC | 24 | 14940 |
| BCL11A-12709 | − | CGGGGAGAGCCGUGGGAC | 18 | 14941 |
| BCL11A-12710 | − | ACGGGGAGAGCCGUGGGAC | 19 | 14942 |
| BCL11A-10065 | − | GACGGGGAGAGCCGUGGGAC | 20 | 14943 |
| BCL11A-12711 | − | CGACGGGGAGAGCCGUGGGAC | 21 | 14944 |
| BCL11A-12712 | − | GCGACGGGGAGAGCCGUGGGAC | 22 | 14945 |
| BCL11A-12713 | − | GGCGACGGGGAGAGCCGUGGGAC | 23 | 14946 |
| BCL11A-12714 | − | CGGCGACGGGGAGAGCCGUGGGAC | 24 | 14947 |
| BCL11A-12715 | − | ACAACUCACAUGCAAACC | 18 | 14948 |
| BCL11A-12716 | − | AACAACUCACAUGCAAACC | 19 | 14949 |
| BCL11A-10066 | − | GAACAACUCACAUGCAAACC | 20 | 14950 |
| BCL11A-12717 | − | CGAACAACUCACAUGCAAACC | 21 | 14951 |
| BCL11A-12718 | − | GCGAACAACUCACAUGCAAACC | 22 | 14952 |
| BCL11A-12719 | − | UGCGAACAACUCACAUGCAAACC | 23 | 14953 |
| BCL11A-12720 | − | UUGCGAACAACUCACAUGCAAACC | 24 | 14954 |
| BCL11A-12721 | − | GGGGAGAGCCGUGGGACC | 18 | 14955 |
| BCL11A-12722 | − | CGGGGAGAGCCGUGGGACC | 19 | 14956 |
| BCL11A-10070 | − | ACGGGGAGAGCCGUGGGACC | 20 | 14957 |
| BCL11A-12723 | − | GACGGGGAGAGCCGUGGGACC | 21 | 14958 |
| BCL11A-12724 | − | CGACGGGGAGAGCCGUGGGACC | 22 | 14959 |
| BCL11A-12725 | − | GCGACGGGGAGAGCCGUGGGACC | 23 | 14960 |
| BCL11A-12726 | − | GGCGACGGGGAGAGCCGUGGGACC | 24 | 14961 |
| BCL11A-12727 | − | UCGGCCUUGGGGGCGCCC | 18 | 14962 |
| BCL11A-12728 | − | CUCGGCCUUGGGGGCGCCC | 19 | 14963 |
| BCL11A-12729 | − | GCUCGGCCUUGGGGGCGCCC | 20 | 14964 |
| BCL11A-12730 | − | GGCUCGGCCUUGGGGGCGCCC | 21 | 14965 |
| BCL11A-12731 | − | UGGCUCGGCCUUGGGGGCGCCC | 22 | 14966 |
| BCL11A-12732 | − | CUGGCUCGGCCUUGGGGGCGCCC | 23 | 14967 |
| BCL11A-12733 | − | CCUGGCUCGGCCUUGGGGGCGCCC | 24 | 14968 |
| BCL11A-12734 | − | GUCUAAAAAACGAUUCCC | 18 | 14969 |
| BCL11A-12735 | − | AGUCUAAAAAACGAUUCCC | 19 | 14970 |
| BCL11A-10082 | − | AAGUCUAAAAAACGAUUCCC | 20 | 14971 |
| BCL11A-12736 | − | CAAGUCUAAAAAACGAUUCCC | 21 | 14972 |
| BCL11A-12737 | − | ACAAGUCUAAAAAACGAUUCCC | 22 | 14973 |
| BCL11A-12738 | − | UACAAGUCUAAAAAACGAUUCCC | 23 | 14974 |
| BCL11A-12739 | − | GUACAAGUCUAAAAAACGAUUCCC | 24 | 14975 |
| BCL11A-12740 | − | GCCCGCGCUUCCCCAGCC | 18 | 14976 |
| BCL11A-12741 | − | CGCCCGCGCUUCCCCAGCC | 19 | 14977 |
| BCL11A-10084 | − | CCGCCCGCGCUUCCCCAGCC | 20 | 14978 |
| BCL11A-12742 | − | UCCGCCCGCGCUUCCCCAGCC | 21 | 14979 |
| BCL11A-12743 | − | CUCCGCCCGCGCUUCCCCAGCC | 22 | 14980 |
| BCL11A-12744 | − | CCUCCGCCCGCGCUUCCCCAGCC | 23 | 14981 |
| BCL11A-12745 | − | CCCUCCGCCCGCGCUUCCCCAGCC | 24 | 14982 |
| BCL11A-12746 | − | AGUUUCCCGAGCGCAGCC | 18 | 14983 |
| BCL11A-12747 | − | AAGUUUCCCGAGCGCAGCC | 19 | 14984 |
| BCL11A-12748 | − | AAAGUUUCCCGAGCGCAGCC | 20 | 14985 |
| BCL11A-12749 | − | CAAAGUUUCCCGAGCGCAGCC | 21 | 14986 |
| BCL11A-12750 | − | GCAAAGUUUCCCGAGCGCAGCC | 22 | 14987 |
| BCL11A-12751 | − | GGCAAAGUUUCCCGAGCGCAGCC | 23 | 14988 |
| BCL11A-12752 | − | GGGCAAAGUUUCCCGAGCGCAGCC | 24 | 14989 |
| BCL11A-12753 | − | GCGGCGACGGGGAGAGCC | 18 | 14990 |
| BCL11A-12754 | − | CGCGGCGACGGGGAGAGCC | 19 | 14991 |
| BCL11A-12755 | − | CCGCGGCGACGGGGAGAGCC | 20 | 14992 |
| BCL11A-12756 | − | GCCGCGGCGACGGGGAGAGCC | 21 | 14993 |
| BCL11A-12757 | − | GGCCGCGGCGACGGGGAGAGCC | 22 | 14994 |
| BCL11A-12758 | − | GGGCCGCGGCGACGGGGAGAGCC | 23 | 14995 |
| BCL11A-12759 | − | GGGGCCGCGGCGACGGGGAGAGCC | 24 | 14996 |
| BCL11A-12760 | − | CCGGUCCCUGGCUCGGCC | 18 | 14997 |
| BCL11A-12761 | − | CCCGGUCCCUGGCUCGGCC | 19 | 14998 |
| BCL11A-12762 | − | UCCCGGUCCCUGGCUCGGCC | 20 | 14999 |
| BCL11A-12763 | − | CCAGGCCGCGCGGGCUCC | 18 | 15000 |
| BCL11A-12764 | − | UCCAGGCCGCGCGGGCUCC | 19 | 15001 |
| BCL11A-10091 | − | UUCCAGGCCGCGCGGGCUCC | 20 | 15002 |
| BCL11A-12765 | − | UUUCCAGGCCGCGCGGGCUCC | 21 | 15003 |
| BCL11A-12766 | − | CUUUCCAGGCCGCGCGGGCUCC | 22 | 15004 |
| BCL11A-12767 | − | UCUUUCCAGGCCGCGCGGGCUCC | 23 | 15005 |
| BCL11A-12768 | − | CUCUUUCCAGGCCGCGCGGGCUCC | 24 | 15006 |
| BCL11A-12769 | − | UUCUUUGCUGUCCUCUCC | 18 | 15007 |
| BCL11A-12770 | − | UUUCUUUGCUGUCCUCUCC | 19 | 15008 |
| BCL11A-12771 | − | UUUUCUUUGCUGUCCUCUCC | 20 | 15009 |
| BCL11A-12772 | − | UUUUUCUUUGCUGUCCUCUCC | 21 | 15010 |
| BCL11A-12773 | − | AUUUUUCUUUGCUGUCCUCUCC | 22 | 15011 |
| BCL11A-12774 | − | GAUUUUUCUUUGCUGUCCUCUCC | 23 | 15012 |
| BCL11A-12775 | − | UGAUUUUUCUUUGCUGUCCUCUCC | 24 | 15013 |
| BCL11A-12776 | − | CCCGGCGCUCCUGAGUCC | 18 | 15014 |
| BCL11A-12777 | − | CCCCGGCGCUCCUGAGUCC | 19 | 15015 |
| BCL11A-12778 | − | CCCCCGGCGCUCCUGAGUCC | 20 | 15016 |
| BCL11A-12779 | − | GCCCCCGGCGCUCCUGAGUCC | 21 | 15017 |
| BCL11A-12780 | − | GGCCCCCGGCGCUCCUGAGUCC | 22 | 15018 |
| BCL11A-12781 | − | GGGCCCCCGGCGCUCCUGAGUCC | 23 | 15019 |
| BCL11A-12782 | − | GGGGCCCCCGGCGCUCCUGAGUCC | 24 | 15020 |
| BCL11A-12783 | − | GUACGGAGGAGGGUGUCC | 18 | 15021 |
| BCL11A-12784 | − | CGUACGGAGGAGGGUGUCC | 19 | 15022 |
| BCL11A-10094 | − | GCGUACGGAGGAGGGUGUCC | 20 | 15023 |
| BCL11A-12785 | − | UGCGUACGGAGGAGGGUGUCC | 21 | 15024 |
| BCL11A-12786 | − | GUGCGUACGGAGGAGGGUGUCC | 22 | 15025 |
| BCL11A-12787 | − | UGUGCGUACGGAGGAGGGUGUCC | 23 | 15026 |
| BCL11A-12788 | − | GUGUGCGUACGGAGGAGGGUGUCC | 24 | 15027 |
| BCL11A-12789 | − | AGUCUAAAAAACGAUUCC | 18 | 15028 |
| BCL11A-12790 | − | AAGUCUAAAAAACGAUUCC | 19 | 15029 |
| BCL11A-10095 | − | CAAGUCUAAAAAACGAUUCC | 20 | 15030 |
| BCL11A-12791 | − | ACAAGUCUAAAAAACGAUUCC | 21 | 15031 |
| BCL11A-12792 | − | UACAAGUCUAAAAAACGAUUCC | 22 | 15032 |
| BCL11A-12793 | − | GUACAAGUCUAAAAAACGAUUCC | 23 | 15033 |
| BCL11A-12794 | − | AGUACAAGUCUAAAAAACGAUUCC | 24 | 15034 |
| BCL11A-12795 | − | CGCCCGCGCUUCCCCAGC | 18 | 15035 |
| BCL11A-12796 | − | CCGCCCGCGCUUCCCCAGC | 19 | 15036 |
| BCL11A-12797 | − | UCCGCCCGCGCUUCCCCAGC | 20 | 15037 |
| BCL11A-12798 | − | CUCCGCCCGCGCUUCCCCAGC | 21 | 15038 |
| BCL11A-12799 | − | CCUCCGCCCGCGCUUCCCCAGC | 22 | 15039 |
| BCL11A-12800 | − | CCCUCCGCCCGCGCUUCCCCAGC | 23 | 15040 |
| BCL11A-12801 | − | UCCCUCCGCCCGCGCUUCCCCAGC | 24 | 15041 |
| BCL11A-12802 | − | CACGGUCAAGUGUGCAGC | 18 | 15042 |
| BCL11A-12803 | − | UCACGGUCAAGUGUGCAGC | 19 | 15043 |
| BCL11A-10100 | − | CUCACGGUCAAGUGUGCAGC | 20 | 15044 |
| BCL11A-12804 | − | GCUCACGGUCAAGUGUGCAGC | 21 | 15045 |
| BCL11A-12805 | − | CGCUCACGGUCAAGUGUGCAGC | 22 | 15046 |
| BCL11A-12806 | − | GCGCUCACGGUCAAGUGUGCAGC | 23 | 15047 |
| BCL11A-12807 | − | CGCGCUCACGGUCAAGUGUGCAGC | 24 | 15048 |
| BCL11A-12808 | − | CCCCUGGCGUCCACACGC | 18 | 15049 |
| BCL11A-12809 | − | GCCCCUGGCGUCCACACGC | 19 | 15050 |
| BCL11A-10103 | − | GGCCCCUGGCGUCCACACGC | 20 | 15051 |
| BCL11A-12810 | − | CGGCCCCUGGCGUCCACACGC | 21 | 15052 |
| BCL11A-12811 | − | UCGGCCCCUGGCGUCCACACGC | 22 | 15053 |
| BCL11A-12812 | − | UUCGGCCCCUGGCGUCCACACGC | 23 | 15054 |
| BCL11A-12813 | − | CUUCGGCCCCUGGCGUCCACACGC | 24 | 15055 |
| BCL11A-12814 | − | CCCCUCUUUCCAGGCCGC | 18 | 15056 |
| BCL11A-12815 | − | UCCCCUCUUUCCAGGCCGC | 19 | 15057 |
| BCL11A-12816 | − | GUCCCCUCUUUCCAGGCCGC | 20 | 15058 |
| BCL11A-12817 | − | GGUCCCCUCUUUCCAGGCCGC | 21 | 15059 |
| BCL11A-12818 | − | CGGUCCCCUCUUUCCAGGCCGC | 22 | 15060 |
| BCL11A-12819 | − | CCGGUCCCCUCUUUCCAGGCCGC | 23 | 15061 |
| BCL11A-12820 | − | CCCGGUCCCCUCUUUCCAGGCCGC | 24 | 15062 |
| BCL11A-12821 | − | GCCGCCUUUUGUUCCGGC | 18 | 15063 |
| BCL11A-12822 | − | UGCCGCCUUUUGUUCCGGC | 19 | 15064 |
| BCL11A-12823 | − | CUGCCGCCUUUUGUUCCGGC | 20 | 15065 |
| BCL11A-12824 | − | ACUGCCGCCUUUUGUUCCGGC | 21 | 15066 |
| BCL11A-12825 | − | CACUGCCGCCUUUUGUUCCGGC | 22 | 15067 |
| BCL11A-12826 | − | GCACUGCCGCCUUUUGUUCCGGC | 23 | 15068 |
| BCL11A-12827 | − | GGCACUGCCGCCUUUUGUUCCGGC | 24 | 15069 |
| BCL11A-12828 | − | AGCGAGCGCGGCGGCGGC | 18 | 15070 |
| BCL11A-12829 | − | GAGCGAGCGCGGCGGCGGC | 19 | 15071 |
| BCL11A-10114 | − | GGAGCGAGCGCGGCGGCGGC | 20 | 15072 |
| BCL11A-12830 | − | GGGAGCGAGCGCGGCGGCGGC | 21 | 15073 |
| BCL11A-12831 | − | GGGGAGCGAGCGCGGCGGCGGC | 22 | 15074 |
| BCL11A-12832 | − | CGGGGAGCGAGCGCGGCGGCGGC | 23 | 15075 |
| BCL11A-12833 | − | GCGGGGAGCGAGCGCGGCGGCGGC | 24 | 15076 |
| BCL11A-12834 | − | CCGAGCGCAGCCGCGGGC | 18 | 15077 |
| BCL11A-12835 | − | CCCGAGCGCAGCCGCGGGC | 19 | 15078 |
| BCL11A-12836 | − | UCCCGAGCGCAGCCGCGGGC | 20 | 15079 |
| BCL11A-12837 | − | UUCCCGAGCGCAGCCGCGGGC | 21 | 15080 |
| BCL11A-12838 | − | UUUCCCGAGCGCAGCCGCGGGC | 22 | 15081 |
| BCL11A-12839 | − | GUUUCCCGAGCGCAGCCGCGGGC | 23 | 15082 |
| BCL11A-12840 | − | AGUUUCCCGAGCGCAGCCGCGGGC | 24 | 15083 |
| BCL11A-12841 | − | UCCAGGCCGCGCGGGCUC | 18 | 15084 |
| BCL11A-12842 | − | UUCCAGGCCGCGCGGGCUC | 19 | 15085 |
| BCL11A-12843 | − | UUUCCAGGCCGCGCGGGCUC | 20 | 15086 |
| BCL11A-12844 | − | CUUUCCAGGCCGCGCGGGCUC | 21 | 15087 |
| BCL11A-12845 | − | UCUUUCCAGGCCGCGCGGGCUC | 22 | 15088 |
| BCL11A-12846 | − | CUCUUUCCAGGCCGCGCGGGCUC | 23 | 15089 |
| BCL11A-12847 | − | CCUCUUUCCAGGCCGCGCGGGCUC | 24 | 15090 |
| BCL11A-12848 | − | UCCUGAGUCCGCGGAGUC | 18 | 15091 |
| BCL11A-12849 | − | CUCCUGAGUCCGCGGAGUC | 19 | 15092 |
| BCL11A-10128 | − | GCUCCUGAGUCCGCGGAGUC | 20 | 15093 |
| BCL11A-12850 | − | CGCUCCUGAGUCCGCGGAGUC | 21 | 15094 |
| BCL11A-12851 | − | GCGCUCCUGAGUCCGCGGAGUC | 22 | 15095 |
| BCL11A-12852 | − | GGCGCUCCUGAGUCCGCGGAGUC | 23 | 15096 |
| BCL11A-12853 | − | CGGCGCUCCUGAGUCCGCGGAGUC | 24 | 15097 |
| BCL11A-12854 | − | CGUACGGAGGAGGGUGUC | 18 | 15098 |
| BCL11A-12855 | − | GCGUACGGAGGAGGGUGUC | 19 | 15099 |
| BCL11A-10130 | − | UGCGUACGGAGGAGGGUGUC | 20 | 15100 |
| BCL11A-12856 | − | GUGCGUACGGAGGAGGGUGUC | 21 | 15101 |
| BCL11A-12857 | − | UGUGCGUACGGAGGAGGGUGUC | 22 | 15102 |
| BCL11A-12858 | − | GUGUGCGUACGGAGGAGGGUGUC | 23 | 15103 |
| BCL11A-12859 | − | GGUGUGCGUACGGAGGAGGGUGUC | 24 | 15104 |
| BCL11A-12860 | − | AAGUCUAAAAAACGAUUC | 18 | 15105 |
| BCL11A-12861 | − | CAAGUCUAAAAAACGAUUC | 19 | 15106 |
| BCL11A-12862 | − | ACAAGUCUAAAAAACGAUUC | 20 | 15107 |
| BCL11A-12863 | − | UACAAGUCUAAAAAACGAUUC | 21 | 15108 |
| BCL11A-12864 | − | GUACAAGUCUAAAAAACGAUUC | 22 | 15109 |
| BCL11A-12865 | − | AGUACAAGUCUAAAAAACGAUUC | 23 | 15110 |
| BCL11A-12866 | − | GAGUACAAGUCUAAAAAACGAUUC | 24 | 15111 |
| BCL11A-12867 | − | CUCCUCGGGCAAAGUUUC | 18 | 15112 |
| BCL11A-12868 | − | UCUCCUCGGGCAAAGUUUC | 19 | 15113 |
| BCL11A-12869 | − | CUCUCCUCGGGCAAAGUUUC | 20 | 15114 |
| BCL11A-12870 | − | CCUCUCCUCGGGCAAAGUUUC | 21 | 15115 |
| BCL11A-12871 | − | UCCUCUCCUCGGGCAAAGUUUC | 22 | 15116 |
| BCL11A-12872 | − | GUCCUCUCCUCGGGCAAAGUUUC | 23 | 15117 |
| BCL11A-12873 | − | UGUCCUCUCCUCGGGCAAAGUUUC | 24 | 15118 |
| BCL11A-12874 | − | UCACGGUCAAGUGUGCAG | 18 | 15119 |
| BCL11A-12875 | − | CUCACGGUCAAGUGUGCAG | 19 | 15120 |
| BCL11A-10145 | − | GCUCACGGUCAAGUGUGCAG | 20 | 15121 |
| BCL11A-12876 | − | CGCUCACGGUCAAGUGUGCAG | 21 | 15122 |
| BCL11A-12877 | − | GCGCUCACGGUCAAGUGUGCAG | 22 | 15123 |
| BCL11A-12878 | − | CGCGCUCACGGUCAAGUGUGCAG | 23 | 15124 |
| BCL11A-12879 | − | GCGCGCUCACGGUCAAGUGUGCAG | 24 | 15125 |
| BCL11A-12880 | − | UUCCCGGGGAGAAAAGAG | 18 | 15126 |
| BCL11A-12881 | − | AUUCCCGGGGAGAAAAGAG | 19 | 15127 |
| BCL11A-12882 | − | GAUUCCCGGGGAGAAAAGAG | 20 | 15128 |
| BCL11A-12883 | − | CGAUUCCCGGGGAGAAAAGAG | 21 | 15129 |
| BCL11A-12884 | − | ACGAUUCCCGGGGAGAAAAGAG | 22 | 15130 |
| BCL11A-12885 | − | AACGAUUCCCGGGGAGAAAAGAG | 23 | 15131 |
| BCL11A-12886 | − | AAACGAUUCCCGGGGAGAAAAGAG | 24 | 15132 |
| BCL11A-12887 | − | GCUCCUGAGUCCGCGGAG | 18 | 15133 |
| BCL11A-12888 | − | CGCUCCUGAGUCCGCGGAG | 19 | 15134 |
| BCL11A-12889 | − | GCGCUCCUGAGUCCGCGGAG | 20 | 15135 |
| BCL11A-12890 | − | GGCGCUCCUGAGUCCGCGGAG | 21 | 15136 |
| BCL11A-12891 | − | CGGCGCUCCUGAGUCCGCGGAG | 22 | 15137 |
| BCL11A-12892 | − | CCGGCGCUCCUGAGUCCGCGGAG | 23 | 15138 |
| BCL11A-12893 | − | CCCGGCGCUCCUGAGUCCGCGGAG | 24 | 15139 |
| BCL11A-12894 | − | AGUCCGCGGAGUCGGGAG | 18 | 15140 |
| BCL11A-12895 | − | GAGUCCGCGGAGUCGGGAG | 19 | 15141 |
| BCL11A-10150 | − | UGAGUCCGCGGAGUCGGGAG | 20 | 15142 |
| BCL11A-12896 | − | CUGAGUCCGCGGAGUCGGGAG | 21 | 15143 |
| BCL11A-12897 | − | CCUGAGUCCGCGGAGUCGGGAG | 22 | 15144 |
| BCL11A-12898 | − | UCCUGAGUCCGCGGAGUCGGGAG | 23 | 15145 |
| BCL11A-12899 | − | CUCCUGAGUCCGCGGAGUCGGGAG | 24 | 15146 |
| BCL11A-12900 | − | CGCGGCGGCGGCGGGGAG | 18 | 15147 |
| BCL11A-12901 | − | GCGCGGCGGCGGCGGGGAG | 19 | 15148 |
| BCL11A-10152 | − | AGCGCGGCGGCGGCGGGGAG | 20 | 15149 |
| BCL11A-12902 | − | GAGCGCGGCGGCGGCGGGGAG | 21 | 15150 |
| BCL11A-12903 | − | CGAGCGCGGCGGCGGCGGGGAG | 22 | 15151 |
| BCL11A-12904 | − | GCGAGCGCGGCGGCGGCGGGGAG | 23 | 15152 |
| BCL11A-12905 | − | AGCGAGCGCGGCGGCGGCGGGGAG | 24 | 15153 |
| BCL11A-11434 | − | CGCGUGUGUGGGGGGGAG | 18 | 15154 |
| BCL11A-11435 | − | CCGCGUGUGUGGGGGGGAG | 19 | 15155 |
| BCL11A-11436 | − | UCCGCGUGUGUGGGGGGGAG | 20 | 15156 |
| BCL11A-11437 | − | GUCCGCGUGUGUGGGGGGGAG | 21 | 15157 |
| BCL11A-11438 | − | AGUCCGCGUGUGUGGGGGGGAG | 22 | 15158 |
| BCL11A-11439 | − | GAGUCCGCGUGUGUGGGGGGGAG | 23 | 15159 |
| BCL11A-11440 | − | AGAGUCCGCGUGUGUGGGGGGGAG | 24 | 15160 |
| BCL11A-12906 | − | GCCCCUGGCGUCCACACG | 18 | 15161 |
| BCL11A-12907 | − | GGCCCCUGGCGUCCACACG | 19 | 15162 |
| BCL11A-10156 | − | CGGCCCCUGGCGUCCACACG | 20 | 15163 |
| BCL11A-12908 | − | UCGGCCCCUGGCGUCCACACG | 21 | 15164 |
| BCL11A-12909 | − | UUCGGCCCCUGGCGUCCACACG | 22 | 15165 |
| BCL11A-12910 | − | CUUCGGCCCCUGGCGUCCACACG | 23 | 15166 |
| BCL11A-12911 | − | ACUUCGGCCCCUGGCGUCCACACG | 24 | 15167 |
| BCL11A-12912 | − | AGAGGGGCCGCGGCGACG | 18 | 15168 |
| BCL11A-12913 | − | GAGAGGGGCCGCGGCGACG | 19 | 15169 |
| BCL11A-10158 | − | GGAGAGGGGCCGCGGCGACG | 20 | 15170 |
| BCL11A-12914 | − | GGGAGAGGGGCCGCGGCGACG | 21 | 15171 |
| BCL11A-12915 | − | CGGGAGAGGGGCCGCGGCGACG | 22 | 15172 |
| BCL11A-12916 | − | UCGGGAGAGGGGCCGCGGCGACG | 23 | 15173 |
| BCL11A-12917 | − | GUCGGGAGAGGGGCCGCGGCGACG | 24 | 15174 |
| BCL11A-12918 | − | GAAGUGGGUGUGCGUACG | 18 | 15175 |
| BCL11A-12919 | − | GGAAGUGGGUGUGCGUACG | 19 | 15176 |
| BCL11A-12920 | − | GGGAAGUGGGUGUGCGUACG | 20 | 15177 |
| BCL11A-12921 | − | GGGGAAGUGGGUGUGCGUACG | 21 | 15178 |
| BCL11A-12922 | − | AGGGGAAGUGGGUGUGCGUACG | 22 | 15179 |
| BCL11A-12923 | − | GAGGGGAAGUGGGUGUGCGUACG | 23 | 15180 |
| BCL11A-12924 | − | GGAGGGGAAGUGGGUGUGCGUACG | 24 | 15181 |
| BCL11A-12925 | − | UCUAAAAAACGAUUCCCG | 18 | 15182 |
| BCL11A-12926 | − | GUCUAAAAAACGAUUCCCG | 19 | 15183 |
| BCL11A-10164 | − | AGUCUAAAAAACGAUUCCCG | 20 | 15184 |
| BCL11A-12927 | − | AAGUCUAAAAAACGAUUCCCG | 21 | 15185 |
| BCL11A-12928 | − | CAAGUCUAAAAAACGAUUCCCG | 22 | 15186 |
| BCL11A-12929 | − | ACAAGUCUAAAAAACGAUUCCCG | 23 | 15187 |
| BCL11A-12930 | − | UACAAGUCUAAAAAACGAUUCCCG | 24 | 15188 |
| BCL11A-12931 | − | CGGCGACGGGGAGAGCCG | 18 | 15189 |
| BCL11A-12932 | − | GCGGCGACGGGGAGAGCCG | 19 | 15190 |
| BCL11A-10166 | − | CGCGGCGACGGGGAGAGCCG | 20 | 15191 |
| BCL11A-12933 | − | CCGCGGCGACGGGGAGAGCCG | 21 | 15192 |
| BCL11A-12934 | − | GCCGCGGCGACGGGGAGAGCCG | 22 | 15193 |
| BCL11A-12935 | − | GGCCGCGGCGACGGGGAGAGCCG | 23 | 15194 |
| BCL11A-12936 | − | GGGCCGCGGCGACGGGGAGAGCCG | 24 | 15195 |
| BCL11A-12937 | − | CCCUGGCGUCCACACGCG | 18 | 15196 |
| BCL11A-12938 | − | CCCCUGGCGUCCACACGCG | 19 | 15197 |
| BCL11A-10175 | − | GCCCCUGGCGUCCACACGCG | 20 | 15198 |
| BCL11A-12939 | − | GGCCCCUGGCGUCCACACGCG | 21 | 15199 |
| BCL11A-12940 | − | CGGCCCCUGGCGUCCACACGCG | 22 | 15200 |
| BCL11A-12941 | − | UCGGCCCCUGGCGUCCACACGCG | 23 | 15201 |
| BCL11A-12942 | − | UUCGGCCCCUGGCGUCCACACGCG | 24 | 15202 |
| BCL11A-12943 | − | GGGAGAGGGGCCGCGGCG | 18 | 15203 |
| BCL11A-12944 | − | CGGGAGAGGGGCCGCGGCG | 19 | 15204 |
| BCL11A-12945 | − | UCGGGAGAGGGGCCGCGGCG | 20 | 15205 |
| BCL11A-12946 | − | GUCGGGAGAGGGGCCGCGGCG | 21 | 15206 |
| BCL11A-12947 | − | AGUCGGGAGAGGGGCCGCGGCG | 22 | 15207 |
| BCL11A-12948 | − | GAGUCGGGAGAGGGGCCGCGGCG | 23 | 15208 |
| BCL11A-12949 | − | GGAGUCGGGAGAGGGGCCGCGGCG | 24 | 15209 |
| BCL11A-12950 | − | GGAGCGAGCGCGGCGGCG | 18 | 15210 |
| BCL11A-12951 | − | GGGAGCGAGCGCGGCGGCG | 19 | 15211 |
| BCL11A-12952 | − | GGGGAGCGAGCGCGGCGGCG | 20 | 15212 |
| BCL11A-12953 | − | CGGGGAGCGAGCGCGGCGGCG | 21 | 15213 |
| BCL11A-12954 | − | GCGGGGAGCGAGCGCGGCGGCG | 22 | 15214 |
| BCL11A-12955 | − | CGCGGGGAGCGAGCGCGGCGGCG | 23 | 15215 |
| BCL11A-12956 | − | ACGCGGGGAGCGAGCGCGGCGGCG | 24 | 15216 |
| BCL11A-12957 | − | GCGAGCGCGGCGGCGGCG | 18 | 15217 |
| BCL11A-12958 | − | AGCGAGCGCGGCGGCGGCG | 19 | 15218 |
| BCL11A-10179 | − | GAGCGAGCGCGGCGGCGGCG | 20 | 15219 |
| BCL11A-12959 | − | GGAGCGAGCGCGGCGGCGGCG | 21 | 15220 |
| BCL11A-12960 | − | GGGAGCGAGCGCGGCGGCGGCG | 22 | 15221 |
| BCL11A-12961 | − | GGGGAGCGAGCGCGGCGGCGGCG | 23 | 15222 |
| BCL11A-12962 | − | CGGGGAGCGAGCGCGGCGGCGGCG | 24 | 15223 |
| BCL11A-12963 | − | GCCGUGGGACCGGGAAGG | 18 | 15224 |
| BCL11A-12964 | − | AGCCGUGGGACCGGGAAGG | 19 | 15225 |
| BCL11A-12965 | − | GAGCCGUGGGACCGGGAAGG | 20 | 15226 |
| BCL11A-12966 | − | AGAGCCGUGGGACCGGGAAGG | 21 | 15227 |
| BCL11A-12967 | − | GAGAGCCGUGGGACCGGGAAGG | 22 | 15228 |
| BCL11A-12968 | − | GGAGAGCCGUGGGACCGGGAAGG | 23 | 15229 |
| BCL11A-12969 | − | GGGAGAGCCGUGGGACCGGGAAGG | 24 | 15230 |
| BCL11A-12970 | − | AGAAAAUGGGGGGGUAGG | 18 | 15231 |
| BCL11A-12971 | − | AAGAAAAUGGGGGGGUAGG | 19 | 15232 |
| BCL11A-12972 | − | UAAGAAAAUGGGGGGGUAGG | 20 | 15233 |
| BCL11A-12973 | − | GUAAGAAAAUGGGGGGGUAGG | 21 | 15234 |
| BCL11A-12974 | − | CGUAAGAAAAUGGGGGGGUAGG | 22 | 15235 |
| BCL11A-12975 | − | CCGUAAGAAAAUGGGGGGGUAGG | 23 | 15236 |
| BCL11A-12976 | − | ACCGUAAGAAAAUGGGGGGGUAGG | 24 | 15237 |
| BCL11A-12977 | − | AAGUGGGUGUGCGUACGG | 18 | 15238 |
| BCL11A-12978 | − | GAAGUGGGUGUGCGUACGG | 19 | 15239 |
| BCL11A-10191 | − | GGAAGUGGGUGUGCGUACGG | 20 | 15240 |
| BCL11A-12979 | − | GGGAAGUGGGUGUGCGUACGG | 21 | 15241 |
| BCL11A-12980 | − | GGGGAAGUGGGUGUGCGUACGG | 22 | 15242 |
| BCL11A-12981 | − | AGGGGAAGUGGGUGUGCGUACGG | 23 | 15243 |
| BCL11A-12982 | − | GAGGGGAAGUGGGUGUGCGUACGG | 24 | 15244 |
| BCL11A-12983 | − | CGGUCAAGUGUGCAGCGG | 18 | 15245 |
| BCL11A-12984 | − | ACGGUCAAGUGUGCAGCGG | 19 | 15246 |
| BCL11A-12985 | − | CACGGUCAAGUGUGCAGCGG | 20 | 15247 |
| BCL11A-12986 | − | UCACGGUCAAGUGUGCAGCGG | 21 | 15248 |
| BCL11A-12987 | − | CUCACGGUCAAGUGUGCAGCGG | 22 | 15249 |
| BCL11A-12988 | − | GCUCACGGUCAAGUGUGCAGCGG | 23 | 15250 |
| BCL11A-12989 | − | CGCUCACGGUCAAGUGUGCAGCGG | 24 | 15251 |
| BCL11A-12990 | − | GAGCGAGCGCGGCGGCGG | 18 | 15252 |
| BCL11A-12991 | − | GGAGCGAGCGCGGCGGCGG | 19 | 15253 |
| BCL11A-10196 | − | GGGAGCGAGCGCGGCGGCGG | 20 | 15254 |
| BCL11A-12992 | − | GGGGAGCGAGCGCGGCGGCGG | 21 | 15255 |
| BCL11A-12993 | − | CGGGGAGCGAGCGCGGCGGCGG | 22 | 15256 |
| BCL11A-12994 | − | GCGGGGAGCGAGCGCGGCGGCGG | 23 | 15257 |
| BCL11A-12995 | − | CGCGGGGAGCGAGCGCGGCGGCGG | 24 | 15258 |
| BCL11A-12996 | − | CUGAGUCCGCGGAGUCGG | 18 | 15259 |
| BCL11A-12997 | − | CCUGAGUCCGCGGAGUCGG | 19 | 15260 |
| BCL11A-12998 | − | UCCUGAGUCCGCGGAGUCGG | 20 | 15261 |
| BCL11A-12999 | − | CUCCUGAGUCCGCGGAGUCGG | 21 | 15262 |
| BCL11A-13000 | − | GCUCCUGAGUCCGCGGAGUCGG | 22 | 15263 |
| BCL11A-13001 | − | CGCUCCUGAGUCCGCGGAGUCGG | 23 | 15264 |
| BCL11A-13002 | − | GCGCUCCUGAGUCCGCGGAGUCGG | 24 | 15265 |
| BCL11A-13003 | − | GAAAAUGGGGGGGUAGGG | 18 | 15266 |
| BCL11A-13004 | − | AGAAAAUGGGGGGGUAGGG | 19 | 15267 |
| BCL11A-10200 | − | AAGAAAAUGGGGGGGUAGGG | 20 | 15268 |
| BCL11A-13005 | − | UAAGAAAAUGGGGGGGUAGGG | 21 | 15269 |
| BCL11A-13006 | − | GUAAGAAAAUGGGGGGGUAGGG | 22 | 15270 |
| BCL11A-13007 | − | CGUAAGAAAAUGGGGGGGUAGGG | 23 | 15271 |
| BCL11A-13008 | − | CCGUAAGAAAAUGGGGGGGUAGGG | 24 | 15272 |
| BCL11A-13009 | − | AGGGGCCGCGGCGACGGG | 18 | 15273 |
| BCL11A-13010 | − | GAGGGGCCGCGGCGACGGG | 19 | 15274 |
| BCL11A-13011 | − | AGAGGGGCCGCGGCGACGGG | 20 | 15275 |
| BCL11A-13012 | − | GAGAGGGGCCGCGGCGACGGG | 21 | 15276 |
| BCL11A-13013 | − | GGAGAGGGGCCGCGGCGACGGG | 22 | 15277 |
| BCL11A-13014 | − | GGGAGAGGGGCCGCGGCGACGGG | 23 | 15278 |
| BCL11A-13015 | − | CGGGAGAGGGGCCGCGGCGACGGG | 24 | 15279 |
| BCL11A-13016 | − | GAGAGCCGUGGGACCGGG | 18 | 15280 |
| BCL11A-13017 | − | GGAGAGCCGUGGGACCGGG | 19 | 15281 |
| BCL11A-13018 | − | GGGAGAGCCGUGGGACCGGG | 20 | 15282 |
| BCL11A-13019 | − | GGGGAGAGCCGUGGGACCGGG | 21 | 15283 |
| BCL11A-13020 | − | CGGGGAGAGCCGUGGGACCGGG | 22 | 15284 |
| BCL11A-13021 | − | ACGGGGAGAGCCGUGGGACCGGG | 23 | 15285 |
| BCL11A-13022 | − | GACGGGGAGAGCCGUGGGACCGGG | 24 | 15286 |
| BCL11A-13023 | − | UAAAAAACGAUUCCCGGG | 18 | 15287 |
| BCL11A-13024 | − | CUAAAAAACGAUUCCCGGG | 19 | 15288 |
| BCL11A-13025 | − | UCUAAAAAACGAUUCCCGGG | 20 | 15289 |
| BCL11A-13026 | − | GUCUAAAAAACGAUUCCCGGG | 21 | 15290 |
| BCL11A-13027 | − | AGUCUAAAAAACGAUUCCCGGG | 22 | 15291 |
| BCL11A-13028 | − | AAGUCUAAAAAACGAUUCCCGGG | 23 | 15292 |
| BCL11A-13029 | − | CAAGUCUAAAAAACGAUUCCCGGG | 24 | 15293 |
| BCL11A-13030 | − | GGUCAAGUGUGCAGCGGG | 18 | 15294 |
| BCL11A-13031 | − | CGGUCAAGUGUGCAGCGGG | 19 | 15295 |
| BCL11A-10202 | − | ACGGUCAAGUGUGCAGCGGG | 20 | 15296 |
| BCL11A-13032 | − | CACGGUCAAGUGUGCAGCGGG | 21 | 15297 |
| BCL11A-13033 | − | UCACGGUCAAGUGUGCAGCGGG | 22 | 15298 |
| BCL11A-13034 | − | CUCACGGUCAAGUGUGCAGCGGG | 23 | 15299 |
| BCL11A-13035 | − | GCUCACGGUCAAGUGUGCAGCGGG | 24 | 15300 |
| BCL11A-13036 | − | GAGCGCGGCGGCGGCGGG | 18 | 15301 |
| BCL11A-13037 | − | CGAGCGCGGCGGCGGCGGG | 19 | 15302 |
| BCL11A-13038 | − | GCGAGCGCGGCGGCGGCGGG | 20 | 15303 |
| BCL11A-13039 | − | AGCGAGCGCGGCGGCGGCGGG | 21 | 15304 |
| BCL11A-13040 | − | GAGCGAGCGCGGCGGCGGCGGG | 22 | 15305 |
| BCL11A-13041 | − | GGAGCGAGCGCGGCGGCGGCGGG | 23 | 15306 |
| BCL11A-13042 | − | GGGAGCGAGCGCGGCGGCGGCGGG | 24 | 15307 |
| BCL11A-13043 | − | AGCGCGGCGGCGGCGGGG | 18 | 15308 |
| BCL11A-13044 | − | GAGCGCGGCGGCGGCGGGG | 19 | 15309 |
| BCL11A-10206 | − | CGAGCGCGGCGGCGGCGGGG | 20 | 15310 |
| BCL11A-13045 | − | GCGAGCGCGGCGGCGGCGGGG | 21 | 15311 |
| BCL11A-13046 | − | AGCGAGCGCGGCGGCGGCGGGG | 22 | 15312 |
| BCL11A-13047 | − | GAGCGAGCGCGGCGGCGGCGGGG | 23 | 15313 |
| BCL11A-13048 | − | GGAGCGAGCGCGGCGGCGGCGGGG | 24 | 15314 |
| BCL11A-13049 | − | CGUAAGAAAAUGGGGGGG | 18 | 15315 |
| BCL11A-13050 | − | CCGUAAGAAAAUGGGGGGG | 19 | 15316 |
| BCL11A-13051 | − | ACCGUAAGAAAAUGGGGGGG | 20 | 15317 |
| BCL11A-13052 | − | CACCGUAAGAAAAUGGGGGGG | 21 | 15318 |
| BCL11A-13053 | − | UCACCGUAAGAAAAUGGGGGGG | 22 | 15319 |
| BCL11A-13054 | − | CUCACCGUAAGAAAAUGGGGGGG | 23 | 15320 |
| BCL11A-13055 | − | ACUCACCGUAAGAAAAUGGGGGGG | 24 | 15321 |
| BCL11A-13056 | − | CACAUGCAAACCUGGGGG | 18 | 15322 |
| BCL11A-13057 | − | UCACAUGCAAACCUGGGGG | 19 | 15323 |
| BCL11A-10210 | − | CUCACAUGCAAACCUGGGGG | 20 | 15324 |
| BCL11A-13058 | − | ACUCACAUGCAAACCUGGGGG | 21 | 15325 |
| BCL11A-13059 | − | AACUCACAUGCAAACCUGGGGG | 22 | 15326 |
| BCL11A-13060 | − | CAACUCACAUGCAAACCUGGGGG | 23 | 15327 |
| BCL11A-13061 | − | ACAACUCACAUGCAAACCUGGGGG | 24 | 15328 |
| BCL11A-13062 | − | UCACAUGCAAACCUGGGG | 18 | 15329 |
| BCL11A-13063 | − | CUCACAUGCAAACCUGGGG | 19 | 15330 |
| BCL11A-13064 | − | ACUCACAUGCAAACCUGGGG | 20 | 15331 |
| BCL11A-13065 | − | AACUCACAUGCAAACCUGGGG | 21 | 15332 |
| BCL11A-13066 | − | CAACUCACAUGCAAACCUGGGG | 22 | 15333 |
| BCL11A-13067 | − | ACAACUCACAUGCAAACCUGGGG | 23 | 15334 |
| BCL11A-13068 | − | AACAACUCACAUGCAAACCUGGGG | 24 | 15335 |
| BCL11A-11486 | − | GAGUCCGCGUGUGUGGGG | 18 | 15336 |
| BCL11A-11487 | − | AGAGUCCGCGUGUGUGGGG | 19 | 15337 |
| BCL11A-9577 | − | UAGAGUCCGCGUGUGUGGGG | 20 | 15338 |
| BCL11A-11488 | − | UUAGAGUCCGCGUGUGUGGGG | 21 | 15339 |
| BCL11A-11489 | − | UUUAGAGUCCGCGUGUGUGGGG | 22 | 15340 |
| BCL11A-11490 | − | UUUUAGAGUCCGCGUGUGUGGGG | 23 | 15341 |
| BCL11A-11491 | − | AUUUUAGAGUCCGCGUGUGUGGGG | 24 | 15342 |
| BCL11A-11492 | − | AGAGUCCGCGUGUGUGGG | 18 | 15343 |
| BCL11A-11493 | − | UAGAGUCCGCGUGUGUGGG | 19 | 15344 |
| BCL11A-9769 | − | UUAGAGUCCGCGUGUGUGGG | 20 | 15345 |
| BCL11A-11494 | − | UUUAGAGUCCGCGUGUGUGGG | 21 | 15346 |
| BCL11A-11495 | − | UUUUAGAGUCCGCGUGUGUGGG | 22 | 15347 |
| BCL11A-11496 | − | AUUUUAGAGUCCGCGUGUGUGGG | 23 | 15348 |
| BCL11A-11497 | − | CAUUUUAGAGUCCGCGUGUGUGGG | 24 | 15349 |
| BCL11A-13069 | − | CCUGGGGGUGGGAGCUGG | 18 | 15350 |
| BCL11A-13070 | − | ACCUGGGGGUGGGAGCUGG | 19 | 15351 |
| BCL11A-10217 | − | AACCUGGGGGUGGGAGCUGG | 20 | 15352 |
| BCL11A-13071 | − | AAACCUGGGGGUGGGAGCUGG | 21 | 15353 |
| BCL11A-13072 | − | CAAACCUGGGGGUGGGAGCUGG | 22 | 15354 |
| BCL11A-13073 | − | GCAAACCUGGGGGUGGGAGCUGG | 23 | 15355 |
| BCL11A-13074 | − | UGCAAACCUGGGGGUGGGAGCUGG | 24 | 15356 |
| BCL11A-11498 | − | UAGAGUCCGCGUGUGUGG | 18 | 15357 |
| BCL11A-11499 | − | UUAGAGUCCGCGUGUGUGG | 19 | 15358 |
| BCL11A-9578 | − | UUUAGAGUCCGCGUGUGUGG | 20 | 15359 |
| BCL11A-11500 | − | UUUUAGAGUCCGCGUGUGUGG | 21 | 15360 |
| BCL11A-11501 | − | AUUUUAGAGUCCGCGUGUGUGG | 22 | 15361 |
| BCL11A-11502 | − | CAUUUUAGAGUCCGCGUGUGUGG | 23 | 15362 |
| BCL11A-11503 | − | UCAUUUUAGAGUCCGCGUGUGUGG | 24 | 15363 |
| BCL11A-13075 | − | ACUCACCGUAAGAAAAUG | 18 | 15364 |
| BCL11A-13076 | − | CACUCACCGUAAGAAAAUG | 19 | 15365 |
| BCL11A-10221 | − | CCACUCACCGUAAGAAAAUG | 20 | 15366 |
| BCL11A-13077 | − | CCCACUCACCGUAAGAAAAUG | 21 | 15367 |
| BCL11A-13078 | − | UCCCACUCACCGUAAGAAAAUG | 22 | 15368 |
| BCL11A-13079 | − | UUCCCACUCACCGUAAGAAAAUG | 23 | 15369 |
| BCL11A-13080 | − | CUUCCCACUCACCGUAAGAAAAUG | 24 | 15370 |
| BCL11A-13081 | − | AGUGAGAAAGUGGCACUG | 18 | 15371 |
| BCL11A-13082 | − | UAGUGAGAAAGUGGCACUG | 19 | 15372 |
| BCL11A-10222 | − | AUAGUGAGAAAGUGGCACUG | 20 | 15373 |
| BCL11A-13083 | − | AAUAGUGAGAAAGUGGCACUG | 21 | 15374 |
| BCL11A-13084 | − | CAAUAGUGAGAAAGUGGCACUG | 22 | 15375 |
| BCL11A-13085 | − | ACAAUAGUGAGAAAGUGGCACUG | 23 | 15376 |
| BCL11A-13086 | − | CACAAUAGUGAGAAAGUGGCACUG | 24 | 15377 |
| BCL11A-13087 | − | ACCUGGGGGUGGGAGCUG | 18 | 15378 |
| BCL11A-13088 | − | AACCUGGGGGUGGGAGCUG | 19 | 15379 |
| BCL11A-13089 | − | AAACCUGGGGGUGGGAGCUG | 20 | 15380 |
| BCL11A-13090 | − | CAAACCUGGGGGUGGGAGCUG | 21 | 15381 |
| BCL11A-13091 | − | GCAAACCUGGGGGUGGGAGCUG | 22 | 15382 |
| BCL11A-13092 | − | UGCAAACCUGGGGGUGGGAGCUG | 23 | 15383 |
| BCL11A-13093 | − | AUGCAAACCUGGGGGUGGGAGCUG | 24 | 15384 |
| BCL11A-13094 | − | ACCUCCCCUCGCCCGCUG | 18 | 15385 |
| BCL11A-13095 | − | CACCUCCCCUCGCCCGCUG | 19 | 15386 |
| BCL11A-10224 | − | CCACCUCCCCUCGCCCGCUG | 20 | 15387 |
| BCL11A-13096 | − | CCCACCUCCCCUCGCCCGCUG | 21 | 15388 |
| BCL11A-13097 | − | UCCCACCUCCCCUCGCCCGCUG | 22 | 15389 |
| BCL11A-13098 | − | CUCCCACCUCCCCUCGCCCGCUG | 23 | 15390 |
| BCL11A-13099 | − | CCUCCCACCUCCCCUCGCCCGCUG | 24 | 15391 |
| BCL11A-13100 | − | UGGGGGUGGGAGCUGGUG | 18 | 15392 |
| BCL11A-13101 | − | CUGGGGGUGGGAGCUGGUG | 19 | 15393 |
| BCL11A-10228 | − | CCUGGGGGUGGGAGCUGGUG | 20 | 15394 |
| BCL11A-13102 | − | ACCUGGGGGUGGGAGCUGGUG | 21 | 15395 |
| BCL11A-13103 | − | AACCUGGGGGUGGGAGCUGGUG | 22 | 15396 |
| BCL11A-13104 | − | AAACCUGGGGGUGGGAGCUGGUG | 23 | 15397 |
| BCL11A-13105 | − | CAAACCUGGGGGUGGGAGCUGGUG | 24 | 15398 |
| BCL11A-11518 | − | UUUUAGAGUCCGCGUGUG | 18 | 15399 |
| BCL11A-11519 | − | AUUUUAGAGUCCGCGUGUG | 19 | 15400 |
| BCL11A-9581 | − | CAUUUUAGAGUCCGCGUGUG | 20 | 15401 |
| BCL11A-11520 | − | UCAUUUUAGAGUCCGCGUGUG | 21 | 15402 |
| BCL11A-11521 | − | UUCAUUUUAGAGUCCGCGUGUG | 22 | 15403 |
| BCL11A-11522 | − | UUUCAUUUUAGAGUCCGCGUGUG | 23 | 15404 |
| BCL11A-11523 | − | CUUUCAUUUUAGAGUCCGCGUGUG | 24 | 15405 |
| BCL11A-11524 | − | UUAGAGUCCGCGUGUGUG | 18 | 15406 |
| BCL11A-11525 | − | UUUAGAGUCCGCGUGUGUG | 19 | 15407 |
| BCL11A-9776 | − | UUUUAGAGUCCGCGUGUGUG | 20 | 15408 |
| BCL11A-11526 | − | AUUUUAGAGUCCGCGUGUGUG | 21 | 15409 |
| BCL11A-11527 | − | CAUUUUAGAGUCCGCGUGUGUG | 22 | 15410 |
| BCL11A-11528 | − | UCAUUUUAGAGUCCGCGUGUGUG | 23 | 15411 |
| BCL11A-11529 | − | UUCAUUUUAGAGUCCGCGUGUGUG | 24 | 15412 |
| BCL11A-13106 | − | CACUCACCGUAAGAAAAU | 18 | 15413 |
| BCL11A-13107 | − | CCACUCACCGUAAGAAAAU | 19 | 15414 |
| BCL11A-10232 | − | CCCACUCACCGUAAGAAAAU | 20 | 15415 |
| BCL11A-13108 | − | UCCCACUCACCGUAAGAAAAU | 21 | 15416 |
| BCL11A-13109 | − | UUCCCACUCACCGUAAGAAAAU | 22 | 15417 |
| BCL11A-13110 | − | CUUCCCACUCACCGUAAGAAAAU | 23 | 15418 |
| BCL11A-13111 | − | GCUUCCCACUCACCGUAAGAAAAU | 24 | 15419 |
| BCL11A-13112 | − | CGCUGCGGAGCUGUAACU | 18 | 15420 |
| BCL11A-13113 | − | CCGCUGCGGAGCUGUAACU | 19 | 15421 |
| BCL11A-10233 | − | CCCGCUGCGGAGCUGUAACU | 20 | 15422 |
| BCL11A-13114 | − | GCCCGCUGCGGAGCUGUAACU | 21 | 15423 |
| BCL11A-13115 | − | CGCCCGCUGCGGAGCUGUAACU | 22 | 15424 |
| BCL11A-13116 | − | UCGCCCGCUGCGGAGCUGUAACU | 23 | 15425 |
| BCL11A-13117 | − | CUCGCCCGCUGCGGAGCUGUAACU | 24 | 15426 |
| BCL11A-13118 | − | UAGUGAGAAAGUGGCACU | 18 | 15427 |
| BCL11A-13119 | − | AUAGUGAGAAAGUGGCACU | 19 | 15428 |
| BCL11A-13120 | − | AAUAGUGAGAAAGUGGCACU | 20 | 15429 |
| BCL11A-13121 | − | CAAUAGUGAGAAAGUGGCACU | 21 | 15430 |
| BCL11A-13122 | − | ACAAUAGUGAGAAAGUGGCACU | 22 | 15431 |
| BCL11A-13123 | − | CACAAUAGUGAGAAAGUGGCACU | 23 | 15432 |
| BCL11A-13124 | − | CCACAAUAGUGAGAAAGUGGCACU | 24 | 15433 |
| BCL11A-13125 | − | CGGUCCCUGGCUCGGCCU | 18 | 15434 |
| BCL11A-13126 | − | CCGGUCCCUGGCUCGGCCU | 19 | 15435 |
| BCL11A-10237 | − | CCCGGUCCCUGGCUCGGCCU | 20 | 15436 |
| BCL11A-13127 | − | CACCUCCCCUCGCCCGCU | 18 | 15437 |
| BCL11A-13128 | − | CCACCUCCCCUCGCCCGCU | 19 | 15438 |
| BCL11A-13129 | − | CCCACCUCCCCUCGCCCGCU | 20 | 15439 |
| BCL11A-13130 | − | UCCCACCUCCCCUCGCCCGCU | 21 | 15440 |
| BCL11A-13131 | − | CUCCCACCUCCCCUCGCCCGCU | 22 | 15441 |
| BCL11A-13132 | − | CCUCCCACCUCCCCUCGCCCGCU | 23 | 15442 |
| BCL11A-13133 | − | CCCUCCCACCUCCCCUCGCCCGCU | 24 | 15443 |
| BCL11A-13134 | − | CGAGCGCAGCCGCGGGCU | 18 | 15444 |
| BCL11A-13135 | − | CCGAGCGCAGCCGCGGGCU | 19 | 15445 |
| BCL11A-10241 | − | CCCGAGCGCAGCCGCGGGCU | 20 | 15446 |
| BCL11A-13136 | − | UCCCGAGCGCAGCCGCGGGCU | 21 | 15447 |
| BCL11A-13137 | − | UUCCCGAGCGCAGCCGCGGGCU | 22 | 15448 |
| BCL11A-13138 | − | UUUCCCGAGCGCAGCCGCGGGCU | 23 | 15449 |
| BCL11A-13139 | − | GUUUCCCGAGCGCAGCCGCGGGCU | 24 | 15450 |
| BCL11A-13140 | − | CUCCUGAGUCCGCGGAGU | 18 | 15451 |
| BCL11A-13141 | − | GCUCCUGAGUCCGCGGAGU | 19 | 15452 |
| BCL11A-10243 | − | CGCUCCUGAGUCCGCGGAGU | 20 | 15453 |
| BCL11A-13142 | − | GCGCUCCUGAGUCCGCGGAGU | 21 | 15454 |
| BCL11A-13143 | − | GGCGCUCCUGAGUCCGCGGAGU | 22 | 15455 |
| BCL11A-13144 | − | CGGCGCUCCUGAGUCCGCGGAGU | 23 | 15456 |
| BCL11A-13145 | − | CCGGCGCUCCUGAGUCCGCGGAGU | 24 | 15457 |
| BCL11A-13146 | − | AGUCAUCCCCACAAUAGU | 18 | 15458 |
| BCL11A-13147 | − | UAGUCAUCCCCACAAUAGU | 19 | 15459 |
| BCL11A-13148 | − | GUAGUCAUCCCCACAAUAGU | 20 | 15460 |
| BCL11A-13149 | − | AGUAGUCAUCCCCACAAUAGU | 21 | 15461 |
| BCL11A-13150 | − | AAGUAGUCAUCCCCACAAUAGU | 22 | 15462 |
| BCL11A-13151 | − | AAAGUAGUCAUCCCCACAAUAGU | 23 | 15463 |
| BCL11A-13152 | − | GAAAGUAGUCAUCCCCACAAUAGU | 24 | 15464 |
| BCL11A-13153 | − | UUGCUUCCCACUCACCGU | 18 | 15465 |
| BCL11A-13154 | − | GUUGCUUCCCACUCACCGU | 19 | 15466 |
| BCL11A-13155 | − | GGUUGCUUCCCACUCACCGU | 20 | 15467 |
| BCL11A-13156 | − | AGGUUGCUUCCCACUCACCGU | 21 | 15468 |
| BCL11A-13157 | − | GAGGUUGCUUCCCACUCACCGU | 22 | 15469 |
| BCL11A-13158 | − | GGAGGUUGCUUCCCACUCACCGU | 23 | 15470 |
| BCL11A-13159 | − | GGGAGGUUGCUUCCCACUCACCGU | 24 | 15471 |
| BCL11A-13160 | − | GGGGAAGUGGGUGUGCGU | 18 | 15472 |
| BCL11A-13161 | − | AGGGGAAGUGGGUGUGCGU | 19 | 15473 |
| BCL11A-13162 | − | GAGGGGAAGUGGGUGUGCGU | 20 | 15474 |
| BCL11A-13163 | − | GGAGGGGAAGUGGGUGUGCGU | 21 | 15475 |
| BCL11A-13164 | − | GGGAGGGGAAGUGGGUGUGCGU | 22 | 15476 |
| BCL11A-13165 | − | GGGGAGGGGAAGUGGGUGUGCGU | 23 | 15477 |
| BCL11A-13166 | − | CGGGGAGGGGAAGUGGGUGUGCGU | 24 | 15478 |
| BCL11A-13167 | − | GUAAGAAAAUGGGGGGGU | 18 | 15479 |
| BCL11A-13168 | − | CGUAAGAAAAUGGGGGGGU | 19 | 15480 |
| BCL11A-10248 | − | CCGUAAGAAAAUGGGGGGGU | 20 | 15481 |
| BCL11A-13169 | − | ACCGUAAGAAAAUGGGGGGGU | 21 | 15482 |
| BCL11A-13170 | − | CACCGUAAGAAAAUGGGGGGGU | 22 | 15483 |
| BCL11A-13171 | − | UCACCGUAAGAAAAUGGGGGGGU | 23 | 15484 |
| BCL11A-13172 | − | CUCACCGUAAGAAAAUGGGGGGGU | 24 | 15485 |
| BCL11A-13173 | − | ACAUGCAAACCUGGGGGU | 18 | 15486 |
| BCL11A-13174 | − | CACAUGCAAACCUGGGGGU | 19 | 15487 |
| BCL11A-10249 | − | UCACAUGCAAACCUGGGGGU | 20 | 15488 |
| BCL11A-13175 | − | CUCACAUGCAAACCUGGGGGU | 21 | 15489 |
| BCL11A-13176 | − | ACUCACAUGCAAACCUGGGGGU | 22 | 15490 |
| BCL11A-13177 | − | AACUCACAUGCAAACCUGGGGGU | 23 | 15491 |
| BCL11A-13178 | − | CAACUCACAUGCAAACCUGGGGGU | 24 | 15492 |
| BCL11A-13179 | − | CUGGGGGUGGGAGCUGGU | 18 | 15493 |
| BCL11A-13180 | − | CCUGGGGGUGGGAGCUGGU | 19 | 15494 |
| BCL11A-10250 | − | ACCUGGGGGUGGGAGCUGGU | 20 | 15495 |
| BCL11A-13181 | − | AACCUGGGGGUGGGAGCUGGU | 21 | 15496 |
| BCL11A-13182 | − | AAACCUGGGGGUGGGAGCUGGU | 22 | 15497 |
| BCL11A-13183 | − | CAAACCUGGGGGUGGGAGCUGGU | 23 | 15498 |
| BCL11A-13184 | − | GCAAACCUGGGGGUGGGAGCUGGU | 24 | 15499 |
| BCL11A-11572 | − | AUUUUAGAGUCCGCGUGU | 18 | 15500 |
| BCL11A-11573 | − | CAUUUUAGAGUCCGCGUGU | 19 | 15501 |
| BCL11A-11574 | − | UCAUUUUAGAGUCCGCGUGU | 20 | 15502 |
| BCL11A-11575 | − | UUCAUUUUAGAGUCCGCGUGU | 21 | 15503 |
| BCL11A-11576 | − | UUUCAUUUUAGAGUCCGCGUGU | 22 | 15504 |
| BCL11A-11577 | − | CUUUCAUUUUAGAGUCCGCGUGU | 23 | 15505 |
| BCL11A-11578 | − | UCUUUCAUUUUAGAGUCCGCGUGU | 24 | 15506 |
| BCL11A-13185 | − | GCGUACGGAGGAGGGUGU | 18 | 15507 |
| BCL11A-13186 | − | UGCGUACGGAGGAGGGUGU | 19 | 15508 |
| BCL11A-13187 | − | GUGCGUACGGAGGAGGGUGU | 20 | 15509 |
| BCL11A-13188 | − | UGUGCGUACGGAGGAGGGUGU | 21 | 15510 |
| BCL11A-13189 | − | GUGUGCGUACGGAGGAGGGUGU | 22 | 15511 |
| BCL11A-13190 | − | GGUGUGCGUACGGAGGAGGGUGU | 23 | 15512 |
| BCL11A-13191 | − | GGGUGUGCGUACGGAGGAGGGUGU | 24 | 15513 |
| BCL11A-11579 | − | UUUAGAGUCCGCGUGUGU | 18 | 15514 |
| BCL11A-11580 | − | UUUUAGAGUCCGCGUGUGU | 19 | 15515 |
| BCL11A-9586 | − | AUUUUAGAGUCCGCGUGUGU | 20 | 15516 |
| BCL11A-11581 | − | CAUUUUAGAGUCCGCGUGUGU | 21 | 15517 |
| BCL11A-11582 | − | UCAUUUUAGAGUCCGCGUGUGU | 22 | 15518 |
| BCL11A-11583 | − | UUCAUUUUAGAGUCCGCGUGUGU | 23 | 15519 |
| BCL11A-11584 | − | UUUCAUUUUAGAGUCCGCGUGUGU | 24 | 15520 |
| BCL11A-13192 | − | GACUUGGGCGCUGCCCUU | 18 | 15521 |
| BCL11A-13193 | − | AGACUUGGGCGCUGCCCUU | 19 | 15522 |
| BCL11A-13194 | − | GAGACUUGGGCGCUGCCCUU | 20 | 15523 |
| BCL11A-13195 | − | GGAGACUUGGGCGCUGCCCUU | 21 | 15524 |
| BCL11A-13196 | − | UGGAGACUUGGGCGCUGCCCUU | 22 | 15525 |
| BCL11A-13197 | − | CUGGAGACUUGGGCGCUGCCCUU | 23 | 15526 |
| BCL11A-13198 | − | CCUGGAGACUUGGGCGCUGCCCUU | 24 | 15527 |
| BCL11A-13199 | − | GGUCCCUGGCUCGGCCUU | 18 | 15528 |
| BCL11A-13200 | − | CGGUCCCUGGCUCGGCCUU | 19 | 15529 |
| BCL11A-10256 | − | CCGGUCCCUGGCUCGGCCUU | 20 | 15530 |
| BCL11A-13201 | − | AAGAGGUGAGACUGGCUU | 18 | 15531 |
| BCL11A-13202 | − | AAAGAGGUGAGACUGGCUU | 19 | 15532 |
| BCL11A-13203 | − | AAAAGAGGUGAGACUGGCUU | 20 | 15533 |
| BCL11A-13204 | − | GAAAAGAGGUGAGACUGGCUU | 21 | 15534 |
| BCL11A-13205 | − | AGAAAAGAGGUGAGACUGGCUU | 22 | 15535 |
| BCL11A-13206 | − | GAGAAAAGAGGUGAGACUGGCUU | 23 | 15536 |
| BCL11A-13207 | − | GGAGAAAAGAGGUGAGACUGGCUU | 24 | 15537 |
| BCL11A-13208 | − | AUGAACAAUGCUAAGGUU | 18 | 15538 |
| BCL11A-13209 | − | AAUGAACAAUGCUAAGGUU | 19 | 15539 |
| BCL11A-13210 | − | UAAUGAACAAUGCUAAGGUU | 20 | 15540 |
| BCL11A-13211 | − | AUAAUGAACAAUGCUAAGGUU | 21 | 15541 |
| BCL11A-13212 | − | AAUAAUGAACAAUGCUAAGGUU | 22 | 15542 |
| BCL11A-13213 | − | AAAUAAUGAACAAUGCUAAGGUU | 23 | 15543 |
| BCL11A-13214 | − | AAAAUAAUGAACAAUGCUAAGGUU | 24 | 15544 |
| BCL11A-13215 | − | GCCGCUUUAUUUCUCUUU | 18 | 15545 |
| BCL11A-13216 | − | CGCCGCUUUAUUUCUCUUU | 19 | 15546 |
| BCL11A-13217 | − | CCGCCGCUUUAUUUCUCUUU | 20 | 15547 |
| BCL11A-13218 | − | UCCGCCGCUUUAUUUCUCUUU | 21 | 15548 |
| BCL11A-13219 | − | UUCCGCCGCUUUAUUUCUCUUU | 22 | 15549 |
| BCL11A-13220 | − | UUUCCGCCGCUUUAUUUCUCUUU | 23 | 15550 |
| BCL11A-13221 | − | CUUUCCGCCGCUUUAUUUCUCUUU | 24 | 15551 |

[1106] Table 20A provides exemplary targeting domains for knocking down the BCL11A gene selected according to the first tier parameters. The targeting domains bind within 500 bp (e.g., upstream or downstream) of a transcription start site (TSS) and have a high level of orthogonality. It is contemplated herein that in an embodiment the targeting domain hybridizes to the target domain through complementary base pairing. Any of the targeting domains in the table can be used with a N. meningitidis eiCas9 molecule or eiCas9 fusion protein (e.g., an eiCas9 fused to a transcription repressor domain) to alter the BCL11A gene (e.g., reduce or eliminate BCL11A gene expression, BCL11A protein function, or the level of BCL11A protein). One or more gRNA may be used to target an eiCas9 to the promoter region of the BCL11A gene.

TABLE 20A
1st Tier

| | DNA | | Target Site | SEQ ID |
|---|---|---|---|---|
| gRNA Name | Strand | Targeting Domain | Length | NO: |
| BCL11A-13222 | + | ACACACCCCUCUCUCCC | 17 | 15552 |
| BCL11A-9477 | + | CUUACGCGAGAAUUCCC | 17 | 15553 |
| BCL11A-13223 | + | CCCUCUCUCCCCCUCGC | 17 | 15554 |
| BCL11A-13224 | + | UCUAGUCCUGCGCGCUC | 17 | 15555 |
| BCL11A-9638 | − | UUGAACUUGCAGCUCAG | 17 | 15556 |
| BCL11A-9482 | + | UUAAGUGCUGGGGUUUG | 17 | 15557 |
| BCL11A-13225 | + | CACGCGGACUCUAAAAU | 17 | 15558 |
| BCL11A-13226 | + | AAUUGUGGGAGAGCCGU | 17 | 15559 |
| BCL11A-13227 | − | GAUGUGUGUCCAUUGGU | 17 | 15560 |
| BCL11A-13228 | + | UGCACACACCCCUCUCUCCC | 20 | 15561 |
| BCL11A-9487 | + | UUACUUACGCGAGAAUUCCC | 20 | 15562 |
| BCL11A-13229 | + | CACCCCUCUCUCCCCCUCGC | 20 | 15563 |
| BCL11A-13230 | + | GCUUCUAGUCCUGCGCGCUC | 20 | 15564 |
| BCL11A-9738 | − | CACUUGAACUUGCAGCUCAG | 20 | 15565 |
| BCL11A-9491 | + | UGCUUAAGUGCUGGGGUUUG | 20 | 15566 |
| BCL11A-13231 | + | AUGAAUUGUGGGAGAGCCGU | 20 | 15567 |
| BCL11A-11567 | − | CCUGAUGUGUGUCCAUUGGU | 20 | 15568 |

[1107] Table 20B provides exemplary targeting domains for knocking down the BCL11A gene selected according to the second tier parameters. The targeting domains bind within 500 bp (e.g., upstream or downstream) of a transcription start site (TSS). It is contemplated herein that in an embodiment the targeting domain hybridizes to the target domain through complementary base pairing. Any of the targeting domains in the table can be used with a N. meningitidis eiCas9 molecule or eiCas9 fusion protein (e.g., an eiCas9 fused to a transcription repressor domain) to alter the BCL11A gene (e.g., reduce or eliminate BCL11A gene expression, BCL11A protein function, or the level of BCL11A protein). One or More gRNA may be used to target an eiCas9 to the promoter region of the BCL11A gene.

TABLE 20B
2nd Tier

| | DNA | | Target Site | |
|---|---|---|---|---|
| gRNA Name | Strand | Targeting Domain | Length | SEQ ID NO: |
| BCL11A-13232 | − | CCCUCCCCGCACUGGCC | 17 | 15569 |
| BCL11A-13233 | − | UUUUUUUUUUUUUUUUU | 17 | 15570 |
| BCL11A-13234 | − | UCCCCCUCCCCGCACUGGCC | 20 | 15571 |
| BCL11A-13235 | + | ACACACGCGGACUCUAAAAU | 20 | 15572 |
| BCL11A-13236 | − | UUUUUUUUUUUUUUUUUUUU | 20 | 15573 |

[1108] Table 20C provides exemplary targeting domains for knocking down the BCL11A gene selected according to the third tier parameters. The targeting domains bind within the additional 500 bp (e.g., upstream or downstream) of a transcription start site (TSS), e.g., extending to 1 kb upstream and downstream of a TSS. It is contemplated herein that in an embodiment the targeting domain hybridizes to the target domain through complementary base pairing. Any of the targeting domains in the table can be used with a N. meningitidis eiCas9 molecule or eiCas9 fusion protein (e.g., an eiCas9 fused to a transcription repressor domain) to alter the BCL11A gene (e.g., reduce or eliminate BCL11A gene expression, BCL11A protein function, or the level of BCL11A protein). One or more gRNA may be used to target an eiCas9 to the promoter region of the BCL11A gene.

TABLE 20C
3rd Tier

| | | | Target Site | SEQ ID |
|---|---|---|---|---|
| gRNA Name | DNA Strand | Targeting Domain | Length | NO: |
| BCL11A-13237 | − | GUGAGUACAAGUCUAAA | 17 | 15574 |
| BCL11A-13238 | − | GCUGGUGGGGAAAGGGA | 17 | 15575 |
| BCL11A-13239 | − | GUCCGGGAGCAACUCUA | 17 | 15576 |
| BCL11A-13240 | − | CCUUUUGUGCCGGCUCC | 17 | 15577 |
| BCL11A-13241 | − | ACCUGGCUUCCCUCCGC | 17 | 15578 |
| BCL11A-9896 | − | GCUCAGCUCUCAACUUC | 17 | 15579 |
| BCL11A-13242 | − | UCCUCUUUCCUCCUUUC | 17 | 15580 |
| BCL11A-13243 | − | GGGAGAAAAGAGGUGAG | 17 | 15581 |
| BCL11A-13244 | − | CAGCCCUCCAAACUUAG | 17 | 15582 |
| BCL11A-13245 | − | CUUUUCGAAAAGGAAUG | 17 | 15583 |
| BCL11A-13225 | + | CACGCGGACUCUAAAAU | 17 | 15584 |
| BCL11A-10006 | − | GAGCGCAGCCGCGGGCU | 17 | 15585 |
| BCL11A-13246 | − | GGAGUGAGUACAAGUCUAAA | 20 | 15586 |
| BCL11A-13247 | − | GGAGCUGGUGGGGAAAGGGA | 20 | 15587 |
| BCL11A-13248 | − | GGUGUCCGGGAGCAACUCUA | 20 | 15588 |
| BCL11A-13249 | − | CUGCCUUUUGUGCCGGCUCC | 20 | 15589 |
| BCL11A-13250 | − | UCUACCUGGCUUCCCUCCGC | 20 | 15590 |
| BCL11A-10131 | − | GAGGCUCAGCUCUCAACUUC | 20 | 15591 |
| BCL11A-13251 | − | UCCUCCUCUUUCCUCCUUUC | 20 | 15592 |
| BCL11A-13252 | − | CCGGGGAGAAAAGAGGUGAG | 20 | 15593 |
| BCL11A-13253 | − | CCGCAGCCCUCCAAACUUAG | 20 | 15594 |
| BCL11A-13254 | − | UCUCUUUUCGAAAAGGAAUG | 20 | 15595 |
| BCL11A-13235 | + | ACACACGCGGACUCUAAAAU | 20 | 15596 |
| BCL11A-10241 | − | CCCGAGCGCAGCCGCGGGCU | 20 | 15597 |

[1109] Table 21A provides exemplary targeting domains for removing (e.g., deleting) the enhancer region of the BCL11A gene selected according to the first tier parameters. The targeting domains bind within a region 5′ (51.5 to 51.7 kb downstream of TSS) or 3′ (65.1 to 65.3 kb downstream of TSS), and have a high level of orthogonality and starts with 5′G. It is contemplated herein that in an embodiment the targeting domain hybridizes to the target domain through complementary base pairing. Any of the targeting domains in the table can be used with a S. pyogenes Cas9 molecule that generates a double stranded break (Cas9 nuclease) or a single-stranded break (Cas9 nickase).

TABLE 21A
1st Tier

| | | | Target | | |
|---|---|---|---|---|---|
| | DNA | | Site | | SEQ ID |
| gRNA Name | Strand | Targeting Domain | Length | 5′ or 3′ | NO: |
| BCL11A-13255 | + | GCACUAGGUGAAAUCUC | 17 | 5′ | 15598 |
| BCL11A-13256 | − | GAAAGCAGUGUAAGGCU | 17 | 5′ | 15599 |
| BCL11A-13257 | − | GUAAUUAAGAAAGCAGUGUA | 20 | 5′ | 15600 |
| BCL11A-13258 | + | GUUGCACUAGGUGAAAUCUC | 20 | 5′ | 15601 |
| BCL11A-13259 | − | GGCUGUUUUGGAAUGUAGAG | 20 | 5′ | 15602 |
| BCL11A-13260 | − | GGCUGUUUUUGGAUCUU | 17 | 3′ | 15603 |
| BCL11A-13261 | + | GUGCUACUUAUACAAUUCAC | 20 | 3′ | 15604 |
| BCL11A-13262 | + | GAAAAUACUUACUGUACUGC | 20 | 3′ | 15605 |

[1110] Table 21B provides exemplary targeting domains for removing (e.g., deleting) the enhancer region of the BCL11A gene selected according to the second tier parameters. The targeting domains bind within a region 5′ (51.5 to 51.7 kb downstream of TSS) or 3′ (65.1 to 65.3 kb downstream of TSS) and have a high level of orthogonality. It is contemplated herein that in an embodiment the targeting domain hybridizes to the target domain through complementary base pairing. Any of the targeting domains in the table can be used with a S. pyogenes Cas9 molecule that generates a double stranded break (Cas9 nuclease) or a single-stranded break (Cas9 nickase).

TABLE 21B
2nd Tier

| | | | Target | | |
|---|---|---|---|---|---|
| | DNA | | Site | | SEQ ID |
| gRNA Name | Strand | Targeting Domain | Length | 5′ or 3′ | NO: |
| BCL11A-13263 | − | AUUAAGAAAGCAGUGUA | 17 | 5′ | 15606 |
| BCL11A-13264 | + | AUUUUACUAGUGAAUUA | 17 | 5′ | 15607 |
| BCL11A-13265 | + | AUUUAAGACGGGAAAAC | 17 | 5′ | 15608 |
| BCL11A-13266 | − | AGAAAGCAGUGUAAGGC | 17 | 5′ | 15609 |
| BCL11A-13267 | − | UGUUUUGGAAUGUAGAG | 17 | 5′ | 15610 |
| BCL11A-13268 | + | ACAACUUGUGUUGCACU | 17 | 5′ | 15611 |
| BCL11A-13269 | + | UCUCACAUAAAAAUUUAAGA | 20 | 5′ | 15612 |
| BCL11A-13270 | − | UUGGAAUGUAGAGAGGCAGA | 20 | 5′ | 15613 |
| BCL11A-13271 | + | AUUAUUUUACUAGUGAAUUA | 20 | 5′ | 15614 |
| BCL11A-13272 | + | AAAAUUUAAGACGGGAAAAC | 20 | 5′ | 15615 |
| BCL11A-13273 | + | CUCACAUAAAAAUUUAAGAC | 20 | 5′ | 15616 |
| BCL11A-13274 | + | UACACAACUUGUGUUGCACU | 20 | 5′ | 15617 |
| BCL11A-13275 | − | UAAGAAAGCAGUGUAAGGCU | 20 | 5′ | 15618 |
| BCL11A-13276 | − | AUUAGAAUAAAAGGCUGUUU | 20 | 5′ | 15619 |
| BCL11A-13277 | − | UAUUUACAGCCAUAACA | 17 | 3′ | 15620 |
| BCL11A-13278 | + | AUACUUACUGUACUGCA | 17 | 3′ | 15621 |
| BCL11A-13279 | + | CACUGGAAACCCUGUUA | 17 | 3′ | 15622 |
| BCL11A-13280 | − | CUAUUUACAGCCAUAAC | 17 | 3′ | 15623 |
| BCL11A-13281 | + | CUACUUAUACAAUUCAC | 17 | 3′ | 15624 |
| BCL11A-13282 | + | AAUACUUACUGUACUGC | 17 | 3′ | 15625 |
| BCL11A-13283 | + | UACUUACUGUACUGCAG | 17 | 3′ | 15626 |
| BCL11A-13284 | + | UGUACUGCAGGGGAAUU | 17 | 3′ | 15627 |
| BCL11A-13285 | − | UGGGUAGCAGUGGCUUU | 17 | 3′ | 15628 |
| BCL11A-13286 | − | UGGCUUUAGGCUGUUUU | 17 | 3′ | 15629 |
| BCL11A-13287 | − | AACUAUUUACAGCCAUAACA | 20 | 3′ | 15630 |
| BCL11A-13288 | + | AAAAUACUUACUGUACUGCA | 20 | 3′ | 15631 |
| BCL11A-13289 | + | AUUCACUGGAAACCCUGUUA | 20 | 3′ | 15632 |
| BCL11A-13290 | − | AAACUAUUUACAGCCAUAAC | 20 | 3′ | 15633 |
| BCL11A-13291 | + | AAAUACUUACUGUACUGCAG | 20 | 3′ | 15634 |
| BCL11A-13292 | + | UACUGUACUGCAGGGGAAUU | 20 | 3′ | 15635 |
| BCL11A-13293 | − | UUAGGCUGUUUUUGGAUCUU | 20 | 3′ | 15636 |
| BCL11A-13294 | − | CAGUGGCUUUAGGCUGUUUU | 20 | 3′ | 15637 |

[1111] Table 21C provides exemplary targeting domains for removing (e.g., deleting) the enhancer region of the BCL11A gene selected according to the third tier parameters. The targeting domains bind within a region 5′ (51.5 to 51.7 kb downstream of TSS) or 3′ (65.1 to 65.3 kb downstream of TSS) and starts with 5′G. It is contemplated herein that in an embodiment the targeting domain hybridizes to the target domain through complementary base pairing. Any of the targeting domains in the table can be used with a S. pyogenes Cas9 molecule that generates a double stranded break (Cas9 nuclease) or a single-stranded break (Cas9 nickase).

TABLE 21C
3rd Tier

| | DNA | | Target Site | | SEQ ID |
|---|---|---|---|---|---|
| gRNA Name | Strand | Targeting Domain | Length | 5′ or 3′ | NO: |
| BCL11A-13295 | − | GAAUGUAGAGAGGCAGA | 17 | 5′ | 15638 |
| BCL11A-13296 | − | GGAAUGUAGAGAGGCAG | 17 | 5′ | 15639 |
| BCL11A-13297 | − | GUAUUUUCUUUCAUUGG | 17 | 3′ | 15640 |
| BCL11A-13298 | − | GUAAGUAUUUUCUUUCAUUG | 20 | 3′ | 15641 |

[1112] Table 21D provides exemplary targeting domains for removing (e.g., deleting) the enhancer region of the BCL11A gene selected according to the fourth tier parameters. The targeting domains bind within a region 5′ (51.5 to 51.7 kb downstream of TSS) or 3′ (65.1 to 65.3 kb downstream of TSS). It is contemplated herein that in an embodiment the targeting domain hybridizes to the target domain through complementary base pairing. Any of the targeting domains in the table can be used with a S. pyogenes Cas9 molecule that generates a double stranded break (Cas9 nuclease) or a single-stranded break (Cas9 nickase).

TABLE 21D
4th Tier

| | | | Target | | |
|---|---|---|---|---|---|
| | DNA | | Site | | |
| gRNA Name | Strand | Targeting Domain | Length | 5′ or 3′ | SEQ ID NO: |
| BCL11A-13299 | − | AAAAUAAUUAGAAUAAA | 17 | 5′ | 15642 |
| BCL11A-13300 | + | CACAUAAAAAUUUAAGA | 17 | 5′ | 15643 |
| BCL11A-13301 | + | ACAUAAAAAUUUAAGAC | 17 | 5′ | 15644 |
| BCL11A-13302 | − | UGUAAGGCUGGGCGCAG | 17 | 5′ | 15645 |
| BCL11A-13303 | − | AAUGUAGAGAGGCAGAG | 17 | 5′ | 15646 |
| BCL11A-13304 | − | AGAAUAAAAGGCUGUUU | 17 | 5′ | 15647 |
| BCL11A-13305 | − | AGUAAAAUAAUUAGAAUAAA | 20 | 5′ | 15648 |
| BCL11A-13306 | − | UUAAGAAAGCAGUGUAAGGC | 20 | 5′ | 15649 |
| BCL11A-13307 | − | CAGUGUAAGGCUGGGCGCAG | 20 | 5′ | 15650 |
| BCL11A-13308 | − | UUUGGAAUGUAGAGAGGCAG | 20 | 5′ | 15651 |
| BCL11A-13309 | − | UGGAAUGUAGAGAGGCAGAG | 20 | 5′ | 15652 |
| BCL11A-13310 | − | AGUAUUUUCUUUCAUUG | 17 | 3′ | 15653 |
| BCL11A-13311 | − | UAAGUAUUUUCUUUCAU | 17 | 3′ | 15654 |
| BCL11A-13312 | − | AAGUAUUUUCUUUCAUU | 17 | 3′ | 15655 |
| BCL11A-13313 | − | UAAGUAUUUUCUUUCAUUGG | 20 | 3′ | 15656 |
| BCL11A-13314 | − | CAGUAAGUAUUUUCUUUCAU | 20 | 3′ | 15657 |
| BCL11A-13315 | − | AGUAAGUAUUUUCUUUCAUU | 20 | 3′ | 15658 |

[1113] Table 21E provides targeting domains for removing (e.g., deleting) the enhancer region of the BCL11A gene by dual targeting (e.g., dual double strand cleavage). It is contemplated herein that an upstream gRNA can be paired with a downstream gRNA to guide Cas9 nuclease pairs. Exemplary nickase pairs include a targeting domain from Group A and a second targeting domain from Group B, or include a targeting domain from Group C and a second targeting domain from Group D. It is contemplated herein that in an embodiment a targeting domain of Group A can be combined with any of the targeting domains of Group B; in an embodiment a targeting domain of Group C can be combined with any of the targeting domains of Group D. For example, BCL11A-13271 or BCL11A-13264 can be combined with BCL11A-13276; or BCL11A-13262 or BCL11A-13282 can be combined with BCL11A-13290 or BCL11A-13280.

TABLE 21E

| Group A | Group B |
|---|---|
| BCL11A-13271, BCL11A- | BCL11A-13276 |
| 13264 | |
| Group C | Group D |
| BCL11A-13262, BCL11A- | BCL11A-13290, |
| 13282 | BCL11A-13280 |

[1114] Table 22A provides exemplary targeting domains for removing (e.g., deleting) the enhancer region of the BCL11A gene selected according to the first tier parameters. The targeting domains bind within a region 5′ (51.5 to 51.7 kb downstream of TSS) or 3′ (65.1 to 65.3 kb downstream of TSS), have a high level of orthogonality, and start with 5′G. The PAM is NNGRRT. It is contemplated herein that in an embodiment the targeting domain hybridizes to the target domain through complementary base pairing. Any of the targeting domains in the table can be used with a S. aureus Cas9 molecule that generates a double stranded break (Cas9 nuclease) or a single-stranded break (Cas9 nickase).

TABLE 22A
1st Tier

| | | | Target | | |
|---|---|---|---|---|---|
| | DNA | | Site | | SEQ ID |
| gRNA Name | Strand | Targeting Domain | Length | 5′ or 3′ | NO: |
| BCL11A-13316 | − | GGGGCUGAUAUAACUUCU | 18 | 5′ | 15659 |
| BCL11A-13317 | − | GAGGGGCUGAUAUAACUUCU | 20 | 5′ | 15660 |
| BCL11A-13318 | − | GCAGAGGGGCUGAUAUAACUUCU | 23 | 5′ | 15661 |
| BCL11A-13319 | − | GGCAGAGGGGCUGAUAUAACUUCU | 24 | 5′ | 15662 |
| BCL11A-13320 | − | GCAAACUAUUUACAGCCAUAA | 21 | 3′ | 15663 |
| BCL11A-13321 | − | GAAGCAAACUAUUUACAGCCAUAA | 24 | 3′ | 15664 |
| BCL11A-13322 | − | GCCAUAACAGGGUUUCCA | 18 | 3′ | 15665 |
| BCL11A-13323 | − | GUGAAUUGUAUAAGUAGCA | 19 | 3′ | 15666 |
| BCL11A-13324 | − | GCAAAACUAGAAAGUUUUA | 19 | 3′ | 15667 |
| BCL11A-13325 | − | GCAGUGGCUUUAGGCUGUUU | 20 | 3′ | 15668 |
| BCL11A-13326 | − | GUAGCAGUGGCUUUAGGCUGUUU | 23 | 3′ | 15669 |
| BCL11A-13327 | − | GGUAGCAGUGGCUUUAGGCUGUUU | 24 | 3′ | 15670 |

[1115] Table 22B provides exemplary targeting domains for removing (e.g., deleting) the enhancer region of the BCL11A gene selected according to the second tier parameters. The targeting domains bind within a region 5′ (51.5 to 51.7 kb downstream of TSS) or 3′ (65.1 to 65.3 kb downstream of TSS), and have a high level of orthogonality. The PAM is NNGRRT. It is contemplated herein that in an embodiment the targeting domain hybridizes to the target domain through complementary base pairing. Any of the targeting domains in the table can be used with a S. aureus Cas9 molecule that generates a double stranded break (Cas9 nuclease) or a single-stranded break (Cas9 nickase).

TABLE 22B
2nd Tier

| | | | Target | | |
|---|---|---|---|---|---|
| | DNA | | Site | | SEQ ID |
| gRNA Name | Strand | Targeting Domain | Length | 5′ or 3′ | NO: |
| BCL11A-13328 | + | UUUAUUCUAAUUAUUUUACUA | 21 | 5′ | 15671 |
| BCL11A-13329 | + | UUUUAUUCUAAUUAUUUUACUA | 22 | 5′ | 15672 |
| BCL11A-13330 | + | CUUUUAUUCUAAUUAUUUUACUA | 23 | 5′ | 15673 |
| BCL11A-13331 | + | CCUUUUAUUCUAAUUAUUUUACUA | 24 | 5′ | 15674 |
| BCL11A-13332 | + | UAUUUUACUAGUGAAUUA | 18 | 5′ | 15675 |
| BCL11A-13333 | + | UUAUUUUACUAGUGAAUUA | 19 | 5′ | 15676 |
| BCL11A-13334 | + | AUUAUUUUACUAGUGAAUUA | 20 | 5′ | 15677 |
| BCL11A-13335 | + | AAUUAUUUUACUAGUGAAUUA | 21 | 5′ | 15678 |
| BCL11A-13336 | + | UAAUUAUUUUACUAGUGAAUUA | 22 | 5′ | 15679 |
| BCL11A-13337 | + | CUAAUUAUUUUACUAGUGAAUUA | 23 | 5′ | 15680 |
| BCL11A-13338 | + | UCUAAUUAUUUUACUAGUGAAUUA | 24 | 5′ | 15681 |
| BCL11A-13339 | − | AUUCACUAGUAAAAUAAU | 18 | 5′ | 15682 |
| BCL11A-13340 | − | AAUUCACUAGUAAAAUAAU | 19 | 5′ | 15683 |
| BCL11A-13341 | − | UAAUUCACUAGUAAAAUAAU | 20 | 5′ | 15684 |
| BCL11A-13342 | − | AGGGGCUGAUAUAACUUCU | 19 | 5′ | 15685 |
| BCL11A-13343 | − | AGAGGGGCUGAUAUAACUUCU | 21 | 5′ | 15686 |
| BCL11A-13344 | − | CAGAGGGGCUGAUAUAACUUCU | 22 | 5′ | 15687 |
| BCL11A-13345 | − | UAGAAUAAAAGGCUGUUU | 18 | 5′ | 15688 |
| BCL11A-13346 | − | UUAGAAUAAAAGGCUGUUU | 19 | 5′ | 15689 |
| BCL11A-13347 | − | AUUAGAAUAAAAGGCUGUUU | 20 | 5′ | 15690 |
| BCL11A-13348 | − | AAUUAGAAUAAAAGGCUGUUU | 21 | 5′ | 15691 |
| BCL11A-13349 | − | UAAUUAGAAUAAAAGGCUGUUU | 22 | 5′ | 15692 |
| BCL11A-13350 | − | AUAAUUAGAAUAAAAGGCUGUUU | 23 | 5′ | 15693 |
| BCL11A-13351 | − | AAUAAUUAGAAUAAAAGGCUGUUU | 24 | 5′ | 15694 |
| BCL11A-13352 | + | AUACUUACUGUACUGCAG | 18 | 3′ | 15695 |
| BCL11A-13353 | + | AAUACUUACUGUACUGCAG | 19 | 3′ | 15696 |
| BCL11A-13354 | + | AAAUACUUACUGUACUGCAG | 20 | 3′ | 15697 |
| BCL11A-13355 | − | AACUAUUUACAGCCAUAA | 18 | 3′ | 15698 |
| BCL11A-13356 | − | AAACUAUUUACAGCCAUAA | 19 | 3′ | 15699 |
| BCL11A-13357 | − | CAAACUAUUUACAGCCAUAA | 20 | 3′ | 15700 |
| BCL11A-13358 | − | AGCAAACUAUUUACAGCCAUAA | 22 | 3′ | 15701 |
| BCL11A-13359 | − | AAGCAAACUAUUUACAGCCAUAA | 23 | 3′ | 15702 |
| BCL11A-13360 | − | AGCCAUAACAGGGUUUCCA | 19 | 3′ | 15703 |
| BCL11A-13361 | − | CAGCCAUAACAGGGUUUCCA | 20 | 3′ | 15704 |
| BCL11A-13362 | − | ACAGCCAUAACAGGGUUUCCA | 21 | 3′ | 15705 |
| BCL11A-13363 | − | UACAGCCAUAACAGGGUUUCCA | 22 | 3′ | 15706 |
| BCL11A-13364 | − | UUACAGCCAUAACAGGGUUUCCA | 23 | 3′ | 15707 |
| BCL11A-13365 | − | UUUACAGCCAUAACAGGGUUUCCA | 24 | 3′ | 15708 |
| BCL11A-13366 | − | UGAAUUGUAUAAGUAGCA | 18 | 3′ | 15709 |
| BCL11A-13367 | − | AGUGAAUUGUAUAAGUAGCA | 20 | 3′ | 15710 |
| BCL11A-13368 | − | CAGUGAAUUGUAUAAGUAGCA | 21 | 3′ | 15711 |
| BCL11A-13369 | − | CCAGUGAAUUGUAUAAGUAGCA | 22 | 3′ | 15712 |
| BCL11A-13370 | − | UCCAGUGAAUUGUAUAAGUAGCA | 23 | 3′ | 15713 |
| BCL11A-13371 | − | UUCCAGUGAAUUGUAUAAGUAGCA | 24 | 3′ | 15714 |
| BCL11A-13372 | − | CAAAACUAGAAAGUUUUA | 18 | 3′ | 15715 |
| BCL11A-13373 | − | AGCAAAACUAGAAAGUUUUA | 20 | 3′ | 15716 |
| BCL11A-13374 | − | AGUGGCUUUAGGCUGUUU | 18 | 3′ | 15717 |
| BCL11A-13375 | − | CAGUGGCUUUAGGCUGUUU | 19 | 3′ | 15718 |
| BCL11A-13376 | − | AGCAGUGGCUUUAGGCUGUUU | 21 | 3′ | 15719 |
| BCL11A-13377 | − | UAGCAGUGGCUUUAGGCUGUUU | 22 | 3′ | 15720 |

[1116] Table 22C provides exemplary targeting domains for removing (e.g., deleting) the enhancer region of the BCL11A gene selected according to the third tier parameters. The targeting domains bind within a region 5′ (51.5 to 51.7 kb downstream of TSS) or 3′ (65.1 to 65.3 kb downstream of TSS), and start with 5′G. The PAM is NNGRRT. It is contemplated herein that in an embodiment the targeting domain hybridizes to the target domain through complementary base pairing. Any of the targeting domains in the table can be used with a S. aureus Cas9 molecule that generates a double stranded break (Cas9 nuclease) or a single-stranded break (Cas9 nickase).

TABLE 22C
3rd Tier

| | | | Target | | |
|---|---|---|---|---|---|
| | DNA | | Site | | SEQ ID |
| gRNA Name | Strand | Targeting Domain | Length | 5′ or 3′ | NO: |
| BCL11A-13378 | + | GAAAAUACUUACUGUACUGCAG | 22 | 3′ | 15721 |
| BCL11A-13379 | − | GUUAAGCAAAACUAGAAAGUUUUA | 24 | 3′ | 15722 |

[1117] Table 22D provides exemplary targeting domains for removing (e.g., deleting) the enhancer region of the BCL11A gene selected according to the second tier parameters. The targeting domains bind within a region 5′ (51.5 to 51.7 kb downstream of TSS) or 3′ (65.1 to 65.3 kb downstream of TSS), and the PAM is NNGRRT. It is contemplated herein that in an embodiment the targeting domain hybridizes to the target domain through complementary base pairing. Any of the targeting domains in the table can be used with a S. aureus Cas9 molecule that generates a double stranded break (Cas9 nuclease) or a single-stranded break (Cas9 nickase).

TABLE 22D
4th Tier

| | | | Target | | |
|---|---|---|---|---|---|
| | DNA | | Site | | SEQ ID |
| gRNA Name | Strand | Targeting Domain | Length | 5′ or 3′ | NO: |
| BCL11A-13380 | + | AUUCUAAUUAUUUUACUA | 18 | 5′ | 15723 |
| BCL11A-13381 | + | UAUUCUAAUUAUUUUACUA | 19 | 5′ | 15724 |
| BCL11A-13382 | + | UUAUUCUAAUUAUUUUACUA | 20 | 5′ | 15725 |
| BCL11A-13383 | − | AUAAUUCACUAGUAAAAUAAU | 21 | 5′ | 15726 |
| BCL11A-13384 | − | CAUAAUUCACUAGUAAAAUAAU | 22 | 5′ | 15727 |
| BCL11A-13385 | − | CCAUAAUUCACUAGUAAAAUAAU | 23 | 5′ | 15728 |
| BCL11A-13386 | − | UCCAUAAUUCACUAGUAAAAUAAU | 24 | 5′ | 15729 |
| BCL11A-13387 | + | AAAAUACUUACUGUACUGCAG | 21 | 3′ | 15730 |
| BCL11A-13388 | + | AGAAAAUACUUACUGUACUGCAG | 23 | 3′ | 15731 |
| BCL11A-13389 | + | AAGAAAAUACUUACUGUACUGCAG | 24 | 3′ | 15732 |
| BCL11A-13390 | − | AAGCAAAACUAGAAAGUUUUA | 21 | 3′ | 15733 |
| BCL11A-13391 | − | UAAGCAAAACUAGAAAGUUUUA | 22 | 3′ | 15734 |
| BCL11A-13392 | − | UUAAGCAAAACUAGAAAGUUUUA | 23 | 3′ | 15735 |

[1118] Table 22E provides exemplary targeting domains for removing (e.g., deleting) the enhancer region of the BCL11A gene selected according to the third tier parameters. The targeting domains bind within a region 5′ (51.5 to 51.7 kb downstream of TSS) or 3′ (65.1 to 65.3 kb downstream of TSS), and the PAM is NNGRRV. It is contemplated herein that in an embodiment the targeting domain hybridizes to the target domain through complementary base pairing. Any of the targeting domains in the table can be used with a S. aureus Cas9 molecule that generates a double stranded break (Cas9 nuclease) or a single-stranded break (Cas9 nickase).

TABLE 22E
5th Tier

| | | | Target | | |
|---|---|---|---|---|---|
| | DNA | | Site | | SEQ ID |
| gRNA Name | Strand | Targeting Domain | Length | 5′ or 3′ | NO: |
| BCL11A-13393 | + | AAAUUUAAGACGGGAAAA | 18 | 5′ | 15736 |
| BCL11A-13394 | + | AAAAUUUAAGACGGGAAAA | 19 | 5′ | 15737 |
| BCL11A-13395 | + | AAAAAUUUAAGACGGGAAAA | 20 | 5′ | 15738 |
| BCL11A-13396 | + | UAAAAAUUUAAGACGGGAAAA | 21 | 5′ | 15739 |
| BCL11A-13397 | + | AUAAAAAUUUAAGACGGGAAAA | 22 | 5′ | 15740 |
| BCL11A-13398 | + | CAUAAAAAUUUAAGACGGGAAAA | 23 | 5′ | 15741 |
| BCL11A-13399 | + | ACAUAAAAAUUUAAGACGGGAAAA | 24 | 5′ | 15742 |
| BCL11A-13400 | + | UCACAUAAAAAUUUAAGA | 18 | 5′ | 15743 |
| BCL11A-13401 | + | CUCACAUAAAAAUUUAAGA | 19 | 5′ | 15744 |
| BCL11A-13402 | + | UCUCACAUAAAAAUUUAAGA | 20 | 5′ | 15745 |
| BCL11A-13403 | + | AUCUCACAUAAAAAUUUAAGA | 21 | 5′ | 15746 |
| BCL11A-13404 | + | CAUCUCACAUAAAAAUUUAAGA | 22 | 5′ | 15747 |
| BCL11A-13405 | + | UCAUCUCACAUAAAAAUUUAAGA | 23 | 5′ | 15748 |
| BCL11A-13406 | + | CUCAUCUCACAUAAAAAUUUAAGA | 24 | 5′ | 15749 |
| BCL11A-13407 | + | AAUUUAAGACGGGAAAAC | 18 | 5′ | 15750 |
| BCL11A-13408 | + | AAAUUUAAGACGGGAAAAC | 19 | 5′ | 15751 |
| BCL11A-13409 | + | AAAAUUUAAGACGGGAAAAC | 20 | 5′ | 15752 |
| BCL11A-13410 | + | AAAAAUUUAAGACGGGAAAAC | 21 | 5′ | 15753 |
| BCL11A-13411 | + | UAAAAAUUUAAGACGGGAAAAC | 22 | 5′ | 15754 |
| BCL11A-13412 | + | AUAAAAAUUUAAGACGGGAAAAC | 23 | 5′ | 15755 |
| BCL11A-13413 | + | CAUAAAAAUUUAAGACGGGAAAAC | 24 | 5′ | 15756 |
| BCL11A-13414 | + | CACAUAAAAAUUUAAGAC | 18 | 5′ | 15757 |
| BCL11A-13415 | + | UCACAUAAAAAUUUAAGAC | 19 | 5′ | 15758 |
| BCL11A-13416 | + | CUCACAUAAAAAUUUAAGAC | 20 | 5′ | 15759 |
| BCL11A-13417 | + | UCUCACAUAAAAAUUUAAGAC | 21 | 5′ | 15760 |
| BCL11A-13418 | + | AUCUCACAUAAAAAUUUAAGAC | 22 | 5′ | 15761 |
| BCL11A-13419 | + | CAUCUCACAUAAAAAUUUAAGAC | 23 | 5′ | 15762 |
| BCL11A-13420 | + | UCAUCUCACAUAAAAAUUUAAGAC | 24 | 5′ | 15763 |
| BCL11A-13421 | + | CUCACAUAAAAAUUUAAG | 18 | 5′ | 15764 |
| BCL11A-13422 | + | UCUCACAUAAAAAUUUAAG | 19 | 5′ | 15765 |
| BCL11A-13423 | + | AUCUCACAUAAAAAUUUAAG | 20 | 5′ | 15766 |
| BCL11A-13424 | + | CAUCUCACAUAAAAAUUUAAG | 21 | 5′ | 15767 |
| BCL11A-13425 | + | UCAUCUCACAUAAAAAUUUAAG | 22 | 5′ | 15768 |
| BCL11A-13426 | + | CUCAUCUCACAUAAAAAUUUAAG | 23 | 5′ | 15769 |
| BCL11A-13427 | + | GCUCAUCUCACAUAAAAAUUUAAG | 24 | 5′ | 15770 |
| BCL11A-13428 | + | CAACUUGUGUUGCACUAG | 18 | 5′ | 15771 |
| BCL11A-13429 | + | ACAACUUGUGUUGCACUAG | 19 | 5′ | 15772 |
| BCL11A-13430 | + | CACAACUUGUGUUGCACUAG | 20 | 5′ | 15773 |
| BCL11A-13431 | + | ACACAACUUGUGUUGCACUAG | 21 | 5′ | 15774 |
| BCL11A-13432 | + | UACACAACUUGUGUUGCACUAG | 22 | 5′ | 15775 |
| BCL11A-13433 | + | CUACACAACUUGUGUUGCACUAG | 23 | 5′ | 15776 |
| BCL11A-13434 | + | UCUACACAACUUGUGUUGCACUAG | 24 | 5′ | 15777 |
| BCL11A-13435 | + | AACAGGAAGAUGCAUUCU | 18 | 5′ | 15778 |
| BCL11A-13436 | + | AAACAGGAAGAUGCAUUCU | 19 | 5′ | 15779 |
| BCL11A-13437 | + | AAAACAGGAAGAUGCAUUCU | 20 | 5′ | 15780 |
| BCL11A-13438 | + | GAAAACAGGAAGAUGCAUUCU | 21 | 5′ | 15781 |
| BCL11A-13439 | + | GGAAAACAGGAAGAUGCAUUCU | 22 | 5′ | 15782 |
| BCL11A-13440 | + | GGGAAAACAGGAAGAUGCAUUCU | 23 | 5′ | 15783 |
| BCL11A-13441 | + | CGGGAAAACAGGAAGAUGCAUUCU | 24 | 5′ | 15784 |
| BCL11A-13442 | + | UUAUUUUACUAGUGAAUU | 18 | 5′ | 15785 |
| BCL11A-13443 | + | AUUAUUUUACUAGUGAAUU | 19 | 5′ | 15786 |
| BCL11A-13444 | + | AAUUAUUUUACUAGUGAAUU | 20 | 5′ | 15787 |
| BCL11A-13445 | + | UAAUUAUUUUACUAGUGAAUU | 21 | 5′ | 15788 |
| BCL11A-13446 | + | CUAAUUAUUUUACUAGUGAAUU | 22 | 5′ | 15789 |
| BCL11A-13447 | + | UCUAAUUAUUUUACUAGUGAAUU | 23 | 5′ | 15790 |
| BCL11A-13448 | + | UUCUAAUUAUUUUACUAGUGAAUU | 24 | 5′ | 15791 |
| BCL11A-13449 | + | AAAACAGGAAGAUGCAUU | 18 | 5′ | 15792 |
| BCL11A-13450 | + | GAAAACAGGAAGAUGCAUU | 19 | 5′ | 15793 |
| BCL11A-13451 | + | GGAAAACAGGAAGAUGCAUU | 20 | 5′ | 15794 |
| BCL11A-13452 | + | GGGAAAACAGGAAGAUGCAUU | 21 | 5′ | 15795 |
| BCL11A-13453 | + | CGGGAAAACAGGAAGAUGCAUU | 22 | 5′ | 15796 |
| BCL11A-13454 | + | ACGGGAAAACAGGAAGAUGCAUU | 23 | 5′ | 15797 |
| BCL11A-13455 | + | GACGGGAAAACAGGAAGAUGCAUU | 24 | 5′ | 15798 |
| BCL11A-13456 | − | UUGGAAUGUAGAGAGGCA | 18 | 5′ | 15799 |
| BCL11A-13457 | − | UUUGGAAUGUAGAGAGGCA | 19 | 5′ | 15800 |
| BCL11A-13458 | − | UUUUGGAAUGUAGAGAGGCA | 20 | 5′ | 15801 |
| BCL11A-13459 | − | GUUUUGGAAUGUAGAGAGGCA | 21 | 5′ | 15802 |
| BCL11A-13460 | − | UGUUUUGGAAUGUAGAGAGGCA | 22 | 5′ | 15803 |
| BCL11A-13461 | − | CUGUUUUGGAAUGUAGAGAGGCA | 23 | 5′ | 15804 |
| BCL11A-13462 | − | GCUGUUUUGGAAUGUAGAGAGGCA | 24 | 5′ | 15805 |
| BCL11A-13463 | − | CAACACAAGUUGUGUAGA | 18 | 5′ | 15806 |
| BCL11A-13464 | − | GCAACACAAGUUGUGUAGA | 19 | 5′ | 15807 |
| BCL11A-13465 | − | UGCAACACAAGUUGUGUAGA | 20 | 5′ | 15808 |
| BCL11A-13466 | − | GUGCAACACAAGUUGUGUAGA | 21 | 5′ | 15809 |
| BCL11A-13467 | − | AGUGCAACACAAGUUGUGUAGA | 22 | 5′ | 15810 |
| BCL11A-13468 | − | UAGUGCAACACAAGUUGUGUAGA | 23 | 5′ | 15811 |
| BCL11A-13469 | − | CUAGUGCAACACAAGUUGUGUAGA | 24 | 5′ | 15812 |
| BCL11A-13470 | − | AGGCUGUUUUGGAAUGUA | 18 | 5′ | 15813 |
| BCL11A-13471 | − | AAGGCUGUUUUGGAAUGUA | 19 | 5′ | 15814 |
| BCL11A-13472 | − | AAAGGCUGUUUUGGAAUGUA | 20 | 5′ | 15815 |
| BCL11A-13473 | − | AAAAGGCUGUUUUGGAAUGUA | 21 | 5′ | 15816 |
| BCL11A-13474 | − | UAAAAGGCUGUUUUGGAAUGUA | 22 | 5′ | 15817 |
| BCL11A-13475 | − | AUAAAAGGCUGUUUUGGAAUGUA | 23 | 5′ | 15818 |
| BCL11A-13476 | − | AAUAAAAGGCUGUUUUGGAAUGUA | 24 | 5′ | 15819 |
| BCL11A-13477 | − | UGGAAUGUAGAGAGGCAG | 18 | 5′ | 15820 |
| BCL11A-13478 | − | UUGGAAUGUAGAGAGGCAG | 19 | 5′ | 15821 |
| BCL11A-13479 | − | UUUGGAAUGUAGAGAGGCAG | 20 | 5′ | 15822 |
| BCL11A-13480 | − | UUUUGGAAUGUAGAGAGGCAG | 21 | 5′ | 15823 |
| BCL11A-13481 | − | GUUUUGGAAUGUAGAGAGGCAG | 22 | 5′ | 15824 |
| BCL11A-13482 | − | UGUUUUGGAAUGUAGAGAGGCAG | 23 | 5′ | 15825 |
| BCL11A-13483 | − | CUGUUUUGGAAUGUAGAGAGGCAG | 24 | 5′ | 15826 |
| BCL11A-13484 | − | CUUAAAUUUUUAUGUGAG | 18 | 5′ | 15827 |
| BCL11A-13485 | − | UCUUAAAUUUUUAUGUGAG | 19 | 5′ | 15828 |
| BCL11A-13486 | − | GUCUUAAAUUUUUAUGUGAG | 20 | 5′ | 15829 |
| BCL11A-13487 | − | CGUCUUAAAUUUUUAUGUGAG | 21 | 5′ | 15830 |
| BCL11A-13488 | − | CCGUCUUAAAUUUUUAUGUGAG | 22 | 5′ | 15831 |
| BCL11A-13489 | − | CCCGUCUUAAAUUUUUAUGUGAG | 23 | 5′ | 15832 |
| BCL11A-13490 | − | UCCCGUCUUAAAUUUUUAUGUGAG | 24 | 5′ | 15833 |
| BCL11A-13491 | − | UAAGAAAGCAGUGUAAGG | 18 | 5′ | 15834 |
| BCL11A-13492 | − | UUAAGAAAGCAGUGUAAGG | 19 | 5′ | 15835 |
| BCL11A-13493 | − | AUUAAGAAAGCAGUGUAAGG | 20 | 5′ | 15836 |
| BCL11A-13494 | − | AAUUAAGAAAGCAGUGUAAGG | 21 | 5′ | 15837 |
| BCL11A-13495 | − | UAAUUAAGAAAGCAGUGUAAGG | 22 | 5′ | 15838 |
| BCL11A-13496 | − | GUAAUUAAGAAAGCAGUGUAAGG | 23 | 5′ | 15839 |
| BCL11A-13497 | − | UGUAAUUAAGAAAGCAGUGUAAGG | 24 | 5′ | 15840 |
| BCL11A-13498 | − | UUUUGGAAUGUAGAGAGG | 18 | 5′ | 15841 |
| BCL11A-13499 | − | GUUUUGGAAUGUAGAGAGG | 19 | 5′ | 15842 |
| BCL11A-13500 | − | UGUUUUGGAAUGUAGAGAGG | 20 | 5′ | 15843 |
| BCL11A-13501 | − | CUGUUUUGGAAUGUAGAGAGG | 21 | 5′ | 15844 |
| BCL11A-13502 | − | GCUGUUUUGGAAUGUAGAGAGG | 22 | 5′ | 15845 |
| BCL11A-13503 | − | GGCUGUUUUGGAAUGUAGAGAGG | 23 | 5′ | 15846 |
| BCL11A-13504 | − | AGGCUGUUUUGGAAUGUAGAGAGG | 24 | 5′ | 15847 |
| BCL11A-13505 | − | AAAGGCUGUUUUGGAAUG | 18 | 5′ | 15848 |
| BCL11A-13506 | − | AAAAGGCUGUUUUGGAAUG | 19 | 5′ | 15849 |
| BCL11A-13507 | − | UAAAAGGCUGUUUUGGAAUG | 20 | 5′ | 15850 |
| BCL11A-13508 | − | AUAAAAGGCUGUUUUGGAAUG | 21 | 5′ | 15851 |
| BCL11A-13509 | − | AAUAAAAGGCUGUUUUGGAAUG | 22 | 5′ | 15852 |
| BCL11A-13510 | − | GAAUAAAAGGCUGUUUUGGAAUG | 23 | 5′ | 15853 |
| BCL11A-13511 | − | AGAAUAAAAGGCUGUUUUGGAAUG | 24 | 5′ | 15854 |
| BCL11A-13512 | − | AGUGCAACACAAGUUGUG | 18 | 5′ | 15855 |
| BCL11A-13513 | − | UAGUGCAACACAAGUUGUG | 19 | 5′ | 15856 |
| BCL11A-13514 | − | CUAGUGCAACACAAGUUGUG | 20 | 5′ | 15857 |
| BCL11A-13515 | − | CCUAGUGCAACACAAGUUGUG | 21 | 5′ | 15858 |
| BCL11A-13516 | − | ACCUAGUGCAACACAAGUUGUG | 22 | 5′ | 15859 |
| BCL11A-13517 | − | CACCUAGUGCAACACAAGUUGUG | 23 | 5′ | 15860 |
| BCL11A-13518 | − | UCACCUAGUGCAACACAAGUUGUG | 24 | 5′ | 15861 |
| BCL11A-13519 | − | CCCGUCUUAAAUUUUUAU | 18 | 5′ | 15862 |
| BCL11A-13520 | − | UCCCGUCUUAAAUUUUUAU | 19 | 5′ | 15863 |
| BCL11A-13521 | − | UUCCCGUCUUAAAUUUUUAU | 20 | 5′ | 15864 |
| BCL11A-13522 | − | UUUCCCGUCUUAAAUUUUUAU | 21 | 5′ | 15865 |
| BCL11A-13523 | − | UUUUCCCGUCUUAAAUUUUUAU | 22 | 5′ | 15866 |
| BCL11A-13524 | − | GUUUUCCCGUCUUAAAUUUUUAU | 23 | 5′ | 15867 |
| BCL11A-13525 | − | UGUUUUCCCGUCUUAAAUUUUUAU | 24 | 5′ | 15868 |
| BCL11A-13526 | − | GAGCACACUGCUGUAAUU | 18 | 5′ | 15869 |
| BCL11A-13527 | − | UGAGCACACUGCUGUAAUU | 19 | 5′ | 15870 |
| BCL11A-13528 | − | AUGAGCACACUGCUGUAAUU | 20 | 5′ | 15871 |
| BCL11A-13529 | − | GAUGAGCACACUGCUGUAAUU | 21 | 5′ | 15872 |
| BCL11A-13530 | − | AGAUGAGCACACUGCUGUAAUU | 22 | 5′ | 15873 |
| BCL11A-13531 | − | GAGAUGAGCACACUGCUGUAAUU | 23 | 5′ | 15874 |
| BCL11A-13532 | − | UGAGAUGAGCACACUGCUGUAAUU | 24 | 5′ | 15875 |
| BCL11A-13533 | − | UUAGAAUAAAAGGCUGUU | 18 | 5′ | 15876 |
| BCL11A-13534 | − | AUUAGAAUAAAAGGCUGUU | 19 | 5′ | 15877 |
| BCL11A-13535 | − | AAUUAGAAUAAAAGGCUGUU | 20 | 5′ | 15878 |
| BCL11A-13536 | − | UAAUUAGAAUAAAAGGCUGUU | 21 | 5′ | 15879 |
| BCL11A-13537 | − | AUAAUUAGAAUAAAAGGCUGUU | 22 | 5′ | 15880 |
| BCL11A-13538 | − | AAUAAUUAGAAUAAAAGGCUGUU | 23 | 5′ | 15881 |
| BCL11A-13539 | − | AAAUAAUUAGAAUAAAAGGCUGUU | 24 | 5′ | 15882 |
| BCL11A-13540 | + | UUUCAUUUUUUGCUGACA | 18 | 3′ | 15883 |
| BCL11A-13541 | + | GUUUCAUUUUUUGCUGACA | 19 | 3′ | 15884 |
| BCL11A-13542 | + | UGUUUCAUUUUUUGCUGACA | 20 | 3′ | 15885 |
| BCL11A-13543 | + | UUGUUUCAUUUUUUGCUGACA | 21 | 3′ | 15886 |
| BCL11A-13544 | + | UUUGUUUCAUUUUUUGCUGACA | 22 | 3′ | 15887 |
| BCL11A-13545 | + | UUUUGUUUCAUUUUUUGCUGACA | 23 | 3′ | 15888 |
| BCL11A-13546 | + | UUUUUGUUUCAUUUUUUGCUGACA | 24 | 3′ | 15889 |
| BCL11A-13547 | + | AAUAGUUUGCUUCCCCCA | 18 | 3′ | 15890 |
| BCL11A-13548 | + | AAAUAGUUUGCUUCCCCCA | 19 | 3′ | 15891 |
| BCL11A-13549 | + | UAAAUAGUUUGCUUCCCCCA | 20 | 3′ | 15892 |
| BCL11A-13550 | + | GUAAAUAGUUUGCUUCCCCCA | 21 | 3′ | 15893 |
| BCL11A-13551 | + | UGUAAAUAGUUUGCUUCCCCCA | 22 | 3′ | 15894 |
| BCL11A-13552 | + | CUGUAAAUAGUUUGCUUCCCCCA | 23 | 3′ | 15895 |
| BCL11A-13553 | + | GCUGUAAAUAGUUUGCUUCCCCCA | 24 | 3′ | 15896 |
| BCL11A-13554 | + | AAUACUUACUGUACUGCA | 18 | 3′ | 15897 |
| BCL11A-13555 | + | AAAUACUUACUGUACUGCA | 19 | 3′ | 15898 |
| BCL11A-13556 | + | AAAAUACUUACUGUACUGCA | 20 | 3′ | 15899 |
| BCL11A-13557 | + | GAAAAUACUUACUGUACUGCA | 21 | 3′ | 15900 |
| BCL11A-13558 | + | AGAAAAUACUUACUGUACUGCA | 22 | 3′ | 15901 |
| BCL11A-13559 | + | AAGAAAAUACUUACUGUACUGCA | 23 | 3′ | 15902 |
| BCL11A-13560 | + | AAAGAAAAUACUUACUGUACUGCA | 24 | 3′ | 15903 |
| BCL11A-13561 | + | UGCUACUUAUACAAUUCA | 18 | 3′ | 15904 |
| BCL11A-13562 | + | GUGCUACUUAUACAAUUCA | 19 | 3′ | 15905 |
| BCL11A-13563 | + | AGUGCUACUUAUACAAUUCA | 20 | 3′ | 15906 |
| BCL11A-13564 | + | CAGUGCUACUUAUACAAUUCA | 21 | 3′ | 15907 |
| BCL11A-13565 | + | UCAGUGCUACUUAUACAAUUCA | 22 | 3′ | 15908 |
| BCL11A-13566 | + | CUCAGUGCUACUUAUACAAUUCA | 23 | 3′ | 15909 |
| BCL11A-13567 | + | ACUCAGUGCUACUUAUACAAUUCA | 24 | 3′ | 15910 |
| BCL11A-13568 | + | GUUUGCUUCCCCCAAUGA | 18 | 3′ | 15911 |
| BCL11A-13569 | + | AGUUUGCUUCCCCCAAUGA | 19 | 3′ | 15912 |
| BCL11A-13570 | + | UAGUUUGCUUCCCCCAAUGA | 20 | 3′ | 15913 |
| BCL11A-13571 | + | AUAGUUUGCUUCCCCCAAUGA | 21 | 3′ | 15914 |
| BCL11A-13572 | + | AAUAGUUUGCUUCCCCCAAUGA | 22 | 3′ | 15915 |
| BCL11A-13573 | + | AAAUAGUUUGCUUCCCCCAAUGA | 23 | 3′ | 15916 |
| BCL11A-13574 | + | UAAAUAGUUUGCUUCCCCCAAUGA | 24 | 3′ | 15917 |
| BCL11A-13575 | + | UUUCUAGUUUUGCUUAAC | 18 | 3′ | 15918 |
| BCL11A-13576 | + | CUUUCUAGUUUUGCUUAAC | 19 | 3′ | 15919 |
| BCL11A-13577 | + | ACUUUCUAGUUUUGCUUAAC | 20 | 3′ | 15920 |
| BCL11A-13578 | + | AACUUUCUAGUUUUGCUUAAC | 21 | 3′ | 15921 |
| BCL11A-13579 | + | AAACUUUCUAGUUUUGCUUAAC | 22 | 3′ | 15922 |
| BCL11A-13580 | + | AAAACUUUCUAGUUUUGCUUAAC | 23 | 3′ | 15923 |
| BCL11A-13581 | + | UAAAACUUUCUAGUUUUGCUUAAC | 24 | 3′ | 15924 |
| BCL11A-13582 | + | GCUACUUAUACAAUUCAC | 18 | 3′ | 15925 |
| BCL11A-13583 | + | UGCUACUUAUACAAUUCAC | 19 | 3′ | 15926 |
| BCL11A-13584 | + | GUGCUACUUAUACAAUUCAC | 20 | 3′ | 15927 |
| BCL11A-13585 | + | AGUGCUACUUAUACAAUUCAC | 21 | 3′ | 15928 |
| BCL11A-13586 | + | CAGUGCUACUUAUACAAUUCAC | 22 | 3′ | 15929 |
| BCL11A-13587 | + | UCAGUGCUACUUAUACAAUUCAC | 23 | 3′ | 15930 |
| BCL11A-13588 | + | CUCAGUGCUACUUAUACAAUUCAC | 24 | 3′ | 15931 |
| BCL11A-13589 | + | AAAUACUUACUGUACUGC | 18 | 3′ | 15932 |
| BCL11A-13590 | + | AAAAUACUUACUGUACUGC | 19 | 3′ | 15933 |
| BCL11A-13591 | + | GAAAAUACUUACUGUACUGC | 20 | 3′ | 15934 |
| BCL11A-13592 | + | AGAAAAUACUUACUGUACUGC | 21 | 3′ | 15935 |
| BCL11A-13593 | + | AAGAAAAUACUUACUGUACUGC | 22 | 3′ | 15936 |
| BCL11A-13594 | + | AAAGAAAAUACUUACUGUACUGC | 23 | 3′ | 15937 |
| BCL11A-13595 | + | GAAAGAAAAUACUUACUGUACUGC | 24 | 3′ | 15938 |
| BCL11A-13596 | + | AAAAUACUUACUGUACUG | 18 | 3′ | 15939 |
| BCL11A-13597 | + | GAAAAUACUUACUGUACUG | 19 | 3′ | 15940 |
| BCL11A-13598 | + | AGAAAAUACUUACUGUACUG | 20 | 3′ | 15941 |
| BCL11A-13599 | + | AAGAAAAUACUUACUGUACUG | 21 | 3′ | 15942 |
| BCL11A-13600 | + | AAAGAAAAUACUUACUGUACUG | 22 | 3′ | 15943 |
| BCL11A-13601 | + | GAAAGAAAAUACUUACUGUACUG | 23 | 3′ | 15944 |
| BCL11A-13602 | + | UGAAAGAAAAUACUUACUGUACUG | 24 | 3′ | 15945 |
| BCL11A-13603 | − | GUUCUGUGUCAGCAAAAA | 18 | 3′ | 15946 |
| BCL11A-13604 | − | AGUUCUGUGUCAGCAAAAA | 19 | 3′ | 15947 |
| BCL11A-13605 | − | GAGUUCUGUGUCAGCAAAAA | 20 | 3′ | 15948 |
| BCL11A-13606 | − | UGAGUUCUGUGUCAGCAAAAA | 21 | 3′ | 15949 |
| BCL11A-13607 | − | CUGAGUUCUGUGUCAGCAAAAA | 22 | 3′ | 15950 |
| BCL11A-13608 | − | ACUGAGUUCUGUGUCAGCAAAAA | 23 | 3′ | 15951 |
| BCL11A-13609 | − | CACUGAGUUCUGUGUCAGCAAAAA | 24 | 3′ | 15952 |
| BCL11A-13610 | − | AGUAAGUAUUUUCUUUCA | 18 | 3′ | 15953 |
| BCL11A-13611 | − | CAGUAAGUAUUUUCUUUCA | 19 | 3′ | 15954 |
| BCL11A-13612 | − | ACAGUAAGUAUUUUCUUUCA | 20 | 3′ | 15955 |
| BCL11A-13613 | − | UACAGUAAGUAUUUUCUUUCA | 21 | 3′ | 15956 |
| BCL11A-13614 | − | GUACAGUAAGUAUUUUCUUUCA | 22 | 3′ | 15957 |
| BCL11A-13615 | − | AGUACAGUAAGUAUUUUCUUUCA | 23 | 3′ | 15958 |
| BCL11A-13616 | − | CAGUACAGUAAGUAUUUUCUUUCA | 24 | 3′ | 15959 |
| BCL11A-13617 | − | UUUCAUGUUAAGCAAAAC | 18 | 3′ | 15960 |
| BCL11A-13618 | − | UUUUCAUGUUAAGCAAAAC | 19 | 3′ | 15961 |
| BCL11A-13619 | − | AUUUUCAUGUUAAGCAAAAC | 20 | 3′ | 15962 |
| BCL11A-13620 | − | UAUUUUCAUGUUAAGCAAAAC | 21 | 3′ | 15963 |
| BCL11A-13621 | − | UUAUUUUCAUGUUAAGCAAAAC | 22 | 3′ | 15964 |
| BCL11A-13622 | − | AUUAUUUUCAUGUUAAGCAAAAC | 23 | 3′ | 15965 |
| BCL11A-13623 | − | UAUUAUUUUCAUGUUAAGCAAAAC | 24 | 3′ | 15966 |
| BCL11A-13624 | − | AGUAUUUUCUUUCAUUGG | 18 | 3′ | 15967 |
| BCL11A-13625 | − | AAGUAUUUUCUUUCAUUGG | 19 | 3′ | 15968 |
| BCL11A-13626 | − | UAAGUAUUUUCUUUCAUUGG | 20 | 3′ | 15969 |
| BCL11A-13627 | − | GUAAGUAUUUUCUUUCAUUGG | 21 | 3′ | 15970 |
| BCL11A-13628 | − | AGUAAGUAUUUUCUUUCAUUGG | 22 | 3′ | 15971 |
| BCL11A-13629 | − | CAGUAAGUAUUUUCUUUCAUUGG | 23 | 3′ | 15972 |
| BCL11A-13630 | − | ACAGUAAGUAUUUUCUUUCAUUGG | 24 | 3′ | 15973 |
| BCL11A-13631 | − | AAGUAUUUUCUUUCAUUG | 18 | 3′ | 15974 |
| BCL11A-13632 | − | UAAGUAUUUUCUUUCAUUG | 19 | 3′ | 15975 |
| BCL11A-13633 | − | GUAAGUAUUUUCUUUCAUUG | 20 | 3′ | 15976 |
| BCL11A-13634 | − | AGUAAGUAUUUUCUUUCAUUG | 21 | 3′ | 15977 |
| BCL11A-13635 | − | CAGUAAGUAUUUUCUUUCAUUG | 22 | 3′ | 15978 |
| BCL11A-13636 | − | ACAGUAAGUAUUUUCUUUCAUUG | 23 | 3′ | 15979 |
| BCL11A-13637 | − | UACAGUAAGUAUUUUCUUUCAUUG | 24 | 3′ | 15980 |
| BCL11A-13638 | − | GUAAGUAUUUUCUUUCAU | 18 | 3′ | 15981 |
| BCL11A-13639 | − | AGUAAGUAUUUUCUUUCAU | 19 | 3′ | 15982 |
| BCL11A-13640 | − | CAGUAAGUAUUUUCUUUCAU | 20 | 3′ | 15983 |
| BCL11A-13641 | − | ACAGUAAGUAUUUUCUUUCAU | 21 | 3′ | 15984 |
| BCL11A-13642 | − | UACAGUAAGUAUUUUCUUUCAU | 22 | 3′ | 15985 |
| BCL11A-13643 | − | GUACAGUAAGUAUUUUCUUUCAU | 23 | 3′ | 15986 |
| BCL11A-13644 | − | AGUACAGUAAGUAUUUUCUUUCAU | 24 | 3′ | 15987 |
| BCL11A-13645 | − | UUGGCUAUUGAUACUGAU | 18 | 3′ | 15988 |
| BCL11A-13646 | − | UUUGGCUAUUGAUACUGAU | 19 | 3′ | 15989 |
| BCL11A-13647 | − | CUUUGGCUAUUGAUACUGAU | 20 | 3′ | 15990 |
| BCL11A-13648 | − | UCUUUGGCUAUUGAUACUGAU | 21 | 3′ | 15991 |
| BCL11A-13649 | − | AUCUUUGGCUAUUGAUACUGAU | 22 | 3′ | 15992 |
| BCL11A-13650 | − | GAUCUUUGGCUAUUGAUACUGAU | 23 | 3′ | 15993 |
| BCL11A-13651 | − | GGAUCUUUGGCUAUUGAUACUGAU | 24 | 3′ | 15994 |
| BCL11A-13652 | − | UAAGUAUUUUCUUUCAUU | 18 | 3′ | 15995 |
| BCL11A-13653 | − | GUAAGUAUUUUCUUUCAUU | 19 | 3′ | 15996 |
| BCL11A-13654 | − | AGUAAGUAUUUUCUUUCAUU | 20 | 3′ | 15997 |
| BCL11A-13655 | − | CAGUAAGUAUUUUCUUUCAUU | 21 | 3′ | 15998 |
| BCL11A-13656 | − | ACAGUAAGUAUUUUCUUUCAUU | 22 | 3′ | 15999 |
| BCL11A-13657 | − | UACAGUAAGUAUUUUCUUUCAUU | 23 | 3′ | 16000 |
| BCL11A-13658 | − | GUACAGUAAGUAUUUUCUUUCAUU | 24 | 3′ | 16001 |

[1119] Table 23A provides exemplary targeting domains for removing (e.g., deleting) the enhancer region of the BCL11A gene selected according to the first tier parameters. The targeting domains bind within a region 5′ (51.5 to 51.7 kb downstream of TSS) or 3′ (65.1 to 65.3 kb downstream of TSS), have a high level of orthogonality, and start with 5′G. It is contemplated herein that in an embodiment the targeting domain hybridizes to the target domain through complementary base pairing. Any of the targeting domains in the table can be used with a N. meningitidis Cas9 molecule that generates a double stranded break (Cas9 nuclease) or a single-stranded break (Cas9 nickase).

TABLE 23A
1st Tier

| | DNA | | Target Site | | SEQ ID |
|---|---|---|---|---|---|
| gRNA Name | Strand | Targeting Domain | Length | 5′ or 3′ | NO: |
| BCL11A-13659 | − | GGAUCUUUGGCUAUUGA | 17 | 3′ | 16002 |

[1120] Table 23B provides exemplary targeting domains for removing (e.g., deleting) the enhancer region of the BCL11A gene selected according to the second tier parameters. The targeting domains bind within a region 5′ (51.5 to 51.7 kb downstream of TSS) or 3′ (65.1 to 65.3 kb downstream of TSS) and have a high level of orthogonality. It is contemplated herein that in an embodiment the targeting domain hybridizes to the target domain through complementary base pairing. Any of the targeting domains in the table can be used with a N. meningitidis Cas9 molecule that generates a double stranded break (Cas9 nuclease) or a single-stranded break (Cas9 nickase).

TABLE 23B
2nd Tier

| | | | Target | | |
|---|---|---|---|---|---|
| | DNA | | Site | | SEQ ID |
| gRNA Name | Strand | Targeting Domain | Length | 5′ or 3′ | NO: |
| BCL11A-13660 | + | UCGGUAAAACUUUCUAG | 17 | 3′ | 16003 |
| BCL11A-13661 | − | UUUGGAUCUUUGGCUAUUGA | 20 | 3′ | 16004 |
| BCL11A-13662 | + | CCCUGUUAUGGCUGUAAAUA | 20 | 3′ | 16005 |
| BCL11A-13663 | + | AAUUCGGUAAAACUUUCUAG | 20 | 3′ | 16006 |

[1121] Table 23C provides exemplary targeting domains for removing (e.g., deleting) the enhancer region of the BCL11A gene selected according to the fourth tier parameters. The targeting domains bind within a region 5′ (51.5 to 51.7 kb downstream of TSS) or 3′ (65.1 to 65.3 kb downstream of TSS). It is contemplated herein that in an embodiment the targeting domain hybridizes to the target domain through complementary base pairing. Any of the targeting domains in the table can be used with a N. meningitidis Cas9 molecule that generates a double stranded break (Cas9 nuclease) or a single-stranded break (Cas9 nickase).

TABLE 23C
4th Tier

| | DNA | | Target Site | | SEQ ID |
|---|---|---|---|---|---|
| gRNA Name | Strand | Targeting Domain | Length | 5′ or 3′ | NO: |
| BCL11A-13664 | + | CACUGCGCCCAGCCUUA | 17 | 5′ | 16007 |
| BCL11A-13665 | + | AGCCACUGCGCCCAGCCUUA | 20 | 5′ | 16008 |
| BCL11A-13666 | + | UGUUAUGGCUGUAAAUA | 17 | 3′ | 16009 |

[1122] Table 24A provides exemplary targeting domains for correcting a mutation (e.g., E6V) in the HBB gene selected according to the first tier parameters. The targeting domains bind within 200 bp to a mutation (e.g., E6V) and have a high level of orthogonality. It is contemplated herein that the targeting domain hybridizes to the target domain through complementary base pairing. Any of the targeting domains in the table can be used with a S. pyogenes Cas9 molecule that generates a double strand break (Cas9 nuclease) or a single-strand break (Cas9 nickase).

TABLE 24A
1st Tier

| | | | Target | |
|---|---|---|---|---|
| | DNA | | Site | SEQ ID |
| gRNA Name | Strand | Targeting Domain | Length | NO: |
| HBB-19 | + | GUUCACCUUGCCCCACA | 17 | 16010 |
| HBB-5 | + | AGGAGUCAGGUGCACCA | 17 | 16011 |
| HBB-40 | − | UACUGCCCUGUGGGGCA | 17 | 16012 |
| HBB-70 | − | GCUGGGCAUAAAAGUCA | 17 | 16013 |
| HBB-71 | − | GUUACAAGACAGGUUUA | 17 | 16014 |
| HBB-72 | − | AGGAGACCAAUAGAAAC | 17 | 16015 |
| HBB-37 | + | CGUUCACCUUGCCCCAC | 17 | 16016 |
| HBB-3 | + | ACGGCAGACUUCUCCAC | 17 | 16017 |
| HBB-41 | − | UAUCAAGGUUACAAGAC | 17 | 16018 |
| HBB-73 | + | ACUUUUAUGCCCAGCCC | 17 | 16019 |
| HBB-74 | − | GGCUGGGCAUAAAAGUC | 17 | 16020 |
| HBB-4 | + | ACUUCUCCACAGGAGUC | 17 | 16021 |
| HBB-75 | − | AAUAGAAACUGGGCAUG | 17 | 16022 |
| HBB-38 | − | CUGCCGUUACUGCCCUG | 17 | 16023 |
| HBB-13 | − | GGAUGAAGUUGGUGGUG | 17 | 16024 |
| HBB-12 | − | GCCGUUACUGCCCUGUG | 17 | 16025 |
| HBB-76 | + | ACAUGCCCAGUUUCUAU | 17 | 16026 |
| HBB-77 | − | GGAGACCAAUAGAAACU | 17 | 16027 |
| HBB-15 | − | GUGAACGUGGAUGAAGU | 17 | 16028 |
| HBB-47 | − | UGCCGUUACUGCCCUGU | 17 | 16029 |
| HBB-39 | + | CUUGCCCCACAGGGCAGUAA | 20 | 16030 |
| HBB-30 | + | CACGUUCACCUUGCCCCACA | 20 | 16031 |
| HBB-7 | + | CACAGGAGUCAGGUGCACCA | 20 | 16032 |
| HBB-78 | − | AGCAGGGAGGGCAGGAGCCA | 20 | 16033 |
| HBB-36 | − | CGUUACUGCCCUGUGGGGCA | 20 | 16034 |
| HBB-79 | − | AGGGCUGGGCAUAAAAGUCA | 20 | 16035 |
| HBB-22 | + | AAGCAAAUGUAAGCAAUAGA | 20 | 16036 |
| HBB-80 | − | AAGGUUACAAGACAGGUUUA | 20 | 16037 |
| HBB-81 | − | UUAAGGAGACCAAUAGAAAC | 20 | 16038 |
| HBB-2 | + | GUAACGGCAGACUUCUCCAC | 20 | 16039 |
| HBB-49 | − | UGGUAUCAAGGUUACAAGAC | 20 | 16040 |
| HBB-82 | + | CUGACUUUUAUGCCCAGCCC | 20 | 16041 |
| HBB-43 | − | UGAAGUUGGUGGUGAGGCCC | 20 | 16042 |
| HBB-83 | − | GAGCAGGGAGGGCAGGAGCC | 20 | 16043 |
| HBB-84 | − | CAGGGCUGGGCAUAAAAGUC | 20 | 16044 |
| HBB-8 | + | CAGACUUCUCCACAGGAGUC | 20 | 16045 |
| HBB-16 | − | GUGAACGUGGAUGAAGUUGG | 20 | 16046 |
| HBB-85 | − | ACCAAUAGAAACUGGGCAUG | 20 | 16047 |
| HBB-27 | − | AGUCUGCCGUUACUGCCCUG | 20 | 16048 |
| HBB-35 | − | CGUGGAUGAAGUUGGUGGUG | 20 | 16049 |
| HBB-42 | − | UCUGCCGUUACUGCCCUGUG | 20 | 16050 |
| HBB-86 | − | UAAGGAGACCAAUAGAAACU | 20 | 16051 |
| HBB-9 | − | GAAGUUGGUGGUGAGGCCCU | 20 | 16052 |
| HBB-87 | − | GGAGGGCAGGAGCCAGGGCU | 20 | 16053 |
| HBB-23 | − | AAGGUGAACGUGGAUGAAGU | 20 | 16054 |
| HBB-14 | − | GUCUGCCGUUACUGCCCUGU | 20 | 16055 |

[1123] Table 24B provides exemplary targeting domains for correcting a mutation (e.g., E6V) in the HBB gene selected according to the second tier parameters. The targeting domains bind within 200 bp to a mutation (e.g., E6V) and start with a 5′G. It is contemplated herein that the targeting domain hybridizes to the target domain through complementary base pairing. Any of the targeting domains in the table can be used with a S. pyogenes Cas9 molecule that generates a double strand break (Cas9 nuclease) or a single-strand break (Cas9 nickase).

TABLE 24B
2nd Tier

| | | | Target | |
|---|---|---|---|---|
| | DNA | | Site | SEQ ID |
| gRNA Name | Strand | Targeting Domain | Length | NO: |
| HBB-11 | + | GCCCCACAGGGCAGUAA | 17 | 16056 |
| HBB-18 | − | GUGGUGAGGCCCUGGGC | 17 | 16057 |
| HBB-17 | − | GUGGGGCAAGGUGAACG | 17 | 16058 |
| HBB-1 | − | GGUGCACCUGACUCCUG | 17 | 16059 |
| HBB-20 | − | GUUGGUGGUGAGGCCCU | 17 | 16060 |
| HBB-88 | − | GGGCAGGAGCCAGGGCU | 17 | 16061 |
| HBB-10 | − | GCAACCUCAAACAGACACCA | 20 | 16062 |
| HBB-89 | − | GGGAGGGCAGGAGCCAGGGC | 20 | 16063 |

[1124] Table 24C provides exemplary targeting domains for correcting a mutation (e.g., E6V) in the HBB gene selected according to the third tier parameters. The targeting domains bind within 200 bp to a mutation (e.g., E6V). It is contemplated herein that the targeting domain hybridizes to the target domain through complementary base pairing. Any of the targeting domains in the table can be used with a S. pyogenes Cas9 molecule that generates a double strand break (Cas9 nuclease) or a single-strand break (Cas9 nickase).

TABLE 24C
3rd Tier

| | | | Target | |
|---|---|---|---|---|
| | DNA | | Site | SEQ ID |
| gRNA Name | Strand | Targeting Domain | Length | NO: |
| HBB-25 | − | ACCUCAAACAGACACCA | 17 | 16064 |
| HBB-45 | + | UGAUACCAACCUGCCCA | 17 | 16065 |
| HBB-90 | − | AGGGAGGGCAGGAGCCA | 17 | 16066 |
| HBB-48 | − | UGGGCAGGUUGGUAUCA | 17 | 16067 |
| HBB-29 | + | CAAAUGUAAGCAAUAGA | 17 | 16068 |
| HBB-28 | − | AGUUGGUGGUGAGGCCC | 17 | 16069 |
| HBB-51 | + | UUGAUACCAACCUGCCC | 17 | 16070 |
| HBB-91 | − | CAGGGAGGGCAGGAGCC | 17 | 16071 |
| HBB-92 | − | AGGGCAGGAGCCAGGGC | 17 | 16072 |
| HBB-21 | − | AACGUGGAUGAAGUUGG | 17 | 16073 |
| HBB-24 | + | ACCAUGGUGUCUGUUUG | 17 | 16074 |
| HBB-44 | − | UGAGGCCCUGGGCAGGU | 17 | 16075 |
| HBB-34 | + | CCUUGAUACCAACCUGCCCA | 20 | 16076 |
| HBB-32 | − | CCCUGGGCAGGUUGGUAUCA | 20 | 16077 |
| HBB-31 | + | CCACGUUCACCUUGCCCCAC | 20 | 16078 |
| HBB-26 | + | ACCUUGAUACCAACCUGCCC | 20 | 16079 |
| HBB-52 | − | UUGGUGGUGAGGCCCUGGGC | 20 | 16080 |
| HBB-33 | − | CCUGUGGGGCAAGGUGAACG | 20 | 16081 |
| HBB-6 | − | CAUGGUGCACCUGACUCCUG | 20 | 16082 |
| HBB-46 | + | UGCACCAUGGUGUCUGUUUG | 20 | 16083 |
| HBB-50 | − | UGGUGAGGCCCUGGGCAGGU | 20 | 16084 |

[1125] Table 24D provides targeting domains for correcting a mutation (e.g., E6V) in the HBB gene by dual targeting (e.g., dual single strand cleavages). In an embodiment, dual targeting (e.g., dual nicking) is used to create two nicks on opposite DNA strands by using S. pyogenes Cas9 nickases with two targeting domains that are complementary to opposite DNA strands, e.g., a gRNA comprising any minus strand targeting domain may be paired any gRNA comprising a plus strand targeting domain provided that the two gRNAs are oriented on the DNA such that PAMs face outward and the distance between the 5′ ends of the gRNAs is 0-50 bp. Exemplary nickase pairs include a targeting domain from Group A and a second targeting domain from Group B in Table 24D (for S. pyogenes). It is contemplated herein that in an embodiment a targeting domain of Group A can be combined with any of the targeting domains of Group B in Table 24D (for S. pyogenes). For example, HBB-9 or HBB-20 can be combined with HBB-11 or HBB-39.

TABLE 24D

| Group A | Group B |
|---|---|
| HBB-9, HBB-20 | HBB-11, HBB-39 |

[1126] Table 25A provides exemplary targeting domains for correcting a mutation (e.g., E6V) in the HBB gene selected according to the first tier parameters. The targeting domains bind within 200 bp to a mutation (e.g., E6V), and have a high level of orthogonality. The PAM is NNGRRT. It is contemplated herein that the targeting domain hybridizes to the target domain through complementary base pairing. Any of the targeting domains in the table can be used with a S. pyogenes Cas9 molecule that generates a double strand break (Cas9 nuclease) or a single-strand break (Cas9 nickase).

TABLE 25A
1st Tier

| | | | Target | |
|---|---|---|---|---|
| gRNA | DNA | | Site | SEQ ID |
| Name | Strand | Targeting Domain | Length | NO: |
| HBB-93 | + | AACGGCAGACUUCUCCAC | 18 | 16085 |
| HBB-94 | + | UAACGGCAGACUUCUCCAC | 19 | 16086 |
| HBB-2 | + | GUAACGGCAGACUUCUCCAC | 20 | 16087 |
| HBB-95 | + | AGUAACGGCAGACUUCUCCAC | 21 | 16088 |
| HBB-96 | + | CAGUAACGGCAGACUUCUCCAC | 22 | 16089 |
| HBB-97 | + | GCAGUAACGGCAGACUUCUCC | 23 | 16090 |
| | | AC | | |
| HBB-98 | + | GGCAGUAACGGCAGACUUCUCC | 24 | 16091 |
| | | AC | | |
| HBB-99 | − | CUGUGGGGCAAGGUGAAC | 18 | 16092 |
| HBB-100 | − | CCUGUGGGGCAAGGUGAAC | 19 | 16093 |
| HBB-101 | − | CCCUGUGGGGCAAGGUGAAC | 20 | 16094 |
| HBB-102 | − | GCCCUGUGGGGCAAGGUGAAC | 21 | 16095 |
| HBB-103 | − | UGCCCUGUGGGGCAAGGUGAAC | 22 | 16096 |
| HBB-104 | − | CUGCCCUGUGGGGCAAGGUGA | 23 | 16097 |
| | | AC | | |
| HBB-105 | − | ACUGCCCUGUGGGGCAAGGUGA | 24 | 16098 |
| | | AC | | |

[1127] Table 25B provides exemplary targeting domains for correcting a mutation (e.g., E6V) in the HBB gene selected according to the fourth tier parameters. The targeting domains bind within 200 bp to a mutation (e.g., E6V), and the PAM is NNGRRV. It is contemplated herein that the targeting domain hybridizes to the target domain through complementary base pairing. Any of the targeting domains in the table can be used with a S. pyogenes Cas9 molecule that generates a double strand break (Cas9 nuclease) or a single-strand break (Cas9 nickase).

TABLE 25B
4th Tier

| | DNA | | Target Site | SEQ ID |
|---|---|---|---|---|
| gRNA Name | Strand | Targeting Domain | Length | NO: |
| HBB-106 | + | CACGUUCACCUUGCCCCA | 18 | 16099 |
| HBB-107 | + | CCACGUUCACCUUGCCCCA | 19 | 16100 |
| HBB-58 | + | UCCACGUUCACCUUGCCCCA | 20 | 16101 |
| HBB-108 | + | AUCCACGUUCACCUUGCCCCA | 21 | 16102 |
| HBB-109 | + | CAUCCACGUUCACCUUGCCCCA | 22 | 16103 |
| HBB-110 | + | UCAUCCACGUUCACCUUGCCCCA | 23 | 16104 |
| HBB-111 | + | UUCAUCCACGUUCACCUUGCCCCA | 24 | 16105 |
| HBB-112 | + | UAACGGCAGACUUCUCCA | 18 | 16106 |
| HBB-113 | + | GUAACGGCAGACUUCUCCA | 19 | 16107 |
| HBB-69 | + | AGUAACGGCAGACUUCUCCA | 20 | 16108 |
| HBB-114 | + | CAGUAACGGCAGACUUCUCCA | 21 | 16109 |
| HBB-115 | + | GCAGUAACGGCAGACUUCUCCA | 22 | 16110 |
| HBB-116 | + | GGCAGUAACGGCAGACUUCUCCA | 23 | 16111 |
| HBB-117 | + | GGGCAGUAACGGCAGACUUCUCCA | 24 | 16112 |
| HBB-118 | + | GUCUGUUUGAGGUUGCUA | 18 | 16113 |
| HBB-119 | + | UGUCUGUUUGAGGUUGCUA | 19 | 16114 |
| HBB-66 | + | GUGUCUGUUUGAGGUUGCUA | 20 | 16115 |
| HBB-120 | + | GGUGUCUGUUUGAGGUUGCUA | 21 | 16116 |
| HBB-121 | + | UGGUGUCUGUUUGAGGUUGCUA | 22 | 16117 |
| HBB-122 | + | AUGGUGUCUGUUUGAGGUUGCUA | 23 | 16118 |
| HBB-123 | + | CAUGGUGUCUGUUUGAGGUUGCUA | 24 | 16119 |
| HBB-124 | + | CCUUGAUACCAACCUGCC | 18 | 16120 |
| HBB-125 | + | ACCUUGAUACCAACCUGCC | 19 | 16121 |
| HBB-57 | + | AACCUUGAUACCAACCUGCC | 20 | 16122 |
| HBB-126 | + | UAACCUUGAUACCAACCUGCC | 21 | 16123 |
| HBB-127 | + | GUAACCUUGAUACCAACCUGCC | 22 | 16124 |
| HBB-128 | + | UGUAACCUUGAUACCAACCUGCC | 23 | 16125 |
| HBB-129 | + | UUGUAACCUUGAUACCAACCUGCC | 24 | 16126 |
| HBB-130 | + | GUGCACCAUGGUGUCUGU | 18 | 16127 |
| HBB-131 | + | GGUGCACCAUGGUGUCUGU | 19 | 16128 |
| HBB-62 | + | AGGUGCACCAUGGUGUCUGU | 20 | 16129 |
| HBB-132 | + | CAGGUGCACCAUGGUGUCUGU | 21 | 16130 |
| HBB-133 | + | UCAGGUGCACCAUGGUGUCUGU | 22 | 16131 |
| HBB-134 | + | GUCAGGUGCACCAUGGUGUCUGU | 23 | 16132 |
| HBB-135 | + | AGUCAGGUGCACCAUGGUGUCUGU | 24 | 16133 |
| HBB-136 | + | UAGUGAACACAGUUGUGU | 18 | 16134 |
| HBB-137 | + | CUAGUGAACACAGUUGUGU | 19 | 16135 |
| HBB-59 | + | GCUAGUGAACACAGUUGUGU | 20 | 16136 |
| HBB-138 | + | UGCUAGUGAACACAGUUGUGU | 21 | 16137 |
| HBB-139 | + | UUGCUAGUGAACACAGUUGUGU | 22 | 16138 |
| HBB-140 | + | GUUGCUAGUGAACACAGUUGUGU | 23 | 16139 |
| HBB-141 | + | GGUUGCUAGUGAACACAGUUGUGU | 24 | 16140 |
| HBB-142 | − | UAAGGAGACCAAUAGAAA | 18 | 16141 |
| HBB-143 | − | UUAAGGAGACCAAUAGAAA | 19 | 16142 |
| HBB-144 | − | UUUAAGGAGACCAAUAGAAA | 20 | 16143 |
| HBB-145 | − | GUUUAAGGAGACCAAUAGAAA | 21 | 16144 |
| HBB-146 | − | GGUUUAAGGAGACCAAUAGAAA | 22 | 16145 |
| HBB-147 | − | AGGUUUAAGGAGACCAAUAGAAA | 23 | 16146 |
| HBB-148 | − | CAGGUUUAAGGAGACCAAUAGAAA | 24 | 16147 |
| HBB-149 | − | CAGGUUUAAGGAGACCAA | 18 | 16148 |
| HBB-150 | − | ACAGGUUUAAGGAGACCAA | 19 | 16149 |
| HBB-151 | − | GACAGGUUUAAGGAGACCAA | 20 | 16150 |
| HBB-152 | − | AGACAGGUUUAAGGAGACCAA | 21 | 16151 |
| HBB-153 | − | AAGACAGGUUUAAGGAGACCAA | 22 | 16152 |
| HBB-154 | − | CAAGACAGGUUUAAGGAGACCAA | 23 | 16153 |
| HBB-155 | − | ACAAGACAGGUUUAAGGAGACCAA | 24 | 16154 |
| HBB-156 | − | GGUUACAAGACAGGUUUA | 18 | 16155 |
| HBB-157 | − | AGGUUACAAGACAGGUUUA | 19 | 16156 |
| HBB-80 | − | AAGGUUACAAGACAGGUUUA | 20 | 16157 |
| HBB-158 | − | CAAGGUUACAAGACAGGUUUA | 21 | 16158 |
| HBB-159 | − | UCAAGGUUACAAGACAGGUUUA | 22 | 16159 |
| HBB-160 | − | AUCAAGGUUACAAGACAGGUUUA | 23 | 16160 |
| HBB-161 | − | UAUCAAGGUUACAAGACAGGUUUA | 24 | 16161 |
| HBB-162 | − | GAAGUUGGUGGUGAGGCC | 18 | 16162 |
| HBB-163 | − | UGAAGUUGGUGGUGAGGCC | 19 | 16163 |
| HBB-68 | − | AUGAAGUUGGUGGUGAGGCC | 20 | 16164 |
| HBB-164 | − | GAUGAAGUUGGUGGUGAGGCC | 21 | 16165 |
| HBB-165 | − | GGAUGAAGUUGGUGGUGAGGCC | 22 | 16166 |
| HBB-166 | − | UGGAUGAAGUUGGUGGUGAGGCC | 23 | 16167 |
| HBB-167 | − | GUGGAUGAAGUUGGUGGUGAGGCC | 24 | 16168 |
| HBB-168 | − | ACUGCCCUGUGGGGCAAG | 18 | 16169 |
| HBB-169 | − | UACUGCCCUGUGGGGCAAG | 19 | 16170 |
| HBB-65 | − | UUACUGCCCUGUGGGGCAAG | 20 | 16171 |
| HBB-170 | − | GUUACUGCCCUGUGGGGCAAG | 21 | 16172 |
| HBB-171 | − | CGUUACUGCCCUGUGGGGCAAG | 22 | 16173 |
| HBB-172 | − | CCGUUACUGCCCUGUGGGGCAAG | 23 | 16174 |
| HBB-173 | − | GCCGUUACUGCCCUGUGGGGCAAG | 24 | 16175 |
| HBB-174 | − | GGAGGGCAGGAGCCAGGG | 18 | 16176 |
| HBB-175 | − | GGGAGGGCAGGAGCCAGGG | 19 | 16177 |
| HBB-176 | − | AGGGAGGGCAGGAGCCAGGG | 20 | 16178 |
| HBB-177 | − | CAGGGAGGGCAGGAGCCAGGG | 21 | 16179 |
| HBB-178 | − | GCAGGGAGGGCAGGAGCCAGGG | 22 | 16180 |
| HBB-179 | − | AGCAGGGAGGGCAGGAGCCAGGG | 23 | 16181 |
| HBB-180 | − | GAGCAGGGAGGGCAGGAGCCAGGG | 24 | 16182 |
| HBB-181 | − | UGGGCAUAAAAGUCAGGG | 18 | 16183 |
| HBB-182 | − | CUGGGCAUAAAAGUCAGGG | 19 | 16184 |
| HBB-183 | − | GCUGGGCAUAAAAGUCAGGG | 20 | 16185 |
| HBB-184 | − | GGCUGGGCAUAAAAGUCAGGG | 21 | 16186 |
| HBB-185 | − | GGGCUGGGCAUAAAAGUCAGGG | 22 | 16187 |
| HBB-186 | − | AGGGCUGGGCAUAAAAGUCAGGG | 23 | 16188 |
| HBB-187 | − | CAGGGCUGGGCAUAAAAGUCAGGG | 24 | 16189 |
| HBB-188 | − | GGGGCAAGGUGAACGUGG | 18 | 16190 |
| HBB-189 | − | UGGGGCAAGGUGAACGUGG | 19 | 16191 |
| HBB-67 | − | GUGGGGCAAGGUGAACGUGG | 20 | 16192 |
| HBB-190 | − | UGUGGGGCAAGGUGAACGUGG | 21 | 16193 |
| HBB-191 | − | CUGUGGGGCAAGGUGAACGUGG | 22 | 16194 |
| HBB-192 | − | CCUGUGGGGCAAGGUGAACGUGG | 23 | 16195 |
| HBB-193 | − | CCCUGUGGGGCAAGGUGAACGUGG | 24 | 16196 |
| HBB-194 | − | UCUGCCGUUACUGCCCUG | 18 | 16197 |
| HBB-195 | − | GUCUGCCGUUACUGCCCUG | 19 | 16198 |
| HBB-27 | − | AGUCUGCCGUUACUGCCCUG | 20 | 16199 |
| HBB-196 | − | AAGUCUGCCGUUACUGCCCUG | 21 | 16200 |
| HBB-197 | − | GAAGUCUGCCGUUACUGCCCUG | 22 | 16201 |
| HBB-198 | − | AGAAGUCUGCCGUUACUGCCCUG | 23 | 16202 |
| HBB-199 | − | GAGAAGUCUGCCGUUACUGCCCUG | 24 | 16203 |
| HBB-200 | − | UGGUGCACCUGACUCCUG | 18 | 16204 |
| HBB-201 | − | AUGGUGCACCUGACUCCUG | 19 | 16205 |
| HBB-6 | − | CAUGGUGCACCUGACUCCUG | 20 | 16206 |
| HBB-202 | − | CCAUGGUGCACCUGACUCCUG | 21 | 16207 |
| HBB-203 | − | ACCAUGGUGCACCUGACUCCUG | 22 | 16208 |
| HBB-204 | − | CACCAUGGUGCACCUGACUCCUG | 23 | 16209 |
| HBB-205 | − | ACACCAUGGUGCACCUGACUCCUG | 24 | 16210 |
| HBB-206 | − | ACGUGGAUGAAGUUGGUG | 18 | 16211 |
| HBB-207 | − | AACGUGGAUGAAGUUGGUG | 19 | 16212 |
| HBB-64 | − | GAACGUGGAUGAAGUUGGUG | 20 | 16213 |
| HBB-208 | − | UGAACGUGGAUGAAGUUGGUG | 21 | 16214 |
| HBB-209 | − | GUGAACGUGGAUGAAGUUGGUG | 22 | 16215 |
| HBB-210 | − | GGUGAACGUGGAUGAAGUUGGUG | 23 | 16216 |
| HBB-211 | − | AGGUGAACGUGGAUGAAGUUGGUG | 24 | 16217 |
| HBB-212 | − | GUGCACCUGACUCCUGUG | 18 | 16218 |
| HBB-213 | − | GGUGCACCUGACUCCUGUG | 19 | 16219 |
| HBB-63 | − | UGGUGCACCUGACUCCUGUG | 20 | 16220 |
| HBB-214 | − | AUGGUGCACCUGACUCCUGUG | 21 | 16221 |
| HBB-215 | − | CAUGGUGCACCUGACUCCUGUG | 22 | 16222 |
| HBB-216 | − | CCAUGGUGCACCUGACUCCUGUG | 23 | 16223 |
| HBB-217 | − | ACCAUGGUGCACCUGACUCCUGUG | 24 | 16224 |
| HBB-218 | − | GUCUGCCGUUACUGCCCU | 18 | 16225 |
| HBB-219 | − | AGUCUGCCGUUACUGCCCU | 19 | 16226 |
| HBB-56 | − | AAGUCUGCCGUUACUGCCCU | 20 | 16227 |
| HBB-220 | − | GAAGUCUGCCGUUACUGCCCU | 21 | 16228 |
| HBB-221 | − | AGAAGUCUGCCGUUACUGCCCU | 22 | 16229 |
| HBB-222 | − | GAGAAGUCUGCCGUUACUGCCCU | 23 | 16230 |
| HBB-223 | − | GGAGAAGUCUGCCGUUACUGCCCU | 24 | 16231 |
| HBB-224 | − | AUGGUGCACCUGACUCCU | 18 | 16232 |
| HBB-225 | − | CAUGGUGCACCUGACUCCU | 19 | 16233 |
| HBB-60 | − | CCAUGGUGCACCUGACUCCU | 20 | 16234 |
| HBB-226 | − | ACCAUGGUGCACCUGACUCCU | 21 | 16235 |
| HBB-227 | − | CACCAUGGUGCACCUGACUCCU | 22 | 16236 |
| HBB-228 | − | ACACCAUGGUGCACCUGACUCCU | 23 | 16237 |
| HBB-229 | − | GACACCAUGGUGCACCUGACUCCU | 24 | 16238 |
| HBB-230 | − | AGGGCUGGGCAUAAAAGU | 18 | 16239 |
| HBB-231 | − | CAGGGCUGGGCAUAAAAGU | 19 | 16240 |
| HBB-232 | − | CCAGGGCUGGGCAUAAAAGU | 20 | 16241 |
| HBB-233 | − | GCCAGGGCUGGGCAUAAAAGU | 21 | 16242 |
| HBB-234 | − | AGCCAGGGCUGGGCAUAAAAGU | 22 | 16243 |
| HBB-235 | − | GAGCCAGGGCUGGGCAUAAAAGU | 23 | 16244 |
| HBB-236 | − | GGAGCCAGGGCUGGGCAUAAAAGU | 24 | 16245 |
| HBB-237 | − | AGGUUACAAGACAGGUUU | 18 | 16246 |
| HBB-238 | − | AAGGUUACAAGACAGGUUU | 19 | 16247 |
| HBB-239 | − | CAAGGUUACAAGACAGGUUU | 20 | 16248 |
| HBB-240 | − | UCAAGGUUACAAGACAGGUUU | 21 | 16249 |
| HBB-241 | − | AUCAAGGUUACAAGACAGGUUU | 22 | 16250 |
| HBB-242 | − | UAUCAAGGUUACAAGACAGGUUU | 23 | 16251 |
| HBB-243 | − | GUAUCAAGGUUACAAGACAGGUUU | 24 | 16252 |

[1128] Table 26 provides exemplary targeting domains for correcting a mutation (e.g., E6V) in the HBB gene selected according to the first tier parameters. The targeting domains bind within 200 bp to a mutation (e.g., E6V) and have a high level of orthogonality. It is contemplated herein that the targeting domain hybridizes to the target domain through complementary base pairing. Any of the targeting domains in the table can be used with a N. meningitidis Cas9 molecule that generates a double strand break (Cas9 nuclease) or a single-strand break (Cas9 nickase).

TABLE 26
1st Tier

| | | | Target | |
|---|---|---|---|---|
| | DNA | | Site | SEQ ID |
| gRNA Name | Strand | Targeting Domain | Length | NO: |
| HBB-244 | − | AGCCAUCUAUUGCUUAC | 17 | 16253 |
| HBB-245 | − | GUCAGGGCAGAGCCAUC | 17 | 16254 |
| HBB-246 | − | CAGAGCCAUCUAUUGCUUAC | 20 | 16255 |
| HBB-247 | − | AAAGUCAGGGCAGAGCCAUC | 20 | 16256 |

### III. Cas9 Molecules

[1129] Cas9 molecules of a variety of species can be used in the methods and compositions described herein. While the S. pyogenes, S. aureus, and S. thermophilus Cas9 molecules are the subject of much of the disclosure herein, Cas9 molecules of, derived from, or based on the Cas9 proteins of other species listed herein can be used as well. In other words, while the much of the description herein uses S. pyogenes and S. thermophilus Cas9 molecules, Cas9 molecules from the other species can replace them, e.g., Staphylococcus aureus and Neisseria meningitidis Cas9 molecules. Additional Cas9 species include: Acidovorax avenue, Actinobacillus pleuropneumoniae, Actinobacillus succinogenes, Actinobacillus suis, Actinomyces sp., cycliphilus denitrificans, Aminomonas paucivorans, Bacillus cereus, Bacillus smithii, Bacillus thuringiensis, Bacteroides sp., Blastopirellula marina, Bradyrhizobium sp., Brevibacillus laterosporus, Campylobacter coli, Campylobacter jejuni, Campylobacter lari, Candidatus Puniceispirillum, Clostridium cellulolyticum, Clostridium perfringens, Corynebacterium accolens, Corynebacterium diphtheria, Corynebacterium matruchotii, Dinoroseobacter shibae, Eubacterium dolichum, gamma proteobacterium, Gluconacetobacter diazotrophicus, Haemophilus parainfluenzae, Haemophilus sputorum, Helicobacter canadensis, Helicobacter cinaedi, Helicobacter mustelae, Ilyobacter polytropus, Kingella kingae, Lactobacillus. crispatus, Listeria ivanovii, Listeria monocytogenes, Listeriaceae bacterium, Methylocystis sp., Methylosinus trichosporium, Mobiluncus mulieris, Neisseria bacilliformis, Neisseria cinerea, Neisseria flavescens, Neisseria lactamica, Neisseria sp., Neisseria wadsworthii, Nitrosomonas sp., Parvibaculum lavamentivorans, Pasteurella multocida, Phascolarciobacterium succinatutens, Ralstonia syzygii, Rhodopseudomonas palustris, Rhodovulum sp., Simonsiella muelleri, Sphingomonas sp., Sporolactobacillus vineae, Staphylococcus lugdunensis, Streptococcus sp., Subdoligranulum sp., Tistrella mobilis, Treponema sp., or Verminephrobacter eiseniae.

[1130] A Cas9 molecule, or Cas9 polypeptide, as that term is used herein, refers to a molecule or a polypeptide that can interact with a guide RNA (gRNA) molecule and, in concert with the gRNA molecule, localizes to a site which comprises a target domain, and in an embodiment, a PAM sequence. Cas9 molecule and Cas9 polypeptide, as those terms are used herein, refer to naturally occurring Cas9 molecules and to engineered, altered, or modified Cas9 molecules or Cas9 polypeptides that differ, e.g., by at least one amino acid residue, from a reference sequence, e.g., the most similar naturally occurring Cas9 molecule or a sequence of Table 28.

[1131] Cas9 Domains

[1132] Crystal structures have been determined for two different naturally occurring bacterial Cas9 molecules (Jinek et al., Science, 343(6176):1247997, 2014) and for S. pyogenes Cas9 with a guide RNA (e.g., a synthetic fusion of crRNA and tracrRNA) (Nishimasu et al., Cell, 156:935-949, 2014; and Anders et al., Nature, 2014, doi: 10.1038/nature13579).

[1133] A naturally occurring Cas9 molecule comprises two lobes: a recognition (REC) lobe and a nuclease (NUC) lobe; each of which further comprise domains described herein. FIGS. 9A-9B provide a schematic of the organization of important Cas9 domains in the primary structure. The domain nomenclature and the numbering of the amino acid residues encompassed by each domain used throughout this disclosure is as described in Nishimasu et al. The numbering of the amino acid residues is with reference to Cas9 from S. pyogenes.

[1134] The REC lobe comprises the arginine-rich bridge helix (BH), the REC1 domain, and the REC2 domain. The REC lobe does not share structural similarity with other known proteins, indicating that it is a Cas9-specific functional domain. The BH domain is a long α helix and arginine rich region and comprises amino acids 60-93 of the sequence of S. pyogenes Cas9. The REC1 domain is important for recognition of the repeat:anti-repeat duplex, e.g., of a gRNA or a tracrRNA, and is therefore critical for Cas9 activity by recognizing the target sequence. The REC1 domain comprises two REC1 motifs at amino acids 94 to 179 and 308 to 717 of the sequence of S. pyogenes Cas9. These two REC1 domains, though separated by the REC2 domain in the linear primary structure, assemble in the tertiary structure to form the REC1 domain. The REC2 domain, or parts thereof, may also play a role in the recognition of the repeat:anti-repeat duplex. The REC2 domain comprises amino acids 180-307 of the sequence of S. pyogenes Cas9.

[1135] The NUC lobe comprises the RuvC domain, the HNH domain, and the PAM-interacting (PI) domain. The RuvC domain shares structural similarity to retroviral integrase superfamily members and cleaves a single strand, e.g., the non-complementary strand of the target nucleic acid molecule. The RuvC domain is assembled from the three split RuvC motifs (RuvC I, RuvCII, and RuvCIII, which are often commonly referred to in the art as RuvCI domain, or N-terminal RuvC domain, RuvCII domain, and RuvCIII domain) at amino acids 1-59, 718-769, and 909-1098, respectively, of the sequence of S. pyogenes Cas9. Similar to the REC1 domain, the three RuvC motifs are linearly separated by other domains in the primary structure, however in the tertiary structure, the three RuvC motifs assemble and form the RuvC domain. The HNH domain shares structural similarity with HNH endonucleases, and cleaves a single strand, e.g., the complementary strand of the target nucleic acid molecule. The HNH domain lies between the RuvC II-III motifs and comprises amino acids 775-908 of the sequence of S. pyogenes Cas9. The PI domain interacts with the PAM of the target nucleic acid molecule, and comprises amino acids 1099-1368 of the sequence of S. pyogenes Cas9.

[1136] A RuvC-like Domain and an HNH-like Domain

[1137] In an embodiment, a Cas9 molecule or Cas9 polypeptide comprises an HNH-like domain and a RuvC-like domain. In an embodiment, cleavage activity is dependent on a RuvC-like domain and an HNH-like domain. A Cas9 molecule or Cas9 polypeptide, e.g., an eaCas9 molecule or eaCas9 polypeptide, can comprise one or more of the following domains: a RuvC-like domain and an HNH-like domain. In an embodiment, a Cas9 molecule or Cas9 polypeptide is an eaCas9 molecule or eaCas9 polypeptide and the eaCas9 molecule or eaCas9 polypeptide comprises a RuvC-like domain, e.g., a RuvC-like domain described below, and/or an HNH-like domain, e.g., an HNH-like domain described below.

[1138] RuvC-like Domains

[1139] In an embodiment, a RuvC-like domain cleaves, a single strand, e.g., the non-complementary strand of the target nucleic acid molecule. The Cas9 molecule or Cas9 polypeptide can include more than one RuvC-like domain (e.g., one, two, three or more RuvC-like domains). In an embodiment, a RuvC-like domain is at least 5, 6, 7, 8 amino acids in length but not more than 20, 19, 18, 17, 16 or 15 amino acids in length. In an embodiment, the Cas9 molecule or Cas9 polypeptide comprises an N-terminal RuvC-like domain of about 10 to 20 amino acids, e.g., about 15 amino acids in length.

[1140] N-Terminal RuvC-like Domains

[1141] Some naturally occurring Cas9 molecules comprise more than one RuvC-like domain with cleavage being dependent on the N-terminal RuvC-like domain. Accordingly, Cas9 molecules or Cas9 polypeptide can comprise an N-terminal RuvC-like domain. Exemplary N-terminal RuvC-like domains are described below.

[1142] In an embodiment, an eaCas9 molecule or eaCas9 polypeptide comprises an N-terminal RuvC-like domain comprising an amino acid sequence of formula I:

D-X1-G-X2-X3-X4-X5-G-X6-X7-X8-X9 (SEQ ID NO: 8),

[1143] wherein,

[1144] X1 is selected from I, V, M, L and T (e.g., selected from I, V, and L);

[1145] X2 is selected from T, I, V, S, N, Y, E and L (e.g., selected from T, V, and I);

[1146] X3 is selected from N, S, G, A, D, T, R, M and F (e.g., A or N);

[1147] X4 is selected from S, Y, N and F (e.g., S);

[1148] X5 is selected from V, I, L, C, T and F (e.g., selected from V, I and L);

[1149] X6 is selected from W, F, V, Y, S and L (e.g., W);

[1150] X7 is selected from A, S, C, V and G (e.g., selected from A and S);

[1151] X8 is selected from V, I, L, A, M and H (e.g., selected from V, I, M and L); and

[1152] X9 is selected from any amino acid or is absent (e.g., selected from T, V, I, L, A, F, S, A, Y, M and R, or, e.g., selected from T, V, I, L and A).

[1153] In an embodiment, the N-terminal RuvC-like domain differs from a sequence of SEQ ID NO:8, by as many as 1 but no more than 2, 3, 4, or 5 residues.

[1154] In embodiment, the N-terminal RuvC-like domain is cleavage competent.

[1155] In embodiment, the N-terminal RuvC-like domain is cleavage incompetent.

[1156] In an embodiment, a eaCas9 molecule or eaCas9 polypeptide comprises an N-terminal RuvC-like domain comprising an amino acid sequence of formula II:

D-X1-G-X2-X3-S-X5-G-X6-X7-X8-X9, (SEQ ID NO: 9),

[1157] wherein

[1158] X1 is selected from I, V, M, L and T (e.g., selected from I, V, and L);

[1159] X2 is selected from T, I, V, S, N, Y, E and L (e.g., selected from T, V, and I);

[1160] X3 is selected from N, S, G, A, D, T, R, M and F (e.g., A or N);

[1161] X5 is selected from V, I, L, C, T and F (e.g., selected from V, I and L);

[1162] X6 is selected from W, F, V, Y, S and L (e.g., W);

[1163] X7 is selected from A, S, C, V and G (e.g., selected from A and S);

[1164] X8 is selected from V, I, L, A, M and H (e.g., selected from V, I, M and L); and

[1165] X9 is selected from any amino acid or is absent (e.g., selected from T, V, I, L, A, F, S, A, Y, M and R or selected from e.g., T, V, I, L and A).

[1166] In an embodiment, the N-terminal RuvC-like domain differs from a sequence of SEQ ID NO:9 by as many as 1 but no more than 2, 3, 4, or 5 residues.

[1167] In an embodiment, the N-terminal RuvC-like domain comprises an amino acid sequence of formula III:

D-I-G-X2-X3-S-V-G-W-A-X8-X9 (SEQ ID NO: 10),

[1168] wherein

[1169] X2 is selected from T, I, V, S, N, Y, E and L (e.g., selected from T, V, and I);

[1170] X3 is selected from N, S, G, A, D, T, R, M and F (e.g., A or N);

[1171] X8 is selected from V, I, L, A, M and H (e.g., selected from V, I, M and L); and

[1172] X9 is selected from any amino acid or is absent (e.g., selected from T, V, I, L, A, F, S, A, Y, M and R or selected from e.g., T, V, I, L and A).

[1173] In an embodiment, the N-terminal RuvC-like domain differs from a sequence of SEQ ID NO:10 by as many as 1 but no more than, 2, 3, 4, or 5 residues.

[1174] In an embodiment, the N-terminal RuvC-like domain comprises an amino acid sequence of formula III:

(SEQ ID NO: 11)

D-I-G-T-N-S-V-G-W-A-V-X,

[1175] wherein

[1176] X is a non-polar alkyl amino acid or a hydroxyl amino acid, e.g., X is selected from V, I, L and T (e.g., the eaCas9 molecule can comprise an N-terminal RuvC-like domain shown in FIGS. 2A-2G (is depicted as Y)).

[1177] In an embodiment, the N-terminal RuvC-like domain differs from a sequence of SEQ ID NO:11 by as many as 1 but no more than, 2, 3, 4, or 5 residues.

[1178] In an embodiment, the N-terminal RuvC-like domain differs from a sequence of an N-terminal RuvC like domain disclosed herein, e.g., in FIGS. 3A-3B or FIGS. 7A-7B, as many as 1 but no more than 2, 3, 4, or 5 residues. In an embodiment, 1, 2, 3 or all of the highly conserved residues identified in FIGS. 3A-3B or FIGS. 7A-7B are present.

[1179] In an embodiment, the N-terminal RuvC-like domain differs from a sequence of an N-terminal RuvC-like domain disclosed herein, e.g., in FIGS. 4A-4B or FIGS. 7A-7B, as many as 1 but no more than 2, 3, 4, or 5 residues. In an embodiment, 1, 2, or all of the highly conserved residues identified in FIGS. 4A-4 B or FIGS. 7A-7B are present.

[1180] Additional RuvC-like Domains

[1181] In addition to the N-terminal RuvC-like domain, the Cas9 molecule or Cas9 polypeptide, e.g., an eaCas9 molecule or eaCas9 polypeptide, can comprise one or more additional RuvC-like domains. In an embodiment, the Cas9 molecule or Cas9 polypeptide can comprise two additional RuvC-like domains. Preferably, the additional RuvC-like domain is at least 5 amino acids in length and, e.g., less than 15 amino acids in length, e.g., 5 to 10 amino acids in length, e.g., 8 amino acids in length.

[1182] An additional RuvC-like domain can comprise an amino acid sequence:

I-X1-X2-E-X3-A-R-E (SEQ ID NO:12), wherein

[1183] X1 is V or H,

[1184] X2 is I, L or V (e.g., I or V); and

[1185] X3 is M or T.

[1186] In an embodiment, the additional RuvC-like domain comprises the amino acid sequence:

I-V-X2-E-M-A-R-E (SEQ ID NO:13), wherein

[1187] X2 is I, L or V (e.g., I or V) (e.g., the eaCas9 molecule or eaCas9 polypeptide can comprise an additional RuvC-like domain shown in FIG. 2A-2G or FIGS. 7A-7B (depicted as B)).

[1188] An additional RuvC-like domain can comprise an amino acid sequence:

H-H-A-X1-D-A-X2-X3 (SEQ ID NO: 14), wherein

[1189] X1 is H or L;

[1190] X2 is R or V; and

[1191] X3 is E or V.

[1192] In an embodiment, the additional RuvC-like domain comprises the amino acid sequence:

H-H-A-H-D-A-Y-L (SEQ ID NO:15).

[1193] In an embodiment, the additional RuvC-like domain differs from a sequence of SEQ ID NO: 12, 13, 14 or 15 by as many as 1 but no more than 2, 3, 4, or 5 residues.

[1194] In some embodiments, the sequence flanking the N-terminal RuvC-like domain is a sequences of formula V:

K-X1′-Y-X2′-X3′-X4′-Z-T-D-X9′-Y, (SEQ ID NO: 16).

[1195] wherein

[1196] X1′ is selected from K and P,

[1197] X2′ is selected from V, L, I, and F (e.g., V, I and L);

[1198] X3′ is selected from G, A and S (e.g., G),

[1199] X4′ is selected from L, I, V and F (e.g., L);

[1200] X9′ is selected from D, E, N and Q; and

[1201] Z is an N-terminal RuvC-like domain, e.g., as described above.

[1202] HNH-like Domains

[1203] In an embodiment, an HNH-like domain cleaves a single stranded complementary domain, e.g., a complementary strand of a double stranded nucleic acid molecule. In an embodiment, an HNH-like domain is at least 15, 20, 25 amino acids in length but not more than 40, 35 or 30 amino acids in length, e.g., 20 to 35 amino acids in length, e.g., 25 to 30 amino acids in length. Exemplary HNH-like domains are described below.

[1204] In an embodiment, an eaCas9 molecule or eaCas9 polypeptide comprises an HNH-like domain having an amino acid sequence of formula VI:

X1-X2-X3-H-X4-X5-P-X6-X7-X8-X9-X10-X11-X12-X13-X14-X15-N-X16-X17-X18-X19-X20-X21-X22-X23-N (SEQ ID NO: 17), wherein

[1205] X1 is selected from D, E, Q and N (e.g., D and E);

[1206] X2 is selected from L, I, R, Q, V, M and K;

[1207] X3 is selected from D and E;

[1208] X4 is selected from I, V, T, A and L (e.g., A, I and V);

[1209] X5 is selected from V, Y, I, L, F and W (e.g., V, I and L);

[1210] X6 is selected from Q, H, R, K, Y, I, L, F and W;

[1211] X7 is selected from S, A, D, T and K (e.g., S and A);

[1212] X8 is selected from F, L, V, K, Y, M, I, R, A, E, D and Q (e.g., F);

[1213] X9 is selected from L, R, T, I, V, S, C, Y, K, F and G;

[1214] X10 is selected from K, Q, Y, T, F, L, W, M, A, E, G, and S;

[1215] X11 is selected from D, S, N, R, L and T (e.g., D);

[1216] X12 is selected from D, N and S;

[1217] X13 is selected from S, A, T, G and R (e.g., S);

[1218] X14 is selected from I, L, F, S, R, Y, Q, W, D, K and H (e.g., I, L and F);

[1219] X15 is selected from D, S, I, N, E, A, H, F, L, Q, M, G, Y and V;

[1220] X16 is selected from K, L, R, M, T and F (e.g., L, R and K);

[1221] X17 is selected from V, L, I, A and T;

[1222] X18 is selected from L, I, V and A (e.g., L and I);

[1223] X19 is selected from T, V, C, E, S and A (e.g., T and V);

[1224] X20 is selected from R, F, T, W, E, L, N, C, K, V, S, Q, I, Y, H and A;

[1225] X21 is selected from S, P, R, K, N, A, H, Q, G and L;

[1226] X22 is selected from D, G, T, N, S, K, A, I, E, L, Q, R and Y; and

[1227] X23 is selected from K, V, A, E, Y, I, C, L, S, T, G, K, M, D and F.

[1228] In an embodiment, a HNH-like domain differs from a sequence of SEQ ID NO: 17 by at least one but no more than, 2, 3, 4, or 5 residues.

[1229] In an embodiment, the HNH-like domain is cleavage competent.

[1230] In an embodiment, the HNH-like domain is cleavage incompetent.

[1231] In an embodiment, an eaCas9 molecule or eaCas9 polypeptide comprises an HNH-like domain comprising an amino acid sequence of formula VII:

X1-X2-X3-H-X4-X5-P-X6-S-X8-X9-X10-D-D-S-X14-X15-N-K-V-L-X19-X20-X21-X22-X23-N (SEQ ID NO: 18),

[1232] wherein

[1233] X1 is selected from D and E;

[1234] X2 is selected from L, I, R, Q, V, M and K;

[1235] X3 is selected from D and E;

[1236] X4 is selected from I, V, T, A and L (e.g., A, I and V);

[1237] X5 is selected from V, Y, I, L, F and W (e.g., V, I and L);

[1238] X6 is selected from Q, H, R, K, Y, I, L, F and W;

[1239] X8 is selected from F, L, V, K, Y, M, I, R, A, E, D and Q (e.g., F);

[1240] X9 is selected from L, R, T, I, V, S, C, Y, K, F and G;

[1241] X10 is selected from K, Q, Y, T, F, L, W, M, A, E, G, and S;

[1242] X14 is selected from I, L, F, S, R, Y, Q, W, D, K and H (e.g., I, L and F);

[1243] X15 is selected from D, S, I, N, E, A, H, F, L, Q, M, G, Y and V;

[1244] X19 is selected from T, V, C, E, S and A (e.g., T and V);

[1245] X20 is selected from R, F, T, W, E, L, N, C, K, V, S, Q, I, Y, H and A;

[1246] X21 is selected from S, P, R, K, N, A, H, Q, G and L;

[1247] X22 is selected from D, G, T, N, S, K, A, I, E, L, Q, R and Y; and

[1248] X23 is selected from K, V, A, E, Y, I, C, L, S, T, G, K, M, D and F.

[1249] In an embodiment, the HNH-like domain differs from a sequence of SEQ ID NO: 18 by 1, 2, 3, 4, or 5 residues.

[1250] In an embodiment, an eaCas9 molecule or eaCas9 polypeptide comprises an HNH-like domain comprising an amino acid sequence of formula VII:

X1-V-X3-H-I-V-P-X6-S-X8-X9-X10-D-D-S-X14-X15-N-K-V-L-T-X20-X21-X22-X23-N (SEQ ID NO:19),

[1251] wherein

[1252] X1 is selected from D and E;

[1253] X3 is selected from D and E;

[1254] X6 is selected from Q, H, R, K, Y, I, L and W;

[1255] X8 is selected from F, L, V, K, Y, M, I, R, A, E, D and Q (e.g., F);

[1256] X9 is selected from L, R, T, I, V, S, C, Y, K, F and G;

[1257] X10 is selected from K, Q, Y, T, F, L, W, M, A, E, G, and S;

[1258] X14 is selected from I, L, F, S, R, Y, Q, W, D, K and H (e.g., I, L and F);

[1259] X15 is selected from D, S, I, N, E, A, H, F, L, Q, M, G, Y and V;

[1260] X20 is selected from R, F, T, W, E, L, N, C, K, V, S, Q, I, Y, H and A;

[1261] X21 is selected from S, P, R, K, N, A, H, Q, G and L;

[1262] X22 is selected from D, G, T, N, S, K, A, I, E, L, Q, R and Y; and

[1263] X23 is selected from K, V, A, E, Y, I, C, L, S, T, G, K, M, D and F.

[1264] In an embodiment, the HNH-like domain differs from a sequence of SEQ ID NO: 19 by 1, 2, 3, 4, or 5 residues.

[1265] In an embodiment, an eaCas9 molecule or eaCas9 polypeptide comprises an HNH-like domain having an amino acid sequence of formula VIII:

D-X2-D-H-I-X5-P-Q-X7-F-X9-X10-D-X12-S-I-D-N-X16-V-L-X19-X20-S-X22-X23-N (SEQ ID NO:20),

[1266] wherein

[1267] X2 is selected from I and V;

[1268] X5 is selected from I and V;

[1269] X7 is selected from A and S;

[1270] X9 is selected from I and L;

[1271] X10 is selected from K and T;

[1272] X12 is selected from D and N;

[1273] X16 is selected from R, K and L; X19 is selected from T and V;

[1274] X20 is selected from S and R;

[1275] X22 is selected from K, D and A; and

[1276] X23 is selected from E, K, G and N (e.g., the eaCas9 molecule or eaCas9 polypeptide can comprise an HNH-like domain as described herein).

[1277] In an embodiment, the HNH-like domain differs from a sequence of SEQ ID NO: 20 by as many as 1 but no more than 2, 3, 4, or 5 residues.

[1278] In an embodiment, an eaCas9 molecule or eaCas9 polypeptide comprises the amino acid sequence of formula IX:

L-Y-Y-L-Q-N-G-X1′-D-M-Y-X2′-X3′-X4′-X5′-L-D-I-X6′-X7′-L-S-X8′-Y-Z-N-R-X9′-K-X10′-D-X11′-V-P (SEQ ID NO: 21),

[1279] wherein

[1280] X1′ is selected from K and R;

[1281] X2′ is selected from V and T;

[1282] X3′ is selected from G and D;

[1283] X4′ is selected from E, Q and D;

[1284] X5′ is selected from E and D;

[1285] X6′ is selected from D, N and H;

[1286] X7′ is selected from Y, R and N;

[1287] X8′ is selected from Q, D and N; X9′ is selected from G and E;

[1288] X10′ is selected from S and G;

[1289] X11′ is selected from D and N; and

[1290] Z is an HNH-like domain, e.g., as described above.

[1291] In an embodiment, the eaCas9 molecule or eaCas9 polypeptide comprises an amino acid sequence that differs from a sequence of SEQ ID NO:21 by as many as 1 but no more than 2, 3, 4, or 5 residues.

[1292] In an embodiment, the HNH-like domain differs from a sequence of an HNH-like domain disclosed herein, e.g., in FIGS. 5A-5C or FIGS. 7A-7B, as many as 1 but no more than 2, 3, 4, or 5 residues. In an embodiment, 1 or both of the highly conserved residues identified in FIGS. 5A-5C or FIGS. 7A-7B are present.

[1293] In an embodiment, the HNH -like domain differs from a sequence of an HNH-like domain disclosed herein, e.g., in FIGS. 6A-6B or FIGS. 7A-7B, as many as 1 but no more than 2, 3, 4, or 5 residues. In an embodiment, 1, 2, all 3 of the highly conserved residues identified in FIGS. 6A-6B or FIGS. 7A-7B are present.

[1294] Cas9 Activities

[1295] Nuclease and Helicase Activities

[1296] In an embodiment, the Cas9 molecule or Cas9 polypeptide is capable of cleaving a target nucleic acid molecule. Typically wild type Cas9 molecules cleave both strands of a target nucleic acid molecule. Cas9 molecules and Cas9 polypeptides can be engineered to alter nuclease cleavage (or other properties), e.g., to provide a Cas9 molecule or Cas9 peolypeptide which is a nickase, or which lacks the ability to cleave target nucleic acid. A Cas9 molecule or Cas9 polypeptide that is capable of cleaving a target nucleic acid molecule is referred to herein as an eaCas9 (an enzymatically active Cas9) molecule or eaCas9 polypeptide.

[1297] In an embodiment, an eaCas9 molecule or eaCas9 polypeptide comprises one or more of the following enzymatic activities:

[1298] a nickase activity, i.e., the ability to cleave a single strand, e.g., the non-complementary strand or the complementary strand, of a nucleic acid molecule;

[1299] a double stranded nuclease activity, i.e., the ability to cleave both strands of a double stranded nucleic acid and create a double stranded break, which in an embodiment is the presence of two nickase activities;

[1300] an endonuclease activity;

[1301] an exonuclease activity; and

[1302] a helicase activity, i.e., the ability to unwind the helical structure of a double stranded nucleic acid.

[1303] In an embodiment, an enzymatically active or an eaCas9 molecule or eaCas9 polypeptide cleaves both DNA strands and results in a double stranded break. In an embodiment, an eaCas9 molecule or eaCas9 polypeptide cleaves only one strand, e.g., the strand to which the gRNA hybridizes to, or the strand complementary to the strand the gRNA hybridizes with. In an embodiment, an eaCas9 molecule or eaCas9 polypeptide comprises cleavage activity associated with an HNH domain. In an embodiment, an eaCas9 molecule or eaCas9 polypeptide comprises cleavage activity associated with a RuvC domain. In an embodiment, an eaCas9 molecule or eaCas9 polypeptide comprises cleavage activity associated with an HNH domain and cleavage activity associated with a RuvC domain. In an embodiment, an eaCas9 molecule or eaCas9 polypeptide comprises an active, or cleavage competent, HNH domain and an inactive, or cleavage incompetent, RuvC domain. In an embodiment, an eaCas9 molecule or eaCas9 polypeptide comprises an inactive, or cleavage incompetent, HNH domain and an active, or cleavage competent, RuvC domain.

[1304] Some Cas9 molecules or Cas9 polypeptides have the ability to interact with a gRNA molecule, and in conjunction with the gRNA molecule localize to a core target domain, but are incapable of cleaving the target nucleic acid, or incapable of cleaving at efficient rates. Cas9 molecules having no, or no substantial, cleavage activity are referred to herein as an eiCas9 molecule or eiCas9 polypeptide. For example, an eiCas9 molecule or eiCas9 polypeptide can lack cleavage activity or have substantially less, e.g., less than 20, 10, 5, 1 or 0.1% of the cleavage activity of a reference Cas9 molecule or eiCas9 polypeptide, as measured by an assay described herein.

[1305] Targeting And PAMs

[1306] A Cas9 molecule or Cas9 polypeptide, is a polypeptide that can interact with a guide RNA (gRNA) molecule and, in concert with the gRNA molecule, localizes to a site which comprises a target domain, and in an embodiment, a PAM sequence.

[1307] In an embodiment, the ability of an eaCas9 molecule or eaCas9 polypeptide to interact with and cleave a target nucleic acid is PAM sequence dependent. A PAM sequence is a sequence in the target nucleic acid. In an embodiment, cleavage of the target nucleic acid occurs upstream from the PAM sequence. EaCas9 molecules from different bacterial species can recognize different sequence motifs (e.g., PAM sequences). In an embodiment, an eaCas9 molecule of S. pyogenes recognizes the sequence motif NGG and directs cleavage of a target nucleic acid sequence 1 to 10, e.g., 3 to 5, base pairs upstream from that sequence. See, e.g., Mali et al., SCIENCE 2013; 339(6121): 823-826. In an embodiment, an eaCas9 molecule of S. thermophilus recognizes the sequence motif NGGNG (SEQ ID NO.: 90) and/or NNAGAAW (W=A or T) (SEQ ID NO.: 91) and directs cleavage of a target nucleic acid sequence 1 to 10, e.g., 3 to 5, base pairs upstream from these sequences. See, e.g., Horvath et al., SCIENCE 2010; 327(5962):167-170, and Deveau et al., J BACTERIOL 2008; 190(4): 1390-1400. In an embodiment, an eaCas9 molecule of S. mutans recognizes the sequence motif NGG and/or NAAR (R=A or G) (SEQ ID NO.: 92) and directs cleavage of a target nucleic acid sequence 1 to 10, e.g., 3 to 5 base pairs, upstream from this sequence. See, e.g., Deveau et al., J BACTERIOL 2008; 190(4): 1390-1400. In an embodiment, an eaCas9 molecule of S. aureus recognizes the sequence motif NNGRR (R=A or G) (SEQ ID NO.: 93) and directs cleavage of a target nucleic acid sequence 1 to 10, e.g., 3 to 5, base pairs upstream from that sequence. In an embodiment, an eaCas9 molecule of S. aureus recognizes the sequence motif NNGRRN (R=A or G) and directs cleavage of a target nucleic acid sequence 1 to 10, e.g., 3 to 5, base pairs upstream from that sequence. In an embodiment, an eaCas9 molecule of S. aureus recognizes the sequence motif NNGRRT (R=A or G) and directs cleavage of a target nucleic acid sequence 1 to 10, e.g., 3 to 5, base pairs upstream from that sequence. In an embodiment, an eaCas9 molecule of S. aureus recognizes the sequence motif NNGRRV (R=A or G) (SEQ ID NO.:) and directs cleavage of a target nucleic acid sequence 1 to 10, e.g., 3 to 5, base pairs upstream from that sequence. In an embodiment, an eaCas9 molecule of N. meningitidis recognizes the sequence motif NNNNGATT (SEQ ID NO.: 94) or NNNGCTT (R=A or G) (SEQ ID NO: 95) and directs cleavage of a target nucleic acid sequence 1 to 10, e.g., 3 to 5, base pairs upstream from that sequence. See, e.g., Hou et al., PNAS 2013; 110(39):15644-15649. The ability of a Cas9 molecule to recognize a PAM sequence can be determined, e.g., using a transformation assay described in Jinek el al., SCIENCE 2012, 337:816. In the aforementioned embodiments, N can be any nucleotide residue, e.g., any of A, G, C or T.

[1308] As is discussed herein, Cas9 molecules can be engineered to alter the PAM specificity of the Cas9 molecule.

[1309] Exemplary naturally occurring Cas9 molecules are described in Chylinski et al., RNA BIOLOGY 2013 10:5, 727-737. Such Cas9 molecules include Cas9 molecules of a cluster 1 bacterial family, cluster 2 bacterial family, cluster 3 bacterial family, cluster 4 bacterial family, cluster 5 bacterial family, cluster 6 bacterial family, a cluster 7 bacterial family, a cluster 8 bacterial family, a cluster 9 bacterial family, a cluster 10 bacterial family, a cluster 11 bacterial family, a cluster 12 bacterial family, a cluster 13 bacterial family, a cluster 14 bacterial family, a cluster 15 bacterial family, a cluster 16 bacterial family, a cluster 17 bacterial family, a cluster 18 bacterial family, a cluster 19 bacterial family, a cluster 20 bacterial family, a cluster 21 bacterial family, a cluster 22 bacterial family, a cluster 23 bacterial family, a cluster 24 bacterial family, a cluster 25 bacterial family, a cluster 26 bacterial family, a cluster 27 bacterial family, a cluster 28 bacterial family, a cluster 29 bacterial family, a cluster 30 bacterial family, a cluster 31 bacterial family, a cluster 32 bacterial family, a cluster 33 bacterial family, a cluster 34 bacterial family, a cluster 35 bacterial family, a cluster 36 bacterial family, a cluster 37 bacterial family, a cluster 38 bacterial family, a cluster 39 bacterial family, a cluster 40 bacterial family, a cluster 41 bacterial family, a cluster 42 bacterial family, a cluster 43 bacterial family, a cluster 44 bacterial family, a cluster 45 bacterial family, a cluster 46 bacterial family, a cluster 47 bacterial family, a cluster 48 bacterial family, a cluster 49 bacterial family, a cluster 50 bacterial family, a cluster 51 bacterial family, a cluster 52 bacterial family, a cluster 53 bacterial family, a cluster 54 bacterial family, a cluster 55 bacterial family, a cluster 56 bacterial family, a cluster 57 bacterial family, a cluster 58 bacterial family, a cluster 59 bacterial family, a cluster 60 bacterial family, a cluster 61 bacterial family, a cluster 62 bacterial family, a cluster 63 bacterial family, a cluster 64 bacterial family, a cluster 65 bacterial family, a cluster 66 bacterial family, a cluster 67 bacterial family, a cluster 68 bacterial family, a cluster 69 bacterial family, a cluster 70 bacterial family, a cluster 71 bacterial family, a cluster 72 bacterial family, a cluster 73 bacterial family, a cluster 74 bacterial family, a cluster 75 bacterial family, a cluster 76 bacterial family, a cluster 77 bacterial family, or a cluster 78 bacterial family.

[1310] Exemplary naturally occurring Cas9 molecules include a Cas9 molecule of a cluster 1 bacterial family. Examples include a Cas9 molecule of: S. pyogenes (e.g., strain SF370, MGAS10270, MGAS10750, MGAS2096, MGAS315, MGAS5005, MGAS6180, MGAS9429, NZ131 and SSI-1), S. thermophilus (e.g., strain LMD-9), S. pseudoporcinus (e.g., strain SPIN 20026), S. mutans (e.g., strain UA159, NN2025), S. macacae (e.g., strain NCTC11558), S. gallolyticus (e.g., strain UCN34, ATCC BAA-2069), S. equines (e.g., strain ATCC 9812, MGCS 124), S. dysdalactiae (e.g., strain GGS 124), S. bovis (e.g., strain ATCC 700338), S. anginosus (e.g., strain F0211), S. agalactiae (e.g., strain NEM316, A909), Listeria monocytogenes (e.g., strain F6854), Listeria innocua (L. innocua, e.g., strain Clip11262), Enterococcus italicus (e.g., strain DSM 15952), or Enterococcus faecium (e.g., strain 1,231,408). Additional exemplary Cas9 molecules are a Cas9 molecule of Neisseria meningitidis (Hou et al., PNAS Early Edition 2013, 1-6 and a S. aureus cas9 molecule.

[1311] In an embodiment, a Cas9 molecule or Cas9 polypeptide, e.g., an eaCas9 molecule or eaCas9 polypeptide, comprises an amino acid sequence:

[1312] having 60%, 65%, 70%, 75%, 80%, 85%, 90%, 95%, 96%, 97%, 98% or 99% homology with;

[1313] differs at no more than, 2, 5, 10, 15, 20, 30, or 40% of the amino acid residues when compared with;

[1314] differs by at least 1, 2, 5, 10 or 20 amino acids, but by no more than 100, 80, 70, 60, 50, 40 or 30 amino acids from; or

[1315] is identical to any Cas9 molecule sequence described herein, or a naturally occurring Cas9 molecule sequence, e.g., a Cas9 molecule from a species listed herein or described in Chylinski et al., RNA BIOLOGY 2013 10:5, 727-737; Hou et al., PNAS Early Edition 2013, 1-6; SEQ ID NO:1-4. In an embodiment, the Cas9 molecule or Cas9 polypeptide comprises one or more of the following activities: a nickase activity; a double stranded cleavage activity (e.g., an endonuclease and/or exonuclease activity); a helicase activity; or the ability, together with a gRNA molecule, to localize to a target nucleic acid.

[1316] In an embodiment, a Cas9 molecule or Cas9 polypeptide comprises any of the amino acid sequence of the consensus sequence of FIGS. 2A-2G, wherein “*” indicates any amino acid found in the corresponding position in the amino acid sequence of a Cas9 molecule of S. pyogenes, S. thermophilus, S. mutans and L. innocua, and “-” indicates any amino acid. In an embodiment, a Cas9 molecule or Cas9 polypeptide differs from the sequence of the consensus sequence disclosed in FIGS. 2A-2G by at least 1, but no more than 2, 3, 4, 5, 6, 7, 8, 9, or 10 amino acid residues. In an embodiment, a Cas9 molecule or Cas9 polypeptide comprises the amino acid sequence of SEQ ID NO:7 of FIGS. 7A-7B, wherein “*” indicates any amino acid found in the corresponding position in the amino acid sequence of a Cas9 molecule of S. pyogenes, or N. meningitidis, “-” indicates any amino acid, and “-” indicates any amino acid or absent. In an embodiment, a Cas9 molecule or Cas9 polypeptide differs from the sequence of SEQ ID NO:6 or 7 disclosed in FIGS. 7A-7B by at least 1, but no more than 2, 3, 4, 5, 6, 7, 8, 9, or 10 amino acid residues.

[1317] A comparison of the sequence of a number of Cas9 molecules indicate that certain regions are conserved. These are identified below as:

[1318] region 1 (residues 1 to 180, or in the case of region 1′residues 120 to 180)

[1319] region 2 (residues 360 to 480);

[1320] region 3 (residues 660 to 720);

[1321] region 4 (residues 817 to 900); and

[1322] region 5 (residues 900 to 960);

[1323] In an embodiment, a Cas9 molecule or Cas9 polypeptide comprises regions 1-5, together with sufficient additional Cas9 molecule sequence to provide a biologically active molecule, e.g., a Cas9 molecule having at least one activity described herein. In an embodiment, each of regions 1-5, independently, have 50%, 60%, 70%, 80%, 85%, 90%, 95%, 96%, 97%, 98% or 99% homology with the corresponding residues of a Cas9 molecule or Cas9 polypeptide described herein, e.g., a sequence from FIGS. 2A-2G or from FIGS. 7A-7B.

[1324] In an embodiment, a Cas9 molecule or Cas9 polypeptide, e.g., an eaCas9 molecule or eaCas9 polypeptide, comprises an amino acid sequence referred to as region 1:

[1325] having 50%, 60%, 70%, 80%, 85%, 90%, 95%, 96%, 97%, 98% or 99% homology with amino acids 1-180 (the numbering is according to the motif sequence in FIG. 2; 52% of residues in the four Cas9 sequences in FIGS. 2A-2G are conserved) of the amino acid sequence of Cas9 of S. pyogenes;

[1326] differs by at least 1, 2, 5, 10 or 20 amino acids but by no more than 90, 80, 70, 60, 50, 40 or 30 amino acids from amino acids 1-180 of the amino acid sequence of Cas9 of S. pyogenes, S. thermophilus, S. mutans or Listeria innocua; or

[1327] is identical to 1-180 of the amino acid sequence of Cas9 of S. pyogenes, S. thermophilus, S. mutans or L. innocua.

[1328] In an embodiment, a Cas9 molecule or Cas9 polypeptide, e.g., an eaCas9 molecule or eaCas9 polypeptide, comprises an amino acid sequence referred to as region 1′:

[1329] having 55%, 60%, 65%, 70%, 75%, 80%, 85%, 90%, 95%, 96%, 97%, 98% or 99% homology with amino acids 120-180 (55% of residues in the four Cas9 sequences in FIG. 2 are conserved) of the amino acid sequence of Cas9 of S. pyogenes, S. thermophilus, S. mutans or L. innocua;

[1330] differs by at least 1, 2, or 5 amino acids but by no more than 35, 30, 25, 20 or 10 amino acids from amino acids 120-180 of the amino acid sequence of Cas9 of S. pyogenes, S. thermophilus, S. mutans or L. innocua; or

[1331] is identical to 120-180 of the amino acid sequence of Cas9 of S. pyogenes, S. thermophilus, S. mutans or L. innocua.

[1332] In an embodiment, a Cas9 molecule or Cas9 polypeptide, e.g., an eaCas9 molecule or eaCas9 polypeptide, comprises an amino acid sequence referred to as region 2:

[1333] having 50%, 55%, 60%, 65%, 70%, 75%, 80%, 85%, 90%, 95%, 96%, 97%, 98% or 99% homology with amino acids 360-480 (52% of residues in the four Cas9 sequences in FIG. 2 are conserved) of the amino acid sequence of Cas9 of S. pyogenes, S. thermophilus, S. mutans or L. innocua;

[1334] differs by at least 1, 2, or 5 amino acids but by no more than 35, 30, 25, 20 or 10 amino acids from amino acids 360-480 of the amino acid sequence of Cas9 of S. pyogenes, S. thermophilus, S. mutans or L. innocua; or

[1335] is identical to 360-480 of the amino acid sequence of Cas9 of S. pyogenes, S. thermophilus, S. mutans or L. innocua.

[1336] In an embodiment, a Cas9 molecule or Cas9 polypeptide, e.g., an eaCas9 molecule or eaCas9 polypeptide, comprises an amino acid sequence referred to as region 3:

[1337] having 55%, 60%, 65%, 70%, 75%, 80%, 85%, 90%, 95%, 96%, 97%, 98%, or 99% homology with amino acids 660-720 (56% of residues in the four Cas9 sequences in FIG. 2 are conserved) of the amino acid sequence of Cas9 of S. pyogenes, S. thermophilus, S. mutans or L. innocua;

[1338] differs by at least 1, 2, or 5 amino acids but by no more than 35, 30, 25, 20 or 10 amino acids from amino acids 660-720 of the amino acid sequence of Cas9 of S. pyogenes, S. thermophilus, S. mutans or L. innocua; or

[1339] is identical to 660-720 of the amino acid sequence of Cas9 of S. pyogenes, S. thermophilus, S. mutans or L. innocua.

[1340] In an embodiment, a Cas9 molecule or Cas9 polypeptide, e.g., an eaCas9 molecule or eaCas9 polypeptide, comprises an amino acid sequence referred to as region 4:

[1341] having 50%, 55%, 60%, 65%, 70%, 75%, 80%, 85%, 90%, 95%, 96%, 97%, 98%, or 99% homology with amino acids 817-900 (55% of residues in the four Cas9 sequences in FIGS. 2A-2G are conserved) of the amino acid sequence of Cas9 of S. pyogenes, S. thermophilus, S. mutans or L. innocua;

[1342] differs by at least 1, 2, or 5 amino acids but by no more than 35, 30, 25, 20 or 10 amino acids from amino acids 817-900 of the amino acid sequence of Cas9 of S. pyogenes, S. thermophilus, S. mutans or L. innocua; or

[1343] is identical to 817-900 of the amino acid sequence of Cas9 of S. pyogenes, S. thermophilus, S. mutans or L. innocua.

[1344] In an embodiment, a Cas9 molecule or Cas9 polypeptide, e.g., an eaCas9 molecule or eaCas9 polypeptide, comprises an amino acid sequence referred to as region 5:

[1345] having 50%, 55%, 60%, 65%, 70%, 75%, 80%, 85%, 90%, 95%, 96%, 97%, 98%, or 99% homology with amino acids 900-960 (60% of residues in the four Cas9 sequences in FIGS. 2A-2G are conserved) of the amino acid sequence of Cas9 of S. pyogenes, S. thermophilus, S. mutans or L. innocua;

[1346] differs by at least 1, 2, or 5 amino acids but by no more than 35, 30, 25, 20 or 10 amino acids from amino acids 900-960 of the amino acid sequence of Cas9 of S. pyogenes, S. thermophilus, S. mutans or L. innocua; or

[1347] is identical to 900-960 of the amino acid sequence of Cas9 of S. pyogenes, S. thermophilus, S. mutans or L. innocua.

[1348] Engineered or Altered Cas9 Molecules and Cas9 Polypeptides

[1349] Cas9 molecules and Cas9 polypeptides described herein, e.g., naturally occurring Cas9 molecules, can possess any of a number of properties, including: nuclease activity (e.g., endonuclease and/or exonuclease activity); helicase activity; the ability to associate functionally with a gRNA molecule; and the ability to target (or localize to) a site on a nucleic acid (e.g., PAM recognition and specificity). In an embodiment, a Cas9 molecule or Cas9 polypeptide can include all or a subset of these properties. In a typical embodiment, a Cas9 molecule or Cas9 polypeptide has the ability to interact with a gRNA molecule and, in concert with the gRNA molecule, localize to a site in a nucleic acid. Other activities, e.g., PAM specificity, cleavage activity, or helicase activity can vary more widely in Cas9 molecules and Cas9 polypeptides.

[1350] Cas9 molecules include engineered Cas9 molecules and engineered Cas9 polypeptides (engineered, as used in this context, means merely that the Cas9 molecule or Cas9 polypeptide differs from a reference sequences, and implies no process or origin limitation). An engineered Cas9 molecule or Cas9 polypeptide can comprise altered enzymatic properties, e.g., altered nuclease activity, (as compared with a naturally occurring or other reference Cas9 molecule) or altered helicase activity. As discussed herein, an engineered Cas9 molecule or Cas9 polypeptide can have nickase activity (as opposed to double strand nuclease activity). In an embodiment an engineered Cas9 molecule or Cas9 polypeptide can have an alteration that alters its size, e.g., a deletion of amino acid sequence that reduces its size, e.g., without significant effect on one or more, or any Cas9 activity. In an embodiment, an engineered Cas9 molecule or Cas9 polypeptide can comprise an alteration that affects PAM recognition. E.g., an engineered Cas9 molecule can be altered to recognize a PAM sequence other than that recognized by the endogenous wild-type PI domain. In an embodiment a Cas9 molecule or Cas9 polypeptide can differ in sequence from a naturally occurring Cas9 molecule but not have significant alteration in one or more Cas9 activities.

[1351] Cas9 molecules or Cas9 polypeptides with desired properties can be made in a number of ways, e.g., by alteration of a parental, e.g., naturally occurring, Cas9 molecules or Cas9 polypeptides, to provide an altered Cas9 molecule or Cas9 polypeptide having a desired property. For example, one or more mutations or differences relative to a parental Cas9 molecule, e.g., a naturally occurring or engineered Cas9 molecule, can be introduced. Such mutations and differences comprise: substitutions (e.g., conservative substitutions or substitutions of non-essential amino acids); insertions; or deletions. In an embodiment, a Cas9 molecule or Cas9 polypeptide can comprises one or more mutations or differences, e.g., at least 1, 2, 3, 4, 5, 10, 15, 20, 30, 40 or 50 mutations but less than 200, 100, or 80 mutations relative to a reference, e.g., a parental, Cas9 molecule.

[1352] In an embodiment, a mutation or mutations do not have a substantial effect on a Cas9 activity, e.g. a Cas9 activity described herein. In an embodiment, a mutation or mutations have a substantial effect on a Cas9 activity, e.g. a Cas9 activity described herein.

[1353] Non-Cleaving and Modified-Cleavage Cas9 Molecules and Cas9 Polypeptides

[1354] In an embodiment, a Cas9 molecule or Cas9 polypeptide comprises a cleavage property that differs from naturally occurring Cas9 molecules, e.g., that differs from the naturally occurring Cas9 molecule having the closest homology. For example, a Cas9 molecule or Cas9 polypeptide can differ from naturally occurring Cas9 molecules, e.g., a Cas9 molecule of S. pyogenes, as follows: its ability to modulate, e.g., decreased or increased, cleavage of a double stranded nucleic acid (endonuclease and/or exonuclease activity), e.g., as compared to a naturally occurring Cas9 molecule (e.g., a Cas9 molecule of S. pyogenes); its ability to modulate, e.g., decreased or increased, cleavage of a single strand of a nucleic acid, e.g., a non-complementary strand of a nucleic acid molecule or a complementary strand of a nucleic acid molecule (nickase activity), e.g., as compared to a naturally occurring Cas9 molecule (e.g., a Cas9 molecule of S. pyogenes); or the ability to cleave a nucleic acid molecule, e.g., a double stranded or single stranded nucleic acid molecule, can be eliminated.

[1355] Modified Cleavage eaCas9 Molecules and eaCas9 Polypeptides

[1356] In an embodiment, an eaCas9 molecule or eaCas9 polypeptide comprises one or more of the following activities: cleavage activity associated with an N-terminal RuvC-like domain; cleavage activity associated with an HNH-like domain; cleavage activity associated with an HNH-like domain and cleavage activity associated with an N-terminal RuvC-like domain.

[1357] In an embodiment, an eaCas9 molecule or eaCas9 polypeptide comprises an active, or cleavage competent, HNH-like domain (e.g., an HNH-like domain described herein, e.g., SEQ ID NO: 17, SEQ ID NO: 18, SEQ ID NO: 19, SEQ ID NO: 20 or SEQ ID NO: 21) and an inactive, or cleavage incompetent, N-terminal RuvC-like domain. An exemplary inactive, or cleavage incompetent N-terminal RuvC-like domain can have a mutation of an aspartic acid in an N-terminal RuvC-like domain, e.g., an aspartic acid at position 9 of the consensus sequence disclosed in FIGS. 2A-2G or an aspartic acid at position 10 of SEQ ID NO: 7, e.g., can be substituted with an alanine. In an embodiment, the eaCas9 molecule or eaCas9 polypeptide differs from wild type in the N-terminal RuvC-like domain and does not cleave the target nucleic acid, or cleaves with significantly less efficiency, e.g., less than 20, 10, 5, 1 or 1% of the cleavage activity of a reference Cas9 molecule, e.g., as measured by an assay described herein. The reference Cas9 molecule can by a naturally occurring unmodified Cas9 molecule, e.g., a naturally occurring Cas9 molecule such as a Cas9 molecule of S. pyogenes, or S. thermophilus. In an embodiment, the reference Cas9 molecule is the naturally occurring Cas9 molecule having the closest sequence identity or homology.

[1358] In an embodiment, an eaCas9 molecule or eaCas9 polypeptide comprises an inactive, or cleavage incompetent, HNH domain and an active, or cleavage competent, N-terminal RuvC-like domain (e.g., a RuvC-like domain described herein, e.g., SEQ ID NO: 8, SEQ ID NO: 9, SEQ ID NO: 10, SEQ ID NO: 11, SEQ ID NO: 12, SEQ ID NO: 13, SEQ ID NO: 14, SEQ ID NO: 15, or SEQ ID NO: 16). Exemplary inactive, or cleavage incompetent HNH-like domains can have a mutation at one or more of: a histidine in an HNH-like domain, e.g., a histidine shown at position 856 of the consensus sequence disclosed in FIGS. 2A-2G, e.g., can be substituted with an alanine; and one or more asparagines in an HNH-like domain, e.g., an asparagine shown at position 870 of the consensus sequence disclosed in FIGS. 2A-2G and/or at position 879 of the consensus sequence disclosed in FIGS. 2A-2G, e.g., can be substituted with an alanine. In an embodiment, the eaCas9 differs from wild type in the HNH-like domain and does not cleave the target nucleic acid, or cleaves with significantly less efficiency, e.g., less than 20, 10, 5, 1 or 0.1% of the cleavage activity of a reference Cas9 molecule, e.g., as measured by an assay described herein. The reference Cas9 molecule can by a naturally occurring unmodified Cas9 molecule, e.g., a naturally occurring Cas9 molecule such as a Cas9 molecule of S. pyogenes, or S. thermophilus. In an embodiment, the reference Cas9 molecule is the naturally occurring Cas9 molecule having the closest sequence identity or homology.

[1359] Alterations in the Ability to Cleave One or Both Strands of a Target Nucleic Acid

[1360] In an embodiment, exemplary Cas9 activities comprise one or more of PAM specificity, cleavage activity, and helicase activity. A mutation(s) can be present, e.g., in: one or more RuvC domains, e.g., an N-terminal RuvC domain; an HNH domain; a region outside the RuvC domains and the HNH domain. In an embodiment, a mutation(s) is present in a RuvC domain. In an embodiment, a mutation(s) is present in an HNH domain. In an embodiment, mutations are present in both a RuvC domain and an HNH domain.

[1361] Exemplary mutations that may be made in the RuvC domain or HNH domain with reference to the S. pyogenes sequence include: D10A, E762A, H840A, N854A, N863A and/or D986A.

[1362] In an embodiment, a Cas9 molecule is an eiCas9 molecule comprising one or more differences in a RuvC domain and/or in an HNH domain as compared to a reference Cas9 molecule, and the eiCas9 molecule does not cleave a nucleic acid, or cleaves with significantly less efficiency than does wildtype, e.g., when compared with wild type in a cleavage assay, e.g., as described herein, cuts with less than 50, 25, 10, or 1% of a reference Cas9 molecule, as measured by an assay described herein.

[1363] Whether or not a particular sequence, e.g., a substitution, may affect one or more activity, such as targeting activity, cleavage activity, etc, can be evaluated or predicted, e.g., by evaluating whether the mutation is conservative. In an embodiment, a “non-essential” amino acid residue, as used in the context of a Cas9 molecule, is a residue that can be altered from the wild-type sequence of a Cas9 molecule, e.g., a naturally occurring Cas9 molecule, e.g., an eaCas9 molecule, without abolishing or more preferably, without substantially altering a Cas9 activity (e.g., cleavage activity), whereas changing an “essential” amino acid residue results in a substantial loss of activity (e.g., cleavage activity).

[1364] In an embodiment, a Cas9 molecule comprises a cleavage property that differs from naturally occurring Cas9 molecules, e.g., that differs from the naturally occurring Cas9 molecule having the closest homology. For example, a Cas9 molecule can differ from naturally occurring Cas9 molecules, e.g., a Cas9 molecule of S. aureus, S. pyogenes, or C. jejuni as follows: its ability to modulate, e.g., decreased or increased, cleavage of a double stranded break (endonuclease and/or exonuclease activity), e.g., as compared to a naturally occurring Cas9 molecule (e.g., a Cas9 molecule of S. aureus, S. pyogenes, or C. jejuni); its ability to modulate, e.g., decreased or increased, cleavage of a single strand of a nucleic acid, e.g., a non-complimentary strand of a nucleic acid molecule or a complementary strand of a nucleic acid molecule (nickase activity), e.g., as compared to a naturally occurring Cas9 molecule (e.g., a Cas9 molecule of S. aureus, S. pyogenes, or C. jejuni); or the ability to cleave a nucleic acid molecule, e.g., a double stranded or single stranded nucleic acid molecule, can be eliminated.

[1365] In an embodiment, the altered Cas9 molecule is an eaCas9 molecule comprising one or more of the following activities: cleavage activity associated with a RuvC domain; cleavage activity associated with an HNH domain; cleavage activity associated with an HNH domain and cleavage activity associated with a RuvC domain.

[1366] In an embodiment, the altered Cas9 molecule is an eiCas9 molecule which does not cleave a nucleic acid molecule (either double stranded or single stranded nucleic acid molecules) or cleaves a nucleic acid molecule with significantly less efficiency, e.g., less than 20, 10, 5, 1 or 0.1% of the cleavage activity of a reference Cas9 molecule, e.g., as measured by an assay described herein. The reference Cas9 molecule can be a naturally occurring unmodified Cas9 molecule, e.g., a naturally occurring Cas9 molecule such as a Cas9 molecule of S. pyogenes, S. thermophilus, S. aureus, C. jejuni or N. meningitidis. In an embodiment, the reference Cas9 molecule is the naturally occurring Cas9 molecule having the closest sequence identity or homology. In an embodiment, the eiCas9 molecule lacks substantial cleavage activity associated with a RuvC domain and cleavage activity associated with an HNH domain.

[1367] In an embodiment, the altered Cas9 molecule or Cas9 polypeptide is an eaCas9 molecule or eaCas9 polypeptide comprising the fixed amino acid residues of S. pyogenes shown in the consensus sequence disclosed in FIGS. 2A-2G, and has one or more amino acids that differ from the amino acid sequence of S. pyogenes (e.g., has a substitution) at one or more residue (e.g., 2, 3, 5, 10, 15, 20, 30, 50, 70, 80, 90, 100, 200 amino acid residues) represented by an “-” in the consensus sequence disclosed in FIGS. 2A-2G or SEQ ID NO: 7.

[1368] In an embodiment, the altered Cas9 molecule or Cas9 polypeptide comprises a sequence in which:

[1369] the sequence corresponding to the fixed sequence of the consensus sequence disclosed in FIGS. 2A-2G differs at no more than 1, 2, 3, 4, 5, 10, 15, or 20% of the fixed residues in the consensus sequence disclosed in FIGS. 2A-2G;

[1370] the sequence corresponding to the residues identified by “*” in the consensus sequence disclosed in FIGS. 2A-2G differ at no more than 1, 2, 3, 4, 5, 10, 15, 20, 25, 30, 35, or 40% of the “*” residues from the corresponding sequence of naturally occurring Cas9 molecule, e.g., an S. pyogenes Cas9 molecule; and,

[1371] the sequence corresponding to the residues identified by “-” in the consensus sequence disclosed in FIGS. 2A-2G differ at no more than 5, 10, 15, 20, 25, 30, 35, 40, 45, 55, or 60% of the “-” residues from the corresponding sequence of naturally occurring Cas9 molecule, e.g., an S. pyogenes Cas9 molecule.

[1372] In an embodiment, the altered Cas9 molecule or Cas9 polypeptide is an eaCas9 molecule or eaCas9 polypeptide comprising the fixed amino acid residues of S. thermophilus shown in the consensus sequence disclosed in FIGS. 2A-2G, and has one or more amino acids that differ from the amino acid sequence of S. thermophilus (e.g., has a substitution) at one or more residue (e.g., 2, 3, 5, 10, 15, 20, 30, 50, 70, 80, 90, 100, 200 amino acid residues) represented by an “-” in the consensus sequence disclosed in FIGS. 2A-2G. In an embodiment

[1373] In an embodiment, the altered Cas9 molecule or Cas9 polypeptide comprises a sequence in which:

[1374] the sequence corresponding to the fixed sequence of the consensus sequence disclosed in FIGS. 2A-2G differs at no more than 1, 2, 3, 4, 5, 10, 15, or 20% of the fixed residues in the consensus sequence disclosed in FIGS. 2A-2G;

[1375] the sequence corresponding to the residues identified by “*” in the consensus sequence disclosed in FIGS. 2A-2G differ at no more than 1, 2, 3, 4, 5, 10, 15, 20, 25, 30, 35, or 40% of the “*” residues from the corresponding sequence of naturally occurring Cas9 molecule, e.g., an S. thermophilus Cas9 molecule; and,

[1376] the sequence corresponding to the residues identified by “-” in the consensus sequence disclosed in FIGS. 2A-2G differ at no more than 5, 10, 15, 20, 25, 30, 35, 40, 45, 55, or 60% of the “-” residues from the corresponding sequence of naturally occurring Cas9 molecule, e.g., an S. thermophilus Cas9 molecule.

[1377] In an embodiment, the altered Cas9 molecule or Cas9 polypeptide is an eaCas9 molecule or eaCas9 polypeptide comprising the fixed amino acid residues of S. mutans shown in the consensus sequence disclosed in FIGS. 2A-2G, and has one or more amino acids that differ from the amino acid sequence of S. mutans (e.g., has a substitution) at one or more residue (e.g., 2, 3, 5, 10, 15, 20, 30, 50, 70, 80, 90, 100, 200 amino acid residues) represented by an “-” in the consensus sequence disclosed in FIGS. 2A-2G.

[1378] In an embodiment, the altered Cas9 molecule or Cas9 polypeptide comprises a sequence in which:

[1379] the sequence corresponding to the fixed sequence of the consensus sequence disclosed in FIGS. 2A-2G differs at no more than 1, 2, 3, 4, 5, 10, 15, or 20% of the fixed residues in the consensus sequence disclosed in FIGS. 2A-2G;

[1380] the sequence corresponding to the residues identified by “*” in the consensus sequence disclosed in FIGS. 2A-2G differ at no more than 1, 2, 3, 4, 5, 10, 15, 20, 25, 30, 35, or 40% of the “*” residues from the corresponding sequence of naturally occurring Cas9 molecule, e.g., an S. mutans Cas9 molecule; and,

[1381] the sequence corresponding to the residues identified by “-” in the consensus sequence disclosed in FIGS. 2A-2G differ at no more than 5, 10, 15, 20, 25, 30, 35, 40, 45, 55, or 60% of the “-” residues from the corresponding sequence of naturally occurring Cas9 molecule, e.g., an S. mutans Cas9 molecule.

[1382] In an embodiment, the altered Cas9 molecule or Cas9 polypeptide is an eaCas9 molecule or eaCas9 polypeptide comprising the fixed amino acid residues of L. innocula shown in the consensus sequence disclosed in FIGS. 2A-2G, and has one or more amino acids that differ from the amino acid sequence of L. innocula (e.g., has a substitution) at one or more residue (e.g., 2, 3, 5, 10, 15, 20, 30, 50, 70, 80, 90, 100, 200 amino acid residues) represented by an “-”in the consensus sequence disclosed in FIGS. 2A-2G.

[1383] In an embodiment, the altered Cas9 molecule or Cas9 polypeptide comprises a sequence in which:

[1384] the sequence corresponding to the fixed sequence of the consensus sequence disclosed in FIGS. 2A-2G differs at no more than 1, 2, 3, 4, 5, 10, 15, or 20% of the fixed residues in the consensus sequence disclosed in FIGS. 2A-2G;

[1385] the sequence corresponding to the residues identified by “*” in the consensus sequence disclosed in FIGS. 2A-2G differ at no more than 1, 2, 3, 4, 5, 10, 15, 20, 25, 30, 35, or 40% of the “*” residues from the corresponding sequence of naturally occurring Cas9 molecule, e.g., an L. innocula Cas9 molecule; and,

[1386] the sequence corresponding to the residues identified by “-” in the consensus sequence disclosed in FIGS. 2A-2G differ at no more than 5, 10, 15, 20, 25, 30, 35, 40, 45, 55, or 60% of the “-” residues from the corresponding sequence of naturally occurring Cas9 molecule, e.g., an L. innocula Cas9 molecule.

[1387] In an embodiment, the altered Cas9 molecule or Cas9 polypeptide, e.g., an eaCas9 molecule or eaCas9 polypeptide, can be a fusion, e.g., of two of more different Cas9 molecules, e.g., of two or more naturally occurring Cas9 molecules of different species. For example, a fragment of a naturally occurring Cas9 molecule of one species can be fused to a fragment of a Cas9 molecule of a second species. As an example, a fragment of a Cas9 molecule of S. pyogenes comprising an N-terminal RuvC-like domain can be fused to a fragment of Cas9 molecule of a species other than S. pyogenes (e.g., S. thermophilus) comprising an HNH-like domain.

[1388] Cas9 Molecules and Cas9 Polypeptides with Altered PAM Recognition or No PAM Recognition

[1389] Naturally occurring Cas9 molecules can recognize specific PAM sequences, for example the PAM recognition sequences described above for, e.g., S. pyogenes, S. thermophilus, S. mutans, S. aureus and N. meningitidis.

[1390] In an embodiment, a Cas9 molecule or Cas9 polypeptide has the same PAM specificities as a naturally occurring Cas9 molecule. In an embodiment, a Cas9 molecule or Cas9 polypeptide has a PAM specificity not associated with a naturally occurring Cas9 molecule, or a PAM specificity not associated with the naturally occurring Cas9 molecule to which it has the closest sequence homology. For example, a naturally occurring Cas9 molecule can be altered, e.g., to alter PAM recognition, e.g., to alter the PAM sequence that the Cas9 molecule or Cas9 polypeptide recognizes to decrease off target sites and/or improve specificity; or eliminate a PAM recognition requirement. In an embodiment, a Cas9 molecule or Cas9 polypeptide can be altered, e.g., to increase length of PAM recognition sequence and/or improve Cas9 specificity to high level of identity (e.g., 98%, 99% or 100% match between gRNA and a PAM sequence), e.g., to decrease off target sites and increase specificity. In an embodiment, the length of the PAM recognition sequence is at least 4, 5, 6, 7, 8, 9, 10 or 15 amino acids in length. In an embodiment, the Cas9 specificity requires at least 90%, 95%, 96%, 97%, 98%, 99% or more homology between the gRNA and the PAM sequence. Cas9 molecules or Cas9 polypeptides that recognize different PAM sequences and/or have reduced off-target activity can be generated using directed evolution. Exemplary methods and systems that can be used for directed evolution of Cas9 molecules are described, e.g., in Esvelt et al. Nature 2011, 472(7344): 499-503. Candidate Cas9 molecules can be evaluated, e.g., by methods described in Section IV.

[1391] Alterations of the PI domain, which mediates PAM recognition are discussed below.

[1392] Synthetic Cas9 Molecules and Cas9 Polypeptides with Altered PI Domains

[1393] Current genome-editing methods are limited in the diversity of target sequences that can be targeted by the PAM sequence that is recognized by the Cas9 molecule utilized. A synthetic Cas9 molecule (or Syn-Cas9 molecule), or synthetic Cas9 polypeptide (or syn-Cas9 polypeptide), as that term is used herein, refers to a Cas9 molecule or Cas9 polypeptide that comprises a Cas9 core domain from one bacterial species and a functional altered PI domain, i.e., a PI domain other than that naturally associated with the Cas9 core domain, e.g., from a different bacterial species.

[1394] In an embodiment, the altered PI domain recognizes a PAM sequence that is different from the PAM sequence recognized by the naturally-occurring Cas9 from which the Cas9 core domain is derived. In an embodiment, the altered PI domain recognizes the same PAM sequence recognized by the naturally-occurring Cas9 from which the Cas9 core domain is derived, but with different affinity or specificity. A Syn-Cas9 molecule or Syn-Cas9 polypeptide can be, respectively, a Syn-eaCas9 molecule or Syn-eaCas9 polypeptide or a Syn-eiCas9 molecule Syn-eiCas9 polypeptide.

[1395] An exemplary Syn-Cas9 molecule Syn-Cas9 polypeptide comprises:

[1396] a) a Cas9 core domain, e.g., a Cas9 core domain from Table 28 or 29, e.g., a S. aureus, S. pyogenes, or C. jejuni Cas9 core domain; and

[1397] b) an altered PI domain from a species X Cas9 sequence selected from Tables 31 and 32.

[1398] In an embodiment, the RKR motif (the PAM binding motif) of said altered PI domain comprises: differences at 1, 2, or 3 amino acid residues; a difference in amino acid sequence at the first, second, or third position; differences in amino acid sequence at the first and second positions, the first and third positions, or the second and third positions; as compared with the sequence of the RKR motif of the native or endogenous PI domain associated with the Cas9 core domain.

[1399] In an embodiment, the Cas9 core domain comprises the Cas9 core domain from a species X Cas9 from Table 28 and said altered PI domain comprises a PI domain from a species Y Cas9 from Table 28.

[1400] In an embodiment, the RKR motif of the species X Cas9 is other than the RKR motif of the species Y Cas9.

[1401] In an embodiment, the RKR motif of the altered PI domain is selected from XXY, XNG, and XNQ.

[1402] In an embodiment, the altered PI domain has at least 60, 70, 80, 90, 95, or 100% homology with the amino acid sequence of a naturally occurring PI domain of said species Y from Table 28.

[1403] In an embodiment, the altered PI domain differs by no more than 50, 40, 30, 25, 20, 15, 10, 5, 4, 3, 2, or 1 amino acid residue from the amino acid sequence of a naturally occurring PI domain of said second species from Table 28.

[1404] In an embodiment, the Cas9 core domain comprises a S. aureus core domain and altered PI domain comprises: an A. denitrificans PI domain; a C. jejuni PI domain; a H. mustelae PI domain; or an altered PI domain of species X PI domain, wherein species X is selected from Table 32.

[1405] In an embodiment, the Cas9 core domain comprises a S. pyogenes core domain and the altered PI domain comprises: an A. denitrificans PI domain; a C. jejuni PI domain; a H. mustelae PI domain; or an altered PI domain of species X PI domain, wherein species X is selected from Table 32.

[1406] In an embodiment, the Cas9 core domain comprises a C. jejuni core domain and the altered PI domain comprises: an A. denitrificans PI domain; a H. mustelae PI domain; or an altered PI domain of species X PI domain, wherein species X is selected from Table 32.

[1407] In an embodiment, the Cas9 molecule further comprises a linker disposed between said Cas9 core domain and said altered PI domain.

[1408] In an embodiment, the linker comprises: a linker described elsewhere herein disposed between the Cas9 core domain and the heterologous PI domain. Suitable linkers are further described in Section V.

[1409] Exemplary altered PI domains for use in Syn-Cas9 molecules are described in Tables 31 and 32. The sequences for the 83 Cas9 orthologs referenced in Tables 31 and 32 are provided in Table 28. Table 30 provides the Cas9 orthologs with known PAM sequences and the corresponding RKR motif.

[1410] In an embodiment, a Syn-Cas9 molecule may also be size-optimized, e.g., the Syn-Cas9 molecule comprises one or more deletions, and optionally one or more linkers disposed between the amino acid residues flanking the deletions. In an embodiment, a Syn-Cas9 molecule comprises a REC deletion.

[1411] Size-Optimized Cas9 Molecules

[1412] Engineered Cas9 molecules and engineered Cas9 polypeptides described herein include a Cas9 molecule or Cas9 polypeptide comprising a deletion that reduces the size of the molecule while still retaining desired Cas9 properties, e.g., essentially native conformation, Cas9 nuclease activity, and/or target nucleic acid molecule recognition. Provided herein are Cas9 molecules or Cas9 polypeptides comprising one or more deletions and optionally one or more linkers, wherein a linker is disposed between the amino acid residues that flank the deletion. Methods for identifying suitable deletions in a reference Cas9 molecule, methods for generating Cas9 molecules with a deletion and a linker, and methods for using such Cas9 molecules will be apparent to one of ordinary skill in the art upon review of this document.

[1413] A Cas9 molecule, e.g., a S. aureus, S. pyogenes, or C. jejuni, Cas9 molecule, having a deletion is smaller, e.g., has reduced number of amino acids, than the corresponding naturally-occurring Cas9 molecule. The smaller size of the Cas9 molecules allows increased flexibility for delivery methods, and thereby increases utility for genome-editing. A Cas9 molecule can comprise one or more deletions that do not substantially affect or decrease the activity of the resultant Cas9 molecules described herein. Activities that are retained in the Cas9 molecules comprising a deletion as described herein include one or more of the following:

[1414] a nickase activity, i.e., the ability to cleave a single strand, e.g., the non-complementary strand or the complementary strand, of a nucleic acid molecule; a double stranded nuclease activity, i.e., the ability to cleave both strands of a double stranded nucleic acid and create a double stranded break, which in an embodiment is the presence of two nickase activities;

[1415] an endonuclease activity;

[1416] an exonuclease activity;

[1417] a helicase activity, i.e., the ability to unwind the helical structure of a double stranded nucleic acid;

[1418] and recognition activity of a nucleic acid molecule, e.g., a target nucleic acid or a gRNA.

[1419] Activity of the Cas9 molecules described herein can be assessed using the activity assays described herein or in the art.

[1420] Identifying Regions Suitable for Deletion

[1421] Suitable regions of Cas9 molecules for deletion can be identified by a variety of methods. Naturally-occurring orthologous Cas9 molecules from various bacterial species, e.g., any one of those listed in Table 28, can be modeled onto the crystal structure of S. pyogenes Cas9 (Nishimasu et al., Cell, 156:935-949, 2014) to examine the level of conservation across the selected Cas9 orthologs with respect to the three-dimensional conformation of the protein. Less conserved or unconserved regions that are spatially located distant from regions involved in Cas9 activity, e.g., interface with the target nucleic acid molecule and/or gRNA, represent regions or domains are candidates for deletion without substantially affecting or decreasing Cas9 activity.

[1422] REC-Optimized Cas9 Molecules

[1423] A REC-optimized Cas9 molecule, as that term is used herein, refers to a Cas9 molecule that comprises a deletion in one or both of the REC2 domain and the RE1_{CT} domain (collectively a REC deletion), wherein the deletion comprises at least 10% of the amino acid residues in the cognate domain. A REC-optimized Cas9 molecule can be an eaCas9 molecule or an eiCas9 molecule. An exemplary REC-optimized Cas9 molecule comprises:

[1424] a) a deletion selected from:
[1425] i) a REC2 deletion;
[1426] ii) a REC1_{CT} deletion; or
[1427] iii) a REC1_{SUB} deletion.

[1428] Optionally, a linker is disposed between the amino acid residues that flank the deletion. In an embodiment a Cas9 molecule includes only one deletion, or only two deletions. A Cas9 molecule can comprise a REC2 deletion and a REC1_{CT} deletion. A Cas9 molecule can comprise a REC2 deletion and a REC1_{SUB} deletion.

[1429] Generally, the deletion will contain at least 10% of the amino acids in the cognate domain, e.g., a REC2 deletion will include at least 10% of the amino acids in the REC2 domain.

[1430] A deletion can comprise: at least 10, 20, 30, 40, 50, 60, 70, 80, or 90% of the amino acid residues of its cognate domain; all of the amino acid residues of its cognate domain; an amino acid residue outside its cognate domain; a plurality of amino acid residues outside its cognate domain; the amino acid residue immediately N terminal to its cognate domain; the amino acid residue immediately C terminal to its cognate domain; the amino acid residue immediately N terminal to its cognate and the amino acid residue immediately C terminal to its cognate domain; a plurality of, e.g., up to 5, 10, 15, or 20, amino acid residues N terminal to its cognate domain; a plurality of, e.g., up to 5, 10, 15, or 20, amino acid residues C terminal to its cognate domain; a plurality of, e.g., up to 5, 10, 15, or 20, amino acid residues N terminal to to its cognate domain and a plurality of e.g., up to 5, 10, 15, or 20, amino acid residues C terminal to its cognate domain.

[1431] In an embodiment, a deletion does not extend beyond: its cognate domain; the N terminal amino acid residue of its cognate domain; the C terminal amino acid residue of its cognate domain.

[1432] A REC-optimized Cas9 molecule can include a linker disposed between the amino acid residues that flank the deletion. Suitable linkers for use between the amino acid resides that flank a REC deletion in a REC-optimized Cas9 molecule is disclosed in Section V.

[1433] In an embodiment a REC-optimized Cas9 molecule comprises an amino acid sequence that, other than any REC deletion and associated linker, has at least 50, 55, 60, 65, 70, 75, 80, 85, 90, 95, 99, or 100% homology with the amino acid sequence of a naturally occurring Cas 9, e.g., a Cas9 molecule described in Table 28, e.g., a S. aureus Cas9 molecule, a S. pyogenes Cas9 molecule, or a C. jejuni Cas9 molecule.

[1434] In an embodiment, a a REC-optimized Cas9 molecule comprises an amino acid sequence that, other than any REC deletion and associated linker, differs by no more than 1, 2, 3, 4, 5, 6, 7, 8, 9, 10, 15, 20, or 25, amino acid residues from the amino acid sequence of a naturally occurring Cas 9, e.g., a Cas9 molecule described in Table 28, e.g., a S. aureus Cas9 molecule, a S. pyogenes Cas9 molecule, or a C. jejuni Cas9 molecule.

[1435] In an embodiment, a REC-optimized Cas9 molecule comprises an amino acid sequence that, other than any REC deletion and associate linker, differs by no more than 1, 2, 3, 4, 5, 6, 7, 8, 9, 10, 15, 20, or 25% of the, amino acid residues from the amino acid sequence of a naturally occurring Cas 9, e.g., a Cas9 molecule described in Table 28, e.g., a S. aureus Cas9 molecule, a S. pyogenes Cas9 molecule, or a C. jejuni Cas9 molecule.

[1436] For sequence comparison, typically one sequence acts as a reference sequence, to which test sequences are compared. When using a sequence comparison algorithm, test and reference sequences are entered into a computer, subsequence coordinates are designated, if necessary, and sequence algorithm program parameters are designated. Default program parameters can be used, or alternative parameters can be designated. The sequence comparison algorithm then calculates the percent sequence identities for the test sequences relative to the reference sequence, based on the program parameters. Methods of alignment of sequences for comparison are well known in the art. Optimal alignment of sequences for comparison can be conducted, e.g., by the local homology algorithm of Smith and Waterman, (1970) Adv. Appl. Math. 2:482c, by the homology alignment algorithm of Needleman and Wunsch, (1970) J. Mol. Biol. 48:443, by the search for similarity method of Pearson and Lipman, (1988) Proc. Nat'l. Acad. Sci. USA 85:2444, by computerized implementations of these algorithms (GAP, BESTFIT, FASTA, and TFASTA in the Wisconsin Genetics Software Package, Genetics Computer Group, 575 Science Dr., Madison, Wis.), or by manual alignment and visual inspection (see, e.g., Brent et al., (2003) Current Protocols in Molecular Biology).

[1437] Two examples of algorithms that are suitable for determining percent sequence identity and sequence similarity are the BLAST and BLAST 2.0 algorithms, which are described in Altschul et al., (1977) Nuc. Acids Res. 25:3389-3402; and Altschul et al., (1990) J. Mol. Biol. 215:403-410, respectively. Software for performing BLAST analyses is publicly available through the National Center for Biotechnology Information.

[1438] The percent identity between two amino acid sequences can also be determined using the algorithm of E. Meyers and W. Miller, (1988) Comput. Appl. Biosci. 4:11-17) which has been incorporated into the ALIGN program (version 2.0), using a PAM120 weight residue table, a gap length penalty of 12 and a gap penalty of 4. In addition, the percent identity between two amino acid sequences can be determined using the Needleman and Wunsch (1970) J. Mol. Biol. 48:444-453) algorithm which has been incorporated into the GAP program in the GCG software package (available at www.gcg.com), using either a Blossom 62 matrix or a PAM250 matrix, and a gap weight of 16, 14, 12, 10, 8, 6, or 4 and a length weight of 1, 2, 3, 4, 5, or 6.

[1439] Sequence information for exemplary REC deletions are provided for 83 naturally-occurring Cas9 orthologs in Table 28.

[1440] The amino acid sequences of exemplary Cas9 molecules from different bacterial species are shown below.

TABLE 28
Amino Acid Sequence of Cas9 Orthologs

| | | REC2 | | | REC1_{CT} | | | Rec_{sub} | | |
|---|---|---|---|---|---|---|---|---|---|---|
| | Amino | start | stop | # AA | start | stop | # AA | start | stop | # AA |
| | acid | (AA | (AA | deleted | (AA | (AA | deleted | (AA | (AA | deleted |
| Species/Composite ID | sequence | pos) | pos) | (n) | pos) | pos) | (n) | pos) | pos) | (n) |
| Staphylococcus Aureus | SEQ ID | 126 | 166 | 41 | 296 | 352 | 57 | 296 | 352 | 57 |
| tr\|J7RUA5\|J7RUA5_STAAU | NO: 304 | | | | | | | | | |
| Streptococcus Pyogenes | SEQ ID | 176 | 314 | 139 | 511 | 592 | 82 | 511 | 592 | 82 |
| sp\|Q99ZW2\|CAS9_STRP1 | NO: 305 | | | | | | | | | |
| Campylobacter jejuni NCTC 11168 | SEQ ID | 137 | 181 | 45 | 316 | 360 | 45 | 316 | 360 | 45 |
| gi\|218563121\|ref\|YP_002344900.1 | NO: 306 | | | | | | | | | |
| Bacteroides fragilis NCTC 9343 | SEQ ID | 148 | 339 | 192 | 524 | 617 | 84 | 524 | 617 | 84 |
| gi\|60683389\|ref\|YP_213533.1\| | NO: 307 | | | | | | | | | |
| Bifidobacterium bifidum S17 | SEQ ID | 173 | 335 | 163 | 516 | 607 | 87 | 516 | 607 | 87 |
| gi\|310286728\|ref\|YP_003937986. | NO: 308 | | | | | | | | | |
| Veillonella atypica ACS-134-V-Col7a | SEQ ID | 185 | 339 | 155 | 574 | 663 | 79 | 574 | 663 | 79 |
| gi\|303229466\|ref\|ZP_07316256.1 | NO: 309 | | | | | | | | | |
| Lactobacillus rhamnosus GG | SEQ ID | 169 | 320 | 152 | 559 | 645 | 78 | 559 | 645 | 78 |
| gi\|258509199\|ref\|YP_003171950.1 | NO: 310 | | | | | | | | | |
| Filifactor alocis ATCC 35896 | SEQ ID | 166 | 314 | 149 | 508 | 592 | 76 | 508 | 592 | 76 |
| gi\|374307738\|ref\|YP_005054169.1 | NO: 311 | | | | | | | | | |
| Oenococcus kitaharae DSM 17330 | SEQ ID | 169 | 317 | 149 | 555 | 639 | 80 | 555 | 639 | 80 |
| gi\|366983953\|gb\|EHN59352.1\| | NO: 312 | | | | | | | | | |
| Fructobacillus fructosus KCTC 3544 | SEQ ID | 168 | 314 | 147 | 488 | 571 | 76 | 488 | 571 | 76 |
| gi\|339625081\|ref\|ZP_08660870.1 | NO: 313 | | | | | | | | | |
| Catenibacterium mitsuokai DSM 15897 | SEQ ID | 173 | 318 | 146 | 511 | 594 | 78 | 511 | 594 | 78 |
| gi\|224543312\|ref\|ZP_03683851.1 | NO: 314 | | | | | | | | | |
| Finegoldia magna ATCC 29328 | SEQ ID | 168 | 313 | 146 | 452 | 534 | 77 | 452 | 534 | 77 |
| gi\|169823755\|ref\|YP_001691366.1 | NO: 315 | | | | | | | | | |
| CoriobacteriumglomeransPW2 | SEQ ID | 175 | 318 | 144 | 511 | 592 | 82 | 511 | 592 | 82 |
| gi\|328956315\|ref\|YP_004373648.1 | NO: 316 | | | | | | | | | |
| Eubacterium yurii ATCC 43715 | SEQ ID | 169 | 310 | 142 | 552 | 633 | 76 | 552 | 633 | 76 |
| gi\|306821691\|ref\|ZP_07455288.1 | NO: 317 | | | | | | | | | |
| Peptoniphilus duerdenii ATCC BAA-1640 | SEQ ID | 171 | 311 | 141 | 535 | 615 | 76 | 535 | 615 | 76 |
| gi\|304438954\|ref\|ZP_07398877.1 | NO: 318 | | | | | | | | | |
| Acidaminococcus sp. D21 | SEQ ID | 167 | 306 | 140 | 511 | 591 | 75 | 511 | 591 | 75 |
| gi\|227824983\|ref\|ZP_03989815.1 | NO: 319 | | | | | | | | | |
| Lactobacillus farciminis KCTC 3681 | SEQ ID | 171 | 310 | 140 | 542 | 621 | 85 | 542 | 621 | 85 |
| gi\|336394882\|ref\|ZP_08576281.1 | NO: 320 | | | | | | | | | |
| Streptococcus sanguinis SK49 | SEQ ID | 185 | 324 | 140 | 411 | 490 | 85 | 411 | 490 | 85 |
| gi\|422884106\|ref\|ZP_16930555.1 | NO: 321 | | | | | | | | | |
| Coprococcus catus GD-7 | SEQ ID | 172 | 310 | 139 | 556 | 634 | 76 | 556 | 634 | 76 |
| gi\|291520705\|emb\|CBK78998.1\| | NO: 322 | | | | | | | | | |
| Streptococcus mutans UA159 | SEQ ID | 176 | 314 | 139 | 392 | 470 | 84 | 392 | 470 | 84 |
| gi\|24379809\|ref\|NP_721764.1\| | NO: 323 | | | | | | | | | |
| Streptococcus pyogenes M1 GAS | SEQ ID | 176 | 314 | 139 | 523 | 600 | 82 | 523 | 600 | 82 |
| gi\|13622193\|gb\|AAK33936.1\| | NO: 324 | | | | | | | | | |
| Streptococcus thermophilus LMD-9 | SEQ ID | 176 | 314 | 139 | 481 | 558 | 81 | 481 | 558 | 81 |
| gi\|116628213\|ref\|YP_820832.1\| | NO: 325 | | | | | | | | | |
| Fusobacterium nucleatum ATCC49256 | SEQ ID | 171 | 308 | 138 | 537 | 614 | 76 | 537 | 614 | 76 |
| gi\|34762592\|ref\|ZP_00143587.1\| | NO: 326 | | | | | | | | | |
| Planococcus antarcticus DSM 14505 | SEQ ID | 162 | 299 | 138 | 538 | 614 | 94 | 538 | 614 | 94 |
| gi\|389815359\|ref\|ZP_10206685.1 | NO: 327 | | | | | | | | | |
| Treponema denticola ATCC 35405 | SEQ ID | 169 | 305 | 137 | 524 | 600 | 81 | 524 | 600 | 81 |
| gi\|42525843\|ref\|NP_970941.1\| | NO: 328 | | | | | | | | | |
| Solobacterium moorei F0204 | SEQ ID | 179 | 314 | 136 | 544 | 619 | 77 | 544 | 619 | 77 |
| gi\|320528778\|ref\|ZP_08029929.1 | NO: 329 | | | | | | | | | |
| Staphylococcus pseudintermedius ED99 | SEQ ID | 164 | 299 | 136 | 531 | 606 | 92 | 531 | 606 | 92 |
| gi\|323463801\|gb\|ADX75954.1\| | NO: 330 | | | | | | | | | |
| Flavobacterium branchiophilum FL-15 | SEQ ID | 162 | 286 | 125 | 538 | 613 | 63 | 538 | 613 | 63 |
| gi\|347536497\|ref\|YP_004843922.1 | NO: 331 | | | | | | | | | |
| Ignavibacterium album JCM 16511 | SEQ ID | 223 | 329 | 107 | 357 | 432 | 90 | 357 | 432 | 90 |
| gi\|385811609\|ref\|YP_005848005.1 | NO: 332 | | | | | | | | | |
| Bergeyella zoohelcum ATCC 43767 | SEQ ID | 165 | 261 | 97 | 529 | 604 | 56 | 529 | 604 | 56 |
| gi\|423317190\|ref\|ZP_17295095.1 | NO: 333 | | | | | | | | | |
| Nitrobacter hamburgensis X14 | SEQ ID | 169 | 253 | 85 | 536 | 611 | 48 | 536 | 611 | 48 |
| gi\|92109262\|ref\|YP_571550.1\| | NO: 334 | | | | | | | | | |
| Odoribacter laneus YIT 12061 | SEQ ID | 164 | 242 | 79 | 535 | 610 | 63 | 535 | 610 | 63 |
| gi\|374384763\|ref\|ZP_09642280.1 | NO: 335 | | | | | | | | | |
| Legionella pneumophila str. Paris | SEQ ID | 164 | 239 | 76 | 402 | 476 | 67 | 402 | 476 | 67 |
| gi\|54296138\|ref\|YP_122507.1\| | NO: 336 | | | | | | | | | |
| Bacteroides sp. 20 3 | SEQ ID | 198 | 269 | 72 | 530 | 604 | 83 | 530 | 604 | 83 |
| gi\|301311869\|ref\|ZP_07217791.1 | NO: 337 | | | | | | | | | |
| Akkermansia muciniphila ATCC BAA-835 | SEQ ID | 136 | 202 | 67 | 348 | 418 | 62 | 348 | 418 | 62 |
| gi\|187736489\|ref\|YP_001878601. | NO: 338 | | | | | | | | | |
| Prevotella sp. C561 | SEQ ID | 184 | 250 | 67 | 357 | 425 | 78 | 357 | 425 | 78 |
| gi\|345885718\|ref\|ZP_08837074.1 | NO: 339 | | | | | | | | | |
| Wolinella succinogenes DSM 1740 | SEQ ID | 157 | 218 | 36 | 401 | 468 | 60 | 401 | 468 | 60 |
| gi\|34557932\|ref\|NP_907747.1\| | NO: 340 | | | | | | | | | |
| Alicyclobacillus hesperidum URH17-3-68 | SEQ ID | 142 | 196 | 55 | 416 | 482 | 61 | 416 | 482 | 61 |
| gi\|403744858\|ref\|ZP_10953934.1 | NO: 341 | | | | | | | | | |
| Caenispirillum salinarum AK4 | SEQ ID | 161 | 214 | 54 | 330 | 393 | 68 | 330 | 393 | 68 |
| gi\|427429481\|ref\|ZP_18919511.1 | NO: 342 | | | | | | | | | |
| Eubacterium rectale ATCC 33656 | SEQ ID | 133 | 185 | 53 | 322 | 384 | 60 | 322 | 384 | 60 |
| gi\|238924075\|ref\| YP_002937591.1 | NO: 343 | | | | | | | | | |
| Mycoplasma synoviae 53 | SEQ ID | 187 | 239 | 53 | 319 | 381 | 80 | 319 | 381 | 80 |
| gi\|71894592\|ref\|YP_278700.1\| | NO: 344 | | | | | | | | | |
| Porphyromonas sp. oral taxon | SEQ ID | 150 | 202 | 53 | 309 | 371 | 60 | 309 | 371 | 60 |
| 279 str. F0450 | NO: 345 | | | | | | | | | |
| gi\|402847315\|ref\|ZP_10895610.1 | | | | | | | | | | |
| Streptococcus thermophilus LMD-9 | SEQ ID | 127 | 178 | 139 | 424 | 486 | 81 | 424 | 486 | 81 |
| gi\|116627542\|ref\|YP_820161.1\| | NO: 346 | | | | | | | | | |
| Roseburia inulinivorans DSM 16841 | SEQ ID | 154 | 204 | 51 | 318 | 380 | 69 | 318 | 380 | 69 |
| gi\|225377804\|ref\|ZP_03755025.1 | NO: 347 | | | | | | | | | |
| Methylosinus trichosporium OB3b | SEQ ID | 144 | 193 | 50 | 426 | 488 | 64 | 426 | 488 | 64 |
| gi\|296446027\|ref\|ZP_06887976.1 | NO: 348 | | | | | | | | | |
| Ruminococcus albus 8 | SEQ ID | 139 | 187 | 49 | 351 | 412 | 55 | 351 | 412 | 55 |
| gi\|325677756\|ref\|ZP_08157403.1 | NO: 349 | | | | | | | | | |
| Bifidobacterium longum DJO10A | SEQ ID | 183 | 230 | 48 | 370 | 431 | 44 | 370 | 431 | 44 |
| gi\|189440764\|ref\|YP_001955845. | NO: 350 | | | | | | | | | |
| Enterococcus faecalis TX0012 | SEQ ID | 123 | 170 | 48 | 327 | 387 | 60 | 327 | 387 | 60 |
| gi\|315149830\|gb\|EFT93846.1 | NO: 351 | | | | | | | | | |
| Mycoplasma mobile 163K | SEQ ID | 179 | 226 | 48 | 314 | 374 | 79 | 314 | 374 | 79 |
| gi\|47458868\|ref\|YP_015730.1\| | NO: 352 | | | | | | | | | |
| Actinomyces coleocanis DSM 15436 | SEQ ID | 147 | 193 | 47 | 358 | 418 | 40 | 358 | 418 | 40 |
| gi\|227494853\|ref\|ZP_03925169.1 | NO: 353 | | | | | | | | | |
| Dinoroseobacter shibae DFL 12 | SEQ ID | 138 | 184 | 47 | 338 | 398 | 48 | 338 | 398 | 48 |
| gi\|159042956\|ref\|YP_001531750.1 | NO: 354 | | | | | | | | | |
| Actinomyces sp. oral taxon | SEQ ID | 183 | 228 | 46 | 349 | 409 | 40 | 349 | 409 | 40 |
| 180 str. F0310 | NO: 355 | | | | | | | | | |
| gi\|315605738\|ref\|ZP_07880770.1 | | | | | | | | | | |
| Alcanivorax sp. W11-5 | SEQ ID | 139 | 183 | 45 | 344 | 404 | 61 | 344 | 404 | 61 |
| gi\|407803669\|ref\|ZP_11150502.1 | NO: 356 | | | | | | | | | |
| Aminomonas paucivorans DSM 12260 | SEQ ID | 134 | 178 | 45 | 341 | 401 | 63 | 341 | 401 | 63 |
| gi\|312879015\|ref\|ZP_07738815.1 | NO: 357 | | | | | | | | | |
| Mycoplasma canis PG 14 | SEQ ID | 139 | 183 | 45 | 319 | 379 | 76 | 319 | 379 | 76 |
| gi\|384393286\|gb\|EIE39736.1\| | NO: 358 | | | | | | | | | |
| Lactobacillus coryniformis KCTC 3535 | SEQ ID | 141 | 184 | 44 | 328 | 387 | 61 | 328 | 387 | 61 |
| gi\|336393381\|ref\|ZP_08574780.1 | NO: 359 | | | | | | | | | |
| Elusimicrobium minutum Pei191 | SEQ ID | 177 | 219 | 43 | 322 | 381 | 47 | 322 | 381 | 47 |
| gi\|187250660\|ref\|YP_001875142.1 | NO: 360 | | | | | | | | | |
| Neisseria meningitidis Z2491 | SEQ ID | 147 | 189 | 43 | 360 | 419 | 61 | 360 | 419 | 61 |
| gi\|218767588\|ref\|YP_002342100.1 | NO: 361 | | | | | | | | | |
| Pasteurella multocida str. Pm70 | SEQ ID | 139 | 181 | 43 | 319 | 378 | 61 | 319 | 378 | 61 |
| gi\|15602992\|ref\|NP_246064.1\| | NO: 362 | | | | | | | | | |
| Rhodovulum sp. PH10 | SEQ ID | 141 | 183 | 43 | 319 | 378 | 48 | 319 | 378 | 48 |
| gi\|402849997\|ref\|ZP_10898214.1 | NO: 363 | | | | | | | | | |
| Eubacterium dolichum DSM 3991 | SEQ ID | 131 | 172 | 42 | 303 | 361 | 59 | 303 | 361 | 59 |
| gi\|160915782\|ref\|ZP_02077990.1 | NO: 364 | | | | | | | | | |
| Nitratifractor salsuginis DSM 16511 | SEQ ID | 143 | 184 | 42 | 347 | 404 | 61 | 347 | 404 | 61 |
| gi\|319957206\|ref\|YP_004168469.1 | NO: 365 | | | | | | | | | |
| Rhodospirillum rubrum ATCC 11170 | SEQ ID | 139 | 180 | 42 | 314 | 371 | 55 | 314 | 371 | 55 |
| gi\|83591793\|ref\|YP_425545.1\| | NO: 366 | | | | | | | | | |
| Clostridium cellulolyticum H10 | SEQ ID | 137 | 176 | 40 | 320 | 376 | 61 | 320 | 376 | 61 |
| gi\|220930482\|ref\|YP_002507391.1 | NO: 367 | | | | | | | | | |
| Helicobacter mustelae 12198 | SEQ ID | 148 | 187 | 40 | 298 | 354 | 48 | 298 | 354 | 48 |
| gi\|291276265\|ref\|YP_003516037.1 | NO: 368 | | | | | | | | | |
| Ilyobacter polytropus DSM 2926 | SEQ ID | 134 | 173 | 40 | 462 | 517 | 63 | 462 | 517 | 63 |
| gi\|310780384\|ref\|YP_003968716.1 | NO: 369 | | | | | | | | | |
| Sphaerochaeta globus str. Buddy | SEQ ID | 163 | 202 | 40 | 335 | 389 | 45 | 335 | 389 | 45 |
| gi\|325972003\|ref\|YP_004248194.1 | NO: 370 | | | | | | | | | |
| Staphylococcus lugdunensis M23590 | SEQ ID | 128 | 167 | 40 | 337 | 391 | 57 | 337 | 391 | 57 |
| gi\|315659848\|ref\|ZP_07912707.1 | NO: 371 | | | | | | | | | |
| Treponema sp. JC4 | SEQ ID | 144 | 183 | 40 | 328 | 382 | 63 | 328 | 382 | 63 |
| gi\|384109266\|ref\|ZP_10010146.1 | NO: 372 | | | | | | | | | |
| uncultured delta proteobacterium | SEQ ID | 154 | 193 | 40 | 313 | 365 | 55 | 313 | 365 | 55 |
| HF0070 07E19 | NO: 373 | | | | | | | | | |
| gi\|297182908\|gb\|ADI19058.1\| | | | | | | | | | | |
| Alicycliphilus denitrificans K601 | SEQ ID | 140 | 178 | 39 | 317 | 366 | 48 | 317 | 366 | 48 |
| gi\|330822845\|ref\|YP_004386148.1 | NO: 374 | | | | | | | | | |
| Azospirillum sp. B510 | SEQ ID | 205 | 243 | 39 | 342 | 389 | 46 | 342 | 389 | 46 |
| gi\|288957741\|ref\|YP_003448082.1 | NO: 375 | | | | | | | | | |
| Bradyrhizobium sp. BTAi1 | SEQ ID | 143 | 181 | 39 | 323 | 370 | 48 | 323 | 370 | 48 |
| gi\|148255343\|ref\|YP_001239928.1 | NO: 376 | | | | | | | | | |
| Parvibaculum lavamentivorans DS-1 | SEQ ID | 138 | 176 | 39 | 327 | 374 | 58 | 327 | 374 | 58 |
| gi\|154250555\|ref\|YP_001411379.1 | NO: 377 | | | | | | | | | |
| Prevotella timonensis CRIS 5C-B1 | SEQ ID | 170 | 208 | 39 | 328 | 375 | 61 | 328 | 375 | 61 |
| gi\|282880052\|ref\|ZP_06288774.1 | NO: 378 | | | | | | | | | |
| Bacillus smithii 7 3 47FAA | SEQ ID | 134 | 171 | 38 | 401 | 448 | 63 | 401 | 448 | 63 |
| gi\|365156657\|ref\|ZP_09352959.1 | NO: 379 | | | | | | | | | |
| Cand. Puniceispirillum marinum | SEQ ID | 135 | 172 | 38 | 344 | 391 | 53 | 344 | 391 | 53 |
| IMCC1322 | NO: 380 | | | | | | | | | |
| gi\|294086111ref\|YP_003552871.1 | | | | | | | | | | |
| Barnesiella intestinihominis YIT 11860 | SEQ ID | 140 | 176 | 37 | 371 | 417 | 60 | 371 | 417 | 60 |
| gi\|404487228\|ref\|ZP_11022414.1 | NO: 381 | | | | | | | | | |
| Ralstonia syzygii R24 | SEQ ID | 140 | 176 | 37 | 395 | 440 | 50 | 395 | 440 | 50 |
| gi\|344171927\|emb\|CCA84553.1\| | NO: 382 | | | | | | | | | |
| Wolinella succinogenes DSM 1740 | SEQ ID | 145 | 180 | 36 | 348 | 392 | 60 | 348 | 392 | 60 |
| gi\|34557790\|ref\|NP_907605.1\| | NO: 383 | | | | | | | | | |
| Mycoplasma gallisepticum str. F | SEQ ID | 144 | 177 | 34 | 373 | 416 | 71 | 373 | 416 | 71 |
| gi\|284931710\|gb\|ADC31648.1\| | NO: 384 | | | | | | | | | |
| Acidothermus cellulolyticus 11B | SEQ ID | 150 | 182 | 33 | 341 | 380 | 58 | 341 | 380 | 58 |
| gi\|117929158\|ref\|YP_873709.1\| | NO: 385 | | | | | | | | | |
| Mycoplasma ovipneumoniae SC01 | SEQ ID | 156 | 184 | 29 | 381 | 420 | 62 | 381 | 420 | 62 |
| gi\|363542550\|ref\|ZP_09312133.1 | NO: 386 | | | | | | | | | |

TABLE 29
Amino Acid Sequence of Cas9 Core Domains

| | |
|---|---|
| Cas9 Start (AA | Cas9 Stop (AA |
| pos) | pos) |

| | |
|---|---|
| | Start and Stop numbers refer |
| Strain Name | to the sequence in Table 28 |

| | | |
|---|---|---|
| Staphylococcus Aureus | 1 | 772 |
| Streptococcus Pyogenes | 1 | 1099 |
| Campulobacter Jejuni | 1 | 741 |

TABLE 30
Identified PAM sequences and corresponding
RKR motifs.

| | | RKR |
|---|---|---|
| | PAM sequence | motif |
| Strain Name | (NA) | (AA) |
| Streptococcus pyogenes | NGG | RKR |
| Streptococcus mutans | NGG | RKR |
| Streptococcus thermophilus A | NGGNG | RYR |
| Treponema denticola | NAAAAN | VAK |
| Streptococcus thermophilus B | NNAAAAW | IYK |
| Campylobacter jejuni | NNNNACA | NLK |
| Pasteurella multocida | GNNNCNNA | KDG |
| Neisseria meningitidis | NNNNGATT or | IGK |
| Staphylococcus aureus | NNGRRV | NDK |
| | (R = A or G; | |
| | V = A, G or C) | |
| | NNGRRT | |
| | (R = A or G) | |

PI domains are provided in Tables 31 and 32.

TABLE 31
Altered PI Domains

| | PI Start | PI Stop (AA | | |
|---|---|---|---|---|
| | (AA pos) | pos) | | |
| | Start and Stop numbers | | | |
| | refer to the sequences in | | Length of PI | RKR |
| Strain Name | Table 28 | | (AA) | motif (AA) |
| Alicycliphilus | 837 | 1029 | 193 | --Y |
| denitrificans | | | | |
| K601 | | | | |
| Campylobacter | 741 | 984 | 244 | -NG |
| jejuni NCTC | | | | |
| 11168 | | | | |
| Helicobacter | 771 | 1024 | 254 | -NQ |
| mustelae 12198 | | | | |

TABLE 32
Other Altered PI Domains

| | PI Start | PI Stop (AA | | |
|---|---|---|---|---|
| | (AA pos) | pos) | | |
| | Start and Stop | | | |
| | numbers refer to | | | |
| | the sequences in | | Length of PI | |
| Strain Name | Table 28 | | (AA) | RKR motif (AA) |
| Akkermansia muciniphila ATCC BAA-835 | 871 | 1101 | 231 | ALK |
| Ralstonia syzygii R24 | 821 | 1062 | 242 | APY |
| Cand. Puniceispirillum marinum IMCC1322 | 815 | 1035 | 221 | AYK |
| Fructobacillus fructosus KCTC 3544 | 1074 | 1323 | 250 | DGN |
| Eubacterium yurii ATCC 43715 | 1107 | 1391 | 285 | DGY |
| Eubacterium dolichum DSM 3991 | 779 | 1096 | 318 | DKK |
| Dinoroseobacter shibae DFL 12 | 851 | 1079 | 229 | DPI |
| Clostridium cellulolyticum H10 | 767 | 1021 | 255 | EGK |
| Pasteurella multocida str. Pm70 | 815 | 1056 | 242 | ENN |
| Mycoplasma canis PG 14 | 907 | 1233 | 327 | EPK |
| Porphyromonas sp. oral taxon 279 str. F0450 | 935 | 1197 | 263 | EPT |
| Filifactor alocis ATCC 35896 | 1094 | 1365 | 272 | EVD |
| Aminomonas paucivorans DSM 12260 | 801 | 1052 | 252 | EVY |
| Wolinella succinogenes DSM 1740 | 1034 | 1409 | 376 | EYK |
| Oenococcus kitaharae DSM 17330 | 1119 | 1389 | 271 | GAL |
| Coriobacteriumglomerans PW2 | 1126 | 1384 | 259 | GDR |
| Peptoniphilus duerdenii ATCC BAA-1640 | 1091 | 1364 | 274 | GDS |
| Bifidobacterium bifidum S17 | 1138 | 1420 | 283 | GGL |
| Alicyclobacillus hesperidum URH17-3-68 | 876 | 1146 | 271 | GGR |
| Roseburia inulinivorans DSM 16841 | 895 | 1152 | 258 | GGT |
| Actinomyces coleocanis DSM 15436 | 843 | 1105 | 263 | GKK |
| Odoribacter laneus YIT 12061 | 1103 | 1498 | 396 | GKV |
| Coprococcus catus GD-7 | 1063 | 1338 | 276 | GNQ |
| Enterococcus faecalis TX0012 | 829 | 1150 | 322 | GRK |
| Bacillus smithii 7 3 47FAA | 809 | 1088 | 280 | GSK |
| Legionella pneumophila str. Paris | 1021 | 1372 | 352 | GTM |
| Bacteroides fragilis NCTC 9343 | 1140 | 1436 | 297 | IPV |
| Mycoplasma ovipneumoniae SC01 | 923 | 1265 | 343 | IRI |
| Actinomyces sp. oral taxon 180 str. F0310 | 895 | 1181 | 287 | KEK |
| Treponema sp. JC4 | 832 | 1062 | 231 | KIS |
| Fusobacteriumnucleatum ATCC49256 | 1073 | 1374 | 302 | KKV |
| Lactobacillus farciminis KCTC 3681 | 1101 | 1356 | 256 | KKV |
| Nitratifractor salsuginis DSM 16511 | 840 | 1132 | 293 | KMR |
| Lactobacillus coryniformis KCTC 3535 | 850 | 1119 | 270 | KNK |
| Mycoplasma mobile 163K | 916 | 1236 | 321 | KNY |
| Flavobacterium branchiophilum FL-15 | 1182 | 1473 | 292 | KQK |
| Prevotella timonensis CRIS 5C-B1 | 957 | 1218 | 262 | KQQ |
| Methylosinus trichosporium OB3b | 830 | 1082 | 253 | KRP |
| Prevotella sp. C561 | 1099 | 1424 | 326 | KRY |
| Mycoplasma gallisepticum str. F | 911 | 1269 | 359 | KTA |
| Lactobacillus rhamnosus GG | 1077 | 1363 | 287 | KYG |
| Wolinella succinogenes DSM 1740 | 811 | 1059 | 249 | LPN |
| Streptococcus thermophilus LMD-9 | 1099 | 1388 | 290 | MLA |
| Treponema denticola ATCC 35405 | 1092 | 1395 | 304 | NDS |
| Bergeyella zoohelcum ATCC 43767 | 1098 | 1415 | 318 | NEK |
| Veillonella atypica ACS-134-V-Col7a | 1107 | 1398 | 292 | NGF |
| Neisseria meningitidis Z2491 | 835 | 1082 | 248 | NHN |
| Ignavibacterium album JCM 16511 | 1296 | 1688 | 393 | NKK |
| Ruminococcus albus 8 | 853 | 1156 | 304 | NNF |
| Streptococcus thermophilus LMD-9 | 811 | 1121 | 311 | NNK |
| Barnesiella intestinihominis Y1T 11860 | 871 | 1153 | 283 | NPV |
| Azospirillum sp. B510 | 911 | 1168 | 258 | PFH |
| Rhodospirillum rubrum ATCC 11170 | 863 | 1173 | 311 | PRG |
| Planococcus antarcticus DSM 14505 | 1087 | 1333 | 247 | PYY |
| Staphylococcus pseudintermedius ED99 | 1073 | 1334 | 262 | QIV |
| Alcanivorax sp. W11-5 | 843 | 1113 | 271 | RIE |
| Bradyrhizobium sp. BTAil | 811 | 1064 | 254 | RIY |
| Streptococcus pyogenes MI GAS | 1099 | 1368 | 270 | RKR |
| Streptococcus mutans UA159 | 1078 | 1345 | 268 | RKR |
| Streptococcus Pyogenes | 1099 | 1368 | 270 | RKR |
| Bacteroides sp. 20 3 | 1147 | 1517 | 371 | RNI |
| S. aureus | 772 | 1053 | 282 | RNK |
| Solobacterium moorei F0204 | 1062 | 1327 | 266 | RSG |
| Finegoldia magna ATCC 29328 | 1081 | 1348 | 268 | RTE |
| uncultured delta proteobacterium HF0070 07E19 | 770 | 1011 | 242 | SGG |
| Acidaminococcus sp. D21 | 1064 | 1358 | 295 | SIG |
| Eubacterium rectale ATCC 33656 | 824 | 1114 | 291 | SKK |
| Caenispirillum salinarum AK4 | 1048 | 1442 | 395 | SLV |
| Acidothermus cellulolyticus 11B | 830 | 1138 | 309 | SPS |
| Catenibacterium mitsuokai DSM 15897 | 1068 | 1329 | 262 | SPT |
| Parvibaculum lavamentivorans DS-1 | 827 | 1037 | 211 | TGN |
| Staphylococcus lugdunensis M23590 | 772 | 1054 | 283 | TKK |
| Streptococcus sanguinis SK49 | 1123 | 1421 | 299 | TRM |
| Elusimicrobium minutum Pei191 | 910 | 1195 | 286 | TTG |
| Nitrobacter hamburgensis X14 | 914 | 1166 | 253 | VAY |
| Mycoplasma synoviae 53 | 991 | 1314 | 324 | VGF |
| Sphaerochaeta globus str. Buddy | 877 | 1179 | 303 | VKG |
| Ilyobacter polytropus DSM 2926 | 837 | 1092 | 256 | VNG |
| Rhodovulum sp. PH10 | 821 | 1059 | 239 | VPY |
| Bifidobacterium longum DJO10A | 904 | 1187 | 284 | VRK |

Amino acid sequences described in Table 28:

SEQ ID NO: 304
MKRNYILGLDIGITSVGYGIIDYETRDVIDAGVRLFKEANVENNEGRRSKRGARRLKRRRRHRI
QRVKKLLFDYNLLTDHSELSGINPYEARVKGLSQKLSEEEFSAALLHLAKRRGVHNVNEVEEDT
GNELSTKEQISRNSKALEEKYVAELQLERLKKDGEVRGSINRFKTSDYVKEAKQLLKVQKAYHQ
LDQSFIDTYIDLLETRRTYYEGPGEGSPFGWKDIKEWYEMLMGHCTYFPEELRSVKYAYNADLY
NALNDLNNLVITRDENEKLEYYEKFQIIENVFKQKKKPTLKQIAKEILVNEEDIKGYRVTSTGK
PEFTNLKVYHDIKDITARKEIIENAELLDQIAKILTIYQSSEDIQEELTNLNSELTQEEIEQIS
NLKGYTGTHNLSLKAINLILDELWHTNDNQIAIFNRLKLVPKKVDLSQQKEIPTTLVDDFILSP
VVKRSFIQSIKVINAIIKKYGLPNDIIIELAREKNSKDAQKMINEMQKRNRQTNERIEEIIRTT
GKENAKYLIEKIKLHDMQEGKCLYSLEAIPLEDLLNNPFNYEVDHIIPRSVSFDNSFNNKVLVK
QEENSKKGNRTPFQYLSSSDSKISYETFKKHILNLAKGKGRISKTKKEYLLEERDINRFSVQKD
FINRNLVDTRYATRGLMNLLRSYFRVNNLDVKVKSINGGFTSFLRRKWKFKKERNKGYKHHAED
ALIIANADFIFKEWKKLDKAKKVMENQMFEEKQAESMPEIETEQEYKEIFITPHQIKHIKDFKD
YKYSHRVDKKPNRELINDTLYSTRKDDKGNTLIVNNLNGLYDKDNDKLKKLINKSPEKLLMYHH
DPQTYQKLKLIMEQYGDEKNPLYKYYEETGNYLTKYSKKDNGPVIKKIKYYGNKLNAHLDITDD
YPNSRNKVVKLSLKPYRFDVYLDNGVYKFVTVKNLDVIKKENYYEVNSKCYEEAKKLKKISNQA
EFIASFYNNDLIKINGELYRVIGVNNDLLNRIEVNMIDITYREYLENMNDKRPPRIIKTIASKT
QSIKKYSTDILGNLYEVKSKKHPQIIKKG
SEQ ID NO: 305
[sequence omitted]
SEQ ID NO: 306
MARILAFDIGISSIGWAFSENDELKDCGVRIFTKVENPKTGESLALPRRLARSARKRLARRKAR
LNHLKHLIANEFKLNYEDYQSFDESLAKAYKGSLISPYELRFRALNELLSKQDFARVILHIAKR
RGYDDIKNSDDKEKGAILKAIKQNEEKLANYQSVGEYLYKEYFQKFKENSKEFTNVRNKKESYE
RCIAQSFLKDELKLIFKKQREFGFSFSKKFEEEVLSVAFYKRALKDFSHLVGNCSFFTDEKRAP
KNSPLAFMFVALTRIINLLNNLKNTEGILYTKDDLNALLNEVLKNGTLTYKQTKKLLGLSDDYE
FKGEKGTYFIEFKKYKEFIKALGEHNLSQDDLNEIAKDITLIKDEIKLKKALAKYDLNQNQIDS
LSKLEFKDHLNISFKALKLVTPLMLEGKKYDEACNELNLKVAINEDKKDFLPAFNETYYKDEVT
NPVVLRAIKEYRKVLNALLKKYGKVHKINIELAREVGKNHSQRAKIEKEQNENYKAKKDAELEC
EKLGLKINSKNILKLRLFKEQKEFCAYSGEKIKISDLQDEKMLEIDHIYPYSRSFDDSYMNKVL
VFTKQNQEKLNQTPFEAFGNDSAKWQKIEVLAKNLPTKKQKRILDKNYKDKEQKNFKDRNLNDT
RYIARLVLNYTKDYLDFLPLSDDENTKLNDTQKGSKVHVEAKSGMLTSALRHTWGFSAKDRNNH
LHHAIDAVIIAYANNSIVKAFSDFKKEQESNSAELYAKKISELDYKNKRKFFEPFSGFRQKVLD
KIDEIFVSKPERKKPSGALHEETFRKEEEFYQSYGGKEGVLKALELGKIRKVNGKIVKNGDMFR
VDIFKHKKTNKFYAVPIYTMDFALKVLPNKAVARSKKGEIKDWILMDENYEFCFSLYKDSLILI
QTKDMQEPEFVYYNAFTSSTVSLIVSKHDNKFETLSKNQKILFKNANEKEVIAKSIGIQNLKVF
EKYIVSALGEVTKAEFRQREDFKK
SEQ ID NO: 307
MKRILGLDLGTNSIGWALVNEAENKDERSSIVKLGVRVNPLTVDELTNFEKGKSITTNADRTLK
RGMRRNLQRYKLRRETLTEVLKEHKLITEDTILSENGNRTTFETYRLRAKAVTEEISLEEFARV
LLMINKKRGYKSSRKAKGVEEGTLIDGMDIARELYNNNLTPGELCLQLLDAGKKFLPDFYRSDL
QNELDRIWEKQKEYYPEILTDVLKEELRGKKRDAVWAICAKYFVWKENYTEWNKEKGKTEQQER
EHKLEGIYSKRKRDEAKRENLQWRVNGLKEKLSLEQLVIVFQEMNTQINNSSGYLGAISDRSKE
LYFNKQTVGQYQMEMLDKNPNASLRNMVFYRQDYLDEFNMLWEKQAVYHKELTEELKKEIRDII
IFYQRRLKSQKGLIGFCEFESRQIEVDIDGKKKIKTVGNRVISRSSPLFQEFKIWQILNNIEVT
VVGKKRKRRKLKENYSALFEELNDAEQLELNGSRRLCQEEKELLAQELFIRDKMTKSEVLKLLF
DNPQELDLNFKTIDGNKTGYALFQAYSKMIEMSGHEPVDFKKPVEKVVEYIKAVFDLLNWNTDI
LGFNSNEELDNQPYYKLWHLLYSFEGDNTPTGNGRLIQKMTELYGFEKEYATILANVSFQDDYG
SLSAKAIHKILPHLKEGNRYDVACVYAGYRHSESSLTREEIANKVLKDRLMLLPKNSLHNPVVE
KILNQMVNVINVIIDIYGKPDEIRVELARELKKNAKEREELTKSIAQTTKAHEEYKTLLQTEFG
LTNVSRTDILRYKLYKELESCGYKTLYSNTYISREKLFSKEFDIEHIIPQARLFDDSFSNKTLE
ARSVNIEKGNKTAYDFVKEKFGESGADNSLEHYLNNIEDLFKSGKISKTKYNKLKMAEQDIPDG
FIERDLRNTQYIAKKALSMLNEISHRVVATSGSVTDKLREDWQLIDVMKELNWEKYKALGLVEY
FEDRDGRQIGRIKDWTKRNDHRHHAMDALTVAFTKDVFIQYFNNKNASLDPNANEHAIKNKYFQ
NGRAIAPMPLREFRAEAKKHLENTLISIKAKNKVITGNINKTRKKGGVNKNMQQTPRGQLHLET
IYGSGKQYLTKEEKVNASFDMRKIGTVSKSAYRDALLKRLYENDNDPKKAFAGKNSLDKQPIWL
DKEQMRKVPEKVKIVTLEAIYTIRKEISPDLKVDKVIDVGVRKILIDRLNEYGNDAKKAFSNLD
KNPIWLNKEKGISIKRVTISGISNAQSLHVKKDKDGKPILDENGRNIPVDFVNTGNNHHVAVYY
RPVIDKRGQLVVDEAGNPKYELEEVVVSFFEAVTRANLGLPIIDKDYKTTEGWQFLFSMKQNEY
FVFPNEKTGFNPKEIDLLDVENYGLISPNLFRVQKFSLKNYVFRHHLETTIKDTSSILRGITWI
DFRSSKGLDTIVKVRVNHIGQIVSVGEY
SEQ ID NO: 308
MSRKNYVDDYAISLDIGNASVGWSAFTPNYRLVRAKGHELIGVRLFDPADTAESRRMARTTRRR
YSRRRWRLRLLDALFDQALSEIDPSFLARRKYSWVHPDDENNADCWYGSVLFDSNEQDKRFYEK
YPTIYHLRKALMEDDSQHDIREIYLAIHHMVKYRGNFLVEGTLESSNAFKEDELLKLLGRITRY
EMSEGEQNSDIEQDDENKLVAPANGQLADALCATRGSRSMRVDNALEALSAVNDLSREQRAIVK
AIFAGLEGNKLDLAKIFVSKEFSSENKKILGIYFNKSDYEEKCVQIVDSGLLDDEEREFLDRMQ
GQYNAIALKQLLGRSTSVSDSKCASYDAHRANWNLIKLQLRTKENEKDINENYGILVGWKIDSG
QRKSVRGESAYENMRKKANVFFKKMIETSDLSETDKNRLIHDIEEDKLFPIQRDSDNGVIPHQL
HQNELKQIIKKQGKYYPFLLDAFEKDGKQINKIEGLLTFRVPYFVGPLVVPEDLQKSDNSENHW
MVRKKKGEITPWNFDEMVDKDASGRKFIERLVGTDSYLLGEPTLPKNSLLYQEYEVLNELNNVR
LSVRTGNHWNDKRRMRLGREEKTLLCQRLFMKGQTVTKRTAENLLRKEYGRTYELSGLSDESKF
TSSLSTYGKMCRIFGEKYVNEHRDLMEKIVELQTVFEDKETLLHQLRQLEGISEADCALLVNTH
YTGWGRLSRKLLTTKAGECKISDDFAPRKHSIIEIMRAEDRNLMEIITDKQLGFSDWIEQENLG
AENGSSLMEVVDDLRVSPKVKRGIIQSIRLIDDISKAVGKRPSRIFLELADDIQPSGRTISRKS
RLQDLYRNANLGKEFKGIADELNACSDKDLQDDRLFLYYTQLGKDMYTGEELDLDRLSSAYDID
HIIPQAVTQNDSIDNRVLVARAENARKTDSFTYMPQIADRMRNFWQILLDNGLISRVKFERLTR
QNEFSEREKERFVQRSLVETRQIMKNVATLMRQRYGNSAAVIGLNAELTKEMHRYLGFSHKNRD
INDYHHAQDALCVGIAGQFAANRGFFADGEVSDGAQNSYNQYLRDYLRGYREKLSAEDRKQGRA
FGFIVGSMRSQDEQKRVNPRTGEVVWSEEDKDYLRKVMNYRKMLVTQKVGDDFGALYDETRYAA
TDPKGIKGIPFDGAKQDTSLYGGFSSAKPAYAVLIESKGKTRLVNVTMQEYSLLGDRPSDDELR
KVLAKKKSEYAKANILLRHVPKMQLIRYGGGLMVIKSAGELNNAQQLWLPYEEYCYFDDLSQGK
GSLEKDDLKKLLDSILGSVQCLYPWHRFTEEELADLHVAFDKLPEDEKKNVITGIVSALHADAK
TANLSIVGMTGSWRRMNNKSGYTFSDEDEFIFQSPSGLFEKRVTVGELKRKAKKEVNSKYRTNE
KRLPTLSGASQP
SEQ ID NO: 309
METQTSNQLITSHLKDYPKQDYFVGLDIGTNSVGWAVTNTSYELLKFHSHKMWGSRLFEEGESA
VTRRGFRSMRRRLERRKLRLKLLEELFADAMAQVDSTFFIRLHESKYHYEDKTTGHSSKHILFI
DEDYTDQDYFTEYPTIYHLRKDLMENGTDDIRKLFLAVHHILKYRGNFLYEGATFNSNAFTFED
VLKQALVNITFNCFDTNSAISSISNILMESGKTKSDKAKAIERLVDTYTVFDEVNTPDKPQKEQ
VKEDKKTLKAFANLVLGLSANLIDLFGSVEDIDDDLKKLQIVGDTYDEKRDELAKVWGDEIHII
DDCKSVYDAIILMSIKEPGLTISQSKVKAFDKHKEDLVILKSLLKLDRNVYNEMFKSDKKGLHN
YVHYIKQGRTEETSCSREDFYKYTKKIVEGLADSKDKEYILNEIELQTLLPLQRIKDNGVIPYQ
LHLEELKVILDKCGPKFPFLHTVSDGFSVTEKLIKMLEFRIPYYVGPLNTHHNIDNGGFSWAVR
KQAGRVTPWNFEEKIDREKSAAAFIKNLTNKCTYLFGEDVLPKSSLLYSEFMLLNELNNVRIDG
KALAQGVKQHLIDSIFKQDHKKMTKNRIELFLKDNNYITKKHKPEITGLDGEIKNDLTSYRDMV
RILGNNFDVSMAEDIITDITIFGESKKMLRQTLRNKFGSQLNDETIKKLSKLRYRDWGRLSKKL
LKGIDGCDKAGNGAPKTIIELMRNDSYNLMEILGDKFSFMECIEEENAKLAQGQVVNPHDIIDE
LALSPAVKRAVWQALRIVDEVAHIKKALPSRIFVEVARTNKSEKKKKDSRQKRLSDLYSAIKKD
DVLQSGLQDKEFGALKSGLANYDDAALRSKKLYLYYTQMGRCAYTGNIIDLNQLNTDNYDIDHI
YPRSLTKDDSFDNLVLCERTANAKKSDIYPIDNRIQTKQKPFWAFLKHQGLISERKYERLTRIA
PLTADDLSGFIARQLVETNQSVKATTTLLRRLYPDIDVVFVKAENVSDFRHNNNFIKVRSLNHH
HHAKDAYLNIVVGNVYHEKFTRNFRLFFKKNGANRTYNLAKMFNYDVICTNAQDGKAWDVKTSM
NTVKKMMASNDVRVTRRLLEQSGALADATIYKASVAAKAKDGAYIGMKTKYSVFADVTKYGGMT
KIKNAYSIIVQYTGKKGEEIKEIVPLPIYLINRNATDIELIDYVKSVIPKAKDISIKYRKLCIN
QLVKVNGFYYYLGGKTNDKIYIDNAIELVVPHDIATYIKLLDKYDLLRKENKTLKASSITTSIY
NINTSTVVSLNKVGIDVFDYFMSKLRTPLYMKMKGNKVDELSSTGRSKFIKMTLEEQSIYLLEV
LNLLTNSKTTFDVKPLGITGSRSTIGVKIHNLDEFKIINESITGLYSNEVTIV
SEQ ID NO: 310
MTKLNQPYGIGLDIGSNSIGFAVVDANSHLLRLKGETAIGARLFREGQSAADRRGSRTTRRRLS
RTRWRLSFLRDFFAPHITKIDPDFFLRQKYSEISPKDKDRFKYEKRLFNDRTDAEFYEDYPSMY
HLRLHLMTHTHKADPREIFLAIHHILKSRGHFLTPGAAKDFNTDKVDLEDIFPALTEAYAQVYP
DLELTFDLAKADDFKAKLLDEQATPSDTQKALVNLLLSSDGEKEIVKKRKQVLTEFAKAITGLK
TKFNLALGTEVDEADASNWQFSMGQLDDKWSNIETSMTDQGTEIFEQIQELYRARLLNGIVPAG
MSLSQAKVADYGQHKEDLELFKTYLKKLNDHELAKTIRGLYDRYINGDDAKPFLREDFVKALTK
EVTAHPNEVSEQLLNRMGQANFMLKQRTKANGAIPIQLQQRELDQIIANQSKYYDWLAAPNPVE
AHRWKMPYQLDELLNFHIPYYVGPLITPKQQAESGENVFAWMVRKDPSGNITPYNFDEKVDREA
SANTFIQRMKTTDTYLIGEDVLPKQSLLYQKYEVLNELNNVRINNECLGTDQKQRLIREVFERH
SSVTIKQVADNLVAHGDFARRPEIRGLADEKRFLSSLSTYHQLKEILHEAIDDPTKLLDIENII
TWSTVFEDHTIFETKLAEIEWLDPKKINELSGIRYRGWGQFSRKLLDGLKLGNGHTVIQELMLS
NHNLMQILADETLKETMTELNQDKLKTDDIEDVINDAYTSPSNKKALRQVLRVVEDIKHAANGQ
DPSWLFIETADGTGTAGKRTQSRQKQIQTVYANAAQELIDSAVRGELEDKIADKASFTDRLVLY
FMQGGRDIYTGAPLNIDQLSHYDIDHILPQSLIKDDSLDNRVLVNATINREKNNVFASTLFAGK
MKATWRKWHEAGLISGRKLRNLMLRPDEIDKFAKGFVARQLVETRQIIKLTEQIAAAQYPNTKI
IAVKAGLSHQLREELDFPKNRDVNHYHHAFDAFLAARIGTYLLKRYPKLAPFFTYGEFAKVDVK
KFREFNFIGALTHAKKNIIAKDTGEIVWDKERDIRELDRIYNFKRMLITHEVYFETADLFKQTI
YAAKDSKERGGSKQLIPKKQGYPTQVYGGYTQESGSYNALVRVAEADTTAYQVIKISAQNASKI
ASANLKSREKGKQLLNEIVVKQLAKRRKNWKPSANSFKIVIPRFGMGTLFQNAKYGLFMVNSDT
YYRNYQELWLSRENQKLLKKLFSIKYEKTQMNHDALQVYKAIIDQVEKFFKLYDINQFRAKLSD
AIERFEKLPINTDGNKIGKTETLRQILIGLQANGTRSNVKNLGIKTDLGLLQVGSGIKLDKDTQ
IVYQSPSGLFKRRIPLADL
SEQ ID NO: 311
MTKEYYLGLDVGTNSVGWAVTDSQYNLCKFKKKDMWGIRLFESANTAKDRRLQRGNRRRLERKK
QRIDLLQEIFSPEICKIDPTFFIRLNESRLHLEDKSNDFKYPLFIEKDYSDIEYYKEFPTIFHL
RKHLIESEEKQDIRLIYLALHNIIKTRGHFLIDGDLQSAKQLRPILDTFLLSLQEEQNLSVSLS
ENQKDEYEEILKNRSIAKSEKVKKLKNLFEISDELEKEEKKAQSAVIENFCKFIVGNKGDVCKF
LRVSKEELEIDSFSFSEGKYEDDIVKNLEEKVPEKVYLFEQMKAMYDWNILVDILETEEYISFA
KVKQYEKHKTNLRLLRDIILKYCTKDEYNRMFNDEKEAGSYTAYVGKLKKNNKKYWIEKKRNPE
EFYKSLGKLLDKIEPLKEDLEVLTMMIEECKNHTLLPIQKNKDNGVIPHQVHEVELKKILENAK
KYYSFLTETDKDGYSVVQKIESIFRFRIPYYVGPLSTRHQEKGSNVWMVRKPGREDRIYPWNME
EIIDFEKSNENFITRMTNKCTYLIGEDVLPKHSLLYSKYMVLNELNNVKVRGKKLPTSLKQKVF
EDLFENKSKVTGKNLLEYLQIQDKDIQIDDLSGFDKDFKTSLKSYLDFKKQIFGEEIEKESIQN
MIEDIIKWITIYGNDKEMLKRVIRANYSNQLTEEQMKKITGFQYSGWGNFSKMFLKGISGSDVS
TGETFDIITAMWETDNNLMQILSKKFTFMDNVEDFNSGKVGKIDKITYDSTVKEMFLSPENKRA
VWQTIQVAEEIKKVMGCEPKKIFIEMARGGEKVKKRTKSRKAQLLELYAACEEDCRELIKEIED
RDERDFNSMKLFLYYTQFGKCMYSGDDIDINELIRGNSKWDRDHIYPQSKIKDDSIDNLVLVNK
TYNAKKSNELLSEDIQKKMHSFWLSLLNKKLITKSKYDRLTRKGDFTDEELSGFIARQLVETRQ
STKAIADIFKQIYSSEVVYVKSSLVSDFRKKPLNYLKSRRVNDYHHAKDAYLNIVVGNVYNKKF
TSNPIQWMKKNRDTNYSLNKVFEHDVVINGEVIWEKCTYHEDTNTYDGGTLDRIRKIVERDNIL
YTEYAYCEKGELFNATIQNKNGNSTVSLKKGLDVKKYGGYFSANTSYFSLIEFEDKKGDRARHI
IGVPIYIANMLEHSPSAFLEYCEQKGYQNVRILVEKIKKNSLLIINGYPLRIRGENEVDTSFKR
AIQLKLDQKNYELVRNIEKFLEKYVEKKGNYPIDENRDHITHEKMNQLYEVLLSKMKKFNKKGM
ADPSDRIEKSKPKFIKLEDLIDKINVINKMLNLLRCDNDTKADLSLIELPKNAGSFVVKKNTIG
KSKIILVNQSVTGLYENRREL
SEQ ID NO: 312
MARDYSVGLDIGTSSVGWAAIDNKYHLIRAKSKNLIGVRLFDSAVTAEKRRGYRTTRRRLSRRH
WRLRLLNDIFAGPLTDFGDENFLARLKYSWVHPQDQSNQAHFAAGLLFDSKEQDKDFYRKYPTI
YHLRLALMNDDQKHDLREVYLAIHHLVKYRGHFLIEGDVKADSAFDVHTFADAIQRYAESNNSD
ENLLGKIDEKKLSAALTDKHGSKSQRAETAETAFDILDLQSKKQIQAILKSVVGNQANLMAIFG
LDSSAISKDEQKNYKFSFDDADIDEKIADSEALLSDTEFEFLCDLKAAFDGLTLKMLLGDDKTV
SAAMVRRFNEHQKDWEYIKSHIRNAKNAGNGLYEKSKKFDGINAAYLALQSDNEDDRKKAKKIF
QDEISSADIPDDVKADFLKKIDDDQFLPIQRTKNNGTIPHQLHRNELEQIIEKQGIYYPFLKDT
YQENSHELNKITALINFRVPYYVGPLVEEEQKIADDGKNIPDPTNHWMVRKSNDTITPWNLSQV
VDLDKSGRRFIERLTGTDTYLIGEPTLPKNSLLYQKFDVLQELNNIRVSGRRLDIRAKQDAFEH
LFKVQKTVSATNLKDFLVQAGYISEDTQIEGLADVNGKNFNNALTTYNYLVSVLGREFVENPSN
EELLEEITELQTVFEDKKVLRRQLDQLDGLSDHNREKLSRKHYTGWGRISKKLLTTKIVQNADK
IDNQTFDVPRMNQSIIDTLYNTKMNLMEIINNAEDDFGVRAWIDKQNTTDGDEQDVYSLIDELA
GPKEIKRGIVQSFRILDDITKAVGYAPKRVYLEFARKTQESHLTNSRKNQLSTLLKNAGLSELV
TQVSQYDAAALQNDRLYLYFLQQGKDMYSGEKLNLDNLSNYDIDHIIPQAYTKDNSLDNRVLVS
NITNRRKSDSSNYLPALIDKMRPFWSVLSKQGLLSKHKFANLTRTRDFDDMEKERFIARSLVET
RQIIKNVASLIDSHFGGETKAVAIRSSLTADMRRYVDIPKNRDINDYHHAFDALLFSTVGQYTE
NSGLMKKGQLSDSAGNQYNRYIKEWIHAARLNAQSQRVNPFGFVVGSMRNAAPGKLNPETGEIT
PEENADWSIADLDYLHKVMNFRKITVTRRLKDQKGQLYDESRYPSVLHDAKSKASINFDKHKPV
DLYGGFSSAKPAYAALIKFKNKFRLVNVLRQWTYSDKNSEDYILEQIRGKYPKAEMVLSHIPYG
QLVKKDGALVTISSATELHNFEQLWLPLADYKLINTLLKTKEDNLVDILHNRLDLPEMTIESAF
YKAFDSILSFAFNRYALHQNALVKLQAHRDDFNALNYEDKQQTLERILDALHASPASSDLKKIN
LSSGFGRLFSPSHFTLADTDEFIFQSVTGLFSTQKTVAQLYQETK
SEQ ID NO: 313
MVYDVGLDIGTGSVGWVALDENGKLARAKGKNLVGVRLFDTAQTAADRRGFRTTRRRLSRRKWR
LRLLDELFSAEINEIDSSFFQRLKYSYVHPKDEENKAHYYGGYLFPTEEETKKFHRSYPTIYHL
RQELMAQPNKRFDIREIYLAIHHLVKYRGHFLSSQEKITIGSTYNPEDLANAIEVYADEKGLSW
ELNNPEQLTEIISGEAGYGLNKSMKADEALKLFEFDNNQDKVAIKTLLAGLTGNQIDFAKLFGK
DISDKDEAKLWKLKLDDEALEEKSQTILSQLTDEEIELFHAVVQAYDGFVLIGLLNGADSVSAA
MVQLYDQHREDRKLLKSLAQKAGLKHKRFSEIYEQLALATDEATIKNGISTARELVEESNLSKE
VKEDTLRRLDENEFLPKQRTKANSVIPHQLHLAELQKILQNQGQYYPFLLDTFEKEDGQDNKIE
ELLRFRIPYYVGPLVTKKDVEHAGGDADNHWVERNEGFEKSRVTPWNFDKVFNRDKAARDFIER
LTGNDTYLIGEKTLPQNSLRYQLFTVLNELNNVRVNGKKFDSKTKADLINDLFKARKTVSLSAL
KDYLKAQGKGDVTITGLADESKFNSSLSSYNDLKKTFDAEYLENEDNQETLEKIIEIQTVFEDS
KIASRELSKLPLDDDQVKKLSQTHYTGWGRLSEKLLDSKIIDERGQKVSILDKLKSTSQNFMSI
INNDKYGVQAWITEQNTGSSKLTFDEKVNELTTSPANKRGIKQSFAVLNDIKKAMKEEPRRVYL
EFAREDQTSVRSVPRYNQLKEKYQSKSLSEEAKVLKKTLDGNKNKMSDDRYFLYFQQQGKDMYT
GRPINFERLSQDYDIDHIIPQAFTKDDSLDNRVLVSRPENARKSDSFAYTDEVQKQDGSLWTSL
LKSGFINRKKYERLTKAGKYLDGQKTGFIARQLVETRQIIKNVASLIEGEYENSKAVAIRSEIT
ADMRLLVGIKKHREINSFHHAFDALLITAAGQYMQNRYPDRDSTNVYNEFDRYTNDYLKNLRQL
SSRDEVRRLKSFGFVVGTMRKGNEDWSEENTSYLRKVMMFKNILTTKKTEKDRGPLNKETIFSP
KSGKKLIPLNSKRSDTALYGGYSNVYSAYMTLVRANGKNLLIKIPISIANQIEVGNLKINDYIV
NNPAIKKFEKILISKLPLGQLVNEDGNLIYLASNEYRHNAKQLWLSTTDADKIASISENSSDEE
LLEAYDILTSENVKNRFPFFKKDIDKLSQVRDEFLDSDKRIAVIQTILRGLQIDAAYQAPVKII
SKKVSDWHKLQQSGGIKLSDNSEMIYQSATGIFETRVKISDLL
SEQ ID NO: 314
IVDYCIGLDLGTGSVGWAVVDMNHRLMKRNGKHLWGSRLFSNAETAANRRASRSIRRRYNKRRE
RIRLLRAILQDMVLEKDPTFFIRLEHTSFLDEEDKAKYLGTDYKDNYNLFIDEDFNDYTYYHKY
PTIYHLRKALCESTEKADPRLIYLALHHIVKYRGNFLYEGQKFNMDASNIEDKLSDIFTQFTSF
NNIPYEDDEKKNLEILEILKKPLSKKAKVDEVMTLIAPEKDYKSAFKELVTGIAGNKMNVTKMI
LCEPIKQGDSEIKLKFSDSNYDDQFSEVEKDLGEYVEFVDALHNVYSWVELQTIMGATHTDNAS
ISEAMVSRYNKHHDDLKLLKDCIKNNVPNKYFDMFRNDSEKSKGYYNYINRPSKAPVDEFYKYV
KKCIEKVDTPEAKQILNDIELENFLLKQNSRTNGSVPYQMQLDEMIKIIDNQAEYYPILKEKRE
QLLSILTFRIPYYFGPLNETSEHAWIKRLEGKENQRILPWNYQDIVDVDATAEGFIKRMRSYCT
YFPDEEVLPKNSLIVSKYEVYNELNKIRVDDKLLEVDVKNDIYNELFMKNKTVTEKKLKNWLVN
NQCCSKDAEIKGFQKENQFSTSLTPWIDFTNIFGKIDQSNFDLIENIIYDLTVFEDKKIMKRRL
KKKYALPDDKVKQILKLKYKDWSRLSKKLLDGIVADNRFGSSVTVLDVLEMSRLNLMEIINDKD
LGYAQMIEEATSCPEDGKFTYEEVERLAGSPALKRGIWQSLQIVEEITKVMKCRPKYIYIEFER
SEEAKERTESKIKKLENVYKDLDEQTKKEYKSVLEELKGFDNTKKISSDSLFLYFTQLGKCMYS
GKKLDIDSLDKYQIDHIVPQSLVKDDSFDNRVLVVPSENQRKLDDLVVPFDIRDKMYRFWKLLF
DHELISPKKFYSLIKTEYTERDEERFINRQLVETRQITKNVTQIIEDHYSTTKVAAIRANLSHE
FRVKNHIYKNRDINDYHHAHDAYIVALIGGFMRDRYPNMHDSKAVYSEYMKMFRKNKNDQKRWK
DGFVINSMNYPYEVDGKLIWNPDLINEIKKCFYYKDCYCTTKLDQKSGQLFNLTVLSNDAHADK
GVTKAVVPVNKNRSDVHKYGGFSGLQYTIVAIEGQKKKGKKTELVKKISGVPLHLKAASINEKI
NYIEEKEGLSDVRIIKDNIPVNQMIEMDGGEYLLTSPTEYVNARQLVLNEKQCALIADIYNAIY
KQDYDNLDDILMIQLYIELTNKMKVLYPAYRGIAEKFESMNENYVVISKEEKANIIKQMLIVMH
RGPQNGNIVYDDFKISDRIGRLKTKNHNLNNIVFISQSPTGIYTKKYKL
SEQ ID NO: 315
MKSEKKYYIGLDVGTNSVGWAVTDEFYNILRAKGKDLWGVRLFEKADTAANTRIFRSGRRRNDR
KGMRLQILREIFEDEIKKVDKDFYDRLDESKFWAEDKKVSGKYSLFNDKNFSDKQYFEKFPTIF
HLRKYLMEEHGKVDIRYYFLAINQMMKRRGHFLIDGQISHVTDDKPLKEQLILLINDLLKIELE
EELMDSIFEILADVNEKRTDKKNNLKELIKGQDFNKQEGNILNSIFESIVTGKAKIKNIISDED
ILEKIKEDNKEDFVLTGDSYEENLQYFEEVLQENITLFNTLKSTYDFLILQSILKGKSTLSDAQ
VERYDEHKKDLEILKKVIKKYDEDGKLFKQVFKEDNGNGYVSYIGYYLNKNKKITAKKKISNIE
FTKYVKGILEKQCDCEDEDVKYLLGKIEQENFLLKQISSINSVIPHQIHLFELDKILENLAKNY
PSFNNKKEEFTKIEKIRKTFTFRIPYYVGPLNDYHKNNGGNAWIFRNKGEKIRPWNFEKIVDLH
KSEEEFIKRMLNQCTYLPEETVLPKSSILYSEYMVLNELNNLRINGKPLDTDVKLKLIEELFKK
KTKVTLKSIRDYMVRNNFADKEDFDNSEKNLEIASNMKSYIDFNNILEDKFDVEMVEDLIEKIT
IHTGNKKLLKKYIEETYPDLSSSQIQKIINLKYKDWGRLSRKLLDGIKGTKKETEKTDTVINFL
RNSSDNLMQIIGSQNYSFNEYIDKLRKKYIPQEISYEVVENLYVSPSVKKMIWQVIRVTEEITK
VMGYDPDKIFIEMAKSEEEKKTTISRKNKLLDLYKAIKKDERDSQYEKLLTGLNKLDDSDLRSR
KLYLYYTQMGRDMYTGEKIDLDKLFDSTHYDKDHIIPQSMKKDDSIINNLVLVNKNANQTTKGN
IYPVPSSIRNNPKIYNYWKYLMEKEFISKEKYNRLIRNTPLTNEELGGFINRQLVETRQSTKAI
KELFEKFYQKSKIIPVKASLASDLRKDMNTLKSREVNDLHHAHDAFLNIVAGDVWNREFTSNPI
NYVKENREGDKVKYSLSKDFTRPRKSKGKVIWTPEKGRKLIVDTLNKPSVLISNESHVKKGELF
NATIAGKKDYKKGKIYLPLKKDDRLQDVSKYGGYKAINGAFFFLVEHTKSKKRIRSIELFPLHL
LSKFYEDKNTVLDYAINVLQLQDPKIIIDKINYRTEIIIDNFSYLISTKSNDGSITVKPNEQMY
WRVDEISNLKKIENKYKKDAILTEEDRKIMESYIDKIYQQFKAGKYKNRRTTDTIIEKYEIIDL
DTLDNKQLYQLLVAFISLSYKTSNNAVDFTVIGLGTECGKPRITNLPDNTYLVYKSITGIYEKR
IRIK
SEQ ID NO: 316
MKLRGIEDDYSIGLDMGTSSVGWAVTDERGTLAHFKRKPTWGSRLFREAQTAAVARMPRGQRRR
YVRRRWRLDLLQKLFEQQMEQADPDFFIRLRQSRLLRDDRAEEHADYRWPLFNDCKFTERDYYQ
RFPTIYHVRSWLMETDEQADIRLIYLALHNIVKHRGNFLREGQSLSAKSARPDEALNHLRETLR
VWSSERGFECSIADNGSILAMLTHPDLSPSDRRKKIAPLFDVKSDDAAADKKLGIALAGAVIGL
KTEFKNIFGDFPCEDSSIYLSNDEAVDAVRSACPDDCAELFDRLCEVYSAYVLQGLLSYAPGQT
ISANMVEKYRRYGEDLALLKKLVKIYAPDQYRMFFSGATYPGTGIYDAAQARGYTKYNLGPKKS
EYKPSESMQYDDFRKAVEKLFAKTDARADERYRMMMDRFDKQQFLRRLKTSDNGSIYHQLHLEE
LKAIVENQGRFYPFLKRDADKLVSLVSFRIPYYVGPLSTRNARTDQHGENRFAWSERKPGMQDE
PIFPWNWESIIDRSKSAEKFILRMTGMCTYLQQEPVLPKSSLLYEEFCVLNELNGAHWSIDGDD
EHRFDAADREGIIEELFRRKRTVSYGDVAGWMERERNQIGAHVCGGQGEKGFESKLGSYIFFCK
DVFKVERLEQSDYPMIERIILWNTLFEDRKILSQRLKEEYGSRLSAEQIKTICKKRFTGWGRLS
EKFLTGITVQVDEDSVSIMDVLREGCPVSGKRGRAMVMMEILRDEELGFQKKVDDFNRAFFAEN
AQALGVNELPGSPAVRRSLNQSIRIVDEIASIAGKAPANIFIEVTRDEDPKKKGRRTKRRYNDL
KDALEAFKKEDPELWRELCETAPNDMDERLSLYFMQRGKCLYSGRAIDIHQLSNAGIYEVDHII
PRTYVKDDSLENKALVYREENQRKTDMLLIDPEIRRRMSGYWRMLHEAKLIGDKKFRNLLRSRI
DDKALKGFIARQLVETGQMVKLVRSLLEARYPETNIISVKASISHDLRTAAELVKCREANDFHH
AHDAFLACRVGLFIQKRHPCVYENPIGLSQVVRNYVRQQADIFKRCRTIPGSSGFIVNSFMTSG
FDKETGEIFKDDWDAEAEVEGIRRSLNFRQCFISRMPFEDHGVFWDATIYSPRAKKTAALPLKQ
GLNPSRYGSFSREQFAYFFIYKARNPRKEQTLFEFAQVPVRLSAQIRQDENALERYARELAKDQ
GLEFIRIERSKILKNQLIEIDGDRLCITGKEEVRNACELAFAQDEMRVIRMLVSEKPVSRECVI
SLFNRILLHGDQASRRLSKQLKLALLSEAFSEASDNVQRNVVLGLIAIFNGSTNMVNLSDIGGS
KFAGNVRIKYKKELASPKVNVHLIDQSVTGMFERRTKIGL
SEQ ID NO: 317
MENKQYYIGLDVGTNSVGWAVTDTSYNLLRAKGKDMWGARLFEKANTAAERRTKRTSRRRSERE
KARKAMLKELFADEINRVDPSFFIRLEESKFFLDDRSENNRQRYTLFNDATFTDKDYYEKYKTI
FHLRSALINSDEKFDVRLVFLAILNLFSHRGHFLNASLKGDGDIQGMDVFYNDLVESCEYFEIE
LPRITNIDNFEKILSQKGKSRTKILEELSEELSISKKDKSKYNLIKLISGLEASVVELYNIEDI
QDENKKIKIGFRESDYEESSLKVKEIIGDEYFDLVERAKSVHDMGLLSNIIGNSKYLCEARVEA
YENHHKDLLKIKELLKKYDKKAYNDMFRKMTDKNYSAYVGSVNSNIAKERRSVDKRKIEDLYKY
IEDTALKNIPDDNKDKIEILEKIKLGEFLKKQLTASNGVIPNQLQSRELRAILKKAENYLPFLK
EKGEKNLTVSEMIIQLFEFQIPYYVGPLDKNPKKDNKANSWAKIKQGGRILPWNFEDKVDVKGS
RKEFIEKMVRKCTYISDEHTLPKQSLLYEKFMVLNEINNIKIDGEKISVEAKQKIYNDLFVKGK
KVSQKDIKKELISLNIMDKDSVLSGTDTVCNAYLSSIGKFTGVFKEEINKQSIVDMIEDIIFLK
TVYGDEKRFVKEEIVEKYGDEIDKDKIKRILGFKFSNWGNLSKSFLELEGADVGTGEVRSIIQS
LWETNFNLMELLSSRFTYMDELEKRVKKLEKPLSEWTIEDLDDMYLSSPVKRMIWQSMKIVDEI
QTVIGYAPKRIFVEMTRSEGEKVRTKSRKDRLKELYNGIKEDSKQWVKELDSKDESYFRSKKMY
LYYLQKGRCMYSGEVIELDKLMDDNLYDIDHIYPRSFVKDDSLDNLVLVKKEINNRKQNDPITP
QIQASCQGFWKILHDQGFMSNEKYSRLTRKTQEFSDEEKLSFINRQIVETGQATKCMAQILQKS
MGEDVDVVFSKARLVSEFRHKFELFKSRLINDFHHANDAYLNIVVGNSYFVKFTRNPANFIKDA
RKNPDNPVYKYHMDRFFERDVKSKSEVAWIGQSEGNSGTIVIVKKTMAKNSPLITKKVEEGHGS
ITKETIVGVKEIKFGRNKVEKADKTPKKPNLQAYRPIKTSDERLCNILRYGGRTSISISGYCLV
EYVKKRKTIRSLEAIPVYLGRKDSLSEEKLLNYFRYNLNDGGKDSVSDIRLCLPFISTNSLVKI
DGYLYYLGGKNDDRIQLYNAYQLKMKKEEVEYIRKIEKAVSMSKFDEIDREKNPVLTEEKNIEL
YNKIQDKFENTVFSKRMSLVKYNKKDLSFGDFLKNKKSKFEEIDLEKQCKVLYNIIFNLSNLKE
VDLSDIGGSKSTGKCRCKKNITNYKEFKLIQQSITGLYSCEKDLMTI
SEQ ID NO: 318
MKNLKEYYIGLDIGTASVGWAVTDESYNIPKFNGKKMWGVRLFDDAKTAEERRTQRGSRRRLNR
RKERINLLQDLFATEISKVDPNFFLRLDNSDLYREDKDEKLKSKYTLFNDKDFKDRDYHKKYPT
IHHLIMDLIEDEGKKDIRLLYLACHYLLKNRGHFIFEGQKFDTKNSFDKSINDLKIHLRDEYNI
DLEFNNEDLIEIITDTTLNKTNKKKELKNIVGDTKFLKAISAIMIGSSQKLVDLFEDGEFEETT
VKSVDFSTTAFDDKYSEYEEALGDTISLLNILKSIYDSSILENLLKDADKSKDGNKYISKAFVK
KFNKHGKDLKTLKRIIKKYLPSEYANIFRNKSINDNYVAYTKSNITSNKRTKASKFTKQEDFYK
FIKKHLDTIKETKLNSSENEDLKLIDEMLTDIEFKTFIPKLKSSDNGVIPYQLKLMELKKILDN
QSKYYDFLNESDEYGTVKDKVESIMEFRIPYYVGPLNPDSKYAWIKRENTKITPWNFKDIVDLD
SSREEFIDRLIGRCTYLKEEKVLPKASLIYNEFMVLNELNNLKLNEFLITEEMKKAIFEELFKT
KKKVTLKAVSNLLKKEFNLTGDILLSGTDGDFKQGLNSYIDFKNIIGDKVDRDDYRIKIEEIIK
LIVLYEDDKTYLKKKIKSAYKNDFTDDEIKKIAALNYKDWGRLSKRFLTGIEGVDKTTGEKGSI
IYFMREYNLNLMELMSGHYTFTEEVEKLNPVENRELCYEMVDELYLSPSVKRMLWQSLRVVDEI
KRIIGKDPKKIFIEMARAKEAKNSRKESRKNKLLEFYKFGKKAFINEIGEERYNYLLNEINSEE
ESKFRWDNLYLYYTQLGRCMYSLEPIDLADLKSNNIYDQDHIYPKSKIYDDSLENRVLVKKNLN
HEKGNQYPIPEKVLNKNAYGFWKILFDKGLIGQKKYTRLTRRTPFEERELAEFIERQIVETRQA
TKETANLLKNICQDSEIVYSKAENASRFRQEFDIIKCRTVNDLHHMHDAYLNIVVGNVYNTKFT
KNPLNFIKDKDNVRSYNLENMFKYDVVRGSYTAWIADDSEGNVKAATIKKVKRELEGKNYRFTR
MSYIGTGGLYDQNLMRKGKGQIPQKENTNKSNIEKYGGYNKASSAYFALIESDGKAGRERTLET
IPIMVYNQEKYGNTEAVDKYLKDNLELQDPKILKDKIKINSLIKLDGFLYNIKGKTGDSLSIAG
SVQLIVNKEEQKLIKKMDKFLVKKKDNKDIKVTSFDNIKEEELIKLYKTLSDKLNNGIYSNKRN
NQAKNISEALDKFKEISIEEKIDVLNQIILLFQSYNNGCNLKSIGLSAKTGVVFIPKKLNYKEC
KLINQSITGLFENEVDLLNL
SEQ ID NO: 319
MGKMYYLGLDIGTNSVGYAVTDPSYHLLKFKGEPMWGAHVFAAGNQSAERRSFRTSRRRLDRRQ
QRVKLVQEIFAPVISPIDPRFFIRLHESALWRDDVAETDKHIFFNDPTYTDKEYYSDYPTIHHL
IVDLMESSEKHDPRLVYLAVAWLVAHRGHFLNEVDKDNIGDVLSFDAFYPEFLAFLSDNGVSPW
VCESKALQATLLSRNSVNDKYKALKSLIFGSQKPEDNFDANISEDGLIQLLAGKKVKVNKLFPQ
ESNDASFTLNDKEDAIEEILGTLTPDECEWIAHIRRLFDWAIMKHALKDGRTISESKVKLYEQH
HHDLTQLKYFVKTYLAKEYDDIFRNVDSETTKNYVAYSYHVKEVKGTLPKNKATQEEFCKYVLG
KVKNIECSEADKVDFDEMIQRLTDNSFMPKQVSGENRVIPYQLYYYELKTILNKAASYLPFLTQ
CGKDAISNQDKLLSIMTFRIPYFVGPLRKDNSEHAWLERKAGKIYPWNFNDKVDLDKSEEAFIR
RMTNTCTYYPGEDVLPLDSLIYEKFMILNEINNIRIDGYPISVDVKQQVFGLFEKKRRVTVKDI
QNLLLSLGALDKHGKLTGIDTTIHSNYNTYHHFKSLMERGVLTRDDVERIVERMTYSDDTKRVR
LWLNNNYGTLTADDVKHISRLRKHDFGRLSKMFLTGLKGVHKETGERASILDFMWNTNDNLMQL
LSECYTFSDEITKLQEAYYAKAQLSLNDFLDSMYISNAVKRPIYRTLAVVNDIRKACGTAPKRI
FIEMARDGESKKKRSVTRREQIKNLYRSIRKDFQQEVDFLEKILENKSDGQLQSDALYLYFAQL
GRDMYTGDPIKLEHIKDQSFYNIDHIYPQSMVKDDSLDNKVLVQSEINGEKSSRYPLDAAIRNK
MKPLWDAYYNHGLISLKKYQRLTRSTPFTDDEKWDFINRQLVETRQSTKALAILLKRKFPDTEI
VYSKAGLSSDFRHEFGLVKSRNINDLHHAKDAFLAIVTGNVYHERFNRRWFMVNQPYSVKTKTL
FTHSIKNGNFVAWNGEEDLGRIVKMLKQNKNTIHFTRFSFDRKEGLFDIQPLKASTGLVPRKAG
LDVVKYGGYDKSTAAYYLLVRFTLEDKKTQHKLMMIPVEGLYKARIDHDKEFLTDYAQTTISEI
LQKDKQKVINIMFPMGTRHIKLNSMISIDGFYLSIGGKSSKGKSVLCHAMVPLIVPHKIECYIK
AMESFARKFKENNKLRIVEKFDKITVEDNLNLYELFLQKLQHNPYNKFFSTQFDVLTNGRSTFT
KLSPEEQVQTLLNILSIFKTCRSSGCDLKSINGSAQAARIMISADLTGLSKKYSDIRLVEQSAS
GLFVSKSQNLLEYL
SEQ ID NO: 320
MTKKEQPYNIGLDIGTSSVGWAVTNDNYDLLNIKKKNLWGVRLFEEAQTAKETRLNRSTRRRYR
RRKNRINWLNEIFSEELAKTDPSFLIRLQNSWVSKKDPDRKRDKYNLFIDGPYTDKEYYREFPT
IFHLRKELILNKDKADIRLIYLALHNILKYRGNFTYEHQKFNISNLNNNLSKELIELNQQLIKY
DISFPDDCDWNHISDILIGRGNATQKSSNILKDFTLDKETKKLLKEVINLILGNVAHLNTIFKT
SLTKDEEKLNFSGKDIESKLDDLDSILDDDQFTVLDAANRIYSTITLNEILNGESYFSMAKVNQ
YENHAIDLCKLRDMWHTTKNEEAVEQSRQAYDDYINKPKYGTKELYTSLKKFLKVALPTNLAKE
AEEKISKGTYLVKPRNSENGVVPYQLNKIEMEKIIDNQSQYYPFLKENKEKLLSILSFRIPYYV
GPLQSAEKNPFAWMERKSNGHARPWNFDEIVDREKSSNKFIRRMTVTDSYLVGEPVLPKNSLIY
QRYEVLNELNNIRITENLKTNPIGSRLTVETKQRIYNELFKKYKKVTVKKLTKWLIAQGYYKNP
ILIGLSQKDEFNSTLTTYLDMKKIFGSSFMEDNKNYDQIEELIEWLTIFEDKQILNEKLHSSKY
SYTPDQIKKISNMRYKGWGRLSKKILMDITTETNTPQLLQLSNYSILDLMWATNNNFISIMSND
KYDFKNYIENHNLNKNEDQNISDLVNDIHVSPALKRGITQSIKIVQEIVKFMGHAPKHIFIEVT
RETKKSEITTSREKRIKRLQSKLLNKANDFKPQLREYLVPNKKIQEELKKHKNDLSSERIMLYF
LQNGKSLYSEESLNINKLSDYQVDHILPRTYIPDDSLENKALVLAKENQRKADDLLLNSNVIDR
NLERWTYMLNNNMIGLKKFKNLTRRVITDKDKLGFIHRQLVQTSQMVKGVANILDNMYKNQGTT
CIQARANLSTAFRKALSGQDDTYHFKHPELVKNRNVNDFHHAQDAYLASFLGTYRLRRFPTNEM
LLMNGEYNKFYGQVKELYSKKKKLPDSRKNGFIISPLVNGTTQYDRNTGEIIWNVGFRDKILKI
FNYHQCNVTRKTEIKTGQFYDQTIYSPKNPKYKKLIAQKKDMDPNIYGGFSGDNKSSITIVKID
NNKIKPVAIPIRLINDLKDKKTLQNWLEENVKHKKSIQIIKNNVPIGQIIYSKKVGLLSLNSDR
EVANRQQLILPPEHSALLRLLQIPDEDLDQILAFYDKNILVEILQELITKMKKFYPFYKGEREF
LIANIENFNQATTSEKVNSLEELITLLHANSTSAHLIFNNIEKKAFGRKTHGLTLNNTDFIYQS
VTGLYETRIHIE
SEQ ID NO: 321
MTKFNKNYSIGLDIGVSSVGYAVVTEDYRVPAFKFKVLGNTEKEKIKKNLIGSTTFVSAQPAKG
TRVFRVNRRRIDRRNHRITYLRDIFQKEIEKVDKNFYRRLDESFRVLGDKSEDLQIKQPFFGDK
ELETAYHKKYPTIYHLRKHLADADKNSPVADIREVYMAISHILKYRGHFLTLDKINPNNINMQN
SWIDFIESCQEVFDLEISDESKNIADIFKSSENRQEKVKKILPYFQQELLKKDKSIFKQLLQLL
FGLKTKFKDCFELEEEPDLNFSKENYDENLENFLGSLEEDFSDVFAKLKVLRDTILLSGMLTYT
GATHARFSATMVERYEEHRKDLQRFKFFIKQNLSEQDYLDIFGRKTQNGFDVDKETKGYVGYIT
NKMVLTNPQKQKTIQQNFYDYISGKITGIEGAEYFLNKISDGTFLRKLRTSDNGAIPNQIHAYE
LEKIIERQGKDYPFLLENKDKLLSILTFKIPYYVGPLAKGSNSRFAWIKRATSSDILDDNDEDT
RNGKIRPWNYQKLINMDETRDAFITNLIGNDIILLNEKVLPKRSLIYEEVMLQNELTRVKYKDK
YGKAHFFDSELRQNIINGLFKNNSKRVNAKSLIKYLSDNHKDLNAIEIVSGVEKGKSFNSTLKT
YNDLKTIFSEELLDSEIYQKELEEIIKVITVFDDKKSIKNYLTKFFGHLEILDEEKINQLSKLR
YSGWGRYSAKLLLDIRDEDTGFNLLQFLRNDEENRNLTKLISDNTLSFEPKIKDIQSKSTIEDD
IFDEIKKLAGSPAIKRGILNSIKIVDELVQIIGYPPHNIVIEMARENMTTEEGQKKAKTRKTKL
ESALKNIENSLLENGKVPHSDEQLQSEKLYLYYLQNGKDMYTLDKTGSPAPLYLDQLDQYEVDH
IIPYSFLPIDSIDNKVLTHRENNQQKLNNIPDKETVANMKPFWEKLYNAKLISQTKYQRLTTSE
RTPDGVLTESMKAGFIERQLVETRQIIKHVARILDNRFSDTKIITLKSQLITNFRNTFHIAKIR
ELNDYHHAHDAYLAVVVGQTLLKVYPKLAPELIYGHHAHFNRHEENKATLRKHLYSNIMRFFNN
PDSKVSKDIWDCNRDLPIIKDVIYNSQINFVKRTMIKKGAFYNQNPVGKFNKQLAANNRYPLKT
KALCLDTSIYGGYGPMNSALSIIIIAERFNEKKGKIETVKEFHDIFIIDYEKFNNNPFQFLNDT
SENGFLKKNNINRVLGFYRIPKYSLMQKIDGTRMLFESKSNLHKATQFKLTKTQNELFFHMKRL
LTKSNLMDLKSKSAIKESQNFILKHKEEFDNISNQLSAFSQKMLGNTTSLKNLIKGYNERKIKE
IDIRDETIKYFYDNFIKMFSFVKSGAPKDINDFFDNKCTVARMRPKPDKKLLNATLIHQSITGL
YETRIDLSKLGED
SEQ ID NO: 322
MKQEYFLGLDMGTGSLGWAVTDSTYQVMRKHGKALWGTRLFESASTAEERRMFRTARRRLDRRN
WRIQVLQEIFSEEISKVDPGFFLRMKESKYYPEDKRDAEGNCPELPYALFVDDNYTDKNYHKDY
PTIYHLRKMLMETTEIPDIRLVYLVLHHMMKHRGHFLLSGDISQIKEFKSTFEQLIQNIQDEEL
EWHISLDDAAIQFVEHVLKDRNLTRSTKKSRLIKQLNAKSACEKAILNLLSGGTVKLSDIFNNK
ELDESERPKVSFADSGYDDYIGIVEAELAEQYYIIASAKAVYDWSVLVEILGNSVSISEAKIKV
YQKHQADLKTLKKIVRQYMTKEDYKRVFVDTEEKLNNYSAYIGMTKKNGKKVDLKSKQCTQADF
YDFLKKNVIKVIDHKEITQEIESEIEKENFLPKQVTKDNGVIPYQVHDYELKKILDNLGTRMPF
IKENAEKIQQLFEFRIPYYVGPLNRVDDGKDGKFTWSVRKSDARIYPWNFTEVIDVEASAEKFI
RRMTNKCTYLVGEDVLPKDSLVYSKFMVLNELNNLRLNGEKISVELKQRIYEELFCKYRKVTRK
KLERYLVIEGIAKKGVEITGIDGDFKASLTAYHDFKERLTDVQLSQRAKEAIVLNVVLFGDDKK
LLKQRLSKMYPNLTTGQLKGICSLSYQGWGRLSKTFLEEITVPAPGTGEVWNIMTALWQTNDNL
MQLLSRNYGFTNEVEEFNTLKKETDLSYKTVDELYVSPAVKRQIWQTLKVVKEIQKVMGNAPKR
VFVEMAREKQEGKRSDSRKKQLVELYRACKNEERDWITELNAQSDQQLRSDKLFLYYIQKGRCM
YSGETIQLDELWDNTKYDIDHIYPQSKTMDDSLNNRVLVKKNYNAIKSDTYPLSLDIQKKMMSF
WKMLQQQGFITKEKYVRLVRSDELSADELAGFIERQIVETRQSTKAVATILKEALPDTEIVYVK
AGNVSNFRQTYELLKVREMNDLHHAKDAYLNIVVGNAYFVKFTKNAAWFIRNNPGRSYNLKRMF
EFDIERSGEIAWKAGNKGSIVTVKKVMQKNNILVTRKAYEVKGGLFDQQIMKKGKGQVPIKGND
ERLADIEKYGGYNKAAGTYFMLVKSLDKKGKEIRTIEFVPLYLKNQIEINHESAIQYLAQERGL
NSPEILLSKIKIDTLFKVDGFKMWLSGRTGNQLIFKGANQLILSHQEAAILKGVVKYVNRKNEN
KDAKLSERDGMTEEKLLQLYDTFLDKLSNTVYSIRLSAQIKTLTEKRAKFIGLSNEDQCIVLNE
ILHMFQCQSGSANLKLIGGPGSAGILVMNNNITACKQISVINQSPTGIYEKEIDLIKL
SEQ ID NO: 323
MKKPYSIGLDIGTNSVGWAVVTDDYKVPAKKMKVLGNTDKSHIEKNLLGALLFDSGNTAEDRRL
KRTARRRYTRRRNRILYLQEIFSEEMGKVDDSFFHRLEDSFLVTEDKRGERHPIFGNLEEEVKY
HENFPTIYHLRQYLADNPEKVDLRLVYLALAHIIKFRGHFLIEGKFDTRNNDVQRLFQEFLAVY
DNTFENSSLQEQNVQVEEILTDKISKSAKKDRVLKLFPNEKSNGRFAEFLKLIVGNQADFKKHF
ELEEKAPLQFSKDTYEEELEVLLAQIGDNYAELFLSAKKLYDSILLSGILTVTDVGTKAPLSAS
MIQRYNEHQMDLAQLKQFIRQKLSDKYNEVFSDVSKDGYAGYIDGKTNQEAFYKYLKGLLNKIE
GSGYFLDKIEREDFLRKQRTFDNGSIPHQIHLQEMRAIIRRQAEFYPFLADNQDRIEKLLTFRI
PYYVGPLARGKSDFAWLSRKSADKITPWNFDEIVDKESSAEAFINRMTNYDLYLPNQKVLPKHS
LLYEKFTVYNELTKVKYKTEQGKTAFFDANMKQEIFDGVFKVYRKVTKDKLMDFLEKEFDEFRI
VDLTGLDKENKVFNASYGTYHDLCKILDKDFLDNSKNEKILEDIVLTLTLFEDREMIRKRLENY
SDLLTKEQVKKLERRHYTGWGRLSAELIHGIRNKESRKTILDYLIDDGNSNRNFMQLINDDALS
FKEEIAKAQVIGETDNLNQVVSDIAGSPAIKKGILQSLKIVDELVKIMGHQPENIVVEMARENQ
FTNQGRRNSQQRLKGLTDSIKEFGSQILKEHPVENSQLQNDRLFLYYLQNGRDMYTGEELDIDY
LSQYDIDHIIPQAFIKDNSIDNRVLTSSKENRGKSDDVPSKDVVRKMKSYWSKLLSAKLITQRK
FDNLTKAERGGLTDDDKAGFIKRQLVETRQITKHVARILDERFNTETDENNKKIRQVKIVTLKS
NLVSNFRKEFELYKVREINDYHHAHDAYLNAVIGKALLGVYPQLEPEFVYGDYPHFHGHKENKA
TAKKFFYSNIMNFFKKDDVRTDKNGEIIWKKDEHISNIKKVLSYPQVNIVKKVEEQTGGFSKES
ILPKGNSDKLIPRKTKKFYWDTKKYGGFDSPIVAYSILVIADIEKGKSKKLKTVKALVGVTIME
KMTFERDPVAFLERKGYRNVQEENIIKLPKYSLFKLENGRKRLLASARELQKGNEIVLPNHLGT
LLYHAKNIHKVDEPKHLDYVDKHKDEFKELLDVVSNFSKKYTLAEGNLEKIKELYAQNNGEDLK
ELASSFINLLTFTAIGAPATFKFFDKNIDRKRYTSTTEILNATLIHQSITGLYETRIDLNKLGG
D
SEQ ID NO: 324
[sequence omitted]
SEQ ID NO: 325
MTKPYSIGLDIGTNSVGWAVTTDNYKVPSKKMKVLGNTSKKYIKKNLLGVLLFDSGITAEGRRL
KRTARRRYTRRRNRILYLQEIFSTEMATLDDAFFQRLDDSFLVPDDKRDSKYPIFGNLVEEKAY
HDEFPTIYHLRKYLADSTKKADLRLVYLALAHMIKYRGHFLIEGEFNSKNNDIQKNFQDFLDTY
NAIFESDLSLENSKQLEEIVKDKISKLEKKDRILKLFPGEKNSGIFSEFLKLIVGNQADFRKCF
NLDEKASLHFSKESYDEDLETLLGYIGDDYSDVFLKAKKLYDAILLSGFLTVTDNETEAPLSSA
MIKRYNEHKEDLALLKEYIRNISLKTYNEVFKDDTKNGYAGYIDGKTNQEDFYVYLKKLLAEFE
GADYFLEKIDREDFLRKQRTFDNGSIPYQIHLQEMRAILDKQAKFYPFLAKNKERIEKILTFRI
PYYVGPLARGNSDFAWSIRKRNEKITPWNFEDVIDKESSAEAFINRMTSFDLYLPEEKVLPKHS
LLYETFNVYNELTKVRFIAESMRDYQFLDSKQKKDIVRLYFKDKRKVTDKDIIEYLHAIYGYDG
IELKGIEKQFNSSLSTYHDLLNIINDKEFLDDSSNEAIIEEIIHTLTIFEDREMIKQRLSKFEN
IFDKSVLKKLSRRHYTGWGKLSAKLINGIRDEKSGNTILDYLIDDGISNRNFMQLIHDDALSFK
KKIQKAQIIGDEDKGNIKEVVKSLPGSPAIKKGILQSIKIVDELVKVMGGRKPESIVVEMAREN
QYTNQGKSNSQQRLKRLEKSLKELGSKILKENIPAKLSKIDNNALQNDRLYLYYLQNGKDMYTG
DDLDIDRLSNYDIDHIIPQAFLKDNSIDNKVLVSSASNRGKSDDVPSLEVVKKRKTFWYQLLKS
KLISQRKFDNLTKAERGGLSPEDKAGFIQRQLVETRQITKHVARLLDEKFNNKKDENNRAVRTV
KIITLKSTLVSQFRKDFELYKVREINDFHHAHDAYLNAVVASALLKKYPKLEPEFVYGDYPKYN
SFRERKSATEKVYFYSNIMNIFKKSISLADGRVIERPLIEVNEETGESVWNKESDLATVRRVLS
YPQVNVVKKVEEQNHGLDRGKPKGLFNANLSSKPKPNSNENLVGAKEYLDPKKYGGYAGISNSF
TVLVKGTIEKGAKKKITNVLEFQGISILDRINYRKDKLNFLLEKGYKDIELIIELPKYSLFELS
DGSRRMLASILSTNNKRGEIHKGNQIFLSQKFVKLLYHAKRISNTINENHRKYVENHKKEFEEL
FYYILEFNENYVGAKKNGKLLNSAFQSWQNHSIDELCSSFIGPTGSERKGLFELTSRGSAADFE
FLGVKIPRYRDYTPSSLLKDATLIHQSVTGLYETRIDLAKLGEG
SEQ ID NO: 326
MKKQKFSDYYLGFDIGTNSVGWCVTDLDYNVLRFNKKDMWGSRLFDEAKTAAERRVQRNSRRRL
KRRKWRLNLLEEIFSDEIMKIDSNFFRRLKESSLWLEDKNSKEKFTLFNDDNYKDYDFYKQYPT
IFHLRDELIKNPEKKDIRLIYLALHSIFKSRGHFLFEGQNLKEIKNFETLYNNLISFLEDNGIN
KSIDKDNIEKLEKIICDSGKGLKDKEKEFKGIFNSDKQLVAIFKLSVGSSVSLNDLFDTDEYKK
EEVEKEKISFREQIYEDDKPIYYSILGEKIELLDIAKSFYDFMVLNNILSDSNYISEAKVKLYE
EHKKDLKNLKYIIRKYNKENYDKLFKDKNENNYPAYIGLNKEKDKKEVVEKSRLKIDDLIKVIK
GYLPKPERIEEKDKTIFNEILNKIELKTILPKQRISDNGTLPYQIHEVELEKILENQSKYYDFL
NYEENGVSTKDKLLKTFKFRIPYYVGPLNSYHKDKGGNSWIVRKEEGKILPWNFEQKVDIEKSA
EEFIKRMTNKCTYLNGEDVIPKDSFLYSEYIILNELNKVQVNDEFLNEENKRKIIDELFKENKK
VSEKKFKEYLLVNQIANRTVELKGIKDSFNSNYVSYIKFKDIFGEKLNLDIYKEISEKSILWKC
LYGDDKKIFEKKIKNEYGDILNKDEIKKINSFKFNTWGRLSEKLLTGIEFINLETGECYSSVME
ALRRTNYNLMELLSSKFTLQESIDNENKEMNEVSYRDLIEESYVSPSLKRAILQTLKIYEEIKK
ITGRVPKKVFIEMARGGDESMKNKKIPARQEQLKKLYDSCGNDIANFSIDIKEMKNSLSSYDNN
SLRQKKLYLYYLQFGKCMYTGREIDLDRLLQNNDTYDIDHIYPRSKVIKDDSFDNLVLVLKNEN
AEKSNEYPVKKEIQEKMKSFWRFLKEKNFISDEKYKRLTGKDDFELRGFMARQLVNVRQTTKEV
GKILQQIEPEIKIVYSKAEIASSFREMFDFIKVRELNDTHHAKDAYLNIVAGNVYNTKFTEKPY
RYLQEIKENYDVKKIYNYDIKNAWDKENSLEIVKKNMEKNTVNITRFIKEEKGELFNLNPIKKG
ETSNEIISIKPKLYDGKDNKLNEKYGYYTSLKAAYFIYVEHEKKNKKVKTFERITRIDSTLIKN
EKNLIKYLVSQKKLLNPKIIKKIYKEQTLIIDSYPYTFTGVDSNKKVELKNKKQLYLEKKYEQI
LKNALKFVEDNQGETEENYKFIYLKKRNNNEKNETIDAVKERYNIEFNEMYDKFLEKLSSKDYK
NYINNKLYTNFLNSKEKFKKLKLWEKSLILREFLKIFNKNTYGKYEIKDSQTKEKLFSFPEDTG
RIRLGQSSLGNNKELLEESVTGLFVKKIKL
SEQ ID NO: 327
MKNYTIGLDIGVASVGWVCIDENYKILNYNNRHAFGVHEFESAESAAGRRLKRGMRRRYNRRKK
RLQLLQSLFDSYITDSGFFSKTDSQHFWKNNNEFENRSLTEVLSSLRISSRKYPTIYHLRSDLI
ESNKKMDLRLVYLALHNLVKYRGHFLQEGNWSEAASAEGMDDQLLELVTRYAELENLSPLDLSE
SQWKAAETLLLNRNLTKTDQSKELTAMFGKEYEPFCKLVAGLGVSLHQLFPSSEQALAYKETKT
KVQLSNENVEEVMELLLEEESALLEAVQPFYQQVVLYELLKGETYVAKAKVSAFKQYQKDMASL
KNLLDKTFGEKVYRSYFISDKNSQREYQKSHKVEVLCKLDQFNKEAKFAETFYKDLKKLLEDKS
KTSIGTTEKDEMLRIIKAIDSNQFLQKQKGIQNAAIPHQNSLYEAEKILRNQQAHYPFITTEWI
EKVKQILAFRIPYYIGPLVKDTTQSPFSWVERKGDAPITPWNFDEQIDKAASAEAFISRMRKTC
TYLKGQEVLPKSSLTYERFEVLNELNGIQLRTTGAESDFRHRLSYEMKCWIIDNVFKQYKTVST
KRLLQELKKSPYADELYDEHTGEIKEVFGTQKENAFATSLSGYISMKSILGAVVDDNPAMTEEL
IYWIAVFEDREILHLKIQEKYPSITDVQRQKLALVKLPGWGRFSRLLIDGLPLDEQGQSVLDHM
EQYSSVFMEVLKNKGFGLEKKIQKMNQHQVDGTKKIRYEDIEELAGSPALKRGIWRSVKIVEEL
VSIFGEPANIVLEVAREDGEKKRTKSRKDQWEELTKTTLKNDPDLKSFIGEIKSQGDQRFNEQR
FWLYVTQQGKCLYTGKALDIQNLSMYEVDHILPQNFVKDDSLDNLALVMPEANQRKNQVGQNKM
PLEIIEANQQYAMRTLWERLHELKLISSGKLGRLKKPSFDEVDKDKFIARQLVETRQIIKHVRD
LLDERFSKSDIHLVKAGIVSKFRRFSEIPKIRDYNNKHHAMDALFAAALIQSILGKYGKNFLAF
DLSKKDRQKQWRSVKGSNKEFFLFKNFGNLRLQSPVTGEEVSGVEYMKHVYFELPWQTTKMTQT
GDGMFYKESIFSPKVKQAKYVSPKTEKFVHDEVKNHSICLVEFTFMKKEKEVQETKFIDLKVIE
HHQFLKEPESQLAKFLAEKETNSPIIHARIIRTIPKYQKIWIEHFPYYFISTRELHNARQFEIS
YELMEKVKQLSERSSVEELKIVFGLLIDQMNDNYPIYTKSSIQDRVQKFVDTQLYDFKSFEIGF
EELKKAVAANAQRSDTFGSRISKKPKPEEVAIGYESITGLKYRKPRSVVGTKR
SEQ ID NO: 328
MKKEIKDYFLGLDVGTGSVGWAVTDTDYKLLKANRKDLWGMRCFETAETAEVRRLHRGARRRIE
RRKKRIKLLQELFSQEIAKTDEGFFQRMKESPFYAEDKTILQENTLFNDKDFADKTYHKAYPTI
NHLIKAWIENKVKPDPRLLYLACHNIIKKRGHFLFEGDFDSENQFDTSIQALFEYLREDMEVDI
DADSQKVKEILKDSSLKNSEKQSRLNKILGLKPSDKQKKAITNLISGNKINFADLYDNPDLKDA
EKNSISFSKDDFDALSDDLASILGDSFELLLKAKAVYNCSVLSKVIGDEQYLSFAKVKIYEKHK
TDLTKLKNVIKKHFPKDYKKVFGYNKNEKNNNNYSGYVGVCKTKSKKLIINNSVNQEDFYKFLK
TILSAKSEIKEVNDILTEIETGTFLPKQISKSNAEIPYQLRKMELEKILSNAEKHFSFLKQKDE
KGLSHSEKIIMLLTFKIPYYIGPINDNHKKFFPDRCWVVKKEKSPSGKTTPWNFFDHIDKEKTA
EAFITSRTNFCTYLVGESVLPKSSLLYSEYTVLNEINNLQIIIDGKNICDIKLKQKIYEDLFKK
YKKITQKQISTFIKHEGICNKTDEVIILGIDKECTSSLKSYIELKNIFGKQVDEISTKNMLEEI
IRWATIYDEGEGKTILKTKIKAEYGKYCSDEQIKKILNLKFSGWGRLSRKFLETVTSEMPGFSE
PVNIITAMRETQNNLMELLSSEFTFTENIKKINSGFEDAEKQFSYDGLVKPLFLSPSVKKMLWQ
TLKLVKEISHITQAPPKKIFIEMAKGAELEPARTKTRLKILQDLYNNCKNDADAFSSEIKDLSG
KIENEDNLRLRSDKLYLYYTQLGKCMYCGKPIEIGHVFDTSNYDIDHIYPQSKIKDDSISNRVL
VCSSCNKNKEDKYPLKSEIQSKQRGFWNFLQRNNFISLEKLNRLTRATPISDDETAKFIARQLV
ETRQATKVAAKVLEKMFPETKIVYSKAETVSMFRNKFDIVKCREINDFHHAHDAYLNIVVGNVY
NTKFTNNPWNFIKEKRDNPKIADTYNYYKVFDYDVKRNNITAWEKGKTIITVKDMLKRNTPIYT
RQAACKKGELFNQTIMKKGLGQHPLKKEGPFSNISKYGGYNKVSAAYYTLIEYEEKGNKIRSLE
TIPLYLVKDIQKDQDVLKSYLTDLLGKKEFKILVPKIKINSLLKINGFPCHITGKTNDSFLLRP
AVQFCCSNNEVLYFKKIIRFSEIRSQREKIGKTISPYEDLSFRSYIKENLWKKTKNDEIGEKEF
YDLLQKKNLEIYDMLLTKHKDTIYKKRPNSATIDILVKGKEKFKSLIIENQFEVILEILKLFSA
TRNVSDLQHIGGSKYSGVAKIGNKISSLDNCILIYQSITGIFEKRIDLLKV
SEQ ID NO: 329
MEGQMKNNGNNLQQGNYYLGLDVGTSSVGWAVTDTDYNVLKFRGKSMWGARLFDEASTAEERRT
HRGNRRRLARRKYRLLLLEQLFEKEIRKIDDNFFVRLHESNLWADDKSKPSKFLLFNDTNFTDK
DYLKKYPTIYHLRSDLIHNSTEHDIRLVFLALHHLIKYRGHFIYDNSANGDVKTLDEAVSDFEE
YLNENDIEFNIENKKEFINVLSDKHLTKKEKKISLKKLYGDITDSENINISVLIEMLSGSSISL
SNLFKDIEFDGKQNLSLDSDIEETLNDVVDILGDNIDLLIHAKEVYDIAVLTSSLGKHKYLCDA
KVELFEKNKKDLMILKKYIKKNHPEDYKKIFSSPTEKKNYAAYSQTNSKNVCSQEEFCLFIKPY
IRDMVKSENEDEVRIAKEVEDKSFLTKLKGTNNSVVPYQIHERELNQILKNIVAYLPFMNDEQE
DISVVDKIKLIFKFKIPYYVGPLNTKSTRSWVYRSDEKIYPWNFSNVIDLDKTAHEFMNRLIGR
CTYTNDPVLPMDSLLYSKYNVLNEINPIKVNGKAIPVEVKQAIYTDLFENSKKKVTRKSIYIYL
LKNGYIEKEDIVSGIDIEIKSKLKSHHDFTQIVQENKCTPEEIERIIKGILVYSDDKSMLRRWL
KNNIKGLSENDVKYLAKLNYKEWGRLSKTLLTDIYTINPEDGEACSILDIMWNTNATLMEILSN
EKYQFKQNIENYKAENYDEKQNLHEELDDMYISPAARRSIWQALRIVDEIVDIKKSAPKKIFIE
MAREKKSAMKKKRTESRKDTLLELYKSCKSQADGFYDEELFEKLSNESNSRLRRDQLYLYYTQM
GRSMYTGKRIDFDKLINDKNTYDIDHIYPRSKIKDDSITNRVLVEKDINGEKTDIYPISEDIRQ
KMQPFWKILKEKGLINEEKYKRLTRNYELTDEELSSFVARQLVETQQSTKALATLLKKEYPSAK
IVYSKAGNVSEFRNRKDKELPKFREINDLHHAKDAYLNIVVGNVYDTKFTEKFFNNIRNENYSL
KRVFDFSVPGAWDAKGSTFNTIKKYMAKNNPIIAFAPYEVKGELFDQQIVPKGKGQFPIKQGKD
IEKYGGYNKLSSAFLFAVEYKGKKARERSLETVYIKDVELYLQDPIKYCESVLGLKEPQIIKPK
ILMGSLFSINNKKLVVTGRSGKQYVCHHIYQLSINDEDSQYLKNIAKYLQEEPDGNIERQNILN
ITSVNNIKLFDVLCTKFNSNTYEIILNSLKNDVNEGREKFSELDILEQCNILLQLLKAFKCNRE
SSNLEKLNNKKQAGVIVIPHLFTKCSVFKVIHQSITGLFEKEMDLLK
SEQ ID NO: 330
MGRKPYILSLDIGTGSVGYACMDKGFNVLKYHDKDALGVYLFDGALTAQERRQFRTSRRRKNRR
IKRLGLLQELLAPLVQNPNFYQFQRQFAWKNDNMDFKNKSLSEVLSFLGYESKKYPTIYHLQEA
LLLKDEKFDPELIYMALYHLVKYRGHFLFDHLKIENLTNNDNMHDFVELIETYENLNNIKLNLD
YEKTKVIYEILKDNEMTKNDRAKRVKNMEKKLEQFSIMLLGLKFNEGKLFNHADNAEELKGANQ
SHTFADNYEENLTPFLTVEQSEFIERANKIYLSLTLQDILKGKKSMAMSKVAAYDKFRNELKQV
KDIVYKADSTRTQFKKIFVSSKKSLKQYDATPNDQTFSSLCLFDQYLIRPKKQYSLLIKELKKI
IPQDSELYFEAENDTLLKVLNTTDNASIPMQINLYEAETILRNQQKYHAEITDEMIEKVLSLIQ
FRIPYYVGPLVNDHTASKFGWMERKSNESIKPWNFDEVVDRSKSATQFIRRMTNKCSYLINEDV
LPKNSLLYQEMEVLNELNATQIRLQTDPKNRKYRMMPQIKLFAVEHIFKKYKTVSHSKFLEIML
NSNHRENFMNHGEKLSIFGTQDDKKFASKLSSYQDMTKIFGDIEGKRAQIEEIIQWITIFEDKK
ILVQKLKECYPELTSKQINQLKKLNYSGWGRLSEKLLTHAYQGHSIIELLRHSDENFMEILTND
VYGFQNFIKEENQVQSNKIQHQDIANLTTSPALKKGIWSTIKLVRELTSIFGEPEKIIMEFATE
DQQKGKKQKSRKQLWDDNIKKNKLKSVDEYKYIIDVANKLNNEQLQQEKLWLYLSQNGKCMYSG
QSIDLDALLSPNATKHYEVDHIFPRSFIKDDSIDNKVLVIKKMNQTKGDQVPLQFIQQPYERIA
YWKSLNKAGLISDSKLHKLMKPEFTAMDKEGFIQRQLVETRQISVHVRDFLKEEYPNTKVIPMK
AKMVSEFRKKFDIPKIRQMNDAHHAIDAYLNGVVYHGAQLAYPNVDLFDFNFKWEKVREKWKAL
GEFNTKQKSRELFFFKKLEKMEVSQGERLISKIKLDMNHFKINYSRKLANIPQQFYNQTAVSPK
TAELKYESNKSNEVVYKGLTPYQTYVVAIKSVNKKGKEKMEYQMIDHYVFDFYKFQNGNEKELA
LYLAQRENKDEVLDAQIVYSLNKGDLLYINNHPCYFVSRKEVINAKQFELTVEQQLSLYNVMNN
KETNVEKLLIEYDFIAEKVINEYHHYLNSKLKEKRVRTFFSESNQTHEDFIKALDELFKVVTAS
ATRSDKIGSRKNSMTHRAFLGKGKDVKIAYTSISGLKTTKPKSLFKLAESRNEL
SEQ ID NO: 331
MAKILGLDLGTNSIGWAVVERENIDFSLIDKGVRIFSEGVKSEKGIESSRAAERTGYRSARKIK
YRRKLRKYETLKVLSLNRMCPLSIEEVEEWKKSGFKDYPLNPEFLKWLSTDEESNVNPYFFRDR
ASKHKVSLFELGRAFYHIAQRRGFLSNRLDQSAEGILEEHCPKIEAIVEDLISIDEISTNITDY
FFETGILDSNEKNGYAKDLDEGDKKLVSLYKSLLAILKKNESDFENCKSEIIERLNKKDVLGKV
KGKIKDISQAMLDGNYKTLGQYFYSLYSKEKIRNQYTSREEHYLSEFITICKVQGIDQINEEEK
INEKKFDGLAKDLYKAIFFQRPLKSQKGLIGKCSFEKSKSRCAISHPDFEEYRMWTYLNTIKIG
TQSDKKLRFLTQDEKLKLVPKFYRKNDFNFDVLAKELIEKGSSFGFYKSSKKNDFFYWFNYKPT
DTVAACQVAASLKNAIGEDWKTKSFKYQTINSNKEQVSRTVDYKDLWHLLTVATSDVYLYEFAI
DKLGLDEKNAKAFSKTKLKKDFASLSLSAINKILPYLKEGLLYSHAVFVANIENIVDENIWKDE
KQRDYIKTQISEIIENYTLEKSRFEIINGLLKEYKSENEDGKRVYYSKEAEQSFENDLKKKLVL
FYKSNEIENKEQQETIFNELLPIFIQQLKDYEFIKIQRLDQKVLIFLKGKNETGQIFCTEEKGT
AEEKEKKIKNRLKKLYHPSDIEKFKKKIIKDEFGNEKIVLGSPLTPSIKNPMAMRALHQLRKVL
NALILEGQIDEKTIIHIEMARELNDANKRKGIQDYQNDNKKFREDAIKEIKKLYFEDCKKEVEP
TEDDILRYQLWMEQNRSEIYEEGKNISICDIIGSNPAYDIEHTIPRSRSQDNSQMNKTLCSQRF
NREVKKQSMPIELNNHLEILPRIAHWKEEADNLTREIEIISRSIKAAATKEIKDKKIRRRHYLT
LKRDYLQGKYDRFIWEEPKVGFKNSQIPDTGIITKYAQAYLKSYFKKVESVKGGMVAEFRKIWG
IQESFIDENGMKHYKVKDRSKHTHHTIDAITIACMTKEKYDVLAHAWTLEDQQNKKEARSIIEA
SKPWKTFKEDLLKIEEEILVSHYTPDNVKKQAKKIVRVRGKKQFVAEVERDVNGKAVPKKAASG
KTIYKLDGEGKKLPRLQQGDTIRGSLHQDSIYGAIKNPLNTDEIKYVIRKDLESIKGSDVESIV
DEVVKEKIKEAIANKVLLLSSNAQQKNKLVGTVWMNEEKRIAINKVRIYANSVKNPLHIKEHSL
LSKSKHVHKQKVYGQNDENYAMAIYELDGKRDFELINIFNLAKLIKQGQGFYPLHKKKEIKGKI
VFVPIEKRNKRDVVLKRGQQVVFYDKEVENPKDISEIVDFKGRIYIIEGLSIQRIVRPSGKVDE
YGVIMLRYFKEARKADDIKQDNFKPDGVFKLGENKPTRKMNHQFTAFVEGIDFKVLPSGKFEKI
SEQ ID NO: 332
MEFKKVLGLDIGTNSIGCALLSLPKSIQDYGKGGRLEWLTSRVIPLDADYMKAFIDGKNGLPQV
ITPAGKRRQKRGSRRLKHRYKLRRSRLIRVFKTLNWLPEDFPLDNPKRIKETISTEGKFSFRIS
DYVPISDESYREFYREFGYPENEIEQVIEEINFRRKTKGKNKNPMIKLLPEDWVVYYLRKKALI
KPTTKEELIRIIYLFNQRRGFKSSRKDLTETAILDYDEFAKRLAEKEKYSAENYETKFVSITKV
KEVVELKTDGRKGKKRFKVILEDSRIEPYEIERKEKPDWEGKEYTFLVTQKLEKGKFKQNKPDL
PKEEDWALCTTALDNRMGSKHPGEFFFDELLKAFKEKRGYKIRQYPVNRWRYKKELEFIWTKQC
QLNPELNNLNINKEILRKLATVLYPSQSKFFGPKIKEFENSDVLHIISEDIIYYQRDLKSQKSL
ISECRYEKRKGIDGEIYGLKCIPKSSPLYQEFRIWQDIHNIKVIRKESEVNGKKKINIDETQLY
INENIKEKLFELFNSKDSLSEKDILELISLNIINSGIKISKKEEETTHRINLFANRKELKGNET
KSRYRKVFKKLGFDGEYILNHPSKLNRLWHSDYSNDYADKEKTEKSILSSLGWKNRNGKWEKSK
NYDVFNLPLEVAKAIANLPPLKKEYGSYSALAIRKMLVVMRDGKYWQHPDQIAKDQENTSLMLF
DKNLIQLTNNQRKVLNKYLLTLAEVQKRSTLIKQKLNEIEHNPYKLELVSDQDLEKQVLKSFLE
KKNESDYLKGLKTYQAGYLIYGKHSEKDVPIVNSPDELGEYIRKKLPNNSLRNPIVEQVIRETI
FIVRDVWKSFGIIDEIHIELGRELKNNSEERKKTSESQEKNFQEKERARKLLKELLNSSNFEHY
DENGNKIFSSFTVNPNPDSPLDIEKFRIWKNQSGLTDEELNKKLKDEKIPTEIEVKKYILWLTQ
KCRSPYTGKIIPLSKLFDSNVYEIEHIIPRSKMKNDSTNNLVICELGVNKAKGDRLAANFISES
NGKCKFGEVEYTLLKYGDYLQYCKDTFKYQKAKYKNLLATEPPEDFIERQINDTRYIGRKLAEL
LTPVVKDSKNIIFTIGSITSELKITWGLNGVWKDILRPRFKRLESIINKKLIFQDEDDPNKYHF
DLSINPQLDKEGLKRLDHRHHALDATIIAATTREHVRYLNSLNAADNDEEKREYFLSLCNHKIR
DFKLPWENFTSEVKSKLLSCVVSYKESKPILSDPFNKYLKWEYKNGKWQKVFAIQIKNDRWKAV
RRSMFKEPIGTVWIKKIKEVSLKEAIKIQAIWEEVKNDPVRKKKEKYIYDDYAQKVIAKIVQEL
GLSSSMRKQDDEKLNKFINEAKVSAGVNKNLNTTNKTIYNLEGRFYEKIKVAEYVLYKAKRMPL
NKKEYIEKLSLQKMFNDLPNFILEKSILDNYPEILKELESDNKYIIEPHKKNNPVNRLLLEHIL
EYHNNPKEAFSTEGLEKLNKKAINKIGKPIKYITRLDGDINEEEIFRGAVFETDKGSNVYFVMY
ENNQTKDREFLKPNPSISVLKAIEHKNKIDFFAPNRLGFSRIILSPGDLVYVPTNDQYVLIKDN
SSNETIINWDDNEFISNRIYQVKKFTGNSCYFLKNDIASLILSYSASNGVGEFGSQNISEYSVD
DPPIRIKDVCIKIRVDRLGNVRPL
SEQ ID NO: 333
MKHILGLDLGTNSIGWALIERNIEEKYGKIIGMGSRIVPMGAELSKFEQGQAQTKNADRRTNRG
ARRLNKRYKQRRNKLIYILQKLDMLPSQIKLKEDFSDPNKIDKITILPISKKQEQLTAFDLVSL
RVKALTEKVGLEDLGKIIYKYNQLRGYAGGSLEPEKEDIFDEEQSKDKKNKSFIAFSKIVFLGE
PQEEIFKNKKLNRRAIIVETEEGNFEGSTFLENIKVGDSLELLINISASKSGDTITIKLPNKTN
WRKKMENIENQLKEKSKEMGREFYISEFLLELLKENRWAKIRNNTILRARYESEFEAIWNEQVK
HYPFLENLDKKTLIEIVSFIFPGEKESQKKYRELGLEKGLKYIIKNQVVFYQRELKDQSHLISD
CRYEPNEKAIAKSHPVFQEYKVWEQINKLIVNTKIEAGTNRKGEKKYKYIDRPIPTALKEWIFE
ELQNKKEITFSAIFKKLKAEFDLREGIDFLNGMSPKDKLKGNETKLQLQKSLGELWDVLGLDSI
NRQIELWNILYNEKGNEYDLTSDRTSKVLEFINKYGNNIVDDNAEETAIRISKIKFARAYSSLS
LKAVERILPLVRAGKYFNNDFSQQLQSKILKLLNENVEDPFAKAAQTYLDNNQSVLSEGGVGNS
IATILVYDKHTAKEYSHDELYKSYKEINLLKQGDLRNPLVEQIINEALVLIRDIWKNYGIKPNE
IRVELARDLKNSAKERATIHKRNKDNQTINNKIKETLVKNKKELSLANIEKVKLWEAQRHLSPY
TGQPIPLSDLFDKEKYDVDHIIPISRYFDDSFTNKVISEKSVNQEKANRTAMEYFEVGSLKYSI
FTKEQFIAHVNEYFSGVKRKNLLATSIPEDPVQRQIKDTQYIAIRVKEELNKIVGNENVKTTTG
SITDYLRNHWGLTDKFKLLLKERYEALLESEKFLEAEYDNYKKDFDSRKKEYEEKEVLFEEQEL
TREEFIKEYKENYIRYKKNKLIIKGWSKRIDHRHHAIDALIVACTEPAHIKRLNDLNKVLQDWL
VEHKSEFMPNFEGSNSELLEEILSLPENERTEIFTQIEKFRAIEMPWKGFPEQVEQKLKEIIIS
HKPKDKLLLQYNKAGDRQIKLRGQLHEGTLYGISQGKEAYRIPLTKFGGSKFATEKNIQKIVSP
FLSGFIANHLKEYNNKKEEAFSAEGIMDLNNKLAQYRNEKGELKPHTPISTVKIYYKDPSKNKK
KKDEEDLSLQKLDREKAFNEKLYVKTGDNYLFAVLEGEIKTKKTSQIKRLYDIISFFDATNFLK
EEFRNAPDKKTFDKDLLFRQYFEERNKAKLLFTLKQGDFVYLPNENEEVILDKESPLYNQYWGD
LKERGKNIYVVQKFSKKQIYFIKHTIADIIKKDVEFGSQNCYETVEGRSIKENCFKLEIDRLGN
IVKVIKR
SEQ ID NO: 334
MHVEIDFPHFSRGDSHLAMNKNEILRGSSVLYRLGLDLGSNSLGWFVTHLEKRGDRHEPVALGP
GGVRIFPDGRDPQSGTSNAVDRRMARGARKRRDRFVERRKELIAALIKYNLLPDDARERRALEV
LDPYALRKTALTDTLPAHHVGRALFHLNQRRGFQSNRKTDSKQSEDGAIKQAASRLATDKGNET
LGVFFADMHLRKSYEDRQTAIRAELVRLGKDHLTGNARKKIWAKVRKRLFGDEVLPRADAPHGV
RARATITGTKASYDYYPTRDMLRDEFNAIWAGQSAHHATITDEARTEIEHIIFYQRPLKPAIVG
KCTLDPATRPFKEDPEGYRAPWSHPLAQRFRILSEARNLEIRDTGKGSRRLTKEQSDLVVAALL
ANREVKFDKLRTLLKLPAEARFNLESDRRAALDGDQTAARLSDKKGFNKAWRGFPPERQIAIVA
RLEETEDENELIAWLEKECALDGAAAARVANTTLPDGHCRLGLRAIKKIVPIMQDGLDEDGVAG
AGYHIAAKRAGYDHAKLPTGEQLGRLPYYGQWLQDAVVGSGDARDQKEKQYGQFPNPTVHIGLG
QLRRVVNDLIDKYGPPTEISIEFTRALKLSEQQKAERQREQRRNQDKNKARAEELAKFGRPANP
RNLLKMRLWEELAHDPLDRKCVYTGEQISIERLLSDEVDIDHILPVAMTLDDSPANKIICMRYA
NRHKRKQTPSEAFGSSPTLQGHRYNWDDIAARATGLPRNKRWRFDANAREEFDKRGGFLARQLN
ETGWLARLAKQYLGAVTDPNQIWVVPGRLTSMLRGKWGLNGLLPSDNYAGVQDKAEEFLASTDD
MEFSGVKNRADHRHHAIDGLVTALTDRSLLWKMANAYDEEHEKFVIEPPWPTMRDDLKAALEKM
VVSHKPDHGIEGKLHEDSAYGFVKPLDATGLKEEEAGNLVYRKAIESLNENEVDRIRDIQLRTI
VRDHVNVEKTKGVALADALRQLQAPSDDYPQFKHGLRHVRILKKEKGDYLVPIANRASGVAYKA
YSAGENFCVEVFETAGGKWDGEAVRRFDANKKNAGPKIAHAPQWRDANEGAKLVMRIHKGDLIR
LDHEGRARIMVVHRLDAAAGRFKLADHNETGNLDKRHATNNDIDPFRWLMASYNTLKKLAAVPV
RVDELGRVWRVMPN
SEQ ID NO: 335
METTLGIDLGTNSIGLALVDQEEHQILYSGVRIFPEGINKDTIGLGEKEESRNATRRAKRQMRR
QYFRKKLRKAKLLELLIAYDMCPLKPEDVRRWKNWDKQQKSTVRQFPDTPAFREWLKQNPYELR
KQAVTEDVTRPELGRILYQMIQRRGFLSSRKGKEEGKIFTGKDRMVGIDETRKNLQKQTLGAYL
YDIAPKNGEKYRFRTERVRARYTLRDMYIREFEIIWQRQAGHLGLAHEQATRKKNIFLEGSATN
VRNSKLITHLQAKYGRGHVLIEDTRITVTFQLPLKEVLGGKIEIEEEQLKFKSNESVLFWQRPL
RSQKSLLSKCVFEGRNFYDPVHQKWIIAGPTPAPLSHPEFEEFRAYQFINNIIYGKNEHLTAIQ
REAVFELMCTESKDFNFEKIPKHLKLFEKFNFDDTTKVPACTTISQLRKLFPHPVWEEKREEIW
HCFYFYDDNTLLFEKLQKDYALQTNDLEKIKKIRLSESYGNVSLKAIRRINPYLKKGYAYSTAV
LLGGIRNSFGKRFEYFKEYEPEIEKAVCRILKEKNAEGEVIRKIKDYLVHNRFGFAKNDRAFQK
LYHHSQAITTQAQKERLPETGNLRNPIVQQGLNELRRTVNKLLATCREKYGPSFKFDHIHVEMG
RELRSSKTEREKQSRQIRENEKKNEAAKVKLAEYGLKAYRDNIQKYLLYKEIEEKGGTVCCPYT
GKTLNISHTLGSDNSVQIEHIIPYSISLDDSLANKTLCDATFNREKGELTPYDFYQKDPSPEKW
GASSWEEIEDRAFRLLPYAKAQRFIRRKPQESNEFISRQLNDTRYISKKAVEYLSAICSDVKAF
PGQLTAELRHLWGLNNILQSAPDITFPLPVSATENHREYYVITNEQNEVIRLFPKQGETPRTEK
GELLLTGEVERKVFRCKGMQEFQTDVSDGKYWRRIKLSSSVTWSPLFAPKPISADGQIVLKGRI
EKGVFVCNQLKQKLKTGLPDGSYWISLPVISQTFKEGESVNNSKLTSQQVQLFGRVREGIFRCH
NYQCPASGADGNFWCTLDTDTAQPAFTPIKNAPPGVGGGQIILTGDVDDKGIFHADDDLHYELP
ASLPKGKYYGIFTVESCDPTLIPIELSAPKTSKGENLIEGNIWVDEHTGEVRFDPKKNREDQRH
HAIDAIVIALSSQSLFQRLSTYNARRENKKRGLDSTEHFPSPWPGFAQDVRQSVVPLLVSYKQN
PKTLCKISKTLYKDGKKIHSCGNAVRGQLHKETVYGQRTAPGATEKSYHIRKDIRELKTSKHIG
KVVDITIRQMLLKHLQENYHIDITQEFNIPSNAFFKEGVYRIFLPNKHGEPVPIKKIRMKEELG
NAERLKDNINQYVNPRNNHHVMIYQDADGNLKEEIVSFWSVIERQNQGQPIYQLPREGRNIVSI
LQINDTFLIGLKEEEPEVYRNDLSTLSKHLYRVQKLSGMYYTFRHHLASTLNNEREEFRIQSLE
AWKRANPVKVQIDEIGRITFLNGPLC
SEQ ID NO: 336
MESSQILSPIGIDLGGKFTGVCLSHLEAFAELPNHANTKYSVILIDHNNFQLSQAQRRATRHRV
RNKKRNQFVKRVALQLFQHILSRDLNAKEETALCHYLNNRGYTYVDTDLDEYIKDETTINLLKE
LLPSESEHNFIDWFLQKMQSSEFRKILVSKVEEKKDDKELKNAVKNIKNFITGFEKNSVEGHRH
RKVYFENIKSDITKDNQLDSIKKKIPSVCLSNLLGHLSNLQWKNLHRYLAKNPKQFDEQTFGNE
FLRMLKNFRHLKGSQESLAVRNLIQQLEQSQDYISILEKTPPEITIPPYEARTNTGMEKDQSLL
LNPEKLNNLYPNWRNLIPGIIDAHPFLEKDLEHTKLRDRKRIISPSKQDEKRDSYILQRYLDLN
KKIDKFKIKKQLSFLGQGKQLPANLIETQKEMETHFNSSLVSVLIQIASAYNKEREDAAQGIWF
DNAFSLCELSNINPPRKQKILPLLVGAILSEDFINNKDKWAKFKIFWNTHKIGRTSLKSKCKEI
EEARKNSGNAFKIDYEEALNHPEHSNNKALIKIIQTIPDIIQAIQSHLGHNDSQALIYHNPFSL
SQLYTILETKRDGFHKNCVAVTCENYWRSQKTEIDPEISYASRLPADSVRPFDGVLARMMQRLA
YEIAMAKWEQIKHIPDNSSLLIPIYLEQNRFEFEESFKKIKGSSSDKTLEQAIEKQNIQWEEKF
QRIINASMNICPYKGASIGGQGEIDHIYPRSLSKKHFGVIFNSEVNLIYCSSQGNREKKEEHYL
LEHLSPLYLKHQFGTDNVSDIKNFISQNVANIKKYISFHLLTPEQQKAARHALFLDYDDEAFKT
ITKFLMSQQKARVNGTQKFLGKQIMEFLSTLADSKQLQLEFSIKQITAEEVHDHRELLSKQEPK
LVKSRQQSFPSHAIDATLTMSIGLKEFPQFSQELDNSWFINHLMPDEVHLNPVRSKEKYNKPNI
SSTPLFKDSLYAERFIPVWVKGETFAIGFSEKDLFEIKPSNKEKLFTLLKTYSTKNPGESLQEL
QAKSKAKWLYFPINKTLALEFLHHYFHKEIVTPDDTTVCHFINSLRYYTKKESITVKILKEPMP
VLSVKFESSKKNVLGSFKHTIALPATKDWERLFNHPNFLALKANPAPNPKEFNEFIRKYFLSDN
NPNSDIPNNGHNIKPQKHKAVRKVFSLPVIPGNAGTMMRIRRKDNKGQPLYQLQTIDDTPSMGI
QINEDRLVKQEVLMDAYKTRNLSTIDGINNSEGQAYATFDNWLTLPVSTFKPEIIKLEMKPHSK
TRRYIRITQSLADFIKTIDEALMIKPSDSIDDPLNMPNEIVCKNKLFGNELKPRDGKMKIVSTG
KIVTYEFESDSTPQWIQTLYVTQLKKQP
SEQ ID NO: 337
MKKIVGLDLGTNSIGWALINAYINKEHLYGIEACGSRIIPMDAAILGNFDKGNSISQTADRTSY
RGIRRLRERHLLRRERLHRILDLLGFLPKHYSDSLNRYGKFLNDIECKLPWVKDETGSYKFIFQ
ESFKEMLANFTEHHPILIANNKKVPYDWTIYYLRKKALTQKISKEELAWILLNFNQKRGYYQLR
GEEEETPNKLVEYYSLKVEKVEDSGERKGKDTWYNVHLENGMIYRRTSNIPLDWEGKTKEFIVT
TDLEADGSPKKDKEGNIKRSFRAPKDDDWTLIKKKTEADIDKIKMTVGAYIYDTLLQKPDQKIR
GKLVRTIERKYYKNELYQILKTQSEFHEELRDKQLYIACLNELYPNNEPRRNSISTRDFCHLFI
EDIIFYQRPLKSKKSLIDNCPYEENRYIDKESGEIKHASIKCIAKSHPLYQEFRLWQFIVNLRI
YRKETDVDVTQELLPTEADYVTLFEWLNEKKEIDQKAFFKYPPFGFKKTTSNYRWNYVEDKPYP
CNETHAQIIARLGKAHIPKAFLSKEKEETLWHILYSIEDKQEIEKALHSFANKNNLSEEFIEQF
KNFPPFKKEYGSYSAKAIKKLLPLMRMGKYWSIENIDNGTRIRINKIIDGEYDENIRERVRQKA
INLTDITHFRALPLWLACYLVYDRHSEVKDIVKWKTPKDIDLYLKSFKQHSLRNPIVEQVITET
LRTVRDIWQQVGHIDEIHIELGREMKNPADKRARMSQQMIKNENTNLRIKALLTEFLNPEFGIE
NVRPYSPSQQDLLRIYEEGVLNSILELPEDIGIILGKFNQTDTLKRPTRSEILRYKLWLEQKYR
SPYTGEMIPLSKLFTPAYEIEHIIPQSRYFDDSLSNKVICESEINKLKDRSLGYEFIKNHHGEK
VELAFDKPVEVLSVEAYEKLVHESYSHNRSKMKKLLMEDIPDQFIERQLNDSRYISKVVKSLLS
NIVREENEQEAISKNVIPCTGGITDRLKKDWGINDVWNKIVLPRFIRLNELTESTRFTSINTNN
TMIPSMPLELQKGFNKKRIDHRHHAMDAIIIACANRNIVNYLNNVSASKNTKITRRDLQTLLCH
KDKTDNNGNYKWVIDKPWETFTQDTLTALQKITVSFKQNLRVINKTTNHYQHYENGKKIVSNQS
KGDSWAIRKSMHKETVHGEVNLRMIKTVSFNEALKKPQAIVEMDLKKKILAMLELGYDTKRIKN
YFEENKDTWQDINPSKIKVYYFTKETKDRYFAVRKPIDTSFDKKKIKESITDTGIQQIMLRHLE
TKDNDPTLAFSPDGIDEMNRNILILNKGKKHQPIYKVRVYEKAEKFTVGQKGNKRTKFVEAAKG
TNLFFAIYETEEIDKDTKKVIRKRSYSTIPLNVVIERQKQGLSSAPEDENGNLPKYILSPNDLV
YVPTQEEINKGEVVMPIDRDRIYKMVDSSGITANFIPASTANLIFALPKATAEIYCNGENCIQN
EYGIGSPQSKNQKAITGEMVKEICFPIKVDRLGNIIQVGSCILTN
SEQ ID NO: 338
MSRSLTFSFDIGYASIGWAVIASASHDDADPSVCGCGTVLFPKDDCQAFKRREYRRLRRNIRSR
RVRIERIGRLLVQAQIITPEMKETSGHPAPFYLASEALKGHRTLAPIELWHVLRWYAHNRGYDN
NASWSNSLSEDGGNGEDTERVKHAQDLMDKHGTATMAETICRELKLEEGKADAPMEVSTPAYKN
LNTAFPRLIVEKEVRRILELSAPLIPGLTAEIIELIAQHHPLTTEQRGVLLQHGIKLARRYRGS
LLFGQLIPRFDNRIISRCPVTWAQVYEAELKKGNSEQSARERAEKLSKVPTANCPEFYEYRMAR
ILCNIRADGEPLSAEIRRELMNQARQEGKLTKASLEKAISSRLGKETETNVSNYFTLHPDSEEA
LYLNPAVEVLQRSGIGQILSPSVYRIAANRLRRGKSVTPNYLLNLLKSRGESGEALEKKIEKES
KKKEADYADTPLKPKYATGRAPYARTVLKKVVEEILDGEDPTRPARGEAHPDGELKAHDGCLYC
LLDTDSSVNQHQKERRLDTMTNNHLVRHRMLILDRLLKDLIQDFADGQKDRISRVCVEVGKELT
TFSAMDSKKIQRELTLRQKSHTDAVNRLKRKLPGKALSANLIRKCRIAMDMNWTCPFTGATYGD
HELENLELEHIVPHSFRQSNALSSLVLTWPGVNRMKGQRTGYDFVEQEQENPVPDKPNLHICSL
NNYRELVEKLDDKKGHEDDRRRKKKRKALLMVRGLSHKHQSQNHEAMKEIGMTEGMMTQSSHLM
KLACKSIKTSLPDAHIDMIPGAVTAEVRKAWDVFGVFKELCPEAADPDSGKILKENLRSLTHLH
HALDACVLGLIPYIIPAHHNGLLRRVLAMRRIPEKLIPQVRPVANQRHYVLNDDGRMMLRDLSA
SLKENIREQLMEQRVIQHVPADMGGALLKETMQRVLSVDGSGEDAMVSLSKKKDGKKEKNQVKA
SKLVGVFPEGPSKLKALKAAIEIDGNYGVALDPKPVVIRHIKVFKRIMALKEQNGGKPVRILKK
GMLIHLTSSKDPKHAGVWRIESIQDSKGGVKLDLQRAHCAVPKNKTHECNWREVDLISLLKKYQ
MKRYPTSYTGTPR
SEQ ID NO: 339
MTQKVLGLDLGTNSIGSAVRNLDLSDDLQWQLEFFSSDIFRSSVNKESNGREYSLAAQRSAHRR
SRGLNEVRRRRLWATLNLLIKHGFCPMSSESLMRWCTYDKRKGLFREYPIDDKDFNAWILLDFN
GDGRPDYSSPYQLRRELVTRQFDFEQPIERYKLGRALYHIAQHRGFKSSKGETLSQQETNSKPS
STDEIPDVAGAMKASEEKLSKGLSTYMKEHNLLTVGAAFAQLEDEGVRVRNNNDYRAIRSQFQH
EIETIFKFQQGLSVESELYERLISEKKNVGTIFYKRPLRSQRGNVGKCTLERSKPRCAIGHPLF
EKFRAWTLINNIKVRMSVDTLDEQLPMKLRLDLYNECFLAFVRTEFKFEDIRKYLEKRLGIHFS
YNDKTINYKDSTSVAGCPITARFRKMLGEEWESFRVEGQKERQAHSKNNISFHRVSYSIEDIWH
FCYDAEEPEAVLAFAQETLRLERKKAEELVRIWSAMPQGYAMLSQKAIRNINKILMLGLKYSDA
VILAKVPELVDVSDEELLSIAKDYYLVEAQVNYDKRINSIVNGLIAKYKSVSEEYRFADHNYEY
LLDESDEKDIIRQIENSLGARRWSLMDANEQTDILQKVRDRYQDFFRSHERKFVESPKLGESFE
NYLTKKFPMVEREQWKKLYHPSQITIYRPVSVGKDRSVLRLGNPDIGAIKNPTVLRVLNTLRRR
VNQLLDDGVISPDETRVVVETARELNDANRKWALDTYNRIRHDENEKIKKILEEFYPKRDGIST
DDIDKARYVIDQREVDYFTGSKTYNKDIKKYKFWLEQGGQCMYTGRTINLSNLFDPNAFDIEHT
IPESLSFDSSDMNLTLCDAHYNRFIKKNHIPTDMPNYDKAITIDGKEYPAITSQLQRWVERVER
LNRNVEYWKGQARRAQNKDRKDQCMREMHLWKMELEYWKKKLERFTVTEVTDGFKNSQLVDTRV
ITRHAVLYLKSIFPHVDVQRGDVTAKFRKILGIQSVDEKKDRSLHSHHAIDATTLTIIPVSAKR
DRMLELFAKIEEINKMLSFSGSEDRTGLIQELEGLKNKLQMEVKVCRIGHNVSEIGTFINDNII
VNHHIKNQALTPVRRRLRKKGYIVGGVDNPRWQTGDALRGEIHKASYYGAITQFAKDDEGKVLM
KEGRPQVNPTIKFVIRRELKYKKSAADSGFASWDDLGKAIVDKELFALMKGQFPAETSFKDACE
QGIYMIKKGKNGMPDIKLHHIRHVRCEAPQSGLKIKEQTYKSEKEYKRYFYAAVGDLYAMCCYT
NGKIREFRIYSLYDVSCHRKSDIEDIPEFITDKKGNRLMLDYKLRTGDMILLYKDNPAELYDLD
NVNLSRRLYKINRFESQSNLVLMTHHLSTSKERGRSLGKTVDYQNLPESIRSSVKSLNFLIMGE
NRDFVIKNGKIIFNHR
SEQ ID NO: 340
MLVSPISVDLGGKNTGFFSFTDSLDNSQSGTVIYDESFVLSQVGRRSKRHSKRNNLRNKLVKRL
FLLILQEHHGLSIDVLPDEIRGLFNKRGYTYAGFELDEKKKDALESDTLKEFLSEKLQSIDRDS
DVEDFLNQIASNAESFKDYKKGFEAVFASATHSPNKKLELKDELKSEYGENAKELLAGLRVTKE
ILDEFDKQENQGNLPRAKYFEELGEYIATNEKVKSFFDSNSLKLTDMTKLIGNISNYQLKELRR
YFNDKEMEKGDIWIPNKLHKITERFVRSWHPKNDADRQRRAELMKDLKSKEIMELLTTTEPVMT
IPPYDDMNNRGAVKCQTLRLNEEYLDKHLPNWRDIAKRLNHGKFNDDLADSTVKGYSEDSTLLH
RLLDTSKEIDIYELRGKKPNELLVKTLGQSDANRLYGFAQNYYELIRQKVRAGIWVPVKNKDDS
LNLEDNSNMLKRCNHNPPHKKNQIHNLVAGILGVKLDEAKFAEFEKELWSAKVGNKKLSAYCKN
IEELRKTHGNTFKIDIEELRKKDPAELSKEEKAKLRLTDDVILNEWSQKIANFFDIDDKHRQRF
NNLFSMAQLHTVIDTPRSGFSSTCKRCTAENRFRSETAFYNDETGEFHKKATATCQRLPADTQR
PFSGKIERYIDKLGYELAKIKAKELEGMEAKEIKVPIILEQNAFEYEESLRKSKTGSNDRVINS
KKDRDGKKLAKAKENAEDRLKDKDKRIKAFSSGICPYCGDTIGDDGEIDHILPRSHTLKIYGTV
FNPEGNLIYVHQKCNQAKADSIYKLSDIKAGVSAQWIEEQVANIKGYKTFSVLSAEQQKAFRYA
LFLQNDNEAYKKVVDWLRTDQSARVNGTQKYLAKKIQEKLTKMLPNKHLSFEFILADATEVSEL
RRQYARQNPLLAKAEKQAPSSHAIDAVMAFVARYQKVFKDGTPPNADEVAKLAMLDSWNPASNE
PLTKGLSTNQKIEKMIKSGDYGQKNMREVFGKSIFGENAIGERYKPIVVQEGGYYIGYPATVKK
GYELKNCKVVTSKNDIAKLEKIIKNQDLISLKENQYIKIFSINKQTISELSNRYFNMNYKNLVE
RDKEIVGLLEFIVENCRYYTKKVDVKFAPKYIHETKYPFYDDWRRFDEAWRYLQENQNKTSSKD
RFVIDKSSLNEYYQPDKNEYKLDVDTQPIWDDFCRWYFLDRYKTANDKKSIRIKARKTFSLLAE
SGVQGKVFRAKRKIPTGYAYQALPMDNNVIAGDYANILLEANSKTLSLVPKSGISIEKQLDKKL
DVIKKTDVRGLAIDNNSFFNADFDTHGIRLIVENTSVKVGNFPISAIDKSAKRMIFRALFEKEK
GKRKKKTTISFKESGPVQDYLKVFLKKIVKIQLRTDGSISNIVVRKNAADFTLSFRSEHIQKLL
K
SEQ ID NO: 341
MAYRLGLDIGITSVGWAVVALEKDESGLKPVRIQDLGVRIFDKAEDSKTGASLALPRREARSAR
RRTRRRRHRLWRVKRLLEQHGILSMEQIEALYAQRTSSPDVYALRVAGLDRCLIAEEIARVLIH
IAHRRGFQSNRKSEIKDSDAGKLLKAVQENENLMQSKGYRTVAEMLVSEATKTDAEGKLVHGKK
HGYVSNVRNKAGEYRHTVSRQAIVDEVRKIFAAQRALGNDVMSEELEDSYLKILCSQRNFDDGP
GGDSPYGHGSVSPDGVRQSIYERMVGSCTFETGEKRAPRSSYSFERFQLLTKVVNLRIYRQQED
GGRYPCELTQTERARVIDCAYEQTKITYGKLRKLLDMKDTESFAGLTYGLNRSRNKTEDTVFVE
MKFYHEVRKALQRAGVFIQDLSIETLDQIGWILSVWKSDDNRRKKLSTLGLSDNVIEELLPLNG
SKFGHLSLKAIRKILPFLEDGYSYDVACELAGYQFQGKTEYVKQRLLPPLGEGEVTNPVVRRAL
SQAIKVVNAVIRKHGSPESIHIELARELSKNLDERRKIEKAQKENQKNNEQIKDEIREILGSAH
VTGRDIVKYKLFKQQQEFCMYSGEKLDVTRLFEPGYAEVDHIIPYGISFDDSYDNKVLVKTEQN
RQKGNRTPLEYLRDKPEQKAKFIALVESIPLSQKKKNHLLMDKRAIDLEQEGFRERNLSDTRYI
TRALMNHIQAWLLFDETASTRSKRVVCVNGAVTAYMRARWGLTKDRDAGDKHHAADAVVVACIG
DSLIQRVTKYDKFKRNALADRNRYVQQVSKSEGITQYVDKETGEVFTWESFDERKFLPNEPLEP
WPFFRDELLARLSDDPSKNIRAIGLLTYSETEQIDPIFVSRMPTRKVTGAAHKETIRSPRIVKV
DDNKGTEIQVVVSKVALTELKLTKDGEIKDYFRPEDDPRLYNTLRERLVQFGGDAKAAFKEPVY
KISKDGSVRTPVRKVKIQEKLTLGVPVHGGRGIAENGGMVRIDVFAKGGKYYFVPIYVADVLKR
ELPNRLATAHKPYSEWRVVDDSYQFKFSLYPNDAVMIKPSREVDITYKDRKEPVGCRIMYFVSA
NIASASISLRTHDNSGELEGLGIQGLEVFEKYVVGPLGDTHPVYKERRMPFRVERKMN
SEQ ID NO: 342
MPVLSPLSPNAAQGRRRWSLALDIGEGSIGWAVAEVDAEGRVLQLTGTGVTLFPSAWSNENGTY
VAHGAADRAVRGQQQRHDSRRRRLAGLARLCAPVLERSPEDLKDLTRTPPKADPRAIFFLRADA
ARRPLDGPELFRVLHHMAAHRGIRLAELQEVDPPPESDADDAAPAATEDEDGTRRAAADERAFR
RLMAEHMHRHGTQPTCGEIMAGRLRETPAGAQPVTRARDGLRVGGGVAVPTRALIEQEFDAIRA
IQAPRHPDLPWDSLRRLVLDQAPIAVPPATPCLFLEELRRRGETFQGRTITREAIDRGLTVDPL
IQALRIRETVGNLRLHERITEPDGRQRYVPRAMPELGLSHGELTAPERDTLVRALMHDPDGLAA
KDGRIPYTRLRKLIGYDNSPVCFAQERDTSGGGITVNPTDPLMARWIDGWVDLPLKARSLYVRD
VVARGADSAALARLLAEGAHGVPPVAAAAVPAATAAILESDIMQPGRYSVCPWAAEAILDAWAN
APTEGFYDVTRGLFGFAPGEIVLEDLRRARGALLAHLPRTMAAARTPNRAAQQRGPLPAYESVI
PSQLITSLRRAHKGRAADWSAADPEERNPFLRTWTGNAATDHILNQVRKTANEVITKYGNRRGW
DPLPSRITVELAREAKHGVIRRNEIAKENRENEGRRKKESAALDTFCQDNTVSWQAGGLPKERA
ALRLRLAQRQEFFCPYCAERPKLRATDLFSPAETEIDHVIERRMGGDGPDNLVLAHKDCNNAKG
KKTPHEHAGDLLDSPALAALWQGWRKENADRLKGKGHKARTPREDKDFMDRVGWRFEEDARAKA
EENQERRGRRMLHDTARATRLARLYLAAAVMPEDPAEIGAPPVETPPSPEDPTGYTAIYRTISR
VQPVNGSVTHMLRQRLLQRDKNRDYQTHHAEDACLLLLAGPAVVQAFNTEAAQHGADAPDDRPV
DLMPTSDAYHQQRRARALGRVPLATVDAALADIVMPESDRQDPETGRVHWRLTRAGRGLKRRID
DLTRNCVILSRPRRPSETGTPGALHNATHYGRREITVDGRTDTVVTQRMNARDLVALLDNAKIV
PAARLDAAAPGDTILKEICTEIADRHDRVVDPEGTHARRWISARLAALVPAHAEAVARDIAELA
DLDALADADRTPEQEARRSALRQSPYLGRAISAKKADGRARAREQEILTRALLDPHWGPRGLRH
LIMREARAPSLVRIRANKTDAFGRPVPDAAVWVKTDGNAVSQLWRLTSVVTDDGRRIPLPKPIE
KRIEISNLEYARLNGLDEGAGVTGNNAPPRPLRQDIDRLTPLWRDHGTAPGGYLGTAVGELEDK
ARSALRGKAMRQTLTDAGITAEAGWRLDSEGAVCDLEVAKGDTVKKDGKTYKVGVITQGIFGMP
VDAAGSAPRTPEDCEKFEEQYGIKPWKAKGIPLA
SEQ ID NO: 343
MNYTEKEKLFMKYILALDIGIASVGWAILDKESETVIEAGSNIFPEASAADNQLRRDMRGAKRN
NRRLKTRINDFIKLWENNNLSIPQFKSTEIVGLKVRAITEEITLDELYLILYSYLKHRGISYLE
DALDDTVSGSSAYANGLKLNAKELETHYPCEIQQERLNTIGKYRGQSQIINENGEVLDLSNVFT
IGAYRKEIQRVFEIQKKYHPELTDEFCDGYMLIFNRKRKYYEGPGNEKSRTDYGRFTTKLDANG
NYITEDNIFEKLIGKCSVYPDELRAAAASYTAQEYNVLNDLNNLTINGRKLEENEKHEIVERIK
SSNTINMRKIISDCMGENIDDFAGARIDKSGKEIFHKFEVYNKMRKALLEIGIDISNYSREELD
EIGYIMTINTDKEAMMEAFQKSWIDLSDDVKQCLINMRKTNGALFNKWQSFSLKIMNELIPEMY
AQPKEQMTLLTEMGVTKGTQEEFAGLKYIPVDVVSEDIFNPVVRRSVRISFKILNAVLKKYKAL
DTIVIEMPRDRNSEEQKKRINDSQKLNEKEMEYIEKKLAVTYGIKLSPSDFSSQKQLSLKLKLW
NEQDGICLYSGKTIDPNDIINNPQLFEIDHIIPRSISFDDARSNKVLVYRSENQKKGNQTPYYY
LTHSHSEWSFEQYKATVMNLSKKKEYAISRKKIQNLLYSEDITKMDVLKGFINRNINDTSYASR
LVLNTIQNFFMANEADTKVKVIKGSYTHQMRCNLKLDKNRDESYSHHAVDAMLIGYSELGYEAY
HKLQGEFIDFETGEILRKDMWDENMSDEVYADYLYGKKWANIRNEVVKAEKNVKYWHYVMRKSN
RGLCNQTIRGTREYDGKQYKINKLDIRTKEGIKVFAKLAFSKKDSDRERLLVYLNDRRTFDDLC
KIYEDYSDAANPFVQYEKETGDIIRKYSKKHNGPRIDKLKYKDGEVGACIDISHKYGFEKGSKK
VILESLVPYRMDVYYKEENHSYYLVGVKQSDIKFEKGRNVIDEEAYARILVNEKMIQPGQSRAD
LENLGFKFKLSFYKNDIIEYEKDGKIYTERLVSRTMPKQRNYIETKPIDKAKFEKQNLVGLGKT
KFIKKYRYDILGNKYSCSEEKFTSFC
SEQ ID NO: 344
MLRLYCANNLVLNNVQNLWKYLLLLIFDKKIIFLFKIKVILIRRYMENNNKEKIVIGFDLGVAS
VGWSIVNAETKEVIDLGVRLFSEPEKADYRRAKRTTRRLLRRKKFKREKFHKLILKNAEIFGLQ
SRNEILNVYKDQSSKYRNILKLKINALKEEIKPSELVWILRDYLQNRGYFYKNEKLTDEFVSNS
FPSKKLHEHYEKYGFFRGSVKLDNKLDNKKDKAKEKDEEEESDAKKESEELIFSNKQWINEIVK
VFENQSYLTESFKEEYLKLFNYVRPFNKGPGSKNSRTAYGVFSTDIDPETNKFKDYSNIWDKTI
GKCSLFEEEIRAPKNLPSALIFNLQNEICTIKNEFTEFKNWWLNAEQKSEILKFVFTELFNWKD
KKYSDKKFNKNLQDKIKKYLLNFALENFNLNEEILKNRDLENDTVLGLKGVKYYEKSNATADAA
LEFSSLKPLYVFIKFLKEKKLDLNYLLGLENTEILYFLDSIYLAISYSSDLKERNEWFKKLLKE
LYPKIKNNNLEIIENVEDIFEITDQEKFESFSKTHSLSREAFNHIIPLLLSNNEGKNYESLKHS
NEELKKRTEKAELKAQQNQKYLKDNFLKEALVPLSVKTSVLQAIKIFNQIIKNFGKKYEISQVV
IEMARELTKPNLEKLLNNATNSNIKILKEKLDQTEKFDDFTKKKFIDKIENSVVFRNKLFLWFE
QDRKDPYTQLDIKINEIEDETEIDHVIPYSKSADDSWFNKLLVKKSTNQLKKNKTVWEYYQNES
DPEAKWNKFVAWAKRIYLVQKSDKESKDNSEKNSIFKNKKPNLKFKNITKKLFDPYKDLGFLAR
NLNDTRYATKVFRDQLNNYSKHHSKDDENKLFKVVCMNGSITSFLRKSMWRKNEEQVYRFNFWK
KDRDQFFHHAVDASIIAIFSLLTKTLYNKLRVYESYDVQRREDGVYLINKETGEVKKADKDYWK
DQHNFLKIRENAIEIKNVLNNVDFQNQVRYSRKANTKLNTQLFNETLYGVKEFENNFYKLEKVN
LFSRKDLRKFILEDLNEESEKNKKNENGSRKRILTEKYIVDEILQILENEEFKDSKSDINALNK
YMDSLPSKFSEFFSQDFINKCKKENSLILTFDAIKHNDPKKVIKIKNLKFFREDATLKNKQAVH
KDSKNQIKSFYESYKCVGFIWLKNKNDLEESIFVPINSRVIHFGDKDKDIFDFDSYNKEKLLNE
INLKRPENKKFNSINEIEFVKFVKPGALLLNFENQQIYYISTLESSSLRAKIKLLNKMDKGKAV
SMKKITNPDEYKIIEHVNPLGINLNWTKKLENNN
SEQ ID NO: 345
MLMSKHVLGLDLGVGSIGWCLIALDAQGDPAEILGMGSRVVPLNNATKAIEAFNAGAAFTASQE
RTARRTMRRGFARYQLRRYRLRRELEKVGMLPDAALIQLPLLELWELRERAATAGRRLTLPELG
RVLCHINQKRGYRHVKSDAAAIVGDEGEKKKDSNSAYLAGIRANDEKLQAEHKTVGQYFAEQLR
QNQSESPTGGISYRIKDQIFSRQCYIDEYDQIMAVQRVHYPDILTDEFIRMLRDEVIFMQRPLK
SCKHLVSLCEFEKQERVMRVQQDDGKGGWQLVERRVKFGPKVAPKSSPLFQLCCIYEAVNNIRL
TRPNGSPCDITPEERAKIVAHLQSSASLSFAALKKLLKEKALIADQLTSKSGLKGNSTRVALAS
ALQPYPQYHHLLDMELETRMMTVQLTDEETGEVTEREVAVVTDSYVRKPLYRLWHILYSIEERE
AMRRALITQLGMKEEDLDGGLLDQLYRLDFVKPGYGNKSAKFICKLLPQLQQGLGYSEACAAVG
YRHSNSPTSEEITERTLLEKIPLLQRNELRQPLVEKILNQMINLVNALKAEYGIDEVRVELARE
LKMSREERERMARNNKDREERNKGVAAKIRECGLYPTKPRIQKYMLWKEAGRQCLYCGRSIEEE
QCLREGGMEVEHIIPKSVLYDDSYGNKTCACRRCNKEKGNRTALEYIRAKGREAEYMKRINDLL
KEKKISYSKHQRLRWLKEDIPSDFLERQLRLTQYISRQAMAILQQGIRRVSASEGGVTARLRSL
WGYGKILHTLNLDRYDSMGETERVSREGEATEELHITNWSKRMDHRHHAIDALVVACTRQSYIQ
RLNRLSSEFGREDKKKEDQEAQEQQATETGRLSNLERWLTQRPHFSVRTVSDKVAEILISYRPG
QRVVTRGRNIYRKKMADGREVSCVQRGVLVPRGELMEASFYGKILSQGRVRIVKRYPLHDLKGE
VVDPHLRELITTYNQELKSREKGAPIPPLCLDKDKKQEVRSVRCYAKTLSLDKAIPMCFDEKGE
PTAFVKSASNHHLALYRTPKGKLVESIVTFWDAVDRARYGIPLVITHPREVMEQVLQRGDIPEQ
VLSLLPPSDWVFVDSLQQDEMVVIGLSDEELQRALEAQNYRKISEHLYRVQKMSSSYYVFRYHL
ETSVADDKNTSGRIPKFHRVQSLKAYEERNIRKVRVDLLGRISLL
SEQ ID NO: 346
MSDLVLGLDIGIGSVGVGILNKVTGEIIHKNSRIFPAAQAENNLVRRTNRQGRRLARRKKHRRV
RLNRLFEESGLITDFTKISINLNPYQLRVKGLTDELSNEELFIALKNMVKHRGISYLDDASDDG
NSSVGDYAQIVKENSKQLETKTPGQIQLERYQTYGQLRGDFTVEKDGKKHRLINVFPTSAYRSE
ALRILQTQQEFNPQITDEFINRYLEILTGKRKYYHGPGNEKSRTDYGRYRTSGETLDNIFGILI
GKCTFYPDEFRAAKASYTAQEFNLLNDLNNLTVPTETKKLSKEQKNQIINYVKNEKAMGPAKLF
KYIAKLLSCDVADIKGYRIDKSGKAEIHTFEAYRKMKTLETLDIEQMDRETLDKLAYVLTLNTE
REGIQEALEHEFADGSFSQKQVDELVQFRKANSSIFGKGWHNFSVKLMMELIPELYETSEEQMT
ILTRLGKQKTTSSSNKTKYIDEKLLTEEIYNPVVAKSVRQAIKIVNAAIKEYGDFDNIVIEMAR
ETNEDDEKKAIQKIQKANKDEKDAAMLKAANQYNGKAELPHSVFHGHKQLATKIRLWHQQGERC
LYTGKTISIHDLINNSNQFEVDHILPLSITFDDSLANKVLVYATANQEKGQRTPYQALDSMDDA
WSFRELKAFVRESKTLSNKKKEYLLTEEDISKFDVRKKFIERNLVDTRYASRVVLNALQEHFRA
HKIDTKVSVVRGQFTSQLRRHWGIEKTRDTYHHHAVDALIIAASSQLNLWKKQKNTLVSYSEDQ
LLDIETGELISDDEYKESVFKAPYQHFVDTLKSKEFEDSILFSYQVDSKFNRKISDATIYATRQ
AKVGKDKADETYVLGKIKDIYTQDGYDAFMKIYKKDKSKFLMYRHDPQTFEKVIEPILENYPNK
QINEKGKEVPCNPFLKYKEEHGYIRKYSKKGNGPEIKSLKYYDSKLGNHIDITPKDSNNKVVLQ
SVSPWRADVYFNKTTGKYEILGLKYADLQFEKGTGTYKISQEKYNDIKKKEGVDSDSEFKFTLY
KNDLLLVKDTETKEQQLFRFLSRTMPKQKHYVELKPYDKQKFEGGEALIKVLGNVANSGQCKKG
LGKSNISIYKVRTDVLGNQHIIKNEGDKPKLDF
SEQ ID NO: 347
MNAEHGKEGLLIMEENFQYRIGLDIGITSVGWAVLQNNSQDEPVRITDLGVRIFDVAENPKNGD
ALAAPRRDARTTRRRLRRRRHRLERIKFLLQENGLIEMDSFMERYYKGNLPDVYQLRYEGLDRK
LKDEELAQVLIHIAKHRGFRSTRKAETKEKEGGAVLKATTENQKIMQEKGYRTVGEMLYLDEAF
HTECLWNEKGYVLTPRNRPDDYKHTILRSMLVEEVHAIFAAQRAHGNQKATEGLEEAYVEIMTS
QRSFDMGPGLQPDGKPSPYAMEGFGDRVGKCTFEKDEYRAPKATYTAELFVALQKINHTKLIDE
FGTGRFFSEEERKTIIGLLLSSKELKYGTIRKKLNIDPSLKFNSLNYSAKKEGETEEERVLDTE
KAKFASMFWTYEYSKCLKDRTEEMPVGEKADLFDRIGEILTAYKNDDSRSSRLKELGLSGEEID
GLLDLSPAKYQRVSLKAMRKMQPYLEDGLIYDKACEAAGYDFRALNDGNKKHLLKGEEINAIVN
DITNPVVKRSVSQTIKVINAIIQKYGSPQAVNIELAREMSKNFQDRTNLEKEMKKRQQENERAK
QQIIELGKQNPTGQDILKYRLWNDQGGYCLYSGKKIPLEELFDGGYDIDHILPYSITFDDSYRN
KVLVTAQENRQKGNRTPYEYFGADEKRWEDYEASVRLLVRDYKKQQKLLKKNFTEEERKEFKER
NLNDTKYITRVVYNMIRQNLELEPFNHPEKKKQVWAVNGAVTSYLRKRWGLMQKDRSTDRHHAM
DAVVIACCTDGMIHKISRYMQGRELAYSRNFKFPDEETGEILNRDNFTREQWDEKFGVKVPLPW
NSFRDELDIRLLNEDPKNFLLTHADVQRELDYPGWMYGEEESPIEEGRYINYIRPLFVSRMPNH
KVTGSAHDATIRSARDYETRGVVITKVPLTDLKLNKDNEIEGYYDKDSDRLLYQALVRQLLLHG
NDGKKAFAEDFHKPKADGTEGPVVRKVKIEKKQTSGVMVRGGTGIAANGEMVRIDVFRENGKYY
FVPVYTADVVRKVLPNRAATHTKPYSEWRVMDDANFVFSLYSRDLIHVKSKKDIKTNLVNGGLL
LQKEIFAYYTGADIATASIAGFANDSNFKFRGLGIQSLEIFEKCQVDILGNISVVRHENRQEFH
SEQ ID NO: 348
MRVLGLDAGIASLGWALIEIEESNRGELSQGTIIGAGTWMFDAPEEKTQAGAKLKSEQRRTFRG
QRRVVRRRRQRMNEVRRILHSHGLLPSSDRDALKQPGLDPWRIRAEALDRLLGPVELAVALGHI
ARHRGFKSNSKGAKTNDPADDTSKMKRAVNETREKLARFGSAAKMLVEDESFVLRQTPTKNGAS
EIVRRFRNREGDYSRSLLRDDLAAEMRALFTAQARFQSAIATADLQTAFTKAAFFQRPLQDSEK
LVGPCPFEVDEKRAPKRGYSFELFRFLSRLNHVTLRDGKQERTLTRDELALAAADFGAAAKVSF
TALRKKLKLPETTVFVGVKADEESKLDVVARSGKAAEGTARLRSVIVDALGELAWGALLCSPEK
LDKIAEVISFRSDIGRISEGLAQAGCNAPLVDALTAAASDGRFDPFTGAGHISSKAARNILSGL
RQGMTYDKACCAADYDHTASRERGAFDVGGHGREALKRILQEERISRELVGSPTARKALIESIK
QVKAIVERYGVPDRIHVELARDVGKSIEEREEITRGIEKRNRQKDKLRGLFEKEVGRPPQDGAR
GKEELLRFELWSEQMGRCLYTDDYISPSQLVATDDAVQVDHILPWSRFADDSYANKTLCMAKAN
QDKKGRTPYEWFKAEKTDTEWDAFIVRVEALADMKGFKKRNYKLRNAEEAAAKFRNRNLNDTRW
ACRLLAEALKQLYPKGEKDKDGKERRRVFSRPGALTDRLRRAWGLQWMKKSTKGDRIPDDRHHA
LDAIVIAATTESLLQRATREVQEIEDKGLHYDLVKNVTPPWPGFREQAVEAVEKVFVARAERRR
ARGKAHDATIRHIAVREGEQRVYERRKVAELKLADLDRVKDAERNARLIEKLRNWIEAGSPKDD
PPLSPKGDPIFKVRLVTKSKVNIALDTGNPKRPGTVDRGEMARVDVFRKASKKGKYEYYLVPIY
PHDIATMKTPPIRAVQAYKPEDEWPEMDSSYEFCWSLVPMTYLQVISSKGEIFEGYYRGMNRSV
GAIQLSAHSNSSDVVQGIGARTLTEFKKFNVDRFGRKHEVERELRTWRGETWRGKAYI
SEQ ID NO: 349
MGNYYLGLDVGIGSIGWAVINIEKKRIEDFNVRIFKSGEIQEKNRNSRASQQCRRSRGLRRLYR
RKSHRKLRLKNYLSIIGLTTSEKIDYYYETADNNVIQLRNKGLSEKLTPEEIAACLIHICNNRG
YKDFYEVNVEDIEDPDERNEYKEEHDSIVLISNLMNEGGYCTPAEMICNCREFDEPNSVYRKFH
NSAASKNHYLITRHMLVKEVDLILENQSKYYGILDDKTIAKIKDIIFAQRDFEIGPGKNERFRR
FTGYLDSIGKCQFFKDQERGSRFTVIADIYAFVNVLSQYTYTNNRGESVFDTSFANDLINSALK
NGSMDKRELKAIAKSYHIDISDKNSDTSLTKCFKYIKVVKPLFEKYGYDWDKLIENYTDTDNNV
LNRIGIVLSQAQTPKRRREKLKALNIGLDDGLINELTKLKLSGTANVSYKYMQGSIEAFCEGDL
YGKYQAKFNKEIPDIDENAKPQKLPPFKNEDDCEFFKNPVVFRSINETRKLINAIIDKYGYPAA
VNIETADELNKTFEDRAIDTKRNNDNQKENDRIVKEIIECIKCDEVHARHLIEKYKLWEAQEGK
CLYSGETITKEDMLRDKDKLFEVDHIVPYSLILDNTINNKALVYAEENQKKGQRTPLMYMNEAQ
AADYRVRVNTMFKSKKCSKKKYQYLMLPDLNDQELLGGWRSRNLNDTRYICKYLVNYLRKNLRF
DRSYESSDEDDLKIRDHYRVFPVKSRFTSMFRRWWLNEKTWGRYDKAELKKLTYLDHAADAIII
ANCRPEYVVLAGEKLKLNKMYHQAGKRITPEYEQSKKACIDNLYKLFRMDRRTAEKLLSGHGRL
TPIIPNLSEEVDKRLWDKNIYEQFWKDDKDKKSCEELYRENVASLYKGDPKFASSLSMPVISLK
PDHKYRGTITGEEAIRVKEIDGKLIKLKRKSISEITAESINSIYTDDKILIDSLKTIFEQADYK
DVGDYLKKTNQHFFTTSSGKRVNKVTVIEKVPSRWLRKEIDDNNFSLLNDSSYYCIELYKDSKG
DNNLQGIAMSDIVHDRKTKKLYLKPDFNYPDDYYTHVMYIFPGDYLRIKSTSKKSGEQLKFEGY
FISVKNVNENSFRFISDNKPCAKDKRVSITKKDIVIKLAVDLMGKVQGENNGKGISCGEPLSLL
KEKN
SEQ ID NO: 350
MLSRQLLGASHLARPVSYSYNVQDNDVHCSYGERCFMRGKRYRIGIDVGLNSVGLAAVEVSDEN
SPVRLLNAQSVIHDGGVDPQKNKEAITRKNMSGVARRTRRMRRRKRERLHKLDMLLGKFGYPVI
EPESLDKPFEEWHVRAELATRYIEDDELRRESISIALRHMARHRGWRNPYRQVDSLISDNPYSK
QYGELKEKAKAYNDDATAAEEESTPAQLVVAMLDAGYAEAPRLRWRTGSKKPDAEGYLPVRLMQ
EDNANELKQIFRVQRVPADEWKPLFRSVFYAVSPKGSAEQRVGQDPLAPEQARALKASLAFQEY
RIANVITNLRIKDASAELRKLTVDEKQSIYDQLVSPSSEDITWSDLCDFLGFKRSQLKGVGSLT
EDGEERISSRPPRLTSVQRIYESDNKIRKPLVAWWKSASDNEHEAMIRLLSNTVDIDKVREDVA
YASAIEFIDGLDDDALTKLDSVDLPSGRAAYSVETLQKLTRQMLTTDDDLHEARKTLFNVTDSW
RPPADPIGEPLGNPSVDRVLKNVNRYLMNCQQRWGNPVSVNIEHVRSSFSSVAFARKDKREYEK
NNEKRSIFRSSLSEQLRADEQMEKVRESDLRRLEAIQRQNGQCLYCGRTITFRTCEMDHIVPRK
GVGSTNTRTNFAAVCAECNRMKSNTPFAIWARSEDAQTRGVSLAEAKKRVTMFTFNPKSYAPRE
VKAFKQAVIARLQQTEDDAAIDNRSIESVAWMADELHRRIDWYFNAKQYVNSASIDDAEAETMK
TTVSVFQGRVTASARRAAGIEGKIHFIGQQSKTRLDRRHHAVDASVIAMMNTAAAQTLMERESL
RESQRLIGLMPGERSWKEYPYEGTSRYESFHLWLDNMDVLLELLNDALDNDRIAVMQSQRYVLG
NSIAHDATIHPLEKVPLGSAMSADLIRRASTPALWCALTRLPDYDEKEGLPEDSHREIRVHDTR
YSADDEMGFFASQAAQIAVQEGSADIGSAIHHARVYRCWKTNAKGVRKYFYGMIRVFQTDLLRA
CHDDLFTVPLPPQSISMRYGEPRVVQALQSGNAQYLGSLVVGDEIEMDFSSLDVDGQIGEYLQF
FSQFSGGNLAWKHWVVDGFFNQTQLRIRPRYLAAEGLAKAFSDDVVPDGVQKIVTKQGWLPPVN
TASKTAVRIVRRNAFGEPRLSSAHHMPCSWQWRHE
SEQ ID NO: 351
MYSIGLDLGISSVGWSVIDERTGNVIDLGVRLFSAKNSEKNLERRTNRGGRRLIRRKTNRLKDA
KKILAAVGFYEDKSLKNSCPYQLRVKGLTEPLSRGEIYKVTLHILKKRGISYLDEVDTEAAKES
QDYKEQVRKNAQLLTKYTPGQIQLQRLKENNRVKTGINAQGNYQLNVFKVSAYANELATILKTQ
QAFYPNELTDDWIALFVQPGIAEEAGLIYRKRPYYHGPGNEANNSPYGRWSDFQKTGEPATNIF
DKLIGKDFQGELRASGLSLSAQQYNLLNDLTNLKIDGEVPLSSEQKEYILTELMTKEFTRFGVN
DVVKLLGVKKERLSGWRLDKKGKPEIHTLKGYRNWRKIFAEAGIDLATLPTETIDCLAKVLTLN
TEREGIENTLAFELPELSESVKLLVLDRYKELSQSISTQSWHRFSLKTLHLLIPELMNATSEQN
TLLEQFQLKSDVRKRYSEYKKLPTKDVLAEIYNPTVNKTVSQAFKVIDALLVKYGKEQIRYITI
EMPRDDNEEDEKKRIKELHAKNSQRKNDSQSYFMQKSGWSQEKFQTTIQKNRRFLAKLLYYYEQ
DGICAYTGLPISPELLVSDSTEIDHIIPISISLDDSINNKVLVLSKANQVKGQQTPYDAWMDGS
FKKINGKFSNWDDYQKWVESRHFSHKKENNLLETRNIFDSEQVEKFLARNLNDTRYASRLVLNT
LQSFFTNQETKVRVVNGSFTHTLRKKWGADLDKTRETHHHHAVDATLCAVTSFVKVSRYHYAVK
EETGEKVMREIDFETGEIVNEMSYWEFKKSKKYERKTYQVKWPNFREQLKPVNLHPRIKFSHQV
DRKANRKLSDATIYSVREKTEVKTLKSGKQKITTDEYTIGKIKDIYTLDGWEAFKKKQDKLLMK
DLDEKTYERLLSIAETTPDFQEVEEKNGKVKRVKRSPFAVYCEENDIPAIQKYAKKNNGPLIRS
LKYYDGKLNKHINITKDSQGRPVEKTKNGRKVTLQSLKPYRYDIYQDLETKAYYTVQLYYSDLR
FVEGKYGITEKEYMKKVAEQTKGQVVRFCFSLQKNDGLEIEWKDSQRYDVRFYNFQSANSINFK
GLEQEMMPAENQFKQKPYNNGAINLNIAKYGKEGKKLRKFNTDILGKKHYLFYEKEPKNIIK
SEQ ID NO: 352
MYFYKNKENKLNKKVVLGLDLGIASVGWCLTDISQKEDNKFPIILHGVRLFETVDDSDDKLLNE
TRRKKRGQRRRNRRLFTRKRDFIKYLIDNNIIELEFDKNPKILVRNFIEKYINPFSKNLELKYK
SVTNLPIGFHNLRKAAINEKYKLDKSELIVLLYFYLSLRGAFFDNPEDTKSKEMNKNEIEIFDK
NESIKNAEFPIDKIIEFYKISGKIRSTINLKFGHQDYLKEIKQVFEKQNIDFMNYEKFAMEEKS
FFSRIRNYSEGPGNEKSFSKYGLYANENGNPELIINEKGQKIYTKIFKTLWESKIGKCSYDKKL
YRAPKNSFSAKVFDITNKLTDWKHKNEYISERLKRKILLSRFLNKDSKSAVEKILKEENIKFEN
LSEIAYNKDDNKINLPIINAYHSLTTIFKKHLINFENYLISNENDLSKLMSFYKQQSEKLFVPN
EKGSYEINQNNNVLHIFDAISNILNKFSTIQDRIRILEGYFEFSNLKKDVKSSEIYSEIAKLRE
FSGTSSLSFGAYYKFIPNLISEGSKNYSTISYEEKALQNQKNNFSHSNLFEKTWVEDLIASPTV
KRSLRQTMNLLKEIFKYSEKNNLEIEKIVVEVTRSSNNKHERKKIEGINKYRKEKYEELKKVYD
LPNENTTLLKKLWLLRQQQGYDAYSLRKIEANDVINKPWNYDIDHIVPRSISFDDSFSNLVIVN
KLDNAKKSNDLSAKQFIEKIYGIEKLKEAKENWGNWYLRNANGKAFNDKGKFIKLYTIDNLDEF
DNSDFINRNLSDTSYITNALVNHLTFSNSKYKYSVVSVNGKQTSNLRNQIAFVGIKNNKETERE
WKRPEGFKSINSNDFLIREEGKNDVKDDVLIKDRSFNGHHAEDAYFITIISQYFRSFKRIERLN
VNYRKETRELDDLEKNNIKFKEKASFDNFLLINALDELNEKLNQMRFSRMVITKKNTQLFNETL
YSGKYDKGKNTIKKVEKLNLLDNRTDKIKKIEEFFDEDKLKENELTKLHIFNHDKNLYETLKII
WNEVKIEIKNKNLNEKNYFKYFVNKKLQEGKISFNEWVPILDNDFKIIRKIRYIKFSSEEKETD
EIIFSQSNFLKIDQRQNFSFHNTLYWVQIWVYKNQKDQYCFISIDARNSKFEKDEIKINYEKLK
TQKEKLQIINEEPILKINKGDLFENEEKELFYIVGRDEKPQKLEIKYILGKKIKDQKQIQKPVK
KYFPNWKKVNLTYMGEIFKK
SEQ ID NO: 353
MDNKNYRIGIDVGLNSIGFCAVEVDQHDTPLGFLNLSVYRHDAGIDPNGKKTNTTRLAMSGVAR
RTRRLFRKRKRRLAALDRFIEAQGWTLPDHADYKDPYTPWLVRAELAQTPIRDENDLHEKLAIA
VRHIARHRGWRSPWVPVRSLHVEQPPSDQYLALKERVEAKTLLQMPEGATPAEMVVALDLSVDV
NLRPKNREKTDTRPENKKPGFLGGKLMQSDNANELRKIAKIQGLDDALLRELIELVFAADSPKG
ASGELVGYDVLPGQHGKRRAEKAHPAFQRYRIASIVSNLRIRHLGSGADERLDVETQKRVFEYL
LNAKPTADITWSDVAEEIGVERNLLMGTATQTADGERASAKPPVDVTNVAFATCKIKPLKEWWL
NADYEARCVMVSALSHAEKLTEGTAAEVEVAEFLQNLSDEDNEKLDSFSLPIGRAAYSVDSLER
LTKRMIENGEDLFEARVNEFGVSEDWRPPAEPIGARVGNPAVDRVLKAVNRYLMAAEAEWGAPL
SVNIEHVREGFISKRQAVEIDRENQKRYQRNQAVRSQIADHINATSGVRGSDVTRYLAIQRQNG
ECLYCGTAITFVNSEMDHIVPRAGLGSTNTRDNLVATCERCNKSKSNKPFAVWAAECGIPGVSV
AEALKRVDFWIADGFASSKEHRELQKGVKDRLKRKVSDPEIDNRSMESVAWMARELAHRVQYYF
DEKHTGTKVRVFRGSLTSAARKASGFESRVNFIGGNGKTRLDRRHHAMDAATVAMLRNSVAKTL
VLRGNIRASERAIGAAETWKSFRGENVADRQIFESWSENMRVLVEKFNLALYNDEVSIFSSLRL
QLGNGKAHDDTITKLQMHKVGDAWSLTEIDRASTPALWCALTRQPDFTWKDGLPANEDRTIIVN
GTHYGPLDKVGIFGKAAASLLVRGGSVDIGSAIHHARIYRIAGKKPTYGMVRVFAPDLLRYRNE
DLFNVELPPQSVSMRYAEPKVREAIREGKAEYLGWLVVGDELLLDLSSETSGQIAELQQDFPGT
THWTVAGFFSPSRLRLRPVYLAQEGLGEDVSEGSKSIIAGQGWRPAVNKVFGSAMPEVIRRDGL
GRKRRFSYSGLPVSWQG
SEQ ID NO: 354
MRLGLDIGTSSIGWWLYETDGAGSDARITGVVDGGVRIFSDGRDPKSGASLAVDRRAARAMRRR
RDRYLRRRATLMKVLAETGLMPADPAEAKALEALDPFALRAAGLDEPLPLPHLGRALFHLNQRR
GFKSNRKTDRGDNESGKIKDATARLDMEMMANGARTYGEFLHKRRQKATDPRHVPSVRTRLSIA
NRGGPDGKEEAGYDFYPDRRHLEEEFHKLWAAQGAHHPELTETLRDLLFEKIFFQRPLKEPEVG
LCLFSGHHGVPPKDPRLPKAHPLTQRRVLYETVNQLRVTADGREARPLTREERDQVIHALDNKK
PTKSLSSMVLKLPALAKVLKLRDGERFTLETGVRDAIACDPLRASPAHPDRFGPRWSILDADAQ
WEVISRIRRVQSDAEHAALVDWLTEAHGLDRAHAEATAHAPLPDGYGRLGLTATTRILYQLTAD
VVTYADAVKACGWHHSDGRTGECFDRLPYYGEVLERHVIPGSYHPDDDDITRFGRITNPTVHIG
LNQLRRLVNRIIETHGKPHQIVVELARDLKKSEEQKRADIKRIRDTTEAAKKRSEKLEELEIED
NGRNRMLLRLWEDLNPDDAMRRFCPYTGTRISAAMIFDGSCDVDHILPYSRTLDDSFPNRTLCL
REANRQKRNQTPWQAWGDTPHWHAIAANLKNLPENKRWRFAPDAMTRFEGENGFLDRALKDTQY
LARISRSYLDTLFTKGGHVWVVPGRFTEMLRRHWGLNSLLSDAGRGAVKAKNRTDHRHHAIDAA
VIAATDPGLLNRISRAAGQGEAAGQSAELIARDTPPPWEGFRDDLRVRLDRIIVSHRADHGRID
HAARKQGRDSTAGQLHQETAYSIVDDIHVASRTDLLSLKPAQLLDEPGRSGQVRDPQLRKALRV
ATGGKTGKDFENALRYFASKPGPYQAIRRVRIIKPLQAQARVPVPAQDPIKAYQGGSNHLFEIW
RLPDGEIEAQVITSFEAHTLEGEKRPHPAAKRLLRVHKGDMVALERDGRRVVGHVQKMDIANGL
FIVPHNEANADTRNNDKSDPFKWIQIGARPAIASGIRRVSVDEIGRLRDGGTRPI
SEQ ID NO: 355
MLHCIAVIRVPPSEEPGFFETHADSCALCHHGCMTYAANDKAIRYRVGIDVGLRSIGFCAVEVD
DEDHPIRILNSVVHVHDAGTGGPGETESLRKRSGVAARARRRGRAEKQRLKKLDVLLEELGWGV
SSNELLDSHAPWHIRKRLVSEYIEDETERRQCLSVAMAHIARHRGWRNSFSKVDTLLLEQAPSD
RMQGLKERVEDRTGLQFSEEVTQGELVATLLEHDGDVTIRGFVRKGGKATKVHGVLEGKYMQSD
LVAELRQICRTQRVSETTFEKLVLSIFHSKEPAPSAARQRERVGLDELQLALDPAAKQPRAERA
HPAFQKFKVVATLANMRIREQSAGERSLTSEELNRVARYLLNHTESESPTWDDVARKLEVPRHR
LRGSSRASLETGGGLTYPPVDDTTVRVMSAEVDWLADWWDCANDESRGHMIDAISNGCGSEPDD
VEDEEVNELISSATAEDMLKLELLAKKLPSGRVAYSLKTLREVTAAILETGDDLSQAITRLYGV
DPGWVPTPAPIEAPVGNPSVDRVLKQVARWLKFASKRWGVPQTVNIEHTREGLKSASLLEEERE
RWERFEARREIRQKEMYKRLGISGPFRRSDQVRYEILDLQDCACLYCGNEINFQTFEVDHIIPR
VDASSDSRRTNLAAVCHSCNSAKGGLAFGQWVKRGDCPSGVSLENAIKRVRSWSKDRLGLTEKA
MGKRKSEVISRLKTEMPYEEFDGRSMESVAWMAIELKKRIEGYFNSDRPEGCAAVQVNAYSGRL
TACARRAAHVDKRVRLIRLKGDDGHHKNRFDRRNHAMDALVIALMTPAIARTIAVREDRREAQQ
LTRAFESWKNFLGSEERMQDRWESWIGDVEYACDRLNELIDADKIPVTENLRLRNSGKLHADQP
ESLKKARRGSKRPRPQRYVLGDALPADVINRVTDPGLWTALVRAPGFDSQLGLPADLNRGLKLR
GKRISADFPIDYFPTDSPALAVQGGYVGLEFHHARLYRIIGPKEKVKYALLRVCAIDLCGIDCD
DLFEVELKPSSISMRTADAKLKEAMGNGSAKQIGWLVLGDEIQIDPTKFPKQSIGKFLKECGPV
SSWRVSALDTPSKITLKPRLLSNEPLLKTSRVGGHESDLVVAECVEKIMKKTGWVVEINALCQS
GLIRVIRRNALGEVRTSPKSGLPISLNLR
SEQ ID NO: 356
MRYRVGLDLGTASVGAAVFSMDEQGNPMELIWHYERLFSEPLVPDMGQLKPKKAARRLARQQRR
QIDRRASRLRRIAIVSRRLGIAPGRNDSGVHGNDVPTLRAMAVNERIELGQLRAVLLRMGKKRG
YGGTFKAVRKVGEAGEVASGASRLEEEMVALASVQNKDSVTVGEYLAARVEHGLPSKLKVAANN
EYYAPEYALFRQYLGLPAIKGRPDCLPNMYALRHQIEHEFERIWATQSQFHDVMKDHGVKEEIR
NAIFFQRPLKSPADKVGRCSLQTNLPRAPRAQIAAQNFRIEKQMADLRWGMGRRAEMLNDHQKA
VIRELLNQQKELSFRKIYKELERAGCPGPEGKGLNMDRAALGGRDDLSGNTTLAAWRKLGLEDR
WQELDEVTQIQVINFLADLGSPEQLDTDDWSCRFMGKNGRPRNFSDEFVAFMNELRMTDGFDRL
SKMGFEGGRSSYSIKALKALTEWMIAPHWRETPETHRVDEEAAIRECYPESLATPAQGGRQSKL
EPPPLTGNEVVDVALRQVRHTINMMIDDLGSVPAQIVVEMAREMKGGVTRRNDIEKQNKRFASE
RKKAAQSIEENGKTPTPARILRYQLWIEQGHQCPYCESNISLEQALSGAYTNFEHILPRTLTQI
GRKRSELVLAHRECNDEKGNRTPYQAFGHDDRRWRIVEQRANALPKKSSRKTRLLLLKDFEGEA
LTDESIDEFADRQLHESSWLAKVTTQWLSSLGSDVYVSRGSLTAELRRRWGLDTVIPQVRFESG
MPVVDEEGAEITPEEFEKFRLQWEGHRVTREMRTDRRPDKRIDHRHHLVDAIVTALTSRSLYQQ
YAKAWKVADEKQRHGRVDVKVELPMPILTIRDIALEAVRSVRISHKPDRYPDGRFFEATAYGIA
QRLDERSGEKVDWLVSRKSLTDLAPEKKSIDVDKVRANISRIVGEAIRLHISNIFEKRVSKGMT
PQQALREPIEFQGNILRKVRCFYSKADDCVRIEHSSRRGHHYKMLLNDGFAYMEVPCKEGILYG
VPNLVRPSEAVGIKRAPESGDFIRFYKGDTVKNIKTGRVYTIKQILGDGGGKLILTPVTETKPA
DLLSAKWGRLKVGGRNIHLLRLCAE
SEQ ID NO: 357
MIGEHVRGGCLFDDHWTPNWGAFRLPNTVRTFTKAENPKDGSSLAEPRRQARGLRRRLRRKTQR
LEDLRRLLAKEGVLSLSDLETLFRETPAKDPYQLRAEGLDRPLSFPEWVRVLYHITKHRGFQSN
RRNPVEDGQERSRQEEEGKLLSGVGENERLLREGGYRTAGEMLARDPKFQDHRRNRAGDYSHTL
SRSLLLEEARRLFQSQRTLGNPHASSNLEEAFLHLVAFQNPFASGEDIRNKAGHCSLEPDQIRA
PRRSASAETFMLLQKTGNLRLIHRRTGEERPLTDKEREQIHLLAWKQEKVTHKTLRRHLEIPEE
WLFTGLPYHRSGDKAEEKLFVHLAGIHEIRKALDKGPDPAVWDTLRSRRDLLDSIADTLTFYKN
EDEILPRLESLGLSPENARALAPLSFSGTAHLSLSALGKLLPHLEEGKSYTQARADAGYAAPPP
DRHPKLPPLEEADWRNPVVFRALTQTRKVVNALVRRYGPPWCIHLETARELSQPAKVRRRIETE
QQANEKKKQQAEREFLDIVGTAPGPGDLLKMRLWREQGGFCPYCEEYLNPTRLAEPGYAEMDHI
LPYSRSLDNGWHNRVLVHGKDNRDKGNRTPFEAFGGDTARWDRLVAWVQASHLSAPKKRNLLRE
DFGEEAERELKDRNLTDTRFITKTAATLLRDRLTFHPEAPKDPVMTLNGRLTAFLRKQWGLHKN
RKNGDLHHALDAAVLAVASRSFVYRLSSHNAAWGELPRGREAENGFSLPYPAFRSEVLARLCPT
REEILLRLDQGGVGYDEAFRNGLRPVFVSRAPSRRLRGKAHMETLRSPKWKDHPEGPRTASRIP
LKDLNLEKLERMVGKDRDRKLYEALRERLAAFGGNGKKAFVAPFRKPCRSGEGPLVRSLRIFDS
GYSGVELRDGGEVYAVADHESMVRVDVYAKKNRFYLVPVYVADVARGIVKNRAIVAHKSEEEWD
LVDGSFDFRFSLFPGDLVEIEKKDGAYLGYYKSCHRGDGRLLLDRHDRMPRESDCGTFYVSTRK
DVLSMSKYQVDPLGEIRLVGSEKPPFVL
SEQ ID NO: 358
MEKKRKVTLGFDLGIASVGWAIVDSETNQVYKLGSRLFDAPDTNLERRTQRGTRRLLRRRKYRN
QKFYNLVKRTEVFGLSSREAIENRFRELSIKYPNIIELKTKALSQEVCPDEIAWILHDYLKNRG
YFYDEKETKEDFDQQTVESMPSYKLNEFYKKYGYFKGALSQPTESEMKDNKDLKEAFFFDFSNK
EWLKEINYFFNVQKNILSETFIEEFKKIFSFTRDISKGPGSDNMPSPYGIFGEFGDNGQGGRYE
HIWDKNIGKCSIFTNEQRAPKYLPSALIFNFLNELANIRLYSTDKKNIQPLWKLSSVDKLNILL
NLFNLPISEKKKKLTSTNINDIVKKESIKSIMISVEDIDMIKDEWAGKEPNVYGVGLSGLNIEE
SAKENKFKFQDLKILNVLINLLDNVGIKFEFKDRNDIIKNLELLDNLYLFLIYQKESNNKDSSI
DLFIAKNESLNIENLKLKLKEFLLGAGNEFENHNSKTHSLSKKAIDEILPKLLDNNEGWNLEAI
KNYDEEIKSQIEDNSSLMAKQDKKYLNDNFLKDAILPPNVKVTFQQAILIFNKIIQKFSKDFEI
DKVVIELAREMTQDQENDALKGIAKAQKSKKSLVEERLEANNIDKSVFNDKYEKLIYKIFLWIS
QDFKDPYTGAQISVNEIVNNKVEIDHIIPYSLCFDDSSANKVLVHKQSNQEKSNSLPYEYIKQG
HSGWNWDEFTKYVKRVFVNNVDSILSKKERLKKSENLLTASYDGYDKLGFLARNLNDTRYATIL
FRDQLNNYAEHHLIDNKKMFKVIAMNGAVTSFIRKNMSYDNKLRLKDRSDFSHHAYDAAIIALF
SNKTKTLYNLIDPSLNGIISKRSEGYWVIEDRYTGEIKELKKEDWTSIKNNVQARKIAKEIEEY
LIDLDDEVFFSRKTKRKTNRQLYNETIYGIATKTDEDGITNYYKKEKFSILDDKDIYLRLLRER
EKFVINQSNPEVIDQIIEIIESYGKENNIPSRDEAINIKYTKNKINYNLYLKQYMRSLTKSLDQ
FSEEFINQMIANKTFVLYNPTKNTTRKIKFLRLVNDVKINDIRKNQVINKFNGKNNEPKAFYEN
INSLGAIVFKNSANNFKTLSINTQIAIFGDKNWDIEDFKTYNMEKIEKYKEIYGIDKTYNFHSF
IFPGTILLDKQNKEFYYISSIQTVRDIIEIKFLNKIEFKDENKNQDTSKTPKRLMFGIKSIMNN
YEQVDISPFGINKKIFE
SEQ ID NO: 359
MGYRIGLDVGITSTGYAVLKTDKNGLPYKILTLDSVIYPRAENPQTGASLAEPRRIKRGLRRRT
RRTKFRKQRTQQLFIHSGLLSKPEIEQILATPQAKYSVYELRVAGLDRRLTNSELFRVLYFFIG
HRGFKSNRKAELNPENEADKKQMGQLLNSIEEIRKAIAEKGYRTVGELYLKDPKYNDHKRNKGY
IDGYLSTPNRQMLVDEIKQILDKQRELGNEKLTDEFYATYLLGDENRAGIFQAQRDFDEGPGAG
PYAGDQIKKMVGKDIFEPTEDRAAKATYTFQYFNLLQKMTSLNYQNTTGDTWHTLNGLDRQAII
DAVFAKAEKPTKTYKPTDFGELRKLLKLPDDARFNLVNYGSLQTQKEIETVEKKTRFVDFKAYH
DLVKVLPEEMWQSRQLLDHIGTALTLYSSDKRRRRYFAEELNLPAELIEKLLPLNFSKFGHLSI
KSMQNIIPYLEMGQVYSEATTNTGYDFRKKQISKDTIREEITNPVVRRAVTKTIKIVEQIIRRY
GKPDGINIELARELGRNFKERGDIQKRQDKNRQTNDKIAAELTELGIPVNGQNIIRYKLHKEQN
GVDPYTGDQIPFERAFSEGYEVDHIIPYSISWDDSYTNKVLTSAKCNREKGNRIPMVYLANNEQ
RLNALTNIADNIIRNSRKRQKLLKQKLSDEELKDWKQRNINDTRFITRVLYNYFRQAIEFNPEL
EKKQRVLPLNGEVTSKIRSRWGFLKVREDGDLHHAIDATVIAAITPKFIQQVTKYSQHQEVKNN
QALWHDAEIKDAEYAAEAQRMDADLFNKIFNGFPLPWPEFLDELLARISDNPVEMMKSRSWNTY
TPIEIAKLKPVFVVRLANHKISGPAHLDTIRSAKLFDEKGIVLSRVSITKLKINKKGQVATGDG
IYDPENSNNGDKVVYSAIRQALEAHNGSGELAFPDGYLEYVDHGTKKLVRKVRVAKKVSLPVRL
KNKAAADNGSMVRIDVFNTGKKFVFVPIYIKDTVEQVLPNKAIARGKSLWYQITESDQFCFSLY
PGDMVHIESKTGIKPKYSNKENNTSVVPIKNFYGYFDGADIATASILVRAHDSSYTARSIGIAG
LLKFEKYQVDYFGRYHKVHEKKRQLFVKRDE
SEQ ID NO: 360
MQKNINTKQNHIYIKQAQKIKEKLGDKPYRIGLDLGVGSIGFAIVSMEENDGNVLLPKEIIMVG
SRIFKASAGAADRKLSRGQRNNHRHTRERMRYLWKVLAEQKLALPVPADLDRKENSSEGETSAK
RFLGDVLQKDIYELRVKSLDERLSLQELGYVLYHIAGHRGSSAIRTFENDSEEAQKENTENKKI
AGNIKRLMAKKNYRTYGEYLYKEFFENKEKHKREKISNAANNHKFSPTRDLVIKEAEAILKKQA
GKDGFHKELTEEYIEKLTKAIGYESEKLIPESGFCPYLKDEKRLPASHKLNEERRLWETLNNAR
YSDPIVDIVTGEITGYYEKQFTKEQKQKLFDYLLTGSELTPAQTKKLLGLKNTNFEDIILQGRD
KKAQKIKGYKLIKLESMPFWARLSEAQQDSFLYDWNSCPDEKLLTEKLSNEYHLTEEEIDNAFN
EIVLSSSYAPLGKSAMLIILEKIKNDLSYTEAVEEALKEGKLTKEKQAIKDRLPYYGAVLQEST
QKIIAKGFSPQFKDKGYKTPHTNKYELEYGRIANPVVHQTLNELRKLVNEIIDILGKKPCEIGL
ETARELKKSAEDRSKLSREQNDNESNRNRIYEIYIRPQQQVIITRRENPRNYILKFELLEEQKS
QCPFCGGQISPNDIINNQADIEHLFPIAESEDNGRNNLVISHSACNADKAKRSPWAAFASAAKD
SKYDYNRILSNVKENIPHKAWRFNQGAFEKFIENKPMAARFKTDNSYISKVAHKYLACLFEKPN
IICVKGSLTAQLRMAWGLQGLMIPFAKQLITEKESESFNKDVNSNKKIRLDNRHHALDAIVIAY
ASRGYGNLLNKMAGKDYKINYSERNWLSKILLPPNNIVWENIDADLESFESSVKTALKNAFISV
KHDHSDNGELVKGTMYKIFYSERGYTLTTYKKLSALKLTDPQKKKTPKDFLETALLKFKGRESE
MKNEKIKSAIENNKRLFDVIQDNLEKAKKLLEEENEKSKAEGKKEKNINDASIYQKAISLSGDK
YVQLSKKEPGKFFAISKPTPTTTGYGYDTGDSLCVDLYYDNKGKLCGEIIRKIDAQQKNPLKYK
EQGFTLFERIYGGDILEVDFDIHSDKNSFRNNTGSAPENRVFIKVGTFTEITNNNIQIWFGNII
KSTGGQDDSFTINSMQQYNPRKLILSSCGFIKYRSPILKNKEG
SEQ ID NO: 361
MAAFKPNPINYILGLDIGIASVGWAMVEIDEDENPICLIDLGVRVFERAEVPKTGDSLAMARRL
ARSVRRLTRRRAHRLLRARRLLKREGVLQAADFDENGLIKSLPNTPWQLRAAALDRKLTPLEWS
AVLLHLIKHRGYLSQRKNEGETADKELGALLKGVADNAHALQTGDFRTPAELALNKFEKESGHI
RNQRGDYSHTFSRKDLQAELILLFEKQKEFGNPHVSGGLKEGIETLLMTQRPALSGDAVQKMLG
HCTFEPAEPKAAKNTYTAERFIWLTKLNNLRILEQGSERPLTDTERATLMDEPYRKSKLTYAQA
RKLLGLEDTAFFKGLRYGKDNAEASTLMEMKAYHAISRALEKEGLKDKKSPLNLSPELQDEIGT
AFSLFKTDEDITGRLKDRIQPEILEALLKHISFDKFVQISLKALRRIVPLMEQGKRYDEACAEI
YGDHYGKKNTEEKIYLPPIPADEIRNPVVLRALSQARKVINGVVRRYGSPARIHIETAREVGKS
FKDRKEIEKRQEENRKDREKAAAKFREYFPNFVGEPKSKDILKLRLYEQQHGKCLYSGKEINLG
RLNEKGYVEIDHALPFSRTWDDSFNNKVLVLGSENQNKGNQTPYEYFNGKDNSREWQEFKARVE
TSRFPRSKKQRILLQKFDEDGFKERNLNDTRYVNRFLCQFVADRMRLTGKGKKRVFASNGQITN
LLRGFWGLRKVRAENDRHHALDAVVVACSTVAMQQKITRFVRYKEMNAFDGKTIDKETGEVLHQ
KTHFPQPWEFFAQEVMIRVFGKPDGKPEFEEADTPEKLRTLLAEKLSSRPEAVHEYVTPLFVSR
APNRKMSGQGHMETVKSAKRLDEGVSVLRVPLTQLKLKDLEKMVNREREPKLYEALKARLEAHK
DDPAKAFAEPFYKYDKAGNRTQQVKAVRVEQVQKTGVWVRNHNGIADNATMVRVDVFEKGDKYY
LVPIYSWQVAKGILPDRAVVQGKDEEDWQLIDDSFNFKFSLHPNDLVEVITKKARMFGYFASCH
RGTGNINIRIHDLDHKIGKNGILEGIGVKTALSFQKYQIDELGKEIRPCRLKKRPPVR
SEQ ID NO: 362
MQTTNLSYILGLDLGIASVGWAVVEINENEDPIGLIDVGVRIFERAEVPKTGESLALSRRLARS
TRRLIRRRAHRLLLAKRFLKREGILSTIDLEKGLPNQAWELRVAGLERRLSAIEWGAVLLHLIK
HRGYLSKRKNESQTNNKELGALLSGVAQNHQLLQSDDYRTPAELALKKFAKEEGHIRNQRGAYT
HTFNRLDLLAELNLLFAQQHQFGNPHCKEHIQQYMTELLMWQKPALSGEAILKMLGKCTHEKNE
FKAAKHTYSAERFVWLTKLNNLRILEDGAERALNEEERQLLINHPYEKSKLTYAQVRKLLGLSE
QAIFKHLRYSKENAESATFMELKAWHAIRKALENQGLKDTWQDLAKKPDLLDEIGTAFSLYKTD
EDIQQYLTNKVPNSVINALLVSLNFDKFIELSLKSLRKILPLMEQGKRYDQACREIYGHHYGEA
NQKTSQLLPAIPAQEIRNPVVLRTLSQARKVINAIIRQYGSPARVHIETGRELGKSFKERREIQ
KQQEDNRTKRESAVQKFKELFSDFSSEPKSKDILKFRLYEQQHGKCLYSGKEINIHRLNEKGYV
EIDHALPFSRTWDDSFNNKVLVLASENQNKGNQTPYEWLQGKINSERWKNFVALVLGSQCSAAK
KQRLLTQVIDDNKFIDRNLNDTRYIARFLSNYIQENLLLVGKNKKNVFTPNGQITALLRSRWGL
IKARENNNRHHALDAIVVACATPSMQQKITRFIRFKEVHPYKIENRYEMVDQESGEIISPHFPE
PWAYFRQEVNIRVFDNHPDTVLKEMLPDRPQANHQFVQPLFVSRAPTRKMSGQGHMETIKSAKR
LAEGISVLRIPLTQLKPNLLENMVNKEREPALYAGLKARLAEFNQDPAKAFATPFYKQGGQQVK
AIRVEQVQKSGVLVRENNGVADNASIVRTDVFIKNNKFFLVPIYTWQVAKGILPNKAIVAHKNE
DEWEEMDEGAKFKFSLFPNDLVELKTKKEYFFGYYIGLDRATGNISLKEHDGEISKGKDGVYRV
GVKLALSFEKYQVDELGKNRQICRPQQRQPVR
SEQ ID NO: 363
MGIRFAFDLGTNSIGWAVWRTGPGVFGEDTAASLDGSGVLIFKDGRNPKDGQSLATMRRVPRQS
RKRRDRFVLRRRDLLAALRKAGLFPVDVEEGRRLAATDPYHLRAKALDESLTPHEMGRVIFHLN
QRRGFRSNRKADRQDREKGKIAEGSKRLAETLAATNCRTLGEFLWSRHRGTPRTRSPTRIRMEG
EGAKALYAFYPTREMVRAEFERLWTAQSRFAPDLLTPERHEEIAGILFRQRDLAPPKIGCCTFE
PSERRLPRALPSVEARGIYERLAHLRITTGPVSDRGLTRPERDVLASALLAGKSLTFKAVRKTL
KILPHALVNFEEAGEKGLDGALTAKLLSKPDHYGAAWHGLSFAEKDTFVGKLLDEADEERLIRR
LVTENRLSEDAARRCASIPLADGYGRLGRTANTEILAALVEETDETGTVVTYAEAVRRAGERTG
RNWHHSDERDGVILDRLPYYGEILQRHVVPGSGEPEEKNEAARWGRLANPTVHIGLNQLRKVVN
RLIAAHGRPDQIVVELARELKLNREQKERLDRENRKNREENERRTAILAEHGQRDTAENKIRLR
LFEEQARANAGIALCPYTGRAIGIAELFTSEVEIDHILPVSLTLDDSLANRVLCRREANREKRR
QTPFQAFGATPAWNDIVARAAKLPPNKRWRFDPAALERFEREGGFLGRQLNETKYLSRLAKIYL
GKICDPDRVYVTPGTLTGLLRARWGLNSILSDSNFKNRSDHRHHAVDAVVIGVLTRGMIQRIAH
DAARAEDQDLDRVFRDVPVPFEDFRDHVRERVSTITVAVKPEHGKGGALHEDTSYGLVPDTDPN
AALGNLVVRKPIRSLTAGEVDRVRDRALRARLGALAAPFRDESGRVRDAKGLAQALEAFGAENG
IRRVRILKPDASVVTIADRRTGVPYRAVAPGENHHVDIVQMRDGSWRGFAASVFEVNRPGWRPE
WEVKKLGGKLVMRLHKGDMVELSDKDGQRRVKVVQQIEISANRVRLSPHNDGGKLQDRHADADD
PFRWDLATIPLLKDRGCVAVRVDPIGVVTLRRSNV
SEQ ID NO: 364
MMEVFMGRLVLGLDIGITSVGFGIIDLDESEIVDYGVRLFKEGTAAENETRRTKRGGRRLKRRR
VTRREDMLHLLKQAGIISTSFHPLNNPYDVRVKGLNERLNGEELATALLHLCKHRGSSVETIED
DEAKAKEAGETKKVLSMNDQLLKSGKYVCEIQKERLRTNGHIRGHENNFKTRAYVDEAFQILSH
QDLSNELKSAIITIISRKRMYYDGPGGPLSPTPYGRYTYFGQKEPIDLIEKMRGKCSLFPNEPR
APKLAYSAELFNLLNDLNNLSIEGEKLTSEQKAMILKIVHEKGKITPKQLAKEVGVSLEQIRGF
RIDTKGSPLLSELTGYKMIREVLEKSNDEHLEDHVFYDEIAEILTKTKDIEGRKKQISELSSDL
NEESVHQLAGLTKFTAYHSLSFKALRLINEEMLKTELNQMQSITLFGLKQNNELSVKGMKNIQA
DDTAILSPVAKRAQRETFKVVNRLREIYGEFDSIVVEMAREKNSEEQRKAIRERQKFFEMRNKQ
VADIIGDDRKINAKLREKLVLYQEQDGKTAYSLEPIDLKLLIDDPNAYEVDHIIPISISLDDSI
TNKVLVTHRENQEKGNLTPISAFVKGRFTKGSLAQYKAYCLKLKEKNIKTNKGYRKKVEQYLLN
ENDIYKYDIQKEFINRNLVDTSYASRVVLNTLTTYFKQNEIPTKVFTVKGSLTNAFRRKINLKK
DRDEDYGHHAIDALIIASMPKMRLLSTIFSRYKIEDIYDESTGEVFSSGDDSMYYDDRYFAFIA
SLKAIKVRKFSHKIDTKPNRSVADETIYSTRVIDGKEKVVKKYKDIYDPKFTALAEDILNNAYQ
EKYLMALHDPQTFDQIVKVVNYYFEEMSKSEKYFTKDKKGRIKISGMNPLSLYRDEHGMLKKYS
KKGDGPAITQMKYFDGVLGNHIDISAHYQVRDKKVVLQQISPYRTDFYYSKENGYKFVTIRYKD
VRWSEKKKKYVIDQQDYAMKKAEKKIDDTYEFQFSMHRDELIGITKAEGEALIYPDETWHNFNF
FFHAGETPEILKFTATNNDKSNKIEVKPIHCYCKMRLMPTISKKIVRIDKYATDVVGNLYKVKK
NTLKFEFD
SEQ ID NO: 365
MKKILGVDLGITSFGYAILQETGKDLYRCLDNSVVMRNNPYDEKSGESSQSIRSTQKSMRRLIE
KRKKRIRCVAQTMERYGILDYSETMKINDPKNNPIKNRWQLRAVDAWKRPLSPQELFAIFAHMA
KHRGYKSIATEDLIYELELELGLNDPEKESEKKADERRQVYNALRHLEELRKKYGGETIAQTIH
RAVEAGDLRSYRNHDDYEKMIRREDIEEEIEKVLLRQAELGALGLPEEQVSELIDELKACITDQ
EMPTIDESLFGKCTFYKDELAAPAYSYLYDLYRLYKKLADLNIDGYEVTQEDREKVIEWVEKKI
AQGKNLKKITHKDLRKILGLAPEQKIFGVEDERIVKGKKEPRTFVPFFFLADIAKFKELFASIQ
KHPDALQIFRELAEILQRSKTPQEALDRLRALMAGKGIDTDDRELLELFKNKRSGTRELSHRYI
LEALPLFLEGYDEKEVQRILGFDDREDYSRYPKSLRHLHLREGNLFEKEENPINNHAVKSLASW
ALGLIADLSWRYGPFDEIILETTRDALPEKIRKEIDKAMREREKALDKIIGKYKKEFPSIDKRL
ARKIQLWERQKGLDLYSGKVINLSQLLDGSADIEHIVPQSLGGLSTDYNTIVTLKSVNAAKGNR
LPGDWLAGNPDYRERIGMLSEKGLIDWKKRKNLLAQSLDEIYTENTHSKGIRATSYLEALVAQV
LKRYYPFPDPELRKNGIGVRMIPGKVTSKTRSLLGIKSKSRETNFHHAEDALILSTLTRGWQNR
LHRMLRDNYGKSEAELKELWKKYMPHIEGLTLADYIDEAFRRFMSKGEESLFYRDMFDTIRSIS
YWVDKKPLSASSHKETVYSSRHEVPTLRKNILEAFDSLNVIKDRHKLTTEEFMKRYDKEIRQKL
WLHRIGNTNDESYRAVEERATQIAQILTRYQLMDAQNDKEIDEKFQQALKELITSPIEVTGKLL
RKMRFVYDKLNAMQIDRGLVETDKNMLGIHISKGPNEKLIFRRMDVNNAHELQKERSGILCYLN
EMLFIFNKKGLIHYGCLRSYLEKGQGSKYIALFNPRFPANPKAQPSKFTSDSKIKQVGIGSATG
IIKAHLDLDGHVRSYEVFGTLPEGSIEWFKEESGYGRVEDDPHH
SEQ ID NO: 366
MRPIEPWILGLDIGTDSLGWAVFSCEEKGPPTAKELLGGGVRLFDSGRDAKDHTSRQAERGAFR
RARRQTRTWPWRRDRLIALFQAAGLTPPAAETRQIALALRREAVSRPLAPDALWAALLHLAHHR
GFRSNRIDKRERAAAKALAKAKPAKATAKATAPAKEADDEAGFWEGAEAALRQRMAASGAPTVG
ALLADDLDRGQPVRMRYNQSDRDGVVAPTRALIAEELAEIVARQSSAYPGLDWPAVTRLVLDQR
PLRSKGAGPCAFLPGEDRALRALPTVQDFIIRQTLANLRLPSTSADEPRPLTDEEHAKALALLS
TARFVEWPALRRALGLKRGVKFTAETERNGAKQAARGTAGNLTEAILAPLIPGWSGWDLDRKDR
VFSDLWAARQDRSALLALIGDPRGPTRVTEDETAEAVADAIQIVLPTGRASLSAKAARAIAQAM
APGIGYDEAVTLALGLHHSHRPRQERLARLPYYAAALPDVGLDGDPVGPPPAEDDGAAAEAYYG
RIGNISVHIALNETRKIVNALLHRHGPILRLVMVETTRELKAGADERKRMIAEQAERERENAEI
DVELRKSDRWMANARERRQRVRLARRQNNLCPYTSTPIGHADLLGDAYDIDHVIPLARGGRDSL
DNMVLCQSDANKTKGDKTPWEAFHDKPGWIAQRDDFLARLDPQTAKALAWRFADDAGERVARKS
AEDEDQGFLPRQLTDTGYIARVALRYLSLVTNEPNAVVATNGRLTGLLRLAWDITPGPAPRDLL
PTPRDALRDDTAARRFLDGLTPPPLAKAVEGAVQARLAALGRSRVADAGLADALGLTLASLGGG
GKNRADHRHHFIDAAMIAVTTRGLINQINQASGAGRILDLRKWPRTNFEPPYPTFRAEVMKQWD
HIHPSIRPAHRDGGSLHAATVFGVRNRPDARVLVQRKPVEKLFLDANAKPLPADKIAEIIDGFA
SPRMAKRFKALLARYQAAHPEVPPALAALAVARDPAFGPRGMTANTVIAGRSDGDGEDAGLITP
FRANPKAAVRTMGNAVYEVWEIQVKGRPRWTHRVLTRFDRTQPAPPPPPENARLVMRLRRGDLV
YWPLESGDRLFLVKKMAVDGRLALWPARLATGKATALYAQLSCPNINLNGDQGYCVQSAEGIRK
EKIRTTSCTALGRLRLSKKAT
SEQ ID NO: 367
MKYTLGLDVGIASVGWAVIDKDNNKIIDLGVRCFDKAEESKTGESLATARRIARGMRRRISRRS
QRLRLVKKLFVQYEIIKDSSEFNRIFDTSRDGWKDPWELRYNALSRILKPYELVQVLTHITKRR
GFKSNRKEDLSTTKEGVVITSIKNNSEMLRTKNYRTIGEMIFMETPENSNKRNKVDEYIHTIAR
EDLLNEIKYIFSIQRKLGSPFVTEKLEHDFLNIWEFQRPFASGDSILSKVGKCTLLKEELRAPT
SCYTSEYFGLLQSINNLVLVEDNNTLTLNNDQRAKIIEYAHFKNEIKYSEIRKLLDIEPEILFK
AHNLTHKNPSGNNESKKFYEMKSYHKLKSTLPTDIWGKLHSNKESLDNLFYCLTVYKNDNEIKD
YLQANNLDYLIEYIAKLPTFNKFKHLSLVAMKRIIPFMEKGYKYSDACNMAELDFTGSSKLEKC
NKLTVEPIIENVTNPVVIRALTQARKVINAIIQKYGLPYMVNIELAREAGMTRQDRDNLKKEHE
NNRKAREKISDLIRQNGRVASGLDILKWRLWEDQGGRCAYSGKPIPVCDLLNDSLTQIDHIYPY
SRSMDDSYMNKVLVLTDENQNKRSYTPYEVWGSTEKWEDFEARIYSMHLPQSKEKRLLNRNFIT
KDLDSFISRNLNDTRYISRFLKNYIESYLQFSNDSPKSCVVCVNGQCTAQLRSRWGLNKNREES
DLHHALDAAVIACADRKIIKEITNYYNERENHNYKVKYPLPWHSFRQDLMETLAGVFISRAPRR
KITGPAHDETIRSPKHFNKGLTSVKIPLTTVTLEKLETMVKNTKGGISDKAVYNVLKNRLIEHN
NKPLKAFAEKIYKPLKNGTNGAIIRSIRVETPSYTGVFRNEGKGISDNSLMVRVDVFKKKDKYY
LVPIYVAHMIKKELPSKAIVPLKPESQWELIDSTHEFLFSLYQNDYLVIKTKKGITEGYYRSCH
RGTGSLSLMPHFANNKNVKIDIGVRTAISIEKYNVDILGNKSIVKGEPRRGMEKYNSFKSN
SEQ ID NO: 368
MIRTLGIDIGIASIGWAVIEGEYTDKGLENKEIVASGVRVFTKAENPKNKESLALPRTLARSAR
RRNARKKGRIQQVKHYLSKALGLDLECFVQGEKLATLFQTSKDFLSPWELRERALYRVLDKEEL
ARVILHIAKRRGYDDITYGVEDNDSGKIKKAIAENSKRIKEEQCKTIGEMMYKLYFQKSLNVRN
KKESYNRCVGRSELREELKTIFQIQQELKSPWVNEELIYKLLGNPDAQSKQEREGLIFYQRPLK
GFGDKIGKCSHIKKGENSPYRACKHAPSAEEFVALTKSINFLKNLTNRHGLCFSQEDMCVYLGK
ILQEAQKNEKGLTYSKLKLLLDLPSDFEFLGLDYSGKNPEKAVFLSLPSTFKLNKITQDRKTQD
KIANILGANKDWEAILKELESLQLSKEQIQTIKDAKLNFSKHINLSLEALYHLLPLMREGKRYD
EGVEILQERGIFSKPQPKNRQLLPPLSELAKEESYFDIPNPVLRRALSEFRKVVNALLEKYGGF
HYFHIELTRDVCKAKSARMQLEKINKKNKSENDAASQLLEVLGLPNTYNNRLKCKLWKQQEEYC
LYSGEKITIDHLKDQRALQIDHAFPLSRSLDDSQSNKVLCLTSSNQEKSNKTPYEWLGSDEKKW
DMYVGRVYSSNFSPSKKRKLTQKNFKERNEEDFLARNLVDTGYIGRVTKEYIKHSLSFLPLPDG
KKEHIRIISGSMTSTMRSFWGVQEKNRDHHLHHAQDAIIIACIEPSMIQKYTTYLKDKETHRLK
SHQKAQILREGDHKLSLRWPMSNFKDKIQESIQNIIPSHHVSHKVTGELHQETVRTKEFYYQAF
GGEEGVKKALKFGKIREINQGIVDNGAMVRVDIFKSKDKGKFYAVPIYTYDFAIGKLPNKAIVQ
GKKNGIIKDWLEMDENYEFCFSLFKNDCIKIQTKEMQEAVLAIYKSTNSAKATIELEHLSKYAL
KNEDEEKMFTDTDKEKNKTMTRESCGIQGLKVFQKVKLSVLGEVLEHKPRNRQNIALKTTPKHV
SEQ ID NO: 369
MKYSIGLDIGIASVGWSVINKDKERIEDMGVRIFQKAENPKDGSSLASSRREKRGSRRRNRRKK
HRLDRIKNILCESGLVKKNEIEKIYKNAYLKSPWELRAKSLEAKISNKEIAQILLHIAKRRGFK
SFRKTDRNADDTGKLLSGIQENKKIMEEKGYLTIGDMVAKDPKFNTHVRNKAGSYLFSFSRKLL
EDEVRKIQAKQKELGNTHFTDDVLEKYIEVFNSQRNFDEGPSKPSPYYSEIGQIAKMIGNCTFE
SSEKRTAKNTWSGERFVFLQKLNNFRIVGLSGKRPLTEEERDIVEKEVYLKKEVRYEKLRKILY
LKEEERFGDLNYSKDEKQDKKTEKTKFISLIGNYTIKKLNLSEKLKSEIEEDKSKLDKIIEILT
FNKSDKTIESNLKKLELSREDIEILLSEEFSGTLNLSLKAIKKILPYLEKGLSYNEACEKADYD
YKNNGIKFKRGELLPVVDKDLIANPVVLRAISQTRKVVNAIIRKYGTPHTIHVEVARDLAKSYD
DRQTIIKENKKRELENEKTKKFISEEFGIKNVKGKLLLKYRLYQEQEGRCAYSRKELSLSEVIL
DESMTDIDHIIPYSRSMDDSYSNKVLVLSGENRKKSNLLPKEYFDRQGRDWDTFVLNVKAMKIH
PRKKSNLLKEKFTREDNKDWKSRALNDTRYISRFVANYLENALEYRDDSPKKRVFMIPGQLTAQ
LRARWRLNKVRENGDLHHALDAAVVAVTDQKAINNISNISRYKELKNCKDVIPSIEYHADEETG
EVYFEEVKDTRFPMPWSGFDLELQKRLESENPREEFYNLLSDKRYLGWFNYEEGFIEKLRPVFV
SRMPNRGVKGQAHQETIRSSKKISNQIAVSKKPLNSIKLKDLEKMQGRDTDRKLYEALKNRLEE
YDDKPEKAFAEPFYKPTNSGKRGPLVRGIKVEEKQNVGVYVNGGQASNGSMVRIDVFRKNGKFY
TVPIYVHQTLLKELPNRAINGKPYKDWDLIDGSFEFLYSFYPNDLIEIEFGKSKSIKNDNKLTK
TEIPEVNLSEVLGYYRGMDTSTGAATIDTQDGKIQMRIGIKTVKNIKKYQVDVLGNVYKVKREK
RQTF
SEQ ID NO: 370
MSKKVSRRYEEQAQEICQRLGSRPYSIGLDLGVGSIGVAVAAYDPIKKQPSDLVFVSSRIFIPS
TGAAERRQKRGQRNSLRHRANRLKFLWKLLAERNLMLSYSEQDVPDPARLRFEDAVVRANPYEL
RLKGLNEQLTLSELGYALYHIANHRGSSSVRTFLDEEKSSDDKKLEEQQAMTEQLAKEKGISTF
IEVLTAFNTNGLIGYRNSESVKSKGVPVPTRDIISNEIDVLLQTQKQFYQEILSDEYCDRIVSA
ILFENEKIVPEAGCCPYFPDEKKLPRCHFLNEERRLWEAINNARIKMPMQEGAAKRYQSASFSD
EQRHILFHIARSGTDITPKLVQKEFPALKTSIIVLQGKEKAIQKIAGFRFRRLEEKSFWKRLSE
EQKDDFFSAWTNTPDDKRLSKYLMKHLLLTENEVVDALKTVSLIGDYGPIGKTATQLLMKHLED
GLTYTEALERGMETGEFQELSVWEQQSLLPYYGQILTGSTQALMGKYWHSAFKEKRDSEGFFKP
NTNSDEEKYGRIANPVVHQTLNELRKLMNELITILGAKPQEITVELARELKVGAEKREDIIKQQ
TKQEKEAVLAYSKYCEPNNLDKRYIERFRLLEDQAFVCPYCLEHISVADIAAGRADVDHIFPRD
DTADNSYGNKVVAHRQCNDIKGKRTPYAAFSNTSAWGPIMHYLDETPGMWRKRRKFETNEEEYA
KYLQSKGFVSRFESDNSYIAKAAKEYLRCLFNPNNVTAVGSLKGMETSILRKAWNLQGIDDLLG
SRHWSKDADTSPTMRKNRDDNRHHGLDAIVALYCSRSLVQMINTMSEQGKRAVEIEAMIPIPGY
ASEPNLSFEAQRELFRKKILEFMDLHAFVSMKTDNDANGALLKDTVYSILGADTQGEDLVFVVK
KKIKDIGVKIGDYEEVASAIRGRITDKQPKWYPMEMKDKIEQLQSKNEAALQKYKESLVQAAAV
LEESNRKLIESGKKPIQLSEKTISKKALELVGGYYYLISNNKRTKTFVVKEPSNEVKGFAFDTG
SNLCLDFYHDAQGKLCGEIIRKIQAMNPSYKPAYMKQGYSLYVRLYQGDVCELRASDLTEAESN
LAKTTHVRLPNAKPGRTFVIIITFTEMGSGYQIYFSNLAKSKKGQDTSFTLTTIKNYDVRKVQL
SSAGLVRYVSPLLVDKIEKDEVALCGE
SEQ ID NO: 371
MNQKFILGLDIGITSVGYGLIDYETKNIIDAGVRLFPEANVENNEGRRSKRGSRRLKRRRIHRL
ERVKKLLEDYNLLDQSQIPQSTNPYAIRVKGLSEALSKDELVIALLHIAKRRGIHKIDVIDSND
DVGNELSTKEQLNKNSKLLKDKFVCQIQLERMNEGQVRGEKNRFKTADIIKEIIQLLNVQKNFH
QLDENFINKYIELVEMRREYFEGPGKGSPYGWEGDPKAWYETLMGHCTYFPDELRSVKYAYSAD
LFNALNDLNNLVIQRDGLSKLEYHEKYHIIENVFKQKKKPTLKQIANEINVNPEDIKGYRITKS
GKPQFTEFKLYHDLKSVLFDQSILENEDVLDQIAEILTIYQDKDSIKSKLTELDILLNEEDKEN
IAQLTGYTGTHRLSLKCIRLVLEEQWYSSRNQMEIFTHLNIKPKKINLTAANKIPKAMIDEFIL
SPVVKRTFGQAINLINKIIEKYGVPEDIIIELARENNSKDKQKFINEMQKKNENTRKRINEIIG
KYGNQNAKRLVEKIRLHDEQEGKCLYSLESIPLEDLLNNPNHYEVDHIIPRSVSFDNSYHNKVL
VKQSENSKKSNLTPYQYFNSGKSKLSYNQFKQHILNLSKSQDRISKKKKEYLLEERDINKFEVQ
KEFINRNLVDTRYATRELTNYLKAYFSANNMNVKVKTINGSFTDYLRKVWKFKKERNHGYKHHA
EDALIIANADFLFKENKKLKAVNSVLEKPEIESKQLDIQVDSEDNYSEMFIIPKQVQDIKDFRN
FKYSHRVDKKPNRQLINDTLYSTRKKDNSTYIVQTIKDIYAKDNTTLKKQFDKSPEKFLMYQHD
PRTFEKLEVIMKQYANEKNPLAKYHEETGEYLTKYSKKNNGPIVKSLKYIGNKLGSHLDVTHQF
KSSTKKLVKLSIKPYRFDVYLTDKGYKFITISYLDVLKKDNYYYIPEQKYDKLKLGKAIDKNAK
FIASFYKNDLIKLDGEIYKIIGVNSDTRNMIELDLPDIRYKEYCELNNIKGEPRIKKTIGKKVN
SIEKLTTDVLGNVFTNTQYTKPQLLFKRGN
SEQ ID NO: 372
MIMKLEKWRLGLDLGTNSIGWSVFSLDKDNSVQDLIDMGVRIFSDGRDPKTKEPLAVARRTARS
QRKLIYRRKLRRKQVFKFLQEQGLFPKTKEECMTLKSLNPYELRIKALDEKLEPYELGRALFNL
AVRRGFKSNRKDGSREEVSEKKSPDEIKTQADMQTHLEKAIKENGCRTITEFLYKNQGENGGIR
FAPGRMTYYPTRKMYEEEFNLIRSKQEKYYPQVDWDDIYKAIFYQRPLKPQQRGYCIYENDKER
TFKAMPCSQKLRILQDIGNLAYYEGGSKKRVELNDNQDKVLYELLNSKDKVTFDQMRKALCLAD
SNSFNLEENRDFLIGNPTAVKMRSKNRFGKLWDEIPLEEQDLIIETIITADEDDAVYEVIKKYD
LTQEQRDFIVKNTILQSGTSMLCKEVSEKLVKRLEEIADLKYHEAVESLGYKFADQTVEKYDLL
PYYGKVLPGSTMEIDLSAPETNPEKHYGKISNPTVHVALNQTRVVVNALIKEYGKPSQIAIELS
RDLKNNVEKKAEIARKQNQRAKENIAINDTISALYHTAFPGKSFYPNRNDRMKYRLWSELGLGN
KCIYCGKGISGAELFTKEIEIEHILPFSRTLLDAESNLTVAHSSCNAFKAERSPFEAFGTNPSG
YSWQEIIQRANQLKNTSKKNKFSPNAMDSFEKDSSFIARQLSDNQYIAKAALRYLKCLVENPSD
VWTTNGSMTKLLRDKWEMDSILCRKFTEKEVALLGLKPEQIGNYKKNRFDHRHHAIDAVVIGLT
DRSMVQKLATKNSHKGNRIEIPEFPILRSDLIEKVKNIVVSFKPDHGAEGKLSKETLLGKIKLH
GKETFVCRENIVSLSEKNLDDIVDEIKSKVKDYVAKHKGQKIEAVLSDFSKENGIKKVRCVNRV
QTPIEITSGKISRYLSPEDYFAAVIWEIPGEKKTFKAQYIRRNEVEKNSKGLNVVKPAVLENGK
PHPAAKQVCLLHKDDYLEFSDKGKMYFCRIAGYAATNNKLDIRPVYAVSYCADWINSTNETMLT
GYWKPTPTQNWVSVNVLFDKQKARLVTVSPIGRVFRK
SEQ ID NO: 373
MSSKAIDSLEQLDLFKPQEYTLGLDLGIKSIGWAILSGERIANAGVYLFETAEELNSTGNKLIS
KAAERGRKRRIRRMLDRKARRGRHIRYLLEREGLPTDELEEVVVHQSNRTLWDVRAEAVERKLT
KQELAAVLFHLVRHRGYFPNTKKLPPDDESDSADEEQGKINRATSRLREELKASDCKTIGQFLA
QNRDRQRNREGDYSNLMARKLVFEEALQILAFQRKQGHELSKDFEKTYLDVLMGQRSGRSPKLG
NCSLIPSELRAPSSAPSTEWFKFLQNLGNLQISNAYREEWSIDAPRRAQIIDACSQRSTSSYWQ
IRRDFQIPDEYRFNLVNYERRDPDVDLQEYLQQQERKTLANFRNWKQLEKIIGTGHPIQTLDEA
ARLITLIKDDEKLSDQLADLLPEASDKAITQLCELDFTTAAKISLEAMYRILPHMNQGMGFFDA
CQQESLPEIGVPPAGDRVPPFDEMYNPVVNRVLSQSRKLINAVIDEYGMPAKIRVELARDLGKG
RELRERIKLDQLDKSKQNDQRAEDFRAEFQQAPRGDQSLRYRLWKEQNCTCPYSGRMIPVNSVL
SEDTQIDHILPISQSFDNSLSNKVLCFTEENAQKSNRTPFEYLDAADFQRLEAISGNWPEAKRN
KLLHKSFGKVAEEWKSRALNDTRYLTSALADHLRHHLPDSKIQTVNGRITGYLRKQWGLEKDRD
KHTHHAVDAIVVACTTPAIVQQVTLYHQDIRRYKKLGEKRPTPWPETFRQDVLDVEEEIFITRQ
PKKVSGGIQTKDTLRKHRSKPDRQRVALTKVKLADLERLVEKDASNRNLYEHLKQCLEESGDQP
TKAFKAPFYMPSGPEAKQRPILSKVTLLREKPEPPKQLTELSGGRRYDSMAQGRLDIYRYKPGG
KRKDEYRVVLQRMIDLMRGEENVHVFQKGVPYDQGPEIEQNYTFLFSLYFDDLVEFQRSADSEV
IRGYYRTFNIANGQLKISTYLEGRQDFDFFGANRLAHFAKVQVNLLGKVIK
SEQ ID NO: 374
MRSLRYRLALDLGSTSLGWALFRLDACNRPTAVIKAGVRIFSDGRNPKDGSSLAVTRRAARAMR
RRRDRLLKRKTRMQAKLVEHGFFPADAGKRKALEQLNPYALRAKGLQEALLPGEFARALFHINQ
RRGFKSNRKTDKKDNDSGVLKKAIGQLRQQMAEQGSRTVGEYLWTRLQQGQGVRARYREKPYTT
EEGKKRIDKSYDLYIDRAMIEQEFDALWAAQAAFNPTLFHEAARADLKDTLLHQRPLRPVKPGR
CTLLPEEERAPLALPSTQRFRIHQEVNHLRLLDENLREVALTLAQRDAVVTALETKAKLSFEQI
RKLLKLSGSVQFNLEDAKRTELKGNATSAALARKELFGAAWSGFDEALQDEIVWQLVTEEGEGA
LIAWLQTHTGVDEARAQAIVDVSLPEGYGNLSRKALARIVPALRAAVITYDKAVQAAGFDHHSQ
LGFEYDASEVEDLVHPETGEIRSVFKQLPYYGKALQRHVAFGSGKPEDPDEKRYGKIANPTVHI
GLNQVRMVVNALIRRYGRPTEVVIELARDLKQSREQKVEAQRRQADNQRRNARIRRSIAEVLGI
GEERVRGSDIQKWICWEELSFDAADRRCPYSGVQISAAMLLSDEVEVEHILPFSKTLDDSLNNR
TVAMRQANRIKRNRTPWDARAEFEAQGWSYEDILQRAERMPLRKRYRFAPDGYERWLGDDKDFL
ARALNDTRYLSRVAAEYLRLVCPGTRVIPGQLTALLRGKFGLNDVLGLDGEKNRNDHRHHAVDA
CVIGVTDQGLMQRFATASAQARGDGLTRLVDGMPMPWPTYRDHVERAVRHIWVSHRPDHGFEGA
MMEETSYGIRKDGSIKQRRKADGSAGREISNLIRIHEATQPLRHGVSADGQPLAYKGYVGGSNY
CIEITVNDKGKWEGEVISTFRAYGVVRAGGMGRLRNPHEGQNGRKLIMRLVIGDSVRLEVDGAE
RTMRIVKISGSNGQIFMAPIHEANVDARNTDKQDAFTYTSKYAGSLQKAKTRRVTISPIGEVRD
PGFKG
SEQ ID NO: 375
MARPAFRAPRREHVNGWTPDPHRISKPFFILVSWHLLSRVVIDSSSGCFPGTSRDHTDKFAEWE
CAVQPYRLSFDLGTNSIGWGLLNLDRQGKPREIRALGSRIFSDGRDPQDKASLAVARRLARQMR
RRRDRYLTRRTRLMGALVRFGLMPADPAARKRLEVAVDPYLARERATRERLEPFEIGRALFHLN
QRRGYKPVRTATKPDEEAGKVKEAVERLEAAIAAAGAPTLGAWFAWRKTRGETLRARLAGKGKE
AAYPFYPARRMLEAEFDTLWAEQARHHPDLLTAEAREILRHRIFHQRPLKPPPVGRCTLYPDDG
RAPRALPSAQRLRLFQELASLRVIHLDLSERPLTPAERDRIVAFVQGRPPKAGRKPGKVQKSVP
FEKLRGLLELPPGTGFSLESDKRPELLGDETGARIAPAFGPGWTALPLEEQDALVELLLTEAEP
ERAIAALTARWALDEATAAKLAGATLPDFHGRYGRRAVAELLPVLERETRGDPDGRVRPIRLDE
AVKLLRGGKDHSDFSREGALLDALPYYGAVLERHVAFGTGNPADPEEKRVGRVANPTVHIALNQ
LRHLVNAILARHGRPEEIVIELARDLKRSAEDRRREDKRQADNQKRNEERKRLILSLGERPTPR
NLLKLRLWEEQGPVENRRCPYSGETISMRMLLSEQVDIDHILPFSVSLDDSAANKVVCLREANR
IKRNRSPWEAFGHDSERWAGILARAEALPKNKRWRFAPDALEKLEGEGGLRARHLNDTRHLSRL
AVEYLRCVCPKVRVSPGRLTALLRRRWGIDAILAEADGPPPEVPAETLDPSPAEKNRADHRHHA
LDAVVIGCIDRSMVQRVQLAAASAEREAAAREDNIRRVLEGFKEEPWDGFRAELERRARTIVVS
HRPEHGIGGALHKETAYGPVDPPEEGFNLVVRKPIDGLSKDEINSVRDPRLRRALIDRLAIRRR
DANDPATALAKAAEDLAAQPASRGIRRVRVLKKESNPIRVEHGGNPSGPRSGGPFHKLLLAGEV
HHVDVALRADGRRWVGHWVTLFEAHGGRGADGAAAPPRLGDGERFLMRLHKGDCLKLEHKGRVR
VMQVVKLEPSSNSVVVVEPHQVKTDRSKHVKISCDQLRARGARRVTVDPLGRVRVHAPGARVGI
GGDAGRTAMEPAEDIS
SEQ ID NO: 376
MKRTSLRAYRLGVDLGANSLGWFVVWLDDHGQPEGLGPGGVRIFPDGRNPQSKQSNAAGRRLAR
SARRRRDRYLQRRGKLMGLLVKHGLMPADEPARKRLECLDPYGLRAKALDEVLPLHHVGRALFH
LNQRRGLFANRAIEQGDKDASAIKAAAGRLQTSMQACGARTLGEFLNRRHQLRATVRARSPVGG
DVQARYEFYPTRAMVDAEFEAIWAAQAPHHPTMTAEAHDTIREAIFSQRAMKRPSIGKCSLDPA
TSQDDVDGFRCAWSHPLAQRFRIWQDVRNLAVVETGPTSSRLGKEDQDKVARALLQTDQLSFDE
IRGLLGLPSDARFNLESDRRDHLKGDATGAILSARRHFGPAWHDRSLDRQIDIVALLESALDEA
AIIASLGTTHSLDEAAAQRALSALLPDGYCRLGLRAIKRVLPLMEAGRTYAEAASAAGYDHALL
PGGKLSPTGYLPYYGQWLQNDVVGSDDERDTNERRWGRLPNPTVHIGIGQLRRVVNELIRWHGP
PAEITVELTRDLKLSPRRLAELEREQAENQRKNDKRTSLLRKLGLPASTHNLLKLRLWDEQGDV
ASECPYTGEAIGLERLVSDDVDIDHLIPFSISWDDSAANKVVCMRYANREKGNRTPFEAFGHRQ
GRPYDWADIAERAARLPRGKRWRFGPGARAQFEELGDFQARLLNETSWLARVAKQYLAAVTHPH
RIHVLPGRLTALLRATWELNDLLPGSDDRAAKSRKDHRHHAIDALVAALTDQALLRRMANAHDD
TRRKIEVLLPWPTFRIDLETRLKAMLVSHKPDHGLQARLHEDTAYGTVEHPETEDGANLVYRKT
FVDISEKEIDRIRDRRLRDLVRAHVAGERQQGKTLKAAVLSFAQRRDIAGHPNGIRHVRLTKSI
KPDYLVPIRDKAGRIYKSYNAGENAFVDILQAESGRWIARATTVFQANQANESHDAPAAQPIMR
VFKGDMLRIDHAGAEKFVKIVRLSPSNNLLYLVEHHQAGVFQTRHDDPEDSFRWLFASFDKLRE
WNAELVRIDTLGQPWRRKRGLETGSEDATRIGWTRPKKWP
SEQ ID NO: 377
MERIFGFDIGTTSIGFSVIDYSSTQSAGNIQRLGVRIFPEARDPDGTPLNQQRRQKRMMRRQLR
RRRIRRKALNETLHEAGFLPAYGSADWPVVMADEPYELRRRGLEEGLSAYEFGRAIYHLAQHRH
FKGRELEESDTPDPDVDDEKEAANERAATLKALKNEQTTLGAWLARRPPSDRKRGIHAHRNVVA
EEFERLWEVQSKFHPALKSEEMRARISDTIFAQRPVFWRKNTLGECRFMPGEPLCPKGSWLSQQ
RRMLEKLNNLAIAGGNARPLDAEERDAILSKLQQQASMSWPGVRSALKALYKQRGEPGAEKSLK
FNLELGGESKLLGNALEAKLADMFGPDWPAHPRKQEIRHAVHERLWAADYGETPDKKRVIILSE
KDRKAHREAAANSFVADFGITGEQAAQLQALKLPTGWEPYSIPALNLFLAELEKGERFGALVNG
PDWEGWRRTNFPHRNQPTGEILDKLPSPASKEERERISQLRNPTVVRTQNELRKVVNNLIGLYG
KPDRIRIEVGRDVGKSKREREEIQSGIRRNEKQRKKATEDLIKNGIANPSRDDVEKWILWKEGQ
ERCPYTGDQIGFNALFREGRYEVEHIWPRSRSFDNSPRNKTLCRKDVNIEKGNRMPFEAFGHDE
DRWSAIQIRLQGMVSAKGGTGMSPGKVKRFLAKTMPEDFAARQLNDTRYAAKQILAQLKRLWPD
MGPEAPVKVEAVTGQVTAQLRKLWTLNNILADDGEKTRADHRHHAIDALTVACTHPGMTNKLSR
YWQLRDDPRAEKPALTPPWDTIRADAEKAVSEIVVSHRVRKKVSGPLHKETTYGDTGTDIKTKS
GTYRQFVTRKKIESLSKGELDEIRDPRIKEIVAAHVAGRGGDPKKAFPPYPCVSPGGPEIRKVR
LTSKQQLNLMAQTGNGYADLGSNHHIAIYRLPDGKADFEIVSLFDASRRLAQRNPIVQRTRADG
ASFVMSLAAGEAIMIPEGSKKGIWIVQGVWASGQVVLERDTDADHSTTTRPMPNPILKDDAKKV
SIDPIGRVRPSND
SEQ ID NO: 378
MNKRILGLDTGTNSLGWAVVDWDEHAQSYELIKYGDVIFQEGVKIEKGIESSKAAERSGYKAIR
KQYFRRRLRKIQVLKVLVKYHLCPYLSDDDLRQWHLQKQYPKSDELMLWQRTSDEEGKNPYYDR
HRCLHEKLDLTVEADRYTLGRALYHLTQRRGFLSNRLDTSADNKEDGVVKSGISQLSTEMEEAG
CEYLGDYFYKLYDAQGNKVRIRQRYTDRNKHYQHEFDAICEKQELSSELIEDLQRAIFFQLPLK
SQRHGVGRCTFERGKPRCADSHPDYEEFRMLCFVNNIQVKGPHDLELRPLTYEEREKIEPLFFR
KSKPNFDFEDIAKALAGKKNYAWIHDKEERAYKFNYRMTQGVPGCPTIAQLKSIFGDDWKTGIA
ETYTLIQKKNGSKSLQEMVDDVWNVLYSFSSVEKLKEFAHHKLQLDEESAEKFAKIKLSHSFAA
LSLKAIRKFLPFLRKGMYYTHASFFANIPTIVGKEIWNKEQNRKYIMENVGELVFNYQPKHREV
QGTIEMLIKDFLANNFELPAGATDKLYHPSMIETYPNAQRNEFGILQLGSPRTNAIRNPMAMRS
LHILRRVVNQLLKESIIDENTEVHVEYARELNDANKRRAIADRQKEQDKQHKKYGDEIRKLYKE
ETGKDIEPTQTDVLKFQLWEEQNHHCLYTGEQIGITDFIGSNPKFDIEHTIPQSVGGDSTQMNL
TLCDNRFNREVKKAKLPTELANHEEILTRIEPWKNKYEQLVKERDKQRTFAGMDKAVKDIRIQK
RHKLQMEIDYWRGKYERFTMTEVPEGFSRRQGTGIGLISRYAGLYLKSLFHQADSRNKSNVYVV
KGVATAEFRKMWGLQSEYEKKCRDNHSHHCMDAITIACIGKREYDLMAEYYRMEETFKQGRGSK
PKFSKPWATFTEDVLNIYKNLLVVHDTPNNMPKHTKKYVQTSIGKVLAQGDTARGSLHLDTYYG
AIERDGEIRYVVRRPLSSFTKPEELENIVDETVKRTIKEAIADKNFKQAIAEPIYMNEEKGILI
KKVRCFAKSVKQPINIRQHRDLSKKEYKQQYHVMNENNYLLAIYEGLVKNKVVREFEIVSYIEA
AKYYKRSQDRNIFSSIVPTHSTKYGLPLKTKLLMGQLVLMFEENPDEIQVDNTKDLVKRLYKVV
GIEKDGRIKFKYHQEARKEGLPIFSTPYKNNDDYAPIFRQSINNINILVDGIDFTIDILGKVTL
KE
SEQ ID NO: 379
MNYKMGLDIGIASVGWAVINLDLKRIEDLGVRIFDKAEHPQNGESLALPRRIARSARRRLRRRK
HRLERIRRLLVSENVLTKEEMNLLFKQKKQIDVWQLRVDALERKLNNDELARVLLHLAKRRGFK
SNRKSERNSKESSEFLKNIEENQSILAQYRSVGEMIVKDSKFAYHKRNKLDSYSNMIARDDLER
EIKLIFEKQREFNNPVCTERLEEKYLNIWSSQRPFASKEDIEKKVGFCTFEPKEKRAPKATYTF
QSFIVWEHINKLRLVSPDETRALTEIERNLLYKQAFSKNKMTYYDIRKLLNLSDDIHFKGLLYD
PKSSLKQIENIRFLELDSYHKIRKCIENVYGKDGIRMFNETDIDTFGYALTIFKDDEDIVAYLQ
NEYITKNGKRVSNLANKVYDKSLIDELLNLSFSKFAHLSMKAIRNILPYMEQGEIYSKACELAG
YNFTGPKKKEKALLLPVIPNIANPVVMRALTQSRKVVNAIIKKYGSPVSIHIELARDLSHSFDE
RKKIQKDQTENRKKNETAIKQLIEYELTKNPTGLDIVKFKLWSEQQGRCMYSLKPIELERLLEP
GYVEVDHILPYSRSLDDSYANKVLVLTKENREKGNHTPVEYLGLGSERWKKFEKFVLANKQFSK
KKKQNLLRLRYEETEEKEFKERNLNDTRYISKFFANFIKEHLKFADGDGGQKVYTINGKITAHL
RSRWDFNKNREESDLHHAVDAVIVACATQGMIKKITEFYKAREQNKESAKKKEPIFPQPWPHFA
DELKARLSKFPQESIEAFALGNYDRKKLESLRPVFVSRMPKRSVTGAAHQETLRRCVGIDEQSG
KIQTAVKTKLSDIKLDKDGHFPMYQKESDPRTYEAIRQRLLEHNNDPKKAFQEPLYKPKKNGEP
GPVIRTVKIIDTKNKVVHLDGSKTVAYNSNIVRTDVFEKDGKYYCVPVYTMDIMKGTLPNKAIE
ANKPYSEWKEMTEEYTFQFSLFPNDLVRIVLPREKTIKTSTNEEIIIKDIFAYYKTIDSATGGL
ELISHDRNFSLRGVGSKTLKRFEKYQVDVLGNIHKVKGEKRVGLAAPTNQKKGKTVDSLQSVSD
SEQ ID NO: 380
MRRLGLDLGTNSIGWCLLDLGDDGEPVSIFRTGARIFSDGRDPKSLGSLKATRREARLTRRRRD
RFIQRQKNLINALVKYGLMPADEIQRQALAYKDPYPIRKKALDEAIDPYEMGRAIFHINQRRGF
KSNRKSADNEAGVVKQSIADLEMKLGEAGARTIGEFLADRQATNDTVRARRLSGTNALYEFYPD
RYMLEQEFDTLWAKQAAFNPSLYIEAARERLKEIVFFQRKLKPQEVGRCIFLSDEDRISKALPS
FQRFRIYQELSNLAWIDHDGVAHRITASLALRDHLFDELEHKKKLTFKAMRAILRKQGVVDYPV
GFNLESDNRDHLIGNLTSCIMRDAKKMIGSAWDRLDEEEQDSFILMLQDDQKGDDEVRSILTQQ
YGLSDDVAEDCLDVRLPDGHGSLSKKAIDRILPVLRDQGLIYYDAVKEAGLGEANLYDPYAALS
DKLDYYGKALAGHVMGASGKFEDSDEKRYGTISNPTVHIALNQVRAVVNELIRLHGKPDEVVIE
IGRDLPMGADGKRELERFQKEGRAKNERARDELKKLGHIDSRESRQKFQLWEQLAKEPVDRCCP
FTGKMMSISDLFSDKVEIEHLLPFSLTLDDSMANKTVCFRQANRDKGNRAPFDAFGNSPAGYDW
QEILGRSQNLPYAKRWRFLPDAMKRFEADGGFLERQLNDTRYISRYTTEYISTIIPKNKIWVVT
GRLTSLLRGFWGLNSILRGHNTDDGTPAKKSRDDHRHHAIDAIVVGMTSRGLLQKVSKAARRSE
DLDLTRLFEGRIDPWDGFRDEVKKHIDAIIVSHRPRKKSQGALHNDTAYGIVEHAENGASTVVH
RVPITSLGKQSDIEKVRDPLIKSALLNETAGLSGKSFENAVQKWCADNSIKSLRIVETVSIIPI
TDKEGVAYKGYKGDGNAYMDIYQDPTSSKWKGEIVSRFDANQKGFIPSWQSQFPTARLIMRLRI
NDLLKLQDGEIEEIYRVQRLSGSKILMAPHTEANVDARDRDKNDTFKLTSKSPGKLQSASARKV
HISPTGLIREG
SEQ ID NO: 381
MKNILGLDLGLSSIGWSVIRENSEEQELVAMGSRVVSLTAAELSSFTQGNGVSINSQRTQKRTQ
RKGYDRYQLRRTLLRNKLDTLGMLPDDSLSYLPKLQLWGLRAKAVTQRIELNELGRVLLHLNQK
RGYKSIKSDFSGDKKITDYVKTVKTRYDELKEMRLTIGELFFRRLTENAFFRCKEQVYPRQAYV
EEFDCIMNCQRKFYPDILTDETIRCIRDEIIYYQRPLKSCKYLVSRCEFEKRFYLNAAGKKTEA
GPKVSPRTSPLFQVCRLWESINNIVVKDRRNEIVFISAEQRAALFDFLNTHEKLKGSDLLKLLG
LSKTYGYRLGEQFKTGIQGNKTRVEIERALGNYPDKKRLLQFNLQEESSSMVNTETGEIIPMIS
LSFEQEPLYRLWHVLYSIDDREQLQSVLRQKFGIDDDEVLERLSAIDLVKAGFGNKSSKAIRRI
LPFLQLGMNYAEACEAAGYNHSNNYTKAENEARALLDRLPAIKKNELRQPVVEKILNQMVNVVN
ALMEKYGRFDEIRVELARELKQSKEERSNTYKSINKNQRENEQIAKRIVEYGVPTRSRIQKYKM
WEESKHCCIYCGQPVDVGDFLRGFDVEVEHIIPKSLYFDDSFANKVCSCRSCNKEKNNRTAYDY
MKSKGEKALSDYVERVNTMYTNNQISKTKWQNLLTPVDKISIDFIDRQLRESQYIARKAKEILT
SICYNVTATSGSVTSFLRHVWGWDTVLHDLNFDRYKKVGLTEVIEVNHRGSVIRREQIKDWSKR
FDHRHHAIDALTIACTKQAYIQRLNNLRAEEGPDFNKMSLERYIQSQPHFSVAQVREAVDRILV
SFRAGKRAVTPGKRYIRKNRKRISVQSVLIPRGALSEESVYGVIHVWEKDEQGHVIQKQRAVMK
YPITSINREMLDKEKVVDKRIHRILSGRLAQYNDNPKEAFAKPVYIDKECRIPIRTVRCFAKPA
INTLVPLKKDDKGNPVAWVNPGNNHHVAIYRDEDGKYKERTVTFWEAVDRCRVGIPAIVTQPDT
IWDNILQRNDISENVLESLPDVKWQFVLSLQQNEMFILGMNEEDYRYAMDQQDYALLNKYLYRV
QKLSKSDYSFRYHTETSVEDKYDGKPNLKLSMQMGKLKRVSIKSLLGLNPHKVHISVLGEIKEI
S
SEQ ID NO: 382
MAEKQHRWGLDIGTNSIGWAVIALIEGRPAGLVATGSRIFSDGRNPKDGSSLAVERRGPRQMRR
RRDRYLRRRDRFMQALINVGLMPGDAAARKALVTENPYVLRQRGLDQALTLPEFGRALFHLNQR
RGFQSNRKTDRATAKESGKVKNAIAAFRAGMGNARTVGEALARRLEDGRPVRARMVGQGKDEHY
ELYIAREWIAQEFDALWASQQRFHAEVLADAARDRLRAILLFQRKLLPVPVGKCFLEPNQPRVA
AALPSAQRFRLMQELNHLRVMTLADKRERPLSFQERNDLLAQLVARPKCGFDMLRKIVFGANKE
AYRFTIESERRKELKGCDTAAKLAKVNALGTRWQALSLDEQDRLVCLLLDGENDAVLADALREH
YGLTDAQIDTLLGLSFEDGHMRLGRSALLRVLDALESGRDEQGLPLSYDKAVVAAGYPAHTADL
ENGERDALPYYGELLWRYTQDAPTAKNDAERKFGKIANPTVHIGLNQLRKLVNALIQRYGKPAQ
IVVELARNLKAGLEEKERIKKQQTANLERNERIRQKLQDAGVPDNRENRLRMRLFEELGQGNGL
GTPCIYSGRQISLQRLFSNDVQVDHILPFSKTLDDSFANKVLAQHDANRYKGNRGPFEAFGANR
DGYAWDDIRARAAVLPRNKRNRFAETAMQDWLHNETDFLARQLTDTAYLSRVARQYLTAICSKD
DVYVSPGRLTAMLRAKWGLNRVLDGVMEEQGRPAVKNRDDHRHHAIDAVVIGATDRAMLQQVAT
LAARAREQDAERLIGDMPTPWPNFLEDVRAAVARCVVSHKPDHGPEGGLHNDTAYGIVAGPFED
GRYRVRHRVSLFDLKPGDLSNVRCDAPLQAELEPIFEQDDARAREVALTALAERYRQRKVWLEE
LMSVLPIRPRGEDGKTLPDSAPYKAYKGDSNYCYELFINERGRWDGELISTFRANQAAYRRFRN
DPARFRRYTAGGRPLLMRLCINDYIAVGTAAERTIFRVVKMSENKITLAEHFEGGTLKQRDADK
DDPFKYLTKSPGALRDLGARRIFVDLIGRVLDPGIKGD
SEQ ID NO: 383
MIERILGVDLGISSLGWAIVEYDKDDEAANRIIDCGVRLFTAAETPKKKESPNKARREARGIRR
VLNRRRVRMNMIKKLFLRAGLIQDVDLDGEGGMFYSKANRADVWELRHDGLYRLLKGDELARVL
IHIAKHRGYKFIGDDEADEESGKVKKAGVVLRQNFEAAGCRTVGEWLWRERGANGKKRNKHGDY
EISIHRDLLVEEVEAIFVAQQEMRSTIATDALKAAYREIAFFVRPMQRIEKMVGHCTYFPEERR
APKSAPTAEKFIAISKFFSTVIIDNEGWEQKIIERKTLEELLDFAVSREKVEFRHLRKFLDLSD
NEIFKGLHYKGKPKTAKKREATLFDPNEPTELEFDKVEAEKKAWISLRGAAKLREALGNEFYGR
FVALGKHADEATKILTYYKDEGQKRRELTKLPLEAEMVERLVKIGFSDFLKLSLKAIRDILPAM
ESGARYDEAVLMLGVPHKEKSAILPPLNKTDIDILNPTVIRAFAQFRKVANALVRKYGAFDRVH
FELAREINTKGEIEDIKESQRKNEKERKEAADWIAETSFQVPLTRKNILKKRLYIQQDGRCAYT
GDVIELERLFDEGYCEIDHILPRSRSADDSFANKVLCLARANQQKTDRTPYEWFGHDAARWNAF
ETRTSAPSNRVRTGKGKIDRLLKKNFDENSEMAFKDRNLNDTRYMARAIKTYCEQYWVFKNSHT
KAPVQVRSGKLTSVLRYQWGLESKDRESHTHHAVDAIIIAFSTQGMVQKLSEYYRFKETHREKE
RPKLAVPLANFRDAVEEATRIENTETVKEGVEVKRLLISRPPRARVTGQAHEQTAKPYPRIKQV
KNKKKWRLAPIDEEKFESFKADRVASANQKNFYETSTIPRVDVYHKKGKFHLVPIYLHEMVLNE
LPNLSLGTNPEAMDENFFKFSIFKDDLISIQTQGTPKKPAKIIMGYFKNMHGANMVLSSINNSP
CEGFTCTPVSMDKKHKDKCKLCPEENRIAGRCLQGFLDYWSQEGLRPPRKEFECDQGVKFALDV
KKYQIDPLGYYYEVKQEKRLGTIPQMRSAKKLVKK
SEQ ID NO: 384
MNNSIKSKPEVTIGLDLGVGSVGWAIVDNETNIIHHLGSRLFSQAKTAEDRRSFRGVRRLIRRR
KYKLKRFVNLIWKYNSYFGFKNKEDILNNYQEQQKLHNTVLNLKSEALNAKIDPKALSWILHDY
LKNRGHFYEDNRDFNVYPTKELAKYFDKYGYYKGIIDSKEDNDNKLEEELTKYKFSNKHWLEEV
KKVLSNQTGLPEKFKEEYESLFSYVRNYSEGPGSINSVSPYGIYHLDEKEGKVVQKYNNIWDKT
IGKCNIFPDEYRAPKNSPIAMIFNEINELSTIRSYSIYLTGWFINQEFKKAYLNKLLDLLIKTN
GEKPIDARQFKKLREETIAESIGKETLKDVENEEKLEKEDHKWKLKGLKLNTNGKIQYNDLSSL
AKFVHKLKQHLKLDFLLEDQYATLDKINFLQSLFVYLGKHLRYSNRVDSANLKEFSDSNKLFER
ILQKQKDGLFKLFEQTDKDDEKILAQTHSLSTKAMLLAITRMTNLDNDEDNQKNNDKGWNFEAI
KNFDQKFIDITKKNNNLSLKQNKRYLDDRFINDAILSPGVKRILREATKVFNAILKQFSEEYDV
TKVVIELARELSEEKELENTKNYKKLIKKNGDKISEGLKALGISEDEIKDILKSPTKSYKFLLW
LQQDHIDPYSLKEIAFDDIFTKTEKFEIDHIIPYSISFDDSSSNKLLVLAESNQAKSNQTPYEF
ISSGNAGIKWEDYEAYCRKFKDGDSSLLDSTQRSKKFAKMMKTDTSSKYDIGFLARNLNDTRYA
TIVFRDALEDYANNHLVEDKPMFKVVCINGSVTSFLRKNFDDSSYAKKDRDKNIHHAVDASIIS
IFSNETKTLFNQLTQFADYKLFKNTDGSWKKIDPKTGVVTEVTDENWKQIRVRNQVSEIAKVIE
KYIQDSNIERKARYSRKIENKTNISLFNDTVYSAKKVGYEDQIKRKNLKTLDIHESAKENKNSK
VKRQFVYRKLVNVSLLNNDKLADLFAEKEDILMYRANPWVINLAEQIFNEYTENKKIKSQNVFE
KYMLDLTKEFPEKFSEFLVKSMLRNKTAIIYDDKKNIVHRIKRLKMLSSELKENKLSNVIIRSK
NQSGTKLSYQDTINSLALMIMRSIDPTAKKQYIRVPLNTLNLHLGDHDFDLHNMDAYLKKPKFV
KYLKANEIGDEYKPWRVLTSGTLLIHKKDKKLMYISSFQNLNDVIEIKNLIETEYKENDDSDSK
KKKKANRFLMTLSTILNDYILLDAKDNFDILGLSKNRIDEILNSKLGLDKIVK
SEQ ID NO: 385
MGGSEVGTVPVTWRLGVDVGERSIGLAAVSYEEDKPKEILAAVSWIHDGGVGDERSGASRLALR
GMARRARRLRRFRRARLRDLDMLLSELGWTPLPDKNVSPVDAWLARKRLAEEYVVDETERRRLL
GYAVSHMARHRGWRNPWTTIKDLKNLPQPSDSWERTRESLEARYSVSLEPGTVGQWAGYLLQRA
PGIRLNPTQQSAGRRAELSNATAFETRLRQEDVLWELRCIADVQGLPEDVVSNVIDAVFCQKRP
SVPAERIGRDPLDPSQLRASRACLEFQEYRIVAAVANLRIRDGSGSRPLSLEERNAVIEALLAQ
TERSLTWSDIALEILKLPNESDLTSVPEEDGPSSLAYSQFAPFDETSARIAEFIAKNRRKIPTF
AQWWQEQDRTSRSDLVAALADNSIAGEEEQELLVHLPDAELEALEGLALPSGRVAYSRLTLSGL
TRVMRDDGVDVHNARKTCFGVDDNWRPPLPALHEATGHPVVDRNLAILRKFLSSATMRWGPPQS
IVVELARGASESRERQAEEEAARRAHRKANDRIRAELRASGLSDPSPADLVRARLLELYDCHCM
YCGAPISWENSELDHIVPRTDGGSNRHENLAITCGACNKEKGRRPFASWAETSNRVQLRDVIDR
VQKLKYSGNMYWTRDEFSRYKKSVVARLKRRTSDPEVIQSIESTGYAAVALRDRLLSYGEKNGV
AQVAVFRGGVTAEARRWLDISIERLFSRVAIFAQSTSTKRLDRRHHAVDAVVLTTLTPGVAKTL
ADARSRRVSAEFWRRPSDVNRHSTEEPQSPAYRQWKESCSGLGDLLISTAARDSIAVAAPLRLR
PTGALHEETLRAFSEHTVGAAWKGAELRRIVEPEVYAAFLALTDPGGRFLKVSPSEDVLPADEN
RHIVLSDRVLGPRDRVKLFPDDRGSIRVRGGAAYIASFHHARVFRWGSSHSPSFALLRVSLADL
AVAGLLRDGVDVFTAELPPWTPAWRYASIALVKAVESGDAKQVGWLVPGDELDFGPEGVTTAAG
DLSMFLKYFPERHWVVTGFEDDKRINLKPAFLSAEQAEVLRTERSDRPDTLTEAGEILAQFFPR
CWRATVAKVLCHPGLTVIRRTALGQPRWRRGHLPYSWRPWSADPWSGGTP
SEQ ID NO: 386
MHNKKNITIGFDLGIASIGWAIIDSTTSKILDWGTRTFEERKTANERRAFRSTRRNIRRKAYRN
QRFINLILKYKDLFELKNISDIQRANKKDTENYEKIISFFTEIYKKCAAKHSNILEVKVKALDS
KIEKLDLIWILHDYLENRGFFYDLEEENVADKYEGIEHPSILLYDFFKKNGFFKSNSSIPKDLG
GYSFSNLQWVNEIKKLFEVQEINPEFSEKFLNLFTSVRDYAKGPGSEHSASEYGIFQKDEKGKV
FKKYDNIWDKTIGKCSFFVEENRSPVNYPSYEIFNLLNQLINLSTDLKTTNKKIWQLSSNDRNE
LLDELLKVKEKAKIISISLKKNEIKKIILKDFGFEKSDIDDQDTIEGRKIIKEEPTTKLEVTKH
LLATIYSHSSDSNWININNILEFLPYLDAICIILDREKSRGQDEVLKKLTEKNIFEVLKIDREK
QLDFVKSIFSNTKFNFKKIGNFSLKAIREFLPKMFEQNKNSEYLKWKDEEIRRKWEEQKSKLGK
TDKKTKYLNPRIFQDEIISPGTKNTFEQAVLVLNQIIKKYSKENIIDAIIIESPREKNDKKTIE
EIKKRNKKGKGKTLEKLFQILNLENKGYKLSDLETKPAKLLDRLRFYHQQDGIDLYTLDKINID
QLINGSQKYEIEHIIPYSMSYDNSQANKILTEKAENLKKGKLIASEYIKRNGDEFYNKYYEKAK
ELFINKYKKNKKLDSYVDLDEDSAKNRFRFLTLQDYDEFQVEFLARNLNDTRYSTKLFYHALVE
HFENNEFFTYIDENSSKHKVKISTIKGHVTKYFRAKPVQKNNGPNENLNNNKPEKIEKNRENNE
HHAVDAAIVAIIGNKNPQIANLLTLADNKTDKKFLLHDENYKENIETGELVKIPKFEVDKLAKV
EDLKKIIQEKYEEAKKHTAIKFSRKTRTILNGGLSDETLYGFKYDEKEDKYFKIIKKKLVTSKN
EELKKYFENPFGKKADGKSEYTVLMAQSHLSEFNKLKEIFEKYNGFSNKTGNAFVEYMNDLALK
EPTLKAEIESAKSVEKLLYYNFKPSDQFTYHDNINNKSFKRFYKNIRIIEYKSIPIKFKILSKH
DGGKSFKDTLFSLYSLVYKVYENGKESYKSIPVTSQMRNFGIDEFDFLDENLYNKEKLDIYKSD
FAKPIPVNCKPVFVLKKGSILKKKSLDIDDFKETKETEEGNYYFISTISKRFNRDTAYGLKPLK
LSVVKPVAEPSTNPIFKEYIPIHLDELGNEYPVKIKEHTDDEKLMCTIK

[1441] Nucleic Acids Encoding Cas9 Molecules

[1442] Nucleic acids encoding the Cas9 molecules or Cas9 polypeptides, e.g., an eaCas9 molecule or eaCas9 polypeptides are provided herein.

[1443] Exemplary nucleic acids encoding Cas9 molecules or Cas9 polypeptides are described in Cong et al., SCIENCE 2013, 399(6121):819-823; Wang et al., CELL 2013, 153(4):910-918; Mali et al., SCIENCE 2013, 399(6121):823-826; Jinek el al., SCIENCE 2012, 337(6096):816-821. Another exemplary nucleic acid encoding a Cas9 molecule or Cas9 polypeptide is shown in FIG. 8.

[1444] In an embodiment, a nucleic acid encoding a Cas9 molecule or Cas9 polypeptide can be a synthetic nucleic acid sequence. For example, the synthetic nucleic acid molecule can be chemically modified, e.g., as described in Section VIII. In an embodiment, the Cas9 mRNA has one or more (e.g., all of the following properties: it is capped, polyadenylated, substituted with 5-methylcytidine and/or pseudouridine.

[1445] In addition, or alternatively, the synthetic nucleic acid sequence can be codon optimized, e.g., at least one non-common codon or less-common codon has been replaced by a common codon. For example, the synthetic nucleic acid can direct the synthesis of an optimized messenger mRNA, e.g., optimized for expression in a mammalian expression system, e.g., described herein.

[1446] In addition, or alternatively, a nucleic acid encoding a Cas9 molecule or Cas9 polypeptide may comprise a nuclear localization sequence (NLS). Nuclear localization sequences are known in the art.

[1447] Provided below is an exemplary codon optimized nucleic acid sequence encoding a Cas9 molecule of S. pyogenes.

(SEQ ID NO: 22)
ATGGATAAAA AGTACAGCAT CGGGCTGGAC ATCGGTACAA ACTCAGTGGG
GTGGGCCGTG ATTACGGACG AGTACAAGGT ACCCTCCAAA AAATTTAAAG
TGCTGGGTAA CACGGACAGA CACTCTATAA AGAAAAATCT TATTGGAGCC
TTGCTGTTCG ACTCAGGCGA GACAGCCGAA GCCACAAGGT TGAAGCGGAC
CGCCAGGAGG CGGTATACCA GGAGAAAGAA CCGCATATGC TACCTGCAAG
AAATCTTCAG TAACGAGATG GCAAAGGTTG ACGATAGCTT TTTCCATCGC
CTGGAAGAAT CCTTTCTTGT TGAGGAAGAC AAGAAGCACG AACGGCACCC
CATCTTTGGC AATATTGTCG ACGAAGTGGC ATATCACGAA AAGTACCCGA
CTATCTACCA CCTCAGGAAG AAGCTGGTGG ACTCTACCGA TAAGGCGGAC
CTCAGACTTA TTTATTTGGC ACTCGCCCAC ATGATTAAAT TTAGAGGACA
TTTCTTGATC GAGGGCGACC TGAACCCGGA CAACAGTGAC GTCGATAAGC
TGTTCATCCA ACTTGTGCAG ACCTACAATC AACTGTTCGA AGAAAACCCT
ATAAATGCTT CAGGAGTCGA CGCTAAAGCA ATCCTGTCCG CGCGCCTCTC
AAAATCTAGA AGACTTGAGA ATCTGATTGC TCAGTTGCCC GGGGAAAAGA
AAAATGGATT GTTTGGCAAC CTGATCGCCC TCAGTCTCGG ACTGACCCCA
AATTTCAAAA GTAACTTCGA CCTGGCCGAA GACGCTAAGC TCCAGCTGTC
CAAGGACACA TACGATGACG ACCTCGACAA TCTGCTGGCC CAGATTGGGG
ATCAGTACGC CGATCTCTTT TTGGCAGCAA AGAACCTGTC CGACGCCATC
CTGTTGAGCG ATATCTTGAG AGTGAACACC GAAATTACTA AAGCACCCCT
TAGCGCATCT ATGATCAAGC GGTACGACGA GCATCATCAG GATCTGACCC
TGCTGAAGGC TCTTGTGAGG CAACAGCTCC CCGAAAAATA CAAGGAAATC
TTCTTTGACC AGAGCAAAAA CGGCTACGCT GGCTATATAG ATGGTGGGGC
CAGTCAGGAG GAATTCTATA AATTCATCAA GCCCATTCTC GAGAAAATGG
ACGGCACAGA GGAGTTGCTG GTCAAACTTA ACAGGGAGGA CCTGCTGCGG
AAGCAGCGGA CCTTTGACAA CGGGTCTATC CCCCACCAGA TTCATCTGGG
CGAACTGCAC GCAATCCTGA GGAGGCAGGA GGATTTTTAT CCTTTTCTTA
AAGATAACCG CGAGAAAATA GAAAAGATTC TTACATTCAG GATCCCGTAC
TACGTGGGAC CTCTCGCCCG GGGCAATTCA CGGTTTGCCT GGATGACAAG
GAAGTCAGAG GAGACTATTA CACCTTGGAA CTTCGAAGAA GTGGTGGACA
AGGGTGCATC TGCCCAGTCT TTCATCGAGC GGATGACAAA TTTTGACAAG
AACCTCCCTA ATGAGAAGGT GCTGCCCAAA CATTCTCTGC TCTACGAGTA
CTTTACCGTC TACAATGAAC TGACTAAAGT CAAGTACGTC ACCGAGGGAA
TGAGGAAGCC GGCATTCCTT AGTGGAGAAC AGAAGAAGGC GATTGTAGAC
CTGTTGTTCA AGACCAACAG GAAGGTGACT GTGAAGCAAC TTAAAGAAGA
CTACTTTAAG AAGATCGAAT GTTTTGACAG TGTGGAAATT TCAGGGGTTG
AAGACCGCTT CAATGCGTCA TTGGGGACTT ACCATGATCT TCTCAAGATC
ATAAAGGACA AAGACTTCCT GGACAACGAA GAAAATGAGG ATATTCTCGA
AGACATCGTC CTCACCCTGA CCCTGTTCGA AGACAGGGAA ATGATAGAAG
AGCGCTTGAA AACCTATGCC CACCTCTTCG ACGATAAAGT TATGAAGCAG
CTGAAGCGCA GGAGATACAC AGGATGGGGA AGATTGTCAA GGAAGCTGAT
CAATGGAATT AGGGATAAAC AGAGTGGCAA GACCATACTG GATTTCCTCA
AATCTGATGG CTTCGCCAAT AGGAACTTCA TGCAACTGAT TCACGATGAC
TCTCTTACCT TCAAGGAGGA CATTCAAAAG GCTCAGGTGA GCGGGCAGGG
AGACTCCCTT CATGAACACA TCGCGAATTT GGCAGGTTCC CCCGCTATTA
AAAAGGGCAT CCTTCAAACT GTCAAGGTGG TGGATGAATT GGTCAAGGTA
ATGGGCAGAC ATAAGCCAGA AAATATTGTG ATCGAGATGG CCCGCGAAAA
CCAGACCACA CAGAAGGGCC AGAAAAATAG TAGAGAGCGG ATGAAGAGGA
TCGAGGAGGG CATCAAAGAG CTGGGATCTC AGATTCTCAA AGAACACCCC
GTAGAAAACA CACAGCTGCA GAACGAAAAA TTGTACTTGT ACTATCTGCA
GAACGGCAGA GACATGTACG TCGACCAAGA ACTTGATATT AATAGACTGT
CCGACTATGA CGTAGACCAT ATCGTGCCCC AGTCCTTCCT GAAGGACGAC
TCCATTGATA ACAAAGTCTT GACAAGAAGC GACAAGAACA GGGGTAAAAG
TGATAATGTG CCTAGCGAGG AGGTGGTGAA AAAAATGAAG AACTACTGGC
GACAGCTGCT TAATGCAAAG CTCATTACAC AACGGAAGTT CGATAATCTG
ACGAAAGCAG AGAGAGGTGG CTTGTCTGAG TTGGACAAGG CAGGGTTTAT
TAAGCGGCAG CTGGTGGAAA CTAGGCAGAT CACAAAGCAC GTGGCGCAGA
TTTTGGACAG CCGGATGAAC ACAAAATACG ACGAAAATGA TAAACTGATA
CGAGAGGTCA AAGTTATCAC GCTGAAAAGC AAGCTGGTGT CCGATTTTCG
GAAAGACTTC CAGTTCTACA AAGTTCGCGA GATTAATAAC TACCATCATG
CTCACGATGC GTACCTGAAC GCTGTTGTCG GGACCGCCTT GATAAAGAAG
TACCCAAAGC TGGAATCCGA GTTCGTATAC GGGGATTACA AAGTGTACGA
TGTGAGGAAA ATGATAGCCA AGTCCGAGCA GGAGATTGGA AAGGCCACAG
CTAAGTACTT CTTTTATTCT AACATCATGA ATTTTTTTAA GACGGAAATT
ACCCTGGCCA ACGGAGAGAT CAGAAAGCGG CCCCTTATAG AGACAAATGG
TGAAACAGGT GAAATCGTCT GGGATAAGGG CAGGGATTTC GCTACTGTGA
GGAAGGTGCT GAGTATGCCA CAGGTAAATA TCGTGAAAAA AACCGAAGTA
CAGACCGGAG GATTTTCCAA GGAAAGCATT TTGCCTAAAA GAAACTCAGA
CAAGCTCATC GCCCGCAAGA AAGATTGGGA CCCTAAGAAA TACGGGGGAT
TTGACTCACC CACCGTAGCC TATTCTGTGC TGGTGGTAGC TAAGGTGGAA
AAAGGAAAGT CTAAGAAGCT GAAGTCCGTG AAGGAACTCT TGGGAATCAC
TATCATGGAA AGATCATCCT TTGAAAAGAA CCCTATCGAT TTCCTGGAGG
CTAAGGGTTA CAAGGAGGTC AAGAAAGACC TCATCATTAA ACTGCCAAAA
TACTCTCTCT TCGAGCTGGA AAATGGCAGG AAGAGAATGT TGGCCAGCGC
CGGAGAGCTG CAAAAGGGAA ACGAGCTTGC TCTGCCCTCC AAATATGTTA
ATTTTCTCTA TCTCGCTTCC CACTATGAAA AGCTGAAAGG GTCTCCCGAA
GATAACGAGC AGAAGCAGCT GTTCGTCGAA CAGCACAAGC ACTATCTGGA
TGAAATAATC GAACAAATAA GCGAGTTCAG CAAAAGGGTT ATCCTGGCGG
ATGCTAATTT GGACAAAGTA CTGTCTGCTT ATAACAAGCA CCGGGATAAG
CCTATTAGGG AACAAGCCGA GAATATAATT CACCTCTTTA CACTCACGAA
TCTCGGAGCC CCCGCCGCCT TCAAATACTT TGATACGACT ATCGACCGGA
AACGGTATAC CAGTACCAAA GAGGTCCTCG ATGCCACCCT CATCCACCAG
TCAATTACTG GCCTGTACGA AACACGGATC GACCTCTCTC AACTGGGCGG
CGACTAG

[1448] Provided below is the corresponding amino acid sequence of a S. pyogenes Cas9 molecule.

(SEQ ID NO: 23)

[sequence omitted]

[1449] Provided below is an exemplary codon optimized nucleic acid sequence encoding a Cas9 molecule of N. meningitidis.

(SEQ ID NO: 24)

ATGGCCGCCTTCAAGCCCAACCCCATCAACTACATCCTGGGCCTGGACAT
CGGCATCGCCAGCGTGGGCTGGGCCATGGTGGAGATCGACGAGGACGAGA
ACCCCATCTGCCTGATCGACCTGGGTGTGCGCGTGTTCGAGCGCGCTGAG
GTGCCCAAGACTGGTGACAGTCTGGCTATGGCTCGCCGGCTTGCTCGCTC
TGTTCGGCGCCTTACTCGCCGGCGCGCTCACCGCCTTCTGCGCGCTCGCC
GCCTGCTGAAGCGCGAGGGTGTGCTGCAGGCTGCCGACTTCGACGAGAAC
GGCCTGATCAAGAGCCTGCCCAACACTCCTTGGCAGCTGCGCGCTGCCGC
TCTGGACCGCAAGCTGACTCCTCTGGAGTGGAGCGCCGTGCTGCTGCACC
TGATCAAGCACCGCGGCTACCTGAGCCAGCGCAAGAACGAGGGCGAGACC
GCCGACAAGGAGCTGGGTGCTCTGCTGAAGGGCGTGGCCGACAACGCCCA
CGCCCTGCAGACTGGTGACTTCCGCACTCCTGCTGAGCTGGCCCTGAACA
AGTTCGAGAAGGAGAGCGGCCACATCCGCAACCAGCGCGGCGACTACAGC
CACACCTTCAGCCGCAAGGACCTGCAGGCCGAGCTGATCCTGCTGTTCGA
GAAGCAGAAGGAGTTCGGCAACCCCCACGTGAGCGGCGGCCTGAAGGAGG
GCATCGAGACCCTGCTGATGACCCAGCGCCCCGCCCTGAGCGGCGACGCC
GTGCAGAAGATGCTGGGCCACTGCACCTTCGAGCCAGCCGAGCCCAAGGC
CGCCAAGAACACCTACACCGCCGAGCGCTTCATCTGGCTGACCAAGCTGA
ACAACCTGCGCATCCTGGAGCAGGGCAGCGAGCGCCCCCTGACCGACACC
GAGCGCGCCACCCTGATGGACGAGCCCTACCGCAAGAGCAAGCTGACCTA
CGCCCAGGCCCGCAAGCTGCTGGGTCTGGAGGACACCGCCTTCTTCAAGG
GCCTGCGCTACGGCAAGGACAACGCCGAGGCCAGCACCCTGATGGAGATG
AAGGCCTACCACGCCATCAGCCGCGCCCTGGAGAAGGAGGGCCTGAAGGA
CAAGAAGAGTCCTCTGAACCTGAGCCCCGAGCTGCAGGACGAGATCGGCA
CCGCCTTCAGCCTGTTCAAGACCGACGAGGACATCACCGGCCGCCTGAAG
GACCGCATCCAGCCCGAGATCCTGGAGGCCCTGCTGAAGCACATCAGCTT
CGACAAGTTCGTGCAGATCAGCCTGAAGGCCCTGCGCCGCATCGTGCCCC
TGATGGAGCAGGGCAAGCGCTACGACGAGGCCTGCGCCGAGATCTACGGC
GACCACTACGGCAAGAAGAACACCGAGGAGAAGATCTACCTGCCTCCTAT
CCCCGCCGACGAGATCCGCAACCCCGTGGTGCTGCGCGCCCTGAGCCAGG
CCCGCAAGGTGATCAACGGCGTGGTGCGCCGCTACGGCAGCCCCGCCCGC
ATCCACATCGAGACCGCCCGCGAGGTGGGCAAGAGCTTCAAGGACCGCAA
GGAGATCGAGAAGCGCCAGGAGGAGAACCGCAAGGACCGCGAGAAGGCCG
CCGCCAAGTTCCGCGAGTACTTCCCCAACTTCGTGGGCGAGCCCAAGAGC
AAGGACATCCTGAAGCTGCGCCTGTACGAGCAGCAGCACGGCAAGTGCCT
GTACAGCGGCAAGGAGATCAACCTGGGCCGCCTGAACGAGAAGGGCTACG
TGGAGATCGACCACGCCCTGCCCTTCAGCCGCACCTGGGACGACAGCTTC
AACAACAAGGTGCTGGTGCTGGGCAGCGAGAACCAGAACAAGGGCAACCA
GACCCCCTACGAGTACTTCAACGGCAAGGACAACAGCCGCGAGTGGCAGG
AGTTCAAGGCCCGCGTGGAGACCAGCCGCTTCCCCCGCAGCAAGAAGCAG
CGCATCCTGCTGCAGAAGTTCGACGAGGACGGCTTCAAGGAGCGCAACCT
GAACGACACCCGCTACGTGAACCGCTTCCTGTGCCAGTTCGTGGCCGACC
GCATGCGCCTGACCGGCAAGGGCAAGAAGCGCGTGTTCGCCAGCAACGGC
CAGATCACCAACCTGCTGCGCGGCTTCTGGGGCCTGCGCAAGGTGCGCGC
CGAGAACGACCGCCACCACGCCCTGGACGCCGTGGTGGTGGCCTGCAGCA
CCGTGGCCATGCAGCAGAAGATCACCCGCTTCGTGCGCTACAAGGAGATG
AACGCCTTCGACGGTAAAACCATCGACAAGGAGACCGGCGAGGTGCTGCA
CCAGAAGACCCACTTCCCCCAGCCCTGGGAGTTCTTCGCCCAGGAGGTGA
TGATCCGCGTGTTCGGCAAGCCCGACGGCAAGCCCGAGTTCGAGGAGGCC
GACACCCCCGAGAAGCTGCGCACCCTGCTGGCCGAGAAGCTGAGCAGCCG
CCCTGAGGCCGTGCACGAGTACGTGACTCCTCTGTTCGTGAGCCGCGCCC
CCAACCGCAAGATGAGCGGTCAGGGTCACATGGAGACCGTGAAGAGCGCC
AAGCGCCTGGACGAGGGCGTGAGCGTGCTGCGCGTGCCCCTGACCCAGCT
GAAGCTGAAGGACCTGGAGAAGATGGTGAACCGCGAGCGCGAGCCCAAGC
TGTACGAGGCCCTGAAGGCCCGCCTGGAGGCCCACAAGGACGACCCCGCC
AAGGCCTTCGCCGAGCCCTTCTACAAGTACGACAAGGCCGGCAACCGCAC
CCAGCAGGTGAAGGCCGTGCGCGTGGAGCAGGTGCAGAAGACCGGCGTGT
GGGTGCGCAACCACAACGGCATCGCCGACAACGCCACCATGGTGCGCGTG
GACGTGTTCGAGAAGGGCGACAAGTACTACCTGGTGCCCATCTACAGCTG
GCAGGTGGCCAAGGGCATCCTGCCCGACCGCGCCGTGGTGCAGGGCAAGG
ACGAGGAGGACTGGCAGCTGATCGACGACAGCTTCAACTTCAAGTTCAGC
CTGCACCCCAACGACCTGGTGGAGGTGATCACCAAGAAGGCCCGCATGTT
CGGCTACTTCGCCAGCTGCCACCGCGGCACCGGCAACATCAACATCCGCA
TCCACGACCTGGACCACAAGATCGGCAAGAACGGCATCCTGGAGGGCATC
GGCGTGAAGACCGCCCTGAGCTTCCAGAAGTACCAGATCGACGAGCTGGG
CAAGGAGATCCGCCCCTGCCGCCTGAAGAAGCGCCCTCCTGTGCGCTAA

[1450] Provided below is the corresponding amino acid sequence of a N. meningitidis Cas9 molecule.

(SEQ ID NO: 25)

MAAFKPNPINYILGLDIGIASVGWAMVEIDEDENPICLIDLGVRVFERAE
VPKTGDSLAMARRLARSVRRLTRRRAHRLLRARRLLKREGVLQAADFDEN
GLIKSLPNTPWQLRAAALDRKLTPLEWSAVLLHLIKHRGYLSQRKNEGET
ADKELGALLKGVADNAHALQTGDFRTPAELALNKFEKESGHIRNQRGDYS
HTFSRKDLQAELILLFEKQKEFGNPHVSGGLKEGIETLLMTQRPALSGDA
VQKMLGHCTFEPAEPKAAKNTYTAERFIWLTKLNNLRILEQGSERPLTDT
ERATLMDEPYRKSKLTYAQARKLLGLEDTAFFKGLRYGKDNAEASTLMEM
KAYHAISRALEKEGLKDKKSPLNLSPELQDEIGTAFSLFKTDEDITGRLK
DRIQPEILEALLKHISFDKFVQISLKALRRIVPLMEQGKRYDEACAEIYG
DHYGKKNTEEKIYLPPIPADEIRNPVVLRALSQARKVINGVVRRYGSPAR
IHIETAREVGKSFKDRKEIEKRQEENRKDREKAAAKFREYFPNFVGEPKS
KDILKLRLYEQQHGKCLYSGKEINLGRLNEKGYVEIDHALPFSRTWDDSF
NNKVLVLGSENQNKGNQTPYEYFNGKDNSREWQEFKARVETSRFPRSKKQ
RILLQKFDEDGFKERNLNDTRYVNRFLCQFVADRMRLTGKGKKRVFASNG
QITNLLRGFWGLRKVRAENDRHHALDAVVVACSTVAMQQKITRFVRYKEM
NAFDGKTIDKETGEVLHQKTHFPQPWEFFAQEVMIRVFGKPDGKPEFEEA
DTPEKLRTLLAEKLSSRPEAVHEYVTPLFVSRAPNRKMSGQGHMETVKSA
KRLDEGVSVLRVPLTQLKLKDLEKMVNREREPKLYEALKARLEAHKDDPA
KAFAEPFYKYDKAGNRTQQVKAVRVEQVQKTGVWVRNHNGIADNATMVRV
DVFEKGDKYYLVPIYSWQVAKGILPDRAVVQGKDEEDWQLIDDSFNFKFS
LHPNDLVEVITKKARMFGYFASCHRGTGNINIRIHDLDHKIGKNGILEGI
GVKTALSFQKYQIDELGKEIRPCRLKKRPPVR*

[1451] Provided below is an amino acid sequence of a S. aureus Cas9 molecule.

(SEQ ID NO: 26)

MKRNYILGLDIGITSVGYGIIDYETRDVIDAGVRLFKEANVENNEGRRSK
RGARRLKRRRRHRIQRVKKLLFDYNLLTDHSELSGINPYEARVKGLSQKL
SEEEFSAALLHLAKRRGVHNVNEVEEDTGNELSTKEQISRNSKALEEKYV
AELQLERLKKDGEVRGSINRFKTSDYVKEAKQLLKVQKAYHQLDQSFIDT
YIDLLETRRTYYEGPGEGSPFGWKDIKEWYEMLMGHCTYFPEELRSVKYA
YNADLYNALNDLNNLVITRDENEKLEYYEKFQIIENVFKQKKKPTLKQIA
KEILVNEEDIKGYRVTSTGKPEFTNLKVYHDIKDITARKEIIENAELLDQ
IAKILTIYQSSEDIQEELTNLNSELTQEEIEQISNLKGYTGTHNLSLKAI
NLILDELWHTNDNQIAIFNRLKLVPKKVDLSQQKEIPTTLVDDFILSPVV
KRSFIQSIKVINAIIKKYGLPNDIIIELAREKNSKDAQKMINEMQKRNRQ
TNERIEEIIRTTGKENAKYLIEKIKLHDMQEGKCLYSLEAIPLEDLLNNP
FNYEVDHIIPRSVSFDNSFNNKVLVKQEENSKKGNRTPFQYLSSSDSKIS
YETFKKHILNLAKGKGRISKTKKEYLLEERDINRFSVQKDFINRNLVDTR
YATRGLMNLLRSYFRVNNLDVKVKSINGGFTSFLRRKWKFKKERNKGYKH
HAEDALIIANADFIFKEWKKLDKAKKVMENQMFEEKQAESMPEIETEQEY
KEIFITPHQIKHIKDFKDYKYSHRVDKKPNRELINDTLYSTRKDDKGNTL
IVNNLNGLYDKDNDKLKKLINKSPEKLLMYHHDPQTYQKLKLIMEQYGDE
KNPLYKYYEETGNYLTKYSKKDNGPVIKKIKYYGNKLNAHLDITDDYPNS
RNKVVKLSLKPYRFDVYLDNGVYKFVTVKNLDVIKKENYYEVNSKCYEEA
KKLKKISNQAEFIASFYNNDLIKINGELYRVIGVNNDLLNRIEVNMIDIT
YREYLENMNDKRPPRIIKTIASKTQSIKKYSTDILGNLYEVKSKKHPQII
KKG*

[1452] Provided below is an exemplary codon optimized nucleic acid sequence encoding a Cas9 molecule of S. aureus Cas9.

(SEQ ID NO: 39)

ATGAAAAGGAACTACATTCTGGGGCTGGACATCGGGATTACAAGCGTGGG
GTATGGGATTATTGACTATGAAACAAGGGACGTGATCGACGCAGGCGTCA
GACTGTTCAAGGAGGCCAACGTGGAAAACAATGAGGGACGGAGAAGCAAG
AGGGGAGCCAGGCGCCTGAAACGACGGAGAAGGCACAGAATCCAGAGGGT
GAAGAAACTGCTGTTCGATTACAACCTGCTGACCGACCATTCTGAGCTGA
GTGGAATTAATCCTTATGAAGCCAGGGTGAAAGGCCTGAGTCAGAAGCTG
TCAGAGGAAGAGTTTTCCGCAGCTCTGCTGCACCTGGCTAAGCGCCGAGG
AGTGCATAACGTCAATGAGGTGGAAGAGGACACCGGCAACGAGCTGTCTA
CAAAGGAACAGATCTCACGCAATAGCAAAGCTCTGGAAGAGAAGTATGTC
GCAGAGCTGCAGCTGGAACGGCTGAAGAAAGATGGCGAGGTGAGAGGGTC
AATTAATAGGTTCAAGACAAGCGACTACGTCAAAGAAGCCAAGCAGCTGC
TGAAAGTGCAGAAGGCTTACCACCAGCTGGATCAGAGCTTCATCGATACT
TATATCGACCTGCTGGAGACTCGGAGAACCTACTATGAGGGACCAGGAGA
AGGGAGCCCCTTCGGATGGAAAGACATCAAGGAATGGTACGAGATGCTGA
TGGGACATTGCACCTATTTTCCAGAAGAGCTGAGAAGCGTCAAGTACGCT
TATAACGCAGATCTGTACAACGCCCTGAATGACCTGAACAACCTGGTCAT
CACCAGGGATGAAAACGAGAAACTGGAATACTATGAGAAGTTCCAGATCA
TCGAAAACGTGTTTAAGCAGAAGAAAAAGCCTACACTGAAACAGATTGCT
AAGGAGATCCTGGTCAACGAAGAGGACATCAAGGGCTACCGGGTGACAAG
CACTGGAAAACCAGAGTTCACCAATCTGAAAGTGTATCACGATATTAAGG
ACATCACAGCACGGAAAGAAATCATTGAGAACGCCGAACTGCTGGATCAG
ATTGCTAAGATCCTGACTATCTACCAGAGCTCCGAGGACATCCAGGAAGA
GCTGACTAACCTGAACAGCGAGCTGACCCAGGAAGAGATCGAACAGATTA
GTAATCTGAAGGGGTACACCGGAACACACAACCTGTCCCTGAAAGCTATC
AATCTGATTCTGGATGAGCTGTGGCATACAAACGACAATCAGATTGCAAT
CTTTAACCGGCTGAAGCTGGTCCCAAAAAAGGTGGACCTGAGTCAGCAGA
AAGAGATCCCAACCACACTGGTGGACGATTTCATTCTGTCACCCGTGGTC
AAGCGGAGCTTCATCCAGAGCATCAAAGTGATCAACGCCATCATCAAGAA
GTACGGCCTGCCCAATGATATCATTATCGAGCTGGCTAGGGAGAAGAACA
GCAAGGACGCACAGAAGATGATCAATGAGATGCAGAAACGAAACCGGCAG
ACCAATGAACGCATTGAAGAGATTATCCGAACTACCGGGAAAGAGAACGC
AAAGTACCTGATTGAAAAAATCAAGCTGCACGATATGCAGGAGGGAAAGT
GTCTGTATTCTCTGGAGGCCATCCCCCTGGAGGACCTGCTGAACAATCCA
TTCAACTACGAGGTCGATCATATTATCCCCAGAAGCGTGTCCTTCGACAA
TTCCTTTAACAACAAGGTGCTGGTCAAGCAGGAAGAGAACTCTAAAAAGG
GCAATAGGACTCCTTTCCAGTACCTGTCTAGTTCAGATTCCAAGATCTCT
TACGAAACCTTTAAAAAGCACATTCTGAATCTGGCCAAAGGAAAGGGCCG
CATCAGCAAGACCAAAAAGGAGTACCTGCTGGAAGAGCGGGACATCAACA
GATTCTCCGTCCAGAAGGATTTTATTAACCGGAATCTGGTGGACACAAGA
TACGCTACTCGCGGCCTGATGAATCTGCTGCGATCCTATTTCCGGGTGAA
CAATCTGGATGTGAAAGTCAAGTCCATCAACGGCGGGTTCACATCTTTTC
TGAGGCGCAAATGGAAGTTTAAAAAGGAGCGCAACAAAGGGTACAAGCAC
CATGCCGAAGATGCTCTGATTATCGCAAATGCCGACTTCATCTTTAAGGA
GTGGAAAAAGCTGGACAAAGCCAAGAAAGTGATGGAGAACCAGATGTTCG
AAGAGAAGCAGGCCGAATCTATGCCCGAAATCGAGACAGAACAGGAGTAC
AAGGAGATTTTCATCACTCCTCACCAGATCAAGCATATCAAGGATTTCAA
GGACTACAAGTACTCTCACCGGGTGGATAAAAAGCCCAACAGAGAGCTGA
TCAATGACACCCTGTATAGTACAAGAAAAGACGATAAGGGGAATACCCTG
ATTGTGAACAATCTGAACGGACTGTACGACAAAGATAATGACAAGCTGAA
AAAGCTGATCAACAAAAGTCCCGAGAAGCTGCTGATGTACCACCATGATC
CTCAGACATATCAGAAACTGAAGCTGATTATGGAGCAGTACGGCGACGAG
AAGAACCCACTGTATAAGTACTATGAAGAGACTGGGAACTACCTGACCAA
GTATAGCAAAAAGGATAATGGCCCCGTGATCAAGAAGATCAAGTACTATG
GGAACAAGCTGAATGCCCATCTGGACATCACAGACGATTACCCTAACAGT
CGCAACAAGGTGGTCAAGCTGTCACTGAAGCCATACAGATTCGATGTCTA
TCTGGACAACGGCGTGTATAAATTTGTGACTGTCAAGAATCTGGATGTCA
TCAAAAAGGAGAACTACTATGAAGTGAATAGCAAGTGCTACGAAGAGGCT
AAAAAGCTGAAAAAGATTAGCAACCAGGCAGAGTTCATCGCCTCCTTTTA
CAACAACGACCTGATTAAGATCAATGGCGAACTGTATAGGGTCATCGGGG
TGAACAATGATCTGCTGAACCGCATTGAAGTGAATATGATTGACATCACT
TACCGAGAGTATCTGGAAAACATGAATGATAAGCGCCCCCCTCGAATTAT
CAAAACAATTGCCTCTAAGACTCAGAGTATCAAAAAGTACTCAACCGACA
TTCTGGGAAACCTGTATGAGGTGAAGAGCAAAAAGCACCCTCAGATTATC
AAAAAGGGC

[1453] If any of the above Cas9 sequences are fused with a peptide or polypeptide at the C-terminus, it is understood that the stop codon will be removed.

[1454] Other Cas Molecules and Cas Polypeptides

[1455] Various types of Cas molecules or Cas polypeptides can be used to practice the inventions disclosed herein. In some embodiments, Cas molecules of Type II Cas systems are used. In other embodiments, Cas molecules of other Cas systems are used. For example, Type I or Type III Cas molecules may be used. Exemplary Cas molecules (and Cas systems) are described, e.g., in Haft et al., PLoS COMPUTATIONAL BIOLOGY 2005, 1(6): e60 and Makarova et al., NATURE REVIEW MICROBIOLOGY 2011, 9:467-477, the contents of both references are incorporated herein by reference in their entirety. Exemplary Cas molecules (and Cas systems) are also shown in Table 33.

TABLE 33
Cas Systems

| | | | Structure of | Families (and | |
|---|---|---|---|---|---|
| | | | encoded protein | superfamily) of | |
| Gene | System type | Name from | (PDB | encoded | |
| name^{‡} | or subtype | Haft et al.^{§} | accessions)^{¶} | protein^{#}** | Representatives |
| cas1 | Type I | cas1 | 3GOD, 3LFX | COG1518 | SERP2463, SPy1047 |
| | Type II | | and 2YZS | | and ygbT |
| | Type III | | | | |
| cas2 | Type I | cas2 | 2IVY, 2I8E and | COG1343 and | SERP2462, SPy1048, |
| | Type II | | 3EXC | COG3512 | SPy1723 (N-terminal |
| | Type III | | | | domain) and ygbF |
| cas3′ | Type I^{‡‡} | cas3 | NA | COG1203 | APE1232 and ygcB |
| cas3″ | Subtype I-A | NA | NA | COG2254 | APEI231 and BH0336 |
| | Subtype I-B | | | | |
| cas4 | Subtype I-A | cas4 and csa1 | NA | COG1468 | APE1239 and BH0340 |
| | Subtype I-B | | | | |
| | Subtype I-C | | | | |
| | Subtype I-D | | | | |
| | Subtype II-B | | | | |
| cas5 | Subtype I-A | cas5a, cas5d, | 3KG4 | COG1688 | APE1234, BH0337, |
| | Subtype I-B | cas5e, cas5h, | | (RAMP) | devS and ygcI |
| | Subtype I-C | cas5p, cas5t | | | |
| | Subtype I-E | and cmx5 | | | |
| cas6 | Subtype I-A | cas6 and cmx6 | 3I4H | COG1583 and | PF1131 and slr7014 |
| | Subtype I-B | | | COG5551 | |
| | Subtype I-D | | | (RAMP) | |
| | Subtype III- | | | | |
| | A Subtype | | | | |
| | III-B | | | | |
| cas6e | Subtype I-E | cse3 | 1WJ9 | (RAMP) | ygcH |
| cas6f | Subtype I-F | csy4 | 2XLJ | (RAMP) | y1727 |
| cas7 | Subtype I-A | csa2, csd2, | NA | COG1857 and | devR and ygcJ |
| | Subtype I-B | cse4, csh2, | | COG3649 | |
| | Subtype I-C | csp1 and cst2 | | (RAMP) | |
| | Subtype I-E | | | | |
| cas8a1 | Subtype I- | cmx1, cst1, | NA | BH0338-like | LA3191^{§§} and |
| | A^{‡‡} | csx8, csx13 | | | PG2018^{§§} |
| | | and CXXC- | | | |
| | | CXXC | | | |
| cas8a2 | Subtype I- | csa4 and csx9 | NA | PH0918 | AF0070, AF1873, |
| | A^{‡‡} | | | | MJ0385, PF0637, |
| | | | | | PH0918 and SSO1401 |
| cas8b | Subtype I- | csh1 and | NA | BH0338-like | MTH1090 and |
| | B^{‡‡} | TM1802 | | | TM1802 |
| cas8c | Subtype I- | csd1 and csp2 | NA | BH0338-like | BH0338 |
| | C^{‡‡} | | | | |
| cas9 | Type II^{‡‡} | csn1 and csx12 | NA | COG3513 | FTN_0757 and |
| | | | | | SPy1046 |
| cas10 | Type III^{‡‡} | cmr2, csm1 | NA | COG1353 | MTH326, Rv2823c^{§§} |
| | | and csx11 | | | and TM1794^{§§} |
| cas10d | Subtype I- | csc3 | NA | COG1353 | slr7011 |
| | D^{‡‡} | | | | |
| csy1 | Subtype I- | csy1 | NA | y1724-like | y1724 |
| | F^{‡‡} | | | | |
| csy2 | Subtype I-F | csy2 | NA | (RAMP) | y1725 |
| csy3 | Subtype I-F | csy3 | NA | (RAMP) | y1726 |
| cse1 | Subtype I- | cse1 | NA | YgcL-like | ygcL |
| | E^{‡‡} | | | | |
| cse2 | Subtype I-E | cse2 | 2ZCA | YgcK-like | ygcK |
| csc1 | Subtype I-D | csc1 | NA | alr1563-like | alr1563 |
| | | | | (RAMP) | |
| csc2 | Subtype I-D | csc1 and csc2 | NA | COG1337 | slr7012 |
| | | | | (RAMP) | |
| csa5 | Subtype I-A | csa5 | NA | AF1870 | AF1870, MJ0380, |
| | | | | | PF0643 and SSO1398 |
| csn2 | Subtype II-A | csn2 | NA | SPy1049-like | SPy1049 |
| csm2 | Subtype III- | csm2 | NA | COG1421 | MTH1081 and |
| | A^{‡‡} | | | | SERP2460 |
| csm3 | Subtype III-A | csc2 and csm3 | NA | COG1337 | MTH1080 and |
| | | | | (RAMP) | SERP2459 |
| csm4 | Subtype III-A | csm4 | NA | COG1567 | MTH1079 and |
| | | | | (RAMP) | SERP2458 |
| csm5 | Subtype III-A | csm5 | NA | COG1332 | MTH1078 and |
| | | | | (RAMP) | SERP2457 |
| csm6 | Subtype III-A | APE2256 and | 2WTE | COG1517 | APE2256 and |
| | | csm6 | | | SSO1445 |
| cmr1 | Subtype III-B | cmr1 | NA | COG1367 | PF1130 |
| | | | | (RAMP) | |
| cmr3 | Subtype III-B | cmr3 | NA | COG1769 | PF1128 |
| | | | | (RAMP) | |
| cmr4 | Subtype III-B | cmr4 | NA | COG1336 | PF1126 |
| | | | | (RAMP) | |
| cmr5 | Subtype III- | cmr5 | 2ZOP and 2OEB | COG3337 | MTH324 and PF1125 |
| | B^{‡‡} | | | | |
| cmr6 | Subtype III-B | cmr6 | NA | COG1604 | PF1124 |
| | | | | (RAMP) | |
| csb1 | Subtype I-U | GSU0053 | NA | (RAMP) | Balac_1306 and |
| | | | | | GSU0053 |
| csb2 | Subtype I- | NA | NA | (RAMP) | Balac_1305 and |
| | U^{§§} | | | | GSU0054 |
| csb3 | Subtype I-U | NA | NA | (RAMP) | Balac_1303^{§§} |
| csx17 | Subtype I-U | NA | NA | NA | Btus_2683 |
| csx14 | Subtype I-U | NA | NA | NA | GSU0052 |
| csx10 | Subtype I-U | csx10 | NA | (RAMP) | Caur_2274 |
| csx16 | Subtype III-U | VVA1548 | NA | NA | VVA1548 |
| csaX | Subtype III-U | csaX | NA | NA | SSO1438 |
| csx3 | Subtype III-U | csx3 | NA | NA | AF1864 |
| csx1 | Subtype III-U | csa3, csx1, | 1XMX and 2171 | COG1517 and | MJ1666, NE0113, |
| | | csx2, DXTHG, | | COG4006 | PF1127 and TM1812 |
| | | NE0113 and | | | |
| | | TIGR02710 | | | |
| csx15 | Unknown | NA | NA | TTE2665 | TTE2665 |
| csf1 | Type U | csf1 | NA | NA | AFE_1038 |
| csf2 | Type U | csf2 | NA | (RAMP) | AFE_1039 |
| csf3 | Type U | csf3 | NA | (RAMP) | AFE_1040 |
| csf4 | Type U | csf4 | NA | NA | AFE_1037 |

### IV. Functional Analysis of Candidate Molecules

[1456] Candidate Cas9 molecules, candidate gRNA molecules, candidate Cas9 molecule/gRNA molecule complexes, can be evaluated by art-known methods or as described herein. For example, exemplary methods for evaluating the endonuclease activity of Cas9 molecule are described, e.g., in Jinek et al., SCIENCE 2012, 337(6096):816-821.

[1457] Binding and Cleavage Assay: Testing the Endonuclease Activity of Cas9 Molecule

[1458] The ability of a Cas9 molecule/gRNA molecule complex to bind to and cleave a target nucleic acid can be evaluated in a plasmid cleavage assay. In this assay, synthetic or in vitro-transcribed gRNA molecule is pre-annealed prior to the reaction by heating to 95° C. and slowly cooling down to room temperature. Native or restriction digest-linearized plasmid DNA (300 ng (˜8 nM)) is incubated for 60 min at 37° C. with purified Cas9 protein molecule (50-500 nM) and gRNA (50-500 nM, 1:1) in a Cas9 plasmid cleavage buffer (20 mM HEPES pH 7.5, 150 mM KCl, 0.5 mM DTT, 0.1 mM EDTA) with or without 10 mM MgCl₂. The reactions are stopped with 5× DNA loading buffer (30% glycerol, 1.2% SDS, 250 mM EDTA), resolved by a 0.8 or 1% agarose gel electrophoresis and visualized by ethidium bromide staining. The resulting cleavage products indicate whether the Cas9 molecule cleaves both DNA strands, or only one of the two strands. For example, linear DNA products indicate the cleavage of both DNA strands. Nicked open circular products indicate that only one of the two strands is cleaved.

[1459] Alternatively, the ability of a Cas9 molecule/gRNA molecule complex to bind to and cleave a target nucleic acid can be evaluated in an oligonucleotide DNA cleavage assay. In this assay, DNA oligonucleotides (10 pmol) are radiolabeled by incubating with 5 units T4 polynucleotide kinase and ˜3-6 pmol (˜20-40 mCi) [γ-32P]-ATP in 1× T4 polynucleotide kinase reaction buffer at 37° C. for 30 min, in a 50 μL reaction. After heat inactivation (65° C. for 20 min), reactions are purified through a column to remove unincorporated label. Duplex substrates (100 nM) are generated by annealing labeled oligonucleotides with equimolar amounts of unlabeled complementary oligonucleotide at 95° C. for 3 min, followed by slow cooling to room temperature. For cleavage assays, gRNA molecules are annealed by heating to 95° C. for 30 s, followed by slow cooling to room temperature. Cas9 (500 nM final concentration) is pre-incubated with the annealed gRNA molecules (500 nM) in cleavage assay buffer (20 mM HEPES pH 7.5, 100 mM KCl, 5 mM MgCl2, 1 mM DTT, 5% glycerol) in a total volume of 9 μl. Reactions are initiated by the addition of 1 μl target DNA (10 nM) and incubated for 1 h at 37° C. Reactions are quenched by the addition of 20 μl of loading dye (5 mM EDTA, 0.025% SDS, 5% glycerol in formamide) and heated to 95° C. for 5 min. Cleavage products are resolved on 12% denaturing polyacrylamide gels containing 7 M urea and visualized by phosphorimaging. The resulting cleavage products indicate that whether the complementary strand, the non-complementary strand, or both, are cleaved.

[1460] One or both of these assays can be used to evaluate the suitability of a candidate gRNA molecule or candidate Cas9 molecule.

[1461] Binding Assay: Testing the Binding of Cas9 Molecule to Target DNA

[1462] Exemplary methods for evaluating the binding of Cas9 molecule to target DNA are described, e.g., in Jinek et al., SCIENCE 2012; 337(6096):816-821.

[1463] For example, in an electrophoretic mobility shift assay, target DNA duplexes are formed by mixing of each strand (10 nmol) in deionized water, heating to 95° C. for 3 min and slow cooling to room temperature. All DNAs are purified on 8% native gels containing 1× TBE. DNA bands are visualized by UV shadowing, excised, and eluted by soaking gel pieces in DEPC-treated H₂O. Eluted DNA is ethanol precipitated and dissolved in DEPC-treated H₂O. DNA samples are 5′ end labeled with [γ-32P]-ATP using T4 polynucleotide kinase for 30 min at 37° C. Polynucleotide kinase is heat denatured at 65° C. for 20 min, and unincorporated radiolabel is removed using a column. Binding assays are performed in buffer containing 20 mM HEPES pH 7.5, 100 mM KCl, 5 mM MgCl₂, 1 mM DTT and 10% glycerol in a total volume of 10 μl. Cas9 protein molecule is programmed with equimolar amounts of pre-annealed gRNA molecule and titrated from 100 pM to 1 μM. Radiolabeled DNA is added to a final concentration of 20 pM. Samples are incubated for 1 h at 37° C. and resolved at 4° C. on an 8% native polyacrylamide gel containing 1× TBE and 5 mM MgCl₂. Gels are dried and DNA visualized by phosphorimaging.

[1464] Differential Scanning Flourimetry (DSF)

[1465] The thermostability of Cas9-gRNA ribonucleoprotein (RNP) complexes can be measured via DSF. This technique measures the thermostability of a protein, which can increase under favorable conditions such as the addition of a binding RNA molecule, e.g., a gRNA.

[1466] The assay is performed using two different protocols, one to test the best stoichiometric ratio of gRNA:Cas9 protein and another to determine the best solution conditions for RNP formation.

[1467] To determine the best solution to form RNP complexes, a 2 uM solution of Cas9 in water+10× SYPRO Orange® (Life Techonologies cat #S-6650) and dispensed into a 384 well plate. An equimolar amount of gRNA diluted in solutions with varied pH and salt is then added. After incubating at room temperature for 10′ and brief centrifugation to remove any bubbles,a Bio-Rad CFX384™ Real-Time System C1000 Touch™ Thermal Cycler with the Bio-Rad CFX Manager software is used to run a gradient from 20° C. to 90° C. with a 1° increase in temperature every 10 seconds.

[1468] The second assay consists of mixing various concentrations of gRNA with 2 uM Cas9 in optimal buffer from assay 1 above and incubating at RT for 10′ in a 384 well plate. An equal volume of optimal buffer +10× SYPRO Orange® (Life Techonologies cat #S-6650) is added and the plate sealed with Microseal® B adhesive (MSB-1001). Following brief centrifugation to remove any bubbles, a Bio-Rad CFX384™ Real-Time System C1000 Touch™ Thermal Cycler with the Bio-Rad CFX Manager software is used to run a gradient from 20° C. to 90° C. with a 1° increase in temperature every 10 seconds.

### V. Genome Editing Approaches

[1469] Mutations in the HBB gene may be corrected using one of the approaches discussed herein. In an embodiment, a mutation in the HBB gene is corrected by homology directed repair (HDR) using an exogenously provided template nucleic acid (see Section V.1). In another embodiment, a mutation in the HBB gene is corrected by homology directed repair without using an exogenously provided template nucleic acid (see Section V.1).

[1470] Also described herein are methods for targeted knockout of one or both alleles of the BCL11A gene using NHEJ (see Section V.2). In another embodiment, methods are provided for targeted knockdown of the BCL11A gene (see Section V.3).

[1471] V.1 HDR Repair and Template Nucleic Acids

[1472] As described herein, nuclease-induced homology directed repair (HDR) can be used to alter a target sequence and correct (e.g., repair or edit) a mutation in the genome. While not wishing to be bound by theory, it is believed that alteration of the target sequence occurs by homology-directed repair (HDR) with an exogenously provided donor template or template nucleic acid. For example, the donor template or the template nucleic acid provides for alteration of the target sequence. It is contemplated that a plasmid donor can be used as a template for homologous recombination. It is further contemplated that a single stranded donor template can be used as a template for alteration of the target sequence by alternate methods of homology directed repair (e.g., single strand annealing) between the target sequence and the donor template. Donor template-effected alteration of a target sequence depends on cleavage by a Cas9 molecule. Cleavage by Cas9 can comprise a double strand break or two single strand breaks. As described herein, nuclease-induced homology directed repair (HDR) can be used to alter a target sequence and correct (e.g., repair or edit) a mutation in the genome without the use of an exogenously provided donor template or template nucleic acid. While not wishing to be bound by theory, it is believed that alteration of the target sequence occurs by homology-directed repair (HDR) with endogenous genomic donor sequence. For example, the endogenous genomic donor sequence provides for alteration of the target sequence. It is contemplated that in an embodiment the endogenous genomic donor sequence is located on the same chromosome as the target sequence. It is further contemplated that in another embodiment the endogenous genomic donor sequence is located on a different chromosome from the target sequence. In an embodiment, the endogenous genomic donor sequence comprises one or more nucleotides derived from the HBD gene. Alteration of a target sequence by endogenous genomic donor sequence depends on cleavage by a Cas9 molecule. Cleavage by Cas9 can comprise a double strand break or two single strand breaks.

[1473] Mutations that can be corrected by HDR using a template nucleic acid, or using endogenous genomic donor sequence, include point mutations. In an embodiment, a point mutation can be corrected by either a single double-strand break or two single strand breaks. In an embodiment, a point mutation can be corrected by (1) a single double-strand break, (2) two single strand breaks, (3) two double stranded breaks with a break occurring on each side of the target position, (4) one double stranded break and two single strand breaks with the double strand break and two single strand breaks occurring on each side of the target position (5) four single stranded breaks with a pair of single stranded breaks occurring on each side of the target position, or (6) one single stranded break.

[1474] In an embodiment where a single-stranded template nucleic acid is used, the target position can be altered by alternative HDR.

[1475] Donor template-effected alteration of a target position depends on cleavage by a Cas9 molecule. Cleavage by Cas9 can comprise a nick, a double strand break, or two single strand breaks, e.g., one on each strand of the target nucleic acid. After introduction of the breaks on the target nucleic acid, resection occurs at the break ends resulting in single stranded overhanging DNA regions.

[1476] In canonical HDR, a double-stranded donor template is introduced, comprising homologous sequence to the target nucleic acid that will either be directly incorporated into the target nucleic acid or used as a template to correct the sequence of the target nucleic acid. After resection at the break, repair can progress by different pathways, e.g., by the double Holliday junction model (or double strand break repair, DSBR, pathway) or the synthesis-dependent strand annealing (SDSA) pathway. In the double Holliday junction model, strand invasion by the two single stranded overhangs of the target nucleic acid to the homologous sequences in the donor template occurs, resulting in the formation of an intermediate with two Holliday junctions. The junctions migrate as new DNA is synthesized from the ends of the invading strand to fill the gap resulting from the resection. The end of the newly synthesized DNA is ligated to the resected end, and the junctions are resolved, resulting in the correction of the target nucleic acid, e.g., incorporation of the correct sequence of the donor template at the corresponding target position. Crossover with the donor template may occur upon resolution of the junctions. In the SDSA pathway, only one single stranded overhang invades the donor template and new DNA is synthesized from the end of the invading strand to fill the gap resulting from resection. The newly synthesized DNA then anneals to the remaining single stranded overhang, new DNA is synthesized to fill in the gap, and the strands are ligated to produce the corrected DNA duplex.

[1477] In alternative HDR, a single strand donor template, e.g., template nucleic acid, is introduced. A nick, single strand break, or double strand break at the target nucleic acid, for altering a desired target position, is mediated by a Cas9 molecule, e.g., described herein, and resection at the break occurs to reveal single stranded overhangs. Incorporation of the sequence of the template nucleic acid to correct or alter the target position of the target nucleic acid typically occurs by the SDSA pathway, as described above.

[1478] Methods of promoting HDR pathways, e.g., canonical HDR or alt-HDR, are described herein in Section VI.

[1479] Additional details on template nucleic acids are provided in Section IV entitled “Template nucleic acids” in International Application PCT/US2014/057905.

[1480] Mutations in the HBB gene that can be corrected (e.g., altered) by HDR with a template nucleic acid or with endogenous genomic donor sequence include, e.g., point mutation at E6, e.g., E6V.

[1481] Double Strand Break Mediated Correction

[1482] In an embodiment, double strand cleavage is effected by a Cas9 molecule having cleavage activity associated with an HNH-like domain and cleavage activity associated with a RuvC-like domain, e.g., an N-terminal RuvC-like domain, e.g., a wild type Cas9. Such embodiments require only a single gRNA.

[1483] Single Strand Break Mediated Correction

[1484] In some embodiments, one single strand break, or nick, is effected by a Cas9 molecule having nickase activity, e.g., a Cas9 nickase as described herein. A nicked target nucleic acid can be a substrate for alt-HDR.

[1485] In other embodiments, two single strand breaks, or nicks, are effected by a Cas9 molecule having nickase activity, e.g., cleavage activity associated with an HNH-like domain or cleavage activity associated with an N-terminal RuvC-like domain. Such embodiments usually require two gRNAs, one for placement of each single strand break. In an embodiment, the Cas9 molecule having nickase activity cleaves the strand to which the gRNA hybridizes, but not the strand that is complementary to the strand to which the gRNA hybridizes. In an embodiment, the Cas9 molecule having nickase activity does not cleave the strand to which the gRNA hybridizes, but rather cleaves the strand that is complementary to the strand to which the gRNA hybridizes.

[1486] In an embodiment, the nickase has HNH activity, e.g., a Cas9 molecule having the RuvC activity inactivated, e.g., a Cas9 molecule having a mutation at D10, e.g., the D10A mutation. D10A inactivates RuvC; therefore, the Cas9 nickase has (only) HNH activity and will cut on the strand to which the gRNA hybridizes (e.g., the complementary strand, which does not have the NGG PAM on it). In other embodiments, a Cas9 molecule having an H840, e.g., an H840A, mutation can be used as a nickase. H840A inactivates HNH; therefore, the Cas9 nickase has (only) RuvC activity and cuts on the non-complementary strand (e.g., the strand that has the NGG PAM and whose sequence is identical to the gRNA). In other embodiments, a Cas9 molecule having an N863 mutation, e.g., the N863A mutation, mutation can be used as a nickase. N863A inactivates HNH therefore the Cas9 nickase has (only) RuvC activity and cuts on the non-complementary strand (the strand that has the NGG PAM and whose sequence is identical to the gRNA).

[1487] In an embodiment, in which a nickase and two gRNAs are used to position two single strand nicks, one nick is on the + strand and one nick is on the − strand of the target nucleic acid. The PAMs can be outwardly facing. The gRNAs can be selected such that the gRNAs are separated by, from about 0-50, 0-100, or 0-200 nucleotides. In an embodiment, there is no overlap between the target sequences that are complementary to the targeting domains of the two gRNAs. In an embodiment, the gRNAs do not overlap and are separated by as much as 50, 100, or 200 nucleotides. In an embodiment, the use of two gRNAs can increase specificity, e.g., by decreasing off-target binding (Ran et al., Cell 2013; 154(6):1380-1389).

[1488] In an embodiment, a single nick can be used to induce HDR, e.g., alt-HDR. It is contemplated herein that a single nick can be used to increase the ratio of HR to NHEJ at a given cleavage site. In an embodiment, a single strand break is formed in the strand of the target nucleic acid to which the targeting domain of said gRNA is complementary. In another embodiment, a single strand break is formed in the strand of the target nucleic acid other than the strand to which the targeting domain of said gRNA is complementary.

[1489] Placement of Double Strand or Single Strand Breaks Relative to the Target Position

[1490] The double strand break or single strand break in one of the strands should be sufficiently close to target position such that an alteration is produced in the desired region, e.g., correction of a mutation occurs. In an embodiment, the distance is not more than 50, 100, 200, 300, 350 or 400 nucleotides. While not wishing to be bound by theory, in some embodiments, it is believed that the break should be sufficiently close to target position such that the target position is within the region that is subject to exonuclease-mediated removal during end resection. If the distance between the target position and a break is too great, the mutation or other sequence desired to be altered may not be included in the end resection and, therefore, may not be corrected, as donor sequence, either exogenously provided donor sequence or endogenous genomic donor sequence, in some embodiments is only used to correct sequence within the end resection region.

[1491] In an embodiment, the targeting domain is configured such that a cleavage event, e.g., a double strand or single strand break, is positioned within 1, 2, 3, 4, 5, 10, 15, 20, 25, 30, 35, 40, 45, 50, 60, 70, 80, 90, 100, 150 or 200 nucleotides of the region desired to be altered, e.g., a mutation. The break, e.g., a double strand or single strand break, can be positioned upstream or downstream of the region desired to be altered, e.g., a mutation. In some embodiments, a break is positioned within the region desired to be altered, e.g., within a region defined by at least two mutant nucleotides. In some embodiments, a break is positioned immediately adjacent to the region desired to be altered, e.g., immediately upstream or downstream of a mutation. In an embodiment, a single strand break is accompanied by an additional single strand break, positioned by a second gRNA molecule, as discussed below. For example, the targeting domains bind configured such that a cleavage event, e.g., the two single strand breaks, are positioned within 1, 2, 3, 4, 5, 10, 15, 20, 25, 30, 35, 40, 45, 50, 60, 70, 80, 90, 100, 150 or 200 nucleotides of a target position. In an embodiment, the first and second gRNA molecules are configured such, that when guiding a Cas9 nickase, a single strand break will be accompanied by an additional single strand break, positioned by a second gRNA, sufficiently close to one another to result in alteration of the desired region. In an embodiment, the first and second gRNA molecules are configured such that a single strand break positioned by said second gRNA is within 10, 20, 30, 40, or 50 nucleotides of the break positioned by said first gRNA molecule, e.g., when the Cas9 is a nickase. In an embodiment, the two gRNA molecules are configured to position cuts at the same position, or within a few nucleotides of one another, on different strands, e.g., essentially mimicking a double strand break.

[1492] In an embodiment, in which a gRNA (unimolecular (or chimeric) or modular gRNA) and Cas9 nuclease induce a double strand break for the purpose of inducing HDR-mediated correction, the cleavage site is between 0-200 bp (e.g., 0-175, 0 to 150, 0 to 125, 0 to 100, 0 to 75, 0 to 50, 0 to 25, 25 to 200, 25 to 175, 25 to 150, 25 to 125, 25 to 100, 25 to 75, 25 to 50, 50 to 200, 50 to 175, 50 to 150, 50 to 125, 50 to 100, 50 to 75, 75 to 200, 75 to 175, 75 to 150, 75 to 125, 75 to 100 bp) away from the target position. In an embodiment, the cleavage site is between 0-100 bp (e.g., 0 to 75, 0 to 50, 0 to 25, 25 to 100, 25 to 75, 25 to 50, 50 to 100, 50 to 75 or 75 to 100 bp) away from the target position.

[1493] In embodiments, one can promote HDR by using nickases to generate a break with overhangs. While not wishing to be bound by theory, the single stranded nature of the overhangs can enhance the cell's likelihood of repairing the break by HDR as opposed to, e.g., NHEJ. Specifically, in some embodiments, HDR is promoted by selecting a first gRNA that targets a first nickase to a first target sequence, and a second gRNA that targets a second nickase to a second target sequence which is on the opposite DNA strand from the first target sequence and offset from the first nick.

[1494] In an embodiment, the targeting domain of a gRNA molecule is configured to position a cleavage event sufficiently far from a preselected nucleotide, e.g., the nucleotide of a coding region, such that the nucleotide is not altered. In an embodiment, the targeting domain of a gRNA molecule is configured to position an intronic cleavage event sufficiently far from an intron/exon border, or naturally occurring splice signal, to avoid alteration of the exonic sequence or unwanted splicing events. The gRNA molecule may be a first, second, third and/or fourth gRNA molecule, as described herein.

Placement of a First Break and a Second Break Relative to each other

[1495] In an embodiment, a double strand break can be accompanied by an additional double strand break, positioned by a second gRNA molecule, as is discussed below.

[1496] In an embodiment, a double strand break can be accompanied by two additional single strand breaks, positioned by a second gRNA molecule and a third gRNA molecule.

[1497] In an embodiment, a first and second single strand breaks can be accompanied by two additional single strand breaks positioned by a third gRNA molecule and a fourth gRNA molecule.

[1498] When two or more gRNAs are used to position two or more cleavage events, e.g., double strand or single strand breaks, in a target nucleic acid, it is contemplated that the two or more cleavage events may be made by the same or different Cas9 proteins. For example, when two gRNAs are used to position two double stranded breaks, a single Cas9 nuclease may be used to create both double stranded breaks. When two or more gRNAs are used to position two or more single stranded breaks (nicks), a single Cas9 nickase may be used to create the two or more nicks. When two or more gRNAs are used to position at least one double stranded break and at least one single stranded break, two Cas9 proteins may be used, e.g., one Cas9 nuclease and one Cas9 nickase. It is contemplated that when two or more Cas9 proteins are used that the two or more Cas9 proteins may be delivered sequentially to control specificity of a double stranded versus a single stranded break at the desired position in the target nucleic acid.

[1499] In some embodiments, the targeting domain of the first gRNA molecule and the targeting domain of the second gRNA molecules are complementary to opposite strands of the target nucleic acid molecule. In some embodiments, the gRNA molecule and the second gRNA molecule are configured such that the PAMs are oriented outward.

[1500] In certain embodiments, two gRNA are selected to direct Cas9-mediated cleavage at two positions that are a preselected distance from each other. In embodiments, the two points of cleavage are on opposite strands of the target nucleic acid. In some embodiments, the two cleavage points form a blunt ended break, and in other embodiments, they are offset so that the DNA ends comprise one or two overhangs (e.g., one or more 5′ overhangs and/or one or more 3′ overhangs). In some embodiments, each cleavage event is a nick. In embodiments, the nicks are close enough together that they form a break that is recognized by the double stranded break machinery (as opposed to being recognized by, e.g., the SSBr machinery). In embodiments, the nicks are far enough apart that they create an overhang that is a substrate for HDR, i.e., the placement of the breaks mimics a DNA substrate that has experienced some resection. For instance, in some embodiments the nicks are spaced to create an overhang that is a substrate for processive resection. In some embodiments, the two breaks are spaced within 25-65 nucleotides of each other. The two breaks may be, e.g., about 25, 30, 35, 40, 45, 50, 55, 60 or 65 nucleotides of each other. The two breaks may be, e.g., at least about 25, 30, 35, 40, 45, 50, 55, 60 or 65 nucleotides of each other. The two breaks may be, e.g., at most about 30, 35, 40, 45, 50, 55, 60 or 65 nucleotides of each other. In embodiments, the two breaks are about 25-30, 30-35, 35-40. 40-45, 45-50, 50-55, 55-60, or 60-65 nucleotides of each other.

[1501] In some embodiments, the break that mimics a resected break comprises a 3′ overhang (e.g., generated by a DSB and a nick, where the nick leaves a 3′ overhang), a 5′ overhang (e.g., generated by a DSB and a nick, where the nick leaves a 5′ overhang), a 3′ and a 5′ overhang (e.g., generated by three cuts), two 3′ overhangs (e.g., generated by two nicks that are offset from each other), or two 5′ overhangs (e.g., generated by two nicks that are offset from each other).

[1502] In an embodiment, in which two gRNAs (independently, unimolecular (or chimeric) or modular gRNA) complexing with Cas9 nickases induce two single strand breaks for the purpose of inducing HDR-mediated correction, the closer nick is between 0-200 bp (e.g., 0-175, 0 to 150, 0 to 125, 0 to 100, 0 to 75, 0 to 50, 0 to 25, 25 to 200, 25 to 175, 25 to 150, 25 to 125, 25 to 100, 25 to 75, 25 to 50, 50 to 200, 50 to 175, 50 to 150, 50 to 125, 50 to 100, 50 to 75, 75 to 200, 75 to 175, 75 to 150, 75 to 125, 75 to 100 bp) away from the target position and the two nicks will ideally be within 25-65 bp of each other (e.g., 25 to 50, 25 to 45, 25 to 40, 25 to 35, 25 to 30, 30 to 55, 30 to 50, 30 to 45, 30 to 40, 30 to 35, 35 to 55, 35 to 50, 35 to 45, 35 to 40, 40 to 55, 40 to 50, 40 to 45 bp, 45 to 50 bp, 50 to 55 bp, 55 to 60 bp, 60 to 65 bp) and no more than 100 bp away from each other (e.g., no more than 90, 80, 70, 60, 50, 40, 30, 20, 10 or 5 bp away from each other). In an embodiment, the cleavage site is between 0-100 bp (e.g., 0 to 75, 0 to 50, 0 to 25, 25 to 100, 25 to 75, 25 to 50, 50 to 100, 50 to 75 or 75 to 100 bp) away from the target position.

[1503] In one embodiment, two gRNAs, e.g., independently, unimolecular (or chimeric) or modular gRNA, are configured to position a double-strand break on both sides of a target position. In an alternate embodiment, three gRNAs, e.g., independently, unimolecular (or chimeric) or modular gRNA, are configured to position a double strand break (i.e., one gRNA complexes with a cas9 nuclease) and two single strand breaks or paired single stranded breaks (i.e., two gRNAs complex with Cas9 nickases) on either side of the target position. In another embodiment, four gRNAs, e.g., independently, unimolecular (or chimeric) or modular gRNA, are configured to generate two pairs of single stranded breaks (i.e., two pairs of two gRNAs complex with Cas9 nickases) on either side of the target position. The double strand break(s) or the closer of the two single strand nicks in a pair will ideally be within 0-500 bp of the target position (e.g., no more than 450, 400, 350, 300, 250, 200, 150, 100, 50 or 25 bp from the target position). When nickases are used, the two nicks in a pair are, in embodiments, within 25-65 bp of each other (e.g., between 25 to 55, 25 to 50, 25 to 45, 25 to 40, 25 to 35, 25 to 30, 50 to 55, 45 to 55, 40 to 55, 35 to 55, 30 to 55, 30 to 50, 35 to 50, 40 to 50, 45 to 50, 35 to 45, 40 to 45 bp, 45 to 50 bp, 50 to 55 bp, 55 to 60 bp, or 60 to 65 bp) and no more than 100 bp away from each other (e.g., no more than 90, 80, 70, 60, 50, 40, 30, 20 or 10 bp).

[1504] When two gRNAs are used to target Cas9 molecules to breaks, different combinations of Cas9 molecules are envisioned. In some embodiments, a first gRNA is used to target a first Cas9 molecule to a first target position, and a second gRNA is used to target a second Cas9 molecule to a second target position. In some embodiments, the first Cas9 molecule creates a nick on the first strand of the target nucleic acid, and the second Cas9 molecule creates a nick on the opposite strand, resulting in a double stranded break (e.g., a blunt ended cut or a cut with overhangs).

[1505] Different combinations of nickases can be chosen to target one single stranded break to one strand and a second single stranded break to the opposite strand. When choosing a combination, one can take into account that there are nickases having one active RuvC-like domain, and nickases having one active HNH domain. In an embodiment, a RuvC-like domain cleaves the non-complementary strand of the target nucleic acid molecule. In an embodiment, an HNH-like domain cleaves a single stranded complementary domain, e.g., a complementary strand of a double stranded nucleic acid molecule. Generally, if both Cas9 molecules have the same active domain (e.g., both have an active RuvC domain or both have an active HNH domain), one will choose two gRNAs that bind to opposite strands of the target. In more detail, in some embodiments, a first gRNA is complementary with a first strand of the target nucleic acid and binds a nickase having an active RuvC-like domain and causes that nickase to cleave the strand that is non-complementary to that first gRNA, i.e., a second strand of the target nucleic acid; and a second gRNA is complementary with a second strand of the target nucleic acid and binds a nickase having an active RuvC-like domain and causes that nickase to cleave the strand that is non-complementary to that second gRNA, i.e., the first strand of the target nucleic acid. Conversely, in some embodiments, a first gRNA is complementary with a first strand of the target nucleic acid and binds a nickase having an active HNH domain and causes that nickase to cleave the strand that is complementary to that first gRNA, i.e., a first strand of the target nucleic acid; and a second gRNA is complementary with a second strand of the target nucleic acid and binds a nickase having an active HNH domain and causes that nickase to cleave the strand that is complementary to that second gRNA, i.e., the second strand of the target nucleic acid. In another arrangement, if one Cas9 molecule has an active RuvC-like domain and the other Cas9 molecule has an active HNH domain, the gRNAs for both Cas9 molecules can be complementary to the same strand of the target nucleic acid, so that the Cas9 molecule with the active RuvC-like domain will cleave the non-complementary strand and the Cas9 molecule with the HNH domain will cleave the complementary strand, resulting in a double stranded break.

### Length of the Homology Arms of the Donor Template

[1506] The homology arm should extend at least as far as the region in which end resection may occur, e.g., in order to allow the resected single stranded overhang to find a complementary region within the donor template. The overall length could be limited by parameters such as plasmid size or viral packaging limits. In an embodiment, a homology arm does not extend into repeated elements, e.g., Alu repeats or LINE repeats.

[1507] Exemplary homology arm lengths include at least 50, 100, 250, 500, 750, 1000, 2000, 3000, 4000, or 5000 nucleotides. In some embodiments, the homology arm length is 50-100, 100-250, 250-500, 500-750, 750-1000, 1000-2000, 2000-3000, 3000-4000, or 4000-5000 nucleotides.

[1508] Target position, as used herein, refers to a site on a target nucleic acid (e.g., the chromosome) that is modified by a Cas9 molecule-dependent process. For example, the target position can be a modified Cas9 molecule cleavage of the target nucleic acid and template nucleic acid directed modification, e.g., correction, of the target position. In an embodiment, a target position can be a site between two nucleotides, e.g., adjacent nucleotides, on the target nucleic acid into which one or more nucleotides is added. The target position may comprise one or more nucleotides that are altered, e.g., corrected, by a template nucleic acid. In an embodiment, the target position is within a target sequence (e.g., the sequence to which the gRNA binds). In an embodiment, a target position is upstream or downstream of a target sequence (e.g., the sequence to which the gRNA binds).

[1509] A template nucleic acid, as that term is used herein, refers to a nucleic acid sequence which can be used in conjunction with a Cas9 molecule and a gRNA molecule to alter the structure of a target position. In an embodiment, the target nucleic acid is modified to have the some or all of the sequence of the template nucleic acid, typically at or near cleavage site(s). In an embodiment, the template nucleic acid is single stranded. In an alternate embodiment, the template nucleic acid is double stranded. In an embodiment, the template nucleic acid is DNA, e.g., double stranded DNA. In an alternate embodiment, the template nucleic acid is single stranded DNA. In an embodiment, the template nucleic acid is encoded on the same vector backbone, e.g. AAV genome, plasmid DNA, as the Cas9 and gRNA. In an embodiment, the template nucleic acid is excised from a vector backbone in vivo, e.g., it is flanked by gRNA recognition sequences. In an embodiment, the template nucleic acid comprises endogenous genomic sequence

[1510] In an embodiment, the template nucleic acid alters the structure of the target position by participating in a homology directed repair event. In an embodiment, the template nucleic acid alters the sequence of the target position. In an embodiment, the template nucleic acid results in the incorporation of a modified, or non-naturally occurring base into the target nucleic acid.

[1511] Typically, the template sequence undergoes a breakage mediated or catalyzed recombination with the target sequence. In an embodiment, the template nucleic acid includes sequence that corresponds to a site on the target sequence that is cleaved by an eaCas9 mediated cleavage event. In an embodiment, the template nucleic acid includes sequence that corresponds to both, a first site on the target sequence that is cleaved in a first Cas9 mediated event, and a second site on the target sequence that is cleaved in a second Cas9 mediated event.

[1512] In an embodiment, the template nucleic acid can include sequence which results in an alteration in the coding sequence of a translated sequence, e.g., one which results in the substitution of one amino acid for another in a protein product, e.g., transforming a mutant allele into a wild type allele, transforming a wild type allele into a mutant allele, and/or introducing a stop codon, insertion of an amino acid residue, deletion of an amino acid residue, or a nonsense mutation.

[1513] In other embodiments, the template nucleic acid can include sequence which results in an alteration in a non-coding sequence, e.g., an alteration in an exon or in a 5′ or 3′ non-translated or non-transcribed region. Such alterations include an alteration in a control element, e.g., a promoter, enhancer, and an alteration in a cis-acting or trans-acting control element.

[1514] A template nucleic acid having homology with a target position in the HBB gene can be used to alter the structure of a target sequence. The template sequence can be used to alter an unwanted structure, e.g., an unwanted or mutant nucleotide.

[1515] A template nucleic acid typically comprises the following components:

[1516] [5′ homology arm]-[replacement sequence]-[3′ homology arm].

[1517] The homology arms provide for recombination into the chromosome, thus replacing the undesired element, e.g., a mutation or signature, with the replacement sequence. In an embodiment, the homology arms flank the most distal cleavage sites.

[1518] In an embodiment, the 3′ end of the 5′ homology arm is the position next to the 5′ end of the replacement sequence. In an embodiment, the 5′ homology arm can extend at least 10, 20, 30, 40, 50, 100, 200, 300, 400, 500, 600, 700, 800, 900, 1000, 1500, 2000, 3000, 4000, or 5000 nucleotides 5′ from the 5′ end of the replacement sequence.

[1519] In an embodiment, the 5′ end of the 3′ homology arm is the position next to the 3′ end of the replacement sequence. In an embodiment, the 3′ homology arm can extend at least 10, 20, 30, 40, 50, 100, 200, 300, 400, 500, 600, 700, 800, 900, 1000, 1500, 2000, 3000, 4000, or 5000 nucleotides 3′ from the 3′ end of the replacement sequence.

[1520] In an embodiment, to correct a mutation, the homology arms, e.g., the 5′ and 3′ homology arms, may each comprise about 1000 base pairs (bp) of sequence flanking the most distal gRNAs (e.g., 1000 bp of sequence on either side of the mutation).

[1521] It is contemplated herein that one or both homology arms may be shortened to avoid including certain sequence repeat elements, e.g., Alu repeats or LINE elements. For example, a 5′ homology arm may be shortened to avoid a sequence repeat element. In other embodiments, a 3′ homology arm may be shortened to avoid a sequence repeat element. In some embodiments, both the 5′ and the 3′ homology arms may be shortened to avoid including certain sequence repeat elements.

[1522] It is contemplated herein that template nucleic acids for correcting a mutation may be designed for use as a single-stranded oligonucleotide, e.g., a single-stranded oligodeoxynucleotide (ssODN). When using a ssODN, 5′ and 3′ homology arms may range up to about 200 base pairs (bp) in length, e.g., at least 25, 50, 75, 100, 125, 150, 175, or 200 bp in length. Longer homology arms are also contemplated for ssODNs as improvements in oligonucleotide synthesis continue to be made. In some embodiments, a longer homology arm is made by a method other than chemical synthesis, e.g., by denaturing a long double stranded nucleic acid and purifying one of the strands, e.g., by affinity for a strand-specific sequence anchored to a solid substrate.

[1523] While not wishing to be bound by theory, in some embodiments alt-HDR proceeds more efficiently when the template nucleic acid has extended homology 5′ to the nick (i.e., in the 5′ direction of the nicked strand). Accordingly, in some embodiments, the template nucleic acid has a longer homology arm and a shorter homology arm, wherein the longer homology arm can anneal 5′ of the nick. In some embodiments, the arm that can anneal 5′ to the nick is at least 25, 50, 75, 100, 125, 150, 175, or 200, 300, 400, 500, 600, 700, 800, 900, 1000, 1500, 2000, 3000, 4000, or 5000 nucleotides from the nick or the 5′ or 3′ end of the replacement sequence. In some embodiments, the arm that can anneal 5′ to the nick is at least 10%, 20%, 30%, 40%, or 50% longer than the arm that can anneal 3′ to the nick. In some embodiments, the arm that can anneal 5′ to the nick is at least 2×, 3×, 4×, or 5× longer than the arm that can anneal 3′ to the nick. Depending on whether a ssDNA template can anneal to the intact strand or the nicked strand, the homology arm that anneals 5′ to the nick may be at the 5′ end of the ssDNA template or the 3′ end of the ssDNA template, respectively.

[1524] Similarly, in some embodiments, the template nucleic acid has a 5′ homology arm, a replacement sequence, and a 3′ homology arm, such that the template nucleic acid has extended homology to the 5′ of the nick. For example, the 5′ homology arm and 3′ homology arm may be substantially the same length, but the replacement sequence may extend farther 5′ of the nick than 3′ of the nick. In some embodiments, the replacement sequence extends at least 10%, 20%, 30%, 40%, 50%, 2×, 3×, 4×, or 5× further to the 5′ end of the nick than the 3′ end of the nick. While not wishing to be bound by theory, in some embodiments alt-HDR proceeds more efficiently when the template nucleic acid is centered on the nick. Accordingly, in some embodiments, the template nucleic acid has two homology arms that are essentially the same size. For instance, the first homology arm of a template nucleic acid may have a length that is within 10%, 9%, 8%, 7%, 6%, 5%, 4%, 3%, 2%, or 1% of the second homology arm of the template nucleic acid.

[1525] Similarly, in some embodiments, the template nucleic acid has a 5′ homology arm, a replacement sequence, and a 3′ homology arm, such that the template nucleic acid extends substantially the same distance on either side of the nick. For example, the homology arms may have different lengths, but the replacement sequence may be selected to compensate for this. For example, the replacement sequence may extend further 5′ from the nick than it does 3′ of the nick, but the homology arm 5′ of the nick is shorter than the homology arm 3′ of the nick, to compensate. The converse is also possible, e.g., that the replacement sequence may extend further 3′ from the nick than it does 5′ of the nick, but the homology arm 3′ of the nick is shorter than the homology arm 5′ of the nick, to compensate.

[1526] Exemplary Arrangements of Linear Nucleic Acid Template Systems

[1527] In an embodiment, the nucleic acid template system is double stranded. In an embodiment, the nucleic acid template system is single stranded. In an embodiment, the nucleic acid template system comprises a single stranded portion and a double stranded portion. In an embodiment, the template nucleic acid comprises about 50 to 100, e.g., 55 to 95, 60 to 90, 65 to 85, or 70 to 80, base pairs, homology on either side of the nick and/or replacement sequence. In an embodiment, the template nucleic acid comprises about 50, 55, 60, 65, 70, 75, 80, 85, 90, 95, or 100 base pairs homology 5′ of the nick or replacement sequence, 3′ of the nick or replacement sequence, or both 5′ and 3′ of the nick or replacement sequences.

[1528] In an embodiment, the template nucleic acid comprises about 150 to 200, e.g., 155 to 195, 160 to 190, 165 to 185, or 170 to 180, base pairs homology 3′ of the nick and/or replacement sequence. In an embodiment, the template nucleic acid comprises about 150, 155, 160, 165, 170, 175, 180, 185, 190, 195, or 200 base pairs homology 3′ of the nick or replacement sequence. In an embodiment, the template nucleic acid comprises less than about 100, 90, 80, 70, 60, 50, 40, 30, 20, 15, or 10 base pairs homology 5′ of the nick or replacement sequence.

[1529] In an embodiment, the template nucleic acid comprises about 150 to 200, e.g., 155 to 195, 160 to 190, 165 to 185, or 170 to 180, base pairs homology 5′ of the nick and/or replacement sequence. In an embodiment, the template nucleic acid comprises about 150, 155, 160, 165, 170, 175, 180, 185, 190, 195, or 200 base pairs homology 5′ of the nick or replacement sequence. In an embodiment, the template nucleic acid comprises less than about 100, 90, 80, 70, 60, 50, 40, 30, 20, 15, or 10 base pairs homology 3′ of the nick or replacement sequence.

[1530] Exemplary Template Nucleic Acids

[1531] In an embodiment, the template nucleic acid is a single stranded nucleic acid. In another embodiment, the template nucleic acid is a double stranded nucleic acid. In some embodiments, the template nucleic acid comprises a nucleotide sequence, e.g., of one or more nucleotides, that will be added to or will template a change in the target nucleic acid. In other embodiments, the template nucleic acid comprises a nucleotide sequence that may be used to modify the target position. In other embodiments, the template nucleic acid comprises a nucleotide sequence, e.g., of one or more nucleotides, that corresponds to wild type sequence of the target nucleic acid, e.g., of the target position.

[1532] The template nucleic acid may comprise a replacement sequence. In some embodiments, the template nucleic acid comprises a 5′ homology arm. In other embodiments, the template nucleic acid comprises a 3′ homology arm.

[1533] In embodiments, the template nucleic acid is linear double stranded DNA. The length may be, e.g., about 150-200 base pairs, e.g., about 150, 160, 170, 180, 190, or 200 base pairs. The length may be, e.g., at least 150, 160, 170, 180, 190, or 200 base pairs. In some embodiments, the length is no greater than 150, 160, 170, 180, 190, or 200 base pairs. In some embodiments, a double stranded template nucleic acid has a length of about 160 base pairs, e.g., about 155-165, 150-170, 140-180, 130-190, 120-200, 110-210, 100-220, 90-230, or 80-240 base pairs.

[1534] The template nucleic acid can be linear single stranded DNA. In embodiments, the template nucleic acid is (i) linear single stranded DNA that can anneal to the nicked strand of the target nucleic acid, (ii) linear single stranded DNA that can anneal to the intact strand of the target nucleic acid, (iii) linear single stranded DNA that can anneal to the transcribed strand of the target nucleic acid, (iv) linear single stranded DNA that can anneal to the non-transcribed strand of the target nucleic acid, or more than one of the preceding. The length may be, e.g., about 150-200 nucleotides, e.g., about 150, 160, 170, 180, 190, or 200 nucleotides. The length may be, e.g., at least 150, 160, 170, 180, 190, or 200 nucleotides. In some embodiments, the length is no greater than 150, 160, 170, 180, 190, or 200 nucleotides. In some embodiments, a single stranded template nucleic acid has a length of about 160 nucleotides, e.g., about 155-165, 150-170, 140-180, 130-190, 120-200, 110-210, 100-220, 90-230, or 80-240 nucleotides.

[1535] In some embodiments, the template nucleic acid is circular double stranded DNA, e.g., a plasmid. In some embodiments, the template nucleic acid comprises about 500 to 1000 base pairs of homology on either side of the replacement sequence and/or the nick. In some embodiments, the template nucleic acid comprises about 300, 400, 500, 600, 700, 800, 900, 1000, 1500, or 2000 base pairs of homology 5′ of the nick or replacement sequence, 3′ of the nick or replacement sequence, or both 5′ and 3′ of the nick or replacement sequence. In some embodiments, the template nucleic acid comprises at least 300, 400, 500, 600, 700, 800, 900, 1000, 1500, or 2000 base pairs of homology 5′ of the nick or replacement sequence, 3′ of the nick or replacement sequence, or both 5′ and 3′ of the nick or replacement sequence. In some embodiments, the template nucleic acid comprises no more than 300, 400, 500, 600, 700, 800, 900, 1000, 1500, or 2000 base pairs of homology 5′ of the nick or replacement sequence, 3′ of the nick or replacement sequence, or both 5′ and 3′ of the nick or replacement sequence.

[1536] In some embodiments, the template nucleic acid is an adenovirus vector, e.g., an AAV vector, e.g., a ssDNA molecule of a length and sequence that allows it to be packaged in an AAV capsid. The vector may be, e.g., less than 5 kb and may contain an ITR sequence that promotes packaging into the capsid. The vector may be integration-deficient; In some embodiments, the template nucleic acid comprises about 150 to 1000 nucleotides of homology on either side of the replacement sequence and/or the nick. In some embodiments, the template nucleic acid comprises about 100, 150, 200, 300, 400, 500, 600, 700, 800, 900, 1000, 1500, or 2000 nucleotides 5′ of the nick or replacement sequence, 3′ of the nick or replacement sequence, or both 5′ and 3′ of the nick or replacement sequence. In some embodiments, the template nucleic acid comprises at least 100, 150, 200, 300, 400, 500, 600, 700, 800, 900, 1000, 1500, or 2000 nucleotides 5′ of the nick or replacement sequence, 3′ of the nick or replacement sequence, or both 5′ and 3′ of the nick or replacement sequence. In some embodiments, the template nucleic acid comprises at most 100, 150, 200, 300, 400, 500, 600, 700, 800, 900, 1000, 1500, or 2000 nucleotides 5′ of the nick or replacement sequence, 3′ of the nick or replacement sequence, or both 5′ and 3′ of the nick or replacement sequence.

[1537] In some embodiments, the template nucleic acid is a lentiviral vector, e.g., an IDLV (integration deficiency lentivirus). In some embodiments, the template nucleic acid comprises about 500 to 1000 base pairs of homology on either side of the replacement sequence and/or the nick. In some embodiments, the template nucleic acid comprises about 300, 400, 500, 600, 700, 800, 900, 1000, 1500, or 2000 base pairs of homology 5′ of the nick or replacement sequence, 3′ of the nick or replacement sequence, or both 5′ and 3′ of the nick or replacement sequence. In some embodiments, the template nucleic acid comprises at least 300, 400, 500, 600, 700, 800, 900, 1000, 1500, or 2000 base pairs of homology 5′ of the nick or replacement sequence, 3′ of the nick or replacement sequence, or both 5′ and 3′ of the nick or replacement sequence. In some embodiments, the template nucleic acid comprises no more than 300, 400, 500, 600, 700, 800, 900, 1000, 1500, or 2000 base pairs of homology 5′ of the nick or replacement sequence, 3′ of the nick or replacement sequence, or both 5′ and 3′ of the nick or replacement sequence.

[1538] In many embodiments, the template nucleic acid comprises one or more mutations, e.g., silent mutations, that prevent Cas9 from recognizing and cleaving the template nucleic acid. The template nucleic acid may comprise, e.g., at least 1, 2, 3, 4, 5, 10, 20, or 30 silent mutations relative to the corresponding sequence in the genome of the cell to be altered. In embodiments, the template nucleic acid comprises at most 2, 3, 4, 5, 10, 20, 30, or 50 silent mutations relative to the corresponding sequence in the genome of the cell to be altered. In an embodiment, the template nucleic acid alters the structure of the target position by participating in a homology directed repair event. In an embodiment, the template nucleic acid alters the sequence of the target position. In an embodiment, the template nucleic acid results in the incorporation of a modified, or non-naturally occurring base into the target nucleic acid.

[1539] Typically, the template sequence undergoes a breakage mediated or catalyzed recombination with the target sequence. In an embodiment, the template nucleic acid includes sequence that corresponds to a site on the target sequence that is cleaved by an eaCas9 mediated cleavage event. In an embodiment, the template nucleic acid includes sequence that corresponds to both, a first site on the target sequence that is cleaved in a first Cas9 mediated event, and a second site on the target sequence that is cleaved in a second Cas9 mediated event.

[1540] In an embodiment, the template nucleic acid can include sequence which results in an alteration in the coding sequence of a translated sequence, e.g., one which results in the substitution of one amino acid for another in a protein product, e.g., transforming a mutant allele into a wild type allele, transforming a wild type allele into a mutant allele, and/or introducing a stop codon, insertion of an amino acid residue, deletion of an amino acid residue, or a nonsense mutation.

[1541] In other embodiments, the template nucleic acid can include sequence which results in an alteration in a non-coding sequence, e.g., an alteration in an exon or in a 5′ or 3′ non-translated or non-transcribed region. Such alterations include an alteration in a control element, e.g., a promoter, enhancer, and an alteration in a cis-acting or trans-acting control element. A template nucleic acid having homology with a target position can be used to alter the structure of a target sequence. The template sequence can be used to alter an unwanted structure, e.g., an unwanted or mutant nucleotide.

[1542] Exemplary template nucleic acids (also referred to herein as donor constructs) to correction a mutation, e.g., at E6, e.g., E6V, in the HBB gene, are provided.

[1543] Suitable sequence for the 5′ homology arm can be selected from (e.g., includes a portion of) or include the following sequence:

SEQ ID NO: 16257

ATAGGAACTTGAATCAAGGAAATGATTTTAAAACGCAGTATTCTTAGTGG
ACTAGAGGAAAAAAATAATCTGAGCCAAGTAGAAGACCTTTTCCCCTCCT
ACCCCTACTTTCTAAGTCACAGAGGCTTTTTGTTCCCCCAGACACTCTTG
CAGATTAGTCCAGGCAGAAACAGTTAGATGTCCCCAGTTAACCTCCTATT
TGACACCACTGATTACCCCATTGATAGTCACACTTTGGGTTGTAAGTGAC
TTTTTATTTATTTGTATTTTTGACTGCATTAAGAGGTCTCTAGTTTTTTA
TCTCTTGTTTCCCAAAACCTAATAAGTAACTAATGCACAGAGCACATTGA
TTTGTATTTATTCTATTTTTAGACATAATTTATTAGCATGCATGAGCAAA
TTAAGAAAAACAACAACAAATGAATGCATATATATGTATATGTATGTGTG
TATATATACACACATATATATATATATTTTTTCTTTTCTTACCAGAAGGT
TTTAATCCAAATAAGGAGAAGATATGCTTAGAACCGAGGTAGAGTTTTCA
TCCATTCTGTCCTGTAAGTATTTTGCATATTCTGGAGACGCAGGAAGAGA
TCCATCTACATATCCCAAAGCTGAATTATGGTAGACAAAACTCTTCCACT
TTTAGTGCATCAACTTCTTATTTGTGTAATAAGAAAATTGGGAAAACGAT
CTTCAATATGCTTACCAAGCTGTGATTCCAAATATTACGTAAATACACTT
GCAAAGGAGGATGTTTTTAGTAGCAATTTGTACTGATGGTATGGGGCCAA
GAGATATATCTTAGAGGGAGGGCTGAGGGTTTGAAGTCCAACTCCTAAGC
CAGTGCCAGAAGAGCCAAGGACAGGTACGGCTGTCATCACTTAGACCTCA
CCCTGTGGAGCCACACCCTAGGGTTGGCCAATCTACTCCCAGGAGCAGGG
AGGGCAGGAGCCAGGGCTGGGCATAAAAGTCAGGGCAGAGCCATCTATTG
CTTACATTTGCTTCTGACACAACTGTGTTCACTAGCAACCTCAAACAGAC
ACCATGGTGCATCTGACTCCTG (5′H arm)

[1544] Suitable sequence for the 3′ homology arm can be selected from (e.g., includes a portion of) or include the following sequence:

SEQ ID NO: 16258

GGAGAAGTCTGCCGTTACTGCCCTGTGGGGCAAGGTGAACGTGGATGAAG
TTGGTGGTGAGGCCCTGGGCAGGTTGGTATCAAGGTTACAAGACAGGTTT
AAGGAGACCAATAGAAACTGGGCATGTGGAGACAGAGAAGACTCTTGGGT
TTCTGATAGGCACTGACTCTCTCTGCCTATTGGTCTATTTTCCCACCCTT
AGGCTGCTGGTGGTCTACCCTTGGACCCAGAGGTTCTTTGAGTCCTTTGG
GGATCTGTCCACTCCTGATGCTGTTATGGGCAACCCTAAGGTGAAGGCTC
ATGGCAAGAAAGTGCTCGGTGCCTTTAGTGATGGCCTGGCTCACCTGGAC
AACCTCAAGGGCACCTTTGCCACACTGAGTGAGCTGCACTGTGACAAGCT
GCACGTGGATCCTGAGAACTTCAGGGTGAGTCTATGGGACGCTTGATGTT
TTCTTTCCCCTTCTTTTCTATGGTTAAGTTCATGTCATAGGAAGGGGATA
AGTAACAGGGTACAGTTTAGAATGGGAAACAGACGAATGATTGCATCAGT
GTGGAAGTCTCAGGATCGTTTTAGTTTCTTTTATTTGCTGTTCATAACAA
TTGTTTTCTTTTGTTTAATTCTTGCTTTCTTTTTTTTTCTTCTCCGCAAT
TTTTACTATTATACTTAATGCCTTAACATTGTGTATAACAAAAGGAAATA
TCTCTGAGATACATTAAGTAACTTAAAAAAAAACTTTACACAGTCTGCCT
AGTACATTACTATTTGGAATATATGTGTGCTTATTTGCATATTCATAATC
TCCCTACTTTATTTTCTTTTATTTTTAATTGATACATAATCATTATACAT
ATTTATGGGTTAAAGTGTAATGTTTTAATATGTGTACACATATTGACCAA
ATCAGGGTAATTTTGCATTTGTAATTTTAAAAAATGCTTTCTTCTTTTAA
TATACTTTTTTGTTTATCTTATTTCTAATACTTTCCCTAATCTCTTTCTT
TCAGGGCAATAATGATACAATGTATCATGCCTCTTTGCACCATTCTAAAG
AATAACAGTGATAATTTCTGGGTTAAGGCAATAGCAATATCTCTGCATAT
AAATATTTCTGCATATAAATTGTAACTG (3′H arm)

[1545] In an embodiment, the replacement sequence comprises or consists of an adenine (A) residue to correct the amino acid sequence to a glutamic acid (E) residue.

[1546] In an embodiment, to correct a mutation, e.g., at E6, e.g., E6V, in the HBB gene, the homology arms, e.g., the 5′ and 3′ homology arms, may each comprise about 1000 base pairs (bp) of sequence flanking the most distal gRNAs (e.g., 1100 bp of sequence on either side of the mutation). The 5′ homology arm is shown as bold sequence, codon 6 is shown as underlined sequence, the inserted base to correct the mutation at E6, e.g., E6V, is shown as boxed sequence, and the 3′ homology arm is shown as no emphasis sequence.

(Template Construct 1; SEQ ID NO: 16259)
ATAGGAACTTGAATCAAGGAAATGATTTTAAAACGCAGTATTCTTAGTGGACTA
GAG GAAAAAAATAATCTGAGCCAAGTAGAAGACCTTTTCCCCTCCTACCCCTAC
TTTCTAAGTCACAGAGGCTTTTTGTTCCCCCAGACACTCTTGCAGATTAGTCCA
GGCAGAAACAGTTAGATGTCCCCAGTTAACCTCCTATTTGACACCACTGATTAC
CCCATTGATAGTCACACTTTGGGTTGTAAGTGACTTTTTATTTATTTGTATTTTT
GACTGCATTAAGAGGTCTCTAGTTTTTTATCTCTTGTTTCCCAAAACCTAATAA
GTAACTAATGCACAGAGCACATTGATTTGTATTTATTCTATTTTTAGACATAATT
TATTAGCATGCATGAGCAAATTAAGAAAAACAACAACAAATGAATGCATATATA
TGTATATGTATGTGTGTATATATACACACATATATATATATATTTTTTCTTTTCT
TACCAGAAGGTTTTAATCCAAATAAGGAGAAGATATGCTTAGAACCGAGGTAG
AGTTTTCATCCATTCTGTCCTGTAAGTATTTTGCATATTCTGGAGACGCAGGAA
GAGATCCATCTACATATCCCAAAGCTGAATTATGGTAGACAAAACTCTTCCACT
TTTAGTGCATCAACTTCTTATTTGTGTAATAAGAAAATTGGGAAAACGATCTTC
AATATGCTTACCAAGCTGTGATTCCAAATATTACGTAAATACACTTGCAAAGGA
GGATGTTTTTAGTAGCAATTTGTACTGATGGTATGGGGCCAAGAGATATATCTT
AGAGGGAGGGCTGAGGGTTTGAAGTCCAACTCCTAAGCCAGTGCCAGAAGAGC
CAAGGACAGGTACGGCTGTCATCACTTAGACCTCACCCTGTGGAGCCACACCC
TAGGGTTGGCCAATCTACTCCCAGGAGCAGGGAGGGCAGGAGCCAGGGCTGG
GCATAAAAGTCAGGGCAGAGCCATCTATTGCTTACATTTGCTTCTGACACAACT

[chemical structure]

AGTCTGCCGTTACTGCCCTGTGGGGCAAGGTGAACGTGGATGAAGTTGGTGGTGAG
GCCCTGGGCAGGTTGGTATCAAGGTTACAAGACAGGTTTAAGGAGACCAATAGAAA
CTGGGCATGTGGAGACAGAGAAGACTCTTGGGTTTCTGATAGGCACTGACTCTCTCT
GCCTATTGGTCTATTTTCCCACCCTTAGGCTGCTGGTGGTCTACCCTTGGACCCAGAG
GTTCTTTGAGTCCTTTGGGGATCTGTCCACTCCTGATGCTGTTATGGGCAACCCTAAG
GTGAAGGCTCATGGCAAGAAAGTGCTCGGTGCCTTTAGTGATGGCCTGGCTCACCTG
GACAACCTCAAGGGCACCTTTGCCACACTGAGTGAGCTGCACTGTGACAAGCTGCA
CGTGGATCCTGAGAACTTCAGGGTGAGTCTATGGGACGCTTGATGTTTTCTTTCCCCT
TCTTTTCTATGGTTAAGTTCATGTCATAGGAAGGGGATAAGTAACAGGGTACAGTTT
AGAATGGGAAACAGACGAATGATTGCATCAGTGTGGAAGTCTCAGGATCGTTTTAG
TTTCTTTTATTTGCTGTTCATAACAATTGTTTTCTTTTGTTTAATTCTTGCTTTCTTTTT
TTTTCTTCTCCGCAATTTTTACTATTATACTTAATGCCTTAACATTGTGTATAACAAA
AGGAAATATCTCTGAGATACATTAAGTAACTTAAAAAAAAACTTTACACAGTCTGCC
TAGTACATTACTATTTGGAATATATGTGTGCTTATTTGCATATTCATAATCTCCCTAC
TTTATTTTCTTTTATTTTTAATTGATACATAATCATTATACATATTTATGGGTTAAAGT
GTAATGTTTTAATATGTGTACACATATTGACCAAATCAGGGTAATTTTGCATTTGTAA
TTTTAAAAAATGCTTTCTTCTTTTAATATACTTTTTTGTTTATCTTATTTCTAATACTTT
CCCTAATCTCTTTCTTTCAGGGCAATAATGATACAATGTATCATGCCTCTTTGCACCA
TTCTAAAGAATAACAGTGATAATTTCTGGGTTAAGGCAATAGCAATATCTCTGCATA
TAAATATTTCTGCATATAAATTGTAACTG

[1547] As described below in Table 27, shorter homology arms, e.g., 5′ and/or 3′ homology arms may be used.

[1548] It is contemplated herein that one or both homology arms may be shortened to avoid including certain sequence repeat elements, e.g., Alu repeats, LINE elements. For example, a 5′ homology arm may be shortened to avoid a sequence repeat element. In another embodiment, a 3′ homology arm may be shortened to avoid a sequence repeat element. In an embodiment, both the 5′ and the 3′ homology arms may be shortened to avoid including certain sequence repeat elements.

[1549] It is contemplated herein that template nucleic acids for correcting a mutation may designed for use as a single-stranded oligonucleotide (ssODN). When using a ssODN, 5′ and 3′ homology arms may range up to about 200 base pairs (bp) in length, e.g., at least 25, 50, 75, 100, 125, 150, 175, or 200 bp in length. Longer homology arms are also contemplated for ssODNs as improvements in oligonucleotide synthesis continue to be made.

[1550] In an embodiment, an ssODN may be used to correct a mutation, e.g., E6V in the HBB gene. For example, the ssODN may include 50 bp 5′ and 3′ homology arms as shown below. The 5′ homology arm is shown as bold sequence, codon 6 is shown as underlined sequence, the inserted base to correct the E6V mutation is shown as boxed sequence, and the 3′ homology arm is shown as no emphasis sequence.

(Template Construct 2; SEQ ID NO: 16260)
ACTGTGTTCACTAGCAACCTCAAACAGACACCATGGTGCATCTGACTCCT

[chemical structure]

AGT

[1551] Silent Mutations in Donor Construct

[1552] It is contemplated herein that Cas9 could potentially cleave donor constructs either prior to or following homology directed repair (e.g., homologous recombination), resulting in a possible non-homologous-end-joining event and further DNA sequence mutation at the chromosomal locus of interest. Therefore, to avoid cleavage of the donor sequence before and/or after Cas9-mediated homology directed repair, alternate versions of the donor sequence may be used where silent mutations are introduced. These silent mutations may disrupt Cas9 binding and cleavage, but not disrupt the amino acid sequence of the repaired gene. For example, mutations may include those made to a donor sequence to repair the HBB gene, the mutant form of which can cause Sickle Cell Disease. If gRNA HBB-6 with the 20-base target sequence CGUUACUGCCCUGUGGGGCA is used to insert a donor sequence including

[chemical structure]

where the italic A is the base being corrected and the bracketed bases are those that match the guide RNA, the donor sequence may be changed to

[chemical structure]

where the lowercase a has been changed from a G (lower case g in sequence ID xxx) at that position so that codon 15 still codes for the amino acid Arginine but the PAM sequence AGG has been modified to AGA to reduce or eliminate Cas9 cleavage at that locus.

[1553] Table 27 below provides exemplary template nucleic acids. In an embodiment, the template nucleic acid includes the 5′ homology arm and the 3′ homology arm of a row from Table 27. In another embodiment, a 5′ homology arm from the first column can be combined with a 3′ homology arm from Table 27. In each embodiment, a combination of the 5′ and 3′ homology arms include a replacement sequence, e.g., an adenine (A) residue.

TABLE 27

| 5′ homology arm | | 3′ homology arm |
|---|---|---|
| (the number of | | (the number of |
| nucleotides from | | nucleotides from |
| SEQ ID NO: 5′H, | | SEQ ID NO: 3′H, |
| beginning at | | beginning at |
| the 3′ end of | Replacement | the 5′ end of |
| SEQ ID NO: 5′H) | Sequence = A | SEQ ID NO: 3′H) |
| 10 or more | | 10 or more |
| 20 or more | | 20 or more |
| 50 or more | | 50 or more |
| 100 or more | | 100 or more |
| 150 or more | | 150 or more |
| 200 or more | | 200 or more |
| 250 or more | | 250 or more |
| 300 or more | | 300 or more |
| 350 or more | | 350 or more |
| 400 or more | | 400 or more |
| 450 or more | | 450 or more |
| 500 or more | | 500 or more |
| 550 or more | | 550 or more |
| 600 or more | | 600 or more |
| 650 or more | | 650 or more |
| 700 or more | | 700 or more |
| 750 or more | | 750 or more |
| 800 or more | | 800 or more |
| 850 or more | | 850 or more |
| 900 or more | | 900 or more |
| 1000 or more | | 1000 or more |
| 1100 or more | | 1100 or more |
| 1200 or more | | 1200 or more |
| 1300 or more | | 1300 or more |
| 1400 or more | | 1400 or more |
| 1500 or more | | 1500 or more |
| 1600 or more | | 1600 or more |
| 1700 or more | | 1700 or more |
| 1800 or more | | 1800 or more |
| 1900 or more | | 1900 or more |
| 1200 or more | | 1200 or more |
| At least 50 but not long | | At least 50 but not long |
| enough to include a | | enough to include a |
| repeated element. | | repeated element. |
| At least 100 but not long | | At least 100 but not long |
| enough to include a | | enough to include a |
| repeated element. | | repeated element. |
| At least 150 but not long | | At least 150 but not long |
| enough to include a | | enough to include a |
| repeated element. | | repeated element. |
| 5 to 100 nucleotides | | 5 to 100 nucleotides |
| 10 to 150 nucleotides | | 10 to 150 nucleotides |
| 20 to 150 nucleotides | | 20 to 150 nucleotides |

Template Construct No. 1
Template Construct No. 2

[1554] V.2 NHEJ Approaches for Gene Targeting

[1555] As described herein, nuclease-induced non-homologous end-joining (NHEJ) can be used to target gene-specific knockouts. Nuclease-induced NHEJ can also be used to remove (e.g., delete) sequences in a gene of interest.

[1556] While not wishing to be bound by theory, it is believed that, in an embodiment, the genomic alterations associated with the methods described herein rely on nuclease-induced NHEJ and the error-prone nature of the NHEJ repair pathway. NHEJ repairs a double-strand break in the DNA by joining together the two ends; however, generally, the original sequence is restored only if two compatible ends, exactly as they were formed by the double-strand break, are perfectly ligated. The DNA ends of the double-strand break are frequently the subject of enzymatic processing, resulting in the addition or removal of nucleotides, at one or both strands, prior to rejoining of the ends. This results in the presence of insertion and/or deletion (indel) mutations in the DNA sequence at the site of the NHEJ repair. Two-thirds of these mutations typically alter the reading frame and, therefore, produce a non-functional protein. Additionally, mutations that maintain the reading frame, but which insert or delete a significant amount of sequence, can destroy functionality of the protein. This is locus dependent as mutations in critical functional domains are likely less tolerable than mutations in non-critical regions of the protein.

[1557] The indel mutations generated by NHEJ are unpredictable in nature; however, at a given break site certain indel sequences are favored and are over represented in the population, likely due to small regions of microhomology. The lengths of deletions can vary widely; most commonly in the 1-50 bp range, but they can reach greater than 100-200 bp. Insertions tend to be shorter and often include short duplications of the sequence immediately surrounding the break site. However, it is possible to obtain large insertions, and in these cases, the inserted sequence has often been traced to other regions of the genome or to plasmid DNA present in the cells.

[1558] Because NHEJ is a mutagenic process, it can also be used to delete small sequence motifs (e.g., motifs less than or equal to 50 nucleotides in length) as long as the generation of a specific final sequence is not required. If a double-strand break is targeted near to a target sequence, the deletion mutations caused by the NHEJ repair often span, and therefore remove, the unwanted nucleotides. For the deletion of larger DNA segments, introducing two double-strand breaks, one on each side of the sequence, can result in NHEJ between the ends with removal of the entire intervening sequence. In this way, DNA segments as large as several hundred kilobases can be deleted. Both of these approaches can be used to delete specific DNA sequences; however, the error-prone nature of NHEJ may still produce indel mutations at the site of repair.

[1559] Both double strand cleaving eaCas9 molecules and single strand, or nickase, eaCas9 molecules can be used in the methods and compositions described herein to generate NHEJ-mediated indels. NHEJ-mediated indels targeted to the the gene, e.g., a coding region, e.g., an early coding region of a gene, of interest can be used to knockout (i.e., eliminate expression of) a gene of interest. For example, early coding region of a gene of interest includes sequence immediately following a start codon, within a first exon of the coding sequence, or within 500 bp of the start codon (e.g., less than 500, 450, 400, 350, 300, 250, 200, 150, 100 or 50 bp).

[1560] Placement of Double Strand or Single Strand Breaks Relative to the Target Position

[1561] In an embodiment, in which a gRNA and Cas9 nuclease generate a double strand break for the purpose of inducing NHEJ-mediated indels, a gRNA, e.g., a unimolecular (or chimeric) or modular gRNA molecule, is configured to position one double-strand break in close proximity to a nucleotide of the target position. In an embodiment, the cleavage site is between 0-30 bp away from the target position (e.g., less than 30, 25, 20, 15, 10, 9, 8, 7, 6, 5, 4, 3, 2 or 1 bp from the target position).

[1562] In an embodiment, in which two gRNAs complexing with Cas9 nickases induce two single strand breaks for the purpose of inducing NHEJ-mediated indels, two gRNAs, e.g., independently, unimolecular (or chimeric) or modular gRNA, are configured to position two single-strand breaks to provide for NHEJ repair a nucleotide of the target position. In an embodiment, the gRNAs are configured to position cuts at the same position, or within a few nucleotides of one another, on different strands, essentially mimicking a double strand break. In an embodiment, the closer nick is between 0-30 bp away from the target position (e.g., less than 30, 25, 20, 15, 10, 9, 8, 7, 6, 5, 4, 3, 2 or 1 bp from the target position), and the two nicks are within 25-55 bp of each other (e.g., between 25 to 50, 25 to 45, 25 to 40, 25 to 35, 25 to 30, 50 to 55, 45 to 55, 40 to 55, 35 to 55, 30 to 55, 30 to 50, 35 to 50, 40 to 50, 45 to 50, 35 to 45, or 40 to 45 bp) and no more than 100 bp away from each other (e.g., no more than 90, 80, 70, 60, 50, 40, 30, 20 or 10 bp). In an embodiment, the gRNAs are configured to place a single strand break on either side of a nucleotide of the target position.

[1563] Both double strand cleaving eaCas9 molecules and single strand, or nickase, eaCas9 molecules can be used in the methods and compositions described herein to generate breaks both sides of a target position. Double strand or paired single strand breaks may be generated on both sides of a target position to remove the nucleic acid sequence between the two cuts (e.g., the region between the two breaks in deleted). In one embodiment, two gRNAs, e.g., independently, unimolecular (or chimeric) or modular gRNA, are configured to position a double-strand break on both sides of a target position. In an alternate embodiment, three gRNAs, e.g., independently, unimolecular (or chimeric) or modular gRNA, are configured to position a double strand break (i.e., one gRNA complexes with a cas9 nuclease) and two single strand breaks or paired single strand breaks (i.e., two gRNAs complex with Cas9 nickases) on either side of the target position. In another embodiment, four gRNAs, e.g., independently, unimolecular (or chimeric) or modular gRNA, are configured to generate two pairs of single strand breaks (i.e., two pairs of two gRNAs complex with Cas9 nickases) on either side of the target position. The double strand break(s) or the closer of the two single strand nicks in a pair will ideally be within 0-500 bp of the target position (e.g., no more than 450, 400, 350, 300, 250, 200, 150, 100, 50 or 25 bp from the target position). When nickases are used, the two nicks in a pair are within 25-55 bp of each other (e.g., between 25 to 50, 25 to 45, 25 to 40, 25 to 35, 25 to 30, 50 to 55, 45 to 55, 40 to 55, 35 to 55, 30 to 55, 30 to 50, 35 to 50, 40 to 50, 45 to 50, 35 to 45, or 40 to 45 bp) and no more than 100 bp away from each other (e.g., no more than 90, 80, 70, 60, 50, 40, 30, 20 or 10 bp).

[1564] V.3 Targeted Knockdown

[1565] Unlike CRISPR/Cas-mediated gene knockout, which permanently eliminates expression by mutating the gene at the DNA level, CRISPR/Cas knockdown allows for temporary reduction of gene expression through the use of artificial transcription factors. Mutating key residues in both DNA cleavage domains of the Cas9 protein (e.g. the D10A and H840A mutations) results in the generation of a catalytically inactive Cas9 (eiCas9 which is also known as dead Cas9 or dCas9) molecule. A catalytically inactive Cas9 complexes with a gRNA and localizes to the DNA sequence specified by that gRNA's targeting domain, however, it does not cleave the target DNA. Fusion of the dCas9 to an effector domain, e.g., a transcription repression domain, enables recruitment of the effector to any DNA site specified by the gRNA. Although an enxymatically inactive (eiCas9) Cas9 molecule itself can block transcription when recruited to early regions in the coding sequence, more robust repression can be achieved by fusing a transcriptional repression domain (for example KRAB, SID or ERD) to the Cas9 and recruiting it to the target knockdown position, e.g., within 1000 bp of sequence 3′ of the start codon or within 500 bp of a promoter region 5′ of the start codon of a gene. It is likely that targeting DNAseI hypersensitive sites (DHSs) of the promoter may yield more efficient gene repression or activation because these regions are more likely to be accessible to the Cas9 protein and are also more likely to harbor sites for endogenous transcription factors. Especially for gene repression, it is contemplated herein that blocking the binding site of an endogenous transcription factor would aid in downregulating gene expression. In an embodiment, one or more eiCas9 molecules may be used to block binding of one or more endogenous transcription factors. In another embodiment, an eiCas9 molecule can be fused to a chromatin modifying protein. Altering chromatin status can result in decreased expression of the target gene. One or more eiCas9 molecules fused to one or more chromatin modifying proteins may be used to alter chromatin status.

[1566] In an embodiment, a gRNA molecule can be targeted to a known transcription response elements (e.g., promoters, enhancers, etc.), a known upstream activating sequences (UAS), and/or sequences of unknown or known function that are suspected of being able to control expression of the target DNA.

[1567] CRISPR/Cas-mediated gene knockdown can be used to reduce expression of an unwanted allele or transcript. Contemplated herein are scenarios wherein permanent destruction of the gene is not ideal. In these scenarios, site-specific repression may be used to temporarily reduce or eliminate expression. It is also contemplated herein that the off-target effects of a Cas-repressor may be less severe than those of a Cas-nuclease as a nuclease can cleave any DNA sequence and cause mutations whereas a Cas-repressor may only have an effect if it targets the promoter region of an actively transcribed gene. However, while nuclease-mediated knockout is permanent, repression may only persist as long as the Cas-repressor is present in the cells. Once the repressor is no longer present, it is likely that endogenous transcription factors and gene regulatory elements would restore expression to its natural state.

[1568] V.4 Single-Strand Annealing

[1569] Single strand annealing (SSA) is another DNA repair process that repairs a double-strand break between two repeat sequences present in a target nucleic acid. Repeat sequences utilized by the SSA pathway are generally greater than 30 nucleotides in length. Resection at the break ends occurs to reveal repeat sequences on both strands of the target nucleic acid. After resection, single strand overhangs containing the repeat sequences are coated with RPA protein to prevent the repeats sequences from inappropriate annealing, e.g., to themselves. RAD52 binds to and each of the repeat sequences on the overhangs and aligns the sequences to enable the annealing of the complementary repeat sequences. After annealing, the single-strand flaps of the overhangs are cleaved. New DNA synthesis fills in any gaps, and ligation restores the DNA duplex. As a result of the processing, the DNA sequence between the two repeats is deleted. The length of the deletion can depend on many factors including the location of the two repeats utilized, and the pathway or processivity of the resection.

[1570] In contrast to HDR pathways, SSA does not require a template nucleic acid to alter or correct a target nucleic acid sequence. Instead, the complementary repeat sequence is utilized.

[1571] V. 5 Other DNA Repair Pathways

[1572] SSBR (Single Strand Break Repair)

[1573] Single-stranded breaks (SSB) in the genome are repaired by the SSBR pathway, which is a distinct mechanism from the DSB repair mechanisms discussed above. The SSBR pathway has four major stages: SSB detection, DNA end processing, DNA gap filling, and DNA ligation. A more detailed explanation is given in Caldecott, Nature Reviews Genetics 9, 619-631 (August 2008), and a summary is given here.

[1574] In the first stage, when a SSB forms, PARP1 and/or PARP2 recognize the break and recruit repair machinery. The binding and activity of PARP1 at DNA breaks is transient and it seems to accelerate SSBr by promoting the focal accumulation or stability of SSBr protein complexes at the lesion. Arguably the most important of these SSBr proteins is XRCC1, which functions as a molecular scaffold that interacts with, stabilizes, and stimulates multiple enzymatic components of the SSBr process including the protein responsible for cleaning the DNA 3′ and 5′ ends. For instance, XRCC1 interacts with several proteins (DNA polymerase beta, PNK, and three nucleases, APE1, APTX, and APLF) that promote end processing. APE1 has endonuclease activity. APLF exhibits endonuclease and 3′ to 5′ exonuclease activities. APTX has endonuclease and 3′ to 5′ exonuclease activity.

[1575] This end processing is an important stage of SSBR since the 3′- and/or 5′-termini of most, if not all, SSBs are ‘damaged’. End processing generally involves restoring a damaged 3′-end to a hydroxylated state and and/or a damaged 5′ end to a phosphate moiety, so that the ends become ligation-competent. Enzymes that can process damaged 3′ termini include PNKP, APE1, and TDP1. Enzymes that can process damaged 5′ termini include PNKP, DNA polymerase beta, and APTX. LIG3 (DNA ligase III) can also participate in end processing. Once the ends are cleaned, gap filling can occur.

[1576] At the DNA gap filling stage, the proteins typically present are PARP1, DNA polymerase beta, XRCC1, FEN1 (flap endonculease 1), DNA polymerase delta/epsilon, PCNA, and LIG1. There are two ways of gap filling, the short patch repair and the long patch repair. Short patch repair involves the insertion of a single nucleotide that is missing. At some SSBs, “gap filling” might continue displacing two or more nucleotides (displacement of up to 12 bases have been reported). FEN1 is an endonuclease that removes the displaced 5′-residues. Multiple DNA polymerases, including Pol β, are involved in the repair of SSBs, with the choice of DNA polymerase influenced by the source and type of SSB.

[1577] In the fourth stage, a DNA ligase such as LIG1 (Ligase I) or LIG3 (Ligase III) catalyzes joining of the ends. Short patch repair uses Ligase III and long patch repair uses Ligase I.

[1578] Sometimes, SSBR is replication-coupled. This pathway can involve one or more of CtIP, MRN, ERCC1, and FEN1. Additional factors that may promote SSBR include: aPARP, PARP1, PARP2, PARG, XRCC1, DNA polymerase b, DNA polymerase d, DNA polymerase e, PCNA, LIG1, PNK, PNKP, APE1, APTX, APLF, TDP1, LIG3, FEN1, CtIP, MRN, and ERCC1.

[1579] MMR (Mismatch Repair)

[1580] Cells contain three excision repair pathways: MMR, BER, and NER. The excision repair pathways have a common feature in that they typically recognize a lesion on one strand of the DNA, then exo/endonucleaseases remove the lesion and leave a 1-30 nucleotide gap that is sub-sequentially filled in by DNA polymerase and finally sealed with ligase. A more complete picture is given in Li, Cell Research (2008) 18:85-98, and a summary is provided here.

[1581] Mismatch repair (MMR) operates on mispaired DNA bases.

[1582] The MSH2/6 or MSH2/3 complexes both have ATPases activity that plays an important role in mismatch recognition and the initiation of repair. MSH2/6 preferentially recognizes base-base mismatches and identifies mispairs of 1 or 2 nucleotides, while MSH2/3 preferentially recognizes larger ID mispairs.

[1583] hMLH1 heterodimerizes with hPMS2 to form hMutL α which possesses an ATPase activity and is important for multiple steps of MMR. It possesses a PCNA/replication factor C (RFC)-dependent endonuclease activity which plays an important role in 3′ nick-directed MMR involving EXO1. (EXO1 is a participant in both HR and MMR.) It regulates termination of mismatch-provoked excision. Ligase I is the relevant ligase for this pathway. Additional factors that may promote MMR include: EXO1, MSH2, MSH3, MSH6, MLH1, PMS2, MLH3, DNA Pol d, RPA, HMGB1, RFC, and DNA ligase I.

[1584] Base Excision Repair (BER)

[1585] The base excision repair (BER) pathway is active throughout the cell cycle; it is responsible primarily for removing small, non-helix-distorting base lesions from the genome. In contrast, the related Nucleotide Excision Repair pathway (discussed in the next section) repairs bulky helix-distorting lesions. A more detailed explanation is given in Caldecott, Nature Reviews Genetics 9, 619-631 (August 2008), and a summary is given here.

[1586] Upon DNA base damage, base excision repair (BER) is initiated and the process can be simplified into five major steps: (a) removal of the damaged DNA' base; (b) incision of the subsequent a basic site; (c) clean-up of the DNA ends; (d) insertion of the correct nucleotide into the repair gap; and (e) ligation of the remaining nick in the DNA backbone. These last steps are similar to the SSBR.

[1587] In the first step, a damage-specific DNA glycosylase excises the damaged base through cleavage of the N-glycosidic bond linking the base to the sugar phosphate backbone. Then AP endonuclease-1 (APE1) or bifunctional DNA glycosylases with an associated lyase activity incised the phosphodiester backbone to create a DNA single strand break (SSB). The third step of BER involves cleaning-up of the DNA ends. The fourth step in BER is conducted by Pol β that adds a new complementary nucleotide into the repair gap and in the final step XRCC1/Ligase III seals the remaining nick in the DNA backbone. This completes the short-patch BER pathway in which the majority (˜80%) of damaged DNA bases are repaired. However, if the 5′-ends in step 3 are resistant to end processing activity, following one nucleotide insertion by Pol β there is then a polymerase switch to the replicative DNA polymerases, Pol δ/ε, which then add ˜2-8 more nucleotides into the DNA repair gap. This creates a 5′-flap structure, which is recognized and excised by flap endonuclease-1 (FEN-1) in association with the processivity factor proliferating cell nuclear antigen (PCNA). DNA ligase I then seals the remaining nick in the DNA backbone and completes long-patch BER. Additional factors that may promote the BER pathway include: DNA glycosylase, APE1, Polb, Pold, Pole, XRCC1, Ligase III, FEN-1, PCNA, RECQL4, WRN, MYH, PNKP, and APTX.

[1588] Nucleotide Excision Repair (NER)

[1589] Nucleotide excision repair (NER) is an important excision mechanism that removes bulky helix-distorting lesions from DNA. Additional details about NER are given in Marteijn et al., Nature Reviews Molecular Cell Biology 15,465-481 (2014), and a summary is given here. NER a broad pathway encompassing two smaller pathways: global genomic NER (GG-NER) and transcription coupled repair NER (TC-NER). GG-NER and TC-NER use different factors for recognizing DNA damage. However, they utilize the same machinery for lesion incision, repair, and ligation.

[1590] Once damage is recognized, the cell removes a short single-stranded DNA segment that contains the lesion. Endonucleases XPF/ERCC1 and XPG (encoded by ERCCS) remove the lesion by cutting the damaged strand on either side of the lesion, resulting in a single-strand gap of 22-30 nucleotides. Next, the cell performs DNA gap filling synthesis and ligation. Involved in this process are: PCNA, RFC, DNA Pol δ, DNA Pol ε or DNA Pol κ, and DNA ligase I or XRCC1/Ligase III. Replicating cells tend to use DNA pol ε and DNA ligase 1, while non-replicating cells tend to use DNA Pol δ, DNA Pol κ, and the XRCC1/Ligase III complex to perform the ligation step.

[1591] NER can involve the following factors: XPA-G, POLH, XPF, ERCC1, XPA-G, and LIG1. Transcription-coupled NER (TC-NER) can involve the following factors: CSA, CSB, XPB, XPD, XPG, ERCC1, and TTDA. Additional factors that may promote the NER repair pathway include XPA-G, POLH, XPF, ERCC1, XPA-G, LIG1, CSA, CSB, XPA, XPB, XPC, XPD, XPF, XPG, TTDA, UVSSA, USP7, CETN2, RAD23B, UV-DDB, CAK subcomplex, RPA, and PCNA.

[1592] Interstrand Crosslink (ICL)

[1593] A dedicated pathway called the ICL repair pathway repairs interstrand crosslinks. Interstrand crosslinks, or covalent crosslinks between bases in different DNA strand, can occur during replication or transcription. ICL repair involves the coordination of multiple repair processes, in particular, nucleolytic activity, translesion synthesis (TLS), and HDR. Nucleases are recruited to excise the ICL on either side of the crosslinked bases, while TLS and HDR are coordinated to repair the cut strands. ICL repair can involve the following factors: endonucleases, e.g., XPF and RAD51C, endonucleases such as RAD51, translesion polymerases, e.g., DNA polymerase zeta and Rev1), and the Fanconi anemia (FA) proteins, e.g., FancJ.

[1594] Other Pathways

[1595] Several other DNA repair pathways exist in mammals.

[1596] Translesion synthesis (TLS) is a pathway for repairing a single stranded break left after a defective replication event and involves translesion polymerases, e.g., DNA pol□ and Rev1.

[1597] Error-free postreplication repair (PRR) is another pathway for repairing a single stranded break left after a defective replication event.

[1598] V.6 Examples of gRNAs in Genome Editing Methods

[1599] gRNA molecules as described herein can be used with Cas9 molecules that generate a double strand break or a single strand break to alter the sequence of a target nucleic acid, e.g., a target position or target genetic signature. gRNA molecules useful in these methods are described below.

[1600] In an embodiment, the gRNA, e.g., a chimeric gRNA, is configured such that it comprises one or more of the following properties;

[1601] a) it can position, e.g., when targeting a Cas9 molecule that makes double strand breaks, a double strand break (i) within 50, 100, 150, 200, 250, 300, 350, 400, 450, or 500 nucleotides of a target position, or (ii) sufficiently close that the target position is within the region of end resection;

[1602] b) it has a targeting domain of at least 16 nucleotides, e.g., a targeting domain of (i) 16, (ii), 17, (iii) 18, (iv) 19, (v) 20, (vi) 21, (vii) 22, (viii) 23, (ix) 24, (x) 25, or (xi) 26 nucleotides; and

[1603] c)
[1604] (i) the proximal and tail domain, when taken together, comprise at least 15, 18, 20, 25, 30, 31, 35, 40, 45, 49, 50, or 53 nucleotides, e.g., at least 15, 18, 20, 25, 30, 31, 35, 40, 45, 49, 50, or 53 nucleotides from a naturally occurring S. pyogenes, S. thermophilus, S. aureus, or N. meningitidis tail and proximal domain, or a sequence that differs by no more than 1, 2, 3, 4, 5; 6, 7, 8, 9 or 10 nucleotides therefrom;
[1605] (ii) there are at least 15, 18, 20, 25, 30, 31, 35, 40, 45, 49, 50, or 53 nucleotides 3′ to the last nucleotide of the second complementarity domain, e.g., at least 15, 18, 20, 25, 30, 31, 35, 40, 45, 49, 50, or 53 nucleotides from the corresponding sequence of a naturally occurring S. pyogenes, S. thermophilus, S. aureus, or N. meningitidis gRNA, or a sequence that differs by no more than 1, 2, 3, 4, 5; 6, 7, 8, 9 or 10 nucleotides therefrom;
[1606] (iii) there are at least 16, 19, 21, 26, 31, 32, 36, 41, 46, 50, 51, or 54 nucleotides 3′ to the last nucleotide of the second complementarity domain that is complementary to its corresponding nucleotide of the first complementarity domain, e.g., at least 16, 19, 21, 26, 31, 32, 36, 41, 46, 50, 51, or 54 nucleotides from the corresponding sequence of a naturally occurring S. pyogenes, S. thermophilus, S. aureus, or N. meningitidis gRNA, or a sequence that differs by no more than 1, 2, 3, 4, 5; 6, 7, 8, 9 or 10 nucleotides therefrom;
[1607] (iv) the tail domain is at least 10, 15, 20, 25, 30, 35 or 40 nucleotides in length, e.g., it comprises at least 10, 15, 20, 25, 30, 35 or 40 nucleotides from a naturally occurring S. pyogenes, S. thermophilus, S. aureus, or N. meningitidis tail domain, or a sequence that differs by no more than 1, 2, 3, 4, 5; 6, 7, 8, 9 or 10 nucleotides therefrom; or
[1608] (v) the tail domain comprises 15, 20, 25, 30, 35, 40 nucleotides or all of the corresponding portions of a naturally occurring tail domain, e.g., a naturally occurring S. pyogenes, S. thermophilus, S. aureus, or N. meningitidis tail domain.

[1609] In an embodiment, the gRNA is configured such that it comprises properties: a and b(i).

[1610] In an embodiment, the gRNA is configured such that it comprises properties: a and b(ii).

[1611] In an embodiment, the gRNA is configured such that it comprises properties: a and b(iii).

[1612] In an embodiment, the gRNA is configured such that it comprises properties: a and b(iv).

[1613] In an embodiment, the gRNA is configured such that it comprises properties: a and b(v).

[1614] In an embodiment, the gRNA is configured such that it comprises properties: a and b(vi).

[1615] In an embodiment, the gRNA is configured such that it comprises properties: a and b(vii).

[1616] In an embodiment, the gRNA is configured such that it comprises properties: a and b(viii).

[1617] In an embodiment, the gRNA is configured such that it comprises properties: a and b(ix).

[1618] In an embodiment, the gRNA is configured such that it comprises properties: a and b(x).

[1619] In an embodiment, the gRNA is configured such that it comprises properties: a and b(xi).

[1620] In an embodiment, the gRNA is configured such that it comprises properties: a and c.

[1621] In an embodiment, the gRNA is configured such that in comprises properties: a, b, and c.

[1622] In an embodiment, the gRNA is configured such that in comprises properties: a(i), b(i), and c(i).

[1623] In an embodiment, the gRNA is configured such that in comprises properties: a(i), b(i), and c(ii).

[1624] In an embodiment, the gRNA is configured such that in comprises properties: a(i), b(ii), and c(i).

[1625] In an embodiment, the gRNA is configured such that in comprises properties: a(i), b(ii), and c(ii).

[1626] In an embodiment, the gRNA is configured such that in comprises properties: a(i), b(iii), and c(i).

[1627] In an embodiment, the gRNA is configured such that in comprises properties: a(i), b(iii), and c(ii).

[1628] In an embodiment, the gRNA is configured such that in comprises properties: a(i), b(iv), and c(i).

[1629] In an embodiment, the gRNA is configured such that in comprises properties: a(i), b(iv), and c(ii).

[1630] In an embodiment, the gRNA is configured such that in comprises properties: a(i), b(v), and c(i).

[1631] In an embodiment, the gRNA is configured such that in comprises properties: a(i), b(v), and c(ii).

[1632] In an embodiment, the gRNA is configured such that in comprises properties: a(i), b(vi), and c(i).

[1633] In an embodiment, the gRNA is configured such that in comprises properties: a(i), b(vi), and c(ii).

[1634] In an embodiment, the gRNA is configured such that in comprises properties: a(i), b(vii), and c(i).

[1635] In an embodiment, the gRNA is configured such that in comprises properties: a(i), b(vii), and c(ii).

[1636] In an embodiment, the gRNA is configured such that in comprises properties: a(i), b(viii), and c(i).

[1637] In an embodiment, the gRNA is configured such that in comprises properties: a(i), b(viii), and c(ii).

[1638] In an embodiment, the gRNA is configured such that in comprises properties: a(i), b(ix), and c(i).

[1639] In an embodiment, the gRNA is configured such that in comprises properties: a(i), b(ix), and c(ii).

[1640] In an embodiment, the gRNA is configured such that in comprises properties: a(i), b(x), and c(i).

[1641] In an embodiment, the gRNA is configured such that in comprises properties: a(i), b(x), and c(ii).

[1642] In an embodiment, the gRNA is configured such that in comprises properties: a(i), b(xi), and c(i).

[1643] In an embodiment, the gRNA is configured such that in comprises properties: a(i), b(xi), and c(ii).

[1644] In an embodiment, the gRNA, e.g., a chimeric gRNA, is configured such that it comprises one or more of the following properties;

[1645] a) one or both of the gRNAs can position, e.g., when targeting a Cas9 molecule that makes single strand breaks, a single strand break within (i) 50, 100, 150, 200, 250, 300, 350, 400, 450, or 500 nucleotides of a target position, or (ii) sufficiently close that the target position is within the region of end resection;

[1646] b) one or both have a targeting domain of at least 16 nucleotides, e.g., a targeting domain of (i) 16, (ii), 17, (iii) 18, (iv) 19, (v) 20, (vi) 21, (vii) 22, (viii) 23, (ix) 24, (x) 25, or (xi) 26 nucleotides; and

[1647] c)
[1648] (i) the proximal and tail domain, when taken together, comprise at least 15, 18, 20, 25, 30, 31, 35, 40, 45, 49, 50, or 53 nucleotides, e.g., at least 15, 18, 20, 25, 30, 31, 35, 40, 45, 49, 50, or 53 nucleotides from a naturally occurring S. pyogenes, S. thermophilus, S. aureus, or N. meningitidis tail and proximal domain, or a sequence that differs by no more than 1, 2, 3, 4, 5; 6, 7, 8, 9 or 10 nucleotides therefrom;
[1649] (ii) there are at least 15, 18, 20, 25, 30, 31, 35, 40, 45, 49, 50, or 53 nucleotides 3′ to the last nucleotide of the second complementarity domain, e.g., at least 15, 18, 20, 25, 30, 31, 35, 40, 45, 49, 50, or 53 nucleotides from the corresponding sequence of a naturally occurring S. pyogenes, S. thermophilus, S. aureus, or N. meningitidis gRNA, or a sequence that differs by no more than 1, 2, 3, 4, 5; 6, 7, 8, 9 or 10 nucleotides therefrom;
[1650] (iii) there are at least 16, 19, 21, 26, 31, 32, 36, 41, 46, 50, 51, or 54 nucleotides 3′ to the last nucleotide of the second complementarity domain that is complementary to its corresponding nucleotide of the first complementarity domain, e.g., at least 16, 19, 21, 26, 31, 32, 36, 41, 46, 50, 51, or 54 nucleotides from the corresponding sequence of a naturally occurring S. pyogenes, S. thermophilus, S. aureus, or N. meningitidis gRNA, or a sequence that differs by no more than 1, 2, 3, 4, 5; 6, 7, 8, 9 or 10 nucleotides therefrom;
[1651] (iv) the tail domain is at least 10, 15, 20, 25, 30, 35 or 40 nucleotides in length, e.g., it comprises at least 10, 15, 20, 25, 30, 35 or 40 nucleotides from a naturally occurring S. pyogenes, S. thermophilus, S. aureus, or N. meningitidis tail domain, or a sequence that differs by no more than 1, 2, 3, 4, 5; 6, 7, 8, 9 or 10 nucleotides therefrom; or
[1652] (v) the tail domain comprises 15, 20, 25, 30, 35, 40 nucleotides or all of the corresponding portions of a naturally occurring tail domain, e.g., a naturally occurring S. pyogenes, S. thermophilus, S. aureus, or N. meningitidis tail domain.

[1653] In an embodiment, the gRNA is configured such that it comprises properties: a and b(i).

[1654] In an embodiment, the gRNA is configured such that it comprises properties: a and b(ii).

[1655] In an embodiment, the gRNA is configured such that it comprises properties: a and b(iii).

[1656] In an embodiment, the gRNA is configured such that it comprises properties: a and b(iv).

[1657] In an embodiment, the gRNA is configured such that it comprises properties: a and b(v).

[1658] In an embodiment, the gRNA is configured such that it comprises properties: a and b(vi).

[1659] In an embodiment, the gRNA is configured such that it comprises properties: a and b(vii).

[1660] In an embodiment, the gRNA is configured such that it comprises properties: a and b(viii).

[1661] In an embodiment, the gRNA is configured such that it comprises properties: a and b(ix).

[1662] In an embodiment, the gRNA is configured such that it comprises properties: a and b(x).

[1663] In an embodiment, the gRNA is configured such that it comprises properties: a and b(xi).

[1664] In an embodiment, the gRNA is configured such that it comprises properties: a and c.

[1665] In an embodiment, the gRNA is configured such that in comprises properties: a, b, and c.

[1666] In an embodiment, the gRNA is configured such that in comprises properties: a(i), b(i), and c(i).

[1667] In an embodiment, the gRNA is configured such that in comprises properties: a(i), b(i), and c(ii).

[1668] In an embodiment, the gRNA is configured such that in comprises properties: a(i), b(ii), and c(i).

[1669] In an embodiment, the gRNA is configured such that in comprises properties: a(i), b(ii), and c(ii).

[1670] In an embodiment, the gRNA is configured such that in comprises properties: a(i), b(iii), and c(i).

[1671] In an embodiment, the gRNA is configured such that in comprises properties: a(i), b(iii), and c(ii).

[1672] In an embodiment, the gRNA is configured such that in comprises properties: a(i), b(iv), and c(i).

[1673] In an embodiment, the gRNA is configured such that in comprises properties: a(i), b(iv), and c(ii).

[1674] In an embodiment, the gRNA is configured such that in comprises properties: a(i), b(v), and c(i).

[1675] In an embodiment, the gRNA is configured such that in comprises properties: a(i), b(v), and c(ii).

[1676] In an embodiment, the gRNA is configured such that in comprises properties: a(i), b(vi), and c(i).

[1677] In an embodiment, the gRNA is configured such that in comprises properties: a(i), b(vi), and c(ii).

[1678] In an embodiment, the gRNA is configured such that in comprises properties: a(i), b(vii), and c(i).

[1679] In an embodiment, the gRNA is configured such that in comprises properties: a(i), b(vii), and c(ii).

[1680] In an embodiment, the gRNA is configured such that in comprises properties: a(i), b(viii), and c(i).

[1681] In an embodiment, the gRNA is configured such that in comprises properties: a(i), b(viii), and c(ii).

[1682] In an embodiment, the gRNA is configured such that in comprises properties: a(i), b(ix), and c(i).

[1683] In an embodiment, the gRNA is configured such that in comprises properties: a(i), b(ix), and c(ii).

[1684] In an embodiment, the gRNA is configured such that in comprises properties: a(i), b(x), and c(i).

[1685] In an embodiment, the gRNA is configured such that in comprises properties: a(i), b(x), and c(ii).

[1686] In an embodiment, the gRNA is configured such that in comprises properties: a(i), b(xi), and c(i).

[1687] In an embodiment, the gRNA is configured such that in comprises properties: a(i), b(xi), and c(ii).

[1688] In an embodiment, the gRNA is used with a Cas9 nickase molecule having HNH activity, e.g., a Cas9 molecule having the RuvC activity inactivated, e.g., a Cas9 molecule having a mutation at D10, e.g., the D10A mutation.

[1689] In an embodiment, the gRNA is used with a Cas9 nickase molecule having RuvC activity, e.g., a Cas9 molecule having the HNH activity inactivated, e.g., a Cas9 molecule having a mutation at 840, e.g., the H840A.

[1690] In an embodiment, the gRNAs are used with a Cas9 nickase molecule having RuvC activity, e.g., a Cas9 molecule having the HNH activity inactivated, e.g., a Cas9 molecule having a mutation at N863, e.g., the N863A mutation.

[1691] In an embodiment, a pair of gRNAs, e.g., a pair of chimeric gRNAs, comprising a first and a second gRNA, is configured such that they comprises one or more of the following properties;

[1692] a) one or both of the gRNAs can position, e.g., when targeting a Cas9 molecule that makes single strand breaks, a single strand break within (i) 50, 100, 150, 200, 250, 300, 350, 400, 450, or 500 nucleotides of a target position, or (ii) sufficiently close that the target position is within the region of end resection;

[1693] b) one or both have a targeting domain of at least 16 nucleotides, e.g., a targeting domain of (i) 16, (ii), 17, (iii) 18, (iv) 19, (v) 20, (vi) 21, (vii) 22, (viii) 23. (ix) 24, (x) 25, or (xi) 26 nucleotides;

[1694] c) for one or both:
[1695] (i) the proximal and tail domain, when taken together, comprise at least 15, 18, 20, 25, 30, 31, 35, 40, 45, 49, 50, or 53 nucleotides, e.g., at least 15, 18, 20, 25, 30, 31, 35, 40, 45, 49, 50, or 53 nucleotides from a naturally occurring S. pyogenes, S. thermophilus, S. aureus, or N. meningitidis tail and proximal domain, or a sequence that differs by no more than 1, 2, 3, 4, 5; 6, 7, 8, 9 or 10 nucleotides therefrom;
[1696] (ii) there are at least 15, 18, 20, 25, 30, 31, 35, 40, 45, 49, 50, or 53 nucleotides 3′ to the last nucleotide of the second complementarity domain, e.g., at least 15, 18, 20, 25, 30, 31, 35, 40, 45, 49, 50, or 53 nucleotides from the corresponding sequence of a naturally occurring S. pyogenes, S. thermophilus, S. aureus, or N. meningitidis gRNA, or a sequence that differs by no more than 1, 2, 3, 4, 5; 6, 7, 8, 9 or 10 nucleotides therefrom;
[1697] (iii) there are at least 16, 19, 21, 26, 31, 32, 36, 41, 46, 50, 51, or 54 nucleotides 3′ to the last nucleotide of the second complementarity domain that is complementary to its corresponding nucleotide of the first complementarity domain, e.g., at least 16, 19, 21, 26, 31, 32, 36, 41, 46, 50, 51, or 54 nucleotides from the corresponding sequence of a naturally occurring S. pyogenes, S. thermophilus, S. aureus, or N. meningitidis gRNA, or a sequence that differs by no more than 1, 2, 3, 4, 5; 6, 7, 8, 9 or 10 nucleotides therefrom;
[1698] (iv) the tail domain is at least 10, 15, 20, 25, 30, 35 or 40 nucleotides in length, e.g., it comprises at least 10, 15, 20, 25, 30, 35 or 40 nucleotides from a naturally occurring S. pyogenes, S. thermophilus, S. aureus, or N. meningitidis tail domain; or, or a sequence that differs by no more than 1, 2, 3, 4, 5; 6, 7, 8, 9 or 10 nucleotides therefrom; or
[1699] (v) the tail domain comprises 15, 20, 25, 30, 35, 40 nucleotides or all of the corresponding portions of a naturally occurring tail domain, e.g., a naturally occurring S. pyogenes, S. thermophilus, S. aureus, or N. meningitidis tail domain;

[1700] d) the gRNAs are configured such that, when hybridized to target nucleic acid, they are separated by 0-50, 0-100, 0-200, at least 10, at least 20, at least 30 or at least 50 nucleotides;

[1701] e) the breaks made by the first gRNA and second gRNA are on different strands; and

[1702] 0 the PAMs are facing outwards.

[1703] In an embodiment, one or both of the gRNAs is configured such that it comprises properties: a and b(i).

[1704] In an embodiment, one or both of the gRNAs is configured such that it comprises properties: a and b(ii).

[1705] In an embodiment, one or both of the gRNAs is configured such that it comprises properties: a and b(iii).

[1706] In an embodiment, one or both of the gRNAs is configured such that it comprises properties: a and b(iv).

[1707] In an embodiment, one or both of the gRNAs is configured such that it comprises properties: a and b(v).

[1708] In an embodiment, one or both of the gRNAs is configured such that it comprises properties: a and b(vi).

[1709] In an embodiment, one or both of the gRNAs is configured such that it comprises properties: a and b(vii).

[1710] In an embodiment, one or both of the gRNAs is configured such that it comprises properties: a and b(viii).

[1711] In an embodiment, one or both of the gRNAs is configured such that it comprises properties: a and b(ix).

[1712] In an embodiment, one or both of the gRNAs is configured such that it comprises properties: a and b(x).

[1713] In an embodiment, one or both of the gRNAs is configured such that it comprises properties: a and b(xi).

[1714] In an embodiment, one or both of the gRNAs configured such that it comprises properties: a and c.

[1715] In an embodiment, one or both of the gRNAs is configured such that it comprises properties: a, b, and c.

[1716] In an embodiment, one or both of the gRNAs is configured such that it comprises properties: a(i), b(i), and c(i).

[1717] In an embodiment, one or both of the gRNAs is configured such that it comprises properties: a(i), b(i), and c(ii).

[1718] In an embodiment, one or both of the gRNAs is configured such that it comprises properties: a(i), b(i), c, and d.

[1719] In an embodiment, one or both of the gRNAs is configured such that it comprises properties: a(i), b(i), c, and e.

[1720] In an embodiment, one or both of the gRNAs is configured such that it comprises properties: a(i), b(i), c, d, and e.

[1721] In an embodiment, one or both of the gRNAs is configured such that it comprises properties: a(i), b(ii), and c(i).

[1722] In an embodiment, one or both of the gRNAs is configured such that it comprises properties: a(i), b(ii), and c(ii).

[1723] In an embodiment, one or both of the gRNAs is configured such that it comprises properties: a(i), b(ii), c, and d.

[1724] In an embodiment, one or both of the gRNAs is configured such that it comprises properties: a(i), b(ii), c, and e.

[1725] In an embodiment, one or both of the gRNAs is configured such that it comprises properties: a(i), b(ii), c, d, and e.

[1726] In an embodiment, one or both of the gRNAs is configured such that it comprises properties: a(i), b(iii), and c(i).

[1727] In an embodiment, one or both of the gRNAs is configured such that it comprises properties: a(i), b(iii), and c(ii).

[1728] In an embodiment, one or both of the gRNAs is configured such that it comprises properties: a(i), b(iii), c, and d.

[1729] In an embodiment, one or both of the gRNAs is configured such that it comprises properties: a(i), b(iii), c, and e.

[1730] In an embodiment, one or both of the gRNAs is configured such that it comprises properties: a(i), b(iii), c, d, and e.

[1731] In an embodiment, one or both of the gRNAs is configured such that it comprises properties: a(i), b(iv), and c(i).

[1732] In an embodiment, one or both of the gRNAs is configured such that it comprises properties: a(i), b(iv), and c(ii).

[1733] In an embodiment, one or both of the gRNAs is configured such that it comprises properties: a(i), b(iv), c, and d.

[1734] In an embodiment, one or both of the gRNAs is configured such that it comprises properties: a(i), b(iv), c, and e.

[1735] In an embodiment, one or both of the gRNAs is configured such that it comprises properties: a(i), b(iv), c, d, and e.

[1736] In an embodiment, one or both of the gRNAs is configured such that it comprises properties: a(i), b(v), and c(i).

[1737] In an embodiment, one or both of the gRNAs is configured such that it comprises properties: a(i), b(v), and c(ii).

[1738] In an embodiment, one or both of the gRNAs is configured such that it comprises properties: a(i), b(v), c, and d.

[1739] In an embodiment, one or both of the gRNAs is configured such that it comprises properties: a(i), b(v), c, and e.

[1740] In an embodiment, one or both of the gRNAs is configured such that it comprises properties: a(i), b(v), c, d, and e.

[1741] In an embodiment, one or both of the gRNAs is configured such that it comprises properties: a(i), b(vi), and c(i).

[1742] In an embodiment, one or both of the gRNAs is configured such that it comprises properties: a(i), b(vi), and c(ii).

[1743] In an embodiment, one or both of the gRNAs is configured such that it comprises properties: a(i), b(vi), c, and d.

[1744] In an embodiment, one or both of the gRNAs is configured such that it comprises properties: a(i), b(vi), c, and e.

[1745] In an embodiment, one or both of the gRNAs is configured such that it comprises properties: a(i), b(vi), c, d, and e.

[1746] In an embodiment, one or both of the gRNAs is configured such that it comprises properties: a(i), b(vii), and c(i).

[1747] In an embodiment, one or both of the gRNAs is configured such that it comprises properties: a(i), b(vii), and c(ii).

[1748] In an embodiment, one or both of the gRNAs is configured such that it comprises properties: a(i), b(vii), c, and d.

[1749] In an embodiment, one or both of the gRNAs is configured such that it comprises properties: a(i), b(vii), c, and e.

[1750] In an embodiment, one or both of the gRNAs is configured such that it comprises properties: a(i), b(vii), c, d, and e.

[1751] In an embodiment, one or both of the gRNAs is configured such that it comprises properties: a(i), b(viii), and c(i).

[1752] In an embodiment, one or both of the gRNAs is configured such that it comprises properties: a(i), b(viii), and c(ii).

[1753] In an embodiment, one or both of the gRNAs is configured such that it comprises properties: a(i), b(viii), c, and d.

[1754] In an embodiment, one or both of the gRNAs is configured such that it comprises properties: a(i), b(viii), c, and e.

[1755] In an embodiment, one or both of the gRNAs is configured such that it comprises properties: a(i), b(viii), c, d, and e.

[1756] In an embodiment, one or both of the gRNAs is configured such that it comprises properties: a(i), b(ix), and c(i).

[1757] In an embodiment, one or both of the gRNAs is configured such that it comprises properties: a(i), b(ix), and c(ii).

[1758] In an embodiment, one or both of the gRNAs is configured such that it comprises properties: a(i), b(ix), c, and d.

[1759] In an embodiment, one or both of the gRNAs is configured such that it comprises properties: a(i), b(ix), c, and e.

[1760] In an embodiment, one or both of the gRNAs is configured such that it comprises properties: a(i), b(ix), c, d, and e.

[1761] In an embodiment, one or both of the gRNAs is configured such that it comprises properties: a(i), b(x), and c(i).

[1762] In an embodiment, one or both of the gRNAs is configured such that it comprises properties: a(i), b(x), and c(ii).

[1763] In an embodiment, one or both of the gRNAs is configured such that it comprises properties: a(i), b(x), c, and d.

[1764] In an embodiment, one or both of the gRNAs is configured such that it comprises properties: a(i), b(x), c, and e.

[1765] In an embodiment, one or both of the gRNAs is configured such that it comprises properties: a(i), b(x), c, d, and e.

[1766] In an embodiment, one or both of the gRNAs is configured such that it comprises properties: a(i), b(xi), and c(i).

[1767] In an embodiment, one or both of the gRNAs is configured such that it comprises properties: a(i), b(xi), and c(ii).

[1768] In an embodiment, one or both of the gRNAs is configured such that it comprises properties: a(i), b(xi), c, and d.

[1769] In an embodiment, one or both of the gRNAs is configured such that it comprises properties: a(i), b(xi), c, and e.

[1770] In an embodiment, one or both of the gRNAs is configured such that it comprises properties: a(i), b(xi), c, d, and e.

[1771] In an embodiment, the gRNAs are used with a Cas9 nickase molecule having HNH activity, e.g., a Cas9 molecule having the RuvC activity inactivated, e.g., a Cas9 molecule having a mutation at D10, e.g., the D10A mutation.

[1772] In an embodiment, the gRNAs are used with a Cas9 nickase molecule having RuvC activity, e.g., a Cas9 molecule having the HNH activity inactivated, e.g., a Cas9 molecule having a mutation at H840, e.g., the H840A mutation.

[1773] In an embodiment, the gRNAs are used with a Cas9 nickase molecule having RuvC activity. e.g., a Cas9 molecule having the HNH activity inactivated, e.g., a Cas9 molecule having a mutation at N863, e.g., the N863A mutation.

### VI. Target Cells

[1774] Cas9 molecules and gRNA molecules, e.g., a Cas9 molecule/gRNA molecule complex, can be used to manipulate a cell, e.g., to edit a target nucleic acid, in a wide variety of cells.

[1775] In an embodiment, a cell is manipulated by editing (e.g., inducing a mutation in) the HBB and/or BCL11A target genes, e.g., as described herein. In an embodiment, the expression of the HBB and/or BCL11A target genes is modulated, e.g., in vivo. In another embodiment, the expression of the HBB and/or BCL11A target genes is modulated, e.g., ex vivo.

[1776] The Cas9 and gRNA molecules described herein can be delivered to a target cell. In an embodiment, the target cell is a circulating blood cell. e.g., a reticulocyte, a myeloid progenitor cell, or a hematopoietic stern cell. In an embodiment, the target cell is a bone marrow cell (e.g., a myeloid progenitor cell, an erythroid progenitor cell, a hematopoietic stem cell, or a mesenchymal stem cell). In an embodiment, the target cell is a myeloid progenitor cell (e.g. a common myeloid progenitor (CMP) cell). In an embodiment, the target cell is an erythroid progenitor cell (e.g. a megakaryocyte erythroid progenitor (MEP) cell). In an embodiment, the target cell is a hematopoietic stem cell (e.g. a long term hematopoietic stem cell (LT-HSC), a short term hematopoietic stem cell (ST-HSC), a multipotent progenitor (MPP) cell, a lineage restricted progenitor (LRP) cell).

[1777] In an embodiment, the target cell is manipulated ex vivo by editing (e.g., inducing a mutation in) the HBB and/or BCL11A target genes and/or modulating the expression of the HBB and/or BCL11A target genes, and administered to the subject. Sources of target cells for ex vivo manipulation may include, by way of example, the subject's blood, the subject's cord blood, or the subject's bone marrow. Sources of target cells for ex vivo manipulation may also include, by way of example, heterologous donor blood, cord blood, or bone marrow.

[1778] In an embodiment, a myeloid progenitor cell is removed from the subject, manipulated ex vivo as described above, and the myeloid progenitor cell is returned to the subject. In an embodiment, an erythroid progenitor cell is removed from the subject, manipulated ex vivo as described above, and the erythroid progenitor cell is returned to the subject. In an embodiment, a hematopoietic stem cell is removed from the subject, manipulated ex vivo as described above, and the hematopoietic stem cell is returned to the subject. In an embodiment, a CD34+ hematopoietic stem cell is removed from the subject, manipulated ex vivo as described above, and the CD34+ hematopoietic stern cell is returned to the subject.

[1779] A suitable cell can also include a stem cell such as, by way of example, an embryonic stem cell, an induced pluripotent stem cell, a hematopoietic stern cell, a neuronal stern cell and a mesenchymal stem cell. In an embodiment, the cell is an induced pluripotent stem (iPS) cell or a cell derived from an iPS cell, e.g., an iPS cell generated from the subject, modified to induce a mutation and differentiated into a clinically relevant cell such as a myeloid progenitor cell, an erythroid progenitor cell or a hematopoietic stem cell. In an embodiment, AAV is used to transduce the target cells, e.g., the target cells described herein.

[1780] Cells produced by the methods described herein may be used immediately. Alternatively, the cells may be frozen (e.g., in liquid nitrogen) and stored for later use. The cells will usually be frozen in 10% dimehtylsulfoxide (DMSO), 50% serum, 40% buffered medium, or some other such solution as is commonly used in the art to preserve cells at such freezing temperature and thawed in such a manner as commonly known in the art for thawing frozen cultured cells.

### VII. Delivery, Formulations and Routes of Administration

[1781] The components, e.g., a Cas9 molecule and gRNA molecule (e.g., a Cas9 molecule/gRNA molecule complex), and a donor template nucleic acid, can be delivered or formulated in a variety of forms, see, e.g., Tables 34-35. In an embodiment, one Cas9 molecule and two or more (e.g., 2, 3, 4, or more) different gRNA molecules are delivered, e.g., by an AAV vector. In an embodiment, the sequence encoding the Cas9 molecule and the sequence(s) encoding the two or more (e.g., 2, 3, 4, or more) different gRNA molecules are present on the same nucleic acid molecule, e.g., an AAV vector. When a Cas9 or gRNA component is encoded as DNA for delivery, the DNA will typically but not necessarily include a control region, e.g., comprising a promoter, to effect expression. Useful promoters for Cas9 molecule sequences include CMV, EFS, EF-1a, MSCV, PGK, CAG promoters. In an embodiment, the promoter is a constitutive promoter. In another embodiment, the promoter is a tissue specific promoter. Useful promoters for gRNAs include H1, 7SK, tRNA, and U6 promoters. Promoters with similar or dissimilar strengths can be selected to tune the expression of components. Sequences encoding a Cas9 molecule can comprise a nuclear localization signal (NLS), e.g., an SV40 NLS. In an embodiment, the sequence encoding a Cas9 molecule comprises at least two nuclear localization signals. In an embodiment a promoter for a Cas9 molecule or a gRNA molecule can be, independently, inducible, tissue specific, or cell specific.

[1782] Table 34 provides examples of how the components can be formulated, delivered, or administered.

TABLE 34
Elements

| | | Donor | |
|---|---|---|---|
| Cas9 | gRNA | Template | |
| Molecule(s) | Molecule(s) | Nucleic Acid | Comments |
| DNA | DNA | DNA | In this embodiment, a Cas9 molecule, typically |
| | | | an eaCas9 molecule, and a gRNA are transcribed |
| | | | from DNA. In this embodiment, they are |
| | | | encoded on separate molecules. In this |
| | | | embodiment, the donor template is provided as a |
| | | | separate DNA molecule. |
| DNA | DNA | | In this embodiment, a Cas9 molecule, typically |
| | | | an eaCas9 molecule, and a gRNA are transcribed |
| | | | from DNA. In this embodiment, they are |
| | | | encoded on separate molecules. In this |
| | | | embodiment, the donor template is provided on |
| | | | the same DNA molecule that encodes the gRNA. |
| DNA | | DNA | In this embodiment, a Cas9 molecule, typically |
| | | | an eaCas9 molecule, and a gRNA are transcribed |
| | | | from DNA, here from a single molecule. In this |
| | | | embodiment, the donor template is provided as a |
| | | | separate DNA molecule. |
| DNA | DNA | DNA | In this embodiment, a Cas9 molecule, typically |
| | | | an eaCas9 molecule, and a gRNA are transcribed |
| | | | from DNA. In this embodiment, they are |
| | | | encoded on separate molecules. In this |
| | | | embodiment, the donor template is provided on |
| | | | the same DNA molecule that encodes the Cas9. |
| DNA | RNA | DNA | In this embodiment, a Cas9 molecule, typically |
| | | | an eaCas9 molecule, is transcribed from DNA, |
| | | | and a gRNA is provided as in vitro transcribed or |
| | | | synthesized RNA. In this embodiment, the donor |
| | | | template is provided as a separate DNA molecule. |
| DNA | RNA | DNA | In this embodiment, a Cas9 Molecule, typically |
| | | | an eaCas9 molecule, is transcribed from DNA, |
| | | | and a gRNA is provided as in vitro transcribed or |
| | | | synthesized RNA. In this embodiment, the donor |
| | | | template is provided on the same DNA molecule |
| | | | that encodes the Cas9. |
| mRNA | RNA | DNA | In this embodiment, a Cas9 molecule, typically |
| | | | an eaCas9 molecule, is translated from in vitro |
| | | | transcribed mRNA, and a gRNA is provided as in |
| | | | vitro transcribed or synthesized RNA. In this |
| | | | embodiment, the donor template is provided as a |
| | | | DNA molecule. |
| mRNA | DNA | DNA | In this embodiment, a Cas9 molecule, typically |
| | | | an eaCas9 molecule, is translated from in vitro |
| | | | transcribed mRNA, and a gRNA is transcribed |
| | | | from DNA. In this embodiment, the donor |
| | | | template is provided as a separate DNA molecule. |
| mRNA | DNA | | In this embodiment, a Cas9 molecule, typically |
| | | | an eaCas9 molecule, is translated from in vitro |
| | | | transcribed mRNA, and a gRNA is transcribed |
| | | | from DNA. In this embodiment, the donor |
| | | | template is provided on the same DNA molecule |
| | | | that encodes the gRNA. |
| Protein | DNA | DNA | In this embodiment, a Cas9 molecule, typically |
| | | | an eaCas9 molecule, is provided as a protein, and |
| | | | a gRNA is transcribed from DNA. In this |
| | | | embodiment, the donor template is provided as a |
| | | | separate DNA molecule. |
| Protein | DNA | | In this embodiment, a Cas9 molecule, typically |
| | | | an eaCas9 molecule, is provided as a protein, and |
| | | | a gRNA is transcribed from DNA. In this |
| | | | embodiment, the donor template is provided on |
| | | | the same DNA molecule that encodes the gRNA. |
| Protein | RNA | DNA | In this embodiment, an eaCas9 molecule is |
| | | | provided as a protein, and a gRNA is provided as |
| | | | transcribed or synthesized RNA. In this |
| | | | embodiment, the donor template is provided as a |
| | | | DNA molecule. |

[1783] Table 35 summarizes various delivery methods for the components of a Cas system, e.g., the Cas9 molecule component and the gRNA molecule component, as described herein.

TABLE 35

| | | Delivery | | | |
|---|---|---|---|---|---|
| | | into Non- | Duration | | Type of |
| | | Dividing | of | Genome | Molecule |
| Delivery Vector/Mode | | Cells | Expression | Integration | Delivered |
| Physical (eg, electroporation, | | YES | Transient | NO | Nucleic Acids |
| particle gun, Calcium | | | | | and Proteins |
| Phosphate transfection) | | | | | |
| Viral | Retrovirus | NO | Stable | YES | RNA |
| | Lentivirus | YES | Stable | YES/NO with | RNA |
| | | | | modifications | |
| | Adenovirus | YES | Transient | NO | DNA |
| | Adeno- | YES | Stable | NO | DNA |
| | Associated | | | | |
| | Virus (AAV) | | | | |
| | Vaccinia Virus | YES | Very | NO | DNA |
| | | | Transient | | |
| | Herpes Simplex | YES | Stable | NO | DNA |
| | Virus | | | | |
| Non-Viral | Cationic | YES | Transient | Depends on | Nucleic Acids |
| | Liposomes | | | what is | and Proteins |
| | | | | delivered | |
| | Polymeric | YES | Transient | Depends on | Nucleic Acids |
| | Nanoparticles | | | what is | and Proteins |
| | | | | delivered | |
| Biological | Attenuated | YES | Transient | NO | Nucleic Acids |
| Non-Viral | Bacteria | | | | |
| Delivery | Engineered | YES | Transient | NO | Nucleic Acids |
| Vehicles | Bacteriophages | | | | |
| | Mammalian | YES | Transient | NO | Nucleic Acids |
| | Virus-like | | | | |
| | Particles | | | | |
| | Biological | YES | Transient | NO | Nucleic Acids |
| | liposomes: | | | | |
| | Erythrocyte | | | | |
| | Ghosts and | | | | |
| | Exosomes | | | | |

DNA-Based Delivery of a Cas9 Molecule and/or One or more gRNA Molecule and/or a Donor Template

[1784] Nucleic acids (e.g., DNA) encoding a Cas9 molecule (e.g., an eaCas9 molecule), a gRNA molecule, a donor template nucleic acid, or any combination (e.g., two or all) thereof, can be administered to subjects or delivered into cells by art-known methods or as described herein. For example, Cas9-encoding and/or gRNA-encoding DNA, as well as donor template nucleic acids, can be delivered, e.g., by vectors (e.g., viral or non-viral vectors), non-vector based methods (e.g., using naked DNA or DNA complexes), or a combination thereof. Donor template molecules can be administered to subjects or delivered into cells by art-known methods or as described herein. For example, donor template molecules can be delivered, e.g., by vectors (e.g., viral or non-viral vectors), non-vector based methods (e.g., using naked DNA or DNA complexes), or a combination thereof.

[1785] Nucleic acids (e.g., DNA) encoding Cas9 molecules (e.g., eaCas9 molecules) and/or gRNA molecules can be conjugated to molecules to promote uptake by the target cells (e.g., the target cells describe herein). Donor template molecules can be conjugated to molecules to promote uptake by the target cells (e.g., the target cells describe herein).

[1786] In an embodiment, the Cas9- and/or gRNA-encoding DNA is delivered by a vector (e.g., viral vector/virus or plasmid).

[1787] A vector can comprise a sequence that encodes a Cas9 molecule and/or a gRNA molecule. A vector can also comprise a sequence encoding a signal peptide (e.g., for nuclear localization, nucleolar localization, mitochondrial localization), fused, e.g., to a Cas9 molecule sequence. For example, a vector can comprise a nuclear localization sequence (e.g., from SV40) fused to the sequence encoding the Cas9 molecule.

[1788] One or more regulatory/control elements, e.g., a promoter, an enhancer, an intron, a polyadenylation signal, a Kozak consensus sequence, internal ribosome entry sites (IRES), a 2A sequence, and splice acceptor or donor can be included in the vectors. In an embodiment, the promoter is recognized by RNA polymerase II (e.g., a CMV promoter). In another embodiment, the promoter is recognized by RNA polymerase III (e.g., a U6 promoter). In an embodiment, the promoter is a regulated promoter (e.g., inducible promoter). In another embodiment, the promoter is a constitutive promoter. In an embodiment, the promoter is a tissue specific promoter. In an embodiment, the promoter is a viral promoter. In another embodiment, the promoter is a non-viral promoter.

[1789] In an embodiment, the vector or delivery vehicle is a viral vector (e.g., for generation of recombinant viruses). In an embodiment, the virus is a DNA virus (e.g., dsDNA or ssDNA virus). In another embodiment, the virus is an RNA virus (e.g., an ssRNA virus). Exemplary viral vectors/viruses include, e.g., retroviruses, lentiviruses, adenovirus, adeno-associated virus (AAV), vaccinia viruses, poxviruses, and herpes simplex viruses.

[1790] In an embodiment, the virus infects dividing cells. In another embodiment, the virus infects non-dividing cells. In an embodiment, the virus infects both dividing and non-dividing cells. In an embodiment, the virus can integrate into the host genome. In an embodiment, the virus is engineered to have reduced immunity, e.g., in human. In an embodiment, the virus is replication-competent. In another embodiment, the virus is replication-defective, e.g., having one or more coding regions for the genes necessary for additional rounds of virion replication and/or packaging replaced with other genes or deleted. In an embodiment, the virus causes transient expression of the Cas9 molecule and/or the gRNA molecule. In another embodiment, the virus causes long-lasting, e.g., at least 1 week, 2 weeks, 1 month, 2 months, 3 months, 6 months, 9 months, 1 year, 2 years, or permanent expression, of the Cas9 molecule and/or the gRNA molecule. The packaging capacity of the viruses may vary, e.g., from at least about 4 kb to at least about 30 kb, e.g., at least about 5 kb, 10 kb, 15 kb, 20 kb, 25 kb, 30 kb, 35 kb, 40 kb, 45 kb, or 50 kb.

[1791] In an embodiment, the viral vector recognizes a specific cell type or tissue. For example, the viral vector can be pseudotyped with a different/alternative viral envelope glycoprotein; engineered with a cell type-specific receptor (e.g., genetic modification(s) of one or more viral envelope glycoproteins to incorporate a targeting ligand such as a peptide ligand, a single chain antibody, or a growth factor); and/or engineered to have a molecular bridge with dual specificities with one end recognizing a viral glycoprotein and the other end recognizing a moiety of the target cell surface (e.g., a ligand-receptor, monoclonal antibody, avidin-biotin and chemical conjugation).

[1792] Exemplary viral vectors/viruses include, e.g., retroviruses, lentiviruses, adenovirus, adeno-associated virus (AAV), vaccinia viruses, poxviruses, and herpes simplex viruses.

[1793] In an embodiment, the Cas9- and/or gRNA-encoding nucleic acid sequence is delivered by a recombinant retrovirus. In an embodiment, the donor template nucleic acid is delivered by a recombinant retrovirus. In an embodiment, the retrovirus (e.g., Moloney murine leukemia virus) comprises a reverse transcriptase, e.g., that allows integration into the host genome. In an embodiment, the retrovirus is replication-competent. In another embodiment, the retrovirus is replication-defective, e.g., having one of more coding regions for the genes necessary for additional rounds of virion replication and packaging replaced with other genes, or deleted.

[1794] In an embodiment, the Cas9- and/or gRNA-encoding nucleic acid sequence is delivered by a recombinant lentivirus. In an embodiment, the donor template nucleic acid is delivered by a recombinant lentivirus. For example, the lentivirus is replication-defective, e.g., does not comprise one or more genes required for viral replication.

[1795] In an embodiment, the Cas9- and/or gRNA-encoding DNA is delivered by a recombinant adenovirus. In an embodiment, the donor template nucleic acid is delivered by a recombinant adenovirus. In an embodiment, the adenovirus is engineered to have reduced immunity in human.

[1796] In an embodiment, the Cas9- and/or gRNA-encoding DNA is delivered by a recombinant AAV. In an embodiment, the donor template nucleic acid is delivered by a recombinant AAV. In some embodiments, the AAV does not incorporate its geneome into that of a host cell, e.g., a target cell as describe herein. In an embodiment, the AAV can incorporate its genome into that of a host cell, e.g., a target cell as described herein. In an embodiment, the AAV is a self-complementary adeno-associated virus (scAAV), e.g., a scAAV that packages both strands which anneal together to form double stranded DNA. AAV serotypes that may be used in the disclosed methods, include AAV1, AAV2, modified AAV2 (e.g., modifications at Y444F, Y500F, Y730F and/or S662V), AAV3, modified AAV3 (e.g., modifications at Y705F, Y731F and/or T492V), AAV4, AAV5, AAV6, modified AAV6 (e.g., modifications at S663V and/or T492V), AAV8, AAV 8.2, AAV9, AAV rh 10, and pseudotyped AAV, such as AAV2/8, AAV2/5 and AAV2/6 can also be used in the disclosed methods.

[1797] In an embodiment, an AAV capsid that can be used in the methods described herein is a capsid sequence from serotype AAV1, AAV2, AAV3, AAV4, AAV5, AAV6, AAV7, AAV8, AAV9, AAV.rh8, AAV.rh10, AAV.rh32/33, AAV.rh43, AAV.rh64R1, or AAV7m8.

[1798] In an embodiment, the Cas9- and/or gRNA-encoding DNA is delivered in a re-engineered AAV capsid, e.g., with 50% or greater, e.g., 60% or greater. 70% or greater, 80% or greater, 90% or greater, or 95% or greater, sequence homology with a capsid sequence from serotypes AAV1, AAV2, AAV3, AAV4, AAV5, AAV6, AAV7, AAV8, AAV9, AAV.rh8, AAV.rh 10, AAV.rh32/33, AAV.rh43, or AAV.rh64R1.

[1799] In an embodiment, the Cas9- and/or gRNA-encoding DNA is delivered by a chimeric AAV capsid. In an embodiment, the donor template nucleic acid is delivered by a chimeric AAV capsid. Exemplary chimeric AAV capsids include, but are not limited to, AAV9i1, AAV2i8, AAV-DJ, AAV2G9, AAV2i8G9, or AAV8G9.

[1800] In an embodiment, the AAV is a self-complementary adeno-associated virus (scAAV), e.g., a scAAV that packages both strands which anneal together to form double stranded DNA.

[1801] In an embodiment, the Cas9- and/or gRNA-encoding DNA is delivered by a hybrid virus, e.g., a hybrid of one or more of the viruses described herein. In an embodiment, the hybrid virus is hybrid of an AAV (e.g., of any AAV serotype), with a Bocavirus, B19 virus, porcine AAV, goose AAV, feline AAV, canine AAV, or MVM.

[1802] A Packaging cell is used to form a virus particle that is capable of infecting a target cell. Such a cell includes a 293 cell, which can package adenovirus, and a ψ2 cell or a PA317 cell, which can package retrovirus. A viral vector used in gene therapy is usually generated by a producer cell line that packages a nucleic acid vector into a viral particle. The vector typically contains the minimal viral sequences required for packaging and subsequent integration into a host or target cell (if applicable), with other viral sequences being replaced by an expression cassette encoding the protein to be expressed, eg. Cas9. For example, an AAV vector used in gene therapy typically only possesses inverted terminal repeat (ITR) sequences from the AAV genome which are required for packaging and gene expression in the host or target cell. The missing viral functions can be supplied in trans by the packaging cell line and/or plasmid containing E2A, E4, and VA genes from adenovirus, and plasmid encoding Rep and Cap genes from AAV, as described in “Triple Transfection Protocol.” Henceforth, the viral DNA is packaged in a cell line, which contains a helper plasmid encoding the other AAV genes, namely rep and cap, but lacking ITR sequences. In embodiment, the viral DNA is packaged in a producer cell line, which contains E1A and/or E1B genes from adenovirus. The cell line is also infected with adenovirus as a helper. The helper virus (e.g., adenovirus or HSV) or helper plasmid promotes replication of the AAV vector and expression of AAV genes from the helper plasmid with ITRs. The helper plasmid is not packaged in significant amounts due to a lack of ITR sequences. Contamination with adenovirus can be reduced by, e.g., heat treatment to which adenovirus is more sensitive than AAV.

[1803] In an embodiment, the viral vector has the ability of cell type and/or tissue type recognition. For example, the viral vector can be pseudotyped with a different/alternative viral envelope glycoprotein; engineered with a cell type-specific receptor (e.g., genetic modification of the viral envelope glycoproteins to incorporate targeting ligands such as a peptide ligand, a single chain antibodie, a growth factor); and/or engineered to have a molecular bridge with dual specificities with one end recognizing a viral glycoprotein and the other end recognizing a moiety of the target cell surface (e.g., ligand-receptor, monoclonal antibody, avidin-biotin and chemical conjugation).

[1804] In an embodiment, the viral vector achieves cell type specific expression. For example, a tissue-specific promoter can be constructed to restrict expression of the transgene (Cas 9 and gRNA) in only the target cell. The specificity of the vector can also be mediated by microRNA-dependent control of transgene expression. In an embodiment, the viral vector has increased efficiency of fusion of the viral vector and a target cell membrane. For example, a fusion protein such as fusion-competent hemagglutin (HA) can be incorporated to increase viral uptake into cells. In an embodiment, the viral vector has the ability of nuclear localization. For example, aviruse that requires the breakdown of the nuclear envelope (during cell division) and therefore will not infect a non-diving cell can be altered to incorporate a nuclear localization peptide in the matrix protein of the virus thereby enabling the transduction of non-proliferating cells.

[1805] In some embodiments, the Cas9- and/or gRNA-encoding DNA is delivered by a non-vector based method (e.g., using naked DNA or DNA complexes). For example, the DNA can be delivered, e.g., by organically modified silica or silicate (Ormosil), electroporation, transient cell compression or squeezing (e.g., as described in Lee, et al., Nano Lett 12: 6322-27), gene gun, sonoporation, magnetofection, lipid-mediated transfection, dendrimers, inorganic nanoparticles, calcium phosphates, or a combination thereof.

[1806] In an embodiment, delivery via electroporation comprises mixing the cells with the Cas9- and/or gRNA-encoding DNA in a cartridge, chamber or cuvette and applying one or more electrical impulses of defined duration and amplitude. In an embodiment, delivery via electroporation is performed using a system in which cells are mixed with the Cas9-and/or gRNA-encoding DNA in a vessel connected to a device (eg, a pump) which feeds the mixture into a cartridge, chamber or cuvette wherein one or more electrical impulses of defined duration and amplitude are applied, after which the cells are delivered to a second vessel.

[1807] In an embodiment, the Cas9- and/or gRNA-encoding DNA is delivered by a combination of a vector and a non-vector based method. In an embodiment, the donor template nucleic acid is delivered by a combination of a vector and a non-vector based method. For example, a virosome comprises a liposome combined with an inactivated virus (e.g., HIV or influenza virus), which can result in more efficient gene transfer, e.g., in a respiratory epithelial cell than either a viral or a liposomal method alone.

[1808] In an embodiment, the delivery vehicle is a non-viral vector. In an embodiment, the non-viral vector is an inorganic nanoparticle. Exemplary inorganic nanoparticles include, e.g., magnetic nanoparticles (e.g., Fe₃MnO₂) or silica. The outer surface of the nanoparticle can be conjugated with a positively charged polymer (e.g., polyethylenimine, polylysine, polyserine) which allows for attachment (e.g., conjugation or entrapment) of payload. In an embodiment, the non-viral vector is an organic nanoparticle (e.g., entrapment of the payload inside the nanoparticle). Exemplary organic nanoparticles include, e.g., SNALP liposomes that contain cationic lipids together with neutral helper lipids which are coated with polyethylene glycol (PEG) and protamine and nucleic acid complex coated with lipid coating.

[1809] Exemplary lipids for gene transfer are shown below in Table 36.

TABLE 36
Lipids Used for Gene Transfer

| Lipid | Abbreviation | Feature |
|---|---|---|
| 1,2-Dioleoyl-sn-glycero-3-phosphatidylcholine | DOPC | Helper |
| 1,2-Dioleoyl-sn-glycero-3-phosphatidylethanolamine | DOPE | Helper |
| Cholesterol | | Helper |
| N-[1-(2.3-Dioleyloxy)prophyl]N,N,N-trimethylammonium | DOTMA | Cationic |
| chloride | | |
| 1,2-Dioleoyloxy-3-trimethylammonium-propane | DOTAP | Cationic |
| Dioctadecylamidoglycylspermine | DOGS | Cationic |
| N-(3-Aminopropyl)-N,N-dimethyl-2,3-bis(dodecyloxy)-1- | GAP-DLRIE | Cationic |
| propanaminium bromide | | |
| Cetyltrimethylammonium bromide | CTAB | Cationic |
| 6-Lauroxyhexyl ornithinate | LHON | Cationic |
| 1-(2,3-Dioleoyloxypropyl)-2,4,6-trimethylpyridinium | 2Oc | Cationic |
| 2,3-Dioleyloxy-N-[2(sperminecarboxamido-ethyl]-N,N-dimethyl- | DOSPA | Cationic |
| 1-propanaminium trifluoroacetate | | |
| 1,2-Dioleyl-3-trimethylammonium-propane | DOPA | Cationic |
| N-(2-Hydroxyethyl)-N,N-dimethyl-2,3-bis(tetradecyloxy)-1- | MDRIE | Cationic |
| propanaminium bromide | | |
| Dimyristooxypropyl dimethyl hydroxyethyl ammonium bromide | DMRI | Cationic |
| 3β-[N-(N′,N′-Dimethylaminoethane)-carbamoyl]cholesterol | DC-Chol | Cationic |
| Bis-guanidium-tren-cholesterol | BGTC | Cationic |
| 1,3-Diodeoxy-2-(6-carboxy-spermyl)-propylamide | DOSPER | Cationic |
| Dimethyloctadecylammonium bromide | DDAB | Cationic |
| Dioctadecylamidoglicylspermidin | DSL | Cationic |
| rac-[(2,3-Dioctadecyloxypropyl)(2-hydroxyethyl)]- | CLIP-1 | Cationic |
| dimethylammonium chloride | | |
| rac-[2(2,3-Dihexadecyloxypropyl- | CLIP-6 | Cationic |
| oxymethyloxy)ethyl]trimethylammonium bromide | | |
| Ethyldimyristoylphosphatidylcholine | EDMPC | Cationic |
| 1,2-Distearyloxy-N,N-dimethyl-3-aminopropane | DSDMA | Cationic |
| 1,2-Dimyristoyl-trimethylammonium propane | DMTAP | Cationic |
| O,O′-Dimyristyl-N-lysyl aspartate | DMKE | Cationic |
| 1,2-Distearoyl-sn-glycero-3-ethylphosphocholine | DSEPC | Cationic |
| N-Palmitoyl D-erythro-sphingosyl carbamoyl-spermine | CCS | Cationic |
| N-t-Butyl-N0-tetradecyl-3-tetradecylaminopropionamidine | diC14-amidine | Cationic |
| Octadecenolyoxy[ethyl-2-heptadecenyl-3 hydroxyethyl] | DOTIM | Cationic |
| imidazolinium chloride | | |
| N1-Cholesteryloxycarbonyl-3,7-diazanonane-1,9-diamine | CDAN | Cationic |
| 2-(3-[Bis(3-amino-propyl)-amino]propylamino)-N- | RPR209120 | Cationic |
| ditetradecylcarbamoylme-ethyl-acetamide | | |

[1810] Exemplary polymers for gene transfer are shown below in Table 37.

TABLE 37
Polymers Used for Gene Transfer

| Polymer | Abbreviation |
|---|---|
| Poly(ethylene)glycol | PEG |
| Polyethylenimine | PEI |
| Dithiobis(succinimidylpropionate) | DSP |
| Dimethyl-3,3′-dithiobispropionimidate | DTBP |
| Poly(ethylene imine) biscarbamate | PEIC |
| Poly(L-lysine) | PLL |
| Histidine modified PLL | |
| Poly(N-vinylpyrrolidone) | PVP |
| Poly(propylenimine) | PPI |
| Poly(amidoamine) | PAMAM |
| Poly(amido ethylenimine) | SS-PAEI |
| Triethylenetetramine | TETA |
| Poly(β-aminoester) | |
| Poly(4-hydroxy-L-proline ester) | PHP |
| Poly(allylamine) | |
| Poly(α-[4-aminobutyl]-L-glycolic acid) | PAGA |
| Poly(D,L-lactic-co-glycolic acid) | PLGA |
| Poly(N-ethyl-4-vinylpyridinium bromide) | |
| Poly(phosphazene)s | PPZ |
| Poly(phosphoester)s | PPE |
| Poly(phosphoramidate)s | PPA |
| Poly(N-2-hydroxypropylmethacrylamide) | pHPMA |
| Poly (2-(dimethylamino)ethyl methacrylate) | pDMAEMA |
| Poly(2-aminoethyl propylene phosphate) | PPE-EA |
| Chitosan | |
| Galactosylated chitosan | |
| N-Dodacylated chitosan | |
| Histone | |
| Collagen | |
| Dextran-spermine | D-SPM |

[1811] In an embodiment, the vehicle has targeting modifications to increase target cell update of nanoparticles and liposomes, e.g., cell specific antigens, monoclonal antibodies, single chain antibodies, aptamers, polymers, sugars, and cell penetrating peptides. In an embodiment, the vehicle uses fusogenic and endosome-destabilizing peptides/polymers. In an embodiment, the vehicle undergoes acid-triggered conformational changes (e.g., to accelerate endosomal escape of the cargo). In an embodiment, a stimuli-cleavable polymer is used, e.g., for release in a cellular compartment. For example, disulfide-based cationic polymers that are cleaved in the reducing cellular environment can be used.

[1812] In an embodiment, the delivery vehicle is a biological non-viral delivery vehicle. In an embodiment, the vehicle is an attenuated bacterium (e.g., naturally or artificially engineered to be invasive but attenuated to prevent pathogenesis and expressing the transgene (e.g., Listeria monocytogenes, certain Salmonella strains, Bifidobacterium longum, and modified Escherichia coli), bacteria having nutritional and tissue-specific tropism to target specific tissues, bacteria having modified surface proteins to alter target tissue specificity). In an embodiment, the vehicle is a genetically modified bacteriophage (e.g., engineered phages having large packaging capacity, less immunogenic, containing mammalian plasmid maintenance sequences and having incorporated targeting ligands). In an embodiment, the vehicle is a mammalian virus-like particle. For example, modified viral particles can be generated (e.g., by purification of the “empty” particles followed by ex vivo assembly of the virus with the desired cargo). The vehicle can also be engineered to incorporate targeting ligands to alter target tissue specificity. In an embodiment, the vehicle is a biological liposome. For example, the biological liposome is a phospholipid-based particle derived from human cells (e.g., erythrocyte ghosts, which are red blood cells broken down into spherical structures derived from the subject (e.g., tissue targeting can be achieved by attachment of various tissue or cell-specific ligands), or secretory exosomes—subject (i.e., patient) derived membrane-bound nanovescicle (30-100 nm) of endocytic origin (e.g., can be produced from various cell types and can therefore be taken up by cells without the need of for targeting ligands).

[1813] In an embodiment, one or more nucleic acid molecules (e.g., DNA molecules) other than the components of a Cas system, e.g., the Cas9 molecule component and/or the gRNA molecule component described herein, are delivered. In an embodiment, the nucleic acid molecule is delivered at the same time as one or more of the components of the Cas system are delivered. In an embodiment, the nucleic acid molecule is delivered before or after (e.g., less than about 30 minutes, 1 hour, 2 hours, 3 hours, 6 hours, 9 hours, 12 hours, 1 day, 2 days, 3 days, 1 week, 2 weeks, or 4 weeks) one or more of the components of the Cas system are delivered. In an embodiment, the nucleic acid molecule is delivered by a different means than one or more of the components of the Cas system, e.g., the Cas9 molecule component and/or the gRNA molecule component, are delivered. The nucleic acid molecule can be delivered by any of the delivery methods described herein. For example, the nucleic acid molecule can be delivered by a viral vector, e.g., an integration-deficient lentivirus, and the Cas9 molecule component and/or the gRNA molecule component can be delivered by electroporation, e.g., such that the toxicity caused by nucleic acids (e.g., DNAs) can be reduced. In an embodiment, the nucleic acid molecule encodes a therapeutic protein, e.g., a protein described herein. In an embodiment, the nucleic acid molecule encodes an RNA molecule, e.g., an RNA molecule described herein.

[1814] Delivery of RNA Encoding a Cas9 Molecule

[1815] RNA encoding Cas9 molecules (e.g., eaCas9 molecules or eiCas9 molecules) and/or gRNA molecules, can be delivered into cells, e.g., target cells described herein, by art-known methods or as described herein. For example, Cas9-encoding and/or gRNA-encoding RNA can be delivered, e.g., by microinjection, electroporation, transient cell compression or squeezing (eg, as described in Lee. et al., 2012, Nano Len 12: 6322-27), lipid-mediated transfection, peptide-mediated delivery, or a combination thereof. Cas9-encoding and/or gRNA-encoding RNA can be conjugated to molecules) promoting uptake by the target cells (e.g., target cells described herein).

[1816] In an embodiment, delivery via electroporation comprises mixing the cells with the RNA encoding Cas9 molecules (e.g., eaCas9 molecules, eiCas9 molecules or eiCas9 fusion proteins) and/or gRNA molecules, with or without donor template nucleic acid molecules, in a cartridge, chamber or cuvette and applying one or more electrical impulses of defined duration and amplitude. In an embodiment, delivery via electroporation is performed using a system in which cells are mixed with the RNA encoding Cas9 molecules (e.g., eaCas9 molecules, eiCas9 molecules or eiCas9 fusion proteins) and/or gRNA molecules, with or without donor template nucleic acid molecules in a vessel connected to a device (eg, a pump) which feeds the mixture into a cartridge, chamber or cuvette wherein one or more electrical impulses of defined duration and amplitude are applied, after which the cells are delivered to a second vessel. Cas9-encoding and/or gRNA-encoding RNA can be conjugated to molecules to promote uptake by the target cells (e.g., target cells described herein).

[1817] Delivery Cas9 Molecule Protein

[1818] Cas9 molecules (e.g., eaCas9 molecules or eiCas9 molecules) can be delivered into cells by art-known methods or as described herein. For example, Cas9 protein molecules can be delivered, e.g., by microinjection, electroporation, transient cell compression or squeezing (eg, as described in Lee, et al [2012] Nano Len 12: 6322-27), lipid-mediated transfection, peptide-mediated delivery, or a combination thereof. Delivery can be accompanied by DNA encoding a gRNA or by a gRNA. Cas9 protein can be conjugated to molecules promoting uptake by the target cells (e.g., target cells described herein).

[1819] In an embodiment, delivery via electroporation comprises mixing the cells with the Cas9 molecules (e.g., eaCas9 molecules, eiCas9 molecules or eiCas9 fusion proteins) and/or gRNA molecules, with or without donor nucleic acid, in a cartridge, chamber or cuvette and applying one or more electrical impulses of defined duration and amplitude. In an embodiment, delivery via electroporation is performed using a system in which cells are mixed with the Cas9 molecules (e.g., eaCas9 molecules, eiCas9 molecules or eiCas9 fusion proteins) and/or gRNA molecules, with or without donor nucleic acid in a vessel connected to a device (eg, a pump) which feeds the mixture into a cartridge, chamber or cuvette wherein one or more electrical impulses of defined duration and amplitude are applied, after which the cells are delivered to a second vessel. Cas9-encoding and/or gRNA-encoding RNA can be conjugated to molecules to promote uptake by the target cells (e.g., target cells described herein).

[1820] Route of Administration

[1821] Systemic modes of administration include oral and parenteral routes. Parenteral routes include, by way of example, intravenous, intrarterial, intraosseous, intramuscular, intradermal, subcutaneous, intranasal and intraperitoneal routes. Components administered systemically may be modified or formulated to target the components to cells of the blood and bone marrow.

[1822] Local modes of administration include, by way of example, intra-bone marrow, intrathecal, and intra-cerebroventricular routes. In an embodiment, significantly smaller amounts of the components (compared with systemic approaches) may exert an effect when administered locally (for example, intra-bone marrow) compared to when administered systemically (for example, intravenously). Local modes of administration can reduce or eliminate the incidence of potentially toxic side effects that may occur when therapeutically effective amounts of a component are administered systemically.

[1823] In an embodiment, components described herein are delivered by intra-bone marrow injection. Injections may be made directly into the bone marrow compartment of one or more than one bone. In an embodiment, nanoparticle or viral, e.g., AAV vector, delivery is via intra-bone marrow injection.

[1824] Administration may be provided as a periodic bolus or as continuous infusion from an internal reservoir or from an external reservoir (for example, from an intravenous bag). Components may be administered locally, for example, by continuous release from a sustained release drug delivery device

[1825] In addition, components may be formulated to permit release over a prolonged period of time. A release system can include a matrix of a biodegradable material or a material which releases the incorporated components by diffusion. The components can be homogeneously or heterogeneously distributed within the release system. A variety of release systems may be useful, however, the choice of the appropriate system will depend upon rate of release required by a particular application. Both non-degradable and degradable release systems can be used. Suitable release systems include polymers and polymeric matrices, non-polymeric matrices, or inorganic and organic excipients and diluents such as, but not limited to, calcium carbonate and sugar (for example, trehalose). Release systems may be natural or synthetic. However, synthetic release systems are preferred because generally they are more reliable, more reproducible and produce more defined release profiles. The release system material can be selected so that components having different molecular weights are released by diffusion through or degradation of the material.

[1826] Representative synthetic, biodegradable polymers include, for example: polyamides such as poly(amino acids) and poly(peptides); polyesters such as poly(lactic acid), poly(glycolic acid), poly(lactic-co-glycolic acid), and poly(caprolactone); poly(anhydrides); polyorthoesters; polycarbonates; and chemical derivatives thereof (substitutions, additions of chemical groups, for example, alkyl, alkylene, hydroxylations, oxidations, and other modifications routinely made by those skilled in the art), copolymers and mixtures thereof. Representative synthetic, non-degradable polymers include, for example: polyethers such as poly(ethylene oxide), poly(ethylene glycol), and poly(tetramethylene oxide); vinyl polymers-polyacrylates and polymethacrylates such as methyl, ethyl, other alkyl, hydroxyethyl methacrylate, acrylic and methacrylic acids, and others such as poly(vinyl alcohol), poly(vinyl pyrolidone), and poly(vinyl acetate); poly(urethanes); cellulose and its derivatives such as alkyl, hydroxyalkyl, ethers, esters, nitrocellulose, and various cellulose acetates; polysiloxanes; and any chemical derivatives thereof (substitutions, additions of chemical groups, for example, alkyl, alkylene, hydroxylations, oxidations, and other modifications routinely made by those skilled in the art), copolymers and mixtures thereof.

[1827] Poly(lactide-co-glycolide) microsphere can also be used for injection. Typically the microspheres are composed of a polymer of lactic acid and glycolic acid, which are structured to form hollow spheres. The spheres can be approximately 15-30 microns in diameter and can be loaded with components described herein.

[1828] Bi-Modal or Differential Delivery of Components

[1829] Separate delivery of the components of a Cas system, e.g., the Cas9 molecule component and the gRNA molecule component, and more particularly, delivery of the components by differing modes, can enhance performance, e.g., by improving tissue specificity and safety.

[1830] In an embodiment, the Cas9 molecule and the gRNA molecule are delivered by different modes, or as sometimes referred to herein as differential modes. Different or differential modes, as used herein, refer modes of delivery that confer different pharmacodynamic or pharmacokinetic properties on the subject component molecule, e.g., a Cas9 molecule, gRNA molecule, or template nucleic acid. For example, the modes of delivery can result in different tissue distribution, different half-life, or different temporal distribution, e.g., in a selected compartment, tissue, or organ.

[1831] Some modes of delivery, e.g., delivery by a nucleic acid vector that persists in a cell, or in progeny of a cell, e.g., by autonomous replication or insertion into cellular nucleic acid, result in more persistent expression of and presence of a component. Examples include viral, e.g., adeno-associated virus or lentivirus, delivery.

[1832] By way of example, the components, e.g., a Cas9 molecule and a gRNA molecule, can be delivered by modes that differ in terms of resulting half-life or persistent of the delivered component the body, or in a particular compartment, tissue or organ. In an embodiment, a gRNA molecule can be delivered by such modes. The Cas9 molecule component can be delivered by a mode which results in less persistence or less exposure to the body or a particular compartment or tissue or organ.

[1833] More generally, in an embodiment, a first mode of delivery is used to deliver a first component and a second mode of delivery is used to deliver a second component. The first mode of delivery confers a first pharmacodynamic or pharmacokinetic property. The first pharmacodynamic property can be, e.g., distribution, persistence, or exposure, of the component, or of a nucleic acid that encodes the component, in the body, a compartment, tissue or organ. The second mode of delivery confers a second pharmacodynamic or pharmacokinetic property. The second pharmacodynamic property can be, e.g., distribution, persistence, or exposure, of the component, or of a nucleic acid that encodes the component, in the body, a compartment, tissue or organ.

[1834] In an embodiment, the first pharmacodynamic or pharmacokinetic property, e.g., distribution, persistence or exposure, is more limited than the second pharmacodynamic or pharmacokinetic property.

[1835] In an embodiment, the first mode of delivery is selected to optimize, e.g., minimize, a pharmacodynamic or pharmacokinetic property, e.g., distribution, persistence or exposure.

[1836] In an embodiment, the second mode of delivery is selected to optimize, e.g., maximize, a pharmacodynamic or pharmcokinetic property, e.g., distribution, persistence or exposure.

[1837] In an embodiment, the first mode of delivery comprises the use of a relatively persistent element, e.g., a nucleic acid, e.g., a plasmid or viral vector, e.g., an AAV or lentivirus. As such vectors are relatively persistent product transcribed from them would be relatively persistent.

[1838] In an embodiment, the second mode of delivery comprises a relatively transient element, e.g., an RNA or protein.

[1839] In an embodiment, the first component comprises gRNA, and the delivery mode is relatively persistent, e.g., the gRNA is transcribed from a plasmid or viral vector, e.g., an AAV or lentivirus. Transcription of these genes would be of little physiological consequence because the genes do not encode for a protein product, and the gRNAs are incapable of acting in isolation. The second component, a Cas9 molecule, is delivered in a transient manner, for example as mRNA or as protein, ensuring that the full Cas9 molecule/gRNA molecule complex is only present and active for a short period of time.

[1840] Furthermore, the components can be delivered in different molecular form or with different delivery vectors that complement one another to enhance safety and tissue specificity.

[1841] Use of differential delivery modes can enhance performance, safety and efficacy. E.g., the likelihood of an eventual off-target modification can be reduced. Delivery of immunogenic components, e.g., Cas9 molecules, by less persistent modes can reduce immunogenicity, as peptides from the bacterially-derived Cas enzyme are displayed on the surface of the cell by MHC molecules. A two-part delivery system can alleviate these drawbacks.

[1842] Differential delivery modes can be used to deliver components to different, but overlapping target regions. The formation active complex is minimized outside the overlap of the target regions. Thus, in an embodiment, a first component, e.g., a gRNA molecule is delivered by a first delivery mode that results in a first spatial, e.g., tissue, distribution. A second component, e.g., a Cas9 molecule is delivered by a second delivery mode that results in a second spatial, e.g., tissue, distribution. In an embodiment, the first mode comprises a first element selected from a liposome, nanoparticle, e.g., polymeric nanoparticle, and a nucleic acid, e.g., viral vector. The second mode comprises a second element selected from the group. In an embodiment, the first mode of delivery comprises a first targeting element, e.g., a cell specific receptor or an antibody, and the second mode of delivery does not include that element. In embodiment, the second mode of delivery comprises a second targeting element, e.g., a second cell specific receptor or second antibody.

[1843] When the Cas9 molecule is delivered in a virus delivery vector, a liposome, or polymeric nanoparticle, there is the potential for delivery to and therapeutic activity in multiple tissues, when it may be desirable to only target a single tissue. A two-part delivery system can resolve this challenge and enhance tissue specificity. If the gRNA molecule and the Cas9 molecule are packaged in separated delivery vehicles with distinct but overlapping tissue tropism, the fully functional complex is only be formed in the tissue that is targeted by both vectors.

### Ex Vivo Delivery

[1844] In an embodiment, components described in Table 34 are introduced into cells which are then introduced into the subject, e.g., cells are removed from a subject, manipulated ex vivo and then introduced into the subject. Methods of introducing the components can include, e.g., any of the delivery methods described in Table 35.

### VIII. Modified Nucleosides, Nucleotides, and Nucleic Acids

[1845] Modified nucleosides and modified nucleotides can be present in nucleic acids, e.g., particularly gRNA, but also other forms of RNA, e.g., mRNA, RNAi, or siRNA. As described herein, “nucleoside” is defined as a compound containing a five-carbon sugar molecule (a pentose or ribose) or derivative thereof, and an organic base, purine or pyrimidine, or a derivative thereof. As described herein, “nucleotide” is defined as a nucleoside further comprising a phosphate group.

[1846] Modified nucleosides and nucleotides can include one or more of:

[1847] (i) alteration, e.g., replacement, of one or both of the non-linking phosphate oxygens and/or of one or more of the linking phosphate oxygens in the phosphodiester backbone linkage;

[1848] (ii) alteration, e.g., replacement, of a constituent of the ribose sugar. e.g., of the 2′ hydroxyl on the ribose sugar;

[1849] (iii) wholesale replacement of the phosphate moiety with “dephospho” linkers;

[1850] (iv) modification or replacement of a naturally occurring nucleobase;

[1851] (v) replacement or modification of the ribose-phosphate backbone;

[1852] (vi) modification of the 3′ end or 5′ end of the oligonucleotide, e.g., removal, modification or replacement of a terminal phosphate group or conjugation of a moiety; and

[1853] (vii) modification of the sugar.

[1854] The modifications listed above can be combined to provide modified nucleosides and nucleotides that can have two, three, four, or more modifications. For example, a modified nucleoside or nucleotide can have a modified sugar and a modified nucleobase. In an embodiment, every base of a gRNA is modified, e.g., all bases have a modified phosphate group, e.g., all are phosphorothioate groups. In an embodiment, all, or substantially all, of the phosphate groups of a unimolecular or modular gRNA molecule are replaced with phosphorothioate groups.

[1855] In an embodiment, modified nucleotides, e.g., nucleotides having modifications as described herein, can be incorporated into a nucleic acid, e.g., a “modified nucleic acid.” In an embodiment, the modified nucleic acids comprise one, two, three or more modified nucleotides. In an embodiment, at least 5% (e.g., at least about 5%, at least about 10%, at least about 15%, at least about 20%, at least about 25%, at least about 30%, at least about 35%, at least about 40%, at least about 45%, at least about 50%, at least about 55%, at least about 60%, at least about 65%, at least about 70%, at least about 75%, at least about 80%, at least about 85%, at least about 90%, at least about 95%, or about 100%) of the positions in a modified nucleic acid are a modified nucleotides.

[1856] Unmodified nucleic acids can be prone to degradation by, e.g., cellular nucleases. For example, nucleases can hydrolyze nucleic acid phosphodiester bonds. Accordingly, in one aspect the modified nucleic acids described herein can contain one or more modified nucleosides or nucleotides, e.g., to introduce stability toward nucleases.

[1857] In an embodiment, the modified nucleosides, modified nucleotides, and modified nucleic acids described herein can exhibit a reduced innate immune response when introduced into a population of cells, both in vivo and ex vivo. The term “innate immune response” includes a cellular response to exogenous nucleic acids, including single stranded nucleic acids, generally of viral or bacterial origin, which involves the induction of cytokine expression and release, particularly the interferons, and cell death. In an embodiment, the modified nucleosides, modified nucleotides, and modified nucleic acids described herein can disrupt binding of a major groove interacting partner with the nucleic acid. In an embodiment, the modified nucleosides, modified nucleotides, and modified nucleic acids described herein can exhibit a reduced innate immune response when introduced into a population of cells, both in vivo and ex vivo, and also disrupt binding of a major groove interacting partner with the nucleic acid.

[1858] Definitions of Chemical Groups

[1859] As used herein, “alkyl” is meant to refer to a saturated hydrocarbon group which is straight-chained or branched. Example alkyl groups include methyl (Me), ethyl (Et), propyl (e.g., n-propyl and isopropyl), butyl (e.g., n-butyl, isobutyl, t-butyl), pentyl (e.g., n-pentyl, isopentyl, neopentyl), and the like. An alkyl group can contain from 1 to about 20, from 2 to about 20, from 1 to about 12, from 1 to about 8, from 1 to about 6, from 1 to about 4, or from 1 to about 3 carbon atoms.

[1860] As used herein, “aryl” refers to monocyclic or polycyclic (e.g., having 2, 3 or 4 fused rings) aromatic hydrocarbons such as, for example, phenyl, naphthyl, anthracenyl, phenanthrenyl, indanyl, indenyl, and the like. In an embodiment, aryl groups have from 6 to about 20 carbon atoms.

[1861] As used herein, “alkenyl” refers to an aliphatic group containing at least one double bond.

[1862] As used herein, “alkynyl” refers to a straight or branched hydrocarbon chain containing 2-12 carbon atoms and characterized in having one or more triple bonds. Examples of alkynyl groups include, but are not limited to, ethynyl, propargyl, and 3-hexynyl.

[1863] As used herein, “arylalkyl” or “aralkyl” refers to an alkyl moiety in which an alkyl hydrogen atom is replaced by an aryl group. Aralkyl includes groups in which more than one hydrogen atom has been replaced by an aryl group. Examples of “arylalkyl” or “aralkyl” include benzyl, 2-phenylethyl, 3-phenylpropyl, 9-fluorenyl, benzhydryl, and trityl groups.

[1864] As used herein, “cycloalkyl” refers to a cyclic, bicyclic, tricyclic, or polycyclic non-aromatic hydrocarbon groups having 3 to 12 carbons. Examples of cycloalkyl moieties include, but are not limited to, cyclopropyl, cyclopentyl, and cyclohexyl.

[1865] As used herein, “heterocyclyl” refers to a monovalent radical of a heterocyclic ring system. Representative heterocyclyls include, without limitation, tetrahydrofuranyl, tetrahydrothienyl, pyrrolidinyl, pyrrolidonyl, piperidinyl, pyrrolinyl, piperazinyl, dioxanyl, dioxolanyl, diazepinyl, oxazepinyl, thiazepinyl, and morpholinyl.

[1866] As used herein, “heteroaryl” refers to a monovalent radical of a heteroaromatic ring system. Examples of heteroaryl moieties include, but are not limited to, imidazolyl, oxazolyl, thiazolyl, triazolyl, pyrrolyl, furanyl, indolyl, thiophenyl pyrazolyl, pyridinyl, pyrazinyl, pyridazinyl, pyrimidinyl, indolizinyl, purinyl, naphthyridinyl, quinolyl, and pteridinyl.

[1867] Phosphate Backbone Modifications

[1868] The Phosphate Group

[1869] In an embodiment, the phosphate group of a modified nucleotide can be modified by replacing one or more of the oxygens with a different substituent. Further, the modified nucleotide, e.g., modified nucleotide present in a modified nucleic acid, can include the wholesale replacement of an unmodified phosphate moiety with a modified phosphate as described herein. In an embodiment, the modification of the phosphate backbone can include alterations that result in either an uncharged linker or a charged linker with unsymmetrical charge distribution.

[1870] Examples of modified phosphate groups include, phosphorothioate, phosphoroselenates, borano phosphates, borano phosphate esters, hydrogen phosphonates, phosphoroamidates, alkyl or aryl phosphonates and phosphotriesters. In an embodiment, one of the non-bridging phosphate oxygen atoms in the phosphate backbone moiety can be replaced by any of the following groups: sulfur (S), selenium (Se), BR₃ (wherein R can be, e.g., hydrogen, alkyl, or aryl), C (e.g., an alkyl group, an aryl group, and the like), H, NR₂ (wherein R can be, e.g., hydrogen, alkyl, or aryl), or OR (wherein R can be, e.g., alkyl or aryl). The phosphorous atom in an unmodified phosphate group is achiral. However, replacement of one of the non-bridging oxygens with one of the above atoms or groups of atoms can render the phosphorous atom chiral; that is to say that a phosphorous atom in a phosphate group modified in this way is a stereogenic center. The stereogenic phosphorous atom can possess either the “R” configuration (herein Rp) or the “S” configuration (herein Sp).

[1871] Phosphorodithioates have both non-bridging oxygens replaced by sulfur. The phosphorus center in the phosphorodithioates is achiral which precludes the formation of oligoribonucleotide diastereomers. In an embodiment, modifications to one or both non-bridging oxygens can also include the replacement of the non-bridging oxygens with a group independently selected from S, Se, B, C, H, N, and OR (R can be, e.g., alkyl or aryl).

[1872] The phosphate linker can also be modified by replacement of a bridging oxygen, (i.e., the oxygen that links the phosphate to the nucleoside), with nitrogen (bridged phosphoroamidates), sulfur (bridged phosphorothioates) and carbon (bridged methylenephosphonates). The replacement can occur at either linking oxygen or at both of the linking oxygens.

[1873] Replacement of the Phosphate Group

[1874] The phosphate group can be replaced by non-phosphorus containing connectors. In an embodiment, the charge phosphate group can be replaced by a neutral moiety.

[1875] Examples of moieties which can replace the phosphate group can include, without limitation, e.g., methyl phosphonate, hydroxylamino, siloxane, carbonate, carboxymethyl, carbamate, amide, thioether, ethylene oxide linker, sulfonate, sulfonamide, thioformacetal, formacetal, oxime, methyleneimino, methylenemethylimino, methylenehydrazo, methylenedimethylhydrazo and methyleneoxymethylimino.

[1876] Replacement of the Ribophosphate Backbone

[1877] Scaffolds that can mimic nucleic acids can also be constructed wherein the phosphate linker and ribose sugar are replaced by nuclease resistant nucleoside or nucleotide surrogates. In an embodiment, the nucleobases can be tethered by a surrogate backbone. Examples can include, without limitation, the morpholino, cyclobutyl, pyrrolidine and peptide nucleic acid (PNA) nucleoside surrogates.

[1878] Sugar Modifications

[1879] The modified nucleosides and modified nucleotides can include one or more modifications to the sugar group. For example, the 2′ hydroxyl group (OH) can be modified or replaced with a number of different “oxy” or “deoxy” substituents. In an embodiment, modifications to the 2′ hydroxyl group can enhance the stability of the nucleic acid since the hydroxyl can no longer be deprotonated to form a 2′-alkoxide ion. The 2′-alkoxide can catalyze degradation by intramolecular nucleophilic attack on the linker phosphorus atom.

[1880] Examples of “oxy”-2′ hydroxyl group modifications can include alkoxy or aryloxy (OR, wherein “R” can be, e.g., alkyl, cycloalkyl, aryl, aralkyl, heteroaryl or a sugar); polyethyleneglycols (PEG), O(CH₂CH₂O)ₙCH₂CH₂OR wherein R can be, e.g., H or optionally substituted alkyl, and n can be an integer from 0 to 20 (e.g., from 0 to 4, from 0 to 8, from 0 to 10, from 0 to 16, from 1 to 4, from l to 8, from 1 to 10, from 1 to 16, from 1 to 20, from 2 to 4, from 2 to 8, from 2 to 10, from 2 to 16, from 2 to 20, from 4 to 8, from 4 to 10, from 4 to 16, and from 4 to 20). In an embodiment, the “oxy”-2′ hydroxyl group modification can include “locked” nucleic acids (LNA) in which the 2′ hydroxyl can be connected, e.g., by a C₁₋₆ alkylene or C₁₋₆ heteroalkylene bridge, to the 4′ carbon of the same ribose sugar, where exemplary bridges can include methylene, propylene, ether, or amino bridges; O-amino (wherein amino can be, e.g., NH₂; alkylamino, dialkylamino, heterocyclyl, arylamino, diarylamino, heteroarylamino, or diheteroarylamino, ethylenediamine, or polyamino) and aminoalkoxy, O(CH₂)ₙ-amino, (wherein amino can be, e.g., NH₂; alkylamino, dialkylamino, heterocyclyl, arylamino, diarylamino, heteroarylamino, or diheteroarylamino, ethylenediamine, or polyamino). In an embodiment, the “oxy”-2′ hydroxyl group modification can include the methoxyethyl group (MOE), (OCH₂CH₂OCH₃, e.g., a PEG derivative).

[1881] “Deoxy” modifications can include hydrogen (i.e. deoxyribose sugars, e.g., at the overhang portions of partially ds RNA); halo (e.g., bromo, chloro, fluoro, or iodo); amino (wherein amino can be, e.g., NH₂; alkylamino, dialkylamino, heterocyclyl, arylamino, diarylamino, heteroarylamino, diheteroarylamino, or amino acid); NH(CH₂CH₂NH)ₙCH₂CH₂-amino (wherein amino can be, e.g., as described herein), —NHC(O)R (wherein R can be, e.g., alkyl, cycloalkyl, aryl, aralkyl, heteroaryl or sugar), cyano; mercapto; alkyl-thio-alkyl; thioalkoxy; and alkyl, cycloalkyl, aryl, alkenyl and alkynyl, which may be optionally substituted with e.g., an amino as described herein.

[1882] The sugar group can also contain one or more carbons that possess the opposite stereochemical configuration than that of the corresponding carbon in ribose. Thus, a modified nucleic acid can include nucleotides containing e.g., arabinose, as the sugar. The nucleotide “monomer” can have an alpha linkage at the 1′ position on the sugar, e.g., alpha-nucleosides. The modified nucleic acids can also include “abasic” sugars, which lack a nucleobase at C-1′. These abasic sugars can also be further modified at one or more of the constituent sugar atoms. The modified nucleic acids can also include one or more sugars that are in the L form, e.g. L-nucleosides.

[1883] Generally, RNA includes the sugar group ribose, which is a 5-membered ring having an oxygen. Exemplary modified nucleosides and modified nucleotides can include, without limitation, replacement of the oxygen in ribose (e.g., with sulfur (S), selenium (Se), or alkylene, such as, e.g., methylene or ethylene); addition of a double bond (e.g., to replace ribose with cyclopentenyl or cyclohexenyl); ring contraction of ribose (e.g., to form a 4-membered ring of cyclobutane or oxetane); ring expansion of ribose (e.g., to form a 6- or 7-membered ring having an additional carbon or heteroatom, such as for example, anhydrohexitol, altritol, mannitol, cyclohexanyl, cyclohexenyl, and morpholino that also has a phosphoramidate backbone). In an embodiment, the modified nucleotides can include multicyclic forms (e.g., tricyclo; and “unlocked” forms, such as glycol nucleic acid (GNA) (e.g., R-GNA or S-GNA, where ribose is replaced by glycol units attached to phosphodiester bonds), threose nucleic acid (TNA, where ribose is replaced with α-L-threofuranosyl-(3′→2′)).

[1884] Modifications on the Nucleobase

[1885] The modified nucleosides and modified nucleotides described herein, which can be incorporated into a modified nucleic acid, can include a modified nucleobase. Examples of nucleobases include, but are not limited to, adenine (A), guanine (G), cytosine (C), and uracil (U). These nucleobases can be modified or wholly replaced to provide modified nucleosides and modified nucleotides that can be incorporated into modified nucleic acids. The nucleobase of the nucleotide can be independently selected from a purine, a pyrimidine, a purine or pyrimidine analog. In an embodiment, the nucleobase can include, for example, naturally-occurring and synthetic derivatives of a base.

[1886] Uracil

[1887] In an embodiment, the modified nucleobase is a modified uracil. Exemplary nucleobases and nucleosides having a modified uracil include without limitation pseudouridine (ψ), pyridin-4-one ribonucleoside, 5-aza-uridine, 6-aza-uridine, 2-thio-5-aza-uridine, 2-thio-uridine (s2U), 4-thio-uridine (s4U), 4-thio-pseudouridine, 2-thio-pseudouridine, 5-hydroxy-uridine (ho⁵U), 5-aminoallyl-uridine, 5-halo-uridine (e.g., 5-iodo-uridine or 5-bromo-uridine), 3-methyl-uridine (m³U), 5-methoxy-uridine (mo⁵U), uridine 5-oxyacetic acid (cmo⁵U), uridine 5-oxyacetic acid methyl ester (mcmo⁵U), 5-carboxymethyl-uridine (cm⁵U), 1-carboxymethyl-pseudouridine, 5-carboxyhydroxymethyl-uridine (chm⁵U), 5-carboxyhydroxymethyl-uridine methyl ester (mchm⁵U), 5-methoxycarbonylmethyl-uridine (mcm⁵U), 5-methoxycarbonylmethyl-2-thio-uridine (mcm⁵s2U), 5-aminomethyl-2-thio-uridine (nm⁵s2U), 5-methylaminomethyl-uridine (mnm⁵U), 5-methylaminomethyl-2-thio-uridine (mnm⁵s2U), 5-methylaminomethyl-2-seleno-uridine (mnm⁵se²U), 5-carbamoylmethyl-uridine (ncm⁵U), 5-carboxymethylaminomethyl-uridine (cmnm⁵U), 5-carboxymethylaminomethyl-2-thio-uridine (cmnm ⁵s2U), 5-propynyl-uridine, 1-propynyl-pseudouridine, 5-taurinomethyl-uridine (τcm⁵U), 1-taurinomethyl-pseudouridine, 5-taurinomethyl-2-thio-uridine(τm⁵s2U), 1-taurinomethyl-4-thio-pseudouridine, 5-methyl-uridine (m⁵U, i.e., having the nucleobase deoxythymine), 1-methyl-pseudouridine (m¹ψ), 5-methyl-2-thio-uridine (m⁵s2U), 1-methyl-4-thio-pseudouridine (m¹s⁴ψ), 4-thio-1-methyl-pseudouridine, 3-methyl-pseudouridine (m³ψ), 2-thio-1-methyl-pseudouridine, 1-methyl-1-deaza-pseudouridine, 2-thio-1-methyl-1-deaza-pseudouridine, dihydrouridine (D), dihydropseudouridine, 5,6-dihydrouridine, 5-methyl-dihydrouridine (m⁵D), 2-thio-dihydrouridine, 2-thio-dihydropseudouridine, 2-methoxy-uridine, 2-methoxy-4-thio-uridine, 4-methoxy-pseudouridine, 4-methoxy-2-thio-pseudouridine, N1-methyl-pseudouridine, 3-(3-amino-3-carboxypropyl)uridine (acp³U), 1-methyl-3-(3-amino-3-carboxypropyl)pseudouridine (acp³ψ), 5-(isopentenylaminomethyl)uridine (inm⁵U), 5-(isopentenylaminomethyl)-2-thio-uridine (inm⁵s2U), α-thio-uridine, 2′-O-methyl-uridine (Urn), 5,2′-O-dimethyl-uridine (m⁵Um), 2′-O-methyl-pseudouridine (ψm), 2-thio-2′-O-methyl-uridine (s2Um), 5-methoxycarbonylmethyl-2′-O-methyl-uridine (mcm ⁵Um), 5-carbamoylmethyl-2′-O-methyl-uridine (ncm⁵Um), 5-carboxymethylaminomethyl-2′-O-methyl-uridine (cmnm ⁵Um), 3,2′-O-dimethyl-uridine (m³Um), 5-(isopentenylaminomethyl)-2′-O-methyl-uridine (inm ⁵Um), 1-thio-uridine, deoxythymidine, 2′-F-ara-uridine, 2′-F-uridine, 2′-OH-ara-uridine, 5-(2-carbomethoxyvinyl) uridine, 5-[3-(1-E-propenylamino)uridine, pyrazolo[3,4-d]pyrimidines, xanthine, and hypoxanthine.

[1888] Cytosine

[1889] In an embodiment, the modified nucleobase is a modified cytosine. Exemplary nucleobases and nucleosides having a modified cytosine include without limitation 5-aza-cytidine, 6-aza-cytidine, pseudoisocytidine, 3-methyl-cytidine (m³C), N4-acetyl-cytidine (act), 5-formyl-cytidine (f⁵C), N4-methyl-cytidine (m⁴C), 5-methyl-cytidine (m⁵C), 5-halo-cytidine (e.g., 5-iodo-cytidine), 5-hydroxymethyl-cytidine (hm⁵C), 1-methyl-pseudoisocytidine, pyrrolo-cytidine, pyrrolo-pseudoisocytidine, 2-thio-cytidine (s2C). 2-thio-5-methyl-cytidine, 4-thio-pseudoisocytidine, 4-thio-1-methyl-pseudoisocytidine, 4-thio-1-methyl-1-deaza-pseudoisocytidine, 1-methyl-1-deaza-pseudoisocytidine, zebularine, 5-aza-zebularine, 5-methyl-zebularine, 5-aza-2-thio-zebularine, 2-thio-zebularine, 2-methoxy-cytidine, 2-methoxy-5-methyl-cytidine, 4-methoxy-pseudoisocytidine, 4-methoxy-1-methyl-pseudoisocytidine, lysidine (k²C), α-thio-cytidine, 2′-O-methyl-cytidine (Cm), 5,2′-O-dimethyl-cytidine (m⁵Cm), N4-acetyl-2′-O-methyl-cytidine (ac⁴Cm), N4,2′-O-dimethyl-cytidine (m⁴Cm), 5-formyl-2′-O-methyl-cytidine (f⁵Cm), N4,N4,2′-O-trimethyl-cytidine (m⁴₂Cm), 1-thio-cytidine, 2′-F-ara-cytidine, 2′-F-cytidine, and 2′-OH-ara-cytidine.

[1890] Adenine

[1891] In an embodiment, the modified nucleobase is a modified adenine. Exemplary nucleobases and nucleosides having a modified adenine include without limitation 2-amino-purine, 2,6-diaminopurine, 2-amino-6-halo-purine (e.g., 2-amino-6-chloro-purine), 6-halo-purine (e.g., 6-chloro-purine), 2-amino-6-methyl-purine, 8-azido-adenosine, 7-deaza-adenosine, 7-deaza-8-aza-adenosine, 7-deaza-2-amino-purine, 7-deaza-8-aza-2-amino-purine, 7-deaza-2,6-diaminopurine, 7-deaza-8-aza-2,6-diaminopurine, 1-methyl-adenosine (m¹A), 2-methyl-adenosine (m²A), N6-methyl-adenosine (m⁶A), 2-methylthio-N6-methyl-adenosine (ms2m⁶A), N6-isopentenyl-adenosine (i⁶A), 2-methylthio-N6-isopentenyl-adenosine (ms²i⁶A), N6-(cis-hydroxyisopentenyl)adenosine (io⁶A), 2-methylthio-N6-(cis-hydroxyisopentenyl)adenosine (ms2io⁶A), N6-glycinylcarbamoyl-adenosine (g⁶A), N6-threonylcarbamoyl-adenosine (t⁶A), N6-methyl-N6-threonylcarbamoyl-adenosine (m⁶t⁶A), 2-methylthio-N6-threonylcarbamoyl-adenosine (ms²g⁶A), N6,N6-dimethyl-adenosine (m⁶₂A), N6-hydroxynorvalylcarbamoyl-adenosine (hn⁶A), 2-methylthio-N6-hydroxynorvalylcarbamoyl-adenosine (ms2hn⁶A), N6-acetyl-adenosine (ac⁶A), 7-methyl-adenosine, 2-methylthio-adenosine, 2-methoxy-adenosine, α-thio-adenosine, 2′-O-methyl-adenosine (Am), N⁶,2′-O-dimethyl-adenosine (m⁶Am), N⁶-Methyl-2′-deoxyadenosine, N6,N6,2′-O-trimethyl-adenosine (m⁶₂Am), 1,2′-O-dimethyl-adenosine (m¹Am), 2′-O-ribosyladenosine (phosphate) (Ar(p)), 2-amino-N6-methyl-purine, 1-thio-adenosine, 8-azido-adenosine, 2′-F-ara-adenosine, 2′-F-adenosine, 2′-OH-ara-adenosine, and N6-(19-amino-pentaoxanonadecyl)-adenosine.

[1892] Guanine

[1893] In an embodiment, the modified nucleobase is a modified guanine. Exemplary nucleobases and nucleosides having a modified guanine include without limitation inosine (I), 1-methyl-inosine (m¹I), wyosine (imG), methylwyosine (mimG), 4-demethyl-wyosine (imG-14), isowyosine (imG2), wybutosine (yW), peroxywybutosine (o₂yW), hydroxywybutosine (OHyW), undermodified hydroxywybutosine (OHyW*), 7-deaza-guanosine, queuosine (Q), epoxyqueuosine (oQ), galactosyl-queuosine (galQ), mannosyl-queuosine (manQ), 7-cyano-7-deaza-guanosine (preQ₀), 7-aminomethyl-7-deaza-guanosine (preQ₁), archaeosine (G⁺), 7-deaza-8-aza-guanosine, 6-thio-guanosine, 6-thio-7-deaza-guanosine, 6-thio-7-deaza-8-aza-guanosine, 7-methyl-guanosine (m⁷G), 6-thio-7-methyl-guanosine, 7-methyl-inosine, 6-methoxy-guanosine, 1-methyl-guanosine (m′G), N2-methyl-guanosine (m²G), N2,N2-dimethyl-guanosine (m²₂G), N2,7-dimethyl-guanosine (m²,7G), N2, N2,7-dimethyl-guanosine (m²,2,7G), 8-oxo-guanosine, 7-methyl-8-oxo-guanosine, 1-methyl-6-thio-guanosine, N2-methyl-6-thio-guanosine, N2,N2-dimethyl-6-thio-guanosine, α-thio-guanosine, 2′-O-methyl-guanosine (Gm), N2-methyl-2′-O-methyl-guanosine (m²Gm), N2,N2-dimethyl-2′-O-methyl-guanosine (m²₂Gm), 1-methyl-2′-O-methyl-guanosine (m′Gm), N2,7-dimethyl-2′-O-methyl-guanosine (m²,7Gm), 2′-O-methyl-inosine (Im), 1,2′-O-dimethyl-inosine (m′Im), O⁶-phenyl-2′-deoxyinosine, 2′-O-ribosylguanosine (phosphate) (Gr(p)), 1-thio-guanosine, O⁶-methyl-guanosine, O⁶-Methyl-2′-deoxyguanosine, 2′-F-ara-guanosine, and 2′-F-guanosine.

[1894] Exemplary Modified gRNAs

[1895] In some embodiments, the modified nucleic acids can be modified gRNAs. It is to be understood that any of the gRNAs described herein can be modified in accordance with this section, including any gRNA that comprises a targeting domain from Tables 1A-1D, 2A-2F, 3A-3C, 4A-4E, 5A-5E, 6A-6B, 7A-7D, 8A-8D, 9, 10A-10D, 11A-11D, 12, 13A-13D, 14A-14C, 15A-15D, 16A-16E, 17A-17B, 18A-18C, 19A-19E, 20A-20C, 21A-21E, 22A-22E, 23A-23C, 24A-24D, 25A-25B, 26, or 31.

[1896] As discussed above, transiently expressed or delivered nucleic acids can be prone to degradation by, e.g., cellular nucleases. Accordingly, in one aspect the modified gRNAs described herein can contain one or more modified nucleosides or nucleotides which introduce stability toward nucleases. While not wishing to be bound by theory it is also believed that certain modified gRNAs described herein can exhibit a reduced innate immune response when introduced into a population of cells, particularly the cells of the present invention. As noted above, the term “innate immune response” includes a cellular response to exogenous nucleic acids, including single stranded nucleic acids, generally of viral or bacterial origin, which involves the induction of cytokine expression and release, particularly the interferons, and cell death.

[1897] While some of the exemplary modification discussed in this section may be included at any position within the gRNA sequence, in some embodiments, a gRNA comprises a modification at or near its 5′ end (e.g., within 1-10, 1-5, or 1-2 nucleotides of its 5′ end). In some embodiments, a gRNA comprises a modification at or near its 3′ end (e.g., within 1-10, 1-5, or 1-2 nucleotides of its 3′ end). In some embodiments, a gRNA comprises both a modification at or near its 5′ end and a modification at or near its 3′ end.

[1898] In an embodiment, the 5′ end of a gRNA is modified by the inclusion of a eukaryotic mRNA cap structure or cap analog (e.g., a G(5′)ppp(5′)G cap analog, a m7G(5′)ppp(5′)G cap analog, or a 3′-O-Me-m7G(5′)ppp(5′)G anti reverse cap analog (ARCA)). The cap or cap analog can be included during either chemical synthesis or in vitro transcription of the gRNA.

[1899] In an embodiment, an in vitro transcribed gRNA is modified by treatment with a phosphatase (e.g., calf intestinal alkaline phosphatase) to remove the 5′ triphosphate group.

[1900] In an embodiment, the 3′ end of a gRNA is modified by the addition of one or more (e.g., 25-200) adenine (A) residues. The polyA tract can be contained in the nucleic acid (e.g., plasmid, PCR product, viral genome) encoding the gRNA, or can be added to the gRNA during chemical synthesis, or following in vitro transcription using a polyadenosine polymerase (e.g., E. coli Poly(A)Polymerase).

[1901] In an embodiment, in vitro transcribed gRNA contains both a 5′ cap structure or cap analog and a 3′ polyA tract. In an embodiment, an in vitro transcribed gRNA is modified by treatment with a phosphatase (e.g., calf intestinal alkaline phosphatase) to remove the 5′ triphosphate group and comprises a 3′ polyA tract.

[1902] In some embodiments, gRNAs can be modified at a 3′ terminal U ribose. For example, the two terminal hydroxyl groups of the U ribose can be oxidized to aldehyde groups and a concomitant opening of the ribose ring to afford a modified nucleoside as shown below:

[chemical structure]

wherein “U” can be an unmodified or modified uridine.

[1903] In another embodiment, the 3′ terminal U can be modified with a 2′3′ cyclic phosphate as shown below:

[chemical structure]

wherein “U” can be an unmodified or modified uridine.

[1904] In some embodiments, the gRNA molecules may contain 3′ nucleotides which can be stabilized against degradation, e.g., by incorporating one or more of the modified nucleotides described herein. In this embodiment, e.g., uridines can be replaced with modified uridines, e.g., 5-(2-amino)propyl uridine, and 5-bromo uridine, or with any of the modified uridines described herein; adenosines and guanosines can be replaced with modified adenosines and guanosines, e.g., with modifications at the 8-position, e.g., 8-bromo guanosine, or with any of the modified adenosines or guanosines described herein.

[1905] In some embodiments, sugar-modified ribonucleotides can be incorporated into the gRNA, e.g., wherein the 2′ OH-group is replaced by a group selected from H, —OR, —R (wherein R can be, e.g., alkyl, cycloalkyl, aryl, aralkyl, heteroaryl or sugar), halo, —SH, —SR (wherein R can be, e.g., alkyl, cycloalkyl, aryl, aralkyl, heteroaryl or sugar), amino (wherein amino can be, e.g., NH₂; alkylamino, dialkylamino, heterocyclyl, arylamino, diarylamino, heteroarylamino, diheteroarylamino, or amino acid); or cyano (—CN). In some embodiments, the phosphate backbone can be modified as described herein, e.g., with a phosphothioate group. In some embodiments, one or more of the nucleotides of the gRNA can each independently be a modified or unmodified nucleotide including, but not limited to 2′-sugar modified, such as, 2′-O-methyl, 2′-O-methoxyethyl, or 2′-Fluoro modified including, e.g., 2′-F or 2′-O-methyl, adenosine (A), 2′-F or 2′-O-methyl, cytidine (C), 2′-F or 2′-O-methyl, uridine (U), 2′-F or 2′-O-methyl, thymidine (T), 2′-F or 2′-O-methyl, guanosine (G), 2′-O-methoxyethyl-5-methyluridine (Teo), 2′-O-methoxyethyladenosine (Aeo), 2′-O-methoxyethyl-5-methylcytidine (m5Ceo), and any combinations thereof.

[1906] In some embodiments, a gRNA can include “locked” nucleic acids (LNA) in which the 2′ OH-group can be connected, e.g., by a C1-6 alkylene or C1-6 heteroalkylene bridge, to the 4′ carbon of the same ribose sugar, where exemplary bridges can include methylene, propylene, ether, or amino bridges; O-amino (wherein amino can be, e.g., NH₂; alkylamino, dialkylamino, heterocyclyl, arylamino, diarylamino, heteroarylamino, or diheteroarylamino, ethylenediamine, or polyamino) and aminoalkoxy or O(CH₂)ₙ-amino (wherein amino can be, e.g., NH₂; alkylamino, dialkylamino, heterocyclyl, arylamino, diarylamino, heteroarylamino, or diheteroarylamino, ethylenediamine, or polyamino).

[1907] In some embodiments, a gRNA can include a modified nucleotide which is multicyclic (e.g., tricyclo; and “unlocked” forms, such as glycol nucleic acid (GNA) (e.g., R-GNA or S-GNA, where ribose is replaced by glycol units attached to phosphodiester bonds), or threose nucleic acid (TNA, where ribose is replaced with a-L-threofuranosyl-(3′→2′)).

[1908] Generally, gRNA molecules include the sugar group ribose, which is a 5-membered ring having an oxygen. Exemplary modified gRNAs can include, without limitation, replacement of the oxygen in ribose (e.g., with sulfur (S), selenium (Se), or alkylene, such as, e.g., methylene or ethylene); addition of a double bond (e.g., to replace ribose with cyclopentenyl or cyclohexenyl); ring contraction of ribose (e.g., to form a 4-membered ring of cyclobutane or oxetane); ring expansion of ribose (e.g., to form a 6- or 7-membered ring having an additional carbon or heteroatom, such as for example, anhydrohexitol, altritol, mannitol, cyclohexanyl, cyclohexenyl, and morpholino that also has a phosphoramidate backbone). Although the majority of sugar analog alterations are localized to the 2′ position, other sites are amenable to modification, including the 4′ position. In an embodiment, a gRNA comprises a 4′-S, 4′-Se or a 4′-C-aminomethyl-2′-O-Me modification.

[1909] In some embodiments, deaza nucleotides, e.g., 7-deaza-adenosine, can be incorporated into the gRNA. In some embodiments, O- and N-alkylated nucleotides, e.g., N6-methyl adenosine, can be incorporated into the gRNA. In some embodiments, one or more or all of the nucleotides in a gRNA molecule are deoxynucleotides.

[1910] miRNA Binding Sites

[1911] microRNAs (or miRNAs) are naturally occurring cellular 19-25 nucleotide long noncoding RNAs. They bind to nucleic acid molecules having an appropriate miRNA binding site, e.g., in the 3′ UTR of an mRNA, and down-regulate gene expression. While not wishing to be bound by theory it is believed that the down regulation is either by reducing nucleic acid molecule stability or by inhibiting translation. An RNA species disclosed herein, e.g., an mRNA encoding Cas9 can comprise an miRNA binding site, e.g., in its 3′UTR. The miRNA binding site can be selected to promote down regulation of expression is a selected cell type. By way of example, the incorporation of a binding site for miR-122, a microRNA abundant in liver, can inhibit the expression of the gene of interest in the liver.

### EXAMPLES

[1912] The following Examples are merely illustrative and are not intended to limit the scope or content of the invention in any way.

### Example 1

### Cloning and Initial Screening of gRNAs

[1913] The suitability of candidate gRNAs can be evaluated as described in this example. Although described for a chimeric gRNA, the approach can also be used to evaluate modular gRNAs.

[1914] Cloning gRNAs into Vectors

[1915] For each gRNA, a pair of overlapping oligonucleotides is designed and obtained. Oligonucleotides are annealed and ligated into a digested vector backbone containing an upstream U6 promoter and the remaining sequence of a long chimeric gRNA. Plasmid is sequence-verified and prepped to generate sufficient amounts of transfection-quality DNA. Alternate promoters maybe used to drive in vivo transcription (e.g. H1 promoter) or for in vitro transcription (e.g., a T7 promoter).

[1916] Cloning gRNAs in Linear dsDNA Molecule (STITCHR)

[1917] For each gRNA, a single oligonucleotide is designed and obtained. The U6 promoter and the gRNA scaffold (e.g. including everything except the targeting domain, e.g., including sequences derived from the crRNA and tracrRNA, e.g., including a first complementarity domain; a linking domain; a second complementarity domain; a proximal domain; and a tail domain) are separately PCR amplified and purified as dsDNA molecules. The gRNA-specific oligonucleotide is used in a PCR reaction to stitch together the U6 and the gRNA scaffold, linked by the targeting domain specified in the oligonucleotide. Resulting dsDNA molecule (STITCHR product) is purified for transfection. Alternate promoters may be used to drive in vivo transcription (e.g., H1 promoter) or for in vitro transcription (e.g., T7 promoter). Any gRNA scaffold may be used to create gRNAs compatible with Cas9s from any bacterial species.

[1918] Initial gRNA Screen

[1919] Each gRNA to be tested is transfected, along with a plasmid expressing Cas9 and a small amount of a GFP-expressing plasmid into human cells. In preliminary experiments, these cells can be immortalized human cell lines such as 293T, K562 or U2OS. Alternatively, primary human cells may be used. In this case, cells may be relevant to the eventual therapeutic cell target (for example, an erythroid cell). The use of primary cells similar to the potential therapeutic target cell population may provide important information on gene targeting rates in the context of endogenous chromatin and gene expression.

[1920] Transfection may be performed using lipid transfection (such as Lipofectamine or Fugene) or by electroporation (such as Lonza Nucleofection). Following transfection, GFP expression can be determined either by fluorescence microscopy or by flow cytometry to confirm consistent and high levels of transfection. These preliminary transfections can comprise different gRNAs and different targeting approaches (17-mers, 20-mers, nuclease, dual-nickase, etc.) to determine which gRNAs/combinations of gRNAs give the greatest activity.

[1921] Efficiency of cleavage with each gRNA may be assessed by measuring NHEJ-induced indel formation at the target locus by a T7E1-type assay or by sequencing. Alternatively, other mismatch-sensitive enzymes, such as Cell/Surveyor nuclease, may also be used.

[1922] For the T7E1 assay, PCR amplicons are approximately 500-700 bp with the intended cut site placed asymmetrically in the amplicon. Following amplification, purification and size-verification of PCR products, DNA is denatured and re-hybridized by heating to 95° C. and then slowly cooling. Hybridized PCR products are then digested with T7 Endonuclease I (or other mismatch-sensitive enzyme) which recognizes and cleaves non-perfectly matched DNA. If indels are present in the original template DNA, when the amplicons are denatured and re-annealed, this results in the hybridization of DNA strands harboring different indels and therefore lead to double-stranded DNA that is not perfectly matched. Digestion products may be visualized by gel electrophoresis or by capillary electrophoresis. The fraction of DNA that is cleaved (density of cleavage products divided by the density of cleaved and uncleaved) may be used to estimate a percent NHEJ using the following equation: % NHEJ=(1-(1-fraction cleaved)^{1/2}). The T7E1 assay is sensitive down to about 2-5% NHEJ.

[1923] Sequencing may be used instead of, or in addition to, the T7E1 assay. For Sanger sequencing, purified PCR amplicons are cloned into a plasmid backbone, transformed, miniprepped and sequenced with a single primer. Sanger sequencing may be used for determining the exact nature of indels after determining the NHEJ rate by T7E1.

[1924] Sequencing may also be performed using next generation sequencing techniques. When using next generation sequencing, amplicons may be 300-500 bp with the intended cut site placed asymmetrically. Following PCR, next generation sequencing adapters and barcodes (for example Illumina multiplex adapters and indexes) may be added to the ends of the amplicon, e.g., for use in high throughput sequencing (for example on an Illumina MiSeq). This method allows for detection of very low NHEJ rates.

### Example 2

### Assessment of Gene Targeting by NHEJ

[1925] The gRNAs that induce the greatest levels of NHEJ in initial tests can be selected for further evaluation of gene targeting efficiency. In this case, cells are derived from disease subjects and, therefore, harbor the relevant mutation.

[1926] Following transfection (usually 2-3 days post-transfection,) genomic DNA may be isolated from a bulk population of transfected cells and PCR may be used to amplify the target region. Following PCR, gene targeting efficiency to generate the desired mutations (either knockout of a target gene or removal of a target sequence motif) may be determined by sequencing. For Sanger sequencing, PCR amplicons may be 500-700 bp long. For next generation sequencing, PCR amplicons may be 300-500 bp long. If the goal is to knockout gene function, sequencing may be used to assess what percent of alleles have undergone NHEJ-induced indels that result in a frameshift or large deletion or insertion that would be expected to destroy gene function. If the goal is to remove a specific sequence motif, sequencing may be used to assess what percent of alleles have undergone NHEJ-induced deletions that span this sequence.

### Example 3

### Assessment of Gene Targeting by HDR

[1927] The gRNAs that induce the greatest levels of NHEJ in initial tests can be selected for further evaluation of gene targeting efficiency. In this case, cells are derived from disease subjects and, therefore, harbor the relevant mutation.

[1928] Following transfection (usually 2-3 days post-transfection,) genomic DNA may be isolated from a bulk population of transfected cells and PCR may be used to amplify the target region. Following PCR, gene targeting efficiency can be determined by several methods.

[1929] Determination of gene targeting frequency involves measuring the percentage of alleles that have undergone homologous directed repair (HDR) with the exogenously provided donor template or endogenous genomic donor sequence and which therefore have incorporated the desired correction. If the desired HDR event creates or destroys a restriction enzyme site, the frequency of gene targeting may be determined by a RFLP assay. If no restriction site is created or destroyed, sequencing may be used to determine gene targeting frequency. If a RFLP assay is used, sequencing may still be used to verify the desired HDR event and ensure that no other mutations are present. If an exogenously provided donor template is employed, at least one of the primers is placed in the endogenous gene sequence outside of the region included in the homology arms, which prevents amplification of donor template still present in the cells. Therefore, the length of the homology arms present in the donor template may affect the length of the PCR amplicon. PCR amplicons can either span the entire donor region (both primers placed outside the homology arms) or they can span only part of the donor region and a single junction between donor and endogenous DNA (one internal and one external primer). If the amplicons span less than the entire donor region, two different PCRs should be used to amplify and sequence both the 5′ and the 3′ junction.

[1930] If the PCR amplicon is short (less than 600 bp) it is possible to use next generation sequencing. Following PCR, next generation sequencing adapters and barcodes (for example Illumina multiplex adapters and indexes) may be added to the ends of the amplicon, e.g., for use in high throughput sequencing (for example on an Illumina MiSeq). This method allows for detection of very low gene targeting rates.

[1931] If the PCR amplicon is too long for next generation sequencing, Sanger sequencing can be performed. For Sanger sequencing, purified PCR amplicons will be cloned into a plasmid backbone (for example, TOPO cloned using the LifeTech Zero Blunt® TOPO® cloning kit), transformed, miniprepped and sequenced.

[1932] The same or similar assays described above can be used to measure the percentage of alleles that have undergone HDR with endogenous genomic donor sequence and which therefore have incorporated the desired correction.

### Example 4

### Screening of gRNAs for Targeting BCL11A

[1933] In order to identify gRNAs with the highest on target NHEJ efficiency, thirty exemplary S. pyogenes gRNAs were selected for testing (Table 31). The gRNAs tested target three different regions of the BCL11A locus—5′ of a red blood cell enhancer, 3′ of a red blood cell enhancer and downstream of the ATG start codon in exon 2 (specified in Table 31).

TABLE 31

| gRNA Name | Targeting Sequence | Size | Gene Region | SEQ ID NO |
|---|---|---|---|---|
| BCL11A-2981W | GUGCUACUUAUACAAUUCAC | 20 | 3′ of enhancer | 16261 |
| BCL11A-2982W | GAAAAUACUUACUGUACUGC | 20 | 3′ of enhancer | 16262 |
| BCL11A-2983W | GGCUGUUUUGGAAUGUAGAG | 20 | 5′ of enhancer | 16263 |
| BCL11A-2984W | AUUCACUGGAAACCCUGUUA | 20 | 3′ of enhancer | 16264 |
| BCL11A-2985W | UACUGUACUGCAGGGGAAUU | 20 | 3′ of enhancer | 16265 |
| BCL11A-2986W | AAACUAUUUACAGCCAUAAC | 20 | 3′ of enhancer | 16266 |
| BCL11A-2987W | AAAUACUUACUGUACUGCAG | 20 | 3′ of enhancer | 16267 |
| BCL11A-2988W | CUAUUUACAGCCAUAAC | 17 | 3′ of enhancer | 16268 |
| BCL11A-2989W | CUACUUAUACAAUUCAC | 17 | 3′ of enhancer | 16269 |
| BCL11A-2990W | CACUGGAAACCCUGUUA | 17 | 3′ of enhancer | 16270 |
| BCL11A-2991W | UACUUACUGUACUGCAG | 17 | 3′ of enhancer | 16271 |
| BCL11A-2992W | UGUACUGCAGGGGAAUU | 17 | 3′ of enhancer | 16272 |
| BCL11A-2993W | AAUACUUACUGUACUGC | 17 | 3′ of enhancer | 16273 |
| BCL11A-2994W | AUACUUACUGUACUGCA | 17 | 3′ of enhancer | 16274 |
| BCL11A-2995W | GAAUGUAGAGAGGCAGA | 17 | 5′ of enhancer | 16275 |
| BCL11A-2996W | GGAAUGUAGAGAGGCAG | 17 | 5′ of enhancer | 16276 |
| BCL11A-2997W | GUAAGUAUUUUCUUUCAUUG | 20 | 3′ of enhancer | 16277 |
| BCL11A-2998W | GUAAUUAAGAAAGCAGUGUA | 20 | 5′ of enhancer | 16278 |
| BCL11A-2999W | GUAUUUUCUUUCAUUGG | 17 | 3′ of enhancer | 16279 |
| BCL11A-32W | UGGCAUCCAGGUCACGCCAG | 20 | Exon 2 | 16280 |
| BCL11A-40W | GAUGCUUUUUUCAUCUCGAU | 20 | Exon 2 | 16281 |
| BCL11A-30W | GCAUCCAAUCCCGUGGAGGU | 20 | Exon 2 | 16282 |
| BCL11A-42W | UUUUCAUCUCGAUUGGUGAA | 20 | Exon 2 | 16283 |
| BCL11A-24W | CCAGAUGAACUUCCCAUUGG | 20 | Exon 2 | 16284 |
| BCL11A-53W | AGGAGGUCAUGAUCCCCUUC | 20 | Exon 2 | 16285 |
| BCL11A-79W | CAUCCAGGUCACGCCAG | 17 | Exon 2 | 16286 |
| BCL11A-90W | GCUUUUUUCAUCUCGAU | 17 | Exon 2 | 16287 |
| BCL11A-77W | UCCAAUCCCGUGGAGGU | 17 | Exon 2 | 16288 |
| BCL11A-92W | UCAUCUCGAUUGGUGAA | 17 | Exon 2 | 16289 |
| BCL11A-71W | GAUGAACUUCCCAUUGG | 17 | Exon 2 | 16290 |

[1934] A DNA template comprised of an exemplary gRNA (including the target region and the S. pyogenes TRACR sequence) under the control of a U6 promoter was generated by a PCR StitchR reaction. This DNA template was subsequently transfected into 293 cells using Lipofectamine 3000 along with a DNA plasmid encoding the S. pyogenes Cas9 downstream of a CMV promoter. Genomic DNA was isolated from the cells 48-72 hours post transfection. To determine the rate of modification at the BCL11A locus, the target region was amplified using a locus PCR with the primers listed in Table 32.

TABLE 32

| Primer Sequence | Exon |
|---|---|
| TGCCTACATCTGATTCAGTGA | BCL11A exon 2 5′ primer |
| GG (SEQ ID NO: 16291) | |
| TGCCTCATTGACAAATTTGC | BCL11A exon 2 3′ primer |
| TC (SEQ ID NO: 16292) | |
| AGACCGTCTCTTTGGTGCAG | BCL11A 5′ enhancer 5′ primer |
| (SEQ ID NO: 16293) | |
| GCAGTGGCTTTAGGCTGTTT | BCL11A 5′ enhancer 3′ primer |
| (SEQ ID NO: 16294) | |
| GTGTGATCTCGGCTCACCAC | BCL11A 3′ enhancer 5′ primer |
| (SEQ ID NO: 16295) | |
| CCCTGACTTTGGAGCTCAGC | BCL11A 3′ enhancer 3′ primer |
| (SEQ ID NO: 16296) | |

[1935] After PCR amplification, a T7E1-directed mismatch cleavage assay was performed on the PCR product. Briefly, this assay involves melting the PCR product followed by a re-annealing step. If gene modification has occurred, there will exist double stranded products that are not perfect matches due to some frequency of insertions or deletions. These double stranded products are sensitive to cleavage by a T7 endonuclease 1 enzyme at the site of mismatch. Therefore, the efficiency of cutting by the Cas9/gRNA complex was determined by analyzing the amount of T7E1 cleavage. The formula that was used to provide a measure of % NHEJ from the T7E1 cutting is the following: 100*(1−(1−(fraction cleaved))̂0.5). The results of this analysis are shown in FIG. 11. The top performing gRNAs in this assay were BCL11A-2981, BCL11A-2983, BCL11A-2995, BCL11A-32, BCL11A-30, and BCL11A-71.

### Example 5

### Deletion of the Erythroid Enhancer Elements Using Two gRNAs Flanking the Sequence

[1936] In order to test whether the erythroid enhancer sequence can be deleted using a two gRNA approach, two pairs of gRNAs were tested in 293 cells. Pair number 1 comprised BCL11A-2983W and BCL11A-2981W while Pair number 2 comprised BCL11A-2995W and BCL11A-2984W. In this example, a plasmid encoding S. pyogenes Cas9 downstream of a CMV promoter was delivered with either gRNA pair 1 or gRNA pair 2. The gRNAs were delivered as separate STITCHR products with each template comprising the U6 promoter, gRNA target sequence and S. pyogenes TRACR sequence. The DNA templates were delivered to 293 cells using lipid transfection (Lipofectamine 3000, Life Technologies). 72 hours post transfection, the cells were harvested and gDNA was isolated. To detect the deletion of the enhancer region of BCL11A, PCR primers flanking the enhancer sequences were used to amplify the deletion event. The PCR product was TOPO cloned and sequenced by Sanger sequencing. The results of these analyses are presented in FIG. 12A-13B. As shown in FIG. 12A-13B, the deletion for both gRNA pairs that were delivered to the 293 cells were detected.

### Example 6

### Gene Targeting of the HBB Locus by CRISPR/Cas9 to Investigate Repair Pathway Choice in Response to Different Types of DNA Lesions

[1937] The CRISPR/Cas9 system was used to target the human HBB gene in the region of the sickle cell anemia-causing mutation.

[1938] To examine how the nature of the targeted break affects the frequency of different DNA repair outcomes, blunt double-strand breaks, single-strand nicks, and dual-nicks in which the nicks are placed on opposite strands and leave either 3′ or 5′ overhangs of varying lengths, were introduced by utilizing the wild type Cas9 nuclease, as well as two different Cas9 nickases. Several different DNA repair outcomes including indel mutations resulting from non-homologous end-joining, homology-dependent repair (HDR) using the donor as a template, and HDR using the closely related HBD gene as an endogenous template, were characterized using either single-strand oligonucleotide (ssODN) or plasmid DNA donors. The frequency of these various repair outcomes under different conditions offer insight into the mechanisms of DNA repair and how it is impacted by the nature of the DNA break. The data also indicates a therapeutic approach in which correction of the sickle-cell mutation is efficiently mediated through HDR with either a donor template or with the HBD gene.

[1939] In this study different gRNA for the HBB region that surrounds the nucleotides encoding the amino acid most commonly mutated in sickle cell disease had been tested in 293T cells with wild type Cas9 molecule. The gRNAs that induced similar high rates of NHEJ and had PAMs facing in opposite orientations were selected to test as pairs with Cas9 D10A and Cas9 N863A nickases.

[1940] As shown in FIG. 14, the gRNA pair 8/15 (“8gRNA”/“15gRNA” pair) was selected as one of the best pairs of gRNA. “8gRNA” has the targeting domain sequence of GUAACGGCAGACUUCUCCUC (SEQ ID NO: 388) and “15gRNA” has the targeting domain sequence of AAGGUGAACGUGGAUGAAGU (SEQ ID NO: 387). This pair of gRNAs in combination with the mutant Cas9 D10A would generate a 5′ overhang of 47 bp, and in combination with the mutant N863A would generate a 3′ overhang of 47 bp.

[1941] In this Example, U20S cells were electroporated with 200 ng of each gRNA and 750 ng of plasmid that encodes wild type Cas9 or mutant Cas9. Cells were collected 6 days after electroporation and genomic DNA was extracted. PCR amplification of the HBB locus was performed and subcloned into a Topo Blunt Vector. For each condition in each experiment 96 colonies were sequenced with Sanger sequencing. In the experiments assessing HDR efficacy, cells were electroporated with 2.5 ug of single stranded oligo or double stranded oligo in addition to the gRNA and the Cas9-encoding plasmid.

[1942] As shown in FIG. 15, the total percentages of all editing events detected by Sanger sequencing of the HBB locus were similar using wild type Cas9 or Cas9 nickases (D10A, N863A).

[1943] FIGS. 16A-16B show that a majority of the total gene editing events (about ¾ of the total) were small deletions (<10 bp). This is consistent with the notion that wildtype Cas9 generates a blunt end which are preferentially repaired by canonical NHEJ. In contrast, deletions represented only about a quarter of the total events using either nickase (D10A or N863A). Moreover, larger deletions of ˜50 bp that can be mapped to the region between the two nickase sites were observed (FIG. 16A or 16C). The remaining gene-editing events were substantially different between the two nickases.

[1944] As shown in FIG. 17A, in the case of Cas9 D10A nickase which leaves a 5′ protruding end, the lesion is mostly repaired through a mechanism defined as gene conversion. In gene conversion, the HBD locus will serve as a template to repair the HBB gene. HBD is a highly similar gene (92% identity with HBB) that does not carry the sickle-cell mutation (FIG. 17B). FIG. 18 shows that the majority of the HBD sequence that got incorporated in the HBB locus was in the region between the nickase cuts. In contrast, a low frequency of gene conversion was observed when the N863 nicase was used (FIG. 17A). In the case of Cas9 N863A nickase, a majority of the gene editing events were insertions in which the inserted part was a duplication of the overhangs (FIGS. 19A-19B).

[1945] To test the effect that different lesions had on the engagement of HDR, a donor template was provided as a single strand oligo or as ds DNA donor. In both cases the length of the donor is approximately 170 bp with 60 bp of homology outside the nicks and with 8 mismatches (FIG. 20A). As shown in FIG. 20B, the Cas9 D10A nickase that resulted in a 5′ overhang gave a significantly higher rate of HDR, especially when using the upper stand as a single-strand oligo donor. FIG. 20C shows different forms of donors (dsDNA, upper stand, and lower strand) and there contribution to HDR.

[1946] In summary, Cas9 nickases (D10A and N863A) showed comparable levels of efficacy compared to wildtype Cas9. Different DNA ends engage different repair pathways. The use of a wildtype Cas9 generates a blunt end, which are preferentially repaired by canonical NHEJ. Use of a Cas9 nickase with two gRNAs generates either 3′ or 5′ overhangs, which are not suitable substrates to be repaired by canonical NHEJ but can be repaired by alternative pathways.

[1947] The 5′ protruding end was mostly repaired through a mechanism called gene conversion in which the HBB gene is repaired by using the HBD locus as a template. Use of nickase is advantageous to promote HDR. In the experiments in which a donor was provided, a significantly higher rate of HDR was observed using a nickase compared to the wildtype Cas9. The nature of the donor template also influences the outcome as HDR was preferentially observed when an SS Oligo was used.

### Example 7

### Assessment of Gene Targeting in Hematopoietic Stem Cells

[1948] Transplantation of autologous CD34⁺ hematopoietic stem cells (HSCs, also known as hematopoietic stem/progenitor cells or HSPCs) genetically modified to correct the Sickle Cell Disease (SCD) mutation in the human β-hemoglobin gene (HBB) would prevent deformability (sickling) after deoxygenation in the erythrocyte progeny of corrected HSCs which could ameliorate symptoms associated with SCD. Genome editing with the CRISPR/Cas9 platform precisely alters endogenous gene targets by creating an indel at the targeted cut site that can lead to knock down of gene expression at the edited locus. In this Example, genome editing in the human K562 bone marrow erythroleukemia cell line, which serve as a proxy for HSCs and which can be predictive of genome editing in HSCs, were electroporated with Cas9 mRNA and gRNA HBB-8 and gRNA HBB-15 to induce gene editing at the human HBB locus.

[1949] K562 cells were grown in RPMI media (Life Technologies) containing 10% fetal bovine serum (FBS). For the RNA electroporation, the Maxcyte GT device (http://www.maxcyte.com/) was used. S. pyogenes Cas9 mRNA and gRNA HBB-15 and gRNA HBB-8 were prepared by in vitro transcription using linearized plasmid DNA as templates and the Ambion mMessage mMachine® T7 Ultra Transcription kit (Life Technologies) according to the manufacturer's instructions. In this embodiment, both the Cas9 and gRNA were in vitro transcribed using a T7 polymerase. For example, a 5′ ARCA cap was added to both RNA species simultaneous to transcription while a polyA tail was added after transcription to the 3′ end of the RNA species by an E. coli polyA polymerase. Capped and tailed gRNA HBB-8 and gRNA HBB-15 were complexed at room temperature with S. pyogenes H-NLS-Cas9 protein at a molar ratio of ˜25:1 (gRNA: Cas9 protein) in a total of 30 μg RNP. Briefly, three million K562 cells were suspended in 100 μL Maxcyte EP buffer and transferred to the RNP solution (13 μL). In addition, K562 cells were electroporated with S. pyogenes Cas9 mRNA and each of the gRNA HBB-8 and gRNA HBB-15. For the mRNA/gRNA electroporation with the Maxcyte device, 10 μg of gRNA HBB-8 (or 10 μg of HBB gRNA HBB-15) were mixed with 10 μg of Cas9 mRNA. Four million K562 cells were suspended in 100 μL Maxcyte EP buffer and then transferred to the mRNA/gRNA solution (13 μL). K562 cells mixed with either RNP or RNA were electroporated with the Maxcyte GT device. At 48 hours after electroporation, K562 cells were enumerated by trypan blue exclusion and were determined to have >88% viability in the electroporated cell populations. Genomic DNA was extracted from K562 cells 48 hours after electroporation and HBB locus-specific PCR reactions were performed.

[1950] In order to detect indels at the HBB locus, T7E1 assays were performed on HBB locus-specific PCR products that were amplified from genomic DNA samples from electroporated K562 cells and the percentage of indels detected at the HBB locus was calculated (FIG. 21).

[1951] Co-delivery of 10 μg RNP which contains wild-type S. pyogenes Cas9 protein with HBB gRNA 8 or HBB gRNA 15 resulted in 26.8% and 16.1% indels, respectively, at the HBB locus in gDNA from K562 cells (molar ratio protein: gRNA 24:1). Co-delivery of Cas9 mRNA with gRNA HBB-8 or HBB-15 led to 66.9% and 29.5% indels at the HBB locus in gDNA from K562 cells (10 μg of each RNA/4 million cells). This example shows that delivery of Cas9 mRNA/gRNA and Cas9 RNPs leads to editing of the HBB locus in a relevant bone marrow derived hematopoietic cell line (K562 cells). Clinically, transplantation of autologous HSCs in which the HBB locus has been edited to correct the genetic mutation that causes red blood cell sickling could be used to ameliorate symptoms of SCD.

### INCORPORATION BY REFERENCE

[1952] All publications, patents, and patent applications mentioned herein are hereby incorporated by reference in their entirety as if each individual publication, patent or patent application was specifically and individually indicated to be incorporated by reference. In case of conflict, the present application, including any definitions herein, will control.

### EQUIVALENTS

[1953] Those skilled in the art will recognize, or be able to ascertain using no more than routine experimentation, many equivalents to the specific embodiments of the invention described herein. Such equivalents are intended to be encompassed by the following claims.

The application's sequence listing, which the Patent Office published only in electronic form, follows.

SEQUENCE LISTING (16298 sequences)

SEQ ID NO: 1 - protein, 1344 aa, Streptococcus mutans
KKPYSIGLDIGTNSVGWAVVTDDYKVPAKKMKVLGNTDKSHIEKNLLGALLFDSGNTAEDRRLKRTARRRYTRRRNRILYLQEIFSEEMGKVDDSFFHRLEDSFLVTEDKRGERHPIFGNLEEEVKYHENFPTIYHLRQYLADNPEKVDLRLVYLALAHIIKFRGHFLIEGKFDTRNNDVQRLFQEFLAVYDNTFENSSLQEQNVQVEEILTDKISKSAKKDRVLKLFPNEKSNGRFAEFLKLIVGNQADFKKHFELEEKAPLQFSKDTYEEELEVLLAQIGDNYAELFLSAKKLYDSILLSGILTVTDVGTKAPLSASMIQRYNEHQMDLAQLKQFIRQKLSDKYNEVFSDVSKDGYAGYIDGKTNQEAFYKYLKGLLNKIEGSGYFLDKIEREDFLRKQRTFDNGSIPHQIHLQEMRAIIRRQAEFYPFLADNQDRIEKLLTFRIPYYVGPLARGKSDFAWLSRKSADKITPWNFDEIVDKESSAEAFINRMTNYDLYLPNQKVLPKHSLLYEKFTVYNELTKVKYKTEQGKTAFFDANMKQEIFDGVFKVYRKVTKDKLMDFLEKEFDEFRIVDLTGLDKENKVFNASYGTYHDLCKILDKDFLDNSKNEKILEDIVLTLTLFEDREMIRKRLENYSDLLTKEQVKKLERRHYTGWGRLSAELIHGIRNKESRKTILDYLIDDGNSNRNFMQLINDDALSFKEEIAKAQVIGETDNLNQVVSDIAGSPAIKKGILQSLKIVDELVKIMGHQPENIVVEMARENQFTNQGRRNSQQRLKGLTDSIKEFGSQILKEHPVENSQLQNDRLFLYYLQNGRDMYTGEELDIDYLSQYDIDHIIPQAFIKDNSIDNRVLTSSKENRGKSDDVPSKDVVRKMKSYWSKLLSAKLITQRKFDNLTKAERGGLTDDDKAGFIKRQLVETRQITKHVARILDERFNTETDENNKKIRQVKIVTLKSNLVSNFRKEFELYKVREINDYHHAHDAYLNAVIGKALLGVYPQLEPEFVYGDYPHFHGHKENKATAKKFFYSNIMNFFKKDDVRTDKNGEIIWKKDEHISNIKKVLSYPQVNIVKKVEEQTGGFSKESILPKGNSDKLIPRKTKKFYWDTKKYGGFDSPIVAYSILVIADIEKGKSKKLKTVKALVGVTIMEKMTFERDPVAFLERKGYRNVQEENIIKLPKYSLFKLENGRKRLLASARELQKGNEIVLPNHLGTLLYHAKNIHKVDEPKHLDYVDKHKDEFKELLDVVSNFSKKYTLAEGNLEKIKELYAQNNGEDLKELASSFINLLTFTAIGAPATFKFFDKNIDRKRYTSTTEILNATLIHQSITGLYETRIDLNKLGGD

SEQ ID NO: 2 - protein, 1367 aa, Streptococcus pyogenes
DKKYSIGLDIGTNSVGWAVITDEYKVPSKKFKVLGNTDRHSIKKNLIGALLFDSGETAEATRLKRTARRRYTRRKNRICYLQEIFSNEMAKVDDSFFHRLEESFLVEEDKKHERHPIFGNIVDEVAYHEKYPTIYHLRKKLVDSTDKADLRLIYLALAHMIKFRGHFLIEGDLNPDNSDVDKLFIQLVQTYNQLFEENPINASGVDAKAILSARLSKSRRLENLIAQLPGEKKNGLFGNLIALSLGLTPNFKSNFDLAEDAKLQLSKDTYDDDLDNLLAQIGDQYADLFLAAKNLSDAILLSDILRVNTEITKAPLSASMIKRYDEHHQDLTLLKALVRQQLPEKYKEIFFDQSKNGYAGYIDGGASQEEFYKFIKPILEKMDGTEELLVKLNREDLLRKQRTFDNGSIPHQIHLGELHAILRRQEDFYPFLKDNREKIEKILTFRIPYYVGPLARGNSRFAWMTRKSEETITPWNFEEVVDKGASAQSFIERMTNFDKNLPNEKVLPKHSLLYEYFTVYNELTKVKYVTEGMRKPAFLSGEQKKAIVDLLFKTNRKVTVKQLKEDYFKKIECFDSVEISGVEDRFNASLGTYHDLLKIIKDKDFLDNEENEDILEDIVLTLTLFEDREMIEERLKTYAHLFDDKVMKQLKRRRYTGWGRLSRKLINGIRDKQSGKTILDFLKSDGFANRNFMQLIHDDSLTFKEDIQKAQVSGQGDSLHEHIANLAGSPAIKKGILQTVKVVDELVKVMGRHKPENIVIEMARENQTTQKGQKNSRERMKRIEEGIKELGSQILKEHPVENTQLQNEKLYLYYLQNGRDMYVDQELDINRLSDYDVDHIVPQSFLKDDSIDNKVLTRSDKNRGKSDNVPSEEVVKKMKNYWRQLLNAKLITQRKFDNLTKAERGGLSELDKAGFIKRQLVETRQITKHVAQILDSRMNTKYDENDKLIREVKVITLKSKLVSDFRKDFQFYKVREINNYHHAHDAYLNAVVGTALIKKYPKLESEFVYGDYKVYDVRKMIAKSEQEIGKATAKYFFYSNIMNFFKTEITLANGEIRKRPLIETNGETGEIVWDKGRDFATVRKVLSMPQVNIVKKTEVQTGGFSKESILPKRNSDKLIARKKDWDPKKYGGFDSPTVAYSVLVVAKVEKGKSKKLKSVKELLGITIMERSSFEKNPIDFLEAKGYKEVKKDLIIKLPKYSLFELENGRKRMLASAGELQKGNELALPSKYVNFLYLASHYEKLKGSPEDNEQKQLFVEQHKHYLDEIIEQISEFSKRVILADANLDKVLSAYNKHRDKPIREQAENIIHLFTLTNLGAPAAFKYFDTTIDRKRYTSTKEVLDATLIHQSITGLYETRIDLSQLGGD

SEQ ID NO: 3 - protein, 1387 aa, Streptococcus thermophilus
TKPYSIGLDIGTNSVGWAVTTDNYKVPSKKMKVLGNTSKKYIKKNLLGVLLFDSGITAEGRRLKRTARRRYTRRRNRILYLQEIFSTEMATLDDAFFQRLDDSFLVPDDKRDSKYPIFGNLVEEKAYHDEFPTIYHLRKYLADSTKKADLRLVYLALAHMIKYRGHFLIEGEFNSKNNDIQKNFQDFLDTYNAIFESDLSLENSKQLEEIVKDKISKLEKKDRILKLFPGEKNSGIFSEFLKLIVGNQADFRKCFNLDEKASLHFSKESYDEDLETLLGYIGDDYSDVFLKAKKLYDAILLSGFLTVTDNETEAPLSSAMIKRYNEHKEDLALLKEYIRNISLKTYNEVFKDDTKNGYAGYIDGKTNQEDFYVYLKKLLAEFEGADYFLEKIDREDFLRKQRTFDNGSIPYQIHLQEMRAILDKQAKFYPFLAKNKERIEKILTFRIPYYVGPLARGNSDFAWSIRKRNEKITPWNFEDVIDKESSAEAFINRMTSFDLYLPEEKVLPKHSLLYETFNVYNELTKVRFIAESMRDYQFLDSKQKKDIVRLYFKDKRKVTDKDIIEYLHAIYGYDGIELKGIEKQFNSSLSTYHDLLNIINDKEFLDDSSNEAIIEEIIHTLTIFEDREMIKQRLSKFENIFDKSVLKKLSRRHYTGWGKLSAKLINGIRDEKSGNTILDYLIDDGISNRNFMQLIHDDALSFKKKIQKAQIIGDEDKGNIKEVVKSLPGSPAIKKGILQSIKIVDELVKVMGGRKPESIVVEMARENQYTNQGKSNSQQRLKRLEKSLKELGSKILKENIPAKLSKIDNNALQNDRLYLYYLQNGKDMYTGDDLDIDRLSNYDIDHIIPQAFLKDNSIDNKVLVSSASNRGKSDDVPSLEVVKKRKTFWYQLLKSKLISQRKFDNLTKAERGGLSPEDKAGFIQRQLVETRQITKHVARLLDEKFNNKKDENNRAVRTVKIITLKSTLVSQFRKDFELYKVREINDFHHAHDAYLNAVVASALLKKYPKLEPEFVYGDYPKYNSFRERKSATEKVYFYSNIMNIFKKSISLADGRVIERPLIEVNEETGESVWNKESDLATVRRVLSYPQVNVVKKVEEQNHGLDRGKPKGLFNANLSSKPKPNSNENLVGAKEYLDPKKYGGYAGISNSFTVLVKGTIEKGAKKKITNVLEFQGISILDRINYRKDKLNFLLEKGYKDIELIIELPKYSLFELSDGSRRMLASILSTNNKRGEIHKGNQIFLSQKFVKLLYHAKRISNTINENHRKYVENHKKEFEELFYYILEFNENYVGAKKNGKLLNSAFQSWQNHSIDELCSSFIGPTGSERKGLFELTSRGSAADFEFLGVKIPRYRDYTPSSLLKDATLIHQSVTGLYETRIDLAKLGEG

SEQ ID NO: 4 - protein, 1333 aa, Listeria innocua
KKPYTIGLDIGTNSVGWAVLTDQYDLVKRKMKIAGDSEKKQIKKNFWGVRLFDEGQTAADRRMARTARRRIERRRNRISYLQGIFAEEMSKTDANFFCRLSDSFYVDNEKRNSRHPFFATIEEEVEYHKNYPTIYHLREELVNSSEKADLRLVYLALAHIIKYRGNFLIEGALDTQNTSVDGIYKQFIQTYNQVFASGIEDGSLKKLEDNKDVAKILVEKVTRKEKLERILKLYPGEKSAGMFAQFISLIVGSKGNFQKPFDLIEKSDIECAKDSYEEDLESLLALIGDEYAELFVAAKNAYSAVVLSSIITVAETETNAKLSASMIERFDTHEEDLGELKAFIKLHLPKHYEEIFSNTEKHGYAGYIDGKTKQADFYKYMKMTLENIEGADYFIAKIEKENFLRKQRTFDNGAIPHQLHLEELEAILHQQAKYYPFLKENYDKIKSLVTFRIPYFVGPLANGQSEFAWLTRKADGEIRPWNIEEKVDFGKSAVDFIEKMTNKDTYLPKENVLPKHSLCYQKYLVYNELTKVRYINDQGKTSYFSGQEKEQIFNDLFKQKRKVKKKDLELFLRNMSHVESPTIEGLEDSFNSSYSTYHDLLKVGIKQEILDNPVNTEMLENIVKILTVFEDKRMIKEQLQQFSDVLDGVVLKKLERRHYTGWGRLSAKLLMGIRDKQSHLTILDYLMNDDGLNRNLMQLINDSNLSFKSIIEKEQVTTADKDIQSIVADLAGSPAIKKGILQSLKIVDELVSVMGYPPQTIVVEMARENQTTGKGKNNSRPRYKSLEKAIKEFGSQILKEHPTDNQELRNNRLYLYYLQNGKDMYTGQDLDIHNLSNYDIDHIVPQSFITDNSIDNLVLTSSAGNREKGDDVPPLEIVRKRKVFWEKLYQGNLMSKRKFDYLTKAERGGLTEADKARFIHRQLVETRQITKNVANILHQRFNYEKDDHGNTMKQVRIVTLKSALVSQFRKQFQLYKVRDVNDYHHAHDAYLNGVVANTLLKVYPQLEPEFVYGDYHQFDWFKANKATAKKQFYTNIMLFFAQKDRIIDENGEILWDKKYLDTVKKVMSYRQMNIVKKTEIQKGEFSKATIKPKGNSSKLIPRKTNWDPMKYGGLDSPNMAYAVVIEYAKGKNKLVFEKKIIRVTIMERKAFEKDEKAFLEEQGYRQPKVLAKLPKYTLYECEEGRRRMLASANEAQKGNQQVLPNHLVTLLHHAANCEVSDGKSLDYIESNREMFAELLAHVSEFAKRYTLAEANLNKINQLFEQNKEGDIKAIAQSFVDLMAFNAMGAPASFKFFETTIERKRYNNLKELLNSTIIYQSITGLYESRKRLDD

SEQ ID NO: 5 - RNA, 96 nt, Artificial Sequence
  Synthetic oligonucleotide
  misc_feature (1)..(20): a, c, u, g, unknown or other
nnnnnnnnnnnnnnnnnnnnguuuuagagcuagaaauagcaaguuaaaauaaggcuaguccguuaucaacuugaaaaaguggcaccgagucggugc

SEQ ID NO: 6 - protein, 1082 aa, Neisseria meningitidis
MAAFKPNSINYILGLDIGIASVGWAMVEIDEEENPIRLIDLGVRVFERAEVPKTGDSLAMARRLARSVRRLTRRRAHRLLRTRRLLKREGVLQAANFDENGLIKSLPNTPWQLRAAALDRKLTPLEWSAVLLHLIKHRGYLSQRKNEGETADKELGALLKGVAGNAHALQTGDFRTPAELALNKFEKESGHIRNQRSDYSHTFSRKDLQAELILLFEKQKEFGNPHVSGGLKEGIETLLMTQRPALSGDAVQKMLGHCTFEPAEPKAAKNTYTAERFIWLTKLNNLRILEQGSERPLTDTERATLMDEPYRKSKLTYAQARKLLGLEDTAFFKGLRYGKDNAEASTLMEMKAYHAISRALEKEGLKDKKSPLNLSPELQDEIGTAFSLFKTDEDITGRLKDRIQPEILEALLKHISFDKFVQISLKALRRIVPLMEQGKRYDEACAEIYGDHYGKKNTEEKIYLPPIPADEIRNPVVLRALSQARKVINGVVRRYGSPARIHIETAREVGKSFKDRKEIEKRQEENRKDREKAAAKFREYFPNFVGEPKSKDILKLRLYEQQHGKCLYSGKEINLGRLNEKGYVEIDHALPFSRTWDDSFNNKVLVLGSENQNKGNQTPYEYFNGKDNSREWQEFKARVETSRFPRSKKQRILLQKFDEDGFKERNLNDTRYVNRFLCQFVADRMRLTGKGKKRVFASNGQITNLLRGFWGLRKVRAENDRHHALDAVVVACSTVAMQQKITRFVRYKEMNAFDGKTIDKETGEVLHQKTHFPQPWEFFAQEVMIRVFGKPDGKPEFEEADTLEKLRTLLAEKLSSRPEAVHEYVTPLFVSRAPNRKMSGQGHMETVKSAKRLDEGVSVLRVPLTQLKLKDLEKMVNREREPKLYEALKARLEAHKDDPAKAFAEPFYKYDKAGNRTQQVKAVRVEQVQKTGVWVRNHNGIADNATMVRVDVFEKGDKYYLVPIYSWQVAKGILPDRAVVQGKDEEDWQLIDDSFNFKFSLHPNDLVEVITKKARMFGYFASCHRGTGNINIRIHDLDHKIGKNGILEGIGVKTALSFQKYQIDELGKEIRPCRLKKRPPVR

SEQ ID NO: 7 - protein, 1368 aa, Streptococcus pyogenes [sequence omitted]

SEQ ID NO: 8 - protein, 12 aa, Artificial Sequence
  Synthetic peptide
  VARIANT (2)..(2): Xaa is Ile or Val or Met or Leu or Thr
  VARIANT (4)..(4): Xaa is Thr or Ile or Val or Ser or Asn or Tyr or Glu or Leu
  VARIANT (5)..(5): Xaa is Asn or Ser or Gly or Ala or Asp or Thr or Arg or Met or Phe
  VARIANT (6)..(6): Xaa is Ser or Tyr or Asn or Phe
  VARIANT (7)..(7): Xaa is Val or Ile or Leu or Cys or Thr or Phe
  VARIANT (9)..(9): Xaa is Trp or Phe or Val or Tyr or Ser or Leu
  VARIANT (10)..(10): Xaa is Ala or Ser or Cys or Val or Gly
  VARIANT (11)..(11): Xaa is Val or Ile or Leu or Ala or Met or His
  VARIANT (12)..(12): Any amino acid or absent
DXGXXXXGXXXX

SEQ ID NO: 9 - protein, 12 aa, Artificial Sequence
  Synthetic peptide
  VARIANT (2)..(2): Xaa is Ile or Val or Met or Leu or Thr
  VARIANT (4)..(4): Xaa is Thr or Ile or Val or Ser or Asn or Tyr or Glu or Leu
  VARIANT (5)..(5): Xaa is Asn or Ser or Gly or Ala or Asp or Thr or Arg or Met or Phe
  VARIANT (7)..(7): Xaa is Val or Ile or Leu or Cys or Thr or Phe
  VARIANT (9)..(9): Xaa is Trp or Phe or Val or Tyr or Ser or Leu
  VARIANT (10)..(10): Xaa is Ala or Ser or Cys or Val or Gly
  VARIANT (11)..(11): Xaa is Val or Ile or Leu or Ala or Met or His
  VARIANT (12)..(12): Any amino acid or absent
DXGXXSXGXXXX

SEQ ID NO: 10 - protein, 12 aa, Artificial Sequence
  Synthetic peptide
  VARIANT (4)..(4): Xaa is Thr or Ile or Val or Ser or Asn or Tyr or Glu or Leu
  VARIANT (5)..(5): Xaa is Asn or Ser or Gly or Ala or Asp or Thr or Arg or Met or Phe
  VARIANT (11)..(11): Xaa is Val or Ile or Leu or Ala or Met or His
  VARIANT (12)..(12): Any amino acid or absent
DIGXXSVGWAXX

SEQ ID NO: 11 - protein, 12 aa, Artificial Sequence
  Synthetic peptide
  MOD_RES (12)..(12): Any non-polar alkyl amino acid or a hydroxyl amino acid
DIGTNSVGWAVX

SEQ ID NO: 12 - protein, 8 aa, Artificial Sequence
  Synthetic peptide
  VARIANT (2)..(2): Xaa is Val or His
  VARIANT (3)..(3): Xaa is Ile or Leu or Val
  VARIANT (5)..(5): Xaa is Met or Thr
IXXEXARE

SEQ ID NO: 13 - protein, 8 aa, Artificial Sequence
  Synthetic peptide
  VARIANT (3)..(3): Xaa is Ile or Leu or Val
IVXEMARE

SEQ ID NO: 14 - protein, 8 aa, Artificial Sequence
  Synthetic peptide
  VARIANT (4)..(4): Xaa is His or Leu
  VARIANT (7)..(7): Xaa is Arg or Val
  VARIANT (8)..(8): Xaa is Glu or Val
HHAXDAXX

SEQ ID NO: 15 - protein, 8 aa, Artificial Sequence
  Synthetic peptide
HHAHDAYL

SEQ ID NO: 16 - protein, 30 aa, Artificial Sequence
  Synthetic polypeptide
  VARIANT (2)..(2): Xaa is Lys or Pro
  VARIANT (4)..(4): Xaa is Val or Leu or Ile or Phe
  VARIANT (5)..(5): Xaa is Gly or Ala or Ser
  VARIANT (6)..(6): Xaa is Leu or Ile or Val or Phe
  MOD_RES (7)..(26): Any amino acid and this region may encompass 5-20 residues wherein some positions may be absent
  VARIANT (29)..(29): Xaa is Asp or Glu or Asn or Gln
KXYXXXXXXXXXXXXXXXXXXXXXXXTDXY

SEQ ID NO: 17 - protein, 27 aa, Artificial Sequence
  Synthetic peptide
  VARIANT (1)..(1): Xaa is Asp or Glu or Gln or Asn
  VARIANT (2)..(2): Xaa is Leu or Ile or Arg or Gln or Val or Met or Lys
  VARIANT (3)..(3): Xaa is Asp or Glu
  VARIANT (5)..(5): Xaa is Ile or Val or Thr or Ala or Leu
  VARIANT (6)..(6): Xaa is Val or Tyr or Ile or Leu or Phe or Trp
  VARIANT (8)..(8): Xaa is Gln or His or Arg or Lys or Tyr or Ile or Leu or Phe or Trp
  VARIANT (9)..(9): Xaa is Ser or Ala or Asp or Thr or Lys
  VARIANT (10)..(10): Xaa is Phe or Leu or Val or Lys or Tyr or Met or Ile or Arg or Ala or Glu or Asp or Gln
  VARIANT (11)..(11): Xaa is Leu or Arg or Thr or Ile or Val or Ser or Cys or Tyr or Lys or Phe or Gly
  VARIANT (12)..(12): Xaa is Lys or Gln or Tyr or Thr or Phe or Leu or Trp or Met or Ala or Glu or Gly or Ser
  VARIANT (13)..(13): Xaa is Asp or Ser or Asn or Arg or Leu or Thr
  VARIANT (14)..(14): Xaa is Asp or Asn or Ser
  VARIANT (15)..(15): Xaa is Ser or Ala or Thr or Gly or Arg
  VARIANT (16)..(16): Xaa is Ile or Leu or Phe or Ser or Arg or Tyr or Gln or Trp or Asp or Lys or His
  VARIANT (17)..(17): Xaa is Asp or Ser or Ile or Asn or Glu or Ala or His or Phe or Leu or Gln or Met or Gly or Tyr or Val
  VARIANT (19)..(19): Xaa is Lys or Leu or Arg or Met or Thr or Phe
  VARIANT (20)..(20): Xaa is Val or Leu or Ile or Ala or Thr
  VARIANT (21)..(21): Xaa is Leu or Ile or Val or Ala
  VARIANT (22)..(22): Xaa is Thr or Val or Cys or Glu or Ser or Ala
  VARIANT (23)..(23): Xaa is Arg or Phe or Thr or Trp or Glu or Leu or Asn or Cys or Lys or Val or Ser or Gln or Ile or Tyr or His or Ala
  VARIANT (24)..(24): Xaa is Ser or Pro or Arg or Lys or Asn or Ala or His or Gln or Gly or Leu
  VARIANT (25)..(25): Xaa is Asp or Gly or Thr or Asn or Ser or Lys or Ala or Ile or Glu or Leu or Gln or Arg or Tyr
  VARIANT (26)..(26): Xaa is Lys or Val or Ala or Glu or Tyr or Ile or Cys or Leu or Ser or Thr or Gly or Lys or Met or Asp or Phe
XXXHXXPXXXXXXXXXXNXXXXXXXXN

SEQ ID NO: 18 - protein, 27 aa, Artificial Sequence
  Synthetic peptide
  VARIANT (1)..(1): Xaa is Asp or Glu
  VARIANT (2)..(2): Xaa is Leu or Ile or Arg or Gln or Val or Met or Lys
  VARIANT (3)..(3): Xaa is Asp or Glu
  VARIANT (5)..(5): Xaa is Ile or Val or Thr or Ala or Leu
  VARIANT (6)..(6): Xaa is Val or Tyr or Ile or Leu or Phe or Trp
  VARIANT (8)..(8): Xaa is Gln or His or Arg or Lys or Tyr or Ile or Leu or Phe or Trp
  VARIANT (10)..(10): Xaa is Phe or Leu or Val or Lys or Tyr or Met or Ile or Arg or Ala or Glu or Asp or Gln
  VARIANT (11)..(11): Xaa is Leu or Arg or Thr or Ile or Val or Ser or Cys or Tyr or Lys or Phe or Gly
  VARIANT (12)..(12): Xaa is Lys or Gln or Tyr or Thr or Phe or Leu or Trp or Met or Ala or Glu or Gly or Ser
  VARIANT (16)..(16): Xaa is Ile or Leu or Phe or Ser or Arg or Tyr or Gln or Trp or Asp or Lys or His
  VARIANT (17)..(17): Xaa is Asp or Ser or Ile or Asn or Glu or Ala or His or Phe or Leu or Gln or Met or Gly or Tyr or Val
  VARIANT (22)..(22): Xaa is Thr or Val or Cys or Glu or Ser or Ala
  VARIANT (23)..(23): Xaa is Arg or Phe or Thr or Trp or Glu or Leu or Asn or Cys or Lys or Val or Ser or Gln or Ile or Tyr or His or Ala
  VARIANT (24)..(24): Xaa is Ser or Pro or Arg or Lys or Asn or Ala or His or Gln or Gly or Leu
  VARIANT (25)..(25): Xaa is Asp or Gly or Thr or Asn or Ser or Lys or Ala or Ile or Glu or Leu or Gln or Arg or Tyr
  VARIANT (26)..(26): Xaa is Lys or Val or Ala or Glu or Tyr or Ile or Cys or Leu or Ser or Thr or Gly or Lys Met or Asp or Phe
XXXHXXPXSXXXDDSXXNKVLXXXXXN

SEQ ID NO: 19 - protein, 27 aa, Artificial Sequence
  Synthetic peptide
  VARIANT (1)..(1): Xaa is Asp or Glu
  VARIANT (3)..(3): Xaa is Asp or Glu
  VARIANT (8)..(8): Xaa is Gln or His or Arg or Lys or Tyr or Ile or Leu or Trp
  VARIANT (10)..(10): Xaa is Phe or Leu or Val or Lys or Tyr or Met or Ile or Arg or Ala or Glu or Asp or Gln
  VARIANT (11)..(11): Xaa is Leu or Arg or Thr or Ile or Val or Ser or Cys or Tyr or Lys or Phe or Gly
  VARIANT (12)..(12): Xaa is Lys or Gln or Tyr or Thr or Phe or Leu or Trp or Met or Ala or Glu or Gly or Ser
  VARIANT (16)..(16): Xaa is Ile or Leu or Phe or Ser or Arg or Tyr or Gln or Trp or Asp or Lys or His
  VARIANT (17)..(17): Xaa is Asp or Ser or Ile or Asn or Glu or Ala or His or Phe or Leu or Gln or Met or Gly or Tyr or Val
  VARIANT (23)..(23): Xaa is Arg or Phe or Thr or Trp or Glu or Leu or Asn or Cys or Lys or Val or Ser or Gln or Ile or Tyr or His or Ala
  VARIANT (24)..(24): Xaa is Ser or Pro or Arg or Lys or Asn or Ala or His or Gln or Gly or Leu
  VARIANT (25)..(25): Xaa is Asp or Gly or Thr or Asn or Ser or Lys or Ala or Ile or Glu or Leu or Gln or Arg or Tyr
  VARIANT (26)..(26): Xaa is Lys or Val or Ala or Glu or Tyr or Ile or Cys or Leu or Ser or Thr or Gly or Lys or Met or Asp or Phe
XVXHIVPXSXXXDDSXXNKVLTXXXXN

SEQ ID NO: 20 - protein, 27 aa, Artificial Sequence
  Synthetic peptide
  VARIANT (2)..(2): Xaa is Ile or Val
  VARIANT (6)..(6): Xaa is Ile or Val
  VARIANT (9)..(9): Xaa is Ala or Ser
  VARIANT (11)..(11): Xaa is Ile or Leu
  VARIANT (12)..(12): Xaa is Lys or Thr
  VARIANT (14)..(14): Xaa is Asp or Asn
  VARIANT (19)..(19): Xaa is Arg or Lys or Leu
  VARIANT (22)..(22): Xaa is Thr or Val
  VARIANT (23)..(23): Xaa is Ser or Arg
  VARIANT (25)..(25): Xaa is Lys or Asp or Ala
  VARIANT (26)..(26): Xaa is Glu or Lys or Gly or Asn
DXDHIXPQXFXXDXSIDNXVLXXSXXN

SEQ ID NO: 21 - protein, 73 aa, Artificial Sequence
  Synthetic polypeptide
  VARIANT (8)..(8): Xaa is Lys or Arg
  VARIANT (12)..(12): Xaa is Val or Thr
  VARIANT (13)..(13): Xaa is Gly or Asp
  VARIANT (14)..(14): Xaa is Glu or Gln or Asp
  VARIANT (15)..(15): Xaa is Glu or Asp
  VARIANT (19)..(19): Xaa is Asp or Asn or His
  VARIANT (20)..(20): Xaa is Tyr or Arg or Asn
  VARIANT (23)..(23): Xaa is Gln or Asp or Asn
  MOD_RES (25)..(64): Any amino acid and this region may encompass 15-40 residues wherein some positions may be absent
  VARIANT (67)..(67): Xaa is Gly or Glu
  VARIANT (69)..(69): Xaa is Ser or Gly
  VARIANT (71)..(71): Xaa is Asp or Asn
LYYLQNGXDMYXXXXLDIXXLSXYXXXXXXXXXXXXXXXXXXXXXXXXXXXXXXXXXXXXXXXXNRXKXDXVP

SEQ ID NO: 22 - DNA, 4107 bp, Artificial Sequence
  Synthetic polynucleotide
atggataaaaagtacagcatcgggctggacatcggtacaaactcagtggggtgggccgtgattacggacgagtacaaggtaccctccaaaaaatttaaagtgctgggtaacacggacagacactctataaagaaaaatcttattggagccttgctgttcgactcaggcgagacagccgaagccacaaggttgaagcggaccgccaggaggcggtataccaggagaaagaaccgcatatgctacctgcaagaaatcttcagtaacgagatggcaaaggttgacgatagctttttccatcgcctggaagaatcctttcttgttgaggaagacaagaagcacgaacggcaccccatctttggcaatattgtcgacgaagtggcatatcacgaaaagtacccgactatctaccacctcaggaagaagctggtggactctaccgataaggcggacctcagacttatttatttggcactcgcccacatgattaaatttagaggacatttcttgatcgagggcgacctgaacccggacaacagtgacgtcgataagctgttcatccaacttgtgcagacctacaatcaactgttcgaagaaaaccctataaatgcttcaggagtcgacgctaaagcaatcctgtccgcgcgcctctcaaaatctagaagacttgagaatctgattgctcagttgcccggggaaaagaaaaatggattgtttggcaacctgatcgccctcagtctcggactgaccccaaatttcaaaagtaacttcgacctggccgaagacgctaagctccagctgtccaaggacacatacgatgacgacctcgacaatctgctggcccagattggggatcagtacgccgatctctttttggcagcaaagaacctgtccgacgccatcctgttgagcgatatcttgagagtgaacaccgaaattactaaagcaccccttagcgcatctatgatcaagcggtacgacgagcatcatcaggatctgaccctgctgaaggctcttgtgaggcaacagctccccgaaaaatacaaggaaatcttctttgaccagagcaaaaacggctacgctggctatatagatggtggggccagtcaggaggaattctataaattcatcaagcccattctcgagaaaatggacggcacagaggagttgctggtcaaacttaacagggaggacctgctgcggaagcagcggacctttgacaacgggtctatcccccaccagattcatctgggcgaactgcacgcaatcctgaggaggcaggaggatttttatccttttcttaaagataaccgcgagaaaatagaaaagattcttacattcaggatcccgtactacgtgggacctctcgcccggggcaattcacggtttgcctggatgacaaggaagtcagaggagactattacaccttggaacttcgaagaagtggtggacaagggtgcatctgcccagtctttcatcgagcggatgacaaattttgacaagaacctccctaatgagaaggtgctgcccaaacattctctgctctacgagtactttaccgtctacaatgaactgactaaagtcaagtacgtcaccgagggaatgaggaagccggcattccttagtggagaacagaagaaggcgattgtagacctgttgttcaagaccaacaggaaggtgactgtgaagcaacttaaagaagactactttaagaagatcgaatgttttgacagtgtggaaatttcaggggttgaagaccgcttcaatgcgtcattggggacttaccatgatcttctcaagatcataaaggacaaagacttcctggacaacgaagaaaatgaggatattctcgaagacatcgtcctcaccctgaccctgttcgaagacagggaaatgatagaagagcgcttgaaaacctatgcccacctcttcgacgataaagttatgaagcagctgaagcgcaggagatacacaggatggggaagattgtcaaggaagctgatcaatggaattagggataaacagagtggcaagaccatactggatttcctcaaatctgatggcttcgccaataggaacttcatgcaactgattcacgatgactctcttaccttcaaggaggacattcaaaaggctcaggtgagcgggcagggagactcccttcatgaacacatcgcgaatttggcaggttcccccgctattaaaaagggcatccttcaaactgtcaaggtggtggatgaattggtcaaggtaatgggcagacataagccagaaaatattgtgatcgagatggcccgcgaaaaccagaccacacagaagggccagaaaaatagtagagagcggatgaagaggatcgaggagggcatcaaagagctgggatctcagattctcaaagaacaccccgtagaaaacacacagctgcagaacgaaaaattgtacttgtactatctgcagaacggcagagacatgtacgtcgaccaagaacttgatattaatagactgtccgactatgacgtagaccatatcgtgccccagtccttcctgaaggacgactccattgataacaaagtcttgacaagaagcgacaagaacaggggtaaaagtgataatgtgcctagcgaggaggtggtgaaaaaaatgaagaactactggcgacagctgcttaatgcaaagctcattacacaacggaagttcgataatctgacgaaagcagagagaggtggcttgtctgagttggacaaggcagggtttattaagcggcagctggtggaaactaggcagatcacaaagcacgtggcgcagattttggacagccggatgaacacaaaatacgacgaaaatgataaactgatacgagaggtcaaagttatcacgctgaaaagcaagctggtgtccgattttcggaaagacttccagttctacaaagttcgcgagattaataactaccatcatgctcacgatgcgtacctgaacgctgttgtcgggaccgccttgataaagaagtacccaaagctggaatccgagttcgtatacggggattacaaagtgtacgatgtgaggaaaatgatagccaagtccgagcaggagattggaaaggccacagctaagtacttcttttattctaacatcatgaatttttttaagacggaaattaccctggccaacggagagatcagaaagcggccccttatagagacaaatggtgaaacaggtgaaatcgtctgggataagggcagggatttcgctactgtgaggaaggtgctgagtatgccacaggtaaatatcgtgaaaaaaaccgaagtacagaccggaggattttccaaggaaagcattttgcctaaaagaaactcagacaagctcatcgcccgcaagaaagattgggaccctaagaaatacgggggatttgactcacccaccgtagcctattctgtgctggtggtagctaaggtggaaaaaggaaagtctaagaagctgaagtccgtgaaggaactcttgggaatcactatcatggaaagatcatcctttgaaaagaaccctatcgatttcctggaggctaagggttacaaggaggtcaagaaagacctcatcattaaactgccaaaatactctctcttcgagctggaaaatggcaggaagagaatgttggccagcgccggagagctgcaaaagggaaacgagcttgctctgccctccaaatatgttaattttctctatctcgcttcccactatgaaaagctgaaagggtctcccgaagataacgagcagaagcagctgttcgtcgaacagcacaagcactatctggatgaaataatcgaacaaataagcgagttcagcaaaagggttatcctggcggatgctaatttggacaaagtactgtctgcttataacaagcaccgggataagcctattagggaacaagccgagaatataattcacctctttacactcacgaatctcggagcccccgccgccttcaaatactttgatacgactatcgaccggaaacggtataccagtaccaaagaggtcctcgatgccaccctcatccaccagtcaattactggcctgtacgaaacacggatcgacctctctcaactgggcggcgactag

SEQ ID NO: 23 - protein, 1368 aa, Streptococcus pyogenes [sequence omitted]

SEQ ID NO: 24 - DNA, 3249 bp, Artificial Sequence
  Synthetic polynucleotide
atggccgccttcaagcccaaccccatcaactacatcctgggcctggacatcggcatcgccagcgtgggctgggccatggtggagatcgacgaggacgagaaccccatctgcctgatcgacctgggtgtgcgcgtgttcgagcgcgctgaggtgcccaagactggtgacagtctggctatggctcgccggcttgctcgctctgttcggcgccttactcgccggcgcgctcaccgccttctgcgcgctcgccgcctgctgaagcgcgagggtgtgctgcaggctgccgacttcgacgagaacggcctgatcaagagcctgcccaacactccttggcagctgcgcgctgccgctctggaccgcaagctgactcctctggagtggagcgccgtgctgctgcacctgatcaagcaccgcggctacctgagccagcgcaagaacgagggcgagaccgccgacaaggagctgggtgctctgctgaagggcgtggccgacaacgcccacgccctgcagactggtgacttccgcactcctgctgagctggccctgaacaagttcgagaaggagagcggccacatccgcaaccagcgcggcgactacagccacaccttcagccgcaaggacctgcaggccgagctgatcctgctgttcgagaagcagaaggagttcggcaacccccacgtgagcggcggcctgaaggagggcatcgagaccctgctgatgacccagcgccccgccctgagcggcgacgccgtgcagaagatgctgggccactgcaccttcgagccagccgagcccaaggccgccaagaacacctacaccgccgagcgcttcatctggctgaccaagctgaacaacctgcgcatcctggagcagggcagcgagcgccccctgaccgacaccgagcgcgccaccctgatggacgagccctaccgcaagagcaagctgacctacgcccaggcccgcaagctgctgggtctggaggacaccgccttcttcaagggcctgcgctacggcaaggacaacgccgaggccagcaccctgatggagatgaaggcctaccacgccatcagccgcgccctggagaaggagggcctgaaggacaagaagagtcctctgaacctgagccccgagctgcaggacgagatcggcaccgccttcagcctgttcaagaccgacgaggacatcaccggccgcctgaaggaccgcatccagcccgagatcctggaggccctgctgaagcacatcagcttcgacaagttcgtgcagatcagcctgaaggccctgcgccgcatcgtgcccctgatggagcagggcaagcgctacgacgaggcctgcgccgagatctacggcgaccactacggcaagaagaacaccgaggagaagatctacctgcctcctatccccgccgacgagatccgcaaccccgtggtgctgcgcgccctgagccaggcccgcaaggtgatcaacggcgtggtgcgccgctacggcagccccgcccgcatccacatcgagaccgcccgcgaggtgggcaagagcttcaaggaccgcaaggagatcgagaagcgccaggaggagaaccgcaaggaccgcgagaaggccgccgccaagttccgcgagtacttccccaacttcgtgggcgagcccaagagcaaggacatcctgaagctgcgcctgtacgagcagcagcacggcaagtgcctgtacagcggcaaggagatcaacctgggccgcctgaacgagaagggctacgtggagatcgaccacgccctgcccttcagccgcacctgggacgacagcttcaacaacaaggtgctggtgctgggcagcgagaaccagaacaagggcaaccagaccccctacgagtacttcaacggcaaggacaacagccgcgagtggcaggagttcaaggcccgcgtggagaccagccgcttcccccgcagcaagaagcagcgcatcctgctgcagaagttcgacgaggacggcttcaaggagcgcaacctgaacgacacccgctacgtgaaccgcttcctgtgccagttcgtggccgaccgcatgcgcctgaccggcaagggcaagaagcgcgtgttcgccagcaacggccagatcaccaacctgctgcgcggcttctggggcctgcgcaaggtgcgcgccgagaacgaccgccaccacgccctggacgccgtggtggtggcctgcagcaccgtggccatgcagcagaagatcacccgcttcgtgcgctacaaggagatgaacgccttcgacggtaaaaccatcgacaaggagaccggcgaggtgctgcaccagaagacccacttcccccagccctgggagttcttcgcccaggaggtgatgatccgcgtgttcggcaagcccgacggcaagcccgagttcgaggaggccgacacccccgagaagctgcgcaccctgctggccgagaagctgagcagccgccctgaggccgtgcacgagtacgtgactcctctgttcgtgagccgcgcccccaaccgcaagatgagcggtcagggtcacatggagaccgtgaagagcgccaagcgcctggacgagggcgtgagcgtgctgcgcgtgcccctgacccagctgaagctgaaggacctggagaagatggtgaaccgcgagcgcgagcccaagctgtacgaggccctgaaggcccgcctggaggcccacaaggacgaccccgccaaggccttcgccgagcccttctacaagtacgacaaggccggcaaccgcacccagcaggtgaaggccgtgcgcgtggagcaggtgcagaagaccggcgtgtgggtgcgcaaccacaacggcatcgccgacaacgccaccatggtgcgcgtggacgtgttcgagaagggcgacaagtactacctggtgcccatctacagctggcaggtggccaagggcatcctgcccgaccgcgccgtggtgcagggcaaggacgaggaggactggcagctgatcgacgacagcttcaacttcaagttcagcctgcaccccaacgacctggtggaggtgatcaccaagaaggcccgcatgttcggctacttcgccagctgccaccgcggcaccggcaacatcaacatccgcatccacgacctggaccacaagatcggcaagaacggcatcctggagggcatcggcgtgaagaccgccctgagcttccagaagtaccagatcgacgagctgggcaaggagatccgcccctgccgcctgaagaagcgccctcctgtgcgctaa

SEQ ID NO: 25 - protein, 1082 aa, Neisseria meningitidis
MAAFKPNPINYILGLDIGIASVGWAMVEIDEDENPICLIDLGVRVFERAEVPKTGDSLAMARRLARSVRRLTRRRAHRLLRARRLLKREGVLQAADFDENGLIKSLPNTPWQLRAAALDRKLTPLEWSAVLLHLIKHRGYLSQRKNEGETADKELGALLKGVADNAHALQTGDFRTPAELALNKFEKESGHIRNQRGDYSHTFSRKDLQAELILLFEKQKEFGNPHVSGGLKEGIETLLMTQRPALSGDAVQKMLGHCTFEPAEPKAAKNTYTAERFIWLTKLNNLRILEQGSERPLTDTERATLMDEPYRKSKLTYAQARKLLGLEDTAFFKGLRYGKDNAEASTLMEMKAYHAISRALEKEGLKDKKSPLNLSPELQDEIGTAFSLFKTDEDITGRLKDRIQPEILEALLKHISFDKFVQISLKALRRIVPLMEQGKRYDEACAEIYGDHYGKKNTEEKIYLPPIPADEIRNPVVLRALSQARKVINGVVRRYGSPARIHIETAREVGKSFKDRKEIEKRQEENRKDREKAAAKFREYFPNFVGEPKSKDILKLRLYEQQHGKCLYSGKEINLGRLNEKGYVEIDHALPFSRTWDDSFNNKVLVLGSENQNKGNQTPYEYFNGKDNSREWQEFKARVETSRFPRSKKQRILLQKFDEDGFKERNLNDTRYVNRFLCQFVADRMRLTGKGKKRVFASNGQITNLLRGFWGLRKVRAENDRHHALDAVVVACSTVAMQQKITRFVRYKEMNAFDGKTIDKETGEVLHQKTHFPQPWEFFAQEVMIRVFGKPDGKPEFEEADTPEKLRTLLAEKLSSRPEAVHEYVTPLFVSRAPNRKMSGQGHMETVKSAKRLDEGVSVLRVPLTQLKLKDLEKMVNREREPKLYEALKARLEAHKDDPAKAFAEPFYKYDKAGNRTQQVKAVRVEQVQKTGVWVRNHNGIADNATMVRVDVFEKGDKYYLVPIYSWQVAKGILPDRAVVQGKDEEDWQLIDDSFNFKFSLHPNDLVEVITKKARMFGYFASCHRGTGNINIRIHDLDHKIGKNGILEGIGVKTALSFQKYQIDELGKEIRPCRLKKRPPVR

SEQ ID NO: 26 - protein, 1053 aa, Staphylococcus aureus
MKRNYILGLDIGITSVGYGIIDYETRDVIDAGVRLFKEANVENNEGRRSKRGARRLKRRRRHRIQRVKKLLFDYNLLTDHSELSGINPYEARVKGLSQKLSEEEFSAALLHLAKRRGVHNVNEVEEDTGNELSTKEQISRNSKALEEKYVAELQLERLKKDGEVRGSINRFKTSDYVKEAKQLLKVQKAYHQLDQSFIDTYIDLLETRRTYYEGPGEGSPFGWKDIKEWYEMLMGHCTYFPEELRSVKYAYNADLYNALNDLNNLVITRDENEKLEYYEKFQIIENVFKQKKKPTLKQIAKEILVNEEDIKGYRVTSTGKPEFTNLKVYHDIKDITARKEIIENAELLDQIAKILTIYQSSEDIQEELTNLNSELTQEEIEQISNLKGYTGTHNLSLKAINLILDELWHTNDNQIAIFNRLKLVPKKVDLSQQKEIPTTLVDDFILSPVVKRSFIQSIKVINAIIKKYGLPNDIIIELAREKNSKDAQKMINEMQKRNRQTNERIEEIIRTTGKENAKYLIEKIKLHDMQEGKCLYSLEAIPLEDLLNNPFNYEVDHIIPRSVSFDNSFNNKVLVKQEENSKKGNRTPFQYLSSSDSKISYETFKKHILNLAKGKGRISKTKKEYLLEERDINRFSVQKDFINRNLVDTRYATRGLMNLLRSYFRVNNLDVKVKSINGGFTSFLRRKWKFKKERNKGYKHHAEDALIIANADFIFKEWKKLDKAKKVMENQMFEEKQAESMPEIETEQEYKEIFITPHQIKHIKDFKDYKYSHRVDKKPNRELINDTLYSTRKDDKGNTLIVNNLNGLYDKDNDKLKKLINKSPEKLLMYHHDPQTYQKLKLIMEQYGDEKNPLYKYYEETGNYLTKYSKKDNGPVIKKIKYYGNKLNAHLDITDDYPNSRNKVVKLSLKPYRFDVYLDNGVYKFVTVKNLDVIKKENYYEVNSKCYEEAKKLKKISNQAEFIASFYNNDLIKINGELYRVIGVNNDLLNRIEVNMIDITYREYLENMNDKRPPRIIKTIASKTQSIKKYSTDILGNLYEVKSKKHPQIIKKG

SEQ ID NO: 27 - RNA, 104 nt, Artificial Sequence
  Synthetic polynucleotide
  misc_feature (1)..(20): a, c, u, g, unknown or other
nnnnnnnnnnnnnnnnnnnnguuuuagagcuaugcugaaaagcauagcaaguuaaaauaaggcuaguccguuaucaacuugaaaaaguggcaccgagucggugc

SEQ ID NO: 28 - RNA, 106 nt, Artificial Sequence
  Synthetic polynucleotide
  misc_feature (1)..(20): a, c, u, g, unknown or other
nnnnnnnnnnnnnnnnnnnnguuuuagagcuaugcuggaaacagcauagcaaguuaaaauaaggcuaguccguuaucaacuugaaaaaguggcaccgagucggugc

SEQ ID NO: 29 - RNA, 116 nt, Artificial Sequence
  Synthetic polynucleotide
  misc_feature (1)..(20): a, c, u, g, unknown or other
nnnnnnnnnnnnnnnnnnnnguuuuagagcuaugcuguuuuggaaacaaaacagcauagcaaguuaaaauaaggcuaguccguuaucaacuugaaaaaguggcaccgagucggugc

SEQ ID NO: 30 - RNA, 96 nt, Artificial Sequence
  Synthetic oligonucleotide
  misc_feature (1)..(20): a, c, u, g, unknown or other
nnnnnnnnnnnnnnnnnnnnguauuagagcuagaaauagcaaguuaauauaaggcuaguccguuaucaacuugaaaaaguggcaccgagucggugc

SEQ ID NO: 31 - RNA, 96 nt, Artificial Sequence
  Synthetic oligonucleotide
  misc_feature (1)..(20): a, c, u, g, unknown or other
nnnnnnnnnnnnnnnnnnnnguuuaagagcuagaaauagcaaguuuaaauaaggcuaguccguuaucaacuugaaaaaguggcaccgagucggugc

SEQ ID NO: 32 - RNA, 116 nt, Artificial Sequence
  Synthetic polynucleotide
  misc_feature (1)..(20): a, c, u, g, unknown or other
nnnnnnnnnnnnnnnnnnnnguauuagagcuaugcuguauuggaaacaauacagcauagcaaguuaauauaaggcuaguccguuaucaacuugaaaaaguggcaccgagucggugc

SEQ ID NO: 33 - RNA, 47 nt, Artificial Sequence
  Synthetic oligonucleotide
aaggcuaguccguuaucaacuugaaaaaguggcaccgagucggugcu

SEQ ID NO: 34 - RNA, 49 nt, Artificial Sequence
  Synthetic oligonucleotide
aaggcuaguccguuaucaacuugaaaaaguggcaccgagucgguggugc

SEQ ID NO: 35 - RNA, 51 nt, Artificial Sequence
  Synthetic oligonucleotide
aaggcuaguccguuaucaacuugaaaaaguggcaccgagucggugcggauc

SEQ ID NO: 36 - RNA, 31 nt, Artificial Sequence
  Synthetic oligonucleotide
aaggcuaguccguuaucaacuugaaaaagug

SEQ ID NO: 37 - RNA, 18 nt, Artificial Sequence
  Synthetic oligonucleotide
aaggcuaguccguuauca

SEQ ID NO: 38 - RNA, 12 nt, Artificial Sequence
  Synthetic oligonucleotide
aaggcuaguccg

SEQ ID NO: 39 - DNA, 3159 bp, Artificial Sequence
  Synthetic polynucleotide
atgaaaaggaactacattctggggctggacatcgggattacaagcgtggggtatgggattattgactatgaaacaagggacgtgatcgacgcaggcgtcagactgttcaaggaggccaacgtggaaaacaatgagggacggagaagcaagaggggagccaggcgcctgaaacgacggagaaggcacagaatccagagggtgaagaaactgctgttcgattacaacctgctgaccgaccattctgagctgagtggaattaatccttatgaagccagggtgaaaggcctgagtcagaagctgtcagaggaagagttttccgcagctctgctgcacctggctaagcgccgaggagtgcataacgtcaatgaggtggaagaggacaccggcaacgagctgtctacaaaggaacagatctcacgcaatagcaaagctctggaagagaagtatgtcgcagagctgcagctggaacggctgaagaaagatggcgaggtgagagggtcaattaataggttcaagacaagcgactacgtcaaagaagccaagcagctgctgaaagtgcagaaggcttaccaccagctggatcagagcttcatcgatacttatatcgacctgctggagactcggagaacctactatgagggaccaggagaagggagccccttcggatggaaagacatcaaggaatggtacgagatgctgatgggacattgcacctattttccagaagagctgagaagcgtcaagtacgcttataacgcagatctgtacaacgccctgaatgacctgaacaacctggtcatcaccagggatgaaaacgagaaactggaatactatgagaagttccagatcatcgaaaacgtgtttaagcagaagaaaaagcctacactgaaacagattgctaaggagatcctggtcaacgaagaggacatcaagggctaccgggtgacaagcactggaaaaccagagttcaccaatctgaaagtgtatcacgatattaaggacatcacagcacggaaagaaatcattgagaacgccgaactgctggatcagattgctaagatcctgactatctaccagagctccgaggacatccaggaagagctgactaacctgaacagcgagctgacccaggaagagatcgaacagattagtaatctgaaggggtacaccggaacacacaacctgtccctgaaagctatcaatctgattctggatgagctgtggcatacaaacgacaatcagattgcaatctttaaccggctgaagctggtcccaaaaaaggtggacctgagtcagcagaaagagatcccaaccacactggtggacgatttcattctgtcacccgtggtcaagcggagcttcatccagagcatcaaagtgatcaacgccatcatcaagaagtacggcctgcccaatgatatcattatcgagctggctagggagaagaacagcaaggacgcacagaagatgatcaatgagatgcagaaacgaaaccggcagaccaatgaacgcattgaagagattatccgaactaccgggaaagagaacgcaaagtacctgattgaaaaaatcaagctgcacgatatgcaggagggaaagtgtctgtattctctggaggccatccccctggaggacctgctgaacaatccattcaactacgaggtcgatcatattatccccagaagcgtgtccttcgacaattcctttaacaacaaggtgctggtcaagcaggaagagaactctaaaaagggcaataggactcctttccagtacctgtctagttcagattccaagatctcttacgaaacctttaaaaagcacattctgaatctggccaaaggaaagggccgcatcagcaagaccaaaaaggagtacctgctggaagagcgggacatcaacagattctccgtccagaaggattttattaaccggaatctggtggacacaagatacgctactcgcggcctgatgaatctgctgcgatcctatttccgggtgaacaatctggatgtgaaagtcaagtccatcaacggcgggttcacatcttttctgaggcgcaaatggaagtttaaaaaggagcgcaacaaagggtacaagcaccatgccgaagatgctctgattatcgcaaatgccgacttcatctttaaggagtggaaaaagctggacaaagccaagaaagtgatggagaaccagatgttcgaagagaagcaggccgaatctatgcccgaaatcgagacagaacaggagtacaaggagattttcatcactcctcaccagatcaagcatatcaaggatttcaaggactacaagtactctcaccgggtggataaaaagcccaacagagagctgatcaatgacaccctgtatagtacaagaaaagacgataaggggaataccctgattgtgaacaatctgaacggactgtacgacaaagataatgacaagctgaaaaagctgatcaacaaaagtcccgagaagctgctgatgtaccaccatgatcctcagacatatcagaaactgaagctgattatggagcagtacggcgacgagaagaacccactgtataagtactatgaagagactgggaactacctgaccaagtatagcaaaaaggataatggccccgtgatcaagaagatcaagtactatgggaacaagctgaatgcccatctggacatcacagacgattaccctaacagtcgcaacaaggtggtcaagctgtcactgaagccatacagattcgatgtctatctggacaacggcgtgtataaatttgtgactgtcaagaatctggatgtcatcaaaaaggagaactactatgaagtgaatagcaagtgctacgaagaggctaaaaagctgaaaaagattagcaaccaggcagagttcatcgcctccttttacaacaacgacctgattaagatcaatggcgaactgtatagggtcatcggggtgaacaatgatctgctgaaccgcattgaagtgaatatgattgacatcacttaccgagagtatctggaaaacatgaatgataagcgcccccctcgaattatcaaaacaattgcctctaagactcagagtatcaaaaagtactcaaccgacattctgggaaacctgtatgaggtgaagagcaaaaagcaccctcagattatcaaaaagggc

SEQ ID NO: 40 - RNA, 102 nt, Artificial Sequence
  Synthetic oligonucleotide
  misc_feature (1)..(20): n is a, c, g, or u
nnnnnnnnnnnnnnnnnnnnguuuuaguacucuggaaacagaaucuacuaaaacaaggcaaaaugccguguuuaucucgucaacuuguuggcgagauuuuuu

SEQ ID NO: 41 - skipped

SEQ ID NO: 42 - RNA, 42 nt, Streptococcus pyogenes
  misc_feature (1)..(20): a, c, u, g, unknown or other
nnnnnnnnnnnnnnnnnnnnguuuuagagcuaugcuguuuug

SEQ ID NO: 43 - RNA, 85 nt, Streptococcus pyogenes
ggaaccauucaaaacagcauagcaaguuaaaauaaggcuaguccguuaucaacuugaaaaaguggcaccgagucggugcuuuuuu

SEQ ID NO: 44 - RNA, 62 nt, Streptococcus pyogenes
  misc_feature (1)..(20): a, c, u, g, unknown or other
nnnnnnnnnnnnnnnnnnnnguuuuagagcuagaaauagcaaguuaaaauaaggcuaguccg

SEQ ID NO: 45 - RNA, 102 nt, Streptococcus pyogenes
  misc_feature (1)..(20): a, c, u, g, unknown or other
nnnnnnnnnnnnnnnnnnnnguuuuagagcuagaaauagcaaguuaaaauaaggcuaguccguuaucaacuugaaaaaguggcaccgagucggugcuuuuuu

SEQ ID NO: 46 - RNA, 75 nt, Streptococcus pyogenes
  misc_feature (1)..(20): a, c, u, g, unknown or other
nnnnnnnnnnnnnnnnnnnnguuuuagagcuaugcugaaaagcauagcaaguuaaaauaaggcuaguccguuauc

SEQ ID NO: 47 - RNA, 87 nt, Streptococcus pyogenes
  misc_feature (1)..(20): a, c, u, g, unknown or other
nnnnnnnnnnnnnnnnnnnnguuuuagagcuaugcuguuuuggaaacaaaacagcauagcaaguuaaaauaaggcuaguccguuauc

SEQ ID NO: 48 - RNA, 42 nt, Streptococcus thermophilus
  misc_feature (1)..(20): a, c, u, g, unknown or other
nnnnnnnnnnnnnnnnnnnnguuuuagagcuguguuguuucg

SEQ ID NO: 49 - RNA, 78 nt, Streptococcus thermophilus
gggcgaaacaacacagcgaguuaaaauaaggcuuaguccguacucaacuugaaaagguggcaccgauucgguguuuuu

SEQ ID NO: 50 - RNA, 42 nt, Streptococcus pyogenes; identical to SEQ ID NO: 42
  misc_feature (1)..(20): a, c, u, g, unknown or other

SEQ ID NO: 51 - RNA, 42 nt, Streptococcus thermophilus; identical to SEQ ID NO: 48
  misc_feature (1)..(20): a, c, u, g, unknown or other

SEQ ID NO: 52 - RNA, 85 nt, Streptococcus pyogenes
gaaccauucaaaacagcauagcaaguuaaaauaaggcuaguccguuaucaacuugaaaaaguggcaccgagucggugcuuuuuuu

SEQ ID NO: 53 - RNA, 78 nt, Streptococcus thermophilus; identical to SEQ ID NO: 49

SEQ ID NO: 54 - protein, 12 aa, Artificial Sequence
  Synthetic peptide
DIGTNSVGWAVT

SEQ ID NO: 55 - protein, 12 aa, Artificial Sequence
  Synthetic peptide
DIGTNSVGWAVT

SEQ ID NO: 56 - protein, 12 aa, Artificial Sequence
  Synthetic peptide
DVGTNSVGWAVT

SEQ ID NO: 57 - protein, 12 aa, Artificial Sequence
  Synthetic peptide
DVGTNSVGWAVT

SEQ ID NO: 58 - protein, 12 aa, Artificial Sequence
  Synthetic peptide
DMGTNSVGWAVT

SEQ ID NO: 59 - protein, 12 aa, Artificial Sequence
  Synthetic peptide
DVGTSSVGWAVT

SEQ ID NO: 60 - protein, 12 aa, Artificial Sequence
  Synthetic peptide
DIGTASVGWAVT

SEQ ID NO: 61 - protein, 12 aa, Artificial Sequence
  Synthetic peptide
DVGTGSVGWAVT

SEQ ID NO: 62 - protein, 12 aa, Artificial Sequence
  Synthetic peptide
DIGTNSVGWAVV

SEQ ID NO: 63 - protein, 12 aa, Artificial Sequence
  Synthetic peptide
DIGTNSVGWAVI

SEQ ID NO: 64 - protein, 12 aa, Artificial Sequence
  Synthetic peptide
DIGTNSVGWAVL

SEQ ID NO: 65 - protein, 12 aa, Artificial Sequence
  Synthetic peptide
DLGTNSIGWAVV

SEQ ID NO: 66 - protein, 11 aa, Artificial Sequence
  Synthetic peptide
DLGTNSIGWAI

SEQ ID NO: 67 - protein, 12 aa, Artificial Sequence
  Synthetic peptide
DLGTNSIGWALV

SEQ ID NO: 68 - protein, 12 aa, Artificial Sequence
  Synthetic peptide
DIGTNSVGWCVT

SEQ ID NO: 69 - protein, 12 aa, Artificial Sequence
  Synthetic peptide
DIGTNSVGYAVT

SEQ ID NO: 70 - protein, 12 aa, Artificial Sequence
  Synthetic peptide
DMGTGSLGWAVT

SEQ ID NO: 71 - protein, 12 aa, Artificial Sequence
  Synthetic peptide
DIGTSSVGWAAI

SEQ ID NO: 72 - protein, 12 aa, Artificial Sequence
  Synthetic peptide
DLGTGSVGWAVV

SEQ ID NO: 73 - protein, 12 aa, Artificial Sequence
  Synthetic peptide
DLGVGSVGWAIV

SEQ ID NO: 74 - protein, 12 aa, Artificial Sequence
  Synthetic peptide
DLGIASIGWAII

SEQ ID NO: 75 - protein, 12 aa, Artificial Sequence
  Synthetic peptide
DLGIASVGWAIV

SEQ ID NO: 76 - protein, 12 aa, Artificial Sequence
  Synthetic peptide
DLGVASVGWSIV

SEQ ID NO: 77 - protein, 12 aa, Artificial Sequence
  Synthetic peptide
DIGIASVGWAIL

SEQ ID NO: 78 - protein, 12 aa, Artificial Sequence
  Synthetic peptide
DLGISSVGWSVI

SEQ ID NO: 79 - protein, 12 aa, Artificial Sequence
  Synthetic peptide
DIGIASVGWSVI

SEQ ID NO: 80 - protein, 12 aa, Artificial Sequence
  Synthetic peptide
DVGIGSIGWAVI

SEQ ID NO: 81 - protein, 12 aa, Artificial Sequence
  Synthetic peptide
DLGVGSIGFAIV

SEQ ID NO: 82 - protein, 12 aa, Artificial Sequence
  Synthetic peptide
DIGYASIGWAVI

SEQ ID NO: 83 - protein, 12 aa, Artificial Sequence
  Synthetic peptide
DTGTNSLGWAIV

SEQ ID NO: 84 - protein, 12 aa, Artificial Sequence
  Synthetic peptide
DLGTNSIGWCLL

SEQ ID NO: 85 - protein, 12 aa, Artificial Sequence
  Synthetic peptide
DIGTDSLGWAVF

SEQ ID NO: 86 - protein, 12 aa, Artificial Sequence
  Synthetic peptide
DIGSNSIGFAVV

SEQ ID NO: 87 - protein, 12 aa, Artificial Sequence
  Synthetic peptide
DLGVGSIGVAVA

SEQ ID NO: 88 - protein, 12 aa, Artificial Sequence
  Synthetic peptide
DLGIASCGWGVV

SEQ ID NO: 89 - protein, 12 aa, Artificial Sequence
  Synthetic peptide
DLGIASVGWCLT

SEQ ID NO: 90 - protein, 12 aa, Artificial Sequence
  Synthetic peptide
DIGIGSVGVGIL

SEQ ID NO: 91 - protein, 12 aa, Artificial Sequence
  Synthetic peptide
DIGITSVGYGLI

SEQ ID NO: 92 - protein, 12 aa, Artificial Sequence
  Synthetic peptide
DIGITSVGFGII

SEQ ID NO: 93 - protein, 12 aa, Artificial Sequence
  Synthetic peptide
DVGITSTGYAVL

SEQ ID NO: 94 - protein, 12 aa, Artificial Sequence
  Synthetic peptide
DLGITSFGYAIL

SEQ ID NO: 95 - protein, 12 aa, Artificial Sequence
  Synthetic peptide
DIGNASVGWSAF

SEQ ID NO: 96 - protein, 12 aa, Artificial Sequence
  Synthetic peptide
DVGTNSCGWVAM

SEQ ID NO: 97 - protein, 12 aa, Artificial Sequence
  Synthetic peptide
DVGERSIGLAAV

SEQ ID NO: 98 - protein, 12 aa, Artificial Sequence
  Synthetic peptide
DVGLNSVGLAAV

SEQ ID NO: 99 - protein, 12 aa, Artificial Sequence
  Synthetic peptide
DVGLMSVGLAAI

SEQ ID NO: 100 - protein, 12 aa, Artificial Sequence
  Synthetic peptide
DVGTFSVGLAAI

SEQ ID NO: 101 - protein, 12 aa, Artificial Sequence
  Synthetic peptide
DIGTGSVGYACM

SEQ ID NO: 102 - protein, 12 aa, Artificial Sequence
  Synthetic peptide
DLGTTSIGFAHI

SEQ ID NO: 103 - protein, 12 aa, Artificial Sequence
  Synthetic peptide
DLGTNSIGSSVR

SEQ ID NO: 104 - protein, 12 aa, Artificial Sequence
  Synthetic peptide
DIGTNSVGWAVT

SEQ ID NO: 105 - protein, 12 aa, Artificial Sequence
  Synthetic peptide
DIGTNSVGWAVT

SEQ ID NO: 106 - protein, 12 aa, Artificial Sequence
  Synthetic peptide
DVGTNSVGWAVT

SEQ ID NO: 107 - protein, 12 aa, Artificial Sequence
  Synthetic peptide
DVGTNSVGWAVT

SEQ ID NO: 108 - protein, 12 aa, Artificial Sequence
  Synthetic peptide
DMGTNSVGWAVT

SEQ ID NO: 109 - protein, 12 aa, Artificial Sequence
  Synthetic peptide
DVGTSSVGWAVT

SEQ ID NO: 110 - protein, 12 aa, Artificial Sequence
  Synthetic peptide
DIGTASVGWAVT

SEQ ID NO: 111 - protein, 12 aa, Artificial Sequence
  Synthetic peptide
DVGTGSVGWAVT

SEQ ID NO: 112 - protein, 12 aa, Artificial Sequence
  Synthetic peptide
DIGTNSVGWAVV

SEQ ID NO: 113 - protein, 12 aa, Artificial Sequence
  Synthetic peptide
DIGTNSVGWAVI

SEQ ID NO: 114 - protein, 12 aa, Artificial Sequence
  Synthetic peptide
DIGTNSIGWAVI

SEQ ID NO: 115 - protein, 12 aa, Artificial Sequence
  Synthetic peptide
DIGTNSVGWAVL

SEQ ID NO: 116 - protein, 12 aa, Artificial Sequence
  Synthetic peptide
DLGTNSIGWAVV

SEQ ID NO: 117 - protein, 11 aa, Artificial Sequence
  Synthetic peptide
DLGTNSIGWAI

SEQ ID NO: 118 - protein, 12 aa, Artificial Sequence
  Synthetic peptide
DLGTNSIGWALV

SEQ ID NO: 119 - protein, 12 aa, Artificial Sequence
  Synthetic peptide
DIGTNSVGWCVT

SEQ ID NO: 120 - protein, 12 aa, Artificial Sequence
  Synthetic peptide
DIGTNSVGYAVT

SEQ ID NO: 121 - protein, 12 aa, Artificial Sequence
  Synthetic peptide
DMGTGSLGWAVT

SEQ ID NO: 122 - protein, 12 aa, Artificial Sequence
  Synthetic peptide
DIGTSSVGWAAI

SEQ ID NO: 123 - protein, 12 aa, Artificial Sequence
  Synthetic peptide
DLGTGSVGWAVV

SEQ ID NO: 124 - protein, 12 aa, Artificial Sequence
  Synthetic peptide
DLGVGSVGWAIV

SEQ ID NO: 125 - protein, 12 aa, Artificial Sequence
  Synthetic peptide
DLGIASIGWAII

SEQ ID NO: 126 - protein, 12 aa, Artificial Sequence
  Synthetic peptide
DLGIASVGWAIV

SEQ ID NO: 127 - protein, 12 aa, Artificial Sequence
  Synthetic peptide
DLGIASVGWAVV

SEQ ID NO: 128 - protein, 12 aa, Artificial Sequence
  Synthetic peptide
DLGVASVGWSIV

SEQ ID NO: 129 - protein, 12 aa, Artificial Sequence
  Synthetic peptide
DIGIASVGWAIL

SEQ ID NO: 130 - protein, 12 aa, Artificial Sequence
  Synthetic peptide
DIGIASVGWAVL

SEQ ID NO: 131 - protein, 12 aa, Artificial Sequence
  Synthetic peptide
DIGIASIGWAVI

SEQ ID NO: 132 - protein, 12 aa, Artificial Sequence
  Synthetic peptide
DIGIASVGWAII

SEQ ID NO: 133 - protein, 12 aa, Artificial Sequence
  Synthetic peptide
DVGIASVGWAVI

SEQ ID NO: 134 - protein, 11 aa, Artificial Sequence
  Synthetic peptide
DIGIASVGWAL

SEQ ID NO: 135 - protein, 12 aa, Artificial Sequence
  Synthetic peptide
DIGIASVGWAMV

SEQ ID NO: 136 - protein, 12 aa, Artificial Sequence
  Synthetic peptide
DIGIASVGWSVI

SEQ ID NO: 137 - protein, 12 aa, Artificial Sequence
  Synthetic peptide
DLGISSVGWSVI

SEQ ID NO: 138 - protein, 12 aa, Artificial Sequence
  Synthetic peptide
DIGITSVGWAVI

SEQ ID NO: 139 - protein, 12 aa, Artificial Sequence
  Synthetic peptide
DVGIGSIGWAVI

SEQ ID NO: 140 - protein, 12 aa, Artificial Sequence
  Synthetic peptide
DLGISSLGWAIV

SEQ ID NO: 141 - protein, 12 aa, Artificial Sequence
  Synthetic peptide
DLGVGSIGFAIV

SEQ ID NO: 142 - protein, 12 aa, Artificial Sequence
  Synthetic peptide
DIGYASIGWAVI

SEQ ID NO: 143 - protein, 12 aa, Artificial Sequence
  Synthetic peptide
DLGTNSIGWCLL

SEQ ID NO: 144 - protein, 12 aa, Artificial Sequence
  Synthetic peptide
DLGTNSIGWGLL

SEQ ID NO: 145 - protein, 12 aa, Artificial Sequence
  Synthetic peptide
DTGTNSLGWAIV

SEQ ID NO: 146 - protein, 12 aa, Artificial Sequence
  Synthetic peptide
DIGTDSLGWAVF

SEQ ID NO: 147 - protein, 12 aa, Artificial Sequence
  Synthetic peptide
DLGSTSLGWAIF

SEQ ID NO: 148 - protein, 12 aa, Artificial Sequence
  Synthetic peptide
DIGISSIGWAFS

SEQ ID NO: 149 - protein, 12 aa, Artificial Sequence
  Synthetic peptide
DLGIASVGWCLT

SEQ ID NO: 150 - protein, 12 aa, Artificial Sequence
  Synthetic peptide
DLGIASCGWGVV

SEQ ID NO: 151 - protein, 12 aa, Artificial Sequence
  Synthetic peptide
DIGSNSIGFAVV

SEQ ID NO: 152 - protein, 12 aa, Artificial Sequence
  Synthetic peptide
DIGTTSIGFSVI

SEQ ID NO: 153 - protein, 12 aa, Artificial Sequence
  Synthetic peptide
DIGITSVGYGLI

SEQ ID NO: 154 - protein, 12 aa, Artificial Sequence
  Synthetic peptide
DIGITSVGFGII

SEQ ID NO: 155 - protein, 12 aa, Artificial Sequence
  Synthetic peptide
DLGTTSIGFAHI

SEQ ID NO: 156 - protein, 12 aa, Artificial Sequence
  Synthetic peptide
DIGIGSVGVGIL

SEQ ID NO: 157 - protein, 12 aa, Artificial Sequence
  Synthetic peptide
DLGVGSIGVAVA

SEQ ID NO: 158 - protein, 12 aa, Artificial Sequence
  Synthetic peptide
DVGITSTGYAVL

SEQ ID NO: 159 - protein, 12 aa, Artificial Sequence
  Synthetic peptide
DLGITSFGYAIL

SEQ ID NO: 160 - protein, 12 aa, Artificial Sequence
  Synthetic peptide
DIGTSSIGWWLY

SEQ ID NO: 161 - protein, 12 aa, Artificial Sequence
  Synthetic peptide
DLGSNSLGWFVT

SEQ ID NO: 162 - protein, 12 aa, Artificial Sequence
  Synthetic peptide
DLGANSLGWFVV

SEQ ID NO: 163 - protein, 12 aa, Artificial Sequence
  Synthetic peptide
DIGNASVGWSAF

SEQ ID NO: 164 - protein, 12 aa, Artificial Sequence
  Synthetic peptide
DVGTNSCGWVAM

SEQ ID NO: 165 - protein, 12 aa, Artificial Sequence
  Synthetic peptide
DVGERSIGLAAV

SEQ ID NO: 166 - protein, 12 aa, Artificial Sequence
  Synthetic peptide
DVGLNSVGLAAV

SEQ ID NO: 167 - protein, 12 aa, Artificial Sequence
  Synthetic peptide
DVGLMSVGLAAI

SEQ ID NO: 168 - protein, 12 aa, Artificial Sequence
  Synthetic peptide
DVGTFSVGLAAI

SEQ ID NO: 169 - protein, 12 aa, Artificial Sequence
  Synthetic peptide
DIGTGSVGYACM

SEQ ID NO: 170 - protein, 12 aa, Artificial Sequence
  Synthetic peptide
DLGTNSIGSSVR

SEQ ID NO: 171 - protein, 15 aa, Artificial Sequence
  Synthetic peptide
DIGLRIGITSCGWSI

SEQ ID NO: 172 - protein, 12 aa, Artificial Sequence
  Synthetic peptide
DMGAKYTGVFYA

SEQ ID NO: 173 - protein, 12 aa, Artificial Sequence
  Synthetic peptide
DLGGKNTGFFSF

SEQ ID NO: 174 - protein, 12 aa, Artificial Sequence
  Synthetic peptide
DLGVKNTGVFSA

SEQ ID NO: 175 - protein, 12 aa, Artificial Sequence
  Synthetic peptide
DLGAKFTGVALY

SEQ ID NO: 176 - protein, 12 aa, Artificial Sequence
  Synthetic peptide
DLGGKFTGVCLS

SEQ ID NO: 177 - protein, 12 aa, Artificial Sequence
  Synthetic peptide
DLGGTYTGTFIT

SEQ ID NO: 178 - protein, 28 aa, Artificial Sequence
  Synthetic peptide
YDIDHIYPRSLTKDDSFDNLVLCERTAN

SEQ ID NO: 179 - protein, 28 aa, Artificial Sequence
  Synthetic peptide
DIDHIYPRSKVIKDDSFDNLVLVLKNEN

SEQ ID NO: 180 - protein, 27 aa, Artificial Sequence
  Synthetic peptide
DRDHIYPQSKIKDDSIDNLVLVNKTYN

SEQ ID NO: 181 - protein, 27 aa, Artificial Sequence
  Synthetic peptide
DIDHIYPRSKIKDDSITNRVLVEKDIN

SEQ ID NO: 182 - protein, 27 aa, Artificial Sequence
  Synthetic peptide
DIDHIYPQSKIKDDSISNRVLVCSSCN

SEQ ID NO: 183 - protein, 27 aa, Artificial Sequence
  Synthetic peptide
DIDHIYPQSKTMDDSLNNRVLVKKNYN

SEQ ID NO: 184 - protein, 27 aa, Artificial Sequence
  Synthetic peptide
DQDHIYPKSKIYDDSLENRVLVKKNLN

SEQ ID NO: 185 - protein, 27 aa, Artificial Sequence
  Synthetic peptide
QIDHIVPQSLVKDDSFDNRVLVVPSEN

SEQ ID NO: 186 - protein, 27 aa, Artificial Sequence
  Synthetic peptide
DIDHIIPQAFIKDNSIDNRVLTSSKEN

SEQ ID NO: 187 - protein, 27 aa, Artificial Sequence
  Synthetic peptide
DIDHIIPQAFLKDNSIDNKVLVSSASN

SEQ ID NO: 188 - protein, 27 aa, Artificial Sequence
  Synthetic peptide
DIDHIIPQAYTKDNSLDNRVLVSNITN

SEQ ID NO: 189 - protein, 27 aa, Artificial Sequence
  Synthetic peptide
DIDHIVPQSFITDNSIDNLVLTSSAGN

SEQ ID NO: 190 - protein, 27 aa, Artificial Sequence
  Synthetic peptide
DVDHIVPQSFLKDDSIDNKVLTRSDKN

SEQ ID NO: 191 - protein, 27 aa, Artificial Sequence
  Synthetic peptide
NIDHIYPQSMVKDDSLDNKVLVQSEIN

SEQ ID NO: 192 - protein, 27 aa, Artificial Sequence
  Synthetic peptide
DIDHILPQSLIKDDSLDNRVLVNATIN

SEQ ID NO: 193 - protein, 27 aa, Artificial Sequence
  Synthetic peptide
DIDHILPQSFIKDDSLENRVLVKKAVN

SEQ ID NO: 194 - protein, 27 aa, Artificial Sequence
  Synthetic peptide
EVDHIFPRSFIKDDSIDNKVLVIKKMN

SEQ ID NO: 195 - protein, 27 aa, Artificial Sequence
  Synthetic peptide
EVDHIIPRSYIKDDSFENKVLVYREEN

SEQ ID NO: 196 - protein, 27 aa, Artificial Sequence
  Synthetic peptide
DIDHIIPQAVTQNDSIDNRVLVARAEN

SEQ ID NO: 197 - protein, 27 aa, Artificial Sequence
  Synthetic peptide
EIDHIIPYSISFDDSSSNKLLVLAESN

SEQ ID NO: 198 - protein, 27 aa, Artificial Sequence
  Synthetic peptide
EIDHIIPYSLCFDDSSANKVLVHKQSN

SEQ ID NO: 199 - protein, 27 aa, Artificial Sequence
  Synthetic peptide
DIDHIIPYSRSMDDSYSNKVLVLSGEN

SEQ ID NO: 200 - protein, 27 aa, Artificial Sequence
  Synthetic peptide
DIDHIIPYSKSMDDSFNNKVLCLAEEN

SEQ ID NO: 201 - protein, 27 aa, Artificial Sequence
  Synthetic peptide
EIDHIYPYSRSFDDSYMNKVLVFTKQN

SEQ ID NO: 202 - protein, 27 aa, Artificial Sequence
  Synthetic peptide
QIDHIYPYSRSMDDSYMNKVLVLTDEN

SEQ ID NO: 203 - protein, 27 aa, Artificial Sequence
  Synthetic peptide
EIDHIIPFSRSFDDSLSNKILVLGSEN

SEQ ID NO: 204 - protein, 27 aa, Artificial Sequence
  Synthetic peptide
EIDHALPFSRTWDDSFNNKVLVLGSEN

SEQ ID NO: 205 - protein, 27 aa, Artificial Sequence
  Synthetic peptide
EIDHALPFSRTWDDSFNNKVLVLASEN

SEQ ID NO: 206 - protein, 27 aa, Artificial Sequence
  Synthetic peptide
EIDHIIPISISLDDSINNKVLVLSKAN

SEQ ID NO: 207 - protein, 27 aa, Artificial Sequence
  Synthetic peptide
EVDHIIPISISLDDSITNKVLVTHREN

SEQ ID NO: 208 - protein, 27 aa, Artificial Sequence
  Synthetic peptide
QVDHALPYSRSYDDSKNNKVLVLTHEN

SEQ ID NO: 209 - protein, 27 aa, Artificial Sequence
  Synthetic peptide
EVDHILPLSITFDDSLANKVLVYATAN

SEQ ID NO: 210 - protein, 27 aa, Artificial Sequence
  Synthetic peptide
EIDHIIPRSISFDDARSNKVLVYRSEN

SEQ ID NO: 211 - protein, 27 aa, Artificial Sequence
  Synthetic peptide
EVDHIIPRSVSFDNSYHNKVLVKQSEN

SEQ ID NO: 212 - protein, 27 aa, Artificial Sequence
  Synthetic peptide
DIDHILPYSITFDDSFRNKVLVTSQEN

SEQ ID NO: 213 - protein, 27 aa, Artificial Sequence
  Synthetic peptide
EIDHILPRSRSADDSFANKVLCLARAN

SEQ ID NO: 214 - protein, 27 aa, Artificial Sequence
  Synthetic peptide
EIEHLLPFSLTLDDSMANKTVCFRQAN

SEQ ID NO: 215 - protein, 27 aa, Artificial Sequence
  Synthetic peptide
DIDHILPFSVSLDDSAANKVVCLREAN

SEQ ID NO: 216 - protein, 27 aa, Artificial Sequence
  Synthetic peptide
DIDHLIPFSISWDDSAANKVVCMRYAN

SEQ ID NO: 217 - protein, 27 aa, Artificial Sequence
  Synthetic peptide
DIDHILPVAMTLDDSPANKIICMRYAN

SEQ ID NO: 218 - protein, 27 aa, Artificial Sequence
  Synthetic peptide
DVDHILPYSRTLDDSFPNRTLCLREAN

SEQ ID NO: 219 - protein, 27 aa, Artificial Sequence
  Synthetic peptide
EIEHILPFSRTLDDSLNNRTVAMRRAN

SEQ ID NO: 220 - protein, 27 aa, Artificial Sequence
  Synthetic peptide
EVDHIIPYSISWDDSYTNKVLTSAKCN

SEQ ID NO: 221 - protein, 27 aa, Artificial Sequence
  Synthetic peptide
QVDHILPWSRFGDDSYLNKTLCTARSN

SEQ ID NO: 222 - protein, 27 aa, Artificial Sequence
  Synthetic peptide
QVDHILPFSKTLDDSFANKVLAQHDAN

SEQ ID NO: 223 - protein, 27 aa, Artificial Sequence
  Synthetic peptide
QIDHAFPLSRSLDDSQSNKVLCLTSSN

SEQ ID NO: 224 - protein, 27 aa, Artificial Sequence
  Synthetic peptide
DIDHIVPRSISFDDSFSNLVIVNKLDN

SEQ ID NO: 225 - protein, 27 aa, Artificial Sequence
  Synthetic peptide
EIEHIIPYSMSYDNSQANKILTEKAEN

SEQ ID NO: 226 - protein, 27 aa, Artificial Sequence
  Synthetic peptide
EIDHVIPYSKSADDSWFNKLLVKKSTN

SEQ ID NO: 227 - protein, 27 aa, Artificial Sequence
  Synthetic peptide
EMDHILPYSRSLDNGWHNRVLVHGKDN

SEQ ID NO: 228 - protein, 27 aa, Artificial Sequence
  Synthetic peptide
EVDHIVPYSLILDNTINNKALVYAEEN

SEQ ID NO: 229 - protein, 27 aa, Artificial Sequence
  Synthetic peptide
EIEHVIPQSLYFDDSFSNKVICEAEVN

SEQ ID NO: 230 - protein, 27 aa, Artificial Sequence
  Synthetic peptide
DIEHIIPQARLFDDSFSNKTLEARSVN

SEQ ID NO: 231 - protein, 27 aa, Artificial Sequence
  Synthetic peptide
EIEHIVPKARVFDDSFSNKTLTFHRIN

SEQ ID NO: 232 - protein, 28 aa, Artificial Sequence
  Synthetic peptide
DKDHIIPQSMKKDDSIINNLVLVNKNAN

SEQ ID NO: 233 - protein, 27 aa, Artificial Sequence
  Synthetic peptide
EVEHIWPRSRSFDNSPRNKTLCRKDVN

SEQ ID NO: 234 - protein, 27 aa, Artificial Sequence
  Synthetic peptide
IVNHIIPYNRSFDDTYHNRVLTLTETK

SEQ ID NO: 235 - protein, 27 aa, Artificial Sequence
  Synthetic peptide
DMEHTIPKSISFDNSDQNLTLCESYYN

SEQ ID NO: 236 - protein, 27 aa, Artificial Sequence
  Synthetic peptide
DIEHTIPRSAGGDSTKMNLTLCSSRFN

SEQ ID NO: 237 - protein, 27 aa, Artificial Sequence
  Synthetic peptide
DIEHTIPRSISQDNSQMNKTLCSLKFN

SEQ ID NO: 238 - protein, 27 aa, Artificial Sequence
  Synthetic peptide
DIDHVIPLARGGRDSLDNMVLCQSDAN

SEQ ID NO: 239 - protein, 27 aa, Artificial Sequence
  Synthetic peptide
DIEHLFPIAESEDNGRNNLVISHSACN

SEQ ID NO: 240 - protein, 27 aa, Artificial Sequence
  Synthetic peptide
DVDHIFPRDDTADNSYGNKVVAHRQCN

SEQ ID NO: 241 - protein, 27 aa, Artificial Sequence
  Synthetic peptide
DIEHIVPQSLGGLSTDYNTIVTLKSVN

SEQ ID NO: 242 - protein, 27 aa, Artificial Sequence
  Synthetic peptide
ELDHIVPRTDGGSNRHENLAITCGACN

SEQ ID NO: 243 - protein, 28 aa, Artificial Sequence
  Synthetic peptide
EMDHIVPRKGVGSTNTRTNFAAVCAECN

SEQ ID NO: 244 - protein, 28 aa, Artificial Sequence
  Synthetic peptide
EMDHIVPRKGVGSTNTRVNLAAACAACN

SEQ ID NO: 245 - protein, 28 aa, Artificial Sequence
  Synthetic peptide
EMDHIVPRAGQGSTNTRENLVAVCHRCN

SEQ ID NO: 246 - protein, 33 aa, Artificial Sequence
  Synthetic polypeptide
EIDHILPRSLIKDARGIVFNAEPNLIYASSRGN

SEQ ID NO: 247 - protein, 33 aa, Artificial Sequence
  Synthetic polypeptide
EIDHIIPRSLTGRTKKTVFNSEANLIYCSSKGN

SEQ ID NO: 248 - protein, 33 aa, Artificial Sequence
  Synthetic polypeptide
EIDHIIPRSLTLKKSESIYNSEVNLIFVSAQGN

SEQ ID NO: 249 - protein, 33 aa, Artificial Sequence
  Synthetic polypeptide
EIDHIYPRSLSKKHFGVIFNSEVNLIYCSSQGN

SEQ ID NO: 250 - protein, 33 aa, Artificial Sequence
  Synthetic polypeptide
EIDHILPRSHTLKIYGTVFNPEGNLIYVHQKCN

SEQ ID NO: 251 - protein, 30 aa, Artificial Sequence
  Synthetic polypeptide
ELDHIIPRSHKKYGTLNDEANLICVTRGDN

SEQ ID NO: 252 - protein, 27 aa, Artificial Sequence
  Synthetic peptide
ELEHIVPHSFRQSNALSSLVLTWPGVN

SEQ ID NO: 253 - protein, 28 aa, Artificial Sequence
  Synthetic peptide
YDIDHIYPRSLTKDDSFDNLVLCERTAN

SEQ ID NO: 254 - protein, 28 aa, Artificial Sequence
  Synthetic peptide
DIDHIYPRSKVIKDDSFDNLVLVLKNEN

SEQ ID NO: 255 - protein, 27 aa, Artificial Sequence
  Synthetic peptide
DRDHIYPQSKIKDDSIDNLVLVNKTYN

SEQ ID NO: 256 - protein, 27 aa, Artificial Sequence
  Synthetic peptide
DIDHIYPRSKIKDDSITNRVLVEKDIN

SEQ ID NO: 257 - protein, 27 aa, Artificial Sequence
  Synthetic peptide
DIDHIYPQSKIKDDSISNRVLVCSSCN

SEQ ID NO: 258 - protein, 27 aa, Artificial Sequence
  Synthetic peptide
DIDHIYPQSKTMDDSLNNRVLVKKNYN

SEQ ID NO: 259 - protein, 27 aa, Artificial Sequence
  Synthetic peptide
DQDHIYPKSKIYDDSLENRVLVKKNLN

SEQ ID NO: 260 - protein, 27 aa, Artificial Sequence
  Synthetic peptide
QIDHIVPQSLVKDDSFDNRVLVVPSEN

SEQ ID NO: 261 - protein, 27 aa, Artificial Sequence
  Synthetic peptide
DIDHIIPQAFIKDNSIDNRVLTSSKEN

SEQ ID NO: 262 - protein, 27 aa, Artificial Sequence
  Synthetic peptide
DIDHIIPQAFLKDNSIDNKVLVSSASN

SEQ ID NO: 263 - protein, 27 aa, Artificial Sequence
  Synthetic peptide
DIDHIIPQAYTKDNSLDNRVLVSNITN

SEQ ID NO: 264 - protein, 27 aa, Artificial Sequence
  Synthetic peptide
DIDHIVPQSFITDNSIDNLVLTSSAGN

SEQ ID NO: 265 - protein, 27 aa, Artificial Sequence
  Synthetic peptide
DVDHIVPQSFLKDDSIDNKVLTRSDKN

SEQ ID NO: 266 - protein, 27 aa, Artificial Sequence
  Synthetic peptide
NIDHIYPQSMVKDDSLDNKVLVQSEIN

SEQ ID NO: 267 - protein, 27 aa, Artificial Sequence
  Synthetic peptide
DIDHILPQSLIKDDSLDNRVLVNATIN

SEQ ID NO: 268 - protein, 27 aa, Artificial Sequence
  Synthetic peptide
DIDHILPQSFIKDDSLENRVLVKKAVN

SEQ ID NO: 269 - protein, 27 aa, Artificial Sequence
  Synthetic peptide
EVDHIFPRSFIKDDSIDNKVLVIKKMN

SEQ ID NO: 270 - protein, 27 aa, Artificial Sequence
  Synthetic peptide
EVDHIIPRSYIKDDSFENKVLVYREEN

SEQ ID NO: 271 - protein, 27 aa, Artificial Sequence
  Synthetic peptide
DIDHIIPQAVTQNDSIDNRVLVARAEN

SEQ ID NO: 272 - protein, 27 aa, Artificial Sequence
  Synthetic peptide
DIDHIVPRSISFDDSFSNLVIVNKLDN

SEQ ID NO: 273 - protein, 27 aa, Artificial Sequence
  Synthetic peptide
EIDHIIPYSISFDDSSSNKLLVLAESN

SEQ ID NO: 274 - protein, 27 aa, Artificial Sequence
  Synthetic peptide
EIDHIIPYSLCFDDSSANKVLVHKQSN

SEQ ID NO: 275 - protein, 27 aa, Artificial Sequence
  Synthetic peptide
EIDHIIPISISLDDSINNKVLVLSKAN

SEQ ID NO: 276 - protein, 27 aa, Artificial Sequence
  Synthetic peptide
EVDHIIPISISLDDSITNKVLVTHREN

SEQ ID NO: 277 - protein, 27 aa, Artificial Sequence
  Synthetic peptide
EVDHILPLSITFDDSLANKVLVYATAN

SEQ ID NO: 278 - protein, 27 aa, Artificial Sequence
  Synthetic peptide
EIDHIIPRSISFDDARSNKVLVYRSEN

SEQ ID NO: 279 - protein, 27 aa, Artificial Sequence
  Synthetic peptide
EVDHIIPRSVSFDNSYHNKVLVKQSEN

SEQ ID NO: 280 - protein, 27 aa, Artificial Sequence
  Synthetic peptide
EVDHIIPYSISWDDSYTNKVLTSAKCN

SEQ ID NO: 281 - protein, 27 aa, Artificial Sequence
  Synthetic peptide
DIDHIIPYSRSMDDSYSNKVLVLSGEN

SEQ ID NO: 282 - protein, 27 aa, Artificial Sequence
  Synthetic peptide
EIEHIIPYSMSYDNSQANKILTEKAEN

SEQ ID NO: 283 - protein, 27 aa, Artificial Sequence
  Synthetic peptide
EVDHIVPYSLILDNTINNKALVYAEEN

SEQ ID NO: 284 - protein, 27 aa, Artificial Sequence
  Synthetic peptide
EIDHVIPYSKSADDSWFNKLLVKKSTN

SEQ ID NO: 285 - protein, 27 aa, Artificial Sequence
  Synthetic peptide
EMDHILPYSRSLDNGWHNRVLVHGKDN

SEQ ID NO: 286 - protein, 27 aa, Artificial Sequence
  Synthetic peptide
EIEHVIPQSLYFDDSFSNKVICEAEVN

SEQ ID NO: 287 - protein, 27 aa, Artificial Sequence
  Synthetic peptide
DIEHIIPQARLFDDSFSNKTLEARSVN

SEQ ID NO: 288 - protein, 27 aa, Artificial Sequence
  Synthetic peptide
EIEHIVPKARVFDDSFSNKTLTFHRIN

SEQ ID NO: 289 - protein, 28 aa, Artificial Sequence
  Synthetic peptide
DKDHIIPQSMKKDDSIINNLVLVNKNAN

SEQ ID NO: 290 - protein, 27 aa, Artificial Sequence
  Synthetic peptide
QVDHILPWSRFGDDSYLNKTLCTARSN

SEQ ID NO: 291 - protein, 27 aa, Artificial Sequence
  Synthetic peptide
DIDHVIPLARGGRDSLDNMVLCQSDAN

SEQ ID NO: 292 - protein, 27 aa, Artificial Sequence
  Synthetic peptide
DMEHTIPKSISFDNSDQNLTLCESYYN

SEQ ID NO: 293 - protein, 27 aa, Artificial Sequence
  Synthetic peptide
DIEHTIPRSAGGDSTKMNLTLCSSRFN

SEQ ID NO: 294 - protein, 27 aa, Artificial Sequence
  Synthetic peptide
DIEHTIPRSISQDNSQMNKTLCSLKFN

SEQ ID NO: 295 - protein, 27 aa, Artificial Sequence
  Synthetic peptide
DIEHLFPIAESEDNGRNNLVISHSACN

SEQ ID NO: 296 - protein, 27 aa, Artificial Sequence
  Synthetic peptide
DVDHIFPRDDTADNSYGNKVVAHRQCN

SEQ ID NO: 297 - protein, 27 aa, Artificial Sequence
  Synthetic peptide
DIEHIVPQSLGGLSTDYNTIVTLKSVN

SEQ ID NO: 298 - protein, 27 aa, Artificial Sequence
  Synthetic peptide
ELDHIVPRTDGGSNRHENLAITCGACN

SEQ ID NO: 299 - protein, 28 aa, Artificial Sequence
  Synthetic peptide
EMDHIVPRKGVGSTNTRTNFAAVCAECN

SEQ ID NO: 300 - protein, 28 aa, Artificial Sequence
  Synthetic peptide
EMDHIVPRKGVGSTNTRVNLAAACAACN

SEQ ID NO: 301 - protein, 28 aa, Artificial Sequence
  Synthetic peptide
EMDHIVPRAGQGSTNTRENLVAVCHRCN

SEQ ID NO: 302 - protein, 27 aa, Artificial Sequence
  Synthetic peptide
ELEHIVPHSFRQSNALSSLVLTWPGVN

SEQ ID NO: 303 - DNA, 3333 bp, Artificial Sequence
  Synthetic polynucleotide
atggtgcctaagaagaagagaaaggtggctgccttcaaacctaattcaatcaactacatcctcggcctcgatatcggcatcgcatccgtcggctgggcgatggtagaaattgacgaagaagaaaaccccatccgcctgattgatttgggcgtgcgcgtatttgagcgtgccgaagtaccgaaaacaggcgactcccttgccatggcaaggcgtttggcgcgcagtgttcgccgcctgacccgccgtcgcgcccaccgcctgcttcggacccgccgcctattgaaacgcgaaggcgtattacaagccgccaattttgacgaaaacggcttgattaaatccttaccgaatacaccatggcaacttcgcgcagccgcattagaccgcaaactgacgcctttagagtggtcggcagtcttgttgcatttaatcaaacatcgcggctatttatcgcaacggaaaaacgagggcgaaactgccgataaggagcttggcgctttgcttaaaggcgtagccggcaatgcccatgccttacagacaggcgatttccgcacaccggccgaattggctttaaataaatttgagaaagaaagcggccatatccgcaatcagcgcagcgattattcgcatacgttcagccgcaaagatttacaggcggagctgattttgctgtttgaaaaacaaaaagaatttggcaatccgcatgtttcaggcggccttaaagaaggtattgaaaccctactgatgacgcaacgccctgccctgtccggcgatgccgttcaaaaaatgttggggcattgcaccttcgaaccggcagagccgaaagccgctaaaaacacctacacagccgaacgtttcatctggctgaccaagctgaacaacctgcgtattttagagcaaggcagcgagcggccattgaccgataccgaacgcgccacgcttatggacgagccatacagaaaatccaaactgacttacgcacaagcccgtaagctgctgggtttagaagataccgcctttttcaaaggcttgcgctatggtaaagacaatgccgaagcctcaacattgatggaaatgaaggcctaccatgccatcagccgtgcactggaaaaagaaggattgaaagacaaaaaatccccattaaacctttctcccgaattacaagacgaaatcggcacggcattctccctgttcaaaaccgatgaagacattacaggccgtctgaaagaccgtatacagcccgaaatcttagaagcgctgttgaaacacatcagcttcgataagttcgtccaaatttccttgaaagcattgcgccgaattgtgcctctaatggaacaaggcaaacgttacgatgaagcctgcgccgaaatctacggagaccattacggcaagaagaatacggaagaaaagatttatctgccgccgattcccgccgacgaaatccgcaaccccgtcgtcttgcgcgccttatctcaagcacgtaaggtcattaacggcgtggtacgccgttacggctccccagctcgtatccatattgaaactgcaagggaagtaggtaaatcgtttaaagaccgcaaagaaattgagaaacgccaagaagaaaaccgcaaagaccgggaaaaagccgccgccaaattccgagagtatttccccaattttgtcggagaacccaaatccaaagatattctgaaactgcgcctgtacgagcaacaacacggcaaatgcctgtattcgggcaaagaaatcaacttaggccgtctgaacgaaaaaggctatgtcgaaatcgaccatgccctgccgttctcgcgcacatgggacgacagtttcaacaataaagtactggtattgggcagcgaaaaccaaaacaaaggcaatcaaaccccttacgaatacttcaacggcaaagacaacagccgcgaatggcaggaatttaaagcgcgtgtcgaaaccagccgtttcccgcgcagtaaaaaacaacggattctgctgcaaaaattcgatgaagacggctttaaagaacgcaatctgaacgacacgcgctacgtcaaccgtttcctgtgtcaatttgttgccgaccgtatgcggctgacaggtaaaggcaagaaacgtgtctttgcatccaacggacaaattaccaatctgttgcgcggcttttggggattgcgcaaagtgcgtgcggaaaacgaccgccatcacgccttggacgccgtcgtcgttgcctgctcgaccgttgccatgcagcagaaaattacccgttttgtacgctataaagagatgaacgcgtttgacggtaaaaccatagacaaagaaacaggagaagtgctgcatcaaaaaacacacttcccacaaccttgggaatttttcgcacaagaagtcatgattcgcgtcttcggcaaaccggacggcaaacccgaattcgaagaagccgataccctagaaaaactgcgcacgttgcttgccgaaaaattatcatctcgccccgaagccgtacacgaatacgttacgccactgtttgtttcacgcgcgcccaatcggaagatgagcgggcaagggcatatggagaccgtcaaatccgccaaacgactggacgaaggcgtcagcgtgttgcgcgtaccgctgacacagttaaaactgaaagacttggaaaaaatggtcaatcgggagcgcgaacctaagctatacgaagcactgaaagcacggctggaagcacataaagacgatcctgccaaagcctttgccgagccgttttacaaatacgataaagcaggcaaccgcacccaacaggtaaaagccgtacgcgtagagcaagtacagaaaaccggcgtatgggtgcgcaaccataacggtattgccgacaacgcaaccatggtgcgcgtagatgtgtttgagaaaggcgacaagtattatctggtaccgatttacagttggcaggtagcgaaagggattttgccggatagggctgttgtacaaggaaaagatgaagaagattggcaacttattgatgatagtttcaactttaaattctcattacaccctaatgatttagtcgaggttataacaaaaaaagctagaatgtttggttactttgccagctgccatcgaggcacaggtaatatcaatatacgcattcatgatcttgatcataaaattggcaaaaatggaatactggaaggtatcggcgtcaaaaccgccctttcattccaaaaataccaaattgacgaactgggcaaagaaatcagaccatgccgtctgaaaaaacgcccgcctgtccgttacccatacgatgttccagattacgctgcagctccagcagcgaagaaaaagaagctggattaa

SEQ ID NO: 304 - protein, 1053 aa, Staphylococcus aureus; identical to SEQ ID NO: 26

SEQ ID NO: 305 - protein, 1368 aa, Streptococcus pyogenes [sequence omitted]

SEQ ID NO: 306 - protein, 984 aa, Campylobacter jejuni
MARILAFDIGISSIGWAFSENDELKDCGVRIFTKVENPKTGESLALPRRLARSARKRLARRKARLNHLKHLIANEFKLNYEDYQSFDESLAKAYKGSLISPYELRFRALNELLSKQDFARVILHIAKRRGYDDIKNSDDKEKGAILKAIKQNEEKLANYQSVGEYLYKEYFQKFKENSKEFTNVRNKKESYERCIAQSFLKDELKLIFKKQREFGFSFSKKFEEEVLSVAFYKRALKDFSHLVGNCSFFTDEKRAPKNSPLAFMFVALTRIINLLNNLKNTEGILYTKDDLNALLNEVLKNGTLTYKQTKKLLGLSDDYEFKGEKGTYFIEFKKYKEFIKALGEHNLSQDDLNEIAKDITLIKDEIKLKKALAKYDLNQNQIDSLSKLEFKDHLNISFKALKLVTPLMLEGKKYDEACNELNLKVAINEDKKDFLPAFNETYYKDEVTNPVVLRAIKEYRKVLNALLKKYGKVHKINIELAREVGKNHSQRAKIEKEQNENYKAKKDAELECEKLGLKINSKNILKLRLFKEQKEFCAYSGEKIKISDLQDEKMLEIDHIYPYSRSFDDSYMNKVLVFTKQNQEKLNQTPFEAFGNDSAKWQKIEVLAKNLPTKKQKRILDKNYKDKEQKNFKDRNLNDTRYIARLVLNYTKDYLDFLPLSDDENTKLNDTQKGSKVHVEAKSGMLTSALRHTWGFSAKDRNNHLHHAIDAVIIAYANNSIVKAFSDFKKEQESNSAELYAKKISELDYKNKRKFFEPFSGFRQKVLDKIDEIFVSKPERKKPSGALHEETFRKEEEFYQSYGGKEGVLKALELGKIRKVNGKIVKNGDMFRVDIFKHKKTNKFYAVPIYTMDFALKVLPNKAVARSKKGEIKDWILMDENYEFCFSLYKDSLILIQTKDMQEPEFVYYNAFTSSTVSLIVSKHDNKFETLSKNQKILFKNANEKEVIAKSIGIQNLKVFEKYIVSALGEVTKAEFRQREDFKK

SEQ ID NO: 307 - protein, 1436 aa, Bacteroides fragilis
MKRILGLDLGTNSIGWALVNEAENKDERSSIVKLGVRVNPLTVDELTNFEKGKSITTNADRTLKRGMRRNLQRYKLRRETLTEVLKEHKLITEDTILSENGNRTTFETYRLRAKAVTEEISLEEFARVLLMINKKRGYKSSRKAKGVEEGTLIDGMDIARELYNNNLTPGELCLQLLDAGKKFLPDFYRSDLQNELDRIWEKQKEYYPEILTDVLKEELRGKKRDAVWAICAKYFVWKENYTEWNKEKGKTEQQEREHKLEGIYSKRKRDEAKRENLQWRVNGLKEKLSLEQLVIVFQEMNTQINNSSGYLGAISDRSKELYFNKQTVGQYQMEMLDKNPNASLRNMVFYRQDYLDEFNMLWEKQAVYHKELTEELKKEIRDIIIFYQRRLKSQKGLIGFCEFESRQIEVDIDGKKKIKTVGNRVISRSSPLFQEFKIWQILNNIEVTVVGKKRKRRKLKENYSALFEELNDAEQLELNGSRRLCQEEKELLAQELFIRDKMTKSEVLKLLFDNPQELDLNFKTIDGNKTGYALFQAYSKMIEMSGHEPVDFKKPVEKVVEYIKAVFDLLNWNTDILGFNSNEELDNQPYYKLWHLLYSFEGDNTPTGNGRLIQKMTELYGFEKEYATILANVSFQDDYGSLSAKAIHKILPHLKEGNRYDVACVYAGYRHSESSLTREEIANKVLKDRLMLLPKNSLHNPVVEKILNQMVNVINVIIDIYGKPDEIRVELARELKKNAKEREELTKSIAQTTKAHEEYKTLLQTEFGLTNVSRTDILRYKLYKELESCGYKTLYSNTYISREKLFSKEFDIEHIIPQARLFDDSFSNKTLEARSVNIEKGNKTAYDFVKEKFGESGADNSLEHYLNNIEDLFKSGKISKTKYNKLKMAEQDIPDGFIERDLRNTQYIAKKALSMLNEISHRVVATSGSVTDKLREDWQLIDVMKELNWEKYKALGLVEYFEDRDGRQIGRIKDWTKRNDHRHHAMDALTVAFTKDVFIQYFNNKNASLDPNANEHAIKNKYFQNGRAIAPMPLREFRAEAKKHLENTLISIKAKNKVITGNINKTRKKGGVNKNMQQTPRGQLHLETIYGSGKQYLTKEEKVNASFDMRKIGTVSKSAYRDALLKRLYENDNDPKKAFAGKNSLDKQPIWLDKEQMRKVPEKVKIVTLEAIYTIRKEISPDLKVDKVIDVGVRKILIDRLNEYGNDAKKAFSNLDKNPIWLNKEKGISIKRVTISGISNAQSLHVKKDKDGKPILDENGRNIPVDFVNTGNNHHVAVYYRPVIDKRGQLVVDEAGNPKYELEEVVVSFFEAVTRANLGLPIIDKDYKTTEGWQFLFSMKQNEYFVFPNEKTGFNPKEIDLLDVENYGLISPNLFRVQKFSLKNYVFRHHLETTIKDTSSILRGITWIDFRSSKGLDTIVKVRVNHIGQIVSVGEY

SEQ ID NO: 308 - protein, 1420 aa, Bifidobacterium bifidum
MSRKNYVDDYAISLDIGNASVGWSAFTPNYRLVRAKGHELIGVRLFDPADTAESRRMARTTRRRYSRRRWRLRLLDALFDQALSEIDPSFLARRKYSWVHPDDENNADCWYGSVLFDSNEQDKRFYEKYPTIYHLRKALMEDDSQHDIREIYLAIHHMVKYRGNFLVEGTLESSNAFKEDELLKLLGRITRYEMSEGEQNSDIEQDDENKLVAPANGQLADALCATRGSRSMRVDNALEALSAVNDLSREQRAIVKAIFAGLEGNKLDLAKIFVSKEFSSENKKILGIYFNKSDYEEKCVQIVDSGLLDDEEREFLDRMQGQYNAIALKQLLGRSTSVSDSKCASYDAHRANWNLIKLQLRTKENEKDINENYGILVGWKIDSGQRKSVRGESAYENMRKKANVFFKKMIETSDLSETDKNRLIHDIEEDKLFPIQRDSDNGVIPHQLHQNELKQIIKKQGKYYPFLLDAFEKDGKQINKIEGLLTFRVPYFVGPLVVPEDLQKSDNSENHWMVRKKKGEITPWNFDEMVDKDASGRKFIERLVGTDSYLLGEPTLPKNSLLYQEYEVLNELNNVRLSVRTGNHWNDKRRMRLGREEKTLLCQRLFMKGQTVTKRTAENLLRKEYGRTYELSGLSDESKFTSSLSTYGKMCRIFGEKYVNEHRDLMEKIVELQTVFEDKETLLHQLRQLEGISEADCALLVNTHYTGWGRLSRKLLTTKAGECKISDDFAPRKHSIIEIMRAEDRNLMEIITDKQLGFSDWIEQENLGAENGSSLMEVVDDLRVSPKVKRGIIQSIRLIDDISKAVGKRPSRIFLELADDIQPSGRTISRKSRLQDLYRNANLGKEFKGIADELNACSDKDLQDDRLFLYYTQLGKDMYTGEELDLDRLSSAYDIDHIIPQAVTQNDSIDNRVLVARAENARKTDSFTYMPQIADRMRNFWQILLDNGLISRVKFERLTRQNEFSEREKERFVQRSLVETRQIMKNVATLMRQRYGNSAAVIGLNAELTKEMHRYLGFSHKNRDINDYHHAQDALCVGIAGQFAANRGFFADGEVSDGAQNSYNQYLRDYLRGYREKLSAEDRKQGRAFGFIVGSMRSQDEQKRVNPRTGEVVWSEEDKDYLRKVMNYRKMLVTQKVGDDFGALYDETRYAATDPKGIKGIPFDGAKQDTSLYGGFSSAKPAYAVLIESKGKTRLVNVTMQEYSLLGDRPSDDELRKVLAKKKSEYAKANILLRHVPKMQLIRYGGGLMVIKSAGELNNAQQLWLPYEEYCYFDDLSQGKGSLEKDDLKKLLDSILGSVQCLYPWHRFTEEELADLHVAFDKLPEDEKKNVITGIVSALHADAKTANLSIVGMTGSWRRMNNKSGYTFSDEDEFIFQSPSGLFEKRVTVGELKRKAKKEVNSKYRTNEKRLPTLSGASQP

SEQ ID NO: 309 - protein, 1397 aa, Veillonella atypica
METQTSNQLITSHLKDYPKQDYFVGLDIGTNSVGWAVTNTSYELLKFHSHKMWGSRLFEEGESAVTRRGFRSMRRRLERRKLRLKLLEELFADAMAQVDSTFFIRLHESKYHYEDKTTGHSSKHILFIDEDYTDQDYFTEYPTIYHLRKDLMENGTDDIRKLFLAVHHILKYRGNFLYEGATFNSNAFTFEDVLKQALVNITFNCFDTNSAISSISNILMESGKTKSDKAKAIERLVDTYTVFDEVNTPDKPQKEQVKEDKKTLKAFANLVLGLSANLIDLFGSVEDIDDDLKKLQIVGDTYDEKRDELAKVWGDEIHIIDDCKSVYDAIILMSIKEPGLTISQSKVKAFDKHKEDLVILKSLLKLDRNVYNEMFKSDKKGLHNYVHYIKQGRTEETSCSREDFYKYTKKIVEGLADSKDKEYILNEIELQTLLPLQRIKDNGVIPYQLHLEELKVILDKCGPKFPFLHTVSDGFSVTEKLIKMLEFRIPYYVGPLNTHHNIDNGGFSWAVRKQAGRVTPWNFEEKIDREKSAAAFIKNLTNKCTYLFGEDVLPKSSLLYSEFMLLNELNNVRIDGKALAQGVKQHLIDSIFKQDHKKMTKNRIELFLKDNNYITKKHKPEITGLDGEIKNDLTSYRDMVRILGNNFDVSMAEDIITDITIFGESKKMLRQTLRNKFGSQLNDETIKKLSKLRYRDWGRLSKKLLKGIDGCDKAGNGAPKTIIELMRNDSYNLMEILGDKFSFMECIEEENAKLAQGQVVNPHDIIDELALSPAVKRAVWQALRIVDEVAHIKKALPSRIFVEVARTNKSEKKKKDSRQKRLSDLYSAIKKDDVLQSGLQDKEFGALKSGLANYDDAALRSKKLYLYYTQMGRCAYTGNIIDLNQLNTDNYDIDHIYPRSLTKDDSFDNLVLCERTANAKKSDIYPIDNRIQTKQKPFWAFLKHQGLISERKYERLTRIAPLTADDLSGFIARQLVETNQSVKATTTLLRRLYPDIDVVFVKAENVSDFRHNNNFIKVRSLNHHHHAKDAYLNIVVGNVYHEKFTRNFRLFFKKNGANRTYNLAKMFNYDVICTNAQDGKAWDVKTSMNTVKKMMASNDVRVTRRLLEQSGALADATIYKASVAAKAKDGAYIGMKTKYSVFADVTKYGGMTKIKNAYSIIVQYTGKKGEEIKEIVPLPIYLINRNATDIELIDYVKSVIPKAKDISIKYRKLCINQLVKVNGFYYYLGGKTNDKIYIDNAIELVVPHDIATYIKLLDKYDLLRKENKTLKASSITTSIYNINTSTVVSLNKVGIDVFDYFMSKLRTPLYMKMKGNKVDELSSTGRSKFIKMTLEEQSIYLLEVLNLLTNSKTTFDVKPLGITGSRSTIGVKIHNLDEFKIINESITGLYSNEVTIV

SEQ ID NO: 310 - protein, 1363 aa, Lactobacillus rhamnosus
MTKLNQPYGIGLDIGSNSIGFAVVDANSHLLRLKGETAIGARLFREGQSAADRRGSRTTRRRLSRTRWRLSFLRDFFAPHITKIDPDFFLRQKYSEISPKDKDRFKYEKRLFNDRTDAEFYEDYPSMYHLRLHLMTHTHKADPREIFLAIHHILKSRGHFLTPGAAKDFNTDKVDLEDIFPALTEAYAQVYPDLELTFDLAKADDFKAKLLDEQATPSDTQKALVNLLLSSDGEKEIVKKRKQVLTEFAKAITGLKTKFNLALGTEVDEADASNWQFSMGQLDDKWSNIETSMTDQGTEIFEQIQELYRARLLNGIVPAGMSLSQAKVADYGQHKEDLELFKTYLKKLNDHELAKTIRGLYDRYINGDDAKPFLREDFVKALTKEVTAHPNEVSEQLLNRMGQANFMLKQRTKANGAIPIQLQQRELDQIIANQSKYYDWLAAPNPVEAHRWKMPYQLDELLNFHIPYYVGPLITPKQQAESGENVFAWMVRKDPSGNITPYNFDEKVDREASANTFIQRMKTTDTYLIGEDVLPKQSLLYQKYEVLNELNNVRINNECLGTDQKQRLIREVFERHSSVTIKQVADNLVAHGDFARRPEIRGLADEKRFLSSLSTYHQLKEILHEAIDDPTKLLDIENIITWSTVFEDHTIFETKLAEIEWLDPKKINELSGIRYRGWGQFSRKLLDGLKLGNGHTVIQELMLSNHNLMQILADETLKETMTELNQDKLKTDDIEDVINDAYTSPSNKKALRQVLRVVEDIKHAANGQDPSWLFIETADGTGTAGKRTQSRQKQIQTVYANAAQELIDSAVRGELEDKIADKASFTDRLVLYFMQGGRDIYTGAPLNIDQLSHYDIDHILPQSLIKDDSLDNRVLVNATINREKNNVFASTLFAGKMKATWRKWHEAGLISGRKLRNLMLRPDEIDKFAKGFVARQLVETRQIIKLTEQIAAAQYPNTKIIAVKAGLSHQLREELDFPKNRDVNHYHHAFDAFLAARIGTYLLKRYPKLAPFFTYGEFAKVDVKKFREFNFIGALTHAKKNIIAKDTGEIVWDKERDIRELDRIYNFKRMLITHEVYFETADLFKQTIYAAKDSKERGGSKQLIPKKQGYPTQVYGGYTQESGSYNALVRVAEADTTAYQVIKISAQNASKIASANLKSREKGKQLLNEIVVKQLAKRRKNWKPSANSFKIVIPRFGMGTLFQNAKYGLFMVNSDTYYRNYQELWLSRENQKLLKKLFSIKYEKTQMNHDALQVYKAIIDQVEKFFKLYDINQFRAKLSDAIERFEKLPINTDGNKIGKTETLRQILIGLQANGTRSNVKNLGIKTDLGLLQVGSGIKLDKDTQIVYQSPSGLFKRRIPLADL

SEQ ID NO: 311 - protein, 1365 aa, Filifactor alocis
MTKEYYLGLDVGTNSVGWAVTDSQYNLCKFKKKDMWGIRLFESANTAKDRRLQRGNRRRLERKKQRIDLLQEIFSPEICKIDPTFFIRLNESRLHLEDKSNDFKYPLFIEKDYSDIEYYKEFPTIFHLRKHLIESEEKQDIRLIYLALHNIIKTRGHFLIDGDLQSAKQLRPILDTFLLSLQEEQNLSVSLSENQKDEYEEILKNRSIAKSEKVKKLKNLFEISDELEKEEKKAQSAVIENFCKFIVGNKGDVCKFLRVSKEELEIDSFSFSEGKYEDDIVKNLEEKVPEKVYLFEQMKAMYDWNILVDILETEEYISFAKVKQYEKHKTNLRLLRDIILKYCTKDEYNRMFNDEKEAGSYTAYVGKLKKNNKKYWIEKKRNPEEFYKSLGKLLDKIEPLKEDLEVLTMMIEECKNHTLLPIQKNKDNGVIPHQVHEVELKKILENAKKYYSFLTETDKDGYSVVQKIESIFRFRIPYYVGPLSTRHQEKGSNVWMVRKPGREDRIYPWNMEEIIDFEKSNENFITRMTNKCTYLIGEDVLPKHSLLYSKYMVLNELNNVKVRGKKLPTSLKQKVFEDLFENKSKVTGKNLLEYLQIQDKDIQIDDLSGFDKDFKTSLKSYLDFKKQIFGEEIEKESIQNMIEDIIKWITIYGNDKEMLKRVIRANYSNQLTEEQMKKITGFQYSGWGNFSKMFLKGISGSDVSTGETFDIITAMWETDNNLMQILSKKFTFMDNVEDFNSGKVGKIDKITYDSTVKEMFLSPENKRAVWQTIQVAEEIKKVMGCEPKKIFIEMARGGEKVKKRTKSRKAQLLELYAACEEDCRELIKEIEDRDERDFNSMKLFLYYTQFGKCMYSGDDIDINELIRGNSKWDRDHIYPQSKIKDDSIDNLVLVNKTYNAKKSNELLSEDIQKKMHSFWLSLLNKKLITKSKYDRLTRKGDFTDEELSGFIARQLVETRQSTKAIADIFKQIYSSEVVYVKSSLVSDFRKKPLNYLKSRRVNDYHHAKDAYLNIVVGNVYNKKFTSNPIQWMKKNRDTNYSLNKVFEHDVVINGEVIWEKCTYHEDTNTYDGGTLDRIRKIVERDNILYTEYAYCEKGELFNATIQNKNGNSTVSLKKGLDVKKYGGYFSANTSYFSLIEFEDKKGDRARHIIGVPIYIANMLEHSPSAFLEYCEQKGYQNVRILVEKIKKNSLLIINGYPLRIRGENEVDTSFKRAIQLKLDQKNYELVRNIEKFLEKYVEKKGNYPIDENRDHITHEKMNQLYEVLLSKMKKFNKKGMADPSDRIEKSKPKFIKLEDLIDKINVINKMLNLLRCDNDTKADLSLIELPKNAGSFVVKKNTIGKSKIILVNQSVTGLYENRREL

SEQ ID NO: 312 - protein, 1389 aa, Oenococcus kitaharae
MARDYSVGLDIGTSSVGWAAIDNKYHLIRAKSKNLIGVRLFDSAVTAEKRRGYRTTRRRLSRRHWRLRLLNDIFAGPLTDFGDENFLARLKYSWVHPQDQSNQAHFAAGLLFDSKEQDKDFYRKYPTIYHLRLALMNDDQKHDLREVYLAIHHLVKYRGHFLIEGDVKADSAFDVHTFADAIQRYAESNNSDENLLGKIDEKKLSAALTDKHGSKSQRAETAETAFDILDLQSKKQIQAILKSVVGNQANLMAIFGLDSSAISKDEQKNYKFSFDDADIDEKIADSEALLSDTEFEFLCDLKAAFDGLTLKMLLGDDKTVSAAMVRRFNEHQKDWEYIKSHIRNAKNAGNGLYEKSKKFDGINAAYLALQSDNEDDRKKAKKIFQDEISSADIPDDVKADFLKKIDDDQFLPIQRTKNNGTIPHQLHRNELEQIIEKQGIYYPFLKDTYQENSHELNKITALINFRVPYYVGPLVEEEQKIADDGKNIPDPTNHWMVRKSNDTITPWNLSQVVDLDKSGRRFIERLTGTDTYLIGEPTLPKNSLLYQKFDVLQELNNIRVSGRRLDIRAKQDAFEHLFKVQKTVSATNLKDFLVQAGYISEDTQIEGLADVNGKNFNNALTTYNYLVSVLGREFVENPSNEELLEEITELQTVFEDKKVLRRQLDQLDGLSDHNREKLSRKHYTGWGRISKKLLTTKIVQNADKIDNQTFDVPRMNQSIIDTLYNTKMNLMEIINNAEDDFGVRAWIDKQNTTDGDEQDVYSLIDELAGPKEIKRGIVQSFRILDDITKAVGYAPKRVYLEFARKTQESHLTNSRKNQLSTLLKNAGLSELVTQVSQYDAAALQNDRLYLYFLQQGKDMYSGEKLNLDNLSNYDIDHIIPQAYTKDNSLDNRVLVSNITNRRKSDSSNYLPALIDKMRPFWSVLSKQGLLSKHKFANLTRTRDFDDMEKERFIARSLVETRQIIKNVASLIDSHFGGETKAVAIRSSLTADMRRYVDIPKNRDINDYHHAFDALLFSTVGQYTENSGLMKKGQLSDSAGNQYNRYIKEWIHAARLNAQSQRVNPFGFVVGSMRNAAPGKLNPETGEITPEENADWSIADLDYLHKVMNFRKITVTRRLKDQKGQLYDESRYPSVLHDAKSKASINFDKHKPVDLYGGFSSAKPAYAALIKFKNKFRLVNVLRQWTYSDKNSEDYILEQIRGKYPKAEMVLSHIPYGQLVKKDGALVTISSATELHNFEQLWLPLADYKLINTLLKTKEDNLVDILHNRLDLPEMTIESAFYKAFDSILSFAFNRYALHQNALVKLQAHRDDFNALNYEDKQQTLERILDALHASPASSDLKKINLSSGFGRLFSPSHFTLADTDEFIFQSVTGLFSTQKTVAQLYQETK

SEQ ID NO: 313 - protein, 1323 aa, Fructobacillus fructosus
MVYDVGLDIGTGSVGWVALDENGKLARAKGKNLVGVRLFDTAQTAADRRGFRTTRRRLSRRKWRLRLLDELFSAEINEIDSSFFQRLKYSYVHPKDEENKAHYYGGYLFPTEEETKKFHRSYPTIYHLRQELMAQPNKRFDIREIYLAIHHLVKYRGHFLSSQEKITIGSTYNPEDLANAIEVYADEKGLSWELNNPEQLTEIISGEAGYGLNKSMKADEALKLFEFDNNQDKVAIKTLLAGLTGNQIDFAKLFGKDISDKDEAKLWKLKLDDEALEEKSQTILSQLTDEEIELFHAVVQAYDGFVLIGLLNGADSVSAAMVQLYDQHREDRKLLKSLAQKAGLKHKRFSEIYEQLALATDEATIKNGISTARELVEESNLSKEVKEDTLRRLDENEFLPKQRTKANSVIPHQLHLAELQKILQNQGQYYPFLLDTFEKEDGQDNKIEELLRFRIPYYVGPLVTKKDVEHAGGDADNHWVERNEGFEKSRVTPWNFDKVFNRDKAARDFIERLTGNDTYLIGEKTLPQNSLRYQLFTVLNELNNVRVNGKKFDSKTKADLINDLFKARKTVSLSALKDYLKAQGKGDVTITGLADESKFNSSLSSYNDLKKTFDAEYLENEDNQETLEKIIEIQTVFEDSKIASRELSKLPLDDDQVKKLSQTHYTGWGRLSEKLLDSKIIDERGQKVSILDKLKSTSQNFMSIINNDKYGVQAWITEQNTGSSKLTFDEKVNELTTSPANKRGIKQSFAVLNDIKKAMKEEPRRVYLEFAREDQTSVRSVPRYNQLKEKYQSKSLSEEAKVLKKTLDGNKNKMSDDRYFLYFQQQGKDMYTGRPINFERLSQDYDIDHIIPQAFTKDDSLDNRVLVSRPENARKSDSFAYTDEVQKQDGSLWTSLLKSGFINRKKYERLTKAGKYLDGQKTGFIARQLVETRQIIKNVASLIEGEYENSKAVAIRSEITADMRLLVGIKKHREINSFHHAFDALLITAAGQYMQNRYPDRDSTNVYNEFDRYTNDYLKNLRQLSSRDEVRRLKSFGFVVGTMRKGNEDWSEENTSYLRKVMMFKNILTTKKTEKDRGPLNKETIFSPKSGKKLIPLNSKRSDTALYGGYSNVYSAYMTLVRANGKNLLIKIPISIANQIEVGNLKINDYIVNNPAIKKFEKILISKLPLGQLVNEDGNLIYLASNEYRHNAKQLWLSTTDADKIASISENSSDEELLEAYDILTSENVKNRFPFFKKDIDKLSQVRDEFLDSDKRIAVIQTILRGLQIDAAYQAPVKIISKKVSDWHKLQQSGGIKLSDNSEMIYQSATGIFETRVKISDLL

SEQ ID NO: 314 - protein, 1329 aa, Catenibacterium mitsuokai
IVDYCIGLDLGTGSVGWAVVDMNHRLMKRNGKHLWGSRLFSNAETAANRRASRSIRRRYNKRRERIRLLRAILQDMVLEKDPTFFIRLEHTSFLDEEDKAKYLGTDYKDNYNLFIDEDFNDYTYYHKYPTIYHLRKALCESTEKADPRLIYLALHHIVKYRGNFLYEGQKFNMDASNIEDKLSDIFTQFTSFNNIPYEDDEKKNLEILEILKKPLSKKAKVDEVMTLIAPEKDYKSAFKELVTGIAGNKMNVTKMILCEPIKQGDSEIKLKFSDSNYDDQFSEVEKDLGEYVEFVDALHNVYSWVELQTIMGATHTDNASISEAMVSRYNKHHDDLKLLKDCIKNNVPNKYFDMFRNDSEKSKGYYNYINRPSKAPVDEFYKYVKKCIEKVDTPEAKQILNDIELENFLLKQNSRTNGSVPYQMQLDEMIKIIDNQAEYYPILKEKREQLLSILTFRIPYYFGPLNETSEHAWIKRLEGKENQRILPWNYQDIVDVDATAEGFIKRMRSYCTYFPDEEVLPKNSLIVSKYEVYNELNKIRVDDKLLEVDVKNDIYNELFMKNKTVTEKKLKNWLVNNQCCSKDAEIKGFQKENQFSTSLTPWIDFTNIFGKIDQSNFDLIENIIYDLTVFEDKKIMKRRLKKKYALPDDKVKQILKLKYKDWSRLSKKLLDGIVADNRFGSSVTVLDVLEMSRLNLMEIINDKDLGYAQMIEEATSCPEDGKFTYEEVERLAGSPALKRGIWQSLQIVEEITKVMKCRPKYIYIEFERSEEAKERTESKIKKLENVYKDLDEQTKKEYKSVLEELKGFDNTKKISSDSLFLYFTQLGKCMYSGKKLDIDSLDKYQIDHIVPQSLVKDDSFDNRVLVVPSENQRKLDDLVVPFDIRDKMYRFWKLLFDHELISPKKFYSLIKTEYTERDEERFINRQLVETRQITKNVTQIIEDHYSTTKVAAIRANLSHEFRVKNHIYKNRDINDYHHAHDAYIVALIGGFMRDRYPNMHDSKAVYSEYMKMFRKNKNDQKRWKDGFVINSMNYPYEVDGKLIWNPDLINEIKKCFYYKDCYCTTKLDQKSGQLFNLTVLSNDAHADKGVTKAVVPVNKNRSDVHKYGGFSGLQYTIVAIEGQKKKGKKTELVKKISGVPLHLKAASINEKINYIEEKEGLSDVRIIKDNIPVNQMIEMDGGEYLLTSPTEYVNARQLVLNEKQCALIADIYNAIYKQDYDNLDDILMIQLYIELTNKMKVLYPAYRGIAEKFESMNENYVVISKEEKANIIKQMLIVMHRGPQNGNIVYDDFKISDRIGRLKTKNHNLNNIVFISQSPTGIYTKKYKL

SEQ ID NO: 315 - protein, 1348 aa, Finegoldia magna
MKSEKKYYIGLDVGTNSVGWAVTDEFYNILRAKGKDLWGVRLFEKADTAANTRIFRSGRRRNDRKGMRLQILREIFEDEIKKVDKDFYDRLDESKFWAEDKKVSGKYSLFNDKNFSDKQYFEKFPTIFHLRKYLMEEHGKVDIRYYFLAINQMMKRRGHFLIDGQISHVTDDKPLKEQLILLINDLLKIELEEELMDSIFEILADVNEKRTDKKNNLKELIKGQDFNKQEGNILNSIFESIVTGKAKIKNIISDEDILEKIKEDNKEDFVLTGDSYEENLQYFEEVLQENITLFNTLKSTYDFLILQSILKGKSTLSDAQVERYDEHKKDLEILKKVIKKYDEDGKLFKQVFKEDNGNGYVSYIGYYLNKNKKITAKKKISNIEFTKYVKGILEKQCDCEDEDVKYLLGKIEQENFLLKQISSINSVIPHQIHLFELDKILENLAKNYPSFNNKKEEFTKIEKIRKTFTFRIPYYVGPLNDYHKNNGGNAWIFRNKGEKIRPWNFEKIVDLHKSEEEFIKRMLNQCTYLPEETVLPKSSILYSEYMVLNELNNLRINGKPLDTDVKLKLIEELFKKKTKVTLKSIRDYMVRNNFADKEDFDNSEKNLEIASNMKSYIDFNNILEDKFDVEMVEDLIEKITIHTGNKKLLKKYIEETYPDLSSSQIQKIINLKYKDWGRLSRKLLDGIKGTKKETEKTDTVINFLRNSSDNLMQIIGSQNYSFNEYIDKLRKKYIPQEISYEVVENLYVSPSVKKMIWQVIRVTEEITKVMGYDPDKIFIEMAKSEEEKKTTISRKNKLLDLYKAIKKDERDSQYEKLLTGLNKLDDSDLRSRKLYLYYTQMGRDMYTGEKIDLDKLFDSTHYDKDHIIPQSMKKDDSIINNLVLVNKNANQTTKGNIYPVPSSIRNNPKIYNYWKYLMEKEFISKEKYNRLIRNTPLTNEELGGFINRQLVETRQSTKAIKELFEKFYQKSKIIPVKASLASDLRKDMNTLKSREVNDLHHAHDAFLNIVAGDVWNREFTSNPINYVKENREGDKVKYSLSKDFTRPRKSKGKVIWTPEKGRKLIVDTLNKPSVLISNESHVKKGELFNATIAGKKDYKKGKIYLPLKKDDRLQDVSKYGGYKAINGAFFFLVEHTKSKKRIRSIELFPLHLLSKFYEDKNTVLDYAINVLQLQDPKIIIDKINYRTEIIIDNFSYLISTKSNDGSITVKPNEQMYWRVDEISNLKKIENKYKKDAILTEEDRKIMESYIDKIYQQFKAGKYKNRRTTDTIIEKYEIIDLDTLDNKQLYQLLVAFISLSYKTSNNAVDFTVIGLGTECGKPRITNLPDNTYLVYKSITGIYEKRIRIK

SEQ ID NO: 316 - protein, 1384 aa, Coriobacterium glomerans
MKLRGIEDDYSIGLDMGTSSVGWAVTDERGTLAHFKRKPTWGSRLFREAQTAAVARMPRGQRRRYVRRRWRLDLLQKLFEQQMEQADPDFFIRLRQSRLLRDDRAEEHADYRWPLFNDCKFTERDYYQRFPTIYHVRSWLMETDEQADIRLIYLALHNIVKHRGNFLREGQSLSAKSARPDEALNHLRETLRVWSSERGFECSIADNGSILAMLTHPDLSPSDRRKKIAPLFDVKSDDAAADKKLGIALAGAVIGLKTEFKNIFGDFPCEDSSIYLSNDEAVDAVRSACPDDCAELFDRLCEVYSAYVLQGLLSYAPGQTISANMVEKYRRYGEDLALLKKLVKIYAPDQYRMFFSGATYPGTGIYDAAQARGYTKYNLGPKKSEYKPSESMQYDDFRKAVEKLFAKTDARADERYRMMMDRFDKQQFLRRLKTSDNGSIYHQLHLEELKAIVENQGRFYPFLKRDADKLVSLVSFRIPYYVGPLSTRNARTDQHGENRFAWSERKPGMQDEPIFPWNWESIIDRSKSAEKFILRMTGMCTYLQQEPVLPKSSLLYEEFCVLNELNGAHWSIDGDDEHRFDAADREGIIEELFRRKRTVSYGDVAGWMERERNQIGAHVCGGQGEKGFESKLGSYIFFCKDVFKVERLEQSDYPMIERIILWNTLFEDRKILSQRLKEEYGSRLSAEQIKTICKKRFTGWGRLSEKFLTGITVQVDEDSVSIMDVLREGCPVSGKRGRAMVMMEILRDEELGFQKKVDDFNRAFFAENAQALGVNELPGSPAVRRSLNQSIRIVDEIASIAGKAPANIFIEVTRDEDPKKKGRRTKRRYNDLKDALEAFKKEDPELWRELCETAPNDMDERLSLYFMQRGKCLYSGRAIDIHQLSNAGIYEVDHIIPRTYVKDDSLENKALVYREENQRKTDMLLIDPEIRRRMSGYWRMLHEAKLIGDKKFRNLLRSRIDDKALKGFIARQLVETGQMVKLVRSLLEARYPETNIISVKASISHDLRTAAELVKCREANDFHHAHDAFLACRVGLFIQKRHPCVYENPIGLSQVVRNYVRQQADIFKRCRTIPGSSGFIVNSFMTSGFDKETGEIFKDDWDAEAEVEGIRRSLNFRQCFISRMPFEDHGVFWDATIYSPRAKKTAALPLKQGLNPSRYGSFSREQFAYFFIYKARNPRKEQTLFEFAQVPVRLSAQIRQDENALERYARELAKDQGLEFIRIERSKILKNQLIEIDGDRLCITGKEEVRNACELAFAQDEMRVIRMLVSEKPVSRECVISLFNRILLHGDQASRRLSKQLKLALLSEAFSEASDNVQRNVVLGLIAIFNGSTNMVNLSDIGGSKFAGNVRIKYKKELASPKVNVHLIDQSVTGMFERRTKIGL

SEQ ID NO: 317 - protein, 1391 aa, Eubacterium yurii
MENKQYYIGLDVGTNSVGWAVTDTSYNLLRAKGKDMWGARLFEKANTAAERRTKRTSRRRSEREKARKAMLKELFADEINRVDPSFFIRLEESKFFLDDRSENNRQRYTLFNDATFTDKDYYEKYKTIFHLRSALINSDEKFDVRLVFLAILNLFSHRGHFLNASLKGDGDIQGMDVFYNDLVESCEYFEIELPRITNIDNFEKILSQKGKSRTKILEELSEELSISKKDKSKYNLIKLISGLEASVVELYNIEDIQDENKKIKIGFRESDYEESSLKVKEIIGDEYFDLVERAKSVHDMGLLSNIIGNSKYLCEARVEAYENHHKDLLKIKELLKKYDKKAYNDMFRKMTDKNYSAYVGSVNSNIAKERRSVDKRKIEDLYKYIEDTALKNIPDDNKDKIEILEKIKLGEFLKKQLTASNGVIPNQLQSRELRAILKKAENYLPFLKEKGEKNLTVSEMIIQLFEFQIPYYVGPLDKNPKKDNKANSWAKIKQGGRILPWNFEDKVDVKGSRKEFIEKMVRKCTYISDEHTLPKQSLLYEKFMVLNEINNIKIDGEKISVEAKQKIYNDLFVKGKKVSQKDIKKELISLNIMDKDSVLSGTDTVCNAYLSSIGKFTGVFKEEINKQSIVDMIEDIIFLKTVYGDEKRFVKEEIVEKYGDEIDKDKIKRILGFKFSNWGNLSKSFLELEGADVGTGEVRSIIQSLWETNFNLMELLSSRFTYMDELEKRVKKLEKPLSEWTIEDLDDMYLSSPVKRMIWQSMKIVDEIQTVIGYAPKRIFVEMTRSEGEKVRTKSRKDRLKELYNGIKEDSKQWVKELDSKDESYFRSKKMYLYYLQKGRCMYSGEVIELDKLMDDNLYDIDHIYPRSFVKDDSLDNLVLVKKEINNRKQNDPITPQIQASCQGFWKILHDQGFMSNEKYSRLTRKTQEFSDEEKLSFINRQIVETGQATKCMAQILQKSMGEDVDVVFSKARLVSEFRHKFELFKSRLINDFHHANDAYLNIVVGNSYFVKFTRNPANFIKDARKNPDNPVYKYHMDRFFERDVKSKSEVAWIGQSEGNSGTIVIVKKTMAKNSPLITKKVEEGHGSITKETIVGVKEIKFGRNKVEKADKTPKKPNLQAYRPIKTSDERLCNILRYGGRTSISISGYCLVEYVKKRKTIRSLEAIPVYLGRKDSLSEEKLLNYFRYNLNDGGKDSVSDIRLCLPFISTNSLVKIDGYLYYLGGKNDDRIQLYNAYQLKMKKEEVEYIRKIEKAVSMSKFDEIDREKNPVLTEEKNIELYNKIQDKFENTVFSKRMSLVKYNKKDLSFGDFLKNKKSKFEEIDLEKQCKVLYNIIFNLSNLKEVDLSDIGGSKSTGKCRCKKNITNYKEFKLIQQSITGLYSCEKDLMTI

SEQ ID NO: 318 - protein, 1364 aa, Peptoniphilus duerdenii
MKNLKEYYIGLDIGTASVGWAVTDESYNIPKFNGKKMWGVRLFDDAKTAEERRTQRGSRRRLNRRKERINLLQDLFATEISKVDPNFFLRLDNSDLYREDKDEKLKSKYTLFNDKDFKDRDYHKKYPTIHHLIMDLIEDEGKKDIRLLYLACHYLLKNRGHFIFEGQKFDTKNSFDKSINDLKIHLRDEYNIDLEFNNEDLIEIITDTTLNKTNKKKELKNIVGDTKFLKAISAIMIGSSQKLVDLFEDGEFEETTVKSVDFSTTAFDDKYSEYEEALGDTISLLNILKSIYDSSILENLLKDADKSKDGNKYISKAFVKKFNKHGKDLKTLKRIIKKYLPSEYANIFRNKSINDNYVAYTKSNITSNKRTKASKFTKQEDFYKFIKKHLDTIKETKLNSSENEDLKLIDEMLTDIEFKTFIPKLKSSDNGVIPYQLKLMELKKILDNQSKYYDFLNESDEYGTVKDKVESIMEFRIPYYVGPLNPDSKYAWIKRENTKITPWNFKDIVDLDSSREEFIDRLIGRCTYLKEEKVLPKASLIYNEFMVLNELNNLKLNEFLITEEMKKAIFEELFKTKKKVTLKAVSNLLKKEFNLTGDILLSGTDGDFKQGLNSYIDFKNIIGDKVDRDDYRIKIEEIIKLIVLYEDDKTYLKKKIKSAYKNDFTDDEIKKIAALNYKDWGRLSKRFLTGIEGVDKTTGEKGSIIYFMREYNLNLMELMSGHYTFTEEVEKLNPVENRELCYEMVDELYLSPSVKRMLWQSLRVVDEIKRIIGKDPKKIFIEMARAKEAKNSRKESRKNKLLEFYKFGKKAFINEIGEERYNYLLNEINSEEESKFRWDNLYLYYTQLGRCMYSLEPIDLADLKSNNIYDQDHIYPKSKIYDDSLENRVLVKKNLNHEKGNQYPIPEKVLNKNAYGFWKILFDKGLIGQKKYTRLTRRTPFEERELAEFIERQIVETRQATKETANLLKNICQDSEIVYSKAENASRFRQEFDIIKCRTVNDLHHMHDAYLNIVVGNVYNTKFTKNPLNFIKDKDNVRSYNLENMFKYDVVRGSYTAWIADDSEGNVKAATIKKVKRELEGKNYRFTRMSYIGTGGLYDQNLMRKGKGQIPQKENTNKSNIEKYGGYNKASSAYFALIESDGKAGRERTLETIPIMVYNQEKYGNTEAVDKYLKDNLELQDPKILKDKIKINSLIKLDGFLYNIKGKTGDSLSIAGSVQLIVNKEEQKLIKKMDKFLVKKKDNKDIKVTSFDNIKEEELIKLYKTLSDKLNNGIYSNKRNNQAKNISEALDKFKEISIEEKIDVLNQIILLFQSYNNGCNLKSIGLSAKTGVVFIPKKLNYKECKLINQSITGLFENEVDLLNL

SEQ ID NO: 319 - protein, 1358 aa, Acidaminococcus sp.
MGKMYYLGLDIGTNSVGYAVTDPSYHLLKFKGEPMWGAHVFAAGNQSAERRSFRTSRRRLDRRQQRVKLVQEIFAPVISPIDPRFFIRLHESALWRDDVAETDKHIFFNDPTYTDKEYYSDYPTIHHLIVDLMESSEKHDPRLVYLAVAWLVAHRGHFLNEVDKDNIGDVLSFDAFYPEFLAFLSDNGVSPWVCESKALQATLLSRNSVNDKYKALKSLIFGSQKPEDNFDANISEDGLIQLLAGKKVKVNKLFPQESNDASFTLNDKEDAIEEILGTLTPDECEWIAHIRRLFDWAIMKHALKDGRTISESKVKLYEQHHHDLTQLKYFVKTYLAKEYDDIFRNVDSETTKNYVAYSYHVKEVKGTLPKNKATQEEFCKYVLGKVKNIECSEADKVDFDEMIQRLTDNSFMPKQVSGENRVIPYQLYYYELKTILNKAASYLPFLTQCGKDAISNQDKLLSIMTFRIPYFVGPLRKDNSEHAWLERKAGKIYPWNFNDKVDLDKSEEAFIRRMTNTCTYYPGEDVLPLDSLIYEKFMILNEINNIRIDGYPISVDVKQQVFGLFEKKRRVTVKDIQNLLLSLGALDKHGKLTGIDTTIHSNYNTYHHFKSLMERGVLTRDDVERIVERMTYSDDTKRVRLWLNNNYGTLTADDVKHISRLRKHDFGRLSKMFLTGLKGVHKETGERASILDFMWNTNDNLMQLLSECYTFSDEITKLQEAYYAKAQLSLNDFLDSMYISNAVKRPIYRTLAVVNDIRKACGTAPKRIFIEMARDGESKKKRSVTRREQIKNLYRSIRKDFQQEVDFLEKILENKSDGQLQSDALYLYFAQLGRDMYTGDPIKLEHIKDQSFYNIDHIYPQSMVKDDSLDNKVLVQSEINGEKSSRYPLDAAIRNKMKPLWDAYYNHGLISLKKYQRLTRSTPFTDDEKWDFINRQLVETRQSTKALAILLKRKFPDTEIVYSKAGLSSDFRHEFGLVKSRNINDLHHAKDAFLAIVTGNVYHERFNRRWFMVNQPYSVKTKTLFTHSIKNGNFVAWNGEEDLGRIVKMLKQNKNTIHFTRFSFDRKEGLFDIQPLKASTGLVPRKAGLDVVKYGGYDKSTAAYYLLVRFTLEDKKTQHKLMMIPVEGLYKARIDHDKEFLTDYAQTTISEILQKDKQKVINIMFPMGTRHIKLNSMISIDGFYLSIGGKSSKGKSVLCHAMVPLIVPHKIECYIKAMESFARKFKENNKLRIVEKFDKITVEDNLNLYELFLQKLQHNPYNKFFSTQFDVLTNGRSTFTKLSPEEQVQTLLNILSIFKTCRSSGCDLKSINGSAQAARIMISADLTGLSKKYSDIRLVEQSASGLFVSKSQNLLEYL

SEQ ID NO: 320 - protein, 1356 aa, Lactobacillus farciminis
MTKKEQPYNIGLDIGTSSVGWAVTNDNYDLLNIKKKNLWGVRLFEEAQTAKETRLNRSTRRRYRRRKNRINWLNEIFSEELAKTDPSFLIRLQNSWVSKKDPDRKRDKYNLFIDGPYTDKEYYREFPTIFHLRKELILNKDKADIRLIYLALHNILKYRGNFTYEHQKFNISNLNNNLSKELIELNQQLIKYDISFPDDCDWNHISDILIGRGNATQKSSNILKDFTLDKETKKLLKEVINLILGNVAHLNTIFKTSLTKDEEKLNFSGKDIESKLDDLDSILDDDQFTVLDAANRIYSTITLNEILNGESYFSMAKVNQYENHAIDLCKLRDMWHTTKNEEAVEQSRQAYDDYINKPKYGTKELYTSLKKFLKVALPTNLAKEAEEKISKGTYLVKPRNSENGVVPYQLNKIEMEKIIDNQSQYYPFLKENKEKLLSILSFRIPYYVGPLQSAEKNPFAWMERKSNGHARPWNFDEIVDREKSSNKFIRRMTVTDSYLVGEPVLPKNSLIYQRYEVLNELNNIRITENLKTNPIGSRLTVETKQRIYNELFKKYKKVTVKKLTKWLIAQGYYKNPILIGLSQKDEFNSTLTTYLDMKKIFGSSFMEDNKNYDQIEELIEWLTIFEDKQILNEKLHSSKYSYTPDQIKKISNMRYKGWGRLSKKILMDITTETNTPQLLQLSNYSILDLMWATNNNFISIMSNDKYDFKNYIENHNLNKNEDQNISDLVNDIHVSPALKRGITQSIKIVQEIVKFMGHAPKHIFIEVTRETKKSEITTSREKRIKRLQSKLLNKANDFKPQLREYLVPNKKIQEELKKHKNDLSSERIMLYFLQNGKSLYSEESLNINKLSDYQVDHILPRTYIPDDSLENKALVLAKENQRKADDLLLNSNVIDRNLERWTYMLNNNMIGLKKFKNLTRRVITDKDKLGFIHRQLVQTSQMVKGVANILDNMYKNQGTTCIQARANLSTAFRKALSGQDDTYHFKHPELVKNRNVNDFHHAQDAYLASFLGTYRLRRFPTNEMLLMNGEYNKFYGQVKELYSKKKKLPDSRKNGFIISPLVNGTTQYDRNTGEIIWNVGFRDKILKIFNYHQCNVTRKTEIKTGQFYDQTIYSPKNPKYKKLIAQKKDMDPNIYGGFSGDNKSSITIVKIDNNKIKPVAIPIRLINDLKDKKTLQNWLEENVKHKKSIQIIKNNVPIGQIIYSKKVGLLSLNSDREVANRQQLILPPEHSALLRLLQIPDEDLDQILAFYDKNILVEILQELITKMKKFYPFYKGEREFLIANIENFNQATTSEKVNSLEELITLLHANSTSAHLIFNNIEKKAFGRKTHGLTLNNTDFIYQSVTGLYETRIHIE

SEQ ID NO: 321 - protein, 1421 aa, Streptococcus sanguinis
MTKFNKNYSIGLDIGVSSVGYAVVTEDYRVPAFKFKVLGNTEKEKIKKNLIGSTTFVSAQPAKGTRVFRVNRRRIDRRNHRITYLRDIFQKEIEKVDKNFYRRLDESFRVLGDKSEDLQIKQPFFGDKELETAYHKKYPTIYHLRKHLADADKNSPVADIREVYMAISHILKYRGHFLTLDKINPNNINMQNSWIDFIESCQEVFDLEISDESKNIADIFKSSENRQEKVKKILPYFQQELLKKDKSIFKQLLQLLFGLKTKFKDCFELEEEPDLNFSKENYDENLENFLGSLEEDFSDVFAKLKVLRDTILLSGMLTYTGATHARFSATMVERYEEHRKDLQRFKFFIKQNLSEQDYLDIFGRKTQNGFDVDKETKGYVGYITNKMVLTNPQKQKTIQQNFYDYISGKITGIEGAEYFLNKISDGTFLRKLRTSDNGAIPNQIHAYELEKIIERQGKDYPFLLENKDKLLSILTFKIPYYVGPLAKGSNSRFAWIKRATSSDILDDNDEDTRNGKIRPWNYQKLINMDETRDAFITNLIGNDIILLNEKVLPKRSLIYEEVMLQNELTRVKYKDKYGKAHFFDSELRQNIINGLFKNNSKRVNAKSLIKYLSDNHKDLNAIEIVSGVEKGKSFNSTLKTYNDLKTIFSEELLDSEIYQKELEEIIKVITVFDDKKSIKNYLTKFFGHLEILDEEKINQLSKLRYSGWGRYSAKLLLDIRDEDTGFNLLQFLRNDEENRNLTKLISDNTLSFEPKIKDIQSKSTIEDDIFDEIKKLAGSPAIKRGILNSIKIVDELVQIIGYPPHNIVIEMARENMTTEEGQKKAKTRKTKLESALKNIENSLLENGKVPHSDEQLQSEKLYLYYLQNGKDMYTLDKTGSPAPLYLDQLDQYEVDHIIPYSFLPIDSIDNKVLTHRENNQQKLNNIPDKETVANMKPFWEKLYNAKLISQTKYQRLTTSERTPDGVLTESMKAGFIERQLVETRQIIKHVARILDNRFSDTKIITLKSQLITNFRNTFHIAKIRELNDYHHAHDAYLAVVVGQTLLKVYPKLAPELIYGHHAHFNRHEENKATLRKHLYSNIMRFFNNPDSKVSKDIWDCNRDLPIIKDVIYNSQINFVKRTMIKKGAFYNQNPVGKFNKQLAANNRYPLKTKALCLDTSIYGGYGPMNSALSIIIIAERFNEKKGKIETVKEFHDIFIIDYEKFNNNPFQFLNDTSENGFLKKNNINRVLGFYRIPKYSLMQKIDGTRMLFESKSNLHKATQFKLTKTQNELFFHMKRLLTKSNLMDLKSKSAIKESQNFILKHKEEFDNISNQLSAFSQKMLGNTTSLKNLIKGYNERKIKEIDIRDETIKYFYDNFIKMFSFVKSGAPKDINDFFDNKCTVARMRPKPDKKLLNATLIHQSITGLYETRIDLSKLGED

SEQ ID NO: 322 - protein, 1338 aa, Coprococcus catus
MKQEYFLGLDMGTGSLGWAVTDSTYQVMRKHGKALWGTRLFESASTAEERRMFRTARRRLDRRNWRIQVLQEIFSEEISKVDPGFFLRMKESKYYPEDKRDAEGNCPELPYALFVDDNYTDKNYHKDYPTIYHLRKMLMETTEIPDIRLVYLVLHHMMKHRGHFLLSGDISQIKEFKSTFEQLIQNIQDEELEWHISLDDAAIQFVEHVLKDRNLTRSTKKSRLIKQLNAKSACEKAILNLLSGGTVKLSDIFNNKELDESERPKVSFADSGYDDYIGIVEAELAEQYYIIASAKAVYDWSVLVEILGNSVSISEAKIKVYQKHQADLKTLKKIVRQYMTKEDYKRVFVDTEEKLNNYSAYIGMTKKNGKKVDLKSKQCTQADFYDFLKKNVIKVIDHKEITQEIESEIEKENFLPKQVTKDNGVIPYQVHDYELKKILDNLGTRMPFIKENAEKIQQLFEFRIPYYVGPLNRVDDGKDGKFTWSVRKSDARIYPWNFTEVIDVEASAEKFIRRMTNKCTYLVGEDVLPKDSLVYSKFMVLNELNNLRLNGEKISVELKQRIYEELFCKYRKVTRKKLERYLVIEGIAKKGVEITGIDGDFKASLTAYHDFKERLTDVQLSQRAKEAIVLNVVLFGDDKKLLKQRLSKMYPNLTTGQLKGICSLSYQGWGRLSKTFLEEITVPAPGTGEVWNIMTALWQTNDNLMQLLSRNYGFTNEVEEFNTLKKETDLSYKTVDELYVSPAVKRQIWQTLKVVKEIQKVMGNAPKRVFVEMAREKQEGKRSDSRKKQLVELYRACKNEERDWITELNAQSDQQLRSDKLFLYYIQKGRCMYSGETIQLDELWDNTKYDIDHIYPQSKTMDDSLNNRVLVKKNYNAIKSDTYPLSLDIQKKMMSFWKMLQQQGFITKEKYVRLVRSDELSADELAGFIERQIVETRQSTKAVATILKEALPDTEIVYVKAGNVSNFRQTYELLKVREMNDLHHAKDAYLNIVVGNAYFVKFTKNAAWFIRNNPGRSYNLKRMFEFDIERSGEIAWKAGNKGSIVTVKKVMQKNNILVTRKAYEVKGGLFDQQIMKKGKGQVPIKGNDERLADIEKYGGYNKAAGTYFMLVKSLDKKGKEIRTIEFVPLYLKNQIEINHESAIQYLAQERGLNSPEILLSKIKIDTLFKVDGFKMWLSGRTGNQLIFKGANQLILSHQEAAILKGVVKYVNRKNENKDAKLSERDGMTEEKLLQLYDTFLDKLSNTVYSIRLSAQIKTLTEKRAKFIGLSNEDQCIVLNEILHMFQCQSGSANLKLIGGPGSAGILVMNNNITACKQISVINQSPTGIYEKEIDLIKL

SEQ ID NO: 323 - protein, 1345 aa, Streptococcus mutans
MKKPYSIGLDIGTNSVGWAVVTDDYKVPAKKMKVLGNTDKSHIEKNLLGALLFDSGNTAEDRRLKRTARRRYTRRRNRILYLQEIFSEEMGKVDDSFFHRLEDSFLVTEDKRGERHPIFGNLEEEVKYHENFPTIYHLRQYLADNPEKVDLRLVYLALAHIIKFRGHFLIEGKFDTRNNDVQRLFQEFLAVYDNTFENSSLQEQNVQVEEILTDKISKSAKKDRVLKLFPNEKSNGRFAEFLKLIVGNQADFKKHFELEEKAPLQFSKDTYEEELEVLLAQIGDNYAELFLSAKKLYDSILLSGILTVTDVGTKAPLSASMIQRYNEHQMDLAQLKQFIRQKLSDKYNEVFSDVSKDGYAGYIDGKTNQEAFYKYLKGLLNKIEGSGYFLDKIEREDFLRKQRTFDNGSIPHQIHLQEMRAIIRRQAEFYPFLADNQDRIEKLLTFRIPYYVGPLARGKSDFAWLSRKSADKITPWNFDEIVDKESSAEAFINRMTNYDLYLPNQKVLPKHSLLYEKFTVYNELTKVKYKTEQGKTAFFDANMKQEIFDGVFKVYRKVTKDKLMDFLEKEFDEFRIVDLTGLDKENKVFNASYGTYHDLCKILDKDFLDNSKNEKILEDIVLTLTLFEDREMIRKRLENYSDLLTKEQVKKLERRHYTGWGRLSAELIHGIRNKESRKTILDYLIDDGNSNRNFMQLINDDALSFKEEIAKAQVIGETDNLNQVVSDIAGSPAIKKGILQSLKIVDELVKIMGHQPENIVVEMARENQFTNQGRRNSQQRLKGLTDSIKEFGSQILKEHPVENSQLQNDRLFLYYLQNGRDMYTGEELDIDYLSQYDIDHIIPQAFIKDNSIDNRVLTSSKENRGKSDDVPSKDVVRKMKSYWSKLLSAKLITQRKFDNLTKAERGGLTDDDKAGFIKRQLVETRQITKHVARILDERFNTETDENNKKIRQVKIVTLKSNLVSNFRKEFELYKVREINDYHHAHDAYLNAVIGKALLGVYPQLEPEFVYGDYPHFHGHKENKATAKKFFYSNIMNFFKKDDVRTDKNGEIIWKKDEHISNIKKVLSYPQVNIVKKVEEQTGGFSKESILPKGNSDKLIPRKTKKFYWDTKKYGGFDSPIVAYSILVIADIEKGKSKKLKTVKALVGVTIMEKMTFERDPVAFLERKGYRNVQEENIIKLPKYSLFKLENGRKRLLASARELQKGNEIVLPNHLGTLLYHAKNIHKVDEPKHLDYVDKHKDEFKELLDVVSNFSKKYTLAEGNLEKIKELYAQNNGEDLKELASSFINLLTFTAIGAPATFKFFDKNIDRKRYTSTTEILNATLIHQSITGLYETRIDLNKLGGD

SEQ ID NO: 324 - protein, 1368 aa, Streptococcus pyogenes [sequence omitted]

SEQ ID NO: 325 - protein, 1388 aa, Streptococcus thermophilus
MTKPYSIGLDIGTNSVGWAVTTDNYKVPSKKMKVLGNTSKKYIKKNLLGVLLFDSGITAEGRRLKRTARRRYTRRRNRILYLQEIFSTEMATLDDAFFQRLDDSFLVPDDKRDSKYPIFGNLVEEKAYHDEFPTIYHLRKYLADSTKKADLRLVYLALAHMIKYRGHFLIEGEFNSKNNDIQKNFQDFLDTYNAIFESDLSLENSKQLEEIVKDKISKLEKKDRILKLFPGEKNSGIFSEFLKLIVGNQADFRKCFNLDEKASLHFSKESYDEDLETLLGYIGDDYSDVFLKAKKLYDAILLSGFLTVTDNETEAPLSSAMIKRYNEHKEDLALLKEYIRNISLKTYNEVFKDDTKNGYAGYIDGKTNQEDFYVYLKKLLAEFEGADYFLEKIDREDFLRKQRTFDNGSIPYQIHLQEMRAILDKQAKFYPFLAKNKERIEKILTFRIPYYVGPLARGNSDFAWSIRKRNEKITPWNFEDVIDKESSAEAFINRMTSFDLYLPEEKVLPKHSLLYETFNVYNELTKVRFIAESMRDYQFLDSKQKKDIVRLYFKDKRKVTDKDIIEYLHAIYGYDGIELKGIEKQFNSSLSTYHDLLNIINDKEFLDDSSNEAIIEEIIHTLTIFEDREMIKQRLSKFENIFDKSVLKKLSRRHYTGWGKLSAKLINGIRDEKSGNTILDYLIDDGISNRNFMQLIHDDALSFKKKIQKAQIIGDEDKGNIKEVVKSLPGSPAIKKGILQSIKIVDELVKVMGGRKPESIVVEMARENQYTNQGKSNSQQRLKRLEKSLKELGSKILKENIPAKLSKIDNNALQNDRLYLYYLQNGKDMYTGDDLDIDRLSNYDIDHIIPQAFLKDNSIDNKVLVSSASNRGKSDDVPSLEVVKKRKTFWYQLLKSKLISQRKFDNLTKAERGGLSPEDKAGFIQRQLVETRQITKHVARLLDEKFNNKKDENNRAVRTVKIITLKSTLVSQFRKDFELYKVREINDFHHAHDAYLNAVVASALLKKYPKLEPEFVYGDYPKYNSFRERKSATEKVYFYSNIMNIFKKSISLADGRVIERPLIEVNEETGESVWNKESDLATVRRVLSYPQVNVVKKVEEQNHGLDRGKPKGLFNANLSSKPKPNSNENLVGAKEYLDPKKYGGYAGISNSFTVLVKGTIEKGAKKKITNVLEFQGISILDRINYRKDKLNFLLEKGYKDIELIIELPKYSLFELSDGSRRMLASILSTNNKRGEIHKGNQIFLSQKFVKLLYHAKRISNTINENHRKYVENHKKEFEELFYYILEFNENYVGAKKNGKLLNSAFQSWQNHSIDELCSSFIGPTGSERKGLFELTSRGSAADFEFLGVKIPRYRDYTPSSLLKDATLIHQSVTGLYETRIDLAKLGEG

SEQ ID NO: 326 - protein, 1374 aa, Fusobacterium nucleatum
MKKQKFSDYYLGFDIGTNSVGWCVTDLDYNVLRFNKKDMWGSRLFDEAKTAAERRVQRNSRRRLKRRKWRLNLLEEIFSDEIMKIDSNFFRRLKESSLWLEDKNSKEKFTLFNDDNYKDYDFYKQYPTIFHLRDELIKNPEKKDIRLIYLALHSIFKSRGHFLFEGQNLKEIKNFETLYNNLISFLEDNGINKSIDKDNIEKLEKIICDSGKGLKDKEKEFKGIFNSDKQLVAIFKLSVGSSVSLNDLFDTDEYKKEEVEKEKISFREQIYEDDKPIYYSILGEKIELLDIAKSFYDFMVLNNILSDSNYISEAKVKLYEEHKKDLKNLKYIIRKYNKENYDKLFKDKNENNYPAYIGLNKEKDKKEVVEKSRLKIDDLIKVIKGYLPKPERIEEKDKTIFNEILNKIELKTILPKQRISDNGTLPYQIHEVELEKILENQSKYYDFLNYEENGVSTKDKLLKTFKFRIPYYVGPLNSYHKDKGGNSWIVRKEEGKILPWNFEQKVDIEKSAEEFIKRMTNKCTYLNGEDVIPKDSFLYSEYIILNELNKVQVNDEFLNEENKRKIIDELFKENKKVSEKKFKEYLLVNQIANRTVELKGIKDSFNSNYVSYIKFKDIFGEKLNLDIYKEISEKSILWKCLYGDDKKIFEKKIKNEYGDILNKDEIKKINSFKFNTWGRLSEKLLTGIEFINLETGECYSSVMEALRRTNYNLMELLSSKFTLQESIDNENKEMNEVSYRDLIEESYVSPSLKRAILQTLKIYEEIKKITGRVPKKVFIEMARGGDESMKNKKIPARQEQLKKLYDSCGNDIANFSIDIKEMKNSLSSYDNNSLRQKKLYLYYLQFGKCMYTGREIDLDRLLQNNDTYDIDHIYPRSKVIKDDSFDNLVLVLKNENAEKSNEYPVKKEIQEKMKSFWRFLKEKNFISDEKYKRLTGKDDFELRGFMARQLVNVRQTTKEVGKILQQIEPEIKIVYSKAEIASSFREMFDFIKVRELNDTHHAKDAYLNIVAGNVYNTKFTEKPYRYLQEIKENYDVKKIYNYDIKNAWDKENSLEIVKKNMEKNTVNITRFIKEEKGELFNLNPIKKGETSNEIISIKPKLYDGKDNKLNEKYGYYTSLKAAYFIYVEHEKKNKKVKTFERITRIDSTLIKNEKNLIKYLVSQKKLLNPKIIKKIYKEQTLIIDSYPYTFTGVDSNKKVELKNKKQLYLEKKYEQILKNALKFVEDNQGETEENYKFIYLKKRNNNEKNETIDAVKERYNIEFNEMYDKFLEKLSSKDYKNYINNKLYTNFLNSKEKFKKLKLWEKSLILREFLKIFNKNTYGKYEIKDSQTKEKLFSFPEDTGRIRLGQSSLGNNKELLEESVTGLFVKKIKL

SEQ ID NO: 327 - protein, 1333 aa, Planococcus antarcticus
MKNYTIGLDIGVASVGWVCIDENYKILNYNNRHAFGVHEFESAESAAGRRLKRGMRRRYNRRKKRLQLLQSLFDSYITDSGFFSKTDSQHFWKNNNEFENRSLTEVLSSLRISSRKYPTIYHLRSDLIESNKKMDLRLVYLALHNLVKYRGHFLQEGNWSEAASAEGMDDQLLELVTRYAELENLSPLDLSESQWKAAETLLLNRNLTKTDQSKELTAMFGKEYEPFCKLVAGLGVSLHQLFPSSEQALAYKETKTKVQLSNENVEEVMELLLEEESALLEAVQPFYQQVVLYELLKGETYVAKAKVSAFKQYQKDMASLKNLLDKTFGEKVYRSYFISDKNSQREYQKSHKVEVLCKLDQFNKEAKFAETFYKDLKKLLEDKSKTSIGTTEKDEMLRIIKAIDSNQFLQKQKGIQNAAIPHQNSLYEAEKILRNQQAHYPFITTEWIEKVKQILAFRIPYYIGPLVKDTTQSPFSWVERKGDAPITPWNFDEQIDKAASAEAFISRMRKTCTYLKGQEVLPKSSLTYERFEVLNELNGIQLRTTGAESDFRHRLSYEMKCWIIDNVFKQYKTVSTKRLLQELKKSPYADELYDEHTGEIKEVFGTQKENAFATSLSGYISMKSILGAVVDDNPAMTEELIYWIAVFEDREILHLKIQEKYPSITDVQRQKLALVKLPGWGRFSRLLIDGLPLDEQGQSVLDHMEQYSSVFMEVLKNKGFGLEKKIQKMNQHQVDGTKKIRYEDIEELAGSPALKRGIWRSVKIVEELVSIFGEPANIVLEVAREDGEKKRTKSRKDQWEELTKTTLKNDPDLKSFIGEIKSQGDQRFNEQRFWLYVTQQGKCLYTGKALDIQNLSMYEVDHILPQNFVKDDSLDNLALVMPEANQRKNQVGQNKMPLEIIEANQQYAMRTLWERLHELKLISSGKLGRLKKPSFDEVDKDKFIARQLVETRQIIKHVRDLLDERFSKSDIHLVKAGIVSKFRRFSEIPKIRDYNNKHHAMDALFAAALIQSILGKYGKNFLAFDLSKKDRQKQWRSVKGSNKEFFLFKNFGNLRLQSPVTGEEVSGVEYMKHVYFELPWQTTKMTQTGDGMFYKESIFSPKVKQAKYVSPKTEKFVHDEVKNHSICLVEFTFMKKEKEVQETKFIDLKVIEHHQFLKEPESQLAKFLAEKETNSPIIHARIIRTIPKYQKIWIEHFPYYFISTRELHNARQFEISYELMEKVKQLSERSSVEELKIVFGLLIDQMNDNYPIYTKSSIQDRVQKFVDTQLYDFKSFEIGFEELKKAVAANAQRSDTFGSRISKKPKPEEVAIGYESITGLKYRKPRSVVGTKR

SEQ ID NO: 328 - protein, 1395 aa, Treponema denticola
MKKEIKDYFLGLDVGTGSVGWAVTDTDYKLLKANRKDLWGMRCFETAETAEVRRLHRGARRRIERRKKRIKLLQELFSQEIAKTDEGFFQRMKESPFYAEDKTILQENTLFNDKDFADKTYHKAYPTINHLIKAWIENKVKPDPRLLYLACHNIIKKRGHFLFEGDFDSENQFDTSIQALFEYLREDMEVDIDADSQKVKEILKDSSLKNSEKQSRLNKILGLKPSDKQKKAITNLISGNKINFADLYDNPDLKDAEKNSISFSKDDFDALSDDLASILGDSFELLLKAKAVYNCSVLSKVIGDEQYLSFAKVKIYEKHKTDLTKLKNVIKKHFPKDYKKVFGYNKNEKNNNNYSGYVGVCKTKSKKLIINNSVNQEDFYKFLKTILSAKSEIKEVNDILTEIETGTFLPKQISKSNAEIPYQLRKMELEKILSNAEKHFSFLKQKDEKGLSHSEKIIMLLTFKIPYYIGPINDNHKKFFPDRCWVVKKEKSPSGKTTPWNFFDHIDKEKTAEAFITSRTNFCTYLVGESVLPKSSLLYSEYTVLNEINNLQIIIDGKNICDIKLKQKIYEDLFKKYKKITQKQISTFIKHEGICNKTDEVIILGIDKECTSSLKSYIELKNIFGKQVDEISTKNMLEEIIRWATIYDEGEGKTILKTKIKAEYGKYCSDEQIKKILNLKFSGWGRLSRKFLETVTSEMPGFSEPVNIITAMRETQNNLMELLSSEFTFTENIKKINSGFEDAEKQFSYDGLVKPLFLSPSVKKMLWQTLKLVKEISHITQAPPKKIFIEMAKGAELEPARTKTRLKILQDLYNNCKNDADAFSSEIKDLSGKIENEDNLRLRSDKLYLYYTQLGKCMYCGKPIEIGHVFDTSNYDIDHIYPQSKIKDDSISNRVLVCSSCNKNKEDKYPLKSEIQSKQRGFWNFLQRNNFISLEKLNRLTRATPISDDETAKFIARQLVETRQATKVAAKVLEKMFPETKIVYSKAETVSMFRNKFDIVKCREINDFHHAHDAYLNIVVGNVYNTKFTNNPWNFIKEKRDNPKIADTYNYYKVFDYDVKRNNITAWEKGKTIITVKDMLKRNTPIYTRQAACKKGELFNQTIMKKGLGQHPLKKEGPFSNISKYGGYNKVSAAYYTLIEYEEKGNKIRSLETIPLYLVKDIQKDQDVLKSYLTDLLGKKEFKILVPKIKINSLLKINGFPCHITGKTNDSFLLRPAVQFCCSNNEVLYFKKIIRFSEIRSQREKIGKTISPYEDLSFRSYIKENLWKKTKNDEIGEKEFYDLLQKKNLEIYDMLLTKHKDTIYKKRPNSATIDILVKGKEKFKSLIIENQFEVILEILKLFSATRNVSDLQHIGGSKYSGVAKIGNKISSLDNCILIYQSITGIFEKRIDLLKV

SEQ ID NO: 329 - protein, 1327 aa, Solobacterium moorei
MEGQMKNNGNNLQQGNYYLGLDVGTSSVGWAVTDTDYNVLKFRGKSMWGARLFDEASTAEERRTHRGNRRRLARRKYRLLLLEQLFEKEIRKIDDNFFVRLHESNLWADDKSKPSKFLLFNDTNFTDKDYLKKYPTIYHLRSDLIHNSTEHDIRLVFLALHHLIKYRGHFIYDNSANGDVKTLDEAVSDFEEYLNENDIEFNIENKKEFINVLSDKHLTKKEKKISLKKLYGDITDSENINISVLIEMLSGSSISLSNLFKDIEFDGKQNLSLDSDIEETLNDVVDILGDNIDLLIHAKEVYDIAVLTSSLGKHKYLCDAKVELFEKNKKDLMILKKYIKKNHPEDYKKIFSSPTEKKNYAAYSQTNSKNVCSQEEFCLFIKPYIRDMVKSENEDEVRIAKEVEDKSFLTKLKGTNNSVVPYQIHERELNQILKNIVAYLPFMNDEQEDISVVDKIKLIFKFKIPYYVGPLNTKSTRSWVYRSDEKIYPWNFSNVIDLDKTAHEFMNRLIGRCTYTNDPVLPMDSLLYSKYNVLNEINPIKVNGKAIPVEVKQAIYTDLFENSKKKVTRKSIYIYLLKNGYIEKEDIVSGIDIEIKSKLKSHHDFTQIVQENKCTPEEIERIIKGILVYSDDKSMLRRWLKNNIKGLSENDVKYLAKLNYKEWGRLSKTLLTDIYTINPEDGEACSILDIMWNTNATLMEILSNEKYQFKQNIENYKAENYDEKQNLHEELDDMYISPAARRSIWQALRIVDEIVDIKKSAPKKIFIEMAREKKSAMKKKRTESRKDTLLELYKSCKSQADGFYDEELFEKLSNESNSRLRRDQLYLYYTQMGRSMYTGKRIDFDKLINDKNTYDIDHIYPRSKIKDDSITNRVLVEKDINGEKTDIYPISEDIRQKMQPFWKILKEKGLINEEKYKRLTRNYELTDEELSSFVARQLVETQQSTKALATLLKKEYPSAKIVYSKAGNVSEFRNRKDKELPKFREINDLHHAKDAYLNIVVGNVYDTKFTEKFFNNIRNENYSLKRVFDFSVPGAWDAKGSTFNTIKKYMAKNNPIIAFAPYEVKGELFDQQIVPKGKGQFPIKQGKDIEKYGGYNKLSSAFLFAVEYKGKKARERSLETVYIKDVELYLQDPIKYCESVLGLKEPQIIKPKILMGSLFSINNKKLVVTGRSGKQYVCHHIYQLSINDEDSQYLKNIAKYLQEEPDGNIERQNILNITSVNNIKLFDVLCTKFNSNTYEIILNSLKNDVNEGREKFSELDILEQCNILLQLLKAFKCNRESSNLEKLNNKKQAGVIVIPHLFTKCSVFKVIHQSITGLFEKEMDLLK

SEQ ID NO: 330 - protein, 1334 aa, Staphylococcus pseudintermedius
MGRKPYILSLDIGTGSVGYACMDKGFNVLKYHDKDALGVYLFDGALTAQERRQFRTSRRRKNRRIKRLGLLQELLAPLVQNPNFYQFQRQFAWKNDNMDFKNKSLSEVLSFLGYESKKYPTIYHLQEALLLKDEKFDPELIYMALYHLVKYRGHFLFDHLKIENLTNNDNMHDFVELIETYENLNNIKLNLDYEKTKVIYEILKDNEMTKNDRAKRVKNMEKKLEQFSIMLLGLKFNEGKLFNHADNAEELKGANQSHTFADNYEENLTPFLTVEQSEFIERANKIYLSLTLQDILKGKKSMAMSKVAAYDKFRNELKQVKDIVYKADSTRTQFKKIFVSSKKSLKQYDATPNDQTFSSLCLFDQYLIRPKKQYSLLIKELKKIIPQDSELYFEAENDTLLKVLNTTDNASIPMQINLYEAETILRNQQKYHAEITDEMIEKVLSLIQFRIPYYVGPLVNDHTASKFGWMERKSNESIKPWNFDEVVDRSKSATQFIRRMTNKCSYLINEDVLPKNSLLYQEMEVLNELNATQIRLQTDPKNRKYRMMPQIKLFAVEHIFKKYKTVSHSKFLEIMLNSNHRENFMNHGEKLSIFGTQDDKKFASKLSSYQDMTKIFGDIEGKRAQIEEIIQWITIFEDKKILVQKLKECYPELTSKQINQLKKLNYSGWGRLSEKLLTHAYQGHSIIELLRHSDENFMEILTNDVYGFQNFIKEENQVQSNKIQHQDIANLTTSPALKKGIWSTIKLVRELTSIFGEPEKIIMEFATEDQQKGKKQKSRKQLWDDNIKKNKLKSVDEYKYIIDVANKLNNEQLQQEKLWLYLSQNGKCMYSGQSIDLDALLSPNATKHYEVDHIFPRSFIKDDSIDNKVLVIKKMNQTKGDQVPLQFIQQPYERIAYWKSLNKAGLISDSKLHKLMKPEFTAMDKEGFIQRQLVETRQISVHVRDFLKEEYPNTKVIPMKAKMVSEFRKKFDIPKIRQMNDAHHAIDAYLNGVVYHGAQLAYPNVDLFDFNFKWEKVREKWKALGEFNTKQKSRELFFFKKLEKMEVSQGERLISKIKLDMNHFKINYSRKLANIPQQFYNQTAVSPKTAELKYESNKSNEVVYKGLTPYQTYVVAIKSVNKKGKEKMEYQMIDHYVFDFYKFQNGNEKELALYLAQRENKDEVLDAQIVYSLNKGDLLYINNHPCYFVSRKEVINAKQFELTVEQQLSLYNVMNNKETNVEKLLIEYDFIAEKVINEYHHYLNSKLKEKRVRTFFSESNQTHEDFIKALDELFKVVTASATRSDKIGSRKNSMTHRAFLGKGKDVKIAYTSISGLKTTKPKSLFKLAESRNEL

SEQ ID NO: 331 - protein, 1472 aa, Flavobacterium branchiophilum
MAKILGLDLGTNSIGWAVVERENIDFSLIDKGVRIFSEGVKSEKGIESSRAAERTGYRSARKIKYRRKLRKYETLKVLSLNRMCPLSIEEVEEWKKSGFKDYPLNPEFLKWLSTDEESNVNPYFFRDRASKHKVSLFELGRAFYHIAQRRGFLSNRLDQSAEGILEEHCPKIEAIVEDLISIDEISTNITDYFFETGILDSNEKNGYAKDLDEGDKKLVSLYKSLLAILKKNESDFENCKSEIIERLNKKDVLGKVKGKIKDISQAMLDGNYKTLGQYFYSLYSKEKIRNQYTSREEHYLSEFITICKVQGIDQINEEEKINEKKFDGLAKDLYKAIFFQRPLKSQKGLIGKCSFEKSKSRCAISHPDFEEYRMWTYLNTIKIGTQSDKKLRFLTQDEKLKLVPKFYRKNDFNFDVLAKELIEKGSSFGFYKSSKKNDFFYWFNYKPTDTVAACQVAASLKNAIGEDWKTKSFKYQTINSNKEQVSRTVDYKDLWHLLTVATSDVYLYEFAIDKLGLDEKNAKAFSKTKLKKDFASLSLSAINKILPYLKEGLLYSHAVFVANIENIVDENIWKDEKQRDYIKTQISEIIENYTLEKSRFEIINGLLKEYKSENEDGKRVYYSKEAEQSFENDLKKKLVLFYKSNEIENKEQQETIFNELLPIFIQQLKDYEFIKIQRLDQKVLIFLKGKNETGQIFCTEEKGTAEEKEKKIKNRLKKLYHPSDIEKFKKKIIKDEFGNEKIVLGSPLTPSIKNPMAMRALHQLRKVLNALILEGQIDEKTIIHIEMARELNDANKRKGIQDYQNDNKKFREDAIKEIKKLYFEDCKKEVEPTEDDILRYQLWMEQNRSEIYEEGKNISICDIIGSNPAYDIEHTIPRSRSQDNSQMNKTLCSQRFNREVKKQSMPIELNNHLEILPRIAHWKEEADNLTREIEIISRSIKAAATKEIKDKKIRRRHYLTLKRDYLQGKYDRFIWEEPKVGFKNSQIPDTGIITKYAQAYLKSYFKKVESVKGGMVAEFRKIWGIQESFIDENGMKHYKVKDRSKHTHHTIDAITIACMTKEKYDVLAHAWTLEDQQNKKEARSIIEASKPWKTFKEDLLKIEEEILVSHYTPDNVKKQAKKIVRVRGKKQFVAEVERDVNGKAVPKKAASGKTIYKLDGEGKKLPRLQQGDTIRGSLHQDSIYGAIKNPLNTDEIKYVIRKDLESIKGSDVESIVDEVVKEKIKEAIANKVLLLSSNAQQKNKLVGTVWMNEEKRIAINKVRIYANSVKNPLHIKEHSLLSKSKHVHKQKVYGQNDENYAMAIYELDGKRDFELINIFNLAKLIKQGQGFYPLHKKKEIKGKIVFVPIEKRNKRDVVLKRGQQVVFYDKEVENPKDISEIVDFKGRIYIIEGLSIQRIVRPSGKVDEYGVIMLRYFKEARKADDIKQDNFKPDGVFKLGENKPTRKMNHQFTAFVEGIDFKVLPSGKFEKI

SEQ ID NO: 332 - protein, 1688 aa, Ignavibacterium album
MEFKKVLGLDIGTNSIGCALLSLPKSIQDYGKGGRLEWLTSRVIPLDADYMKAFIDGKNGLPQVITPAGKRRQKRGSRRLKHRYKLRRSRLIRVFKTLNWLPEDFPLDNPKRIKETISTEGKFSFRISDYVPISDESYREFYREFGYPENEIEQVIEEINFRRKTKGKNKNPMIKLLPEDWVVYYLRKKALIKPTTKEELIRIIYLFNQRRGFKSSRKDLTETAILDYDEFAKRLAEKEKYSAENYETKFVSITKVKEVVELKTDGRKGKKRFKVILEDSRIEPYEIERKEKPDWEGKEYTFLVTQKLEKGKFKQNKPDLPKEEDWALCTTALDNRMGSKHPGEFFFDELLKAFKEKRGYKIRQYPVNRWRYKKELEFIWTKQCQLNPELNNLNINKEILRKLATVLYPSQSKFFGPKIKEFENSDVLHIISEDIIYYQRDLKSQKSLISECRYEKRKGIDGEIYGLKCIPKSSPLYQEFRIWQDIHNIKVIRKESEVNGKKKINIDETQLYINENIKEKLFELFNSKDSLSEKDILELISLNIINSGIKISKKEEETTHRINLFANRKELKGNETKSRYRKVFKKLGFDGEYILNHPSKLNRLWHSDYSNDYADKEKTEKSILSSLGWKNRNGKWEKSKNYDVFNLPLEVAKAIANLPPLKKEYGSYSALAIRKMLVVMRDGKYWQHPDQIAKDQENTSLMLFDKNLIQLTNNQRKVLNKYLLTLAEVQKRSTLIKQKLNEIEHNPYKLELVSDQDLEKQVLKSFLEKKNESDYLKGLKTYQAGYLIYGKHSEKDVPIVNSPDELGEYIRKKLPNNSLRNPIVEQVIRETIFIVRDVWKSFGIIDEIHIELGRELKNNSEERKKTSESQEKNFQEKERARKLLKELLNSSNFEHYDENGNKIFSSFTVNPNPDSPLDIEKFRIWKNQSGLTDEELNKKLKDEKIPTEIEVKKYILWLTQKCRSPYTGKIIPLSKLFDSNVYEIEHIIPRSKMKNDSTNNLVICELGVNKAKGDRLAANFISESNGKCKFGEVEYTLLKYGDYLQYCKDTFKYQKAKYKNLLATEPPEDFIERQINDTRYIGRKLAELLTPVVKDSKNIIFTIGSITSELKITWGLNGVWKDILRPRFKRLESIINKKLIFQDEDDPNKYHFDLSINPQLDKEGLKRLDHRHHALDATIIAATTREHVRYLNSLNAADNDEEKREYFLSLCNHKIRDFKLPWENFTSEVKSKLLSCVVSYKESKPILSDPFNKYLKWEYKNGKWQKVFAIQIKNDRWKAVRRSMFKEPIGTVWIKKIKEVSLKEAIKIQAIWEEVKNDPVRKKKEKYIYDDYAQKVIAKIVQELGLSSSMRKQDDEKLNKFINEAKVSAGVNKNLNTTNKTIYNLEGRFYEKIKVAEYVLYKAKRMPLNKKEYIEKLSLQKMFNDLPNFILEKSILDNYPEILKELESDNKYIIEPHKKNNPVNRLLLEHILEYHNNPKEAFSTEGLEKLNKKAINKIGKPIKYITRLDGDINEEEIFRGAVFETDKGSNVYFVMYENNQTKDREFLKPNPSISVLKAIEHKNKIDFFAPNRLGFSRIILSPGDLVYVPTNDQYVLIKDNSSNETIINWDDNEFISNRIYQVKKFTGNSCYFLKNDIASLILSYSASNGVGEFGSQNISEYSVDDPPIRIKDVCIKIRVDRLGNVRPL

SEQ ID NO: 333 - protein, 1415 aa, Bergeyella zoohelcum
MKHILGLDLGTNSIGWALIERNIEEKYGKIIGMGSRIVPMGAELSKFEQGQAQTKNADRRTNRGARRLNKRYKQRRNKLIYILQKLDMLPSQIKLKEDFSDPNKIDKITILPISKKQEQLTAFDLVSLRVKALTEKVGLEDLGKIIYKYNQLRGYAGGSLEPEKEDIFDEEQSKDKKNKSFIAFSKIVFLGEPQEEIFKNKKLNRRAIIVETEEGNFEGSTFLENIKVGDSLELLINISASKSGDTITIKLPNKTNWRKKMENIENQLKEKSKEMGREFYISEFLLELLKENRWAKIRNNTILRARYESEFEAIWNEQVKHYPFLENLDKKTLIEIVSFIFPGEKESQKKYRELGLEKGLKYIIKNQVVFYQRELKDQSHLISDCRYEPNEKAIAKSHPVFQEYKVWEQINKLIVNTKIEAGTNRKGEKKYKYIDRPIPTALKEWIFEELQNKKEITFSAIFKKLKAEFDLREGIDFLNGMSPKDKLKGNETKLQLQKSLGELWDVLGLDSINRQIELWNILYNEKGNEYDLTSDRTSKVLEFINKYGNNIVDDNAEETAIRISKIKFARAYSSLSLKAVERILPLVRAGKYFNNDFSQQLQSKILKLLNENVEDPFAKAAQTYLDNNQSVLSEGGVGNSIATILVYDKHTAKEYSHDELYKSYKEINLLKQGDLRNPLVEQIINEALVLIRDIWKNYGIKPNEIRVELARDLKNSAKERATIHKRNKDNQTINNKIKETLVKNKKELSLANIEKVKLWEAQRHLSPYTGQPIPLSDLFDKEKYDVDHIIPISRYFDDSFTNKVISEKSVNQEKANRTAMEYFEVGSLKYSIFTKEQFIAHVNEYFSGVKRKNLLATSIPEDPVQRQIKDTQYIAIRVKEELNKIVGNENVKTTTGSITDYLRNHWGLTDKFKLLLKERYEALLESEKFLEAEYDNYKKDFDSRKKEYEEKEVLFEEQELTREEFIKEYKENYIRYKKNKLIIKGWSKRIDHRHHAIDALIVACTEPAHIKRLNDLNKVLQDWLVEHKSEFMPNFEGSNSELLEEILSLPENERTEIFTQIEKFRAIEMPWKGFPEQVEQKLKEIIISHKPKDKLLLQYNKAGDRQIKLRGQLHEGTLYGISQGKEAYRIPLTKFGGSKFATEKNIQKIVSPFLSGFIANHLKEYNNKKEEAFSAEGIMDLNNKLAQYRNEKGELKPHTPISTVKIYYKDPSKNKKKKDEEDLSLQKLDREKAFNEKLYVKTGDNYLFAVLEGEIKTKKTSQIKRLYDIISFFDATNFLKEEFRNAPDKKTFDKDLLFRQYFEERNKAKLLFTLKQGDFVYLPNENEEVILDKESPLYNQYWGDLKERGKNIYVVQKFSKKQIYFIKHTIADIIKKDVEFGSQNCYETVEGRSIKENCFKLEIDRLGNIVKVIKR

SEQ ID NO: 334 - protein, 1166 aa, Nitrobacter hamburgensis
MHVEIDFPHFSRGDSHLAMNKNEILRGSSVLYRLGLDLGSNSLGWFVTHLEKRGDRHEPVALGPGGVRIFPDGRDPQSGTSNAVDRRMARGARKRRDRFVERRKELIAALIKYNLLPDDARERRALEVLDPYALRKTALTDTLPAHHVGRALFHLNQRRGFQSNRKTDSKQSEDGAIKQAASRLATDKGNETLGVFFADMHLRKSYEDRQTAIRAELVRLGKDHLTGNARKKIWAKVRKRLFGDEVLPRADAPHGVRARATITGTKASYDYYPTRDMLRDEFNAIWAGQSAHHATITDEARTEIEHIIFYQRPLKPAIVGKCTLDPATRPFKEDPEGYRAPWSHPLAQRFRILSEARNLEIRDTGKGSRRLTKEQSDLVVAALLANREVKFDKLRTLLKLPAEARFNLESDRRAALDGDQTAARLSDKKGFNKAWRGFPPERQIAIVARLEETEDENELIAWLEKECALDGAAAARVANTTLPDGHCRLGLRAIKKIVPIMQDGLDEDGVAGAGYHIAAKRAGYDHAKLPTGEQLGRLPYYGQWLQDAVVGSGDARDQKEKQYGQFPNPTVHIGLGQLRRVVNDLIDKYGPPTEISIEFTRALKLSEQQKAERQREQRRNQDKNKARAEELAKFGRPANPRNLLKMRLWEELAHDPLDRKCVYTGEQISIERLLSDEVDIDHILPVAMTLDDSPANKIICMRYANRHKRKQTPSEAFGSSPTLQGHRYNWDDIAARATGLPRNKRWRFDANAREEFDKRGGFLARQLNETGWLARLAKQYLGAVTDPNQIWVVPGRLTSMLRGKWGLNGLLPSDNYAGVQDKAEEFLASTDDMEFSGVKNRADHRHHAIDGLVTALTDRSLLWKMANAYDEEHEKFVIEPPWPTMRDDLKAALEKMVVSHKPDHGIEGKLHEDSAYGFVKPLDATGLKEEEAGNLVYRKAIESLNENEVDRIRDIQLRTIVRDHVNVEKTKGVALADALRQLQAPSDDYPQFKHGLRHVRILKKEKGDYLVPIANRASGVAYKAYSAGENFCVEVFETAGGKWDGEAVRRFDANKKNAGPKIAHAPQWRDANEGAKLVMRIHKGDLIRLDHEGRARIMVVHRLDAAAGRFKLADHNETGNLDKRHATNNDIDPFRWLMASYNTLKKLAAVPVRVDELGRVWRVMPN

SEQ ID NO: 335 - protein, 1498 aa, Odoribacter laneus
METTLGIDLGTNSIGLALVDQEEHQILYSGVRIFPEGINKDTIGLGEKEESRNATRRAKRQMRRQYFRKKLRKAKLLELLIAYDMCPLKPEDVRRWKNWDKQQKSTVRQFPDTPAFREWLKQNPYELRKQAVTEDVTRPELGRILYQMIQRRGFLSSRKGKEEGKIFTGKDRMVGIDETRKNLQKQTLGAYLYDIAPKNGEKYRFRTERVRARYTLRDMYIREFEIIWQRQAGHLGLAHEQATRKKNIFLEGSATNVRNSKLITHLQAKYGRGHVLIEDTRITVTFQLPLKEVLGGKIEIEEEQLKFKSNESVLFWQRPLRSQKSLLSKCVFEGRNFYDPVHQKWIIAGPTPAPLSHPEFEEFRAYQFINNIIYGKNEHLTAIQREAVFELMCTESKDFNFEKIPKHLKLFEKFNFDDTTKVPACTTISQLRKLFPHPVWEEKREEIWHCFYFYDDNTLLFEKLQKDYALQTNDLEKIKKIRLSESYGNVSLKAIRRINPYLKKGYAYSTAVLLGGIRNSFGKRFEYFKEYEPEIEKAVCRILKEKNAEGEVIRKIKDYLVHNRFGFAKNDRAFQKLYHHSQAITTQAQKERLPETGNLRNPIVQQGLNELRRTVNKLLATCREKYGPSFKFDHIHVEMGRELRSSKTEREKQSRQIRENEKKNEAAKVKLAEYGLKAYRDNIQKYLLYKEIEEKGGTVCCPYTGKTLNISHTLGSDNSVQIEHIIPYSISLDDSLANKTLCDATFNREKGELTPYDFYQKDPSPEKWGASSWEEIEDRAFRLLPYAKAQRFIRRKPQESNEFISRQLNDTRYISKKAVEYLSAICSDVKAFPGQLTAELRHLWGLNNILQSAPDITFPLPVSATENHREYYVITNEQNEVIRLFPKQGETPRTEKGELLLTGEVERKVFRCKGMQEFQTDVSDGKYWRRIKLSSSVTWSPLFAPKPISADGQIVLKGRIEKGVFVCNQLKQKLKTGLPDGSYWISLPVISQTFKEGESVNNSKLTSQQVQLFGRVREGIFRCHNYQCPASGADGNFWCTLDTDTAQPAFTPIKNAPPGVGGGQIILTGDVDDKGIFHADDDLHYELPASLPKGKYYGIFTVESCDPTLIPIELSAPKTSKGENLIEGNIWVDEHTGEVRFDPKKNREDQRHHAIDAIVIALSSQSLFQRLSTYNARRENKKRGLDSTEHFPSPWPGFAQDVRQSVVPLLVSYKQNPKTLCKISKTLYKDGKKIHSCGNAVRGQLHKETVYGQRTAPGATEKSYHIRKDIRELKTSKHIGKVVDITIRQMLLKHLQENYHIDITQEFNIPSNAFFKEGVYRIFLPNKHGEPVPIKKIRMKEELGNAERLKDNINQYVNPRNNHHVMIYQDADGNLKEEIVSFWSVIERQNQGQPIYQLPREGRNIVSILQINDTFLIGLKEEEPEVYRNDLSTLSKHLYRVQKLSGMYYTFRHHLASTLNNEREEFRIQSLEAWKRANPVKVQIDEIGRITFLNGPLC

SEQ ID NO: 336 - protein, 1372 aa, Legionella pneumophila
MESSQILSPIGIDLGGKFTGVCLSHLEAFAELPNHANTKYSVILIDHNNFQLSQAQRRATRHRVRNKKRNQFVKRVALQLFQHILSRDLNAKEETALCHYLNNRGYTYVDTDLDEYIKDETTINLLKELLPSESEHNFIDWFLQKMQSSEFRKILVSKVEEKKDDKELKNAVKNIKNFITGFEKNSVEGHRHRKVYFENIKSDITKDNQLDSIKKKIPSVCLSNLLGHLSNLQWKNLHRYLAKNPKQFDEQTFGNEFLRMLKNFRHLKGSQESLAVRNLIQQLEQSQDYISILEKTPPEITIPPYEARTNTGMEKDQSLLLNPEKLNNLYPNWRNLIPGIIDAHPFLEKDLEHTKLRDRKRIISPSKQDEKRDSYILQRYLDLNKKIDKFKIKKQLSFLGQGKQLPANLIETQKEMETHFNSSLVSVLIQIASAYNKEREDAAQGIWFDNAFSLCELSNINPPRKQKILPLLVGAILSEDFINNKDKWAKFKIFWNTHKIGRTSLKSKCKEIEEARKNSGNAFKIDYEEALNHPEHSNNKALIKIIQTIPDIIQAIQSHLGHNDSQALIYHNPFSLSQLYTILETKRDGFHKNCVAVTCENYWRSQKTEIDPEISYASRLPADSVRPFDGVLARMMQRLAYEIAMAKWEQIKHIPDNSSLLIPIYLEQNRFEFEESFKKIKGSSSDKTLEQAIEKQNIQWEEKFQRIINASMNICPYKGASIGGQGEIDHIYPRSLSKKHFGVIFNSEVNLIYCSSQGNREKKEEHYLLEHLSPLYLKHQFGTDNVSDIKNFISQNVANIKKYISFHLLTPEQQKAARHALFLDYDDEAFKTITKFLMSQQKARVNGTQKFLGKQIMEFLSTLADSKQLQLEFSIKQITAEEVHDHRELLSKQEPKLVKSRQQSFPSHAIDATLTMSIGLKEFPQFSQELDNSWFINHLMPDEVHLNPVRSKEKYNKPNISSTPLFKDSLYAERFIPVWVKGETFAIGFSEKDLFEIKPSNKEKLFTLLKTYSTKNPGESLQELQAKSKAKWLYFPINKTLALEFLHHYFHKEIVTPDDTTVCHFINSLRYYTKKESITVKILKEPMPVLSVKFESSKKNVLGSFKHTIALPATKDWERLFNHPNFLALKANPAPNPKEFNEFIRKYFLSDNNPNSDIPNNGHNIKPQKHKAVRKVFSLPVIPGNAGTMMRIRRKDNKGQPLYQLQTIDDTPSMGIQINEDRLVKQEVLMDAYKTRNLSTIDGINNSEGQAYATFDNWLTLPVSTFKPEIIKLEMKPHSKTRRYIRITQSLADFIKTIDEALMIKPSDSIDDPLNMPNEIVCKNKLFGNELKPRDGKMKIVSTGKIVTYEFESDSTPQWIQTLYVTQLKKQP

SEQ ID NO: 337 - protein, 1517 aa, Bacteroides sp.
MKKIVGLDLGTNSIGWALINAYINKEHLYGIEACGSRIIPMDAAILGNFDKGNSISQTADRTSYRGIRRLRERHLLRRERLHRILDLLGFLPKHYSDSLNRYGKFLNDIECKLPWVKDETGSYKFIFQESFKEMLANFTEHHPILIANNKKVPYDWTIYYLRKKALTQKISKEELAWILLNFNQKRGYYQLRGEEEETPNKLVEYYSLKVEKVEDSGERKGKDTWYNVHLENGMIYRRTSNIPLDWEGKTKEFIVTTDLEADGSPKKDKEGNIKRSFRAPKDDDWTLIKKKTEADIDKIKMTVGAYIYDTLLQKPDQKIRGKLVRTIERKYYKNELYQILKTQSEFHEELRDKQLYIACLNELYPNNEPRRNSISTRDFCHLFIEDIIFYQRPLKSKKSLIDNCPYEENRYIDKESGEIKHASIKCIAKSHPLYQEFRLWQFIVNLRIYRKETDVDVTQELLPTEADYVTLFEWLNEKKEIDQKAFFKYPPFGFKKTTSNYRWNYVEDKPYPCNETHAQIIARLGKAHIPKAFLSKEKEETLWHILYSIEDKQEIEKALHSFANKNNLSEEFIEQFKNFPPFKKEYGSYSAKAIKKLLPLMRMGKYWSIENIDNGTRIRINKIIDGEYDENIRERVRQKAINLTDITHFRALPLWLACYLVYDRHSEVKDIVKWKTPKDIDLYLKSFKQHSLRNPIVEQVITETLRTVRDIWQQVGHIDEIHIELGREMKNPADKRARMSQQMIKNENTNLRIKALLTEFLNPEFGIENVRPYSPSQQDLLRIYEEGVLNSILELPEDIGIILGKFNQTDTLKRPTRSEILRYKLWLEQKYRSPYTGEMIPLSKLFTPAYEIEHIIPQSRYFDDSLSNKVICESEINKLKDRSLGYEFIKNHHGEKVELAFDKPVEVLSVEAYEKLVHESYSHNRSKMKKLLMEDIPDQFIERQLNDSRYISKVVKSLLSNIVREENEQEAISKNVIPCTGGITDRLKKDWGINDVWNKIVLPRFIRLNELTESTRFTSINTNNTMIPSMPLELQKGFNKKRIDHRHHAMDAIIIACANRNIVNYLNNVSASKNTKITRRDLQTLLCHKDKTDNNGNYKWVIDKPWETFTQDTLTALQKITVSFKQNLRVINKTTNHYQHYENGKKIVSNQSKGDSWAIRKSMHKETVHGEVNLRMIKTVSFNEALKKPQAIVEMDLKKKILAMLELGYDTKRIKNYFEENKDTWQDINPSKIKVYYFTKETKDRYFAVRKPIDTSFDKKKIKESITDTGIQQIMLRHLETKDNDPTLAFSPDGIDEMNRNILILNKGKKHQPIYKVRVYEKAEKFTVGQKGNKRTKFVEAAKGTNLFFAIYETEEIDKDTKKVIRKRSYSTIPLNVVIERQKQGLSSAPEDENGNLPKYILSPNDLVYVPTQEEINKGEVVMPIDRDRIYKMVDSSGITANFIPASTANLIFALPKATAEIYCNGENCIQNEYGIGSPQSKNQKAITGEMVKEICFPIKVDRLGNIIQVGSCILTN

SEQ ID NO: 338 - protein, 1101 aa, Akkermansia muciniphila
MSRSLTFSFDIGYASIGWAVIASASHDDADPSVCGCGTVLFPKDDCQAFKRREYRRLRRNIRSRRVRIERIGRLLVQAQIITPEMKETSGHPAPFYLASEALKGHRTLAPIELWHVLRWYAHNRGYDNNASWSNSLSEDGGNGEDTERVKHAQDLMDKHGTATMAETICRELKLEEGKADAPMEVSTPAYKNLNTAFPRLIVEKEVRRILELSAPLIPGLTAEIIELIAQHHPLTTEQRGVLLQHGIKLARRYRGSLLFGQLIPRFDNRIISRCPVTWAQVYEAELKKGNSEQSARERAEKLSKVPTANCPEFYEYRMARILCNIRADGEPLSAEIRRELMNQARQEGKLTKASLEKAISSRLGKETETNVSNYFTLHPDSEEALYLNPAVEVLQRSGIGQILSPSVYRIAANRLRRGKSVTPNYLLNLLKSRGESGEALEKKIEKESKKKEADYADTPLKPKYATGRAPYARTVLKKVVEEILDGEDPTRPARGEAHPDGELKAHDGCLYCLLDTDSSVNQHQKERRLDTMTNNHLVRHRMLILDRLLKDLIQDFADGQKDRISRVCVEVGKELTTFSAMDSKKIQRELTLRQKSHTDAVNRLKRKLPGKALSANLIRKCRIAMDMNWTCPFTGATYGDHELENLELEHIVPHSFRQSNALSSLVLTWPGVNRMKGQRTGYDFVEQEQENPVPDKPNLHICSLNNYRELVEKLDDKKGHEDDRRRKKKRKALLMVRGLSHKHQSQNHEAMKEIGMTEGMMTQSSHLMKLACKSIKTSLPDAHIDMIPGAVTAEVRKAWDVFGVFKELCPEAADPDSGKILKENLRSLTHLHHALDACVLGLIPYIIPAHHNGLLRRVLAMRRIPEKLIPQVRPVANQRHYVLNDDGRMMLRDLSASLKENIREQLMEQRVIQHVPADMGGALLKETMQRVLSVDGSGEDAMVSLSKKKDGKKEKNQVKASKLVGVFPEGPSKLKALKAAIEIDGNYGVALDPKPVVIRHIKVFKRIMALKEQNGGKPVRILKKGMLIHLTSSKDPKHAGVWRIESIQDSKGGVKLDLQRAHCAVPKNKTHECNWREVDLISLLKKYQMKRYPTSYTGTPR

SEQ ID NO: 339 - protein, 1424 aa, Prevotella sp.
MTQKVLGLDLGTNSIGSAVRNLDLSDDLQWQLEFFSSDIFRSSVNKESNGREYSLAAQRSAHRRSRGLNEVRRRRLWATLNLLIKHGFCPMSSESLMRWCTYDKRKGLFREYPIDDKDFNAWILLDFNGDGRPDYSSPYQLRRELVTRQFDFEQPIERYKLGRALYHIAQHRGFKSSKGETLSQQETNSKPSSTDEIPDVAGAMKASEEKLSKGLSTYMKEHNLLTVGAAFAQLEDEGVRVRNNNDYRAIRSQFQHEIETIFKFQQGLSVESELYERLISEKKNVGTIFYKRPLRSQRGNVGKCTLERSKPRCAIGHPLFEKFRAWTLINNIKVRMSVDTLDEQLPMKLRLDLYNECFLAFVRTEFKFEDIRKYLEKRLGIHFSYNDKTINYKDSTSVAGCPITARFRKMLGEEWESFRVEGQKERQAHSKNNISFHRVSYSIEDIWHFCYDAEEPEAVLAFAQETLRLERKKAEELVRIWSAMPQGYAMLSQKAIRNINKILMLGLKYSDAVILAKVPELVDVSDEELLSIAKDYYLVEAQVNYDKRINSIVNGLIAKYKSVSEEYRFADHNYEYLLDESDEKDIIRQIENSLGARRWSLMDANEQTDILQKVRDRYQDFFRSHERKFVESPKLGESFENYLTKKFPMVEREQWKKLYHPSQITIYRPVSVGKDRSVLRLGNPDIGAIKNPTVLRVLNTLRRRVNQLLDDGVISPDETRVVVETARELNDANRKWALDTYNRIRHDENEKIKKILEEFYPKRDGISTDDIDKARYVIDQREVDYFTGSKTYNKDIKKYKFWLEQGGQCMYTGRTINLSNLFDPNAFDIEHTIPESLSFDSSDMNLTLCDAHYNRFIKKNHIPTDMPNYDKAITIDGKEYPAITSQLQRWVERVERLNRNVEYWKGQARRAQNKDRKDQCMREMHLWKMELEYWKKKLERFTVTEVTDGFKNSQLVDTRVITRHAVLYLKSIFPHVDVQRGDVTAKFRKILGIQSVDEKKDRSLHSHHAIDATTLTIIPVSAKRDRMLELFAKIEEINKMLSFSGSEDRTGLIQELEGLKNKLQMEVKVCRIGHNVSEIGTFINDNIIVNHHIKNQALTPVRRRLRKKGYIVGGVDNPRWQTGDALRGEIHKASYYGAITQFAKDDEGKVLMKEGRPQVNPTIKFVIRRELKYKKSAADSGFASWDDLGKAIVDKELFALMKGQFPAETSFKDACEQGIYMIKKGKNGMPDIKLHHIRHVRCEAPQSGLKIKEQTYKSEKEYKRYFYAAVGDLYAMCCYTNGKIREFRIYSLYDVSCHRKSDIEDIPEFITDKKGNRLMLDYKLRTGDMILLYKDNPAELYDLDNVNLSRRLYKINRFESQSNLVLMTHHLSTSKERGRSLGKTVDYQNLPESIRSSVKSLNFLIMGENRDFVIKNGKIIFNHR

SEQ ID NO: 340 - protein, 1409 aa, Wolinella succinogenes
MLVSPISVDLGGKNTGFFSFTDSLDNSQSGTVIYDESFVLSQVGRRSKRHSKRNNLRNKLVKRLFLLILQEHHGLSIDVLPDEIRGLFNKRGYTYAGFELDEKKKDALESDTLKEFLSEKLQSIDRDSDVEDFLNQIASNAESFKDYKKGFEAVFASATHSPNKKLELKDELKSEYGENAKELLAGLRVTKEILDEFDKQENQGNLPRAKYFEELGEYIATNEKVKSFFDSNSLKLTDMTKLIGNISNYQLKELRRYFNDKEMEKGDIWIPNKLHKITERFVRSWHPKNDADRQRRAELMKDLKSKEIMELLTTTEPVMTIPPYDDMNNRGAVKCQTLRLNEEYLDKHLPNWRDIAKRLNHGKFNDDLADSTVKGYSEDSTLLHRLLDTSKEIDIYELRGKKPNELLVKTLGQSDANRLYGFAQNYYELIRQKVRAGIWVPVKNKDDSLNLEDNSNMLKRCNHNPPHKKNQIHNLVAGILGVKLDEAKFAEFEKELWSAKVGNKKLSAYCKNIEELRKTHGNTFKIDIEELRKKDPAELSKEEKAKLRLTDDVILNEWSQKIANFFDIDDKHRQRFNNLFSMAQLHTVIDTPRSGFSSTCKRCTAENRFRSETAFYNDETGEFHKKATATCQRLPADTQRPFSGKIERYIDKLGYELAKIKAKELEGMEAKEIKVPIILEQNAFEYEESLRKSKTGSNDRVINSKKDRDGKKLAKAKENAEDRLKDKDKRIKAFSSGICPYCGDTIGDDGEIDHILPRSHTLKIYGTVFNPEGNLIYVHQKCNQAKADSIYKLSDIKAGVSAQWIEEQVANIKGYKTFSVLSAEQQKAFRYALFLQNDNEAYKKVVDWLRTDQSARVNGTQKYLAKKIQEKLTKMLPNKHLSFEFILADATEVSELRRQYARQNPLLAKAEKQAPSSHAIDAVMAFVARYQKVFKDGTPPNADEVAKLAMLDSWNPASNEPLTKGLSTNQKIEKMIKSGDYGQKNMREVFGKSIFGENAIGERYKPIVVQEGGYYIGYPATVKKGYELKNCKVVTSKNDIAKLEKIIKNQDLISLKENQYIKIFSINKQTISELSNRYFNMNYKNLVERDKEIVGLLEFIVENCRYYTKKVDVKFAPKYIHETKYPFYDDWRRFDEAWRYLQENQNKTSSKDRFVIDKSSLNEYYQPDKNEYKLDVDTQPIWDDFCRWYFLDRYKTANDKKSIRIKARKTFSLLAESGVQGKVFRAKRKIPTGYAYQALPMDNNVIAGDYANILLEANSKTLSLVPKSGISIEKQLDKKLDVIKKTDVRGLAIDNNSFFNADFDTHGIRLIVENTSVKVGNFPISAIDKSAKRMIFRALFEKEKGKRKKKTTISFKESGPVQDYLKVFLKKIVKIQLRTDGSISNIVVRKNAADFTLSFRSEHIQKLLK

SEQ ID NO: 341 - protein, 1146 aa, Alicyclobacillus hesperidum
MAYRLGLDIGITSVGWAVVALEKDESGLKPVRIQDLGVRIFDKAEDSKTGASLALPRREARSARRRTRRRRHRLWRVKRLLEQHGILSMEQIEALYAQRTSSPDVYALRVAGLDRCLIAEEIARVLIHIAHRRGFQSNRKSEIKDSDAGKLLKAVQENENLMQSKGYRTVAEMLVSEATKTDAEGKLVHGKKHGYVSNVRNKAGEYRHTVSRQAIVDEVRKIFAAQRALGNDVMSEELEDSYLKILCSQRNFDDGPGGDSPYGHGSVSPDGVRQSIYERMVGSCTFETGEKRAPRSSYSFERFQLLTKVVNLRIYRQQEDGGRYPCELTQTERARVIDCAYEQTKITYGKLRKLLDMKDTESFAGLTYGLNRSRNKTEDTVFVEMKFYHEVRKALQRAGVFIQDLSIETLDQIGWILSVWKSDDNRRKKLSTLGLSDNVIEELLPLNGSKFGHLSLKAIRKILPFLEDGYSYDVACELAGYQFQGKTEYVKQRLLPPLGEGEVTNPVVRRALSQAIKVVNAVIRKHGSPESIHIELARELSKNLDERRKIEKAQKENQKNNEQIKDEIREILGSAHVTGRDIVKYKLFKQQQEFCMYSGEKLDVTRLFEPGYAEVDHIIPYGISFDDSYDNKVLVKTEQNRQKGNRTPLEYLRDKPEQKAKFIALVESIPLSQKKKNHLLMDKRAIDLEQEGFRERNLSDTRYITRALMNHIQAWLLFDETASTRSKRVVCVNGAVTAYMRARWGLTKDRDAGDKHHAADAVVVACIGDSLIQRVTKYDKFKRNALADRNRYVQQVSKSEGITQYVDKETGEVFTWESFDERKFLPNEPLEPWPFFRDELLARLSDDPSKNIRAIGLLTYSETEQIDPIFVSRMPTRKVTGAAHKETIRSPRIVKVDDNKGTEIQVVVSKVALTELKLTKDGEIKDYFRPEDDPRLYNTLRERLVQFGGDAKAAFKEPVYKISKDGSVRTPVRKVKIQEKLTLGVPVHGGRGIAENGGMVRIDVFAKGGKYYFVPIYVADVLKRELPNRLATAHKPYSEWRVVDDSYQFKFSLYPNDAVMIKPSREVDITYKDRKEPVGCRIMYFVSANIASASISLRTHDNSGELEGLGIQGLEVFEKYVVGPLGDTHPVYKERRMPFRVERKMN

SEQ ID NO: 342 - protein, 1442 aa, Caenispirillum salinarum
MPVLSPLSPNAAQGRRRWSLALDIGEGSIGWAVAEVDAEGRVLQLTGTGVTLFPSAWSNENGTYVAHGAADRAVRGQQQRHDSRRRRLAGLARLCAPVLERSPEDLKDLTRTPPKADPRAIFFLRADAARRPLDGPELFRVLHHMAAHRGIRLAELQEVDPPPESDADDAAPAATEDEDGTRRAAADERAFRRLMAEHMHRHGTQPTCGEIMAGRLRETPAGAQPVTRARDGLRVGGGVAVPTRALIEQEFDAIRAIQAPRHPDLPWDSLRRLVLDQAPIAVPPATPCLFLEELRRRGETFQGRTITREAIDRGLTVDPLIQALRIRETVGNLRLHERITEPDGRQRYVPRAMPELGLSHGELTAPERDTLVRALMHDPDGLAAKDGRIPYTRLRKLIGYDNSPVCFAQERDTSGGGITVNPTDPLMARWIDGWVDLPLKARSLYVRDVVARGADSAALARLLAEGAHGVPPVAAAAVPAATAAILESDIMQPGRYSVCPWAAEAILDAWANAPTEGFYDVTRGLFGFAPGEIVLEDLRRARGALLAHLPRTMAAARTPNRAAQQRGPLPAYESVIPSQLITSLRRAHKGRAADWSAADPEERNPFLRTWTGNAATDHILNQVRKTANEVITKYGNRRGWDPLPSRITVELAREAKHGVIRRNEIAKENRENEGRRKKESAALDTFCQDNTVSWQAGGLPKERAALRLRLAQRQEFFCPYCAERPKLRATDLFSPAETEIDHVIERRMGGDGPDNLVLAHKDCNNAKGKKTPHEHAGDLLDSPALAALWQGWRKENADRLKGKGHKARTPREDKDFMDRVGWRFEEDARAKAEENQERRGRRMLHDTARATRLARLYLAAAVMPEDPAEIGAPPVETPPSPEDPTGYTAIYRTISRVQPVNGSVTHMLRQRLLQRDKNRDYQTHHAEDACLLLLAGPAVVQAFNTEAAQHGADAPDDRPVDLMPTSDAYHQQRRARALGRVPLATVDAALADIVMPESDRQDPETGRVHWRLTRAGRGLKRRIDDLTRNCVILSRPRRPSETGTPGALHNATHYGRREITVDGRTDTVVTQRMNARDLVALLDNAKIVPAARLDAAAPGDTILKEICTEIADRHDRVVDPEGTHARRWISARLAALVPAHAEAVARDIAELADLDALADADRTPEQEARRSALRQSPYLGRAISAKKADGRARAREQEILTRALLDPHWGPRGLRHLIMREARAPSLVRIRANKTDAFGRPVPDAAVWVKTDGNAVSQLWRLTSVVTDDGRRIPLPKPIEKRIEISNLEYARLNGLDEGAGVTGNNAPPRPLRQDIDRLTPLWRDHGTAPGGYLGTAVGELEDKARSALRGKAMRQTLTDAGITAEAGWRLDSEGAVCDLEVAKGDTVKKDGKTYKVGVITQGIFGMPVDAAGSAPRTPEDCEKFEEQYGIKPWKAKGIPLA

SEQ ID NO: 343 - protein, 1114 aa, Eubacterium rectale
MNYTEKEKLFMKYILALDIGIASVGWAILDKESETVIEAGSNIFPEASAADNQLRRDMRGAKRNNRRLKTRINDFIKLWENNNLSIPQFKSTEIVGLKVRAITEEITLDELYLILYSYLKHRGISYLEDALDDTVSGSSAYANGLKLNAKELETHYPCEIQQERLNTIGKYRGQSQIINENGEVLDLSNVFTIGAYRKEIQRVFEIQKKYHPELTDEFCDGYMLIFNRKRKYYEGPGNEKSRTDYGRFTTKLDANGNYITEDNIFEKLIGKCSVYPDELRAAAASYTAQEYNVLNDLNNLTINGRKLEENEKHEIVERIKSSNTINMRKIISDCMGENIDDFAGARIDKSGKEIFHKFEVYNKMRKALLEIGIDISNYSREELDEIGYIMTINTDKEAMMEAFQKSWIDLSDDVKQCLINMRKTNGALFNKWQSFSLKIMNELIPEMYAQPKEQMTLLTEMGVTKGTQEEFAGLKYIPVDVVSEDIFNPVVRRSVRISFKILNAVLKKYKALDTIVIEMPRDRNSEEQKKRINDSQKLNEKEMEYIEKKLAVTYGIKLSPSDFSSQKQLSLKLKLWNEQDGICLYSGKTIDPNDIINNPQLFEIDHIIPRSISFDDARSNKVLVYRSENQKKGNQTPYYYLTHSHSEWSFEQYKATVMNLSKKKEYAISRKKIQNLLYSEDITKMDVLKGFINRNINDTSYASRLVLNTIQNFFMANEADTKVKVIKGSYTHQMRCNLKLDKNRDESYSHHAVDAMLIGYSELGYEAYHKLQGEFIDFETGEILRKDMWDENMSDEVYADYLYGKKWANIRNEVVKAEKNVKYWHYVMRKSNRGLCNQTIRGTREYDGKQYKINKLDIRTKEGIKVFAKLAFSKKDSDRERLLVYLNDRRTFDDLCKIYEDYSDAANPFVQYEKETGDIIRKYSKKHNGPRIDKLKYKDGEVGACIDISHKYGFEKGSKKVILESLVPYRMDVYYKEENHSYYLVGVKQSDIKFEKGRNVIDEEAYARILVNEKMIQPGQSRADLENLGFKFKLSFYKNDIIEYEKDGKIYTERLVSRTMPKQRNYIETKPIDKAKFEKQNLVGLGKTKFIKKYRYDILGNKYSCSEEKFTSFC

SEQ ID NO: 344 - protein, 1314 aa, Mycoplasma synoviae
MLRLYCANNLVLNNVQNLWKYLLLLIFDKKIIFLFKIKVILIRRYMENNNKEKIVIGFDLGVASVGWSIVNAETKEVIDLGVRLFSEPEKADYRRAKRTTRRLLRRKKFKREKFHKLILKNAEIFGLQSRNEILNVYKDQSSKYRNILKLKINALKEEIKPSELVWILRDYLQNRGYFYKNEKLTDEFVSNSFPSKKLHEHYEKYGFFRGSVKLDNKLDNKKDKAKEKDEEEESDAKKESEELIFSNKQWINEIVKVFENQSYLTESFKEEYLKLFNYVRPFNKGPGSKNSRTAYGVFSTDIDPETNKFKDYSNIWDKTIGKCSLFEEEIRAPKNLPSALIFNLQNEICTIKNEFTEFKNWWLNAEQKSEILKFVFTELFNWKDKKYSDKKFNKNLQDKIKKYLLNFALENFNLNEEILKNRDLENDTVLGLKGVKYYEKSNATADAALEFSSLKPLYVFIKFLKEKKLDLNYLLGLENTEILYFLDSIYLAISYSSDLKERNEWFKKLLKELYPKIKNNNLEIIENVEDIFEITDQEKFESFSKTHSLSREAFNHIIPLLLSNNEGKNYESLKHSNEELKKRTEKAELKAQQNQKYLKDNFLKEALVPLSVKTSVLQAIKIFNQIIKNFGKKYEISQVVIEMARELTKPNLEKLLNNATNSNIKILKEKLDQTEKFDDFTKKKFIDKIENSVVFRNKLFLWFEQDRKDPYTQLDIKINEIEDETEIDHVIPYSKSADDSWFNKLLVKKSTNQLKKNKTVWEYYQNESDPEAKWNKFVAWAKRIYLVQKSDKESKDNSEKNSIFKNKKPNLKFKNITKKLFDPYKDLGFLARNLNDTRYATKVFRDQLNNYSKHHSKDDENKLFKVVCMNGSITSFLRKSMWRKNEEQVYRFNFWKKDRDQFFHHAVDASIIAIFSLLTKTLYNKLRVYESYDVQRREDGVYLINKETGEVKKADKDYWKDQHNFLKIRENAIEIKNVLNNVDFQNQVRYSRKANTKLNTQLFNETLYGVKEFENNFYKLEKVNLFSRKDLRKFILEDLNEESEKNKKNENGSRKRILTEKYIVDEILQILENEEFKDSKSDINALNKYMDSLPSKFSEFFSQDFINKCKKENSLILTFDAIKHNDPKKVIKIKNLKFFREDATLKNKQAVHKDSKNQIKSFYESYKCVGFIWLKNKNDLEESIFVPINSRVIHFGDKDKDIFDFDSYNKEKLLNEINLKRPENKKFNSINEIEFVKFVKPGALLLNFENQQIYYISTLESSSLRAKIKLLNKMDKGKAVSMKKITNPDEYKIIEHVNPLGINLNWTKKLENNN

SEQ ID NO: 345 - protein, 1197 aa, Porphyromonas sp.
MLMSKHVLGLDLGVGSIGWCLIALDAQGDPAEILGMGSRVVPLNNATKAIEAFNAGAAFTASQERTARRTMRRGFARYQLRRYRLRRELEKVGMLPDAALIQLPLLELWELRERAATAGRRLTLPELGRVLCHINQKRGYRHVKSDAAAIVGDEGEKKKDSNSAYLAGIRANDEKLQAEHKTVGQYFAEQLRQNQSESPTGGISYRIKDQIFSRQCYIDEYDQIMAVQRVHYPDILTDEFIRMLRDEVIFMQRPLKSCKHLVSLCEFEKQERVMRVQQDDGKGGWQLVERRVKFGPKVAPKSSPLFQLCCIYEAVNNIRLTRPNGSPCDITPEERAKIVAHLQSSASLSFAALKKLLKEKALIADQLTSKSGLKGNSTRVALASALQPYPQYHHLLDMELETRMMTVQLTDEETGEVTEREVAVVTDSYVRKPLYRLWHILYSIEEREAMRRALITQLGMKEEDLDGGLLDQLYRLDFVKPGYGNKSAKFICKLLPQLQQGLGYSEACAAVGYRHSNSPTSEEITERTLLEKIPLLQRNELRQPLVEKILNQMINLVNALKAEYGIDEVRVELARELKMSREERERMARNNKDREERNKGVAAKIRECGLYPTKPRIQKYMLWKEAGRQCLYCGRSIEEEQCLREGGMEVEHIIPKSVLYDDSYGNKTCACRRCNKEKGNRTALEYIRAKGREAEYMKRINDLLKEKKISYSKHQRLRWLKEDIPSDFLERQLRLTQYISRQAMAILQQGIRRVSASEGGVTARLRSLWGYGKILHTLNLDRYDSMGETERVSREGEATEELHITNWSKRMDHRHHAIDALVVACTRQSYIQRLNRLSSEFGREDKKKEDQEAQEQQATETGRLSNLERWLTQRPHFSVRTVSDKVAEILISYRPGQRVVTRGRNIYRKKMADGREVSCVQRGVLVPRGELMEASFYGKILSQGRVRIVKRYPLHDLKGEVVDPHLRELITTYNQELKSREKGAPIPPLCLDKDKKQEVRSVRCYAKTLSLDKAIPMCFDEKGEPTAFVKSASNHHLALYRTPKGKLVESIVTFWDAVDRARYGIPLVITHPREVMEQVLQRGDIPEQVLSLLPPSDWVFVDSLQQDEMVVIGLSDEELQRALEAQNYRKISEHLYRVQKMSSSYYVFRYHLETSVADDKNTSGRIPKFHRVQSLKAYEERNIRKVRVDLLGRISLL

SEQ ID NO: 346 - protein, 1121 aa, Streptococcus thermophilus
MSDLVLGLDIGIGSVGVGILNKVTGEIIHKNSRIFPAAQAENNLVRRTNRQGRRLARRKKHRRVRLNRLFEESGLITDFTKISINLNPYQLRVKGLTDELSNEELFIALKNMVKHRGISYLDDASDDGNSSVGDYAQIVKENSKQLETKTPGQIQLERYQTYGQLRGDFTVEKDGKKHRLINVFPTSAYRSEALRILQTQQEFNPQITDEFINRYLEILTGKRKYYHGPGNEKSRTDYGRYRTSGETLDNIFGILIGKCTFYPDEFRAAKASYTAQEFNLLNDLNNLTVPTETKKLSKEQKNQIINYVKNEKAMGPAKLFKYIAKLLSCDVADIKGYRIDKSGKAEIHTFEAYRKMKTLETLDIEQMDRETLDKLAYVLTLNTEREGIQEALEHEFADGSFSQKQVDELVQFRKANSSIFGKGWHNFSVKLMMELIPELYETSEEQMTILTRLGKQKTTSSSNKTKYIDEKLLTEEIYNPVVAKSVRQAIKIVNAAIKEYGDFDNIVIEMARETNEDDEKKAIQKIQKANKDEKDAAMLKAANQYNGKAELPHSVFHGHKQLATKIRLWHQQGERCLYTGKTISIHDLINNSNQFEVDHILPLSITFDDSLANKVLVYATANQEKGQRTPYQALDSMDDAWSFRELKAFVRESKTLSNKKKEYLLTEEDISKFDVRKKFIERNLVDTRYASRVVLNALQEHFRAHKIDTKVSVVRGQFTSQLRRHWGIEKTRDTYHHHAVDALIIAASSQLNLWKKQKNTLVSYSEDQLLDIETGELISDDEYKESVFKAPYQHFVDTLKSKEFEDSILFSYQVDSKFNRKISDATIYATRQAKVGKDKADETYVLGKIKDIYTQDGYDAFMKIYKKDKSKFLMYRHDPQTFEKVIEPILENYPNKQINEKGKEVPCNPFLKYKEEHGYIRKYSKKGNGPEIKSLKYYDSKLGNHIDITPKDSNNKVVLQSVSPWRADVYFNKTTGKYEILGLKYADLQFEKGTGTYKISQEKYNDIKKKEGVDSDSEFKFTLYKNDLLLVKDTETKEQQLFRFLSRTMPKQKHYVELKPYDKQKFEGGEALIKVLGNVANSGQCKKGLGKSNISIYKVRTDVLGNQHIIKNEGDKPKLDF

SEQ ID NO: 347 - protein, 1152 aa, Roseburia inulinivorans
MNAEHGKEGLLIMEENFQYRIGLDIGITSVGWAVLQNNSQDEPVRITDLGVRIFDVAENPKNGDALAAPRRDARTTRRRLRRRRHRLERIKFLLQENGLIEMDSFMERYYKGNLPDVYQLRYEGLDRKLKDEELAQVLIHIAKHRGFRSTRKAETKEKEGGAVLKATTENQKIMQEKGYRTVGEMLYLDEAFHTECLWNEKGYVLTPRNRPDDYKHTILRSMLVEEVHAIFAAQRAHGNQKATEGLEEAYVEIMTSQRSFDMGPGLQPDGKPSPYAMEGFGDRVGKCTFEKDEYRAPKATYTAELFVALQKINHTKLIDEFGTGRFFSEEERKTIIGLLLSSKELKYGTIRKKLNIDPSLKFNSLNYSAKKEGETEEERVLDTEKAKFASMFWTYEYSKCLKDRTEEMPVGEKADLFDRIGEILTAYKNDDSRSSRLKELGLSGEEIDGLLDLSPAKYQRVSLKAMRKMQPYLEDGLIYDKACEAAGYDFRALNDGNKKHLLKGEEINAIVNDITNPVVKRSVSQTIKVINAIIQKYGSPQAVNIELAREMSKNFQDRTNLEKEMKKRQQENERAKQQIIELGKQNPTGQDILKYRLWNDQGGYCLYSGKKIPLEELFDGGYDIDHILPYSITFDDSYRNKVLVTAQENRQKGNRTPYEYFGADEKRWEDYEASVRLLVRDYKKQQKLLKKNFTEEERKEFKERNLNDTKYITRVVYNMIRQNLELEPFNHPEKKKQVWAVNGAVTSYLRKRWGLMQKDRSTDRHHAMDAVVIACCTDGMIHKISRYMQGRELAYSRNFKFPDEETGEILNRDNFTREQWDEKFGVKVPLPWNSFRDELDIRLLNEDPKNFLLTHADVQRELDYPGWMYGEEESPIEEGRYINYIRPLFVSRMPNHKVTGSAHDATIRSARDYETRGVVITKVPLTDLKLNKDNEIEGYYDKDSDRLLYQALVRQLLLHGNDGKKAFAEDFHKPKADGTEGPVVRKVKIEKKQTSGVMVRGGTGIAANGEMVRIDVFRENGKYYFVPVYTADVVRKVLPNRAATHTKPYSEWRVMDDANFVFSLYSRDLIHVKSKKDIKTNLVNGGLLLQKEIFAYYTGADIATASIAGFANDSNFKFRGLGIQSLEIFEKCQVDILGNISVVRHENRQEFH

SEQ ID NO: 348 - protein, 1082 aa, Methylosinus trichosporium
MRVLGLDAGIASLGWALIEIEESNRGELSQGTIIGAGTWMFDAPEEKTQAGAKLKSEQRRTFRGQRRVVRRRRQRMNEVRRILHSHGLLPSSDRDALKQPGLDPWRIRAEALDRLLGPVELAVALGHIARHRGFKSNSKGAKTNDPADDTSKMKRAVNETREKLARFGSAAKMLVEDESFVLRQTPTKNGASEIVRRFRNREGDYSRSLLRDDLAAEMRALFTAQARFQSAIATADLQTAFTKAAFFQRPLQDSEKLVGPCPFEVDEKRAPKRGYSFELFRFLSRLNHVTLRDGKQERTLTRDELALAAADFGAAAKVSFTALRKKLKLPETTVFVGVKADEESKLDVVARSGKAAEGTARLRSVIVDALGELAWGALLCSPEKLDKIAEVISFRSDIGRISEGLAQAGCNAPLVDALTAAASDGRFDPFTGAGHISSKAARNILSGLRQGMTYDKACCAADYDHTASRERGAFDVGGHGREALKRILQEERISRELVGSPTARKALIESIKQVKAIVERYGVPDRIHVELARDVGKSIEEREEITRGIEKRNRQKDKLRGLFEKEVGRPPQDGARGKEELLRFELWSEQMGRCLYTDDYISPSQLVATDDAVQVDHILPWSRFADDSYANKTLCMAKANQDKKGRTPYEWFKAEKTDTEWDAFIVRVEALADMKGFKKRNYKLRNAEEAAAKFRNRNLNDTRWACRLLAEALKQLYPKGEKDKDGKERRRVFSRPGALTDRLRRAWGLQWMKKSTKGDRIPDDRHHALDAIVIAATTESLLQRATREVQEIEDKGLHYDLVKNVTPPWPGFREQAVEAVEKVFVARAERRRARGKAHDATIRHIAVREGEQRVYERRKVAELKLADLDRVKDAERNARLIEKLRNWIEAGSPKDDPPLSPKGDPIFKVRLVTKSKVNIALDTGNPKRPGTVDRGEMARVDVFRKASKKGKYEYYLVPIYPHDIATMKTPPIRAVQAYKPEDEWPEMDSSYEFCWSLVPMTYLQVISSKGEIFEGYYRGMNRSVGAIQLSAHSNSSDVVQGIGARTLTEFKKFNVDRFGRKHEVERELRTWRGETWRGKAYI

SEQ ID NO: 349 - protein, 1156 aa, Ruminococcus albus
MGNYYLGLDVGIGSIGWAVINIEKKRIEDFNVRIFKSGEIQEKNRNSRASQQCRRSRGLRRLYRRKSHRKLRLKNYLSIIGLTTSEKIDYYYETADNNVIQLRNKGLSEKLTPEEIAACLIHICNNRGYKDFYEVNVEDIEDPDERNEYKEEHDSIVLISNLMNEGGYCTPAEMICNCREFDEPNSVYRKFHNSAASKNHYLITRHMLVKEVDLILENQSKYYGILDDKTIAKIKDIIFAQRDFEIGPGKNERFRRFTGYLDSIGKCQFFKDQERGSRFTVIADIYAFVNVLSQYTYTNNRGESVFDTSFANDLINSALKNGSMDKRELKAIAKSYHIDISDKNSDTSLTKCFKYIKVVKPLFEKYGYDWDKLIENYTDTDNNVLNRIGIVLSQAQTPKRRREKLKALNIGLDDGLINELTKLKLSGTANVSYKYMQGSIEAFCEGDLYGKYQAKFNKEIPDIDENAKPQKLPPFKNEDDCEFFKNPVVFRSINETRKLINAIIDKYGYPAAVNIETADELNKTFEDRAIDTKRNNDNQKENDRIVKEIIECIKCDEVHARHLIEKYKLWEAQEGKCLYSGETITKEDMLRDKDKLFEVDHIVPYSLILDNTINNKALVYAEENQKKGQRTPLMYMNEAQAADYRVRVNTMFKSKKCSKKKYQYLMLPDLNDQELLGGWRSRNLNDTRYICKYLVNYLRKNLRFDRSYESSDEDDLKIRDHYRVFPVKSRFTSMFRRWWLNEKTWGRYDKAELKKLTYLDHAADAIIIANCRPEYVVLAGEKLKLNKMYHQAGKRITPEYEQSKKACIDNLYKLFRMDRRTAEKLLSGHGRLTPIIPNLSEEVDKRLWDKNIYEQFWKDDKDKKSCEELYRENVASLYKGDPKFASSLSMPVISLKPDHKYRGTITGEEAIRVKEIDGKLIKLKRKSISEITAESINSIYTDDKILIDSLKTIFEQADYKDVGDYLKKTNQHFFTTSSGKRVNKVTVIEKVPSRWLRKEIDDNNFSLLNDSSYYCIELYKDSKGDNNLQGIAMSDIVHDRKTKKLYLKPDFNYPDDYYTHVMYIFPGDYLRIKSTSKKSGEQLKFEGYFISVKNVNENSFRFISDNKPCAKDKRVSITKKDIVIKLAVDLMGKVQGENNGKGISCGEPLSLLKEKN

SEQ ID NO: 350 - protein, 1187 aa, Bifidobacterium longum
MLSRQLLGASHLARPVSYSYNVQDNDVHCSYGERCFMRGKRYRIGIDVGLNSVGLAAVEVSDENSPVRLLNAQSVIHDGGVDPQKNKEAITRKNMSGVARRTRRMRRRKRERLHKLDMLLGKFGYPVIEPESLDKPFEEWHVRAELATRYIEDDELRRESISIALRHMARHRGWRNPYRQVDSLISDNPYSKQYGELKEKAKAYNDDATAAEEESTPAQLVVAMLDAGYAEAPRLRWRTGSKKPDAEGYLPVRLMQEDNANELKQIFRVQRVPADEWKPLFRSVFYAVSPKGSAEQRVGQDPLAPEQARALKASLAFQEYRIANVITNLRIKDASAELRKLTVDEKQSIYDQLVSPSSEDITWSDLCDFLGFKRSQLKGVGSLTEDGEERISSRPPRLTSVQRIYESDNKIRKPLVAWWKSASDNEHEAMIRLLSNTVDIDKVREDVAYASAIEFIDGLDDDALTKLDSVDLPSGRAAYSVETLQKLTRQMLTTDDDLHEARKTLFNVTDSWRPPADPIGEPLGNPSVDRVLKNVNRYLMNCQQRWGNPVSVNIEHVRSSFSSVAFARKDKREYEKNNEKRSIFRSSLSEQLRADEQMEKVRESDLRRLEAIQRQNGQCLYCGRTITFRTCEMDHIVPRKGVGSTNTRTNFAAVCAECNRMKSNTPFAIWARSEDAQTRGVSLAEAKKRVTMFTFNPKSYAPREVKAFKQAVIARLQQTEDDAAIDNRSIESVAWMADELHRRIDWYFNAKQYVNSASIDDAEAETMKTTVSVFQGRVTASARRAAGIEGKIHFIGQQSKTRLDRRHHAVDASVIAMMNTAAAQTLMERESLRESQRLIGLMPGERSWKEYPYEGTSRYESFHLWLDNMDVLLELLNDALDNDRIAVMQSQRYVLGNSIAHDATIHPLEKVPLGSAMSADLIRRASTPALWCALTRLPDYDEKEGLPEDSHREIRVHDTRYSADDEMGFFASQAAQIAVQEGSADIGSAIHHARVYRCWKTNAKGVRKYFYGMIRVFQTDLLRACHDDLFTVPLPPQSISMRYGEPRVVQALQSGNAQYLGSLVVGDEIEMDFSSLDVDGQIGEYLQFFSQFSGGNLAWKHWVVDGFFNQTQLRIRPRYLAAEGLAKAFSDDVVPDGVQKIVTKQGWLPPVNTASKTAVRIVRRNAFGEPRLSSAHHMPCSWQWRHE

SEQ ID NO: 351 - protein, 1150 aa, Enterococcus faecalis
MYSIGLDLGISSVGWSVIDERTGNVIDLGVRLFSAKNSEKNLERRTNRGGRRLIRRKTNRLKDAKKILAAVGFYEDKSLKNSCPYQLRVKGLTEPLSRGEIYKVTLHILKKRGISYLDEVDTEAAKESQDYKEQVRKNAQLLTKYTPGQIQLQRLKENNRVKTGINAQGNYQLNVFKVSAYANELATILKTQQAFYPNELTDDWIALFVQPGIAEEAGLIYRKRPYYHGPGNEANNSPYGRWSDFQKTGEPATNIFDKLIGKDFQGELRASGLSLSAQQYNLLNDLTNLKIDGEVPLSSEQKEYILTELMTKEFTRFGVNDVVKLLGVKKERLSGWRLDKKGKPEIHTLKGYRNWRKIFAEAGIDLATLPTETIDCLAKVLTLNTEREGIENTLAFELPELSESVKLLVLDRYKELSQSISTQSWHRFSLKTLHLLIPELMNATSEQNTLLEQFQLKSDVRKRYSEYKKLPTKDVLAEIYNPTVNKTVSQAFKVIDALLVKYGKEQIRYITIEMPRDDNEEDEKKRIKELHAKNSQRKNDSQSYFMQKSGWSQEKFQTTIQKNRRFLAKLLYYYEQDGICAYTGLPISPELLVSDSTEIDHIIPISISLDDSINNKVLVLSKANQVKGQQTPYDAWMDGSFKKINGKFSNWDDYQKWVESRHFSHKKENNLLETRNIFDSEQVEKFLARNLNDTRYASRLVLNTLQSFFTNQETKVRVVNGSFTHTLRKKWGADLDKTRETHHHHAVDATLCAVTSFVKVSRYHYAVKEETGEKVMREIDFETGEIVNEMSYWEFKKSKKYERKTYQVKWPNFREQLKPVNLHPRIKFSHQVDRKANRKLSDATIYSVREKTEVKTLKSGKQKITTDEYTIGKIKDIYTLDGWEAFKKKQDKLLMKDLDEKTYERLLSIAETTPDFQEVEEKNGKVKRVKRSPFAVYCEENDIPAIQKYAKKNNGPLIRSLKYYDGKLNKHINITKDSQGRPVEKTKNGRKVTLQSLKPYRYDIYQDLETKAYYTVQLYYSDLRFVEGKYGITEKEYMKKVAEQTKGQVVRFCFSLQKNDGLEIEWKDSQRYDVRFYNFQSANSINFKGLEQEMMPAENQFKQKPYNNGAINLNIAKYGKEGKKLRKFNTDILGKKHYLFYEKEPKNIIK

SEQ ID NO: 352 - protein, 1236 aa, Mycoplasma mobile
MYFYKNKENKLNKKVVLGLDLGIASVGWCLTDISQKEDNKFPIILHGVRLFETVDDSDDKLLNETRRKKRGQRRRNRRLFTRKRDFIKYLIDNNIIELEFDKNPKILVRNFIEKYINPFSKNLELKYKSVTNLPIGFHNLRKAAINEKYKLDKSELIVLLYFYLSLRGAFFDNPEDTKSKEMNKNEIEIFDKNESIKNAEFPIDKIIEFYKISGKIRSTINLKFGHQDYLKEIKQVFEKQNIDFMNYEKFAMEEKSFFSRIRNYSEGPGNEKSFSKYGLYANENGNPELIINEKGQKIYTKIFKTLWESKIGKCSYDKKLYRAPKNSFSAKVFDITNKLTDWKHKNEYISERLKRKILLSRFLNKDSKSAVEKILKEENIKFENLSEIAYNKDDNKINLPIINAYHSLTTIFKKHLINFENYLISNENDLSKLMSFYKQQSEKLFVPNEKGSYEINQNNNVLHIFDAISNILNKFSTIQDRIRILEGYFEFSNLKKDVKSSEIYSEIAKLREFSGTSSLSFGAYYKFIPNLISEGSKNYSTISYEEKALQNQKNNFSHSNLFEKTWVEDLIASPTVKRSLRQTMNLLKEIFKYSEKNNLEIEKIVVEVTRSSNNKHERKKIEGINKYRKEKYEELKKVYDLPNENTTLLKKLWLLRQQQGYDAYSLRKIEANDVINKPWNYDIDHIVPRSISFDDSFSNLVIVNKLDNAKKSNDLSAKQFIEKIYGIEKLKEAKENWGNWYLRNANGKAFNDKGKFIKLYTIDNLDEFDNSDFINRNLSDTSYITNALVNHLTFSNSKYKYSVVSVNGKQTSNLRNQIAFVGIKNNKETEREWKRPEGFKSINSNDFLIREEGKNDVKDDVLIKDRSFNGHHAEDAYFITIISQYFRSFKRIERLNVNYRKETRELDDLEKNNIKFKEKASFDNFLLINALDELNEKLNQMRFSRMVITKKNTQLFNETLYSGKYDKGKNTIKKVEKLNLLDNRTDKIKKIEEFFDEDKLKENELTKLHIFNHDKNLYETLKIIWNEVKIEIKNKNLNEKNYFKYFVNKKLQEGKISFNEWVPILDNDFKIIRKIRYIKFSSEEKETDEIIFSQSNFLKIDQRQNFSFHNTLYWVQIWVYKNQKDQYCFISIDARNSKFEKDEIKINYEKLKTQKEKLQIINEEPILKINKGDLFENEEKELFYIVGRDEKPQKLEIKYILGKKIKDQKQIQKPVKKYFPNWKKVNLTYMGEIFKK

SEQ ID NO: 353 - protein, 1105 aa, Actinomyces coleocanis
MDNKNYRIGIDVGLNSIGFCAVEVDQHDTPLGFLNLSVYRHDAGIDPNGKKTNTTRLAMSGVARRTRRLFRKRKRRLAALDRFIEAQGWTLPDHADYKDPYTPWLVRAELAQTPIRDENDLHEKLAIAVRHIARHRGWRSPWVPVRSLHVEQPPSDQYLALKERVEAKTLLQMPEGATPAEMVVALDLSVDVNLRPKNREKTDTRPENKKPGFLGGKLMQSDNANELRKIAKIQGLDDALLRELIELVFAADSPKGASGELVGYDVLPGQHGKRRAEKAHPAFQRYRIASIVSNLRIRHLGSGADERLDVETQKRVFEYLLNAKPTADITWSDVAEEIGVERNLLMGTATQTADGERASAKPPVDVTNVAFATCKIKPLKEWWLNADYEARCVMVSALSHAEKLTEGTAAEVEVAEFLQNLSDEDNEKLDSFSLPIGRAAYSVDSLERLTKRMIENGEDLFEARVNEFGVSEDWRPPAEPIGARVGNPAVDRVLKAVNRYLMAAEAEWGAPLSVNIEHVREGFISKRQAVEIDRENQKRYQRNQAVRSQIADHINATSGVRGSDVTRYLAIQRQNGECLYCGTAITFVNSEMDHIVPRAGLGSTNTRDNLVATCERCNKSKSNKPFAVWAAECGIPGVSVAEALKRVDFWIADGFASSKEHRELQKGVKDRLKRKVSDPEIDNRSMESVAWMARELAHRVQYYFDEKHTGTKVRVFRGSLTSAARKASGFESRVNFIGGNGKTRLDRRHHAMDAATVAMLRNSVAKTLVLRGNIRASERAIGAAETWKSFRGENVADRQIFESWSENMRVLVEKFNLALYNDEVSIFSSLRLQLGNGKAHDDTITKLQMHKVGDAWSLTEIDRASTPALWCALTRQPDFTWKDGLPANEDRTIIVNGTHYGPLDKVGIFGKAAASLLVRGGSVDIGSAIHHARIYRIAGKKPTYGMVRVFAPDLLRYRNEDLFNVELPPQSVSMRYAEPKVREAIREGKAEYLGWLVVGDELLLDLSSETSGQIAELQQDFPGTTHWTVAGFFSPSRLRLRPVYLAQEGLGEDVSEGSKSIIAGQGWRPAVNKVFGSAMPEVIRRDGLGRKRRFSYSGLPVSWQG

SEQ ID NO: 354 - protein, 1079 aa, Dinoroseobacter shibae
MRLGLDIGTSSIGWWLYETDGAGSDARITGVVDGGVRIFSDGRDPKSGASLAVDRRAARAMRRRRDRYLRRRATLMKVLAETGLMPADPAEAKALEALDPFALRAAGLDEPLPLPHLGRALFHLNQRRGFKSNRKTDRGDNESGKIKDATARLDMEMMANGARTYGEFLHKRRQKATDPRHVPSVRTRLSIANRGGPDGKEEAGYDFYPDRRHLEEEFHKLWAAQGAHHPELTETLRDLLFEKIFFQRPLKEPEVGLCLFSGHHGVPPKDPRLPKAHPLTQRRVLYETVNQLRVTADGREARPLTREERDQVIHALDNKKPTKSLSSMVLKLPALAKVLKLRDGERFTLETGVRDAIACDPLRASPAHPDRFGPRWSILDADAQWEVISRIRRVQSDAEHAALVDWLTEAHGLDRAHAEATAHAPLPDGYGRLGLTATTRILYQLTADVVTYADAVKACGWHHSDGRTGECFDRLPYYGEVLERHVIPGSYHPDDDDITRFGRITNPTVHIGLNQLRRLVNRIIETHGKPHQIVVELARDLKKSEEQKRADIKRIRDTTEAAKKRSEKLEELEIEDNGRNRMLLRLWEDLNPDDAMRRFCPYTGTRISAAMIFDGSCDVDHILPYSRTLDDSFPNRTLCLREANRQKRNQTPWQAWGDTPHWHAIAANLKNLPENKRWRFAPDAMTRFEGENGFLDRALKDTQYLARISRSYLDTLFTKGGHVWVVPGRFTEMLRRHWGLNSLLSDAGRGAVKAKNRTDHRHHAIDAAVIAATDPGLLNRISRAAGQGEAAGQSAELIARDTPPPWEGFRDDLRVRLDRIIVSHRADHGRIDHAARKQGRDSTAGQLHQETAYSIVDDIHVASRTDLLSLKPAQLLDEPGRSGQVRDPQLRKALRVATGGKTGKDFENALRYFASKPGPYQAIRRVRIIKPLQAQARVPVPAQDPIKAYQGGSNHLFEIWRLPDGEIEAQVITSFEAHTLEGEKRPHPAAKRLLRVHKGDMVALERDGRRVVGHVQKMDIANGLFIVPHNEANADTRNNDKSDPFKWIQIGARPAIASGIRRVSVDEIGRLRDGGTRPI

SEQ ID NO: 355 - protein, 1181 aa, Actinomyces sp.
MLHCIAVIRVPPSEEPGFFETHADSCALCHHGCMTYAANDKAIRYRVGIDVGLRSIGFCAVEVDDEDHPIRILNSVVHVHDAGTGGPGETESLRKRSGVAARARRRGRAEKQRLKKLDVLLEELGWGVSSNELLDSHAPWHIRKRLVSEYIEDETERRQCLSVAMAHIARHRGWRNSFSKVDTLLLEQAPSDRMQGLKERVEDRTGLQFSEEVTQGELVATLLEHDGDVTIRGFVRKGGKATKVHGVLEGKYMQSDLVAELRQICRTQRVSETTFEKLVLSIFHSKEPAPSAARQRERVGLDELQLALDPAAKQPRAERAHPAFQKFKVVATLANMRIREQSAGERSLTSEELNRVARYLLNHTESESPTWDDVARKLEVPRHRLRGSSRASLETGGGLTYPPVDDTTVRVMSAEVDWLADWWDCANDESRGHMIDAISNGCGSEPDDVEDEEVNELISSATAEDMLKLELLAKKLPSGRVAYSLKTLREVTAAILETGDDLSQAITRLYGVDPGWVPTPAPIEAPVGNPSVDRVLKQVARWLKFASKRWGVPQTVNIEHTREGLKSASLLEEERERWERFEARREIRQKEMYKRLGISGPFRRSDQVRYEILDLQDCACLYCGNEINFQTFEVDHIIPRVDASSDSRRTNLAAVCHSCNSAKGGLAFGQWVKRGDCPSGVSLENAIKRVRSWSKDRLGLTEKAMGKRKSEVISRLKTEMPYEEFDGRSMESVAWMAIELKKRIEGYFNSDRPEGCAAVQVNAYSGRLTACARRAAHVDKRVRLIRLKGDDGHHKNRFDRRNHAMDALVIALMTPAIARTIAVREDRREAQQLTRAFESWKNFLGSEERMQDRWESWIGDVEYACDRLNELIDADKIPVTENLRLRNSGKLHADQPESLKKARRGSKRPRPQRYVLGDALPADVINRVTDPGLWTALVRAPGFDSQLGLPADLNRGLKLRGKRISADFPIDYFPTDSPALAVQGGYVGLEFHHARLYRIIGPKEKVKYALLRVCAIDLCGIDCDDLFEVELKPSSISMRTADAKLKEAMGNGSAKQIGWLVLGDEIQIDPTKFPKQSIGKFLKECGPVSSWRVSALDTPSKITLKPRLLSNEPLLKTSRVGGHESDLVVAECVEKIMKKTGWVVEINALCQSGLIRVIRRNALGEVRTSPKSGLPISLNLR

SEQ ID NO: 356 - protein, 1113 aa, Alcanivorax sp.
MRYRVGLDLGTASVGAAVFSMDEQGNPMELIWHYERLFSEPLVPDMGQLKPKKAARRLARQQRRQIDRRASRLRRIAIVSRRLGIAPGRNDSGVHGNDVPTLRAMAVNERIELGQLRAVLLRMGKKRGYGGTFKAVRKVGEAGEVASGASRLEEEMVALASVQNKDSVTVGEYLAARVEHGLPSKLKVAANNEYYAPEYALFRQYLGLPAIKGRPDCLPNMYALRHQIEHEFERIWATQSQFHDVMKDHGVKEEIRNAIFFQRPLKSPADKVGRCSLQTNLPRAPRAQIAAQNFRIEKQMADLRWGMGRRAEMLNDHQKAVIRELLNQQKELSFRKIYKELERAGCPGPEGKGLNMDRAALGGRDDLSGNTTLAAWRKLGLEDRWQELDEVTQIQVINFLADLGSPEQLDTDDWSCRFMGKNGRPRNFSDEFVAFMNELRMTDGFDRLSKMGFEGGRSSYSIKALKALTEWMIAPHWRETPETHRVDEEAAIRECYPESLATPAQGGRQSKLEPPPLTGNEVVDVALRQVRHTINMMIDDLGSVPAQIVVEMAREMKGGVTRRNDIEKQNKRFASERKKAAQSIEENGKTPTPARILRYQLWIEQGHQCPYCESNISLEQALSGAYTNFEHILPRTLTQIGRKRSELVLAHRECNDEKGNRTPYQAFGHDDRRWRIVEQRANALPKKSSRKTRLLLLKDFEGEALTDESIDEFADRQLHESSWLAKVTTQWLSSLGSDVYVSRGSLTAELRRRWGLDTVIPQVRFESGMPVVDEEGAEITPEEFEKFRLQWEGHRVTREMRTDRRPDKRIDHRHHLVDAIVTALTSRSLYQQYAKAWKVADEKQRHGRVDVKVELPMPILTIRDIALEAVRSVRISHKPDRYPDGRFFEATAYGIAQRLDERSGEKVDWLVSRKSLTDLAPEKKSIDVDKVRANISRIVGEAIRLHISNIFEKRVSKGMTPQQALREPIEFQGNILRKVRCFYSKADDCVRIEHSSRRGHHYKMLLNDGFAYMEVPCKEGILYGVPNLVRPSEAVGIKRAPESGDFIRFYKGDTVKNIKTGRVYTIKQILGDGGGKLILTPVTETKPADLLSAKWGRLKVGGRNIHLLRLCAE

SEQ ID NO: 357 - protein, 1052 aa, Aminomonas paucivorans
MIGEHVRGGCLFDDHWTPNWGAFRLPNTVRTFTKAENPKDGSSLAEPRRQARGLRRRLRRKTQRLEDLRRLLAKEGVLSLSDLETLFRETPAKDPYQLRAEGLDRPLSFPEWVRVLYHITKHRGFQSNRRNPVEDGQERSRQEEEGKLLSGVGENERLLREGGYRTAGEMLARDPKFQDHRRNRAGDYSHTLSRSLLLEEARRLFQSQRTLGNPHASSNLEEAFLHLVAFQNPFASGEDIRNKAGHCSLEPDQIRAPRRSASAETFMLLQKTGNLRLIHRRTGEERPLTDKEREQIHLLAWKQEKVTHKTLRRHLEIPEEWLFTGLPYHRSGDKAEEKLFVHLAGIHEIRKALDKGPDPAVWDTLRSRRDLLDSIADTLTFYKNEDEILPRLESLGLSPENARALAPLSFSGTAHLSLSALGKLLPHLEEGKSYTQARADAGYAAPPPDRHPKLPPLEEADWRNPVVFRALTQTRKVVNALVRRYGPPWCIHLETARELSQPAKVRRRIETEQQANEKKKQQAEREFLDIVGTAPGPGDLLKMRLWREQGGFCPYCEEYLNPTRLAEPGYAEMDHILPYSRSLDNGWHNRVLVHGKDNRDKGNRTPFEAFGGDTARWDRLVAWVQASHLSAPKKRNLLREDFGEEAERELKDRNLTDTRFITKTAATLLRDRLTFHPEAPKDPVMTLNGRLTAFLRKQWGLHKNRKNGDLHHALDAAVLAVASRSFVYRLSSHNAAWGELPRGREAENGFSLPYPAFRSEVLARLCPTREEILLRLDQGGVGYDEAFRNGLRPVFVSRAPSRRLRGKAHMETLRSPKWKDHPEGPRTASRIPLKDLNLEKLERMVGKDRDRKLYEALRERLAAFGGNGKKAFVAPFRKPCRSGEGPLVRSLRIFDSGYSGVELRDGGEVYAVADHESMVRVDVYAKKNRFYLVPVYVADVARGIVKNRAIVAHKSEEEWDLVDGSFDFRFSLFPGDLVEIEKKDGAYLGYYKSCHRGDGRLLLDRHDRMPRESDCGTFYVSTRKDVLSMSKYQVDPLGEIRLVGSEKPPFVL

SEQ ID NO: 358 - protein, 1233 aa, Mycoplasma canis
MEKKRKVTLGFDLGIASVGWAIVDSETNQVYKLGSRLFDAPDTNLERRTQRGTRRLLRRRKYRNQKFYNLVKRTEVFGLSSREAIENRFRELSIKYPNIIELKTKALSQEVCPDEIAWILHDYLKNRGYFYDEKETKEDFDQQTVESMPSYKLNEFYKKYGYFKGALSQPTESEMKDNKDLKEAFFFDFSNKEWLKEINYFFNVQKNILSETFIEEFKKIFSFTRDISKGPGSDNMPSPYGIFGEFGDNGQGGRYEHIWDKNIGKCSIFTNEQRAPKYLPSALIFNFLNELANIRLYSTDKKNIQPLWKLSSVDKLNILLNLFNLPISEKKKKLTSTNINDIVKKESIKSIMISVEDIDMIKDEWAGKEPNVYGVGLSGLNIEESAKENKFKFQDLKILNVLINLLDNVGIKFEFKDRNDIIKNLELLDNLYLFLIYQKESNNKDSSIDLFIAKNESLNIENLKLKLKEFLLGAGNEFENHNSKTHSLSKKAIDEILPKLLDNNEGWNLEAIKNYDEEIKSQIEDNSSLMAKQDKKYLNDNFLKDAILPPNVKVTFQQAILIFNKIIQKFSKDFEIDKVVIELAREMTQDQENDALKGIAKAQKSKKSLVEERLEANNIDKSVFNDKYEKLIYKIFLWISQDFKDPYTGAQISVNEIVNNKVEIDHIIPYSLCFDDSSANKVLVHKQSNQEKSNSLPYEYIKQGHSGWNWDEFTKYVKRVFVNNVDSILSKKERLKKSENLLTASYDGYDKLGFLARNLNDTRYATILFRDQLNNYAEHHLIDNKKMFKVIAMNGAVTSFIRKNMSYDNKLRLKDRSDFSHHAYDAAIIALFSNKTKTLYNLIDPSLNGIISKRSEGYWVIEDRYTGEIKELKKEDWTSIKNNVQARKIAKEIEEYLIDLDDEVFFSRKTKRKTNRQLYNETIYGIATKTDEDGITNYYKKEKFSILDDKDIYLRLLREREKFVINQSNPEVIDQIIEIIESYGKENNIPSRDEAINIKYTKNKINYNLYLKQYMRSLTKSLDQFSEEFINQMIANKTFVLYNPTKNTTRKIKFLRLVNDVKINDIRKNQVINKFNGKNNEPKAFYENINSLGAIVFKNSANNFKTLSINTQIAIFGDKNWDIEDFKTYNMEKIEKYKEIYGIDKTYNFHSFIFPGTILLDKQNKEFYYISSIQTVRDIIEIKFLNKIEFKDENKNQDTSKTPKRLMFGIKSIMNNYEQVDISPFGINKKIFE

SEQ ID NO: 359 - protein, 1119 aa, Lactobacillus coryniformis
MGYRIGLDVGITSTGYAVLKTDKNGLPYKILTLDSVIYPRAENPQTGASLAEPRRIKRGLRRRTRRTKFRKQRTQQLFIHSGLLSKPEIEQILATPQAKYSVYELRVAGLDRRLTNSELFRVLYFFIGHRGFKSNRKAELNPENEADKKQMGQLLNSIEEIRKAIAEKGYRTVGELYLKDPKYNDHKRNKGYIDGYLSTPNRQMLVDEIKQILDKQRELGNEKLTDEFYATYLLGDENRAGIFQAQRDFDEGPGAGPYAGDQIKKMVGKDIFEPTEDRAAKATYTFQYFNLLQKMTSLNYQNTTGDTWHTLNGLDRQAIIDAVFAKAEKPTKTYKPTDFGELRKLLKLPDDARFNLVNYGSLQTQKEIETVEKKTRFVDFKAYHDLVKVLPEEMWQSRQLLDHIGTALTLYSSDKRRRRYFAEELNLPAELIEKLLPLNFSKFGHLSIKSMQNIIPYLEMGQVYSEATTNTGYDFRKKQISKDTIREEITNPVVRRAVTKTIKIVEQIIRRYGKPDGINIELARELGRNFKERGDIQKRQDKNRQTNDKIAAELTELGIPVNGQNIIRYKLHKEQNGVDPYTGDQIPFERAFSEGYEVDHIIPYSISWDDSYTNKVLTSAKCNREKGNRIPMVYLANNEQRLNALTNIADNIIRNSRKRQKLLKQKLSDEELKDWKQRNINDTRFITRVLYNYFRQAIEFNPELEKKQRVLPLNGEVTSKIRSRWGFLKVREDGDLHHAIDATVIAAITPKFIQQVTKYSQHQEVKNNQALWHDAEIKDAEYAAEAQRMDADLFNKIFNGFPLPWPEFLDELLARISDNPVEMMKSRSWNTYTPIEIAKLKPVFVVRLANHKISGPAHLDTIRSAKLFDEKGIVLSRVSITKLKINKKGQVATGDGIYDPENSNNGDKVVYSAIRQALEAHNGSGELAFPDGYLEYVDHGTKKLVRKVRVAKKVSLPVRLKNKAAADNGSMVRIDVFNTGKKFVFVPIYIKDTVEQVLPNKAIARGKSLWYQITESDQFCFSLYPGDMVHIESKTGIKPKYSNKENNTSVVPIKNFYGYFDGADIATASILVRAHDSSYTARSIGIAGLLKFEKYQVDYFGRYHKVHEKKRQLFVKRDE

SEQ ID NO: 360 - protein, 1195 aa, Elusimicrobium minutum
MQKNINTKQNHIYIKQAQKIKEKLGDKPYRIGLDLGVGSIGFAIVSMEENDGNVLLPKEIIMVGSRIFKASAGAADRKLSRGQRNNHRHTRERMRYLWKVLAEQKLALPVPADLDRKENSSEGETSAKRFLGDVLQKDIYELRVKSLDERLSLQELGYVLYHIAGHRGSSAIRTFENDSEEAQKENTENKKIAGNIKRLMAKKNYRTYGEYLYKEFFENKEKHKREKISNAANNHKFSPTRDLVIKEAEAILKKQAGKDGFHKELTEEYIEKLTKAIGYESEKLIPESGFCPYLKDEKRLPASHKLNEERRLWETLNNARYSDPIVDIVTGEITGYYEKQFTKEQKQKLFDYLLTGSELTPAQTKKLLGLKNTNFEDIILQGRDKKAQKIKGYKLIKLESMPFWARLSEAQQDSFLYDWNSCPDEKLLTEKLSNEYHLTEEEIDNAFNEIVLSSSYAPLGKSAMLIILEKIKNDLSYTEAVEEALKEGKLTKEKQAIKDRLPYYGAVLQESTQKIIAKGFSPQFKDKGYKTPHTNKYELEYGRIANPVVHQTLNELRKLVNEIIDILGKKPCEIGLETARELKKSAEDRSKLSREQNDNESNRNRIYEIYIRPQQQVIITRRENPRNYILKFELLEEQKSQCPFCGGQISPNDIINNQADIEHLFPIAESEDNGRNNLVISHSACNADKAKRSPWAAFASAAKDSKYDYNRILSNVKENIPHKAWRFNQGAFEKFIENKPMAARFKTDNSYISKVAHKYLACLFEKPNIICVKGSLTAQLRMAWGLQGLMIPFAKQLITEKESESFNKDVNSNKKIRLDNRHHALDAIVIAYASRGYGNLLNKMAGKDYKINYSERNWLSKILLPPNNIVWENIDADLESFESSVKTALKNAFISVKHDHSDNGELVKGTMYKIFYSERGYTLTTYKKLSALKLTDPQKKKTPKDFLETALLKFKGRESEMKNEKIKSAIENNKRLFDVIQDNLEKAKKLLEEENEKSKAEGKKEKNINDASIYQKAISLSGDKYVQLSKKEPGKFFAISKPTPTTTGYGYDTGDSLCVDLYYDNKGKLCGEIIRKIDAQQKNPLKYKEQGFTLFERIYGGDILEVDFDIHSDKNSFRNNTGSAPENRVFIKVGTFTEITNNNIQIWFGNIIKSTGGQDDSFTINSMQQYNPRKLILSSCGFIKYRSPILKNKEG

SEQ ID NO: 361 - protein, 1082 aa, Neisseria meningitidis; identical to SEQ ID NO: 25

SEQ ID NO: 362 - protein, 1056 aa, Pasteurella multocida
MQTTNLSYILGLDLGIASVGWAVVEINENEDPIGLIDVGVRIFERAEVPKTGESLALSRRLARSTRRLIRRRAHRLLLAKRFLKREGILSTIDLEKGLPNQAWELRVAGLERRLSAIEWGAVLLHLIKHRGYLSKRKNESQTNNKELGALLSGVAQNHQLLQSDDYRTPAELALKKFAKEEGHIRNQRGAYTHTFNRLDLLAELNLLFAQQHQFGNPHCKEHIQQYMTELLMWQKPALSGEAILKMLGKCTHEKNEFKAAKHTYSAERFVWLTKLNNLRILEDGAERALNEEERQLLINHPYEKSKLTYAQVRKLLGLSEQAIFKHLRYSKENAESATFMELKAWHAIRKALENQGLKDTWQDLAKKPDLLDEIGTAFSLYKTDEDIQQYLTNKVPNSVINALLVSLNFDKFIELSLKSLRKILPLMEQGKRYDQACREIYGHHYGEANQKTSQLLPAIPAQEIRNPVVLRTLSQARKVINAIIRQYGSPARVHIETGRELGKSFKERREIQKQQEDNRTKRESAVQKFKELFSDFSSEPKSKDILKFRLYEQQHGKCLYSGKEINIHRLNEKGYVEIDHALPFSRTWDDSFNNKVLVLASENQNKGNQTPYEWLQGKINSERWKNFVALVLGSQCSAAKKQRLLTQVIDDNKFIDRNLNDTRYIARFLSNYIQENLLLVGKNKKNVFTPNGQITALLRSRWGLIKARENNNRHHALDAIVVACATPSMQQKITRFIRFKEVHPYKIENRYEMVDQESGEIISPHFPEPWAYFRQEVNIRVFDNHPDTVLKEMLPDRPQANHQFVQPLFVSRAPTRKMSGQGHMETIKSAKRLAEGISVLRIPLTQLKPNLLENMVNKEREPALYAGLKARLAEFNQDPAKAFATPFYKQGGQQVKAIRVEQVQKSGVLVRENNGVADNASIVRTDVFIKNNKFFLVPIYTWQVAKGILPNKAIVAHKNEDEWEEMDEGAKFKFSLFPNDLVELKTKKEYFFGYYIGLDRATGNISLKEHDGEISKGKDGVYRVGVKLALSFEKYQVDELGKNRQICRPQQRQPVR

SEQ ID NO: 363 - protein, 1059 aa, Rhodovulum sp.
MGIRFAFDLGTNSIGWAVWRTGPGVFGEDTAASLDGSGVLIFKDGRNPKDGQSLATMRRVPRQSRKRRDRFVLRRRDLLAALRKAGLFPVDVEEGRRLAATDPYHLRAKALDESLTPHEMGRVIFHLNQRRGFRSNRKADRQDREKGKIAEGSKRLAETLAATNCRTLGEFLWSRHRGTPRTRSPTRIRMEGEGAKALYAFYPTREMVRAEFERLWTAQSRFAPDLLTPERHEEIAGILFRQRDLAPPKIGCCTFEPSERRLPRALPSVEARGIYERLAHLRITTGPVSDRGLTRPERDVLASALLAGKSLTFKAVRKTLKILPHALVNFEEAGEKGLDGALTAKLLSKPDHYGAAWHGLSFAEKDTFVGKLLDEADEERLIRRLVTENRLSEDAARRCASIPLADGYGRLGRTANTEILAALVEETDETGTVVTYAEAVRRAGERTGRNWHHSDERDGVILDRLPYYGEILQRHVVPGSGEPEEKNEAARWGRLANPTVHIGLNQLRKVVNRLIAAHGRPDQIVVELARELKLNREQKERLDRENRKNREENERRTAILAEHGQRDTAENKIRLRLFEEQARANAGIALCPYTGRAIGIAELFTSEVEIDHILPVSLTLDDSLANRVLCRREANREKRRQTPFQAFGATPAWNDIVARAAKLPPNKRWRFDPAALERFEREGGFLGRQLNETKYLSRLAKIYLGKICDPDRVYVTPGTLTGLLRARWGLNSILSDSNFKNRSDHRHHAVDAVVIGVLTRGMIQRIAHDAARAEDQDLDRVFRDVPVPFEDFRDHVRERVSTITVAVKPEHGKGGALHEDTSYGLVPDTDPNAALGNLVVRKPIRSLTAGEVDRVRDRALRARLGALAAPFRDESGRVRDAKGLAQALEAFGAENGIRRVRILKPDASVVTIADRRTGVPYRAVAPGENHHVDIVQMRDGSWRGFAASVFEVNRPGWRPEWEVKKLGGKLVMRLHKGDMVELSDKDGQRRVKVVQQIEISANRVRLSPHNDGGKLQDRHADADDPFRWDLATIPLLKDRGCVAVRVDPIGVVTLRRSNV

SEQ ID NO: 364 - protein, 1096 aa, Eubacterium dolichum
MMEVFMGRLVLGLDIGITSVGFGIIDLDESEIVDYGVRLFKEGTAAENETRRTKRGGRRLKRRRVTRREDMLHLLKQAGIISTSFHPLNNPYDVRVKGLNERLNGEELATALLHLCKHRGSSVETIEDDEAKAKEAGETKKVLSMNDQLLKSGKYVCEIQKERLRTNGHIRGHENNFKTRAYVDEAFQILSHQDLSNELKSAIITIISRKRMYYDGPGGPLSPTPYGRYTYFGQKEPIDLIEKMRGKCSLFPNEPRAPKLAYSAELFNLLNDLNNLSIEGEKLTSEQKAMILKIVHEKGKITPKQLAKEVGVSLEQIRGFRIDTKGSPLLSELTGYKMIREVLEKSNDEHLEDHVFYDEIAEILTKTKDIEGRKKQISELSSDLNEESVHQLAGLTKFTAYHSLSFKALRLINEEMLKTELNQMQSITLFGLKQNNELSVKGMKNIQADDTAILSPVAKRAQRETFKVVNRLREIYGEFDSIVVEMAREKNSEEQRKAIRERQKFFEMRNKQVADIIGDDRKINAKLREKLVLYQEQDGKTAYSLEPIDLKLLIDDPNAYEVDHIIPISISLDDSITNKVLVTHRENQEKGNLTPISAFVKGRFTKGSLAQYKAYCLKLKEKNIKTNKGYRKKVEQYLLNENDIYKYDIQKEFINRNLVDTSYASRVVLNTLTTYFKQNEIPTKVFTVKGSLTNAFRRKINLKKDRDEDYGHHAIDALIIASMPKMRLLSTIFSRYKIEDIYDESTGEVFSSGDDSMYYDDRYFAFIASLKAIKVRKFSHKIDTKPNRSVADETIYSTRVIDGKEKVVKKYKDIYDPKFTALAEDILNNAYQEKYLMALHDPQTFDQIVKVVNYYFEEMSKSEKYFTKDKKGRIKISGMNPLSLYRDEHGMLKKYSKKGDGPAITQMKYFDGVLGNHIDISAHYQVRDKKVVLQQISPYRTDFYYSKENGYKFVTIRYKDVRWSEKKKKYVIDQQDYAMKKAEKKIDDTYEFQFSMHRDELIGITKAEGEALIYPDETWHNFNFFFHAGETPEILKFTATNNDKSNKIEVKPIHCYCKMRLMPTISKKIVRIDKYATDVVGNLYKVKKNTLKFEFD

SEQ ID NO: 365 - protein, 1132 aa, Nitratifractor salsuginis
MKKILGVDLGITSFGYAILQETGKDLYRCLDNSVVMRNNPYDEKSGESSQSIRSTQKSMRRLIEKRKKRIRCVAQTMERYGILDYSETMKINDPKNNPIKNRWQLRAVDAWKRPLSPQELFAIFAHMAKHRGYKSIATEDLIYELELELGLNDPEKESEKKADERRQVYNALRHLEELRKKYGGETIAQTIHRAVEAGDLRSYRNHDDYEKMIRREDIEEEIEKVLLRQAELGALGLPEEQVSELIDELKACITDQEMPTIDESLFGKCTFYKDELAAPAYSYLYDLYRLYKKLADLNIDGYEVTQEDREKVIEWVEKKIAQGKNLKKITHKDLRKILGLAPEQKIFGVEDERIVKGKKEPRTFVPFFFLADIAKFKELFASIQKHPDALQIFRELAEILQRSKTPQEALDRLRALMAGKGIDTDDRELLELFKNKRSGTRELSHRYILEALPLFLEGYDEKEVQRILGFDDREDYSRYPKSLRHLHLREGNLFEKEENPINNHAVKSLASWALGLIADLSWRYGPFDEIILETTRDALPEKIRKEIDKAMREREKALDKIIGKYKKEFPSIDKRLARKIQLWERQKGLDLYSGKVINLSQLLDGSADIEHIVPQSLGGLSTDYNTIVTLKSVNAAKGNRLPGDWLAGNPDYRERIGMLSEKGLIDWKKRKNLLAQSLDEIYTENTHSKGIRATSYLEALVAQVLKRYYPFPDPELRKNGIGVRMIPGKVTSKTRSLLGIKSKSRETNFHHAEDALILSTLTRGWQNRLHRMLRDNYGKSEAELKELWKKYMPHIEGLTLADYIDEAFRRFMSKGEESLFYRDMFDTIRSISYWVDKKPLSASSHKETVYSSRHEVPTLRKNILEAFDSLNVIKDRHKLTTEEFMKRYDKEIRQKLWLHRIGNTNDESYRAVEERATQIAQILTRYQLMDAQNDKEIDEKFQQALKELITSPIEVTGKLLRKMRFVYDKLNAMQIDRGLVETDKNMLGIHISKGPNEKLIFRRMDVNNAHELQKERSGILCYLNEMLFIFNKKGLIHYGCLRSYLEKGQGSKYIALFNPRFPANPKAQPSKFTSDSKIKQVGIGSATGIIKAHLDLDGHVRSYEVFGTLPEGSIEWFKEESGYGRVEDDPHH

SEQ ID NO: 366 - protein, 1173 aa, Rhodospirillum rubrum
MRPIEPWILGLDIGTDSLGWAVFSCEEKGPPTAKELLGGGVRLFDSGRDAKDHTSRQAERGAFRRARRQTRTWPWRRDRLIALFQAAGLTPPAAETRQIALALRREAVSRPLAPDALWAALLHLAHHRGFRSNRIDKRERAAAKALAKAKPAKATAKATAPAKEADDEAGFWEGAEAALRQRMAASGAPTVGALLADDLDRGQPVRMRYNQSDRDGVVAPTRALIAEELAEIVARQSSAYPGLDWPAVTRLVLDQRPLRSKGAGPCAFLPGEDRALRALPTVQDFIIRQTLANLRLPSTSADEPRPLTDEEHAKALALLSTARFVEWPALRRALGLKRGVKFTAETERNGAKQAARGTAGNLTEAILAPLIPGWSGWDLDRKDRVFSDLWAARQDRSALLALIGDPRGPTRVTEDETAEAVADAIQIVLPTGRASLSAKAARAIAQAMAPGIGYDEAVTLALGLHHSHRPRQERLARLPYYAAALPDVGLDGDPVGPPPAEDDGAAAEAYYGRIGNISVHIALNETRKIVNALLHRHGPILRLVMVETTRELKAGADERKRMIAEQAERERENAEIDVELRKSDRWMANARERRQRVRLARRQNNLCPYTSTPIGHADLLGDAYDIDHVIPLARGGRDSLDNMVLCQSDANKTKGDKTPWEAFHDKPGWIAQRDDFLARLDPQTAKALAWRFADDAGERVARKSAEDEDQGFLPRQLTDTGYIARVALRYLSLVTNEPNAVVATNGRLTGLLRLAWDITPGPAPRDLLPTPRDALRDDTAARRFLDGLTPPPLAKAVEGAVQARLAALGRSRVADAGLADALGLTLASLGGGGKNRADHRHHFIDAAMIAVTTRGLINQINQASGAGRILDLRKWPRTNFEPPYPTFRAEVMKQWDHIHPSIRPAHRDGGSLHAATVFGVRNRPDARVLVQRKPVEKLFLDANAKPLPADKIAEIIDGFASPRMAKRFKALLARYQAAHPEVPPALAALAVARDPAFGPRGMTANTVIAGRSDGDGEDAGLITPFRANPKAAVRTMGNAVYEVWEIQVKGRPRWTHRVLTRFDRTQPAPPPPPENARLVMRLRRGDLVYWPLESGDRLFLVKKMAVDGRLALWPARLATGKATALYAQLSCPNINLNGDQGYCVQSAEGIRKEKIRTTSCTALGRLRLSKKAT

SEQ ID NO: 367 - protein, 1021 aa, Clostridium cellulolyticum
MKYTLGLDVGIASVGWAVIDKDNNKIIDLGVRCFDKAEESKTGESLATARRIARGMRRRISRRSQRLRLVKKLFVQYEIIKDSSEFNRIFDTSRDGWKDPWELRYNALSRILKPYELVQVLTHITKRRGFKSNRKEDLSTTKEGVVITSIKNNSEMLRTKNYRTIGEMIFMETPENSNKRNKVDEYIHTIAREDLLNEIKYIFSIQRKLGSPFVTEKLEHDFLNIWEFQRPFASGDSILSKVGKCTLLKEELRAPTSCYTSEYFGLLQSINNLVLVEDNNTLTLNNDQRAKIIEYAHFKNEIKYSEIRKLLDIEPEILFKAHNLTHKNPSGNNESKKFYEMKSYHKLKSTLPTDIWGKLHSNKESLDNLFYCLTVYKNDNEIKDYLQANNLDYLIEYIAKLPTFNKFKHLSLVAMKRIIPFMEKGYKYSDACNMAELDFTGSSKLEKCNKLTVEPIIENVTNPVVIRALTQARKVINAIIQKYGLPYMVNIELAREAGMTRQDRDNLKKEHENNRKAREKISDLIRQNGRVASGLDILKWRLWEDQGGRCAYSGKPIPVCDLLNDSLTQIDHIYPYSRSMDDSYMNKVLVLTDENQNKRSYTPYEVWGSTEKWEDFEARIYSMHLPQSKEKRLLNRNFITKDLDSFISRNLNDTRYISRFLKNYIESYLQFSNDSPKSCVVCVNGQCTAQLRSRWGLNKNREESDLHHALDAAVIACADRKIIKEITNYYNERENHNYKVKYPLPWHSFRQDLMETLAGVFISRAPRRKITGPAHDETIRSPKHFNKGLTSVKIPLTTVTLEKLETMVKNTKGGISDKAVYNVLKNRLIEHNNKPLKAFAEKIYKPLKNGTNGAIIRSIRVETPSYTGVFRNEGKGISDNSLMVRVDVFKKKDKYYLVPIYVAHMIKKELPSKAIVPLKPESQWELIDSTHEFLFSLYQNDYLVIKTKKGITEGYYRSCHRGTGSLSLMPHFANNKNVKIDIGVRTAISIEKYNVDILGNKSIVKGEPRRGMEKYNSFKSN

SEQ ID NO: 368 - protein, 1024 aa, Helicobacter mustelae
MIRTLGIDIGIASIGWAVIEGEYTDKGLENKEIVASGVRVFTKAENPKNKESLALPRTLARSARRRNARKKGRIQQVKHYLSKALGLDLECFVQGEKLATLFQTSKDFLSPWELRERALYRVLDKEELARVILHIAKRRGYDDITYGVEDNDSGKIKKAIAENSKRIKEEQCKTIGEMMYKLYFQKSLNVRNKKESYNRCVGRSELREELKTIFQIQQELKSPWVNEELIYKLLGNPDAQSKQEREGLIFYQRPLKGFGDKIGKCSHIKKGENSPYRACKHAPSAEEFVALTKSINFLKNLTNRHGLCFSQEDMCVYLGKILQEAQKNEKGLTYSKLKLLLDLPSDFEFLGLDYSGKNPEKAVFLSLPSTFKLNKITQDRKTQDKIANILGANKDWEAILKELESLQLSKEQIQTIKDAKLNFSKHINLSLEALYHLLPLMREGKRYDEGVEILQERGIFSKPQPKNRQLLPPLSELAKEESYFDIPNPVLRRALSEFRKVVNALLEKYGGFHYFHIELTRDVCKAKSARMQLEKINKKNKSENDAASQLLEVLGLPNTYNNRLKCKLWKQQEEYCLYSGEKITIDHLKDQRALQIDHAFPLSRSLDDSQSNKVLCLTSSNQEKSNKTPYEWLGSDEKKWDMYVGRVYSSNFSPSKKRKLTQKNFKERNEEDFLARNLVDTGYIGRVTKEYIKHSLSFLPLPDGKKEHIRIISGSMTSTMRSFWGVQEKNRDHHLHHAQDAIIIACIEPSMIQKYTTYLKDKETHRLKSHQKAQILREGDHKLSLRWPMSNFKDKIQESIQNIIPSHHVSHKVTGELHQETVRTKEFYYQAFGGEEGVKKALKFGKIREINQGIVDNGAMVRVDIFKSKDKGKFYAVPIYTYDFAIGKLPNKAIVQGKKNGIIKDWLEMDENYEFCFSLFKNDCIKIQTKEMQEAVLAIYKSTNSAKATIELEHLSKYALKNEDEEKMFTDTDKEKNKTMTRESCGIQGLKVFQKVKLSVLGEVLEHKPRNRQNIALKTTPKHV

SEQ ID NO: 369 - protein, 1092 aa, Ilyobacter polytropus
MKYSIGLDIGIASVGWSVINKDKERIEDMGVRIFQKAENPKDGSSLASSRREKRGSRRRNRRKKHRLDRIKNILCESGLVKKNEIEKIYKNAYLKSPWELRAKSLEAKISNKEIAQILLHIAKRRGFKSFRKTDRNADDTGKLLSGIQENKKIMEEKGYLTIGDMVAKDPKFNTHVRNKAGSYLFSFSRKLLEDEVRKIQAKQKELGNTHFTDDVLEKYIEVFNSQRNFDEGPSKPSPYYSEIGQIAKMIGNCTFESSEKRTAKNTWSGERFVFLQKLNNFRIVGLSGKRPLTEEERDIVEKEVYLKKEVRYEKLRKILYLKEEERFGDLNYSKDEKQDKKTEKTKFISLIGNYTIKKLNLSEKLKSEIEEDKSKLDKIIEILTFNKSDKTIESNLKKLELSREDIEILLSEEFSGTLNLSLKAIKKILPYLEKGLSYNEACEKADYDYKNNGIKFKRGELLPVVDKDLIANPVVLRAISQTRKVVNAIIRKYGTPHTIHVEVARDLAKSYDDRQTIIKENKKRELENEKTKKFISEEFGIKNVKGKLLLKYRLYQEQEGRCAYSRKELSLSEVILDESMTDIDHIIPYSRSMDDSYSNKVLVLSGENRKKSNLLPKEYFDRQGRDWDTFVLNVKAMKIHPRKKSNLLKEKFTREDNKDWKSRALNDTRYISRFVANYLENALEYRDDSPKKRVFMIPGQLTAQLRARWRLNKVRENGDLHHALDAAVVAVTDQKAINNISNISRYKELKNCKDVIPSIEYHADEETGEVYFEEVKDTRFPMPWSGFDLELQKRLESENPREEFYNLLSDKRYLGWFNYEEGFIEKLRPVFVSRMPNRGVKGQAHQETIRSSKKISNQIAVSKKPLNSIKLKDLEKMQGRDTDRKLYEALKNRLEEYDDKPEKAFAEPFYKPTNSGKRGPLVRGIKVEEKQNVGVYVNGGQASNGSMVRIDVFRKNGKFYTVPIYVHQTLLKELPNRAINGKPYKDWDLIDGSFEFLYSFYPNDLIEIEFGKSKSIKNDNKLTKTEIPEVNLSEVLGYYRGMDTSTGAATIDTQDGKIQMRIGIKTVKNIKKYQVDVLGNVYKVKREKRQTF

SEQ ID NO: 370 - protein, 1179 aa, Sphaerochaeta globus
MSKKVSRRYEEQAQEICQRLGSRPYSIGLDLGVGSIGVAVAAYDPIKKQPSDLVFVSSRIFIPSTGAAERRQKRGQRNSLRHRANRLKFLWKLLAERNLMLSYSEQDVPDPARLRFEDAVVRANPYELRLKGLNEQLTLSELGYALYHIANHRGSSSVRTFLDEEKSSDDKKLEEQQAMTEQLAKEKGISTFIEVLTAFNTNGLIGYRNSESVKSKGVPVPTRDIISNEIDVLLQTQKQFYQEILSDEYCDRIVSAILFENEKIVPEAGCCPYFPDEKKLPRCHFLNEERRLWEAINNARIKMPMQEGAAKRYQSASFSDEQRHILFHIARSGTDITPKLVQKEFPALKTSIIVLQGKEKAIQKIAGFRFRRLEEKSFWKRLSEEQKDDFFSAWTNTPDDKRLSKYLMKHLLLTENEVVDALKTVSLIGDYGPIGKTATQLLMKHLEDGLTYTEALERGMETGEFQELSVWEQQSLLPYYGQILTGSTQALMGKYWHSAFKEKRDSEGFFKPNTNSDEEKYGRIANPVVHQTLNELRKLMNELITILGAKPQEITVELARELKVGAEKREDIIKQQTKQEKEAVLAYSKYCEPNNLDKRYIERFRLLEDQAFVCPYCLEHISVADIAAGRADVDHIFPRDDTADNSYGNKVVAHRQCNDIKGKRTPYAAFSNTSAWGPIMHYLDETPGMWRKRRKFETNEEEYAKYLQSKGFVSRFESDNSYIAKAAKEYLRCLFNPNNVTAVGSLKGMETSILRKAWNLQGIDDLLGSRHWSKDADTSPTMRKNRDDNRHHGLDAIVALYCSRSLVQMINTMSEQGKRAVEIEAMIPIPGYASEPNLSFEAQRELFRKKILEFMDLHAFVSMKTDNDANGALLKDTVYSILGADTQGEDLVFVVKKKIKDIGVKIGDYEEVASAIRGRITDKQPKWYPMEMKDKIEQLQSKNEAALQKYKESLVQAAAVLEESNRKLIESGKKPIQLSEKTISKKALELVGGYYYLISNNKRTKTFVVKEPSNEVKGFAFDTGSNLCLDFYHDAQGKLCGEIIRKIQAMNPSYKPAYMKQGYSLYVRLYQGDVCELRASDLTEAESNLAKTTHVRLPNAKPGRTFVIIITFTEMGSGYQIYFSNLAKSKKGQDTSFTLTTIKNYDVRKVQLSSAGLVRYVSPLLVDKIEKDEVALCGE

SEQ ID NO: 371 - protein, 1054 aa, Staphylococcus lugdunensis
MNQKFILGLDIGITSVGYGLIDYETKNIIDAGVRLFPEANVENNEGRRSKRGSRRLKRRRIHRLERVKKLLEDYNLLDQSQIPQSTNPYAIRVKGLSEALSKDELVIALLHIAKRRGIHKIDVIDSNDDVGNELSTKEQLNKNSKLLKDKFVCQIQLERMNEGQVRGEKNRFKTADIIKEIIQLLNVQKNFHQLDENFINKYIELVEMRREYFEGPGKGSPYGWEGDPKAWYETLMGHCTYFPDELRSVKYAYSADLFNALNDLNNLVIQRDGLSKLEYHEKYHIIENVFKQKKKPTLKQIANEINVNPEDIKGYRITKSGKPQFTEFKLYHDLKSVLFDQSILENEDVLDQIAEILTIYQDKDSIKSKLTELDILLNEEDKENIAQLTGYTGTHRLSLKCIRLVLEEQWYSSRNQMEIFTHLNIKPKKINLTAANKIPKAMIDEFILSPVVKRTFGQAINLINKIIEKYGVPEDIIIELARENNSKDKQKFINEMQKKNENTRKRINEIIGKYGNQNAKRLVEKIRLHDEQEGKCLYSLESIPLEDLLNNPNHYEVDHIIPRSVSFDNSYHNKVLVKQSENSKKSNLTPYQYFNSGKSKLSYNQFKQHILNLSKSQDRISKKKKEYLLEERDINKFEVQKEFINRNLVDTRYATRELTNYLKAYFSANNMNVKVKTINGSFTDYLRKVWKFKKERNHGYKHHAEDALIIANADFLFKENKKLKAVNSVLEKPEIESKQLDIQVDSEDNYSEMFIIPKQVQDIKDFRNFKYSHRVDKKPNRQLINDTLYSTRKKDNSTYIVQTIKDIYAKDNTTLKKQFDKSPEKFLMYQHDPRTFEKLEVIMKQYANEKNPLAKYHEETGEYLTKYSKKNNGPIVKSLKYIGNKLGSHLDVTHQFKSSTKKLVKLSIKPYRFDVYLTDKGYKFITISYLDVLKKDNYYYIPEQKYDKLKLGKAIDKNAKFIASFYKNDLIKLDGEIYKIIGVNSDTRNMIELDLPDIRYKEYCELNNIKGEPRIKKTIGKKVNSIEKLTTDVLGNVFTNTQYTKPQLLFKRGN

SEQ ID NO: 372 - protein, 1061 aa, Treponema sp.
MIMKLEKWRLGLDLGTNSIGWSVFSLDKDNSVQDLIDMGVRIFSDGRDPKTKEPLAVARRTARSQRKLIYRRKLRRKQVFKFLQEQGLFPKTKEECMTLKSLNPYELRIKALDEKLEPYELGRALFNLAVRRGFKSNRKDGSREEVSEKKSPDEIKTQADMQTHLEKAIKENGCRTITEFLYKNQGENGGIRFAPGRMTYYPTRKMYEEEFNLIRSKQEKYYPQVDWDDIYKAIFYQRPLKPQQRGYCIYENDKERTFKAMPCSQKLRILQDIGNLAYYEGGSKKRVELNDNQDKVLYELLNSKDKVTFDQMRKALCLADSNSFNLEENRDFLIGNPTAVKMRSKNRFGKLWDEIPLEEQDLIIETIITADEDDAVYEVIKKYDLTQEQRDFIVKNTILQSGTSMLCKEVSEKLVKRLEEIADLKYHEAVESLGYKFADQTVEKYDLLPYYGKVLPGSTMEIDLSAPETNPEKHYGKISNPTVHVALNQTRVVVNALIKEYGKPSQIAIELSRDLKNNVEKKAEIARKQNQRAKENIAINDTISALYHTAFPGKSFYPNRNDRMKYRLWSELGLGNKCIYCGKGISGAELFTKEIEIEHILPFSRTLLDAESNLTVAHSSCNAFKAERSPFEAFGTNPSGYSWQEIIQRANQLKNTSKKNKFSPNAMDSFEKDSSFIARQLSDNQYIAKAALRYLKCLVENPSDVWTTNGSMTKLLRDKWEMDSILCRKFTEKEVALLGLKPEQIGNYKKNRFDHRHHAIDAVVIGLTDRSMVQKLATKNSHKGNRIEIPEFPILRSDLIEKVKNIVVSFKPDHGAEGKLSKETLLGKIKLHGKETFVCRENIVSLSEKNLDDIVDEIKSKVKDYVAKHKGQKIEAVLSDFSKENGIKKVRCVNRVQTPIEITSGKISRYLSPEDYFAAVIWEIPGEKKTFKAQYIRRNEVEKNSKGLNVVKPAVLENGKPHPAAKQVCLLHKDDYLEFSDKGKMYFCRIAGYAATNNKLDIRPVYAVSYCADWINSTNETMLTGYWKPTPTQNWVSVNVLFDKQKARLVTVSPIGRVFRK

SEQ ID NO: 373 - protein, 1011 aa, Unknown
  Uncultured delta polypeptide
MSSKAIDSLEQLDLFKPQEYTLGLDLGIKSIGWAILSGERIANAGVYLFETAEELNSTGNKLISKAAERGRKRRIRRMLDRKARRGRHIRYLLEREGLPTDELEEVVVHQSNRTLWDVRAEAVERKLTKQELAAVLFHLVRHRGYFPNTKKLPPDDESDSADEEQGKINRATSRLREELKASDCKTIGQFLAQNRDRQRNREGDYSNLMARKLVFEEALQILAFQRKQGHELSKDFEKTYLDVLMGQRSGRSPKLGNCSLIPSELRAPSSAPSTEWFKFLQNLGNLQISNAYREEWSIDAPRRAQIIDACSQRSTSSYWQIRRDFQIPDEYRFNLVNYERRDPDVDLQEYLQQQERKTLANFRNWKQLEKIIGTGHPIQTLDEAARLITLIKDDEKLSDQLADLLPEASDKAITQLCELDFTTAAKISLEAMYRILPHMNQGMGFFDACQQESLPEIGVPPAGDRVPPFDEMYNPVVNRVLSQSRKLINAVIDEYGMPAKIRVELARDLGKGRELRERIKLDQLDKSKQNDQRAEDFRAEFQQAPRGDQSLRYRLWKEQNCTCPYSGRMIPVNSVLSEDTQIDHILPISQSFDNSLSNKVLCFTEENAQKSNRTPFEYLDAADFQRLEAISGNWPEAKRNKLLHKSFGKVAEEWKSRALNDTRYLTSALADHLRHHLPDSKIQTVNGRITGYLRKQWGLEKDRDKHTHHAVDAIVVACTTPAIVQQVTLYHQDIRRYKKLGEKRPTPWPETFRQDVLDVEEEIFITRQPKKVSGGIQTKDTLRKHRSKPDRQRVALTKVKLADLERLVEKDASNRNLYEHLKQCLEESGDQPTKAFKAPFYMPSGPEAKQRPILSKVTLLREKPEPPKQLTELSGGRRYDSMAQGRLDIYRYKPGGKRKDEYRVVLQRMIDLMRGEENVHVFQKGVPYDQGPEIEQNYTFLFSLYFDDLVEFQRSADSEVIRGYYRTFNIANGQLKISTYLEGRQDFDFFGANRLAHFAKVQVNLLGKVIK

SEQ ID NO: 374 - protein, 1029 aa, Alicycliphilus denitrificans
MRSLRYRLALDLGSTSLGWALFRLDACNRPTAVIKAGVRIFSDGRNPKDGSSLAVTRRAARAMRRRRDRLLKRKTRMQAKLVEHGFFPADAGKRKALEQLNPYALRAKGLQEALLPGEFARALFHINQRRGFKSNRKTDKKDNDSGVLKKAIGQLRQQMAEQGSRTVGEYLWTRLQQGQGVRARYREKPYTTEEGKKRIDKSYDLYIDRAMIEQEFDALWAAQAAFNPTLFHEAARADLKDTLLHQRPLRPVKPGRCTLLPEEERAPLALPSTQRFRIHQEVNHLRLLDENLREVALTLAQRDAVVTALETKAKLSFEQIRKLLKLSGSVQFNLEDAKRTELKGNATSAALARKELFGAAWSGFDEALQDEIVWQLVTEEGEGALIAWLQTHTGVDEARAQAIVDVSLPEGYGNLSRKALARIVPALRAAVITYDKAVQAAGFDHHSQLGFEYDASEVEDLVHPETGEIRSVFKQLPYYGKALQRHVAFGSGKPEDPDEKRYGKIANPTVHIGLNQVRMVVNALIRRYGRPTEVVIELARDLKQSREQKVEAQRRQADNQRRNARIRRSIAEVLGIGEERVRGSDIQKWICWEELSFDAADRRCPYSGVQISAAMLLSDEVEVEHILPFSKTLDDSLNNRTVAMRQANRIKRNRTPWDARAEFEAQGWSYEDILQRAERMPLRKRYRFAPDGYERWLGDDKDFLARALNDTRYLSRVAAEYLRLVCPGTRVIPGQLTALLRGKFGLNDVLGLDGEKNRNDHRHHAVDACVIGVTDQGLMQRFATASAQARGDGLTRLVDGMPMPWPTYRDHVERAVRHIWVSHRPDHGFEGAMMEETSYGIRKDGSIKQRRKADGSAGREISNLIRIHEATQPLRHGVSADGQPLAYKGYVGGSNYCIEITVNDKGKWEGEVISTFRAYGVVRAGGMGRLRNPHEGQNGRKLIMRLVIGDSVRLEVDGAERTMRIVKISGSNGQIFMAPIHEANVDARNTDKQDAFTYTSKYAGSLQKAKTRRVTISPIGEVRDPGFKG

SEQ ID NO: 375 - protein, 1168 aa, Azospirillum sp.
MARPAFRAPRREHVNGWTPDPHRISKPFFILVSWHLLSRVVIDSSSGCFPGTSRDHTDKFAEWECAVQPYRLSFDLGTNSIGWGLLNLDRQGKPREIRALGSRIFSDGRDPQDKASLAVARRLARQMRRRRDRYLTRRTRLMGALVRFGLMPADPAARKRLEVAVDPYLARERATRERLEPFEIGRALFHLNQRRGYKPVRTATKPDEEAGKVKEAVERLEAAIAAAGAPTLGAWFAWRKTRGETLRARLAGKGKEAAYPFYPARRMLEAEFDTLWAEQARHHPDLLTAEAREILRHRIFHQRPLKPPPVGRCTLYPDDGRAPRALPSAQRLRLFQELASLRVIHLDLSERPLTPAERDRIVAFVQGRPPKAGRKPGKVQKSVPFEKLRGLLELPPGTGFSLESDKRPELLGDETGARIAPAFGPGWTALPLEEQDALVELLLTEAEPERAIAALTARWALDEATAAKLAGATLPDFHGRYGRRAVAELLPVLERETRGDPDGRVRPIRLDEAVKLLRGGKDHSDFSREGALLDALPYYGAVLERHVAFGTGNPADPEEKRVGRVANPTVHIALNQLRHLVNAILARHGRPEEIVIELARDLKRSAEDRRREDKRQADNQKRNEERKRLILSLGERPTPRNLLKLRLWEEQGPVENRRCPYSGETISMRMLLSEQVDIDHILPFSVSLDDSAANKVVCLREANRIKRNRSPWEAFGHDSERWAGILARAEALPKNKRWRFAPDALEKLEGEGGLRARHLNDTRHLSRLAVEYLRCVCPKVRVSPGRLTALLRRRWGIDAILAEADGPPPEVPAETLDPSPAEKNRADHRHHALDAVVIGCIDRSMVQRVQLAAASAEREAAAREDNIRRVLEGFKEEPWDGFRAELERRARTIVVSHRPEHGIGGALHKETAYGPVDPPEEGFNLVVRKPIDGLSKDEINSVRDPRLRRALIDRLAIRRRDANDPATALAKAAEDLAAQPASRGIRRVRVLKKESNPIRVEHGGNPSGPRSGGPFHKLLLAGEVHHVDVALRADGRRWVGHWVTLFEAHGGRGADGAAAPPRLGDGERFLMRLHKGDCLKLEHKGRVRVMQVVKLEPSSNSVVVVEPHQVKTDRSKHVKISCDQLRARGARRVTVDPLGRVRVHAPGARVGIGGDAGRTAMEPAEDIS

SEQ ID NO: 376 - protein, 1064 aa, Bradyrhizobium sp.
MKRTSLRAYRLGVDLGANSLGWFVVWLDDHGQPEGLGPGGVRIFPDGRNPQSKQSNAAGRRLARSARRRRDRYLQRRGKLMGLLVKHGLMPADEPARKRLECLDPYGLRAKALDEVLPLHHVGRALFHLNQRRGLFANRAIEQGDKDASAIKAAAGRLQTSMQACGARTLGEFLNRRHQLRATVRARSPVGGDVQARYEFYPTRAMVDAEFEAIWAAQAPHHPTMTAEAHDTIREAIFSQRAMKRPSIGKCSLDPATSQDDVDGFRCAWSHPLAQRFRIWQDVRNLAVVETGPTSSRLGKEDQDKVARALLQTDQLSFDEIRGLLGLPSDARFNLESDRRDHLKGDATGAILSARRHFGPAWHDRSLDRQIDIVALLESALDEAAIIASLGTTHSLDEAAAQRALSALLPDGYCRLGLRAIKRVLPLMEAGRTYAEAASAAGYDHALLPGGKLSPTGYLPYYGQWLQNDVVGSDDERDTNERRWGRLPNPTVHIGIGQLRRVVNELIRWHGPPAEITVELTRDLKLSPRRLAELEREQAENQRKNDKRTSLLRKLGLPASTHNLLKLRLWDEQGDVASECPYTGEAIGLERLVSDDVDIDHLIPFSISWDDSAANKVVCMRYANREKGNRTPFEAFGHRQGRPYDWADIAERAARLPRGKRWRFGPGARAQFEELGDFQARLLNETSWLARVAKQYLAAVTHPHRIHVLPGRLTALLRATWELNDLLPGSDDRAAKSRKDHRHHAIDALVAALTDQALLRRMANAHDDTRRKIEVLLPWPTFRIDLETRLKAMLVSHKPDHGLQARLHEDTAYGTVEHPETEDGANLVYRKTFVDISEKEIDRIRDRRLRDLVRAHVAGERQQGKTLKAAVLSFAQRRDIAGHPNGIRHVRLTKSIKPDYLVPIRDKAGRIYKSYNAGENAFVDILQAESGRWIARATTVFQANQANESHDAPAAQPIMRVFKGDMLRIDHAGAEKFVKIVRLSPSNNLLYLVEHHQAGVFQTRHDDPEDSFRWLFASFDKLREWNAELVRIDTLGQPWRRKRGLETGSEDATRIGWTRPKKWP

SEQ ID NO: 377 - protein, 1037 aa, Parvibaculum lavamentivorans
MERIFGFDIGTTSIGFSVIDYSSTQSAGNIQRLGVRIFPEARDPDGTPLNQQRRQKRMMRRQLRRRRIRRKALNETLHEAGFLPAYGSADWPVVMADEPYELRRRGLEEGLSAYEFGRAIYHLAQHRHFKGRELEESDTPDPDVDDEKEAANERAATLKALKNEQTTLGAWLARRPPSDRKRGIHAHRNVVAEEFERLWEVQSKFHPALKSEEMRARISDTIFAQRPVFWRKNTLGECRFMPGEPLCPKGSWLSQQRRMLEKLNNLAIAGGNARPLDAEERDAILSKLQQQASMSWPGVRSALKALYKQRGEPGAEKSLKFNLELGGESKLLGNALEAKLADMFGPDWPAHPRKQEIRHAVHERLWAADYGETPDKKRVIILSEKDRKAHREAAANSFVADFGITGEQAAQLQALKLPTGWEPYSIPALNLFLAELEKGERFGALVNGPDWEGWRRTNFPHRNQPTGEILDKLPSPASKEERERISQLRNPTVVRTQNELRKVVNNLIGLYGKPDRIRIEVGRDVGKSKREREEIQSGIRRNEKQRKKATEDLIKNGIANPSRDDVEKWILWKEGQERCPYTGDQIGFNALFREGRYEVEHIWPRSRSFDNSPRNKTLCRKDVNIEKGNRMPFEAFGHDEDRWSAIQIRLQGMVSAKGGTGMSPGKVKRFLAKTMPEDFAARQLNDTRYAAKQILAQLKRLWPDMGPEAPVKVEAVTGQVTAQLRKLWTLNNILADDGEKTRADHRHHAIDALTVACTHPGMTNKLSRYWQLRDDPRAEKPALTPPWDTIRADAEKAVSEIVVSHRVRKKVSGPLHKETTYGDTGTDIKTKSGTYRQFVTRKKIESLSKGELDEIRDPRIKEIVAAHVAGRGGDPKKAFPPYPCVSPGGPEIRKVRLTSKQQLNLMAQTGNGYADLGSNHHIAIYRLPDGKADFEIVSLFDASRRLAQRNPIVQRTRADGASFVMSLAAGEAIMIPEGSKKGIWIVQGVWASGQVVLERDTDADHSTTTRPMPNPILKDDAKKVSIDPIGRVRPSND

SEQ ID NO: 378 - protein, 1218 aa, Prevotella timonensis
MNKRILGLDTGTNSLGWAVVDWDEHAQSYELIKYGDVIFQEGVKIEKGIESSKAAERSGYKAIRKQYFRRRLRKIQVLKVLVKYHLCPYLSDDDLRQWHLQKQYPKSDELMLWQRTSDEEGKNPYYDRHRCLHEKLDLTVEADRYTLGRALYHLTQRRGFLSNRLDTSADNKEDGVVKSGISQLSTEMEEAGCEYLGDYFYKLYDAQGNKVRIRQRYTDRNKHYQHEFDAICEKQELSSELIEDLQRAIFFQLPLKSQRHGVGRCTFERGKPRCADSHPDYEEFRMLCFVNNIQVKGPHDLELRPLTYEEREKIEPLFFRKSKPNFDFEDIAKALAGKKNYAWIHDKEERAYKFNYRMTQGVPGCPTIAQLKSIFGDDWKTGIAETYTLIQKKNGSKSLQEMVDDVWNVLYSFSSVEKLKEFAHHKLQLDEESAEKFAKIKLSHSFAALSLKAIRKFLPFLRKGMYYTHASFFANIPTIVGKEIWNKEQNRKYIMENVGELVFNYQPKHREVQGTIEMLIKDFLANNFELPAGATDKLYHPSMIETYPNAQRNEFGILQLGSPRTNAIRNPMAMRSLHILRRVVNQLLKESIIDENTEVHVEYARELNDANKRRAIADRQKEQDKQHKKYGDEIRKLYKEETGKDIEPTQTDVLKFQLWEEQNHHCLYTGEQIGITDFIGSNPKFDIEHTIPQSVGGDSTQMNLTLCDNRFNREVKKAKLPTELANHEEILTRIEPWKNKYEQLVKERDKQRTFAGMDKAVKDIRIQKRHKLQMEIDYWRGKYERFTMTEVPEGFSRRQGTGIGLISRYAGLYLKSLFHQADSRNKSNVYVVKGVATAEFRKMWGLQSEYEKKCRDNHSHHCMDAITIACIGKREYDLMAEYYRMEETFKQGRGSKPKFSKPWATFTEDVLNIYKNLLVVHDTPNNMPKHTKKYVQTSIGKVLAQGDTARGSLHLDTYYGAIERDGEIRYVVRRPLSSFTKPEELENIVDETVKRTIKEAIADKNFKQAIAEPIYMNEEKGILIKKVRCFAKSVKQPINIRQHRDLSKKEYKQQYHVMNENNYLLAIYEGLVKNKVVREFEIVSYIEAAKYYKRSQDRNIFSSIVPTHSTKYGLPLKTKLLMGQLVLMFEENPDEIQVDNTKDLVKRLYKVVGIEKDGRIKFKYHQEARKEGLPIFSTPYKNNDDYAPIFRQSINNINILVDGIDFTIDILGKVTLKE

SEQ ID NO: 379 - protein, 1088 aa, Bacillus smithii
MNYKMGLDIGIASVGWAVINLDLKRIEDLGVRIFDKAEHPQNGESLALPRRIARSARRRLRRRKHRLERIRRLLVSENVLTKEEMNLLFKQKKQIDVWQLRVDALERKLNNDELARVLLHLAKRRGFKSNRKSERNSKESSEFLKNIEENQSILAQYRSVGEMIVKDSKFAYHKRNKLDSYSNMIARDDLEREIKLIFEKQREFNNPVCTERLEEKYLNIWSSQRPFASKEDIEKKVGFCTFEPKEKRAPKATYTFQSFIVWEHINKLRLVSPDETRALTEIERNLLYKQAFSKNKMTYYDIRKLLNLSDDIHFKGLLYDPKSSLKQIENIRFLELDSYHKIRKCIENVYGKDGIRMFNETDIDTFGYALTIFKDDEDIVAYLQNEYITKNGKRVSNLANKVYDKSLIDELLNLSFSKFAHLSMKAIRNILPYMEQGEIYSKACELAGYNFTGPKKKEKALLLPVIPNIANPVVMRALTQSRKVVNAIIKKYGSPVSIHIELARDLSHSFDERKKIQKDQTENRKKNETAIKQLIEYELTKNPTGLDIVKFKLWSEQQGRCMYSLKPIELERLLEPGYVEVDHILPYSRSLDDSYANKVLVLTKENREKGNHTPVEYLGLGSERWKKFEKFVLANKQFSKKKKQNLLRLRYEETEEKEFKERNLNDTRYISKFFANFIKEHLKFADGDGGQKVYTINGKITAHLRSRWDFNKNREESDLHHAVDAVIVACATQGMIKKITEFYKAREQNKESAKKKEPIFPQPWPHFADELKARLSKFPQESIEAFALGNYDRKKLESLRPVFVSRMPKRSVTGAAHQETLRRCVGIDEQSGKIQTAVKTKLSDIKLDKDGHFPMYQKESDPRTYEAIRQRLLEHNNDPKKAFQEPLYKPKKNGEPGPVIRTVKIIDTKNKVVHLDGSKTVAYNSNIVRTDVFEKDGKYYCVPVYTMDIMKGTLPNKAIEANKPYSEWKEMTEEYTFQFSLFPNDLVRIVLPREKTIKTSTNEEIIIKDIFAYYKTIDSATGGLELISHDRNFSLRGVGSKTLKRFEKYQVDVLGNIHKVKGEKRVGLAAPTNQKKGKTVDSLQSVSD

SEQ ID NO: 380 - protein, 1035 aa, Puniceispirillum marinum
MRRLGLDLGTNSIGWCLLDLGDDGEPVSIFRTGARIFSDGRDPKSLGSLKATRREARLTRRRRDRFIQRQKNLINALVKYGLMPADEIQRQALAYKDPYPIRKKALDEAIDPYEMGRAIFHINQRRGFKSNRKSADNEAGVVKQSIADLEMKLGEAGARTIGEFLADRQATNDTVRARRLSGTNALYEFYPDRYMLEQEFDTLWAKQAAFNPSLYIEAARERLKEIVFFQRKLKPQEVGRCIFLSDEDRISKALPSFQRFRIYQELSNLAWIDHDGVAHRITASLALRDHLFDELEHKKKLTFKAMRAILRKQGVVDYPVGFNLESDNRDHLIGNLTSCIMRDAKKMIGSAWDRLDEEEQDSFILMLQDDQKGDDEVRSILTQQYGLSDDVAEDCLDVRLPDGHGSLSKKAIDRILPVLRDQGLIYYDAVKEAGLGEANLYDPYAALSDKLDYYGKALAGHVMGASGKFEDSDEKRYGTISNPTVHIALNQVRAVVNELIRLHGKPDEVVIEIGRDLPMGADGKRELERFQKEGRAKNERARDELKKLGHIDSRESRQKFQLWEQLAKEPVDRCCPFTGKMMSISDLFSDKVEIEHLLPFSLTLDDSMANKTVCFRQANRDKGNRAPFDAFGNSPAGYDWQEILGRSQNLPYAKRWRFLPDAMKRFEADGGFLERQLNDTRYISRYTTEYISTIIPKNKIWVVTGRLTSLLRGFWGLNSILRGHNTDDGTPAKKSRDDHRHHAIDAIVVGMTSRGLLQKVSKAARRSEDLDLTRLFEGRIDPWDGFRDEVKKHIDAIIVSHRPRKKSQGALHNDTAYGIVEHAENGASTVVHRVPITSLGKQSDIEKVRDPLIKSALLNETAGLSGKSFENAVQKWCADNSIKSLRIVETVSIIPITDKEGVAYKGYKGDGNAYMDIYQDPTSSKWKGEIVSRFDANQKGFIPSWQSQFPTARLIMRLRINDLLKLQDGEIEEIYRVQRLSGSKILMAPHTEANVDARDRDKNDTFKLTSKSPGKLQSASARKVHISPTGLIREG

SEQ ID NO: 381 - protein, 1153 aa, Barnesiella intestinihominis
MKNILGLDLGLSSIGWSVIRENSEEQELVAMGSRVVSLTAAELSSFTQGNGVSINSQRTQKRTQRKGYDRYQLRRTLLRNKLDTLGMLPDDSLSYLPKLQLWGLRAKAVTQRIELNELGRVLLHLNQKRGYKSIKSDFSGDKKITDYVKTVKTRYDELKEMRLTIGELFFRRLTENAFFRCKEQVYPRQAYVEEFDCIMNCQRKFYPDILTDETIRCIRDEIIYYQRPLKSCKYLVSRCEFEKRFYLNAAGKKTEAGPKVSPRTSPLFQVCRLWESINNIVVKDRRNEIVFISAEQRAALFDFLNTHEKLKGSDLLKLLGLSKTYGYRLGEQFKTGIQGNKTRVEIERALGNYPDKKRLLQFNLQEESSSMVNTETGEIIPMISLSFEQEPLYRLWHVLYSIDDREQLQSVLRQKFGIDDDEVLERLSAIDLVKAGFGNKSSKAIRRILPFLQLGMNYAEACEAAGYNHSNNYTKAENEARALLDRLPAIKKNELRQPVVEKILNQMVNVVNALMEKYGRFDEIRVELARELKQSKEERSNTYKSINKNQRENEQIAKRIVEYGVPTRSRIQKYKMWEESKHCCIYCGQPVDVGDFLRGFDVEVEHIIPKSLYFDDSFANKVCSCRSCNKEKNNRTAYDYMKSKGEKALSDYVERVNTMYTNNQISKTKWQNLLTPVDKISIDFIDRQLRESQYIARKAKEILTSICYNVTATSGSVTSFLRHVWGWDTVLHDLNFDRYKKVGLTEVIEVNHRGSVIRREQIKDWSKRFDHRHHAIDALTIACTKQAYIQRLNNLRAEEGPDFNKMSLERYIQSQPHFSVAQVREAVDRILVSFRAGKRAVTPGKRYIRKNRKRISVQSVLIPRGALSEESVYGVIHVWEKDEQGHVIQKQRAVMKYPITSINREMLDKEKVVDKRIHRILSGRLAQYNDNPKEAFAKPVYIDKECRIPIRTVRCFAKPAINTLVPLKKDDKGNPVAWVNPGNNHHVAIYRDEDGKYKERTVTFWEAVDRCRVGIPAIVTQPDTIWDNILQRNDISENVLESLPDVKWQFVLSLQQNEMFILGMNEEDYRYAMDQQDYALLNKYLYRVQKLSKSDYSFRYHTETSVEDKYDGKPNLKLSMQMGKLKRVSIKSLLGLNPHKVHISVLGEIKEIS

SEQ ID NO: 382 - protein, 1062 aa, Ralstonia syzygii
MAEKQHRWGLDIGTNSIGWAVIALIEGRPAGLVATGSRIFSDGRNPKDGSSLAVERRGPRQMRRRRDRYLRRRDRFMQALINVGLMPGDAAARKALVTENPYVLRQRGLDQALTLPEFGRALFHLNQRRGFQSNRKTDRATAKESGKVKNAIAAFRAGMGNARTVGEALARRLEDGRPVRARMVGQGKDEHYELYIAREWIAQEFDALWASQQRFHAEVLADAARDRLRAILLFQRKLLPVPVGKCFLEPNQPRVAAALPSAQRFRLMQELNHLRVMTLADKRERPLSFQERNDLLAQLVARPKCGFDMLRKIVFGANKEAYRFTIESERRKELKGCDTAAKLAKVNALGTRWQALSLDEQDRLVCLLLDGENDAVLADALREHYGLTDAQIDTLLGLSFEDGHMRLGRSALLRVLDALESGRDEQGLPLSYDKAVVAAGYPAHTADLENGERDALPYYGELLWRYTQDAPTAKNDAERKFGKIANPTVHIGLNQLRKLVNALIQRYGKPAQIVVELARNLKAGLEEKERIKKQQTANLERNERIRQKLQDAGVPDNRENRLRMRLFEELGQGNGLGTPCIYSGRQISLQRLFSNDVQVDHILPFSKTLDDSFANKVLAQHDANRYKGNRGPFEAFGANRDGYAWDDIRARAAVLPRNKRNRFAETAMQDWLHNETDFLARQLTDTAYLSRVARQYLTAICSKDDVYVSPGRLTAMLRAKWGLNRVLDGVMEEQGRPAVKNRDDHRHHAIDAVVIGATDRAMLQQVATLAARAREQDAERLIGDMPTPWPNFLEDVRAAVARCVVSHKPDHGPEGGLHNDTAYGIVAGPFEDGRYRVRHRVSLFDLKPGDLSNVRCDAPLQAELEPIFEQDDARAREVALTALAERYRQRKVWLEELMSVLPIRPRGEDGKTLPDSAPYKAYKGDSNYCYELFINERGRWDGELISTFRANQAAYRRFRNDPARFRRYTAGGRPLLMRLCINDYIAVGTAAERTIFRVVKMSENKITLAEHFEGGTLKQRDADKDDPFKYLTKSPGALRDLGARRIFVDLIGRVLDPGIKGD

SEQ ID NO: 383 - protein, 1059 aa, Wolinella succinogenes
MIERILGVDLGISSLGWAIVEYDKDDEAANRIIDCGVRLFTAAETPKKKESPNKARREARGIRRVLNRRRVRMNMIKKLFLRAGLIQDVDLDGEGGMFYSKANRADVWELRHDGLYRLLKGDELARVLIHIAKHRGYKFIGDDEADEESGKVKKAGVVLRQNFEAAGCRTVGEWLWRERGANGKKRNKHGDYEISIHRDLLVEEVEAIFVAQQEMRSTIATDALKAAYREIAFFVRPMQRIEKMVGHCTYFPEERRAPKSAPTAEKFIAISKFFSTVIIDNEGWEQKIIERKTLEELLDFAVSREKVEFRHLRKFLDLSDNEIFKGLHYKGKPKTAKKREATLFDPNEPTELEFDKVEAEKKAWISLRGAAKLREALGNEFYGRFVALGKHADEATKILTYYKDEGQKRRELTKLPLEAEMVERLVKIGFSDFLKLSLKAIRDILPAMESGARYDEAVLMLGVPHKEKSAILPPLNKTDIDILNPTVIRAFAQFRKVANALVRKYGAFDRVHFELAREINTKGEIEDIKESQRKNEKERKEAADWIAETSFQVPLTRKNILKKRLYIQQDGRCAYTGDVIELERLFDEGYCEIDHILPRSRSADDSFANKVLCLARANQQKTDRTPYEWFGHDAARWNAFETRTSAPSNRVRTGKGKIDRLLKKNFDENSEMAFKDRNLNDTRYMARAIKTYCEQYWVFKNSHTKAPVQVRSGKLTSVLRYQWGLESKDRESHTHHAVDAIIIAFSTQGMVQKLSEYYRFKETHREKERPKLAVPLANFRDAVEEATRIENTETVKEGVEVKRLLISRPPRARVTGQAHEQTAKPYPRIKQVKNKKKWRLAPIDEEKFESFKADRVASANQKNFYETSTIPRVDVYHKKGKFHLVPIYLHEMVLNELPNLSLGTNPEAMDENFFKFSIFKDDLISIQTQGTPKKPAKIIMGYFKNMHGANMVLSSINNSPCEGFTCTPVSMDKKHKDKCKLCPEENRIAGRCLQGFLDYWSQEGLRPPRKEFECDQGVKFALDVKKYQIDPLGYYYEVKQEKRLGTIPQMRSAKKLVKK

SEQ ID NO: 384 - protein, 1269 aa, Mycoplasma gallisepticum
MNNSIKSKPEVTIGLDLGVGSVGWAIVDNETNIIHHLGSRLFSQAKTAEDRRSFRGVRRLIRRRKYKLKRFVNLIWKYNSYFGFKNKEDILNNYQEQQKLHNTVLNLKSEALNAKIDPKALSWILHDYLKNRGHFYEDNRDFNVYPTKELAKYFDKYGYYKGIIDSKEDNDNKLEEELTKYKFSNKHWLEEVKKVLSNQTGLPEKFKEEYESLFSYVRNYSEGPGSINSVSPYGIYHLDEKEGKVVQKYNNIWDKTIGKCNIFPDEYRAPKNSPIAMIFNEINELSTIRSYSIYLTGWFINQEFKKAYLNKLLDLLIKTNGEKPIDARQFKKLREETIAESIGKETLKDVENEEKLEKEDHKWKLKGLKLNTNGKIQYNDLSSLAKFVHKLKQHLKLDFLLEDQYATLDKINFLQSLFVYLGKHLRYSNRVDSANLKEFSDSNKLFERILQKQKDGLFKLFEQTDKDDEKILAQTHSLSTKAMLLAITRMTNLDNDEDNQKNNDKGWNFEAIKNFDQKFIDITKKNNNLSLKQNKRYLDDRFINDAILSPGVKRILREATKVFNAILKQFSEEYDVTKVVIELARELSEEKELENTKNYKKLIKKNGDKISEGLKALGISEDEIKDILKSPTKSYKFLLWLQQDHIDPYSLKEIAFDDIFTKTEKFEIDHIIPYSISFDDSSSNKLLVLAESNQAKSNQTPYEFISSGNAGIKWEDYEAYCRKFKDGDSSLLDSTQRSKKFAKMMKTDTSSKYDIGFLARNLNDTRYATIVFRDALEDYANNHLVEDKPMFKVVCINGSVTSFLRKNFDDSSYAKKDRDKNIHHAVDASIISIFSNETKTLFNQLTQFADYKLFKNTDGSWKKIDPKTGVVTEVTDENWKQIRVRNQVSEIAKVIEKYIQDSNIERKARYSRKIENKTNISLFNDTVYSAKKVGYEDQIKRKNLKTLDIHESAKENKNSKVKRQFVYRKLVNVSLLNNDKLADLFAEKEDILMYRANPWVINLAEQIFNEYTENKKIKSQNVFEKYMLDLTKEFPEKFSEFLVKSMLRNKTAIIYDDKKNIVHRIKRLKMLSSELKENKLSNVIIRSKNQSGTKLSYQDTINSLALMIMRSIDPTAKKQYIRVPLNTLNLHLGDHDFDLHNMDAYLKKPKFVKYLKANEIGDEYKPWRVLTSGTLLIHKKDKKLMYISSFQNLNDVIEIKNLIETEYKENDDSDSKKKKKANRFLMTLSTILNDYILLDAKDNFDILGLSKNRIDEILNSKLGLDKIVK

SEQ ID NO: 385 - protein, 1138 aa, Acidothermus cellulolyticus
MGGSEVGTVPVTWRLGVDVGERSIGLAAVSYEEDKPKEILAAVSWIHDGGVGDERSGASRLALRGMARRARRLRRFRRARLRDLDMLLSELGWTPLPDKNVSPVDAWLARKRLAEEYVVDETERRRLLGYAVSHMARHRGWRNPWTTIKDLKNLPQPSDSWERTRESLEARYSVSLEPGTVGQWAGYLLQRAPGIRLNPTQQSAGRRAELSNATAFETRLRQEDVLWELRCIADVQGLPEDVVSNVIDAVFCQKRPSVPAERIGRDPLDPSQLRASRACLEFQEYRIVAAVANLRIRDGSGSRPLSLEERNAVIEALLAQTERSLTWSDIALEILKLPNESDLTSVPEEDGPSSLAYSQFAPFDETSARIAEFIAKNRRKIPTFAQWWQEQDRTSRSDLVAALADNSIAGEEEQELLVHLPDAELEALEGLALPSGRVAYSRLTLSGLTRVMRDDGVDVHNARKTCFGVDDNWRPPLPALHEATGHPVVDRNLAILRKFLSSATMRWGPPQSIVVELARGASESRERQAEEEAARRAHRKANDRIRAELRASGLSDPSPADLVRARLLELYDCHCMYCGAPISWENSELDHIVPRTDGGSNRHENLAITCGACNKEKGRRPFASWAETSNRVQLRDVIDRVQKLKYSGNMYWTRDEFSRYKKSVVARLKRRTSDPEVIQSIESTGYAAVALRDRLLSYGEKNGVAQVAVFRGGVTAEARRWLDISIERLFSRVAIFAQSTSTKRLDRRHHAVDAVVLTTLTPGVAKTLADARSRRVSAEFWRRPSDVNRHSTEEPQSPAYRQWKESCSGLGDLLISTAARDSIAVAAPLRLRPTGALHEETLRAFSEHTVGAAWKGAELRRIVEPEVYAAFLALTDPGGRFLKVSPSEDVLPADENRHIVLSDRVLGPRDRVKLFPDDRGSIRVRGGAAYIASFHHARVFRWGSSHSPSFALLRVSLADLAVAGLLRDGVDVFTAELPPWTPAWRYASIALVKAVESGDAKQVGWLVPGDELDFGPEGVTTAAGDLSMFLKYFPERHWVVTGFEDDKRINLKPAFLSAEQAEVLRTERSDRPDTLTEAGEILAQFFPRCWRATVAKVLCHPGLTVIRRTALGQPRWRRGHLPYSWRPWSADPWSGGTP

SEQ ID NO: 386 - protein, 1265 aa, Mycoplasma ovipneumoniae
MHNKKNITIGFDLGIASIGWAIIDSTTSKILDWGTRTFEERKTANERRAFRSTRRNIRRKAYRNQRFINLILKYKDLFELKNISDIQRANKKDTENYEKIISFFTEIYKKCAAKHSNILEVKVKALDSKIEKLDLIWILHDYLENRGFFYDLEEENVADKYEGIEHPSILLYDFFKKNGFFKSNSSIPKDLGGYSFSNLQWVNEIKKLFEVQEINPEFSEKFLNLFTSVRDYAKGPGSEHSASEYGIFQKDEKGKVFKKYDNIWDKTIGKCSFFVEENRSPVNYPSYEIFNLLNQLINLSTDLKTTNKKIWQLSSNDRNELLDELLKVKEKAKIISISLKKNEIKKIILKDFGFEKSDIDDQDTIEGRKIIKEEPTTKLEVTKHLLATIYSHSSDSNWININNILEFLPYLDAICIILDREKSRGQDEVLKKLTEKNIFEVLKIDREKQLDFVKSIFSNTKFNFKKIGNFSLKAIREFLPKMFEQNKNSEYLKWKDEEIRRKWEEQKSKLGKTDKKTKYLNPRIFQDEIISPGTKNTFEQAVLVLNQIIKKYSKENIIDAIIIESPREKNDKKTIEEIKKRNKKGKGKTLEKLFQILNLENKGYKLSDLETKPAKLLDRLRFYHQQDGIDLYTLDKINIDQLINGSQKYEIEHIIPYSMSYDNSQANKILTEKAENLKKGKLIASEYIKRNGDEFYNKYYEKAKELFINKYKKNKKLDSYVDLDEDSAKNRFRFLTLQDYDEFQVEFLARNLNDTRYSTKLFYHALVEHFENNEFFTYIDENSSKHKVKISTIKGHVTKYFRAKPVQKNNGPNENLNNNKPEKIEKNRENNEHHAVDAAIVAIIGNKNPQIANLLTLADNKTDKKFLLHDENYKENIETGELVKIPKFEVDKLAKVEDLKKIIQEKYEEAKKHTAIKFSRKTRTILNGGLSDETLYGFKYDEKEDKYFKIIKKKLVTSKNEELKKYFENPFGKKADGKSEYTVLMAQSHLSEFNKLKEIFEKYNGFSNKTGNAFVEYMNDLALKEPTLKAEIESAKSVEKLLYYNFKPSDQFTYHDNINNKSFKRFYKNIRIIEYKSIPIKFKILSKHDGGKSFKDTLFSLYSLVYKVYENGKESYKSIPVTSQMRNFGIDEFDFLDENLYNKEKLDIYKSDFAKPIPVNCKPVFVLKKGSILKKKSLDIDDFKETKETEEGNYYFISTISKRFNRDTAYGLKPLKLSVVKPVAEPSTNPIFKEYIPIHLDELGNEYPVKIKEHTDDEKLMCTIK

SEQ ID NO: 387 - RNA, 20 nt, Artificial Sequence
  Synthetic
aaggugaacguggaugaagu

SEQ ID NO: 388 - RNA, 20 nt, Artificial Sequence
  Synthetic
guaacggcagacuucuccuc

SEQ ID NO: 389 - RNA, 17 nt, Artificial Sequence
  Synthetic
gugaacguggaugaagu

SEQ ID NO: 390 - RNA, 17 nt, Artificial Sequence
  Synthetic
acggcagacuucuccuc

SEQ ID NO: 391 - RNA, 20 nt, Artificial Sequence
  Synthetic
gaaguugguggugaggcccu

SEQ ID NO: 392 - RNA, 20 nt, Artificial Sequence
  Synthetic
gcaaccucaaacagacacca

SEQ ID NO: 393 - RNA, 17 nt, Artificial Sequence
  Synthetic
gccccacagggcaguaa

SEQ ID NO: 394 - RNA, 17 nt, Artificial Sequence
  Synthetic
gccguuacugcccugug

SEQ ID NO: 395 - RNA, 17 nt, Artificial Sequence
  Synthetic
ggagaccaauagaaacu

SEQ ID NO: 396 - RNA, 17 nt, Artificial Sequence
  Synthetic
ggaugaaguugguggug

SEQ ID NO: 397 - RNA, 17 nt, Artificial Sequence
  Synthetic
ggugcaucugacuccug

SEQ ID NO: 398 - RNA, 20 nt, Artificial Sequence
  Synthetic
gucugccguuacugcccugu

SEQ ID NO: 399 - RNA, 20 nt, Artificial Sequence
  Synthetic
gugaacguggaugaaguugg

SEQ ID NO: 400 - RNA, 17 nt, Artificial Sequence
  Synthetic
guggggcaaggugaacg

SEQ ID NO: 401 - RNA, 17 nt, Artificial Sequence
  Synthetic
guggugaggcccugggc

SEQ ID NO: 402 - RNA, 17 nt, Artificial Sequence
  Synthetic
guuacaagacagguuua

SEQ ID NO: 403 - RNA, 17 nt, Artificial Sequence
  Synthetic
guucaccuugccccaca

SEQ ID NO: 404 - RNA, 17 nt, Artificial Sequence
  Synthetic
guugguggugaggcccu

SEQ ID NO: 405 - RNA, 17 nt, Artificial Sequence
  Synthetic
aacguggaugaaguugg

SEQ ID NO: 406 - RNA, 20 nt, Artificial Sequence
  Synthetic
aagguuacaagacagguuua

SEQ ID NO: 407 - RNA, 17 nt, Artificial Sequence
  Synthetic
acaugcccaguuucuau

SEQ ID NO: 408 - RNA, 17 nt, Artificial Sequence
  Synthetic
accauggugucuguuug

SEQ ID NO: 409 - RNA, 17 nt, Artificial Sequence
  Synthetic
accucaaacagacacca

SEQ ID NO: 410 - RNA, 20 nt, Artificial Sequence
  Synthetic
accuugauaccaaccugccc

SEQ ID NO: 411 - RNA, 17 nt, Artificial Sequence
  Synthetic
aggagaccaauagaaac

SEQ ID NO: 412 - RNA, 17 nt, Artificial Sequence
  Synthetic
aggagucagaugcacca

SEQ ID NO: 413 - RNA, 20 nt, Artificial Sequence
  Synthetic
agucugccguuacugcccug

SEQ ID NO: 414 - RNA, 17 nt, Artificial Sequence
  Synthetic
aguugguggugaggccc

SEQ ID NO: 415 - RNA, 20 nt, Artificial Sequence
  Synthetic
cacguucaccuugccccaca

SEQ ID NO: 416 - RNA, 20 nt, Artificial Sequence
  Synthetic
cauggugcaucugacuccug

SEQ ID NO: 417 - RNA, 20 nt, Artificial Sequence
  Synthetic
ccacguucaccuugccccac

SEQ ID NO: 418 - RNA, 20 nt, Artificial Sequence
  Synthetic
cccugggcagguugguauca

SEQ ID NO: 419 - RNA, 20 nt, Artificial Sequence
  Synthetic
ccuguggggcaaggugaacg

SEQ ID NO: 420 - RNA, 20 nt, Artificial Sequence
  Synthetic
ccuugauaccaaccugccca

SEQ ID NO: 421 - RNA, 20 nt, Artificial Sequence
  Synthetic
cguggaugaaguugguggug

SEQ ID NO: 422 - RNA, 20 nt, Artificial Sequence
  Synthetic
cguuacugcccuguggggca

SEQ ID NO: 423 - RNA, 17 nt, Artificial Sequence
  Synthetic
cguucaccuugccccac

SEQ ID NO: 424 - RNA, 20 nt, Artificial Sequence
  Synthetic
cucaggagucagaugcacca

SEQ ID NO: 425 - RNA, 17 nt, Artificial Sequence
  Synthetic
cugccguuacugcccug

SEQ ID NO: 426 - RNA, 20 nt, Artificial Sequence
  Synthetic
cuugccccacagggcaguaa

SEQ ID NO: 427 - RNA, 20 nt, Artificial Sequence
  Synthetic
uaaggagaccaauagaaacu

SEQ ID NO: 428 - RNA, 17 nt, Artificial Sequence
  Synthetic
uacugcccuguggggca

SEQ ID NO: 429 - RNA, 17 nt, Artificial Sequence
  Synthetic
uaucaagguuacaagac

SEQ ID NO: 430 - RNA, 20 nt, Artificial Sequence
  Synthetic
ucugccguuacugcccugug

SEQ ID NO: 431 - RNA, 20 nt, Artificial Sequence
  Synthetic
ugaaguugguggugaggccc

SEQ ID NO: 432 - RNA, 17 nt, Artificial Sequence
  Synthetic
ugaggcccugggcaggu

SEQ ID NO: 433 - RNA, 17 nt, Artificial Sequence
  Synthetic
ugauaccaaccugccca

SEQ ID NO: 434 - RNA, 20 nt, Artificial Sequence
  Synthetic
ugcaccauggugucuguuug

SEQ ID NO: 435 - RNA, 17 nt, Artificial Sequence
  Synthetic
ugccguuacugcccugu

SEQ ID NO: 436 - RNA, 17 nt, Artificial Sequence
  Synthetic
ugggcagguugguauca

SEQ ID NO: 437 - RNA, 20 nt, Artificial Sequence
  Synthetic
ugguaucaagguuacaagac

SEQ ID NO: 438 - RNA, 20 nt, Artificial Sequence
  Synthetic
uggugaggcccugggcaggu

SEQ ID NO: 439 - RNA, 20 nt, Artificial Sequence
  Synthetic
uuaaggagaccaauagaaac

SEQ ID NO: 440 - RNA, 17 nt, Artificial Sequence
  Synthetic
uugauaccaaccugccc

SEQ ID NO: 441 - RNA, 20 nt, Artificial Sequence
  Synthetic
uugguggugaggcccugggc

SEQ ID NO: 442 - RNA, 20 nt, Artificial Sequence
  Synthetic
caccauggugcaucugacuc

SEQ ID NO: 443 - RNA, 20 nt, Artificial Sequence
  Synthetic
ccauggugcaucugacuccu

SEQ ID NO: 444 - RNA, 20 nt, Artificial Sequence
  Synthetic
cauggugcaucugacuccug

SEQ ID NO: 445 - RNA, 20 nt, Artificial Sequence
  Synthetic
uggugcaucugacuccugag

SEQ ID NO: 446 - RNA, 20 nt, Artificial Sequence
  Synthetic
aagucugccguuacugcccu

SEQ ID NO: 447 - RNA, 20 nt, Artificial Sequence
  Synthetic
agucugccguuacugcccug

SEQ ID NO: 448 - RNA, 20 nt, Artificial Sequence
  Synthetic
uuacugcccuguggggcaag

SEQ ID NO: 449 - RNA, 20 nt, Artificial Sequence
  Synthetic
cccuguggggcaaggugaac

SEQ ID NO: 450 - RNA, 20 nt, Artificial Sequence
  Synthetic
guggggcaaggugaacgugg

SEQ ID NO: 451 - RNA, 20 nt, Artificial Sequence
  Synthetic
gaacguggaugaaguuggug

SEQ ID NO: 452 - RNA, 20 nt, Artificial Sequence
  Synthetic
augaaguugguggugaggcc

SEQ ID NO: 453 - RNA, 20 nt, Artificial Sequence
  Synthetic
caagguuacaagacagguuu

SEQ ID NO: 454 - RNA, 20 nt, Artificial Sequence
  Synthetic
aagguuacaagacagguuua

SEQ ID NO: 455 - RNA, 20 nt, Artificial Sequence
  Synthetic
gacagguuuaaggagaccaa

SEQ ID NO: 456 - RNA, 20 nt, Artificial Sequence
  Synthetic
uuuaaggagaccaauagaaa

SEQ ID NO: 457 - RNA, 17 nt, Artificial Sequence
  Synthetic
cauggugcaucugacuc

SEQ ID NO: 458 - RNA, 17 nt, Artificial Sequence
  Synthetic
uggugcaucugacuccu

SEQ ID NO: 459 - RNA, 17 nt, Artificial Sequence
  Synthetic
ggugcaucugacuccug

SEQ ID NO: 460 - RNA, 17 nt, Artificial Sequence
  Synthetic
ugcaucugacuccugag

SEQ ID NO: 461 - RNA, 17 nt, Artificial Sequence
  Synthetic
ucugccguuacugcccu

SEQ ID NO: 462 - RNA, 17 nt, Artificial Sequence
  Synthetic
cugccguuacugcccug

SEQ ID NO: 463 - RNA, 17 nt, Artificial Sequence
  Synthetic
cugcccuguggggcaag

SEQ ID NO: 464 - RNA, 17 nt, Artificial Sequence
  Synthetic
uguggggcaaggugaac

SEQ ID NO: 465 - RNA, 17 nt, Artificial Sequence
  Synthetic
gggcaaggugaacgugg

SEQ ID NO: 466 - RNA, 17 nt, Artificial Sequence
  Synthetic
cguggaugaaguuggug

SEQ ID NO: 467 - RNA, 17 nt, Artificial Sequence
  Synthetic
aaguugguggugaggcc

SEQ ID NO: 468 - RNA, 17 nt, Artificial Sequence
  Synthetic
gguuacaagacagguuu

SEQ ID NO: 469 - RNA, 17 nt, Artificial Sequence
  Synthetic
guuacaagacagguuua

SEQ ID NO: 470 - RNA, 17 nt, Artificial Sequence
  Synthetic
agguuuaaggagaccaa

SEQ ID NO: 471 - RNA, 17 nt, Artificial Sequence
  Synthetic
aaggagaccaauagaaa

SEQ ID NO: 472 - RNA, 20 nt, Artificial Sequence
  Synthetic
gcuagugaacacaguugugu

SEQ ID NO: 473 - RNA, 20 nt, Artificial Sequence
  Synthetic
gugucuguuugagguugcua

SEQ ID NO: 474 - RNA, 20 nt, Artificial Sequence
  Synthetic
agaugcaccauggugucugu

SEQ ID NO: 475 - RNA, 20 nt, Artificial Sequence
  Synthetic
guaacggcagacuucuccuc

SEQ ID NO: 476 - RNA, 20 nt, Artificial Sequence
  Synthetic
aguaacggcagacuucuccu

SEQ ID NO: 477 - RNA, 20 nt, Artificial Sequence
  Synthetic
uccacguucaccuugcccca

SEQ ID NO: 478 - RNA, 20 nt, Artificial Sequence
  Synthetic
aaccuugauaccaaccugcc

SEQ ID NO: 479 - RNA, 17 nt, Artificial Sequence
  Synthetic
agugaacacaguugugu

SEQ ID NO: 480 - RNA, 17 nt, Artificial Sequence
  Synthetic
ucuguuugagguugcua

SEQ ID NO: 481 - RNA, 17 nt, Artificial Sequence
  Synthetic
ugcaccauggugucugu

SEQ ID NO: 482 - RNA, 17 nt, Artificial Sequence
  Synthetic
acggcagacuucuccuc

SEQ ID NO: 483 - RNA, 17 nt, Artificial Sequence
  Synthetic
aacggcagacuucuccu

SEQ ID NO: 484 - RNA, 17 nt, Artificial Sequence
  Synthetic
acguucaccuugcccca

SEQ ID NO: 485 - RNA, 17 nt, Artificial Sequence
  Synthetic
cuugauaccaaccugcc

SEQ ID NO: 486 - RNA, 20 nt, Artificial Sequence
  Synthetic
uggcauccaggucacgccag

SEQ ID NO: 487 - RNA, 20 nt, Artificial Sequence
  Synthetic
gaugcuuuuuucaucucgau

SEQ ID NO: 488 - RNA, 20 nt, Artificial Sequence
  Synthetic
gcauccaaucccguggaggu

SEQ ID NO: 489 - RNA, 20 nt, Artificial Sequence
  Synthetic
uuuucaucucgauuggugaa

SEQ ID NO: 490 - RNA, 20 nt, Artificial Sequence
  Synthetic
ccagaugaacuucccauugg

SEQ ID NO: 491 - RNA, 20 nt, Artificial Sequence
  Synthetic
aggaggucaugauccccuuc

SEQ ID NO: 492 - RNA, 17 nt, Artificial Sequence
  Synthetic
cauccaggucacgccag

SEQ ID NO: 493 - RNA, 17 nt, Artificial Sequence
  Synthetic
gcuuuuuucaucucgau

SEQ ID NO: 494 - RNA, 17 nt, Artificial Sequence
  Synthetic
uccaaucccguggaggu

SEQ ID NO: 495 - RNA, 17 nt, Artificial Sequence
  Synthetic
ucaucucgauuggugaa

SEQ ID NO: 496 - RNA, 17 nt, Artificial Sequence
  Synthetic
gaugaacuucccauugg

SEQ ID NO: 497 - RNA, 17 nt, Artificial Sequence
  Synthetic
aggucaugauccccuuc

SEQ ID NO: 498 - RNA, 20 nt, Artificial Sequence
  Synthetic
gaaaaaagcauccaaucccg

SEQ ID NO: 499 - RNA, 20 nt, Artificial Sequence
  Synthetic
gaaccagaccacggcccguu

SEQ ID NO: 500 - RNA, 20 nt, Artificial Sequence
  Synthetic
gaccuggaugccaaccucca

SEQ ID NO: 501 - RNA, 20 nt, Artificial Sequence
  Synthetic
gagcuccaugugcagaacga

SEQ ID NO: 502 - RNA, 17 nt, Artificial Sequence
  Synthetic
gagcucccaacgggccg

SEQ ID NO: 503 - RNA, 20 nt, Artificial Sequence
  Synthetic
gagcucuaauccccacgccu

SEQ ID NO: 504 - RNA, 20 nt, Artificial Sequence
  Synthetic
gagugcagaauaugccccgc

SEQ ID NO: 505 - RNA, 20 nt, Artificial Sequence
  Synthetic
gauaaacaaucgucauccuc

SEQ ID NO: 506 - RNA, 20 nt, Artificial Sequence
  Synthetic
gaucaugaccuccucaccug

SEQ ID NO: 507 - RNA, 17 nt, Artificial Sequence
  Synthetic
gaugaugaaccagacca

SEQ ID NO: 508 - RNA, 20 nt, Artificial Sequence
  Synthetic
gaugccaaccuccacgggau

SEQ ID NO: 509 - RNA, 17 nt, Artificial Sequence
  Synthetic
gcacucaucccaggcgu

SEQ ID NO: 510 - RNA, 17 nt, Artificial Sequence
  Synthetic
gcagaauaugccccgca

SEQ ID NO: 511 - RNA, 20 nt, Artificial Sequence
  Synthetic
gcauauucugcacucauccc

SEQ ID NO: 512 - RNA, 17 nt, Artificial Sequence
  Synthetic
gccaaccuccacgggau

SEQ ID NO: 513 - RNA, 20 nt, Artificial Sequence
  Synthetic
gccagaugaacuucccauug

SEQ ID NO: 514 - RNA, 20 nt, Artificial Sequence
  Synthetic
gcccguugggagcuccagaa

SEQ ID NO: 515 - RNA, 17 nt, Artificial Sequence
  Synthetic
gcuauguguuccuguuu

SEQ ID NO: 516 - RNA, 17 nt, Artificial Sequence
  Synthetic
gcuccaugugcagaacg

SEQ ID NO: 517 - RNA, 20 nt, Artificial Sequence
  Synthetic
gcucccaacgggccgugguc

SEQ ID NO: 518 - RNA, 17 nt, Artificial Sequence
  Synthetic
gcucuaauccccacgcc

SEQ ID NO: 519 - RNA, 20 nt, Artificial Sequence
  Synthetic
gcugggguuugccuugcuug

SEQ ID NO: 520 - RNA, 20 nt, Artificial Sequence
  Synthetic
ggagcucuaauccccacgcc

SEQ ID NO: 521 - RNA, 17 nt, Artificial Sequence
  Synthetic
ggcacugcccacaggug

SEQ ID NO: 522 - RNA, 20 nt, Artificial Sequence
  Synthetic
ggcacugcccacaggugagg

SEQ ID NO: 523 - RNA, 20 nt, Artificial Sequence
  Synthetic
ggcccguugggagcuccaga

SEQ ID NO: 524 - RNA, 17 nt, Artificial Sequence
  Synthetic
gggguuugccuugcuug

SEQ ID NO: 525 - RNA, 17 nt, Artificial Sequence
  Synthetic
guaagaauggcuucaag

SEQ ID NO: 526 - RNA, 20 nt, Artificial Sequence
  Synthetic
gugcagaacgaggggaggag

SEQ ID NO: 527 - RNA, 20 nt, Artificial Sequence
  Synthetic
gugccagaugaacuucccau

SEQ ID NO: 528 - RNA, 20 nt, Artificial Sequence
  Synthetic
guucaucuggcacugcccac

SEQ ID NO: 529 - RNA, 17 nt, Artificial Sequence
  Synthetic
guugggagcuccagaag

SEQ ID NO: 530 - RNA, 17 nt, Artificial Sequence
  Synthetic
aaaagcauccaaucccg

SEQ ID NO: 531 - RNA, 20 nt, Artificial Sequence
  Synthetic
aaaagcauccaaucccgugg

SEQ ID NO: 532 - RNA, 20 nt, Artificial Sequence
  Synthetic
aaaauaagaaugucccccaa

SEQ ID NO: 533 - RNA, 17 nt, Artificial Sequence
  Synthetic
aaacaaucgucauccuc

SEQ ID NO: 534 - RNA, 17 nt, Artificial Sequence
  Synthetic
aaacggaaacaaugcaa

SEQ ID NO: 535 - RNA, 17 nt, Artificial Sequence
  Synthetic
aaacuucugcacuggag

SEQ ID NO: 536 - RNA, 20 nt, Artificial Sequence
  Synthetic
aaauaagaaugucccccaau

SEQ ID NO: 537 - RNA, 20 nt, Artificial Sequence
  Synthetic
aaccccagcacuuaagcaaa

SEQ ID NO: 538 - RNA, 20 nt, Artificial Sequence
  Synthetic
acagaugaugaaccagacca

SEQ ID NO: 539 - RNA, 17 nt, Artificial Sequence
  Synthetic
accagaccacggcccgu

SEQ ID NO: 540 - RNA, 20 nt, Artificial Sequence
  Synthetic
accccagcacuuaagcaaac

SEQ ID NO: 541 - RNA, 20 nt, Artificial Sequence
  Synthetic
accuggaugccaaccuccac

SEQ ID NO: 542 - RNA, 17 nt, Artificial Sequence
  Synthetic
acugcccacaggugagg

SEQ ID NO: 543 - RNA, 20 nt, Artificial Sequence
  Synthetic
agagcuccaugugcagaacg

SEQ ID NO: 544 - RNA, 17 nt, Artificial Sequence
  Synthetic
agaugaacuucccauug

SEQ ID NO: 545 - RNA, 17 nt, Artificial Sequence
  Synthetic
agcauccaaucccgugg

SEQ ID NO: 546 - RNA, 20 nt, Artificial Sequence
  Synthetic
agcuccaugugcagaacgag

SEQ ID NO: 547 - RNA, 17 nt, Artificial Sequence
  Synthetic
aggaauuugccccaaac

SEQ ID NO: 548 - RNA, 20 nt, Artificial Sequence
  Synthetic
agugcagaauaugccccgca

SEQ ID NO: 549 - RNA, 17 nt, Artificial Sequence
  Synthetic
auaagaaugucccccaa

SEQ ID NO: 550 - RNA, 20 nt, Artificial Sequence
  Synthetic
aucaugaccuccucaccugu

SEQ ID NO: 551 - RNA, 20 nt, Artificial Sequence
  Synthetic
aucucgauuggugaagggga

SEQ ID NO: 552 - RNA, 17 nt, Artificial Sequence
  Synthetic
augaccuccucaccugu

SEQ ID NO: 553 - RNA, 17 nt, Artificial Sequence
  Synthetic
augugcagaacgagggg

SEQ ID NO: 554 - RNA, 20 nt, Artificial Sequence
  Synthetic
auucccguuugcuuaagugc

SEQ ID NO: 555 - RNA, 17 nt, Artificial Sequence
  Synthetic
auuggugaaggggaagg

SEQ ID NO: 556 - RNA, 20 nt, Artificial Sequence
  Synthetic
cacaaacggaaacaaugcaa

SEQ ID NO: 557 - RNA, 17 nt, Artificial Sequence
  Synthetic
cacucaucccaggcgug

SEQ ID NO: 558 - RNA, 17 nt, Artificial Sequence
  Synthetic
cagaacgaggggaggag

SEQ ID NO: 559 - RNA, 17 nt, Artificial Sequence
  Synthetic
cagaugaacuucccauu

SEQ ID NO: 560 - RNA, 17 nt, Artificial Sequence
  Synthetic
cagcuuuuucuaagcag

SEQ ID NO: 561 - RNA, 17 nt, Artificial Sequence
  Synthetic
cauccucuggcgugacc

SEQ ID NO: 562 - RNA, 17 nt, Artificial Sequence
  Synthetic
caucucgauuggugaag

SEQ ID NO: 563 - RNA, 17 nt, Artificial Sequence
  Synthetic
caucuggcacugcccac

SEQ ID NO: 564 - RNA, 17 nt, Artificial Sequence
  Synthetic
caugaccuccucaccug

SEQ ID NO: 565 - RNA, 17 nt, Artificial Sequence
  Synthetic
ccaaugggaaguucauc

SEQ ID NO: 566 - RNA, 20 nt, Artificial Sequence
  Synthetic
ccacagcuuuuucuaagcag

SEQ ID NO: 567 - RNA, 17 nt, Artificial Sequence
  Synthetic
ccagaccacggcccguu

SEQ ID NO: 568 - RNA, 17 nt, Artificial Sequence
  Synthetic
ccagaugaacuucccau

SEQ ID NO: 569 - RNA, 17 nt, Artificial Sequence
  Synthetic
ccagcacuuaagcaaac

SEQ ID NO: 570 - RNA, 17 nt, Artificial Sequence
  Synthetic
cccaacgggccgugguc

SEQ ID NO: 571 - RNA, 17 nt, Artificial Sequence
  Synthetic
cccagcacuuaagcaaa

SEQ ID NO: 572 - RNA, 20 nt, Artificial Sequence
  Synthetic
cccccaaugggaaguucauc

SEQ ID NO: 573 - RNA, 20 nt, Artificial Sequence
  Synthetic
ccccuucuggagcucccaac

SEQ ID NO: 574 - RNA, 20 nt, Artificial Sequence
  Synthetic
cccguugggagcuccagaag

SEQ ID NO: 575 - RNA, 17 nt, Artificial Sequence
  Synthetic
cccguuugcuuaagugc

SEQ ID NO: 576 - RNA, 17 nt, Artificial Sequence
  Synthetic
ccguugggagcuccaga

SEQ ID NO: 577 - RNA, 17 nt, Artificial Sequence
  Synthetic
ccguuugcuuaagugcu

SEQ ID NO: 578 - RNA, 20 nt, Artificial Sequence
  Synthetic
ccucugcuuagaaaaagcug

SEQ ID NO: 579 - RNA, 17 nt, Artificial Sequence
  Synthetic
ccuucuggagcucccaa

SEQ ID NO: 580 - RNA, 20 nt, Artificial Sequence
  Synthetic
cgucauccucuggcgugacc

SEQ ID NO: 581 - RNA, 17 nt, Artificial Sequence
  Synthetic
cguggagguuggcaucc

SEQ ID NO: 582 - RNA, 17 nt, Artificial Sequence
  Synthetic
cguugggagcuccagaa

SEQ ID NO: 583 - RNA, 17 nt, Artificial Sequence
  Synthetic
cguuugcuuaagugcug

SEQ ID NO: 584 - RNA, 17 nt, Artificial Sequence
  Synthetic
cuauguguuccuguuug

SEQ ID NO: 585 - RNA, 17 nt, Artificial Sequence
  Synthetic
cuccaugugcagaacga

SEQ ID NO: 586 - RNA, 17 nt, Artificial Sequence
  Synthetic
cucuaauccccacgccu

SEQ ID NO: 587 - RNA, 20 nt, Artificial Sequence
  Synthetic
cugcacucaucccaggcgug

SEQ ID NO: 588 - RNA, 17 nt, Artificial Sequence
  Synthetic
cugcuuagaaaaagcug

SEQ ID NO: 589 - RNA, 20 nt, Artificial Sequence
  Synthetic
cuggagcucccaacgggccg

SEQ ID NO: 590 - RNA, 17 nt, Artificial Sequence
  Synthetic
cuggaugccaaccucca

SEQ ID NO: 591 - RNA, 17 nt, Artificial Sequence
  Synthetic
cuucuggagcucccaac

SEQ ID NO: 592 - RNA, 17 nt, Artificial Sequence
  Synthetic
uaaacuucugcacugga

SEQ ID NO: 593 - RNA, 17 nt, Artificial Sequence
  Synthetic
uaagaaugucccccaau

SEQ ID NO: 594 - RNA, 20 nt, Artificial Sequence
  Synthetic
uagaggaauuugccccaaac

SEQ ID NO: 595 - RNA, 17 nt, Artificial Sequence
  Synthetic
uauucugcacucauccc

SEQ ID NO: 596 - RNA, 17 nt, Artificial Sequence
  Synthetic
uccaugugcagaacgag

SEQ ID NO: 597 - RNA, 20 nt, Artificial Sequence
  Synthetic
uccaugugcagaacgagggg

SEQ ID NO: 598 - RNA, 17 nt, Artificial Sequence
  Synthetic
uccccucguucugcaca

SEQ ID NO: 599 - RNA, 20 nt, Artificial Sequence
  Synthetic
uccccuucuggagcucccaa

SEQ ID NO: 600 - RNA, 20 nt, Artificial Sequence
  Synthetic
ucccguggagguuggcaucc

SEQ ID NO: 601 - RNA, 20 nt, Artificial Sequence
  Synthetic
ucccguuugcuuaagugcug

SEQ ID NO: 602 - RNA, 20 nt, Artificial Sequence
  Synthetic
uccuccccucguucugcaca

SEQ ID NO: 603 - RNA, 17 nt, Artificial Sequence
  Synthetic
ucgauuggugaagggga

SEQ ID NO: 604 - RNA, 20 nt, Artificial Sequence
  Synthetic
ucgauuggugaaggggaagg

SEQ ID NO: 605 - RNA, 20 nt, Artificial Sequence
  Synthetic
ucugcacucaucccaggcgu

SEQ ID NO: 606 - RNA, 20 nt, Artificial Sequence
  Synthetic
ucuggcacugcccacaggug

SEQ ID NO: 607 - RNA, 20 nt, Artificial Sequence
  Synthetic
ucuguaagaauggcuucaag

SEQ ID NO: 608 - RNA, 20 nt, Artificial Sequence
  Synthetic
ugaaccagaccacggcccgu

SEQ ID NO: 609 - RNA, 17 nt, Artificial Sequence
  Synthetic
ugcacucaucccaggcg

SEQ ID NO: 610 - RNA, 17 nt, Artificial Sequence
  Synthetic
ugcagaauaugccccgc

SEQ ID NO: 611 - RNA, 20 nt, Artificial Sequence
  Synthetic
ugccagaugaacuucccauu

SEQ ID NO: 612 - RNA, 17 nt, Artificial Sequence
  Synthetic
ugcuauguguuccuguu

SEQ ID NO: 613 - RNA, 17 nt, Artificial Sequence
  Synthetic
uggaugccaaccuccac

SEQ ID NO: 614 - RNA, 20 nt, Artificial Sequence
  Synthetic
ugguucaucaucuguaagaa

SEQ ID NO: 615 - RNA, 20 nt, Artificial Sequence
  Synthetic
uguuuaucaacgucaucuag

SEQ ID NO: 616 - RNA, 17 nt, Artificial Sequence
  Synthetic
uuaucaacgucaucuag

SEQ ID NO: 617 - RNA, 20 nt, Artificial Sequence
  Synthetic
uuauuuuuaucgagcacaaa

SEQ ID NO: 618 - RNA, 17 nt, Artificial Sequence
  Synthetic
uucaucaucuguaagaa

SEQ ID NO: 619 - RNA, 17 nt, Artificial Sequence
  Synthetic
uucaucucgauugguga

SEQ ID NO: 620 - RNA, 20 nt, Artificial Sequence
  Synthetic
uucccguuugcuuaagugcu

SEQ ID NO: 621 - RNA, 20 nt, Artificial Sequence
  Synthetic
uucugcacucaucccaggcg

SEQ ID NO: 622 - RNA, 20 nt, Artificial Sequence
  Synthetic
uuucaucucgauuggugaag

SEQ ID NO: 623 - RNA, 17 nt, Artificial Sequence
  Synthetic
uuuuuaucgagcacaaa

SEQ ID NO: 624 - RNA, 20 nt, Artificial Sequence
  Synthetic
uuuuucaucucgauugguga

SEQ ID NO: 625 - RNA, 20 nt, Artificial Sequence
  Synthetic
aacagccauucaccagugca

SEQ ID NO: 626 - RNA, 20 nt, Artificial Sequence
  Synthetic
caacacgcacagaacacuca

SEQ ID NO: 627 - RNA, 20 nt, Artificial Sequence
  Synthetic
aucuacuuagaaagcgaaca

SEQ ID NO: 628 - RNA, 20 nt, Artificial Sequence
  Synthetic
acggaaguccccugaccccg

SEQ ID NO: 629 - RNA, 20 nt, Artificial Sequence
  Synthetic
cggaaguccccugaccccgc

SEQ ID NO: 630 - RNA, 20 nt, Artificial Sequence
  Synthetic
aguccccugaccccgcgggu

SEQ ID NO: 631 - RNA, 20 nt, Artificial Sequence
  Synthetic
ccgcggguugguaucccuuc

SEQ ID NO: 632 - RNA, 20 nt, Artificial Sequence
  Synthetic
guugguaucccuucaggacu

SEQ ID NO: 633 - RNA, 20 nt, Artificial Sequence
  Synthetic
ccuucccagccaccucucca

SEQ ID NO: 634 - RNA, 20 nt, Artificial Sequence
  Synthetic
cuucccagccaccucuccau

SEQ ID NO: 635 - RNA, 20 nt, Artificial Sequence
  Synthetic
uuuaaccugcuaagaauacc

SEQ ID NO: 636 - RNA, 20 nt, Artificial Sequence
  Synthetic
accaggaucaguaucgagag

SEQ ID NO: 637 - RNA, 20 nt, Artificial Sequence
  Synthetic
ucaguaucgagagaggcuuc

SEQ ID NO: 638 - RNA, 20 nt, Artificial Sequence
  Synthetic
aucgagagaggcuuccggcc

SEQ ID NO: 639 - RNA, 20 nt, Artificial Sequence
  Synthetic
gaggcuuccggccuggcaga

SEQ ID NO: 640 - RNA, 20 nt, Artificial Sequence
  Synthetic
aggcuuccggccuggcagaa

SEQ ID NO: 641 - RNA, 20 nt, Artificial Sequence
  Synthetic
uccaccaccgagacaucacu

SEQ ID NO: 642 - RNA, 20 nt, Artificial Sequence
  Synthetic
cccccaccgcauagagcgcc

SEQ ID NO: 643 - RNA, 20 nt, Artificial Sequence
  Synthetic
ccccaccgcauagagcgccu

SEQ ID NO: 644 - RNA, 20 nt, Artificial Sequence
  Synthetic
cccaccgcauagagcgccug

SEQ ID NO: 645 - RNA, 20 nt, Artificial Sequence
  Synthetic
ccaccgcauagagcgccugg

SEQ ID NO: 646 - RNA, 20 nt, Artificial Sequence
  Synthetic
ccgcauagagcgccuggggg

SEQ ID NO: 647 - RNA, 20 nt, Artificial Sequence
  Synthetic
gcgccugggggcggaagaga

SEQ ID NO: 648 - RNA, 20 nt, Artificial Sequence
  Synthetic
gggggcggaagagauggccc

SEQ ID NO: 649 - RNA, 20 nt, Artificial Sequence
  Synthetic
aucacccgagugccuuugac

SEQ ID NO: 650 - RNA, 20 nt, Artificial Sequence
  Synthetic
ucacccgagugccuuugaca

SEQ ID NO: 651 - RNA, 20 nt, Artificial Sequence
  Synthetic
gugccuuugacagggugcug

SEQ ID NO: 652 - RNA, 20 nt, Artificial Sequence
  Synthetic
ggugcugcgguugaauccaa

SEQ ID NO: 653 - RNA, 20 nt, Artificial Sequence
  Synthetic
gcgguugaauccaauggcua

SEQ ID NO: 654 - RNA, 20 nt, Artificial Sequence
  Synthetic
ggcuauggagccucccgcca

SEQ ID NO: 655 - RNA, 20 nt, Artificial Sequence
  Synthetic
cucccgccauggauuucucu

SEQ ID NO: 656 - RNA, 20 nt, Artificial Sequence
  Synthetic
cucuaggagacuuagagagc

SEQ ID NO: 657 - RNA, 20 nt, Artificial Sequence
  Synthetic
aggagacuuagagagcuggc

SEQ ID NO: 658 - RNA, 20 nt, Artificial Sequence
  Synthetic
ggagacuuagagagcuggca

SEQ ID NO: 659 - RNA, 20 nt, Artificial Sequence
  Synthetic
ucuagcccaccgcugucccc

SEQ ID NO: 660 - RNA, 20 nt, Artificial Sequence
  Synthetic
gcccaccgcuguccccaggc

SEQ ID NO: 661 - RNA, 20 nt, Artificial Sequence
  Synthetic
gccggcccagcccuaugcaa

SEQ ID NO: 662 - RNA, 20 nt, Artificial Sequence
  Synthetic
uuacugcaaccauuccagcc

SEQ ID NO: 663 - RNA, 20 nt, Artificial Sequence
  Synthetic
agguagcaagccgcccuucc

SEQ ID NO: 664 - RNA, 20 nt, Artificial Sequence
  Synthetic
cccuccucccucccagcccc

SEQ ID NO: 665 - RNA, 20 nt, Artificial Sequence
  Synthetic
uccaagucaugcgaguucug

SEQ ID NO: 666 - RNA, 20 nt, Artificial Sequence
  Synthetic
guucaaauuucagagcaacc

SEQ ID NO: 667 - RNA, 20 nt, Artificial Sequence
  Synthetic
caaauuucagagcaaccugg

SEQ ID NO: 668 - RNA, 20 nt, Artificial Sequence
  Synthetic
agagcaaccugguggugcac

SEQ ID NO: 669 - RNA, 20 nt, Artificial Sequence
  Synthetic
ggugcaccggcgcagccaca

SEQ ID NO: 670 - RNA, 20 nt, Artificial Sequence
  Synthetic
gugcaccggcgcagccacac

SEQ ID NO: 671 - RNA, 20 nt, Artificial Sequence
  Synthetic
gugcgaccacgcgugcaccc

SEQ ID NO: 672 - RNA, 20 nt, Artificial Sequence
  Synthetic
gcacaaaucgucccccauga

SEQ ID NO: 673 - RNA, 20 nt, Artificial Sequence
  Synthetic
augacggucaaguccgacga

SEQ ID NO: 674 - RNA, 20 nt, Artificial Sequence
  Synthetic
ucucuccaccgccagcuccc

SEQ ID NO: 675 - RNA, 20 nt, Artificial Sequence
  Synthetic
accgccagcuccccggaacc

SEQ ID NO: 676 - RNA, 20 nt, Artificial Sequence
  Synthetic
ggaacccggcaccagcgacu

SEQ ID NO: 677 - RNA, 20 nt, Artificial Sequence
  Synthetic
acccggcaccagcgacuugg

SEQ ID NO: 678 - RNA, 20 nt, Artificial Sequence
  Synthetic
cccggcaccagcgacuuggu

SEQ ID NO: 679 - RNA, 20 nt, Artificial Sequence
  Synthetic
cagcagcgcgcucaaguccg

SEQ ID NO: 680 - RNA, 20 nt, Artificial Sequence
  Synthetic
cagcgcgcucaaguccgugg

SEQ ID NO: 681 - RNA, 20 nt, Artificial Sequence
  Synthetic
gaacgaccccaaccugaucc

SEQ ID NO: 682 - RNA, 20 nt, Artificial Sequence
  Synthetic
cccaaccugaucccggagaa

SEQ ID NO: 683 - RNA, 20 nt, Artificial Sequence
  Synthetic
ccaaccugaucccggagaac

SEQ ID NO: 684 - RNA, 20 nt, Artificial Sequence
  Synthetic
caaccugaucccggagaacg

SEQ ID NO: 685 - RNA, 20 nt, Artificial Sequence
  Synthetic
gaucccggagaacggggacg

SEQ ID NO: 686 - RNA, 20 nt, Artificial Sequence
  Synthetic
cccggagaacggggacgagg

SEQ ID NO: 687 - RNA, 20 nt, Artificial Sequence
  Synthetic
gaacggggacgaggaggaag

SEQ ID NO: 688 - RNA, 20 nt, Artificial Sequence
  Synthetic
cggggacgaggaggaagagg

SEQ ID NO: 689 - RNA, 20 nt, Artificial Sequence
  Synthetic
ggaggaagaggaggacgacg

SEQ ID NO: 690 - RNA, 20 nt, Artificial Sequence
  Synthetic
agaggaggacgacgaggaag

SEQ ID NO: 691 - RNA, 20 nt, Artificial Sequence
  Synthetic
cgacgaggaagaggaagaag

SEQ ID NO: 692 - RNA, 20 nt, Artificial Sequence
  Synthetic
cgaggaagaggaagaagagg

SEQ ID NO: 693 - RNA, 20 nt, Artificial Sequence
  Synthetic
agaggaagaagaggaggaag

SEQ ID NO: 694 - RNA, 20 nt, Artificial Sequence
  Synthetic
ggaagaagaggaggaagagg

SEQ ID NO: 695 - RNA, 20 nt, Artificial Sequence
  Synthetic
agaagaggaggaagaggagg

SEQ ID NO: 696 - RNA, 20 nt, Artificial Sequence
  Synthetic
agaggaggaagaggaggagg

SEQ ID NO: 697 - RNA, 20 nt, Artificial Sequence
  Synthetic
uccuccucguccccguucuc

SEQ ID NO: 698 - RNA, 20 nt, Artificial Sequence
  Synthetic
ccuccucguccccguucucc

SEQ ID NO: 699 - RNA, 20 nt, Artificial Sequence
  Synthetic
cguccccguucuccgggauc

SEQ ID NO: 700 - RNA, 20 nt, Artificial Sequence
  Synthetic
cccguucuccgggaucaggu

SEQ ID NO: 701 - RNA, 20 nt, Artificial Sequence
  Synthetic
ccguucuccgggaucagguu

SEQ ID NO: 702 - RNA, 20 nt, Artificial Sequence
  Synthetic
cguucuccgggaucagguug

SEQ ID NO: 703 - RNA, 20 nt, Artificial Sequence
  Synthetic
gucguucucgcucuugaacu

SEQ ID NO: 704 - RNA, 20 nt, Artificial Sequence
  Synthetic
gcucuugaacuuggccacca

SEQ ID NO: 705 - RNA, 20 nt, Artificial Sequence
  Synthetic
cacggacuugagcgcgcugc

SEQ ID NO: 706 - RNA, 20 nt, Artificial Sequence
  Synthetic
ggcgcugcccaccaagucgc

SEQ ID NO: 707 - RNA, 20 nt, Artificial Sequence
  Synthetic
gcccaccaagucgcuggugc

SEQ ID NO: 708 - RNA, 20 nt, Artificial Sequence
  Synthetic
cccaccaagucgcuggugcc

SEQ ID NO: 709 - RNA, 20 nt, Artificial Sequence
  Synthetic
aagucgcuggugccggguuc

SEQ ID NO: 710 - RNA, 20 nt, Artificial Sequence
  Synthetic
agucgcuggugccggguucc

SEQ ID NO: 711 - RNA, 20 nt, Artificial Sequence
  Synthetic
gucgcuggugccggguuccg

SEQ ID NO: 712 - RNA, 20 nt, Artificial Sequence
  Synthetic
ggugccggguuccggggagc

SEQ ID NO: 713 - RNA, 20 nt, Artificial Sequence
  Synthetic
gccggguuccggggagcugg

SEQ ID NO: 714 - RNA, 20 nt, Artificial Sequence
  Synthetic
ggguuccggggagcuggcgg

SEQ ID NO: 715 - RNA, 20 nt, Artificial Sequence
  Synthetic
ggcgguggagagaccgucgu

SEQ ID NO: 716 - RNA, 20 nt, Artificial Sequence
  Synthetic
gucgucggacuugaccguca

SEQ ID NO: 717 - RNA, 20 nt, Artificial Sequence
  Synthetic
ucgucggacuugaccgucau

SEQ ID NO: 718 - RNA, 20 nt, Artificial Sequence
  Synthetic
cgucggacuugaccgucaug

SEQ ID NO: 719 - RNA, 20 nt, Artificial Sequence
  Synthetic
gucggacuugaccgucaugg

SEQ ID NO: 720 - RNA, 20 nt, Artificial Sequence
  Synthetic
ugugcaugugcgucuucaug

SEQ ID NO: 721 - RNA, 20 nt, Artificial Sequence
  Synthetic
cauguggcgcuucagcuugc

SEQ ID NO: 722 - RNA, 20 nt, Artificial Sequence
  Synthetic
ggcgcuucagcuugcuggcc

SEQ ID NO: 723 - RNA, 20 nt, Artificial Sequence
  Synthetic
gcgcuucagcuugcuggccu

SEQ ID NO: 724 - RNA, 20 nt, Artificial Sequence
  Synthetic
ugcuggccugggugcacgcg

SEQ ID NO: 725 - RNA, 20 nt, Artificial Sequence
  Synthetic
gggugcacgcguggucgcac

SEQ ID NO: 726 - RNA, 20 nt, Artificial Sequence
  Synthetic
gucgcacagguugcacuugu

SEQ ID NO: 727 - RNA, 20 nt, Artificial Sequence
  Synthetic
ucgcacagguugcacuugua

SEQ ID NO: 728 - RNA, 20 nt, Artificial Sequence
  Synthetic
uguagggcuucucgcccgug

SEQ ID NO: 729 - RNA, 20 nt, Artificial Sequence
  Synthetic
ucucgcccguguggcugcgc

SEQ ID NO: 730 - RNA, 20 nt, Artificial Sequence
  Synthetic
ggcugcgccggugcaccacc

SEQ ID NO: 731 - RNA, 20 nt, Artificial Sequence
  Synthetic
gccgcagaacucgcaugacu

SEQ ID NO: 732 - RNA, 20 nt, Artificial Sequence
  Synthetic
ucgcaugacuuggacuugac

SEQ ID NO: 733 - RNA, 20 nt, Artificial Sequence
  Synthetic
cgcaugacuuggacuugacc

SEQ ID NO: 734 - RNA, 20 nt, Artificial Sequence
  Synthetic
gcaugacuuggacuugaccg

SEQ ID NO: 735 - RNA, 20 nt, Artificial Sequence
  Synthetic
caugacuuggacuugaccgg

SEQ ID NO: 736 - RNA, 20 nt, Artificial Sequence
  Synthetic
acuuggacuugaccgggggc

SEQ ID NO: 737 - RNA, 20 nt, Artificial Sequence
  Synthetic
cuuggacuugaccgggggcu

SEQ ID NO: 738 - RNA, 20 nt, Artificial Sequence
  Synthetic
ggacuugaccgggggcuggg

SEQ ID NO: 739 - RNA, 20 nt, Artificial Sequence
  Synthetic
gacuugaccgggggcuggga

SEQ ID NO: 740 - RNA, 20 nt, Artificial Sequence
  Synthetic
uugaccgggggcugggaggg

SEQ ID NO: 741 - RNA, 20 nt, Artificial Sequence
  Synthetic
accgggggcugggagggagg

SEQ ID NO: 742 - RNA, 20 nt, Artificial Sequence
  Synthetic
ccgggggcugggagggagga

SEQ ID NO: 743 - RNA, 20 nt, Artificial Sequence
  Synthetic
cgggggcugggagggaggag

SEQ ID NO: 744 - RNA, 20 nt, Artificial Sequence
  Synthetic
gggcugggagggaggagggg

SEQ ID NO: 745 - RNA, 20 nt, Artificial Sequence
  Synthetic
ggaggaggggcggauugcag

SEQ ID NO: 746 - RNA, 20 nt, Artificial Sequence
  Synthetic
ggaggggcggauugcagagg

SEQ ID NO: 747 - RNA, 20 nt, Artificial Sequence
  Synthetic
gaggggcggauugcagagga

SEQ ID NO: 748 - RNA, 20 nt, Artificial Sequence
  Synthetic
gggcggauugcagaggaggg

SEQ ID NO: 749 - RNA, 20 nt, Artificial Sequence
  Synthetic
ggcggauugcagaggaggga

SEQ ID NO: 750 - RNA, 20 nt, Artificial Sequence
  Synthetic
gcggauugcagaggagggag

SEQ ID NO: 751 - RNA, 20 nt, Artificial Sequence
  Synthetic
cggauugcagaggagggagg

SEQ ID NO: 752 - RNA, 20 nt, Artificial Sequence
  Synthetic
ggauugcagaggagggaggg

SEQ ID NO: 753 - RNA, 20 nt, Artificial Sequence
  Synthetic
gauugcagaggagggagggg

SEQ ID NO: 754 - RNA, 20 nt, Artificial Sequence
  Synthetic
gagggagggggggcgucgcc

SEQ ID NO: 755 - RNA, 20 nt, Artificial Sequence
  Synthetic
gagggggggcgucgccagga

SEQ ID NO: 756 - RNA, 20 nt, Artificial Sequence
  Synthetic
agggggggcgucgccaggaa

SEQ ID NO: 757 - RNA, 20 nt, Artificial Sequence
  Synthetic
gggggcgucgccaggaaggg

SEQ ID NO: 758 - RNA, 20 nt, Artificial Sequence
  Synthetic
aggaagggcggcuugcuacc

SEQ ID NO: 759 - RNA, 20 nt, Artificial Sequence
  Synthetic
agggcggcuugcuaccuggc

SEQ ID NO: 760 - RNA, 20 nt, Artificial Sequence
  Synthetic
ggcuugcuaccuggcuggaa

SEQ ID NO: 761 - RNA, 20 nt, Artificial Sequence
  Synthetic
gguugcaguaaccuuugcau

SEQ ID NO: 762 - RNA, 20 nt, Artificial Sequence
  Synthetic
guugcaguaaccuuugcaua

SEQ ID NO: 763 - RNA, 20 nt, Artificial Sequence
  Synthetic
caguaaccuuugcauagggc

SEQ ID NO: 764 - RNA, 20 nt, Artificial Sequence
  Synthetic
aguaaccuuugcauagggcu

SEQ ID NO: 765 - RNA, 20 nt, Artificial Sequence
  Synthetic
accuuugcauagggcugggc

SEQ ID NO: 766 - RNA, 20 nt, Artificial Sequence
  Synthetic
ugcauagggcugggccggcc

SEQ ID NO: 767 - RNA, 20 nt, Artificial Sequence
  Synthetic
gcauagggcugggccggccu

SEQ ID NO: 768 - RNA, 20 nt, Artificial Sequence
  Synthetic
cauagggcugggccggccug

SEQ ID NO: 769 - RNA, 20 nt, Artificial Sequence
  Synthetic
cugggccggccuggggacag

SEQ ID NO: 770 - RNA, 20 nt, Artificial Sequence
  Synthetic
ggccggccuggggacagcgg

SEQ ID NO: 771 - RNA, 20 nt, Artificial Sequence
  Synthetic
gccggccuggggacagcggu

SEQ ID NO: 772 - RNA, 20 nt, Artificial Sequence
  Synthetic
aagucuccuagagaaaucca

SEQ ID NO: 773 - RNA, 20 nt, Artificial Sequence
  Synthetic
ucuccuagagaaauccaugg

SEQ ID NO: 774 - RNA, 20 nt, Artificial Sequence
  Synthetic
cuccuagagaaauccauggc

SEQ ID NO: 775 - RNA, 20 nt, Artificial Sequence
  Synthetic
cuagagaaauccauggcggg

SEQ ID NO: 776 - RNA, 20 nt, Artificial Sequence
  Synthetic
gcgggaggcuccauagccau

SEQ ID NO: 777 - RNA, 20 nt, Artificial Sequence
  Synthetic
caaccgcagcacccugucaa

SEQ ID NO: 778 - RNA, 20 nt, Artificial Sequence
  Synthetic
agcacccugucaaaggcacu

SEQ ID NO: 779 - RNA, 20 nt, Artificial Sequence
  Synthetic
gcacccugucaaaggcacuc

SEQ ID NO: 780 - RNA, 20 nt, Artificial Sequence
  Synthetic
ugucaaaggcacucggguga

SEQ ID NO: 781 - RNA, 20 nt, Artificial Sequence
  Synthetic
gucaaaggcacucgggugau

SEQ ID NO: 782 - RNA, 20 nt, Artificial Sequence
  Synthetic
aaaggcacucgggugauggg

SEQ ID NO: 783 - RNA, 20 nt, Artificial Sequence
  Synthetic
cacucgggugauggguggcc

SEQ ID NO: 784 - RNA, 20 nt, Artificial Sequence
  Synthetic
acucgggugauggguggcca

SEQ ID NO: 785 - RNA, 20 nt, Artificial Sequence
  Synthetic
gggccaucucuuccgccccc

SEQ ID NO: 786 - RNA, 20 nt, Artificial Sequence
  Synthetic
ccgcccccaggcgcucuaug

SEQ ID NO: 787 - RNA, 20 nt, Artificial Sequence
  Synthetic
cccccaggcgcucuaugcgg

SEQ ID NO: 788 - RNA, 20 nt, Artificial Sequence
  Synthetic
ccccaggcgcucuaugcggu

SEQ ID NO: 789 - RNA, 20 nt, Artificial Sequence
  Synthetic
cccaggcgcucuaugcggug

SEQ ID NO: 790 - RNA, 20 nt, Artificial Sequence
  Synthetic
ccaggcgcucuaugcggugg

SEQ ID NO: 791 - RNA, 20 nt, Artificial Sequence
  Synthetic
uggggguccaagugaugucu

SEQ ID NO: 792 - RNA, 20 nt, Artificial Sequence
  Synthetic
ggguccaagugaugucucgg

SEQ ID NO: 793 - RNA, 20 nt, Artificial Sequence
  Synthetic
uccaagugaugucucggugg

SEQ ID NO: 794 - RNA, 20 nt, Artificial Sequence
  Synthetic
gucucggugguggacuaaac

SEQ ID NO: 795 - RNA, 20 nt, Artificial Sequence
  Synthetic
ucucggugguggacuaaaca

SEQ ID NO: 796 - RNA, 20 nt, Artificial Sequence
  Synthetic
cucggugguggacuaaacag

SEQ ID NO: 797 - RNA, 20 nt, Artificial Sequence
  Synthetic
ucggugguggacuaaacagg

SEQ ID NO: 798 - RNA, 20 nt, Artificial Sequence
  Synthetic
cggugguggacuaaacaggg

SEQ ID NO: 799 - RNA, 20 nt, Artificial Sequence
  Synthetic
ggugguggacuaaacagggg

SEQ ID NO: 800 - RNA, 20 nt, Artificial Sequence
  Synthetic
uggacuaaacagggggggag

SEQ ID NO: 801 - RNA, 20 nt, Artificial Sequence
  Synthetic
ggacuaaacagggggggagu

SEQ ID NO: 802 - RNA, 20 nt, Artificial Sequence
  Synthetic
cuaaacagggggggaguggg

SEQ ID NO: 803 - RNA, 20 nt, Artificial Sequence
  Synthetic
guggaaagcgcccuucugcc

SEQ ID NO: 804 - RNA, 20 nt, Artificial Sequence
  Synthetic
aaagcgcccuucugccaggc

SEQ ID NO: 805 - RNA, 20 nt, Artificial Sequence
  Synthetic
gccucucucgauacugaucc

SEQ ID NO: 806 - RNA, 20 nt, Artificial Sequence
  Synthetic
cugauccugguauucuuagc

SEQ ID NO: 807 - RNA, 20 nt, Artificial Sequence
  Synthetic
ugguauucuuagcagguuaa

SEQ ID NO: 808 - RNA, 20 nt, Artificial Sequence
  Synthetic
gguauucuuagcagguuaaa

SEQ ID NO: 809 - RNA, 20 nt, Artificial Sequence
  Synthetic
guauucuuagcagguuaaag

SEQ ID NO: 810 - RNA, 20 nt, Artificial Sequence
  Synthetic
ugucugcaauaugaauccca

SEQ ID NO: 811 - RNA, 20 nt, Artificial Sequence
  Synthetic
gcaauaugaaucccauggag

SEQ ID NO: 812 - RNA, 20 nt, Artificial Sequence
  Synthetic
auaugaaucccauggagagg

SEQ ID NO: 813 - RNA, 20 nt, Artificial Sequence
  Synthetic
gaaucccauggagagguggc

SEQ ID NO: 814 - RNA, 20 nt, Artificial Sequence
  Synthetic
aaucccauggagagguggcu

SEQ ID NO: 815 - RNA, 20 nt, Artificial Sequence
  Synthetic
ccauggagagguggcuggga

SEQ ID NO: 816 - RNA, 20 nt, Artificial Sequence
  Synthetic
cauucugcaccuaguccuga

SEQ ID NO: 817 - RNA, 20 nt, Artificial Sequence
  Synthetic
auucugcaccuaguccugaa

SEQ ID NO: 818 - RNA, 20 nt, Artificial Sequence
  Synthetic
ccugaagggauaccaacccg

SEQ ID NO: 819 - RNA, 20 nt, Artificial Sequence
  Synthetic
cugaagggauaccaacccgc

SEQ ID NO: 820 - RNA, 20 nt, Artificial Sequence
  Synthetic
ugaagggauaccaacccgcg

SEQ ID NO: 821 - RNA, 20 nt, Artificial Sequence
  Synthetic
ggauaccaacccgcgggguc

SEQ ID NO: 822 - RNA, 20 nt, Artificial Sequence
  Synthetic
gauaccaacccgcgggguca

SEQ ID NO: 823 - RNA, 20 nt, Artificial Sequence
  Synthetic
auaccaacccgcggggucag

SEQ ID NO: 824 - RNA, 20 nt, Artificial Sequence
  Synthetic
uugcaagagaaaccaugcac

SEQ ID NO: 825 - RNA, 20 nt, Artificial Sequence
  Synthetic
agaaaccaugcacuggugaa

SEQ ID NO: 826 - RNA, 20 nt, Artificial Sequence
  Synthetic
aguuguacauguguagcugc

SEQ ID NO: 827 - RNA, 20 nt, Artificial Sequence
  Synthetic
guuguacauguguagcugcu

SEQ ID NO: 828 - RNA, 17 nt, Artificial Sequence
  Synthetic
agccauucaccagugca

SEQ ID NO: 829 - RNA, 17 nt, Artificial Sequence
  Synthetic
cacgcacagaacacuca

SEQ ID NO: 830 - RNA, 17 nt, Artificial Sequence
  Synthetic
uacuuagaaagcgaaca

SEQ ID NO: 831 - RNA, 17 nt, Artificial Sequence
  Synthetic
gaaguccccugaccccg

SEQ ID NO: 832 - RNA, 17 nt, Artificial Sequence
  Synthetic
aaguccccugaccccgc

SEQ ID NO: 833 - RNA, 17 nt, Artificial Sequence
  Synthetic
ccccugaccccgcgggu

SEQ ID NO: 834 - RNA, 17 nt, Artificial Sequence
  Synthetic
cggguugguaucccuuc

SEQ ID NO: 835 - RNA, 17 nt, Artificial Sequence
  Synthetic
gguaucccuucaggacu

SEQ ID NO: 836 - RNA, 17 nt, Artificial Sequence
  Synthetic
ucccagccaccucucca

SEQ ID NO: 837 - RNA, 17 nt, Artificial Sequence
  Synthetic
cccagccaccucuccau

SEQ ID NO: 838 - RNA, 17 nt, Artificial Sequence
  Synthetic
aaccugcuaagaauacc

SEQ ID NO: 839 - RNA, 17 nt, Artificial Sequence
  Synthetic
aggaucaguaucgagag

SEQ ID NO: 840 - RNA, 17 nt, Artificial Sequence
  Synthetic
guaucgagagaggcuuc

SEQ ID NO: 841 - RNA, 17 nt, Artificial Sequence
  Synthetic
gagagaggcuuccggcc

SEQ ID NO: 842 - RNA, 17 nt, Artificial Sequence
  Synthetic
gcuuccggccuggcaga

SEQ ID NO: 843 - RNA, 17 nt, Artificial Sequence
  Synthetic
cuuccggccuggcagaa

SEQ ID NO: 844 - RNA, 17 nt, Artificial Sequence
  Synthetic
accaccgagacaucacu

SEQ ID NO: 845 - RNA, 17 nt, Artificial Sequence
  Synthetic
ccaccgcauagagcgcc

SEQ ID NO: 846 - RNA, 17 nt, Artificial Sequence
  Synthetic
caccgcauagagcgccu

SEQ ID NO: 847 - RNA, 17 nt, Artificial Sequence
  Synthetic
accgcauagagcgccug

SEQ ID NO: 848 - RNA, 17 nt, Artificial Sequence
  Synthetic
ccgcauagagcgccugg

SEQ ID NO: 849 - RNA, 17 nt, Artificial Sequence
  Synthetic
cauagagcgccuggggg

SEQ ID NO: 850 - RNA, 17 nt, Artificial Sequence
  Synthetic
ccugggggcggaagaga

SEQ ID NO: 851 - RNA, 17 nt, Artificial Sequence
  Synthetic
ggcggaagagauggccc

SEQ ID NO: 852 - RNA, 17 nt, Artificial Sequence
  Synthetic
acccgagugccuuugac

SEQ ID NO: 853 - RNA, 17 nt, Artificial Sequence
  Synthetic
cccgagugccuuugaca

SEQ ID NO: 854 - RNA, 17 nt, Artificial Sequence
  Synthetic
ccuuugacagggugcug

SEQ ID NO: 855 - RNA, 17 nt, Artificial Sequence
  Synthetic
gcugcgguugaauccaa

SEQ ID NO: 856 - RNA, 17 nt, Artificial Sequence
  Synthetic
guugaauccaauggcua

SEQ ID NO: 857 - RNA, 17 nt, Artificial Sequence
  Synthetic
uauggagccucccgcca

SEQ ID NO: 858 - RNA, 17 nt, Artificial Sequence
  Synthetic
ccgccauggauuucucu

SEQ ID NO: 859 - RNA, 17 nt, Artificial Sequence
  Synthetic
uaggagacuuagagagc

SEQ ID NO: 860 - RNA, 17 nt, Artificial Sequence
  Synthetic
agacuuagagagcuggc

SEQ ID NO: 861 - RNA, 17 nt, Artificial Sequence
  Synthetic
gacuuagagagcuggca

SEQ ID NO: 862 - RNA, 17 nt, Artificial Sequence
  Synthetic
agcccaccgcugucccc

SEQ ID NO: 863 - RNA, 17 nt, Artificial Sequence
  Synthetic
caccgcuguccccaggc

SEQ ID NO: 864 - RNA, 17 nt, Artificial Sequence
  Synthetic
ggcccagcccuaugcaa

SEQ ID NO: 865 - RNA, 17 nt, Artificial Sequence
  Synthetic
cugcaaccauuccagcc

SEQ ID NO: 866 - RNA, 17 nt, Artificial Sequence
  Synthetic
uagcaagccgcccuucc

SEQ ID NO: 867 - RNA, 17 nt, Artificial Sequence
  Synthetic
uccucccucccagcccc

SEQ ID NO: 868 - RNA, 17 nt, Artificial Sequence
  Synthetic
aagucaugcgaguucug

SEQ ID NO: 869 - RNA, 17 nt, Artificial Sequence
  Synthetic
caaauuucagagcaacc

SEQ ID NO: 870 - RNA, 17 nt, Artificial Sequence
  Synthetic
auuucagagcaaccugg

SEQ ID NO: 871 - RNA, 17 nt, Artificial Sequence
  Synthetic
gcaaccugguggugcac

SEQ ID NO: 872 - RNA, 17 nt, Artificial Sequence
  Synthetic
gcaccggcgcagccaca

SEQ ID NO: 873 - RNA, 17 nt, Artificial Sequence
  Synthetic
caccggcgcagccacac

SEQ ID NO: 874 - RNA, 17 nt, Artificial Sequence
  Synthetic
cgaccacgcgugcaccc

SEQ ID NO: 875 - RNA, 17 nt, Artificial Sequence
  Synthetic
caaaucgucccccauga

SEQ ID NO: 876 - RNA, 17 nt, Artificial Sequence
  Synthetic
acggucaaguccgacga

SEQ ID NO: 877 - RNA, 17 nt, Artificial Sequence
  Synthetic
cuccaccgccagcuccc

SEQ ID NO: 878 - RNA, 17 nt, Artificial Sequence
  Synthetic
gccagcuccccggaacc

SEQ ID NO: 879 - RNA, 17 nt, Artificial Sequence
  Synthetic
acccggcaccagcgacu

SEQ ID NO: 880 - RNA, 17 nt, Artificial Sequence
  Synthetic
cggcaccagcgacuugg

SEQ ID NO: 881 - RNA, 17 nt, Artificial Sequence
  Synthetic
ggcaccagcgacuuggu

SEQ ID NO: 882 - RNA, 17 nt, Artificial Sequence
  Synthetic
cagcgcgcucaaguccg

SEQ ID NO: 883 - RNA, 17 nt, Artificial Sequence
  Synthetic
cgcgcucaaguccgugg

SEQ ID NO: 884 - RNA, 17 nt, Artificial Sequence
  Synthetic
cgaccccaaccugaucc

SEQ ID NO: 885 - RNA, 17 nt, Artificial Sequence
  Synthetic
aaccugaucccggagaa

SEQ ID NO: 886 - RNA, 17 nt, Artificial Sequence
  Synthetic
accugaucccggagaac

SEQ ID NO: 887 - RNA, 17 nt, Artificial Sequence
  Synthetic
ccugaucccggagaacg

SEQ ID NO: 888 - RNA, 17 nt, Artificial Sequence
  Synthetic
cccggagaacggggacg

SEQ ID NO: 889 - RNA, 17 nt, Artificial Sequence
  Synthetic
ggagaacggggacgagg

SEQ ID NO: 890 - RNA, 17 nt, Artificial Sequence
  Synthetic
cggggacgaggaggaag

SEQ ID NO: 891 - RNA, 17 nt, Artificial Sequence
  Synthetic
ggacgaggaggaagagg

SEQ ID NO: 892 - RNA, 17 nt, Artificial Sequence
  Synthetic
ggaagaggaggacgacg

SEQ ID NO: 893 - RNA, 17 nt, Artificial Sequence
  Synthetic
ggaggacgacgaggaag

SEQ ID NO: 894 - RNA, 17 nt, Artificial Sequence
  Synthetic
cgaggaagaggaagaag

SEQ ID NO: 895 - RNA, 17 nt, Artificial Sequence
  Synthetic
ggaagaggaagaagagg

SEQ ID NO: 896 - RNA, 17 nt, Artificial Sequence
  Synthetic
ggaagaagaggaggaag

SEQ ID NO: 897 - RNA, 17 nt, Artificial Sequence
  Synthetic
agaagaggaggaagagg

SEQ ID NO: 898 - RNA, 17 nt, Artificial Sequence
  Synthetic
agaggaggaagaggagg

SEQ ID NO: 899 - RNA, 17 nt, Artificial Sequence
  Synthetic
ggaggaagaggaggagg

SEQ ID NO: 900 - RNA, 17 nt, Artificial Sequence
  Synthetic
uccucguccccguucuc

SEQ ID NO: 901 - RNA, 17 nt, Artificial Sequence
  Synthetic
ccucguccccguucucc

SEQ ID NO: 902 - RNA, 17 nt, Artificial Sequence
  Synthetic
ccccguucuccgggauc

SEQ ID NO: 903 - RNA, 17 nt, Artificial Sequence
  Synthetic
guucuccgggaucaggu

SEQ ID NO: 904 - RNA, 17 nt, Artificial Sequence
  Synthetic
uucuccgggaucagguu

SEQ ID NO: 905 - RNA, 17 nt, Artificial Sequence
  Synthetic
ucuccgggaucagguug

SEQ ID NO: 906 - RNA, 17 nt, Artificial Sequence
  Synthetic
guucucgcucuugaacu

SEQ ID NO: 907 - RNA, 17 nt, Artificial Sequence
  Synthetic
cuugaacuuggccacca

SEQ ID NO: 908 - RNA, 17 nt, Artificial Sequence
  Synthetic
ggacuugagcgcgcugc

SEQ ID NO: 909 - RNA, 17 nt, Artificial Sequence
  Synthetic
gcugcccaccaagucgc

SEQ ID NO: 910 - RNA, 17 nt, Artificial Sequence
  Synthetic
caccaagucgcuggugc

SEQ ID NO: 911 - RNA, 17 nt, Artificial Sequence
  Synthetic
accaagucgcuggugcc

SEQ ID NO: 912 - RNA, 17 nt, Artificial Sequence
  Synthetic
ucgcuggugccggguuc

SEQ ID NO: 913 - RNA, 17 nt, Artificial Sequence
  Synthetic
cgcuggugccggguucc

SEQ ID NO: 914 - RNA, 17 nt, Artificial Sequence
  Synthetic
gcuggugccggguuccg

SEQ ID NO: 915 - RNA, 17 nt, Artificial Sequence
  Synthetic
gccggguuccggggagc

SEQ ID NO: 916 - RNA, 17 nt, Artificial Sequence
  Synthetic
ggguuccggggagcugg

SEQ ID NO: 917 - RNA, 17 nt, Artificial Sequence
  Synthetic
uuccggggagcuggcgg

SEQ ID NO: 918 - RNA, 17 nt, Artificial Sequence
  Synthetic
gguggagagaccgucgu

SEQ ID NO: 919 - RNA, 17 nt, Artificial Sequence
  Synthetic
gucggacuugaccguca

SEQ ID NO: 920 - RNA, 17 nt, Artificial Sequence
  Synthetic
ucggacuugaccgucau

SEQ ID NO: 921 - RNA, 17 nt, Artificial Sequence
  Synthetic
cggacuugaccgucaug

SEQ ID NO: 922 - RNA, 17 nt, Artificial Sequence
  Synthetic
ggacuugaccgucaugg

SEQ ID NO: 923 - RNA, 17 nt, Artificial Sequence
  Synthetic
gcaugugcgucuucaug

SEQ ID NO: 924 - RNA, 17 nt, Artificial Sequence
  Synthetic
guggcgcuucagcuugc

SEQ ID NO: 925 - RNA, 17 nt, Artificial Sequence
  Synthetic
gcuucagcuugcuggcc

SEQ ID NO: 926 - RNA, 17 nt, Artificial Sequence
  Synthetic
cuucagcuugcuggccu

SEQ ID NO: 927 - RNA, 17 nt, Artificial Sequence
  Synthetic
uggccugggugcacgcg

SEQ ID NO: 928 - RNA, 17 nt, Artificial Sequence
  Synthetic
ugcacgcguggucgcac

SEQ ID NO: 929 - RNA, 17 nt, Artificial Sequence
  Synthetic
gcacagguugcacuugu

SEQ ID NO: 930 - RNA, 17 nt, Artificial Sequence
  Synthetic
cacagguugcacuugua

SEQ ID NO: 931 - RNA, 17 nt, Artificial Sequence
  Synthetic
agggcuucucgcccgug

SEQ ID NO: 932 - RNA, 17 nt, Artificial Sequence
  Synthetic
cgcccguguggcugcgc

SEQ ID NO: 933 - RNA, 17 nt, Artificial Sequence
  Synthetic
ugcgccggugcaccacc

SEQ ID NO: 934 - RNA, 17 nt, Artificial Sequence
  Synthetic
gcagaacucgcaugacu

SEQ ID NO: 935 - RNA, 17 nt, Artificial Sequence
  Synthetic
caugacuuggacuugac

SEQ ID NO: 936 - RNA, 17 nt, Artificial Sequence
  Synthetic
augacuuggacuugacc

SEQ ID NO: 937 - RNA, 17 nt, Artificial Sequence
  Synthetic
ugacuuggacuugaccg

SEQ ID NO: 938 - RNA, 17 nt, Artificial Sequence
  Synthetic
gacuuggacuugaccgg

SEQ ID NO: 939 - RNA, 17 nt, Artificial Sequence
  Synthetic
uggacuugaccgggggc

SEQ ID NO: 940 - RNA, 17 nt, Artificial Sequence
  Synthetic
ggacuugaccgggggcu

SEQ ID NO: 941 - RNA, 17 nt, Artificial Sequence
  Synthetic
cuugaccgggggcuggg

SEQ ID NO: 942 - RNA, 17 nt, Artificial Sequence
  Synthetic
uugaccgggggcuggga

SEQ ID NO: 943 - RNA, 17 nt, Artificial Sequence
  Synthetic
accgggggcugggaggg

SEQ ID NO: 944 - RNA, 17 nt, Artificial Sequence
  Synthetic
gggggcugggagggagg

SEQ ID NO: 945 - RNA, 17 nt, Artificial Sequence
  Synthetic
ggggcugggagggagga

SEQ ID NO: 946 - RNA, 17 nt, Artificial Sequence
  Synthetic
gggcugggagggaggag

SEQ ID NO: 947 - RNA, 17 nt, Artificial Sequence
  Synthetic
cugggagggaggagggg

SEQ ID NO: 948 - RNA, 17 nt, Artificial Sequence
  Synthetic
ggaggggcggauugcag

SEQ ID NO: 949 - RNA, 17 nt, Artificial Sequence
  Synthetic
ggggcggauugcagagg

SEQ ID NO: 950 - RNA, 17 nt, Artificial Sequence
  Synthetic
gggcggauugcagagga

SEQ ID NO: 951 - RNA, 17 nt, Artificial Sequence
  Synthetic
cggauugcagaggaggg

SEQ ID NO: 952 - RNA, 17 nt, Artificial Sequence
  Synthetic
ggauugcagaggaggga

SEQ ID NO: 953 - RNA, 17 nt, Artificial Sequence
  Synthetic
gauugcagaggagggag

SEQ ID NO: 954 - RNA, 17 nt, Artificial Sequence
  Synthetic
auugcagaggagggagg

SEQ ID NO: 955 - RNA, 17 nt, Artificial Sequence
  Synthetic
uugcagaggagggaggg

SEQ ID NO: 956 - RNA, 17 nt, Artificial Sequence
  Synthetic
ugcagaggagggagggg

SEQ ID NO: 957 - RNA, 17 nt, Artificial Sequence
  Synthetic
ggagggggggcgucgcc

SEQ ID NO: 958 - RNA, 17 nt, Artificial Sequence
  Synthetic
ggggggcgucgccagga

SEQ ID NO: 959 - RNA, 17 nt, Artificial Sequence
  Synthetic
gggggcgucgccaggaa

SEQ ID NO: 960 - RNA, 17 nt, Artificial Sequence
  Synthetic
ggcgucgccaggaaggg

SEQ ID NO: 961 - RNA, 17 nt, Artificial Sequence
  Synthetic
aagggcggcuugcuacc

SEQ ID NO: 962 - RNA, 17 nt, Artificial Sequence
  Synthetic
gcggcuugcuaccuggc

SEQ ID NO: 963 - RNA, 17 nt, Artificial Sequence
  Synthetic
uugcuaccuggcuggaa

SEQ ID NO: 964 - RNA, 17 nt, Artificial Sequence
  Synthetic
ugcaguaaccuuugcau

SEQ ID NO: 965 - RNA, 17 nt, Artificial Sequence
  Synthetic
gcaguaaccuuugcaua

SEQ ID NO: 966 - RNA, 17 nt, Artificial Sequence
  Synthetic
uaaccuuugcauagggc

SEQ ID NO: 967 - RNA, 17 nt, Artificial Sequence
  Synthetic
aaccuuugcauagggcu

SEQ ID NO: 968 - RNA, 17 nt, Artificial Sequence
  Synthetic
uuugcauagggcugggc

SEQ ID NO: 969 - RNA, 17 nt, Artificial Sequence
  Synthetic
auagggcugggccggcc

SEQ ID NO: 970 - RNA, 17 nt, Artificial Sequence
  Synthetic
uagggcugggccggccu

SEQ ID NO: 971 - RNA, 17 nt, Artificial Sequence
  Synthetic
agggcugggccggccug

SEQ ID NO: 972 - RNA, 17 nt, Artificial Sequence
  Synthetic
ggccggccuggggacag

SEQ ID NO: 973 - RNA, 17 nt, Artificial Sequence
  Synthetic
cggccuggggacagcgg

SEQ ID NO: 974 - RNA, 17 nt, Artificial Sequence
  Synthetic
ggccuggggacagcggu

SEQ ID NO: 975 - RNA, 17 nt, Artificial Sequence
  Synthetic
ucuccuagagaaaucca

SEQ ID NO: 976 - RNA, 17 nt, Artificial Sequence
  Synthetic
ccuagagaaauccaugg

SEQ ID NO: 977 - RNA, 17 nt, Artificial Sequence
  Synthetic
cuagagaaauccauggc

SEQ ID NO: 978 - RNA, 17 nt, Artificial Sequence
  Synthetic
gagaaauccauggcggg

SEQ ID NO: 979 - RNA, 17 nt, Artificial Sequence
  Synthetic
ggaggcuccauagccau

SEQ ID NO: 980 - RNA, 17 nt, Artificial Sequence
  Synthetic
ccgcagcacccugucaa

SEQ ID NO: 981 - RNA, 17 nt, Artificial Sequence
  Synthetic
acccugucaaaggcacu

SEQ ID NO: 982 - RNA, 17 nt, Artificial Sequence
  Synthetic
cccugucaaaggcacuc

SEQ ID NO: 983 - RNA, 17 nt, Artificial Sequence
  Synthetic
caaaggcacucggguga

SEQ ID NO: 984 - RNA, 17 nt, Artificial Sequence
  Synthetic
aaaggcacucgggugau

SEQ ID NO: 985 - RNA, 17 nt, Artificial Sequence
  Synthetic
ggcacucgggugauggg

SEQ ID NO: 986 - RNA, 17 nt, Artificial Sequence
  Synthetic
ucgggugauggguggcc

SEQ ID NO: 987 - RNA, 17 nt, Artificial Sequence
  Synthetic
cgggugauggguggcca

SEQ ID NO: 988 - RNA, 17 nt, Artificial Sequence
  Synthetic
ccaucucuuccgccccc

SEQ ID NO: 989 - RNA, 17 nt, Artificial Sequence
  Synthetic
cccccaggcgcucuaug

SEQ ID NO: 990 - RNA, 17 nt, Artificial Sequence
  Synthetic
ccaggcgcucuaugcgg

SEQ ID NO: 991 - RNA, 17 nt, Artificial Sequence
  Synthetic
caggcgcucuaugcggu

SEQ ID NO: 992 - RNA, 17 nt, Artificial Sequence
  Synthetic
aggcgcucuaugcggug

SEQ ID NO: 993 - RNA, 17 nt, Artificial Sequence
  Synthetic
ggcgcucuaugcggugg

SEQ ID NO: 994 - RNA, 17 nt, Artificial Sequence
  Synthetic
ggguccaagugaugucu

SEQ ID NO: 995 - RNA, 17 nt, Artificial Sequence
  Synthetic
uccaagugaugucucgg

SEQ ID NO: 996 - RNA, 17 nt, Artificial Sequence
  Synthetic
aagugaugucucggugg

SEQ ID NO: 997 - RNA, 17 nt, Artificial Sequence
  Synthetic
ucggugguggacuaaac

SEQ ID NO: 998 - RNA, 17 nt, Artificial Sequence
  Synthetic
cggugguggacuaaaca

SEQ ID NO: 999 - RNA, 17 nt, Artificial Sequence
  Synthetic
ggugguggacuaaacag

SEQ ID NO: 1000 - RNA, 17 nt, Artificial Sequence
  Synthetic
gugguggacuaaacagg

SEQ ID NO: 1001 - RNA, 17 nt, Artificial Sequence
  Synthetic
ugguggacuaaacaggg

SEQ ID NO: 1002 - RNA, 17 nt, Artificial Sequence
  Synthetic
gguggacuaaacagggg

SEQ ID NO: 1003 - RNA, 17 nt, Artificial Sequence
  Synthetic
acuaaacagggggggag

SEQ ID NO: 1004 - RNA, 17 nt, Artificial Sequence
  Synthetic
cuaaacagggggggagu

SEQ ID NO: 1005 - RNA, 17 nt, Artificial Sequence
  Synthetic
aacagggggggaguggg

SEQ ID NO: 1006 - RNA, 17 nt, Artificial Sequence
  Synthetic
gaaagcgcccuucugcc

SEQ ID NO: 1007 - RNA, 17 nt, Artificial Sequence
  Synthetic
gcgcccuucugccaggc

SEQ ID NO: 1008 - RNA, 17 nt, Artificial Sequence
  Synthetic
ucucucgauacugaucc

SEQ ID NO: 1009 - RNA, 17 nt, Artificial Sequence
  Synthetic
auccugguauucuuagc

SEQ ID NO: 1010 - RNA, 17 nt, Artificial Sequence
  Synthetic
uauucuuagcagguuaa

SEQ ID NO: 1011 - RNA, 17 nt, Artificial Sequence
  Synthetic
auucuuagcagguuaaa

SEQ ID NO: 1012 - RNA, 17 nt, Artificial Sequence
  Synthetic
uucuuagcagguuaaag

SEQ ID NO: 1013 - RNA, 17 nt, Artificial Sequence
  Synthetic
cugcaauaugaauccca

SEQ ID NO: 1014 - RNA, 17 nt, Artificial Sequence
  Synthetic
auaugaaucccauggag

SEQ ID NO: 1015 - RNA, 17 nt, Artificial Sequence
  Synthetic
ugaaucccauggagagg

SEQ ID NO: 1016 - RNA, 17 nt, Artificial Sequence
  Synthetic
ucccauggagagguggc

SEQ ID NO: 1017 - RNA, 17 nt, Artificial Sequence
  Synthetic
cccauggagagguggcu

SEQ ID NO: 1018 - RNA, 17 nt, Artificial Sequence
  Synthetic
uggagagguggcuggga

SEQ ID NO: 1019 - RNA, 17 nt, Artificial Sequence
  Synthetic
ucugcaccuaguccuga

SEQ ID NO: 1020 - RNA, 17 nt, Artificial Sequence
  Synthetic
cugcaccuaguccugaa

SEQ ID NO: 1021 - RNA, 17 nt, Artificial Sequence
  Synthetic
gaagggauaccaacccg

SEQ ID NO: 1022 - RNA, 17 nt, Artificial Sequence
  Synthetic
aagggauaccaacccgc

SEQ ID NO: 1023 - RNA, 17 nt, Artificial Sequence
  Synthetic
agggauaccaacccgcg

SEQ ID NO: 1024 - RNA, 17 nt, Artificial Sequence
  Synthetic
uaccaacccgcgggguc

SEQ ID NO: 1025 - RNA, 17 nt, Artificial Sequence
  Synthetic
accaacccgcgggguca

SEQ ID NO: 1026 - RNA, 17 nt, Artificial Sequence
  Synthetic
ccaacccgcggggucag

SEQ ID NO: 1027 - RNA, 17 nt, Artificial Sequence
  Synthetic
caagagaaaccaugcac

SEQ ID NO: 1028 - RNA, 17 nt, Artificial Sequence
  Synthetic
aaccaugcacuggugaa

SEQ ID NO: 1029 - RNA, 17 nt, Artificial Sequence
  Synthetic
uguacauguguagcugc

SEQ ID NO: 1030 - RNA, 17 nt, Artificial Sequence
  Synthetic
guacauguguagcugcu

SEQ ID NO: 1031 - RNA, 20 nt, Artificial Sequence
  Synthetic
agaggaggaggaggagcuga

SEQ ID NO: 1032 - RNA, 20 nt, Artificial Sequence
  Synthetic
aggagcugacggagagcgag

SEQ ID NO: 1033 - RNA, 20 nt, Artificial Sequence
  Synthetic
ggagcugacggagagcgaga

SEQ ID NO: 1034 - RNA, 20 nt, Artificial Sequence
  Synthetic
gcugacggagagcgagaggg

SEQ ID NO: 1035 - RNA, 20 nt, Artificial Sequence
  Synthetic
gagagcgagaggguggacua

SEQ ID NO: 1036 - RNA, 20 nt, Artificial Sequence
  Synthetic
gagaggguggacuacggcuu

SEQ ID NO: 1037 - RNA, 20 nt, Artificial Sequence
  Synthetic
agaggguggacuacggcuuc

SEQ ID NO: 1038 - RNA, 20 nt, Artificial Sequence
  Synthetic
cuacggcuucgggcugagcc

SEQ ID NO: 1039 - RNA, 20 nt, Artificial Sequence
  Synthetic
cggcuucgggcugagccugg

SEQ ID NO: 1040 - RNA, 20 nt, Artificial Sequence
  Synthetic
cuucgggcugagccuggagg

SEQ ID NO: 1041 - RNA, 20 nt, Artificial Sequence
  Synthetic
gccaccacgagaacagcucg

SEQ ID NO: 1042 - RNA, 20 nt, Artificial Sequence
  Synthetic
ccaccacgagaacagcucgc

SEQ ID NO: 1043 - RNA, 20 nt, Artificial Sequence
  Synthetic
caccacgagaacagcucgcg

SEQ ID NO: 1044 - RNA, 20 nt, Artificial Sequence
  Synthetic
cgagaacagcucgcggggcg

SEQ ID NO: 1045 - RNA, 20 nt, Artificial Sequence
  Synthetic
cagcucgcggggcgcggucg

SEQ ID NO: 1046 - RNA, 20 nt, Artificial Sequence
  Synthetic
agcucgcggggcgcggucgu

SEQ ID NO: 1047 - RNA, 20 nt, Artificial Sequence
  Synthetic
gcggggcgcggucgugggcg

SEQ ID NO: 1048 - RNA, 20 nt, Artificial Sequence
  Synthetic
cggggcgcggucgugggcgu

SEQ ID NO: 1049 - RNA, 20 nt, Artificial Sequence
  Synthetic
cgcccugcccgacgucaugc

SEQ ID NO: 1050 - RNA, 20 nt, Artificial Sequence
  Synthetic
gcccugcccgacgucaugca

SEQ ID NO: 1051 - RNA, 20 nt, Artificial Sequence
  Synthetic
gcccgacgucaugcagggca

SEQ ID NO: 1052 - RNA, 20 nt, Artificial Sequence
  Synthetic
cuccaugcagcacuucagcg

SEQ ID NO: 1053 - RNA, 20 nt, Artificial Sequence
  Synthetic
cuucagcgaggccuuccacc

SEQ ID NO: 1054 - RNA, 20 nt, Artificial Sequence
  Synthetic
cgaggccuuccaccaggucc

SEQ ID NO: 1055 - RNA, 20 nt, Artificial Sequence
  Synthetic
gaggccuuccaccagguccu

SEQ ID NO: 1056 - RNA, 20 nt, Artificial Sequence
  Synthetic
cugggcgagaagcauaagcg

SEQ ID NO: 1057 - RNA, 20 nt, Artificial Sequence
  Synthetic
gaagcauaagcgcggccacc

SEQ ID NO: 1058 - RNA, 20 nt, Artificial Sequence
  Synthetic
uaagcgcggccaccuggccg

SEQ ID NO: 1059 - RNA, 20 nt, Artificial Sequence
  Synthetic
cggccaccuggccgaggccg

SEQ ID NO: 1060 - RNA, 20 nt, Artificial Sequence
  Synthetic
ggccaccuggccgaggccga

SEQ ID NO: 1061 - RNA, 20 nt, Artificial Sequence
  Synthetic
uggccgaggccgagggccac

SEQ ID NO: 1062 - RNA, 20 nt, Artificial Sequence
  Synthetic
ggccgaggccgagggccaca

SEQ ID NO: 1063 - RNA, 20 nt, Artificial Sequence
  Synthetic
ggacacuugcgacgaagacu

SEQ ID NO: 1064 - RNA, 20 nt, Artificial Sequence
  Synthetic
cacuugcgacgaagacucgg

SEQ ID NO: 1065 - RNA, 20 nt, Artificial Sequence
  Synthetic
ugcgacgaagacucgguggc

SEQ ID NO: 1066 - RNA, 20 nt, Artificial Sequence
  Synthetic
agacucgguggccggcgagu

SEQ ID NO: 1067 - RNA, 20 nt, Artificial Sequence
  Synthetic
gagucggaccgcauagacga

SEQ ID NO: 1068 - RNA, 20 nt, Artificial Sequence
  Synthetic
auagacgauggcacuguuaa

SEQ ID NO: 1069 - RNA, 20 nt, Artificial Sequence
  Synthetic
gauggcacuguuaauggccg

SEQ ID NO: 1070 - RNA, 20 nt, Artificial Sequence
  Synthetic
uaauggccgcggcugcuccc

SEQ ID NO: 1071 - RNA, 20 nt, Artificial Sequence
  Synthetic
aauggccgcggcugcucccc

SEQ ID NO: 1072 - RNA, 20 nt, Artificial Sequence
  Synthetic
cggcugcuccccgggcgagu

SEQ ID NO: 1073 - RNA, 20 nt, Artificial Sequence
  Synthetic
cuccccgggcgagucggccu

SEQ ID NO: 1074 - RNA, 20 nt, Artificial Sequence
  Synthetic
uccccgggcgagucggccuc

SEQ ID NO: 1075 - RNA, 20 nt, Artificial Sequence
  Synthetic
ccccgggcgagucggccucg

SEQ ID NO: 1076 - RNA, 20 nt, Artificial Sequence
  Synthetic
cccgggcgagucggccucgg

SEQ ID NO: 1077 - RNA, 20 nt, Artificial Sequence
  Synthetic
ccgggcgagucggccucggg

SEQ ID NO: 1078 - RNA, 20 nt, Artificial Sequence
  Synthetic
ccuguccaaaaagcugcugc

SEQ ID NO: 1079 - RNA, 20 nt, Artificial Sequence
  Synthetic
cuguccaaaaagcugcugcu

SEQ ID NO: 1080 - RNA, 20 nt, Artificial Sequence
  Synthetic
uaagcgcaucaagcucgaga

SEQ ID NO: 1081 - RNA, 20 nt, Artificial Sequence
  Synthetic
gaaggaguucgaccugcccc

SEQ ID NO: 1082 - RNA, 20 nt, Artificial Sequence
  Synthetic
cccggccgcgaugcccaaca

SEQ ID NO: 1083 - RNA, 20 nt, Artificial Sequence
  Synthetic
cggagaacguguacucgcag

SEQ ID NO: 1084 - RNA, 20 nt, Artificial Sequence
  Synthetic
guguacucgcaguggcucgc

SEQ ID NO: 1085 - RNA, 20 nt, Artificial Sequence
  Synthetic
gcaguggcucgccggcuacg

SEQ ID NO: 1086 - RNA, 20 nt, Artificial Sequence
  Synthetic
ucgccggcuacgcggccucc

SEQ ID NO: 1087 - RNA, 20 nt, Artificial Sequence
  Synthetic
aaagaucccuuccuuagcuu

SEQ ID NO: 1088 - RNA, 20 nt, Artificial Sequence
  Synthetic
aucgccuuuugccuccucgu

SEQ ID NO: 1089 - RNA, 20 nt, Artificial Sequence
  Synthetic
cuccucgucggagcacuccu

SEQ ID NO: 1090 - RNA, 20 nt, Artificial Sequence
  Synthetic
ucggagcacuccucggagaa

SEQ ID NO: 1091 - RNA, 20 nt, Artificial Sequence
  Synthetic
cggagcacuccucggagaac

SEQ ID NO: 1092 - RNA, 20 nt, Artificial Sequence
  Synthetic
uugcgcuucuccacaccgcc

SEQ ID NO: 1093 - RNA, 20 nt, Artificial Sequence
  Synthetic
ugcgcuucuccacaccgccc

SEQ ID NO: 1094 - RNA, 20 nt, Artificial Sequence
  Synthetic
gcgcuucuccacaccgcccg

SEQ ID NO: 1095 - RNA, 20 nt, Artificial Sequence
  Synthetic
cuccacaccgcccggggagc

SEQ ID NO: 1096 - RNA, 20 nt, Artificial Sequence
  Synthetic
acaccgcccggggagcugga

SEQ ID NO: 1097 - RNA, 20 nt, Artificial Sequence
  Synthetic
ccgcccggggagcuggacgg

SEQ ID NO: 1098 - RNA, 20 nt, Artificial Sequence
  Synthetic
cgcccggggagcuggacgga

SEQ ID NO: 1099 - RNA, 20 nt, Artificial Sequence
  Synthetic
ggagcuggacggagggaucu

SEQ ID NO: 1100 - RNA, 20 nt, Artificial Sequence
  Synthetic
gagcuggacggagggaucuc

SEQ ID NO: 1101 - RNA, 20 nt, Artificial Sequence
  Synthetic
agcuggacggagggaucucg

SEQ ID NO: 1102 - RNA, 20 nt, Artificial Sequence
  Synthetic
ggagggaucucggggcgcag

SEQ ID NO: 1103 - RNA, 20 nt, Artificial Sequence
  Synthetic
gaucucggggcgcagcggca

SEQ ID NO: 1104 - RNA, 20 nt, Artificial Sequence
  Synthetic
aucucggggcgcagcggcac

SEQ ID NO: 1105 - RNA, 20 nt, Artificial Sequence
  Synthetic
gggcgcagcggcacgggaag

SEQ ID NO: 1106 - RNA, 20 nt, Artificial Sequence
  Synthetic
cgcagcggcacgggaagugg

SEQ ID NO: 1107 - RNA, 20 nt, Artificial Sequence
  Synthetic
gcagcggcacgggaagugga

SEQ ID NO: 1108 - RNA, 20 nt, Artificial Sequence
  Synthetic
gggagcacgccccauauuag

SEQ ID NO: 1109 - RNA, 20 nt, Artificial Sequence
  Synthetic
cacgccccauauuagugguc

SEQ ID NO: 1110 - RNA, 20 nt, Artificial Sequence
  Synthetic
acgccccauauuaguggucc

SEQ ID NO: 1111 - RNA, 20 nt, Artificial Sequence
  Synthetic
ccauauuagugguccgggcc

SEQ ID NO: 1112 - RNA, 20 nt, Artificial Sequence
  Synthetic
cauauuagugguccgggccc

SEQ ID NO: 1113 - RNA, 20 nt, Artificial Sequence
  Synthetic
uuagugguccgggcccgggc

SEQ ID NO: 1114 - RNA, 20 nt, Artificial Sequence
  Synthetic
gggcaggcccagcucaaaag

SEQ ID NO: 1115 - RNA, 20 nt, Artificial Sequence
  Synthetic
ggcaggcccagcucaaaaga

SEQ ID NO: 1116 - RNA, 20 nt, Artificial Sequence
  Synthetic
gcgucugcccucuuuugagc

SEQ ID NO: 1117 - RNA, 20 nt, Artificial Sequence
  Synthetic
cgucugcccucuuuugagcu

SEQ ID NO: 1118 - RNA, 20 nt, Artificial Sequence
  Synthetic
ucuuuugagcugggccugcc

SEQ ID NO: 1119 - RNA, 20 nt, Artificial Sequence
  Synthetic
cuuuugagcugggccugccc

SEQ ID NO: 1120 - RNA, 20 nt, Artificial Sequence
  Synthetic
gagcugggccugcccgggcc

SEQ ID NO: 1121 - RNA, 20 nt, Artificial Sequence
  Synthetic
ccgggcccggaccacuaaua

SEQ ID NO: 1122 - RNA, 20 nt, Artificial Sequence
  Synthetic
cgggcccggaccacuaauau

SEQ ID NO: 1123 - RNA, 20 nt, Artificial Sequence
  Synthetic
gggcccggaccacuaauaug

SEQ ID NO: 1124 - RNA, 20 nt, Artificial Sequence
  Synthetic
gaucccuccguccagcuccc

SEQ ID NO: 1125 - RNA, 20 nt, Artificial Sequence
  Synthetic
aucccuccguccagcucccc

SEQ ID NO: 1126 - RNA, 20 nt, Artificial Sequence
  Synthetic
ccuccguccagcuccccggg

SEQ ID NO: 1127 - RNA, 20 nt, Artificial Sequence
  Synthetic
guccagcuccccgggcggug

SEQ ID NO: 1128 - RNA, 20 nt, Artificial Sequence
  Synthetic
gcgcaaacucccguucuccg

SEQ ID NO: 1129 - RNA, 20 nt, Artificial Sequence
  Synthetic
cuccgaggagugcuccgacg

SEQ ID NO: 1130 - RNA, 20 nt, Artificial Sequence
  Synthetic
cgaggagugcuccgacgagg

SEQ ID NO: 1131 - RNA, 20 nt, Artificial Sequence
  Synthetic
ugcuccgacgaggaggcaaa

SEQ ID NO: 1132 - RNA, 20 nt, Artificial Sequence
  Synthetic
ggaggcaaaaggcgauuguc

SEQ ID NO: 1133 - RNA, 20 nt, Artificial Sequence
  Synthetic
gucuggagucuccgaagcua

SEQ ID NO: 1134 - RNA, 20 nt, Artificial Sequence
  Synthetic
ggagucuccgaagcuaagga

SEQ ID NO: 1135 - RNA, 20 nt, Artificial Sequence
  Synthetic
gagucuccgaagcuaaggaa

SEQ ID NO: 1136 - RNA, 20 nt, Artificial Sequence
  Synthetic
gaagggaucuuugagcugcc

SEQ ID NO: 1137 - RNA, 20 nt, Artificial Sequence
  Synthetic
gggaucuuugagcugccugg

SEQ ID NO: 1138 - RNA, 20 nt, Artificial Sequence
  Synthetic
cugccuggaggccgcguagc

SEQ ID NO: 1139 - RNA, 20 nt, Artificial Sequence
  Synthetic
cgaguacacguucuccgugu

SEQ ID NO: 1140 - RNA, 20 nt, Artificial Sequence
  Synthetic
gaguacacguucuccguguu

SEQ ID NO: 1141 - RNA, 20 nt, Artificial Sequence
  Synthetic
guucuccguguugggcaucg

SEQ ID NO: 1142 - RNA, 20 nt, Artificial Sequence
  Synthetic
uccguguugggcaucgcggc

SEQ ID NO: 1143 - RNA, 20 nt, Artificial Sequence
  Synthetic
ccguguugggcaucgcggcc

SEQ ID NO: 1144 - RNA, 20 nt, Artificial Sequence
  Synthetic
cguguugggcaucgcggccg

SEQ ID NO: 1145 - RNA, 20 nt, Artificial Sequence
  Synthetic
guguugggcaucgcggccgg

SEQ ID NO: 1146 - RNA, 20 nt, Artificial Sequence
  Synthetic
ugggcaucgcggccgggggc

SEQ ID NO: 1147 - RNA, 20 nt, Artificial Sequence
  Synthetic
gagcuugaugcgcuuagaga

SEQ ID NO: 1148 - RNA, 20 nt, Artificial Sequence
  Synthetic
agcuugaugcgcuuagagaa

SEQ ID NO: 1149 - RNA, 20 nt, Artificial Sequence
  Synthetic
gcuugaugcgcuuagagaag

SEQ ID NO: 1150 - RNA, 20 nt, Artificial Sequence
  Synthetic
agagaaggggcucagcgagc

SEQ ID NO: 1151 - RNA, 20 nt, Artificial Sequence
  Synthetic
gagaaggggcucagcgagcu

SEQ ID NO: 1152 - RNA, 20 nt, Artificial Sequence
  Synthetic
agaaggggcucagcgagcug

SEQ ID NO: 1153 - RNA, 20 nt, Artificial Sequence
  Synthetic
gcugcccagcagcagcuuuu

SEQ ID NO: 1154 - RNA, 20 nt, Artificial Sequence
  Synthetic
ccagcagcagcuuuuuggac

SEQ ID NO: 1155 - RNA, 20 nt, Artificial Sequence
  Synthetic
cuuuuuggacaggccccccg

SEQ ID NO: 1156 - RNA, 20 nt, Artificial Sequence
  Synthetic
ccccccgaggccgacucgcc

SEQ ID NO: 1157 - RNA, 20 nt, Artificial Sequence
  Synthetic
cccccgaggccgacucgccc

SEQ ID NO: 1158 - RNA, 20 nt, Artificial Sequence
  Synthetic
ccccgaggccgacucgcccg

SEQ ID NO: 1159 - RNA, 20 nt, Artificial Sequence
  Synthetic
acucgcccggggagcagccg

SEQ ID NO: 1160 - RNA, 20 nt, Artificial Sequence
  Synthetic
uaacagugccaucgucuaug

SEQ ID NO: 1161 - RNA, 20 nt, Artificial Sequence
  Synthetic
gucuaugcgguccgacucgc

SEQ ID NO: 1162 - RNA, 20 nt, Artificial Sequence
  Synthetic
cuucgucgcaagugucccug

SEQ ID NO: 1163 - RNA, 20 nt, Artificial Sequence
  Synthetic
gcaagugucccuguggcccu

SEQ ID NO: 1164 - RNA, 20 nt, Artificial Sequence
  Synthetic
gucccuguggcccucggccu

SEQ ID NO: 1165 - RNA, 20 nt, Artificial Sequence
  Synthetic
uguggcccucggccucggcc

SEQ ID NO: 1166 - RNA, 20 nt, Artificial Sequence
  Synthetic
ggcccucggccucggccagg

SEQ ID NO: 1167 - RNA, 20 nt, Artificial Sequence
  Synthetic
cgcgcuuaugcuucucgccc

SEQ ID NO: 1168 - RNA, 20 nt, Artificial Sequence
  Synthetic
uaugcuucucgcccaggacc

SEQ ID NO: 1169 - RNA, 20 nt, Artificial Sequence
  Synthetic
gcuucucgcccaggaccugg

SEQ ID NO: 1170 - RNA, 20 nt, Artificial Sequence
  Synthetic
cucgcccaggaccuggugga

SEQ ID NO: 1171 - RNA, 20 nt, Artificial Sequence
  Synthetic
ggccucgcugaagugcugca

SEQ ID NO: 1172 - RNA, 20 nt, Artificial Sequence
  Synthetic
caccaugcccugcaugacgu

SEQ ID NO: 1173 - RNA, 20 nt, Artificial Sequence
  Synthetic
accaugcccugcaugacguc

SEQ ID NO: 1174 - RNA, 20 nt, Artificial Sequence
  Synthetic
ugcccugcaugacgucgggc

SEQ ID NO: 1175 - RNA, 20 nt, Artificial Sequence
  Synthetic
gcccugcaugacgucgggca

SEQ ID NO: 1176 - RNA, 20 nt, Artificial Sequence
  Synthetic
gcaugacgucgggcagggcg

SEQ ID NO: 1177 - RNA, 20 nt, Artificial Sequence
  Synthetic
cgccccgcgagcuguucucg

SEQ ID NO: 1178 - RNA, 20 nt, Artificial Sequence
  Synthetic
cccgcgagcuguucucgugg

SEQ ID NO: 1179 - RNA, 20 nt, Artificial Sequence
  Synthetic
cgugguggcgcgccgccucc

SEQ ID NO: 1180 - RNA, 17 nt, Artificial Sequence
  Synthetic
ggaggaagaggaggagg

SEQ ID NO: 1181 - RNA, 17 nt, Artificial Sequence
  Synthetic
ggaggaggaggagcuga

SEQ ID NO: 1182 - RNA, 17 nt, Artificial Sequence
  Synthetic
agcugacggagagcgag

SEQ ID NO: 1183 - RNA, 17 nt, Artificial Sequence
  Synthetic
gcugacggagagcgaga

SEQ ID NO: 1184 - RNA, 17 nt, Artificial Sequence
  Synthetic
gacggagagcgagaggg

SEQ ID NO: 1185 - RNA, 17 nt, Artificial Sequence
  Synthetic
agcgagaggguggacua

SEQ ID NO: 1186 - RNA, 17 nt, Artificial Sequence
  Synthetic
aggguggacuacggcuu

SEQ ID NO: 1187 - RNA, 17 nt, Artificial Sequence
  Synthetic
ggguggacuacggcuuc

SEQ ID NO: 1188 - RNA, 17 nt, Artificial Sequence
  Synthetic
cggcuucgggcugagcc

SEQ ID NO: 1189 - RNA, 17 nt, Artificial Sequence
  Synthetic
cuucgggcugagccugg

SEQ ID NO: 1190 - RNA, 17 nt, Artificial Sequence
  Synthetic
cgggcugagccuggagg

SEQ ID NO: 1191 - RNA, 17 nt, Artificial Sequence
  Synthetic
accacgagaacagcucg

SEQ ID NO: 1192 - RNA, 17 nt, Artificial Sequence
  Synthetic
ccacgagaacagcucgc

SEQ ID NO: 1193 - RNA, 17 nt, Artificial Sequence
  Synthetic
cacgagaacagcucgcg

SEQ ID NO: 1194 - RNA, 17 nt, Artificial Sequence
  Synthetic
gaacagcucgcggggcg

SEQ ID NO: 1195 - RNA, 17 nt, Artificial Sequence
  Synthetic
cucgcggggcgcggucg

SEQ ID NO: 1196 - RNA, 17 nt, Artificial Sequence
  Synthetic
ucgcggggcgcggucgu

SEQ ID NO: 1197 - RNA, 17 nt, Artificial Sequence
  Synthetic
gggcgcggucgugggcg

SEQ ID NO: 1198 - RNA, 17 nt, Artificial Sequence
  Synthetic
ggcgcggucgugggcgu

SEQ ID NO: 1199 - RNA, 17 nt, Artificial Sequence
  Synthetic
ccugcccgacgucaugc

SEQ ID NO: 1200 - RNA, 17 nt, Artificial Sequence
  Synthetic
cugcccgacgucaugca

SEQ ID NO: 1201 - RNA, 17 nt, Artificial Sequence
  Synthetic
cgacgucaugcagggca

SEQ ID NO: 1202 - RNA, 17 nt, Artificial Sequence
  Synthetic
caugcagcacuucagcg

SEQ ID NO: 1203 - RNA, 17 nt, Artificial Sequence
  Synthetic
cagcgaggccuuccacc

SEQ ID NO: 1204 - RNA, 17 nt, Artificial Sequence
  Synthetic
ggccuuccaccaggucc

SEQ ID NO: 1205 - RNA, 17 nt, Artificial Sequence
  Synthetic
gccuuccaccagguccu

SEQ ID NO: 1206 - RNA, 17 nt, Artificial Sequence
  Synthetic
ggcgagaagcauaagcg

SEQ ID NO: 1207 - RNA, 17 nt, Artificial Sequence
  Synthetic
gcauaagcgcggccacc

SEQ ID NO: 1208 - RNA, 17 nt, Artificial Sequence
  Synthetic
gcgcggccaccuggccg

SEQ ID NO: 1209 - RNA, 17 nt, Artificial Sequence
  Synthetic
ccaccuggccgaggccg

SEQ ID NO: 1210 - RNA, 17 nt, Artificial Sequence
  Synthetic
caccuggccgaggccga

SEQ ID NO: 1211 - RNA, 17 nt, Artificial Sequence
  Synthetic
ccgaggccgagggccac

SEQ ID NO: 1212 - RNA, 17 nt, Artificial Sequence
  Synthetic
cgaggccgagggccaca

SEQ ID NO: 1213 - RNA, 17 nt, Artificial Sequence
  Synthetic
cacuugcgacgaagacu

SEQ ID NO: 1214 - RNA, 17 nt, Artificial Sequence
  Synthetic
uugcgacgaagacucgg

SEQ ID NO: 1215 - RNA, 17 nt, Artificial Sequence
  Synthetic
gacgaagacucgguggc

SEQ ID NO: 1216 - RNA, 17 nt, Artificial Sequence
  Synthetic
cucgguggccggcgagu

SEQ ID NO: 1217 - RNA, 17 nt, Artificial Sequence
  Synthetic
ucggaccgcauagacga

SEQ ID NO: 1218 - RNA, 17 nt, Artificial Sequence
  Synthetic
gacgauggcacuguuaa

SEQ ID NO: 1219 - RNA, 17 nt, Artificial Sequence
  Synthetic
ggcacuguuaauggccg

SEQ ID NO: 1220 - RNA, 17 nt, Artificial Sequence
  Synthetic
uggccgcggcugcuccc

SEQ ID NO: 1221 - RNA, 17 nt, Artificial Sequence
  Synthetic
ggccgcggcugcucccc

SEQ ID NO: 1222 - RNA, 17 nt, Artificial Sequence
  Synthetic
cugcuccccgggcgagu

SEQ ID NO: 1223 - RNA, 17 nt, Artificial Sequence
  Synthetic
cccgggcgagucggccu

SEQ ID NO: 1224 - RNA, 17 nt, Artificial Sequence
  Synthetic
ccgggcgagucggccuc

SEQ ID NO: 1225 - RNA, 17 nt, Artificial Sequence
  Synthetic
cgggcgagucggccucg

SEQ ID NO: 1226 - RNA, 17 nt, Artificial Sequence
  Synthetic
gggcgagucggccucgg

SEQ ID NO: 1227 - RNA, 17 nt, Artificial Sequence
  Synthetic
ggcgagucggccucggg

SEQ ID NO: 1228 - RNA, 17 nt, Artificial Sequence
  Synthetic
guccaaaaagcugcugc

SEQ ID NO: 1229 - RNA, 17 nt, Artificial Sequence
  Synthetic
uccaaaaagcugcugcu

SEQ ID NO: 1230 - RNA, 17 nt, Artificial Sequence
  Synthetic
gcgcaucaagcucgaga

SEQ ID NO: 1231 - RNA, 17 nt, Artificial Sequence
  Synthetic
ggaguucgaccugcccc

SEQ ID NO: 1232 - RNA, 17 nt, Artificial Sequence
  Synthetic
ggccgcgaugcccaaca

SEQ ID NO: 1233 - RNA, 17 nt, Artificial Sequence
  Synthetic
agaacguguacucgcag

SEQ ID NO: 1234 - RNA, 17 nt, Artificial Sequence
  Synthetic
uacucgcaguggcucgc

SEQ ID NO: 1235 - RNA, 17 nt, Artificial Sequence
  Synthetic
guggcucgccggcuacg

SEQ ID NO: 1236 - RNA, 17 nt, Artificial Sequence
  Synthetic
ccggcuacgcggccucc

SEQ ID NO: 1237 - RNA, 17 nt, Artificial Sequence
  Synthetic
gaucccuuccuuagcuu

SEQ ID NO: 1238 - RNA, 17 nt, Artificial Sequence
  Synthetic
gccuuuugccuccucgu

SEQ ID NO: 1239 - RNA, 17 nt, Artificial Sequence
  Synthetic
cucgucggagcacuccu

SEQ ID NO: 1240 - RNA, 17 nt, Artificial Sequence
  Synthetic
gagcacuccucggagaa

SEQ ID NO: 1241 - RNA, 17 nt, Artificial Sequence
  Synthetic
agcacuccucggagaac

SEQ ID NO: 1242 - RNA, 17 nt, Artificial Sequence
  Synthetic
cgcuucuccacaccgcc

SEQ ID NO: 1243 - RNA, 17 nt, Artificial Sequence
  Synthetic
gcuucuccacaccgccc

SEQ ID NO: 1244 - RNA, 17 nt, Artificial Sequence
  Synthetic
cuucuccacaccgcccg

SEQ ID NO: 1245 - RNA, 17 nt, Artificial Sequence
  Synthetic
cacaccgcccggggagc

SEQ ID NO: 1246 - RNA, 17 nt, Artificial Sequence
  Synthetic
ccgcccggggagcugga

SEQ ID NO: 1247 - RNA, 17 nt, Artificial Sequence
  Synthetic
cccggggagcuggacgg

SEQ ID NO: 1248 - RNA, 17 nt, Artificial Sequence
  Synthetic
ccggggagcuggacgga

SEQ ID NO: 1249 - RNA, 17 nt, Artificial Sequence
  Synthetic
gcuggacggagggaucu

SEQ ID NO: 1250 - RNA, 17 nt, Artificial Sequence
  Synthetic
cuggacggagggaucuc

SEQ ID NO: 1251 - RNA, 17 nt, Artificial Sequence
  Synthetic
uggacggagggaucucg

SEQ ID NO: 1252 - RNA, 17 nt, Artificial Sequence
  Synthetic
gggaucucggggcgcag

SEQ ID NO: 1253 - RNA, 17 nt, Artificial Sequence
  Synthetic
cucggggcgcagcggca

SEQ ID NO: 1254 - RNA, 17 nt, Artificial Sequence
  Synthetic
ucggggcgcagcggcac

SEQ ID NO: 1255 - RNA, 17 nt, Artificial Sequence
  Synthetic
cgcagcggcacgggaag

SEQ ID NO: 1256 - RNA, 17 nt, Artificial Sequence
  Synthetic
agcggcacgggaagugg

SEQ ID NO: 1257 - RNA, 17 nt, Artificial Sequence
  Synthetic
gcggcacgggaagugga

SEQ ID NO: 1258 - RNA, 17 nt, Artificial Sequence
  Synthetic
agcacgccccauauuag

SEQ ID NO: 1259 - RNA, 17 nt, Artificial Sequence
  Synthetic
gccccauauuagugguc

SEQ ID NO: 1260 - RNA, 17 nt, Artificial Sequence
  Synthetic
ccccauauuaguggucc

SEQ ID NO: 1261 - RNA, 17 nt, Artificial Sequence
  Synthetic
uauuagugguccgggcc

SEQ ID NO: 1262 - RNA, 17 nt, Artificial Sequence
  Synthetic
auuagugguccgggccc

SEQ ID NO: 1263 - RNA, 17 nt, Artificial Sequence
  Synthetic
gugguccgggcccgggc

SEQ ID NO: 1264 - RNA, 17 nt, Artificial Sequence
  Synthetic
caggcccagcucaaaag

SEQ ID NO: 1265 - RNA, 17 nt, Artificial Sequence
  Synthetic
aggcccagcucaaaaga

SEQ ID NO: 1266 - RNA, 17 nt, Artificial Sequence
  Synthetic
ucugcccucuuuugagc

SEQ ID NO: 1267 - RNA, 17 nt, Artificial Sequence
  Synthetic
cugcccucuuuugagcu

SEQ ID NO: 1268 - RNA, 17 nt, Artificial Sequence
  Synthetic
uuugagcugggccugcc

SEQ ID NO: 1269 - RNA, 17 nt, Artificial Sequence
  Synthetic
uugagcugggccugccc

SEQ ID NO: 1270 - RNA, 17 nt, Artificial Sequence
  Synthetic
cugggccugcccgggcc

SEQ ID NO: 1271 - RNA, 17 nt, Artificial Sequence
  Synthetic
ggcccggaccacuaaua

SEQ ID NO: 1272 - RNA, 17 nt, Artificial Sequence
  Synthetic
gcccggaccacuaauau

SEQ ID NO: 1273 - RNA, 17 nt, Artificial Sequence
  Synthetic
cccggaccacuaauaug

SEQ ID NO: 1274 - RNA, 17 nt, Artificial Sequence
  Synthetic
cccuccguccagcuccc

SEQ ID NO: 1275 - RNA, 17 nt, Artificial Sequence
  Synthetic
ccuccguccagcucccc

SEQ ID NO: 1276 - RNA, 17 nt, Artificial Sequence
  Synthetic
ccguccagcuccccggg

SEQ ID NO: 1277 - RNA, 17 nt, Artificial Sequence
  Synthetic
cagcuccccgggcggug

SEQ ID NO: 1278 - RNA, 17 nt, Artificial Sequence
  Synthetic
caaacucccguucuccg

SEQ ID NO: 1279 - RNA, 17 nt, Artificial Sequence
  Synthetic
cgaggagugcuccgacg

SEQ ID NO: 1280 - RNA, 17 nt, Artificial Sequence
  Synthetic
ggagugcuccgacgagg

SEQ ID NO: 1281 - RNA, 17 nt, Artificial Sequence
  Synthetic
uccgacgaggaggcaaa

SEQ ID NO: 1282 - RNA, 17 nt, Artificial Sequence
  Synthetic
ggcaaaaggcgauuguc

SEQ ID NO: 1283 - RNA, 17 nt, Artificial Sequence
  Synthetic
uggagucuccgaagcua

SEQ ID NO: 1284 - RNA, 17 nt, Artificial Sequence
  Synthetic
gucuccgaagcuaagga

SEQ ID NO: 1285 - RNA, 17 nt, Artificial Sequence
  Synthetic
ucuccgaagcuaaggaa

SEQ ID NO: 1286 - RNA, 17 nt, Artificial Sequence
  Synthetic
gggaucuuugagcugcc

SEQ ID NO: 1287 - RNA, 17 nt, Artificial Sequence
  Synthetic
aucuuugagcugccugg

SEQ ID NO: 1288 - RNA, 17 nt, Artificial Sequence
  Synthetic
ccuggaggccgcguagc

SEQ ID NO: 1289 - RNA, 17 nt, Artificial Sequence
  Synthetic
guacacguucuccgugu

SEQ ID NO: 1290 - RNA, 17 nt, Artificial Sequence
  Synthetic
uacacguucuccguguu

SEQ ID NO: 1291 - RNA, 17 nt, Artificial Sequence
  Synthetic
cuccguguugggcaucg

SEQ ID NO: 1292 - RNA, 17 nt, Artificial Sequence
  Synthetic
guguugggcaucgcggc

SEQ ID NO: 1293 - RNA, 17 nt, Artificial Sequence
  Synthetic
uguugggcaucgcggcc

SEQ ID NO: 1294 - RNA, 17 nt, Artificial Sequence
  Synthetic
guugggcaucgcggccg

SEQ ID NO: 1295 - RNA, 17 nt, Artificial Sequence
  Synthetic
uugggcaucgcggccgg

SEQ ID NO: 1296 - RNA, 17 nt, Artificial Sequence
  Synthetic
gcaucgcggccgggggc

SEQ ID NO: 1297 - RNA, 17 nt, Artificial Sequence
  Synthetic
cuugaugcgcuuagaga

SEQ ID NO: 1298 - RNA, 17 nt, Artificial Sequence
  Synthetic
uugaugcgcuuagagaa

SEQ ID NO: 1299 - RNA, 17 nt, Artificial Sequence
  Synthetic
ugaugcgcuuagagaag

SEQ ID NO: 1300 - RNA, 17 nt, Artificial Sequence
  Synthetic
gaaggggcucagcgagc

SEQ ID NO: 1301 - RNA, 17 nt, Artificial Sequence
  Synthetic
aaggggcucagcgagcu

SEQ ID NO: 1302 - RNA, 17 nt, Artificial Sequence
  Synthetic
aggggcucagcgagcug

SEQ ID NO: 1303 - RNA, 17 nt, Artificial Sequence
  Synthetic
gcccagcagcagcuuuu

SEQ ID NO: 1304 - RNA, 17 nt, Artificial Sequence
  Synthetic
gcagcagcuuuuuggac

SEQ ID NO: 1305 - RNA, 17 nt, Artificial Sequence
  Synthetic
uuuggacaggccccccg

SEQ ID NO: 1306 - RNA, 17 nt, Artificial Sequence
  Synthetic
cccgaggccgacucgcc

SEQ ID NO: 1307 - RNA, 17 nt, Artificial Sequence
  Synthetic
ccgaggccgacucgccc

SEQ ID NO: 1308 - RNA, 17 nt, Artificial Sequence
  Synthetic
cgaggccgacucgcccg

SEQ ID NO: 1309 - RNA, 17 nt, Artificial Sequence
  Synthetic
cgcccggggagcagccg

SEQ ID NO: 1310 - RNA, 17 nt, Artificial Sequence
  Synthetic
cagugccaucgucuaug

SEQ ID NO: 1311 - RNA, 17 nt, Artificial Sequence
  Synthetic
uaugcgguccgacucgc

SEQ ID NO: 1312 - RNA, 17 nt, Artificial Sequence
  Synthetic
cgucgcaagugucccug

SEQ ID NO: 1313 - RNA, 17 nt, Artificial Sequence
  Synthetic
agugucccuguggcccu

SEQ ID NO: 1314 - RNA, 17 nt, Artificial Sequence
  Synthetic
ccuguggcccucggccu

SEQ ID NO: 1315 - RNA, 17 nt, Artificial Sequence
  Synthetic
ggcccucggccucggcc

SEQ ID NO: 1316 - RNA, 17 nt, Artificial Sequence
  Synthetic
ccucggccucggccagg

SEQ ID NO: 1317 - RNA, 17 nt, Artificial Sequence
  Synthetic
gcuuaugcuucucgccc

SEQ ID NO: 1318 - RNA, 17 nt, Artificial Sequence
  Synthetic
gcuucucgcccaggacc

SEQ ID NO: 1319 - RNA, 17 nt, Artificial Sequence
  Synthetic
ucucgcccaggaccugg

SEQ ID NO: 1320 - RNA, 17 nt, Artificial Sequence
  Synthetic
gcccaggaccuggugga

SEQ ID NO: 1321 - RNA, 17 nt, Artificial Sequence
  Synthetic
cucgcugaagugcugca

SEQ ID NO: 1322 - RNA, 17 nt, Artificial Sequence
  Synthetic
caugcccugcaugacgu

SEQ ID NO: 1323 - RNA, 17 nt, Artificial Sequence
  Synthetic
augcccugcaugacguc

SEQ ID NO: 1324 - RNA, 17 nt, Artificial Sequence
  Synthetic
ccugcaugacgucgggc

SEQ ID NO: 1325 - RNA, 17 nt, Artificial Sequence
  Synthetic
cugcaugacgucgggca

SEQ ID NO: 1326 - RNA, 17 nt, Artificial Sequence
  Synthetic
ugacgucgggcagggcg

SEQ ID NO: 1327 - RNA, 17 nt, Artificial Sequence
  Synthetic
cccgcgagcuguucucg

SEQ ID NO: 1328 - RNA, 17 nt, Artificial Sequence
  Synthetic
gcgagcuguucucgugg

SEQ ID NO: 1329 - RNA, 17 nt, Artificial Sequence
  Synthetic
gguggcgcgccgccucc

SEQ ID NO: 1330 - RNA, 20 nt, Artificial Sequence
  Synthetic
cccagagagcucaagaugug

SEQ ID NO: 1331 - RNA, 20 nt, Artificial Sequence
  Synthetic
ucaagauguguggcaguuuu

SEQ ID NO: 1332 - RNA, 20 nt, Artificial Sequence
  Synthetic
gauguguggcaguuuucgga

SEQ ID NO: 1333 - RNA, 20 nt, Artificial Sequence
  Synthetic
gccacacaucuugagcucuc

SEQ ID NO: 1334 - RNA, 20 nt, Artificial Sequence
  Synthetic
ccacacaucuugagcucucu

SEQ ID NO: 1335 - RNA, 20 nt, Artificial Sequence
  Synthetic
ucucuggguacuacgccgaa

SEQ ID NO: 1336 - RNA, 20 nt, Artificial Sequence
  Synthetic
cucuggguacuacgccgaau

SEQ ID NO: 1337 - RNA, 20 nt, Artificial Sequence
  Synthetic
ucuggguacuacgccgaaug

SEQ ID NO: 1338 - RNA, 20 nt, Artificial Sequence
  Synthetic
cuggguacuacgccgaaugg

SEQ ID NO: 1339 - RNA, 17 nt, Artificial Sequence
  Synthetic
cuucacacacccccauu

SEQ ID NO: 1340 - RNA, 17 nt, Artificial Sequence
  Synthetic
agagagcucaagaugug

SEQ ID NO: 1341 - RNA, 17 nt, Artificial Sequence
  Synthetic
agauguguggcaguuuu

SEQ ID NO: 1342 - RNA, 17 nt, Artificial Sequence
  Synthetic
guguggcaguuuucgga

SEQ ID NO: 1343 - RNA, 17 nt, Artificial Sequence
  Synthetic
acacaucuugagcucuc

SEQ ID NO: 1344 - RNA, 17 nt, Artificial Sequence
  Synthetic
cacaucuugagcucucu

SEQ ID NO: 1345 - RNA, 17 nt, Artificial Sequence
  Synthetic
cuggguacuacgccgaa

SEQ ID NO: 1346 - RNA, 17 nt, Artificial Sequence
  Synthetic
uggguacuacgccgaau

SEQ ID NO: 1347 - RNA, 17 nt, Artificial Sequence
  Synthetic
ggguacuacgccgaaug

SEQ ID NO: 1348 - RNA, 17 nt, Artificial Sequence
  Synthetic
gguacuacgccgaaugg

SEQ ID NO: 1349 - RNA, 20 nt, Artificial Sequence
  Synthetic
aaaccccagcacuuaagcaa

SEQ ID NO: 1350 - RNA, 20 nt, Artificial Sequence
  Synthetic
aaccccagcacuuaagcaaa

SEQ ID NO: 1351 - RNA, 20 nt, Artificial Sequence
  Synthetic
accccagcacuuaagcaaac

SEQ ID NO: 1352 - RNA, 17 nt, Artificial Sequence
  Synthetic
ccccagcacuuaagcaa

SEQ ID NO: 1353 - RNA, 17 nt, Artificial Sequence
  Synthetic
cccagcacuuaagcaaa

SEQ ID NO: 1354 - RNA, 17 nt, Artificial Sequence
  Synthetic
ccagcacuuaagcaaac

SEQ ID NO: 1355 - RNA, 20 nt, Artificial Sequence
  Synthetic
ugggguuugccuugcuugcg

SEQ ID NO: 1356 - RNA, 20 nt, Artificial Sequence
  Synthetic
auucccguuugcuuaagugc

SEQ ID NO: 1357 - RNA, 20 nt, Artificial Sequence
  Synthetic
aauucccguuugcuuaagug

SEQ ID NO: 1358 - RNA, 17 nt, Artificial Sequence
  Synthetic
gguuugccuugcuugcg

SEQ ID NO: 1359 - RNA, 17 nt, Artificial Sequence
  Synthetic
cccguuugcuuaagugc

SEQ ID NO: 1360 - RNA, 17 nt, Artificial Sequence
  Synthetic
ucccguuugcuuaagug

SEQ ID NO: 1361 - RNA, 20 nt, Artificial Sequence
  Synthetic
ugaagccauucuuacagaug

SEQ ID NO: 1362 - RNA, 20 nt, Artificial Sequence
  Synthetic
augaaccagaccacggcccg

SEQ ID NO: 1363 - RNA, 20 nt, Artificial Sequence
  Synthetic
ugaaccagaccacggcccgu

SEQ ID NO: 1364 - RNA, 20 nt, Artificial Sequence
  Synthetic
gaaccagaccacggcccguu

SEQ ID NO: 1365 - RNA, 20 nt, Artificial Sequence
  Synthetic
ccacggcccguugggagcuc

SEQ ID NO: 1366 - RNA, 20 nt, Artificial Sequence
  Synthetic
cggcccguugggagcuccag

SEQ ID NO: 1367 - RNA, 20 nt, Artificial Sequence
  Synthetic
ggcccguugggagcuccaga

SEQ ID NO: 1368 - RNA, 20 nt, Artificial Sequence
  Synthetic
gcccguugggagcuccagaa

SEQ ID NO: 1369 - RNA, 20 nt, Artificial Sequence
  Synthetic
ggaucaugaccuccucaccu

SEQ ID NO: 1370 - RNA, 20 nt, Artificial Sequence
  Synthetic
ucaccugugggcagugccag

SEQ ID NO: 1371 - RNA, 20 nt, Artificial Sequence
  Synthetic
agugccagaugaacuuccca

SEQ ID NO: 1372 - RNA, 20 nt, Artificial Sequence
  Synthetic
gugccagaugaacuucccau

SEQ ID NO: 1373 - RNA, 20 nt, Artificial Sequence
  Synthetic
ugccagaugaacuucccauu

SEQ ID NO: 1374 - RNA, 20 nt, Artificial Sequence
  Synthetic
gccagaugaacuucccauug

SEQ ID NO: 1375 - RNA, 20 nt, Artificial Sequence
  Synthetic
gggggacauucuuauuuuua

SEQ ID NO: 1376 - RNA, 20 nt, Artificial Sequence
  Synthetic
cuuauuuuuaucgagcacaa

SEQ ID NO: 1377 - RNA, 20 nt, Artificial Sequence
  Synthetic
uuauuuuuaucgagcacaaa

SEQ ID NO: 1378 - RNA, 20 nt, Artificial Sequence
  Synthetic
augcaauggcagccucugcu

SEQ ID NO: 1379 - RNA, 20 nt, Artificial Sequence
  Synthetic
gccucugcuuagaaaaagcu

SEQ ID NO: 1380 - RNA, 20 nt, Artificial Sequence
  Synthetic
gccaccuuccccuucaccaa

SEQ ID NO: 1381 - RNA, 20 nt, Artificial Sequence
  Synthetic
cuuccccuucaccaaucgag

SEQ ID NO: 1382 - RNA, 20 nt, Artificial Sequence
  Synthetic
ugaaaaaagcauccaauccc

SEQ ID NO: 1383 - RNA, 20 nt, Artificial Sequence
  Synthetic
gaaaaaagcauccaaucccg

SEQ ID NO: 1384 - RNA, 20 nt, Artificial Sequence
  Synthetic
gguuggcauccaggucacgc

SEQ ID NO: 1385 - RNA, 20 nt, Artificial Sequence
  Synthetic
uuggcauccaggucacgcca

SEQ ID NO: 1386 - RNA, 20 nt, Artificial Sequence
  Synthetic
gauuguuuaucaacgucauc

SEQ ID NO: 1387 - RNA, 20 nt, Artificial Sequence
  Synthetic
uuguuuaucaacgucaucua

SEQ ID NO: 1388 - RNA, 20 nt, Artificial Sequence
  Synthetic
uguuuaucaacgucaucuag

SEQ ID NO: 1389 - RNA, 20 nt, Artificial Sequence
  Synthetic
cuagaggaauuugccccaaa

SEQ ID NO: 1390 - RNA, 20 nt, Artificial Sequence
  Synthetic
uagaggaauuugccccaaac

SEQ ID NO: 1391 - RNA, 17 nt, Artificial Sequence
  Synthetic
agccauucuuacagaug

SEQ ID NO: 1392 - RNA, 17 nt, Artificial Sequence
  Synthetic
aaccagaccacggcccg

SEQ ID NO: 1393 - RNA, 17 nt, Artificial Sequence
  Synthetic
accagaccacggcccgu

SEQ ID NO: 1394 - RNA, 17 nt, Artificial Sequence
  Synthetic
ccagaccacggcccguu

SEQ ID NO: 1395 - RNA, 17 nt, Artificial Sequence
  Synthetic
cggcccguugggagcuc

SEQ ID NO: 1396 - RNA, 17 nt, Artificial Sequence
  Synthetic
cccguugggagcuccag

SEQ ID NO: 1397 - RNA, 17 nt, Artificial Sequence
  Synthetic
ccguugggagcuccaga

SEQ ID NO: 1398 - RNA, 17 nt, Artificial Sequence
  Synthetic
cguugggagcuccagaa

SEQ ID NO: 1399 - RNA, 17 nt, Artificial Sequence
  Synthetic
ucaugaccuccucaccu

SEQ ID NO: 1400 - RNA, 17 nt, Artificial Sequence
  Synthetic
ccugugggcagugccag

SEQ ID NO: 1401 - RNA, 17 nt, Artificial Sequence
  Synthetic
gccagaugaacuuccca

SEQ ID NO: 1402 - RNA, 17 nt, Artificial Sequence
  Synthetic
ccagaugaacuucccau

SEQ ID NO: 1403 - RNA, 17 nt, Artificial Sequence
  Synthetic
cagaugaacuucccauu

SEQ ID NO: 1404 - RNA, 17 nt, Artificial Sequence
  Synthetic
agaugaacuucccauug

SEQ ID NO: 1405 - RNA, 17 nt, Artificial Sequence
  Synthetic
ggacauucuuauuuuua

SEQ ID NO: 1406 - RNA, 17 nt, Artificial Sequence
  Synthetic
auuuuuaucgagcacaa

SEQ ID NO: 1407 - RNA, 17 nt, Artificial Sequence
  Synthetic
uuuuuaucgagcacaaa

SEQ ID NO: 1408 - RNA, 17 nt, Artificial Sequence
  Synthetic
caauggcagccucugcu

SEQ ID NO: 1409 - RNA, 17 nt, Artificial Sequence
  Synthetic
ucugcuuagaaaaagcu

SEQ ID NO: 1410 - RNA, 17 nt, Artificial Sequence
  Synthetic
accuuccccuucaccaa

SEQ ID NO: 1411 - RNA, 17 nt, Artificial Sequence
  Synthetic
ccccuucaccaaucgag

SEQ ID NO: 1412 - RNA, 17 nt, Artificial Sequence
  Synthetic
aaaaagcauccaauccc

SEQ ID NO: 1413 - RNA, 17 nt, Artificial Sequence
  Synthetic
aaaagcauccaaucccg

SEQ ID NO: 1414 - RNA, 17 nt, Artificial Sequence
  Synthetic
uggcauccaggucacgc

SEQ ID NO: 1415 - RNA, 17 nt, Artificial Sequence
  Synthetic
gcauccaggucacgcca

SEQ ID NO: 1416 - RNA, 17 nt, Artificial Sequence
  Synthetic
uguuuaucaacgucauc

SEQ ID NO: 1417 - RNA, 17 nt, Artificial Sequence
  Synthetic
uuuaucaacgucaucua

SEQ ID NO: 1418 - RNA, 17 nt, Artificial Sequence
  Synthetic
uuaucaacgucaucuag

SEQ ID NO: 1419 - RNA, 17 nt, Artificial Sequence
  Synthetic
gaggaauuugccccaaa

SEQ ID NO: 1420 - RNA, 17 nt, Artificial Sequence
  Synthetic
aggaauuugccccaaac

SEQ ID NO: 1421 - RNA, 20 nt, Artificial Sequence
  Synthetic
ucaucuguaagaauggcuuc

SEQ ID NO: 1422 - RNA, 20 nt, Artificial Sequence
  Synthetic
uggucugguucaucaucugu

SEQ ID NO: 1423 - RNA, 20 nt, Artificial Sequence
  Synthetic
auccccuucuggagcuccca

SEQ ID NO: 1424 - RNA, 20 nt, Artificial Sequence
  Synthetic
aggaggucaugauccccuuc

SEQ ID NO: 1425 - RNA, 20 nt, Artificial Sequence
  Synthetic
gaggaggucaugauccccuu

SEQ ID NO: 1426 - RNA, 20 nt, Artificial Sequence
  Synthetic
ucuggcacugcccacaggug

SEQ ID NO: 1427 - RNA, 20 nt, Artificial Sequence
  Synthetic
aucuggcacugcccacaggu

SEQ ID NO: 1428 - RNA, 20 nt, Artificial Sequence
  Synthetic
ucaucuggcacugcccacag

SEQ ID NO: 1429 - RNA, 20 nt, Artificial Sequence
  Synthetic
aaauaagaaugucccccaau

SEQ ID NO: 1430 - RNA, 20 nt, Artificial Sequence
  Synthetic
aaaauaagaaugucccccaa

SEQ ID NO: 1431 - RNA, 20 nt, Artificial Sequence
  Synthetic
aaaaauaagaauguccccca

SEQ ID NO: 1432 - RNA, 20 nt, Artificial Sequence
  Synthetic
cguuugugcucgauaaaaau

SEQ ID NO: 1433 - RNA, 20 nt, Artificial Sequence
  Synthetic
uauccacagcuuuuucuaag

SEQ ID NO: 1434 - RNA, 20 nt, Artificial Sequence
  Synthetic
uuucaucucgauuggugaag

SEQ ID NO: 1435 - RNA, 20 nt, Artificial Sequence
  Synthetic
uuuucaucucgauuggugaa

SEQ ID NO: 1436 - RNA, 20 nt, Artificial Sequence
  Synthetic
uuuuucaucucgauugguga

SEQ ID NO: 1437 - RNA, 20 nt, Artificial Sequence
  Synthetic
uuuuuucaucucgauuggug

SEQ ID NO: 1438 - RNA, 20 nt, Artificial Sequence
  Synthetic
ugcuuuuuucaucucgauug

SEQ ID NO: 1439 - RNA, 20 nt, Artificial Sequence
  Synthetic
ggaugccaaccuccacggga

SEQ ID NO: 1440 - RNA, 20 nt, Artificial Sequence
  Synthetic
gaccuggaugccaaccucca

SEQ ID NO: 1441 - RNA, 20 nt, Artificial Sequence
  Synthetic
ugaccuggaugccaaccucc

SEQ ID NO: 1442 - RNA, 20 nt, Artificial Sequence
  Synthetic
ucgucauccucuggcgugac

SEQ ID NO: 1443 - RNA, 20 nt, Artificial Sequence
  Synthetic
cugcuauguguuccuguuug

SEQ ID NO: 1444 - RNA, 20 nt, Artificial Sequence
  Synthetic
cugcuauguguuccuguuug

SEQ ID NO: 1445 - RNA, 17 nt, Artificial Sequence
  Synthetic
ucuguaagaauggcuuc

SEQ ID NO: 1446 - RNA, 17 nt, Artificial Sequence
  Synthetic
ucugguucaucaucugu

SEQ ID NO: 1447 - RNA, 17 nt, Artificial Sequence
  Synthetic
cccuucuggagcuccca

SEQ ID NO: 1448 - RNA, 17 nt, Artificial Sequence
  Synthetic
aggucaugauccccuuc

SEQ ID NO: 1449 - RNA, 17 nt, Artificial Sequence
  Synthetic
gaggucaugauccccuu

SEQ ID NO: 1450 - RNA, 17 nt, Artificial Sequence
  Synthetic
ggcacugcccacaggug

SEQ ID NO: 1451 - RNA, 17 nt, Artificial Sequence
  Synthetic
uggcacugcccacaggu

SEQ ID NO: 1452 - RNA, 17 nt, Artificial Sequence
  Synthetic
ucuggcacugcccacag

SEQ ID NO: 1453 - RNA, 17 nt, Artificial Sequence
  Synthetic
uaagaaugucccccaau

SEQ ID NO: 1454 - RNA, 17 nt, Artificial Sequence
  Synthetic
auaagaaugucccccaa

SEQ ID NO: 1455 - RNA, 17 nt, Artificial Sequence
  Synthetic
aauaagaauguccccca

SEQ ID NO: 1456 - RNA, 17 nt, Artificial Sequence
  Synthetic
uugugcucgauaaaaau

SEQ ID NO: 1457 - RNA, 17 nt, Artificial Sequence
  Synthetic
ccacagcuuuuucuaag

SEQ ID NO: 1458 - RNA, 17 nt, Artificial Sequence
  Synthetic
caucucgauuggugaag

SEQ ID NO: 1459 - RNA, 17 nt, Artificial Sequence
  Synthetic
ucaucucgauuggugaa

SEQ ID NO: 1460 - RNA, 17 nt, Artificial Sequence
  Synthetic
uucaucucgauugguga

SEQ ID NO: 1461 - RNA, 17 nt, Artificial Sequence
  Synthetic
uuucaucucgauuggug

SEQ ID NO: 1462 - RNA, 17 nt, Artificial Sequence
  Synthetic
uuuuuucaucucgauug

SEQ ID NO: 1463 - RNA, 17 nt, Artificial Sequence
  Synthetic
ugccaaccuccacggga

SEQ ID NO: 1464 - RNA, 17 nt, Artificial Sequence
  Synthetic
cuggaugccaaccucca

SEQ ID NO: 1465 - RNA, 17 nt, Artificial Sequence
  Synthetic
ccuggaugccaaccucc

SEQ ID NO: 1466 - RNA, 17 nt, Artificial Sequence
  Synthetic
ucauccucuggcgugac

SEQ ID NO: 1467 - RNA, 17 nt, Artificial Sequence
  Synthetic
ugcuauguguuccuguu

SEQ ID NO: 1468 - RNA, 17 nt, Artificial Sequence
  Synthetic
cugcuauguguuccugu

SEQ ID NO: 1469 - RNA, 20 nt, Artificial Sequence
  Synthetic
cuccuccccucguucugcac

SEQ ID NO: 1470 - RNA, 20 nt, Artificial Sequence
  Synthetic
uccuccccucguucugcaca

SEQ ID NO: 1471 - RNA, 20 nt, Artificial Sequence
  Synthetic
uggagcucuaauccccacgc

SEQ ID NO: 1472 - RNA, 20 nt, Artificial Sequence
  Synthetic
ggagcucuaauccccacgcc

SEQ ID NO: 1473 - RNA, 20 nt, Artificial Sequence
  Synthetic
cucuaauccccacgccuggg

SEQ ID NO: 1474 - RNA, 20 nt, Artificial Sequence
  Synthetic
ccccacgccugggaugagug

SEQ ID NO: 1475 - RNA, 20 nt, Artificial Sequence
  Synthetic
ugagugcagaauaugccccg

SEQ ID NO: 1476 - RNA, 17 nt, Artificial Sequence
  Synthetic
cuccccucguucugcac

SEQ ID NO: 1477 - RNA, 17 nt, Artificial Sequence
  Synthetic
uccccucguucugcaca

SEQ ID NO: 1478 - RNA, 17 nt, Artificial Sequence
  Synthetic
agcucuaauccccacgc

SEQ ID NO: 1479 - RNA, 17 nt, Artificial Sequence
  Synthetic
gcucuaauccccacgcc

SEQ ID NO: 1480 - RNA, 17 nt, Artificial Sequence
  Synthetic
uaauccccacgccuggg

SEQ ID NO: 1481 - RNA, 17 nt, Artificial Sequence
  Synthetic
cacgccugggaugagug

SEQ ID NO: 1482 - RNA, 17 nt, Artificial Sequence
  Synthetic
gugcagaauaugccccg

SEQ ID NO: 1483 - RNA, 20 nt, Artificial Sequence
  Synthetic
gaggagaggccccuccagug

SEQ ID NO: 1484 - RNA, 20 nt, Artificial Sequence
  Synthetic
caugugcagaacgaggggag

SEQ ID NO: 1485 - RNA, 20 nt, Artificial Sequence
  Synthetic
uccaugugcagaacgagggg

SEQ ID NO: 1486 - RNA, 20 nt, Artificial Sequence
  Synthetic
cuccaugugcagaacgaggg

SEQ ID NO: 1487 - RNA, 20 nt, Artificial Sequence
  Synthetic
agcuccaugugcagaacgag

SEQ ID NO: 1488 - RNA, 20 nt, Artificial Sequence
  Synthetic
gagcuccaugugcagaacga

SEQ ID NO: 1489 - RNA, 20 nt, Artificial Sequence
  Synthetic
agagcuccaugugcagaacg

SEQ ID NO: 1490 - RNA, 20 nt, Artificial Sequence
  Synthetic
uagagcuccaugugcagaac

SEQ ID NO: 1491 - RNA, 20 nt, Artificial Sequence
  Synthetic
auuagagcuccaugugcaga

SEQ ID NO: 1492 - RNA, 20 nt, Artificial Sequence
  Synthetic
ggggauuagagcuccaugug

SEQ ID NO: 1493 - RNA, 20 nt, Artificial Sequence
  Synthetic
cucaucccaggcguggggau

SEQ ID NO: 1494 - RNA, 20 nt, Artificial Sequence
  Synthetic
ucugcacucaucccaggcgu

SEQ ID NO: 1495 - RNA, 20 nt, Artificial Sequence
  Synthetic
uucugcacucaucccaggcg

SEQ ID NO: 1496 - RNA, 20 nt, Artificial Sequence
  Synthetic
auucugcacucaucccaggc

SEQ ID NO: 1497 - RNA, 17 nt, Artificial Sequence
  Synthetic
gagaggccccuccagug

SEQ ID NO: 1498 - RNA, 17 nt, Artificial Sequence
  Synthetic
gugcagaacgaggggag

SEQ ID NO: 1499 - RNA, 17 nt, Artificial Sequence
  Synthetic
augugcagaacgagggg

SEQ ID NO: 1500 - RNA, 17 nt, Artificial Sequence
  Synthetic
caugugcagaacgaggg

SEQ ID NO: 1501 - RNA, 17 nt, Artificial Sequence
  Synthetic
uccaugugcagaacgag

SEQ ID NO: 1502 - RNA, 17 nt, Artificial Sequence
  Synthetic
cuccaugugcagaacga

SEQ ID NO: 1503 - RNA, 17 nt, Artificial Sequence
  Synthetic
gcuccaugugcagaacg

SEQ ID NO: 1504 - RNA, 17 nt, Artificial Sequence
  Synthetic
agcuccaugugcagaac

SEQ ID NO: 1505 - RNA, 17 nt, Artificial Sequence
  Synthetic
agagcuccaugugcaga

SEQ ID NO: 1506 - RNA, 17 nt, Artificial Sequence
  Synthetic
gauuagagcuccaugug

SEQ ID NO: 1507 - RNA, 17 nt, Artificial Sequence
  Synthetic
aucccaggcguggggau

SEQ ID NO: 1508 - RNA, 17 nt, Artificial Sequence
  Synthetic
gcacucaucccaggcgu

SEQ ID NO: 1509 - RNA, 17 nt, Artificial Sequence
  Synthetic
ugcacucaucccaggcg

SEQ ID NO: 1510 - RNA, 17 nt, Artificial Sequence
  Synthetic
cugcacucaucccaggc

SEQ ID NO: 1511 - RNA, 20 nt, Artificial Sequence
  Synthetic
gguuucucuugcaacacgca

SEQ ID NO: 1512 - RNA, 20 nt, Artificial Sequence
  Synthetic
gcaacacgcacagaacacuc

SEQ ID NO: 1513 - RNA, 20 nt, Artificial Sequence
  Synthetic
gcacagaacacucauggauu

SEQ ID NO: 1514 - RNA, 20 nt, Artificial Sequence
  Synthetic
ucauggauuaagaaucuacu

SEQ ID NO: 1515 - RNA, 20 nt, Artificial Sequence
  Synthetic
auuaagaaucuacuuagaaa

SEQ ID NO: 1516 - RNA, 20 nt, Artificial Sequence
  Synthetic
aaucuacuuagaaagcgaac

SEQ ID NO: 1517 - RNA, 20 nt, Artificial Sequence
  Synthetic
aucuacuuagaaagcgaaca

SEQ ID NO: 1518 - RNA, 20 nt, Artificial Sequence
  Synthetic
cacggaaguccccugacccc

SEQ ID NO: 1519 - RNA, 20 nt, Artificial Sequence
  Synthetic
cccgcggguugguaucccuu

SEQ ID NO: 1520 - RNA, 20 nt, Artificial Sequence
  Synthetic
uaucccuucaggacuaggug

SEQ ID NO: 1521 - RNA, 20 nt, Artificial Sequence
  Synthetic
uccuucccagccaccucucc

SEQ ID NO: 1522 - RNA, 20 nt, Artificial Sequence
  Synthetic
ccuucccagccaccucucca

SEQ ID NO: 1523 - RNA, 20 nt, Artificial Sequence
  Synthetic
aauaaccccuuuaaccugcu

SEQ ID NO: 1524 - RNA, 20 nt, Artificial Sequence
  Synthetic
cuuuaaccugcuaagaauac

SEQ ID NO: 1525 - RNA, 20 nt, Artificial Sequence
  Synthetic
uaagaauaccaggaucagua

SEQ ID NO: 1526 - RNA, 20 nt, Artificial Sequence
  Synthetic
agaauaccaggaucaguauc

SEQ ID NO: 1527 - RNA, 20 nt, Artificial Sequence
  Synthetic
aauaccaggaucaguaucga

SEQ ID NO: 1528 - RNA, 20 nt, Artificial Sequence
  Synthetic
gagagaggcuuccggccugg

SEQ ID NO: 1529 - RNA, 20 nt, Artificial Sequence
  Synthetic
agaggcuuccggccuggcag

SEQ ID NO: 1530 - RNA, 20 nt, Artificial Sequence
  Synthetic
ccccccuguuuaguccacca

SEQ ID NO: 1531 - RNA, 20 nt, Artificial Sequence
  Synthetic
guccaccaccgagacaucac

SEQ ID NO: 1532 - RNA, 20 nt, Artificial Sequence
  Synthetic
ucacuuggacccccaccgca

SEQ ID NO: 1533 - RNA, 20 nt, Artificial Sequence
  Synthetic
acccccaccgcauagagcgc

SEQ ID NO: 1534 - RNA, 20 nt, Artificial Sequence
  Synthetic
cccccaccgcauagagcgcc

SEQ ID NO: 1535 - RNA, 20 nt, Artificial Sequence
  Synthetic
ccccaccgcauagagcgccu

SEQ ID NO: 1536 - RNA, 20 nt, Artificial Sequence
  Synthetic
accgcauagagcgccugggg

SEQ ID NO: 1537 - RNA, 20 nt, Artificial Sequence
  Synthetic
ccgcauagagcgccuggggg

SEQ ID NO: 1538 - RNA, 20 nt, Artificial Sequence
  Synthetic
cauagagcgccugggggcgg

SEQ ID NO: 1539 - RNA, 20 nt, Artificial Sequence
  Synthetic
uggcccuggccacccaucac

SEQ ID NO: 1540 - RNA, 20 nt, Artificial Sequence
  Synthetic
caucacccgagugccuuuga

SEQ ID NO: 1541 - RNA, 20 nt, Artificial Sequence
  Synthetic
ccuuugacagggugcugcgg

SEQ ID NO: 1542 - RNA, 20 nt, Artificial Sequence
  Synthetic
ugcgguugaauccaauggcu

SEQ ID NO: 1543 - RNA, 20 nt, Artificial Sequence
  Synthetic
gcgguugaauccaauggcua

SEQ ID NO: 1544 - RNA, 20 nt, Artificial Sequence
  Synthetic
uggcuauggagccucccgcc

SEQ ID NO: 1545 - RNA, 20 nt, Artificial Sequence
  Synthetic
ccucccgccauggauuucuc

SEQ ID NO: 1546 - RNA, 20 nt, Artificial Sequence
  Synthetic
cucccgccauggauuucucu

SEQ ID NO: 1547 - RNA, 20 nt, Artificial Sequence
  Synthetic
auggauuucucuaggagacu

SEQ ID NO: 1548 - RNA, 20 nt, Artificial Sequence
  Synthetic
ggauuucucuaggagacuua

SEQ ID NO: 1549 - RNA, 20 nt, Artificial Sequence
  Synthetic
uaggagacuuagagagcugg

SEQ ID NO: 1550 - RNA, 20 nt, Artificial Sequence
  Synthetic
aggagacuuagagagcuggc

SEQ ID NO: 1551 - RNA, 20 nt, Artificial Sequence
  Synthetic
ggagacuuagagagcuggca

SEQ ID NO: 1552 - RNA, 20 nt, Artificial Sequence
  Synthetic
cccggucaaguccaagucau

SEQ ID NO: 1553 - RNA, 20 nt, Artificial Sequence
  Synthetic
gcggcaagacguucaaauuu

SEQ ID NO: 1554 - RNA, 20 nt, Artificial Sequence
  Synthetic
uggugcaccggcgcagccac

SEQ ID NO: 1555 - RNA, 20 nt, Artificial Sequence
  Synthetic
gcaccggcgcagccacacgg

SEQ ID NO: 1556 - RNA, 20 nt, Artificial Sequence
  Synthetic
accggcgcagccacacgggc

SEQ ID NO: 1557 - RNA, 20 nt, Artificial Sequence
  Synthetic
cgugcacccaggccagcaag

SEQ ID NO: 1558 - RNA, 20 nt, Artificial Sequence
  Synthetic
ccagcaagcugaagcgccac

SEQ ID NO: 1559 - RNA, 20 nt, Artificial Sequence
  Synthetic
gucucuccaccgccagcucc

SEQ ID NO: 1560 - RNA, 20 nt, Artificial Sequence
  Synthetic
ucucuccaccgccagcuccc

SEQ ID NO: 1561 - RNA, 20 nt, Artificial Sequence
  Synthetic
aacccggcaccagcgacuug

SEQ ID NO: 1562 - RNA, 20 nt, Artificial Sequence
  Synthetic
aguccgugguggccaaguuc

SEQ ID NO: 1563 - RNA, 20 nt, Artificial Sequence
  Synthetic
cgugguggccaaguucaaga

SEQ ID NO: 1564 - RNA, 20 nt, Artificial Sequence
  Synthetic
ugguggccaaguucaagagc

SEQ ID NO: 1565 - RNA, 20 nt, Artificial Sequence
  Synthetic
agaacgaccccaaccugauc

SEQ ID NO: 1566 - RNA, 20 nt, Artificial Sequence
  Synthetic
gaacgaccccaaccugaucc

SEQ ID NO: 1567 - RNA, 20 nt, Artificial Sequence
  Synthetic
acgaccccaaccugaucccg

SEQ ID NO: 1568 - RNA, 20 nt, Artificial Sequence
  Synthetic
ccccaaccugaucccggaga

SEQ ID NO: 1569 - RNA, 20 nt, Artificial Sequence
  Synthetic
cccaaccugaucccggagaa

SEQ ID NO: 1570 - RNA, 20 nt, Artificial Sequence
  Synthetic
ccaaccugaucccggagaac

SEQ ID NO: 1571 - RNA, 20 nt, Artificial Sequence
  Synthetic
ccugaucccggagaacgggg

SEQ ID NO: 1572 - RNA, 20 nt, Artificial Sequence
  Synthetic
ugaucccggagaacggggac

SEQ ID NO: 1573 - RNA, 20 nt, Artificial Sequence
  Synthetic
gaucccggagaacggggacg

SEQ ID NO: 1574 - RNA, 20 nt, Artificial Sequence
  Synthetic
ucccggagaacggggacgag

SEQ ID NO: 1575 - RNA, 20 nt, Artificial Sequence
  Synthetic
cccggagaacggggacgagg

SEQ ID NO: 1576 - RNA, 20 nt, Artificial Sequence
  Synthetic
ggagaacggggacgaggagg

SEQ ID NO: 1577 - RNA, 20 nt, Artificial Sequence
  Synthetic
agaacggggacgaggaggaa

SEQ ID NO: 1578 - RNA, 20 nt, Artificial Sequence
  Synthetic
gaacggggacgaggaggaag

SEQ ID NO: 1579 - RNA, 20 nt, Artificial Sequence
  Synthetic
acggggacgaggaggaagag

SEQ ID NO: 1580 - RNA, 20 nt, Artificial Sequence
  Synthetic
cgaggaggaagaggaggacg

SEQ ID NO: 1581 - RNA, 20 nt, Artificial Sequence
  Synthetic
aggaggaagaggaggacgac

SEQ ID NO: 1582 - RNA, 20 nt, Artificial Sequence
  Synthetic
ggaggaagaggaggacgacg

SEQ ID NO: 1583 - RNA, 20 nt, Artificial Sequence
  Synthetic
ggaagaggaggacgacgagg

SEQ ID NO: 1584 - RNA, 20 nt, Artificial Sequence
  Synthetic
aagaggaggacgacgaggaa

SEQ ID NO: 1585 - RNA, 20 nt, Artificial Sequence
  Synthetic
agaggaggacgacgaggaag

SEQ ID NO: 1586 - RNA, 20 nt, Artificial Sequence
  Synthetic
ggaggacgacgaggaagagg

SEQ ID NO: 1587 - RNA, 20 nt, Artificial Sequence
  Synthetic
ggacgacgaggaagaggaag

SEQ ID NO: 1588 - RNA, 20 nt, Artificial Sequence
  Synthetic
acgacgaggaagaggaagaa

SEQ ID NO: 1589 - RNA, 20 nt, Artificial Sequence
  Synthetic
cgacgaggaagaggaagaag

SEQ ID NO: 1590 - RNA, 20 nt, Artificial Sequence
  Synthetic
acgaggaagaggaagaagag

SEQ ID NO: 1591 - RNA, 20 nt, Artificial Sequence
  Synthetic
cgaggaagaggaagaagagg

SEQ ID NO: 1592 - RNA, 20 nt, Artificial Sequence
  Synthetic
ggaagaggaagaagaggagg

SEQ ID NO: 1593 - RNA, 20 nt, Artificial Sequence
  Synthetic
aagaggaagaagaggaggaa

SEQ ID NO: 1594 - RNA, 20 nt, Artificial Sequence
  Synthetic
agaggaagaagaggaggaag

SEQ ID NO: 1595 - RNA, 20 nt, Artificial Sequence
  Synthetic
aggaagaagaggaggaagag

SEQ ID NO: 1596 - RNA, 20 nt, Artificial Sequence
  Synthetic
ggaagaagaggaggaagagg

SEQ ID NO: 1597 - RNA, 20 nt, Artificial Sequence
  Synthetic
aagaagaggaggaagaggag

SEQ ID NO: 1598 - RNA, 20 nt, Artificial Sequence
  Synthetic
agaagaggaggaagaggagg

SEQ ID NO: 1599 - RNA, 20 nt, Artificial Sequence
  Synthetic
aagaggaggaagaggaggag

SEQ ID NO: 1600 - RNA, 20 nt, Artificial Sequence
  Synthetic
agaggaggaagaggaggagg

SEQ ID NO: 1601 - RNA, 20 nt, Artificial Sequence
  Synthetic
aagaggaggaggaggagcug

SEQ ID NO: 1602 - RNA, 20 nt, Artificial Sequence
  Synthetic
agaggaggaggaggagcuga

SEQ ID NO: 1603 - RNA, 20 nt, Artificial Sequence
  Synthetic
aggaggaggaggagcugacg

SEQ ID NO: 1604 - RNA, 20 nt, Artificial Sequence
  Synthetic
ggaggaggagcugacggaga

SEQ ID NO: 1605 - RNA, 20 nt, Artificial Sequence
  Synthetic
aggaggagcugacggagagc

SEQ ID NO: 1606 - RNA, 20 nt, Artificial Sequence
  Synthetic
gaggagcugacggagagcga

SEQ ID NO: 1607 - RNA, 20 nt, Artificial Sequence
  Synthetic
agcugacggagagcgagagg

SEQ ID NO: 1608 - RNA, 20 nt, Artificial Sequence
  Synthetic
cgagaggguggacuacggcu

SEQ ID NO: 1609 - RNA, 20 nt, Artificial Sequence
  Synthetic
ggguggacuacggcuucggg

SEQ ID NO: 1610 - RNA, 20 nt, Artificial Sequence
  Synthetic
acuacggcuucgggcugagc

SEQ ID NO: 1611 - RNA, 20 nt, Artificial Sequence
  Synthetic
cuacggcuucgggcugagcc

SEQ ID NO: 1612 - RNA, 20 nt, Artificial Sequence
  Synthetic
ccuggaggcggcgcgccacc

SEQ ID NO: 1613 - RNA, 20 nt, Artificial Sequence
  Synthetic
uggaggcggcgcgccaccac

SEQ ID NO: 1614 - RNA, 20 nt, Artificial Sequence
  Synthetic
cgccaccacgagaacagcuc

SEQ ID NO: 1615 - RNA, 20 nt, Artificial Sequence
  Synthetic
gccaccacgagaacagcucg

SEQ ID NO: 1616 - RNA, 20 nt, Artificial Sequence
  Synthetic
acagcucgcggggcgcgguc

SEQ ID NO: 1617 - RNA, 20 nt, Artificial Sequence
  Synthetic
cgcggggcgcggucgugggc

SEQ ID NO: 1618 - RNA, 20 nt, Artificial Sequence
  Synthetic
cgcggucgugggcgugggcg

SEQ ID NO: 1619 - RNA, 20 nt, Artificial Sequence
  Synthetic
cggucgugggcgugggcgac

SEQ ID NO: 1620 - RNA, 20 nt, Artificial Sequence
  Synthetic
gcgcccugcccgacgucaug

SEQ ID NO: 1621 - RNA, 20 nt, Artificial Sequence
  Synthetic
cagcuccaugcagcacuuca

SEQ ID NO: 1622 - RNA, 20 nt, Artificial Sequence
  Synthetic
gcgaggccuuccaccagguc

SEQ ID NO: 1623 - RNA, 20 nt, Artificial Sequence
  Synthetic
ggccuuccaccagguccugg

SEQ ID NO: 1624 - RNA, 20 nt, Artificial Sequence
  Synthetic
ccuuccaccagguccugggc

SEQ ID NO: 1625 - RNA, 20 nt, Artificial Sequence
  Synthetic
gcauaagcgcggccaccugg

SEQ ID NO: 1626 - RNA, 20 nt, Artificial Sequence
  Synthetic
gcgcggccaccuggccgagg

SEQ ID NO: 1627 - RNA, 20 nt, Artificial Sequence
  Synthetic
gcggccaccuggccgaggcc

SEQ ID NO: 1628 - RNA, 20 nt, Artificial Sequence
  Synthetic
cuggccgaggccgagggcca

SEQ ID NO: 1629 - RNA, 20 nt, Artificial Sequence
  Synthetic
uggccgaggccgagggccac

SEQ ID NO: 1630 - RNA, 20 nt, Artificial Sequence
  Synthetic
gggccacagggacacuugcg

SEQ ID NO: 1631 - RNA, 20 nt, Artificial Sequence
  Synthetic
cgacgaagacucgguggccg

SEQ ID NO: 1632 - RNA, 20 nt, Artificial Sequence
  Synthetic
aagacucgguggccggcgag

SEQ ID NO: 1633 - RNA, 20 nt, Artificial Sequence
  Synthetic
uuaauggccgcggcugcucc

SEQ ID NO: 1634 - RNA, 20 nt, Artificial Sequence
  Synthetic
uggccgcggcugcuccccgg

SEQ ID NO: 1635 - RNA, 20 nt, Artificial Sequence
  Synthetic
gcuccccgggcgagucggcc

SEQ ID NO: 1636 - RNA, 20 nt, Artificial Sequence
  Synthetic
cuccccgggcgagucggccu

SEQ ID NO: 1637 - RNA, 20 nt, Artificial Sequence
  Synthetic
uccccgggcgagucggccuc

SEQ ID NO: 1638 - RNA, 20 nt, Artificial Sequence
  Synthetic
ccccgggcgagucggccucg

SEQ ID NO: 1639 - RNA, 20 nt, Artificial Sequence
  Synthetic
gccuguccaaaaagcugcug

SEQ ID NO: 1640 - RNA, 20 nt, Artificial Sequence
  Synthetic
ugcugggcagccccagcucg

SEQ ID NO: 1641 - RNA, 20 nt, Artificial Sequence
  Synthetic
cuucucuaagcgcaucaagc

SEQ ID NO: 1642 - RNA, 20 nt, Artificial Sequence
  Synthetic
ucucuaagcgcaucaagcuc

SEQ ID NO: 1643 - RNA, 20 nt, Artificial Sequence
  Synthetic
cuaagcgcaucaagcucgag

SEQ ID NO: 1644 - RNA, 20 nt, Artificial Sequence
  Synthetic
uaagcgcaucaagcucgaga

SEQ ID NO: 1645 - RNA, 20 nt, Artificial Sequence
  Synthetic
ccccggccgcgaugcccaac

SEQ ID NO: 1646 - RNA, 20 nt, Artificial Sequence
  Synthetic
cccggccgcgaugcccaaca

SEQ ID NO: 1647 - RNA, 20 nt, Artificial Sequence
  Synthetic
cggccgcgaugcccaacacg

SEQ ID NO: 1648 - RNA, 20 nt, Artificial Sequence
  Synthetic
caaagaucccuuccuuagcu

SEQ ID NO: 1649 - RNA, 20 nt, Artificial Sequence
  Synthetic
aaagaucccuuccuuagcuu

SEQ ID NO: 1650 - RNA, 20 nt, Artificial Sequence
  Synthetic
aaucgccuuuugccuccucg

SEQ ID NO: 1651 - RNA, 20 nt, Artificial Sequence
  Synthetic
aucgccuuuugccuccucgu

SEQ ID NO: 1652 - RNA, 20 nt, Artificial Sequence
  Synthetic
ccuccucgucggagcacucc

SEQ ID NO: 1653 - RNA, 20 nt, Artificial Sequence
  Synthetic
cuccucgucggagcacuccu

SEQ ID NO: 1654 - RNA, 20 nt, Artificial Sequence
  Synthetic
ccucgucggagcacuccucg

SEQ ID NO: 1655 - RNA, 20 nt, Artificial Sequence
  Synthetic
gucggagcacuccucggaga

SEQ ID NO: 1656 - RNA, 20 nt, Artificial Sequence
  Synthetic
ucggagcacuccucggagaa

SEQ ID NO: 1657 - RNA, 20 nt, Artificial Sequence
  Synthetic
cggagcacuccucggagaac

SEQ ID NO: 1658 - RNA, 20 nt, Artificial Sequence
  Synthetic
uuugcgcuucuccacaccgc

SEQ ID NO: 1659 - RNA, 20 nt, Artificial Sequence
  Synthetic
uugcgcuucuccacaccgcc

SEQ ID NO: 1660 - RNA, 20 nt, Artificial Sequence
  Synthetic
ugcgcuucuccacaccgccc

SEQ ID NO: 1661 - RNA, 20 nt, Artificial Sequence
  Synthetic
gcgcuucuccacaccgcccg

SEQ ID NO: 1662 - RNA, 20 nt, Artificial Sequence
  Synthetic
ucuccacaccgcccggggag

SEQ ID NO: 1663 - RNA, 20 nt, Artificial Sequence
  Synthetic
cacaccgcccggggagcugg

SEQ ID NO: 1664 - RNA, 20 nt, Artificial Sequence
  Synthetic
acaccgcccggggagcugga

SEQ ID NO: 1665 - RNA, 20 nt, Artificial Sequence
  Synthetic
accgcccggggagcuggacg

SEQ ID NO: 1666 - RNA, 20 nt, Artificial Sequence
  Synthetic
ccgcccggggagcuggacgg

SEQ ID NO: 1667 - RNA, 20 nt, Artificial Sequence
  Synthetic
gggagcuggacggagggauc

SEQ ID NO: 1668 - RNA, 20 nt, Artificial Sequence
  Synthetic
ggagcuggacggagggaucu

SEQ ID NO: 1669 - RNA, 20 nt, Artificial Sequence
  Synthetic
ggaucucggggcgcagcggc

SEQ ID NO: 1670 - RNA, 20 nt, Artificial Sequence
  Synthetic
gaucucggggcgcagcggca

SEQ ID NO: 1671 - RNA, 20 nt, Artificial Sequence
  Synthetic
aucucggggcgcagcggcac

SEQ ID NO: 1672 - RNA, 20 nt, Artificial Sequence
  Synthetic
ggggcgcagcggcacgggaa

SEQ ID NO: 1673 - RNA, 20 nt, Artificial Sequence
  Synthetic
gggcgcagcggcacgggaag

SEQ ID NO: 1674 - RNA, 20 nt, Artificial Sequence
  Synthetic
gcgcagcggcacgggaagug

SEQ ID NO: 1675 - RNA, 20 nt, Artificial Sequence
  Synthetic
cgcagcggcacgggaagugg

SEQ ID NO: 1676 - RNA, 20 nt, Artificial Sequence
  Synthetic
gcagcggcacgggaagugga

SEQ ID NO: 1677 - RNA, 20 nt, Artificial Sequence
  Synthetic
gcacgccccauauuaguggu

SEQ ID NO: 1678 - RNA, 20 nt, Artificial Sequence
  Synthetic
cccauauuagugguccgggc

SEQ ID NO: 1679 - RNA, 20 nt, Artificial Sequence
  Synthetic
cccgggcaggcccagcucaa

SEQ ID NO: 1680 - RNA, 20 nt, Artificial Sequence
  Synthetic
cgggcaggcccagcucaaaa

SEQ ID NO: 1681 - RNA, 17 nt, Artificial Sequence
  Synthetic
uucucuugcaacacgca

SEQ ID NO: 1682 - RNA, 17 nt, Artificial Sequence
  Synthetic
acacgcacagaacacuc

SEQ ID NO: 1683 - RNA, 17 nt, Artificial Sequence
  Synthetic
cagaacacucauggauu

SEQ ID NO: 1684 - RNA, 17 nt, Artificial Sequence
  Synthetic
uggauuaagaaucuacu

SEQ ID NO: 1685 - RNA, 17 nt, Artificial Sequence
  Synthetic
aagaaucuacuuagaaa

SEQ ID NO: 1686 - RNA, 17 nt, Artificial Sequence
  Synthetic
cuacuuagaaagcgaac

SEQ ID NO: 1687 - RNA, 17 nt, Artificial Sequence
  Synthetic
uacuuagaaagcgaaca

SEQ ID NO: 1688 - RNA, 17 nt, Artificial Sequence
  Synthetic
ggaaguccccugacccc

SEQ ID NO: 1689 - RNA, 17 nt, Artificial Sequence
  Synthetic
gcggguugguaucccuu

SEQ ID NO: 1690 - RNA, 17 nt, Artificial Sequence
  Synthetic
cccuucaggacuaggug

SEQ ID NO: 1691 - RNA, 17 nt, Artificial Sequence
  Synthetic
uucccagccaccucucc

SEQ ID NO: 1692 - RNA, 17 nt, Artificial Sequence
  Synthetic
ucccagccaccucucca

SEQ ID NO: 1693 - RNA, 17 nt, Artificial Sequence
  Synthetic
aaccccuuuaaccugcu

SEQ ID NO: 1694 - RNA, 17 nt, Artificial Sequence
  Synthetic
uaaccugcuaagaauac

SEQ ID NO: 1695 - RNA, 17 nt, Artificial Sequence
  Synthetic
gaauaccaggaucagua

SEQ ID NO: 1696 - RNA, 17 nt, Artificial Sequence
  Synthetic
auaccaggaucaguauc

SEQ ID NO: 1697 - RNA, 17 nt, Artificial Sequence
  Synthetic
accaggaucaguaucga

SEQ ID NO: 1698 - RNA, 17 nt, Artificial Sequence
  Synthetic
agaggcuuccggccugg

SEQ ID NO: 1699 - RNA, 17 nt, Artificial Sequence
  Synthetic
ggcuuccggccuggcag

SEQ ID NO: 1700 - RNA, 17 nt, Artificial Sequence
  Synthetic
cccuguuuaguccacca

SEQ ID NO: 1701 - RNA, 17 nt, Artificial Sequence
  Synthetic
caccaccgagacaucac

SEQ ID NO: 1702 - RNA, 17 nt, Artificial Sequence
  Synthetic
cuuggacccccaccgca

SEQ ID NO: 1703 - RNA, 17 nt, Artificial Sequence
  Synthetic
cccaccgcauagagcgc

SEQ ID NO: 1704 - RNA, 17 nt, Artificial Sequence
  Synthetic
ccaccgcauagagcgcc

SEQ ID NO: 1705 - RNA, 17 nt, Artificial Sequence
  Synthetic
caccgcauagagcgccu

SEQ ID NO: 1706 - RNA, 17 nt, Artificial Sequence
  Synthetic
gcauagagcgccugggg

SEQ ID NO: 1707 - RNA, 17 nt, Artificial Sequence
  Synthetic
cauagagcgccuggggg

SEQ ID NO: 1708 - RNA, 17 nt, Artificial Sequence
  Synthetic
agagcgccugggggcgg

SEQ ID NO: 1709 - RNA, 17 nt, Artificial Sequence
  Synthetic
cccuggccacccaucac

SEQ ID NO: 1710 - RNA, 17 nt, Artificial Sequence
  Synthetic
cacccgagugccuuuga

SEQ ID NO: 1711 - RNA, 17 nt, Artificial Sequence
  Synthetic
uugacagggugcugcgg

SEQ ID NO: 1712 - RNA, 17 nt, Artificial Sequence
  Synthetic
gguugaauccaauggcu

SEQ ID NO: 1713 - RNA, 17 nt, Artificial Sequence
  Synthetic
guugaauccaauggcua

SEQ ID NO: 1714 - RNA, 17 nt, Artificial Sequence
  Synthetic
cuauggagccucccgcc

SEQ ID NO: 1715 - RNA, 17 nt, Artificial Sequence
  Synthetic
cccgccauggauuucuc

SEQ ID NO: 1716 - RNA, 17 nt, Artificial Sequence
  Synthetic
ccgccauggauuucucu

SEQ ID NO: 1717 - RNA, 17 nt, Artificial Sequence
  Synthetic
gauuucucuaggagacu

SEQ ID NO: 1718 - RNA, 17 nt, Artificial Sequence
  Synthetic
uuucucuaggagacuua

SEQ ID NO: 1719 - RNA, 17 nt, Artificial Sequence
  Synthetic
gagacuuagagagcugg

SEQ ID NO: 1720 - RNA, 17 nt, Artificial Sequence
  Synthetic
agacuuagagagcuggc

SEQ ID NO: 1721 - RNA, 17 nt, Artificial Sequence
  Synthetic
gacuuagagagcuggca

SEQ ID NO: 1722 - RNA, 17 nt, Artificial Sequence
  Synthetic
ggucaaguccaagucau

SEQ ID NO: 1723 - RNA, 17 nt, Artificial Sequence
  Synthetic
gcaagacguucaaauuu

SEQ ID NO: 1724 - RNA, 17 nt, Artificial Sequence
  Synthetic
ugcaccggcgcagccac

SEQ ID NO: 1725 - RNA, 17 nt, Artificial Sequence
  Synthetic
ccggcgcagccacacgg

SEQ ID NO: 1726 - RNA, 17 nt, Artificial Sequence
  Synthetic
ggcgcagccacacgggc

SEQ ID NO: 1727 - RNA, 17 nt, Artificial Sequence
  Synthetic
gcacccaggccagcaag

SEQ ID NO: 1728 - RNA, 17 nt, Artificial Sequence
  Synthetic
gcaagcugaagcgccac

SEQ ID NO: 1729 - RNA, 17 nt, Artificial Sequence
  Synthetic
ucuccaccgccagcucc

SEQ ID NO: 1730 - RNA, 17 nt, Artificial Sequence
  Synthetic
cuccaccgccagcuccc

SEQ ID NO: 1731 - RNA, 17 nt, Artificial Sequence
  Synthetic
ccggcaccagcgacuug

SEQ ID NO: 1732 - RNA, 17 nt, Artificial Sequence
  Synthetic
ccgugguggccaaguuc

SEQ ID NO: 1733 - RNA, 17 nt, Artificial Sequence
  Synthetic
gguggccaaguucaaga

SEQ ID NO: 1734 - RNA, 17 nt, Artificial Sequence
  Synthetic
uggccaaguucaagagc

SEQ ID NO: 1735 - RNA, 17 nt, Artificial Sequence
  Synthetic
acgaccccaaccugauc

SEQ ID NO: 1736 - RNA, 17 nt, Artificial Sequence
  Synthetic
cgaccccaaccugaucc

SEQ ID NO: 1737 - RNA, 17 nt, Artificial Sequence
  Synthetic
accccaaccugaucccg

SEQ ID NO: 1738 - RNA, 17 nt, Artificial Sequence
  Synthetic
caaccugaucccggaga

SEQ ID NO: 1739 - RNA, 17 nt, Artificial Sequence
  Synthetic
aaccugaucccggagaa

SEQ ID NO: 1740 - RNA, 17 nt, Artificial Sequence
  Synthetic
accugaucccggagaac

SEQ ID NO: 1741 - RNA, 17 nt, Artificial Sequence
  Synthetic
gaucccggagaacgggg

SEQ ID NO: 1742 - RNA, 17 nt, Artificial Sequence
  Synthetic
ucccggagaacggggac

SEQ ID NO: 1743 - RNA, 17 nt, Artificial Sequence
  Synthetic
cccggagaacggggacg

SEQ ID NO: 1744 - RNA, 17 nt, Artificial Sequence
  Synthetic
cggagaacggggacgag

SEQ ID NO: 1745 - RNA, 17 nt, Artificial Sequence
  Synthetic
ggagaacggggacgagg

SEQ ID NO: 1746 - RNA, 17 nt, Artificial Sequence
  Synthetic
gaacggggacgaggagg

SEQ ID NO: 1747 - RNA, 17 nt, Artificial Sequence
  Synthetic
acggggacgaggaggaa

SEQ ID NO: 1748 - RNA, 17 nt, Artificial Sequence
  Synthetic
cggggacgaggaggaag

SEQ ID NO: 1749 - RNA, 17 nt, Artificial Sequence
  Synthetic
gggacgaggaggaagag

SEQ ID NO: 1750 - RNA, 17 nt, Artificial Sequence
  Synthetic
ggaggaagaggaggacg

SEQ ID NO: 1751 - RNA, 17 nt, Artificial Sequence
  Synthetic
aggaagaggaggacgac

SEQ ID NO: 1752 - RNA, 17 nt, Artificial Sequence
  Synthetic
ggaagaggaggacgacg

SEQ ID NO: 1753 - RNA, 17 nt, Artificial Sequence
  Synthetic
agaggaggacgacgagg

SEQ ID NO: 1754 - RNA, 17 nt, Artificial Sequence
  Synthetic
aggaggacgacgaggaa

SEQ ID NO: 1755 - RNA, 17 nt, Artificial Sequence
  Synthetic
ggaggacgacgaggaag

SEQ ID NO: 1756 - RNA, 17 nt, Artificial Sequence
  Synthetic
ggacgacgaggaagagg

SEQ ID NO: 1757 - RNA, 17 nt, Artificial Sequence
  Synthetic
cgacgaggaagaggaag

SEQ ID NO: 1758 - RNA, 17 nt, Artificial Sequence
  Synthetic
acgaggaagaggaagaa

SEQ ID NO: 1759 - RNA, 17 nt, Artificial Sequence
  Synthetic
cgaggaagaggaagaag

SEQ ID NO: 1760 - RNA, 17 nt, Artificial Sequence
  Synthetic
aggaagaggaagaagag

SEQ ID NO: 1761 - RNA, 17 nt, Artificial Sequence
  Synthetic
ggaagaggaagaagagg

SEQ ID NO: 1762 - RNA, 17 nt, Artificial Sequence
  Synthetic
agaggaagaagaggagg

SEQ ID NO: 1763 - RNA, 17 nt, Artificial Sequence
  Synthetic
aggaagaagaggaggaa

SEQ ID NO: 1764 - RNA, 17 nt, Artificial Sequence
  Synthetic
ggaagaagaggaggaag

SEQ ID NO: 1765 - RNA, 17 nt, Artificial Sequence
  Synthetic
aagaagaggaggaagag

SEQ ID NO: 1766 - RNA, 17 nt, Artificial Sequence
  Synthetic
agaagaggaggaagagg

SEQ ID NO: 1767 - RNA, 17 nt, Artificial Sequence
  Synthetic
aagaggaggaagaggag

SEQ ID NO: 1768 - RNA, 17 nt, Artificial Sequence
  Synthetic
agaggaggaagaggagg

SEQ ID NO: 1769 - RNA, 17 nt, Artificial Sequence
  Synthetic
aggaggaagaggaggag

SEQ ID NO: 1770 - RNA, 17 nt, Artificial Sequence
  Synthetic
ggaggaagaggaggagg

SEQ ID NO: 1771 - RNA, 17 nt, Artificial Sequence
  Synthetic
aggaggaggaggagcug

SEQ ID NO: 1772 - RNA, 17 nt, Artificial Sequence
  Synthetic
ggaggaggaggagcuga

SEQ ID NO: 1773 - RNA, 17 nt, Artificial Sequence
  Synthetic
aggaggaggagcugacg

SEQ ID NO: 1774 - RNA, 17 nt, Artificial Sequence
  Synthetic
ggaggagcugacggaga

SEQ ID NO: 1775 - RNA, 17 nt, Artificial Sequence
  Synthetic
aggagcugacggagagc

SEQ ID NO: 1776 - RNA, 17 nt, Artificial Sequence
  Synthetic
gagcugacggagagcga

SEQ ID NO: 1777 - RNA, 17 nt, Artificial Sequence
  Synthetic
ugacggagagcgagagg

SEQ ID NO: 1778 - RNA, 17 nt, Artificial Sequence
  Synthetic
gaggguggacuacggcu

SEQ ID NO: 1779 - RNA, 17 nt, Artificial Sequence
  Synthetic
uggacuacggcuucggg

SEQ ID NO: 1780 - RNA, 17 nt, Artificial Sequence
  Synthetic
acggcuucgggcugagc

SEQ ID NO: 1781 - RNA, 17 nt, Artificial Sequence
  Synthetic
cggcuucgggcugagcc

SEQ ID NO: 1782 - RNA, 17 nt, Artificial Sequence
  Synthetic
ggaggcggcgcgccacc

SEQ ID NO: 1783 - RNA, 17 nt, Artificial Sequence
  Synthetic
aggcggcgcgccaccac

SEQ ID NO: 1784 - RNA, 17 nt, Artificial Sequence
  Synthetic
caccacgagaacagcuc

SEQ ID NO: 1785 - RNA, 17 nt, Artificial Sequence
  Synthetic
accacgagaacagcucg

SEQ ID NO: 1786 - RNA, 17 nt, Artificial Sequence
  Synthetic
gcucgcggggcgcgguc

SEQ ID NO: 1787 - RNA, 17 nt, Artificial Sequence
  Synthetic
ggggcgcggucgugggc

SEQ ID NO: 1788 - RNA, 17 nt, Artificial Sequence
  Synthetic
ggucgugggcgugggcg

SEQ ID NO: 1789 - RNA, 17 nt, Artificial Sequence
  Synthetic
ucgugggcgugggcgac

SEQ ID NO: 1790 - RNA, 17 nt, Artificial Sequence
  Synthetic
cccugcccgacgucaug

SEQ ID NO: 1791 - RNA, 17 nt, Artificial Sequence
  Synthetic
cuccaugcagcacuuca

SEQ ID NO: 1792 - RNA, 17 nt, Artificial Sequence
  Synthetic
aggccuuccaccagguc

SEQ ID NO: 1793 - RNA, 17 nt, Artificial Sequence
  Synthetic
cuuccaccagguccugg

SEQ ID NO: 1794 - RNA, 17 nt, Artificial Sequence
  Synthetic
uccaccagguccugggc

SEQ ID NO: 1795 - RNA, 17 nt, Artificial Sequence
  Synthetic
uaagcgcggccaccugg

SEQ ID NO: 1796 - RNA, 17 nt, Artificial Sequence
  Synthetic
cggccaccuggccgagg

SEQ ID NO: 1797 - RNA, 17 nt, Artificial Sequence
  Synthetic
gccaccuggccgaggcc

SEQ ID NO: 1798 - RNA, 17 nt, Artificial Sequence
  Synthetic
gccgaggccgagggcca

SEQ ID NO: 1799 - RNA, 17 nt, Artificial Sequence
  Synthetic
ccgaggccgagggccac

SEQ ID NO: 1800 - RNA, 17 nt, Artificial Sequence
  Synthetic
ccacagggacacuugcg

SEQ ID NO: 1801 - RNA, 17 nt, Artificial Sequence
  Synthetic
cgaagacucgguggccg

SEQ ID NO: 1802 - RNA, 17 nt, Artificial Sequence
  Synthetic
acucgguggccggcgag

SEQ ID NO: 1803 - RNA, 17 nt, Artificial Sequence
  Synthetic
auggccgcggcugcucc

SEQ ID NO: 1804 - RNA, 17 nt, Artificial Sequence
  Synthetic
ccgcggcugcuccccgg

SEQ ID NO: 1805 - RNA, 17 nt, Artificial Sequence
  Synthetic
ccccgggcgagucggcc

SEQ ID NO: 1806 - RNA, 17 nt, Artificial Sequence
  Synthetic
cccgggcgagucggccu

SEQ ID NO: 1807 - RNA, 17 nt, Artificial Sequence
  Synthetic
ccgggcgagucggccuc

SEQ ID NO: 1808 - RNA, 17 nt, Artificial Sequence
  Synthetic
cgggcgagucggccucg

SEQ ID NO: 1809 - RNA, 17 nt, Artificial Sequence
  Synthetic
uguccaaaaagcugcug

SEQ ID NO: 1810 - RNA, 17 nt, Artificial Sequence
  Synthetic
ugggcagccccagcucg

SEQ ID NO: 1811 - RNA, 17 nt, Artificial Sequence
  Synthetic
cucuaagcgcaucaagc

SEQ ID NO: 1812 - RNA, 17 nt, Artificial Sequence
  Synthetic
cuaagcgcaucaagcuc

SEQ ID NO: 1813 - RNA, 17 nt, Artificial Sequence
  Synthetic
agcgcaucaagcucgag

SEQ ID NO: 1814 - RNA, 17 nt, Artificial Sequence
  Synthetic
gcgcaucaagcucgaga

SEQ ID NO: 1815 - RNA, 17 nt, Artificial Sequence
  Synthetic
cggccgcgaugcccaac

SEQ ID NO: 1816 - RNA, 17 nt, Artificial Sequence
  Synthetic
ggccgcgaugcccaaca

SEQ ID NO: 1817 - RNA, 17 nt, Artificial Sequence
  Synthetic
ccgcgaugcccaacacg

SEQ ID NO: 1818 - RNA, 17 nt, Artificial Sequence
  Synthetic
agaucccuuccuuagcu

SEQ ID NO: 1819 - RNA, 17 nt, Artificial Sequence
  Synthetic
gaucccuuccuuagcuu

SEQ ID NO: 1820 - RNA, 17 nt, Artificial Sequence
  Synthetic
cgccuuuugccuccucg

SEQ ID NO: 1821 - RNA, 17 nt, Artificial Sequence
  Synthetic
gccuuuugccuccucgu

SEQ ID NO: 1822 - RNA, 17 nt, Artificial Sequence
  Synthetic
ccucgucggagcacucc

SEQ ID NO: 1823 - RNA, 17 nt, Artificial Sequence
  Synthetic
cucgucggagcacuccu

SEQ ID NO: 1824 - RNA, 17 nt, Artificial Sequence
  Synthetic
cgucggagcacuccucg

SEQ ID NO: 1825 - RNA, 17 nt, Artificial Sequence
  Synthetic
ggagcacuccucggaga

SEQ ID NO: 1826 - RNA, 17 nt, Artificial Sequence
  Synthetic
gagcacuccucggagaa

SEQ ID NO: 1827 - RNA, 17 nt, Artificial Sequence
  Synthetic
agcacuccucggagaac

SEQ ID NO: 1828 - RNA, 17 nt, Artificial Sequence
  Synthetic
gcgcuucuccacaccgc

SEQ ID NO: 1829 - RNA, 17 nt, Artificial Sequence
  Synthetic
cgcuucuccacaccgcc

SEQ ID NO: 1830 - RNA, 17 nt, Artificial Sequence
  Synthetic
gcuucuccacaccgccc

SEQ ID NO: 1831 - RNA, 17 nt, Artificial Sequence
  Synthetic
cuucuccacaccgcccg

SEQ ID NO: 1832 - RNA, 17 nt, Artificial Sequence
  Synthetic
ccacaccgcccggggag

SEQ ID NO: 1833 - RNA, 17 nt, Artificial Sequence
  Synthetic
accgcccggggagcugg

SEQ ID NO: 1834 - RNA, 17 nt, Artificial Sequence
  Synthetic
ccgcccggggagcugga

SEQ ID NO: 1835 - RNA, 17 nt, Artificial Sequence
  Synthetic
gcccggggagcuggacg

SEQ ID NO: 1836 - RNA, 17 nt, Artificial Sequence
  Synthetic
cccggggagcuggacgg

SEQ ID NO: 1837 - RNA, 17 nt, Artificial Sequence
  Synthetic
agcuggacggagggauc

SEQ ID NO: 1838 - RNA, 17 nt, Artificial Sequence
  Synthetic
gcuggacggagggaucu

SEQ ID NO: 1839 - RNA, 17 nt, Artificial Sequence
  Synthetic
ucucggggcgcagcggc

SEQ ID NO: 1840 - RNA, 17 nt, Artificial Sequence
  Synthetic
cucggggcgcagcggca

SEQ ID NO: 1841 - RNA, 17 nt, Artificial Sequence
  Synthetic
ucggggcgcagcggcac

SEQ ID NO: 1842 - RNA, 17 nt, Artificial Sequence
  Synthetic
gcgcagcggcacgggaa

SEQ ID NO: 1843 - RNA, 17 nt, Artificial Sequence
  Synthetic
cgcagcggcacgggaag

SEQ ID NO: 1844 - RNA, 17 nt, Artificial Sequence
  Synthetic
cagcggcacgggaagug

SEQ ID NO: 1845 - RNA, 17 nt, Artificial Sequence
  Synthetic
agcggcacgggaagugg

SEQ ID NO: 1846 - RNA, 17 nt, Artificial Sequence
  Synthetic
gcggcacgggaagugga

SEQ ID NO: 1847 - RNA, 17 nt, Artificial Sequence
  Synthetic
cgccccauauuaguggu

SEQ ID NO: 1848 - RNA, 17 nt, Artificial Sequence
  Synthetic
auauuagugguccgggc

SEQ ID NO: 1849 - RNA, 17 nt, Artificial Sequence
  Synthetic
gggcaggcccagcucaa

SEQ ID NO: 1850 - RNA, 17 nt, Artificial Sequence
  Synthetic
gcaggcccagcucaaaa

SEQ ID NO: 1851 - RNA, 20 nt, Artificial Sequence
  Synthetic
aaguuguacauguguagcug

SEQ ID NO: 1852 - RNA, 20 nt, Artificial Sequence
  Synthetic
gcaagagaaaccaugcacug

SEQ ID NO: 1853 - RNA, 20 nt, Artificial Sequence
  Synthetic
guguucugugcguguugcaa

SEQ ID NO: 1854 - RNA, 20 nt, Artificial Sequence
  Synthetic
gaguguucugugcguguugc

SEQ ID NO: 1855 - RNA, 20 nt, Artificial Sequence
  Synthetic
ucuaaguagauucuuaaucc

SEQ ID NO: 1856 - RNA, 20 nt, Artificial Sequence
  Synthetic
gauaccaacccgcgggguca

SEQ ID NO: 1857 - RNA, 20 nt, Artificial Sequence
  Synthetic
ggauaccaacccgcgggguc

SEQ ID NO: 1858 - RNA, 20 nt, Artificial Sequence
  Synthetic
gggauaccaacccgcggggu

SEQ ID NO: 1859 - RNA, 20 nt, Artificial Sequence
  Synthetic
ccugaagggauaccaacccg

SEQ ID NO: 1860 - RNA, 20 nt, Artificial Sequence
  Synthetic
uccugaagggauaccaaccc

SEQ ID NO: 1861 - RNA, 20 nt, Artificial Sequence
  Synthetic
cauucugcaccuaguccuga

SEQ ID NO: 1862 - RNA, 20 nt, Artificial Sequence
  Synthetic
acauucugcaccuaguccug

SEQ ID NO: 1863 - RNA, 20 nt, Artificial Sequence
  Synthetic
aggacauucugcaccuaguc

SEQ ID NO: 1864 - RNA, 20 nt, Artificial Sequence
  Synthetic
cccauggagagguggcuggg

SEQ ID NO: 1865 - RNA, 20 nt, Artificial Sequence
  Synthetic
aaucccauggagagguggcu

SEQ ID NO: 1866 - RNA, 20 nt, Artificial Sequence
  Synthetic
gaaucccauggagagguggc

SEQ ID NO: 1867 - RNA, 20 nt, Artificial Sequence
  Synthetic
ugaaucccauggagaggugg

SEQ ID NO: 1868 - RNA, 20 nt, Artificial Sequence
  Synthetic
ucugcaauaugaaucccaug

SEQ ID NO: 1869 - RNA, 20 nt, Artificial Sequence
  Synthetic
ugucugcaauaugaauccca

SEQ ID NO: 1870 - RNA, 20 nt, Artificial Sequence
  Synthetic
uugucugcaauaugaauccc

SEQ ID NO: 1871 - RNA, 20 nt, Artificial Sequence
  Synthetic
aagggguuauugucugcaau

SEQ ID NO: 1872 - RNA, 20 nt, Artificial Sequence
  Synthetic
ugguauucuuagcagguuaa

SEQ ID NO: 1873 - RNA, 20 nt, Artificial Sequence
  Synthetic
cugguauucuuagcagguua

SEQ ID NO: 1874 - RNA, 20 nt, Artificial Sequence
  Synthetic
aaagcgcccuucugccaggc

SEQ ID NO: 1875 - RNA, 20 nt, Artificial Sequence
  Synthetic
gaaagcgcccuucugccagg

SEQ ID NO: 1876 - RNA, 20 nt, Artificial Sequence
  Synthetic
cuaaacagggggggaguggg

SEQ ID NO: 1877 - RNA, 20 nt, Artificial Sequence
  Synthetic
acuaaacagggggggagugg

SEQ ID NO: 1878 - RNA, 20 nt, Artificial Sequence
  Synthetic
guggacuaaacaggggggga

SEQ ID NO: 1879 - RNA, 20 nt, Artificial Sequence
  Synthetic
ggugguggacuaaacagggg

SEQ ID NO: 1880 - RNA, 20 nt, Artificial Sequence
  Synthetic
cggugguggacuaaacaggg

SEQ ID NO: 1881 - RNA, 20 nt, Artificial Sequence
  Synthetic
ucggugguggacuaaacagg

SEQ ID NO: 1882 - RNA, 20 nt, Artificial Sequence
  Synthetic
cucggugguggacuaaacag

SEQ ID NO: 1883 - RNA, 20 nt, Artificial Sequence
  Synthetic
ucucggugguggacuaaaca

SEQ ID NO: 1884 - RNA, 20 nt, Artificial Sequence
  Synthetic
gucucggugguggacuaaac

SEQ ID NO: 1885 - RNA, 20 nt, Artificial Sequence
  Synthetic
ugucucggugguggacuaaa

SEQ ID NO: 1886 - RNA, 20 nt, Artificial Sequence
  Synthetic
guccaagugaugucucggug

SEQ ID NO: 1887 - RNA, 20 nt, Artificial Sequence
  Synthetic
ccccaggcgcucuaugcggu

SEQ ID NO: 1888 - RNA, 20 nt, Artificial Sequence
  Synthetic
cccccaggcgcucuaugcgg

SEQ ID NO: 1889 - RNA, 20 nt, Artificial Sequence
  Synthetic
gcccccaggcgcucuaugcg

SEQ ID NO: 1890 - RNA, 20 nt, Artificial Sequence
  Synthetic
gcacucgggugauggguggc

SEQ ID NO: 1891 - RNA, 20 nt, Artificial Sequence
  Synthetic
cugucaaaggcacucgggug

SEQ ID NO: 1892 - RNA, 20 nt, Artificial Sequence
  Synthetic
cagcacccugucaaaggcac

SEQ ID NO: 1893 - RNA, 20 nt, Artificial Sequence
  Synthetic
ggcgggaggcuccauagcca

SEQ ID NO: 1894 - RNA, 20 nt, Artificial Sequence
  Synthetic
cuccuagagaaauccauggc

SEQ ID NO: 1895 - RNA, 20 nt, Artificial Sequence
  Synthetic
ucuccuagagaaauccaugg

SEQ ID NO: 1896 - RNA, 20 nt, Artificial Sequence
  Synthetic
gucuccuagagaaauccaug

SEQ ID NO: 1897 - RNA, 20 nt, Artificial Sequence
  Synthetic
ccagcucucuaagucuccua

SEQ ID NO: 1898 - RNA, 20 nt, Artificial Sequence
  Synthetic
ugccagcucucuaagucucc

SEQ ID NO: 1899 - RNA, 20 nt, Artificial Sequence
  Synthetic
gggccggccuggggacagcg

SEQ ID NO: 1900 - RNA, 20 nt, Artificial Sequence
  Synthetic
gcauagggcugggccggccu

SEQ ID NO: 1901 - RNA, 20 nt, Artificial Sequence
  Synthetic
ugcauagggcugggccggcc

SEQ ID NO: 1902 - RNA, 20 nt, Artificial Sequence
  Synthetic
uugcauagggcugggccggc

SEQ ID NO: 1903 - RNA, 20 nt, Artificial Sequence
  Synthetic
gcaguaaccuuugcauaggg

SEQ ID NO: 1904 - RNA, 20 nt, Artificial Sequence
  Synthetic
ugguugcaguaaccuuugca

SEQ ID NO: 1905 - RNA, 20 nt, Artificial Sequence
  Synthetic
agggcggcuugcuaccuggc

SEQ ID NO: 1906 - RNA, 20 nt, Artificial Sequence
  Synthetic
aagggcggcuugcuaccugg

SEQ ID NO: 1907 - RNA, 20 nt, Artificial Sequence
  Synthetic
ggagggggggcgucgccagg

SEQ ID NO: 1908 - RNA, 20 nt, Artificial Sequence
  Synthetic
gagggagggggggcgucgcc

SEQ ID NO: 1909 - RNA, 20 nt, Artificial Sequence
  Synthetic
ggagggagggggggcgucgc

SEQ ID NO: 1910 - RNA, 20 nt, Artificial Sequence
  Synthetic
cggauugcagaggagggagg

SEQ ID NO: 1911 - RNA, 20 nt, Artificial Sequence
  Synthetic
gcggauugcagaggagggag

SEQ ID NO: 1912 - RNA, 20 nt, Artificial Sequence
  Synthetic
ggcggauugcagaggaggga

SEQ ID NO: 1913 - RNA, 20 nt, Artificial Sequence
  Synthetic
gggcggauugcagaggaggg

SEQ ID NO: 1914 - RNA, 20 nt, Artificial Sequence
  Synthetic
ggggcggauugcagaggagg

SEQ ID NO: 1915 - RNA, 20 nt, Artificial Sequence
  Synthetic
gaggggcggauugcagagga

SEQ ID NO: 1916 - RNA, 20 nt, Artificial Sequence
  Synthetic
ggaggggcggauugcagagg

SEQ ID NO: 1917 - RNA, 20 nt, Artificial Sequence
  Synthetic
aggaggggcggauugcagag

SEQ ID NO: 1918 - RNA, 20 nt, Artificial Sequence
  Synthetic
ggaggaggggcggauugcag

SEQ ID NO: 1919 - RNA, 20 nt, Artificial Sequence
  Synthetic
gggaggaggggcggauugca

SEQ ID NO: 1920 - RNA, 20 nt, Artificial Sequence
  Synthetic
gagggaggaggggcggauug

SEQ ID NO: 1921 - RNA, 20 nt, Artificial Sequence
  Synthetic
ggggcugggagggaggaggg

SEQ ID NO: 1922 - RNA, 20 nt, Artificial Sequence
  Synthetic
accgggggcugggagggagg

SEQ ID NO: 1923 - RNA, 20 nt, Artificial Sequence
  Synthetic
gaccgggggcugggagggag

SEQ ID NO: 1924 - RNA, 20 nt, Artificial Sequence
  Synthetic
uugaccgggggcugggaggg

SEQ ID NO: 1925 - RNA, 20 nt, Artificial Sequence
  Synthetic
cuugaccgggggcugggagg

SEQ ID NO: 1926 - RNA, 20 nt, Artificial Sequence
  Synthetic
gacuugaccgggggcuggga

SEQ ID NO: 1927 - RNA, 20 nt, Artificial Sequence
  Synthetic
ggacuugaccgggggcuggg

SEQ ID NO: 1928 - RNA, 20 nt, Artificial Sequence
  Synthetic
uggacuugaccgggggcugg

SEQ ID NO: 1929 - RNA, 20 nt, Artificial Sequence
  Synthetic
cuuggacuugaccgggggcu

SEQ ID NO: 1930 - RNA, 20 nt, Artificial Sequence
  Synthetic
acuuggacuugaccgggggc

SEQ ID NO: 1931 - RNA, 20 nt, Artificial Sequence
  Synthetic
gacuuggacuugaccggggg

SEQ ID NO: 1932 - RNA, 20 nt, Artificial Sequence
  Synthetic
cgcaugacuuggacuugacc

SEQ ID NO: 1933 - RNA, 20 nt, Artificial Sequence
  Synthetic
ucgcaugacuuggacuugac

SEQ ID NO: 1934 - RNA, 20 nt, Artificial Sequence
  Synthetic
cucgcaugacuuggacuuga

SEQ ID NO: 1935 - RNA, 20 nt, Artificial Sequence
  Synthetic
ugccgcagaacucgcaugac

SEQ ID NO: 1936 - RNA, 20 nt, Artificial Sequence
  Synthetic
gaaauuugaacgucuugccg

SEQ ID NO: 1937 - RNA, 20 nt, Artificial Sequence
  Synthetic
ccaccagguugcucugaaau

SEQ ID NO: 1938 - RNA, 20 nt, Artificial Sequence
  Synthetic
cggugcaccaccagguugcu

SEQ ID NO: 1939 - RNA, 20 nt, Artificial Sequence
  Synthetic
ggucgcacagguugcacuug

SEQ ID NO: 1940 - RNA, 20 nt, Artificial Sequence
  Synthetic
uggcgcuucagcuugcuggc

SEQ ID NO: 1941 - RNA, 20 nt, Artificial Sequence
  Synthetic
cgucggacuugaccgucaug

SEQ ID NO: 1942 - RNA, 20 nt, Artificial Sequence
  Synthetic
ucgucggacuugaccgucau

SEQ ID NO: 1943 - RNA, 20 nt, Artificial Sequence
  Synthetic
gucgucggacuugaccguca

SEQ ID NO: 1944 - RNA, 20 nt, Artificial Sequence
  Synthetic
cgucgucggacuugaccguc

SEQ ID NO: 1945 - RNA, 20 nt, Artificial Sequence
  Synthetic
uggcgguggagagaccgucg

SEQ ID NO: 1946 - RNA, 20 nt, Artificial Sequence
  Synthetic
guuccggggagcuggcggug

SEQ ID NO: 1947 - RNA, 20 nt, Artificial Sequence
  Synthetic
ggguuccggggagcuggcgg

SEQ ID NO: 1948 - RNA, 20 nt, Artificial Sequence
  Synthetic
cggguuccggggagcuggcg

SEQ ID NO: 1949 - RNA, 20 nt, Artificial Sequence
  Synthetic
gucgcuggugccggguuccg

SEQ ID NO: 1950 - RNA, 20 nt, Artificial Sequence
  Synthetic
agucgcuggugccggguucc

SEQ ID NO: 1951 - RNA, 20 nt, Artificial Sequence
  Synthetic
aagucgcuggugccggguuc

SEQ ID NO: 1952 - RNA, 20 nt, Artificial Sequence
  Synthetic
caagucgcuggugccggguu

SEQ ID NO: 1953 - RNA, 20 nt, Artificial Sequence
  Synthetic
ugcccaccaagucgcuggug

SEQ ID NO: 1954 - RNA, 20 nt, Artificial Sequence
  Synthetic
ugaacuuggccaccacggac

SEQ ID NO: 1955 - RNA, 20 nt, Artificial Sequence
  Synthetic
cgcucuugaacuuggccacc

SEQ ID NO: 1956 - RNA, 20 nt, Artificial Sequence
  Synthetic
gguuggggucguucucgcuc

SEQ ID NO: 1957 - RNA, 20 nt, Artificial Sequence
  Synthetic
cccguucuccgggaucaggu

SEQ ID NO: 1958 - RNA, 20 nt, Artificial Sequence
  Synthetic
ccccguucuccgggaucagg

SEQ ID NO: 1959 - RNA, 20 nt, Artificial Sequence
  Synthetic
uccuccucguccccguucuc

SEQ ID NO: 1960 - RNA, 20 nt, Artificial Sequence
  Synthetic
uuccuccucguccccguucu

SEQ ID NO: 1961 - RNA, 20 nt, Artificial Sequence
  Synthetic
gcgccgccuccaggcucagc

SEQ ID NO: 1962 - RNA, 20 nt, Artificial Sequence
  Synthetic
cacgcccacgaccgcgcccc

SEQ ID NO: 1963 - RNA, 20 nt, Artificial Sequence
  Synthetic
augcccugcaugacgucggg

SEQ ID NO: 1964 - RNA, 20 nt, Artificial Sequence
  Synthetic
gcaccaugcccugcaugacg

SEQ ID NO: 1965 - RNA, 20 nt, Artificial Sequence
  Synthetic
cgcugaagugcugcauggag

SEQ ID NO: 1966 - RNA, 20 nt, Artificial Sequence
  Synthetic
ggccucgcugaagugcugca

SEQ ID NO: 1967 - RNA, 20 nt, Artificial Sequence
  Synthetic
aggccucgcugaagugcugc

SEQ ID NO: 1968 - RNA, 20 nt, Artificial Sequence
  Synthetic
ggaccugguggaaggccucg

SEQ ID NO: 1969 - RNA, 20 nt, Artificial Sequence
  Synthetic
gcuucucgcccaggaccugg

SEQ ID NO: 1970 - RNA, 20 nt, Artificial Sequence
  Synthetic
ugcuucucgcccaggaccug

SEQ ID NO: 1971 - RNA, 20 nt, Artificial Sequence
  Synthetic
ccgcgcuuaugcuucucgcc

SEQ ID NO: 1972 - RNA, 20 nt, Artificial Sequence
  Synthetic
gcgguccgacucgccggcca

SEQ ID NO: 1973 - RNA, 20 nt, Artificial Sequence
  Synthetic
ccccgaggccgacucgcccg

SEQ ID NO: 1974 - RNA, 20 nt, Artificial Sequence
  Synthetic
cccccgaggccgacucgccc

SEQ ID NO: 1975 - RNA, 20 nt, Artificial Sequence
  Synthetic
ccccccgaggccgacucgcc

SEQ ID NO: 1976 - RNA, 20 nt, Artificial Sequence
  Synthetic
gccccccgaggccgacucgc

SEQ ID NO: 1977 - RNA, 20 nt, Artificial Sequence
  Synthetic
cagcuuuuuggacaggcccc

SEQ ID NO: 1978 - RNA, 20 nt, Artificial Sequence
  Synthetic
ggcugcccagcagcagcuuu

SEQ ID NO: 1979 - RNA, 20 nt, Artificial Sequence
  Synthetic
agagaaggggcucagcgagc

SEQ ID NO: 1980 - RNA, 20 nt, Artificial Sequence
  Synthetic
uagagaaggggcucagcgag

SEQ ID NO: 1981 - RNA, 20 nt, Artificial Sequence
  Synthetic
gcgcuuagagaaggggcuca

SEQ ID NO: 1982 - RNA, 20 nt, Artificial Sequence
  Synthetic
gagcuugaugcgcuuagaga

SEQ ID NO: 1983 - RNA, 20 nt, Artificial Sequence
  Synthetic
cgagcuugaugcgcuuagag

SEQ ID NO: 1984 - RNA, 20 nt, Artificial Sequence
  Synthetic
ucucgagcuugaugcgcuua

SEQ ID NO: 1985 - RNA, 20 nt, Artificial Sequence
  Synthetic
cuucucgagcuugaugcgcu

SEQ ID NO: 1986 - RNA, 20 nt, Artificial Sequence
  Synthetic
ggggcaggucgaacuccuuc

SEQ ID NO: 1987 - RNA, 20 nt, Artificial Sequence
  Synthetic
gcaucgcggccgggggcagg

SEQ ID NO: 1988 - RNA, 20 nt, Artificial Sequence
  Synthetic
ccguguugggcaucgcggcc

SEQ ID NO: 1989 - RNA, 20 nt, Artificial Sequence
  Synthetic
uccguguugggcaucgcggc

SEQ ID NO: 1990 - RNA, 20 nt, Artificial Sequence
  Synthetic
cuccguguugggcaucgcgg

SEQ ID NO: 1991 - RNA, 20 nt, Artificial Sequence
  Synthetic
gcgaguacacguucuccgug

SEQ ID NO: 1992 - RNA, 20 nt, Artificial Sequence
  Synthetic
cgcguagccggcgagccacu

SEQ ID NO: 1993 - RNA, 20 nt, Artificial Sequence
  Synthetic
gccuggaggccgcguagccg

SEQ ID NO: 1994 - RNA, 20 nt, Artificial Sequence
  Synthetic
gaagggaucuuugagcugcc

SEQ ID NO: 1995 - RNA, 20 nt, Artificial Sequence
  Synthetic
ggaagggaucuuugagcugc

SEQ ID NO: 1996 - RNA, 20 nt, Artificial Sequence
  Synthetic
cgaagcuaaggaagggaucu

SEQ ID NO: 1997 - RNA, 20 nt, Artificial Sequence
  Synthetic
ggagucuccgaagcuaagga

SEQ ID NO: 1998 - RNA, 20 nt, Artificial Sequence
  Synthetic
uggagucuccgaagcuaagg

SEQ ID NO: 1999 - RNA, 20 nt, Artificial Sequence
  Synthetic
gucuggagucuccgaagcua

SEQ ID NO: 2000 - RNA, 20 nt, Artificial Sequence
  Synthetic
ugucuggagucuccgaagcu

SEQ ID NO: 2001 - RNA, 20 nt, Artificial Sequence
  Synthetic
aaggcgauugucuggagucu

SEQ ID NO: 2002 - RNA, 20 nt, Artificial Sequence
  Synthetic
ggaggcaaaaggcgauuguc

SEQ ID NO: 2003 - RNA, 20 nt, Artificial Sequence
  Synthetic
aggaggcaaaaggcgauugu

SEQ ID NO: 2004 - RNA, 20 nt, Artificial Sequence
  Synthetic
cuccgaggagugcuccgacg

SEQ ID NO: 2005 - RNA, 20 nt, Artificial Sequence
  Synthetic
ucuccgaggagugcuccgac

SEQ ID NO: 2006 - RNA, 20 nt, Artificial Sequence
  Synthetic
guucuccgaggagugcuccg

SEQ ID NO: 2007 - RNA, 20 nt, Artificial Sequence
  Synthetic
gcgcaaacucccguucuccg

SEQ ID NO: 2008 - RNA, 20 nt, Artificial Sequence
  Synthetic
agcgcaaacucccguucucc

SEQ ID NO: 2009 - RNA, 20 nt, Artificial Sequence
  Synthetic
gaagcgcaaacucccguucu

SEQ ID NO: 2010 - RNA, 20 nt, Artificial Sequence
  Synthetic
ccagcuccccgggcggugug

SEQ ID NO: 2011 - RNA, 20 nt, Artificial Sequence
  Synthetic
guccagcuccccgggcggug

SEQ ID NO: 2012 - RNA, 20 nt, Artificial Sequence
  Synthetic
cguccagcuccccgggcggu

SEQ ID NO: 2013 - RNA, 20 nt, Artificial Sequence
  Synthetic
agaucccuccguccagcucc

SEQ ID NO: 2014 - RNA, 20 nt, Artificial Sequence
  Synthetic
acuucccgugccgcugcgcc

SEQ ID NO: 2015 - RNA, 20 nt, Artificial Sequence
  Synthetic
ccgggcccggaccacuaaua

SEQ ID NO: 2016 - RNA, 20 nt, Artificial Sequence
  Synthetic
cccgggcccggaccacuaau

SEQ ID NO: 2017 - RNA, 20 nt, Artificial Sequence
  Synthetic
ugagcugggccugcccgggc

SEQ ID NO: 2018 - RNA, 20 nt, Artificial Sequence
  Synthetic
cucuuuugagcugggccugc

SEQ ID NO: 2019 - RNA, 20 nt, Artificial Sequence
  Synthetic
ugcgucugcccucuuuugag

SEQ ID NO: 2020 - RNA, 20 nt, Artificial Sequence
  Synthetic
gucgcugcgucugcccucuu

SEQ ID NO: 2021 - RNA, 17 nt, Artificial Sequence
  Synthetic
uuguacauguguagcug

SEQ ID NO: 2022 - RNA, 17 nt, Artificial Sequence
  Synthetic
agagaaaccaugcacug

SEQ ID NO: 2023 - RNA, 17 nt, Artificial Sequence
  Synthetic
uucugugcguguugcaa

SEQ ID NO: 2024 - RNA, 17 nt, Artificial Sequence
  Synthetic
uguucugugcguguugc

SEQ ID NO: 2025 - RNA, 17 nt, Artificial Sequence
  Synthetic
aaguagauucuuaaucc

SEQ ID NO: 2026 - RNA, 17 nt, Artificial Sequence
  Synthetic
accaacccgcgggguca

SEQ ID NO: 2027 - RNA, 17 nt, Artificial Sequence
  Synthetic
uaccaacccgcgggguc

SEQ ID NO: 2028 - RNA, 17 nt, Artificial Sequence
  Synthetic
auaccaacccgcggggu

SEQ ID NO: 2029 - RNA, 17 nt, Artificial Sequence
  Synthetic
gaagggauaccaacccg

SEQ ID NO: 2030 - RNA, 17 nt, Artificial Sequence
  Synthetic
ugaagggauaccaaccc

SEQ ID NO: 2031 - RNA, 17 nt, Artificial Sequence
  Synthetic
ucugcaccuaguccuga

SEQ ID NO: 2032 - RNA, 17 nt, Artificial Sequence
  Synthetic
uucugcaccuaguccug

SEQ ID NO: 2033 - RNA, 17 nt, Artificial Sequence
  Synthetic
acauucugcaccuaguc

SEQ ID NO: 2034 - RNA, 17 nt, Artificial Sequence
  Synthetic
auggagagguggcuggg

SEQ ID NO: 2035 - RNA, 17 nt, Artificial Sequence
  Synthetic
cccauggagagguggcu

SEQ ID NO: 2036 - RNA, 17 nt, Artificial Sequence
  Synthetic
ucccauggagagguggc

SEQ ID NO: 2037 - RNA, 17 nt, Artificial Sequence
  Synthetic
aucccauggagaggugg

SEQ ID NO: 2038 - RNA, 17 nt, Artificial Sequence
  Synthetic
gcaauaugaaucccaug

SEQ ID NO: 2039 - RNA, 17 nt, Artificial Sequence
  Synthetic
cugcaauaugaauccca

SEQ ID NO: 2040 - RNA, 17 nt, Artificial Sequence
  Synthetic
ucugcaauaugaauccc

SEQ ID NO: 2041 - RNA, 17 nt, Artificial Sequence
  Synthetic
ggguuauugucugcaau

SEQ ID NO: 2042 - RNA, 17 nt, Artificial Sequence
  Synthetic
uauucuuagcagguuaa

SEQ ID NO: 2043 - RNA, 17 nt, Artificial Sequence
  Synthetic
guauucuuagcagguua

SEQ ID NO: 2044 - RNA, 17 nt, Artificial Sequence
  Synthetic
gcgcccuucugccaggc

SEQ ID NO: 2045 - RNA, 17 nt, Artificial Sequence
  Synthetic
agcgcccuucugccagg

SEQ ID NO: 2046 - RNA, 17 nt, Artificial Sequence
  Synthetic
aacagggggggaguggg

SEQ ID NO: 2047 - RNA, 17 nt, Artificial Sequence
  Synthetic
aaacagggggggagugg

SEQ ID NO: 2048 - RNA, 17 nt, Artificial Sequence
  Synthetic
gacuaaacaggggggga

SEQ ID NO: 2049 - RNA, 17 nt, Artificial Sequence
  Synthetic
gguggacuaaacagggg

SEQ ID NO: 2050 - RNA, 17 nt, Artificial Sequence
  Synthetic
ugguggacuaaacaggg

SEQ ID NO: 2051 - RNA, 17 nt, Artificial Sequence
  Synthetic
gugguggacuaaacagg

SEQ ID NO: 2052 - RNA, 17 nt, Artificial Sequence
  Synthetic
ggugguggacuaaacag

SEQ ID NO: 2053 - RNA, 17 nt, Artificial Sequence
  Synthetic
cggugguggacuaaaca

SEQ ID NO: 2054 - RNA, 17 nt, Artificial Sequence
  Synthetic
ucggugguggacuaaac

SEQ ID NO: 2055 - RNA, 17 nt, Artificial Sequence
  Synthetic
cucggugguggacuaaa

SEQ ID NO: 2056 - RNA, 17 nt, Artificial Sequence
  Synthetic
caagugaugucucggug

SEQ ID NO: 2057 - RNA, 17 nt, Artificial Sequence
  Synthetic
caggcgcucuaugcggu

SEQ ID NO: 2058 - RNA, 17 nt, Artificial Sequence
  Synthetic
ccaggcgcucuaugcgg

SEQ ID NO: 2059 - RNA, 17 nt, Artificial Sequence
  Synthetic
cccaggcgcucuaugcg

SEQ ID NO: 2060 - RNA, 17 nt, Artificial Sequence
  Synthetic
cucgggugauggguggc

SEQ ID NO: 2061 - RNA, 17 nt, Artificial Sequence
  Synthetic
ucaaaggcacucgggug

SEQ ID NO: 2062 - RNA, 17 nt, Artificial Sequence
  Synthetic
cacccugucaaaggcac

SEQ ID NO: 2063 - RNA, 17 nt, Artificial Sequence
  Synthetic
gggaggcuccauagcca

SEQ ID NO: 2064 - RNA, 17 nt, Artificial Sequence
  Synthetic
cuagagaaauccauggc

SEQ ID NO: 2065 - RNA, 17 nt, Artificial Sequence
  Synthetic
ccuagagaaauccaugg

SEQ ID NO: 2066 - RNA, 17 nt, Artificial Sequence
  Synthetic
uccuagagaaauccaug

SEQ ID NO: 2067 - RNA, 17 nt, Artificial Sequence
  Synthetic
gcucucuaagucuccua

SEQ ID NO: 2068 - RNA, 17 nt, Artificial Sequence
  Synthetic
cagcucucuaagucucc

SEQ ID NO: 2069 - RNA, 17 nt, Artificial Sequence
  Synthetic
ccggccuggggacagcg

SEQ ID NO: 2070 - RNA, 17 nt, Artificial Sequence
  Synthetic
uagggcugggccggccu

SEQ ID NO: 2071 - RNA, 17 nt, Artificial Sequence
  Synthetic
auagggcugggccggcc

SEQ ID NO: 2072 - RNA, 17 nt, Artificial Sequence
  Synthetic
cauagggcugggccggc

SEQ ID NO: 2073 - RNA, 17 nt, Artificial Sequence
  Synthetic
guaaccuuugcauaggg

SEQ ID NO: 2074 - RNA, 17 nt, Artificial Sequence
  Synthetic
uugcaguaaccuuugca

SEQ ID NO: 2075 - RNA, 17 nt, Artificial Sequence
  Synthetic
gcggcuugcuaccuggc

SEQ ID NO: 2076 - RNA, 17 nt, Artificial Sequence
  Synthetic
ggcggcuugcuaccugg

SEQ ID NO: 2077 - RNA, 17 nt, Artificial Sequence
  Synthetic
gggggggcgucgccagg

SEQ ID NO: 2078 - RNA, 17 nt, Artificial Sequence
  Synthetic
ggagggggggcgucgcc

SEQ ID NO: 2079 - RNA, 17 nt, Artificial Sequence
  Synthetic
gggagggggggcgucgc

SEQ ID NO: 2080 - RNA, 17 nt, Artificial Sequence
  Synthetic
auugcagaggagggagg

SEQ ID NO: 2081 - RNA, 17 nt, Artificial Sequence
  Synthetic
gauugcagaggagggag

SEQ ID NO: 2082 - RNA, 17 nt, Artificial Sequence
  Synthetic
ggauugcagaggaggga

SEQ ID NO: 2083 - RNA, 17 nt, Artificial Sequence
  Synthetic
cggauugcagaggaggg

SEQ ID NO: 2084 - RNA, 17 nt, Artificial Sequence
  Synthetic
gcggauugcagaggagg

SEQ ID NO: 2085 - RNA, 17 nt, Artificial Sequence
  Synthetic
gggcggauugcagagga

SEQ ID NO: 2086 - RNA, 17 nt, Artificial Sequence
  Synthetic
ggggcggauugcagagg

SEQ ID NO: 2087 - RNA, 17 nt, Artificial Sequence
  Synthetic
aggggcggauugcagag

SEQ ID NO: 2088 - RNA, 17 nt, Artificial Sequence
  Synthetic
ggaggggcggauugcag

SEQ ID NO: 2089 - RNA, 17 nt, Artificial Sequence
  Synthetic
aggaggggcggauugca

SEQ ID NO: 2090 - RNA, 17 nt, Artificial Sequence
  Synthetic
ggaggaggggcggauug

SEQ ID NO: 2091 - RNA, 17 nt, Artificial Sequence
  Synthetic
gcugggagggaggaggg

SEQ ID NO: 2092 - RNA, 17 nt, Artificial Sequence
  Synthetic
gggggcugggagggagg

SEQ ID NO: 2093 - RNA, 17 nt, Artificial Sequence
  Synthetic
cgggggcugggagggag

SEQ ID NO: 2094 - RNA, 17 nt, Artificial Sequence
  Synthetic
accgggggcugggaggg

SEQ ID NO: 2095 - RNA, 17 nt, Artificial Sequence
  Synthetic
gaccgggggcugggagg

SEQ ID NO: 2096 - RNA, 17 nt, Artificial Sequence
  Synthetic
uugaccgggggcuggga

SEQ ID NO: 2097 - RNA, 17 nt, Artificial Sequence
  Synthetic
cuugaccgggggcuggg

SEQ ID NO: 2098 - RNA, 17 nt, Artificial Sequence
  Synthetic
acuugaccgggggcugg

SEQ ID NO: 2099 - RNA, 17 nt, Artificial Sequence
  Synthetic
ggacuugaccgggggcu

SEQ ID NO: 2100 - RNA, 17 nt, Artificial Sequence
  Synthetic
uggacuugaccgggggc

SEQ ID NO: 2101 - RNA, 17 nt, Artificial Sequence
  Synthetic
uuggacuugaccggggg

SEQ ID NO: 2102 - RNA, 17 nt, Artificial Sequence
  Synthetic
augacuuggacuugacc

SEQ ID NO: 2103 - RNA, 17 nt, Artificial Sequence
  Synthetic
caugacuuggacuugac

SEQ ID NO: 2104 - RNA, 17 nt, Artificial Sequence
  Synthetic
gcaugacuuggacuuga

SEQ ID NO: 2105 - RNA, 17 nt, Artificial Sequence
  Synthetic
cgcagaacucgcaugac

SEQ ID NO: 2106 - RNA, 17 nt, Artificial Sequence
  Synthetic
auuugaacgucuugccg

SEQ ID NO: 2107 - RNA, 17 nt, Artificial Sequence
  Synthetic
ccagguugcucugaaau

SEQ ID NO: 2108 - RNA, 17 nt, Artificial Sequence
  Synthetic
ugcaccaccagguugcu

SEQ ID NO: 2109 - RNA, 17 nt, Artificial Sequence
  Synthetic
cgcacagguugcacuug

SEQ ID NO: 2110 - RNA, 17 nt, Artificial Sequence
  Synthetic
cgcuucagcuugcuggc

SEQ ID NO: 2111 - RNA, 17 nt, Artificial Sequence
  Synthetic
cggacuugaccgucaug

SEQ ID NO: 2112 - RNA, 17 nt, Artificial Sequence
  Synthetic
ucggacuugaccgucau

SEQ ID NO: 2113 - RNA, 17 nt, Artificial Sequence
  Synthetic
gucggacuugaccguca

SEQ ID NO: 2114 - RNA, 17 nt, Artificial Sequence
  Synthetic
cgucggacuugaccguc

SEQ ID NO: 2115 - RNA, 17 nt, Artificial Sequence
  Synthetic
cgguggagagaccgucg

SEQ ID NO: 2116 - RNA, 17 nt, Artificial Sequence
  Synthetic
ccggggagcuggcggug

SEQ ID NO: 2117 - RNA, 17 nt, Artificial Sequence
  Synthetic
uuccggggagcuggcgg

SEQ ID NO: 2118 - RNA, 17 nt, Artificial Sequence
  Synthetic
guuccggggagcuggcg

SEQ ID NO: 2119 - RNA, 17 nt, Artificial Sequence
  Synthetic
gcuggugccggguuccg

SEQ ID NO: 2120 - RNA, 17 nt, Artificial Sequence
  Synthetic
cgcuggugccggguucc

SEQ ID NO: 2121 - RNA, 17 nt, Artificial Sequence
  Synthetic
ucgcuggugccggguuc

SEQ ID NO: 2122 - RNA, 17 nt, Artificial Sequence
  Synthetic
gucgcuggugccggguu

SEQ ID NO: 2123 - RNA, 17 nt, Artificial Sequence
  Synthetic
ccaccaagucgcuggug

SEQ ID NO: 2124 - RNA, 17 nt, Artificial Sequence
  Synthetic
acuuggccaccacggac

SEQ ID NO: 2125 - RNA, 17 nt, Artificial Sequence
  Synthetic
ucuugaacuuggccacc

SEQ ID NO: 2126 - RNA, 17 nt, Artificial Sequence
  Synthetic
uggggucguucucgcuc

SEQ ID NO: 2127 - RNA, 17 nt, Artificial Sequence
  Synthetic
guucuccgggaucaggu

SEQ ID NO: 2128 - RNA, 17 nt, Artificial Sequence
  Synthetic
cguucuccgggaucagg

SEQ ID NO: 2129 - RNA, 17 nt, Artificial Sequence
  Synthetic
uccucguccccguucuc

SEQ ID NO: 2130 - RNA, 17 nt, Artificial Sequence
  Synthetic
cuccucguccccguucu

SEQ ID NO: 2131 - RNA, 17 nt, Artificial Sequence
  Synthetic
ccgccuccaggcucagc

SEQ ID NO: 2132 - RNA, 17 nt, Artificial Sequence
  Synthetic
gcccacgaccgcgcccc

SEQ ID NO: 2133 - RNA, 17 nt, Artificial Sequence
  Synthetic
cccugcaugacgucggg

SEQ ID NO: 2134 - RNA, 17 nt, Artificial Sequence
  Synthetic
ccaugcccugcaugacg

SEQ ID NO: 2135 - RNA, 17 nt, Artificial Sequence
  Synthetic
ugaagugcugcauggag

SEQ ID NO: 2136 - RNA, 17 nt, Artificial Sequence
  Synthetic
cucgcugaagugcugca

SEQ ID NO: 2137 - RNA, 17 nt, Artificial Sequence
  Synthetic
ccucgcugaagugcugc

SEQ ID NO: 2138 - RNA, 17 nt, Artificial Sequence
  Synthetic
ccugguggaaggccucg

SEQ ID NO: 2139 - RNA, 17 nt, Artificial Sequence
  Synthetic
ucucgcccaggaccugg

SEQ ID NO: 2140 - RNA, 17 nt, Artificial Sequence
  Synthetic
uucucgcccaggaccug

SEQ ID NO: 2141 - RNA, 17 nt, Artificial Sequence
  Synthetic
cgcuuaugcuucucgcc

SEQ ID NO: 2142 - RNA, 17 nt, Artificial Sequence
  Synthetic
guccgacucgccggcca

SEQ ID NO: 2143 - RNA, 17 nt, Artificial Sequence
  Synthetic
cgaggccgacucgcccg

SEQ ID NO: 2144 - RNA, 17 nt, Artificial Sequence
  Synthetic
ccgaggccgacucgccc

SEQ ID NO: 2145 - RNA, 17 nt, Artificial Sequence
  Synthetic
cccgaggccgacucgcc

SEQ ID NO: 2146 - RNA, 17 nt, Artificial Sequence
  Synthetic
ccccgaggccgacucgc

SEQ ID NO: 2147 - RNA, 17 nt, Artificial Sequence
  Synthetic
cuuuuuggacaggcccc

SEQ ID NO: 2148 - RNA, 17 nt, Artificial Sequence
  Synthetic
ugcccagcagcagcuuu

SEQ ID NO: 2149 - RNA, 17 nt, Artificial Sequence
  Synthetic
gaaggggcucagcgagc

SEQ ID NO: 2150 - RNA, 17 nt, Artificial Sequence
  Synthetic
agaaggggcucagcgag

SEQ ID NO: 2151 - RNA, 17 nt, Artificial Sequence
  Synthetic
cuuagagaaggggcuca

SEQ ID NO: 2152 - RNA, 17 nt, Artificial Sequence
  Synthetic
cuugaugcgcuuagaga

SEQ ID NO: 2153 - RNA, 17 nt, Artificial Sequence
  Synthetic
gcuugaugcgcuuagag

SEQ ID NO: 2154 - RNA, 17 nt, Artificial Sequence
  Synthetic
cgagcuugaugcgcuua

SEQ ID NO: 2155 - RNA, 17 nt, Artificial Sequence
  Synthetic
cucgagcuugaugcgcu

SEQ ID NO: 2156 - RNA, 17 nt, Artificial Sequence
  Synthetic
gcaggucgaacuccuuc

SEQ ID NO: 2157 - RNA, 17 nt, Artificial Sequence
  Synthetic
ucgcggccgggggcagg

SEQ ID NO: 2158 - RNA, 17 nt, Artificial Sequence
  Synthetic
uguugggcaucgcggcc

SEQ ID NO: 2159 - RNA, 17 nt, Artificial Sequence
  Synthetic
guguugggcaucgcggc

SEQ ID NO: 2160 - RNA, 17 nt, Artificial Sequence
  Synthetic
cguguugggcaucgcgg

SEQ ID NO: 2161 - RNA, 17 nt, Artificial Sequence
  Synthetic
aguacacguucuccgug

SEQ ID NO: 2162 - RNA, 17 nt, Artificial Sequence
  Synthetic
guagccggcgagccacu

SEQ ID NO: 2163 - RNA, 17 nt, Artificial Sequence
  Synthetic
uggaggccgcguagccg

SEQ ID NO: 2164 - RNA, 17 nt, Artificial Sequence
  Synthetic
gggaucuuugagcugcc

SEQ ID NO: 2165 - RNA, 17 nt, Artificial Sequence
  Synthetic
agggaucuuugagcugc

SEQ ID NO: 2166 - RNA, 17 nt, Artificial Sequence
  Synthetic
agcuaaggaagggaucu

SEQ ID NO: 2167 - RNA, 17 nt, Artificial Sequence
  Synthetic
gucuccgaagcuaagga

SEQ ID NO: 2168 - RNA, 17 nt, Artificial Sequence
  Synthetic
agucuccgaagcuaagg

SEQ ID NO: 2169 - RNA, 17 nt, Artificial Sequence
  Synthetic
uggagucuccgaagcua

SEQ ID NO: 2170 - RNA, 17 nt, Artificial Sequence
  Synthetic
cuggagucuccgaagcu

SEQ ID NO: 2171 - RNA, 17 nt, Artificial Sequence
  Synthetic
gcgauugucuggagucu

SEQ ID NO: 2172 - RNA, 17 nt, Artificial Sequence
  Synthetic
ggcaaaaggcgauuguc

SEQ ID NO: 2173 - RNA, 17 nt, Artificial Sequence
  Synthetic
aggcaaaaggcgauugu

SEQ ID NO: 2174 - RNA, 17 nt, Artificial Sequence
  Synthetic
cgaggagugcuccgacg

SEQ ID NO: 2175 - RNA, 17 nt, Artificial Sequence
  Synthetic
ccgaggagugcuccgac

SEQ ID NO: 2176 - RNA, 17 nt, Artificial Sequence
  Synthetic
cuccgaggagugcuccg

SEQ ID NO: 2177 - RNA, 17 nt, Artificial Sequence
  Synthetic
caaacucccguucuccg

SEQ ID NO: 2178 - RNA, 17 nt, Artificial Sequence
  Synthetic
gcaaacucccguucucc

SEQ ID NO: 2179 - RNA, 17 nt, Artificial Sequence
  Synthetic
gcgcaaacucccguucu

SEQ ID NO: 2180 - RNA, 17 nt, Artificial Sequence
  Synthetic
gcuccccgggcggugug

SEQ ID NO: 2181 - RNA, 17 nt, Artificial Sequence
  Synthetic
cagcuccccgggcggug

SEQ ID NO: 2182 - RNA, 17 nt, Artificial Sequence
  Synthetic
ccagcuccccgggcggu

SEQ ID NO: 2183 - RNA, 17 nt, Artificial Sequence
  Synthetic
ucccuccguccagcucc

SEQ ID NO: 2184 - RNA, 17 nt, Artificial Sequence
  Synthetic
ucccgugccgcugcgcc

SEQ ID NO: 2185 - RNA, 17 nt, Artificial Sequence
  Synthetic
ggcccggaccacuaaua

SEQ ID NO: 2186 - RNA, 17 nt, Artificial Sequence
  Synthetic
gggcccggaccacuaau

SEQ ID NO: 2187 - RNA, 17 nt, Artificial Sequence
  Synthetic
gcugggccugcccgggc

SEQ ID NO: 2188 - RNA, 17 nt, Artificial Sequence
  Synthetic
uuuugagcugggccugc

SEQ ID NO: 2189 - RNA, 17 nt, Artificial Sequence
  Synthetic
gucugcccucuuuugag

SEQ ID NO: 2190 - RNA, 17 nt, Artificial Sequence
  Synthetic
gcugcgucugcccucuu

SEQ ID NO: 2191 - RNA, 20 nt, Artificial Sequence
  Synthetic
cccccauucggcguaguacc

SEQ ID NO: 2192 - RNA, 20 nt, Artificial Sequence
  Synthetic
cccauucggcguaguaccca

SEQ ID NO: 2193 - RNA, 20 nt, Artificial Sequence
  Synthetic
cucaagauguguggcaguuu

SEQ ID NO: 2194 - RNA, 20 nt, Artificial Sequence
  Synthetic
agauguguggcaguuuucgg

SEQ ID NO: 2195 - RNA, 20 nt, Artificial Sequence
  Synthetic
gauguguggcaguuuucgga

SEQ ID NO: 2196 - RNA, 20 nt, Artificial Sequence
  Synthetic
ggcaguuuucggauggaagc

SEQ ID NO: 2197 - RNA, 20 nt, Artificial Sequence
  Synthetic
caguuuucggauggaagcuc

SEQ ID NO: 2198 - RNA, 17 nt, Artificial Sequence
  Synthetic
ccauucggcguaguacc

SEQ ID NO: 2199 - RNA, 17 nt, Artificial Sequence
  Synthetic
auucggcguaguaccca

SEQ ID NO: 2200 - RNA, 17 nt, Artificial Sequence
  Synthetic
aagauguguggcaguuu

SEQ ID NO: 2201 - RNA, 17 nt, Artificial Sequence
  Synthetic
uguguggcaguuuucgg

SEQ ID NO: 2202 - RNA, 17 nt, Artificial Sequence
  Synthetic
guguggcaguuuucgga

SEQ ID NO: 2203 - RNA, 17 nt, Artificial Sequence
  Synthetic
aguuuucggauggaagc

SEQ ID NO: 2204 - RNA, 17 nt, Artificial Sequence
  Synthetic
uuuucggauggaagcuc

SEQ ID NO: 2205 - RNA, 20 nt, Artificial Sequence
  Synthetic
acgccgaaugggggugugug

SEQ ID NO: 2206 - RNA, 20 nt, Artificial Sequence
  Synthetic
acuacgccgaaugggggugu

SEQ ID NO: 2207 - RNA, 20 nt, Artificial Sequence
  Synthetic
cucuggguacuacgccgaau

SEQ ID NO: 2208 - RNA, 20 nt, Artificial Sequence
  Synthetic
ucucuggguacuacgccgaa

SEQ ID NO: 2209 - RNA, 20 nt, Artificial Sequence
  Synthetic
cucucuggguacuacgccga

SEQ ID NO: 2210 - RNA, 20 nt, Artificial Sequence
  Synthetic
ugagcucucuggguacuacg

SEQ ID NO: 2211 - RNA, 20 nt, Artificial Sequence
  Synthetic
ugccacacaucuugagcucu

SEQ ID NO: 2212 - RNA, 20 nt, Artificial Sequence
  Synthetic
uccgaaaacugccacacauc

SEQ ID NO: 2213 - RNA, 20 nt, Artificial Sequence
  Synthetic
aagggcucucgagcuuccau

SEQ ID NO: 2214 - RNA, 17 nt, Artificial Sequence
  Synthetic
ccgaaugggggugugug

SEQ ID NO: 2215 - RNA, 17 nt, Artificial Sequence
  Synthetic
acgccgaaugggggugu

SEQ ID NO: 2216 - RNA, 17 nt, Artificial Sequence
  Synthetic
uggguacuacgccgaau

SEQ ID NO: 2217 - RNA, 17 nt, Artificial Sequence
  Synthetic
cuggguacuacgccgaa

SEQ ID NO: 2218 - RNA, 17 nt, Artificial Sequence
  Synthetic
ucuggguacuacgccga

SEQ ID NO: 2219 - RNA, 17 nt, Artificial Sequence
  Synthetic
gcucucuggguacuacg

SEQ ID NO: 2220 - RNA, 17 nt, Artificial Sequence
  Synthetic
cacacaucuugagcucu

SEQ ID NO: 2221 - RNA, 17 nt, Artificial Sequence
  Synthetic
gaaaacugccacacauc

SEQ ID NO: 2222 - RNA, 17 nt, Artificial Sequence
  Synthetic
ggcucucgagcuuccau

SEQ ID NO: 2223 - RNA, 20 nt, Artificial Sequence
  Synthetic
auccaggucacgccagagga

SEQ ID NO: 2224 - RNA, 20 nt, Artificial Sequence
  Synthetic
ugcaacacgcacagaacacu

SEQ ID NO: 2225 - RNA, 20 nt, Artificial Sequence
  Synthetic
uccuucccagccaccucucc

SEQ ID NO: 2226 - RNA, 20 nt, Artificial Sequence
  Synthetic
auggcuauggagccucccgc

SEQ ID NO: 2227 - RNA, 17 nt, Artificial Sequence
  Synthetic
caggucacgccagagga

SEQ ID NO: 2228 - RNA, 17 nt, Artificial Sequence
  Synthetic
aacacgcacagaacacu

SEQ ID NO: 2229 - RNA, 17 nt, Artificial Sequence
  Synthetic
uucccagccaccucucc

SEQ ID NO: 2230 - RNA, 17 nt, Artificial Sequence
  Synthetic
gcuauggagccucccgc

SEQ ID NO: 2231 - RNA, 20 nt, Artificial Sequence
  Synthetic
ugaaaaaagcauccaauccc

SEQ ID NO: 2232 - RNA, 20 nt, Artificial Sequence
  Synthetic
ggagguuggcauccagguca

SEQ ID NO: 2233 - RNA, 20 nt, Artificial Sequence
  Synthetic
cgccugggaugagugcagaa

SEQ ID NO: 2234 - RNA, 20 nt, Artificial Sequence
  Synthetic
uagaaagcgaacacggaagu

SEQ ID NO: 2235 - RNA, 20 nt, Artificial Sequence
  Synthetic
ggcuauggagccucccgcca

SEQ ID NO: 2236 - RNA, 20 nt, Artificial Sequence
  Synthetic
ccuccucccucccagccccc

SEQ ID NO: 2237 - RNA, 20 nt, Artificial Sequence
  Synthetic
cccaugacggucaaguccga

SEQ ID NO: 2238 - RNA, 20 nt, Artificial Sequence
  Synthetic
uuugccuccucgucggagca

SEQ ID NO: 2239 - RNA, 17 nt, Artificial Sequence
  Synthetic
ugaaaaaagcauccaau

SEQ ID NO: 2240 - RNA, 17 nt, Artificial Sequence
  Synthetic
ggagguuggcauccagg

SEQ ID NO: 2241 - RNA, 17 nt, Artificial Sequence
  Synthetic
cgccugggaugagugca

SEQ ID NO: 2242 - RNA, 17 nt, Artificial Sequence
  Synthetic
uagaaagcgaacacgga

SEQ ID NO: 2243 - RNA, 17 nt, Artificial Sequence
  Synthetic
ggcuauggagccucccg

SEQ ID NO: 2244 - RNA, 17 nt, Artificial Sequence
  Synthetic
ccuccucccucccagcc

SEQ ID NO: 2245 - RNA, 17 nt, Artificial Sequence
  Synthetic
cccaugacggucaaguc

SEQ ID NO: 2246 - RNA, 17 nt, Artificial Sequence
  Synthetic
uuugccuccucgucgga

SEQ ID NO: 2247 - RNA, 20 nt, Artificial Sequence
  Synthetic
ucuucuccuugcugccucug

SEQ ID NO: 2248 - RNA, 20 nt, Artificial Sequence
  Synthetic
uccuugcugccucugagguu

SEQ ID NO: 2249 - RNA, 20 nt, Artificial Sequence
  Synthetic
ugcugccucugagguucggu

SEQ ID NO: 2250 - RNA, 20 nt, Artificial Sequence
  Synthetic
gcugccucugagguucgguc

SEQ ID NO: 2251 - RNA, 20 nt, Artificial Sequence
  Synthetic
gccucugagguucggucggg

SEQ ID NO: 2252 - RNA, 20 nt, Artificial Sequence
  Synthetic
ccucugagguucggucggga

SEQ ID NO: 2253 - RNA, 20 nt, Artificial Sequence
  Synthetic
cucugagguucggucgggag

SEQ ID NO: 2254 - RNA, 20 nt, Artificial Sequence
  Synthetic
ugagguucggucgggagggg

SEQ ID NO: 2255 - RNA, 20 nt, Artificial Sequence
  Synthetic
gagguucggucgggagggga

SEQ ID NO: 2256 - RNA, 20 nt, Artificial Sequence
  Synthetic
cggucgggaggggagggcag

SEQ ID NO: 2257 - RNA, 20 nt, Artificial Sequence
  Synthetic
ggggagggcagcggcaaccc

SEQ ID NO: 2258 - RNA, 20 nt, Artificial Sequence
  Synthetic
gagggcagcggcaacccagg

SEQ ID NO: 2259 - RNA, 20 nt, Artificial Sequence
  Synthetic
caacccaggaggcagcaguc

SEQ ID NO: 2260 - RNA, 20 nt, Artificial Sequence
  Synthetic
aacccaggaggcagcagucc

SEQ ID NO: 2261 - RNA, 20 nt, Artificial Sequence
  Synthetic
cucccucucccgcgugcccc

SEQ ID NO: 2262 - RNA, 20 nt, Artificial Sequence
  Synthetic
cccccggccgccuccucccc

SEQ ID NO: 2263 - RNA, 20 nt, Artificial Sequence
  Synthetic
cggcccuagcuccugcccuu

SEQ ID NO: 2264 - RNA, 20 nt, Artificial Sequence
  Synthetic
cccuagcuccugcccuucgg

SEQ ID NO: 2265 - RNA, 20 nt, Artificial Sequence
  Synthetic
uagcuccugcccuucggcgg

SEQ ID NO: 2266 - RNA, 20 nt, Artificial Sequence
  Synthetic
cuccugcccuucggcggcgg

SEQ ID NO: 2267 - RNA, 20 nt, Artificial Sequence
  Synthetic
cugcccuucggcggcggcgg

SEQ ID NO: 2268 - RNA, 20 nt, Artificial Sequence
  Synthetic
cccuucggcggcggcggcgg

SEQ ID NO: 2269 - RNA, 20 nt, Artificial Sequence
  Synthetic
uucggcggcggcggcggcgg

SEQ ID NO: 2270 - RNA, 20 nt, Artificial Sequence
  Synthetic
cggcggcggcggcggcggcg

SEQ ID NO: 2271 - RNA, 20 nt, Artificial Sequence
  Synthetic
ggcggcggcggcggcggcgc

SEQ ID NO: 2272 - RNA, 20 nt, Artificial Sequence
  Synthetic
ggcggcggcggcggcgcggg

SEQ ID NO: 2273 - RNA, 20 nt, Artificial Sequence
  Synthetic
gcggcggcggcggcgcggga

SEQ ID NO: 2274 - RNA, 20 nt, Artificial Sequence
  Synthetic
ggcgcgggagggcaagcgcg

SEQ ID NO: 2275 - RNA, 20 nt, Artificial Sequence
  Synthetic
ggagggcaagcgcgaggagc

SEQ ID NO: 2276 - RNA, 20 nt, Artificial Sequence
  Synthetic
gcgcgaggagccggcacaaa

SEQ ID NO: 2277 - RNA, 20 nt, Artificial Sequence
  Synthetic
ggagccggcacaaaaggcag

SEQ ID NO: 2278 - RNA, 20 nt, Artificial Sequence
  Synthetic
gagccggcacaaaaggcagc

SEQ ID NO: 2279 - RNA, 20 nt, Artificial Sequence
  Synthetic
gcgggacaaacacccaccuc

SEQ ID NO: 2280 - RNA, 20 nt, Artificial Sequence
  Synthetic
gacaaacacccaccucuggc

SEQ ID NO: 2281 - RNA, 20 nt, Artificial Sequence
  Synthetic
ccaccucuggccggaacaaa

SEQ ID NO: 2282 - RNA, 20 nt, Artificial Sequence
  Synthetic
ccucuggccggaacaaaagg

SEQ ID NO: 2283 - RNA, 20 nt, Artificial Sequence
  Synthetic
ggaacaaaaggcggcagugc

SEQ ID NO: 2284 - RNA, 20 nt, Artificial Sequence
  Synthetic
gccgcgucucccguccuucc

SEQ ID NO: 2285 - RNA, 20 nt, Artificial Sequence
  Synthetic
ucccguccuucccgguccca

SEQ ID NO: 2286 - RNA, 20 nt, Artificial Sequence
  Synthetic
cacggcucuccccgucgccg

SEQ ID NO: 2287 - RNA, 20 nt, Artificial Sequence
  Synthetic
cggccccucucccgacuccg

SEQ ID NO: 2288 - RNA, 20 nt, Artificial Sequence
  Synthetic
ucucccgacuccgcggacuc

SEQ ID NO: 2289 - RNA, 20 nt, Artificial Sequence
  Synthetic
cuccgcggacucaggagcgc

SEQ ID NO: 2290 - RNA, 20 nt, Artificial Sequence
  Synthetic
uccgcggacucaggagcgcc

SEQ ID NO: 2291 - RNA, 20 nt, Artificial Sequence
  Synthetic
ccgcggacucaggagcgccg

SEQ ID NO: 2292 - RNA, 20 nt, Artificial Sequence
  Synthetic
cgcggacucaggagcgccgg

SEQ ID NO: 2293 - RNA, 20 nt, Artificial Sequence
  Synthetic
gugccacuuucucacuauug

SEQ ID NO: 2294 - RNA, 20 nt, Artificial Sequence
  Synthetic
ugccacuuucucacuauugu

SEQ ID NO: 2295 - RNA, 20 nt, Artificial Sequence
  Synthetic
gccacuuucucacuauugug

SEQ ID NO: 2296 - RNA, 20 nt, Artificial Sequence
  Synthetic
acacuugaccgugagcgcgc

SEQ ID NO: 2297 - RNA, 20 nt, Artificial Sequence
  Synthetic
agucucaccucuuuucuccc

SEQ ID NO: 2298 - RNA, 20 nt, Artificial Sequence
  Synthetic
gucucaccucuuuucucccc

SEQ ID NO: 2299 - RNA, 20 nt, Artificial Sequence
  Synthetic
ccuacccccccauuuucuua

SEQ ID NO: 2300 - RNA, 20 nt, Artificial Sequence
  Synthetic
ccccauuuucuuacggugag

SEQ ID NO: 2301 - RNA, 20 nt, Artificial Sequence
  Synthetic
cccauuuucuuacggugagu

SEQ ID NO: 2302 - RNA, 20 nt, Artificial Sequence
  Synthetic
ccccaccagcucccaccccc

SEQ ID NO: 2303 - RNA, 20 nt, Artificial Sequence
  Synthetic
uguucauuauuuugcaaaac

SEQ ID NO: 2304 - RNA, 20 nt, Artificial Sequence
  Synthetic
ucauuauuuugcaaaacugg

SEQ ID NO: 2305 - RNA, 20 nt, Artificial Sequence
  Synthetic
cauuauuuugcaaaacuggc

SEQ ID NO: 2306 - RNA, 20 nt, Artificial Sequence
  Synthetic
auuauuuugcaaaacuggcg

SEQ ID NO: 2307 - RNA, 20 nt, Artificial Sequence
  Synthetic
auuuugcaaaacuggcgggg

SEQ ID NO: 2308 - RNA, 20 nt, Artificial Sequence
  Synthetic
uuuugcaaaacuggcggggc

SEQ ID NO: 2309 - RNA, 20 nt, Artificial Sequence
  Synthetic
uuugcaaaacuggcggggcg

SEQ ID NO: 2310 - RNA, 20 nt, Artificial Sequence
  Synthetic
uugcaaaacuggcggggcgg

SEQ ID NO: 2311 - RNA, 20 nt, Artificial Sequence
  Synthetic
ugcaaaacuggcggggcggg

SEQ ID NO: 2312 - RNA, 20 nt, Artificial Sequence
  Synthetic
gcaaaacuggcggggcgggg

SEQ ID NO: 2313 - RNA, 20 nt, Artificial Sequence
  Synthetic
caaaacuggcggggcggggg

SEQ ID NO: 2314 - RNA, 20 nt, Artificial Sequence
  Synthetic
cuggcggggcggggggggag

SEQ ID NO: 2315 - RNA, 20 nt, Artificial Sequence
  Synthetic
uuucgaaaagagaaauaaag

SEQ ID NO: 2316 - RNA, 20 nt, Artificial Sequence
  Synthetic
cgaaaagagaaauaaagcgg

SEQ ID NO: 2317 - RNA, 20 nt, Artificial Sequence
  Synthetic
agagaaauaaagcggcggaa

SEQ ID NO: 2318 - RNA, 20 nt, Artificial Sequence
  Synthetic
gaaauaaagcggcggaaagg

SEQ ID NO: 2319 - RNA, 20 nt, Artificial Sequence
  Synthetic
agcggcggaaaggaggaaag

SEQ ID NO: 2320 - RNA, 20 nt, Artificial Sequence
  Synthetic
ggcggaaaggaggaaagagg

SEQ ID NO: 2321 - RNA, 20 nt, Artificial Sequence
  Synthetic
uaaaauuaaauaaaauuaaa

SEQ ID NO: 2322 - RNA, 20 nt, Artificial Sequence
  Synthetic
cugucucaaaagugcauaca

SEQ ID NO: 2323 - RNA, 20 nt, Artificial Sequence
  Synthetic
caaaagugcauacacggcaa

SEQ ID NO: 2324 - RNA, 20 nt, Artificial Sequence
  Synthetic
uacacggcaaugguuccaga

SEQ ID NO: 2325 - RNA, 20 nt, Artificial Sequence
  Synthetic
acacggcaaugguuccagau

SEQ ID NO: 2326 - RNA, 20 nt, Artificial Sequence
  Synthetic
caaugguuccagaugggaug

SEQ ID NO: 2327 - RNA, 20 nt, Artificial Sequence
  Synthetic
aaugguuccagaugggauga

SEQ ID NO: 2328 - RNA, 20 nt, Artificial Sequence
  Synthetic
aucucuuuuaccucgacucu

SEQ ID NO: 2329 - RNA, 20 nt, Artificial Sequence
  Synthetic
ucuuuuaccucgacucucgg

SEQ ID NO: 2330 - RNA, 20 nt, Artificial Sequence
  Synthetic
auaauuauuauuacuauuau

SEQ ID NO: 2331 - RNA, 20 nt, Artificial Sequence
  Synthetic
uaauuauuauuacuauuauu

SEQ ID NO: 2332 - RNA, 20 nt, Artificial Sequence
  Synthetic
uaauaaucacgagagcgcgc

SEQ ID NO: 2333 - RNA, 20 nt, Artificial Sequence
  Synthetic
caggacuagaagcaaaagcg

SEQ ID NO: 2334 - RNA, 20 nt, Artificial Sequence
  Synthetic
aggacuagaagcaaaagcga

SEQ ID NO: 2335 - RNA, 20 nt, Artificial Sequence
  Synthetic
ggacuagaagcaaaagcgag

SEQ ID NO: 2336 - RNA, 20 nt, Artificial Sequence
  Synthetic
gacuagaagcaaaagcgagg

SEQ ID NO: 2337 - RNA, 20 nt, Artificial Sequence
  Synthetic
agcaaaagcgagggggagag

SEQ ID NO: 2338 - RNA, 20 nt, Artificial Sequence
  Synthetic
gcaaaagcgagggggagaga

SEQ ID NO: 2339 - RNA, 20 nt, Artificial Sequence
  Synthetic
caaaagcgagggggagagag

SEQ ID NO: 2340 - RNA, 20 nt, Artificial Sequence
  Synthetic
agaaaaaccuccgagagucg

SEQ ID NO: 2341 - RNA, 20 nt, Artificial Sequence
  Synthetic
agucgagguaaaagagauaa

SEQ ID NO: 2342 - RNA, 20 nt, Artificial Sequence
  Synthetic
gucgagguaaaagagauaaa

SEQ ID NO: 2343 - RNA, 20 nt, Artificial Sequence
  Synthetic
ucgagguaaaagagauaaag

SEQ ID NO: 2344 - RNA, 20 nt, Artificial Sequence
  Synthetic
cgagguaaaagagauaaagg

SEQ ID NO: 2345 - RNA, 20 nt, Artificial Sequence
  Synthetic
gaaaaaacccucaucccauc

SEQ ID NO: 2346 - RNA, 20 nt, Artificial Sequence
  Synthetic
cuuuauuucucuuuucgaaa

SEQ ID NO: 2347 - RNA, 20 nt, Artificial Sequence
  Synthetic
caaaauaaugaacaaugcua

SEQ ID NO: 2348 - RNA, 20 nt, Artificial Sequence
  Synthetic
gaacaacucacaugcaaacc

SEQ ID NO: 2349 - RNA, 20 nt, Artificial Sequence
  Synthetic
aacaacucacaugcaaaccu

SEQ ID NO: 2350 - RNA, 20 nt, Artificial Sequence
  Synthetic
acaacucacaugcaaaccug

SEQ ID NO: 2351 - RNA, 20 nt, Artificial Sequence
  Synthetic
caacucacaugcaaaccugg

SEQ ID NO: 2352 - RNA, 20 nt, Artificial Sequence
  Synthetic
cucacaugcaaaccuggggg

SEQ ID NO: 2353 - RNA, 20 nt, Artificial Sequence
  Synthetic
ucacaugcaaaccugggggu

SEQ ID NO: 2354 - RNA, 20 nt, Artificial Sequence
  Synthetic
gcaaaccugggggugggagc

SEQ ID NO: 2355 - RNA, 20 nt, Artificial Sequence
  Synthetic
aaccugggggugggagcugg

SEQ ID NO: 2356 - RNA, 20 nt, Artificial Sequence
  Synthetic
accugggggugggagcuggu

SEQ ID NO: 2357 - RNA, 20 nt, Artificial Sequence
  Synthetic
ccugggggugggagcuggug

SEQ ID NO: 2358 - RNA, 20 nt, Artificial Sequence
  Synthetic
gggugggagcugguggggaa

SEQ ID NO: 2359 - RNA, 20 nt, Artificial Sequence
  Synthetic
ggugggagcugguggggaaa

SEQ ID NO: 2360 - RNA, 20 nt, Artificial Sequence
  Synthetic
gggagcugguggggaaaggg

SEQ ID NO: 2361 - RNA, 20 nt, Artificial Sequence
  Synthetic
ucccacucaccguaagaaaa

SEQ ID NO: 2362 - RNA, 20 nt, Artificial Sequence
  Synthetic
cccacucaccguaagaaaau

SEQ ID NO: 2363 - RNA, 20 nt, Artificial Sequence
  Synthetic
ccacucaccguaagaaaaug

SEQ ID NO: 2364 - RNA, 20 nt, Artificial Sequence
  Synthetic
cacucaccguaagaaaaugg

SEQ ID NO: 2365 - RNA, 20 nt, Artificial Sequence
  Synthetic
acucaccguaagaaaauggg

SEQ ID NO: 2366 - RNA, 20 nt, Artificial Sequence
  Synthetic
cucaccguaagaaaaugggg

SEQ ID NO: 2367 - RNA, 20 nt, Artificial Sequence
  Synthetic
ccguaagaaaaugggggggu

SEQ ID NO: 2368 - RNA, 20 nt, Artificial Sequence
  Synthetic
cguaagaaaaugggggggua

SEQ ID NO: 2369 - RNA, 20 nt, Artificial Sequence
  Synthetic
aagaaaauggggggguaggg

SEQ ID NO: 2370 - RNA, 20 nt, Artificial Sequence
  Synthetic
agaaaauggggggguaggga

SEQ ID NO: 2371 - RNA, 20 nt, Artificial Sequence
  Synthetic
caagucuaaaaaacgauucc

SEQ ID NO: 2372 - RNA, 20 nt, Artificial Sequence
  Synthetic
aagucuaaaaaacgauuccc

SEQ ID NO: 2373 - RNA, 20 nt, Artificial Sequence
  Synthetic
agucuaaaaaacgauucccg

SEQ ID NO: 2374 - RNA, 20 nt, Artificial Sequence
  Synthetic
acgauucccggggagaaaag

SEQ ID NO: 2375 - RNA, 20 nt, Artificial Sequence
  Synthetic
ggggagaaaagaggugagac

SEQ ID NO: 2376 - RNA, 20 nt, Artificial Sequence
  Synthetic
aaagaggugagacuggcuuu

SEQ ID NO: 2377 - RNA, 20 nt, Artificial Sequence
  Synthetic
uuuggacaccagcgcgcuca

SEQ ID NO: 2378 - RNA, 20 nt, Artificial Sequence
  Synthetic
gcucacggucaagugugcag

SEQ ID NO: 2379 - RNA, 20 nt, Artificial Sequence
  Synthetic
cucacggucaagugugcagc

SEQ ID NO: 2380 - RNA, 20 nt, Artificial Sequence
  Synthetic
acggucaagugugcagcggg

SEQ ID NO: 2381 - RNA, 20 nt, Artificial Sequence
  Synthetic
uccccacaauagugagaaag

SEQ ID NO: 2382 - RNA, 20 nt, Artificial Sequence
  Synthetic
auagugagaaaguggcacug

SEQ ID NO: 2383 - RNA, 20 nt, Artificial Sequence
  Synthetic
gagaaaguggcacuguggaa

SEQ ID NO: 2384 - RNA, 20 nt, Artificial Sequence
  Synthetic
agaaaguggcacuguggaaa

SEQ ID NO: 2385 - RNA, 20 nt, Artificial Sequence
  Synthetic
gaaaguggcacuguggaaag

SEQ ID NO: 2386 - RNA, 20 nt, Artificial Sequence
  Synthetic
gcacuguggaaaggggcccc

SEQ ID NO: 2387 - RNA, 20 nt, Artificial Sequence
  Synthetic
ccccggcgcuccugaguccg

SEQ ID NO: 2388 - RNA, 20 nt, Artificial Sequence
  Synthetic
cgcuccugaguccgcggagu

SEQ ID NO: 2389 - RNA, 20 nt, Artificial Sequence
  Synthetic
gcuccugaguccgcggaguc

SEQ ID NO: 2390 - RNA, 20 nt, Artificial Sequence
  Synthetic
ugaguccgcggagucgggag

SEQ ID NO: 2391 - RNA, 20 nt, Artificial Sequence
  Synthetic
gaguccgcggagucgggaga

SEQ ID NO: 2392 - RNA, 20 nt, Artificial Sequence
  Synthetic
aguccgcggagucgggagag

SEQ ID NO: 2393 - RNA, 20 nt, Artificial Sequence
  Synthetic
cggagucgggagaggggccg

SEQ ID NO: 2394 - RNA, 20 nt, Artificial Sequence
  Synthetic
cgggagaggggccgcggcga

SEQ ID NO: 2395 - RNA, 20 nt, Artificial Sequence
  Synthetic
gggagaggggccgcggcgac

SEQ ID NO: 2396 - RNA, 20 nt, Artificial Sequence
  Synthetic
ggagaggggccgcggcgacg

SEQ ID NO: 2397 - RNA, 20 nt, Artificial Sequence
  Synthetic
cgcggcgacggggagagccg

SEQ ID NO: 2398 - RNA, 20 nt, Artificial Sequence
  Synthetic
gcggcgacggggagagccgu

SEQ ID NO: 2399 - RNA, 20 nt, Artificial Sequence
  Synthetic
gacggggagagccgugggac

SEQ ID NO: 2400 - RNA, 20 nt, Artificial Sequence
  Synthetic
acggggagagccgugggacc

SEQ ID NO: 2401 - RNA, 20 nt, Artificial Sequence
  Synthetic
ggagagccgugggaccggga

SEQ ID NO: 2402 - RNA, 20 nt, Artificial Sequence
  Synthetic
agccgugggaccgggaagga

SEQ ID NO: 2403 - RNA, 20 nt, Artificial Sequence
  Synthetic
gccgugggaccgggaaggac

SEQ ID NO: 2404 - RNA, 20 nt, Artificial Sequence
  Synthetic
accgggaaggacgggagacg

SEQ ID NO: 2405 - RNA, 20 nt, Artificial Sequence
  Synthetic
ggaaggacgggagacgcggc

SEQ ID NO: 2406 - RNA, 20 nt, Artificial Sequence
  Synthetic
ggcacugccgccuuuuguuc

SEQ ID NO: 2407 - RNA, 20 nt, Artificial Sequence
  Synthetic
ccgccuuuuguuccggccag

SEQ ID NO: 2408 - RNA, 20 nt, Artificial Sequence
  Synthetic
ccuuuuguuccggccagagg

SEQ ID NO: 2409 - RNA, 20 nt, Artificial Sequence
  Synthetic
cuuuuguuccggccagaggu

SEQ ID NO: 2410 - RNA, 20 nt, Artificial Sequence
  Synthetic
ugucccgcugccuuuugugc

SEQ ID NO: 2411 - RNA, 20 nt, Artificial Sequence
  Synthetic
gccgccgccgccgccgccga

SEQ ID NO: 2412 - RNA, 20 nt, Artificial Sequence
  Synthetic
ccgccgccgccgccgccgaa

SEQ ID NO: 2413 - RNA, 20 nt, Artificial Sequence
  Synthetic
cgccgccgccgccgaagggc

SEQ ID NO: 2414 - RNA, 20 nt, Artificial Sequence
  Synthetic
gccgccgaagggcaggagcu

SEQ ID NO: 2415 - RNA, 20 nt, Artificial Sequence
  Synthetic
ccgccgaagggcaggagcua

SEQ ID NO: 2416 - RNA, 20 nt, Artificial Sequence
  Synthetic
cgaagggcaggagcuagggc

SEQ ID NO: 2417 - RNA, 20 nt, Artificial Sequence
  Synthetic
gaagggcaggagcuagggcc

SEQ ID NO: 2418 - RNA, 20 nt, Artificial Sequence
  Synthetic
aagggcaggagcuagggccg

SEQ ID NO: 2419 - RNA, 20 nt, Artificial Sequence
  Synthetic
agggcaggagcuagggccgg

SEQ ID NO: 2420 - RNA, 20 nt, Artificial Sequence
  Synthetic
gcaggagcuagggccggggg

SEQ ID NO: 2421 - RNA, 20 nt, Artificial Sequence
  Synthetic
ggagcuagggccgggggagg

SEQ ID NO: 2422 - RNA, 20 nt, Artificial Sequence
  Synthetic
gcuagggccgggggaggagg

SEQ ID NO: 2423 - RNA, 20 nt, Artificial Sequence
  Synthetic
gggccgggggaggaggcggc

SEQ ID NO: 2424 - RNA, 20 nt, Artificial Sequence
  Synthetic
ggccgggggaggaggcggcc

SEQ ID NO: 2425 - RNA, 20 nt, Artificial Sequence
  Synthetic
gccgggggaggaggcggccg

SEQ ID NO: 2426 - RNA, 20 nt, Artificial Sequence
  Synthetic
ccgggggaggaggcggccgg

SEQ ID NO: 2427 - RNA, 20 nt, Artificial Sequence
  Synthetic
aggaggcggccgggggcacg

SEQ ID NO: 2428 - RNA, 20 nt, Artificial Sequence
  Synthetic
ggaggcggccgggggcacgc

SEQ ID NO: 2429 - RNA, 20 nt, Artificial Sequence
  Synthetic
cggccgggggcacgcgggag

SEQ ID NO: 2430 - RNA, 20 nt, Artificial Sequence
  Synthetic
ggccgggggcacgcgggaga

SEQ ID NO: 2431 - RNA, 20 nt, Artificial Sequence
  Synthetic
cgggggcacgcgggagaggg

SEQ ID NO: 2432 - RNA, 20 nt, Artificial Sequence
  Synthetic
gggggcacgcgggagaggga

SEQ ID NO: 2433 - RNA, 20 nt, Artificial Sequence
  Synthetic
ggcacgcgggagagggaggg

SEQ ID NO: 2434 - RNA, 20 nt, Artificial Sequence
  Synthetic
gcacgcgggagagggaggga

SEQ ID NO: 2435 - RNA, 20 nt, Artificial Sequence
  Synthetic
ggagagggagggagggagcc

SEQ ID NO: 2436 - RNA, 20 nt, Artificial Sequence
  Synthetic
gagcccggacugcugccucc

SEQ ID NO: 2437 - RNA, 20 nt, Artificial Sequence
  Synthetic
agcccggacugcugccuccu

SEQ ID NO: 2438 - RNA, 20 nt, Artificial Sequence
  Synthetic
cccucccgaccgaaccucag

SEQ ID NO: 2439 - RNA, 20 nt, Artificial Sequence
  Synthetic
accgaaccucagaggcagca

SEQ ID NO: 2440 - RNA, 20 nt, Artificial Sequence
  Synthetic
agaggcagcaaggagaagac

SEQ ID NO: 2441 - RNA, 20 nt, Artificial Sequence
  Synthetic
aaaauaaaauaaauaaaaca

SEQ ID NO: 2442 - RNA, 17 nt, Artificial Sequence
  Synthetic
ucuccuugcugccucug

SEQ ID NO: 2443 - RNA, 17 nt, Artificial Sequence
  Synthetic
uugcugccucugagguu

SEQ ID NO: 2444 - RNA, 17 nt, Artificial Sequence
  Synthetic
ugccucugagguucggu

SEQ ID NO: 2445 - RNA, 17 nt, Artificial Sequence
  Synthetic
gccucugagguucgguc

SEQ ID NO: 2446 - RNA, 17 nt, Artificial Sequence
  Synthetic
ucugagguucggucggg

SEQ ID NO: 2447 - RNA, 17 nt, Artificial Sequence
  Synthetic
cugagguucggucggga

SEQ ID NO: 2448 - RNA, 17 nt, Artificial Sequence
  Synthetic
ugagguucggucgggag

SEQ ID NO: 2449 - RNA, 17 nt, Artificial Sequence
  Synthetic
gguucggucgggagggg

SEQ ID NO: 2450 - RNA, 17 nt, Artificial Sequence
  Synthetic
guucggucgggagggga

SEQ ID NO: 2451 - RNA, 17 nt, Artificial Sequence
  Synthetic
ucgggaggggagggcag

SEQ ID NO: 2452 - RNA, 17 nt, Artificial Sequence
  Synthetic
gagggcagcggcaaccc

SEQ ID NO: 2453 - RNA, 17 nt, Artificial Sequence
  Synthetic
ggcagcggcaacccagg

SEQ ID NO: 2454 - RNA, 17 nt, Artificial Sequence
  Synthetic
cccaggaggcagcaguc

SEQ ID NO: 2455 - RNA, 17 nt, Artificial Sequence
  Synthetic
ccaggaggcagcagucc

SEQ ID NO: 2456 - RNA, 17 nt, Artificial Sequence
  Synthetic
ccucucccgcgugcccc

SEQ ID NO: 2457 - RNA, 17 nt, Artificial Sequence
  Synthetic
ccggccgccuccucccc

SEQ ID NO: 2458 - RNA, 17 nt, Artificial Sequence
  Synthetic
cccuagcuccugcccuu

SEQ ID NO: 2459 - RNA, 17 nt, Artificial Sequence
  Synthetic
uagcuccugcccuucgg

SEQ ID NO: 2460 - RNA, 17 nt, Artificial Sequence
  Synthetic
cuccugcccuucggcgg

SEQ ID NO: 2461 - RNA, 17 nt, Artificial Sequence
  Synthetic
cugcccuucggcggcgg

SEQ ID NO: 2462 - RNA, 17 nt, Artificial Sequence
  Synthetic
cccuucggcggcggcgg

SEQ ID NO: 2463 - RNA, 17 nt, Artificial Sequence
  Synthetic
uucggcggcggcggcgg

SEQ ID NO: 2464 - RNA, 17 nt, Artificial Sequence
  Synthetic
ggcggcggcggcggcgg

SEQ ID NO: 2465 - RNA, 17 nt, Artificial Sequence
  Synthetic
cggcggcggcggcggcg

SEQ ID NO: 2466 - RNA, 17 nt, Artificial Sequence
  Synthetic
ggcggcggcggcggcgc

SEQ ID NO: 2467 - RNA, 17 nt, Artificial Sequence
  Synthetic
ggcggcggcggcgcggg

SEQ ID NO: 2468 - RNA, 17 nt, Artificial Sequence
  Synthetic
gcggcggcggcgcggga

SEQ ID NO: 2469 - RNA, 17 nt, Artificial Sequence
  Synthetic
gcgggagggcaagcgcg

SEQ ID NO: 2470 - RNA, 17 nt, Artificial Sequence
  Synthetic
gggcaagcgcgaggagc

SEQ ID NO: 2471 - RNA, 17 nt, Artificial Sequence
  Synthetic
cgaggagccggcacaaa

SEQ ID NO: 2472 - RNA, 17 nt, Artificial Sequence
  Synthetic
gccggcacaaaaggcag

SEQ ID NO: 2473 - RNA, 17 nt, Artificial Sequence
  Synthetic
ccggcacaaaaggcagc

SEQ ID NO: 2474 - RNA, 17 nt, Artificial Sequence
  Synthetic
ggacaaacacccaccuc

SEQ ID NO: 2475 - RNA, 17 nt, Artificial Sequence
  Synthetic
aaacacccaccucuggc

SEQ ID NO: 2476 - RNA, 17 nt, Artificial Sequence
  Synthetic
ccucuggccggaacaaa

SEQ ID NO: 2477 - RNA, 17 nt, Artificial Sequence
  Synthetic
cuggccggaacaaaagg

SEQ ID NO: 2478 - RNA, 17 nt, Artificial Sequence
  Synthetic
acaaaaggcggcagugc

SEQ ID NO: 2479 - RNA, 17 nt, Artificial Sequence
  Synthetic
gcgucucccguccuucc

SEQ ID NO: 2480 - RNA, 17 nt, Artificial Sequence
  Synthetic
cguccuucccgguccca

SEQ ID NO: 2481 - RNA, 17 nt, Artificial Sequence
  Synthetic
ggcucuccccgucgccg

SEQ ID NO: 2482 - RNA, 17 nt, Artificial Sequence
  Synthetic
ccccucucccgacuccg

SEQ ID NO: 2483 - RNA, 17 nt, Artificial Sequence
  Synthetic
cccgacuccgcggacuc

SEQ ID NO: 2484 - RNA, 17 nt, Artificial Sequence
  Synthetic
cgcggacucaggagcgc

SEQ ID NO: 2485 - RNA, 17 nt, Artificial Sequence
  Synthetic
gcggacucaggagcgcc

SEQ ID NO: 2486 - RNA, 17 nt, Artificial Sequence
  Synthetic
cggacucaggagcgccg

SEQ ID NO: 2487 - RNA, 17 nt, Artificial Sequence
  Synthetic
ggacucaggagcgccgg

SEQ ID NO: 2488 - RNA, 17 nt, Artificial Sequence
  Synthetic
ccacuuucucacuauug

SEQ ID NO: 2489 - RNA, 17 nt, Artificial Sequence
  Synthetic
cacuuucucacuauugu

SEQ ID NO: 2490 - RNA, 17 nt, Artificial Sequence
  Synthetic
acuuucucacuauugug

SEQ ID NO: 2491 - RNA, 17 nt, Artificial Sequence
  Synthetic
cuugaccgugagcgcgc

SEQ ID NO: 2492 - RNA, 17 nt, Artificial Sequence
  Synthetic
cucaccucuuuucuccc

SEQ ID NO: 2493 - RNA, 17 nt, Artificial Sequence
  Synthetic
ucaccucuuuucucccc

SEQ ID NO: 2494 - RNA, 17 nt, Artificial Sequence
  Synthetic
acccccccauuuucuua

SEQ ID NO: 2495 - RNA, 17 nt, Artificial Sequence
  Synthetic
cauuuucuuacggugag

SEQ ID NO: 2496 - RNA, 17 nt, Artificial Sequence
  Synthetic
auuuucuuacggugagu

SEQ ID NO: 2497 - RNA, 17 nt, Artificial Sequence
  Synthetic
caccagcucccaccccc

SEQ ID NO: 2498 - RNA, 17 nt, Artificial Sequence
  Synthetic
ucauuauuuugcaaaac

SEQ ID NO: 2499 - RNA, 17 nt, Artificial Sequence
  Synthetic
uuauuuugcaaaacugg

SEQ ID NO: 2500 - RNA, 17 nt, Artificial Sequence
  Synthetic
uauuuugcaaaacuggc

SEQ ID NO: 2501 - RNA, 17 nt, Artificial Sequence
  Synthetic
auuuugcaaaacuggcg

SEQ ID NO: 2502 - RNA, 17 nt, Artificial Sequence
  Synthetic
uugcaaaacuggcgggg

SEQ ID NO: 2503 - RNA, 17 nt, Artificial Sequence
  Synthetic
ugcaaaacuggcggggc

SEQ ID NO: 2504 - RNA, 17 nt, Artificial Sequence
  Synthetic
gcaaaacuggcggggcg

SEQ ID NO: 2505 - RNA, 17 nt, Artificial Sequence
  Synthetic
caaaacuggcggggcgg

SEQ ID NO: 2506 - RNA, 17 nt, Artificial Sequence
  Synthetic
aaaacuggcggggcggg

SEQ ID NO: 2507 - RNA, 17 nt, Artificial Sequence
  Synthetic
aaacuggcggggcgggg

SEQ ID NO: 2508 - RNA, 17 nt, Artificial Sequence
  Synthetic
aacuggcggggcggggg

SEQ ID NO: 2509 - RNA, 17 nt, Artificial Sequence
  Synthetic
gcggggcggggggggag

SEQ ID NO: 2510 - RNA, 17 nt, Artificial Sequence
  Synthetic
cgaaaagagaaauaaag

SEQ ID NO: 2511 - RNA, 17 nt, Artificial Sequence
  Synthetic
aaagagaaauaaagcgg

SEQ ID NO: 2512 - RNA, 17 nt, Artificial Sequence
  Synthetic
gaaauaaagcggcggaa

SEQ ID NO: 2513 - RNA, 17 nt, Artificial Sequence
  Synthetic
auaaagcggcggaaagg

SEQ ID NO: 2514 - RNA, 17 nt, Artificial Sequence
  Synthetic
ggcggaaaggaggaaag

SEQ ID NO: 2515 - RNA, 17 nt, Artificial Sequence
  Synthetic
ggaaaggaggaaagagg

SEQ ID NO: 2516 - RNA, 17 nt, Artificial Sequence
  Synthetic
aauuaaauaaaauuaaa

SEQ ID NO: 2517 - RNA, 17 nt, Artificial Sequence
  Synthetic
ucucaaaagugcauaca

SEQ ID NO: 2518 - RNA, 17 nt, Artificial Sequence
  Synthetic
aagugcauacacggcaa

SEQ ID NO: 2519 - RNA, 17 nt, Artificial Sequence
  Synthetic
acggcaaugguuccaga

SEQ ID NO: 2520 - RNA, 17 nt, Artificial Sequence
  Synthetic
cggcaaugguuccagau

SEQ ID NO: 2521 - RNA, 17 nt, Artificial Sequence
  Synthetic
ugguuccagaugggaug

SEQ ID NO: 2522 - RNA, 17 nt, Artificial Sequence
  Synthetic
gguuccagaugggauga

SEQ ID NO: 2523 - RNA, 17 nt, Artificial Sequence
  Synthetic
ucuuuuaccucgacucu

SEQ ID NO: 2524 - RNA, 17 nt, Artificial Sequence
  Synthetic
uuuaccucgacucucgg

SEQ ID NO: 2525 - RNA, 17 nt, Artificial Sequence
  Synthetic
auuauuauuacuauuau

SEQ ID NO: 2526 - RNA, 17 nt, Artificial Sequence
  Synthetic
uuauuauuacuauuauu

SEQ ID NO: 2527 - RNA, 17 nt, Artificial Sequence
  Synthetic
uaaucacgagagcgcgc

SEQ ID NO: 2528 - RNA, 17 nt, Artificial Sequence
  Synthetic
gacuagaagcaaaagcg

SEQ ID NO: 2529 - RNA, 17 nt, Artificial Sequence
  Synthetic
acuagaagcaaaagcga

SEQ ID NO: 2530 - RNA, 17 nt, Artificial Sequence
  Synthetic
cuagaagcaaaagcgag

SEQ ID NO: 2531 - RNA, 17 nt, Artificial Sequence
  Synthetic
uagaagcaaaagcgagg

SEQ ID NO: 2532 - RNA, 17 nt, Artificial Sequence
  Synthetic
aaaagcgagggggagag

SEQ ID NO: 2533 - RNA, 17 nt, Artificial Sequence
  Synthetic
aaagcgagggggagaga

SEQ ID NO: 2534 - RNA, 17 nt, Artificial Sequence
  Synthetic
aagcgagggggagagag

SEQ ID NO: 2535 - RNA, 17 nt, Artificial Sequence
  Synthetic
aaaaccuccgagagucg

SEQ ID NO: 2536 - RNA, 17 nt, Artificial Sequence
  Synthetic
cgagguaaaagagauaa

SEQ ID NO: 2537 - RNA, 17 nt, Artificial Sequence
  Synthetic
gagguaaaagagauaaa

SEQ ID NO: 2538 - RNA, 17 nt, Artificial Sequence
  Synthetic
agguaaaagagauaaag

SEQ ID NO: 2539 - RNA, 17 nt, Artificial Sequence
  Synthetic
gguaaaagagauaaagg

SEQ ID NO: 2540 - RNA, 17 nt, Artificial Sequence
  Synthetic
aaaacccucaucccauc

SEQ ID NO: 2541 - RNA, 17 nt, Artificial Sequence
  Synthetic
uauuucucuuuucgaaa

SEQ ID NO: 2542 - RNA, 17 nt, Artificial Sequence
  Synthetic
aauaaugaacaaugcua

SEQ ID NO: 2543 - RNA, 17 nt, Artificial Sequence
  Synthetic
caacucacaugcaaacc

SEQ ID NO: 2544 - RNA, 17 nt, Artificial Sequence
  Synthetic
aacucacaugcaaaccu

SEQ ID NO: 2545 - RNA, 17 nt, Artificial Sequence
  Synthetic
acucacaugcaaaccug

SEQ ID NO: 2546 - RNA, 17 nt, Artificial Sequence
  Synthetic
cucacaugcaaaccugg

SEQ ID NO: 2547 - RNA, 17 nt, Artificial Sequence
  Synthetic
acaugcaaaccuggggg

SEQ ID NO: 2548 - RNA, 17 nt, Artificial Sequence
  Synthetic
caugcaaaccugggggu

SEQ ID NO: 2549 - RNA, 17 nt, Artificial Sequence
  Synthetic
aaccugggggugggagc

SEQ ID NO: 2550 - RNA, 17 nt, Artificial Sequence
  Synthetic
cugggggugggagcugg

SEQ ID NO: 2551 - RNA, 17 nt, Artificial Sequence
  Synthetic
ugggggugggagcuggu

SEQ ID NO: 2552 - RNA, 17 nt, Artificial Sequence
  Synthetic
gggggugggagcuggug

SEQ ID NO: 2553 - RNA, 17 nt, Artificial Sequence
  Synthetic
ugggagcugguggggaa

SEQ ID NO: 2554 - RNA, 17 nt, Artificial Sequence
  Synthetic
gggagcugguggggaaa

SEQ ID NO: 2555 - RNA, 17 nt, Artificial Sequence
  Synthetic
agcugguggggaaaggg

SEQ ID NO: 2556 - RNA, 17 nt, Artificial Sequence
  Synthetic
cacucaccguaagaaaa

SEQ ID NO: 2557 - RNA, 17 nt, Artificial Sequence
  Synthetic
acucaccguaagaaaau

SEQ ID NO: 2558 - RNA, 17 nt, Artificial Sequence
  Synthetic
cucaccguaagaaaaug

SEQ ID NO: 2559 - RNA, 17 nt, Artificial Sequence
  Synthetic
ucaccguaagaaaaugg

SEQ ID NO: 2560 - RNA, 17 nt, Artificial Sequence
  Synthetic
caccguaagaaaauggg

SEQ ID NO: 2561 - RNA, 17 nt, Artificial Sequence
  Synthetic
accguaagaaaaugggg

SEQ ID NO: 2562 - RNA, 17 nt, Artificial Sequence
  Synthetic
uaagaaaaugggggggu

SEQ ID NO: 2563 - RNA, 17 nt, Artificial Sequence
  Synthetic
aagaaaaugggggggua

SEQ ID NO: 2564 - RNA, 17 nt, Artificial Sequence
  Synthetic
aaaauggggggguaggg

SEQ ID NO: 2565 - RNA, 17 nt, Artificial Sequence
  Synthetic
aaauggggggguaggga

SEQ ID NO: 2566 - RNA, 17 nt, Artificial Sequence
  Synthetic
gucuaaaaaacgauucc

SEQ ID NO: 2567 - RNA, 17 nt, Artificial Sequence
  Synthetic
ucuaaaaaacgauuccc

SEQ ID NO: 2568 - RNA, 17 nt, Artificial Sequence
  Synthetic
cuaaaaaacgauucccg

SEQ ID NO: 2569 - RNA, 17 nt, Artificial Sequence
  Synthetic
auucccggggagaaaag

SEQ ID NO: 2570 - RNA, 17 nt, Artificial Sequence
  Synthetic
gagaaaagaggugagac

SEQ ID NO: 2571 - RNA, 17 nt, Artificial Sequence
  Synthetic
gaggugagacuggcuuu

SEQ ID NO: 2572 - RNA, 17 nt, Artificial Sequence
  Synthetic
ggacaccagcgcgcuca

SEQ ID NO: 2573 - RNA, 17 nt, Artificial Sequence
  Synthetic
cacggucaagugugcag

SEQ ID NO: 2574 - RNA, 17 nt, Artificial Sequence
  Synthetic
acggucaagugugcagc

SEQ ID NO: 2575 - RNA, 17 nt, Artificial Sequence
  Synthetic
gucaagugugcagcggg

SEQ ID NO: 2576 - RNA, 17 nt, Artificial Sequence
  Synthetic
ccacaauagugagaaag

SEQ ID NO: 2577 - RNA, 17 nt, Artificial Sequence
  Synthetic
gugagaaaguggcacug

SEQ ID NO: 2578 - RNA, 17 nt, Artificial Sequence
  Synthetic
aaaguggcacuguggaa

SEQ ID NO: 2579 - RNA, 17 nt, Artificial Sequence
  Synthetic
aaguggcacuguggaaa

SEQ ID NO: 2580 - RNA, 17 nt, Artificial Sequence
  Synthetic
aguggcacuguggaaag

SEQ ID NO: 2581 - RNA, 17 nt, Artificial Sequence
  Synthetic
cuguggaaaggggcccc

SEQ ID NO: 2582 - RNA, 17 nt, Artificial Sequence
  Synthetic
cggcgcuccugaguccg

SEQ ID NO: 2583 - RNA, 17 nt, Artificial Sequence
  Synthetic
uccugaguccgcggagu

SEQ ID NO: 2584 - RNA, 17 nt, Artificial Sequence
  Synthetic
ccugaguccgcggaguc

SEQ ID NO: 2585 - RNA, 17 nt, Artificial Sequence
  Synthetic
guccgcggagucgggag

SEQ ID NO: 2586 - RNA, 17 nt, Artificial Sequence
  Synthetic
uccgcggagucgggaga

SEQ ID NO: 2587 - RNA, 17 nt, Artificial Sequence
  Synthetic
ccgcggagucgggagag

SEQ ID NO: 2588 - RNA, 17 nt, Artificial Sequence
  Synthetic
agucgggagaggggccg

SEQ ID NO: 2589 - RNA, 17 nt, Artificial Sequence
  Synthetic
gagaggggccgcggcga

SEQ ID NO: 2590 - RNA, 17 nt, Artificial Sequence
  Synthetic
agaggggccgcggcgac

SEQ ID NO: 2591 - RNA, 17 nt, Artificial Sequence
  Synthetic
gaggggccgcggcgacg

SEQ ID NO: 2592 - RNA, 17 nt, Artificial Sequence
  Synthetic
ggcgacggggagagccg

SEQ ID NO: 2593 - RNA, 17 nt, Artificial Sequence
  Synthetic
gcgacggggagagccgu

SEQ ID NO: 2594 - RNA, 17 nt, Artificial Sequence
  Synthetic
ggggagagccgugggac

SEQ ID NO: 2595 - RNA, 17 nt, Artificial Sequence
  Synthetic
gggagagccgugggacc

SEQ ID NO: 2596 - RNA, 17 nt, Artificial Sequence
  Synthetic
gagccgugggaccggga

SEQ ID NO: 2597 - RNA, 17 nt, Artificial Sequence
  Synthetic
cgugggaccgggaagga

SEQ ID NO: 2598 - RNA, 17 nt, Artificial Sequence
  Synthetic
gugggaccgggaaggac

SEQ ID NO: 2599 - RNA, 17 nt, Artificial Sequence
  Synthetic
gggaaggacgggagacg

SEQ ID NO: 2600 - RNA, 17 nt, Artificial Sequence
  Synthetic
aggacgggagacgcggc

SEQ ID NO: 2601 - RNA, 17 nt, Artificial Sequence
  Synthetic
acugccgccuuuuguuc

SEQ ID NO: 2602 - RNA, 17 nt, Artificial Sequence
  Synthetic
ccuuuuguuccggccag

SEQ ID NO: 2603 - RNA, 17 nt, Artificial Sequence
  Synthetic
uuuguuccggccagagg

SEQ ID NO: 2604 - RNA, 17 nt, Artificial Sequence
  Synthetic
uuguuccggccagaggu

SEQ ID NO: 2605 - RNA, 17 nt, Artificial Sequence
  Synthetic
cccgcugccuuuugugc

SEQ ID NO: 2606 - RNA, 17 nt, Artificial Sequence
  Synthetic
gccgccgccgccgccga

SEQ ID NO: 2607 - RNA, 17 nt, Artificial Sequence
  Synthetic
ccgccgccgccgccgaa

SEQ ID NO: 2608 - RNA, 17 nt, Artificial Sequence
  Synthetic
cgccgccgccgaagggc

SEQ ID NO: 2609 - RNA, 17 nt, Artificial Sequence
  Synthetic
gccgaagggcaggagcu

SEQ ID NO: 2610 - RNA, 17 nt, Artificial Sequence
  Synthetic
ccgaagggcaggagcua

SEQ ID NO: 2611 - RNA, 17 nt, Artificial Sequence
  Synthetic
agggcaggagcuagggc

SEQ ID NO: 2612 - RNA, 17 nt, Artificial Sequence
  Synthetic
gggcaggagcuagggcc

SEQ ID NO: 2613 - RNA, 17 nt, Artificial Sequence
  Synthetic
ggcaggagcuagggccg

SEQ ID NO: 2614 - RNA, 17 nt, Artificial Sequence
  Synthetic
gcaggagcuagggccgg

SEQ ID NO: 2615 - RNA, 17 nt, Artificial Sequence
  Synthetic
ggagcuagggccggggg

SEQ ID NO: 2616 - RNA, 17 nt, Artificial Sequence
  Synthetic
gcuagggccgggggagg

SEQ ID NO: 2617 - RNA, 17 nt, Artificial Sequence
  Synthetic
agggccgggggaggagg

SEQ ID NO: 2618 - RNA, 17 nt, Artificial Sequence
  Synthetic
ccgggggaggaggcggc

SEQ ID NO: 2619 - RNA, 17 nt, Artificial Sequence
  Synthetic
cgggggaggaggcggcc

SEQ ID NO: 2620 - RNA, 17 nt, Artificial Sequence
  Synthetic
gggggaggaggcggccg

SEQ ID NO: 2621 - RNA, 17 nt, Artificial Sequence
  Synthetic
ggggaggaggcggccgg

SEQ ID NO: 2622 - RNA, 17 nt, Artificial Sequence
  Synthetic
aggcggccgggggcacg

SEQ ID NO: 2623 - RNA, 17 nt, Artificial Sequence
  Synthetic
ggcggccgggggcacgc

SEQ ID NO: 2624 - RNA, 17 nt, Artificial Sequence
  Synthetic
ccgggggcacgcgggag

SEQ ID NO: 2625 - RNA, 17 nt, Artificial Sequence
  Synthetic
cgggggcacgcgggaga

SEQ ID NO: 2626 - RNA, 17 nt, Artificial Sequence
  Synthetic
gggcacgcgggagaggg

SEQ ID NO: 2627 - RNA, 17 nt, Artificial Sequence
  Synthetic
ggcacgcgggagaggga

SEQ ID NO: 2628 - RNA, 17 nt, Artificial Sequence
  Synthetic
acgcgggagagggaggg

SEQ ID NO: 2629 - RNA, 17 nt, Artificial Sequence
  Synthetic
cgcgggagagggaggga

SEQ ID NO: 2630 - RNA, 17 nt, Artificial Sequence
  Synthetic
gagggagggagggagcc

SEQ ID NO: 2631 - RNA, 17 nt, Artificial Sequence
  Synthetic
cccggacugcugccucc

SEQ ID NO: 2632 - RNA, 17 nt, Artificial Sequence
  Synthetic
ccggacugcugccuccu

SEQ ID NO: 2633 - RNA, 17 nt, Artificial Sequence
  Synthetic
ucccgaccgaaccucag

SEQ ID NO: 2634 - RNA, 17 nt, Artificial Sequence
  Synthetic
gaaccucagaggcagca

SEQ ID NO: 2635 - RNA, 17 nt, Artificial Sequence
  Synthetic
ggcagcaaggagaagac

SEQ ID NO: 2636 - RNA, 17 nt, Artificial Sequence
  Synthetic
auaaaauaaauaaaaca

SEQ ID NO: 2637 - RNA, 20 nt, Artificial Sequence
  Synthetic
cagucuucuccuugcugccu

SEQ ID NO: 2638 - RNA, 20 nt, Artificial Sequence
  Synthetic
uugcugccucugagguucgg

SEQ ID NO: 2639 - RNA, 20 nt, Artificial Sequence
  Synthetic
ugcugccucugagguucggu

SEQ ID NO: 2640 - RNA, 20 nt, Artificial Sequence
  Synthetic
gcugccucugagguucgguc

SEQ ID NO: 2641 - RNA, 20 nt, Artificial Sequence
  Synthetic
ugccucugagguucggucgg

SEQ ID NO: 2642 - RNA, 20 nt, Artificial Sequence
  Synthetic
gccucugagguucggucggg

SEQ ID NO: 2643 - RNA, 20 nt, Artificial Sequence
  Synthetic
ccucugagguucggucggga

SEQ ID NO: 2644 - RNA, 20 nt, Artificial Sequence
  Synthetic
cucugagguucggucgggag

SEQ ID NO: 2645 - RNA, 20 nt, Artificial Sequence
  Synthetic
cugagguucggucgggaggg

SEQ ID NO: 2646 - RNA, 20 nt, Artificial Sequence
  Synthetic
aggggagggcagcggcaacc

SEQ ID NO: 2647 - RNA, 20 nt, Artificial Sequence
  Synthetic
ggggagggcagcggcaaccc

SEQ ID NO: 2648 - RNA, 20 nt, Artificial Sequence
  Synthetic
gcaacccaggaggcagcagu

SEQ ID NO: 2649 - RNA, 20 nt, Artificial Sequence
  Synthetic
gcggcggcggcggcggcggc

SEQ ID NO: 2650 - RNA, 20 nt, Artificial Sequence
  Synthetic
cggcggcggcggcggcggcg

SEQ ID NO: 2651 - RNA, 20 nt, Artificial Sequence
  Synthetic
ggcggcggcggcggcggcgc

SEQ ID NO: 2652 - RNA, 20 nt, Artificial Sequence
  Synthetic
cggcggcggcggcggcgcgg

SEQ ID NO: 2653 - RNA, 20 nt, Artificial Sequence
  Synthetic
ggcggcgcgggagggcaagc

SEQ ID NO: 2654 - RNA, 20 nt, Artificial Sequence
  Synthetic
cggcgcgggagggcaagcgc

SEQ ID NO: 2655 - RNA, 20 nt, Artificial Sequence
  Synthetic
ggcgcgggagggcaagcgcg

SEQ ID NO: 2656 - RNA, 20 nt, Artificial Sequence
  Synthetic
aggagccggcacaaaaggca

SEQ ID NO: 2657 - RNA, 20 nt, Artificial Sequence
  Synthetic
ggagccggcacaaaaggcag

SEQ ID NO: 2658 - RNA, 20 nt, Artificial Sequence
  Synthetic
ggacaaacacccaccucugg

SEQ ID NO: 2659 - RNA, 20 nt, Artificial Sequence
  Synthetic
gacaaacacccaccucuggc

SEQ ID NO: 2660 - RNA, 20 nt, Artificial Sequence
  Synthetic
gcggccccucucccgacucc

SEQ ID NO: 2661 - RNA, 20 nt, Artificial Sequence
  Synthetic
cucucccgacuccgcggacu

SEQ ID NO: 2662 - RNA, 20 nt, Artificial Sequence
  Synthetic
ucucccgacuccgcggacuc

SEQ ID NO: 2663 - RNA, 20 nt, Artificial Sequence
  Synthetic
acuccgcggacucaggagcg

SEQ ID NO: 2664 - RNA, 20 nt, Artificial Sequence
  Synthetic
cuccgcggacucaggagcgc

SEQ ID NO: 2665 - RNA, 20 nt, Artificial Sequence
  Synthetic
uccgcggacucaggagcgcc

SEQ ID NO: 2666 - RNA, 20 nt, Artificial Sequence
  Synthetic
agugccacuuucucacuauu

SEQ ID NO: 2667 - RNA, 20 nt, Artificial Sequence
  Synthetic
gugccacuuucucacuauug

SEQ ID NO: 2668 - RNA, 20 nt, Artificial Sequence
  Synthetic
ugccacuuucucacuauugu

SEQ ID NO: 2669 - RNA, 20 nt, Artificial Sequence
  Synthetic
cucccgcugcacacuugacc

SEQ ID NO: 2670 - RNA, 20 nt, Artificial Sequence
  Synthetic
cagucucaccucuuuucucc

SEQ ID NO: 2671 - RNA, 20 nt, Artificial Sequence
  Synthetic
agucucaccucuuuucuccc

SEQ ID NO: 2672 - RNA, 20 nt, Artificial Sequence
  Synthetic
gucucaccucuuuucucccc

SEQ ID NO: 2673 - RNA, 20 nt, Artificial Sequence
  Synthetic
uacccccccauuuucuuacg

SEQ ID NO: 2674 - RNA, 20 nt, Artificial Sequence
  Synthetic
cccccauuuucuuacgguga

SEQ ID NO: 2675 - RNA, 20 nt, Artificial Sequence
  Synthetic
ccccauuuucuuacggugag

SEQ ID NO: 2676 - RNA, 20 nt, Artificial Sequence
  Synthetic
cccauuuucuuacggugagu

SEQ ID NO: 2677 - RNA, 20 nt, Artificial Sequence
  Synthetic
ucccacccccagguuugcau

SEQ ID NO: 2678 - RNA, 20 nt, Artificial Sequence
  Synthetic
uucauuauuuugcaaaacug

SEQ ID NO: 2679 - RNA, 20 nt, Artificial Sequence
  Synthetic
ucauuauuuugcaaaacugg

SEQ ID NO: 2680 - RNA, 20 nt, Artificial Sequence
  Synthetic
uauuuugcaaaacuggcggg

SEQ ID NO: 2681 - RNA, 20 nt, Artificial Sequence
  Synthetic
auuuugcaaaacuggcgggg

SEQ ID NO: 2682 - RNA, 20 nt, Artificial Sequence
  Synthetic
uuuugcaaaacuggcggggc

SEQ ID NO: 2683 - RNA, 20 nt, Artificial Sequence
  Synthetic
uuugcaaaacuggcggggcg

SEQ ID NO: 2684 - RNA, 20 nt, Artificial Sequence
  Synthetic
uugcaaaacuggcggggcgg

SEQ ID NO: 2685 - RNA, 20 nt, Artificial Sequence
  Synthetic
ugcaaaacuggcggggcggg

SEQ ID NO: 2686 - RNA, 20 nt, Artificial Sequence
  Synthetic
gcaaaacuggcggggcgggg

SEQ ID NO: 2687 - RNA, 20 nt, Artificial Sequence
  Synthetic
caaaacuggcggggcggggg

SEQ ID NO: 2688 - RNA, 20 nt, Artificial Sequence
  Synthetic
acuggcggggcgggggggga

SEQ ID NO: 2689 - RNA, 20 nt, Artificial Sequence
  Synthetic
cuggcggggcggggggggag

SEQ ID NO: 2690 - RNA, 20 nt, Artificial Sequence
  Synthetic
uggaaucauugcauuccuuu

SEQ ID NO: 2691 - RNA, 20 nt, Artificial Sequence
  Synthetic
ucauugcauuccuuuucgaa

SEQ ID NO: 2692 - RNA, 20 nt, Artificial Sequence
  Synthetic
auugcauuccuuuucgaaaa

SEQ ID NO: 2693 - RNA, 20 nt, Artificial Sequence
  Synthetic
ucgaaaagagaaauaaagcg

SEQ ID NO: 2694 - RNA, 20 nt, Artificial Sequence
  Synthetic
cgaaaagagaaauaaagcgg

SEQ ID NO: 2695 - RNA, 20 nt, Artificial Sequence
  Synthetic
aagagaaauaaagcggcgga

SEQ ID NO: 2696 - RNA, 20 nt, Artificial Sequence
  Synthetic
agagaaauaaagcggcggaa

SEQ ID NO: 2697 - RNA, 20 nt, Artificial Sequence
  Synthetic
agaaauaaagcggcggaaag

SEQ ID NO: 2698 - RNA, 20 nt, Artificial Sequence
  Synthetic
gaaauaaagcggcggaaagg

SEQ ID NO: 2699 - RNA, 20 nt, Artificial Sequence
  Synthetic
uaaagcggcggaaaggagga

SEQ ID NO: 2700 - RNA, 20 nt, Artificial Sequence
  Synthetic
aagcggcggaaaggaggaaa

SEQ ID NO: 2701 - RNA, 20 nt, Artificial Sequence
  Synthetic
agcggcggaaaggaggaaag

SEQ ID NO: 2702 - RNA, 20 nt, Artificial Sequence
  Synthetic
cggcggaaaggaggaaagag

SEQ ID NO: 2703 - RNA, 20 nt, Artificial Sequence
  Synthetic
ggcggaaaggaggaaagagg

SEQ ID NO: 2704 - RNA, 20 nt, Artificial Sequence
  Synthetic
auacacggcaaugguuccag

SEQ ID NO: 2705 - RNA, 20 nt, Artificial Sequence
  Synthetic
uacacggcaaugguuccaga

SEQ ID NO: 2706 - RNA, 20 nt, Artificial Sequence
  Synthetic
cggcaaugguuccagauggg

SEQ ID NO: 2707 - RNA, 20 nt, Artificial Sequence
  Synthetic
gcaaugguuccagaugggau

SEQ ID NO: 2708 - RNA, 20 nt, Artificial Sequence
  Synthetic
uaucucuuuuaccucgacuc

SEQ ID NO: 2709 - RNA, 20 nt, Artificial Sequence
  Synthetic
aucucuuuuaccucgacucu

SEQ ID NO: 2710 - RNA, 20 nt, Artificial Sequence
  Synthetic
gacucucggagguuuuucuc

SEQ ID NO: 2711 - RNA, 20 nt, Artificial Sequence
  Synthetic
aauaauuauuauuacuauua

SEQ ID NO: 2712 - RNA, 20 nt, Artificial Sequence
  Synthetic
acuauuauuggguuacuuac

SEQ ID NO: 2713 - RNA, 20 nt, Artificial Sequence
  Synthetic
uauuauuggguuacuuacgc

SEQ ID NO: 2714 - RNA, 17 nt, Artificial Sequence
  Synthetic
ucuucuccuugcugccu

SEQ ID NO: 2715 - RNA, 17 nt, Artificial Sequence
  Synthetic
cugccucugagguucgg

SEQ ID NO: 2716 - RNA, 17 nt, Artificial Sequence
  Synthetic
ugccucugagguucggu

SEQ ID NO: 2717 - RNA, 17 nt, Artificial Sequence
  Synthetic
gccucugagguucgguc

SEQ ID NO: 2718 - RNA, 17 nt, Artificial Sequence
  Synthetic
cucugagguucggucgg

SEQ ID NO: 2719 - RNA, 17 nt, Artificial Sequence
  Synthetic
ucugagguucggucggg

SEQ ID NO: 2720 - RNA, 17 nt, Artificial Sequence
  Synthetic
cugagguucggucggga

SEQ ID NO: 2721 - RNA, 17 nt, Artificial Sequence
  Synthetic
ugagguucggucgggag

SEQ ID NO: 2722 - RNA, 17 nt, Artificial Sequence
  Synthetic
agguucggucgggaggg

SEQ ID NO: 2723 - RNA, 17 nt, Artificial Sequence
  Synthetic
ggagggcagcggcaacc

SEQ ID NO: 2724 - RNA, 17 nt, Artificial Sequence
  Synthetic
gagggcagcggcaaccc

SEQ ID NO: 2725 - RNA, 17 nt, Artificial Sequence
  Synthetic
acccaggaggcagcagu

SEQ ID NO: 2726 - RNA, 17 nt, Artificial Sequence
  Synthetic
gcggcggcggcggcggc

SEQ ID NO: 2727 - RNA, 17 nt, Artificial Sequence
  Synthetic
cggcggcggcggcggcg

SEQ ID NO: 2728 - RNA, 17 nt, Artificial Sequence
  Synthetic
ggcggcggcggcggcgc

SEQ ID NO: 2729 - RNA, 17 nt, Artificial Sequence
  Synthetic
cggcggcggcggcgcgg

SEQ ID NO: 2730 - RNA, 17 nt, Artificial Sequence
  Synthetic
ggcgcgggagggcaagc

SEQ ID NO: 2731 - RNA, 17 nt, Artificial Sequence
  Synthetic
cgcgggagggcaagcgc

SEQ ID NO: 2732 - RNA, 17 nt, Artificial Sequence
  Synthetic
gcgggagggcaagcgcg

SEQ ID NO: 2733 - RNA, 17 nt, Artificial Sequence
  Synthetic
agccggcacaaaaggca

SEQ ID NO: 2734 - RNA, 17 nt, Artificial Sequence
  Synthetic
gccggcacaaaaggcag

SEQ ID NO: 2735 - RNA, 17 nt, Artificial Sequence
  Synthetic
caaacacccaccucugg

SEQ ID NO: 2736 - RNA, 17 nt, Artificial Sequence
  Synthetic
aaacacccaccucuggc

SEQ ID NO: 2737 - RNA, 17 nt, Artificial Sequence
  Synthetic
gccccucucccgacucc

SEQ ID NO: 2738 - RNA, 17 nt, Artificial Sequence
  Synthetic
ucccgacuccgcggacu

SEQ ID NO: 2739 - RNA, 17 nt, Artificial Sequence
  Synthetic
cccgacuccgcggacuc

SEQ ID NO: 2740 - RNA, 17 nt, Artificial Sequence
  Synthetic
ccgcggacucaggagcg

SEQ ID NO: 2741 - RNA, 17 nt, Artificial Sequence
  Synthetic
cgcggacucaggagcgc

SEQ ID NO: 2742 - RNA, 17 nt, Artificial Sequence
  Synthetic
gcggacucaggagcgcc

SEQ ID NO: 2743 - RNA, 17 nt, Artificial Sequence
  Synthetic
gccacuuucucacuauu

SEQ ID NO: 2744 - RNA, 17 nt, Artificial Sequence
  Synthetic
ccacuuucucacuauug

SEQ ID NO: 2745 - RNA, 17 nt, Artificial Sequence
  Synthetic
cacuuucucacuauugu

SEQ ID NO: 2746 - RNA, 17 nt, Artificial Sequence
  Synthetic
ccgcugcacacuugacc

SEQ ID NO: 2747 - RNA, 17 nt, Artificial Sequence
  Synthetic
ucucaccucuuuucucc

SEQ ID NO: 2748 - RNA, 17 nt, Artificial Sequence
  Synthetic
cucaccucuuuucuccc

SEQ ID NO: 2749 - RNA, 17 nt, Artificial Sequence
  Synthetic
ucaccucuuuucucccc

SEQ ID NO: 2750 - RNA, 17 nt, Artificial Sequence
  Synthetic
ccccccauuuucuuacg

SEQ ID NO: 2751 - RNA, 17 nt, Artificial Sequence
  Synthetic
ccauuuucuuacgguga

SEQ ID NO: 2752 - RNA, 17 nt, Artificial Sequence
  Synthetic
cauuuucuuacggugag

SEQ ID NO: 2753 - RNA, 17 nt, Artificial Sequence
  Synthetic
auuuucuuacggugagu

SEQ ID NO: 2754 - RNA, 17 nt, Artificial Sequence
  Synthetic
cacccccagguuugcau

SEQ ID NO: 2755 - RNA, 17 nt, Artificial Sequence
  Synthetic
auuauuuugcaaaacug

SEQ ID NO: 2756 - RNA, 17 nt, Artificial Sequence
  Synthetic
uuauuuugcaaaacugg

SEQ ID NO: 2757 - RNA, 17 nt, Artificial Sequence
  Synthetic
uuugcaaaacuggcggg

SEQ ID NO: 2758 - RNA, 17 nt, Artificial Sequence
  Synthetic
uugcaaaacuggcgggg

SEQ ID NO: 2759 - RNA, 17 nt, Artificial Sequence
  Synthetic
ugcaaaacuggcggggc

SEQ ID NO: 2760 - RNA, 17 nt, Artificial Sequence
  Synthetic
gcaaaacuggcggggcg

SEQ ID NO: 2761 - RNA, 17 nt, Artificial Sequence
  Synthetic
caaaacuggcggggcgg

SEQ ID NO: 2762 - RNA, 17 nt, Artificial Sequence
  Synthetic
aaaacuggcggggcggg

SEQ ID NO: 2763 - RNA, 17 nt, Artificial Sequence
  Synthetic
aaacuggcggggcgggg

SEQ ID NO: 2764 - RNA, 17 nt, Artificial Sequence
  Synthetic
aacuggcggggcggggg

SEQ ID NO: 2765 - RNA, 17 nt, Artificial Sequence
  Synthetic
ggcggggcgggggggga

SEQ ID NO: 2766 - RNA, 17 nt, Artificial Sequence
  Synthetic
gcggggcggggggggag

SEQ ID NO: 2767 - RNA, 17 nt, Artificial Sequence
  Synthetic
aaucauugcauuccuuu

SEQ ID NO: 2768 - RNA, 17 nt, Artificial Sequence
  Synthetic
uugcauuccuuuucgaa

SEQ ID NO: 2769 - RNA, 17 nt, Artificial Sequence
  Synthetic
gcauuccuuuucgaaaa

SEQ ID NO: 2770 - RNA, 17 nt, Artificial Sequence
  Synthetic
aaaagagaaauaaagcg

SEQ ID NO: 2771 - RNA, 17 nt, Artificial Sequence
  Synthetic
aaagagaaauaaagcgg

SEQ ID NO: 2772 - RNA, 17 nt, Artificial Sequence
  Synthetic
agaaauaaagcggcgga

SEQ ID NO: 2773 - RNA, 17 nt, Artificial Sequence
  Synthetic
gaaauaaagcggcggaa

SEQ ID NO: 2774 - RNA, 17 nt, Artificial Sequence
  Synthetic
aauaaagcggcggaaag

SEQ ID NO: 2775 - RNA, 17 nt, Artificial Sequence
  Synthetic
auaaagcggcggaaagg

SEQ ID NO: 2776 - RNA, 17 nt, Artificial Sequence
  Synthetic
agcggcggaaaggagga

SEQ ID NO: 2777 - RNA, 17 nt, Artificial Sequence
  Synthetic
cggcggaaaggaggaaa

SEQ ID NO: 2778 - RNA, 17 nt, Artificial Sequence
  Synthetic
ggcggaaaggaggaaag

SEQ ID NO: 2779 - RNA, 17 nt, Artificial Sequence
  Synthetic
cggaaaggaggaaagag

SEQ ID NO: 2780 - RNA, 17 nt, Artificial Sequence
  Synthetic
ggaaaggaggaaagagg

SEQ ID NO: 2781 - RNA, 17 nt, Artificial Sequence
  Synthetic
cacggcaaugguuccag

SEQ ID NO: 2782 - RNA, 17 nt, Artificial Sequence
  Synthetic
acggcaaugguuccaga

SEQ ID NO: 2783 - RNA, 17 nt, Artificial Sequence
  Synthetic
caaugguuccagauggg

SEQ ID NO: 2784 - RNA, 17 nt, Artificial Sequence
  Synthetic
augguuccagaugggau

SEQ ID NO: 2785 - RNA, 17 nt, Artificial Sequence
  Synthetic
cucuuuuaccucgacuc

SEQ ID NO: 2786 - RNA, 17 nt, Artificial Sequence
  Synthetic
ucuuuuaccucgacucu

SEQ ID NO: 2787 - RNA, 17 nt, Artificial Sequence
  Synthetic
ucucggagguuuuucuc

SEQ ID NO: 2788 - RNA, 17 nt, Artificial Sequence
  Synthetic
aauuauuauuacuauua

SEQ ID NO: 2789 - RNA, 17 nt, Artificial Sequence
  Synthetic
auuauuggguuacuuac

SEQ ID NO: 2790 - RNA, 17 nt, Artificial Sequence
  Synthetic
uauuggguuacuuacgc

SEQ ID NO: 2791 - RNA, 20 nt, Artificial Sequence
  Synthetic
cgaaccucagaggcagcaag

SEQ ID NO: 2792 - RNA, 20 nt, Artificial Sequence
  Synthetic
accgaaccucagaggcagca

SEQ ID NO: 2793 - RNA, 20 nt, Artificial Sequence
  Synthetic
gaccgaaccucagaggcagc

SEQ ID NO: 2794 - RNA, 20 nt, Artificial Sequence
  Synthetic
cuccccucccgaccgaaccu

SEQ ID NO: 2795 - RNA, 20 nt, Artificial Sequence
  Synthetic
ccgcugcccuccccucccga

SEQ ID NO: 2796 - RNA, 20 nt, Artificial Sequence
  Synthetic
ggagcccggacugcugccuc

SEQ ID NO: 2797 - RNA, 20 nt, Artificial Sequence
  Synthetic
gggagagggagggagggagc

SEQ ID NO: 2798 - RNA, 20 nt, Artificial Sequence
  Synthetic
gcacgcgggagagggaggga

SEQ ID NO: 2799 - RNA, 20 nt, Artificial Sequence
  Synthetic
ggcacgcgggagagggaggg

SEQ ID NO: 2800 - RNA, 20 nt, Artificial Sequence
  Synthetic
gggcacgcgggagagggagg

SEQ ID NO: 2801 - RNA, 20 nt, Artificial Sequence
  Synthetic
gggggcacgcgggagaggga

SEQ ID NO: 2802 - RNA, 20 nt, Artificial Sequence
  Synthetic
cgggggcacgcgggagaggg

SEQ ID NO: 2803 - RNA, 20 nt, Artificial Sequence
  Synthetic
ccgggggcacgcgggagagg

SEQ ID NO: 2804 - RNA, 20 nt, Artificial Sequence
  Synthetic
ggccgggggcacgcgggaga

SEQ ID NO: 2805 - RNA, 20 nt, Artificial Sequence
  Synthetic
cggccgggggcacgcgggag

SEQ ID NO: 2806 - RNA, 20 nt, Artificial Sequence
  Synthetic
gcggccgggggcacgcggga

SEQ ID NO: 2807 - RNA, 20 nt, Artificial Sequence
  Synthetic
aggcggccgggggcacgcgg

SEQ ID NO: 2808 - RNA, 20 nt, Artificial Sequence
  Synthetic
ggaggcggccgggggcacgc

SEQ ID NO: 2809 - RNA, 20 nt, Artificial Sequence
  Synthetic
aggaggcggccgggggcacg

SEQ ID NO: 2810 - RNA, 20 nt, Artificial Sequence
  Synthetic
gaggaggcggccgggggcac

SEQ ID NO: 2811 - RNA, 20 nt, Artificial Sequence
  Synthetic
ggccgggggaggaggcggcc

SEQ ID NO: 2812 - RNA, 20 nt, Artificial Sequence
  Synthetic
gggccgggggaggaggcggc

SEQ ID NO: 2813 - RNA, 20 nt, Artificial Sequence
  Synthetic
agggccgggggaggaggcgg

SEQ ID NO: 2814 - RNA, 20 nt, Artificial Sequence
  Synthetic
gcaggagcuagggccggggg

SEQ ID NO: 2815 - RNA, 20 nt, Artificial Sequence
  Synthetic
ggcaggagcuagggccgggg

SEQ ID NO: 2816 - RNA, 20 nt, Artificial Sequence
  Synthetic
agggcaggagcuagggccgg

SEQ ID NO: 2817 - RNA, 20 nt, Artificial Sequence
  Synthetic
aagggcaggagcuagggccg

SEQ ID NO: 2818 - RNA, 20 nt, Artificial Sequence
  Synthetic
gaagggcaggagcuagggcc

SEQ ID NO: 2819 - RNA, 20 nt, Artificial Sequence
  Synthetic
cgaagggcaggagcuagggc

SEQ ID NO: 2820 - RNA, 20 nt, Artificial Sequence
  Synthetic
ccgaagggcaggagcuaggg

SEQ ID NO: 2821 - RNA, 20 nt, Artificial Sequence
  Synthetic
cgccgccgaagggcaggagc

SEQ ID NO: 2822 - RNA, 20 nt, Artificial Sequence
  Synthetic
cgccgccgccgccgaagggc

SEQ ID NO: 2823 - RNA, 20 nt, Artificial Sequence
  Synthetic
ccgccgccgccgccgaaggg

SEQ ID NO: 2824 - RNA, 20 nt, Artificial Sequence
  Synthetic
cgccgccgccgccgccgccg

SEQ ID NO: 2825 - RNA, 20 nt, Artificial Sequence
  Synthetic
cgccgccgccgccgccgccg

SEQ ID NO: 2826 - RNA, 20 nt, Artificial Sequence
  Synthetic
gccuuuuguuccggccagag

SEQ ID NO: 2827 - RNA, 20 nt, Artificial Sequence
  Synthetic
cugccgccuuuuguuccggc

SEQ ID NO: 2828 - RNA, 20 nt, Artificial Sequence
  Synthetic
gccgugggaccgggaaggac

SEQ ID NO: 2829 - RNA, 20 nt, Artificial Sequence
  Synthetic
agccgugggaccgggaagga

SEQ ID NO: 2830 - RNA, 20 nt, Artificial Sequence
  Synthetic
gagccgugggaccgggaagg

SEQ ID NO: 2831 - RNA, 20 nt, Artificial Sequence
  Synthetic
gggagagccgugggaccggg

SEQ ID NO: 2832 - RNA, 20 nt, Artificial Sequence
  Synthetic
acggggagagccgugggacc

SEQ ID NO: 2833 - RNA, 20 nt, Artificial Sequence
  Synthetic
gacggggagagccgugggac

SEQ ID NO: 2834 - RNA, 20 nt, Artificial Sequence
  Synthetic
cgacggggagagccguggga

SEQ ID NO: 2835 - RNA, 20 nt, Artificial Sequence
  Synthetic
cgcggcgacggggagagccg

SEQ ID NO: 2836 - RNA, 20 nt, Artificial Sequence
  Synthetic
ccgcggcgacggggagagcc

SEQ ID NO: 2837 - RNA, 20 nt, Artificial Sequence
  Synthetic
agaggggccgcggcgacggg

SEQ ID NO: 2838 - RNA, 20 nt, Artificial Sequence
  Synthetic
ggagaggggccgcggcgacg

SEQ ID NO: 2839 - RNA, 20 nt, Artificial Sequence
  Synthetic
gggagaggggccgcggcgac

SEQ ID NO: 2840 - RNA, 20 nt, Artificial Sequence
  Synthetic
cgggagaggggccgcggcga

SEQ ID NO: 2841 - RNA, 20 nt, Artificial Sequence
  Synthetic
ucgggagaggggccgcggcg

SEQ ID NO: 2842 - RNA, 20 nt, Artificial Sequence
  Synthetic
ugaguccgcggagucgggag

SEQ ID NO: 2843 - RNA, 20 nt, Artificial Sequence
  Synthetic
cugaguccgcggagucggga

SEQ ID NO: 2844 - RNA, 20 nt, Artificial Sequence
  Synthetic
uccugaguccgcggagucgg

SEQ ID NO: 2845 - RNA, 20 nt, Artificial Sequence
  Synthetic
gcuccugaguccgcggaguc

SEQ ID NO: 2846 - RNA, 20 nt, Artificial Sequence
  Synthetic
cgcuccugaguccgcggagu

SEQ ID NO: 2847 - RNA, 20 nt, Artificial Sequence
  Synthetic
gcgcuccugaguccgcggag

SEQ ID NO: 2848 - RNA, 20 nt, Artificial Sequence
  Synthetic
ccccggcgcuccugaguccg

SEQ ID NO: 2849 - RNA, 20 nt, Artificial Sequence
  Synthetic
cccccggcgcuccugagucc

SEQ ID NO: 2850 - RNA, 20 nt, Artificial Sequence
  Synthetic
gaaaggggcccccggcgcuc

SEQ ID NO: 2851 - RNA, 20 nt, Artificial Sequence
  Synthetic
gagaaaguggcacuguggaa

SEQ ID NO: 2852 - RNA, 20 nt, Artificial Sequence
  Synthetic
ugagaaaguggcacugugga

SEQ ID NO: 2853 - RNA, 20 nt, Artificial Sequence
  Synthetic
auagugagaaaguggcacug

SEQ ID NO: 2854 - RNA, 20 nt, Artificial Sequence
  Synthetic
aauagugagaaaguggcacu

SEQ ID NO: 2855 - RNA, 20 nt, Artificial Sequence
  Synthetic
guagucauccccacaauagu

SEQ ID NO: 2856 - RNA, 20 nt, Artificial Sequence
  Synthetic
aaguagucauccccacaaua

SEQ ID NO: 2857 - RNA, 20 nt, Artificial Sequence
  Synthetic
acggucaagugugcagcggg

SEQ ID NO: 2858 - RNA, 20 nt, Artificial Sequence
  Synthetic
cacggucaagugugcagcgg

SEQ ID NO: 2859 - RNA, 20 nt, Artificial Sequence
  Synthetic
cucacggucaagugugcagc

SEQ ID NO: 2860 - RNA, 20 nt, Artificial Sequence
  Synthetic
gcucacggucaagugugcag

SEQ ID NO: 2861 - RNA, 20 nt, Artificial Sequence
  Synthetic
cgcucacggucaagugugca

SEQ ID NO: 2862 - RNA, 20 nt, Artificial Sequence
  Synthetic
aaaagaggugagacuggcuu

SEQ ID NO: 2863 - RNA, 20 nt, Artificial Sequence
  Synthetic
gauucccggggagaaaagag

SEQ ID NO: 2864 - RNA, 20 nt, Artificial Sequence
  Synthetic
aaaacgauucccggggagaa

SEQ ID NO: 2865 - RNA, 20 nt, Artificial Sequence
  Synthetic
ucuaaaaaacgauucccggg

SEQ ID NO: 2866 - RNA, 20 nt, Artificial Sequence
  Synthetic
agucuaaaaaacgauucccg

SEQ ID NO: 2867 - RNA, 20 nt, Artificial Sequence
  Synthetic
aagucuaaaaaacgauuccc

SEQ ID NO: 2868 - RNA, 20 nt, Artificial Sequence
  Synthetic
caagucuaaaaaacgauucc

SEQ ID NO: 2869 - RNA, 20 nt, Artificial Sequence
  Synthetic
acaagucuaaaaaacgauuc

SEQ ID NO: 2870 - RNA, 20 nt, Artificial Sequence
  Synthetic
aauggggggguagggaggga

SEQ ID NO: 2871 - RNA, 20 nt, Artificial Sequence
  Synthetic
agaaaauggggggguaggga

SEQ ID NO: 2872 - RNA, 20 nt, Artificial Sequence
  Synthetic
aagaaaauggggggguaggg

SEQ ID NO: 2873 - RNA, 20 nt, Artificial Sequence
  Synthetic
uaagaaaauggggggguagg

SEQ ID NO: 2874 - RNA, 20 nt, Artificial Sequence
  Synthetic
cguaagaaaaugggggggua

SEQ ID NO: 2875 - RNA, 20 nt, Artificial Sequence
  Synthetic
ccguaagaaaaugggggggu

SEQ ID NO: 2876 - RNA, 20 nt, Artificial Sequence
  Synthetic
accguaagaaaauggggggg

SEQ ID NO: 2877 - RNA, 20 nt, Artificial Sequence
  Synthetic
cacucaccguaagaaaaugg

SEQ ID NO: 2878 - RNA, 20 nt, Artificial Sequence
  Synthetic
ccacucaccguaagaaaaug

SEQ ID NO: 2879 - RNA, 20 nt, Artificial Sequence
  Synthetic
cccacucaccguaagaaaau

SEQ ID NO: 2880 - RNA, 20 nt, Artificial Sequence
  Synthetic
ucccacucaccguaagaaaa

SEQ ID NO: 2881 - RNA, 20 nt, Artificial Sequence
  Synthetic
uucccacucaccguaagaaa

SEQ ID NO: 2882 - RNA, 20 nt, Artificial Sequence
  Synthetic
gguugcuucccacucaccgu

SEQ ID NO: 2883 - RNA, 20 nt, Artificial Sequence
  Synthetic
ggugggagcugguggggaaa

SEQ ID NO: 2884 - RNA, 20 nt, Artificial Sequence
  Synthetic
gggugggagcugguggggaa

SEQ ID NO: 2885 - RNA, 20 nt, Artificial Sequence
  Synthetic
ggggugggagcuggugggga

SEQ ID NO: 2886 - RNA, 20 nt, Artificial Sequence
  Synthetic
ccugggggugggagcuggug

SEQ ID NO: 2887 - RNA, 20 nt, Artificial Sequence
  Synthetic
accugggggugggagcuggu

SEQ ID NO: 2888 - RNA, 20 nt, Artificial Sequence
  Synthetic
aaccugggggugggagcugg

SEQ ID NO: 2889 - RNA, 20 nt, Artificial Sequence
  Synthetic
aaaccugggggugggagcug

SEQ ID NO: 2890 - RNA, 20 nt, Artificial Sequence
  Synthetic
ucacaugcaaaccugggggu

SEQ ID NO: 2891 - RNA, 20 nt, Artificial Sequence
  Synthetic
cucacaugcaaaccuggggg

SEQ ID NO: 2892 - RNA, 20 nt, Artificial Sequence
  Synthetic
acucacaugcaaaccugggg

SEQ ID NO: 2893 - RNA, 20 nt, Artificial Sequence
  Synthetic
aacaacucacaugcaaaccu

SEQ ID NO: 2894 - RNA, 20 nt, Artificial Sequence
  Synthetic
gaacaacucacaugcaaacc

SEQ ID NO: 2895 - RNA, 20 nt, Artificial Sequence
  Synthetic
cgaacaacucacaugcaaac

SEQ ID NO: 2896 - RNA, 20 nt, Artificial Sequence
  Synthetic
uaaugaacaaugcuaagguu

SEQ ID NO: 2897 - RNA, 20 nt, Artificial Sequence
  Synthetic
cccgccaguuuugcaaaaua

SEQ ID NO: 2898 - RNA, 20 nt, Artificial Sequence
  Synthetic
cuuuauuucucuuuucgaaa

SEQ ID NO: 2899 - RNA, 20 nt, Artificial Sequence
  Synthetic
gcuuuauuucucuuuucgaa

SEQ ID NO: 2900 - RNA, 20 nt, Artificial Sequence
  Synthetic
ccgccgcuuuauuucucuuu

SEQ ID NO: 2901 - RNA, 20 nt, Artificial Sequence
  Synthetic
ccauugccguguaugcacuu

SEQ ID NO: 2902 - RNA, 20 nt, Artificial Sequence
  Synthetic
gaaaaaacccucaucccauc

SEQ ID NO: 2903 - RNA, 20 nt, Artificial Sequence
  Synthetic
ggaaaaaacccucaucccau

SEQ ID NO: 2904 - RNA, 20 nt, Artificial Sequence
  Synthetic
cgagguaaaagagauaaagg

SEQ ID NO: 2905 - RNA, 20 nt, Artificial Sequence
  Synthetic
ucgagguaaaagagauaaag

SEQ ID NO: 2906 - RNA, 20 nt, Artificial Sequence
  Synthetic
gucgagguaaaagagauaaa

SEQ ID NO: 2907 - RNA, 20 nt, Artificial Sequence
  Synthetic
agucgagguaaaagagauaa

SEQ ID NO: 2908 - RNA, 20 nt, Artificial Sequence
  Synthetic
gagucgagguaaaagagaua

SEQ ID NO: 2909 - RNA, 20 nt, Artificial Sequence
  Synthetic
accuccgagagucgagguaa

SEQ ID NO: 2910 - RNA, 20 nt, Artificial Sequence
  Synthetic
acgagaaaaaccuccgagag

SEQ ID NO: 2911 - RNA, 20 nt, Artificial Sequence
  Synthetic
uuuucacgagaaaaaccucc

SEQ ID NO: 2912 - RNA, 20 nt, Artificial Sequence
  Synthetic
auuuuucacgagaaaaaccu

SEQ ID NO: 2913 - RNA, 20 nt, Artificial Sequence
  Synthetic
ugcauuuuuaaauuuuucac

SEQ ID NO: 2914 - RNA, 20 nt, Artificial Sequence
  Synthetic
caugcauuuuuaaauuuuuc

SEQ ID NO: 2915 - RNA, 20 nt, Artificial Sequence
  Synthetic
agcaaaagcgagggggagag

SEQ ID NO: 2916 - RNA, 20 nt, Artificial Sequence
  Synthetic
aagcaaaagcgagggggaga

SEQ ID NO: 2917 - RNA, 20 nt, Artificial Sequence
  Synthetic
agaagcaaaagcgaggggga

SEQ ID NO: 2918 - RNA, 20 nt, Artificial Sequence
  Synthetic
cuagaagcaaaagcgagggg

SEQ ID NO: 2919 - RNA, 20 nt, Artificial Sequence
  Synthetic
gacuagaagcaaaagcgagg

SEQ ID NO: 2920 - RNA, 20 nt, Artificial Sequence
  Synthetic
ggacuagaagcaaaagcgag

SEQ ID NO: 2921 - RNA, 20 nt, Artificial Sequence
  Synthetic
aggacuagaagcaaaagcga

SEQ ID NO: 2922 - RNA, 20 nt, Artificial Sequence
  Synthetic
caggacuagaagcaaaagcg

SEQ ID NO: 2923 - RNA, 20 nt, Artificial Sequence
  Synthetic
gcaggacuagaagcaaaagc

SEQ ID NO: 2924 - RNA, 20 nt, Artificial Sequence
  Synthetic
gcgcaggacuagaagcaaaa

SEQ ID NO: 2925 - RNA, 20 nt, Artificial Sequence
  Synthetic
aucacgagagcgcgcaggac

SEQ ID NO: 2926 - RNA, 20 nt, Artificial Sequence
  Synthetic
uuaauaaucacgagagcgcg

SEQ ID NO: 2927 - RNA, 20 nt, Artificial Sequence
  Synthetic
uaauaauuauuaauaaucac

SEQ ID NO: 2928 - RNA, 20 nt, Artificial Sequence
  Synthetic
aauaauaauuauuaauaauc

SEQ ID NO: 2929 - RNA, 17 nt, Artificial Sequence
  Synthetic
accucagaggcagcaag

SEQ ID NO: 2930 - RNA, 17 nt, Artificial Sequence
  Synthetic
gaaccucagaggcagca

SEQ ID NO: 2931 - RNA, 17 nt, Artificial Sequence
  Synthetic
cgaaccucagaggcagc

SEQ ID NO: 2932 - RNA, 17 nt, Artificial Sequence
  Synthetic
cccucccgaccgaaccu

SEQ ID NO: 2933 - RNA, 17 nt, Artificial Sequence
  Synthetic
cugcccuccccucccga

SEQ ID NO: 2934 - RNA, 17 nt, Artificial Sequence
  Synthetic
gcccggacugcugccuc

SEQ ID NO: 2935 - RNA, 17 nt, Artificial Sequence
  Synthetic
agagggagggagggagc

SEQ ID NO: 2936 - RNA, 17 nt, Artificial Sequence
  Synthetic
cgcgggagagggaggga

SEQ ID NO: 2937 - RNA, 17 nt, Artificial Sequence
  Synthetic
acgcgggagagggaggg

SEQ ID NO: 2938 - RNA, 17 nt, Artificial Sequence
  Synthetic
cacgcgggagagggagg

SEQ ID NO: 2939 - RNA, 17 nt, Artificial Sequence
  Synthetic
ggcacgcgggagaggga

SEQ ID NO: 2940 - RNA, 17 nt, Artificial Sequence
  Synthetic
gggcacgcgggagaggg

SEQ ID NO: 2941 - RNA, 17 nt, Artificial Sequence
  Synthetic
ggggcacgcgggagagg

SEQ ID NO: 2942 - RNA, 17 nt, Artificial Sequence
  Synthetic
cgggggcacgcgggaga

SEQ ID NO: 2943 - RNA, 17 nt, Artificial Sequence
  Synthetic
ccgggggcacgcgggag

SEQ ID NO: 2944 - RNA, 17 nt, Artificial Sequence
  Synthetic
gccgggggcacgcggga

SEQ ID NO: 2945 - RNA, 17 nt, Artificial Sequence
  Synthetic
cggccgggggcacgcgg

SEQ ID NO: 2946 - RNA, 17 nt, Artificial Sequence
  Synthetic
ggcggccgggggcacgc

SEQ ID NO: 2947 - RNA, 17 nt, Artificial Sequence
  Synthetic
aggcggccgggggcacg

SEQ ID NO: 2948 - RNA, 17 nt, Artificial Sequence
  Synthetic
gaggcggccgggggcac

SEQ ID NO: 2949 - RNA, 17 nt, Artificial Sequence
  Synthetic
cgggggaggaggcggcc

SEQ ID NO: 2950 - RNA, 17 nt, Artificial Sequence
  Synthetic
ccgggggaggaggcggc

SEQ ID NO: 2951 - RNA, 17 nt, Artificial Sequence
  Synthetic
gccgggggaggaggcgg

SEQ ID NO: 2952 - RNA, 17 nt, Artificial Sequence
  Synthetic
ggagcuagggccggggg

SEQ ID NO: 2953 - RNA, 17 nt, Artificial Sequence
  Synthetic
aggagcuagggccgggg

SEQ ID NO: 2954 - RNA, 17 nt, Artificial Sequence
  Synthetic
gcaggagcuagggccgg

SEQ ID NO: 2955 - RNA, 17 nt, Artificial Sequence
  Synthetic
ggcaggagcuagggccg

SEQ ID NO: 2956 - RNA, 17 nt, Artificial Sequence
  Synthetic
gggcaggagcuagggcc

SEQ ID NO: 2957 - RNA, 17 nt, Artificial Sequence
  Synthetic
agggcaggagcuagggc

SEQ ID NO: 2958 - RNA, 17 nt, Artificial Sequence
  Synthetic
aagggcaggagcuaggg

SEQ ID NO: 2959 - RNA, 17 nt, Artificial Sequence
  Synthetic
cgccgaagggcaggagc

SEQ ID NO: 2960 - RNA, 17 nt, Artificial Sequence
  Synthetic
cgccgccgccgaagggc

SEQ ID NO: 2961 - RNA, 17 nt, Artificial Sequence
  Synthetic
ccgccgccgccgaaggg

SEQ ID NO: 2962 - RNA, 17 nt, Artificial Sequence
  Synthetic
cgccgccgccgccgccg

SEQ ID NO: 2963 - RNA, 17 nt, Artificial Sequence
  Synthetic
cgccgccgccgccgccg

SEQ ID NO: 2964 - RNA, 17 nt, Artificial Sequence
  Synthetic
uuuuguuccggccagag

SEQ ID NO: 2965 - RNA, 17 nt, Artificial Sequence
  Synthetic
ccgccuuuuguuccggc

SEQ ID NO: 2966 - RNA, 17 nt, Artificial Sequence
  Synthetic
gugggaccgggaaggac

SEQ ID NO: 2967 - RNA, 17 nt, Artificial Sequence
  Synthetic
cgugggaccgggaagga

SEQ ID NO: 2968 - RNA, 17 nt, Artificial Sequence
  Synthetic
ccgugggaccgggaagg

SEQ ID NO: 2969 - RNA, 17 nt, Artificial Sequence
  Synthetic
agagccgugggaccggg

SEQ ID NO: 2970 - RNA, 17 nt, Artificial Sequence
  Synthetic
gggagagccgugggacc

SEQ ID NO: 2971 - RNA, 17 nt, Artificial Sequence
  Synthetic
ggggagagccgugggac

SEQ ID NO: 2972 - RNA, 17 nt, Artificial Sequence
  Synthetic
cggggagagccguggga

SEQ ID NO: 2973 - RNA, 17 nt, Artificial Sequence
  Synthetic
ggcgacggggagagccg

SEQ ID NO: 2974 - RNA, 17 nt, Artificial Sequence
  Synthetic
cggcgacggggagagcc

SEQ ID NO: 2975 - RNA, 17 nt, Artificial Sequence
  Synthetic
ggggccgcggcgacggg

SEQ ID NO: 2976 - RNA, 17 nt, Artificial Sequence
  Synthetic
gaggggccgcggcgacg

SEQ ID NO: 2977 - RNA, 17 nt, Artificial Sequence
  Synthetic
agaggggccgcggcgac

SEQ ID NO: 2978 - RNA, 17 nt, Artificial Sequence
  Synthetic
gagaggggccgcggcga

SEQ ID NO: 2979 - RNA, 17 nt, Artificial Sequence
  Synthetic
ggagaggggccgcggcg

SEQ ID NO: 2980 - RNA, 17 nt, Artificial Sequence
  Synthetic
guccgcggagucgggag

SEQ ID NO: 2981 - RNA, 17 nt, Artificial Sequence
  Synthetic
aguccgcggagucggga

SEQ ID NO: 2982 - RNA, 17 nt, Artificial Sequence
  Synthetic
ugaguccgcggagucgg

SEQ ID NO: 2983 - RNA, 17 nt, Artificial Sequence
  Synthetic
ccugaguccgcggaguc

SEQ ID NO: 2984 - RNA, 17 nt, Artificial Sequence
  Synthetic
uccugaguccgcggagu

SEQ ID NO: 2985 - RNA, 17 nt, Artificial Sequence
  Synthetic
cuccugaguccgcggag

SEQ ID NO: 2986 - RNA, 17 nt, Artificial Sequence
  Synthetic
cggcgcuccugaguccg

SEQ ID NO: 2987 - RNA, 17 nt, Artificial Sequence
  Synthetic
ccggcgcuccugagucc

SEQ ID NO: 2988 - RNA, 17 nt, Artificial Sequence
  Synthetic
aggggcccccggcgcuc

SEQ ID NO: 2989 - RNA, 17 nt, Artificial Sequence
  Synthetic
aaaguggcacuguggaa

SEQ ID NO: 2990 - RNA, 17 nt, Artificial Sequence
  Synthetic
gaaaguggcacugugga

SEQ ID NO: 2991 - RNA, 17 nt, Artificial Sequence
  Synthetic
gugagaaaguggcacug

SEQ ID NO: 2992 - RNA, 17 nt, Artificial Sequence
  Synthetic
agugagaaaguggcacu

SEQ ID NO: 2993 - RNA, 17 nt, Artificial Sequence
  Synthetic
gucauccccacaauagu

SEQ ID NO: 2994 - RNA, 17 nt, Artificial Sequence
  Synthetic
uagucauccccacaaua

SEQ ID NO: 2995 - RNA, 17 nt, Artificial Sequence
  Synthetic
gucaagugugcagcggg

SEQ ID NO: 2996 - RNA, 17 nt, Artificial Sequence
  Synthetic
ggucaagugugcagcgg

SEQ ID NO: 2997 - RNA, 17 nt, Artificial Sequence
  Synthetic
acggucaagugugcagc

SEQ ID NO: 2998 - RNA, 17 nt, Artificial Sequence
  Synthetic
cacggucaagugugcag

SEQ ID NO: 2999 - RNA, 17 nt, Artificial Sequence
  Synthetic
ucacggucaagugugca

SEQ ID NO: 3000 - RNA, 17 nt, Artificial Sequence
  Synthetic
agaggugagacuggcuu

SEQ ID NO: 3001 - RNA, 17 nt, Artificial Sequence
  Synthetic
ucccggggagaaaagag

SEQ ID NO: 3002 - RNA, 17 nt, Artificial Sequence
  Synthetic
acgauucccggggagaa

SEQ ID NO: 3003 - RNA, 17 nt, Artificial Sequence
  Synthetic
aaaaaacgauucccggg

SEQ ID NO: 3004 - RNA, 17 nt, Artificial Sequence
  Synthetic
cuaaaaaacgauucccg

SEQ ID NO: 3005 - RNA, 17 nt, Artificial Sequence
  Synthetic
ucuaaaaaacgauuccc

SEQ ID NO: 3006 - RNA, 17 nt, Artificial Sequence
  Synthetic
gucuaaaaaacgauucc

SEQ ID NO: 3007 - RNA, 17 nt, Artificial Sequence
  Synthetic
agucuaaaaaacgauuc

SEQ ID NO: 3008 - RNA, 17 nt, Artificial Sequence
  Synthetic
ggggggguagggaggga

SEQ ID NO: 3009 - RNA, 17 nt, Artificial Sequence
  Synthetic
aaauggggggguaggga

SEQ ID NO: 3010 - RNA, 17 nt, Artificial Sequence
  Synthetic
aaaauggggggguaggg

SEQ ID NO: 3011 - RNA, 17 nt, Artificial Sequence
  Synthetic
gaaaauggggggguagg

SEQ ID NO: 3012 - RNA, 17 nt, Artificial Sequence
  Synthetic
aagaaaaugggggggua

SEQ ID NO: 3013 - RNA, 17 nt, Artificial Sequence
  Synthetic
uaagaaaaugggggggu

SEQ ID NO: 3014 - RNA, 17 nt, Artificial Sequence
  Synthetic
guaagaaaauggggggg

SEQ ID NO: 3015 - RNA, 17 nt, Artificial Sequence
  Synthetic
ucaccguaagaaaaugg

SEQ ID NO: 3016 - RNA, 17 nt, Artificial Sequence
  Synthetic
cucaccguaagaaaaug

SEQ ID NO: 3017 - RNA, 17 nt, Artificial Sequence
  Synthetic
acucaccguaagaaaau

SEQ ID NO: 3018 - RNA, 17 nt, Artificial Sequence
  Synthetic
cacucaccguaagaaaa

SEQ ID NO: 3019 - RNA, 17 nt, Artificial Sequence
  Synthetic
ccacucaccguaagaaa

SEQ ID NO: 3020 - RNA, 17 nt, Artificial Sequence
  Synthetic
ugcuucccacucaccgu

SEQ ID NO: 3021 - RNA, 17 nt, Artificial Sequence
  Synthetic
gggagcugguggggaaa

SEQ ID NO: 3022 - RNA, 17 nt, Artificial Sequence
  Synthetic
ugggagcugguggggaa

SEQ ID NO: 3023 - RNA, 17 nt, Artificial Sequence
  Synthetic
gugggagcuggugggga

SEQ ID NO: 3024 - RNA, 17 nt, Artificial Sequence
  Synthetic
gggggugggagcuggug

SEQ ID NO: 3025 - RNA, 17 nt, Artificial Sequence
  Synthetic
ugggggugggagcuggu

SEQ ID NO: 3026 - RNA, 17 nt, Artificial Sequence
  Synthetic
cugggggugggagcugg

SEQ ID NO: 3027 - RNA, 17 nt, Artificial Sequence
  Synthetic
ccugggggugggagcug

SEQ ID NO: 3028 - RNA, 17 nt, Artificial Sequence
  Synthetic
caugcaaaccugggggu

SEQ ID NO: 3029 - RNA, 17 nt, Artificial Sequence
  Synthetic
acaugcaaaccuggggg

SEQ ID NO: 3030 - RNA, 17 nt, Artificial Sequence
  Synthetic
cacaugcaaaccugggg

SEQ ID NO: 3031 - RNA, 17 nt, Artificial Sequence
  Synthetic
aacucacaugcaaaccu

SEQ ID NO: 3032 - RNA, 17 nt, Artificial Sequence
  Synthetic
caacucacaugcaaacc

SEQ ID NO: 3033 - RNA, 17 nt, Artificial Sequence
  Synthetic
acaacucacaugcaaac

SEQ ID NO: 3034 - RNA, 17 nt, Artificial Sequence
  Synthetic
ugaacaaugcuaagguu

SEQ ID NO: 3035 - RNA, 17 nt, Artificial Sequence
  Synthetic
gccaguuuugcaaaaua

SEQ ID NO: 3036 - RNA, 17 nt, Artificial Sequence
  Synthetic
uauuucucuuuucgaaa

SEQ ID NO: 3037 - RNA, 17 nt, Artificial Sequence
  Synthetic
uuauuucucuuuucgaa

SEQ ID NO: 3038 - RNA, 17 nt, Artificial Sequence
  Synthetic
ccgcuuuauuucucuuu

SEQ ID NO: 3039 - RNA, 17 nt, Artificial Sequence
  Synthetic
uugccguguaugcacuu

SEQ ID NO: 3040 - RNA, 17 nt, Artificial Sequence
  Synthetic
aaaacccucaucccauc

SEQ ID NO: 3041 - RNA, 17 nt, Artificial Sequence
  Synthetic
aaaaacccucaucccau

SEQ ID NO: 3042 - RNA, 17 nt, Artificial Sequence
  Synthetic
gguaaaagagauaaagg

SEQ ID NO: 3043 - RNA, 17 nt, Artificial Sequence
  Synthetic
agguaaaagagauaaag

SEQ ID NO: 3044 - RNA, 17 nt, Artificial Sequence
  Synthetic
gagguaaaagagauaaa

SEQ ID NO: 3045 - RNA, 17 nt, Artificial Sequence
  Synthetic
cgagguaaaagagauaa

SEQ ID NO: 3046 - RNA, 17 nt, Artificial Sequence
  Synthetic
ucgagguaaaagagaua

SEQ ID NO: 3047 - RNA, 17 nt, Artificial Sequence
  Synthetic
uccgagagucgagguaa

SEQ ID NO: 3048 - RNA, 17 nt, Artificial Sequence
  Synthetic
agaaaaaccuccgagag

SEQ ID NO: 3049 - RNA, 17 nt, Artificial Sequence
  Synthetic
ucacgagaaaaaccucc

SEQ ID NO: 3050 - RNA, 17 nt, Artificial Sequence
  Synthetic
uuucacgagaaaaaccu

SEQ ID NO: 3051 - RNA, 17 nt, Artificial Sequence
  Synthetic
auuuuuaaauuuuucac

SEQ ID NO: 3052 - RNA, 17 nt, Artificial Sequence
  Synthetic
gcauuuuuaaauuuuuc

SEQ ID NO: 3053 - RNA, 17 nt, Artificial Sequence
  Synthetic
aaaagcgagggggagag

SEQ ID NO: 3054 - RNA, 17 nt, Artificial Sequence
  Synthetic
caaaagcgagggggaga

SEQ ID NO: 3055 - RNA, 17 nt, Artificial Sequence
  Synthetic
agcaaaagcgaggggga

SEQ ID NO: 3056 - RNA, 17 nt, Artificial Sequence
  Synthetic
gaagcaaaagcgagggg

SEQ ID NO: 3057 - RNA, 17 nt, Artificial Sequence
  Synthetic
uagaagcaaaagcgagg

SEQ ID NO: 3058 - RNA, 17 nt, Artificial Sequence
  Synthetic
cuagaagcaaaagcgag

SEQ ID NO: 3059 - RNA, 17 nt, Artificial Sequence
  Synthetic
acuagaagcaaaagcga

SEQ ID NO: 3060 - RNA, 17 nt, Artificial Sequence
  Synthetic
gacuagaagcaaaagcg

SEQ ID NO: 3061 - RNA, 17 nt, Artificial Sequence
  Synthetic
ggacuagaagcaaaagc

SEQ ID NO: 3062 - RNA, 17 nt, Artificial Sequence
  Synthetic
caggacuagaagcaaaa

SEQ ID NO: 3063 - RNA, 17 nt, Artificial Sequence
  Synthetic
acgagagcgcgcaggac

SEQ ID NO: 3064 - RNA, 17 nt, Artificial Sequence
  Synthetic
auaaucacgagagcgcg

SEQ ID NO: 3065 - RNA, 17 nt, Artificial Sequence
  Synthetic
uaauuauuaauaaucac

SEQ ID NO: 3066 - RNA, 17 nt, Artificial Sequence
  Synthetic
aauaauuauuaauaauc

SEQ ID NO: 3067 - RNA, 20 nt, Artificial Sequence
  Synthetic
gcuucuaguccugcgcgcuc

SEQ ID NO: 3068 - RNA, 17 nt, Artificial Sequence
  Synthetic
ucuaguccugcgcgcuc

SEQ ID NO: 3069 - RNA, 20 nt, Artificial Sequence
  Synthetic
uuuagacuuguacucacucc

SEQ ID NO: 3070 - RNA, 20 nt, Artificial Sequence
  Synthetic
cauuccuuuucgaaaagaga

SEQ ID NO: 3071 - RNA, 17 nt, Artificial Sequence
  Synthetic
uuuagacuuguacucac

SEQ ID NO: 3072 - RNA, 17 nt, Artificial Sequence
  Synthetic
cauuccuuuucgaaaag

SEQ ID NO: 3073 - RNA, 20 nt, Artificial Sequence
  Synthetic
gagcuccaugugcagaacga

SEQ ID NO: 3074 - RNA, 17 nt, Artificial Sequence
  Synthetic
gagcucccaacgggccg

SEQ ID NO: 3075 - RNA, 20 nt, Artificial Sequence
  Synthetic
gagugcagaauaugccccgc

SEQ ID NO: 3076 - RNA, 20 nt, Artificial Sequence
  Synthetic
gauaaacaaucgucauccuc

SEQ ID NO: 3077 - RNA, 20 nt, Artificial Sequence
  Synthetic
gaugccaaccuccacgggau

SEQ ID NO: 3078 - RNA, 17 nt, Artificial Sequence
  Synthetic
gcagaauaugccccgca

SEQ ID NO: 3079 - RNA, 20 nt, Artificial Sequence
  Synthetic
gcauccaaucccguggaggu

SEQ ID NO: 3080 - RNA, 17 nt, Artificial Sequence
  Synthetic
gccaaccuccacgggau

SEQ ID NO: 3081 - RNA, 20 nt, Artificial Sequence
  Synthetic
gcucccaacgggccgugguc

SEQ ID NO: 3082 - RNA, 20 nt, Artificial Sequence
  Synthetic
ggagcucuaauccccacgcc

SEQ ID NO: 3083 - RNA, 17 nt, Artificial Sequence
  Synthetic
agcauccaaucccgugg

SEQ ID NO: 3084 - RNA, 20 nt, Artificial Sequence
  Synthetic
agugcagaauaugccccgca

SEQ ID NO: 3085 - RNA, 17 nt, Artificial Sequence
  Synthetic
augucucgccgcaagca

SEQ ID NO: 3086 - RNA, 20 nt, Artificial Sequence
  Synthetic
auucccguuugcuuaagugc

SEQ ID NO: 3087 - RNA, 17 nt, Artificial Sequence
  Synthetic
cauccucuggcgugacc

SEQ ID NO: 3088 - RNA, 17 nt, Artificial Sequence
  Synthetic
cccaacgggccgugguc

SEQ ID NO: 3089 - RNA, 20 nt, Artificial Sequence
  Synthetic
cccccaaugggaaguucauc

SEQ ID NO: 3090 - RNA, 17 nt, Artificial Sequence
  Synthetic
cccguuugcuuaagugc

SEQ ID NO: 3091 - RNA, 20 nt, Artificial Sequence
  Synthetic
cgucauccucuggcgugacc

SEQ ID NO: 3092 - RNA, 17 nt, Artificial Sequence
  Synthetic
ucaucucgauuggugaa

SEQ ID NO: 3093 - RNA, 17 nt, Artificial Sequence
  Synthetic
uccaaucccguggaggu

SEQ ID NO: 3094 - RNA, 20 nt, Artificial Sequence
  Synthetic
ucccguuugcuuaagugcug

SEQ ID NO: 3095 - RNA, 20 nt, Artificial Sequence
  Synthetic
ugaaccagaccacggcccgu

SEQ ID NO: 3096 - RNA, 17 nt, Artificial Sequence
  Synthetic
ugcagaauaugccccgc

SEQ ID NO: 3097 - RNA, 20 nt, Artificial Sequence
  Synthetic
uggcauccaggucacgccag

SEQ ID NO: 3098 - RNA, 17 nt, Artificial Sequence
  Synthetic
uuaucaacgucaucuag

SEQ ID NO: 3099 - RNA, 17 nt, Artificial Sequence
  Synthetic
uucaucucgauugguga

SEQ ID NO: 3100 - RNA, 20 nt, Artificial Sequence
  Synthetic
gaaaaaagcauccaaucccg

SEQ ID NO: 3101 - RNA, 20 nt, Artificial Sequence
  Synthetic
gaaccagaccacggcccguu

SEQ ID NO: 3102 - RNA, 20 nt, Artificial Sequence
  Synthetic
gaccuggaugccaaccucca

SEQ ID NO: 3103 - RNA, 20 nt, Artificial Sequence
  Synthetic
gagcucuaauccccacgccu

SEQ ID NO: 3104 - RNA, 20 nt, Artificial Sequence
  Synthetic
gaucaugaccuccucaccug

SEQ ID NO: 3105 - RNA, 17 nt, Artificial Sequence
  Synthetic
gaugaacuucccauugg

SEQ ID NO: 3106 - RNA, 17 nt, Artificial Sequence
  Synthetic
gaugaugaaccagacca

SEQ ID NO: 3107 - RNA, 20 nt, Artificial Sequence
  Synthetic
gaugcuuuuuucaucucgau

SEQ ID NO: 3108 - RNA, 17 nt, Artificial Sequence
  Synthetic
gcacucaucccaggcgu

SEQ ID NO: 3109 - RNA, 20 nt, Artificial Sequence
  Synthetic
gcauauucugcacucauccc

SEQ ID NO: 3110 - RNA, 20 nt, Artificial Sequence
  Synthetic
gccagaugaacuucccauug

SEQ ID NO: 3111 - RNA, 20 nt, Artificial Sequence
  Synthetic
gcccguugggagcuccagaa

SEQ ID NO: 3112 - RNA, 17 nt, Artificial Sequence
  Synthetic
gcuauguguuccuguuu

SEQ ID NO: 3113 - RNA, 17 nt, Artificial Sequence
  Synthetic
gcuccaugugcagaacg

SEQ ID NO: 3114 - RNA, 17 nt, Artificial Sequence
  Synthetic
gcucuaauccccacgcc

SEQ ID NO: 3115 - RNA, 20 nt, Artificial Sequence
  Synthetic
gcugggguuugccuugcuug

SEQ ID NO: 3116 - RNA, 17 nt, Artificial Sequence
  Synthetic
gcuuuuuucaucucgau

SEQ ID NO: 3117 - RNA, 17 nt, Artificial Sequence
  Synthetic
ggcacugcccacaggug

SEQ ID NO: 3118 - RNA, 20 nt, Artificial Sequence
  Synthetic
ggcacugcccacaggugagg

SEQ ID NO: 3119 - RNA, 20 nt, Artificial Sequence
  Synthetic
ggcccguugggagcuccaga

SEQ ID NO: 3120 - RNA, 17 nt, Artificial Sequence
  Synthetic
gggguuugccuugcuug

SEQ ID NO: 3121 - RNA, 17 nt, Artificial Sequence
  Synthetic
guaagaauggcuucaag

SEQ ID NO: 3122 - RNA, 20 nt, Artificial Sequence
  Synthetic
gugcagaacgaggggaggag

SEQ ID NO: 3123 - RNA, 20 nt, Artificial Sequence
  Synthetic
gugccagaugaacuucccau

SEQ ID NO: 3124 - RNA, 20 nt, Artificial Sequence
  Synthetic
guucaucuggcacugcccac

SEQ ID NO: 3125 - RNA, 17 nt, Artificial Sequence
  Synthetic
guugggagcuccagaag

SEQ ID NO: 3126 - RNA, 17 nt, Artificial Sequence
  Synthetic
aaaagcauccaaucccg

SEQ ID NO: 3127 - RNA, 20 nt, Artificial Sequence
  Synthetic
aaaagcauccaaucccgugg

SEQ ID NO: 3128 - RNA, 20 nt, Artificial Sequence
  Synthetic
aaaauaagaaugucccccaa

SEQ ID NO: 3129 - RNA, 17 nt, Artificial Sequence
  Synthetic
aaacaaucgucauccuc

SEQ ID NO: 3130 - RNA, 17 nt, Artificial Sequence
  Synthetic
aaacggaaacaaugcaa

SEQ ID NO: 3131 - RNA, 17 nt, Artificial Sequence
  Synthetic
aaacuucugcacuggag

SEQ ID NO: 3132 - RNA, 20 nt, Artificial Sequence
  Synthetic
aaauaagaaugucccccaau

SEQ ID NO: 3133 - RNA, 20 nt, Artificial Sequence
  Synthetic
aaccccagcacuuaagcaaa

SEQ ID NO: 3134 - RNA, 20 nt, Artificial Sequence
  Synthetic
aagaauggcuucaagaggcu

SEQ ID NO: 3135 - RNA, 17 nt, Artificial Sequence
  Synthetic
aauggcuucaagaggcu

SEQ ID NO: 3136 - RNA, 20 nt, Artificial Sequence
  Synthetic
acagaugaugaaccagacca

SEQ ID NO: 3137 - RNA, 17 nt, Artificial Sequence
  Synthetic
accagaccacggcccgu

SEQ ID NO: 3138 - RNA, 20 nt, Artificial Sequence
  Synthetic
accccagcacuuaagcaaac

SEQ ID NO: 3139 - RNA, 20 nt, Artificial Sequence
  Synthetic
accuggaugccaaccuccac

SEQ ID NO: 3140 - RNA, 17 nt, Artificial Sequence
  Synthetic
acugcccacaggugagg

SEQ ID NO: 3141 - RNA, 20 nt, Artificial Sequence
  Synthetic
agagcuccaugugcagaacg

SEQ ID NO: 3142 - RNA, 17 nt, Artificial Sequence
  Synthetic
agaugaacuucccauug

SEQ ID NO: 3143 - RNA, 20 nt, Artificial Sequence
  Synthetic
agcuccaugugcagaacgag

SEQ ID NO: 3144 - RNA, 17 nt, Artificial Sequence
  Synthetic
aggaauuugccccaaac

SEQ ID NO: 3145 - RNA, 20 nt, Artificial Sequence
  Synthetic
aggaggucaugauccccuuc

SEQ ID NO: 3146 - RNA, 17 nt, Artificial Sequence
  Synthetic
aggucaugauccccuuc

SEQ ID NO: 3147 - RNA, 17 nt, Artificial Sequence
  Synthetic
auaaacuucugcacugg

SEQ ID NO: 3148 - RNA, 17 nt, Artificial Sequence
  Synthetic
auaagaaugucccccaa

SEQ ID NO: 3149 - RNA, 20 nt, Artificial Sequence
  Synthetic
aucaugaccuccucaccugu

SEQ ID NO: 3150 - RNA, 20 nt, Artificial Sequence
  Synthetic
aucucgauuggugaagggga

SEQ ID NO: 3151 - RNA, 17 nt, Artificial Sequence
  Synthetic
augaccuccucaccugu

SEQ ID NO: 3152 - RNA, 17 nt, Artificial Sequence
  Synthetic
augugcagaacgagggg

SEQ ID NO: 3153 - RNA, 17 nt, Artificial Sequence
  Synthetic
auuggugaaggggaagg

SEQ ID NO: 3154 - RNA, 20 nt, Artificial Sequence
  Synthetic
cacaaacggaaacaaugcaa

SEQ ID NO: 3155 - RNA, 17 nt, Artificial Sequence
  Synthetic
cacucaucccaggcgug

SEQ ID NO: 3156 - RNA, 17 nt, Artificial Sequence
  Synthetic
cagaacgaggggaggag

SEQ ID NO: 3157 - RNA, 17 nt, Artificial Sequence
  Synthetic
cagaugaacuucccauu

SEQ ID NO: 3158 - RNA, 17 nt, Artificial Sequence
  Synthetic
cagcuuuuucuaagcag

SEQ ID NO: 3159 - RNA, 17 nt, Artificial Sequence
  Synthetic
cauccaggucacgccag

SEQ ID NO: 3160 - RNA, 17 nt, Artificial Sequence
  Synthetic
caucucgauuggugaag

SEQ ID NO: 3161 - RNA, 17 nt, Artificial Sequence
  Synthetic
caucuggcacugcccac

SEQ ID NO: 3162 - RNA, 17 nt, Artificial Sequence
  Synthetic
caugaccuccucaccug

SEQ ID NO: 3163 - RNA, 17 nt, Artificial Sequence
  Synthetic
ccaaugggaaguucauc

SEQ ID NO: 3164 - RNA, 20 nt, Artificial Sequence
  Synthetic
ccacagcuuuuucuaagcag

SEQ ID NO: 3165 - RNA, 17 nt, Artificial Sequence
  Synthetic
ccagaccacggcccguu

SEQ ID NO: 3166 - RNA, 17 nt, Artificial Sequence
  Synthetic
ccagaugaacuucccau

SEQ ID NO: 3167 - RNA, 20 nt, Artificial Sequence
  Synthetic
ccagaugaacuucccauugg

SEQ ID NO: 3168 - RNA, 17 nt, Artificial Sequence
  Synthetic
ccagcacuuaagcaaac

SEQ ID NO: 3169 - RNA, 17 nt, Artificial Sequence
  Synthetic
cccagcacuuaagcaaa

SEQ ID NO: 3170 - RNA, 20 nt, Artificial Sequence
  Synthetic
ccccuucuggagcucccaac

SEQ ID NO: 3171 - RNA, 20 nt, Artificial Sequence
  Synthetic
cccguugggagcuccagaag

SEQ ID NO: 3172 - RNA, 17 nt, Artificial Sequence
  Synthetic
ccguugggagcuccaga

SEQ ID NO: 3173 - RNA, 17 nt, Artificial Sequence
  Synthetic
ccguuugcuuaagugcu

SEQ ID NO: 3174 - RNA, 20 nt, Artificial Sequence
  Synthetic
ccucugcuuagaaaaagcug

SEQ ID NO: 3175 - RNA, 17 nt, Artificial Sequence
  Synthetic
ccuucuggagcucccaa

SEQ ID NO: 3176 - RNA, 17 nt, Artificial Sequence
  Synthetic
cguggagguuggcaucc

SEQ ID NO: 3177 - RNA, 17 nt, Artificial Sequence
  Synthetic
cguugggagcuccagaa

SEQ ID NO: 3178 - RNA, 17 nt, Artificial Sequence
  Synthetic
cguuugcuuaagugcug

SEQ ID NO: 3179 - RNA, 17 nt, Artificial Sequence
  Synthetic
cuauguguuccuguuug

SEQ ID NO: 3180 - RNA, 17 nt, Artificial Sequence
  Synthetic
cuccaugugcagaacga

SEQ ID NO: 3181 - RNA, 17 nt, Artificial Sequence
  Synthetic
cucuaauccccacgccu

SEQ ID NO: 3182 - RNA, 20 nt, Artificial Sequence
  Synthetic
cugcacucaucccaggcgug

SEQ ID NO: 3183 - RNA, 20 nt, Artificial Sequence
  Synthetic
cugcuauguguuccuguuug

SEQ ID NO: 3184 - RNA, 17 nt, Artificial Sequence
  Synthetic
cugcuuagaaaaagcug

SEQ ID NO: 3185 - RNA, 20 nt, Artificial Sequence
  Synthetic
cuggagcucccaacgggccg

SEQ ID NO: 3186 - RNA, 17 nt, Artificial Sequence
  Synthetic
cuggaugccaaccucca

SEQ ID NO: 3187 - RNA, 17 nt, Artificial Sequence
  Synthetic
cuucuggagcucccaac

SEQ ID NO: 3188 - RNA, 17 nt, Artificial Sequence
  Synthetic
uaaacuucugcacugga

SEQ ID NO: 3189 - RNA, 17 nt, Artificial Sequence
  Synthetic
uaagaaugucccccaau

SEQ ID NO: 3190 - RNA, 20 nt, Artificial Sequence
  Synthetic
uagaggaauuugccccaaac

SEQ ID NO: 3191 - RNA, 17 nt, Artificial Sequence
  Synthetic
uauucugcacucauccc

SEQ ID NO: 3192 - RNA, 17 nt, Artificial Sequence
  Synthetic
uccaugugcagaacgag

SEQ ID NO: 3193 - RNA, 20 nt, Artificial Sequence
  Synthetic
uccaugugcagaacgagggg

SEQ ID NO: 3194 - RNA, 17 nt, Artificial Sequence
  Synthetic
uccccucguucugcaca

SEQ ID NO: 3195 - RNA, 20 nt, Artificial Sequence
  Synthetic
uccccuucuggagcucccaa

SEQ ID NO: 3196 - RNA, 20 nt, Artificial Sequence
  Synthetic
ucccguggagguuggcaucc

SEQ ID NO: 3197 - RNA, 20 nt, Artificial Sequence
  Synthetic
uccuccccucguucugcaca

SEQ ID NO: 3198 - RNA, 17 nt, Artificial Sequence
  Synthetic
ucgauuggugaagggga

SEQ ID NO: 3199 - RNA, 20 nt, Artificial Sequence
  Synthetic
ucgauuggugaaggggaagg

SEQ ID NO: 3200 - RNA, 20 nt, Artificial Sequence
  Synthetic
ucugcacucaucccaggcgu

SEQ ID NO: 3201 - RNA, 20 nt, Artificial Sequence
  Synthetic
ucuggcacugcccacaggug

SEQ ID NO: 3202 - RNA, 20 nt, Artificial Sequence
  Synthetic
ucuguaagaauggcuucaag

SEQ ID NO: 3203 - RNA, 17 nt, Artificial Sequence
  Synthetic
ugcacucaucccaggcg

SEQ ID NO: 3204 - RNA, 20 nt, Artificial Sequence
  Synthetic
ugccagaugaacuucccauu

SEQ ID NO: 3205 - RNA, 17 nt, Artificial Sequence
  Synthetic
ugcuauguguuccuguu

SEQ ID NO: 3206 - RNA, 17 nt, Artificial Sequence
  Synthetic
uggaugccaaccuccac

SEQ ID NO: 3207 - RNA, 20 nt, Artificial Sequence
  Synthetic
ugguucaucaucuguaagaa

SEQ ID NO: 3208 - RNA, 20 nt, Artificial Sequence
  Synthetic
uguuuaucaacgucaucuag

SEQ ID NO: 3209 - RNA, 20 nt, Artificial Sequence
  Synthetic
uuauuuuuaucgagcacaaa

SEQ ID NO: 3210 - RNA, 17 nt, Artificial Sequence
  Synthetic
uucaucaucuguaagaa

SEQ ID NO: 3211 - RNA, 20 nt, Artificial Sequence
  Synthetic
uucccguuugcuuaagugcu

SEQ ID NO: 3212 - RNA, 20 nt, Artificial Sequence
  Synthetic
uucugcacucaucccaggcg

SEQ ID NO: 3213 - RNA, 20 nt, Artificial Sequence
  Synthetic
uuucaucucgauuggugaag

SEQ ID NO: 3214 - RNA, 20 nt, Artificial Sequence
  Synthetic
uuuucaucucgauuggugaa

SEQ ID NO: 3215 - RNA, 17 nt, Artificial Sequence
  Synthetic
uuuuuaucgagcacaaa

SEQ ID NO: 3216 - RNA, 20 nt, Artificial Sequence
  Synthetic
uuuuucaucucgauugguga

SEQ ID NO: 3217 - RNA, 17 nt, Artificial Sequence
  Synthetic
uaugcgguccgacucgc

SEQ ID NO: 3218 - RNA, 17 nt, Artificial Sequence
  Synthetic
ucggaccgcauagacga

SEQ ID NO: 3219 - RNA, 17 nt, Artificial Sequence
  Synthetic
uggguacuacgccgaau

SEQ ID NO: 3220 - RNA, 17 nt, Artificial Sequence
  Synthetic
gguacuacgccgaaugg

SEQ ID NO: 3221 - RNA, 17 nt, Artificial Sequence
  Synthetic
uugcgacgaagacucgg

SEQ ID NO: 3222 - RNA, 17 nt, Artificial Sequence
  Synthetic
cuggguacuacgccgaa

SEQ ID NO: 3223 - RNA, 17 nt, Artificial Sequence
  Synthetic
ggguacuacgccgaaug

SEQ ID NO: 3224 - RNA, 17 nt, Artificial Sequence
  Synthetic
ucggacuugaccgucau

SEQ ID NO: 3225 - RNA, 17 nt, Artificial Sequence
  Synthetic
agggauaccaacccgcg

SEQ ID NO: 3226 - RNA, 17 nt, Artificial Sequence
  Synthetic
cgcgcucaaguccgugg

SEQ ID NO: 3227 - RNA, 17 nt, Artificial Sequence
  Synthetic
cgaggagugcuccgacg

SEQ ID NO: 3228 - RNA, 17 nt, Artificial Sequence
  Synthetic
gucggacuugaccguca

SEQ ID NO: 3229 - RNA, 17 nt, Artificial Sequence
  Synthetic
ugcacgcguggucgcac

SEQ ID NO: 3230 - RNA, 17 nt, Artificial Sequence
  Synthetic
cagcgcgcucaaguccg

SEQ ID NO: 3231 - RNA, 17 nt, Artificial Sequence
  Synthetic
uaccaacccgcgggguc

SEQ ID NO: 3232 - RNA, 17 nt, Artificial Sequence
  Synthetic
guggcucgccggcuacg

SEQ ID NO: 3233 - RNA, 17 nt, Artificial Sequence
  Synthetic
cggacuugaccgucaug

SEQ ID NO: 3234 - RNA, 17 nt, Artificial Sequence
  Synthetic
caccgcauagagcgccu

SEQ ID NO: 3235 - RNA, 17 nt, Artificial Sequence
  Synthetic
gcgcaucaagcucgaga

SEQ ID NO: 3236 - RNA, 17 nt, Artificial Sequence
  Synthetic
ggcccggaccacuaaua

SEQ ID NO: 3237 - RNA, 17 nt, Artificial Sequence
  Synthetic
gcccggaccacuaauau

SEQ ID NO: 3238 - RNA, 17 nt, Artificial Sequence
  Synthetic
gcauaagcgcggccacc

SEQ ID NO: 3239 - RNA, 17 nt, Artificial Sequence
  Synthetic
aggcgcucuaugcggug

SEQ ID NO: 3240 - RNA, 17 nt, Artificial Sequence
  Synthetic
acggucaaguccgacga

SEQ ID NO: 3241 - RNA, 17 nt, Artificial Sequence
  Synthetic
cgaggccgacucgcccg

SEQ ID NO: 3242 - RNA, 17 nt, Artificial Sequence
  Synthetic
accgcauagagcgccug

SEQ ID NO: 3243 - RNA, 17 nt, Artificial Sequence
  Synthetic
cgaccacgcgugcaccc

SEQ ID NO: 3244 - RNA, 17 nt, Artificial Sequence
  Synthetic
guacacguucuccgugu

SEQ ID NO: 3245 - RNA, 17 nt, Artificial Sequence
  Synthetic
cacuugcgacgaagacu

SEQ ID NO: 3246 - RNA, 17 nt, Artificial Sequence
  Synthetic
cggguugguaucccuuc

SEQ ID NO: 3247 - RNA, 17 nt, Artificial Sequence
  Synthetic
cucgucggagcacuccu

SEQ ID NO: 3248 - RNA, 17 nt, Artificial Sequence
  Synthetic
cccggaccacuaauaug

SEQ ID NO: 3249 - RNA, 17 nt, Artificial Sequence
  Synthetic
ucggugguggacuaaac

SEQ ID NO: 3250 - RNA, 17 nt, Artificial Sequence
  Synthetic
caggcgcucuaugcggu

SEQ ID NO: 3251 - RNA, 17 nt, Artificial Sequence
  Synthetic
aagggauaccaacccgc

SEQ ID NO: 3252 - RNA, 17 nt, Artificial Sequence
  Synthetic
ggcgcucuaugcggugg

SEQ ID NO: 3253 - RNA, 17 nt, Artificial Sequence
  Synthetic
ccaccgcauagagcgcc

SEQ ID NO: 3254 - RNA, 17 nt, Artificial Sequence
  Synthetic
uacucgcaguggcucgc

SEQ ID NO: 3255 - RNA, 17 nt, Artificial Sequence
  Synthetic
cgggcgagucggccucg

SEQ ID NO: 3256 - RNA, 17 nt, Artificial Sequence
  Synthetic
uacacguucuccguguu

SEQ ID NO: 3257 - RNA, 17 nt, Artificial Sequence
  Synthetic
agcacgccccauauuag

SEQ ID NO: 3258 - RNA, 17 nt, Artificial Sequence
  Synthetic
gaagggauaccaacccg

SEQ ID NO: 3259 - RNA, 17 nt, Artificial Sequence
  Synthetic
uugggcaucgcggccgg

SEQ ID NO: 3260 - RNA, 17 nt, Artificial Sequence
  Synthetic
ccgggcgagucggccuc

SEQ ID NO: 3261 - RNA, 17 nt, Artificial Sequence
  Synthetic
gguggagagaccgucgu

SEQ ID NO: 3262 - RNA, 17 nt, Artificial Sequence
  Synthetic
guugggcaucgcggccg

SEQ ID NO: 3263 - RNA, 17 nt, Artificial Sequence
  Synthetic
agaacguguacucgcag

SEQ ID NO: 3264 - RNA, 17 nt, Artificial Sequence
  Synthetic
accaacccgcgggguca

SEQ ID NO: 3265 - RNA, 17 nt, Artificial Sequence
  Synthetic
cacgagaacagcucgcg

SEQ ID NO: 3266 - RNA, 17 nt, Artificial Sequence
  Synthetic
uauuagugguccgggcc

SEQ ID NO: 3267 - RNA, 17 nt, Artificial Sequence
  Synthetic
cgucgcaagugucccug

SEQ ID NO: 3268 - RNA, 17 nt, Artificial Sequence
  Synthetic
cccgcgagcuguucucg

SEQ ID NO: 3269 - RNA, 17 nt, Artificial Sequence
  Synthetic
ugcgccggugcaccacc

SEQ ID NO: 3270 - RNA, 17 nt, Artificial Sequence
  Synthetic
cugcccgacgucaugca

SEQ ID NO: 3271 - RNA, 17 nt, Artificial Sequence
  Synthetic
gacgaagacucgguggc

SEQ ID NO: 3272 - RNA, 17 nt, Artificial Sequence
  Synthetic
ccugcccgacgucaugc

SEQ ID NO: 3273 - RNA, 17 nt, Artificial Sequence
  Synthetic
aagggcggcuugcuacc

SEQ ID NO: 3274 - RNA, 17 nt, Artificial Sequence
  Synthetic
ggguggacuacggcuuc

SEQ ID NO: 3275 - RNA, 17 nt, Artificial Sequence
  Synthetic
ucgcuggugccggguuc

SEQ ID NO: 3276 - RNA, 17 nt, Artificial Sequence
  Synthetic
ggcgagaagcauaagcg

SEQ ID NO: 3277 - RNA, 17 nt, Artificial Sequence
  Synthetic
ggacuugagcgcgcugc

SEQ ID NO: 3278 - RNA, 17 nt, Artificial Sequence
  Synthetic
cucgguggccggcgagu

SEQ ID NO: 3279 - RNA, 17 nt, Artificial Sequence
  Synthetic
cccgaggccgacucgcc

SEQ ID NO: 3280 - RNA, 17 nt, Artificial Sequence
  Synthetic
cccgggcgagucggccu

SEQ ID NO: 3281 - RNA, 17 nt, Artificial Sequence
  Synthetic
ccgcauagagcgccugg

SEQ ID NO: 3282 - RNA, 17 nt, Artificial Sequence
  Synthetic
uguugggcaucgcggcc

SEQ ID NO: 3283 - RNA, 17 nt, Artificial Sequence
  Synthetic
guguugggcaucgcggc

SEQ ID NO: 3284 - RNA, 17 nt, Artificial Sequence
  Synthetic
ucucucgauacugaucc

SEQ ID NO: 3285 - RNA, 17 nt, Artificial Sequence
  Synthetic
acccgagugccuuugac

SEQ ID NO: 3286 - RNA, 17 nt, Artificial Sequence
  Synthetic
uccgacgaggaggcaaa

SEQ ID NO: 3287 - RNA, 17 nt, Artificial Sequence
  Synthetic
acccggcaccagcgacu

SEQ ID NO: 3288 - RNA, 17 nt, Artificial Sequence
  Synthetic
ccccguucuccgggauc

SEQ ID NO: 3289 - RNA, 17 nt, Artificial Sequence
  Synthetic
ccgaggccgacucgccc

SEQ ID NO: 3290 - RNA, 17 nt, Artificial Sequence
  Synthetic
ccccauauuaguggucc

SEQ ID NO: 3291 - RNA, 17 nt, Artificial Sequence
  Synthetic
gacuuggacuugaccgg

SEQ ID NO: 3292 - RNA, 17 nt, Artificial Sequence
  Synthetic
gccccauauuagugguc

SEQ ID NO: 3293 - RNA, 17 nt, Artificial Sequence
  Synthetic
aggguggacuacggcuu

SEQ ID NO: 3294 - RNA, 17 nt, Artificial Sequence
  Synthetic
caaaucgucccccauga

SEQ ID NO: 3295 - RNA, 17 nt, Artificial Sequence
  Synthetic
cgacgucaugcagggca

SEQ ID NO: 3296 - RNA, 17 nt, Artificial Sequence
  Synthetic
ggccgcgaugcccaaca

SEQ ID NO: 3297 - RNA, 17 nt, Artificial Sequence
  Synthetic
ccaggcgcucuaugcgg

SEQ ID NO: 3298 - RNA, 17 nt, Artificial Sequence
  Synthetic
ccugaucccggagaacg

SEQ ID NO: 3299 - RNA, 17 nt, Artificial Sequence
  Synthetic
ccaacccgcggggucag

SEQ ID NO: 3300 - RNA, 17 nt, Artificial Sequence
  Synthetic
ggcgagucggccucggg

SEQ ID NO: 3301 - RNA, 17 nt, Artificial Sequence
  Synthetic
ggcaaaaggcgauuguc

SEQ ID NO: 3302 - RNA, 17 nt, Artificial Sequence
  Synthetic
uuuggacaggccccccg

SEQ ID NO: 3303 - RNA, 17 nt, Artificial Sequence
  Synthetic
gcggcuugcuaccuggc

SEQ ID NO: 3304 - RNA, 17 nt, Artificial Sequence
  Synthetic
ggacuugaccgucaugg

SEQ ID NO: 3305 - RNA, 17 nt, Artificial Sequence
  Synthetic
ggagugcuccgacgagg

SEQ ID NO: 3306 - RNA, 17 nt, Artificial Sequence
  Synthetic
auuagugguccgggccc

SEQ ID NO: 3307 - RNA, 17 nt, Artificial Sequence
  Synthetic
ccacgagaacagcucgc

SEQ ID NO: 3308 - RNA, 17 nt, Artificial Sequence
  Synthetic
guaucgagagaggcuuc

SEQ ID NO: 3309 - RNA, 17 nt, Artificial Sequence
  Synthetic
cuccguguugggcaucg

SEQ ID NO: 3310 - RNA, 17 nt, Artificial Sequence
  Synthetic
caaacucccguucuccg

SEQ ID NO: 3311 - RNA, 17 nt, Artificial Sequence
  Synthetic
accugaucccggagaac

SEQ ID NO: 3312 - RNA, 17 nt, Artificial Sequence
  Synthetic
ggcacuguuaauggccg

SEQ ID NO: 3313 - RNA, 17 nt, Artificial Sequence
  Synthetic
uucuccgggaucagguu

SEQ ID NO: 3314 - RNA, 17 nt, Artificial Sequence
  Synthetic
uauggagccucccgcca

SEQ ID NO: 3315 - RNA, 17 nt, Artificial Sequence
  Synthetic
cuugaugcgcuuagaga

SEQ ID NO: 3316 - RNA, 17 nt, Artificial Sequence
  Synthetic
uagcaagccgcccuucc

SEQ ID NO: 3317 - RNA, 17 nt, Artificial Sequence
  Synthetic
ccggcuacgcggccucc

SEQ ID NO: 3318 - RNA, 17 nt, Artificial Sequence
  Synthetic
uccaagugaugucucgg

SEQ ID NO: 3319 - RNA, 17 nt, Artificial Sequence
  Synthetic
gaacagcucgcggggcg

SEQ ID NO: 3320 - RNA, 17 nt, Artificial Sequence
  Synthetic
gcugcgguugaauccaa

SEQ ID NO: 3321 - RNA, 17 nt, Artificial Sequence
  Synthetic
ugacuuggacuugaccg

SEQ ID NO: 3322 - RNA, 17 nt, Artificial Sequence
  Synthetic
cccggagaacggggacg

SEQ ID NO: 3323 - RNA, 17 nt, Artificial Sequence
  Synthetic
guggcgcuucagcuugc

SEQ ID NO: 3324 - RNA, 17 nt, Artificial Sequence
  Synthetic
guucuccgggaucaggu

SEQ ID NO: 3325 - RNA, 17 nt, Artificial Sequence
  Synthetic
cagugccaucgucuaug

SEQ ID NO: 3326 - RNA, 17 nt, Artificial Sequence
  Synthetic
ucuccgggaucagguug

SEQ ID NO: 3327 - RNA, 17 nt, Artificial Sequence
  Synthetic
gacgauggcacuguuaa

SEQ ID NO: 3328 - RNA, 17 nt, Artificial Sequence
  Synthetic
cugcuccccgggcgagu

SEQ ID NO: 3329 - RNA, 17 nt, Artificial Sequence
  Synthetic
cggugguggacuaaaca

SEQ ID NO: 3330 - RNA, 17 nt, Artificial Sequence
  Synthetic
cucgcggggcgcggucg

SEQ ID NO: 3331 - RNA, 17 nt, Artificial Sequence
  Synthetic
augcccugcaugacguc

SEQ ID NO: 3332 - RNA, 17 nt, Artificial Sequence
  Synthetic
uggacuugaccgggggc

SEQ ID NO: 3333 - RNA, 17 nt, Artificial Sequence
  Synthetic
accaccgagacaucacu

SEQ ID NO: 3334 - RNA, 17 nt, Artificial Sequence
  Synthetic
ggaguucgaccugcccc

SEQ ID NO: 3335 - RNA, 17 nt, Artificial Sequence
  Synthetic
ccugcaugacgucgggc

SEQ ID NO: 3336 - RNA, 17 nt, Artificial Sequence
  Synthetic
cugcaugacgucgggca

SEQ ID NO: 3337 - RNA, 17 nt, Artificial Sequence
  Synthetic
aggaucaguaucgagag

SEQ ID NO: 3338 - RNA, 17 nt, Artificial Sequence
  Synthetic
ggacuugaccgggggcu

SEQ ID NO: 3339 - RNA, 17 nt, Artificial Sequence
  Synthetic
aaaggcacucgggugau

SEQ ID NO: 3340 - RNA, 17 nt, Artificial Sequence
  Synthetic
uggacggagggaucucg

SEQ ID NO: 3341 - RNA, 17 nt, Artificial Sequence
  Synthetic
cccccaggcgcucuaug

SEQ ID NO: 3342 - RNA, 17 nt, Artificial Sequence
  Synthetic
ccgccauggauuucucu

SEQ ID NO: 3343 - RNA, 17 nt, Artificial Sequence
  Synthetic
ggcgcggucgugggcgu

SEQ ID NO: 3344 - RNA, 17 nt, Artificial Sequence
  Synthetic
aaccugaucccggagaa

SEQ ID NO: 3345 - RNA, 17 nt, Artificial Sequence
  Synthetic
caugcccugcaugacgu

SEQ ID NO: 3346 - RNA, 17 nt, Artificial Sequence
  Synthetic
cgcuggugccggguucc

SEQ ID NO: 3347 - RNA, 17 nt, Artificial Sequence
  Synthetic
ccuggaggccgcguagc

SEQ ID NO: 3348 - RNA, 17 nt, Artificial Sequence
  Synthetic
ccccugaccccgcgggu

SEQ ID NO: 3349 - RNA, 17 nt, Artificial Sequence
  Synthetic
gcuuaugcuucucgccc

SEQ ID NO: 3350 - RNA, 17 nt, Artificial Sequence
  Synthetic
aagucaugcgaguucug

SEQ ID NO: 3351 - RNA, 17 nt, Artificial Sequence
  Synthetic
caccaagucgcuggugc

SEQ ID NO: 3352 - RNA, 17 nt, Artificial Sequence
  Synthetic
cccgagugccuuugaca

SEQ ID NO: 3353 - RNA, 17 nt, Artificial Sequence
  Synthetic
caugacuuggacuugac

SEQ ID NO: 3354 - RNA, 17 nt, Artificial Sequence
  Synthetic
cgaccccaaccugaucc

SEQ ID NO: 3355 - RNA, 17 nt, Artificial Sequence
  Synthetic
accaagucgcuggugcc

SEQ ID NO: 3356 - RNA, 17 nt, Artificial Sequence
  Synthetic
aagugaugucucggugg

SEQ ID NO: 3357 - RNA, 17 nt, Artificial Sequence
  Synthetic
cuucuccacaccgcccg

SEQ ID NO: 3358 - RNA, 17 nt, Artificial Sequence
  Synthetic
uggagucuccgaagcua

SEQ ID NO: 3359 - RNA, 17 nt, Artificial Sequence
  Synthetic
cgcuucuccacaccgcc

SEQ ID NO: 3360 - RNA, 17 nt, Artificial Sequence
  Synthetic
gcuggugccggguuccg

SEQ ID NO: 3361 - RNA, 17 nt, Artificial Sequence
  Synthetic
cgcagcggcacgggaag

SEQ ID NO: 3362 - RNA, 17 nt, Artificial Sequence
  Synthetic
gcaucgcggccgggggc

SEQ ID NO: 3363 - RNA, 17 nt, Artificial Sequence
  Synthetic
gagcacuccucggagaa

SEQ ID NO: 3364 - RNA, 17 nt, Artificial Sequence
  Synthetic
ggggggcgucgccagga

SEQ ID NO: 3365 - RNA, 17 nt, Artificial Sequence
  Synthetic
gaaagcgcccuucugcc

SEQ ID NO: 3366 - RNA, 17 nt, Artificial Sequence
  Synthetic
cuggacggagggaucuc

SEQ ID NO: 3367 - RNA, 17 nt, Artificial Sequence
  Synthetic
cggcuucgggcugagcc

SEQ ID NO: 3368 - RNA, 17 nt, Artificial Sequence
  Synthetic
gggggcgucgccaggaa

SEQ ID NO: 3369 - RNA, 17 nt, Artificial Sequence
  Synthetic
uaaccuuugcauagggc

SEQ ID NO: 3370 - RNA, 17 nt, Artificial Sequence
  Synthetic
gggcgagucggccucgg

SEQ ID NO: 3371 - RNA, 17 nt, Artificial Sequence
  Synthetic
cacaccgcccggggagc

SEQ ID NO: 3372 - RNA, 17 nt, Artificial Sequence
  Synthetic
gggaucucggggcgcag

SEQ ID NO: 3373 - RNA, 17 nt, Artificial Sequence
  Synthetic
cucgcugaagugcugca

SEQ ID NO: 3374 - RNA, 17 nt, Artificial Sequence
  Synthetic
ucggggcgcagcggcac

SEQ ID NO: 3375 - RNA, 17 nt, Artificial Sequence
  Synthetic
aaguccccugaccccgc

SEQ ID NO: 3376 - RNA, 17 nt, Artificial Sequence
  Synthetic
gccuuuugccuccucgu

SEQ ID NO: 3377 - RNA, 17 nt, Artificial Sequence
  Synthetic
caccuggccgaggccga

SEQ ID NO: 3378 - RNA, 17 nt, Artificial Sequence
  Synthetic
gguaucccuucaggacu

SEQ ID NO: 3379 - RNA, 17 nt, Artificial Sequence
  Synthetic
gugguggacuaaacagg

SEQ ID NO: 3380 - RNA, 17 nt, Artificial Sequence
  Synthetic
gcgagcuguucucgugg

SEQ ID NO: 3381 - RNA, 17 nt, Artificial Sequence
  Synthetic
agcacuccucggagaac

SEQ ID NO: 3382 - RNA, 17 nt, Artificial Sequence
  Synthetic
caugcagcacuucagcg

SEQ ID NO: 3383 - RNA, 17 nt, Artificial Sequence
  Synthetic
uggccugggugcacgcg

SEQ ID NO: 3384 - RNA, 17 nt, Artificial Sequence
  Synthetic
agcgagaggguggacua

SEQ ID NO: 3385 - RNA, 17 nt, Artificial Sequence
  Synthetic
gcacagguugcacuugu

SEQ ID NO: 3386 - RNA, 17 nt, Artificial Sequence
  Synthetic
gagaaauccauggcggg

SEQ ID NO: 3387 - RNA, 17 nt, Artificial Sequence
  Synthetic
gcagaacucgcaugacu

SEQ ID NO: 3388 - RNA, 17 nt, Artificial Sequence
  Synthetic
ucuccgaagcuaaggaa

SEQ ID NO: 3389 - RNA, 17 nt, Artificial Sequence
  Synthetic
ugacgucgggcagggcg

SEQ ID NO: 3390 - RNA, 17 nt, Artificial Sequence
  Synthetic
ggguccaagugaugucu

SEQ ID NO: 3391 - RNA, 17 nt, Artificial Sequence
  Synthetic
gcaaccugguggugcac

SEQ ID NO: 3392 - RNA, 17 nt, Artificial Sequence
  Synthetic
gguggcgcgccgccucc

SEQ ID NO: 3393 - RNA, 17 nt, Artificial Sequence
  Synthetic
gcugcccaccaagucgc

SEQ ID NO: 3394 - RNA, 17 nt, Artificial Sequence
  Synthetic
guucucgcucuugaacu

SEQ ID NO: 3395 - RNA, 17 nt, Artificial Sequence
  Synthetic
ccgcagcacccugucaa

SEQ ID NO: 3396 - RNA, 17 nt, Artificial Sequence
  Synthetic
gaaguccccugaccccg

SEQ ID NO: 3397 - RNA, 17 nt, Artificial Sequence
  Synthetic
gcgcggccaccuggccg

SEQ ID NO: 3398 - RNA, 17 nt, Artificial Sequence
  Synthetic
ggcgucgccaggaaggg

SEQ ID NO: 3399 - RNA, 17 nt, Artificial Sequence
  Synthetic
guugaauccaauggcua

SEQ ID NO: 3400 - RNA, 17 nt, Artificial Sequence
  Synthetic
cucggggcgcagcggca

SEQ ID NO: 3401 - RNA, 17 nt, Artificial Sequence
  Synthetic
ccgaggccgagggccac

SEQ ID NO: 3402 - RNA, 17 nt, Artificial Sequence
  Synthetic
cuaaacagggggggagu

SEQ ID NO: 3403 - RNA, 17 nt, Artificial Sequence
  Synthetic
gcggcacgggaagugga

SEQ ID NO: 3404 - RNA, 17 nt, Artificial Sequence
  Synthetic
cacagguugcacuugua

SEQ ID NO: 3405 - RNA, 17 nt, Artificial Sequence
  Synthetic
cagcgaggccuuccacc

SEQ ID NO: 3406 - RNA, 17 nt, Artificial Sequence
  Synthetic
aaccugcuaagaauacc

SEQ ID NO: 3407 - RNA, 17 nt, Artificial Sequence
  Synthetic
auccugguauucuuagc

SEQ ID NO: 3408 - RNA, 17 nt, Artificial Sequence
  Synthetic
ggugguggacuaaacag

SEQ ID NO: 3409 - RNA, 17 nt, Artificial Sequence
  Synthetic
cgaggccgagggccaca

SEQ ID NO: 3410 - RNA, 17 nt, Artificial Sequence
  Synthetic
guacauguguagcugcu

SEQ ID NO: 3411 - RNA, 17 nt, Artificial Sequence
  Synthetic
uugaugcgcuuagagaa

SEQ ID NO: 3412 - RNA, 17 nt, Artificial Sequence
  Synthetic
uccucguccccguucuc

SEQ ID NO: 3413 - RNA, 17 nt, Artificial Sequence
  Synthetic
augacuuggacuugacc

SEQ ID NO: 3414 - RNA, 17 nt, Artificial Sequence
  Synthetic
gucuccgaagcuaagga

SEQ ID NO: 3415 - RNA, 17 nt, Artificial Sequence
  Synthetic
gguggacuaaacagggg

SEQ ID NO: 3416 - RNA, 17 nt, Artificial Sequence
  Synthetic
gcaugugcgucuucaug

SEQ ID NO: 3417 - RNA, 17 nt, Artificial Sequence
  Synthetic
ggcacucgggugauggg

SEQ ID NO: 3418 - RNA, 17 nt, Artificial Sequence
  Synthetic
auagggcugggccggcc

SEQ ID NO: 3419 - RNA, 17 nt, Artificial Sequence
  Synthetic
ccguccagcuccccggg

SEQ ID NO: 3420 - RNA, 17 nt, Artificial Sequence
  Synthetic
gcaguaaccuuugcaua

SEQ ID NO: 3421 - RNA, 17 nt, Artificial Sequence
  Synthetic
gaucccuuccuuagcuu

SEQ ID NO: 3422 - RNA, 17 nt, Artificial Sequence
  Synthetic
aaggggcucagcgagcu

SEQ ID NO: 3423 - RNA, 17 nt, Artificial Sequence
  Synthetic
agcugacggagagcgag

SEQ ID NO: 3424 - RNA, 17 nt, Artificial Sequence
  Synthetic
ucgcggggcgcggucgu

SEQ ID NO: 3425 - RNA, 17 nt, Artificial Sequence
  Synthetic
agcggcacgggaagugg

SEQ ID NO: 3426 - RNA, 17 nt, Artificial Sequence
  Synthetic
caaaggcacucggguga

SEQ ID NO: 3427 - RNA, 17 nt, Artificial Sequence
  Synthetic
cugcaccuaguccugaa

SEQ ID NO: 3428 - RNA, 17 nt, Artificial Sequence
  Synthetic
gcuggacggagggaucu

SEQ ID NO: 3429 - RNA, 17 nt, Artificial Sequence
  Synthetic
cccugucaaaggcacuc

SEQ ID NO: 3430 - RNA, 17 nt, Artificial Sequence
  Synthetic
aaccuuugcauagggcu

SEQ ID NO: 3431 - RNA, 17 nt, Artificial Sequence
  Synthetic
cgcccggggagcagccg

SEQ ID NO: 3432 - RNA, 17 nt, Artificial Sequence
  Synthetic
ugguggacuaaacaggg

SEQ ID NO: 3433 - RNA, 17 nt, Artificial Sequence
  Synthetic
ggcccagcccuaugcaa

SEQ ID NO: 3434 - RNA, 17 nt, Artificial Sequence
  Synthetic
ccucguccccguucucc

SEQ ID NO: 3435 - RNA, 17 nt, Artificial Sequence
  Synthetic
gccagcuccccggaacc

SEQ ID NO: 3436 - RNA, 17 nt, Artificial Sequence
  Synthetic
gccggguuccggggagc

SEQ ID NO: 3437 - RNA, 17 nt, Artificial Sequence
  Synthetic
ugcaguaaccuuugcau

SEQ ID NO: 3438 - RNA, 17 nt, Artificial Sequence
  Synthetic
gcuucucgcccaggacc

SEQ ID NO: 3439 - RNA, 17 nt, Artificial Sequence
  Synthetic
ccgcccggggagcugga

SEQ ID NO: 3440 - RNA, 17 nt, Artificial Sequence
  Synthetic
ccggggagcuggacgga

SEQ ID NO: 3441 - RNA, 17 nt, Artificial Sequence
  Synthetic
cuuccggccuggcagaa

SEQ ID NO: 3442 - RNA, 17 nt, Artificial Sequence
  Synthetic
ccuagagaaauccaugg

SEQ ID NO: 3443 - RNA, 17 nt, Artificial Sequence
  Synthetic
ggagggggggcgucgcc

SEQ ID NO: 3444 - RNA, 17 nt, Artificial Sequence
  Synthetic
uacuuagaaagcgaaca

SEQ ID NO: 3445 - RNA, 17 nt, Artificial Sequence
  Synthetic
ggaggcuccauagccau

SEQ ID NO: 3446 - RNA, 17 nt, Artificial Sequence
  Synthetic
acacaucuugagcucuc

SEQ ID NO: 3447 - RNA, 17 nt, Artificial Sequence
  Synthetic
ggcaccagcgacuuggu

SEQ ID NO: 3448 - RNA, 17 nt, Artificial Sequence
  Synthetic
gggaucuuugagcugcc

SEQ ID NO: 3449 - RNA, 17 nt, Artificial Sequence
  Synthetic
gcagcagcuuuuuggac

SEQ ID NO: 3450 - RNA, 17 nt, Artificial Sequence
  Synthetic
cugcaauaugaauccca

SEQ ID NO: 3451 - RNA, 17 nt, Artificial Sequence
  Synthetic
ucugcaccuaguccuga

SEQ ID NO: 3452 - RNA, 17 nt, Artificial Sequence
  Synthetic
gaaggggcucagcgagc

SEQ ID NO: 3453 - RNA, 17 nt, Artificial Sequence
  Synthetic
uuccggggagcuggcgg

SEQ ID NO: 3454 - RNA, 17 nt, Artificial Sequence
  Synthetic
gcaccggcgcagccaca

SEQ ID NO: 3455 - RNA, 17 nt, Artificial Sequence
  Synthetic
auaugaaucccauggag

SEQ ID NO: 3456 - RNA, 17 nt, Artificial Sequence
  Synthetic
gugguccgggcccgggc

SEQ ID NO: 3457 - RNA, 17 nt, Artificial Sequence
  Synthetic
cuucacacacccccauu

SEQ ID NO: 3458 - RNA, 17 nt, Artificial Sequence
  Synthetic
guccaaaaagcugcugc

SEQ ID NO: 3459 - RNA, 17 nt, Artificial Sequence
  Synthetic
cggcaccagcgacuugg

SEQ ID NO: 3460 - RNA, 17 nt, Artificial Sequence
  Synthetic
gcuucuccacaccgccc

SEQ ID NO: 3461 - RNA, 17 nt, Artificial Sequence
  Synthetic
cgcccguguggcugcgc

SEQ ID NO: 3462 - RNA, 17 nt, Artificial Sequence
  Synthetic
cacgcacagaacacuca

SEQ ID NO: 3463 - RNA, 17 nt, Artificial Sequence
  Synthetic
uguacauguguagcugc

SEQ ID NO: 3464 - RNA, 17 nt, Artificial Sequence
  Synthetic
caccggcgcagccacac

SEQ ID NO: 3465 - RNA, 17 nt, Artificial Sequence
  Synthetic
uugcuaccuggcuggaa

SEQ ID NO: 3466 - RNA, 17 nt, Artificial Sequence
  Synthetic
acccugucaaaggcacu

SEQ ID NO: 3467 - RNA, 17 nt, Artificial Sequence
  Synthetic
ccaccuggccgaggccg

SEQ ID NO: 3468 - RNA, 17 nt, Artificial Sequence
  Synthetic
gggcggauugcagagga

SEQ ID NO: 3469 - RNA, 17 nt, Artificial Sequence
  Synthetic
cuagagaaauccauggc

SEQ ID NO: 3470 - RNA, 17 nt, Artificial Sequence
  Synthetic
ggcggaagagauggccc

SEQ ID NO: 3471 - RNA, 17 nt, Artificial Sequence
  Synthetic
ggggcggauugcagagg

SEQ ID NO: 3472 - RNA, 17 nt, Artificial Sequence
  Synthetic
guguggcaguuuucgga

SEQ ID NO: 3473 - RNA, 17 nt, Artificial Sequence
  Synthetic
gagagaggcuuccggcc

SEQ ID NO: 3474 - RNA, 17 nt, Artificial Sequence
  Synthetic
cgggugauggguggcca

SEQ ID NO: 3475 - RNA, 17 nt, Artificial Sequence
  Synthetic
cccggggagcuggacgg

SEQ ID NO: 3476 - RNA, 17 nt, Artificial Sequence
  Synthetic
uaggagacuuagagagc

SEQ ID NO: 3477 - RNA, 17 nt, Artificial Sequence
  Synthetic
cacaucuugagcucucu

SEQ ID NO: 3478 - RNA, 17 nt, Artificial Sequence
  Synthetic
ccucggccucggccagg

SEQ ID NO: 3479 - RNA, 17 nt, Artificial Sequence
  Synthetic
ggccuuccaccaggucc

SEQ ID NO: 3480 - RNA, 17 nt, Artificial Sequence
  Synthetic
ucucgcccaggaccugg

SEQ ID NO: 3481 - RNA, 17 nt, Artificial Sequence
  Synthetic
ucugcccucuuuugagc

SEQ ID NO: 3482 - RNA, 17 nt, Artificial Sequence
  Synthetic
acuaaacagggggggag

SEQ ID NO: 3483 - RNA, 17 nt, Artificial Sequence
  Synthetic
cuugaccgggggcuggg

SEQ ID NO: 3484 - RNA, 17 nt, Artificial Sequence
  Synthetic
uugaccgggggcuggga

SEQ ID NO: 3485 - RNA, 17 nt, Artificial Sequence
  Synthetic
agacuuagagagcuggc

SEQ ID NO: 3486 - RNA, 17 nt, Artificial Sequence
  Synthetic
agcccaccgcugucccc

SEQ ID NO: 3487 - RNA, 17 nt, Artificial Sequence
  Synthetic
agccauucaccagugca

SEQ ID NO: 3488 - RNA, 17 nt, Artificial Sequence
  Synthetic
gcuuccggccuggcaga

SEQ ID NO: 3489 - RNA, 17 nt, Artificial Sequence
  Synthetic
gacuuagagagcuggca

SEQ ID NO: 3490 - RNA, 17 nt, Artificial Sequence
  Synthetic
aggcccagcucaaaaga

SEQ ID NO: 3491 - RNA, 17 nt, Artificial Sequence
  Synthetic
ucgggugauggguggcc

SEQ ID NO: 3492 - RNA, 17 nt, Artificial Sequence
  Synthetic
caagagaaaccaugcac

SEQ ID NO: 3493 - RNA, 17 nt, Artificial Sequence
  Synthetic
aucuuugagcugccugg

SEQ ID NO: 3494 - RNA, 17 nt, Artificial Sequence
  Synthetic
uauucuuagcagguuaa

SEQ ID NO: 3495 - RNA, 17 nt, Artificial Sequence
  Synthetic
cugcccucuuuugagcu

SEQ ID NO: 3496 - RNA, 17 nt, Artificial Sequence
  Synthetic
ccaucucuuccgccccc

SEQ ID NO: 3497 - RNA, 17 nt, Artificial Sequence
  Synthetic
uggccgcggcugcuccc

SEQ ID NO: 3498 - RNA, 17 nt, Artificial Sequence
  Synthetic
ccuguggcccucggccu

SEQ ID NO: 3499 - RNA, 17 nt, Artificial Sequence
  Synthetic
cagcuccccgggcggug

SEQ ID NO: 3500 - RNA, 17 nt, Artificial Sequence
  Synthetic
uuugcauagggcugggc

SEQ ID NO: 3501 - RNA, 17 nt, Artificial Sequence
  Synthetic
ggcccucggccucggcc

SEQ ID NO: 3502 - RNA, 17 nt, Artificial Sequence
  Synthetic
gcugacggagagcgaga

SEQ ID NO: 3503 - RNA, 17 nt, Artificial Sequence
  Synthetic
agauguguggcaguuuu

SEQ ID NO: 3504 - RNA, 17 nt, Artificial Sequence
  Synthetic
auucuuagcagguuaaa

SEQ ID NO: 3505 - RNA, 17 nt, Artificial Sequence
  Synthetic
ucuccuagagaaaucca

SEQ ID NO: 3506 - RNA, 17 nt, Artificial Sequence
  Synthetic
ccuuugacagggugcug

SEQ ID NO: 3507 - RNA, 17 nt, Artificial Sequence
  Synthetic
ggaggggcggauugcag

SEQ ID NO: 3508 - RNA, 17 nt, Artificial Sequence
  Synthetic
uucuuagcagguuaaag

SEQ ID NO: 3509 - RNA, 17 nt, Artificial Sequence
  Synthetic
cggauugcagaggaggg

SEQ ID NO: 3510 - RNA, 17 nt, Artificial Sequence
  Synthetic
uuugagcugggccugcc

SEQ ID NO: 3511 - RNA, 17 nt, Artificial Sequence
  Synthetic
cuucagcuugcuggccu

SEQ ID NO: 3512 - RNA, 17 nt, Artificial Sequence
  Synthetic
cuugaacuuggccacca

SEQ ID NO: 3513 - RNA, 17 nt, Artificial Sequence
  Synthetic
cugcaaccauuccagcc

SEQ ID NO: 3514 - RNA, 17 nt, Artificial Sequence
  Synthetic
cauagagcgccuggggg

SEQ ID NO: 3515 - RNA, 17 nt, Artificial Sequence
  Synthetic
gggcgcggucgugggcg

SEQ ID NO: 3516 - RNA, 17 nt, Artificial Sequence
  Synthetic
ucccauggagagguggc

SEQ ID NO: 3517 - RNA, 17 nt, Artificial Sequence
  Synthetic
ggccgcggcugcucccc

SEQ ID NO: 3518 - RNA, 17 nt, Artificial Sequence
  Synthetic
auuucagagcaaccugg

SEQ ID NO: 3519 - RNA, 17 nt, Artificial Sequence
  Synthetic
gccuuccaccagguccu

SEQ ID NO: 3520 - RNA, 17 nt, Artificial Sequence
  Synthetic
ugaaucccauggagagg

SEQ ID NO: 3521 - RNA, 17 nt, Artificial Sequence
  Synthetic
uugagcugggccugccc

SEQ ID NO: 3522 - RNA, 17 nt, Artificial Sequence
  Synthetic
aggggcucagcgagcug

SEQ ID NO: 3523 - RNA, 17 nt, Artificial Sequence
  Synthetic
agggcuucucgcccgug

SEQ ID NO: 3524 - RNA, 17 nt, Artificial Sequence
  Synthetic
caccgcuguccccaggc

SEQ ID NO: 3525 - RNA, 17 nt, Artificial Sequence
  Synthetic
caaauuucagagcaacc

SEQ ID NO: 3526 - RNA, 17 nt, Artificial Sequence
  Synthetic
agagagcucaagaugug

SEQ ID NO: 3527 - RNA, 17 nt, Artificial Sequence
  Synthetic
aaccaugcacuggugaa

SEQ ID NO: 3528 - RNA, 17 nt, Artificial Sequence
  Synthetic
ccuccguccagcucccc

SEQ ID NO: 3529 - RNA, 17 nt, Artificial Sequence
  Synthetic
agugucccuguggcccu

SEQ ID NO: 3530 - RNA, 17 nt, Artificial Sequence
  Synthetic
cccuccguccagcuccc

SEQ ID NO: 3531 - RNA, 17 nt, Artificial Sequence
  Synthetic
ggccuggggacagcggu

SEQ ID NO: 3532 - RNA, 17 nt, Artificial Sequence
  Synthetic
gcccagcagcagcuuuu

SEQ ID NO: 3533 - RNA, 17 nt, Artificial Sequence
  Synthetic
caggcccagcucaaaag

SEQ ID NO: 3534 - RNA, 17 nt, Artificial Sequence
  Synthetic
cuucgggcugagccugg

SEQ ID NO: 3535 - RNA, 17 nt, Artificial Sequence
  Synthetic
cccauggagagguggcu

SEQ ID NO: 3536 - RNA, 17 nt, Artificial Sequence
  Synthetic
cccagccaccucuccau

SEQ ID NO: 3537 - RNA, 17 nt, Artificial Sequence
  Synthetic
ggguuccggggagcugg

SEQ ID NO: 3538 - RNA, 17 nt, Artificial Sequence
  Synthetic
uagggcugggccggccu

SEQ ID NO: 3539 - RNA, 17 nt, Artificial Sequence
  Synthetic
ccugggggcggaagaga

SEQ ID NO: 3540 - RNA, 17 nt, Artificial Sequence
  Synthetic
gcccaggaccuggugga

SEQ ID NO: 3541 - RNA, 17 nt, Artificial Sequence
  Synthetic
cgggcugagccuggagg

SEQ ID NO: 3542 - RNA, 17 nt, Artificial Sequence
  Synthetic
accacgagaacagcucg

SEQ ID NO: 3543 - RNA, 17 nt, Artificial Sequence
  Synthetic
cggccuggggacagcgg

SEQ ID NO: 3544 - RNA, 17 nt, Artificial Sequence
  Synthetic
uccaaaaagcugcugcu

SEQ ID NO: 3545 - RNA, 17 nt, Artificial Sequence
  Synthetic
gcgcccuucugccaggc

SEQ ID NO: 3546 - RNA, 17 nt, Artificial Sequence
  Synthetic
ucccagccaccucucca

SEQ ID NO: 3547 - RNA, 17 nt, Artificial Sequence
  Synthetic
cuccaccgccagcuccc

SEQ ID NO: 3548 - RNA, 17 nt, Artificial Sequence
  Synthetic
cugggccugcccgggcc

SEQ ID NO: 3549 - RNA, 17 nt, Artificial Sequence
  Synthetic
agggcugggccggccug

SEQ ID NO: 3550 - RNA, 17 nt, Artificial Sequence
  Synthetic
aacagggggggaguggg

SEQ ID NO: 3551 - RNA, 17 nt, Artificial Sequence
  Synthetic
ggagaacggggacgagg

SEQ ID NO: 3552 - RNA, 17 nt, Artificial Sequence
  Synthetic
ugaugcgcuuagagaag

SEQ ID NO: 3553 - RNA, 17 nt, Artificial Sequence
  Synthetic
ggauugcagaggaggga

SEQ ID NO: 3554 - RNA, 17 nt, Artificial Sequence
  Synthetic
ggccggccuggggacag

SEQ ID NO: 3555 - RNA, 17 nt, Artificial Sequence
  Synthetic
gauugcagaggagggag

SEQ ID NO: 3556 - RNA, 17 nt, Artificial Sequence
  Synthetic
auugcagaggagggagg

SEQ ID NO: 3557 - RNA, 17 nt, Artificial Sequence
  Synthetic
accgggggcugggaggg

SEQ ID NO: 3558 - RNA, 17 nt, Artificial Sequence
  Synthetic
uggagagguggcuggga

SEQ ID NO: 3559 - RNA, 17 nt, Artificial Sequence
  Synthetic
uugcagaggagggaggg

SEQ ID NO: 3560 - RNA, 17 nt, Artificial Sequence
  Synthetic
cggggacgaggaggaag

SEQ ID NO: 3561 - RNA, 17 nt, Artificial Sequence
  Synthetic
gacggagagcgagaggg

SEQ ID NO: 3562 - RNA, 17 nt, Artificial Sequence
  Synthetic
uccucccucccagcccc

SEQ ID NO: 3563 - RNA, 17 nt, Artificial Sequence
  Synthetic
gcuucagcuugcuggcc

SEQ ID NO: 3564 - RNA, 17 nt, Artificial Sequence
  Synthetic
ugcagaggagggagggg

SEQ ID NO: 3565 - RNA, 17 nt, Artificial Sequence
  Synthetic
gggcugggagggaggag

SEQ ID NO: 3566 - RNA, 17 nt, Artificial Sequence
  Synthetic
ggaagaggaggacgacg

SEQ ID NO: 3567 - RNA, 17 nt, Artificial Sequence
  Synthetic
ggggcugggagggagga

SEQ ID NO: 3568 - RNA, 17 nt, Artificial Sequence
  Synthetic
ggaggacgacgaggaag

SEQ ID NO: 3569 - RNA, 17 nt, Artificial Sequence
  Synthetic
ggaggaggaggagcuga

SEQ ID NO: 3570 - RNA, 17 nt, Artificial Sequence
  Synthetic
gggggcugggagggagg

SEQ ID NO: 3571 - RNA, 17 nt, Artificial Sequence
  Synthetic
cugggagggaggagggg

SEQ ID NO: 3572 - RNA, 17 nt, Artificial Sequence
  Synthetic
cgaggaagaggaagaag

SEQ ID NO: 3573 - RNA, 17 nt, Artificial Sequence
  Synthetic
ggacgaggaggaagagg

SEQ ID NO: 3574 - RNA, 17 nt, Artificial Sequence
  Synthetic
ggaagaagaggaggaag

SEQ ID NO: 3575 - RNA, 17 nt, Artificial Sequence
  Synthetic
ggaagaggaagaagagg

SEQ ID NO: 3576 - RNA, 17 nt, Artificial Sequence
  Synthetic
agaagaggaggaagagg

SEQ ID NO: 3577 - RNA, 17 nt, Artificial Sequence
  Synthetic
agaggaggaagaggagg

SEQ ID NO: 3578 - RNA, 17 nt, Artificial Sequence
  Synthetic
ggaggaagaggaggagg

SEQ ID NO: 3579 - RNA, 20 nt, Artificial Sequence
  Synthetic
gucuaugcgguccgacucgc

SEQ ID NO: 3580 - RNA, 20 nt, Artificial Sequence
  Synthetic
ucgucggacuugaccgucau

SEQ ID NO: 3581 - RNA, 20 nt, Artificial Sequence
  Synthetic
cgucggacuugaccgucaug

SEQ ID NO: 3582 - RNA, 20 nt, Artificial Sequence
  Synthetic
augacggucaaguccgacga

SEQ ID NO: 3583 - RNA, 20 nt, Artificial Sequence
  Synthetic
gagucggaccgcauagacga

SEQ ID NO: 3584 - RNA, 20 nt, Artificial Sequence
  Synthetic
cgggcccggaccacuaauau

SEQ ID NO: 3585 - RNA, 20 nt, Artificial Sequence
  Synthetic
gucgucggacuugaccguca

SEQ ID NO: 3586 - RNA, 20 nt, Artificial Sequence
  Synthetic
cucuggguacuacgccgaau

SEQ ID NO: 3587 - RNA, 20 nt, Artificial Sequence
  Synthetic
cuggguacuacgccgaaugg

SEQ ID NO: 3588 - RNA, 20 nt, Artificial Sequence
  Synthetic
ccgggcccggaccacuaaua

SEQ ID NO: 3589 - RNA, 20 nt, Artificial Sequence
  Synthetic
ccgcggguugguaucccuuc

SEQ ID NO: 3590 - RNA, 20 nt, Artificial Sequence
  Synthetic
ucuggguacuacgccgaaug

SEQ ID NO: 3591 - RNA, 20 nt, Artificial Sequence
  Synthetic
ggauaccaacccgcgggguc

SEQ ID NO: 3592 - RNA, 20 nt, Artificial Sequence
  Synthetic
acgccccauauuaguggucc

SEQ ID NO: 3593 - RNA, 20 nt, Artificial Sequence
  Synthetic
cacuugcgacgaagacucgg

SEQ ID NO: 3594 - RNA, 20 nt, Artificial Sequence
  Synthetic
ucucuggguacuacgccgaa

SEQ ID NO: 3595 - RNA, 20 nt, Artificial Sequence
  Synthetic
uaagcgcaucaagcucgaga

SEQ ID NO: 3596 - RNA, 20 nt, Artificial Sequence
  Synthetic
ugcgacgaagacucgguggc

SEQ ID NO: 3597 - RNA, 20 nt, Artificial Sequence
  Synthetic
cgcgcuuaugcuucucgccc

SEQ ID NO: 3598 - RNA, 20 nt, Artificial Sequence
  Synthetic
ugaagggauaccaacccgcg

SEQ ID NO: 3599 - RNA, 20 nt, Artificial Sequence
  Synthetic
gggcccggaccacuaauaug

SEQ ID NO: 3600 - RNA, 20 nt, Artificial Sequence
  Synthetic
cguguugggcaucgcggccg

SEQ ID NO: 3601 - RNA, 20 nt, Artificial Sequence
  Synthetic
uccguguugggcaucgcggc

SEQ ID NO: 3602 - RNA, 20 nt, Artificial Sequence
  Synthetic
gucggacuugaccgucaugg

SEQ ID NO: 3603 - RNA, 20 nt, Artificial Sequence
  Synthetic
gcgcaaacucccguucuccg

SEQ ID NO: 3604 - RNA, 20 nt, Artificial Sequence
  Synthetic
cuccgaggagugcuccgacg

SEQ ID NO: 3605 - RNA, 20 nt, Artificial Sequence
  Synthetic
cacggacuugagcgcgcugc

SEQ ID NO: 3606 - RNA, 20 nt, Artificial Sequence
  Synthetic
cacgccccauauuagugguc

SEQ ID NO: 3607 - RNA, 20 nt, Artificial Sequence
  Synthetic
gauaccaacccgcgggguca

SEQ ID NO: 3608 - RNA, 20 nt, Artificial Sequence
  Synthetic
cagcgcgcucaaguccgugg

SEQ ID NO: 3609 - RNA, 20 nt, Artificial Sequence
  Synthetic
gggugcacgcguggucgcac

SEQ ID NO: 3610 - RNA, 20 nt, Artificial Sequence
  Synthetic
gaagcauaagcgcggccacc

SEQ ID NO: 3611 - RNA, 20 nt, Artificial Sequence
  Synthetic
gugcgaccacgcgugcaccc

SEQ ID NO: 3612 - RNA, 20 nt, Artificial Sequence
  Synthetic
gaguacacguucuccguguu

SEQ ID NO: 3613 - RNA, 20 nt, Artificial Sequence
  Synthetic
gucucggugguggacuaaac

SEQ ID NO: 3614 - RNA, 20 nt, Artificial Sequence
  Synthetic
ccguucuccgggaucagguu

SEQ ID NO: 3615 - RNA, 20 nt, Artificial Sequence
  Synthetic
cgaguacacguucuccgugu

SEQ ID NO: 3616 - RNA, 20 nt, Artificial Sequence
  Synthetic
cggagaacguguacucgcag

SEQ ID NO: 3617 - RNA, 20 nt, Artificial Sequence
  Synthetic
gggagcacgccccauauuag

SEQ ID NO: 3618 - RNA, 20 nt, Artificial Sequence
  Synthetic
ccauauuagugguccgggcc

SEQ ID NO: 3619 - RNA, 20 nt, Artificial Sequence
  Synthetic
gccgcagaacucgcaugacu

SEQ ID NO: 3620 - RNA, 20 nt, Artificial Sequence
  Synthetic
cgccccgcgagcuguucucg

SEQ ID NO: 3621 - RNA, 20 nt, Artificial Sequence
  Synthetic
gcaguggcucgccggcuacg

SEQ ID NO: 3622 - RNA, 20 nt, Artificial Sequence
  Synthetic
cauauuagugguccgggccc

SEQ ID NO: 3623 - RNA, 20 nt, Artificial Sequence
  Synthetic
cugaagggauaccaacccgc

SEQ ID NO: 3624 - RNA, 20 nt, Artificial Sequence
  Synthetic
auaccaacccgcggggucag

SEQ ID NO: 3625 - RNA, 20 nt, Artificial Sequence
  Synthetic
cagcagcgcgcucaaguccg

SEQ ID NO: 3626 - RNA, 20 nt, Artificial Sequence
  Synthetic
cguccccguucuccgggauc

SEQ ID NO: 3627 - RNA, 20 nt, Artificial Sequence
  Synthetic
caccacgagaacagcucgcg

SEQ ID NO: 3628 - RNA, 20 nt, Artificial Sequence
  Synthetic
gcgguugaauccaauggcua

SEQ ID NO: 3629 - RNA, 20 nt, Artificial Sequence
  Synthetic
ggacacuugcgacgaagacu

SEQ ID NO: 3630 - RNA, 20 nt, Artificial Sequence
  Synthetic
guguugggcaucgcggccgg

SEQ ID NO: 3631 - RNA, 20 nt, Artificial Sequence
  Synthetic
cuucgucgcaagugucccug

SEQ ID NO: 3632 - RNA, 20 nt, Artificial Sequence
  Synthetic
ccccaggcgcucuaugcggu

SEQ ID NO: 3633 - RNA, 20 nt, Artificial Sequence
  Synthetic
ccguguugggcaucgcggcc

SEQ ID NO: 3634 - RNA, 20 nt, Artificial Sequence
  Synthetic
cguucuccgggaucagguug

SEQ ID NO: 3635 - RNA, 20 nt, Artificial Sequence
  Synthetic
gccucucucgauacugaucc

SEQ ID NO: 3636 - RNA, 20 nt, Artificial Sequence
  Synthetic
ucgcaugacuuggacuugac

SEQ ID NO: 3637 - RNA, 20 nt, Artificial Sequence
  Synthetic
aucacccgagugccuuugac

SEQ ID NO: 3638 - RNA, 20 nt, Artificial Sequence
  Synthetic
uaagcgcggccaccuggccg

SEQ ID NO: 3639 - RNA, 20 nt, Artificial Sequence
  Synthetic
gcacaaaucgucccccauga

SEQ ID NO: 3640 - RNA, 20 nt, Artificial Sequence
  Synthetic
cgcccugcccgacgucaugc

SEQ ID NO: 3641 - RNA, 20 nt, Artificial Sequence
  Synthetic
caaccugaucccggagaacg

SEQ ID NO: 3642 - RNA, 20 nt, Artificial Sequence
  Synthetic
cggagcacuccucggagaac

SEQ ID NO: 3643 - RNA, 20 nt, Artificial Sequence
  Synthetic
agacucgguggccggcgagu

SEQ ID NO: 3644 - RNA, 20 nt, Artificial Sequence
  Synthetic
ggcgguggagagaccgucgu

SEQ ID NO: 3645 - RNA, 20 nt, Artificial Sequence
  Synthetic
guguacucgcaguggcucgc

SEQ ID NO: 3646 - RNA, 20 nt, Artificial Sequence
  Synthetic
ucggagcacuccucggagaa

SEQ ID NO: 3647 - RNA, 20 nt, Artificial Sequence
  Synthetic
cccggccgcgaugcccaaca

SEQ ID NO: 3648 - RNA, 20 nt, Artificial Sequence
  Synthetic
cccguucuccgggaucaggu

SEQ ID NO: 3649 - RNA, 20 nt, Artificial Sequence
  Synthetic
ucggugguggacuaaacagg

SEQ ID NO: 3650 - RNA, 20 nt, Artificial Sequence
  Synthetic
ccugaagggauaccaacccg

SEQ ID NO: 3651 - RNA, 20 nt, Artificial Sequence
  Synthetic
gucguucucgcucuugaacu

SEQ ID NO: 3652 - RNA, 20 nt, Artificial Sequence
  Synthetic
ccccaccgcauagagcgccu

SEQ ID NO: 3653 - RNA, 20 nt, Artificial Sequence
  Synthetic
gucgcuggugccggguuccg

SEQ ID NO: 3654 - RNA, 20 nt, Artificial Sequence
  Synthetic
cgagaacagcucgcggggcg

SEQ ID NO: 3655 - RNA, 20 nt, Artificial Sequence
  Synthetic
cgcaugacuuggacuugacc

SEQ ID NO: 3656 - RNA, 20 nt, Artificial Sequence
  Synthetic
cccaccgcauagagcgccug

SEQ ID NO: 3657 - RNA, 20 nt, Artificial Sequence
  Synthetic
aagucgcuggugccggguuc

SEQ ID NO: 3658 - RNA, 20 nt, Artificial Sequence
  Synthetic
cgaggagugcuccgacgagg

SEQ ID NO: 3659 - RNA, 20 nt, Artificial Sequence
  Synthetic
uccccgggcgagucggccuc

SEQ ID NO: 3660 - RNA, 20 nt, Artificial Sequence
  Synthetic
cuccccgggcgagucggccu

SEQ ID NO: 3661 - RNA, 20 nt, Artificial Sequence
  Synthetic
caugacuuggacuugaccgg

SEQ ID NO: 3662 - RNA, 20 nt, Artificial Sequence
  Synthetic
agcucgcggggcgcggucgu

SEQ ID NO: 3663 - RNA, 20 nt, Artificial Sequence
  Synthetic
ugcuccgacgaggaggcaaa

SEQ ID NO: 3664 - RNA, 20 nt, Artificial Sequence
  Synthetic
cuuuuuggacaggccccccg

SEQ ID NO: 3665 - RNA, 20 nt, Artificial Sequence
  Synthetic
cuacggcuucgggcugagcc

SEQ ID NO: 3666 - RNA, 20 nt, Artificial Sequence
  Synthetic
ccccgggcgagucggccucg

SEQ ID NO: 3667 - RNA, 20 nt, Artificial Sequence
  Synthetic
uaacagugccaucgucuaug

SEQ ID NO: 3668 - RNA, 20 nt, Artificial Sequence
  Synthetic
cuccucgucggagcacuccu

SEQ ID NO: 3669 - RNA, 20 nt, Artificial Sequence
  Synthetic
cccggcaccagcgacuuggu

SEQ ID NO: 3670 - RNA, 20 nt, Artificial Sequence
  Synthetic
gcgcuucuccacaccgcccg

SEQ ID NO: 3671 - RNA, 20 nt, Artificial Sequence
  Synthetic
cucggugguggacuaaacag

SEQ ID NO: 3672 - RNA, 20 nt, Artificial Sequence
  Synthetic
cccccaccgcauagagcgcc

SEQ ID NO: 3673 - RNA, 20 nt, Artificial Sequence
  Synthetic
gaucccggagaacggggacg

SEQ ID NO: 3674 - RNA, 20 nt, Artificial Sequence
  Synthetic
ccaggcgcucuaugcggugg

SEQ ID NO: 3675 - RNA, 20 nt, Artificial Sequence
  Synthetic
uuagugguccgggcccgggc

SEQ ID NO: 3676 - RNA, 20 nt, Artificial Sequence
  Synthetic
cccaggcgcucuaugcggug

SEQ ID NO: 3677 - RNA, 20 nt, Artificial Sequence
  Synthetic
cggcugcuccccgggcgagu

SEQ ID NO: 3678 - RNA, 20 nt, Artificial Sequence
  Synthetic
ucgccggcuacgcggccucc

SEQ ID NO: 3679 - RNA, 20 nt, Artificial Sequence
  Synthetic
aucgagagaggcuuccggcc

SEQ ID NO: 3680 - RNA, 20 nt, Artificial Sequence
  Synthetic
ggguccaagugaugucucgg

SEQ ID NO: 3681 - RNA, 20 nt, Artificial Sequence
  Synthetic
aucgccuuuugccuccucgu

SEQ ID NO: 3682 - RNA, 20 nt, Artificial Sequence
  Synthetic
aucucggggcgcagcggcac

SEQ ID NO: 3683 - RNA, 20 nt, Artificial Sequence
  Synthetic
cggugguggacuaaacaggg

SEQ ID NO: 3684 - RNA, 20 nt, Artificial Sequence
  Synthetic
gauggcacuguuaauggccg

SEQ ID NO: 3685 - RNA, 20 nt, Artificial Sequence
  Synthetic
ugcccugcaugacgucgggc

SEQ ID NO: 3686 - RNA, 20 nt, Artificial Sequence
  Synthetic
ucucggugguggacuaaaca

SEQ ID NO: 3687 - RNA, 20 nt, Artificial Sequence
  Synthetic
agaggguggacuacggcuuc

SEQ ID NO: 3688 - RNA, 20 nt, Artificial Sequence
  Synthetic
ccccgaggccgacucgcccg

SEQ ID NO: 3689 - RNA, 20 nt, Artificial Sequence
  Synthetic
gaucucggggcgcagcggca

SEQ ID NO: 3690 - RNA, 20 nt, Artificial Sequence
  Synthetic
acggaaguccccugaccccg

SEQ ID NO: 3691 - RNA, 20 nt, Artificial Sequence
  Synthetic
acucgcccggggagcagccg

SEQ ID NO: 3692 - RNA, 20 nt, Artificial Sequence
  Synthetic
uugcgcuucuccacaccgcc

SEQ ID NO: 3693 - RNA, 20 nt, Artificial Sequence
  Synthetic
ggaacccggcaccagcgacu

SEQ ID NO: 3694 - RNA, 20 nt, Artificial Sequence
  Synthetic
gcaugacuuggacuugaccg

SEQ ID NO: 3695 - RNA, 20 nt, Artificial Sequence
  Synthetic
uaauggccgcggcugcuccc

SEQ ID NO: 3696 - RNA, 20 nt, Artificial Sequence
  Synthetic
ccgggcgagucggccucggg

SEQ ID NO: 3697 - RNA, 20 nt, Artificial Sequence
  Synthetic
gucaaaggcacucgggugau

SEQ ID NO: 3698 - RNA, 20 nt, Artificial Sequence
  Synthetic
ggugcugcgguugaauccaa

SEQ ID NO: 3699 - RNA, 20 nt, Artificial Sequence
  Synthetic
cugggcgagaagcauaagcg

SEQ ID NO: 3700 - RNA, 20 nt, Artificial Sequence
  Synthetic
acuuggacuugaccgggggc

SEQ ID NO: 3701 - RNA, 20 nt, Artificial Sequence
  Synthetic
ccccccgaggccgacucgcc

SEQ ID NO: 3702 - RNA, 20 nt, Artificial Sequence
  Synthetic
ccaccgcauagagcgccugg

SEQ ID NO: 3703 - RNA, 20 nt, Artificial Sequence
  Synthetic
agucgcuggugccggguucc

SEQ ID NO: 3704 - RNA, 20 nt, Artificial Sequence
  Synthetic
ucgcacagguugcacuugua

SEQ ID NO: 3705 - RNA, 20 nt, Artificial Sequence
  Synthetic
gcccugcaugacgucgggca

SEQ ID NO: 3706 - RNA, 20 nt, Artificial Sequence
  Synthetic
ccgcccccaggcgcucuaug

SEQ ID NO: 3707 - RNA, 20 nt, Artificial Sequence
  Synthetic
gcccugcccgacgucaugca

SEQ ID NO: 3708 - RNA, 20 nt, Artificial Sequence
  Synthetic
gucgcacagguugcacuugu

SEQ ID NO: 3709 - RNA, 20 nt, Artificial Sequence
  Synthetic
agguagcaagccgcccuucc

SEQ ID NO: 3710 - RNA, 20 nt, Artificial Sequence
  Synthetic
ccaaccugaucccggagaac

SEQ ID NO: 3711 - RNA, 20 nt, Artificial Sequence
  Synthetic
aggaagggcggcuugcuacc

SEQ ID NO: 3712 - RNA, 20 nt, Artificial Sequence
  Synthetic
gaaggaguucgaccugcccc

SEQ ID NO: 3713 - RNA, 20 nt, Artificial Sequence
  Synthetic
cuuggacuugaccgggggcu

SEQ ID NO: 3714 - RNA, 20 nt, Artificial Sequence
  Synthetic
gagaggguggacuacggcuu

SEQ ID NO: 3715 - RNA, 20 nt, Artificial Sequence
  Synthetic
uccaagucaugcgaguucug

SEQ ID NO: 3716 - RNA, 20 nt, Artificial Sequence
  Synthetic
acccggcaccagcgacuugg

SEQ ID NO: 3717 - RNA, 20 nt, Artificial Sequence
  Synthetic
cccccaggcgcucuaugcgg

SEQ ID NO: 3718 - RNA, 20 nt, Artificial Sequence
  Synthetic
gcgucugcccucuuuugagc

SEQ ID NO: 3719 - RNA, 20 nt, Artificial Sequence
  Synthetic
gcccgacgucaugcagggca

SEQ ID NO: 3720 - RNA, 20 nt, Artificial Sequence
  Synthetic
gagcuugaugcgcuuagaga

SEQ ID NO: 3721 - RNA, 20 nt, Artificial Sequence
  Synthetic
cagcucgcggggcgcggucg

SEQ ID NO: 3722 - RNA, 20 nt, Artificial Sequence
  Synthetic
cgugguggcgcgccgccucc

SEQ ID NO: 3723 - RNA, 20 nt, Artificial Sequence
  Synthetic
ucacccgagugccuuugaca

SEQ ID NO: 3724 - RNA, 20 nt, Artificial Sequence
  Synthetic
gaacgaccccaaccugaucc

SEQ ID NO: 3725 - RNA, 20 nt, Artificial Sequence
  Synthetic
caaccgcagcacccugucaa

SEQ ID NO: 3726 - RNA, 20 nt, Artificial Sequence
  Synthetic
uccaagugaugucucggugg

SEQ ID NO: 3727 - RNA, 20 nt, Artificial Sequence
  Synthetic
guucuccguguugggcaucg

SEQ ID NO: 3728 - RNA, 20 nt, Artificial Sequence
  Synthetic
cggaaguccccugaccccgc

SEQ ID NO: 3729 - RNA, 20 nt, Artificial Sequence
  Synthetic
uaugcuucucgcccaggacc

SEQ ID NO: 3730 - RNA, 20 nt, Artificial Sequence
  Synthetic
agcuggacggagggaucucg

SEQ ID NO: 3731 - RNA, 20 nt, Artificial Sequence
  Synthetic
ggcugcgccggugcaccacc

SEQ ID NO: 3732 - RNA, 20 nt, Artificial Sequence
  Synthetic
guugguaucccuucaggacu

SEQ ID NO: 3733 - RNA, 20 nt, Artificial Sequence
  Synthetic
auagacgauggcacuguuaa

SEQ ID NO: 3734 - RNA, 20 nt, Artificial Sequence
  Synthetic
cucccgccauggauuucucu

SEQ ID NO: 3735 - RNA, 20 nt, Artificial Sequence
  Synthetic
accaggaucaguaucgagag

SEQ ID NO: 3736 - RNA, 20 nt, Artificial Sequence
  Synthetic
aguccccugaccccgcgggu

SEQ ID NO: 3737 - RNA, 20 nt, Artificial Sequence
  Synthetic
gucuggagucuccgaagcua

SEQ ID NO: 3738 - RNA, 20 nt, Artificial Sequence
  Synthetic
gccggcccagcccuaugcaa

SEQ ID NO: 3739 - RNA, 20 nt, Artificial Sequence
  Synthetic
gauguguggcaguuuucgga

SEQ ID NO: 3740 - RNA, 20 nt, Artificial Sequence
  Synthetic
cuagagaaauccauggcggg

SEQ ID NO: 3741 - RNA, 20 nt, Artificial Sequence
  Synthetic
ggcgcugcccaccaagucgc

SEQ ID NO: 3742 - RNA, 20 nt, Artificial Sequence
  Synthetic
cccgggcgagucggccucgg

SEQ ID NO: 3743 - RNA, 20 nt, Artificial Sequence
  Synthetic
acaccgcccggggagcugga

SEQ ID NO: 3744 - RNA, 20 nt, Artificial Sequence
  Synthetic
caguaaccuuugcauagggc

SEQ ID NO: 3745 - RNA, 20 nt, Artificial Sequence
  Synthetic
ucaguaucgagagaggcuuc

SEQ ID NO: 3746 - RNA, 20 nt, Artificial Sequence
  Synthetic
gcaugacgucgggcagggcg

SEQ ID NO: 3747 - RNA, 20 nt, Artificial Sequence
  Synthetic
ccgcauagagcgccuggggg

SEQ ID NO: 3748 - RNA, 20 nt, Artificial Sequence
  Synthetic
cccccgaggccgacucgccc

SEQ ID NO: 3749 - RNA, 20 nt, Artificial Sequence
  Synthetic
agggcggcuugcuaccuggc

SEQ ID NO: 3750 - RNA, 20 nt, Artificial Sequence
  Synthetic
gcacccugucaaaggcacuc

SEQ ID NO: 3751 - RNA, 20 nt, Artificial Sequence
  Synthetic
cugauccugguauucuuagc

SEQ ID NO: 3752 - RNA, 20 nt, Artificial Sequence
  Synthetic
cauguggcgcuucagcuugc

SEQ ID NO: 3753 - RNA, 20 nt, Artificial Sequence
  Synthetic
cccaccaagucgcuggugcc

SEQ ID NO: 3754 - RNA, 20 nt, Artificial Sequence
  Synthetic
ggaggcaaaaggcgauuguc

SEQ ID NO: 3755 - RNA, 20 nt, Artificial Sequence
  Synthetic
cccaaccugaucccggagaa

SEQ ID NO: 3756 - RNA, 20 nt, Artificial Sequence
  Synthetic
gagucuccgaagcuaaggaa

SEQ ID NO: 3757 - RNA, 20 nt, Artificial Sequence
  Synthetic
ggcuauggagccucccgcca

SEQ ID NO: 3758 - RNA, 20 nt, Artificial Sequence
  Synthetic
cgucugcccucuuuugagcu

SEQ ID NO: 3759 - RNA, 20 nt, Artificial Sequence
  Synthetic
cgcccggggagcuggacgga

SEQ ID NO: 3760 - RNA, 20 nt, Artificial Sequence
  Synthetic
aguaaccuuugcauagggcu

SEQ ID NO: 3761 - RNA, 20 nt, Artificial Sequence
  Synthetic
uccaccaccgagacaucacu

SEQ ID NO: 3762 - RNA, 20 nt, Artificial Sequence
  Synthetic
gguugcaguaaccuuugcau

SEQ ID NO: 3763 - RNA, 20 nt, Artificial Sequence
  Synthetic
gcaauaugaaucccauggag

SEQ ID NO: 3764 - RNA, 20 nt, Artificial Sequence
  Synthetic
accaugcccugcaugacguc

SEQ ID NO: 3765 - RNA, 20 nt, Artificial Sequence
  Synthetic
ggccucgcugaagugcugca

SEQ ID NO: 3766 - RNA, 20 nt, Artificial Sequence
  Synthetic
agagcaaccugguggugcac

SEQ ID NO: 3767 - RNA, 20 nt, Artificial Sequence
  Synthetic
gcccaccaagucgcuggugc

SEQ ID NO: 3768 - RNA, 20 nt, Artificial Sequence
  Synthetic
ugucaaaggcacucggguga

SEQ ID NO: 3769 - RNA, 20 nt, Artificial Sequence
  Synthetic
agcuugaugcgcuuagagaa

SEQ ID NO: 3770 - RNA, 20 nt, Artificial Sequence
  Synthetic
agggggggcgucgccaggaa

SEQ ID NO: 3771 - RNA, 20 nt, Artificial Sequence
  Synthetic
guggaaagcgcccuucugcc

SEQ ID NO: 3772 - RNA, 20 nt, Artificial Sequence
  Synthetic
uggggguccaagugaugucu

SEQ ID NO: 3773 - RNA, 20 nt, Artificial Sequence
  Synthetic
cuccaugcagcacuucagcg

SEQ ID NO: 3774 - RNA, 20 nt, Artificial Sequence
  Synthetic
gcgcuucagcuugcuggccu

SEQ ID NO: 3775 - RNA, 20 nt, Artificial Sequence
  Synthetic
cuucagcgaggccuuccacc

SEQ ID NO: 3776 - RNA, 20 nt, Artificial Sequence
  Synthetic
ggagucuccgaagcuaagga

SEQ ID NO: 3777 - RNA, 20 nt, Artificial Sequence
  Synthetic
cacucgggugauggguggcc

SEQ ID NO: 3778 - RNA, 20 nt, Artificial Sequence
  Synthetic
ugcgcuucuccacaccgccc

SEQ ID NO: 3779 - RNA, 20 nt, Artificial Sequence
  Synthetic
ggugguggacuaaacagggg

SEQ ID NO: 3780 - RNA, 20 nt, Artificial Sequence
  Synthetic
cgaggccuuccaccaggucc

SEQ ID NO: 3781 - RNA, 20 nt, Artificial Sequence
  Synthetic
aauggccgcggcugcucccc

SEQ ID NO: 3782 - RNA, 20 nt, Artificial Sequence
  Synthetic
guuguacauguguagcugcu

SEQ ID NO: 3783 - RNA, 20 nt, Artificial Sequence
  Synthetic
guucuucacacacccccauu

SEQ ID NO: 3784 - RNA, 20 nt, Artificial Sequence
  Synthetic
cgcagcggcacgggaagugg

SEQ ID NO: 3785 - RNA, 20 nt, Artificial Sequence
  Synthetic
gcgggaggcuccauagccau

SEQ ID NO: 3786 - RNA, 20 nt, Artificial Sequence
  Synthetic
ggugcaccggcgcagccaca

SEQ ID NO: 3787 - RNA, 20 nt, Artificial Sequence
  Synthetic
cuccacaccgcccggggagc

SEQ ID NO: 3788 - RNA, 20 nt, Artificial Sequence
  Synthetic
aaagcgcccuucugccaggc

SEQ ID NO: 3789 - RNA, 20 nt, Artificial Sequence
  Synthetic
acucgggugauggguggcca

SEQ ID NO: 3790 - RNA, 20 nt, Artificial Sequence
  Synthetic
cugccuggaggccgcguagc

SEQ ID NO: 3791 - RNA, 20 nt, Artificial Sequence
  Synthetic
guccagcuccccgggcggug

SEQ ID NO: 3792 - RNA, 20 nt, Artificial Sequence
  Synthetic
gagcuggacggagggaucuc

SEQ ID NO: 3793 - RNA, 20 nt, Artificial Sequence
  Synthetic
ucuagcccaccgcugucccc

SEQ ID NO: 3794 - RNA, 20 nt, Artificial Sequence
  Synthetic
aguuguacauguguagcugc

SEQ ID NO: 3795 - RNA, 20 nt, Artificial Sequence
  Synthetic
auucugcaccuaguccugaa

SEQ ID NO: 3796 - RNA, 20 nt, Artificial Sequence
  Synthetic
ccaccacgagaacagcucgc

SEQ ID NO: 3797 - RNA, 20 nt, Artificial Sequence
  Synthetic
cuccuagagaaauccauggc

SEQ ID NO: 3798 - RNA, 20 nt, Artificial Sequence
  Synthetic
uuuaaccugcuaagaauacc

SEQ ID NO: 3799 - RNA, 20 nt, Artificial Sequence
  Synthetic
ggacuaaacagggggggagu

SEQ ID NO: 3800 - RNA, 20 nt, Artificial Sequence
  Synthetic
ggccaccuggccgaggccga

SEQ ID NO: 3801 - RNA, 20 nt, Artificial Sequence
  Synthetic
ggcuugcuaccuggcuggaa

SEQ ID NO: 3802 - RNA, 20 nt, Artificial Sequence
  Synthetic
cauucugcaccuaguccuga

SEQ ID NO: 3803 - RNA, 20 nt, Artificial Sequence
  Synthetic
ugcuggccugggugcacgcg

SEQ ID NO: 3804 - RNA, 20 nt, Artificial Sequence
  Synthetic
uguggcccucggccucggcc

SEQ ID NO: 3805 - RNA, 20 nt, Artificial Sequence
  Synthetic
ccgcccggggagcuggacgg

SEQ ID NO: 3806 - RNA, 20 nt, Artificial Sequence
  Synthetic
uggccgaggccgagggccac

SEQ ID NO: 3807 - RNA, 20 nt, Artificial Sequence
  Synthetic
ugggcaucgcggccgggggc

SEQ ID NO: 3808 - RNA, 20 nt, Artificial Sequence
  Synthetic
ucuccuagagaaauccaugg

SEQ ID NO: 3809 - RNA, 20 nt, Artificial Sequence
  Synthetic
gggccaucucuuccgccccc

SEQ ID NO: 3810 - RNA, 20 nt, Artificial Sequence
  Synthetic
guugcaguaaccuuugcaua

SEQ ID NO: 3811 - RNA, 20 nt, Artificial Sequence
  Synthetic
aaaggcacucgggugauggg

SEQ ID NO: 3812 - RNA, 20 nt, Artificial Sequence
  Synthetic
gaagggaucuuugagcugcc

SEQ ID NO: 3813 - RNA, 20 nt, Artificial Sequence
  Synthetic
gccacacaucuugagcucuc

SEQ ID NO: 3814 - RNA, 20 nt, Artificial Sequence
  Synthetic
ggagggaucucggggcgcag

SEQ ID NO: 3815 - RNA, 20 nt, Artificial Sequence
  Synthetic
cccggagaacggggacgagg

SEQ ID NO: 3816 - RNA, 20 nt, Artificial Sequence
  Synthetic
ugcauagggcugggccggcc

SEQ ID NO: 3817 - RNA, 20 nt, Artificial Sequence
  Synthetic
cggggcgcggucgugggcgu

SEQ ID NO: 3818 - RNA, 20 nt, Artificial Sequence
  Synthetic
gagggggggcgucgccagga

SEQ ID NO: 3819 - RNA, 20 nt, Artificial Sequence
  Synthetic
accgccagcuccccggaacc

SEQ ID NO: 3820 - RNA, 20 nt, Artificial Sequence
  Synthetic
gguauucuuagcagguuaaa

SEQ ID NO: 3821 - RNA, 20 nt, Artificial Sequence
  Synthetic
aggcuuccggccuggcagaa

SEQ ID NO: 3822 - RNA, 20 nt, Artificial Sequence
  Synthetic
gaucccuccguccagcuccc

SEQ ID NO: 3823 - RNA, 20 nt, Artificial Sequence
  Synthetic
ugguauucuuagcagguuaa

SEQ ID NO: 3824 - RNA, 20 nt, Artificial Sequence
  Synthetic
aucuacuuagaaagcgaaca

SEQ ID NO: 3825 - RNA, 20 nt, Artificial Sequence
  Synthetic
cggccaccuggccgaggccg

SEQ ID NO: 3826 - RNA, 20 nt, Artificial Sequence
  Synthetic
caacacgcacagaacacuca

SEQ ID NO: 3827 - RNA, 20 nt, Artificial Sequence
  Synthetic
gccggccuggggacagcggu

SEQ ID NO: 3828 - RNA, 20 nt, Artificial Sequence
  Synthetic
gccaccacgagaacagcucg

SEQ ID NO: 3829 - RNA, 20 nt, Artificial Sequence
  Synthetic
guauucuuagcagguuaaag

SEQ ID NO: 3830 - RNA, 20 nt, Artificial Sequence
  Synthetic
cucuaggagacuuagagagc

SEQ ID NO: 3831 - RNA, 20 nt, Artificial Sequence
  Synthetic
aacagccauucaccagugca

SEQ ID NO: 3832 - RNA, 20 nt, Artificial Sequence
  Synthetic
uugcaagagaaaccaugcac

SEQ ID NO: 3833 - RNA, 20 nt, Artificial Sequence
  Synthetic
gacuugaccgggggcuggga

SEQ ID NO: 3834 - RNA, 20 nt, Artificial Sequence
  Synthetic
accuuugcauagggcugggc

SEQ ID NO: 3835 - RNA, 20 nt, Artificial Sequence
  Synthetic
ucuuuugagcugggccugcc

SEQ ID NO: 3836 - RNA, 20 nt, Artificial Sequence
  Synthetic
gaggccuuccaccagguccu

SEQ ID NO: 3837 - RNA, 20 nt, Artificial Sequence
  Synthetic
cuuuugagcugggccugccc

SEQ ID NO: 3838 - RNA, 20 nt, Artificial Sequence
  Synthetic
gggaucuuugagcugccugg

SEQ ID NO: 3839 - RNA, 20 nt, Artificial Sequence
  Synthetic
gggcaggcccagcucaaaag

SEQ ID NO: 3840 - RNA, 20 nt, Artificial Sequence
  Synthetic
agcacccugucaaaggcacu

SEQ ID NO: 3841 - RNA, 20 nt, Artificial Sequence
  Synthetic
uggacuaaacagggggggag

SEQ ID NO: 3842 - RNA, 20 nt, Artificial Sequence
  Synthetic
gcucuugaacuuggccacca

SEQ ID NO: 3843 - RNA, 20 nt, Artificial Sequence
  Synthetic
gaaucccauggagagguggc

SEQ ID NO: 3844 - RNA, 20 nt, Artificial Sequence
  Synthetic
gugcaccggcgcagccacac

SEQ ID NO: 3845 - RNA, 20 nt, Artificial Sequence
  Synthetic
aaagaucccuuccuuagcuu

SEQ ID NO: 3846 - RNA, 20 nt, Artificial Sequence
  Synthetic
ugucugcaauaugaauccca

SEQ ID NO: 3847 - RNA, 20 nt, Artificial Sequence
  Synthetic
ggcaggcccagcucaaaaga

SEQ ID NO: 3848 - RNA, 20 nt, Artificial Sequence
  Synthetic
ccuccguccagcuccccggg

SEQ ID NO: 3849 - RNA, 20 nt, Artificial Sequence
  Synthetic
cuguccaaaaagcugcugcu

SEQ ID NO: 3850 - RNA, 20 nt, Artificial Sequence
  Synthetic
gcuugaugcgcuuagagaag

SEQ ID NO: 3851 - RNA, 20 nt, Artificial Sequence
  Synthetic
cggcuucgggcugagccugg

SEQ ID NO: 3852 - RNA, 20 nt, Artificial Sequence
  Synthetic
caccaugcccugcaugacgu

SEQ ID NO: 3853 - RNA, 20 nt, Artificial Sequence
  Synthetic
ucaagauguguggcaguuuu

SEQ ID NO: 3854 - RNA, 20 nt, Artificial Sequence
  Synthetic
guucaaauuucagagcaacc

SEQ ID NO: 3855 - RNA, 20 nt, Artificial Sequence
  Synthetic
gagaaggggcucagcgagcu

SEQ ID NO: 3856 - RNA, 20 nt, Artificial Sequence
  Synthetic
gcagcggcacgggaagugga

SEQ ID NO: 3857 - RNA, 20 nt, Artificial Sequence
  Synthetic
aagucuccuagagaaaucca

SEQ ID NO: 3858 - RNA, 20 nt, Artificial Sequence
  Synthetic
ggugccggguuccggggagc

SEQ ID NO: 3859 - RNA, 20 nt, Artificial Sequence
  Synthetic
ccuguccaaaaagcugcugc

SEQ ID NO: 3860 - RNA, 20 nt, Artificial Sequence
  Synthetic
auaugaaucccauggagagg

SEQ ID NO: 3861 - RNA, 20 nt, Artificial Sequence
  Synthetic
gggcgcagcggcacgggaag

SEQ ID NO: 3862 - RNA, 20 nt, Artificial Sequence
  Synthetic
ggccgaggccgagggccaca

SEQ ID NO: 3863 - RNA, 20 nt, Artificial Sequence
  Synthetic
gcaagugucccuguggcccu

SEQ ID NO: 3864 - RNA, 20 nt, Artificial Sequence
  Synthetic
ggacuugaccgggggcuggg

SEQ ID NO: 3865 - RNA, 20 nt, Artificial Sequence
  Synthetic
gcuucucgcccaggaccugg

SEQ ID NO: 3866 - RNA, 20 nt, Artificial Sequence
  Synthetic
gcgccugggggcggaagaga

SEQ ID NO: 3867 - RNA, 20 nt, Artificial Sequence
  Synthetic
gucccuguggcccucggccu

SEQ ID NO: 3868 - RNA, 20 nt, Artificial Sequence
  Synthetic
aucccuccguccagcucccc

SEQ ID NO: 3869 - RNA, 20 nt, Artificial Sequence
  Synthetic
gugccuuugacagggugcug

SEQ ID NO: 3870 - RNA, 20 nt, Artificial Sequence
  Synthetic
cccagagagcucaagaugug

SEQ ID NO: 3871 - RNA, 20 nt, Artificial Sequence
  Synthetic
ggcccucggccucggccagg

SEQ ID NO: 3872 - RNA, 20 nt, Artificial Sequence
  Synthetic
gagagcgagaggguggacua

SEQ ID NO: 3873 - RNA, 20 nt, Artificial Sequence
  Synthetic
gggggcgucgccaggaaggg

SEQ ID NO: 3874 - RNA, 20 nt, Artificial Sequence
  Synthetic
agagaaggggcucagcgagc

SEQ ID NO: 3875 - RNA, 20 nt, Artificial Sequence
  Synthetic
ccacacaucuugagcucucu

SEQ ID NO: 3876 - RNA, 20 nt, Artificial Sequence
  Synthetic
gcugcccagcagcagcuuuu

SEQ ID NO: 3877 - RNA, 20 nt, Artificial Sequence
  Synthetic
ggagcuggacggagggaucu

SEQ ID NO: 3878 - RNA, 20 nt, Artificial Sequence
  Synthetic
gggggcggaagagauggccc

SEQ ID NO: 3879 - RNA, 20 nt, Artificial Sequence
  Synthetic
aggagacuuagagagcuggc

SEQ ID NO: 3880 - RNA, 20 nt, Artificial Sequence
  Synthetic
gaggcuuccggccuggcaga

SEQ ID NO: 3881 - RNA, 20 nt, Artificial Sequence
  Synthetic
aaucccauggagagguggcu

SEQ ID NO: 3882 - RNA, 20 nt, Artificial Sequence
  Synthetic
ugugcaugugcgucuucaug

SEQ ID NO: 3883 - RNA, 20 nt, Artificial Sequence
  Synthetic
cucgcccaggaccuggugga

SEQ ID NO: 3884 - RNA, 20 nt, Artificial Sequence
  Synthetic
uccuccucguccccguucuc

SEQ ID NO: 3885 - RNA, 20 nt, Artificial Sequence
  Synthetic
agaaaccaugcacuggugaa

SEQ ID NO: 3886 - RNA, 20 nt, Artificial Sequence
  Synthetic
cuucgggcugagccuggagg

SEQ ID NO: 3887 - RNA, 20 nt, Artificial Sequence
  Synthetic
gccggguuccggggagcugg

SEQ ID NO: 3888 - RNA, 20 nt, Artificial Sequence
  Synthetic
agaaggggcucagcgagcug

SEQ ID NO: 3889 - RNA, 20 nt, Artificial Sequence
  Synthetic
cuaaacagggggggaguggg

SEQ ID NO: 3890 - RNA, 20 nt, Artificial Sequence
  Synthetic
caaauuucagagcaaccugg

SEQ ID NO: 3891 - RNA, 20 nt, Artificial Sequence
  Synthetic
gagggagggggggcgucgcc

SEQ ID NO: 3892 - RNA, 20 nt, Artificial Sequence
  Synthetic
ccuccucguccccguucucc

SEQ ID NO: 3893 - RNA, 20 nt, Artificial Sequence
  Synthetic
ccagcagcagcuuuuuggac

SEQ ID NO: 3894 - RNA, 20 nt, Artificial Sequence
  Synthetic
gcccaccgcuguccccaggc

SEQ ID NO: 3895 - RNA, 20 nt, Artificial Sequence
  Synthetic
ggagacuuagagagcuggca

SEQ ID NO: 3896 - RNA, 20 nt, Artificial Sequence
  Synthetic
aggagcugacggagagcgag

SEQ ID NO: 3897 - RNA, 20 nt, Artificial Sequence
  Synthetic
gaggggcggauugcagagga

SEQ ID NO: 3898 - RNA, 20 nt, Artificial Sequence
  Synthetic
cauagggcugggccggccug

SEQ ID NO: 3899 - RNA, 20 nt, Artificial Sequence
  Synthetic
ggcggauugcagaggaggga

SEQ ID NO: 3900 - RNA, 20 nt, Artificial Sequence
  Synthetic
ggaggggcggauugcagagg

SEQ ID NO: 3901 - RNA, 20 nt, Artificial Sequence
  Synthetic
uuacugcaaccauuccagcc

SEQ ID NO: 3902 - RNA, 20 nt, Artificial Sequence
  Synthetic
gcauagggcugggccggccu

SEQ ID NO: 3903 - RNA, 20 nt, Artificial Sequence
  Synthetic
gggcggauugcagaggaggg

SEQ ID NO: 3904 - RNA, 20 nt, Artificial Sequence
  Synthetic
ggguuccggggagcuggcgg

SEQ ID NO: 3905 - RNA, 20 nt, Artificial Sequence
  Synthetic
ucucgcccguguggcugcgc

SEQ ID NO: 3906 - RNA, 20 nt, Artificial Sequence
  Synthetic
cuucccagccaccucuccau

SEQ ID NO: 3907 - RNA, 20 nt, Artificial Sequence
  Synthetic
gcugacggagagcgagaggg

SEQ ID NO: 3908 - RNA, 20 nt, Artificial Sequence
  Synthetic
gcggauugcagaggagggag

SEQ ID NO: 3909 - RNA, 20 nt, Artificial Sequence
  Synthetic
ggagcugacggagagcgaga

SEQ ID NO: 3910 - RNA, 20 nt, Artificial Sequence
  Synthetic
ucucuccaccgccagcuccc

SEQ ID NO: 3911 - RNA, 20 nt, Artificial Sequence
  Synthetic
uugaccgggggcugggaggg

SEQ ID NO: 3912 - RNA, 20 nt, Artificial Sequence
  Synthetic
cggauugcagaggagggagg

SEQ ID NO: 3913 - RNA, 20 nt, Artificial Sequence
  Synthetic
gcggggcgcggucgugggcg

SEQ ID NO: 3914 - RNA, 20 nt, Artificial Sequence
  Synthetic
gagcugggccugcccgggcc

SEQ ID NO: 3915 - RNA, 20 nt, Artificial Sequence
  Synthetic
cugggccggccuggggacag

SEQ ID NO: 3916 - RNA, 20 nt, Artificial Sequence
  Synthetic
uguagggcuucucgcccgug

SEQ ID NO: 3917 - RNA, 20 nt, Artificial Sequence
  Synthetic
ccauggagagguggcuggga

SEQ ID NO: 3918 - RNA, 20 nt, Artificial Sequence
  Synthetic
ggaggaggggcggauugcag

SEQ ID NO: 3919 - RNA, 20 nt, Artificial Sequence
  Synthetic
ccuucccagccaccucucca

SEQ ID NO: 3920 - RNA, 20 nt, Artificial Sequence
  Synthetic
cccgcgagcuguucucgugg

SEQ ID NO: 3921 - RNA, 20 nt, Artificial Sequence
  Synthetic
gauugcagaggagggagggg

SEQ ID NO: 3922 - RNA, 20 nt, Artificial Sequence
  Synthetic
ggccggccuggggacagcgg

SEQ ID NO: 3923 - RNA, 20 nt, Artificial Sequence
  Synthetic
ggauugcagaggagggaggg

SEQ ID NO: 3924 - RNA, 20 nt, Artificial Sequence
  Synthetic
accgggggcugggagggagg

SEQ ID NO: 3925 - RNA, 20 nt, Artificial Sequence
  Synthetic
ccgggggcugggagggagga

SEQ ID NO: 3926 - RNA, 20 nt, Artificial Sequence
  Synthetic
gaacggggacgaggaggaag

SEQ ID NO: 3927 - RNA, 20 nt, Artificial Sequence
  Synthetic
cccuccucccucccagcccc

SEQ ID NO: 3928 - RNA, 20 nt, Artificial Sequence
  Synthetic
cgggggcugggagggaggag

SEQ ID NO: 3929 - RNA, 20 nt, Artificial Sequence
  Synthetic
ggcgcuucagcuugcuggcc

SEQ ID NO: 3930 - RNA, 20 nt, Artificial Sequence
  Synthetic
cggggacgaggaggaagagg

SEQ ID NO: 3931 - RNA, 20 nt, Artificial Sequence
  Synthetic
agaggaggaggaggagcuga

SEQ ID NO: 3932 - RNA, 20 nt, Artificial Sequence
  Synthetic
gggcugggagggaggagggg

SEQ ID NO: 3933 - RNA, 20 nt, Artificial Sequence
  Synthetic
agaggaggacgacgaggaag

SEQ ID NO: 3934 - RNA, 20 nt, Artificial Sequence
  Synthetic
cgacgaggaagaggaagaag

SEQ ID NO: 3935 - RNA, 20 nt, Artificial Sequence
  Synthetic
ggaggaagaggaggacgacg

SEQ ID NO: 3936 - RNA, 20 nt, Artificial Sequence
  Synthetic
cgaggaagaggaagaagagg

SEQ ID NO: 3937 - RNA, 20 nt, Artificial Sequence
  Synthetic
ggaagaagaggaggaagagg

SEQ ID NO: 3938 - RNA, 20 nt, Artificial Sequence
  Synthetic
agaggaagaagaggaggaag

SEQ ID NO: 3939 - RNA, 20 nt, Artificial Sequence
  Synthetic
agaagaggaggaagaggagg

SEQ ID NO: 3940 - RNA, 20 nt, Artificial Sequence
  Synthetic
agaggaggaagaggaggagg

SEQ ID NO: 3941 - RNA, 20 nt, Artificial Sequence
  Synthetic
gaaccagaccacggcccguu

SEQ ID NO: 3942 - RNA, 20 nt, Artificial Sequence
  Synthetic
gaccuggaugccaaccucca

SEQ ID NO: 3943 - RNA, 17 nt, Artificial Sequence
  Synthetic
gauuagagcuccaugug

SEQ ID NO: 3944 - RNA, 20 nt, Artificial Sequence
  Synthetic
gauuguuuaucaacgucauc

SEQ ID NO: 3945 - RNA, 17 nt, Artificial Sequence
  Synthetic
gcacucaucccaggcgu

SEQ ID NO: 3946 - RNA, 20 nt, Artificial Sequence
  Synthetic
ggggauuagagcuccaugug

SEQ ID NO: 3947 - RNA, 17 nt, Artificial Sequence
  Synthetic
gugcagaauaugccccg

SEQ ID NO: 3948 - RNA, 17 nt, Artificial Sequence
  Synthetic
aaccagaccacggcccg

SEQ ID NO: 3949 - RNA, 20 nt, Artificial Sequence
  Synthetic
aauucccguuugcuuaagug

SEQ ID NO: 3950 - RNA, 17 nt, Artificial Sequence
  Synthetic
accagaccacggcccgu

SEQ ID NO: 3951 - RNA, 20 nt, Artificial Sequence
  Synthetic
augaaccagaccacggcccg

SEQ ID NO: 3952 - RNA, 20 nt, Artificial Sequence
  Synthetic
auucccguuugcuuaagugc

SEQ ID NO: 3953 - RNA, 17 nt, Artificial Sequence
  Synthetic
ccagaccacggcccguu

SEQ ID NO: 3954 - RNA, 17 nt, Artificial Sequence
  Synthetic
cccguuugcuuaagugc

SEQ ID NO: 3955 - RNA, 17 nt, Artificial Sequence
  Synthetic
ccuggaugccaaccucc

SEQ ID NO: 3956 - RNA, 17 nt, Artificial Sequence
  Synthetic
cuggaugccaaccucca

SEQ ID NO: 3957 - RNA, 17 nt, Artificial Sequence
  Synthetic
ucauccucuggcgugac

SEQ ID NO: 3958 - RNA, 17 nt, Artificial Sequence
  Synthetic
ucccguuugcuuaagug

SEQ ID NO: 3959 - RNA, 20 nt, Artificial Sequence
  Synthetic
ucgucauccucuggcgugac

SEQ ID NO: 3960 - RNA, 20 nt, Artificial Sequence
  Synthetic
ucugcacucaucccaggcgu

SEQ ID NO: 3961 - RNA, 17 nt, Artificial Sequence
  Synthetic
ucugguucaucaucugu

SEQ ID NO: 3962 - RNA, 20 nt, Artificial Sequence
  Synthetic
ugaaccagaccacggcccgu

SEQ ID NO: 3963 - RNA, 20 nt, Artificial Sequence
  Synthetic
ugaccuggaugccaaccucc

SEQ ID NO: 3964 - RNA, 20 nt, Artificial Sequence
  Synthetic
ugagugcagaauaugccccg

SEQ ID NO: 3965 - RNA, 17 nt, Artificial Sequence
  Synthetic
ugcacucaucccaggcg

SEQ ID NO: 3966 - RNA, 20 nt, Artificial Sequence
  Synthetic
uggucugguucaucaucugu

SEQ ID NO: 3967 - RNA, 17 nt, Artificial Sequence
  Synthetic
uguuuaucaacgucauc

SEQ ID NO: 3968 - RNA, 20 nt, Artificial Sequence
  Synthetic
uguuuaucaacgucaucuag

SEQ ID NO: 3969 - RNA, 17 nt, Artificial Sequence
  Synthetic
uuaucaacgucaucuag

SEQ ID NO: 3970 - RNA, 20 nt, Artificial Sequence
  Synthetic
uucugcacucaucccaggcg

SEQ ID NO: 3971 - RNA, 20 nt, Artificial Sequence
  Synthetic
uuguuuaucaacgucaucua

SEQ ID NO: 3972 - RNA, 17 nt, Artificial Sequence
  Synthetic
uuuaucaacgucaucua

SEQ ID NO: 3973 - RNA, 20 nt, Artificial Sequence
  Synthetic
gaaaaaagcauccaaucccg

SEQ ID NO: 3974 - RNA, 17 nt, Artificial Sequence
  Synthetic
gagaggccccuccagug

SEQ ID NO: 3975 - RNA, 20 nt, Artificial Sequence
  Synthetic
gagcuccaugugcagaacga

SEQ ID NO: 3976 - RNA, 17 nt, Artificial Sequence
  Synthetic
gaggaauuugccccaaa

SEQ ID NO: 3977 - RNA, 20 nt, Artificial Sequence
  Synthetic
gaggagaggccccuccagug

SEQ ID NO: 3978 - RNA, 20 nt, Artificial Sequence
  Synthetic
gaggaggucaugauccccuu

SEQ ID NO: 3979 - RNA, 17 nt, Artificial Sequence
  Synthetic
gaggucaugauccccuu

SEQ ID NO: 3980 - RNA, 17 nt, Artificial Sequence
  Synthetic
gcauccaggucacgcca

SEQ ID NO: 3981 - RNA, 20 nt, Artificial Sequence
  Synthetic
gccaccuuccccuucaccaa

SEQ ID NO: 3982 - RNA, 17 nt, Artificial Sequence
  Synthetic
gccagaugaacuuccca

SEQ ID NO: 3983 - RNA, 20 nt, Artificial Sequence
  Synthetic
gccagaugaacuucccauug

SEQ ID NO: 3984 - RNA, 20 nt, Artificial Sequence
  Synthetic
gcccguugggagcuccagaa

SEQ ID NO: 3985 - RNA, 20 nt, Artificial Sequence
  Synthetic
gccucugcuuagaaaaagcu

SEQ ID NO: 3986 - RNA, 17 nt, Artificial Sequence
  Synthetic
gcuccaugugcagaacg

SEQ ID NO: 3987 - RNA, 17 nt, Artificial Sequence
  Synthetic
gcucuaauccccacgcc

SEQ ID NO: 3988 - RNA, 17 nt, Artificial Sequence
  Synthetic
ggacauucuuauuuuua

SEQ ID NO: 3989 - RNA, 20 nt, Artificial Sequence
  Synthetic
ggagcucuaauccccacgcc

SEQ ID NO: 3990 - RNA, 20 nt, Artificial Sequence
  Synthetic
ggaucaugaccuccucaccu

SEQ ID NO: 3991 - RNA, 20 nt, Artificial Sequence
  Synthetic
ggaugccaaccuccacggga

SEQ ID NO: 3992 - RNA, 17 nt, Artificial Sequence
  Synthetic
ggcacugcccacaggug

SEQ ID NO: 3993 - RNA, 20 nt, Artificial Sequence
  Synthetic
ggcccguugggagcuccaga

SEQ ID NO: 3994 - RNA, 20 nt, Artificial Sequence
  Synthetic
gggggacauucuuauuuuua

SEQ ID NO: 3995 - RNA, 20 nt, Artificial Sequence
  Synthetic
gguuggcauccaggucacgc

SEQ ID NO: 3996 - RNA, 17 nt, Artificial Sequence
  Synthetic
gguuugccuugcuugcg

SEQ ID NO: 3997 - RNA, 17 nt, Artificial Sequence
  Synthetic
gugcagaacgaggggag

SEQ ID NO: 3998 - RNA, 20 nt, Artificial Sequence
  Synthetic
gugccagaugaacuucccau

SEQ ID NO: 3999 - RNA, 17 nt, Artificial Sequence
  Synthetic
aaaaagcauccaauccc

SEQ ID NO: 4000 - RNA, 20 nt, Artificial Sequence
  Synthetic
aaaaauaagaauguccccca

SEQ ID NO: 4001 - RNA, 17 nt, Artificial Sequence
  Synthetic
aaaagcauccaaucccg

SEQ ID NO: 4002 - RNA, 20 nt, Artificial Sequence
  Synthetic
aaaauaagaaugucccccaa

SEQ ID NO: 4003 - RNA, 20 nt, Artificial Sequence
  Synthetic
aaaccccagcacuuaagcaa

SEQ ID NO: 4004 - RNA, 20 nt, Artificial Sequence
  Synthetic
aaauaagaaugucccccaau

SEQ ID NO: 4005 - RNA, 20 nt, Artificial Sequence
  Synthetic
aaccccagcacuuaagcaaa

SEQ ID NO: 4006 - RNA, 17 nt, Artificial Sequence
  Synthetic
aauaagaauguccccca

SEQ ID NO: 4007 - RNA, 20 nt, Artificial Sequence
  Synthetic
accccagcacuuaagcaaac

SEQ ID NO: 4008 - RNA, 17 nt, Artificial Sequence
  Synthetic
accuuccccuucaccaa

SEQ ID NO: 4009 - RNA, 17 nt, Artificial Sequence
  Synthetic
agagcuccaugugcaga

SEQ ID NO: 4010 - RNA, 20 nt, Artificial Sequence
  Synthetic
agagcuccaugugcagaacg

SEQ ID NO: 4011 - RNA, 17 nt, Artificial Sequence
  Synthetic
agaugaacuucccauug

SEQ ID NO: 4012 - RNA, 17 nt, Artificial Sequence
  Synthetic
agccauucuuacagaug

SEQ ID NO: 4013 - RNA, 17 nt, Artificial Sequence
  Synthetic
agcuccaugugcagaac

SEQ ID NO: 4014 - RNA, 20 nt, Artificial Sequence
  Synthetic
agcuccaugugcagaacgag

SEQ ID NO: 4015 - RNA, 17 nt, Artificial Sequence
  Synthetic
agcucuaauccccacgc

SEQ ID NO: 4016 - RNA, 17 nt, Artificial Sequence
  Synthetic
aggaauuugccccaaac

SEQ ID NO: 4017 - RNA, 20 nt, Artificial Sequence
  Synthetic
aggaggucaugauccccuuc

SEQ ID NO: 4018 - RNA, 17 nt, Artificial Sequence
  Synthetic
aggucaugauccccuuc

SEQ ID NO: 4019 - RNA, 20 nt, Artificial Sequence
  Synthetic
agugccagaugaacuuccca

SEQ ID NO: 4020 - RNA, 17 nt, Artificial Sequence
  Synthetic
auaagaaugucccccaa

SEQ ID NO: 4021 - RNA, 17 nt, Artificial Sequence
  Synthetic
aucccaggcguggggau

SEQ ID NO: 4022 - RNA, 20 nt, Artificial Sequence
  Synthetic
auccccuucuggagcuccca

SEQ ID NO: 4023 - RNA, 20 nt, Artificial Sequence
  Synthetic
aucuggcacugcccacaggu

SEQ ID NO: 4024 - RNA, 20 nt, Artificial Sequence
  Synthetic
augcaauggcagccucugcu

SEQ ID NO: 4025 - RNA, 17 nt, Artificial Sequence
  Synthetic
augugcagaacgagggg

SEQ ID NO: 4026 - RNA, 20 nt, Artificial Sequence
  Synthetic
auuagagcuccaugugcaga

SEQ ID NO: 4027 - RNA, 20 nt, Artificial Sequence
  Synthetic
auucugcacucaucccaggc

SEQ ID NO: 4028 - RNA, 17 nt, Artificial Sequence
  Synthetic
auuuuuaucgagcacaa

SEQ ID NO: 4029 - RNA, 17 nt, Artificial Sequence
  Synthetic
caauggcagccucugcu

SEQ ID NO: 4030 - RNA, 17 nt, Artificial Sequence
  Synthetic
cacgccugggaugagug

SEQ ID NO: 4031 - RNA, 17 nt, Artificial Sequence
  Synthetic
cagaugaacuucccauu

SEQ ID NO: 4032 - RNA, 17 nt, Artificial Sequence
  Synthetic
caucucgauuggugaag

SEQ ID NO: 4033 - RNA, 17 nt, Artificial Sequence
  Synthetic
caugugcagaacgaggg

SEQ ID NO: 4034 - RNA, 20 nt, Artificial Sequence
  Synthetic
caugugcagaacgaggggag

SEQ ID NO: 4035 - RNA, 17 nt, Artificial Sequence
  Synthetic
ccacagcuuuuucuaag

SEQ ID NO: 4036 - RNA, 20 nt, Artificial Sequence
  Synthetic
ccacggcccguugggagcuc

SEQ ID NO: 4037 - RNA, 17 nt, Artificial Sequence
  Synthetic
ccagaugaacuucccau

SEQ ID NO: 4038 - RNA, 17 nt, Artificial Sequence
  Synthetic
ccagcacuuaagcaaac

SEQ ID NO: 4039 - RNA, 17 nt, Artificial Sequence
  Synthetic
cccagcacuuaagcaaa

SEQ ID NO: 4040 - RNA, 20 nt, Artificial Sequence
  Synthetic
ccccacgccugggaugagug

SEQ ID NO: 4041 - RNA, 17 nt, Artificial Sequence
  Synthetic
ccccagcacuuaagcaa

SEQ ID NO: 4042 - RNA, 17 nt, Artificial Sequence
  Synthetic
ccccuucaccaaucgag

SEQ ID NO: 4043 - RNA, 17 nt, Artificial Sequence
  Synthetic
cccguugggagcuccag

SEQ ID NO: 4044 - RNA, 17 nt, Artificial Sequence
  Synthetic
cccuucuggagcuccca

SEQ ID NO: 4045 - RNA, 17 nt, Artificial Sequence
  Synthetic
ccguugggagcuccaga

SEQ ID NO: 4046 - RNA, 17 nt, Artificial Sequence
  Synthetic
ccugugggcagugccag

SEQ ID NO: 4047 - RNA, 17 nt, Artificial Sequence
  Synthetic
cggcccguugggagcuc

SEQ ID NO: 4048 - RNA, 20 nt, Artificial Sequence
  Synthetic
cggcccguugggagcuccag

SEQ ID NO: 4049 - RNA, 17 nt, Artificial Sequence
  Synthetic
cguugggagcuccagaa

SEQ ID NO: 4050 - RNA, 20 nt, Artificial Sequence
  Synthetic
cguuugugcucgauaaaaau

SEQ ID NO: 4051 - RNA, 20 nt, Artificial Sequence
  Synthetic
cuagaggaauuugccccaaa

SEQ ID NO: 4052 - RNA, 20 nt, Artificial Sequence
  Synthetic
cucaucccaggcguggggau

SEQ ID NO: 4053 - RNA, 17 nt, Artificial Sequence
  Synthetic
cuccaugugcagaacga

SEQ ID NO: 4054 - RNA, 20 nt, Artificial Sequence
  Synthetic
cuccaugugcagaacgaggg

SEQ ID NO: 4055 - RNA, 17 nt, Artificial Sequence
  Synthetic
cuccccucguucugcac

SEQ ID NO: 4056 - RNA, 20 nt, Artificial Sequence
  Synthetic
cuccuccccucguucugcac

SEQ ID NO: 4057 - RNA, 20 nt, Artificial Sequence
  Synthetic
cucuaauccccacgccuggg

SEQ ID NO: 4058 - RNA, 17 nt, Artificial Sequence
  Synthetic
cugcacucaucccaggc

SEQ ID NO: 4059 - RNA, 20 nt, Artificial Sequence
  Synthetic
cuuauuuuuaucgagcacaa

SEQ ID NO: 4060 - RNA, 20 nt, Artificial Sequence
  Synthetic
cuuccccuucaccaaucgag

SEQ ID NO: 4061 - RNA, 17 nt, Artificial Sequence
  Synthetic
uaagaaugucccccaau

SEQ ID NO: 4062 - RNA, 17 nt, Artificial Sequence
  Synthetic
uaauccccacgccuggg

SEQ ID NO: 4063 - RNA, 20 nt, Artificial Sequence
  Synthetic
uagagcuccaugugcagaac

SEQ ID NO: 4064 - RNA, 20 nt, Artificial Sequence
  Synthetic
uagaggaauuugccccaaac

SEQ ID NO: 4065 - RNA, 20 nt, Artificial Sequence
  Synthetic
uauccacagcuuuuucuaag

SEQ ID NO: 4066 - RNA, 20 nt, Artificial Sequence
  Synthetic
ucaccugugggcagugccag

SEQ ID NO: 4067 - RNA, 17 nt, Artificial Sequence
  Synthetic
ucaucucgauuggugaa

SEQ ID NO: 4068 - RNA, 20 nt, Artificial Sequence
  Synthetic
ucaucuggcacugcccacag

SEQ ID NO: 4069 - RNA, 20 nt, Artificial Sequence
  Synthetic
ucaucuguaagaauggcuuc

SEQ ID NO: 4070 - RNA, 17 nt, Artificial Sequence
  Synthetic
ucaugaccuccucaccu

SEQ ID NO: 4071 - RNA, 17 nt, Artificial Sequence
  Synthetic
uccaugugcagaacgag

SEQ ID NO: 4072 - RNA, 20 nt, Artificial Sequence
  Synthetic
uccaugugcagaacgagggg

SEQ ID NO: 4073 - RNA, 17 nt, Artificial Sequence
  Synthetic
uccccucguucugcaca

SEQ ID NO: 4074 - RNA, 20 nt, Artificial Sequence
  Synthetic
uccuccccucguucugcaca

SEQ ID NO: 4075 - RNA, 17 nt, Artificial Sequence
  Synthetic
ucugcuuagaaaaagcu

SEQ ID NO: 4076 - RNA, 17 nt, Artificial Sequence
  Synthetic
ucuggcacugcccacag

SEQ ID NO: 4077 - RNA, 20 nt, Artificial Sequence
  Synthetic
ucuggcacugcccacaggug

SEQ ID NO: 4078 - RNA, 17 nt, Artificial Sequence
  Synthetic
ucuguaagaauggcuuc

SEQ ID NO: 4079 - RNA, 20 nt, Artificial Sequence
  Synthetic
ugaaaaaagcauccaauccc

SEQ ID NO: 4080 - RNA, 20 nt, Artificial Sequence
  Synthetic
ugaagccauucuuacagaug

SEQ ID NO: 4081 - RNA, 17 nt, Artificial Sequence
  Synthetic
ugccaaccuccacggga

SEQ ID NO: 4082 - RNA, 20 nt, Artificial Sequence
  Synthetic
ugccagaugaacuucccauu

SEQ ID NO: 4083 - RNA, 20 nt, Artificial Sequence
  Synthetic
ugcuuuuuucaucucgauug

SEQ ID NO: 4084 - RNA, 20 nt, Artificial Sequence
  Synthetic
uggagcucuaauccccacgc

SEQ ID NO: 4085 - RNA, 17 nt, Artificial Sequence
  Synthetic
uggcacugcccacaggu

SEQ ID NO: 4086 - RNA, 17 nt, Artificial Sequence
  Synthetic
uggcauccaggucacgc

SEQ ID NO: 4087 - RNA, 20 nt, Artificial Sequence
  Synthetic
ugggguuugccuugcuugcg

SEQ ID NO: 4088 - RNA, 20 nt, Artificial Sequence
  Synthetic
uuauuuuuaucgagcacaaa

SEQ ID NO: 4089 - RNA, 17 nt, Artificial Sequence
  Synthetic
uucaucucgauugguga

SEQ ID NO: 4090 - RNA, 20 nt, Artificial Sequence
  Synthetic
uuggcauccaggucacgcca

SEQ ID NO: 4091 - RNA, 17 nt, Artificial Sequence
  Synthetic
uugugcucgauaaaaau

SEQ ID NO: 4092 - RNA, 17 nt, Artificial Sequence
  Synthetic
uuucaucucgauuggug

SEQ ID NO: 4093 - RNA, 20 nt, Artificial Sequence
  Synthetic
uuucaucucgauuggugaag

SEQ ID NO: 4094 - RNA, 20 nt, Artificial Sequence
  Synthetic
uuuucaucucgauuggugaa

SEQ ID NO: 4095 - RNA, 17 nt, Artificial Sequence
  Synthetic
uuuuuaucgagcacaaa

SEQ ID NO: 4096 - RNA, 20 nt, Artificial Sequence
  Synthetic
uuuuucaucucgauugguga

SEQ ID NO: 4097 - RNA, 17 nt, Artificial Sequence
  Synthetic
uuuuuucaucucgauug

SEQ ID NO: 4098 - RNA, 20 nt, Artificial Sequence
  Synthetic
uuuuuucaucucgauuggug

SEQ ID NO: 4099 - RNA, 20 nt, Artificial Sequence
  Synthetic
ucgucggacuugaccgucau

SEQ ID NO: 4100 - RNA, 20 nt, Artificial Sequence
  Synthetic
gucgucggacuugaccguca

SEQ ID NO: 4101 - RNA, 20 nt, Artificial Sequence
  Synthetic
cgucgucggacuugaccguc

SEQ ID NO: 4102 - RNA, 20 nt, Artificial Sequence
  Synthetic
cgucggacuugaccgucaug

SEQ ID NO: 4103 - RNA, 20 nt, Artificial Sequence
  Synthetic
cccauauuagugguccgggc

SEQ ID NO: 4104 - RNA, 20 nt, Artificial Sequence
  Synthetic
gcgguccgacucgccggcca

SEQ ID NO: 4105 - RNA, 20 nt, Artificial Sequence
  Synthetic
cuccgaggagugcuccgacg

SEQ ID NO: 4106 - RNA, 20 nt, Artificial Sequence
  Synthetic
cccccauucggcguaguacc

SEQ ID NO: 4107 - RNA, 20 nt, Artificial Sequence
  Synthetic
ucuccgaggagugcuccgac

SEQ ID NO: 4108 - RNA, 20 nt, Artificial Sequence
  Synthetic
cccgcggguugguaucccuu

SEQ ID NO: 4109 - RNA, 20 nt, Artificial Sequence
  Synthetic
gcgaguacacguucuccgug

SEQ ID NO: 4110 - RNA, 20 nt, Artificial Sequence
  Synthetic
cccauucggcguaguaccca

SEQ ID NO: 4111 - RNA, 20 nt, Artificial Sequence
  Synthetic
cuccguguugggcaucgcgg

SEQ ID NO: 4112 - RNA, 20 nt, Artificial Sequence
  Synthetic
ccgcgcuuaugcuucucgcc

SEQ ID NO: 4113 - RNA, 20 nt, Artificial Sequence
  Synthetic
cgacgaagacucgguggccg

SEQ ID NO: 4114 - RNA, 20 nt, Artificial Sequence
  Synthetic
acccccaccgcauagagcgc

SEQ ID NO: 4115 - RNA, 20 nt, Artificial Sequence
  Synthetic
acuacgccgaaugggggugu

SEQ ID NO: 4116 - RNA, 20 nt, Artificial Sequence
  Synthetic
ccgggcccggaccacuaaua

SEQ ID NO: 4117 - RNA, 20 nt, Artificial Sequence
  Synthetic
cgcguagccggcgagccacu

SEQ ID NO: 4118 - RNA, 20 nt, Artificial Sequence
  Synthetic
ucggagcacuccucggagaa

SEQ ID NO: 4119 - RNA, 20 nt, Artificial Sequence
  Synthetic
cggagcacuccucggagaac

SEQ ID NO: 4120 - RNA, 20 nt, Artificial Sequence
  Synthetic
ucucuggguacuacgccgaa

SEQ ID NO: 4121 - RNA, 20 nt, Artificial Sequence
  Synthetic
ugccgcagaacucgcaugac

SEQ ID NO: 4122 - RNA, 20 nt, Artificial Sequence
  Synthetic
gauaccaacccgcgggguca

SEQ ID NO: 4123 - RNA, 20 nt, Artificial Sequence
  Synthetic
ggauaccaacccgcgggguc

SEQ ID NO: 4124 - RNA, 20 nt, Artificial Sequence
  Synthetic
gggauaccaacccgcggggu

SEQ ID NO: 4125 - RNA, 20 nt, Artificial Sequence
  Synthetic
cccccaccgcauagagcgcc

SEQ ID NO: 4126 - RNA, 20 nt, Artificial Sequence
  Synthetic
gguuggggucguucucgcuc

SEQ ID NO: 4127 - RNA, 20 nt, Artificial Sequence
  Synthetic
gcacgccccauauuaguggu

SEQ ID NO: 4128 - RNA, 20 nt, Artificial Sequence
  Synthetic
uaagcgcaucaagcucgaga

SEQ ID NO: 4129 - RNA, 20 nt, Artificial Sequence
  Synthetic
guucuccgaggagugcuccg

SEQ ID NO: 4130 - RNA, 20 nt, Artificial Sequence
  Synthetic
ucucgagcuugaugcgcuua

SEQ ID NO: 4131 - RNA, 20 nt, Artificial Sequence
  Synthetic
cuaagcgcaucaagcucgag

SEQ ID NO: 4132 - RNA, 20 nt, Artificial Sequence
  Synthetic
gucggagcacuccucggaga

SEQ ID NO: 4133 - RNA, 20 nt, Artificial Sequence
  Synthetic
uggccgcggcugcuccccgg

SEQ ID NO: 4134 - RNA, 20 nt, Artificial Sequence
  Synthetic
ccccaccgcauagagcgccu

SEQ ID NO: 4135 - RNA, 20 nt, Artificial Sequence
  Synthetic
ccugaagggauaccaacccg

SEQ ID NO: 4136 - RNA, 20 nt, Artificial Sequence
  Synthetic
gcgcuucuccacaccgcccg

SEQ ID NO: 4137 - RNA, 20 nt, Artificial Sequence
  Synthetic
gcgcccugcccgacgucaug

SEQ ID NO: 4138 - RNA, 20 nt, Artificial Sequence
  Synthetic
aacccggcaccagcgacuug

SEQ ID NO: 4139 - RNA, 20 nt, Artificial Sequence
  Synthetic
cucuggguacuacgccgaau

SEQ ID NO: 4140 - RNA, 20 nt, Artificial Sequence
  Synthetic
cccguucuccgggaucaggu

SEQ ID NO: 4141 - RNA, 20 nt, Artificial Sequence
  Synthetic
gaacgaccccaaccugaucc

SEQ ID NO: 4142 - RNA, 20 nt, Artificial Sequence
  Synthetic
acgccgaaugggggugugug

SEQ ID NO: 4143 - RNA, 20 nt, Artificial Sequence
  Synthetic
gucgcuggugccggguuccg

SEQ ID NO: 4144 - RNA, 20 nt, Artificial Sequence
  Synthetic
ccccgggcgagucggccucg

SEQ ID NO: 4145 - RNA, 20 nt, Artificial Sequence
  Synthetic
cggugcaccaccagguugcu

SEQ ID NO: 4146 - RNA, 20 nt, Artificial Sequence
  Synthetic
guccaccaccgagacaucac

SEQ ID NO: 4147 - RNA, 20 nt, Artificial Sequence
  Synthetic
uuaauggccgcggcugcucc

SEQ ID NO: 4148 - RNA, 20 nt, Artificial Sequence
  Synthetic
cucucuggguacuacgccga

SEQ ID NO: 4149 - RNA, 20 nt, Artificial Sequence
  Synthetic
gcgcaaacucccguucuccg

SEQ ID NO: 4150 - RNA, 20 nt, Artificial Sequence
  Synthetic
cccgggcccggaccacuaau

SEQ ID NO: 4151 - RNA, 20 nt, Artificial Sequence
  Synthetic
gcccccaggcgcucuaugcg

SEQ ID NO: 4152 - RNA, 20 nt, Artificial Sequence
  Synthetic
aucgccuuuugccuccucgu

SEQ ID NO: 4153 - RNA, 20 nt, Artificial Sequence
  Synthetic
ccucgucggagcacuccucg

SEQ ID NO: 4154 - RNA, 20 nt, Artificial Sequence
  Synthetic
gagcuugaugcgcuuagaga

SEQ ID NO: 4155 - RNA, 20 nt, Artificial Sequence
  Synthetic
ccccguucuccgggaucagg

SEQ ID NO: 4156 - RNA, 20 nt, Artificial Sequence
  Synthetic
cggccgcgaugcccaacacg

SEQ ID NO: 4157 - RNA, 20 nt, Artificial Sequence
  Synthetic
gccccccgaggccgacucgc

SEQ ID NO: 4158 - RNA, 20 nt, Artificial Sequence
  Synthetic
cccggccgcgaugcccaaca

SEQ ID NO: 4159 - RNA, 20 nt, Artificial Sequence
  Synthetic
cuccucgucggagcacuccu

SEQ ID NO: 4160 - RNA, 20 nt, Artificial Sequence
  Synthetic
gucucggugguggacuaaac

SEQ ID NO: 4161 - RNA, 20 nt, Artificial Sequence
  Synthetic
ccccaggcgcucuaugcggu

SEQ ID NO: 4162 - RNA, 20 nt, Artificial Sequence
  Synthetic
ggucgcacagguugcacuug

SEQ ID NO: 4163 - RNA, 20 nt, Artificial Sequence
  Synthetic
agucgcuggugccggguucc

SEQ ID NO: 4164 - RNA, 20 nt, Artificial Sequence
  Synthetic
cccggucaaguccaagucau

SEQ ID NO: 4165 - RNA, 20 nt, Artificial Sequence
  Synthetic
agaacgaccccaaccugauc

SEQ ID NO: 4166 - RNA, 20 nt, Artificial Sequence
  Synthetic
uccguguugggcaucgcggc

SEQ ID NO: 4167 - RNA, 20 nt, Artificial Sequence
  Synthetic
ccuccucgucggagcacucc

SEQ ID NO: 4168 - RNA, 20 nt, Artificial Sequence
  Synthetic
ucacuuggacccccaccgca

SEQ ID NO: 4169 - RNA, 20 nt, Artificial Sequence
  Synthetic
cccaaccugaucccggagaa

SEQ ID NO: 4170 - RNA, 20 nt, Artificial Sequence
  Synthetic
acuacggcuucgggcugagc

SEQ ID NO: 4171 - RNA, 20 nt, Artificial Sequence
  Synthetic
uuugcgcuucuccacaccgc

SEQ ID NO: 4172 - RNA, 20 nt, Artificial Sequence
  Synthetic
aagucgcuggugccggguuc

SEQ ID NO: 4173 - RNA, 20 nt, Artificial Sequence
  Synthetic
ccccaaccugaucccggaga

SEQ ID NO: 4174 - RNA, 20 nt, Artificial Sequence
  Synthetic
aagacucgguggccggcgag

SEQ ID NO: 4175 - RNA, 20 nt, Artificial Sequence
  Synthetic
gcgcggccaccuggccgagg

SEQ ID NO: 4176 - RNA, 20 nt, Artificial Sequence
  Synthetic
aaucgccuuuugccuccucg

SEQ ID NO: 4177 - RNA, 20 nt, Artificial Sequence
  Synthetic
acgaccccaaccugaucccg

SEQ ID NO: 4178 - RNA, 20 nt, Artificial Sequence
  Synthetic
gaucccggagaacggggacg

SEQ ID NO: 4179 - RNA, 20 nt, Artificial Sequence
  Synthetic
ggggcaggucgaacuccuuc

SEQ ID NO: 4180 - RNA, 20 nt, Artificial Sequence
  Synthetic
uggcuauggagccucccgcc

SEQ ID NO: 4181 - RNA, 20 nt, Artificial Sequence
  Synthetic
cccccaggcgcucuaugcgg

SEQ ID NO: 4182 - RNA, 20 nt, Artificial Sequence
  Synthetic
gcgguugaauccaauggcua

SEQ ID NO: 4183 - RNA, 20 nt, Artificial Sequence
  Synthetic
cuacggcuucgggcugagcc

SEQ ID NO: 4184 - RNA, 20 nt, Artificial Sequence
  Synthetic
acagcucgcggggcgcgguc

SEQ ID NO: 4185 - RNA, 20 nt, Artificial Sequence
  Synthetic
ccccccuguuuaguccacca

SEQ ID NO: 4186 - RNA, 20 nt, Artificial Sequence
  Synthetic
cgcaugacuuggacuugacc

SEQ ID NO: 4187 - RNA, 20 nt, Artificial Sequence
  Synthetic
cacggaaguccccugacccc

SEQ ID NO: 4188 - RNA, 20 nt, Artificial Sequence
  Synthetic
ccucccgccauggauuucuc

SEQ ID NO: 4189 - RNA, 20 nt, Artificial Sequence
  Synthetic
ucucggugguggacuaaaca

SEQ ID NO: 4190 - RNA, 20 nt, Artificial Sequence
  Synthetic
ugaacuuggccaccacggac

SEQ ID NO: 4191 - RNA, 20 nt, Artificial Sequence
  Synthetic
cuucucuaagcgcaucaagc

SEQ ID NO: 4192 - RNA, 20 nt, Artificial Sequence
  Synthetic
agcgcaaacucccguucucc

SEQ ID NO: 4193 - RNA, 20 nt, Artificial Sequence
  Synthetic
ucggugguggacuaaacagg

SEQ ID NO: 4194 - RNA, 20 nt, Artificial Sequence
  Synthetic
cgccaccacgagaacagcuc

SEQ ID NO: 4195 - RNA, 20 nt, Artificial Sequence
  Synthetic
cucccgccauggauuucucu

SEQ ID NO: 4196 - RNA, 20 nt, Artificial Sequence
  Synthetic
cgagcuugaugcgcuuagag

SEQ ID NO: 4197 - RNA, 20 nt, Artificial Sequence
  Synthetic
augcccugcaugacgucggg

SEQ ID NO: 4198 - RNA, 20 nt, Artificial Sequence
  Synthetic
ucucuaagcgcaucaagcuc

SEQ ID NO: 4199 - RNA, 20 nt, Artificial Sequence
  Synthetic
guccaagugaugucucggug

SEQ ID NO: 4200 - RNA, 20 nt, Artificial Sequence
  Synthetic
cccccgaggccgacucgccc

SEQ ID NO: 4201 - RNA, 20 nt, Artificial Sequence
  Synthetic
ccccgaggccgacucgcccg

SEQ ID NO: 4202 - RNA, 20 nt, Artificial Sequence
  Synthetic
gaaauuugaacgucuugccg

SEQ ID NO: 4203 - RNA, 20 nt, Artificial Sequence
  Synthetic
gucgcugcgucugcccucuu

SEQ ID NO: 4204 - RNA, 20 nt, Artificial Sequence
  Synthetic
uggaggcggcgcgccaccac

SEQ ID NO: 4205 - RNA, 20 nt, Artificial Sequence
  Synthetic
cuucucgagcuugaugcgcu

SEQ ID NO: 4206 - RNA, 20 nt, Artificial Sequence
  Synthetic
gaagcgcaaacucccguucu

SEQ ID NO: 4207 - RNA, 20 nt, Artificial Sequence
  Synthetic
gagagaggcuuccggccugg

SEQ ID NO: 4208 - RNA, 20 nt, Artificial Sequence
  Synthetic
uccccgggcgagucggccuc

SEQ ID NO: 4209 - RNA, 20 nt, Artificial Sequence
  Synthetic
caagucgcuggugccggguu

SEQ ID NO: 4210 - RNA, 20 nt, Artificial Sequence
  Synthetic
cauagagcgccugggggcgg

SEQ ID NO: 4211 - RNA, 20 nt, Artificial Sequence
  Synthetic
cucggugguggacuaaacag

SEQ ID NO: 4212 - RNA, 20 nt, Artificial Sequence
  Synthetic
ccccccgaggccgacucgcc

SEQ ID NO: 4213 - RNA, 20 nt, Artificial Sequence
  Synthetic
gguuucucuugcaacacgca

SEQ ID NO: 4214 - RNA, 20 nt, Artificial Sequence
  Synthetic
acuuggacuugaccgggggc

SEQ ID NO: 4215 - RNA, 20 nt, Artificial Sequence
  Synthetic
ugaucccggagaacggggac

SEQ ID NO: 4216 - RNA, 20 nt, Artificial Sequence
  Synthetic
ugucuggagucuccgaagcu

SEQ ID NO: 4217 - RNA, 20 nt, Artificial Sequence
  Synthetic
auggauuucucuaggagacu

SEQ ID NO: 4218 - RNA, 20 nt, Artificial Sequence
  Synthetic
ugcgguugaauccaauggcu

SEQ ID NO: 4219 - RNA, 20 nt, Artificial Sequence
  Synthetic
cuccccgggcgagucggccu

SEQ ID NO: 4220 - RNA, 20 nt, Artificial Sequence
  Synthetic
ccugaucccggagaacgggg

SEQ ID NO: 4221 - RNA, 20 nt, Artificial Sequence
  Synthetic
ugucucggugguggacuaaa

SEQ ID NO: 4222 - RNA, 20 nt, Artificial Sequence
  Synthetic
cggugguggacuaaacaggg

SEQ ID NO: 4223 - RNA, 20 nt, Artificial Sequence
  Synthetic
ugcccaccaagucgcuggug

SEQ ID NO: 4224 - RNA, 20 nt, Artificial Sequence
  Synthetic
cgugguggccaaguucaaga

SEQ ID NO: 4225 - RNA, 20 nt, Artificial Sequence
  Synthetic
caucacccgagugccuuuga

SEQ ID NO: 4226 - RNA, 20 nt, Artificial Sequence
  Synthetic
gcggcaagacguucaaauuu

SEQ ID NO: 4227 - RNA, 20 nt, Artificial Sequence
  Synthetic
aagggcucucgagcuuccau

SEQ ID NO: 4228 - RNA, 20 nt, Artificial Sequence
  Synthetic
gucuggagucuccgaagcua

SEQ ID NO: 4229 - RNA, 20 nt, Artificial Sequence
  Synthetic
ccccggccgcgaugcccaac

SEQ ID NO: 4230 - RNA, 20 nt, Artificial Sequence
  Synthetic
cugucaaaggcacucgggug

SEQ ID NO: 4231 - RNA, 20 nt, Artificial Sequence
  Synthetic
cuuggacuugaccgggggcu

SEQ ID NO: 4232 - RNA, 20 nt, Artificial Sequence
  Synthetic
gacuuggacuugaccggggg

SEQ ID NO: 4233 - RNA, 20 nt, Artificial Sequence
  Synthetic
ugcgucugcccucuuuugag

SEQ ID NO: 4234 - RNA, 20 nt, Artificial Sequence
  Synthetic
ggaggcaaaaggcgauuguc

SEQ ID NO: 4235 - RNA, 20 nt, Artificial Sequence
  Synthetic
gcaacacgcacagaacacuc

SEQ ID NO: 4236 - RNA, 20 nt, Artificial Sequence
  Synthetic
gcaguaaccuuugcauaggg

SEQ ID NO: 4237 - RNA, 20 nt, Artificial Sequence
  Synthetic
uggugcaccggcgcagccac

SEQ ID NO: 4238 - RNA, 20 nt, Artificial Sequence
  Synthetic
ugguggccaaguucaagagc

SEQ ID NO: 4239 - RNA, 20 nt, Artificial Sequence
  Synthetic
gcauaagcgcggccaccugg

SEQ ID NO: 4240 - RNA, 20 nt, Artificial Sequence
  Synthetic
uugcauagggcugggccggc

SEQ ID NO: 4241 - RNA, 20 nt, Artificial Sequence
  Synthetic
ccaaccugaucccggagaac

SEQ ID NO: 4242 - RNA, 20 nt, Artificial Sequence
  Synthetic
agauguguggcaguuuucgg

SEQ ID NO: 4243 - RNA, 20 nt, Artificial Sequence
  Synthetic
caguuuucggauggaagcuc

SEQ ID NO: 4244 - RNA, 20 nt, Artificial Sequence
  Synthetic
gcuccccgggcgagucggcc

SEQ ID NO: 4245 - RNA, 20 nt, Artificial Sequence
  Synthetic
ggguggacuacggcuucggg

SEQ ID NO: 4246 - RNA, 20 nt, Artificial Sequence
  Synthetic
uaucccuucaggacuaggug

SEQ ID NO: 4247 - RNA, 20 nt, Artificial Sequence
  Synthetic
aucucggggcgcagcggcac

SEQ ID NO: 4248 - RNA, 20 nt, Artificial Sequence
  Synthetic
cgcucuugaacuuggccacc

SEQ ID NO: 4249 - RNA, 20 nt, Artificial Sequence
  Synthetic
gcaccggcgcagccacacgg

SEQ ID NO: 4250 - RNA, 20 nt, Artificial Sequence
  Synthetic
gcuucucgcccaggaccugg

SEQ ID NO: 4251 - RNA, 20 nt, Artificial Sequence
  Synthetic
ucccggagaacggggacgag

SEQ ID NO: 4252 - RNA, 20 nt, Artificial Sequence
  Synthetic
cagcacccugucaaaggcac

SEQ ID NO: 4253 - RNA, 20 nt, Artificial Sequence
  Synthetic
cauucugcaccuaguccuga

SEQ ID NO: 4254 - RNA, 20 nt, Artificial Sequence
  Synthetic
cuuuaaccugcuaagaauac

SEQ ID NO: 4255 - RNA, 20 nt, Artificial Sequence
  Synthetic
gucucuccaccgccagcucc

SEQ ID NO: 4256 - RNA, 20 nt, Artificial Sequence
  Synthetic
ucucuccaccgccagcuccc

SEQ ID NO: 4257 - RNA, 20 nt, Artificial Sequence
  Synthetic
ugcuucucgcccaggaccug

SEQ ID NO: 4258 - RNA, 20 nt, Artificial Sequence
  Synthetic
gcgccgccuccaggcucagc

SEQ ID NO: 4259 - RNA, 20 nt, Artificial Sequence
  Synthetic
agaucccuccguccagcucc

SEQ ID NO: 4260 - RNA, 20 nt, Artificial Sequence
  Synthetic
cgagaggguggacuacggcu

SEQ ID NO: 4261 - RNA, 20 nt, Artificial Sequence
  Synthetic
cguccagcuccccgggcggu

SEQ ID NO: 4262 - RNA, 20 nt, Artificial Sequence
  Synthetic
ccagcucucuaagucuccua

SEQ ID NO: 4263 - RNA, 20 nt, Artificial Sequence
  Synthetic
ucgcaugacuuggacuugac

SEQ ID NO: 4264 - RNA, 20 nt, Artificial Sequence
  Synthetic
gcaccaugcccugcaugacg

SEQ ID NO: 4265 - RNA, 20 nt, Artificial Sequence
  Synthetic
aaggcgauugucuggagucu

SEQ ID NO: 4266 - RNA, 20 nt, Artificial Sequence
  Synthetic
gccuggaggccgcguagccg

SEQ ID NO: 4267 - RNA, 20 nt, Artificial Sequence
  Synthetic
gcggccaccuggccgaggcc

SEQ ID NO: 4268 - RNA, 20 nt, Artificial Sequence
  Synthetic
agaauaccaggaucaguauc

SEQ ID NO: 4269 - RNA, 20 nt, Artificial Sequence
  Synthetic
gauguguggcaguuuucgga

SEQ ID NO: 4270 - RNA, 20 nt, Artificial Sequence
  Synthetic
ucuccacaccgcccggggag

SEQ ID NO: 4271 - RNA, 20 nt, Artificial Sequence
  Synthetic
ccuggaggcggcgcgccacc

SEQ ID NO: 4272 - RNA, 20 nt, Artificial Sequence
  Synthetic
cugguauucuuagcagguua

SEQ ID NO: 4273 - RNA, 20 nt, Artificial Sequence
  Synthetic
uagagaaggggcucagcgag

SEQ ID NO: 4274 - RNA, 20 nt, Artificial Sequence
  Synthetic
gaguguucugugcguguugc

SEQ ID NO: 4275 - RNA, 20 nt, Artificial Sequence
  Synthetic
aauaaccccuuuaaccugcu

SEQ ID NO: 4276 - RNA, 20 nt, Artificial Sequence
  Synthetic
aaagcgcccuucugccaggc

SEQ ID NO: 4277 - RNA, 20 nt, Artificial Sequence
  Synthetic
guccagcuccccgggcggug

SEQ ID NO: 4278 - RNA, 20 nt, Artificial Sequence
  Synthetic
aagggcggcuugcuaccugg

SEQ ID NO: 4279 - RNA, 20 nt, Artificial Sequence
  Synthetic
gaaagcgcccuucugccagg

SEQ ID NO: 4280 - RNA, 20 nt, Artificial Sequence
  Synthetic
agggcggcuugcuaccuggc

SEQ ID NO: 4281 - RNA, 20 nt, Artificial Sequence
  Synthetic
cgcggggcgcggucgugggc

SEQ ID NO: 4282 - RNA, 20 nt, Artificial Sequence
  Synthetic
gcgaggccuuccaccagguc

SEQ ID NO: 4283 - RNA, 20 nt, Artificial Sequence
  Synthetic
acuucccgugccgcugcgcc

SEQ ID NO: 4284 - RNA, 20 nt, Artificial Sequence
  Synthetic
gcacagaacacucauggauu

SEQ ID NO: 4285 - RNA, 20 nt, Artificial Sequence
  Synthetic
ccagcuccccgggcggugug

SEQ ID NO: 4286 - RNA, 20 nt, Artificial Sequence
  Synthetic
accgcccggggagcuggacg

SEQ ID NO: 4287 - RNA, 20 nt, Artificial Sequence
  Synthetic
ugguugcaguaaccuuugca

SEQ ID NO: 4288 - RNA, 20 nt, Artificial Sequence
  Synthetic
aggagacuuagagagcuggc

SEQ ID NO: 4289 - RNA, 20 nt, Artificial Sequence
  Synthetic
accggcgcagccacacgggc

SEQ ID NO: 4290 - RNA, 20 nt, Artificial Sequence
  Synthetic
acauucugcaccuaguccug

SEQ ID NO: 4291 - RNA, 20 nt, Artificial Sequence
  Synthetic
guguucugugcguguugcaa

SEQ ID NO: 4292 - RNA, 20 nt, Artificial Sequence
  Synthetic
uggcccuggccacccaucac

SEQ ID NO: 4293 - RNA, 20 nt, Artificial Sequence
  Synthetic
ugcauagggcugggccggcc

SEQ ID NO: 4294 - RNA, 20 nt, Artificial Sequence
  Synthetic
aauaccaggaucaguaucga

SEQ ID NO: 4295 - RNA, 20 nt, Artificial Sequence
  Synthetic
uccugaagggauaccaaccc

SEQ ID NO: 4296 - RNA, 20 nt, Artificial Sequence
  Synthetic
cuccuagagaaauccauggc

SEQ ID NO: 4297 - RNA, 20 nt, Artificial Sequence
  Synthetic
uggcgguggagagaccgucg

SEQ ID NO: 4298 - RNA, 20 nt, Artificial Sequence
  Synthetic
ggauuucucuaggagacuua

SEQ ID NO: 4299 - RNA, 20 nt, Artificial Sequence
  Synthetic
cucgcaugacuuggacuuga

SEQ ID NO: 4300 - RNA, 20 nt, Artificial Sequence
  Synthetic
gaucucggggcgcagcggca

SEQ ID NO: 4301 - RNA, 20 nt, Artificial Sequence
  Synthetic
ggugguggacuaaacagggg

SEQ ID NO: 4302 - RNA, 20 nt, Artificial Sequence
  Synthetic
aggccucgcugaagugcugc

SEQ ID NO: 4303 - RNA, 20 nt, Artificial Sequence
  Synthetic
ccaccagguugcucugaaau

SEQ ID NO: 4304 - RNA, 20 nt, Artificial Sequence
  Synthetic
accgcauagagcgccugggg

SEQ ID NO: 4305 - RNA, 20 nt, Artificial Sequence
  Synthetic
ccagcaagcugaagcgccac

SEQ ID NO: 4306 - RNA, 20 nt, Artificial Sequence
  Synthetic
ggccucgcugaagugcugca

SEQ ID NO: 4307 - RNA, 20 nt, Artificial Sequence
  Synthetic
cgugcacccaggccagcaag

SEQ ID NO: 4308 - RNA, 20 nt, Artificial Sequence
  Synthetic
ggcgggaggcuccauagcca

SEQ ID NO: 4309 - RNA, 20 nt, Artificial Sequence
  Synthetic
aggaggcaaaaggcgauugu

SEQ ID NO: 4310 - RNA, 20 nt, Artificial Sequence
  Synthetic
aaagaucccuuccuuagcuu

SEQ ID NO: 4311 - RNA, 20 nt, Artificial Sequence
  Synthetic
ggagucuccgaagcuaagga

SEQ ID NO: 4312 - RNA, 20 nt, Artificial Sequence
  Synthetic
gcgcuuagagaaggggcuca

SEQ ID NO: 4313 - RNA, 20 nt, Artificial Sequence
  Synthetic
cagcuuuuuggacaggcccc

SEQ ID NO: 4314 - RNA, 20 nt, Artificial Sequence
  Synthetic
gcacucgggugauggguggc

SEQ ID NO: 4315 - RNA, 20 nt, Artificial Sequence
  Synthetic
cacgcccacgaccgcgcccc

SEQ ID NO: 4316 - RNA, 20 nt, Artificial Sequence
  Synthetic
aaguuguacauguguagcug

SEQ ID NO: 4317 - RNA, 20 nt, Artificial Sequence
  Synthetic
aguccgugguggccaaguuc

SEQ ID NO: 4318 - RNA, 20 nt, Artificial Sequence
  Synthetic
cccggagaacggggacgagg

SEQ ID NO: 4319 - RNA, 20 nt, Artificial Sequence
  Synthetic
cgggcaggcccagcucaaaa

SEQ ID NO: 4320 - RNA, 20 nt, Artificial Sequence
  Synthetic
ugguauucuuagcagguuaa

SEQ ID NO: 4321 - RNA, 20 nt, Artificial Sequence
  Synthetic
uugucugcaauaugaauccc

SEQ ID NO: 4322 - RNA, 20 nt, Artificial Sequence
  Synthetic
gucuccuagagaaauccaug

SEQ ID NO: 4323 - RNA, 20 nt, Artificial Sequence
  Synthetic
uggacuugaccgggggcugg

SEQ ID NO: 4324 - RNA, 20 nt, Artificial Sequence
  Synthetic
uggagucuccgaagcuaagg

SEQ ID NO: 4325 - RNA, 20 nt, Artificial Sequence
  Synthetic
ugagcugggccugcccgggc

SEQ ID NO: 4326 - RNA, 20 nt, Artificial Sequence
  Synthetic
caaagaucccuuccuuagcu

SEQ ID NO: 4327 - RNA, 20 nt, Artificial Sequence
  Synthetic
ugccacacaucuugagcucu

SEQ ID NO: 4328 - RNA, 20 nt, Artificial Sequence
  Synthetic
ccgcccggggagcuggacgg

SEQ ID NO: 4329 - RNA, 20 nt, Artificial Sequence
  Synthetic
agagaaggggcucagcgagc

SEQ ID NO: 4330 - RNA, 20 nt, Artificial Sequence
  Synthetic
ggagacuuagagagcuggca

SEQ ID NO: 4331 - RNA, 20 nt, Artificial Sequence
  Synthetic
gaaucccauggagagguggc

SEQ ID NO: 4332 - RNA, 20 nt, Artificial Sequence
  Synthetic
cgcugaagugcugcauggag

SEQ ID NO: 4333 - RNA, 20 nt, Artificial Sequence
  Synthetic
aggacauucugcaccuaguc

SEQ ID NO: 4334 - RNA, 20 nt, Artificial Sequence
  Synthetic
aaucccauggagagguggcu

SEQ ID NO: 4335 - RNA, 20 nt, Artificial Sequence
  Synthetic
ugagcucucuggguacuacg

SEQ ID NO: 4336 - RNA, 20 nt, Artificial Sequence
  Synthetic
gggccacagggacacuugcg

SEQ ID NO: 4337 - RNA, 20 nt, Artificial Sequence
  Synthetic
uaggagacuuagagagcugg

SEQ ID NO: 4338 - RNA, 20 nt, Artificial Sequence
  Synthetic
ccuuugacagggugcugcgg

SEQ ID NO: 4339 - RNA, 20 nt, Artificial Sequence
  Synthetic
uggccgaggccgagggccac

SEQ ID NO: 4340 - RNA, 20 nt, Artificial Sequence
  Synthetic
ggaagggaucuuugagcugc

SEQ ID NO: 4341 - RNA, 20 nt, Artificial Sequence
  Synthetic
ucuaaguagauucuuaaucc

SEQ ID NO: 4342 - RNA, 20 nt, Artificial Sequence
  Synthetic
ggggcgcagcggcacgggaa

SEQ ID NO: 4343 - RNA, 20 nt, Artificial Sequence
  Synthetic
cuggccgaggccgagggcca

SEQ ID NO: 4344 - RNA, 20 nt, Artificial Sequence
  Synthetic
cucaagauguguggcaguuu

SEQ ID NO: 4345 - RNA, 20 nt, Artificial Sequence
  Synthetic
cgaagcuaaggaagggaucu

SEQ ID NO: 4346 - RNA, 20 nt, Artificial Sequence
  Synthetic
ugccagcucucuaagucucc

SEQ ID NO: 4347 - RNA, 20 nt, Artificial Sequence
  Synthetic
ucuccuagagaaauccaugg

SEQ ID NO: 4348 - RNA, 20 nt, Artificial Sequence
  Synthetic
gccaccacgagaacagcucg

SEQ ID NO: 4349 - RNA, 20 nt, Artificial Sequence
  Synthetic
ucugcaauaugaaucccaug

SEQ ID NO: 4350 - RNA, 20 nt, Artificial Sequence
  Synthetic
cagcuccaugcagcacuuca

SEQ ID NO: 4351 - RNA, 20 nt, Artificial Sequence
  Synthetic
gccuguccaaaaagcugcug

SEQ ID NO: 4352 - RNA, 20 nt, Artificial Sequence
  Synthetic
uaagaauaccaggaucagua

SEQ ID NO: 4353 - RNA, 20 nt, Artificial Sequence
  Synthetic
ggaucucggggcgcagcggc

SEQ ID NO: 4354 - RNA, 20 nt, Artificial Sequence
  Synthetic
ggcaguuuucggauggaagc

SEQ ID NO: 4355 - RNA, 20 nt, Artificial Sequence
  Synthetic
cggucgugggcgugggcgac

SEQ ID NO: 4356 - RNA, 20 nt, Artificial Sequence
  Synthetic
gcaucgcggccgggggcagg

SEQ ID NO: 4357 - RNA, 20 nt, Artificial Sequence
  Synthetic
aaucuacuuagaaagcgaac

SEQ ID NO: 4358 - RNA, 20 nt, Artificial Sequence
  Synthetic
aagggguuauugucugcaau

SEQ ID NO: 4359 - RNA, 20 nt, Artificial Sequence
  Synthetic
ggacuugaccgggggcuggg

SEQ ID NO: 4360 - RNA, 20 nt, Artificial Sequence
  Synthetic
ucauggauuaagaaucuacu

SEQ ID NO: 4361 - RNA, 20 nt, Artificial Sequence
  Synthetic
agaggcuuccggccuggcag

SEQ ID NO: 4362 - RNA, 20 nt, Artificial Sequence
  Synthetic
ggccuuccaccagguccugg

SEQ ID NO: 4363 - RNA, 20 nt, Artificial Sequence
  Synthetic
uggcgcuucagcuugcuggc

SEQ ID NO: 4364 - RNA, 20 nt, Artificial Sequence
  Synthetic
ccgcauagagcgccuggggg

SEQ ID NO: 4365 - RNA, 20 nt, Artificial Sequence
  Synthetic
ggaccugguggaaggccucg

SEQ ID NO: 4366 - RNA, 20 nt, Artificial Sequence
  Synthetic
ccuuccaccagguccugggc

SEQ ID NO: 4367 - RNA, 20 nt, Artificial Sequence
  Synthetic
ugucugcaauaugaauccca

SEQ ID NO: 4368 - RNA, 20 nt, Artificial Sequence
  Synthetic
ggagcuggacggagggaucu

SEQ ID NO: 4369 - RNA, 20 nt, Artificial Sequence
  Synthetic
gacuugaccgggggcuggga

SEQ ID NO: 4370 - RNA, 20 nt, Artificial Sequence
  Synthetic
uccuucccagccaccucucc

SEQ ID NO: 4371 - RNA, 20 nt, Artificial Sequence
  Synthetic
cucuuuugagcugggccugc

SEQ ID NO: 4372 - RNA, 20 nt, Artificial Sequence
  Synthetic
ugcgcuucuccacaccgccc

SEQ ID NO: 4373 - RNA, 20 nt, Artificial Sequence
  Synthetic
gcaagagaaaccaugcacug

SEQ ID NO: 4374 - RNA, 20 nt, Artificial Sequence
  Synthetic
gggagcuggacggagggauc

SEQ ID NO: 4375 - RNA, 20 nt, Artificial Sequence
  Synthetic
guuccggggagcuggcggug

SEQ ID NO: 4376 - RNA, 20 nt, Artificial Sequence
  Synthetic
ugaaucccauggagaggugg

SEQ ID NO: 4377 - RNA, 20 nt, Artificial Sequence
  Synthetic
cggguuccggggagcuggcg

SEQ ID NO: 4378 - RNA, 20 nt, Artificial Sequence
  Synthetic
guggacuaaacaggggggga

SEQ ID NO: 4379 - RNA, 20 nt, Artificial Sequence
  Synthetic
ggcugcccagcagcagcuuu

SEQ ID NO: 4380 - RNA, 20 nt, Artificial Sequence
  Synthetic
gaagggaucuuugagcugcc

SEQ ID NO: 4381 - RNA, 20 nt, Artificial Sequence
  Synthetic
ccuucccagccaccucucca

SEQ ID NO: 4382 - RNA, 20 nt, Artificial Sequence
  Synthetic
gcgcagcggcacgggaagug

SEQ ID NO: 4383 - RNA, 20 nt, Artificial Sequence
  Synthetic
ggguuccggggagcuggcgg

SEQ ID NO: 4384 - RNA, 20 nt, Artificial Sequence
  Synthetic
uccuccucguccccguucuc

SEQ ID NO: 4385 - RNA, 20 nt, Artificial Sequence
  Synthetic
gcagcggcacgggaagugga

SEQ ID NO: 4386 - RNA, 20 nt, Artificial Sequence
  Synthetic
ugcugggcagccccagcucg

SEQ ID NO: 4387 - RNA, 20 nt, Artificial Sequence
  Synthetic
gggcgcagcggcacgggaag

SEQ ID NO: 4388 - RNA, 20 nt, Artificial Sequence
  Synthetic
acaccgcccggggagcugga

SEQ ID NO: 4389 - RNA, 20 nt, Artificial Sequence
  Synthetic
cccauggagagguggcuggg

SEQ ID NO: 4390 - RNA, 20 nt, Artificial Sequence
  Synthetic
uuccuccucguccccguucu

SEQ ID NO: 4391 - RNA, 20 nt, Artificial Sequence
  Synthetic
aucuacuuagaaagcgaaca

SEQ ID NO: 4392 - RNA, 20 nt, Artificial Sequence
  Synthetic
cccgggcaggcccagcucaa

SEQ ID NO: 4393 - RNA, 20 nt, Artificial Sequence
  Synthetic
cacaccgcccggggagcugg

SEQ ID NO: 4394 - RNA, 20 nt, Artificial Sequence
  Synthetic
acuaaacagggggggagugg

SEQ ID NO: 4395 - RNA, 20 nt, Artificial Sequence
  Synthetic
gaccgggggcugggagggag

SEQ ID NO: 4396 - RNA, 20 nt, Artificial Sequence
  Synthetic
gggccggccuggggacagcg

SEQ ID NO: 4397 - RNA, 20 nt, Artificial Sequence
  Synthetic
gcauagggcugggccggccu

SEQ ID NO: 4398 - RNA, 20 nt, Artificial Sequence
  Synthetic
auuaagaaucuacuuagaaa

SEQ ID NO: 4399 - RNA, 20 nt, Artificial Sequence
  Synthetic
cuaaacagggggggaguggg

SEQ ID NO: 4400 - RNA, 20 nt, Artificial Sequence
  Synthetic
uugaccgggggcugggaggg

SEQ ID NO: 4401 - RNA, 20 nt, Artificial Sequence
  Synthetic
cgcggucgugggcgugggcg

SEQ ID NO: 4402 - RNA, 20 nt, Artificial Sequence
  Synthetic
gagggagggggggcgucgcc

SEQ ID NO: 4403 - RNA, 20 nt, Artificial Sequence
  Synthetic
ggagaacggggacgaggagg

SEQ ID NO: 4404 - RNA, 20 nt, Artificial Sequence
  Synthetic
cuugaccgggggcugggagg

SEQ ID NO: 4405 - RNA, 20 nt, Artificial Sequence
  Synthetic
ggagggagggggggcgucgc

SEQ ID NO: 4406 - RNA, 20 nt, Artificial Sequence
  Synthetic
accgggggcugggagggagg

SEQ ID NO: 4407 - RNA, 20 nt, Artificial Sequence
  Synthetic
cgcagcggcacgggaagugg

SEQ ID NO: 4408 - RNA, 20 nt, Artificial Sequence
  Synthetic
gcggauugcagaggagggag

SEQ ID NO: 4409 - RNA, 20 nt, Artificial Sequence
  Synthetic
ggagggggggcgucgccagg

SEQ ID NO: 4410 - RNA, 20 nt, Artificial Sequence
  Synthetic
ggcggauugcagaggaggga

SEQ ID NO: 4411 - RNA, 20 nt, Artificial Sequence
  Synthetic
gaggggcggauugcagagga

SEQ ID NO: 4412 - RNA, 20 nt, Artificial Sequence
  Synthetic
ggggcggauugcagaggagg

SEQ ID NO: 4413 - RNA, 20 nt, Artificial Sequence
  Synthetic
gaggagcugacggagagcga

SEQ ID NO: 4414 - RNA, 20 nt, Artificial Sequence
  Synthetic
uccgaaaacugccacacauc

SEQ ID NO: 4415 - RNA, 20 nt, Artificial Sequence
  Synthetic
cggauugcagaggagggagg

SEQ ID NO: 4416 - RNA, 20 nt, Artificial Sequence
  Synthetic
ggaggggcggauugcagagg

SEQ ID NO: 4417 - RNA, 20 nt, Artificial Sequence
  Synthetic
gggcggauugcagaggaggg

SEQ ID NO: 4418 - RNA, 20 nt, Artificial Sequence
  Synthetic
aggaggggcggauugcagag

SEQ ID NO: 4419 - RNA, 20 nt, Artificial Sequence
  Synthetic
agaacggggacgaggaggaa

SEQ ID NO: 4420 - RNA, 20 nt, Artificial Sequence
  Synthetic
gagggaggaggggcggauug

SEQ ID NO: 4421 - RNA, 20 nt, Artificial Sequence
  Synthetic
uugcgcuucuccacaccgcc

SEQ ID NO: 4422 - RNA, 20 nt, Artificial Sequence
  Synthetic
agcugacggagagcgagagg

SEQ ID NO: 4423 - RNA, 20 nt, Artificial Sequence
  Synthetic
aggaggagcugacggagagc

SEQ ID NO: 4424 - RNA, 20 nt, Artificial Sequence
  Synthetic
ggggcugggagggaggaggg

SEQ ID NO: 4425 - RNA, 20 nt, Artificial Sequence
  Synthetic
gggaggaggggcggauugca

SEQ ID NO: 4426 - RNA, 20 nt, Artificial Sequence
  Synthetic
ccguguugggcaucgcggcc

SEQ ID NO: 4427 - RNA, 20 nt, Artificial Sequence
  Synthetic
gaacggggacgaggaggaag

SEQ ID NO: 4428 - RNA, 20 nt, Artificial Sequence
  Synthetic
ggaggaggggcggauugcag

SEQ ID NO: 4429 - RNA, 20 nt, Artificial Sequence
  Synthetic
ggaggaggagcugacggaga

SEQ ID NO: 4430 - RNA, 20 nt, Artificial Sequence
  Synthetic
acggggacgaggaggaagag

SEQ ID NO: 4431 - RNA, 20 nt, Artificial Sequence
  Synthetic
aggaggaggaggagcugacg

SEQ ID NO: 4432 - RNA, 20 nt, Artificial Sequence
  Synthetic
acgacgaggaagaggaagaa

SEQ ID NO: 4433 - RNA, 20 nt, Artificial Sequence
  Synthetic
acgaggaagaggaagaagag

SEQ ID NO: 4434 - RNA, 20 nt, Artificial Sequence
  Synthetic
aggaggaagaggaggacgac

SEQ ID NO: 4435 - RNA, 20 nt, Artificial Sequence
  Synthetic
aagaggaggacgacgaggaa

SEQ ID NO: 4436 - RNA, 20 nt, Artificial Sequence
  Synthetic
agaggaggaggaggagcuga

SEQ ID NO: 4437 - RNA, 20 nt, Artificial Sequence
  Synthetic
ggaggaagaggaggacgacg

SEQ ID NO: 4438 - RNA, 20 nt, Artificial Sequence
  Synthetic
cgaggaggaagaggaggacg

SEQ ID NO: 4439 - RNA, 20 nt, Artificial Sequence
  Synthetic
cgaggaagaggaagaagagg

SEQ ID NO: 4440 - RNA, 20 nt, Artificial Sequence
  Synthetic
aagaggaggaggaggagcug

SEQ ID NO: 4441 - RNA, 20 nt, Artificial Sequence
  Synthetic
cgacgaggaagaggaagaag

SEQ ID NO: 4442 - RNA, 20 nt, Artificial Sequence
  Synthetic
ggaggacgacgaggaagagg

SEQ ID NO: 4443 - RNA, 20 nt, Artificial Sequence
  Synthetic
agaggaggacgacgaggaag

SEQ ID NO: 4444 - RNA, 20 nt, Artificial Sequence
  Synthetic
ggacgacgaggaagaggaag

SEQ ID NO: 4445 - RNA, 20 nt, Artificial Sequence
  Synthetic
ggaagaggaggacgacgagg

SEQ ID NO: 4446 - RNA, 20 nt, Artificial Sequence
  Synthetic
aggaagaagaggaggaagag

SEQ ID NO: 4447 - RNA, 20 nt, Artificial Sequence
  Synthetic
aagaggaagaagaggaggaa

SEQ ID NO: 4448 - RNA, 20 nt, Artificial Sequence
  Synthetic
ggaagaggaagaagaggagg

SEQ ID NO: 4449 - RNA, 20 nt, Artificial Sequence
  Synthetic
aagaagaggaggaagaggag

SEQ ID NO: 4450 - RNA, 20 nt, Artificial Sequence
  Synthetic
aagaggaggaagaggaggag

SEQ ID NO: 4451 - RNA, 20 nt, Artificial Sequence
  Synthetic
agaggaagaagaggaggaag

SEQ ID NO: 4452 - RNA, 20 nt, Artificial Sequence
  Synthetic
ggaagaagaggaggaagagg

SEQ ID NO: 4453 - RNA, 20 nt, Artificial Sequence
  Synthetic
agaagaggaggaagaggagg

SEQ ID NO: 4454 - RNA, 20 nt, Artificial Sequence
  Synthetic
agaggaggaagaggaggagg

SEQ ID NO: 4455 - RNA, 17 nt, Artificial Sequence
  Synthetic
ucggacuugaccgucau

SEQ ID NO: 4456 - RNA, 17 nt, Artificial Sequence
  Synthetic
gucggacuugaccguca

SEQ ID NO: 4457 - RNA, 17 nt, Artificial Sequence
  Synthetic
cgucggacuugaccguc

SEQ ID NO: 4458 - RNA, 17 nt, Artificial Sequence
  Synthetic
cggacuugaccgucaug

SEQ ID NO: 4459 - RNA, 17 nt, Artificial Sequence
  Synthetic
auauuagugguccgggc

SEQ ID NO: 4460 - RNA, 17 nt, Artificial Sequence
  Synthetic
guccgacucgccggcca

SEQ ID NO: 4461 - RNA, 17 nt, Artificial Sequence
  Synthetic
cgaggagugcuccgacg

SEQ ID NO: 4462 - RNA, 17 nt, Artificial Sequence
  Synthetic
ccauucggcguaguacc

SEQ ID NO: 4463 - RNA, 17 nt, Artificial Sequence
  Synthetic
ccgaggagugcuccgac

SEQ ID NO: 4464 - RNA, 17 nt, Artificial Sequence
  Synthetic
gcggguugguaucccuu

SEQ ID NO: 4465 - RNA, 17 nt, Artificial Sequence
  Synthetic
aguacacguucuccgug

SEQ ID NO: 4466 - RNA, 17 nt, Artificial Sequence
  Synthetic
auucggcguaguaccca

SEQ ID NO: 4467 - RNA, 17 nt, Artificial Sequence
  Synthetic
cguguugggcaucgcgg

SEQ ID NO: 4468 - RNA, 17 nt, Artificial Sequence
  Synthetic
cgcuuaugcuucucgcc

SEQ ID NO: 4469 - RNA, 17 nt, Artificial Sequence
  Synthetic
cgaagacucgguggccg

SEQ ID NO: 4470 - RNA, 17 nt, Artificial Sequence
  Synthetic
cccaccgcauagagcgc

SEQ ID NO: 4471 - RNA, 17 nt, Artificial Sequence
  Synthetic
acgccgaaugggggugu

SEQ ID NO: 4472 - RNA, 17 nt, Artificial Sequence
  Synthetic
ggcccggaccacuaaua

SEQ ID NO: 4473 - RNA, 17 nt, Artificial Sequence
  Synthetic
guagccggcgagccacu

SEQ ID NO: 4474 - RNA, 17 nt, Artificial Sequence
  Synthetic
gagcacuccucggagaa

SEQ ID NO: 4475 - RNA, 17 nt, Artificial Sequence
  Synthetic
agcacuccucggagaac

SEQ ID NO: 4476 - RNA, 17 nt, Artificial Sequence
  Synthetic
cuggguacuacgccgaa

SEQ ID NO: 4477 - RNA, 17 nt, Artificial Sequence
  Synthetic
cgcagaacucgcaugac

SEQ ID NO: 4478 - RNA, 17 nt, Artificial Sequence
  Synthetic
accaacccgcgggguca

SEQ ID NO: 4479 - RNA, 17 nt, Artificial Sequence
  Synthetic
uaccaacccgcgggguc

SEQ ID NO: 4480 - RNA, 17 nt, Artificial Sequence
  Synthetic
auaccaacccgcggggu

SEQ ID NO: 4481 - RNA, 17 nt, Artificial Sequence
  Synthetic
ccaccgcauagagcgcc

SEQ ID NO: 4482 - RNA, 17 nt, Artificial Sequence
  Synthetic
uggggucguucucgcuc

SEQ ID NO: 4483 - RNA, 17 nt, Artificial Sequence
  Synthetic
cgccccauauuaguggu

SEQ ID NO: 4484 - RNA, 17 nt, Artificial Sequence
  Synthetic
gcgcaucaagcucgaga

SEQ ID NO: 4485 - RNA, 17 nt, Artificial Sequence
  Synthetic
cuccgaggagugcuccg

SEQ ID NO: 4486 - RNA, 17 nt, Artificial Sequence
  Synthetic
cgagcuugaugcgcuua

SEQ ID NO: 4487 - RNA, 17 nt, Artificial Sequence
  Synthetic
agcgcaucaagcucgag

SEQ ID NO: 4488 - RNA, 17 nt, Artificial Sequence
  Synthetic
ggagcacuccucggaga

SEQ ID NO: 4489 - RNA, 17 nt, Artificial Sequence
  Synthetic
ccgcggcugcuccccgg

SEQ ID NO: 4490 - RNA, 17 nt, Artificial Sequence
  Synthetic
caccgcauagagcgccu

SEQ ID NO: 4491 - RNA, 17 nt, Artificial Sequence
  Synthetic
gaagggauaccaacccg

SEQ ID NO: 4492 - RNA, 17 nt, Artificial Sequence
  Synthetic
cuucuccacaccgcccg

SEQ ID NO: 4493 - RNA, 17 nt, Artificial Sequence
  Synthetic
cccugcccgacgucaug

SEQ ID NO: 4494 - RNA, 17 nt, Artificial Sequence
  Synthetic
ccggcaccagcgacuug

SEQ ID NO: 4495 - RNA, 17 nt, Artificial Sequence
  Synthetic
uggguacuacgccgaau

SEQ ID NO: 4496 - RNA, 17 nt, Artificial Sequence
  Synthetic
guucuccgggaucaggu

SEQ ID NO: 4497 - RNA, 17 nt, Artificial Sequence
  Synthetic
cgaccccaaccugaucc

SEQ ID NO: 4498 - RNA, 17 nt, Artificial Sequence
  Synthetic
ccgaaugggggugugug

SEQ ID NO: 4499 - RNA, 17 nt, Artificial Sequence
  Synthetic
gcuggugccggguuccg

SEQ ID NO: 4500 - RNA, 17 nt, Artificial Sequence
  Synthetic
cgggcgagucggccucg

SEQ ID NO: 4501 - RNA, 17 nt, Artificial Sequence
  Synthetic
ugcaccaccagguugcu

SEQ ID NO: 4502 - RNA, 17 nt, Artificial Sequence
  Synthetic
caccaccgagacaucac

SEQ ID NO: 4503 - RNA, 17 nt, Artificial Sequence
  Synthetic
auggccgcggcugcucc

SEQ ID NO: 4504 - RNA, 17 nt, Artificial Sequence
  Synthetic
ucuggguacuacgccga

SEQ ID NO: 4505 - RNA, 17 nt, Artificial Sequence
  Synthetic
caaacucccguucuccg

SEQ ID NO: 4506 - RNA, 17 nt, Artificial Sequence
  Synthetic
gggcccggaccacuaau

SEQ ID NO: 4507 - RNA, 17 nt, Artificial Sequence
  Synthetic
cccaggcgcucuaugcg

SEQ ID NO: 4508 - RNA, 17 nt, Artificial Sequence
  Synthetic
gccuuuugccuccucgu

SEQ ID NO: 4509 - RNA, 17 nt, Artificial Sequence
  Synthetic
cgucggagcacuccucg

SEQ ID NO: 4510 - RNA, 17 nt, Artificial Sequence
  Synthetic
cuugaugcgcuuagaga

SEQ ID NO: 4511 - RNA, 17 nt, Artificial Sequence
  Synthetic
cguucuccgggaucagg

SEQ ID NO: 4512 - RNA, 17 nt, Artificial Sequence
  Synthetic
ccgcgaugcccaacacg

SEQ ID NO: 4513 - RNA, 17 nt, Artificial Sequence
  Synthetic
ccccgaggccgacucgc

SEQ ID NO: 4514 - RNA, 17 nt, Artificial Sequence
  Synthetic
ggccgcgaugcccaaca

SEQ ID NO: 4515 - RNA, 17 nt, Artificial Sequence
  Synthetic
cucgucggagcacuccu

SEQ ID NO: 4516 - RNA, 17 nt, Artificial Sequence
  Synthetic
ucggugguggacuaaac

SEQ ID NO: 4517 - RNA, 17 nt, Artificial Sequence
  Synthetic
caggcgcucuaugcggu

SEQ ID NO: 4518 - RNA, 17 nt, Artificial Sequence
  Synthetic
cgcacagguugcacuug

SEQ ID NO: 4519 - RNA, 17 nt, Artificial Sequence
  Synthetic
cgcuggugccggguucc

SEQ ID NO: 4520 - RNA, 17 nt, Artificial Sequence
  Synthetic
ggucaaguccaagucau

SEQ ID NO: 4521 - RNA, 17 nt, Artificial Sequence
  Synthetic
acgaccccaaccugauc

SEQ ID NO: 4522 - RNA, 17 nt, Artificial Sequence
  Synthetic
guguugggcaucgcggc

SEQ ID NO: 4523 - RNA, 17 nt, Artificial Sequence
  Synthetic
ccucgucggagcacucc

SEQ ID NO: 4524 - RNA, 17 nt, Artificial Sequence
  Synthetic
cuuggacccccaccgca

SEQ ID NO: 4525 - RNA, 17 nt, Artificial Sequence
  Synthetic
aaccugaucccggagaa

SEQ ID NO: 4526 - RNA, 17 nt, Artificial Sequence
  Synthetic
acggcuucgggcugagc

SEQ ID NO: 4527 - RNA, 17 nt, Artificial Sequence
  Synthetic
gcgcuucuccacaccgc

SEQ ID NO: 4528 - RNA, 17 nt, Artificial Sequence
  Synthetic
ucgcuggugccggguuc

SEQ ID NO: 4529 - RNA, 17 nt, Artificial Sequence
  Synthetic
caaccugaucccggaga

SEQ ID NO: 4530 - RNA, 17 nt, Artificial Sequence
  Synthetic
acucgguggccggcgag

SEQ ID NO: 4531 - RNA, 17 nt, Artificial Sequence
  Synthetic
cggccaccuggccgagg

SEQ ID NO: 4532 - RNA, 17 nt, Artificial Sequence
  Synthetic
cgccuuuugccuccucg

SEQ ID NO: 4533 - RNA, 17 nt, Artificial Sequence
  Synthetic
accccaaccugaucccg

SEQ ID NO: 4534 - RNA, 17 nt, Artificial Sequence
  Synthetic
cccggagaacggggacg

SEQ ID NO: 4535 - RNA, 17 nt, Artificial Sequence
  Synthetic
gcaggucgaacuccuuc

SEQ ID NO: 4536 - RNA, 17 nt, Artificial Sequence
  Synthetic
cuauggagccucccgcc

SEQ ID NO: 4537 - RNA, 17 nt, Artificial Sequence
  Synthetic
ccaggcgcucuaugcgg

SEQ ID NO: 4538 - RNA, 17 nt, Artificial Sequence
  Synthetic
guugaauccaauggcua

SEQ ID NO: 4539 - RNA, 17 nt, Artificial Sequence
  Synthetic
cggcuucgggcugagcc

SEQ ID NO: 4540 - RNA, 17 nt, Artificial Sequence
  Synthetic
gcucgcggggcgcgguc

SEQ ID NO: 4541 - RNA, 17 nt, Artificial Sequence
  Synthetic
cccuguuuaguccacca

SEQ ID NO: 4542 - RNA, 17 nt, Artificial Sequence
  Synthetic
augacuuggacuugacc

SEQ ID NO: 4543 - RNA, 17 nt, Artificial Sequence
  Synthetic
ggaaguccccugacccc

SEQ ID NO: 4544 - RNA, 17 nt, Artificial Sequence
  Synthetic
cccgccauggauuucuc

SEQ ID NO: 4545 - RNA, 17 nt, Artificial Sequence
  Synthetic
cggugguggacuaaaca

SEQ ID NO: 4546 - RNA, 17 nt, Artificial Sequence
  Synthetic
acuuggccaccacggac

SEQ ID NO: 4547 - RNA, 17 nt, Artificial Sequence
  Synthetic
cucuaagcgcaucaagc

SEQ ID NO: 4548 - RNA, 17 nt, Artificial Sequence
  Synthetic
gcaaacucccguucucc

SEQ ID NO: 4549 - RNA, 17 nt, Artificial Sequence
  Synthetic
gugguggacuaaacagg

SEQ ID NO: 4550 - RNA, 17 nt, Artificial Sequence
  Synthetic
caccacgagaacagcuc

SEQ ID NO: 4551 - RNA, 17 nt, Artificial Sequence
  Synthetic
ccgccauggauuucucu

SEQ ID NO: 4552 - RNA, 17 nt, Artificial Sequence
  Synthetic
gcuugaugcgcuuagag

SEQ ID NO: 4553 - RNA, 17 nt, Artificial Sequence
  Synthetic
cccugcaugacgucggg

SEQ ID NO: 4554 - RNA, 17 nt, Artificial Sequence
  Synthetic
cuaagcgcaucaagcuc

SEQ ID NO: 4555 - RNA, 17 nt, Artificial Sequence
  Synthetic
caagugaugucucggug

SEQ ID NO: 4556 - RNA, 17 nt, Artificial Sequence
  Synthetic
ccgaggccgacucgccc

SEQ ID NO: 4557 - RNA, 17 nt, Artificial Sequence
  Synthetic
cgaggccgacucgcccg

SEQ ID NO: 4558 - RNA, 17 nt, Artificial Sequence
  Synthetic
auuugaacgucuugccg

SEQ ID NO: 4559 - RNA, 17 nt, Artificial Sequence
  Synthetic
gcugcgucugcccucuu

SEQ ID NO: 4560 - RNA, 17 nt, Artificial Sequence
  Synthetic
aggcggcgcgccaccac

SEQ ID NO: 4561 - RNA, 17 nt, Artificial Sequence
  Synthetic
cucgagcuugaugcgcu

SEQ ID NO: 4562 - RNA, 17 nt, Artificial Sequence
  Synthetic
gcgcaaacucccguucu

SEQ ID NO: 4563 - RNA, 17 nt, Artificial Sequence
  Synthetic
agaggcuuccggccugg

SEQ ID NO: 4564 - RNA, 17 nt, Artificial Sequence
  Synthetic
ccgggcgagucggccuc

SEQ ID NO: 4565 - RNA, 17 nt, Artificial Sequence
  Synthetic
gucgcuggugccggguu

SEQ ID NO: 4566 - RNA, 17 nt, Artificial Sequence
  Synthetic
agagcgccugggggcgg

SEQ ID NO: 4567 - RNA, 17 nt, Artificial Sequence
  Synthetic
ggugguggacuaaacag

SEQ ID NO: 4568 - RNA, 17 nt, Artificial Sequence
  Synthetic
cccgaggccgacucgcc

SEQ ID NO: 4569 - RNA, 17 nt, Artificial Sequence
  Synthetic
uucucuugcaacacgca

SEQ ID NO: 4570 - RNA, 17 nt, Artificial Sequence
  Synthetic
uggacuugaccgggggc

SEQ ID NO: 4571 - RNA, 17 nt, Artificial Sequence
  Synthetic
ucccggagaacggggac

SEQ ID NO: 4572 - RNA, 17 nt, Artificial Sequence
  Synthetic
cuggagucuccgaagcu

SEQ ID NO: 4573 - RNA, 17 nt, Artificial Sequence
  Synthetic
gauuucucuaggagacu

SEQ ID NO: 4574 - RNA, 17 nt, Artificial Sequence
  Synthetic
gguugaauccaauggcu

SEQ ID NO: 4575 - RNA, 17 nt, Artificial Sequence
  Synthetic
cccgggcgagucggccu

SEQ ID NO: 4576 - RNA, 17 nt, Artificial Sequence
  Synthetic
gaucccggagaacgggg

SEQ ID NO: 4577 - RNA, 17 nt, Artificial Sequence
  Synthetic
cucggugguggacuaaa

SEQ ID NO: 4578 - RNA, 17 nt, Artificial Sequence
  Synthetic
ugguggacuaaacaggg

SEQ ID NO: 4579 - RNA, 17 nt, Artificial Sequence
  Synthetic
ccaccaagucgcuggug

SEQ ID NO: 4580 - RNA, 17 nt, Artificial Sequence
  Synthetic
gguggccaaguucaaga

SEQ ID NO: 4581 - RNA, 17 nt, Artificial Sequence
  Synthetic
cacccgagugccuuuga

SEQ ID NO: 4582 - RNA, 17 nt, Artificial Sequence
  Synthetic
gcaagacguucaaauuu

SEQ ID NO: 4583 - RNA, 17 nt, Artificial Sequence
  Synthetic
ggcucucgagcuuccau

SEQ ID NO: 4584 - RNA, 17 nt, Artificial Sequence
  Synthetic
uggagucuccgaagcua

SEQ ID NO: 4585 - RNA, 17 nt, Artificial Sequence
  Synthetic
cggccgcgaugcccaac

SEQ ID NO: 4586 - RNA, 17 nt, Artificial Sequence
  Synthetic
ucaaaggcacucgggug

SEQ ID NO: 4587 - RNA, 17 nt, Artificial Sequence
  Synthetic
ggacuugaccgggggcu

SEQ ID NO: 4588 - RNA, 17 nt, Artificial Sequence
  Synthetic
uuggacuugaccggggg

SEQ ID NO: 4589 - RNA, 17 nt, Artificial Sequence
  Synthetic
gucugcccucuuuugag

SEQ ID NO: 4590 - RNA, 17 nt, Artificial Sequence
  Synthetic
ggcaaaaggcgauuguc

SEQ ID NO: 4591 - RNA, 17 nt, Artificial Sequence
  Synthetic
acacgcacagaacacuc

SEQ ID NO: 4592 - RNA, 17 nt, Artificial Sequence
  Synthetic
guaaccuuugcauaggg

SEQ ID NO: 4593 - RNA, 17 nt, Artificial Sequence
  Synthetic
ugcaccggcgcagccac

SEQ ID NO: 4594 - RNA, 17 nt, Artificial Sequence
  Synthetic
uggccaaguucaagagc

SEQ ID NO: 4595 - RNA, 17 nt, Artificial Sequence
  Synthetic
uaagcgcggccaccugg

SEQ ID NO: 4596 - RNA, 17 nt, Artificial Sequence
  Synthetic
cauagggcugggccggc

SEQ ID NO: 4597 - RNA, 17 nt, Artificial Sequence
  Synthetic
accugaucccggagaac

SEQ ID NO: 4598 - RNA, 17 nt, Artificial Sequence
  Synthetic
uguguggcaguuuucgg

SEQ ID NO: 4599 - RNA, 17 nt, Artificial Sequence
  Synthetic
uuuucggauggaagcuc

SEQ ID NO: 4600 - RNA, 17 nt, Artificial Sequence
  Synthetic
ccccgggcgagucggcc

SEQ ID NO: 4601 - RNA, 17 nt, Artificial Sequence
  Synthetic
uggacuacggcuucggg

SEQ ID NO: 4602 - RNA, 17 nt, Artificial Sequence
  Synthetic
cccuucaggacuaggug

SEQ ID NO: 4603 - RNA, 17 nt, Artificial Sequence
  Synthetic
ucggggcgcagcggcac

SEQ ID NO: 4604 - RNA, 17 nt, Artificial Sequence
  Synthetic
ucuugaacuuggccacc

SEQ ID NO: 4605 - RNA, 17 nt, Artificial Sequence
  Synthetic
ccggcgcagccacacgg

SEQ ID NO: 4606 - RNA, 17 nt, Artificial Sequence
  Synthetic
ucucgcccaggaccugg

SEQ ID NO: 4607 - RNA, 17 nt, Artificial Sequence
  Synthetic
cggagaacggggacgag

SEQ ID NO: 4608 - RNA, 17 nt, Artificial Sequence
  Synthetic
cacccugucaaaggcac

SEQ ID NO: 4609 - RNA, 17 nt, Artificial Sequence
  Synthetic
ucugcaccuaguccuga

SEQ ID NO: 4610 - RNA, 17 nt, Artificial Sequence
  Synthetic
uaaccugcuaagaauac

SEQ ID NO: 4611 - RNA, 17 nt, Artificial Sequence
  Synthetic
ucuccaccgccagcucc

SEQ ID NO: 4612 - RNA, 17 nt, Artificial Sequence
  Synthetic
cuccaccgccagcuccc

SEQ ID NO: 4613 - RNA, 17 nt, Artificial Sequence
  Synthetic
uucucgcccaggaccug

SEQ ID NO: 4614 - RNA, 17 nt, Artificial Sequence
  Synthetic
ccgccuccaggcucagc

SEQ ID NO: 4615 - RNA, 17 nt, Artificial Sequence
  Synthetic
ucccuccguccagcucc

SEQ ID NO: 4616 - RNA, 17 nt, Artificial Sequence
  Synthetic
gaggguggacuacggcu

SEQ ID NO: 4617 - RNA, 17 nt, Artificial Sequence
  Synthetic
ccagcuccccgggcggu

SEQ ID NO: 4618 - RNA, 17 nt, Artificial Sequence
  Synthetic
gcucucuaagucuccua

SEQ ID NO: 4619 - RNA, 17 nt, Artificial Sequence
  Synthetic
caugacuuggacuugac

SEQ ID NO: 4620 - RNA, 17 nt, Artificial Sequence
  Synthetic
ccaugcccugcaugacg

SEQ ID NO: 4621 - RNA, 17 nt, Artificial Sequence
  Synthetic
gcgauugucuggagucu

SEQ ID NO: 4622 - RNA, 17 nt, Artificial Sequence
  Synthetic
uggaggccgcguagccg

SEQ ID NO: 4623 - RNA, 17 nt, Artificial Sequence
  Synthetic
gccaccuggccgaggcc

SEQ ID NO: 4624 - RNA, 17 nt, Artificial Sequence
  Synthetic
auaccaggaucaguauc

SEQ ID NO: 4625 - RNA, 17 nt, Artificial Sequence
  Synthetic
guguggcaguuuucgga

SEQ ID NO: 4626 - RNA, 17 nt, Artificial Sequence
  Synthetic
ccacaccgcccggggag

SEQ ID NO: 4627 - RNA, 17 nt, Artificial Sequence
  Synthetic
ggaggcggcgcgccacc

SEQ ID NO: 4628 - RNA, 17 nt, Artificial Sequence
  Synthetic
guauucuuagcagguua

SEQ ID NO: 4629 - RNA, 17 nt, Artificial Sequence
  Synthetic
agaaggggcucagcgag

SEQ ID NO: 4630 - RNA, 17 nt, Artificial Sequence
  Synthetic
uguucugugcguguugc

SEQ ID NO: 4631 - RNA, 17 nt, Artificial Sequence
  Synthetic
aaccccuuuaaccugcu

SEQ ID NO: 4632 - RNA, 17 nt, Artificial Sequence
  Synthetic
gcgcccuucugccaggc

SEQ ID NO: 4633 - RNA, 17 nt, Artificial Sequence
  Synthetic
cagcuccccgggcggug

SEQ ID NO: 4634 - RNA, 17 nt, Artificial Sequence
  Synthetic
ggcggcuugcuaccugg

SEQ ID NO: 4635 - RNA, 17 nt, Artificial Sequence
  Synthetic
agcgcccuucugccagg

SEQ ID NO: 4636 - RNA, 17 nt, Artificial Sequence
  Synthetic
gcggcuugcuaccuggc

SEQ ID NO: 4637 - RNA, 17 nt, Artificial Sequence
  Synthetic
ggggcgcggucgugggc

SEQ ID NO: 4638 - RNA, 17 nt, Artificial Sequence
  Synthetic
aggccuuccaccagguc

SEQ ID NO: 4639 - RNA, 17 nt, Artificial Sequence
  Synthetic
ucccgugccgcugcgcc

SEQ ID NO: 4640 - RNA, 17 nt, Artificial Sequence
  Synthetic
cagaacacucauggauu

SEQ ID NO: 4641 - RNA, 17 nt, Artificial Sequence
  Synthetic
gcuccccgggcggugug

SEQ ID NO: 4642 - RNA, 17 nt, Artificial Sequence
  Synthetic
gcccggggagcuggacg

SEQ ID NO: 4643 - RNA, 17 nt, Artificial Sequence
  Synthetic
uugcaguaaccuuugca

SEQ ID NO: 4644 - RNA, 17 nt, Artificial Sequence
  Synthetic
agacuuagagagcuggc

SEQ ID NO: 4645 - RNA, 17 nt, Artificial Sequence
  Synthetic
ggcgcagccacacgggc

SEQ ID NO: 4646 - RNA, 17 nt, Artificial Sequence
  Synthetic
uucugcaccuaguccug

SEQ ID NO: 4647 - RNA, 17 nt, Artificial Sequence
  Synthetic
uucugugcguguugcaa

SEQ ID NO: 4648 - RNA, 17 nt, Artificial Sequence
  Synthetic
cccuggccacccaucac

SEQ ID NO: 4649 - RNA, 17 nt, Artificial Sequence
  Synthetic
auagggcugggccggcc

SEQ ID NO: 4650 - RNA, 17 nt, Artificial Sequence
  Synthetic
accaggaucaguaucga

SEQ ID NO: 4651 - RNA, 17 nt, Artificial Sequence
  Synthetic
ugaagggauaccaaccc

SEQ ID NO: 4652 - RNA, 17 nt, Artificial Sequence
  Synthetic
cuagagaaauccauggc

SEQ ID NO: 4653 - RNA, 17 nt, Artificial Sequence
  Synthetic
cgguggagagaccgucg

SEQ ID NO: 4654 - RNA, 17 nt, Artificial Sequence
  Synthetic
uuucucuaggagacuua

SEQ ID NO: 4655 - RNA, 17 nt, Artificial Sequence
  Synthetic
gcaugacuuggacuuga

SEQ ID NO: 4656 - RNA, 17 nt, Artificial Sequence
  Synthetic
cucggggcgcagcggca

SEQ ID NO: 4657 - RNA, 17 nt, Artificial Sequence
  Synthetic
gguggacuaaacagggg

SEQ ID NO: 4658 - RNA, 17 nt, Artificial Sequence
  Synthetic
ccucgcugaagugcugc

SEQ ID NO: 4659 - RNA, 17 nt, Artificial Sequence
  Synthetic
ccagguugcucugaaau

SEQ ID NO: 4660 - RNA, 17 nt, Artificial Sequence
  Synthetic
gcauagagcgccugggg

SEQ ID NO: 4661 - RNA, 17 nt, Artificial Sequence
  Synthetic
gcaagcugaagcgccac

SEQ ID NO: 4662 - RNA, 17 nt, Artificial Sequence
  Synthetic
cucgcugaagugcugca

SEQ ID NO: 4663 - RNA, 17 nt, Artificial Sequence
  Synthetic
gcacccaggccagcaag

SEQ ID NO: 4664 - RNA, 17 nt, Artificial Sequence
  Synthetic
gggaggcuccauagcca

SEQ ID NO: 4665 - RNA, 17 nt, Artificial Sequence
  Synthetic
aggcaaaaggcgauugu

SEQ ID NO: 4666 - RNA, 17 nt, Artificial Sequence
  Synthetic
gaucccuuccuuagcuu

SEQ ID NO: 4667 - RNA, 17 nt, Artificial Sequence
  Synthetic
gucuccgaagcuaagga

SEQ ID NO: 4668 - RNA, 17 nt, Artificial Sequence
  Synthetic
cuuagagaaggggcuca

SEQ ID NO: 4669 - RNA, 17 nt, Artificial Sequence
  Synthetic
cuuuuuggacaggcccc

SEQ ID NO: 4670 - RNA, 17 nt, Artificial Sequence
  Synthetic
cucgggugauggguggc

SEQ ID NO: 4671 - RNA, 17 nt, Artificial Sequence
  Synthetic
gcccacgaccgcgcccc

SEQ ID NO: 4672 - RNA, 17 nt, Artificial Sequence
  Synthetic
uuguacauguguagcug

SEQ ID NO: 4673 - RNA, 17 nt, Artificial Sequence
  Synthetic
ccgugguggccaaguuc

SEQ ID NO: 4674 - RNA, 17 nt, Artificial Sequence
  Synthetic
ggagaacggggacgagg

SEQ ID NO: 4675 - RNA, 17 nt, Artificial Sequence
  Synthetic
gcaggcccagcucaaaa

SEQ ID NO: 4676 - RNA, 17 nt, Artificial Sequence
  Synthetic
uauucuuagcagguuaa

SEQ ID NO: 4677 - RNA, 17 nt, Artificial Sequence
  Synthetic
ucugcaauaugaauccc

SEQ ID NO: 4678 - RNA, 17 nt, Artificial Sequence
  Synthetic
uccuagagaaauccaug

SEQ ID NO: 4679 - RNA, 17 nt, Artificial Sequence
  Synthetic
acuugaccgggggcugg

SEQ ID NO: 4680 - RNA, 17 nt, Artificial Sequence
  Synthetic
agucuccgaagcuaagg

SEQ ID NO: 4681 - RNA, 17 nt, Artificial Sequence
  Synthetic
gcugggccugcccgggc

SEQ ID NO: 4682 - RNA, 17 nt, Artificial Sequence
  Synthetic
agaucccuuccuuagcu

SEQ ID NO: 4683 - RNA, 17 nt, Artificial Sequence
  Synthetic
cacacaucuugagcucu

SEQ ID NO: 4684 - RNA, 17 nt, Artificial Sequence
  Synthetic
cccggggagcuggacgg

SEQ ID NO: 4685 - RNA, 17 nt, Artificial Sequence
  Synthetic
gaaggggcucagcgagc

SEQ ID NO: 4686 - RNA, 17 nt, Artificial Sequence
  Synthetic
gacuuagagagcuggca

SEQ ID NO: 4687 - RNA, 17 nt, Artificial Sequence
  Synthetic
ucccauggagagguggc

SEQ ID NO: 4688 - RNA, 17 nt, Artificial Sequence
  Synthetic
ugaagugcugcauggag

SEQ ID NO: 4689 - RNA, 17 nt, Artificial Sequence
  Synthetic
acauucugcaccuaguc

SEQ ID NO: 4690 - RNA, 17 nt, Artificial Sequence
  Synthetic
cccauggagagguggcu

SEQ ID NO: 4691 - RNA, 17 nt, Artificial Sequence
  Synthetic
gcucucuggguacuacg

SEQ ID NO: 4692 - RNA, 17 nt, Artificial Sequence
  Synthetic
ccacagggacacuugcg

SEQ ID NO: 4693 - RNA, 17 nt, Artificial Sequence
  Synthetic
gagacuuagagagcugg

SEQ ID NO: 4694 - RNA, 17 nt, Artificial Sequence
  Synthetic
uugacagggugcugcgg

SEQ ID NO: 4695 - RNA, 17 nt, Artificial Sequence
  Synthetic
ccgaggccgagggccac

SEQ ID NO: 4696 - RNA, 17 nt, Artificial Sequence
  Synthetic
agggaucuuugagcugc

SEQ ID NO: 4697 - RNA, 17 nt, Artificial Sequence
  Synthetic
aaguagauucuuaaucc

SEQ ID NO: 4698 - RNA, 17 nt, Artificial Sequence
  Synthetic
gcgcagcggcacgggaa

SEQ ID NO: 4699 - RNA, 17 nt, Artificial Sequence
  Synthetic
gccgaggccgagggcca

SEQ ID NO: 4700 - RNA, 17 nt, Artificial Sequence
  Synthetic
aagauguguggcaguuu

SEQ ID NO: 4701 - RNA, 17 nt, Artificial Sequence
  Synthetic
agcuaaggaagggaucu

SEQ ID NO: 4702 - RNA, 17 nt, Artificial Sequence
  Synthetic
cagcucucuaagucucc

SEQ ID NO: 4703 - RNA, 17 nt, Artificial Sequence
  Synthetic
ccuagagaaauccaugg

SEQ ID NO: 4704 - RNA, 17 nt, Artificial Sequence
  Synthetic
accacgagaacagcucg

SEQ ID NO: 4705 - RNA, 17 nt, Artificial Sequence
  Synthetic
gcaauaugaaucccaug

SEQ ID NO: 4706 - RNA, 17 nt, Artificial Sequence
  Synthetic
cuccaugcagcacuuca

SEQ ID NO: 4707 - RNA, 17 nt, Artificial Sequence
  Synthetic
uguccaaaaagcugcug

SEQ ID NO: 4708 - RNA, 17 nt, Artificial Sequence
  Synthetic
gaauaccaggaucagua

SEQ ID NO: 4709 - RNA, 17 nt, Artificial Sequence
  Synthetic
ucucggggcgcagcggc

SEQ ID NO: 4710 - RNA, 17 nt, Artificial Sequence
  Synthetic
aguuuucggauggaagc

SEQ ID NO: 4711 - RNA, 17 nt, Artificial Sequence
  Synthetic
ucgugggcgugggcgac

SEQ ID NO: 4712 - RNA, 17 nt, Artificial Sequence
  Synthetic
ucgcggccgggggcagg

SEQ ID NO: 4713 - RNA, 17 nt, Artificial Sequence
  Synthetic
cuacuuagaaagcgaac

SEQ ID NO: 4714 - RNA, 17 nt, Artificial Sequence
  Synthetic
ggguuauugucugcaau

SEQ ID NO: 4715 - RNA, 17 nt, Artificial Sequence
  Synthetic
cuugaccgggggcuggg

SEQ ID NO: 4716 - RNA, 17 nt, Artificial Sequence
  Synthetic
uggauuaagaaucuacu

SEQ ID NO: 4717 - RNA, 17 nt, Artificial Sequence
  Synthetic
ggcuuccggccuggcag

SEQ ID NO: 4718 - RNA, 17 nt, Artificial Sequence
  Synthetic
cuuccaccagguccugg

SEQ ID NO: 4719 - RNA, 17 nt, Artificial Sequence
  Synthetic
cgcuucagcuugcuggc

SEQ ID NO: 4720 - RNA, 17 nt, Artificial Sequence
  Synthetic
cauagagcgccuggggg

SEQ ID NO: 4721 - RNA, 17 nt, Artificial Sequence
  Synthetic
ccugguggaaggccucg

SEQ ID NO: 4722 - RNA, 17 nt, Artificial Sequence
  Synthetic
uccaccagguccugggc

SEQ ID NO: 4723 - RNA, 17 nt, Artificial Sequence
  Synthetic
cugcaauaugaauccca

SEQ ID NO: 4724 - RNA, 17 nt, Artificial Sequence
  Synthetic
gcuggacggagggaucu

SEQ ID NO: 4725 - RNA, 17 nt, Artificial Sequence
  Synthetic
uugaccgggggcuggga

SEQ ID NO: 4726 - RNA, 17 nt, Artificial Sequence
  Synthetic
uucccagccaccucucc

SEQ ID NO: 4727 - RNA, 17 nt, Artificial Sequence
  Synthetic
uuuugagcugggccugc

SEQ ID NO: 4728 - RNA, 17 nt, Artificial Sequence
  Synthetic
gcuucuccacaccgccc

SEQ ID NO: 4729 - RNA, 17 nt, Artificial Sequence
  Synthetic
agagaaaccaugcacug

SEQ ID NO: 4730 - RNA, 17 nt, Artificial Sequence
  Synthetic
agcuggacggagggauc

SEQ ID NO: 4731 - RNA, 17 nt, Artificial Sequence
  Synthetic
ccggggagcuggcggug

SEQ ID NO: 4732 - RNA, 17 nt, Artificial Sequence
  Synthetic
aucccauggagaggugg

SEQ ID NO: 4733 - RNA, 17 nt, Artificial Sequence
  Synthetic
guuccggggagcuggcg

SEQ ID NO: 4734 - RNA, 17 nt, Artificial Sequence
  Synthetic
gacuaaacaggggggga

SEQ ID NO: 4735 - RNA, 17 nt, Artificial Sequence
  Synthetic
ugcccagcagcagcuuu

SEQ ID NO: 4736 - RNA, 17 nt, Artificial Sequence
  Synthetic
gggaucuuugagcugcc

SEQ ID NO: 4737 - RNA, 17 nt, Artificial Sequence
  Synthetic
ucccagccaccucucca

SEQ ID NO: 4738 - RNA, 17 nt, Artificial Sequence
  Synthetic
cagcggcacgggaagug

SEQ ID NO: 4739 - RNA, 17 nt, Artificial Sequence
  Synthetic
uuccggggagcuggcgg

SEQ ID NO: 4740 - RNA, 17 nt, Artificial Sequence
  Synthetic
uccucguccccguucuc

SEQ ID NO: 4741 - RNA, 17 nt, Artificial Sequence
  Synthetic
gcggcacgggaagugga

SEQ ID NO: 4742 - RNA, 17 nt, Artificial Sequence
  Synthetic
ugggcagccccagcucg

SEQ ID NO: 4743 - RNA, 17 nt, Artificial Sequence
  Synthetic
cgcagcggcacgggaag

SEQ ID NO: 4744 - RNA, 17 nt, Artificial Sequence
  Synthetic
ccgcccggggagcugga

SEQ ID NO: 4745 - RNA, 17 nt, Artificial Sequence
  Synthetic
auggagagguggcuggg

SEQ ID NO: 4746 - RNA, 17 nt, Artificial Sequence
  Synthetic
cuccucguccccguucu

SEQ ID NO: 4747 - RNA, 17 nt, Artificial Sequence
  Synthetic
uacuuagaaagcgaaca

SEQ ID NO: 4748 - RNA, 17 nt, Artificial Sequence
  Synthetic
gggcaggcccagcucaa

SEQ ID NO: 4749 - RNA, 17 nt, Artificial Sequence
  Synthetic
accgcccggggagcugg

SEQ ID NO: 4750 - RNA, 17 nt, Artificial Sequence
  Synthetic
aaacagggggggagugg

SEQ ID NO: 4751 - RNA, 17 nt, Artificial Sequence
  Synthetic
cgggggcugggagggag

SEQ ID NO: 4752 - RNA, 17 nt, Artificial Sequence
  Synthetic
ccggccuggggacagcg

SEQ ID NO: 4753 - RNA, 17 nt, Artificial Sequence
  Synthetic
uagggcugggccggccu

SEQ ID NO: 4754 - RNA, 17 nt, Artificial Sequence
  Synthetic
aagaaucuacuuagaaa

SEQ ID NO: 4755 - RNA, 17 nt, Artificial Sequence
  Synthetic
aacagggggggaguggg

SEQ ID NO: 4756 - RNA, 17 nt, Artificial Sequence
  Synthetic
accgggggcugggaggg

SEQ ID NO: 4757 - RNA, 17 nt, Artificial Sequence
  Synthetic
ggucgugggcgugggcg

SEQ ID NO: 4758 - RNA, 17 nt, Artificial Sequence
  Synthetic
ggagggggggcgucgcc

SEQ ID NO: 4759 - RNA, 17 nt, Artificial Sequence
  Synthetic
gaacggggacgaggagg

SEQ ID NO: 4760 - RNA, 17 nt, Artificial Sequence
  Synthetic
gaccgggggcugggagg

SEQ ID NO: 4761 - RNA, 17 nt, Artificial Sequence
  Synthetic
gggagggggggcgucgc

SEQ ID NO: 4762 - RNA, 17 nt, Artificial Sequence
  Synthetic
gggggcugggagggagg

SEQ ID NO: 4763 - RNA, 17 nt, Artificial Sequence
  Synthetic
agcggcacgggaagugg

SEQ ID NO: 4764 - RNA, 17 nt, Artificial Sequence
  Synthetic
gauugcagaggagggag

SEQ ID NO: 4765 - RNA, 17 nt, Artificial Sequence
  Synthetic
gggggggcgucgccagg

SEQ ID NO: 4766 - RNA, 17 nt, Artificial Sequence
  Synthetic
ggauugcagaggaggga

SEQ ID NO: 4767 - RNA, 17 nt, Artificial Sequence
  Synthetic
gggcggauugcagagga

SEQ ID NO: 4768 - RNA, 17 nt, Artificial Sequence
  Synthetic
gcggauugcagaggagg

SEQ ID NO: 4769 - RNA, 17 nt, Artificial Sequence
  Synthetic
gagcugacggagagcga

SEQ ID NO: 4770 - RNA, 17 nt, Artificial Sequence
  Synthetic
gaaaacugccacacauc

SEQ ID NO: 4771 - RNA, 17 nt, Artificial Sequence
  Synthetic
auugcagaggagggagg

SEQ ID NO: 4772 - RNA, 17 nt, Artificial Sequence
  Synthetic
ggggcggauugcagagg

SEQ ID NO: 4773 - RNA, 17 nt, Artificial Sequence
  Synthetic
cggauugcagaggaggg

SEQ ID NO: 4774 - RNA, 17 nt, Artificial Sequence
  Synthetic
aggggcggauugcagag

SEQ ID NO: 4775 - RNA, 17 nt, Artificial Sequence
  Synthetic
acggggacgaggaggaa

SEQ ID NO: 4776 - RNA, 17 nt, Artificial Sequence
  Synthetic
ggaggaggggcggauug

SEQ ID NO: 4777 - RNA, 17 nt, Artificial Sequence
  Synthetic
cgcuucuccacaccgcc

SEQ ID NO: 4778 - RNA, 17 nt, Artificial Sequence
  Synthetic
ugacggagagcgagagg

SEQ ID NO: 4779 - RNA, 17 nt, Artificial Sequence
  Synthetic
aggagcugacggagagc

SEQ ID NO: 4780 - RNA, 17 nt, Artificial Sequence
  Synthetic
gcugggagggaggaggg

SEQ ID NO: 4781 - RNA, 17 nt, Artificial Sequence
  Synthetic
aggaggggcggauugca

SEQ ID NO: 4782 - RNA, 17 nt, Artificial Sequence
  Synthetic
uguugggcaucgcggcc

SEQ ID NO: 4783 - RNA, 17 nt, Artificial Sequence
  Synthetic
cggggacgaggaggaag

SEQ ID NO: 4784 - RNA, 17 nt, Artificial Sequence
  Synthetic
ggaggggcggauugcag

SEQ ID NO: 4785 - RNA, 17 nt, Artificial Sequence
  Synthetic
ggaggagcugacggaga

SEQ ID NO: 4786 - RNA, 17 nt, Artificial Sequence
  Synthetic
gggacgaggaggaagag

SEQ ID NO: 4787 - RNA, 17 nt, Artificial Sequence
  Synthetic
aggaggaggagcugacg

SEQ ID NO: 4788 - RNA, 17 nt, Artificial Sequence
  Synthetic
acgaggaagaggaagaa

SEQ ID NO: 4789 - RNA, 17 nt, Artificial Sequence
  Synthetic
aggaagaggaagaagag

SEQ ID NO: 4790 - RNA, 17 nt, Artificial Sequence
  Synthetic
aggaagaggaggacgac

SEQ ID NO: 4791 - RNA, 17 nt, Artificial Sequence
  Synthetic
aggaggacgacgaggaa

SEQ ID NO: 4792 - RNA, 17 nt, Artificial Sequence
  Synthetic
ggaggaggaggagcuga

SEQ ID NO: 4793 - RNA, 17 nt, Artificial Sequence
  Synthetic
ggaagaggaggacgacg

SEQ ID NO: 4794 - RNA, 17 nt, Artificial Sequence
  Synthetic
ggaggaagaggaggacg

SEQ ID NO: 4795 - RNA, 17 nt, Artificial Sequence
  Synthetic
ggaagaggaagaagagg

SEQ ID NO: 4796 - RNA, 17 nt, Artificial Sequence
  Synthetic
aggaggaggaggagcug

SEQ ID NO: 4797 - RNA, 17 nt, Artificial Sequence
  Synthetic
cgaggaagaggaagaag

SEQ ID NO: 4798 - RNA, 17 nt, Artificial Sequence
  Synthetic
ggacgacgaggaagagg

SEQ ID NO: 4799 - RNA, 17 nt, Artificial Sequence
  Synthetic
ggaggacgacgaggaag

SEQ ID NO: 4800 - RNA, 17 nt, Artificial Sequence
  Synthetic
cgacgaggaagaggaag

SEQ ID NO: 4801 - RNA, 17 nt, Artificial Sequence
  Synthetic
agaggaggacgacgagg

SEQ ID NO: 4802 - RNA, 17 nt, Artificial Sequence
  Synthetic
aagaagaggaggaagag

SEQ ID NO: 4803 - RNA, 17 nt, Artificial Sequence
  Synthetic
aggaagaagaggaggaa

SEQ ID NO: 4804 - RNA, 17 nt, Artificial Sequence
  Synthetic
agaggaagaagaggagg

SEQ ID NO: 4805 - RNA, 17 nt, Artificial Sequence
  Synthetic
aagaggaggaagaggag

SEQ ID NO: 4806 - RNA, 17 nt, Artificial Sequence
  Synthetic
aggaggaagaggaggag

SEQ ID NO: 4807 - RNA, 17 nt, Artificial Sequence
  Synthetic
ggaagaagaggaggaag

SEQ ID NO: 4808 - RNA, 17 nt, Artificial Sequence
  Synthetic
agaagaggaggaagagg

SEQ ID NO: 4809 - RNA, 17 nt, Artificial Sequence
  Synthetic
agaggaggaagaggagg

SEQ ID NO: 4810 - RNA, 17 nt, Artificial Sequence
  Synthetic
ggaggaagaggaggagg

SEQ ID NO: 4811 - RNA, 20 nt, Artificial Sequence
  Synthetic
uucugcacucaucccaggcg

SEQ ID NO: 4812 - RNA, 20 nt, Artificial Sequence
  Synthetic
auccaggucacgccagagga

SEQ ID NO: 4813 - RNA, 20 nt, Artificial Sequence
  Synthetic
ugaccuggaugccaaccucc

SEQ ID NO: 4814 - RNA, 20 nt, Artificial Sequence
  Synthetic
gggauuggaugcuuuuuuca

SEQ ID NO: 4815 - RNA, 17 nt, Artificial Sequence
  Synthetic
ugcacucaucccaggcg

SEQ ID NO: 4816 - RNA, 17 nt, Artificial Sequence
  Synthetic
caggucacgccagagga

SEQ ID NO: 4817 - RNA, 17 nt, Artificial Sequence
  Synthetic
ccuggaugccaaccucc

SEQ ID NO: 4818 - RNA, 17 nt, Artificial Sequence
  Synthetic
auuggaugcuuuuuuca

SEQ ID NO: 4819 - RNA, 17 nt, Artificial Sequence
  Synthetic
gcuauggagccucccgc

SEQ ID NO: 4820 - RNA, 17 nt, Artificial Sequence
  Synthetic
gacuugaccgucauggg

SEQ ID NO: 4821 - RNA, 17 nt, Artificial Sequence
  Synthetic
uccgacgaggaggcaaa

SEQ ID NO: 4822 - RNA, 17 nt, Artificial Sequence
  Synthetic
cgggaggcuccauagcc

SEQ ID NO: 4823 - RNA, 17 nt, Artificial Sequence
  Synthetic
uccguguucgcuuucua

SEQ ID NO: 4824 - RNA, 17 nt, Artificial Sequence
  Synthetic
aacacgcacagaacacu

SEQ ID NO: 4825 - RNA, 17 nt, Artificial Sequence
  Synthetic
uucccagccaccucucc

SEQ ID NO: 4826 - RNA, 17 nt, Artificial Sequence
  Synthetic
ggcugggagggaggagg

SEQ ID NO: 4827 - RNA, 20 nt, Artificial Sequence
  Synthetic
ucggacuugaccgucauggg

SEQ ID NO: 4828 - RNA, 20 nt, Artificial Sequence
  Synthetic
auggcuauggagccucccgc

SEQ ID NO: 4829 - RNA, 20 nt, Artificial Sequence
  Synthetic
ugcuccgacgaggaggcaaa

SEQ ID NO: 4830 - RNA, 20 nt, Artificial Sequence
  Synthetic
uggcgggaggcuccauagcc

SEQ ID NO: 4831 - RNA, 20 nt, Artificial Sequence
  Synthetic
ugcaacacgcacagaacacu

SEQ ID NO: 4832 - RNA, 20 nt, Artificial Sequence
  Synthetic
acuuccguguucgcuuucua

SEQ ID NO: 4833 - RNA, 20 nt, Artificial Sequence
  Synthetic
uccuucccagccaccucucc

SEQ ID NO: 4834 - RNA, 20 nt, Artificial Sequence
  Synthetic
gggggcugggagggaggagg

SEQ ID NO: 4835 - RNA, 20 nt, Artificial Sequence
  Synthetic
gaaaauacuuacuguacugc

SEQ ID NO: 4836 - RNA, 17 nt, Artificial Sequence
  Synthetic
gaaagcaguguaaggcu

SEQ ID NO: 4837 - RNA, 20 nt, Artificial Sequence
  Synthetic
ggcuguuuuggaauguagag

SEQ ID NO: 4838 - RNA, 20 nt, Artificial Sequence
  Synthetic
gugcuacuuauacaauucac

SEQ ID NO: 4839 - RNA, 20 nt, Artificial Sequence
  Synthetic
aaacuauuuacagccauaac

SEQ ID NO: 4840 - RNA, 20 nt, Artificial Sequence
  Synthetic
aaauacuuacuguacugcag

SEQ ID NO: 4841 - RNA, 20 nt, Artificial Sequence
  Synthetic
aacuauuuacagccauaaca

SEQ ID NO: 4842 - RNA, 17 nt, Artificial Sequence
  Synthetic
aauacuuacuguacugc

SEQ ID NO: 4843 - RNA, 17 nt, Artificial Sequence
  Synthetic
acaacuuguguugcacu

SEQ ID NO: 4844 - RNA, 17 nt, Artificial Sequence
  Synthetic
auacuuacuguacugca

SEQ ID NO: 4845 - RNA, 20 nt, Artificial Sequence
  Synthetic
auucacuggaaacccuguua

SEQ ID NO: 4846 - RNA, 17 nt, Artificial Sequence
  Synthetic
auuuaagacgggaaaac

SEQ ID NO: 4847 - RNA, 17 nt, Artificial Sequence
  Synthetic
cacuggaaacccuguua

SEQ ID NO: 4848 - RNA, 17 nt, Artificial Sequence
  Synthetic
cuacuuauacaauucac

SEQ ID NO: 4849 - RNA, 17 nt, Artificial Sequence
  Synthetic
cuauuuacagccauaac

SEQ ID NO: 4850 - RNA, 20 nt, Artificial Sequence
  Synthetic
uaagaaagcaguguaaggcu

SEQ ID NO: 4851 - RNA, 20 nt, Artificial Sequence
  Synthetic
uacacaacuuguguugcacu

SEQ ID NO: 4852 - RNA, 20 nt, Artificial Sequence
  Synthetic
uacuguacugcaggggaauu

SEQ ID NO: 4853 - RNA, 17 nt, Artificial Sequence
  Synthetic
uacuuacuguacugcag

SEQ ID NO: 4854 - RNA, 17 nt, Artificial Sequence
  Synthetic
uguacugcaggggaauu

SEQ ID NO: 4855 - RNA, 17 nt, Artificial Sequence
  Synthetic
gaauguagagaggcaga

SEQ ID NO: 4856 - RNA, 17 nt, Artificial Sequence
  Synthetic
ggaauguagagaggcag

SEQ ID NO: 4857 - RNA, 20 nt, Artificial Sequence
  Synthetic
guaaguauuuucuuucauug

SEQ ID NO: 4858 - RNA, 20 nt, Artificial Sequence
  Synthetic
guaauuaagaaagcagugua

SEQ ID NO: 4859 - RNA, 17 nt, Artificial Sequence
  Synthetic
guauuuucuuucauugg

SEQ ID NO: 4860 - RNA, 17 nt, Artificial Sequence
  Synthetic
aaaauaauuagaauaaa

SEQ ID NO: 4861 - RNA, 20 nt, Artificial Sequence
  Synthetic
aaaauacuuacuguacugca

SEQ ID NO: 4862 - RNA, 20 nt, Artificial Sequence
  Synthetic
aaaauuuaagacgggaaaac

SEQ ID NO: 4863 - RNA, 17 nt, Artificial Sequence
  Synthetic
aaguauuuucuuucauu

SEQ ID NO: 4864 - RNA, 17 nt, Artificial Sequence
  Synthetic
aauguagagaggcagag

SEQ ID NO: 4865 - RNA, 17 nt, Artificial Sequence
  Synthetic
acauaaaaauuuaagac

SEQ ID NO: 4866 - RNA, 17 nt, Artificial Sequence
  Synthetic
agaaagcaguguaaggc

SEQ ID NO: 4867 - RNA, 17 nt, Artificial Sequence
  Synthetic
agaauaaaaggcuguuu

SEQ ID NO: 4868 - RNA, 20 nt, Artificial Sequence
  Synthetic
aguaaaauaauuagaauaaa

SEQ ID NO: 4869 - RNA, 20 nt, Artificial Sequence
  Synthetic
aguaaguauuuucuuucauu

SEQ ID NO: 4870 - RNA, 17 nt, Artificial Sequence
  Synthetic
aguauuuucuuucauug

SEQ ID NO: 4871 - RNA, 17 nt, Artificial Sequence
  Synthetic
auuaagaaagcagugua

SEQ ID NO: 4872 - RNA, 20 nt, Artificial Sequence
  Synthetic
auuagaauaaaaggcuguuu

SEQ ID NO: 4873 - RNA, 20 nt, Artificial Sequence
  Synthetic
auuauuuuacuagugaauua

SEQ ID NO: 4874 - RNA, 17 nt, Artificial Sequence
  Synthetic
auuuuacuagugaauua

SEQ ID NO: 4875 - RNA, 17 nt, Artificial Sequence
  Synthetic
cacauaaaaauuuaaga

SEQ ID NO: 4876 - RNA, 20 nt, Artificial Sequence
  Synthetic
caguaaguauuuucuuucau

SEQ ID NO: 4877 - RNA, 20 nt, Artificial Sequence
  Synthetic
cucacauaaaaauuuaagac

SEQ ID NO: 4878 - RNA, 17 nt, Artificial Sequence
  Synthetic
uaaguauuuucuuucau

SEQ ID NO: 4879 - RNA, 20 nt, Artificial Sequence
  Synthetic
uaaguauuuucuuucauugg

SEQ ID NO: 4880 - RNA, 17 nt, Artificial Sequence
  Synthetic
uauuuacagccauaaca

SEQ ID NO: 4881 - RNA, 20 nt, Artificial Sequence
  Synthetic
ucucacauaaaaauuuaaga

SEQ ID NO: 4882 - RNA, 20 nt, Artificial Sequence
  Synthetic
uggaauguagagaggcagag

SEQ ID NO: 4883 - RNA, 17 nt, Artificial Sequence
  Synthetic
uguuuuggaauguagag

SEQ ID NO: 4884 - RNA, 20 nt, Artificial Sequence
  Synthetic
uuaagaaagcaguguaaggc

SEQ ID NO: 4885 - RNA, 20 nt, Artificial Sequence
  Synthetic
uuggaauguagagaggcaga

SEQ ID NO: 4886 - RNA, 20 nt, Artificial Sequence
  Synthetic
uuuggaauguagagaggcag

SEQ ID NO: 4887 - RNA, 20 nt, Artificial Sequence
  Synthetic
gaggggcugauauaacuucu

SEQ ID NO: 4888 - RNA, 17 nt, Artificial Sequence
  Synthetic
gcuacuuauacaauuca

SEQ ID NO: 4889 - RNA, 17 nt, Artificial Sequence
  Synthetic
gggcugauauaacuucu

SEQ ID NO: 4890 - RNA, 20 nt, Artificial Sequence
  Synthetic
gucuuaaauuuuuaugugag

SEQ ID NO: 4891 - RNA, 20 nt, Artificial Sequence
  Synthetic
gugcuacuuauacaauucac

SEQ ID NO: 4892 - RNA, 17 nt, Artificial Sequence
  Synthetic
aacacaaguuguguaga

SEQ ID NO: 4893 - RNA, 17 nt, Artificial Sequence
  Synthetic
acuauuuacagccauaa

SEQ ID NO: 4894 - RNA, 17 nt, Artificial Sequence
  Synthetic
agcacacugcuguaauu

SEQ ID NO: 4895 - RNA, 20 nt, Artificial Sequence
  Synthetic
agugcuacuuauacaauuca

SEQ ID NO: 4896 - RNA, 17 nt, Artificial Sequence
  Synthetic
auaguuugcuuccccca

SEQ ID NO: 4897 - RNA, 20 nt, Artificial Sequence
  Synthetic
augagcacacugcuguaauu

SEQ ID NO: 4898 - RNA, 20 nt, Artificial Sequence
  Synthetic
caaacuauuuacagccauaa

SEQ ID NO: 4899 - RNA, 20 nt, Artificial Sequence
  Synthetic
cagccauaacaggguuucca

SEQ ID NO: 4900 - RNA, 17 nt, Artificial Sequence
  Synthetic
ccauaacaggguuucca

SEQ ID NO: 4901 - RNA, 17 nt, Artificial Sequence
  Synthetic
cuacuuauacaauucac

SEQ ID NO: 4902 - RNA, 20 nt, Artificial Sequence
  Synthetic
cuuuggcuauugauacugau

SEQ ID NO: 4903 - RNA, 20 nt, Artificial Sequence
  Synthetic
uaaauaguuugcuuccccca

SEQ ID NO: 4904 - RNA, 20 nt, Artificial Sequence
  Synthetic
uaguuugcuucccccaauga

SEQ ID NO: 4905 - RNA, 20 nt, Artificial Sequence
  Synthetic
ugcaacacaaguuguguaga

SEQ ID NO: 4906 - RNA, 17 nt, Artificial Sequence
  Synthetic
uggaauguagagaggca

SEQ ID NO: 4907 - RNA, 17 nt, Artificial Sequence
  Synthetic
uggcuauugauacugau

SEQ ID NO: 4908 - RNA, 17 nt, Artificial Sequence
  Synthetic
uuugcuucccccaauga

SEQ ID NO: 4909 - RNA, 20 nt, Artificial Sequence
  Synthetic
uuuuggaauguagagaggca

SEQ ID NO: 4910 - RNA, 20 nt, Artificial Sequence
  Synthetic
gaaaauacuuacuguacugc

SEQ ID NO: 4911 - RNA, 17 nt, Artificial Sequence
  Synthetic
gaauuguauaaguagca

SEQ ID NO: 4912 - RNA, 20 nt, Artificial Sequence
  Synthetic
gaguucugugucagcaaaaa

SEQ ID NO: 4913 - RNA, 20 nt, Artificial Sequence
  Synthetic
ggaaaacaggaagaugcauu

SEQ ID NO: 4914 - RNA, 17 nt, Artificial Sequence
  Synthetic
ggaauguagagaggcag

SEQ ID NO: 4915 - RNA, 17 nt, Artificial Sequence
  Synthetic
ggcuguuuuggaaugua

SEQ ID NO: 4916 - RNA, 17 nt, Artificial Sequence
  Synthetic
guaaguauuuucuuuca

SEQ ID NO: 4917 - RNA, 20 nt, Artificial Sequence
  Synthetic
guaaguauuuucuuucauug

SEQ ID NO: 4918 - RNA, 17 nt, Artificial Sequence
  Synthetic
guauuuucuuucauugg

SEQ ID NO: 4919 - RNA, 20 nt, Artificial Sequence
  Synthetic
aaaaauuuaagacgggaaaa

SEQ ID NO: 4920 - RNA, 20 nt, Artificial Sequence
  Synthetic
aaaacaggaagaugcauucu

SEQ ID NO: 4921 - RNA, 17 nt, Artificial Sequence
  Synthetic
aaaacuagaaaguuuua

SEQ ID NO: 4922 - RNA, 20 nt, Artificial Sequence
  Synthetic
aaaauacuuacuguacugca

SEQ ID NO: 4923 - RNA, 20 nt, Artificial Sequence
  Synthetic
aaaauuuaagacgggaaaac

SEQ ID NO: 4924 - RNA, 17 nt, Artificial Sequence
  Synthetic
aaacaggaagaugcauu

SEQ ID NO: 4925 - RNA, 20 nt, Artificial Sequence
  Synthetic
aaaggcuguuuuggaaugua

SEQ ID NO: 4926 - RNA, 17 nt, Artificial Sequence
  Synthetic
aaauacuuacuguacug

SEQ ID NO: 4927 - RNA, 20 nt, Artificial Sequence
  Synthetic
aaauacuuacuguacugcag

SEQ ID NO: 4928 - RNA, 17 nt, Artificial Sequence
  Synthetic
aagaaagcaguguaagg

SEQ ID NO: 4929 - RNA, 17 nt, Artificial Sequence
  Synthetic
aaggcuguuuuggaaug

SEQ ID NO: 4930 - RNA, 17 nt, Artificial Sequence
  Synthetic
aaguauuuucuuucauu

SEQ ID NO: 4931 - RNA, 17 nt, Artificial Sequence
  Synthetic
aauacuuacuguacugc

SEQ ID NO: 4932 - RNA, 20 nt, Artificial Sequence
  Synthetic
aauuagaauaaaaggcuguu

SEQ ID NO: 4933 - RNA, 20 nt, Artificial Sequence
  Synthetic
aauuauuuuacuagugaauu

SEQ ID NO: 4934 - RNA, 17 nt, Artificial Sequence
  Synthetic
aauuuaagacgggaaaa

SEQ ID NO: 4935 - RNA, 17 nt, Artificial Sequence
  Synthetic
acaggaagaugcauucu

SEQ ID NO: 4936 - RNA, 20 nt, Artificial Sequence
  Synthetic
acaguaaguauuuucuuuca

SEQ ID NO: 4937 - RNA, 17 nt, Artificial Sequence
  Synthetic
acauaaaaauuuaagac

SEQ ID NO: 4938 - RNA, 20 nt, Artificial Sequence
  Synthetic
acuuucuaguuuugcuuaac

SEQ ID NO: 4939 - RNA, 20 nt, Artificial Sequence
  Synthetic
agaaaauacuuacuguacug

SEQ ID NO: 4940 - RNA, 17 nt, Artificial Sequence
  Synthetic
agaauaaaaggcuguuu

SEQ ID NO: 4941 - RNA, 20 nt, Artificial Sequence
  Synthetic
agcaaaacuagaaaguuuua

SEQ ID NO: 4942 - RNA, 20 nt, Artificial Sequence
  Synthetic
aguaaguauuuucuuucauu

SEQ ID NO: 4943 - RNA, 17 nt, Artificial Sequence
  Synthetic
aguauuuucuuucauug

SEQ ID NO: 4944 - RNA, 20 nt, Artificial Sequence
  Synthetic
agugaauuguauaaguagca

SEQ ID NO: 4945 - RNA, 17 nt, Artificial Sequence
  Synthetic
auacuuacuguacugca

SEQ ID NO: 4946 - RNA, 20 nt, Artificial Sequence
  Synthetic
aucucacauaaaaauuuaag

SEQ ID NO: 4947 - RNA, 20 nt, Artificial Sequence
  Synthetic
auuaagaaagcaguguaagg

SEQ ID NO: 4948 - RNA, 20 nt, Artificial Sequence
  Synthetic
auuagaauaaaaggcuguuu

SEQ ID NO: 4949 - RNA, 20 nt, Artificial Sequence
  Synthetic
auuauuuuacuagugaauua

SEQ ID NO: 4950 - RNA, 17 nt, Artificial Sequence
  Synthetic
auuuaagacgggaaaac

SEQ ID NO: 4951 - RNA, 17 nt, Artificial Sequence
  Synthetic
auuuuacuagugaauua

SEQ ID NO: 4952 - RNA, 20 nt, Artificial Sequence
  Synthetic
auuuucauguuaagcaaaac

SEQ ID NO: 4953 - RNA, 17 nt, Artificial Sequence
  Synthetic
cacauaaaaauuuaaga

SEQ ID NO: 4954 - RNA, 20 nt, Artificial Sequence
  Synthetic
caguaaguauuuucuuucau

SEQ ID NO: 4955 - RNA, 17 nt, Artificial Sequence
  Synthetic
ccgucuuaaauuuuuau

SEQ ID NO: 4956 - RNA, 20 nt, Artificial Sequence
  Synthetic
cucacauaaaaauuuaagac

SEQ ID NO: 4957 - RNA, 20 nt, Artificial Sequence
  Synthetic
uaaaaggcuguuuuggaaug

SEQ ID NO: 4958 - RNA, 17 nt, Artificial Sequence
  Synthetic
uaaguauuuucuuucau

SEQ ID NO: 4959 - RNA, 20 nt, Artificial Sequence
  Synthetic
uaaguauuuucuuucauugg

SEQ ID NO: 4960 - RNA, 20 nt, Artificial Sequence
  Synthetic
uaauucacuaguaaaauaau

SEQ ID NO: 4961 - RNA, 17 nt, Artificial Sequence
  Synthetic
uacuuacuguacugcag

SEQ ID NO: 4962 - RNA, 17 nt, Artificial Sequence
  Synthetic
uagaauaaaaggcuguu

SEQ ID NO: 4963 - RNA, 17 nt, Artificial Sequence
  Synthetic
uauuuuacuagugaauu

SEQ ID NO: 4964 - RNA, 17 nt, Artificial Sequence
  Synthetic
ucacauaaaaauuuaag

SEQ ID NO: 4965 - RNA, 20 nt, Artificial Sequence
  Synthetic
ucucacauaaaaauuuaaga

SEQ ID NO: 4966 - RNA, 20 nt, Artificial Sequence
  Synthetic
uguuucauuuuuugcugaca

SEQ ID NO: 4967 - RNA, 20 nt, Artificial Sequence
  Synthetic
uguuuuggaauguagagagg

SEQ ID NO: 4968 - RNA, 17 nt, Artificial Sequence
  Synthetic
uuaaauuuuuaugugag

SEQ ID NO: 4969 - RNA, 20 nt, Artificial Sequence
  Synthetic
uuauucuaauuauuuuacua

SEQ ID NO: 4970 - RNA, 17 nt, Artificial Sequence
  Synthetic
uucacuaguaaaauaau

SEQ ID NO: 4971 - RNA, 17 nt, Artificial Sequence
  Synthetic
uucauguuaagcaaaac

SEQ ID NO: 4972 - RNA, 17 nt, Artificial Sequence
  Synthetic
uucauuuuuugcugaca

SEQ ID NO: 4973 - RNA, 20 nt, Artificial Sequence
  Synthetic
uucccgucuuaaauuuuuau

SEQ ID NO: 4974 - RNA, 17 nt, Artificial Sequence
  Synthetic
uucuaauuauuuuacua

SEQ ID NO: 4975 - RNA, 17 nt, Artificial Sequence
  Synthetic
uucuaguuuugcuuaac

SEQ ID NO: 4976 - RNA, 17 nt, Artificial Sequence
  Synthetic
uucugugucagcaaaaa

SEQ ID NO: 4977 - RNA, 17 nt, Artificial Sequence
  Synthetic
uuuggaauguagagagg

SEQ ID NO: 4978 - RNA, 20 nt, Artificial Sequence
  Synthetic
uuuggaauguagagaggcag

SEQ ID NO: 4979 - RNA, 20 nt, Artificial Sequence
  Synthetic
uuuggaucuuuggcuauuga

SEQ ID NO: 4980 - RNA, 17 nt, Artificial Sequence
  Synthetic
ggaucuuuggcuauuga

SEQ ID NO: 4981 - RNA, 20 nt, Artificial Sequence
  Synthetic
gacgacggcucgguucacau

SEQ ID NO: 4982 - RNA, 20 nt, Artificial Sequence
  Synthetic
gacgccagacgcggcccccg

SEQ ID NO: 4983 - RNA, 20 nt, Artificial Sequence
  Synthetic
gccuugcuugcggcgagaca

SEQ ID NO: 4984 - RNA, 20 nt, Artificial Sequence
  Synthetic
ggcuccgcggacgccagacg

SEQ ID NO: 4985 - RNA, 17 nt, Artificial Sequence
  Synthetic
gacggcucgguucacau

SEQ ID NO: 4986 - RNA, 17 nt, Artificial Sequence
  Synthetic
gccgcgucuggcguccg

SEQ ID NO: 4987 - RNA, 17 nt, Artificial Sequence
  Synthetic
gcgggcggacgacggcu

SEQ ID NO: 4988 - RNA, 20 nt, Artificial Sequence
  Synthetic
acacggcaaugguuccagau

SEQ ID NO: 4989 - RNA, 20 nt, Artificial Sequence
  Synthetic
accaugucucgccgcaagca

SEQ ID NO: 4990 - RNA, 20 nt, Artificial Sequence
  Synthetic
acgacggcucgguucacauc

SEQ ID NO: 4991 - RNA, 20 nt, Artificial Sequence
  Synthetic
auucccguuugcuuaagugc

SEQ ID NO: 4992 - RNA, 20 nt, Artificial Sequence
  Synthetic
cauuuuagaguccgcgugug

SEQ ID NO: 4993 - RNA, 20 nt, Artificial Sequence
  Synthetic
cggacgccagacgcggcccc

SEQ ID NO: 4994 - RNA, 20 nt, Artificial Sequence
  Synthetic
cgguucacaucgggagagcc

SEQ ID NO: 4995 - RNA, 20 nt, Artificial Sequence
  Synthetic
cuccugacguucaaguucgc

SEQ ID NO: 4996 - RNA, 20 nt, Artificial Sequence
  Synthetic
uaauaaucacgagagcgcgc

SEQ ID NO: 4997 - RNA, 20 nt, Artificial Sequence
  Synthetic
uccugacguucaaguucgca

SEQ ID NO: 4998 - RNA, 20 nt, Artificial Sequence
  Synthetic
ucgguucacaucgggagagc

SEQ ID NO: 4999 - RNA, 20 nt, Artificial Sequence
  Synthetic
ucuuuuaccucgacucucgg

SEQ ID NO: 5000 - RNA, 20 nt, Artificial Sequence
  Synthetic
ugcuugcggcgagacauggu

SEQ ID NO: 5001 - RNA, 20 nt, Artificial Sequence
  Synthetic
uuuagaguccgcgugugugg

SEQ ID NO: 5002 - RNA, 17 nt, Artificial Sequence
  Synthetic
acggcucgguucacauc

SEQ ID NO: 5003 - RNA, 17 nt, Artificial Sequence
  Synthetic
augucucgccgcaagca

SEQ ID NO: 5004 - RNA, 17 nt, Artificial Sequence
  Synthetic
cugacguucaaguucgc

SEQ ID NO: 5005 - RNA, 17 nt, Artificial Sequence
  Synthetic
uaaucacgagagcgcgc

SEQ ID NO: 5006 - RNA, 17 nt, Artificial Sequence
  Synthetic
uccgcggacgccagacg

SEQ ID NO: 5007 - RNA, 17 nt, Artificial Sequence
  Synthetic
ugacguucaaguucgca

SEQ ID NO: 5008 - RNA, 17 nt, Artificial Sequence
  Synthetic
uuagaguccgcgugugu

SEQ ID NO: 5009 - RNA, 17 nt, Artificial Sequence
  Synthetic
uugcggcgagacauggu

SEQ ID NO: 5010 - RNA, 17 nt, Artificial Sequence
  Synthetic
uugcuugcggcgagaca

SEQ ID NO: 5011 - RNA, 17 nt, Artificial Sequence
  Synthetic
uuuaccucgacucucgg

SEQ ID NO: 5012 - RNA, 17 nt, Artificial Sequence
  Synthetic
uuuagaguccgcgugug

SEQ ID NO: 5013 - RNA, 20 nt, Artificial Sequence
  Synthetic
gaaaaaacccucaucccauc

SEQ ID NO: 5014 - RNA, 17 nt, Artificial Sequence
  Synthetic
gaaagggguggcagggg

SEQ ID NO: 5015 - RNA, 20 nt, Artificial Sequence
  Synthetic
gaacuugaacgucaggaguc

SEQ ID NO: 5016 - RNA, 17 nt, Artificial Sequence
  Synthetic
gaacuugcagcucaggg

SEQ ID NO: 5017 - RNA, 17 nt, Artificial Sequence
  Synthetic
gaagaaagggguggcag

SEQ ID NO: 5018 - RNA, 20 nt, Artificial Sequence
  Synthetic
gaagaaagggguggcagggg

SEQ ID NO: 5019 - RNA, 20 nt, Artificial Sequence
  Synthetic
gaaggggaagcucacaccaa

SEQ ID NO: 5020 - RNA, 17 nt, Artificial Sequence
  Synthetic
gaaggggaggagggaag

SEQ ID NO: 5021 - RNA, 20 nt, Artificial Sequence
  Synthetic
gaauugugggagagccguca

SEQ ID NO: 5022 - RNA, 20 nt, Artificial Sequence
  Synthetic
gacaagccaauggccagugc

SEQ ID NO: 5023 - RNA, 20 nt, Artificial Sequence
  Synthetic
gacagagacacacaaaacau

SEQ ID NO: 5024 - RNA, 17 nt, Artificial Sequence
  Synthetic
gacaugaaaaagagacc

SEQ ID NO: 5025 - RNA, 20 nt, Artificial Sequence
  Synthetic
gacauggugggcugcggggc

SEQ ID NO: 5026 - RNA, 17 nt, Artificial Sequence
  Synthetic
gacgcggcccccggggg

SEQ ID NO: 5027 - RNA, 17 nt, Artificial Sequence
  Synthetic
gacuagaagcaaaagcg

SEQ ID NO: 5028 - RNA, 20 nt, Artificial Sequence
  Synthetic
gacuagaagcaaaagcgagg

SEQ ID NO: 5029 - RNA, 17 nt, Artificial Sequence
  Synthetic
gagaagaaagggguggc

SEQ ID NO: 5030 - RNA, 17 nt, Artificial Sequence
  Synthetic
gagaaggggaggaggga

SEQ ID NO: 5031 - RNA, 20 nt, Artificial Sequence
  Synthetic
gagacacacaaaacaugggc

SEQ ID NO: 5032 - RNA, 17 nt, Artificial Sequence
  Synthetic
gagacauggugggcugc

SEQ ID NO: 5033 - RNA, 20 nt, Artificial Sequence
  Synthetic
gagagaagaaagggguggca

SEQ ID NO: 5034 - RNA, 17 nt, Artificial Sequence
  Synthetic
gagagaagagagauaga

SEQ ID NO: 5035 - RNA, 20 nt, Artificial Sequence
  Synthetic
gagagaaggggaggagggaa

SEQ ID NO: 5036 - RNA, 20 nt, Artificial Sequence
  Synthetic
gagagagagaagagagauag

SEQ ID NO: 5037 - RNA, 17 nt, Artificial Sequence
  Synthetic
gagagagaugaaaaaaa

SEQ ID NO: 5038 - RNA, 17 nt, Artificial Sequence
  Synthetic
gagcaggagagaagggg

SEQ ID NO: 5039 - RNA, 20 nt, Artificial Sequence
  Synthetic
gagcaggagagaaggggagg

SEQ ID NO: 5040 - RNA, 17 nt, Artificial Sequence
  Synthetic
gagccggguuagaaaga

SEQ ID NO: 5041 - RNA, 17 nt, Artificial Sequence
  Synthetic
gaggggagggggcgcug

SEQ ID NO: 5042 - RNA, 20 nt, Artificial Sequence
  Synthetic
gaggggcgggccgaggggag

SEQ ID NO: 5043 - RNA, 17 nt, Artificial Sequence
  Synthetic
gagggggaggugcgggg

SEQ ID NO: 5044 - RNA, 20 nt, Artificial Sequence
  Synthetic
gagggggaggugcggggcgg

SEQ ID NO: 5045 - RNA, 17 nt, Artificial Sequence
  Synthetic
gagguaaaagagauaaa

SEQ ID NO: 5046 - RNA, 17 nt, Artificial Sequence
  Synthetic
gaguccgcguguguggg

SEQ ID NO: 5047 - RNA, 20 nt, Artificial Sequence
  Synthetic
gagucuccuucuuucuaacc

SEQ ID NO: 5048 - RNA, 17 nt, Artificial Sequence
  Synthetic
gaugaagauauuuucuc

SEQ ID NO: 5049 - RNA, 20 nt, Artificial Sequence
  Synthetic
gcaaaagcgagggggagaga

SEQ ID NO: 5050 - RNA, 20 nt, Artificial Sequence
  Synthetic
gcaccucccccuccccgcac

SEQ ID NO: 5051 - RNA, 20 nt, Artificial Sequence
  Synthetic
gcacuugaacuugcagcuca

SEQ ID NO: 5052 - RNA, 17 nt, Artificial Sequence
  Synthetic
gcagggaagaugaauug

SEQ ID NO: 5053 - RNA, 20 nt, Artificial Sequence
  Synthetic
gcagggcgagcaggagagaa

SEQ ID NO: 5054 - RNA, 17 nt, Artificial Sequence
  Synthetic
gcaggggugggaggaaa

SEQ ID NO: 5055 - RNA, 20 nt, Artificial Sequence
  Synthetic
gcaggggugggaggaaaggg

SEQ ID NO: 5056 - RNA, 20 nt, Artificial Sequence
  Synthetic
gccaauggccagugcgggga

SEQ ID NO: 5057 - RNA, 20 nt, Artificial Sequence
  Synthetic
gccaccccuuucuucucucc

SEQ ID NO: 5058 - RNA, 17 nt, Artificial Sequence
  Synthetic
gccagacgcggcccccg

SEQ ID NO: 5059 - RNA, 20 nt, Artificial Sequence
  Synthetic
gccccagcgcccccuccccu

SEQ ID NO: 5060 - RNA, 17 nt, Artificial Sequence
  Synthetic
gcccccgggggaggggc

SEQ ID NO: 5061 - RNA, 17 nt, Artificial Sequence
  Synthetic
gcccgccccucccccgg

SEQ ID NO: 5062 - RNA, 20 nt, Artificial Sequence
  Synthetic
gccgaggggagggggcgcug

SEQ ID NO: 5063 - RNA, 20 nt, Artificial Sequence
  Synthetic
gccgcggcgguggcguggcc

SEQ ID NO: 5064 - RNA, 17 nt, Artificial Sequence
  Synthetic
gccgggagagaagaaag

SEQ ID NO: 5065 - RNA, 20 nt, Artificial Sequence
  Synthetic
gccgggagagaagaaagggg

SEQ ID NO: 5066 - RNA, 20 nt, Artificial Sequence
  Synthetic
gcgagacauggugggcugcg

SEQ ID NO: 5067 - RNA, 20 nt, Artificial Sequence
  Synthetic
gcgcagggaagaugaauugu

SEQ ID NO: 5068 - RNA, 17 nt, Artificial Sequence
  Synthetic
gcgccgcggcgguggcg

SEQ ID NO: 5069 - RNA, 17 nt, Artificial Sequence
  Synthetic
gcgcucgcugcggccac

SEQ ID NO: 5070 - RNA, 20 nt, Artificial Sequence
  Synthetic
gcggcccccgggggaggggc

SEQ ID NO: 5071 - RNA, 20 nt, Artificial Sequence
  Synthetic
gcggcgcucgcugcggccac

SEQ ID NO: 5072 - RNA, 17 nt, Artificial Sequence
  Synthetic
gcggcggcggcggcggc

SEQ ID NO: 5073 - RNA, 20 nt, Artificial Sequence
  Synthetic
gcggcggcggcggcggcggc

SEQ ID NO: 5074 - RNA, 20 nt, Artificial Sequence
  Synthetic
gcggcggcggcggcggcggg

SEQ ID NO: 5075 - RNA, 17 nt, Artificial Sequence
  Synthetic
gcggcggcggcggcggg

SEQ ID NO: 5076 - RNA, 20 nt, Artificial Sequence
  Synthetic
gcggcgggcggacgacggcu

SEQ ID NO: 5077 - RNA, 17 nt, Artificial Sequence
  Synthetic
gcggcgguggcguggcc

SEQ ID NO: 5078 - RNA, 17 nt, Artificial Sequence
  Synthetic
gcgggcggcggcggcgg

SEQ ID NO: 5079 - RNA, 20 nt, Artificial Sequence
  Synthetic
gcgggcggcggcggcggcgg

SEQ ID NO: 5080 - RNA, 17 nt, Artificial Sequence
  Synthetic
gcggggagggggaggug

SEQ ID NO: 5081 - RNA, 20 nt, Artificial Sequence
  Synthetic
gcguggccgggagagaagaa

SEQ ID NO: 5082 - RNA, 17 nt, Artificial Sequence
  Synthetic
gcucccccccacacacg

SEQ ID NO: 5083 - RNA, 20 nt, Artificial Sequence
  Synthetic
gcugggguuugccuugcuug

SEQ ID NO: 5084 - RNA, 20 nt, Artificial Sequence
  Synthetic
ggacaagccaauggccagug

SEQ ID NO: 5085 - RNA, 17 nt, Artificial Sequence
  Synthetic
ggacacacaucaggggc

SEQ ID NO: 5086 - RNA, 20 nt, Artificial Sequence
  Synthetic
ggacagagacacacaaaaca

SEQ ID NO: 5087 - RNA, 20 nt, Artificial Sequence
  Synthetic
ggacgccagacgcggccccc

SEQ ID NO: 5088 - RNA, 20 nt, Artificial Sequence
  Synthetic
ggacuagaagcaaaagcgag

SEQ ID NO: 5089 - RNA, 20 nt, Artificial Sequence
  Synthetic
ggagagaagaaagggguggc

SEQ ID NO: 5090 - RNA, 20 nt, Artificial Sequence
  Synthetic
ggagagaaggggaggaggga

SEQ ID NO: 5091 - RNA, 20 nt, Artificial Sequence
  Synthetic
ggagagccggguuagaaaga

SEQ ID NO: 5092 - RNA, 20 nt, Artificial Sequence
  Synthetic
ggaggggcgggccgagggga

SEQ ID NO: 5093 - RNA, 20 nt, Artificial Sequence
  Synthetic
ggagggggaggugcggggcg

SEQ ID NO: 5094 - RNA, 20 nt, Artificial Sequence
  Synthetic
ggagggggcgcuggggccgc

SEQ ID NO: 5095 - RNA, 20 nt, Artificial Sequence
  Synthetic
ggcagggcgagcaggagaga

SEQ ID NO: 5096 - RNA, 17 nt, Artificial Sequence
  Synthetic
ggcaggggugggaggaa

SEQ ID NO: 5097 - RNA, 17 nt, Artificial Sequence
  Synthetic
ggccacuggugagcccg

SEQ ID NO: 5098 - RNA, 17 nt, Artificial Sequence
  Synthetic
ggcccccgggggagggg

SEQ ID NO: 5099 - RNA, 17 nt, Artificial Sequence
  Synthetic
ggcccgccccucccccg

SEQ ID NO: 5100 - RNA, 20 nt, Artificial Sequence
  Synthetic
ggccgaggggagggggcgcu

SEQ ID NO: 5101 - RNA, 17 nt, Artificial Sequence
  Synthetic
ggccgcagcgagcgccg

SEQ ID NO: 5102 - RNA, 20 nt, Artificial Sequence
  Synthetic
ggccgcagcgagcgccgcgg

SEQ ID NO: 5103 - RNA, 17 nt, Artificial Sequence
  Synthetic
ggccgcgggcucaccag

SEQ ID NO: 5104 - RNA, 17 nt, Artificial Sequence
  Synthetic
ggccgggagagaagaaa

SEQ ID NO: 5105 - RNA, 20 nt, Artificial Sequence
  Synthetic
ggcgagacauggugggcugc

SEQ ID NO: 5106 - RNA, 17 nt, Artificial Sequence
  Synthetic
ggcgagcaggagagaag

SEQ ID NO: 5107 - RNA, 20 nt, Artificial Sequence
  Synthetic
ggcgagcaggagagaagggg

SEQ ID NO: 5108 - RNA, 20 nt, Artificial Sequence
  Synthetic
ggcgcagggaagaugaauug

SEQ ID NO: 5109 - RNA, 17 nt, Artificial Sequence
  Synthetic
ggcggcggcggcggcgg

SEQ ID NO: 5110 - RNA, 20 nt, Artificial Sequence
  Synthetic
ggcggcggcggcggcggcgg

SEQ ID NO: 5111 - RNA, 17 nt, Artificial Sequence
  Synthetic
ggcgggccgaggggagg

SEQ ID NO: 5112 - RNA, 17 nt, Artificial Sequence
  Synthetic
ggcugcggggcgggcgg

SEQ ID NO: 5113 - RNA, 20 nt, Artificial Sequence
  Synthetic
ggcugcggggcgggcggcgg

SEQ ID NO: 5114 - RNA, 17 nt, Artificial Sequence
  Synthetic
gggagagaagaaagggg

SEQ ID NO: 5115 - RNA, 17 nt, Artificial Sequence
  Synthetic
gggaggaaagggugggg

SEQ ID NO: 5116 - RNA, 17 nt, Artificial Sequence
  Synthetic
gggaggggcgggccgag

SEQ ID NO: 5117 - RNA, 20 nt, Artificial Sequence
  Synthetic
gggaggggcgggccgagggg

SEQ ID NO: 5118 - RNA, 20 nt, Artificial Sequence
  Synthetic
gggagggggaggugcggggc

SEQ ID NO: 5119 - RNA, 20 nt, Artificial Sequence
  Synthetic
gggagggggcgcuggggccg

SEQ ID NO: 5120 - RNA, 17 nt, Artificial Sequence
  Synthetic
gggaggugcggggcggg

SEQ ID NO: 5121 - RNA, 20 nt, Artificial Sequence
  Synthetic
gggccgaggggagggggcgc

SEQ ID NO: 5122 - RNA, 17 nt, Artificial Sequence
  Synthetic
gggcgagcaggagagaa

SEQ ID NO: 5123 - RNA, 17 nt, Artificial Sequence
  Synthetic
gggcgggccgaggggag

SEQ ID NO: 5124 - RNA, 17 nt, Artificial Sequence
  Synthetic
ggggaagcucacaccaa

SEQ ID NO: 5125 - RNA, 17 nt, Artificial Sequence
  Synthetic
ggggaggggcgggccga

SEQ ID NO: 5126 - RNA, 17 nt, Artificial Sequence
  Synthetic
ggggagggggaggugcg

SEQ ID NO: 5127 - RNA, 20 nt, Artificial Sequence
  Synthetic
ggggagggggaggugcgggg

SEQ ID NO: 5128 - RNA, 17 nt, Artificial Sequence
  Synthetic
ggggaggugcggggcgg

SEQ ID NO: 5129 - RNA, 20 nt, Artificial Sequence
  Synthetic
ggggccgcgucuggcguccg

SEQ ID NO: 5130 - RNA, 17 nt, Artificial Sequence
  Synthetic
ggggcgggccgagggga

SEQ ID NO: 5131 - RNA, 17 nt, Artificial Sequence
  Synthetic
ggggcgggcggcggcgg

SEQ ID NO: 5132 - RNA, 20 nt, Artificial Sequence
  Synthetic
ggggcgggcggcggcggcgg

SEQ ID NO: 5133 - RNA, 17 nt, Artificial Sequence
  Synthetic
gggggaggggcgggccg

SEQ ID NO: 5134 - RNA, 17 nt, Artificial Sequence
  Synthetic
gggggaggugcggggcg

SEQ ID NO: 5135 - RNA, 17 nt, Artificial Sequence
  Synthetic
gggggcgcuggggccgc

SEQ ID NO: 5136 - RNA, 17 nt, Artificial Sequence
  Synthetic
gggguggcagggguggg

SEQ ID NO: 5137 - RNA, 17 nt, Artificial Sequence
  Synthetic
ggggugggaggaaaggg

SEQ ID NO: 5138 - RNA, 20 nt, Artificial Sequence
  Synthetic
ggggugggaggaaagggugg

SEQ ID NO: 5139 - RNA, 17 nt, Artificial Sequence
  Synthetic
gggguuugccuugcuug

SEQ ID NO: 5140 - RNA, 17 nt, Artificial Sequence
  Synthetic
gggugggaggaaagggu

SEQ ID NO: 5141 - RNA, 20 nt, Artificial Sequence
  Synthetic
gggugggaggaaaggguggg

SEQ ID NO: 5142 - RNA, 17 nt, Artificial Sequence
  Synthetic
gguaaaagagauaaagg

SEQ ID NO: 5143 - RNA, 20 nt, Artificial Sequence
  Synthetic
gguggcaggggugggaggaa

SEQ ID NO: 5144 - RNA, 17 nt, Artificial Sequence
  Synthetic
ggugggaggaaagggug

SEQ ID NO: 5145 - RNA, 20 nt, Artificial Sequence
  Synthetic
ggugggaggaaagggugggg

SEQ ID NO: 5146 - RNA, 17 nt, Artificial Sequence
  Synthetic
gguuccagaugggauga

SEQ ID NO: 5147 - RNA, 20 nt, Artificial Sequence
  Synthetic
guauuauuucuaauuuauuu

SEQ ID NO: 5148 - RNA, 20 nt, Artificial Sequence
  Synthetic
gucgagguaaaagagauaaa

SEQ ID NO: 5149 - RNA, 20 nt, Artificial Sequence
  Synthetic
gugcggggagggggaggugc

SEQ ID NO: 5150 - RNA, 20 nt, Artificial Sequence
  Synthetic
gugcggggcggggggcuccg

SEQ ID NO: 5151 - RNA, 20 nt, Artificial Sequence
  Synthetic
guggcaggggugggaggaaa

SEQ ID NO: 5152 - RNA, 20 nt, Artificial Sequence
  Synthetic
guggccgggagagaagaaag

SEQ ID NO: 5153 - RNA, 17 nt, Artificial Sequence
  Synthetic
gugggaggaaagggugg

SEQ ID NO: 5154 - RNA, 17 nt, Artificial Sequence
  Synthetic
gugggcugcggggcggg

SEQ ID NO: 5155 - RNA, 20 nt, Artificial Sequence
  Synthetic
gugggcugcggggcgggcgg

SEQ ID NO: 5156 - RNA, 17 nt, Artificial Sequence
  Synthetic
gugugugggggggagca

SEQ ID NO: 5157 - RNA, 20 nt, Artificial Sequence
  Synthetic
aaaaaaaaaaaaaaaaaaag

SEQ ID NO: 5158 - RNA, 20 nt, Artificial Sequence
  Synthetic
aaaaaaaaaaaaaaaaaaga

SEQ ID NO: 5159 - RNA, 17 nt, Artificial Sequence
  Synthetic
aaaaaaaaaaaaaaaag

SEQ ID NO: 5160 - RNA, 17 nt, Artificial Sequence
  Synthetic
aaaaaaaaaaaaaaaga

SEQ ID NO: 5161 - RNA, 20 nt, Artificial Sequence
  Synthetic
aaaacaugggcagggcgagc

SEQ ID NO: 5162 - RNA, 17 nt, Artificial Sequence
  Synthetic
aaaacccucaucccauc

SEQ ID NO: 5163 - RNA, 17 nt, Artificial Sequence
  Synthetic
aaaaccuccgagagucg

SEQ ID NO: 5164 - RNA, 17 nt, Artificial Sequence
  Synthetic
aaaagcgagggggagag

SEQ ID NO: 5165 - RNA, 17 nt, Artificial Sequence
  Synthetic
aaagcgagggggagaga

SEQ ID NO: 5166 - RNA, 17 nt, Artificial Sequence
  Synthetic
aaagggguggcaggggu

SEQ ID NO: 5167 - RNA, 20 nt, Artificial Sequence
  Synthetic
aaagggguggcagggguggg

SEQ ID NO: 5168 - RNA, 20 nt, Artificial Sequence
  Synthetic
aaauaauacaaagauggcgc

SEQ ID NO: 5169 - RNA, 20 nt, Artificial Sequence
  Synthetic
aaccccagcacuuaagcaaa

SEQ ID NO: 5170 - RNA, 17 nt, Artificial Sequence
  Synthetic
aacgucaggagucugga

SEQ ID NO: 5171 - RNA, 20 nt, Artificial Sequence
  Synthetic
aagaaagggguggcaggggu

SEQ ID NO: 5172 - RNA, 20 nt, Artificial Sequence
  Synthetic
aagagaccaggacaagccaa

SEQ ID NO: 5173 - RNA, 17 nt, Artificial Sequence
  Synthetic
aagccaauggccagugc

SEQ ID NO: 5174 - RNA, 17 nt, Artificial Sequence
  Synthetic
aagcgagggggagagag

SEQ ID NO: 5175 - RNA, 17 nt, Artificial Sequence
  Synthetic
aagugcauacacggcaa

SEQ ID NO: 5176 - RNA, 20 nt, Artificial Sequence
  Synthetic
aauaauacaaagauggcgca

SEQ ID NO: 5177 - RNA, 17 nt, Artificial Sequence
  Synthetic
aauacaaagauggcgca

SEQ ID NO: 5178 - RNA, 20 nt, Artificial Sequence
  Synthetic
aauggacacacaucaggggc

SEQ ID NO: 5179 - RNA, 17 nt, Artificial Sequence
  Synthetic
aauggccagugcgggga

SEQ ID NO: 5180 - RNA, 20 nt, Artificial Sequence
  Synthetic
aaugguuccagaugggauga

SEQ ID NO: 5181 - RNA, 17 nt, Artificial Sequence
  Synthetic
aauuaaauaaaauuaaa

SEQ ID NO: 5182 - RNA, 20 nt, Artificial Sequence
  Synthetic
aauuagaaauaauacaaaga

SEQ ID NO: 5183 - RNA, 20 nt, Artificial Sequence
  Synthetic
aauuuauuuuggaugucaaa

SEQ ID NO: 5184 - RNA, 20 nt, Artificial Sequence
  Synthetic
acaagccaauggccagugcg

SEQ ID NO: 5185 - RNA, 17 nt, Artificial Sequence
  Synthetic
acacacaaaacaugggc

SEQ ID NO: 5186 - RNA, 20 nt, Artificial Sequence
  Synthetic
acaccaauggacacacauca

SEQ ID NO: 5187 - RNA, 17 nt, Artificial Sequence
  Synthetic
acaugggcagggcgagc

SEQ ID NO: 5188 - RNA, 17 nt, Artificial Sequence
  Synthetic
accaauggacacacauc

SEQ ID NO: 5189 - RNA, 20 nt, Artificial Sequence
  Synthetic
accccagcacuuaagcaaac

SEQ ID NO: 5190 - RNA, 17 nt, Artificial Sequence
  Synthetic
accccuuucuucucucc

SEQ ID NO: 5191 - RNA, 17 nt, Artificial Sequence
  Synthetic
acgccagacgcggcccc

SEQ ID NO: 5192 - RNA, 20 nt, Artificial Sequence
  Synthetic
acgccagacgcggcccccgg

SEQ ID NO: 5193 - RNA, 17 nt, Artificial Sequence
  Synthetic
acgcggcccccggggga

SEQ ID NO: 5194 - RNA, 17 nt, Artificial Sequence
  Synthetic
acggcaaugguuccaga

SEQ ID NO: 5195 - RNA, 17 nt, Artificial Sequence
  Synthetic
acuagaagcaaaagcga

SEQ ID NO: 5196 - RNA, 20 nt, Artificial Sequence
  Synthetic
acugaugaagauauuuucuc

SEQ ID NO: 5197 - RNA, 17 nt, Artificial Sequence
  Synthetic
acuugaacuugcagcuc

SEQ ID NO: 5198 - RNA, 20 nt, Artificial Sequence
  Synthetic
acuugaacuugcagcucagg

SEQ ID NO: 5199 - RNA, 20 nt, Artificial Sequence
  Synthetic
agaaaaaccuccgagagucg

SEQ ID NO: 5200 - RNA, 17 nt, Artificial Sequence
  Synthetic
agaagaaagggguggca

SEQ ID NO: 5201 - RNA, 17 nt, Artificial Sequence
  Synthetic
agaaggggaggagggaa

SEQ ID NO: 5202 - RNA, 20 nt, Artificial Sequence
  Synthetic
agacacacaaaacaugggca

SEQ ID NO: 5203 - RNA, 17 nt, Artificial Sequence
  Synthetic
agacauggugggcugcg

SEQ ID NO: 5204 - RNA, 20 nt, Artificial Sequence
  Synthetic
agacauggugggcugcgggg

SEQ ID NO: 5205 - RNA, 17 nt, Artificial Sequence
  Synthetic
agaccaggacaagccaa

SEQ ID NO: 5206 - RNA, 20 nt, Artificial Sequence
  Synthetic
agacgcggcccccgggggag

SEQ ID NO: 5207 - RNA, 20 nt, Artificial Sequence
  Synthetic
agagaagaaagggguggcag

SEQ ID NO: 5208 - RNA, 20 nt, Artificial Sequence
  Synthetic
agagaaggggaggagggaag

SEQ ID NO: 5209 - RNA, 17 nt, Artificial Sequence
  Synthetic
agagacacacaaaacau

SEQ ID NO: 5210 - RNA, 17 nt, Artificial Sequence
  Synthetic
agagagaagagagauag

SEQ ID NO: 5211 - RNA, 20 nt, Artificial Sequence
  Synthetic
agagagagaagagagauaga

SEQ ID NO: 5212 - RNA, 20 nt, Artificial Sequence
  Synthetic
agagagagagaugaaaaaaa

SEQ ID NO: 5213 - RNA, 17 nt, Artificial Sequence
  Synthetic
agaguccgcgugugugg

SEQ ID NO: 5214 - RNA, 20 nt, Artificial Sequence
  Synthetic
agcaaaagcgagggggagag

SEQ ID NO: 5215 - RNA, 20 nt, Artificial Sequence
  Synthetic
agcaggagagaaggggagga

SEQ ID NO: 5216 - RNA, 17 nt, Artificial Sequence
  Synthetic
agccaauggccagugcg

SEQ ID NO: 5217 - RNA, 20 nt, Artificial Sequence
  Synthetic
agccaauggccagugcgggg

SEQ ID NO: 5218 - RNA, 20 nt, Artificial Sequence
  Synthetic
agccccugauguguguccau

SEQ ID NO: 5219 - RNA, 17 nt, Artificial Sequence
  Synthetic
agcgagcgccgcggcgg

SEQ ID NO: 5220 - RNA, 17 nt, Artificial Sequence
  Synthetic
agcugcaaguucaagug

SEQ ID NO: 5221 - RNA, 20 nt, Artificial Sequence
  Synthetic
aggacuagaagcaaaagcga

SEQ ID NO: 5222 - RNA, 17 nt, Artificial Sequence
  Synthetic
aggagagaaggggagga

SEQ ID NO: 5223 - RNA, 17 nt, Artificial Sequence
  Synthetic
agggcgagcaggagaga

SEQ ID NO: 5224 - RNA, 17 nt, Artificial Sequence
  Synthetic
aggggcgggccgagggg

SEQ ID NO: 5225 - RNA, 20 nt, Artificial Sequence
  Synthetic
aggggcgggccgaggggagg

SEQ ID NO: 5226 - RNA, 17 nt, Artificial Sequence
  Synthetic
agggggaggugcggggc

SEQ ID NO: 5227 - RNA, 20 nt, Artificial Sequence
  Synthetic
agggggaggugcggggcggg

SEQ ID NO: 5228 - RNA, 17 nt, Artificial Sequence
  Synthetic
agggggcgcuggggccg

SEQ ID NO: 5229 - RNA, 20 nt, Artificial Sequence
  Synthetic
aggggugggaggaaagggug

SEQ ID NO: 5230 - RNA, 17 nt, Artificial Sequence
  Synthetic
agguaaaagagauaaag

SEQ ID NO: 5231 - RNA, 17 nt, Artificial Sequence
  Synthetic
aguccgcgugugugggg

SEQ ID NO: 5232 - RNA, 20 nt, Artificial Sequence
  Synthetic
agucgagguaaaagagauaa

SEQ ID NO: 5233 - RNA, 20 nt, Artificial Sequence
  Synthetic
agugcggggagggggaggug

SEQ ID NO: 5234 - RNA, 20 nt, Artificial Sequence
  Synthetic
aguggccgcagcgagcgccg

SEQ ID NO: 5235 - RNA, 20 nt, Artificial Sequence
  Synthetic
auaauuauuauuacuauuau

SEQ ID NO: 5236 - RNA, 20 nt, Artificial Sequence
  Synthetic
aucucuuuuaccucgacucu

SEQ ID NO: 5237 - RNA, 17 nt, Artificial Sequence
  Synthetic
auggccagugcggggag

SEQ ID NO: 5238 - RNA, 17 nt, Artificial Sequence
  Synthetic
auggugggcugcggggc

SEQ ID NO: 5239 - RNA, 20 nt, Artificial Sequence
  Synthetic
auggugggcugcggggcggg

SEQ ID NO: 5240 - RNA, 17 nt, Artificial Sequence
  Synthetic
auuauuauuacuauuau

SEQ ID NO: 5241 - RNA, 20 nt, Artificial Sequence
  Synthetic
auuuuagaguccgcgugugu

SEQ ID NO: 5242 - RNA, 20 nt, Artificial Sequence
  Synthetic
caaaagcgagggggagagag

SEQ ID NO: 5243 - RNA, 20 nt, Artificial Sequence
  Synthetic
caaaagugcauacacggcaa

SEQ ID NO: 5244 - RNA, 17 nt, Artificial Sequence
  Synthetic
caagccaauggccagug

SEQ ID NO: 5245 - RNA, 17 nt, Artificial Sequence
  Synthetic
caauggacacacaucag

SEQ ID NO: 5246 - RNA, 17 nt, Artificial Sequence
  Synthetic
caauggccagugcgggg

SEQ ID NO: 5247 - RNA, 20 nt, Artificial Sequence
  Synthetic
caauggccagugcggggagg

SEQ ID NO: 5248 - RNA, 20 nt, Artificial Sequence
  Synthetic
caaugguuccagaugggaug

SEQ ID NO: 5249 - RNA, 17 nt, Artificial Sequence
  Synthetic
cacacaaaacaugggca

SEQ ID NO: 5250 - RNA, 20 nt, Artificial Sequence
  Synthetic
cacaccaauggacacacauc

SEQ ID NO: 5251 - RNA, 20 nt, Artificial Sequence
  Synthetic
caccaauggacacacaucag

SEQ ID NO: 5252 - RNA, 20 nt, Artificial Sequence
  Synthetic
caccgccgcggcgcucgcug

SEQ ID NO: 5253 - RNA, 20 nt, Artificial Sequence
  Synthetic
cacuggccauuggcuugucc

SEQ ID NO: 5254 - RNA, 20 nt, Artificial Sequence
  Synthetic
cacuugaacuugcagcucag

SEQ ID NO: 5255 - RNA, 20 nt, Artificial Sequence
  Synthetic
cagacgcggcccccggggga

SEQ ID NO: 5256 - RNA, 17 nt, Artificial Sequence
  Synthetic
cagagacacacaaaaca

SEQ ID NO: 5257 - RNA, 20 nt, Artificial Sequence
  Synthetic
caggacuagaagcaaaagcg

SEQ ID NO: 5258 - RNA, 17 nt, Artificial Sequence
  Synthetic
caggagagaaggggagg

SEQ ID NO: 5259 - RNA, 17 nt, Artificial Sequence
  Synthetic
cagggaagaugaauugu

SEQ ID NO: 5260 - RNA, 20 nt, Artificial Sequence
  Synthetic
cagggcgagcaggagagaag

SEQ ID NO: 5261 - RNA, 20 nt, Artificial Sequence
  Synthetic
caggggugggaggaaagggu

SEQ ID NO: 5262 - RNA, 17 nt, Artificial Sequence
  Synthetic
cauggugggcugcgggg

SEQ ID NO: 5263 - RNA, 17 nt, Artificial Sequence
  Synthetic
ccaauggacacacauca

SEQ ID NO: 5264 - RNA, 20 nt, Artificial Sequence
  Synthetic
ccaauggccagugcggggag

SEQ ID NO: 5265 - RNA, 17 nt, Artificial Sequence
  Synthetic
ccagacgcggcccccgg

SEQ ID NO: 5266 - RNA, 20 nt, Artificial Sequence
  Synthetic
ccagacgcggcccccggggg

SEQ ID NO: 5267 - RNA, 17 nt, Artificial Sequence
  Synthetic
ccagcacuuaagcaaac

SEQ ID NO: 5268 - RNA, 17 nt, Artificial Sequence
  Synthetic
ccagcgcccccuccccu

SEQ ID NO: 5269 - RNA, 17 nt, Artificial Sequence
  Synthetic
ccagugcggggaggggg

SEQ ID NO: 5270 - RNA, 17 nt, Artificial Sequence
  Synthetic
cccagcacuuaagcaaa

SEQ ID NO: 5271 - RNA, 17 nt, Artificial Sequence
  Synthetic
cccccgggggccgcguc

SEQ ID NO: 5272 - RNA, 20 nt, Artificial Sequence
  Synthetic
ccccuccccgcacuggccau

SEQ ID NO: 5273 - RNA, 20 nt, Artificial Sequence
  Synthetic
cccgggggaggggcgggccg

SEQ ID NO: 5274 - RNA, 17 nt, Artificial Sequence
  Synthetic
cccguuugcuuaagugc

SEQ ID NO: 5275 - RNA, 20 nt, Artificial Sequence
  Synthetic
cccucggcccgccccucccc

SEQ ID NO: 5276 - RNA, 17 nt, Artificial Sequence
  Synthetic
cccugauguguguccau

SEQ ID NO: 5277 - RNA, 17 nt, Artificial Sequence
  Synthetic
ccgaggggagggggcgc

SEQ ID NO: 5278 - RNA, 20 nt, Artificial Sequence
  Synthetic
ccgcgugugugggggggagc

SEQ ID NO: 5279 - RNA, 20 nt, Artificial Sequence
  Synthetic
ccgggggaggggcgggccga

SEQ ID NO: 5280 - RNA, 17 nt, Artificial Sequence
  Synthetic
ccguuugcuuaagugcu

SEQ ID NO: 5281 - RNA, 20 nt, Artificial Sequence
  Synthetic
ccucccccgggggccgcguc

SEQ ID NO: 5282 - RNA, 17 nt, Artificial Sequence
  Synthetic
ccucccccuccccgcac

SEQ ID NO: 5283 - RNA, 20 nt, Artificial Sequence
  Synthetic
ccucggcccgccccuccccc

SEQ ID NO: 5284 - RNA, 20 nt, Artificial Sequence
  Synthetic
ccugcucccccccacacacg

SEQ ID NO: 5285 - RNA, 17 nt, Artificial Sequence
  Synthetic
cgagacauggugggcug

SEQ ID NO: 5286 - RNA, 20 nt, Artificial Sequence
  Synthetic
cgagcgccgcggcgguggcg

SEQ ID NO: 5287 - RNA, 17 nt, Artificial Sequence
  Synthetic
cgaggggagggggcgcu

SEQ ID NO: 5288 - RNA, 17 nt, Artificial Sequence
  Synthetic
cgagguaaaagagauaa

SEQ ID NO: 5289 - RNA, 20 nt, Artificial Sequence
  Synthetic
cgagguaaaagagauaaagg

SEQ ID NO: 5290 - RNA, 20 nt, Artificial Sequence
  Synthetic
cgcacuugaacuugcagcuc

SEQ ID NO: 5291 - RNA, 17 nt, Artificial Sequence
  Synthetic
cgcagcgagcgccgcgg

SEQ ID NO: 5292 - RNA, 20 nt, Artificial Sequence
  Synthetic
cgcagcgagcgccgcggcgg

SEQ ID NO: 5293 - RNA, 17 nt, Artificial Sequence
  Synthetic
cgccagacgcggccccc

SEQ ID NO: 5294 - RNA, 17 nt, Artificial Sequence
  Synthetic
cgccgcggcgcucgcug

SEQ ID NO: 5295 - RNA, 20 nt, Artificial Sequence
  Synthetic
cgccgcggcgguggcguggc

SEQ ID NO: 5296 - RNA, 17 nt, Artificial Sequence
  Synthetic
cgcggcccccgggggag

SEQ ID NO: 5297 - RNA, 20 nt, Artificial Sequence
  Synthetic
cgcggcccccgggggagggg

SEQ ID NO: 5298 - RNA, 17 nt, Artificial Sequence
  Synthetic
cgcggcgguggcguggc

SEQ ID NO: 5299 - RNA, 20 nt, Artificial Sequence
  Synthetic
cgcgugugugggggggagca

SEQ ID NO: 5300 - RNA, 17 nt, Artificial Sequence
  Synthetic
cggcaaugguuccagau

SEQ ID NO: 5301 - RNA, 17 nt, Artificial Sequence
  Synthetic
cggccacgccaccgccg

SEQ ID NO: 5302 - RNA, 17 nt, Artificial Sequence
  Synthetic
cggcccgccccuccccc

SEQ ID NO: 5303 - RNA, 20 nt, Artificial Sequence
  Synthetic
cggcgagacauggugggcug

SEQ ID NO: 5304 - RNA, 20 nt, Artificial Sequence
  Synthetic
cggcggcggcgggcggacga

SEQ ID NO: 5305 - RNA, 17 nt, Artificial Sequence
  Synthetic
cggcggcgggcggacga

SEQ ID NO: 5306 - RNA, 17 nt, Artificial Sequence
  Synthetic
cggggagggggaggugc

SEQ ID NO: 5307 - RNA, 17 nt, Artificial Sequence
  Synthetic
cggggcggggggcuccg

SEQ ID NO: 5308 - RNA, 20 nt, Artificial Sequence
  Synthetic
cgggggaggggcgggccgag

SEQ ID NO: 5309 - RNA, 20 nt, Artificial Sequence
  Synthetic
cguggccgggagagaagaaa

SEQ ID NO: 5310 - RNA, 17 nt, Artificial Sequence
  Synthetic
cgugugugggggggagc

SEQ ID NO: 5311 - RNA, 17 nt, Artificial Sequence
  Synthetic
cguuugcuuaagugcug

SEQ ID NO: 5312 - RNA, 17 nt, Artificial Sequence
  Synthetic
cuagaagcaaaagcgag

SEQ ID NO: 5313 - RNA, 17 nt, Artificial Sequence
  Synthetic
cuccccgcacuggccau

SEQ ID NO: 5314 - RNA, 20 nt, Artificial Sequence
  Synthetic
cucggcccgccccucccccg

SEQ ID NO: 5315 - RNA, 20 nt, Artificial Sequence
  Synthetic
cugagcugcaaguucaagug

SEQ ID NO: 5316 - RNA, 17 nt, Artificial Sequence
  Synthetic
cugcgaacuugaacguc

SEQ ID NO: 5317 - RNA, 20 nt, Artificial Sequence
  Synthetic
cuggacaugaaaaagagacc

SEQ ID NO: 5318 - RNA, 20 nt, Artificial Sequence
  Synthetic
cugucucaaaagugcauaca

SEQ ID NO: 5319 - RNA, 17 nt, Artificial Sequence
  Synthetic
cuugaacgucaggaguc

SEQ ID NO: 5320 - RNA, 17 nt, Artificial Sequence
  Synthetic
cuugaacuugcagcuca

SEQ ID NO: 5321 - RNA, 20 nt, Artificial Sequence
  Synthetic
cuugaacuugcagcucaggg

SEQ ID NO: 5322 - RNA, 17 nt, Artificial Sequence
  Synthetic
cuugcggcgagacaugg

SEQ ID NO: 5323 - RNA, 17 nt, Artificial Sequence
  Synthetic
guucacaucgggagagc

SEQ ID NO: 5324 - RNA, 17 nt, Artificial Sequence
  Synthetic
uaauacaaagauggcgc

SEQ ID NO: 5325 - RNA, 20 nt, Artificial Sequence
  Synthetic
uaauuauuauuacuauuauu

SEQ ID NO: 5326 - RNA, 20 nt, Artificial Sequence
  Synthetic
uacacggcaaugguuccaga

SEQ ID NO: 5327 - RNA, 17 nt, Artificial Sequence
  Synthetic
uagaaauaauacaaaga

SEQ ID NO: 5328 - RNA, 17 nt, Artificial Sequence
  Synthetic
uagaagcaaaagcgagg

SEQ ID NO: 5329 - RNA, 17 nt, Artificial Sequence
  Synthetic
uagaguccgcgugugug

SEQ ID NO: 5330 - RNA, 20 nt, Artificial Sequence
  Synthetic
uagaguccgcgugugugggg

SEQ ID NO: 5331 - RNA, 20 nt, Artificial Sequence
  Synthetic
ucccggccacgccaccgccg

SEQ ID NO: 5332 - RNA, 20 nt, Artificial Sequence
  Synthetic
ucccguuugcuuaagugcug

SEQ ID NO: 5333 - RNA, 20 nt, Artificial Sequence
  Synthetic
ucccugcgaacuugaacguc

SEQ ID NO: 5334 - RNA, 20 nt, Artificial Sequence
  Synthetic
ucgagguaaaagagauaaag

SEQ ID NO: 5335 - RNA, 17 nt, Artificial Sequence
  Synthetic
ucggcccgccccucccc

SEQ ID NO: 5336 - RNA, 20 nt, Artificial Sequence
  Synthetic
ucggcccgccccucccccgg

SEQ ID NO: 5337 - RNA, 17 nt, Artificial Sequence
  Synthetic
ucucaaaagugcauaca

SEQ ID NO: 5338 - RNA, 17 nt, Artificial Sequence
  Synthetic
ucuccuucuuucuaacc

SEQ ID NO: 5339 - RNA, 17 nt, Artificial Sequence
  Synthetic
ucuuuuaccucgacucu

SEQ ID NO: 5340 - RNA, 17 nt, Artificial Sequence
  Synthetic
ugaacuugcagcucagg

SEQ ID NO: 5341 - RNA, 20 nt, Artificial Sequence
  Synthetic
ugcggccacuggugagcccg

SEQ ID NO: 5342 - RNA, 20 nt, Artificial Sequence
  Synthetic
ugcggggagggggaggugcg

SEQ ID NO: 5343 - RNA, 17 nt, Artificial Sequence
  Synthetic
ugcggggcgggcggcgg

SEQ ID NO: 5344 - RNA, 20 nt, Artificial Sequence
  Synthetic
ugcggggcgggcggcggcgg

SEQ ID NO: 5345 - RNA, 20 nt, Artificial Sequence
  Synthetic
ugcuuaaaaaaaagccauga

SEQ ID NO: 5346 - RNA, 17 nt, Artificial Sequence
  Synthetic
uggccagugcggggagg

SEQ ID NO: 5347 - RNA, 20 nt, Artificial Sequence
  Synthetic
uggccagugcggggaggggg

SEQ ID NO: 5348 - RNA, 17 nt, Artificial Sequence
  Synthetic
uggccauuggcuugucc

SEQ ID NO: 5349 - RNA, 17 nt, Artificial Sequence
  Synthetic
uggccgggagagaagaa

SEQ ID NO: 5350 - RNA, 17 nt, Artificial Sequence
  Synthetic
ugggaggaaaggguggg

SEQ ID NO: 5351 - RNA, 20 nt, Artificial Sequence
  Synthetic
uggggccgcgggcucaccag

SEQ ID NO: 5352 - RNA, 17 nt, Artificial Sequence
  Synthetic
ugguuccagaugggaug

SEQ ID NO: 5353 - RNA, 17 nt, Artificial Sequence
  Synthetic
uuaaaaaaaagccauga

SEQ ID NO: 5354 - RNA, 20 nt, Artificial Sequence
  Synthetic
uuagaguccgcguguguggg

SEQ ID NO: 5355 - RNA, 17 nt, Artificial Sequence
  Synthetic
uuauuauuacuauuauu

SEQ ID NO: 5356 - RNA, 17 nt, Artificial Sequence
  Synthetic
uuauuucuaauuuauuu

SEQ ID NO: 5357 - RNA, 17 nt, Artificial Sequence
  Synthetic
uuauuuuggaugucaaa

SEQ ID NO: 5358 - RNA, 17 nt, Artificial Sequence
  Synthetic
uucacaucgggagagcc

SEQ ID NO: 5359 - RNA, 20 nt, Artificial Sequence
  Synthetic
uucccguuugcuuaagugcu

SEQ ID NO: 5360 - RNA, 20 nt, Artificial Sequence
  Synthetic
uugaacgucaggagucugga

SEQ ID NO: 5361 - RNA, 17 nt, Artificial Sequence
  Synthetic
uugaacuugcagcucag

SEQ ID NO: 5362 - RNA, 20 nt, Artificial Sequence
  Synthetic
uugcuugcggcgagacaugg

SEQ ID NO: 5363 - RNA, 17 nt, Artificial Sequence
  Synthetic
uugugggagagccguca

SEQ ID NO: 5364 - RNA, 20 nt, Artificial Sequence
  Synthetic
uuuuagaguccgcgugugug

SEQ ID NO: 5365-6364 - skipped (1000 entries)

SEQ ID NO: 6365 - RNA, 20 nt, Artificial Sequence
  Synthetic
gacgacggcucgguucacau

SEQ ID NO: 6366 - RNA, 17 nt, Artificial Sequence
  Synthetic
gacggcucgguucacau

SEQ ID NO: 6367 - RNA, 20 nt, Artificial Sequence
  Synthetic
gacggcucgguucacaucgg

SEQ ID NO: 6368 - RNA, 20 nt, Artificial Sequence
  Synthetic
gacgugacgucccugcgaac

SEQ ID NO: 6369 - RNA, 17 nt, Artificial Sequence
  Synthetic
gcggacgugacgucccu

SEQ ID NO: 6370 - RNA, 20 nt, Artificial Sequence
  Synthetic
ggacgacggcucgguucaca

SEQ ID NO: 6371 - RNA, 17 nt, Artificial Sequence
  Synthetic
ggacgucacguccgcac

SEQ ID NO: 6372 - RNA, 17 nt, Artificial Sequence
  Synthetic
ggcucgguucacaucgg

SEQ ID NO: 6373 - RNA, 17 nt, Artificial Sequence
  Synthetic
ggcucucccgaugugaa

SEQ ID NO: 6374 - RNA, 17 nt, Artificial Sequence
  Synthetic
gguucacaucgggagag

SEQ ID NO: 6375 - RNA, 20 nt, Artificial Sequence
  Synthetic
gucccugcgaacuugaacgu

SEQ ID NO: 6376 - RNA, 17 nt, Artificial Sequence
  Synthetic
gugacgucccugcgaac

SEQ ID NO: 6377 - RNA, 20 nt, Artificial Sequence
  Synthetic
acgacggcucgguucacauc

SEQ ID NO: 6378 - RNA, 17 nt, Artificial Sequence
  Synthetic
acgagagcgcgcaggac

SEQ ID NO: 6379 - RNA, 17 nt, Artificial Sequence
  Synthetic
acggcucgguucacauc

SEQ ID NO: 6380 - RNA, 20 nt, Artificial Sequence
  Synthetic
agugcggacgugacgucccu

SEQ ID NO: 6381 - RNA, 20 nt, Artificial Sequence
  Synthetic
aucacgagagcgcgcaggac

SEQ ID NO: 6382 - RNA, 20 nt, Artificial Sequence
  Synthetic
cagggacgucacguccgcac

SEQ ID NO: 6383 - RNA, 17 nt, Artificial Sequence
  Synthetic
caucgggagagccgggu

SEQ ID NO: 6384 - RNA, 20 nt, Artificial Sequence
  Synthetic
cccggcucucccgaugugaa

SEQ ID NO: 6385 - RNA, 17 nt, Artificial Sequence
  Synthetic
ccugcgaacuugaacgu

SEQ ID NO: 6386 - RNA, 17 nt, Artificial Sequence
  Synthetic
cgacggcucgguucaca

SEQ ID NO: 6387 - RNA, 20 nt, Artificial Sequence
  Synthetic
cucgguucacaucgggagag

SEQ ID NO: 6388 - RNA, 17 nt, Artificial Sequence
  Synthetic
cugcgaacuugaacguc

SEQ ID NO: 6389 - RNA, 20 nt, Artificial Sequence
  Synthetic
ucacaucgggagagccgggu

SEQ ID NO: 6390 - RNA, 20 nt, Artificial Sequence
  Synthetic
ucccugcgaacuugaacguc

SEQ ID NO: 6391 - RNA, 20 nt, Artificial Sequence
  Synthetic
gaaaaaacccucaucccauc

SEQ ID NO: 6392 - RNA, 17 nt, Artificial Sequence
  Synthetic
gaaagaaggagacucca

SEQ ID NO: 6393 - RNA, 17 nt, Artificial Sequence
  Synthetic
gaaagggguggcagggg

SEQ ID NO: 6394 - RNA, 20 nt, Artificial Sequence
  Synthetic
gaaagggguggcaggggugg

SEQ ID NO: 6395 - RNA, 20 nt, Artificial Sequence
  Synthetic
gaaauaauacaaagauggcg

SEQ ID NO: 6396 - RNA, 17 nt, Artificial Sequence
  Synthetic
gaacgucaggagucugg

SEQ ID NO: 6397 - RNA, 20 nt, Artificial Sequence
  Synthetic
gaagaaagggguggcagggg

SEQ ID NO: 6398 - RNA, 17 nt, Artificial Sequence
  Synthetic
gaagagagauagaggga

SEQ ID NO: 6399 - RNA, 17 nt, Artificial Sequence
  Synthetic
gaagcaaaagcgagggg

SEQ ID NO: 6400 - RNA, 17 nt, Artificial Sequence
  Synthetic
gaaggggaggagggaag

SEQ ID NO: 6401 - RNA, 20 nt, Artificial Sequence
  Synthetic
gacaagccaauggccagugc

SEQ ID NO: 6402 - RNA, 17 nt, Artificial Sequence
  Synthetic
gacacacaaaacauggg

SEQ ID NO: 6403 - RNA, 17 nt, Artificial Sequence
  Synthetic
gacgccagacgcggccc

SEQ ID NO: 6404 - RNA, 20 nt, Artificial Sequence
  Synthetic
gacgccagacgcggcccccg

SEQ ID NO: 6405 - RNA, 17 nt, Artificial Sequence
  Synthetic
gacgcggcccccggggg

SEQ ID NO: 6406 - RNA, 17 nt, Artificial Sequence
  Synthetic
gacuagaagcaaaagcg

SEQ ID NO: 6407 - RNA, 20 nt, Artificial Sequence
  Synthetic
gacuagaagcaaaagcgagg

SEQ ID NO: 6408 - RNA, 20 nt, Artificial Sequence
  Synthetic
gacucucggagguuuuucuc

SEQ ID NO: 6409 - RNA, 17 nt, Artificial Sequence
  Synthetic
gagaagaaagggguggc

SEQ ID NO: 6410 - RNA, 17 nt, Artificial Sequence
  Synthetic
gagaagagagauagagg

SEQ ID NO: 6411 - RNA, 17 nt, Artificial Sequence
  Synthetic
gagaaggggaggaggga

SEQ ID NO: 6412 - RNA, 20 nt, Artificial Sequence
  Synthetic
gagacauggugggcugcggg

SEQ ID NO: 6413 - RNA, 17 nt, Artificial Sequence
  Synthetic
gagagaagagagauaga

SEQ ID NO: 6414 - RNA, 20 nt, Artificial Sequence
  Synthetic
gagagaaggggaggagggaa

SEQ ID NO: 6415 - RNA, 17 nt, Artificial Sequence
  Synthetic
gagagagaagagagaua

SEQ ID NO: 6416 - RNA, 17 nt, Artificial Sequence
  Synthetic
gagagagagaagagaga

SEQ ID NO: 6417 - RNA, 20 nt, Artificial Sequence
  Synthetic
gagagagagaagagagauag

SEQ ID NO: 6418 - RNA, 17 nt, Artificial Sequence
  Synthetic
gagagagagagagagag

SEQ ID NO: 6419 - RNA, 20 nt, Artificial Sequence
  Synthetic
gagagauagagggagagaga

SEQ ID NO: 6420 - RNA, 20 nt, Artificial Sequence
  Synthetic
gagauagagggagagagaga

SEQ ID NO: 6421 - RNA, 17 nt, Artificial Sequence
  Synthetic
gagcaggagagaagggg

SEQ ID NO: 6422 - RNA, 20 nt, Artificial Sequence
  Synthetic
gagcaggagagaaggggagg

SEQ ID NO: 6423 - RNA, 17 nt, Artificial Sequence
  Synthetic
gagccggguuagaaaga

SEQ ID NO: 6424 - RNA, 17 nt, Artificial Sequence
  Synthetic
gagcugcaaguucaagu

SEQ ID NO: 6425 - RNA, 17 nt, Artificial Sequence
  Synthetic
gagggagagagagagaa

SEQ ID NO: 6426 - RNA, 17 nt, Artificial Sequence
  Synthetic
gaggggcgggccgaggg

SEQ ID NO: 6427 - RNA, 17 nt, Artificial Sequence
  Synthetic
gagggggaggugcgggg

SEQ ID NO: 6428 - RNA, 17 nt, Artificial Sequence
  Synthetic
gagggggcgcuggggcc

SEQ ID NO: 6429 - RNA, 17 nt, Artificial Sequence
  Synthetic
gagguaaaagagauaaa

SEQ ID NO: 6430 - RNA, 17 nt, Artificial Sequence
  Synthetic
gaguccgcguguguggg

SEQ ID NO: 6431 - RNA, 20 nt, Artificial Sequence
  Synthetic
gagucgagguaaaagagaua

SEQ ID NO: 6432 - RNA, 20 nt, Artificial Sequence
  Synthetic
gauagagggagagagagaga

SEQ ID NO: 6433 - RNA, 17 nt, Artificial Sequence
  Synthetic
gaugaagauauuuucuc

SEQ ID NO: 6434 - RNA, 17 nt, Artificial Sequence
  Synthetic
gaugucaaaaggcacug

SEQ ID NO: 6435 - RNA, 17 nt, Artificial Sequence
  Synthetic
gauguguguccauuggu

SEQ ID NO: 6436 - RNA, 20 nt, Artificial Sequence
  Synthetic
gcaaugguuccagaugggau

SEQ ID NO: 6437 - RNA, 20 nt, Artificial Sequence
  Synthetic
gcacuugaacuugcagcuca

SEQ ID NO: 6438 - RNA, 20 nt, Artificial Sequence
  Synthetic
gcaggacuagaagcaaaagc

SEQ ID NO: 6439 - RNA, 17 nt, Artificial Sequence
  Synthetic
gcaggagagaaggggag

SEQ ID NO: 6440 - RNA, 17 nt, Artificial Sequence
  Synthetic
gcagggaagaugaauug

SEQ ID NO: 6441 - RNA, 20 nt, Artificial Sequence
  Synthetic
gcagggaagaugaauugugg

SEQ ID NO: 6442 - RNA, 20 nt, Artificial Sequence
  Synthetic
gcagggcgagcaggagagaa

SEQ ID NO: 6443 - RNA, 20 nt, Artificial Sequence
  Synthetic
gcaggggugggaggaaaggg

SEQ ID NO: 6444 - RNA, 17 nt, Artificial Sequence
  Synthetic
gcauuuuuaaauuuuuc

SEQ ID NO: 6445 - RNA, 20 nt, Artificial Sequence
  Synthetic
gccaauggccagugcgggga

SEQ ID NO: 6446 - RNA, 17 nt, Artificial Sequence
  Synthetic
gccagacgcggcccccg

SEQ ID NO: 6447 - RNA, 20 nt, Artificial Sequence
  Synthetic
gccagacgcggcccccgggg

SEQ ID NO: 6448 - RNA, 20 nt, Artificial Sequence
  Synthetic
gcccccgggggaggggcggg

SEQ ID NO: 6449 - RNA, 17 nt, Artificial Sequence
  Synthetic
gccgaggggagggggcg

SEQ ID NO: 6450 - RNA, 20 nt, Artificial Sequence
  Synthetic
gccgcggcgguggcguggcc

SEQ ID NO: 6451 - RNA, 17 nt, Artificial Sequence
  Synthetic
gccgcgucuggcguccg

SEQ ID NO: 6452 - RNA, 17 nt, Artificial Sequence
  Synthetic
gcgagacauggugggcu

SEQ ID NO: 6453 - RNA, 20 nt, Artificial Sequence
  Synthetic
gcgcaggacuagaagcaaaa

SEQ ID NO: 6454 - RNA, 20 nt, Artificial Sequence
  Synthetic
gcgcagggaagaugaauugu

SEQ ID NO: 6455 - RNA, 20 nt, Artificial Sequence
  Synthetic
gcgccgcggcgguggcgugg

SEQ ID NO: 6456 - RNA, 20 nt, Artificial Sequence
  Synthetic
gcggacgccagacgcggccc

SEQ ID NO: 6457 - RNA, 20 nt, Artificial Sequence
  Synthetic
gcggcgagacauggugggcu

SEQ ID NO: 6458 - RNA, 17 nt, Artificial Sequence
  Synthetic
gcggcgguggcguggcc

SEQ ID NO: 6459 - RNA, 17 nt, Artificial Sequence
  Synthetic
gcggggagggggaggug

SEQ ID NO: 6460 - RNA, 17 nt, Artificial Sequence
  Synthetic
gcggggcggggggcucc

SEQ ID NO: 6461 - RNA, 20 nt, Artificial Sequence
  Synthetic
gcguggccgggagagaagaa

SEQ ID NO: 6462 - RNA, 17 nt, Artificial Sequence
  Synthetic
gcgugugugggggggag

SEQ ID NO: 6463 - RNA, 17 nt, Artificial Sequence
  Synthetic
gcucaccaguggccgca

SEQ ID NO: 6464 - RNA, 17 nt, Artificial Sequence
  Synthetic
gcucgcugcggccacug

SEQ ID NO: 6465 - RNA, 20 nt, Artificial Sequence
  Synthetic
gcuggacaugaaaaagagac

SEQ ID NO: 6466 - RNA, 17 nt, Artificial Sequence
  Synthetic
gcuugcggcgagacaug

SEQ ID NO: 6467 - RNA, 20 nt, Artificial Sequence
  Synthetic
ggaaaaaacccucaucccau

SEQ ID NO: 6468 - RNA, 20 nt, Artificial Sequence
  Synthetic
ggaaggggaagcucacacca

SEQ ID NO: 6469 - RNA, 20 nt, Artificial Sequence
  Synthetic
ggacaagccaauggccagug

SEQ ID NO: 6470 - RNA, 17 nt, Artificial Sequence
  Synthetic
ggacaugaaaaagagac

SEQ ID NO: 6471 - RNA, 20 nt, Artificial Sequence
  Synthetic
ggacgccagacgcggccccc

SEQ ID NO: 6472 - RNA, 17 nt, Artificial Sequence
  Synthetic
ggacuagaagcaaaagc

SEQ ID NO: 6473 - RNA, 20 nt, Artificial Sequence
  Synthetic
ggacuagaagcaaaagcgag

SEQ ID NO: 6474 - RNA, 20 nt, Artificial Sequence
  Synthetic
ggagagaagaaagggguggc

SEQ ID NO: 6475 - RNA, 20 nt, Artificial Sequence
  Synthetic
ggagagaaggggaggaggga

SEQ ID NO: 6476 - RNA, 20 nt, Artificial Sequence
  Synthetic
ggagagagagagaagagaga

SEQ ID NO: 6477 - RNA, 20 nt, Artificial Sequence
  Synthetic
ggagagccggguuagaaaga

SEQ ID NO: 6478 - RNA, 20 nt, Artificial Sequence
  Synthetic
ggaggggcgggccgagggga

SEQ ID NO: 6479 - RNA, 17 nt, Artificial Sequence
  Synthetic
ggagggggaggugcggg

SEQ ID NO: 6480 - RNA, 20 nt, Artificial Sequence
  Synthetic
ggagggggaggugcggggcg

SEQ ID NO: 6481 - RNA, 20 nt, Artificial Sequence
  Synthetic
ggcagggcgagcaggagaga

SEQ ID NO: 6482 - RNA, 20 nt, Artificial Sequence
  Synthetic
ggcaggggugggaggaaagg

SEQ ID NO: 6483 - RNA, 17 nt, Artificial Sequence
  Synthetic
ggccgcgucuggcgucc

SEQ ID NO: 6484 - RNA, 17 nt, Artificial Sequence
  Synthetic
ggcgagcaggagagaag

SEQ ID NO: 6485 - RNA, 20 nt, Artificial Sequence
  Synthetic
ggcgagcaggagagaagggg

SEQ ID NO: 6486 - RNA, 20 nt, Artificial Sequence
  Synthetic
ggcgcagggaagaugaauug

SEQ ID NO: 6487 - RNA, 20 nt, Artificial Sequence
  Synthetic
ggcgcucgcugcggccacug

SEQ ID NO: 6488 - RNA, 17 nt, Artificial Sequence
  Synthetic
ggcggcggcggcggcgg

SEQ ID NO: 6489 - RNA, 20 nt, Artificial Sequence
  Synthetic
ggcggcggcggcggcggcgg

SEQ ID NO: 6490 - RNA, 17 nt, Artificial Sequence
  Synthetic
ggcgguggcguggccgg

SEQ ID NO: 6491 - RNA, 20 nt, Artificial Sequence
  Synthetic
ggcguggccgggagagaaga

SEQ ID NO: 6492 - RNA, 17 nt, Artificial Sequence
  Synthetic
gggaagaugaauugugg

SEQ ID NO: 6493 - RNA, 20 nt, Artificial Sequence
  Synthetic
gggagagaagaaaggggugg

SEQ ID NO: 6494 - RNA, 17 nt, Artificial Sequence
  Synthetic
gggagagccggguuaga

SEQ ID NO: 6495 - RNA, 20 nt, Artificial Sequence
  Synthetic
gggagagccggguuagaaag

SEQ ID NO: 6496 - RNA, 17 nt, Artificial Sequence
  Synthetic
gggaggaaagggugggg

SEQ ID NO: 6497 - RNA, 17 nt, Artificial Sequence
  Synthetic
gggaggggcgggccgag

SEQ ID NO: 6498 - RNA, 20 nt, Artificial Sequence
  Synthetic
gggaggggcgggccgagggg

SEQ ID NO: 6499 - RNA, 20 nt, Artificial Sequence
  Synthetic
gggagggggaggugcggggc

SEQ ID NO: 6500 - RNA, 17 nt, Artificial Sequence
  Synthetic
gggcagggcgagcagga

SEQ ID NO: 6501 - RNA, 20 nt, Artificial Sequence
  Synthetic
gggcagggcgagcaggagag

SEQ ID NO: 6502 - RNA, 20 nt, Artificial Sequence
  Synthetic
gggccgaggggagggggcgc

SEQ ID NO: 6503 - RNA, 17 nt, Artificial Sequence
  Synthetic
gggcgagcaggagagaa

SEQ ID NO: 6504 - RNA, 20 nt, Artificial Sequence
  Synthetic
gggcgagcaggagagaaggg

SEQ ID NO: 6505 - RNA, 17 nt, Artificial Sequence
  Synthetic
ggggaggggcgggccga

SEQ ID NO: 6506 - RNA, 20 nt, Artificial Sequence
  Synthetic
ggggaggggcgggccgaggg

SEQ ID NO: 6507 - RNA, 20 nt, Artificial Sequence
  Synthetic
ggggagggggaggugcgggg

SEQ ID NO: 6508 - RNA, 20 nt, Artificial Sequence
  Synthetic
ggggagggggcgcuggggcc

SEQ ID NO: 6509 - RNA, 20 nt, Artificial Sequence
  Synthetic
ggggccgcgucuggcguccg

SEQ ID NO: 6510 - RNA, 17 nt, Artificial Sequence
  Synthetic
ggggcgggccgagggga

SEQ ID NO: 6511 - RNA, 17 nt, Artificial Sequence
  Synthetic
gggggaggggcgggccg

SEQ ID NO: 6512 - RNA, 17 nt, Artificial Sequence
  Synthetic
gggggaggugcggggcg

SEQ ID NO: 6513 - RNA, 20 nt, Artificial Sequence
  Synthetic
gggggccgcgucuggcgucc

SEQ ID NO: 6514 - RNA, 17 nt, Artificial Sequence
  Synthetic
gggguggcagggguggg

SEQ ID NO: 6515 - RNA, 17 nt, Artificial Sequence
  Synthetic
ggggugggaggaaaggg

SEQ ID NO: 6516 - RNA, 20 nt, Artificial Sequence
  Synthetic
ggggugggaggaaagggugg

SEQ ID NO: 6517 - RNA, 20 nt, Artificial Sequence
  Synthetic
ggguggcaggggugggagga

SEQ ID NO: 6518 - RNA, 17 nt, Artificial Sequence
  Synthetic
gggugggaggaaagggu

SEQ ID NO: 6519 - RNA, 20 nt, Artificial Sequence
  Synthetic
gggugggaggaaaggguggg

SEQ ID NO: 6520 - RNA, 17 nt, Artificial Sequence
  Synthetic
gguaaaagagauaaagg

SEQ ID NO: 6521 - RNA, 20 nt, Artificial Sequence
  Synthetic
ggugcggggcggggggcucc

SEQ ID NO: 6522 - RNA, 17 nt, Artificial Sequence
  Synthetic
ggugggaggaaagggug

SEQ ID NO: 6523 - RNA, 20 nt, Artificial Sequence
  Synthetic
ggugggaggaaagggugggg

SEQ ID NO: 6524 - RNA, 20 nt, Artificial Sequence
  Synthetic
gguuagaaagaaggagacuc

SEQ ID NO: 6525 - RNA, 17 nt, Artificial Sequence
  Synthetic
gguuugccuugcuugcg

SEQ ID NO: 6526 - RNA, 20 nt, Artificial Sequence
  Synthetic
gucgagguaaaagagauaaa

SEQ ID NO: 6527 - RNA, 17 nt, Artificial Sequence
  Synthetic
guggccgggagagaaga

SEQ ID NO: 6528 - RNA, 17 nt, Artificial Sequence
  Synthetic
gugggaggaaagggugg

SEQ ID NO: 6529 - RNA, 17 nt, Artificial Sequence
  Synthetic
aaaaaaaaaaaaaaaaa

SEQ ID NO: 6530 - RNA, 20 nt, Artificial Sequence
  Synthetic
aaaaaaaaaaaaaaaaaaaa

SEQ ID NO: 6531 - RNA, 20 nt, Artificial Sequence
  Synthetic
aaaaaaaaaaaaaaaaaaag

SEQ ID NO: 6532 - RNA, 20 nt, Artificial Sequence
  Synthetic
aaaaaaaaaaaaaaaaaaga

SEQ ID NO: 6533 - RNA, 17 nt, Artificial Sequence
  Synthetic
aaaaaaaaaaaaaaaag

SEQ ID NO: 6534 - RNA, 20 nt, Artificial Sequence
  Synthetic
aaaaaaaaaaaaaaaagagg

SEQ ID NO: 6535 - RNA, 17 nt, Artificial Sequence
  Synthetic
aaaaaaaaaaaaaaaga

SEQ ID NO: 6536 - RNA, 20 nt, Artificial Sequence
  Synthetic
aaaaaaaaaaaaaagaggga

SEQ ID NO: 6537 - RNA, 17 nt, Artificial Sequence
  Synthetic
aaaaaaaaaaaaagagg

SEQ ID NO: 6538 - RNA, 20 nt, Artificial Sequence
  Synthetic
aaaaaaaaaaaagagggaga

SEQ ID NO: 6539 - RNA, 17 nt, Artificial Sequence
  Synthetic
aaaaaaaaaaagaggga

SEQ ID NO: 6540 - RNA, 20 nt, Artificial Sequence
  Synthetic
aaaaaaaaaagagggagaga

SEQ ID NO: 6541 - RNA, 17 nt, Artificial Sequence
  Synthetic
aaaaaaaaagagggaga

SEQ ID NO: 6542 - RNA, 20 nt, Artificial Sequence
  Synthetic
aaaaaaaagagggagagaga

SEQ ID NO: 6543 - RNA, 17 nt, Artificial Sequence
  Synthetic
aaaaaaagagggagaga

SEQ ID NO: 6544 - RNA, 20 nt, Artificial Sequence
  Synthetic
aaaaaauggcaaaagccccc

SEQ ID NO: 6545 - RNA, 17 nt, Artificial Sequence
  Synthetic
aaaaacccucaucccau

SEQ ID NO: 6546 - RNA, 17 nt, Artificial Sequence
  Synthetic
aaaaagagggagagaga

SEQ ID NO: 6547 - RNA, 20 nt, Artificial Sequence
  Synthetic
aaaaagagggagagagagag

SEQ ID NO: 6548 - RNA, 20 nt, Artificial Sequence
  Synthetic
aaaacaugggcagggcgagc

SEQ ID NO: 6549 - RNA, 17 nt, Artificial Sequence
  Synthetic
aaaacccucaucccauc

SEQ ID NO: 6550 - RNA, 17 nt, Artificial Sequence
  Synthetic
aaaagcgagggggagag

SEQ ID NO: 6551 - RNA, 20 nt, Artificial Sequence
  Synthetic
aaaccccagcacuuaagcaa

SEQ ID NO: 6552 - RNA, 20 nt, Artificial Sequence
  Synthetic
aaagagggagagagagagaa

SEQ ID NO: 6553 - RNA, 17 nt, Artificial Sequence
  Synthetic
aaagggguggcaggggu

SEQ ID NO: 6554 - RNA, 20 nt, Artificial Sequence
  Synthetic
aaagggguggcagggguggg

SEQ ID NO: 6555 - RNA, 20 nt, Artificial Sequence
  Synthetic
aaauaauacaaagauggcgc

SEQ ID NO: 6556 - RNA, 17 nt, Artificial Sequence
  Synthetic
aaauggcaaaagccccc

SEQ ID NO: 6557 - RNA, 17 nt, Artificial Sequence
  Synthetic
aacaugggcagggcgag

SEQ ID NO: 6558 - RNA, 20 nt, Artificial Sequence
  Synthetic
aacaugggcagggcgagcag

SEQ ID NO: 6559 - RNA, 20 nt, Artificial Sequence
  Synthetic
aaccccagcacuuaagcaaa

SEQ ID NO: 6560 - RNA, 17 nt, Artificial Sequence
  Synthetic
aacccggcucucccgau

SEQ ID NO: 6561 - RNA, 20 nt, Artificial Sequence
  Synthetic
aagaaagggguggcaggggu

SEQ ID NO: 6562 - RNA, 20 nt, Artificial Sequence
  Synthetic
aagagagauagagggagaga

SEQ ID NO: 6563 - RNA, 17 nt, Artificial Sequence
  Synthetic
aagagggagagagagag

SEQ ID NO: 6564 - RNA, 17 nt, Artificial Sequence
  Synthetic
aagauggcgcagggaag

SEQ ID NO: 6565 - RNA, 20 nt, Artificial Sequence
  Synthetic
aagcaaaagcgagggggaga

SEQ ID NO: 6566 - RNA, 17 nt, Artificial Sequence
  Synthetic
aagccaauggccagugc

SEQ ID NO: 6567 - RNA, 20 nt, Artificial Sequence
  Synthetic
aagccaauggccagugcggg

SEQ ID NO: 6568 - RNA, 20 nt, Artificial Sequence
  Synthetic
aauaauaauuauuaauaauc

SEQ ID NO: 6569 - RNA, 20 nt, Artificial Sequence
  Synthetic
aauaauacaaagauggcgca

SEQ ID NO: 6570 - RNA, 17 nt, Artificial Sequence
  Synthetic
aauaauuauuaauaauc

SEQ ID NO: 6571 - RNA, 20 nt, Artificial Sequence
  Synthetic
aauaauuauuauuacuauua

SEQ ID NO: 6572 - RNA, 17 nt, Artificial Sequence
  Synthetic
aauacaaagauggcgca

SEQ ID NO: 6573 - RNA, 17 nt, Artificial Sequence
  Synthetic
aauggccagugcgggga

SEQ ID NO: 6574 - RNA, 17 nt, Artificial Sequence
  Synthetic
aauuauuauuacuauua

SEQ ID NO: 6575 - RNA, 20 nt, Artificial Sequence
  Synthetic
aauucccguuugcuuaagug

SEQ ID NO: 6576 - RNA, 20 nt, Artificial Sequence
  Synthetic
acaaagauggcgcagggaag

SEQ ID NO: 6577 - RNA, 17 nt, Artificial Sequence
  Synthetic
acaagccaauggccagu

SEQ ID NO: 6578 - RNA, 20 nt, Artificial Sequence
  Synthetic
acaagccaauggccagugcg

SEQ ID NO: 6579 - RNA, 20 nt, Artificial Sequence
  Synthetic
acacacaaaacaugggcagg

SEQ ID NO: 6580 - RNA, 20 nt, Artificial Sequence
  Synthetic
acacacaucaggggcuggac

SEQ ID NO: 6581 - RNA, 17 nt, Artificial Sequence
  Synthetic
acagagacacacaaaac

SEQ ID NO: 6582 - RNA, 17 nt, Artificial Sequence
  Synthetic
acaugggcagggcgagc

SEQ ID NO: 6583 - RNA, 17 nt, Artificial Sequence
  Synthetic
acauggugggcugcggg

SEQ ID NO: 6584 - RNA, 17 nt, Artificial Sequence
  Synthetic
accaauggacacacauc

SEQ ID NO: 6585 - RNA, 20 nt, Artificial Sequence
  Synthetic
accccagcacuuaagcaaac

SEQ ID NO: 6586 - RNA, 20 nt, Artificial Sequence
  Synthetic
accuccgagagucgagguaa

SEQ ID NO: 6587 - RNA, 20 nt, Artificial Sequence
  Synthetic
acgagaaaaaccuccgagag

SEQ ID NO: 6588 - RNA, 17 nt, Artificial Sequence
  Synthetic
acgccagacgcggcccc

SEQ ID NO: 6589 - RNA, 20 nt, Artificial Sequence
  Synthetic
acgccagacgcggcccccgg

SEQ ID NO: 6590 - RNA, 20 nt, Artificial Sequence
  Synthetic
acgcggcccccgggggaggg

SEQ ID NO: 6591 - RNA, 17 nt, Artificial Sequence
  Synthetic
acggcaaugguuccaga

SEQ ID NO: 6592 - RNA, 20 nt, Artificial Sequence
  Synthetic
acgucaggagucuggaugga

SEQ ID NO: 6593 - RNA, 17 nt, Artificial Sequence
  Synthetic
acuagaagcaaaagcga

SEQ ID NO: 6594 - RNA, 20 nt, Artificial Sequence
  Synthetic
acuauuauuggguuacuuac

SEQ ID NO: 6595 - RNA, 20 nt, Artificial Sequence
  Synthetic
acuccugacguucaaguucg

SEQ ID NO: 6596 - RNA, 20 nt, Artificial Sequence
  Synthetic
acugaugaagauauuuucuc

SEQ ID NO: 6597 - RNA, 17 nt, Artificial Sequence
  Synthetic
acuugaacgucaggagu

SEQ ID NO: 6598 - RNA, 17 nt, Artificial Sequence
  Synthetic
acuugaacuugcagcuc

SEQ ID NO: 6599 - RNA, 17 nt, Artificial Sequence
  Synthetic
agaaaaaccuccgagag

SEQ ID NO: 6600 - RNA, 17 nt, Artificial Sequence
  Synthetic
agaaagggguggcaggg

SEQ ID NO: 6601 - RNA, 20 nt, Artificial Sequence
  Synthetic
agaagaaagggguggcaggg

SEQ ID NO: 6602 - RNA, 20 nt, Artificial Sequence
  Synthetic
agaagagagauagagggaga

SEQ ID NO: 6603 - RNA, 20 nt, Artificial Sequence
  Synthetic
agaagcaaaagcgaggggga

SEQ ID NO: 6604 - RNA, 17 nt, Artificial Sequence
  Synthetic
agaaggggaggagggaa

SEQ ID NO: 6605 - RNA, 17 nt, Artificial Sequence
  Synthetic
agacgcggcccccgggg

SEQ ID NO: 6606 - RNA, 17 nt, Artificial Sequence
  Synthetic
agagaagaaaggggugg

SEQ ID NO: 6607 - RNA, 20 nt, Artificial Sequence
  Synthetic
agagaagagagauagaggga

SEQ ID NO: 6608 - RNA, 17 nt, Artificial Sequence
  Synthetic
agagaaggggaggaggg

SEQ ID NO: 6609 - RNA, 20 nt, Artificial Sequence
  Synthetic
agagaaggggaggagggaag

SEQ ID NO: 6610 - RNA, 20 nt, Artificial Sequence
  Synthetic
agagacacacaaaacauggg

SEQ ID NO: 6611 - RNA, 17 nt, Artificial Sequence
  Synthetic
agagagaagagagauag

SEQ ID NO: 6612 - RNA, 20 nt, Artificial Sequence
  Synthetic
agagagaagagagauagagg

SEQ ID NO: 6613 - RNA, 20 nt, Artificial Sequence
  Synthetic
agagagagaagagagauaga

SEQ ID NO: 6614 - RNA, 20 nt, Artificial Sequence
  Synthetic
agagagagagaagagagaua

SEQ ID NO: 6615 - RNA, 17 nt, Artificial Sequence
  Synthetic
agagagauagagggaga

SEQ ID NO: 6616 - RNA, 17 nt, Artificial Sequence
  Synthetic
agagauagagggagaga

SEQ ID NO: 6617 - RNA, 17 nt, Artificial Sequence
  Synthetic
agagccggguuagaaag

SEQ ID NO: 6618 - RNA, 17 nt, Artificial Sequence
  Synthetic
agagggagagagagaga

SEQ ID NO: 6619 - RNA, 17 nt, Artificial Sequence
  Synthetic
agaguccgcgugugugg

SEQ ID NO: 6620 - RNA, 17 nt, Artificial Sequence
  Synthetic
agauagagggagagaga

SEQ ID NO: 6621 - RNA, 17 nt, Artificial Sequence
  Synthetic
agcaaaagcgaggggga

SEQ ID NO: 6622 - RNA, 20 nt, Artificial Sequence
  Synthetic
agcaaaagcgagggggagag

SEQ ID NO: 6623 - RNA, 20 nt, Artificial Sequence
  Synthetic
agcaggagagaaggggagga

SEQ ID NO: 6624 - RNA, 17 nt, Artificial Sequence
  Synthetic
agccaauggccagugcg

SEQ ID NO: 6625 - RNA, 20 nt, Artificial Sequence
  Synthetic
agccaauggccagugcgggg

SEQ ID NO: 6626 - RNA, 20 nt, Artificial Sequence
  Synthetic
aggacaagccaauggccagu

SEQ ID NO: 6627 - RNA, 20 nt, Artificial Sequence
  Synthetic
aggacuagaagcaaaagcga

SEQ ID NO: 6628 - RNA, 17 nt, Artificial Sequence
  Synthetic
aggagagaaggggagga

SEQ ID NO: 6629 - RNA, 20 nt, Artificial Sequence
  Synthetic
aggagagaaggggaggaggg

SEQ ID NO: 6630 - RNA, 20 nt, Artificial Sequence
  Synthetic
agggagagagagagagagag

SEQ ID NO: 6631 - RNA, 17 nt, Artificial Sequence
  Synthetic
agggcgagcaggagaga

SEQ ID NO: 6632 - RNA, 17 nt, Artificial Sequence
  Synthetic
aggggaagcucacacca

SEQ ID NO: 6633 - RNA, 17 nt, Artificial Sequence
  Synthetic
aggggcgggccgagggg

SEQ ID NO: 6634 - RNA, 17 nt, Artificial Sequence
  Synthetic
aggggcuggacaugaaa

SEQ ID NO: 6635 - RNA, 17 nt, Artificial Sequence
  Synthetic
agggggaggugcggggc

SEQ ID NO: 6636 - RNA, 17 nt, Artificial Sequence
  Synthetic
agggguggcaggggugg

SEQ ID NO: 6637 - RNA, 17 nt, Artificial Sequence
  Synthetic
aggggugggaggaaagg

SEQ ID NO: 6638 - RNA, 20 nt, Artificial Sequence
  Synthetic
aggggugggaggaaagggug

SEQ ID NO: 6639 - RNA, 17 nt, Artificial Sequence
  Synthetic
agguaaaagagauaaag

SEQ ID NO: 6640 - RNA, 17 nt, Artificial Sequence
  Synthetic
aguccgcgugugugggg

SEQ ID NO: 6641 - RNA, 20 nt, Artificial Sequence
  Synthetic
agucgagguaaaagagauaa

SEQ ID NO: 6642 - RNA, 20 nt, Artificial Sequence
  Synthetic
agugcggggagggggaggug

SEQ ID NO: 6643 - RNA, 17 nt, Artificial Sequence
  Synthetic
auaauacaaagauggcg

SEQ ID NO: 6644 - RNA, 17 nt, Artificial Sequence
  Synthetic
auaaucacgagagcgcg

SEQ ID NO: 6645 - RNA, 20 nt, Artificial Sequence
  Synthetic
auacacggcaaugguuccag

SEQ ID NO: 6646 - RNA, 17 nt, Artificial Sequence
  Synthetic
auagagggagagagaga

SEQ ID NO: 6647 - RNA, 20 nt, Artificial Sequence
  Synthetic
aucaggggcuggacaugaaa

SEQ ID NO: 6648 - RNA, 20 nt, Artificial Sequence
  Synthetic
aucgggagagccggguuaga

SEQ ID NO: 6649 - RNA, 20 nt, Artificial Sequence
  Synthetic
aucucuuuuaccucgacucu

SEQ ID NO: 6650 - RNA, 17 nt, Artificial Sequence
  Synthetic
auggccagugcggggag

SEQ ID NO: 6651 - RNA, 17 nt, Artificial Sequence
  Synthetic
augggcagggcgagcag

SEQ ID NO: 6652 - RNA, 17 nt, Artificial Sequence
  Synthetic
augguuccagaugggau

SEQ ID NO: 6653 - RNA, 17 nt, Artificial Sequence
  Synthetic
auuauuggguuacuuac

SEQ ID NO: 6654 - RNA, 17 nt, Artificial Sequence
  Synthetic
auuauuucuaauuuauu

SEQ ID NO: 6655 - RNA, 20 nt, Artificial Sequence
  Synthetic
auucccguuugcuuaagugc

SEQ ID NO: 6656 - RNA, 20 nt, Artificial Sequence
  Synthetic
auuuuagaguccgcgugugu

SEQ ID NO: 6657 - RNA, 17 nt, Artificial Sequence
  Synthetic
auuuuuaaauuuuucac

SEQ ID NO: 6658 - RNA, 20 nt, Artificial Sequence
  Synthetic
auuuuucacgagaaaaaccu

SEQ ID NO: 6659 - RNA, 20 nt, Artificial Sequence
  Synthetic
caaaacaugggcagggcgag

SEQ ID NO: 6660 - RNA, 17 nt, Artificial Sequence
  Synthetic
caaaagcgagggggaga

SEQ ID NO: 6661 - RNA, 17 nt, Artificial Sequence
  Synthetic
caagccaauggccagug

SEQ ID NO: 6662 - RNA, 20 nt, Artificial Sequence
  Synthetic
caauggacacacaucagggg

SEQ ID NO: 6663 - RNA, 17 nt, Artificial Sequence
  Synthetic
caauggccagugcgggg

SEQ ID NO: 6664 - RNA, 20 nt, Artificial Sequence
  Synthetic
caauggccagugcggggagg

SEQ ID NO: 6665 - RNA, 17 nt, Artificial Sequence
  Synthetic
caaugguuccagauggg

SEQ ID NO: 6666 - RNA, 17 nt, Artificial Sequence
  Synthetic
cacaaaacaugggcagg

SEQ ID NO: 6667 - RNA, 20 nt, Artificial Sequence
  Synthetic
cacaccaauggacacacauc

SEQ ID NO: 6668 - RNA, 17 nt, Artificial Sequence
  Synthetic
cacacgcggacucuaaa

SEQ ID NO: 6669 - RNA, 17 nt, Artificial Sequence
  Synthetic
cacaucaggggcuggac

SEQ ID NO: 6670 - RNA, 17 nt, Artificial Sequence
  Synthetic
caccaauggacacacau

SEQ ID NO: 6671 - RNA, 17 nt, Artificial Sequence
  Synthetic
cacggcaaugguuccag

SEQ ID NO: 6672 - RNA, 20 nt, Artificial Sequence
  Synthetic
cacugaugaagauauuuucu

SEQ ID NO: 6673 - RNA, 17 nt, Artificial Sequence
  Synthetic
cacuugaacuugcagcu

SEQ ID NO: 6674 - RNA, 20 nt, Artificial Sequence
  Synthetic
cacuugaacuugcagcucag

SEQ ID NO: 6675 - RNA, 17 nt, Artificial Sequence
  Synthetic
caggacuagaagcaaaa

SEQ ID NO: 6676 - RNA, 20 nt, Artificial Sequence
  Synthetic
caggacuagaagcaaaagcg

SEQ ID NO: 6677 - RNA, 17 nt, Artificial Sequence
  Synthetic
caggagagaaggggagg

SEQ ID NO: 6678 - RNA, 17 nt, Artificial Sequence
  Synthetic
cagggaagaugaauugu

SEQ ID NO: 6679 - RNA, 17 nt, Artificial Sequence
  Synthetic
cagggcgagcaggagag

SEQ ID NO: 6680 - RNA, 20 nt, Artificial Sequence
  Synthetic
cagggcgagcaggagagaag

SEQ ID NO: 6681 - RNA, 20 nt, Artificial Sequence
  Synthetic
caggggugggaggaaagggu

SEQ ID NO: 6682 - RNA, 20 nt, Artificial Sequence
  Synthetic
cagugcggggagggggaggu

SEQ ID NO: 6683 - RNA, 20 nt, Artificial Sequence
  Synthetic
caugcauuuuuaaauuuuuc

SEQ ID NO: 6684 - RNA, 20 nt, Artificial Sequence
  Synthetic
caugggcagggcgagcagga

SEQ ID NO: 6685 - RNA, 20 nt, Artificial Sequence
  Synthetic
cauuuuagaguccgcgugug

SEQ ID NO: 6686 - RNA, 17 nt, Artificial Sequence
  Synthetic
ccaauggccagugcggg

SEQ ID NO: 6687 - RNA, 20 nt, Artificial Sequence
  Synthetic
ccaauggccagugcggggag

SEQ ID NO: 6688 - RNA, 20 nt, Artificial Sequence
  Synthetic
ccacacacgcggacucuaaa

SEQ ID NO: 6689 - RNA, 17 nt, Artificial Sequence
  Synthetic
ccagacgcggcccccgg

SEQ ID NO: 6690 - RNA, 20 nt, Artificial Sequence
  Synthetic
ccagacgcggcccccggggg

SEQ ID NO: 6691 - RNA, 17 nt, Artificial Sequence
  Synthetic
ccagcacuuaagcaaac

SEQ ID NO: 6692 - RNA, 20 nt, Artificial Sequence
  Synthetic
ccauugccguguaugcacuu

SEQ ID NO: 6693 - RNA, 17 nt, Artificial Sequence
  Synthetic
cccagcacuuaagcaaa

SEQ ID NO: 6694 - RNA, 17 nt, Artificial Sequence
  Synthetic
ccccagcacuuaagcaa

SEQ ID NO: 6695 - RNA, 20 nt, Artificial Sequence
  Synthetic
ccccgggggaggggcgggcc

SEQ ID NO: 6696 - RNA, 20 nt, Artificial Sequence
  Synthetic
ccccucggcccgccccuccc

SEQ ID NO: 6697 - RNA, 17 nt, Artificial Sequence
  Synthetic
cccgggggaggggcggg

SEQ ID NO: 6698 - RNA, 20 nt, Artificial Sequence
  Synthetic
cccgggggaggggcgggccg

SEQ ID NO: 6699 - RNA, 17 nt, Artificial Sequence
  Synthetic
cccguuugcuuaagugc

SEQ ID NO: 6700 - RNA, 20 nt, Artificial Sequence
  Synthetic
cccucggcccgccccucccc

SEQ ID NO: 6701 - RNA, 20 nt, Artificial Sequence
  Synthetic
cccugcucccccccacacac

SEQ ID NO: 6702 - RNA, 17 nt, Artificial Sequence
  Synthetic
ccgaggggagggggcgc

SEQ ID NO: 6703 - RNA, 20 nt, Artificial Sequence
  Synthetic
ccgcacuugaacuugcagcu

SEQ ID NO: 6704 - RNA, 17 nt, Artificial Sequence
  Synthetic
ccgcggcgguggcgugg

SEQ ID NO: 6705 - RNA, 20 nt, Artificial Sequence
  Synthetic
ccgggggaggggcgggccga

SEQ ID NO: 6706 - RNA, 20 nt, Artificial Sequence
  Synthetic
ccucggcccgccccuccccc

SEQ ID NO: 6707 - RNA, 17 nt, Artificial Sequence
  Synthetic
ccugacguucaaguucg

SEQ ID NO: 6708 - RNA, 20 nt, Artificial Sequence
  Synthetic
ccugagcugcaaguucaagu

SEQ ID NO: 6709 - RNA, 20 nt, Artificial Sequence
  Synthetic
ccugauguguguccauuggu

SEQ ID NO: 6710 - RNA, 20 nt, Artificial Sequence
  Synthetic
cgaacuugaacgucaggagu

SEQ ID NO: 6711 - RNA, 17 nt, Artificial Sequence
  Synthetic
cgagacauggugggcug

SEQ ID NO: 6712 - RNA, 17 nt, Artificial Sequence
  Synthetic
cgagcaggagagaaggg

SEQ ID NO: 6713 - RNA, 20 nt, Artificial Sequence
  Synthetic
cgagcaggagagaaggggag

SEQ ID NO: 6714 - RNA, 17 nt, Artificial Sequence
  Synthetic
cgagguaaaagagauaa

SEQ ID NO: 6715 - RNA, 20 nt, Artificial Sequence
  Synthetic
cgagguaaaagagauaaagg

SEQ ID NO: 6716 - RNA, 20 nt, Artificial Sequence
  Synthetic
cgcacuugaacuugcagcuc

SEQ ID NO: 6717 - RNA, 17 nt, Artificial Sequence
  Synthetic
cgcagggaagaugaauu

SEQ ID NO: 6718 - RNA, 17 nt, Artificial Sequence
  Synthetic
cgccagacgcggccccc

SEQ ID NO: 6719 - RNA, 20 nt, Artificial Sequence
  Synthetic
cgccgcggcgguggcguggc

SEQ ID NO: 6720 - RNA, 17 nt, Artificial Sequence
  Synthetic
cgcggcgguggcguggc

SEQ ID NO: 6721 - RNA, 20 nt, Artificial Sequence
  Synthetic
cgcggcgguggcguggccgg

SEQ ID NO: 6722 - RNA, 20 nt, Artificial Sequence
  Synthetic
cggacgccagacgcggcccc

SEQ ID NO: 6723 - RNA, 20 nt, Artificial Sequence
  Synthetic
cggcaaugguuccagauggg

SEQ ID NO: 6724 - RNA, 17 nt, Artificial Sequence
  Synthetic
cggcccccgggggaggg

SEQ ID NO: 6725 - RNA, 17 nt, Artificial Sequence
  Synthetic
cggcccgccccuccccc

SEQ ID NO: 6726 - RNA, 20 nt, Artificial Sequence
  Synthetic
cggcgagacauggugggcug

SEQ ID NO: 6727 - RNA, 17 nt, Artificial Sequence
  Synthetic
cggcggcggcggcggcg

SEQ ID NO: 6728 - RNA, 20 nt, Artificial Sequence
  Synthetic
cggcggcggcggcggcggcg

SEQ ID NO: 6729 - RNA, 20 nt, Artificial Sequence
  Synthetic
cggcgguggcguggccggga

SEQ ID NO: 6730 - RNA, 20 nt, Artificial Sequence
  Synthetic
cgggccgaggggagggggcg

SEQ ID NO: 6731 - RNA, 20 nt, Artificial Sequence
  Synthetic
cgggcucaccaguggccgca

SEQ ID NO: 6732 - RNA, 20 nt, Artificial Sequence
  Synthetic
cggggagggggaggugcggg

SEQ ID NO: 6733 - RNA, 17 nt, Artificial Sequence
  Synthetic
cgggggaggggcgggcc

SEQ ID NO: 6734 - RNA, 20 nt, Artificial Sequence
  Synthetic
cgggggaggggcgggccgag

SEQ ID NO: 6735 - RNA, 17 nt, Artificial Sequence
  Synthetic
cgguggcguggccggga

SEQ ID NO: 6736 - RNA, 20 nt, Artificial Sequence
  Synthetic
cgguggcguggccgggagag

SEQ ID NO: 6737 - RNA, 17 nt, Artificial Sequence
  Synthetic
cuagaagcaaaagcgag

SEQ ID NO: 6738 - RNA, 20 nt, Artificial Sequence
  Synthetic
cuagaagcaaaagcgagggg

SEQ ID NO: 6739 - RNA, 20 nt, Artificial Sequence
  Synthetic
cuccugacguucaaguucgc

SEQ ID NO: 6740 - RNA, 17 nt, Artificial Sequence
  Synthetic
cucggcccgccccuccc

SEQ ID NO: 6741 - RNA, 17 nt, Artificial Sequence
  Synthetic
cucuuuuaccucgacuc

SEQ ID NO: 6742 - RNA, 17 nt, Artificial Sequence
  Synthetic
cugacguucaaguucgc

SEQ ID NO: 6743 - RNA, 20 nt, Artificial Sequence
  Synthetic
cuugaacgucaggagucugg

SEQ ID NO: 6744 - RNA, 17 nt, Artificial Sequence
  Synthetic
cuugaacuugcagcuca

SEQ ID NO: 6745 - RNA, 20 nt, Artificial Sequence
  Synthetic
cuugcuugcggcgagacaug

SEQ ID NO: 6746 - RNA, 20 nt, Artificial Sequence
  Synthetic
uaauaauuauuaauaaucac

SEQ ID NO: 6747 - RNA, 17 nt, Artificial Sequence
  Synthetic
uaauacaaagauggcgc

SEQ ID NO: 6748 - RNA, 17 nt, Artificial Sequence
  Synthetic
uaauuauuaauaaucac

SEQ ID NO: 6749 - RNA, 20 nt, Artificial Sequence
  Synthetic
uacacggcaaugguuccaga

SEQ ID NO: 6750 - RNA, 17 nt, Artificial Sequence
  Synthetic
uagaaagaaggagacuc

SEQ ID NO: 6751 - RNA, 17 nt, Artificial Sequence
  Synthetic
uagaagcaaaagcgagg

SEQ ID NO: 6752 - RNA, 17 nt, Artificial Sequence
  Synthetic
uagaguccgcgugugug

SEQ ID NO: 6753 - RNA, 20 nt, Artificial Sequence
  Synthetic
uagaguccgcgugugugggg

SEQ ID NO: 6754 - RNA, 20 nt, Artificial Sequence
  Synthetic
uaucucuuuuaccucgacuc

SEQ ID NO: 6755 - RNA, 20 nt, Artificial Sequence
  Synthetic
uauuauuggguuacuuacgc

SEQ ID NO: 6756 - RNA, 17 nt, Artificial Sequence
  Synthetic
uauuggguuacuuacgc

SEQ ID NO: 6757 - RNA, 20 nt, Artificial Sequence
  Synthetic
ucacaccaauggacacacau

SEQ ID NO: 6758 - RNA, 17 nt, Artificial Sequence
  Synthetic
ucacgagaaaaaccucc

SEQ ID NO: 6759 - RNA, 17 nt, Artificial Sequence
  Synthetic
ucaggagucuggaugga

SEQ ID NO: 6760 - RNA, 20 nt, Artificial Sequence
  Synthetic
ucauuuuagaguccgcgugu

SEQ ID NO: 6761 - RNA, 17 nt, Artificial Sequence
  Synthetic
ucccguuugcuuaagug

SEQ ID NO: 6762 - RNA, 17 nt, Artificial Sequence
  Synthetic
uccgagagucgagguaa

SEQ ID NO: 6763 - RNA, 20 nt, Artificial Sequence
  Synthetic
uccgcgugugugggggggag

SEQ ID NO: 6764 - RNA, 17 nt, Artificial Sequence
  Synthetic
ucgagguaaaagagaua

SEQ ID NO: 6765 - RNA, 20 nt, Artificial Sequence
  Synthetic
ucgagguaaaagagauaaag

SEQ ID NO: 6766 - RNA, 17 nt, Artificial Sequence
  Synthetic
ucggcccgccccucccc

SEQ ID NO: 6767 - RNA, 20 nt, Artificial Sequence
  Synthetic
ucuaacccggcucucccgau

SEQ ID NO: 6768 - RNA, 17 nt, Artificial Sequence
  Synthetic
ucucggagguuuuucuc

SEQ ID NO: 6769 - RNA, 17 nt, Artificial Sequence
  Synthetic
ucuuuuaccucgacucu

SEQ ID NO: 6770 - RNA, 17 nt, Artificial Sequence
  Synthetic
ugacauccaaaauaaau

SEQ ID NO: 6771 - RNA, 17 nt, Artificial Sequence
  Synthetic
ugaugaagauauuuucu

SEQ ID NO: 6772 - RNA, 20 nt, Artificial Sequence
  Synthetic
ugcauuuuuaaauuuuucac

SEQ ID NO: 6773 - RNA, 17 nt, Artificial Sequence
  Synthetic
ugcggggagggggaggu

SEQ ID NO: 6774 - RNA, 17 nt, Artificial Sequence
  Synthetic
ugcucccccccacacac

SEQ ID NO: 6775 - RNA, 17 nt, Artificial Sequence
  Synthetic
uggacacacaucagggg

SEQ ID NO: 6776 - RNA, 20 nt, Artificial Sequence
  Synthetic
uggacagagacacacaaaac

SEQ ID NO: 6777 - RNA, 17 nt, Artificial Sequence
  Synthetic
uggcaggggugggagga

SEQ ID NO: 6778 - RNA, 17 nt, Artificial Sequence
  Synthetic
uggccagugcggggagg

SEQ ID NO: 6779 - RNA, 17 nt, Artificial Sequence
  Synthetic
uggccgggagagaagaa

SEQ ID NO: 6780 - RNA, 20 nt, Artificial Sequence
  Synthetic
uggcgcagggaagaugaauu

SEQ ID NO: 6781 - RNA, 17 nt, Artificial Sequence
  Synthetic
uggcguggccgggagag

SEQ ID NO: 6782 - RNA, 17 nt, Artificial Sequence
  Synthetic
ugggaggaaaggguggg

SEQ ID NO: 6783 - RNA, 20 nt, Artificial Sequence
  Synthetic
ugggguuugccuugcuugcg

SEQ ID NO: 6784 - RNA, 20 nt, Artificial Sequence
  Synthetic
uguauuauuucuaauuuauu

SEQ ID NO: 6785 - RNA, 20 nt, Artificial Sequence
  Synthetic
uuaauaaucacgagagcgcg

SEQ ID NO: 6786 - RNA, 20 nt, Artificial Sequence
  Synthetic
uuagaaagaaggagacucca

SEQ ID NO: 6787 - RNA, 17 nt, Artificial Sequence
  Synthetic
uuagaguccgcgugugu

SEQ ID NO: 6788 - RNA, 20 nt, Artificial Sequence
  Synthetic
uuagaguccgcguguguggg

SEQ ID NO: 6789 - RNA, 17 nt, Artificial Sequence
  Synthetic
uugaacuugcagcucag

SEQ ID NO: 6790 - RNA, 17 nt, Artificial Sequence
  Synthetic
uugccguguaugcacuu

SEQ ID NO: 6791 - RNA, 20 nt, Artificial Sequence
  Synthetic
uuggaugucaaaaggcacug

SEQ ID NO: 6792 - RNA, 17 nt, Artificial Sequence
  Synthetic
uuuagaguccgcgugug

SEQ ID NO: 6793 - RNA, 20 nt, Artificial Sequence
  Synthetic
uuuagaguccgcgugugugg

SEQ ID NO: 6794 - RNA, 17 nt, Artificial Sequence
  Synthetic
uuucacgagaaaaaccu

SEQ ID NO: 6795 - RNA, 17 nt, Artificial Sequence
  Synthetic
uuuuagaguccgcgugu

SEQ ID NO: 6796 - RNA, 20 nt, Artificial Sequence
  Synthetic
uuuuagaguccgcgugugug

SEQ ID NO: 6797 - RNA, 20 nt, Artificial Sequence
  Synthetic
uuuucacgagaaaaaccucc

SEQ ID NO: 6798 - RNA, 20 nt, Artificial Sequence
  Synthetic
uuuugacauccaaaauaaau

SEQ ID NO: 6799 - RNA, 20 nt, Artificial Sequence
  Synthetic
gcuucuaguccugcgcgcuc

SEQ ID NO: 6800 - RNA, 20 nt, Artificial Sequence
  Synthetic
acacacgcggacucuaaaau

SEQ ID NO: 6801 - RNA, 17 nt, Artificial Sequence
  Synthetic
ucuaguccugcgcgcuc

SEQ ID NO: 6802 - RNA, 17 nt, Artificial Sequence
  Synthetic
cacgcggacucuaaaau

SEQ ID NO: 6803 - RNA, 17 nt, Artificial Sequence
  Synthetic
ggugcaccugacuccug

SEQ ID NO: 6804 - RNA, 20 nt, Artificial Sequence
  Synthetic
guaacggcagacuucuccac

SEQ ID NO: 6805 - RNA, 17 nt, Artificial Sequence
  Synthetic
acggcagacuucuccac

SEQ ID NO: 6806 - RNA, 17 nt, Artificial Sequence
  Synthetic
acuucuccacaggaguc

SEQ ID NO: 6807 - RNA, 17 nt, Artificial Sequence
  Synthetic
aggagucaggugcacca

SEQ ID NO: 6808 - RNA, 20 nt, Artificial Sequence
  Synthetic
cauggugcaccugacuccug

SEQ ID NO: 6809 - RNA, 20 nt, Artificial Sequence
  Synthetic
cacaggagucaggugcacca

SEQ ID NO: 6810 - RNA, 20 nt, Artificial Sequence
  Synthetic
cagacuucuccacaggaguc

SEQ ID NO: 6811 - RNA, 20 nt, Artificial Sequence
  Synthetic
gaaguugguggugaggcccu

SEQ ID NO: 6812 - RNA, 20 nt, Artificial Sequence
  Synthetic
gcaaccucaaacagacacca

SEQ ID NO: 6813 - RNA, 17 nt, Artificial Sequence
  Synthetic
gccccacagggcaguaa

SEQ ID NO: 6814 - RNA, 17 nt, Artificial Sequence
  Synthetic
gccguuacugcccugug

SEQ ID NO: 6815 - RNA, 17 nt, Artificial Sequence
  Synthetic
ggaugaaguugguggug

SEQ ID NO: 6816 - RNA, 20 nt, Artificial Sequence
  Synthetic
gucugccguuacugcccugu

SEQ ID NO: 6817 - RNA, 17 nt, Artificial Sequence
  Synthetic
gugaacguggaugaagu

SEQ ID NO: 6818 - RNA, 20 nt, Artificial Sequence
  Synthetic
gugaacguggaugaaguugg

SEQ ID NO: 6819 - RNA, 17 nt, Artificial Sequence
  Synthetic
guggggcaaggugaacg

SEQ ID NO: 6820 - RNA, 17 nt, Artificial Sequence
  Synthetic
guggugaggcccugggc

SEQ ID NO: 6821 - RNA, 17 nt, Artificial Sequence
  Synthetic
guucaccuugccccaca

SEQ ID NO: 6822 - RNA, 17 nt, Artificial Sequence
  Synthetic
guugguggugaggcccu

SEQ ID NO: 6823 - RNA, 17 nt, Artificial Sequence
  Synthetic
aacguggaugaaguugg

SEQ ID NO: 6824 - RNA, 20 nt, Artificial Sequence
  Synthetic
aagcaaauguaagcaauaga

SEQ ID NO: 6825 - RNA, 20 nt, Artificial Sequence
  Synthetic
aaggugaacguggaugaagu

SEQ ID NO: 6826 - RNA, 17 nt, Artificial Sequence
  Synthetic
accauggugucuguuug

SEQ ID NO: 6827 - RNA, 17 nt, Artificial Sequence
  Synthetic
accucaaacagacacca

SEQ ID NO: 6828 - RNA, 20 nt, Artificial Sequence
  Synthetic
accuugauaccaaccugccc

SEQ ID NO: 6829 - RNA, 20 nt, Artificial Sequence
  Synthetic
agucugccguuacugcccug

SEQ ID NO: 6830 - RNA, 17 nt, Artificial Sequence
  Synthetic
aguugguggugaggccc

SEQ ID NO: 6831 - RNA, 17 nt, Artificial Sequence
  Synthetic
caaauguaagcaauaga

SEQ ID NO: 6832 - RNA, 20 nt, Artificial Sequence
  Synthetic
cacguucaccuugccccaca

SEQ ID NO: 6833 - RNA, 20 nt, Artificial Sequence
  Synthetic
ccacguucaccuugccccac

SEQ ID NO: 6834 - RNA, 20 nt, Artificial Sequence
  Synthetic
cccugggcagguugguauca

SEQ ID NO: 6835 - RNA, 20 nt, Artificial Sequence
  Synthetic
ccuguggggcaaggugaacg

SEQ ID NO: 6836 - RNA, 20 nt, Artificial Sequence
  Synthetic
ccuugauaccaaccugccca

SEQ ID NO: 6837 - RNA, 20 nt, Artificial Sequence
  Synthetic
cguggaugaaguugguggug

SEQ ID NO: 6838 - RNA, 20 nt, Artificial Sequence
  Synthetic
cguuacugcccuguggggca

SEQ ID NO: 6839 - RNA, 17 nt, Artificial Sequence
  Synthetic
cguucaccuugccccac

SEQ ID NO: 6840 - RNA, 17 nt, Artificial Sequence
  Synthetic
cugccguuacugcccug

SEQ ID NO: 6841 - RNA, 20 nt, Artificial Sequence
  Synthetic
cuugccccacagggcaguaa

SEQ ID NO: 6842 - RNA, 17 nt, Artificial Sequence
  Synthetic
uacugcccuguggggca

SEQ ID NO: 6843 - RNA, 17 nt, Artificial Sequence
  Synthetic
uaucaagguuacaagac

SEQ ID NO: 6844 - RNA, 20 nt, Artificial Sequence
  Synthetic
ucugccguuacugcccugug

SEQ ID NO: 6845 - RNA, 20 nt, Artificial Sequence
  Synthetic
ugaaguugguggugaggccc

SEQ ID NO: 6846 - RNA, 17 nt, Artificial Sequence
  Synthetic
ugaggcccugggcaggu

SEQ ID NO: 6847 - RNA, 17 nt, Artificial Sequence
  Synthetic
ugauaccaaccugccca

SEQ ID NO: 6848 - RNA, 20 nt, Artificial Sequence
  Synthetic
ugcaccauggugucuguuug

SEQ ID NO: 6849 - RNA, 17 nt, Artificial Sequence
  Synthetic
ugccguuacugcccugu

SEQ ID NO: 6850 - RNA, 17 nt, Artificial Sequence
  Synthetic
ugggcagguugguauca

SEQ ID NO: 6851 - RNA, 20 nt, Artificial Sequence
  Synthetic
ugguaucaagguuacaagac

SEQ ID NO: 6852 - RNA, 20 nt, Artificial Sequence
  Synthetic
uggugaggcccugggcaggu

SEQ ID NO: 6853 - RNA, 17 nt, Artificial Sequence
  Synthetic
uugauaccaaccugccc

SEQ ID NO: 6854 - RNA, 20 nt, Artificial Sequence
  Synthetic
uugguggugaggcccugggc

SEQ ID NO: 6855 - RNA, 20 nt, Artificial Sequence
  Synthetic
guaacggcagacuucuccac

SEQ ID NO: 6856 - RNA, 20 nt, Artificial Sequence
  Synthetic
cccuguggggcaagguggac

SEQ ID NO: 6857 - RNA, 20 nt, Artificial Sequence
  Synthetic
agucugccguuacugcccug

SEQ ID NO: 6858 - RNA, 20 nt, Artificial Sequence
  Synthetic
aagucugccguuacugcccu

SEQ ID NO: 6859 - RNA, 20 nt, Artificial Sequence
  Synthetic
aaccuugauaccaaccugcc

SEQ ID NO: 6860 - RNA, 20 nt, Artificial Sequence
  Synthetic
uccacguucaccuugcccca

SEQ ID NO: 6861 - RNA, 20 nt, Artificial Sequence
  Synthetic
gcuagugaacacaguugugu

SEQ ID NO: 6862 - RNA, 20 nt, Artificial Sequence
  Synthetic
ccauggugcaccugacuccu

SEQ ID NO: 6863 - RNA, 20 nt, Artificial Sequence
  Synthetic
cauggugcaccugacuccug

SEQ ID NO: 6864 - RNA, 20 nt, Artificial Sequence
  Synthetic
aggugcaccauggugucugu

SEQ ID NO: 6865 - RNA, 20 nt, Artificial Sequence
  Synthetic
uggugcaccugacuccugug

SEQ ID NO: 6866 - RNA, 20 nt, Artificial Sequence
  Synthetic
gaacguggaugaaguuggug

SEQ ID NO: 6867 - RNA, 20 nt, Artificial Sequence
  Synthetic
uuacugcccuguggggcaag

SEQ ID NO: 6868 - RNA, 20 nt, Artificial Sequence
  Synthetic
gugucuguuugagguugcua

SEQ ID NO: 6869 - RNA, 20 nt, Artificial Sequence
  Synthetic
guggggcaaggugaacgugg

SEQ ID NO: 6870 - RNA, 20 nt, Artificial Sequence
  Synthetic
augaaguugguggugaggcc

SEQ ID NO: 6871 - RNA, 20 nt, Artificial Sequence
  Synthetic
aguaacggcagacuucucca

SEQ ID NO: 6872 - RNA, 17 nt, Artificial Sequence
  Synthetic
ucaucucgauuggugaa

SEQ ID NO: 6873 - RNA, 17 nt, Artificial Sequence
  Synthetic
uugcuugcggcgagaca

SEQ ID NO: 6874 - RNA, 17 nt, Artificial Sequence
  Synthetic
augucucgccgcaagca

SEQ ID NO: 6875 - RNA, 17 nt, Artificial Sequence
  Synthetic
gcagaauaugccccgca

SEQ ID NO: 6876 - RNA, 17 nt, Artificial Sequence
  Synthetic
ccguugggagcuccaga

SEQ ID NO: 6877 - RNA, 17 nt, Artificial Sequence
  Synthetic
cuccaugugcagaacga

SEQ ID NO: 6878 - RNA, 17 nt, Artificial Sequence
  Synthetic
ucgauuggugaagggga

SEQ ID NO: 6879 - RNA, 17 nt, Artificial Sequence
  Synthetic
cauccucuggcgugacc

SEQ ID NO: 6880 - RNA, 17 nt, Artificial Sequence
  Synthetic
gcucuaauccccacgcc

SEQ ID NO: 6881 - RNA, 17 nt, Artificial Sequence
  Synthetic
cccguuugcuuaagugc

SEQ ID NO: 6882 - RNA, 17 nt, Artificial Sequence
  Synthetic
aaacaaucgucauccuc

SEQ ID NO: 6883 - RNA, 17 nt, Artificial Sequence
  Synthetic
cccaacgggccgugguc

SEQ ID NO: 6884 - RNA, 17 nt, Artificial Sequence
  Synthetic
caucucgauuggugaag

SEQ ID NO: 6885 - RNA, 17 nt, Artificial Sequence
  Synthetic
cauccaggucacgccag

SEQ ID NO: 6886 - RNA, 17 nt, Artificial Sequence
  Synthetic
uuaucaacgucaucuag

SEQ ID NO: 6887 - RNA, 17 nt, Artificial Sequence
  Synthetic
gagcucccaacgggccg

SEQ ID NO: 6888 - RNA, 17 nt, Artificial Sequence
  Synthetic
ugcacucaucccaggcg

SEQ ID NO: 6889 - RNA, 17 nt, Artificial Sequence
  Synthetic
agacauggugggcugcg

SEQ ID NO: 6890 - RNA, 17 nt, Artificial Sequence
  Synthetic
cguuugcuuaagugcug

SEQ ID NO: 6891 - RNA, 17 nt, Artificial Sequence
  Synthetic
gcuuuuuucaucucgau

SEQ ID NO: 6892 - RNA, 17 nt, Artificial Sequence
  Synthetic
ccguuugcuuaagugcu

SEQ ID NO: 6893 - RNA, 17 nt, Artificial Sequence
  Synthetic
uccaaucccguggaggu

SEQ ID NO: 6894 - RNA, 17 nt, Artificial Sequence
  Synthetic
uugcggcgagacauggu

SEQ ID NO: 6895 - RNA, 17 nt, Artificial Sequence
  Synthetic
augaccuccucaccugu

SEQ ID NO: 6896 - RNA, 20 nt, Artificial Sequence
  Synthetic
uuauuuuuaucgagcacaaa

SEQ ID NO: 6897 - RNA, 20 nt, Artificial Sequence
  Synthetic
uccccuucuggagcucccaa

SEQ ID NO: 6898 - RNA, 20 nt, Artificial Sequence
  Synthetic
uuuucaucucgauuggugaa

SEQ ID NO: 6899 - RNA, 20 nt, Artificial Sequence
  Synthetic
gccuugcuugcggcgagaca

SEQ ID NO: 6900 - RNA, 20 nt, Artificial Sequence
  Synthetic
accaugucucgccgcaagca

SEQ ID NO: 6901 - RNA, 20 nt, Artificial Sequence
  Synthetic
gagcuccaugugcagaacga

SEQ ID NO: 6902 - RNA, 20 nt, Artificial Sequence
  Synthetic
ucacagauaaacuucugcac

SEQ ID NO: 6903 - RNA, 20 nt, Artificial Sequence
  Synthetic
cgucauccucuggcgugacc

SEQ ID NO: 6904 - RNA, 20 nt, Artificial Sequence
  Synthetic
ggagcucuaauccccacgcc

SEQ ID NO: 6905 - RNA, 20 nt, Artificial Sequence
  Synthetic
ucccguggagguuggcaucc

SEQ ID NO: 6906 - RNA, 20 nt, Artificial Sequence
  Synthetic
auucccguuugcuuaagugc

SEQ ID NO: 6907 - RNA, 20 nt, Artificial Sequence
  Synthetic
cccccaaugggaaguucauc

SEQ ID NO: 6908 - RNA, 20 nt, Artificial Sequence
  Synthetic
gcucccaacgggccgugguc

SEQ ID NO: 6909 - RNA, 20 nt, Artificial Sequence
  Synthetic
uuucaucucgauuggugaag

SEQ ID NO: 6910 - RNA, 20 nt, Artificial Sequence
  Synthetic
uguuuaucaacgucaucuag

SEQ ID NO: 6911 - RNA, 20 nt, Artificial Sequence
  Synthetic
agagcuccaugugcagaacg

SEQ ID NO: 6912 - RNA, 20 nt, Artificial Sequence
  Synthetic
gaaaaaagcauccaaucccg

SEQ ID NO: 6913 - RNA, 20 nt, Artificial Sequence
  Synthetic
gcgagacauggugggcugcg

SEQ ID NO: 6914 - RNA, 20 nt, Artificial Sequence
  Synthetic
cagauaaacuucugcacugg

SEQ ID NO: 6915 - RNA, 20 nt, Artificial Sequence
  Synthetic
cggcgagacauggugggcug

SEQ ID NO: 6916 - RNA, 20 nt, Artificial Sequence
  Synthetic
cugcacucaucccaggcgug

SEQ ID NO: 6917 - RNA, 20 nt, Artificial Sequence
  Synthetic
ugaaccagaccacggcccgu

SEQ ID NO: 6918 - RNA, 20 nt, Artificial Sequence
  Synthetic
gcauccaaucccguggaggu

SEQ ID NO: 6919 - RNA, 20 nt, Artificial Sequence
  Synthetic
ugcuugcggcgagacauggu

SEQ ID NO: 6920 - RNA, 20 nt, Artificial Sequence
  Synthetic
ucaagaggcucggcuguggu

SEQ ID NO: 6921 - RNA, 20 nt, Artificial Sequence
  Synthetic
aucaugaccuccucaccugu

SEQ ID NO: 6922 - RNA, 17 nt, Artificial Sequence
  Synthetic
uuuuuaucgagcacaaa

SEQ ID NO: 6923 - RNA, 17 nt, Artificial Sequence
  Synthetic
cccagcacuuaagcaaa

SEQ ID NO: 6924 - RNA, 17 nt, Artificial Sequence
  Synthetic
auaagaaugucccccaa

SEQ ID NO: 6925 - RNA, 17 nt, Artificial Sequence
  Synthetic
ccuucuggagcucccaa

SEQ ID NO: 6926 - RNA, 17 nt, Artificial Sequence
  Synthetic
aaacggaaacaaugcaa

SEQ ID NO: 6927 - RNA, 17 nt, Artificial Sequence
  Synthetic
uucaucaucuguaagaa

SEQ ID NO: 6928 - RNA, 17 nt, Artificial Sequence
  Synthetic
cguugggagcuccagaa

SEQ ID NO: 6929 - RNA, 17 nt, Artificial Sequence
  Synthetic
uccccucguucugcaca

SEQ ID NO: 6930 - RNA, 17 nt, Artificial Sequence
  Synthetic
gaugaugaaccagacca

SEQ ID NO: 6931 - RNA, 17 nt, Artificial Sequence
  Synthetic
cuggaugccaaccucca

SEQ ID NO: 6932 - RNA, 17 nt, Artificial Sequence
  Synthetic
cagguaaaugagaagca

SEQ ID NO: 6933 - RNA, 17 nt, Artificial Sequence
  Synthetic
uaaacuucugcacugga

SEQ ID NO: 6934 - RNA, 17 nt, Artificial Sequence
  Synthetic
uucaucucgauugguga

SEQ ID NO: 6935 - RNA, 17 nt, Artificial Sequence
  Synthetic
cauuuguagaagaaaua

SEQ ID NO: 6936 - RNA, 17 nt, Artificial Sequence
  Synthetic
aggaauuugccccaaac

SEQ ID NO: 6937 - RNA, 17 nt, Artificial Sequence
  Synthetic
ccagcacuuaagcaaac

SEQ ID NO: 6938 - RNA, 17 nt, Artificial Sequence
  Synthetic
cuucuggagcucccaac

SEQ ID NO: 6939 - RNA, 17 nt, Artificial Sequence
  Synthetic
caucuggcacugcccac

SEQ ID NO: 6940 - RNA, 17 nt, Artificial Sequence
  Synthetic
uggaugccaaccuccac

SEQ ID NO: 6941 - RNA, 17 nt, Artificial Sequence
  Synthetic
cagauaaacuucugcac

SEQ ID NO: 6942 - RNA, 17 nt, Artificial Sequence
  Synthetic
uauucugcacucauccc

SEQ ID NO: 6943 - RNA, 17 nt, Artificial Sequence
  Synthetic
cguggagguuggcaucc

SEQ ID NO: 6944 - RNA, 17 nt, Artificial Sequence
  Synthetic
aaacaggaacacauagc

SEQ ID NO: 6945 - RNA, 17 nt, Artificial Sequence
  Synthetic
ugcagaauaugccccgc

SEQ ID NO: 6946 - RNA, 17 nt, Artificial Sequence
  Synthetic
auggugggcugcggggc

SEQ ID NO: 6947 - RNA, 17 nt, Artificial Sequence
  Synthetic
acuuacaaauacccugc

SEQ ID NO: 6948 - RNA, 17 nt, Artificial Sequence
  Synthetic
uguacauguguagcugc

SEQ ID NO: 6949 - RNA, 17 nt, Artificial Sequence
  Synthetic
gagacauggugggcugc

SEQ ID NO: 6950 - RNA, 17 nt, Artificial Sequence
  Synthetic
guguuguauuauuuugc

SEQ ID NO: 6951 - RNA, 17 nt, Artificial Sequence
  Synthetic
ccaaugggaaguucauc

SEQ ID NO: 6952 - RNA, 17 nt, Artificial Sequence
  Synthetic
aggucaugauccccuuc

SEQ ID NO: 6953 - RNA, 17 nt, Artificial Sequence
  Synthetic
guaagaauggcuucaag

SEQ ID NO: 6954 - RNA, 17 nt, Artificial Sequence
  Synthetic
guugggagcuccagaag

SEQ ID NO: 6955 - RNA, 17 nt, Artificial Sequence
  Synthetic
cagcuuuuucuaagcag

SEQ ID NO: 6956 - RNA, 17 nt, Artificial Sequence
  Synthetic
uccaugugcagaacgag

SEQ ID NO: 6957 - RNA, 17 nt, Artificial Sequence
  Synthetic
cagaacgaggggaggag

SEQ ID NO: 6958 - RNA, 17 nt, Artificial Sequence
  Synthetic
aaacuucugcacuggag

SEQ ID NO: 6959 - RNA, 17 nt, Artificial Sequence
  Synthetic
gcuccaugugcagaacg

SEQ ID NO: 6960 - RNA, 17 nt, Artificial Sequence
  Synthetic
aaaagcauccaaucccg

SEQ ID NO: 6961 - RNA, 17 nt, Artificial Sequence
  Synthetic
cuuacaaauacccugcg

SEQ ID NO: 6962 - RNA, 17 nt, Artificial Sequence
  Synthetic
auuggugaaggggaagg

SEQ ID NO: 6963 - RNA, 17 nt, Artificial Sequence
  Synthetic
acugcccacaggugagg

SEQ ID NO: 6964 - RNA, 17 nt, Artificial Sequence
  Synthetic
ggggcgggcggcggcgg

SEQ ID NO: 6965 - RNA, 17 nt, Artificial Sequence
  Synthetic
ugcggggcgggcggcgg

SEQ ID NO: 6966 - RNA, 17 nt, Artificial Sequence
  Synthetic
ggcugcggggcgggcgg

SEQ ID NO: 6967 - RNA, 17 nt, Artificial Sequence
  Synthetic
gugggcugcggggcggg

SEQ ID NO: 6968 - RNA, 17 nt, Artificial Sequence
  Synthetic
augugcagaacgagggg

SEQ ID NO: 6969 - RNA, 17 nt, Artificial Sequence
  Synthetic
cauggugggcugcgggg

SEQ ID NO: 6970 - RNA, 17 nt, Artificial Sequence
  Synthetic
cuugcggcgagacaugg

SEQ ID NO: 6971 - RNA, 17 nt, Artificial Sequence
  Synthetic
auaaacuucugcacugg

SEQ ID NO: 6972 - RNA, 17 nt, Artificial Sequence
  Synthetic
agcauccaaucccgugg

SEQ ID NO: 6973 - RNA, 17 nt, Artificial Sequence
  Synthetic
gaugaacuucccauugg

SEQ ID NO: 6974 - RNA, 17 nt, Artificial Sequence
  Synthetic
caugaccuccucaccug

SEQ ID NO: 6975 - RNA, 17 nt, Artificial Sequence
  Synthetic
aacuuacaaauacccug

SEQ ID NO: 6976 - RNA, 17 nt, Artificial Sequence
  Synthetic
cugcuuagaaaaagcug

SEQ ID NO: 6977 - RNA, 17 nt, Artificial Sequence
  Synthetic
uucaagaggcucggcug

SEQ ID NO: 6978 - RNA, 17 nt, Artificial Sequence
  Synthetic
cgagacauggugggcug

SEQ ID NO: 6979 - RNA, 17 nt, Artificial Sequence
  Synthetic
cacucaucccaggcgug

SEQ ID NO: 6980 - RNA, 17 nt, Artificial Sequence
  Synthetic
ggcacugcccacaggug

SEQ ID NO: 6981 - RNA, 17 nt, Artificial Sequence
  Synthetic
agaugaacuucccauug

SEQ ID NO: 6982 - RNA, 17 nt, Artificial Sequence
  Synthetic
gggguuugccuugcuug

SEQ ID NO: 6983 - RNA, 17 nt, Artificial Sequence
  Synthetic
cuauguguuccuguuug

SEQ ID NO: 6984 - RNA, 17 nt, Artificial Sequence
  Synthetic
uaagaaugucccccaau

SEQ ID NO: 6985 - RNA, 17 nt, Artificial Sequence
  Synthetic
ccagaugaacuucccau

SEQ ID NO: 6986 - RNA, 17 nt, Artificial Sequence
  Synthetic
gccaaccuccacgggau

SEQ ID NO: 6987 - RNA, 17 nt, Artificial Sequence
  Synthetic
auuauuauuacuauuau

SEQ ID NO: 6988 - RNA, 17 nt, Artificial Sequence
  Synthetic
cucuaauccccacgccu

SEQ ID NO: 6989 - RNA, 17 nt, Artificial Sequence
  Synthetic
aauggcuucaagaggcu

SEQ ID NO: 6990 - RNA, 17 nt, Artificial Sequence
  Synthetic
guacauguguagcugcu

SEQ ID NO: 6991 - RNA, 17 nt, Artificial Sequence
  Synthetic
accagaccacggcccgu

SEQ ID NO: 6992 - RNA, 17 nt, Artificial Sequence
  Synthetic
gcacucaucccaggcgu

SEQ ID NO: 6993 - RNA, 17 nt, Artificial Sequence
  Synthetic
agaggcucggcuguggu

SEQ ID NO: 6994 - RNA, 17 nt, Artificial Sequence
  Synthetic
cagaugaacuucccauu

SEQ ID NO: 6995 - RNA, 17 nt, Artificial Sequence
  Synthetic
uuauuauuacuauuauu

SEQ ID NO: 6996 - RNA, 17 nt, Artificial Sequence
  Synthetic
ccagaccacggcccguu

SEQ ID NO: 6997 - RNA, 17 nt, Artificial Sequence
  Synthetic
ugcuauguguuccuguu

SEQ ID NO: 6998 - RNA, 17 nt, Artificial Sequence
  Synthetic
gcuauguguuccuguuu

SEQ ID NO: 6999 - RNA, 20 nt, Artificial Sequence
  Synthetic
aaccccagcacuuaagcaaa

SEQ ID NO: 7000 - RNA, 20 nt, Artificial Sequence
  Synthetic
aaaauaagaaugucccccaa

SEQ ID NO: 7001 - RNA, 20 nt, Artificial Sequence
  Synthetic
cacaaacggaaacaaugcaa

SEQ ID NO: 7002 - RNA, 20 nt, Artificial Sequence
  Synthetic
ugguucaucaucuguaagaa

SEQ ID NO: 7003 - RNA, 20 nt, Artificial Sequence
  Synthetic
gcccguugggagcuccagaa

SEQ ID NO: 7004 - RNA, 20 nt, Artificial Sequence
  Synthetic
uccuccccucguucugcaca

SEQ ID NO: 7005 - RNA, 20 nt, Artificial Sequence
  Synthetic
acagaugaugaaccagacca

SEQ ID NO: 7006 - RNA, 20 nt, Artificial Sequence
  Synthetic
gaccuggaugccaaccucca

SEQ ID NO: 7007 - RNA, 20 nt, Artificial Sequence
  Synthetic
uagcagguaaaugagaagca

SEQ ID NO: 7008 - RNA, 20 nt, Artificial Sequence
  Synthetic
agugcagaauaugccccgca

SEQ ID NO: 7009 - RNA, 20 nt, Artificial Sequence
  Synthetic
ggcccguugggagcuccaga

SEQ ID NO: 7010 - RNA, 20 nt, Artificial Sequence
  Synthetic
aucucgauuggugaagggga

SEQ ID NO: 7011 - RNA, 20 nt, Artificial Sequence
  Synthetic
agauaaacuucugcacugga

SEQ ID NO: 7012 - RNA, 20 nt, Artificial Sequence
  Synthetic
uuuuucaucucgauugguga

SEQ ID NO: 7013 - RNA, 20 nt, Artificial Sequence
  Synthetic
uagaggaauuugccccaaac

SEQ ID NO: 7014 - RNA, 20 nt, Artificial Sequence
  Synthetic
accccagcacuuaagcaaac

SEQ ID NO: 7015 - RNA, 20 nt, Artificial Sequence
  Synthetic
ccccuucuggagcucccaac

SEQ ID NO: 7016 - RNA, 20 nt, Artificial Sequence
  Synthetic
guucaucuggcacugcccac

SEQ ID NO: 7017 - RNA, 20 nt, Artificial Sequence
  Synthetic
accuggaugccaaccuccac

SEQ ID NO: 7018 - RNA, 20 nt, Artificial Sequence
  Synthetic
gcauauucugcacucauccc

SEQ ID NO: 7019 - RNA, 20 nt, Artificial Sequence
  Synthetic
cccaaacaggaacacauagc

SEQ ID NO: 7020 - RNA, 20 nt, Artificial Sequence
  Synthetic
gagugcagaauaugccccgc

SEQ ID NO: 7021 - RNA, 20 nt, Artificial Sequence
  Synthetic
gacauggugggcugcggggc

SEQ ID NO: 7022 - RNA, 20 nt, Artificial Sequence
  Synthetic
ucaacuuacaaauacccugc

SEQ ID NO: 7023 - RNA, 20 nt, Artificial Sequence
  Synthetic
aguuguacauguguagcugc

SEQ ID NO: 7024 - RNA, 20 nt, Artificial Sequence
  Synthetic
ggcgagacauggugggcugc

SEQ ID NO: 7025 - RNA, 20 nt, Artificial Sequence
  Synthetic
uugguguuguauuauuuugc

SEQ ID NO: 7026 - RNA, 20 nt, Artificial Sequence
  Synthetic
gauaaacaaucgucauccuc

SEQ ID NO: 7027 - RNA, 20 nt, Artificial Sequence
  Synthetic
aggaggucaugauccccuuc

SEQ ID NO: 7028 - RNA, 20 nt, Artificial Sequence
  Synthetic
ucuguaagaauggcuucaag

SEQ ID NO: 7029 - RNA, 20 nt, Artificial Sequence
  Synthetic
cccguugggagcuccagaag

SEQ ID NO: 7030 - RNA, 20 nt, Artificial Sequence
  Synthetic
uggcauccaggucacgccag

SEQ ID NO: 7031 - RNA, 20 nt, Artificial Sequence
  Synthetic
ccacagcuuuuucuaagcag

SEQ ID NO: 7032 - RNA, 20 nt, Artificial Sequence
  Synthetic
agcuccaugugcagaacgag

SEQ ID NO: 7033 - RNA, 20 nt, Artificial Sequence
  Synthetic
gugcagaacgaggggaggag

SEQ ID NO: 7034 - RNA, 20 nt, Artificial Sequence
  Synthetic
gauaaacuucugcacuggag

SEQ ID NO: 7035 - RNA, 20 nt, Artificial Sequence
  Synthetic
cuggagcucccaacgggccg

SEQ ID NO: 7036 - RNA, 20 nt, Artificial Sequence
  Synthetic
uucugcacucaucccaggcg

SEQ ID NO: 7037 - RNA, 20 nt, Artificial Sequence
  Synthetic
caacuuacaaauacccugcg

SEQ ID NO: 7038 - RNA, 20 nt, Artificial Sequence
  Synthetic
ucgauuggugaaggggaagg

SEQ ID NO: 7039 - RNA, 20 nt, Artificial Sequence
  Synthetic
ggcacugcccacaggugagg

SEQ ID NO: 7040 - RNA, 20 nt, Artificial Sequence
  Synthetic
ugcggggcgggcggcggcgg

SEQ ID NO: 7041 - RNA, 20 nt, Artificial Sequence
  Synthetic
ggcugcggggcgggcggcgg

SEQ ID NO: 7042 - RNA, 20 nt, Artificial Sequence
  Synthetic
gugggcugcggggcgggcgg

SEQ ID NO: 7043 - RNA, 20 nt, Artificial Sequence
  Synthetic
auggugggcugcggggcggg

SEQ ID NO: 7044 - RNA, 20 nt, Artificial Sequence
  Synthetic
uccaugugcagaacgagggg

SEQ ID NO: 7045 - RNA, 20 nt, Artificial Sequence
  Synthetic
agacauggugggcugcgggg

SEQ ID NO: 7046 - RNA, 20 nt, Artificial Sequence
  Synthetic
uugcuugcggcgagacaugg

SEQ ID NO: 7047 - RNA, 20 nt, Artificial Sequence
  Synthetic
aaaagcauccaaucccgugg

SEQ ID NO: 7048 - RNA, 20 nt, Artificial Sequence
  Synthetic
ccagaugaacuucccauugg

SEQ ID NO: 7049 - RNA, 20 nt, Artificial Sequence
  Synthetic
gaucaugaccuccucaccug

SEQ ID NO: 7050 - RNA, 20 nt, Artificial Sequence
  Synthetic
cucaacuuacaaauacccug

SEQ ID NO: 7051 - RNA, 20 nt, Artificial Sequence
  Synthetic
ccucugcuuagaaaaagcug

SEQ ID NO: 7052 - RNA, 20 nt, Artificial Sequence
  Synthetic
ggcuucaagaggcucggcug

SEQ ID NO: 7053 - RNA, 20 nt, Artificial Sequence
  Synthetic
ucccguuugcuuaagugcug

SEQ ID NO: 7054 - RNA, 20 nt, Artificial Sequence
  Synthetic
ucuggcacugcccacaggug

SEQ ID NO: 7055 - RNA, 20 nt, Artificial Sequence
  Synthetic
gccagaugaacuucccauug

SEQ ID NO: 7056 - RNA, 20 nt, Artificial Sequence
  Synthetic
gcugggguuugccuugcuug

SEQ ID NO: 7057 - RNA, 20 nt, Artificial Sequence
  Synthetic
cugcuauguguuccuguuug

SEQ ID NO: 7058 - RNA, 20 nt, Artificial Sequence
  Synthetic
aaauaagaaugucccccaau

SEQ ID NO: 7059 - RNA, 20 nt, Artificial Sequence
  Synthetic
gugccagaugaacuucccau

SEQ ID NO: 7060 - RNA, 20 nt, Artificial Sequence
  Synthetic
gaugcuuuuuucaucucgau

SEQ ID NO: 7061 - RNA, 20 nt, Artificial Sequence
  Synthetic
gaugccaaccuccacgggau

SEQ ID NO: 7062 - RNA, 20 nt, Artificial Sequence
  Synthetic
gagcucuaauccccacgccu

SEQ ID NO: 7063 - RNA, 20 nt, Artificial Sequence
  Synthetic
aagaauggcuucaagaggcu

SEQ ID NO: 7064 - RNA, 20 nt, Artificial Sequence
  Synthetic
guuguacauguguagcugcu

SEQ ID NO: 7065 - RNA, 20 nt, Artificial Sequence
  Synthetic
uucccguuugcuuaagugcu

SEQ ID NO: 7066 - RNA, 20 nt, Artificial Sequence
  Synthetic
ucugcacucaucccaggcgu

SEQ ID NO: 7067 - RNA, 20 nt, Artificial Sequence
  Synthetic
ugccagaugaacuucccauu

SEQ ID NO: 7068 - RNA, 20 nt, Artificial Sequence
  Synthetic
gaaccagaccacggcccguu

SEQ ID NO: 7069 - RNA, 20 nt, Artificial Sequence
  Synthetic
accugcuauguguuccuguu

SEQ ID NO: 7070 - RNA, 20 nt, Artificial Sequence
  Synthetic
ccugcuauguguuccuguuu

SEQ ID NO: 7071 - RNA, 17 nt, Artificial Sequence
  Synthetic
uccgacgaggaggcaaa

SEQ ID NO: 7072 - RNA, 17 nt, Artificial Sequence
  Synthetic
auucuuagcagguuaaa

SEQ ID NO: 7073 - RNA, 17 nt, Artificial Sequence
  Synthetic
gcugcgguugaauccaa

SEQ ID NO: 7074 - RNA, 17 nt, Artificial Sequence
  Synthetic
ggcccagcccuaugcaa

SEQ ID NO: 7075 - RNA, 17 nt, Artificial Sequence
  Synthetic
ccgcagcacccugucaa

SEQ ID NO: 7076 - RNA, 17 nt, Artificial Sequence
  Synthetic
cuuccggccuggcagaa

SEQ ID NO: 7077 - RNA, 17 nt, Artificial Sequence
  Synthetic
uugaugcgcuuagagaa

SEQ ID NO: 7078 - RNA, 17 nt, Artificial Sequence
  Synthetic
aaccugaucccggagaa

SEQ ID NO: 7079 - RNA, 17 nt, Artificial Sequence
  Synthetic
gagcacuccucggagaa

SEQ ID NO: 7080 - RNA, 17 nt, Artificial Sequence
  Synthetic
cuggguacuacgccgaa

SEQ ID NO: 7081 - RNA, 17 nt, Artificial Sequence
  Synthetic
ucuccgaagcuaaggaa

SEQ ID NO: 7082 - RNA, 17 nt, Artificial Sequence
  Synthetic
gggggcgucgccaggaa

SEQ ID NO: 7083 - RNA, 17 nt, Artificial Sequence
  Synthetic
uugcuaccuggcuggaa

SEQ ID NO: 7084 - RNA, 17 nt, Artificial Sequence
  Synthetic
cugcaccuaguccugaa

SEQ ID NO: 7085 - RNA, 17 nt, Artificial Sequence
  Synthetic
aaccaugcacuggugaa

SEQ ID NO: 7086 - RNA, 17 nt, Artificial Sequence
  Synthetic
auuuucucagaacuuaa

SEQ ID NO: 7087 - RNA, 17 nt, Artificial Sequence
  Synthetic
uauucuuagcagguuaa

SEQ ID NO: 7088 - RNA, 17 nt, Artificial Sequence
  Synthetic
gacgauggcacuguuaa

SEQ ID NO: 7089 - RNA, 17 nt, Artificial Sequence
  Synthetic
cggugguggacuaaaca

SEQ ID NO: 7090 - RNA, 17 nt, Artificial Sequence
  Synthetic
ggccgcgaugcccaaca

SEQ ID NO: 7091 - RNA, 17 nt, Artificial Sequence
  Synthetic
uacuuagaaagcgaaca

SEQ ID NO: 7092 - RNA, 17 nt, Artificial Sequence
  Synthetic
gcaccggcgcagccaca

SEQ ID NO: 7093 - RNA, 17 nt, Artificial Sequence
  Synthetic
cgaggccgagggccaca

SEQ ID NO: 7094 - RNA, 17 nt, Artificial Sequence
  Synthetic
cccgagugccuuugaca

SEQ ID NO: 7095 - RNA, 17 nt, Artificial Sequence
  Synthetic
cuugaacuuggccacca

SEQ ID NO: 7096 - RNA, 17 nt, Artificial Sequence
  Synthetic
aaaauuugaagccccca

SEQ ID NO: 7097 - RNA, 17 nt, Artificial Sequence
  Synthetic
cugcaauaugaauccca

SEQ ID NO: 7098 - RNA, 17 nt, Artificial Sequence
  Synthetic
uauggagccucccgcca

SEQ ID NO: 7099 - RNA, 17 nt, Artificial Sequence
  Synthetic
cgggugauggguggcca

SEQ ID NO: 7100 - RNA, 17 nt, Artificial Sequence
  Synthetic
ucuccuagagaaaucca

SEQ ID NO: 7101 - RNA, 17 nt, Artificial Sequence
  Synthetic
ucccagccaccucucca

SEQ ID NO: 7102 - RNA, 17 nt, Artificial Sequence
  Synthetic
cucggggcgcagcggca

SEQ ID NO: 7103 - RNA, 17 nt, Artificial Sequence
  Synthetic
cgacgucaugcagggca

SEQ ID NO: 7104 - RNA, 17 nt, Artificial Sequence
  Synthetic
cugcaugacgucgggca

SEQ ID NO: 7105 - RNA, 17 nt, Artificial Sequence
  Synthetic
gacuuagagagcuggca

SEQ ID NO: 7106 - RNA, 17 nt, Artificial Sequence
  Synthetic
cugcccgacgucaugca

SEQ ID NO: 7107 - RNA, 17 nt, Artificial Sequence
  Synthetic
cucgcugaagugcugca

SEQ ID NO: 7108 - RNA, 17 nt, Artificial Sequence
  Synthetic
agccauucaccagugca

SEQ ID NO: 7109 - RNA, 17 nt, Artificial Sequence
  Synthetic
cacgcacagaacacuca

SEQ ID NO: 7110 - RNA, 17 nt, Artificial Sequence
  Synthetic
gucggacuugaccguca

SEQ ID NO: 7111 - RNA, 17 nt, Artificial Sequence
  Synthetic
accaacccgcgggguca

SEQ ID NO: 7112 - RNA, 17 nt, Artificial Sequence
  Synthetic
aggcccagcucaaaaga

SEQ ID NO: 7113 - RNA, 17 nt, Artificial Sequence
  Synthetic
gcuuccggccuggcaga

SEQ ID NO: 7114 - RNA, 17 nt, Artificial Sequence
  Synthetic
ccugggggcggaagaga

SEQ ID NO: 7115 - RNA, 17 nt, Artificial Sequence
  Synthetic
cuugaugcgcuuagaga

SEQ ID NO: 7116 - RNA, 17 nt, Artificial Sequence
  Synthetic
gcugacggagagcgaga

SEQ ID NO: 7117 - RNA, 17 nt, Artificial Sequence
  Synthetic
gcgcaucaagcucgaga

SEQ ID NO: 7118 - RNA, 17 nt, Artificial Sequence
  Synthetic
ucggaccgcauagacga

SEQ ID NO: 7119 - RNA, 17 nt, Artificial Sequence
  Synthetic
acggucaaguccgacga

SEQ ID NO: 7120 - RNA, 17 nt, Artificial Sequence
  Synthetic
caccuggccgaggccga

SEQ ID NO: 7121 - RNA, 17 nt, Artificial Sequence
  Synthetic
gucuccgaagcuaagga

SEQ ID NO: 7122 - RNA, 17 nt, Artificial Sequence
  Synthetic
ggggggcgucgccagga

SEQ ID NO: 7123 - RNA, 17 nt, Artificial Sequence
  Synthetic
agguuggagacagagga

SEQ ID NO: 7124 - RNA, 17 nt, Artificial Sequence
  Synthetic
gggcggauugcagagga

SEQ ID NO: 7125 - RNA, 17 nt, Artificial Sequence
  Synthetic
ggggcugggagggagga

SEQ ID NO: 7126 - RNA, 17 nt, Artificial Sequence
  Synthetic
ccggggagcuggacgga

SEQ ID NO: 7127 - RNA, 17 nt, Artificial Sequence
  Synthetic
guguggcaguuuucgga

SEQ ID NO: 7128 - RNA, 17 nt, Artificial Sequence
  Synthetic
ggauugcagaggaggga

SEQ ID NO: 7129 - RNA, 17 nt, Artificial Sequence
  Synthetic
uugaccgggggcuggga

SEQ ID NO: 7130 - RNA, 17 nt, Artificial Sequence
  Synthetic
uggagagguggcuggga

SEQ ID NO: 7131 - RNA, 17 nt, Artificial Sequence
  Synthetic
ccgcccggggagcugga

SEQ ID NO: 7132 - RNA, 17 nt, Artificial Sequence
  Synthetic
gcggcacgggaagugga

SEQ ID NO: 7133 - RNA, 17 nt, Artificial Sequence
  Synthetic
gcccaggaccuggugga

SEQ ID NO: 7134 - RNA, 17 nt, Artificial Sequence
  Synthetic
caaaucgucccccauga

SEQ ID NO: 7135 - RNA, 17 nt, Artificial Sequence
  Synthetic
ucugcaccuaguccuga

SEQ ID NO: 7136 - RNA, 17 nt, Artificial Sequence
  Synthetic
ggaggaggaggagcuga

SEQ ID NO: 7137 - RNA, 17 nt, Artificial Sequence
  Synthetic
caaaggcacucggguga

SEQ ID NO: 7138 - RNA, 17 nt, Artificial Sequence
  Synthetic
ggcccggaccacuaaua

SEQ ID NO: 7139 - RNA, 17 nt, Artificial Sequence
  Synthetic
gcaguaaccuuugcaua

SEQ ID NO: 7140 - RNA, 17 nt, Artificial Sequence
  Synthetic
agcgagaggguggacua

SEQ ID NO: 7141 - RNA, 17 nt, Artificial Sequence
  Synthetic
uggagucuccgaagcua

SEQ ID NO: 7142 - RNA, 17 nt, Artificial Sequence
  Synthetic
guugaauccaauggcua

SEQ ID NO: 7143 - RNA, 17 nt, Artificial Sequence
  Synthetic
cacagguugcacuugua

SEQ ID NO: 7144 - RNA, 17 nt, Artificial Sequence
  Synthetic
aauuuucucagaacuua

SEQ ID NO: 7145 - RNA, 17 nt, Artificial Sequence
  Synthetic
ucggugguggacuaaac

SEQ ID NO: 7146 - RNA, 17 nt, Artificial Sequence
  Synthetic
accugaucccggagaac

SEQ ID NO: 7147 - RNA, 17 nt, Artificial Sequence
  Synthetic
agcacuccucggagaac

SEQ ID NO: 7148 - RNA, 17 nt, Artificial Sequence
  Synthetic
caccggcgcagccacac

SEQ ID NO: 7149 - RNA, 17 nt, Artificial Sequence
  Synthetic
ccgaggccgagggccac

SEQ ID NO: 7150 - RNA, 17 nt, Artificial Sequence
  Synthetic
ugcacgcguggucgcac

SEQ ID NO: 7151 - RNA, 17 nt, Artificial Sequence
  Synthetic
ucggggcgcagcggcac

SEQ ID NO: 7152 - RNA, 17 nt, Artificial Sequence
  Synthetic
caagagaaaccaugcac

SEQ ID NO: 7153 - RNA, 17 nt, Artificial Sequence
  Synthetic
gcaaccugguggugcac

SEQ ID NO: 7154 - RNA, 17 nt, Artificial Sequence
  Synthetic
gcagcagcuuuuuggac

SEQ ID NO: 7155 - RNA, 17 nt, Artificial Sequence
  Synthetic
caugacuuggacuugac

SEQ ID NO: 7156 - RNA, 17 nt, Artificial Sequence
  Synthetic
acccgagugccuuugac

SEQ ID NO: 7157 - RNA, 17 nt, Artificial Sequence
  Synthetic
caaauuucagagcaacc

SEQ ID NO: 7158 - RNA, 17 nt, Artificial Sequence
  Synthetic
gccagcuccccggaacc

SEQ ID NO: 7159 - RNA, 17 nt, Artificial Sequence
  Synthetic
ugcgccggugcaccacc

SEQ ID NO: 7160 - RNA, 17 nt, Artificial Sequence
  Synthetic
gcauaagcgcggccacc

SEQ ID NO: 7161 - RNA, 17 nt, Artificial Sequence
  Synthetic
cagcgaggccuuccacc

SEQ ID NO: 7162 - RNA, 17 nt, Artificial Sequence
  Synthetic
gcuucucgcccaggacc

SEQ ID NO: 7163 - RNA, 17 nt, Artificial Sequence
  Synthetic
augacuuggacuugacc

SEQ ID NO: 7164 - RNA, 17 nt, Artificial Sequence
  Synthetic
aaccugcuaagaauacc

SEQ ID NO: 7165 - RNA, 17 nt, Artificial Sequence
  Synthetic
aagggcggcuugcuacc

SEQ ID NO: 7166 - RNA, 17 nt, Artificial Sequence
  Synthetic
cgaccacgcgugcaccc

SEQ ID NO: 7167 - RNA, 17 nt, Artificial Sequence
  Synthetic
gaaaauuugaagccccc

SEQ ID NO: 7168 - RNA, 17 nt, Artificial Sequence
  Synthetic
ccaucucuuccgccccc

SEQ ID NO: 7169 - RNA, 17 nt, Artificial Sequence
  Synthetic
uccucccucccagcccc

SEQ ID NO: 7170 - RNA, 17 nt, Artificial Sequence
  Synthetic
ggaguucgaccugcccc

SEQ ID NO: 7171 - RNA, 17 nt, Artificial Sequence
  Synthetic
ccuccguccagcucccc

SEQ ID NO: 7172 - RNA, 17 nt, Artificial Sequence
  Synthetic
ggccgcggcugcucccc

SEQ ID NO: 7173 - RNA, 17 nt, Artificial Sequence
  Synthetic
agcccaccgcugucccc

SEQ ID NO: 7174 - RNA, 17 nt, Artificial Sequence
  Synthetic
gcuucuccacaccgccc

SEQ ID NO: 7175 - RNA, 17 nt, Artificial Sequence
  Synthetic
ccgaggccgacucgccc

SEQ ID NO: 7176 - RNA, 17 nt, Artificial Sequence
  Synthetic
gcuuaugcuucucgccc

SEQ ID NO: 7177 - RNA, 17 nt, Artificial Sequence
  Synthetic
auuagugguccgggccc

SEQ ID NO: 7178 - RNA, 17 nt, Artificial Sequence
  Synthetic
ggcggaagagauggccc

SEQ ID NO: 7179 - RNA, 17 nt, Artificial Sequence
  Synthetic
uugagcugggccugccc

SEQ ID NO: 7180 - RNA, 17 nt, Artificial Sequence
  Synthetic
cuccaccgccagcuccc

SEQ ID NO: 7181 - RNA, 17 nt, Artificial Sequence
  Synthetic
cccuccguccagcuccc

SEQ ID NO: 7182 - RNA, 17 nt, Artificial Sequence
  Synthetic
uggccgcggcugcuccc

SEQ ID NO: 7183 - RNA, 17 nt, Artificial Sequence
  Synthetic
cugcaaccauuccagcc

SEQ ID NO: 7184 - RNA, 17 nt, Artificial Sequence
  Synthetic
cggcuucgggcugagcc

SEQ ID NO: 7185 - RNA, 17 nt, Artificial Sequence
  Synthetic
cgcuucuccacaccgcc

SEQ ID NO: 7186 - RNA, 17 nt, Artificial Sequence
  Synthetic
ccaccgcauagagcgcc

SEQ ID NO: 7187 - RNA, 17 nt, Artificial Sequence
  Synthetic
cccgaggccgacucgcc

SEQ ID NO: 7188 - RNA, 17 nt, Artificial Sequence
  Synthetic
ggagggggggcgucgcc

SEQ ID NO: 7189 - RNA, 17 nt, Artificial Sequence
  Synthetic
auagggcugggccggcc

SEQ ID NO: 7190 - RNA, 17 nt, Artificial Sequence
  Synthetic
gagagaggcuuccggcc

SEQ ID NO: 7191 - RNA, 17 nt, Artificial Sequence
  Synthetic
uguugggcaucgcggcc

SEQ ID NO: 7192 - RNA, 17 nt, Artificial Sequence
  Synthetic
ggcccucggccucggcc

SEQ ID NO: 7193 - RNA, 17 nt, Artificial Sequence
  Synthetic
cugggccugcccgggcc

SEQ ID NO: 7194 - RNA, 17 nt, Artificial Sequence
  Synthetic
uauuagugguccgggcc

SEQ ID NO: 7195 - RNA, 17 nt, Artificial Sequence
  Synthetic
gcuucagcuugcuggcc

SEQ ID NO: 7196 - RNA, 17 nt, Artificial Sequence
  Synthetic
ucgggugauggguggcc

SEQ ID NO: 7197 - RNA, 17 nt, Artificial Sequence
  Synthetic
uuugagcugggccugcc

SEQ ID NO: 7198 - RNA, 17 nt, Artificial Sequence
  Synthetic
gggaucuuugagcugcc

SEQ ID NO: 7199 - RNA, 17 nt, Artificial Sequence
  Synthetic
gaaagcgcccuucugcc

SEQ ID NO: 7200 - RNA, 17 nt, Artificial Sequence
  Synthetic
accaagucgcuggugcc

SEQ ID NO: 7201 - RNA, 17 nt, Artificial Sequence
  Synthetic
ucucucgauacugaucc

SEQ ID NO: 7202 - RNA, 17 nt, Artificial Sequence
  Synthetic
cgaccccaaccugaucc

SEQ ID NO: 7203 - RNA, 17 nt, Artificial Sequence
  Synthetic
gguggcgcgccgccucc

SEQ ID NO: 7204 - RNA, 17 nt, Artificial Sequence
  Synthetic
ccggcuacgcggccucc

SEQ ID NO: 7205 - RNA, 17 nt, Artificial Sequence
  Synthetic
ccucguccccguucucc

SEQ ID NO: 7206 - RNA, 17 nt, Artificial Sequence
  Synthetic
ggccuuccaccaggucc

SEQ ID NO: 7207 - RNA, 17 nt, Artificial Sequence
  Synthetic
ccccauauuaguggucc

SEQ ID NO: 7208 - RNA, 17 nt, Artificial Sequence
  Synthetic
uagcaagccgcccuucc

SEQ ID NO: 7209 - RNA, 17 nt, Artificial Sequence
  Synthetic
cgcuggugccggguucc

SEQ ID NO: 7210 - RNA, 17 nt, Artificial Sequence
  Synthetic
uaggagacuuagagagc

SEQ ID NO: 7211 - RNA, 17 nt, Artificial Sequence
  Synthetic
gaaggggcucagcgagc

SEQ ID NO: 7212 - RNA, 17 nt, Artificial Sequence
  Synthetic
cacaccgcccggggagc

SEQ ID NO: 7213 - RNA, 17 nt, Artificial Sequence
  Synthetic
gccggguuccggggagc

SEQ ID NO: 7214 - RNA, 17 nt, Artificial Sequence
  Synthetic
ucugcccucuuuugagc

SEQ ID NO: 7215 - RNA, 17 nt, Artificial Sequence
  Synthetic
ccuggaggccgcguagc

SEQ ID NO: 7216 - RNA, 17 nt, Artificial Sequence
  Synthetic
auccugguauucuuagc

SEQ ID NO: 7217 - RNA, 17 nt, Artificial Sequence
  Synthetic
aagggauaccaacccgc

SEQ ID NO: 7218 - RNA, 17 nt, Artificial Sequence
  Synthetic
aaguccccugaccccgc

SEQ ID NO: 7219 - RNA, 17 nt, Artificial Sequence
  Synthetic
cgcccguguggcugcgc

SEQ ID NO: 7220 - RNA, 17 nt, Artificial Sequence
  Synthetic
uaugcgguccgacucgc

SEQ ID NO: 7221 - RNA, 17 nt, Artificial Sequence
  Synthetic
ccacgagaacagcucgc

SEQ ID NO: 7222 - RNA, 17 nt, Artificial Sequence
  Synthetic
uacucgcaguggcucgc

SEQ ID NO: 7223 - RNA, 17 nt, Artificial Sequence
  Synthetic
gcugcccaccaagucgc

SEQ ID NO: 7224 - RNA, 17 nt, Artificial Sequence
  Synthetic
caccgcuguccccaggc

SEQ ID NO: 7225 - RNA, 17 nt, Artificial Sequence
  Synthetic
gcgcccuucugccaggc

SEQ ID NO: 7226 - RNA, 17 nt, Artificial Sequence
  Synthetic
guguugggcaucgcggc

SEQ ID NO: 7227 - RNA, 17 nt, Artificial Sequence
  Synthetic
uaaccuuugcauagggc

SEQ ID NO: 7228 - RNA, 17 nt, Artificial Sequence
  Synthetic
gugguccgggcccgggc

SEQ ID NO: 7229 - RNA, 17 nt, Artificial Sequence
  Synthetic
ccugcaugacgucgggc

SEQ ID NO: 7230 - RNA, 17 nt, Artificial Sequence
  Synthetic
uggacuugaccgggggc

SEQ ID NO: 7231 - RNA, 17 nt, Artificial Sequence
  Synthetic
gcaucgcggccgggggc

SEQ ID NO: 7232 - RNA, 17 nt, Artificial Sequence
  Synthetic
uuugcauagggcugggc

SEQ ID NO: 7233 - RNA, 17 nt, Artificial Sequence
  Synthetic
cuagagaaauccauggc

SEQ ID NO: 7234 - RNA, 17 nt, Artificial Sequence
  Synthetic
gcggcuugcuaccuggc

SEQ ID NO: 7235 - RNA, 17 nt, Artificial Sequence
  Synthetic
agacuuagagagcuggc

SEQ ID NO: 7236 - RNA, 17 nt, Artificial Sequence
  Synthetic
ucccauggagagguggc

SEQ ID NO: 7237 - RNA, 17 nt, Artificial Sequence
  Synthetic
gacgaagacucgguggc

SEQ ID NO: 7238 - RNA, 17 nt, Artificial Sequence
  Synthetic
ccugcccgacgucaugc

SEQ ID NO: 7239 - RNA, 17 nt, Artificial Sequence
  Synthetic
uguacauguguagcugc

SEQ ID NO: 7240 - RNA, 17 nt, Artificial Sequence
  Synthetic
ggacuugagcgcgcugc

SEQ ID NO: 7241 - RNA, 17 nt, Artificial Sequence
  Synthetic
guccaaaaagcugcugc

SEQ ID NO: 7242 - RNA, 17 nt, Artificial Sequence
  Synthetic
caccaagucgcuggugc

SEQ ID NO: 7243 - RNA, 17 nt, Artificial Sequence
  Synthetic
guggcgcuucagcuugc

SEQ ID NO: 7244 - RNA, 17 nt, Artificial Sequence
  Synthetic
ccccguucuccgggauc

SEQ ID NO: 7245 - RNA, 17 nt, Artificial Sequence
  Synthetic
cccugucaaaggcacuc

SEQ ID NO: 7246 - RNA, 17 nt, Artificial Sequence
  Synthetic
ccgggcgagucggccuc

SEQ ID NO: 7247 - RNA, 17 nt, Artificial Sequence
  Synthetic
cuggacggagggaucuc

SEQ ID NO: 7248 - RNA, 17 nt, Artificial Sequence
  Synthetic
acacaucuugagcucuc

SEQ ID NO: 7249 - RNA, 17 nt, Artificial Sequence
  Synthetic
uccucguccccguucuc

SEQ ID NO: 7250 - RNA, 17 nt, Artificial Sequence
  Synthetic
augcccugcaugacguc

SEQ ID NO: 7251 - RNA, 17 nt, Artificial Sequence
  Synthetic
uaccaacccgcgggguc

SEQ ID NO: 7252 - RNA, 17 nt, Artificial Sequence
  Synthetic
gccccauauuagugguc

SEQ ID NO: 7253 - RNA, 17 nt, Artificial Sequence
  Synthetic
ggcaaaaggcgauuguc

SEQ ID NO: 7254 - RNA, 17 nt, Artificial Sequence
  Synthetic
cggguugguaucccuuc

SEQ ID NO: 7255 - RNA, 17 nt, Artificial Sequence
  Synthetic
guaucgagagaggcuuc

SEQ ID NO: 7256 - RNA, 17 nt, Artificial Sequence
  Synthetic
ggguggacuacggcuuc

SEQ ID NO: 7257 - RNA, 17 nt, Artificial Sequence
  Synthetic
ucgcuggugccggguuc

SEQ ID NO: 7258 - RNA, 17 nt, Artificial Sequence
  Synthetic
caggcccagcucaaaag

SEQ ID NO: 7259 - RNA, 17 nt, Artificial Sequence
  Synthetic
gugaagaaccuagaaag

SEQ ID NO: 7260 - RNA, 17 nt, Artificial Sequence
  Synthetic
uucuuagcagguuaaag

SEQ ID NO: 7261 - RNA, 17 nt, Artificial Sequence
  Synthetic
cgaggaagaggaagaag

SEQ ID NO: 7262 - RNA, 17 nt, Artificial Sequence
  Synthetic
ugaugcgcuuagagaag

SEQ ID NO: 7263 - RNA, 17 nt, Artificial Sequence
  Synthetic
ggaggacgacgaggaag

SEQ ID NO: 7264 - RNA, 17 nt, Artificial Sequence
  Synthetic
ggaagaagaggaggaag

SEQ ID NO: 7265 - RNA, 17 nt, Artificial Sequence
  Synthetic
cggggacgaggaggaag

SEQ ID NO: 7266 - RNA, 17 nt, Artificial Sequence
  Synthetic
cgcagcggcacgggaag

SEQ ID NO: 7267 - RNA, 17 nt, Artificial Sequence
  Synthetic
ggugguggacuaaacag

SEQ ID NO: 7268 - RNA, 17 nt, Artificial Sequence
  Synthetic
aaagagguuggagacag

SEQ ID NO: 7269 - RNA, 17 nt, Artificial Sequence
  Synthetic
ggccggccuggggacag

SEQ ID NO: 7270 - RNA, 17 nt, Artificial Sequence
  Synthetic
aaauuugaagcccccag

SEQ ID NO: 7271 - RNA, 17 nt, Artificial Sequence
  Synthetic
gggaucucggggcgcag

SEQ ID NO: 7272 - RNA, 17 nt, Artificial Sequence
  Synthetic
agaacguguacucgcag

SEQ ID NO: 7273 - RNA, 17 nt, Artificial Sequence
  Synthetic
ggaggggcggauugcag

SEQ ID NO: 7274 - RNA, 17 nt, Artificial Sequence
  Synthetic
ccaacccgcggggucag

SEQ ID NO: 7275 - RNA, 17 nt, Artificial Sequence
  Synthetic
aggaucaguaucgagag

SEQ ID NO: 7276 - RNA, 17 nt, Artificial Sequence
  Synthetic
agcugacggagagcgag

SEQ ID NO: 7277 - RNA, 17 nt, Artificial Sequence
  Synthetic
gguuggagacagaggag

SEQ ID NO: 7278 - RNA, 17 nt, Artificial Sequence
  Synthetic
gggcugggagggaggag

SEQ ID NO: 7279 - RNA, 17 nt, Artificial Sequence
  Synthetic
gauugcagaggagggag

SEQ ID NO: 7280 - RNA, 17 nt, Artificial Sequence
  Synthetic
acuaaacagggggggag

SEQ ID NO: 7281 - RNA, 17 nt, Artificial Sequence
  Synthetic
auaugaaucccauggag

SEQ ID NO: 7282 - RNA, 17 nt, Artificial Sequence
  Synthetic
agcacgccccauauuag

SEQ ID NO: 7283 - RNA, 17 nt, Artificial Sequence
  Synthetic
ccugaucccggagaacg

SEQ ID NO: 7284 - RNA, 17 nt, Artificial Sequence
  Synthetic
ggaagaggaggacgacg

SEQ ID NO: 7285 - RNA, 17 nt, Artificial Sequence
  Synthetic
cgaggagugcuccgacg

SEQ ID NO: 7286 - RNA, 17 nt, Artificial Sequence
  Synthetic
cccggagaacggggacg

SEQ ID NO: 7287 - RNA, 17 nt, Artificial Sequence
  Synthetic
guggcucgccggcuacg

SEQ ID NO: 7288 - RNA, 17 nt, Artificial Sequence
  Synthetic
ugacuuggacuugaccg

SEQ ID NO: 7289 - RNA, 17 nt, Artificial Sequence
  Synthetic
gaagggauaccaacccg

SEQ ID NO: 7290 - RNA, 17 nt, Artificial Sequence
  Synthetic
gaaguccccugaccccg

SEQ ID NO: 7291 - RNA, 17 nt, Artificial Sequence
  Synthetic
uuuggacaggccccccg

SEQ ID NO: 7292 - RNA, 17 nt, Artificial Sequence
  Synthetic
cuucuccacaccgcccg

SEQ ID NO: 7293 - RNA, 17 nt, Artificial Sequence
  Synthetic
cgaggccgacucgcccg

SEQ ID NO: 7294 - RNA, 17 nt, Artificial Sequence
  Synthetic
cgcccggggagcagccg

SEQ ID NO: 7295 - RNA, 17 nt, Artificial Sequence
  Synthetic
ccaccuggccgaggccg

SEQ ID NO: 7296 - RNA, 17 nt, Artificial Sequence
  Synthetic
guugggcaucgcggccg

SEQ ID NO: 7297 - RNA, 17 nt, Artificial Sequence
  Synthetic
ggcacuguuaauggccg

SEQ ID NO: 7298 - RNA, 17 nt, Artificial Sequence
  Synthetic
gcgcggccaccuggccg

SEQ ID NO: 7299 - RNA, 17 nt, Artificial Sequence
  Synthetic
caaacucccguucuccg

SEQ ID NO: 7300 - RNA, 17 nt, Artificial Sequence
  Synthetic
cagcgcgcucaaguccg

SEQ ID NO: 7301 - RNA, 17 nt, Artificial Sequence
  Synthetic
gcuggugccggguuccg

SEQ ID NO: 7302 - RNA, 17 nt, Artificial Sequence
  Synthetic
ggcgagaagcauaagcg

SEQ ID NO: 7303 - RNA, 17 nt, Artificial Sequence
  Synthetic
caugcagcacuucagcg

SEQ ID NO: 7304 - RNA, 17 nt, Artificial Sequence
  Synthetic
uggccugggugcacgcg

SEQ ID NO: 7305 - RNA, 17 nt, Artificial Sequence
  Synthetic
agggauaccaacccgcg

SEQ ID NO: 7306 - RNA, 17 nt, Artificial Sequence
  Synthetic
cacgagaacagcucgcg

SEQ ID NO: 7307 - RNA, 17 nt, Artificial Sequence
  Synthetic
ugacgucgggcagggcg

SEQ ID NO: 7308 - RNA, 17 nt, Artificial Sequence
  Synthetic
gaacagcucgcggggcg

SEQ ID NO: 7309 - RNA, 17 nt, Artificial Sequence
  Synthetic
gggcgcggucgugggcg

SEQ ID NO: 7310 - RNA, 17 nt, Artificial Sequence
  Synthetic
cuccguguugggcaucg

SEQ ID NO: 7311 - RNA, 17 nt, Artificial Sequence
  Synthetic
cgggcgagucggccucg

SEQ ID NO: 7312 - RNA, 17 nt, Artificial Sequence
  Synthetic
accacgagaacagcucg

SEQ ID NO: 7313 - RNA, 17 nt, Artificial Sequence
  Synthetic
uggacggagggaucucg

SEQ ID NO: 7314 - RNA, 17 nt, Artificial Sequence
  Synthetic
cccgcgagcuguucucg

SEQ ID NO: 7315 - RNA, 17 nt, Artificial Sequence
  Synthetic
cucgcggggcgcggucg

SEQ ID NO: 7316 - RNA, 17 nt, Artificial Sequence
  Synthetic
gugguggacuaaacagg

SEQ ID NO: 7317 - RNA, 17 nt, Artificial Sequence
  Synthetic
ccucggccucggccagg

SEQ ID NO: 7318 - RNA, 17 nt, Artificial Sequence
  Synthetic
ggaagaggaagaagagg

SEQ ID NO: 7319 - RNA, 17 nt, Artificial Sequence
  Synthetic
agaagaggaggaagagg

SEQ ID NO: 7320 - RNA, 17 nt, Artificial Sequence
  Synthetic
ggacgaggaggaagagg

SEQ ID NO: 7321 - RNA, 17 nt, Artificial Sequence
  Synthetic
gagguuggagacagagg

SEQ ID NO: 7322 - RNA, 17 nt, Artificial Sequence
  Synthetic
ggggcggauugcagagg

SEQ ID NO: 7323 - RNA, 17 nt, Artificial Sequence
  Synthetic
ugaaucccauggagagg

SEQ ID NO: 7324 - RNA, 17 nt, Artificial Sequence
  Synthetic
ggagugcuccgacgagg

SEQ ID NO: 7325 - RNA, 17 nt, Artificial Sequence
  Synthetic
ggagaacggggacgagg

SEQ ID NO: 7326 - RNA, 17 nt, Artificial Sequence
  Synthetic
agaggaggaagaggagg

SEQ ID NO: 7327 - RNA, 17 nt, Artificial Sequence
  Synthetic
guuggagacagaggagg

SEQ ID NO: 7328 - RNA, 17 nt, Artificial Sequence
  Synthetic
ggaggaagaggaggagg

SEQ ID NO: 7329 - RNA, 17 nt, Artificial Sequence
  Synthetic
auugcagaggagggagg

SEQ ID NO: 7330 - RNA, 17 nt, Artificial Sequence
  Synthetic
gggggcugggagggagg

SEQ ID NO: 7331 - RNA, 17 nt, Artificial Sequence
  Synthetic
cgggcugagccuggagg

SEQ ID NO: 7332 - RNA, 17 nt, Artificial Sequence
  Synthetic
cccggggagcuggacgg

SEQ ID NO: 7333 - RNA, 17 nt, Artificial Sequence
  Synthetic
gacuuggacuugaccgg

SEQ ID NO: 7334 - RNA, 17 nt, Artificial Sequence
  Synthetic
uugggcaucgcggccgg

SEQ ID NO: 7335 - RNA, 17 nt, Artificial Sequence
  Synthetic
cggccuggggacagcgg

SEQ ID NO: 7336 - RNA, 17 nt, Artificial Sequence
  Synthetic
uuccggggagcuggcgg

SEQ ID NO: 7337 - RNA, 17 nt, Artificial Sequence
  Synthetic
ccaggcgcucuaugcgg

SEQ ID NO: 7338 - RNA, 17 nt, Artificial Sequence
  Synthetic
uugcgacgaagacucgg

SEQ ID NO: 7339 - RNA, 17 nt, Artificial Sequence
  Synthetic
gggcgagucggccucgg

SEQ ID NO: 7340 - RNA, 17 nt, Artificial Sequence
  Synthetic
uccaagugaugucucgg

SEQ ID NO: 7341 - RNA, 17 nt, Artificial Sequence
  Synthetic
ggcgucgccaggaaggg

SEQ ID NO: 7342 - RNA, 17 nt, Artificial Sequence
  Synthetic
ugguggacuaaacaggg

SEQ ID NO: 7343 - RNA, 17 nt, Artificial Sequence
  Synthetic
gacggagagcgagaggg

SEQ ID NO: 7344 - RNA, 17 nt, Artificial Sequence
  Synthetic
cggauugcagaggaggg

SEQ ID NO: 7345 - RNA, 17 nt, Artificial Sequence
  Synthetic
uugcagaggagggaggg

SEQ ID NO: 7346 - RNA, 17 nt, Artificial Sequence
  Synthetic
accgggggcugggaggg

SEQ ID NO: 7347 - RNA, 17 nt, Artificial Sequence
  Synthetic
ccguccagcuccccggg

SEQ ID NO: 7348 - RNA, 17 nt, Artificial Sequence
  Synthetic
gagaaauccauggcggg

SEQ ID NO: 7349 - RNA, 17 nt, Artificial Sequence
  Synthetic
ggcgagucggccucggg

SEQ ID NO: 7350 - RNA, 17 nt, Artificial Sequence
  Synthetic
gguggacuaaacagggg

SEQ ID NO: 7351 - RNA, 17 nt, Artificial Sequence
  Synthetic
uuugaagcccccagggg

SEQ ID NO: 7352 - RNA, 17 nt, Artificial Sequence
  Synthetic
cugggagggaggagggg

SEQ ID NO: 7353 - RNA, 17 nt, Artificial Sequence
  Synthetic
ugcagaggagggagggg

SEQ ID NO: 7354 - RNA, 17 nt, Artificial Sequence
  Synthetic
cauagagcgccuggggg

SEQ ID NO: 7355 - RNA, 17 nt, Artificial Sequence
  Synthetic
agcccccaggggugggg

SEQ ID NO: 7356 - RNA, 17 nt, Artificial Sequence
  Synthetic
ggcacucgggugauggg

SEQ ID NO: 7357 - RNA, 17 nt, Artificial Sequence
  Synthetic
cuugaccgggggcuggg

SEQ ID NO: 7358 - RNA, 17 nt, Artificial Sequence
  Synthetic
aacagggggggaguggg

SEQ ID NO: 7359 - RNA, 17 nt, Artificial Sequence
  Synthetic
gguacuacgccgaaugg

SEQ ID NO: 7360 - RNA, 17 nt, Artificial Sequence
  Synthetic
ccuagagaaauccaugg

SEQ ID NO: 7361 - RNA, 17 nt, Artificial Sequence
  Synthetic
ggacuugaccgucaugg

SEQ ID NO: 7362 - RNA, 17 nt, Artificial Sequence
  Synthetic
auuucagagcaaccugg

SEQ ID NO: 7363 - RNA, 17 nt, Artificial Sequence
  Synthetic
ucucgcccaggaccugg

SEQ ID NO: 7364 - RNA, 17 nt, Artificial Sequence
  Synthetic
cuucgggcugagccugg

SEQ ID NO: 7365 - RNA, 17 nt, Artificial Sequence
  Synthetic
ccgcauagagcgccugg

SEQ ID NO: 7366 - RNA, 17 nt, Artificial Sequence
  Synthetic
aucuuugagcugccugg

SEQ ID NO: 7367 - RNA, 17 nt, Artificial Sequence
  Synthetic
ggguuccggggagcugg

SEQ ID NO: 7368 - RNA, 17 nt, Artificial Sequence
  Synthetic
agcggcacgggaagugg

SEQ ID NO: 7369 - RNA, 17 nt, Artificial Sequence
  Synthetic
cgcgcucaaguccgugg

SEQ ID NO: 7370 - RNA, 17 nt, Artificial Sequence
  Synthetic
gcgagcuguucucgugg

SEQ ID NO: 7371 - RNA, 17 nt, Artificial Sequence
  Synthetic
ggcgcucuaugcggugg

SEQ ID NO: 7372 - RNA, 17 nt, Artificial Sequence
  Synthetic
aagugaugucucggugg

SEQ ID NO: 7373 - RNA, 17 nt, Artificial Sequence
  Synthetic
cggcaccagcgacuugg

SEQ ID NO: 7374 - RNA, 17 nt, Artificial Sequence
  Synthetic
ggguacuacgccgaaug

SEQ ID NO: 7375 - RNA, 17 nt, Artificial Sequence
  Synthetic
cggacuugaccgucaug

SEQ ID NO: 7376 - RNA, 17 nt, Artificial Sequence
  Synthetic
gcaugugcgucuucaug

SEQ ID NO: 7377 - RNA, 17 nt, Artificial Sequence
  Synthetic
cccggaccacuaauaug

SEQ ID NO: 7378 - RNA, 17 nt, Artificial Sequence
  Synthetic
cccccaggcgcucuaug

SEQ ID NO: 7379 - RNA, 17 nt, Artificial Sequence
  Synthetic
cagugccaucgucuaug

SEQ ID NO: 7380 - RNA, 17 nt, Artificial Sequence
  Synthetic
gacacuugugaguacug

SEQ ID NO: 7381 - RNA, 17 nt, Artificial Sequence
  Synthetic
cgucgcaagugucccug

SEQ ID NO: 7382 - RNA, 17 nt, Artificial Sequence
  Synthetic
accgcauagagcgccug

SEQ ID NO: 7383 - RNA, 17 nt, Artificial Sequence
  Synthetic
agggcugggccggccug

SEQ ID NO: 7384 - RNA, 17 nt, Artificial Sequence
  Synthetic
aggggcucagcgagcug

SEQ ID NO: 7385 - RNA, 17 nt, Artificial Sequence
  Synthetic
ccuuugacagggugcug

SEQ ID NO: 7386 - RNA, 17 nt, Artificial Sequence
  Synthetic
aagucaugcgaguucug

SEQ ID NO: 7387 - RNA, 17 nt, Artificial Sequence
  Synthetic
agggcuucucgcccgug

SEQ ID NO: 7388 - RNA, 17 nt, Artificial Sequence
  Synthetic
cagcuccccgggcggug

SEQ ID NO: 7389 - RNA, 17 nt, Artificial Sequence
  Synthetic
aggcgcucuaugcggug

SEQ ID NO: 7390 - RNA, 17 nt, Artificial Sequence
  Synthetic
ugaagcccccaggggug

SEQ ID NO: 7391 - RNA, 17 nt, Artificial Sequence
  Synthetic
agagagcucaagaugug

SEQ ID NO: 7392 - RNA, 17 nt, Artificial Sequence
  Synthetic
ucuccgggaucagguug

SEQ ID NO: 7393 - RNA, 17 nt, Artificial Sequence
  Synthetic
uggguacuacgccgaau

SEQ ID NO: 7394 - RNA, 17 nt, Artificial Sequence
  Synthetic
ggaggcuccauagccau

SEQ ID NO: 7395 - RNA, 17 nt, Artificial Sequence
  Synthetic
cccagccaccucuccau

SEQ ID NO: 7396 - RNA, 17 nt, Artificial Sequence
  Synthetic
ugcaguaaccuuugcau

SEQ ID NO: 7397 - RNA, 17 nt, Artificial Sequence
  Synthetic
ucggacuugaccgucau

SEQ ID NO: 7398 - RNA, 17 nt, Artificial Sequence
  Synthetic
aaaggcacucgggugau

SEQ ID NO: 7399 - RNA, 17 nt, Artificial Sequence
  Synthetic
gcccggaccacuaauau

SEQ ID NO: 7400 - RNA, 17 nt, Artificial Sequence
  Synthetic
guucucgcucuugaacu

SEQ ID NO: 7401 - RNA, 17 nt, Artificial Sequence
  Synthetic
acccugucaaaggcacu

SEQ ID NO: 7402 - RNA, 17 nt, Artificial Sequence
  Synthetic
accaccgagacaucacu

SEQ ID NO: 7403 - RNA, 17 nt, Artificial Sequence
  Synthetic
cacuugcgacgaagacu

SEQ ID NO: 7404 - RNA, 17 nt, Artificial Sequence
  Synthetic
acccggcaccagcgacu

SEQ ID NO: 7405 - RNA, 17 nt, Artificial Sequence
  Synthetic
gguaucccuucaggacu

SEQ ID NO: 7406 - RNA, 17 nt, Artificial Sequence
  Synthetic
gcagaacucgcaugacu

SEQ ID NO: 7407 - RNA, 17 nt, Artificial Sequence
  Synthetic
agugucccuguggcccu

SEQ ID NO: 7408 - RNA, 17 nt, Artificial Sequence
  Synthetic
caccgcauagagcgccu

SEQ ID NO: 7409 - RNA, 17 nt, Artificial Sequence
  Synthetic
uagggcugggccggccu

SEQ ID NO: 7410 - RNA, 17 nt, Artificial Sequence
  Synthetic
ccuguggcccucggccu

SEQ ID NO: 7411 - RNA, 17 nt, Artificial Sequence
  Synthetic
cccgggcgagucggccu

SEQ ID NO: 7412 - RNA, 17 nt, Artificial Sequence
  Synthetic
cuucagcuugcuggccu

SEQ ID NO: 7413 - RNA, 17 nt, Artificial Sequence
  Synthetic
cucgucggagcacuccu

SEQ ID NO: 7414 - RNA, 17 nt, Artificial Sequence
  Synthetic
gccuuccaccagguccu

SEQ ID NO: 7415 - RNA, 17 nt, Artificial Sequence
  Synthetic
aaggggcucagcgagcu

SEQ ID NO: 7416 - RNA, 17 nt, Artificial Sequence
  Synthetic
cugcccucuuuugagcu

SEQ ID NO: 7417 - RNA, 17 nt, Artificial Sequence
  Synthetic
aaccuuugcauagggcu

SEQ ID NO: 7418 - RNA, 17 nt, Artificial Sequence
  Synthetic
ggacuugaccgggggcu

SEQ ID NO: 7419 - RNA, 17 nt, Artificial Sequence
  Synthetic
cccauggagagguggcu

SEQ ID NO: 7420 - RNA, 17 nt, Artificial Sequence
  Synthetic
guacauguguagcugcu

SEQ ID NO: 7421 - RNA, 17 nt, Artificial Sequence
  Synthetic
uccaaaaagcugcugcu

SEQ ID NO: 7422 - RNA, 17 nt, Artificial Sequence
  Synthetic
gcuggacggagggaucu

SEQ ID NO: 7423 - RNA, 17 nt, Artificial Sequence
  Synthetic
cacaucuugagcucucu

SEQ ID NO: 7424 - RNA, 17 nt, Artificial Sequence
  Synthetic
ccgccauggauuucucu

SEQ ID NO: 7425 - RNA, 17 nt, Artificial Sequence
  Synthetic
ggguccaagugaugucu

SEQ ID NO: 7426 - RNA, 17 nt, Artificial Sequence
  Synthetic
gucuccaaccucuuucu

SEQ ID NO: 7427 - RNA, 17 nt, Artificial Sequence
  Synthetic
cucgguggccggcgagu

SEQ ID NO: 7428 - RNA, 17 nt, Artificial Sequence
  Synthetic
cugcuccccgggcgagu

SEQ ID NO: 7429 - RNA, 17 nt, Artificial Sequence
  Synthetic
cuaaacagggggggagu

SEQ ID NO: 7430 - RNA, 17 nt, Artificial Sequence
  Synthetic
caugcccugcaugacgu

SEQ ID NO: 7431 - RNA, 17 nt, Artificial Sequence
  Synthetic
ggcgcggucgugggcgu

SEQ ID NO: 7432 - RNA, 17 nt, Artificial Sequence
  Synthetic
gccuuuugccuccucgu

SEQ ID NO: 7433 - RNA, 17 nt, Artificial Sequence
  Synthetic
gguggagagaccgucgu

SEQ ID NO: 7434 - RNA, 17 nt, Artificial Sequence
  Synthetic
ucgcggggcgcggucgu

SEQ ID NO: 7435 - RNA, 17 nt, Artificial Sequence
  Synthetic
guucuccgggaucaggu

SEQ ID NO: 7436 - RNA, 17 nt, Artificial Sequence
  Synthetic
agaaccuagaaagaggu

SEQ ID NO: 7437 - RNA, 17 nt, Artificial Sequence
  Synthetic
ggccuggggacagcggu

SEQ ID NO: 7438 - RNA, 17 nt, Artificial Sequence
  Synthetic
caggcgcucuaugcggu

SEQ ID NO: 7439 - RNA, 17 nt, Artificial Sequence
  Synthetic
ccccugaccccgcgggu

SEQ ID NO: 7440 - RNA, 17 nt, Artificial Sequence
  Synthetic
uugaagcccccaggggu

SEQ ID NO: 7441 - RNA, 17 nt, Artificial Sequence
  Synthetic
ggcaccagcgacuuggu

SEQ ID NO: 7442 - RNA, 17 nt, Artificial Sequence
  Synthetic
acacuugugaguacugu

SEQ ID NO: 7443 - RNA, 17 nt, Artificial Sequence
  Synthetic
guacacguucuccgugu

SEQ ID NO: 7444 - RNA, 17 nt, Artificial Sequence
  Synthetic
gcacagguugcacuugu

SEQ ID NO: 7445 - RNA, 17 nt, Artificial Sequence
  Synthetic
cuucacacacccccauu

SEQ ID NO: 7446 - RNA, 17 nt, Artificial Sequence
  Synthetic
gaucccuuccuuagcuu

SEQ ID NO: 7447 - RNA, 17 nt, Artificial Sequence
  Synthetic
aggguggacuacggcuu

SEQ ID NO: 7448 - RNA, 17 nt, Artificial Sequence
  Synthetic
uucuccgggaucagguu

SEQ ID NO: 7449 - RNA, 17 nt, Artificial Sequence
  Synthetic
uacacguucuccguguu

SEQ ID NO: 7450 - RNA, 17 nt, Artificial Sequence
  Synthetic
gcccagcagcagcuuuu

SEQ ID NO: 7451 - RNA, 17 nt, Artificial Sequence
  Synthetic
agauguguggcaguuuu

SEQ ID NO: 7452 - RNA, 20 nt, Artificial Sequence
  Synthetic
ugcuccgacgaggaggcaaa

SEQ ID NO: 7453 - RNA, 20 nt, Artificial Sequence
  Synthetic
gguauucuuagcagguuaaa

SEQ ID NO: 7454 - RNA, 20 nt, Artificial Sequence
  Synthetic
ggugcugcgguugaauccaa

SEQ ID NO: 7455 - RNA, 20 nt, Artificial Sequence
  Synthetic
gccggcccagcccuaugcaa

SEQ ID NO: 7456 - RNA, 20 nt, Artificial Sequence
  Synthetic
caaccgcagcacccugucaa

SEQ ID NO: 7457 - RNA, 20 nt, Artificial Sequence
  Synthetic
aggcuuccggccuggcagaa

SEQ ID NO: 7458 - RNA, 20 nt, Artificial Sequence
  Synthetic
agcuugaugcgcuuagagaa

SEQ ID NO: 7459 - RNA, 20 nt, Artificial Sequence
  Synthetic
cccaaccugaucccggagaa

SEQ ID NO: 7460 - RNA, 20 nt, Artificial Sequence
  Synthetic
ucggagcacuccucggagaa

SEQ ID NO: 7461 - RNA, 20 nt, Artificial Sequence
  Synthetic
ucucuggguacuacgccgaa

SEQ ID NO: 7462 - RNA, 20 nt, Artificial Sequence
  Synthetic
gagucuccgaagcuaaggaa

SEQ ID NO: 7463 - RNA, 20 nt, Artificial Sequence
  Synthetic
agggggggcgucgccaggaa

SEQ ID NO: 7464 - RNA, 20 nt, Artificial Sequence
  Synthetic
ggcuugcuaccuggcuggaa

SEQ ID NO: 7465 - RNA, 20 nt, Artificial Sequence
  Synthetic
auucugcaccuaguccugaa

SEQ ID NO: 7466 - RNA, 20 nt, Artificial Sequence
  Synthetic
agaaaccaugcacuggugaa

SEQ ID NO: 7467 - RNA, 20 nt, Artificial Sequence
  Synthetic
caaauuuucucagaacuuaa

SEQ ID NO: 7468 - RNA, 20 nt, Artificial Sequence
  Synthetic
ugguauucuuagcagguuaa

SEQ ID NO: 7469 - RNA, 20 nt, Artificial Sequence
  Synthetic
auagacgauggcacuguuaa

SEQ ID NO: 7470 - RNA, 20 nt, Artificial Sequence
  Synthetic
ucucggugguggacuaaaca

SEQ ID NO: 7471 - RNA, 20 nt, Artificial Sequence
  Synthetic
cccggccgcgaugcccaaca

SEQ ID NO: 7472 - RNA, 20 nt, Artificial Sequence
  Synthetic
aucuacuuagaaagcgaaca

SEQ ID NO: 7473 - RNA, 20 nt, Artificial Sequence
  Synthetic
ggugcaccggcgcagccaca

SEQ ID NO: 7474 - RNA, 20 nt, Artificial Sequence
  Synthetic
ggccgaggccgagggccaca

SEQ ID NO: 7475 - RNA, 20 nt, Artificial Sequence
  Synthetic
ucacccgagugccuuugaca

SEQ ID NO: 7476 - RNA, 20 nt, Artificial Sequence
  Synthetic
gcucuugaacuuggccacca

SEQ ID NO: 7477 - RNA, 20 nt, Artificial Sequence
  Synthetic
gagaaaauuugaagccccca

SEQ ID NO: 7478 - RNA, 20 nt, Artificial Sequence
  Synthetic
ugucugcaauaugaauccca

SEQ ID NO: 7479 - RNA, 20 nt, Artificial Sequence
  Synthetic
ggcuauggagccucccgcca

SEQ ID NO: 7480 - RNA, 20 nt, Artificial Sequence
  Synthetic
acucgggugauggguggcca

SEQ ID NO: 7481 - RNA, 20 nt, Artificial Sequence
  Synthetic
aagucuccuagagaaaucca

SEQ ID NO: 7482 - RNA, 20 nt, Artificial Sequence
  Synthetic
ccuucccagccaccucucca

SEQ ID NO: 7483 - RNA, 20 nt, Artificial Sequence
  Synthetic
gaucucggggcgcagcggca

SEQ ID NO: 7484 - RNA, 20 nt, Artificial Sequence
  Synthetic
gcccgacgucaugcagggca

SEQ ID NO: 7485 - RNA, 20 nt, Artificial Sequence
  Synthetic
gcccugcaugacgucgggca

SEQ ID NO: 7486 - RNA, 20 nt, Artificial Sequence
  Synthetic
ggagacuuagagagcuggca

SEQ ID NO: 7487 - RNA, 20 nt, Artificial Sequence
  Synthetic
gcccugcccgacgucaugca

SEQ ID NO: 7488 - RNA, 20 nt, Artificial Sequence
  Synthetic
ggccucgcugaagugcugca

SEQ ID NO: 7489 - RNA, 20 nt, Artificial Sequence
  Synthetic
aacagccauucaccagugca

SEQ ID NO: 7490 - RNA, 20 nt, Artificial Sequence
  Synthetic
caacacgcacagaacacuca

SEQ ID NO: 7491 - RNA, 20 nt, Artificial Sequence
  Synthetic
gucgucggacuugaccguca

SEQ ID NO: 7492 - RNA, 20 nt, Artificial Sequence
  Synthetic
gauaccaacccgcgggguca

SEQ ID NO: 7493 - RNA, 20 nt, Artificial Sequence
  Synthetic
ggcaggcccagcucaaaaga

SEQ ID NO: 7494 - RNA, 20 nt, Artificial Sequence
  Synthetic
gaggcuuccggccuggcaga

SEQ ID NO: 7495 - RNA, 20 nt, Artificial Sequence
  Synthetic
gcgccugggggcggaagaga

SEQ ID NO: 7496 - RNA, 20 nt, Artificial Sequence
  Synthetic
gagcuugaugcgcuuagaga

SEQ ID NO: 7497 - RNA, 20 nt, Artificial Sequence
  Synthetic
ggagcugacggagagcgaga

SEQ ID NO: 7498 - RNA, 20 nt, Artificial Sequence
  Synthetic
uaagcgcaucaagcucgaga

SEQ ID NO: 7499 - RNA, 20 nt, Artificial Sequence
  Synthetic
gagucggaccgcauagacga

SEQ ID NO: 7500 - RNA, 20 nt, Artificial Sequence
  Synthetic
augacggucaaguccgacga

SEQ ID NO: 7501 - RNA, 20 nt, Artificial Sequence
  Synthetic
ggccaccuggccgaggccga

SEQ ID NO: 7502 - RNA, 20 nt, Artificial Sequence
  Synthetic
ggagucuccgaagcuaagga

SEQ ID NO: 7503 - RNA, 20 nt, Artificial Sequence
  Synthetic
gagggggggcgucgccagga

SEQ ID NO: 7504 - RNA, 20 nt, Artificial Sequence
  Synthetic
aagagguuggagacagagga

SEQ ID NO: 7505 - RNA, 20 nt, Artificial Sequence
  Synthetic
gaggggcggauugcagagga

SEQ ID NO: 7506 - RNA, 20 nt, Artificial Sequence
  Synthetic
ccgggggcugggagggagga

SEQ ID NO: 7507 - RNA, 20 nt, Artificial Sequence
  Synthetic
cgcccggggagcuggacgga

SEQ ID NO: 7508 - RNA, 20 nt, Artificial Sequence
  Synthetic
gauguguggcaguuuucgga

SEQ ID NO: 7509 - RNA, 20 nt, Artificial Sequence
  Synthetic
ggcggauugcagaggaggga

SEQ ID NO: 7510 - RNA, 20 nt, Artificial Sequence
  Synthetic
gacuugaccgggggcuggga

SEQ ID NO: 7511 - RNA, 20 nt, Artificial Sequence
  Synthetic
ccauggagagguggcuggga

SEQ ID NO: 7512 - RNA, 20 nt, Artificial Sequence
  Synthetic
acaccgcccggggagcugga

SEQ ID NO: 7513 - RNA, 20 nt, Artificial Sequence
  Synthetic
gcagcggcacgggaagugga

SEQ ID NO: 7514 - RNA, 20 nt, Artificial Sequence
  Synthetic
cucgcccaggaccuggugga

SEQ ID NO: 7515 - RNA, 20 nt, Artificial Sequence
  Synthetic
gcacaaaucgucccccauga

SEQ ID NO: 7516 - RNA, 20 nt, Artificial Sequence
  Synthetic
cauucugcaccuaguccuga

SEQ ID NO: 7517 - RNA, 20 nt, Artificial Sequence
  Synthetic
agaggaggaggaggagcuga

SEQ ID NO: 7518 - RNA, 20 nt, Artificial Sequence
  Synthetic
ugucaaaggcacucggguga

SEQ ID NO: 7519 - RNA, 20 nt, Artificial Sequence
  Synthetic
ccgggcccggaccacuaaua

SEQ ID NO: 7520 - RNA, 20 nt, Artificial Sequence
  Synthetic
guugcaguaaccuuugcaua

SEQ ID NO: 7521 - RNA, 20 nt, Artificial Sequence
  Synthetic
gagagcgagaggguggacua

SEQ ID NO: 7522 - RNA, 20 nt, Artificial Sequence
  Synthetic
gucuggagucuccgaagcua

SEQ ID NO: 7523 - RNA, 20 nt, Artificial Sequence
  Synthetic
gcgguugaauccaauggcua

SEQ ID NO: 7524 - RNA, 20 nt, Artificial Sequence
  Synthetic
ucgcacagguugcacuugua

SEQ ID NO: 7525 - RNA, 20 nt, Artificial Sequence
  Synthetic
ucaaauuuucucagaacuua

SEQ ID NO: 7526 - RNA, 20 nt, Artificial Sequence
  Synthetic
gucucggugguggacuaaac

SEQ ID NO: 7527 - RNA, 20 nt, Artificial Sequence
  Synthetic
ccaaccugaucccggagaac

SEQ ID NO: 7528 - RNA, 20 nt, Artificial Sequence
  Synthetic
cggagcacuccucggagaac

SEQ ID NO: 7529 - RNA, 20 nt, Artificial Sequence
  Synthetic
gugcaccggcgcagccacac

SEQ ID NO: 7530 - RNA, 20 nt, Artificial Sequence
  Synthetic
uggccgaggccgagggccac

SEQ ID NO: 7531 - RNA, 20 nt, Artificial Sequence
  Synthetic
gggugcacgcguggucgcac

SEQ ID NO: 7532 - RNA, 20 nt, Artificial Sequence
  Synthetic
aucucggggcgcagcggcac

SEQ ID NO: 7533 - RNA, 20 nt, Artificial Sequence
  Synthetic
uugcaagagaaaccaugcac

SEQ ID NO: 7534 - RNA, 20 nt, Artificial Sequence
  Synthetic
agagcaaccugguggugcac

SEQ ID NO: 7535 - RNA, 20 nt, Artificial Sequence
  Synthetic
ccagcagcagcuuuuuggac

SEQ ID NO: 7536 - RNA, 20 nt, Artificial Sequence
  Synthetic
ucgcaugacuuggacuugac

SEQ ID NO: 7537 - RNA, 20 nt, Artificial Sequence
  Synthetic
aucacccgagugccuuugac

SEQ ID NO: 7538 - RNA, 20 nt, Artificial Sequence
  Synthetic
guucaaauuucagagcaacc

SEQ ID NO: 7539 - RNA, 20 nt, Artificial Sequence
  Synthetic
accgccagcuccccggaacc

SEQ ID NO: 7540 - RNA, 20 nt, Artificial Sequence
  Synthetic
ggcugcgccggugcaccacc

SEQ ID NO: 7541 - RNA, 20 nt, Artificial Sequence
  Synthetic
gaagcauaagcgcggccacc

SEQ ID NO: 7542 - RNA, 20 nt, Artificial Sequence
  Synthetic
cuucagcgaggccuuccacc

SEQ ID NO: 7543 - RNA, 20 nt, Artificial Sequence
  Synthetic
uaugcuucucgcccaggacc

SEQ ID NO: 7544 - RNA, 20 nt, Artificial Sequence
  Synthetic
cgcaugacuuggacuugacc

SEQ ID NO: 7545 - RNA, 20 nt, Artificial Sequence
  Synthetic
uuuaaccugcuaagaauacc

SEQ ID NO: 7546 - RNA, 20 nt, Artificial Sequence
  Synthetic
aggaagggcggcuugcuacc

SEQ ID NO: 7547 - RNA, 20 nt, Artificial Sequence
  Synthetic
gugcgaccacgcgugcaccc

SEQ ID NO: 7548 - RNA, 20 nt, Artificial Sequence
  Synthetic
ugagaaaauuugaagccccc

SEQ ID NO: 7549 - RNA, 20 nt, Artificial Sequence
  Synthetic
gggccaucucuuccgccccc

SEQ ID NO: 7550 - RNA, 20 nt, Artificial Sequence
  Synthetic
cccuccucccucccagcccc

SEQ ID NO: 7551 - RNA, 20 nt, Artificial Sequence
  Synthetic
gaaggaguucgaccugcccc

SEQ ID NO: 7552 - RNA, 20 nt, Artificial Sequence
  Synthetic
aucccuccguccagcucccc

SEQ ID NO: 7553 - RNA, 20 nt, Artificial Sequence
  Synthetic
aauggccgcggcugcucccc

SEQ ID NO: 7554 - RNA, 20 nt, Artificial Sequence
  Synthetic
ucuagcccaccgcugucccc

SEQ ID NO: 7555 - RNA, 20 nt, Artificial Sequence
  Synthetic
ugcgcuucuccacaccgccc

SEQ ID NO: 7556 - RNA, 20 nt, Artificial Sequence
  Synthetic
cccccgaggccgacucgccc

SEQ ID NO: 7557 - RNA, 20 nt, Artificial Sequence
  Synthetic
cgcgcuuaugcuucucgccc

SEQ ID NO: 7558 - RNA, 20 nt, Artificial Sequence
  Synthetic
cauauuagugguccgggccc

SEQ ID NO: 7559 - RNA, 20 nt, Artificial Sequence
  Synthetic
gggggcggaagagauggccc

SEQ ID NO: 7560 - RNA, 20 nt, Artificial Sequence
  Synthetic
cuuuugagcugggccugccc

SEQ ID NO: 7561 - RNA, 20 nt, Artificial Sequence
  Synthetic
ucucuccaccgccagcuccc

SEQ ID NO: 7562 - RNA, 20 nt, Artificial Sequence
  Synthetic
gaucccuccguccagcuccc

SEQ ID NO: 7563 - RNA, 20 nt, Artificial Sequence
  Synthetic
uaauggccgcggcugcuccc

SEQ ID NO: 7564 - RNA, 20 nt, Artificial Sequence
  Synthetic
uuacugcaaccauuccagcc

SEQ ID NO: 7565 - RNA, 20 nt, Artificial Sequence
  Synthetic
cuacggcuucgggcugagcc

SEQ ID NO: 7566 - RNA, 20 nt, Artificial Sequence
  Synthetic
uugcgcuucuccacaccgcc

SEQ ID NO: 7567 - RNA, 20 nt, Artificial Sequence
  Synthetic
cccccaccgcauagagcgcc

SEQ ID NO: 7568 - RNA, 20 nt, Artificial Sequence
  Synthetic
ccccccgaggccgacucgcc

SEQ ID NO: 7569 - RNA, 20 nt, Artificial Sequence
  Synthetic
gagggagggggggcgucgcc

SEQ ID NO: 7570 - RNA, 20 nt, Artificial Sequence
  Synthetic
ugcauagggcugggccggcc

SEQ ID NO: 7571 - RNA, 20 nt, Artificial Sequence
  Synthetic
aucgagagaggcuuccggcc

SEQ ID NO: 7572 - RNA, 20 nt, Artificial Sequence
  Synthetic
ccguguugggcaucgcggcc

SEQ ID NO: 7573 - RNA, 20 nt, Artificial Sequence
  Synthetic
uguggcccucggccucggcc

SEQ ID NO: 7574 - RNA, 20 nt, Artificial Sequence
  Synthetic
gagcugggccugcccgggcc

SEQ ID NO: 7575 - RNA, 20 nt, Artificial Sequence
  Synthetic
ccauauuagugguccgggcc

SEQ ID NO: 7576 - RNA, 20 nt, Artificial Sequence
  Synthetic
ggcgcuucagcuugcuggcc

SEQ ID NO: 7577 - RNA, 20 nt, Artificial Sequence
  Synthetic
cacucgggugauggguggcc

SEQ ID NO: 7578 - RNA, 20 nt, Artificial Sequence
  Synthetic
ucuuuugagcugggccugcc

SEQ ID NO: 7579 - RNA, 20 nt, Artificial Sequence
  Synthetic
gaagggaucuuugagcugcc

SEQ ID NO: 7580 - RNA, 20 nt, Artificial Sequence
  Synthetic
guggaaagcgcccuucugcc

SEQ ID NO: 7581 - RNA, 20 nt, Artificial Sequence
  Synthetic
cccaccaagucgcuggugcc

SEQ ID NO: 7582 - RNA, 20 nt, Artificial Sequence
  Synthetic
gccucucucgauacugaucc

SEQ ID NO: 7583 - RNA, 20 nt, Artificial Sequence
  Synthetic
gaacgaccccaaccugaucc

SEQ ID NO: 7584 - RNA, 20 nt, Artificial Sequence
  Synthetic
cgugguggcgcgccgccucc

SEQ ID NO: 7585 - RNA, 20 nt, Artificial Sequence
  Synthetic
ucgccggcuacgcggccucc

SEQ ID NO: 7586 - RNA, 20 nt, Artificial Sequence
  Synthetic
ccuccucguccccguucucc

SEQ ID NO: 7587 - RNA, 20 nt, Artificial Sequence
  Synthetic
cgaggccuuccaccaggucc

SEQ ID NO: 7588 - RNA, 20 nt, Artificial Sequence
  Synthetic
acgccccauauuaguggucc

SEQ ID NO: 7589 - RNA, 20 nt, Artificial Sequence
  Synthetic
agguagcaagccgcccuucc

SEQ ID NO: 7590 - RNA, 20 nt, Artificial Sequence
  Synthetic
agucgcuggugccggguucc

SEQ ID NO: 7591 - RNA, 20 nt, Artificial Sequence
  Synthetic
cucuaggagacuuagagagc

SEQ ID NO: 7592 - RNA, 20 nt, Artificial Sequence
  Synthetic
agagaaggggcucagcgagc

SEQ ID NO: 7593 - RNA, 20 nt, Artificial Sequence
  Synthetic
cuccacaccgcccggggagc

SEQ ID NO: 7594 - RNA, 20 nt, Artificial Sequence
  Synthetic
ggugccggguuccggggagc

SEQ ID NO: 7595 - RNA, 20 nt, Artificial Sequence
  Synthetic
gcgucugcccucuuuugagc

SEQ ID NO: 7596 - RNA, 20 nt, Artificial Sequence
  Synthetic
cugccuggaggccgcguagc

SEQ ID NO: 7597 - RNA, 20 nt, Artificial Sequence
  Synthetic
cugauccugguauucuuagc

SEQ ID NO: 7598 - RNA, 20 nt, Artificial Sequence
  Synthetic
cugaagggauaccaacccgc

SEQ ID NO: 7599 - RNA, 20 nt, Artificial Sequence
  Synthetic
cggaaguccccugaccccgc

SEQ ID NO: 7600 - RNA, 20 nt, Artificial Sequence
  Synthetic
ucucgcccguguggcugcgc

SEQ ID NO: 7601 - RNA, 20 nt, Artificial Sequence
  Synthetic
gucuaugcgguccgacucgc

SEQ ID NO: 7602 - RNA, 20 nt, Artificial Sequence
  Synthetic
ccaccacgagaacagcucgc

SEQ ID NO: 7603 - RNA, 20 nt, Artificial Sequence
  Synthetic
guguacucgcaguggcucgc

SEQ ID NO: 7604 - RNA, 20 nt, Artificial Sequence
  Synthetic
ggcgcugcccaccaagucgc

SEQ ID NO: 7605 - RNA, 20 nt, Artificial Sequence
  Synthetic
gcccaccgcuguccccaggc

SEQ ID NO: 7606 - RNA, 20 nt, Artificial Sequence
  Synthetic
aaagcgcccuucugccaggc

SEQ ID NO: 7607 - RNA, 20 nt, Artificial Sequence
  Synthetic
uccguguugggcaucgcggc

SEQ ID NO: 7608 - RNA, 20 nt, Artificial Sequence
  Synthetic
caguaaccuuugcauagggc

SEQ ID NO: 7609 - RNA, 20 nt, Artificial Sequence
  Synthetic
uuagugguccgggcccgggc

SEQ ID NO: 7610 - RNA, 20 nt, Artificial Sequence
  Synthetic
ugcccugcaugacgucgggc

SEQ ID NO: 7611 - RNA, 20 nt, Artificial Sequence
  Synthetic
acuuggacuugaccgggggc

SEQ ID NO: 7612 - RNA, 20 nt, Artificial Sequence
  Synthetic
ugggcaucgcggccgggggc

SEQ ID NO: 7613 - RNA, 20 nt, Artificial Sequence
  Synthetic
accuuugcauagggcugggc

SEQ ID NO: 7614 - RNA, 20 nt, Artificial Sequence
  Synthetic
cuccuagagaaauccauggc

SEQ ID NO: 7615 - RNA, 20 nt, Artificial Sequence
  Synthetic
agggcggcuugcuaccuggc

SEQ ID NO: 7616 - RNA, 20 nt, Artificial Sequence
  Synthetic
aggagacuuagagagcuggc

SEQ ID NO: 7617 - RNA, 20 nt, Artificial Sequence
  Synthetic
gaaucccauggagagguggc

SEQ ID NO: 7618 - RNA, 20 nt, Artificial Sequence
  Synthetic
ugcgacgaagacucgguggc

SEQ ID NO: 7619 - RNA, 20 nt, Artificial Sequence
  Synthetic
cgcccugcccgacgucaugc

SEQ ID NO: 7620 - RNA, 20 nt, Artificial Sequence
  Synthetic
aguuguacauguguagcugc

SEQ ID NO: 7621 - RNA, 20 nt, Artificial Sequence
  Synthetic
cacggacuugagcgcgcugc

SEQ ID NO: 7622 - RNA, 20 nt, Artificial Sequence
  Synthetic
ccuguccaaaaagcugcugc

SEQ ID NO: 7623 - RNA, 20 nt, Artificial Sequence
  Synthetic
gcccaccaagucgcuggugc

SEQ ID NO: 7624 - RNA, 20 nt, Artificial Sequence
  Synthetic
cauguggcgcuucagcuugc

SEQ ID NO: 7625 - RNA, 20 nt, Artificial Sequence
  Synthetic
cguccccguucuccgggauc

SEQ ID NO: 7626 - RNA, 20 nt, Artificial Sequence
  Synthetic
gcacccugucaaaggcacuc

SEQ ID NO: 7627 - RNA, 20 nt, Artificial Sequence
  Synthetic
uccccgggcgagucggccuc

SEQ ID NO: 7628 - RNA, 20 nt, Artificial Sequence
  Synthetic
gagcuggacggagggaucuc

SEQ ID NO: 7629 - RNA, 20 nt, Artificial Sequence
  Synthetic
gccacacaucuugagcucuc

SEQ ID NO: 7630 - RNA, 20 nt, Artificial Sequence
  Synthetic
uccuccucguccccguucuc

SEQ ID NO: 7631 - RNA, 20 nt, Artificial Sequence
  Synthetic
accaugcccugcaugacguc

SEQ ID NO: 7632 - RNA, 20 nt, Artificial Sequence
  Synthetic
ggauaccaacccgcgggguc

SEQ ID NO: 7633 - RNA, 20 nt, Artificial Sequence
  Synthetic
cacgccccauauuagugguc

SEQ ID NO: 7634 - RNA, 20 nt, Artificial Sequence
  Synthetic
ggaggcaaaaggcgauuguc

SEQ ID NO: 7635 - RNA, 20 nt, Artificial Sequence
  Synthetic
ccgcggguugguaucccuuc

SEQ ID NO: 7636 - RNA, 20 nt, Artificial Sequence
  Synthetic
ucaguaucgagagaggcuuc

SEQ ID NO: 7637 - RNA, 20 nt, Artificial Sequence
  Synthetic
agaggguggacuacggcuuc

SEQ ID NO: 7638 - RNA, 20 nt, Artificial Sequence
  Synthetic
aagucgcuggugccggguuc

SEQ ID NO: 7639 - RNA, 20 nt, Artificial Sequence
  Synthetic
gggcaggcccagcucaaaag

SEQ ID NO: 7640 - RNA, 20 nt, Artificial Sequence
  Synthetic
ugugugaagaaccuagaaag

SEQ ID NO: 7641 - RNA, 20 nt, Artificial Sequence
  Synthetic
guauucuuagcagguuaaag

SEQ ID NO: 7642 - RNA, 20 nt, Artificial Sequence
  Synthetic
cgacgaggaagaggaagaag

SEQ ID NO: 7643 - RNA, 20 nt, Artificial Sequence
  Synthetic
gcuugaugcgcuuagagaag

SEQ ID NO: 7644 - RNA, 20 nt, Artificial Sequence
  Synthetic
agaggaggacgacgaggaag

SEQ ID NO: 7645 - RNA, 20 nt, Artificial Sequence
  Synthetic
agaggaagaagaggaggaag

SEQ ID NO: 7646 - RNA, 20 nt, Artificial Sequence
  Synthetic
gaacggggacgaggaggaag

SEQ ID NO: 7647 - RNA, 20 nt, Artificial Sequence
  Synthetic
gggcgcagcggcacgggaag

SEQ ID NO: 7648 - RNA, 20 nt, Artificial Sequence
  Synthetic
cucggugguggacuaaacag

SEQ ID NO: 7649 - RNA, 20 nt, Artificial Sequence
  Synthetic
uagaaagagguuggagacag

SEQ ID NO: 7650 - RNA, 20 nt, Artificial Sequence
  Synthetic
cugggccggccuggggacag

SEQ ID NO: 7651 - RNA, 20 nt, Artificial Sequence
  Synthetic
agaaaauuugaagcccccag

SEQ ID NO: 7652 - RNA, 20 nt, Artificial Sequence
  Synthetic
ggagggaucucggggcgcag

SEQ ID NO: 7653 - RNA, 20 nt, Artificial Sequence
  Synthetic
cggagaacguguacucgcag

SEQ ID NO: 7654 - RNA, 20 nt, Artificial Sequence
  Synthetic
ggaggaggggcggauugcag

SEQ ID NO: 7655 - RNA, 20 nt, Artificial Sequence
  Synthetic
auaccaacccgcggggucag

SEQ ID NO: 7656 - RNA, 20 nt, Artificial Sequence
  Synthetic
accaggaucaguaucgagag

SEQ ID NO: 7657 - RNA, 20 nt, Artificial Sequence
  Synthetic
aggagcugacggagagcgag

SEQ ID NO: 7658 - RNA, 20 nt, Artificial Sequence
  Synthetic
agagguuggagacagaggag

SEQ ID NO: 7659 - RNA, 20 nt, Artificial Sequence
  Synthetic
cgggggcugggagggaggag

SEQ ID NO: 7660 - RNA, 20 nt, Artificial Sequence
  Synthetic
gcggauugcagaggagggag

SEQ ID NO: 7661 - RNA, 20 nt, Artificial Sequence
  Synthetic
uggacuaaacagggggggag

SEQ ID NO: 7662 - RNA, 20 nt, Artificial Sequence
  Synthetic
gcaauaugaaucccauggag

SEQ ID NO: 7663 - RNA, 20 nt, Artificial Sequence
  Synthetic
gggagcacgccccauauuag

SEQ ID NO: 7664 - RNA, 20 nt, Artificial Sequence
  Synthetic
caaccugaucccggagaacg

SEQ ID NO: 7665 - RNA, 20 nt, Artificial Sequence
  Synthetic
ggaggaagaggaggacgacg

SEQ ID NO: 7666 - RNA, 20 nt, Artificial Sequence
  Synthetic
cuccgaggagugcuccgacg

SEQ ID NO: 7667 - RNA, 20 nt, Artificial Sequence
  Synthetic
gaucccggagaacggggacg

SEQ ID NO: 7668 - RNA, 20 nt, Artificial Sequence
  Synthetic
gcaguggcucgccggcuacg

SEQ ID NO: 7669 - RNA, 20 nt, Artificial Sequence
  Synthetic
gcaugacuuggacuugaccg

SEQ ID NO: 7670 - RNA, 20 nt, Artificial Sequence
  Synthetic
ccugaagggauaccaacccg

SEQ ID NO: 7671 - RNA, 20 nt, Artificial Sequence
  Synthetic
acggaaguccccugaccccg

SEQ ID NO: 7672 - RNA, 20 nt, Artificial Sequence
  Synthetic
cuuuuuggacaggccccccg

SEQ ID NO: 7673 - RNA, 20 nt, Artificial Sequence
  Synthetic
gcgcuucuccacaccgcccg

SEQ ID NO: 7674 - RNA, 20 nt, Artificial Sequence
  Synthetic
ccccgaggccgacucgcccg

SEQ ID NO: 7675 - RNA, 20 nt, Artificial Sequence
  Synthetic
acucgcccggggagcagccg

SEQ ID NO: 7676 - RNA, 20 nt, Artificial Sequence
  Synthetic
cggccaccuggccgaggccg

SEQ ID NO: 7677 - RNA, 20 nt, Artificial Sequence
  Synthetic
cguguugggcaucgcggccg

SEQ ID NO: 7678 - RNA, 20 nt, Artificial Sequence
  Synthetic
gauggcacuguuaauggccg

SEQ ID NO: 7679 - RNA, 20 nt, Artificial Sequence
  Synthetic
uaagcgcggccaccuggccg

SEQ ID NO: 7680 - RNA, 20 nt, Artificial Sequence
  Synthetic
gcgcaaacucccguucuccg

SEQ ID NO: 7681 - RNA, 20 nt, Artificial Sequence
  Synthetic
cagcagcgcgcucaaguccg

SEQ ID NO: 7682 - RNA, 20 nt, Artificial Sequence
  Synthetic
gucgcuggugccggguuccg

SEQ ID NO: 7683 - RNA, 20 nt, Artificial Sequence
  Synthetic
cugggcgagaagcauaagcg

SEQ ID NO: 7684 - RNA, 20 nt, Artificial Sequence
  Synthetic
cuccaugcagcacuucagcg

SEQ ID NO: 7685 - RNA, 20 nt, Artificial Sequence
  Synthetic
ugcuggccugggugcacgcg

SEQ ID NO: 7686 - RNA, 20 nt, Artificial Sequence
  Synthetic
ugaagggauaccaacccgcg

SEQ ID NO: 7687 - RNA, 20 nt, Artificial Sequence
  Synthetic
caccacgagaacagcucgcg

SEQ ID NO: 7688 - RNA, 20 nt, Artificial Sequence
  Synthetic
gcaugacgucgggcagggcg

SEQ ID NO: 7689 - RNA, 20 nt, Artificial Sequence
  Synthetic
cgagaacagcucgcggggcg

SEQ ID NO: 7690 - RNA, 20 nt, Artificial Sequence
  Synthetic
gcggggcgcggucgugggcg

SEQ ID NO: 7691 - RNA, 20 nt, Artificial Sequence
  Synthetic
guucuccguguugggcaucg

SEQ ID NO: 7692 - RNA, 20 nt, Artificial Sequence
  Synthetic
ccccgggcgagucggccucg

SEQ ID NO: 7693 - RNA, 20 nt, Artificial Sequence
  Synthetic
gccaccacgagaacagcucg

SEQ ID NO: 7694 - RNA, 20 nt, Artificial Sequence
  Synthetic
agcuggacggagggaucucg

SEQ ID NO: 7695 - RNA, 20 nt, Artificial Sequence
  Synthetic
cgccccgcgagcuguucucg

SEQ ID NO: 7696 - RNA, 20 nt, Artificial Sequence
  Synthetic
cagcucgcggggcgcggucg

SEQ ID NO: 7697 - RNA, 20 nt, Artificial Sequence
  Synthetic
ucggugguggacuaaacagg

SEQ ID NO: 7698 - RNA, 20 nt, Artificial Sequence
  Synthetic
ggcccucggccucggccagg

SEQ ID NO: 7699 - RNA, 20 nt, Artificial Sequence
  Synthetic
cgaggaagaggaagaagagg

SEQ ID NO: 7700 - RNA, 20 nt, Artificial Sequence
  Synthetic
ggaagaagaggaggaagagg

SEQ ID NO: 7701 - RNA, 20 nt, Artificial Sequence
  Synthetic
cggggacgaggaggaagagg

SEQ ID NO: 7702 - RNA, 20 nt, Artificial Sequence
  Synthetic
aaagagguuggagacagagg

SEQ ID NO: 7703 - RNA, 20 nt, Artificial Sequence
  Synthetic
ggaggggcggauugcagagg

SEQ ID NO: 7704 - RNA, 20 nt, Artificial Sequence
  Synthetic
auaugaaucccauggagagg

SEQ ID NO: 7705 - RNA, 20 nt, Artificial Sequence
  Synthetic
cgaggagugcuccgacgagg

SEQ ID NO: 7706 - RNA, 20 nt, Artificial Sequence
  Synthetic
cccggagaacggggacgagg

SEQ ID NO: 7707 - RNA, 20 nt, Artificial Sequence
  Synthetic
agaagaggaggaagaggagg

SEQ ID NO: 7708 - RNA, 20 nt, Artificial Sequence
  Synthetic
gagguuggagacagaggagg

SEQ ID NO: 7709 - RNA, 20 nt, Artificial Sequence
  Synthetic
agaggaggaagaggaggagg

SEQ ID NO: 7710 - RNA, 20 nt, Artificial Sequence
  Synthetic
cggauugcagaggagggagg

SEQ ID NO: 7711 - RNA, 20 nt, Artificial Sequence
  Synthetic
accgggggcugggagggagg

SEQ ID NO: 7712 - RNA, 20 nt, Artificial Sequence
  Synthetic
cuucgggcugagccuggagg

SEQ ID NO: 7713 - RNA, 20 nt, Artificial Sequence
  Synthetic
ccgcccggggagcuggacgg

SEQ ID NO: 7714 - RNA, 20 nt, Artificial Sequence
  Synthetic
caugacuuggacuugaccgg

SEQ ID NO: 7715 - RNA, 20 nt, Artificial Sequence
  Synthetic
guguugggcaucgcggccgg

SEQ ID NO: 7716 - RNA, 20 nt, Artificial Sequence
  Synthetic
ggccggccuggggacagcgg

SEQ ID NO: 7717 - RNA, 20 nt, Artificial Sequence
  Synthetic
ggguuccggggagcuggcgg

SEQ ID NO: 7718 - RNA, 20 nt, Artificial Sequence
  Synthetic
cccccaggcgcucuaugcgg

SEQ ID NO: 7719 - RNA, 20 nt, Artificial Sequence
  Synthetic
cacuugcgacgaagacucgg

SEQ ID NO: 7720 - RNA, 20 nt, Artificial Sequence
  Synthetic
cccgggcgagucggccucgg

SEQ ID NO: 7721 - RNA, 20 nt, Artificial Sequence
  Synthetic
ggguccaagugaugucucgg

SEQ ID NO: 7722 - RNA, 20 nt, Artificial Sequence
  Synthetic
gggggcgucgccaggaaggg

SEQ ID NO: 7723 - RNA, 20 nt, Artificial Sequence
  Synthetic
cggugguggacuaaacaggg

SEQ ID NO: 7724 - RNA, 20 nt, Artificial Sequence
  Synthetic
gcugacggagagcgagaggg

SEQ ID NO: 7725 - RNA, 20 nt, Artificial Sequence
  Synthetic
gggcggauugcagaggaggg

SEQ ID NO: 7726 - RNA, 20 nt, Artificial Sequence
  Synthetic
ggauugcagaggagggaggg

SEQ ID NO: 7727 - RNA, 20 nt, Artificial Sequence
  Synthetic
uugaccgggggcugggaggg

SEQ ID NO: 7728 - RNA, 20 nt, Artificial Sequence
  Synthetic
ccuccguccagcuccccggg

SEQ ID NO: 7729 - RNA, 20 nt, Artificial Sequence
  Synthetic
cuagagaaauccauggcggg

SEQ ID NO: 7730 - RNA, 20 nt, Artificial Sequence
  Synthetic
ccgggcgagucggccucggg

SEQ ID NO: 7731 - RNA, 20 nt, Artificial Sequence
  Synthetic
ggugguggacuaaacagggg

SEQ ID NO: 7732 - RNA, 20 nt, Artificial Sequence
  Synthetic
aaauuugaagcccccagggg

SEQ ID NO: 7733 - RNA, 20 nt, Artificial Sequence
  Synthetic
gggcugggagggaggagggg

SEQ ID NO: 7734 - RNA, 20 nt, Artificial Sequence
  Synthetic
gauugcagaggagggagggg

SEQ ID NO: 7735 - RNA, 20 nt, Artificial Sequence
  Synthetic
ccgcauagagcgccuggggg

SEQ ID NO: 7736 - RNA, 20 nt, Artificial Sequence
  Synthetic
ugaagcccccaggggugggg

SEQ ID NO: 7737 - RNA, 20 nt, Artificial Sequence
  Synthetic
aaaggcacucgggugauggg

SEQ ID NO: 7738 - RNA, 20 nt, Artificial Sequence
  Synthetic
ggacuugaccgggggcuggg

SEQ ID NO: 7739 - RNA, 20 nt, Artificial Sequence
  Synthetic
cuaaacagggggggaguggg

SEQ ID NO: 7740 - RNA, 20 nt, Artificial Sequence
  Synthetic
cuggguacuacgccgaaugg

SEQ ID NO: 7741 - RNA, 20 nt, Artificial Sequence
  Synthetic
ucuccuagagaaauccaugg

SEQ ID NO: 7742 - RNA, 20 nt, Artificial Sequence
  Synthetic
gucggacuugaccgucaugg

SEQ ID NO: 7743 - RNA, 20 nt, Artificial Sequence
  Synthetic
caaauuucagagcaaccugg

SEQ ID NO: 7744 - RNA, 20 nt, Artificial Sequence
  Synthetic
gcuucucgcccaggaccugg

SEQ ID NO: 7745 - RNA, 20 nt, Artificial Sequence
  Synthetic
cggcuucgggcugagccugg

SEQ ID NO: 7746 - RNA, 20 nt, Artificial Sequence
  Synthetic
ccaccgcauagagcgccugg

SEQ ID NO: 7747 - RNA, 20 nt, Artificial Sequence
  Synthetic
gggaucuuugagcugccugg

SEQ ID NO: 7748 - RNA, 20 nt, Artificial Sequence
  Synthetic
gccggguuccggggagcugg

SEQ ID NO: 7749 - RNA, 20 nt, Artificial Sequence
  Synthetic
cgcagcggcacgggaagugg

SEQ ID NO: 7750 - RNA, 20 nt, Artificial Sequence
  Synthetic
cagcgcgcucaaguccgugg

SEQ ID NO: 7751 - RNA, 20 nt, Artificial Sequence
  Synthetic
cccgcgagcuguucucgugg

SEQ ID NO: 7752 - RNA, 20 nt, Artificial Sequence
  Synthetic
ccaggcgcucuaugcggugg

SEQ ID NO: 7753 - RNA, 20 nt, Artificial Sequence
  Synthetic
uccaagugaugucucggugg

SEQ ID NO: 7754 - RNA, 20 nt, Artificial Sequence
  Synthetic
acccggcaccagcgacuugg

SEQ ID NO: 7755 - RNA, 20 nt, Artificial Sequence
  Synthetic
ucuggguacuacgccgaaug

SEQ ID NO: 7756 - RNA, 20 nt, Artificial Sequence
  Synthetic
cgucggacuugaccgucaug

SEQ ID NO: 7757 - RNA, 20 nt, Artificial Sequence
  Synthetic
ugugcaugugcgucuucaug

SEQ ID NO: 7758 - RNA, 20 nt, Artificial Sequence
  Synthetic
gggcccggaccacuaauaug

SEQ ID NO: 7759 - RNA, 20 nt, Artificial Sequence
  Synthetic
ccgcccccaggcgcucuaug

SEQ ID NO: 7760 - RNA, 20 nt, Artificial Sequence
  Synthetic
uaacagugccaucgucuaug

SEQ ID NO: 7761 - RNA, 20 nt, Artificial Sequence
  Synthetic
agcgacacuugugaguacug

SEQ ID NO: 7762 - RNA, 20 nt, Artificial Sequence
  Synthetic
cuucgucgcaagugucccug

SEQ ID NO: 7763 - RNA, 20 nt, Artificial Sequence
  Synthetic
cccaccgcauagagcgccug

SEQ ID NO: 7764 - RNA, 20 nt, Artificial Sequence
  Synthetic
cauagggcugggccggccug

SEQ ID NO: 7765 - RNA, 20 nt, Artificial Sequence
  Synthetic
agaaggggcucagcgagcug

SEQ ID NO: 7766 - RNA, 20 nt, Artificial Sequence
  Synthetic
gugccuuugacagggugcug

SEQ ID NO: 7767 - RNA, 20 nt, Artificial Sequence
  Synthetic
uccaagucaugcgaguucug

SEQ ID NO: 7768 - RNA, 20 nt, Artificial Sequence
  Synthetic
uguagggcuucucgcccgug

SEQ ID NO: 7769 - RNA, 20 nt, Artificial Sequence
  Synthetic
guccagcuccccgggcggug

SEQ ID NO: 7770 - RNA, 20 nt, Artificial Sequence
  Synthetic
cccaggcgcucuaugcggug

SEQ ID NO: 7771 - RNA, 20 nt, Artificial Sequence
  Synthetic
auuugaagcccccaggggug

SEQ ID NO: 7772 - RNA, 20 nt, Artificial Sequence
  Synthetic
cccagagagcucaagaugug

SEQ ID NO: 7773 - RNA, 20 nt, Artificial Sequence
  Synthetic
cguucuccgggaucagguug

SEQ ID NO: 7774 - RNA, 20 nt, Artificial Sequence
  Synthetic
cucuggguacuacgccgaau

SEQ ID NO: 7775 - RNA, 20 nt, Artificial Sequence
  Synthetic
gcgggaggcuccauagccau

SEQ ID NO: 7776 - RNA, 20 nt, Artificial Sequence
  Synthetic
cuucccagccaccucuccau

SEQ ID NO: 7777 - RNA, 20 nt, Artificial Sequence
  Synthetic
gguugcaguaaccuuugcau

SEQ ID NO: 7778 - RNA, 20 nt, Artificial Sequence
  Synthetic
ucgucggacuugaccgucau

SEQ ID NO: 7779 - RNA, 20 nt, Artificial Sequence
  Synthetic
gucaaaggcacucgggugau

SEQ ID NO: 7780 - RNA, 20 nt, Artificial Sequence
  Synthetic
cgggcccggaccacuaauau

SEQ ID NO: 7781 - RNA, 20 nt, Artificial Sequence
  Synthetic
gucguucucgcucuugaacu

SEQ ID NO: 7782 - RNA, 20 nt, Artificial Sequence
  Synthetic
agcacccugucaaaggcacu

SEQ ID NO: 7783 - RNA, 20 nt, Artificial Sequence
  Synthetic
uccaccaccgagacaucacu

SEQ ID NO: 7784 - RNA, 20 nt, Artificial Sequence
  Synthetic
ggacacuugcgacgaagacu

SEQ ID NO: 7785 - RNA, 20 nt, Artificial Sequence
  Synthetic
ggaacccggcaccagcgacu

SEQ ID NO: 7786 - RNA, 20 nt, Artificial Sequence
  Synthetic
guugguaucccuucaggacu

SEQ ID NO: 7787 - RNA, 20 nt, Artificial Sequence
  Synthetic
gccgcagaacucgcaugacu

SEQ ID NO: 7788 - RNA, 20 nt, Artificial Sequence
  Synthetic
gcaagugucccuguggcccu

SEQ ID NO: 7789 - RNA, 20 nt, Artificial Sequence
  Synthetic
ccccaccgcauagagcgccu

SEQ ID NO: 7790 - RNA, 20 nt, Artificial Sequence
  Synthetic
gcauagggcugggccggccu

SEQ ID NO: 7791 - RNA, 20 nt, Artificial Sequence
  Synthetic
gucccuguggcccucggccu

SEQ ID NO: 7792 - RNA, 20 nt, Artificial Sequence
  Synthetic
cuccccgggcgagucggccu

SEQ ID NO: 7793 - RNA, 20 nt, Artificial Sequence
  Synthetic
gcgcuucagcuugcuggccu

SEQ ID NO: 7794 - RNA, 20 nt, Artificial Sequence
  Synthetic
cuccucgucggagcacuccu

SEQ ID NO: 7795 - RNA, 20 nt, Artificial Sequence
  Synthetic
gaggccuuccaccagguccu

SEQ ID NO: 7796 - RNA, 20 nt, Artificial Sequence
  Synthetic
gagaaggggcucagcgagcu

SEQ ID NO: 7797 - RNA, 20 nt, Artificial Sequence
  Synthetic
cgucugcccucuuuugagcu

SEQ ID NO: 7798 - RNA, 20 nt, Artificial Sequence
  Synthetic
aguaaccuuugcauagggcu

SEQ ID NO: 7799 - RNA, 20 nt, Artificial Sequence
  Synthetic
cuuggacuugaccgggggcu

SEQ ID NO: 7800 - RNA, 20 nt, Artificial Sequence
  Synthetic
aaucccauggagagguggcu

SEQ ID NO: 7801 - RNA, 20 nt, Artificial Sequence
  Synthetic
guuguacauguguagcugcu

SEQ ID NO: 7802 - RNA, 20 nt, Artificial Sequence
  Synthetic
cuguccaaaaagcugcugcu

SEQ ID NO: 7803 - RNA, 20 nt, Artificial Sequence
  Synthetic
ggagcuggacggagggaucu

SEQ ID NO: 7804 - RNA, 20 nt, Artificial Sequence
  Synthetic
ccacacaucuugagcucucu

SEQ ID NO: 7805 - RNA, 20 nt, Artificial Sequence
  Synthetic
cucccgccauggauuucucu

SEQ ID NO: 7806 - RNA, 20 nt, Artificial Sequence
  Synthetic
uggggguccaagugaugucu

SEQ ID NO: 7807 - RNA, 20 nt, Artificial Sequence
  Synthetic
ucugucuccaaccucuuucu

SEQ ID NO: 7808 - RNA, 20 nt, Artificial Sequence
  Synthetic
agacucgguggccggcgagu

SEQ ID NO: 7809 - RNA, 20 nt, Artificial Sequence
  Synthetic
cggcugcuccccgggcgagu

SEQ ID NO: 7810 - RNA, 20 nt, Artificial Sequence
  Synthetic
ggacuaaacagggggggagu

SEQ ID NO: 7811 - RNA, 20 nt, Artificial Sequence
  Synthetic
caccaugcccugcaugacgu

SEQ ID NO: 7812 - RNA, 20 nt, Artificial Sequence
  Synthetic
cggggcgcggucgugggcgu

SEQ ID NO: 7813 - RNA, 20 nt, Artificial Sequence
  Synthetic
aucgccuuuugccuccucgu

SEQ ID NO: 7814 - RNA, 20 nt, Artificial Sequence
  Synthetic
ggcgguggagagaccgucgu

SEQ ID NO: 7815 - RNA, 20 nt, Artificial Sequence
  Synthetic
agcucgcggggcgcggucgu

SEQ ID NO: 7816 - RNA, 20 nt, Artificial Sequence
  Synthetic
cccguucuccgggaucaggu

SEQ ID NO: 7817 - RNA, 20 nt, Artificial Sequence
  Synthetic
ugaagaaccuagaaagaggu

SEQ ID NO: 7818 - RNA, 20 nt, Artificial Sequence
  Synthetic
gccggccuggggacagcggu

SEQ ID NO: 7819 - RNA, 20 nt, Artificial Sequence
  Synthetic
ccccaggcgcucuaugcggu

SEQ ID NO: 7820 - RNA, 20 nt, Artificial Sequence
  Synthetic
aguccccugaccccgcgggu

SEQ ID NO: 7821 - RNA, 20 nt, Artificial Sequence
  Synthetic
aauuugaagcccccaggggu

SEQ ID NO: 7822 - RNA, 20 nt, Artificial Sequence
  Synthetic
cccggcaccagcgacuuggu

SEQ ID NO: 7823 - RNA, 20 nt, Artificial Sequence
  Synthetic
gcgacacuugugaguacugu

SEQ ID NO: 7824 - RNA, 20 nt, Artificial Sequence
  Synthetic
cgaguacacguucuccgugu

SEQ ID NO: 7825 - RNA, 20 nt, Artificial Sequence
  Synthetic
gucgcacagguugcacuugu

SEQ ID NO: 7826 - RNA, 20 nt, Artificial Sequence
  Synthetic
guucuucacacacccccauu

SEQ ID NO: 7827 - RNA, 20 nt, Artificial Sequence
  Synthetic
aaagaucccuuccuuagcuu

SEQ ID NO: 7828 - RNA, 20 nt, Artificial Sequence
  Synthetic
gagaggguggacuacggcuu

SEQ ID NO: 7829 - RNA, 20 nt, Artificial Sequence
  Synthetic
ccguucuccgggaucagguu

SEQ ID NO: 7830 - RNA, 20 nt, Artificial Sequence
  Synthetic
gaguacacguucuccguguu

SEQ ID NO: 7831 - RNA, 20 nt, Artificial Sequence
  Synthetic
gcugcccagcagcagcuuuu

SEQ ID NO: 7832 - RNA, 20 nt, Artificial Sequence
  Synthetic
ucaagauguguggcaguuuu

SEQ ID NO: 7833 - RNA, 21 nt, Artificial Sequence
  Synthetic
ugaccuggaugccaaccucca

SEQ ID NO: 7834 - RNA, 22 nt, Artificial Sequence
  Synthetic
gugaccuggaugccaaccucca

SEQ ID NO: 7835 - RNA, 23 nt, Artificial Sequence
  Synthetic
cgugaccuggaugccaaccucca

SEQ ID NO: 7836 - RNA, 24 nt, Artificial Sequence
  Synthetic
gcgugaccuggaugccaaccucca

SEQ ID NO: 7837 - RNA, 18 nt, Artificial Sequence
  Synthetic
augccaaccuccacggga

SEQ ID NO: 7838 - RNA, 19 nt, Artificial Sequence
  Synthetic
gaugccaaccuccacggga

SEQ ID NO: 7839 - RNA, 20 nt, Artificial Sequence
  Synthetic
ggaugccaaccuccacggga

SEQ ID NO: 7840 - RNA, 21 nt, Artificial Sequence
  Synthetic
uggaugccaaccuccacggga

SEQ ID NO: 7841 - RNA, 22 nt, Artificial Sequence
  Synthetic
cuggaugccaaccuccacggga

SEQ ID NO: 7842 - RNA, 23 nt, Artificial Sequence
  Synthetic
ccuggaugccaaccuccacggga

SEQ ID NO: 7843 - RNA, 24 nt, Artificial Sequence
  Synthetic
accuggaugccaaccuccacggga

SEQ ID NO: 7844 - RNA, 18 nt, Artificial Sequence
  Synthetic
gucauccucuggcgugac

SEQ ID NO: 7845 - RNA, 19 nt, Artificial Sequence
  Synthetic
cgucauccucuggcgugac

SEQ ID NO: 7846 - RNA, 20 nt, Artificial Sequence
  Synthetic
ucgucauccucuggcgugac

SEQ ID NO: 7847 - RNA, 21 nt, Artificial Sequence
  Synthetic
aucgucauccucuggcgugac

SEQ ID NO: 7848 - RNA, 22 nt, Artificial Sequence
  Synthetic
aaucgucauccucuggcgugac

SEQ ID NO: 7849 - RNA, 23 nt, Artificial Sequence
  Synthetic
caaucgucauccucuggcgugac

SEQ ID NO: 7850 - RNA, 24 nt, Artificial Sequence
  Synthetic
acaaucgucauccucuggcgugac

SEQ ID NO: 7851 - RNA, 18 nt, Artificial Sequence
  Synthetic
uuauuggguuacuuacgc

SEQ ID NO: 7852 - RNA, 19 nt, Artificial Sequence
  Synthetic
auuauuggguuacuuacgc

SEQ ID NO: 7853 - RNA, 20 nt, Artificial Sequence
  Synthetic
uauuauuggguuacuuacgc

SEQ ID NO: 7854 - RNA, 21 nt, Artificial Sequence
  Synthetic
cuauuauuggguuacuuacgc

SEQ ID NO: 7855 - RNA, 22 nt, Artificial Sequence
  Synthetic
acuauuauuggguuacuuacgc

SEQ ID NO: 7856 - RNA, 23 nt, Artificial Sequence
  Synthetic
uacuauuauuggguuacuuacgc

SEQ ID NO: 7857 - RNA, 24 nt, Artificial Sequence
  Synthetic
uuacuauuauuggguuacuuacgc

SEQ ID NO: 7858 - RNA, 18 nt, Artificial Sequence
  Synthetic
ucccguuugcuuaagugc

SEQ ID NO: 7859 - RNA, 19 nt, Artificial Sequence
  Synthetic
uucccguuugcuuaagugc

SEQ ID NO: 7860 - RNA, 20 nt, Artificial Sequence
  Synthetic
auucccguuugcuuaagugc

SEQ ID NO: 7861 - RNA, 21 nt, Artificial Sequence
  Synthetic
aauucccguuugcuuaagugc

SEQ ID NO: 7862 - RNA, 22 nt, Artificial Sequence
  Synthetic
gaauucccguuugcuuaagugc

SEQ ID NO: 7863 - RNA, 23 nt, Artificial Sequence
  Synthetic
agaauucccguuugcuuaagugc

SEQ ID NO: 7864 - RNA, 24 nt, Artificial Sequence
  Synthetic
gagaauucccguuugcuuaagugc

SEQ ID NO: 7865 - RNA, 18 nt, Artificial Sequence
  Synthetic
uuugugcucgauaaaaau

SEQ ID NO: 7866 - RNA, 19 nt, Artificial Sequence
  Synthetic
guuugugcucgauaaaaau

SEQ ID NO: 7867 - RNA, 20 nt, Artificial Sequence
  Synthetic
cguuugugcucgauaaaaau

SEQ ID NO: 7868 - RNA, 21 nt, Artificial Sequence
  Synthetic
ccguuugugcucgauaaaaau

SEQ ID NO: 7869 - RNA, 22 nt, Artificial Sequence
  Synthetic
uccguuugugcucgauaaaaau

SEQ ID NO: 7870 - RNA, 23 nt, Artificial Sequence
  Synthetic
uuccguuugugcucgauaaaaau

SEQ ID NO: 7871 - RNA, 24 nt, Artificial Sequence
  Synthetic
uuuccguuugugcucgauaaaaau

SEQ ID NO: 7872 - RNA, 18 nt, Artificial Sequence
  Synthetic
ugcacucaucccaggcgu

SEQ ID NO: 7873 - RNA, 19 nt, Artificial Sequence
  Synthetic
cugcacucaucccaggcgu

SEQ ID NO: 7874 - RNA, 20 nt, Artificial Sequence
  Synthetic
ucugcacucaucccaggcgu

SEQ ID NO: 7875 - RNA, 21 nt, Artificial Sequence
  Synthetic
uucugcacucaucccaggcgu

SEQ ID NO: 7876 - RNA, 22 nt, Artificial Sequence
  Synthetic
auucugcacucaucccaggcgu

SEQ ID NO: 7877 - RNA, 23 nt, Artificial Sequence
  Synthetic
uauucugcacucaucccaggcgu

SEQ ID NO: 7878 - RNA, 24 nt, Artificial Sequence
  Synthetic
auauucugcacucaucccaggcgu

SEQ ID NO: 7879 - RNA, 18 nt, Artificial Sequence
  Synthetic
gucugguucaucaucugu

SEQ ID NO: 7880 - RNA, 19 nt, Artificial Sequence
  Synthetic
ggucugguucaucaucugu

SEQ ID NO: 7881 - RNA, 20 nt, Artificial Sequence
  Synthetic
uggucugguucaucaucugu

SEQ ID NO: 7882 - RNA, 21 nt, Artificial Sequence
  Synthetic
guggucugguucaucaucugu

SEQ ID NO: 7883 - RNA, 22 nt, Artificial Sequence
  Synthetic
cguggucugguucaucaucugu

SEQ ID NO: 7884 - RNA, 23 nt, Artificial Sequence
  Synthetic
ccguggucugguucaucaucugu

SEQ ID NO: 7885 - RNA, 24 nt, Artificial Sequence
  Synthetic
gccguggucugguucaucaucugu

SEQ ID NO: 7886 - RNA, 18 nt, Artificial Sequence
  Synthetic
ccguugggagcuccagaa

SEQ ID NO: 7887 - RNA, 19 nt, Artificial Sequence
  Synthetic
cccguugggagcuccagaa

SEQ ID NO: 7888 - RNA, 20 nt, Artificial Sequence
  Synthetic
gcccguugggagcuccagaa

SEQ ID NO: 7889 - RNA, 21 nt, Artificial Sequence
  Synthetic
ggcccguugggagcuccagaa

SEQ ID NO: 7890 - RNA, 22 nt, Artificial Sequence
  Synthetic
cggcccguugggagcuccagaa

SEQ ID NO: 7891 - RNA, 23 nt, Artificial Sequence
  Synthetic
acggcccguugggagcuccagaa

SEQ ID NO: 7892 - RNA, 24 nt, Artificial Sequence
  Synthetic
cacggcccguugggagcuccagaa

SEQ ID NO: 7893 - RNA, 18 nt, Artificial Sequence
  Synthetic
ggcauccaggucacgcca

SEQ ID NO: 7894 - RNA, 19 nt, Artificial Sequence
  Synthetic
uggcauccaggucacgcca

SEQ ID NO: 7895 - RNA, 20 nt, Artificial Sequence
  Synthetic
uuggcauccaggucacgcca

SEQ ID NO: 7896 - RNA, 21 nt, Artificial Sequence
  Synthetic
guuggcauccaggucacgcca

SEQ ID NO: 7897 - RNA, 22 nt, Artificial Sequence
  Synthetic
gguuggcauccaggucacgcca

SEQ ID NO: 7898 - RNA, 23 nt, Artificial Sequence
  Synthetic
agguuggcauccaggucacgcca

SEQ ID NO: 7899 - RNA, 24 nt, Artificial Sequence
  Synthetic
gagguuggcauccaggucacgcca

SEQ ID NO: 7900 - RNA, 21 nt, Artificial Sequence
  Synthetic
aaccccagcacuuaagcaaac

SEQ ID NO: 7901 - RNA, 22 nt, Artificial Sequence
  Synthetic
aaaccccagcacuuaagcaaac

SEQ ID NO: 7902 - RNA, 23 nt, Artificial Sequence
  Synthetic
caaaccccagcacuuaagcaaac

SEQ ID NO: 7903 - RNA, 24 nt, Artificial Sequence
  Synthetic
gcaaaccccagcacuuaagcaaac

SEQ ID NO: 7904 - RNA, 18 nt, Artificial Sequence
  Synthetic
agcucuaauccccacgcc

SEQ ID NO: 7905 - RNA, 19 nt, Artificial Sequence
  Synthetic
gagcucuaauccccacgcc

SEQ ID NO: 7906 - RNA, 20 nt, Artificial Sequence
  Synthetic
ggagcucuaauccccacgcc

SEQ ID NO: 7907 - RNA, 21 nt, Artificial Sequence
  Synthetic
uggagcucuaauccccacgcc

SEQ ID NO: 7908 - RNA, 22 nt, Artificial Sequence
  Synthetic
auggagcucuaauccccacgcc

SEQ ID NO: 7909 - RNA, 23 nt, Artificial Sequence
  Synthetic
cauggagcucuaauccccacgcc

SEQ ID NO: 7910 - RNA, 24 nt, Artificial Sequence
  Synthetic
acauggagcucuaauccccacgcc

SEQ ID NO: 7911 - RNA, 18 nt, Artificial Sequence
  Synthetic
uuuaucaacgucaucuag

SEQ ID NO: 7912 - RNA, 19 nt, Artificial Sequence
  Synthetic
guuuaucaacgucaucuag

SEQ ID NO: 7913 - RNA, 20 nt, Artificial Sequence
  Synthetic
uguuuaucaacgucaucuag

SEQ ID NO: 7914 - RNA, 21 nt, Artificial Sequence
  Synthetic
uuguuuaucaacgucaucuag

SEQ ID NO: 7915 - RNA, 22 nt, Artificial Sequence
  Synthetic
auuguuuaucaacgucaucuag

SEQ ID NO: 7916 - RNA, 23 nt, Artificial Sequence
  Synthetic
gauuguuuaucaacgucaucuag

SEQ ID NO: 7917 - RNA, 24 nt, Artificial Sequence
  Synthetic
cgauuguuuaucaacgucaucuag

SEQ ID NO: 7918 - RNA, 18 nt, Artificial Sequence
  Synthetic
agugcagaauaugccccg

SEQ ID NO: 7919 - RNA, 19 nt, Artificial Sequence
  Synthetic
gagugcagaauaugccccg

SEQ ID NO: 7920 - RNA, 20 nt, Artificial Sequence
  Synthetic
ugagugcagaauaugccccg

SEQ ID NO: 7921 - RNA, 21 nt, Artificial Sequence
  Synthetic
augagugcagaauaugccccg

SEQ ID NO: 7922 - RNA, 22 nt, Artificial Sequence
  Synthetic
gaugagugcagaauaugccccg

SEQ ID NO: 7923 - RNA, 23 nt, Artificial Sequence
  Synthetic
ggaugagugcagaauaugccccg

SEQ ID NO: 7924 - RNA, 24 nt, Artificial Sequence
  Synthetic
gggaugagugcagaauaugccccg

SEQ ID NO: 7925 - RNA, 18 nt, Artificial Sequence
  Synthetic
cuaauccccacgccuggg

SEQ ID NO: 7926 - RNA, 19 nt, Artificial Sequence
  Synthetic
ucuaauccccacgccuggg

SEQ ID NO: 7927 - RNA, 20 nt, Artificial Sequence
  Synthetic
cucuaauccccacgccuggg

SEQ ID NO: 7928 - RNA, 21 nt, Artificial Sequence
  Synthetic
gcucuaauccccacgccuggg

SEQ ID NO: 7929 - RNA, 22 nt, Artificial Sequence
  Synthetic
agcucuaauccccacgccuggg

SEQ ID NO: 7930 - RNA, 23 nt, Artificial Sequence
  Synthetic
gagcucuaauccccacgccuggg

SEQ ID NO: 7931 - RNA, 24 nt, Artificial Sequence
  Synthetic
ggagcucuaauccccacgccuggg

SEQ ID NO: 7932 - RNA, 18 nt, Artificial Sequence
  Synthetic
ccacgccugggaugagug

SEQ ID NO: 7933 - RNA, 19 nt, Artificial Sequence
  Synthetic
cccacgccugggaugagug

SEQ ID NO: 7934 - RNA, 20 nt, Artificial Sequence
  Synthetic
ccccacgccugggaugagug

SEQ ID NO: 7935 - RNA, 21 nt, Artificial Sequence
  Synthetic
uccccacgccugggaugagug

SEQ ID NO: 7936 - RNA, 22 nt, Artificial Sequence
  Synthetic
auccccacgccugggaugagug

SEQ ID NO: 7937 - RNA, 23 nt, Artificial Sequence
  Synthetic
aauccccacgccugggaugagug

SEQ ID NO: 7938 - RNA, 24 nt, Artificial Sequence
  Synthetic
uaauccccacgccugggaugagug

SEQ ID NO: 7939 - RNA, 18 nt, Artificial Sequence
  Synthetic
cucugcuuagaaaaagcu

SEQ ID NO: 7940 - RNA, 19 nt, Artificial Sequence
  Synthetic
ccucugcuuagaaaaagcu

SEQ ID NO: 7941 - RNA, 20 nt, Artificial Sequence
  Synthetic
gccucugcuuagaaaaagcu

SEQ ID NO: 7942 - RNA, 21 nt, Artificial Sequence
  Synthetic
agccucugcuuagaaaaagcu

SEQ ID NO: 7943 - RNA, 22 nt, Artificial Sequence
  Synthetic
cagccucugcuuagaaaaagcu

SEQ ID NO: 7944 - RNA, 23 nt, Artificial Sequence
  Synthetic
gcagccucugcuuagaaaaagcu

SEQ ID NO: 7945 - RNA, 24 nt, Artificial Sequence
  Synthetic
ggcagccucugcuuagaaaaagcu

SEQ ID NO: 7946 - RNA, 18 nt, Artificial Sequence
  Synthetic
ccuggaugccaaccucca

SEQ ID NO: 7947 - RNA, 19 nt, Artificial Sequence
  Synthetic
accuggaugccaaccucca

SEQ ID NO: 7948 - RNA, 20 nt, Artificial Sequence
  Synthetic
gaccuggaugccaaccucca

SEQ ID NO: 7949 - RNA, 18 nt, Artificial Sequence
  Synthetic
cccagcacuuaagcaaac

SEQ ID NO: 7950 - RNA, 19 nt, Artificial Sequence
  Synthetic
ccccagcacuuaagcaaac

SEQ ID NO: 7951 - RNA, 20 nt, Artificial Sequence
  Synthetic
accccagcacuuaagcaaac

SEQ ID NO: 7952 - RNA, 18 nt, Artificial Sequence
  Synthetic
aauaagaaugucccccaa

SEQ ID NO: 7953 - RNA, 19 nt, Artificial Sequence
  Synthetic
aaauaagaaugucccccaa

SEQ ID NO: 7954 - RNA, 20 nt, Artificial Sequence
  Synthetic
aaaauaagaaugucccccaa

SEQ ID NO: 7955 - RNA, 21 nt, Artificial Sequence
  Synthetic
aaaaauaagaaugucccccaa

SEQ ID NO: 7956 - RNA, 22 nt, Artificial Sequence
  Synthetic
uaaaaauaagaaugucccccaa

SEQ ID NO: 7957 - RNA, 23 nt, Artificial Sequence
  Synthetic
auaaaaauaagaaugucccccaa

SEQ ID NO: 7958 - RNA, 24 nt, Artificial Sequence
  Synthetic
gauaaaaauaagaaugucccccaa

SEQ ID NO: 7959 - RNA, 18 nt, Artificial Sequence
  Synthetic
uucaucucgauuggugaa

SEQ ID NO: 7960 - RNA, 19 nt, Artificial Sequence
  Synthetic
uuucaucucgauuggugaa

SEQ ID NO: 7961 - RNA, 20 nt, Artificial Sequence
  Synthetic
uuuucaucucgauuggugaa

SEQ ID NO: 7962 - RNA, 21 nt, Artificial Sequence
  Synthetic
uuuuucaucucgauuggugaa

SEQ ID NO: 7963 - RNA, 22 nt, Artificial Sequence
  Synthetic
uuuuuucaucucgauuggugaa

SEQ ID NO: 7964 - RNA, 23 nt, Artificial Sequence
  Synthetic
cuuuuuucaucucgauuggugaa

SEQ ID NO: 7965 - RNA, 24 nt, Artificial Sequence
  Synthetic
gcuuuuuucaucucgauuggugaa

SEQ ID NO: 7966 - RNA, 18 nt, Artificial Sequence
  Synthetic
aaauaagaauguccccca

SEQ ID NO: 7967 - RNA, 19 nt, Artificial Sequence
  Synthetic
aaaauaagaauguccccca

SEQ ID NO: 7968 - RNA, 20 nt, Artificial Sequence
  Synthetic
aaaaauaagaauguccccca

SEQ ID NO: 7969 - RNA, 21 nt, Artificial Sequence
  Synthetic
uaaaaauaagaauguccccca

SEQ ID NO: 7970 - RNA, 22 nt, Artificial Sequence
  Synthetic
auaaaaauaagaauguccccca

SEQ ID NO: 7971 - RNA, 23 nt, Artificial Sequence
  Synthetic
gauaaaaauaagaauguccccca

SEQ ID NO: 7972 - RNA, 24 nt, Artificial Sequence
  Synthetic
cgauaaaaauaagaauguccccca

SEQ ID NO: 7973 - RNA, 18 nt, Artificial Sequence
  Synthetic
ccccuucuggagcuccca

SEQ ID NO: 7974 - RNA, 19 nt, Artificial Sequence
  Synthetic
uccccuucuggagcuccca

SEQ ID NO: 7975 - RNA, 20 nt, Artificial Sequence
  Synthetic
auccccuucuggagcuccca

SEQ ID NO: 7976 - RNA, 21 nt, Artificial Sequence
  Synthetic
gauccccuucuggagcuccca

SEQ ID NO: 7977 - RNA, 22 nt, Artificial Sequence
  Synthetic
ugauccccuucuggagcuccca

SEQ ID NO: 7978 - RNA, 23 nt, Artificial Sequence
  Synthetic
augauccccuucuggagcuccca

SEQ ID NO: 7979 - RNA, 24 nt, Artificial Sequence
  Synthetic
caugauccccuucuggagcuccca

SEQ ID NO: 7980 - RNA, 18 nt, Artificial Sequence
  Synthetic
uagagcuccaugugcaga

SEQ ID NO: 7981 - RNA, 19 nt, Artificial Sequence
  Synthetic
uuagagcuccaugugcaga

SEQ ID NO: 7982 - RNA, 20 nt, Artificial Sequence
  Synthetic
auuagagcuccaugugcaga

SEQ ID NO: 7983 - RNA, 21 nt, Artificial Sequence
  Synthetic
gauuagagcuccaugugcaga

SEQ ID NO: 7984 - RNA, 22 nt, Artificial Sequence
  Synthetic
ggauuagagcuccaugugcaga

SEQ ID NO: 7985 - RNA, 23 nt, Artificial Sequence
  Synthetic
gggauuagagcuccaugugcaga

SEQ ID NO: 7986 - RNA, 24 nt, Artificial Sequence
  Synthetic
ggggauuagagcuccaugugcaga

SEQ ID NO: 7987 - RNA, 18 nt, Artificial Sequence
  Synthetic
gcuccaugugcagaacga

SEQ ID NO: 7988 - RNA, 19 nt, Artificial Sequence
  Synthetic
agcuccaugugcagaacga

SEQ ID NO: 7989 - RNA, 20 nt, Artificial Sequence
  Synthetic
gagcuccaugugcagaacga

SEQ ID NO: 7990 - RNA, 21 nt, Artificial Sequence
  Synthetic
agagcuccaugugcagaacga

SEQ ID NO: 7991 - RNA, 22 nt, Artificial Sequence
  Synthetic
uagagcuccaugugcagaacga

SEQ ID NO: 7992 - RNA, 23 nt, Artificial Sequence
  Synthetic
uuagagcuccaugugcagaacga

SEQ ID NO: 7993 - RNA, 24 nt, Artificial Sequence
  Synthetic
auuagagcuccaugugcagaacga

SEQ ID NO: 7994 - RNA, 18 nt, Artificial Sequence
  Synthetic
uuucaucucgauugguga

SEQ ID NO: 7995 - RNA, 19 nt, Artificial Sequence
  Synthetic
uuuucaucucgauugguga

SEQ ID NO: 7996 - RNA, 20 nt, Artificial Sequence
  Synthetic
uuuuucaucucgauugguga

SEQ ID NO: 7997 - RNA, 21 nt, Artificial Sequence
  Synthetic
uuuuuucaucucgauugguga

SEQ ID NO: 7998 - RNA, 22 nt, Artificial Sequence
  Synthetic
cuuuuuucaucucgauugguga

SEQ ID NO: 7999 - RNA, 23 nt, Artificial Sequence
  Synthetic
gcuuuuuucaucucgauugguga

SEQ ID NO: 8000 - RNA, 24 nt, Artificial Sequence
  Synthetic
ugcuuuuuucaucucgauugguga

SEQ ID NO: 8001 - RNA, 18 nt, Artificial Sequence
  Synthetic
gcagaaguuuaucuguga

SEQ ID NO: 8002 - RNA, 19 nt, Artificial Sequence
  Synthetic
ugcagaaguuuaucuguga

SEQ ID NO: 8003 - RNA, 20 nt, Artificial Sequence
  Synthetic
gugcagaaguuuaucuguga

SEQ ID NO: 8004 - RNA, 21 nt, Artificial Sequence
  Synthetic
agugcagaaguuuaucuguga

SEQ ID NO: 8005 - RNA, 22 nt, Artificial Sequence
  Synthetic
cagugcagaaguuuaucuguga

SEQ ID NO: 8006 - RNA, 23 nt, Artificial Sequence
  Synthetic
ccagugcagaaguuuaucuguga

SEQ ID NO: 8007 - RNA, 24 nt, Artificial Sequence
  Synthetic
uccagugcagaaguuuaucuguga

SEQ ID NO: 8008 - RNA, 18 nt, Artificial Sequence
  Synthetic
gagcuccaugugcagaac

SEQ ID NO: 8009 - RNA, 19 nt, Artificial Sequence
  Synthetic
agagcuccaugugcagaac

SEQ ID NO: 8010 - RNA, 20 nt, Artificial Sequence
  Synthetic
uagagcuccaugugcagaac

SEQ ID NO: 8011 - RNA, 21 nt, Artificial Sequence
  Synthetic
uuagagcuccaugugcagaac

SEQ ID NO: 8012 - RNA, 22 nt, Artificial Sequence
  Synthetic
auuagagcuccaugugcagaac

SEQ ID NO: 8013 - RNA, 23 nt, Artificial Sequence
  Synthetic
gauuagagcuccaugugcagaac

SEQ ID NO: 8014 - RNA, 24 nt, Artificial Sequence
  Synthetic
ggauuagagcuccaugugcagaac

SEQ ID NO: 8015 - RNA, 18 nt, Artificial Sequence
  Synthetic
uauuauuggguuacuuac

SEQ ID NO: 8016 - RNA, 19 nt, Artificial Sequence
  Synthetic
cuauuauuggguuacuuac

SEQ ID NO: 8017 - RNA, 20 nt, Artificial Sequence
  Synthetic
acuauuauuggguuacuuac

SEQ ID NO: 8018 - RNA, 21 nt, Artificial Sequence
  Synthetic
uacuauuauuggguuacuuac

SEQ ID NO: 8019 - RNA, 22 nt, Artificial Sequence
  Synthetic
uuacuauuauuggguuacuuac

SEQ ID NO: 8020 - RNA, 23 nt, Artificial Sequence
  Synthetic
auuacuauuauuggguuacuuac

SEQ ID NO: 8021 - RNA, 24 nt, Artificial Sequence
  Synthetic
uauuacuauuauuggguuacuuac

SEQ ID NO: 8022 - RNA, 18 nt, Artificial Sequence
  Synthetic
accuggaugccaaccucc

SEQ ID NO: 8023 - RNA, 19 nt, Artificial Sequence
  Synthetic
gaccuggaugccaaccucc

SEQ ID NO: 8024 - RNA, 20 nt, Artificial Sequence
  Synthetic
ugaccuggaugccaaccucc

SEQ ID NO: 8025 - RNA, 21 nt, Artificial Sequence
  Synthetic
gugaccuggaugccaaccucc

SEQ ID NO: 8026 - RNA, 22 nt, Artificial Sequence
  Synthetic
cgugaccuggaugccaaccucc

SEQ ID NO: 8027 - RNA, 23 nt, Artificial Sequence
  Synthetic
gcgugaccuggaugccaaccucc

SEQ ID NO: 8028 - RNA, 24 nt, Artificial Sequence
  Synthetic
ggcgugaccuggaugccaaccucc

SEQ ID NO: 8029 - RNA, 18 nt, Artificial Sequence
  Synthetic
ucugcacucaucccaggc

SEQ ID NO: 8030 - RNA, 19 nt, Artificial Sequence
  Synthetic
uucugcacucaucccaggc

SEQ ID NO: 8031 - RNA, 20 nt, Artificial Sequence
  Synthetic
auucugcacucaucccaggc

SEQ ID NO: 8032 - RNA, 21 nt, Artificial Sequence
  Synthetic
uauucugcacucaucccaggc

SEQ ID NO: 8033 - RNA, 22 nt, Artificial Sequence
  Synthetic
auauucugcacucaucccaggc

SEQ ID NO: 8034 - RNA, 23 nt, Artificial Sequence
  Synthetic
cauauucugcacucaucccaggc

SEQ ID NO: 8035 - RNA, 24 nt, Artificial Sequence
  Synthetic
gcauauucugcacucaucccaggc

SEQ ID NO: 8036 - RNA, 18 nt, Artificial Sequence
  Synthetic
gaggucaugauccccuuc

SEQ ID NO: 8037 - RNA, 19 nt, Artificial Sequence
  Synthetic
ggaggucaugauccccuuc

SEQ ID NO: 8038 - RNA, 20 nt, Artificial Sequence
  Synthetic
aggaggucaugauccccuuc

SEQ ID NO: 8039 - RNA, 21 nt, Artificial Sequence
  Synthetic
gaggaggucaugauccccuuc

SEQ ID NO: 8040 - RNA, 22 nt, Artificial Sequence
  Synthetic
ugaggaggucaugauccccuuc

SEQ ID NO: 8041 - RNA, 23 nt, Artificial Sequence
  Synthetic
gugaggaggucaugauccccuuc

SEQ ID NO: 8042 - RNA, 24 nt, Artificial Sequence
  Synthetic
ggugaggaggucaugauccccuuc

SEQ ID NO: 8043 - RNA, 18 nt, Artificial Sequence
  Synthetic
aucuguaagaauggcuuc

SEQ ID NO: 8044 - RNA, 19 nt, Artificial Sequence
  Synthetic
caucuguaagaauggcuuc

SEQ ID NO: 8045 - RNA, 20 nt, Artificial Sequence
  Synthetic
ucaucuguaagaauggcuuc

SEQ ID NO: 8046 - RNA, 21 nt, Artificial Sequence
  Synthetic
aucaucuguaagaauggcuuc

SEQ ID NO: 8047 - RNA, 22 nt, Artificial Sequence
  Synthetic
caucaucuguaagaauggcuuc

SEQ ID NO: 8048 - RNA, 23 nt, Artificial Sequence
  Synthetic
ucaucaucuguaagaauggcuuc

SEQ ID NO: 8049 - RNA, 24 nt, Artificial Sequence
  Synthetic
uucaucaucuguaagaauggcuuc

SEQ ID NO: 8050 - RNA, 18 nt, Artificial Sequence
  Synthetic
ucaucucgauuggugaag

SEQ ID NO: 8051 - RNA, 19 nt, Artificial Sequence
  Synthetic
uucaucucgauuggugaag

SEQ ID NO: 8052 - RNA, 20 nt, Artificial Sequence
  Synthetic
uuucaucucgauuggugaag

SEQ ID NO: 8053 - RNA, 21 nt, Artificial Sequence
  Synthetic
uuuucaucucgauuggugaag

SEQ ID NO: 8054 - RNA, 22 nt, Artificial Sequence
  Synthetic
uuuuucaucucgauuggugaag

SEQ ID NO: 8055 - RNA, 23 nt, Artificial Sequence
  Synthetic
uuuuuucaucucgauuggugaag

SEQ ID NO: 8056 - RNA, 24 nt, Artificial Sequence
  Synthetic
cuuuuuucaucucgauuggugaag

SEQ ID NO: 8057 - RNA, 18 nt, Artificial Sequence
  Synthetic
uccacagcuuuuucuaag

SEQ ID NO: 8058 - RNA, 19 nt, Artificial Sequence
  Synthetic
auccacagcuuuuucuaag

SEQ ID NO: 8059 - RNA, 20 nt, Artificial Sequence
  Synthetic
uauccacagcuuuuucuaag

SEQ ID NO: 8060 - RNA, 21 nt, Artificial Sequence
  Synthetic
uuauccacagcuuuuucuaag

SEQ ID NO: 8061 - RNA, 22 nt, Artificial Sequence
  Synthetic
cuuauccacagcuuuuucuaag

SEQ ID NO: 8062 - RNA, 23 nt, Artificial Sequence
  Synthetic
gcuuauccacagcuuuuucuaag

SEQ ID NO: 8063 - RNA, 24 nt, Artificial Sequence
  Synthetic
ggcuuauccacagcuuuuucuaag

SEQ ID NO: 8064 - RNA, 18 nt, Artificial Sequence
  Synthetic
aucuggcacugcccacag

SEQ ID NO: 8065 - RNA, 19 nt, Artificial Sequence
  Synthetic
caucuggcacugcccacag

SEQ ID NO: 8066 - RNA, 20 nt, Artificial Sequence
  Synthetic
ucaucuggcacugcccacag

SEQ ID NO: 8067 - RNA, 21 nt, Artificial Sequence
  Synthetic
uucaucuggcacugcccacag

SEQ ID NO: 8068 - RNA, 22 nt, Artificial Sequence
  Synthetic
guucaucuggcacugcccacag

SEQ ID NO: 8069 - RNA, 23 nt, Artificial Sequence
  Synthetic
aguucaucuggcacugcccacag

SEQ ID NO: 8070 - RNA, 24 nt, Artificial Sequence
  Synthetic
aaguucaucuggcacugcccacag

SEQ ID NO: 8071 - RNA, 18 nt, Artificial Sequence
  Synthetic
cuccaugugcagaacgag

SEQ ID NO: 8072 - RNA, 19 nt, Artificial Sequence
  Synthetic
gcuccaugugcagaacgag

SEQ ID NO: 8073 - RNA, 20 nt, Artificial Sequence
  Synthetic
agcuccaugugcagaacgag

SEQ ID NO: 8074 - RNA, 21 nt, Artificial Sequence
  Synthetic
gagcuccaugugcagaacgag

SEQ ID NO: 8075 - RNA, 22 nt, Artificial Sequence
  Synthetic
agagcuccaugugcagaacgag

SEQ ID NO: 8076 - RNA, 23 nt, Artificial Sequence
  Synthetic
uagagcuccaugugcagaacgag

SEQ ID NO: 8077 - RNA, 24 nt, Artificial Sequence
  Synthetic
uuagagcuccaugugcagaacgag

SEQ ID NO: 8078 - RNA, 18 nt, Artificial Sequence
  Synthetic
ugugcagaacgaggggag

SEQ ID NO: 8079 - RNA, 19 nt, Artificial Sequence
  Synthetic
augugcagaacgaggggag

SEQ ID NO: 8080 - RNA, 20 nt, Artificial Sequence
  Synthetic
caugugcagaacgaggggag

SEQ ID NO: 8081 - RNA, 21 nt, Artificial Sequence
  Synthetic
ccaugugcagaacgaggggag

SEQ ID NO: 8082 - RNA, 22 nt, Artificial Sequence
  Synthetic
uccaugugcagaacgaggggag

SEQ ID NO: 8083 - RNA, 23 nt, Artificial Sequence
  Synthetic
cuccaugugcagaacgaggggag

SEQ ID NO: 8084 - RNA, 24 nt, Artificial Sequence
  Synthetic
gcuccaugugcagaacgaggggag

SEQ ID NO: 8085 - RNA, 18 nt, Artificial Sequence
  Synthetic
agcuccaugugcagaacg

SEQ ID NO: 8086 - RNA, 19 nt, Artificial Sequence
  Synthetic
gagcuccaugugcagaacg

SEQ ID NO: 8087 - RNA, 20 nt, Artificial Sequence
  Synthetic
agagcuccaugugcagaacg

SEQ ID NO: 8088 - RNA, 21 nt, Artificial Sequence
  Synthetic
uagagcuccaugugcagaacg

SEQ ID NO: 8089 - RNA, 22 nt, Artificial Sequence
  Synthetic
uuagagcuccaugugcagaacg

SEQ ID NO: 8090 - RNA, 23 nt, Artificial Sequence
  Synthetic
auuagagcuccaugugcagaacg

SEQ ID NO: 8091 - RNA, 24 nt, Artificial Sequence
  Synthetic
gauuagagcuccaugugcagaacg

SEQ ID NO: 8092 - RNA, 18 nt, Artificial Sequence
  Synthetic
cugcacucaucccaggcg

SEQ ID NO: 8093 - RNA, 19 nt, Artificial Sequence
  Synthetic
ucugcacucaucccaggcg

SEQ ID NO: 8094 - RNA, 20 nt, Artificial Sequence
  Synthetic
uucugcacucaucccaggcg

SEQ ID NO: 8095 - RNA, 21 nt, Artificial Sequence
  Synthetic
auucugcacucaucccaggcg

SEQ ID NO: 8096 - RNA, 22 nt, Artificial Sequence
  Synthetic
uauucugcacucaucccaggcg

SEQ ID NO: 8097 - RNA, 23 nt, Artificial Sequence
  Synthetic
auauucugcacucaucccaggcg

SEQ ID NO: 8098 - RNA, 24 nt, Artificial Sequence
  Synthetic
cauauucugcacucaucccaggcg

SEQ ID NO: 8099 - RNA, 18 nt, Artificial Sequence
  Synthetic
ggguuugccuugcuugcg

SEQ ID NO: 8100 - RNA, 19 nt, Artificial Sequence
  Synthetic
gggguuugccuugcuugcg

SEQ ID NO: 8101 - RNA, 20 nt, Artificial Sequence
  Synthetic
ugggguuugccuugcuugcg

SEQ ID NO: 8102 - RNA, 21 nt, Artificial Sequence
  Synthetic
cugggguuugccuugcuugcg

SEQ ID NO: 8103 - RNA, 22 nt, Artificial Sequence
  Synthetic
gcugggguuugccuugcuugcg

SEQ ID NO: 8104 - RNA, 23 nt, Artificial Sequence
  Synthetic
ugcugggguuugccuugcuugcg

SEQ ID NO: 8105 - RNA, 24 nt, Artificial Sequence
  Synthetic
gugcugggguuugccuugcuugcg

SEQ ID NO: 8106 - RNA, 18 nt, Artificial Sequence
  Synthetic
ccaugugcagaacgaggg

SEQ ID NO: 8107 - RNA, 19 nt, Artificial Sequence
  Synthetic
uccaugugcagaacgaggg

SEQ ID NO: 8108 - RNA, 20 nt, Artificial Sequence
  Synthetic
cuccaugugcagaacgaggg

SEQ ID NO: 8109 - RNA, 21 nt, Artificial Sequence
  Synthetic
gcuccaugugcagaacgaggg

SEQ ID NO: 8110 - RNA, 22 nt, Artificial Sequence
  Synthetic
agcuccaugugcagaacgaggg

SEQ ID NO: 8111 - RNA, 23 nt, Artificial Sequence
  Synthetic
gagcuccaugugcagaacgaggg

SEQ ID NO: 8112 - RNA, 24 nt, Artificial Sequence
  Synthetic
agagcuccaugugcagaacgaggg

SEQ ID NO: 8113 - RNA, 18 nt, Artificial Sequence
  Synthetic
gacauggugggcugcggg

SEQ ID NO: 8114 - RNA, 19 nt, Artificial Sequence
  Synthetic
agacauggugggcugcggg

SEQ ID NO: 8115 - RNA, 20 nt, Artificial Sequence
  Synthetic
gagacauggugggcugcggg

SEQ ID NO: 8116 - RNA, 21 nt, Artificial Sequence
  Synthetic
cgagacauggugggcugcggg

SEQ ID NO: 8117 - RNA, 22 nt, Artificial Sequence
  Synthetic
gcgagacauggugggcugcggg

SEQ ID NO: 8118 - RNA, 23 nt, Artificial Sequence
  Synthetic
ggcgagacauggugggcugcggg

SEQ ID NO: 8119 - RNA, 24 nt, Artificial Sequence
  Synthetic
cggcgagacauggugggcugcggg

SEQ ID NO: 8120 - RNA, 18 nt, Artificial Sequence
  Synthetic
caugugcagaacgagggg

SEQ ID NO: 8121 - RNA, 19 nt, Artificial Sequence
  Synthetic
ccaugugcagaacgagggg

SEQ ID NO: 8122 - RNA, 20 nt, Artificial Sequence
  Synthetic
uccaugugcagaacgagggg

SEQ ID NO: 8123 - RNA, 21 nt, Artificial Sequence
  Synthetic
cuccaugugcagaacgagggg

SEQ ID NO: 8124 - RNA, 22 nt, Artificial Sequence
  Synthetic
gcuccaugugcagaacgagggg

SEQ ID NO: 8125 - RNA, 23 nt, Artificial Sequence
  Synthetic
agcuccaugugcagaacgagggg

SEQ ID NO: 8126 - RNA, 24 nt, Artificial Sequence
  Synthetic
gagcuccaugugcagaacgagggg

SEQ ID NO: 8127 - RNA, 18 nt, Artificial Sequence
  Synthetic
caagaggcucggcugugg

SEQ ID NO: 8128 - RNA, 19 nt, Artificial Sequence
  Synthetic
ucaagaggcucggcugugg

SEQ ID NO: 8129 - RNA, 20 nt, Artificial Sequence
  Synthetic
uucaagaggcucggcugugg

SEQ ID NO: 8130 - RNA, 21 nt, Artificial Sequence
  Synthetic
cuucaagaggcucggcugugg

SEQ ID NO: 8131 - RNA, 22 nt, Artificial Sequence
  Synthetic
gcuucaagaggcucggcugugg

SEQ ID NO: 8132 - RNA, 23 nt, Artificial Sequence
  Synthetic
ggcuucaagaggcucggcugugg

SEQ ID NO: 8133 - RNA, 24 nt, Artificial Sequence
  Synthetic
uggcuucaagaggcucggcugugg

SEQ ID NO: 8134 - RNA, 18 nt, Artificial Sequence
  Synthetic
ugcuugcggcgagacaug

SEQ ID NO: 8135 - RNA, 19 nt, Artificial Sequence
  Synthetic
uugcuugcggcgagacaug

SEQ ID NO: 8136 - RNA, 20 nt, Artificial Sequence
  Synthetic
cuugcuugcggcgagacaug

SEQ ID NO: 8137 - RNA, 21 nt, Artificial Sequence
  Synthetic
ccuugcuugcggcgagacaug

SEQ ID NO: 8138 - RNA, 22 nt, Artificial Sequence
  Synthetic
gccuugcuugcggcgagacaug

SEQ ID NO: 8139 - RNA, 23 nt, Artificial Sequence
  Synthetic
ugccuugcuugcggcgagacaug

SEQ ID NO: 8140 - RNA, 24 nt, Artificial Sequence
  Synthetic
uugccuugcuugcggcgagacaug

SEQ ID NO: 8141 - RNA, 18 nt, Artificial Sequence
  Synthetic
caacuuacaaauacccug

SEQ ID NO: 8142 - RNA, 19 nt, Artificial Sequence
  Synthetic
ucaacuuacaaauacccug

SEQ ID NO: 8143 - RNA, 20 nt, Artificial Sequence
  Synthetic
cucaacuuacaaauacccug

SEQ ID NO: 8144 - RNA, 21 nt, Artificial Sequence
  Synthetic
gcucaacuuacaaauacccug

SEQ ID NO: 8145 - RNA, 22 nt, Artificial Sequence
  Synthetic
ggcucaacuuacaaauacccug

SEQ ID NO: 8146 - RNA, 23 nt, Artificial Sequence
  Synthetic
aggcucaacuuacaaauacccug

SEQ ID NO: 8147 - RNA, 24 nt, Artificial Sequence
  Synthetic
aaggcucaacuuacaaauacccug

SEQ ID NO: 8148 - RNA, 18 nt, Artificial Sequence
  Synthetic
guuguacauguguagcug

SEQ ID NO: 8149 - RNA, 19 nt, Artificial Sequence
  Synthetic
aguuguacauguguagcug

SEQ ID NO: 8150 - RNA, 20 nt, Artificial Sequence
  Synthetic
aaguuguacauguguagcug

SEQ ID NO: 8151 - RNA, 21 nt, Artificial Sequence
  Synthetic
caaguuguacauguguagcug

SEQ ID NO: 8152 - RNA, 22 nt, Artificial Sequence
  Synthetic
gcaaguuguacauguguagcug

SEQ ID NO: 8153 - RNA, 23 nt, Artificial Sequence
  Synthetic
ugcaaguuguacauguguagcug

SEQ ID NO: 8154 - RNA, 24 nt, Artificial Sequence
  Synthetic
uugcaaguuguacauguguagcug

SEQ ID NO: 8155 - RNA, 18 nt, Artificial Sequence
  Synthetic
gcgagacauggugggcug

SEQ ID NO: 8156 - RNA, 19 nt, Artificial Sequence
  Synthetic
ggcgagacauggugggcug

SEQ ID NO: 8157 - RNA, 20 nt, Artificial Sequence
  Synthetic
cggcgagacauggugggcug

SEQ ID NO: 8158 - RNA, 21 nt, Artificial Sequence
  Synthetic
gcggcgagacauggugggcug

SEQ ID NO: 8159 - RNA, 22 nt, Artificial Sequence
  Synthetic
ugcggcgagacauggugggcug

SEQ ID NO: 8160 - RNA, 23 nt, Artificial Sequence
  Synthetic
uugcggcgagacauggugggcug

SEQ ID NO: 8161 - RNA, 24 nt, Artificial Sequence
  Synthetic
cuugcggcgagacauggugggcug

SEQ ID NO: 8162 - RNA, 18 nt, Artificial Sequence
  Synthetic
uucccguuugcuuaagug

SEQ ID NO: 8163 - RNA, 19 nt, Artificial Sequence
  Synthetic
auucccguuugcuuaagug

SEQ ID NO: 8164 - RNA, 20 nt, Artificial Sequence
  Synthetic
aauucccguuugcuuaagug

SEQ ID NO: 8165 - RNA, 21 nt, Artificial Sequence
  Synthetic
gaauucccguuugcuuaagug

SEQ ID NO: 8166 - RNA, 22 nt, Artificial Sequence
  Synthetic
agaauucccguuugcuuaagug

SEQ ID NO: 8167 - RNA, 23 nt, Artificial Sequence
  Synthetic
gagaauucccguuugcuuaagug

SEQ ID NO: 8168 - RNA, 24 nt, Artificial Sequence
  Synthetic
cgagaauucccguuugcuuaagug

SEQ ID NO: 8169 - RNA, 18 nt, Artificial Sequence
  Synthetic
ggagaggccccuccagug

SEQ ID NO: 8170 - RNA, 19 nt, Artificial Sequence
  Synthetic
aggagaggccccuccagug

SEQ ID NO: 8171 - RNA, 20 nt, Artificial Sequence
  Synthetic
gaggagaggccccuccagug

SEQ ID NO: 8172 - RNA, 21 nt, Artificial Sequence
  Synthetic
ggaggagaggccccuccagug

SEQ ID NO: 8173 - RNA, 22 nt, Artificial Sequence
  Synthetic
gggaggagaggccccuccagug

SEQ ID NO: 8174 - RNA, 23 nt, Artificial Sequence
  Synthetic
ggggaggagaggccccuccagug

SEQ ID NO: 8175 - RNA, 24 nt, Artificial Sequence
  Synthetic
aggggaggagaggccccuccagug

SEQ ID NO: 8176 - RNA, 18 nt, Artificial Sequence
  Synthetic
uggcacugcccacaggug

SEQ ID NO: 8177 - RNA, 19 nt, Artificial Sequence
  Synthetic
cuggcacugcccacaggug

SEQ ID NO: 8178 - RNA, 20 nt, Artificial Sequence
  Synthetic
ucuggcacugcccacaggug

SEQ ID NO: 8179 - RNA, 21 nt, Artificial Sequence
  Synthetic
aucuggcacugcccacaggug

SEQ ID NO: 8180 - RNA, 22 nt, Artificial Sequence
  Synthetic
caucuggcacugcccacaggug

SEQ ID NO: 8181 - RNA, 23 nt, Artificial Sequence
  Synthetic
ucaucuggcacugcccacaggug

SEQ ID NO: 8182 - RNA, 24 nt, Artificial Sequence
  Synthetic
uucaucuggcacugcccacaggug

SEQ ID NO: 8183 - RNA, 18 nt, Artificial Sequence
  Synthetic
uuuucaucucgauuggug

SEQ ID NO: 8184 - RNA, 19 nt, Artificial Sequence
  Synthetic
uuuuucaucucgauuggug

SEQ ID NO: 8185 - RNA, 20 nt, Artificial Sequence
  Synthetic
uuuuuucaucucgauuggug

SEQ ID NO: 8186 - RNA, 21 nt, Artificial Sequence
  Synthetic
cuuuuuucaucucgauuggug

SEQ ID NO: 8187 - RNA, 22 nt, Artificial Sequence
  Synthetic
gcuuuuuucaucucgauuggug

SEQ ID NO: 8188 - RNA, 23 nt, Artificial Sequence
  Synthetic
ugcuuuuuucaucucgauuggug

SEQ ID NO: 8189 - RNA, 24 nt, Artificial Sequence
  Synthetic
augcuuuuuucaucucgauuggug

SEQ ID NO: 8190 - RNA, 18 nt, Artificial Sequence
  Synthetic
ggauuagagcuccaugug

SEQ ID NO: 8191 - RNA, 19 nt, Artificial Sequence
  Synthetic
gggauuagagcuccaugug

SEQ ID NO: 8192 - RNA, 20 nt, Artificial Sequence
  Synthetic
ggggauuagagcuccaugug

SEQ ID NO: 8193 - RNA, 21 nt, Artificial Sequence
  Synthetic
uggggauuagagcuccaugug

SEQ ID NO: 8194 - RNA, 22 nt, Artificial Sequence
  Synthetic
guggggauuagagcuccaugug

SEQ ID NO: 8195 - RNA, 23 nt, Artificial Sequence
  Synthetic
cguggggauuagagcuccaugug

SEQ ID NO: 8196 - RNA, 24 nt, Artificial Sequence
  Synthetic
gcguggggauuagagcuccaugug

SEQ ID NO: 8197 - RNA, 18 nt, Artificial Sequence
  Synthetic
cuuuuuucaucucgauug

SEQ ID NO: 8198 - RNA, 19 nt, Artificial Sequence
  Synthetic
gcuuuuuucaucucgauug

SEQ ID NO: 8199 - RNA, 20 nt, Artificial Sequence
  Synthetic
ugcuuuuuucaucucgauug

SEQ ID NO: 8200 - RNA, 21 nt, Artificial Sequence
  Synthetic
augcuuuuuucaucucgauug

SEQ ID NO: 8201 - RNA, 22 nt, Artificial Sequence
  Synthetic
gaugcuuuuuucaucucgauug

SEQ ID NO: 8202 - RNA, 23 nt, Artificial Sequence
  Synthetic
ggaugcuuuuuucaucucgauug

SEQ ID NO: 8203 - RNA, 24 nt, Artificial Sequence
  Synthetic
uggaugcuuuuuucaucucgauug

SEQ ID NO: 8204 - RNA, 18 nt, Artificial Sequence
  Synthetic
gaggcucggcugugguug

SEQ ID NO: 8205 - RNA, 19 nt, Artificial Sequence
  Synthetic
agaggcucggcugugguug

SEQ ID NO: 8206 - RNA, 20 nt, Artificial Sequence
  Synthetic
aagaggcucggcugugguug

SEQ ID NO: 8207 - RNA, 21 nt, Artificial Sequence
  Synthetic
caagaggcucggcugugguug

SEQ ID NO: 8208 - RNA, 22 nt, Artificial Sequence
  Synthetic
ucaagaggcucggcugugguug

SEQ ID NO: 8209 - RNA, 23 nt, Artificial Sequence
  Synthetic
uucaagaggcucggcugugguug

SEQ ID NO: 8210 - RNA, 24 nt, Artificial Sequence
  Synthetic
cuucaagaggcucggcugugguug

SEQ ID NO: 8211 - RNA, 18 nt, Artificial Sequence
  Synthetic
auaagaaugucccccaau

SEQ ID NO: 8212 - RNA, 19 nt, Artificial Sequence
  Synthetic
aauaagaaugucccccaau

SEQ ID NO: 8213 - RNA, 20 nt, Artificial Sequence
  Synthetic
aaauaagaaugucccccaau

SEQ ID NO: 8214 - RNA, 21 nt, Artificial Sequence
  Synthetic
aaaauaagaaugucccccaau

SEQ ID NO: 8215 - RNA, 22 nt, Artificial Sequence
  Synthetic
aaaaauaagaaugucccccaau

SEQ ID NO: 8216 - RNA, 23 nt, Artificial Sequence
  Synthetic
uaaaaauaagaaugucccccaau

SEQ ID NO: 8217 - RNA, 24 nt, Artificial Sequence
  Synthetic
auaaaaauaagaaugucccccaau

SEQ ID NO: 8218 - RNA, 18 nt, Artificial Sequence
  Synthetic
caucccaggcguggggau

SEQ ID NO: 8219 - RNA, 19 nt, Artificial Sequence
  Synthetic
ucaucccaggcguggggau

SEQ ID NO: 8220 - RNA, 20 nt, Artificial Sequence
  Synthetic
cucaucccaggcguggggau

SEQ ID NO: 8221 - RNA, 21 nt, Artificial Sequence
  Synthetic
acucaucccaggcguggggau

SEQ ID NO: 8222 - RNA, 22 nt, Artificial Sequence
  Synthetic
cacucaucccaggcguggggau

SEQ ID NO: 8223 - RNA, 23 nt, Artificial Sequence
  Synthetic
gcacucaucccaggcguggggau

SEQ ID NO: 8224 - RNA, 24 nt, Artificial Sequence
  Synthetic
ugcacucaucccaggcguggggau

SEQ ID NO: 8225 - RNA, 18 nt, Artificial Sequence
  Synthetic
ucaacuuacaaauacccu

SEQ ID NO: 8226 - RNA, 19 nt, Artificial Sequence
  Synthetic
cucaacuuacaaauacccu

SEQ ID NO: 8227 - RNA, 20 nt, Artificial Sequence
  Synthetic
gcucaacuuacaaauacccu

SEQ ID NO: 8228 - RNA, 21 nt, Artificial Sequence
  Synthetic
ggcucaacuuacaaauacccu

SEQ ID NO: 8229 - RNA, 22 nt, Artificial Sequence
  Synthetic
aggcucaacuuacaaauacccu

SEQ ID NO: 8230 - RNA, 23 nt, Artificial Sequence
  Synthetic
aaggcucaacuuacaaauacccu

SEQ ID NO: 8231 - RNA, 24 nt, Artificial Sequence
  Synthetic
uaaggcucaacuuacaaauacccu

SEQ ID NO: 8232 - RNA, 18 nt, Artificial Sequence
  Synthetic
ggcgagacauggugggcu

SEQ ID NO: 8233 - RNA, 19 nt, Artificial Sequence
  Synthetic
cggcgagacauggugggcu

SEQ ID NO: 8234 - RNA, 20 nt, Artificial Sequence
  Synthetic
gcggcgagacauggugggcu

SEQ ID NO: 8235 - RNA, 21 nt, Artificial Sequence
  Synthetic
ugcggcgagacauggugggcu

SEQ ID NO: 8236 - RNA, 22 nt, Artificial Sequence
  Synthetic
uugcggcgagacauggugggcu

SEQ ID NO: 8237 - RNA, 23 nt, Artificial Sequence
  Synthetic
cuugcggcgagacauggugggcu

SEQ ID NO: 8238 - RNA, 24 nt, Artificial Sequence
  Synthetic
gcuugcggcgagacauggugggcu

SEQ ID NO: 8239 - RNA, 18 nt, Artificial Sequence
  Synthetic
cagugcagaaguuuaucu

SEQ ID NO: 8240 - RNA, 19 nt, Artificial Sequence
  Synthetic
ccagugcagaaguuuaucu

SEQ ID NO: 8241 - RNA, 20 nt, Artificial Sequence
  Synthetic
uccagugcagaaguuuaucu

SEQ ID NO: 8242 - RNA, 21 nt, Artificial Sequence
  Synthetic
cuccagugcagaaguuuaucu

SEQ ID NO: 8243 - RNA, 22 nt, Artificial Sequence
  Synthetic
ccuccagugcagaaguuuaucu

SEQ ID NO: 8244 - RNA, 23 nt, Artificial Sequence
  Synthetic
cccuccagugcagaaguuuaucu

SEQ ID NO: 8245 - RNA, 24 nt, Artificial Sequence
  Synthetic
ccccuccagugcagaaguuuaucu

SEQ ID NO: 8246 - RNA, 18 nt, Artificial Sequence
  Synthetic
cuggcacugcccacaggu

SEQ ID NO: 8247 - RNA, 19 nt, Artificial Sequence
  Synthetic
ucuggcacugcccacaggu

SEQ ID NO: 8248 - RNA, 20 nt, Artificial Sequence
  Synthetic
aucuggcacugcccacaggu

SEQ ID NO: 8249 - RNA, 21 nt, Artificial Sequence
  Synthetic
caucuggcacugcccacaggu

SEQ ID NO: 8250 - RNA, 22 nt, Artificial Sequence
  Synthetic
ucaucuggcacugcccacaggu

SEQ ID NO: 8251 - RNA, 23 nt, Artificial Sequence
  Synthetic
uucaucuggcacugcccacaggu

SEQ ID NO: 8252 - RNA, 24 nt, Artificial Sequence
  Synthetic
guucaucuggcacugcccacaggu

SEQ ID NO: 8253 - RNA, 18 nt, Artificial Sequence
  Synthetic
aagaggcucggcuguggu

SEQ ID NO: 8254 - RNA, 19 nt, Artificial Sequence
  Synthetic
caagaggcucggcuguggu

SEQ ID NO: 8255 - RNA, 20 nt, Artificial Sequence
  Synthetic
ucaagaggcucggcuguggu

SEQ ID NO: 8256 - RNA, 21 nt, Artificial Sequence
  Synthetic
uucaagaggcucggcuguggu

SEQ ID NO: 8257 - RNA, 22 nt, Artificial Sequence
  Synthetic
cuucaagaggcucggcuguggu

SEQ ID NO: 8258 - RNA, 23 nt, Artificial Sequence
  Synthetic
gcuucaagaggcucggcuguggu

SEQ ID NO: 8259 - RNA, 24 nt, Artificial Sequence
  Synthetic
ggcuucaagaggcucggcuguggu

SEQ ID NO: 8260 - RNA, 18 nt, Artificial Sequence
  Synthetic
ccugcuauguguuccugu

SEQ ID NO: 8261 - RNA, 19 nt, Artificial Sequence
  Synthetic
accugcuauguguuccugu

SEQ ID NO: 8262 - RNA, 20 nt, Artificial Sequence
  Synthetic
uaccugcuauguguuccugu

SEQ ID NO: 8263 - RNA, 21 nt, Artificial Sequence
  Synthetic
uuaccugcuauguguuccugu

SEQ ID NO: 8264 - RNA, 22 nt, Artificial Sequence
  Synthetic
uuuaccugcuauguguuccugu

SEQ ID NO: 8265 - RNA, 23 nt, Artificial Sequence
  Synthetic
auuuaccugcuauguguuccugu

SEQ ID NO: 8266 - RNA, 24 nt, Artificial Sequence
  Synthetic
cauuuaccugcuauguguuccugu

SEQ ID NO: 8267 - RNA, 18 nt, Artificial Sequence
  Synthetic
ggaggucaugauccccuu

SEQ ID NO: 8268 - RNA, 19 nt, Artificial Sequence
  Synthetic
aggaggucaugauccccuu

SEQ ID NO: 8269 - RNA, 20 nt, Artificial Sequence
  Synthetic
gaggaggucaugauccccuu

SEQ ID NO: 8270 - RNA, 21 nt, Artificial Sequence
  Synthetic
ugaggaggucaugauccccuu

SEQ ID NO: 8271 - RNA, 22 nt, Artificial Sequence
  Synthetic
gugaggaggucaugauccccuu

SEQ ID NO: 8272 - RNA, 23 nt, Artificial Sequence
  Synthetic
ggugaggaggucaugauccccuu

SEQ ID NO: 8273 - RNA, 24 nt, Artificial Sequence
  Synthetic
aggugaggaggucaugauccccuu

SEQ ID NO: 8274 - RNA, 18 nt, Artificial Sequence
  Synthetic
cugcuauguguuccuguu

SEQ ID NO: 8275 - RNA, 19 nt, Artificial Sequence
  Synthetic
ccugcuauguguuccuguu

SEQ ID NO: 8276 - RNA, 20 nt, Artificial Sequence
  Synthetic
accugcuauguguuccuguu

SEQ ID NO: 8277 - RNA, 21 nt, Artificial Sequence
  Synthetic
uaccugcuauguguuccuguu

SEQ ID NO: 8278 - RNA, 22 nt, Artificial Sequence
  Synthetic
uuaccugcuauguguuccuguu

SEQ ID NO: 8279 - RNA, 23 nt, Artificial Sequence
  Synthetic
uuuaccugcuauguguuccuguu

SEQ ID NO: 8280 - RNA, 24 nt, Artificial Sequence
  Synthetic
auuuaccugcuauguguuccuguu

SEQ ID NO: 8281 - RNA, 18 nt, Artificial Sequence
  Synthetic
auuuuuaucgagcacaaa

SEQ ID NO: 8282 - RNA, 19 nt, Artificial Sequence
  Synthetic
uauuuuuaucgagcacaaa

SEQ ID NO: 8283 - RNA, 20 nt, Artificial Sequence
  Synthetic
uuauuuuuaucgagcacaaa

SEQ ID NO: 8284 - RNA, 21 nt, Artificial Sequence
  Synthetic
cuuauuuuuaucgagcacaaa

SEQ ID NO: 8285 - RNA, 22 nt, Artificial Sequence
  Synthetic
ucuuauuuuuaucgagcacaaa

SEQ ID NO: 8286 - RNA, 23 nt, Artificial Sequence
  Synthetic
uucuuauuuuuaucgagcacaaa

SEQ ID NO: 8287 - RNA, 24 nt, Artificial Sequence
  Synthetic
auucuuauuuuuaucgagcacaaa

SEQ ID NO: 8288 - RNA, 18 nt, Artificial Sequence
  Synthetic
agaggaauuugccccaaa

SEQ ID NO: 8289 - RNA, 19 nt, Artificial Sequence
  Synthetic
uagaggaauuugccccaaa

SEQ ID NO: 8290 - RNA, 20 nt, Artificial Sequence
  Synthetic
cuagaggaauuugccccaaa

SEQ ID NO: 8291 - RNA, 21 nt, Artificial Sequence
  Synthetic
ucuagaggaauuugccccaaa

SEQ ID NO: 8292 - RNA, 22 nt, Artificial Sequence
  Synthetic
aucuagaggaauuugccccaaa

SEQ ID NO: 8293 - RNA, 23 nt, Artificial Sequence
  Synthetic
caucuagaggaauuugccccaaa

SEQ ID NO: 8294 - RNA, 24 nt, Artificial Sequence
  Synthetic
ucaucuagaggaauuugccccaaa

SEQ ID NO: 8295 - RNA, 18 nt, Artificial Sequence
  Synthetic
ccccagcacuuaagcaaa

SEQ ID NO: 8296 - RNA, 19 nt, Artificial Sequence
  Synthetic
accccagcacuuaagcaaa

SEQ ID NO: 8297 - RNA, 20 nt, Artificial Sequence
  Synthetic
aaccccagcacuuaagcaaa

SEQ ID NO: 8298 - RNA, 21 nt, Artificial Sequence
  Synthetic
aaaccccagcacuuaagcaaa

SEQ ID NO: 8299 - RNA, 22 nt, Artificial Sequence
  Synthetic
caaaccccagcacuuaagcaaa

SEQ ID NO: 8300 - RNA, 23 nt, Artificial Sequence
  Synthetic
gcaaaccccagcacuuaagcaaa

SEQ ID NO: 8301 - RNA, 24 nt, Artificial Sequence
  Synthetic
ggcaaaccccagcacuuaagcaaa

SEQ ID NO: 8302 - RNA, 18 nt, Artificial Sequence
  Synthetic
uauuuuuaucgagcacaa

SEQ ID NO: 8303 - RNA, 19 nt, Artificial Sequence
  Synthetic
uuauuuuuaucgagcacaa

SEQ ID NO: 8304 - RNA, 20 nt, Artificial Sequence
  Synthetic
cuuauuuuuaucgagcacaa

SEQ ID NO: 8305 - RNA, 21 nt, Artificial Sequence
  Synthetic
ucuuauuuuuaucgagcacaa

SEQ ID NO: 8306 - RNA, 22 nt, Artificial Sequence
  Synthetic
uucuuauuuuuaucgagcacaa

SEQ ID NO: 8307 - RNA, 23 nt, Artificial Sequence
  Synthetic
auucuuauuuuuaucgagcacaa

SEQ ID NO: 8308 - RNA, 24 nt, Artificial Sequence
  Synthetic
cauucuuauuuuuaucgagcacaa

SEQ ID NO: 8309 - RNA, 18 nt, Artificial Sequence
  Synthetic
caccuuccccuucaccaa

SEQ ID NO: 8310 - RNA, 19 nt, Artificial Sequence
  Synthetic
ccaccuuccccuucaccaa

SEQ ID NO: 8311 - RNA, 20 nt, Artificial Sequence
  Synthetic
gccaccuuccccuucaccaa

SEQ ID NO: 8312 - RNA, 21 nt, Artificial Sequence
  Synthetic
agccaccuuccccuucaccaa

SEQ ID NO: 8313 - RNA, 22 nt, Artificial Sequence
  Synthetic
aagccaccuuccccuucaccaa

SEQ ID NO: 8314 - RNA, 23 nt, Artificial Sequence
  Synthetic
uaagccaccuuccccuucaccaa

SEQ ID NO: 8315 - RNA, 24 nt, Artificial Sequence
  Synthetic
auaagccaccuuccccuucaccaa

SEQ ID NO: 8316 - RNA, 18 nt, Artificial Sequence
  Synthetic
accccagcacuuaagcaa

SEQ ID NO: 8317 - RNA, 19 nt, Artificial Sequence
  Synthetic
aaccccagcacuuaagcaa

SEQ ID NO: 8318 - RNA, 20 nt, Artificial Sequence
  Synthetic
aaaccccagcacuuaagcaa

SEQ ID NO: 8319 - RNA, 21 nt, Artificial Sequence
  Synthetic
caaaccccagcacuuaagcaa

SEQ ID NO: 8320 - RNA, 22 nt, Artificial Sequence
  Synthetic
gcaaaccccagcacuuaagcaa

SEQ ID NO: 8321 - RNA, 23 nt, Artificial Sequence
  Synthetic
ggcaaaccccagcacuuaagcaa

SEQ ID NO: 8322 - RNA, 24 nt, Artificial Sequence
  Synthetic
aggcaaaccccagcacuuaagcaa

SEQ ID NO: 8323 - RNA, 18 nt, Artificial Sequence
  Synthetic
ggaacacauagcagguaa

SEQ ID NO: 8324 - RNA, 19 nt, Artificial Sequence
  Synthetic
aggaacacauagcagguaa

SEQ ID NO: 8325 - RNA, 20 nt, Artificial Sequence
  Synthetic
caggaacacauagcagguaa

SEQ ID NO: 8326 - RNA, 21 nt, Artificial Sequence
  Synthetic
acaggaacacauagcagguaa

SEQ ID NO: 8327 - RNA, 22 nt, Artificial Sequence
  Synthetic
aacaggaacacauagcagguaa

SEQ ID NO: 8328 - RNA, 23 nt, Artificial Sequence
  Synthetic
aaacaggaacacauagcagguaa

SEQ ID NO: 8329 - RNA, 24 nt, Artificial Sequence
  Synthetic
caaacaggaacacauagcagguaa

SEQ ID NO: 8330 - RNA, 18 nt, Artificial Sequence
  Synthetic
cuccccucguucugcaca

SEQ ID NO: 8331 - RNA, 19 nt, Artificial Sequence
  Synthetic
ccuccccucguucugcaca

SEQ ID NO: 8332 - RNA, 20 nt, Artificial Sequence
  Synthetic
uccuccccucguucugcaca

SEQ ID NO: 8333 - RNA, 21 nt, Artificial Sequence
  Synthetic
cuccuccccucguucugcaca

SEQ ID NO: 8334 - RNA, 22 nt, Artificial Sequence
  Synthetic
ucuccuccccucguucugcaca

SEQ ID NO: 8335 - RNA, 23 nt, Artificial Sequence
  Synthetic
cucuccuccccucguucugcaca

SEQ ID NO: 8336 - RNA, 24 nt, Artificial Sequence
  Synthetic
ccucuccuccccucguucugcaca

SEQ ID NO: 8337 - RNA, 18 nt, Artificial Sequence
  Synthetic
ugccagaugaacuuccca

SEQ ID NO: 8338 - RNA, 19 nt, Artificial Sequence
  Synthetic
gugccagaugaacuuccca

SEQ ID NO: 8339 - RNA, 20 nt, Artificial Sequence
  Synthetic
agugccagaugaacuuccca

SEQ ID NO: 8340 - RNA, 21 nt, Artificial Sequence
  Synthetic
cagugccagaugaacuuccca

SEQ ID NO: 8341 - RNA, 22 nt, Artificial Sequence
  Synthetic
gcagugccagaugaacuuccca

SEQ ID NO: 8342 - RNA, 23 nt, Artificial Sequence
  Synthetic
ggcagugccagaugaacuuccca

SEQ ID NO: 8343 - RNA, 24 nt, Artificial Sequence
  Synthetic
gggcagugccagaugaacuuccca

SEQ ID NO: 8344 - RNA, 18 nt, Artificial Sequence
  Synthetic
gcagguaaaugagaagca

SEQ ID NO: 8345 - RNA, 19 nt, Artificial Sequence
  Synthetic
agcagguaaaugagaagca

SEQ ID NO: 8346 - RNA, 20 nt, Artificial Sequence
  Synthetic
uagcagguaaaugagaagca

SEQ ID NO: 8347 - RNA, 21 nt, Artificial Sequence
  Synthetic
auagcagguaaaugagaagca

SEQ ID NO: 8348 - RNA, 22 nt, Artificial Sequence
  Synthetic
cauagcagguaaaugagaagca

SEQ ID NO: 8349 - RNA, 23 nt, Artificial Sequence
  Synthetic
acauagcagguaaaugagaagca

SEQ ID NO: 8350 - RNA, 24 nt, Artificial Sequence
  Synthetic
cacauagcagguaaaugagaagca

SEQ ID NO: 8351 - RNA, 18 nt, Artificial Sequence
  Synthetic
cacagauaaacuucugca

SEQ ID NO: 8352 - RNA, 19 nt, Artificial Sequence
  Synthetic
ucacagauaaacuucugca

SEQ ID NO: 8353 - RNA, 20 nt, Artificial Sequence
  Synthetic
uucacagauaaacuucugca

SEQ ID NO: 8354 - RNA, 21 nt, Artificial Sequence
  Synthetic
uuucacagauaaacuucugca

SEQ ID NO: 8355 - RNA, 22 nt, Artificial Sequence
  Synthetic
cuuucacagauaaacuucugca

SEQ ID NO: 8356 - RNA, 23 nt, Artificial Sequence
  Synthetic
ucuuucacagauaaacuucugca

SEQ ID NO: 8357 - RNA, 24 nt, Artificial Sequence
  Synthetic
uucuuucacagauaaacuucugca

SEQ ID NO: 8358 - RNA, 18 nt, Artificial Sequence
  Synthetic
cccguugggagcuccaga

SEQ ID NO: 8359 - RNA, 19 nt, Artificial Sequence
  Synthetic
gcccguugggagcuccaga

SEQ ID NO: 8360 - RNA, 20 nt, Artificial Sequence
  Synthetic
ggcccguugggagcuccaga

SEQ ID NO: 8361 - RNA, 21 nt, Artificial Sequence
  Synthetic
cggcccguugggagcuccaga

SEQ ID NO: 8362 - RNA, 22 nt, Artificial Sequence
  Synthetic
acggcccguugggagcuccaga

SEQ ID NO: 8363 - RNA, 23 nt, Artificial Sequence
  Synthetic
cacggcccguugggagcuccaga

SEQ ID NO: 8364 - RNA, 24 nt, Artificial Sequence
  Synthetic
ccacggcccguugggagcuccaga

SEQ ID NO: 8365 - RNA, 18 nt, Artificial Sequence
  Synthetic
guuuaucaacgucaucua

SEQ ID NO: 8366 - RNA, 19 nt, Artificial Sequence
  Synthetic
uguuuaucaacgucaucua

SEQ ID NO: 8367 - RNA, 20 nt, Artificial Sequence
  Synthetic
uuguuuaucaacgucaucua

SEQ ID NO: 8368 - RNA, 21 nt, Artificial Sequence
  Synthetic
auuguuuaucaacgucaucua

SEQ ID NO: 8369 - RNA, 22 nt, Artificial Sequence
  Synthetic
gauuguuuaucaacgucaucua

SEQ ID NO: 8370 - RNA, 23 nt, Artificial Sequence
  Synthetic
cgauuguuuaucaacgucaucua

SEQ ID NO: 8371 - RNA, 24 nt, Artificial Sequence
  Synthetic
acgauuguuuaucaacgucaucua

SEQ ID NO: 8372 - RNA, 18 nt, Artificial Sequence
  Synthetic
gggacauucuuauuuuua

SEQ ID NO: 8373 - RNA, 19 nt, Artificial Sequence
  Synthetic
ggggacauucuuauuuuua

SEQ ID NO: 8374 - RNA, 20 nt, Artificial Sequence
  Synthetic
gggggacauucuuauuuuua

SEQ ID NO: 8375 - RNA, 21 nt, Artificial Sequence
  Synthetic
ugggggacauucuuauuuuua

SEQ ID NO: 8376 - RNA, 22 nt, Artificial Sequence
  Synthetic
uugggggacauucuuauuuuua

SEQ ID NO: 8377 - RNA, 23 nt, Artificial Sequence
  Synthetic
auugggggacauucuuauuuuua

SEQ ID NO: 8378 - RNA, 24 nt, Artificial Sequence
  Synthetic
cauugggggacauucuuauuuuua

SEQ ID NO: 8379 - RNA, 18 nt, Artificial Sequence
  Synthetic
gaggaauuugccccaaac

SEQ ID NO: 8380 - RNA, 19 nt, Artificial Sequence
  Synthetic
agaggaauuugccccaaac

SEQ ID NO: 8381 - RNA, 20 nt, Artificial Sequence
  Synthetic
uagaggaauuugccccaaac

SEQ ID NO: 8382 - RNA, 21 nt, Artificial Sequence
  Synthetic
cuagaggaauuugccccaaac

SEQ ID NO: 8383 - RNA, 22 nt, Artificial Sequence
  Synthetic
ucuagaggaauuugccccaaac

SEQ ID NO: 8384 - RNA, 23 nt, Artificial Sequence
  Synthetic
aucuagaggaauuugccccaaac

SEQ ID NO: 8385 - RNA, 24 nt, Artificial Sequence
  Synthetic
caucuagaggaauuugccccaaac

SEQ ID NO: 8386 - RNA, 18 nt, Artificial Sequence
  Synthetic
acagauaaacuucugcac

SEQ ID NO: 8387 - RNA, 19 nt, Artificial Sequence
  Synthetic
cacagauaaacuucugcac

SEQ ID NO: 8388 - RNA, 20 nt, Artificial Sequence
  Synthetic
ucacagauaaacuucugcac

SEQ ID NO: 8389 - RNA, 21 nt, Artificial Sequence
  Synthetic
uucacagauaaacuucugcac

SEQ ID NO: 8390 - RNA, 22 nt, Artificial Sequence
  Synthetic
uuucacagauaaacuucugcac

SEQ ID NO: 8391 - RNA, 23 nt, Artificial Sequence
  Synthetic
cuuucacagauaaacuucugcac

SEQ ID NO: 8392 - RNA, 24 nt, Artificial Sequence
  Synthetic
ucuuucacagauaaacuucugcac

SEQ ID NO: 8393 - RNA, 18 nt, Artificial Sequence
  Synthetic
ccuccccucguucugcac

SEQ ID NO: 8394 - RNA, 19 nt, Artificial Sequence
  Synthetic
uccuccccucguucugcac

SEQ ID NO: 8395 - RNA, 20 nt, Artificial Sequence
  Synthetic
cuccuccccucguucugcac

SEQ ID NO: 8396 - RNA, 21 nt, Artificial Sequence
  Synthetic
ucuccuccccucguucugcac

SEQ ID NO: 8397 - RNA, 22 nt, Artificial Sequence
  Synthetic
cucuccuccccucguucugcac

SEQ ID NO: 8398 - RNA, 23 nt, Artificial Sequence
  Synthetic
ccucuccuccccucguucugcac

SEQ ID NO: 8399 - RNA, 24 nt, Artificial Sequence
  Synthetic
gccucuccuccccucguucugcac

SEQ ID NO: 8400 - RNA, 18 nt, Artificial Sequence
  Synthetic
aaaaaagcauccaauccc

SEQ ID NO: 8401 - RNA, 19 nt, Artificial Sequence
  Synthetic
gaaaaaagcauccaauccc

SEQ ID NO: 8402 - RNA, 20 nt, Artificial Sequence
  Synthetic
ugaaaaaagcauccaauccc

SEQ ID NO: 8403 - RNA, 21 nt, Artificial Sequence
  Synthetic
augaaaaaagcauccaauccc

SEQ ID NO: 8404 - RNA, 22 nt, Artificial Sequence
  Synthetic
gaugaaaaaagcauccaauccc

SEQ ID NO: 8405 - RNA, 23 nt, Artificial Sequence
  Synthetic
agaugaaaaaagcauccaauccc

SEQ ID NO: 8406 - RNA, 24 nt, Artificial Sequence
  Synthetic
gagaugaaaaaagcauccaauccc

SEQ ID NO: 8407 - RNA, 18 nt, Artificial Sequence
  Synthetic
agcagguaaaugagaagc

SEQ ID NO: 8408 - RNA, 19 nt, Artificial Sequence
  Synthetic
uagcagguaaaugagaagc

SEQ ID NO: 8409 - RNA, 20 nt, Artificial Sequence
  Synthetic
auagcagguaaaugagaagc

SEQ ID NO: 8410 - RNA, 21 nt, Artificial Sequence
  Synthetic
cauagcagguaaaugagaagc

SEQ ID NO: 8411 - RNA, 22 nt, Artificial Sequence
  Synthetic
acauagcagguaaaugagaagc

SEQ ID NO: 8412 - RNA, 23 nt, Artificial Sequence
  Synthetic
cacauagcagguaaaugagaagc

SEQ ID NO: 8413 - RNA, 24 nt, Artificial Sequence
  Synthetic
acacauagcagguaaaugagaagc

SEQ ID NO: 8414 - RNA, 18 nt, Artificial Sequence
  Synthetic
gagcucuaauccccacgc

SEQ ID NO: 8415 - RNA, 19 nt, Artificial Sequence
  Synthetic
ggagcucuaauccccacgc

SEQ ID NO: 8416 - RNA, 20 nt, Artificial Sequence
  Synthetic
uggagcucuaauccccacgc

SEQ ID NO: 8417 - RNA, 21 nt, Artificial Sequence
  Synthetic
auggagcucuaauccccacgc

SEQ ID NO: 8418 - RNA, 22 nt, Artificial Sequence
  Synthetic
cauggagcucuaauccccacgc

SEQ ID NO: 8419 - RNA, 23 nt, Artificial Sequence
  Synthetic
acauggagcucuaauccccacgc

SEQ ID NO: 8420 - RNA, 24 nt, Artificial Sequence
  Synthetic
cacauggagcucuaauccccacgc

SEQ ID NO: 8421 - RNA, 18 nt, Artificial Sequence
  Synthetic
uuggcauccaggucacgc

SEQ ID NO: 8422 - RNA, 19 nt, Artificial Sequence
  Synthetic
guuggcauccaggucacgc

SEQ ID NO: 8423 - RNA, 20 nt, Artificial Sequence
  Synthetic
gguuggcauccaggucacgc

SEQ ID NO: 8424 - RNA, 21 nt, Artificial Sequence
  Synthetic
agguuggcauccaggucacgc

SEQ ID NO: 8425 - RNA, 22 nt, Artificial Sequence
  Synthetic
gagguuggcauccaggucacgc

SEQ ID NO: 8426 - RNA, 23 nt, Artificial Sequence
  Synthetic
ggagguuggcauccaggucacgc

SEQ ID NO: 8427 - RNA, 24 nt, Artificial Sequence
  Synthetic
uggagguuggcauccaggucacgc

SEQ ID NO: 8428 - RNA, 18 nt, Artificial Sequence
  Synthetic
uuguuuaucaacgucauc

SEQ ID NO: 8429 - RNA, 19 nt, Artificial Sequence
  Synthetic
auuguuuaucaacgucauc

SEQ ID NO: 8430 - RNA, 20 nt, Artificial Sequence
  Synthetic
gauuguuuaucaacgucauc

SEQ ID NO: 8431 - RNA, 21 nt, Artificial Sequence
  Synthetic
cgauuguuuaucaacgucauc

SEQ ID NO: 8432 - RNA, 22 nt, Artificial Sequence
  Synthetic
acgauuguuuaucaacgucauc

SEQ ID NO: 8433 - RNA, 23 nt, Artificial Sequence
  Synthetic
gacgauuguuuaucaacgucauc

SEQ ID NO: 8434 - RNA, 24 nt, Artificial Sequence
  Synthetic
ugacgauuguuuaucaacgucauc

SEQ ID NO: 8435 - RNA, 18 nt, Artificial Sequence
  Synthetic
caaccacagccgagccuc

SEQ ID NO: 8436 - RNA, 19 nt, Artificial Sequence
  Synthetic
ccaaccacagccgagccuc

SEQ ID NO: 8437 - RNA, 20 nt, Artificial Sequence
  Synthetic
uccaaccacagccgagccuc

SEQ ID NO: 8438 - RNA, 21 nt, Artificial Sequence
  Synthetic
cuccaaccacagccgagccuc

SEQ ID NO: 8439 - RNA, 22 nt, Artificial Sequence
  Synthetic
ucuccaaccacagccgagccuc

SEQ ID NO: 8440 - RNA, 23 nt, Artificial Sequence
  Synthetic
uucuccaaccacagccgagccuc

SEQ ID NO: 8441 - RNA, 24 nt, Artificial Sequence
  Synthetic
uuucuccaaccacagccgagccuc

SEQ ID NO: 8442 - RNA, 18 nt, Artificial Sequence
  Synthetic
acggcccguugggagcuc

SEQ ID NO: 8443 - RNA, 19 nt, Artificial Sequence
  Synthetic
cacggcccguugggagcuc

SEQ ID NO: 8444 - RNA, 20 nt, Artificial Sequence
  Synthetic
ccacggcccguugggagcuc

SEQ ID NO: 8445 - RNA, 21 nt, Artificial Sequence
  Synthetic
accacggcccguugggagcuc

SEQ ID NO: 8446 - RNA, 22 nt, Artificial Sequence
  Synthetic
gaccacggcccguugggagcuc

SEQ ID NO: 8447 - RNA, 23 nt, Artificial Sequence
  Synthetic
agaccacggcccguugggagcuc

SEQ ID NO: 8448 - RNA, 24 nt, Artificial Sequence
  Synthetic
cagaccacggcccguugggagcuc

SEQ ID NO: 8449 - RNA, 18 nt, Artificial Sequence
  Synthetic
auuauuuugcagguaaag

SEQ ID NO: 8450 - RNA, 19 nt, Artificial Sequence
  Synthetic
uauuauuuugcagguaaag

SEQ ID NO: 8451 - RNA, 20 nt, Artificial Sequence
  Synthetic
guauuauuuugcagguaaag

SEQ ID NO: 8452 - RNA, 21 nt, Artificial Sequence
  Synthetic
uguauuauuuugcagguaaag

SEQ ID NO: 8453 - RNA, 22 nt, Artificial Sequence
  Synthetic
uuguauuauuuugcagguaaag

SEQ ID NO: 8454 - RNA, 23 nt, Artificial Sequence
  Synthetic
guuguauuauuuugcagguaaag

SEQ ID NO: 8455 - RNA, 24 nt, Artificial Sequence
  Synthetic
uguuguauuauuuugcagguaaag

SEQ ID NO: 8456 - RNA, 18 nt, Artificial Sequence
  Synthetic
agguaaaugagaagcaag

SEQ ID NO: 8457 - RNA, 19 nt, Artificial Sequence
  Synthetic
cagguaaaugagaagcaag

SEQ ID NO: 8458 - RNA, 20 nt, Artificial Sequence
  Synthetic
gcagguaaaugagaagcaag

SEQ ID NO: 8459 - RNA, 21 nt, Artificial Sequence
  Synthetic
agcagguaaaugagaagcaag

SEQ ID NO: 8460 - RNA, 22 nt, Artificial Sequence
  Synthetic
uagcagguaaaugagaagcaag

SEQ ID NO: 8461 - RNA, 23 nt, Artificial Sequence
  Synthetic
auagcagguaaaugagaagcaag

SEQ ID NO: 8462 - RNA, 24 nt, Artificial Sequence
  Synthetic
cauagcagguaaaugagaagcaag

SEQ ID NO: 8463 - RNA, 18 nt, Artificial Sequence
  Synthetic
ccgcaggguauuuguaag

SEQ ID NO: 8464 - RNA, 19 nt, Artificial Sequence
  Synthetic
cccgcaggguauuuguaag

SEQ ID NO: 8465 - RNA, 20 nt, Artificial Sequence
  Synthetic
ccccgcaggguauuuguaag

SEQ ID NO: 8466 - RNA, 21 nt, Artificial Sequence
  Synthetic
gccccgcaggguauuuguaag

SEQ ID NO: 8467 - RNA, 22 nt, Artificial Sequence
  Synthetic
ugccccgcaggguauuuguaag

SEQ ID NO: 8468 - RNA, 23 nt, Artificial Sequence
  Synthetic
augccccgcaggguauuuguaag

SEQ ID NO: 8469 - RNA, 24 nt, Artificial Sequence
  Synthetic
uaugccccgcaggguauuuguaag

SEQ ID NO: 8470 - RNA, 18 nt, Artificial Sequence
  Synthetic
uuguuucuccaaccacag

SEQ ID NO: 8471 - RNA, 19 nt, Artificial Sequence
  Synthetic
uuuguuucuccaaccacag

SEQ ID NO: 8472 - RNA, 20 nt, Artificial Sequence
  Synthetic
uuuuguuucuccaaccacag

SEQ ID NO: 8473 - RNA, 21 nt, Artificial Sequence
  Synthetic
cuuuuguuucuccaaccacag

SEQ ID NO: 8474 - RNA, 22 nt, Artificial Sequence
  Synthetic
gcuuuuguuucuccaaccacag

SEQ ID NO: 8475 - RNA, 23 nt, Artificial Sequence
  Synthetic
ugcuuuuguuucuccaaccacag

SEQ ID NO: 8476 - RNA, 24 nt, Artificial Sequence
  Synthetic
gugcuuuuguuucuccaaccacag

SEQ ID NO: 8477 - RNA, 18 nt, Artificial Sequence
  Synthetic
accugugggcagugccag

SEQ ID NO: 8478 - RNA, 19 nt, Artificial Sequence
  Synthetic
caccugugggcagugccag

SEQ ID NO: 8479 - RNA, 20 nt, Artificial Sequence
  Synthetic
ucaccugugggcagugccag

SEQ ID NO: 8480 - RNA, 21 nt, Artificial Sequence
  Synthetic
cucaccugugggcagugccag

SEQ ID NO: 8481 - RNA, 22 nt, Artificial Sequence
  Synthetic
ccucaccugugggcagugccag

SEQ ID NO: 8482 - RNA, 23 nt, Artificial Sequence
  Synthetic
uccucaccugugggcagugccag

SEQ ID NO: 8483 - RNA, 24 nt, Artificial Sequence
  Synthetic
cuccucaccugugggcagugccag

SEQ ID NO: 8484 - RNA, 18 nt, Artificial Sequence
  Synthetic
gcccguugggagcuccag

SEQ ID NO: 8485 - RNA, 19 nt, Artificial Sequence
  Synthetic
ggcccguugggagcuccag

SEQ ID NO: 8486 - RNA, 20 nt, Artificial Sequence
  Synthetic
cggcccguugggagcuccag

SEQ ID NO: 8487 - RNA, 21 nt, Artificial Sequence
  Synthetic
acggcccguugggagcuccag

SEQ ID NO: 8488 - RNA, 22 nt, Artificial Sequence
  Synthetic
cacggcccguugggagcuccag

SEQ ID NO: 8489 - RNA, 23 nt, Artificial Sequence
  Synthetic
ccacggcccguugggagcuccag

SEQ ID NO: 8490 - RNA, 24 nt, Artificial Sequence
  Synthetic
accacggcccguugggagcuccag

SEQ ID NO: 8491 - RNA, 18 nt, Artificial Sequence
  Synthetic
uccccuucaccaaucgag

SEQ ID NO: 8492 - RNA, 19 nt, Artificial Sequence
  Synthetic
uuccccuucaccaaucgag

SEQ ID NO: 8493 - RNA, 20 nt, Artificial Sequence
  Synthetic
cuuccccuucaccaaucgag

SEQ ID NO: 8494 - RNA, 21 nt, Artificial Sequence
  Synthetic
ccuuccccuucaccaaucgag

SEQ ID NO: 8495 - RNA, 22 nt, Artificial Sequence
  Synthetic
accuuccccuucaccaaucgag

SEQ ID NO: 8496 - RNA, 23 nt, Artificial Sequence
  Synthetic
caccuuccccuucaccaaucgag

SEQ ID NO: 8497 - RNA, 24 nt, Artificial Sequence
  Synthetic
ccaccuuccccuucaccaaucgag

SEQ ID NO: 8498 - RNA, 18 nt, Artificial Sequence
  Synthetic
gaaccagaccacggcccg

SEQ ID NO: 8499 - RNA, 19 nt, Artificial Sequence
  Synthetic
ugaaccagaccacggcccg

SEQ ID NO: 8500 - RNA, 20 nt, Artificial Sequence
  Synthetic
augaaccagaccacggcccg

SEQ ID NO: 8501 - RNA, 21 nt, Artificial Sequence
  Synthetic
gaugaaccagaccacggcccg

SEQ ID NO: 8502 - RNA, 22 nt, Artificial Sequence
  Synthetic
ugaugaaccagaccacggcccg

SEQ ID NO: 8503 - RNA, 23 nt, Artificial Sequence
  Synthetic
augaugaaccagaccacggcccg

SEQ ID NO: 8504 - RNA, 24 nt, Artificial Sequence
  Synthetic
gaugaugaaccagaccacggcccg

SEQ ID NO: 8505 - RNA, 18 nt, Artificial Sequence
  Synthetic
aaaaagcauccaaucccg

SEQ ID NO: 8506 - RNA, 19 nt, Artificial Sequence
  Synthetic
aaaaaagcauccaaucccg

SEQ ID NO: 8507 - RNA, 20 nt, Artificial Sequence
  Synthetic
gaaaaaagcauccaaucccg

SEQ ID NO: 8508 - RNA, 21 nt, Artificial Sequence
  Synthetic
ugaaaaaagcauccaaucccg

SEQ ID NO: 8509 - RNA, 22 nt, Artificial Sequence
  Synthetic
augaaaaaagcauccaaucccg

SEQ ID NO: 8510 - RNA, 23 nt, Artificial Sequence
  Synthetic
gaugaaaaaagcauccaaucccg

SEQ ID NO: 8511 - RNA, 24 nt, Artificial Sequence
  Synthetic
agaugaaaaaagcauccaaucccg

SEQ ID NO: 8512 - RNA, 18 nt, Artificial Sequence
  Synthetic
gauaaacuucugcacugg

SEQ ID NO: 8513 - RNA, 19 nt, Artificial Sequence
  Synthetic
agauaaacuucugcacugg

SEQ ID NO: 8514 - RNA, 20 nt, Artificial Sequence
  Synthetic
cagauaaacuucugcacugg

SEQ ID NO: 8515 - RNA, 21 nt, Artificial Sequence
  Synthetic
acagauaaacuucugcacugg

SEQ ID NO: 8516 - RNA, 22 nt, Artificial Sequence
  Synthetic
cacagauaaacuucugcacugg

SEQ ID NO: 8517 - RNA, 23 nt, Artificial Sequence
  Synthetic
ucacagauaaacuucugcacugg

SEQ ID NO: 8518 - RNA, 24 nt, Artificial Sequence
  Synthetic
uucacagauaaacuucugcacugg

SEQ ID NO: 8519 - RNA, 18 nt, Artificial Sequence
  Synthetic
aagccauucuuacagaug

SEQ ID NO: 8520 - RNA, 19 nt, Artificial Sequence
  Synthetic
gaagccauucuuacagaug

SEQ ID NO: 8521 - RNA, 20 nt, Artificial Sequence
  Synthetic
ugaagccauucuuacagaug

SEQ ID NO: 8522 - RNA, 21 nt, Artificial Sequence
  Synthetic
uugaagccauucuuacagaug

SEQ ID NO: 8523 - RNA, 22 nt, Artificial Sequence
  Synthetic
cuugaagccauucuuacagaug

SEQ ID NO: 8524 - RNA, 23 nt, Artificial Sequence
  Synthetic
ucuugaagccauucuuacagaug

SEQ ID NO: 8525 - RNA, 24 nt, Artificial Sequence
  Synthetic
cucuugaagccauucuuacagaug

SEQ ID NO: 8526 - RNA, 18 nt, Artificial Sequence
  Synthetic
agauaaacuucugcacug

SEQ ID NO: 8527 - RNA, 19 nt, Artificial Sequence
  Synthetic
cagauaaacuucugcacug

SEQ ID NO: 8528 - RNA, 20 nt, Artificial Sequence
  Synthetic
acagauaaacuucugcacug

SEQ ID NO: 8529 - RNA, 21 nt, Artificial Sequence
  Synthetic
cacagauaaacuucugcacug

SEQ ID NO: 8530 - RNA, 22 nt, Artificial Sequence
  Synthetic
ucacagauaaacuucugcacug

SEQ ID NO: 8531 - RNA, 23 nt, Artificial Sequence
  Synthetic
uucacagauaaacuucugcacug

SEQ ID NO: 8532 - RNA, 24 nt, Artificial Sequence
  Synthetic
uuucacagauaaacuucugcacug

SEQ ID NO: 8533 - RNA, 18 nt, Artificial Sequence
  Synthetic
cagaugaacuucccauug

SEQ ID NO: 8534 - RNA, 19 nt, Artificial Sequence
  Synthetic
ccagaugaacuucccauug

SEQ ID NO: 8535 - RNA, 20 nt, Artificial Sequence
  Synthetic
gccagaugaacuucccauug

SEQ ID NO: 8536 - RNA, 21 nt, Artificial Sequence
  Synthetic
ugccagaugaacuucccauug

SEQ ID NO: 8537 - RNA, 22 nt, Artificial Sequence
  Synthetic
gugccagaugaacuucccauug

SEQ ID NO: 8538 - RNA, 23 nt, Artificial Sequence
  Synthetic
agugccagaugaacuucccauug

SEQ ID NO: 8539 - RNA, 24 nt, Artificial Sequence
  Synthetic
cagugccagaugaacuucccauug

SEQ ID NO: 8540 - RNA, 18 nt, Artificial Sequence
  Synthetic
aacacauagcagguaaau

SEQ ID NO: 8541 - RNA, 19 nt, Artificial Sequence
  Synthetic
gaacacauagcagguaaau

SEQ ID NO: 8542 - RNA, 20 nt, Artificial Sequence
  Synthetic
ggaacacauagcagguaaau

SEQ ID NO: 8543 - RNA, 21 nt, Artificial Sequence
  Synthetic
aggaacacauagcagguaaau

SEQ ID NO: 8544 - RNA, 22 nt, Artificial Sequence
  Synthetic
caggaacacauagcagguaaau

SEQ ID NO: 8545 - RNA, 23 nt, Artificial Sequence
  Synthetic
acaggaacacauagcagguaaau

SEQ ID NO: 8546 - RNA, 24 nt, Artificial Sequence
  Synthetic
aacaggaacacauagcagguaaau

SEQ ID NO: 8547 - RNA, 18 nt, Artificial Sequence
  Synthetic
gccagaugaacuucccau

SEQ ID NO: 8548 - RNA, 19 nt, Artificial Sequence
  Synthetic
ugccagaugaacuucccau

SEQ ID NO: 8549 - RNA, 20 nt, Artificial Sequence
  Synthetic
gugccagaugaacuucccau

SEQ ID NO: 8550 - RNA, 21 nt, Artificial Sequence
  Synthetic
agugccagaugaacuucccau

SEQ ID NO: 8551 - RNA, 22 nt, Artificial Sequence
  Synthetic
cagugccagaugaacuucccau

SEQ ID NO: 8552 - RNA, 23 nt, Artificial Sequence
  Synthetic
gcagugccagaugaacuucccau

SEQ ID NO: 8553 - RNA, 24 nt, Artificial Sequence
  Synthetic
ggcagugccagaugaacuucccau

SEQ ID NO: 8554 - RNA, 18 nt, Artificial Sequence
  Synthetic
aucaugaccuccucaccu

SEQ ID NO: 8555 - RNA, 19 nt, Artificial Sequence
  Synthetic
gaucaugaccuccucaccu

SEQ ID NO: 8556 - RNA, 20 nt, Artificial Sequence
  Synthetic
ggaucaugaccuccucaccu

SEQ ID NO: 8557 - RNA, 21 nt, Artificial Sequence
  Synthetic
gggaucaugaccuccucaccu

SEQ ID NO: 8558 - RNA, 22 nt, Artificial Sequence
  Synthetic
ggggaucaugaccuccucaccu

SEQ ID NO: 8559 - RNA, 23 nt, Artificial Sequence
  Synthetic
aggggaucaugaccuccucaccu

SEQ ID NO: 8560 - RNA, 24 nt, Artificial Sequence
  Synthetic
aaggggaucaugaccuccucaccu

SEQ ID NO: 8561 - RNA, 18 nt, Artificial Sequence
  Synthetic
gcaauggcagccucugcu

SEQ ID NO: 8562 - RNA, 19 nt, Artificial Sequence
  Synthetic
ugcaauggcagccucugcu

SEQ ID NO: 8563 - RNA, 20 nt, Artificial Sequence
  Synthetic
augcaauggcagccucugcu

SEQ ID NO: 8564 - RNA, 21 nt, Artificial Sequence
  Synthetic
aaugcaauggcagccucugcu

SEQ ID NO: 8565 - RNA, 22 nt, Artificial Sequence
  Synthetic
caaugcaauggcagccucugcu

SEQ ID NO: 8566 - RNA, 23 nt, Artificial Sequence
  Synthetic
acaaugcaauggcagccucugcu

SEQ ID NO: 8567 - RNA, 24 nt, Artificial Sequence
  Synthetic
aacaaugcaauggcagccucugcu

SEQ ID NO: 8568 - RNA, 18 nt, Artificial Sequence
  Synthetic
aaccagaccacggcccgu

SEQ ID NO: 8569 - RNA, 19 nt, Artificial Sequence
  Synthetic
gaaccagaccacggcccgu

SEQ ID NO: 8570 - RNA, 20 nt, Artificial Sequence
  Synthetic
ugaaccagaccacggcccgu

SEQ ID NO: 8571 - RNA, 21 nt, Artificial Sequence
  Synthetic
augaaccagaccacggcccgu

SEQ ID NO: 8572 - RNA, 22 nt, Artificial Sequence
  Synthetic
gaugaaccagaccacggcccgu

SEQ ID NO: 8573 - RNA, 23 nt, Artificial Sequence
  Synthetic
ugaugaaccagaccacggcccgu

SEQ ID NO: 8574 - RNA, 24 nt, Artificial Sequence
  Synthetic
augaugaaccagaccacggcccgu

SEQ ID NO: 8575 - RNA, 18 nt, Artificial Sequence
  Synthetic
ccagaugaacuucccauu

SEQ ID NO: 8576 - RNA, 19 nt, Artificial Sequence
  Synthetic
gccagaugaacuucccauu

SEQ ID NO: 8577 - RNA, 20 nt, Artificial Sequence
  Synthetic
ugccagaugaacuucccauu

SEQ ID NO: 8578 - RNA, 21 nt, Artificial Sequence
  Synthetic
gugccagaugaacuucccauu

SEQ ID NO: 8579 - RNA, 22 nt, Artificial Sequence
  Synthetic
agugccagaugaacuucccauu

SEQ ID NO: 8580 - RNA, 23 nt, Artificial Sequence
  Synthetic
cagugccagaugaacuucccauu

SEQ ID NO: 8581 - RNA, 24 nt, Artificial Sequence
  Synthetic
gcagugccagaugaacuucccauu

SEQ ID NO: 8582 - RNA, 18 nt, Artificial Sequence
  Synthetic
accagaccacggcccguu

SEQ ID NO: 8583 - RNA, 19 nt, Artificial Sequence
  Synthetic
aaccagaccacggcccguu

SEQ ID NO: 8584 - RNA, 20 nt, Artificial Sequence
  Synthetic
gaaccagaccacggcccguu

SEQ ID NO: 8585 - RNA, 21 nt, Artificial Sequence
  Synthetic
ugaaccagaccacggcccguu

SEQ ID NO: 8586 - RNA, 22 nt, Artificial Sequence
  Synthetic
augaaccagaccacggcccguu

SEQ ID NO: 8587 - RNA, 23 nt, Artificial Sequence
  Synthetic
gaugaaccagaccacggcccguu

SEQ ID NO: 8588 - RNA, 24 nt, Artificial Sequence
  Synthetic
ugaugaaccagaccacggcccguu

SEQ ID NO: 8589 - RNA, 18 nt, Artificial Sequence
  Synthetic
guauucuuagcagguuaa

SEQ ID NO: 8590 - RNA, 19 nt, Artificial Sequence
  Synthetic
gguauucuuagcagguuaa

SEQ ID NO: 8591 - RNA, 20 nt, Artificial Sequence
  Synthetic
ugguauucuuagcagguuaa

SEQ ID NO: 8592 - RNA, 21 nt, Artificial Sequence
  Synthetic
cugguauucuuagcagguuaa

SEQ ID NO: 8593 - RNA, 22 nt, Artificial Sequence
  Synthetic
ccugguauucuuagcagguuaa

SEQ ID NO: 8594 - RNA, 23 nt, Artificial Sequence
  Synthetic
uccugguauucuuagcagguuaa

SEQ ID NO: 8595 - RNA, 24 nt, Artificial Sequence
  Synthetic
auccugguauucuuagcagguuaa

SEQ ID NO: 8596 - RNA, 18 nt, Artificial Sequence
  Synthetic
cgggaggcuccauagcca

SEQ ID NO: 8597 - RNA, 19 nt, Artificial Sequence
  Synthetic
gcgggaggcuccauagcca

SEQ ID NO: 8598 - RNA, 20 nt, Artificial Sequence
  Synthetic
ggcgggaggcuccauagcca

SEQ ID NO: 8599 - RNA, 21 nt, Artificial Sequence
  Synthetic
uggcgggaggcuccauagcca

SEQ ID NO: 8600 - RNA, 22 nt, Artificial Sequence
  Synthetic
auggcgggaggcuccauagcca

SEQ ID NO: 8601 - RNA, 23 nt, Artificial Sequence
  Synthetic
cauggcgggaggcuccauagcca

SEQ ID NO: 8602 - RNA, 24 nt, Artificial Sequence
  Synthetic
ccauggcgggaggcuccauagcca

SEQ ID NO: 8603 - RNA, 18 nt, Artificial Sequence
  Synthetic
gguccgacucgccggcca

SEQ ID NO: 8604 - RNA, 19 nt, Artificial Sequence
  Synthetic
cgguccgacucgccggcca

SEQ ID NO: 8605 - RNA, 20 nt, Artificial Sequence
  Synthetic
gcgguccgacucgccggcca

SEQ ID NO: 8606 - RNA, 21 nt, Artificial Sequence
  Synthetic
ugcgguccgacucgccggcca

SEQ ID NO: 8607 - RNA, 22 nt, Artificial Sequence
  Synthetic
augcgguccgacucgccggcca

SEQ ID NO: 8608 - RNA, 23 nt, Artificial Sequence
  Synthetic
uaugcgguccgacucgccggcca

SEQ ID NO: 8609 - RNA, 24 nt, Artificial Sequence
  Synthetic
cuaugcgguccgacucgccggcca

SEQ ID NO: 8610 - RNA, 18 nt, Artificial Sequence
  Synthetic
agucuccgaagcuaagga

SEQ ID NO: 8611 - RNA, 19 nt, Artificial Sequence
  Synthetic
gagucuccgaagcuaagga

SEQ ID NO: 8612 - RNA, 20 nt, Artificial Sequence
  Synthetic
ggagucuccgaagcuaagga

SEQ ID NO: 8613 - RNA, 21 nt, Artificial Sequence
  Synthetic
uggagucuccgaagcuaagga

SEQ ID NO: 8614 - RNA, 22 nt, Artificial Sequence
  Synthetic
cuggagucuccgaagcuaagga

SEQ ID NO: 8615 - RNA, 23 nt, Artificial Sequence
  Synthetic
ucuggagucuccgaagcuaagga

SEQ ID NO: 8616 - RNA, 24 nt, Artificial Sequence
  Synthetic
gucuggagucuccgaagcuaagga

SEQ ID NO: 8617 - RNA, 18 nt, Artificial Sequence
  Synthetic
ggacuaaacaggggggga

SEQ ID NO: 8618 - RNA, 19 nt, Artificial Sequence
  Synthetic
uggacuaaacaggggggga

SEQ ID NO: 8619 - RNA, 20 nt, Artificial Sequence
  Synthetic
guggacuaaacaggggggga

SEQ ID NO: 8620 - RNA, 21 nt, Artificial Sequence
  Synthetic
gguggacuaaacaggggggga

SEQ ID NO: 8621 - RNA, 22 nt, Artificial Sequence
  Synthetic
ugguggacuaaacaggggggga

SEQ ID NO: 8622 - RNA, 23 nt, Artificial Sequence
  Synthetic
gugguggacuaaacaggggggga

SEQ ID NO: 8623 - RNA, 24 nt, Artificial Sequence
  Synthetic
ggugguggacuaaacaggggggga

SEQ ID NO: 8624 - RNA, 18 nt, Artificial Sequence
  Synthetic
uucugcaccuaguccuga

SEQ ID NO: 8625 - RNA, 19 nt, Artificial Sequence
  Synthetic
auucugcaccuaguccuga

SEQ ID NO: 8626 - RNA, 20 nt, Artificial Sequence
  Synthetic
cauucugcaccuaguccuga

SEQ ID NO: 8627 - RNA, 21 nt, Artificial Sequence
  Synthetic
acauucugcaccuaguccuga

SEQ ID NO: 8628 - RNA, 22 nt, Artificial Sequence
  Synthetic
gacauucugcaccuaguccuga

SEQ ID NO: 8629 - RNA, 23 nt, Artificial Sequence
  Synthetic
ggacauucugcaccuaguccuga

SEQ ID NO: 8630 - RNA, 24 nt, Artificial Sequence
  Synthetic
aggacauucugcaccuaguccuga

SEQ ID NO: 8631 - RNA, 18 nt, Artificial Sequence
  Synthetic
gcacccugucaaaggcac

SEQ ID NO: 8632 - RNA, 19 nt, Artificial Sequence
  Synthetic
agcacccugucaaaggcac

SEQ ID NO: 8633 - RNA, 20 nt, Artificial Sequence
  Synthetic
cagcacccugucaaaggcac

SEQ ID NO: 8634 - RNA, 21 nt, Artificial Sequence
  Synthetic
gcagcacccugucaaaggcac

SEQ ID NO: 8635 - RNA, 22 nt, Artificial Sequence
  Synthetic
cgcagcacccugucaaaggcac

SEQ ID NO: 8636 - RNA, 23 nt, Artificial Sequence
  Synthetic
ccgcagcacccugucaaaggcac

SEQ ID NO: 8637 - RNA, 24 nt, Artificial Sequence
  Synthetic
accgcagcacccugucaaaggcac

SEQ ID NO: 8638 - RNA, 18 nt, Artificial Sequence
  Synthetic
uaaguagauucuuaaucc

SEQ ID NO: 8639 - RNA, 19 nt, Artificial Sequence
  Synthetic
cuaaguagauucuuaaucc

SEQ ID NO: 8640 - RNA, 20 nt, Artificial Sequence
  Synthetic
ucuaaguagauucuuaaucc

SEQ ID NO: 8641 - RNA, 21 nt, Artificial Sequence
  Synthetic
uucuaaguagauucuuaaucc

SEQ ID NO: 8642 - RNA, 22 nt, Artificial Sequence
  Synthetic
uuucuaaguagauucuuaaucc

SEQ ID NO: 8643 - RNA, 23 nt, Artificial Sequence
  Synthetic
cuuucuaaguagauucuuaaucc

SEQ ID NO: 8644 - RNA, 24 nt, Artificial Sequence
  Synthetic
gcuuucuaaguagauucuuaaucc

SEQ ID NO: 8645 - RNA, 18 nt, Artificial Sequence
  Synthetic
ggcggcuugcuaccuggc

SEQ ID NO: 8646 - RNA, 19 nt, Artificial Sequence
  Synthetic
gggcggcuugcuaccuggc

SEQ ID NO: 8647 - RNA, 20 nt, Artificial Sequence
  Synthetic
agggcggcuugcuaccuggc

SEQ ID NO: 8648 - RNA, 21 nt, Artificial Sequence
  Synthetic
aagggcggcuugcuaccuggc

SEQ ID NO: 8649 - RNA, 22 nt, Artificial Sequence
  Synthetic
gaagggcggcuugcuaccuggc

SEQ ID NO: 8650 - RNA, 23 nt, Artificial Sequence
  Synthetic
ggaagggcggcuugcuaccuggc

SEQ ID NO: 8651 - RNA, 24 nt, Artificial Sequence
  Synthetic
aggaagggcggcuugcuaccuggc

SEQ ID NO: 8652 - RNA, 18 nt, Artificial Sequence
  Synthetic
gcgcuucagcuugcuggc

SEQ ID NO: 8653 - RNA, 19 nt, Artificial Sequence
  Synthetic
ggcgcuucagcuugcuggc

SEQ ID NO: 8654 - RNA, 20 nt, Artificial Sequence
  Synthetic
uggcgcuucagcuugcuggc

SEQ ID NO: 8655 - RNA, 21 nt, Artificial Sequence
  Synthetic
guggcgcuucagcuugcuggc

SEQ ID NO: 8656 - RNA, 22 nt, Artificial Sequence
  Synthetic
uguggcgcuucagcuugcuggc

SEQ ID NO: 8657 - RNA, 23 nt, Artificial Sequence
  Synthetic
auguggcgcuucagcuugcuggc

SEQ ID NO: 8658 - RNA, 24 nt, Artificial Sequence
  Synthetic
cauguggcgcuucagcuugcuggc

SEQ ID NO: 8659 - RNA, 18 nt, Artificial Sequence
  Synthetic
cuccucguccccguucuc

SEQ ID NO: 8660 - RNA, 19 nt, Artificial Sequence
  Synthetic
ccuccucguccccguucuc

SEQ ID NO: 8661 - RNA, 20 nt, Artificial Sequence
  Synthetic
uccuccucguccccguucuc

SEQ ID NO: 8662 - RNA, 21 nt, Artificial Sequence
  Synthetic
uuccuccucguccccguucuc

SEQ ID NO: 8663 - RNA, 22 nt, Artificial Sequence
  Synthetic
cuuccuccucguccccguucuc

SEQ ID NO: 8664 - RNA, 23 nt, Artificial Sequence
  Synthetic
ucuuccuccucguccccguucuc

SEQ ID NO: 8665 - RNA, 24 nt, Artificial Sequence
  Synthetic
cucuuccuccucguccccguucuc

SEQ ID NO: 8666 - RNA, 18 nt, Artificial Sequence
  Synthetic
aggcaaaaggcgauuguc

SEQ ID NO: 8667 - RNA, 19 nt, Artificial Sequence
  Synthetic
gaggcaaaaggcgauuguc

SEQ ID NO: 8668 - RNA, 20 nt, Artificial Sequence
  Synthetic
ggaggcaaaaggcgauuguc

SEQ ID NO: 8669 - RNA, 21 nt, Artificial Sequence
  Synthetic
aggaggcaaaaggcgauuguc

SEQ ID NO: 8670 - RNA, 22 nt, Artificial Sequence
  Synthetic
gaggaggcaaaaggcgauuguc

SEQ ID NO: 8671 - RNA, 23 nt, Artificial Sequence
  Synthetic
cgaggaggcaaaaggcgauuguc

SEQ ID NO: 8672 - RNA, 24 nt, Artificial Sequence
  Synthetic
acgaggaggcaaaaggcgauuguc

SEQ ID NO: 8673 - RNA, 18 nt, Artificial Sequence
  Synthetic
agcucucuggguacuacg

SEQ ID NO: 8674 - RNA, 19 nt, Artificial Sequence
  Synthetic
gagcucucuggguacuacg

SEQ ID NO: 8675 - RNA, 20 nt, Artificial Sequence
  Synthetic
ugagcucucuggguacuacg

SEQ ID NO: 8676 - RNA, 21 nt, Artificial Sequence
  Synthetic
uugagcucucuggguacuacg

SEQ ID NO: 8677 - RNA, 22 nt, Artificial Sequence
  Synthetic
cuugagcucucuggguacuacg

SEQ ID NO: 8678 - RNA, 23 nt, Artificial Sequence
  Synthetic
ucuugagcucucuggguacuacg

SEQ ID NO: 8679 - RNA, 24 nt, Artificial Sequence
  Synthetic
aucuugagcucucuggguacuacg

SEQ ID NO: 8680 - RNA, 18 nt, Artificial Sequence
  Synthetic
ugaagggauaccaacccg

SEQ ID NO: 8681 - RNA, 19 nt, Artificial Sequence
  Synthetic
cugaagggauaccaacccg

SEQ ID NO: 8682 - RNA, 20 nt, Artificial Sequence
  Synthetic
ccugaagggauaccaacccg

SEQ ID NO: 8683 - RNA, 21 nt, Artificial Sequence
  Synthetic
uccugaagggauaccaacccg

SEQ ID NO: 8684 - RNA, 22 nt, Artificial Sequence
  Synthetic
guccugaagggauaccaacccg

SEQ ID NO: 8685 - RNA, 23 nt, Artificial Sequence
  Synthetic
aguccugaagggauaccaacccg

SEQ ID NO: 8686 - RNA, 24 nt, Artificial Sequence
  Synthetic
uaguccugaagggauaccaacccg

SEQ ID NO: 8687 - RNA, 18 nt, Artificial Sequence
  Synthetic
gcaaacucccguucuccg

SEQ ID NO: 8688 - RNA, 19 nt, Artificial Sequence
  Synthetic
cgcaaacucccguucuccg

SEQ ID NO: 8689 - RNA, 20 nt, Artificial Sequence
  Synthetic
gcgcaaacucccguucuccg

SEQ ID NO: 8690 - RNA, 21 nt, Artificial Sequence
  Synthetic
agcgcaaacucccguucuccg

SEQ ID NO: 8691 - RNA, 22 nt, Artificial Sequence
  Synthetic
aagcgcaaacucccguucuccg

SEQ ID NO: 8692 - RNA, 23 nt, Artificial Sequence
  Synthetic
gaagcgcaaacucccguucuccg

SEQ ID NO: 8693 - RNA, 24 nt, Artificial Sequence
  Synthetic
agaagcgcaaacucccguucuccg

SEQ ID NO: 8694 - RNA, 18 nt, Artificial Sequence
  Synthetic
ggcugggagggaggaggg

SEQ ID NO: 8695 - RNA, 19 nt, Artificial Sequence
  Synthetic
gggcugggagggaggaggg

SEQ ID NO: 8696 - RNA, 20 nt, Artificial Sequence
  Synthetic
ggggcugggagggaggaggg

SEQ ID NO: 8697 - RNA, 21 nt, Artificial Sequence
  Synthetic
gggggcugggagggaggaggg

SEQ ID NO: 8698 - RNA, 22 nt, Artificial Sequence
  Synthetic
cgggggcugggagggaggaggg

SEQ ID NO: 8699 - RNA, 23 nt, Artificial Sequence
  Synthetic
ccgggggcugggagggaggaggg

SEQ ID NO: 8700 - RNA, 24 nt, Artificial Sequence
  Synthetic
accgggggcugggagggaggaggg

SEQ ID NO: 8701 - RNA, 18 nt, Artificial Sequence
  Synthetic
ugguggacuaaacagggg

SEQ ID NO: 8702 - RNA, 19 nt, Artificial Sequence
  Synthetic
gugguggacuaaacagggg

SEQ ID NO: 8703 - RNA, 20 nt, Artificial Sequence
  Synthetic
ggugguggacuaaacagggg

SEQ ID NO: 8704 - RNA, 21 nt, Artificial Sequence
  Synthetic
cggugguggacuaaacagggg

SEQ ID NO: 8705 - RNA, 22 nt, Artificial Sequence
  Synthetic
ucggugguggacuaaacagggg

SEQ ID NO: 8706 - RNA, 23 nt, Artificial Sequence
  Synthetic
cucggugguggacuaaacagggg

SEQ ID NO: 8707 - RNA, 24 nt, Artificial Sequence
  Synthetic
ucucggugguggacuaaacagggg

SEQ ID NO: 8708 - RNA, 18 nt, Artificial Sequence
  Synthetic
aagagaaaccaugcacug

SEQ ID NO: 8709 - RNA, 19 nt, Artificial Sequence
  Synthetic
caagagaaaccaugcacug

SEQ ID NO: 8710 - RNA, 20 nt, Artificial Sequence
  Synthetic
gcaagagaaaccaugcacug

SEQ ID NO: 8711 - RNA, 21 nt, Artificial Sequence
  Synthetic
ugcaagagaaaccaugcacug

SEQ ID NO: 8712 - RNA, 22 nt, Artificial Sequence
  Synthetic
uugcaagagaaaccaugcacug

SEQ ID NO: 8713 - RNA, 23 nt, Artificial Sequence
  Synthetic
guugcaagagaaaccaugcacug

SEQ ID NO: 8714 - RNA, 24 nt, Artificial Sequence
  Synthetic
uguugcaagagaaaccaugcacug

SEQ ID NO: 8715 - RNA, 18 nt, Artificial Sequence
  Synthetic
gucaaaggcacucgggug

SEQ ID NO: 8716 - RNA, 19 nt, Artificial Sequence
  Synthetic
ugucaaaggcacucgggug

SEQ ID NO: 8717 - RNA, 20 nt, Artificial Sequence
  Synthetic
cugucaaaggcacucgggug

SEQ ID NO: 8718 - RNA, 21 nt, Artificial Sequence
  Synthetic
ccugucaaaggcacucgggug

SEQ ID NO: 8719 - RNA, 22 nt, Artificial Sequence
  Synthetic
cccugucaaaggcacucgggug

SEQ ID NO: 8720 - RNA, 23 nt, Artificial Sequence
  Synthetic
acccugucaaaggcacucgggug

SEQ ID NO: 8721 - RNA, 24 nt, Artificial Sequence
  Synthetic
cacccugucaaaggcacucgggug

SEQ ID NO: 8722 - RNA, 18 nt, Artificial Sequence
  Synthetic
cccaccaagucgcuggug

SEQ ID NO: 8723 - RNA, 19 nt, Artificial Sequence
  Synthetic
gcccaccaagucgcuggug

SEQ ID NO: 8724 - RNA, 20 nt, Artificial Sequence
  Synthetic
ugcccaccaagucgcuggug

SEQ ID NO: 8725 - RNA, 21 nt, Artificial Sequence
  Synthetic
cugcccaccaagucgcuggug

SEQ ID NO: 8726 - RNA, 22 nt, Artificial Sequence
  Synthetic
gcugcccaccaagucgcuggug

SEQ ID NO: 8727 - RNA, 23 nt, Artificial Sequence
  Synthetic
cgcugcccaccaagucgcuggug

SEQ ID NO: 8728 - RNA, 24 nt, Artificial Sequence
  Synthetic
gcgcugcccaccaagucgcuggug

SEQ ID NO: 8729 - RNA, 18 nt, Artificial Sequence
  Synthetic
gggguuauugucugcaau

SEQ ID NO: 8730 - RNA, 19 nt, Artificial Sequence
  Synthetic
agggguuauugucugcaau

SEQ ID NO: 8731 - RNA, 20 nt, Artificial Sequence
  Synthetic
aagggguuauugucugcaau

SEQ ID NO: 8732 - RNA, 21 nt, Artificial Sequence
  Synthetic
aaagggguuauugucugcaau

SEQ ID NO: 8733 - RNA, 22 nt, Artificial Sequence
  Synthetic
uaaagggguuauugucugcaau

SEQ ID NO: 8734 - RNA, 23 nt, Artificial Sequence
  Synthetic
uuaaagggguuauugucugcaau

SEQ ID NO: 8735 - RNA, 24 nt, Artificial Sequence
  Synthetic
guuaaagggguuauugucugcaau

SEQ ID NO: 8736 - RNA, 18 nt, Artificial Sequence
  Synthetic
cuggguacuacgccgaau

SEQ ID NO: 8737 - RNA, 19 nt, Artificial Sequence
  Synthetic
ucuggguacuacgccgaau

SEQ ID NO: 8738 - RNA, 20 nt, Artificial Sequence
  Synthetic
cucuggguacuacgccgaau

SEQ ID NO: 8739 - RNA, 21 nt, Artificial Sequence
  Synthetic
ucucuggguacuacgccgaau

SEQ ID NO: 8740 - RNA, 22 nt, Artificial Sequence
  Synthetic
cucucuggguacuacgccgaau

SEQ ID NO: 8741 - RNA, 23 nt, Artificial Sequence
  Synthetic
gcucucuggguacuacgccgaau

SEQ ID NO: 8742 - RNA, 24 nt, Artificial Sequence
  Synthetic
agcucucuggguacuacgccgaau

SEQ ID NO: 8743 - RNA, 18 nt, Artificial Sequence
  Synthetic
cguagccggcgagccacu

SEQ ID NO: 8744 - RNA, 19 nt, Artificial Sequence
  Synthetic
gcguagccggcgagccacu

SEQ ID NO: 8745 - RNA, 20 nt, Artificial Sequence
  Synthetic
cgcguagccggcgagccacu

SEQ ID NO: 8746 - RNA, 21 nt, Artificial Sequence
  Synthetic
ccgcguagccggcgagccacu

SEQ ID NO: 8747 - RNA, 22 nt, Artificial Sequence
  Synthetic
gccgcguagccggcgagccacu

SEQ ID NO: 8748 - RNA, 23 nt, Artificial Sequence
  Synthetic
ggccgcguagccggcgagccacu

SEQ ID NO: 8749 - RNA, 24 nt, Artificial Sequence
  Synthetic
aggccgcguagccggcgagccacu

SEQ ID NO: 8750 - RNA, 18 nt, Artificial Sequence
  Synthetic
ccacacaucuugagcucu

SEQ ID NO: 8751 - RNA, 19 nt, Artificial Sequence
  Synthetic
gccacacaucuugagcucu

SEQ ID NO: 8752 - RNA, 20 nt, Artificial Sequence
  Synthetic
ugccacacaucuugagcucu

SEQ ID NO: 8753 - RNA, 21 nt, Artificial Sequence
  Synthetic
cugccacacaucuugagcucu

SEQ ID NO: 8754 - RNA, 22 nt, Artificial Sequence
  Synthetic
acugccacacaucuugagcucu

SEQ ID NO: 8755 - RNA, 23 nt, Artificial Sequence
  Synthetic
aacugccacacaucuugagcucu

SEQ ID NO: 8756 - RNA, 24 nt, Artificial Sequence
  Synthetic
aaacugccacacaucuugagcucu

SEQ ID NO: 8757 - RNA, 18 nt, Artificial Sequence
  Synthetic
cguucuccgggaucaggu

SEQ ID NO: 8758 - RNA, 19 nt, Artificial Sequence
  Synthetic
ccguucuccgggaucaggu

SEQ ID NO: 8759 - RNA, 20 nt, Artificial Sequence
  Synthetic
cccguucuccgggaucaggu

SEQ ID NO: 8760 - RNA, 21 nt, Artificial Sequence
  Synthetic
ccccguucuccgggaucaggu

SEQ ID NO: 8761 - RNA, 22 nt, Artificial Sequence
  Synthetic
uccccguucuccgggaucaggu

SEQ ID NO: 8762 - RNA, 23 nt, Artificial Sequence
  Synthetic
guccccguucuccgggaucaggu

SEQ ID NO: 8763 - RNA, 24 nt, Artificial Sequence
  Synthetic
cguccccguucuccgggaucaggu

SEQ ID NO: 8764 - RNA, 18 nt, Artificial Sequence
  Synthetic
ccaggcgcucuaugcggu

SEQ ID NO: 8765 - RNA, 19 nt, Artificial Sequence
  Synthetic
cccaggcgcucuaugcggu

SEQ ID NO: 8766 - RNA, 20 nt, Artificial Sequence
  Synthetic
ccccaggcgcucuaugcggu

SEQ ID NO: 8767 - RNA, 21 nt, Artificial Sequence
  Synthetic
cccccaggcgcucuaugcggu

SEQ ID NO: 8768 - RNA, 22 nt, Artificial Sequence
  Synthetic
gcccccaggcgcucuaugcggu

SEQ ID NO: 8769 - RNA, 23 nt, Artificial Sequence
  Synthetic
cgcccccaggcgcucuaugcggu

SEQ ID NO: 8770 - RNA, 24 nt, Artificial Sequence
  Synthetic
ccgcccccaggcgcucuaugcggu

SEQ ID NO: 8771 - RNA, 18 nt, Artificial Sequence
  Synthetic
uucccagccaccucucca

SEQ ID NO: 8772 - RNA, 19 nt, Artificial Sequence
  Synthetic
cuucccagccaccucucca

SEQ ID NO: 8773 - RNA, 20 nt, Artificial Sequence
  Synthetic
ccuucccagccaccucucca

SEQ ID NO: 8774 - RNA, 21 nt, Artificial Sequence
  Synthetic
uccuucccagccaccucucca

SEQ ID NO: 8775 - RNA, 22 nt, Artificial Sequence
  Synthetic
guccuucccagccaccucucca

SEQ ID NO: 8776 - RNA, 23 nt, Artificial Sequence
  Synthetic
uguccuucccagccaccucucca

SEQ ID NO: 8777 - RNA, 24 nt, Artificial Sequence
  Synthetic
auguccuucccagccaccucucca

SEQ ID NO: 8778 - RNA, 18 nt, Artificial Sequence
  Synthetic
agcgcaucaagcucgaga

SEQ ID NO: 8779 - RNA, 19 nt, Artificial Sequence
  Synthetic
aagcgcaucaagcucgaga

SEQ ID NO: 8780 - RNA, 20 nt, Artificial Sequence
  Synthetic
uaagcgcaucaagcucgaga

SEQ ID NO: 8781 - RNA, 21 nt, Artificial Sequence
  Synthetic
cuaagcgcaucaagcucgaga

SEQ ID NO: 8782 - RNA, 22 nt, Artificial Sequence
  Synthetic
ucuaagcgcaucaagcucgaga

SEQ ID NO: 8783 - RNA, 23 nt, Artificial Sequence
  Synthetic
cucuaagcgcaucaagcucgaga

SEQ ID NO: 8784 - RNA, 24 nt, Artificial Sequence
  Synthetic
ucucuaagcgcaucaagcucgaga

SEQ ID NO: 8785 - RNA, 18 nt, Artificial Sequence
  Synthetic
ggagcugacggagagcga

SEQ ID NO: 8786 - RNA, 19 nt, Artificial Sequence
  Synthetic
aggagcugacggagagcga

SEQ ID NO: 8787 - RNA, 20 nt, Artificial Sequence
  Synthetic
gaggagcugacggagagcga

SEQ ID NO: 8788 - RNA, 21 nt, Artificial Sequence
  Synthetic
ggaggagcugacggagagcga

SEQ ID NO: 8789 - RNA, 22 nt, Artificial Sequence
  Synthetic
aggaggagcugacggagagcga

SEQ ID NO: 8790 - RNA, 23 nt, Artificial Sequence
  Synthetic
gaggaggagcugacggagagcga

SEQ ID NO: 8791 - RNA, 24 nt, Artificial Sequence
  Synthetic
ggaggaggagcugacggagagcga

SEQ ID NO: 8792 - RNA, 18 nt, Artificial Sequence
  Synthetic
ucacccgagugccuuuga

SEQ ID NO: 8793 - RNA, 19 nt, Artificial Sequence
  Synthetic
aucacccgagugccuuuga

SEQ ID NO: 8794 - RNA, 20 nt, Artificial Sequence
  Synthetic
caucacccgagugccuuuga

SEQ ID NO: 8795 - RNA, 21 nt, Artificial Sequence
  Synthetic
ccaucacccgagugccuuuga

SEQ ID NO: 8796 - RNA, 22 nt, Artificial Sequence
  Synthetic
cccaucacccgagugccuuuga

SEQ ID NO: 8797 - RNA, 23 nt, Artificial Sequence
  Synthetic
acccaucacccgagugccuuuga

SEQ ID NO: 8798 - RNA, 24 nt, Artificial Sequence
  Synthetic
cacccaucacccgagugccuuuga

SEQ ID NO: 8799 - RNA, 18 nt, Artificial Sequence
  Synthetic
gagcacuccucggagaac

SEQ ID NO: 8800 - RNA, 19 nt, Artificial Sequence
  Synthetic
ggagcacuccucggagaac

SEQ ID NO: 8801 - RNA, 20 nt, Artificial Sequence
  Synthetic
cggagcacuccucggagaac

SEQ ID NO: 8802 - RNA, 21 nt, Artificial Sequence
  Synthetic
ucggagcacuccucggagaac

SEQ ID NO: 8803 - RNA, 22 nt, Artificial Sequence
  Synthetic
gucggagcacuccucggagaac

SEQ ID NO: 8804 - RNA, 23 nt, Artificial Sequence
  Synthetic
cgucggagcacuccucggagaac

SEQ ID NO: 8805 - RNA, 24 nt, Artificial Sequence
  Synthetic
ucgucggagcacuccucggagaac

SEQ ID NO: 8806 - RNA, 18 nt, Artificial Sequence
  Synthetic
gcccuggccacccaucac

SEQ ID NO: 8807 - RNA, 19 nt, Artificial Sequence
  Synthetic
ggcccuggccacccaucac

SEQ ID NO: 8808 - RNA, 20 nt, Artificial Sequence
  Synthetic
uggcccuggccacccaucac

SEQ ID NO: 8809 - RNA, 21 nt, Artificial Sequence
  Synthetic
auggcccuggccacccaucac

SEQ ID NO: 8810 - RNA, 22 nt, Artificial Sequence
  Synthetic
gauggcccuggccacccaucac

SEQ ID NO: 8811 - RNA, 23 nt, Artificial Sequence
  Synthetic
agauggcccuggccacccaucac

SEQ ID NO: 8812 - RNA, 24 nt, Artificial Sequence
  Synthetic
gagauggcccuggccacccaucac

SEQ ID NO: 8813 - RNA, 18 nt, Artificial Sequence
  Synthetic
uuaaccugcuaagaauac

SEQ ID NO: 8814 - RNA, 19 nt, Artificial Sequence
  Synthetic
uuuaaccugcuaagaauac

SEQ ID NO: 8815 - RNA, 20 nt, Artificial Sequence
  Synthetic
cuuuaaccugcuaagaauac

SEQ ID NO: 8816 - RNA, 21 nt, Artificial Sequence
  Synthetic
ccuuuaaccugcuaagaauac

SEQ ID NO: 8817 - RNA, 22 nt, Artificial Sequence
  Synthetic
cccuuuaaccugcuaagaauac

SEQ ID NO: 8818 - RNA, 23 nt, Artificial Sequence
  Synthetic
ccccuuuaaccugcuaagaauac

SEQ ID NO: 8819 - RNA, 24 nt, Artificial Sequence
  Synthetic
accccuuuaaccugcuaagaauac

SEQ ID NO: 8820 - RNA, 18 nt, Artificial Sequence
  Synthetic
cggaaguccccugacccc

SEQ ID NO: 8821 - RNA, 19 nt, Artificial Sequence
  Synthetic
acggaaguccccugacccc

SEQ ID NO: 8822 - RNA, 20 nt, Artificial Sequence
  Synthetic
cacggaaguccccugacccc

SEQ ID NO: 8823 - RNA, 21 nt, Artificial Sequence
  Synthetic
acacggaaguccccugacccc

SEQ ID NO: 8824 - RNA, 22 nt, Artificial Sequence
  Synthetic
aacacggaaguccccugacccc

SEQ ID NO: 8825 - RNA, 23 nt, Artificial Sequence
  Synthetic
gaacacggaaguccccugacccc

SEQ ID NO: 8826 - RNA, 24 nt, Artificial Sequence
  Synthetic
cgaacacggaaguccccugacccc

SEQ ID NO: 8827 - RNA, 18 nt, Artificial Sequence
  Synthetic
agaaaauuugaagccccc

SEQ ID NO: 8828 - RNA, 19 nt, Artificial Sequence
  Synthetic
gagaaaauuugaagccccc

SEQ ID NO: 8829 - RNA, 20 nt, Artificial Sequence
  Synthetic
ugagaaaauuugaagccccc

SEQ ID NO: 8830 - RNA, 21 nt, Artificial Sequence
  Synthetic
cugagaaaauuugaagccccc

SEQ ID NO: 8831 - RNA, 22 nt, Artificial Sequence
  Synthetic
ucugagaaaauuugaagccccc

SEQ ID NO: 8832 - RNA, 23 nt, Artificial Sequence
  Synthetic
uucugagaaaauuugaagccccc

SEQ ID NO: 8833 - RNA, 24 nt, Artificial Sequence
  Synthetic
guucugagaaaauuugaagccccc

SEQ ID NO: 8834 - RNA, 18 nt, Artificial Sequence
  Synthetic
gcuauggagccucccgcc

SEQ ID NO: 8835 - RNA, 19 nt, Artificial Sequence
  Synthetic
ggcuauggagccucccgcc

SEQ ID NO: 8836 - RNA, 20 nt, Artificial Sequence
  Synthetic
uggcuauggagccucccgcc

SEQ ID NO: 8837 - RNA, 21 nt, Artificial Sequence
  Synthetic
auggcuauggagccucccgcc

SEQ ID NO: 8838 - RNA, 22 nt, Artificial Sequence
  Synthetic
aauggcuauggagccucccgcc

SEQ ID NO: 8839 - RNA, 23 nt, Artificial Sequence
  Synthetic
caauggcuauggagccucccgcc

SEQ ID NO: 8840 - RNA, 24 nt, Artificial Sequence
  Synthetic
ccaauggcuauggagccucccgcc

SEQ ID NO: 8841 - RNA, 18 nt, Artificial Sequence
  Synthetic
aacacgcacagaacacuc

SEQ ID NO: 8842 - RNA, 19 nt, Artificial Sequence
  Synthetic
caacacgcacagaacacuc

SEQ ID NO: 8843 - RNA, 20 nt, Artificial Sequence
  Synthetic
gcaacacgcacagaacacuc

SEQ ID NO: 8844 - RNA, 21 nt, Artificial Sequence
  Synthetic
ugcaacacgcacagaacacuc

SEQ ID NO: 8845 - RNA, 22 nt, Artificial Sequence
  Synthetic
uugcaacacgcacagaacacuc

SEQ ID NO: 8846 - RNA, 23 nt, Artificial Sequence
  Synthetic
cuugcaacacgcacagaacacuc

SEQ ID NO: 8847 - RNA, 24 nt, Artificial Sequence
  Synthetic
ucuugcaacacgcacagaacacuc

SEQ ID NO: 8848 - RNA, 18 nt, Artificial Sequence
  Synthetic
acgaagacucgguggccg

SEQ ID NO: 8849 - RNA, 19 nt, Artificial Sequence
  Synthetic
gacgaagacucgguggccg

SEQ ID NO: 8850 - RNA, 20 nt, Artificial Sequence
  Synthetic
cgacgaagacucgguggccg

SEQ ID NO: 8851 - RNA, 21 nt, Artificial Sequence
  Synthetic
gcgacgaagacucgguggccg

SEQ ID NO: 8852 - RNA, 22 nt, Artificial Sequence
  Synthetic
ugcgacgaagacucgguggccg

SEQ ID NO: 8853 - RNA, 23 nt, Artificial Sequence
  Synthetic
uugcgacgaagacucgguggccg

SEQ ID NO: 8854 - RNA, 24 nt, Artificial Sequence
  Synthetic
cuugcgacgaagacucgguggccg

SEQ ID NO: 8855 - RNA, 18 nt, Artificial Sequence
  Synthetic
gcccggggagcuggacgg

SEQ ID NO: 8856 - RNA, 19 nt, Artificial Sequence
  Synthetic
cgcccggggagcuggacgg

SEQ ID NO: 8857 - RNA, 20 nt, Artificial Sequence
  Synthetic
ccgcccggggagcuggacgg

SEQ ID NO: 8858 - RNA, 21 nt, Artificial Sequence
  Synthetic
accgcccggggagcuggacgg

SEQ ID NO: 8859 - RNA, 22 nt, Artificial Sequence
  Synthetic
caccgcccggggagcuggacgg

SEQ ID NO: 8860 - RNA, 23 nt, Artificial Sequence
  Synthetic
acaccgcccggggagcuggacgg

SEQ ID NO: 8861 - RNA, 24 nt, Artificial Sequence
  Synthetic
cacaccgcccggggagcuggacgg

SEQ ID NO: 8862 - RNA, 18 nt, Artificial Sequence
  Synthetic
gccgcggcugcuccccgg

SEQ ID NO: 8863 - RNA, 19 nt, Artificial Sequence
  Synthetic
ggccgcggcugcuccccgg

SEQ ID NO: 8864 - RNA, 20 nt, Artificial Sequence
  Synthetic
uggccgcggcugcuccccgg

SEQ ID NO: 8865 - RNA, 21 nt, Artificial Sequence
  Synthetic
auggccgcggcugcuccccgg

SEQ ID NO: 8866 - RNA, 22 nt, Artificial Sequence
  Synthetic
aauggccgcggcugcuccccgg

SEQ ID NO: 8867 - RNA, 23 nt, Artificial Sequence
  Synthetic
uaauggccgcggcugcuccccgg

SEQ ID NO: 8868 - RNA, 24 nt, Artificial Sequence
  Synthetic
uuaauggccgcggcugcuccccgg

SEQ ID NO: 8869 - RNA, 18 nt, Artificial Sequence
  Synthetic
uuugacagggugcugcgg

SEQ ID NO: 8870 - RNA, 19 nt, Artificial Sequence
  Synthetic
cuuugacagggugcugcgg

SEQ ID NO: 8871 - RNA, 20 nt, Artificial Sequence
  Synthetic
ccuuugacagggugcugcgg

SEQ ID NO: 8872 - RNA, 21 nt, Artificial Sequence
  Synthetic
gccuuugacagggugcugcgg

SEQ ID NO: 8873 - RNA, 22 nt, Artificial Sequence
  Synthetic
ugccuuugacagggugcugcgg

SEQ ID NO: 8874 - RNA, 23 nt, Artificial Sequence
  Synthetic
gugccuuugacagggugcugcgg

SEQ ID NO: 8875 - RNA, 24 nt, Artificial Sequence
  Synthetic
agugccuuugacagggugcugcgg

SEQ ID NO: 8876 - RNA, 18 nt, Artificial Sequence
  Synthetic
auuugaagcccccagggg

SEQ ID NO: 8877 - RNA, 19 nt, Artificial Sequence
  Synthetic
aauuugaagcccccagggg

SEQ ID NO: 8878 - RNA, 20 nt, Artificial Sequence
  Synthetic
aaauuugaagcccccagggg

SEQ ID NO: 8879 - RNA, 21 nt, Artificial Sequence
  Synthetic
aaaauuugaagcccccagggg

SEQ ID NO: 8880 - RNA, 22 nt, Artificial Sequence
  Synthetic
gaaaauuugaagcccccagggg

SEQ ID NO: 8881 - RNA, 23 nt, Artificial Sequence
  Synthetic
agaaaauuugaagcccccagggg

SEQ ID NO: 8882 - RNA, 24 nt, Artificial Sequence
  Synthetic
gagaaaauuugaagcccccagggg

SEQ ID NO: 8883 - RNA, 18 nt, Artificial Sequence
  Synthetic
ucccuucaggacuaggug

SEQ ID NO: 8884 - RNA, 19 nt, Artificial Sequence
  Synthetic
aucccuucaggacuaggug

SEQ ID NO: 8885 - RNA, 20 nt, Artificial Sequence
  Synthetic
uaucccuucaggacuaggug

SEQ ID NO: 8886 - RNA, 21 nt, Artificial Sequence
  Synthetic
guaucccuucaggacuaggug

SEQ ID NO: 8887 - RNA, 22 nt, Artificial Sequence
  Synthetic
gguaucccuucaggacuaggug

SEQ ID NO: 8888 - RNA, 23 nt, Artificial Sequence
  Synthetic
ugguaucccuucaggacuaggug

SEQ ID NO: 8889 - RNA, 24 nt, Artificial Sequence
  Synthetic
uugguaucccuucaggacuaggug

SEQ ID NO: 8890 - RNA, 18 nt, Artificial Sequence
  Synthetic
cggucaaguccaagucau

SEQ ID NO: 8891 - RNA, 19 nt, Artificial Sequence
  Synthetic
ccggucaaguccaagucau

SEQ ID NO: 8892 - RNA, 20 nt, Artificial Sequence
  Synthetic
cccggucaaguccaagucau

SEQ ID NO: 8893 - RNA, 21 nt, Artificial Sequence
  Synthetic
ccccggucaaguccaagucau

SEQ ID NO: 8894 - RNA, 22 nt, Artificial Sequence
  Synthetic
cccccggucaaguccaagucau

SEQ ID NO: 8895 - RNA, 23 nt, Artificial Sequence
  Synthetic
gcccccggucaaguccaagucau

SEQ ID NO: 8896 - RNA, 24 nt, Artificial Sequence
  Synthetic
agcccccggucaaguccaagucau

SEQ ID NO: 8897 - RNA, 18 nt, Artificial Sequence
  Synthetic
uaaccccuuuaaccugcu

SEQ ID NO: 8898 - RNA, 19 nt, Artificial Sequence
  Synthetic
auaaccccuuuaaccugcu

SEQ ID NO: 8899 - RNA, 20 nt, Artificial Sequence
  Synthetic
aauaaccccuuuaaccugcu

SEQ ID NO: 8900 - RNA, 21 nt, Artificial Sequence
  Synthetic
caauaaccccuuuaaccugcu

SEQ ID NO: 8901 - RNA, 22 nt, Artificial Sequence
  Synthetic
acaauaaccccuuuaaccugcu

SEQ ID NO: 8902 - RNA, 23 nt, Artificial Sequence
  Synthetic
gacaauaaccccuuuaaccugcu

SEQ ID NO: 8903 - RNA, 24 nt, Artificial Sequence
  Synthetic
agacaauaaccccuuuaaccugcu

SEQ ID NO: 8904 - RNA, 18 nt, Artificial Sequence
  Synthetic
acagaacacucauggauu

SEQ ID NO: 8905 - RNA, 19 nt, Artificial Sequence
  Synthetic
cacagaacacucauggauu

SEQ ID NO: 8906 - RNA, 20 nt, Artificial Sequence
  Synthetic
gcacagaacacucauggauu

SEQ ID NO: 8907 - RNA, 21 nt, Artificial Sequence
  Synthetic
cgcacagaacacucauggauu

SEQ ID NO: 8908 - RNA, 22 nt, Artificial Sequence
  Synthetic
acgcacagaacacucauggauu

SEQ ID NO: 8909 - RNA, 23 nt, Artificial Sequence
  Synthetic
cacgcacagaacacucauggauu

SEQ ID NO: 8910 - RNA, 24 nt, Artificial Sequence
  Synthetic
acacgcacagaacacucauggauu

SEQ ID NO: 8911 - RNA, 18 nt, Artificial Sequence
  Synthetic
gcagacgcagcgacacuu

SEQ ID NO: 8912 - RNA, 19 nt, Artificial Sequence
  Synthetic
ggcagacgcagcgacacuu

SEQ ID NO: 8913 - RNA, 20 nt, Artificial Sequence
  Synthetic
gggcagacgcagcgacacuu

SEQ ID NO: 8914 - RNA, 21 nt, Artificial Sequence
  Synthetic
agggcagacgcagcgacacuu

SEQ ID NO: 8915 - RNA, 22 nt, Artificial Sequence
  Synthetic
gagggcagacgcagcgacacuu

SEQ ID NO: 8916 - RNA, 23 nt, Artificial Sequence
  Synthetic
agagggcagacgcagcgacacuu

SEQ ID NO: 8917 - RNA, 24 nt, Artificial Sequence
  Synthetic
aagagggcagacgcagcgacacuu

SEQ ID NO: 8918 - RNA, 18 nt, Artificial Sequence
  Synthetic
caagauguguggcaguuu

SEQ ID NO: 8919 - RNA, 19 nt, Artificial Sequence
  Synthetic
ucaagauguguggcaguuu

SEQ ID NO: 8920 - RNA, 20 nt, Artificial Sequence
  Synthetic
cucaagauguguggcaguuu

SEQ ID NO: 8921 - RNA, 21 nt, Artificial Sequence
  Synthetic
gcucaagauguguggcaguuu

SEQ ID NO: 8922 - RNA, 22 nt, Artificial Sequence
  Synthetic
agcucaagauguguggcaguuu

SEQ ID NO: 8923 - RNA, 23 nt, Artificial Sequence
  Synthetic
gagcucaagauguguggcaguuu

SEQ ID NO: 8924 - RNA, 24 nt, Artificial Sequence
  Synthetic
agagcucaagauguguggcaguuu

SEQ ID NO: 8925 - RNA, 18 nt, Artificial Sequence
  Synthetic
ucucggugguggacuaaa

SEQ ID NO: 8926 - RNA, 19 nt, Artificial Sequence
  Synthetic
gucucggugguggacuaaa

SEQ ID NO: 8927 - RNA, 20 nt, Artificial Sequence
  Synthetic
ugucucggugguggacuaaa

SEQ ID NO: 8928 - RNA, 21 nt, Artificial Sequence
  Synthetic
augucucggugguggacuaaa

SEQ ID NO: 8929 - RNA, 22 nt, Artificial Sequence
  Synthetic
gaugucucggugguggacuaaa

SEQ ID NO: 8930 - RNA, 23 nt, Artificial Sequence
  Synthetic
ugaugucucggugguggacuaaa

SEQ ID NO: 8931 - RNA, 24 nt, Artificial Sequence
  Synthetic
gugaugucucggugguggacuaaa

SEQ ID NO: 8932 - RNA, 18 nt, Artificial Sequence
  Synthetic
guucugugcguguugcaa

SEQ ID NO: 8933 - RNA, 19 nt, Artificial Sequence
  Synthetic
uguucugugcguguugcaa

SEQ ID NO: 8934 - RNA, 20 nt, Artificial Sequence
  Synthetic
guguucugugcguguugcaa

SEQ ID NO: 8935 - RNA, 21 nt, Artificial Sequence
  Synthetic
aguguucugugcguguugcaa

SEQ ID NO: 8936 - RNA, 22 nt, Artificial Sequence
  Synthetic
gaguguucugugcguguugcaa

SEQ ID NO: 8937 - RNA, 23 nt, Artificial Sequence
  Synthetic
ugaguguucugugcguguugcaa

SEQ ID NO: 8938 - RNA, 24 nt, Artificial Sequence
  Synthetic
augaguguucugugcguguugcaa

SEQ ID NO: 8939 - RNA, 18 nt, Artificial Sequence
  Synthetic
ucuggguacuacgccgaa

SEQ ID NO: 8940 - RNA, 19 nt, Artificial Sequence
  Synthetic
cucuggguacuacgccgaa

SEQ ID NO: 8941 - RNA, 20 nt, Artificial Sequence
  Synthetic
ucucuggguacuacgccgaa

SEQ ID NO: 8942 - RNA, 21 nt, Artificial Sequence
  Synthetic
cucucuggguacuacgccgaa

SEQ ID NO: 8943 - RNA, 22 nt, Artificial Sequence
  Synthetic
gcucucuggguacuacgccgaa

SEQ ID NO: 8944 - RNA, 23 nt, Artificial Sequence
  Synthetic
agcucucuggguacuacgccgaa

SEQ ID NO: 8945 - RNA, 24 nt, Artificial Sequence
  Synthetic
gagcucucuggguacuacgccgaa

SEQ ID NO: 8946 - RNA, 18 nt, Artificial Sequence
  Synthetic
ucggugguggacuaaaca

SEQ ID NO: 8947 - RNA, 19 nt, Artificial Sequence
  Synthetic
cucggugguggacuaaaca

SEQ ID NO: 8948 - RNA, 20 nt, Artificial Sequence
  Synthetic
ucucggugguggacuaaaca

SEQ ID NO: 8949 - RNA, 21 nt, Artificial Sequence
  Synthetic
gucucggugguggacuaaaca

SEQ ID NO: 8950 - RNA, 22 nt, Artificial Sequence
  Synthetic
ugucucggugguggacuaaaca

SEQ ID NO: 8951 - RNA, 23 nt, Artificial Sequence
  Synthetic
augucucggugguggacuaaaca

SEQ ID NO: 8952 - RNA, 24 nt, Artificial Sequence
  Synthetic
gaugucucggugguggacuaaaca

SEQ ID NO: 8953 - RNA, 18 nt, Artificial Sequence
  Synthetic
agaaagagguuggagaca

SEQ ID NO: 8954 - RNA, 19 nt, Artificial Sequence
  Synthetic
uagaaagagguuggagaca

SEQ ID NO: 8955 - RNA, 20 nt, Artificial Sequence
  Synthetic
cuagaaagagguuggagaca

SEQ ID NO: 8956 - RNA, 21 nt, Artificial Sequence
  Synthetic
ccuagaaagagguuggagaca

SEQ ID NO: 8957 - RNA, 22 nt, Artificial Sequence
  Synthetic
accuagaaagagguuggagaca

SEQ ID NO: 8958 - RNA, 23 nt, Artificial Sequence
  Synthetic
aaccuagaaagagguuggagaca

SEQ ID NO: 8959 - RNA, 24 nt, Artificial Sequence
  Synthetic
gaaccuagaaagagguuggagaca

SEQ ID NO: 8960 - RNA, 18 nt, Artificial Sequence
  Synthetic
ucugcaauaugaauccca

SEQ ID NO: 8961 - RNA, 19 nt, Artificial Sequence
  Synthetic
gucugcaauaugaauccca

SEQ ID NO: 8962 - RNA, 20 nt, Artificial Sequence
  Synthetic
ugucugcaauaugaauccca

SEQ ID NO: 8963 - RNA, 21 nt, Artificial Sequence
  Synthetic
uugucugcaauaugaauccca

SEQ ID NO: 8964 - RNA, 22 nt, Artificial Sequence
  Synthetic
auugucugcaauaugaauccca

SEQ ID NO: 8965 - RNA, 23 nt, Artificial Sequence
  Synthetic
uauugucugcaauaugaauccca

SEQ ID NO: 8966 - RNA, 24 nt, Artificial Sequence
  Synthetic
uuauugucugcaauaugaauccca

SEQ ID NO: 8967 - RNA, 18 nt, Artificial Sequence
  Synthetic
ccucgcugaagugcugca

SEQ ID NO: 8968 - RNA, 19 nt, Artificial Sequence
  Synthetic
gccucgcugaagugcugca

SEQ ID NO: 8969 - RNA, 20 nt, Artificial Sequence
  Synthetic
ggccucgcugaagugcugca

SEQ ID NO: 8970 - RNA, 21 nt, Artificial Sequence
  Synthetic
aggccucgcugaagugcugca

SEQ ID NO: 8971 - RNA, 22 nt, Artificial Sequence
  Synthetic
aaggccucgcugaagugcugca

SEQ ID NO: 8972 - RNA, 23 nt, Artificial Sequence
  Synthetic
gaaggccucgcugaagugcugca

SEQ ID NO: 8973 - RNA, 24 nt, Artificial Sequence
  Synthetic
ggaaggccucgcugaagugcugca

SEQ ID NO: 8974 - RNA, 18 nt, Artificial Sequence
  Synthetic
gaggaggggcggauugca

SEQ ID NO: 8975 - RNA, 19 nt, Artificial Sequence
  Synthetic
ggaggaggggcggauugca

SEQ ID NO: 8976 - RNA, 20 nt, Artificial Sequence
  Synthetic
gggaggaggggcggauugca

SEQ ID NO: 8977 - RNA, 21 nt, Artificial Sequence
  Synthetic
agggaggaggggcggauugca

SEQ ID NO: 8978 - RNA, 22 nt, Artificial Sequence
  Synthetic
gagggaggaggggcggauugca

SEQ ID NO: 8979 - RNA, 23 nt, Artificial Sequence
  Synthetic
ggagggaggaggggcggauugca

SEQ ID NO: 8980 - RNA, 24 nt, Artificial Sequence
  Synthetic
gggagggaggaggggcggauugca

SEQ ID NO: 8981 - RNA, 18 nt, Artificial Sequence
  Synthetic
guugcaguaaccuuugca

SEQ ID NO: 8982 - RNA, 19 nt, Artificial Sequence
  Synthetic
gguugcaguaaccuuugca

SEQ ID NO: 8983 - RNA, 20 nt, Artificial Sequence
  Synthetic
ugguugcaguaaccuuugca

SEQ ID NO: 8984 - RNA, 21 nt, Artificial Sequence
  Synthetic
augguugcaguaaccuuugca

SEQ ID NO: 8985 - RNA, 22 nt, Artificial Sequence
  Synthetic
aaugguugcaguaaccuuugca

SEQ ID NO: 8986 - RNA, 23 nt, Artificial Sequence
  Synthetic
gaaugguugcaguaaccuuugca

SEQ ID NO: 8987 - RNA, 24 nt, Artificial Sequence
  Synthetic
ggaaugguugcaguaaccuuugca

SEQ ID NO: 8988 - RNA, 18 nt, Artificial Sequence
  Synthetic
gcuuagagaaggggcuca

SEQ ID NO: 8989 - RNA, 19 nt, Artificial Sequence
  Synthetic
cgcuuagagaaggggcuca

SEQ ID NO: 8990 - RNA, 20 nt, Artificial Sequence
  Synthetic
gcgcuuagagaaggggcuca

SEQ ID NO: 8991 - RNA, 21 nt, Artificial Sequence
  Synthetic
ugcgcuuagagaaggggcuca

SEQ ID NO: 8992 - RNA, 22 nt, Artificial Sequence
  Synthetic
augcgcuuagagaaggggcuca

SEQ ID NO: 8993 - RNA, 23 nt, Artificial Sequence
  Synthetic
gaugcgcuuagagaaggggcuca

SEQ ID NO: 8994 - RNA, 24 nt, Artificial Sequence
  Synthetic
ugaugcgcuuagagaaggggcuca

SEQ ID NO: 8995 - RNA, 18 nt, Artificial Sequence
  Synthetic
cgucggacuugaccguca

SEQ ID NO: 8996 - RNA, 19 nt, Artificial Sequence
  Synthetic
ucgucggacuugaccguca

SEQ ID NO: 8997 - RNA, 20 nt, Artificial Sequence
  Synthetic
gucgucggacuugaccguca

SEQ ID NO: 8998 - RNA, 21 nt, Artificial Sequence
  Synthetic
cgucgucggacuugaccguca

SEQ ID NO: 8999 - RNA, 22 nt, Artificial Sequence
  Synthetic
ccgucgucggacuugaccguca

SEQ ID NO: 9000 - RNA, 23 nt, Artificial Sequence
  Synthetic
accgucgucggacuugaccguca

SEQ ID NO: 9001 - RNA, 24 nt, Artificial Sequence
  Synthetic
gaccgucgucggacuugaccguca

SEQ ID NO: 9002 - RNA, 18 nt, Artificial Sequence
  Synthetic
uaccaacccgcgggguca

SEQ ID NO: 9003 - RNA, 19 nt, Artificial Sequence
  Synthetic
auaccaacccgcgggguca

SEQ ID NO: 9004 - RNA, 20 nt, Artificial Sequence
  Synthetic
gauaccaacccgcgggguca

SEQ ID NO: 9005 - RNA, 21 nt, Artificial Sequence
  Synthetic
ggauaccaacccgcgggguca

SEQ ID NO: 9006 - RNA, 22 nt, Artificial Sequence
  Synthetic
gggauaccaacccgcgggguca

SEQ ID NO: 9007 - RNA, 23 nt, Artificial Sequence
  Synthetic
agggauaccaacccgcgggguca

SEQ ID NO: 9008 - RNA, 24 nt, Artificial Sequence
  Synthetic
aagggauaccaacccgcgggguca

SEQ ID NO: 9009 - RNA, 18 nt, Artificial Sequence
  Synthetic
gcuugaugcgcuuagaga

SEQ ID NO: 9010 - RNA, 19 nt, Artificial Sequence
  Synthetic
agcuugaugcgcuuagaga

SEQ ID NO: 9011 - RNA, 20 nt, Artificial Sequence
  Synthetic
gagcuugaugcgcuuagaga

SEQ ID NO: 9012 - RNA, 21 nt, Artificial Sequence
  Synthetic
cgagcuugaugcgcuuagaga

SEQ ID NO: 9013 - RNA, 22 nt, Artificial Sequence
  Synthetic
ucgagcuugaugcgcuuagaga

SEQ ID NO: 9014 - RNA, 23 nt, Artificial Sequence
  Synthetic
cucgagcuugaugcgcuuagaga

SEQ ID NO: 9015 - RNA, 24 nt, Artificial Sequence
  Synthetic
ucucgagcuugaugcgcuuagaga

SEQ ID NO: 9016 - RNA, 18 nt, Artificial Sequence
  Synthetic
cuagaaagagguuggaga

SEQ ID NO: 9017 - RNA, 19 nt, Artificial Sequence
  Synthetic
ccuagaaagagguuggaga

SEQ ID NO: 9018 - RNA, 20 nt, Artificial Sequence
  Synthetic
accuagaaagagguuggaga

SEQ ID NO: 9019 - RNA, 21 nt, Artificial Sequence
  Synthetic
aaccuagaaagagguuggaga

SEQ ID NO: 9020 - RNA, 22 nt, Artificial Sequence
  Synthetic
gaaccuagaaagagguuggaga

SEQ ID NO: 9021 - RNA, 23 nt, Artificial Sequence
  Synthetic
agaaccuagaaagagguuggaga

SEQ ID NO: 9022 - RNA, 24 nt, Artificial Sequence
  Synthetic
aagaaccuagaaagagguuggaga

SEQ ID NO: 9023 - RNA, 18 nt, Artificial Sequence
  Synthetic
gugugugaagaaccuaga

SEQ ID NO: 9024 - RNA, 19 nt, Artificial Sequence
  Synthetic
ggugugugaagaaccuaga

SEQ ID NO: 9025 - RNA, 20 nt, Artificial Sequence
  Synthetic
gggugugugaagaaccuaga

SEQ ID NO: 9026 - RNA, 21 nt, Artificial Sequence
  Synthetic
ggggugugugaagaaccuaga

SEQ ID NO: 9027 - RNA, 22 nt, Artificial Sequence
  Synthetic
gggggugugugaagaaccuaga

SEQ ID NO: 9028 - RNA, 23 nt, Artificial Sequence
  Synthetic
ugggggugugugaagaaccuaga

SEQ ID NO: 9029 - RNA, 24 nt, Artificial Sequence
  Synthetic
augggggugugugaagaaccuaga

SEQ ID NO: 9030 - RNA, 18 nt, Artificial Sequence
  Synthetic
cucuggguacuacgccga

SEQ ID NO: 9031 - RNA, 19 nt, Artificial Sequence
  Synthetic
ucucuggguacuacgccga

SEQ ID NO: 9032 - RNA, 20 nt, Artificial Sequence
  Synthetic
cucucuggguacuacgccga

SEQ ID NO: 9033 - RNA, 21 nt, Artificial Sequence
  Synthetic
gcucucuggguacuacgccga

SEQ ID NO: 9034 - RNA, 22 nt, Artificial Sequence
  Synthetic
agcucucuggguacuacgccga

SEQ ID NO: 9035 - RNA, 23 nt, Artificial Sequence
  Synthetic
gagcucucuggguacuacgccga

SEQ ID NO: 9036 - RNA, 24 nt, Artificial Sequence
  Synthetic
ugagcucucuggguacuacgccga

SEQ ID NO: 9037 - RNA, 18 nt, Artificial Sequence
  Synthetic
gagguuggagacagagga

SEQ ID NO: 9038 - RNA, 19 nt, Artificial Sequence
  Synthetic
agagguuggagacagagga

SEQ ID NO: 9039 - RNA, 20 nt, Artificial Sequence
  Synthetic
aagagguuggagacagagga

SEQ ID NO: 9040 - RNA, 21 nt, Artificial Sequence
  Synthetic
aaagagguuggagacagagga

SEQ ID NO: 9041 - RNA, 22 nt, Artificial Sequence
  Synthetic
gaaagagguuggagacagagga

SEQ ID NO: 9042 - RNA, 23 nt, Artificial Sequence
  Synthetic
agaaagagguuggagacagagga

SEQ ID NO: 9043 - RNA, 24 nt, Artificial Sequence
  Synthetic
uagaaagagguuggagacagagga

SEQ ID NO: 9044 - RNA, 18 nt, Artificial Sequence
  Synthetic
ggggcggauugcagagga

SEQ ID NO: 9045 - RNA, 19 nt, Artificial Sequence
  Synthetic
aggggcggauugcagagga

SEQ ID NO: 9046 - RNA, 20 nt, Artificial Sequence
  Synthetic
gaggggcggauugcagagga

SEQ ID NO: 9047 - RNA, 21 nt, Artificial Sequence
  Synthetic
ggaggggcggauugcagagga

SEQ ID NO: 9048 - RNA, 22 nt, Artificial Sequence
  Synthetic
aggaggggcggauugcagagga

SEQ ID NO: 9049 - RNA, 23 nt, Artificial Sequence
  Synthetic
gaggaggggcggauugcagagga

SEQ ID NO: 9050 - RNA, 24 nt, Artificial Sequence
  Synthetic
ggaggaggggcggauugcagagga

SEQ ID NO: 9051 - RNA, 18 nt, Artificial Sequence
  Synthetic
cggauugcagaggaggga

SEQ ID NO: 9052 - RNA, 19 nt, Artificial Sequence
  Synthetic
gcggauugcagaggaggga

SEQ ID NO: 9053 - RNA, 20 nt, Artificial Sequence
  Synthetic
ggcggauugcagaggaggga

SEQ ID NO: 9054 - RNA, 21 nt, Artificial Sequence
  Synthetic
gggcggauugcagaggaggga

SEQ ID NO: 9055 - RNA, 22 nt, Artificial Sequence
  Synthetic
ggggcggauugcagaggaggga

SEQ ID NO: 9056 - RNA, 23 nt, Artificial Sequence
  Synthetic
aggggcggauugcagaggaggga

SEQ ID NO: 9057 - RNA, 24 nt, Artificial Sequence
  Synthetic
gaggggcggauugcagaggaggga

SEQ ID NO: 9058 - RNA, 18 nt, Artificial Sequence
  Synthetic
cuugaccgggggcuggga

SEQ ID NO: 9059 - RNA, 19 nt, Artificial Sequence
  Synthetic
acuugaccgggggcuggga

SEQ ID NO: 9060 - RNA, 20 nt, Artificial Sequence
  Synthetic
gacuugaccgggggcuggga

SEQ ID NO: 9061 - RNA, 21 nt, Artificial Sequence
  Synthetic
ggacuugaccgggggcuggga

SEQ ID NO: 9062 - RNA, 22 nt, Artificial Sequence
  Synthetic
uggacuugaccgggggcuggga

SEQ ID NO: 9063 - RNA, 23 nt, Artificial Sequence
  Synthetic
uuggacuugaccgggggcuggga

SEQ ID NO: 9064 - RNA, 24 nt, Artificial Sequence
  Synthetic
cuuggacuugaccgggggcuggga

SEQ ID NO: 9065 - RNA, 18 nt, Artificial Sequence
  Synthetic
cgcaugacuuggacuuga

SEQ ID NO: 9066 - RNA, 19 nt, Artificial Sequence
  Synthetic
ucgcaugacuuggacuuga

SEQ ID NO: 9067 - RNA, 20 nt, Artificial Sequence
  Synthetic
cucgcaugacuuggacuuga

SEQ ID NO: 9068 - RNA, 21 nt, Artificial Sequence
  Synthetic
acucgcaugacuuggacuuga

SEQ ID NO: 9069 - RNA, 22 nt, Artificial Sequence
  Synthetic
aacucgcaugacuuggacuuga

SEQ ID NO: 9070 - RNA, 23 nt, Artificial Sequence
  Synthetic
gaacucgcaugacuuggacuuga

SEQ ID NO: 9071 - RNA, 24 nt, Artificial Sequence
  Synthetic
agaacucgcaugacuuggacuuga

SEQ ID NO: 9072 - RNA, 18 nt, Artificial Sequence
  Synthetic
gggcccggaccacuaaua

SEQ ID NO: 9073 - RNA, 19 nt, Artificial Sequence
  Synthetic
cgggcccggaccacuaaua

SEQ ID NO: 9074 - RNA, 20 nt, Artificial Sequence
  Synthetic
ccgggcccggaccacuaaua

SEQ ID NO: 9075 - RNA, 21 nt, Artificial Sequence
  Synthetic
cccgggcccggaccacuaaua

SEQ ID NO: 9076 - RNA, 22 nt, Artificial Sequence
  Synthetic
gcccgggcccggaccacuaaua

SEQ ID NO: 9077 - RNA, 23 nt, Artificial Sequence
  Synthetic
ugcccgggcccggaccacuaaua

SEQ ID NO: 9078 - RNA, 24 nt, Artificial Sequence
  Synthetic
cugcccgggcccggaccacuaaua

SEQ ID NO: 9079 - RNA, 18 nt, Artificial Sequence
  Synthetic
agcucucuaagucuccua

SEQ ID NO: 9080 - RNA, 19 nt, Artificial Sequence
  Synthetic
cagcucucuaagucuccua

SEQ ID NO: 9081 - RNA, 20 nt, Artificial Sequence
  Synthetic
ccagcucucuaagucuccua

SEQ ID NO: 9082 - RNA, 21 nt, Artificial Sequence
  Synthetic
gccagcucucuaagucuccua

SEQ ID NO: 9083 - RNA, 22 nt, Artificial Sequence
  Synthetic
ugccagcucucuaagucuccua

SEQ ID NO: 9084 - RNA, 23 nt, Artificial Sequence
  Synthetic
cugccagcucucuaagucuccua

SEQ ID NO: 9085 - RNA, 24 nt, Artificial Sequence
  Synthetic
ccugccagcucucuaagucuccua

SEQ ID NO: 9086 - RNA, 18 nt, Artificial Sequence
  Synthetic
cuggagucuccgaagcua

SEQ ID NO: 9087 - RNA, 19 nt, Artificial Sequence
  Synthetic
ucuggagucuccgaagcua

SEQ ID NO: 9088 - RNA, 20 nt, Artificial Sequence
  Synthetic
gucuggagucuccgaagcua

SEQ ID NO: 9089 - RNA, 21 nt, Artificial Sequence
  Synthetic
ugucuggagucuccgaagcua

SEQ ID NO: 9090 - RNA, 22 nt, Artificial Sequence
  Synthetic
uugucuggagucuccgaagcua

SEQ ID NO: 9091 - RNA, 23 nt, Artificial Sequence
  Synthetic
auugucuggagucuccgaagcua

SEQ ID NO: 9092 - RNA, 24 nt, Artificial Sequence
  Synthetic
gauugucuggagucuccgaagcua

SEQ ID NO: 9093 - RNA, 18 nt, Artificial Sequence
  Synthetic
ucgagcuugaugcgcuua

SEQ ID NO: 9094 - RNA, 19 nt, Artificial Sequence
  Synthetic
cucgagcuugaugcgcuua

SEQ ID NO: 9095 - RNA, 20 nt, Artificial Sequence
  Synthetic
ucucgagcuugaugcgcuua

SEQ ID NO: 9096 - RNA, 21 nt, Artificial Sequence
  Synthetic
uucucgagcuugaugcgcuua

SEQ ID NO: 9097 - RNA, 22 nt, Artificial Sequence
  Synthetic
cuucucgagcuugaugcgcuua

SEQ ID NO: 9098 - RNA, 23 nt, Artificial Sequence
  Synthetic
ccuucucgagcuugaugcgcuua

SEQ ID NO: 9099 - RNA, 24 nt, Artificial Sequence
  Synthetic
uccuucucgagcuugaugcgcuua

SEQ ID NO: 9100 - RNA, 18 nt, Artificial Sequence
  Synthetic
gguauucuuagcagguua

SEQ ID NO: 9101 - RNA, 19 nt, Artificial Sequence
  Synthetic
ugguauucuuagcagguua

SEQ ID NO: 9102 - RNA, 20 nt, Artificial Sequence
  Synthetic
cugguauucuuagcagguua

SEQ ID NO: 9103 - RNA, 21 nt, Artificial Sequence
  Synthetic
ccugguauucuuagcagguua

SEQ ID NO: 9104 - RNA, 22 nt, Artificial Sequence
  Synthetic
uccugguauucuuagcagguua

SEQ ID NO: 9105 - RNA, 23 nt, Artificial Sequence
  Synthetic
auccugguauucuuagcagguua

SEQ ID NO: 9106 - RNA, 24 nt, Artificial Sequence
  Synthetic
gauccugguauucuuagcagguua

SEQ ID NO: 9107 - RNA, 18 nt, Artificial Sequence
  Synthetic
cucggugguggacuaaac

SEQ ID NO: 9108 - RNA, 19 nt, Artificial Sequence
  Synthetic
ucucggugguggacuaaac

SEQ ID NO: 9109 - RNA, 20 nt, Artificial Sequence
  Synthetic
gucucggugguggacuaaac

SEQ ID NO: 9110 - RNA, 21 nt, Artificial Sequence
  Synthetic
ugucucggugguggacuaaac

SEQ ID NO: 9111 - RNA, 22 nt, Artificial Sequence
  Synthetic
augucucggugguggacuaaac

SEQ ID NO: 9112 - RNA, 23 nt, Artificial Sequence
  Synthetic
gaugucucggugguggacuaaac

SEQ ID NO: 9113 - RNA, 24 nt, Artificial Sequence
  Synthetic
ugaugucucggugguggacuaaac

SEQ ID NO: 9114 - RNA, 18 nt, Artificial Sequence
  Synthetic
uccgaggagugcuccgac

SEQ ID NO: 9115 - RNA, 19 nt, Artificial Sequence
  Synthetic
cuccgaggagugcuccgac

SEQ ID NO: 9116 - RNA, 20 nt, Artificial Sequence
  Synthetic
ucuccgaggagugcuccgac

SEQ ID NO: 9117 - RNA, 21 nt, Artificial Sequence
  Synthetic
uucuccgaggagugcuccgac

SEQ ID NO: 9118 - RNA, 22 nt, Artificial Sequence
  Synthetic
guucuccgaggagugcuccgac

SEQ ID NO: 9119 - RNA, 23 nt, Artificial Sequence
  Synthetic
cguucuccgaggagugcuccgac

SEQ ID NO: 9120 - RNA, 24 nt, Artificial Sequence
  Synthetic
ccguucuccgaggagugcuccgac

SEQ ID NO: 9121 - RNA, 18 nt, Artificial Sequence
  Synthetic
aacuuggccaccacggac

SEQ ID NO: 9122 - RNA, 19 nt, Artificial Sequence
  Synthetic
gaacuuggccaccacggac

SEQ ID NO: 9123 - RNA, 20 nt, Artificial Sequence
  Synthetic
ugaacuuggccaccacggac

SEQ ID NO: 9124 - RNA, 21 nt, Artificial Sequence
  Synthetic
uugaacuuggccaccacggac

SEQ ID NO: 9125 - RNA, 22 nt, Artificial Sequence
  Synthetic
cuugaacuuggccaccacggac

SEQ ID NO: 9126 - RNA, 23 nt, Artificial Sequence
  Synthetic
ucuugaacuuggccaccacggac

SEQ ID NO: 9127 - RNA, 24 nt, Artificial Sequence
  Synthetic
cucuugaacuuggccaccacggac

SEQ ID NO: 9128 - RNA, 18 nt, Artificial Sequence
  Synthetic
ccgcagaacucgcaugac

SEQ ID NO: 9129 - RNA, 19 nt, Artificial Sequence
  Synthetic
gccgcagaacucgcaugac

SEQ ID NO: 9130 - RNA, 20 nt, Artificial Sequence
  Synthetic
ugccgcagaacucgcaugac

SEQ ID NO: 9131 - RNA, 21 nt, Artificial Sequence
  Synthetic
uugccgcagaacucgcaugac

SEQ ID NO: 9132 - RNA, 22 nt, Artificial Sequence
  Synthetic
cuugccgcagaacucgcaugac

SEQ ID NO: 9133 - RNA, 23 nt, Artificial Sequence
  Synthetic
ucuugccgcagaacucgcaugac

SEQ ID NO: 9134 - RNA, 24 nt, Artificial Sequence
  Synthetic
gucuugccgcagaacucgcaugac

SEQ ID NO: 9135 - RNA, 18 nt, Artificial Sequence
  Synthetic
gcaugacuuggacuugac

SEQ ID NO: 9136 - RNA, 19 nt, Artificial Sequence
  Synthetic
cgcaugacuuggacuugac

SEQ ID NO: 9137 - RNA, 20 nt, Artificial Sequence
  Synthetic
ucgcaugacuuggacuugac

SEQ ID NO: 9138 - RNA, 21 nt, Artificial Sequence
  Synthetic
cucgcaugacuuggacuugac

SEQ ID NO: 9139 - RNA, 22 nt, Artificial Sequence
  Synthetic
acucgcaugacuuggacuugac

SEQ ID NO: 9140 - RNA, 23 nt, Artificial Sequence
  Synthetic
aacucgcaugacuuggacuugac

SEQ ID NO: 9141 - RNA, 24 nt, Artificial Sequence
  Synthetic
gaacucgcaugacuuggacuugac

SEQ ID NO: 9142 - RNA, 18 nt, Artificial Sequence
  Synthetic
gggggugugugaagaacc

SEQ ID NO: 9143 - RNA, 19 nt, Artificial Sequence
  Synthetic
ugggggugugugaagaacc

SEQ ID NO: 9144 - RNA, 20 nt, Artificial Sequence
  Synthetic
augggggugugugaagaacc

SEQ ID NO: 9145 - RNA, 21 nt, Artificial Sequence
  Synthetic
aaugggggugugugaagaacc

SEQ ID NO: 9146 - RNA, 22 nt, Artificial Sequence
  Synthetic
gaaugggggugugugaagaacc

SEQ ID NO: 9147 - RNA, 23 nt, Artificial Sequence
  Synthetic
cgaaugggggugugugaagaacc

SEQ ID NO: 9148 - RNA, 24 nt, Artificial Sequence
  Synthetic
ccgaaugggggugugugaagaacc

SEQ ID NO: 9149 - RNA, 18 nt, Artificial Sequence
  Synthetic
cucuugaacuuggccacc

SEQ ID NO: 9150 - RNA, 19 nt, Artificial Sequence
  Synthetic
gcucuugaacuuggccacc

SEQ ID NO: 9151 - RNA, 20 nt, Artificial Sequence
  Synthetic
cgcucuugaacuuggccacc

SEQ ID NO: 9152 - RNA, 21 nt, Artificial Sequence
  Synthetic
ucgcucuugaacuuggccacc

SEQ ID NO: 9153 - RNA, 22 nt, Artificial Sequence
  Synthetic
cucgcucuugaacuuggccacc

SEQ ID NO: 9154 - RNA, 23 nt, Artificial Sequence
  Synthetic
ucucgcucuugaacuuggccacc

SEQ ID NO: 9155 - RNA, 24 nt, Artificial Sequence
  Synthetic
uucucgcucuugaacuuggccacc

SEQ ID NO: 9156 - RNA, 18 nt, Artificial Sequence
  Synthetic
caugacuuggacuugacc

SEQ ID NO: 9157 - RNA, 19 nt, Artificial Sequence
  Synthetic
gcaugacuuggacuugacc

SEQ ID NO: 9158 - RNA, 20 nt, Artificial Sequence
  Synthetic
cgcaugacuuggacuugacc

SEQ ID NO: 9159 - RNA, 21 nt, Artificial Sequence
  Synthetic
ucgcaugacuuggacuugacc

SEQ ID NO: 9160 - RNA, 22 nt, Artificial Sequence
  Synthetic
cucgcaugacuuggacuugacc

SEQ ID NO: 9161 - RNA, 23 nt, Artificial Sequence
  Synthetic
acucgcaugacuuggacuugacc

SEQ ID NO: 9162 - RNA, 24 nt, Artificial Sequence
  Synthetic
aacucgcaugacuuggacuugacc

SEQ ID NO: 9163 - RNA, 18 nt, Artificial Sequence
  Synthetic
cugaagggauaccaaccc

SEQ ID NO: 9164 - RNA, 19 nt, Artificial Sequence
  Synthetic
ccugaagggauaccaaccc

SEQ ID NO: 9165 - RNA, 20 nt, Artificial Sequence
  Synthetic
uccugaagggauaccaaccc

SEQ ID NO: 9166 - RNA, 21 nt, Artificial Sequence
  Synthetic
guccugaagggauaccaaccc

SEQ ID NO: 9167 - RNA, 22 nt, Artificial Sequence
  Synthetic
aguccugaagggauaccaaccc

SEQ ID NO: 9168 - RNA, 23 nt, Artificial Sequence
  Synthetic
uaguccugaagggauaccaaccc

SEQ ID NO: 9169 - RNA, 24 nt, Artificial Sequence
  Synthetic
cuaguccugaagggauaccaaccc

SEQ ID NO: 9170 - RNA, 18 nt, Artificial Sequence
  Synthetic
cgcccacgaccgcgcccc

SEQ ID NO: 9171 - RNA, 19 nt, Artificial Sequence
  Synthetic
acgcccacgaccgcgcccc

SEQ ID NO: 9172 - RNA, 20 nt, Artificial Sequence
  Synthetic
cacgcccacgaccgcgcccc

SEQ ID NO: 9173 - RNA, 21 nt, Artificial Sequence
  Synthetic
ccacgcccacgaccgcgcccc

SEQ ID NO: 9174 - RNA, 22 nt, Artificial Sequence
  Synthetic
cccacgcccacgaccgcgcccc

SEQ ID NO: 9175 - RNA, 23 nt, Artificial Sequence
  Synthetic
gcccacgcccacgaccgcgcccc

SEQ ID NO: 9176 - RNA, 24 nt, Artificial Sequence
  Synthetic
cgcccacgcccacgaccgcgcccc

SEQ ID NO: 9177 - RNA, 18 nt, Artificial Sequence
  Synthetic
gcuuuuuggacaggcccc

SEQ ID NO: 9178 - RNA, 19 nt, Artificial Sequence
  Synthetic
agcuuuuuggacaggcccc

SEQ ID NO: 9179 - RNA, 20 nt, Artificial Sequence
  Synthetic
cagcuuuuuggacaggcccc

SEQ ID NO: 9180 - RNA, 21 nt, Artificial Sequence
  Synthetic
gcagcuuuuuggacaggcccc

SEQ ID NO: 9181 - RNA, 22 nt, Artificial Sequence
  Synthetic
agcagcuuuuuggacaggcccc

SEQ ID NO: 9182 - RNA, 23 nt, Artificial Sequence
  Synthetic
cagcagcuuuuuggacaggcccc

SEQ ID NO: 9183 - RNA, 24 nt, Artificial Sequence
  Synthetic
gcagcagcuuuuuggacaggcccc

SEQ ID NO: 9184 - RNA, 18 nt, Artificial Sequence
  Synthetic
cccgaggccgacucgccc

SEQ ID NO: 9185 - RNA, 19 nt, Artificial Sequence
  Synthetic
ccccgaggccgacucgccc

SEQ ID NO: 9186 - RNA, 20 nt, Artificial Sequence
  Synthetic
cccccgaggccgacucgccc

SEQ ID NO: 9187 - RNA, 21 nt, Artificial Sequence
  Synthetic
ccccccgaggccgacucgccc

SEQ ID NO: 9188 - RNA, 22 nt, Artificial Sequence
  Synthetic
gccccccgaggccgacucgccc

SEQ ID NO: 9189 - RNA, 23 nt, Artificial Sequence
  Synthetic
ggccccccgaggccgacucgccc

SEQ ID NO: 9190 - RNA, 24 nt, Artificial Sequence
  Synthetic
aggccccccgaggccgacucgccc

SEQ ID NO: 9191 - RNA, 18 nt, Artificial Sequence
  Synthetic
gucugcaauaugaauccc

SEQ ID NO: 9192 - RNA, 19 nt, Artificial Sequence
  Synthetic
ugucugcaauaugaauccc

SEQ ID NO: 9193 - RNA, 20 nt, Artificial Sequence
  Synthetic
uugucugcaauaugaauccc

SEQ ID NO: 9194 - RNA, 21 nt, Artificial Sequence
  Synthetic
auugucugcaauaugaauccc

SEQ ID NO: 9195 - RNA, 22 nt, Artificial Sequence
  Synthetic
uauugucugcaauaugaauccc

SEQ ID NO: 9196 - RNA, 23 nt, Artificial Sequence
  Synthetic
uuauugucugcaauaugaauccc

SEQ ID NO: 9197 - RNA, 24 nt, Artificial Sequence
  Synthetic
guuauugucugcaauaugaauccc

SEQ ID NO: 9198 - RNA, 18 nt, Artificial Sequence
  Synthetic
uucccgugccgcugcgcc

SEQ ID NO: 9199 - RNA, 19 nt, Artificial Sequence
  Synthetic
cuucccgugccgcugcgcc

SEQ ID NO: 9200 - RNA, 20 nt, Artificial Sequence
  Synthetic
acuucccgugccgcugcgcc

SEQ ID NO: 9201 - RNA, 21 nt, Artificial Sequence
  Synthetic
cacuucccgugccgcugcgcc

SEQ ID NO: 9202 - RNA, 22 nt, Artificial Sequence
  Synthetic
ccacuucccgugccgcugcgcc

SEQ ID NO: 9203 - RNA, 23 nt, Artificial Sequence
  Synthetic
uccacuucccgugccgcugcgcc

SEQ ID NO: 9204 - RNA, 24 nt, Artificial Sequence
  Synthetic
cuccacuucccgugccgcugcgcc

SEQ ID NO: 9205 - RNA, 18 nt, Artificial Sequence
  Synthetic
ccccgaggccgacucgcc

SEQ ID NO: 9206 - RNA, 19 nt, Artificial Sequence
  Synthetic
cccccgaggccgacucgcc

SEQ ID NO: 9207 - RNA, 20 nt, Artificial Sequence
  Synthetic
ccccccgaggccgacucgcc

SEQ ID NO: 9208 - RNA, 21 nt, Artificial Sequence
  Synthetic
gccccccgaggccgacucgcc

SEQ ID NO: 9209 - RNA, 22 nt, Artificial Sequence
  Synthetic
ggccccccgaggccgacucgcc

SEQ ID NO: 9210 - RNA, 23 nt, Artificial Sequence
  Synthetic
aggccccccgaggccgacucgcc

SEQ ID NO: 9211 - RNA, 24 nt, Artificial Sequence
  Synthetic
caggccccccgaggccgacucgcc

SEQ ID NO: 9212 - RNA, 18 nt, Artificial Sequence
  Synthetic
gcgcuuaugcuucucgcc

SEQ ID NO: 9213 - RNA, 19 nt, Artificial Sequence
  Synthetic
cgcgcuuaugcuucucgcc

SEQ ID NO: 9214 - RNA, 20 nt, Artificial Sequence
  Synthetic
ccgcgcuuaugcuucucgcc

SEQ ID NO: 9215 - RNA, 21 nt, Artificial Sequence
  Synthetic
gccgcgcuuaugcuucucgcc

SEQ ID NO: 9216 - RNA, 22 nt, Artificial Sequence
  Synthetic
ggccgcgcuuaugcuucucgcc

SEQ ID NO: 9217 - RNA, 23 nt, Artificial Sequence
  Synthetic
uggccgcgcuuaugcuucucgcc

SEQ ID NO: 9218 - RNA, 24 nt, Artificial Sequence
  Synthetic
guggccgcgcuuaugcuucucgcc

SEQ ID NO: 9219 - RNA, 18 nt, Artificial Sequence
  Synthetic
gggagggggggcgucgcc

SEQ ID NO: 9220 - RNA, 19 nt, Artificial Sequence
  Synthetic
agggagggggggcgucgcc

SEQ ID NO: 9221 - RNA, 20 nt, Artificial Sequence
  Synthetic
gagggagggggggcgucgcc

SEQ ID NO: 9222 - RNA, 21 nt, Artificial Sequence
  Synthetic
ggagggagggggggcgucgcc

SEQ ID NO: 9223 - RNA, 22 nt, Artificial Sequence
  Synthetic
aggagggagggggggcgucgcc

SEQ ID NO: 9224 - RNA, 23 nt, Artificial Sequence
  Synthetic
gaggagggagggggggcgucgcc

SEQ ID NO: 9225 - RNA, 24 nt, Artificial Sequence
  Synthetic
agaggagggagggggggcgucgcc

SEQ ID NO: 9226 - RNA, 18 nt, Artificial Sequence
  Synthetic
cauagggcugggccggcc

SEQ ID NO: 9227 - RNA, 19 nt, Artificial Sequence
  Synthetic
gcauagggcugggccggcc

SEQ ID NO: 9228 - RNA, 20 nt, Artificial Sequence
  Synthetic
ugcauagggcugggccggcc

SEQ ID NO: 9229 - RNA, 21 nt, Artificial Sequence
  Synthetic
uugcauagggcugggccggcc

SEQ ID NO: 9230 - RNA, 22 nt, Artificial Sequence
  Synthetic
uuugcauagggcugggccggcc

SEQ ID NO: 9231 - RNA, 23 nt, Artificial Sequence
  Synthetic
cuuugcauagggcugggccggcc

SEQ ID NO: 9232 - RNA, 24 nt, Artificial Sequence
  Synthetic
ccuuugcauagggcugggccggcc

SEQ ID NO: 9233 - RNA, 18 nt, Artificial Sequence
  Synthetic
guguugggcaucgcggcc

SEQ ID NO: 9234 - RNA, 19 nt, Artificial Sequence
  Synthetic
cguguugggcaucgcggcc

SEQ ID NO: 9235 - RNA, 20 nt, Artificial Sequence
  Synthetic
ccguguugggcaucgcggcc

SEQ ID NO: 9236 - RNA, 21 nt, Artificial Sequence
  Synthetic
uccguguugggcaucgcggcc

SEQ ID NO: 9237 - RNA, 22 nt, Artificial Sequence
  Synthetic
cuccguguugggcaucgcggcc

SEQ ID NO: 9238 - RNA, 23 nt, Artificial Sequence
  Synthetic
ucuccguguugggcaucgcggcc

SEQ ID NO: 9239 - RNA, 24 nt, Artificial Sequence
  Synthetic
uucuccguguugggcaucgcggcc

SEQ ID NO: 9240 - RNA, 18 nt, Artificial Sequence
  Synthetic
agggaucuuugagcugcc

SEQ ID NO: 9241 - RNA, 19 nt, Artificial Sequence
  Synthetic
aagggaucuuugagcugcc

SEQ ID NO: 9242 - RNA, 20 nt, Artificial Sequence
  Synthetic
gaagggaucuuugagcugcc

SEQ ID NO: 9243 - RNA, 21 nt, Artificial Sequence
  Synthetic
ggaagggaucuuugagcugcc

SEQ ID NO: 9244 - RNA, 22 nt, Artificial Sequence
  Synthetic
aggaagggaucuuugagcugcc

SEQ ID NO: 9245 - RNA, 23 nt, Artificial Sequence
  Synthetic
aaggaagggaucuuugagcugcc

SEQ ID NO: 9246 - RNA, 24 nt, Artificial Sequence
  Synthetic
uaaggaagggaucuuugagcugcc

SEQ ID NO: 9247 - RNA, 18 nt, Artificial Sequence
  Synthetic
aucccuccguccagcucc

SEQ ID NO: 9248 - RNA, 19 nt, Artificial Sequence
  Synthetic
gaucccuccguccagcucc

SEQ ID NO: 9249 - RNA, 20 nt, Artificial Sequence
  Synthetic
agaucccuccguccagcucc

SEQ ID NO: 9250 - RNA, 21 nt, Artificial Sequence
  Synthetic
gagaucccuccguccagcucc

SEQ ID NO: 9251 - RNA, 22 nt, Artificial Sequence
  Synthetic
cgagaucccuccguccagcucc

SEQ ID NO: 9252 - RNA, 23 nt, Artificial Sequence
  Synthetic
ccgagaucccuccguccagcucc

SEQ ID NO: 9253 - RNA, 24 nt, Artificial Sequence
  Synthetic
cccgagaucccuccguccagcucc

SEQ ID NO: 9254 - RNA, 18 nt, Artificial Sequence
  Synthetic
ccagcucucuaagucucc

SEQ ID NO: 9255 - RNA, 19 nt, Artificial Sequence
  Synthetic
gccagcucucuaagucucc

SEQ ID NO: 9256 - RNA, 20 nt, Artificial Sequence
  Synthetic
ugccagcucucuaagucucc

SEQ ID NO: 9257 - RNA, 21 nt, Artificial Sequence
  Synthetic
cugccagcucucuaagucucc

SEQ ID NO: 9258 - RNA, 22 nt, Artificial Sequence
  Synthetic
ccugccagcucucuaagucucc

SEQ ID NO: 9259 - RNA, 23 nt, Artificial Sequence
  Synthetic
cccugccagcucucuaagucucc

SEQ ID NO: 9260 - RNA, 24 nt, Artificial Sequence
  Synthetic
ucccugccagcucucuaagucucc

SEQ ID NO: 9261 - RNA, 18 nt, Artificial Sequence
  Synthetic
cgcaaacucccguucucc

SEQ ID NO: 9262 - RNA, 19 nt, Artificial Sequence
  Synthetic
gcgcaaacucccguucucc

SEQ ID NO: 9263 - RNA, 20 nt, Artificial Sequence
  Synthetic
agcgcaaacucccguucucc

SEQ ID NO: 9264 - RNA, 21 nt, Artificial Sequence
  Synthetic
aagcgcaaacucccguucucc

SEQ ID NO: 9265 - RNA, 22 nt, Artificial Sequence
  Synthetic
gaagcgcaaacucccguucucc

SEQ ID NO: 9266 - RNA, 23 nt, Artificial Sequence
  Synthetic
agaagcgcaaacucccguucucc

SEQ ID NO: 9267 - RNA, 24 nt, Artificial Sequence
  Synthetic
gagaagcgcaaacucccguucucc

SEQ ID NO: 9268 - RNA, 18 nt, Artificial Sequence
  Synthetic
ucgcuggugccggguucc

SEQ ID NO: 9269 - RNA, 19 nt, Artificial Sequence
  Synthetic
gucgcuggugccggguucc

SEQ ID NO: 9270 - RNA, 20 nt, Artificial Sequence
  Synthetic
agucgcuggugccggguucc

SEQ ID NO: 9271 - RNA, 21 nt, Artificial Sequence
  Synthetic
aagucgcuggugccggguucc

SEQ ID NO: 9272 - RNA, 22 nt, Artificial Sequence
  Synthetic
caagucgcuggugccggguucc

SEQ ID NO: 9273 - RNA, 23 nt, Artificial Sequence
  Synthetic
ccaagucgcuggugccggguucc

SEQ ID NO: 9274 - RNA, 24 nt, Artificial Sequence
  Synthetic
accaagucgcuggugccggguucc

SEQ ID NO: 9275 - RNA, 18 nt, Artificial Sequence
  Synthetic
gccgccuccaggcucagc

SEQ ID NO: 9276 - RNA, 19 nt, Artificial Sequence
  Synthetic
cgccgccuccaggcucagc

SEQ ID NO: 9277 - RNA, 20 nt, Artificial Sequence
  Synthetic
gcgccgccuccaggcucagc

SEQ ID NO: 9278 - RNA, 21 nt, Artificial Sequence
  Synthetic
cgcgccgccuccaggcucagc

SEQ ID NO: 9279 - RNA, 22 nt, Artificial Sequence
  Synthetic
gcgcgccgccuccaggcucagc

SEQ ID NO: 9280 - RNA, 23 nt, Artificial Sequence
  Synthetic
ggcgcgccgccuccaggcucagc

SEQ ID NO: 9281 - RNA, 24 nt, Artificial Sequence
  Synthetic
uggcgcgccgccuccaggcucagc

SEQ ID NO: 9282 - RNA, 18 nt, Artificial Sequence
  Synthetic
agaaggggcucagcgagc

SEQ ID NO: 9283 - RNA, 19 nt, Artificial Sequence
  Synthetic
gagaaggggcucagcgagc

SEQ ID NO: 9284 - RNA, 20 nt, Artificial Sequence
  Synthetic
agagaaggggcucagcgagc

SEQ ID NO: 9285 - RNA, 21 nt, Artificial Sequence
  Synthetic
uagagaaggggcucagcgagc

SEQ ID NO: 9286 - RNA, 22 nt, Artificial Sequence
  Synthetic
uuagagaaggggcucagcgagc

SEQ ID NO: 9287 - RNA, 23 nt, Artificial Sequence
  Synthetic
cuuagagaaggggcucagcgagc

SEQ ID NO: 9288 - RNA, 24 nt, Artificial Sequence
  Synthetic
gcuuagagaaggggcucagcgagc

SEQ ID NO: 9289 - RNA, 18 nt, Artificial Sequence
  Synthetic
cccccgaggccgacucgc

SEQ ID NO: 9290 - RNA, 19 nt, Artificial Sequence
  Synthetic
ccccccgaggccgacucgc

SEQ ID NO: 9291 - RNA, 20 nt, Artificial Sequence
  Synthetic
gccccccgaggccgacucgc

SEQ ID NO: 9292 - RNA, 21 nt, Artificial Sequence
  Synthetic
ggccccccgaggccgacucgc

SEQ ID NO: 9293 - RNA, 22 nt, Artificial Sequence
  Synthetic
aggccccccgaggccgacucgc

SEQ ID NO: 9294 - RNA, 23 nt, Artificial Sequence
  Synthetic
caggccccccgaggccgacucgc

SEQ ID NO: 9295 - RNA, 24 nt, Artificial Sequence
  Synthetic
acaggccccccgaggccgacucgc

SEQ ID NO: 9296 - RNA, 18 nt, Artificial Sequence
  Synthetic
agggagggggggcgucgc

SEQ ID NO: 9297 - RNA, 19 nt, Artificial Sequence
  Synthetic
gagggagggggggcgucgc

SEQ ID NO: 9298 - RNA, 20 nt, Artificial Sequence
  Synthetic
ggagggagggggggcgucgc

SEQ ID NO: 9299 - RNA, 21 nt, Artificial Sequence
  Synthetic
aggagggagggggggcgucgc

SEQ ID NO: 9300 - RNA, 22 nt, Artificial Sequence
  Synthetic
gaggagggagggggggcgucgc

SEQ ID NO: 9301 - RNA, 23 nt, Artificial Sequence
  Synthetic
agaggagggagggggggcgucgc

SEQ ID NO: 9302 - RNA, 24 nt, Artificial Sequence
  Synthetic
cagaggagggagggggggcgucgc

SEQ ID NO: 9303 - RNA, 18 nt, Artificial Sequence
  Synthetic
agcgcccuucugccaggc

SEQ ID NO: 9304 - RNA, 19 nt, Artificial Sequence
  Synthetic
aagcgcccuucugccaggc

SEQ ID NO: 9305 - RNA, 20 nt, Artificial Sequence
  Synthetic
aaagcgcccuucugccaggc

SEQ ID NO: 9306 - RNA, 21 nt, Artificial Sequence
  Synthetic
gaaagcgcccuucugccaggc

SEQ ID NO: 9307 - RNA, 22 nt, Artificial Sequence
  Synthetic
ggaaagcgcccuucugccaggc

SEQ ID NO: 9308 - RNA, 23 nt, Artificial Sequence
  Synthetic
uggaaagcgcccuucugccaggc

SEQ ID NO: 9309 - RNA, 24 nt, Artificial Sequence
  Synthetic
guggaaagcgcccuucugccaggc

SEQ ID NO: 9310 - RNA, 18 nt, Artificial Sequence
  Synthetic
gcauagggcugggccggc

SEQ ID NO: 9311 - RNA, 19 nt, Artificial Sequence
  Synthetic
ugcauagggcugggccggc

SEQ ID NO: 9312 - RNA, 20 nt, Artificial Sequence
  Synthetic
uugcauagggcugggccggc

SEQ ID NO: 9313 - RNA, 21 nt, Artificial Sequence
  Synthetic
uuugcauagggcugggccggc

SEQ ID NO: 9314 - RNA, 22 nt, Artificial Sequence
  Synthetic
cuuugcauagggcugggccggc

SEQ ID NO: 9315 - RNA, 23 nt, Artificial Sequence
  Synthetic
ccuuugcauagggcugggccggc

SEQ ID NO: 9316 - RNA, 24 nt, Artificial Sequence
  Synthetic
accuuugcauagggcugggccggc

SEQ ID NO: 9317 - RNA, 18 nt, Artificial Sequence
  Synthetic
cguguugggcaucgcggc

SEQ ID NO: 9318 - RNA, 19 nt, Artificial Sequence
  Synthetic
ccguguugggcaucgcggc

SEQ ID NO: 9319 - RNA, 20 nt, Artificial Sequence
  Synthetic
uccguguugggcaucgcggc

SEQ ID NO: 9320 - RNA, 21 nt, Artificial Sequence
  Synthetic
cuccguguugggcaucgcggc

SEQ ID NO: 9321 - RNA, 22 nt, Artificial Sequence
  Synthetic
ucuccguguugggcaucgcggc

SEQ ID NO: 9322 - RNA, 23 nt, Artificial Sequence
  Synthetic
uucuccguguugggcaucgcggc

SEQ ID NO: 9323 - RNA, 24 nt, Artificial Sequence
  Synthetic
guucuccguguugggcaucgcggc

SEQ ID NO: 9324 - RNA, 18 nt, Artificial Sequence
  Synthetic
agcugggccugcccgggc

SEQ ID NO: 9325 - RNA, 19 nt, Artificial Sequence
  Synthetic
gagcugggccugcccgggc

SEQ ID NO: 9326 - RNA, 20 nt, Artificial Sequence
  Synthetic
ugagcugggccugcccgggc

SEQ ID NO: 9327 - RNA, 21 nt, Artificial Sequence
  Synthetic
uugagcugggccugcccgggc

SEQ ID NO: 9328 - RNA, 22 nt, Artificial Sequence
  Synthetic
uuugagcugggccugcccgggc

SEQ ID NO: 9329 - RNA, 23 nt, Artificial Sequence
  Synthetic
uuuugagcugggccugcccgggc

SEQ ID NO: 9330 - RNA, 24 nt, Artificial Sequence
  Synthetic
cuuuugagcugggccugcccgggc

SEQ ID NO: 9331 - RNA, 18 nt, Artificial Sequence
  Synthetic
uuggacuugaccgggggc

SEQ ID NO: 9332 - RNA, 19 nt, Artificial Sequence
  Synthetic
cuuggacuugaccgggggc

SEQ ID NO: 9333 - RNA, 20 nt, Artificial Sequence
  Synthetic
acuuggacuugaccgggggc

SEQ ID NO: 9334 - RNA, 21 nt, Artificial Sequence
  Synthetic
gacuuggacuugaccgggggc

SEQ ID NO: 9335 - RNA, 22 nt, Artificial Sequence
  Synthetic
ugacuuggacuugaccgggggc

SEQ ID NO: 9336 - RNA, 23 nt, Artificial Sequence
  Synthetic
augacuuggacuugaccgggggc

SEQ ID NO: 9337 - RNA, 24 nt, Artificial Sequence
  Synthetic
caugacuuggacuugaccgggggc

SEQ ID NO: 9338 - RNA, 18 nt, Artificial Sequence
  Synthetic
ccuagagaaauccauggc

SEQ ID NO: 9339 - RNA, 19 nt, Artificial Sequence
  Synthetic
uccuagagaaauccauggc

SEQ ID NO: 9340 - RNA, 20 nt, Artificial Sequence
  Synthetic
cuccuagagaaauccauggc

SEQ ID NO: 9341 - RNA, 21 nt, Artificial Sequence
  Synthetic
ucuccuagagaaauccauggc

SEQ ID NO: 9342 - RNA, 22 nt, Artificial Sequence
  Synthetic
gucuccuagagaaauccauggc

SEQ ID NO: 9343 - RNA, 23 nt, Artificial Sequence
  Synthetic
agucuccuagagaaauccauggc

SEQ ID NO: 9344 - RNA, 24 nt, Artificial Sequence
  Synthetic
aagucuccuagagaaauccauggc

SEQ ID NO: 9345 - RNA, 18 nt, Artificial Sequence
  Synthetic
aucccauggagagguggc

SEQ ID NO: 9346 - RNA, 19 nt, Artificial Sequence
  Synthetic
aaucccauggagagguggc

SEQ ID NO: 9347 - RNA, 20 nt, Artificial Sequence
  Synthetic
gaaucccauggagagguggc

SEQ ID NO: 9348 - RNA, 21 nt, Artificial Sequence
  Synthetic
ugaaucccauggagagguggc

SEQ ID NO: 9349 - RNA, 22 nt, Artificial Sequence
  Synthetic
augaaucccauggagagguggc

SEQ ID NO: 9350 - RNA, 23 nt, Artificial Sequence
  Synthetic
uaugaaucccauggagagguggc

SEQ ID NO: 9351 - RNA, 24 nt, Artificial Sequence
  Synthetic
auaugaaucccauggagagguggc

SEQ ID NO: 9352 - RNA, 18 nt, Artificial Sequence
  Synthetic
acucgggugauggguggc

SEQ ID NO: 9353 - RNA, 19 nt, Artificial Sequence
  Synthetic
cacucgggugauggguggc

SEQ ID NO: 9354 - RNA, 20 nt, Artificial Sequence
  Synthetic
gcacucgggugauggguggc

SEQ ID NO: 9355 - RNA, 21 nt, Artificial Sequence
  Synthetic
ggcacucgggugauggguggc

SEQ ID NO: 9356 - RNA, 22 nt, Artificial Sequence
  Synthetic
aggcacucgggugauggguggc

SEQ ID NO: 9357 - RNA, 23 nt, Artificial Sequence
  Synthetic
aaggcacucgggugauggguggc

SEQ ID NO: 9358 - RNA, 24 nt, Artificial Sequence
  Synthetic
aaaggcacucgggugauggguggc

SEQ ID NO: 9359 - RNA, 18 nt, Artificial Sequence
  Synthetic
cuuuugagcugggccugc

SEQ ID NO: 9360 - RNA, 19 nt, Artificial Sequence
  Synthetic
ucuuuugagcugggccugc

SEQ ID NO: 9361 - RNA, 20 nt, Artificial Sequence
  Synthetic
cucuuuugagcugggccugc

SEQ ID NO: 9362 - RNA, 21 nt, Artificial Sequence
  Synthetic
ccucuuuugagcugggccugc

SEQ ID NO: 9363 - RNA, 22 nt, Artificial Sequence
  Synthetic
cccucuuuugagcugggccugc

SEQ ID NO: 9364 - RNA, 23 nt, Artificial Sequence
  Synthetic
gcccucuuuugagcugggccugc

SEQ ID NO: 9365 - RNA, 24 nt, Artificial Sequence
  Synthetic
ugcccucuuuugagcugggccugc

SEQ ID NO: 9366 - RNA, 18 nt, Artificial Sequence
  Synthetic
aagggaucuuugagcugc

SEQ ID NO: 9367 - RNA, 19 nt, Artificial Sequence
  Synthetic
gaagggaucuuugagcugc

SEQ ID NO: 9368 - RNA, 20 nt, Artificial Sequence
  Synthetic
ggaagggaucuuugagcugc

SEQ ID NO: 9369 - RNA, 21 nt, Artificial Sequence
  Synthetic
aggaagggaucuuugagcugc

SEQ ID NO: 9370 - RNA, 22 nt, Artificial Sequence
  Synthetic
aaggaagggaucuuugagcugc

SEQ ID NO: 9371 - RNA, 23 nt, Artificial Sequence
  Synthetic
uaaggaagggaucuuugagcugc

SEQ ID NO: 9372 - RNA, 24 nt, Artificial Sequence
  Synthetic
cuaaggaagggaucuuugagcugc

SEQ ID NO: 9373 - RNA, 18 nt, Artificial Sequence
  Synthetic
gccucgcugaagugcugc

SEQ ID NO: 9374 - RNA, 19 nt, Artificial Sequence
  Synthetic
ggccucgcugaagugcugc

SEQ ID NO: 9375 - RNA, 20 nt, Artificial Sequence
  Synthetic
aggccucgcugaagugcugc

SEQ ID NO: 9376 - RNA, 21 nt, Artificial Sequence
  Synthetic
aaggccucgcugaagugcugc

SEQ ID NO: 9377 - RNA, 22 nt, Artificial Sequence
  Synthetic
gaaggccucgcugaagugcugc

SEQ ID NO: 9378 - RNA, 23 nt, Artificial Sequence
  Synthetic
ggaaggccucgcugaagugcugc

SEQ ID NO: 9379 - RNA, 24 nt, Artificial Sequence
  Synthetic
uggaaggccucgcugaagugcugc

SEQ ID NO: 9380 - RNA, 18 nt, Artificial Sequence
  Synthetic
guguucugugcguguugc

SEQ ID NO: 9381 - RNA, 19 nt, Artificial Sequence
  Synthetic
aguguucugugcguguugc

SEQ ID NO: 9382 - RNA, 20 nt, Artificial Sequence
  Synthetic
gaguguucugugcguguugc

SEQ ID NO: 9383 - RNA, 21 nt, Artificial Sequence
  Synthetic
ugaguguucugugcguguugc

SEQ ID NO: 9384 - RNA, 22 nt, Artificial Sequence
  Synthetic
augaguguucugugcguguugc

SEQ ID NO: 9385 - RNA, 23 nt, Artificial Sequence
  Synthetic
caugaguguucugugcguguugc

SEQ ID NO: 9386 - RNA, 24 nt, Artificial Sequence
  Synthetic
ccaugaguguucugugcguguugc

SEQ ID NO: 9387 - RNA, 18 nt, Artificial Sequence
  Synthetic
cgaaaacugccacacauc

SEQ ID NO: 9388 - RNA, 19 nt, Artificial Sequence
  Synthetic
ccgaaaacugccacacauc

SEQ ID NO: 9389 - RNA, 20 nt, Artificial Sequence
  Synthetic
uccgaaaacugccacacauc

SEQ ID NO: 9390 - RNA, 21 nt, Artificial Sequence
  Synthetic
auccgaaaacugccacacauc

SEQ ID NO: 9391 - RNA, 22 nt, Artificial Sequence
  Synthetic
cauccgaaaacugccacacauc

SEQ ID NO: 9392 - RNA, 23 nt, Artificial Sequence
  Synthetic
ccauccgaaaacugccacacauc

SEQ ID NO: 9393 - RNA, 24 nt, Artificial Sequence
  Synthetic
uccauccgaaaacugccacacauc

SEQ ID NO: 9394 - RNA, 18 nt, Artificial Sequence
  Synthetic
uuggggucguucucgcuc

SEQ ID NO: 9395 - RNA, 19 nt, Artificial Sequence
  Synthetic
guuggggucguucucgcuc

SEQ ID NO: 9396 - RNA, 20 nt, Artificial Sequence
  Synthetic
gguuggggucguucucgcuc

SEQ ID NO: 9397 - RNA, 21 nt, Artificial Sequence
  Synthetic
agguuggggucguucucgcuc

SEQ ID NO: 9398 - RNA, 22 nt, Artificial Sequence
  Synthetic
cagguuggggucguucucgcuc

SEQ ID NO: 9399 - RNA, 23 nt, Artificial Sequence
  Synthetic
ucagguuggggucguucucgcuc

SEQ ID NO: 9400 - RNA, 24 nt, Artificial Sequence
  Synthetic
aucagguuggggucguucucgcuc

SEQ ID NO: 9401 - RNA, 18 nt, Artificial Sequence
  Synthetic
cucagaacuuaagggcuc

SEQ ID NO: 9402 - RNA, 19 nt, Artificial Sequence
  Synthetic
ucucagaacuuaagggcuc

SEQ ID NO: 9403 - RNA, 20 nt, Artificial Sequence
  Synthetic
uucucagaacuuaagggcuc

SEQ ID NO: 9404 - RNA, 21 nt, Artificial Sequence
  Synthetic
uuucucagaacuuaagggcuc

SEQ ID NO: 9405 - RNA, 22 nt, Artificial Sequence
  Synthetic
uuuucucagaacuuaagggcuc

SEQ ID NO: 9406 - RNA, 23 nt, Artificial Sequence
  Synthetic
auuuucucagaacuuaagggcuc

SEQ ID NO: 9407 - RNA, 24 nt, Artificial Sequence
  Synthetic
aauuuucucagaacuuaagggcuc

SEQ ID NO: 9408 - RNA, 18 nt, Artificial Sequence
  Synthetic
gacauucugcaccuaguc

SEQ ID NO: 9409 - RNA, 19 nt, Artificial Sequence
  Synthetic
ggacauucugcaccuaguc

SEQ ID NO: 9410 - RNA, 20 nt, Artificial Sequence
  Synthetic
aggacauucugcaccuaguc

SEQ ID NO: 9411 - RNA, 21 nt, Artificial Sequence
  Synthetic
aaggacauucugcaccuaguc

SEQ ID NO: 9412 - RNA, 22 nt, Artificial Sequence
  Synthetic
gaaggacauucugcaccuaguc

SEQ ID NO: 9413 - RNA, 23 nt, Artificial Sequence
  Synthetic
ggaaggacauucugcaccuaguc

SEQ ID NO: 9414 - RNA, 24 nt, Artificial Sequence
  Synthetic
gggaaggacauucugcaccuaguc

SEQ ID NO: 9415 - RNA, 18 nt, Artificial Sequence
  Synthetic
ucgucggacuugaccguc

SEQ ID NO: 9416 - RNA, 19 nt, Artificial Sequence
  Synthetic
gucgucggacuugaccguc

SEQ ID NO: 9417 - RNA, 20 nt, Artificial Sequence
  Synthetic
cgucgucggacuugaccguc

SEQ ID NO: 9418 - RNA, 21 nt, Artificial Sequence
  Synthetic
ccgucgucggacuugaccguc

SEQ ID NO: 9419 - RNA, 22 nt, Artificial Sequence
  Synthetic
accgucgucggacuugaccguc

SEQ ID NO: 9420 - RNA, 23 nt, Artificial Sequence
  Synthetic
gaccgucgucggacuugaccguc

SEQ ID NO: 9421 - RNA, 24 nt, Artificial Sequence
  Synthetic
agaccgucgucggacuugaccguc

SEQ ID NO: 9422 - RNA, 18 nt, Artificial Sequence
  Synthetic
auaccaacccgcgggguc

SEQ ID NO: 9423 - RNA, 19 nt, Artificial Sequence
  Synthetic
gauaccaacccgcgggguc

SEQ ID NO: 9424 - RNA, 20 nt, Artificial Sequence
  Synthetic
ggauaccaacccgcgggguc

SEQ ID NO: 9425 - RNA, 21 nt, Artificial Sequence
  Synthetic
gggauaccaacccgcgggguc

SEQ ID NO: 9426 - RNA, 22 nt, Artificial Sequence
  Synthetic
agggauaccaacccgcgggguc

SEQ ID NO: 9427 - RNA, 23 nt, Artificial Sequence
  Synthetic
aagggauaccaacccgcgggguc

SEQ ID NO: 9428 - RNA, 24 nt, Artificial Sequence
  Synthetic
gaagggauaccaacccgcgggguc

SEQ ID NO: 9429 - RNA, 18 nt, Artificial Sequence
  Synthetic
ggcaggucgaacuccuuc

SEQ ID NO: 9430 - RNA, 19 nt, Artificial Sequence
  Synthetic
gggcaggucgaacuccuuc

SEQ ID NO: 9431 - RNA, 20 nt, Artificial Sequence
  Synthetic
ggggcaggucgaacuccuuc

SEQ ID NO: 9432 - RNA, 21 nt, Artificial Sequence
  Synthetic
gggggcaggucgaacuccuuc

SEQ ID NO: 9433 - RNA, 22 nt, Artificial Sequence
  Synthetic
cgggggcaggucgaacuccuuc

SEQ ID NO: 9434 - RNA, 23 nt, Artificial Sequence
  Synthetic
ccgggggcaggucgaacuccuuc

SEQ ID NO: 9435 - RNA, 24 nt, Artificial Sequence
  Synthetic
gccgggggcaggucgaacuccuuc

SEQ ID NO: 9436 - RNA, 18 nt, Artificial Sequence
  Synthetic
gucgcuggugccggguuc

SEQ ID NO: 9437 - RNA, 19 nt, Artificial Sequence
  Synthetic
agucgcuggugccggguuc

SEQ ID NO: 9438 - RNA, 20 nt, Artificial Sequence
  Synthetic
aagucgcuggugccggguuc

SEQ ID NO: 9439 - RNA, 21 nt, Artificial Sequence
  Synthetic
caagucgcuggugccggguuc

SEQ ID NO: 9440 - RNA, 22 nt, Artificial Sequence
  Synthetic
ccaagucgcuggugccggguuc

SEQ ID NO: 9441 - RNA, 23 nt, Artificial Sequence
  Synthetic
accaagucgcuggugccggguuc

SEQ ID NO: 9442 - RNA, 24 nt, Artificial Sequence
  Synthetic
caccaagucgcuggugccggguuc

SEQ ID NO: 9443 - RNA, 18 nt, Artificial Sequence
  Synthetic
cggugguggacuaaacag

SEQ ID NO: 9444 - RNA, 19 nt, Artificial Sequence
  Synthetic
ucggugguggacuaaacag

SEQ ID NO: 9445 - RNA, 20 nt, Artificial Sequence
  Synthetic
cucggugguggacuaaacag

SEQ ID NO: 9446 - RNA, 21 nt, Artificial Sequence
  Synthetic
ucucggugguggacuaaacag

SEQ ID NO: 9447 - RNA, 22 nt, Artificial Sequence
  Synthetic
gucucggugguggacuaaacag

SEQ ID NO: 9448 - RNA, 23 nt, Artificial Sequence
  Synthetic
ugucucggugguggacuaaacag

SEQ ID NO: 9449 - RNA, 24 nt, Artificial Sequence
  Synthetic
augucucggugguggacuaaacag

SEQ ID NO: 9450 - RNA, 18 nt, Artificial Sequence
  Synthetic
gaaagagguuggagacag

SEQ ID NO: 9451 - RNA, 19 nt, Artificial Sequence
  Synthetic
agaaagagguuggagacag

SEQ ID NO: 9452 - RNA, 20 nt, Artificial Sequence
  Synthetic
uagaaagagguuggagacag

SEQ ID NO: 9453 - RNA, 21 nt, Artificial Sequence
  Synthetic
cuagaaagagguuggagacag

SEQ ID NO: 9454 - RNA, 22 nt, Artificial Sequence
  Synthetic
ccuagaaagagguuggagacag

SEQ ID NO: 9455 - RNA, 23 nt, Artificial Sequence
  Synthetic
accuagaaagagguuggagacag

SEQ ID NO: 9456 - RNA, 24 nt, Artificial Sequence
  Synthetic
aaccuagaaagagguuggagacag

SEQ ID NO: 9457 - RNA, 18 nt, Artificial Sequence
  Synthetic
aggaggggcggauugcag

SEQ ID NO: 9458 - RNA, 19 nt, Artificial Sequence
  Synthetic
gaggaggggcggauugcag

SEQ ID NO: 9459 - RNA, 20 nt, Artificial Sequence
  Synthetic
ggaggaggggcggauugcag

SEQ ID NO: 9460 - RNA, 21 nt, Artificial Sequence
  Synthetic
gggaggaggggcggauugcag

SEQ ID NO: 9461 - RNA, 22 nt, Artificial Sequence
  Synthetic
agggaggaggggcggauugcag

SEQ ID NO: 9462 - RNA, 23 nt, Artificial Sequence
  Synthetic
gagggaggaggggcggauugcag

SEQ ID NO: 9463 - RNA, 24 nt, Artificial Sequence
  Synthetic
ggagggaggaggggcggauugcag

SEQ ID NO: 9464 - RNA, 18 nt, Artificial Sequence
  Synthetic
aagagguuggagacagag

SEQ ID NO: 9465 - RNA, 19 nt, Artificial Sequence
  Synthetic
aaagagguuggagacagag

SEQ ID NO: 9466 - RNA, 20 nt, Artificial Sequence
  Synthetic
gaaagagguuggagacagag

SEQ ID NO: 9467 - RNA, 21 nt, Artificial Sequence
  Synthetic
agaaagagguuggagacagag

SEQ ID NO: 9468 - RNA, 22 nt, Artificial Sequence
  Synthetic
uagaaagagguuggagacagag

SEQ ID NO: 9469 - RNA, 23 nt, Artificial Sequence
  Synthetic
cuagaaagagguuggagacagag

SEQ ID NO: 9470 - RNA, 24 nt, Artificial Sequence
  Synthetic
ccuagaaagagguuggagacagag

SEQ ID NO: 9471 - RNA, 18 nt, Artificial Sequence
  Synthetic
gaggggcggauugcagag

SEQ ID NO: 9472 - RNA, 19 nt, Artificial Sequence
  Synthetic
ggaggggcggauugcagag

SEQ ID NO: 9473 - RNA, 20 nt, Artificial Sequence
  Synthetic
aggaggggcggauugcagag

SEQ ID NO: 9474 - RNA, 21 nt, Artificial Sequence
  Synthetic
gaggaggggcggauugcagag

SEQ ID NO: 9475 - RNA, 22 nt, Artificial Sequence
  Synthetic
ggaggaggggcggauugcagag

SEQ ID NO: 9476 - RNA, 23 nt, Artificial Sequence
  Synthetic
gggaggaggggcggauugcagag

SEQ ID NO: 9477 - RNA, 24 nt, Artificial Sequence
  Synthetic
agggaggaggggcggauugcagag

SEQ ID NO: 9478 - RNA, 18 nt, Artificial Sequence
  Synthetic
agcuugaugcgcuuagag

SEQ ID NO: 9479 - RNA, 19 nt, Artificial Sequence
  Synthetic
gagcuugaugcgcuuagag

SEQ ID NO: 9480 - RNA, 20 nt, Artificial Sequence
  Synthetic
cgagcuugaugcgcuuagag

SEQ ID NO: 9481 - RNA, 21 nt, Artificial Sequence
  Synthetic
ucgagcuugaugcgcuuagag

SEQ ID NO: 9482 - RNA, 22 nt, Artificial Sequence
  Synthetic
cucgagcuugaugcgcuuagag

SEQ ID NO: 9483 - RNA, 23 nt, Artificial Sequence
  Synthetic
ucucgagcuugaugcgcuuagag

SEQ ID NO: 9484 - RNA, 24 nt, Artificial Sequence
  Synthetic
uucucgagcuugaugcgcuuagag

SEQ ID NO: 9485 - RNA, 18 nt, Artificial Sequence
  Synthetic
gagaaggggcucagcgag

SEQ ID NO: 9486 - RNA, 19 nt, Artificial Sequence
  Synthetic
agagaaggggcucagcgag

SEQ ID NO: 9487 - RNA, 20 nt, Artificial Sequence
  Synthetic
uagagaaggggcucagcgag

SEQ ID NO: 9488 - RNA, 21 nt, Artificial Sequence
  Synthetic
uuagagaaggggcucagcgag

SEQ ID NO: 9489 - RNA, 22 nt, Artificial Sequence
  Synthetic
cuuagagaaggggcucagcgag

SEQ ID NO: 9490 - RNA, 23 nt, Artificial Sequence
  Synthetic
gcuuagagaaggggcucagcgag

SEQ ID NO: 9491 - RNA, 24 nt, Artificial Sequence
  Synthetic
cgcuuagagaaggggcucagcgag

SEQ ID NO: 9492 - RNA, 18 nt, Artificial Sequence
  Synthetic
ggauugcagaggagggag

SEQ ID NO: 9493 - RNA, 19 nt, Artificial Sequence
  Synthetic
cggauugcagaggagggag

SEQ ID NO: 9494 - RNA, 20 nt, Artificial Sequence
  Synthetic
gcggauugcagaggagggag

SEQ ID NO: 9495 - RNA, 21 nt, Artificial Sequence
  Synthetic
ggcggauugcagaggagggag

SEQ ID NO: 9496 - RNA, 22 nt, Artificial Sequence
  Synthetic
gggcggauugcagaggagggag

SEQ ID NO: 9497 - RNA, 23 nt, Artificial Sequence
  Synthetic
ggggcggauugcagaggagggag

SEQ ID NO: 9498 - RNA, 24 nt, Artificial Sequence
  Synthetic
aggggcggauugcagaggagggag

SEQ ID NO: 9499 - RNA, 18 nt, Artificial Sequence
  Synthetic
ccgggggcugggagggag

SEQ ID NO: 9500 - RNA, 19 nt, Artificial Sequence
  Synthetic
accgggggcugggagggag

SEQ ID NO: 9501 - RNA, 20 nt, Artificial Sequence
  Synthetic
gaccgggggcugggagggag

SEQ ID NO: 9502 - RNA, 21 nt, Artificial Sequence
  Synthetic
ugaccgggggcugggagggag

SEQ ID NO: 9503 - RNA, 22 nt, Artificial Sequence
  Synthetic
uugaccgggggcugggagggag

SEQ ID NO: 9504 - RNA, 23 nt, Artificial Sequence
  Synthetic
cuugaccgggggcugggagggag

SEQ ID NO: 9505 - RNA, 24 nt, Artificial Sequence
  Synthetic
acuugaccgggggcugggagggag

SEQ ID NO: 9506 - RNA, 18 nt, Artificial Sequence
  Synthetic
cugaagugcugcauggag

SEQ ID NO: 9507 - RNA, 19 nt, Artificial Sequence
  Synthetic
gcugaagugcugcauggag

SEQ ID NO: 9508 - RNA, 20 nt, Artificial Sequence
  Synthetic
cgcugaagugcugcauggag

SEQ ID NO: 9509 - RNA, 21 nt, Artificial Sequence
  Synthetic
ucgcugaagugcugcauggag

SEQ ID NO: 9510 - RNA, 22 nt, Artificial Sequence
  Synthetic
cucgcugaagugcugcauggag

SEQ ID NO: 9511 - RNA, 23 nt, Artificial Sequence
  Synthetic
ccucgcugaagugcugcauggag

SEQ ID NO: 9512 - RNA, 24 nt, Artificial Sequence
  Synthetic
gccucgcugaagugcugcauggag

SEQ ID NO: 9513 - RNA, 18 nt, Artificial Sequence
  Synthetic
cgucugcccucuuuugag

SEQ ID NO: 9514 - RNA, 19 nt, Artificial Sequence
  Synthetic
gcgucugcccucuuuugag

SEQ ID NO: 9515 - RNA, 20 nt, Artificial Sequence
  Synthetic
ugcgucugcccucuuuugag

SEQ ID NO: 9516 - RNA, 21 nt, Artificial Sequence
  Synthetic
cugcgucugcccucuuuugag

SEQ ID NO: 9517 - RNA, 22 nt, Artificial Sequence
  Synthetic
gcugcgucugcccucuuuugag

SEQ ID NO: 9518 - RNA, 23 nt, Artificial Sequence
  Synthetic
cgcugcgucugcccucuuuugag

SEQ ID NO: 9519 - RNA, 24 nt, Artificial Sequence
  Synthetic
ucgcugcgucugcccucuuuugag

SEQ ID NO: 9520 - RNA, 18 nt, Artificial Sequence
  Synthetic
ccgaggagugcuccgacg

SEQ ID NO: 9521 - RNA, 19 nt, Artificial Sequence
  Synthetic
uccgaggagugcuccgacg

SEQ ID NO: 9522 - RNA, 20 nt, Artificial Sequence
  Synthetic
cuccgaggagugcuccgacg

SEQ ID NO: 9523 - RNA, 21 nt, Artificial Sequence
  Synthetic
ucuccgaggagugcuccgacg

SEQ ID NO: 9524 - RNA, 22 nt, Artificial Sequence
  Synthetic
uucuccgaggagugcuccgacg

SEQ ID NO: 9525 - RNA, 23 nt, Artificial Sequence
  Synthetic
guucuccgaggagugcuccgacg

SEQ ID NO: 9526 - RNA, 24 nt, Artificial Sequence
  Synthetic
cguucuccgaggagugcuccgacg

SEQ ID NO: 9527 - RNA, 18 nt, Artificial Sequence
  Synthetic
accaugcccugcaugacg

SEQ ID NO: 9528 - RNA, 19 nt, Artificial Sequence
  Synthetic
caccaugcccugcaugacg

SEQ ID NO: 9529 - RNA, 20 nt, Artificial Sequence
  Synthetic
gcaccaugcccugcaugacg

SEQ ID NO: 9530 - RNA, 21 nt, Artificial Sequence
  Synthetic
agcaccaugcccugcaugacg

SEQ ID NO: 9531 - RNA, 22 nt, Artificial Sequence
  Synthetic
gagcaccaugcccugcaugacg

SEQ ID NO: 9532 - RNA, 23 nt, Artificial Sequence
  Synthetic
ugagcaccaugcccugcaugacg

SEQ ID NO: 9533 - RNA, 24 nt, Artificial Sequence
  Synthetic
cugagcaccaugcccugcaugacg

SEQ ID NO: 9534 - RNA, 18 nt, Artificial Sequence
  Synthetic
ccgaggccgacucgcccg

SEQ ID NO: 9535 - RNA, 19 nt, Artificial Sequence
  Synthetic
cccgaggccgacucgcccg

SEQ ID NO: 9536 - RNA, 20 nt, Artificial Sequence
  Synthetic
ccccgaggccgacucgcccg

SEQ ID NO: 9537 - RNA, 21 nt, Artificial Sequence
  Synthetic
cccccgaggccgacucgcccg

SEQ ID NO: 9538 - RNA, 22 nt, Artificial Sequence
  Synthetic
ccccccgaggccgacucgcccg

SEQ ID NO: 9539 - RNA, 23 nt, Artificial Sequence
  Synthetic
gccccccgaggccgacucgcccg

SEQ ID NO: 9540 - RNA, 24 nt, Artificial Sequence
  Synthetic
ggccccccgaggccgacucgcccg

SEQ ID NO: 9541 - RNA, 18 nt, Artificial Sequence
  Synthetic
cuggaggccgcguagccg

SEQ ID NO: 9542 - RNA, 19 nt, Artificial Sequence
  Synthetic
ccuggaggccgcguagccg

SEQ ID NO: 9543 - RNA, 20 nt, Artificial Sequence
  Synthetic
gccuggaggccgcguagccg

SEQ ID NO: 9544 - RNA, 21 nt, Artificial Sequence
  Synthetic
ugccuggaggccgcguagccg

SEQ ID NO: 9545 - RNA, 22 nt, Artificial Sequence
  Synthetic
cugccuggaggccgcguagccg

SEQ ID NO: 9546 - RNA, 23 nt, Artificial Sequence
  Synthetic
gcugccuggaggccgcguagccg

SEQ ID NO: 9547 - RNA, 24 nt, Artificial Sequence
  Synthetic
agcugccuggaggccgcguagccg

SEQ ID NO: 9548 - RNA, 18 nt, Artificial Sequence
  Synthetic
aauuugaacgucuugccg

SEQ ID NO: 9549 - RNA, 19 nt, Artificial Sequence
  Synthetic
aaauuugaacgucuugccg

SEQ ID NO: 9550 - RNA, 20 nt, Artificial Sequence
  Synthetic
gaaauuugaacgucuugccg

SEQ ID NO: 9551 - RNA, 21 nt, Artificial Sequence
  Synthetic
ugaaauuugaacgucuugccg

SEQ ID NO: 9552 - RNA, 22 nt, Artificial Sequence
  Synthetic
cugaaauuugaacgucuugccg

SEQ ID NO: 9553 - RNA, 23 nt, Artificial Sequence
  Synthetic
ucugaaauuugaacgucuugccg

SEQ ID NO: 9554 - RNA, 24 nt, Artificial Sequence
  Synthetic
cucugaaauuugaacgucuugccg

SEQ ID NO: 9555 - RNA, 18 nt, Artificial Sequence
  Synthetic
ucuccgaggagugcuccg

SEQ ID NO: 9556 - RNA, 19 nt, Artificial Sequence
  Synthetic
uucuccgaggagugcuccg

SEQ ID NO: 9557 - RNA, 20 nt, Artificial Sequence
  Synthetic
guucuccgaggagugcuccg

SEQ ID NO: 9558 - RNA, 21 nt, Artificial Sequence
  Synthetic
cguucuccgaggagugcuccg

SEQ ID NO: 9559 - RNA, 22 nt, Artificial Sequence
  Synthetic
ccguucuccgaggagugcuccg

SEQ ID NO: 9560 - RNA, 23 nt, Artificial Sequence
  Synthetic
cccguucuccgaggagugcuccg

SEQ ID NO: 9561 - RNA, 24 nt, Artificial Sequence
  Synthetic
ucccguucuccgaggagugcuccg

SEQ ID NO: 9562 - RNA, 18 nt, Artificial Sequence
  Synthetic
cgcuggugccggguuccg

SEQ ID NO: 9563 - RNA, 19 nt, Artificial Sequence
  Synthetic
ucgcuggugccggguuccg

SEQ ID NO: 9564 - RNA, 20 nt, Artificial Sequence
  Synthetic
gucgcuggugccggguuccg

SEQ ID NO: 9565 - RNA, 21 nt, Artificial Sequence
  Synthetic
agucgcuggugccggguuccg

SEQ ID NO: 9566 - RNA, 22 nt, Artificial Sequence
  Synthetic
aagucgcuggugccggguuccg

SEQ ID NO: 9567 - RNA, 23 nt, Artificial Sequence
  Synthetic
caagucgcuggugccggguuccg

SEQ ID NO: 9568 - RNA, 24 nt, Artificial Sequence
  Synthetic
ccaagucgcuggugccggguuccg

SEQ ID NO: 9569 - RNA, 18 nt, Artificial Sequence
  Synthetic
gccggccuggggacagcg

SEQ ID NO: 9570 - RNA, 19 nt, Artificial Sequence
  Synthetic
ggccggccuggggacagcg

SEQ ID NO: 9571 - RNA, 20 nt, Artificial Sequence
  Synthetic
gggccggccuggggacagcg

SEQ ID NO: 9572 - RNA, 21 nt, Artificial Sequence
  Synthetic
ugggccggccuggggacagcg

SEQ ID NO: 9573 - RNA, 22 nt, Artificial Sequence
  Synthetic
cugggccggccuggggacagcg

SEQ ID NO: 9574 - RNA, 23 nt, Artificial Sequence
  Synthetic
gcugggccggccuggggacagcg

SEQ ID NO: 9575 - RNA, 24 nt, Artificial Sequence
  Synthetic
ggcugggccggccuggggacagcg

SEQ ID NO: 9576 - RNA, 18 nt, Artificial Sequence
  Synthetic
gguuccggggagcuggcg

SEQ ID NO: 9577 - RNA, 19 nt, Artificial Sequence
  Synthetic
ggguuccggggagcuggcg

SEQ ID NO: 9578 - RNA, 20 nt, Artificial Sequence
  Synthetic
cggguuccggggagcuggcg

SEQ ID NO: 9579 - RNA, 21 nt, Artificial Sequence
  Synthetic
ccggguuccggggagcuggcg

SEQ ID NO: 9580 - RNA, 22 nt, Artificial Sequence
  Synthetic
gccggguuccggggagcuggcg

SEQ ID NO: 9581 - RNA, 23 nt, Artificial Sequence
  Synthetic
ugccggguuccggggagcuggcg

SEQ ID NO: 9582 - RNA, 24 nt, Artificial Sequence
  Synthetic
gugccggguuccggggagcuggcg

SEQ ID NO: 9583 - RNA, 18 nt, Artificial Sequence
  Synthetic
ccccaggcgcucuaugcg

SEQ ID NO: 9584 - RNA, 19 nt, Artificial Sequence
  Synthetic
cccccaggcgcucuaugcg

SEQ ID NO: 9585 - RNA, 20 nt, Artificial Sequence
  Synthetic
gcccccaggcgcucuaugcg

SEQ ID NO: 9586 - RNA, 21 nt, Artificial Sequence
  Synthetic
cgcccccaggcgcucuaugcg

SEQ ID NO: 9587 - RNA, 22 nt, Artificial Sequence
  Synthetic
ccgcccccaggcgcucuaugcg

SEQ ID NO: 9588 - RNA, 23 nt, Artificial Sequence
  Synthetic
uccgcccccaggcgcucuaugcg

SEQ ID NO: 9589 - RNA, 24 nt, Artificial Sequence
  Synthetic
uuccgcccccaggcgcucuaugcg

SEQ ID NO: 9590 - RNA, 18 nt, Artificial Sequence
  Synthetic
accugguggaaggccucg

SEQ ID NO: 9591 - RNA, 19 nt, Artificial Sequence
  Synthetic
gaccugguggaaggccucg

SEQ ID NO: 9592 - RNA, 20 nt, Artificial Sequence
  Synthetic
ggaccugguggaaggccucg

SEQ ID NO: 9593 - RNA, 21 nt, Artificial Sequence
  Synthetic
aggaccugguggaaggccucg

SEQ ID NO: 9594 - RNA, 22 nt, Artificial Sequence
  Synthetic
caggaccugguggaaggccucg

SEQ ID NO: 9595 - RNA, 23 nt, Artificial Sequence
  Synthetic
ccaggaccugguggaaggccucg

SEQ ID NO: 9596 - RNA, 24 nt, Artificial Sequence
  Synthetic
cccaggaccugguggaaggccucg

SEQ ID NO: 9597 - RNA, 18 nt, Artificial Sequence
  Synthetic
gcgguggagagaccgucg

SEQ ID NO: 9598 - RNA, 19 nt, Artificial Sequence
  Synthetic
ggcgguggagagaccgucg

SEQ ID NO: 9599 - RNA, 20 nt, Artificial Sequence
  Synthetic
uggcgguggagagaccgucg

SEQ ID NO: 9600 - RNA, 21 nt, Artificial Sequence
  Synthetic
cuggcgguggagagaccgucg

SEQ ID NO: 9601 - RNA, 22 nt, Artificial Sequence
  Synthetic
gcuggcgguggagagaccgucg

SEQ ID NO: 9602 - RNA, 23 nt, Artificial Sequence
  Synthetic
agcuggcgguggagagaccgucg

SEQ ID NO: 9603 - RNA, 24 nt, Artificial Sequence
  Synthetic
gagcuggcgguggagagaccgucg

SEQ ID NO: 9604 - RNA, 18 nt, Artificial Sequence
  Synthetic
gagucuccgaagcuaagg

SEQ ID NO: 9605 - RNA, 19 nt, Artificial Sequence
  Synthetic
ggagucuccgaagcuaagg

SEQ ID NO: 9606 - RNA, 20 nt, Artificial Sequence
  Synthetic
uggagucuccgaagcuaagg

SEQ ID NO: 9607 - RNA, 21 nt, Artificial Sequence
  Synthetic
cuggagucuccgaagcuaagg

SEQ ID NO: 9608 - RNA, 22 nt, Artificial Sequence
  Synthetic
ucuggagucuccgaagcuaagg

SEQ ID NO: 9609 - RNA, 23 nt, Artificial Sequence
  Synthetic
gucuggagucuccgaagcuaagg

SEQ ID NO: 9610 - RNA, 24 nt, Artificial Sequence
  Synthetic
ugucuggagucuccgaagcuaagg

SEQ ID NO: 9611 - RNA, 18 nt, Artificial Sequence
  Synthetic
ggugguggacuaaacagg

SEQ ID NO: 9612 - RNA, 19 nt, Artificial Sequence
  Synthetic
cggugguggacuaaacagg

SEQ ID NO: 9613 - RNA, 20 nt, Artificial Sequence
  Synthetic
ucggugguggacuaaacagg

SEQ ID NO: 9614 - RNA, 21 nt, Artificial Sequence
  Synthetic
cucggugguggacuaaacagg

SEQ ID NO: 9615 - RNA, 22 nt, Artificial Sequence
  Synthetic
ucucggugguggacuaaacagg

SEQ ID NO: 9616 - RNA, 23 nt, Artificial Sequence
  Synthetic
gucucggugguggacuaaacagg

SEQ ID NO: 9617 - RNA, 24 nt, Artificial Sequence
  Synthetic
ugucucggugguggacuaaacagg

SEQ ID NO: 9618 - RNA, 18 nt, Artificial Sequence
  Synthetic
agggggggcgucgccagg

SEQ ID NO: 9619 - RNA, 19 nt, Artificial Sequence
  Synthetic
gagggggggcgucgccagg

SEQ ID NO: 9620 - RNA, 20 nt, Artificial Sequence
  Synthetic
ggagggggggcgucgccagg

SEQ ID NO: 9621 - RNA, 21 nt, Artificial Sequence
  Synthetic
gggagggggggcgucgccagg

SEQ ID NO: 9622 - RNA, 22 nt, Artificial Sequence
  Synthetic
agggagggggggcgucgccagg

SEQ ID NO: 9623 - RNA, 23 nt, Artificial Sequence
  Synthetic
gagggagggggggcgucgccagg

SEQ ID NO: 9624 - RNA, 24 nt, Artificial Sequence
  Synthetic
ggagggagggggggcgucgccagg

SEQ ID NO: 9625 - RNA, 18 nt, Artificial Sequence
  Synthetic
aagcgcccuucugccagg

SEQ ID NO: 9626 - RNA, 19 nt, Artificial Sequence
  Synthetic
aaagcgcccuucugccagg

SEQ ID NO: 9627 - RNA, 20 nt, Artificial Sequence
  Synthetic
gaaagcgcccuucugccagg

SEQ ID NO: 9628 - RNA, 21 nt, Artificial Sequence
  Synthetic
ggaaagcgcccuucugccagg

SEQ ID NO: 9629 - RNA, 22 nt, Artificial Sequence
  Synthetic
uggaaagcgcccuucugccagg

SEQ ID NO: 9630 - RNA, 23 nt, Artificial Sequence
  Synthetic
guggaaagcgcccuucugccagg

SEQ ID NO: 9631 - RNA, 24 nt, Artificial Sequence
  Synthetic
gguggaaagcgcccuucugccagg

SEQ ID NO: 9632 - RNA, 18 nt, Artificial Sequence
  Synthetic
aucgcggccgggggcagg

SEQ ID NO: 9633 - RNA, 19 nt, Artificial Sequence
  Synthetic
caucgcggccgggggcagg

SEQ ID NO: 9634 - RNA, 20 nt, Artificial Sequence
  Synthetic
gcaucgcggccgggggcagg

SEQ ID NO: 9635 - RNA, 21 nt, Artificial Sequence
  Synthetic
ggcaucgcggccgggggcagg

SEQ ID NO: 9636 - RNA, 22 nt, Artificial Sequence
  Synthetic
gggcaucgcggccgggggcagg

SEQ ID NO: 9637 - RNA, 23 nt, Artificial Sequence
  Synthetic
ugggcaucgcggccgggggcagg

SEQ ID NO: 9638 - RNA, 24 nt, Artificial Sequence
  Synthetic
uugggcaucgcggccgggggcagg

SEQ ID NO: 9639 - RNA, 18 nt, Artificial Sequence
  Synthetic
ccguucuccgggaucagg

SEQ ID NO: 9640 - RNA, 19 nt, Artificial Sequence
  Synthetic
cccguucuccgggaucagg

SEQ ID NO: 9641 - RNA, 20 nt, Artificial Sequence
  Synthetic
ccccguucuccgggaucagg

SEQ ID NO: 9642 - RNA, 21 nt, Artificial Sequence
  Synthetic
uccccguucuccgggaucagg

SEQ ID NO: 9643 - RNA, 22 nt, Artificial Sequence
  Synthetic
guccccguucuccgggaucagg

SEQ ID NO: 9644 - RNA, 23 nt, Artificial Sequence
  Synthetic
cguccccguucuccgggaucagg

SEQ ID NO: 9645 - RNA, 24 nt, Artificial Sequence
  Synthetic
ucguccccguucuccgggaucagg

SEQ ID NO: 9646 - RNA, 18 nt, Artificial Sequence
  Synthetic
gaagaaccuagaaagagg

SEQ ID NO: 9647 - RNA, 19 nt, Artificial Sequence
  Synthetic
ugaagaaccuagaaagagg

SEQ ID NO: 9648 - RNA, 20 nt, Artificial Sequence
  Synthetic
gugaagaaccuagaaagagg

SEQ ID NO: 9649 - RNA, 21 nt, Artificial Sequence
  Synthetic
ugugaagaaccuagaaagagg

SEQ ID NO: 9650 - RNA, 22 nt, Artificial Sequence
  Synthetic
gugugaagaaccuagaaagagg

SEQ ID NO: 9651 - RNA, 23 nt, Artificial Sequence
  Synthetic
ugugugaagaaccuagaaagagg

SEQ ID NO: 9652 - RNA, 24 nt, Artificial Sequence
  Synthetic
gugugugaagaaccuagaaagagg

SEQ ID NO: 9653 - RNA, 18 nt, Artificial Sequence
  Synthetic
agagguuggagacagagg

SEQ ID NO: 9654 - RNA, 19 nt, Artificial Sequence
  Synthetic
aagagguuggagacagagg

SEQ ID NO: 9655 - RNA, 20 nt, Artificial Sequence
  Synthetic
aaagagguuggagacagagg

SEQ ID NO: 9656 - RNA, 21 nt, Artificial Sequence
  Synthetic
gaaagagguuggagacagagg

SEQ ID NO: 9657 - RNA, 22 nt, Artificial Sequence
  Synthetic
agaaagagguuggagacagagg

SEQ ID NO: 9658 - RNA, 23 nt, Artificial Sequence
  Synthetic
uagaaagagguuggagacagagg

SEQ ID NO: 9659 - RNA, 24 nt, Artificial Sequence
  Synthetic
cuagaaagagguuggagacagagg

SEQ ID NO: 9660 - RNA, 18 nt, Artificial Sequence
  Synthetic
aggggcggauugcagagg

SEQ ID NO: 9661 - RNA, 19 nt, Artificial Sequence
  Synthetic
gaggggcggauugcagagg

SEQ ID NO: 9662 - RNA, 20 nt, Artificial Sequence
  Synthetic
ggaggggcggauugcagagg

SEQ ID NO: 9663 - RNA, 21 nt, Artificial Sequence
  Synthetic
aggaggggcggauugcagagg

SEQ ID NO: 9664 - RNA, 22 nt, Artificial Sequence
  Synthetic
gaggaggggcggauugcagagg

SEQ ID NO: 9665 - RNA, 23 nt, Artificial Sequence
  Synthetic
ggaggaggggcggauugcagagg

SEQ ID NO: 9666 - RNA, 24 nt, Artificial Sequence
  Synthetic
gggaggaggggcggauugcagagg

SEQ ID NO: 9667 - RNA, 18 nt, Artificial Sequence
  Synthetic
ggcggauugcagaggagg

SEQ ID NO: 9668 - RNA, 19 nt, Artificial Sequence
  Synthetic
gggcggauugcagaggagg

SEQ ID NO: 9669 - RNA, 20 nt, Artificial Sequence
  Synthetic
ggggcggauugcagaggagg

SEQ ID NO: 9670 - RNA, 21 nt, Artificial Sequence
  Synthetic
aggggcggauugcagaggagg

SEQ ID NO: 9671 - RNA, 22 nt, Artificial Sequence
  Synthetic
gaggggcggauugcagaggagg

SEQ ID NO: 9672 - RNA, 23 nt, Artificial Sequence
  Synthetic
ggaggggcggauugcagaggagg

SEQ ID NO: 9673 - RNA, 24 nt, Artificial Sequence
  Synthetic
aggaggggcggauugcagaggagg

SEQ ID NO: 9674 - RNA, 18 nt, Artificial Sequence
  Synthetic
gauugcagaggagggagg

SEQ ID NO: 9675 - RNA, 19 nt, Artificial Sequence
  Synthetic
ggauugcagaggagggagg

SEQ ID NO: 9676 - RNA, 20 nt, Artificial Sequence
  Synthetic
cggauugcagaggagggagg

SEQ ID NO: 9677 - RNA, 21 nt, Artificial Sequence
  Synthetic
gcggauugcagaggagggagg

SEQ ID NO: 9678 - RNA, 22 nt, Artificial Sequence
  Synthetic
ggcggauugcagaggagggagg

SEQ ID NO: 9679 - RNA, 23 nt, Artificial Sequence
  Synthetic
gggcggauugcagaggagggagg

SEQ ID NO: 9680 - RNA, 24 nt, Artificial Sequence
  Synthetic
ggggcggauugcagaggagggagg

SEQ ID NO: 9681 - RNA, 18 nt, Artificial Sequence
  Synthetic
cgggggcugggagggagg

SEQ ID NO: 9682 - RNA, 19 nt, Artificial Sequence
  Synthetic
ccgggggcugggagggagg

SEQ ID NO: 9683 - RNA, 20 nt, Artificial Sequence
  Synthetic
accgggggcugggagggagg

SEQ ID NO: 9684 - RNA, 21 nt, Artificial Sequence
  Synthetic
gaccgggggcugggagggagg

SEQ ID NO: 9685 - RNA, 22 nt, Artificial Sequence
  Synthetic
ugaccgggggcugggagggagg

SEQ ID NO: 9686 - RNA, 23 nt, Artificial Sequence
  Synthetic
uugaccgggggcugggagggagg

SEQ ID NO: 9687 - RNA, 24 nt, Artificial Sequence
  Synthetic
cuugaccgggggcugggagggagg

SEQ ID NO: 9688 - RNA, 18 nt, Artificial Sequence
  Synthetic
ugaccgggggcugggagg

SEQ ID NO: 9689 - RNA, 19 nt, Artificial Sequence
  Synthetic
uugaccgggggcugggagg

SEQ ID NO: 9690 - RNA, 20 nt, Artificial Sequence
  Synthetic
cuugaccgggggcugggagg

SEQ ID NO: 9691 - RNA, 21 nt, Artificial Sequence
  Synthetic
acuugaccgggggcugggagg

SEQ ID NO: 9692 - RNA, 22 nt, Artificial Sequence
  Synthetic
gacuugaccgggggcugggagg

SEQ ID NO: 9693 - RNA, 23 nt, Artificial Sequence
  Synthetic
ggacuugaccgggggcugggagg

SEQ ID NO: 9694 - RNA, 24 nt, Artificial Sequence
  Synthetic
uggacuugaccgggggcugggagg

SEQ ID NO: 9695 - RNA, 18 nt, Artificial Sequence
  Synthetic
ccguguugggcaucgcgg

SEQ ID NO: 9696 - RNA, 19 nt, Artificial Sequence
  Synthetic
uccguguugggcaucgcgg

SEQ ID NO: 9697 - RNA, 20 nt, Artificial Sequence
  Synthetic
cuccguguugggcaucgcgg

SEQ ID NO: 9698 - RNA, 21 nt, Artificial Sequence
  Synthetic
ucuccguguugggcaucgcgg

SEQ ID NO: 9699 - RNA, 22 nt, Artificial Sequence
  Synthetic
uucuccguguugggcaucgcgg

SEQ ID NO: 9700 - RNA, 23 nt, Artificial Sequence
  Synthetic
guucuccguguugggcaucgcgg

SEQ ID NO: 9701 - RNA, 24 nt, Artificial Sequence
  Synthetic
cguucuccguguugggcaucgcgg

SEQ ID NO: 9702 - RNA, 18 nt, Artificial Sequence
  Synthetic
guuccggggagcuggcgg

SEQ ID NO: 9703 - RNA, 19 nt, Artificial Sequence
  Synthetic
gguuccggggagcuggcgg

SEQ ID NO: 9704 - RNA, 20 nt, Artificial Sequence
  Synthetic
ggguuccggggagcuggcgg

SEQ ID NO: 9705 - RNA, 21 nt, Artificial Sequence
  Synthetic
cggguuccggggagcuggcgg

SEQ ID NO: 9706 - RNA, 22 nt, Artificial Sequence
  Synthetic
ccggguuccggggagcuggcgg

SEQ ID NO: 9707 - RNA, 23 nt, Artificial Sequence
  Synthetic
gccggguuccggggagcuggcgg

SEQ ID NO: 9708 - RNA, 24 nt, Artificial Sequence
  Synthetic
ugccggguuccggggagcuggcgg

SEQ ID NO: 9709 - RNA, 18 nt, Artificial Sequence
  Synthetic
cccaggcgcucuaugcgg

SEQ ID NO: 9710 - RNA, 19 nt, Artificial Sequence
  Synthetic
ccccaggcgcucuaugcgg

SEQ ID NO: 9711 - RNA, 20 nt, Artificial Sequence
  Synthetic
cccccaggcgcucuaugcgg

SEQ ID NO: 9712 - RNA, 21 nt, Artificial Sequence
  Synthetic
gcccccaggcgcucuaugcgg

SEQ ID NO: 9713 - RNA, 22 nt, Artificial Sequence
  Synthetic
cgcccccaggcgcucuaugcgg

SEQ ID NO: 9714 - RNA, 23 nt, Artificial Sequence
  Synthetic
ccgcccccaggcgcucuaugcgg

SEQ ID NO: 9715 - RNA, 24 nt, Artificial Sequence
  Synthetic
uccgcccccaggcgcucuaugcgg

SEQ ID NO: 9716 - RNA, 18 nt, Artificial Sequence
  Synthetic
gugguggacuaaacaggg

SEQ ID NO: 9717 - RNA, 19 nt, Artificial Sequence
  Synthetic
ggugguggacuaaacaggg

SEQ ID NO: 9718 - RNA, 20 nt, Artificial Sequence
  Synthetic
cggugguggacuaaacaggg

SEQ ID NO: 9719 - RNA, 21 nt, Artificial Sequence
  Synthetic
ucggugguggacuaaacaggg

SEQ ID NO: 9720 - RNA, 22 nt, Artificial Sequence
  Synthetic
cucggugguggacuaaacaggg

SEQ ID NO: 9721 - RNA, 23 nt, Artificial Sequence
  Synthetic
ucucggugguggacuaaacaggg

SEQ ID NO: 9722 - RNA, 24 nt, Artificial Sequence
  Synthetic
gucucggugguggacuaaacaggg

SEQ ID NO: 9723 - RNA, 18 nt, Artificial Sequence
  Synthetic
gcggauugcagaggaggg

SEQ ID NO: 9724 - RNA, 19 nt, Artificial Sequence
  Synthetic
ggcggauugcagaggaggg

SEQ ID NO: 9725 - RNA, 20 nt, Artificial Sequence
  Synthetic
gggcggauugcagaggaggg

SEQ ID NO: 9726 - RNA, 21 nt, Artificial Sequence
  Synthetic
ggggcggauugcagaggaggg

SEQ ID NO: 9727 - RNA, 22 nt, Artificial Sequence
  Synthetic
aggggcggauugcagaggaggg

SEQ ID NO: 9728 - RNA, 23 nt, Artificial Sequence
  Synthetic
gaggggcggauugcagaggaggg

SEQ ID NO: 9729 - RNA, 24 nt, Artificial Sequence
  Synthetic
ggaggggcggauugcagaggaggg

SEQ ID NO: 9730 - RNA, 18 nt, Artificial Sequence
  Synthetic
gaccgggggcugggaggg

SEQ ID NO: 9731 - RNA, 19 nt, Artificial Sequence
  Synthetic
ugaccgggggcugggaggg

SEQ ID NO: 9732 - RNA, 20 nt, Artificial Sequence
  Synthetic
uugaccgggggcugggaggg

SEQ ID NO: 9733 - RNA, 21 nt, Artificial Sequence
  Synthetic
cuugaccgggggcugggaggg

SEQ ID NO: 9734 - RNA, 22 nt, Artificial Sequence
  Synthetic
acuugaccgggggcugggaggg

SEQ ID NO: 9735 - RNA, 23 nt, Artificial Sequence
  Synthetic
gacuugaccgggggcugggaggg

SEQ ID NO: 9736 - RNA, 24 nt, Artificial Sequence
  Synthetic
ggacuugaccgggggcugggaggg

SEQ ID NO: 9737 - RNA, 18 nt, Artificial Sequence
  Synthetic
aguaaccuuugcauaggg

SEQ ID NO: 9738 - RNA, 19 nt, Artificial Sequence
  Synthetic
caguaaccuuugcauaggg

SEQ ID NO: 9739 - RNA, 20 nt, Artificial Sequence
  Synthetic
gcaguaaccuuugcauaggg

SEQ ID NO: 9740 - RNA, 21 nt, Artificial Sequence
  Synthetic
ugcaguaaccuuugcauaggg

SEQ ID NO: 9741 - RNA, 22 nt, Artificial Sequence
  Synthetic
uugcaguaaccuuugcauaggg

SEQ ID NO: 9742 - RNA, 23 nt, Artificial Sequence
  Synthetic
guugcaguaaccuuugcauaggg

SEQ ID NO: 9743 - RNA, 24 nt, Artificial Sequence
  Synthetic
gguugcaguaaccuuugcauaggg

SEQ ID NO: 9744 - RNA, 18 nt, Artificial Sequence
  Synthetic
gcccugcaugacgucggg

SEQ ID NO: 9745 - RNA, 19 nt, Artificial Sequence
  Synthetic
ugcccugcaugacgucggg

SEQ ID NO: 9746 - RNA, 20 nt, Artificial Sequence
  Synthetic
augcccugcaugacgucggg

SEQ ID NO: 9747 - RNA, 21 nt, Artificial Sequence
  Synthetic
caugcccugcaugacgucggg

SEQ ID NO: 9748 - RNA, 22 nt, Artificial Sequence
  Synthetic
ccaugcccugcaugacgucggg

SEQ ID NO: 9749 - RNA, 23 nt, Artificial Sequence
  Synthetic
accaugcccugcaugacgucggg

SEQ ID NO: 9750 - RNA, 24 nt, Artificial Sequence
  Synthetic
caccaugcccugcaugacgucggg

SEQ ID NO: 9751 - RNA, 18 nt, Artificial Sequence
  Synthetic
cuuggacuugaccggggg

SEQ ID NO: 9752 - RNA, 19 nt, Artificial Sequence
  Synthetic
acuuggacuugaccggggg

SEQ ID NO: 9753 - RNA, 20 nt, Artificial Sequence
  Synthetic
gacuuggacuugaccggggg

SEQ ID NO: 9754 - RNA, 21 nt, Artificial Sequence
  Synthetic
ugacuuggacuugaccggggg

SEQ ID NO: 9755 - RNA, 22 nt, Artificial Sequence
  Synthetic
augacuuggacuugaccggggg

SEQ ID NO: 9756 - RNA, 23 nt, Artificial Sequence
  Synthetic
caugacuuggacuugaccggggg

SEQ ID NO: 9757 - RNA, 24 nt, Artificial Sequence
  Synthetic
gcaugacuuggacuugaccggggg

SEQ ID NO: 9758 - RNA, 18 nt, Artificial Sequence
  Synthetic
acuugaccgggggcuggg

SEQ ID NO: 9759 - RNA, 19 nt, Artificial Sequence
  Synthetic
gacuugaccgggggcuggg

SEQ ID NO: 9760 - RNA, 20 nt, Artificial Sequence
  Synthetic
ggacuugaccgggggcuggg

SEQ ID NO: 9761 - RNA, 21 nt, Artificial Sequence
  Synthetic
uggacuugaccgggggcuggg

SEQ ID NO: 9762 - RNA, 22 nt, Artificial Sequence
  Synthetic
uuggacuugaccgggggcuggg

SEQ ID NO: 9763 - RNA, 23 nt, Artificial Sequence
  Synthetic
cuuggacuugaccgggggcuggg

SEQ ID NO: 9764 - RNA, 24 nt, Artificial Sequence
  Synthetic
acuuggacuugaccgggggcuggg

SEQ ID NO: 9765 - RNA, 18 nt, Artificial Sequence
  Synthetic
cauggagagguggcuggg

SEQ ID NO: 9766 - RNA, 19 nt, Artificial Sequence
  Synthetic
ccauggagagguggcuggg

SEQ ID NO: 9767 - RNA, 20 nt, Artificial Sequence
  Synthetic
cccauggagagguggcuggg

SEQ ID NO: 9768 - RNA, 21 nt, Artificial Sequence
  Synthetic
ucccauggagagguggcuggg

SEQ ID NO: 9769 - RNA, 22 nt, Artificial Sequence
  Synthetic
aucccauggagagguggcuggg

SEQ ID NO: 9770 - RNA, 23 nt, Artificial Sequence
  Synthetic
aaucccauggagagguggcuggg

SEQ ID NO: 9771 - RNA, 24 nt, Artificial Sequence
  Synthetic
gaaucccauggagagguggcuggg

SEQ ID NO: 9772 - RNA, 18 nt, Artificial Sequence
  Synthetic
aaacagggggggaguggg

SEQ ID NO: 9773 - RNA, 19 nt, Artificial Sequence
  Synthetic
uaaacagggggggaguggg

SEQ ID NO: 9774 - RNA, 20 nt, Artificial Sequence
  Synthetic
cuaaacagggggggaguggg

SEQ ID NO: 9775 - RNA, 21 nt, Artificial Sequence
  Synthetic
acuaaacagggggggaguggg

SEQ ID NO: 9776 - RNA, 22 nt, Artificial Sequence
  Synthetic
gacuaaacagggggggaguggg

SEQ ID NO: 9777 - RNA, 23 nt, Artificial Sequence
  Synthetic
ggacuaaacagggggggaguggg

SEQ ID NO: 9778 - RNA, 24 nt, Artificial Sequence
  Synthetic
uggacuaaacagggggggaguggg

SEQ ID NO: 9779 - RNA, 18 nt, Artificial Sequence
  Synthetic
uccuagagaaauccaugg

SEQ ID NO: 9780 - RNA, 19 nt, Artificial Sequence
  Synthetic
cuccuagagaaauccaugg

SEQ ID NO: 9781 - RNA, 20 nt, Artificial Sequence
  Synthetic
ucuccuagagaaauccaugg

SEQ ID NO: 9782 - RNA, 21 nt, Artificial Sequence
  Synthetic
gucuccuagagaaauccaugg

SEQ ID NO: 9783 - RNA, 22 nt, Artificial Sequence
  Synthetic
agucuccuagagaaauccaugg

SEQ ID NO: 9784 - RNA, 23 nt, Artificial Sequence
  Synthetic
aagucuccuagagaaauccaugg

SEQ ID NO: 9785 - RNA, 24 nt, Artificial Sequence
  Synthetic
uaagucuccuagagaaauccaugg

SEQ ID NO: 9786 - RNA, 18 nt, Artificial Sequence
  Synthetic
uucucgcccaggaccugg

SEQ ID NO: 9787 - RNA, 19 nt, Artificial Sequence
  Synthetic
cuucucgcccaggaccugg

SEQ ID NO: 9788 - RNA, 20 nt, Artificial Sequence
  Synthetic
gcuucucgcccaggaccugg

SEQ ID NO: 9789 - RNA, 21 nt, Artificial Sequence
  Synthetic
ugcuucucgcccaggaccugg

SEQ ID NO: 9790 - RNA, 22 nt, Artificial Sequence
  Synthetic
augcuucucgcccaggaccugg

SEQ ID NO: 9791 - RNA, 23 nt, Artificial Sequence
  Synthetic
uaugcuucucgcccaggaccugg

SEQ ID NO: 9792 - RNA, 24 nt, Artificial Sequence
  Synthetic
uuaugcuucucgcccaggaccugg

SEQ ID NO: 9793 - RNA, 18 nt, Artificial Sequence
  Synthetic
gggcggcuugcuaccugg

SEQ ID NO: 9794 - RNA, 19 nt, Artificial Sequence
  Synthetic
agggcggcuugcuaccugg

SEQ ID NO: 9795 - RNA, 20 nt, Artificial Sequence
  Synthetic
aagggcggcuugcuaccugg

SEQ ID NO: 9796 - RNA, 21 nt, Artificial Sequence
  Synthetic
gaagggcggcuugcuaccugg

SEQ ID NO: 9797 - RNA, 22 nt, Artificial Sequence
  Synthetic
ggaagggcggcuugcuaccugg

SEQ ID NO: 9798 - RNA, 23 nt, Artificial Sequence
  Synthetic
aggaagggcggcuugcuaccugg

SEQ ID NO: 9799 - RNA, 24 nt, Artificial Sequence
  Synthetic
caggaagggcggcuugcuaccugg

SEQ ID NO: 9800 - RNA, 18 nt, Artificial Sequence
  Synthetic
gacuugaccgggggcugg

SEQ ID NO: 9801 - RNA, 19 nt, Artificial Sequence
  Synthetic
ggacuugaccgggggcugg

SEQ ID NO: 9802 - RNA, 20 nt, Artificial Sequence
  Synthetic
uggacuugaccgggggcugg

SEQ ID NO: 9803 - RNA, 21 nt, Artificial Sequence
  Synthetic
uuggacuugaccgggggcugg

SEQ ID NO: 9804 - RNA, 22 nt, Artificial Sequence
  Synthetic
cuuggacuugaccgggggcugg

SEQ ID NO: 9805 - RNA, 23 nt, Artificial Sequence
  Synthetic
acuuggacuugaccgggggcugg

SEQ ID NO: 9806 - RNA, 24 nt, Artificial Sequence
  Synthetic
gacuuggacuugaccgggggcugg

SEQ ID NO: 9807 - RNA, 18 nt, Artificial Sequence
  Synthetic
uaaacagggggggagugg

SEQ ID NO: 9808 - RNA, 19 nt, Artificial Sequence
  Synthetic
cuaaacagggggggagugg

SEQ ID NO: 9809 - RNA, 20 nt, Artificial Sequence
  Synthetic
acuaaacagggggggagugg

SEQ ID NO: 9810 - RNA, 21 nt, Artificial Sequence
  Synthetic
gacuaaacagggggggagugg

SEQ ID NO: 9811 - RNA, 22 nt, Artificial Sequence
  Synthetic
ggacuaaacagggggggagugg

SEQ ID NO: 9812 - RNA, 23 nt, Artificial Sequence
  Synthetic
uggacuaaacagggggggagugg

SEQ ID NO: 9813 - RNA, 24 nt, Artificial Sequence
  Synthetic
guggacuaaacagggggggagugg

SEQ ID NO: 9814 - RNA, 18 nt, Artificial Sequence
  Synthetic
aaucccauggagaggugg

SEQ ID NO: 9815 - RNA, 19 nt, Artificial Sequence
  Synthetic
gaaucccauggagaggugg

SEQ ID NO: 9816 - RNA, 20 nt, Artificial Sequence
  Synthetic
ugaaucccauggagaggugg

SEQ ID NO: 9817 - RNA, 21 nt, Artificial Sequence
  Synthetic
augaaucccauggagaggugg

SEQ ID NO: 9818 - RNA, 22 nt, Artificial Sequence
  Synthetic
uaugaaucccauggagaggugg

SEQ ID NO: 9819 - RNA, 23 nt, Artificial Sequence
  Synthetic
auaugaaucccauggagaggugg

SEQ ID NO: 9820 - RNA, 24 nt, Artificial Sequence
  Synthetic
aauaugaaucccauggagaggugg

SEQ ID NO: 9821 - RNA, 18 nt, Artificial Sequence
  Synthetic
ugcaauaugaaucccaug

SEQ ID NO: 9822 - RNA, 19 nt, Artificial Sequence
  Synthetic
cugcaauaugaaucccaug

SEQ ID NO: 9823 - RNA, 20 nt, Artificial Sequence
  Synthetic
ucugcaauaugaaucccaug

SEQ ID NO: 9824 - RNA, 21 nt, Artificial Sequence
  Synthetic
gucugcaauaugaaucccaug

SEQ ID NO: 9825 - RNA, 22 nt, Artificial Sequence
  Synthetic
ugucugcaauaugaaucccaug

SEQ ID NO: 9826 - RNA, 23 nt, Artificial Sequence
  Synthetic
uugucugcaauaugaaucccaug

SEQ ID NO: 9827 - RNA, 24 nt, Artificial Sequence
  Synthetic
auugucugcaauaugaaucccaug

SEQ ID NO: 9828 - RNA, 18 nt, Artificial Sequence
  Synthetic
cuccuagagaaauccaug

SEQ ID NO: 9829 - RNA, 19 nt, Artificial Sequence
  Synthetic
ucuccuagagaaauccaug

SEQ ID NO: 9830 - RNA, 20 nt, Artificial Sequence
  Synthetic
gucuccuagagaaauccaug

SEQ ID NO: 9831 - RNA, 21 nt, Artificial Sequence
  Synthetic
agucuccuagagaaauccaug

SEQ ID NO: 9832 - RNA, 22 nt, Artificial Sequence
  Synthetic
aagucuccuagagaaauccaug

SEQ ID NO: 9833 - RNA, 23 nt, Artificial Sequence
  Synthetic
uaagucuccuagagaaauccaug

SEQ ID NO: 9834 - RNA, 24 nt, Artificial Sequence
  Synthetic
cuaagucuccuagagaaauccaug

SEQ ID NO: 9835 - RNA, 18 nt, Artificial Sequence
  Synthetic
ucggacuugaccgucaug

SEQ ID NO: 9836 - RNA, 19 nt, Artificial Sequence
  Synthetic
gucggacuugaccgucaug

SEQ ID NO: 9837 - RNA, 20 nt, Artificial Sequence
  Synthetic
cgucggacuugaccgucaug

SEQ ID NO: 9838 - RNA, 21 nt, Artificial Sequence
  Synthetic
ucgucggacuugaccgucaug

SEQ ID NO: 9839 - RNA, 22 nt, Artificial Sequence
  Synthetic
gucgucggacuugaccgucaug

SEQ ID NO: 9840 - RNA, 23 nt, Artificial Sequence
  Synthetic
cgucgucggacuugaccgucaug

SEQ ID NO: 9841 - RNA, 24 nt, Artificial Sequence
  Synthetic
ccgucgucggacuugaccgucaug

SEQ ID NO: 9842 - RNA, 18 nt, Artificial Sequence
  Synthetic
cuucucgcccaggaccug

SEQ ID NO: 9843 - RNA, 19 nt, Artificial Sequence
  Synthetic
gcuucucgcccaggaccug

SEQ ID NO: 9844 - RNA, 20 nt, Artificial Sequence
  Synthetic
ugcuucucgcccaggaccug

SEQ ID NO: 9845 - RNA, 21 nt, Artificial Sequence
  Synthetic
augcuucucgcccaggaccug

SEQ ID NO: 9846 - RNA, 22 nt, Artificial Sequence
  Synthetic
uaugcuucucgcccaggaccug

SEQ ID NO: 9847 - RNA, 23 nt, Artificial Sequence
  Synthetic
uuaugcuucucgcccaggaccug

SEQ ID NO: 9848 - RNA, 24 nt, Artificial Sequence
  Synthetic
cuuaugcuucucgcccaggaccug

SEQ ID NO: 9849 - RNA, 18 nt, Artificial Sequence
  Synthetic
auucugcaccuaguccug

SEQ ID NO: 9850 - RNA, 19 nt, Artificial Sequence
  Synthetic
cauucugcaccuaguccug

SEQ ID NO: 9851 - RNA, 20 nt, Artificial Sequence
  Synthetic
acauucugcaccuaguccug

SEQ ID NO: 9852 - RNA, 21 nt, Artificial Sequence
  Synthetic
gacauucugcaccuaguccug

SEQ ID NO: 9853 - RNA, 22 nt, Artificial Sequence
  Synthetic
ggacauucugcaccuaguccug

SEQ ID NO: 9854 - RNA, 23 nt, Artificial Sequence
  Synthetic
aggacauucugcaccuaguccug

SEQ ID NO: 9855 - RNA, 24 nt, Artificial Sequence
  Synthetic
aaggacauucugcaccuaguccug

SEQ ID NO: 9856 - RNA, 18 nt, Artificial Sequence
  Synthetic
guuguacauguguagcug

SEQ ID NO: 9857 - RNA, 19 nt, Artificial Sequence
  Synthetic
aguuguacauguguagcug

SEQ ID NO: 9858 - RNA, 20 nt, Artificial Sequence
  Synthetic
aaguuguacauguguagcug

SEQ ID NO: 9859 - RNA, 21 nt, Artificial Sequence
  Synthetic
caaguuguacauguguagcug

SEQ ID NO: 9860 - RNA, 22 nt, Artificial Sequence
  Synthetic
gcaaguuguacauguguagcug

SEQ ID NO: 9861 - RNA, 23 nt, Artificial Sequence
  Synthetic
ugcaaguuguacauguguagcug

SEQ ID NO: 9862 - RNA, 24 nt, Artificial Sequence
  Synthetic
uugcaaguuguacauguguagcug

SEQ ID NO: 9863 - RNA, 18 nt, Artificial Sequence
  Synthetic
gaguacacguucuccgug

SEQ ID NO: 9864 - RNA, 19 nt, Artificial Sequence
  Synthetic
cgaguacacguucuccgug

SEQ ID NO: 9865 - RNA, 20 nt, Artificial Sequence
  Synthetic
gcgaguacacguucuccgug

SEQ ID NO: 9866 - RNA, 21 nt, Artificial Sequence
  Synthetic
ugcgaguacacguucuccgug

SEQ ID NO: 9867 - RNA, 22 nt, Artificial Sequence
  Synthetic
cugcgaguacacguucuccgug

SEQ ID NO: 9868 - RNA, 23 nt, Artificial Sequence
  Synthetic
acugcgaguacacguucuccgug

SEQ ID NO: 9869 - RNA, 24 nt, Artificial Sequence
  Synthetic
cacugcgaguacacguucuccgug

SEQ ID NO: 9870 - RNA, 18 nt, Artificial Sequence
  Synthetic
ccagcuccccgggcggug

SEQ ID NO: 9871 - RNA, 19 nt, Artificial Sequence
  Synthetic
uccagcuccccgggcggug

SEQ ID NO: 9872 - RNA, 20 nt, Artificial Sequence
  Synthetic
guccagcuccccgggcggug

SEQ ID NO: 9873 - RNA, 21 nt, Artificial Sequence
  Synthetic
cguccagcuccccgggcggug

SEQ ID NO: 9874 - RNA, 22 nt, Artificial Sequence
  Synthetic
ccguccagcuccccgggcggug

SEQ ID NO: 9875 - RNA, 23 nt, Artificial Sequence
  Synthetic
uccguccagcuccccgggcggug

SEQ ID NO: 9876 - RNA, 24 nt, Artificial Sequence
  Synthetic
cuccguccagcuccccgggcggug

SEQ ID NO: 9877 - RNA, 18 nt, Artificial Sequence
  Synthetic
uccggggagcuggcggug

SEQ ID NO: 9878 - RNA, 19 nt, Artificial Sequence
  Synthetic
uuccggggagcuggcggug

SEQ ID NO: 9879 - RNA, 20 nt, Artificial Sequence
  Synthetic
guuccggggagcuggcggug

SEQ ID NO: 9880 - RNA, 21 nt, Artificial Sequence
  Synthetic
gguuccggggagcuggcggug

SEQ ID NO: 9881 - RNA, 22 nt, Artificial Sequence
  Synthetic
ggguuccggggagcuggcggug

SEQ ID NO: 9882 - RNA, 23 nt, Artificial Sequence
  Synthetic
cggguuccggggagcuggcggug

SEQ ID NO: 9883 - RNA, 24 nt, Artificial Sequence
  Synthetic
ccggguuccggggagcuggcggug

SEQ ID NO: 9884 - RNA, 18 nt, Artificial Sequence
  Synthetic
ccaagugaugucucggug

SEQ ID NO: 9885 - RNA, 19 nt, Artificial Sequence
  Synthetic
uccaagugaugucucggug

SEQ ID NO: 9886 - RNA, 20 nt, Artificial Sequence
  Synthetic
guccaagugaugucucggug

SEQ ID NO: 9887 - RNA, 21 nt, Artificial Sequence
  Synthetic
gguccaagugaugucucggug

SEQ ID NO: 9888 - RNA, 22 nt, Artificial Sequence
  Synthetic
ggguccaagugaugucucggug

SEQ ID NO: 9889 - RNA, 23 nt, Artificial Sequence
  Synthetic
gggguccaagugaugucucggug

SEQ ID NO: 9890 - RNA, 24 nt, Artificial Sequence
  Synthetic
ggggguccaagugaugucucggug

SEQ ID NO: 9891 - RNA, 18 nt, Artificial Sequence
  Synthetic
agcuccccgggcggugug

SEQ ID NO: 9892 - RNA, 19 nt, Artificial Sequence
  Synthetic
cagcuccccgggcggugug

SEQ ID NO: 9893 - RNA, 20 nt, Artificial Sequence
  Synthetic
ccagcuccccgggcggugug

SEQ ID NO: 9894 - RNA, 21 nt, Artificial Sequence
  Synthetic
uccagcuccccgggcggugug

SEQ ID NO: 9895 - RNA, 22 nt, Artificial Sequence
  Synthetic
guccagcuccccgggcggugug

SEQ ID NO: 9896 - RNA, 23 nt, Artificial Sequence
  Synthetic
cguccagcuccccgggcggugug

SEQ ID NO: 9897 - RNA, 24 nt, Artificial Sequence
  Synthetic
ccguccagcuccccgggcggugug

SEQ ID NO: 9898 - RNA, 18 nt, Artificial Sequence
  Synthetic
gccgaaugggggugugug

SEQ ID NO: 9899 - RNA, 19 nt, Artificial Sequence
  Synthetic
cgccgaaugggggugugug

SEQ ID NO: 9900 - RNA, 20 nt, Artificial Sequence
  Synthetic
acgccgaaugggggugugug

SEQ ID NO: 9901 - RNA, 21 nt, Artificial Sequence
  Synthetic
uacgccgaaugggggugugug

SEQ ID NO: 9902 - RNA, 22 nt, Artificial Sequence
  Synthetic
cuacgccgaaugggggugugug

SEQ ID NO: 9903 - RNA, 23 nt, Artificial Sequence
  Synthetic
acuacgccgaaugggggugugug

SEQ ID NO: 9904 - RNA, 24 nt, Artificial Sequence
  Synthetic
uacuacgccgaaugggggugugug

SEQ ID NO: 9905 - RNA, 18 nt, Artificial Sequence
  Synthetic
gggaggaggggcggauug

SEQ ID NO: 9906 - RNA, 19 nt, Artificial Sequence
  Synthetic
agggaggaggggcggauug

SEQ ID NO: 9907 - RNA, 20 nt, Artificial Sequence
  Synthetic
gagggaggaggggcggauug

SEQ ID NO: 9908 - RNA, 21 nt, Artificial Sequence
  Synthetic
ggagggaggaggggcggauug

SEQ ID NO: 9909 - RNA, 22 nt, Artificial Sequence
  Synthetic
gggagggaggaggggcggauug

SEQ ID NO: 9910 - RNA, 23 nt, Artificial Sequence
  Synthetic
ugggagggaggaggggcggauug

SEQ ID NO: 9911 - RNA, 24 nt, Artificial Sequence
  Synthetic
cugggagggaggaggggcggauug

SEQ ID NO: 9912 - RNA, 18 nt, Artificial Sequence
  Synthetic
ucgcacagguugcacuug

SEQ ID NO: 9913 - RNA, 19 nt, Artificial Sequence
  Synthetic
gucgcacagguugcacuug

SEQ ID NO: 9914 - RNA, 20 nt, Artificial Sequence
  Synthetic
ggucgcacagguugcacuug

SEQ ID NO: 9915 - RNA, 21 nt, Artificial Sequence
  Synthetic
uggucgcacagguugcacuug

SEQ ID NO: 9916 - RNA, 22 nt, Artificial Sequence
  Synthetic
guggucgcacagguugcacuug

SEQ ID NO: 9917 - RNA, 23 nt, Artificial Sequence
  Synthetic
cguggucgcacagguugcacuug

SEQ ID NO: 9918 - RNA, 24 nt, Artificial Sequence
  Synthetic
gcguggucgcacagguugcacuug

SEQ ID NO: 9919 - RNA, 18 nt, Artificial Sequence
  Synthetic
accagguugcucugaaau

SEQ ID NO: 9920 - RNA, 19 nt, Artificial Sequence
  Synthetic
caccagguugcucugaaau

SEQ ID NO: 9921 - RNA, 20 nt, Artificial Sequence
  Synthetic
ccaccagguugcucugaaau

SEQ ID NO: 9922 - RNA, 21 nt, Artificial Sequence
  Synthetic
accaccagguugcucugaaau

SEQ ID NO: 9923 - RNA, 22 nt, Artificial Sequence
  Synthetic
caccaccagguugcucugaaau

SEQ ID NO: 9924 - RNA, 23 nt, Artificial Sequence
  Synthetic
gcaccaccagguugcucugaaau

SEQ ID NO: 9925 - RNA, 24 nt, Artificial Sequence
  Synthetic
ugcaccaccagguugcucugaaau

SEQ ID NO: 9926 - RNA, 18 nt, Artificial Sequence
  Synthetic
cgggcccggaccacuaau

SEQ ID NO: 9927 - RNA, 19 nt, Artificial Sequence
  Synthetic
ccgggcccggaccacuaau

SEQ ID NO: 9928 - RNA, 20 nt, Artificial Sequence
  Synthetic
cccgggcccggaccacuaau

SEQ ID NO: 9929 - RNA, 21 nt, Artificial Sequence
  Synthetic
gcccgggcccggaccacuaau

SEQ ID NO: 9930 - RNA, 22 nt, Artificial Sequence
  Synthetic
ugcccgggcccggaccacuaau

SEQ ID NO: 9931 - RNA, 23 nt, Artificial Sequence
  Synthetic
cugcccgggcccggaccacuaau

SEQ ID NO: 9932 - RNA, 24 nt, Artificial Sequence
  Synthetic
ccugcccgggcccggaccacuaau

SEQ ID NO: 9933 - RNA, 18 nt, Artificial Sequence
  Synthetic
gggcucucgagcuuccau

SEQ ID NO: 9934 - RNA, 19 nt, Artificial Sequence
  Synthetic
agggcucucgagcuuccau

SEQ ID NO: 9935 - RNA, 20 nt, Artificial Sequence
  Synthetic
aagggcucucgagcuuccau

SEQ ID NO: 9936 - RNA, 21 nt, Artificial Sequence
  Synthetic
uaagggcucucgagcuuccau

SEQ ID NO: 9937 - RNA, 22 nt, Artificial Sequence
  Synthetic
uuaagggcucucgagcuuccau

SEQ ID NO: 9938 - RNA, 23 nt, Artificial Sequence
  Synthetic
cuuaagggcucucgagcuuccau

SEQ ID NO: 9939 - RNA, 24 nt, Artificial Sequence
  Synthetic
acuuaagggcucucgagcuuccau

SEQ ID NO: 9940 - RNA, 18 nt, Artificial Sequence
  Synthetic
gucggacuugaccgucau

SEQ ID NO: 9941 - RNA, 19 nt, Artificial Sequence
  Synthetic
cgucggacuugaccgucau

SEQ ID NO: 9942 - RNA, 20 nt, Artificial Sequence
  Synthetic
ucgucggacuugaccgucau

SEQ ID NO: 9943 - RNA, 21 nt, Artificial Sequence
  Synthetic
gucgucggacuugaccgucau

SEQ ID NO: 9944 - RNA, 22 nt, Artificial Sequence
  Synthetic
cgucgucggacuugaccgucau

SEQ ID NO: 9945 - RNA, 23 nt, Artificial Sequence
  Synthetic
ccgucgucggacuugaccgucau

SEQ ID NO: 9946 - RNA, 24 nt, Artificial Sequence
  Synthetic
accgucgucggacuugaccgucau

SEQ ID NO: 9947 - RNA, 18 nt, Artificial Sequence
  Synthetic
auagggcugggccggccu

SEQ ID NO: 9948 - RNA, 19 nt, Artificial Sequence
  Synthetic
cauagggcugggccggccu

SEQ ID NO: 9949 - RNA, 20 nt, Artificial Sequence
  Synthetic
gcauagggcugggccggccu

SEQ ID NO: 9950 - RNA, 21 nt, Artificial Sequence
  Synthetic
ugcauagggcugggccggccu

SEQ ID NO: 9951 - RNA, 22 nt, Artificial Sequence
  Synthetic
uugcauagggcugggccggccu

SEQ ID NO: 9952 - RNA, 23 nt, Artificial Sequence
  Synthetic
uuugcauagggcugggccggccu

SEQ ID NO: 9953 - RNA, 24 nt, Artificial Sequence
  Synthetic
cuuugcauagggcugggccggccu

SEQ ID NO: 9954 - RNA, 18 nt, Artificial Sequence
  Synthetic
ucuggagucuccgaagcu

SEQ ID NO: 9955 - RNA, 19 nt, Artificial Sequence
  Synthetic
gucuggagucuccgaagcu

SEQ ID NO: 9956 - RNA, 20 nt, Artificial Sequence
  Synthetic
ugucuggagucuccgaagcu

SEQ ID NO: 9957 - RNA, 21 nt, Artificial Sequence
  Synthetic
uugucuggagucuccgaagcu

SEQ ID NO: 9958 - RNA, 22 nt, Artificial Sequence
  Synthetic
auugucuggagucuccgaagcu

SEQ ID NO: 9959 - RNA, 23 nt, Artificial Sequence
  Synthetic
gauugucuggagucuccgaagcu

SEQ ID NO: 9960 - RNA, 24 nt, Artificial Sequence
  Synthetic
cgauugucuggagucuccgaagcu

SEQ ID NO: 9961 - RNA, 18 nt, Artificial Sequence
  Synthetic
ucucgagcuugaugcgcu

SEQ ID NO: 9962 - RNA, 19 nt, Artificial Sequence
  Synthetic
uucucgagcuugaugcgcu

SEQ ID NO: 9963 - RNA, 20 nt, Artificial Sequence
  Synthetic
cuucucgagcuugaugcgcu

SEQ ID NO: 9964 - RNA, 21 nt, Artificial Sequence
  Synthetic
ccuucucgagcuugaugcgcu

SEQ ID NO: 9965 - RNA, 22 nt, Artificial Sequence
  Synthetic
uccuucucgagcuugaugcgcu

SEQ ID NO: 9966 - RNA, 23 nt, Artificial Sequence
  Synthetic
cuccuucucgagcuugaugcgcu

SEQ ID NO: 9967 - RNA, 24 nt, Artificial Sequence
  Synthetic
acuccuucucgagcuugaugcgcu

SEQ ID NO: 9968 - RNA, 18 nt, Artificial Sequence
  Synthetic
uggacuugaccgggggcu

SEQ ID NO: 9969 - RNA, 19 nt, Artificial Sequence
  Synthetic
uuggacuugaccgggggcu

SEQ ID NO: 9970 - RNA, 20 nt, Artificial Sequence
  Synthetic
cuuggacuugaccgggggcu

SEQ ID NO: 9971 - RNA, 21 nt, Artificial Sequence
  Synthetic
acuuggacuugaccgggggcu

SEQ ID NO: 9972 - RNA, 22 nt, Artificial Sequence
  Synthetic
gacuuggacuugaccgggggcu

SEQ ID NO: 9973 - RNA, 23 nt, Artificial Sequence
  Synthetic
ugacuuggacuugaccgggggcu

SEQ ID NO: 9974 - RNA, 24 nt, Artificial Sequence
  Synthetic
augacuuggacuugaccgggggcu

SEQ ID NO: 9975 - RNA, 18 nt, Artificial Sequence
  Synthetic
ucccauggagagguggcu

SEQ ID NO: 9976 - RNA, 19 nt, Artificial Sequence
  Synthetic
aucccauggagagguggcu

SEQ ID NO: 9977 - RNA, 20 nt, Artificial Sequence
  Synthetic
aaucccauggagagguggcu

SEQ ID NO: 9978 - RNA, 21 nt, Artificial Sequence
  Synthetic
gaaucccauggagagguggcu

SEQ ID NO: 9979 - RNA, 22 nt, Artificial Sequence
  Synthetic
ugaaucccauggagagguggcu

SEQ ID NO: 9980 - RNA, 23 nt, Artificial Sequence
  Synthetic
augaaucccauggagagguggcu

SEQ ID NO: 9981 - RNA, 24 nt, Artificial Sequence
  Synthetic
uaugaaucccauggagagguggcu

SEQ ID NO: 9982 - RNA, 18 nt, Artificial Sequence
  Synthetic
gugcaccaccagguugcu

SEQ ID NO: 9983 - RNA, 19 nt, Artificial Sequence
  Synthetic
ggugcaccaccagguugcu

SEQ ID NO: 9984 - RNA, 20 nt, Artificial Sequence
  Synthetic
cggugcaccaccagguugcu

SEQ ID NO: 9985 - RNA, 21 nt, Artificial Sequence
  Synthetic
ccggugcaccaccagguugcu

SEQ ID NO: 9986 - RNA, 22 nt, Artificial Sequence
  Synthetic
gccggugcaccaccagguugcu

SEQ ID NO: 9987 - RNA, 23 nt, Artificial Sequence
  Synthetic
cgccggugcaccaccagguugcu

SEQ ID NO: 9988 - RNA, 24 nt, Artificial Sequence
  Synthetic
gcgccggugcaccaccagguugcu

SEQ ID NO: 9989 - RNA, 18 nt, Artificial Sequence
  Synthetic
aagcuaaggaagggaucu

SEQ ID NO: 9990 - RNA, 19 nt, Artificial Sequence
  Synthetic
gaagcuaaggaagggaucu

SEQ ID NO: 9991 - RNA, 20 nt, Artificial Sequence
  Synthetic
cgaagcuaaggaagggaucu

SEQ ID NO: 9992 - RNA, 21 nt, Artificial Sequence
  Synthetic
ccgaagcuaaggaagggaucu

SEQ ID NO: 9993 - RNA, 22 nt, Artificial Sequence
  Synthetic
uccgaagcuaaggaagggaucu

SEQ ID NO: 9994 - RNA, 23 nt, Artificial Sequence
  Synthetic
cuccgaagcuaaggaagggaucu

SEQ ID NO: 9995 - RNA, 24 nt, Artificial Sequence
  Synthetic
ucuccgaagcuaaggaagggaucu

SEQ ID NO: 9996 - RNA, 18 nt, Artificial Sequence
  Synthetic
ggcgauugucuggagucu

SEQ ID NO: 9997 - RNA, 19 nt, Artificial Sequence
  Synthetic
aggcgauugucuggagucu

SEQ ID NO: 9998 - RNA, 20 nt, Artificial Sequence
  Synthetic
aaggcgauugucuggagucu

SEQ ID NO: 9999 - RNA, 21 nt, Artificial Sequence
  Synthetic
aaaggcgauugucuggagucu

SEQ ID NO: 10000 - RNA, 22 nt, Artificial Sequence
  Synthetic
aaaaggcgauugucuggagucu

SEQ ID NO: 10001 - RNA, 23 nt, Artificial Sequence
  Synthetic
caaaaggcgauugucuggagucu

SEQ ID NO: 10002 - RNA, 24 nt, Artificial Sequence
  Synthetic
gcaaaaggcgauugucuggagucu

SEQ ID NO: 10003 - RNA, 18 nt, Artificial Sequence
  Synthetic
ccuccucguccccguucu

SEQ ID NO: 10004 - RNA, 19 nt, Artificial Sequence
  Synthetic
uccuccucguccccguucu

SEQ ID NO: 10005 - RNA, 20 nt, Artificial Sequence
  Synthetic
uuccuccucguccccguucu

SEQ ID NO: 10006 - RNA, 21 nt, Artificial Sequence
  Synthetic
cuuccuccucguccccguucu

SEQ ID NO: 10007 - RNA, 22 nt, Artificial Sequence
  Synthetic
ucuuccuccucguccccguucu

SEQ ID NO: 10008 - RNA, 23 nt, Artificial Sequence
  Synthetic
cucuuccuccucguccccguucu

SEQ ID NO: 10009 - RNA, 24 nt, Artificial Sequence
  Synthetic
ccucuuccuccucguccccguucu

SEQ ID NO: 10010 - RNA, 18 nt, Artificial Sequence
  Synthetic
agcgcaaacucccguucu

SEQ ID NO: 10011 - RNA, 19 nt, Artificial Sequence
  Synthetic
aagcgcaaacucccguucu

SEQ ID NO: 10012 - RNA, 20 nt, Artificial Sequence
  Synthetic
gaagcgcaaacucccguucu

SEQ ID NO: 10013 - RNA, 21 nt, Artificial Sequence
  Synthetic
agaagcgcaaacucccguucu

SEQ ID NO: 10014 - RNA, 22 nt, Artificial Sequence
  Synthetic
gagaagcgcaaacucccguucu

SEQ ID NO: 10015 - RNA, 23 nt, Artificial Sequence
  Synthetic
ggagaagcgcaaacucccguucu

SEQ ID NO: 10016 - RNA, 24 nt, Artificial Sequence
  Synthetic
uggagaagcgcaaacucccguucu

SEQ ID NO: 10017 - RNA, 18 nt, Artificial Sequence
  Synthetic
gggggcuucaaauuuucu

SEQ ID NO: 10018 - RNA, 19 nt, Artificial Sequence
  Synthetic
ugggggcuucaaauuuucu

SEQ ID NO: 10019 - RNA, 20 nt, Artificial Sequence
  Synthetic
cugggggcuucaaauuuucu

SEQ ID NO: 10020 - RNA, 21 nt, Artificial Sequence
  Synthetic
ccugggggcuucaaauuuucu

SEQ ID NO: 10021 - RNA, 22 nt, Artificial Sequence
  Synthetic
cccugggggcuucaaauuuucu

SEQ ID NO: 10022 - RNA, 23 nt, Artificial Sequence
  Synthetic
ccccugggggcuucaaauuuucu

SEQ ID NO: 10023 - RNA, 24 nt, Artificial Sequence
  Synthetic
accccugggggcuucaaauuuucu

SEQ ID NO: 10024 - RNA, 18 nt, Artificial Sequence
  Synthetic
aagaaccuagaaagaggu

SEQ ID NO: 10025 - RNA, 19 nt, Artificial Sequence
  Synthetic
gaagaaccuagaaagaggu

SEQ ID NO: 10026 - RNA, 20 nt, Artificial Sequence
  Synthetic
ugaagaaccuagaaagaggu

SEQ ID NO: 10027 - RNA, 21 nt, Artificial Sequence
  Synthetic
gugaagaaccuagaaagaggu

SEQ ID NO: 10028 - RNA, 22 nt, Artificial Sequence
  Synthetic
ugugaagaaccuagaaagaggu

SEQ ID NO: 10029 - RNA, 23 nt, Artificial Sequence
  Synthetic
gugugaagaaccuagaaagaggu

SEQ ID NO: 10030 - RNA, 24 nt, Artificial Sequence
  Synthetic
ugugugaagaaccuagaaagaggu

SEQ ID NO: 10031 - RNA, 18 nt, Artificial Sequence
  Synthetic
uccagcuccccgggcggu

SEQ ID NO: 10032 - RNA, 19 nt, Artificial Sequence
  Synthetic
guccagcuccccgggcggu

SEQ ID NO: 10033 - RNA, 20 nt, Artificial Sequence
  Synthetic
cguccagcuccccgggcggu

SEQ ID NO: 10034 - RNA, 21 nt, Artificial Sequence
  Synthetic
ccguccagcuccccgggcggu

SEQ ID NO: 10035 - RNA, 22 nt, Artificial Sequence
  Synthetic
uccguccagcuccccgggcggu

SEQ ID NO: 10036 - RNA, 23 nt, Artificial Sequence
  Synthetic
cuccguccagcuccccgggcggu

SEQ ID NO: 10037 - RNA, 24 nt, Artificial Sequence
  Synthetic
ccuccguccagcuccccgggcggu

SEQ ID NO: 10038 - RNA, 18 nt, Artificial Sequence
  Synthetic
gauaccaacccgcggggu

SEQ ID NO: 10039 - RNA, 19 nt, Artificial Sequence
  Synthetic
ggauaccaacccgcggggu

SEQ ID NO: 10040 - RNA, 20 nt, Artificial Sequence
  Synthetic
gggauaccaacccgcggggu

SEQ ID NO: 10041 - RNA, 21 nt, Artificial Sequence
  Synthetic
agggauaccaacccgcggggu

SEQ ID NO: 10042 - RNA, 22 nt, Artificial Sequence
  Synthetic
aagggauaccaacccgcggggu

SEQ ID NO: 10043 - RNA, 23 nt, Artificial Sequence
  Synthetic
gaagggauaccaacccgcggggu

SEQ ID NO: 10044 - RNA, 24 nt, Artificial Sequence
  Synthetic
ugaagggauaccaacccgcggggu

SEQ ID NO: 10045 - RNA, 18 nt, Artificial Sequence
  Synthetic
uacgccgaaugggggugu

SEQ ID NO: 10046 - RNA, 19 nt, Artificial Sequence
  Synthetic
cuacgccgaaugggggugu

SEQ ID NO: 10047 - RNA, 20 nt, Artificial Sequence
  Synthetic
acuacgccgaaugggggugu

SEQ ID NO: 10048 - RNA, 21 nt, Artificial Sequence
  Synthetic
uacuacgccgaaugggggugu

SEQ ID NO: 10049 - RNA, 22 nt, Artificial Sequence
  Synthetic
guacuacgccgaaugggggugu

SEQ ID NO: 10050 - RNA, 23 nt, Artificial Sequence
  Synthetic
gguacuacgccgaaugggggugu

SEQ ID NO: 10051 - RNA, 24 nt, Artificial Sequence
  Synthetic
ggguacuacgccgaaugggggugu

SEQ ID NO: 10052 - RNA, 18 nt, Artificial Sequence
  Synthetic
gaggcaaaaggcgauugu

SEQ ID NO: 10053 - RNA, 19 nt, Artificial Sequence
  Synthetic
ggaggcaaaaggcgauugu

SEQ ID NO: 10054 - RNA, 20 nt, Artificial Sequence
  Synthetic
aggaggcaaaaggcgauugu

SEQ ID NO: 10055 - RNA, 21 nt, Artificial Sequence
  Synthetic
gaggaggcaaaaggcgauugu

SEQ ID NO: 10056 - RNA, 22 nt, Artificial Sequence
  Synthetic
cgaggaggcaaaaggcgauugu

SEQ ID NO: 10057 - RNA, 23 nt, Artificial Sequence
  Synthetic
acgaggaggcaaaaggcgauugu

SEQ ID NO: 10058 - RNA, 24 nt, Artificial Sequence
  Synthetic
gacgaggaggcaaaaggcgauugu

SEQ ID NO: 10059 - RNA, 18 nt, Artificial Sequence
  Synthetic
caaauuuucucagaacuu

SEQ ID NO: 10060 - RNA, 19 nt, Artificial Sequence
  Synthetic
ucaaauuuucucagaacuu

SEQ ID NO: 10061 - RNA, 20 nt, Artificial Sequence
  Synthetic
uucaaauuuucucagaacuu

SEQ ID NO: 10062 - RNA, 21 nt, Artificial Sequence
  Synthetic
cuucaaauuuucucagaacuu

SEQ ID NO: 10063 - RNA, 22 nt, Artificial Sequence
  Synthetic
gcuucaaauuuucucagaacuu

SEQ ID NO: 10064 - RNA, 23 nt, Artificial Sequence
  Synthetic
ggcuucaaauuuucucagaacuu

SEQ ID NO: 10065 - RNA, 24 nt, Artificial Sequence
  Synthetic
gggcuucaaauuuucucagaacuu

SEQ ID NO: 10066 - RNA, 18 nt, Artificial Sequence
  Synthetic
cgcugcgucugcccucuu

SEQ ID NO: 10067 - RNA, 19 nt, Artificial Sequence
  Synthetic
ucgcugcgucugcccucuu

SEQ ID NO: 10068 - RNA, 20 nt, Artificial Sequence
  Synthetic
gucgcugcgucugcccucuu

SEQ ID NO: 10069 - RNA, 21 nt, Artificial Sequence
  Synthetic
ugucgcugcgucugcccucuu

SEQ ID NO: 10070 - RNA, 22 nt, Artificial Sequence
  Synthetic
gugucgcugcgucugcccucuu

SEQ ID NO: 10071 - RNA, 23 nt, Artificial Sequence
  Synthetic
agugucgcugcgucugcccucuu

SEQ ID NO: 10072 - RNA, 24 nt, Artificial Sequence
  Synthetic
aagugucgcugcgucugcccucuu

SEQ ID NO: 10073 - RNA, 18 nt, Artificial Sequence
  Synthetic
agucgcuggugccggguu

SEQ ID NO: 10074 - RNA, 19 nt, Artificial Sequence
  Synthetic
aagucgcuggugccggguu

SEQ ID NO: 10075 - RNA, 20 nt, Artificial Sequence
  Synthetic
caagucgcuggugccggguu

SEQ ID NO: 10076 - RNA, 21 nt, Artificial Sequence
  Synthetic
ccaagucgcuggugccggguu

SEQ ID NO: 10077 - RNA, 22 nt, Artificial Sequence
  Synthetic
accaagucgcuggugccggguu

SEQ ID NO: 10078 - RNA, 23 nt, Artificial Sequence
  Synthetic
caccaagucgcuggugccggguu

SEQ ID NO: 10079 - RNA, 24 nt, Artificial Sequence
  Synthetic
ccaccaagucgcuggugccggguu

SEQ ID NO: 10080 - RNA, 18 nt, Artificial Sequence
  Synthetic
cugcccagcagcagcuuu

SEQ ID NO: 10081 - RNA, 19 nt, Artificial Sequence
  Synthetic
gcugcccagcagcagcuuu

SEQ ID NO: 10082 - RNA, 20 nt, Artificial Sequence
  Synthetic
ggcugcccagcagcagcuuu

SEQ ID NO: 10083 - RNA, 21 nt, Artificial Sequence
  Synthetic
gggcugcccagcagcagcuuu

SEQ ID NO: 10084 - RNA, 22 nt, Artificial Sequence
  Synthetic
ggggcugcccagcagcagcuuu

SEQ ID NO: 10085 - RNA, 23 nt, Artificial Sequence
  Synthetic
uggggcugcccagcagcagcuuu

SEQ ID NO: 10086 - RNA, 24 nt, Artificial Sequence
  Synthetic
cuggggcugcccagcagcagcuuu

SEQ ID NO: 10087 - RNA, 18 nt, Artificial Sequence
  Synthetic
ggcaggcccagcucaaaa

SEQ ID NO: 10088 - RNA, 19 nt, Artificial Sequence
  Synthetic
gggcaggcccagcucaaaa

SEQ ID NO: 10089 - RNA, 20 nt, Artificial Sequence
  Synthetic
cgggcaggcccagcucaaaa

SEQ ID NO: 10090 - RNA, 21 nt, Artificial Sequence
  Synthetic
ccgggcaggcccagcucaaaa

SEQ ID NO: 10091 - RNA, 22 nt, Artificial Sequence
  Synthetic
cccgggcaggcccagcucaaaa

SEQ ID NO: 10092 - RNA, 23 nt, Artificial Sequence
  Synthetic
gcccgggcaggcccagcucaaaa

SEQ ID NO: 10093 - RNA, 24 nt, Artificial Sequence
  Synthetic
ggcccgggcaggcccagcucaaaa

SEQ ID NO: 10094 - RNA, 18 nt, Artificial Sequence
  Synthetic
uaagaaucuacuuagaaa

SEQ ID NO: 10095 - RNA, 19 nt, Artificial Sequence
  Synthetic
uuaagaaucuacuuagaaa

SEQ ID NO: 10096 - RNA, 20 nt, Artificial Sequence
  Synthetic
auuaagaaucuacuuagaaa

SEQ ID NO: 10097 - RNA, 21 nt, Artificial Sequence
  Synthetic
gauuaagaaucuacuuagaaa

SEQ ID NO: 10098 - RNA, 22 nt, Artificial Sequence
  Synthetic
ggauuaagaaucuacuuagaaa

SEQ ID NO: 10099 - RNA, 23 nt, Artificial Sequence
  Synthetic
uggauuaagaaucuacuuagaaa

SEQ ID NO: 10100 - RNA, 24 nt, Artificial Sequence
  Synthetic
auggauuaagaaucuacuuagaaa

SEQ ID NO: 10101 - RNA, 18 nt, Artificial Sequence
  Synthetic
cgggcaggcccagcucaa

SEQ ID NO: 10102 - RNA, 19 nt, Artificial Sequence
  Synthetic
ccgggcaggcccagcucaa

SEQ ID NO: 10103 - RNA, 20 nt, Artificial Sequence
  Synthetic
cccgggcaggcccagcucaa

SEQ ID NO: 10104 - RNA, 21 nt, Artificial Sequence
  Synthetic
gcccgggcaggcccagcucaa

SEQ ID NO: 10105 - RNA, 22 nt, Artificial Sequence
  Synthetic
ggcccgggcaggcccagcucaa

SEQ ID NO: 10106 - RNA, 23 nt, Artificial Sequence
  Synthetic
gggcccgggcaggcccagcucaa

SEQ ID NO: 10107 - RNA, 24 nt, Artificial Sequence
  Synthetic
cgggcccgggcaggcccagcucaa

SEQ ID NO: 10108 - RNA, 18 nt, Artificial Sequence
  Synthetic
gacgaggaagaggaagaa

SEQ ID NO: 10109 - RNA, 19 nt, Artificial Sequence
  Synthetic
cgacgaggaagaggaagaa

SEQ ID NO: 10110 - RNA, 20 nt, Artificial Sequence
  Synthetic
acgacgaggaagaggaagaa

SEQ ID NO: 10111 - RNA, 21 nt, Artificial Sequence
  Synthetic
gacgacgaggaagaggaagaa

SEQ ID NO: 10112 - RNA, 22 nt, Artificial Sequence
  Synthetic
ggacgacgaggaagaggaagaa

SEQ ID NO: 10113 - RNA, 23 nt, Artificial Sequence
  Synthetic
aggacgacgaggaagaggaagaa

SEQ ID NO: 10114 - RNA, 24 nt, Artificial Sequence
  Synthetic
gaggacgacgaggaagaggaagaa

SEQ ID NO: 10115 - RNA, 18 nt, Artificial Sequence
  Synthetic
caaccugaucccggagaa

SEQ ID NO: 10116 - RNA, 19 nt, Artificial Sequence
  Synthetic
ccaaccugaucccggagaa

SEQ ID NO: 10117 - RNA, 20 nt, Artificial Sequence
  Synthetic
cccaaccugaucccggagaa

SEQ ID NO: 10118 - RNA, 21 nt, Artificial Sequence
  Synthetic
ccccaaccugaucccggagaa

SEQ ID NO: 10119 - RNA, 22 nt, Artificial Sequence
  Synthetic
accccaaccugaucccggagaa

SEQ ID NO: 10120 - RNA, 23 nt, Artificial Sequence
  Synthetic
gaccccaaccugaucccggagaa

SEQ ID NO: 10121 - RNA, 24 nt, Artificial Sequence
  Synthetic
cgaccccaaccugaucccggagaa

SEQ ID NO: 10122 - RNA, 18 nt, Artificial Sequence
  Synthetic
ggagcacuccucggagaa

SEQ ID NO: 10123 - RNA, 19 nt, Artificial Sequence
  Synthetic
cggagcacuccucggagaa

SEQ ID NO: 10124 - RNA, 20 nt, Artificial Sequence
  Synthetic
ucggagcacuccucggagaa

SEQ ID NO: 10125 - RNA, 21 nt, Artificial Sequence
  Synthetic
gucggagcacuccucggagaa

SEQ ID NO: 10126 - RNA, 22 nt, Artificial Sequence
  Synthetic
cgucggagcacuccucggagaa

SEQ ID NO: 10127 - RNA, 23 nt, Artificial Sequence
  Synthetic
ucgucggagcacuccucggagaa

SEQ ID NO: 10128 - RNA, 24 nt, Artificial Sequence
  Synthetic
cucgucggagcacuccucggagaa

SEQ ID NO: 10129 - RNA, 18 nt, Artificial Sequence
  Synthetic
gaggaggacgacgaggaa

SEQ ID NO: 10130 - RNA, 19 nt, Artificial Sequence
  Synthetic
agaggaggacgacgaggaa

SEQ ID NO: 10131 - RNA, 20 nt, Artificial Sequence
  Synthetic
aagaggaggacgacgaggaa

SEQ ID NO: 10132 - RNA, 21 nt, Artificial Sequence
  Synthetic
gaagaggaggacgacgaggaa

SEQ ID NO: 10133 - RNA, 22 nt, Artificial Sequence
  Synthetic
ggaagaggaggacgacgaggaa

SEQ ID NO: 10134 - RNA, 23 nt, Artificial Sequence
  Synthetic
aggaagaggaggacgacgaggaa

SEQ ID NO: 10135 - RNA, 24 nt, Artificial Sequence
  Synthetic
gaggaagaggaggacgacgaggaa

SEQ ID NO: 10136 - RNA, 18 nt, Artificial Sequence
  Synthetic
gaggaagaagaggaggaa

SEQ ID NO: 10137 - RNA, 19 nt, Artificial Sequence
  Synthetic
agaggaagaagaggaggaa

SEQ ID NO: 10138 - RNA, 20 nt, Artificial Sequence
  Synthetic
aagaggaagaagaggaggaa

SEQ ID NO: 10139 - RNA, 21 nt, Artificial Sequence
  Synthetic
gaagaggaagaagaggaggaa

SEQ ID NO: 10140 - RNA, 22 nt, Artificial Sequence
  Synthetic
ggaagaggaagaagaggaggaa

SEQ ID NO: 10141 - RNA, 23 nt, Artificial Sequence
  Synthetic
aggaagaggaagaagaggaggaa

SEQ ID NO: 10142 - RNA, 24 nt, Artificial Sequence
  Synthetic
gaggaagaggaagaagaggaggaa

SEQ ID NO: 10143 - RNA, 18 nt, Artificial Sequence
  Synthetic
aacggggacgaggaggaa

SEQ ID NO: 10144 - RNA, 19 nt, Artificial Sequence
  Synthetic
gaacggggacgaggaggaa

SEQ ID NO: 10145 - RNA, 20 nt, Artificial Sequence
  Synthetic
agaacggggacgaggaggaa

SEQ ID NO: 10146 - RNA, 21 nt, Artificial Sequence
  Synthetic
gagaacggggacgaggaggaa

SEQ ID NO: 10147 - RNA, 22 nt, Artificial Sequence
  Synthetic
ggagaacggggacgaggaggaa

SEQ ID NO: 10148 - RNA, 23 nt, Artificial Sequence
  Synthetic
cggagaacggggacgaggaggaa

SEQ ID NO: 10149 - RNA, 24 nt, Artificial Sequence
  Synthetic
ccggagaacggggacgaggaggaa

SEQ ID NO: 10150 - RNA, 18 nt, Artificial Sequence
  Synthetic
ggcgcagcggcacgggaa

SEQ ID NO: 10151 - RNA, 19 nt, Artificial Sequence
  Synthetic
gggcgcagcggcacgggaa

SEQ ID NO: 10152 - RNA, 20 nt, Artificial Sequence
  Synthetic
ggggcgcagcggcacgggaa

SEQ ID NO: 10153 - RNA, 21 nt, Artificial Sequence
  Synthetic
cggggcgcagcggcacgggaa

SEQ ID NO: 10154 - RNA, 22 nt, Artificial Sequence
  Synthetic
ucggggcgcagcggcacgggaa

SEQ ID NO: 10155 - RNA, 23 nt, Artificial Sequence
  Synthetic
cucggggcgcagcggcacgggaa

SEQ ID NO: 10156 - RNA, 24 nt, Artificial Sequence
  Synthetic
ucucggggcgcagcggcacgggaa

SEQ ID NO: 10157 - RNA, 18 nt, Artificial Sequence
  Synthetic
cggccgcgaugcccaaca

SEQ ID NO: 10158 - RNA, 19 nt, Artificial Sequence
  Synthetic
ccggccgcgaugcccaaca

SEQ ID NO: 10159 - RNA, 20 nt, Artificial Sequence
  Synthetic
cccggccgcgaugcccaaca

SEQ ID NO: 10160 - RNA, 21 nt, Artificial Sequence
  Synthetic
ccccggccgcgaugcccaaca

SEQ ID NO: 10161 - RNA, 22 nt, Artificial Sequence
  Synthetic
cccccggccgcgaugcccaaca

SEQ ID NO: 10162 - RNA, 23 nt, Artificial Sequence
  Synthetic
gcccccggccgcgaugcccaaca

SEQ ID NO: 10163 - RNA, 24 nt, Artificial Sequence
  Synthetic
ugcccccggccgcgaugcccaaca

SEQ ID NO: 10164 - RNA, 18 nt, Artificial Sequence
  Synthetic
cuacuuagaaagcgaaca

SEQ ID NO: 10165 - RNA, 19 nt, Artificial Sequence
  Synthetic
ucuacuuagaaagcgaaca

SEQ ID NO: 10166 - RNA, 20 nt, Artificial Sequence
  Synthetic
aucuacuuagaaagcgaaca

SEQ ID NO: 10167 - RNA, 21 nt, Artificial Sequence
  Synthetic
aaucuacuuagaaagcgaaca

SEQ ID NO: 10168 - RNA, 22 nt, Artificial Sequence
  Synthetic
gaaucuacuuagaaagcgaaca

SEQ ID NO: 10169 - RNA, 23 nt, Artificial Sequence
  Synthetic
agaaucuacuuagaaagcgaaca

SEQ ID NO: 10170 - RNA, 24 nt, Artificial Sequence
  Synthetic
aagaaucuacuuagaaagcgaaca

SEQ ID NO: 10171 - RNA, 18 nt, Artificial Sequence
  Synthetic
ccccuguuuaguccacca

SEQ ID NO: 10172 - RNA, 19 nt, Artificial Sequence
  Synthetic
cccccuguuuaguccacca

SEQ ID NO: 10173 - RNA, 20 nt, Artificial Sequence
  Synthetic
ccccccuguuuaguccacca

SEQ ID NO: 10174 - RNA, 21 nt, Artificial Sequence
  Synthetic
cccccccuguuuaguccacca

SEQ ID NO: 10175 - RNA, 22 nt, Artificial Sequence
  Synthetic
ucccccccuguuuaguccacca

SEQ ID NO: 10176 - RNA, 23 nt, Artificial Sequence
  Synthetic
cucccccccuguuuaguccacca

SEQ ID NO: 10177 - RNA, 24 nt, Artificial Sequence
  Synthetic
acucccccccuguuuaguccacca

SEQ ID NO: 10178 - RNA, 18 nt, Artificial Sequence
  Synthetic
cauucggcguaguaccca

SEQ ID NO: 10179 - RNA, 19 nt, Artificial Sequence
  Synthetic
ccauucggcguaguaccca

SEQ ID NO: 10180 - RNA, 20 nt, Artificial Sequence
  Synthetic
cccauucggcguaguaccca

SEQ ID NO: 10181 - RNA, 21 nt, Artificial Sequence
  Synthetic
ccccauucggcguaguaccca

SEQ ID NO: 10182 - RNA, 22 nt, Artificial Sequence
  Synthetic
cccccauucggcguaguaccca

SEQ ID NO: 10183 - RNA, 23 nt, Artificial Sequence
  Synthetic
acccccauucggcguaguaccca

SEQ ID NO: 10184 - RNA, 24 nt, Artificial Sequence
  Synthetic
cacccccauucggcguaguaccca

SEQ ID NO: 10185 - RNA, 18 nt, Artificial Sequence
  Synthetic
ggccgaggccgagggcca

SEQ ID NO: 10186 - RNA, 19 nt, Artificial Sequence
  Synthetic
uggccgaggccgagggcca

SEQ ID NO: 10187 - RNA, 20 nt, Artificial Sequence
  Synthetic
cuggccgaggccgagggcca

SEQ ID NO: 10188 - RNA, 21 nt, Artificial Sequence
  Synthetic
ccuggccgaggccgagggcca

SEQ ID NO: 10189 - RNA, 22 nt, Artificial Sequence
  Synthetic
accuggccgaggccgagggcca

SEQ ID NO: 10190 - RNA, 23 nt, Artificial Sequence
  Synthetic
caccuggccgaggccgagggcca

SEQ ID NO: 10191 - RNA, 24 nt, Artificial Sequence
  Synthetic
ccaccuggccgaggccgagggcca

SEQ ID NO: 10192 - RNA, 18 nt, Artificial Sequence
  Synthetic
uuucucuugcaacacgca

SEQ ID NO: 10193 - RNA, 19 nt, Artificial Sequence
  Synthetic
guuucucuugcaacacgca

SEQ ID NO: 10194 - RNA, 20 nt, Artificial Sequence
  Synthetic
gguuucucuugcaacacgca

SEQ ID NO: 10195 - RNA, 21 nt, Artificial Sequence
  Synthetic
ugguuucucuugcaacacgca

SEQ ID NO: 10196 - RNA, 22 nt, Artificial Sequence
  Synthetic
augguuucucuugcaacacgca

SEQ ID NO: 10197 - RNA, 23 nt, Artificial Sequence
  Synthetic
caugguuucucuugcaacacgca

SEQ ID NO: 10198 - RNA, 24 nt, Artificial Sequence
  Synthetic
gcaugguuucucuugcaacacgca

SEQ ID NO: 10199 - RNA, 18 nt, Artificial Sequence
  Synthetic
acuuggacccccaccgca

SEQ ID NO: 10200 - RNA, 19 nt, Artificial Sequence
  Synthetic
cacuuggacccccaccgca

SEQ ID NO: 10201 - RNA, 20 nt, Artificial Sequence
  Synthetic
ucacuuggacccccaccgca

SEQ ID NO: 10202 - RNA, 21 nt, Artificial Sequence
  Synthetic
aucacuuggacccccaccgca

SEQ ID NO: 10203 - RNA, 22 nt, Artificial Sequence
  Synthetic
caucacuuggacccccaccgca

SEQ ID NO: 10204 - RNA, 23 nt, Artificial Sequence
  Synthetic
acaucacuuggacccccaccgca

SEQ ID NO: 10205 - RNA, 24 nt, Artificial Sequence
  Synthetic
gacaucacuuggacccccaccgca

SEQ ID NO: 10206 - RNA, 18 nt, Artificial Sequence
  Synthetic
ucucggggcgcagcggca

SEQ ID NO: 10207 - RNA, 19 nt, Artificial Sequence
  Synthetic
aucucggggcgcagcggca

SEQ ID NO: 10208 - RNA, 20 nt, Artificial Sequence
  Synthetic
gaucucggggcgcagcggca

SEQ ID NO: 10209 - RNA, 21 nt, Artificial Sequence
  Synthetic
ggaucucggggcgcagcggca

SEQ ID NO: 10210 - RNA, 22 nt, Artificial Sequence
  Synthetic
gggaucucggggcgcagcggca

SEQ ID NO: 10211 - RNA, 23 nt, Artificial Sequence
  Synthetic
agggaucucggggcgcagcggca

SEQ ID NO: 10212 - RNA, 24 nt, Artificial Sequence
  Synthetic
gagggaucucggggcgcagcggca

SEQ ID NO: 10213 - RNA, 18 nt, Artificial Sequence
  Synthetic
agacuuagagagcuggca

SEQ ID NO: 10214 - RNA, 19 nt, Artificial Sequence
  Synthetic
gagacuuagagagcuggca

SEQ ID NO: 10215 - RNA, 20 nt, Artificial Sequence
  Synthetic
ggagacuuagagagcuggca

SEQ ID NO: 10216 - RNA, 21 nt, Artificial Sequence
  Synthetic
aggagacuuagagagcuggca

SEQ ID NO: 10217 - RNA, 22 nt, Artificial Sequence
  Synthetic
uaggagacuuagagagcuggca

SEQ ID NO: 10218 - RNA, 23 nt, Artificial Sequence
  Synthetic
cuaggagacuuagagagcuggca

SEQ ID NO: 10219 - RNA, 24 nt, Artificial Sequence
  Synthetic
ucuaggagacuuagagagcuggca

SEQ ID NO: 10220 - RNA, 18 nt, Artificial Sequence
  Synthetic
gcuccaugcagcacuuca

SEQ ID NO: 10221 - RNA, 19 nt, Artificial Sequence
  Synthetic
agcuccaugcagcacuuca

SEQ ID NO: 10222 - RNA, 20 nt, Artificial Sequence
  Synthetic
cagcuccaugcagcacuuca

SEQ ID NO: 10223 - RNA, 21 nt, Artificial Sequence
  Synthetic
ucagcuccaugcagcacuuca

SEQ ID NO: 10224 - RNA, 22 nt, Artificial Sequence
  Synthetic
cucagcuccaugcagcacuuca

SEQ ID NO: 10225 - RNA, 23 nt, Artificial Sequence
  Synthetic
gcucagcuccaugcagcacuuca

SEQ ID NO: 10226 - RNA, 24 nt, Artificial Sequence
  Synthetic
ugcucagcuccaugcagcacuuca

SEQ ID NO: 10227 - RNA, 18 nt, Artificial Sequence
  Synthetic
ugguggccaaguucaaga

SEQ ID NO: 10228 - RNA, 19 nt, Artificial Sequence
  Synthetic
gugguggccaaguucaaga

SEQ ID NO: 10229 - RNA, 20 nt, Artificial Sequence
  Synthetic
cgugguggccaaguucaaga

SEQ ID NO: 10230 - RNA, 21 nt, Artificial Sequence
  Synthetic
ccgugguggccaaguucaaga

SEQ ID NO: 10231 - RNA, 22 nt, Artificial Sequence
  Synthetic
uccgugguggccaaguucaaga

SEQ ID NO: 10232 - RNA, 23 nt, Artificial Sequence
  Synthetic
guccgugguggccaaguucaaga

SEQ ID NO: 10233 - RNA, 24 nt, Artificial Sequence
  Synthetic
aguccgugguggccaaguucaaga

SEQ ID NO: 10234 - RNA, 18 nt, Artificial Sequence
  Synthetic
aggaggagcugacggaga

SEQ ID NO: 10235 - RNA, 19 nt, Artificial Sequence
  Synthetic
gaggaggagcugacggaga

SEQ ID NO: 10236 - RNA, 20 nt, Artificial Sequence
  Synthetic
ggaggaggagcugacggaga

SEQ ID NO: 10237 - RNA, 21 nt, Artificial Sequence
  Synthetic
aggaggaggagcugacggaga

SEQ ID NO: 10238 - RNA, 22 nt, Artificial Sequence
  Synthetic
gaggaggaggagcugacggaga

SEQ ID NO: 10239 - RNA, 23 nt, Artificial Sequence
  Synthetic
ggaggaggaggagcugacggaga

SEQ ID NO: 10240 - RNA, 24 nt, Artificial Sequence
  Synthetic
aggaggaggaggagcugacggaga

SEQ ID NO: 10241 - RNA, 18 nt, Artificial Sequence
  Synthetic
ccaaccugaucccggaga

SEQ ID NO: 10242 - RNA, 19 nt, Artificial Sequence
  Synthetic
cccaaccugaucccggaga

SEQ ID NO: 10243 - RNA, 20 nt, Artificial Sequence
  Synthetic
ccccaaccugaucccggaga

SEQ ID NO: 10244 - RNA, 21 nt, Artificial Sequence
  Synthetic
accccaaccugaucccggaga

SEQ ID NO: 10245 - RNA, 22 nt, Artificial Sequence
  Synthetic
gaccccaaccugaucccggaga

SEQ ID NO: 10246 - RNA, 23 nt, Artificial Sequence
  Synthetic
cgaccccaaccugaucccggaga

SEQ ID NO: 10247 - RNA, 24 nt, Artificial Sequence
  Synthetic
acgaccccaaccugaucccggaga

SEQ ID NO: 10248 - RNA, 18 nt, Artificial Sequence
  Synthetic
cggagcacuccucggaga

SEQ ID NO: 10249 - RNA, 19 nt, Artificial Sequence
  Synthetic
ucggagcacuccucggaga

SEQ ID NO: 10250 - RNA, 20 nt, Artificial Sequence
  Synthetic
gucggagcacuccucggaga

SEQ ID NO: 10251 - RNA, 21 nt, Artificial Sequence
  Synthetic
cgucggagcacuccucggaga

SEQ ID NO: 10252 - RNA, 22 nt, Artificial Sequence
  Synthetic
ucgucggagcacuccucggaga

SEQ ID NO: 10253 - RNA, 23 nt, Artificial Sequence
  Synthetic
cucgucggagcacuccucggaga

SEQ ID NO: 10254 - RNA, 24 nt, Artificial Sequence
  Synthetic
ccucgucggagcacuccucggaga

SEQ ID NO: 10255 - RNA, 18 nt, Artificial Sequence
  Synthetic
uaccaggaucaguaucga

SEQ ID NO: 10256 - RNA, 19 nt, Artificial Sequence
  Synthetic
auaccaggaucaguaucga

SEQ ID NO: 10257 - RNA, 20 nt, Artificial Sequence
  Synthetic
aauaccaggaucaguaucga

SEQ ID NO: 10258 - RNA, 21 nt, Artificial Sequence
  Synthetic
gaauaccaggaucaguaucga

SEQ ID NO: 10259 - RNA, 22 nt, Artificial Sequence
  Synthetic
agaauaccaggaucaguaucga

SEQ ID NO: 10260 - RNA, 23 nt, Artificial Sequence
  Synthetic
aagaauaccaggaucaguaucga

SEQ ID NO: 10261 - RNA, 24 nt, Artificial Sequence
  Synthetic
uaagaauaccaggaucaguaucga

SEQ ID NO: 10262 - RNA, 18 nt, Artificial Sequence
  Synthetic
uguguggcaguuuucgga

SEQ ID NO: 10263 - RNA, 19 nt, Artificial Sequence
  Synthetic
auguguggcaguuuucgga

SEQ ID NO: 10264 - RNA, 20 nt, Artificial Sequence
  Synthetic
gauguguggcaguuuucgga

SEQ ID NO: 10265 - RNA, 21 nt, Artificial Sequence
  Synthetic
agauguguggcaguuuucgga

SEQ ID NO: 10266 - RNA, 22 nt, Artificial Sequence
  Synthetic
aagauguguggcaguuuucgga

SEQ ID NO: 10267 - RNA, 23 nt, Artificial Sequence
  Synthetic
caagauguguggcaguuuucgga

SEQ ID NO: 10268 - RNA, 24 nt, Artificial Sequence
  Synthetic
ucaagauguguggcaguuuucgga

SEQ ID NO: 10269 - RNA, 18 nt, Artificial Sequence
  Synthetic
accgcccggggagcugga

SEQ ID NO: 10270 - RNA, 19 nt, Artificial Sequence
  Synthetic
caccgcccggggagcugga

SEQ ID NO: 10271 - RNA, 20 nt, Artificial Sequence
  Synthetic
acaccgcccggggagcugga

SEQ ID NO: 10272 - RNA, 21 nt, Artificial Sequence
  Synthetic
cacaccgcccggggagcugga

SEQ ID NO: 10273 - RNA, 22 nt, Artificial Sequence
  Synthetic
ccacaccgcccggggagcugga

SEQ ID NO: 10274 - RNA, 23 nt, Artificial Sequence
  Synthetic
uccacaccgcccggggagcugga

SEQ ID NO: 10275 - RNA, 24 nt, Artificial Sequence
  Synthetic
cuccacaccgcccggggagcugga

SEQ ID NO: 10276 - RNA, 18 nt, Artificial Sequence
  Synthetic
agcggcacgggaagugga

SEQ ID NO: 10277 - RNA, 19 nt, Artificial Sequence
  Synthetic
cagcggcacgggaagugga

SEQ ID NO: 10278 - RNA, 20 nt, Artificial Sequence
  Synthetic
gcagcggcacgggaagugga

SEQ ID NO: 10279 - RNA, 21 nt, Artificial Sequence
  Synthetic
cgcagcggcacgggaagugga

SEQ ID NO: 10280 - RNA, 22 nt, Artificial Sequence
  Synthetic
gcgcagcggcacgggaagugga

SEQ ID NO: 10281 - RNA, 23 nt, Artificial Sequence
  Synthetic
ggcgcagcggcacgggaagugga

SEQ ID NO: 10282 - RNA, 24 nt, Artificial Sequence
  Synthetic
gggcgcagcggcacgggaagugga

SEQ ID NO: 10283 - RNA, 18 nt, Artificial Sequence
  Synthetic
aggaggaggaggagcuga

SEQ ID NO: 10284 - RNA, 19 nt, Artificial Sequence
  Synthetic
gaggaggaggaggagcuga

SEQ ID NO: 10285 - RNA, 20 nt, Artificial Sequence
  Synthetic
agaggaggaggaggagcuga

SEQ ID NO: 10286 - RNA, 21 nt, Artificial Sequence
  Synthetic
aagaggaggaggaggagcuga

SEQ ID NO: 10287 - RNA, 22 nt, Artificial Sequence
  Synthetic
gaagaggaggaggaggagcuga

SEQ ID NO: 10288 - RNA, 23 nt, Artificial Sequence
  Synthetic
ggaagaggaggaggaggagcuga

SEQ ID NO: 10289 - RNA, 24 nt, Artificial Sequence
  Synthetic
aggaagaggaggaggaggagcuga

SEQ ID NO: 10290 - RNA, 18 nt, Artificial Sequence
  Synthetic
gguugaauccaauggcua

SEQ ID NO: 10291 - RNA, 19 nt, Artificial Sequence
  Synthetic
cgguugaauccaauggcua

SEQ ID NO: 10292 - RNA, 20 nt, Artificial Sequence
  Synthetic
gcgguugaauccaauggcua

SEQ ID NO: 10293 - RNA, 21 nt, Artificial Sequence
  Synthetic
ugcgguugaauccaauggcua

SEQ ID NO: 10294 - RNA, 22 nt, Artificial Sequence
  Synthetic
cugcgguugaauccaauggcua

SEQ ID NO: 10295 - RNA, 23 nt, Artificial Sequence
  Synthetic
gcugcgguugaauccaauggcua

SEQ ID NO: 10296 - RNA, 24 nt, Artificial Sequence
  Synthetic
ugcugcgguugaauccaauggcua

SEQ ID NO: 10297 - RNA, 18 nt, Artificial Sequence
  Synthetic
agaauaccaggaucagua

SEQ ID NO: 10298 - RNA, 19 nt, Artificial Sequence
  Synthetic
aagaauaccaggaucagua

SEQ ID NO: 10299 - RNA, 20 nt, Artificial Sequence
  Synthetic
uaagaauaccaggaucagua

SEQ ID NO: 10300 - RNA, 21 nt, Artificial Sequence
  Synthetic
cuaagaauaccaggaucagua

SEQ ID NO: 10301 - RNA, 22 nt, Artificial Sequence
  Synthetic
gcuaagaauaccaggaucagua

SEQ ID NO: 10302 - RNA, 23 nt, Artificial Sequence
  Synthetic
ugcuaagaauaccaggaucagua

SEQ ID NO: 10303 - RNA, 24 nt, Artificial Sequence
  Synthetic
cugcuaagaauaccaggaucagua

SEQ ID NO: 10304 - RNA, 18 nt, Artificial Sequence
  Synthetic
auuucucuaggagacuua

SEQ ID NO: 10305 - RNA, 19 nt, Artificial Sequence
  Synthetic
gauuucucuaggagacuua

SEQ ID NO: 10306 - RNA, 20 nt, Artificial Sequence
  Synthetic
ggauuucucuaggagacuua

SEQ ID NO: 10307 - RNA, 21 nt, Artificial Sequence
  Synthetic
uggauuucucuaggagacuua

SEQ ID NO: 10308 - RNA, 22 nt, Artificial Sequence
  Synthetic
auggauuucucuaggagacuua

SEQ ID NO: 10309 - RNA, 23 nt, Artificial Sequence
  Synthetic
cauggauuucucuaggagacuua

SEQ ID NO: 10310 - RNA, 24 nt, Artificial Sequence
  Synthetic
ccauggauuucucuaggagacuua

SEQ ID NO: 10311 - RNA, 18 nt, Artificial Sequence
  Synthetic
ccggccgcgaugcccaac

SEQ ID NO: 10312 - RNA, 19 nt, Artificial Sequence
  Synthetic
cccggccgcgaugcccaac

SEQ ID NO: 10313 - RNA, 20 nt, Artificial Sequence
  Synthetic
ccccggccgcgaugcccaac

SEQ ID NO: 10314 - RNA, 21 nt, Artificial Sequence
  Synthetic
cccccggccgcgaugcccaac

SEQ ID NO: 10315 - RNA, 22 nt, Artificial Sequence
  Synthetic
gcccccggccgcgaugcccaac

SEQ ID NO: 10316 - RNA, 23 nt, Artificial Sequence
  Synthetic
ugcccccggccgcgaugcccaac

SEQ ID NO: 10317 - RNA, 24 nt, Artificial Sequence
  Synthetic
cugcccccggccgcgaugcccaac

SEQ ID NO: 10318 - RNA, 18 nt, Artificial Sequence
  Synthetic
aaccugaucccggagaac

SEQ ID NO: 10319 - RNA, 19 nt, Artificial Sequence
  Synthetic
caaccugaucccggagaac

SEQ ID NO: 10320 - RNA, 20 nt, Artificial Sequence
  Synthetic
ccaaccugaucccggagaac

SEQ ID NO: 10321 - RNA, 21 nt, Artificial Sequence
  Synthetic
cccaaccugaucccggagaac

SEQ ID NO: 10322 - RNA, 22 nt, Artificial Sequence
  Synthetic
ccccaaccugaucccggagaac

SEQ ID NO: 10323 - RNA, 23 nt, Artificial Sequence
  Synthetic
accccaaccugaucccggagaac

SEQ ID NO: 10324 - RNA, 24 nt, Artificial Sequence
  Synthetic
gaccccaaccugaucccggagaac

SEQ ID NO: 10325 - RNA, 18 nt, Artificial Sequence
  Synthetic
ucuacuuagaaagcgaac

SEQ ID NO: 10326 - RNA, 19 nt, Artificial Sequence
  Synthetic
aucuacuuagaaagcgaac

SEQ ID NO: 10327 - RNA, 20 nt, Artificial Sequence
  Synthetic
aaucuacuuagaaagcgaac

SEQ ID NO: 10328 - RNA, 21 nt, Artificial Sequence
  Synthetic
gaaucuacuuagaaagcgaac

SEQ ID NO: 10329 - RNA, 22 nt, Artificial Sequence
  Synthetic
agaaucuacuuagaaagcgaac

SEQ ID NO: 10330 - RNA, 23 nt, Artificial Sequence
  Synthetic
aagaaucuacuuagaaagcgaac

SEQ ID NO: 10331 - RNA, 24 nt, Artificial Sequence
  Synthetic
uaagaaucuacuuagaaagcgaac

SEQ ID NO: 10332 - RNA, 18 nt, Artificial Sequence
  Synthetic
gaggcggcgcgccaccac

SEQ ID NO: 10333 - RNA, 19 nt, Artificial Sequence
  Synthetic
ggaggcggcgcgccaccac

SEQ ID NO: 10334 - RNA, 20 nt, Artificial Sequence
  Synthetic
uggaggcggcgcgccaccac

SEQ ID NO: 10335 - RNA, 21 nt, Artificial Sequence
  Synthetic
cuggaggcggcgcgccaccac

SEQ ID NO: 10336 - RNA, 22 nt, Artificial Sequence
  Synthetic
ccuggaggcggcgcgccaccac

SEQ ID NO: 10337 - RNA, 23 nt, Artificial Sequence
  Synthetic
gccuggaggcggcgcgccaccac

SEQ ID NO: 10338 - RNA, 24 nt, Artificial Sequence
  Synthetic
agccuggaggcggcgcgccaccac

SEQ ID NO: 10339 - RNA, 18 nt, Artificial Sequence
  Synthetic
gugcaccggcgcagccac

SEQ ID NO: 10340 - RNA, 19 nt, Artificial Sequence
  Synthetic
ggugcaccggcgcagccac

SEQ ID NO: 10341 - RNA, 20 nt, Artificial Sequence
  Synthetic
uggugcaccggcgcagccac

SEQ ID NO: 10342 - RNA, 21 nt, Artificial Sequence
  Synthetic
guggugcaccggcgcagccac

SEQ ID NO: 10343 - RNA, 22 nt, Artificial Sequence
  Synthetic
gguggugcaccggcgcagccac

SEQ ID NO: 10344 - RNA, 23 nt, Artificial Sequence
  Synthetic
ugguggugcaccggcgcagccac

SEQ ID NO: 10345 - RNA, 24 nt, Artificial Sequence
  Synthetic
cugguggugcaccggcgcagccac

SEQ ID NO: 10346 - RNA, 18 nt, Artificial Sequence
  Synthetic
agcaagcugaagcgccac

SEQ ID NO: 10347 - RNA, 19 nt, Artificial Sequence
  Synthetic
cagcaagcugaagcgccac

SEQ ID NO: 10348 - RNA, 20 nt, Artificial Sequence
  Synthetic
ccagcaagcugaagcgccac

SEQ ID NO: 10349 - RNA, 21 nt, Artificial Sequence
  Synthetic
gccagcaagcugaagcgccac

SEQ ID NO: 10350 - RNA, 22 nt, Artificial Sequence
  Synthetic
ggccagcaagcugaagcgccac

SEQ ID NO: 10351 - RNA, 23 nt, Artificial Sequence
  Synthetic
aggccagcaagcugaagcgccac

SEQ ID NO: 10352 - RNA, 24 nt, Artificial Sequence
  Synthetic
caggccagcaagcugaagcgccac

SEQ ID NO: 10353 - RNA, 18 nt, Artificial Sequence
  Synthetic
gccgaggccgagggccac

SEQ ID NO: 10354 - RNA, 19 nt, Artificial Sequence
  Synthetic
ggccgaggccgagggccac

SEQ ID NO: 10355 - RNA, 20 nt, Artificial Sequence
  Synthetic
uggccgaggccgagggccac

SEQ ID NO: 10356 - RNA, 21 nt, Artificial Sequence
  Synthetic
cuggccgaggccgagggccac

SEQ ID NO: 10357 - RNA, 22 nt, Artificial Sequence
  Synthetic
ccuggccgaggccgagggccac

SEQ ID NO: 10358 - RNA, 23 nt, Artificial Sequence
  Synthetic
accuggccgaggccgagggccac

SEQ ID NO: 10359 - RNA, 24 nt, Artificial Sequence
  Synthetic
caccuggccgaggccgagggccac

SEQ ID NO: 10360 - RNA, 18 nt, Artificial Sequence
  Synthetic
cucggggcgcagcggcac

SEQ ID NO: 10361 - RNA, 19 nt, Artificial Sequence
  Synthetic
ucucggggcgcagcggcac

SEQ ID NO: 10362 - RNA, 20 nt, Artificial Sequence
  Synthetic
aucucggggcgcagcggcac

SEQ ID NO: 10363 - RNA, 21 nt, Artificial Sequence
  Synthetic
gaucucggggcgcagcggcac

SEQ ID NO: 10364 - RNA, 22 nt, Artificial Sequence
  Synthetic
ggaucucggggcgcagcggcac

SEQ ID NO: 10365 - RNA, 23 nt, Artificial Sequence
  Synthetic
gggaucucggggcgcagcggcac

SEQ ID NO: 10366 - RNA, 24 nt, Artificial Sequence
  Synthetic
agggaucucggggcgcagcggcac

SEQ ID NO: 10367 - RNA, 18 nt, Artificial Sequence
  Synthetic
ccaccaccgagacaucac

SEQ ID NO: 10368 - RNA, 19 nt, Artificial Sequence
  Synthetic
uccaccaccgagacaucac

SEQ ID NO: 10369 - RNA, 20 nt, Artificial Sequence
  Synthetic
guccaccaccgagacaucac

SEQ ID NO: 10370 - RNA, 21 nt, Artificial Sequence
  Synthetic
aguccaccaccgagacaucac

SEQ ID NO: 10371 - RNA, 22 nt, Artificial Sequence
  Synthetic
uaguccaccaccgagacaucac

SEQ ID NO: 10372 - RNA, 23 nt, Artificial Sequence
  Synthetic
uuaguccaccaccgagacaucac

SEQ ID NO: 10373 - RNA, 24 nt, Artificial Sequence
  Synthetic
uuuaguccaccaccgagacaucac

SEQ ID NO: 10374 - RNA, 18 nt, Artificial Sequence
  Synthetic
gaggaagaggaggacgac

SEQ ID NO: 10375 - RNA, 19 nt, Artificial Sequence
  Synthetic
ggaggaagaggaggacgac

SEQ ID NO: 10376 - RNA, 20 nt, Artificial Sequence
  Synthetic
aggaggaagaggaggacgac

SEQ ID NO: 10377 - RNA, 21 nt, Artificial Sequence
  Synthetic
gaggaggaagaggaggacgac

SEQ ID NO: 10378 - RNA, 22 nt, Artificial Sequence
  Synthetic
cgaggaggaagaggaggacgac

SEQ ID NO: 10379 - RNA, 23 nt, Artificial Sequence
  Synthetic
acgaggaggaagaggaggacgac

SEQ ID NO: 10380 - RNA, 24 nt, Artificial Sequence
  Synthetic
gacgaggaggaagaggaggacgac

SEQ ID NO: 10381 - RNA, 18 nt, Artificial Sequence
  Synthetic
gucgugggcgugggcgac

SEQ ID NO: 10382 - RNA, 19 nt, Artificial Sequence
  Synthetic
ggucgugggcgugggcgac

SEQ ID NO: 10383 - RNA, 20 nt, Artificial Sequence
  Synthetic
cggucgugggcgugggcgac

SEQ ID NO: 10384 - RNA, 21 nt, Artificial Sequence
  Synthetic
gcggucgugggcgugggcgac

SEQ ID NO: 10385 - RNA, 22 nt, Artificial Sequence
  Synthetic
cgcggucgugggcgugggcgac

SEQ ID NO: 10386 - RNA, 23 nt, Artificial Sequence
  Synthetic
gcgcggucgugggcgugggcgac

SEQ ID NO: 10387 - RNA, 24 nt, Artificial Sequence
  Synthetic
ggcgcggucgugggcgugggcgac

SEQ ID NO: 10388 - RNA, 18 nt, Artificial Sequence
  Synthetic
aucccggagaacggggac

SEQ ID NO: 10389 - RNA, 19 nt, Artificial Sequence
  Synthetic
gaucccggagaacggggac

SEQ ID NO: 10390 - RNA, 20 nt, Artificial Sequence
  Synthetic
ugaucccggagaacggggac

SEQ ID NO: 10391 - RNA, 21 nt, Artificial Sequence
  Synthetic
cugaucccggagaacggggac

SEQ ID NO: 10392 - RNA, 22 nt, Artificial Sequence
  Synthetic
ccugaucccggagaacggggac

SEQ ID NO: 10393 - RNA, 23 nt, Artificial Sequence
  Synthetic
accugaucccggagaacggggac

SEQ ID NO: 10394 - RNA, 24 nt, Artificial Sequence
  Synthetic
aaccugaucccggagaacggggac

SEQ ID NO: 10395 - RNA, 18 nt, Artificial Sequence
  Synthetic
uggaggcggcgcgccacc

SEQ ID NO: 10396 - RNA, 19 nt, Artificial Sequence
  Synthetic
cuggaggcggcgcgccacc

SEQ ID NO: 10397 - RNA, 20 nt, Artificial Sequence
  Synthetic
ccuggaggcggcgcgccacc

SEQ ID NO: 10398 - RNA, 21 nt, Artificial Sequence
  Synthetic
gccuggaggcggcgcgccacc

SEQ ID NO: 10399 - RNA, 22 nt, Artificial Sequence
  Synthetic
agccuggaggcggcgcgccacc

SEQ ID NO: 10400 - RNA, 23 nt, Artificial Sequence
  Synthetic
gagccuggaggcggcgcgccacc

SEQ ID NO: 10401 - RNA, 24 nt, Artificial Sequence
  Synthetic
ugagccuggaggcggcgcgccacc

SEQ ID NO: 10402 - RNA, 18 nt, Artificial Sequence
  Synthetic
cccauucggcguaguacc

SEQ ID NO: 10403 - RNA, 19 nt, Artificial Sequence
  Synthetic
ccccauucggcguaguacc

SEQ ID NO: 10404 - RNA, 20 nt, Artificial Sequence
  Synthetic
cccccauucggcguaguacc

SEQ ID NO: 10405 - RNA, 21 nt, Artificial Sequence
  Synthetic
acccccauucggcguaguacc

SEQ ID NO: 10406 - RNA, 22 nt, Artificial Sequence
  Synthetic
cacccccauucggcguaguacc

SEQ ID NO: 10407 - RNA, 23 nt, Artificial Sequence
  Synthetic
acacccccauucggcguaguacc

SEQ ID NO: 10408 - RNA, 24 nt, Artificial Sequence
  Synthetic
cacacccccauucggcguaguacc

SEQ ID NO: 10409 - RNA, 18 nt, Artificial Sequence
  Synthetic
gagaaaauuugaagcccc

SEQ ID NO: 10410 - RNA, 19 nt, Artificial Sequence
  Synthetic
ugagaaaauuugaagcccc

SEQ ID NO: 10411 - RNA, 20 nt, Artificial Sequence
  Synthetic
cugagaaaauuugaagcccc

SEQ ID NO: 10412 - RNA, 21 nt, Artificial Sequence
  Synthetic
ucugagaaaauuugaagcccc

SEQ ID NO: 10413 - RNA, 22 nt, Artificial Sequence
  Synthetic
uucugagaaaauuugaagcccc

SEQ ID NO: 10414 - RNA, 23 nt, Artificial Sequence
  Synthetic
guucugagaaaauuugaagcccc

SEQ ID NO: 10415 - RNA, 24 nt, Artificial Sequence
  Synthetic
aguucugagaaaauuugaagcccc

SEQ ID NO: 10416 - RNA, 18 nt, Artificial Sequence
  Synthetic
cgcuucuccacaccgccc

SEQ ID NO: 10417 - RNA, 19 nt, Artificial Sequence
  Synthetic
gcgcuucuccacaccgccc

SEQ ID NO: 10418 - RNA, 20 nt, Artificial Sequence
  Synthetic
ugcgcuucuccacaccgccc

SEQ ID NO: 10419 - RNA, 21 nt, Artificial Sequence
  Synthetic
uugcgcuucuccacaccgccc

SEQ ID NO: 10420 - RNA, 22 nt, Artificial Sequence
  Synthetic
uuugcgcuucuccacaccgccc

SEQ ID NO: 10421 - RNA, 23 nt, Artificial Sequence
  Synthetic
guuugcgcuucuccacaccgccc

SEQ ID NO: 10422 - RNA, 24 nt, Artificial Sequence
  Synthetic
aguuugcgcuucuccacaccgccc

SEQ ID NO: 10423 - RNA, 18 nt, Artificial Sequence
  Synthetic
ucuccaccgccagcuccc

SEQ ID NO: 10424 - RNA, 19 nt, Artificial Sequence
  Synthetic
cucuccaccgccagcuccc

SEQ ID NO: 10425 - RNA, 20 nt, Artificial Sequence
  Synthetic
ucucuccaccgccagcuccc

SEQ ID NO: 10426 - RNA, 21 nt, Artificial Sequence
  Synthetic
gucucuccaccgccagcuccc

SEQ ID NO: 10427 - RNA, 22 nt, Artificial Sequence
  Synthetic
ggucucuccaccgccagcuccc

SEQ ID NO: 10428 - RNA, 23 nt, Artificial Sequence
  Synthetic
cggucucuccaccgccagcuccc

SEQ ID NO: 10429 - RNA, 24 nt, Artificial Sequence
  Synthetic
acggucucuccaccgccagcuccc

SEQ ID NO: 10430 - RNA, 18 nt, Artificial Sequence
  Synthetic
acggcuucgggcugagcc

SEQ ID NO: 10431 - RNA, 19 nt, Artificial Sequence
  Synthetic
uacggcuucgggcugagcc

SEQ ID NO: 10432 - RNA, 20 nt, Artificial Sequence
  Synthetic
cuacggcuucgggcugagcc

SEQ ID NO: 10433 - RNA, 21 nt, Artificial Sequence
  Synthetic
acuacggcuucgggcugagcc

SEQ ID NO: 10434 - RNA, 22 nt, Artificial Sequence
  Synthetic
gacuacggcuucgggcugagcc

SEQ ID NO: 10435 - RNA, 23 nt, Artificial Sequence
  Synthetic
ggacuacggcuucgggcugagcc

SEQ ID NO: 10436 - RNA, 24 nt, Artificial Sequence
  Synthetic
uggacuacggcuucgggcugagcc

SEQ ID NO: 10437 - RNA, 18 nt, Artificial Sequence
  Synthetic
gcgcuucuccacaccgcc

SEQ ID NO: 10438 - RNA, 19 nt, Artificial Sequence
  Synthetic
ugcgcuucuccacaccgcc

SEQ ID NO: 10439 - RNA, 20 nt, Artificial Sequence
  Synthetic
uugcgcuucuccacaccgcc

SEQ ID NO: 10440 - RNA, 21 nt, Artificial Sequence
  Synthetic
uuugcgcuucuccacaccgcc

SEQ ID NO: 10441 - RNA, 22 nt, Artificial Sequence
  Synthetic
guuugcgcuucuccacaccgcc

SEQ ID NO: 10442 - RNA, 23 nt, Artificial Sequence
  Synthetic
aguuugcgcuucuccacaccgcc

SEQ ID NO: 10443 - RNA, 24 nt, Artificial Sequence
  Synthetic
gaguuugcgcuucuccacaccgcc

SEQ ID NO: 10444 - RNA, 18 nt, Artificial Sequence
  Synthetic
cccaccgcauagagcgcc

SEQ ID NO: 10445 - RNA, 19 nt, Artificial Sequence
  Synthetic
ccccaccgcauagagcgcc

SEQ ID NO: 10446 - RNA, 20 nt, Artificial Sequence
  Synthetic
cccccaccgcauagagcgcc

SEQ ID NO: 10447 - RNA, 21 nt, Artificial Sequence
  Synthetic
acccccaccgcauagagcgcc

SEQ ID NO: 10448 - RNA, 22 nt, Artificial Sequence
  Synthetic
gacccccaccgcauagagcgcc

SEQ ID NO: 10449 - RNA, 23 nt, Artificial Sequence
  Synthetic
ggacccccaccgcauagagcgcc

SEQ ID NO: 10450 - RNA, 24 nt, Artificial Sequence
  Synthetic
uggacccccaccgcauagagcgcc

SEQ ID NO: 10451 - RNA, 18 nt, Artificial Sequence
  Synthetic
ggccaccuggccgaggcc

SEQ ID NO: 10452 - RNA, 19 nt, Artificial Sequence
  Synthetic
cggccaccuggccgaggcc

SEQ ID NO: 10453 - RNA, 20 nt, Artificial Sequence
  Synthetic
gcggccaccuggccgaggcc

SEQ ID NO: 10454 - RNA, 21 nt, Artificial Sequence
  Synthetic
cgcggccaccuggccgaggcc

SEQ ID NO: 10455 - RNA, 22 nt, Artificial Sequence
  Synthetic
gcgcggccaccuggccgaggcc

SEQ ID NO: 10456 - RNA, 23 nt, Artificial Sequence
  Synthetic
agcgcggccaccuggccgaggcc

SEQ ID NO: 10457 - RNA, 24 nt, Artificial Sequence
  Synthetic
aagcgcggccaccuggccgaggcc

SEQ ID NO: 10458 - RNA, 18 nt, Artificial Sequence
  Synthetic
uccccgggcgagucggcc

SEQ ID NO: 10459 - RNA, 19 nt, Artificial Sequence
  Synthetic
cuccccgggcgagucggcc

SEQ ID NO: 10460 - RNA, 20 nt, Artificial Sequence
  Synthetic
gcuccccgggcgagucggcc

SEQ ID NO: 10461 - RNA, 21 nt, Artificial Sequence
  Synthetic
ugcuccccgggcgagucggcc

SEQ ID NO: 10462 - RNA, 22 nt, Artificial Sequence
  Synthetic
cugcuccccgggcgagucggcc

SEQ ID NO: 10463 - RNA, 23 nt, Artificial Sequence
  Synthetic
gcugcuccccgggcgagucggcc

SEQ ID NO: 10464 - RNA, 24 nt, Artificial Sequence
  Synthetic
ggcugcuccccgggcgagucggcc

SEQ ID NO: 10465 - RNA, 18 nt, Artificial Sequence
  Synthetic
acgaccccaaccugaucc

SEQ ID NO: 10466 - RNA, 19 nt, Artificial Sequence
  Synthetic
aacgaccccaaccugaucc

SEQ ID NO: 10467 - RNA, 20 nt, Artificial Sequence
  Synthetic
gaacgaccccaaccugaucc

SEQ ID NO: 10468 - RNA, 21 nt, Artificial Sequence
  Synthetic
agaacgaccccaaccugaucc

SEQ ID NO: 10469 - RNA, 22 nt, Artificial Sequence
  Synthetic
gagaacgaccccaaccugaucc

SEQ ID NO: 10470 - RNA, 23 nt, Artificial Sequence
  Synthetic
cgagaacgaccccaaccugaucc

SEQ ID NO: 10471 - RNA, 24 nt, Artificial Sequence
  Synthetic
gcgagaacgaccccaaccugaucc

SEQ ID NO: 10472 - RNA, 18 nt, Artificial Sequence
  Synthetic
uccucgucggagcacucc

SEQ ID NO: 10473 - RNA, 19 nt, Artificial Sequence
  Synthetic
cuccucgucggagcacucc

SEQ ID NO: 10474 - RNA, 20 nt, Artificial Sequence
  Synthetic
ccuccucgucggagcacucc

SEQ ID NO: 10475 - RNA, 21 nt, Artificial Sequence
  Synthetic
gccuccucgucggagcacucc

SEQ ID NO: 10476 - RNA, 22 nt, Artificial Sequence
  Synthetic
ugccuccucgucggagcacucc

SEQ ID NO: 10477 - RNA, 23 nt, Artificial Sequence
  Synthetic
uugccuccucgucggagcacucc

SEQ ID NO: 10478 - RNA, 24 nt, Artificial Sequence
  Synthetic
uuugccuccucgucggagcacucc

SEQ ID NO: 10479 - RNA, 18 nt, Artificial Sequence
  Synthetic
cucuccaccgccagcucc

SEQ ID NO: 10480 - RNA, 19 nt, Artificial Sequence
  Synthetic
ucucuccaccgccagcucc

SEQ ID NO: 10481 - RNA, 20 nt, Artificial Sequence
  Synthetic
gucucuccaccgccagcucc

SEQ ID NO: 10482 - RNA, 21 nt, Artificial Sequence
  Synthetic
ggucucuccaccgccagcucc

SEQ ID NO: 10483 - RNA, 22 nt, Artificial Sequence
  Synthetic
cggucucuccaccgccagcucc

SEQ ID NO: 10484 - RNA, 23 nt, Artificial Sequence
  Synthetic
acggucucuccaccgccagcucc

SEQ ID NO: 10485 - RNA, 24 nt, Artificial Sequence
  Synthetic
gacggucucuccaccgccagcucc

SEQ ID NO: 10486 - RNA, 18 nt, Artificial Sequence
  Synthetic
aauggccgcggcugcucc

SEQ ID NO: 10487 - RNA, 19 nt, Artificial Sequence
  Synthetic
uaauggccgcggcugcucc

SEQ ID NO: 10488 - RNA, 20 nt, Artificial Sequence
  Synthetic
uuaauggccgcggcugcucc

SEQ ID NO: 10489 - RNA, 21 nt, Artificial Sequence
  Synthetic
guuaauggccgcggcugcucc

SEQ ID NO: 10490 - RNA, 22 nt, Artificial Sequence
  Synthetic
uguuaauggccgcggcugcucc

SEQ ID NO: 10491 - RNA, 23 nt, Artificial Sequence
  Synthetic
cuguuaauggccgcggcugcucc

SEQ ID NO: 10492 - RNA, 24 nt, Artificial Sequence
  Synthetic
acuguuaauggccgcggcugcucc

SEQ ID NO: 10493 - RNA, 18 nt, Artificial Sequence
  Synthetic
cuucccagccaccucucc

SEQ ID NO: 10494 - RNA, 19 nt, Artificial Sequence
  Synthetic
ccuucccagccaccucucc

SEQ ID NO: 10495 - RNA, 20 nt, Artificial Sequence
  Synthetic
uccuucccagccaccucucc

SEQ ID NO: 10496 - RNA, 21 nt, Artificial Sequence
  Synthetic
guccuucccagccaccucucc

SEQ ID NO: 10497 - RNA, 22 nt, Artificial Sequence
  Synthetic
uguccuucccagccaccucucc

SEQ ID NO: 10498 - RNA, 23 nt, Artificial Sequence
  Synthetic
auguccuucccagccaccucucc

SEQ ID NO: 10499 - RNA, 24 nt, Artificial Sequence
  Synthetic
aauguccuucccagccaccucucc

SEQ ID NO: 10500 - RNA, 18 nt, Artificial Sequence
  Synthetic
ucucuaagcgcaucaagc

SEQ ID NO: 10501 - RNA, 19 nt, Artificial Sequence
  Synthetic
uucucuaagcgcaucaagc

SEQ ID NO: 10502 - RNA, 20 nt, Artificial Sequence
  Synthetic
cuucucuaagcgcaucaagc

SEQ ID NO: 10503 - RNA, 21 nt, Artificial Sequence
  Synthetic
ccuucucuaagcgcaucaagc

SEQ ID NO: 10504 - RNA, 22 nt, Artificial Sequence
  Synthetic
cccuucucuaagcgcaucaagc

SEQ ID NO: 10505 - RNA, 23 nt, Artificial Sequence
  Synthetic
ccccuucucuaagcgcaucaagc

SEQ ID NO: 10506 - RNA, 24 nt, Artificial Sequence
  Synthetic
gccccuucucuaagcgcaucaagc

SEQ ID NO: 10507 - RNA, 18 nt, Artificial Sequence
  Synthetic
caguuuucggauggaagc

SEQ ID NO: 10508 - RNA, 19 nt, Artificial Sequence
  Synthetic
gcaguuuucggauggaagc

SEQ ID NO: 10509 - RNA, 20 nt, Artificial Sequence
  Synthetic
ggcaguuuucggauggaagc

SEQ ID NO: 10510 - RNA, 21 nt, Artificial Sequence
  Synthetic
uggcaguuuucggauggaagc

SEQ ID NO: 10511 - RNA, 22 nt, Artificial Sequence
  Synthetic
guggcaguuuucggauggaagc

SEQ ID NO: 10512 - RNA, 23 nt, Artificial Sequence
  Synthetic
uguggcaguuuucggauggaagc

SEQ ID NO: 10513 - RNA, 24 nt, Artificial Sequence
  Synthetic
guguggcaguuuucggauggaagc

SEQ ID NO: 10514 - RNA, 18 nt, Artificial Sequence
  Synthetic
guggccaaguucaagagc

SEQ ID NO: 10515 - RNA, 19 nt, Artificial Sequence
  Synthetic
gguggccaaguucaagagc

SEQ ID NO: 10516 - RNA, 20 nt, Artificial Sequence
  Synthetic
ugguggccaaguucaagagc

SEQ ID NO: 10517 - RNA, 21 nt, Artificial Sequence
  Synthetic
gugguggccaaguucaagagc

SEQ ID NO: 10518 - RNA, 22 nt, Artificial Sequence
  Synthetic
cgugguggccaaguucaagagc

SEQ ID NO: 10519 - RNA, 23 nt, Artificial Sequence
  Synthetic
ccgugguggccaaguucaagagc

SEQ ID NO: 10520 - RNA, 24 nt, Artificial Sequence
  Synthetic
uccgugguggccaaguucaagagc

SEQ ID NO: 10521 - RNA, 18 nt, Artificial Sequence
  Synthetic
gaggagcugacggagagc

SEQ ID NO: 10522 - RNA, 19 nt, Artificial Sequence
  Synthetic
ggaggagcugacggagagc

SEQ ID NO: 10523 - RNA, 20 nt, Artificial Sequence
  Synthetic
aggaggagcugacggagagc

SEQ ID NO: 10524 - RNA, 21 nt, Artificial Sequence
  Synthetic
gaggaggagcugacggagagc

SEQ ID NO: 10525 - RNA, 22 nt, Artificial Sequence
  Synthetic
ggaggaggagcugacggagagc

SEQ ID NO: 10526 - RNA, 23 nt, Artificial Sequence
  Synthetic
aggaggaggagcugacggagagc

SEQ ID NO: 10527 - RNA, 24 nt, Artificial Sequence
  Synthetic
gaggaggaggagcugacggagagc

SEQ ID NO: 10528 - RNA, 18 nt, Artificial Sequence
  Synthetic
uacggcuucgggcugagc

SEQ ID NO: 10529 - RNA, 19 nt, Artificial Sequence
  Synthetic
cuacggcuucgggcugagc

SEQ ID NO: 10530 - RNA, 20 nt, Artificial Sequence
  Synthetic
acuacggcuucgggcugagc

SEQ ID NO: 10531 - RNA, 21 nt, Artificial Sequence
  Synthetic
gacuacggcuucgggcugagc

SEQ ID NO: 10532 - RNA, 22 nt, Artificial Sequence
  Synthetic
ggacuacggcuucgggcugagc

SEQ ID NO: 10533 - RNA, 23 nt, Artificial Sequence
  Synthetic
uggacuacggcuucgggcugagc

SEQ ID NO: 10534 - RNA, 24 nt, Artificial Sequence
  Synthetic
guggacuacggcuucgggcugagc

SEQ ID NO: 10535 - RNA, 18 nt, Artificial Sequence
  Synthetic
ugcgcuucuccacaccgc

SEQ ID NO: 10536 - RNA, 19 nt, Artificial Sequence
  Synthetic
uugcgcuucuccacaccgc

SEQ ID NO: 10537 - RNA, 20 nt, Artificial Sequence
  Synthetic
uuugcgcuucuccacaccgc

SEQ ID NO: 10538 - RNA, 21 nt, Artificial Sequence
  Synthetic
guuugcgcuucuccacaccgc

SEQ ID NO: 10539 - RNA, 22 nt, Artificial Sequence
  Synthetic
aguuugcgcuucuccacaccgc

SEQ ID NO: 10540 - RNA, 23 nt, Artificial Sequence
  Synthetic
gaguuugcgcuucuccacaccgc

SEQ ID NO: 10541 - RNA, 24 nt, Artificial Sequence
  Synthetic
ggaguuugcgcuucuccacaccgc

SEQ ID NO: 10542 - RNA, 18 nt, Artificial Sequence
  Synthetic
ccccaccgcauagagcgc

SEQ ID NO: 10543 - RNA, 19 nt, Artificial Sequence
  Synthetic
cccccaccgcauagagcgc

SEQ ID NO: 10544 - RNA, 20 nt, Artificial Sequence
  Synthetic
acccccaccgcauagagcgc

SEQ ID NO: 10545 - RNA, 21 nt, Artificial Sequence
  Synthetic
gacccccaccgcauagagcgc

SEQ ID NO: 10546 - RNA, 22 nt, Artificial Sequence
  Synthetic
ggacccccaccgcauagagcgc

SEQ ID NO: 10547 - RNA, 23 nt, Artificial Sequence
  Synthetic
uggacccccaccgcauagagcgc

SEQ ID NO: 10548 - RNA, 24 nt, Artificial Sequence
  Synthetic
uuggacccccaccgcauagagcgc

SEQ ID NO: 10549 - RNA, 18 nt, Artificial Sequence
  Synthetic
aucucggggcgcagcggc

SEQ ID NO: 10550 - RNA, 19 nt, Artificial Sequence
  Synthetic
gaucucggggcgcagcggc

SEQ ID NO: 10551 - RNA, 20 nt, Artificial Sequence
  Synthetic
ggaucucggggcgcagcggc

SEQ ID NO: 10552 - RNA, 21 nt, Artificial Sequence
  Synthetic
gggaucucggggcgcagcggc

SEQ ID NO: 10553 - RNA, 22 nt, Artificial Sequence
  Synthetic
agggaucucggggcgcagcggc

SEQ ID NO: 10554 - RNA, 23 nt, Artificial Sequence
  Synthetic
gagggaucucggggcgcagcggc

SEQ ID NO: 10555 - RNA, 24 nt, Artificial Sequence
  Synthetic
ggagggaucucggggcgcagcggc

SEQ ID NO: 10556 - RNA, 18 nt, Artificial Sequence
  Synthetic
cggcgcagccacacgggc

SEQ ID NO: 10557 - RNA, 19 nt, Artificial Sequence
  Synthetic
ccggcgcagccacacgggc

SEQ ID NO: 10558 - RNA, 20 nt, Artificial Sequence
  Synthetic
accggcgcagccacacgggc

SEQ ID NO: 10559 - RNA, 21 nt, Artificial Sequence
  Synthetic
caccggcgcagccacacgggc

SEQ ID NO: 10560 - RNA, 22 nt, Artificial Sequence
  Synthetic
gcaccggcgcagccacacgggc

SEQ ID NO: 10561 - RNA, 23 nt, Artificial Sequence
  Synthetic
ugcaccggcgcagccacacgggc

SEQ ID NO: 10562 - RNA, 24 nt, Artificial Sequence
  Synthetic
gugcaccggcgcagccacacgggc

SEQ ID NO: 10563 - RNA, 18 nt, Artificial Sequence
  Synthetic
cauauuagugguccgggc

SEQ ID NO: 10564 - RNA, 19 nt, Artificial Sequence
  Synthetic
ccauauuagugguccgggc

SEQ ID NO: 10565 - RNA, 20 nt, Artificial Sequence
  Synthetic
cccauauuagugguccgggc

SEQ ID NO: 10566 - RNA, 21 nt, Artificial Sequence
  Synthetic
ccccauauuagugguccgggc

SEQ ID NO: 10567 - RNA, 22 nt, Artificial Sequence
  Synthetic
gccccauauuagugguccgggc

SEQ ID NO: 10568 - RNA, 23 nt, Artificial Sequence
  Synthetic
cgccccauauuagugguccgggc

SEQ ID NO: 10569 - RNA, 24 nt, Artificial Sequence
  Synthetic
acgccccauauuagugguccgggc

SEQ ID NO: 10570 - RNA, 18 nt, Artificial Sequence
  Synthetic
uuccaccagguccugggc

SEQ ID NO: 10571 - RNA, 19 nt, Artificial Sequence
  Synthetic
cuuccaccagguccugggc

SEQ ID NO: 10572 - RNA, 20 nt, Artificial Sequence
  Synthetic
ccuuccaccagguccugggc

SEQ ID NO: 10573 - RNA, 21 nt, Artificial Sequence
  Synthetic
gccuuccaccagguccugggc

SEQ ID NO: 10574 - RNA, 22 nt, Artificial Sequence
  Synthetic
ggccuuccaccagguccugggc

SEQ ID NO: 10575 - RNA, 23 nt, Artificial Sequence
  Synthetic
aggccuuccaccagguccugggc

SEQ ID NO: 10576 - RNA, 24 nt, Artificial Sequence
  Synthetic
gaggccuuccaccagguccugggc

SEQ ID NO: 10577 - RNA, 18 nt, Artificial Sequence
  Synthetic
cggggcgcggucgugggc

SEQ ID NO: 10578 - RNA, 19 nt, Artificial Sequence
  Synthetic
gcggggcgcggucgugggc

SEQ ID NO: 10579 - RNA, 20 nt, Artificial Sequence
  Synthetic
cgcggggcgcggucgugggc

SEQ ID NO: 10580 - RNA, 21 nt, Artificial Sequence
  Synthetic
ucgcggggcgcggucgugggc

SEQ ID NO: 10581 - RNA, 22 nt, Artificial Sequence
  Synthetic
cucgcggggcgcggucgugggc

SEQ ID NO: 10582 - RNA, 23 nt, Artificial Sequence
  Synthetic
gcucgcggggcgcggucgugggc

SEQ ID NO: 10583 - RNA, 24 nt, Artificial Sequence
  Synthetic
agcucgcggggcgcggucgugggc

SEQ ID NO: 10584 - RNA, 18 nt, Artificial Sequence
  Synthetic
gagacuuagagagcuggc

SEQ ID NO: 10585 - RNA, 19 nt, Artificial Sequence
  Synthetic
ggagacuuagagagcuggc

SEQ ID NO: 10586 - RNA, 20 nt, Artificial Sequence
  Synthetic
aggagacuuagagagcuggc

SEQ ID NO: 10587 - RNA, 21 nt, Artificial Sequence
  Synthetic
uaggagacuuagagagcuggc

SEQ ID NO: 10588 - RNA, 22 nt, Artificial Sequence
  Synthetic
cuaggagacuuagagagcuggc

SEQ ID NO: 10589 - RNA, 23 nt, Artificial Sequence
  Synthetic
ucuaggagacuuagagagcuggc

SEQ ID NO: 10590 - RNA, 24 nt, Artificial Sequence
  Synthetic
cucuaggagacuuagagagcuggc

SEQ ID NO: 10591 - RNA, 18 nt, Artificial Sequence
  Synthetic
gagcuggacggagggauc

SEQ ID NO: 10592 - RNA, 19 nt, Artificial Sequence
  Synthetic
ggagcuggacggagggauc

SEQ ID NO: 10593 - RNA, 20 nt, Artificial Sequence
  Synthetic
gggagcuggacggagggauc

SEQ ID NO: 10594 - RNA, 21 nt, Artificial Sequence
  Synthetic
ggggagcuggacggagggauc

SEQ ID NO: 10595 - RNA, 22 nt, Artificial Sequence
  Synthetic
cggggagcuggacggagggauc

SEQ ID NO: 10596 - RNA, 23 nt, Artificial Sequence
  Synthetic
ccggggagcuggacggagggauc

SEQ ID NO: 10597 - RNA, 24 nt, Artificial Sequence
  Synthetic
cccggggagcuggacggagggauc

SEQ ID NO: 10598 - RNA, 18 nt, Artificial Sequence
  Synthetic
aacgaccccaaccugauc

SEQ ID NO: 10599 - RNA, 19 nt, Artificial Sequence
  Synthetic
gaacgaccccaaccugauc

SEQ ID NO: 10600 - RNA, 20 nt, Artificial Sequence
  Synthetic
agaacgaccccaaccugauc

SEQ ID NO: 10601 - RNA, 21 nt, Artificial Sequence
  Synthetic
gagaacgaccccaaccugauc

SEQ ID NO: 10602 - RNA, 22 nt, Artificial Sequence
  Synthetic
cgagaacgaccccaaccugauc

SEQ ID NO: 10603 - RNA, 23 nt, Artificial Sequence
  Synthetic
gcgagaacgaccccaaccugauc

SEQ ID NO: 10604 - RNA, 24 nt, Artificial Sequence
  Synthetic
agcgagaacgaccccaaccugauc

SEQ ID NO: 10605 - RNA, 18 nt, Artificial Sequence
  Synthetic
aauaccaggaucaguauc

SEQ ID NO: 10606 - RNA, 19 nt, Artificial Sequence
  Synthetic
gaauaccaggaucaguauc

SEQ ID NO: 10607 - RNA, 20 nt, Artificial Sequence
  Synthetic
agaauaccaggaucaguauc

SEQ ID NO: 10608 - RNA, 21 nt, Artificial Sequence
  Synthetic
aagaauaccaggaucaguauc

SEQ ID NO: 10609 - RNA, 22 nt, Artificial Sequence
  Synthetic
uaagaauaccaggaucaguauc

SEQ ID NO: 10610 - RNA, 23 nt, Artificial Sequence
  Synthetic
cuaagaauaccaggaucaguauc

SEQ ID NO: 10611 - RNA, 24 nt, Artificial Sequence
  Synthetic
gcuaagaauaccaggaucaguauc

SEQ ID NO: 10612 - RNA, 18 nt, Artificial Sequence
  Synthetic
cccgggcgagucggccuc

SEQ ID NO: 10613 - RNA, 19 nt, Artificial Sequence
  Synthetic
ccccgggcgagucggccuc

SEQ ID NO: 10614 - RNA, 20 nt, Artificial Sequence
  Synthetic
uccccgggcgagucggccuc

SEQ ID NO: 10615 - RNA, 21 nt, Artificial Sequence
  Synthetic
cuccccgggcgagucggccuc

SEQ ID NO: 10616 - RNA, 22 nt, Artificial Sequence
  Synthetic
gcuccccgggcgagucggccuc

SEQ ID NO: 10617 - RNA, 23 nt, Artificial Sequence
  Synthetic
ugcuccccgggcgagucggccuc

SEQ ID NO: 10618 - RNA, 24 nt, Artificial Sequence
  Synthetic
cugcuccccgggcgagucggccuc

SEQ ID NO: 10619 - RNA, 18 nt, Artificial Sequence
  Synthetic
ucuaagcgcaucaagcuc

SEQ ID NO: 10620 - RNA, 19 nt, Artificial Sequence
  Synthetic
cucuaagcgcaucaagcuc

SEQ ID NO: 10621 - RNA, 20 nt, Artificial Sequence
  Synthetic
ucucuaagcgcaucaagcuc

SEQ ID NO: 10622 - RNA, 21 nt, Artificial Sequence
  Synthetic
uucucuaagcgcaucaagcuc

SEQ ID NO: 10623 - RNA, 22 nt, Artificial Sequence
  Synthetic
cuucucuaagcgcaucaagcuc

SEQ ID NO: 10624 - RNA, 23 nt, Artificial Sequence
  Synthetic
ccuucucuaagcgcaucaagcuc

SEQ ID NO: 10625 - RNA, 24 nt, Artificial Sequence
  Synthetic
cccuucucuaagcgcaucaagcuc

SEQ ID NO: 10626 - RNA, 18 nt, Artificial Sequence
  Synthetic
guuuucggauggaagcuc

SEQ ID NO: 10627 - RNA, 19 nt, Artificial Sequence
  Synthetic
aguuuucggauggaagcuc

SEQ ID NO: 10628 - RNA, 20 nt, Artificial Sequence
  Synthetic
caguuuucggauggaagcuc

SEQ ID NO: 10629 - RNA, 21 nt, Artificial Sequence
  Synthetic
gcaguuuucggauggaagcuc

SEQ ID NO: 10630 - RNA, 22 nt, Artificial Sequence
  Synthetic
ggcaguuuucggauggaagcuc

SEQ ID NO: 10631 - RNA, 23 nt, Artificial Sequence
  Synthetic
uggcaguuuucggauggaagcuc

SEQ ID NO: 10632 - RNA, 24 nt, Artificial Sequence
  Synthetic
guggcaguuuucggauggaagcuc

SEQ ID NO: 10633 - RNA, 18 nt, Artificial Sequence
  Synthetic
ccaccacgagaacagcuc

SEQ ID NO: 10634 - RNA, 19 nt, Artificial Sequence
  Synthetic
gccaccacgagaacagcuc

SEQ ID NO: 10635 - RNA, 20 nt, Artificial Sequence
  Synthetic
cgccaccacgagaacagcuc

SEQ ID NO: 10636 - RNA, 21 nt, Artificial Sequence
  Synthetic
gcgccaccacgagaacagcuc

SEQ ID NO: 10637 - RNA, 22 nt, Artificial Sequence
  Synthetic
cgcgccaccacgagaacagcuc

SEQ ID NO: 10638 - RNA, 23 nt, Artificial Sequence
  Synthetic
gcgcgccaccacgagaacagcuc

SEQ ID NO: 10639 - RNA, 24 nt, Artificial Sequence
  Synthetic
ggcgcgccaccacgagaacagcuc

SEQ ID NO: 10640 - RNA, 18 nt, Artificial Sequence
  Synthetic
ucccgccauggauuucuc

SEQ ID NO: 10641 - RNA, 19 nt, Artificial Sequence
  Synthetic
cucccgccauggauuucuc

SEQ ID NO: 10642 - RNA, 20 nt, Artificial Sequence
  Synthetic
ccucccgccauggauuucuc

SEQ ID NO: 10643 - RNA, 21 nt, Artificial Sequence
  Synthetic
gccucccgccauggauuucuc

SEQ ID NO: 10644 - RNA, 22 nt, Artificial Sequence
  Synthetic
agccucccgccauggauuucuc

SEQ ID NO: 10645 - RNA, 23 nt, Artificial Sequence
  Synthetic
gagccucccgccauggauuucuc

SEQ ID NO: 10646 - RNA, 24 nt, Artificial Sequence
  Synthetic
ggagccucccgccauggauuucuc

SEQ ID NO: 10647 - RNA, 18 nt, Artificial Sequence
  Synthetic
gaggccuuccaccagguc

SEQ ID NO: 10648 - RNA, 19 nt, Artificial Sequence
  Synthetic
cgaggccuuccaccagguc

SEQ ID NO: 10649 - RNA, 20 nt, Artificial Sequence
  Synthetic
gcgaggccuuccaccagguc

SEQ ID NO: 10650 - RNA, 21 nt, Artificial Sequence
  Synthetic
agcgaggccuuccaccagguc

SEQ ID NO: 10651 - RNA, 22 nt, Artificial Sequence
  Synthetic
cagcgaggccuuccaccagguc

SEQ ID NO: 10652 - RNA, 23 nt, Artificial Sequence
  Synthetic
ucagcgaggccuuccaccagguc

SEQ ID NO: 10653 - RNA, 24 nt, Artificial Sequence
  Synthetic
uucagcgaggccuuccaccagguc

SEQ ID NO: 10654 - RNA, 18 nt, Artificial Sequence
  Synthetic
agcucgcggggcgcgguc

SEQ ID NO: 10655 - RNA, 19 nt, Artificial Sequence
  Synthetic
cagcucgcggggcgcgguc

SEQ ID NO: 10656 - RNA, 20 nt, Artificial Sequence
  Synthetic
acagcucgcggggcgcgguc

SEQ ID NO: 10657 - RNA, 21 nt, Artificial Sequence
  Synthetic
aacagcucgcggggcgcgguc

SEQ ID NO: 10658 - RNA, 22 nt, Artificial Sequence
  Synthetic
gaacagcucgcggggcgcgguc

SEQ ID NO: 10659 - RNA, 23 nt, Artificial Sequence
  Synthetic
agaacagcucgcggggcgcgguc

SEQ ID NO: 10660 - RNA, 24 nt, Artificial Sequence
  Synthetic
gagaacagcucgcggggcgcgguc

SEQ ID NO: 10661 - RNA, 18 nt, Artificial Sequence
  Synthetic
uacugugggaaagucuuc

SEQ ID NO: 10662 - RNA, 19 nt, Artificial Sequence
  Synthetic
guacugugggaaagucuuc

SEQ ID NO: 10663 - RNA, 20 nt, Artificial Sequence
  Synthetic
aguacugugggaaagucuuc

SEQ ID NO: 10664 - RNA, 21 nt, Artificial Sequence
  Synthetic
gaguacugugggaaagucuuc

SEQ ID NO: 10665 - RNA, 22 nt, Artificial Sequence
  Synthetic
ugaguacugugggaaagucuuc

SEQ ID NO: 10666 - RNA, 23 nt, Artificial Sequence
  Synthetic
gugaguacugugggaaagucuuc

SEQ ID NO: 10667 - RNA, 24 nt, Artificial Sequence
  Synthetic
ugugaguacugugggaaagucuuc

SEQ ID NO: 10668 - RNA, 18 nt, Artificial Sequence
  Synthetic
uccgugguggccaaguuc

SEQ ID NO: 10669 - RNA, 19 nt, Artificial Sequence
  Synthetic
guccgugguggccaaguuc

SEQ ID NO: 10670 - RNA, 20 nt, Artificial Sequence
  Synthetic
aguccgugguggccaaguuc

SEQ ID NO: 10671 - RNA, 21 nt, Artificial Sequence
  Synthetic
aaguccgugguggccaaguuc

SEQ ID NO: 10672 - RNA, 22 nt, Artificial Sequence
  Synthetic
caaguccgugguggccaaguuc

SEQ ID NO: 10673 - RNA, 23 nt, Artificial Sequence
  Synthetic
ucaaguccgugguggccaaguuc

SEQ ID NO: 10674 - RNA, 24 nt, Artificial Sequence
  Synthetic
cucaaguccgugguggccaaguuc

SEQ ID NO: 10675 - RNA, 18 nt, Artificial Sequence
  Synthetic
auuauuuugcagguaaag

SEQ ID NO: 10676 - RNA, 19 nt, Artificial Sequence
  Synthetic
uauuauuuugcagguaaag

SEQ ID NO: 10677 - RNA, 20 nt, Artificial Sequence
  Synthetic
guauuauuuugcagguaaag

SEQ ID NO: 10678 - RNA, 18 nt, Artificial Sequence
  Synthetic
ugcacccaggccagcaag

SEQ ID NO: 10679 - RNA, 19 nt, Artificial Sequence
  Synthetic
gugcacccaggccagcaag

SEQ ID NO: 10680 - RNA, 20 nt, Artificial Sequence
  Synthetic
cgugcacccaggccagcaag

SEQ ID NO: 10681 - RNA, 21 nt, Artificial Sequence
  Synthetic
gcgugcacccaggccagcaag

SEQ ID NO: 10682 - RNA, 22 nt, Artificial Sequence
  Synthetic
cgcgugcacccaggccagcaag

SEQ ID NO: 10683 - RNA, 23 nt, Artificial Sequence
  Synthetic
acgcgugcacccaggccagcaag

SEQ ID NO: 10684 - RNA, 24 nt, Artificial Sequence
  Synthetic
cacgcgugcacccaggccagcaag

SEQ ID NO: 10685 - RNA, 18 nt, Artificial Sequence
  Synthetic
acgaggaagaggaagaag

SEQ ID NO: 10686 - RNA, 19 nt, Artificial Sequence
  Synthetic
gacgaggaagaggaagaag

SEQ ID NO: 10687 - RNA, 20 nt, Artificial Sequence
  Synthetic
cgacgaggaagaggaagaag

SEQ ID NO: 10688 - RNA, 21 nt, Artificial Sequence
  Synthetic
acgacgaggaagaggaagaag

SEQ ID NO: 10689 - RNA, 22 nt, Artificial Sequence
  Synthetic
gacgacgaggaagaggaagaag

SEQ ID NO: 10690 - RNA, 23 nt, Artificial Sequence
  Synthetic
ggacgacgaggaagaggaagaag

SEQ ID NO: 10691 - RNA, 24 nt, Artificial Sequence
  Synthetic
aggacgacgaggaagaggaagaag

SEQ ID NO: 10692 - RNA, 18 nt, Artificial Sequence
  Synthetic
acgacgaggaagaggaag

SEQ ID NO: 10693 - RNA, 19 nt, Artificial Sequence
  Synthetic
gacgacgaggaagaggaag

SEQ ID NO: 10694 - RNA, 20 nt, Artificial Sequence
  Synthetic
ggacgacgaggaagaggaag

SEQ ID NO: 10695 - RNA, 21 nt, Artificial Sequence
  Synthetic
aggacgacgaggaagaggaag

SEQ ID NO: 10696 - RNA, 22 nt, Artificial Sequence
  Synthetic
gaggacgacgaggaagaggaag

SEQ ID NO: 10697 - RNA, 23 nt, Artificial Sequence
  Synthetic
ggaggacgacgaggaagaggaag

SEQ ID NO: 10698 - RNA, 24 nt, Artificial Sequence
  Synthetic
aggaggacgacgaggaagaggaag

SEQ ID NO: 10699 - RNA, 18 nt, Artificial Sequence
  Synthetic
aggaggacgacgaggaag

SEQ ID NO: 10700 - RNA, 19 nt, Artificial Sequence
  Synthetic
gaggaggacgacgaggaag

SEQ ID NO: 10701 - RNA, 20 nt, Artificial Sequence
  Synthetic
agaggaggacgacgaggaag

SEQ ID NO: 10702 - RNA, 21 nt, Artificial Sequence
  Synthetic
aagaggaggacgacgaggaag

SEQ ID NO: 10703 - RNA, 22 nt, Artificial Sequence
  Synthetic
gaagaggaggacgacgaggaag

SEQ ID NO: 10704 - RNA, 23 nt, Artificial Sequence
  Synthetic
ggaagaggaggacgacgaggaag

SEQ ID NO: 10705 - RNA, 24 nt, Artificial Sequence
  Synthetic
aggaagaggaggacgacgaggaag

SEQ ID NO: 10706 - RNA, 18 nt, Artificial Sequence
  Synthetic
aggaagaagaggaggaag

SEQ ID NO: 10707 - RNA, 19 nt, Artificial Sequence
  Synthetic
gaggaagaagaggaggaag

SEQ ID NO: 10708 - RNA, 20 nt, Artificial Sequence
  Synthetic
agaggaagaagaggaggaag

SEQ ID NO: 10709 - RNA, 21 nt, Artificial Sequence
  Synthetic
aagaggaagaagaggaggaag

SEQ ID NO: 10710 - RNA, 22 nt, Artificial Sequence
  Synthetic
gaagaggaagaagaggaggaag

SEQ ID NO: 10711 - RNA, 23 nt, Artificial Sequence
  Synthetic
ggaagaggaagaagaggaggaag

SEQ ID NO: 10712 - RNA, 24 nt, Artificial Sequence
  Synthetic
aggaagaggaagaagaggaggaag

SEQ ID NO: 10713 - RNA, 18 nt, Artificial Sequence
  Synthetic
acggggacgaggaggaag

SEQ ID NO: 10714 - RNA, 19 nt, Artificial Sequence
  Synthetic
aacggggacgaggaggaag

SEQ ID NO: 10715 - RNA, 20 nt, Artificial Sequence
  Synthetic
gaacggggacgaggaggaag

SEQ ID NO: 10716 - RNA, 21 nt, Artificial Sequence
  Synthetic
agaacggggacgaggaggaag

SEQ ID NO: 10717 - RNA, 22 nt, Artificial Sequence
  Synthetic
gagaacggggacgaggaggaag

SEQ ID NO: 10718 - RNA, 23 nt, Artificial Sequence
  Synthetic
ggagaacggggacgaggaggaag

SEQ ID NO: 10719 - RNA, 24 nt, Artificial Sequence
  Synthetic
cggagaacggggacgaggaggaag

SEQ ID NO: 10720 - RNA, 18 nt, Artificial Sequence
  Synthetic
gcgcagcggcacgggaag

SEQ ID NO: 10721 - RNA, 19 nt, Artificial Sequence
  Synthetic
ggcgcagcggcacgggaag

SEQ ID NO: 10722 - RNA, 20 nt, Artificial Sequence
  Synthetic
gggcgcagcggcacgggaag

SEQ ID NO: 10723 - RNA, 21 nt, Artificial Sequence
  Synthetic
ggggcgcagcggcacgggaag

SEQ ID NO: 10724 - RNA, 22 nt, Artificial Sequence
  Synthetic
cggggcgcagcggcacgggaag

SEQ ID NO: 10725 - RNA, 23 nt, Artificial Sequence
  Synthetic
ucggggcgcagcggcacgggaag

SEQ ID NO: 10726 - RNA, 24 nt, Artificial Sequence
  Synthetic
cucggggcgcagcggcacgggaag

SEQ ID NO: 10727 - RNA, 18 nt, Artificial Sequence
  Synthetic
aggcuuccggccuggcag

SEQ ID NO: 10728 - RNA, 19 nt, Artificial Sequence
  Synthetic
gaggcuuccggccuggcag

SEQ ID NO: 10729 - RNA, 20 nt, Artificial Sequence
  Synthetic
agaggcuuccggccuggcag

SEQ ID NO: 10730 - RNA, 21 nt, Artificial Sequence
  Synthetic
gagaggcuuccggccuggcag

SEQ ID NO: 10731 - RNA, 22 nt, Artificial Sequence
  Synthetic
agagaggcuuccggccuggcag

SEQ ID NO: 10732 - RNA, 23 nt, Artificial Sequence
  Synthetic
gagagaggcuuccggccuggcag

SEQ ID NO: 10733 - RNA, 24 nt, Artificial Sequence
  Synthetic
cgagagaggcuuccggccuggcag

SEQ ID NO: 10734 - RNA, 18 nt, Artificial Sequence
  Synthetic
gaggaagaggaagaagag

SEQ ID NO: 10735 - RNA, 19 nt, Artificial Sequence
  Synthetic
cgaggaagaggaagaagag

SEQ ID NO: 10736 - RNA, 20 nt, Artificial Sequence
  Synthetic
acgaggaagaggaagaagag

SEQ ID NO: 10737 - RNA, 21 nt, Artificial Sequence
  Synthetic
gacgaggaagaggaagaagag

SEQ ID NO: 10738 - RNA, 22 nt, Artificial Sequence
  Synthetic
cgacgaggaagaggaagaagag

SEQ ID NO: 10739 - RNA, 23 nt, Artificial Sequence
  Synthetic
acgacgaggaagaggaagaagag

SEQ ID NO: 10740 - RNA, 24 nt, Artificial Sequence
  Synthetic
gacgacgaggaagaggaagaagag

SEQ ID NO: 10741 - RNA, 18 nt, Artificial Sequence
  Synthetic
gaagaagaggaggaagag

SEQ ID NO: 10742 - RNA, 19 nt, Artificial Sequence
  Synthetic
ggaagaagaggaggaagag

SEQ ID NO: 10743 - RNA, 20 nt, Artificial Sequence
  Synthetic
aggaagaagaggaggaagag

SEQ ID NO: 10744 - RNA, 21 nt, Artificial Sequence
  Synthetic
gaggaagaagaggaggaagag

SEQ ID NO: 10745 - RNA, 22 nt, Artificial Sequence
  Synthetic
agaggaagaagaggaggaagag

SEQ ID NO: 10746 - RNA, 23 nt, Artificial Sequence
  Synthetic
aagaggaagaagaggaggaagag

SEQ ID NO: 10747 - RNA, 24 nt, Artificial Sequence
  Synthetic
gaagaggaagaagaggaggaagag

SEQ ID NO: 10748 - RNA, 18 nt, Artificial Sequence
  Synthetic
ggggacgaggaggaagag

SEQ ID NO: 10749 - RNA, 19 nt, Artificial Sequence
  Synthetic
cggggacgaggaggaagag

SEQ ID NO: 10750 - RNA, 20 nt, Artificial Sequence
  Synthetic
acggggacgaggaggaagag

SEQ ID NO: 10751 - RNA, 21 nt, Artificial Sequence
  Synthetic
aacggggacgaggaggaagag

SEQ ID NO: 10752 - RNA, 22 nt, Artificial Sequence
  Synthetic
gaacggggacgaggaggaagag

SEQ ID NO: 10753 - RNA, 23 nt, Artificial Sequence
  Synthetic
agaacggggacgaggaggaagag

SEQ ID NO: 10754 - RNA, 24 nt, Artificial Sequence
  Synthetic
gagaacggggacgaggaggaagag

SEQ ID NO: 10755 - RNA, 18 nt, Artificial Sequence
  Synthetic
ccggagaacggggacgag

SEQ ID NO: 10756 - RNA, 19 nt, Artificial Sequence
  Synthetic
cccggagaacggggacgag

SEQ ID NO: 10757 - RNA, 20 nt, Artificial Sequence
  Synthetic
ucccggagaacggggacgag

SEQ ID NO: 10758 - RNA, 21 nt, Artificial Sequence
  Synthetic
aucccggagaacggggacgag

SEQ ID NO: 10759 - RNA, 22 nt, Artificial Sequence
  Synthetic
gaucccggagaacggggacgag

SEQ ID NO: 10760 - RNA, 23 nt, Artificial Sequence
  Synthetic
ugaucccggagaacggggacgag

SEQ ID NO: 10761 - RNA, 24 nt, Artificial Sequence
  Synthetic
cugaucccggagaacggggacgag

SEQ ID NO: 10762 - RNA, 18 nt, Artificial Sequence
  Synthetic
gacucgguggccggcgag

SEQ ID NO: 10763 - RNA, 19 nt, Artificial Sequence
  Synthetic
agacucgguggccggcgag

SEQ ID NO: 10764 - RNA, 20 nt, Artificial Sequence
  Synthetic
aagacucgguggccggcgag

SEQ ID NO: 10765 - RNA, 21 nt, Artificial Sequence
  Synthetic
gaagacucgguggccggcgag

SEQ ID NO: 10766 - RNA, 22 nt, Artificial Sequence
  Synthetic
cgaagacucgguggccggcgag

SEQ ID NO: 10767 - RNA, 23 nt, Artificial Sequence
  Synthetic
acgaagacucgguggccggcgag

SEQ ID NO: 10768 - RNA, 24 nt, Artificial Sequence
  Synthetic
gacgaagacucgguggccggcgag

SEQ ID NO: 10769 - RNA, 18 nt, Artificial Sequence
  Synthetic
aagcgcaucaagcucgag

SEQ ID NO: 10770 - RNA, 19 nt, Artificial Sequence
  Synthetic
uaagcgcaucaagcucgag

SEQ ID NO: 10771 - RNA, 20 nt, Artificial Sequence
  Synthetic
cuaagcgcaucaagcucgag

SEQ ID NO: 10772 - RNA, 21 nt, Artificial Sequence
  Synthetic
ucuaagcgcaucaagcucgag

SEQ ID NO: 10773 - RNA, 22 nt, Artificial Sequence
  Synthetic
cucuaagcgcaucaagcucgag

SEQ ID NO: 10774 - RNA, 23 nt, Artificial Sequence
  Synthetic
ucucuaagcgcaucaagcucgag

SEQ ID NO: 10775 - RNA, 24 nt, Artificial Sequence
  Synthetic
uucucuaagcgcaucaagcucgag

SEQ ID NO: 10776 - RNA, 18 nt, Artificial Sequence
  Synthetic
gaagaggaggaagaggag

SEQ ID NO: 10777 - RNA, 19 nt, Artificial Sequence
  Synthetic
agaagaggaggaagaggag

SEQ ID NO: 10778 - RNA, 20 nt, Artificial Sequence
  Synthetic
aagaagaggaggaagaggag

SEQ ID NO: 10779 - RNA, 21 nt, Artificial Sequence
  Synthetic
gaagaagaggaggaagaggag

SEQ ID NO: 10780 - RNA, 22 nt, Artificial Sequence
  Synthetic
ggaagaagaggaggaagaggag

SEQ ID NO: 10781 - RNA, 23 nt, Artificial Sequence
  Synthetic
aggaagaagaggaggaagaggag

SEQ ID NO: 10782 - RNA, 24 nt, Artificial Sequence
  Synthetic
gaggaagaagaggaggaagaggag

SEQ ID NO: 10783 - RNA, 18 nt, Artificial Sequence
  Synthetic
gaggaggaagaggaggag

SEQ ID NO: 10784 - RNA, 19 nt, Artificial Sequence
  Synthetic
agaggaggaagaggaggag

SEQ ID NO: 10785 - RNA, 20 nt, Artificial Sequence
  Synthetic
aagaggaggaagaggaggag

SEQ ID NO: 10786 - RNA, 21 nt, Artificial Sequence
  Synthetic
gaagaggaggaagaggaggag

SEQ ID NO: 10787 - RNA, 22 nt, Artificial Sequence
  Synthetic
agaagaggaggaagaggaggag

SEQ ID NO: 10788 - RNA, 23 nt, Artificial Sequence
  Synthetic
aagaagaggaggaagaggaggag

SEQ ID NO: 10789 - RNA, 24 nt, Artificial Sequence
  Synthetic
gaagaagaggaggaagaggaggag

SEQ ID NO: 10790 - RNA, 18 nt, Artificial Sequence
  Synthetic
uccacaccgcccggggag

SEQ ID NO: 10791 - RNA, 19 nt, Artificial Sequence
  Synthetic
cuccacaccgcccggggag

SEQ ID NO: 10792 - RNA, 20 nt, Artificial Sequence
  Synthetic
ucuccacaccgcccggggag

SEQ ID NO: 10793 - RNA, 21 nt, Artificial Sequence
  Synthetic
uucuccacaccgcccggggag

SEQ ID NO: 10794 - RNA, 22 nt, Artificial Sequence
  Synthetic
cuucuccacaccgcccggggag

SEQ ID NO: 10795 - RNA, 23 nt, Artificial Sequence
  Synthetic
gcuucuccacaccgcccggggag

SEQ ID NO: 10796 - RNA, 24 nt, Artificial Sequence
  Synthetic
cgcuucuccacaccgcccggggag

SEQ ID NO: 10797 - RNA, 18 nt, Artificial Sequence
  Synthetic
gccgcgaugcccaacacg

SEQ ID NO: 10798 - RNA, 19 nt, Artificial Sequence
  Synthetic
ggccgcgaugcccaacacg

SEQ ID NO: 10799 - RNA, 20 nt, Artificial Sequence
  Synthetic
cggccgcgaugcccaacacg

SEQ ID NO: 10800 - RNA, 21 nt, Artificial Sequence
  Synthetic
ccggccgcgaugcccaacacg

SEQ ID NO: 10801 - RNA, 22 nt, Artificial Sequence
  Synthetic
cccggccgcgaugcccaacacg

SEQ ID NO: 10802 - RNA, 23 nt, Artificial Sequence
  Synthetic
ccccggccgcgaugcccaacacg

SEQ ID NO: 10803 - RNA, 24 nt, Artificial Sequence
  Synthetic
cccccggccgcgaugcccaacacg

SEQ ID NO: 10804 - RNA, 18 nt, Artificial Sequence
  Synthetic
aggaagaggaggacgacg

SEQ ID NO: 10805 - RNA, 19 nt, Artificial Sequence
  Synthetic
gaggaagaggaggacgacg

SEQ ID NO: 10806 - RNA, 20 nt, Artificial Sequence
  Synthetic
ggaggaagaggaggacgacg

SEQ ID NO: 10807 - RNA, 21 nt, Artificial Sequence
  Synthetic
aggaggaagaggaggacgacg

SEQ ID NO: 10808 - RNA, 22 nt, Artificial Sequence
  Synthetic
gaggaggaagaggaggacgacg

SEQ ID NO: 10809 - RNA, 23 nt, Artificial Sequence
  Synthetic
cgaggaggaagaggaggacgacg

SEQ ID NO: 10810 - RNA, 24 nt, Artificial Sequence
  Synthetic
acgaggaggaagaggaggacgacg

SEQ ID NO: 10811 - RNA, 18 nt, Artificial Sequence
  Synthetic
aggaggaagaggaggacg

SEQ ID NO: 10812 - RNA, 19 nt, Artificial Sequence
  Synthetic
gaggaggaagaggaggacg

SEQ ID NO: 10813 - RNA, 20 nt, Artificial Sequence
  Synthetic
cgaggaggaagaggaggacg

SEQ ID NO: 10814 - RNA, 21 nt, Artificial Sequence
  Synthetic
acgaggaggaagaggaggacg

SEQ ID NO: 10815 - RNA, 22 nt, Artificial Sequence
  Synthetic
gacgaggaggaagaggaggacg

SEQ ID NO: 10816 - RNA, 23 nt, Artificial Sequence
  Synthetic
ggacgaggaggaagaggaggacg

SEQ ID NO: 10817 - RNA, 24 nt, Artificial Sequence
  Synthetic
gggacgaggaggaagaggaggacg

SEQ ID NO: 10818 - RNA, 18 nt, Artificial Sequence
  Synthetic
ucccggagaacggggacg

SEQ ID NO: 10819 - RNA, 19 nt, Artificial Sequence
  Synthetic
aucccggagaacggggacg

SEQ ID NO: 10820 - RNA, 20 nt, Artificial Sequence
  Synthetic
gaucccggagaacggggacg

SEQ ID NO: 10821 - RNA, 21 nt, Artificial Sequence
  Synthetic
ugaucccggagaacggggacg

SEQ ID NO: 10822 - RNA, 22 nt, Artificial Sequence
  Synthetic
cugaucccggagaacggggacg

SEQ ID NO: 10823 - RNA, 23 nt, Artificial Sequence
  Synthetic
ccugaucccggagaacggggacg

SEQ ID NO: 10824 - RNA, 24 nt, Artificial Sequence
  Synthetic
accugaucccggagaacggggacg

SEQ ID NO: 10825 - RNA, 18 nt, Artificial Sequence
  Synthetic
cgcccggggagcuggacg

SEQ ID NO: 10826 - RNA, 19 nt, Artificial Sequence
  Synthetic
ccgcccggggagcuggacg

SEQ ID NO: 10827 - RNA, 20 nt, Artificial Sequence
  Synthetic
accgcccggggagcuggacg

SEQ ID NO: 10828 - RNA, 21 nt, Artificial Sequence
  Synthetic
caccgcccggggagcuggacg

SEQ ID NO: 10829 - RNA, 22 nt, Artificial Sequence
  Synthetic
acaccgcccggggagcuggacg

SEQ ID NO: 10830 - RNA, 23 nt, Artificial Sequence
  Synthetic
cacaccgcccggggagcuggacg

SEQ ID NO: 10831 - RNA, 24 nt, Artificial Sequence
  Synthetic
ccacaccgcccggggagcuggacg

SEQ ID NO: 10832 - RNA, 18 nt, Artificial Sequence
  Synthetic
gaggaggaggagcugacg

SEQ ID NO: 10833 - RNA, 19 nt, Artificial Sequence
  Synthetic
ggaggaggaggagcugacg

SEQ ID NO: 10834 - RNA, 20 nt, Artificial Sequence
  Synthetic
aggaggaggaggagcugacg

SEQ ID NO: 10835 - RNA, 21 nt, Artificial Sequence
  Synthetic
gaggaggaggaggagcugacg

SEQ ID NO: 10836 - RNA, 22 nt, Artificial Sequence
  Synthetic
agaggaggaggaggagcugacg

SEQ ID NO: 10837 - RNA, 23 nt, Artificial Sequence
  Synthetic
aagaggaggaggaggagcugacg

SEQ ID NO: 10838 - RNA, 24 nt, Artificial Sequence
  Synthetic
gaagaggaggaggaggagcugacg

SEQ ID NO: 10839 - RNA, 18 nt, Artificial Sequence
  Synthetic
gcuucuccacaccgcccg

SEQ ID NO: 10840 - RNA, 19 nt, Artificial Sequence
  Synthetic
cgcuucuccacaccgcccg

SEQ ID NO: 10841 - RNA, 20 nt, Artificial Sequence
  Synthetic
gcgcuucuccacaccgcccg

SEQ ID NO: 10842 - RNA, 21 nt, Artificial Sequence
  Synthetic
ugcgcuucuccacaccgcccg

SEQ ID NO: 10843 - RNA, 22 nt, Artificial Sequence
  Synthetic
uugcgcuucuccacaccgcccg

SEQ ID NO: 10844 - RNA, 23 nt, Artificial Sequence
  Synthetic
uuugcgcuucuccacaccgcccg

SEQ ID NO: 10845 - RNA, 24 nt, Artificial Sequence
  Synthetic
guuugcgcuucuccacaccgcccg

SEQ ID NO: 10846 - RNA, 18 nt, Artificial Sequence
  Synthetic
gaccccaaccugaucccg

SEQ ID NO: 10847 - RNA, 19 nt, Artificial Sequence
  Synthetic
cgaccccaaccugaucccg

SEQ ID NO: 10848 - RNA, 20 nt, Artificial Sequence
  Synthetic
acgaccccaaccugaucccg

SEQ ID NO: 10849 - RNA, 21 nt, Artificial Sequence
  Synthetic
aacgaccccaaccugaucccg

SEQ ID NO: 10850 - RNA, 22 nt, Artificial Sequence
  Synthetic
gaacgaccccaaccugaucccg

SEQ ID NO: 10851 - RNA, 23 nt, Artificial Sequence
  Synthetic
agaacgaccccaaccugaucccg

SEQ ID NO: 10852 - RNA, 24 nt, Artificial Sequence
  Synthetic
gagaacgaccccaaccugaucccg

SEQ ID NO: 10853 - RNA, 18 nt, Artificial Sequence
  Synthetic
cggucgugggcgugggcg

SEQ ID NO: 10854 - RNA, 19 nt, Artificial Sequence
  Synthetic
gcggucgugggcgugggcg

SEQ ID NO: 10855 - RNA, 20 nt, Artificial Sequence
  Synthetic
cgcggucgugggcgugggcg

SEQ ID NO: 10856 - RNA, 21 nt, Artificial Sequence
  Synthetic
gcgcggucgugggcgugggcg

SEQ ID NO: 10857 - RNA, 22 nt, Artificial Sequence
  Synthetic
ggcgcggucgugggcgugggcg

SEQ ID NO: 10858 - RNA, 23 nt, Artificial Sequence
  Synthetic
gggcgcggucgugggcgugggcg

SEQ ID NO: 10859 - RNA, 24 nt, Artificial Sequence
  Synthetic
ggggcgcggucgugggcgugggcg

SEQ ID NO: 10860 - RNA, 18 nt, Artificial Sequence
  Synthetic
gccacagggacacuugcg

SEQ ID NO: 10861 - RNA, 19 nt, Artificial Sequence
  Synthetic
ggccacagggacacuugcg

SEQ ID NO: 10862 - RNA, 20 nt, Artificial Sequence
  Synthetic
gggccacagggacacuugcg

SEQ ID NO: 10863 - RNA, 21 nt, Artificial Sequence
  Synthetic
agggccacagggacacuugcg

SEQ ID NO: 10864 - RNA, 22 nt, Artificial Sequence
  Synthetic
gagggccacagggacacuugcg

SEQ ID NO: 10865 - RNA, 23 nt, Artificial Sequence
  Synthetic
cgagggccacagggacacuugcg

SEQ ID NO: 10866 - RNA, 24 nt, Artificial Sequence
  Synthetic
ccgagggccacagggacacuugcg

SEQ ID NO: 10867 - RNA, 18 nt, Artificial Sequence
  Synthetic
ccgggcgagucggccucg

SEQ ID NO: 10868 - RNA, 19 nt, Artificial Sequence
  Synthetic
cccgggcgagucggccucg

SEQ ID NO: 10869 - RNA, 20 nt, Artificial Sequence
  Synthetic
ccccgggcgagucggccucg

SEQ ID NO: 10870 - RNA, 21 nt, Artificial Sequence
  Synthetic
uccccgggcgagucggccucg

SEQ ID NO: 10871 - RNA, 22 nt, Artificial Sequence
  Synthetic
cuccccgggcgagucggccucg

SEQ ID NO: 10872 - RNA, 23 nt, Artificial Sequence
  Synthetic
gcuccccgggcgagucggccucg

SEQ ID NO: 10873 - RNA, 24 nt, Artificial Sequence
  Synthetic
ugcuccccgggcgagucggccucg

SEQ ID NO: 10874 - RNA, 18 nt, Artificial Sequence
  Synthetic
ucgucggagcacuccucg

SEQ ID NO: 10875 - RNA, 19 nt, Artificial Sequence
  Synthetic
cucgucggagcacuccucg

SEQ ID NO: 10876 - RNA, 20 nt, Artificial Sequence
  Synthetic
ccucgucggagcacuccucg

SEQ ID NO: 10877 - RNA, 21 nt, Artificial Sequence
  Synthetic
uccucgucggagcacuccucg

SEQ ID NO: 10878 - RNA, 22 nt, Artificial Sequence
  Synthetic
cuccucgucggagcacuccucg

SEQ ID NO: 10879 - RNA, 23 nt, Artificial Sequence
  Synthetic
ccuccucgucggagcacuccucg

SEQ ID NO: 10880 - RNA, 24 nt, Artificial Sequence
  Synthetic
gccuccucgucggagcacuccucg

SEQ ID NO: 10881 - RNA, 18 nt, Artificial Sequence
  Synthetic
ucgccuuuugccuccucg

SEQ ID NO: 10882 - RNA, 19 nt, Artificial Sequence
  Synthetic
aucgccuuuugccuccucg

SEQ ID NO: 10883 - RNA, 20 nt, Artificial Sequence
  Synthetic
aaucgccuuuugccuccucg

SEQ ID NO: 10884 - RNA, 21 nt, Artificial Sequence
  Synthetic
caaucgccuuuugccuccucg

SEQ ID NO: 10885 - RNA, 22 nt, Artificial Sequence
  Synthetic
acaaucgccuuuugccuccucg

SEQ ID NO: 10886 - RNA, 23 nt, Artificial Sequence
  Synthetic
gacaaucgccuuuugccuccucg

SEQ ID NO: 10887 - RNA, 24 nt, Artificial Sequence
  Synthetic
agacaaucgccuuuugccuccucg

SEQ ID NO: 10888 - RNA, 18 nt, Artificial Sequence
  Synthetic
caccacgagaacagcucg

SEQ ID NO: 10889 - RNA, 19 nt, Artificial Sequence
  Synthetic
ccaccacgagaacagcucg

SEQ ID NO: 10890 - RNA, 20 nt, Artificial Sequence
  Synthetic
gccaccacgagaacagcucg

SEQ ID NO: 10891 - RNA, 21 nt, Artificial Sequence
  Synthetic
cgccaccacgagaacagcucg

SEQ ID NO: 10892 - RNA, 22 nt, Artificial Sequence
  Synthetic
gcgccaccacgagaacagcucg

SEQ ID NO: 10893 - RNA, 23 nt, Artificial Sequence
  Synthetic
cgcgccaccacgagaacagcucg

SEQ ID NO: 10894 - RNA, 24 nt, Artificial Sequence
  Synthetic
gcgcgccaccacgagaacagcucg

SEQ ID NO: 10895 - RNA, 18 nt, Artificial Sequence
  Synthetic
cugggcagccccagcucg

SEQ ID NO: 10896 - RNA, 19 nt, Artificial Sequence
  Synthetic
gcugggcagccccagcucg

SEQ ID NO: 10897 - RNA, 20 nt, Artificial Sequence
  Synthetic
ugcugggcagccccagcucg

SEQ ID NO: 10898 - RNA, 21 nt, Artificial Sequence
  Synthetic
cugcugggcagccccagcucg

SEQ ID NO: 10899 - RNA, 22 nt, Artificial Sequence
  Synthetic
gcugcugggcagccccagcucg

SEQ ID NO: 10900 - RNA, 23 nt, Artificial Sequence
  Synthetic
ugcugcugggcagccccagcucg

SEQ ID NO: 10901 - RNA, 24 nt, Artificial Sequence
  Synthetic
cugcugcugggcagccccagcucg

SEQ ID NO: 10902 - RNA, 18 nt, Artificial Sequence
  Synthetic
aggaagaggaagaagagg

SEQ ID NO: 10903 - RNA, 19 nt, Artificial Sequence
  Synthetic
gaggaagaggaagaagagg

SEQ ID NO: 10904 - RNA, 20 nt, Artificial Sequence
  Synthetic
cgaggaagaggaagaagagg

SEQ ID NO: 10905 - RNA, 21 nt, Artificial Sequence
  Synthetic
acgaggaagaggaagaagagg

SEQ ID NO: 10906 - RNA, 22 nt, Artificial Sequence
  Synthetic
gacgaggaagaggaagaagagg

SEQ ID NO: 10907 - RNA, 23 nt, Artificial Sequence
  Synthetic
cgacgaggaagaggaagaagagg

SEQ ID NO: 10908 - RNA, 24 nt, Artificial Sequence
  Synthetic
acgacgaggaagaggaagaagagg

SEQ ID NO: 10909 - RNA, 18 nt, Artificial Sequence
  Synthetic
aggacgacgaggaagagg

SEQ ID NO: 10910 - RNA, 19 nt, Artificial Sequence
  Synthetic
gaggacgacgaggaagagg

SEQ ID NO: 10911 - RNA, 20 nt, Artificial Sequence
  Synthetic
ggaggacgacgaggaagagg

SEQ ID NO: 10912 - RNA, 21 nt, Artificial Sequence
  Synthetic
aggaggacgacgaggaagagg

SEQ ID NO: 10913 - RNA, 22 nt, Artificial Sequence
  Synthetic
gaggaggacgacgaggaagagg

SEQ ID NO: 10914 - RNA, 23 nt, Artificial Sequence
  Synthetic
agaggaggacgacgaggaagagg

SEQ ID NO: 10915 - RNA, 24 nt, Artificial Sequence
  Synthetic
aagaggaggacgacgaggaagagg

SEQ ID NO: 10916 - RNA, 18 nt, Artificial Sequence
  Synthetic
aagaagaggaggaagagg

SEQ ID NO: 10917 - RNA, 19 nt, Artificial Sequence
  Synthetic
gaagaagaggaggaagagg

SEQ ID NO: 10918 - RNA, 20 nt, Artificial Sequence
  Synthetic
ggaagaagaggaggaagagg

SEQ ID NO: 10919 - RNA, 21 nt, Artificial Sequence
  Synthetic
aggaagaagaggaggaagagg

SEQ ID NO: 10920 - RNA, 22 nt, Artificial Sequence
  Synthetic
gaggaagaagaggaggaagagg

SEQ ID NO: 10921 - RNA, 23 nt, Artificial Sequence
  Synthetic
agaggaagaagaggaggaagagg

SEQ ID NO: 10922 - RNA, 24 nt, Artificial Sequence
  Synthetic
aagaggaagaagaggaggaagagg

SEQ ID NO: 10923 - RNA, 18 nt, Artificial Sequence
  Synthetic
cugacggagagcgagagg

SEQ ID NO: 10924 - RNA, 19 nt, Artificial Sequence
  Synthetic
gcugacggagagcgagagg

SEQ ID NO: 10925 - RNA, 20 nt, Artificial Sequence
  Synthetic
agcugacggagagcgagagg

SEQ ID NO: 10926 - RNA, 21 nt, Artificial Sequence
  Synthetic
gagcugacggagagcgagagg

SEQ ID NO: 10927 - RNA, 22 nt, Artificial Sequence
  Synthetic
ggagcugacggagagcgagagg

SEQ ID NO: 10928 - RNA, 23 nt, Artificial Sequence
  Synthetic
aggagcugacggagagcgagagg

SEQ ID NO: 10929 - RNA, 24 nt, Artificial Sequence
  Synthetic
gaggagcugacggagagcgagagg

SEQ ID NO: 10930 - RNA, 18 nt, Artificial Sequence
  Synthetic
aagaggaggacgacgagg

SEQ ID NO: 10931 - RNA, 19 nt, Artificial Sequence
  Synthetic
gaagaggaggacgacgagg

SEQ ID NO: 10932 - RNA, 20 nt, Artificial Sequence
  Synthetic
ggaagaggaggacgacgagg

SEQ ID NO: 10933 - RNA, 21 nt, Artificial Sequence
  Synthetic
aggaagaggaggacgacgagg

SEQ ID NO: 10934 - RNA, 22 nt, Artificial Sequence
  Synthetic
gaggaagaggaggacgacgagg

SEQ ID NO: 10935 - RNA, 23 nt, Artificial Sequence
  Synthetic
ggaggaagaggaggacgacgagg

SEQ ID NO: 10936 - RNA, 24 nt, Artificial Sequence
  Synthetic
aggaggaagaggaggacgacgagg

SEQ ID NO: 10937 - RNA, 18 nt, Artificial Sequence
  Synthetic
cggagaacggggacgagg

SEQ ID NO: 10938 - RNA, 19 nt, Artificial Sequence
  Synthetic
ccggagaacggggacgagg

SEQ ID NO: 10939 - RNA, 20 nt, Artificial Sequence
  Synthetic
cccggagaacggggacgagg

SEQ ID NO: 10940 - RNA, 21 nt, Artificial Sequence
  Synthetic
ucccggagaacggggacgagg

SEQ ID NO: 10941 - RNA, 22 nt, Artificial Sequence
  Synthetic
aucccggagaacggggacgagg

SEQ ID NO: 10942 - RNA, 23 nt, Artificial Sequence
  Synthetic
gaucccggagaacggggacgagg

SEQ ID NO: 10943 - RNA, 24 nt, Artificial Sequence
  Synthetic
ugaucccggagaacggggacgagg

SEQ ID NO: 10944 - RNA, 18 nt, Artificial Sequence
  Synthetic
gcggccaccuggccgagg

SEQ ID NO: 10945 - RNA, 19 nt, Artificial Sequence
  Synthetic
cgcggccaccuggccgagg

SEQ ID NO: 10946 - RNA, 20 nt, Artificial Sequence
  Synthetic
gcgcggccaccuggccgagg

SEQ ID NO: 10947 - RNA, 21 nt, Artificial Sequence
  Synthetic
agcgcggccaccuggccgagg

SEQ ID NO: 10948 - RNA, 22 nt, Artificial Sequence
  Synthetic
aagcgcggccaccuggccgagg

SEQ ID NO: 10949 - RNA, 23 nt, Artificial Sequence
  Synthetic
uaagcgcggccaccuggccgagg

SEQ ID NO: 10950 - RNA, 24 nt, Artificial Sequence
  Synthetic
auaagcgcggccaccuggccgagg

SEQ ID NO: 10951 - RNA, 18 nt, Artificial Sequence
  Synthetic
aagaggaagaagaggagg

SEQ ID NO: 10952 - RNA, 19 nt, Artificial Sequence
  Synthetic
gaagaggaagaagaggagg

SEQ ID NO: 10953 - RNA, 20 nt, Artificial Sequence
  Synthetic
ggaagaggaagaagaggagg

SEQ ID NO: 10954 - RNA, 21 nt, Artificial Sequence
  Synthetic
aggaagaggaagaagaggagg

SEQ ID NO: 10955 - RNA, 22 nt, Artificial Sequence
  Synthetic
gaggaagaggaagaagaggagg

SEQ ID NO: 10956 - RNA, 23 nt, Artificial Sequence
  Synthetic
cgaggaagaggaagaagaggagg

SEQ ID NO: 10957 - RNA, 24 nt, Artificial Sequence
  Synthetic
acgaggaagaggaagaagaggagg

SEQ ID NO: 10958 - RNA, 18 nt, Artificial Sequence
  Synthetic
aagaggaggaagaggagg

SEQ ID NO: 10959 - RNA, 19 nt, Artificial Sequence
  Synthetic
gaagaggaggaagaggagg

SEQ ID NO: 10960 - RNA, 20 nt, Artificial Sequence
  Synthetic
agaagaggaggaagaggagg

SEQ ID NO: 10961 - RNA, 21 nt, Artificial Sequence
  Synthetic
aagaagaggaggaagaggagg

SEQ ID NO: 10962 - RNA, 22 nt, Artificial Sequence
  Synthetic
gaagaagaggaggaagaggagg

SEQ ID NO: 10963 - RNA, 23 nt, Artificial Sequence
  Synthetic
ggaagaagaggaggaagaggagg

SEQ ID NO: 10964 - RNA, 24 nt, Artificial Sequence
  Synthetic
aggaagaagaggaggaagaggagg

SEQ ID NO: 10965 - RNA, 18 nt, Artificial Sequence
  Synthetic
agaacggggacgaggagg

SEQ ID NO: 10966 - RNA, 19 nt, Artificial Sequence
  Synthetic
gagaacggggacgaggagg

SEQ ID NO: 10967 - RNA, 20 nt, Artificial Sequence
  Synthetic
ggagaacggggacgaggagg

SEQ ID NO: 10968 - RNA, 21 nt, Artificial Sequence
  Synthetic
cggagaacggggacgaggagg

SEQ ID NO: 10969 - RNA, 22 nt, Artificial Sequence
  Synthetic
ccggagaacggggacgaggagg

SEQ ID NO: 10970 - RNA, 23 nt, Artificial Sequence
  Synthetic
cccggagaacggggacgaggagg

SEQ ID NO: 10971 - RNA, 24 nt, Artificial Sequence
  Synthetic
ucccggagaacggggacgaggagg

SEQ ID NO: 10972 - RNA, 18 nt, Artificial Sequence
  Synthetic
aggaggaagaggaggagg

SEQ ID NO: 10973 - RNA, 19 nt, Artificial Sequence
  Synthetic
gaggaggaagaggaggagg

SEQ ID NO: 10974 - RNA, 20 nt, Artificial Sequence
  Synthetic
agaggaggaagaggaggagg

SEQ ID NO: 10975 - RNA, 21 nt, Artificial Sequence
  Synthetic
aagaggaggaagaggaggagg

SEQ ID NO: 10976 - RNA, 22 nt, Artificial Sequence
  Synthetic
gaagaggaggaagaggaggagg

SEQ ID NO: 10977 - RNA, 23 nt, Artificial Sequence
  Synthetic
agaagaggaggaagaggaggagg

SEQ ID NO: 10978 - RNA, 24 nt, Artificial Sequence
  Synthetic
aagaagaggaggaagaggaggagg

SEQ ID NO: 10979 - RNA, 18 nt, Artificial Sequence
  Synthetic
accggcgcagccacacgg

SEQ ID NO: 10980 - RNA, 19 nt, Artificial Sequence
  Synthetic
caccggcgcagccacacgg

SEQ ID NO: 10981 - RNA, 20 nt, Artificial Sequence
  Synthetic
gcaccggcgcagccacacgg

SEQ ID NO: 10982 - RNA, 21 nt, Artificial Sequence
  Synthetic
ugcaccggcgcagccacacgg

SEQ ID NO: 10983 - RNA, 22 nt, Artificial Sequence
  Synthetic
gugcaccggcgcagccacacgg

SEQ ID NO: 10984 - RNA, 23 nt, Artificial Sequence
  Synthetic
ggugcaccggcgcagccacacgg

SEQ ID NO: 10985 - RNA, 24 nt, Artificial Sequence
  Synthetic
uggugcaccggcgcagccacacgg

SEQ ID NO: 10986 - RNA, 18 nt, Artificial Sequence
  Synthetic
uagagcgccugggggcgg

SEQ ID NO: 10987 - RNA, 19 nt, Artificial Sequence
  Synthetic
auagagcgccugggggcgg

SEQ ID NO: 10988 - RNA, 20 nt, Artificial Sequence
  Synthetic
cauagagcgccugggggcgg

SEQ ID NO: 10989 - RNA, 21 nt, Artificial Sequence
  Synthetic
gcauagagcgccugggggcgg

SEQ ID NO: 10990 - RNA, 22 nt, Artificial Sequence
  Synthetic
cgcauagagcgccugggggcgg

SEQ ID NO: 10991 - RNA, 23 nt, Artificial Sequence
  Synthetic
ccgcauagagcgccugggggcgg

SEQ ID NO: 10992 - RNA, 24 nt, Artificial Sequence
  Synthetic
accgcauagagcgccugggggcgg

SEQ ID NO: 10993 - RNA, 18 nt, Artificial Sequence
  Synthetic
auguguggcaguuuucgg

SEQ ID NO: 10994 - RNA, 19 nt, Artificial Sequence
  Synthetic
gauguguggcaguuuucgg

SEQ ID NO: 10995 - RNA, 20 nt, Artificial Sequence
  Synthetic
agauguguggcaguuuucgg

SEQ ID NO: 10996 - RNA, 21 nt, Artificial Sequence
  Synthetic
aagauguguggcaguuuucgg

SEQ ID NO: 10997 - RNA, 22 nt, Artificial Sequence
  Synthetic
caagauguguggcaguuuucgg

SEQ ID NO: 10998 - RNA, 23 nt, Artificial Sequence
  Synthetic
ucaagauguguggcaguuuucgg

SEQ ID NO: 10999 - RNA, 24 nt, Artificial Sequence
  Synthetic
cucaagauguguggcaguuuucgg

SEQ ID NO: 11000 - RNA, 18 nt, Artificial Sequence
  Synthetic
aauuugaagcccccaggg

SEQ ID NO: 11001 - RNA, 19 nt, Artificial Sequence
  Synthetic
aaauuugaagcccccaggg

SEQ ID NO: 11002 - RNA, 20 nt, Artificial Sequence
  Synthetic
aaaauuugaagcccccaggg

SEQ ID NO: 11003 - RNA, 21 nt, Artificial Sequence
  Synthetic
gaaaauuugaagcccccaggg

SEQ ID NO: 11004 - RNA, 22 nt, Artificial Sequence
  Synthetic
agaaaauuugaagcccccaggg

SEQ ID NO: 11005 - RNA, 23 nt, Artificial Sequence
  Synthetic
gagaaaauuugaagcccccaggg

SEQ ID NO: 11006 - RNA, 24 nt, Artificial Sequence
  Synthetic
ugagaaaauuugaagcccccaggg

SEQ ID NO: 11007 - RNA, 18 nt, Artificial Sequence
  Synthetic
guggacuacggcuucggg

SEQ ID NO: 11008 - RNA, 19 nt, Artificial Sequence
  Synthetic
gguggacuacggcuucggg

SEQ ID NO: 11009 - RNA, 20 nt, Artificial Sequence
  Synthetic
ggguggacuacggcuucggg

SEQ ID NO: 11010 - RNA, 21 nt, Artificial Sequence
  Synthetic
aggguggacuacggcuucggg

SEQ ID NO: 11011 - RNA, 22 nt, Artificial Sequence
  Synthetic
gaggguggacuacggcuucggg

SEQ ID NO: 11012 - RNA, 23 nt, Artificial Sequence
  Synthetic
agaggguggacuacggcuucggg

SEQ ID NO: 11013 - RNA, 24 nt, Artificial Sequence
  Synthetic
gagaggguggacuacggcuucggg

SEQ ID NO: 11014 - RNA, 18 nt, Artificial Sequence
  Synthetic
ugaucccggagaacgggg

SEQ ID NO: 11015 - RNA, 19 nt, Artificial Sequence
  Synthetic
cugaucccggagaacgggg

SEQ ID NO: 11016 - RNA, 20 nt, Artificial Sequence
  Synthetic
ccugaucccggagaacgggg

SEQ ID NO: 11017 - RNA, 21 nt, Artificial Sequence
  Synthetic
accugaucccggagaacgggg

SEQ ID NO: 11018 - RNA, 22 nt, Artificial Sequence
  Synthetic
aaccugaucccggagaacgggg

SEQ ID NO: 11019 - RNA, 23 nt, Artificial Sequence
  Synthetic
caaccugaucccggagaacgggg

SEQ ID NO: 11020 - RNA, 24 nt, Artificial Sequence
  Synthetic
ccaaccugaucccggagaacgggg

SEQ ID NO: 11021 - RNA, 18 nt, Artificial Sequence
  Synthetic
gcauagagcgccuggggg

SEQ ID NO: 11022 - RNA, 19 nt, Artificial Sequence
  Synthetic
cgcauagagcgccuggggg

SEQ ID NO: 11023 - RNA, 20 nt, Artificial Sequence
  Synthetic
ccgcauagagcgccuggggg

SEQ ID NO: 11024 - RNA, 21 nt, Artificial Sequence
  Synthetic
accgcauagagcgccuggggg

SEQ ID NO: 11025 - RNA, 22 nt, Artificial Sequence
  Synthetic
caccgcauagagcgccuggggg

SEQ ID NO: 11026 - RNA, 23 nt, Artificial Sequence
  Synthetic
ccaccgcauagagcgccuggggg

SEQ ID NO: 11027 - RNA, 24 nt, Artificial Sequence
  Synthetic
cccaccgcauagagcgccuggggg

SEQ ID NO: 11028 - RNA, 18 nt, Artificial Sequence
  Synthetic
cgcauagagcgccugggg

SEQ ID NO: 11029 - RNA, 19 nt, Artificial Sequence
  Synthetic
ccgcauagagcgccugggg

SEQ ID NO: 11030 - RNA, 20 nt, Artificial Sequence
  Synthetic
accgcauagagcgccugggg

SEQ ID NO: 11031 - RNA, 21 nt, Artificial Sequence
  Synthetic
caccgcauagagcgccugggg

SEQ ID NO: 11032 - RNA, 22 nt, Artificial Sequence
  Synthetic
ccaccgcauagagcgccugggg

SEQ ID NO: 11033 - RNA, 23 nt, Artificial Sequence
  Synthetic
cccaccgcauagagcgccugggg

SEQ ID NO: 11034 - RNA, 24 nt, Artificial Sequence
  Synthetic
ccccaccgcauagagcgccugggg

SEQ ID NO: 11035 - RNA, 18 nt, Artificial Sequence
  Synthetic
auaagcgcggccaccugg

SEQ ID NO: 11036 - RNA, 19 nt, Artificial Sequence
  Synthetic
cauaagcgcggccaccugg

SEQ ID NO: 11037 - RNA, 20 nt, Artificial Sequence
  Synthetic
gcauaagcgcggccaccugg

SEQ ID NO: 11038 - RNA, 21 nt, Artificial Sequence
  Synthetic
agcauaagcgcggccaccugg

SEQ ID NO: 11039 - RNA, 22 nt, Artificial Sequence
  Synthetic
aagcauaagcgcggccaccugg

SEQ ID NO: 11040 - RNA, 23 nt, Artificial Sequence
  Synthetic
gaagcauaagcgcggccaccugg

SEQ ID NO: 11041 - RNA, 24 nt, Artificial Sequence
  Synthetic
agaagcauaagcgcggccaccugg

SEQ ID NO: 11042 - RNA, 18 nt, Artificial Sequence
  Synthetic
gagaggcuuccggccugg

SEQ ID NO: 11043 - RNA, 19 nt, Artificial Sequence
  Synthetic
agagaggcuuccggccugg

SEQ ID NO: 11044 - RNA, 20 nt, Artificial Sequence
  Synthetic
gagagaggcuuccggccugg

SEQ ID NO: 11045 - RNA, 21 nt, Artificial Sequence
  Synthetic
cgagagaggcuuccggccugg

SEQ ID NO: 11046 - RNA, 22 nt, Artificial Sequence
  Synthetic
ucgagagaggcuuccggccugg

SEQ ID NO: 11047 - RNA, 23 nt, Artificial Sequence
  Synthetic
aucgagagaggcuuccggccugg

SEQ ID NO: 11048 - RNA, 24 nt, Artificial Sequence
  Synthetic
uaucgagagaggcuuccggccugg

SEQ ID NO: 11049 - RNA, 18 nt, Artificial Sequence
  Synthetic
ccuuccaccagguccugg

SEQ ID NO: 11050 - RNA, 19 nt, Artificial Sequence
  Synthetic
gccuuccaccagguccugg

SEQ ID NO: 11051 - RNA, 20 nt, Artificial Sequence
  Synthetic
ggccuuccaccagguccugg

SEQ ID NO: 11052 - RNA, 21 nt, Artificial Sequence
  Synthetic
aggccuuccaccagguccugg

SEQ ID NO: 11053 - RNA, 22 nt, Artificial Sequence
  Synthetic
gaggccuuccaccagguccugg

SEQ ID NO: 11054 - RNA, 23 nt, Artificial Sequence
  Synthetic
cgaggccuuccaccagguccugg

SEQ ID NO: 11055 - RNA, 24 nt, Artificial Sequence
  Synthetic
gcgaggccuuccaccagguccugg

SEQ ID NO: 11056 - RNA, 18 nt, Artificial Sequence
  Synthetic
ggagacuuagagagcugg

SEQ ID NO: 11057 - RNA, 19 nt, Artificial Sequence
  Synthetic
aggagacuuagagagcugg

SEQ ID NO: 11058 - RNA, 20 nt, Artificial Sequence
  Synthetic
uaggagacuuagagagcugg

SEQ ID NO: 11059 - RNA, 21 nt, Artificial Sequence
  Synthetic
cuaggagacuuagagagcugg

SEQ ID NO: 11060 - RNA, 22 nt, Artificial Sequence
  Synthetic
ucuaggagacuuagagagcugg

SEQ ID NO: 11061 - RNA, 23 nt, Artificial Sequence
  Synthetic
cucuaggagacuuagagagcugg

SEQ ID NO: 11062 - RNA, 24 nt, Artificial Sequence
  Synthetic
ucucuaggagacuuagagagcugg

SEQ ID NO: 11063 - RNA, 18 nt, Artificial Sequence
  Synthetic
caccgcccggggagcugg

SEQ ID NO: 11064 - RNA, 19 nt, Artificial Sequence
  Synthetic
acaccgcccggggagcugg

SEQ ID NO: 11065 - RNA, 20 nt, Artificial Sequence
  Synthetic
cacaccgcccggggagcugg

SEQ ID NO: 11066 - RNA, 21 nt, Artificial Sequence
  Synthetic
ccacaccgcccggggagcugg

SEQ ID NO: 11067 - RNA, 22 nt, Artificial Sequence
  Synthetic
uccacaccgcccggggagcugg

SEQ ID NO: 11068 - RNA, 23 nt, Artificial Sequence
  Synthetic
cuccacaccgcccggggagcugg

SEQ ID NO: 11069 - RNA, 24 nt, Artificial Sequence
  Synthetic
ucuccacaccgcccggggagcugg

SEQ ID NO: 11070 - RNA, 18 nt, Artificial Sequence
  Synthetic
cagcggcacgggaagugg

SEQ ID NO: 11071 - RNA, 19 nt, Artificial Sequence
  Synthetic
gcagcggcacgggaagugg

SEQ ID NO: 11072 - RNA, 20 nt, Artificial Sequence
  Synthetic
cgcagcggcacgggaagugg

SEQ ID NO: 11073 - RNA, 21 nt, Artificial Sequence
  Synthetic
gcgcagcggcacgggaagugg

SEQ ID NO: 11074 - RNA, 22 nt, Artificial Sequence
  Synthetic
ggcgcagcggcacgggaagugg

SEQ ID NO: 11075 - RNA, 23 nt, Artificial Sequence
  Synthetic
gggcgcagcggcacgggaagugg

SEQ ID NO: 11076 - RNA, 24 nt, Artificial Sequence
  Synthetic
ggggcgcagcggcacgggaagugg

SEQ ID NO: 11077 - RNA, 18 nt, Artificial Sequence
  Synthetic
gcccugcccgacgucaug

SEQ ID NO: 11078 - RNA, 19 nt, Artificial Sequence
  Synthetic
cgcccugcccgacgucaug

SEQ ID NO: 11079 - RNA, 20 nt, Artificial Sequence
  Synthetic
gcgcccugcccgacgucaug

SEQ ID NO: 11080 - RNA, 21 nt, Artificial Sequence
  Synthetic
cgcgcccugcccgacgucaug

SEQ ID NO: 11081 - RNA, 22 nt, Artificial Sequence
  Synthetic
ccgcgcccugcccgacgucaug

SEQ ID NO: 11082 - RNA, 23 nt, Artificial Sequence
  Synthetic
gccgcgcccugcccgacgucaug

SEQ ID NO: 11083 - RNA, 24 nt, Artificial Sequence
  Synthetic
agccgcgcccugcccgacgucaug

SEQ ID NO: 11084 - RNA, 18 nt, Artificial Sequence
  Synthetic
cgacacuugugaguacug

SEQ ID NO: 11085 - RNA, 19 nt, Artificial Sequence
  Synthetic
gcgacacuugugaguacug

SEQ ID NO: 11086 - RNA, 20 nt, Artificial Sequence
  Synthetic
agcgacacuugugaguacug

SEQ ID NO: 11087 - RNA, 21 nt, Artificial Sequence
  Synthetic
cagcgacacuugugaguacug

SEQ ID NO: 11088 - RNA, 22 nt, Artificial Sequence
  Synthetic
gcagcgacacuugugaguacug

SEQ ID NO: 11089 - RNA, 23 nt, Artificial Sequence
  Synthetic
cgcagcgacacuugugaguacug

SEQ ID NO: 11090 - RNA, 24 nt, Artificial Sequence
  Synthetic
acgcagcgacacuugugaguacug

SEQ ID NO: 11091 - RNA, 18 nt, Artificial Sequence
  Synthetic
gaggaggaggaggagcug

SEQ ID NO: 11092 - RNA, 19 nt, Artificial Sequence
  Synthetic
agaggaggaggaggagcug

SEQ ID NO: 11093 - RNA, 20 nt, Artificial Sequence
  Synthetic
aagaggaggaggaggagcug

SEQ ID NO: 11094 - RNA, 21 nt, Artificial Sequence
  Synthetic
gaagaggaggaggaggagcug

SEQ ID NO: 11095 - RNA, 22 nt, Artificial Sequence
  Synthetic
ggaagaggaggaggaggagcug

SEQ ID NO: 11096 - RNA, 23 nt, Artificial Sequence
  Synthetic
aggaagaggaggaggaggagcug

SEQ ID NO: 11097 - RNA, 24 nt, Artificial Sequence
  Synthetic
gaggaagaggaggaggaggagcug

SEQ ID NO: 11098 - RNA, 18 nt, Artificial Sequence
  Synthetic
cuguccaaaaagcugcug

SEQ ID NO: 11099 - RNA, 19 nt, Artificial Sequence
  Synthetic
ccuguccaaaaagcugcug

SEQ ID NO: 11100 - RNA, 20 nt, Artificial Sequence
  Synthetic
gccuguccaaaaagcugcug

SEQ ID NO: 11101 - RNA, 21 nt, Artificial Sequence
  Synthetic
ggccuguccaaaaagcugcug

SEQ ID NO: 11102 - RNA, 22 nt, Artificial Sequence
  Synthetic
gggccuguccaaaaagcugcug

SEQ ID NO: 11103 - RNA, 23 nt, Artificial Sequence
  Synthetic
ggggccuguccaaaaagcugcug

SEQ ID NO: 11104 - RNA, 24 nt, Artificial Sequence
  Synthetic
gggggccuguccaaaaagcugcug

SEQ ID NO: 11105 - RNA, 18 nt, Artificial Sequence
  Synthetic
gcagcggcacgggaagug

SEQ ID NO: 11106 - RNA, 19 nt, Artificial Sequence
  Synthetic
cgcagcggcacgggaagug

SEQ ID NO: 11107 - RNA, 20 nt, Artificial Sequence
  Synthetic
gcgcagcggcacgggaagug

SEQ ID NO: 11108 - RNA, 21 nt, Artificial Sequence
  Synthetic
ggcgcagcggcacgggaagug

SEQ ID NO: 11109 - RNA, 22 nt, Artificial Sequence
  Synthetic
gggcgcagcggcacgggaagug

SEQ ID NO: 11110 - RNA, 23 nt, Artificial Sequence
  Synthetic
ggggcgcagcggcacgggaagug

SEQ ID NO: 11111 - RNA, 24 nt, Artificial Sequence
  Synthetic
cggggcgcagcggcacgggaagug

SEQ ID NO: 11112 - RNA, 18 nt, Artificial Sequence
  Synthetic
cccggcaccagcgacuug

SEQ ID NO: 11113 - RNA, 19 nt, Artificial Sequence
  Synthetic
acccggcaccagcgacuug

SEQ ID NO: 11114 - RNA, 20 nt, Artificial Sequence
  Synthetic
aacccggcaccagcgacuug

SEQ ID NO: 11115 - RNA, 21 nt, Artificial Sequence
  Synthetic
gaacccggcaccagcgacuug

SEQ ID NO: 11116 - RNA, 22 nt, Artificial Sequence
  Synthetic
ggaacccggcaccagcgacuug

SEQ ID NO: 11117 - RNA, 23 nt, Artificial Sequence
  Synthetic
cggaacccggcaccagcgacuug

SEQ ID NO: 11118 - RNA, 24 nt, Artificial Sequence
  Synthetic
ccggaacccggcaccagcgacuug

SEQ ID NO: 11119 - RNA, 18 nt, Artificial Sequence
  Synthetic
cuuaaguucugagaaaau

SEQ ID NO: 11120 - RNA, 19 nt, Artificial Sequence
  Synthetic
ccuuaaguucugagaaaau

SEQ ID NO: 11121 - RNA, 20 nt, Artificial Sequence
  Synthetic
cccuuaaguucugagaaaau

SEQ ID NO: 11122 - RNA, 21 nt, Artificial Sequence
  Synthetic
gcccuuaaguucugagaaaau

SEQ ID NO: 11123 - RNA, 22 nt, Artificial Sequence
  Synthetic
agcccuuaaguucugagaaaau

SEQ ID NO: 11124 - RNA, 23 nt, Artificial Sequence
  Synthetic
gagcccuuaaguucugagaaaau

SEQ ID NO: 11125 - RNA, 24 nt, Artificial Sequence
  Synthetic
agagcccuuaaguucugagaaaau

SEQ ID NO: 11126 - RNA, 18 nt, Artificial Sequence
  Synthetic
ggauuucucuaggagacu

SEQ ID NO: 11127 - RNA, 19 nt, Artificial Sequence
  Synthetic
uggauuucucuaggagacu

SEQ ID NO: 11128 - RNA, 20 nt, Artificial Sequence
  Synthetic
auggauuucucuaggagacu

SEQ ID NO: 11129 - RNA, 21 nt, Artificial Sequence
  Synthetic
cauggauuucucuaggagacu

SEQ ID NO: 11130 - RNA, 22 nt, Artificial Sequence
  Synthetic
ccauggauuucucuaggagacu

SEQ ID NO: 11131 - RNA, 23 nt, Artificial Sequence
  Synthetic
gccauggauuucucuaggagacu

SEQ ID NO: 11132 - RNA, 24 nt, Artificial Sequence
  Synthetic
cgccauggauuucucuaggagacu

SEQ ID NO: 11133 - RNA, 18 nt, Artificial Sequence
  Synthetic
auggauuaagaaucuacu

SEQ ID NO: 11134 - RNA, 19 nt, Artificial Sequence
  Synthetic
cauggauuaagaaucuacu

SEQ ID NO: 11135 - RNA, 20 nt, Artificial Sequence
  Synthetic
ucauggauuaagaaucuacu

SEQ ID NO: 11136 - RNA, 21 nt, Artificial Sequence
  Synthetic
cucauggauuaagaaucuacu

SEQ ID NO: 11137 - RNA, 22 nt, Artificial Sequence
  Synthetic
acucauggauuaagaaucuacu

SEQ ID NO: 11138 - RNA, 23 nt, Artificial Sequence
  Synthetic
cacucauggauuaagaaucuacu

SEQ ID NO: 11139 - RNA, 24 nt, Artificial Sequence
  Synthetic
acacucauggauuaagaaucuacu

SEQ ID NO: 11140 - RNA, 18 nt, Artificial Sequence
  Synthetic
gcgacacuugugaguacu

SEQ ID NO: 11141 - RNA, 19 nt, Artificial Sequence
  Synthetic
agcgacacuugugaguacu

SEQ ID NO: 11142 - RNA, 20 nt, Artificial Sequence
  Synthetic
cagcgacacuugugaguacu

SEQ ID NO: 11143 - RNA, 21 nt, Artificial Sequence
  Synthetic
gcagcgacacuugugaguacu

SEQ ID NO: 11144 - RNA, 22 nt, Artificial Sequence
  Synthetic
cgcagcgacacuugugaguacu

SEQ ID NO: 11145 - RNA, 23 nt, Artificial Sequence
  Synthetic
acgcagcgacacuugugaguacu

SEQ ID NO: 11146 - RNA, 24 nt, Artificial Sequence
  Synthetic
gacgcagcgacacuugugaguacu

SEQ ID NO: 11147 - RNA, 18 nt, Artificial Sequence
  Synthetic
ccaccgcauagagcgccu

SEQ ID NO: 11148 - RNA, 19 nt, Artificial Sequence
  Synthetic
cccaccgcauagagcgccu

SEQ ID NO: 11149 - RNA, 20 nt, Artificial Sequence
  Synthetic
ccccaccgcauagagcgccu

SEQ ID NO: 11150 - RNA, 21 nt, Artificial Sequence
  Synthetic
cccccaccgcauagagcgccu

SEQ ID NO: 11151 - RNA, 22 nt, Artificial Sequence
  Synthetic
acccccaccgcauagagcgccu

SEQ ID NO: 11152 - RNA, 23 nt, Artificial Sequence
  Synthetic
gacccccaccgcauagagcgccu

SEQ ID NO: 11153 - RNA, 24 nt, Artificial Sequence
  Synthetic
ggacccccaccgcauagagcgccu

SEQ ID NO: 11154 - RNA, 18 nt, Artificial Sequence
  Synthetic
ccccgggcgagucggccu

SEQ ID NO: 11155 - RNA, 19 nt, Artificial Sequence
  Synthetic
uccccgggcgagucggccu

SEQ ID NO: 11156 - RNA, 20 nt, Artificial Sequence
  Synthetic
cuccccgggcgagucggccu

SEQ ID NO: 11157 - RNA, 21 nt, Artificial Sequence
  Synthetic
gcuccccgggcgagucggccu

SEQ ID NO: 11158 - RNA, 22 nt, Artificial Sequence
  Synthetic
ugcuccccgggcgagucggccu

SEQ ID NO: 11159 - RNA, 23 nt, Artificial Sequence
  Synthetic
cugcuccccgggcgagucggccu

SEQ ID NO: 11160 - RNA, 24 nt, Artificial Sequence
  Synthetic
gcugcuccccgggcgagucggccu

SEQ ID NO: 11161 - RNA, 18 nt, Artificial Sequence
  Synthetic
ccucgucggagcacuccu

SEQ ID NO: 11162 - RNA, 19 nt, Artificial Sequence
  Synthetic
uccucgucggagcacuccu

SEQ ID NO: 11163 - RNA, 20 nt, Artificial Sequence
  Synthetic
cuccucgucggagcacuccu

SEQ ID NO: 11164 - RNA, 21 nt, Artificial Sequence
  Synthetic
ccuccucgucggagcacuccu

SEQ ID NO: 11165 - RNA, 22 nt, Artificial Sequence
  Synthetic
gccuccucgucggagcacuccu

SEQ ID NO: 11166 - RNA, 23 nt, Artificial Sequence
  Synthetic
ugccuccucgucggagcacuccu

SEQ ID NO: 11167 - RNA, 24 nt, Artificial Sequence
  Synthetic
uugccuccucgucggagcacuccu

SEQ ID NO: 11168 - RNA, 18 nt, Artificial Sequence
  Synthetic
aagaucccuuccuuagcu

SEQ ID NO: 11169 - RNA, 19 nt, Artificial Sequence
  Synthetic
aaagaucccuuccuuagcu

SEQ ID NO: 11170 - RNA, 20 nt, Artificial Sequence
  Synthetic
caaagaucccuuccuuagcu

SEQ ID NO: 11171 - RNA, 21 nt, Artificial Sequence
  Synthetic
ucaaagaucccuuccuuagcu

SEQ ID NO: 11172 - RNA, 22 nt, Artificial Sequence
  Synthetic
cucaaagaucccuuccuuagcu

SEQ ID NO: 11173 - RNA, 23 nt, Artificial Sequence
  Synthetic
gcucaaagaucccuuccuuagcu

SEQ ID NO: 11174 - RNA, 24 nt, Artificial Sequence
  Synthetic
agcucaaagaucccuuccuuagcu

SEQ ID NO: 11175 - RNA, 18 nt, Artificial Sequence
  Synthetic
agaggguggacuacggcu

SEQ ID NO: 11176 - RNA, 19 nt, Artificial Sequence
  Synthetic
gagaggguggacuacggcu

SEQ ID NO: 11177 - RNA, 20 nt, Artificial Sequence
  Synthetic
cgagaggguggacuacggcu

SEQ ID NO: 11178 - RNA, 21 nt, Artificial Sequence
  Synthetic
gcgagaggguggacuacggcu

SEQ ID NO: 11179 - RNA, 22 nt, Artificial Sequence
  Synthetic
agcgagaggguggacuacggcu

SEQ ID NO: 11180 - RNA, 23 nt, Artificial Sequence
  Synthetic
gagcgagaggguggacuacggcu

SEQ ID NO: 11181 - RNA, 24 nt, Artificial Sequence
  Synthetic
agagcgagaggguggacuacggcu

SEQ ID NO: 11182 - RNA, 18 nt, Artificial Sequence
  Synthetic
cgguugaauccaauggcu

SEQ ID NO: 11183 - RNA, 19 nt, Artificial Sequence
  Synthetic
gcgguugaauccaauggcu

SEQ ID NO: 11184 - RNA, 20 nt, Artificial Sequence
  Synthetic
ugcgguugaauccaauggcu

SEQ ID NO: 11185 - RNA, 21 nt, Artificial Sequence
  Synthetic
cugcgguugaauccaauggcu

SEQ ID NO: 11186 - RNA, 22 nt, Artificial Sequence
  Synthetic
gcugcgguugaauccaauggcu

SEQ ID NO: 11187 - RNA, 23 nt, Artificial Sequence
  Synthetic
ugcugcgguugaauccaauggcu

SEQ ID NO: 11188 - RNA, 24 nt, Artificial Sequence
  Synthetic
gugcugcgguugaauccaauggcu

SEQ ID NO: 11189 - RNA, 18 nt, Artificial Sequence
  Synthetic
agcuggacggagggaucu

SEQ ID NO: 11190 - RNA, 19 nt, Artificial Sequence
  Synthetic
gagcuggacggagggaucu

SEQ ID NO: 11191 - RNA, 20 nt, Artificial Sequence
  Synthetic
ggagcuggacggagggaucu

SEQ ID NO: 11192 - RNA, 21 nt, Artificial Sequence
  Synthetic
gggagcuggacggagggaucu

SEQ ID NO: 11193 - RNA, 22 nt, Artificial Sequence
  Synthetic
ggggagcuggacggagggaucu

SEQ ID NO: 11194 - RNA, 23 nt, Artificial Sequence
  Synthetic
cggggagcuggacggagggaucu

SEQ ID NO: 11195 - RNA, 24 nt, Artificial Sequence
  Synthetic
ccggggagcuggacggagggaucu

SEQ ID NO: 11196 - RNA, 18 nt, Artificial Sequence
  Synthetic
cccgccauggauuucucu

SEQ ID NO: 11197 - RNA, 19 nt, Artificial Sequence
  Synthetic
ucccgccauggauuucucu

SEQ ID NO: 11198 - RNA, 20 nt, Artificial Sequence
  Synthetic
cucccgccauggauuucucu

SEQ ID NO: 11199 - RNA, 21 nt, Artificial Sequence
  Synthetic
ccucccgccauggauuucucu

SEQ ID NO: 11200 - RNA, 22 nt, Artificial Sequence
  Synthetic
gccucccgccauggauuucucu

SEQ ID NO: 11201 - RNA, 23 nt, Artificial Sequence
  Synthetic
agccucccgccauggauuucucu

SEQ ID NO: 11202 - RNA, 24 nt, Artificial Sequence
  Synthetic
gagccucccgccauggauuucucu

SEQ ID NO: 11203 - RNA, 18 nt, Artificial Sequence
  Synthetic
cgagagcccuuaaguucu

SEQ ID NO: 11204 - RNA, 19 nt, Artificial Sequence
  Synthetic
ucgagagcccuuaaguucu

SEQ ID NO: 11205 - RNA, 20 nt, Artificial Sequence
  Synthetic
cucgagagcccuuaaguucu

SEQ ID NO: 11206 - RNA, 21 nt, Artificial Sequence
  Synthetic
gcucgagagcccuuaaguucu

SEQ ID NO: 11207 - RNA, 22 nt, Artificial Sequence
  Synthetic
agcucgagagcccuuaaguucu

SEQ ID NO: 11208 - RNA, 23 nt, Artificial Sequence
  Synthetic
aagcucgagagcccuuaaguucu

SEQ ID NO: 11209 - RNA, 24 nt, Artificial Sequence
  Synthetic
gaagcucgagagcccuuaaguucu

SEQ ID NO: 11210 - RNA, 18 nt, Artificial Sequence
  Synthetic
cgccuuuugccuccucgu

SEQ ID NO: 11211 - RNA, 19 nt, Artificial Sequence
  Synthetic
ucgccuuuugccuccucgu

SEQ ID NO: 11212 - RNA, 20 nt, Artificial Sequence
  Synthetic
aucgccuuuugccuccucgu

SEQ ID NO: 11213 - RNA, 21 nt, Artificial Sequence
  Synthetic
aaucgccuuuugccuccucgu

SEQ ID NO: 11214 - RNA, 22 nt, Artificial Sequence
  Synthetic
caaucgccuuuugccuccucgu

SEQ ID NO: 11215 - RNA, 23 nt, Artificial Sequence
  Synthetic
acaaucgccuuuugccuccucgu

SEQ ID NO: 11216 - RNA, 24 nt, Artificial Sequence
  Synthetic
gacaaucgccuuuugccuccucgu

SEQ ID NO: 11217 - RNA, 18 nt, Artificial Sequence
  Synthetic
acgccccauauuaguggu

SEQ ID NO: 11218 - RNA, 19 nt, Artificial Sequence
  Synthetic
cacgccccauauuaguggu

SEQ ID NO: 11219 - RNA, 20 nt, Artificial Sequence
  Synthetic
gcacgccccauauuaguggu

SEQ ID NO: 11220 - RNA, 21 nt, Artificial Sequence
  Synthetic
agcacgccccauauuaguggu

SEQ ID NO: 11221 - RNA, 22 nt, Artificial Sequence
  Synthetic
gagcacgccccauauuaguggu

SEQ ID NO: 11222 - RNA, 23 nt, Artificial Sequence
  Synthetic
ggagcacgccccauauuaguggu

SEQ ID NO: 11223 - RNA, 24 nt, Artificial Sequence
  Synthetic
gggagcacgccccauauuaguggu

SEQ ID NO: 11224 - RNA, 18 nt, Artificial Sequence
  Synthetic
gacacuugugaguacugu

SEQ ID NO: 11225 - RNA, 19 nt, Artificial Sequence
  Synthetic
cgacacuugugaguacugu

SEQ ID NO: 11226 - RNA, 20 nt, Artificial Sequence
  Synthetic
gcgacacuugugaguacugu

SEQ ID NO: 11227 - RNA, 21 nt, Artificial Sequence
  Synthetic
agcgacacuugugaguacugu

SEQ ID NO: 11228 - RNA, 22 nt, Artificial Sequence
  Synthetic
cagcgacacuugugaguacugu

SEQ ID NO: 11229 - RNA, 23 nt, Artificial Sequence
  Synthetic
gcagcgacacuugugaguacugu

SEQ ID NO: 11230 - RNA, 24 nt, Artificial Sequence
  Synthetic
cgcagcgacacuugugaguacugu

SEQ ID NO: 11231 - RNA, 18 nt, Artificial Sequence
  Synthetic
cgcggguugguaucccuu

SEQ ID NO: 11232 - RNA, 19 nt, Artificial Sequence
  Synthetic
ccgcggguugguaucccuu

SEQ ID NO: 11233 - RNA, 20 nt, Artificial Sequence
  Synthetic
cccgcggguugguaucccuu

SEQ ID NO: 11234 - RNA, 21 nt, Artificial Sequence
  Synthetic
ccccgcggguugguaucccuu

SEQ ID NO: 11235 - RNA, 22 nt, Artificial Sequence
  Synthetic
accccgcggguugguaucccuu

SEQ ID NO: 11236 - RNA, 23 nt, Artificial Sequence
  Synthetic
gaccccgcggguugguaucccuu

SEQ ID NO: 11237 - RNA, 24 nt, Artificial Sequence
  Synthetic
ugaccccgcggguugguaucccuu

SEQ ID NO: 11238 - RNA, 18 nt, Artificial Sequence
  Synthetic
agaucccuuccuuagcuu

SEQ ID NO: 11239 - RNA, 19 nt, Artificial Sequence
  Synthetic
aagaucccuuccuuagcuu

SEQ ID NO: 11240 - RNA, 20 nt, Artificial Sequence
  Synthetic
aaagaucccuuccuuagcuu

SEQ ID NO: 11241 - RNA, 21 nt, Artificial Sequence
  Synthetic
caaagaucccuuccuuagcuu

SEQ ID NO: 11242 - RNA, 22 nt, Artificial Sequence
  Synthetic
ucaaagaucccuuccuuagcuu

SEQ ID NO: 11243 - RNA, 23 nt, Artificial Sequence
  Synthetic
cucaaagaucccuuccuuagcuu

SEQ ID NO: 11244 - RNA, 24 nt, Artificial Sequence
  Synthetic
gcucaaagaucccuuccuuagcuu

SEQ ID NO: 11245 - RNA, 18 nt, Artificial Sequence
  Synthetic
cucgagagcccuuaaguu

SEQ ID NO: 11246 - RNA, 19 nt, Artificial Sequence
  Synthetic
gcucgagagcccuuaaguu

SEQ ID NO: 11247 - RNA, 20 nt, Artificial Sequence
  Synthetic
agcucgagagcccuuaaguu

SEQ ID NO: 11248 - RNA, 21 nt, Artificial Sequence
  Synthetic
aagcucgagagcccuuaaguu

SEQ ID NO: 11249 - RNA, 22 nt, Artificial Sequence
  Synthetic
gaagcucgagagcccuuaaguu

SEQ ID NO: 11250 - RNA, 23 nt, Artificial Sequence
  Synthetic
ggaagcucgagagcccuuaaguu

SEQ ID NO: 11251 - RNA, 24 nt, Artificial Sequence
  Synthetic
uggaagcucgagagcccuuaaguu

SEQ ID NO: 11252 - RNA, 18 nt, Artificial Sequence
  Synthetic
ggcaagacguucaaauuu

SEQ ID NO: 11253 - RNA, 19 nt, Artificial Sequence
  Synthetic
cggcaagacguucaaauuu

SEQ ID NO: 11254 - RNA, 20 nt, Artificial Sequence
  Synthetic
gcggcaagacguucaaauuu

SEQ ID NO: 11255 - RNA, 21 nt, Artificial Sequence
  Synthetic
ugcggcaagacguucaaauuu

SEQ ID NO: 11256 - RNA, 22 nt, Artificial Sequence
  Synthetic
cugcggcaagacguucaaauuu

SEQ ID NO: 11257 - RNA, 23 nt, Artificial Sequence
  Synthetic
ucugcggcaagacguucaaauuu

SEQ ID NO: 11258 - RNA, 24 nt, Artificial Sequence
  Synthetic
uucugcggcaagacguucaaauuu

SEQ ID NO: 11259 - RNA, 17 nt, Artificial Sequence
  Synthetic
cgauuggugaaggggaa

SEQ ID NO: 11260 - RNA, 17 nt, Artificial Sequence
  Synthetic
auuggaugcuuuuuuca

SEQ ID NO: 11261 - RNA, 17 nt, Artificial Sequence
  Synthetic
caggucacgccagagga

SEQ ID NO: 11262 - RNA, 17 nt, Artificial Sequence
  Synthetic
cuuacgcgagaauuccc

SEQ ID NO: 11263 - RNA, 17 nt, Artificial Sequence
  Synthetic
ccuggaugccaaccucc

SEQ ID NO: 11264 - RNA, 17 nt, Artificial Sequence
  Synthetic
aacaaugcaauggcagc

SEQ ID NO: 11265 - RNA, 17 nt, Artificial Sequence
  Synthetic
ggggaagguggcuuauc

SEQ ID NO: 11266 - RNA, 17 nt, Artificial Sequence
  Synthetic
gguucaucaucuguaag

SEQ ID NO: 11267 - RNA, 17 nt, Artificial Sequence
  Synthetic
ugcacucaucccaggcg

SEQ ID NO: 11268 - RNA, 17 nt, Artificial Sequence
  Synthetic
uuaagugcugggguuug

SEQ ID NO: 11269 - RNA, 17 nt, Artificial Sequence
  Synthetic
ccaaccuccacgggauu

SEQ ID NO: 11270 - RNA, 20 nt, Artificial Sequence
  Synthetic
ucucgauuggugaaggggaa

SEQ ID NO: 11271 - RNA, 20 nt, Artificial Sequence
  Synthetic
gggauuggaugcuuuuuuca

SEQ ID NO: 11272 - RNA, 20 nt, Artificial Sequence
  Synthetic
auccaggucacgccagagga

SEQ ID NO: 11273 - RNA, 20 nt, Artificial Sequence
  Synthetic
uuacuuacgcgagaauuccc

SEQ ID NO: 11274 - RNA, 20 nt, Artificial Sequence
  Synthetic
ugaccuggaugccaaccucc

SEQ ID NO: 11275 - RNA, 20 nt, Artificial Sequence
  Synthetic
ggaaacaaugcaauggcagc

SEQ ID NO: 11276 - RNA, 20 nt, Artificial Sequence
  Synthetic
gaaggggaagguggcuuauc

SEQ ID NO: 11277 - RNA, 20 nt, Artificial Sequence
  Synthetic
ucugguucaucaucuguaag

SEQ ID NO: 11278 - RNA, 20 nt, Artificial Sequence
  Synthetic
uucugcacucaucccaggcg

SEQ ID NO: 11279 - RNA, 20 nt, Artificial Sequence
  Synthetic
ugcuuaagugcugggguuug

SEQ ID NO: 11280 - RNA, 20 nt, Artificial Sequence
  Synthetic
augccaaccuccacgggauu

SEQ ID NO: 11281 - RNA, 17 nt, Artificial Sequence
  Synthetic
uccgacgaggaggcaaa

SEQ ID NO: 11282 - RNA, 17 nt, Artificial Sequence
  Synthetic
cuuccggccuggcagaa

SEQ ID NO: 11283 - RNA, 17 nt, Artificial Sequence
  Synthetic
uccguguucgcuuucua

SEQ ID NO: 11284 - RNA, 17 nt, Artificial Sequence
  Synthetic
agagcgagaggguggac

SEQ ID NO: 11285 - RNA, 17 nt, Artificial Sequence
  Synthetic
cgggaggcuccauagcc

SEQ ID NO: 11286 - RNA, 17 nt, Artificial Sequence
  Synthetic
uucccagccaccucucc

SEQ ID NO: 11287 - RNA, 17 nt, Artificial Sequence
  Synthetic
agcuggggcugcccagc

SEQ ID NO: 11288 - RNA, 17 nt, Artificial Sequence
  Synthetic
gcuauggagccucccgc

SEQ ID NO: 11289 - RNA, 17 nt, Artificial Sequence
  Synthetic
cggccagguggccgcgc

SEQ ID NO: 11290 - RNA, 17 nt, Artificial Sequence
  Synthetic
gcgucuucauguggcgc

SEQ ID NO: 11291 - RNA, 17 nt, Artificial Sequence
  Synthetic
ucagaacuuaagggcuc

SEQ ID NO: 11292 - RNA, 17 nt, Artificial Sequence
  Synthetic
agcucaaagaucccuuc

SEQ ID NO: 11293 - RNA, 17 nt, Artificial Sequence
  Synthetic
gcaggucgaacuccuuc

SEQ ID NO: 11294 - RNA, 17 nt, Artificial Sequence
  Synthetic
ggggcgucgccaggaag

SEQ ID NO: 11295 - RNA, 17 nt, Artificial Sequence
  Synthetic
ccaggaucaguaucgag

SEQ ID NO: 11296 - RNA, 17 nt, Artificial Sequence
  Synthetic
ggcugggagggaggagg

SEQ ID NO: 11297 - RNA, 17 nt, Artificial Sequence
  Synthetic
gacuugaccgucauggg

SEQ ID NO: 11298 - RNA, 17 nt, Artificial Sequence
  Synthetic
cggccucggccaggugg

SEQ ID NO: 11299 - RNA, 17 nt, Artificial Sequence
  Synthetic
gcaugugcgucuucaug

SEQ ID NO: 11300 - RNA, 17 nt, Artificial Sequence
  Synthetic
cgcacagguugcacuug

SEQ ID NO: 11301 - RNA, 17 nt, Artificial Sequence
  Synthetic
acuccuucucgagcuug

SEQ ID NO: 11302 - RNA, 17 nt, Artificial Sequence
  Synthetic
aacacgcacagaacacu

SEQ ID NO: 11303 - RNA, 17 nt, Artificial Sequence
  Synthetic
ccucggagaacgggagu

SEQ ID NO: 11304 - RNA, 17 nt, Artificial Sequence
  Synthetic
ggucaggggacuuccgu

SEQ ID NO: 11305 - RNA, 20 nt, Artificial Sequence
  Synthetic
ugcuccgacgaggaggcaaa

SEQ ID NO: 11306 - RNA, 20 nt, Artificial Sequence
  Synthetic
aggcuuccggccuggcagaa

SEQ ID NO: 11307 - RNA, 20 nt, Artificial Sequence
  Synthetic
acuuccguguucgcuuucua

SEQ ID NO: 11308 - RNA, 20 nt, Artificial Sequence
  Synthetic
cggagagcgagaggguggac

SEQ ID NO: 11309 - RNA, 20 nt, Artificial Sequence
  Synthetic
uggcgggaggcuccauagcc

SEQ ID NO: 11310 - RNA, 20 nt, Artificial Sequence
  Synthetic
uccuucccagccaccucucc

SEQ ID NO: 11311 - RNA, 20 nt, Artificial Sequence
  Synthetic
gcgagcuggggcugcccagc

SEQ ID NO: 11312 - RNA, 20 nt, Artificial Sequence
  Synthetic
auggcuauggagccucccgc

SEQ ID NO: 11313 - RNA, 20 nt, Artificial Sequence
  Synthetic
ccucggccagguggccgcgc

SEQ ID NO: 11314 - RNA, 20 nt, Artificial Sequence
  Synthetic
ugugcgucuucauguggcgc

SEQ ID NO: 11315 - RNA, 20 nt, Artificial Sequence
  Synthetic
uucucagaacuuaagggcuc

SEQ ID NO: 11316 - RNA, 20 nt, Artificial Sequence
  Synthetic
ggcagcucaaagaucccuuc

SEQ ID NO: 11317 - RNA, 20 nt, Artificial Sequence
  Synthetic
ggggcaggucgaacuccuuc

SEQ ID NO: 11318 - RNA, 20 nt, Artificial Sequence
  Synthetic
gggggggcgucgccaggaag

SEQ ID NO: 11319 - RNA, 20 nt, Artificial Sequence
  Synthetic
auaccaggaucaguaucgag

SEQ ID NO: 11320 - RNA, 20 nt, Artificial Sequence
  Synthetic
gggggcugggagggaggagg

SEQ ID NO: 11321 - RNA, 20 nt, Artificial Sequence
  Synthetic
ucggacuugaccgucauggg

SEQ ID NO: 11322 - RNA, 20 nt, Artificial Sequence
  Synthetic
ccucggccucggccaggugg

SEQ ID NO: 11323 - RNA, 20 nt, Artificial Sequence
  Synthetic
ugugcaugugcgucuucaug

SEQ ID NO: 11324 - RNA, 20 nt, Artificial Sequence
  Synthetic
ggucgcacagguugcacuug

SEQ ID NO: 11325 - RNA, 20 nt, Artificial Sequence
  Synthetic
cgaacuccuucucgagcuug

SEQ ID NO: 11326 - RNA, 20 nt, Artificial Sequence
  Synthetic
ugcaacacgcacagaacacu

SEQ ID NO: 11327 - RNA, 20 nt, Artificial Sequence
  Synthetic
acuccucggagaacgggagu

SEQ ID NO: 11328 - RNA, 20 nt, Artificial Sequence
  Synthetic
cggggucaggggacuuccgu

SEQ ID NO: 11329 - RNA, 17 nt, Artificial Sequence
  Synthetic
aagugcauacacggcaa

SEQ ID NO: 11330 - RNA, 17 nt, Artificial Sequence
  Synthetic
uugcuugcggcgagaca

SEQ ID NO: 11331 - RNA, 17 nt, Artificial Sequence
  Synthetic
augucucgccgcaagca

SEQ ID NO: 11332 - RNA, 17 nt, Artificial Sequence
  Synthetic
ugacguucaaguucgca

SEQ ID NO: 11333 - RNA, 17 nt, Artificial Sequence
  Synthetic
uugugggagagccguca

SEQ ID NO: 11334 - RNA, 17 nt, Artificial Sequence
  Synthetic
acggcaaugguuccaga

SEQ ID NO: 11335 - RNA, 17 nt, Artificial Sequence
  Synthetic
gcgcucgcugcggccac

SEQ ID NO: 11336 - RNA, 17 nt, Artificial Sequence
  Synthetic
acgccagacgcggcccc

SEQ ID NO: 11337 - RNA, 17 nt, Artificial Sequence
  Synthetic
uucacaucgggagagcc

SEQ ID NO: 11338 - RNA, 17 nt, Artificial Sequence
  Synthetic
guucacaucgggagagc

SEQ ID NO: 11339 - RNA, 17 nt, Artificial Sequence
  Synthetic
uaaucacgagagcgcgc

SEQ ID NO: 11340 - RNA, 17 nt, Artificial Sequence
  Synthetic
cugacguucaaguucgc

SEQ ID NO: 11341 - RNA, 17 nt, Artificial Sequence
  Synthetic
cccguuugcuuaagugc

SEQ ID NO: 11342 - RNA, 17 nt, Artificial Sequence
  Synthetic
acggcucgguucacauc

SEQ ID NO: 11343 - RNA, 17 nt, Artificial Sequence
  Synthetic
cuugaacgucaggaguc

SEQ ID NO: 11344 - RNA, 17 nt, Artificial Sequence
  Synthetic
cugcgaacuugaacguc

SEQ ID NO: 11345 - RNA, 17 nt, Artificial Sequence
  Synthetic
cccccgggggccgcguc

SEQ ID NO: 11346 - RNA, 17 nt, Artificial Sequence
  Synthetic
uccgcggacgccagacg

SEQ ID NO: 11347 - RNA, 17 nt, Artificial Sequence
  Synthetic
gacuagaagcaaaagcg

SEQ ID NO: 11348 - RNA, 17 nt, Artificial Sequence
  Synthetic
agacauggugggcugcg

SEQ ID NO: 11349 - RNA, 17 nt, Artificial Sequence
  Synthetic
aaaaccuccgagagucg

SEQ ID NO: 11350 - RNA, 17 nt, Artificial Sequence
  Synthetic
uuuaccucgacucucgg

SEQ ID NO: 11351 - RNA, 17 nt, Artificial Sequence
  Synthetic
aguccgcgugugugggg

SEQ ID NO: 11352 - RNA, 17 nt, Artificial Sequence
  Synthetic
cguuugcuuaagugcug

SEQ ID NO: 11353 - RNA, 17 nt, Artificial Sequence
  Synthetic
uagaguccgcgugugug

SEQ ID NO: 11354 - RNA, 17 nt, Artificial Sequence
  Synthetic
gacggcucgguucacau

SEQ ID NO: 11355 - RNA, 17 nt, Artificial Sequence
  Synthetic
cuccccgcacuggccau

SEQ ID NO: 11356 - RNA, 17 nt, Artificial Sequence
  Synthetic
cggcaaugguuccagau

SEQ ID NO: 11357 - RNA, 17 nt, Artificial Sequence
  Synthetic
gcgggcggacgacggcu

SEQ ID NO: 11358 - RNA, 17 nt, Artificial Sequence
  Synthetic
ccguuugcuuaagugcu

SEQ ID NO: 11359 - RNA, 17 nt, Artificial Sequence
  Synthetic
uugcggcgagacauggu

SEQ ID NO: 11360 - RNA, 20 nt, Artificial Sequence
  Synthetic
cguggccgggagagaagaaa

SEQ ID NO: 11361 - RNA, 20 nt, Artificial Sequence
  Synthetic
gccuugcuugcggcgagaca

SEQ ID NO: 11362 - RNA, 20 nt, Artificial Sequence
  Synthetic
accaugucucgccgcaagca

SEQ ID NO: 11363 - RNA, 20 nt, Artificial Sequence
  Synthetic
uccugacguucaaguucgca

SEQ ID NO: 11364 - RNA, 20 nt, Artificial Sequence
  Synthetic
acaccaauggacacacauca

SEQ ID NO: 11365 - RNA, 20 nt, Artificial Sequence
  Synthetic
uacacggcaaugguuccaga

SEQ ID NO: 11366 - RNA, 20 nt, Artificial Sequence
  Synthetic
gccaauggccagugcgggga

SEQ ID NO: 11367 - RNA, 20 nt, Artificial Sequence
  Synthetic
aaugguuccagaugggauga

SEQ ID NO: 11368 - RNA, 20 nt, Artificial Sequence
  Synthetic
gagucuccuucuuucuaacc

SEQ ID NO: 11369 - RNA, 20 nt, Artificial Sequence
  Synthetic
cgguucacaucgggagagcc

SEQ ID NO: 11370 - RNA, 20 nt, Artificial Sequence
  Synthetic
ucgguucacaucgggagagc

SEQ ID NO: 11371 - RNA, 20 nt, Artificial Sequence
  Synthetic
ccgcgugugugggggggagc

SEQ ID NO: 11372 - RNA, 20 nt, Artificial Sequence
  Synthetic
uaauaaucacgagagcgcgc

SEQ ID NO: 11373 - RNA, 20 nt, Artificial Sequence
  Synthetic
aaauaauacaaagauggcgc

SEQ ID NO: 11374 - RNA, 20 nt, Artificial Sequence
  Synthetic
cuccugacguucaaguucgc

SEQ ID NO: 11375 - RNA, 20 nt, Artificial Sequence
  Synthetic
gagacacacaaaacaugggc

SEQ ID NO: 11376 - RNA, 20 nt, Artificial Sequence
  Synthetic
auucccguuugcuuaagugc

SEQ ID NO: 11377 - RNA, 20 nt, Artificial Sequence
  Synthetic
acgacggcucgguucacauc

SEQ ID NO: 11378 - RNA, 20 nt, Artificial Sequence
  Synthetic
cgcacuugaacuugcagcuc

SEQ ID NO: 11379 - RNA, 20 nt, Artificial Sequence
  Synthetic
ucccugcgaacuugaacguc

SEQ ID NO: 11380 - RNA, 20 nt, Artificial Sequence
  Synthetic
ucgagguaaaagagauaaag

SEQ ID NO: 11381 - RNA, 20 nt, Artificial Sequence
  Synthetic
ccaauggccagugcggggag

SEQ ID NO: 11382 - RNA, 20 nt, Artificial Sequence
  Synthetic
gacgccagacgcggcccccg

SEQ ID NO: 11383 - RNA, 20 nt, Artificial Sequence
  Synthetic
ugcggccacuggugagcccg

SEQ ID NO: 11384 - RNA, 20 nt, Artificial Sequence
  Synthetic
ggggccgcgucuggcguccg

SEQ ID NO: 11385 - RNA, 20 nt, Artificial Sequence
  Synthetic
gcgagacauggugggcugcg

SEQ ID NO: 11386 - RNA, 20 nt, Artificial Sequence
  Synthetic
agaaaaaccuccgagagucg

SEQ ID NO: 11387 - RNA, 20 nt, Artificial Sequence
  Synthetic
acgccagacgcggcccccgg

SEQ ID NO: 11388 - RNA, 20 nt, Artificial Sequence
  Synthetic
ucuuuuaccucgacucucgg

SEQ ID NO: 11389 - RNA, 20 nt, Artificial Sequence
  Synthetic
uagaguccgcgugugugggg

SEQ ID NO: 11390 - RNA, 20 nt, Artificial Sequence
  Synthetic
uuuagaguccgcgugugugg

SEQ ID NO: 11391 - RNA, 20 nt, Artificial Sequence
  Synthetic
caaugguuccagaugggaug

SEQ ID NO: 11392 - RNA, 20 nt, Artificial Sequence
  Synthetic
cggcgagacauggugggcug

SEQ ID NO: 11393 - RNA, 20 nt, Artificial Sequence
  Synthetic
cugagcugcaaguucaagug

SEQ ID NO: 11394 - RNA, 20 nt, Artificial Sequence
  Synthetic
cauuuuagaguccgcgugug

SEQ ID NO: 11395 - RNA, 20 nt, Artificial Sequence
  Synthetic
gacgacggcucgguucacau

SEQ ID NO: 11396 - RNA, 20 nt, Artificial Sequence
  Synthetic
agccccugauguguguccau

SEQ ID NO: 11397 - RNA, 20 nt, Artificial Sequence
  Synthetic
gcggcgggcggacgacggcu

SEQ ID NO: 11398 - RNA, 20 nt, Artificial Sequence
  Synthetic
aucucuuuuaccucgacucu

SEQ ID NO: 11399 - RNA, 20 nt, Artificial Sequence
  Synthetic
ugcuugcggcgagacauggu

SEQ ID NO: 11400 - RNA, 20 nt, Artificial Sequence
  Synthetic
auuuuagaguccgcgugugu

SEQ ID NO: 11401 - RNA, 17 nt, Artificial Sequence
  Synthetic
gagagagaugaaaaaaa

SEQ ID NO: 11402 - RNA, 17 nt, Artificial Sequence
  Synthetic
cccagcacuuaagcaaa

SEQ ID NO: 11403 - RNA, 17 nt, Artificial Sequence
  Synthetic
uuauuuuggaugucaaa

SEQ ID NO: 11404 - RNA, 17 nt, Artificial Sequence
  Synthetic
ggccgggagagaagaaa

SEQ ID NO: 11405 - RNA, 17 nt, Artificial Sequence
  Synthetic
gcaggggugggaggaaa

SEQ ID NO: 11406 - RNA, 17 nt, Artificial Sequence
  Synthetic
gagguaaaagagauaaa

SEQ ID NO: 11407 - RNA, 17 nt, Artificial Sequence
  Synthetic
aauuaaauaaaauuaaa

SEQ ID NO: 11408 - RNA, 17 nt, Artificial Sequence
  Synthetic
ggggaagcucacaccaa

SEQ ID NO: 11409 - RNA, 17 nt, Artificial Sequence
  Synthetic
agaccaggacaagccaa

SEQ ID NO: 11410 - RNA, 17 nt, Artificial Sequence
  Synthetic
uggccgggagagaagaa

SEQ ID NO: 11411 - RNA, 17 nt, Artificial Sequence
  Synthetic
gggcgagcaggagagaa

SEQ ID NO: 11412 - RNA, 17 nt, Artificial Sequence
  Synthetic
ggcaggggugggaggaa

SEQ ID NO: 11413 - RNA, 17 nt, Artificial Sequence
  Synthetic
agaaggggaggagggaa

SEQ ID NO: 11414 - RNA, 17 nt, Artificial Sequence
  Synthetic
cgagguaaaagagauaa

SEQ ID NO: 11415 - RNA, 17 nt, Artificial Sequence
  Synthetic
cagagacacacaaaaca

SEQ ID NO: 11416 - RNA, 17 nt, Artificial Sequence
  Synthetic
ucucaaaagugcauaca

SEQ ID NO: 11417 - RNA, 17 nt, Artificial Sequence
  Synthetic
gugugugggggggagca

SEQ ID NO: 11418 - RNA, 17 nt, Artificial Sequence
  Synthetic
aauacaaagauggcgca

SEQ ID NO: 11419 - RNA, 17 nt, Artificial Sequence
  Synthetic
cacacaaaacaugggca

SEQ ID NO: 11420 - RNA, 17 nt, Artificial Sequence
  Synthetic
agaagaaagggguggca

SEQ ID NO: 11421 - RNA, 17 nt, Artificial Sequence
  Synthetic
ccaauggacacacauca

SEQ ID NO: 11422 - RNA, 17 nt, Artificial Sequence
  Synthetic
cuugaacuugcagcuca

SEQ ID NO: 11423 - RNA, 17 nt, Artificial Sequence
  Synthetic
aaaaaaaaaaaaaaaga

SEQ ID NO: 11424 - RNA, 17 nt, Artificial Sequence
  Synthetic
uagaaauaauacaaaga

SEQ ID NO: 11425 - RNA, 17 nt, Artificial Sequence
  Synthetic
gagccggguuagaaaga

SEQ ID NO: 11426 - RNA, 17 nt, Artificial Sequence
  Synthetic
agggcgagcaggagaga

SEQ ID NO: 11427 - RNA, 17 nt, Artificial Sequence
  Synthetic
aaagcgagggggagaga

SEQ ID NO: 11428 - RNA, 17 nt, Artificial Sequence
  Synthetic
gagagaagagagauaga

SEQ ID NO: 11429 - RNA, 17 nt, Artificial Sequence
  Synthetic
cggcggcgggcggacga

SEQ ID NO: 11430 - RNA, 17 nt, Artificial Sequence
  Synthetic
ggggaggggcgggccga

SEQ ID NO: 11431 - RNA, 17 nt, Artificial Sequence
  Synthetic
acuagaagcaaaagcga

SEQ ID NO: 11432 - RNA, 17 nt, Artificial Sequence
  Synthetic
aggagagaaggggagga

SEQ ID NO: 11433 - RNA, 17 nt, Artificial Sequence
  Synthetic
gagaaggggaggaggga

SEQ ID NO: 11434 - RNA, 17 nt, Artificial Sequence
  Synthetic
ggggcgggccgagggga

SEQ ID NO: 11435 - RNA, 17 nt, Artificial Sequence
  Synthetic
aauggccagugcgggga

SEQ ID NO: 11436 - RNA, 17 nt, Artificial Sequence
  Synthetic
acgcggcccccggggga

SEQ ID NO: 11437 - RNA, 17 nt, Artificial Sequence
  Synthetic
aacgucaggagucugga

SEQ ID NO: 11438 - RNA, 17 nt, Artificial Sequence
  Synthetic
uuaaaaaaaagccauga

SEQ ID NO: 11439 - RNA, 17 nt, Artificial Sequence
  Synthetic
gguuccagaugggauga

SEQ ID NO: 11440 - RNA, 17 nt, Artificial Sequence
  Synthetic
ccagcacuuaagcaaac

SEQ ID NO: 11441 - RNA, 17 nt, Artificial Sequence
  Synthetic
ccucccccuccccgcac

SEQ ID NO: 11442 - RNA, 17 nt, Artificial Sequence
  Synthetic
ucuccuucuuucuaacc

SEQ ID NO: 11443 - RNA, 17 nt, Artificial Sequence
  Synthetic
gacaugaaaaagagacc

SEQ ID NO: 11444 - RNA, 17 nt, Artificial Sequence
  Synthetic
cgccagacgcggccccc

SEQ ID NO: 11445 - RNA, 17 nt, Artificial Sequence
  Synthetic
cggcccgccccuccccc

SEQ ID NO: 11446 - RNA, 17 nt, Artificial Sequence
  Synthetic
ucggcccgccccucccc

SEQ ID NO: 11447 - RNA, 17 nt, Artificial Sequence
  Synthetic
gcggcgguggcguggcc

SEQ ID NO: 11448 - RNA, 17 nt, Artificial Sequence
  Synthetic
accccuuucuucucucc

SEQ ID NO: 11449 - RNA, 17 nt, Artificial Sequence
  Synthetic
uggccauuggcuugucc

SEQ ID NO: 11450 - RNA, 17 nt, Artificial Sequence
  Synthetic
acaugggcagggcgagc

SEQ ID NO: 11451 - RNA, 17 nt, Artificial Sequence
  Synthetic
cgugugugggggggagc

SEQ ID NO: 11452 - RNA, 17 nt, Artificial Sequence
  Synthetic
gggggcgcuggggccgc

SEQ ID NO: 11453 - RNA, 17 nt, Artificial Sequence
  Synthetic
ccgaggggagggggcgc

SEQ ID NO: 11454 - RNA, 17 nt, Artificial Sequence
  Synthetic
uaauacaaagauggcgc

SEQ ID NO: 11455 - RNA, 17 nt, Artificial Sequence
  Synthetic
gcggcggcggcggcggc

SEQ ID NO: 11456 - RNA, 17 nt, Artificial Sequence
  Synthetic
ggacacacaucaggggc

SEQ ID NO: 11457 - RNA, 17 nt, Artificial Sequence
  Synthetic
gcccccgggggaggggc

SEQ ID NO: 11458 - RNA, 17 nt, Artificial Sequence
  Synthetic
auggugggcugcggggc

SEQ ID NO: 11459 - RNA, 17 nt, Artificial Sequence
  Synthetic
agggggaggugcggggc

SEQ ID NO: 11460 - RNA, 17 nt, Artificial Sequence
  Synthetic
acacacaaaacaugggc

SEQ ID NO: 11461 - RNA, 17 nt, Artificial Sequence
  Synthetic
cgcggcgguggcguggc

SEQ ID NO: 11462 - RNA, 17 nt, Artificial Sequence
  Synthetic
gagaagaaagggguggc

SEQ ID NO: 11463 - RNA, 17 nt, Artificial Sequence
  Synthetic
gagacauggugggcugc

SEQ ID NO: 11464 - RNA, 17 nt, Artificial Sequence
  Synthetic
aagccaauggccagugc

SEQ ID NO: 11465 - RNA, 17 nt, Artificial Sequence
  Synthetic
cggggagggggaggugc

SEQ ID NO: 11466 - RNA, 17 nt, Artificial Sequence
  Synthetic
accaauggacacacauc

SEQ ID NO: 11467 - RNA, 17 nt, Artificial Sequence
  Synthetic
aaaacccucaucccauc

SEQ ID NO: 11468 - RNA, 17 nt, Artificial Sequence
  Synthetic
acuugaacuugcagcuc

SEQ ID NO: 11469 - RNA, 17 nt, Artificial Sequence
  Synthetic
gaugaagauauuuucuc

SEQ ID NO: 11470 - RNA, 17 nt, Artificial Sequence
  Synthetic
aaaaaaaaaaaaaaaag

SEQ ID NO: 11471 - RNA, 17 nt, Artificial Sequence
  Synthetic
gccgggagagaagaaag

SEQ ID NO: 11472 - RNA, 17 nt, Artificial Sequence
  Synthetic
agguaaaagagauaaag

SEQ ID NO: 11473 - RNA, 17 nt, Artificial Sequence
  Synthetic
ggcgagcaggagagaag

SEQ ID NO: 11474 - RNA, 17 nt, Artificial Sequence
  Synthetic
gaaggggaggagggaag

SEQ ID NO: 11475 - RNA, 17 nt, Artificial Sequence
  Synthetic
ggccgcgggcucaccag

SEQ ID NO: 11476 - RNA, 17 nt, Artificial Sequence
  Synthetic
gaagaaagggguggcag

SEQ ID NO: 11477 - RNA, 17 nt, Artificial Sequence
  Synthetic
caauggacacacaucag

SEQ ID NO: 11478 - RNA, 17 nt, Artificial Sequence
  Synthetic
uugaacuugcagcucag

SEQ ID NO: 11479 - RNA, 17 nt, Artificial Sequence
  Synthetic
aagcgagggggagagag

SEQ ID NO: 11480 - RNA, 17 nt, Artificial Sequence
  Synthetic
aaaagcgagggggagag

SEQ ID NO: 11481 - RNA, 17 nt, Artificial Sequence
  Synthetic
gggaggggcgggccgag

SEQ ID NO: 11482 - RNA, 17 nt, Artificial Sequence
  Synthetic
cuagaagcaaaagcgag

SEQ ID NO: 11483 - RNA, 17 nt, Artificial Sequence
  Synthetic
gggcgggccgaggggag

SEQ ID NO: 11484 - RNA, 17 nt, Artificial Sequence
  Synthetic
auggccagugcggggag

SEQ ID NO: 11485 - RNA, 17 nt, Artificial Sequence
  Synthetic
cgcggcccccgggggag

SEQ ID NO: 11486 - RNA, 17 nt, Artificial Sequence
  Synthetic
agagagaagagagauag

SEQ ID NO: 11487 - RNA, 17 nt, Artificial Sequence
  Synthetic
gcucccccccacacacg

SEQ ID NO: 11488 - RNA, 17 nt, Artificial Sequence
  Synthetic
gccagacgcggcccccg

SEQ ID NO: 11489 - RNA, 17 nt, Artificial Sequence
  Synthetic
ggcccgccccucccccg

SEQ ID NO: 11490 - RNA, 17 nt, Artificial Sequence
  Synthetic
ggccacuggugagcccg

SEQ ID NO: 11491 - RNA, 17 nt, Artificial Sequence
  Synthetic
cggccacgccaccgccg

SEQ ID NO: 11492 - RNA, 17 nt, Artificial Sequence
  Synthetic
ggccgcagcgagcgccg

SEQ ID NO: 11493 - RNA, 17 nt, Artificial Sequence
  Synthetic
gggggaggggcgggccg

SEQ ID NO: 11494 - RNA, 17 nt, Artificial Sequence
  Synthetic
agggggcgcuggggccg

SEQ ID NO: 11495 - RNA, 17 nt, Artificial Sequence
  Synthetic
cggggcggggggcuccg

SEQ ID NO: 11496 - RNA, 17 nt, Artificial Sequence
  Synthetic
gccgcgucuggcguccg

SEQ ID NO: 11497 - RNA, 17 nt, Artificial Sequence
  Synthetic
gggggaggugcggggcg

SEQ ID NO: 11498 - RNA, 17 nt, Artificial Sequence
  Synthetic
gcgccgcggcgguggcg

SEQ ID NO: 11499 - RNA, 17 nt, Artificial Sequence
  Synthetic
agccaauggccagugcg

SEQ ID NO: 11500 - RNA, 17 nt, Artificial Sequence
  Synthetic
ggggagggggaggugcg

SEQ ID NO: 11501 - RNA, 17 nt, Artificial Sequence
  Synthetic
gguaaaagagauaaagg

SEQ ID NO: 11502 - RNA, 17 nt, Artificial Sequence
  Synthetic
ugaacuugcagcucagg

SEQ ID NO: 11503 - RNA, 17 nt, Artificial Sequence
  Synthetic
uagaagcaaaagcgagg

SEQ ID NO: 11504 - RNA, 17 nt, Artificial Sequence
  Synthetic
caggagagaaggggagg

SEQ ID NO: 11505 - RNA, 17 nt, Artificial Sequence
  Synthetic
ggcgggccgaggggagg

SEQ ID NO: 11506 - RNA, 17 nt, Artificial Sequence
  Synthetic
uggccagugcggggagg

SEQ ID NO: 11507 - RNA, 17 nt, Artificial Sequence
  Synthetic
ccagacgcggcccccgg

SEQ ID NO: 11508 - RNA, 17 nt, Artificial Sequence
  Synthetic
gcccgccccucccccgg

SEQ ID NO: 11509 - RNA, 17 nt, Artificial Sequence
  Synthetic
cgcagcgagcgccgcgg

SEQ ID NO: 11510 - RNA, 17 nt, Artificial Sequence
  Synthetic
agcgagcgccgcggcgg

SEQ ID NO: 11511 - RNA, 17 nt, Artificial Sequence
  Synthetic
ggcggcggcggcggcgg

SEQ ID NO: 11512 - RNA, 17 nt, Artificial Sequence
  Synthetic
gcgggcggcggcggcgg

SEQ ID NO: 11513 - RNA, 17 nt, Artificial Sequence
  Synthetic
ggggcgggcggcggcgg

SEQ ID NO: 11514 - RNA, 17 nt, Artificial Sequence
  Synthetic
ugcggggcgggcggcgg

SEQ ID NO: 11515 - RNA, 17 nt, Artificial Sequence
  Synthetic
ggcugcggggcgggcgg

SEQ ID NO: 11516 - RNA, 17 nt, Artificial Sequence
  Synthetic
ggggaggugcggggcgg

SEQ ID NO: 11517 - RNA, 17 nt, Artificial Sequence
  Synthetic
ggggugggaggaaaggg

SEQ ID NO: 11518 - RNA, 17 nt, Artificial Sequence
  Synthetic
gaacuugcagcucaggg

SEQ ID NO: 11519 - RNA, 17 nt, Artificial Sequence
  Synthetic
gcggcggcggcggcggg

SEQ ID NO: 11520 - RNA, 17 nt, Artificial Sequence
  Synthetic
gugggcugcggggcggg

SEQ ID NO: 11521 - RNA, 17 nt, Artificial Sequence
  Synthetic
gggaggugcggggcggg

SEQ ID NO: 11522 - RNA, 17 nt, Artificial Sequence
  Synthetic
gggagagaagaaagggg

SEQ ID NO: 11523 - RNA, 17 nt, Artificial Sequence
  Synthetic
gagcaggagagaagggg

SEQ ID NO: 11524 - RNA, 17 nt, Artificial Sequence
  Synthetic
gaaagggguggcagggg

SEQ ID NO: 11525 - RNA, 17 nt, Artificial Sequence
  Synthetic
aggggcgggccgagggg

SEQ ID NO: 11526 - RNA, 17 nt, Artificial Sequence
  Synthetic
ggcccccgggggagggg

SEQ ID NO: 11527 - RNA, 17 nt, Artificial Sequence
  Synthetic
cauggugggcugcgggg

SEQ ID NO: 11528 - RNA, 17 nt, Artificial Sequence
  Synthetic
caauggccagugcgggg

SEQ ID NO: 11529 - RNA, 17 nt, Artificial Sequence
  Synthetic
gagggggaggugcgggg

SEQ ID NO: 11530 - RNA, 17 nt, Artificial Sequence
  Synthetic
ccagugcggggaggggg

SEQ ID NO: 11531 - RNA, 17 nt, Artificial Sequence
  Synthetic
gacgcggcccccggggg

SEQ ID NO: 11532 - RNA, 17 nt, Artificial Sequence
  Synthetic
gggaggaaagggugggg

SEQ ID NO: 11533 - RNA, 17 nt, Artificial Sequence
  Synthetic
ugggaggaaaggguggg

SEQ ID NO: 11534 - RNA, 17 nt, Artificial Sequence
  Synthetic
gggguggcagggguggg

SEQ ID NO: 11535 - RNA, 17 nt, Artificial Sequence
  Synthetic
gaguccgcguguguggg

SEQ ID NO: 11536 - RNA, 17 nt, Artificial Sequence
  Synthetic
cuugcggcgagacaugg

SEQ ID NO: 11537 - RNA, 17 nt, Artificial Sequence
  Synthetic
gugggaggaaagggugg

SEQ ID NO: 11538 - RNA, 17 nt, Artificial Sequence
  Synthetic
agaguccgcgugugugg

SEQ ID NO: 11539 - RNA, 17 nt, Artificial Sequence
  Synthetic
ugguuccagaugggaug

SEQ ID NO: 11540 - RNA, 17 nt, Artificial Sequence
  Synthetic
gaggggagggggcgcug

SEQ ID NO: 11541 - RNA, 17 nt, Artificial Sequence
  Synthetic
cgccgcggcgcucgcug

SEQ ID NO: 11542 - RNA, 17 nt, Artificial Sequence
  Synthetic
cgagacauggugggcug

SEQ ID NO: 11543 - RNA, 17 nt, Artificial Sequence
  Synthetic
agcugcaaguucaagug

SEQ ID NO: 11544 - RNA, 17 nt, Artificial Sequence
  Synthetic
caagccaauggccagug

SEQ ID NO: 11545 - RNA, 17 nt, Artificial Sequence
  Synthetic
gcggggagggggaggug

SEQ ID NO: 11546 - RNA, 17 nt, Artificial Sequence
  Synthetic
ggugggaggaaagggug

SEQ ID NO: 11547 - RNA, 17 nt, Artificial Sequence
  Synthetic
uuuagaguccgcgugug

SEQ ID NO: 11548 - RNA, 17 nt, Artificial Sequence
  Synthetic
gcagggaagaugaauug

SEQ ID NO: 11549 - RNA, 17 nt, Artificial Sequence
  Synthetic
gggguuugccuugcuug

SEQ ID NO: 11550 - RNA, 17 nt, Artificial Sequence
  Synthetic
agagacacacaaaacau

SEQ ID NO: 11551 - RNA, 17 nt, Artificial Sequence
  Synthetic
cccugauguguguccau

SEQ ID NO: 11552 - RNA, 17 nt, Artificial Sequence
  Synthetic
auuauuauuacuauuau

SEQ ID NO: 11553 - RNA, 17 nt, Artificial Sequence
  Synthetic
ccagcgcccccuccccu

SEQ ID NO: 11554 - RNA, 17 nt, Artificial Sequence
  Synthetic
cgaggggagggggcgcu

SEQ ID NO: 11555 - RNA, 17 nt, Artificial Sequence
  Synthetic
ucuuuuaccucgacucu

SEQ ID NO: 11556 - RNA, 17 nt, Artificial Sequence
  Synthetic
gggugggaggaaagggu

SEQ ID NO: 11557 - RNA, 17 nt, Artificial Sequence
  Synthetic
aaagggguggcaggggu

SEQ ID NO: 11558 - RNA, 17 nt, Artificial Sequence
  Synthetic
uuagaguccgcgugugu

SEQ ID NO: 11559 - RNA, 17 nt, Artificial Sequence
  Synthetic
cagggaagaugaauugu

SEQ ID NO: 11560 - RNA, 17 nt, Artificial Sequence
  Synthetic
uuauuauuacuauuauu

SEQ ID NO: 11561 - RNA, 17 nt, Artificial Sequence
  Synthetic
uuauuucuaauuuauuu

SEQ ID NO: 11562 - RNA, 20 nt, Artificial Sequence
  Synthetic
agagagagagaugaaaaaaa

SEQ ID NO: 11563 - RNA, 20 nt, Artificial Sequence
  Synthetic
aaccccagcacuuaagcaaa

SEQ ID NO: 11564 - RNA, 20 nt, Artificial Sequence
  Synthetic
aauuuauuuuggaugucaaa

SEQ ID NO: 11565 - RNA, 20 nt, Artificial Sequence
  Synthetic
guggcaggggugggaggaaa

SEQ ID NO: 11566 - RNA, 20 nt, Artificial Sequence
  Synthetic
gucgagguaaaagagauaaa

SEQ ID NO: 11567 - RNA, 20 nt, Artificial Sequence
  Synthetic
uaaaauuaaauaaaauuaaa

SEQ ID NO: 11568 - RNA, 20 nt, Artificial Sequence
  Synthetic
gaaggggaagcucacaccaa

SEQ ID NO: 11569 - RNA, 20 nt, Artificial Sequence
  Synthetic
aagagaccaggacaagccaa

SEQ ID NO: 11570 - RNA, 20 nt, Artificial Sequence
  Synthetic
caaaagugcauacacggcaa

SEQ ID NO: 11571 - RNA, 20 nt, Artificial Sequence
  Synthetic
gcguggccgggagagaagaa

SEQ ID NO: 11572 - RNA, 20 nt, Artificial Sequence
  Synthetic
gcagggcgagcaggagagaa

SEQ ID NO: 11573 - RNA, 20 nt, Artificial Sequence
  Synthetic
gguggcaggggugggaggaa

SEQ ID NO: 11574 - RNA, 20 nt, Artificial Sequence
  Synthetic
gagagaaggggaggagggaa

SEQ ID NO: 11575 - RNA, 20 nt, Artificial Sequence
  Synthetic
agucgagguaaaagagauaa

SEQ ID NO: 11576 - RNA, 20 nt, Artificial Sequence
  Synthetic
ggacagagacacacaaaaca

SEQ ID NO: 11577 - RNA, 20 nt, Artificial Sequence
  Synthetic
cugucucaaaagugcauaca

SEQ ID NO: 11578 - RNA, 20 nt, Artificial Sequence
  Synthetic
cgcgugugugggggggagca

SEQ ID NO: 11579 - RNA, 20 nt, Artificial Sequence
  Synthetic
aauaauacaaagauggcgca

SEQ ID NO: 11580 - RNA, 20 nt, Artificial Sequence
  Synthetic
agacacacaaaacaugggca

SEQ ID NO: 11581 - RNA, 20 nt, Artificial Sequence
  Synthetic
gagagaagaaagggguggca

SEQ ID NO: 11582 - RNA, 20 nt, Artificial Sequence
  Synthetic
gcacuugaacuugcagcuca

SEQ ID NO: 11583 - RNA, 20 nt, Artificial Sequence
  Synthetic
gaauugugggagagccguca

SEQ ID NO: 11584 - RNA, 20 nt, Artificial Sequence
  Synthetic
aaaaaaaaaaaaaaaaaaga

SEQ ID NO: 11585 - RNA, 20 nt, Artificial Sequence
  Synthetic
aauuagaaauaauacaaaga

SEQ ID NO: 11586 - RNA, 20 nt, Artificial Sequence
  Synthetic
ggagagccggguuagaaaga

SEQ ID NO: 11587 - RNA, 20 nt, Artificial Sequence
  Synthetic
ggcagggcgagcaggagaga

SEQ ID NO: 11588 - RNA, 20 nt, Artificial Sequence
  Synthetic
gcaaaagcgagggggagaga

SEQ ID NO: 11589 - RNA, 20 nt, Artificial Sequence
  Synthetic
agagagagaagagagauaga

SEQ ID NO: 11590 - RNA, 20 nt, Artificial Sequence
  Synthetic
cggcggcggcgggcggacga

SEQ ID NO: 11591 - RNA, 20 nt, Artificial Sequence
  Synthetic
ccgggggaggggcgggccga

SEQ ID NO: 11592 - RNA, 20 nt, Artificial Sequence
  Synthetic
aggacuagaagcaaaagcga

SEQ ID NO: 11593 - RNA, 20 nt, Artificial Sequence
  Synthetic
agcaggagagaaggggagga

SEQ ID NO: 11594 - RNA, 20 nt, Artificial Sequence
  Synthetic
ggagagaaggggaggaggga

SEQ ID NO: 11595 - RNA, 20 nt, Artificial Sequence
  Synthetic
ggaggggcgggccgagggga

SEQ ID NO: 11596 - RNA, 20 nt, Artificial Sequence
  Synthetic
cagacgcggcccccggggga

SEQ ID NO: 11597 - RNA, 20 nt, Artificial Sequence
  Synthetic
uugaacgucaggagucugga

SEQ ID NO: 11598 - RNA, 20 nt, Artificial Sequence
  Synthetic
ugcuuaaaaaaaagccauga

SEQ ID NO: 11599 - RNA, 20 nt, Artificial Sequence
  Synthetic
accccagcacuuaagcaaac

SEQ ID NO: 11600 - RNA, 20 nt, Artificial Sequence
  Synthetic
gcggcgcucgcugcggccac

SEQ ID NO: 11601 - RNA, 20 nt, Artificial Sequence
  Synthetic
gcaccucccccuccccgcac

SEQ ID NO: 11602 - RNA, 20 nt, Artificial Sequence
  Synthetic
cuggacaugaaaaagagacc

SEQ ID NO: 11603 - RNA, 20 nt, Artificial Sequence
  Synthetic
ggacgccagacgcggccccc

SEQ ID NO: 11604 - RNA, 20 nt, Artificial Sequence
  Synthetic
ccucggcccgccccuccccc

SEQ ID NO: 11605 - RNA, 20 nt, Artificial Sequence
  Synthetic
cggacgccagacgcggcccc

SEQ ID NO: 11606 - RNA, 20 nt, Artificial Sequence
  Synthetic
cccucggcccgccccucccc

SEQ ID NO: 11607 - RNA, 20 nt, Artificial Sequence
  Synthetic
gccgcggcgguggcguggcc

SEQ ID NO: 11608 - RNA, 20 nt, Artificial Sequence
  Synthetic
gccaccccuuucuucucucc

SEQ ID NO: 11609 - RNA, 20 nt, Artificial Sequence
  Synthetic
cacuggccauuggcuugucc

SEQ ID NO: 11610 - RNA, 20 nt, Artificial Sequence
  Synthetic
aaaacaugggcagggcgagc

SEQ ID NO: 11611 - RNA, 20 nt, Artificial Sequence
  Synthetic
ggagggggcgcuggggccgc

SEQ ID NO: 11612 - RNA, 20 nt, Artificial Sequence
  Synthetic
gggccgaggggagggggcgc

SEQ ID NO: 11613 - RNA, 20 nt, Artificial Sequence
  Synthetic
gcggcggcggcggcggcggc

SEQ ID NO: 11614 - RNA, 20 nt, Artificial Sequence
  Synthetic
aauggacacacaucaggggc

SEQ ID NO: 11615 - RNA, 20 nt, Artificial Sequence
  Synthetic
gcggcccccgggggaggggc

SEQ ID NO: 11616 - RNA, 20 nt, Artificial Sequence
  Synthetic
gacauggugggcugcggggc

SEQ ID NO: 11617 - RNA, 20 nt, Artificial Sequence
  Synthetic
gggagggggaggugcggggc

SEQ ID NO: 11618 - RNA, 20 nt, Artificial Sequence
  Synthetic
cgccgcggcgguggcguggc

SEQ ID NO: 11619 - RNA, 20 nt, Artificial Sequence
  Synthetic
ggagagaagaaagggguggc

SEQ ID NO: 11620 - RNA, 20 nt, Artificial Sequence
  Synthetic
ggcgagacauggugggcugc

SEQ ID NO: 11621 - RNA, 20 nt, Artificial Sequence
  Synthetic
gacaagccaauggccagugc

SEQ ID NO: 11622 - RNA, 20 nt, Artificial Sequence
  Synthetic
gugcggggagggggaggugc

SEQ ID NO: 11623 - RNA, 20 nt, Artificial Sequence
  Synthetic
cacaccaauggacacacauc

SEQ ID NO: 11624 - RNA, 20 nt, Artificial Sequence
  Synthetic
gaaaaaacccucaucccauc

SEQ ID NO: 11625 - RNA, 20 nt, Artificial Sequence
  Synthetic
acugaugaagauauuuucuc

SEQ ID NO: 11626 - RNA, 20 nt, Artificial Sequence
  Synthetic
gaacuugaacgucaggaguc

SEQ ID NO: 11627 - RNA, 20 nt, Artificial Sequence
  Synthetic
ccucccccgggggccgcguc

SEQ ID NO: 11628 - RNA, 20 nt, Artificial Sequence
  Synthetic
aaaaaaaaaaaaaaaaaaag

SEQ ID NO: 11629 - RNA, 20 nt, Artificial Sequence
  Synthetic
guggccgggagagaagaaag

SEQ ID NO: 11630 - RNA, 20 nt, Artificial Sequence
  Synthetic
cagggcgagcaggagagaag

SEQ ID NO: 11631 - RNA, 20 nt, Artificial Sequence
  Synthetic
agagaaggggaggagggaag

SEQ ID NO: 11632 - RNA, 20 nt, Artificial Sequence
  Synthetic
uggggccgcgggcucaccag

SEQ ID NO: 11633 - RNA, 20 nt, Artificial Sequence
  Synthetic
agagaagaaagggguggcag

SEQ ID NO: 11634 - RNA, 20 nt, Artificial Sequence
  Synthetic
caccaauggacacacaucag

SEQ ID NO: 11635 - RNA, 20 nt, Artificial Sequence
  Synthetic
cacuugaacuugcagcucag

SEQ ID NO: 11636 - RNA, 20 nt, Artificial Sequence
  Synthetic
caaaagcgagggggagagag

SEQ ID NO: 11637 - RNA, 20 nt, Artificial Sequence
  Synthetic
agcaaaagcgagggggagag

SEQ ID NO: 11638 - RNA, 20 nt, Artificial Sequence
  Synthetic
cgggggaggggcgggccgag

SEQ ID NO: 11639 - RNA, 20 nt, Artificial Sequence
  Synthetic
ggacuagaagcaaaagcgag

SEQ ID NO: 11640 - RNA, 20 nt, Artificial Sequence
  Synthetic
gaggggcgggccgaggggag

SEQ ID NO: 11641 - RNA, 20 nt, Artificial Sequence
  Synthetic
agacgcggcccccgggggag

SEQ ID NO: 11642 - RNA, 20 nt, Artificial Sequence
  Synthetic
gagagagagaagagagauag

SEQ ID NO: 11643 - RNA, 20 nt, Artificial Sequence
  Synthetic
ccugcucccccccacacacg

SEQ ID NO: 11644 - RNA, 20 nt, Artificial Sequence
  Synthetic
ggcuccgcggacgccagacg

SEQ ID NO: 11645 - RNA, 20 nt, Artificial Sequence
  Synthetic
cucggcccgccccucccccg

SEQ ID NO: 11646 - RNA, 20 nt, Artificial Sequence
  Synthetic
ucccggccacgccaccgccg

SEQ ID NO: 11647 - RNA, 20 nt, Artificial Sequence
  Synthetic
aguggccgcagcgagcgccg

SEQ ID NO: 11648 - RNA, 20 nt, Artificial Sequence
  Synthetic
cccgggggaggggcgggccg

SEQ ID NO: 11649 - RNA, 20 nt, Artificial Sequence
  Synthetic
gggagggggcgcuggggccg

SEQ ID NO: 11650 - RNA, 20 nt, Artificial Sequence
  Synthetic
gugcggggcggggggcuccg

SEQ ID NO: 11651 - RNA, 20 nt, Artificial Sequence
  Synthetic
caggacuagaagcaaaagcg

SEQ ID NO: 11652 - RNA, 20 nt, Artificial Sequence
  Synthetic
ggagggggaggugcggggcg

SEQ ID NO: 11653 - RNA, 20 nt, Artificial Sequence
  Synthetic
cgagcgccgcggcgguggcg

SEQ ID NO: 11654 - RNA, 20 nt, Artificial Sequence
  Synthetic
acaagccaauggccagugcg

SEQ ID NO: 11655 - RNA, 20 nt, Artificial Sequence
  Synthetic
ugcggggagggggaggugcg

SEQ ID NO: 11656 - RNA, 20 nt, Artificial Sequence
  Synthetic
cgagguaaaagagauaaagg

SEQ ID NO: 11657 - RNA, 20 nt, Artificial Sequence
  Synthetic
acuugaacuugcagcucagg

SEQ ID NO: 11658 - RNA, 20 nt, Artificial Sequence
  Synthetic
gacuagaagcaaaagcgagg

SEQ ID NO: 11659 - RNA, 20 nt, Artificial Sequence
  Synthetic
gagcaggagagaaggggagg

SEQ ID NO: 11660 - RNA, 20 nt, Artificial Sequence
  Synthetic
aggggcgggccgaggggagg

SEQ ID NO: 11661 - RNA, 20 nt, Artificial Sequence
  Synthetic
caauggccagugcggggagg

SEQ ID NO: 11662 - RNA, 20 nt, Artificial Sequence
  Synthetic
ucggcccgccccucccccgg

SEQ ID NO: 11663 - RNA, 20 nt, Artificial Sequence
  Synthetic
ggccgcagcgagcgccgcgg

SEQ ID NO: 11664 - RNA, 20 nt, Artificial Sequence
  Synthetic
cgcagcgagcgccgcggcgg

SEQ ID NO: 11665 - RNA, 20 nt, Artificial Sequence
  Synthetic
ggcggcggcggcggcggcgg

SEQ ID NO: 11666 - RNA, 20 nt, Artificial Sequence
  Synthetic
gcgggcggcggcggcggcgg

SEQ ID NO: 11667 - RNA, 20 nt, Artificial Sequence
  Synthetic
ggggcgggcggcggcggcgg

SEQ ID NO: 11668 - RNA, 20 nt, Artificial Sequence
  Synthetic
ugcggggcgggcggcggcgg

SEQ ID NO: 11669 - RNA, 20 nt, Artificial Sequence
  Synthetic
ggcugcggggcgggcggcgg

SEQ ID NO: 11670 - RNA, 20 nt, Artificial Sequence
  Synthetic
gugggcugcggggcgggcgg

SEQ ID NO: 11671 - RNA, 20 nt, Artificial Sequence
  Synthetic
gagggggaggugcggggcgg

SEQ ID NO: 11672 - RNA, 20 nt, Artificial Sequence
  Synthetic
gcaggggugggaggaaaggg

SEQ ID NO: 11673 - RNA, 20 nt, Artificial Sequence
  Synthetic
cuugaacuugcagcucaggg

SEQ ID NO: 11674 - RNA, 20 nt, Artificial Sequence
  Synthetic
gcggcggcggcggcggcggg

SEQ ID NO: 11675 - RNA, 20 nt, Artificial Sequence
  Synthetic
auggugggcugcggggcggg

SEQ ID NO: 11676 - RNA, 20 nt, Artificial Sequence
  Synthetic
agggggaggugcggggcggg

SEQ ID NO: 11677 - RNA, 20 nt, Artificial Sequence
  Synthetic
gccgggagagaagaaagggg

SEQ ID NO: 11678 - RNA, 20 nt, Artificial Sequence
  Synthetic
ggcgagcaggagagaagggg

SEQ ID NO: 11679 - RNA, 20 nt, Artificial Sequence
  Synthetic
gaagaaagggguggcagggg

SEQ ID NO: 11680 - RNA, 20 nt, Artificial Sequence
  Synthetic
gggaggggcgggccgagggg

SEQ ID NO: 11681 - RNA, 20 nt, Artificial Sequence
  Synthetic
cgcggcccccgggggagggg

SEQ ID NO: 11682 - RNA, 20 nt, Artificial Sequence
  Synthetic
agacauggugggcugcgggg

SEQ ID NO: 11683 - RNA, 20 nt, Artificial Sequence
  Synthetic
agccaauggccagugcgggg

SEQ ID NO: 11684 - RNA, 20 nt, Artificial Sequence
  Synthetic
ggggagggggaggugcgggg

SEQ ID NO: 11685 - RNA, 20 nt, Artificial Sequence
  Synthetic
uggccagugcggggaggggg

SEQ ID NO: 11686 - RNA, 20 nt, Artificial Sequence
  Synthetic
ccagacgcggcccccggggg

SEQ ID NO: 11687 - RNA, 20 nt, Artificial Sequence
  Synthetic
ggugggaggaaagggugggg

SEQ ID NO: 11688 - RNA, 20 nt, Artificial Sequence
  Synthetic
gggugggaggaaaggguggg

SEQ ID NO: 11689 - RNA, 20 nt, Artificial Sequence
  Synthetic
aaagggguggcagggguggg

SEQ ID NO: 11690 - RNA, 20 nt, Artificial Sequence
  Synthetic
uuagaguccgcguguguggg

SEQ ID NO: 11691 - RNA, 20 nt, Artificial Sequence
  Synthetic
uugcuugcggcgagacaugg

SEQ ID NO: 11692 - RNA, 20 nt, Artificial Sequence
  Synthetic
ggggugggaggaaagggugg

SEQ ID NO: 11693 - RNA, 20 nt, Artificial Sequence
  Synthetic
gccgaggggagggggcgcug

SEQ ID NO: 11694 - RNA, 20 nt, Artificial Sequence
  Synthetic
caccgccgcggcgcucgcug

SEQ ID NO: 11695 - RNA, 20 nt, Artificial Sequence
  Synthetic
ucccguuugcuuaagugcug

SEQ ID NO: 11696 - RNA, 20 nt, Artificial Sequence
  Synthetic
ggacaagccaauggccagug

SEQ ID NO: 11697 - RNA, 20 nt, Artificial Sequence
  Synthetic
agugcggggagggggaggug

SEQ ID NO: 11698 - RNA, 20 nt, Artificial Sequence
  Synthetic
aggggugggaggaaagggug

SEQ ID NO: 11699 - RNA, 20 nt, Artificial Sequence
  Synthetic
uuuuagaguccgcgugugug

SEQ ID NO: 11700 - RNA, 20 nt, Artificial Sequence
  Synthetic
ggcgcagggaagaugaauug

SEQ ID NO: 11701 - RNA, 20 nt, Artificial Sequence
  Synthetic
gcugggguuugccuugcuug

SEQ ID NO: 11702 - RNA, 20 nt, Artificial Sequence
  Synthetic
gacagagacacacaaaacau

SEQ ID NO: 11703 - RNA, 20 nt, Artificial Sequence
  Synthetic
ccccuccccgcacuggccau

SEQ ID NO: 11704 - RNA, 20 nt, Artificial Sequence
  Synthetic
acacggcaaugguuccagau

SEQ ID NO: 11705 - RNA, 20 nt, Artificial Sequence
  Synthetic
auaauuauuauuacuauuau

SEQ ID NO: 11706 - RNA, 20 nt, Artificial Sequence
  Synthetic
gccccagcgcccccuccccu

SEQ ID NO: 11707 - RNA, 20 nt, Artificial Sequence
  Synthetic
ggccgaggggagggggcgcu

SEQ ID NO: 11708 - RNA, 20 nt, Artificial Sequence
  Synthetic
uucccguuugcuuaagugcu

SEQ ID NO: 11709 - RNA, 20 nt, Artificial Sequence
  Synthetic
caggggugggaggaaagggu

SEQ ID NO: 11710 - RNA, 20 nt, Artificial Sequence
  Synthetic
aagaaagggguggcaggggu

SEQ ID NO: 11711 - RNA, 20 nt, Artificial Sequence
  Synthetic
gcgcagggaagaugaauugu

SEQ ID NO: 11712 - RNA, 20 nt, Artificial Sequence
  Synthetic
uaauuauuauuacuauuauu

SEQ ID NO: 11713 - RNA, 20 nt, Artificial Sequence
  Synthetic
guauuauuucuaauuuauuu

SEQ ID NO: 11714 - RNA, 17 nt, Artificial Sequence
  Synthetic
cacucaccguaagaaaa

SEQ ID NO: 11715 - RNA, 17 nt, Artificial Sequence
  Synthetic
ccucuggccggaacaaa

SEQ ID NO: 11716 - RNA, 17 nt, Artificial Sequence
  Synthetic
cgaggagccggcacaaa

SEQ ID NO: 11717 - RNA, 17 nt, Artificial Sequence
  Synthetic
uauuucucuuuucgaaa

SEQ ID NO: 11718 - RNA, 17 nt, Artificial Sequence
  Synthetic
gggagcugguggggaaa

SEQ ID NO: 11719 - RNA, 17 nt, Artificial Sequence
  Synthetic
aaguggcacuguggaaa

SEQ ID NO: 11720 - RNA, 17 nt, Artificial Sequence
  Synthetic
gggcugcggguccggaa

SEQ ID NO: 11721 - RNA, 17 nt, Artificial Sequence
  Synthetic
gaaauaaagcggcggaa

SEQ ID NO: 11722 - RNA, 17 nt, Artificial Sequence
  Synthetic
ugggagcugguggggaa

SEQ ID NO: 11723 - RNA, 17 nt, Artificial Sequence
  Synthetic
aaaguggcacuguggaa

SEQ ID NO: 11724 - RNA, 17 nt, Artificial Sequence
  Synthetic
gcccgagggcgccccca

SEQ ID NO: 11725 - RNA, 17 nt, Artificial Sequence
  Synthetic
cguccuucccgguccca

SEQ ID NO: 11726 - RNA, 17 nt, Artificial Sequence
  Synthetic
cccccaaggccgagcca

SEQ ID NO: 11727 - RNA, 17 nt, Artificial Sequence
  Synthetic
cccgcguguggacgcca

SEQ ID NO: 11728 - RNA, 17 nt, Artificial Sequence
  Synthetic
gugugugggggggagca

SEQ ID NO: 11729 - RNA, 17 nt, Artificial Sequence
  Synthetic
aggugggagggagcgca

SEQ ID NO: 11730 - RNA, 17 nt, Artificial Sequence
  Synthetic
ggacaccagcgcgcuca

SEQ ID NO: 11731 - RNA, 17 nt, Artificial Sequence
  Synthetic
cgcgcggccuggaaaga

SEQ ID NO: 11732 - RNA, 17 nt, Artificial Sequence
  Synthetic
uccgcggagucgggaga

SEQ ID NO: 11733 - RNA, 17 nt, Artificial Sequence
  Synthetic
cgcaggccggggcccga

SEQ ID NO: 11734 - RNA, 17 nt, Artificial Sequence
  Synthetic
gagaggggccgcggcga

SEQ ID NO: 11735 - RNA, 17 nt, Artificial Sequence
  Synthetic
agcuccgcagcgggcga

SEQ ID NO: 11736 - RNA, 17 nt, Artificial Sequence
  Synthetic
cgugggaccgggaagga

SEQ ID NO: 11737 - RNA, 17 nt, Artificial Sequence
  Synthetic
ggugugcguacggagga

SEQ ID NO: 11738 - RNA, 17 nt, Artificial Sequence
  Synthetic
agggcugcggguccgga

SEQ ID NO: 11739 - RNA, 17 nt, Artificial Sequence
  Synthetic
ggggaagcgcgggcgga

SEQ ID NO: 11740 - RNA, 17 nt, Artificial Sequence
  Synthetic
aaauggggggguaggga

SEQ ID NO: 11741 - RNA, 17 nt, Artificial Sequence
  Synthetic
gagccgugggaccggga

SEQ ID NO: 11742 - RNA, 17 nt, Artificial Sequence
  Synthetic
cgcggcggcggcgggga

SEQ ID NO: 11743 - RNA, 17 nt, Artificial Sequence
  Synthetic
ggcgaggggagguggga

SEQ ID NO: 11744 - RNA, 17 nt, Artificial Sequence
  Synthetic
uccagccuaaguuugga

SEQ ID NO: 11745 - RNA, 17 nt, Artificial Sequence
  Synthetic
aauaaugaacaaugcua

SEQ ID NO: 11746 - RNA, 17 nt, Artificial Sequence
  Synthetic
ggaagugggugugcgua

SEQ ID NO: 11747 - RNA, 17 nt, Artificial Sequence
  Synthetic
aagaaaaugggggggua

SEQ ID NO: 11748 - RNA, 17 nt, Artificial Sequence
  Synthetic
acccccccauuuucuua

SEQ ID NO: 11749 - RNA, 17 nt, Artificial Sequence
  Synthetic
ucauuauuuugcaaaac

SEQ ID NO: 11750 - RNA, 17 nt, Artificial Sequence
  Synthetic
auagagcgagagugcac

SEQ ID NO: 11751 - RNA, 17 nt, Artificial Sequence
  Synthetic
gagaaaagaggugagac

SEQ ID NO: 11752 - RNA, 17 nt, Artificial Sequence
  Synthetic
agaggggccgcggcgac

SEQ ID NO: 11753 - RNA, 17 nt, Artificial Sequence
  Synthetic
gugggaccgggaaggac

SEQ ID NO: 11754 - RNA, 17 nt, Artificial Sequence
  Synthetic
aaggccgagccagggac

SEQ ID NO: 11755 - RNA, 17 nt, Artificial Sequence
  Synthetic
gccuggaaagaggggac

SEQ ID NO: 11756 - RNA, 17 nt, Artificial Sequence
  Synthetic
ggggagagccgugggac

SEQ ID NO: 11757 - RNA, 17 nt, Artificial Sequence
  Synthetic
caacucacaugcaaacc

SEQ ID NO: 11758 - RNA, 17 nt, Artificial Sequence
  Synthetic
uagagcgagagugcacc

SEQ ID NO: 11759 - RNA, 17 nt, Artificial Sequence
  Synthetic
aggccgagccagggacc

SEQ ID NO: 11760 - RNA, 17 nt, Artificial Sequence
  Synthetic
ccuggaaagaggggacc

SEQ ID NO: 11761 - RNA, 17 nt, Artificial Sequence
  Synthetic
gggagagccgugggacc

SEQ ID NO: 11762 - RNA, 17 nt, Artificial Sequence
  Synthetic
ccgggagcaacucuacc

SEQ ID NO: 11763 - RNA, 17 nt, Artificial Sequence
  Synthetic
caccagcucccaccccc

SEQ ID NO: 11764 - RNA, 17 nt, Artificial Sequence
  Synthetic
cgggaggcugcagcccc

SEQ ID NO: 11765 - RNA, 17 nt, Artificial Sequence
  Synthetic
gcuuuuacuucggcccc

SEQ ID NO: 11766 - RNA, 17 nt, Artificial Sequence
  Synthetic
cuguggaaaggggcccc

SEQ ID NO: 11767 - RNA, 17 nt, Artificial Sequence
  Synthetic
ucaccucuuuucucccc

SEQ ID NO: 11768 - RNA, 17 nt, Artificial Sequence
  Synthetic
ccgcgcuuccccagccc

SEQ ID NO: 11769 - RNA, 17 nt, Artificial Sequence
  Synthetic
ccgggaggcugcagccc

SEQ ID NO: 11770 - RNA, 17 nt, Artificial Sequence
  Synthetic
ggggcgcccucgggccc

SEQ ID NO: 11771 - RNA, 17 nt, Artificial Sequence
  Synthetic
cgccgccugccucuccc

SEQ ID NO: 11772 - RNA, 17 nt, Artificial Sequence
  Synthetic
cucaccucuuuucuccc

SEQ ID NO: 11773 - RNA, 17 nt, Artificial Sequence
  Synthetic
ucuaaaaaacgauuccc

SEQ ID NO: 11774 - RNA, 17 nt, Artificial Sequence
  Synthetic
gcgggcggagggaagcc

SEQ ID NO: 11775 - RNA, 17 nt, Artificial Sequence
  Synthetic
cccgcgcuuccccagcc

SEQ ID NO: 11776 - RNA, 17 nt, Artificial Sequence
  Synthetic
gcccccaaggccgagcc

SEQ ID NO: 11777 - RNA, 17 nt, Artificial Sequence
  Synthetic
ccccgcguguggacgcc

SEQ ID NO: 11778 - RNA, 17 nt, Artificial Sequence
  Synthetic
gcggacucaggagcgcc

SEQ ID NO: 11779 - RNA, 17 nt, Artificial Sequence
  Synthetic
ggcaggcggcgcaggcc

SEQ ID NO: 11780 - RNA, 17 nt, Artificial Sequence
  Synthetic
caggagcccgcgcggcc

SEQ ID NO: 11781 - RNA, 17 nt, Artificial Sequence
  Synthetic
ccggggcugcagccucc

SEQ ID NO: 11782 - RNA, 17 nt, Artificial Sequence
  Synthetic
caggccgcgcgggcucc

SEQ ID NO: 11783 - RNA, 17 nt, Artificial Sequence
  Synthetic
ccagguagaguugcucc

SEQ ID NO: 11784 - RNA, 17 nt, Artificial Sequence
  Synthetic
gcagcgcccaagucucc

SEQ ID NO: 11785 - RNA, 17 nt, Artificial Sequence
  Synthetic
uacggaggagggugucc

SEQ ID NO: 11786 - RNA, 17 nt, Artificial Sequence
  Synthetic
gucuaaaaaacgauucc

SEQ ID NO: 11787 - RNA, 17 nt, Artificial Sequence
  Synthetic
gcgucucccguccuucc

SEQ ID NO: 11788 - RNA, 17 nt, Artificial Sequence
  Synthetic
cccgguccccucuuucc

SEQ ID NO: 11789 - RNA, 17 nt, Artificial Sequence
  Synthetic
aguuacagcuccgcagc

SEQ ID NO: 11790 - RNA, 17 nt, Artificial Sequence
  Synthetic
ccggcacaaaaggcagc

SEQ ID NO: 11791 - RNA, 17 nt, Artificial Sequence
  Synthetic
acggucaagugugcagc

SEQ ID NO: 11792 - RNA, 17 nt, Artificial Sequence
  Synthetic
gggcaagcgcgaggagc

SEQ ID NO: 11793 - RNA, 17 nt, Artificial Sequence
  Synthetic
cgugugugggggggagc

SEQ ID NO: 11794 - RNA, 17 nt, Artificial Sequence
  Synthetic
aaccugggggugggagc

SEQ ID NO: 11795 - RNA, 17 nt, Artificial Sequence
  Synthetic
cccuggcguccacacgc

SEQ ID NO: 11796 - RNA, 17 nt, Artificial Sequence
  Synthetic
uucccgagcgcagccgc

SEQ ID NO: 11797 - RNA, 17 nt, Artificial Sequence
  Synthetic
ccgggcuggggaagcgc

SEQ ID NO: 11798 - RNA, 17 nt, Artificial Sequence
  Synthetic
cgcggacucaggagcgc

SEQ ID NO: 11799 - RNA, 17 nt, Artificial Sequence
  Synthetic
cucuuuccaggccgcgc

SEQ ID NO: 11800 - RNA, 17 nt, Artificial Sequence
  Synthetic
cuugaccgugagcgcgc

SEQ ID NO: 11801 - RNA, 17 nt, Artificial Sequence
  Synthetic
ggagaggcaggcggcgc

SEQ ID NO: 11802 - RNA, 17 nt, Artificial Sequence
  Synthetic
aggcaggcggcgcaggc

SEQ ID NO: 11803 - RNA, 17 nt, Artificial Sequence
  Synthetic
ggggaccggggagaggc

SEQ ID NO: 11804 - RNA, 17 nt, Artificial Sequence
  Synthetic
gcccuccaaacuuaggc

SEQ ID NO: 11805 - RNA, 17 nt, Artificial Sequence
  Synthetic
aggacgggagacgcggc

SEQ ID NO: 11806 - RNA, 17 nt, Artificial Sequence
  Synthetic
gcgagcgcggcggcggc

SEQ ID NO: 11807 - RNA, 17 nt, Artificial Sequence
  Synthetic
aggcugcagccccgggc

SEQ ID NO: 11808 - RNA, 17 nt, Artificial Sequence
  Synthetic
ugcaaaacuggcggggc

SEQ ID NO: 11809 - RNA, 17 nt, Artificial Sequence
  Synthetic
uauuuugcaaaacuggc

SEQ ID NO: 11810 - RNA, 17 nt, Artificial Sequence
  Synthetic
aaacacccaccucuggc

SEQ ID NO: 11811 - RNA, 17 nt, Artificial Sequence
  Synthetic
uaaguuuggagggcugc

SEQ ID NO: 11812 - RNA, 17 nt, Artificial Sequence
  Synthetic
acaaaaggcggcagugc

SEQ ID NO: 11813 - RNA, 17 nt, Artificial Sequence
  Synthetic
cccgcugccuuuugugc

SEQ ID NO: 11814 - RNA, 17 nt, Artificial Sequence
  Synthetic
cccgacuccgcggacuc

SEQ ID NO: 11815 - RNA, 17 nt, Artificial Sequence
  Synthetic
ggacaaacacccaccuc

SEQ ID NO: 11816 - RNA, 17 nt, Artificial Sequence
  Synthetic
gccuugggggcgcccuc

SEQ ID NO: 11817 - RNA, 17 nt, Artificial Sequence
  Synthetic
uuugcuguccucuccuc

SEQ ID NO: 11818 - RNA, 17 nt, Artificial Sequence
  Synthetic
agcccgcggcugcgcuc

SEQ ID NO: 11819 - RNA, 17 nt, Artificial Sequence
  Synthetic
agcgcagccgcgggcuc

SEQ ID NO: 11820 - RNA, 17 nt, Artificial Sequence
  Synthetic
ccugaguccgcggaguc

SEQ ID NO: 11821 - RNA, 17 nt, Artificial Sequence
  Synthetic
uuggagggcugcggguc

SEQ ID NO: 11822 - RNA, 17 nt, Artificial Sequence
  Synthetic
guacggaggaggguguc

SEQ ID NO: 11823 - RNA, 17 nt, Artificial Sequence
  Synthetic
gcucagcucucaacuuc

SEQ ID NO: 11824 - RNA, 17 nt, Artificial Sequence
  Synthetic
cuugggcgcugcccuuc

SEQ ID NO: 11825 - RNA, 17 nt, Artificial Sequence
  Synthetic
acugccgccuuuuguuc

SEQ ID NO: 11826 - RNA, 17 nt, Artificial Sequence
  Synthetic
auucccggggagaaaag

SEQ ID NO: 11827 - RNA, 17 nt, Artificial Sequence
  Synthetic
ccacaauagugagaaag

SEQ ID NO: 11828 - RNA, 17 nt, Artificial Sequence
  Synthetic
ggcggaaaggaggaaag

SEQ ID NO: 11829 - RNA, 17 nt, Artificial Sequence
  Synthetic
ccgcgcggccuggaaag

SEQ ID NO: 11830 - RNA, 17 nt, Artificial Sequence
  Synthetic
aguggcacuguggaaag

SEQ ID NO: 11831 - RNA, 17 nt, Artificial Sequence
  Synthetic
cgaaaagagaaauaaag

SEQ ID NO: 11832 - RNA, 17 nt, Artificial Sequence
  Synthetic
gcggcggggaggggaag

SEQ ID NO: 11833 - RNA, 17 nt, Artificial Sequence
  Synthetic
ccgcguguggacgccag

SEQ ID NO: 11834 - RNA, 17 nt, Artificial Sequence
  Synthetic
ccuuuuguuccggccag

SEQ ID NO: 11835 - RNA, 17 nt, Artificial Sequence
  Synthetic
aaguuacagcuccgcag

SEQ ID NO: 11836 - RNA, 17 nt, Artificial Sequence
  Synthetic
gccggcacaaaaggcag

SEQ ID NO: 11837 - RNA, 17 nt, Artificial Sequence
  Synthetic
cacggucaagugugcag

SEQ ID NO: 11838 - RNA, 17 nt, Artificial Sequence
  Synthetic
gcgcggccuggaaagag

SEQ ID NO: 11839 - RNA, 17 nt, Artificial Sequence
  Synthetic
ccgcggagucgggagag

SEQ ID NO: 11840 - RNA, 17 nt, Artificial Sequence
  Synthetic
gcuccgcagcgggcgag

SEQ ID NO: 11841 - RNA, 17 nt, Artificial Sequence
  Synthetic
aaacuuugcccgaggag

SEQ ID NO: 11842 - RNA, 17 nt, Artificial Sequence
  Synthetic
guccgcggagucgggag

SEQ ID NO: 11843 - RNA, 17 nt, Artificial Sequence
  Synthetic
aagaggggaccggggag

SEQ ID NO: 11844 - RNA, 17 nt, Artificial Sequence
  Synthetic
gcggcggcggcggggag

SEQ ID NO: 11845 - RNA, 17 nt, Artificial Sequence
  Synthetic
gcggggcggggggggag

SEQ ID NO: 11846 - RNA, 17 nt, Artificial Sequence
  Synthetic
cauuuucuuacggugag

SEQ ID NO: 11847 - RNA, 17 nt, Artificial Sequence
  Synthetic
gggagcgcacggcaacg

SEQ ID NO: 11848 - RNA, 17 nt, Artificial Sequence
  Synthetic
gcucccccccacacacg

SEQ ID NO: 11849 - RNA, 17 nt, Artificial Sequence
  Synthetic
ccccuggcguccacacg

SEQ ID NO: 11850 - RNA, 17 nt, Artificial Sequence
  Synthetic
gggaaggacgggagacg

SEQ ID NO: 11851 - RNA, 17 nt, Artificial Sequence
  Synthetic
gaggggccgcggcgacg

SEQ ID NO: 11852 - RNA, 17 nt, Artificial Sequence
  Synthetic
cuggaaagaggggaccg

SEQ ID NO: 11853 - RNA, 17 nt, Artificial Sequence
  Synthetic
cgcgcuuccccagcccg

SEQ ID NO: 11854 - RNA, 17 nt, Artificial Sequence
  Synthetic
uaaaagccccgagcccg

SEQ ID NO: 11855 - RNA, 17 nt, Artificial Sequence
  Synthetic
gcgcaggccggggcccg

SEQ ID NO: 11856 - RNA, 17 nt, Artificial Sequence
  Synthetic
ucgggaaacuuugcccg

SEQ ID NO: 11857 - RNA, 17 nt, Artificial Sequence
  Synthetic
cuaaaaaacgauucccg

SEQ ID NO: 11858 - RNA, 17 nt, Artificial Sequence
  Synthetic
uuucccgagcgcagccg

SEQ ID NO: 11859 - RNA, 17 nt, Artificial Sequence
  Synthetic
ggcgacggggagagccg

SEQ ID NO: 11860 - RNA, 17 nt, Artificial Sequence
  Synthetic
cggacucaggagcgccg

SEQ ID NO: 11861 - RNA, 17 nt, Artificial Sequence
  Synthetic
ggcucuccccgucgccg

SEQ ID NO: 11862 - RNA, 17 nt, Artificial Sequence
  Synthetic
gcaggcggcgcaggccg

SEQ ID NO: 11863 - RNA, 17 nt, Artificial Sequence
  Synthetic
agucgggagaggggccg

SEQ ID NO: 11864 - RNA, 17 nt, Artificial Sequence
  Synthetic
ccccucucccgacuccg

SEQ ID NO: 11865 - RNA, 17 nt, Artificial Sequence
  Synthetic
cggcgcuccugaguccg

SEQ ID NO: 11866 - RNA, 17 nt, Artificial Sequence
  Synthetic
cccgggcuggggaagcg

SEQ ID NO: 11867 - RNA, 17 nt, Artificial Sequence
  Synthetic
cacgcggggagcgagcg

SEQ ID NO: 11868 - RNA, 17 nt, Artificial Sequence
  Synthetic
ccuggcguccacacgcg

SEQ ID NO: 11869 - RNA, 17 nt, Artificial Sequence
  Synthetic
gucuccaggagcccgcg

SEQ ID NO: 11870 - RNA, 17 nt, Artificial Sequence
  Synthetic
ccucuuuccaggccgcg

SEQ ID NO: 11871 - RNA, 17 nt, Artificial Sequence
  Synthetic
gcgggagggcaagcgcg

SEQ ID NO: 11872 - RNA, 17 nt, Artificial Sequence
  Synthetic
cgagcgcggcggcggcg

SEQ ID NO: 11873 - RNA, 17 nt, Artificial Sequence
  Synthetic
cagcuccgcagcgggcg

SEQ ID NO: 11874 - RNA, 17 nt, Artificial Sequence
  Synthetic
gcaaaacuggcggggcg

SEQ ID NO: 11875 - RNA, 17 nt, Artificial Sequence
  Synthetic
auuuugcaaaacuggcg

SEQ ID NO: 11876 - RNA, 17 nt, Artificial Sequence
  Synthetic
gcgcagccgcgggcucg

SEQ ID NO: 11877 - RNA, 17 nt, Artificial Sequence
  Synthetic
cuggccggaacaaaagg

SEQ ID NO: 11878 - RNA, 17 nt, Artificial Sequence
  Synthetic
auaaagcggcggaaagg

SEQ ID NO: 11879 - RNA, 17 nt, Artificial Sequence
  Synthetic
gaccggggagaggcagg

SEQ ID NO: 11880 - RNA, 17 nt, Artificial Sequence
  Synthetic
ggaaaggaggaaagagg

SEQ ID NO: 11881 - RNA, 17 nt, Artificial Sequence
  Synthetic
uuuguuccggccagagg

SEQ ID NO: 11882 - RNA, 17 nt, Artificial Sequence
  Synthetic
gggugugcguacggagg

SEQ ID NO: 11883 - RNA, 17 nt, Artificial Sequence
  Synthetic
cagcgggcgaggggagg

SEQ ID NO: 11884 - RNA, 17 nt, Artificial Sequence
  Synthetic
agugggugugcguacgg

SEQ ID NO: 11885 - RNA, 17 nt, Artificial Sequence
  Synthetic
ggacucaggagcgccgg

SEQ ID NO: 11886 - RNA, 17 nt, Artificial Sequence
  Synthetic
aaagagaaauaaagcgg

SEQ ID NO: 11887 - RNA, 17 nt, Artificial Sequence
  Synthetic
gcggggagcgagcgcgg

SEQ ID NO: 11888 - RNA, 17 nt, Artificial Sequence
  Synthetic
gggagcgagcgcggcgg

SEQ ID NO: 11889 - RNA, 17 nt, Artificial Sequence
  Synthetic
agcgagcgcggcggcgg

SEQ ID NO: 11890 - RNA, 17 nt, Artificial Sequence
  Synthetic
uggggaagcgcgggcgg

SEQ ID NO: 11891 - RNA, 17 nt, Artificial Sequence
  Synthetic
caaaacuggcggggcgg

SEQ ID NO: 11892 - RNA, 17 nt, Artificial Sequence
  Synthetic
agcugguggggaaaggg

SEQ ID NO: 11893 - RNA, 17 nt, Artificial Sequence
  Synthetic
aaaauggggggguaggg

SEQ ID NO: 11894 - RNA, 17 nt, Artificial Sequence
  Synthetic
agcgagagugcaccggg

SEQ ID NO: 11895 - RNA, 17 nt, Artificial Sequence
  Synthetic
gucaagugugcagcggg

SEQ ID NO: 11896 - RNA, 17 nt, Artificial Sequence
  Synthetic
ggcuggggaagcgcggg

SEQ ID NO: 11897 - RNA, 17 nt, Artificial Sequence
  Synthetic
aaaacuggcggggcggg

SEQ ID NO: 11898 - RNA, 17 nt, Artificial Sequence
  Synthetic
ccgcagcgggcgagggg

SEQ ID NO: 11899 - RNA, 17 nt, Artificial Sequence
  Synthetic
gcgcggcggcggcgggg

SEQ ID NO: 11900 - RNA, 17 nt, Artificial Sequence
  Synthetic
aaacuggcggggcgggg

SEQ ID NO: 11901 - RNA, 17 nt, Artificial Sequence
  Synthetic
uugcaaaacuggcgggg

SEQ ID NO: 11902 - RNA, 17 nt, Artificial Sequence
  Synthetic
aacuggcggggcggggg

SEQ ID NO: 11903 - RNA, 17 nt, Artificial Sequence
  Synthetic
acaugcaaaccuggggg

SEQ ID NO: 11904 - RNA, 17 nt, Artificial Sequence
  Synthetic
accguaagaaaaugggg

SEQ ID NO: 11905 - RNA, 17 nt, Artificial Sequence
  Synthetic
aguccgcgugugugggg

SEQ ID NO: 11906 - RNA, 17 nt, Artificial Sequence
  Synthetic
caccguaagaaaauggg

SEQ ID NO: 11907 - RNA, 17 nt, Artificial Sequence
  Synthetic
gggcgaggggagguggg

SEQ ID NO: 11908 - RNA, 17 nt, Artificial Sequence
  Synthetic
gaguccgcguguguggg

SEQ ID NO: 11909 - RNA, 17 nt, Artificial Sequence
  Synthetic
ucaccguaagaaaaugg

SEQ ID NO: 11910 - RNA, 17 nt, Artificial Sequence
  Synthetic
uuauuuugcaaaacugg

SEQ ID NO: 11911 - RNA, 17 nt, Artificial Sequence
  Synthetic
cucacaugcaaaccugg

SEQ ID NO: 11912 - RNA, 17 nt, Artificial Sequence
  Synthetic
cugggggugggagcugg

SEQ ID NO: 11913 - RNA, 17 nt, Artificial Sequence
  Synthetic
agaguccgcgugugugg

SEQ ID NO: 11914 - RNA, 17 nt, Artificial Sequence
  Synthetic
gcggagcuguaacuugg

SEQ ID NO: 11915 - RNA, 17 nt, Artificial Sequence
  Synthetic
cccuggcucggccuugg

SEQ ID NO: 11916 - RNA, 17 nt, Artificial Sequence
  Synthetic
auccagccuaaguuugg

SEQ ID NO: 11917 - RNA, 17 nt, Artificial Sequence
  Synthetic
cucaccguaagaaaaug

SEQ ID NO: 11918 - RNA, 17 nt, Artificial Sequence
  Synthetic
gugagaaaguggcacug

SEQ ID NO: 11919 - RNA, 17 nt, Artificial Sequence
  Synthetic
acucacaugcaaaccug

SEQ ID NO: 11920 - RNA, 17 nt, Artificial Sequence
  Synthetic
ccuccccucgcccgcug

SEQ ID NO: 11921 - RNA, 17 nt, Artificial Sequence
  Synthetic
cuaaguuuggagggcug

SEQ ID NO: 11922 - RNA, 17 nt, Artificial Sequence
  Synthetic
gcugcagccccgggcug

SEQ ID NO: 11923 - RNA, 17 nt, Artificial Sequence
  Synthetic
cgcucgcuccccgcgug

SEQ ID NO: 11924 - RNA, 17 nt, Artificial Sequence
  Synthetic
gggggugggagcuggug

SEQ ID NO: 11925 - RNA, 17 nt, Artificial Sequence
  Synthetic
uuuagaguccgcgugug

SEQ ID NO: 11926 - RNA, 17 nt, Artificial Sequence
  Synthetic
uagaguccgcgugugug

SEQ ID NO: 11927 - RNA, 17 nt, Artificial Sequence
  Synthetic
acuuucucacuauugug

SEQ ID NO: 11928 - RNA, 17 nt, Artificial Sequence
  Synthetic
ccacuuucucacuauug

SEQ ID NO: 11929 - RNA, 17 nt, Artificial Sequence
  Synthetic
ucccuggcucggccuug

SEQ ID NO: 11930 - RNA, 17 nt, Artificial Sequence
  Synthetic
acucaccguaagaaaau

SEQ ID NO: 11931 - RNA, 17 nt, Artificial Sequence
  Synthetic
gcugcggagcuguaacu

SEQ ID NO: 11932 - RNA, 17 nt, Artificial Sequence
  Synthetic
gcgggcuccuggagacu

SEQ ID NO: 11933 - RNA, 17 nt, Artificial Sequence
  Synthetic
aacucacaugcaaaccu

SEQ ID NO: 11934 - RNA, 17 nt, Artificial Sequence
  Synthetic
ggccuugggggcgcccu

SEQ ID NO: 11935 - RNA, 17 nt, Artificial Sequence
  Synthetic
ggucccuggcucggccu

SEQ ID NO: 11936 - RNA, 17 nt, Artificial Sequence
  Synthetic
cuuugcuguccucuccu

SEQ ID NO: 11937 - RNA, 17 nt, Artificial Sequence
  Synthetic
gagcccgcggcugcgcu

SEQ ID NO: 11938 - RNA, 17 nt, Artificial Sequence
  Synthetic
ggcugcagccccgggcu

SEQ ID NO: 11939 - RNA, 17 nt, Artificial Sequence
  Synthetic
gagcgcagccgcgggcu

SEQ ID NO: 11940 - RNA, 17 nt, Artificial Sequence
  Synthetic
cggcggggaggggaagu

SEQ ID NO: 11941 - RNA, 17 nt, Artificial Sequence
  Synthetic
uccugaguccgcggagu

SEQ ID NO: 11942 - RNA, 17 nt, Artificial Sequence
  Synthetic
auuuucuuacggugagu

SEQ ID NO: 11943 - RNA, 17 nt, Artificial Sequence
  Synthetic
gcgacggggagagccgu

SEQ ID NO: 11944 - RNA, 17 nt, Artificial Sequence
  Synthetic
uuguuccggccagaggu

SEQ ID NO: 11945 - RNA, 17 nt, Artificial Sequence
  Synthetic
agcgggcgaggggaggu

SEQ ID NO: 11946 - RNA, 17 nt, Artificial Sequence
  Synthetic
uaagaaaaugggggggu

SEQ ID NO: 11947 - RNA, 17 nt, Artificial Sequence
  Synthetic
caugcaaaccugggggu

SEQ ID NO: 11948 - RNA, 17 nt, Artificial Sequence
  Synthetic
ugggggugggagcuggu

SEQ ID NO: 11949 - RNA, 17 nt, Artificial Sequence
  Synthetic
uuagaguccgcgugugu

SEQ ID NO: 11950 - RNA, 17 nt, Artificial Sequence
  Synthetic
cacuuucucacuauugu

SEQ ID NO: 11951 - RNA, 17 nt, Artificial Sequence
  Synthetic
cgcagcccuccaaacuu

SEQ ID NO: 11952 - RNA, 17 nt, Artificial Sequence
  Synthetic
ggcucagcucucaacuu

SEQ ID NO: 11953 - RNA, 17 nt, Artificial Sequence
  Synthetic
cgggcuccuggagacuu

SEQ ID NO: 11954 - RNA, 17 nt, Artificial Sequence
  Synthetic
gcucggggcuuuuacuu

SEQ ID NO: 11955 - RNA, 17 nt, Artificial Sequence
  Synthetic
gucccuggcucggccuu

SEQ ID NO: 11956 - RNA, 17 nt, Artificial Sequence
  Synthetic
ggaauccagccuaaguu

SEQ ID NO: 11957 - RNA, 17 nt, Artificial Sequence
  Synthetic
gaggugagacuggcuuu

SEQ ID NO: 11958 - RNA, 20 nt, Artificial Sequence
  Synthetic
ucccacucaccguaagaaaa

SEQ ID NO: 11959 - RNA, 20 nt, Artificial Sequence
  Synthetic
ccaccucuggccggaacaaa

SEQ ID NO: 11960 - RNA, 20 nt, Artificial Sequence
  Synthetic
gcgcgaggagccggcacaaa

SEQ ID NO: 11961 - RNA, 20 nt, Artificial Sequence
  Synthetic
cuuuauuucucuuuucgaaa

SEQ ID NO: 11962 - RNA, 20 nt, Artificial Sequence
  Synthetic
ggugggagcugguggggaaa

SEQ ID NO: 11963 - RNA, 20 nt, Artificial Sequence
  Synthetic
agaaaguggcacuguggaaa

SEQ ID NO: 11964 - RNA, 20 nt, Artificial Sequence
  Synthetic
ggagggcugcggguccggaa

SEQ ID NO: 11965 - RNA, 20 nt, Artificial Sequence
  Synthetic
agagaaauaaagcggcggaa

SEQ ID NO: 11966 - RNA, 20 nt, Artificial Sequence
  Synthetic
gggugggagcugguggggaa

SEQ ID NO: 11967 - RNA, 20 nt, Artificial Sequence
  Synthetic
gagaaaguggcacuguggaa

SEQ ID NO: 11968 - RNA, 20 nt, Artificial Sequence
  Synthetic
ggggcccgagggcgccccca

SEQ ID NO: 11969 - RNA, 20 nt, Artificial Sequence
  Synthetic
ucccguccuucccgguccca

SEQ ID NO: 11970 - RNA, 20 nt, Artificial Sequence
  Synthetic
gcgcccccaaggccgagcca

SEQ ID NO: 11971 - RNA, 20 nt, Artificial Sequence
  Synthetic
cuccccgcguguggacgcca

SEQ ID NO: 11972 - RNA, 20 nt, Artificial Sequence
  Synthetic
cgcgugugugggggggagca

SEQ ID NO: 11973 - RNA, 20 nt, Artificial Sequence
  Synthetic
gggaggugggagggagcgca

SEQ ID NO: 11974 - RNA, 20 nt, Artificial Sequence
  Synthetic
uuuggacaccagcgcgcuca

SEQ ID NO: 11975 - RNA, 20 nt, Artificial Sequence
  Synthetic
gcccgcgcggccuggaaaga

SEQ ID NO: 11976 - RNA, 20 nt, Artificial Sequence
  Synthetic
gaguccgcggagucgggaga

SEQ ID NO: 11977 - RNA, 20 nt, Artificial Sequence
  Synthetic
cggcgcaggccggggcccga

SEQ ID NO: 11978 - RNA, 20 nt, Artificial Sequence
  Synthetic
cgggagaggggccgcggcga

SEQ ID NO: 11979 - RNA, 20 nt, Artificial Sequence
  Synthetic
uacagcuccgcagcgggcga

SEQ ID NO: 11980 - RNA, 20 nt, Artificial Sequence
  Synthetic
agccgugggaccgggaagga

SEQ ID NO: 11981 - RNA, 20 nt, Artificial Sequence
  Synthetic
gugggugugcguacggagga

SEQ ID NO: 11982 - RNA, 20 nt, Artificial Sequence
  Synthetic
uggagggcugcggguccgga

SEQ ID NO: 11983 - RNA, 20 nt, Artificial Sequence
  Synthetic
gcuggggaagcgcgggcgga

SEQ ID NO: 11984 - RNA, 20 nt, Artificial Sequence
  Synthetic
agaaaauggggggguaggga

SEQ ID NO: 11985 - RNA, 20 nt, Artificial Sequence
  Synthetic
ggagagccgugggaccggga

SEQ ID NO: 11986 - RNA, 20 nt, Artificial Sequence
  Synthetic
gagcgcggcggcggcgggga

SEQ ID NO: 11987 - RNA, 20 nt, Artificial Sequence
  Synthetic
gcgggcgaggggagguggga

SEQ ID NO: 11988 - RNA, 20 nt, Artificial Sequence
  Synthetic
gaauccagccuaaguuugga

SEQ ID NO: 11989 - RNA, 20 nt, Artificial Sequence
  Synthetic
caaaauaaugaacaaugcua

SEQ ID NO: 11990 - RNA, 20 nt, Artificial Sequence
  Synthetic
aggggaagugggugugcgua

SEQ ID NO: 11991 - RNA, 20 nt, Artificial Sequence
  Synthetic
cguaagaaaaugggggggua

SEQ ID NO: 11992 - RNA, 20 nt, Artificial Sequence
  Synthetic
ccuacccccccauuuucuua

SEQ ID NO: 11993 - RNA, 20 nt, Artificial Sequence
  Synthetic
uguucauuauuuugcaaaac

SEQ ID NO: 11994 - RNA, 20 nt, Artificial Sequence
  Synthetic
aaaauagagcgagagugcac

SEQ ID NO: 11995 - RNA, 20 nt, Artificial Sequence
  Synthetic
ggggagaaaagaggugagac

SEQ ID NO: 11996 - RNA, 20 nt, Artificial Sequence
  Synthetic
gggagaggggccgcggcgac

SEQ ID NO: 11997 - RNA, 20 nt, Artificial Sequence
  Synthetic
gccgugggaccgggaaggac

SEQ ID NO: 11998 - RNA, 20 nt, Artificial Sequence
  Synthetic
cccaaggccgagccagggac

SEQ ID NO: 11999 - RNA, 20 nt, Artificial Sequence
  Synthetic
gcggccuggaaagaggggac

SEQ ID NO: 12000 - RNA, 20 nt, Artificial Sequence
  Synthetic
gacggggagagccgugggac

SEQ ID NO: 12001 - RNA, 20 nt, Artificial Sequence
  Synthetic
gaacaacucacaugcaaacc

SEQ ID NO: 12002 - RNA, 20 nt, Artificial Sequence
  Synthetic
aaauagagcgagagugcacc

SEQ ID NO: 12003 - RNA, 20 nt, Artificial Sequence
  Synthetic
ccaaggccgagccagggacc

SEQ ID NO: 12004 - RNA, 20 nt, Artificial Sequence
  Synthetic
cggccuggaaagaggggacc

SEQ ID NO: 12005 - RNA, 20 nt, Artificial Sequence
  Synthetic
acggggagagccgugggacc

SEQ ID NO: 12006 - RNA, 20 nt, Artificial Sequence
  Synthetic
uguccgggagcaacucuacc

SEQ ID NO: 12007 - RNA, 20 nt, Artificial Sequence
  Synthetic
ccccaccagcucccaccccc

SEQ ID NO: 12008 - RNA, 20 nt, Artificial Sequence
  Synthetic
caccgggaggcugcagcccc

SEQ ID NO: 12009 - RNA, 20 nt, Artificial Sequence
  Synthetic
ggggcuuuuacuucggcccc

SEQ ID NO: 12010 - RNA, 20 nt, Artificial Sequence
  Synthetic
gcacuguggaaaggggcccc

SEQ ID NO: 12011 - RNA, 20 nt, Artificial Sequence
  Synthetic
gucucaccucuuuucucccc

SEQ ID NO: 12012 - RNA, 20 nt, Artificial Sequence
  Synthetic
cgcccgcgcuuccccagccc

SEQ ID NO: 12013 - RNA, 20 nt, Artificial Sequence
  Synthetic
gcaccgggaggcugcagccc

SEQ ID NO: 12014 - RNA, 20 nt, Artificial Sequence
  Synthetic
uugggggcgcccucgggccc

SEQ ID NO: 12015 - RNA, 20 nt, Artificial Sequence
  Synthetic
cugcgccgccugccucuccc

SEQ ID NO: 12016 - RNA, 20 nt, Artificial Sequence
  Synthetic
agucucaccucuuuucuccc

SEQ ID NO: 12017 - RNA, 20 nt, Artificial Sequence
  Synthetic
aagucuaaaaaacgauuccc

SEQ ID NO: 12018 - RNA, 20 nt, Artificial Sequence
  Synthetic
agcgcgggcggagggaagcc

SEQ ID NO: 12019 - RNA, 20 nt, Artificial Sequence
  Synthetic
ccgcccgcgcuuccccagcc

SEQ ID NO: 12020 - RNA, 20 nt, Artificial Sequence
  Synthetic
ggcgcccccaaggccgagcc

SEQ ID NO: 12021 - RNA, 20 nt, Artificial Sequence
  Synthetic
gcuccccgcguguggacgcc

SEQ ID NO: 12022 - RNA, 20 nt, Artificial Sequence
  Synthetic
uccgcggacucaggagcgcc

SEQ ID NO: 12023 - RNA, 20 nt, Artificial Sequence
  Synthetic
agaggcaggcggcgcaggcc

SEQ ID NO: 12024 - RNA, 20 nt, Artificial Sequence
  Synthetic
cuccaggagcccgcgcggcc

SEQ ID NO: 12025 - RNA, 20 nt, Artificial Sequence
  Synthetic
agcccggggcugcagccucc

SEQ ID NO: 12026 - RNA, 20 nt, Artificial Sequence
  Synthetic
uuccaggccgcgcgggcucc

SEQ ID NO: 12027 - RNA, 20 nt, Artificial Sequence
  Synthetic
aagccagguagaguugcucc

SEQ ID NO: 12028 - RNA, 20 nt, Artificial Sequence
  Synthetic
agggcagcgcccaagucucc

SEQ ID NO: 12029 - RNA, 20 nt, Artificial Sequence
  Synthetic
gcguacggaggagggugucc

SEQ ID NO: 12030 - RNA, 20 nt, Artificial Sequence
  Synthetic
caagucuaaaaaacgauucc

SEQ ID NO: 12031 - RNA, 20 nt, Artificial Sequence
  Synthetic
gccgcgucucccguccuucc

SEQ ID NO: 12032 - RNA, 20 nt, Artificial Sequence
  Synthetic
cuccccgguccccucuuucc

SEQ ID NO: 12033 - RNA, 20 nt, Artificial Sequence
  Synthetic
ccaaguuacagcuccgcagc

SEQ ID NO: 12034 - RNA, 20 nt, Artificial Sequence
  Synthetic
gagccggcacaaaaggcagc

SEQ ID NO: 12035 - RNA, 20 nt, Artificial Sequence
  Synthetic
cucacggucaagugugcagc

SEQ ID NO: 12036 - RNA, 20 nt, Artificial Sequence
  Synthetic
ggagggcaagcgcgaggagc

SEQ ID NO: 12037 - RNA, 20 nt, Artificial Sequence
  Synthetic
ccgcgugugugggggggagc

SEQ ID NO: 12038 - RNA, 20 nt, Artificial Sequence
  Synthetic
gcaaaccugggggugggagc

SEQ ID NO: 12039 - RNA, 20 nt, Artificial Sequence
  Synthetic
ggccccuggcguccacacgc

SEQ ID NO: 12040 - RNA, 20 nt, Artificial Sequence
  Synthetic
aguuucccgagcgcagccgc

SEQ ID NO: 12041 - RNA, 20 nt, Artificial Sequence
  Synthetic
gccccgggcuggggaagcgc

SEQ ID NO: 12042 - RNA, 20 nt, Artificial Sequence
  Synthetic
cuccgcggacucaggagcgc

SEQ ID NO: 12043 - RNA, 20 nt, Artificial Sequence
  Synthetic
ccccucuuuccaggccgcgc

SEQ ID NO: 12044 - RNA, 20 nt, Artificial Sequence
  Synthetic
acacuugaccgugagcgcgc

SEQ ID NO: 12045 - RNA, 20 nt, Artificial Sequence
  Synthetic
cggggagaggcaggcggcgc

SEQ ID NO: 12046 - RNA, 20 nt, Artificial Sequence
  Synthetic
gagaggcaggcggcgcaggc

SEQ ID NO: 12047 - RNA, 20 nt, Artificial Sequence
  Synthetic
agaggggaccggggagaggc

SEQ ID NO: 12048 - RNA, 20 nt, Artificial Sequence
  Synthetic
gcagcccuccaaacuuaggc

SEQ ID NO: 12049 - RNA, 20 nt, Artificial Sequence
  Synthetic
ggaaggacgggagacgcggc

SEQ ID NO: 12050 - RNA, 20 nt, Artificial Sequence
  Synthetic
ggagcgagcgcggcggcggc

SEQ ID NO: 12051 - RNA, 20 nt, Artificial Sequence
  Synthetic
gggaggcugcagccccgggc

SEQ ID NO: 12052 - RNA, 20 nt, Artificial Sequence
  Synthetic
uuuugcaaaacuggcggggc

SEQ ID NO: 12053 - RNA, 20 nt, Artificial Sequence
  Synthetic
cauuauuuugcaaaacuggc

SEQ ID NO: 12054 - RNA, 20 nt, Artificial Sequence
  Synthetic
gacaaacacccaccucuggc

SEQ ID NO: 12055 - RNA, 20 nt, Artificial Sequence
  Synthetic
gccuaaguuuggagggcugc

SEQ ID NO: 12056 - RNA, 20 nt, Artificial Sequence
  Synthetic
ggaacaaaaggcggcagugc

SEQ ID NO: 12057 - RNA, 20 nt, Artificial Sequence
  Synthetic
ugucccgcugccuuuugugc

SEQ ID NO: 12058 - RNA, 20 nt, Artificial Sequence
  Synthetic
ucucccgacuccgcggacuc

SEQ ID NO: 12059 - RNA, 20 nt, Artificial Sequence
  Synthetic
gcgggacaaacacccaccuc

SEQ ID NO: 12060 - RNA, 20 nt, Artificial Sequence
  Synthetic
ucggccuugggggcgcccuc

SEQ ID NO: 12061 - RNA, 20 nt, Artificial Sequence
  Synthetic
uucuuugcuguccucuccuc

SEQ ID NO: 12062 - RNA, 20 nt, Artificial Sequence
  Synthetic
ccgagcccgcggcugcgcuc

SEQ ID NO: 12063 - RNA, 20 nt, Artificial Sequence
  Synthetic
ccgagcgcagccgcgggcuc

SEQ ID NO: 12064 - RNA, 20 nt, Artificial Sequence
  Synthetic
gcuccugaguccgcggaguc

SEQ ID NO: 12065 - RNA, 20 nt, Artificial Sequence
  Synthetic
aguuuggagggcugcggguc

SEQ ID NO: 12066 - RNA, 20 nt, Artificial Sequence
  Synthetic
ugcguacggaggaggguguc

SEQ ID NO: 12067 - RNA, 20 nt, Artificial Sequence
  Synthetic
gaggcucagcucucaacuuc

SEQ ID NO: 12068 - RNA, 20 nt, Artificial Sequence
  Synthetic
agacuugggcgcugcccuuc

SEQ ID NO: 12069 - RNA, 20 nt, Artificial Sequence
  Synthetic
ggcacugccgccuuuuguuc

SEQ ID NO: 12070 - RNA, 20 nt, Artificial Sequence
  Synthetic
acgauucccggggagaaaag

SEQ ID NO: 12071 - RNA, 20 nt, Artificial Sequence
  Synthetic
uccccacaauagugagaaag

SEQ ID NO: 12072 - RNA, 20 nt, Artificial Sequence
  Synthetic
agcggcggaaaggaggaaag

SEQ ID NO: 12073 - RNA, 20 nt, Artificial Sequence
  Synthetic
agcccgcgcggccuggaaag

SEQ ID NO: 12074 - RNA, 20 nt, Artificial Sequence
  Synthetic
gaaaguggcacuguggaaag

SEQ ID NO: 12075 - RNA, 20 nt, Artificial Sequence
  Synthetic
uuucgaaaagagaaauaaag

SEQ ID NO: 12076 - RNA, 20 nt, Artificial Sequence
  Synthetic
gcggcggcggggaggggaag

SEQ ID NO: 12077 - RNA, 20 nt, Artificial Sequence
  Synthetic
uccccgcguguggacgccag

SEQ ID NO: 12078 - RNA, 20 nt, Artificial Sequence
  Synthetic
ccgccuuuuguuccggccag

SEQ ID NO: 12079 - RNA, 20 nt, Artificial Sequence
  Synthetic
uccaaguuacagcuccgcag

SEQ ID NO: 12080 - RNA, 20 nt, Artificial Sequence
  Synthetic
ggagccggcacaaaaggcag

SEQ ID NO: 12081 - RNA, 20 nt, Artificial Sequence
  Synthetic
gcucacggucaagugugcag

SEQ ID NO: 12082 - RNA, 20 nt, Artificial Sequence
  Synthetic
cccgcgcggccuggaaagag

SEQ ID NO: 12083 - RNA, 20 nt, Artificial Sequence
  Synthetic
aguccgcggagucgggagag

SEQ ID NO: 12084 - RNA, 20 nt, Artificial Sequence
  Synthetic
acagcuccgcagcgggcgag

SEQ ID NO: 12085 - RNA, 20 nt, Artificial Sequence
  Synthetic
gggaaacuuugcccgaggag

SEQ ID NO: 12086 - RNA, 20 nt, Artificial Sequence
  Synthetic
ugaguccgcggagucgggag

SEQ ID NO: 12087 - RNA, 20 nt, Artificial Sequence
  Synthetic
ggaaagaggggaccggggag

SEQ ID NO: 12088 - RNA, 20 nt, Artificial Sequence
  Synthetic
agcgcggcggcggcggggag

SEQ ID NO: 12089 - RNA, 20 nt, Artificial Sequence
  Synthetic
cuggcggggcggggggggag

SEQ ID NO: 12090 - RNA, 20 nt, Artificial Sequence
  Synthetic
ccccauuuucuuacggugag

SEQ ID NO: 12091 - RNA, 20 nt, Artificial Sequence
  Synthetic
ggagggagcgcacggcaacg

SEQ ID NO: 12092 - RNA, 20 nt, Artificial Sequence
  Synthetic
ccugcucccccccacacacg

SEQ ID NO: 12093 - RNA, 20 nt, Artificial Sequence
  Synthetic
cggccccuggcguccacacg

SEQ ID NO: 12094 - RNA, 20 nt, Artificial Sequence
  Synthetic
accgggaaggacgggagacg

SEQ ID NO: 12095 - RNA, 20 nt, Artificial Sequence
  Synthetic
ggagaggggccgcggcgacg

SEQ ID NO: 12096 - RNA, 20 nt, Artificial Sequence
  Synthetic
ggccuggaaagaggggaccg

SEQ ID NO: 12097 - RNA, 20 nt, Artificial Sequence
  Synthetic
gcccgcgcuuccccagcccg

SEQ ID NO: 12098 - RNA, 20 nt, Artificial Sequence
  Synthetic
aaguaaaagccccgagcccg

SEQ ID NO: 12099 - RNA, 20 nt, Artificial Sequence
  Synthetic
gcggcgcaggccggggcccg

SEQ ID NO: 12100 - RNA, 20 nt, Artificial Sequence
  Synthetic
cgcucgggaaacuuugcccg

SEQ ID NO: 12101 - RNA, 20 nt, Artificial Sequence
  Synthetic
agucuaaaaaacgauucccg

SEQ ID NO: 12102 - RNA, 20 nt, Artificial Sequence
  Synthetic
aaguuucccgagcgcagccg

SEQ ID NO: 12103 - RNA, 20 nt, Artificial Sequence
  Synthetic
cgcggcgacggggagagccg

SEQ ID NO: 12104 - RNA, 20 nt, Artificial Sequence
  Synthetic
ccgcggacucaggagcgccg

SEQ ID NO: 12105 - RNA, 20 nt, Artificial Sequence
  Synthetic
cacggcucuccccgucgccg

SEQ ID NO: 12106 - RNA, 20 nt, Artificial Sequence
  Synthetic
gaggcaggcggcgcaggccg

SEQ ID NO: 12107 - RNA, 20 nt, Artificial Sequence
  Synthetic
cggagucgggagaggggccg

SEQ ID NO: 12108 - RNA, 20 nt, Artificial Sequence
  Synthetic
cggccccucucccgacuccg

SEQ ID NO: 12109 - RNA, 20 nt, Artificial Sequence
  Synthetic
ccccggcgcuccugaguccg

SEQ ID NO: 12110 - RNA, 20 nt, Artificial Sequence
  Synthetic
agccccgggcuggggaagcg

SEQ ID NO: 12111 - RNA, 20 nt, Artificial Sequence
  Synthetic
ccacacgcggggagcgagcg

SEQ ID NO: 12112 - RNA, 20 nt, Artificial Sequence
  Synthetic
gccccuggcguccacacgcg

SEQ ID NO: 12113 - RNA, 20 nt, Artificial Sequence
  Synthetic
caagucuccaggagcccgcg

SEQ ID NO: 12114 - RNA, 20 nt, Artificial Sequence
  Synthetic
uccccucuuuccaggccgcg

SEQ ID NO: 12115 - RNA, 20 nt, Artificial Sequence
  Synthetic
ggcgcgggagggcaagcgcg

SEQ ID NO: 12116 - RNA, 20 nt, Artificial Sequence
  Synthetic
gagcgagcgcggcggcggcg

SEQ ID NO: 12117 - RNA, 20 nt, Artificial Sequence
  Synthetic
uuacagcuccgcagcgggcg

SEQ ID NO: 12118 - RNA, 20 nt, Artificial Sequence
  Synthetic
uuugcaaaacuggcggggcg

SEQ ID NO: 12119 - RNA, 20 nt, Artificial Sequence
  Synthetic
auuauuuugcaaaacuggcg

SEQ ID NO: 12120 - RNA, 20 nt, Artificial Sequence
  Synthetic
cgagcgcagccgcgggcucg

SEQ ID NO: 12121 - RNA, 20 nt, Artificial Sequence
  Synthetic
ccucuggccggaacaaaagg

SEQ ID NO: 12122 - RNA, 20 nt, Artificial Sequence
  Synthetic
gaaauaaagcggcggaaagg

SEQ ID NO: 12123 - RNA, 20 nt, Artificial Sequence
  Synthetic
ggggaccggggagaggcagg

SEQ ID NO: 12124 - RNA, 20 nt, Artificial Sequence
  Synthetic
ggcggaaaggaggaaagagg

SEQ ID NO: 12125 - RNA, 20 nt, Artificial Sequence
  Synthetic
ccuuuuguuccggccagagg

SEQ ID NO: 12126 - RNA, 20 nt, Artificial Sequence
  Synthetic
agugggugugcguacggagg

SEQ ID NO: 12127 - RNA, 20 nt, Artificial Sequence
  Synthetic
ccgcagcgggcgaggggagg

SEQ ID NO: 12128 - RNA, 20 nt, Artificial Sequence
  Synthetic
ggaagugggugugcguacgg

SEQ ID NO: 12129 - RNA, 20 nt, Artificial Sequence
  Synthetic
cgcggacucaggagcgccgg

SEQ ID NO: 12130 - RNA, 20 nt, Artificial Sequence
  Synthetic
cgaaaagagaaauaaagcgg

SEQ ID NO: 12131 - RNA, 20 nt, Artificial Sequence
  Synthetic
cacgcggggagcgagcgcgg

SEQ ID NO: 12132 - RNA, 20 nt, Artificial Sequence
  Synthetic
gcggggagcgagcgcggcgg

SEQ ID NO: 12133 - RNA, 20 nt, Artificial Sequence
  Synthetic
gggagcgagcgcggcggcgg

SEQ ID NO: 12134 - RNA, 20 nt, Artificial Sequence
  Synthetic
ggcuggggaagcgcgggcgg

SEQ ID NO: 12135 - RNA, 20 nt, Artificial Sequence
  Synthetic
uugcaaaacuggcggggcgg

SEQ ID NO: 12136 - RNA, 20 nt, Artificial Sequence
  Synthetic
gggagcugguggggaaaggg

SEQ ID NO: 12137 - RNA, 20 nt, Artificial Sequence
  Synthetic
aagaaaauggggggguaggg

SEQ ID NO: 12138 - RNA, 20 nt, Artificial Sequence
  Synthetic
uagagcgagagugcaccggg

SEQ ID NO: 12139 - RNA, 20 nt, Artificial Sequence
  Synthetic
acggucaagugugcagcggg

SEQ ID NO: 12140 - RNA, 20 nt, Artificial Sequence
  Synthetic
ccgggcuggggaagcgcggg

SEQ ID NO: 12141 - RNA, 20 nt, Artificial Sequence
  Synthetic
ugcaaaacuggcggggcggg

SEQ ID NO: 12142 - RNA, 20 nt, Artificial Sequence
  Synthetic
gcuccgcagcgggcgagggg

SEQ ID NO: 12143 - RNA, 20 nt, Artificial Sequence
  Synthetic
cgagcgcggcggcggcgggg

SEQ ID NO: 12144 - RNA, 20 nt, Artificial Sequence
  Synthetic
gcaaaacuggcggggcgggg

SEQ ID NO: 12145 - RNA, 20 nt, Artificial Sequence
  Synthetic
auuuugcaaaacuggcgggg

SEQ ID NO: 12146 - RNA, 20 nt, Artificial Sequence
  Synthetic
caaaacuggcggggcggggg

SEQ ID NO: 12147 - RNA, 20 nt, Artificial Sequence
  Synthetic
cucacaugcaaaccuggggg

SEQ ID NO: 12148 - RNA, 20 nt, Artificial Sequence
  Synthetic
cucaccguaagaaaaugggg

SEQ ID NO: 12149 - RNA, 20 nt, Artificial Sequence
  Synthetic
uagaguccgcgugugugggg

SEQ ID NO: 12150 - RNA, 20 nt, Artificial Sequence
  Synthetic
acucaccguaagaaaauggg

SEQ ID NO: 12151 - RNA, 20 nt, Artificial Sequence
  Synthetic
agcgggcgaggggagguggg

SEQ ID NO: 12152 - RNA, 20 nt, Artificial Sequence
  Synthetic
uuagaguccgcguguguggg

SEQ ID NO: 12153 - RNA, 20 nt, Artificial Sequence
  Synthetic
cacucaccguaagaaaaugg

SEQ ID NO: 12154 - RNA, 20 nt, Artificial Sequence
  Synthetic
ucauuauuuugcaaaacugg

SEQ ID NO: 12155 - RNA, 20 nt, Artificial Sequence
  Synthetic
caacucacaugcaaaccugg

SEQ ID NO: 12156 - RNA, 20 nt, Artificial Sequence
  Synthetic
aaccugggggugggagcugg

SEQ ID NO: 12157 - RNA, 20 nt, Artificial Sequence
  Synthetic
uuuagaguccgcgugugugg

SEQ ID NO: 12158 - RNA, 20 nt, Artificial Sequence
  Synthetic
gcugcggagcuguaacuugg

SEQ ID NO: 12159 - RNA, 20 nt, Artificial Sequence
  Synthetic
ggucccuggcucggccuugg

SEQ ID NO: 12160 - RNA, 20 nt, Artificial Sequence
  Synthetic
ggaauccagccuaaguuugg

SEQ ID NO: 12161 - RNA, 20 nt, Artificial Sequence
  Synthetic
ccacucaccguaagaaaaug

SEQ ID NO: 12162 - RNA, 20 nt, Artificial Sequence
  Synthetic
auagugagaaaguggcacug

SEQ ID NO: 12163 - RNA, 20 nt, Artificial Sequence
  Synthetic
acaacucacaugcaaaccug

SEQ ID NO: 12164 - RNA, 20 nt, Artificial Sequence
  Synthetic
ccaccuccccucgcccgcug

SEQ ID NO: 12165 - RNA, 20 nt, Artificial Sequence
  Synthetic
agccuaaguuuggagggcug

SEQ ID NO: 12166 - RNA, 20 nt, Artificial Sequence
  Synthetic
gaggcugcagccccgggcug

SEQ ID NO: 12167 - RNA, 20 nt, Artificial Sequence
  Synthetic
ccgcgcucgcuccccgcgug

SEQ ID NO: 12168 - RNA, 20 nt, Artificial Sequence
  Synthetic
ccugggggugggagcuggug

SEQ ID NO: 12169 - RNA, 20 nt, Artificial Sequence
  Synthetic
cauuuuagaguccgcgugug

SEQ ID NO: 12170 - RNA, 20 nt, Artificial Sequence
  Synthetic
uuuuagaguccgcgugugug

SEQ ID NO: 12171 - RNA, 20 nt, Artificial Sequence
  Synthetic
gccacuuucucacuauugug

SEQ ID NO: 12172 - RNA, 20 nt, Artificial Sequence
  Synthetic
gugccacuuucucacuauug

SEQ ID NO: 12173 - RNA, 20 nt, Artificial Sequence
  Synthetic
cggucccuggcucggccuug

SEQ ID NO: 12174 - RNA, 20 nt, Artificial Sequence
  Synthetic
cccacucaccguaagaaaau

SEQ ID NO: 12175 - RNA, 20 nt, Artificial Sequence
  Synthetic
cccgcugcggagcuguaacu

SEQ ID NO: 12176 - RNA, 20 nt, Artificial Sequence
  Synthetic
cgcgcgggcuccuggagacu

SEQ ID NO: 12177 - RNA, 20 nt, Artificial Sequence
  Synthetic
aacaacucacaugcaaaccu

SEQ ID NO: 12178 - RNA, 20 nt, Artificial Sequence
  Synthetic
cucggccuugggggcgcccu

SEQ ID NO: 12179 - RNA, 20 nt, Artificial Sequence
  Synthetic
cccggucccuggcucggccu

SEQ ID NO: 12180 - RNA, 20 nt, Artificial Sequence
  Synthetic
uuucuuugcuguccucuccu

SEQ ID NO: 12181 - RNA, 20 nt, Artificial Sequence
  Synthetic
cccgagcccgcggcugcgcu

SEQ ID NO: 12182 - RNA, 20 nt, Artificial Sequence
  Synthetic
ggaggcugcagccccgggcu

SEQ ID NO: 12183 - RNA, 20 nt, Artificial Sequence
  Synthetic
cccgagcgcagccgcgggcu

SEQ ID NO: 12184 - RNA, 20 nt, Artificial Sequence
  Synthetic
cggcggcggggaggggaagu

SEQ ID NO: 12185 - RNA, 20 nt, Artificial Sequence
  Synthetic
cgcuccugaguccgcggagu

SEQ ID NO: 12186 - RNA, 20 nt, Artificial Sequence
  Synthetic
cccauuuucuuacggugagu

SEQ ID NO: 12187 - RNA, 20 nt, Artificial Sequence
  Synthetic
gcggcgacggggagagccgu

SEQ ID NO: 12188 - RNA, 20 nt, Artificial Sequence
  Synthetic
cuuuuguuccggccagaggu

SEQ ID NO: 12189 - RNA, 20 nt, Artificial Sequence
  Synthetic
cgcagcgggcgaggggaggu

SEQ ID NO: 12190 - RNA, 20 nt, Artificial Sequence
  Synthetic
ccguaagaaaaugggggggu

SEQ ID NO: 12191 - RNA, 20 nt, Artificial Sequence
  Synthetic
ucacaugcaaaccugggggu

SEQ ID NO: 12192 - RNA, 20 nt, Artificial Sequence
  Synthetic
accugggggugggagcuggu

SEQ ID NO: 12193 - RNA, 20 nt, Artificial Sequence
  Synthetic
auuuuagaguccgcgugugu

SEQ ID NO: 12194 - RNA, 20 nt, Artificial Sequence
  Synthetic
ugccacuuucucacuauugu

SEQ ID NO: 12195 - RNA, 20 nt, Artificial Sequence
  Synthetic
acccgcagcccuccaaacuu

SEQ ID NO: 12196 - RNA, 20 nt, Artificial Sequence
  Synthetic
ggaggcucagcucucaacuu

SEQ ID NO: 12197 - RNA, 20 nt, Artificial Sequence
  Synthetic
gcgcgggcuccuggagacuu

SEQ ID NO: 12198 - RNA, 20 nt, Artificial Sequence
  Synthetic
cgggcucggggcuuuuacuu

SEQ ID NO: 12199 - RNA, 20 nt, Artificial Sequence
  Synthetic
ccggucccuggcucggccuu

SEQ ID NO: 12200 - RNA, 20 nt, Artificial Sequence
  Synthetic
cgcggaauccagccuaaguu

SEQ ID NO: 12201 - RNA, 20 nt, Artificial Sequence
  Synthetic
aaagaggugagacuggcuuu

SEQ ID NO: 12202 - RNA, 21 nt, Artificial Sequence
  Synthetic
ggcguggccgggagagaagaa

SEQ ID NO: 12203 - RNA, 22 nt, Artificial Sequence
  Synthetic
uggcguggccgggagagaagaa

SEQ ID NO: 12204 - RNA, 23 nt, Artificial Sequence
  Synthetic
guggcguggccgggagagaagaa

SEQ ID NO: 12205 - RNA, 24 nt, Artificial Sequence
  Synthetic
gguggcguggccgggagagaagaa

SEQ ID NO: 12206 - RNA, 18 nt, Artificial Sequence
  Synthetic
cacggcaaugguuccaga

SEQ ID NO: 12207 - RNA, 19 nt, Artificial Sequence
  Synthetic
acacggcaaugguuccaga

SEQ ID NO: 12208 - RNA, 20 nt, Artificial Sequence
  Synthetic
uacacggcaaugguuccaga

SEQ ID NO: 12209 - RNA, 21 nt, Artificial Sequence
  Synthetic
auacacggcaaugguuccaga

SEQ ID NO: 12210 - RNA, 22 nt, Artificial Sequence
  Synthetic
cauacacggcaaugguuccaga

SEQ ID NO: 12211 - RNA, 23 nt, Artificial Sequence
  Synthetic
gcauacacggcaaugguuccaga

SEQ ID NO: 12212 - RNA, 24 nt, Artificial Sequence
  Synthetic
ugcauacacggcaaugguuccaga

SEQ ID NO: 12213 - RNA, 18 nt, Artificial Sequence
  Synthetic
uuauuggguuacuuacgc

SEQ ID NO: 12214 - RNA, 19 nt, Artificial Sequence
  Synthetic
auuauuggguuacuuacgc

SEQ ID NO: 12215 - RNA, 20 nt, Artificial Sequence
  Synthetic
uauuauuggguuacuuacgc

SEQ ID NO: 12216 - RNA, 21 nt, Artificial Sequence
  Synthetic
cuauuauuggguuacuuacgc

SEQ ID NO: 12217 - RNA, 22 nt, Artificial Sequence
  Synthetic
acuauuauuggguuacuuacgc

SEQ ID NO: 12218 - RNA, 23 nt, Artificial Sequence
  Synthetic
uacuauuauuggguuacuuacgc

SEQ ID NO: 12219 - RNA, 24 nt, Artificial Sequence
  Synthetic
uuacuauuauuggguuacuuacgc

SEQ ID NO: 12220 - RNA, 21 nt, Artificial Sequence
  Synthetic
gggagagaagaaagggguggc

SEQ ID NO: 12221 - RNA, 22 nt, Artificial Sequence
  Synthetic
cgggagagaagaaagggguggc

SEQ ID NO: 12222 - RNA, 23 nt, Artificial Sequence
  Synthetic
ccgggagagaagaaagggguggc

SEQ ID NO: 12223 - RNA, 24 nt, Artificial Sequence
  Synthetic
gccgggagagaagaaagggguggc

SEQ ID NO: 12224 - RNA, 18 nt, Artificial Sequence
  Synthetic
ucccguuugcuuaagugc

SEQ ID NO: 12225 - RNA, 19 nt, Artificial Sequence
  Synthetic
uucccguuugcuuaagugc

SEQ ID NO: 12226 - RNA, 20 nt, Artificial Sequence
  Synthetic
auucccguuugcuuaagugc

SEQ ID NO: 12227 - RNA, 21 nt, Artificial Sequence
  Synthetic
aauucccguuugcuuaagugc

SEQ ID NO: 12228 - RNA, 22 nt, Artificial Sequence
  Synthetic
gaauucccguuugcuuaagugc

SEQ ID NO: 12229 - RNA, 23 nt, Artificial Sequence
  Synthetic
agaauucccguuugcuuaagugc

SEQ ID NO: 12230 - RNA, 24 nt, Artificial Sequence
  Synthetic
gagaauucccguuugcuuaagugc

SEQ ID NO: 12231 - RNA, 18 nt, Artificial Sequence
  Synthetic
ccugcgaacuugaacguc

SEQ ID NO: 12232 - RNA, 19 nt, Artificial Sequence
  Synthetic
cccugcgaacuugaacguc

SEQ ID NO: 12233 - RNA, 20 nt, Artificial Sequence
  Synthetic
ucccugcgaacuugaacguc

SEQ ID NO: 12234 - RNA, 21 nt, Artificial Sequence
  Synthetic
gucccugcgaacuugaacguc

SEQ ID NO: 12235 - RNA, 22 nt, Artificial Sequence
  Synthetic
cgucccugcgaacuugaacguc

SEQ ID NO: 12236 - RNA, 23 nt, Artificial Sequence
  Synthetic
acgucccugcgaacuugaacguc

SEQ ID NO: 12237 - RNA, 24 nt, Artificial Sequence
  Synthetic
gacgucccugcgaacuugaacguc

SEQ ID NO: 12238 - RNA, 21 nt, Artificial Sequence
  Synthetic
uacaaagauggcgcagggaag

SEQ ID NO: 12239 - RNA, 22 nt, Artificial Sequence
  Synthetic
auacaaagauggcgcagggaag

SEQ ID NO: 12240 - RNA, 23 nt, Artificial Sequence
  Synthetic
aauacaaagauggcgcagggaag

SEQ ID NO: 12241 - RNA, 24 nt, Artificial Sequence
  Synthetic
uaauacaaagauggcgcagggaag

SEQ ID NO: 12242 - RNA, 18 nt, Artificial Sequence
  Synthetic
cgguucacaucgggagag

SEQ ID NO: 12243 - RNA, 19 nt, Artificial Sequence
  Synthetic
ucgguucacaucgggagag

SEQ ID NO: 12244 - RNA, 20 nt, Artificial Sequence
  Synthetic
cucgguucacaucgggagag

SEQ ID NO: 12245 - RNA, 21 nt, Artificial Sequence
  Synthetic
gcucgguucacaucgggagag

SEQ ID NO: 12246 - RNA, 22 nt, Artificial Sequence
  Synthetic
ggcucgguucacaucgggagag

SEQ ID NO: 12247 - RNA, 23 nt, Artificial Sequence
  Synthetic
cggcucgguucacaucgggagag

SEQ ID NO: 12248 - RNA, 24 nt, Artificial Sequence
  Synthetic
acggcucgguucacaucgggagag

SEQ ID NO: 12249 - RNA, 18 nt, Artificial Sequence
  Synthetic
aaugguuccagaugggau

SEQ ID NO: 12250 - RNA, 19 nt, Artificial Sequence
  Synthetic
caaugguuccagaugggau

SEQ ID NO: 12251 - RNA, 20 nt, Artificial Sequence
  Synthetic
gcaaugguuccagaugggau

SEQ ID NO: 12252 - RNA, 21 nt, Artificial Sequence
  Synthetic
ggcaaugguuccagaugggau

SEQ ID NO: 12253 - RNA, 22 nt, Artificial Sequence
  Synthetic
cggcaaugguuccagaugggau

SEQ ID NO: 12254 - RNA, 23 nt, Artificial Sequence
  Synthetic
acggcaaugguuccagaugggau

SEQ ID NO: 12255 - RNA, 24 nt, Artificial Sequence
  Synthetic
cacggcaaugguuccagaugggau

SEQ ID NO: 12256 - RNA, 18 nt, Artificial Sequence
  Synthetic
aacuugaacgucaggagu

SEQ ID NO: 12257 - RNA, 19 nt, Artificial Sequence
  Synthetic
gaacuugaacgucaggagu

SEQ ID NO: 12258 - RNA, 20 nt, Artificial Sequence
  Synthetic
cgaacuugaacgucaggagu

SEQ ID NO: 12259 - RNA, 21 nt, Artificial Sequence
  Synthetic
gcgaacuugaacgucaggagu

SEQ ID NO: 12260 - RNA, 22 nt, Artificial Sequence
  Synthetic
ugcgaacuugaacgucaggagu

SEQ ID NO: 12261 - RNA, 23 nt, Artificial Sequence
  Synthetic
cugcgaacuugaacgucaggagu

SEQ ID NO: 12262 - RNA, 24 nt, Artificial Sequence
  Synthetic
ccugcgaacuugaacgucaggagu

SEQ ID NO: 12263 - RNA, 21 nt, Artificial Sequence
  Synthetic
aaccccagcacuuaagcaaac

SEQ ID NO: 12264 - RNA, 22 nt, Artificial Sequence
  Synthetic
aaaccccagcacuuaagcaaac

SEQ ID NO: 12265 - RNA, 23 nt, Artificial Sequence
  Synthetic
caaaccccagcacuuaagcaaac

SEQ ID NO: 12266 - RNA, 24 nt, Artificial Sequence
  Synthetic
gcaaaccccagcacuuaagcaaac

SEQ ID NO: 12267 - RNA, 21 nt, Artificial Sequence
  Synthetic
aagcaaaagcgagggggagag

SEQ ID NO: 12268 - RNA, 22 nt, Artificial Sequence
  Synthetic
gaagcaaaagcgagggggagag

SEQ ID NO: 12269 - RNA, 23 nt, Artificial Sequence
  Synthetic
agaagcaaaagcgagggggagag

SEQ ID NO: 12270 - RNA, 24 nt, Artificial Sequence
  Synthetic
uagaagcaaaagcgagggggagag

SEQ ID NO: 12271 - RNA, 18 nt, Artificial Sequence
  Synthetic
guggccgggagagaagaa

SEQ ID NO: 12272 - RNA, 19 nt, Artificial Sequence
  Synthetic
cguggccgggagagaagaa

SEQ ID NO: 12273 - RNA, 20 nt, Artificial Sequence
  Synthetic
gcguggccgggagagaagaa

SEQ ID NO: 12274 - RNA, 18 nt, Artificial Sequence
  Synthetic
guggcaggggugggagga

SEQ ID NO: 12275 - RNA, 19 nt, Artificial Sequence
  Synthetic
gguggcaggggugggagga

SEQ ID NO: 12276 - RNA, 20 nt, Artificial Sequence
  Synthetic
ggguggcaggggugggagga

SEQ ID NO: 12277 - RNA, 21 nt, Artificial Sequence
  Synthetic
gggguggcaggggugggagga

SEQ ID NO: 12278 - RNA, 22 nt, Artificial Sequence
  Synthetic
agggguggcaggggugggagga

SEQ ID NO: 12279 - RNA, 23 nt, Artificial Sequence
  Synthetic
aagggguggcaggggugggagga

SEQ ID NO: 12280 - RNA, 24 nt, Artificial Sequence
  Synthetic
aaagggguggcaggggugggagga

SEQ ID NO: 12281 - RNA, 18 nt, Artificial Sequence
  Synthetic
uaauuauuauuacuauua

SEQ ID NO: 12282 - RNA, 19 nt, Artificial Sequence
  Synthetic
auaauuauuauuacuauua

SEQ ID NO: 12283 - RNA, 20 nt, Artificial Sequence
  Synthetic
aauaauuauuauuacuauua

SEQ ID NO: 12284 - RNA, 21 nt, Artificial Sequence
  Synthetic
uaauaauuauuauuacuauua

SEQ ID NO: 12285 - RNA, 22 nt, Artificial Sequence
  Synthetic
uuaauaauuauuauuacuauua

SEQ ID NO: 12286 - RNA, 23 nt, Artificial Sequence
  Synthetic
auuaauaauuauuauuacuauua

SEQ ID NO: 12287 - RNA, 24 nt, Artificial Sequence
  Synthetic
uauuaauaauuauuauuacuauua

SEQ ID NO: 12288 - RNA, 18 nt, Artificial Sequence
  Synthetic
agagaagaaagggguggc

SEQ ID NO: 12289 - RNA, 19 nt, Artificial Sequence
  Synthetic
gagagaagaaagggguggc

SEQ ID NO: 12290 - RNA, 20 nt, Artificial Sequence
  Synthetic
ggagagaagaaagggguggc

SEQ ID NO: 12291 - RNA, 18 nt, Artificial Sequence
  Synthetic
aaagauggcgcagggaag

SEQ ID NO: 12292 - RNA, 19 nt, Artificial Sequence
  Synthetic
caaagauggcgcagggaag

SEQ ID NO: 12293 - RNA, 20 nt, Artificial Sequence
  Synthetic
acaaagauggcgcagggaag

SEQ ID NO: 12294 - RNA, 18 nt, Artificial Sequence
  Synthetic
cccagcacuuaagcaaac

SEQ ID NO: 12295 - RNA, 19 nt, Artificial Sequence
  Synthetic
ccccagcacuuaagcaaac

SEQ ID NO: 12296 - RNA, 20 nt, Artificial Sequence
  Synthetic
accccagcacuuaagcaaac

SEQ ID NO: 12297 - RNA, 18 nt, Artificial Sequence
  Synthetic
uucacgagaaaaaccucc

SEQ ID NO: 12298 - RNA, 19 nt, Artificial Sequence
  Synthetic
uuucacgagaaaaaccucc

SEQ ID NO: 12299 - RNA, 20 nt, Artificial Sequence
  Synthetic
uuuucacgagaaaaaccucc

SEQ ID NO: 12300 - RNA, 21 nt, Artificial Sequence
  Synthetic
uuuuucacgagaaaaaccucc

SEQ ID NO: 12301 - RNA, 22 nt, Artificial Sequence
  Synthetic
auuuuucacgagaaaaaccucc

SEQ ID NO: 12302 - RNA, 23 nt, Artificial Sequence
  Synthetic
aauuuuucacgagaaaaaccucc

SEQ ID NO: 12303 - RNA, 24 nt, Artificial Sequence
  Synthetic
aaauuuuucacgagaaaaaccucc

SEQ ID NO: 12304 - RNA, 18 nt, Artificial Sequence
  Synthetic
ugaugaagauauuuucuc

SEQ ID NO: 12305 - RNA, 19 nt, Artificial Sequence
  Synthetic
cugaugaagauauuuucuc

SEQ ID NO: 12306 - RNA, 20 nt, Artificial Sequence
  Synthetic
acugaugaagauauuuucuc

SEQ ID NO: 12307 - RNA, 21 nt, Artificial Sequence
  Synthetic
cacugaugaagauauuuucuc

SEQ ID NO: 12308 - RNA, 22 nt, Artificial Sequence
  Synthetic
gcacugaugaagauauuuucuc

SEQ ID NO: 12309 - RNA, 23 nt, Artificial Sequence
  Synthetic
ggcacugaugaagauauuuucuc

SEQ ID NO: 12310 - RNA, 24 nt, Artificial Sequence
  Synthetic
aggcacugaugaagauauuuucuc

SEQ ID NO: 12311 - RNA, 18 nt, Artificial Sequence
  Synthetic
caaaagcgagggggagag

SEQ ID NO: 12312 - RNA, 19 nt, Artificial Sequence
  Synthetic
gcaaaagcgagggggagag

SEQ ID NO: 12313 - RNA, 20 nt, Artificial Sequence
  Synthetic
agcaaaagcgagggggagag

SEQ ID NO: 12314 - RNA, 18 nt, Artificial Sequence
  Synthetic
uauuauuucuaauuuauu

SEQ ID NO: 12315 - RNA, 19 nt, Artificial Sequence
  Synthetic
guauuauuucuaauuuauu

SEQ ID NO: 12316 - RNA, 20 nt, Artificial Sequence
  Synthetic
uguauuauuucuaauuuauu

SEQ ID NO: 12317 - RNA, 21 nt, Artificial Sequence
  Synthetic
uuguauuauuucuaauuuauu

SEQ ID NO: 12318 - RNA, 22 nt, Artificial Sequence
  Synthetic
uuuguauuauuucuaauuuauu

SEQ ID NO: 12319 - RNA, 23 nt, Artificial Sequence
  Synthetic
cuuuguauuauuucuaauuuauu

SEQ ID NO: 12320 - RNA, 24 nt, Artificial Sequence
  Synthetic
ucuuuguauuauuucuaauuuauu

SEQ ID NO: 12321 - RNA, 18 nt, Artificial Sequence
  Synthetic
uugaauaaucuuucauuu

SEQ ID NO: 12322 - RNA, 19 nt, Artificial Sequence
  Synthetic
uuugaauaaucuuucauuu

SEQ ID NO: 12323 - RNA, 20 nt, Artificial Sequence
  Synthetic
uuuugaauaaucuuucauuu

SEQ ID NO: 12324 - RNA, 21 nt, Artificial Sequence
  Synthetic
uuuuugaauaaucuuucauuu

SEQ ID NO: 12325 - RNA, 22 nt, Artificial Sequence
  Synthetic
uuuuuugaauaaucuuucauuu

SEQ ID NO: 12326 - RNA, 23 nt, Artificial Sequence
  Synthetic
cuuuuuugaauaaucuuucauuu

SEQ ID NO: 12327 - RNA, 24 nt, Artificial Sequence
  Synthetic
ucuuuuuugaauaaucuuucauuu

SEQ ID NO: 12328 - RNA, 18 nt, Artificial Sequence
  Synthetic
aaaaaaaaaaaaaaaaaa

SEQ ID NO: 12329 - RNA, 19 nt, Artificial Sequence
  Synthetic
aaaaaaaaaaaaaaaaaaa

SEQ ID NO: 12330 - RNA, 20 nt, Artificial Sequence
  Synthetic
aaaaaaaaaaaaaaaaaaaa

SEQ ID NO: 12331 - RNA, 21 nt, Artificial Sequence
  Synthetic
aaaaaaaaaaaaaaaaaaaaa

SEQ ID NO: 12332 - RNA, 22 nt, Artificial Sequence
  Synthetic
aaaaaaaaaaaaaaaaaaaaaa

SEQ ID NO: 12333 - RNA, 23 nt, Artificial Sequence
  Synthetic
aaaaaaaaaaaaaaaaaaaaaaa

SEQ ID NO: 12334 - RNA, 24 nt, Artificial Sequence
  Synthetic
aaaaaaaaaaaaaaaaaaaaaaaa

SEQ ID NO: 12335 - RNA, 18 nt, Artificial Sequence
  Synthetic
caggggcuggacaugaaa

SEQ ID NO: 12336 - RNA, 19 nt, Artificial Sequence
  Synthetic
ucaggggcuggacaugaaa

SEQ ID NO: 12337 - RNA, 20 nt, Artificial Sequence
  Synthetic
aucaggggcuggacaugaaa

SEQ ID NO: 12338 - RNA, 21 nt, Artificial Sequence
  Synthetic
caucaggggcuggacaugaaa

SEQ ID NO: 12339 - RNA, 22 nt, Artificial Sequence
  Synthetic
acaucaggggcuggacaugaaa

SEQ ID NO: 12340 - RNA, 23 nt, Artificial Sequence
  Synthetic
cacaucaggggcuggacaugaaa

SEQ ID NO: 12341 - RNA, 24 nt, Artificial Sequence
  Synthetic
acacaucaggggcuggacaugaaa

SEQ ID NO: 12342 - RNA, 18 nt, Artificial Sequence
  Synthetic
acacacgcggacucuaaa

SEQ ID NO: 12343 - RNA, 19 nt, Artificial Sequence
  Synthetic
cacacacgcggacucuaaa

SEQ ID NO: 12344 - RNA, 20 nt, Artificial Sequence
  Synthetic
ccacacacgcggacucuaaa

SEQ ID NO: 12345 - RNA, 21 nt, Artificial Sequence
  Synthetic
cccacacacgcggacucuaaa

SEQ ID NO: 12346 - RNA, 22 nt, Artificial Sequence
  Synthetic
ccccacacacgcggacucuaaa

SEQ ID NO: 12347 - RNA, 23 nt, Artificial Sequence
  Synthetic
cccccacacacgcggacucuaaa

SEQ ID NO: 12348 - RNA, 24 nt, Artificial Sequence
  Synthetic
ccccccacacacgcggacucuaaa

SEQ ID NO: 12349 - RNA, 18 nt, Artificial Sequence
  Synthetic
agagggagagagagagaa

SEQ ID NO: 12350 - RNA, 19 nt, Artificial Sequence
  Synthetic
aagagggagagagagagaa

SEQ ID NO: 12351 - RNA, 20 nt, Artificial Sequence
  Synthetic
aaagagggagagagagagaa

SEQ ID NO: 12352 - RNA, 21 nt, Artificial Sequence
  Synthetic
aaaagagggagagagagagaa

SEQ ID NO: 12353 - RNA, 22 nt, Artificial Sequence
  Synthetic
aaaaagagggagagagagagaa

SEQ ID NO: 12354 - RNA, 23 nt, Artificial Sequence
  Synthetic
aaaaaagagggagagagagagaa

SEQ ID NO: 12355 - RNA, 24 nt, Artificial Sequence
  Synthetic
aaaaaaagagggagagagagagaa

SEQ ID NO: 12356 - RNA, 18 nt, Artificial Sequence
  Synthetic
agggcgagcaggagagaa

SEQ ID NO: 12357 - RNA, 19 nt, Artificial Sequence
  Synthetic
cagggcgagcaggagagaa

SEQ ID NO: 12358 - RNA, 20 nt, Artificial Sequence
  Synthetic
gcagggcgagcaggagagaa

SEQ ID NO: 12359 - RNA, 21 nt, Artificial Sequence
  Synthetic
ggcagggcgagcaggagagaa

SEQ ID NO: 12360 - RNA, 22 nt, Artificial Sequence
  Synthetic
gggcagggcgagcaggagagaa

SEQ ID NO: 12361 - RNA, 23 nt, Artificial Sequence
  Synthetic
ugggcagggcgagcaggagagaa

SEQ ID NO: 12362 - RNA, 24 nt, Artificial Sequence
  Synthetic
augggcagggcgagcaggagagaa

SEQ ID NO: 12363 - RNA, 18 nt, Artificial Sequence
  Synthetic
gagaaggggaggagggaa

SEQ ID NO: 12364 - RNA, 19 nt, Artificial Sequence
  Synthetic
agagaaggggaggagggaa

SEQ ID NO: 12365 - RNA, 20 nt, Artificial Sequence
  Synthetic
gagagaaggggaggagggaa

SEQ ID NO: 12366 - RNA, 21 nt, Artificial Sequence
  Synthetic
ggagagaaggggaggagggaa

SEQ ID NO: 12367 - RNA, 22 nt, Artificial Sequence
  Synthetic
aggagagaaggggaggagggaa

SEQ ID NO: 12368 - RNA, 23 nt, Artificial Sequence
  Synthetic
caggagagaaggggaggagggaa

SEQ ID NO: 12369 - RNA, 24 nt, Artificial Sequence
  Synthetic
gcaggagagaaggggaggagggaa

SEQ ID NO: 12370 - RNA, 18 nt, Artificial Sequence
  Synthetic
acgacggcucgguucaca

SEQ ID NO: 12371 - RNA, 19 nt, Artificial Sequence
  Synthetic
gacgacggcucgguucaca

SEQ ID NO: 12372 - RNA, 20 nt, Artificial Sequence
  Synthetic
ggacgacggcucgguucaca

SEQ ID NO: 12373 - RNA, 21 nt, Artificial Sequence
  Synthetic
cggacgacggcucgguucaca

SEQ ID NO: 12374 - RNA, 22 nt, Artificial Sequence
  Synthetic
gcggacgacggcucgguucaca

SEQ ID NO: 12375 - RNA, 23 nt, Artificial Sequence
  Synthetic
ggcggacgacggcucgguucaca

SEQ ID NO: 12376 - RNA, 24 nt, Artificial Sequence
  Synthetic
gggcggacgacggcucgguucaca

SEQ ID NO: 12377 - RNA, 18 nt, Artificial Sequence
  Synthetic
aaggggaagcucacacca

SEQ ID NO: 12378 - RNA, 19 nt, Artificial Sequence
  Synthetic
gaaggggaagcucacacca

SEQ ID NO: 12379 - RNA, 20 nt, Artificial Sequence
  Synthetic
ggaaggggaagcucacacca

SEQ ID NO: 12380 - RNA, 21 nt, Artificial Sequence
  Synthetic
gggaaggggaagcucacacca

SEQ ID NO: 12381 - RNA, 22 nt, Artificial Sequence
  Synthetic
agggaaggggaagcucacacca

SEQ ID NO: 12382 - RNA, 23 nt, Artificial Sequence
  Synthetic
gagggaaggggaagcucacacca

SEQ ID NO: 12383 - RNA, 24 nt, Artificial Sequence
  Synthetic
ggagggaaggggaagcucacacca

SEQ ID NO: 12384 - RNA, 18 nt, Artificial Sequence
  Synthetic
agaaagaaggagacucca

SEQ ID NO: 12385 - RNA, 19 nt, Artificial Sequence
  Synthetic
uagaaagaaggagacucca

SEQ ID NO: 12386 - RNA, 20 nt, Artificial Sequence
  Synthetic
uuagaaagaaggagacucca

SEQ ID NO: 12387 - RNA, 21 nt, Artificial Sequence
  Synthetic
guuagaaagaaggagacucca

SEQ ID NO: 12388 - RNA, 22 nt, Artificial Sequence
  Synthetic
gguuagaaagaaggagacucca

SEQ ID NO: 12389 - RNA, 23 nt, Artificial Sequence
  Synthetic
ggguuagaaagaaggagacucca

SEQ ID NO: 12390 - RNA, 24 nt, Artificial Sequence
  Synthetic
cggguuagaaagaaggagacucca

SEQ ID NO: 12391 - RNA, 18 nt, Artificial Sequence
  Synthetic
ggcucaccaguggccgca

SEQ ID NO: 12392 - RNA, 19 nt, Artificial Sequence
  Synthetic
gggcucaccaguggccgca

SEQ ID NO: 12393 - RNA, 20 nt, Artificial Sequence
  Synthetic
cgggcucaccaguggccgca

SEQ ID NO: 12394 - RNA, 21 nt, Artificial Sequence
  Synthetic
gcgggcucaccaguggccgca

SEQ ID NO: 12395 - RNA, 22 nt, Artificial Sequence
  Synthetic
cgcgggcucaccaguggccgca

SEQ ID NO: 12396 - RNA, 23 nt, Artificial Sequence
  Synthetic
ccgcgggcucaccaguggccgca

SEQ ID NO: 12397 - RNA, 24 nt, Artificial Sequence
  Synthetic
gccgcgggcucaccaguggccgca

SEQ ID NO: 12398 - RNA, 18 nt, Artificial Sequence
  Synthetic
uaauacaaagauggcgca

SEQ ID NO: 12399 - RNA, 19 nt, Artificial Sequence
  Synthetic
auaauacaaagauggcgca

SEQ ID NO: 12400 - RNA, 20 nt, Artificial Sequence
  Synthetic
aauaauacaaagauggcgca

SEQ ID NO: 12401 - RNA, 21 nt, Artificial Sequence
  Synthetic
aaauaauacaaagauggcgca

SEQ ID NO: 12402 - RNA, 22 nt, Artificial Sequence
  Synthetic
gaaauaauacaaagauggcgca

SEQ ID NO: 12403 - RNA, 23 nt, Artificial Sequence
  Synthetic
agaaauaauacaaagauggcgca

SEQ ID NO: 12404 - RNA, 24 nt, Artificial Sequence
  Synthetic
uagaaauaauacaaagauggcgca

SEQ ID NO: 12405 - RNA, 18 nt, Artificial Sequence
  Synthetic
aaaaaaaaaaaaaaaaga

SEQ ID NO: 12406 - RNA, 19 nt, Artificial Sequence
  Synthetic
aaaaaaaaaaaaaaaaaga

SEQ ID NO: 12407 - RNA, 20 nt, Artificial Sequence
  Synthetic
aaaaaaaaaaaaaaaaaaga

SEQ ID NO: 12408 - RNA, 21 nt, Artificial Sequence
  Synthetic
aaaaaaaaaaaaaaaaaaaga

SEQ ID NO: 12409 - RNA, 22 nt, Artificial Sequence
  Synthetic
aaaaaaaaaaaaaaaaaaaaga

SEQ ID NO: 12410 - RNA, 23 nt, Artificial Sequence
  Synthetic
aaaaaaaaaaaaaaaaaaaaaga

SEQ ID NO: 12411 - RNA, 24 nt, Artificial Sequence
  Synthetic
aaaaaaaaaaaaaaaaaaaaaaga

SEQ ID NO: 12412 - RNA, 18 nt, Artificial Sequence
  Synthetic
agagccggguuagaaaga

SEQ ID NO: 12413 - RNA, 19 nt, Artificial Sequence
  Synthetic
gagagccggguuagaaaga

SEQ ID NO: 12414 - RNA, 20 nt, Artificial Sequence
  Synthetic
ggagagccggguuagaaaga

SEQ ID NO: 12415 - RNA, 21 nt, Artificial Sequence
  Synthetic
gggagagccggguuagaaaga

SEQ ID NO: 12416 - RNA, 22 nt, Artificial Sequence
  Synthetic
cgggagagccggguuagaaaga

SEQ ID NO: 12417 - RNA, 23 nt, Artificial Sequence
  Synthetic
ucgggagagccggguuagaaaga

SEQ ID NO: 12418 - RNA, 24 nt, Artificial Sequence
  Synthetic
aucgggagagccggguuagaaaga

SEQ ID NO: 12419 - RNA, 18 nt, Artificial Sequence
  Synthetic
cguggccgggagagaaga

SEQ ID NO: 12420 - RNA, 19 nt, Artificial Sequence
  Synthetic
gcguggccgggagagaaga

SEQ ID NO: 12421 - RNA, 20 nt, Artificial Sequence
  Synthetic
ggcguggccgggagagaaga

SEQ ID NO: 12422 - RNA, 21 nt, Artificial Sequence
  Synthetic
uggcguggccgggagagaaga

SEQ ID NO: 12423 - RNA, 22 nt, Artificial Sequence
  Synthetic
guggcguggccgggagagaaga

SEQ ID NO: 12424 - RNA, 23 nt, Artificial Sequence
  Synthetic
gguggcguggccgggagagaaga

SEQ ID NO: 12425 - RNA, 24 nt, Artificial Sequence
  Synthetic
cgguggcguggccgggagagaaga

SEQ ID NO: 12426 - RNA, 18 nt, Artificial Sequence
  Synthetic
agagagagagaagagaga

SEQ ID NO: 12427 - RNA, 19 nt, Artificial Sequence
  Synthetic
gagagagagagaagagaga

SEQ ID NO: 12428 - RNA, 20 nt, Artificial Sequence
  Synthetic
ggagagagagagaagagaga

SEQ ID NO: 12429 - RNA, 21 nt, Artificial Sequence
  Synthetic
gggagagagagagaagagaga

SEQ ID NO: 12430 - RNA, 22 nt, Artificial Sequence
  Synthetic
agggagagagagagaagagaga

SEQ ID NO: 12431 - RNA, 23 nt, Artificial Sequence
  Synthetic
gagggagagagagagaagagaga

SEQ ID NO: 12432 - RNA, 24 nt, Artificial Sequence
  Synthetic
agagggagagagagagaagagaga

SEQ ID NO: 12433 - RNA, 18 nt, Artificial Sequence
  Synthetic
uagagggagagagagaga

SEQ ID NO: 12434 - RNA, 19 nt, Artificial Sequence
  Synthetic
auagagggagagagagaga

SEQ ID NO: 12435 - RNA, 20 nt, Artificial Sequence
  Synthetic
gauagagggagagagagaga

SEQ ID NO: 12436 - RNA, 21 nt, Artificial Sequence
  Synthetic
agauagagggagagagagaga

SEQ ID NO: 12437 - RNA, 22 nt, Artificial Sequence
  Synthetic
gagauagagggagagagagaga

SEQ ID NO: 12438 - RNA, 23 nt, Artificial Sequence
  Synthetic
agagauagagggagagagagaga

SEQ ID NO: 12439 - RNA, 24 nt, Artificial Sequence
  Synthetic
gagagauagagggagagagagaga

SEQ ID NO: 12440 - RNA, 18 nt, Artificial Sequence
  Synthetic
gauagagggagagagaga

SEQ ID NO: 12441 - RNA, 19 nt, Artificial Sequence
  Synthetic
agauagagggagagagaga

SEQ ID NO: 12442 - RNA, 20 nt, Artificial Sequence
  Synthetic
gagauagagggagagagaga

SEQ ID NO: 12443 - RNA, 21 nt, Artificial Sequence
  Synthetic
agagauagagggagagagaga

SEQ ID NO: 12444 - RNA, 22 nt, Artificial Sequence
  Synthetic
gagagauagagggagagagaga

SEQ ID NO: 12445 - RNA, 23 nt, Artificial Sequence
  Synthetic
agagagauagagggagagagaga

SEQ ID NO: 12446 - RNA, 24 nt, Artificial Sequence
  Synthetic
aagagagauagagggagagagaga

SEQ ID NO: 12447 - RNA, 18 nt, Artificial Sequence
  Synthetic
aaaaaagagggagagaga

SEQ ID NO: 12448 - RNA, 19 nt, Artificial Sequence
  Synthetic
aaaaaaagagggagagaga

SEQ ID NO: 12449 - RNA, 20 nt, Artificial Sequence
  Synthetic
aaaaaaaagagggagagaga

SEQ ID NO: 12450 - RNA, 21 nt, Artificial Sequence
  Synthetic
aaaaaaaaagagggagagaga

SEQ ID NO: 12451 - RNA, 22 nt, Artificial Sequence
  Synthetic
aaaaaaaaaagagggagagaga

SEQ ID NO: 12452 - RNA, 23 nt, Artificial Sequence
  Synthetic
aaaaaaaaaaagagggagagaga

SEQ ID NO: 12453 - RNA, 24 nt, Artificial Sequence
  Synthetic
aaaaaaaaaaaagagggagagaga

SEQ ID NO: 12454 - RNA, 18 nt, Artificial Sequence
  Synthetic
gagauagagggagagaga

SEQ ID NO: 12455 - RNA, 19 nt, Artificial Sequence
  Synthetic
agagauagagggagagaga

SEQ ID NO: 12456 - RNA, 20 nt, Artificial Sequence
  Synthetic
gagagauagagggagagaga

SEQ ID NO: 12457 - RNA, 21 nt, Artificial Sequence
  Synthetic
agagagauagagggagagaga

SEQ ID NO: 12458 - RNA, 22 nt, Artificial Sequence
  Synthetic
aagagagauagagggagagaga

SEQ ID NO: 12459 - RNA, 23 nt, Artificial Sequence
  Synthetic
gaagagagauagagggagagaga

SEQ ID NO: 12460 - RNA, 24 nt, Artificial Sequence
  Synthetic
agaagagagauagagggagagaga

SEQ ID NO: 12461 - RNA, 18 nt, Artificial Sequence
  Synthetic
cagggcgagcaggagaga

SEQ ID NO: 12462 - RNA, 19 nt, Artificial Sequence
  Synthetic
gcagggcgagcaggagaga

SEQ ID NO: 12463 - RNA, 20 nt, Artificial Sequence
  Synthetic
ggcagggcgagcaggagaga

SEQ ID NO: 12464 - RNA, 21 nt, Artificial Sequence
  Synthetic
gggcagggcgagcaggagaga

SEQ ID NO: 12465 - RNA, 22 nt, Artificial Sequence
  Synthetic
ugggcagggcgagcaggagaga

SEQ ID NO: 12466 - RNA, 23 nt, Artificial Sequence
  Synthetic
augggcagggcgagcaggagaga

SEQ ID NO: 12467 - RNA, 24 nt, Artificial Sequence
  Synthetic
caugggcagggcgagcaggagaga

SEQ ID NO: 12468 - RNA, 18 nt, Artificial Sequence
  Synthetic
aaaaaaaagagggagaga

SEQ ID NO: 12469 - RNA, 19 nt, Artificial Sequence
  Synthetic
aaaaaaaaagagggagaga

SEQ ID NO: 12470 - RNA, 20 nt, Artificial Sequence
  Synthetic
aaaaaaaaaagagggagaga

SEQ ID NO: 12471 - RNA, 21 nt, Artificial Sequence
  Synthetic
aaaaaaaaaaagagggagaga

SEQ ID NO: 12472 - RNA, 22 nt, Artificial Sequence
  Synthetic
aaaaaaaaaaaagagggagaga

SEQ ID NO: 12473 - RNA, 23 nt, Artificial Sequence
  Synthetic
aaaaaaaaaaaaagagggagaga

SEQ ID NO: 12474 - RNA, 24 nt, Artificial Sequence
  Synthetic
aaaaaaaaaaaaaagagggagaga

SEQ ID NO: 12475 - RNA, 18 nt, Artificial Sequence
  Synthetic
gagagauagagggagaga

SEQ ID NO: 12476 - RNA, 19 nt, Artificial Sequence
  Synthetic
agagagauagagggagaga

SEQ ID NO: 12477 - RNA, 20 nt, Artificial Sequence
  Synthetic
aagagagauagagggagaga

SEQ ID NO: 12478 - RNA, 21 nt, Artificial Sequence
  Synthetic
gaagagagauagagggagaga

SEQ ID NO: 12479 - RNA, 22 nt, Artificial Sequence
  Synthetic
agaagagagauagagggagaga

SEQ ID NO: 12480 - RNA, 23 nt, Artificial Sequence
  Synthetic
gagaagagagauagagggagaga

SEQ ID NO: 12481 - RNA, 24 nt, Artificial Sequence
  Synthetic
agagaagagagauagagggagaga

SEQ ID NO: 12482 - RNA, 18 nt, Artificial Sequence
  Synthetic
aaaaaaaaaagagggaga

SEQ ID NO: 12483 - RNA, 19 nt, Artificial Sequence
  Synthetic
aaaaaaaaaaagagggaga

SEQ ID NO: 12484 - RNA, 20 nt, Artificial Sequence
  Synthetic
aaaaaaaaaaaagagggaga

SEQ ID NO: 12485 - RNA, 21 nt, Artificial Sequence
  Synthetic
aaaaaaaaaaaaagagggaga

SEQ ID NO: 12486 - RNA, 22 nt, Artificial Sequence
  Synthetic
aaaaaaaaaaaaaagagggaga

SEQ ID NO: 12487 - RNA, 23 nt, Artificial Sequence
  Synthetic
aaaaaaaaaaaaaaagagggaga

SEQ ID NO: 12488 - RNA, 24 nt, Artificial Sequence
  Synthetic
aaaaaaaaaaaaaaaagagggaga

SEQ ID NO: 12489 - RNA, 18 nt, Artificial Sequence
  Synthetic
aagagagauagagggaga

SEQ ID NO: 12490 - RNA, 19 nt, Artificial Sequence
  Synthetic
gaagagagauagagggaga

SEQ ID NO: 12491 - RNA, 20 nt, Artificial Sequence
  Synthetic
agaagagagauagagggaga

SEQ ID NO: 12492 - RNA, 21 nt, Artificial Sequence
  Synthetic
gagaagagagauagagggaga

SEQ ID NO: 12493 - RNA, 22 nt, Artificial Sequence
  Synthetic
agagaagagagauagagggaga

SEQ ID NO: 12494 - RNA, 23 nt, Artificial Sequence
  Synthetic
gagagaagagagauagagggaga

SEQ ID NO: 12495 - RNA, 24 nt, Artificial Sequence
  Synthetic
agagagaagagagauagagggaga

SEQ ID NO: 12496 - RNA, 18 nt, Artificial Sequence
  Synthetic
agagagaagagagauaga

SEQ ID NO: 12497 - RNA, 19 nt, Artificial Sequence
  Synthetic
gagagagaagagagauaga

SEQ ID NO: 12498 - RNA, 20 nt, Artificial Sequence
  Synthetic
agagagagaagagagauaga

SEQ ID NO: 12499 - RNA, 21 nt, Artificial Sequence
  Synthetic
gagagagagaagagagauaga

SEQ ID NO: 12500 - RNA, 22 nt, Artificial Sequence
  Synthetic
agagagagagaagagagauaga

SEQ ID NO: 12501 - RNA, 23 nt, Artificial Sequence
  Synthetic
gagagagagagaagagagauaga

SEQ ID NO: 12502 - RNA, 24 nt, Artificial Sequence
  Synthetic
ggagagagagagaagagagauaga

SEQ ID NO: 12503 - RNA, 18 nt, Artificial Sequence
  Synthetic
cgggagagccggguuaga

SEQ ID NO: 12504 - RNA, 19 nt, Artificial Sequence
  Synthetic
ucgggagagccggguuaga

SEQ ID NO: 12505 - RNA, 20 nt, Artificial Sequence
  Synthetic
aucgggagagccggguuaga

SEQ ID NO: 12506 - RNA, 21 nt, Artificial Sequence
  Synthetic
caucgggagagccggguuaga

SEQ ID NO: 12507 - RNA, 22 nt, Artificial Sequence
  Synthetic
acaucgggagagccggguuaga

SEQ ID NO: 12508 - RNA, 23 nt, Artificial Sequence
  Synthetic
cacaucgggagagccggguuaga

SEQ ID NO: 12509 - RNA, 24 nt, Artificial Sequence
  Synthetic
ucacaucgggagagccggguuaga

SEQ ID NO: 12510 - RNA, 18 nt, Artificial Sequence
  Synthetic
gggggaggggcgggccga

SEQ ID NO: 12511 - RNA, 19 nt, Artificial Sequence
  Synthetic
cgggggaggggcgggccga

SEQ ID NO: 12512 - RNA, 20 nt, Artificial Sequence
  Synthetic
ccgggggaggggcgggccga

SEQ ID NO: 12513 - RNA, 21 nt, Artificial Sequence
  Synthetic
cccgggggaggggcgggccga

SEQ ID NO: 12514 - RNA, 22 nt, Artificial Sequence
  Synthetic
ccccgggggaggggcgggccga

SEQ ID NO: 12515 - RNA, 23 nt, Artificial Sequence
  Synthetic
cccccgggggaggggcgggccga

SEQ ID NO: 12516 - RNA, 24 nt, Artificial Sequence
  Synthetic
gcccccgggggaggggcgggccga

SEQ ID NO: 12517 - RNA, 18 nt, Artificial Sequence
  Synthetic
ugggcagggcgagcagga

SEQ ID NO: 12518 - RNA, 19 nt, Artificial Sequence
  Synthetic
augggcagggcgagcagga

SEQ ID NO: 12519 - RNA, 20 nt, Artificial Sequence
  Synthetic
caugggcagggcgagcagga

SEQ ID NO: 12520 - RNA, 21 nt, Artificial Sequence
  Synthetic
acaugggcagggcgagcagga

SEQ ID NO: 12521 - RNA, 22 nt, Artificial Sequence
  Synthetic
aacaugggcagggcgagcagga

SEQ ID NO: 12522 - RNA, 23 nt, Artificial Sequence
  Synthetic
aaacaugggcagggcgagcagga

SEQ ID NO: 12523 - RNA, 24 nt, Artificial Sequence
  Synthetic
aaaacaugggcagggcgagcagga

SEQ ID NO: 12524 - RNA, 18 nt, Artificial Sequence
  Synthetic
caggagagaaggggagga

SEQ ID NO: 12525 - RNA, 19 nt, Artificial Sequence
  Synthetic
gcaggagagaaggggagga

SEQ ID NO: 12526 - RNA, 20 nt, Artificial Sequence
  Synthetic
agcaggagagaaggggagga

SEQ ID NO: 12527 - RNA, 21 nt, Artificial Sequence
  Synthetic
gagcaggagagaaggggagga

SEQ ID NO: 12528 - RNA, 22 nt, Artificial Sequence
  Synthetic
cgagcaggagagaaggggagga

SEQ ID NO: 12529 - RNA, 23 nt, Artificial Sequence
  Synthetic
gcgagcaggagagaaggggagga

SEQ ID NO: 12530 - RNA, 24 nt, Artificial Sequence
  Synthetic
ggcgagcaggagagaaggggagga

SEQ ID NO: 12531 - RNA, 18 nt, Artificial Sequence
  Synthetic
aaaaaaaaaaaagaggga

SEQ ID NO: 12532 - RNA, 19 nt, Artificial Sequence
  Synthetic
aaaaaaaaaaaaagaggga

SEQ ID NO: 12533 - RNA, 20 nt, Artificial Sequence
  Synthetic
aaaaaaaaaaaaaagaggga

SEQ ID NO: 12534 - RNA, 21 nt, Artificial Sequence
  Synthetic
aaaaaaaaaaaaaaagaggga

SEQ ID NO: 12535 - RNA, 22 nt, Artificial Sequence
  Synthetic
aaaaaaaaaaaaaaaagaggga

SEQ ID NO: 12536 - RNA, 23 nt, Artificial Sequence
  Synthetic
aaaaaaaaaaaaaaaaagaggga

SEQ ID NO: 12537 - RNA, 24 nt, Artificial Sequence
  Synthetic
aaaaaaaaaaaaaaaaaagaggga

SEQ ID NO: 12538 - RNA, 18 nt, Artificial Sequence
  Synthetic
agaagagagauagaggga

SEQ ID NO: 12539 - RNA, 19 nt, Artificial Sequence
  Synthetic
gagaagagagauagaggga

SEQ ID NO: 12540 - RNA, 20 nt, Artificial Sequence
  Synthetic
agagaagagagauagaggga

SEQ ID NO: 12541 - RNA, 21 nt, Artificial Sequence
  Synthetic
gagagaagagagauagaggga

SEQ ID NO: 12542 - RNA, 22 nt, Artificial Sequence
  Synthetic
agagagaagagagauagaggga

SEQ ID NO: 12543 - RNA, 23 nt, Artificial Sequence
  Synthetic
gagagagaagagagauagaggga

SEQ ID NO: 12544 - RNA, 24 nt, Artificial Sequence
  Synthetic
agagagagaagagagauagaggga

SEQ ID NO: 12545 - RNA, 18 nt, Artificial Sequence
  Synthetic
agagaaggggaggaggga

SEQ ID NO: 12546 - RNA, 19 nt, Artificial Sequence
  Synthetic
gagagaaggggaggaggga

SEQ ID NO: 12547 - RNA, 20 nt, Artificial Sequence
  Synthetic
ggagagaaggggaggaggga

SEQ ID NO: 12548 - RNA, 21 nt, Artificial Sequence
  Synthetic
aggagagaaggggaggaggga

SEQ ID NO: 12549 - RNA, 22 nt, Artificial Sequence
  Synthetic
caggagagaaggggaggaggga

SEQ ID NO: 12550 - RNA, 23 nt, Artificial Sequence
  Synthetic
gcaggagagaaggggaggaggga

SEQ ID NO: 12551 - RNA, 24 nt, Artificial Sequence
  Synthetic
agcaggagagaaggggaggaggga

SEQ ID NO: 12552 - RNA, 18 nt, Artificial Sequence
  Synthetic
gcgguggcguggccggga

SEQ ID NO: 12553 - RNA, 19 nt, Artificial Sequence
  Synthetic
ggcgguggcguggccggga

SEQ ID NO: 12554 - RNA, 20 nt, Artificial Sequence
  Synthetic
cggcgguggcguggccggga

SEQ ID NO: 12555 - RNA, 21 nt, Artificial Sequence
  Synthetic
gcggcgguggcguggccggga

SEQ ID NO: 12556 - RNA, 22 nt, Artificial Sequence
  Synthetic
cgcggcgguggcguggccggga

SEQ ID NO: 12557 - RNA, 23 nt, Artificial Sequence
  Synthetic
ccgcggcgguggcguggccggga

SEQ ID NO: 12558 - RNA, 24 nt, Artificial Sequence
  Synthetic
gccgcggcgguggcguggccggga

SEQ ID NO: 12559 - RNA, 18 nt, Artificial Sequence
  Synthetic
aggggcgggccgagggga

SEQ ID NO: 12560 - RNA, 19 nt, Artificial Sequence
  Synthetic
gaggggcgggccgagggga

SEQ ID NO: 12561 - RNA, 20 nt, Artificial Sequence
  Synthetic
ggaggggcgggccgagggga

SEQ ID NO: 12562 - RNA, 21 nt, Artificial Sequence
  Synthetic
gggaggggcgggccgagggga

SEQ ID NO: 12563 - RNA, 22 nt, Artificial Sequence
  Synthetic
ggggaggggcgggccgagggga

SEQ ID NO: 12564 - RNA, 23 nt, Artificial Sequence
  Synthetic
gggggaggggcgggccgagggga

SEQ ID NO: 12565 - RNA, 24 nt, Artificial Sequence
  Synthetic
cgggggaggggcgggccgagggga

SEQ ID NO: 12566 - RNA, 18 nt, Artificial Sequence
  Synthetic
caauggccagugcgggga

SEQ ID NO: 12567 - RNA, 19 nt, Artificial Sequence
  Synthetic
ccaauggccagugcgggga

SEQ ID NO: 12568 - RNA, 20 nt, Artificial Sequence
  Synthetic
gccaauggccagugcgggga

SEQ ID NO: 12569 - RNA, 21 nt, Artificial Sequence
  Synthetic
agccaauggccagugcgggga

SEQ ID NO: 12570 - RNA, 22 nt, Artificial Sequence
  Synthetic
aagccaauggccagugcgggga

SEQ ID NO: 12571 - RNA, 23 nt, Artificial Sequence
  Synthetic
caagccaauggccagugcgggga

SEQ ID NO: 12572 - RNA, 24 nt, Artificial Sequence
  Synthetic
acaagccaauggccagugcgggga

SEQ ID NO: 12573 - RNA, 18 nt, Artificial Sequence
  Synthetic
gucaggagucuggaugga

SEQ ID NO: 12574 - RNA, 19 nt, Artificial Sequence
  Synthetic
cgucaggagucuggaugga

SEQ ID NO: 12575 - RNA, 20 nt, Artificial Sequence
  Synthetic
acgucaggagucuggaugga

SEQ ID NO: 12576 - RNA, 21 nt, Artificial Sequence
  Synthetic
aacgucaggagucuggaugga

SEQ ID NO: 12577 - RNA, 22 nt, Artificial Sequence
  Synthetic
gaacgucaggagucuggaugga

SEQ ID NO: 12578 - RNA, 23 nt, Artificial Sequence
  Synthetic
ugaacgucaggagucuggaugga

SEQ ID NO: 12579 - RNA, 24 nt, Artificial Sequence
  Synthetic
uugaacgucaggagucuggaugga

SEQ ID NO: 12580 - RNA, 18 nt, Artificial Sequence
  Synthetic
agagagagaagagagaua

SEQ ID NO: 12581 - RNA, 19 nt, Artificial Sequence
  Synthetic
gagagagagaagagagaua

SEQ ID NO: 12582 - RNA, 20 nt, Artificial Sequence
  Synthetic
agagagagagaagagagaua

SEQ ID NO: 12583 - RNA, 21 nt, Artificial Sequence
  Synthetic
gagagagagagaagagagaua

SEQ ID NO: 12584 - RNA, 22 nt, Artificial Sequence
  Synthetic
ggagagagagagaagagagaua

SEQ ID NO: 12585 - RNA, 23 nt, Artificial Sequence
  Synthetic
gggagagagagagaagagagaua

SEQ ID NO: 12586 - RNA, 24 nt, Artificial Sequence
  Synthetic
agggagagagagagaagagagaua

SEQ ID NO: 12587 - RNA, 18 nt, Artificial Sequence
  Synthetic
gacagagacacacaaaac

SEQ ID NO: 12588 - RNA, 19 nt, Artificial Sequence
  Synthetic
ggacagagacacacaaaac

SEQ ID NO: 12589 - RNA, 20 nt, Artificial Sequence
  Synthetic
uggacagagacacacaaaac

SEQ ID NO: 12590 - RNA, 21 nt, Artificial Sequence
  Synthetic
auggacagagacacacaaaac

SEQ ID NO: 12591 - RNA, 22 nt, Artificial Sequence
  Synthetic
gauggacagagacacacaaaac

SEQ ID NO: 12592 - RNA, 23 nt, Artificial Sequence
  Synthetic
ggauggacagagacacacaaaac

SEQ ID NO: 12593 - RNA, 24 nt, Artificial Sequence
  Synthetic
uggauggacagagacacacaaaac

SEQ ID NO: 12594 - RNA, 18 nt, Artificial Sequence
  Synthetic
cgugacgucccugcgaac

SEQ ID NO: 12595 - RNA, 19 nt, Artificial Sequence
  Synthetic
acgugacgucccugcgaac

SEQ ID NO: 12596 - RNA, 20 nt, Artificial Sequence
  Synthetic
gacgugacgucccugcgaac

SEQ ID NO: 12597 - RNA, 21 nt, Artificial Sequence
  Synthetic
ggacgugacgucccugcgaac

SEQ ID NO: 12598 - RNA, 22 nt, Artificial Sequence
  Synthetic
cggacgugacgucccugcgaac

SEQ ID NO: 12599 - RNA, 23 nt, Artificial Sequence
  Synthetic
gcggacgugacgucccugcgaac

SEQ ID NO: 12600 - RNA, 24 nt, Artificial Sequence
  Synthetic
ugcggacgugacgucccugcgaac

SEQ ID NO: 12601 - RNA, 18 nt, Artificial Sequence
  Synthetic
cugcucccccccacacac

SEQ ID NO: 12602 - RNA, 19 nt, Artificial Sequence
  Synthetic
ccugcucccccccacacac

SEQ ID NO: 12603 - RNA, 20 nt, Artificial Sequence
  Synthetic
cccugcucccccccacacac

SEQ ID NO: 12604 - RNA, 21 nt, Artificial Sequence
  Synthetic
gcccugcucccccccacacac

SEQ ID NO: 12605 - RNA, 22 nt, Artificial Sequence
  Synthetic
cgcccugcucccccccacacac

SEQ ID NO: 12606 - RNA, 23 nt, Artificial Sequence
  Synthetic
gcgcccugcucccccccacacac

SEQ ID NO: 12607 - RNA, 24 nt, Artificial Sequence
  Synthetic
ugcgcccugcucccccccacacac

SEQ ID NO: 12608 - RNA, 18 nt, Artificial Sequence
  Synthetic
uggacaugaaaaagagac

SEQ ID NO: 12609 - RNA, 19 nt, Artificial Sequence
  Synthetic
cuggacaugaaaaagagac

SEQ ID NO: 12610 - RNA, 20 nt, Artificial Sequence
  Synthetic
gcuggacaugaaaaagagac

SEQ ID NO: 12611 - RNA, 21 nt, Artificial Sequence
  Synthetic
ggcuggacaugaaaaagagac

SEQ ID NO: 12612 - RNA, 22 nt, Artificial Sequence
  Synthetic
gggcuggacaugaaaaagagac

SEQ ID NO: 12613 - RNA, 23 nt, Artificial Sequence
  Synthetic
ggggcuggacaugaaaaagagac

SEQ ID NO: 12614 - RNA, 24 nt, Artificial Sequence
  Synthetic
aggggcuggacaugaaaaagagac

SEQ ID NO: 12615 - RNA, 18 nt, Artificial Sequence
  Synthetic
acacaucaggggcuggac

SEQ ID NO: 12616 - RNA, 19 nt, Artificial Sequence
  Synthetic
cacacaucaggggcuggac

SEQ ID NO: 12617 - RNA, 20 nt, Artificial Sequence
  Synthetic
acacacaucaggggcuggac

SEQ ID NO: 12618 - RNA, 21 nt, Artificial Sequence
  Synthetic
gacacacaucaggggcuggac

SEQ ID NO: 12619 - RNA, 22 nt, Artificial Sequence
  Synthetic
ggacacacaucaggggcuggac

SEQ ID NO: 12620 - RNA, 23 nt, Artificial Sequence
  Synthetic
uggacacacaucaggggcuggac

SEQ ID NO: 12621 - RNA, 24 nt, Artificial Sequence
  Synthetic
auggacacacaucaggggcuggac

SEQ ID NO: 12622 - RNA, 18 nt, Artificial Sequence
  Synthetic
uauuauuggguuacuuac

SEQ ID NO: 12623 - RNA, 19 nt, Artificial Sequence
  Synthetic
cuauuauuggguuacuuac

SEQ ID NO: 12624 - RNA, 20 nt, Artificial Sequence
  Synthetic
acuauuauuggguuacuuac

SEQ ID NO: 12625 - RNA, 21 nt, Artificial Sequence
  Synthetic
uacuauuauuggguuacuuac

SEQ ID NO: 12626 - RNA, 22 nt, Artificial Sequence
  Synthetic
uuacuauuauuggguuacuuac

SEQ ID NO: 12627 - RNA, 23 nt, Artificial Sequence
  Synthetic
auuacuauuauuggguuacuuac

SEQ ID NO: 12628 - RNA, 24 nt, Artificial Sequence
  Synthetic
uauuacuauuauuggguuacuuac

SEQ ID NO: 12629 - RNA, 18 nt, Artificial Sequence
  Synthetic
aaaauggcaaaagccccc

SEQ ID NO: 12630 - RNA, 19 nt, Artificial Sequence
  Synthetic
aaaaauggcaaaagccccc

SEQ ID NO: 12631 - RNA, 20 nt, Artificial Sequence
  Synthetic
aaaaaauggcaaaagccccc

SEQ ID NO: 12632 - RNA, 21 nt, Artificial Sequence
  Synthetic
aaaaaaauggcaaaagccccc

SEQ ID NO: 12633 - RNA, 22 nt, Artificial Sequence
  Synthetic
gaaaaaaauggcaaaagccccc

SEQ ID NO: 12634 - RNA, 23 nt, Artificial Sequence
  Synthetic
ugaaaaaaauggcaaaagccccc

SEQ ID NO: 12635 - RNA, 24 nt, Artificial Sequence
  Synthetic
augaaaaaaauggcaaaagccccc

SEQ ID NO: 12636 - RNA, 18 nt, Artificial Sequence
  Synthetic
acgccagacgcggccccc

SEQ ID NO: 12637 - RNA, 19 nt, Artificial Sequence
  Synthetic
gacgccagacgcggccccc

SEQ ID NO: 12638 - RNA, 20 nt, Artificial Sequence
  Synthetic
ggacgccagacgcggccccc

SEQ ID NO: 12639 - RNA, 21 nt, Artificial Sequence
  Synthetic
cggacgccagacgcggccccc

SEQ ID NO: 12640 - RNA, 22 nt, Artificial Sequence
  Synthetic
gcggacgccagacgcggccccc

SEQ ID NO: 12641 - RNA, 23 nt, Artificial Sequence
  Synthetic
cgcggacgccagacgcggccccc

SEQ ID NO: 12642 - RNA, 24 nt, Artificial Sequence
  Synthetic
ccgcggacgccagacgcggccccc

SEQ ID NO: 12643 - RNA, 18 nt, Artificial Sequence
  Synthetic
gacgccagacgcggcccc

SEQ ID NO: 12644 - RNA, 19 nt, Artificial Sequence
  Synthetic
ggacgccagacgcggcccc

SEQ ID NO: 12645 - RNA, 20 nt, Artificial Sequence
  Synthetic
cggacgccagacgcggcccc

SEQ ID NO: 12646 - RNA, 21 nt, Artificial Sequence
  Synthetic
gcggacgccagacgcggcccc

SEQ ID NO: 12647 - RNA, 22 nt, Artificial Sequence
  Synthetic
cgcggacgccagacgcggcccc

SEQ ID NO: 12648 - RNA, 23 nt, Artificial Sequence
  Synthetic
ccgcggacgccagacgcggcccc

SEQ ID NO: 12649 - RNA, 24 nt, Artificial Sequence
  Synthetic
uccgcggacgccagacgcggcccc

SEQ ID NO: 12650 - RNA, 18 nt, Artificial Sequence
  Synthetic
ggacgccagacgcggccc

SEQ ID NO: 12651 - RNA, 19 nt, Artificial Sequence
  Synthetic
cggacgccagacgcggccc

SEQ ID NO: 12652 - RNA, 20 nt, Artificial Sequence
  Synthetic
gcggacgccagacgcggccc

SEQ ID NO: 12653 - RNA, 21 nt, Artificial Sequence
  Synthetic
cgcggacgccagacgcggccc

SEQ ID NO: 12654 - RNA, 22 nt, Artificial Sequence
  Synthetic
ccgcggacgccagacgcggccc

SEQ ID NO: 12655 - RNA, 23 nt, Artificial Sequence
  Synthetic
uccgcggacgccagacgcggccc

SEQ ID NO: 12656 - RNA, 24 nt, Artificial Sequence
  Synthetic
cuccgcggacgccagacgcggccc

SEQ ID NO: 12657 - RNA, 18 nt, Artificial Sequence
  Synthetic
ccgggggaggggcgggcc

SEQ ID NO: 12658 - RNA, 19 nt, Artificial Sequence
  Synthetic
cccgggggaggggcgggcc

SEQ ID NO: 12659 - RNA, 20 nt, Artificial Sequence
  Synthetic
ccccgggggaggggcgggcc

SEQ ID NO: 12660 - RNA, 21 nt, Artificial Sequence
  Synthetic
cccccgggggaggggcgggcc

SEQ ID NO: 12661 - RNA, 22 nt, Artificial Sequence
  Synthetic
gcccccgggggaggggcgggcc

SEQ ID NO: 12662 - RNA, 23 nt, Artificial Sequence
  Synthetic
ggcccccgggggaggggcgggcc

SEQ ID NO: 12663 - RNA, 24 nt, Artificial Sequence
  Synthetic
cggcccccgggggaggggcgggcc

SEQ ID NO: 12664 - RNA, 18 nt, Artificial Sequence
  Synthetic
ggagggggcgcuggggcc

SEQ ID NO: 12665 - RNA, 19 nt, Artificial Sequence
  Synthetic
gggagggggcgcuggggcc

SEQ ID NO: 12666 - RNA, 20 nt, Artificial Sequence
  Synthetic
ggggagggggcgcuggggcc

SEQ ID NO: 12667 - RNA, 21 nt, Artificial Sequence
  Synthetic
aggggagggggcgcuggggcc

SEQ ID NO: 12668 - RNA, 22 nt, Artificial Sequence
  Synthetic
gaggggagggggcgcuggggcc

SEQ ID NO: 12669 - RNA, 23 nt, Artificial Sequence
  Synthetic
cgaggggagggggcgcuggggcc

SEQ ID NO: 12670 - RNA, 24 nt, Artificial Sequence
  Synthetic
ccgaggggagggggcgcuggggcc

SEQ ID NO: 12671 - RNA, 18 nt, Artificial Sequence
  Synthetic
cgcggcgguggcguggcc

SEQ ID NO: 12672 - RNA, 19 nt, Artificial Sequence
  Synthetic
ccgcggcgguggcguggcc

SEQ ID NO: 12673 - RNA, 20 nt, Artificial Sequence
  Synthetic
gccgcggcgguggcguggcc

SEQ ID NO: 12674 - RNA, 21 nt, Artificial Sequence
  Synthetic
cgccgcggcgguggcguggcc

SEQ ID NO: 12675 - RNA, 22 nt, Artificial Sequence
  Synthetic
gcgccgcggcgguggcguggcc

SEQ ID NO: 12676 - RNA, 23 nt, Artificial Sequence
  Synthetic
agcgccgcggcgguggcguggcc

SEQ ID NO: 12677 - RNA, 24 nt, Artificial Sequence
  Synthetic
gagcgccgcggcgguggcguggcc

SEQ ID NO: 12678 - RNA, 18 nt, Artificial Sequence
  Synthetic
ugcggggcggggggcucc

SEQ ID NO: 12679 - RNA, 19 nt, Artificial Sequence
  Synthetic
gugcggggcggggggcucc

SEQ ID NO: 12680 - RNA, 20 nt, Artificial Sequence
  Synthetic
ggugcggggcggggggcucc

SEQ ID NO: 12681 - RNA, 21 nt, Artificial Sequence
  Synthetic
aggugcggggcggggggcucc

SEQ ID NO: 12682 - RNA, 22 nt, Artificial Sequence
  Synthetic
gaggugcggggcggggggcucc

SEQ ID NO: 12683 - RNA, 23 nt, Artificial Sequence
  Synthetic
ggaggugcggggcggggggcucc

SEQ ID NO: 12684 - RNA, 24 nt, Artificial Sequence
  Synthetic
gggaggugcggggcggggggcucc

SEQ ID NO: 12685 - RNA, 18 nt, Artificial Sequence
  Synthetic
aacaugggcagggcgagc

SEQ ID NO: 12686 - RNA, 19 nt, Artificial Sequence
  Synthetic
aaacaugggcagggcgagc

SEQ ID NO: 12687 - RNA, 20 nt, Artificial Sequence
  Synthetic
aaaacaugggcagggcgagc

SEQ ID NO: 12688 - RNA, 21 nt, Artificial Sequence
  Synthetic
caaaacaugggcagggcgagc

SEQ ID NO: 12689 - RNA, 22 nt, Artificial Sequence
  Synthetic
acaaaacaugggcagggcgagc

SEQ ID NO: 12690 - RNA, 23 nt, Artificial Sequence
  Synthetic
cacaaaacaugggcagggcgagc

SEQ ID NO: 12691 - RNA, 24 nt, Artificial Sequence
  Synthetic
acacaaaacaugggcagggcgagc

SEQ ID NO: 12692 - RNA, 18 nt, Artificial Sequence
  Synthetic
gccgaggggagggggcgc

SEQ ID NO: 12693 - RNA, 19 nt, Artificial Sequence
  Synthetic
ggccgaggggagggggcgc

SEQ ID NO: 12694 - RNA, 20 nt, Artificial Sequence
  Synthetic
gggccgaggggagggggcgc

SEQ ID NO: 12695 - RNA, 21 nt, Artificial Sequence
  Synthetic
cgggccgaggggagggggcgc

SEQ ID NO: 12696 - RNA, 22 nt, Artificial Sequence
  Synthetic
gcgggccgaggggagggggcgc

SEQ ID NO: 12697 - RNA, 23 nt, Artificial Sequence
  Synthetic
ggcgggccgaggggagggggcgc

SEQ ID NO: 12698 - RNA, 24 nt, Artificial Sequence
  Synthetic
gggcgggccgaggggagggggcgc

SEQ ID NO: 12699 - RNA, 18 nt, Artificial Sequence
  Synthetic
auaauacaaagauggcgc

SEQ ID NO: 12700 - RNA, 19 nt, Artificial Sequence
  Synthetic
aauaauacaaagauggcgc

SEQ ID NO: 12701 - RNA, 20 nt, Artificial Sequence
  Synthetic
aaauaauacaaagauggcgc

SEQ ID NO: 12702 - RNA, 21 nt, Artificial Sequence
  Synthetic
gaaauaauacaaagauggcgc

SEQ ID NO: 12703 - RNA, 22 nt, Artificial Sequence
  Synthetic
agaaauaauacaaagauggcgc

SEQ ID NO: 12704 - RNA, 23 nt, Artificial Sequence
  Synthetic
uagaaauaauacaaagauggcgc

SEQ ID NO: 12705 - RNA, 24 nt, Artificial Sequence
  Synthetic
uuagaaauaauacaaagauggcgc

SEQ ID NO: 12706 - RNA, 18 nt, Artificial Sequence
  Synthetic
gagggggaggugcggggc

SEQ ID NO: 12707 - RNA, 19 nt, Artificial Sequence
  Synthetic
ggagggggaggugcggggc

SEQ ID NO: 12708 - RNA, 20 nt, Artificial Sequence
  Synthetic
gggagggggaggugcggggc

SEQ ID NO: 12709 - RNA, 21 nt, Artificial Sequence
  Synthetic
ggggagggggaggugcggggc

SEQ ID NO: 12710 - RNA, 22 nt, Artificial Sequence
  Synthetic
cggggagggggaggugcggggc

SEQ ID NO: 12711 - RNA, 23 nt, Artificial Sequence
  Synthetic
gcggggagggggaggugcggggc

SEQ ID NO: 12712 - RNA, 24 nt, Artificial Sequence
  Synthetic
ugcggggagggggaggugcggggc

SEQ ID NO: 12713 - RNA, 18 nt, Artificial Sequence
  Synthetic
ccgcggcgguggcguggc

SEQ ID NO: 12714 - RNA, 19 nt, Artificial Sequence
  Synthetic
gccgcggcgguggcguggc

SEQ ID NO: 12715 - RNA, 20 nt, Artificial Sequence
  Synthetic
cgccgcggcgguggcguggc

SEQ ID NO: 12716 - RNA, 21 nt, Artificial Sequence
  Synthetic
gcgccgcggcgguggcguggc

SEQ ID NO: 12717 - RNA, 22 nt, Artificial Sequence
  Synthetic
agcgccgcggcgguggcguggc

SEQ ID NO: 12718 - RNA, 23 nt, Artificial Sequence
  Synthetic
gagcgccgcggcgguggcguggc

SEQ ID NO: 12719 - RNA, 24 nt, Artificial Sequence
  Synthetic
cgagcgccgcggcgguggcguggc

SEQ ID NO: 12720 - RNA, 18 nt, Artificial Sequence
  Synthetic
caagccaauggccagugc

SEQ ID NO: 12721 - RNA, 19 nt, Artificial Sequence
  Synthetic
acaagccaauggccagugc

SEQ ID NO: 12722 - RNA, 20 nt, Artificial Sequence
  Synthetic
gacaagccaauggccagugc

SEQ ID NO: 12723 - RNA, 21 nt, Artificial Sequence
  Synthetic
ggacaagccaauggccagugc

SEQ ID NO: 12724 - RNA, 22 nt, Artificial Sequence
  Synthetic
aggacaagccaauggccagugc

SEQ ID NO: 12725 - RNA, 23 nt, Artificial Sequence
  Synthetic
caggacaagccaauggccagugc

SEQ ID NO: 12726 - RNA, 24 nt, Artificial Sequence
  Synthetic
ccaggacaagccaauggccagugc

SEQ ID NO: 12727 - RNA, 18 nt, Artificial Sequence
  Synthetic
caccaauggacacacauc

SEQ ID NO: 12728 - RNA, 19 nt, Artificial Sequence
  Synthetic
acaccaauggacacacauc

SEQ ID NO: 12729 - RNA, 20 nt, Artificial Sequence
  Synthetic
cacaccaauggacacacauc

SEQ ID NO: 12730 - RNA, 21 nt, Artificial Sequence
  Synthetic
ucacaccaauggacacacauc

SEQ ID NO: 12731 - RNA, 22 nt, Artificial Sequence
  Synthetic
cucacaccaauggacacacauc

SEQ ID NO: 12732 - RNA, 23 nt, Artificial Sequence
  Synthetic
gcucacaccaauggacacacauc

SEQ ID NO: 12733 - RNA, 24 nt, Artificial Sequence
  Synthetic
agcucacaccaauggacacacauc

SEQ ID NO: 12734 - RNA, 18 nt, Artificial Sequence
  Synthetic
gacggcucgguucacauc

SEQ ID NO: 12735 - RNA, 19 nt, Artificial Sequence
  Synthetic
cgacggcucgguucacauc

SEQ ID NO: 12736 - RNA, 20 nt, Artificial Sequence
  Synthetic
acgacggcucgguucacauc

SEQ ID NO: 12737 - RNA, 21 nt, Artificial Sequence
  Synthetic
gacgacggcucgguucacauc

SEQ ID NO: 12738 - RNA, 22 nt, Artificial Sequence
  Synthetic
ggacgacggcucgguucacauc

SEQ ID NO: 12739 - RNA, 23 nt, Artificial Sequence
  Synthetic
cggacgacggcucgguucacauc

SEQ ID NO: 12740 - RNA, 24 nt, Artificial Sequence
  Synthetic
gcggacgacggcucgguucacauc

SEQ ID NO: 12741 - RNA, 18 nt, Artificial Sequence
  Synthetic
uuagaaagaaggagacuc

SEQ ID NO: 12742 - RNA, 19 nt, Artificial Sequence
  Synthetic
guuagaaagaaggagacuc

SEQ ID NO: 12743 - RNA, 20 nt, Artificial Sequence
  Synthetic
gguuagaaagaaggagacuc

SEQ ID NO: 12744 - RNA, 21 nt, Artificial Sequence
  Synthetic
ggguuagaaagaaggagacuc

SEQ ID NO: 12745 - RNA, 22 nt, Artificial Sequence
  Synthetic
cggguuagaaagaaggagacuc

SEQ ID NO: 12746 - RNA, 23 nt, Artificial Sequence
  Synthetic
ccggguuagaaagaaggagacuc

SEQ ID NO: 12747 - RNA, 24 nt, Artificial Sequence
  Synthetic
gccggguuagaaagaaggagacuc

SEQ ID NO: 12748 - RNA, 18 nt, Artificial Sequence
  Synthetic
ucucuuuuaccucgacuc

SEQ ID NO: 12749 - RNA, 19 nt, Artificial Sequence
  Synthetic
aucucuuuuaccucgacuc

SEQ ID NO: 12750 - RNA, 20 nt, Artificial Sequence
  Synthetic
uaucucuuuuaccucgacuc

SEQ ID NO: 12751 - RNA, 21 nt, Artificial Sequence
  Synthetic
uuaucucuuuuaccucgacuc

SEQ ID NO: 12752 - RNA, 22 nt, Artificial Sequence
  Synthetic
uuuaucucuuuuaccucgacuc

SEQ ID NO: 12753 - RNA, 23 nt, Artificial Sequence
  Synthetic
cuuuaucucuuuuaccucgacuc

SEQ ID NO: 12754 - RNA, 24 nt, Artificial Sequence
  Synthetic
ccuuuaucucuuuuaccucgacuc

SEQ ID NO: 12755 - RNA, 18 nt, Artificial Sequence
  Synthetic
cucucggagguuuuucuc

SEQ ID NO: 12756 - RNA, 19 nt, Artificial Sequence
  Synthetic
acucucggagguuuuucuc

SEQ ID NO: 12757 - RNA, 20 nt, Artificial Sequence
  Synthetic
gacucucggagguuuuucuc

SEQ ID NO: 12758 - RNA, 21 nt, Artificial Sequence
  Synthetic
cgacucucggagguuuuucuc

SEQ ID NO: 12759 - RNA, 22 nt, Artificial Sequence
  Synthetic
ucgacucucggagguuuuucuc

SEQ ID NO: 12760 - RNA, 23 nt, Artificial Sequence
  Synthetic
cucgacucucggagguuuuucuc

SEQ ID NO: 12761 - RNA, 24 nt, Artificial Sequence
  Synthetic
ccucgacucucggagguuuuucuc

SEQ ID NO: 12762 - RNA, 18 nt, Artificial Sequence
  Synthetic
aaaaaaaaaaaaaaaaag

SEQ ID NO: 12763 - RNA, 19 nt, Artificial Sequence
  Synthetic
aaaaaaaaaaaaaaaaaag

SEQ ID NO: 12764 - RNA, 20 nt, Artificial Sequence
  Synthetic
aaaaaaaaaaaaaaaaaaag

SEQ ID NO: 12765 - RNA, 21 nt, Artificial Sequence
  Synthetic
aaaaaaaaaaaaaaaaaaaag

SEQ ID NO: 12766 - RNA, 22 nt, Artificial Sequence
  Synthetic
aaaaaaaaaaaaaaaaaaaaag

SEQ ID NO: 12767 - RNA, 23 nt, Artificial Sequence
  Synthetic
aaaaaaaaaaaaaaaaaaaaaag

SEQ ID NO: 12768 - RNA, 24 nt, Artificial Sequence
  Synthetic
aaaaaaaaaaaaaaaaaaaaaaag

SEQ ID NO: 12769 - RNA, 18 nt, Artificial Sequence
  Synthetic
gagagccggguuagaaag

SEQ ID NO: 12770 - RNA, 19 nt, Artificial Sequence
  Synthetic
ggagagccggguuagaaag

SEQ ID NO: 12771 - RNA, 20 nt, Artificial Sequence
  Synthetic
gggagagccggguuagaaag

SEQ ID NO: 12772 - RNA, 21 nt, Artificial Sequence
  Synthetic
cgggagagccggguuagaaag

SEQ ID NO: 12773 - RNA, 22 nt, Artificial Sequence
  Synthetic
ucgggagagccggguuagaaag

SEQ ID NO: 12774 - RNA, 23 nt, Artificial Sequence
  Synthetic
aucgggagagccggguuagaaag

SEQ ID NO: 12775 - RNA, 24 nt, Artificial Sequence
  Synthetic
caucgggagagccggguuagaaag

SEQ ID NO: 12776 - RNA, 18 nt, Artificial Sequence
  Synthetic
gggcgagcaggagagaag

SEQ ID NO: 12777 - RNA, 19 nt, Artificial Sequence
  Synthetic
agggcgagcaggagagaag

SEQ ID NO: 12778 - RNA, 20 nt, Artificial Sequence
  Synthetic
cagggcgagcaggagagaag

SEQ ID NO: 12779 - RNA, 21 nt, Artificial Sequence
  Synthetic
gcagggcgagcaggagagaag

SEQ ID NO: 12780 - RNA, 22 nt, Artificial Sequence
  Synthetic
ggcagggcgagcaggagagaag

SEQ ID NO: 12781 - RNA, 23 nt, Artificial Sequence
  Synthetic
gggcagggcgagcaggagagaag

SEQ ID NO: 12782 - RNA, 24 nt, Artificial Sequence
  Synthetic
ugggcagggcgagcaggagagaag

SEQ ID NO: 12783 - RNA, 18 nt, Artificial Sequence
  Synthetic
agaaggggaggagggaag

SEQ ID NO: 12784 - RNA, 19 nt, Artificial Sequence
  Synthetic
gagaaggggaggagggaag

SEQ ID NO: 12785 - RNA, 20 nt, Artificial Sequence
  Synthetic
agagaaggggaggagggaag

SEQ ID NO: 12786 - RNA, 21 nt, Artificial Sequence
  Synthetic
gagagaaggggaggagggaag

SEQ ID NO: 12787 - RNA, 22 nt, Artificial Sequence
  Synthetic
ggagagaaggggaggagggaag

SEQ ID NO: 12788 - RNA, 23 nt, Artificial Sequence
  Synthetic
aggagagaaggggaggagggaag

SEQ ID NO: 12789 - RNA, 24 nt, Artificial Sequence
  Synthetic
caggagagaaggggaggagggaag

SEQ ID NO: 12790 - RNA, 18 nt, Artificial Sequence
  Synthetic
acacggcaaugguuccag

SEQ ID NO: 12791 - RNA, 19 nt, Artificial Sequence
  Synthetic
uacacggcaaugguuccag

SEQ ID NO: 12792 - RNA, 20 nt, Artificial Sequence
  Synthetic
auacacggcaaugguuccag

SEQ ID NO: 12793 - RNA, 21 nt, Artificial Sequence
  Synthetic
cauacacggcaaugguuccag

SEQ ID NO: 12794 - RNA, 22 nt, Artificial Sequence
  Synthetic
gcauacacggcaaugguuccag

SEQ ID NO: 12795 - RNA, 23 nt, Artificial Sequence
  Synthetic
ugcauacacggcaaugguuccag

SEQ ID NO: 12796 - RNA, 24 nt, Artificial Sequence
  Synthetic
gugcauacacggcaaugguuccag

SEQ ID NO: 12797 - RNA, 18 nt, Artificial Sequence
  Synthetic
caugggcagggcgagcag

SEQ ID NO: 12798 - RNA, 19 nt, Artificial Sequence
  Synthetic
acaugggcagggcgagcag

SEQ ID NO: 12799 - RNA, 20 nt, Artificial Sequence
  Synthetic
aacaugggcagggcgagcag

SEQ ID NO: 12800 - RNA, 21 nt, Artificial Sequence
  Synthetic
aaacaugggcagggcgagcag

SEQ ID NO: 12801 - RNA, 22 nt, Artificial Sequence
  Synthetic
aaaacaugggcagggcgagcag

SEQ ID NO: 12802 - RNA, 23 nt, Artificial Sequence
  Synthetic
caaaacaugggcagggcgagcag

SEQ ID NO: 12803 - RNA, 24 nt, Artificial Sequence
  Synthetic
acaaaacaugggcagggcgagcag

SEQ ID NO: 12804 - RNA, 18 nt, Artificial Sequence
  Synthetic
ggagagagagagagagag

SEQ ID NO: 12805 - RNA, 19 nt, Artificial Sequence
  Synthetic
gggagagagagagagagag

SEQ ID NO: 12806 - RNA, 20 nt, Artificial Sequence
  Synthetic
agggagagagagagagagag

SEQ ID NO: 12807 - RNA, 21 nt, Artificial Sequence
  Synthetic
gagggagagagagagagagag

SEQ ID NO: 12808 - RNA, 22 nt, Artificial Sequence
  Synthetic
agagggagagagagagagagag

SEQ ID NO: 12809 - RNA, 23 nt, Artificial Sequence
  Synthetic
uagagggagagagagagagagag

SEQ ID NO: 12810 - RNA, 24 nt, Artificial Sequence
  Synthetic
auagagggagagagagagagagag

SEQ ID NO: 12811 - RNA, 18 nt, Artificial Sequence
  Synthetic
aaagagggagagagagag

SEQ ID NO: 12812 - RNA, 19 nt, Artificial Sequence
  Synthetic
aaaagagggagagagagag

SEQ ID NO: 12813 - RNA, 20 nt, Artificial Sequence
  Synthetic
aaaaagagggagagagagag

SEQ ID NO: 12814 - RNA, 21 nt, Artificial Sequence
  Synthetic
aaaaaagagggagagagagag

SEQ ID NO: 12815 - RNA, 22 nt, Artificial Sequence
  Synthetic
aaaaaaagagggagagagagag

SEQ ID NO: 12816 - RNA, 23 nt, Artificial Sequence
  Synthetic
aaaaaaaagagggagagagagag

SEQ ID NO: 12817 - RNA, 24 nt, Artificial Sequence
  Synthetic
aaaaaaaaagagggagagagagag

SEQ ID NO: 12818 - RNA, 18 nt, Artificial Sequence
  Synthetic
gcagggcgagcaggagag

SEQ ID NO: 12819 - RNA, 19 nt, Artificial Sequence
  Synthetic
ggcagggcgagcaggagag

SEQ ID NO: 12820 - RNA, 20 nt, Artificial Sequence
  Synthetic
gggcagggcgagcaggagag

SEQ ID NO: 12821 - RNA, 21 nt, Artificial Sequence
  Synthetic
ugggcagggcgagcaggagag

SEQ ID NO: 12822 - RNA, 22 nt, Artificial Sequence
  Synthetic
augggcagggcgagcaggagag

SEQ ID NO: 12823 - RNA, 23 nt, Artificial Sequence
  Synthetic
caugggcagggcgagcaggagag

SEQ ID NO: 12824 - RNA, 24 nt, Artificial Sequence
  Synthetic
acaugggcagggcgagcaggagag

SEQ ID NO: 12825 - RNA, 18 nt, Artificial Sequence
  Synthetic
guggcguggccgggagag

SEQ ID NO: 12826 - RNA, 19 nt, Artificial Sequence
  Synthetic
gguggcguggccgggagag

SEQ ID NO: 12827 - RNA, 20 nt, Artificial Sequence
  Synthetic
cgguggcguggccgggagag

SEQ ID NO: 12828 - RNA, 21 nt, Artificial Sequence
  Synthetic
gcgguggcguggccgggagag

SEQ ID NO: 12829 - RNA, 22 nt, Artificial Sequence
  Synthetic
ggcgguggcguggccgggagag

SEQ ID NO: 12830 - RNA, 23 nt, Artificial Sequence
  Synthetic
cggcgguggcguggccgggagag

SEQ ID NO: 12831 - RNA, 24 nt, Artificial Sequence
  Synthetic
gcggcgguggcguggccgggagag

SEQ ID NO: 12832 - RNA, 18 nt, Artificial Sequence
  Synthetic
ggggaggggcgggccgag

SEQ ID NO: 12833 - RNA, 19 nt, Artificial Sequence
  Synthetic
gggggaggggcgggccgag

SEQ ID NO: 12834 - RNA, 20 nt, Artificial Sequence
  Synthetic
cgggggaggggcgggccgag

SEQ ID NO: 12835 - RNA, 21 nt, Artificial Sequence
  Synthetic
ccgggggaggggcgggccgag

SEQ ID NO: 12836 - RNA, 22 nt, Artificial Sequence
  Synthetic
cccgggggaggggcgggccgag

SEQ ID NO: 12837 - RNA, 23 nt, Artificial Sequence
  Synthetic
ccccgggggaggggcgggccgag

SEQ ID NO: 12838 - RNA, 24 nt, Artificial Sequence
  Synthetic
cccccgggggaggggcgggccgag

SEQ ID NO: 12839 - RNA, 18 nt, Artificial Sequence
  Synthetic
aaacaugggcagggcgag

SEQ ID NO: 12840 - RNA, 19 nt, Artificial Sequence
  Synthetic
aaaacaugggcagggcgag

SEQ ID NO: 12841 - RNA, 20 nt, Artificial Sequence
  Synthetic
caaaacaugggcagggcgag

SEQ ID NO: 12842 - RNA, 21 nt, Artificial Sequence
  Synthetic
acaaaacaugggcagggcgag

SEQ ID NO: 12843 - RNA, 22 nt, Artificial Sequence
  Synthetic
cacaaaacaugggcagggcgag

SEQ ID NO: 12844 - RNA, 23 nt, Artificial Sequence
  Synthetic
acacaaaacaugggcagggcgag

SEQ ID NO: 12845 - RNA, 24 nt, Artificial Sequence
  Synthetic
cacacaaaacaugggcagggcgag

SEQ ID NO: 12846 - RNA, 18 nt, Artificial Sequence
  Synthetic
agcaggagagaaggggag

SEQ ID NO: 12847 - RNA, 19 nt, Artificial Sequence
  Synthetic
gagcaggagagaaggggag

SEQ ID NO: 12848 - RNA, 20 nt, Artificial Sequence
  Synthetic
cgagcaggagagaaggggag

SEQ ID NO: 12849 - RNA, 21 nt, Artificial Sequence
  Synthetic
gcgagcaggagagaaggggag

SEQ ID NO: 12850 - RNA, 22 nt, Artificial Sequence
  Synthetic
ggcgagcaggagagaaggggag

SEQ ID NO: 12851 - RNA, 23 nt, Artificial Sequence
  Synthetic
gggcgagcaggagagaaggggag

SEQ ID NO: 12852 - RNA, 24 nt, Artificial Sequence
  Synthetic
agggcgagcaggagagaaggggag

SEQ ID NO: 12853 - RNA, 18 nt, Artificial Sequence
  Synthetic
aauggccagugcggggag

SEQ ID NO: 12854 - RNA, 19 nt, Artificial Sequence
  Synthetic
caauggccagugcggggag

SEQ ID NO: 12855 - RNA, 20 nt, Artificial Sequence
  Synthetic
ccaauggccagugcggggag

SEQ ID NO: 12856 - RNA, 21 nt, Artificial Sequence
  Synthetic
gccaauggccagugcggggag

SEQ ID NO: 12857 - RNA, 22 nt, Artificial Sequence
  Synthetic
agccaauggccagugcggggag

SEQ ID NO: 12858 - RNA, 23 nt, Artificial Sequence
  Synthetic
aagccaauggccagugcggggag

SEQ ID NO: 12859 - RNA, 24 nt, Artificial Sequence
  Synthetic
caagccaauggccagugcggggag

SEQ ID NO: 12860 - RNA, 18 nt, Artificial Sequence
  Synthetic
gagagagaagagagauag

SEQ ID NO: 12861 - RNA, 19 nt, Artificial Sequence
  Synthetic
agagagagaagagagauag

SEQ ID NO: 12862 - RNA, 20 nt, Artificial Sequence
  Synthetic
gagagagagaagagagauag

SEQ ID NO: 12863 - RNA, 21 nt, Artificial Sequence
  Synthetic
agagagagagaagagagauag

SEQ ID NO: 12864 - RNA, 22 nt, Artificial Sequence
  Synthetic
gagagagagagaagagagauag

SEQ ID NO: 12865 - RNA, 23 nt, Artificial Sequence
  Synthetic
ggagagagagagaagagagauag

SEQ ID NO: 12866 - RNA, 24 nt, Artificial Sequence
  Synthetic
gggagagagagagaagagagauag

SEQ ID NO: 12867 - RNA, 18 nt, Artificial Sequence
  Synthetic
cgccagacgcggcccccg

SEQ ID NO: 12868 - RNA, 19 nt, Artificial Sequence
  Synthetic
acgccagacgcggcccccg

SEQ ID NO: 12869 - RNA, 20 nt, Artificial Sequence
  Synthetic
gacgccagacgcggcccccg

SEQ ID NO: 12870 - RNA, 21 nt, Artificial Sequence
  Synthetic
ggacgccagacgcggcccccg

SEQ ID NO: 12871 - RNA, 22 nt, Artificial Sequence
  Synthetic
cggacgccagacgcggcccccg

SEQ ID NO: 12872 - RNA, 23 nt, Artificial Sequence
  Synthetic
gcggacgccagacgcggcccccg

SEQ ID NO: 12873 - RNA, 24 nt, Artificial Sequence
  Synthetic
cgcggacgccagacgcggcccccg

SEQ ID NO: 12874 - RNA, 18 nt, Artificial Sequence
  Synthetic
cgggggaggggcgggccg

SEQ ID NO: 12875 - RNA, 19 nt, Artificial Sequence
  Synthetic
ccgggggaggggcgggccg

SEQ ID NO: 12876 - RNA, 20 nt, Artificial Sequence
  Synthetic
cccgggggaggggcgggccg

SEQ ID NO: 12877 - RNA, 21 nt, Artificial Sequence
  Synthetic
ccccgggggaggggcgggccg

SEQ ID NO: 12878 - RNA, 22 nt, Artificial Sequence
  Synthetic
cccccgggggaggggcgggccg

SEQ ID NO: 12879 - RNA, 23 nt, Artificial Sequence
  Synthetic
gcccccgggggaggggcgggccg

SEQ ID NO: 12880 - RNA, 24 nt, Artificial Sequence
  Synthetic
ggcccccgggggaggggcgggccg

SEQ ID NO: 12881 - RNA, 18 nt, Artificial Sequence
  Synthetic
gcggcggcggcggcggcg

SEQ ID NO: 12882 - RNA, 19 nt, Artificial Sequence
  Synthetic
ggcggcggcggcggcggcg

SEQ ID NO: 12883 - RNA, 20 nt, Artificial Sequence
  Synthetic
cggcggcggcggcggcggcg

SEQ ID NO: 12884 - RNA, 21 nt, Artificial Sequence
  Synthetic
gcggcggcggcggcggcggcg

SEQ ID NO: 12885 - RNA, 22 nt, Artificial Sequence
  Synthetic
ggcggcggcggcggcggcggcg

SEQ ID NO: 12886 - RNA, 23 nt, Artificial Sequence
  Synthetic
cggcggcggcggcggcggcggcg

SEQ ID NO: 12887 - RNA, 24 nt, Artificial Sequence
  Synthetic
gcggcggcggcggcggcggcggcg

SEQ ID NO: 12888 - RNA, 18 nt, Artificial Sequence
  Synthetic
agggggaggugcggggcg

SEQ ID NO: 12889 - RNA, 19 nt, Artificial Sequence
  Synthetic
gagggggaggugcggggcg

SEQ ID NO: 12890 - RNA, 20 nt, Artificial Sequence
  Synthetic
ggagggggaggugcggggcg

SEQ ID NO: 12891 - RNA, 21 nt, Artificial Sequence
  Synthetic
gggagggggaggugcggggcg

SEQ ID NO: 12892 - RNA, 22 nt, Artificial Sequence
  Synthetic
ggggagggggaggugcggggcg

SEQ ID NO: 12893 - RNA, 23 nt, Artificial Sequence
  Synthetic
cggggagggggaggugcggggcg

SEQ ID NO: 12894 - RNA, 24 nt, Artificial Sequence
  Synthetic
gcggggagggggaggugcggggcg

SEQ ID NO: 12895 - RNA, 18 nt, Artificial Sequence
  Synthetic
ggccgaggggagggggcg

SEQ ID NO: 12896 - RNA, 19 nt, Artificial Sequence
  Synthetic
gggccgaggggagggggcg

SEQ ID NO: 12897 - RNA, 20 nt, Artificial Sequence
  Synthetic
cgggccgaggggagggggcg

SEQ ID NO: 12898 - RNA, 21 nt, Artificial Sequence
  Synthetic
gcgggccgaggggagggggcg

SEQ ID NO: 12899 - RNA, 22 nt, Artificial Sequence
  Synthetic
ggcgggccgaggggagggggcg

SEQ ID NO: 12900 - RNA, 23 nt, Artificial Sequence
  Synthetic
gggcgggccgaggggagggggcg

SEQ ID NO: 12901 - RNA, 24 nt, Artificial Sequence
  Synthetic
ggggcgggccgaggggagggggcg

SEQ ID NO: 12902 - RNA, 18 nt, Artificial Sequence
  Synthetic
aauaauacaaagauggcg

SEQ ID NO: 12903 - RNA, 19 nt, Artificial Sequence
  Synthetic
aaauaauacaaagauggcg

SEQ ID NO: 12904 - RNA, 20 nt, Artificial Sequence
  Synthetic
gaaauaauacaaagauggcg

SEQ ID NO: 12905 - RNA, 21 nt, Artificial Sequence
  Synthetic
agaaauaauacaaagauggcg

SEQ ID NO: 12906 - RNA, 22 nt, Artificial Sequence
  Synthetic
uagaaauaauacaaagauggcg

SEQ ID NO: 12907 - RNA, 23 nt, Artificial Sequence
  Synthetic
uuagaaauaauacaaagauggcg

SEQ ID NO: 12908 - RNA, 24 nt, Artificial Sequence
  Synthetic
auuagaaauaauacaaagauggcg

SEQ ID NO: 12909 - RNA, 18 nt, Artificial Sequence
  Synthetic
aagccaauggccagugcg

SEQ ID NO: 12910 - RNA, 19 nt, Artificial Sequence
  Synthetic
caagccaauggccagugcg

SEQ ID NO: 12911 - RNA, 20 nt, Artificial Sequence
  Synthetic
acaagccaauggccagugcg

SEQ ID NO: 12912 - RNA, 21 nt, Artificial Sequence
  Synthetic
gacaagccaauggccagugcg

SEQ ID NO: 12913 - RNA, 22 nt, Artificial Sequence
  Synthetic
ggacaagccaauggccagugcg

SEQ ID NO: 12914 - RNA, 23 nt, Artificial Sequence
  Synthetic
aggacaagccaauggccagugcg

SEQ ID NO: 12915 - RNA, 24 nt, Artificial Sequence
  Synthetic
caggacaagccaauggccagugcg

SEQ ID NO: 12916 - RNA, 18 nt, Artificial Sequence
  Synthetic
ggguuugccuugcuugcg

SEQ ID NO: 12917 - RNA, 19 nt, Artificial Sequence
  Synthetic
gggguuugccuugcuugcg

SEQ ID NO: 12918 - RNA, 20 nt, Artificial Sequence
  Synthetic
ugggguuugccuugcuugcg

SEQ ID NO: 12919 - RNA, 21 nt, Artificial Sequence
  Synthetic
cugggguuugccuugcuugcg

SEQ ID NO: 12920 - RNA, 22 nt, Artificial Sequence
  Synthetic
gcugggguuugccuugcuugcg

SEQ ID NO: 12921 - RNA, 23 nt, Artificial Sequence
  Synthetic
ugcugggguuugccuugcuugcg

SEQ ID NO: 12922 - RNA, 24 nt, Artificial Sequence
  Synthetic
gugcugggguuugccuugcuugcg

SEQ ID NO: 12923 - RNA, 18 nt, Artificial Sequence
  Synthetic
caggggugggaggaaagg

SEQ ID NO: 12924 - RNA, 19 nt, Artificial Sequence
  Synthetic
gcaggggugggaggaaagg

SEQ ID NO: 12925 - RNA, 20 nt, Artificial Sequence
  Synthetic
ggcaggggugggaggaaagg

SEQ ID NO: 12926 - RNA, 21 nt, Artificial Sequence
  Synthetic
uggcaggggugggaggaaagg

SEQ ID NO: 12927 - RNA, 22 nt, Artificial Sequence
  Synthetic
guggcaggggugggaggaaagg

SEQ ID NO: 12928 - RNA, 23 nt, Artificial Sequence
  Synthetic
gguggcaggggugggaggaaagg

SEQ ID NO: 12929 - RNA, 24 nt, Artificial Sequence
  Synthetic
ggguggcaggggugggaggaaagg

SEQ ID NO: 12930 - RNA, 18 nt, Artificial Sequence
  Synthetic
acacaaaacaugggcagg

SEQ ID NO: 12931 - RNA, 19 nt, Artificial Sequence
  Synthetic
cacacaaaacaugggcagg

SEQ ID NO: 12932 - RNA, 20 nt, Artificial Sequence
  Synthetic
acacacaaaacaugggcagg

SEQ ID NO: 12933 - RNA, 21 nt, Artificial Sequence
  Synthetic
gacacacaaaacaugggcagg

SEQ ID NO: 12934 - RNA, 22 nt, Artificial Sequence
  Synthetic
agacacacaaaacaugggcagg

SEQ ID NO: 12935 - RNA, 23 nt, Artificial Sequence
  Synthetic
gagacacacaaaacaugggcagg

SEQ ID NO: 12936 - RNA, 24 nt, Artificial Sequence
  Synthetic
agagacacacaaaacaugggcagg

SEQ ID NO: 12937 - RNA, 18 nt, Artificial Sequence
  Synthetic
aaaaaaaaaaaaaagagg

SEQ ID NO: 12938 - RNA, 19 nt, Artificial Sequence
  Synthetic
aaaaaaaaaaaaaaagagg

SEQ ID NO: 12939 - RNA, 20 nt, Artificial Sequence
  Synthetic
aaaaaaaaaaaaaaaagagg

SEQ ID NO: 12940 - RNA, 21 nt, Artificial Sequence
  Synthetic
aaaaaaaaaaaaaaaaagagg

SEQ ID NO: 12941 - RNA, 22 nt, Artificial Sequence
  Synthetic
aaaaaaaaaaaaaaaaaagagg

SEQ ID NO: 12942 - RNA, 23 nt, Artificial Sequence
  Synthetic
aaaaaaaaaaaaaaaaaaagagg

SEQ ID NO: 12943 - RNA, 24 nt, Artificial Sequence
  Synthetic
aaaaaaaaaaaaaaaaaaaagagg

SEQ ID NO: 12944 - RNA, 18 nt, Artificial Sequence
  Synthetic
agagaagagagauagagg

SEQ ID NO: 12945 - RNA, 19 nt, Artificial Sequence
  Synthetic
gagagaagagagauagagg

SEQ ID NO: 12946 - RNA, 20 nt, Artificial Sequence
  Synthetic
agagagaagagagauagagg

SEQ ID NO: 12947 - RNA, 21 nt, Artificial Sequence
  Synthetic
gagagagaagagagauagagg

SEQ ID NO: 12948 - RNA, 22 nt, Artificial Sequence
  Synthetic
agagagagaagagagauagagg

SEQ ID NO: 12949 - RNA, 23 nt, Artificial Sequence
  Synthetic
gagagagagaagagagauagagg

SEQ ID NO: 12950 - RNA, 24 nt, Artificial Sequence
  Synthetic
agagagagagaagagagauagagg

SEQ ID NO: 12951 - RNA, 18 nt, Artificial Sequence
  Synthetic
gcaggagagaaggggagg

SEQ ID NO: 12952 - RNA, 19 nt, Artificial Sequence
  Synthetic
agcaggagagaaggggagg

SEQ ID NO: 12953 - RNA, 20 nt, Artificial Sequence
  Synthetic
gagcaggagagaaggggagg

SEQ ID NO: 12954 - RNA, 21 nt, Artificial Sequence
  Synthetic
cgagcaggagagaaggggagg

SEQ ID NO: 12955 - RNA, 22 nt, Artificial Sequence
  Synthetic
gcgagcaggagagaaggggagg

SEQ ID NO: 12956 - RNA, 23 nt, Artificial Sequence
  Synthetic
ggcgagcaggagagaaggggagg

SEQ ID NO: 12957 - RNA, 24 nt, Artificial Sequence
  Synthetic
gggcgagcaggagagaaggggagg

SEQ ID NO: 12958 - RNA, 18 nt, Artificial Sequence
  Synthetic
auggccagugcggggagg

SEQ ID NO: 12959 - RNA, 19 nt, Artificial Sequence
  Synthetic
aauggccagugcggggagg

SEQ ID NO: 12960 - RNA, 20 nt, Artificial Sequence
  Synthetic
caauggccagugcggggagg

SEQ ID NO: 12961 - RNA, 21 nt, Artificial Sequence
  Synthetic
ccaauggccagugcggggagg

SEQ ID NO: 12962 - RNA, 22 nt, Artificial Sequence
  Synthetic
gccaauggccagugcggggagg

SEQ ID NO: 12963 - RNA, 23 nt, Artificial Sequence
  Synthetic
agccaauggccagugcggggagg

SEQ ID NO: 12964 - RNA, 24 nt, Artificial Sequence
  Synthetic
aagccaauggccagugcggggagg

SEQ ID NO: 12965 - RNA, 18 nt, Artificial Sequence
  Synthetic
gccagacgcggcccccgg

SEQ ID NO: 12966 - RNA, 19 nt, Artificial Sequence
  Synthetic
cgccagacgcggcccccgg

SEQ ID NO: 12967 - RNA, 20 nt, Artificial Sequence
  Synthetic
acgccagacgcggcccccgg

SEQ ID NO: 12968 - RNA, 21 nt, Artificial Sequence
  Synthetic
gacgccagacgcggcccccgg

SEQ ID NO: 12969 - RNA, 22 nt, Artificial Sequence
  Synthetic
ggacgccagacgcggcccccgg

SEQ ID NO: 12970 - RNA, 23 nt, Artificial Sequence
  Synthetic
cggacgccagacgcggcccccgg

SEQ ID NO: 12971 - RNA, 24 nt, Artificial Sequence
  Synthetic
gcggacgccagacgcggcccccgg

SEQ ID NO: 12972 - RNA, 18 nt, Artificial Sequence
  Synthetic
cggcgguggcguggccgg

SEQ ID NO: 12973 - RNA, 19 nt, Artificial Sequence
  Synthetic
gcggcgguggcguggccgg

SEQ ID NO: 12974 - RNA, 20 nt, Artificial Sequence
  Synthetic
cgcggcgguggcguggccgg

SEQ ID NO: 12975 - RNA, 21 nt, Artificial Sequence
  Synthetic
ccgcggcgguggcguggccgg

SEQ ID NO: 12976 - RNA, 22 nt, Artificial Sequence
  Synthetic
gccgcggcgguggcguggccgg

SEQ ID NO: 12977 - RNA, 23 nt, Artificial Sequence
  Synthetic
cgccgcggcgguggcguggccgg

SEQ ID NO: 12978 - RNA, 24 nt, Artificial Sequence
  Synthetic
gcgccgcggcgguggcguggccgg

SEQ ID NO: 12979 - RNA, 18 nt, Artificial Sequence
  Synthetic
cggcggcggcggcggcgg

SEQ ID NO: 12980 - RNA, 19 nt, Artificial Sequence
  Synthetic
gcggcggcggcggcggcgg

SEQ ID NO: 12981 - RNA, 20 nt, Artificial Sequence
  Synthetic
ggcggcggcggcggcggcgg

SEQ ID NO: 12982 - RNA, 21 nt, Artificial Sequence
  Synthetic
cggcggcggcggcggcggcgg

SEQ ID NO: 12983 - RNA, 22 nt, Artificial Sequence
  Synthetic
gcggcggcggcggcggcggcgg

SEQ ID NO: 12984 - RNA, 23 nt, Artificial Sequence
  Synthetic
ggcggcggcggcggcggcggcgg

SEQ ID NO: 12985 - RNA, 24 nt, Artificial Sequence
  Synthetic
cggcggcggcggcggcggcggcgg

SEQ ID NO: 12986 - RNA, 18 nt, Artificial Sequence
  Synthetic
cggcucgguucacaucgg

SEQ ID NO: 12987 - RNA, 19 nt, Artificial Sequence
  Synthetic
acggcucgguucacaucgg

SEQ ID NO: 12988 - RNA, 20 nt, Artificial Sequence
  Synthetic
gacggcucgguucacaucgg

SEQ ID NO: 12989 - RNA, 21 nt, Artificial Sequence
  Synthetic
cgacggcucgguucacaucgg

SEQ ID NO: 12990 - RNA, 22 nt, Artificial Sequence
  Synthetic
acgacggcucgguucacaucgg

SEQ ID NO: 12991 - RNA, 23 nt, Artificial Sequence
  Synthetic
gacgacggcucgguucacaucgg

SEQ ID NO: 12992 - RNA, 24 nt, Artificial Sequence
  Synthetic
ggacgacggcucgguucacaucgg

SEQ ID NO: 12993 - RNA, 18 nt, Artificial Sequence
  Synthetic
aggggugggaggaaaggg

SEQ ID NO: 12994 - RNA, 19 nt, Artificial Sequence
  Synthetic
caggggugggaggaaaggg

SEQ ID NO: 12995 - RNA, 20 nt, Artificial Sequence
  Synthetic
gcaggggugggaggaaaggg

SEQ ID NO: 12996 - RNA, 21 nt, Artificial Sequence
  Synthetic
ggcaggggugggaggaaaggg

SEQ ID NO: 12997 - RNA, 22 nt, Artificial Sequence
  Synthetic
uggcaggggugggaggaaaggg

SEQ ID NO: 12998 - RNA, 23 nt, Artificial Sequence
  Synthetic
guggcaggggugggaggaaaggg

SEQ ID NO: 12999 - RNA, 24 nt, Artificial Sequence
  Synthetic
gguggcaggggugggaggaaaggg

SEQ ID NO: 13000 - RNA, 18 nt, Artificial Sequence
  Synthetic
gcgagcaggagagaaggg

SEQ ID NO: 13001 - RNA, 19 nt, Artificial Sequence
  Synthetic
ggcgagcaggagagaaggg

SEQ ID NO: 13002 - RNA, 20 nt, Artificial Sequence
  Synthetic
gggcgagcaggagagaaggg

SEQ ID NO: 13003 - RNA, 21 nt, Artificial Sequence
  Synthetic
agggcgagcaggagagaaggg

SEQ ID NO: 13004 - RNA, 22 nt, Artificial Sequence
  Synthetic
cagggcgagcaggagagaaggg

SEQ ID NO: 13005 - RNA, 23 nt, Artificial Sequence
  Synthetic
gcagggcgagcaggagagaaggg

SEQ ID NO: 13006 - RNA, 24 nt, Artificial Sequence
  Synthetic
ggcagggcgagcaggagagaaggg

SEQ ID NO: 13007 - RNA, 18 nt, Artificial Sequence
  Synthetic
aagaaagggguggcaggg

SEQ ID NO: 13008 - RNA, 19 nt, Artificial Sequence
  Synthetic
gaagaaagggguggcaggg

SEQ ID NO: 13009 - RNA, 20 nt, Artificial Sequence
  Synthetic
agaagaaagggguggcaggg

SEQ ID NO: 13010 - RNA, 21 nt, Artificial Sequence
  Synthetic
gagaagaaagggguggcaggg

SEQ ID NO: 13011 - RNA, 22 nt, Artificial Sequence
  Synthetic
agagaagaaagggguggcaggg

SEQ ID NO: 13012 - RNA, 23 nt, Artificial Sequence
  Synthetic
gagagaagaaagggguggcaggg

SEQ ID NO: 13013 - RNA, 24 nt, Artificial Sequence
  Synthetic
ggagagaagaaagggguggcaggg

SEQ ID NO: 13014 - RNA, 18 nt, Artificial Sequence
  Synthetic
ggaggggcgggccgaggg

SEQ ID NO: 13015 - RNA, 19 nt, Artificial Sequence
  Synthetic
gggaggggcgggccgaggg

SEQ ID NO: 13016 - RNA, 20 nt, Artificial Sequence
  Synthetic
ggggaggggcgggccgaggg

SEQ ID NO: 13017 - RNA, 21 nt, Artificial Sequence
  Synthetic
gggggaggggcgggccgaggg

SEQ ID NO: 13018 - RNA, 22 nt, Artificial Sequence
  Synthetic
cgggggaggggcgggccgaggg

SEQ ID NO: 13019 - RNA, 23 nt, Artificial Sequence
  Synthetic
ccgggggaggggcgggccgaggg

SEQ ID NO: 13020 - RNA, 24 nt, Artificial Sequence
  Synthetic
cccgggggaggggcgggccgaggg

SEQ ID NO: 13021 - RNA, 18 nt, Artificial Sequence
  Synthetic
gagagaaggggaggaggg

SEQ ID NO: 13022 - RNA, 19 nt, Artificial Sequence
  Synthetic
ggagagaaggggaggaggg

SEQ ID NO: 13023 - RNA, 20 nt, Artificial Sequence
  Synthetic
aggagagaaggggaggaggg

SEQ ID NO: 13024 - RNA, 21 nt, Artificial Sequence
  Synthetic
caggagagaaggggaggaggg

SEQ ID NO: 13025 - RNA, 22 nt, Artificial Sequence
  Synthetic
gcaggagagaaggggaggaggg

SEQ ID NO: 13026 - RNA, 23 nt, Artificial Sequence
  Synthetic
agcaggagagaaggggaggaggg

SEQ ID NO: 13027 - RNA, 24 nt, Artificial Sequence
  Synthetic
gagcaggagagaaggggaggaggg

SEQ ID NO: 13028 - RNA, 18 nt, Artificial Sequence
  Synthetic
gcggcccccgggggaggg

SEQ ID NO: 13029 - RNA, 19 nt, Artificial Sequence
  Synthetic
cgcggcccccgggggaggg

SEQ ID NO: 13030 - RNA, 20 nt, Artificial Sequence
  Synthetic
acgcggcccccgggggaggg

SEQ ID NO: 13031 - RNA, 21 nt, Artificial Sequence
  Synthetic
gacgcggcccccgggggaggg

SEQ ID NO: 13032 - RNA, 22 nt, Artificial Sequence
  Synthetic
agacgcggcccccgggggaggg

SEQ ID NO: 13033 - RNA, 23 nt, Artificial Sequence
  Synthetic
cagacgcggcccccgggggaggg

SEQ ID NO: 13034 - RNA, 24 nt, Artificial Sequence
  Synthetic
ccagacgcggcccccgggggaggg

SEQ ID NO: 13035 - RNA, 18 nt, Artificial Sequence
  Synthetic
ccccgggggaggggcggg

SEQ ID NO: 13036 - RNA, 19 nt, Artificial Sequence
  Synthetic
cccccgggggaggggcggg

SEQ ID NO: 13037 - RNA, 20 nt, Artificial Sequence
  Synthetic
gcccccgggggaggggcggg

SEQ ID NO: 13038 - RNA, 21 nt, Artificial Sequence
  Synthetic
ggcccccgggggaggggcggg

SEQ ID NO: 13039 - RNA, 22 nt, Artificial Sequence
  Synthetic
cggcccccgggggaggggcggg

SEQ ID NO: 13040 - RNA, 23 nt, Artificial Sequence
  Synthetic
gcggcccccgggggaggggcggg

SEQ ID NO: 13041 - RNA, 24 nt, Artificial Sequence
  Synthetic
cgcggcccccgggggaggggcggg

SEQ ID NO: 13042 - RNA, 18 nt, Artificial Sequence
  Synthetic
gacauggugggcugcggg

SEQ ID NO: 13043 - RNA, 19 nt, Artificial Sequence
  Synthetic
agacauggugggcugcggg

SEQ ID NO: 13044 - RNA, 20 nt, Artificial Sequence
  Synthetic
gagacauggugggcugcggg

SEQ ID NO: 13045 - RNA, 21 nt, Artificial Sequence
  Synthetic
cgagacauggugggcugcggg

SEQ ID NO: 13046 - RNA, 22 nt, Artificial Sequence
  Synthetic
gcgagacauggugggcugcggg

SEQ ID NO: 13047 - RNA, 23 nt, Artificial Sequence
  Synthetic
ggcgagacauggugggcugcggg

SEQ ID NO: 13048 - RNA, 24 nt, Artificial Sequence
  Synthetic
cggcgagacauggugggcugcggg

SEQ ID NO: 13049 - RNA, 18 nt, Artificial Sequence
  Synthetic
gccaauggccagugcggg

SEQ ID NO: 13050 - RNA, 19 nt, Artificial Sequence
  Synthetic
agccaauggccagugcggg

SEQ ID NO: 13051 - RNA, 20 nt, Artificial Sequence
  Synthetic
aagccaauggccagugcggg

SEQ ID NO: 13052 - RNA, 21 nt, Artificial Sequence
  Synthetic
caagccaauggccagugcggg

SEQ ID NO: 13053 - RNA, 22 nt, Artificial Sequence
  Synthetic
acaagccaauggccagugcggg

SEQ ID NO: 13054 - RNA, 23 nt, Artificial Sequence
  Synthetic
gacaagccaauggccagugcggg

SEQ ID NO: 13055 - RNA, 24 nt, Artificial Sequence
  Synthetic
ggacaagccaauggccagugcggg

SEQ ID NO: 13056 - RNA, 18 nt, Artificial Sequence
  Synthetic
gggagggggaggugcggg

SEQ ID NO: 13057 - RNA, 19 nt, Artificial Sequence
  Synthetic
ggggagggggaggugcggg

SEQ ID NO: 13058 - RNA, 20 nt, Artificial Sequence
  Synthetic
cggggagggggaggugcggg

SEQ ID NO: 13059 - RNA, 21 nt, Artificial Sequence
  Synthetic
gcggggagggggaggugcggg

SEQ ID NO: 13060 - RNA, 22 nt, Artificial Sequence
  Synthetic
ugcggggagggggaggugcggg

SEQ ID NO: 13061 - RNA, 23 nt, Artificial Sequence
  Synthetic
gugcggggagggggaggugcggg

SEQ ID NO: 13062 - RNA, 24 nt, Artificial Sequence
  Synthetic
agugcggggagggggaggugcggg

SEQ ID NO: 13063 - RNA, 18 nt, Artificial Sequence
  Synthetic
cgagcaggagagaagggg

SEQ ID NO: 13064 - RNA, 19 nt, Artificial Sequence
  Synthetic
gcgagcaggagagaagggg

SEQ ID NO: 13065 - RNA, 20 nt, Artificial Sequence
  Synthetic
ggcgagcaggagagaagggg

SEQ ID NO: 13066 - RNA, 21 nt, Artificial Sequence
  Synthetic
gggcgagcaggagagaagggg

SEQ ID NO: 13067 - RNA, 22 nt, Artificial Sequence
  Synthetic
agggcgagcaggagagaagggg

SEQ ID NO: 13068 - RNA, 23 nt, Artificial Sequence
  Synthetic
cagggcgagcaggagagaagggg

SEQ ID NO: 13069 - RNA, 24 nt, Artificial Sequence
  Synthetic
gcagggcgagcaggagagaagggg

SEQ ID NO: 13070 - RNA, 18 nt, Artificial Sequence
  Synthetic
agaaagggguggcagggg

SEQ ID NO: 13071 - RNA, 19 nt, Artificial Sequence
  Synthetic
aagaaagggguggcagggg

SEQ ID NO: 13072 - RNA, 20 nt, Artificial Sequence
  Synthetic
gaagaaagggguggcagggg

SEQ ID NO: 13073 - RNA, 21 nt, Artificial Sequence
  Synthetic
agaagaaagggguggcagggg

SEQ ID NO: 13074 - RNA, 22 nt, Artificial Sequence
  Synthetic
gagaagaaagggguggcagggg

SEQ ID NO: 13075 - RNA, 23 nt, Artificial Sequence
  Synthetic
agagaagaaagggguggcagggg

SEQ ID NO: 13076 - RNA, 24 nt, Artificial Sequence
  Synthetic
gagagaagaaagggguggcagggg

SEQ ID NO: 13077 - RNA, 18 nt, Artificial Sequence
  Synthetic
auggacacacaucagggg

SEQ ID NO: 13078 - RNA, 19 nt, Artificial Sequence
  Synthetic
aauggacacacaucagggg

SEQ ID NO: 13079 - RNA, 20 nt, Artificial Sequence
  Synthetic
caauggacacacaucagggg

SEQ ID NO: 13080 - RNA, 21 nt, Artificial Sequence
  Synthetic
ccaauggacacacaucagggg

SEQ ID NO: 13081 - RNA, 22 nt, Artificial Sequence
  Synthetic
accaauggacacacaucagggg

SEQ ID NO: 13082 - RNA, 23 nt, Artificial Sequence
  Synthetic
caccaauggacacacaucagggg

SEQ ID NO: 13083 - RNA, 24 nt, Artificial Sequence
  Synthetic
acaccaauggacacacaucagggg

SEQ ID NO: 13084 - RNA, 18 nt, Artificial Sequence
  Synthetic
gaggggcgggccgagggg

SEQ ID NO: 13085 - RNA, 19 nt, Artificial Sequence
  Synthetic
ggaggggcgggccgagggg

SEQ ID NO: 13086 - RNA, 20 nt, Artificial Sequence
  Synthetic
gggaggggcgggccgagggg

SEQ ID NO: 13087 - RNA, 21 nt, Artificial Sequence
  Synthetic
ggggaggggcgggccgagggg

SEQ ID NO: 13088 - RNA, 22 nt, Artificial Sequence
  Synthetic
gggggaggggcgggccgagggg

SEQ ID NO: 13089 - RNA, 23 nt, Artificial Sequence
  Synthetic
cgggggaggggcgggccgagggg

SEQ ID NO: 13090 - RNA, 24 nt, Artificial Sequence
  Synthetic
ccgggggaggggcgggccgagggg

SEQ ID NO: 13091 - RNA, 18 nt, Artificial Sequence
  Synthetic
cagacgcggcccccgggg

SEQ ID NO: 13092 - RNA, 19 nt, Artificial Sequence
  Synthetic
ccagacgcggcccccgggg

SEQ ID NO: 13093 - RNA, 20 nt, Artificial Sequence
  Synthetic
gccagacgcggcccccgggg

SEQ ID NO: 13094 - RNA, 21 nt, Artificial Sequence
  Synthetic
cgccagacgcggcccccgggg

SEQ ID NO: 13095 - RNA, 22 nt, Artificial Sequence
  Synthetic
acgccagacgcggcccccgggg

SEQ ID NO: 13096 - RNA, 23 nt, Artificial Sequence
  Synthetic
gacgccagacgcggcccccgggg

SEQ ID NO: 13097 - RNA, 24 nt, Artificial Sequence
  Synthetic
ggacgccagacgcggcccccgggg

SEQ ID NO: 13098 - RNA, 18 nt, Artificial Sequence
  Synthetic
ccaauggccagugcgggg

SEQ ID NO: 13099 - RNA, 19 nt, Artificial Sequence
  Synthetic
gccaauggccagugcgggg

SEQ ID NO: 13100 - RNA, 20 nt, Artificial Sequence
  Synthetic
agccaauggccagugcgggg

SEQ ID NO: 13101 - RNA, 21 nt, Artificial Sequence
  Synthetic
aagccaauggccagugcgggg

SEQ ID NO: 13102 - RNA, 22 nt, Artificial Sequence
  Synthetic
caagccaauggccagugcgggg

SEQ ID NO: 13103 - RNA, 23 nt, Artificial Sequence
  Synthetic
acaagccaauggccagugcgggg

SEQ ID NO: 13104 - RNA, 24 nt, Artificial Sequence
  Synthetic
gacaagccaauggccagugcgggg

SEQ ID NO: 13105 - RNA, 18 nt, Artificial Sequence
  Synthetic
ggagggggaggugcgggg

SEQ ID NO: 13106 - RNA, 19 nt, Artificial Sequence
  Synthetic
gggagggggaggugcgggg

SEQ ID NO: 13107 - RNA, 20 nt, Artificial Sequence
  Synthetic
ggggagggggaggugcgggg

SEQ ID NO: 13108 - RNA, 21 nt, Artificial Sequence
  Synthetic
cggggagggggaggugcgggg

SEQ ID NO: 13109 - RNA, 22 nt, Artificial Sequence
  Synthetic
gcggggagggggaggugcgggg

SEQ ID NO: 13110 - RNA, 23 nt, Artificial Sequence
  Synthetic
ugcggggagggggaggugcgggg

SEQ ID NO: 13111 - RNA, 24 nt, Artificial Sequence
  Synthetic
gugcggggagggggaggugcgggg

SEQ ID NO: 13112 - RNA, 18 nt, Artificial Sequence
  Synthetic
agacgcggcccccggggg

SEQ ID NO: 13113 - RNA, 19 nt, Artificial Sequence
  Synthetic
cagacgcggcccccggggg

SEQ ID NO: 13114 - RNA, 20 nt, Artificial Sequence
  Synthetic
ccagacgcggcccccggggg

SEQ ID NO: 13115 - RNA, 21 nt, Artificial Sequence
  Synthetic
gccagacgcggcccccggggg

SEQ ID NO: 13116 - RNA, 22 nt, Artificial Sequence
  Synthetic
cgccagacgcggcccccggggg

SEQ ID NO: 13117 - RNA, 23 nt, Artificial Sequence
  Synthetic
acgccagacgcggcccccggggg

SEQ ID NO: 13118 - RNA, 24 nt, Artificial Sequence
  Synthetic
gacgccagacgcggcccccggggg

SEQ ID NO: 13119 - RNA, 18 nt, Artificial Sequence
  Synthetic
ugggaggaaagggugggg

SEQ ID NO: 13120 - RNA, 19 nt, Artificial Sequence
  Synthetic
gugggaggaaagggugggg

SEQ ID NO: 13121 - RNA, 20 nt, Artificial Sequence
  Synthetic
ggugggaggaaagggugggg

SEQ ID NO: 13122 - RNA, 21 nt, Artificial Sequence
  Synthetic
gggugggaggaaagggugggg

SEQ ID NO: 13123 - RNA, 22 nt, Artificial Sequence
  Synthetic
ggggugggaggaaagggugggg

SEQ ID NO: 13124 - RNA, 23 nt, Artificial Sequence
  Synthetic
aggggugggaggaaagggugggg

SEQ ID NO: 13125 - RNA, 24 nt, Artificial Sequence
  Synthetic
caggggugggaggaaagggugggg

SEQ ID NO: 13126 - RNA, 18 nt, Artificial Sequence
  Synthetic
agacacacaaaacauggg

SEQ ID NO: 13127 - RNA, 19 nt, Artificial Sequence
  Synthetic
gagacacacaaaacauggg

SEQ ID NO: 13128 - RNA, 20 nt, Artificial Sequence
  Synthetic
agagacacacaaaacauggg

SEQ ID NO: 13129 - RNA, 21 nt, Artificial Sequence
  Synthetic
cagagacacacaaaacauggg

SEQ ID NO: 13130 - RNA, 22 nt, Artificial Sequence
  Synthetic
acagagacacacaaaacauggg

SEQ ID NO: 13131 - RNA, 23 nt, Artificial Sequence
  Synthetic
gacagagacacacaaaacauggg

SEQ ID NO: 13132 - RNA, 24 nt, Artificial Sequence
  Synthetic
ggacagagacacacaaaacauggg

SEQ ID NO: 13133 - RNA, 18 nt, Artificial Sequence
  Synthetic
gcaaugguuccagauggg

SEQ ID NO: 13134 - RNA, 19 nt, Artificial Sequence
  Synthetic
ggcaaugguuccagauggg

SEQ ID NO: 13135 - RNA, 20 nt, Artificial Sequence
  Synthetic
cggcaaugguuccagauggg

SEQ ID NO: 13136 - RNA, 21 nt, Artificial Sequence
  Synthetic
acggcaaugguuccagauggg

SEQ ID NO: 13137 - RNA, 22 nt, Artificial Sequence
  Synthetic
cacggcaaugguuccagauggg

SEQ ID NO: 13138 - RNA, 23 nt, Artificial Sequence
  Synthetic
acacggcaaugguuccagauggg

SEQ ID NO: 13139 - RNA, 24 nt, Artificial Sequence
  Synthetic
uacacggcaaugguuccagauggg

SEQ ID NO: 13140 - RNA, 18 nt, Artificial Sequence
  Synthetic
gugggaggaaaggguggg

SEQ ID NO: 13141 - RNA, 19 nt, Artificial Sequence
  Synthetic
ggugggaggaaaggguggg

SEQ ID NO: 13142 - RNA, 20 nt, Artificial Sequence
  Synthetic
gggugggaggaaaggguggg

SEQ ID NO: 13143 - RNA, 21 nt, Artificial Sequence
  Synthetic
ggggugggaggaaaggguggg

SEQ ID NO: 13144 - RNA, 22 nt, Artificial Sequence
  Synthetic
aggggugggaggaaaggguggg

SEQ ID NO: 13145 - RNA, 23 nt, Artificial Sequence
  Synthetic
caggggugggaggaaaggguggg

SEQ ID NO: 13146 - RNA, 24 nt, Artificial Sequence
  Synthetic
gcaggggugggaggaaaggguggg

SEQ ID NO: 13147 - RNA, 18 nt, Artificial Sequence
  Synthetic
agggguggcagggguggg

SEQ ID NO: 13148 - RNA, 19 nt, Artificial Sequence
  Synthetic
aagggguggcagggguggg

SEQ ID NO: 13149 - RNA, 20 nt, Artificial Sequence
  Synthetic
aaagggguggcagggguggg

SEQ ID NO: 13150 - RNA, 21 nt, Artificial Sequence
  Synthetic
gaaagggguggcagggguggg

SEQ ID NO: 13151 - RNA, 22 nt, Artificial Sequence
  Synthetic
agaaagggguggcagggguggg

SEQ ID NO: 13152 - RNA, 23 nt, Artificial Sequence
  Synthetic
aagaaagggguggcagggguggg

SEQ ID NO: 13153 - RNA, 24 nt, Artificial Sequence
  Synthetic
gaagaaagggguggcagggguggg

SEQ ID NO: 13154 - RNA, 18 nt, Artificial Sequence
  Synthetic
ugaacgucaggagucugg

SEQ ID NO: 13155 - RNA, 19 nt, Artificial Sequence
  Synthetic
uugaacgucaggagucugg

SEQ ID NO: 13156 - RNA, 20 nt, Artificial Sequence
  Synthetic
cuugaacgucaggagucugg

SEQ ID NO: 13157 - RNA, 21 nt, Artificial Sequence
  Synthetic
acuugaacgucaggagucugg

SEQ ID NO: 13158 - RNA, 22 nt, Artificial Sequence
  Synthetic
aacuugaacgucaggagucugg

SEQ ID NO: 13159 - RNA, 23 nt, Artificial Sequence
  Synthetic
gaacuugaacgucaggagucugg

SEQ ID NO: 13160 - RNA, 24 nt, Artificial Sequence
  Synthetic
cgaacuugaacgucaggagucugg

SEQ ID NO: 13161 - RNA, 18 nt, Artificial Sequence
  Synthetic
gccgcggcgguggcgugg

SEQ ID NO: 13162 - RNA, 19 nt, Artificial Sequence
  Synthetic
cgccgcggcgguggcgugg

SEQ ID NO: 13163 - RNA, 20 nt, Artificial Sequence
  Synthetic
gcgccgcggcgguggcgugg

SEQ ID NO: 13164 - RNA, 21 nt, Artificial Sequence
  Synthetic
agcgccgcggcgguggcgugg

SEQ ID NO: 13165 - RNA, 22 nt, Artificial Sequence
  Synthetic
gagcgccgcggcgguggcgugg

SEQ ID NO: 13166 - RNA, 23 nt, Artificial Sequence
  Synthetic
cgagcgccgcggcgguggcgugg

SEQ ID NO: 13167 - RNA, 24 nt, Artificial Sequence
  Synthetic
gcgagcgccgcggcgguggcgugg

SEQ ID NO: 13168 - RNA, 18 nt, Artificial Sequence
  Synthetic
ggugggaggaaagggugg

SEQ ID NO: 13169 - RNA, 19 nt, Artificial Sequence
  Synthetic
gggugggaggaaagggugg

SEQ ID NO: 13170 - RNA, 20 nt, Artificial Sequence
  Synthetic
ggggugggaggaaagggugg

SEQ ID NO: 13171 - RNA, 21 nt, Artificial Sequence
  Synthetic
aggggugggaggaaagggugg

SEQ ID NO: 13172 - RNA, 22 nt, Artificial Sequence
  Synthetic
caggggugggaggaaagggugg

SEQ ID NO: 13173 - RNA, 23 nt, Artificial Sequence
  Synthetic
gcaggggugggaggaaagggugg

SEQ ID NO: 13174 - RNA, 24 nt, Artificial Sequence
  Synthetic
ggcaggggugggaggaaagggugg

SEQ ID NO: 13175 - RNA, 18 nt, Artificial Sequence
  Synthetic
gagagaagaaaggggugg

SEQ ID NO: 13176 - RNA, 19 nt, Artificial Sequence
  Synthetic
ggagagaagaaaggggugg

SEQ ID NO: 13177 - RNA, 20 nt, Artificial Sequence
  Synthetic
gggagagaagaaaggggugg

SEQ ID NO: 13178 - RNA, 21 nt, Artificial Sequence
  Synthetic
cgggagagaagaaaggggugg

SEQ ID NO: 13179 - RNA, 22 nt, Artificial Sequence
  Synthetic
ccgggagagaagaaaggggugg

SEQ ID NO: 13180 - RNA, 23 nt, Artificial Sequence
  Synthetic
gccgggagagaagaaaggggugg

SEQ ID NO: 13181 - RNA, 24 nt, Artificial Sequence
  Synthetic
ggccgggagagaagaaaggggugg

SEQ ID NO: 13182 - RNA, 18 nt, Artificial Sequence
  Synthetic
aagggguggcaggggugg

SEQ ID NO: 13183 - RNA, 19 nt, Artificial Sequence
  Synthetic
aaagggguggcaggggugg

SEQ ID NO: 13184 - RNA, 20 nt, Artificial Sequence
  Synthetic
gaaagggguggcaggggugg

SEQ ID NO: 13185 - RNA, 21 nt, Artificial Sequence
  Synthetic
agaaagggguggcaggggugg

SEQ ID NO: 13186 - RNA, 22 nt, Artificial Sequence
  Synthetic
aagaaagggguggcaggggugg

SEQ ID NO: 13187 - RNA, 23 nt, Artificial Sequence
  Synthetic
gaagaaagggguggcaggggugg

SEQ ID NO: 13188 - RNA, 24 nt, Artificial Sequence
  Synthetic
agaagaaagggguggcaggggugg

SEQ ID NO: 13189 - RNA, 18 nt, Artificial Sequence
  Synthetic
agggaagaugaauugugg

SEQ ID NO: 13190 - RNA, 19 nt, Artificial Sequence
  Synthetic
cagggaagaugaauugugg

SEQ ID NO: 13191 - RNA, 20 nt, Artificial Sequence
  Synthetic
gcagggaagaugaauugugg

SEQ ID NO: 13192 - RNA, 21 nt, Artificial Sequence
  Synthetic
cgcagggaagaugaauugugg

SEQ ID NO: 13193 - RNA, 22 nt, Artificial Sequence
  Synthetic
gcgcagggaagaugaauugugg

SEQ ID NO: 13194 - RNA, 23 nt, Artificial Sequence
  Synthetic
ggcgcagggaagaugaauugugg

SEQ ID NO: 13195 - RNA, 24 nt, Artificial Sequence
  Synthetic
uggcgcagggaagaugaauugugg

SEQ ID NO: 13196 - RNA, 18 nt, Artificial Sequence
  Synthetic
ugcuugcggcgagacaug

SEQ ID NO: 13197 - RNA, 19 nt, Artificial Sequence
  Synthetic
uugcuugcggcgagacaug

SEQ ID NO: 13198 - RNA, 20 nt, Artificial Sequence
  Synthetic
cuugcuugcggcgagacaug

SEQ ID NO: 13199 - RNA, 21 nt, Artificial Sequence
  Synthetic
ccuugcuugcggcgagacaug

SEQ ID NO: 13200 - RNA, 22 nt, Artificial Sequence
  Synthetic
gccuugcuugcggcgagacaug

SEQ ID NO: 13201 - RNA, 23 nt, Artificial Sequence
  Synthetic
ugccuugcuugcggcgagacaug

SEQ ID NO: 13202 - RNA, 24 nt, Artificial Sequence
  Synthetic
uugccuugcuugcggcgagacaug

SEQ ID NO: 13203 - RNA, 18 nt, Artificial Sequence
  Synthetic
gcgagacauggugggcug

SEQ ID NO: 13204 - RNA, 19 nt, Artificial Sequence
  Synthetic
ggcgagacauggugggcug

SEQ ID NO: 13205 - RNA, 20 nt, Artificial Sequence
  Synthetic
cggcgagacauggugggcug

SEQ ID NO: 13206 - RNA, 21 nt, Artificial Sequence
  Synthetic
gcggcgagacauggugggcug

SEQ ID NO: 13207 - RNA, 22 nt, Artificial Sequence
  Synthetic
ugcggcgagacauggugggcug

SEQ ID NO: 13208 - RNA, 23 nt, Artificial Sequence
  Synthetic
uugcggcgagacauggugggcug

SEQ ID NO: 13209 - RNA, 24 nt, Artificial Sequence
  Synthetic
cuugcggcgagacauggugggcug

SEQ ID NO: 13210 - RNA, 18 nt, Artificial Sequence
  Synthetic
uucccguuugcuuaagug

SEQ ID NO: 13211 - RNA, 19 nt, Artificial Sequence
  Synthetic
auucccguuugcuuaagug

SEQ ID NO: 13212 - RNA, 20 nt, Artificial Sequence
  Synthetic
aauucccguuugcuuaagug

SEQ ID NO: 13213 - RNA, 21 nt, Artificial Sequence
  Synthetic
gaauucccguuugcuuaagug

SEQ ID NO: 13214 - RNA, 22 nt, Artificial Sequence
  Synthetic
agaauucccguuugcuuaagug

SEQ ID NO: 13215 - RNA, 23 nt, Artificial Sequence
  Synthetic
gagaauucccguuugcuuaagug

SEQ ID NO: 13216 - RNA, 24 nt, Artificial Sequence
  Synthetic
cgagaauucccguuugcuuaagug

SEQ ID NO: 13217 - RNA, 18 nt, Artificial Sequence
  Synthetic
acaagccaauggccagug

SEQ ID NO: 13218 - RNA, 19 nt, Artificial Sequence
  Synthetic
gacaagccaauggccagug

SEQ ID NO: 13219 - RNA, 20 nt, Artificial Sequence
  Synthetic
ggacaagccaauggccagug

SEQ ID NO: 13220 - RNA, 21 nt, Artificial Sequence
  Synthetic
aggacaagccaauggccagug

SEQ ID NO: 13221 - RNA, 22 nt, Artificial Sequence
  Synthetic
caggacaagccaauggccagug

SEQ ID NO: 13222 - RNA, 23 nt, Artificial Sequence
  Synthetic
ccaggacaagccaauggccagug

SEQ ID NO: 13223 - RNA, 24 nt, Artificial Sequence
  Synthetic
accaggacaagccaauggccagug

SEQ ID NO: 13224 - RNA, 18 nt, Artificial Sequence
  Synthetic
ugcggggagggggaggug

SEQ ID NO: 13225 - RNA, 19 nt, Artificial Sequence
  Synthetic
gugcggggagggggaggug

SEQ ID NO: 13226 - RNA, 20 nt, Artificial Sequence
  Synthetic
agugcggggagggggaggug

SEQ ID NO: 13227 - RNA, 21 nt, Artificial Sequence
  Synthetic
cagugcggggagggggaggug

SEQ ID NO: 13228 - RNA, 22 nt, Artificial Sequence
  Synthetic
ccagugcggggagggggaggug

SEQ ID NO: 13229 - RNA, 23 nt, Artificial Sequence
  Synthetic
gccagugcggggagggggaggug

SEQ ID NO: 13230 - RNA, 24 nt, Artificial Sequence
  Synthetic
ggccagugcggggagggggaggug

SEQ ID NO: 13231 - RNA, 18 nt, Artificial Sequence
  Synthetic
gggugggaggaaagggug

SEQ ID NO: 13232 - RNA, 19 nt, Artificial Sequence
  Synthetic
ggggugggaggaaagggug

SEQ ID NO: 13233 - RNA, 20 nt, Artificial Sequence
  Synthetic
aggggugggaggaaagggug

SEQ ID NO: 13234 - RNA, 21 nt, Artificial Sequence
  Synthetic
caggggugggaggaaagggug

SEQ ID NO: 13235 - RNA, 22 nt, Artificial Sequence
  Synthetic
gcaggggugggaggaaagggug

SEQ ID NO: 13236 - RNA, 23 nt, Artificial Sequence
  Synthetic
ggcaggggugggaggaaagggug

SEQ ID NO: 13237 - RNA, 24 nt, Artificial Sequence
  Synthetic
uggcaggggugggaggaaagggug

SEQ ID NO: 13238 - RNA, 18 nt, Artificial Sequence
  Synthetic
cgcagggaagaugaauug

SEQ ID NO: 13239 - RNA, 19 nt, Artificial Sequence
  Synthetic
gcgcagggaagaugaauug

SEQ ID NO: 13240 - RNA, 20 nt, Artificial Sequence
  Synthetic
ggcgcagggaagaugaauug

SEQ ID NO: 13241 - RNA, 21 nt, Artificial Sequence
  Synthetic
uggcgcagggaagaugaauug

SEQ ID NO: 13242 - RNA, 22 nt, Artificial Sequence
  Synthetic
auggcgcagggaagaugaauug

SEQ ID NO: 13243 - RNA, 23 nt, Artificial Sequence
  Synthetic
gauggcgcagggaagaugaauug

SEQ ID NO: 13244 - RNA, 24 nt, Artificial Sequence
  Synthetic
agauggcgcagggaagaugaauug

SEQ ID NO: 13245 - RNA, 18 nt, Artificial Sequence
  Synthetic
uugacauccaaaauaaau

SEQ ID NO: 13246 - RNA, 19 nt, Artificial Sequence
  Synthetic
uuugacauccaaaauaaau

SEQ ID NO: 13247 - RNA, 20 nt, Artificial Sequence
  Synthetic
uuuugacauccaaaauaaau

SEQ ID NO: 13248 - RNA, 21 nt, Artificial Sequence
  Synthetic
cuuuugacauccaaaauaaau

SEQ ID NO: 13249 - RNA, 22 nt, Artificial Sequence
  Synthetic
ccuuuugacauccaaaauaaau

SEQ ID NO: 13250 - RNA, 23 nt, Artificial Sequence
  Synthetic
gccuuuugacauccaaaauaaau

SEQ ID NO: 13251 - RNA, 24 nt, Artificial Sequence
  Synthetic
ugccuuuugacauccaaaauaaau

SEQ ID NO: 13252 - RNA, 18 nt, Artificial Sequence
  Synthetic
acaccaauggacacacau

SEQ ID NO: 13253 - RNA, 19 nt, Artificial Sequence
  Synthetic
cacaccaauggacacacau

SEQ ID NO: 13254 - RNA, 20 nt, Artificial Sequence
  Synthetic
ucacaccaauggacacacau

SEQ ID NO: 13255 - RNA, 21 nt, Artificial Sequence
  Synthetic
cucacaccaauggacacacau

SEQ ID NO: 13256 - RNA, 22 nt, Artificial Sequence
  Synthetic
gcucacaccaauggacacacau

SEQ ID NO: 13257 - RNA, 23 nt, Artificial Sequence
  Synthetic
agcucacaccaauggacacacau

SEQ ID NO: 13258 - RNA, 24 nt, Artificial Sequence
  Synthetic
aagcucacaccaauggacacacau

SEQ ID NO: 13259 - RNA, 18 nt, Artificial Sequence
  Synthetic
cgacggcucgguucacau

SEQ ID NO: 13260 - RNA, 19 nt, Artificial Sequence
  Synthetic
acgacggcucgguucacau

SEQ ID NO: 13261 - RNA, 20 nt, Artificial Sequence
  Synthetic
gacgacggcucgguucacau

SEQ ID NO: 13262 - RNA, 21 nt, Artificial Sequence
  Synthetic
ggacgacggcucgguucacau

SEQ ID NO: 13263 - RNA, 22 nt, Artificial Sequence
  Synthetic
cggacgacggcucgguucacau

SEQ ID NO: 13264 - RNA, 23 nt, Artificial Sequence
  Synthetic
gcggacgacggcucgguucacau

SEQ ID NO: 13265 - RNA, 24 nt, Artificial Sequence
  Synthetic
ggcggacgacggcucgguucacau

SEQ ID NO: 13266 - RNA, 18 nt, Artificial Sequence
  Synthetic
ugcggacgugacgucccu

SEQ ID NO: 13267 - RNA, 19 nt, Artificial Sequence
  Synthetic
gugcggacgugacgucccu

SEQ ID NO: 13268 - RNA, 20 nt, Artificial Sequence
  Synthetic
agugcggacgugacgucccu

SEQ ID NO: 13269 - RNA, 21 nt, Artificial Sequence
  Synthetic
aagugcggacgugacgucccu

SEQ ID NO: 13270 - RNA, 22 nt, Artificial Sequence
  Synthetic
caagugcggacgugacgucccu

SEQ ID NO: 13271 - RNA, 23 nt, Artificial Sequence
  Synthetic
ucaagugcggacgugacgucccu

SEQ ID NO: 13272 - RNA, 24 nt, Artificial Sequence
  Synthetic
uucaagugcggacgugacgucccu

SEQ ID NO: 13273 - RNA, 18 nt, Artificial Sequence
  Synthetic
ggcgagacauggugggcu

SEQ ID NO: 13274 - RNA, 19 nt, Artificial Sequence
  Synthetic
cggcgagacauggugggcu

SEQ ID NO: 13275 - RNA, 20 nt, Artificial Sequence
  Synthetic
gcggcgagacauggugggcu

SEQ ID NO: 13276 - RNA, 21 nt, Artificial Sequence
  Synthetic
ugcggcgagacauggugggcu

SEQ ID NO: 13277 - RNA, 22 nt, Artificial Sequence
  Synthetic
uugcggcgagacauggugggcu

SEQ ID NO: 13278 - RNA, 23 nt, Artificial Sequence
  Synthetic
cuugcggcgagacauggugggcu

SEQ ID NO: 13279 - RNA, 24 nt, Artificial Sequence
  Synthetic
gcuugcggcgagacauggugggcu

SEQ ID NO: 13280 - RNA, 18 nt, Artificial Sequence
  Synthetic
cucuuuuaccucgacucu

SEQ ID NO: 13281 - RNA, 19 nt, Artificial Sequence
  Synthetic
ucucuuuuaccucgacucu

SEQ ID NO: 13282 - RNA, 20 nt, Artificial Sequence
  Synthetic
aucucuuuuaccucgacucu

SEQ ID NO: 13283 - RNA, 21 nt, Artificial Sequence
  Synthetic
uaucucuuuuaccucgacucu

SEQ ID NO: 13284 - RNA, 22 nt, Artificial Sequence
  Synthetic
uuaucucuuuuaccucgacucu

SEQ ID NO: 13285 - RNA, 23 nt, Artificial Sequence
  Synthetic
uuuaucucuuuuaccucgacucu

SEQ ID NO: 13286 - RNA, 24 nt, Artificial Sequence
  Synthetic
cuuuaucucuuuuaccucgacucu

SEQ ID NO: 13287 - RNA, 18 nt, Artificial Sequence
  Synthetic
ugagcugcaaguucaagu

SEQ ID NO: 13288 - RNA, 19 nt, Artificial Sequence
  Synthetic
cugagcugcaaguucaagu

SEQ ID NO: 13289 - RNA, 20 nt, Artificial Sequence
  Synthetic
ccugagcugcaaguucaagu

SEQ ID NO: 13290 - RNA, 21 nt, Artificial Sequence
  Synthetic
cccugagcugcaaguucaagu

SEQ ID NO: 13291 - RNA, 22 nt, Artificial Sequence
  Synthetic
ccccugagcugcaaguucaagu

SEQ ID NO: 13292 - RNA, 23 nt, Artificial Sequence
  Synthetic
cccccugagcugcaaguucaagu

SEQ ID NO: 13293 - RNA, 24 nt, Artificial Sequence
  Synthetic
ccccccugagcugcaaguucaagu

SEQ ID NO: 13294 - RNA, 18 nt, Artificial Sequence
  Synthetic
gacaagccaauggccagu

SEQ ID NO: 13295 - RNA, 19 nt, Artificial Sequence
  Synthetic
ggacaagccaauggccagu

SEQ ID NO: 13296 - RNA, 20 nt, Artificial Sequence
  Synthetic
aggacaagccaauggccagu

SEQ ID NO: 13297 - RNA, 21 nt, Artificial Sequence
  Synthetic
caggacaagccaauggccagu

SEQ ID NO: 13298 - RNA, 22 nt, Artificial Sequence
  Synthetic
ccaggacaagccaauggccagu

SEQ ID NO: 13299 - RNA, 23 nt, Artificial Sequence
  Synthetic
accaggacaagccaauggccagu

SEQ ID NO: 13300 - RNA, 24 nt, Artificial Sequence
  Synthetic
gaccaggacaagccaauggccagu

SEQ ID NO: 13301 - RNA, 18 nt, Artificial Sequence
  Synthetic
cccugcgaacuugaacgu

SEQ ID NO: 13302 - RNA, 19 nt, Artificial Sequence
  Synthetic
ucccugcgaacuugaacgu

SEQ ID NO: 13303 - RNA, 20 nt, Artificial Sequence
  Synthetic
gucccugcgaacuugaacgu

SEQ ID NO: 13304 - RNA, 21 nt, Artificial Sequence
  Synthetic
cgucccugcgaacuugaacgu

SEQ ID NO: 13305 - RNA, 22 nt, Artificial Sequence
  Synthetic
acgucccugcgaacuugaacgu

SEQ ID NO: 13306 - RNA, 23 nt, Artificial Sequence
  Synthetic
gacgucccugcgaacuugaacgu

SEQ ID NO: 13307 - RNA, 24 nt, Artificial Sequence
  Synthetic
ugacgucccugcgaacuugaacgu

SEQ ID NO: 13308 - RNA, 18 nt, Artificial Sequence
  Synthetic
gugcggggagggggaggu

SEQ ID NO: 13309 - RNA, 19 nt, Artificial Sequence
  Synthetic
agugcggggagggggaggu

SEQ ID NO: 13310 - RNA, 20 nt, Artificial Sequence
  Synthetic
cagugcggggagggggaggu

SEQ ID NO: 13311 - RNA, 21 nt, Artificial Sequence
  Synthetic
ccagugcggggagggggaggu

SEQ ID NO: 13312 - RNA, 22 nt, Artificial Sequence
  Synthetic
gccagugcggggagggggaggu

SEQ ID NO: 13313 - RNA, 23 nt, Artificial Sequence
  Synthetic
ggccagugcggggagggggaggu

SEQ ID NO: 13314 - RNA, 24 nt, Artificial Sequence
  Synthetic
uggccagugcggggagggggaggu

SEQ ID NO: 13315 - RNA, 18 nt, Artificial Sequence
  Synthetic
ggggugggaggaaagggu

SEQ ID NO: 13316 - RNA, 19 nt, Artificial Sequence
  Synthetic
aggggugggaggaaagggu

SEQ ID NO: 13317 - RNA, 20 nt, Artificial Sequence
  Synthetic
caggggugggaggaaagggu

SEQ ID NO: 13318 - RNA, 21 nt, Artificial Sequence
  Synthetic
gcaggggugggaggaaagggu

SEQ ID NO: 13319 - RNA, 22 nt, Artificial Sequence
  Synthetic
ggcaggggugggaggaaagggu

SEQ ID NO: 13320 - RNA, 23 nt, Artificial Sequence
  Synthetic
uggcaggggugggaggaaagggu

SEQ ID NO: 13321 - RNA, 24 nt, Artificial Sequence
  Synthetic
guggcaggggugggaggaaagggu

SEQ ID NO: 13322 - RNA, 18 nt, Artificial Sequence
  Synthetic
acaucgggagagccgggu

SEQ ID NO: 13323 - RNA, 19 nt, Artificial Sequence
  Synthetic
cacaucgggagagccgggu

SEQ ID NO: 13324 - RNA, 20 nt, Artificial Sequence
  Synthetic
ucacaucgggagagccgggu

SEQ ID NO: 13325 - RNA, 21 nt, Artificial Sequence
  Synthetic
uucacaucgggagagccgggu

SEQ ID NO: 13326 - RNA, 22 nt, Artificial Sequence
  Synthetic
guucacaucgggagagccgggu

SEQ ID NO: 13327 - RNA, 23 nt, Artificial Sequence
  Synthetic
gguucacaucgggagagccgggu

SEQ ID NO: 13328 - RNA, 24 nt, Artificial Sequence
  Synthetic
cgguucacaucgggagagccgggu

SEQ ID NO: 13329 - RNA, 18 nt, Artificial Sequence
  Synthetic
gaaagggguggcaggggu

SEQ ID NO: 13330 - RNA, 19 nt, Artificial Sequence
  Synthetic
agaaagggguggcaggggu

SEQ ID NO: 13331 - RNA, 20 nt, Artificial Sequence
  Synthetic
aagaaagggguggcaggggu

SEQ ID NO: 13332 - RNA, 21 nt, Artificial Sequence
  Synthetic
gaagaaagggguggcaggggu

SEQ ID NO: 13333 - RNA, 22 nt, Artificial Sequence
  Synthetic
agaagaaagggguggcaggggu

SEQ ID NO: 13334 - RNA, 23 nt, Artificial Sequence
  Synthetic
gagaagaaagggguggcaggggu

SEQ ID NO: 13335 - RNA, 24 nt, Artificial Sequence
  Synthetic
agagaagaaagggguggcaggggu

SEQ ID NO: 13336 - RNA, 18 nt, Artificial Sequence
  Synthetic
gcagggaagaugaauugu

SEQ ID NO: 13337 - RNA, 19 nt, Artificial Sequence
  Synthetic
cgcagggaagaugaauugu

SEQ ID NO: 13338 - RNA, 20 nt, Artificial Sequence
  Synthetic
gcgcagggaagaugaauugu

SEQ ID NO: 13339 - RNA, 21 nt, Artificial Sequence
  Synthetic
ggcgcagggaagaugaauugu

SEQ ID NO: 13340 - RNA, 22 nt, Artificial Sequence
  Synthetic
uggcgcagggaagaugaauugu

SEQ ID NO: 13341 - RNA, 23 nt, Artificial Sequence
  Synthetic
auggcgcagggaagaugaauugu

SEQ ID NO: 13342 - RNA, 24 nt, Artificial Sequence
  Synthetic
gauggcgcagggaagaugaauugu

SEQ ID NO: 13343 - RNA, 18 nt, Artificial Sequence
  Synthetic
gcgcagggaagaugaauu

SEQ ID NO: 13344 - RNA, 19 nt, Artificial Sequence
  Synthetic
ggcgcagggaagaugaauu

SEQ ID NO: 13345 - RNA, 20 nt, Artificial Sequence
  Synthetic
uggcgcagggaagaugaauu

SEQ ID NO: 13346 - RNA, 21 nt, Artificial Sequence
  Synthetic
auggcgcagggaagaugaauu

SEQ ID NO: 13347 - RNA, 22 nt, Artificial Sequence
  Synthetic
gauggcgcagggaagaugaauu

SEQ ID NO: 13348 - RNA, 23 nt, Artificial Sequence
  Synthetic
agauggcgcagggaagaugaauu

SEQ ID NO: 13349 - RNA, 24 nt, Artificial Sequence
  Synthetic
aagauggcgcagggaagaugaauu

SEQ ID NO: 13350 - RNA, 18 nt, Artificial Sequence
  Synthetic
gcaggacuagaagcaaaa

SEQ ID NO: 13351 - RNA, 19 nt, Artificial Sequence
  Synthetic
cgcaggacuagaagcaaaa

SEQ ID NO: 13352 - RNA, 20 nt, Artificial Sequence
  Synthetic
gcgcaggacuagaagcaaaa

SEQ ID NO: 13353 - RNA, 21 nt, Artificial Sequence
  Synthetic
cgcgcaggacuagaagcaaaa

SEQ ID NO: 13354 - RNA, 22 nt, Artificial Sequence
  Synthetic
gcgcgcaggacuagaagcaaaa

SEQ ID NO: 13355 - RNA, 23 nt, Artificial Sequence
  Synthetic
agcgcgcaggacuagaagcaaaa

SEQ ID NO: 13356 - RNA, 24 nt, Artificial Sequence
  Synthetic
gagcgcgcaggacuagaagcaaaa

SEQ ID NO: 13357 - RNA, 18 nt, Artificial Sequence
  Synthetic
ccccagcacuuaagcaaa

SEQ ID NO: 13358 - RNA, 19 nt, Artificial Sequence
  Synthetic
accccagcacuuaagcaaa

SEQ ID NO: 13359 - RNA, 20 nt, Artificial Sequence
  Synthetic
aaccccagcacuuaagcaaa

SEQ ID NO: 13360 - RNA, 21 nt, Artificial Sequence
  Synthetic
aaaccccagcacuuaagcaaa

SEQ ID NO: 13361 - RNA, 22 nt, Artificial Sequence
  Synthetic
caaaccccagcacuuaagcaaa

SEQ ID NO: 13362 - RNA, 23 nt, Artificial Sequence
  Synthetic
gcaaaccccagcacuuaagcaaa

SEQ ID NO: 13363 - RNA, 24 nt, Artificial Sequence
  Synthetic
ggcaaaccccagcacuuaagcaaa

SEQ ID NO: 13364 - RNA, 18 nt, Artificial Sequence
  Synthetic
cgagguaaaagagauaaa

SEQ ID NO: 13365 - RNA, 19 nt, Artificial Sequence
  Synthetic
ucgagguaaaagagauaaa

SEQ ID NO: 13366 - RNA, 20 nt, Artificial Sequence
  Synthetic
gucgagguaaaagagauaaa

SEQ ID NO: 13367 - RNA, 21 nt, Artificial Sequence
  Synthetic
agucgagguaaaagagauaaa

SEQ ID NO: 13368 - RNA, 22 nt, Artificial Sequence
  Synthetic
gagucgagguaaaagagauaaa

SEQ ID NO: 13369 - RNA, 23 nt, Artificial Sequence
  Synthetic
agagucgagguaaaagagauaaa

SEQ ID NO: 13370 - RNA, 24 nt, Artificial Sequence
  Synthetic
gagagucgagguaaaagagauaaa

SEQ ID NO: 13371 - RNA, 18 nt, Artificial Sequence
  Synthetic
accccagcacuuaagcaa

SEQ ID NO: 13372 - RNA, 19 nt, Artificial Sequence
  Synthetic
aaccccagcacuuaagcaa

SEQ ID NO: 13373 - RNA, 20 nt, Artificial Sequence
  Synthetic
aaaccccagcacuuaagcaa

SEQ ID NO: 13374 - RNA, 21 nt, Artificial Sequence
  Synthetic
caaaccccagcacuuaagcaa

SEQ ID NO: 13375 - RNA, 22 nt, Artificial Sequence
  Synthetic
gcaaaccccagcacuuaagcaa

SEQ ID NO: 13376 - RNA, 23 nt, Artificial Sequence
  Synthetic
ggcaaaccccagcacuuaagcaa

SEQ ID NO: 13377 - RNA, 24 nt, Artificial Sequence
  Synthetic
aggcaaaccccagcacuuaagcaa

SEQ ID NO: 13378 - RNA, 18 nt, Artificial Sequence
  Synthetic
cggcucucccgaugugaa

SEQ ID NO: 13379 - RNA, 19 nt, Artificial Sequence
  Synthetic
ccggcucucccgaugugaa

SEQ ID NO: 13380 - RNA, 20 nt, Artificial Sequence
  Synthetic
cccggcucucccgaugugaa

SEQ ID NO: 13381 - RNA, 21 nt, Artificial Sequence
  Synthetic
acccggcucucccgaugugaa

SEQ ID NO: 13382 - RNA, 22 nt, Artificial Sequence
  Synthetic
aacccggcucucccgaugugaa

SEQ ID NO: 13383 - RNA, 23 nt, Artificial Sequence
  Synthetic
uaacccggcucucccgaugugaa

SEQ ID NO: 13384 - RNA, 24 nt, Artificial Sequence
  Synthetic
cuaacccggcucucccgaugugaa

SEQ ID NO: 13385 - RNA, 18 nt, Artificial Sequence
  Synthetic
ucgagguaaaagagauaa

SEQ ID NO: 13386 - RNA, 19 nt, Artificial Sequence
  Synthetic
gucgagguaaaagagauaa

SEQ ID NO: 13387 - RNA, 20 nt, Artificial Sequence
  Synthetic
agucgagguaaaagagauaa

SEQ ID NO: 13388 - RNA, 21 nt, Artificial Sequence
  Synthetic
gagucgagguaaaagagauaa

SEQ ID NO: 13389 - RNA, 22 nt, Artificial Sequence
  Synthetic
agagucgagguaaaagagauaa

SEQ ID NO: 13390 - RNA, 23 nt, Artificial Sequence
  Synthetic
gagagucgagguaaaagagauaa

SEQ ID NO: 13391 - RNA, 24 nt, Artificial Sequence
  Synthetic
cgagagucgagguaaaagagauaa

SEQ ID NO: 13392 - RNA, 18 nt, Artificial Sequence
  Synthetic
cuccgagagucgagguaa

SEQ ID NO: 13393 - RNA, 19 nt, Artificial Sequence
  Synthetic
ccuccgagagucgagguaa

SEQ ID NO: 13394 - RNA, 20 nt, Artificial Sequence
  Synthetic
accuccgagagucgagguaa

SEQ ID NO: 13395 - RNA, 21 nt, Artificial Sequence
  Synthetic
aaccuccgagagucgagguaa

SEQ ID NO: 13396 - RNA, 22 nt, Artificial Sequence
  Synthetic
aaaccuccgagagucgagguaa

SEQ ID NO: 13397 - RNA, 23 nt, Artificial Sequence
  Synthetic
aaaaccuccgagagucgagguaa

SEQ ID NO: 13398 - RNA, 24 nt, Artificial Sequence
  Synthetic
aaaaaccuccgagagucgagguaa

SEQ ID NO: 13399 - RNA, 18 nt, Artificial Sequence
  Synthetic
acuugaacuugcagcuca

SEQ ID NO: 13400 - RNA, 19 nt, Artificial Sequence
  Synthetic
cacuugaacuugcagcuca

SEQ ID NO: 13401 - RNA, 20 nt, Artificial Sequence
  Synthetic
gcacuugaacuugcagcuca

SEQ ID NO: 13402 - RNA, 21 nt, Artificial Sequence
  Synthetic
cgcacuugaacuugcagcuca

SEQ ID NO: 13403 - RNA, 22 nt, Artificial Sequence
  Synthetic
ccgcacuugaacuugcagcuca

SEQ ID NO: 13404 - RNA, 23 nt, Artificial Sequence
  Synthetic
uccgcacuugaacuugcagcuca

SEQ ID NO: 13405 - RNA, 24 nt, Artificial Sequence
  Synthetic
guccgcacuugaacuugcagcuca

SEQ ID NO: 13406 - RNA, 18 nt, Artificial Sequence
  Synthetic
gcaaaagcgagggggaga

SEQ ID NO: 13407 - RNA, 19 nt, Artificial Sequence
  Synthetic
agcaaaagcgagggggaga

SEQ ID NO: 13408 - RNA, 20 nt, Artificial Sequence
  Synthetic
aagcaaaagcgagggggaga

SEQ ID NO: 13409 - RNA, 21 nt, Artificial Sequence
  Synthetic
gaagcaaaagcgagggggaga

SEQ ID NO: 13410 - RNA, 22 nt, Artificial Sequence
  Synthetic
agaagcaaaagcgagggggaga

SEQ ID NO: 13411 - RNA, 23 nt, Artificial Sequence
  Synthetic
uagaagcaaaagcgagggggaga

SEQ ID NO: 13412 - RNA, 24 nt, Artificial Sequence
  Synthetic
cuagaagcaaaagcgagggggaga

SEQ ID NO: 13413 - RNA, 18 nt, Artificial Sequence
  Synthetic
gacuagaagcaaaagcga

SEQ ID NO: 13414 - RNA, 19 nt, Artificial Sequence
  Synthetic
ggacuagaagcaaaagcga

SEQ ID NO: 13415 - RNA, 20 nt, Artificial Sequence
  Synthetic
aggacuagaagcaaaagcga

SEQ ID NO: 13416 - RNA, 21 nt, Artificial Sequence
  Synthetic
caggacuagaagcaaaagcga

SEQ ID NO: 13417 - RNA, 22 nt, Artificial Sequence
  Synthetic
gcaggacuagaagcaaaagcga

SEQ ID NO: 13418 - RNA, 23 nt, Artificial Sequence
  Synthetic
cgcaggacuagaagcaaaagcga

SEQ ID NO: 13419 - RNA, 24 nt, Artificial Sequence
  Synthetic
gcgcaggacuagaagcaaaagcga

SEQ ID NO: 13420 - RNA, 18 nt, Artificial Sequence
  Synthetic
aagcaaaagcgaggggga

SEQ ID NO: 13421 - RNA, 19 nt, Artificial Sequence
  Synthetic
gaagcaaaagcgaggggga

SEQ ID NO: 13422 - RNA, 20 nt, Artificial Sequence
  Synthetic
agaagcaaaagcgaggggga

SEQ ID NO: 13423 - RNA, 21 nt, Artificial Sequence
  Synthetic
uagaagcaaaagcgaggggga

SEQ ID NO: 13424 - RNA, 22 nt, Artificial Sequence
  Synthetic
cuagaagcaaaagcgaggggga

SEQ ID NO: 13425 - RNA, 23 nt, Artificial Sequence
  Synthetic
acuagaagcaaaagcgaggggga

SEQ ID NO: 13426 - RNA, 24 nt, Artificial Sequence
  Synthetic
gacuagaagcaaaagcgaggggga

SEQ ID NO: 13427 - RNA, 18 nt, Artificial Sequence
  Synthetic
gucgagguaaaagagaua

SEQ ID NO: 13428 - RNA, 19 nt, Artificial Sequence
  Synthetic
agucgagguaaaagagaua

SEQ ID NO: 13429 - RNA, 20 nt, Artificial Sequence
  Synthetic
gagucgagguaaaagagaua

SEQ ID NO: 13430 - RNA, 21 nt, Artificial Sequence
  Synthetic
agagucgagguaaaagagaua

SEQ ID NO: 13431 - RNA, 22 nt, Artificial Sequence
  Synthetic
gagagucgagguaaaagagaua

SEQ ID NO: 13432 - RNA, 23 nt, Artificial Sequence
  Synthetic
cgagagucgagguaaaagagaua

SEQ ID NO: 13433 - RNA, 24 nt, Artificial Sequence
  Synthetic
ccgagagucgagguaaaagagaua

SEQ ID NO: 13434 - RNA, 18 nt, Artificial Sequence
  Synthetic
gggacgucacguccgcac

SEQ ID NO: 13435 - RNA, 19 nt, Artificial Sequence
  Synthetic
agggacgucacguccgcac

SEQ ID NO: 13436 - RNA, 20 nt, Artificial Sequence
  Synthetic
cagggacgucacguccgcac

SEQ ID NO: 13437 - RNA, 21 nt, Artificial Sequence
  Synthetic
gcagggacgucacguccgcac

SEQ ID NO: 13438 - RNA, 22 nt, Artificial Sequence
  Synthetic
cgcagggacgucacguccgcac

SEQ ID NO: 13439 - RNA, 23 nt, Artificial Sequence
  Synthetic
ucgcagggacgucacguccgcac

SEQ ID NO: 13440 - RNA, 24 nt, Artificial Sequence
  Synthetic
uucgcagggacgucacguccgcac

SEQ ID NO: 13441 - RNA, 18 nt, Artificial Sequence
  Synthetic
auaauuauuaauaaucac

SEQ ID NO: 13442 - RNA, 19 nt, Artificial Sequence
  Synthetic
aauaauuauuaauaaucac

SEQ ID NO: 13443 - RNA, 20 nt, Artificial Sequence
  Synthetic
uaauaauuauuaauaaucac

SEQ ID NO: 13444 - RNA, 21 nt, Artificial Sequence
  Synthetic
auaauaauuauuaauaaucac

SEQ ID NO: 13445 - RNA, 22 nt, Artificial Sequence
  Synthetic
aauaauaauuauuaauaaucac

SEQ ID NO: 13446 - RNA, 23 nt, Artificial Sequence
  Synthetic
uaauaauaauuauuaauaaucac

SEQ ID NO: 13447 - RNA, 24 nt, Artificial Sequence
  Synthetic
guaauaauaauuauuaauaaucac

SEQ ID NO: 13448 - RNA, 18 nt, Artificial Sequence
  Synthetic
cauuuuuaaauuuuucac

SEQ ID NO: 13449 - RNA, 19 nt, Artificial Sequence
  Synthetic
gcauuuuuaaauuuuucac

SEQ ID NO: 13450 - RNA, 20 nt, Artificial Sequence
  Synthetic
ugcauuuuuaaauuuuucac

SEQ ID NO: 13451 - RNA, 21 nt, Artificial Sequence
  Synthetic
augcauuuuuaaauuuuucac

SEQ ID NO: 13452 - RNA, 22 nt, Artificial Sequence
  Synthetic
caugcauuuuuaaauuuuucac

SEQ ID NO: 13453 - RNA, 23 nt, Artificial Sequence
  Synthetic
gcaugcauuuuuaaauuuuucac

SEQ ID NO: 13454 - RNA, 24 nt, Artificial Sequence
  Synthetic
ugcaugcauuuuuaaauuuuucac

SEQ ID NO: 13455 - RNA, 18 nt, Artificial Sequence
  Synthetic
cacgagagcgcgcaggac

SEQ ID NO: 13456 - RNA, 19 nt, Artificial Sequence
  Synthetic
ucacgagagcgcgcaggac

SEQ ID NO: 13457 - RNA, 20 nt, Artificial Sequence
  Synthetic
aucacgagagcgcgcaggac

SEQ ID NO: 13458 - RNA, 21 nt, Artificial Sequence
  Synthetic
aaucacgagagcgcgcaggac

SEQ ID NO: 13459 - RNA, 22 nt, Artificial Sequence
  Synthetic
uaaucacgagagcgcgcaggac

SEQ ID NO: 13460 - RNA, 23 nt, Artificial Sequence
  Synthetic
auaaucacgagagcgcgcaggac

SEQ ID NO: 13461 - RNA, 24 nt, Artificial Sequence
  Synthetic
aauaaucacgagagcgcgcaggac

SEQ ID NO: 13462 - RNA, 18 nt, Artificial Sequence
  Synthetic
ucggcccgccccuccccc

SEQ ID NO: 13463 - RNA, 19 nt, Artificial Sequence
  Synthetic
cucggcccgccccuccccc

SEQ ID NO: 13464 - RNA, 20 nt, Artificial Sequence
  Synthetic
ccucggcccgccccuccccc

SEQ ID NO: 13465 - RNA, 21 nt, Artificial Sequence
  Synthetic
cccucggcccgccccuccccc

SEQ ID NO: 13466 - RNA, 22 nt, Artificial Sequence
  Synthetic
ccccucggcccgccccuccccc

SEQ ID NO: 13467 - RNA, 23 nt, Artificial Sequence
  Synthetic
uccccucggcccgccccuccccc

SEQ ID NO: 13468 - RNA, 24 nt, Artificial Sequence
  Synthetic
cuccccucggcccgccccuccccc

SEQ ID NO: 13469 - RNA, 18 nt, Artificial Sequence
  Synthetic
cucggcccgccccucccc

SEQ ID NO: 13470 - RNA, 19 nt, Artificial Sequence
  Synthetic
ccucggcccgccccucccc

SEQ ID NO: 13471 - RNA, 20 nt, Artificial Sequence
  Synthetic
cccucggcccgccccucccc

SEQ ID NO: 13472 - RNA, 21 nt, Artificial Sequence
  Synthetic
ccccucggcccgccccucccc

SEQ ID NO: 13473 - RNA, 22 nt, Artificial Sequence
  Synthetic
uccccucggcccgccccucccc

SEQ ID NO: 13474 - RNA, 23 nt, Artificial Sequence
  Synthetic
cuccccucggcccgccccucccc

SEQ ID NO: 13475 - RNA, 24 nt, Artificial Sequence
  Synthetic
ccuccccucggcccgccccucccc

SEQ ID NO: 13476 - RNA, 18 nt, Artificial Sequence
  Synthetic
ccucggcccgccccuccc

SEQ ID NO: 13477 - RNA, 19 nt, Artificial Sequence
  Synthetic
cccucggcccgccccuccc

SEQ ID NO: 13478 - RNA, 20 nt, Artificial Sequence
  Synthetic
ccccucggcccgccccuccc

SEQ ID NO: 13479 - RNA, 21 nt, Artificial Sequence
  Synthetic
uccccucggcccgccccuccc

SEQ ID NO: 13480 - RNA, 22 nt, Artificial Sequence
  Synthetic
cuccccucggcccgccccuccc

SEQ ID NO: 13481 - RNA, 23 nt, Artificial Sequence
  Synthetic
ccuccccucggcccgccccuccc

SEQ ID NO: 13482 - RNA, 24 nt, Artificial Sequence
  Synthetic
cccuccccucggcccgccccuccc

SEQ ID NO: 13483 - RNA, 18 nt, Artificial Sequence
  Synthetic
gggccgcgucuggcgucc

SEQ ID NO: 13484 - RNA, 19 nt, Artificial Sequence
  Synthetic
ggggccgcgucuggcgucc

SEQ ID NO: 13485 - RNA, 20 nt, Artificial Sequence
  Synthetic
gggggccgcgucuggcgucc

SEQ ID NO: 13486 - RNA, 21 nt, Artificial Sequence
  Synthetic
cgggggccgcgucuggcgucc

SEQ ID NO: 13487 - RNA, 22 nt, Artificial Sequence
  Synthetic
ccgggggccgcgucuggcgucc

SEQ ID NO: 13488 - RNA, 23 nt, Artificial Sequence
  Synthetic
cccgggggccgcgucuggcgucc

SEQ ID NO: 13489 - RNA, 24 nt, Artificial Sequence
  Synthetic
ccccgggggccgcgucuggcgucc

SEQ ID NO: 13490 - RNA, 18 nt, Artificial Sequence
  Synthetic
aggacuagaagcaaaagc

SEQ ID NO: 13491 - RNA, 19 nt, Artificial Sequence
  Synthetic
caggacuagaagcaaaagc

SEQ ID NO: 13492 - RNA, 20 nt, Artificial Sequence
  Synthetic
gcaggacuagaagcaaaagc

SEQ ID NO: 13493 - RNA, 21 nt, Artificial Sequence
  Synthetic
cgcaggacuagaagcaaaagc

SEQ ID NO: 13494 - RNA, 22 nt, Artificial Sequence
  Synthetic
gcgcaggacuagaagcaaaagc

SEQ ID NO: 13495 - RNA, 23 nt, Artificial Sequence
  Synthetic
cgcgcaggacuagaagcaaaagc

SEQ ID NO: 13496 - RNA, 24 nt, Artificial Sequence
  Synthetic
gcgcgcaggacuagaagcaaaagc

SEQ ID NO: 13497 - RNA, 18 nt, Artificial Sequence
  Synthetic
ccugacguucaaguucgc

SEQ ID NO: 13498 - RNA, 19 nt, Artificial Sequence
  Synthetic
uccugacguucaaguucgc

SEQ ID NO: 13499 - RNA, 20 nt, Artificial Sequence
  Synthetic
cuccugacguucaaguucgc

SEQ ID NO: 13500 - RNA, 21 nt, Artificial Sequence
  Synthetic
acuccugacguucaaguucgc

SEQ ID NO: 13501 - RNA, 22 nt, Artificial Sequence
  Synthetic
gacuccugacguucaaguucgc

SEQ ID NO: 13502 - RNA, 23 nt, Artificial Sequence
  Synthetic
agacuccugacguucaaguucgc

SEQ ID NO: 13503 - RNA, 24 nt, Artificial Sequence
  Synthetic
cagacuccugacguucaaguucgc

SEQ ID NO: 13504 - RNA, 18 nt, Artificial Sequence
  Synthetic
uaauaauuauuaauaauc

SEQ ID NO: 13505 - RNA, 19 nt, Artificial Sequence
  Synthetic
auaauaauuauuaauaauc

SEQ ID NO: 13506 - RNA, 20 nt, Artificial Sequence
  Synthetic
aauaauaauuauuaauaauc

SEQ ID NO: 13507 - RNA, 21 nt, Artificial Sequence
  Synthetic
uaauaauaauuauuaauaauc

SEQ ID NO: 13508 - RNA, 22 nt, Artificial Sequence
  Synthetic
guaauaauaauuauuaauaauc

SEQ ID NO: 13509 - RNA, 23 nt, Artificial Sequence
  Synthetic
aguaauaauaauuauuaauaauc

SEQ ID NO: 13510 - RNA, 24 nt, Artificial Sequence
  Synthetic
uaguaauaauaauuauuaauaauc

SEQ ID NO: 13511 - RNA, 18 nt, Artificial Sequence
  Synthetic
aaaaacccucaucccauc

SEQ ID NO: 13512 - RNA, 19 nt, Artificial Sequence
  Synthetic
aaaaaacccucaucccauc

SEQ ID NO: 13513 - RNA, 20 nt, Artificial Sequence
  Synthetic
gaaaaaacccucaucccauc

SEQ ID NO: 13514 - RNA, 21 nt, Artificial Sequence
  Synthetic
ggaaaaaacccucaucccauc

SEQ ID NO: 13515 - RNA, 22 nt, Artificial Sequence
  Synthetic
gggaaaaaacccucaucccauc

SEQ ID NO: 13516 - RNA, 23 nt, Artificial Sequence
  Synthetic
ggggaaaaaacccucaucccauc

SEQ ID NO: 13517 - RNA, 24 nt, Artificial Sequence
  Synthetic
gggggaaaaaacccucaucccauc

SEQ ID NO: 13518 - RNA, 18 nt, Artificial Sequence
  Synthetic
cacuugaacuugcagcuc

SEQ ID NO: 13519 - RNA, 19 nt, Artificial Sequence
  Synthetic
gcacuugaacuugcagcuc

SEQ ID NO: 13520 - RNA, 20 nt, Artificial Sequence
  Synthetic
cgcacuugaacuugcagcuc

SEQ ID NO: 13521 - RNA, 21 nt, Artificial Sequence
  Synthetic
ccgcacuugaacuugcagcuc

SEQ ID NO: 13522 - RNA, 22 nt, Artificial Sequence
  Synthetic
uccgcacuugaacuugcagcuc

SEQ ID NO: 13523 - RNA, 23 nt, Artificial Sequence
  Synthetic
guccgcacuugaacuugcagcuc

SEQ ID NO: 13524 - RNA, 24 nt, Artificial Sequence
  Synthetic
cguccgcacuugaacuugcagcuc

SEQ ID NO: 13525 - RNA, 18 nt, Artificial Sequence
  Synthetic
ugcauuuuuaaauuuuuc

SEQ ID NO: 13526 - RNA, 19 nt, Artificial Sequence
  Synthetic
augcauuuuuaaauuuuuc

SEQ ID NO: 13527 - RNA, 20 nt, Artificial Sequence
  Synthetic
caugcauuuuuaaauuuuuc

SEQ ID NO: 13528 - RNA, 21 nt, Artificial Sequence
  Synthetic
gcaugcauuuuuaaauuuuuc

SEQ ID NO: 13529 - RNA, 22 nt, Artificial Sequence
  Synthetic
ugcaugcauuuuuaaauuuuuc

SEQ ID NO: 13530 - RNA, 23 nt, Artificial Sequence
  Synthetic
gugcaugcauuuuuaaauuuuuc

SEQ ID NO: 13531 - RNA, 24 nt, Artificial Sequence
  Synthetic
ugugcaugcauuuuuaaauuuuuc

SEQ ID NO: 13532 - RNA, 18 nt, Artificial Sequence
  Synthetic
gagguaaaagagauaaag

SEQ ID NO: 13533 - RNA, 19 nt, Artificial Sequence
  Synthetic
cgagguaaaagagauaaag

SEQ ID NO: 13534 - RNA, 20 nt, Artificial Sequence
  Synthetic
ucgagguaaaagagauaaag

SEQ ID NO: 13535 - RNA, 21 nt, Artificial Sequence
  Synthetic
gucgagguaaaagagauaaag

SEQ ID NO: 13536 - RNA, 22 nt, Artificial Sequence
  Synthetic
agucgagguaaaagagauaaag

SEQ ID NO: 13537 - RNA, 23 nt, Artificial Sequence
  Synthetic
gagucgagguaaaagagauaaag

SEQ ID NO: 13538 - RNA, 24 nt, Artificial Sequence
  Synthetic
agagucgagguaaaagagauaaag

SEQ ID NO: 13539 - RNA, 18 nt, Artificial Sequence
  Synthetic
cuugaacuugcagcucag

SEQ ID NO: 13540 - RNA, 19 nt, Artificial Sequence
  Synthetic
acuugaacuugcagcucag

SEQ ID NO: 13541 - RNA, 20 nt, Artificial Sequence
  Synthetic
cacuugaacuugcagcucag

SEQ ID NO: 13542 - RNA, 21 nt, Artificial Sequence
  Synthetic
gcacuugaacuugcagcucag

SEQ ID NO: 13543 - RNA, 22 nt, Artificial Sequence
  Synthetic
cgcacuugaacuugcagcucag

SEQ ID NO: 13544 - RNA, 23 nt, Artificial Sequence
  Synthetic
ccgcacuugaacuugcagcucag

SEQ ID NO: 13545 - RNA, 24 nt, Artificial Sequence
  Synthetic
uccgcacuugaacuugcagcucag

SEQ ID NO: 13546 - RNA, 18 nt, Artificial Sequence
  Synthetic
gagaaaaaccuccgagag

SEQ ID NO: 13547 - RNA, 19 nt, Artificial Sequence
  Synthetic
cgagaaaaaccuccgagag

SEQ ID NO: 13548 - RNA, 20 nt, Artificial Sequence
  Synthetic
acgagaaaaaccuccgagag

SEQ ID NO: 13549 - RNA, 21 nt, Artificial Sequence
  Synthetic
cacgagaaaaaccuccgagag

SEQ ID NO: 13550 - RNA, 22 nt, Artificial Sequence
  Synthetic
ucacgagaaaaaccuccgagag

SEQ ID NO: 13551 - RNA, 23 nt, Artificial Sequence
  Synthetic
uucacgagaaaaaccuccgagag

SEQ ID NO: 13552 - RNA, 24 nt, Artificial Sequence
  Synthetic
uuucacgagaaaaaccuccgagag

SEQ ID NO: 13553 - RNA, 18 nt, Artificial Sequence
  Synthetic
acuagaagcaaaagcgag

SEQ ID NO: 13554 - RNA, 19 nt, Artificial Sequence
  Synthetic
gacuagaagcaaaagcgag

SEQ ID NO: 13555 - RNA, 20 nt, Artificial Sequence
  Synthetic
ggacuagaagcaaaagcgag

SEQ ID NO: 13556 - RNA, 21 nt, Artificial Sequence
  Synthetic
aggacuagaagcaaaagcgag

SEQ ID NO: 13557 - RNA, 22 nt, Artificial Sequence
  Synthetic
caggacuagaagcaaaagcgag

SEQ ID NO: 13558 - RNA, 23 nt, Artificial Sequence
  Synthetic
gcaggacuagaagcaaaagcgag

SEQ ID NO: 13559 - RNA, 24 nt, Artificial Sequence
  Synthetic
cgcaggacuagaagcaaaagcgag

SEQ ID NO: 13560 - RNA, 18 nt, Artificial Sequence
  Synthetic
cgcgugugugggggggag

SEQ ID NO: 13561 - RNA, 19 nt, Artificial Sequence
  Synthetic
ccgcgugugugggggggag

SEQ ID NO: 13562 - RNA, 20 nt, Artificial Sequence
  Synthetic
uccgcgugugugggggggag

SEQ ID NO: 13563 - RNA, 21 nt, Artificial Sequence
  Synthetic
guccgcgugugugggggggag

SEQ ID NO: 13564 - RNA, 22 nt, Artificial Sequence
  Synthetic
aguccgcgugugugggggggag

SEQ ID NO: 13565 - RNA, 23 nt, Artificial Sequence
  Synthetic
gaguccgcgugugugggggggag

SEQ ID NO: 13566 - RNA, 24 nt, Artificial Sequence
  Synthetic
agaguccgcgugugugggggggag

SEQ ID NO: 13567 - RNA, 18 nt, Artificial Sequence
  Synthetic
ggccgcgucuggcguccg

SEQ ID NO: 13568 - RNA, 19 nt, Artificial Sequence
  Synthetic
gggccgcgucuggcguccg

SEQ ID NO: 13569 - RNA, 20 nt, Artificial Sequence
  Synthetic
ggggccgcgucuggcguccg

SEQ ID NO: 13570 - RNA, 21 nt, Artificial Sequence
  Synthetic
gggggccgcgucuggcguccg

SEQ ID NO: 13571 - RNA, 22 nt, Artificial Sequence
  Synthetic
cgggggccgcgucuggcguccg

SEQ ID NO: 13572 - RNA, 23 nt, Artificial Sequence
  Synthetic
ccgggggccgcgucuggcguccg

SEQ ID NO: 13573 - RNA, 24 nt, Artificial Sequence
  Synthetic
cccgggggccgcgucuggcguccg

SEQ ID NO: 13574 - RNA, 18 nt, Artificial Sequence
  Synthetic
ggacuagaagcaaaagcg

SEQ ID NO: 13575 - RNA, 19 nt, Artificial Sequence
  Synthetic
aggacuagaagcaaaagcg

SEQ ID NO: 13576 - RNA, 20 nt, Artificial Sequence
  Synthetic
caggacuagaagcaaaagcg

SEQ ID NO: 13577 - RNA, 21 nt, Artificial Sequence
  Synthetic
gcaggacuagaagcaaaagcg

SEQ ID NO: 13578 - RNA, 22 nt, Artificial Sequence
  Synthetic
cgcaggacuagaagcaaaagcg

SEQ ID NO: 13579 - RNA, 23 nt, Artificial Sequence
  Synthetic
gcgcaggacuagaagcaaaagcg

SEQ ID NO: 13580 - RNA, 24 nt, Artificial Sequence
  Synthetic
cgcgcaggacuagaagcaaaagcg

SEQ ID NO: 13581 - RNA, 18 nt, Artificial Sequence
  Synthetic
aauaaucacgagagcgcg

SEQ ID NO: 13582 - RNA, 19 nt, Artificial Sequence
  Synthetic
uaauaaucacgagagcgcg

SEQ ID NO: 13583 - RNA, 20 nt, Artificial Sequence
  Synthetic
uuaauaaucacgagagcgcg

SEQ ID NO: 13584 - RNA, 21 nt, Artificial Sequence
  Synthetic
auuaauaaucacgagagcgcg

SEQ ID NO: 13585 - RNA, 22 nt, Artificial Sequence
  Synthetic
uauuaauaaucacgagagcgcg

SEQ ID NO: 13586 - RNA, 23 nt, Artificial Sequence
  Synthetic
uuauuaauaaucacgagagcgcg

SEQ ID NO: 13587 - RNA, 24 nt, Artificial Sequence
  Synthetic
auuauuaauaaucacgagagcgcg

SEQ ID NO: 13588 - RNA, 18 nt, Artificial Sequence
  Synthetic
uccugacguucaaguucg

SEQ ID NO: 13589 - RNA, 19 nt, Artificial Sequence
  Synthetic
cuccugacguucaaguucg

SEQ ID NO: 13590 - RNA, 20 nt, Artificial Sequence
  Synthetic
acuccugacguucaaguucg

SEQ ID NO: 13591 - RNA, 21 nt, Artificial Sequence
  Synthetic
gacuccugacguucaaguucg

SEQ ID NO: 13592 - RNA, 22 nt, Artificial Sequence
  Synthetic
agacuccugacguucaaguucg

SEQ ID NO: 13593 - RNA, 23 nt, Artificial Sequence
  Synthetic
cagacuccugacguucaaguucg

SEQ ID NO: 13594 - RNA, 24 nt, Artificial Sequence
  Synthetic
ccagacuccugacguucaaguucg

SEQ ID NO: 13595 - RNA, 18 nt, Artificial Sequence
  Synthetic
agguaaaagagauaaagg

SEQ ID NO: 13596 - RNA, 19 nt, Artificial Sequence
  Synthetic
gagguaaaagagauaaagg

SEQ ID NO: 13597 - RNA, 20 nt, Artificial Sequence
  Synthetic
cgagguaaaagagauaaagg

SEQ ID NO: 13598 - RNA, 21 nt, Artificial Sequence
  Synthetic
ucgagguaaaagagauaaagg

SEQ ID NO: 13599 - RNA, 22 nt, Artificial Sequence
  Synthetic
gucgagguaaaagagauaaagg

SEQ ID NO: 13600 - RNA, 23 nt, Artificial Sequence
  Synthetic
agucgagguaaaagagauaaagg

SEQ ID NO: 13601 - RNA, 24 nt, Artificial Sequence
  Synthetic
gagucgagguaaaagagauaaagg

SEQ ID NO: 13602 - RNA, 18 nt, Artificial Sequence
  Synthetic
cuagaagcaaaagcgagg

SEQ ID NO: 13603 - RNA, 19 nt, Artificial Sequence
  Synthetic
acuagaagcaaaagcgagg

SEQ ID NO: 13604 - RNA, 20 nt, Artificial Sequence
  Synthetic
gacuagaagcaaaagcgagg

SEQ ID NO: 13605 - RNA, 21 nt, Artificial Sequence
  Synthetic
ggacuagaagcaaaagcgagg

SEQ ID NO: 13606 - RNA, 22 nt, Artificial Sequence
  Synthetic
aggacuagaagcaaaagcgagg

SEQ ID NO: 13607 - RNA, 23 nt, Artificial Sequence
  Synthetic
caggacuagaagcaaaagcgagg

SEQ ID NO: 13608 - RNA, 24 nt, Artificial Sequence
  Synthetic
gcaggacuagaagcaaaagcgagg

SEQ ID NO: 13609 - RNA, 18 nt, Artificial Sequence
  Synthetic
agaagcaaaagcgagggg

SEQ ID NO: 13610 - RNA, 19 nt, Artificial Sequence
  Synthetic
uagaagcaaaagcgagggg

SEQ ID NO: 13611 - RNA, 20 nt, Artificial Sequence
  Synthetic
cuagaagcaaaagcgagggg

SEQ ID NO: 13612 - RNA, 21 nt, Artificial Sequence
  Synthetic
acuagaagcaaaagcgagggg

SEQ ID NO: 13613 - RNA, 22 nt, Artificial Sequence
  Synthetic
gacuagaagcaaaagcgagggg

SEQ ID NO: 13614 - RNA, 23 nt, Artificial Sequence
  Synthetic
ggacuagaagcaaaagcgagggg

SEQ ID NO: 13615 - RNA, 24 nt, Artificial Sequence
  Synthetic
aggacuagaagcaaaagcgagggg

SEQ ID NO: 13616 - RNA, 18 nt, Artificial Sequence
  Synthetic
gaguccgcgugugugggg

SEQ ID NO: 13617 - RNA, 19 nt, Artificial Sequence
  Synthetic
agaguccgcgugugugggg

SEQ ID NO: 13618 - RNA, 20 nt, Artificial Sequence
  Synthetic
uagaguccgcgugugugggg

SEQ ID NO: 13619 - RNA, 21 nt, Artificial Sequence
  Synthetic
uuagaguccgcgugugugggg

SEQ ID NO: 13620 - RNA, 22 nt, Artificial Sequence
  Synthetic
uuuagaguccgcgugugugggg

SEQ ID NO: 13621 - RNA, 23 nt, Artificial Sequence
  Synthetic
uuuuagaguccgcgugugugggg

SEQ ID NO: 13622 - RNA, 24 nt, Artificial Sequence
  Synthetic
auuuuagaguccgcgugugugggg

SEQ ID NO: 13623 - RNA, 18 nt, Artificial Sequence
  Synthetic
agaguccgcguguguggg

SEQ ID NO: 13624 - RNA, 19 nt, Artificial Sequence
  Synthetic
uagaguccgcguguguggg

SEQ ID NO: 13625 - RNA, 20 nt, Artificial Sequence
  Synthetic
uuagaguccgcguguguggg

SEQ ID NO: 13626 - RNA, 21 nt, Artificial Sequence
  Synthetic
uuuagaguccgcguguguggg

SEQ ID NO: 13627 - RNA, 22 nt, Artificial Sequence
  Synthetic
uuuuagaguccgcguguguggg

SEQ ID NO: 13628 - RNA, 23 nt, Artificial Sequence
  Synthetic
auuuuagaguccgcguguguggg

SEQ ID NO: 13629 - RNA, 24 nt, Artificial Sequence
  Synthetic
cauuuuagaguccgcguguguggg

SEQ ID NO: 13630 - RNA, 18 nt, Artificial Sequence
  Synthetic
uagaguccgcgugugugg

SEQ ID NO: 13631 - RNA, 19 nt, Artificial Sequence
  Synthetic
uuagaguccgcgugugugg

SEQ ID NO: 13632 - RNA, 20 nt, Artificial Sequence
  Synthetic
uuuagaguccgcgugugugg

SEQ ID NO: 13633 - RNA, 21 nt, Artificial Sequence
  Synthetic
uuuuagaguccgcgugugugg

SEQ ID NO: 13634 - RNA, 22 nt, Artificial Sequence
  Synthetic
auuuuagaguccgcgugugugg

SEQ ID NO: 13635 - RNA, 23 nt, Artificial Sequence
  Synthetic
cauuuuagaguccgcgugugugg

SEQ ID NO: 13636 - RNA, 24 nt, Artificial Sequence
  Synthetic
ucauuuuagaguccgcgugugugg

SEQ ID NO: 13637 - RNA, 18 nt, Artificial Sequence
  Synthetic
cgcucgcugcggccacug

SEQ ID NO: 13638 - RNA, 19 nt, Artificial Sequence
  Synthetic
gcgcucgcugcggccacug

SEQ ID NO: 13639 - RNA, 20 nt, Artificial Sequence
  Synthetic
ggcgcucgcugcggccacug

SEQ ID NO: 13640 - RNA, 21 nt, Artificial Sequence
  Synthetic
cggcgcucgcugcggccacug

SEQ ID NO: 13641 - RNA, 22 nt, Artificial Sequence
  Synthetic
gcggcgcucgcugcggccacug

SEQ ID NO: 13642 - RNA, 23 nt, Artificial Sequence
  Synthetic
cgcggcgcucgcugcggccacug

SEQ ID NO: 13643 - RNA, 24 nt, Artificial Sequence
  Synthetic
ccgcggcgcucgcugcggccacug

SEQ ID NO: 13644 - RNA, 18 nt, Artificial Sequence
  Synthetic
ggaugucaaaaggcacug

SEQ ID NO: 13645 - RNA, 19 nt, Artificial Sequence
  Synthetic
uggaugucaaaaggcacug

SEQ ID NO: 13646 - RNA, 20 nt, Artificial Sequence
  Synthetic
uuggaugucaaaaggcacug

SEQ ID NO: 13647 - RNA, 21 nt, Artificial Sequence
  Synthetic
uuuggaugucaaaaggcacug

SEQ ID NO: 13648 - RNA, 22 nt, Artificial Sequence
  Synthetic
uuuuggaugucaaaaggcacug

SEQ ID NO: 13649 - RNA, 23 nt, Artificial Sequence
  Synthetic
auuuuggaugucaaaaggcacug

SEQ ID NO: 13650 - RNA, 24 nt, Artificial Sequence
  Synthetic
uauuuuggaugucaaaaggcacug

SEQ ID NO: 13651 - RNA, 18 nt, Artificial Sequence
  Synthetic
uuuuagaguccgcgugug

SEQ ID NO: 13652 - RNA, 19 nt, Artificial Sequence
  Synthetic
auuuuagaguccgcgugug

SEQ ID NO: 13653 - RNA, 20 nt, Artificial Sequence
  Synthetic
cauuuuagaguccgcgugug

SEQ ID NO: 13654 - RNA, 21 nt, Artificial Sequence
  Synthetic
ucauuuuagaguccgcgugug

SEQ ID NO: 13655 - RNA, 22 nt, Artificial Sequence
  Synthetic
uucauuuuagaguccgcgugug

SEQ ID NO: 13656 - RNA, 23 nt, Artificial Sequence
  Synthetic
uuucauuuuagaguccgcgugug

SEQ ID NO: 13657 - RNA, 24 nt, Artificial Sequence
  Synthetic
cuuucauuuuagaguccgcgugug

SEQ ID NO: 13658 - RNA, 18 nt, Artificial Sequence
  Synthetic
uuagaguccgcgugugug

SEQ ID NO: 13659 - RNA, 19 nt, Artificial Sequence
  Synthetic
uuuagaguccgcgugugug

SEQ ID NO: 13660 - RNA, 20 nt, Artificial Sequence
  Synthetic
uuuuagaguccgcgugugug

SEQ ID NO: 13661 - RNA, 21 nt, Artificial Sequence
  Synthetic
auuuuagaguccgcgugugug

SEQ ID NO: 13662 - RNA, 22 nt, Artificial Sequence
  Synthetic
cauuuuagaguccgcgugugug

SEQ ID NO: 13663 - RNA, 23 nt, Artificial Sequence
  Synthetic
ucauuuuagaguccgcgugugug

SEQ ID NO: 13664 - RNA, 24 nt, Artificial Sequence
  Synthetic
uucauuuuagaguccgcgugugug

SEQ ID NO: 13665 - RNA, 18 nt, Artificial Sequence
  Synthetic
aaaaaacccucaucccau

SEQ ID NO: 13666 - RNA, 19 nt, Artificial Sequence
  Synthetic
gaaaaaacccucaucccau

SEQ ID NO: 13667 - RNA, 20 nt, Artificial Sequence
  Synthetic
ggaaaaaacccucaucccau

SEQ ID NO: 13668 - RNA, 21 nt, Artificial Sequence
  Synthetic
gggaaaaaacccucaucccau

SEQ ID NO: 13669 - RNA, 22 nt, Artificial Sequence
  Synthetic
ggggaaaaaacccucaucccau

SEQ ID NO: 13670 - RNA, 23 nt, Artificial Sequence
  Synthetic
gggggaaaaaacccucaucccau

SEQ ID NO: 13671 - RNA, 24 nt, Artificial Sequence
  Synthetic
agggggaaaaaacccucaucccau

SEQ ID NO: 13672 - RNA, 18 nt, Artificial Sequence
  Synthetic
uaacccggcucucccgau

SEQ ID NO: 13673 - RNA, 19 nt, Artificial Sequence
  Synthetic
cuaacccggcucucccgau

SEQ ID NO: 13674 - RNA, 20 nt, Artificial Sequence
  Synthetic
ucuaacccggcucucccgau

SEQ ID NO: 13675 - RNA, 21 nt, Artificial Sequence
  Synthetic
uucuaacccggcucucccgau

SEQ ID NO: 13676 - RNA, 22 nt, Artificial Sequence
  Synthetic
uuucuaacccggcucucccgau

SEQ ID NO: 13677 - RNA, 23 nt, Artificial Sequence
  Synthetic
cuuucuaacccggcucucccgau

SEQ ID NO: 13678 - RNA, 24 nt, Artificial Sequence
  Synthetic
ucuuucuaacccggcucucccgau

SEQ ID NO: 13679 - RNA, 18 nt, Artificial Sequence
  Synthetic
uuuucacgagaaaaaccu

SEQ ID NO: 13680 - RNA, 19 nt, Artificial Sequence
  Synthetic
uuuuucacgagaaaaaccu

SEQ ID NO: 13681 - RNA, 20 nt, Artificial Sequence
  Synthetic
auuuuucacgagaaaaaccu

SEQ ID NO: 13682 - RNA, 21 nt, Artificial Sequence
  Synthetic
aauuuuucacgagaaaaaccu

SEQ ID NO: 13683 - RNA, 22 nt, Artificial Sequence
  Synthetic
aaauuuuucacgagaaaaaccu

SEQ ID NO: 13684 - RNA, 23 nt, Artificial Sequence
  Synthetic
uaaauuuuucacgagaaaaaccu

SEQ ID NO: 13685 - RNA, 24 nt, Artificial Sequence
  Synthetic
uuaaauuuuucacgagaaaaaccu

SEQ ID NO: 13686 - RNA, 18 nt, Artificial Sequence
  Synthetic
gcacuugaacuugcagcu

SEQ ID NO: 13687 - RNA, 19 nt, Artificial Sequence
  Synthetic
cgcacuugaacuugcagcu

SEQ ID NO: 13688 - RNA, 20 nt, Artificial Sequence
  Synthetic
ccgcacuugaacuugcagcu

SEQ ID NO: 13689 - RNA, 21 nt, Artificial Sequence
  Synthetic
uccgcacuugaacuugcagcu

SEQ ID NO: 13690 - RNA, 22 nt, Artificial Sequence
  Synthetic
guccgcacuugaacuugcagcu

SEQ ID NO: 13691 - RNA, 23 nt, Artificial Sequence
  Synthetic
cguccgcacuugaacuugcagcu

SEQ ID NO: 13692 - RNA, 24 nt, Artificial Sequence
  Synthetic
acguccgcacuugaacuugcagcu

SEQ ID NO: 13693 - RNA, 18 nt, Artificial Sequence
  Synthetic
cugaugaagauauuuucu

SEQ ID NO: 13694 - RNA, 19 nt, Artificial Sequence
  Synthetic
acugaugaagauauuuucu

SEQ ID NO: 13695 - RNA, 20 nt, Artificial Sequence
  Synthetic
cacugaugaagauauuuucu

SEQ ID NO: 13696 - RNA, 21 nt, Artificial Sequence
  Synthetic
gcacugaugaagauauuuucu

SEQ ID NO: 13697 - RNA, 22 nt, Artificial Sequence
  Synthetic
ggcacugaugaagauauuuucu

SEQ ID NO: 13698 - RNA, 23 nt, Artificial Sequence
  Synthetic
aggcacugaugaagauauuuucu

SEQ ID NO: 13699 - RNA, 24 nt, Artificial Sequence
  Synthetic
aaggcacugaugaagauauuuucu

SEQ ID NO: 13700 - RNA, 18 nt, Artificial Sequence
  Synthetic
ugauguguguccauuggu

SEQ ID NO: 13701 - RNA, 19 nt, Artificial Sequence
  Synthetic
cugauguguguccauuggu

SEQ ID NO: 13702 - RNA, 20 nt, Artificial Sequence
  Synthetic
ccugauguguguccauuggu

SEQ ID NO: 13703 - RNA, 21 nt, Artificial Sequence
  Synthetic
cccugauguguguccauuggu

SEQ ID NO: 13704 - RNA, 22 nt, Artificial Sequence
  Synthetic
ccccugauguguguccauuggu

SEQ ID NO: 13705 - RNA, 23 nt, Artificial Sequence
  Synthetic
gccccugauguguguccauuggu

SEQ ID NO: 13706 - RNA, 24 nt, Artificial Sequence
  Synthetic
agccccugauguguguccauuggu

SEQ ID NO: 13707 - RNA, 18 nt, Artificial Sequence
  Synthetic
auuuuagaguccgcgugu

SEQ ID NO: 13708 - RNA, 19 nt, Artificial Sequence
  Synthetic
cauuuuagaguccgcgugu

SEQ ID NO: 13709 - RNA, 20 nt, Artificial Sequence
  Synthetic
ucauuuuagaguccgcgugu

SEQ ID NO: 13710 - RNA, 21 nt, Artificial Sequence
  Synthetic
uucauuuuagaguccgcgugu

SEQ ID NO: 13711 - RNA, 22 nt, Artificial Sequence
  Synthetic
uuucauuuuagaguccgcgugu

SEQ ID NO: 13712 - RNA, 23 nt, Artificial Sequence
  Synthetic
cuuucauuuuagaguccgcgugu

SEQ ID NO: 13713 - RNA, 24 nt, Artificial Sequence
  Synthetic
ucuuucauuuuagaguccgcgugu

SEQ ID NO: 13714 - RNA, 18 nt, Artificial Sequence
  Synthetic
uuuagaguccgcgugugu

SEQ ID NO: 13715 - RNA, 19 nt, Artificial Sequence
  Synthetic
uuuuagaguccgcgugugu

SEQ ID NO: 13716 - RNA, 20 nt, Artificial Sequence
  Synthetic
auuuuagaguccgcgugugu

SEQ ID NO: 13717 - RNA, 21 nt, Artificial Sequence
  Synthetic
cauuuuagaguccgcgugugu

SEQ ID NO: 13718 - RNA, 22 nt, Artificial Sequence
  Synthetic
ucauuuuagaguccgcgugugu

SEQ ID NO: 13719 - RNA, 23 nt, Artificial Sequence
  Synthetic
uucauuuuagaguccgcgugugu

SEQ ID NO: 13720 - RNA, 24 nt, Artificial Sequence
  Synthetic
uuucauuuuagaguccgcgugugu

SEQ ID NO: 13721 - RNA, 18 nt, Artificial Sequence
  Synthetic
auugccguguaugcacuu

SEQ ID NO: 13722 - RNA, 19 nt, Artificial Sequence
  Synthetic
cauugccguguaugcacuu

SEQ ID NO: 13723 - RNA, 20 nt, Artificial Sequence
  Synthetic
ccauugccguguaugcacuu

SEQ ID NO: 13724 - RNA, 21 nt, Artificial Sequence
  Synthetic
accauugccguguaugcacuu

SEQ ID NO: 13725 - RNA, 22 nt, Artificial Sequence
  Synthetic
aaccauugccguguaugcacuu

SEQ ID NO: 13726 - RNA, 23 nt, Artificial Sequence
  Synthetic
gaaccauugccguguaugcacuu

SEQ ID NO: 13727 - RNA, 24 nt, Artificial Sequence
  Synthetic
ggaaccauugccguguaugcacuu

SEQ ID NO: 13728 - RNA, 18 nt, Artificial Sequence
  Synthetic
cucaccucuuuucucccc

SEQ ID NO: 13729 - RNA, 19 nt, Artificial Sequence
  Synthetic
ucucaccucuuuucucccc

SEQ ID NO: 13730 - RNA, 20 nt, Artificial Sequence
  Synthetic
gucucaccucuuuucucccc

SEQ ID NO: 13731 - RNA, 21 nt, Artificial Sequence
  Synthetic
agucucaccucuuuucucccc

SEQ ID NO: 13732 - RNA, 22 nt, Artificial Sequence
  Synthetic
cagucucaccucuuuucucccc

SEQ ID NO: 13733 - RNA, 23 nt, Artificial Sequence
  Synthetic
ccagucucaccucuuuucucccc

SEQ ID NO: 13734 - RNA, 24 nt, Artificial Sequence
  Synthetic
gccagucucaccucuuuucucccc

SEQ ID NO: 13735 - RNA, 18 nt, Artificial Sequence
  Synthetic
aaaagaaaaaaauagagc

SEQ ID NO: 13736 - RNA, 19 nt, Artificial Sequence
  Synthetic
aaaaagaaaaaaauagagc

SEQ ID NO: 13737 - RNA, 20 nt, Artificial Sequence
  Synthetic
aaaaaagaaaaaaauagagc

SEQ ID NO: 13738 - RNA, 21 nt, Artificial Sequence
  Synthetic
caaaaaagaaaaaaauagagc

SEQ ID NO: 13739 - RNA, 22 nt, Artificial Sequence
  Synthetic
ucaaaaaagaaaaaaauagagc

SEQ ID NO: 13740 - RNA, 23 nt, Artificial Sequence
  Synthetic
uucaaaaaagaaaaaaauagagc

SEQ ID NO: 13741 - RNA, 24 nt, Artificial Sequence
  Synthetic
auucaaaaaagaaaaaaauagagc

SEQ ID NO: 13742 - RNA, 18 nt, Artificial Sequence
  Synthetic
ggcggggcggggggggag

SEQ ID NO: 13743 - RNA, 19 nt, Artificial Sequence
  Synthetic
uggcggggcggggggggag

SEQ ID NO: 13744 - RNA, 20 nt, Artificial Sequence
  Synthetic
cuggcggggcggggggggag

SEQ ID NO: 13745 - RNA, 21 nt, Artificial Sequence
  Synthetic
acuggcggggcggggggggag

SEQ ID NO: 13746 - RNA, 22 nt, Artificial Sequence
  Synthetic
aacuggcggggcggggggggag

SEQ ID NO: 13747 - RNA, 23 nt, Artificial Sequence
  Synthetic
aaacuggcggggcggggggggag

SEQ ID NO: 13748 - RNA, 24 nt, Artificial Sequence
  Synthetic
aaaacuggcggggcggggggggag

SEQ ID NO: 13749 - RNA, 18 nt, Artificial Sequence
  Synthetic
agggagcgcacggcaacg

SEQ ID NO: 13750 - RNA, 19 nt, Artificial Sequence
  Synthetic
gagggagcgcacggcaacg

SEQ ID NO: 13751 - RNA, 20 nt, Artificial Sequence
  Synthetic
ggagggagcgcacggcaacg

SEQ ID NO: 13752 - RNA, 21 nt, Artificial Sequence
  Synthetic
gggagggagcgcacggcaacg

SEQ ID NO: 13753 - RNA, 22 nt, Artificial Sequence
  Synthetic
ugggagggagcgcacggcaacg

SEQ ID NO: 13754 - RNA, 23 nt, Artificial Sequence
  Synthetic
gugggagggagcgcacggcaacg

SEQ ID NO: 13755 - RNA, 24 nt, Artificial Sequence
  Synthetic
ggugggagggagcgcacggcaacg

SEQ ID NO: 13756 - RNA, 18 nt, Artificial Sequence
  Synthetic
cccccccauuuucuuacg

SEQ ID NO: 13757 - RNA, 19 nt, Artificial Sequence
  Synthetic
acccccccauuuucuuacg

SEQ ID NO: 13758 - RNA, 20 nt, Artificial Sequence
  Synthetic
uacccccccauuuucuuacg

SEQ ID NO: 13759 - RNA, 21 nt, Artificial Sequence
  Synthetic
cuacccccccauuuucuuacg

SEQ ID NO: 13760 - RNA, 22 nt, Artificial Sequence
  Synthetic
ccuacccccccauuuucuuacg

SEQ ID NO: 13761 - RNA, 23 nt, Artificial Sequence
  Synthetic
cccuacccccccauuuucuuacg

SEQ ID NO: 13762 - RNA, 24 nt, Artificial Sequence
  Synthetic
ucccuacccccccauuuucuuacg

SEQ ID NO: 13763 - RNA, 18 nt, Artificial Sequence
  Synthetic
gggcggagggaagccagg

SEQ ID NO: 13764 - RNA, 19 nt, Artificial Sequence
  Synthetic
cgggcggagggaagccagg

SEQ ID NO: 13765 - RNA, 20 nt, Artificial Sequence
  Synthetic
gcgggcggagggaagccagg

SEQ ID NO: 13766 - RNA, 21 nt, Artificial Sequence
  Synthetic
cgcgggcggagggaagccagg

SEQ ID NO: 13767 - RNA, 22 nt, Artificial Sequence
  Synthetic
gcgcgggcggagggaagccagg

SEQ ID NO: 13768 - RNA, 23 nt, Artificial Sequence
  Synthetic
agcgcgggcggagggaagccagg

SEQ ID NO: 13769 - RNA, 24 nt, Artificial Sequence
  Synthetic
aagcgcgggcggagggaagccagg

SEQ ID NO: 13770 - RNA, 18 nt, Artificial Sequence
  Synthetic
cggaaaggaggaaagagg

SEQ ID NO: 13771 - RNA, 19 nt, Artificial Sequence
  Synthetic
gcggaaaggaggaaagagg

SEQ ID NO: 13772 - RNA, 20 nt, Artificial Sequence
  Synthetic
ggcggaaaggaggaaagagg

SEQ ID NO: 13773 - RNA, 21 nt, Artificial Sequence
  Synthetic
cggcggaaaggaggaaagagg

SEQ ID NO: 13774 - RNA, 22 nt, Artificial Sequence
  Synthetic
gcggcggaaaggaggaaagagg

SEQ ID NO: 13775 - RNA, 23 nt, Artificial Sequence
  Synthetic
agcggcggaaaggaggaaagagg

SEQ ID NO: 13776 - RNA, 24 nt, Artificial Sequence
  Synthetic
aagcggcggaaaggaggaaagagg

SEQ ID NO: 13777 - RNA, 18 nt, Artificial Sequence
  Synthetic
aaacuggcggggcggggg

SEQ ID NO: 13778 - RNA, 19 nt, Artificial Sequence
  Synthetic
aaaacuggcggggcggggg

SEQ ID NO: 13779 - RNA, 20 nt, Artificial Sequence
  Synthetic
caaaacuggcggggcggggg

SEQ ID NO: 13780 - RNA, 21 nt, Artificial Sequence
  Synthetic
gcaaaacuggcggggcggggg

SEQ ID NO: 13781 - RNA, 22 nt, Artificial Sequence
  Synthetic
ugcaaaacuggcggggcggggg

SEQ ID NO: 13782 - RNA, 23 nt, Artificial Sequence
  Synthetic
uugcaaaacuggcggggcggggg

SEQ ID NO: 13783 - RNA, 24 nt, Artificial Sequence
  Synthetic
uuugcaaaacuggcggggcggggg

SEQ ID NO: 13784 - RNA, 18 nt, Artificial Sequence
  Synthetic
ccacccccagguuugcau

SEQ ID NO: 13785 - RNA, 19 nt, Artificial Sequence
  Synthetic
cccacccccagguuugcau

SEQ ID NO: 13786 - RNA, 20 nt, Artificial Sequence
  Synthetic
ucccacccccagguuugcau

SEQ ID NO: 13787 - RNA, 21 nt, Artificial Sequence
  Synthetic
cucccacccccagguuugcau

SEQ ID NO: 13788 - RNA, 22 nt, Artificial Sequence
  Synthetic
gcucccacccccagguuugcau

SEQ ID NO: 13789 - RNA, 23 nt, Artificial Sequence
  Synthetic
agcucccacccccagguuugcau

SEQ ID NO: 13790 - RNA, 24 nt, Artificial Sequence
  Synthetic
cagcucccacccccagguuugcau

SEQ ID NO: 13791 - RNA, 18 nt, Artificial Sequence
  Synthetic
gccuaaguuuggagggcu

SEQ ID NO: 13792 - RNA, 19 nt, Artificial Sequence
  Synthetic
agccuaaguuuggagggcu

SEQ ID NO: 13793 - RNA, 20 nt, Artificial Sequence
  Synthetic
cagccuaaguuuggagggcu

SEQ ID NO: 13794 - RNA, 21 nt, Artificial Sequence
  Synthetic
ccagccuaaguuuggagggcu

SEQ ID NO: 13795 - RNA, 22 nt, Artificial Sequence
  Synthetic
uccagccuaaguuuggagggcu

SEQ ID NO: 13796 - RNA, 23 nt, Artificial Sequence
  Synthetic
auccagccuaaguuuggagggcu

SEQ ID NO: 13797 - RNA, 24 nt, Artificial Sequence
  Synthetic
aauccagccuaaguuuggagggcu

SEQ ID NO: 13798 - RNA, 18 nt, Artificial Sequence
  Synthetic
ccacuuucucacuauugu

SEQ ID NO: 13799 - RNA, 19 nt, Artificial Sequence
  Synthetic
gccacuuucucacuauugu

SEQ ID NO: 13800 - RNA, 20 nt, Artificial Sequence
  Synthetic
ugccacuuucucacuauugu

SEQ ID NO: 13801 - RNA, 21 nt, Artificial Sequence
  Synthetic
gugccacuuucucacuauugu

SEQ ID NO: 13802 - RNA, 22 nt, Artificial Sequence
  Synthetic
agugccacuuucucacuauugu

SEQ ID NO: 13803 - RNA, 23 nt, Artificial Sequence
  Synthetic
cagugccacuuucucacuauugu

SEQ ID NO: 13804 - RNA, 24 nt, Artificial Sequence
  Synthetic
acagugccacuuucucacuauugu

SEQ ID NO: 13805 - RNA, 18 nt, Artificial Sequence
  Synthetic
uuauuucucuuuucgaaa

SEQ ID NO: 13806 - RNA, 19 nt, Artificial Sequence
  Synthetic
uuuauuucucuuuucgaaa

SEQ ID NO: 13807 - RNA, 20 nt, Artificial Sequence
  Synthetic
cuuuauuucucuuuucgaaa

SEQ ID NO: 13808 - RNA, 21 nt, Artificial Sequence
  Synthetic
gcuuuauuucucuuuucgaaa

SEQ ID NO: 13809 - RNA, 22 nt, Artificial Sequence
  Synthetic
cgcuuuauuucucuuuucgaaa

SEQ ID NO: 13810 - RNA, 23 nt, Artificial Sequence
  Synthetic
ccgcuuuauuucucuuuucgaaa

SEQ ID NO: 13811 - RNA, 24 nt, Artificial Sequence
  Synthetic
gccgcuuuauuucucuuuucgaaa

SEQ ID NO: 13812 - RNA, 18 nt, Artificial Sequence
  Synthetic
cggcggcggggaggggaa

SEQ ID NO: 13813 - RNA, 19 nt, Artificial Sequence
  Synthetic
gcggcggcggggaggggaa

SEQ ID NO: 13814 - RNA, 20 nt, Artificial Sequence
  Synthetic
ggcggcggcggggaggggaa

SEQ ID NO: 13815 - RNA, 21 nt, Artificial Sequence
  Synthetic
cggcggcggcggggaggggaa

SEQ ID NO: 13816 - RNA, 22 nt, Artificial Sequence
  Synthetic
gcggcggcggcggggaggggaa

SEQ ID NO: 13817 - RNA, 23 nt, Artificial Sequence
  Synthetic
cgcggcggcggcggggaggggaa

SEQ ID NO: 13818 - RNA, 24 nt, Artificial Sequence
  Synthetic
gcgcggcggcggcggggaggggaa

SEQ ID NO: 13819 - RNA, 18 nt, Artificial Sequence
  Synthetic
uggggggguagggaggga

SEQ ID NO: 13820 - RNA, 19 nt, Artificial Sequence
  Synthetic
auggggggguagggaggga

SEQ ID NO: 13821 - RNA, 20 nt, Artificial Sequence
  Synthetic
aauggggggguagggaggga

SEQ ID NO: 13822 - RNA, 21 nt, Artificial Sequence
  Synthetic
aaauggggggguagggaggga

SEQ ID NO: 13823 - RNA, 22 nt, Artificial Sequence
  Synthetic
aaaauggggggguagggaggga

SEQ ID NO: 13824 - RNA, 23 nt, Artificial Sequence
  Synthetic
gaaaauggggggguagggaggga

SEQ ID NO: 13825 - RNA, 24 nt, Artificial Sequence
  Synthetic
agaaaauggggggguagggaggga

SEQ ID NO: 13826 - RNA, 18 nt, Artificial Sequence
  Synthetic
aaaauggggggguaggga

SEQ ID NO: 13827 - RNA, 19 nt, Artificial Sequence
  Synthetic
gaaaauggggggguaggga

SEQ ID NO: 13828 - RNA, 20 nt, Artificial Sequence
  Synthetic
agaaaauggggggguaggga

SEQ ID NO: 13829 - RNA, 21 nt, Artificial Sequence
  Synthetic
aagaaaauggggggguaggga

SEQ ID NO: 13830 - RNA, 22 nt, Artificial Sequence
  Synthetic
uaagaaaauggggggguaggga

SEQ ID NO: 13831 - RNA, 23 nt, Artificial Sequence
  Synthetic
guaagaaaauggggggguaggga

SEQ ID NO: 13832 - RNA, 24 nt, Artificial Sequence
  Synthetic
cguaagaaaauggggggguaggga

SEQ ID NO: 13833 - RNA, 18 nt, Artificial Sequence
  Synthetic
aaggggcccccggcgcuc

SEQ ID NO: 13834 - RNA, 19 nt, Artificial Sequence
  Synthetic
aaaggggcccccggcgcuc

SEQ ID NO: 13835 - RNA, 20 nt, Artificial Sequence
  Synthetic
gaaaggggcccccggcgcuc

SEQ ID NO: 13836 - RNA, 21 nt, Artificial Sequence
  Synthetic
ggaaaggggcccccggcgcuc

SEQ ID NO: 13837 - RNA, 22 nt, Artificial Sequence
  Synthetic
uggaaaggggcccccggcgcuc

SEQ ID NO: 13838 - RNA, 23 nt, Artificial Sequence
  Synthetic
guggaaaggggcccccggcgcuc

SEQ ID NO: 13839 - RNA, 24 nt, Artificial Sequence
  Synthetic
uguggaaaggggcccccggcgcuc

SEQ ID NO: 13840 - RNA, 18 nt, Artificial Sequence
  Synthetic
cuuuuguuccggccagag

SEQ ID NO: 13841 - RNA, 19 nt, Artificial Sequence
  Synthetic
ccuuuuguuccggccagag

SEQ ID NO: 13842 - RNA, 20 nt, Artificial Sequence
  Synthetic
gccuuuuguuccggccagag

SEQ ID NO: 13843 - RNA, 21 nt, Artificial Sequence
  Synthetic
cgccuuuuguuccggccagag

SEQ ID NO: 13844 - RNA, 22 nt, Artificial Sequence
  Synthetic
ccgccuuuuguuccggccagag

SEQ ID NO: 13845 - RNA, 23 nt, Artificial Sequence
  Synthetic
gccgccuuuuguuccggccagag

SEQ ID NO: 13846 - RNA, 24 nt, Artificial Sequence
  Synthetic
ugccgccuuuuguuccggccagag

SEQ ID NO: 13847 - RNA, 18 nt, Artificial Sequence
  Synthetic
gugggugugcguacggag

SEQ ID NO: 13848 - RNA, 19 nt, Artificial Sequence
  Synthetic
agugggugugcguacggag

SEQ ID NO: 13849 - RNA, 20 nt, Artificial Sequence
  Synthetic
aagugggugugcguacggag

SEQ ID NO: 13850 - RNA, 21 nt, Artificial Sequence
  Synthetic
gaagugggugugcguacggag

SEQ ID NO: 13851 - RNA, 22 nt, Artificial Sequence
  Synthetic
ggaagugggugugcguacggag

SEQ ID NO: 13852 - RNA, 23 nt, Artificial Sequence
  Synthetic
gggaagugggugugcguacggag

SEQ ID NO: 13853 - RNA, 24 nt, Artificial Sequence
  Synthetic
ggggaagugggugugcguacggag

SEQ ID NO: 13854 - RNA, 18 nt, Artificial Sequence
  Synthetic
ccggcgcuccugaguccg

SEQ ID NO: 13855 - RNA, 19 nt, Artificial Sequence
  Synthetic
cccggcgcuccugaguccg

SEQ ID NO: 13856 - RNA, 20 nt, Artificial Sequence
  Synthetic
ccccggcgcuccugaguccg

SEQ ID NO: 13857 - RNA, 21 nt, Artificial Sequence
  Synthetic
cccccggcgcuccugaguccg

SEQ ID NO: 13858 - RNA, 22 nt, Artificial Sequence
  Synthetic
gcccccggcgcuccugaguccg

SEQ ID NO: 13859 - RNA, 23 nt, Artificial Sequence
  Synthetic
ggcccccggcgcuccugaguccg

SEQ ID NO: 13860 - RNA, 24 nt, Artificial Sequence
  Synthetic
gggcccccggcgcuccugaguccg

SEQ ID NO: 13861 - RNA, 18 nt, Artificial Sequence
  Synthetic
cagcccuccaaacuuagg

SEQ ID NO: 13862 - RNA, 19 nt, Artificial Sequence
  Synthetic
gcagcccuccaaacuuagg

SEQ ID NO: 13863 - RNA, 20 nt, Artificial Sequence
  Synthetic
cgcagcccuccaaacuuagg

SEQ ID NO: 13864 - RNA, 21 nt, Artificial Sequence
  Synthetic
ccgcagcccuccaaacuuagg

SEQ ID NO: 13865 - RNA, 22 nt, Artificial Sequence
  Synthetic
cccgcagcccuccaaacuuagg

SEQ ID NO: 13866 - RNA, 23 nt, Artificial Sequence
  Synthetic
acccgcagcccuccaaacuuagg

SEQ ID NO: 13867 - RNA, 24 nt, Artificial Sequence
  Synthetic
gacccgcagcccuccaaacuuagg

SEQ ID NO: 13868 - RNA, 18 nt, Artificial Sequence
  Synthetic
cucaccguaagaaaaugg

SEQ ID NO: 13869 - RNA, 19 nt, Artificial Sequence
  Synthetic
acucaccguaagaaaaugg

SEQ ID NO: 13870 - RNA, 20 nt, Artificial Sequence
  Synthetic
cacucaccguaagaaaaugg

SEQ ID NO: 13871 - RNA, 21 nt, Artificial Sequence
  Synthetic
ccacucaccguaagaaaaugg

SEQ ID NO: 13872 - RNA, 22 nt, Artificial Sequence
  Synthetic
cccacucaccguaagaaaaugg

SEQ ID NO: 13873 - RNA, 23 nt, Artificial Sequence
  Synthetic
ucccacucaccguaagaaaaugg

SEQ ID NO: 13874 - RNA, 24 nt, Artificial Sequence
  Synthetic
uucccacucaccguaagaaaaugg

SEQ ID NO: 13875 - RNA, 18 nt, Artificial Sequence
  Synthetic
gaggcucagcucucaacu

SEQ ID NO: 13876 - RNA, 19 nt, Artificial Sequence
  Synthetic
ggaggcucagcucucaacu

SEQ ID NO: 13877 - RNA, 20 nt, Artificial Sequence
  Synthetic
uggaggcucagcucucaacu

SEQ ID NO: 13878 - RNA, 21 nt, Artificial Sequence
  Synthetic
uuggaggcucagcucucaacu

SEQ ID NO: 13879 - RNA, 22 nt, Artificial Sequence
  Synthetic
cuuggaggcucagcucucaacu

SEQ ID NO: 13880 - RNA, 23 nt, Artificial Sequence
  Synthetic
acuuggaggcucagcucucaacu

SEQ ID NO: 13881 - RNA, 24 nt, Artificial Sequence
  Synthetic
aacuuggaggcucagcucucaacu

SEQ ID NO: 13882 - RNA, 18 nt, Artificial Sequence
  Synthetic
caacucacaugcaaaccu

SEQ ID NO: 13883 - RNA, 19 nt, Artificial Sequence
  Synthetic
acaacucacaugcaaaccu

SEQ ID NO: 13884 - RNA, 20 nt, Artificial Sequence
  Synthetic
aacaacucacaugcaaaccu

SEQ ID NO: 13885 - RNA, 21 nt, Artificial Sequence
  Synthetic
gaacaacucacaugcaaaccu

SEQ ID NO: 13886 - RNA, 22 nt, Artificial Sequence
  Synthetic
cgaacaacucacaugcaaaccu

SEQ ID NO: 13887 - RNA, 23 nt, Artificial Sequence
  Synthetic
gcgaacaacucacaugcaaaccu

SEQ ID NO: 13888 - RNA, 24 nt, Artificial Sequence
  Synthetic
ugcgaacaacucacaugcaaaccu

SEQ ID NO: 13889 - RNA, 18 nt, Artificial Sequence
  Synthetic
uugaauaaucuuucauuu

SEQ ID NO: 13890 - RNA, 19 nt, Artificial Sequence
  Synthetic
uuugaauaaucuuucauuu

SEQ ID NO: 13891 - RNA, 20 nt, Artificial Sequence
  Synthetic
uuuugaauaaucuuucauuu

SEQ ID NO: 13892 - RNA, 21 nt, Artificial Sequence
  Synthetic
uuuuugaauaaucuuucauuu

SEQ ID NO: 13893 - RNA, 22 nt, Artificial Sequence
  Synthetic
uuuuuugaauaaucuuucauuu

SEQ ID NO: 13894 - RNA, 23 nt, Artificial Sequence
  Synthetic
cuuuuuugaauaaucuuucauuu

SEQ ID NO: 13895 - RNA, 24 nt, Artificial Sequence
  Synthetic
ucuuuuuugaauaaucuuucauuu

SEQ ID NO: 13896 - RNA, 18 nt, Artificial Sequence
  Synthetic
gcucuauuuuuuucuuuu

SEQ ID NO: 13897 - RNA, 19 nt, Artificial Sequence
  Synthetic
cgcucuauuuuuuucuuuu

SEQ ID NO: 13898 - RNA, 20 nt, Artificial Sequence
  Synthetic
ucgcucuauuuuuuucuuuu

SEQ ID NO: 13899 - RNA, 21 nt, Artificial Sequence
  Synthetic
cucgcucuauuuuuuucuuuu

SEQ ID NO: 13900 - RNA, 22 nt, Artificial Sequence
  Synthetic
ucucgcucuauuuuuuucuuuu

SEQ ID NO: 13901 - RNA, 23 nt, Artificial Sequence
  Synthetic
cucucgcucuauuuuuuucuuuu

SEQ ID NO: 13902 - RNA, 24 nt, Artificial Sequence
  Synthetic
acucucgcucuauuuuuuucuuuu

SEQ ID NO: 13903 - RNA, 18 nt, Artificial Sequence
  Synthetic
auucaaaaaagaaaaaaa

SEQ ID NO: 13904 - RNA, 19 nt, Artificial Sequence
  Synthetic
uauucaaaaaagaaaaaaa

SEQ ID NO: 13905 - RNA, 20 nt, Artificial Sequence
  Synthetic
uuauucaaaaaagaaaaaaa

SEQ ID NO: 13906 - RNA, 21 nt, Artificial Sequence
  Synthetic
auuauucaaaaaagaaaaaaa

SEQ ID NO: 13907 - RNA, 22 nt, Artificial Sequence
  Synthetic
gauuauucaaaaaagaaaaaaa

SEQ ID NO: 13908 - RNA, 23 nt, Artificial Sequence
  Synthetic
agauuauucaaaaaagaaaaaaa

SEQ ID NO: 13909 - RNA, 24 nt, Artificial Sequence
  Synthetic
aagauuauucaaaaaagaaaaaaa

SEQ ID NO: 13910 - RNA, 18 nt, Artificial Sequence
  Synthetic
augaaagauuauucaaaa

SEQ ID NO: 13911 - RNA, 19 nt, Artificial Sequence
  Synthetic
aaugaaagauuauucaaaa

SEQ ID NO: 13912 - RNA, 20 nt, Artificial Sequence
  Synthetic
aaaugaaagauuauucaaaa

SEQ ID NO: 13913 - RNA, 21 nt, Artificial Sequence
  Synthetic
aaaaugaaagauuauucaaaa

SEQ ID NO: 13914 - RNA, 22 nt, Artificial Sequence
  Synthetic
uaaaaugaaagauuauucaaaa

SEQ ID NO: 13915 - RNA, 23 nt, Artificial Sequence
  Synthetic
cuaaaaugaaagauuauucaaaa

SEQ ID NO: 13916 - RNA, 24 nt, Artificial Sequence
  Synthetic
ucuaaaaugaaagauuauucaaaa

SEQ ID NO: 13917 - RNA, 18 nt, Artificial Sequence
  Synthetic
ugcauuccuuuucgaaaa

SEQ ID NO: 13918 - RNA, 19 nt, Artificial Sequence
  Synthetic
uugcauuccuuuucgaaaa

SEQ ID NO: 13919 - RNA, 20 nt, Artificial Sequence
  Synthetic
auugcauuccuuuucgaaaa

SEQ ID NO: 13920 - RNA, 21 nt, Artificial Sequence
  Synthetic
cauugcauuccuuuucgaaaa

SEQ ID NO: 13921 - RNA, 22 nt, Artificial Sequence
  Synthetic
ucauugcauuccuuuucgaaaa

SEQ ID NO: 13922 - RNA, 23 nt, Artificial Sequence
  Synthetic
aucauugcauuccuuuucgaaaa

SEQ ID NO: 13923 - RNA, 24 nt, Artificial Sequence
  Synthetic
aaucauugcauuccuuuucgaaaa

SEQ ID NO: 13924 - RNA, 18 nt, Artificial Sequence
  Synthetic
gcggcggaaaggaggaaa

SEQ ID NO: 13925 - RNA, 19 nt, Artificial Sequence
  Synthetic
agcggcggaaaggaggaaa

SEQ ID NO: 13926 - RNA, 20 nt, Artificial Sequence
  Synthetic
aagcggcggaaaggaggaaa

SEQ ID NO: 13927 - RNA, 21 nt, Artificial Sequence
  Synthetic
aaagcggcggaaaggaggaaa

SEQ ID NO: 13928 - RNA, 22 nt, Artificial Sequence
  Synthetic
uaaagcggcggaaaggaggaaa

SEQ ID NO: 13929 - RNA, 23 nt, Artificial Sequence
  Synthetic
auaaagcggcggaaaggaggaaa

SEQ ID NO: 13930 - RNA, 24 nt, Artificial Sequence
  Synthetic
aauaaagcggcggaaaggaggaaa

SEQ ID NO: 13931 - RNA, 18 nt, Artificial Sequence
  Synthetic
gcccgcgcggccuggaaa

SEQ ID NO: 13932 - RNA, 19 nt, Artificial Sequence
  Synthetic
agcccgcgcggccuggaaa

SEQ ID NO: 13933 - RNA, 20 nt, Artificial Sequence
  Synthetic
gagcccgcgcggccuggaaa

SEQ ID NO: 13934 - RNA, 21 nt, Artificial Sequence
  Synthetic
ggagcccgcgcggccuggaaa

SEQ ID NO: 13935 - RNA, 22 nt, Artificial Sequence
  Synthetic
aggagcccgcgcggccuggaaa

SEQ ID NO: 13936 - RNA, 23 nt, Artificial Sequence
  Synthetic
caggagcccgcgcggccuggaaa

SEQ ID NO: 13937 - RNA, 24 nt, Artificial Sequence
  Synthetic
ccaggagcccgcgcggccuggaaa

SEQ ID NO: 13938 - RNA, 18 nt, Artificial Sequence
  Synthetic
acacacgcggacucuaaa

SEQ ID NO: 13939 - RNA, 19 nt, Artificial Sequence
  Synthetic
cacacacgcggacucuaaa

SEQ ID NO: 13940 - RNA, 20 nt, Artificial Sequence
  Synthetic
ccacacacgcggacucuaaa

SEQ ID NO: 13941 - RNA, 21 nt, Artificial Sequence
  Synthetic
cccacacacgcggacucuaaa

SEQ ID NO: 13942 - RNA, 22 nt, Artificial Sequence
  Synthetic
ccccacacacgcggacucuaaa

SEQ ID NO: 13943 - RNA, 23 nt, Artificial Sequence
  Synthetic
cccccacacacgcggacucuaaa

SEQ ID NO: 13944 - RNA, 24 nt, Artificial Sequence
  Synthetic
ccccccacacacgcggacucuaaa

SEQ ID NO: 13945 - RNA, 18 nt, Artificial Sequence
  Synthetic
auugcauuccuuuucgaa

SEQ ID NO: 13946 - RNA, 19 nt, Artificial Sequence
  Synthetic
cauugcauuccuuuucgaa

SEQ ID NO: 13947 - RNA, 20 nt, Artificial Sequence
  Synthetic
ucauugcauuccuuuucgaa

SEQ ID NO: 13948 - RNA, 21 nt, Artificial Sequence
  Synthetic
aucauugcauuccuuuucgaa

SEQ ID NO: 13949 - RNA, 22 nt, Artificial Sequence
  Synthetic
aaucauugcauuccuuuucgaa

SEQ ID NO: 13950 - RNA, 23 nt, Artificial Sequence
  Synthetic
gaaucauugcauuccuuuucgaa

SEQ ID NO: 13951 - RNA, 24 nt, Artificial Sequence
  Synthetic
ggaaucauugcauuccuuuucgaa

SEQ ID NO: 13952 - RNA, 18 nt, Artificial Sequence
  Synthetic
agaaauaaagcggcggaa

SEQ ID NO: 13953 - RNA, 19 nt, Artificial Sequence
  Synthetic
gagaaauaaagcggcggaa

SEQ ID NO: 13954 - RNA, 20 nt, Artificial Sequence
  Synthetic
agagaaauaaagcggcggaa

SEQ ID NO: 13955 - RNA, 21 nt, Artificial Sequence
  Synthetic
aagagaaauaaagcggcggaa

SEQ ID NO: 13956 - RNA, 22 nt, Artificial Sequence
  Synthetic
aaagagaaauaaagcggcggaa

SEQ ID NO: 13957 - RNA, 23 nt, Artificial Sequence
  Synthetic
aaaagagaaauaaagcggcggaa

SEQ ID NO: 13958 - RNA, 24 nt, Artificial Sequence
  Synthetic
gaaaagagaaauaaagcggcggaa

SEQ ID NO: 13959 - RNA, 18 nt, Artificial Sequence
  Synthetic
cccgaggagaggacagca

SEQ ID NO: 13960 - RNA, 19 nt, Artificial Sequence
  Synthetic
gcccgaggagaggacagca

SEQ ID NO: 13961 - RNA, 20 nt, Artificial Sequence
  Synthetic
ugcccgaggagaggacagca

SEQ ID NO: 13962 - RNA, 21 nt, Artificial Sequence
  Synthetic
uugcccgaggagaggacagca

SEQ ID NO: 13963 - RNA, 22 nt, Artificial Sequence
  Synthetic
uuugcccgaggagaggacagca

SEQ ID NO: 13964 - RNA, 23 nt, Artificial Sequence
  Synthetic
cuuugcccgaggagaggacagca

SEQ ID NO: 13965 - RNA, 24 nt, Artificial Sequence
  Synthetic
acuuugcccgaggagaggacagca

SEQ ID NO: 13966 - RNA, 18 nt, Artificial Sequence
  Synthetic
ccaaguuacagcuccgca

SEQ ID NO: 13967 - RNA, 19 nt, Artificial Sequence
  Synthetic
uccaaguuacagcuccgca

SEQ ID NO: 13968 - RNA, 20 nt, Artificial Sequence
  Synthetic
cuccaaguuacagcuccgca

SEQ ID NO: 13969 - RNA, 21 nt, Artificial Sequence
  Synthetic
ccuccaaguuacagcuccgca

SEQ ID NO: 13970 - RNA, 22 nt, Artificial Sequence
  Synthetic
gccuccaaguuacagcuccgca

SEQ ID NO: 13971 - RNA, 23 nt, Artificial Sequence
  Synthetic
agccuccaaguuacagcuccgca

SEQ ID NO: 13972 - RNA, 24 nt, Artificial Sequence
  Synthetic
gagccuccaaguuacagcuccgca

SEQ ID NO: 13973 - RNA, 18 nt, Artificial Sequence
  Synthetic
gagccggcacaaaaggca

SEQ ID NO: 13974 - RNA, 19 nt, Artificial Sequence
  Synthetic
ggagccggcacaaaaggca

SEQ ID NO: 13975 - RNA, 20 nt, Artificial Sequence
  Synthetic
aggagccggcacaaaaggca

SEQ ID NO: 13976 - RNA, 21 nt, Artificial Sequence
  Synthetic
gaggagccggcacaaaaggca

SEQ ID NO: 13977 - RNA, 22 nt, Artificial Sequence
  Synthetic
cgaggagccggcacaaaaggca

SEQ ID NO: 13978 - RNA, 23 nt, Artificial Sequence
  Synthetic
gcgaggagccggcacaaaaggca

SEQ ID NO: 13979 - RNA, 24 nt, Artificial Sequence
  Synthetic
cgcgaggagccggcacaaaaggca

SEQ ID NO: 13980 - RNA, 18 nt, Artificial Sequence
  Synthetic
aaauagagcgagagugca

SEQ ID NO: 13981 - RNA, 19 nt, Artificial Sequence
  Synthetic
aaaauagagcgagagugca

SEQ ID NO: 13982 - RNA, 20 nt, Artificial Sequence
  Synthetic
aaaaauagagcgagagugca

SEQ ID NO: 13983 - RNA, 21 nt, Artificial Sequence
  Synthetic
aaaaaauagagcgagagugca

SEQ ID NO: 13984 - RNA, 22 nt, Artificial Sequence
  Synthetic
aaaaaaauagagcgagagugca

SEQ ID NO: 13985 - RNA, 23 nt, Artificial Sequence
  Synthetic
gaaaaaaauagagcgagagugca

SEQ ID NO: 13986 - RNA, 24 nt, Artificial Sequence
  Synthetic
agaaaaaaauagagcgagagugca

SEQ ID NO: 13987 - RNA, 18 nt, Artificial Sequence
  Synthetic
ccgcgcggccuggaaaga

SEQ ID NO: 13988 - RNA, 19 nt, Artificial Sequence
  Synthetic
cccgcgcggccuggaaaga

SEQ ID NO: 13989 - RNA, 20 nt, Artificial Sequence
  Synthetic
gcccgcgcggccuggaaaga

SEQ ID NO: 13990 - RNA, 21 nt, Artificial Sequence
  Synthetic
agcccgcgcggccuggaaaga

SEQ ID NO: 13991 - RNA, 22 nt, Artificial Sequence
  Synthetic
gagcccgcgcggccuggaaaga

SEQ ID NO: 13992 - RNA, 23 nt, Artificial Sequence
  Synthetic
ggagcccgcgcggccuggaaaga

SEQ ID NO: 13993 - RNA, 24 nt, Artificial Sequence
  Synthetic
aggagcccgcgcggccuggaaaga

SEQ ID NO: 13994 - RNA, 18 nt, Artificial Sequence
  Synthetic
aaaaaagaaaaaaauaga

SEQ ID NO: 13995 - RNA, 19 nt, Artificial Sequence
  Synthetic
caaaaaagaaaaaaauaga

SEQ ID NO: 13996 - RNA, 20 nt, Artificial Sequence
  Synthetic
ucaaaaaagaaaaaaauaga

SEQ ID NO: 13997 - RNA, 21 nt, Artificial Sequence
  Synthetic
uucaaaaaagaaaaaaauaga

SEQ ID NO: 13998 - RNA, 22 nt, Artificial Sequence
  Synthetic
auucaaaaaagaaaaaaauaga

SEQ ID NO: 13999 - RNA, 23 nt, Artificial Sequence
  Synthetic
uauucaaaaaagaaaaaaauaga

SEQ ID NO: 14000 - RNA, 24 nt, Artificial Sequence
  Synthetic
uuauucaaaaaagaaaaaaauaga

SEQ ID NO: 14001 - RNA, 18 nt, Artificial Sequence
  Synthetic
cagcuccgcagcgggcga

SEQ ID NO: 14002 - RNA, 19 nt, Artificial Sequence
  Synthetic
acagcuccgcagcgggcga

SEQ ID NO: 14003 - RNA, 20 nt, Artificial Sequence
  Synthetic
uacagcuccgcagcgggcga

SEQ ID NO: 14004 - RNA, 21 nt, Artificial Sequence
  Synthetic
uuacagcuccgcagcgggcga

SEQ ID NO: 14005 - RNA, 22 nt, Artificial Sequence
  Synthetic
guuacagcuccgcagcgggcga

SEQ ID NO: 14006 - RNA, 23 nt, Artificial Sequence
  Synthetic
aguuacagcuccgcagcgggcga

SEQ ID NO: 14007 - RNA, 24 nt, Artificial Sequence
  Synthetic
aaguuacagcuccgcagcgggcga

SEQ ID NO: 14008 - RNA, 18 nt, Artificial Sequence
  Synthetic
ggaaacuuugcccgagga

SEQ ID NO: 14009 - RNA, 19 nt, Artificial Sequence
  Synthetic
gggaaacuuugcccgagga

SEQ ID NO: 14010 - RNA, 20 nt, Artificial Sequence
  Synthetic
cgggaaacuuugcccgagga

SEQ ID NO: 14011 - RNA, 21 nt, Artificial Sequence
  Synthetic
ucgggaaacuuugcccgagga

SEQ ID NO: 14012 - RNA, 22 nt, Artificial Sequence
  Synthetic
cucgggaaacuuugcccgagga

SEQ ID NO: 14013 - RNA, 23 nt, Artificial Sequence
  Synthetic
gcucgggaaacuuugcccgagga

SEQ ID NO: 14014 - RNA, 24 nt, Artificial Sequence
  Synthetic
cgcucgggaaacuuugcccgagga

SEQ ID NO: 14015 - RNA, 18 nt, Artificial Sequence
  Synthetic
aagcggcggaaaggagga

SEQ ID NO: 14016 - RNA, 19 nt, Artificial Sequence
  Synthetic
aaagcggcggaaaggagga

SEQ ID NO: 14017 - RNA, 20 nt, Artificial Sequence
  Synthetic
uaaagcggcggaaaggagga

SEQ ID NO: 14018 - RNA, 21 nt, Artificial Sequence
  Synthetic
auaaagcggcggaaaggagga

SEQ ID NO: 14019 - RNA, 22 nt, Artificial Sequence
  Synthetic
aauaaagcggcggaaaggagga

SEQ ID NO: 14020 - RNA, 23 nt, Artificial Sequence
  Synthetic
aaauaaagcggcggaaaggagga

SEQ ID NO: 14021 - RNA, 24 nt, Artificial Sequence
  Synthetic
gaaauaaagcggcggaaaggagga

SEQ ID NO: 14022 - RNA, 18 nt, Artificial Sequence
  Synthetic
gagaaauaaagcggcgga

SEQ ID NO: 14023 - RNA, 19 nt, Artificial Sequence
  Synthetic
agagaaauaaagcggcgga

SEQ ID NO: 14024 - RNA, 20 nt, Artificial Sequence
  Synthetic
aagagaaauaaagcggcgga

SEQ ID NO: 14025 - RNA, 21 nt, Artificial Sequence
  Synthetic
aaagagaaauaaagcggcgga

SEQ ID NO: 14026 - RNA, 22 nt, Artificial Sequence
  Synthetic
aaaagagaaauaaagcggcgga

SEQ ID NO: 14027 - RNA, 23 nt, Artificial Sequence
  Synthetic
gaaaagagaaauaaagcggcgga

SEQ ID NO: 14028 - RNA, 24 nt, Artificial Sequence
  Synthetic
cgaaaagagaaauaaagcggcgga

SEQ ID NO: 14029 - RNA, 18 nt, Artificial Sequence
  Synthetic
uggggaagcgcgggcgga

SEQ ID NO: 14030 - RNA, 19 nt, Artificial Sequence
  Synthetic
cuggggaagcgcgggcgga

SEQ ID NO: 14031 - RNA, 20 nt, Artificial Sequence
  Synthetic
gcuggggaagcgcgggcgga

SEQ ID NO: 14032 - RNA, 21 nt, Artificial Sequence
  Synthetic
ggcuggggaagcgcgggcgga

SEQ ID NO: 14033 - RNA, 22 nt, Artificial Sequence
  Synthetic
gggcuggggaagcgcgggcgga

SEQ ID NO: 14034 - RNA, 23 nt, Artificial Sequence
  Synthetic
cgggcuggggaagcgcgggcgga

SEQ ID NO: 14035 - RNA, 24 nt, Artificial Sequence
  Synthetic
ccgggcuggggaagcgcgggcgga

SEQ ID NO: 14036 - RNA, 18 nt, Artificial Sequence
  Synthetic
ccaaggccgagccaggga

SEQ ID NO: 14037 - RNA, 19 nt, Artificial Sequence
  Synthetic
cccaaggccgagccaggga

SEQ ID NO: 14038 - RNA, 20 nt, Artificial Sequence
  Synthetic
ccccaaggccgagccaggga

SEQ ID NO: 14039 - RNA, 21 nt, Artificial Sequence
  Synthetic
cccccaaggccgagccaggga

SEQ ID NO: 14040 - RNA, 22 nt, Artificial Sequence
  Synthetic
gcccccaaggccgagccaggga

SEQ ID NO: 14041 - RNA, 23 nt, Artificial Sequence
  Synthetic
cgcccccaaggccgagccaggga

SEQ ID NO: 14042 - RNA, 24 nt, Artificial Sequence
  Synthetic
gcgcccccaaggccgagccaggga

SEQ ID NO: 14043 - RNA, 18 nt, Artificial Sequence
  Synthetic
cggccuggaaagagggga

SEQ ID NO: 14044 - RNA, 19 nt, Artificial Sequence
  Synthetic
gcggccuggaaagagggga

SEQ ID NO: 14045 - RNA, 20 nt, Artificial Sequence
  Synthetic
cgcggccuggaaagagggga

SEQ ID NO: 14046 - RNA, 21 nt, Artificial Sequence
  Synthetic
gcgcggccuggaaagagggga

SEQ ID NO: 14047 - RNA, 22 nt, Artificial Sequence
  Synthetic
cgcgcggccuggaaagagggga

SEQ ID NO: 14048 - RNA, 23 nt, Artificial Sequence
  Synthetic
ccgcgcggccuggaaagagggga

SEQ ID NO: 14049 - RNA, 24 nt, Artificial Sequence
  Synthetic
cccgcgcggccuggaaagagggga

SEQ ID NO: 14050 - RNA, 18 nt, Artificial Sequence
  Synthetic
uggcggggcgggggggga

SEQ ID NO: 14051 - RNA, 19 nt, Artificial Sequence
  Synthetic
cuggcggggcgggggggga

SEQ ID NO: 14052 - RNA, 20 nt, Artificial Sequence
  Synthetic
acuggcggggcgggggggga

SEQ ID NO: 14053 - RNA, 21 nt, Artificial Sequence
  Synthetic
aacuggcggggcgggggggga

SEQ ID NO: 14054 - RNA, 22 nt, Artificial Sequence
  Synthetic
aaacuggcggggcgggggggga

SEQ ID NO: 14055 - RNA, 23 nt, Artificial Sequence
  Synthetic
aaaacuggcggggcgggggggga

SEQ ID NO: 14056 - RNA, 24 nt, Artificial Sequence
  Synthetic
caaaacuggcggggcgggggggga

SEQ ID NO: 14057 - RNA, 18 nt, Artificial Sequence
  Synthetic
gggcgaggggagguggga

SEQ ID NO: 14058 - RNA, 19 nt, Artificial Sequence
  Synthetic
cgggcgaggggagguggga

SEQ ID NO: 14059 - RNA, 20 nt, Artificial Sequence
  Synthetic
gcgggcgaggggagguggga

SEQ ID NO: 14060 - RNA, 21 nt, Artificial Sequence
  Synthetic
agcgggcgaggggagguggga

SEQ ID NO: 14061 - RNA, 22 nt, Artificial Sequence
  Synthetic
cagcgggcgaggggagguggga

SEQ ID NO: 14062 - RNA, 23 nt, Artificial Sequence
  Synthetic
gcagcgggcgaggggagguggga

SEQ ID NO: 14063 - RNA, 24 nt, Artificial Sequence
  Synthetic
cgcagcgggcgaggggagguggga

SEQ ID NO: 14064 - RNA, 18 nt, Artificial Sequence
  Synthetic
gagcccgcgcggccugga

SEQ ID NO: 14065 - RNA, 19 nt, Artificial Sequence
  Synthetic
ggagcccgcgcggccugga

SEQ ID NO: 14066 - RNA, 20 nt, Artificial Sequence
  Synthetic
aggagcccgcgcggccugga

SEQ ID NO: 14067 - RNA, 21 nt, Artificial Sequence
  Synthetic
caggagcccgcgcggccugga

SEQ ID NO: 14068 - RNA, 22 nt, Artificial Sequence
  Synthetic
ccaggagcccgcgcggccugga

SEQ ID NO: 14069 - RNA, 23 nt, Artificial Sequence
  Synthetic
uccaggagcccgcgcggccugga

SEQ ID NO: 14070 - RNA, 24 nt, Artificial Sequence
  Synthetic
cuccaggagcccgcgcggccugga

SEQ ID NO: 14071 - RNA, 18 nt, Artificial Sequence
  Synthetic
cccauuuucuuacgguga

SEQ ID NO: 14072 - RNA, 19 nt, Artificial Sequence
  Synthetic
ccccauuuucuuacgguga

SEQ ID NO: 14073 - RNA, 20 nt, Artificial Sequence
  Synthetic
cccccauuuucuuacgguga

SEQ ID NO: 14074 - RNA, 21 nt, Artificial Sequence
  Synthetic
ccccccauuuucuuacgguga

SEQ ID NO: 14075 - RNA, 22 nt, Artificial Sequence
  Synthetic
cccccccauuuucuuacgguga

SEQ ID NO: 14076 - RNA, 23 nt, Artificial Sequence
  Synthetic
acccccccauuuucuuacgguga

SEQ ID NO: 14077 - RNA, 24 nt, Artificial Sequence
  Synthetic
uacccccccauuuucuuacgguga

SEQ ID NO: 14078 - RNA, 18 nt, Artificial Sequence
  Synthetic
gagggagcgcacggcaac

SEQ ID NO: 14079 - RNA, 19 nt, Artificial Sequence
  Synthetic
ggagggagcgcacggcaac

SEQ ID NO: 14080 - RNA, 20 nt, Artificial Sequence
  Synthetic
gggagggagcgcacggcaac

SEQ ID NO: 14081 - RNA, 21 nt, Artificial Sequence
  Synthetic
ugggagggagcgcacggcaac

SEQ ID NO: 14082 - RNA, 22 nt, Artificial Sequence
  Synthetic
gugggagggagcgcacggcaac

SEQ ID NO: 14083 - RNA, 23 nt, Artificial Sequence
  Synthetic
ggugggagggagcgcacggcaac

SEQ ID NO: 14084 - RNA, 24 nt, Artificial Sequence
  Synthetic
aggugggagggagcgcacggcaac

SEQ ID NO: 14085 - RNA, 18 nt, Artificial Sequence
  Synthetic
cugcucccccccacacac

SEQ ID NO: 14086 - RNA, 19 nt, Artificial Sequence
  Synthetic
ccugcucccccccacacac

SEQ ID NO: 14087 - RNA, 20 nt, Artificial Sequence
  Synthetic
cccugcucccccccacacac

SEQ ID NO: 14088 - RNA, 21 nt, Artificial Sequence
  Synthetic
gcccugcucccccccacacac

SEQ ID NO: 14089 - RNA, 22 nt, Artificial Sequence
  Synthetic
cgcccugcucccccccacacac

SEQ ID NO: 14090 - RNA, 23 nt, Artificial Sequence
  Synthetic
gcgcccugcucccccccacacac

SEQ ID NO: 14091 - RNA, 24 nt, Artificial Sequence
  Synthetic
ugcgcccugcucccccccacacac

SEQ ID NO: 14092 - RNA, 18 nt, Artificial Sequence
  Synthetic
aauagagcgagagugcac

SEQ ID NO: 14093 - RNA, 19 nt, Artificial Sequence
  Synthetic
aaauagagcgagagugcac

SEQ ID NO: 14094 - RNA, 20 nt, Artificial Sequence
  Synthetic
aaaauagagcgagagugcac

SEQ ID NO: 14095 - RNA, 21 nt, Artificial Sequence
  Synthetic
aaaaauagagcgagagugcac

SEQ ID NO: 14096 - RNA, 22 nt, Artificial Sequence
  Synthetic
aaaaaauagagcgagagugcac

SEQ ID NO: 14097 - RNA, 23 nt, Artificial Sequence
  Synthetic
aaaaaaauagagcgagagugcac

SEQ ID NO: 14098 - RNA, 24 nt, Artificial Sequence
  Synthetic
gaaaaaaauagagcgagagugcac

SEQ ID NO: 14099 - RNA, 18 nt, Artificial Sequence
  Synthetic
acagcaaagaaaaaucac

SEQ ID NO: 14100 - RNA, 19 nt, Artificial Sequence
  Synthetic
gacagcaaagaaaaaucac

SEQ ID NO: 14101 - RNA, 20 nt, Artificial Sequence
  Synthetic
ggacagcaaagaaaaaucac

SEQ ID NO: 14102 - RNA, 21 nt, Artificial Sequence
  Synthetic
aggacagcaaagaaaaaucac

SEQ ID NO: 14103 - RNA, 22 nt, Artificial Sequence
  Synthetic
gaggacagcaaagaaaaaucac

SEQ ID NO: 14104 - RNA, 23 nt, Artificial Sequence
  Synthetic
agaggacagcaaagaaaaaucac

SEQ ID NO: 14105 - RNA, 24 nt, Artificial Sequence
  Synthetic
gagaggacagcaaagaaaaaucac

SEQ ID NO: 14106 - RNA, 18 nt, Artificial Sequence
  Synthetic
caaggccgagccagggac

SEQ ID NO: 14107 - RNA, 19 nt, Artificial Sequence
  Synthetic
ccaaggccgagccagggac

SEQ ID NO: 14108 - RNA, 20 nt, Artificial Sequence
  Synthetic
cccaaggccgagccagggac

SEQ ID NO: 14109 - RNA, 21 nt, Artificial Sequence
  Synthetic
ccccaaggccgagccagggac

SEQ ID NO: 14110 - RNA, 22 nt, Artificial Sequence
  Synthetic
cccccaaggccgagccagggac

SEQ ID NO: 14111 - RNA, 23 nt, Artificial Sequence
  Synthetic
gcccccaaggccgagccagggac

SEQ ID NO: 14112 - RNA, 24 nt, Artificial Sequence
  Synthetic
cgcccccaaggccgagccagggac

SEQ ID NO: 14113 - RNA, 18 nt, Artificial Sequence
  Synthetic
ggccuggaaagaggggac

SEQ ID NO: 14114 - RNA, 19 nt, Artificial Sequence
  Synthetic
cggccuggaaagaggggac

SEQ ID NO: 14115 - RNA, 20 nt, Artificial Sequence
  Synthetic
gcggccuggaaagaggggac

SEQ ID NO: 14116 - RNA, 21 nt, Artificial Sequence
  Synthetic
cgcggccuggaaagaggggac

SEQ ID NO: 14117 - RNA, 22 nt, Artificial Sequence
  Synthetic
gcgcggccuggaaagaggggac

SEQ ID NO: 14118 - RNA, 23 nt, Artificial Sequence
  Synthetic
cgcgcggccuggaaagaggggac

SEQ ID NO: 14119 - RNA, 24 nt, Artificial Sequence
  Synthetic
ccgcgcggccuggaaagaggggac

SEQ ID NO: 14120 - RNA, 18 nt, Artificial Sequence
  Synthetic
auagagcgagagugcacc

SEQ ID NO: 14121 - RNA, 19 nt, Artificial Sequence
  Synthetic
aauagagcgagagugcacc

SEQ ID NO: 14122 - RNA, 20 nt, Artificial Sequence
  Synthetic
aaauagagcgagagugcacc

SEQ ID NO: 14123 - RNA, 21 nt, Artificial Sequence
  Synthetic
aaaauagagcgagagugcacc

SEQ ID NO: 14124 - RNA, 22 nt, Artificial Sequence
  Synthetic
aaaaauagagcgagagugcacc

SEQ ID NO: 14125 - RNA, 23 nt, Artificial Sequence
  Synthetic
aaaaaauagagcgagagugcacc

SEQ ID NO: 14126 - RNA, 24 nt, Artificial Sequence
  Synthetic
aaaaaaauagagcgagagugcacc

SEQ ID NO: 14127 - RNA, 18 nt, Artificial Sequence
  Synthetic
aaggccgagccagggacc

SEQ ID NO: 14128 - RNA, 19 nt, Artificial Sequence
  Synthetic
caaggccgagccagggacc

SEQ ID NO: 14129 - RNA, 20 nt, Artificial Sequence
  Synthetic
ccaaggccgagccagggacc

SEQ ID NO: 14130 - RNA, 21 nt, Artificial Sequence
  Synthetic
cccaaggccgagccagggacc

SEQ ID NO: 14131 - RNA, 22 nt, Artificial Sequence
  Synthetic
ccccaaggccgagccagggacc

SEQ ID NO: 14132 - RNA, 23 nt, Artificial Sequence
  Synthetic
cccccaaggccgagccagggacc

SEQ ID NO: 14133 - RNA, 24 nt, Artificial Sequence
  Synthetic
gcccccaaggccgagccagggacc

SEQ ID NO: 14134 - RNA, 18 nt, Artificial Sequence
  Synthetic
gccuggaaagaggggacc

SEQ ID NO: 14135 - RNA, 19 nt, Artificial Sequence
  Synthetic
ggccuggaaagaggggacc

SEQ ID NO: 14136 - RNA, 20 nt, Artificial Sequence
  Synthetic
cggccuggaaagaggggacc

SEQ ID NO: 14137 - RNA, 21 nt, Artificial Sequence
  Synthetic
gcggccuggaaagaggggacc

SEQ ID NO: 14138 - RNA, 22 nt, Artificial Sequence
  Synthetic
cgcggccuggaaagaggggacc

SEQ ID NO: 14139 - RNA, 23 nt, Artificial Sequence
  Synthetic
gcgcggccuggaaagaggggacc

SEQ ID NO: 14140 - RNA, 24 nt, Artificial Sequence
  Synthetic
cgcgcggccuggaaagaggggacc

SEQ ID NO: 14141 - RNA, 18 nt, Artificial Sequence
  Synthetic
cccgcugcacacuugacc

SEQ ID NO: 14142 - RNA, 19 nt, Artificial Sequence
  Synthetic
ucccgcugcacacuugacc

SEQ ID NO: 14143 - RNA, 20 nt, Artificial Sequence
  Synthetic
cucccgcugcacacuugacc

SEQ ID NO: 14144 - RNA, 21 nt, Artificial Sequence
  Synthetic
ccucccgcugcacacuugacc

SEQ ID NO: 14145 - RNA, 22 nt, Artificial Sequence
  Synthetic
uccucccgcugcacacuugacc

SEQ ID NO: 14146 - RNA, 23 nt, Artificial Sequence
  Synthetic
uuccucccgcugcacacuugacc

SEQ ID NO: 14147 - RNA, 24 nt, Artificial Sequence
  Synthetic
uuuccucccgcugcacacuugacc

SEQ ID NO: 14148 - RNA, 18 nt, Artificial Sequence
  Synthetic
cggcgcaggccggggccc

SEQ ID NO: 14149 - RNA, 19 nt, Artificial Sequence
  Synthetic
gcggcgcaggccggggccc

SEQ ID NO: 14150 - RNA, 20 nt, Artificial Sequence
  Synthetic
ggcggcgcaggccggggccc

SEQ ID NO: 14151 - RNA, 21 nt, Artificial Sequence
  Synthetic
aggcggcgcaggccggggccc

SEQ ID NO: 14152 - RNA, 22 nt, Artificial Sequence
  Synthetic
caggcggcgcaggccggggccc

SEQ ID NO: 14153 - RNA, 23 nt, Artificial Sequence
  Synthetic
gcaggcggcgcaggccggggccc

SEQ ID NO: 14154 - RNA, 24 nt, Artificial Sequence
  Synthetic
ggcaggcggcgcaggccggggccc

SEQ ID NO: 14155 - RNA, 18 nt, Artificial Sequence
  Synthetic
gcucgggaaacuuugccc

SEQ ID NO: 14156 - RNA, 19 nt, Artificial Sequence
  Synthetic
cgcucgggaaacuuugccc

SEQ ID NO: 14157 - RNA, 20 nt, Artificial Sequence
  Synthetic
gcgcucgggaaacuuugccc

SEQ ID NO: 14158 - RNA, 21 nt, Artificial Sequence
  Synthetic
ugcgcucgggaaacuuugccc

SEQ ID NO: 14159 - RNA, 22 nt, Artificial Sequence
  Synthetic
cugcgcucgggaaacuuugccc

SEQ ID NO: 14160 - RNA, 23 nt, Artificial Sequence
  Synthetic
gcugcgcucgggaaacuuugccc

SEQ ID NO: 14161 - RNA, 24 nt, Artificial Sequence
  Synthetic
ggcugcgcucgggaaacuuugccc

SEQ ID NO: 14162 - RNA, 18 nt, Artificial Sequence
  Synthetic
ucucaccucuuuucuccc

SEQ ID NO: 14163 - RNA, 19 nt, Artificial Sequence
  Synthetic
gucucaccucuuuucuccc

SEQ ID NO: 14164 - RNA, 20 nt, Artificial Sequence
  Synthetic
agucucaccucuuuucuccc

SEQ ID NO: 14165 - RNA, 21 nt, Artificial Sequence
  Synthetic
cagucucaccucuuuucuccc

SEQ ID NO: 14166 - RNA, 22 nt, Artificial Sequence
  Synthetic
ccagucucaccucuuuucuccc

SEQ ID NO: 14167 - RNA, 23 nt, Artificial Sequence
  Synthetic
gccagucucaccucuuuucuccc

SEQ ID NO: 14168 - RNA, 24 nt, Artificial Sequence
  Synthetic
agccagucucaccucuuuucuccc

SEQ ID NO: 14169 - RNA, 18 nt, Artificial Sequence
  Synthetic
ggggccgaaguaaaagcc

SEQ ID NO: 14170 - RNA, 19 nt, Artificial Sequence
  Synthetic
aggggccgaaguaaaagcc

SEQ ID NO: 14171 - RNA, 20 nt, Artificial Sequence
  Synthetic
caggggccgaaguaaaagcc

SEQ ID NO: 14172 - RNA, 21 nt, Artificial Sequence
  Synthetic
ccaggggccgaaguaaaagcc

SEQ ID NO: 14173 - RNA, 22 nt, Artificial Sequence
  Synthetic
gccaggggccgaaguaaaagcc

SEQ ID NO: 14174 - RNA, 23 nt, Artificial Sequence
  Synthetic
cgccaggggccgaaguaaaagcc

SEQ ID NO: 14175 - RNA, 24 nt, Artificial Sequence
  Synthetic
acgccaggggccgaaguaaaagcc

SEQ ID NO: 14176 - RNA, 18 nt, Artificial Sequence
  Synthetic
caccgggaggcugcagcc

SEQ ID NO: 14177 - RNA, 19 nt, Artificial Sequence
  Synthetic
gcaccgggaggcugcagcc

SEQ ID NO: 14178 - RNA, 20 nt, Artificial Sequence
  Synthetic
ugcaccgggaggcugcagcc

SEQ ID NO: 14179 - RNA, 21 nt, Artificial Sequence
  Synthetic
gugcaccgggaggcugcagcc

SEQ ID NO: 14180 - RNA, 22 nt, Artificial Sequence
  Synthetic
agugcaccgggaggcugcagcc

SEQ ID NO: 14181 - RNA, 23 nt, Artificial Sequence
  Synthetic
gagugcaccgggaggcugcagcc

SEQ ID NO: 14182 - RNA, 24 nt, Artificial Sequence
  Synthetic
agagugcaccgggaggcugcagcc

SEQ ID NO: 14183 - RNA, 18 nt, Artificial Sequence
  Synthetic
cgcccccaaggccgagcc

SEQ ID NO: 14184 - RNA, 19 nt, Artificial Sequence
  Synthetic
gcgcccccaaggccgagcc

SEQ ID NO: 14185 - RNA, 20 nt, Artificial Sequence
  Synthetic
ggcgcccccaaggccgagcc

SEQ ID NO: 14186 - RNA, 21 nt, Artificial Sequence
  Synthetic
gggcgcccccaaggccgagcc

SEQ ID NO: 14187 - RNA, 22 nt, Artificial Sequence
  Synthetic
agggcgcccccaaggccgagcc

SEQ ID NO: 14188 - RNA, 23 nt, Artificial Sequence
  Synthetic
gagggcgcccccaaggccgagcc

SEQ ID NO: 14189 - RNA, 24 nt, Artificial Sequence
  Synthetic
cgagggcgcccccaaggccgagcc

SEQ ID NO: 14190 - RNA, 18 nt, Artificial Sequence
  Synthetic
uccccgcguguggacgcc

SEQ ID NO: 14191 - RNA, 19 nt, Artificial Sequence
  Synthetic
cuccccgcguguggacgcc

SEQ ID NO: 14192 - RNA, 20 nt, Artificial Sequence
  Synthetic
gcuccccgcguguggacgcc

SEQ ID NO: 14193 - RNA, 21 nt, Artificial Sequence
  Synthetic
cgcuccccgcguguggacgcc

SEQ ID NO: 14194 - RNA, 22 nt, Artificial Sequence
  Synthetic
ucgcuccccgcguguggacgcc

SEQ ID NO: 14195 - RNA, 23 nt, Artificial Sequence
  Synthetic
cucgcuccccgcguguggacgcc

SEQ ID NO: 14196 - RNA, 24 nt, Artificial Sequence
  Synthetic
gcucgcuccccgcguguggacgcc

SEQ ID NO: 14197 - RNA, 18 nt, Artificial Sequence
  Synthetic
cgcggacucaggagcgcc

SEQ ID NO: 14198 - RNA, 19 nt, Artificial Sequence
  Synthetic
ccgcggacucaggagcgcc

SEQ ID NO: 14199 - RNA, 20 nt, Artificial Sequence
  Synthetic
uccgcggacucaggagcgcc

SEQ ID NO: 14200 - RNA, 21 nt, Artificial Sequence
  Synthetic
cuccgcggacucaggagcgcc

SEQ ID NO: 14201 - RNA, 22 nt, Artificial Sequence
  Synthetic
acuccgcggacucaggagcgcc

SEQ ID NO: 14202 - RNA, 23 nt, Artificial Sequence
  Synthetic
gacuccgcggacucaggagcgcc

SEQ ID NO: 14203 - RNA, 24 nt, Artificial Sequence
  Synthetic
cgacuccgcggacucaggagcgcc

SEQ ID NO: 14204 - RNA, 18 nt, Artificial Sequence
  Synthetic
ccaggagcccgcgcggcc

SEQ ID NO: 14205 - RNA, 19 nt, Artificial Sequence
  Synthetic
uccaggagcccgcgcggcc

SEQ ID NO: 14206 - RNA, 20 nt, Artificial Sequence
  Synthetic
cuccaggagcccgcgcggcc

SEQ ID NO: 14207 - RNA, 21 nt, Artificial Sequence
  Synthetic
ucuccaggagcccgcgcggcc

SEQ ID NO: 14208 - RNA, 22 nt, Artificial Sequence
  Synthetic
gucuccaggagcccgcgcggcc

SEQ ID NO: 14209 - RNA, 23 nt, Artificial Sequence
  Synthetic
agucuccaggagcccgcgcggcc

SEQ ID NO: 14210 - RNA, 24 nt, Artificial Sequence
  Synthetic
aagucuccaggagcccgcgcggcc

SEQ ID NO: 14211 - RNA, 18 nt, Artificial Sequence
  Synthetic
ggccccucucccgacucc

SEQ ID NO: 14212 - RNA, 19 nt, Artificial Sequence
  Synthetic
cggccccucucccgacucc

SEQ ID NO: 14213 - RNA, 20 nt, Artificial Sequence
  Synthetic
gcggccccucucccgacucc

SEQ ID NO: 14214 - RNA, 21 nt, Artificial Sequence
  Synthetic
cgcggccccucucccgacucc

SEQ ID NO: 14215 - RNA, 22 nt, Artificial Sequence
  Synthetic
ccgcggccccucucccgacucc

SEQ ID NO: 14216 - RNA, 23 nt, Artificial Sequence
  Synthetic
gccgcggccccucucccgacucc

SEQ ID NO: 14217 - RNA, 24 nt, Artificial Sequence
  Synthetic
cgccgcggccccucucccgacucc

SEQ ID NO: 14218 - RNA, 18 nt, Artificial Sequence
  Synthetic
ggcagcgcccaagucucc

SEQ ID NO: 14219 - RNA, 19 nt, Artificial Sequence
  Synthetic
gggcagcgcccaagucucc

SEQ ID NO: 14220 - RNA, 20 nt, Artificial Sequence
  Synthetic
agggcagcgcccaagucucc

SEQ ID NO: 14221 - RNA, 21 nt, Artificial Sequence
  Synthetic
aagggcagcgcccaagucucc

SEQ ID NO: 14222 - RNA, 22 nt, Artificial Sequence
  Synthetic
gaagggcagcgcccaagucucc

SEQ ID NO: 14223 - RNA, 23 nt, Artificial Sequence
  Synthetic
ggaagggcagcgcccaagucucc

SEQ ID NO: 14224 - RNA, 24 nt, Artificial Sequence
  Synthetic
cggaagggcagcgcccaagucucc

SEQ ID NO: 14225 - RNA, 18 nt, Artificial Sequence
  Synthetic
gucucaccucuuuucucc

SEQ ID NO: 14226 - RNA, 19 nt, Artificial Sequence
  Synthetic
agucucaccucuuuucucc

SEQ ID NO: 14227 - RNA, 20 nt, Artificial Sequence
  Synthetic
cagucucaccucuuuucucc

SEQ ID NO: 14228 - RNA, 21 nt, Artificial Sequence
  Synthetic
ccagucucaccucuuuucucc

SEQ ID NO: 14229 - RNA, 22 nt, Artificial Sequence
  Synthetic
gccagucucaccucuuuucucc

SEQ ID NO: 14230 - RNA, 23 nt, Artificial Sequence
  Synthetic
agccagucucaccucuuuucucc

SEQ ID NO: 14231 - RNA, 24 nt, Artificial Sequence
  Synthetic
aagccagucucaccucuuuucucc

SEQ ID NO: 14232 - RNA, 18 nt, Artificial Sequence
  Synthetic
cggcgcgggagggcaagc

SEQ ID NO: 14233 - RNA, 19 nt, Artificial Sequence
  Synthetic
gcggcgcgggagggcaagc

SEQ ID NO: 14234 - RNA, 20 nt, Artificial Sequence
  Synthetic
ggcggcgcgggagggcaagc

SEQ ID NO: 14235 - RNA, 18 nt, Artificial Sequence
  Synthetic
gccccgggcuggggaagc

SEQ ID NO: 14236 - RNA, 19 nt, Artificial Sequence
  Synthetic
agccccgggcuggggaagc

SEQ ID NO: 14237 - RNA, 20 nt, Artificial Sequence
  Synthetic
cagccccgggcuggggaagc

SEQ ID NO: 14238 - RNA, 21 nt, Artificial Sequence
  Synthetic
gcagccccgggcuggggaagc

SEQ ID NO: 14239 - RNA, 22 nt, Artificial Sequence
  Synthetic
ugcagccccgggcuggggaagc

SEQ ID NO: 14240 - RNA, 23 nt, Artificial Sequence
  Synthetic
cugcagccccgggcuggggaagc

SEQ ID NO: 14241 - RNA, 24 nt, Artificial Sequence
  Synthetic
gcugcagccccgggcuggggaagc

SEQ ID NO: 14242 - RNA, 18 nt, Artificial Sequence
  Synthetic
gcgcccccaaggccgagc

SEQ ID NO: 14243 - RNA, 19 nt, Artificial Sequence
  Synthetic
ggcgcccccaaggccgagc

SEQ ID NO: 14244 - RNA, 20 nt, Artificial Sequence
  Synthetic
gggcgcccccaaggccgagc

SEQ ID NO: 14245 - RNA, 21 nt, Artificial Sequence
  Synthetic
agggcgcccccaaggccgagc

SEQ ID NO: 14246 - RNA, 22 nt, Artificial Sequence
  Synthetic
gagggcgcccccaaggccgagc

SEQ ID NO: 14247 - RNA, 23 nt, Artificial Sequence
  Synthetic
cgagggcgcccccaaggccgagc

SEQ ID NO: 14248 - RNA, 24 nt, Artificial Sequence
  Synthetic
ccgagggcgcccccaaggccgagc

SEQ ID NO: 14249 - RNA, 18 nt, Artificial Sequence
  Synthetic
cuccccgcguguggacgc

SEQ ID NO: 14250 - RNA, 19 nt, Artificial Sequence
  Synthetic
gcuccccgcguguggacgc

SEQ ID NO: 14251 - RNA, 20 nt, Artificial Sequence
  Synthetic
cgcuccccgcguguggacgc

SEQ ID NO: 14252 - RNA, 21 nt, Artificial Sequence
  Synthetic
ucgcuccccgcguguggacgc

SEQ ID NO: 14253 - RNA, 22 nt, Artificial Sequence
  Synthetic
cucgcuccccgcguguggacgc

SEQ ID NO: 14254 - RNA, 23 nt, Artificial Sequence
  Synthetic
gcucgcuccccgcguguggacgc

SEQ ID NO: 14255 - RNA, 24 nt, Artificial Sequence
  Synthetic
cgcucgcuccccgcguguggacgc

SEQ ID NO: 14256 - RNA, 18 nt, Artificial Sequence
  Synthetic
gcgcgggagggcaagcgc

SEQ ID NO: 14257 - RNA, 19 nt, Artificial Sequence
  Synthetic
ggcgcgggagggcaagcgc

SEQ ID NO: 14258 - RNA, 20 nt, Artificial Sequence
  Synthetic
cggcgcgggagggcaagcgc

SEQ ID NO: 14259 - RNA, 18 nt, Artificial Sequence
  Synthetic
ccgcggacucaggagcgc

SEQ ID NO: 14260 - RNA, 19 nt, Artificial Sequence
  Synthetic
uccgcggacucaggagcgc

SEQ ID NO: 14261 - RNA, 20 nt, Artificial Sequence
  Synthetic
cuccgcggacucaggagcgc

SEQ ID NO: 14262 - RNA, 21 nt, Artificial Sequence
  Synthetic
acuccgcggacucaggagcgc

SEQ ID NO: 14263 - RNA, 22 nt, Artificial Sequence
  Synthetic
gacuccgcggacucaggagcgc

SEQ ID NO: 14264 - RNA, 23 nt, Artificial Sequence
  Synthetic
cgacuccgcggacucaggagcgc

SEQ ID NO: 14265 - RNA, 24 nt, Artificial Sequence
  Synthetic
ccgacuccgcggacucaggagcgc

SEQ ID NO: 14266 - RNA, 18 nt, Artificial Sequence
  Synthetic
ccgagcccgcggcugcgc

SEQ ID NO: 14267 - RNA, 19 nt, Artificial Sequence
  Synthetic
cccgagcccgcggcugcgc

SEQ ID NO: 14268 - RNA, 20 nt, Artificial Sequence
  Synthetic
ccccgagcccgcggcugcgc

SEQ ID NO: 14269 - RNA, 21 nt, Artificial Sequence
  Synthetic
gccccgagcccgcggcugcgc

SEQ ID NO: 14270 - RNA, 22 nt, Artificial Sequence
  Synthetic
agccccgagcccgcggcugcgc

SEQ ID NO: 14271 - RNA, 23 nt, Artificial Sequence
  Synthetic
aagccccgagcccgcggcugcgc

SEQ ID NO: 14272 - RNA, 24 nt, Artificial Sequence
  Synthetic
aaagccccgagcccgcggcugcgc

SEQ ID NO: 14273 - RNA, 18 nt, Artificial Sequence
  Synthetic
gaggcaggcggcgcaggc

SEQ ID NO: 14274 - RNA, 19 nt, Artificial Sequence
  Synthetic
agaggcaggcggcgcaggc

SEQ ID NO: 14275 - RNA, 20 nt, Artificial Sequence
  Synthetic
gagaggcaggcggcgcaggc

SEQ ID NO: 14276 - RNA, 21 nt, Artificial Sequence
  Synthetic
ggagaggcaggcggcgcaggc

SEQ ID NO: 14277 - RNA, 22 nt, Artificial Sequence
  Synthetic
gggagaggcaggcggcgcaggc

SEQ ID NO: 14278 - RNA, 23 nt, Artificial Sequence
  Synthetic
ggggagaggcaggcggcgcaggc

SEQ ID NO: 14279 - RNA, 24 nt, Artificial Sequence
  Synthetic
cggggagaggcaggcggcgcaggc

SEQ ID NO: 14280 - RNA, 18 nt, Artificial Sequence
  Synthetic
uccaggagcccgcgcggc

SEQ ID NO: 14281 - RNA, 19 nt, Artificial Sequence
  Synthetic
cuccaggagcccgcgcggc

SEQ ID NO: 14282 - RNA, 20 nt, Artificial Sequence
  Synthetic
ucuccaggagcccgcgcggc

SEQ ID NO: 14283 - RNA, 21 nt, Artificial Sequence
  Synthetic
gucuccaggagcccgcgcggc

SEQ ID NO: 14284 - RNA, 22 nt, Artificial Sequence
  Synthetic
agucuccaggagcccgcgcggc

SEQ ID NO: 14285 - RNA, 23 nt, Artificial Sequence
  Synthetic
aagucuccaggagcccgcgcggc

SEQ ID NO: 14286 - RNA, 24 nt, Artificial Sequence
  Synthetic
caagucuccaggagcccgcgcggc

SEQ ID NO: 14287 - RNA, 18 nt, Artificial Sequence
  Synthetic
gaggcugcagccccgggc

SEQ ID NO: 14288 - RNA, 19 nt, Artificial Sequence
  Synthetic
ggaggcugcagccccgggc

SEQ ID NO: 14289 - RNA, 20 nt, Artificial Sequence
  Synthetic
gggaggcugcagccccgggc

SEQ ID NO: 14290 - RNA, 21 nt, Artificial Sequence
  Synthetic
cgggaggcugcagccccgggc

SEQ ID NO: 14291 - RNA, 22 nt, Artificial Sequence
  Synthetic
ccgggaggcugcagccccgggc

SEQ ID NO: 14292 - RNA, 23 nt, Artificial Sequence
  Synthetic
accgggaggcugcagccccgggc

SEQ ID NO: 14293 - RNA, 24 nt, Artificial Sequence
  Synthetic
caccgggaggcugcagccccgggc

SEQ ID NO: 14294 - RNA, 18 nt, Artificial Sequence
  Synthetic
uacagcuccgcagcgggc

SEQ ID NO: 14295 - RNA, 19 nt, Artificial Sequence
  Synthetic
uuacagcuccgcagcgggc

SEQ ID NO: 14296 - RNA, 20 nt, Artificial Sequence
  Synthetic
guuacagcuccgcagcgggc

SEQ ID NO: 14297 - RNA, 21 nt, Artificial Sequence
  Synthetic
aguuacagcuccgcagcgggc

SEQ ID NO: 14298 - RNA, 22 nt, Artificial Sequence
  Synthetic
aaguuacagcuccgcagcgggc

SEQ ID NO: 14299 - RNA, 23 nt, Artificial Sequence
  Synthetic
caaguuacagcuccgcagcgggc

SEQ ID NO: 14300 - RNA, 24 nt, Artificial Sequence
  Synthetic
ccaaguuacagcuccgcagcgggc

SEQ ID NO: 14301 - RNA, 18 nt, Artificial Sequence
  Synthetic
ggcggcgcaggccggggc

SEQ ID NO: 14302 - RNA, 19 nt, Artificial Sequence
  Synthetic
aggcggcgcaggccggggc

SEQ ID NO: 14303 - RNA, 20 nt, Artificial Sequence
  Synthetic
caggcggcgcaggccggggc

SEQ ID NO: 14304 - RNA, 21 nt, Artificial Sequence
  Synthetic
gcaggcggcgcaggccggggc

SEQ ID NO: 14305 - RNA, 22 nt, Artificial Sequence
  Synthetic
ggcaggcggcgcaggccggggc

SEQ ID NO: 14306 - RNA, 23 nt, Artificial Sequence
  Synthetic
aggcaggcggcgcaggccggggc

SEQ ID NO: 14307 - RNA, 24 nt, Artificial Sequence
  Synthetic
gaggcaggcggcgcaggccggggc

SEQ ID NO: 14308 - RNA, 18 nt, Artificial Sequence
  Synthetic
uugcaaaacuggcggggc

SEQ ID NO: 14309 - RNA, 19 nt, Artificial Sequence
  Synthetic
uuugcaaaacuggcggggc

SEQ ID NO: 14310 - RNA, 20 nt, Artificial Sequence
  Synthetic
uuuugcaaaacuggcggggc

SEQ ID NO: 14311 - RNA, 21 nt, Artificial Sequence
  Synthetic
auuuugcaaaacuggcggggc

SEQ ID NO: 14312 - RNA, 22 nt, Artificial Sequence
  Synthetic
uauuuugcaaaacuggcggggc

SEQ ID NO: 14313 - RNA, 23 nt, Artificial Sequence
  Synthetic
uuauuuugcaaaacuggcggggc

SEQ ID NO: 14314 - RNA, 24 nt, Artificial Sequence
  Synthetic
auuauuuugcaaaacuggcggggc

SEQ ID NO: 14315 - RNA, 18 nt, Artificial Sequence
  Synthetic
caaacacccaccucuggc

SEQ ID NO: 14316 - RNA, 19 nt, Artificial Sequence
  Synthetic
acaaacacccaccucuggc

SEQ ID NO: 14317 - RNA, 20 nt, Artificial Sequence
  Synthetic
gacaaacacccaccucuggc

SEQ ID NO: 14318 - RNA, 21 nt, Artificial Sequence
  Synthetic
ggacaaacacccaccucuggc

SEQ ID NO: 14319 - RNA, 22 nt, Artificial Sequence
  Synthetic
gggacaaacacccaccucuggc

SEQ ID NO: 14320 - RNA, 23 nt, Artificial Sequence
  Synthetic
cgggacaaacacccaccucuggc

SEQ ID NO: 14321 - RNA, 24 nt, Artificial Sequence
  Synthetic
gcgggacaaacacccaccucuggc

SEQ ID NO: 14322 - RNA, 18 nt, Artificial Sequence
  Synthetic
gcgcucgggaaacuuugc

SEQ ID NO: 14323 - RNA, 19 nt, Artificial Sequence
  Synthetic
ugcgcucgggaaacuuugc

SEQ ID NO: 14324 - RNA, 20 nt, Artificial Sequence
  Synthetic
cugcgcucgggaaacuuugc

SEQ ID NO: 14325 - RNA, 21 nt, Artificial Sequence
  Synthetic
gcugcgcucgggaaacuuugc

SEQ ID NO: 14326 - RNA, 22 nt, Artificial Sequence
  Synthetic
ggcugcgcucgggaaacuuugc

SEQ ID NO: 14327 - RNA, 23 nt, Artificial Sequence
  Synthetic
cggcugcgcucgggaaacuuugc

SEQ ID NO: 14328 - RNA, 24 nt, Artificial Sequence
  Synthetic
gcggcugcgcucgggaaacuuugc

SEQ ID NO: 14329 - RNA, 18 nt, Artificial Sequence
  Synthetic
ucccgacuccgcggacuc

SEQ ID NO: 14330 - RNA, 19 nt, Artificial Sequence
  Synthetic
cucccgacuccgcggacuc

SEQ ID NO: 14331 - RNA, 20 nt, Artificial Sequence
  Synthetic
ucucccgacuccgcggacuc

SEQ ID NO: 14332 - RNA, 21 nt, Artificial Sequence
  Synthetic
cucucccgacuccgcggacuc

SEQ ID NO: 14333 - RNA, 22 nt, Artificial Sequence
  Synthetic
ccucucccgacuccgcggacuc

SEQ ID NO: 14334 - RNA, 23 nt, Artificial Sequence
  Synthetic
cccucucccgacuccgcggacuc

SEQ ID NO: 14335 - RNA, 24 nt, Artificial Sequence
  Synthetic
ccccucucccgacuccgcggacuc

SEQ ID NO: 14336 - RNA, 18 nt, Artificial Sequence
  Synthetic
gagcccgcggcugcgcuc

SEQ ID NO: 14337 - RNA, 19 nt, Artificial Sequence
  Synthetic
cgagcccgcggcugcgcuc

SEQ ID NO: 14338 - RNA, 20 nt, Artificial Sequence
  Synthetic
ccgagcccgcggcugcgcuc

SEQ ID NO: 14339 - RNA, 21 nt, Artificial Sequence
  Synthetic
cccgagcccgcggcugcgcuc

SEQ ID NO: 14340 - RNA, 22 nt, Artificial Sequence
  Synthetic
ccccgagcccgcggcugcgcuc

SEQ ID NO: 14341 - RNA, 23 nt, Artificial Sequence
  Synthetic
gccccgagcccgcggcugcgcuc

SEQ ID NO: 14342 - RNA, 24 nt, Artificial Sequence
  Synthetic
agccccgagcccgcggcugcgcuc

SEQ ID NO: 14343 - RNA, 18 nt, Artificial Sequence
  Synthetic
agccagguagaguugcuc

SEQ ID NO: 14344 - RNA, 19 nt, Artificial Sequence
  Synthetic
aagccagguagaguugcuc

SEQ ID NO: 14345 - RNA, 20 nt, Artificial Sequence
  Synthetic
gaagccagguagaguugcuc

SEQ ID NO: 14346 - RNA, 21 nt, Artificial Sequence
  Synthetic
ggaagccagguagaguugcuc

SEQ ID NO: 14347 - RNA, 22 nt, Artificial Sequence
  Synthetic
gggaagccagguagaguugcuc

SEQ ID NO: 14348 - RNA, 23 nt, Artificial Sequence
  Synthetic
agggaagccagguagaguugcuc

SEQ ID NO: 14349 - RNA, 24 nt, Artificial Sequence
  Synthetic
gagggaagccagguagaguugcuc

SEQ ID NO: 14350 - RNA, 18 nt, Artificial Sequence
  Synthetic
gggcagcgcccaagucuc

SEQ ID NO: 14351 - RNA, 19 nt, Artificial Sequence
  Synthetic
agggcagcgcccaagucuc

SEQ ID NO: 14352 - RNA, 20 nt, Artificial Sequence
  Synthetic
aagggcagcgcccaagucuc

SEQ ID NO: 14353 - RNA, 21 nt, Artificial Sequence
  Synthetic
gaagggcagcgcccaagucuc

SEQ ID NO: 14354 - RNA, 22 nt, Artificial Sequence
  Synthetic
ggaagggcagcgcccaagucuc

SEQ ID NO: 14355 - RNA, 23 nt, Artificial Sequence
  Synthetic
cggaagggcagcgcccaagucuc

SEQ ID NO: 14356 - RNA, 24 nt, Artificial Sequence
  Synthetic
ccggaagggcagcgcccaagucuc

SEQ ID NO: 14357 - RNA, 18 nt, Artificial Sequence
  Synthetic
uuuggagggcugcggguc

SEQ ID NO: 14358 - RNA, 19 nt, Artificial Sequence
  Synthetic
guuuggagggcugcggguc

SEQ ID NO: 14359 - RNA, 20 nt, Artificial Sequence
  Synthetic
aguuuggagggcugcggguc

SEQ ID NO: 14360 - RNA, 21 nt, Artificial Sequence
  Synthetic
aaguuuggagggcugcggguc

SEQ ID NO: 14361 - RNA, 22 nt, Artificial Sequence
  Synthetic
uaaguuuggagggcugcggguc

SEQ ID NO: 14362 - RNA, 23 nt, Artificial Sequence
  Synthetic
cuaaguuuggagggcugcggguc

SEQ ID NO: 14363 - RNA, 24 nt, Artificial Sequence
  Synthetic
ccuaaguuuggagggcugcggguc

SEQ ID NO: 14364 - RNA, 18 nt, Artificial Sequence
  Synthetic
cggcggaaaggaggaaag

SEQ ID NO: 14365 - RNA, 19 nt, Artificial Sequence
  Synthetic
gcggcggaaaggaggaaag

SEQ ID NO: 14366 - RNA, 20 nt, Artificial Sequence
  Synthetic
agcggcggaaaggaggaaag

SEQ ID NO: 14367 - RNA, 21 nt, Artificial Sequence
  Synthetic
aagcggcggaaaggaggaaag

SEQ ID NO: 14368 - RNA, 22 nt, Artificial Sequence
  Synthetic
aaagcggcggaaaggaggaaag

SEQ ID NO: 14369 - RNA, 23 nt, Artificial Sequence
  Synthetic
uaaagcggcggaaaggaggaaag

SEQ ID NO: 14370 - RNA, 24 nt, Artificial Sequence
  Synthetic
auaaagcggcggaaaggaggaaag

SEQ ID NO: 14371 - RNA, 18 nt, Artificial Sequence
  Synthetic
aaauaaagcggcggaaag

SEQ ID NO: 14372 - RNA, 19 nt, Artificial Sequence
  Synthetic
gaaauaaagcggcggaaag

SEQ ID NO: 14373 - RNA, 20 nt, Artificial Sequence
  Synthetic
agaaauaaagcggcggaaag

SEQ ID NO: 14374 - RNA, 21 nt, Artificial Sequence
  Synthetic
gagaaauaaagcggcggaaag

SEQ ID NO: 14375 - RNA, 22 nt, Artificial Sequence
  Synthetic
agagaaauaaagcggcggaaag

SEQ ID NO: 14376 - RNA, 23 nt, Artificial Sequence
  Synthetic
aagagaaauaaagcggcggaaag

SEQ ID NO: 14377 - RNA, 24 nt, Artificial Sequence
  Synthetic
aaagagaaauaaagcggcggaaag

SEQ ID NO: 14378 - RNA, 18 nt, Artificial Sequence
  Synthetic
cccgcgcggccuggaaag

SEQ ID NO: 14379 - RNA, 19 nt, Artificial Sequence
  Synthetic
gcccgcgcggccuggaaag

SEQ ID NO: 14380 - RNA, 20 nt, Artificial Sequence
  Synthetic
agcccgcgcggccuggaaag

SEQ ID NO: 14381 - RNA, 21 nt, Artificial Sequence
  Synthetic
gagcccgcgcggccuggaaag

SEQ ID NO: 14382 - RNA, 22 nt, Artificial Sequence
  Synthetic
ggagcccgcgcggccuggaaag

SEQ ID NO: 14383 - RNA, 23 nt, Artificial Sequence
  Synthetic
aggagcccgcgcggccuggaaag

SEQ ID NO: 14384 - RNA, 24 nt, Artificial Sequence
  Synthetic
caggagcccgcgcggccuggaaag

SEQ ID NO: 14385 - RNA, 18 nt, Artificial Sequence
  Synthetic
aagaaaaaucacccgaag

SEQ ID NO: 14386 - RNA, 19 nt, Artificial Sequence
  Synthetic
aaagaaaaaucacccgaag

SEQ ID NO: 14387 - RNA, 20 nt, Artificial Sequence
  Synthetic
caaagaaaaaucacccgaag

SEQ ID NO: 14388 - RNA, 21 nt, Artificial Sequence
  Synthetic
gcaaagaaaaaucacccgaag

SEQ ID NO: 14389 - RNA, 22 nt, Artificial Sequence
  Synthetic
agcaaagaaaaaucacccgaag

SEQ ID NO: 14390 - RNA, 23 nt, Artificial Sequence
  Synthetic
cagcaaagaaaaaucacccgaag

SEQ ID NO: 14391 - RNA, 24 nt, Artificial Sequence
  Synthetic
acagcaaagaaaaaucacccgaag

SEQ ID NO: 14392 - RNA, 18 nt, Artificial Sequence
  Synthetic
agccggcacaaaaggcag

SEQ ID NO: 14393 - RNA, 19 nt, Artificial Sequence
  Synthetic
gagccggcacaaaaggcag

SEQ ID NO: 14394 - RNA, 20 nt, Artificial Sequence
  Synthetic
ggagccggcacaaaaggcag

SEQ ID NO: 14395 - RNA, 21 nt, Artificial Sequence
  Synthetic
aggagccggcacaaaaggcag

SEQ ID NO: 14396 - RNA, 22 nt, Artificial Sequence
  Synthetic
gaggagccggcacaaaaggcag

SEQ ID NO: 14397 - RNA, 23 nt, Artificial Sequence
  Synthetic
cgaggagccggcacaaaaggcag

SEQ ID NO: 14398 - RNA, 24 nt, Artificial Sequence
  Synthetic
gcgaggagccggcacaaaaggcag

SEQ ID NO: 14399 - RNA, 18 nt, Artificial Sequence
  Synthetic
gcggaaaggaggaaagag

SEQ ID NO: 14400 - RNA, 19 nt, Artificial Sequence
  Synthetic
ggcggaaaggaggaaagag

SEQ ID NO: 14401 - RNA, 20 nt, Artificial Sequence
  Synthetic
cggcggaaaggaggaaagag

SEQ ID NO: 14402 - RNA, 21 nt, Artificial Sequence
  Synthetic
gcggcggaaaggaggaaagag

SEQ ID NO: 14403 - RNA, 22 nt, Artificial Sequence
  Synthetic
agcggcggaaaggaggaaagag

SEQ ID NO: 14404 - RNA, 23 nt, Artificial Sequence
  Synthetic
aagcggcggaaaggaggaaagag

SEQ ID NO: 14405 - RNA, 24 nt, Artificial Sequence
  Synthetic
aaagcggcggaaaggaggaaagag

SEQ ID NO: 14406 - RNA, 18 nt, Artificial Sequence
  Synthetic
aucacccgaaguugagag

SEQ ID NO: 14407 - RNA, 19 nt, Artificial Sequence
  Synthetic
aaucacccgaaguugagag

SEQ ID NO: 14408 - RNA, 20 nt, Artificial Sequence
  Synthetic
aaaucacccgaaguugagag

SEQ ID NO: 14409 - RNA, 21 nt, Artificial Sequence
  Synthetic
aaaaucacccgaaguugagag

SEQ ID NO: 14410 - RNA, 22 nt, Artificial Sequence
  Synthetic
aaaaaucacccgaaguugagag

SEQ ID NO: 14411 - RNA, 23 nt, Artificial Sequence
  Synthetic
gaaaaaucacccgaaguugagag

SEQ ID NO: 14412 - RNA, 24 nt, Artificial Sequence
  Synthetic
agaaaaaucacccgaaguugagag

SEQ ID NO: 14413 - RNA, 18 nt, Artificial Sequence
  Synthetic
cgggaaacuuugcccgag

SEQ ID NO: 14414 - RNA, 19 nt, Artificial Sequence
  Synthetic
ucgggaaacuuugcccgag

SEQ ID NO: 14415 - RNA, 20 nt, Artificial Sequence
  Synthetic
cucgggaaacuuugcccgag

SEQ ID NO: 14416 - RNA, 21 nt, Artificial Sequence
  Synthetic
gcucgggaaacuuugcccgag

SEQ ID NO: 14417 - RNA, 22 nt, Artificial Sequence
  Synthetic
cgcucgggaaacuuugcccgag

SEQ ID NO: 14418 - RNA, 23 nt, Artificial Sequence
  Synthetic
gcgcucgggaaacuuugcccgag

SEQ ID NO: 14419 - RNA, 24 nt, Artificial Sequence
  Synthetic
ugcgcucgggaaacuuugcccgag

SEQ ID NO: 14420 - RNA, 18 nt, Artificial Sequence
  Synthetic
agcuccgcagcgggcgag

SEQ ID NO: 14421 - RNA, 19 nt, Artificial Sequence
  Synthetic
cagcuccgcagcgggcgag

SEQ ID NO: 14422 - RNA, 20 nt, Artificial Sequence
  Synthetic
acagcuccgcagcgggcgag

SEQ ID NO: 14423 - RNA, 21 nt, Artificial Sequence
  Synthetic
uacagcuccgcagcgggcgag

SEQ ID NO: 14424 - RNA, 22 nt, Artificial Sequence
  Synthetic
uuacagcuccgcagcgggcgag

SEQ ID NO: 14425 - RNA, 23 nt, Artificial Sequence
  Synthetic
guuacagcuccgcagcgggcgag

SEQ ID NO: 14426 - RNA, 24 nt, Artificial Sequence
  Synthetic
aguuacagcuccgcagcgggcgag

SEQ ID NO: 14427 - RNA, 18 nt, Artificial Sequence
  Synthetic
cgcagcgggcgaggggag

SEQ ID NO: 14428 - RNA, 19 nt, Artificial Sequence
  Synthetic
ccgcagcgggcgaggggag

SEQ ID NO: 14429 - RNA, 20 nt, Artificial Sequence
  Synthetic
uccgcagcgggcgaggggag

SEQ ID NO: 14430 - RNA, 21 nt, Artificial Sequence
  Synthetic
cuccgcagcgggcgaggggag

SEQ ID NO: 14431 - RNA, 22 nt, Artificial Sequence
  Synthetic
gcuccgcagcgggcgaggggag

SEQ ID NO: 14432 - RNA, 23 nt, Artificial Sequence
  Synthetic
agcuccgcagcgggcgaggggag

SEQ ID NO: 14433 - RNA, 24 nt, Artificial Sequence
  Synthetic
cagcuccgcagcgggcgaggggag

SEQ ID NO: 14434 - RNA, 18 nt, Artificial Sequence
  Synthetic
ccauuuucuuacggugag

SEQ ID NO: 14435 - RNA, 19 nt, Artificial Sequence
  Synthetic
cccauuuucuuacggugag

SEQ ID NO: 14436 - RNA, 20 nt, Artificial Sequence
  Synthetic
ccccauuuucuuacggugag

SEQ ID NO: 14437 - RNA, 21 nt, Artificial Sequence
  Synthetic
cccccauuuucuuacggugag

SEQ ID NO: 14438 - RNA, 22 nt, Artificial Sequence
  Synthetic
ccccccauuuucuuacggugag

SEQ ID NO: 14439 - RNA, 23 nt, Artificial Sequence
  Synthetic
cccccccauuuucuuacggugag

SEQ ID NO: 14440 - RNA, 24 nt, Artificial Sequence
  Synthetic
acccccccauuuucuuacggugag

SEQ ID NO: 14441 - RNA, 18 nt, Artificial Sequence
  Synthetic
ccuggaaagaggggaccg

SEQ ID NO: 14442 - RNA, 19 nt, Artificial Sequence
  Synthetic
gccuggaaagaggggaccg

SEQ ID NO: 14443 - RNA, 20 nt, Artificial Sequence
  Synthetic
ggccuggaaagaggggaccg

SEQ ID NO: 14444 - RNA, 21 nt, Artificial Sequence
  Synthetic
cggccuggaaagaggggaccg

SEQ ID NO: 14445 - RNA, 22 nt, Artificial Sequence
  Synthetic
gcggccuggaaagaggggaccg

SEQ ID NO: 14446 - RNA, 23 nt, Artificial Sequence
  Synthetic
cgcggccuggaaagaggggaccg

SEQ ID NO: 14447 - RNA, 24 nt, Artificial Sequence
  Synthetic
gcgcggccuggaaagaggggaccg

SEQ ID NO: 14448 - RNA, 18 nt, Artificial Sequence
  Synthetic
cucgggaaacuuugcccg

SEQ ID NO: 14449 - RNA, 19 nt, Artificial Sequence
  Synthetic
gcucgggaaacuuugcccg

SEQ ID NO: 14450 - RNA, 20 nt, Artificial Sequence
  Synthetic
cgcucgggaaacuuugcccg

SEQ ID NO: 14451 - RNA, 21 nt, Artificial Sequence
  Synthetic
gcgcucgggaaacuuugcccg

SEQ ID NO: 14452 - RNA, 22 nt, Artificial Sequence
  Synthetic
ugcgcucgggaaacuuugcccg

SEQ ID NO: 14453 - RNA, 23 nt, Artificial Sequence
  Synthetic
cugcgcucgggaaacuuugcccg

SEQ ID NO: 14454 - RNA, 24 nt, Artificial Sequence
  Synthetic
gcugcgcucgggaaacuuugcccg

SEQ ID NO: 14455 - RNA, 18 nt, Artificial Sequence
  Synthetic
gaaaagagaaauaaagcg

SEQ ID NO: 14456 - RNA, 19 nt, Artificial Sequence
  Synthetic
cgaaaagagaaauaaagcg

SEQ ID NO: 14457 - RNA, 20 nt, Artificial Sequence
  Synthetic
ucgaaaagagaaauaaagcg

SEQ ID NO: 14458 - RNA, 21 nt, Artificial Sequence
  Synthetic
uucgaaaagagaaauaaagcg

SEQ ID NO: 14459 - RNA, 22 nt, Artificial Sequence
  Synthetic
uuucgaaaagagaaauaaagcg

SEQ ID NO: 14460 - RNA, 23 nt, Artificial Sequence
  Synthetic
uuuucgaaaagagaaauaaagcg

SEQ ID NO: 14461 - RNA, 24 nt, Artificial Sequence
  Synthetic
cuuuucgaaaagagaaauaaagcg

SEQ ID NO: 14462 - RNA, 18 nt, Artificial Sequence
  Synthetic
uccgcggacucaggagcg

SEQ ID NO: 14463 - RNA, 19 nt, Artificial Sequence
  Synthetic
cuccgcggacucaggagcg

SEQ ID NO: 14464 - RNA, 20 nt, Artificial Sequence
  Synthetic
acuccgcggacucaggagcg

SEQ ID NO: 14465 - RNA, 21 nt, Artificial Sequence
  Synthetic
gacuccgcggacucaggagcg

SEQ ID NO: 14466 - RNA, 22 nt, Artificial Sequence
  Synthetic
cgacuccgcggacucaggagcg

SEQ ID NO: 14467 - RNA, 23 nt, Artificial Sequence
  Synthetic
ccgacuccgcggacucaggagcg

SEQ ID NO: 14468 - RNA, 24 nt, Artificial Sequence
  Synthetic
cccgacuccgcggacucaggagcg

SEQ ID NO: 14469 - RNA, 18 nt, Artificial Sequence
  Synthetic
cgcgggagggcaagcgcg

SEQ ID NO: 14470 - RNA, 19 nt, Artificial Sequence
  Synthetic
gcgcgggagggcaagcgcg

SEQ ID NO: 14471 - RNA, 20 nt, Artificial Sequence
  Synthetic
ggcgcgggagggcaagcgcg

SEQ ID NO: 14472 - RNA, 18 nt, Artificial Sequence
  Synthetic
acagcuccgcagcgggcg

SEQ ID NO: 14473 - RNA, 19 nt, Artificial Sequence
  Synthetic
uacagcuccgcagcgggcg

SEQ ID NO: 14474 - RNA, 20 nt, Artificial Sequence
  Synthetic
uuacagcuccgcagcgggcg

SEQ ID NO: 14475 - RNA, 21 nt, Artificial Sequence
  Synthetic
guuacagcuccgcagcgggcg

SEQ ID NO: 14476 - RNA, 22 nt, Artificial Sequence
  Synthetic
aguuacagcuccgcagcgggcg

SEQ ID NO: 14477 - RNA, 23 nt, Artificial Sequence
  Synthetic
aaguuacagcuccgcagcgggcg

SEQ ID NO: 14478 - RNA, 24 nt, Artificial Sequence
  Synthetic
caaguuacagcuccgcagcgggcg

SEQ ID NO: 14479 - RNA, 18 nt, Artificial Sequence
  Synthetic
gcuggggaagcgcgggcg

SEQ ID NO: 14480 - RNA, 19 nt, Artificial Sequence
  Synthetic
ggcuggggaagcgcgggcg

SEQ ID NO: 14481 - RNA, 20 nt, Artificial Sequence
  Synthetic
gggcuggggaagcgcgggcg

SEQ ID NO: 14482 - RNA, 21 nt, Artificial Sequence
  Synthetic
cgggcuggggaagcgcgggcg

SEQ ID NO: 14483 - RNA, 22 nt, Artificial Sequence
  Synthetic
ccgggcuggggaagcgcgggcg

SEQ ID NO: 14484 - RNA, 23 nt, Artificial Sequence
  Synthetic
cccgggcuggggaagcgcgggcg

SEQ ID NO: 14485 - RNA, 24 nt, Artificial Sequence
  Synthetic
ccccgggcuggggaagcgcgggcg

SEQ ID NO: 14486 - RNA, 18 nt, Artificial Sequence
  Synthetic
ugcaaaacuggcggggcg

SEQ ID NO: 14487 - RNA, 19 nt, Artificial Sequence
  Synthetic
uugcaaaacuggcggggcg

SEQ ID NO: 14488 - RNA, 20 nt, Artificial Sequence
  Synthetic
uuugcaaaacuggcggggcg

SEQ ID NO: 14489 - RNA, 21 nt, Artificial Sequence
  Synthetic
uuuugcaaaacuggcggggcg

SEQ ID NO: 14490 - RNA, 22 nt, Artificial Sequence
  Synthetic
auuuugcaaaacuggcggggcg

SEQ ID NO: 14491 - RNA, 23 nt, Artificial Sequence
  Synthetic
uauuuugcaaaacuggcggggcg

SEQ ID NO: 14492 - RNA, 24 nt, Artificial Sequence
  Synthetic
uuauuuugcaaaacuggcggggcg

SEQ ID NO: 14493 - RNA, 18 nt, Artificial Sequence
  Synthetic
aauaaagcggcggaaagg

SEQ ID NO: 14494 - RNA, 19 nt, Artificial Sequence
  Synthetic
aaauaaagcggcggaaagg

SEQ ID NO: 14495 - RNA, 20 nt, Artificial Sequence
  Synthetic
gaaauaaagcggcggaaagg

SEQ ID NO: 14496 - RNA, 21 nt, Artificial Sequence
  Synthetic
agaaauaaagcggcggaaagg

SEQ ID NO: 14497 - RNA, 22 nt, Artificial Sequence
  Synthetic
gagaaauaaagcggcggaaagg

SEQ ID NO: 14498 - RNA, 23 nt, Artificial Sequence
  Synthetic
agagaaauaaagcggcggaaagg

SEQ ID NO: 14499 - RNA, 24 nt, Artificial Sequence
  Synthetic
aagagaaauaaagcggcggaaagg

SEQ ID NO: 14500 - RNA, 18 nt, Artificial Sequence
  Synthetic
ccgagggcgcccccaagg

SEQ ID NO: 14501 - RNA, 19 nt, Artificial Sequence
  Synthetic
cccgagggcgcccccaagg

SEQ ID NO: 14502 - RNA, 20 nt, Artificial Sequence
  Synthetic
gcccgagggcgcccccaagg

SEQ ID NO: 14503 - RNA, 21 nt, Artificial Sequence
  Synthetic
ggcccgagggcgcccccaagg

SEQ ID NO: 14504 - RNA, 22 nt, Artificial Sequence
  Synthetic
gggcccgagggcgcccccaagg

SEQ ID NO: 14505 - RNA, 23 nt, Artificial Sequence
  Synthetic
ggggcccgagggcgcccccaagg

SEQ ID NO: 14506 - RNA, 24 nt, Artificial Sequence
  Synthetic
cggggcccgagggcgcccccaagg

SEQ ID NO: 14507 - RNA, 18 nt, Artificial Sequence
  Synthetic
agaggcaggcggcgcagg

SEQ ID NO: 14508 - RNA, 19 nt, Artificial Sequence
  Synthetic
gagaggcaggcggcgcagg

SEQ ID NO: 14509 - RNA, 20 nt, Artificial Sequence
  Synthetic
ggagaggcaggcggcgcagg

SEQ ID NO: 14510 - RNA, 21 nt, Artificial Sequence
  Synthetic
gggagaggcaggcggcgcagg

SEQ ID NO: 14511 - RNA, 22 nt, Artificial Sequence
  Synthetic
ggggagaggcaggcggcgcagg

SEQ ID NO: 14512 - RNA, 23 nt, Artificial Sequence
  Synthetic
cggggagaggcaggcggcgcagg

SEQ ID NO: 14513 - RNA, 24 nt, Artificial Sequence
  Synthetic
ccggggagaggcaggcggcgcagg

SEQ ID NO: 14514 - RNA, 18 nt, Artificial Sequence
  Synthetic
gcagcgggcgaggggagg

SEQ ID NO: 14515 - RNA, 19 nt, Artificial Sequence
  Synthetic
cgcagcgggcgaggggagg

SEQ ID NO: 14516 - RNA, 20 nt, Artificial Sequence
  Synthetic
ccgcagcgggcgaggggagg

SEQ ID NO: 14517 - RNA, 21 nt, Artificial Sequence
  Synthetic
uccgcagcgggcgaggggagg

SEQ ID NO: 14518 - RNA, 22 nt, Artificial Sequence
  Synthetic
cuccgcagcgggcgaggggagg

SEQ ID NO: 14519 - RNA, 23 nt, Artificial Sequence
  Synthetic
gcuccgcagcgggcgaggggagg

SEQ ID NO: 14520 - RNA, 24 nt, Artificial Sequence
  Synthetic
agcuccgcagcgggcgaggggagg

SEQ ID NO: 14521 - RNA, 18 nt, Artificial Sequence
  Synthetic
ggagggcugcggguccgg

SEQ ID NO: 14522 - RNA, 19 nt, Artificial Sequence
  Synthetic
uggagggcugcggguccgg

SEQ ID NO: 14523 - RNA, 20 nt, Artificial Sequence
  Synthetic
uuggagggcugcggguccgg

SEQ ID NO: 14524 - RNA, 21 nt, Artificial Sequence
  Synthetic
uuuggagggcugcggguccgg

SEQ ID NO: 14525 - RNA, 22 nt, Artificial Sequence
  Synthetic
guuuggagggcugcggguccgg

SEQ ID NO: 14526 - RNA, 23 nt, Artificial Sequence
  Synthetic
aguuuggagggcugcggguccgg

SEQ ID NO: 14527 - RNA, 24 nt, Artificial Sequence
  Synthetic
aaguuuggagggcugcggguccgg

SEQ ID NO: 14528 - RNA, 18 nt, Artificial Sequence
  Synthetic
aaaagagaaauaaagcgg

SEQ ID NO: 14529 - RNA, 19 nt, Artificial Sequence
  Synthetic
gaaaagagaaauaaagcgg

SEQ ID NO: 14530 - RNA, 20 nt, Artificial Sequence
  Synthetic
cgaaaagagaaauaaagcgg

SEQ ID NO: 14531 - RNA, 21 nt, Artificial Sequence
  Synthetic
ucgaaaagagaaauaaagcgg

SEQ ID NO: 14532 - RNA, 22 nt, Artificial Sequence
  Synthetic
uucgaaaagagaaauaaagcgg

SEQ ID NO: 14533 - RNA, 23 nt, Artificial Sequence
  Synthetic
uuucgaaaagagaaauaaagcgg

SEQ ID NO: 14534 - RNA, 24 nt, Artificial Sequence
  Synthetic
uuuucgaaaagagaaauaaagcgg

SEQ ID NO: 14535 - RNA, 18 nt, Artificial Sequence
  Synthetic
guuacagcuccgcagcgg

SEQ ID NO: 14536 - RNA, 19 nt, Artificial Sequence
  Synthetic
aguuacagcuccgcagcgg

SEQ ID NO: 14537 - RNA, 20 nt, Artificial Sequence
  Synthetic
aaguuacagcuccgcagcgg

SEQ ID NO: 14538 - RNA, 21 nt, Artificial Sequence
  Synthetic
caaguuacagcuccgcagcgg

SEQ ID NO: 14539 - RNA, 22 nt, Artificial Sequence
  Synthetic
ccaaguuacagcuccgcagcgg

SEQ ID NO: 14540 - RNA, 23 nt, Artificial Sequence
  Synthetic
uccaaguuacagcuccgcagcgg

SEQ ID NO: 14541 - RNA, 24 nt, Artificial Sequence
  Synthetic
cuccaaguuacagcuccgcagcgg

SEQ ID NO: 14542 - RNA, 18 nt, Artificial Sequence
  Synthetic
cgggcuggggaagcgcgg

SEQ ID NO: 14543 - RNA, 19 nt, Artificial Sequence
  Synthetic
ccgggcuggggaagcgcgg

SEQ ID NO: 14544 - RNA, 20 nt, Artificial Sequence
  Synthetic
cccgggcuggggaagcgcgg

SEQ ID NO: 14545 - RNA, 21 nt, Artificial Sequence
  Synthetic
ccccgggcuggggaagcgcgg

SEQ ID NO: 14546 - RNA, 22 nt, Artificial Sequence
  Synthetic
gccccgggcuggggaagcgcgg

SEQ ID NO: 14547 - RNA, 23 nt, Artificial Sequence
  Synthetic
agccccgggcuggggaagcgcgg

SEQ ID NO: 14548 - RNA, 24 nt, Artificial Sequence
  Synthetic
cagccccgggcuggggaagcgcgg

SEQ ID NO: 14549 - RNA, 18 nt, Artificial Sequence
  Synthetic
cuggggaagcgcgggcgg

SEQ ID NO: 14550 - RNA, 19 nt, Artificial Sequence
  Synthetic
gcuggggaagcgcgggcgg

SEQ ID NO: 14551 - RNA, 20 nt, Artificial Sequence
  Synthetic
ggcuggggaagcgcgggcgg

SEQ ID NO: 14552 - RNA, 21 nt, Artificial Sequence
  Synthetic
gggcuggggaagcgcgggcgg

SEQ ID NO: 14553 - RNA, 22 nt, Artificial Sequence
  Synthetic
cgggcuggggaagcgcgggcgg

SEQ ID NO: 14554 - RNA, 23 nt, Artificial Sequence
  Synthetic
ccgggcuggggaagcgcgggcgg

SEQ ID NO: 14555 - RNA, 24 nt, Artificial Sequence
  Synthetic
cccgggcuggggaagcgcgggcgg

SEQ ID NO: 14556 - RNA, 18 nt, Artificial Sequence
  Synthetic
gcaaaacuggcggggcgg

SEQ ID NO: 14557 - RNA, 19 nt, Artificial Sequence
  Synthetic
ugcaaaacuggcggggcgg

SEQ ID NO: 14558 - RNA, 20 nt, Artificial Sequence
  Synthetic
uugcaaaacuggcggggcgg

SEQ ID NO: 14559 - RNA, 21 nt, Artificial Sequence
  Synthetic
uuugcaaaacuggcggggcgg

SEQ ID NO: 14560 - RNA, 22 nt, Artificial Sequence
  Synthetic
uuuugcaaaacuggcggggcgg

SEQ ID NO: 14561 - RNA, 23 nt, Artificial Sequence
  Synthetic
auuuugcaaaacuggcggggcgg

SEQ ID NO: 14562 - RNA, 24 nt, Artificial Sequence
  Synthetic
uauuuugcaaaacuggcggggcgg

SEQ ID NO: 14563 - RNA, 18 nt, Artificial Sequence
  Synthetic
uggaaagaggggaccggg

SEQ ID NO: 14564 - RNA, 19 nt, Artificial Sequence
  Synthetic
cuggaaagaggggaccggg

SEQ ID NO: 14565 - RNA, 20 nt, Artificial Sequence
  Synthetic
ccuggaaagaggggaccggg

SEQ ID NO: 14566 - RNA, 21 nt, Artificial Sequence
  Synthetic
gccuggaaagaggggaccggg

SEQ ID NO: 14567 - RNA, 22 nt, Artificial Sequence
  Synthetic
ggccuggaaagaggggaccggg

SEQ ID NO: 14568 - RNA, 23 nt, Artificial Sequence
  Synthetic
cggccuggaaagaggggaccggg

SEQ ID NO: 14569 - RNA, 24 nt, Artificial Sequence
  Synthetic
gcggccuggaaagaggggaccggg

SEQ ID NO: 14570 - RNA, 18 nt, Artificial Sequence
  Synthetic
ggaggcugcagccccggg

SEQ ID NO: 14571 - RNA, 19 nt, Artificial Sequence
  Synthetic
gggaggcugcagccccggg

SEQ ID NO: 14572 - RNA, 20 nt, Artificial Sequence
  Synthetic
cgggaggcugcagccccggg

SEQ ID NO: 14573 - RNA, 21 nt, Artificial Sequence
  Synthetic
ccgggaggcugcagccccggg

SEQ ID NO: 14574 - RNA, 22 nt, Artificial Sequence
  Synthetic
accgggaggcugcagccccggg

SEQ ID NO: 14575 - RNA, 23 nt, Artificial Sequence
  Synthetic
caccgggaggcugcagccccggg

SEQ ID NO: 14576 - RNA, 24 nt, Artificial Sequence
  Synthetic
gcaccgggaggcugcagccccggg

SEQ ID NO: 14577 - RNA, 18 nt, Artificial Sequence
  Synthetic
gggcuggggaagcgcggg

SEQ ID NO: 14578 - RNA, 19 nt, Artificial Sequence
  Synthetic
cgggcuggggaagcgcggg

SEQ ID NO: 14579 - RNA, 20 nt, Artificial Sequence
  Synthetic
ccgggcuggggaagcgcggg

SEQ ID NO: 14580 - RNA, 21 nt, Artificial Sequence
  Synthetic
cccgggcuggggaagcgcggg

SEQ ID NO: 14581 - RNA, 22 nt, Artificial Sequence
  Synthetic
ccccgggcuggggaagcgcggg

SEQ ID NO: 14582 - RNA, 23 nt, Artificial Sequence
  Synthetic
gccccgggcuggggaagcgcggg

SEQ ID NO: 14583 - RNA, 24 nt, Artificial Sequence
  Synthetic
agccccgggcuggggaagcgcggg

SEQ ID NO: 14584 - RNA, 18 nt, Artificial Sequence
  Synthetic
caaaacuggcggggcggg

SEQ ID NO: 14585 - RNA, 19 nt, Artificial Sequence
  Synthetic
gcaaaacuggcggggcggg

SEQ ID NO: 14586 - RNA, 20 nt, Artificial Sequence
  Synthetic
ugcaaaacuggcggggcggg

SEQ ID NO: 14587 - RNA, 21 nt, Artificial Sequence
  Synthetic
uugcaaaacuggcggggcggg

SEQ ID NO: 14588 - RNA, 22 nt, Artificial Sequence
  Synthetic
uuugcaaaacuggcggggcggg

SEQ ID NO: 14589 - RNA, 23 nt, Artificial Sequence
  Synthetic
uuuugcaaaacuggcggggcggg

SEQ ID NO: 14590 - RNA, 24 nt, Artificial Sequence
  Synthetic
auuuugcaaaacuggcggggcggg

SEQ ID NO: 14591 - RNA, 18 nt, Artificial Sequence
  Synthetic
uuuugcaaaacuggcggg

SEQ ID NO: 14592 - RNA, 19 nt, Artificial Sequence
  Synthetic
auuuugcaaaacuggcggg

SEQ ID NO: 14593 - RNA, 20 nt, Artificial Sequence
  Synthetic
uauuuugcaaaacuggcggg

SEQ ID NO: 14594 - RNA, 21 nt, Artificial Sequence
  Synthetic
uuauuuugcaaaacuggcggg

SEQ ID NO: 14595 - RNA, 22 nt, Artificial Sequence
  Synthetic
auuauuuugcaaaacuggcggg

SEQ ID NO: 14596 - RNA, 23 nt, Artificial Sequence
  Synthetic
cauuauuuugcaaaacuggcggg

SEQ ID NO: 14597 - RNA, 24 nt, Artificial Sequence
  Synthetic
ucauuauuuugcaaaacuggcggg

SEQ ID NO: 14598 - RNA, 18 nt, Artificial Sequence
  Synthetic
gcguguggacgccagggg

SEQ ID NO: 14599 - RNA, 19 nt, Artificial Sequence
  Synthetic
cgcguguggacgccagggg

SEQ ID NO: 14600 - RNA, 20 nt, Artificial Sequence
  Synthetic
ccgcguguggacgccagggg

SEQ ID NO: 14601 - RNA, 21 nt, Artificial Sequence
  Synthetic
cccgcguguggacgccagggg

SEQ ID NO: 14602 - RNA, 22 nt, Artificial Sequence
  Synthetic
ccccgcguguggacgccagggg

SEQ ID NO: 14603 - RNA, 23 nt, Artificial Sequence
  Synthetic
uccccgcguguggacgccagggg

SEQ ID NO: 14604 - RNA, 24 nt, Artificial Sequence
  Synthetic
cuccccgcguguggacgccagggg

SEQ ID NO: 14605 - RNA, 18 nt, Artificial Sequence
  Synthetic
aaaacuggcggggcgggg

SEQ ID NO: 14606 - RNA, 19 nt, Artificial Sequence
  Synthetic
caaaacuggcggggcgggg

SEQ ID NO: 14607 - RNA, 20 nt, Artificial Sequence
  Synthetic
gcaaaacuggcggggcgggg

SEQ ID NO: 14608 - RNA, 21 nt, Artificial Sequence
  Synthetic
ugcaaaacuggcggggcgggg

SEQ ID NO: 14609 - RNA, 22 nt, Artificial Sequence
  Synthetic
uugcaaaacuggcggggcgggg

SEQ ID NO: 14610 - RNA, 23 nt, Artificial Sequence
  Synthetic
uuugcaaaacuggcggggcgggg

SEQ ID NO: 14611 - RNA, 24 nt, Artificial Sequence
  Synthetic
uuuugcaaaacuggcggggcgggg

SEQ ID NO: 14612 - RNA, 18 nt, Artificial Sequence
  Synthetic
uuugcaaaacuggcgggg

SEQ ID NO: 14613 - RNA, 19 nt, Artificial Sequence
  Synthetic
uuuugcaaaacuggcgggg

SEQ ID NO: 14614 - RNA, 20 nt, Artificial Sequence
  Synthetic
auuuugcaaaacuggcgggg

SEQ ID NO: 14615 - RNA, 21 nt, Artificial Sequence
  Synthetic
uauuuugcaaaacuggcgggg

SEQ ID NO: 14616 - RNA, 22 nt, Artificial Sequence
  Synthetic
uuauuuugcaaaacuggcgggg

SEQ ID NO: 14617 - RNA, 23 nt, Artificial Sequence
  Synthetic
auuauuuugcaaaacuggcgggg

SEQ ID NO: 14618 - RNA, 24 nt, Artificial Sequence
  Synthetic
cauuauuuugcaaaacuggcgggg

SEQ ID NO: 14619 - RNA, 18 nt, Artificial Sequence
  Synthetic
cgggcgaggggagguggg

SEQ ID NO: 14620 - RNA, 19 nt, Artificial Sequence
  Synthetic
gcgggcgaggggagguggg

SEQ ID NO: 14621 - RNA, 20 nt, Artificial Sequence
  Synthetic
agcgggcgaggggagguggg

SEQ ID NO: 14622 - RNA, 21 nt, Artificial Sequence
  Synthetic
cagcgggcgaggggagguggg

SEQ ID NO: 14623 - RNA, 22 nt, Artificial Sequence
  Synthetic
gcagcgggcgaggggagguggg

SEQ ID NO: 14624 - RNA, 23 nt, Artificial Sequence
  Synthetic
cgcagcgggcgaggggagguggg

SEQ ID NO: 14625 - RNA, 24 nt, Artificial Sequence
  Synthetic
ccgcagcgggcgaggggagguggg

SEQ ID NO: 14626 - RNA, 18 nt, Artificial Sequence
  Synthetic
auuauuuugcaaaacugg

SEQ ID NO: 14627 - RNA, 19 nt, Artificial Sequence
  Synthetic
cauuauuuugcaaaacugg

SEQ ID NO: 14628 - RNA, 20 nt, Artificial Sequence
  Synthetic
ucauuauuuugcaaaacugg

SEQ ID NO: 14629 - RNA, 21 nt, Artificial Sequence
  Synthetic
uucauuauuuugcaaaacugg

SEQ ID NO: 14630 - RNA, 22 nt, Artificial Sequence
  Synthetic
guucauuauuuugcaaaacugg

SEQ ID NO: 14631 - RNA, 23 nt, Artificial Sequence
  Synthetic
uguucauuauuuugcaaaacugg

SEQ ID NO: 14632 - RNA, 24 nt, Artificial Sequence
  Synthetic
uuguucauuauuuugcaaaacugg

SEQ ID NO: 14633 - RNA, 18 nt, Artificial Sequence
  Synthetic
acaaacacccaccucugg

SEQ ID NO: 14634 - RNA, 19 nt, Artificial Sequence
  Synthetic
gacaaacacccaccucugg

SEQ ID NO: 14635 - RNA, 20 nt, Artificial Sequence
  Synthetic
ggacaaacacccaccucugg

SEQ ID NO: 14636 - RNA, 21 nt, Artificial Sequence
  Synthetic
gggacaaacacccaccucugg

SEQ ID NO: 14637 - RNA, 22 nt, Artificial Sequence
  Synthetic
cgggacaaacacccaccucugg

SEQ ID NO: 14638 - RNA, 23 nt, Artificial Sequence
  Synthetic
gcgggacaaacacccaccucugg

SEQ ID NO: 14639 - RNA, 24 nt, Artificial Sequence
  Synthetic
agcgggacaaacacccaccucugg

SEQ ID NO: 14640 - RNA, 18 nt, Artificial Sequence
  Synthetic
gcgggcgaggggaggugg

SEQ ID NO: 14641 - RNA, 19 nt, Artificial Sequence
  Synthetic
agcgggcgaggggaggugg

SEQ ID NO: 14642 - RNA, 20 nt, Artificial Sequence
  Synthetic
cagcgggcgaggggaggugg

SEQ ID NO: 14643 - RNA, 21 nt, Artificial Sequence
  Synthetic
gcagcgggcgaggggaggugg

SEQ ID NO: 14644 - RNA, 22 nt, Artificial Sequence
  Synthetic
cgcagcgggcgaggggaggugg

SEQ ID NO: 14645 - RNA, 23 nt, Artificial Sequence
  Synthetic
ccgcagcgggcgaggggaggugg

SEQ ID NO: 14646 - RNA, 24 nt, Artificial Sequence
  Synthetic
uccgcagcgggcgaggggaggugg

SEQ ID NO: 14647 - RNA, 18 nt, Artificial Sequence
  Synthetic
cauuauuuugcaaaacug

SEQ ID NO: 14648 - RNA, 19 nt, Artificial Sequence
  Synthetic
ucauuauuuugcaaaacug

SEQ ID NO: 14649 - RNA, 20 nt, Artificial Sequence
  Synthetic
uucauuauuuugcaaaacug

SEQ ID NO: 14650 - RNA, 21 nt, Artificial Sequence
  Synthetic
guucauuauuuugcaaaacug

SEQ ID NO: 14651 - RNA, 22 nt, Artificial Sequence
  Synthetic
uguucauuauuuugcaaaacug

SEQ ID NO: 14652 - RNA, 23 nt, Artificial Sequence
  Synthetic
uuguucauuauuuugcaaaacug

SEQ ID NO: 14653 - RNA, 24 nt, Artificial Sequence
  Synthetic
auuguucauuauuuugcaaaacug

SEQ ID NO: 14654 - RNA, 18 nt, Artificial Sequence
  Synthetic
ggcugcagccccgggcug

SEQ ID NO: 14655 - RNA, 19 nt, Artificial Sequence
  Synthetic
aggcugcagccccgggcug

SEQ ID NO: 14656 - RNA, 20 nt, Artificial Sequence
  Synthetic
gaggcugcagccccgggcug

SEQ ID NO: 14657 - RNA, 21 nt, Artificial Sequence
  Synthetic
ggaggcugcagccccgggcug

SEQ ID NO: 14658 - RNA, 22 nt, Artificial Sequence
  Synthetic
gggaggcugcagccccgggcug

SEQ ID NO: 14659 - RNA, 23 nt, Artificial Sequence
  Synthetic
cgggaggcugcagccccgggcug

SEQ ID NO: 14660 - RNA, 24 nt, Artificial Sequence
  Synthetic
ccgggaggcugcagccccgggcug

SEQ ID NO: 14661 - RNA, 18 nt, Artificial Sequence
  Synthetic
gccacuuucucacuauug

SEQ ID NO: 14662 - RNA, 19 nt, Artificial Sequence
  Synthetic
ugccacuuucucacuauug

SEQ ID NO: 14663 - RNA, 20 nt, Artificial Sequence
  Synthetic
gugccacuuucucacuauug

SEQ ID NO: 14664 - RNA, 21 nt, Artificial Sequence
  Synthetic
agugccacuuucucacuauug

SEQ ID NO: 14665 - RNA, 22 nt, Artificial Sequence
  Synthetic
cagugccacuuucucacuauug

SEQ ID NO: 14666 - RNA, 23 nt, Artificial Sequence
  Synthetic
acagugccacuuucucacuauug

SEQ ID NO: 14667 - RNA, 24 nt, Artificial Sequence
  Synthetic
cacagugccacuuucucacuauug

SEQ ID NO: 14668 - RNA, 18 nt, Artificial Sequence
  Synthetic
gaauccagccuaaguuug

SEQ ID NO: 14669 - RNA, 19 nt, Artificial Sequence
  Synthetic
ggaauccagccuaaguuug

SEQ ID NO: 14670 - RNA, 20 nt, Artificial Sequence
  Synthetic
cggaauccagccuaaguuug

SEQ ID NO: 14671 - RNA, 21 nt, Artificial Sequence
  Synthetic
gcggaauccagccuaaguuug

SEQ ID NO: 14672 - RNA, 22 nt, Artificial Sequence
  Synthetic
cgcggaauccagccuaaguuug

SEQ ID NO: 14673 - RNA, 23 nt, Artificial Sequence
  Synthetic
acgcggaauccagccuaaguuug

SEQ ID NO: 14674 - RNA, 24 nt, Artificial Sequence
  Synthetic
aacgcggaauccagccuaaguuug

SEQ ID NO: 14675 - RNA, 18 nt, Artificial Sequence
  Synthetic
cucccgacuccgcggacu

SEQ ID NO: 14676 - RNA, 19 nt, Artificial Sequence
  Synthetic
ucucccgacuccgcggacu

SEQ ID NO: 14677 - RNA, 20 nt, Artificial Sequence
  Synthetic
cucucccgacuccgcggacu

SEQ ID NO: 14678 - RNA, 21 nt, Artificial Sequence
  Synthetic
ccucucccgacuccgcggacu

SEQ ID NO: 14679 - RNA, 22 nt, Artificial Sequence
  Synthetic
cccucucccgacuccgcggacu

SEQ ID NO: 14680 - RNA, 23 nt, Artificial Sequence
  Synthetic
ccccucucccgacuccgcggacu

SEQ ID NO: 14681 - RNA, 24 nt, Artificial Sequence
  Synthetic
gccccucucccgacuccgcggacu

SEQ ID NO: 14682 - RNA, 18 nt, Artificial Sequence
  Synthetic
cgagcccgcggcugcgcu

SEQ ID NO: 14683 - RNA, 19 nt, Artificial Sequence
  Synthetic
ccgagcccgcggcugcgcu

SEQ ID NO: 14684 - RNA, 20 nt, Artificial Sequence
  Synthetic
cccgagcccgcggcugcgcu

SEQ ID NO: 14685 - RNA, 21 nt, Artificial Sequence
  Synthetic
ccccgagcccgcggcugcgcu

SEQ ID NO: 14686 - RNA, 22 nt, Artificial Sequence
  Synthetic
gccccgagcccgcggcugcgcu

SEQ ID NO: 14687 - RNA, 23 nt, Artificial Sequence
  Synthetic
agccccgagcccgcggcugcgcu

SEQ ID NO: 14688 - RNA, 24 nt, Artificial Sequence
  Synthetic
aagccccgagcccgcggcugcgcu

SEQ ID NO: 14689 - RNA, 18 nt, Artificial Sequence
  Synthetic
aggcugcagccccgggcu

SEQ ID NO: 14690 - RNA, 19 nt, Artificial Sequence
  Synthetic
gaggcugcagccccgggcu

SEQ ID NO: 14691 - RNA, 20 nt, Artificial Sequence
  Synthetic
ggaggcugcagccccgggcu

SEQ ID NO: 14692 - RNA, 21 nt, Artificial Sequence
  Synthetic
gggaggcugcagccccgggcu

SEQ ID NO: 14693 - RNA, 22 nt, Artificial Sequence
  Synthetic
cgggaggcugcagccccgggcu

SEQ ID NO: 14694 - RNA, 23 nt, Artificial Sequence
  Synthetic
ccgggaggcugcagccccgggcu

SEQ ID NO: 14695 - RNA, 24 nt, Artificial Sequence
  Synthetic
accgggaggcugcagccccgggcu

SEQ ID NO: 14696 - RNA, 18 nt, Artificial Sequence
  Synthetic
gcggaauccagccuaagu

SEQ ID NO: 14697 - RNA, 19 nt, Artificial Sequence
  Synthetic
cgcggaauccagccuaagu

SEQ ID NO: 14698 - RNA, 20 nt, Artificial Sequence
  Synthetic
acgcggaauccagccuaagu

SEQ ID NO: 14699 - RNA, 21 nt, Artificial Sequence
  Synthetic
aacgcggaauccagccuaagu

SEQ ID NO: 14700 - RNA, 22 nt, Artificial Sequence
  Synthetic
caacgcggaauccagccuaagu

SEQ ID NO: 14701 - RNA, 23 nt, Artificial Sequence
  Synthetic
gcaacgcggaauccagccuaagu

SEQ ID NO: 14702 - RNA, 24 nt, Artificial Sequence
  Synthetic
ggcaacgcggaauccagccuaagu

SEQ ID NO: 14703 - RNA, 18 nt, Artificial Sequence
  Synthetic
cauuuucuuacggugagu

SEQ ID NO: 14704 - RNA, 19 nt, Artificial Sequence
  Synthetic
ccauuuucuuacggugagu

SEQ ID NO: 14705 - RNA, 20 nt, Artificial Sequence
  Synthetic
cccauuuucuuacggugagu

SEQ ID NO: 14706 - RNA, 21 nt, Artificial Sequence
  Synthetic
ccccauuuucuuacggugagu

SEQ ID NO: 14707 - RNA, 22 nt, Artificial Sequence
  Synthetic
cccccauuuucuuacggugagu

SEQ ID NO: 14708 - RNA, 23 nt, Artificial Sequence
  Synthetic
ccccccauuuucuuacggugagu

SEQ ID NO: 14709 - RNA, 24 nt, Artificial Sequence
  Synthetic
cccccccauuuucuuacggugagu

SEQ ID NO: 14710 - RNA, 18 nt, Artificial Sequence
  Synthetic
cgcgcucgcuccccgcgu

SEQ ID NO: 14711 - RNA, 19 nt, Artificial Sequence
  Synthetic
ccgcgcucgcuccccgcgu

SEQ ID NO: 14712 - RNA, 20 nt, Artificial Sequence
  Synthetic
gccgcgcucgcuccccgcgu

SEQ ID NO: 14713 - RNA, 21 nt, Artificial Sequence
  Synthetic
cgccgcgcucgcuccccgcgu

SEQ ID NO: 14714 - RNA, 22 nt, Artificial Sequence
  Synthetic
ccgccgcgcucgcuccccgcgu

SEQ ID NO: 14715 - RNA, 23 nt, Artificial Sequence
  Synthetic
gccgccgcgcucgcuccccgcgu

SEQ ID NO: 14716 - RNA, 24 nt, Artificial Sequence
  Synthetic
cgccgccgcgcucgcuccccgcgu

SEQ ID NO: 14717 - RNA, 18 nt, Artificial Sequence
  Synthetic
cagcgggcgaggggaggu

SEQ ID NO: 14718 - RNA, 19 nt, Artificial Sequence
  Synthetic
gcagcgggcgaggggaggu

SEQ ID NO: 14719 - RNA, 20 nt, Artificial Sequence
  Synthetic
cgcagcgggcgaggggaggu

SEQ ID NO: 14720 - RNA, 21 nt, Artificial Sequence
  Synthetic
ccgcagcgggcgaggggaggu

SEQ ID NO: 14721 - RNA, 22 nt, Artificial Sequence
  Synthetic
uccgcagcgggcgaggggaggu

SEQ ID NO: 14722 - RNA, 23 nt, Artificial Sequence
  Synthetic
cuccgcagcgggcgaggggaggu

SEQ ID NO: 14723 - RNA, 24 nt, Artificial Sequence
  Synthetic
gcuccgcagcgggcgaggggaggu

SEQ ID NO: 14724 - RNA, 18 nt, Artificial Sequence
  Synthetic
guuuggagggcugcgggu

SEQ ID NO: 14725 - RNA, 19 nt, Artificial Sequence
  Synthetic
aguuuggagggcugcgggu

SEQ ID NO: 14726 - RNA, 20 nt, Artificial Sequence
  Synthetic
aaguuuggagggcugcgggu

SEQ ID NO: 14727 - RNA, 21 nt, Artificial Sequence
  Synthetic
uaaguuuggagggcugcgggu

SEQ ID NO: 14728 - RNA, 22 nt, Artificial Sequence
  Synthetic
cuaaguuuggagggcugcgggu

SEQ ID NO: 14729 - RNA, 23 nt, Artificial Sequence
  Synthetic
ccuaaguuuggagggcugcgggu

SEQ ID NO: 14730 - RNA, 24 nt, Artificial Sequence
  Synthetic
gccuaaguuuggagggcugcgggu

SEQ ID NO: 14731 - RNA, 18 nt, Artificial Sequence
  Synthetic
ugccacuuucucacuauu

SEQ ID NO: 14732 - RNA, 19 nt, Artificial Sequence
  Synthetic
gugccacuuucucacuauu

SEQ ID NO: 14733 - RNA, 20 nt, Artificial Sequence
  Synthetic
agugccacuuucucacuauu

SEQ ID NO: 14734 - RNA, 21 nt, Artificial Sequence
  Synthetic
cagugccacuuucucacuauu

SEQ ID NO: 14735 - RNA, 22 nt, Artificial Sequence
  Synthetic
acagugccacuuucucacuauu

SEQ ID NO: 14736 - RNA, 23 nt, Artificial Sequence
  Synthetic
cacagugccacuuucucacuauu

SEQ ID NO: 14737 - RNA, 24 nt, Artificial Sequence
  Synthetic
ccacagugccacuuucucacuauu

SEQ ID NO: 14738 - RNA, 18 nt, Artificial Sequence
  Synthetic
gaaaaaucacccgaaguu

SEQ ID NO: 14739 - RNA, 19 nt, Artificial Sequence
  Synthetic
agaaaaaucacccgaaguu

SEQ ID NO: 14740 - RNA, 20 nt, Artificial Sequence
  Synthetic
aagaaaaaucacccgaaguu

SEQ ID NO: 14741 - RNA, 21 nt, Artificial Sequence
  Synthetic
aaagaaaaaucacccgaaguu

SEQ ID NO: 14742 - RNA, 22 nt, Artificial Sequence
  Synthetic
caaagaaaaaucacccgaaguu

SEQ ID NO: 14743 - RNA, 23 nt, Artificial Sequence
  Synthetic
gcaaagaaaaaucacccgaaguu

SEQ ID NO: 14744 - RNA, 24 nt, Artificial Sequence
  Synthetic
agcaaagaaaaaucacccgaaguu

SEQ ID NO: 14745 - RNA, 18 nt, Artificial Sequence
  Synthetic
cggaauccagccuaaguu

SEQ ID NO: 14746 - RNA, 19 nt, Artificial Sequence
  Synthetic
gcggaauccagccuaaguu

SEQ ID NO: 14747 - RNA, 20 nt, Artificial Sequence
  Synthetic
cgcggaauccagccuaaguu

SEQ ID NO: 14748 - RNA, 21 nt, Artificial Sequence
  Synthetic
acgcggaauccagccuaaguu

SEQ ID NO: 14749 - RNA, 22 nt, Artificial Sequence
  Synthetic
aacgcggaauccagccuaaguu

SEQ ID NO: 14750 - RNA, 23 nt, Artificial Sequence
  Synthetic
caacgcggaauccagccuaaguu

SEQ ID NO: 14751 - RNA, 24 nt, Artificial Sequence
  Synthetic
gcaacgcggaauccagccuaaguu

SEQ ID NO: 14752 - RNA, 18 nt, Artificial Sequence
  Synthetic
gaaucauugcauuccuuu

SEQ ID NO: 14753 - RNA, 19 nt, Artificial Sequence
  Synthetic
ggaaucauugcauuccuuu

SEQ ID NO: 14754 - RNA, 20 nt, Artificial Sequence
  Synthetic
uggaaucauugcauuccuuu

SEQ ID NO: 14755 - RNA, 21 nt, Artificial Sequence
  Synthetic
guggaaucauugcauuccuuu

SEQ ID NO: 14756 - RNA, 22 nt, Artificial Sequence
  Synthetic
aguggaaucauugcauuccuuu

SEQ ID NO: 14757 - RNA, 23 nt, Artificial Sequence
  Synthetic
gaguggaaucauugcauuccuuu

SEQ ID NO: 14758 - RNA, 24 nt, Artificial Sequence
  Synthetic
ggaguggaaucauugcauuccuuu

SEQ ID NO: 14759 - RNA, 18 nt, Artificial Sequence
  Synthetic
ccacucaccguaagaaaa

SEQ ID NO: 14760 - RNA, 19 nt, Artificial Sequence
  Synthetic
cccacucaccguaagaaaa

SEQ ID NO: 14761 - RNA, 20 nt, Artificial Sequence
  Synthetic
ucccacucaccguaagaaaa

SEQ ID NO: 14762 - RNA, 21 nt, Artificial Sequence
  Synthetic
uucccacucaccguaagaaaa

SEQ ID NO: 14763 - RNA, 22 nt, Artificial Sequence
  Synthetic
cuucccacucaccguaagaaaa

SEQ ID NO: 14764 - RNA, 23 nt, Artificial Sequence
  Synthetic
gcuucccacucaccguaagaaaa

SEQ ID NO: 14765 - RNA, 24 nt, Artificial Sequence
  Synthetic
ugcuucccacucaccguaagaaaa

SEQ ID NO: 14766 - RNA, 18 nt, Artificial Sequence
  Synthetic
cccacucaccguaagaaa

SEQ ID NO: 14767 - RNA, 19 nt, Artificial Sequence
  Synthetic
ucccacucaccguaagaaa

SEQ ID NO: 14768 - RNA, 20 nt, Artificial Sequence
  Synthetic
uucccacucaccguaagaaa

SEQ ID NO: 14769 - RNA, 21 nt, Artificial Sequence
  Synthetic
cuucccacucaccguaagaaa

SEQ ID NO: 14770 - RNA, 22 nt, Artificial Sequence
  Synthetic
gcuucccacucaccguaagaaa

SEQ ID NO: 14771 - RNA, 23 nt, Artificial Sequence
  Synthetic
ugcuucccacucaccguaagaaa

SEQ ID NO: 14772 - RNA, 24 nt, Artificial Sequence
  Synthetic
uugcuucccacucaccguaagaaa

SEQ ID NO: 14773 - RNA, 18 nt, Artificial Sequence
  Synthetic
ugggagcugguggggaaa

SEQ ID NO: 14774 - RNA, 19 nt, Artificial Sequence
  Synthetic
gugggagcugguggggaaa

SEQ ID NO: 14775 - RNA, 20 nt, Artificial Sequence
  Synthetic
ggugggagcugguggggaaa

SEQ ID NO: 14776 - RNA, 21 nt, Artificial Sequence
  Synthetic
gggugggagcugguggggaaa

SEQ ID NO: 14777 - RNA, 22 nt, Artificial Sequence
  Synthetic
ggggugggagcugguggggaaa

SEQ ID NO: 14778 - RNA, 23 nt, Artificial Sequence
  Synthetic
gggggugggagcugguggggaaa

SEQ ID NO: 14779 - RNA, 24 nt, Artificial Sequence
  Synthetic
ugggggugggagcugguggggaaa

SEQ ID NO: 14780 - RNA, 18 nt, Artificial Sequence
  Synthetic
aacgauucccggggagaa

SEQ ID NO: 14781 - RNA, 19 nt, Artificial Sequence
  Synthetic
aaacgauucccggggagaa

SEQ ID NO: 14782 - RNA, 20 nt, Artificial Sequence
  Synthetic
aaaacgauucccggggagaa

SEQ ID NO: 14783 - RNA, 21 nt, Artificial Sequence
  Synthetic
aaaaacgauucccggggagaa

SEQ ID NO: 14784 - RNA, 22 nt, Artificial Sequence
  Synthetic
aaaaaacgauucccggggagaa

SEQ ID NO: 14785 - RNA, 23 nt, Artificial Sequence
  Synthetic
uaaaaaacgauucccggggagaa

SEQ ID NO: 14786 - RNA, 24 nt, Artificial Sequence
  Synthetic
cuaaaaaacgauucccggggagaa

SEQ ID NO: 14787 - RNA, 18 nt, Artificial Sequence
  Synthetic
uuuauuucucuuuucgaa

SEQ ID NO: 14788 - RNA, 19 nt, Artificial Sequence
  Synthetic
cuuuauuucucuuuucgaa

SEQ ID NO: 14789 - RNA, 20 nt, Artificial Sequence
  Synthetic
gcuuuauuucucuuuucgaa

SEQ ID NO: 14790 - RNA, 21 nt, Artificial Sequence
  Synthetic
cgcuuuauuucucuuuucgaa

SEQ ID NO: 14791 - RNA, 22 nt, Artificial Sequence
  Synthetic
ccgcuuuauuucucuuuucgaa

SEQ ID NO: 14792 - RNA, 23 nt, Artificial Sequence
  Synthetic
gccgcuuuauuucucuuuucgaa

SEQ ID NO: 14793 - RNA, 24 nt, Artificial Sequence
  Synthetic
cgccgcuuuauuucucuuuucgaa

SEQ ID NO: 14794 - RNA, 18 nt, Artificial Sequence
  Synthetic
gugggagcugguggggaa

SEQ ID NO: 14795 - RNA, 19 nt, Artificial Sequence
  Synthetic
ggugggagcugguggggaa

SEQ ID NO: 14796 - RNA, 20 nt, Artificial Sequence
  Synthetic
gggugggagcugguggggaa

SEQ ID NO: 14797 - RNA, 21 nt, Artificial Sequence
  Synthetic
ggggugggagcugguggggaa

SEQ ID NO: 14798 - RNA, 22 nt, Artificial Sequence
  Synthetic
gggggugggagcugguggggaa

SEQ ID NO: 14799 - RNA, 23 nt, Artificial Sequence
  Synthetic
ugggggugggagcugguggggaa

SEQ ID NO: 14800 - RNA, 24 nt, Artificial Sequence
  Synthetic
cugggggugggagcugguggggaa

SEQ ID NO: 14801 - RNA, 18 nt, Artificial Sequence
  Synthetic
gaaaguggcacuguggaa

SEQ ID NO: 14802 - RNA, 19 nt, Artificial Sequence
  Synthetic
agaaaguggcacuguggaa

SEQ ID NO: 14803 - RNA, 20 nt, Artificial Sequence
  Synthetic
gagaaaguggcacuguggaa

SEQ ID NO: 14804 - RNA, 21 nt, Artificial Sequence
  Synthetic
ugagaaaguggcacuguggaa

SEQ ID NO: 14805 - RNA, 22 nt, Artificial Sequence
  Synthetic
gugagaaaguggcacuguggaa

SEQ ID NO: 14806 - RNA, 23 nt, Artificial Sequence
  Synthetic
agugagaaaguggcacuguggaa

SEQ ID NO: 14807 - RNA, 24 nt, Artificial Sequence
  Synthetic
uagugagaaaguggcacuguggaa

SEQ ID NO: 14808 - RNA, 18 nt, Artificial Sequence
  Synthetic
cucacggucaagugugca

SEQ ID NO: 14809 - RNA, 19 nt, Artificial Sequence
  Synthetic
gcucacggucaagugugca

SEQ ID NO: 14810 - RNA, 20 nt, Artificial Sequence
  Synthetic
cgcucacggucaagugugca

SEQ ID NO: 14811 - RNA, 21 nt, Artificial Sequence
  Synthetic
gcgcucacggucaagugugca

SEQ ID NO: 14812 - RNA, 22 nt, Artificial Sequence
  Synthetic
cgcgcucacggucaagugugca

SEQ ID NO: 14813 - RNA, 23 nt, Artificial Sequence
  Synthetic
gcgcgcucacggucaagugugca

SEQ ID NO: 14814 - RNA, 24 nt, Artificial Sequence
  Synthetic
agcgcgcucacggucaagugugca

SEQ ID NO: 14815 - RNA, 18 nt, Artificial Sequence
  Synthetic
ggagaggggccgcggcga

SEQ ID NO: 14816 - RNA, 19 nt, Artificial Sequence
  Synthetic
gggagaggggccgcggcga

SEQ ID NO: 14817 - RNA, 20 nt, Artificial Sequence
  Synthetic
cgggagaggggccgcggcga

SEQ ID NO: 14818 - RNA, 21 nt, Artificial Sequence
  Synthetic
ucgggagaggggccgcggcga

SEQ ID NO: 14819 - RNA, 22 nt, Artificial Sequence
  Synthetic
gucgggagaggggccgcggcga

SEQ ID NO: 14820 - RNA, 23 nt, Artificial Sequence
  Synthetic
agucgggagaggggccgcggcga

SEQ ID NO: 14821 - RNA, 24 nt, Artificial Sequence
  Synthetic
gagucgggagaggggccgcggcga

SEQ ID NO: 14822 - RNA, 18 nt, Artificial Sequence
  Synthetic
ccgugggaccgggaagga

SEQ ID NO: 14823 - RNA, 19 nt, Artificial Sequence
  Synthetic
gccgugggaccgggaagga

SEQ ID NO: 14824 - RNA, 20 nt, Artificial Sequence
  Synthetic
agccgugggaccgggaagga

SEQ ID NO: 14825 - RNA, 21 nt, Artificial Sequence
  Synthetic
gagccgugggaccgggaagga

SEQ ID NO: 14826 - RNA, 22 nt, Artificial Sequence
  Synthetic
agagccgugggaccgggaagga

SEQ ID NO: 14827 - RNA, 23 nt, Artificial Sequence
  Synthetic
gagagccgugggaccgggaagga

SEQ ID NO: 14828 - RNA, 24 nt, Artificial Sequence
  Synthetic
ggagagccgugggaccgggaagga

SEQ ID NO: 14829 - RNA, 18 nt, Artificial Sequence
  Synthetic
gaguccgcggagucggga

SEQ ID NO: 14830 - RNA, 19 nt, Artificial Sequence
  Synthetic
ugaguccgcggagucggga

SEQ ID NO: 14831 - RNA, 20 nt, Artificial Sequence
  Synthetic
cugaguccgcggagucggga

SEQ ID NO: 14832 - RNA, 21 nt, Artificial Sequence
  Synthetic
ccugaguccgcggagucggga

SEQ ID NO: 14833 - RNA, 22 nt, Artificial Sequence
  Synthetic
uccugaguccgcggagucggga

SEQ ID NO: 14834 - RNA, 23 nt, Artificial Sequence
  Synthetic
cuccugaguccgcggagucggga

SEQ ID NO: 14835 - RNA, 24 nt, Artificial Sequence
  Synthetic
gcuccugaguccgcggagucggga

SEQ ID NO: 14836 - RNA, 18 nt, Artificial Sequence
  Synthetic
ggcguccacacgcgggga

SEQ ID NO: 14837 - RNA, 19 nt, Artificial Sequence
  Synthetic
uggcguccacacgcgggga

SEQ ID NO: 14838 - RNA, 20 nt, Artificial Sequence
  Synthetic
cuggcguccacacgcgggga

SEQ ID NO: 14839 - RNA, 21 nt, Artificial Sequence
  Synthetic
ccuggcguccacacgcgggga

SEQ ID NO: 14840 - RNA, 22 nt, Artificial Sequence
  Synthetic
cccuggcguccacacgcgggga

SEQ ID NO: 14841 - RNA, 23 nt, Artificial Sequence
  Synthetic
ccccuggcguccacacgcgggga

SEQ ID NO: 14842 - RNA, 24 nt, Artificial Sequence
  Synthetic
gccccuggcguccacacgcgggga

SEQ ID NO: 14843 - RNA, 18 nt, Artificial Sequence
  Synthetic
gcgcggcggcggcgggga

SEQ ID NO: 14844 - RNA, 19 nt, Artificial Sequence
  Synthetic
agcgcggcggcggcgggga

SEQ ID NO: 14845 - RNA, 20 nt, Artificial Sequence
  Synthetic
gagcgcggcggcggcgggga

SEQ ID NO: 14846 - RNA, 21 nt, Artificial Sequence
  Synthetic
cgagcgcggcggcggcgggga

SEQ ID NO: 14847 - RNA, 22 nt, Artificial Sequence
  Synthetic
gcgagcgcggcggcggcgggga

SEQ ID NO: 14848 - RNA, 23 nt, Artificial Sequence
  Synthetic
agcgagcgcggcggcggcgggga

SEQ ID NO: 14849 - RNA, 24 nt, Artificial Sequence
  Synthetic
gagcgagcgcggcggcggcgggga

SEQ ID NO: 14850 - RNA, 18 nt, Artificial Sequence
  Synthetic
ggugggagcuggugggga

SEQ ID NO: 14851 - RNA, 19 nt, Artificial Sequence
  Synthetic
gggugggagcuggugggga

SEQ ID NO: 14852 - RNA, 20 nt, Artificial Sequence
  Synthetic
ggggugggagcuggugggga

SEQ ID NO: 14853 - RNA, 21 nt, Artificial Sequence
  Synthetic
gggggugggagcuggugggga

SEQ ID NO: 14854 - RNA, 22 nt, Artificial Sequence
  Synthetic
ugggggugggagcuggugggga

SEQ ID NO: 14855 - RNA, 23 nt, Artificial Sequence
  Synthetic
cugggggugggagcuggugggga

SEQ ID NO: 14856 - RNA, 24 nt, Artificial Sequence
  Synthetic
ccugggggugggagcuggugggga

SEQ ID NO: 14857 - RNA, 18 nt, Artificial Sequence
  Synthetic
acggggagagccguggga

SEQ ID NO: 14858 - RNA, 19 nt, Artificial Sequence
  Synthetic
gacggggagagccguggga

SEQ ID NO: 14859 - RNA, 20 nt, Artificial Sequence
  Synthetic
cgacggggagagccguggga

SEQ ID NO: 14860 - RNA, 21 nt, Artificial Sequence
  Synthetic
gcgacggggagagccguggga

SEQ ID NO: 14861 - RNA, 22 nt, Artificial Sequence
  Synthetic
ggcgacggggagagccguggga

SEQ ID NO: 14862 - RNA, 23 nt, Artificial Sequence
  Synthetic
cggcgacggggagagccguggga

SEQ ID NO: 14863 - RNA, 24 nt, Artificial Sequence
  Synthetic
gcggcgacggggagagccguggga

SEQ ID NO: 14864 - RNA, 18 nt, Artificial Sequence
  Synthetic
agaaaguggcacugugga

SEQ ID NO: 14865 - RNA, 19 nt, Artificial Sequence
  Synthetic
gagaaaguggcacugugga

SEQ ID NO: 14866 - RNA, 20 nt, Artificial Sequence
  Synthetic
ugagaaaguggcacugugga

SEQ ID NO: 14867 - RNA, 21 nt, Artificial Sequence
  Synthetic
gugagaaaguggcacugugga

SEQ ID NO: 14868 - RNA, 22 nt, Artificial Sequence
  Synthetic
agugagaaaguggcacugugga

SEQ ID NO: 14869 - RNA, 23 nt, Artificial Sequence
  Synthetic
uagugagaaaguggcacugugga

SEQ ID NO: 14870 - RNA, 24 nt, Artificial Sequence
  Synthetic
auagugagaaaguggcacugugga

SEQ ID NO: 14871 - RNA, 18 nt, Artificial Sequence
  Synthetic
cgccaguuuugcaaaaua

SEQ ID NO: 14872 - RNA, 19 nt, Artificial Sequence
  Synthetic
ccgccaguuuugcaaaaua

SEQ ID NO: 14873 - RNA, 20 nt, Artificial Sequence
  Synthetic
cccgccaguuuugcaaaaua

SEQ ID NO: 14874 - RNA, 21 nt, Artificial Sequence
  Synthetic
ccccgccaguuuugcaaaaua

SEQ ID NO: 14875 - RNA, 22 nt, Artificial Sequence
  Synthetic
gccccgccaguuuugcaaaaua

SEQ ID NO: 14876 - RNA, 23 nt, Artificial Sequence
  Synthetic
cgccccgccaguuuugcaaaaua

SEQ ID NO: 14877 - RNA, 24 nt, Artificial Sequence
  Synthetic
ccgccccgccaguuuugcaaaaua

SEQ ID NO: 14878 - RNA, 18 nt, Artificial Sequence
  Synthetic
guagucauccccacaaua

SEQ ID NO: 14879 - RNA, 19 nt, Artificial Sequence
  Synthetic
aguagucauccccacaaua

SEQ ID NO: 14880 - RNA, 20 nt, Artificial Sequence
  Synthetic
aaguagucauccccacaaua

SEQ ID NO: 14881 - RNA, 21 nt, Artificial Sequence
  Synthetic
aaaguagucauccccacaaua

SEQ ID NO: 14882 - RNA, 22 nt, Artificial Sequence
  Synthetic
gaaaguagucauccccacaaua

SEQ ID NO: 14883 - RNA, 23 nt, Artificial Sequence
  Synthetic
ggaaaguagucauccccacaaua

SEQ ID NO: 14884 - RNA, 24 nt, Artificial Sequence
  Synthetic
aggaaaguagucauccccacaaua

SEQ ID NO: 14885 - RNA, 18 nt, Artificial Sequence
  Synthetic
gggaagugggugugcgua

SEQ ID NO: 14886 - RNA, 19 nt, Artificial Sequence
  Synthetic
ggggaagugggugugcgua

SEQ ID NO: 14887 - RNA, 20 nt, Artificial Sequence
  Synthetic
aggggaagugggugugcgua

SEQ ID NO: 14888 - RNA, 21 nt, Artificial Sequence
  Synthetic
gaggggaagugggugugcgua

SEQ ID NO: 14889 - RNA, 22 nt, Artificial Sequence
  Synthetic
ggaggggaagugggugugcgua

SEQ ID NO: 14890 - RNA, 23 nt, Artificial Sequence
  Synthetic
gggaggggaagugggugugcgua

SEQ ID NO: 14891 - RNA, 24 nt, Artificial Sequence
  Synthetic
ggggaggggaagugggugugcgua

SEQ ID NO: 14892 - RNA, 18 nt, Artificial Sequence
  Synthetic
uaagaaaaugggggggua

SEQ ID NO: 14893 - RNA, 19 nt, Artificial Sequence
  Synthetic
guaagaaaaugggggggua

SEQ ID NO: 14894 - RNA, 20 nt, Artificial Sequence
  Synthetic
cguaagaaaaugggggggua

SEQ ID NO: 14895 - RNA, 21 nt, Artificial Sequence
  Synthetic
ccguaagaaaaugggggggua

SEQ ID NO: 14896 - RNA, 22 nt, Artificial Sequence
  Synthetic
accguaagaaaaugggggggua

SEQ ID NO: 14897 - RNA, 23 nt, Artificial Sequence
  Synthetic
caccguaagaaaaugggggggua

SEQ ID NO: 14898 - RNA, 24 nt, Artificial Sequence
  Synthetic
ucaccguaagaaaaugggggggua

SEQ ID NO: 14899 - RNA, 18 nt, Artificial Sequence
  Synthetic
aacaacucacaugcaaac

SEQ ID NO: 14900 - RNA, 19 nt, Artificial Sequence
  Synthetic
gaacaacucacaugcaaac

SEQ ID NO: 14901 - RNA, 20 nt, Artificial Sequence
  Synthetic
cgaacaacucacaugcaaac

SEQ ID NO: 14902 - RNA, 21 nt, Artificial Sequence
  Synthetic
gcgaacaacucacaugcaaac

SEQ ID NO: 14903 - RNA, 22 nt, Artificial Sequence
  Synthetic
ugcgaacaacucacaugcaaac

SEQ ID NO: 14904 - RNA, 23 nt, Artificial Sequence
  Synthetic
uugcgaacaacucacaugcaaac

SEQ ID NO: 14905 - RNA, 24 nt, Artificial Sequence
  Synthetic
guugcgaacaacucacaugcaaac

SEQ ID NO: 14906 - RNA, 18 nt, Artificial Sequence
  Synthetic
ccgcugcggagcuguaac

SEQ ID NO: 14907 - RNA, 19 nt, Artificial Sequence
  Synthetic
cccgcugcggagcuguaac

SEQ ID NO: 14908 - RNA, 20 nt, Artificial Sequence
  Synthetic
gcccgcugcggagcuguaac

SEQ ID NO: 14909 - RNA, 21 nt, Artificial Sequence
  Synthetic
cgcccgcugcggagcuguaac

SEQ ID NO: 14910 - RNA, 22 nt, Artificial Sequence
  Synthetic
ucgcccgcugcggagcuguaac

SEQ ID NO: 14911 - RNA, 23 nt, Artificial Sequence
  Synthetic
cucgcccgcugcggagcuguaac

SEQ ID NO: 14912 - RNA, 24 nt, Artificial Sequence
  Synthetic
ccucgcccgcugcggagcuguaac

SEQ ID NO: 14913 - RNA, 18 nt, Artificial Sequence
  Synthetic
ggccccuggcguccacac

SEQ ID NO: 14914 - RNA, 19 nt, Artificial Sequence
  Synthetic
cggccccuggcguccacac

SEQ ID NO: 14915 - RNA, 20 nt, Artificial Sequence
  Synthetic
ucggccccuggcguccacac

SEQ ID NO: 14916 - RNA, 21 nt, Artificial Sequence
  Synthetic
uucggccccuggcguccacac

SEQ ID NO: 14917 - RNA, 22 nt, Artificial Sequence
  Synthetic
cuucggccccuggcguccacac

SEQ ID NO: 14918 - RNA, 23 nt, Artificial Sequence
  Synthetic
acuucggccccuggcguccacac

SEQ ID NO: 14919 - RNA, 24 nt, Artificial Sequence
  Synthetic
uacuucggccccuggcguccacac

SEQ ID NO: 14920 - RNA, 18 nt, Artificial Sequence
  Synthetic
gcgcgggcuccuggagac

SEQ ID NO: 14921 - RNA, 19 nt, Artificial Sequence
  Synthetic
cgcgcgggcuccuggagac

SEQ ID NO: 14922 - RNA, 20 nt, Artificial Sequence
  Synthetic
ccgcgcgggcuccuggagac

SEQ ID NO: 14923 - RNA, 21 nt, Artificial Sequence
  Synthetic
gccgcgcgggcuccuggagac

SEQ ID NO: 14924 - RNA, 22 nt, Artificial Sequence
  Synthetic
ggccgcgcgggcuccuggagac

SEQ ID NO: 14925 - RNA, 23 nt, Artificial Sequence
  Synthetic
aggccgcgcgggcuccuggagac

SEQ ID NO: 14926 - RNA, 24 nt, Artificial Sequence
  Synthetic
caggccgcgcgggcuccuggagac

SEQ ID NO: 14927 - RNA, 18 nt, Artificial Sequence
  Synthetic
gagaggggccgcggcgac

SEQ ID NO: 14928 - RNA, 19 nt, Artificial Sequence
  Synthetic
ggagaggggccgcggcgac

SEQ ID NO: 14929 - RNA, 20 nt, Artificial Sequence
  Synthetic
gggagaggggccgcggcgac

SEQ ID NO: 14930 - RNA, 21 nt, Artificial Sequence
  Synthetic
cgggagaggggccgcggcgac

SEQ ID NO: 14931 - RNA, 22 nt, Artificial Sequence
  Synthetic
ucgggagaggggccgcggcgac

SEQ ID NO: 14932 - RNA, 23 nt, Artificial Sequence
  Synthetic
gucgggagaggggccgcggcgac

SEQ ID NO: 14933 - RNA, 24 nt, Artificial Sequence
  Synthetic
agucgggagaggggccgcggcgac

SEQ ID NO: 14934 - RNA, 18 nt, Artificial Sequence
  Synthetic
cgugggaccgggaaggac

SEQ ID NO: 14935 - RNA, 19 nt, Artificial Sequence
  Synthetic
ccgugggaccgggaaggac

SEQ ID NO: 14936 - RNA, 20 nt, Artificial Sequence
  Synthetic
gccgugggaccgggaaggac

SEQ ID NO: 14937 - RNA, 21 nt, Artificial Sequence
  Synthetic
agccgugggaccgggaaggac

SEQ ID NO: 14938 - RNA, 22 nt, Artificial Sequence
  Synthetic
gagccgugggaccgggaaggac

SEQ ID NO: 14939 - RNA, 23 nt, Artificial Sequence
  Synthetic
agagccgugggaccgggaaggac

SEQ ID NO: 14940 - RNA, 24 nt, Artificial Sequence
  Synthetic
gagagccgugggaccgggaaggac

SEQ ID NO: 14941 - RNA, 18 nt, Artificial Sequence
  Synthetic
cggggagagccgugggac

SEQ ID NO: 14942 - RNA, 19 nt, Artificial Sequence
  Synthetic
acggggagagccgugggac

SEQ ID NO: 14943 - RNA, 20 nt, Artificial Sequence
  Synthetic
gacggggagagccgugggac

SEQ ID NO: 14944 - RNA, 21 nt, Artificial Sequence
  Synthetic
cgacggggagagccgugggac

SEQ ID NO: 14945 - RNA, 22 nt, Artificial Sequence
  Synthetic
gcgacggggagagccgugggac

SEQ ID NO: 14946 - RNA, 23 nt, Artificial Sequence
  Synthetic
ggcgacggggagagccgugggac

SEQ ID NO: 14947 - RNA, 24 nt, Artificial Sequence
  Synthetic
cggcgacggggagagccgugggac

SEQ ID NO: 14948 - RNA, 18 nt, Artificial Sequence
  Synthetic
acaacucacaugcaaacc

SEQ ID NO: 14949 - RNA, 19 nt, Artificial Sequence
  Synthetic
aacaacucacaugcaaacc

SEQ ID NO: 14950 - RNA, 20 nt, Artificial Sequence
  Synthetic
gaacaacucacaugcaaacc

SEQ ID NO: 14951 - RNA, 21 nt, Artificial Sequence
  Synthetic
cgaacaacucacaugcaaacc

SEQ ID NO: 14952 - RNA, 22 nt, Artificial Sequence
  Synthetic
gcgaacaacucacaugcaaacc

SEQ ID NO: 14953 - RNA, 23 nt, Artificial Sequence
  Synthetic
ugcgaacaacucacaugcaaacc

SEQ ID NO: 14954 - RNA, 24 nt, Artificial Sequence
  Synthetic
uugcgaacaacucacaugcaaacc

SEQ ID NO: 14955 - RNA, 18 nt, Artificial Sequence
  Synthetic
ggggagagccgugggacc

SEQ ID NO: 14956 - RNA, 19 nt, Artificial Sequence
  Synthetic
cggggagagccgugggacc

SEQ ID NO: 14957 - RNA, 20 nt, Artificial Sequence
  Synthetic
acggggagagccgugggacc

SEQ ID NO: 14958 - RNA, 21 nt, Artificial Sequence
  Synthetic
gacggggagagccgugggacc

SEQ ID NO: 14959 - RNA, 22 nt, Artificial Sequence
  Synthetic
cgacggggagagccgugggacc

SEQ ID NO: 14960 - RNA, 23 nt, Artificial Sequence
  Synthetic
gcgacggggagagccgugggacc

SEQ ID NO: 14961 - RNA, 24 nt, Artificial Sequence
  Synthetic
ggcgacggggagagccgugggacc

SEQ ID NO: 14962 - RNA, 18 nt, Artificial Sequence
  Synthetic
ucggccuugggggcgccc

SEQ ID NO: 14963 - RNA, 19 nt, Artificial Sequence
  Synthetic
cucggccuugggggcgccc

SEQ ID NO: 14964 - RNA, 20 nt, Artificial Sequence
  Synthetic
gcucggccuugggggcgccc

SEQ ID NO: 14965 - RNA, 21 nt, Artificial Sequence
  Synthetic
ggcucggccuugggggcgccc

SEQ ID NO: 14966 - RNA, 22 nt, Artificial Sequence
  Synthetic
uggcucggccuugggggcgccc

SEQ ID NO: 14967 - RNA, 23 nt, Artificial Sequence
  Synthetic
cuggcucggccuugggggcgccc

SEQ ID NO: 14968 - RNA, 24 nt, Artificial Sequence
  Synthetic
ccuggcucggccuugggggcgccc

SEQ ID NO: 14969 - RNA, 18 nt, Artificial Sequence
  Synthetic
gucuaaaaaacgauuccc

SEQ ID NO: 14970 - RNA, 19 nt, Artificial Sequence
  Synthetic
agucuaaaaaacgauuccc

SEQ ID NO: 14971 - RNA, 20 nt, Artificial Sequence
  Synthetic
aagucuaaaaaacgauuccc

SEQ ID NO: 14972 - RNA, 21 nt, Artificial Sequence
  Synthetic
caagucuaaaaaacgauuccc

SEQ ID NO: 14973 - RNA, 22 nt, Artificial Sequence
  Synthetic
acaagucuaaaaaacgauuccc

SEQ ID NO: 14974 - RNA, 23 nt, Artificial Sequence
  Synthetic
uacaagucuaaaaaacgauuccc

SEQ ID NO: 14975 - RNA, 24 nt, Artificial Sequence
  Synthetic
guacaagucuaaaaaacgauuccc

SEQ ID NO: 14976 - RNA, 18 nt, Artificial Sequence
  Synthetic
gcccgcgcuuccccagcc

SEQ ID NO: 14977 - RNA, 19 nt, Artificial Sequence
  Synthetic
cgcccgcgcuuccccagcc

SEQ ID NO: 14978 - RNA, 20 nt, Artificial Sequence
  Synthetic
ccgcccgcgcuuccccagcc

SEQ ID NO: 14979 - RNA, 21 nt, Artificial Sequence
  Synthetic
uccgcccgcgcuuccccagcc

SEQ ID NO: 14980 - RNA, 22 nt, Artificial Sequence
  Synthetic
cuccgcccgcgcuuccccagcc

SEQ ID NO: 14981 - RNA, 23 nt, Artificial Sequence
  Synthetic
ccuccgcccgcgcuuccccagcc

SEQ ID NO: 14982 - RNA, 24 nt, Artificial Sequence
  Synthetic
cccuccgcccgcgcuuccccagcc

SEQ ID NO: 14983 - RNA, 18 nt, Artificial Sequence
  Synthetic
aguuucccgagcgcagcc

SEQ ID NO: 14984 - RNA, 19 nt, Artificial Sequence
  Synthetic
aaguuucccgagcgcagcc

SEQ ID NO: 14985 - RNA, 20 nt, Artificial Sequence
  Synthetic
aaaguuucccgagcgcagcc

SEQ ID NO: 14986 - RNA, 21 nt, Artificial Sequence
  Synthetic
caaaguuucccgagcgcagcc

SEQ ID NO: 14987 - RNA, 22 nt, Artificial Sequence
  Synthetic
gcaaaguuucccgagcgcagcc

SEQ ID NO: 14988 - RNA, 23 nt, Artificial Sequence
  Synthetic
ggcaaaguuucccgagcgcagcc

SEQ ID NO: 14989 - RNA, 24 nt, Artificial Sequence
  Synthetic
gggcaaaguuucccgagcgcagcc

SEQ ID NO: 14990 - RNA, 18 nt, Artificial Sequence
  Synthetic
gcggcgacggggagagcc

SEQ ID NO: 14991 - RNA, 19 nt, Artificial Sequence
  Synthetic
cgcggcgacggggagagcc

SEQ ID NO: 14992 - RNA, 20 nt, Artificial Sequence
  Synthetic
ccgcggcgacggggagagcc

SEQ ID NO: 14993 - RNA, 21 nt, Artificial Sequence
  Synthetic
gccgcggcgacggggagagcc

SEQ ID NO: 14994 - RNA, 22 nt, Artificial Sequence
  Synthetic
ggccgcggcgacggggagagcc

SEQ ID NO: 14995 - RNA, 23 nt, Artificial Sequence
  Synthetic
gggccgcggcgacggggagagcc

SEQ ID NO: 14996 - RNA, 24 nt, Artificial Sequence
  Synthetic
ggggccgcggcgacggggagagcc

SEQ ID NO: 14997 - RNA, 18 nt, Artificial Sequence
  Synthetic
ccggucccuggcucggcc

SEQ ID NO: 14998 - RNA, 19 nt, Artificial Sequence
  Synthetic
cccggucccuggcucggcc

SEQ ID NO: 14999 - RNA, 20 nt, Artificial Sequence
  Synthetic
ucccggucccuggcucggcc

SEQ ID NO: 15000 - RNA, 18 nt, Artificial Sequence
  Synthetic
ccaggccgcgcgggcucc

SEQ ID NO: 15001 - RNA, 19 nt, Artificial Sequence
  Synthetic
uccaggccgcgcgggcucc

SEQ ID NO: 15002 - RNA, 20 nt, Artificial Sequence
  Synthetic
uuccaggccgcgcgggcucc

SEQ ID NO: 15003 - RNA, 21 nt, Artificial Sequence
  Synthetic
uuuccaggccgcgcgggcucc

SEQ ID NO: 15004 - RNA, 22 nt, Artificial Sequence
  Synthetic
cuuuccaggccgcgcgggcucc

SEQ ID NO: 15005 - RNA, 23 nt, Artificial Sequence
  Synthetic
ucuuuccaggccgcgcgggcucc

SEQ ID NO: 15006 - RNA, 24 nt, Artificial Sequence
  Synthetic
cucuuuccaggccgcgcgggcucc

SEQ ID NO: 15007 - RNA, 18 nt, Artificial Sequence
  Synthetic
uucuuugcuguccucucc

SEQ ID NO: 15008 - RNA, 19 nt, Artificial Sequence
  Synthetic
uuucuuugcuguccucucc

SEQ ID NO: 15009 - RNA, 20 nt, Artificial Sequence
  Synthetic
uuuucuuugcuguccucucc

SEQ ID NO: 15010 - RNA, 21 nt, Artificial Sequence
  Synthetic
uuuuucuuugcuguccucucc

SEQ ID NO: 15011 - RNA, 22 nt, Artificial Sequence
  Synthetic
auuuuucuuugcuguccucucc

SEQ ID NO: 15012 - RNA, 23 nt, Artificial Sequence
  Synthetic
gauuuuucuuugcuguccucucc

SEQ ID NO: 15013 - RNA, 24 nt, Artificial Sequence
  Synthetic
ugauuuuucuuugcuguccucucc

SEQ ID NO: 15014 - RNA, 18 nt, Artificial Sequence
  Synthetic
cccggcgcuccugagucc

SEQ ID NO: 15015 - RNA, 19 nt, Artificial Sequence
  Synthetic
ccccggcgcuccugagucc

SEQ ID NO: 15016 - RNA, 20 nt, Artificial Sequence
  Synthetic
cccccggcgcuccugagucc

SEQ ID NO: 15017 - RNA, 21 nt, Artificial Sequence
  Synthetic
gcccccggcgcuccugagucc

SEQ ID NO: 15018 - RNA, 22 nt, Artificial Sequence
  Synthetic
ggcccccggcgcuccugagucc

SEQ ID NO: 15019 - RNA, 23 nt, Artificial Sequence
  Synthetic
gggcccccggcgcuccugagucc

SEQ ID NO: 15020 - RNA, 24 nt, Artificial Sequence
  Synthetic
ggggcccccggcgcuccugagucc

SEQ ID NO: 15021 - RNA, 18 nt, Artificial Sequence
  Synthetic
guacggaggagggugucc

SEQ ID NO: 15022 - RNA, 19 nt, Artificial Sequence
  Synthetic
cguacggaggagggugucc

SEQ ID NO: 15023 - RNA, 20 nt, Artificial Sequence
  Synthetic
gcguacggaggagggugucc

SEQ ID NO: 15024 - RNA, 21 nt, Artificial Sequence
  Synthetic
ugcguacggaggagggugucc

SEQ ID NO: 15025 - RNA, 22 nt, Artificial Sequence
  Synthetic
gugcguacggaggagggugucc

SEQ ID NO: 15026 - RNA, 23 nt, Artificial Sequence
  Synthetic
ugugcguacggaggagggugucc

SEQ ID NO: 15027 - RNA, 24 nt, Artificial Sequence
  Synthetic
gugugcguacggaggagggugucc

SEQ ID NO: 15028 - RNA, 18 nt, Artificial Sequence
  Synthetic
agucuaaaaaacgauucc

SEQ ID NO: 15029 - RNA, 19 nt, Artificial Sequence
  Synthetic
aagucuaaaaaacgauucc

SEQ ID NO: 15030 - RNA, 20 nt, Artificial Sequence
  Synthetic
caagucuaaaaaacgauucc

SEQ ID NO: 15031 - RNA, 21 nt, Artificial Sequence
  Synthetic
acaagucuaaaaaacgauucc

SEQ ID NO: 15032 - RNA, 22 nt, Artificial Sequence
  Synthetic
uacaagucuaaaaaacgauucc

SEQ ID NO: 15033 - RNA, 23 nt, Artificial Sequence
  Synthetic
guacaagucuaaaaaacgauucc

SEQ ID NO: 15034 - RNA, 24 nt, Artificial Sequence
  Synthetic
aguacaagucuaaaaaacgauucc

SEQ ID NO: 15035 - RNA, 18 nt, Artificial Sequence
  Synthetic
cgcccgcgcuuccccagc

SEQ ID NO: 15036 - RNA, 19 nt, Artificial Sequence
  Synthetic
ccgcccgcgcuuccccagc

SEQ ID NO: 15037 - RNA, 20 nt, Artificial Sequence
  Synthetic
uccgcccgcgcuuccccagc

SEQ ID NO: 15038 - RNA, 21 nt, Artificial Sequence
  Synthetic
cuccgcccgcgcuuccccagc

SEQ ID NO: 15039 - RNA, 22 nt, Artificial Sequence
  Synthetic
ccuccgcccgcgcuuccccagc

SEQ ID NO: 15040 - RNA, 23 nt, Artificial Sequence
  Synthetic
cccuccgcccgcgcuuccccagc

SEQ ID NO: 15041 - RNA, 24 nt, Artificial Sequence
  Synthetic
ucccuccgcccgcgcuuccccagc

SEQ ID NO: 15042 - RNA, 18 nt, Artificial Sequence
  Synthetic
cacggucaagugugcagc

SEQ ID NO: 15043 - RNA, 19 nt, Artificial Sequence
  Synthetic
ucacggucaagugugcagc

SEQ ID NO: 15044 - RNA, 20 nt, Artificial Sequence
  Synthetic
cucacggucaagugugcagc

SEQ ID NO: 15045 - RNA, 21 nt, Artificial Sequence
  Synthetic
gcucacggucaagugugcagc

SEQ ID NO: 15046 - RNA, 22 nt, Artificial Sequence
  Synthetic
cgcucacggucaagugugcagc

SEQ ID NO: 15047 - RNA, 23 nt, Artificial Sequence
  Synthetic
gcgcucacggucaagugugcagc

SEQ ID NO: 15048 - RNA, 24 nt, Artificial Sequence
  Synthetic
cgcgcucacggucaagugugcagc

SEQ ID NO: 15049 - RNA, 18 nt, Artificial Sequence
  Synthetic
ccccuggcguccacacgc

SEQ ID NO: 15050 - RNA, 19 nt, Artificial Sequence
  Synthetic
gccccuggcguccacacgc

SEQ ID NO: 15051 - RNA, 20 nt, Artificial Sequence
  Synthetic
ggccccuggcguccacacgc

SEQ ID NO: 15052 - RNA, 21 nt, Artificial Sequence
  Synthetic
cggccccuggcguccacacgc

SEQ ID NO: 15053 - RNA, 22 nt, Artificial Sequence
  Synthetic
ucggccccuggcguccacacgc

(The sequence listing continues in the following parts.)

1. A gRNA molecule comprising a targeting domain which is complementary with a target domain from the HBB or BCL11A gene.

2. The gRNA molecule of claim 1, wherein said targeting domain is configured to provide a cleavage event selected from a double strand break and a single strand break, within 500, 400, 300, 200, 100, 50, 25, or 10 nucleotides of an SCD target point position or an SCD target knockout position.

3. The gRNA molecule of claim 1, wherein said targeting domain is configured to target an early coding region or an enhancer region of the BCL11A gene.

4. The gRNA molecule of claim 1, wherein said targeting domain is configured to target a mutation in the HBB gene.

5. The gRNA molecule of claim 1, wherein said targeting domain is configured to target an enzymatically inactive Cas9 (eiCas9) or an eiCas9 fusion protein, sufficiently close to an SCD target knockdown position to reduce, decrease or repress expression of the BCL11A gene.

6. The gRNA molecule of claim 1, wherein said targeting domain is configured to target the promoter region of the BCL11A gene.

7. The gRNA molecule of claim 1, wherein said targeting domain comprises or consists of a sequence that is the same as, or differs by no more than 3 nucleotides from, a targeting domain sequence from any of Tables 1A-1D, 2A-2F, 3A-3C, 4A-4E, 5A-5E, 6A-6B, 7A-7D, 8A-8D, 9, 10A-10D, 11A-11D, 12, 13A-13D, 14A-14C, 15A-15D, 16A-16E, 17A-17B, 18A-18C, 19A-19E, 20A-20C, 21A-21E, 22A-22E, 23A-23C, 24A-24D, 25A-25B, 26, or 31.

8. The gRNA molecule of claim 1, wherein said targeting domain comprises or consists of a sequence that is the same as a targeting domain sequence from any of Tables 1A-1D, 2A-2F, 3A-3C, 4A-4E, 5A-5E, 6A-6B, 7A-7D, 8A-8D, 9, 10A-10D, 11A-11D, 12, 13A-13D, 14A-14C, 15A-15D, 16A-16E, 17A-17B, 18A-18C, 19A-19E, 20A-20C, 21A-21E, 22A-22E, 23A-23C, 24A-24D, 25A-25B, 26, or 31.

9. The gRNA molecule of claim 3, wherein said targeting domain is selected from those in Tables 2A-2F, 4A-4E, 5A-5E, 6A-6B, 7A-7D, 8A-8D, 9, 15A-15D, 16A-16E, 17A-17B, 21A-21E, 22A-22E, or 23A-23C.

10. The gRNA molecule of claim 6, wherein said targeting domain is selected from those in Tables 3A-3C, 10A-10D, 11A-11D, 12, 18A-18C, 19A-19E, or 20A-20C.

11. The gRNA molecule of claim 4, wherein said targeting domain is selected from those in Tables 1A-1D, 13A-13D, 14A-14C, 24A-24D, 25A-25B, and 26.

12-29. (canceled)

30. A nucleic acid that comprises: (a) a nucleotide sequence that encodes a gRNA molecule comprising a targeting domain that is complementary with an SCD target domain in the HBB gene or BCL11A gene.

31. The nucleic acid of claim 30, wherein said gRNA molecule is a gRNA molecule of claim 1.

32. The nucleic acid of claim 30, wherein said targeting domain is configured to provide a cleavage event selected from a double strand break and a single strand break, within 500, 400, 300, 200, 100, 50, 25, or 10 nucleotides of the SCD target point position or the SCD target knockout position.

33. The nucleic acid of claim 30, wherein said targeting domain is configured to target an early coding region or an enhancer region of the BCL11A gene.

34. The nucleic acid of claim 30, wherein said targeting domain is configured to target a mutation in the HBB gene.

35. The nucleic acid of claim 30, wherein said targeting domain is configured to target an enzymatically inactive Cas9 (eiCas9) or an eiCas9 fusion protein, sufficiently close to an SCD target knockdown position to reduce, decrease or repress expression of the BCL11A gene.

36. The nucleic acid of claim 30, wherein said targeting domain is configured to target the promoter region of the BCL11A gene.

37. The nucleic acid of claim 30, wherein said targeting domain comprises or consists of a sequence that is the same as, or differs by no more than 3 nucleotides from, a targeting domain sequence from any of Tables 1A-1D, 2A-2F, 3A-3C, 4A-4E, 5A-5E, 6A-6B, 7A-7D, 8A-8D, 9, 10A-10D, 11A-11D, 12, 13A-13D, 14A-14C, 15A-15D, 16A-16E, 17A-17B, 18A-18C, 19A-19E, 20A-20C, 21A-21E, 22A-22E, 23A-23C, 24A-24D, 25A-25B, 26, or 31.

38. The nucleic acid of claim 30, wherein said targeting domain comprises or consists of a sequence that is the same as a targeting domain sequence from any of Tables 1A-1D, 2A-2F, 3A-3C, 4A-4E, 5A-5E, 6A-6B, 7A-7D, 8A-8D, 9, 10A-10D, 11A-11D, 12, 13A-13D, 14A-14C, 15A-15D, 16A-16E, 17A-17B, 18A-18C, 19A-19E, 20A-20C, 21A-21E, 22A-22E, 23A-23C, 24A-24D, 25A-25B, 26, or 31.

39-126. (canceled)

127. A composition comprising (a) a gRNA molecule of claim 1.

128. The composition of claim 127, further comprising (b) a Cas9 molecule.

129. The composition of claim 127, further comprising (c) a second gRNA molecule comprising a targeting domain which is complementary with a second target domain from the HBB or BCL11A gene.

130. The composition of claim 129, further comprising a third gRNA molecule.

131. The composition of claim 130, further comprising a fourth gRNA molecule.

132. A method of altering a cell comprising contacting said cell with:
(a) a gRNA molecule of claim 1;
(b) a Cas9 molecule;
(c) optionally, a second gRNA molecule comprising a targeting domain which is complementary with a second target domain from the HBB or BCL11A gene; and
(d) optionally, a template nucleic acid.

133. The method of claim 132, wherein the gRNA molecule targets the HBB gene and no exogenous template nucleic acid is contacted with the cell.

134. The method of claim 132, further comprising contacting said cell with a third gRNA molecule.

135. The method of claim 134, further comprising contacting said cell with a fourth gRNA molecule.

136. The method of claim 132, comprising contacting said cell with (a), (b), (c), and, optionally (d).

137. (canceled)

138. The method of claim 132, wherein said cell is from a subject suffering from SCD.

139. The method of claim 132, wherein said cell is from a subject having a mutation at an SCD target position in the HBB gene or from a subject which would benefit from having a mutation at an SCD target position in the BCL11A gene.

140. The method of claim 132, wherein said cell is selected from the group consisting of an erythroid cell, a bone marrow cell, and a stem cell.

141. (canceled)

142. (canceled)

143. The method of claim 132, wherein said contacting step is performed ex vivo.

144. The method of claim 132, wherein said contacted cell is returned to said subject's body.

145. The method of claim 132, wherein said contacting is performed in vivo.

146. The method of claim 132, wherein said cell is from a subject that has SCD.

147-177. (canceled)

178. A reaction mixture comprising a gRNA molecule of claim 1, a nucleic acid of claim 30, or a composition of claim 127, and a cell from a subject having SCD, a subject having a mutation at an SCD target position of the HBB gene, or a subject which would benefit from having a mutation at an SCD target position of the BCL11A gene.

179. A kit comprising (a) a gRNA molecule of claim 1, or nucleic acid that encodes said gRNA, and one or more of the following:
(b) a Cas9 molecule;
(c) a second gRNA molecule comprising a targeting domain which is complementary with a second target domain from the HBB or BCL11A gene;
(d) a template nucleic acid; and
(e) nucleic acid that encodes one or more of (b) and (c).

180. The kit of claim 179, comprising a nucleic acid that encodes one or more of (a), (b) (c) and (d).

181. The kit of claim 179, further comprising a third gRNA molecule targeting a SCD target point position or a SCD target knockout position.

182. The kit of claim 181, further comprising a fourth gRNA molecule targeting a SCD target point position or a SCD target knockout position.

183-189. (canceled)
